United States Patent Application Publication US 2021/0199660 A1 - sequence listing, part 49

SEQ ID NO: 700656 - DNA, 120 bp, Artificial Sequence
  ENSG00000196155_30 (sequence is synthesized)
gacagaggtcctgatgcagcaggtgctagactcgccatggctggcatggctacaatgccaggggggccgggagctgacatggctgaagcaagaggtcccagaggtgaccctgagcccaga

SEQ ID NO: 700657 - DNA, 120 bp, Artificial Sequence
  ENSG00000196155_31 (sequence is synthesized)
ctacaggacggcaatggacaaggctgacgagctatatgaccgggtggatggattgctgcaccaactgaccctgcagagcaaccagcgaatacaggccctagagttggtccaaacactgga

SEQ ID NO: 700658 - DNA, 120 bp, Artificial Sequence
  ENSG00000196155_32 (sequence is synthesized)
ggcccgggaaagcggactgcaccagattgaagtgtggctgcagcaggtgggctggccagcactggaggaggctggggagccctcgctggacatgctgctccaggcccaaggctcttttca

SEQ ID NO: 700659 - DNA, 120 bp, Artificial Sequence
  ENSG00000196155_33 (sequence is synthesized)
ggagctgtaccaggttgcccaggagcaggtcaggcaaggggagaagtttctgcagccgctgactggctgggaggcggctgaactggacccccctggggcacgctttctggccctgcgagc

SEQ ID NO: 700660 - DNA, 120 bp, Artificial Sequence
  ENSG00000196155_34 (sequence is synthesized)
ccagctgactgaattctctagggctttggcccagcggtgccagcggctggcggatgctgagaggctgtttcagctcttcagggaggccttgacgtgggctgaggaggggcagcgagtgtt

SEQ ID NO: 700661 - DNA, 120 bp, Artificial Sequence
  ENSG00000196155_35 (sequence is synthesized)
ggcagagctggagcaggaacgcccgggggttgtgttgcagcagctgcagctgcactggaccaggcaccctgacttgcctcctgcccacttccgaaagatgtgggctctggccacggggct

SEQ ID NO: 700662 - DNA, 120 bp, Artificial Sequence
  ENSG00000196155_36 (sequence is synthesized)
gggctcagaggccatccgccaggagtgccgctgggcctgggcgcggtgccaggacacctggctggccctggaccaaaagcttgaggcttcactgaagctaccaccggtgggcagcacagc

SEQ ID NO: 700663 - DNA, 120 bp, Artificial Sequence
  ENSG00000196155_37 (sequence is synthesized)
tagcctgtgtgtcagccaggtccccgctgcacctgcccaccctcccctgaggaaggcctacagcttcgatcggaatctggggcagagtctcagtgaacctgcctgccactgccaccatgc

SEQ ID NO: 700664 - DNA, 120 bp, Artificial Sequence
  ENSG00000196155_38 (sequence is synthesized)
ggccactattgctgcctgccgcagaccagaggctggaggaggtgccctgccccaggcatcccctactgtgcctccaccaggcagctctgaccccaggagcctcaacaggctacagctggt

SEQ ID NO: 700665 - DNA, 120 bp, Artificial Sequence
  ENSG00000196155_39 (sequence is synthesized)
gctggcagagatggtggccacggagcgggagtatgtccgggctctagagtacactatggagaactatttccccgagctggatcgccccgatgtgccccagggcctccgcggtcagcgtgc

SEQ ID NO: 700666 - DNA, 120 bp, Artificial Sequence
  ENSG00000196155_40 (sequence is synthesized)
ccacctctttggcaacctggagaagctgcgggacttccactgccacttcttcctgcgtgagctggaggcttgcacccggcacccaccacgagtggcctatgccttcctgcgccatagggt

SEQ ID NO: 700667 - DNA, 120 bp, Artificial Sequence
  ENSG00000196155_41 (sequence is synthesized)
gcagtttgggatgtacgcgctctacagcaagaataagcctcgctccgatgccctgatgtcaagctatgggcacaccttcttcaaggacaagcagcaagcactgggggaccacctggacct

SEQ ID NO: 700668 - DNA, 120 bp, Artificial Sequence
  ENSG00000196155_42 (sequence is synthesized)
ggcctcctacctgctaaagcccatccagcgcatgggcaagtacgcactgctgctgcaggagctggcacgggcctgcgggggccccacgcaggagctcagtgcgctgcgggaggcccagag

SEQ ID NO: 700669 - DNA, 120 bp, Artificial Sequence
  ENSG00000196155_43 (sequence is synthesized)
ccttgtgcacttccagctgcggcacggaaacgacctgctggccatggacgccatccagggctgtgatgttaacctcaaggaacaggggcagctggtgcgacaggatgagtttgtggtgcg

SEQ ID NO: 700670 - DNA, 120 bp, Artificial Sequence
  ENSG00000196155_44 (sequence is synthesized)
cactgggcgccacaagtccgtgcgccgcatcttcctttttgaggagctgctgctcttcagcaagcctcgccatgggcccacaggggttgacacatttgcctacaagcgctccttcaagat

SEQ ID NO: 700671 - DNA, 120 bp, Artificial Sequence
  ENSG00000196155_45 (sequence is synthesized)
ggcagaccttggtctcactgagtgctgtgggaacagcaacctgcgcttcgagatctggttccgccgccgcaaggccagggacacctttgtgctgcaggcctccagcctggctatcaagca

SEQ ID NO: 700672 - DNA, 120 bp, Artificial Sequence
  ENSG00000196155_46 (sequence is synthesized)
ggcctggacagctgacatctcccacctgctttggaggcaggccgtccacaacaaggaggtgcgcatggctgagatggtgtccatgggtgtggggaacaaggccttccgagacattgctcc

SEQ ID NO: 700673 - DNA, 120 bp, Artificial Sequence
  ENSG00000196155_47 (sequence is synthesized)
cagcgaggaagccatcaacgaccgcaccgtcaactatgtcctgaagtgccgagaagttcgctctcgggcgtccattgccgtagccccgtttgaccatgacagcctctacctgggggcctc

SEQ ID NO: 700674 - DNA, 120 bp, Artificial Sequence
  ENSG00000196155_48 (sequence is synthesized)
gaactcccttcctggagaccctgcctcttgctctgttctggggtccctcaacctgcacctgtacagagacccagctcttctgggtctccgctgtcccctgtatcccagcttcccagagga

SEQ ID NO: 700675 - DNA, 120 bp, Artificial Sequence
  ENSG00000196155_49 (sequence is synthesized)
agcagcactggaggctgaggcagagctgggcggccagccctctttgactgctgaggactcagagatctcgtcccaatgcccatcagccagtggctccagtggctctgacagcagctgtgt

SEQ ID NO: 700676 - DNA, 120 bp, Artificial Sequence
  ENSG00000196155_50 (sequence is synthesized)
gtcagggcaggccctgggtaggggcctggaggacttaccctgtgtctgagcccgggactggacgagcagtagatccagcagcctgcagctccaaggaacattgcctctctggatctgctg

SEQ ID NO: 700677 - DNA, 120 bp, Artificial Sequence
  ENSG00000196155_51 (sequence is synthesized)
tgaccagggtgtggctgacacctgggctacctccaacctacatgtgcaacgctgttgactaccctttctgatgtgtgtggccattggactaactggcacggggcctctctagggaagtct

SEQ ID NO: 700678 - DNA, 120 bp, Artificial Sequence
  ENSG00000196155_52 (sequence is synthesized)
ggttgtagagcctgaataggctcctggccccatgaccccttctcctgtccccagctcccatcccagttgtgggttaagaataggctagagcagacattgggtgtttccatgctgtaggct

SEQ ID NO: 700679 - DNA, 120 bp, Artificial Sequence
  ENSG00000196155_53 (sequence is synthesized)
ggtgggggaccatgtgcctctaggcagtgactagggtgcccccacccctcaggaagaacacaggtgggctcctagcagctgatccccaatgcctggccttaaagccgagctcagttacca

SEQ ID NO: 700680 - DNA, 120 bp, Artificial Sequence
  ENSG00000196155_54 (sequence is synthesized)
tagggacaggtccacctctactgggccctcatgcttgcctttcctggcccccaggcccagcccctttttactggggcagtttcgttattttgacttgatgccttttgaataactttcaat

SEQ ID NO: 700681 - DNA, 120 bp, Artificial Sequence
  ENSG00000196155_55 (sequence is synthesized)
agaattgtctaaaattatcttactggttgttaggcctttggtgtctcagagaaggagtctaggtctttgatgtgtgatttaatcttttatttgtttataataaaaaatagactgatatgt

SEQ ID NO: 700682 - DNA, 120 bp, Artificial Sequence
  ENSG00000196155_56 (sequence is synthesized)
gtgacgccgcgcggccgcgctgtagtggccgtcgaggccgccgtctgttcgaaggctgtccgacttcacggttccccgcggctcggcccgggggcgcctgaattgcagttcctgtgccct

SEQ ID NO: 700683 - DNA, 120 bp, Artificial Sequence
  ENSG00000196155_57 (sequence is synthesized)
caggggcctcatctttaaaaggggaatatggcacctgccccacaggattgttgggaggagagcacctggcactagaaaggctcagctcacaggacagttaatgtgctggatggaggtgta

SEQ ID NO: 700684 - DNA, 120 bp, Artificial Sequence
  ENSG00000196155_58 (sequence is synthesized)
caggaaagacttatctggggggtggtagaggcccaaggacaggcttatgtccagaagcatcccacttatgtccactctccacccagaggtgcgcatggctgagatggtgtccatgggtgt

SEQ ID NO: 700685 - DNA, 120 bp, Artificial Sequence
  ENSG00000196155_59 (sequence is synthesized)
cctttatcagaaatatcaaagctgctggaggcaggtaaggaaggctgggctagggaagtctgggaagggaatggggatgcctggagagatgagtgtcaagactttggaggtctctgaccc

SEQ ID NO: 700686 - DNA, 120 bp, Artificial Sequence
  ENSG00000196156_0 (sequence is synthesized)
gaacctcattctcctgggaacccacccagaacctccaccctctgacgccatggtcagctcctgctgtggctctgtctgctctgaccagagctgtggtcaaggtctcggccaggagagctg

SEQ ID NO: 700687 - DNA, 120 bp, Artificial Sequence
  ENSG00000196156_1 (sequence is synthesized)
ctgccgccccagctgctgccagaccacctgctgcaggaccacctgctgccgccccagctgctgcatttccagttgctgcaggccttcctgctgtatctccagctgctgcaaacccagctg

SEQ ID NO: 700688 - DNA, 120 bp, Artificial Sequence
  ENSG00000196156_2 (sequence is synthesized)
ctgcaggaccacctgctgccgccccagctgctgcatttccagttgctgcaggccttcctgctgtatctccagctgctgcaaacccagctgctgcaggaccacctgctgccgccccagctg

SEQ ID NO: 700689 - DNA, 120 bp, Artificial Sequence
  ENSG00000196156_3 (sequence is synthesized)
ctgcatttctagttgctgcaggccttcctgctgtatctctagctgttgcaaacccagctgctgccagaccacctgctgccgccccagctgctgtatctccagctgctacaggccccagtg

SEQ ID NO: 700690 - DNA, 120 bp, Artificial Sequence
  ENSG00000196156_4 (sequence is synthesized)
tgcatttctagttgctgtcatcccagctgctgtgtgtccagctgccgctgccctttcagctgcccgaccacctgctgtagaacaacctgcttccaccccatctgctgcggcagttcttgc

SEQ ID NO: 700691 - DNA, 120 bp, Artificial Sequence
  ENSG00000196156_5 (sequence is synthesized)
tgctgagtgaagctgctctggatttgtgcaccttcttgctctcaaccttcagttcaggcacagagtatctattcagagaacatgtggacttcctgatgtcgtgaaaacagaggcatggac

SEQ ID NO: 700692 - DNA, 120 bp, Artificial Sequence
  ENSG00000196156_6 (sequence is synthesized)
tgatttggaaaatattttattagtatgtattctcttttatagaagtttttattcctattgaatctgaatttacagtcaaattccacatcacatgttttagaattctttattctaattcaa

SEQ ID NO: 700693 - DNA, 120 bp, Artificial Sequence
  ENSG00000196156_7 (sequence is synthesized)
tatacataaatcttcaaatggtatccttctagatgtttcttcctaatgttttctgtggtatcaattttcatgtggaattgtttgatgttcctcaataaaacttcatagtgttcaaaagca

SEQ ID NO: 700694 - DNA, 120 bp, Artificial Sequence
  ENSG00000196159_0 (sequence is synthesized)
gggagccaggaccatggacttagcaccagacagggctactggccgcccgtggctcccgttgcacactctatcagtatctcagctccttcgagtgttttggctactgtcattgcttccggg

SEQ ID NO: 700695 - DNA, 120 bp, Artificial Sequence
  ENSG00000196159_1 (sequence is synthesized)
gcaggcctgggtccacggggccgagccgcgccaggtgttccaagtgctggaagagcaacctccaggcactctggtaggcaccatccagacgcgccccggcttcacctacaggctcagcga

SEQ ID NO: 700696 - DNA, 120 bp, Artificial Sequence
  ENSG00000196159_2 (sequence is synthesized)
aagccacgccctgtttgccataaacagtagcaccggagccctgtacaccacctccaccatcgaccgcgagagcctgcccagcgacgtgatcaacctggtggtcctttccagcgcgcccac

SEQ ID NO: 700697 - DNA, 120 bp, Artificial Sequence
  ENSG00000196159_3 (sequence is synthesized)
ctaccccaccgaagtgcgagtgctggtgcgggacctcaatgacaacgcccccgttttcccggacccctctatcgtggtcactttcaaggaagacagtagcagcggacgccaagtcatctt

SEQ ID NO: 700698 - DNA, 120 bp, Artificial Sequence
  ENSG00000196159_4 (sequence is synthesized)
agacaccgccaccgactcggacatcggctcaaacggtgtggaccaccgctcctaccgcatcatccgcggcaatgaggcggggcgcttccgtctggacatcaccctgaacccgagcggcga

SEQ ID NO: 700699 - DNA, 120 bp, Artificial Sequence
  ENSG00000196159_5 (sequence is synthesized)
gggagcgttcctgcatctggtgtccaagggcggactggaccgtgaggtcactccgcagtaccagctcctggttgaggtggaggacaagggtgagcctaagcggcggggctaccttcaggt

SEQ ID NO: 700700 - DNA, 120 bp, Artificial Sequence
  ENSG00000196159_6 (sequence is synthesized)
aaacgtgactgtgcaagacattaatgacaaccccccggtttttggcagttctcactaccaggcgggggtgcctgaggacgcggttgtgggttccagcgtcctccaggtggcggcggcgga

SEQ ID NO: 700701 - DNA, 120 bp, Artificial Sequence
  ENSG00000196159_7 (sequence is synthesized)
cgcggacgagggcaccaacgcggacatccgctatcgcctgcaggacgaggggacccccttccaaatggaccctgagacgggacttatcacggtgcgggagcccctggacttcgaagctcg

SEQ ID NO: 700702 - DNA, 120 bp, Artificial Sequence
  ENSG00000196159_8 (sequence is synthesized)
gcgccaatactcgcttacggtgcaggcgatggacagaggcgtgccttccctcactgggcgcgccgaggcgctgattcagctgctggacgtgaatgacaatgacccggtagtgaagttccg

SEQ ID NO: 700703 - DNA, 120 bp, Artificial Sequence
  ENSG00000196159_9 (sequence is synthesized)
ctacttcccggccacctcgcgctacgcctcggtagatgagaatgctcaagtgggcaccgtggtggctctgctcaccgtgacggacgcagattctcccgcggccaacgggaacatctccgt

SEQ ID NO: 700704 - DNA, 120 bp, Artificial Sequence
  ENSG00000196159_10 (sequence is synthesized)
gcaaattctcgggggcaatgagcagcgccactttgaagtgcaaagcagcaaagtgccgaacctgagcctaatcaaggtggccagcgccttggaccgcgagcgcatcccttcctacaacct

SEQ ID NO: 700705 - DNA, 120 bp, Artificial Sequence
  ENSG00000196159_11 (sequence is synthesized)
cacagtttccgtctctgataactacggggcgccccctggcgcagcagtccaggcgcgctcttctgtggcaagcctggtgatttttgttaatgacatcaatgaccatcctcctgtcttttc

SEQ ID NO: 700706 - DNA, 120 bp, Artificial Sequence
  ENSG00000196159_12 (sequence is synthesized)
acagcaagtgtacagagtgaacctgagcgaggaggcgcctccgggaagctatgtgagtgggatatctgccactgatggcgactctggtctcaatgctaatctgcgttacagcattgtctc

SEQ ID NO: 700707 - DNA, 120 bp, Artificial Sequence
  ENSG00000196159_13 (sequence is synthesized)
tggcaatggactgggatggttccatatcagtgaacatagcggcctcgtgaccactgggtcctctgggggcctggaccgtgaacttgcttcccagattgttctgaatataagtgcccggga

SEQ ID NO: 700708 - DNA, 120 bp, Artificial Sequence
  ENSG00000196159_14 (sequence is synthesized)
ccagggagttcaccccaaggtgtcctatgcccagcttgtagtaactctcctagatgtgaatgatgaaaagccagtatttagccagccagaagggtatgatgtgtctgtggttgagaatgc

SEQ ID NO: 700709 - DNA, 120 bp, Artificial Sequence
  ENSG00000196159_15 (sequence is synthesized)
cccaacagggacagaactgttgatgctcagggcaactgacggggacctgggtgacaacggaacagtgcgcttctccttacaagaggcagagactgaccggaggtccttccgtctggatcc

SEQ ID NO: 700710 - DNA, 120 bp, Artificial Sequence
  ENSG00000196159_16 (sequence is synthesized)
tgtgtctgggaggttgagtactatttcctccttggacagagaagagcaagccttctactccctgttggttctggccacagatctgggctcccctccccagtcatcaatggctcgcataaa

SEQ ID NO: 700711 - DNA, 120 bp, Artificial Sequence
  ENSG00000196159_17 (sequence is synthesized)
tgtgagtcttctggatataaatgataacagccctgtcttctacccggtccaatactttgctcacattaaggagaatgagcctggaggtagctacatcaccactgtgtctgccactgaccc

SEQ ID NO: 700712 - DNA, 120 bp, Artificial Sequence
  ENSG00000196159_18 (sequence is synthesized)
agacttgggtaccaatggtactgtcaaatatagcatatctgctggggacaggtctcggtttcaggtcaatgctcagagtggggttatttctacaagaatggccctagacagagaagaaaa

SEQ ID NO: 700713 - DNA, 120 bp, Artificial Sequence
  ENSG00000196159_19 (sequence is synthesized)
aacagcttatcagttgcaaatagtagctactgatggtggcaatttacaatctcccaaccaggcaatagtaaccatcactgtattggacactcaagacaacccacctgtattcagtcaggt

SEQ ID NO: 700714 - DNA, 120 bp, Artificial Sequence
  ENSG00000196159_20 (sequence is synthesized)
tgcctacagctttgtggtttttgagaacgtggcgctgggatatcatgtgggtagtgtgtctgcatccaccatggatctcaattccaacatcagttatctcattactactggggatcagaa

SEQ ID NO: 700715 - DNA, 120 bp, Artificial Sequence
  ENSG00000196159_21 (sequence is synthesized)
aggtatgtttgctatcaaccaggtcactgggcagcttaccacagcaaatgtgattgatagagaagagcaatccttttatcagctgaaggtagtggccagtgggggcacagtgactggaga

SEQ ID NO: 700716 - DNA, 120 bp, Artificial Sequence
  ENSG00000196159_22 (sequence is synthesized)
cactatggttaacataacagttaaggatttgaatgacaactctccccatttccttcaggcaatagagagtgtaaatgtggtggagaattggcaggcaggtcacagcattttccaggccaa

SEQ ID NO: 700717 - DNA, 120 bp, Artificial Sequence
  ENSG00000196159_23 (sequence is synthesized)
agctgtggaccctgatgaaggtgtcaatggcatggtactctatagtctgaagcaaaaccccaagaacctgtttgctatcaatgaaaagaatggcactattagtctgcttgggcccctgga

SEQ ID NO: 700718 - DNA, 120 bp, Artificial Sequence
  ENSG00000196159_24 (sequence is synthesized)
tgttcatgctggctcctaccaaatagagatcttggcatctgacatgggtgtcccacagctctcctctagtgtcatcttaacagtttatgtccatgatgtaaatgacaattcaccagtgtt

SEQ ID NO: 700719 - DNA, 120 bp, Artificial Sequence
  ENSG00000196159_25 (sequence is synthesized)
tgaccaactctcttatgaagtcaccctttctgagtcagaacctgtgaattctcgattctttaaagtacaagcttctgataaggattcaggagcaaatggtgaaattgcatacaccattgc

SEQ ID NO: 700720 - DNA, 120 bp, Artificial Sequence
  ENSG00000196159_26 (sequence is synthesized)
tgaaggaaatacaggggatgcttttggcatattcccagatggtcaattgtatataaaaagtgaactggaccgtgaacttcaagacagatatgttttaatggttgttgcttctgacagagc

SEQ ID NO: 700721 - DNA, 120 bp, Artificial Sequence
  ENSG00000196159_27 (sequence is synthesized)
agtggaaccccttagtgctactgtgaatgttactgtaattttagaagatgtaaatgataacagacctctttttaacagtaccaattacacattttacttcgaagaagagcagagggctgg

SEQ ID NO: 700722 - DNA, 120 bp, Artificial Sequence
  ENSG00000196159_28 (sequence is synthesized)
gtcgtttgtgggcaaagtaagtgctgtagataaagactttgggccaaatggagaagtaaggtattcttttgaaatggtgcagccagattttgagttgcatgccatcagtggggaaattac

SEQ ID NO: 700723 - DNA, 120 bp, Artificial Sequence
  ENSG00000196159_29 (sequence is synthesized)
aaatactcatcagtttgacagggagtctcttatgaggcggagagggactgctgtgtttagctttacagtcatagcaacagatcaggggatccctcagcctctcaaggatcaggccactgt

SEQ ID NO: 700724 - DNA, 120 bp, Artificial Sequence
  ENSG00000196159_30 (sequence is synthesized)
acatgtttacatgaaggatataaatgataatgctcccaaatttttaaaagacttttaccaagctacaatatcagaatcagcagccaatctgacacaagtgttaagagtatctgcctcaga

SEQ ID NO: 700725 - DNA, 120 bp, Artificial Sequence
  ENSG00000196159_31 (sequence is synthesized)
tgttgatgaaggtaataatggacttattcactattctataataaaaggaaatgaagaaagacagtttgctatagacagtacctctggtcaggtaacactaattggcaaattagactatga

SEQ ID NO: 700726 - DNA, 120 bp, Artificial Sequence
  ENSG00000196159_32 (sequence is synthesized)
agcaacacctgcctattcccttgtaattcaagcagtggattcagggacaatccccctcaattcaacgtgtactttaaatattgatattttagatgaaaatgacaataccccttctttccc

SEQ ID NO: 700727 - DNA, 120 bp, Artificial Sequence
  ENSG00000196159_33 (sequence is synthesized)
taaatcaacactctttgttgatgttttggaaaacatgagaattggtgaactcgtgtcctctgttactgcaactgattccgattcaggtgacaatgctgatttatattacagtattactgg

SEQ ID NO: 700728 - DNA, 120 bp, Artificial Sequence
  ENSG00000196159_34 (sequence is synthesized)
gactaacaaccacggaacttttagcattagcccaaacactgggagtatttttcttgccaaaaaactggactttgaaacacagtctttgtataaattaaatataacagcaaaagaccaagg

SEQ ID NO: 700729 - DNA, 120 bp, Artificial Sequence
  ENSG00000196159_35 (sequence is synthesized)
aagacctcctcgttcatctacaatgtcagtggttattcacgtgagggactttaatgacaatcctcctagctttcctcctggagatattttcaagtctattgttgagaacattcccatcgg

SEQ ID NO: 700730 - DNA, 120 bp, Artificial Sequence
  ENSG00000196159_36 (sequence is synthesized)
tacatctgtcatttcagtgactgcacatgaccctgatgcagacattaatggtcaactatcctacacaatcattcaacagatgccaagaggcaaccactttaccatagatgaagtcaaagg

SEQ ID NO: 700731 - DNA, 120 bp, Artificial Sequence
  ENSG00000196159_37 (sequence is synthesized)
gactatatatactaatgctgaaatagatcgggaatttgctaatctctttgagttgactgtaaaagccaatgatcaagctgtgccaatagaaactagacggtatgctttgaagaacgtgac

SEQ ID NO: 700732 - DNA, 120 bp, Artificial Sequence
  ENSG00000196159_38 (sequence is synthesized)
cattttggttacagacctcaatgacaatgtcccaatgtttatatcacaaaacgcccttgctgcagacccatcagctgtgattggttccgttctgacaacaattatggctgctgacccaga

SEQ ID NO: 700733 - DNA, 120 bp, Artificial Sequence
  ENSG00000196159_39 (sequence is synthesized)
tgaaggtgctaatggagaaatagagtatgagatcatcaatggggacacagacaccttcattgttgatcgttatagtggagacctgagagtggcttcagcgttggtgccttcacagttgat

SEQ ID NO: 700734 - DNA, 120 bp, Artificial Sequence
  ENSG00000196159_40 (sequence is synthesized)
ctacaatctcatagtttcagcaacagaccttgggcctgaaaggaggaaatcgaccactgaattgaccatcattcttcagggccttgatggacctgtttttactcaacccaaatatataac

SEQ ID NO: 700735 - DNA, 120 bp, Artificial Sequence
  ENSG00000196159_41 (sequence is synthesized)
tattttgaaggaaggagaacccattggcacaaacgtgatatcaatagaagcagctagccccagaggatctgaggccccagtggagtattatattgtttcagttcgttgtgaagaaaaaac

SEQ ID NO: 700736 - DNA, 120 bp, Artificial Sequence
  ENSG00000196159_42 (sequence is synthesized)
tgttggacgcctctttactattggacgacatactggtataattcagaccgcagccattctggaccgggagcaaggagcatgtctttacctggtggatgtttatgccatagaaaaatcaac

SEQ ID NO: 700737 - DNA, 120 bp, Artificial Sequence
  ENSG00000196159_43 (sequence is synthesized)
tgcttttcccagaacacagagagcagaggtagaaataacacttcaggatatcaatgacaatccaccagtatttccaacggacatgctggatctcacggtagaggagaacattggagatgg

SEQ ID NO: 700738 - DNA, 120 bp, Artificial Sequence
  ENSG00000196159_44 (sequence is synthesized)
ctctaagattatgcagctgacagccatggatgctgatgagggtgcaaatgctctcgtcacatacactatcattagtggagctgatgatagttttcgcatcgacccagaatccggagatct

SEQ ID NO: 700739 - DNA, 120 bp, Artificial Sequence
  ENSG00000196159_45 (sequence is synthesized)
gatagcaaccaggcggttggacagggaacgccgctccaaatattcactgctagttcgtgctgatgatggtcttcagtcctcggatatgagaattaatatcactgtcagtgatgtgaatga

SEQ ID NO: 700740 - DNA, 120 bp, Artificial Sequence
  ENSG00000196159_46 (sequence is synthesized)
ccatacacccaaattttccagacccgtgtactcttttgacattcctgaggacacaatccctggttctttggtagcagccattttagccacggatgatgactctggtgtgaatggagaaat

SEQ ID NO: 700741 - DNA, 120 bp, Artificial Sequence
  ENSG00000196159_47 (sequence is synthesized)
tacatatattgtgaatgaagatgatgaagatggcatctttttcctgaatcctattactggggtctttaatttgactcgattattagattatgaagtacagcaatattatatcctcactgt

SEQ ID NO: 700742 - DNA, 120 bp, Artificial Sequence
  ENSG00000196159_48 (sequence is synthesized)
tcgagcagaagatggtgggggacaatttactaccatcagagtttatttcaatattctagatgtaaatgataatccacctattttcagcttgaattcatacagcacatctttaatggagaa

SEQ ID NO: 700743 - DNA, 120 bp, Artificial Sequence
  ENSG00000196159_49 (sequence is synthesized)
tctacctgtgggatctactgttcttgtgtttaatgttactgatgcagatgatggcatcaactctcaattgacttatagcattgcttcaggtgatagccttgggcagtttactgttgacaa

SEQ ID NO: 700744 - DNA, 120 bp, Artificial Sequence
  ENSG00000196159_50 (sequence is synthesized)
gaatggtgtactcaaagtcctaaaagctttggatcgggaaagtcagtccttctacaacttggttgttcaagtgcatgacctgccacagattccagcctccagattcacaagcactgctca

SEQ ID NO: 700745 - DNA, 120 bp, Artificial Sequence
  ENSG00000196159_51 (sequence is synthesized)
agtctccattattttgttggatgtaaatgataacccaccgacatttctttcccctaaattgacatacattccagaaaatacacctattgatactgttgttttcaaagctcaagcaactga

SEQ ID NO: 700746 - DNA, 120 bp, Artificial Sequence
  ENSG00000196159_52 (sequence is synthesized)
cccagatagtggcccaaacagctatattgagtacactctgctgaaccctttgggaaacaagttcagtattgggaccattgatggtgaagtgaggctcactggagaactggacagagaaga

SEQ ID NO: 700747 - DNA, 120 bp, Artificial Sequence
  ENSG00000196159_53 (sequence is synthesized)
agtttctaattatactctaacagtggtggctacagacaaaggtcaaccatctctctcttcatctacagaggttgtagttatggtacttgacatcaatgataacaaccccatctttgcaca

SEQ ID NO: 700748 - DNA, 120 bp, Artificial Sequence
  ENSG00000196159_54 (sequence is synthesized)
agctttgtataaagtggagattaatgaaaacacacttactggaacagatataatacaagtgttcgcagcagatggagatgaaggcacaaatggacaggttcgctatggcattgttaatgg

SEQ ID NO: 700749 - DNA, 120 bp, Artificial Sequence
  ENSG00000196159_55 (sequence is synthesized)
taataccaatcaggaatttcggatagactctgtcacaggtgccatcactgtcgctaaacctttggatagagaaaagacccctacctaccatttaactgttcaggcaacagatcgaggcag

SEQ ID NO: 700750 - DNA, 120 bp, Artificial Sequence
  ENSG00000196159_56 (sequence is synthesized)
cacacccagaactgatacctccacggtcagcattgttctactggatattaatgactttgttcctgtatttgagctatctccatattctgtaaatgtccctgagaatttagggacactacc

SEQ ID NO: 700751 - DNA, 120 bp, Artificial Sequence
  ENSG00000196159_57 (sequence is synthesized)
cagaacaattcttcaggtggtggcaagagatgatgatcgaggatctaacagcaaactctcatatgttctgtttggtggtaatgaagacaatgcttttactctctcagccagtggagaact

SEQ ID NO: 700752 - DNA, 120 bp, Artificial Sequence
  ENSG00000196159_58 (sequence is synthesized)
tggagtaacacagagtctggatcgggaaacaaaagagcgctttgtcttaatgattacagctacagattcaggatcccctgccttgactggaactggaacaatcaacgtcatagtagatga

SEQ ID NO: 700753 - DNA, 120 bp, Artificial Sequence
  ENSG00000196159_59 (sequence is synthesized)
tgtcaatgacaatgtccccacatttgccagtaaagcgtatttcacaacaattcctgaggatgcaccaactggaacagatgttttattggtaaatgcctcagatgctgatgcttcaaagaa

SEQ ID NO: 700754 - DNA, 120 bp, Artificial Sequence
  ENSG00000196159_60 (sequence is synthesized)
tgcagttataaggatcatcggtggaaactctcagttcacgatcaacccatcgacaggacaaatcatcaccagcgcattgttagatagggaaacaaaagataattatactttggtagtggt

SEQ ID NO: 700755 - DNA, 120 bp, Artificial Sequence
  ENSG00000196159_61 (sequence is synthesized)
ctgcagtgatgcgggatccccagagcctctttccagttccaccagtgtgcttgtcactgtgactgatgtcaatgacaatccaccaagatttcagcatcacccatatgtcactcacatccc

SEQ ID NO: 700756 - DNA, 120 bp, Artificial Sequence
  ENSG00000196159_62 (sequence is synthesized)
atctcctactcttccaggttcctttgtctttgcggttacagtcacagatgctgatattggaccaaattctgaactgcattattctctttcgggtagaaattctgaaaaatttcacattga

SEQ ID NO: 700757 - DNA, 120 bp, Artificial Sequence
  ENSG00000196159_63 (sequence is synthesized)
cccactgaggggagccattatggccgccggaccactaaacggagcttcagaagtgacattttctgtgcatgtaaaagatggtggctcatttccaaagacagattctacaacagtgactgt

SEQ ID NO: 700758 - DNA, 120 bp, Artificial Sequence
  ENSG00000196159_64 (sequence is synthesized)
tagattcgtgaataaggccgatttccctaaagtgagagccaaagaacaaacgttcatgtttcctgaaaaccaaccagtcagctctcttgtcaccaccatcacaggatcctctttaagagg

SEQ ID NO: 700759 - DNA, 120 bp, Artificial Sequence
  ENSG00000196159_65 (sequence is synthesized)
agaacctatgtcatattatatcgcaagtgggaatcttggcaatactttccagattgatcagttaacagggcaggtgtctattagtcaacctctggattttgaaaagatacaaaaatatgt

SEQ ID NO: 700760 - DNA, 120 bp, Artificial Sequence
  ENSG00000196159_66 (sequence is synthesized)
tgtatggatagaggccagagacggtggtttccctcctttctcctcttacgagaaacttgatataacagtattagatgtcaatgataatgccccaatttttaaggaagacccatttatatc

SEQ ID NO: 700761 - DNA, 120 bp, Artificial Sequence
  ENSG00000196159_67 (sequence is synthesized)
tcggcaatggacaaggacagtggacccaatggacagttagattatgaaattgttaatggcaacatggaaaatagtttcagtatcaatcatgctactggtgaaattagaagcgttagacct

SEQ ID NO: 700762 - DNA, 120 bp, Artificial Sequence
  ENSG00000196159_68 (sequence is synthesized)
ttggacagggaaaaagtatctcattatgtcctaaccataaaatcatcagacaaagggtccccgtctcagagtacttcagtaaaagtcatgattaacattttagatgaaaatgataatgcc

SEQ ID NO: 700763 - DNA, 120 bp, Artificial Sequence
  ENSG00000196159_69 (sequence is synthesized)
cctaggttttctcagatatttagtgcccatgttcctgaaaattcccccttaggatacacagttacccgtgtcacaacttctgatgaagacattgggatcaatgcaattagtagatattct

SEQ ID NO: 700764 - DNA, 120 bp, Artificial Sequence
  ENSG00000196159_70 (sequence is synthesized)
ataatggatgcaagtcttccatttacaattaatcccagcacaggggatattgtcataagcagacctttaaatagggaagatacagaccgttacagaattcgagtttccgcacatgattct

SEQ ID NO: 700765 - DNA, 120 bp, Artificial Sequence
  ENSG00000196159_71 (sequence is synthesized)
gggtggactgtaagtacagatgtcacaatatttgtgacagacatcaatgacaatgctccaagatttagcagaacttcctattatttagattgccctgaacttactgagattggctccaaa

SEQ ID NO: 700766 - DNA, 120 bp, Artificial Sequence
  ENSG00000196159_72 (sequence is synthesized)
gtaactcaggtatttgcaacagatcctgatgagggatcaaatggacaagtgttttatttcataaaatcccaatcagaatatttcaggattaatgccaccactggagagattttcaataaa

SEQ ID NO: 700767 - DNA, 120 bp, Artificial Sequence
  ENSG00000196159_73 (sequence is synthesized)
cagatcttaaaataccaaaatgtcactggcttcagtaatgtgaatatcaacaggcatagttttatagtgacatcttcagatcgaggtaaaccttccttaattagtgagacaacagttacc

SEQ ID NO: 700768 - DNA, 120 bp, Artificial Sequence
  ENSG00000196159_74 (sequence is synthesized)
atcaatatagtggacagtaatgacaatgcacctcaatttcttaaaagtaaatatttcactccagtcaccaaaaatgttaaggttggtacgaagttaatcagagttacagcaatagatgac

SEQ ID NO: 700769 - DNA, 120 bp, Artificial Sequence
  ENSG00000196159_75 (sequence is synthesized)
aaagattttggactgaattcagaagtggagtatttcatttctaatgataaccatttaggaaaatttaagttggacaatgatacggggtggatttcagtagcatcctccctgatttctgac

SEQ ID NO: 700770 - DNA, 120 bp, Artificial Sequence
  ENSG00000196159_76 (sequence is synthesized)
ttgaaccaaaacttttttatcacagtcactgcaaaggataagggaaaccctccactttcttcccaagcaactgttcacataactgtcactgaggaaaactaccatacacctgaattctct

SEQ ID NO: 700771 - DNA, 120 bp, Artificial Sequence
  ENSG00000196159_77 (sequence is synthesized)
caaagccacatgagtgcaaccatccctgagagccatagcattgggtccattgtcagaactgtttctgcaagagatagagatgcagcgatgaatggcttgattaagtacagcatttcttca

SEQ ID NO: 700772 - DNA, 120 bp, Artificial Sequence
  ENSG00000196159_78 (sequence is synthesized)
ggaaatgaagaaggcatttttgcaatcaattcttctacaggtatattaacactagccaaagctcttgattatgagctatgccagaaacacgaaatgacgattagtgctatagatggagga

SEQ ID NO: 700773 - DNA, 120 bp, Artificial Sequence
  ENSG00000196159_79 (sequence is synthesized)
tgggttgcaagaactggttactgcagtgtgaccgtaaatgtgattgatgtgaatgataattctccagtattcctctctgatgactatttccctactgttttggaaaatgccccaagtgga

SEQ ID NO: 700774 - DNA, 120 bp, Artificial Sequence
  ENSG00000196159_80 (sequence is synthesized)
acaacagttatccacctaaatgcaacagatgctgactctggaacaaatgctgtgattgcgtatactgtacagtcatctgacagtgacctctttgtcattgaccctaacacaggagtcata

SEQ ID NO: 700775 - DNA, 120 bp, Artificial Sequence
  ENSG00000196159_81 (sequence is synthesized)
accactcaaggcttcttggattttgaaaccaagcagagctaccatcttactgtgaaagccttcaatgtccccgatgaggaaaggtgtagctttgccactgttaatatacaattaaaaggg

SEQ ID NO: 700776 - DNA, 120 bp, Artificial Sequence
  ENSG00000196159_82 (sequence is synthesized)
acaaatgaatatgtgccccgttttgtttccaaactttactattttgaaatctcagaagcagctcctaaaggtactattgttggagaagtgtttgctagcgaccgtgatttgggcactgat

SEQ ID NO: 700777 - DNA, 120 bp, Artificial Sequence
  ENSG00000196159_83 (sequence is synthesized)
ggggaggtacactatttgatttttggtaatagtcgaaagaagggtttccagatcaataagaagactggacagatttatgtttctggaattcttgatcgagaaaaagaagaaagggtgtct

SEQ ID NO: 700778 - DNA, 120 bp, Artificial Sequence
  ENSG00000196159_84 (sequence is synthesized)
ttgaaggtattggccaagaactttggcagcattagaggtgcagatatagatgaggtcactgtaaatgtcaccgtgcttgatgcaaatgacccacccatttttactctaaacatctacagt

SEQ ID NO: 700779 - DNA, 120 bp, Artificial Sequence
  ENSG00000196159_85 (sequence is synthesized)
gtgcagatcagtgaaggggtcccaataggaactcatgtgacctttgtcagtgcctttgactcagactccatccccagctggagcaggttttcttacttcatcggatcagggaatgaaaat

SEQ ID NO: 700780 - DNA, 120 bp, Artificial Sequence
  ENSG00000196159_86 (sequence is synthesized)
ggtgccttttctattaatccgcagacaggacagatcaccgttactgcagaattagatcgagaaacccttcccatctataatctctcagttttggctgttgattcagggaccccctcagct

SEQ ID NO: 700781 - DNA, 120 bp, Artificial Sequence
  ENSG00000196159_87 (sequence is synthesized)
acaggtagtgcctctttattagtcaccctggaagatataaatgataacgggcccatgctgactgtcagtgaaggagaagtcatggaaaacaaacggccaggcactttggtgatgaccctt

SEQ ID NO: 700782 - DNA, 120 bp, Artificial Sequence
  ENSG00000196159_88 (sequence is synthesized)
cagtccactgaccctgatctccctccaaatcaaggtccctttacttattacttgctgagcacaggtcctgccaccagttatttcagtctgagcactgctggagttctgagcacaaccaga

SEQ ID NO: 700783 - DNA, 120 bp, Artificial Sequence
  ENSG00000196159_89 (sequence is synthesized)
gagattgacagagagcagattgcagacttctatctgtctgtggttaccaaggattctggtgttcctcaaatgtcttccacaggaactgtgcatatcacagttatagaccaaaatgacaat

SEQ ID NO: 700784 - DNA, 120 bp, Artificial Sequence
  ENSG00000196159_90 (sequence is synthesized)
ccttcacagtctcggacggtggagatatttgttaattattatggtaacttgtttcccggtgggattttaggctctgtgaagccacaggatccagatgtgttagacagcttccactgctcc

SEQ ID NO: 700785 - DNA, 120 bp, Artificial Sequence
  ENSG00000196159_91 (sequence is synthesized)
cttacttcaggagttaccagcctcttcagtattccagggggtacttgtgatctgaattcccagccaaggtccacagatggcacgtttgatctgactgtccttagcaatgatggagttcac

SEQ ID NO: 700786 - DNA, 120 bp, Artificial Sequence
  ENSG00000196159_92 (sequence is synthesized)
agcacagtcacgagcaacatccgagttttctttgctggattttccaatgccacagtggataacagcatcttacttcgtctcggcgtaccaacagtaaaggacttcttgaccaaccactat

SEQ ID NO: 700787 - DNA, 120 bp, Artificial Sequence
  ENSG00000196159_93 (sequence is synthesized)
cttcattttttacgcattgccagctcacagctgacaggcttagggactgctgtgcaactgtacagtgcatatgaagagaacaatagaacgtttcttttggcagctgtgaagcgaaatcat

SEQ ID NO: 700788 - DNA, 120 bp, Artificial Sequence
  ENSG00000196159_94 (sequence is synthesized)
aatcagtatgtgaatcccagtggcgtagccaccttctttgaaagcatcaaagagatccttctccggcagagtggagtaaaggtggaatctgtggatcatgactcctgtgtgcatggccca

SEQ ID NO: 700789 - DNA, 120 bp, Artificial Sequence
  ENSG00000196159_95 (sequence is synthesized)
tgtcagaatggagggagctgtctacgaagattggctgtgagctccgtattaaaaagccgtgagagtcttccagtcatcatcgtggcaaatgaacctctgcagcctttcttatgcaagtgt

SEQ ID NO: 700790 - DNA, 120 bp, Artificial Sequence
  ENSG00000196159_96 (sequence is synthesized)
ctgccaggatatgcgggtagctggtgtgaaatagatatagatgaatgtcttccatcaccttgccacagtggtggaacctgtcacaatttagtgggaggattttcatgcagctgcccagat

SEQ ID NO: 700791 - DNA, 120 bp, Artificial Sequence
  ENSG00000196159_97 (sequence is synthesized)
ggcttcactggtagggcgtgtgagagagatatcaatgagtgcctgcagagtccttgcaagaatggtgccatctgccagaattttccaggaagcttcaactgtgtttgcaaaactggatac

SEQ ID NO: 700792 - DNA, 120 bp, Artificial Sequence
  ENSG00000196159_98 (sequence is synthesized)
acagggaaaatgtgtgaatcttcagtcaattactgtgaatgcaacccctgctttaatggtggttcctgccaaagtggtgtggattcttattattgtcattgtccatttggtgtctttgga

SEQ ID NO: 700793 - DNA, 120 bp, Artificial Sequence
  ENSG00000196159_99 (sequence is synthesized)
aaacactgcgagttgaacagttatggatttgaggagttatcatacatggaatttccaagcttggaccccaataacaactatatttatgtcaaatttgccacgattaaaagtcatgcctta

SEQ ID NO: 700794 - DNA, 120 bp, Artificial Sequence
  ENSG00000196159_100 (sequence is synthesized)
ttgctttacaactatgacaaccagacaggcgaccgggctgagtttttggcccttgaaattgccgaagaaagactaagattctcttataatttaggcagtggtacatataagctcaccacc

SEQ ID NO: 700795 - DNA, 120 bp, Artificial Sequence
  ENSG00000196159_101 (sequence is synthesized)
atgaagaaggtgtcagatggacattttcacactgtgattgccaggagagcaggaatggcagcctccttaactgtggactcctgttctgagaaccaagagccaggatattgtactgtcagt

SEQ ID NO: 700796 - DNA, 120 bp, Artificial Sequence
  ENSG00000196159_102 (sequence is synthesized)
aatgtggcagtttcagatgactggactcttgatgttcagccaaatagagttacagttggaggtatcagatctctagaaccaatccttcagagaagaggacacgtggaaagccatgatttt

SEQ ID NO: 700797 - DNA, 120 bp, Artificial Sequence
  ENSG00000196159_103 (sequence is synthesized)
gttgggtgtataatggagtttgcagtcaatggaaggcctctggaacccagccaagctttggcagcacaaggcatcctagatcaatgccctaggctggaaggcgcttgtactcgcagccca

SEQ ID NO: 700798 - DNA, 120 bp, Artificial Sequence
  ENSG00000196159_104 (sequence is synthesized)
tgccaacatggtggcacatgtatggattactggtcatggcagcagtgtcattgcaaagagggactcactgggaaatactgtgaaaaatctgttactcctgacactgccttatcattagaa

SEQ ID NO: 700799 - DNA, 120 bp, Artificial Sequence
  ENSG00000196159_105 (sequence is synthesized)
ggcaaagggcgcttggactaccacatgagtcagaatgagaagcgggaatatttgttaaggcaaagcttacgaggtgccatgttggagccttttggtgtgaacagtctggaagtaaaattt

SEQ ID NO: 700800 - DNA, 120 bp, Artificial Sequence
  ENSG00000196159_106 (sequence is synthesized)
aggaccagaagcgagaatggcgttttaatccatatccaagaaagcagcaattacactactgtgaagattaagaatggcaaagtatattttacatccgatgcaggaattgctgggaaagtg

SEQ ID NO: 700801 - DNA, 120 bp, Artificial Sequence
  ENSG00000196159_107 (sequence is synthesized)
gagagaaatattcctgaagtatatgttgcagacggccactggcacacttttctaattgggaaaaatggaacagcaacagtattgtctgttgacagaatatataacagagatattatccac

SEQ ID NO: 700802 - DNA, 120 bp, Artificial Sequence
  ENSG00000196159_108 (sequence is synthesized)
cctactcaggacttcggtggccttgatgtgcttactatatcacttggaggaattccacccaatcaagcacatcgagatgcccaaacagcaggttttgatggctgcattgcttctatgtgg

SEQ ID NO: 700803 - DNA, 120 bp, Artificial Sequence
  ENSG00000196159_109 (sequence is synthesized)
tatggtggagaaagtcttcctttcagcgggaagcatagcttggcctccatctcaaaaacagatccctcagtgaagattggctgccgtggcccgaacatttgtgccagcaacccctgctgg

SEQ ID NO: 700804 - DNA, 120 bp, Artificial Sequence
  ENSG00000196159_110 (sequence is synthesized)
ggtgatttgctgtgcattaatcagtggtatgcctacaggtgtgtccctcctggggactgtgcctcccacccgtgccagaatggtggcagctgtgagccaggcctgcactccggcttcacc

SEQ ID NO: 700805 - DNA, 120 bp, Artificial Sequence
  ENSG00000196159_111 (sequence is synthesized)
tgtagctgcccagactcgcacacgggaaggacctgtgagatggtggtggcctgtcttggcgtcctctgtcctcaggggaaggtgtgcaaagctggaagtcctgcggggcatgtctgtgtt

SEQ ID NO: 700806 - DNA, 120 bp, Artificial Sequence
  ENSG00000196159_112 (sequence is synthesized)
ctgagtcagggccctgaagagatctctctgcctttgtgggctgtgcctgccatcgtgggcagctgcgcaaccgtcttggccctcctggtccttagcctgatcctgtgtaaccagtgcagg

SEQ ID NO: 700807 - DNA, 120 bp, Artificial Sequence
  ENSG00000196159_113 (sequence is synthesized)
gggaagaaggccaaaaatcccaaagaggagaagaaaccgaaggagaagaagaaaaagggaagtgagaacgttgcttttgatgaccctgacaatatccctccctatggggatgacatgact

SEQ ID NO: 700808 - DNA, 120 bp, Artificial Sequence
  ENSG00000196159_114 (sequence is synthesized)
gtgaggaagcagcctgaagggaacccaaaaccagatatcattgaaagggaaaacccctaccttatctatgatgaaactgatattcctcacaactcagaaaccatccccagcgcccctttg

SEQ ID NO: 700809 - DNA, 120 bp, Artificial Sequence
  ENSG00000196159_115 (sequence is synthesized)
gcatctccagagcaggagatagagcactatgacattgacaacgccagcagcatcgccccttcggatgcagacatcattcaacactacaagcagttccgcagccacacaccaaaattttca

SEQ ID NO: 700810 - DNA, 120 bp, Artificial Sequence
  ENSG00000196159_116 (sequence is synthesized)
atccagaggcacagtcccctaggctttgcaaggcaatcccccatgcccttaggagcaagcagtttgacttaccagccttcatatggtcaaggtttgagaaccagctccctaagccactca

SEQ ID NO: 700811 - DNA, 120 bp, Artificial Sequence
  ENSG00000196159_117 (sequence is synthesized)
gcatgcccaactcccaaccctctgtctcgacacagtccagcccctttctccaaatcttctacgttctatagaaacagcccagcaagggaattgcatcttcctataagggatggtaatact

SEQ ID NO: 700812 - DNA, 120 bp, Artificial Sequence
  ENSG00000196159_118 (sequence is synthesized)
ttggaaatgcatggtgacacctgccaacctggcattttcaactatgccacaaggctgggaaggagaagcaagagtcctcaggccatggcatcacatggttctagaccagggagtcgccta

SEQ ID NO: 700813 - DNA, 120 bp, Artificial Sequence
  ENSG00000196159_119 (sequence is synthesized)
aagcagccgattgggcagattccactggaatcttctcctccagtcggactttctattgaagaagtggagaggctcaacacacctcgccctagaaacccaagtatctgcagtgcagaccat

SEQ ID NO: 700814 - DNA, 120 bp, Artificial Sequence
  ENSG00000196159_120 (sequence is synthesized)
gggaggtcttcttcagaggaggactgcagaaggccactgtctagaacaaggaatccagcggatggcattccagctccagaatcctcttctgatagtgactcccatgaatctttcacttgc

SEQ ID NO: 700815 - DNA, 120 bp, Artificial Sequence
  ENSG00000196159_121 (sequence is synthesized)
tcagaaatggaatatgacagggagaagccaatggtatatacttccagaatgcccaaattatctcaagtcaatgaatctgatgcagatgatgaagataattatggagccagactgaagcct

SEQ ID NO: 700816 - DNA, 120 bp, Artificial Sequence
  ENSG00000196159_122 (sequence is synthesized)
cgaaggtaccacggtcgcagggccgagggaggacctgtgggcacccaggcagcagcaccaggcactgctgacaacacactgcccatgaagctagggcagcaagcagggactttcaactgg

SEQ ID NO: 700817 - DNA, 120 bp, Artificial Sequence
  ENSG00000196159_123 (sequence is synthesized)
gacaaccttttgaactggggccctggctttggccattatgtagatgtttttaaagatttggcatctcttccagaaaaagcagcagcaaatgaagaaggcaaagctgggacaactaaacca

SEQ ID NO: 700818 - DNA, 120 bp, Artificial Sequence
  ENSG00000196159_124 (sequence is synthesized)
gtccccaaagatggggaagcagaacagtatgtgtgaagtttatgtactggcactataaaatataaaaacaagaaataatactcaaaccattgtaaagttgctgactaggttgggtcacat

SEQ ID NO: 700819 - DNA, 120 bp, Artificial Sequence
  ENSG00000196159_125 (sequence is synthesized)
ttgaaaaacaggccagtatggactagtggtggagggaaaactttaaaaataataaccacaatgctgctgaaacagactcacaacaactcttaatttaaacatgtgtggttgaatttattt

SEQ ID NO: 700820 - DNA, 120 bp, Artificial Sequence
  ENSG00000196159_126 (sequence is synthesized)
ccctgcatgcattgtgttttgtaactagttatgtggcatgcagcatttggaaaatttttcttatttaccagtgtttgatttgtgatttttaaaaattgatacctttaccattgcagaaaa

SEQ ID NO: 700821 - DNA, 120 bp, Artificial Sequence
  ENSG00000196159_127 (sequence is synthesized)
gaacttgtgctttcccagtggcgtatgtgtattgtttcaactgtattattataattatattttgcattgcaagattcttgatgttaaaccaatccttgtaaagtgtaaaaaggaaccctc

SEQ ID NO: 700822 - DNA, 120 bp, Artificial Sequence
  ENSG00000196159_128 (sequence is synthesized)
ctatcgtggaatgaaagattaagtatattaacacttttcagaatgatagtttctgtatttgatgttgctcagaaatgtctcagtatttgagtaagttttacatgacagtgggtactgaaa

SEQ ID NO: 700823 - DNA, 120 bp, Artificial Sequence
  ENSG00000196159_129 (sequence is synthesized)
ttaagtcattttgttcagcactttaacgctttcttatagaattgtcttaaaacttctggatccttgagcaaatgattatagtctcctgactttcatgaggcttccattaggaacagaatg

SEQ ID NO: 700824 - DNA, 120 bp, Artificial Sequence
  ENSG00000196159_130 (sequence is synthesized)
attgcatgttgtccccagaacactgccaccttgctatgcgaatgatgttctcagcagcacttctaagaaacactcttaaaagttatttattgaaaatttttcgtatgcttttaatatttt

SEQ ID NO: 700825 - DNA, 120 bp, Artificial Sequence
  ENSG00000196159_131 (sequence is synthesized)
aaagaattgacctaaggaaagcttatgattggacttattttccaaccagataacatttactctaagtacccagtttttataatttatatgaaatcagatttcaacacttactttgtcatt

SEQ ID NO: 700826 - DNA, 120 bp, Artificial Sequence
  ENSG00000196159_132 (sequence is synthesized)
ttgtagatcatttttttaaaatactgtgtaaaaactttttttacacctaagctgtgtttttgatactgatattttcctatgctgaatagttttcttactttcagggaaggtaagaaaata

SEQ ID NO: 700827 - DNA, 120 bp, Artificial Sequence
  ENSG00000196159_133 (sequence is synthesized)
ggaaggtaagaaaatactttttttatatttgttacttatgtaacattcatatttttctcattttgatatttgtaacatactgtatgctttctacttgtaaatgtcaacaatagaattaaa

SEQ ID NO: 700828 - DNA, 120 bp, Artificial Sequence
  ENSG00000196159_134 (sequence is synthesized)
gtgatgttcacagaaaatttgaaatatttattagctagactagttgtattctttccaacattgttgtatgatctttcttgtaacgttttcttgcatttctacctcagttttttaattata

SEQ ID NO: 700829 - DNA, 120 bp, Artificial Sequence
  ENSG00000196166_0 (sequence is synthesized)
aagagatgctcaggtcagggagggaatgagacccctggggaagggactcctcccagctgaggagttgattagaagcaatcttggagttggcaggagccttagagactgcctgagccagtc

SEQ ID NO: 700830 - DNA, 120 bp, Artificial Sequence
  ENSG00000196166_1 (sequence is synthesized)
cgggaagctggctgaggagcttgggagcaagagactaaaaccagccaagtttgggacagaagggaaggaaagggttgagcagcgaacagagagacaaagaacaggcagttccaaagagcc

SEQ ID NO: 700831 - DNA, 120 bp, Artificial Sequence
  ENSG00000196166_2 (sequence is synthesized)
aagaatgcaaatcatttgcagacgccgctggcgagagcctccaccaaggctgctgtgggggtgcctgatgccacgagcacagccacttctacacgtcacggcttatgagaatacaggcca

SEQ ID NO: 700832 - DNA, 120 bp, Artificial Sequence
  ENSG00000196166_3 (sequence is synthesized)
ctgggagagactcgcatctgtggtttcttcaaaaacacagcagcccacagtgatctctcattcttccatttctatcacattcagtcattaccctccagccacactggactcctttcttgt

SEQ ID NO: 700833 - DNA, 120 bp, Artificial Sequence
  ENSG00000196166_4 (sequence is synthesized)
cctggaacctatcaaactctttcctgtctcaagcctccgcagtcctctctgcttgaactgtggctcctgcagagaaagcatcagaatctccggggaactgattggaaatgcacattctcc

SEQ ID NO: 700834 - DNA, 120 bp, Artificial Sequence
  ENSG00000196166_5 (sequence is synthesized)
agccccgcccagaactcctgaattagaaaccctggggtgggacaagcaagccgtgctttctggggcacaggtgattctggtgtgtgctgaagtttaagaaccactggccgagaacattct

SEQ ID NO: 700835 - DNA, 120 bp, Artificial Sequence
  ENSG00000196166_6 (sequence is synthesized)
taggtctgctcttcttttgcccggcccctccctcgcggaggaattccttcttattcctctctgaagagtggctgctgccaaaaaacgtttgtgagatggcctgggttttctttgttgatt

SEQ ID NO: 700836 - DNA, 120 bp, Artificial Sequence
  ENSG00000196166_7 (sequence is synthesized)
tatcatttagtttggaagaaatcagaagtctctttaagaagccaatttgaaacattcaccccatgggaacagttctggatgaagtcagaagatctggaggcagcgcagtaacacacgtag

SEQ ID NO: 700837 - DNA, 120 bp, Artificial Sequence
  ENSG00000196166_8 (sequence is synthesized)
gttttctggccatatggacatttcagagaaaacaacgcacagaggcctggagcaggtgaactggcttaagtagagagaaactaagtcatttggggatatttagcacctaatgtcaaggca

SEQ ID NO: 700838 - DNA, 120 bp, Artificial Sequence
  ENSG00000196166_9 (sequence is synthesized)
ccccaggagaaccaaagaaaatctagaagttgctgctaaaaacagttatgttagtgatacctaggaaagttttttttcttttaacatgtcattgtggtttacaaatgaaaattgaggccg

SEQ ID NO: 700839 - DNA, 120 bp, Artificial Sequence
  ENSG00000196166_10 (sequence is synthesized)
tccatctcaaaacaaacaaacaaacaaatgaaacaaatgaaaattgaaacttcacccatttatggctattgcctaaagaatttataaatgcctgggtcattgcaagcatattgctgacat

SEQ ID NO: 700840 - DNA, 120 bp, Artificial Sequence
  ENSG00000196166_11 (sequence is synthesized)
tgggtcattgcaagcatattgctgacatgtctctcggtctgcgttaccctggtggacatcacgacactcacctgacaggcagcagcttccttccagtaaaagcaaagaatctgaaaggaa

SEQ ID NO: 700841 - DNA, 120 bp, Artificial Sequence
  ENSG00000196166_12 (sequence is synthesized)
tggaaaaggctccacacagtgccattttatagaaggaaatgcaacaaggtcacagaccagaaggacagcagcccaggccggctgggcatggaggaagtcccaagatgctgctgggcatga

SEQ ID NO: 700842 - DNA, 120 bp, Artificial Sequence
  ENSG00000196166_13 (sequence is synthesized)
acagacctcctcatacagtgtgcctctgaagaaataatgcaattgtgtggggccagaggagccacaaatagaacaaagggaggaaaggaaaaatcaatatgcagtaaagaggaggaaggg

SEQ ID NO: 700843 - DNA, 120 bp, Artificial Sequence
  ENSG00000196166_14 (sequence is synthesized)
agcccggcgcgatgtctgaatctcgctggcaagaaaaggaaacaggtggtctaagcaggcaacccttcaccccacattgtaatgctggggcatggacgtgttccatagatcactcactga

SEQ ID NO: 700844 - DNA, 120 bp, Artificial Sequence
  ENSG00000196166_15 (sequence is synthesized)
gaagtcttcacaagaacactccaaggcagacactactatccatcttccacacactgggggattgagagtcagaaggattatacagcttgttcaaattataaataaaagccctgagatttg

SEQ ID NO: 700845 - DNA, 120 bp, Artificial Sequence
  ENSG00000196166_16 (sequence is synthesized)
acctatgaaccacctacgaattgtgagaaggaaattgcagatgtggctgttggaggagccaaggaagagaccaacctgggggatgagaacacaggcacgtgtgctggagtggacctgagc

SEQ ID NO: 700846 - DNA, 120 bp, Artificial Sequence
  ENSG00000196166_17 (sequence is synthesized)
ttcccctatcttcccatcagaactcagccagcagccatggacacaggcctctctttcctctgcactgcttccccaccctggttcccgctctggggtaggtccctcccagaccattatggc

SEQ ID NO: 700847 - DNA, 120 bp, Artificial Sequence
  ENSG00000196166_18 (sequence is synthesized)
tgggacgtgcagcatcttttttctctgcttctccagtaacagctggttctgctcaactcccaaagatgattttcaagaaccccaacactactatctgcctgggctgccagaaagagaaag

SEQ ID NO: 700848 - DNA, 120 bp, Artificial Sequence
  ENSG00000196166_19 (sequence is synthesized)
ggcaccctcagagacactgaagaccaccctccagaagccgccagcactttctatcatgtgactagctctgggtgctccttatctagcgaaaggggctggctcaaatggcacagatattga

SEQ ID NO: 700849 - DNA, 120 bp, Artificial Sequence
  ENSG00000196169_0 (sequence is synthesized)
gggttgtcaggcagcgcgcgaggcggcgggcagctagcagctggcggacgcgacccggaggcggtgggggtgcggctgagccatgcccggtggcgcggcctgagcccctccacctgctgc

SEQ ID NO: 700850 - DNA, 120 bp, Artificial Sequence
  ENSG00000196169_1 (sequence is synthesized)
aatcatgaaggacagcggggactccaaggaccagcaactcatggtggcgcttcgggtccggcccatcagcgtggcagagctggaggaaggagctaccctcatcgcccataaagtggatga

SEQ ID NO: 700851 - DNA, 120 bp, Artificial Sequence
  ENSG00000196169_2 (sequence is synthesized)
gcagatggtggttctcatggacccaatggaggatcccgacgacatcctgcgggcgcatcgctcccgggagaagtcctacctgttcgacgtggcctttgacttcaccgccacccaggagat

SEQ ID NO: 700852 - DNA, 120 bp, Artificial Sequence
  ENSG00000196169_3 (sequence is synthesized)
ggtgtatcaggccaccaccaagagcctcatcgagggcgtcatctcaggctacaatgccactgtctttgcctatggccccacaggctgtgggaaaacctacaccatgctgggcacagacca

SEQ ID NO: 700853 - DNA, 120 bp, Artificial Sequence
  ENSG00000196169_4 (sequence is synthesized)
ggagcctggcatctatgttcagaccctcaacgacctcttccgtgccatcgaggagaccagcaatgacatggagtatgaggtctccatgtcctacctggagatctacaatgagatgatccg

SEQ ID NO: 700854 - DNA, 120 bp, Artificial Sequence
  ENSG00000196169_5 (sequence is synthesized)
ggacctgctgaacccctccctgggctacctggagctgcgggaggactctaagggggtgatccaggtggccggcatcaccgaagtctccaccatcaatgccaaggagatcatgcagctgct

SEQ ID NO: 700855 - DNA, 120 bp, Artificial Sequence
  ENSG00000196169_6 (sequence is synthesized)
gatgaaggggaaccggcagaggacccaggagcccacggccgccaaccagacgtcctcccgctcccacgcggtactgcaggtgaccgtgcgccagcgcagccgggtcaagaacatcttgca

SEQ ID NO: 700856 - DNA, 120 bp, Artificial Sequence
  ENSG00000196169_7 (sequence is synthesized)
ggaggtgcggcagggccgcctgttcatgatcgacctggctggctcagagcgcgcctcgcagacacagaatcgtgggcagcgtatgaaggagggggcccacatcaaccgctcactgctggc

SEQ ID NO: 700857 - DNA, 120 bp, Artificial Sequence
  ENSG00000196169_8 (sequence is synthesized)
actgggcaactgcatcaacgccctgagcgacaagggtagcaacaagtacatcaactatcgcgacagcaagctcacccggctcctgaaggactctctgggaggaaacagccgcacagtgat

SEQ ID NO: 700858 - DNA, 120 bp, Artificial Sequence
  ENSG00000196169_9 (sequence is synthesized)
gatcgctcacatcagtcctgcgagcagtgccttcgaggagtcccggaacaccctgacctacgccggccgggccaagaacattaagactagggtgaagcagaacctcctgaacgtctccta

SEQ ID NO: 700859 - DNA, 120 bp, Artificial Sequence
  ENSG00000196169_10 (sequence is synthesized)
ccacatcgcccagtacaccagcatcatcgctgacctgcggggcgagatccagcgactcaagcgcaagattgatgagcagactgggcggggccaggcccggggccggcaggatcggggtga

SEQ ID NO: 700860 - DNA, 120 bp, Artificial Sequence
  ENSG00000196169_11 (sequence is synthesized)
catccgccacatccaagctgaggtccagctgcacagcgggcagggtgagaaggctggcatgggacagcttcgggagcagctcgccagcgccttccaggagcagatggatgtgcggaggcg

SEQ ID NO: 700861 - DNA, 120 bp, Artificial Sequence
  ENSG00000196169_12 (sequence is synthesized)
cctgctggagctggagaaccgcgccatggaggtccagattgacacctcccgacacctgctcaccatcgccggctggaagcatgagaagtcccgccgggccctcaaatggcgggaggagca

SEQ ID NO: 700862 - DNA, 120 bp, Artificial Sequence
  ENSG00000196169_13 (sequence is synthesized)
gcgaaaggagtgctacgctaaggacgacagcgagaaggactcagacacaggtgatgaccaaccagacatcctggagccacccgaggtggccgcagcccgggagagcattgcagccctggt

SEQ ID NO: 700863 - DNA, 120 bp, Artificial Sequence
  ENSG00000196169_14 (sequence is synthesized)
ggacgagcagaagcaactgcgcaagcagaagctggcgctggagcagcgctgccgggagctgcgcgcgcggggccggcgcctggaggagacgctgccgcggcgcatcggctccgaggagca

SEQ ID NO: 700864 - DNA, 120 bp, Artificial Sequence
  ENSG00000196169_15 (sequence is synthesized)
tgcacgagctcgaggtggagaacaccgagatgcagtcgcacgcgctgctccgcgacggtgcgctccgccaccgccacgaggccgtgcgccgcctggagcagcaccgcagtctctgcgacg

SEQ ID NO: 700865 - DNA, 120 bp, Artificial Sequence
  ENSG00000196169_16 (sequence is synthesized)
agattatccagggccagcggcagatcatcgacgactacaacctggccgtcccgcagcgcctggaagagctctacgaagtgtacctgcgggagctggaggagggcagcctggagcaggcca

SEQ ID NO: 700866 - DNA, 120 bp, Artificial Sequence
  ENSG00000196169_17 (sequence is synthesized)
ccatcatggaccaagtggcctccagggccctgcaggacagctccttgcccaaaattaccccagcaggaacctcactgaccccagattctgacctggagagtgtgaagacattgagctctg

SEQ ID NO: 700867 - DNA, 120 bp, Artificial Sequence
  ENSG00000196169_18 (sequence is synthesized)
atgcccagcacctgcagaacagcgccctccctcccctcagcacagagagtgaaggccaccacgtgttcaaggctggtactggggcctggcaggcaaaaagctcctctgtgcccaccccac

SEQ ID NO: 700868 - DNA, 120 bp, Artificial Sequence
  ENSG00000196169_19 (sequence is synthesized)
ctcccatccagctcggcagcctggtgacgcaggaggccccggctcaggacagcctgggcagctggatcaactcttcccctgacagcagtgagaacctgtcggagatccccttgtcccaca

SEQ ID NO: 700869 - DNA, 120 bp, Artificial Sequence
  ENSG00000196169_20 (sequence is synthesized)
aagagaggaaggagatcctgactggcaccaagtgcatctgggtgaaggccgcccggcggcgctcgcgggccctgggaaccgaggggcgacacctgctggcacccgcgacagagcgcagca

SEQ ID NO: 700870 - DNA, 120 bp, Artificial Sequence
  ENSG00000196169_21 (sequence is synthesized)
gcctgtccctgcactcactgagcgagggcgacgatgcgcggccaccaggcccactggcctgcaagcggccgcccagccccacactacagcatgctgccagtgaggacaacctgtccagca

SEQ ID NO: 700871 - DNA, 120 bp, Artificial Sequence
  ENSG00000196169_22 (sequence is synthesized)
gcacgggcgaggccccgtcccgggcagtcggacatcatggggacggccccaggccctggctgcgtggccagaagaaaagcctgggcaagaaaagggaggagtcgctggaggcaaagagaa

SEQ ID NO: 700872 - DNA, 120 bp, Artificial Sequence
  ENSG00000196169_23 (sequence is synthesized)
ggaagcggaggtcccgatccttcgaggtcaccgggcaagggctctcccaccccaagacacacctcctggggccccatcaggcggagcgcatctcggaccacaggatgccagtgtgcaggc

SEQ ID NO: 700873 - DNA, 120 bp, Artificial Sequence
  ENSG00000196169_24 (sequence is synthesized)
acccagcccctggtatccggcatctgggaaaggtcacgctacctttggccaaagtcaaactccctccaagccagaacacgggcccgggggactcctcacccctggctgttccccccaacc

SEQ ID NO: 700874 - DNA, 120 bp, Artificial Sequence
  ENSG00000196169_25 (sequence is synthesized)
caggtggtggttctcgacgggctacccgtgggccccgcctgccccacggcacaagcacccatggcaaagatggatgctcccggcataactgaggggccctgcctggaactggctctctca

SEQ ID NO: 700875 - DNA, 120 bp, Artificial Sequence
  ENSG00000196169_26 (sequence is synthesized)
cctcccaagactgaatggggtctagcagggcatgggaggtggaggctgggcagatggagatgaccaggaagtaagctcaggatctcagcaggccagggctcctgagacccaggaactggg

SEQ ID NO: 700876 - DNA, 120 bp, Artificial Sequence
  ENSG00000196169_27 (sequence is synthesized)
gtctctgcccaaccctcccatgctttcagtgccactggggaaaagaggtgaggccaggggacatggccaggacggctgggctccctggcttcccagccctggacagaatgctgttgccaa

SEQ ID NO: 700877 - DNA, 120 bp, Artificial Sequence
  ENSG00000196169_28 (sequence is synthesized)
aacctgcacagccctgaggccagcctcggccttggtaacggaggaaagcagctgacagtgagacggggctcctggcccacgtgtggggcacgggcatcctggatggttggggaggcgccg

SEQ ID NO: 700878 - DNA, 120 bp, Artificial Sequence
  ENSG00000196169_29 (sequence is synthesized)
acaggcacttcacgtattacaattggggatgtgggtgagggagggaatctggttttgttacttggcagtggttttttctcacccttcctttttaacaataaaatcccatttgggtcttga

SEQ ID NO: 700879 - DNA, 120 bp, Artificial Sequence
  ENSG00000196169_30 (sequence is synthesized)
gcaggtatgcagggctctgcagcaggagctgcagggcagaggtctgctcagatggctcagctcacctggtgagggcagaaagggcccctgtggcttgcagcaccctccttcctctactca

SEQ ID NO: 700880 - DNA, 120 bp, Artificial Sequence
  ENSG00000196169_31 (sequence is synthesized)
ctgaactcttggctgtgctgttgatgacatcaccaaggaagctgggggctcttcttccaggaagccttcctagattgatccaaggacaactgggagcttccctagcctgggtgggccctg

SEQ ID NO: 700881 - DNA, 120 bp, Artificial Sequence
  ENSG00000196169_32 (sequence is synthesized)
atcctttacctttcacatgctcattgcttgactttcccaccctaatatgcctgctgcccacagagcacatatatatatggttgagagctaaagctcgcctctagggtgtaacgtgtggca

SEQ ID NO: 700882 - DNA, 120 bp, Artificial Sequence
  ENSG00000196169_33 (sequence is synthesized)
ctcgctctctgtttgcaatcttggtcctcatgtcaccaggatgaggaaggcagggcacacgaggcaataagtgtgtatcaagtaccagcagcatgctgggtactgttctagaaactggga

SEQ ID NO: 700883 - DNA, 120 bp, Artificial Sequence
  ENSG00000196169_34 (sequence is synthesized)
aactgtggtgaacagaaaaggccctgtcctctctccattaccttaagtctagtgtgaagagatgaggcattcatcaaagaattgcatcacaaacaaacgagtttgcagctaacaagggct

SEQ ID NO: 700884 - DNA, 120 bp, Artificial Sequence
  ENSG00000196169_35 (sequence is synthesized)
tcaaagaaatgcttagtggcatgagagtaggtaagaaggggataagacctaaacctggaggtcagcgagggcttccttaagaaactgtgcttgacactttgggaggccgaggaggccaga

SEQ ID NO: 700885 - DNA, 89 bp, Artificial Sequence
  ENSG00000196169_36 (sequence is synthesized)
gcgtggtggcacgtgcctgtagtcgcagctactcaggaagctgaggcaggataatcgcttacatcacgccattgcactccagcctgggt

SEQ ID NO: 700886 - DNA, 120 bp, Artificial Sequence
  ENSG00000196169_37 (sequence is synthesized)
ttttattccaacccctcaatgggggacgggagacacattcttgaaacagctcattgatggttcagaatattcctaatagcaggtaaatgatgccaatggtaggtgctggggcaagacagg

SEQ ID NO: 700887 - DNA, 120 bp, Artificial Sequence
  ENSG00000196169_38 (sequence is synthesized)
aacaggaggtgggggtggcctggtggggtccagtggaactctctggagactgtgagtgggaccctgaaggctgggaggacattccagaaaggtgggagcagggagagcacaggttccaaa

SEQ ID NO: 700888 - DNA, 120 bp, Artificial Sequence
  ENSG00000196169_39 (sequence is synthesized)
ggcaggaaggggatggcgtctgtggtgggtatggggagagcaggacaggtcttcaactggagtgggatgttcatgcaggagcggtgagcccagagaaaatcagagagatgggggtggccc

SEQ ID NO: 700889 - DNA, 120 bp, Artificial Sequence
  ENSG00000196169_40 (sequence is synthesized)
tcaacaacgggtggaggaatgaggacgttccccgcaggcattaggaagccactgaaggttgatgagatctagcagtgagtgtgacaggaggttgtggaagtggaggaaaggaggccatta

SEQ ID NO: 700890 - DNA, 120 bp, Artificial Sequence
  ENSG00000196169_41 (sequence is synthesized)
ctgtcacccagaaagactgggggaggcagggggaagaaaggccctgcaggcaggcctcggtgagtgcacctggggtgactgcatcccctccgctccatacgtgttccctgcaggtgaagc

SEQ ID NO: 700891 - DNA, 120 bp, Artificial Sequence
  ENSG00000196169_42 (sequence is synthesized)
gtttgagaggcaaggcggaggggccagggtgggggtagccgtgagacttgggaactcaggccacaaatcctgtgtgactttgctaagctctttaacttctctatgcgtcacattccccac

SEQ ID NO: 700892 - DNA, 120 bp, Artificial Sequence
  ENSG00000196169_43 (sequence is synthesized)
ctgtaaaatgggagcagtccatggtgcagccctcatggggttgctgggaagattacataaatgcctggcacataccaaggactcaaaaaatggtaactaatgttataattagggtttttc

SEQ ID NO: 700893 - DNA, 120 bp, Artificial Sequence
  ENSG00000196169_44 (sequence is synthesized)
actcaaaaaatggtaactaatgttataattagggtttttcaggctgggcacagtgactcacacctgtaatctcagcacgttgggaagttgaggtaggcagatcacttgaggccaggagtt

SEQ ID NO: 700894 - DNA, 120 bp, Artificial Sequence
  ENSG00000196171_0 (sequence is synthesized)
atggagagccccaatcgaaccaccattcaggagtttatcttctccgctttcccttattcctgggttaagtctgttgtctgctttgttccactgctcttcatctatgctttcattgttgtt

SEQ ID NO: 700895 - DNA, 120 bp, Artificial Sequence
  ENSG00000196171_1 (sequence is synthesized)
ggaaacctggtcatcatcacagtggtccagttgaatactcacctccacactcccatgtatacttttatcagtgctctttctttcctggagatttggtataccacagccacaatcccaaag

SEQ ID NO: 700896 - DNA, 120 bp, Artificial Sequence
  ENSG00000196171_2 (sequence is synthesized)
atgctgtctagcctgcttagtgagaggagcatttccttcaatggttgtctcctgcagatgtatttcttccattccaccggcatctgtgaggtgtgtctcttgacagttatggcctttgac

SEQ ID NO: 700897 - DNA, 120 bp, Artificial Sequence
  ENSG00000196171_3 (sequence is synthesized)
cactacctggccatatgcagccctcttcattatccctctatcatgacccccaagctatgtacccaactgactttaagttgctgtgtttgtggctttatcacaccccttcctgagattgcc

SEQ ID NO: 700898 - DNA, 120 bp, Artificial Sequence
  ENSG00000196171_4 (sequence is synthesized)
ccattttgtggttcgaatcaccttgaacatatcttctgtgacttcctcccagtgctgcgtctggcctgcacagacacacgagccatcgtcatgattcaggtagtggatgtcattcatgca

SEQ ID NO: 700899 - DNA, 120 bp, Artificial Sequence
  ENSG00000196171_5 (sequence is synthesized)
gtggagattattacagctgtgatgctcatcttcatgtcctacgatggtattgtggctgtaattctacgtattcattcagctggaggccgccgcacagcattttccacgtgtgtctctcac

SEQ ID NO: 700900 - DNA, 120 bp, Artificial Sequence
  ENSG00000196171_6 (sequence is synthesized)
ttcattgtcttttcgctcttctttggcagtgtgactctcatgtacctacgcttctctgccacctactctttgttctgggatatagccattgctctggcctttgcagttttgtctcccttc

SEQ ID NO: 700901 - DNA, 120 bp, Artificial Sequence
  ENSG00000196171_7 (sequence is synthesized)
ttcaaccccattatctatagcctgaggaataaagaaataaaagaagctataaaaaagcacataggtcaagctaagatatttttttccgtaagaccagggacctcaagtaagatattttag

SEQ ID NO: 700902 - DNA, 120 bp, Artificial Sequence
  ENSG00000196172_0 (sequence is synthesized)
gtctctcccttcagcccgagctccgggtctcgtcttcactgctctgtgtcctcttcttctagaggcccagcctctatggccctctgacctgcaggtattggcgatccatagctaagacgc

SEQ ID NO: 700903 - DNA, 81 bp, Artificial Sequence
  ENSG00000196172_1 (sequence is synthesized)
tgcctggacactatacagcagaatttatataggaatgtgatgttagagaactacagaaacctggtcttcttgggtattgtt

SEQ ID NO: 700904 - DNA, 120 bp, Artificial Sequence
  ENSG00000196172_2 (sequence is synthesized)
gttagagaactacagaaacctggtcttcttgggtattgttgtctctaagccagacctgatcacctgtctggaacaagaaaaagagccttggactagaaagagacataggatggtggccga

SEQ ID NO: 700905 - DNA, 120 bp, Artificial Sequence
  ENSG00000196172_3 (sequence is synthesized)
acccccagttatttgttctcattttgcccaagacttttcaccagagcagaacataaaagattctttccaaaaagtgacaccaagaagatatggaaaatgtgaacatgagaatttacagtt

SEQ ID NO: 700906 - DNA, 120 bp, Artificial Sequence
  ENSG00000196172_4 (sequence is synthesized)
aagtaaaagtgtggatgagtgcaaagtgcaaaaaggaggttataatggacttaaccaatgtttgccaactacccagagcaaaatatttcaatgtgataaatatatgaaaatctttcataa

SEQ ID NO: 700907 - DNA, 120 bp, Artificial Sequence
  ENSG00000196172_5 (sequence is synthesized)
attttcaaatttaaatggacataaggtaagacacaccagaaaaaaaccttttaaatataaagaatttggcaaatcattttgcatattttcaaacctaactcaacataaaataatttgtac

SEQ ID NO: 700908 - DNA, 120 bp, Artificial Sequence
  ENSG00000196172_6 (sequence is synthesized)
tagagtaaatttctacaaatgtgaagactgtggaaaagcctttaatggatcctcaatctttactaaacataaaagaattcatattggagagaaatcgtacatatgtgaagaatgtggcaa

SEQ ID NO: 700909 - DNA, 120 bp, Artificial Sequence
  ENSG00000196172_7 (sequence is synthesized)
agcctgtaaccagttcacaaaccttactacacataagataatttatactagagacaaactctacaaacgtgaagaatgtagcaaagcctttaacctgtcgtcacacattacaacacatac

SEQ ID NO: 700910 - DNA, 120 bp, Artificial Sequence
  ENSG00000196172_8 (sequence is synthesized)
acctgtcgtcacacattacaacacatacaataattcatactggagagaatccctacaaacgtgaagaatgtgacaaagcctttaatcagtccttaacccttactacacataagataattc

SEQ ID NO: 700911 - DNA, 81 bp, Artificial Sequence
  ENSG00000196172_9 (sequence is synthesized)
ataagataattcataccagagagaaactcaatgaatataaggaatgtggcaaagctttcaaccagtcctcacaccttacca

SEQ ID NO: 700912 - DNA, 87 bp, Artificial Sequence
  ENSG00000196172_10 (sequence is synthesized)
tttaaccagtcctcacaccttaccagacgatgtgaagaatgtggcaaagcctttaggcagtcctcacaccttactacacataagata

SEQ ID NO: 700913 - DNA, 120 bp, Artificial Sequence
  ENSG00000196172_11 (sequence is synthesized)
gtgaagaatgtggcaaagcttttaacaagtcctcacaccttactagacataagagcattcatactggagaaaaaccctaccagtgtgaaaaatgtggcaaagcttctaaccaatcctcaa

SEQ ID NO: 700914 - DNA, 120 bp, Artificial Sequence
  ENSG00000196172_12 (sequence is synthesized)
atcctcaaaccttactgaacataagaatattcatactgaagagaaaccatacaaatgtgaagaatgtgggaaagcctttaaccagttctcaaaccttactacacataaaagaattcatac

SEQ ID NO: 700915 - DNA, 85 bp, Artificial Sequence
  ENSG00000196172_13 (sequence is synthesized)
ggtaattcatactggagagaaaccctaccaatgtgaagaatgtggtaaagcctttaaccagtcctcacaccttactacaatgtga

SEQ ID NO: 700916 - DNA, 120 bp, Artificial Sequence
  ENSG00000196172_14 (sequence is synthesized)
tgtggcaaagcttttaaccagtcctcaaaccttactggacataagaaaattcatactggtgagaaactctacaaacctaaaagatgtaacagtgattttgaaaacacttcaaagttttct

SEQ ID NO: 700917 - DNA, 120 bp, Artificial Sequence
  ENSG00000196172_15 (sequence is synthesized)
ttctaaacataaaagaaattatgctggtgagaaatcttagaaatgtgaagaatgtaacaaaacctttaaaagttgtcacacttgattgtgcataagataattcatactaaaaaaaaacct

SEQ ID NO: 700918 - DNA, 120 bp, Artificial Sequence
  ENSG00000196172_16 (sequence is synthesized)
acaagtgtgaagaatgtggcaaaacttttaaccaatgctcacaccttattgcacaggaaagcatttgtactagaaaaaaatttcaaatatacagaatgtgaaaaagccattaatatctgt

SEQ ID NO: 700919 - DNA, 120 bp, Artificial Sequence
  ENSG00000196172_17 (sequence is synthesized)
tcacatcttactcaacatcagagatttcatacttaataaaagcattatacatgcaattactgtcaaaaatctttcagaaaatataagcctctaaagtgaagagtattcattttgaagaca

SEQ ID NO: 700920 - DNA, 120 bp, Artificial Sequence
  ENSG00000196172_18 (sequence is synthesized)
cacattatgaacataaggagggttgtggtacctttacttgtatcacagatctcattgtacacattttgtgctagaggaaaaccatggagcagttgcttaaactttgtgcaacataaggaa

SEQ ID NO: 700921 - DNA, 120 bp, Artificial Sequence
  ENSG00000196172_19 (sequence is synthesized)
atttatattggagaaaaaccctgcaaatgtaataaatttgggaaaacattttttcaaaaacgacagcttagaaaacactagagggttcatactaaaatctatttttgcagatgcagtaaa

SEQ ID NO: 700922 - DNA, 120 bp, Artificial Sequence
  ENSG00000196172_20 (sequence is synthesized)
tatgaaaaaatatttaatccaaaattctatgtaaatatcagataattcacagtagaaatagttaaggcactgacacttcaggcattacactaaatcagattgctgagtatagaaaagaat

SEQ ID NO: 700923 - DNA, 120 bp, Artificial Sequence
  ENSG00000196172_21 (sequence is synthesized)
ctaaaactaaagttggtaaatgaattatttgtatataacattataagaagtagaaaatttttgcagagttgtaactacattcaaactatcctttgaaaaaaattaggttttatgaaaagt

SEQ ID NO: 700924 - DNA, 120 bp, Artificial Sequence
  ENSG00000196172_22 (sequence is synthesized)
gaataatgtcatttaactcaagttatgctcttcattcctattgtattcacatgtgaaagcatgtgacttaattgttgctgcatcaaagatgagagattctttgttattaggtgtgcatta

SEQ ID NO: 700925 - DNA, 120 bp, Artificial Sequence
  ENSG00000196172_23 (sequence is synthesized)
tttacgaccttttttagtgaaagagttaaggacattaaaatgtaagatgcaagatgaaaatgtaagtggagaggctctttctggttaatttataatattgactgatgcatgaggtaggag

SEQ ID NO: 700926 - DNA, 120 bp, Artificial Sequence
  ENSG00000196172_24 (sequence is synthesized)
taatattgactgatgcatgaggtaggagttcagataaatatcctgtgttatattgagaaaaaaaattttctggtatatcattttactaattgtactttttttttttttgagacagagttt

SEQ ID NO: 700927 - DNA, 120 bp, Artificial Sequence
  ENSG00000196172_25 (sequence is synthesized)
taataaaatgtagtacattttaaaatttttagataatgtgtgaacttattaatcaggctttttaaaaaacatgttaagaccatcgtgcattcaatgaagcattattatgccattaaattt

SEQ ID NO: 700928 - DNA, 120 bp, Artificial Sequence
  ENSG00000196172_26 (sequence is synthesized)
aacttatcccatcttactcaagggtataggtaaatgatggtaactatacactatttaataagataatggactaacatttctagtaatctgttttgccagtggctttaaattgcaaataag

SEQ ID NO: 700929 - DNA, 120 bp, Artificial Sequence
  ENSG00000196172_27 (sequence is synthesized)
tcagagaatattattcctgtaggttgaattattactcattttttcttatttaaacttatttttcttaatttttgtgggtacatagtatgtgtaaatatggcatatatggcatattttgat

SEQ ID NO: 700930 - DNA, 120 bp, Artificial Sequence
  ENSG00000196172_28 (sequence is synthesized)
acaggtatataatatgtaataattacatatgggtaaatgaaatattcattacctgcagcatttattgtttgtatttgtttgtattataaactaattctgcacttttcggtttttttttga

SEQ ID NO: 700931 - DNA, 120 bp, Artificial Sequence
  ENSG00000196172_29 (sequence is synthesized)
gtattataaactaattctgcacttttcggtttttttttgagacgagtctcactatgtcacccaggctgtgcacgcctgggtgcattggcgtggtctcagctcactgcaacctccgcctac

SEQ ID NO: 700932 - DNA, 77 bp, Artificial Sequence
  ENSG00000196172_30 (sequence is synthesized)
tttcactacgttggccaggtttgtcttgaactcctgaccccatgattagccccctcggcctcccaaagtgctgggat

SEQ ID NO: 700933 - DNA, 120 bp, Artificial Sequence
  ENSG00000196172_31 (sequence is synthesized)
ggattacaggtgggagccaccacacccagccacttttagttgttttcaaatgtacattaaattgttgttggctacagggtctcttttatggtcataagaaaacaatataaacaaaatgca

SEQ ID NO: 700934 - DNA, 120 bp, Artificial Sequence
  ENSG00000196172_32 (sequence is synthesized)
aaacaaaatgcatacatttctgagacctgaattaacattaaaaaattgttatatatttttcttcaaacatgttgcctctctgcctgcaagcacatacagactattagttttgatttacac

SEQ ID NO: 700935 - DNA, 120 bp, Artificial Sequence
  ENSG00000196172_33 (sequence is synthesized)
agagttaaatatatacatatattactttaaagataaagcttgggtttaaaaaaattatggagtaaataaatgccttctttgcgagtatgagtttctacctagtttcagaagagcaatatt

SEQ ID NO: 700936 - DNA, 120 bp, Artificial Sequence
  ENSG00000196172_34 (sequence is synthesized)
gaaacaaatcaaattattttaattagatgatgactgcaaaactaaaaaaacttaaaaatgctgaaaacaaatccatactctctgctttgtattgaattgattactgtaaaattgtatggc

SEQ ID NO: 700937 - DNA, 120 bp, Artificial Sequence
  ENSG00000196172_35 (sequence is synthesized)
ttataattcagaatctccctatgcaaatttttgtttttacttgcctgattcttaggctagacccataattttcttgtgtcttacatttttttctcttattttatataagatgctatgtga

SEQ ID NO: 700938 - DNA, 120 bp, Artificial Sequence
  ENSG00000196172_36 (sequence is synthesized)
aaattagtgcaaaaaatttagatttaatttcaaaattagtgtattgttatattttatgttgttagaatattttattttgttcttttaattggagaacgctgtataagcctacttttttta

SEQ ID NO: 700939 - DNA, 120 bp, Artificial Sequence
  ENSG00000196172_37 (sequence is synthesized)
ttggagaacgctgtataagcctactttttttagtttttgttcctttcagtttttataatgaaaataagtaaatattgattgagcccatttatttaggtgagtactaggggggcttcctaa

SEQ ID NO: 700940 - DNA, 120 bp, Artificial Sequence
  ENSG00000196172_38 (sequence is synthesized)
atcatgaggatgtttttatatataaatatagcaaacaaacatgacagtgctttctgtgtcacagatgctttataataagccataaatattcctgttggagttagtttgtaacttcaagac

SEQ ID NO: 700941 - DNA, 120 bp, Artificial Sequence
  ENSG00000196172_39 (sequence is synthesized)
agagatggaacatatcaattgtgagaaataacattgattttttatgtggagaggacatttattttcaggctgcaaagctcagttttgctgaattaaaaaattgtgcttcttttatttcct

SEQ ID NO: 700942 - DNA, 120 bp, Artificial Sequence
  ENSG00000196172_40 (sequence is synthesized)
aattgtcttagttttgtttgtcttattatgtgtatttcagctgtgtatgcatcacagccctcctttttgctgtgctgtggctacagttttctcactgttctcttcacaccatgtcatttc

SEQ ID NO: 700943 - DNA, 120 bp, Artificial Sequence
  ENSG00000196172_41 (sequence is synthesized)
acatggtatattgtaggttttgatgagaaatcggtatttttaatgcactgcaagattggttttaactggagattttgcatatcaatataattttctgatcagttaaattaaaacaaaaag

SEQ ID NO: 700944 - DNA, 120 bp, Artificial Sequence
  ENSG00000196172_42 (sequence is synthesized)
catacagtgtccacagatgaaaggattaaatcatttagcgttgtttttctctgtttgttaaagaataatcttattaaattcttacacaaagtgtggcaaatataaaatttgcttgaaaat

SEQ ID NO: 700945 - DNA, 120 bp, Artificial Sequence
  ENSG00000196172_43 (sequence is synthesized)
atatcttagaaattaaacttttaatttaattttctacagtatacttatgccacaatgtacgtttccatgcaaaatcttctatttgtaagtgtgaacattaaacattgcaaaatagtaaaa

SEQ ID NO: 700946 - DNA, 120 bp, Artificial Sequence
  ENSG00000196172_44 (sequence is synthesized)
tgacctctgtgattttgaaacctggagtaatatttcttttccatattcatattacaatttgaagaaattttctcagttttatatgtttttttagtgggtgaagttcagtctacagttttt

SEQ ID NO: 700947 - DNA, 120 bp, Artificial Sequence
  ENSG00000196172_45 (sequence is synthesized)
acatttagtcacctaactctagccaacttcttggtcatattctctggaaaacattcgaagatcatggcagcttttagataaaaacattttctattattttgcgtgcaaacttgtttactg

SEQ ID NO: 700948 - DNA, 120 bp, Artificial Sequence
  ENSG00000196172_46 (sequence is synthesized)
tgttcacagagtggccagtcatgagaccataagaaacagctgcccttttagtgtctttcataccgtctgtaatatataaattgtgcatttattctgtgaagcatgacattttgaagtata

SEQ ID NO: 700949 - DNA, 120 bp, Artificial Sequence
  ENSG00000196172_47 (sequence is synthesized)
tacacattgtcaaatgcttcattctaggtaattaatgctttacctaacatagttaacatttttgtggtaagagcacatgacaatgttttagcatttttcagaaatacaaatacattgtta

SEQ ID NO: 700950 - DNA, 120 bp, Artificial Sequence
  ENSG00000196172_48 (sequence is synthesized)
tgaactataggcaccatgcagtacaaaagcttttttgaacttatttctcctattcaactgtaattatgtatttgactgacatctttctaaacccctcttttttccaaatatgttggcatc

SEQ ID NO: 700951 - DNA, 120 bp, Artificial Sequence
  ENSG00000196172_49 (sequence is synthesized)
tggtggtcaccattttattctccacttcagttagattaatttttctagaatcatgtaagtgaaataatttggttaatctatgtaattgaaaataataaatttttttattttaaagatgaa

SEQ ID NO: 700952 - DNA, 120 bp, Artificial Sequence
  ENSG00000196172_50 (sequence is synthesized)
tcttctagaggcccagcctctatggccctctgacctgcaggtattggcgatccatagctaagacgccaggtcccccggaaacctagaaatgacctgatcacctgtctggaacaagaaaaa

SEQ ID NO: 700953 - DNA, 120 bp, Artificial Sequence
  ENSG00000196172_51 (sequence is synthesized)
tcttcttctagaggcccagcctctatggccctctgacctgcaggtattggcgatccatagctaagacgccaggtcccccggaaacctagaaatggtattgttgtctctaagccagacctg

SEQ ID NO: 700954 - DNA, 120 bp, Artificial Sequence
  ENSG00000196177_0 (sequence is synthesized)
ggcctgcggcgaggatggagggcctggcagtgcggttgctgcgcggcagcaggctgctaagaagaaatttcctgacttgtttgtcttcttggaagattcctcctcatgtctcaaaatctt

SEQ ID NO: 700955 - DNA, 120 bp, Artificial Sequence
  ENSG00000196177_1 (sequence is synthesized)
cccagtcagaagctctactcaatataacaaataatggaatacactttgctcccctgcaaacatttacagatgaggaaatgatgataaagagttcagttaaaaaatttgctcaggaacaaa

SEQ ID NO: 700956 - DNA, 120 bp, Artificial Sequence
  ENSG00000196177_2 (sequence is synthesized)
ttgcacctttggtttcaaccatggatgaaaattcgaaaatggagaaatcagtaatacaaggattatttcaacaagggttgatgggtattgaagttgacccagaatatggaggcacaggag

SEQ ID NO: 700957 - DNA, 120 bp, Artificial Sequence
  ENSG00000196177_3 (sequence is synthesized)
cttcatttttatccactgtgctcgtgatagaggaattagccaaagttgatgcatctgtggctgtcttttgtgagatccagaacacattaattaacacactgattagaaaacatggaacag

SEQ ID NO: 700958 - DNA, 120 bp, Artificial Sequence
  ENSG00000196177_4 (sequence is synthesized)
aagaacaaaaggccacctatttgcctcagctcactacagaaaaagtaggaagtttctgcctttcagaggctggagcaggtagtgactcatttgctttgaagaccagagctgataaagagg

SEQ ID NO: 700959 - DNA, 120 bp, Artificial Sequence
  ENSG00000196177_5 (sequence is synthesized)
gagattattatgtcctcaatggatcaaagatgtggatcagcagtgctgagcacgcagggctctttctggtgatggcaaatgtagaccctaccattggatataagggaattacctccttct

SEQ ID NO: 700960 - DNA, 120 bp, Artificial Sequence
  ENSG00000196177_6 (sequence is synthesized)
tagtagatcgtgatactccgggccttcatatagggaaacctgaaaacaaattggggctcagagcttcttccacctgcccgttaacattcgaaaatgtcaaggttccagaagccaatatct

SEQ ID NO: 700961 - DNA, 120 bp, Artificial Sequence
  ENSG00000196177_7 (sequence is synthesized)
tgggacaaattggacatggctataagtatgccatagggagtctcaatgaaggtagaataggaattgctgcacagatgctgggactggcgcaaggatgttttgactacactattccatata

SEQ ID NO: 700962 - DNA, 120 bp, Artificial Sequence
  ENSG00000196177_8 (sequence is synthesized)
ttaaagaaaggatacaatttggcaaaagactatttgattttcagggcctccaacaccaagtggctcacgtggccacccagctggaagctgcaagattactaacatacaatgctgctaggc

SEQ ID NO: 700963 - DNA, 120 bp, Artificial Sequence
  ENSG00000196177_9 (sequence is synthesized)
ttttagaagctggaaagccattcataaaagaagcgtcaatggccaaatactatgcatcagagattgcaggacaaacaacgagtaaatgtatcgagtggatggggggagtaggctacacca

SEQ ID NO: 700964 - DNA, 120 bp, Artificial Sequence
  ENSG00000196177_10 (sequence is synthesized)
aagattaccctgtggagaaatacttccgagatgcaaagattggtacgatatatgaaggagcttccaacatccagttgaacaccattgcaaagcatatcgatgcagaatactgacgtctat

SEQ ID NO: 700965 - DNA, 120 bp, Artificial Sequence
  ENSG00000196177_11 (sequence is synthesized)
aggagtgggacccctccctggtgtcactgctgtaaaattttaaacggttgtgtcttgttgggagtaagtgccttgcgtgggaataaacttccacagcattcgaatattttaatgaagccc

SEQ ID NO: 700966 - DNA, 120 bp, Artificial Sequence
  ENSG00000196177_12 (sequence is synthesized)
ttagtcagggtcctggtgttggcctttttggttttctcttttcaggctgtttaacttaggcacaggagatccacttttaaacttgggaaataagcacctgtatttttttccaaaactgtt

SEQ ID NO: 700967 - DNA, 80 bp, Artificial Sequence
  ENSG00000196177_13 (sequence is synthesized)
acttgggaaataagcacctgtatttttttccaaaactgtttttaaagctgtatacgcatacatatatatatttttactct

SEQ ID NO: 700968 - DNA, 80 bp, Artificial Sequence
  ENSG00000196177_14 (sequence is synthesized)
tacaggtgtgcaccaccatgcctggttccccaggctggtcttctggcttctggatatcgcccaccttggcctcccaaagt

SEQ ID NO: 700969 - DNA, 120 bp, Artificial Sequence
  ENSG00000196177_15 (sequence is synthesized)
ggattacagggatgagccaccgtgcctggctgggtatttatattatcattctagtttcagagtatacagaagtttcatcccatcatttggaaaaataaaggcatctgaagtacaatatta

SEQ ID NO: 700970 - DNA, 120 bp, Artificial Sequence
  ENSG00000196177_16 (sequence is synthesized)
atttggaaaaataaaggcatctgaagtacaatattacttatagaaatagtttatattcctattaaatcttaatcttgtggcatcagggaaatatttgttacatagtaggcaatttttatc

SEQ ID NO: 700971 - DNA, 120 bp, Artificial Sequence
  ENSG00000196177_17 (sequence is synthesized)
cagtactttatagattcaactctaagttgcaagcgaagtcaaaactgatgaaaatttatttagaaaaatctaaaaattctggttttaaatatgagaatcagtggaaaataagggtataat

SEQ ID NO: 700972 - DNA, 120 bp, Artificial Sequence
  ENSG00000196177_18 (sequence is synthesized)
tttgtaggtcatatgattgaagaaaatattattttaacaatgtaaagcaatatgatttgttactataattaacctgtataaaagatacattttatggtggtttcagtaggtcattttaaa

SEQ ID NO: 700973 - DNA, 120 bp, Artificial Sequence
  ENSG00000196177_19 (sequence is synthesized)
aaccaatgtgcattagttttcaagtataaggtttaagtaatttggtttaataatcagaaaatattcaatacagtgttggatattctgtcatgcactatttttcagttgacaatttctgta

SEQ ID NO: 700974 - DNA, 120 bp, Artificial Sequence
  ENSG00000196177_20 (sequence is synthesized)
ttttaattgaatactgtttcttcagtcatggttattgcactttatcctgaataataattcagaaattgggttttggttcagtgattctcaagaaaaagatctcttgcccattaagaagtg

SEQ ID NO: 700975 - DNA, 120 bp, Artificial Sequence
  ENSG00000196177_21 (sequence is synthesized)
tatcaaaatctcataaggaatgagggagagaagggggctgtagagtttgaaaaagcatattcaatattaaaatagttttatatttgggaaggcaaaaatgaatctattgttttgcaatat

SEQ ID NO: 700976 - DNA, 79 bp, Artificial Sequence
  ENSG00000196177_22 (sequence is synthesized)
tatttgggaaggcaaaaatgaatctattgttttgcaatataggttataaacaggcaaaatgcaataaaatatatatctg

SEQ ID NO: 700977 - DNA, 120 bp, Artificial Sequence
  ENSG00000196177_23 (sequence is synthesized)
ggcctcagaatcatggtgggaggcaaaaagcacttcttacatggcggcagcaagagaaaatgagaaagaagcaaaagtggaaacccctaataaacctatcagatcttgtgagacttacta

SEQ ID NO: 700978 - DNA, 120 bp, Artificial Sequence
  ENSG00000196177_24 (sequence is synthesized)
tccctcccacaacacatgggaattctgagagataccatttaagttgagatttcagtggggacacagccaaaccatatcattctacccctggcacctccaaatctcatgtcctcacatttc

SEQ ID NO: 700979 - DNA, 73 bp, Artificial Sequence
  ENSG00000196177_25 (sequence is synthesized)
atttcagcattaacccaaaagtccgacctgtaaaatcaaaagtaaactagttacttcctagatacaatggggg

SEQ ID NO: 700980 - DNA, 120 bp, Artificial Sequence
  ENSG00000196177_26 (sequence is synthesized)
agccattccaaatgggagaaattggccaacacaaaagggtaacagggcccatgcaagtccaaaattcagcagggcagtcaaattttaaacctccaaaatgatcacctttgactccacgtc

SEQ ID NO: 700981 - DNA, 120 bp, Artificial Sequence
  ENSG00000196177_27 (sequence is synthesized)
ttaaacctccaaaatgatcacctttgactccacgtctcacaatcatctctctcaagttcgaagttccacaaatctctaaggcaagggaaagatgctgccagtctctttgctaaaacacag

SEQ ID NO: 700982 - DNA, 79 bp, Artificial Sequence
  ENSG00000196177_28 (sequence is synthesized)
gcaagggaaagatgctgccagtctctttgctaaaacacagcaagagtcacctttactccagttcccaaaaagtttcaat

SEQ ID NO: 700983 - DNA, 71 bp, Artificial Sequence
  ENSG00000196177_29 (sequence is synthesized)
ttgctttcatatttttggctatcttttcagcaatgccccactctactgttagcagtttactgtattagtct

SEQ ID NO: 700984 - DNA, 78 bp, Artificial Sequence
  ENSG00000196177_30 (sequence is synthesized)
gttccaaacttgctttcatatttttggctatcttttcagcaatgccccactctactgttagcatcctcaagattgtga

SEQ ID NO: 700985 - DNA, 86 bp, Artificial Sequence
  ENSG00000196177_31 (sequence is synthesized)
ttggacttacagttccacatggccgcacttcgtacatggtggtggcaagagaaaatgaagaagaagcaaaagtggaaacccctgat

SEQ ID NO: 700986 - DNA, 82 bp, Artificial Sequence
  ENSG00000196177_32 (sequence is synthesized)
attcgatgcagaagataaattcaagttgcaatttcagtggggacatagccaaaccatatcactggtgatgccacttcttcag

SEQ ID NO: 700987 - DNA, 120 bp, Artificial Sequence
  ENSG00000196177_33 (sequence is synthesized)
acatagccaaaccatatcactggtgatgccacttcttcagtattagggattctcagtcagaagagaccccctgtgtggcctgagtcccctcaggaggaaggtggacaacagagaaatgag

SEQ ID NO: 700988 - DNA, 120 bp, Artificial Sequence
  ENSG00000196177_34 (sequence is synthesized)
agttttgatattttctgaaagaggaacatgtgttagagatgaagaatcttccaaggctcatgcagttgcttagaataatcattactgttatatgagaaacattttagtaatttaataaaa

SEQ ID NO: 700989 - DNA, 120 bp, Artificial Sequence
  ENSG00000196177_35 (sequence is synthesized)
ggataatgtttatttaaaaaacctgacttttccagagtaattttgttttgcacattcatgtttattgaagtggactaatttctataatgcaaatcagagttaaatattaaaaattgtgta

SEQ ID NO: 700990 - DNA, 120 bp, Artificial Sequence
  ENSG00000196177_36 (sequence is synthesized)
aatacaattgacataggaattacattaaaatattaggaagaaacaaggacaaatttagaccttgaatccgaagagataaagcttacttgactttcaaatggagagatgatgaaaacccac

SEQ ID NO: 700991 - DNA, 120 bp, Artificial Sequence
  ENSG00000196177_37 (sequence is synthesized)
tcattcactctttcagaacaaaaagacagtcatctgataagagtatgacatggatgaaatgccctacaggggccttggacatctttaatttctgcgattatgtgaaagaggtggacttta

SEQ ID NO: 700992 - DNA, 120 bp, Artificial Sequence
  ENSG00000196177_38 (sequence is synthesized)
cagataatggagcagaagccaacattagtaaaaggaatcccaacttcttcccatagaattagaaacatgtgaaagtacaataaacttcttgttcaaattaccagcatcagagagcttccc

SEQ ID NO: 700993 - DNA, 120 bp, Artificial Sequence
  ENSG00000196177_39 (sequence is synthesized)
atttgcatctagaccttgaatttatatttattgatcaagttctaatttgtatgtatattttgtgcatattcaccaataacagttaaaattaattatgtgttatagttaatatatgcacct

SEQ ID NO: 700994 - DNA, 120 bp, Artificial Sequence
  ENSG00000196177_40 (sequence is synthesized)
accttcttccgttagtgcatcagtaaatgtgttattttgtcatttttccaaagagagtgttgtaggttttccctgtagttcttcctttatagcttttcttctgataaccatgacttcagg

SEQ ID NO: 700995 - DNA, 120 bp, Artificial Sequence
  ENSG00000196177_41 (sequence is synthesized)
agctttaaaactatctatcttgcatttgtgtctggcggagaactagccatcagcctcctgaagcctgccatcattgttaatttgaggactgggctgtcttggggctcagaagataaagaa

SEQ ID NO: 700996 - DNA, 120 bp, Artificial Sequence
  ENSG00000196177_42 (sequence is synthesized)
ctatttgagcagatgtgtgtgggtggcactggattccacccaactgccaagttagtattgttagagatttcattttacaacacaaaaataagcctgtgtcaaagattttaaaatcatgga

SEQ ID NO: 700997 - DNA, 120 bp, Artificial Sequence
  ENSG00000196177_43 (sequence is synthesized)
aagttaaaatctagaaagaccttagagaaccagccaaccaactctctcattttaaaagtgaaggattcatagcacagattacttgcctaagatcatccaggaacgaagacaagaatccaa

SEQ ID NO: 700998 - DNA, 120 bp, Artificial Sequence
  ENSG00000196177_44 (sequence is synthesized)
atgtacttggggacaagaattagtccccaaattcagtgttcttcctagtattaaacattgcccctttcgacaaattttggatttcattcttgttatatttcagtactcttgctgatttat

SEQ ID NO: 700999 - DNA, 120 bp, Artificial Sequence
  ENSG00000196177_45 (sequence is synthesized)
tttaggtttaactggtaaagaatgaacatttcagaagtgttaggattagtcagtgtcatcgcttatgtatatgaatcacttgccaaagacactggctctcctcagctgtaaccagcatgt

SEQ ID NO: 701000 - DNA, 120 bp, Artificial Sequence
  ENSG00000196177_46 (sequence is synthesized)
caaatgtgaagattattgtgtgggatcctttggtttcattgttatgatgtattttataaatgtactagttatatccttgtttatgtatttttgctgatctttcataaagcagaatggtat

SEQ ID NO: 701001 - DNA, 120 bp, Artificial Sequence
  ENSG00000196177_47 (sequence is synthesized)
gtatcggattgttttaatgttatatattggattgtattcgatgttacaaaaccaatattctatggagaatgaaaaaaataaaggactaaattaactggagatttttggtactcttataaa

SEQ ID NO: 701002 - DNA, 120 bp, Artificial Sequence
  ENSG00000196177_48 (sequence is synthesized)
aggggctggctagagacccagaggcgcagagcggagaggcctgcggcgaggatggagggcctggcagtgcggttgctgcgcggcagcagctaagaagaaatttcctgacttgtttgtctt

SEQ ID NO: 701003 - DNA, 120 bp, Artificial Sequence
  ENSG00000196177_49 (sequence is synthesized)
ttagctcgtccgttaggcccccagtaaacatttcctgaataaatgatatctctcagcatgcagattcatgtgaacaatgctctaatttcttaagaaaatggggattctgtgaattaatag

SEQ ID NO: 701004 - DNA, 120 bp, Artificial Sequence
  ENSG00000196177_50 (sequence is synthesized)
gatgttttacagaaatggtatggagaatgggactgaagagacaatgctagtttagaagataactttagtccttccagtgccactaacagtaaatccatgttgctgaaaatgttacccaga

SEQ ID NO: 701005 - DNA, 120 bp, Artificial Sequence
  ENSG00000196182_0 (sequence is synthesized)
cggctcgggtggctgcgctgggaggcggcggtgagaggctcgcacgcctccagcccggccccggccccccgggagggagagccgagcagccccggctctgggctacggactatgggcgaa

SEQ ID NO: 701006 - DNA, 120 bp, Artificial Sequence
  ENSG00000196182_1 (sequence is synthesized)
ggctacggactatgggcgaatagctctgaccacccggcgaagtgcacacacccagaagctatgtccttcggcagtaaaagttttacagcacaatatatgtgctctgctctcctcccgcaa

SEQ ID NO: 701007 - DNA, 120 bp, Artificial Sequence
  ENSG00000196182_2 (sequence is synthesized)
tcctgctccaagagatcttaagctggaggcaccaggtctgaattccagactcctccccaccacccacacttcacctccaactggagcatgaccacagacccattcagggaggctggcgga

SEQ ID NO: 701008 - DNA, 120 bp, Artificial Sequence
  ENSG00000196182_3 (sequence is synthesized)
ctcttcatcctggacagtcccttactgtatgtcaagtagagctgagaatgaagcggagagcatcagacagaggagctggggaaacgtcggccagggccaaggctctaggaagtgggattt

SEQ ID NO: 701009 - DNA, 120 bp, Artificial Sequence
  ENSG00000196182_4 (sequence is synthesized)
ctggaaataatgcaaagagagctggaccattcatccttggtccccgtctgggcaactcaccggtgccaagcatagtgcagtgtttggcgaggaaagatggcacggatgacttctatcagc

SEQ ID NO: 701010 - DNA, 120 bp, Artificial Sequence
  ENSG00000196182_5 (sequence is synthesized)
tgaagatcctgaccctggaggagaggggggaccaaggcatagagagccaggaagagcggcagggcaagatgctgctgcacaccgagtactcactgctgtctctcctgcacacgcaggatg

SEQ ID NO: 701011 - DNA, 120 bp, Artificial Sequence
  ENSG00000196182_6 (sequence is synthesized)
gcgtggtgcaccaccacggcctcttccaggaccgcacctgtgaaatcgttgaggacacagaatccagccggatggttaagaagatgaagaagcgcatctgcctcgtcctggactgcctct

SEQ ID NO: 701012 - DNA, 120 bp, Artificial Sequence
  ENSG00000196182_7 (sequence is synthesized)
gtgctcatgacttcagcgataagaccgctgacctcatcaacctgcagcactacgtcatcaaggagaagaggctcagcgagagggagactgtggtaatcttctacgacgtggtccgcgtgg

SEQ ID NO: 701013 - DNA, 120 bp, Artificial Sequence
  ENSG00000196182_8 (sequence is synthesized)
tggaggccctgcaccagaaaaatatcgtgcacagagacctgaagctggggaacatggtgctcaacaagaggacacatcggataaccatcaccaacttctgcctcgggaagcatctggtga

SEQ ID NO: 701014 - DNA, 120 bp, Artificial Sequence
  ENSG00000196182_9 (sequence is synthesized)
gcgagggggacctgctgaaggaccagagagggagccctgcctacatcagtcccgacgtgctcagcggccggccgtaccgtggcaagcccagtgacatgtgggccctgggcgtggtgctct

SEQ ID NO: 701015 - DNA, 120 bp, Artificial Sequence
  ENSG00000196182_10 (sequence is synthesized)
tcaccatgctgtatggccagttccccttctacgacagcatcccgcaggagctcttccgcaagatcaaggctgccgagtataccattcctgaggatggacgggtttctgagaacaccgtgt

SEQ ID NO: 701016 - DNA, 120 bp, Artificial Sequence
  ENSG00000196182_11 (sequence is synthesized)
gtctcatccggaagctgctggtccttgacccccagcagcgcctggccgccgccgacgtcctggaggccctcagtgccatcattgcatcatggcagtccctgtcatctctgagtgggcctt

SEQ ID NO: 701017 - DNA, 120 bp, Artificial Sequence
  ENSG00000196182_12 (sequence is synthesized)
tgcaagtggttcctgacattgatgaccaaatgagcaatgcggatagctcccaggaggcgaaggtgacggaggagtgctcccagtacgagtttgagaactacatgcgtcagcagctgctgc

SEQ ID NO: 701018 - DNA, 120 bp, Artificial Sequence
  ENSG00000196182_13 (sequence is synthesized)
tggccgaggagaagagctccatccatgacgcccggagctgggtacccaagcggcagttcggcagcgcaccaccggtgcgacggctgggccacgacgcacagcccatgacctccttggaca

SEQ ID NO: 701019 - DNA, 120 bp, Artificial Sequence
  ENSG00000196182_14 (sequence is synthesized)
cggccatcctggcgcagcgctacctgcggaaataacagcctcagccggggccaccagcactgctgccacttcttccagccccagccaaaggcgtggctgtcagggctgggccctgtagtg

SEQ ID NO: 701020 - DNA, 120 bp, Artificial Sequence
  ENSG00000196182_15 (sequence is synthesized)
ctggactctcccgggccacaatagggacagggcagggacagggacagcccaggtcacacgtggggtcagcagaggtaccacgaagctaccttttgggatgattgctcgattgtttggttt

SEQ ID NO: 701021 - DNA, 120 bp, Artificial Sequence
  ENSG00000196182_16 (sequence is synthesized)
ctgagaagcctagataactaatctgcttttaatcacgatgttttaatctacctctgtctctttaaccatgctgtctctggactgagcaagagggaggagggagcctgctcaccccactcc

SEQ ID NO: 701022 - DNA, 120 bp, Artificial Sequence
  ENSG00000196182_17 (sequence is synthesized)
agggccttccccagcggccaccaactgacctggggcgctgctccccacagtccaaataagctgaaagtgcagctcgctgcaggccccagagcgagcttcccctcctccctgctctcccag

SEQ ID NO: 701023 - DNA, 120 bp, Artificial Sequence
  ENSG00000196182_18 (sequence is synthesized)
gcccctgccacagcctctttccgtccctctctttctgatccaggcccctcagtccaagctttggaaaaccttcacctcatcttaaaccgaactcaaatatatttatttttttaccatacc

SEQ ID NO: 701024 - DNA, 120 bp, Artificial Sequence
  ENSG00000196182_19 (sequence is synthesized)
aacttctctcccatctctaggtggctcagtccatggccactccctgcccccagcctggctggacagcaaggaatccacagcccacacgtgagctccctcctcacccccaggcagggaagc

SEQ ID NO: 701025 - DNA, 120 bp, Artificial Sequence
  ENSG00000196182_20 (sequence is synthesized)
ccctcctgccagtccctgtcccctttcagcccaccagtccctctctgctgccggtgatgggaggcctttctagacctggctctttctctcccgtctcagtggcttctctgaggtgctgta

SEQ ID NO: 701026 - DNA, 120 bp, Artificial Sequence
  ENSG00000196182_21 (sequence is synthesized)
cacgcgcgttaacctgttcccttctctatccttccccgtggtactgagctcacgtggactcccagtgcgaaggggcccatgggttgggctgcaggcctggccgtgagcgggggctgcctg

SEQ ID NO: 701027 - DNA, 120 bp, Artificial Sequence
  ENSG00000196182_22 (sequence is synthesized)
cacgctcccctagcctactcttgtgtttaggggatggtgggaacatatcccagtgcccttgcctcataatagatgtggtgactctcccggtagaccctagcaagggtcctccatggtggt

SEQ ID NO: 701028 - DNA, 120 bp, Artificial Sequence
  ENSG00000196182_23 (sequence is synthesized)
gagggactcaggagaattgtagggattgggggaccctgcctgcctggcttgagaacagccctgctgcccttttgagccgagattttgaagtggatgcccgtcttgccagaaatgctgttc

SEQ ID NO: 701029 - DNA, 120 bp, Artificial Sequence
  ENSG00000196182_24 (sequence is synthesized)
tcaccagaatgccccctccccttgcccttactggacttggccctgcctgatgccaagcaaagacccttccccagaggcctaccccccatatgtcctcagagaggctgagtgtcccctcca

SEQ ID NO: 701030 - DNA, 120 bp, Artificial Sequence
  ENSG00000196182_25 (sequence is synthesized)
ggcagtcatgggccctgaggcccctcctgcctggccctgctccccagtggggaggtgactgtgtttcccagagtgtgagccgctctcctccccctaaaaagctgactcactgtgagtgac

SEQ ID NO: 701031 - DNA, 120 bp, Artificial Sequence
  ENSG00000196182_26 (sequence is synthesized)
cttgggcaagttcccaaacctccttgtgcctcagtttccccatctggaaaaaatggggccacctcttgccagcagtagcagggctgcccacgcccctttctccccatgccccatccagca

SEQ ID NO: 701032 - DNA, 120 bp, Artificial Sequence
  ENSG00000196182_27 (sequence is synthesized)
cttgggcgactcatgcctctgcctcagtgggcctgtgggagcctactggagcccagcacttactccccctgagcagcgagcctgcgtctgtctcagctgtccagcgctgagggccagggt

SEQ ID NO: 701033 - DNA, 120 bp, Artificial Sequence
  ENSG00000196182_28 (sequence is synthesized)
cttgtgctgtggggctgggggatgccctcttttctatatttatttcatagaaagtctcctgcgggagcggaaatgcagtccggcctagggctcccagcccttgactgtcctcctgtgagg

SEQ ID NO: 701034 - DNA, 120 bp, Artificial Sequence
  ENSG00000196182_29 (sequence is synthesized)
gcctgaagctgggccagggcccgtcgcagcggagccccctctcagcagcccaccgggtccctccaggctgctgcccgtgcgtggtctttctcctccttttcaaagcaatagccgccgggt

SEQ ID NO: 701035 - DNA, 120 bp, Artificial Sequence
  ENSG00000196182_30 (sequence is synthesized)
ctgcaaagccctgtcagacagactgggcccttccaaggtcaagccatgtgtctgatgacattcctggtgaagcaaaggagaggaggatgggtcagccctcactgggtgtcacacactgag

SEQ ID NO: 701036 - DNA, 120 bp, Artificial Sequence
  ENSG00000196182_31 (sequence is synthesized)
agaagtcctattgtaaagaaacggaaaaagtcacaaaaaagtttgtataaagacatatttttgtactacatggggactcttcctgcatgtcagcaataaaacttcctgatctggaaccac

SEQ ID NO: 701037 - DNA, 120 bp, Artificial Sequence
  ENSG00000196182_32 (sequence is synthesized)
cggatagctcccaggaggtgagttggggagggcagatgggccattacccagccccaagggacaggcttctgggggcaggcagggcaagggcagaggtggcagctacccgcaggccacaga

SEQ ID NO: 701038 - DNA, 120 bp, Artificial Sequence
  ENSG00000196182_33 (sequence is synthesized)
gtttccttggtcttcttccccagccttggggtgggaaagggagacttcagtcctcagcctgagctgcctggggcctgccttgggcttggtgtagctggagatctttggccagagagacct

SEQ ID NO: 701039 - DNA, 120 bp, Artificial Sequence
  ENSG00000196182_34 (sequence is synthesized)
gtgagacagccgagctggagccagtgcccaagtggcccaggccagccctctcagcttcctcctgctgcccaagtcacatttctctgccccctgactcagagttctctctcacccttcctg

SEQ ID NO: 701040 - DNA, 120 bp, Artificial Sequence
  ENSG00000196182_35 (sequence is synthesized)
cttttcatttttcagatgattcatttctccctatttctttcctccccattccctgcactggagaaagtgttgggcctagggtgggggcagagacttgggcaccaggcagcagagggcagg

SEQ ID NO: 701041 - DNA, 120 bp, Artificial Sequence
  ENSG00000196182_36 (sequence is synthesized)
tgatcttagggtgccccctggagggcagggcttggccgagcaacagcattgctgggccctggatattggaaggaccttccctccctggcccaccttggagctccacagtgagcagtgtgc

SEQ ID NO: 701042 - DNA, 120 bp, Artificial Sequence
  ENSG00000196182_37 (sequence is synthesized)
aggtaggaccaggaggggccgtgcctgggagagcctcccagagcctcctggcccccgaggaaagagagttccaatccctacccacctccagcttccaccctttagctgtttggctaaaat

SEQ ID NO: 701043 - DNA, 120 bp, Artificial Sequence
  ENSG00000196182_38 (sequence is synthesized)
catcatcactagcccgcagtgagtgcctaccccgagggcacctcattcagccctcactgcgggcctgcgtggcctgtgttcttagccccatgttacagaagaggaaacagggttagagag

SEQ ID NO: 701044 - DNA, 120 bp, Artificial Sequence
  ENSG00000196182_39 (sequence is synthesized)
gactttcccaaagccacacagcttagaagtagtggagctaagccttgaacccaagtctcatccggaagccctgctgtctcctgtggtgactggcacggggacaccacttcagcttctgtt

SEQ ID NO: 701045 - DNA, 120 bp, Artificial Sequence
  ENSG00000196182_40 (sequence is synthesized)
accatctgcctagaccatcccagggagctcagcatggggccctgcgtatgtggctcctccaggtgctgcgcccccagcccagggcttgctcgtacctcttgacgtgcattagccgcctca

SEQ ID NO: 701046 - DNA, 120 bp, Artificial Sequence
  ENSG00000196182_41 (sequence is synthesized)
gggctcagagaacctttgcgaggggccagacagctaaggcttctgaggtaaagtgacctctcacgcagccagtgagttaggaagcatgagtctgcgtcagtcccgggtccgcagggcggc

SEQ ID NO: 701047 - DNA, 120 bp, Artificial Sequence
  ENSG00000196182_42 (sequence is synthesized)
ctgcaaggggagttgaggttggctggagggggtcagggacccaccctcagcgccactcccacccccggccttgaggcctgagggtgtggtgcctggaagggtgactgcaggagccaggct

SEQ ID NO: 701048 - DNA, 120 bp, Artificial Sequence
  ENSG00000196182_43 (sequence is synthesized)
actatgggcgaatagctctgaccacccggcgaagagaggccccgctcggcagcccctgaaatgcctcattctgagggaagcatgacctctctccctccctgctcacctgcagctttctgg

SEQ ID NO: 701049 - DNA, 120 bp, Artificial Sequence
  ENSG00000196182_44 (sequence is synthesized)
agaacatcagttacttttatatgaagaaaaatacaggaacaggctggagttctgtgtttttgagtccattatggaagggtaaaggctacactcctaagagctgagaatgaagcggagagc

SEQ ID NO: 701050 - DNA, 120 bp, Artificial Sequence
  ENSG00000196182_45 (sequence is synthesized)
cagaagggtggtgataccaacttactattggaggcagtgggcagcgcaggacaggcccagggccgccgaccctggcaatgactgtcaccagctggagggaagagctgagaatgaagcgga

SEQ ID NO: 701051 - DNA, 120 bp, Artificial Sequence
  ENSG00000196184_0 (sequence is synthesized)
tgtgcttctactgctttactgggactatgtgacttttatgcttttatgtttcagatttgggaaccaatccatgaaaagagagaactttactctcatcactgactttgttttccaaggttt

SEQ ID NO: 701052 - DNA, 120 bp, Artificial Sequence
  ENSG00000196184_1 (sequence is synthesized)
ctctagcttccatgagcagcagatcaccctttttggcgtgttccttgcactatacatcttaaccttagcaggcaatatcatcattgtgaccatcatccgaatggatcttcatcttcacac

SEQ ID NO: 701053 - DNA, 120 bp, Artificial Sequence
  ENSG00000196184_2 (sequence is synthesized)
acccatgtacttcttcctgagcatgctgtccacttcagagactgtatatacattggtcattctcccaagaatgctctccagcctcgtaggtatgagccagcccatatcattggcagggtg

SEQ ID NO: 701054 - DNA, 120 bp, Artificial Sequence
  ENSG00000196184_3 (sequence is synthesized)
tgccacacagatgttcttttttgtaacctttggcatcactaactgcttcctgctcacagcaatgggatatgaccgctatgtggccatctgcaaccccctgagatacatggttattatgaa

SEQ ID NO: 701055 - DNA, 120 bp, Artificial Sequence
  ENSG00000196184_4 (sequence is synthesized)
caagaggctgcgtatccaacttgtcctgggggcctgcagcattgggctgattgtagcaataacgcaagtgacatctgtattcaggttacccttctgtgctagaaaggtgccccacttctt

SEQ ID NO: 701056 - DNA, 120 bp, Artificial Sequence
  ENSG00000196184_5 (sequence is synthesized)
gtcaatgaaatcctgactttgattatcagtgtgctggtgcttgttgtacctatgggtctggttttcatttcttatgttctcattatctctacaatcctcaagattgcttcagttgagggc

SEQ ID NO: 701057 - DNA, 120 bp, Artificial Sequence
  ENSG00000196184_6 (sequence is synthesized)
cggaagaaggcttttgccacctgtgcatcccacctcactgtggtcattgtccactacagctgtgcctccattgcctacctcaagcccaagtcagagaacaccagagaacatgaccagctg

SEQ ID NO: 701058 - DNA, 120 bp, Artificial Sequence
  ENSG00000196184_7 (sequence is synthesized)
atctcggtgacctacactgtcatcactcccctactgaaccctgtggtatacaccctgagaaataaagaggtcaaagatgctctgtgcagggctgttggtgggaagttttcctgaccatgt

SEQ ID NO: 701059 - DNA, 120 bp, Artificial Sequence
  ENSG00000196184_8 (sequence is synthesized)
aggaagagttctcctgaggctgtcaacatccacactaggcaggaatatgaggtgtaaactcacaaacacttggctcctagagacctgccccttaaataagaggcaaaagaggaatagcag

SEQ ID NO: 701060 - DNA, 120 bp, Artificial Sequence
  ENSG00000196184_9 (sequence is synthesized)
tttcatacaactgggagtctgaagctttaaataaagttactggatggagtgttatccctatttttggggataaatagacaaacaaggataagatatgcctaaataaaaggccagaaagta

SEQ ID NO: 701061 - DNA, 120 bp, Artificial Sequence
  ENSG00000196184_10 (sequence is synthesized)
tgactatattcctactagtgtgtgtttatgccctgcctgctcagcctcaggtcctgccgtaggcactcttggtcaccttgctcaccttggtcaccctatgcctatccattgtggccaagg

SEQ ID NO: 701062 - DNA, 120 bp, Artificial Sequence
  ENSG00000196184_11 (sequence is synthesized)
gagcctgacatttcaatctttactcctcggcctcctccagcccagctttcccgttgtgcctcagtgctaagcagagtcatatttgggaaccaatccatgaaaagagagaactttactctc

SEQ ID NO: 701063 - DNA, 120 bp, Artificial Sequence
  ENSG00000196184_12 (sequence is synthesized)
ccacctaatgaaggcaatagaaagccccttgagaaaatagaatccaagacacacttaaaatctttttcctataatccctttcttcctatactagagcaccagggcttctgaaactggatt

SEQ ID NO: 701064 - DNA, 120 bp, Artificial Sequence
  ENSG00000196184_13 (sequence is synthesized)
ccctattggagtatgtttatgacatgtcaagtaataagttactgtgtggggagggaaagtggcctcaggattagatagcccaggagaaatagatgttctctcctggatgtgttaatttat

SEQ ID NO: 701065 - DNA, 120 bp, Artificial Sequence
  ENSG00000196184_14 (sequence is synthesized)
attaaagatggtgagcatacacagtttaattagagatgctggcaattctacagtcatcatgacagtgttttgagggcataatctgagatactcctggatcctttcaaatttggctaaatc

SEQ ID NO: 701066 - DNA, 120 bp, Artificial Sequence
  ENSG00000196184_15 (sequence is synthesized)
agaaaacacataatgggcaagagctatgaactagcctctgtgctaggtcctggagaaataaagattaaaaaagctttcttgtctggcttcaggaagctacaagcctagtggtaaaaacaa

SEQ ID NO: 701067 - DNA, 120 bp, Artificial Sequence
  ENSG00000196184_16 (sequence is synthesized)
gcatttgacagtatggtttcagttctttatggtaagtggtgtttacacacaattaaagaagaactcagaaaaagaaagaaaaggaaaggggaagagagagagactgttggagatgttagg

SEQ ID NO: 701068 - DNA, 120 bp, Artificial Sequence
  ENSG00000196184_17 (sequence is synthesized)
gaagtcttaagaggaggggacctgtgatgcaaactgtttttaaaacacaagagattgtctgaatgataagaaagaattccaaagagaagaaacaatgtagctacaggtatgaaagcaaaa

SEQ ID NO: 701069 - DNA, 120 bp, Artificial Sequence
  ENSG00000196184_18 (sequence is synthesized)
ggactgatcaggtaacgaaaaatgattcagttgtgctgactccaggacatggaagaggtggggattgaaggagataaaaccagaagggtaggttggggtcatattctgaaggcctcatat

SEQ ID NO: 701070 - DNA, 81 bp, Artificial Sequence
  ENSG00000196184_19 (sequence is synthesized)
cagaagggtaggttggggtcatattctgaaggcctcatatgccaaattaaggaatttcagctttaacttttttttaaaaaa

SEQ ID NO: 701071 - DNA, 81 bp, Artificial Sequence
  ENSG00000196184_20 (sequence is synthesized)
acagtttttacttttaaatatgggaactacccaggacttaggagaactaggattcagtttgtgaagcatctatatgaattc

SEQ ID NO: 701072 - DNA, 120 bp, Artificial Sequence
  ENSG00000196184_21 (sequence is synthesized)
gagaactaggattcagtttgtgaagcatctatatgaattcttaacatctttatcatacttagctcccctgagatatctaaaaagccatatagggggagggagactttggactgcaagcca

SEQ ID NO: 701073 - DNA, 120 bp, Artificial Sequence
  ENSG00000196184_22 (sequence is synthesized)
aaaagctcatgagtaaaaagaaaatgtgactaaggtattggggagaatacacagaaataattatgtacttaagatgaagctgaatcagactgtcatagagaacatggagtggaggctgtc

SEQ ID NO: 701074 - DNA, 120 bp, Artificial Sequence
  ENSG00000196184_23 (sequence is synthesized)
ccaggactgtcatgtagatttggggtttgagatacagatgagcaccaagggaagaataaggatttgctgtcaaatcagtgactaggctgggcctcagacctggtggcagtatggtctcag

SEQ ID NO: 701075 - DNA, 120 bp, Artificial Sequence
  ENSG00000196184_24 (sequence is synthesized)
ggcacactttctactaggctgaaagtgtggactctttaatcagaaaagcctttgaacgaacaaacaaacaaaacagccgagatccaaaggacacatgtatctgcattccagaccataata

SEQ ID NO: 701076 - DNA, 120 bp, Artificial Sequence
  ENSG00000196184_25 (sequence is synthesized)
gaactactagggcatttttcaggattaacaaggtcaatggcaaaaataaaaccatatctaaagttctctaagaacatcataaggtggctaaaagtaactaagacaagttgttaactgaca

SEQ ID NO: 701077 - DNA, 120 bp, Artificial Sequence
  ENSG00000196184_26 (sequence is synthesized)
agaaaaaaaactgaaaaaagcaaaacattgctggtaaagattttgacaggcattcagtaaacattcatgaaatgtttaccagttattcaataaacattcataaagtatttactatgtgcc

SEQ ID NO: 701078 - DNA, 120 bp, Artificial Sequence
  ENSG00000196184_27 (sequence is synthesized)
agatactatgctagacataaaaaaatcttgaaataagccctgtactatcccttaaatagtttccagtcttgaaagggagatgggtttatgcagaactcaccgtaattcaatgtgatggag

SEQ ID NO: 701079 - DNA, 120 bp, Artificial Sequence
  ENSG00000196187_0 (sequence is synthesized)
agtttcactttgtaacttttaagtggtcggaacacgccccgcgctgctgggtcccgccagacacgccgccgccgcaggaaagtctacagtttggtaccccaggactcgctggtcaggaaa

SEQ ID NO: 701080 - DNA, 120 bp, Artificial Sequence
  ENSG00000196187_1 (sequence is synthesized)
gccctgcaggacatgagtgttaggcccgacgcctggcccttggcagcttgggaggtggctggggctgcttttgcctttgccagagacagctccaactgaggacctctccaacgggcccat

SEQ ID NO: 701081 - DNA, 120 bp, Artificial Sequence
  ENSG00000196187_2 (sequence is synthesized)
ccacagtccttccttcccctagtgtctgggaagacaggcgcgatgatggactccccgttcctggagctgtggcagtccaaggcagtgtccatcagggagcagctgggactcggggaccgg

SEQ ID NO: 701082 - DNA, 120 bp, Artificial Sequence
  ENSG00000196187_3 (sequence is synthesized)
cccaacgactcctattgctacaactcggccaaaaacagcaccgtgctccagggggtcacctttggtggcatccccactgtcctgctcatagacgtcagctgcttcctgttcttaatcttg

SEQ ID NO: 701083 - DNA, 120 bp, Artificial Sequence
  ENSG00000196187_4 (sequence is synthesized)
gtgttttctattataagaagaagattctgggactatggccgcattgccctggtgtcagaagcagacagcgagtccagatttcagagattgtcatcgacttcctcctcaggtcaacaagac

SEQ ID NO: 701084 - DNA, 120 bp, Artificial Sequence
  ENSG00000196187_5 (sequence is synthesized)
tttgaaaatgagctgggatgctgtccctggctgactgccatcttccgtctgcatgatgaccagatcctggaatggtgtggggaggacgccatccactacctgtccttccagaggcacatc

SEQ ID NO: 701085 - DNA, 120 bp, Artificial Sequence
  ENSG00000196187_6 (sequence is synthesized)
atcttcctgttggtggtggtcagctttttgtccctgtgtgtcatcctgcctgtcaacctctcaggggacttgctggacaaagacccgtatagttttgggaggacaacaatagcaaaccta

SEQ ID NO: 701086 - DNA, 120 bp, Artificial Sequence
  ENSG00000196187_7 (sequence is synthesized)
cagactgacaatgacctcctttggctgcacaccatctttgctgtcatttacctcttcctcactgtgggtttcatgcggcaccacactcagtccattaagtacaaagaggagaacctggtg

SEQ ID NO: 701087 - DNA, 120 bp, Artificial Sequence
  ENSG00000196187_8 (sequence is synthesized)
aggcggaccctgttcatcacaggactccccagagatgccaggaaggagactgtggagagccacttccgggacgcgtatcccacgtgtgaggtggttgatgtgcagctgtgctacaacgtg

SEQ ID NO: 701088 - DNA, 120 bp, Artificial Sequence
  ENSG00000196187_9 (sequence is synthesized)
gccaaactgatctacctgtgcaaggagaaaaagaagactgagaagagcctgacctattacacaaacctgcaggtgaagacaggccagcggaccctcatcaaccccaagccctgtggccag

SEQ ID NO: 701089 - DNA, 120 bp, Artificial Sequence
  ENSG00000196187_10 (sequence is synthesized)
ttttgctgctgtgaagtgctgggctgtgagtgggaagacgccatctcttactacacacggatgaaggacaggctgctggagaggatcacagaggaagaacgccacgtccaggaccagccc

SEQ ID NO: 701090 - DNA, 120 bp, Artificial Sequence
  ENSG00000196187_11 (sequence is synthesized)
ctgggaatggccttcgtcaccttccaggagaagtccatggccacctacatcctgaaagatttcaatgcctgcaagtgtcagagccttcagtgcaaaggtgagccccagccgtcctcccat

SEQ ID NO: 701091 - DNA, 120 bp, Artificial Sequence
  ENSG00000196187_12 (sequence is synthesized)
agcagggagctctatacctccaagtggacagtcacctttgctgctgaccctgaggacatctgctggaagaacctctctatccagggcctccgctggtggctacagtggctgggcatcaac

SEQ ID NO: 701092 - DNA, 120 bp, Artificial Sequence
  ENSG00000196187_13 (sequence is synthesized)
ttcaccctcttcctggggctatttttcctgaccacaccctccatcatcctgtccaccatggacaagtttaatgtcaccaaacccatccatgcgctgaataacccgatcatcagccagttc

SEQ ID NO: 701093 - DNA, 120 bp, Artificial Sequence
  ENSG00000196187_14 (sequence is synthesized)
ttccccaccctcctgctctggtccttctcggccctgctcccctccattgtctactactctacactgctggagtctcactggaccaagtcgggggaaaaccagatcatgatgaccaaagtc

SEQ ID NO: 701094 - DNA, 120 bp, Artificial Sequence
  ENSG00000196187_15 (sequence is synthesized)
tacatattcttgatcttcatggtgctgatcctgccctccctgggtctcaccagtctagattttttcttccggtggctctttgacaaaacttcctcggaggcctccatcaggttggagtgc

SEQ ID NO: 701095 - DNA, 120 bp, Artificial Sequence
  ENSG00000196187_16 (sequence is synthesized)
gtcttcctgcctgaccagggtgccttctttgtgaactatgtcatcgcctcggccttcatcggcaatggcatggagctgctgcggctgccaggtctcatcctctataccttccgcatgatc

SEQ ID NO: 701096 - DNA, 120 bp, Artificial Sequence
  ENSG00000196187_17 (sequence is synthesized)
tgtcaagcagaaccaggccttccagtacgagtttggagccatgtatgcatggatgctgtgtgtcttcactgtcatcgtggcctacagcatcacttgtcccatcatcgcgccatttggcct

SEQ ID NO: 701097 - DNA, 120 bp, Artificial Sequence
  ENSG00000196187_18 (sequence is synthesized)
catctacatcctgctcaagcacatggtggaccggcacaacctctacttcgtctacctcccagccaagctggagaaggggatccactttgccgctgtgaaccaggccttggcagcccccat

SEQ ID NO: 701098 - DNA, 120 bp, Artificial Sequence
  ENSG00000196187_19 (sequence is synthesized)
cctgtgcctcttctggctctacttcttttccttcctgcgcctgggtatgaaggcccccgccactctgttcaccttcctggtgctgctgctcaccatcctggtctgcctggctcacacctg

SEQ ID NO: 701099 - DNA, 120 bp, Artificial Sequence
  ENSG00000196187_20 (sequence is synthesized)
ctttggatgcttcaagcacctcagccctctgaactacaaaacagaagagcctgcaagtgacaaaggaagtgaggcagaggcccacatgcccccaccgttcacaccctacgtgcctcggat

SEQ ID NO: 701100 - DNA, 120 bp, Artificial Sequence
  ENSG00000196187_21 (sequence is synthesized)
tctgaacggcttggcctcggagaggacagcactgtctccgcagcagcagcagcagcagacctatggtgccatccacaacatcagcgggactatccctggacagtgcttggcgcagagcgc

SEQ ID NO: 701101 - DNA, 120 bp, Artificial Sequence
  ENSG00000196187_22 (sequence is synthesized)
cacgggcagtgtggctgctgccccccaggaggcctgaggctgggtctcactgctctgaaaagacacaaccagaatggcctggggctcaggcccttggctgagtgggaatgcgttgggact

SEQ ID NO: 701102 - DNA, 120 bp, Artificial Sequence
  ENSG00000196187_23 (sequence is synthesized)
gcccagctgagctatcaggtgcccatcttttctggtcccagcagtggtgaggagagcacaggcaggcctcgcccctcccttgctcacccagtttcccctccggcacaagcttccagctct

SEQ ID NO: 701103 - DNA, 120 bp, Artificial Sequence
  ENSG00000196187_24 (sequence is synthesized)
gcagctggggtgacatccccagtggtttgtcgccaagaccatgtggtggacttttcgccccccaaactgatgagtccgggagaatatatggagagagagatgtaacaaggggaaggcctc

SEQ ID NO: 701104 - DNA, 120 bp, Artificial Sequence
  ENSG00000196187_25 (sequence is synthesized)
ctcccttctgagcacacacacaaccgataaccaaagagatgctgcagtccaggtctgaggtcccgctggcatccagctccctgctccatggccagtccctccccagcccagcagtccctc

SEQ ID NO: 701105 - DNA, 120 bp, Artificial Sequence
  ENSG00000196187_26 (sequence is synthesized)
caggctacatccaggagtaagctatggggaacaggttgggaggtggccagtgctcctgccagctgtgcacacatctctgtatcccgctagagttctgtgtttttgtatcatgttgtcagg

SEQ ID NO: 701106 - DNA, 120 bp, Artificial Sequence
  ENSG00000196187_27 (sequence is synthesized)
gacgctagctgggtcagggttaccccatagcaggcagggacaaggaccactcataatatgcccattggaccacagttaagatccagcctctctcacctcttcagggctgagtgcatgagt

SEQ ID NO: 701107 - DNA, 120 bp, Artificial Sequence
  ENSG00000196187_28 (sequence is synthesized)
ctgcacctccaggcaggctctgtgcagtactcaccccctccgtctgctccctccaaggtgtgggggtgggcagtgctcagggcctcctcggagccaaaggacagcatggtcggcacagag

SEQ ID NO: 701108 - DNA, 120 bp, Artificial Sequence
  ENSG00000196187_29 (sequence is synthesized)
gaaggggtacctgggctgggtgcagggccatcccactgcccttgagctgtggctctggcaggaaggaggggcagcccatccctcttctccctcctggggattctggggaatgggatgcaa

SEQ ID NO: 701109 - DNA, 120 bp, Artificial Sequence
  ENSG00000196187_30 (sequence is synthesized)
cttaagacttctgcctgagaagcctcctccctgctgcctccagggggcaccaaggcacaagcctgtgcagtaggggcgggatgggggtgtggaagagcaggtccaggctcctagcacaac

SEQ ID NO: 701110 - DNA, 120 bp, Artificial Sequence
  ENSG00000196187_31 (sequence is synthesized)
tggcctggggccttggcacctctgtaggccctgcctgtgcctgtccgctggcctggggggcctgggcttatctgggccttctcactcagggactctcttgacgctgacttgcccccgcag

SEQ ID NO: 701111 - DNA, 120 bp, Artificial Sequence
  ENSG00000196187_32 (sequence is synthesized)
tggtggccagtgctgcctctgctccaagctgcccctgcgctgggaggggtgggggcggtgccattggtctggtgcagcatagccctggccagtggcctcatccccagcaggcctcccgtg

SEQ ID NO: 701112 - DNA, 120 bp, Artificial Sequence
  ENSG00000196187_33 (sequence is synthesized)
cctctgccagcaaggaggggccggccagctctgcttgcacagggggccccatgtggggtcagcgcacgctcatgtcactgagttccagccgcttttagagtaaagtcgtttatcatcaaa

SEQ ID NO: 701113 - DNA, 120 bp, Artificial Sequence
  ENSG00000196187_34 (sequence is synthesized)
catggttttggggagggagcagggcggatcttgagcggcaagtgctggagaaagtgcttttctgcatcgacgaaggcacctgaacttgggaaataccacaggagggatggcagctggatg

SEQ ID NO: 701114 - DNA, 120 bp, Artificial Sequence
  ENSG00000196187_35 (sequence is synthesized)
acccgggaccttgagactggatgaatttgcaggcaggaaggggtacggaatcccttgggcttccccagcacttctctctcttacacctatggctttgtatgacagttaattatggacttg

SEQ ID NO: 701115 - DNA, 120 bp, Artificial Sequence
  ENSG00000196187_36 (sequence is synthesized)
ctggctggattatgagccagatgtgggcaggagccctgccctctccagccctgtttcccagcgcctgatgcatagtaggtgtttagtcattgttgaatgaattattgaacaaatatttgt

SEQ ID NO: 701116 - DNA, 120 bp, Artificial Sequence
  ENSG00000196187_37 (sequence is synthesized)
ccagctctgcacccccagctccctgcctgggatcccagccctgatggcaggtggtttccctctcagcaatgacctcctttggctgcacaccatctttgctgtcatttacctcttcctcac

SEQ ID NO: 701117 - DNA, 120 bp, Artificial Sequence
  ENSG00000196187_38 (sequence is synthesized)
tgtgggtttcatgcggcaccacactcagtccattaagtacaaagaggagaacctgtctcctgccatgcaaagaaggctcatagagttgctttggaagtggattctttgtacagcctggaa

SEQ ID NO: 701118 - DNA, 120 bp, Artificial Sequence
  ENSG00000196187_39 (sequence is synthesized)
aggagaggtgggagagaggcctgggttcctggtgggagctgcccatcacctggagcacaggtgtgacctggcagtcaatggagatctccacacatctgcaattctgtgggctgtgatgct

SEQ ID NO: 701119 - DNA, 120 bp, Artificial Sequence
  ENSG00000196187_40 (sequence is synthesized)
aggcaagtttgtgaattaatggcagagaaggaatcctggtccccctgggtattttaacctgcatatttgaaactgttgaggagatagagtcttgtctcgattcatggccatcccccttgg

SEQ ID NO: 701120 - DNA, 120 bp, Artificial Sequence
  ENSG00000196187_41 (sequence is synthesized)
tttcagttccctgctctctttccttctctgcatatttaatgcctgccctacgtgcctcggattctgaacggcttggcctcggagaggacagcactgtctccgcagcagcagcagcagcag

SEQ ID NO: 701121 - DNA, 120 bp, Artificial Sequence
  ENSG00000196187_42 (sequence is synthesized)
catctgagagaataattgttccctctgagctcttggggacctaagatttggtctttctgtagttgaaggtcagtgcagagaacttgcccccaggctagtctcttggtctgcctaaatctg

SEQ ID NO: 701122 - DNA, 120 bp, Artificial Sequence
  ENSG00000196187_43 (sequence is synthesized)
accttctgacccacctaagccacgagcactgggagacaagcctcgagacctgtatcccctctcccgctgcaggaagaacctctctatccagggcctccgctggtggctacagtggctggg

SEQ ID NO: 701123 - DNA, 120 bp, Artificial Sequence
  ENSG00000196187_44 (sequence is synthesized)
cagtctcctgccatgcaaagaaggctcatagagttgctttggaagtggattctttgtacagcctggaagaagacgctgtgtaaatgacatgctttgggggctcccccggccacagaagga

SEQ ID NO: 701124 - DNA, 120 bp, Artificial Sequence
  ENSG00000196187_45 (sequence is synthesized)
gaaaactggagccttctgatttcctgttgtttactttccagaggctggagttgggtaggaaacctgagcataccggcacactggcttgtgggtgacttctctccctgctgtatttcccgg

SEQ ID NO: 701125 - DNA, 120 bp, Artificial Sequence
  ENSG00000196187_46 (sequence is synthesized)
accaacacagccccacccgcagggcgagcaccttaggtgagcgccttctgtctctcgcttgggtatccaggtgagatctgagaaggacctggccctgccacacgtgtatggagtggctcc

SEQ ID NO: 701126 - DNA, 120 bp, Artificial Sequence
  ENSG00000196187_47 (sequence is synthesized)
tgtgtgccagccctgctggtgctgtgcagtgaatagcgccctggtggcctatcctcttcaagcagcctgtgcacagtgtccagagcacagaccagggtgtaggtgcgaataaacgtcttg

SEQ ID NO: 701127 - DNA, 120 bp, Artificial Sequence
  ENSG00000196187_48 (sequence is synthesized)
agagcatacgggggaaaaaattgttgaccccggggttcttagcatcacctttgcagaataagagagacgtgagctgagcatttgtatggacccacagggctagggtctcacaggtggaag

SEQ ID NO: 701128 - DNA, 120 bp, Artificial Sequence
  ENSG00000196187_49 (sequence is synthesized)
gacctcggggccatctctgcgtttgttcgtttgtccacccactgagcgggtgtctgttgagtgagcactgtgtctgagtccaggctctccctggtagaacctcctttccagcggctccct

SEQ ID NO: 701129 - DNA, 120 bp, Artificial Sequence
  ENSG00000196187_50 (sequence is synthesized)
ttgagtatctgcaccaccaattcctgcagatggaggctggaggaaagtctttcctgtgaggagattacgtgtgcagccagggatgcggggaaaggcccagagcatcaggaaaggtggcgg

SEQ ID NO: 701130 - DNA, 120 bp, Artificial Sequence
  ENSG00000196187_51 (sequence is synthesized)
tggggtgcaggggggcagggcaagcagtccgggaaggctcccaggaccccatgctggaggacctgaaggctgggctgaggagctgacattttattctttcttcattcctttttttgtaat

SEQ ID NO: 701131 - DNA, 78 bp, Artificial Sequence
  ENSG00000196187_52 (sequence is synthesized)
ttcagtagtgcaataatagcttactgcggcctcaactcctggacttaaggcatcttcctgcctcagcctcccaagtag

SEQ ID NO: 701132 - DNA, 120 bp, Artificial Sequence
  ENSG00000196187_53 (sequence is synthesized)
caggcgtgagccaccatgcccggcctctcttcattccttatcaatacagcagccactaatttgttgcatggactaggagttggctgcactttaactttgcactatttgtgaagaaagcac

SEQ ID NO: 701133 - DNA, 120 bp, Artificial Sequence
  ENSG00000196187_54 (sequence is synthesized)
aactttgcactatttgtgaagaaagcacttgctaagcaaattgctagacaggatcgtaaactgaatgtttaaaatttgaaaaacttcttcagaaactctaagtattttagaaatatttac

SEQ ID NO: 701134 - DNA, 120 bp, Artificial Sequence
  ENSG00000196187_55 (sequence is synthesized)
taatatgtaaatactcaataccagaatcatttttctgtatttccttgaagcaactcctcaaagttgcctgctaggcaacacctggaaacagtaattccacttaatgtataactttaaaga

SEQ ID NO: 701135 - DNA, 120 bp, Artificial Sequence
  ENSG00000196187_56 (sequence is synthesized)
gaaaaaaaaagtctcctcattctcatacaaacattgcatgactcatgctttcccctattttaagaggcctttttagtgaatgctgttgcagtccgtggggattgatgtatgaatttgcct

SEQ ID NO: 701136 - DNA, 120 bp, Artificial Sequence
  ENSG00000196187_57 (sequence is synthesized)
ttcaagcagggatgcttaaattgcagttttcttcctcacagctcttattgagaccagaaattgtcctactgtttaatttcatgattgatatacctatgggctgtctctctcactaaaatg

SEQ ID NO: 701137 - DNA, 120 bp, Artificial Sequence
  ENSG00000196187_58 (sequence is synthesized)
taagcacatccaggccctgttaccagcacctagaacagtgcctggcaggtggtaggtggggatttacatggttctggaatcccctggaattgtatgtataattttgcgtgtatggtgagg

SEQ ID NO: 701138 - DNA, 120 bp, Artificial Sequence
  ENSG00000196187_59 (sequence is synthesized)
gggtattgcatggtggccatgagcattgaccttggagccaggttgcctgtattcacctcctggctcagacactcactagctgtgtgatcttgggcacaagccacttacctctgtcggcct

SEQ ID NO: 701139 - DNA, 120 bp, Artificial Sequence
  ENSG00000196187_60 (sequence is synthesized)
cagtttactcatctgtaaaatggggacaaaacctcacaggttatgatgaggattaaataaataaatatatgtaacaatacctggtcaatagtgagtatgtattttgctgggtgacagagt

SEQ ID NO: 701140 - DNA, 120 bp, Artificial Sequence
  ENSG00000196187_61 (sequence is synthesized)
gagaccctgtctctaaacaaaacaaaacaaaacaaaagccctctttgtattaaatttcaaaatttcccccttttggaggataaaagacaaagagaagagaggtctccgctggcacagaaa

SEQ ID NO: 701141 - DNA, 120 bp, Artificial Sequence
  ENSG00000196187_62 (sequence is synthesized)
ccagcagcgagatcactctgccatcctttcccttggatccgtgggcacgtctcctgcttggggtgttttcttttccaacggtgtcttttgcctccttctctccctggccacagggacgcg

SEQ ID NO: 701142 - DNA, 120 bp, Artificial Sequence
  ENSG00000196187_63 (sequence is synthesized)
actccctgttcccctccagataactcactgtccctctcgagtggagatggtactgctgacccaccatccctgggatttatctgtggtgtttccttctcctccctcagctacccacactca

SEQ ID NO: 701143 - DNA, 120 bp, Artificial Sequence
  ENSG00000196187_64 (sequence is synthesized)
ctttcagccagcccagcccatgtttgtgtaacaggcggtgggggtgtgggcagcagccacggagtgggtgattctggctgaccccctcgagctgatgtggcctggccccactgctgggct

SEQ ID NO: 701144 - DNA, 120 bp, Artificial Sequence
  ENSG00000196187_65 (sequence is synthesized)
cttccctgctgccctggacccatcctgttggcttcatgtgccagccttgccccaggggagatggaggcaccctcctttcagacatctgctctgggccacagatccttctgtctgtggctc

SEQ ID NO: 701145 - DNA, 120 bp, Artificial Sequence
  ENSG00000196187_66 (sequence is synthesized)
cccaccttcccacaaatgcaaagctgtggggaagacccctggggcacgctggggcgctcactgcagtggggagcttgaccctggggagtggcttttcacagtggcccttggcatgggact

SEQ ID NO: 701146 - DNA, 120 bp, Artificial Sequence
  ENSG00000196187_67 (sequence is synthesized)
ctaggctctcatgcctgtggtctcagtgtcatctcgccttaggagcagcacagggtgggtcgggagaggggtgtggaaaggtgtccagccactgccccaggcattgtgacactaggaatg

SEQ ID NO: 701147 - DNA, 120 bp, Artificial Sequence
  ENSG00000196187_68 (sequence is synthesized)
gactcacacaggacttcctgcctccttgcagacactggggcaggaggaaaggggaaggcatctgaggcaggagtagaggggctgctgggctccttacgggaggttaaaggaggaaaagct

SEQ ID NO: 701148 - DNA, 120 bp, Artificial Sequence
  ENSG00000196187_69 (sequence is synthesized)
gtgacctgttgagatggtgagggtcgaggtgggagccctgaggagggaagcttgggaacaggcaatgtgtaacgtggtctattgctacacttgggcctggggaaaaagtgacagaatgaa

SEQ ID NO: 701149 - DNA, 120 bp, Artificial Sequence
  ENSG00000196187_70 (sequence is synthesized)
aagttgagccactggcctggcagtagcactgatcagagctccagcttaacaggcagggtggagggggatggccctatggaagagcagtgtgttgccctcagtttccttatctgtaaaatg

SEQ ID NO: 701150 - DNA, 120 bp, Artificial Sequence
  ENSG00000196187_71 (sequence is synthesized)
ggaatcgtactccctttgttgctggtggttgcgaggattaaacaaaattctccacacactgtgctagcgtggcacctcttacatagcgttactcataatacactaatcacaacaaagcaa

SEQ ID NO: 701151 - DNA, 120 bp, Artificial Sequence
  ENSG00000196187_72 (sequence is synthesized)
aggtcctatgccactgcctcccactcctactcagtccccacttgccacatgtgtgcttggtaacctgagtagcctgggcctggctgttgctacatttccttgcagcatcctgaaagattt

SEQ ID NO: 701152 - DNA, 120 bp, Artificial Sequence
  ENSG00000196187_73 (sequence is synthesized)
ttctgcatctaattttaaatttcctaatagccatgctaaaaaagtaaaaagaaacagttgaaattaattttaataatgtatctcgcccaatatatccaaactgttatttcaacatgcaat

SEQ ID NO: 701153 - DNA, 120 bp, Artificial Sequence
  ENSG00000196187_74 (sequence is synthesized)
ttttgaaaaatgtgagatgttttacattctctttttcacacttagtcttcaatatctggtgtgtattttacacttctagcacctctcaattcacaccagccacatttaaaatgctcagta

SEQ ID NO: 701154 - DNA, 120 bp, Artificial Sequence
  ENSG00000196187_75 (sequence is synthesized)
gccgcatgcagcttgtgcagccttacttaggtccagtgtcagcctggggccgtgctggggagctgagctgtgtccatgggggccctggtgagcctccagtgctgtgctgagggtaagggc

SEQ ID NO: 701155 - DNA, 120 bp, Artificial Sequence
  ENSG00000196187_76 (sequence is synthesized)
acccagcgcaagccccagcgcagctgcctgtccagccctgcctcagctccttgcacagaatgagcttgaagtgctcccctctgctcggttctagttctgcctctgacagttttgctcttt

SEQ ID NO: 701156 - DNA, 120 bp, Artificial Sequence
  ENSG00000196187_77 (sequence is synthesized)
ggttcacaaggcttcctaaactcaggattgctttgtgggtctgttctttgggatgagaggccagggcaggtgcaagctatgccttcactcctttgtccctgccttcctccttcctgtacc

SEQ ID NO: 701157 - DNA, 120 bp, Artificial Sequence
  ENSG00000196187_78 (sequence is synthesized)
ccagctacagccccgttgggaagaatgtgtcgttagtcacaaagcattgcagatgtgtctaagaaatgccacgctggggccgggcgtggtgctcacacctgtaatcccagcacttcgaga

SEQ ID NO: 701158 - DNA, 120 bp, Artificial Sequence
  ENSG00000196187_79 (sequence is synthesized)
aaaaaaacagtttcctggtggattgtttcaagatttggacagttactggtgctaagtaaagaaatttgggttgagagcagccctttctctttgccgcccacagcttcacaggggagggga

SEQ ID NO: 701159 - DNA, 120 bp, Artificial Sequence
  ENSG00000196187_80 (sequence is synthesized)
gagaactgctctcttgtgcttccttctgtgatcatgagaactgtataactgtgctttctcttttgccctggctgctaggaaattctgcaggtgtcatattttcggtcttaatgtcctaaa

SEQ ID NO: 701160 - DNA, 120 bp, Artificial Sequence
  ENSG00000196187_81 (sequence is synthesized)
tggatgtcggtgtttcttcatatgtcctttatggccactgtctgtgtcctgttgggagaagggcaggaggggagggatgcagtgtggaagctcatgcctgtccaggccaagcacaaatcc

SEQ ID NO: 701161 - DNA, 120 bp, Artificial Sequence
  ENSG00000196188_0 (sequence is synthesized)
agactgggctgggcaggtctgagagttagggaaagtccgttcccactgccctcggggagagaagaaaggagggggcaagggagaagctgctggtcggactcacaatgaaaacgctccttc

SEQ ID NO: 701162 - DNA, 120 bp, Artificial Sequence
  ENSG00000196188_1 (sequence is synthesized)
ttttgctgctggtgctcctggagctgggagaggcccaaggatcccttcacagggtgcccctcaggaggcatccgtccctcaagaagaagctgcgggcacggagccagctctctgagttct

SEQ ID NO: 701163 - DNA, 120 bp, Artificial Sequence
  ENSG00000196188_2 (sequence is synthesized)
ggaaatcccataatttggacatgatccagttcaccgagtcctgctcaatggaccagagtgccaaggaacccctcatcaactacttggatatggaatacttcggcactatctccattggct

SEQ ID NO: 701164 - DNA, 120 bp, Artificial Sequence
  ENSG00000196188_3 (sequence is synthesized)
ccccaccacagaacttcactgtcatcttcgacactggctcctccaacctctgggtcccctctgtgtactgcactagcccagcctgcaagacgcacagcaggttccagccttcccagtcca

SEQ ID NO: 701165 - DNA, 120 bp, Artificial Sequence
  ENSG00000196188_4 (sequence is synthesized)
gcacatacagccagccaggtcaatctttctccattcagtatggaaccgggagcttgtccgggatcattggagccgaccaagtctctgtggaaggactaaccgtggttggccagcagtttg

SEQ ID NO: 701166 - DNA, 120 bp, Artificial Sequence
  ENSG00000196188_5 (sequence is synthesized)
gagaaagtgtcacagagccaggccagacctttgtggatgcagagtttgatggaattctgggcctgggatacccctccttggctgtgggaggagtgactccagtatttgacaacatgatgg

SEQ ID NO: 701167 - DNA, 120 bp, Artificial Sequence
  ENSG00000196188_6 (sequence is synthesized)
ctcagaacctggtggacttgccgatgttttctgtctacatgagcagtaacccagaaggtggtgcggggagcgagctgatttttggaggctacgaccactcccatttctctgggagcctga

SEQ ID NO: 701168 - DNA, 120 bp, Artificial Sequence
  ENSG00000196188_7 (sequence is synthesized)
attgggtcccagtcaccaagcaagcttactggcagattgcactggataacatccaggtgggaggcactgttatgttctgctccgagggctgccaggccattgtggacacagggacttccc

SEQ ID NO: 701169 - DNA, 120 bp, Artificial Sequence
  ENSG00000196188_8 (sequence is synthesized)
tcatcactggcccttccgacaagattaagcagctgcaaaacgccattggggcagcccccgtggatggagaatatgctgtggagtgtgccaaccttaacgtcatgccggatgtcaccttca

SEQ ID NO: 701170 - DNA, 120 bp, Artificial Sequence
  ENSG00000196188_9 (sequence is synthesized)
tcgtggatggaatgcagttctgcagcagtggctttcaaggacttgacatccaccctccagctgggcccctctggatcctgggggatgtcttcattcgacagttttactcagtctttgacc

SEQ ID NO: 701171 - DNA, 120 bp, Artificial Sequence
  ENSG00000196188_10 (sequence is synthesized)
gtgggaataaccgtgtgggactggccccagcagtcccctaaggaggggccttgtgtctgtgcctgcctgtctgacagaccttgaatatgttaggctggggcattctttacacctacaaaa

SEQ ID NO: 701172 - DNA, 120 bp, Artificial Sequence
  ENSG00000196188_11 (sequence is synthesized)
agttattttccagagaatgtagctgtttccagggttgcaacttgaattaagaccaaacagaacatgagaatacacacacacacacacatatacacacacacacacttcacacatacacac

SEQ ID NO: 701173 - DNA, 120 bp, Artificial Sequence
  ENSG00000196188_12 (sequence is synthesized)
cactcccaccaccgtcatgatggaggaattacgttatacattcatattttgtattgatttttgattatgaaaatcaaaaattttcacatttgattatgaaaatctccaaacatatgcaca

SEQ ID NO: 701174 - DNA, 120 bp, Artificial Sequence
  ENSG00000196188_13 (sequence is synthesized)
agcagagatcatggtataataaatccctttgcaactccactcagccctgacaacccatccacacacggccaggcctgtttatctacactgctgcccactcctctctccagctccacatgc

SEQ ID NO: 701175 - DNA, 120 bp, Artificial Sequence
  ENSG00000196188_14 (sequence is synthesized)
tgtacctggatcattctgaagcaaattccgagcattacatcattttgtccataaatatttctaacatccttaaatatacaatcggaattcaagcatctcccattgtcccacaaatgtttg

SEQ ID NO: 701176 - DNA, 120 bp, Artificial Sequence
  ENSG00000196188_15 (sequence is synthesized)
gctgtttttgtagttggattgtttgtattaggattcaagcaaggcccatatattgcatttatttgaaatgtctgtaagtctctttccatctacagagtttagcacatttgaacgttgctg

SEQ ID NO: 701177 - DNA, 120 bp, Artificial Sequence
  ENSG00000196188_16 (sequence is synthesized)
gttgaaatcccgaggtgtcatttgacatggttctctgaacttatctttcctataaaatggtagttagatctggaggtctgattttgtggcaaaaatacttcctaggtggtgctgggtact

SEQ ID NO: 701178 - DNA, 120 bp, Artificial Sequence
  ENSG00000196188_17 (sequence is synthesized)
tcttgttgcatcctgtcaggaggcagataatgctggtgcctctctattggtaatgttaagactgctgggtgggtttggagttcttggctttaatcattcattacaaagttcagcatttta

SEQ ID NO: 701179 - DNA, 120 bp, Artificial Sequence
  ENSG00000196188_18 (sequence is synthesized)
ctatttggtccccagttaggccacatctgtagctagagggaaatgtagttgttcattagggaggggcatcaccaggcttctaggggcccccactcagtgttgagagctgagggaagagac

SEQ ID NO: 701180 - DNA, 120 bp, Artificial Sequence
  ENSG00000196188_19 (sequence is synthesized)
cctgccgctgtggggctgggtggcattagggcagggatgcagccagtgagccgatggcataagcaagagcagtgcacttctttccagagacgcacagcaggttccagccttcccagtcca

SEQ ID NO: 701181 - DNA, 120 bp, Artificial Sequence
  ENSG00000196188_20 (sequence is synthesized)
caagaagcagaaacacattcacaaatggtcaaggggagttgtttctaaccttgtgtcaaaaaggcccagaccaattcacttgcagtagtcagagtcccggtctcaaagcccagactgatg

SEQ ID NO: 701182 - DNA, 120 bp, Artificial Sequence
  ENSG00000196189_0 (sequence is synthesized)
gggctgaggcactgagagaccggaaagcctggcattccagagggagggaaacgcagcggcatccccaggctccagagctccctggtgacagtctgtggctgagcatggccctcccagccc

SEQ ID NO: 701183 - DNA, 120 bp, Artificial Sequence
  ENSG00000196189_1 (sequence is synthesized)
tgggcctggacccctggagcctcctgggccttttcctcttccaactgcttcagctgctgctgccgacgacgaccgcggggggaggcgggcaggggcccatgcccagggtcagatactatg

SEQ ID NO: 701184 - DNA, 120 bp, Artificial Sequence
  ENSG00000196189_2 (sequence is synthesized)
caggggatgaacgtagggcacttagcttcttccaccagaagggcctccaggattttgacactctgctcctgagtggtgatggaaatactctctacgtgggggctcgagaagccattctgg

SEQ ID NO: 701185 - DNA, 120 bp, Artificial Sequence
  ENSG00000196189_3 (sequence is synthesized)
ccttggatatccaggatccaggggtccccaggctaaagaacatgataccgtggccagccagtgacagaaaaaagagtgaatgtgcctttaagaagaagagcaatgagacacagtgtttca

SEQ ID NO: 701186 - DNA, 120 bp, Artificial Sequence
  ENSG00000196189_4 (sequence is synthesized)
acttcatccgtgtcctggtttcttacaatgtcacccatctctacacctgcggcaccttcgccttcagccctgcttgtaccttcattgaacttcaagattcctacctgttgcccatctcgg

SEQ ID NO: 701187 - DNA, 120 bp, Artificial Sequence
  ENSG00000196189_5 (sequence is synthesized)
aggacaaggtcatggagggaaaaggccaaagcccctttgaccccgctcacaagcatacggctgtcttggtggatgggatgctctattctggtactatgaacaacttcctgggcagtgagc

SEQ ID NO: 701188 - DNA, 120 bp, Artificial Sequence
  ENSG00000196189_6 (sequence is synthesized)
ccatcctgatgcgcacactgggatcccagcctgtcctcaagaccgacaacttcctccgctggctgcatcatgacgcctcctttgtggcagccatcccttcgacccaggtcgtctacttct

SEQ ID NO: 701189 - DNA, 120 bp, Artificial Sequence
  ENSG00000196189_7 (sequence is synthesized)
tcttcgaggagacagccagcgagtttgacttctttgagaggctccacacatcgcgggtggctagagtctgcaagaatgacgtgggcggcgaaaagctgctgcagaagaagtggaccacct

SEQ ID NO: 701190 - DNA, 120 bp, Artificial Sequence
  ENSG00000196189_8 (sequence is synthesized)
tcctgaaggcccagctgctctgcacccagccggggcagctgcccttcaacgtcatccgccacgcggtcctgctccccgccgattctcccacagctccccacatctacgcagtcttcacct

SEQ ID NO: 701191 - DNA, 120 bp, Artificial Sequence
  ENSG00000196189_9 (sequence is synthesized)
cccagtggcaggttggcgggaccaggagctctgcggtttgtgccttctctctcttggacattgaacgtgtctttaaggggaaatacaaagagttgaacaaagaaacttcacgctggacta

SEQ ID NO: 701192 - DNA, 120 bp, Artificial Sequence
  ENSG00000196189_10 (sequence is synthesized)
cttataggggccctgagaccaacccccggccaggcagttgctcagtgggcccctcctctgataaggccctgaccttcatgaaggaccatttcctgatggatgagcaagtggtggggacgc

SEQ ID NO: 701193 - DNA, 120 bp, Artificial Sequence
  ENSG00000196189_11 (sequence is synthesized)
ccctgctggtgaaatctggcgtggagtatacacggcttgcagtggagacagcccagggccttgatgggcacagccatcttgtcatgtacctgggaaccaccacagggtcgctccacaagg

SEQ ID NO: 701194 - DNA, 120 bp, Artificial Sequence
  ENSG00000196189_12 (sequence is synthesized)
ctgtggtaagtggggacagcagtgctcatctggtggaagagattcagctgttccctgaccctgaacctgttcgcaacctgcagctggcccccacccagggtgcagtgtttgtaggcttct

SEQ ID NO: 701195 - DNA, 120 bp, Artificial Sequence
  ENSG00000196189_13 (sequence is synthesized)
gtgccccgagccaactgtagtgtctatgagagctgtgtggactgtgtccttgcccgggacccccactgtgcctgggaccctgagtcccgaacctgttgcctcctgtctgcccccaacctg

SEQ ID NO: 701196 - DNA, 120 bp, Artificial Sequence
  ENSG00000196189_14 (sequence is synthesized)
aactcctggaagcaggacatggagcgggggaacccagagtgggcatgtgccagtggccccatgagcaggagccttcggcctcagagccgcccgcaaatcattaaagaagtcctggctgtc

SEQ ID NO: 701197 - DNA, 120 bp, Artificial Sequence
  ENSG00000196189_15 (sequence is synthesized)
cccaactccatcctggagctcccctgcccccacctgtcagccttggcctcttattattggagtcatggcccagcagcagtcccagaagcctcttccactgtctacaatggctccctcttg

SEQ ID NO: 701198 - DNA, 120 bp, Artificial Sequence
  ENSG00000196189_16 (sequence is synthesized)
ctgatagtgcaggatggagttgggggtctctaccagtgctgggcaactgagaatggcttttcataccctgtgatctcctactgggtggacagccaggaccagaccctggccctggatcct

SEQ ID NO: 701199 - DNA, 120 bp, Artificial Sequence
  ENSG00000196189_17 (sequence is synthesized)
gaactggcaggcatcccccgggagcatgtgaaggtcccgttgaccagggtcagtggtggggccgccctggctgcccagcagtcctactggccccactttgtcactgtcactgtcctcttt

SEQ ID NO: 701200 - DNA, 120 bp, Artificial Sequence
  ENSG00000196189_18 (sequence is synthesized)
gccttagtgctttcaggagccctcatcatcctcgtggcctccccattgagagcactccgggctcggggcaaggttcagggctgtgagaccctgcgccctggggagaaggccccgttaagc

SEQ ID NO: 701201 - DNA, 120 bp, Artificial Sequence
  ENSG00000196189_19 (sequence is synthesized)
agagagcaacacctccagtctcccaaggaatgcaggacctctgccagtgatgtggacgctgacaacaactgcctaggcactgaggtagcttaaactctaggcacaggccggggctgcggt

SEQ ID NO: 701202 - DNA, 120 bp, Artificial Sequence
  ENSG00000196189_20 (sequence is synthesized)
gcaggcacctggccatgctggctgggcggcccaagcacagccctgactaggatgacagcagcacaaaagaccacctttctcccctgagaggagcttctgctactctgcatcactgatgac

SEQ ID NO: 701203 - DNA, 120 bp, Artificial Sequence
  ENSG00000196189_21 (sequence is synthesized)
actcagcagggtgatgcacagcagtctgcctcccctatgggactcccttctaccaagcacatgagctctctaacagggtgggggctacccccagacctgctcctacactgatattgaaga

SEQ ID NO: 701204 - DNA, 120 bp, Artificial Sequence
  ENSG00000196189_22 (sequence is synthesized)
acctggagaggatccttcagttctggccattccagggaccctccagaaacacagtgtttcaagagaccctaaaaaacctgcctgtcccaggaccctatggtaatgaacaccaaacatcta

SEQ ID NO: 701205 - DNA, 120 bp, Artificial Sequence
  ENSG00000196189_23 (sequence is synthesized)
aacaatcatatgctaacatgccactcctggaaactccactctgaagctgccgctttggacaccaacactcccttctcccagggtcatgcagggatctgctccctcctgcttcccttacca

SEQ ID NO: 701206 - DNA, 120 bp, Artificial Sequence
  ENSG00000196189_24 (sequence is synthesized)
gtcgtgcaccgctgactcccaggaagtctttcctgaagtctgaccacctttcttcttgcttcagttggggcagactctgatcccttctgccctggcagaatggcaggggtaatctgagcc

SEQ ID NO: 701207 - DNA, 120 bp, Artificial Sequence
  ENSG00000196189_25 (sequence is synthesized)
ttcttcactcctttaccctagctgaccccttcacctctccccctcccttttcctttgttttgggattcagaaaactgcttgtcagagactgtttattttttattaaaaatataaggctta

SEQ ID NO: 701208 - DNA, 120 bp, Artificial Sequence
  ENSG00000196189_26 (sequence is synthesized)
aggatgatgaaagtgagaccgtcttagggcccttccagatagggaaccttctctgccccaatgccccacccctgccaccaatacacacgcttctgctgcctggggctctcctattggtcc

SEQ ID NO: 701209 - DNA, 120 bp, Artificial Sequence
  ENSG00000196189_27 (sequence is synthesized)
agtgctggctttggcatgatgggcacctggagggccgcactcccgttccagccaggctgagccttctgtcccctgcctctggggcctgggaaccccccttcttctttctcctgaatggca

SEQ ID NO: 701210 - DNA, 120 bp, Artificial Sequence
  ENSG00000196189_28 (sequence is synthesized)
agactctgctggaagtcttggacgcctgggttagggtctccacttctgggctggggcaagagaagaaaccactgctaggctggttatactggctgtgacatgatggagaggcaggggaat

SEQ ID NO: 701211 - DNA, 120 bp, Artificial Sequence
  ENSG00000196189_29 (sequence is synthesized)
cgctgaaatgacctagaagggcctcttaaactttctggttggaccgagcagaggagggagagagaggtgtgtctcttgtgagagctccctggtgacagtctgtggctgagcatggccctc

SEQ ID NO: 701212 - DNA, 120 bp, Artificial Sequence
  ENSG00000196189_30 (sequence is synthesized)
acacgggacttgacgccagtgaggccccagctcgtgagcggaggcaggaattgacatgagccagcacctactcagcactttcacataggaaggcattaaatcgtcaccacctctcaggaa

SEQ ID NO: 701213 - DNA, 120 bp, Artificial Sequence
  ENSG00000196189_31 (sequence is synthesized)
cacagccagaaacagaagtccaaaaggaaagaaaagccactggagagcagattgaggaaaacaggtggccacggggccaggggcacgcttcttccagttctccatgttggtaatttttct

SEQ ID NO: 701214 - DNA, 120 bp, Artificial Sequence
  ENSG00000196189_32 (sequence is synthesized)
ttccttccttaaatatcactgtcaccaagctgggcacctcaaactcctaactgcttcacactcccaggtaccccaaagtcaaggcccatgctagaagaccatatgtggacccggtgaccc

SEQ ID NO: 701215 - DNA, 120 bp, Artificial Sequence
  ENSG00000196189_33 (sequence is synthesized)
ggagctcgccaggcccatgccaaccacatagatcatgctggaccataccatgtccaggaccatgggatggctggttggagaatgggccctggaacccacacacaagcacagcttggctgg

SEQ ID NO: 701216 - DNA, 120 bp, Artificial Sequence
  ENSG00000196189_34 (sequence is synthesized)
tttcttactgagactgtggaggctgctggccccctcacctccagggagaagactcaggaaaggatgtagacactgtaggagttgtaggtgactgggcatggctgtgtctttagcatcttt

SEQ ID NO: 701217 - DNA, 120 bp, Artificial Sequence
  ENSG00000196189_35 (sequence is synthesized)
ctggggcaattggtaaaagaaatgtatattgctcattgatgcagagacctcctctgtgttggatgctgggcgcacaaacacggataagcctcagcccctgccctcaaggtgttcacagtc

SEQ ID NO: 701218 - DNA, 120 bp, Artificial Sequence
  ENSG00000196189_36 (sequence is synthesized)
acaagggggaagacatgagcaatcagaccatcaatacagggtgatctgttcagcaactgaggggtttatggcagctctgggggaggcctggcctccaggagatgctcctccctgaggctg

SEQ ID NO: 701219 - DNA, 120 bp, Artificial Sequence
  ENSG00000196189_37 (sequence is synthesized)
gcccttccatcccgcagccacaccagattccccaacttctcccctctgtactgtgtaagattccctgagcctgcaaaggtatcaattagctagtcagctttctaactaatgcaacagtgc

SEQ ID NO: 701220 - DNA, 120 bp, Artificial Sequence
  ENSG00000196189_38 (sequence is synthesized)
aagtgctaatgagagaggatctgaggagctccttcctccttgccgatgtgccagtgggacaggaaaatacacccccacccaccccaccatgccaaggtcatggagaggacctaggtgagc

SEQ ID NO: 701221 - DNA, 120 bp, Artificial Sequence
  ENSG00000196189_39 (sequence is synthesized)
ctcccacacctggctcaccatccctgcccaggggacatccagccatgcccacatggatctttgaagaaaaatgcttcctctctgttcgtggtgactctactggtgggaatttcctttaac

SEQ ID NO: 701222 - DNA, 120 bp, Artificial Sequence
  ENSG00000196189_40 (sequence is synthesized)
agaagaggaagaaagcaggggtggttggggggatggcgagagggactctgacatacgccctcctgtctgcatatagctttgctgcttgtggctgccaacactttcctgtttgtctgtctg

SEQ ID NO: 701223 - DNA, 120 bp, Artificial Sequence
  ENSG00000196189_41 (sequence is synthesized)
tgctcctcatcctagtgaggaccaaggcgtcctccccgacggtagccctccctgtcccaggcctggaagagcatccactgtgcctcactttatttcccgtccccattaccctgcctctgg

SEQ ID NO: 701224 - DNA, 120 bp, Artificial Sequence
  ENSG00000196189_42 (sequence is synthesized)
ctgcctctcctctctactgcgggctcagcacacaacgctcttgtgttggggtggggtgaagggaagaactgctggtggaggagagtgcatctagctgccaaggcctggggagcacactca

SEQ ID NO: 701225 - DNA, 120 bp, Artificial Sequence
  ENSG00000196189_43 (sequence is synthesized)
cctctgtagctctggaaaactctggccttccagatgcaggaccctcatgaacttcctggccccagaccaatttccctctatgtccctttcccttccttcctcaagcccctcatttcccag

SEQ ID NO: 701226 - DNA, 120 bp, Artificial Sequence
  ENSG00000196189_44 (sequence is synthesized)
accccgctcacaagcatacggctgtcttggtgggtgagtatcaggtttcccacttcatcccaacatctactttctccagtcacgctgtgaaatatggaatattacagagttttccaaaag

SEQ ID NO: 701227 - DNA, 120 bp, Artificial Sequence
  ENSG00000196189_45 (sequence is synthesized)
gcaggggaaactgggtgtggtgatgcgtgcatatggtcccagttatttggaagctgaagttgaaggatgcttgagtttaggggtttgagtctagcctgggcaacacagcgagatcgtctc

SEQ ID NO: 701228 - DNA, 120 bp, Artificial Sequence
  ENSG00000196189_46 (sequence is synthesized)
ggaacagaggaggggaggaaatggatatggagaaacagggacacagagagagatgccagggagaaacagaggatctcggagaaagagagacacagccagaaacagaagtccaaaaggaaa

SEQ ID NO: 701229 - DNA, 120 bp, Artificial Sequence
  ENSG00000196189_47 (sequence is synthesized)
cccctgaacccaggtggtgacatgtgcacggtggtgcctgctgaaggtgggcaagggagctgagcagggaccgggggctactgtacctccttttcacctcctcccgcatctggagcccct

SEQ ID NO: 701230 - DNA, 120 bp, Artificial Sequence
  ENSG00000196189_48 (sequence is synthesized)
tactgacatattcactccaagagtcctcccatcctgcagtgggttcctccagggatggagtttccaggcagttttgaagctgctctggccattccgcgttcctctctctgttcctagtct

SEQ ID NO: 701231 - DNA, 120 bp, Artificial Sequence
  ENSG00000196189_49 (sequence is synthesized)
cgagctgcggggggcggggaggacacgcggggctggggggtcggggcgcccggggcgccccctgactccccctgtgcccccagaatgacgtgggcggcgaaaagctgctgcagaagaagt

SEQ ID NO: 701232 - DNA, 120 bp, Artificial Sequence
  ENSG00000196189_50 (sequence is synthesized)
tataggggccctgagaccaacccccggccaggcagtgtgagtactaccccccacactgagcacagtctacacatacataatgtgcatgaaaaaacacctatcatggcatagtaaatgccc

SEQ ID NO: 701233 - DNA, 120 bp, Artificial Sequence
  ENSG00000196189_51 (sequence is synthesized)
aataaatgttagtgctctccaccccaccaatctcgcctgctcagacgtacacctggtatagctgcctatattccacatgtgcctagcacccttttatacacggagcagttgctggagcca

SEQ ID NO: 701234 - DNA, 120 bp, Artificial Sequence
  ENSG00000196196_0 (sequence is synthesized)
agtgactgagagggctgagcggaggctgctgaaggggagaaaggagtgaggagctgctgggcagagagggactgtccggctcccagatgctgggcctcctggggagcacagccctcgtgg

SEQ ID NO: 701235 - DNA, 120 bp, Artificial Sequence
  ENSG00000196196_1 (sequence is synthesized)
gatggatcacaggtgctgctgtggcggtcctgctgctgctgctgctgctggccacctgccttttccacggacggcaggactgtgacgtggagaggaaccgtacagctgcagggggaaacc

SEQ ID NO: 701236 - DNA, 120 bp, Artificial Sequence
  ENSG00000196196_2 (sequence is synthesized)
gagtccgccgggcccagccttggcccttccggcggcggggccacctgggaatctttcaccatcaccgtcatcctggccacgtatctcatgtgccgaatgtgggcctccaccaccaccacc

SEQ ID NO: 701237 - DNA, 120 bp, Artificial Sequence
  ENSG00000196196_3 (sequence is synthesized)
tggacagcagctgcccctgccctcccatctgttcccaggacaagtggaccccatgtttccatgtggaaggatgcatctctggggtgaacgaggggaacaatagactggggcttgctccag

SEQ ID NO: 701238 - DNA, 120 bp, Artificial Sequence
  ENSG00000196196_4 (sequence is synthesized)
ctgcatttgcatggcatgccccagtgtactatggcagcagagaatggaggaacactgggtctgcagtgctgaagggtttggggagtggagagcaagggtgctctttcggggctggacagc

SEQ ID NO: 701239 - DNA, 120 bp, Artificial Sequence
  ENSG00000196196_5 (sequence is synthesized)
ccgtcttgtgacagtgactcccagtgagccccagaaatgacaagcgtgtcttggcagagccagcacacaagtggatgtgaagtgcccgtcttgacctcctcatcaggctgctgcaggcct

SEQ ID NO: 701240 - DNA, 120 bp, Artificial Sequence
  ENSG00000196196_6 (sequence is synthesized)
ctggcgggcagggcactgggagaggccctgagaatgtccttttggtttggagaaggcagtgtgaggctgcacagtcaattcatcggtgccttagtccaagaaaataaaaaccactaagaa

SEQ ID NO: 701241 - DNA, 120 bp, Artificial Sequence
  ENSG00000196199_0 (sequence is synthesized)
gatgtggagtagggccgagcgcggaacgcgaggggctgctggggtgtttgtcgcagcgggttttcctcggcggtttgcggagctgctaggatggagcaggttgcggagggagcaagggtg

SEQ ID NO: 701242 - DNA, 120 bp, Artificial Sequence
  ENSG00000196199_1 (sequence is synthesized)
accgcagtccctgtgtcagctgccgacagcactgaggagttggccgaagtcgaagaaggagttggagtagtgggcgaagataatgacgcagccgcgagaggagcggaggcctttggcgac

SEQ ID NO: 701243 - DNA, 120 bp, Artificial Sequence
  ENSG00000196199_2 (sequence is synthesized)
agtgaggaggacggagaggatgtgttcgaggtggagaagatcctggacatgaagaccgaggggggtaaagttctttacaaagttcgctggaaaggctatacatcggatgatgatacctgg

SEQ ID NO: 701244 - DNA, 120 bp, Artificial Sequence
  ENSG00000196199_3 (sequence is synthesized)
gagcccgagattcacctggaggactgtaaagaagtgcttcttgaatttaggaagaaaattgcagagaacaaagccaaagcagtcaggaaggatattcagagactatccttaaataacgac

SEQ ID NO: 701245 - DNA, 120 bp, Artificial Sequence
  ENSG00000196199_4 (sequence is synthesized)
atatttgaggcgaactctgatagcgatcagcaaagtgagacaaaagaagatacttccccaaagaagaaaaagaaaaaattgaggcagagagaagagaaaagcccagatgatctgaaaaag

SEQ ID NO: 701246 - DNA, 120 bp, Artificial Sequence
  ENSG00000196199_5 (sequence is synthesized)
aaaaaagcaaaggccgggaagctaaaagacaagtccaaaccagacctggagagctccttggaaagtttagtttttgatttaaggacaaagaaaagaatttctgaagccaaagaagaacta

SEQ ID NO: 701247 - DNA, 120 bp, Artificial Sequence
  ENSG00000196199_6 (sequence is synthesized)
aaggagtccaaaaagcccaaaaaagatgaagtaaaagaaacaaaagaattaaagaaagttaaaaagggtgaaataagagatttaaagacgaaaacaagagaagatcccaaagaaaataga

SEQ ID NO: 701248 - DNA, 120 bp, Artificial Sequence
  ENSG00000196199_7 (sequence is synthesized)
aaaacaaaaaaagaaaaatttgtcgaatcccaggtggaatctgaatcaagtgtacttaatgattctccctttccagaggatgacagtgaagggctacattccgacagcagagaagagaaa

SEQ ID NO: 701249 - DNA, 120 bp, Artificial Sequence
  ENSG00000196199_8 (sequence is synthesized)
caaaacactaaaagtgcaagagagagagcagggcaggacatggggctggagcatggctttgagaagcccctagacagtgccatgagtgctgaggaggataccgatgtcagaggcaggagg

SEQ ID NO: 701250 - DNA, 120 bp, Artificial Sequence
  ENSG00000196199_9 (sequence is synthesized)
aaaaagaagaccccgagaaaggctgaggacactagagagaacaggaagctagagaacaagaacgctttcttagagaagaaaactgtgcctaaaaagcagaggaatcaagacagaagcaaa

SEQ ID NO: 701251 - DNA, 120 bp, Artificial Sequence
  ENSG00000196199_10 (sequence is synthesized)
agtgctgcagagttagagaagctgatgcctgtatctgcccaaacgccaaagggccggaggttgagcggggaagagagaggcctctggtccacggactcagccgaggaggacaaagaaacc

SEQ ID NO: 701252 - DNA, 120 bp, Artificial Sequence
  ENSG00000196199_11 (sequence is synthesized)
aaaagaaatgaatccaaagaaaaatatcagaaaaggcatgattctgacaaggaagaaaaaggcagaaaagagccaaaaggattaaagacacttaaggaaatcagaaatgcatttgattta

SEQ ID NO: 701253 - DNA, 120 bp, Artificial Sequence
  ENSG00000196199_12 (sequence is synthesized)
tttaaattaactccagaagaaaaaaatgatgtttctgagaataatcggaaaagggaagaaataccactggattttaaaaccatagacgatcacaaaaccaaggaaaacaaacagtcactt

SEQ ID NO: 701254 - DNA, 120 bp, Artificial Sequence
  ENSG00000196199_13 (sequence is synthesized)
aaagaaaggagaaacaccagagacgaaacggatacttgggcatacattgctgcagaaggtgatcaggaggttttagacagcgtgtgccaagcagatgagaattcagatggcaggcagcag

SEQ ID NO: 701255 - DNA, 120 bp, Artificial Sequence
  ENSG00000196199_14 (sequence is synthesized)
attctgagtttgggcatggacctgcagttggaatggatgaagttggaagatttccaaaagcaccttgatgggaaagatgagaattttgctgcaacagatgcaattccaagtaatgtgtta

SEQ ID NO: 701256 - DNA, 120 bp, Artificial Sequence
  ENSG00000196199_15 (sequence is synthesized)
agggatgctgtgaaaaatggggattatattactgtaaaagttgcacttaattcaaatgaagaatataacctggaccaagaggattccagtggaatgacactggtgatgcttgccgccgcc

SEQ ID NO: 701257 - DNA, 120 bp, Artificial Sequence
  ENSG00000196199_16 (sequence is synthesized)
ggagggcaggacgacctcctgcgactcctcatcacaaaaggcgcgaaagtgaacggtcggcagaagaacgggaccaccgccctcattcatgctgcagagaagaactttttaacaacagtg

SEQ ID NO: 701258 - DNA, 120 bp, Artificial Sequence
  ENSG00000196199_17 (sequence is synthesized)
caaagcaatggtgagactgcactgatgaaggcctgtaaaagaggaaattcagacatcgtacgactcgtaattgaatgtggagctgactgcaatattttgtcaaagcaccagaatagtgcc

SEQ ID NO: 701259 - DNA, 120 bp, Artificial Sequence
  ENSG00000196199_18 (sequence is synthesized)
ctgcactttgcgaagcagtctaacaatgtgcttgtgtacgacttgctgaagaaccatttagagacactttcaagagtagcagaagagacaataaaggattactttgaagctcgccttgct

SEQ ID NO: 701260 - DNA, 120 bp, Artificial Sequence
  ENSG00000196199_19 (sequence is synthesized)
ctgctagaaccagtttttccaatcgcatgtcatcgactctgtgagggtccagatttttcaacagatttcaattacaaacccccacagaacataccagaaggctctggcatcctgctgttt

SEQ ID NO: 701261 - DNA, 120 bp, Artificial Sequence
  ENSG00000196199_20 (sequence is synthesized)
atcttccatgcaaactttttgggtaaagaagttattgctcggctctgtggaccgtgtagtgtacaagctgtagttctgaatgataaatttcagcttcctgtttttctggacagtcatttt

SEQ ID NO: 701262 - DNA, 120 bp, Artificial Sequence
  ENSG00000196199_21 (sequence is synthesized)
gtttactcattcagccctgttgcaggtcccaataaactcttcataaggttgacagaagcaccctctgccaaggttaagttgctaataggtgcatacagagtgcagctgcagtgaccaaac

SEQ ID NO: 701263 - DNA, 120 bp, Artificial Sequence
  ENSG00000196199_22 (sequence is synthesized)
agaagggactgggcggagttctcttcagaccgattcctatactctctttgacagcagtttggaattcttctagcacatctatgtaaagttttgtctgtaaacctcttgcagttaagcctg

SEQ ID NO: 701264 - DNA, 120 bp, Artificial Sequence
  ENSG00000196199_23 (sequence is synthesized)
ttgtctgttgtagtctgtaagatgcgacatagctgtgtctgtgccagtatgccggaatctcagtgcagtgtccagactgcgtatttcagtttttccacaatgtggatagtacatatgagg

SEQ ID NO: 701265 - DNA, 77 bp, Artificial Sequence
  ENSG00000196199_24 (sequence is synthesized)
gtatttcagtttttccacaatgtggatagtacatatgaggattatttaagaaaattaaagacttcactttctttttt

SEQ ID NO: 701266 - DNA, 79 bp, Artificial Sequence
  ENSG00000196199_25 (sequence is synthesized)
aagagttattttcttaacttgaaattttctactagccctggtgaacttctgtgcttaaaaaaaaaaaaaaaaaaaggaa

SEQ ID NO: 701267 - DNA, 120 bp, Artificial Sequence
  ENSG00000196199_26 (sequence is synthesized)
aaaaaaaaaaaaaaaaggaaaaattcagctctaaaacatttgcttacagcaagggagccatgttatattcaagttacccaagcaccaaataaagtgtgggtttgctgcccttgaaagggt

SEQ ID NO: 701268 - DNA, 120 bp, Artificial Sequence
  ENSG00000196199_27 (sequence is synthesized)
tttgctgcccttgaaagggttgggaggcctgatctttttctagtagacagttgccacacattccccaagcacaaaaggtggagatggcagtcactttgtaaatatgctgtagtcacttat

SEQ ID NO: 701269 - DNA, 120 bp, Artificial Sequence
  ENSG00000196199_28 (sequence is synthesized)
catcttttcaaagggtaacaagagaatctaagatgtagtaagaatgtaaaccagtacactatgagacctaaaagagagtattaaatgtgaacttttagcagagcgtggtggctcacacct

SEQ ID NO: 701270 - DNA, 88 bp, Artificial Sequence
  ENSG00000196199_29 (sequence is synthesized)
ttaaatgtgaacttttagcagagcgtggtggctcacacctataatcccagcgctttggaggctgaggttggaggattgcttaagtggt

SEQ ID NO: 701271 - DNA, 85 bp, Artificial Sequence
  ENSG00000196199_30 (sequence is synthesized)
gccgtgaaaggttgtctcaaaaaaaaaaaaaagtttcttggaacctatacggtttttttttgttttttttttttgaaaagccaga

SEQ ID NO: 701272 - DNA, 120 bp, Artificial Sequence
  ENSG00000196199_31 (sequence is synthesized)
tatacggtttttttttgttttttttttttgaaaagccagaccttgtgcccttgttttgaacaccgactgggaagatggggcttaggtaacagccaaacctggctgtcagctgtgtgggag

SEQ ID NO: 701273 - DNA, 120 bp, Artificial Sequence
  ENSG00000196199_32 (sequence is synthesized)
ccaccaccctctctgggaagagttcctgcttctgtatggcaagcataaatcaagctcagtctgggttatggagaagttgaaaattgttttgttcctcattagtttataattgtatgaaat

SEQ ID NO: 701274 - DNA, 120 bp, Artificial Sequence
  ENSG00000196199_33 (sequence is synthesized)
acgattttaatgaaaacttttcagaattcacgtttgtgtagatatttcagagaaccatttttactttacatcctaaaactgccttttcctatggttttgtcaataaaacactatgatgtt

SEQ ID NO: 701275 - DNA, 87 bp, Artificial Sequence
  ENSG00000196199_34 (sequence is synthesized)
gatttaatacacaaaacaaaaagaagatacaaaaatgagtctacttgaggctgtggcaggaggaatgcttgagcccaggagtttgag

SEQ ID NO: 701276 - DNA, 120 bp, Artificial Sequence
  ENSG00000196199_35 (sequence is synthesized)
aggtagtgcaccatattattttactgtactcttctctgtatttctgatctcaacgatcaaaaaataatggagtcgaagagtttatttggatctcctgaataaataacattttatattgaa

SEQ ID NO: 701277 - DNA, 72 bp, Artificial Sequence
  ENSG00000196199_36 (sequence is synthesized)
tggagtcttgacttcccaggcacaagcaatcctcccacctcagcctcctaactacctgggactaaaaatgca

SEQ ID NO: 701278 - DNA, 120 bp, Artificial Sequence
  ENSG00000196208_0 (sequence is synthesized)
gaggcagctcctagtgaaacagtctaagaggtgtcaggctctgctgagtgctaaattagagaaagctgttacttatataacttcctgtaattgcccggcagtagctgcagctgaggacag

SEQ ID NO: 701279 - DNA, 120 bp, Artificial Sequence
  ENSG00000196208_1 (sequence is synthesized)
ccaccctttcttcgtctctgctgagcgaaggctacacggcccttcctccttgcagctgtttcaccttctaccttgcgtggagccaggcttttgcaccgaatctgagatgccattttaaac

SEQ ID NO: 701280 - DNA, 120 bp, Artificial Sequence
  ENSG00000196208_2 (sequence is synthesized)
agaagactccatcctcttgaagatgggaaattcttacgctggacagctgaagacgacacgctttgaagaggtcttgcacaattccatcgaggcatccctgcggtccaacaacctggtgcc

SEQ ID NO: 701281 - DNA, 120 bp, Artificial Sequence
  ENSG00000196208_3 (sequence is synthesized)
caggcccatcttttcccagctgtacctggaagctgagcagcagcttgccgctctagaaggtggtagccgagtggacaatgaggaagaggaagaagagggagaaggagggctggaaacaaa

SEQ ID NO: 701282 - DNA, 120 bp, Artificial Sequence
  ENSG00000196208_4 (sequence is synthesized)
tggccccccaaaccctttccagctgcaccctctgcctgaaggatgctgtaccacagacgggttttgccaggccgggaaggacctgcgccttgtctccatttccaacgagcccatggatgt

SEQ ID NO: 701283 - DNA, 120 bp, Artificial Sequence
  ENSG00000196208_5 (sequence is synthesized)
ccctgcgggctttctcctcgtgggggtcaagtcccccagcctgccggaccatctcctggtgtgcgccgttgacaagaggttcttgccagatgacaatggccacaatgctcttcttggttt

SEQ ID NO: 701284 - DNA, 120 bp, Artificial Sequence
  ENSG00000196208_6 (sequence is synthesized)
ctctgggaattgtgttggctgtggaaagaaaggcttctgttacttcacggaattctccaatcatataaatctgaaactgaccactcaacccaagaagcagaaacacttgaagtattacct

SEQ ID NO: 701285 - DNA, 120 bp, Artificial Sequence
  ENSG00000196208_7 (sequence is synthesized)
ggtccgtaatgcacaagggactctaaccaaaggacctttaatctgttggaaaggctcagagtttagaagccggcagatccccgccagtacttgttccagttccctcttcccagccctgga

SEQ ID NO: 701286 - DNA, 120 bp, Artificial Sequence
  ENSG00000196208_8 (sequence is synthesized)
gagcacggctgccttccccagcgagcccgttcctgggacgaaccccagcatcctgatgggagctcagcaggcaggaccagcttctgatcacccctcactaaacgcagcaatgggtccggc

SEQ ID NO: 701287 - DNA, 120 bp, Artificial Sequence
  ENSG00000196208_9 (sequence is synthesized)
tgttttcaacggcaaagattccccgaagtgccaacaactggcaaagaataacctgttggccctgccgcgaccatcggctttaggtatcttgtcaaactccgggccccccaaaaaacgcca

SEQ ID NO: 701288 - DNA, 120 bp, Artificial Sequence
  ENSG00000196208_10 (sequence is synthesized)
caaagggtggtctccagaatctccatcagctccagatggtggctgcccccaaggtggtgggaacagagctaagtatgagagcgcaggcatgtcctgcgtgccgcaggttggcttggtggg

SEQ ID NO: 701289 - DNA, 120 bp, Artificial Sequence
  ENSG00000196208_11 (sequence is synthesized)
accagcttcagtcacctttccagtggtggcctctggagaaccagtgtctgttcctgacaacttgctgaaaatatgcaaggccaagccagtgatatttaaaggccatgggaacttccctta

SEQ ID NO: 701290 - DNA, 120 bp, Artificial Sequence
  ENSG00000196208_12 (sequence is synthesized)
cctctgtgggaacctgaatgacgtcgtggtcagccccctcttgtacacgtgctaccagaattcccagtctgtctcacgggcatacgagcagtacggcgcctctgccatccagcccatctc

SEQ ID NO: 701291 - DNA, 120 bp, Artificial Sequence
  ENSG00000196208_13 (sequence is synthesized)
cgaggagatgcagctcctgcttaccgtctactacctggtccagctggccgcggaccaggtgcccttgatggaggacctggagcagatcttcctgcgctcttggcgcgagtcgcacctgac

SEQ ID NO: 701292 - DNA, 120 bp, Artificial Sequence
  ENSG00000196208_14 (sequence is synthesized)
gcgagtcgcacctgaccgagatccggcagtaccagcaggcgccgccgcagcccttcccgcccgcgcccagcgccgcggcacccgtgacctccgcgcagctgccctggctggccagcctgg

SEQ ID NO: 701293 - DNA, 120 bp, Artificial Sequence
  ENSG00000196208_15 (sequence is synthesized)
cgacagcgtgcacgtcatcgagtgtgcttactccctggccgagggcctctccgagatgttccggctgttggtcgagggcaagcttgccaagaccaactacgtggtcatcatctgcgcctg

SEQ ID NO: 701294 - DNA, 120 bp, Artificial Sequence
  ENSG00000196208_16 (sequence is synthesized)
ccgcagcgcggccatcgactcctgcatcgccgtcaccggaaaataccaagcccggattctttccgagagccttctcactcctgcggagtaccagaaggaagtcaattacgagctggttac

SEQ ID NO: 701295 - DNA, 120 bp, Artificial Sequence
  ENSG00000196208_17 (sequence is synthesized)
ggggaaggtagactcgctgggggccttctttagcaccctctgtccagagggtgacattgacattttgctggacaaatttcaccaggaaaatcaaggccatatttcttcctcactcgctgc

SEQ ID NO: 701296 - DNA, 120 bp, Artificial Sequence
  ENSG00000196208_18 (sequence is synthesized)
ctcttctgtcactaaagcagcatccctggatgtcagtgggacaccggtgtgcacaagttacaatctggagccacacagcatccggcccttccagctggcagtagcgcagaagctcctctc

SEQ ID NO: 701297 - DNA, 120 bp, Artificial Sequence
  ENSG00000196208_19 (sequence is synthesized)
ccatgtgtgttccattgcggattccagcacccaaaatctggacctgggatcctttgagaaggtggactttctcatttgcattcccccctcagaagtgacctaccagcagactctgctcca

SEQ ID NO: 701298 - DNA, 120 bp, Artificial Sequence
  ENSG00000196208_20 (sequence is synthesized)
tgtgtggcattcaggggttttgctggagcttggtctgaagaaagagcacatgacgaagcagagggtggaacagtatgttctgaagctagacacggaggcacagacaaaatttaaggcttt

SEQ ID NO: 701299 - DNA, 120 bp, Artificial Sequence
  ENSG00000196208_21 (sequence is synthesized)
tctgcaaaactccttccagaacccgcatacactttttgtcctaatccatgaccatgcgcactgggatcttgtgagtagcactgttcataacctctattctcaaagtgacccgtcggtggg

SEQ ID NO: 701300 - DNA, 120 bp, Artificial Sequence
  ENSG00000196208_22 (sequence is synthesized)
attggtggaccgattgctcaactgcagggaggtgaaggaggcccccaacattgtgacacttcacgtgacctccttcccgtatgcactgcagacacagcacaccctcatcagcccctacaa

SEQ ID NO: 701301 - DNA, 120 bp, Artificial Sequence
  ENSG00000196208_23 (sequence is synthesized)
cgagatccactggcctgcctcctgcagtaatggagtggacttatatcatgaaaataagaagtacttcgggctgtcggagtttattgaatccaccctttcaggacacagcctccccttgct

SEQ ID NO: 701302 - DNA, 120 bp, Artificial Sequence
  ENSG00000196208_24 (sequence is synthesized)
cagatacgatagctcctttgaggccatggtcactgcattaggaaaaaggttcccccgcctgcacagcgcggtgatcaggacctttgttctcgtgcagcactacgcggccgccctgatggc

SEQ ID NO: 701303 - DNA, 120 bp, Artificial Sequence
  ENSG00000196208_25 (sequence is synthesized)
cgtaagcggcctcccgcagatgaagaactacacgtcggtggagacgctggagatcacgcagaacctcctcaactccccgaagcagtgcccctgcggccacgggctcatggtcctgctgcg

SEQ ID NO: 701304 - DNA, 120 bp, Artificial Sequence
  ENSG00000196208_26 (sequence is synthesized)
ggtgccctgttcgcccctggcggtggtggcctatgagcggctggcccacgtgcgggcccggctggcgctggaggagcactttgagatcatcctgggcagtcccagctcaggcgtcaccgt

SEQ ID NO: 701305 - DNA, 120 bp, Artificial Sequence
  ENSG00000196208_27 (sequence is synthesized)
ggggaagcacttcgtaaagcagctcaggatgtggcagaaaattgaggatgtggagtggagaccccagacttacttggagctggagggtctgccttgcatcctgatcttcagtgggatgga

SEQ ID NO: 701306 - DNA, 120 bp, Artificial Sequence
  ENSG00000196208_28 (sequence is synthesized)
cccgcatggggagtccttgccgaggtctttgaggtactgtgacctgcgattgataaactcctcctgcttggtgagaacagccttggagcaggagctgggcctggctgcctactttgtgag

SEQ ID NO: 701307 - DNA, 120 bp, Artificial Sequence
  ENSG00000196208_29 (sequence is synthesized)
caacgaggttcccttggagaagggggctaggaacgaggccttggagagtgatgctgagaagctgagcagcacagacaacgaggatgaggagctggggacagaaggctctacctcggagaa

SEQ ID NO: 701308 - DNA, 120 bp, Artificial Sequence
  ENSG00000196208_30 (sequence is synthesized)
gagaagccccatgaaaagggagaggtcccgctcccacgactcagcatcctcatccctctcctccaaggcttccggttcagcgctcggtggcgagtcctcggctcagcccacagcactccc

SEQ ID NO: 701309 - DNA, 120 bp, Artificial Sequence
  ENSG00000196208_31 (sequence is synthesized)
ccagggagagcatgccaggtcgccccagccccgtggccccgcagaggagggcagagcccctggtgagaaacagaggccccgggcaagtcaggggccaccctcggccatcagcaggcacag

SEQ ID NO: 701310 - DNA, 120 bp, Artificial Sequence
  ENSG00000196208_32 (sequence is synthesized)
tcccgggccgacgccccagcccgactgtagcctcaggaccggccagaggagcgtccaggtgtcggtcacctcgtcgtgctcccagctgtcctcctcctcgggctcatcctcctcatccgt

SEQ ID NO: 701311 - DNA, 120 bp, Artificial Sequence
  ENSG00000196208_33 (sequence is synthesized)
ggcgcccgctgccggcacgtgggtcctgcaggcctcccagtgctccttgaccaaggcctgccgccagccacccattgtcttcttgcccaagctcgtgtacgacatggttgtgtccactga

SEQ ID NO: 701312 - DNA, 120 bp, Artificial Sequence
  ENSG00000196208_34 (sequence is synthesized)
cagcagtggcctgcccaaggccgcctccctcctgccctccccctcggtcatgtgggccagctctttccgccccctgctcagcaagaccatgacatccaccgagcagtccctctactaccg

SEQ ID NO: 701313 - DNA, 120 bp, Artificial Sequence
  ENSG00000196208_35 (sequence is synthesized)
gggccgagggccgcgtggacggcttccacccccgcaggctgctgctcagcggcccccctcagatcgggaagacaggtgcctacctgcagttcctcagtgtcctgtccaggatgcttgttc

SEQ ID NO: 701314 - DNA, 120 bp, Artificial Sequence
  ENSG00000196208_36 (sequence is synthesized)
ggctcacagaagtggatgtctatgacgaggaggagatcaatatcaacctcagagaagaatctgactggcattatctccagcttagcgacccctggccagacctggagctgttcaagaagt

SEQ ID NO: 701315 - DNA, 120 bp, Artificial Sequence
  ENSG00000196208_37 (sequence is synthesized)
tgccctttgactacatcattcacgacccgaagtatgaagatgccagcctgatttgttcgcactatcagggtataaagagtgaagacagagggatgtcccggaagccggaggacctttatg

SEQ ID NO: 701316 - DNA, 120 bp, Artificial Sequence
  ENSG00000196208_38 (sequence is synthesized)
tgcggcgtcagacggcacggatgagactgtccaagtacgcagcgtacaacacttaccaccactgtgagcagtgccaccagtacatgggcttccacccccgctaccagctgtatgagtcca

SEQ ID NO: 701317 - DNA, 120 bp, Artificial Sequence
  ENSG00000196208_39 (sequence is synthesized)
ccctgcacgcctttgccttctcttactccatgctaggagaggagatccagctgcacttcatcatccccaagtccaaggagcaccactttgtcttcagccaacctggaggccagctggaga

SEQ ID NO: 701318 - DNA, 120 bp, Artificial Sequence
  ENSG00000196208_40 (sequence is synthesized)
gcatgcgactacccctcgtgacagacaagagccatgaatatataaaaagtccgacattcactccaaccaccggccgtcacgaacatgggctctttaatctgtaccacgcaatggacggtg

SEQ ID NO: 701319 - DNA, 120 bp, Artificial Sequence
  ENSG00000196208_41 (sequence is synthesized)
ccagccatttgcacgtgctggttgtcaaggaatacgagatggcaatttataagaaatattggcccaaccacatcatgctggtgctccccagtatcttcaacagtgctggagttggtgctg

SEQ ID NO: 701320 - DNA, 120 bp, Artificial Sequence
  ENSG00000196208_42 (sequence is synthesized)
ctcatttcctcatcaaggagctgtcctaccataacctggagctcgagcggaaccggcaggaggagctgggaatcaagccgcaggacatctggcctttcattgtgatctctgatgactcct

SEQ ID NO: 701321 - DNA, 120 bp, Artificial Sequence
  ENSG00000196208_43 (sequence is synthesized)
gcgtgatgtggaacgtggtggatgtcaactctgctggggagagaagcagggagttctcctggtcggaaaggaacgtgtctttgaagcacatcatgcagcacatcgaggcggcccccgaca

SEQ ID NO: 701322 - DNA, 120 bp, Artificial Sequence
  ENSG00000196208_44 (sequence is synthesized)
tcatgcactacgccctgctgggcctgcggaagtggtccagcaagacccgggccagcgaggtgcaagagcccttctcccgctgccacgtgcacaacttcatcatcctgaacgtggacctga

SEQ ID NO: 701323 - DNA, 120 bp, Artificial Sequence
  ENSG00000196208_45 (sequence is synthesized)
cccagaacgtgcagtacaaccagaaccggttcctgtgtgacgatgtagacttcaacctgcgggtgcacagcgccggcctcctgctctgccggttcaaccgcttcagcgtgatgaagaagc

SEQ ID NO: 701324 - DNA, 120 bp, Artificial Sequence
  ENSG00000196208_46 (sequence is synthesized)
agatcgtggtgggcggccacaggtccttccacatcacatccaaggtgtctgataactctgccgcggtcgtgccggcccagtacatctgtgccccggacagcaagcacacgttcctcgcag

SEQ ID NO: 701325 - DNA, 120 bp, Artificial Sequence
  ENSG00000196208_47 (sequence is synthesized)
cgcccgcccagctcctgctggagaagttcctgcagcaccacagccacctcttcttcccgctgtccctgaagaaccatgaccacccagtgctgtctgtcgactgttacctgaacctgggat

SEQ ID NO: 701326 - DNA, 120 bp, Artificial Sequence
  ENSG00000196208_48 (sequence is synthesized)
ctcagatttctgtttgctatgtgagctccaggccccactctttaaacatcagctgctcggacttgctgttcagtgggctgctgctgtacctctgtgactcttttgtgggagctagctttt

SEQ ID NO: 701327 - DNA, 120 bp, Artificial Sequence
  ENSG00000196208_49 (sequence is synthesized)
tgaaaaagtttcattttctgaaaggtgcgacgttgtgtgtcatctgtcaggaccggagctcactgcgccagacggtcgtccgcctggagctcgaggacgagtggcagttccggctgcgcg

SEQ ID NO: 701328 - DNA, 120 bp, Artificial Sequence
  ENSG00000196208_50 (sequence is synthesized)
atgagttccagaccgccaatgccagggaagaccggccgctcttttttctgacgggacgacacatctgaggaagacagcggcgagttttctgaagagatgagtgctcagagccctcatgct

SEQ ID NO: 701329 - DNA, 120 bp, Artificial Sequence
  ENSG00000196208_51 (sequence is synthesized)
gttgaggctaaagggaggcctggaacggtggggcgtttgactggaatggaccccagggactgtccaggtgcagcccctcctagtacacatgggcccccgaggccgtggtcctgggagcca

SEQ ID NO: 701330 - DNA, 120 bp, Artificial Sequence
  ENSG00000196208_52 (sequence is synthesized)
ggaagactccgcagtgggtgagaatgaaaacttgagactcccaagttctgggccagcccattgctctgggctgttttaaagcccatttcacgaggaacaaagatttacttcctgtcctgc

SEQ ID NO: 701331 - DNA, 120 bp, Artificial Sequence
  ENSG00000196208_53 (sequence is synthesized)
cattcgtgtgcttccatggacaaacctgatttttttctcttagttctaaagaatcttgggttattttgtagcggtgccagtatttcagtagatgggatttcagccaagtaggttcccctg

SEQ ID NO: 701332 - DNA, 120 bp, Artificial Sequence
  ENSG00000196208_54 (sequence is synthesized)
taacctcctacaaagcaatattccaaaggaacattttaactgtaaaggctggagacaagaaaaaataagtagatcgttttaataacaattatttaattgcctataagtttgctgtttcag

SEQ ID NO: 701333 - DNA, 120 bp, Artificial Sequence
  ENSG00000196208_55 (sequence is synthesized)
aggctagcccaaaggcatcaaatttaataaagttaaacaaattgatttacttcagagcaaatatgatcctattaaaataatatagggtaaataccctacctcttagaaagggcaaaaatg

SEQ ID NO: 701334 - DNA, 120 bp, Artificial Sequence
  ENSG00000196208_56 (sequence is synthesized)
caaagaagctttctttaaaactaaaagggttttttggggggggagttggcggggaggaaataaggctaacagaggttgacctaaaattagccttacaaaggagaaaggaccacattgctt

SEQ ID NO: 701335 - DNA, 120 bp, Artificial Sequence
  ENSG00000196208_57 (sequence is synthesized)
acttgaaacagacaatgaaaacaaccaaagtgatatataaaatagttgatgagaactagacttatgactgtagtttactagagtttagttttcagttgctgaagtagctcattttctctt

SEQ ID NO: 701336 - DNA, 120 bp, Artificial Sequence
  ENSG00000196208_58 (sequence is synthesized)
actaatgtttggttcctcagggaagaatctcacttgactagagaggaggtgggaacagaagagagaaggaggcagggagatgtatttcttagggctcaccccttcacagactgacagaat

SEQ ID NO: 701337 - DNA, 81 bp, Artificial Sequence
  ENSG00000196208_59 (sequence is synthesized)
cagaatggtttttaaagccacagttgagaggccacccattgcccggcgcctggacagtgatcatcttgttcatcttgttca

SEQ ID NO: 701338 - DNA, 120 bp, Artificial Sequence
  ENSG00000196208_60 (sequence is synthesized)
cccggcgcctggacagtgatcatcttgttcatcttgttcagtcctttcttgtgtgattggaattattcatcccctttgaaagatgagaaggttgagatgcaaagagtctacctttccaag

SEQ ID NO: 701339 - DNA, 120 bp, Artificial Sequence
  ENSG00000196208_61 (sequence is synthesized)
ttctcactgctggaaagagctagaagcacagttcaaagttctggcttctggactctgcagtccaggtctcccttctcccacttgcctaccctcaatgccacactgtttttgaagtggccc

SEQ ID NO: 701340 - DNA, 120 bp, Artificial Sequence
  ENSG00000196208_62 (sequence is synthesized)
caatgccacactgtttttgaagtggcccataacttgaaggaaaagtttaaagacagttcaatttaatcatcagaatgcattcttttttttttcggagacggagtttcactcttgctgccc

SEQ ID NO: 701341 - DNA, 120 bp, Artificial Sequence
  ENSG00000196208_63 (sequence is synthesized)
ctcagaatgcattcttacacatctatcctagacatttataagcactctaatggataacaatccaagaataaatgattgtaaaagatgatgccgaagagttgatgtcaatctttttttcct

SEQ ID NO: 701342 - DNA, 120 bp, Artificial Sequence
  ENSG00000196208_64 (sequence is synthesized)
aagaaaaaaagtccgcgagtattaaatatttagatcaatgtttataaaatgattactttgtatatctcattattcctattttggaataaaaactgaccttctttaatcatatacttgtct

SEQ ID NO: 701343 - DNA, 120 bp, Artificial Sequence
  ENSG00000196208_65 (sequence is synthesized)
tttgtaaatagcagcttttgtgtcattctccccactttattagttaatttaaattggaaaaaaccctcaaactaatattcttgtctgttccagtcttataaataaaacttataatgcatg

SEQ ID NO: 701344 - DNA, 120 bp, Artificial Sequence
  ENSG00000196208_66 (sequence is synthesized)
gctaaatggttaagagatacataaatactgcagtagagatgggattttacctcaaagtgcaaaggtaaatgaaataaagttttttcaatggaaggcttgcagctcttgaggacctgccaa

SEQ ID NO: 701345 - DNA, 120 bp, Artificial Sequence
  ENSG00000196208_67 (sequence is synthesized)
caccctctgcctgaaggatgctgtaccacagacggtgagcctctgccagctcctggccaggcagtgcctgccatgctgcccggaggcagtggccaggcgggtgactgggcctgtgactgt

SEQ ID NO: 701346 - DNA, 120 bp, Artificial Sequence
  ENSG00000196208_68 (sequence is synthesized)
gagacaccatcctgggatgctaaggcaggcctctgtgccactctttggacagtctcaactttaccagtggcttgggagccagacattcatttttctgtgttggttgcttggaacctagaa

SEQ ID NO: 701347 - DNA, 120 bp, Artificial Sequence
  ENSG00000196208_69 (sequence is synthesized)
agaatacattttccctactcaggcctgtttgcacagcatattgaactcacaagtgattaggaggaataatctttctttctttcttttttttttttgacggaatctcactctgttgcccag

SEQ ID NO: 701348 - DNA, 120 bp, Artificial Sequence
  ENSG00000196208_70 (sequence is synthesized)
gacacggggcggctgagcagcagtgtgttcatggagaaagaatcaaagcgcacatcttgtactttgatgcccataggaagggctctcctctggcccctctggctttgtttggagcagaaa

SEQ ID NO: 701349 - DNA, 120 bp, Artificial Sequence
  ENSG00000196208_71 (sequence is synthesized)
tgctgggctggggccgctgagcctcctggagtctgatgtggcttccatgagagtcaggccaggaccacaggtgcctcctgagtccgtgggtctgggcccaggccctggtgctctatgagt

SEQ ID NO: 701350 - DNA, 120 bp, Artificial Sequence
  ENSG00000196208_72 (sequence is synthesized)
gacacttgggagttaccgtatgtgccaaggagcagtgagacacctgtggtaatggcgagtgacctgtcctatgggctgcacagctggaggatggtagaattttggagcaatagtgggcag

SEQ ID NO: 701351 - DNA, 120 bp, Artificial Sequence
  ENSG00000196208_73 (sequence is synthesized)
tgtgttgttggggaagaacatgggcttctgaatcagaaaaatatgaattcaaaacctaccgctgtctcttgttagtcaggggaccttggccaagtctcaataaatgtttcttcatctgga

SEQ ID NO: 701352 - DNA, 120 bp, Artificial Sequence
  ENSG00000196208_74 (sequence is synthesized)
gctgatagagatgtcttggacatgctctggctggctaatctccatgttctagccgactgaaaatacggtggccaagtggatggtgtgcttatttgcagtctaaagaaatttccttttgat

SEQ ID NO: 701353 - DNA, 120 bp, Artificial Sequence
  ENSG00000196208_75 (sequence is synthesized)
ctggtctctgtggtgatatattgtcccaactcaccttgccagacagccctgggagaatgcagggcagaatcctccctgcttggagtcagggaggcaagacctggcaggcagcacccagtg

SEQ ID NO: 701354 - DNA, 120 bp, Artificial Sequence
  ENSG00000196208_76 (sequence is synthesized)
aagctctggaaggtgctctgcccacaaggtgtcccattggtggtgctggaggagtgacaggtggcggctgcttggctctgggcaagtccctccctccagccccctcacttgtaaaaaata

SEQ ID NO: 701355 - DNA, 120 bp, Artificial Sequence
  ENSG00000196208_77 (sequence is synthesized)
agaggattggacgaaatgaaccagcaagtggcacagccccattggttagaaaaggtgactcctctcatcctaggctccaggagggtgagcaggtgcactcaatgagcaaggcttcccagg

SEQ ID NO: 701356 - DNA, 120 bp, Artificial Sequence
  ENSG00000196208_78 (sequence is synthesized)
acagggcactcgagggacctggcgcagctcacctatctccttcagtgccctcacccccagagaacccacatgtatgggaccgtaagctgtgcacaagactgggtgccaagtcgctgctgt

SEQ ID NO: 701357 - DNA, 120 bp, Artificial Sequence
  ENSG00000196208_79 (sequence is synthesized)
gatactagctctgaaacttttcccctggctggcttggctgcctctccctgccgggcaggggccaggaagcctgggtgtcaggcagacccgagccaggctctgcacagcagggcattacgc

SEQ ID NO: 701358 - DNA, 120 bp, Artificial Sequence
  ENSG00000196208_80 (sequence is synthesized)
gccccacgcatcctcttccatccccaggcacagatcaaaggcgcagcccaggaggcgggagcccctgcacactttccacctctgctgggcttagcctcttggctggttggtctgtggagt

SEQ ID NO: 701359 - DNA, 120 bp, Artificial Sequence
  ENSG00000196208_81 (sequence is synthesized)
aatggtagcccttggtccggcagaacctgcatcgccccggagcttatgagaggcgtgaattcatggacccatcctggaatcagaatcaggccccacttctgcatcagaagccctgggtgg

SEQ ID NO: 701360 - DNA, 120 bp, Artificial Sequence
  ENSG00000196208_82 (sequence is synthesized)
caccagcaagtgtttggcaagcccttgagaagcagtgtctttgagaacgtgacctgtgccccaggcaccagctttactccccgagcccagcaggacatctgcatataacacacagccgaa

SEQ ID NO: 701361 - DNA, 86 bp, Artificial Sequence
  ENSG00000196208_83 (sequence is synthesized)
ccgagcccagcaggacatctgcatataacacacagccgaagtcagaaaatatatttttggtgactaaatggagtacctggagtaca

SEQ ID NO: 701362 - DNA, 120 bp, Artificial Sequence
  ENSG00000196208_84 (sequence is synthesized)
gccccgagaggatttgatagcttcaccgcttcacctggttttacaaatgcggagactgaggtttagggcagttaagcttcttgcttagcatcatgtaggtaaagaatggtggaaagatat

SEQ ID NO: 701363 - DNA, 120 bp, Artificial Sequence
  ENSG00000196208_85 (sequence is synthesized)
ttagcatcatgtaggtaaagaatggtggaaagatatttgaacccgacctgggcaattccacctctgagggctgtcctcagaatgaatcttctgatgggctgggcacggtggctcacgcct

SEQ ID NO: 701364 - DNA, 120 bp, Artificial Sequence
  ENSG00000196208_86 (sequence is synthesized)
cagacaattcataaaagagaaaataccagaaggaaacaaatattgaaaagtattcagtctcactcatcatcaaagacatgcaaatcacaaatcaagtcatctttttctgaattaataacc

SEQ ID NO: 701365 - DNA, 120 bp, Artificial Sequence
  ENSG00000196208_87 (sequence is synthesized)
caaatgatggtacccagtggtgcttaggtgcggtaaaaccagcgcttgtccgatgcaccgttcgcgtggtaaactgacgcattcaggctcttgggaagcaatctgatgatatgtagtagc

SEQ ID NO: 701366 - DNA, 120 bp, Artificial Sequence
  ENSG00000196208_88 (sequence is synthesized)
tggttctgtaaatccacctttgagaatttaggcgaaggaagtaacgttctatatgtcaagatgtgcattgcagagggatttataaaggtgaatatttggaagaaataagagaatccacaa

SEQ ID NO: 701367 - DNA, 120 bp, Artificial Sequence
  ENSG00000196208_89 (sequence is synthesized)
tagagaccttgctaagtaaacggtggtgctcacgtatgatgggacattatggacacactaacagcactctttatgttggctgaaaatggcactgaaactgatgatagggtcatggttaag

SEQ ID NO: 701368 - DNA, 120 bp, Artificial Sequence
  ENSG00000196208_90 (sequence is synthesized)
gaaagaatgcaagacccaaagtttatactgacaatcattgcagctatttgtaaggacagttttaatactaattccagcaatacatgtttttattccctgtcctggagtaggagaaagcct

SEQ ID NO: 701369 - DNA, 120 bp, Artificial Sequence
  ENSG00000196208_91 (sequence is synthesized)
atattcccaggctgaatgttctacacatttaccactgtatatgcacatagggacagtgtaacctgtctataccaccgtagttccagtcctaactttctgaattctgtttaaagaccttct

SEQ ID NO: 701370 - DNA, 120 bp, Artificial Sequence
  ENSG00000196208_92 (sequence is synthesized)
gtgcttatttgcagtctaaagaaatttccttttggtcagaagatatagttcaaggagtttaaattggtgtgggaggccatcaggattcctctgagctgggctggttgggaagggaggcgt

SEQ ID NO: 701371 - DNA, 120 bp, Artificial Sequence
  ENSG00000196209_0 (sequence is synthesized)
agactccaacactcacaagagagcagaggagccccaagtcttggggaccacagaagatgccatgtgctccacgatgtcggcccccacctgcctggcccacttgcctccctgcttcctgct

SEQ ID NO: 701372 - DNA, 120 bp, Artificial Sequence
  ENSG00000196209_1 (sequence is synthesized)
gctggcactggtccttgtcccctcagatgcctctgggcagagcagcaggaatgactggcaggtgctacagcccgagggccccatgctggtggcagaaggtgagacacttctactgaggtg

SEQ ID NO: 701373 - DNA, 120 bp, Artificial Sequence
  ENSG00000196209_2 (sequence is synthesized)
tatggtggtcggctcctgcactgatggtatgataaaatgggtgaaggtgagcactcaggaccaacaggaaatttataactttaaacgtggctccttccctggggtaatgcccatgatcca

SEQ ID NO: 701374 - DNA, 120 bp, Artificial Sequence
  ENSG00000196209_3 (sequence is synthesized)
acggacatcagaaccactgaattgtgattattccatctatatccacaatgtcaccagggagcacactggaacctaccactgtgtgaggtttgatggtttgagtgaacactcagaaatgaa

SEQ ID NO: 701375 - DNA, 120 bp, Artificial Sequence
  ENSG00000196209_4 (sequence is synthesized)
atcggatgaaggcacctcagtgcttgtgaagggagctggggaccctgaaccagacctgtggatcatccagccccaggaattggtgttggggaccactggagacactgtctttctgaactg

SEQ ID NO: 701376 - DNA, 120 bp, Artificial Sequence
  ENSG00000196209_5 (sequence is synthesized)
cacagtgcttggagacggtccccctggacccatcaggtggttccagggagctggtctgagccgggaggccatttacaactttggaggcatctcccaccccaaggagacagcggtgcaggc

SEQ ID NO: 701377 - DNA, 120 bp, Artificial Sequence
  ENSG00000196209_6 (sequence is synthesized)
ctccaacaatgacttcagcattcttctgcaaaacgtctccagtgaggatgcaggcacctattactgtgtaaagtttcagaggaaacccaacaggcaatacctgtctggacagggcaccag

SEQ ID NO: 701378 - DNA, 120 bp, Artificial Sequence
  ENSG00000196209_7 (sequence is synthesized)
cctgaaagtgaaagcaaaatctacctcttccaaagaggcagaattcaccagtgaacctgcaactgagatgtctccaacaggcctcctggttgtgttcgcacctgtggtcctggggctgaa

SEQ ID NO: 701379 - DNA, 120 bp, Artificial Sequence
  ENSG00000196209_8 (sequence is synthesized)
ggcaattaccttggctgcactcctactggccctggctacctctcggaggagccctgggcaagaagatgtcaagaccacaggcccagcaggagccatgaacaccttagcatggagcaaggg

SEQ ID NO: 701380 - DNA, 120 bp, Artificial Sequence
  ENSG00000196209_9 (sequence is synthesized)
tcaagagtgaggggtcagccccagagtgaggaccctctgagttggagaggagccagggctcctcaaccatttccctacctccagtcccagcctctaggtgcccccaggcctcatgacaaa

SEQ ID NO: 701381 - DNA, 120 bp, Artificial Sequence
  ENSG00000196209_10 (sequence is synthesized)
ctcctagatccctacatctggttttggtccacctagtgaaattcccttctttgcaccgggcttccctctaaaatgtctccctttctctttttggcctgttcaagacctccttgcttttca

SEQ ID NO: 701382 - DNA, 120 bp, Artificial Sequence
  ENSG00000196209_11 (sequence is synthesized)
tgcagccctttctggtgcgccctgcccctttccccacctcgctacatccttcttggcctccaacatccaactcagagtcttcttcccaggagatgtctgtaagaatctctgaactcaacc

SEQ ID NO: 701383 - DNA, 120 bp, Artificial Sequence
  ENSG00000196209_12 (sequence is synthesized)
agccagaccatctgtgcccctccatctacacctttctccccactccttcctgccttccttccatccccctcatggctggcttgggcaggtataatattagaatgcaggttcagcaactat

SEQ ID NO: 701384 - DNA, 120 bp, Artificial Sequence
  ENSG00000196209_13 (sequence is synthesized)
aacaaagctcttaaataacagtggcttaaaccagtggaaatcaaccagaaagttgaccatcagcaggccaagcaatacagagactccctggtattgagacccaggattcactgatctcat

SEQ ID NO: 701385 - DNA, 120 bp, Artificial Sequence
  ENSG00000196209_14 (sequence is synthesized)
tgctaccaggtccaccttctaggcagccagactggaaaagagggcaggaaaggggagcaggaccctcccctttaagtgcacagtcaggaacttggccacctcacttatctctacttggct

SEQ ID NO: 701386 - DNA, 120 bp, Artificial Sequence
  ENSG00000196209_15 (sequence is synthesized)
ggaatgtggtcacatggtcacacctagctgcaagaaacactgggagatgtagtctttatttctggcagcaatgcgcccagctgcaagttttcactagagaaaccagatggcagatatcag

SEQ ID NO: 701387 - DNA, 120 bp, Artificial Sequence
  ENSG00000196209_16 (sequence is synthesized)
gggataaccagttatctccaccacagcagcatacagacagcctctcacctgccctgtgggacacctgagttcaatgcccagctagctagccagcacttcttcccactatcacctcccctg

SEQ ID NO: 701388 - DNA, 120 bp, Artificial Sequence
  ENSG00000196209_17 (sequence is synthesized)
gggcagcatgatgtggggcagtagttcccaagatgagtgattttgcccccactggacttttggcaatgtctagagatgtttttggttggcacaacctgggggggtgctaccaccatctag

SEQ ID NO: 701389 - DNA, 120 bp, Artificial Sequence
  ENSG00000196209_18 (sequence is synthesized)
tggactgagaagccctgacatggggaagagtgtgcatgcccaggagtcagacacacctgcctttaaccctgaggcctctgcctcctccctgtgcaccctcagtgactaatcagagtccct

SEQ ID NO: 701390 - DNA, 120 bp, Artificial Sequence
  ENSG00000196209_19 (sequence is synthesized)
actaatcagagtcccttcccatcacggaacatccaggatactaatgtggacttctctgcattgtgtaagaaccaattcaagaccaggcacggtggcttatgcatgtaatcccagcacttt

SEQ ID NO: 701391 - DNA, 120 bp, Artificial Sequence
  ENSG00000196209_20 (sequence is synthesized)
actggagccaccctcattgaatcctgaaacgtggttgaaagctgactctgtgccaggccctaatcagtgtgctgagaaagaaacagaagtctgctctctcagagcttacctcctcccgag

SEQ ID NO: 701392 - DNA, 120 bp, Artificial Sequence
  ENSG00000196209_21 (sequence is synthesized)
agaagacagacaatgagcaagtaaccctagggtggacagaagaggcctcctgataaagtgacatttgagcagacacctgaaggaggtgaggaagagagccctgcagatacccaggggaag

SEQ ID NO: 701393 - DNA, 120 bp, Artificial Sequence
  ENSG00000196209_22 (sequence is synthesized)
agctgaaaagtacaaggaacagcgaatgcaaaggtcctgaggcaggagcgtgcttgacttgcacaagaacagcaaacaccaagcagaatgcctggcctgtattagaccccgtaaacgcct

SEQ ID NO: 701394 - DNA, 120 bp, Artificial Sequence
  ENSG00000196209_23 (sequence is synthesized)
gaactacatacatggcagagatgaagcacacagtctcggaaatctggctgtgcaggttcaaattccagttctcctacttatctcttggggaagtgcgggaatcttcagttcttgtctgct

SEQ ID NO: 701395 - DNA, 120 bp, Artificial Sequence
  ENSG00000196209_24 (sequence is synthesized)
tggaagaaagatttcagccaagagacacacagcaaaggtgaagtagcagagtttattgaagaaagataaagtacgttcctagaaaggagtgggctgacctggctggaaaacagcatcagg

SEQ ID NO: 701396 - DNA, 120 bp, Artificial Sequence
  ENSG00000196209_25 (sequence is synthesized)
caaaaaacagcagtagcagtgtttatttaaagagacagtacactctgaaagaacgagccagcagcagctggtgctgggggaccctctttatgagaatcttacatgattattcgtgcaggg

SEQ ID NO: 701397 - DNA, 120 bp, Artificial Sequence
  ENSG00000196209_26 (sequence is synthesized)
gcatgagggagcgtcacttacaatcatgttttaggtggtccccctggctgtgaatgttgtgtgtttgtacgcgctagtaaacacattgcctgtctcattagcatttaaaatctccactca

SEQ ID NO: 701398 - DNA, 120 bp, Artificial Sequence
  ENSG00000196209_27 (sequence is synthesized)
aatcctagccgatgatcctgggacagctgcctaacctttccggaccctcagtttcctctgtcaaaaaatgggaatgatgccatttaccttacagaagcattgtgaagaataagtgacatc

SEQ ID NO: 701399 - DNA, 120 bp, Artificial Sequence
  ENSG00000196209_28 (sequence is synthesized)
ttagcacagtgactacaggaatcacagcccagacacaaaagcaggaaaccctttgaccgggctccttcctattgcaccaacagccttgtgttgctgcaatgaaaacacttccccaagcag

SEQ ID NO: 701400 - DNA, 120 bp, Artificial Sequence
  ENSG00000196209_29 (sequence is synthesized)
atgaatggcttggtcatgggaagggagcagtcccagactcctggggctaacctgccaccaagaatgctcccaggacttcatctcaactgcagaactaggaccccagagaaccatgttata

SEQ ID NO: 701401 - DNA, 120 bp, Artificial Sequence
  ENSG00000196209_30 (sequence is synthesized)
acagctcagctataacgaactttctcatagccagggccatgtaactgtttagtgggaaatgttgtttgagaggtggtgagctccctgtgattctgagtgtagggacacactgtgaggcta

SEQ ID NO: 701402 - DNA, 120 bp, Artificial Sequence
  ENSG00000196209_31 (sequence is synthesized)
tgcacagcgacactggagaacatggctttgtagctaagcctcctggatggagccccttcctagtgtaatgggcaggttctcgccccttgagtctggtatctgactctatgaactagcggg

SEQ ID NO: 701403 - DNA, 120 bp, Artificial Sequence
  ENSG00000196209_32 (sequence is synthesized)
gaggggacaagaatcagagaccctacttcatggggttgtgtgtgcactcaaggagatcacacatgccaggtgtccagaactgtgcctagcacatctcatgttaacattcaaggactctca

SEQ ID NO: 701404 - DNA, 120 bp, Artificial Sequence
  ENSG00000196209_33 (sequence is synthesized)
cacaaaatttcagtggcatacaacaatacatatttgtatctctacatgcacatttacatgtggctgggtggttccactcctcatgtctcatgccagagcccaggctggagaggtagcaac

SEQ ID NO: 701405 - DNA, 120 bp, Artificial Sequence
  ENSG00000196209_34 (sequence is synthesized)
tatgtggggcatgttttctcataaagatggcagaagcagaagcccagtcccaactcttcaagtacacctcaagcatctactcacattatgtctgctaacagcccactggctaaagcaagt

SEQ ID NO: 701406 - DNA, 120 bp, Artificial Sequence
  ENSG00000196209_35 (sequence is synthesized)
cacatggctcagctccaagtcaagggacaaggaagaatagtcttccaccatgcaccaaaggtaagagtgtggatgtaccctattacaagcacagagtcaaaacctgaggctgatcatgtc

SEQ ID NO: 701407 - DNA, 120 bp, Artificial Sequence
  ENSG00000196209_36 (sequence is synthesized)
atctaccacactccccaagtactcaatcatggcatctgtaagtccacctatggtgacctgaatacccaaatcctgggcctgtcattgaatagtagttccttcttaagtcagttaccctgg

SEQ ID NO: 701408 - DNA, 73 bp, Artificial Sequence
  ENSG00000196214_0 (sequence is synthesized)
agacccggaagtggatggcgtggagatatggcgcaactgcggcgcggacacttgacattcagggatgcagaag

SEQ ID NO: 701409 - DNA, 120 bp, Artificial Sequence
  ENSG00000196214_1 (sequence is synthesized)
gctttatacagggatgtgatgttggagaactacaggaacctggtctccctgggaatctgtcttcctgacctgagtattatctccatgatgaagcaaaggacagagccctggactgtggag

SEQ ID NO: 701410 - DNA, 120 bp, Artificial Sequence
  ENSG00000196214_2 (sequence is synthesized)
aatgaaatgaaagtagcaaaaaatccagataggtgggaaggtatcaaagatatcaacacagggaggagctgtgcagtgagaagcaaagcaggaaacaagcctattacaaatcaacttgga

SEQ ID NO: 701411 - DNA, 120 bp, Artificial Sequence
  ENSG00000196214_3 (sequence is synthesized)
ttaacctttcagttacctctgccagaactggagatatttcaaggtgaagggaagatttatgaatgtaatcaagttcaaaagttcatcagccacagttcttcagtttcgccacttcaaaga

SEQ ID NO: 701412 - DNA, 120 bp, Artificial Sequence
  ENSG00000196214_4 (sequence is synthesized)
atttactctggggtcaaaacccacatatttaataaacataggaatgattttgttgattttccattgctgtcacaagaacagaaagcacacattaggagaaaaccttacgaatgtaatgag

SEQ ID NO: 701413 - DNA, 120 bp, Artificial Sequence
  ENSG00000196214_5 (sequence is synthesized)
cagggcaaagtcttcagagtgtcttcaagccttcctaatcatcaagtaatccacactgcagataaacctaacagatgtcatgaatgtggtaaaaccgtcagggacaagtcaggcctcgca

SEQ ID NO: 701414 - DNA, 120 bp, Artificial Sequence
  ENSG00000196214_6 (sequence is synthesized)
gaacattggagaattcgtacaggagagaaaccttacaaatgtaaagagtgtggcaagctcttcaatcgaattgcataccttgcacgacacgagaaagtgcatactggagagagtccttac

SEQ ID NO: 701415 - DNA, 120 bp, Artificial Sequence
  ENSG00000196214_7 (sequence is synthesized)
aaatgtaatgagtgtggcaaggtcttcagtcgaattacataccttgtacgacatcagaaaattcatactagagagaaacctcataaatgtaacaaatgtggcaaggtttatagtagcagt

SEQ ID NO: 701416 - DNA, 120 bp, Artificial Sequence
  ENSG00000196214_8 (sequence is synthesized)
tcatacctagcacaacattggagaattcatacaggagagaaactttacaaatgtaataaatgtggcaaagaatttagtgggcattcaagcctcaccacccatctgttaatccacactgga

SEQ ID NO: 701417 - DNA, 120 bp, Artificial Sequence
  ENSG00000196214_9 (sequence is synthesized)
gagaaaccttacaaatgtaaagaatgtgacaaagcttttaggcacaagttctccctgacagttcatcagagaaatcataatggagagaaaccttataaatgtcatgaatgtggcaaagtc

SEQ ID NO: 701418 - DNA, 81 bp, Artificial Sequence
  ENSG00000196214_10 (sequence is synthesized)
tggagagaaaccttataaatgtcatgaatgtggcaaagtcttcactcaagtttcacatcttgcacgacatcagaaaattca

SEQ ID NO: 701419 - DNA, 120 bp, Artificial Sequence
  ENSG00000196214_11 (sequence is synthesized)
atccacactggagagaaaccttacaaatgccatgtgtgtggtaaggtctttaggcacagttcatggtttgtacagcatcagagaagtgttcatgagagagtccttacaaactgagtttgg

SEQ ID NO: 701420 - DNA, 120 bp, Artificial Sequence
  ENSG00000196214_12 (sequence is synthesized)
caaactctatcataagttctagcagtaatcaacatccgagagtctatactagaaagaaatcatttaaatgtactatatgtggcacaggctgtatcgagacctaccaaatcactagacatc

SEQ ID NO: 701421 - DNA, 120 bp, Artificial Sequence
  ENSG00000196214_13 (sequence is synthesized)
gaaacattcatctttggtgaaaccacacaaatggattgtgtgtgccaaggccaacaagtcaaaatatgttgaacctaatgatatgatgtgtataaagggtgcaaggacacgtggaaatga

SEQ ID NO: 701422 - DNA, 68 bp, Artificial Sequence
  ENSG00000196214_14 (sequence is synthesized)
atatgatgtgtataaagggtgcaaggacacgtggaaatgatctgtaatattcgggttattaaaaatgt

SEQ ID NO: 701423 - DNA, 64 bp, Artificial Sequence
  ENSG00000196214_15 (sequence is synthesized)
ttgggtttgaaaggccaggggcagtggttcatgcctataatctcagcacaatagaaagccaaga

SEQ ID NO: 701424 - DNA, 120 bp, Artificial Sequence
  ENSG00000196214_16 (sequence is synthesized)
tggttcatgcctataatctcagcacaatagaaagccaagacaggagggtcacttgatgcctggagatcaagataagtatgggcaacgtagcaaggcccatccctacaaaataaaaaaaat

SEQ ID NO: 701425 - DNA, 120 bp, Artificial Sequence
  ENSG00000196214_17 (sequence is synthesized)
aagccaggcccttggcatgtgtctgtagttccagctactcaagaggccgaggcaagaggattgctcaagcccaggagtttgagagtttgagcagtgagctctgatcttgccatttgtact

SEQ ID NO: 701426 - DNA, 120 bp, Artificial Sequence
  ENSG00000196214_18 (sequence is synthesized)
ggtgacagagcgagaccctgtctcaaaagaaaaaaaaggctagtttttatgacttcaacctgaactttgaaatttcttcatgtgccttccctacaggcctttcactgtggtctgggaaag

SEQ ID NO: 701427 - DNA, 120 bp, Artificial Sequence
  ENSG00000196214_19 (sequence is synthesized)
tgggaaagaatcagtaagatgacagggctgacttcattagatgaggagcgtttctatccagtttcctggaggaataaggacactgccttttcagattaaagattgtctgatttagagacc

SEQ ID NO: 701428 - DNA, 120 bp, Artificial Sequence
  ENSG00000196214_20 (sequence is synthesized)
atggaggtggacagagaataacaaaaccgtgatggcagtcatcatgcttattgcagttagcacacacttttcctgacaggcacagtgctgctgtgctctacaaatgaccatgaaatagag

SEQ ID NO: 701429 - DNA, 120 bp, Artificial Sequence
  ENSG00000196214_21 (sequence is synthesized)
cacgccatgactttaggacacagggatttttatgggaagagagttcatcagggactgattacgtaggagagacgatgcaggggaaatggtggccaccgtctccattgaatagcaatagct

SEQ ID NO: 701430 - DNA, 120 bp, Artificial Sequence
  ENSG00000196214_22 (sequence is synthesized)
gctgtttagcaaagactgattaaaaagtactctgatttttcaaatggaagagagaacagttaaatcagagtagagagtttaatcaaaactaccagtggaacatgttcttgagtaggattc

SEQ ID NO: 701431 - DNA, 120 bp, Artificial Sequence
  ENSG00000196214_23 (sequence is synthesized)
acatttaactgctggcataatttgcaactgttggattttctcatgtttggaacaataaagttgaaattttccaaagtgtgaatgatttaccttctttctaccaatattgttttatctcgt

SEQ ID NO: 701432 - DNA, 120 bp, Artificial Sequence
  ENSG00000196214_24 (sequence is synthesized)
ctcaggaggatactttatagcagacaataataaggcaccattaggatttttaaattaatttatttttaaaattaaagttctagtgtacatgtccacaacatgcaggtttgttacataggt

SEQ ID NO: 701433 - DNA, 120 bp, Artificial Sequence
  ENSG00000196214_25 (sequence is synthesized)
tttacgttagatatttctcctaatgttatccctctgccagccccccaccccccgacaggccccggtgtgtgatgttacccgccttgtgtccaggtgttctcattgatcaattcccaccta

SEQ ID NO: 701434 - DNA, 120 bp, Artificial Sequence
  ENSG00000196214_26 (sequence is synthesized)
ttacaggcatgagccacggcgcctggccaggatttttaaggttgaagcatccacaacaattttgtgtgtgaaatgaaatgacatgcacttttgggtatatacacttgggtaagtatgatt

SEQ ID NO: 701435 - DNA, 120 bp, Artificial Sequence
  ENSG00000196214_27 (sequence is synthesized)
tgaaatgaaatgacatgcacttttgggtatatacacttgggtaagtatgattttgggtaataatacttagtacttaagttattctctctactctttgtttttgttttttgtttgttttgt

SEQ ID NO: 701436 - DNA, 120 bp, Artificial Sequence
  ENSG00000196214_28 (sequence is synthesized)
ctgggattataggcatgagccaccacacttggcctacctctctactctgccctaagatgcttttgtgggtaaagtgaaaatcacataacagtgcagcttcatcatcatatgccctcaatg

SEQ ID NO: 701437 - DNA, 120 bp, Artificial Sequence
  ENSG00000196214_29 (sequence is synthesized)
aatgttcatcactgttgataaacatgcactgtattatgtttctgtgtgcctttttcttgtgtgccaagtaagacccatggcaggcaccttcattttcaggaagcgaaaatacagatacag

SEQ ID NO: 701438 - DNA, 120 bp, Artificial Sequence
  ENSG00000196214_30 (sequence is synthesized)
taatatggaaaataggacaaagtgtggacttcaggatgaaaatattgtaacaatcttgctgttgacctcgtagcgctcagtgacataatttgaaaaaatattaatgttcagaaatgttct

SEQ ID NO: 701439 - DNA, 120 bp, Artificial Sequence
  ENSG00000196214_31 (sequence is synthesized)
cttgaggatgaacacacagattgggaatttcgttttgctttggtagattaactagaaacttcacattttcacccttataacctttttggtaatttgaacttttgatcattcttctggaac

SEQ ID NO: 701440 - DNA, 120 bp, Artificial Sequence
  ENSG00000196214_32 (sequence is synthesized)
tgctttgacatccacctgaagtttggtttgggtattgagaatgatgatgccattcactaatgtgatctcaaaatgtttactccataatgaggctttctggggagagcagggtagacttcc

SEQ ID NO: 701441 - DNA, 120 bp, Artificial Sequence
  ENSG00000196214_33 (sequence is synthesized)
ccggttggtccaaatatgactagggaatcggcataggtgactggcttggggtatgatgattgttaagggatagggcttgggcaggggtgcccacttgtggtttgaactttcagctggtgc

SEQ ID NO: 701442 - DNA, 120 bp, Artificial Sequence
  ENSG00000196214_34 (sequence is synthesized)
caaaggagtgggcactgaggatttttcagttgaccagatgggcagaataggaagagggagtgcagaggtgtaaaaggcgttggtgttcagacatcacaaaatgcagtcaactctaggaca

SEQ ID NO: 701443 - DNA, 120 bp, Artificial Sequence
  ENSG00000196214_35 (sequence is synthesized)
actctagcttcctctggaagctcctgccatcttggttaggaaagactctgattttcttcatgataatatcttacgttccttttatagttacagatacaggtctcattgcacaatatgatt

SEQ ID NO: 701444 - DNA, 120 bp, Artificial Sequence
  ENSG00000196214_36 (sequence is synthesized)
attgcacaatatgattgttgaaaacacttgtgaaatttttttagtaaaattgcctaagatactttttatagtagacaatgaaaattagtgtgtgggtttataataaatataatgtattat

SEQ ID NO: 701445 - DNA, 120 bp, Artificial Sequence
  ENSG00000196214_37 (sequence is synthesized)
atatttgttataaatatgatattactagaagagcatttttccaaaagctatggaaatgtcattttcccgttacagcatcaagcaatatattccatggttcattttcaactctaataaaat

SEQ ID NO: 701446 - DNA, 120 bp, Artificial Sequence
  ENSG00000196214_38 (sequence is synthesized)
tatattttgtgtttatatatgcacgtatagacacatatataatattttttttttacttttttctttttctgtacattgcatccagatgctatgcttgtttgtttttttttttgagacaga

SEQ ID NO: 701447 - DNA, 120 bp, Artificial Sequence
  ENSG00000196214_39 (sequence is synthesized)
acaggcatgagccaccatgcccggccagatgctatgcttaatacattttttccgaatgtcactctagtgaaaattttaggggacacaaaaatgagactgttgtttggagacaatattttt

SEQ ID NO: 701448 - DNA, 120 bp, Artificial Sequence
  ENSG00000196214_40 (sequence is synthesized)
gacaatattttttgacaagagtatgcacaagacaatggcaggtataaacgttttattgtaaatatgaaaaaggaaaaaatgctttcactatattagaggacttgaagtaacgtgaagtga

SEQ ID NO: 701449 - DNA, 78 bp, Artificial Sequence
  ENSG00000196214_41 (sequence is synthesized)
gctttcactatattagaggacttgaagtaacgtgaagtgattccaaccctttatctttattttatttatttattttag

SEQ ID NO: 701450 - DNA, 120 bp, Artificial Sequence
  ENSG00000196214_42 (sequence is synthesized)
acctcccgggagcatgctgctctatcttttttttcagatgtttgagctattccaggttttttgggatttctgttggtttgttttgttttttgcttttctacataattgtttggataatct

SEQ ID NO: 701451 - DNA, 120 bp, Artificial Sequence
  ENSG00000196214_43 (sequence is synthesized)
tgtcagtatctacgaagtgccttgatagtaaatatattaaccctgtgtatcaatttggggtaatttcacatttttttctatgttgagtttatcaataaattgatattgtatatgtctcta

SEQ ID NO: 701452 - DNA, 89 bp, Artificial Sequence
  ENSG00000196214_44 (sequence is synthesized)
aaacagctttaacctggatgtggaggaggatgacattgagaatctcttagaggattgacttctaaagagtcatgttggccgggcgcggg

SEQ ID NO: 701453 - DNA, 120 bp, Artificial Sequence
  ENSG00000196214_45 (sequence is synthesized)
aaaaaacaaaaaaagtcatgttatgtgaaggagaagcccagaagaggaaagcagaggagtcaggcatgccacttactcagggacacttgacattcagggacgtggccatagaattctctc

SEQ ID NO: 701454 - DNA, 120 bp, Artificial Sequence
  ENSG00000196214_46 (sequence is synthesized)
gacagagccctggactgtggagaatgaaatgaaagtagcaaaaaatccagataggtgggaaggtatcaaagatatcaacacagatggagtcctgttctgtcgcccaggctggagtacagt

SEQ ID NO: 701455 - DNA, 120 bp, Artificial Sequence
  ENSG00000196214_47 (sequence is synthesized)
aaacagctttaacctggatgtggaggaggatgacattgagaatctcttagaggtggttcatgaggaatgggttaatgaggagtcattggaactgatacaggaacatgtagctgaagaaga

SEQ ID NO: 701456 - DNA, 81 bp, Artificial Sequence
  ENSG00000196214_48 (sequence is synthesized)
agtcattggaactgatacaggaacatgtagctgaagaagaggcaagagaatagggaactggctgggcacggtggctcacat

SEQ ID NO: 701457 - DNA, 77 bp, Artificial Sequence
  ENSG00000196214_49 (sequence is synthesized)
acacggtgcatgcctgtaatctcagctacacgggaggctgaggcaagaagaattgcttgcacccaggaggcagaggt

SEQ ID NO: 701458 - DNA, 120 bp, Artificial Sequence
  ENSG00000196218_0 (sequence is synthesized)
atgggtgacgcagaaggcgaagacgaggtccagttcctgcggacggacgatgaggtggtcctgcagtgcagcgctaccgtgctcaaggagcagctcaagctctgcctggccgccgagggc

SEQ ID NO: 701459 - DNA, 120 bp, Artificial Sequence
  ENSG00000196218_1 (sequence is synthesized)
ttcggcaaccgcctgtgcttcctggagcccactagcaacgcgcagaatgtgccccccgatctggccatctgttgcttcgtcctggagcagtccctgtctgtgcgagccctgcaggagatg

SEQ ID NO: 701460 - DNA, 120 bp, Artificial Sequence
  ENSG00000196218_2 (sequence is synthesized)
ctggctaacacggtggaggctggcgtggagtcatcccagggcgggggacacaggacgctcctgtatggccatgccatcctgctccggcatgcacacagccgcatgtatctgagctgcctc

SEQ ID NO: 701461 - DNA, 120 bp, Artificial Sequence
  ENSG00000196218_3 (sequence is synthesized)
accacctcccgctccatgactgacaagctggccttcgatgtgggactgcaggaggacgcaacaggagaggcttgctggtggaccatgcacccagcctccaagcagaggtctgaaggagaa

SEQ ID NO: 701462 - DNA, 120 bp, Artificial Sequence
  ENSG00000196218_4 (sequence is synthesized)
aaggtccgcgttggggatgacatcatccttgtcagtgtctcctccgagcgctacctgcacctgtcgaccgccagtggggagctccaggttgacgcttccttcatgcagacactatggaac

SEQ ID NO: 701463 - DNA, 120 bp, Artificial Sequence
  ENSG00000196218_5 (sequence is synthesized)
atgaaccccatctgctcccgctgcgaagagggcttcgtgacgggaggtcacgtcctccgcctctttcatggacatatggatgagtgtctgaccatttcccctgctgacagtgatgaccag

SEQ ID NO: 701464 - DNA, 120 bp, Artificial Sequence
  ENSG00000196218_6 (sequence is synthesized)
cgcagacttgtctactatgaggggggagctgtgtgcactcatgcccgctccctctggaggctggagccactgagaatcagctggagtgggagccacctgcgctggggccagccactccga

SEQ ID NO: 701465 - DNA, 120 bp, Artificial Sequence
  ENSG00000196218_7 (sequence is synthesized)
gtccggcatgtcactaccgggcagtacctagcgctcaccgaggaccagggcctggtggtggttgacgccagcaaggctcacaccaaggctacctccttctgcttccgcatctccaaggag

SEQ ID NO: 701466 - DNA, 120 bp, Artificial Sequence
  ENSG00000196218_8 (sequence is synthesized)
aagctggatgtggcccccaagcgggatgtggagggcatgggcccccctgagatcaagtacggggagtcactgtgcttcgtgcagcatgtggcctcaggactgtggctcacctatgctgct

SEQ ID NO: 701467 - DNA, 120 bp, Artificial Sequence
  ENSG00000196218_9 (sequence is synthesized)
ccagaccccaaggccctgcggctcggcgtgctcaagaagaaggccatgctgcaccaggagggccacatggacgacgcactgtcgctgacccgctgccagcaggaggagtcccaggccgcc

SEQ ID NO: 701468 - DNA, 120 bp, Artificial Sequence
  ENSG00000196218_10 (sequence is synthesized)
cgcatgatccacagcaccaatggcctatacaaccagttcatcaagagcctggacagcttcagcgggaagccacggggctcggggccacccgctggcacggcgctgcccatcgagggcgtt

SEQ ID NO: 701469 - DNA, 120 bp, Artificial Sequence
  ENSG00000196218_11 (sequence is synthesized)
atcctgagcctgcaggacctcatcatctacttcgagcctccctccgaggacttgcagcacgaggagaagcagagcaagctgcgaagcctgcgcaaccgccagagcctcttccaggaggag

SEQ ID NO: 701470 - DNA, 120 bp, Artificial Sequence
  ENSG00000196218_12 (sequence is synthesized)
gggatgctctccatggtcctgaattgcatagaccgcctaaatgtctacaccactgctgcccactttgctgagtttgcaggggaggaggcagccgagtcctggaaagagattgtgaatctt

SEQ ID NO: 701471 - DNA, 120 bp, Artificial Sequence
  ENSG00000196218_13 (sequence is synthesized)
ctctatgaactcctagcttctctaatccgtggcaatcgtagcaactgtgccctcttctccacaaacttggactggctggtcagcaagctggatcggctggaggcctcgtctggcatcctg

SEQ ID NO: 701472 - DNA, 120 bp, Artificial Sequence
  ENSG00000196218_14 (sequence is synthesized)
gaggtcctgtactgtgtcctcattgagagtccagaggttctgaacatcatccaggagaatcacatcaagtccatcatctccctcctggacaagcatgggaggaaccacaaggtcctggac

SEQ ID NO: 701473 - DNA, 120 bp, Artificial Sequence
  ENSG00000196218_15 (sequence is synthesized)
gtgctatgctccctgtgtgtgtgtaatggtgtggctgtacgctccaaccaagatcttattactgagaacttgctgcctggccgtgagcttctgctgcagacaaacctcatcaactatgtc

SEQ ID NO: 701474 - DNA, 120 bp, Artificial Sequence
  ENSG00000196218_16 (sequence is synthesized)
accagcatccgccccaacatctttgtgggccgagcggaaggcaccacgcagtacagcaaatggtactttgaggtgatggtggacgaggtgactccatttctgacagctcaggccacccac

SEQ ID NO: 701475 - DNA, 120 bp, Artificial Sequence
  ENSG00000196218_17 (sequence is synthesized)
ttgcgggtgggctgggccctcaccgagggctacaccccctaccctggggccggcgagggctggggcggcaacggggtcggcgatgacctctattcctacggctttgatggactgcatctc

SEQ ID NO: 701476 - DNA, 120 bp, Artificial Sequence
  ENSG00000196218_18 (sequence is synthesized)
tggacaggacacgtggcacgcccagtgacttccccagggcagcacctcctggcccctgaagacgtgatcagctgctgcctggacctcagcgtgccgtccatctccttccgcatcaacggc

SEQ ID NO: 701477 - DNA, 120 bp, Artificial Sequence
  ENSG00000196218_19 (sequence is synthesized)
tgccccgtgcagggtgtctttgagtccttcaacctggacgggctcttcttccctgttgtcagcttctcggctggtgtcaaggtgcggttcctccttggtggccgccatggtgaattcaag

SEQ ID NO: 701478 - DNA, 120 bp, Artificial Sequence
  ENSG00000196218_20 (sequence is synthesized)
ttcctgcccccacctggctatgctccatgccatgaggctgtgctccctcgagagcgactccatcttgaacccatcaaggagtatcgacgggaggggccccgggggcctcacctggtgggc

SEQ ID NO: 701479 - DNA, 120 bp, Artificial Sequence
  ENSG00000196218_21 (sequence is synthesized)
cccagtcgctgcctctcacacaccgacttcgtgccctgccctgtggacactgtccagattgtcctgccgccccatctggagcgcattcgggagaagctggcggagaacatccacgagctc

SEQ ID NO: 701480 - DNA, 120 bp, Artificial Sequence
  ENSG00000196218_22 (sequence is synthesized)
tgggcgctaacccgcatcgagcagggctggacctacggcccggttcgggatgacaacaagaggctgcacccgtgtcttgtggacttccacagccttccagagcctgagaggaactacaac

SEQ ID NO: 701481 - DNA, 120 bp, Artificial Sequence
  ENSG00000196218_23 (sequence is synthesized)
ctgcagatgtctggggagacgctcaagactctgctggctctgggctgccacgtgggcatggcggatgagaaggcggaggacaacctgaagaagacaaaactccccaagacgtatatgatg

SEQ ID NO: 701482 - DNA, 120 bp, Artificial Sequence
  ENSG00000196218_24 (sequence is synthesized)
agcaatgggtacaagccggctccgctggacctgagccacgtgcggctgacgccggcgcagacgacactggtggaccgtctggcagaaaatgggcacaacgtgtgggcccgagaccgcgtg

SEQ ID NO: 701483 - DNA, 120 bp, Artificial Sequence
  ENSG00000196218_25 (sequence is synthesized)
ggccagggctggagctacagcgcagtgcaggacatcccagcgcgccgaaaccctcggctggtgccctaccgcctgctggatgaagccaccaagcgcagcaaccgggacagcctctgccag

SEQ ID NO: 701484 - DNA, 120 bp, Artificial Sequence
  ENSG00000196218_26 (sequence is synthesized)
gccgtgcgcaccctcctgggctacggctacaacatcgagcctcctgaccaggagcccagtcaggtggagaaccagtctcgttgtgaccgggtgcgcatcttccgggcagagaaatcctat

SEQ ID NO: 701485 - DNA, 120 bp, Artificial Sequence
  ENSG00000196218_27 (sequence is synthesized)
acagtgcagagcggccgctggtacttcgagtttgaagcagtcaccacaggcgagatgcgcgtgggctgggcgaggcccgagctgaggcctgatgtagagctgggagctgacgagctggcc

SEQ ID NO: 701486 - DNA, 120 bp, Artificial Sequence
  ENSG00000196218_28 (sequence is synthesized)
tatgtcttcaatgggcaccgcggccagcgctggcacttgggcagtgaaccatttgggcgcccctggcagccgggcgatgtcgttggctgtatgatcgacctcacagagaacaccattatc

SEQ ID NO: 701487 - DNA, 120 bp, Artificial Sequence
  ENSG00000196218_29 (sequence is synthesized)
ttcaccctcaatggcgaggtcctcatgtctgactcaggctccgaaacagccttccgggagattgagattggggacggcttcctgcccgtctgcagcttgggacctggccaggtgggtcat

SEQ ID NO: 701488 - DNA, 120 bp, Artificial Sequence
  ENSG00000196218_30 (sequence is synthesized)
ctgaacctgggccaggacgtgagctctctgaggttctttgccatctgtggcctccaggaaggcttcgagccatttgccatcaacatgcagcgcccagtcaccacctggttcagcaaaggc

SEQ ID NO: 701489 - DNA, 120 bp, Artificial Sequence
  ENSG00000196218_31 (sequence is synthesized)
ctgccccagtttgagccagtgccccttgaacaccctcactatgaggtatcccgagtggacggcactgtggacacgcccccctgcctgcgcctgacccaccgcacctggggctcccagaac

SEQ ID NO: 701490 - DNA, 120 bp, Artificial Sequence
  ENSG00000196218_32 (sequence is synthesized)
agcctggtggagatgcttttcctgcggctgagcctcccagtccagttccaccagcacttccgctgcactgcaggggccaccccgctggcacctcctggcctgcagccccccgccgaggac

SEQ ID NO: 701491 - DNA, 120 bp, Artificial Sequence
  ENSG00000196218_33 (sequence is synthesized)
gaggcccgggcggcggaacccgaccctgactacgaaaacctgcgccgctcagctgggggctggagcgaggcagagaacggcaaagaagggactgcgaaggagggcgcccccgggggcacc

SEQ ID NO: 701492 - DNA, 120 bp, Artificial Sequence
  ENSG00000196218_34 (sequence is synthesized)
ccgcaggcggggggagaggcgcagcccgccagggcggagaatgagaaggatgccaccaccgagaagaacaagaagagaggcttcttattcaaggccaagaaggtcgccatgatgacccag

SEQ ID NO: 701493 - DNA, 120 bp, Artificial Sequence
  ENSG00000196218_35 (sequence is synthesized)
ccaccggccacccccacgctgccccgactccctcacgacgtggtgcctgcagacaaccgcgatgaccccgagatcatcctcaacaccaccacgtactattactccgtgagggtctttgct

SEQ ID NO: 701494 - DNA, 120 bp, Artificial Sequence
  ENSG00000196218_36 (sequence is synthesized)
ggacaggagcccagctgcgtgtgggcgggctgggtcacccctgactaccatcagcacgacatgagcttcgacctcagcaaggtccgggtcgtgacggtgaccatgggggatgaacaaggc

SEQ ID NO: 701495 - DNA, 120 bp, Artificial Sequence
  ENSG00000196218_37 (sequence is synthesized)
aacgtccacagcagcctcaagtgtagcaactgctacatggtgtggggcggagactttgtgagtcccgggcagcagggccggatcagccacacggaccttgtcattgggtgcctggtggac

SEQ ID NO: 701496 - DNA, 120 bp, Artificial Sequence
  ENSG00000196218_38 (sequence is synthesized)
ttggccactggcttaatgacctttacagccaatggcaaagagagcaacacctttttccaggtggaacccaacactaagctatttcctgccgtcttcgtcctgcccacccaccagaacgtc

SEQ ID NO: 701497 - DNA, 120 bp, Artificial Sequence
  ENSG00000196218_39 (sequence is synthesized)
atccagtttgagctggggaagcagaagaacatcatgccgttgtcagccgccatgttccaaagcgagcgcaagaacccggccccgcagtgcccaccgcggctggagatgcagatgctgatg

SEQ ID NO: 701498 - DNA, 120 bp, Artificial Sequence
  ENSG00000196218_40 (sequence is synthesized)
ccagtgtcctggagccgcatgcccaaccacttcctgcaggtggagacgaggcgtgccggcgagcggctgggctgggccgtgcagtgccaggagccgctgaccatgatggcgctgcacatc

SEQ ID NO: 701499 - DNA, 120 bp, Artificial Sequence
  ENSG00000196218_41 (sequence is synthesized)
cccgaggagaaccggtgcatggacatcctggagctgtcggagcgcctggacctgcagcgcttccactcgcacaccctgcgcctctaccgcgctgtgtgcgccctgggcaacaatcgcgtg

SEQ ID NO: 701500 - DNA, 120 bp, Artificial Sequence
  ENSG00000196218_42 (sequence is synthesized)
gcgcacgctctgtgcagccacgtagaccaagctcagctgctgcacgccctggaggacgcgcacctgccaggcccactgcgcgcaggctactatgacctcctcatcagcatccacctcgaa

SEQ ID NO: 701501 - DNA, 120 bp, Artificial Sequence
  ENSG00000196218_43 (sequence is synthesized)
agtgcctgccgcagccgccgctccatgctctctgaatacatcgtgcccctcacgcctgagacccgcgccatcacgctcttccctcctggaaggagcacagaaaatggtcacccccggcat

SEQ ID NO: 701502 - DNA, 120 bp, Artificial Sequence
  ENSG00000196218_44 (sequence is synthesized)
ggcctgccgggagttggagtcaccacttcgctgaggcccccgcatcatttctcgcccccctgtttcgtggccgctctgccagctgctggggcagcagaggccccggcccgcctcagccct

SEQ ID NO: 701503 - DNA, 120 bp, Artificial Sequence
  ENSG00000196218_45 (sequence is synthesized)
gccatcccgctggaggccctgcgggacaaggcactgaggatgctgggggaggcggtgcgcgacggtgggcagcacgctcgcgaccccgtcgggggctccgtggagttccagtttgtgcct

SEQ ID NO: 701504 - DNA, 120 bp, Artificial Sequence
  ENSG00000196218_46 (sequence is synthesized)
gtgctcaagctcgtgtccaccctgctggtgatgggcatctttggcgatgaggatgtgaaacagatcttgaagatgattgagcctgaggtcttcactgaggaagaagaggaggaggacgag

SEQ ID NO: 701505 - DNA, 120 bp, Artificial Sequence
  ENSG00000196218_47 (sequence is synthesized)
gaggaagagggtgaagaggaagatgaggaggagaaggaggaggatgaggaggaaacagcacaggaaaaggaagatgaggaaaaagaggaagaggaggcagcagaaggggagaaagaagaa

SEQ ID NO: 701506 - DNA, 120 bp, Artificial Sequence
  ENSG00000196218_48 (sequence is synthesized)
ggcttggaggaagggctgctccagatgaagttgccagagtctgtgaagttacagatgtgccacctgctggagtatttctgtgaccaagagctgcagcaccgtgtggagtccctggcagcc

SEQ ID NO: 701507 - DNA, 120 bp, Artificial Sequence
  ENSG00000196218_49 (sequence is synthesized)
tttgcggagcgctatgtggacaagctccaggccaaccagcggagccgctatggcctcctcataaaagccttcagcatgaccgcagcagagactgcaagacgtacccgcgagttccgctcc

SEQ ID NO: 701508 - DNA, 120 bp, Artificial Sequence
  ENSG00000196218_50 (sequence is synthesized)
ccaccccaggaacagatcaatatgctattgcaattcaaagatggtacagatgaggaagactgtcctctccctgaagagattcgacaggatttgcttgactttcatcaagacctgctggca

SEQ ID NO: 701509 - DNA, 120 bp, Artificial Sequence
  ENSG00000196218_51 (sequence is synthesized)
cactgtggaattcagctagatggagaggaggaggaaccagaggaagagaccaccctgggcagccgcctcatgagcctgttggagaaagtgcggctggtgaagaagaaggaagagaaacct

SEQ ID NO: 701510 - DNA, 120 bp, Artificial Sequence
  ENSG00000196218_52 (sequence is synthesized)
gaggaggagcggtcagcagaggagagcaaaccccggtccctgcaggagctggtgtcccacatggtggtgcgctgggcccaagaggacttcgtgcagagccccgagctggtgcgggccatg

SEQ ID NO: 701511 - DNA, 120 bp, Artificial Sequence
  ENSG00000196218_53 (sequence is synthesized)
ttcagcctcctgcaccggcagtacgacgggctgggtgagctgctgcgtgccctgccgcgggcgtacaccatctcaccgtcctccgtggaagacaccatgagcctgctcgagtgcctcggc

SEQ ID NO: 701512 - DNA, 120 bp, Artificial Sequence
  ENSG00000196218_54 (sequence is synthesized)
cagatccgctcgctgctcatcgtgcagatgggcccccaggaggagaacctcatgatccagagcatcgggaacatcatgaacaacaaagtcttctaccaacacccgaacctgatgagggcg

SEQ ID NO: 701513 - DNA, 120 bp, Artificial Sequence
  ENSG00000196218_55 (sequence is synthesized)
ctgggcatgcacgagacggtcatggaggtcatggtcaacgtcctcgggggcggcgagtccaaggagatccgcttccccaagatggtgacaagctgctgccgcttcctctgctatttctgc

SEQ ID NO: 701514 - DNA, 120 bp, Artificial Sequence
  ENSG00000196218_56 (sequence is synthesized)
cgaatcagccggcagaaccagcgctccatgtttgaccacctgagctacctgctggagaacagtggcatcggcctgggcatgcagggctccacgcccctggacgtggctgctgcctccgtc

SEQ ID NO: 701515 - DNA, 120 bp, Artificial Sequence
  ENSG00000196218_57 (sequence is synthesized)
attgacaacaatgagctggccttggcattgcaggagcaggacctggaaaaggttgtgtcctacctggcaggctgtggcctccagagctgccccatgcttgtggccaaagggtacccagac

SEQ ID NO: 701516 - DNA, 120 bp, Artificial Sequence
  ENSG00000196218_58 (sequence is synthesized)
attggctggaacccctgtggtggagagcgctacctggacttcctgcgctttgctgtcttcgtcaacggcgagagcgtggaggagaacgccaatgtggtggtgcggctgctcatccggaag

SEQ ID NO: 701517 - DNA, 120 bp, Artificial Sequence
  ENSG00000196218_59 (sequence is synthesized)
cctgagtgcttcggacccgccctgcggggtgagggtggctcagggctgctggctgccatcgaagaggccatccgcatctccgaggaccctgcgagggatggcccaggcatccgcagggac

SEQ ID NO: 701518 - DNA, 120 bp, Artificial Sequence
  ENSG00000196218_60 (sequence is synthesized)
cggcggcgcgagcactttggtgaggaaccgcctgaagaaaaccgggtgcacctgggacacgccatcatgtccttctatgccgccttgatcgacctgctcggacgctgtgcaccagagatg

SEQ ID NO: 701519 - DNA, 120 bp, Artificial Sequence
  ENSG00000196218_61 (sequence is synthesized)
catctaatccaagccggcaagggtgaggccctgcggatccgcgccatcctccgctcccttgtgcccttggaggaccttgtgggcatcatcagcctcccactgcagattcccaccctgggc

SEQ ID NO: 701520 - DNA, 120 bp, Artificial Sequence
  ENSG00000196218_62 (sequence is synthesized)
cacgtgctggacgtggggttcctgcccgacatgagggcagccgcctcgctggacacggccactttcagcaccaccgagatggcgctggcgctgaaccgctacctgtgcctggccgtgctg

SEQ ID NO: 701521 - DNA, 120 bp, Artificial Sequence
  ENSG00000196218_63 (sequence is synthesized)
ccgctcatcaccaagtgtgcgccgctctttgcgggcacagaacaccgcgccatcatggtggactctatgctgcataccgtgtaccgcctgtctcggggtcgttcgctcaccaaggcgcag

SEQ ID NO: 701522 - DNA, 120 bp, Artificial Sequence
  ENSG00000196218_64 (sequence is synthesized)
cgtgacgtcatcgaggactgcctcatgtcgctctgcaggtacatccgcccgtcgatgctgcagcacctgttgcgccgcctggtgttcgacgtgcccatcctcaacgagttcgccaagatg

SEQ ID NO: 701523 - DNA, 120 bp, Artificial Sequence
  ENSG00000196218_65 (sequence is synthesized)
ccactcaagctcctcaccaaccactatgagcgctgttggaagtactactgcctacccacgggctgggccaacttcggggtcacctcagaggaggagctgcacctcacacggaaactcttc

SEQ ID NO: 701524 - DNA, 120 bp, Artificial Sequence
  ENSG00000196218_66 (sequence is synthesized)
tggggcatctttgactctctggcccataagaaatacgacccggagctgtaccgcatggccatgccttgtctgtgcgccattgccggggctctgccccccgactatgtggatgcctcatac

SEQ ID NO: 701525 - DNA, 120 bp, Artificial Sequence
  ENSG00000196218_67 (sequence is synthesized)
tcatctaaggcagagaaaaaggccacagtggatgctgaaggcaactttgatccccggcctgtggagaccctcaatgtgatcatcccggagaagctggactccttcattaacaagtttgcg

SEQ ID NO: 701526 - DNA, 120 bp, Artificial Sequence
  ENSG00000196218_68 (sequence is synthesized)
gagtacacacacgagaagtgggccttcgacaagatccagaacaactggtcctatggagagaacatagacgaggagctgaagacccaccccatgctgaggccctacaagaccttttcagag

SEQ ID NO: 701527 - DNA, 120 bp, Artificial Sequence
  ENSG00000196218_69 (sequence is synthesized)
aaggacaaagagatttaccgctggcccatcaaggagtccctgaaggccatgattgcctgggaatggacgatagagaaggccagggagggtgaggaggagaagacggaaaagaaaaaaacg

SEQ ID NO: 701528 - DNA, 120 bp, Artificial Sequence
  ENSG00000196218_70 (sequence is synthesized)
cggaagatatcacaaagtgcccagacctatgatcctcgagaaggctacaaccctcagccccccgaccttagtgctgttaccctgtcccgggagctgcaggccatggcagaacaactggca

SEQ ID NO: 701529 - DNA, 120 bp, Artificial Sequence
  ENSG00000196218_71 (sequence is synthesized)
gaaaattaccacaacacgtggggacggaagaagaagcaggagctggaagccaaaggcggtgggacccaccccctgctggtcccctacgacacgctcacggccaaggagaaggcacgagat

SEQ ID NO: 701530 - DNA, 120 bp, Artificial Sequence
  ENSG00000196218_72 (sequence is synthesized)
cgagagaaggcccaggagctactgaaattcctgcagatgaatggctacgcggttacaagaggccttaaggacatggaactggactcgtcttccattgaaaagcggtttgcctttggcttc

SEQ ID NO: 701531 - DNA, 120 bp, Artificial Sequence
  ENSG00000196218_73 (sequence is synthesized)
ctgcagcagctgctgcgctggatggacatttctcaggagttcattgcccacctggaggctgtggtcagcagtgggcgagtggaaaagtccccacatgaacaggagattaaattctttgcc

SEQ ID NO: 701532 - DNA, 120 bp, Artificial Sequence
  ENSG00000196218_74 (sequence is synthesized)
aagatcctgctccctttgatcaaccagtacttcaccaaccactgcctctatttcttgtccactccggctaaagtgctgggcagcggtggccacgcctctaacaaggagaaggaaatgatc

SEQ ID NO: 701533 - DNA, 120 bp, Artificial Sequence
  ENSG00000196218_75 (sequence is synthesized)
accagcctcttctgcaaacttgctgctctcgtccgccaccgagtctctctctttgggacagacgccccagctgtggtcaactgtcttcacatcctggcccgctccctggatgccaggaca

SEQ ID NO: 701534 - DNA, 120 bp, Artificial Sequence
  ENSG00000196218_76 (sequence is synthesized)
gtgatgaagtcaggccctgagatcgtgaaggctggcctccgctccttcttcgagagtgcctcggaggacatcgagaagatggtggagaacctgcggctgggcaaggtgtcgcaggcgcgc

SEQ ID NO: 701535 - DNA, 120 bp, Artificial Sequence
  ENSG00000196218_77 (sequence is synthesized)
acccaggtgaaaggcgtgggccagaacctcacctacaccactgtggcactgctgccggtcctcaccaccctcttccagcacatcgcccagcaccagttcggagatgacgtcatcctggac

SEQ ID NO: 701536 - DNA, 120 bp, Artificial Sequence
  ENSG00000196218_78 (sequence is synthesized)
gacgtccaggtctcttgctaccgaacgctgtgcagtatctactccctgggaaccaccaagaacacttatgtggaaaagcttcggccagccctcggggagtgcctggcccgtctggcagca

SEQ ID NO: 701537 - DNA, 120 bp, Artificial Sequence
  ENSG00000196218_79 (sequence is synthesized)
gccatgccggtggcgttcctggagccgcagctgaacgagtacaacgcctgctccgtgtacaccaccaagtctccgcgggagcgggccatcctggggctccccaacagtgtggaggagatg

SEQ ID NO: 701538 - DNA, 120 bp, Artificial Sequence
  ENSG00000196218_80 (sequence is synthesized)
tgtcccgacatcccggtgctggagcggctcatggcagacattggggggctggccgagtcaggtgcccgctacacagagatgccgcatgtcatcgagatcacgctgcccatgctatgcagc

SEQ ID NO: 701539 - DNA, 120 bp, Artificial Sequence
  ENSG00000196218_81 (sequence is synthesized)
tacctgccccgatggtgggagcgcgggcccgaggcacccccttccgccctgcccgccggcgcccccccaccctgcacagctgtcacctctgaccacctcaactccctgctggggaatatc

SEQ ID NO: 701540 - DNA, 120 bp, Artificial Sequence
  ENSG00000196218_82 (sequence is synthesized)
ctgagaatcatcgtcaacaacctgggcattgacgaggcctcctggatgaagcggctggctgtgttcgcacagcccattgtgagccgtgcacggccggagctcctgcagtcccacttcatc

SEQ ID NO: 701541 - DNA, 120 bp, Artificial Sequence
  ENSG00000196218_83 (sequence is synthesized)
ccaactatcgggcggctgcgcaagagggcagggaaggtggtgtccgaggaggagcagctgcgcctggaggccaaggcggaggcccaggagggcgagctgctggtgcgggacgagttctct

SEQ ID NO: 701542 - DNA, 120 bp, Artificial Sequence
  ENSG00000196218_84 (sequence is synthesized)
gtgctctgccgggacctctacgccctgtatccgctgctcatccgctacgtggacaacaacagggcgcagtggctgacggagccgaatcccagcgcggaggagctgttcaggatggtgggc

SEQ ID NO: 701543 - DNA, 120 bp, Artificial Sequence
  ENSG00000196218_85 (sequence is synthesized)
gagatcttcatctactggtccaagtcccacaacttcaagcgcgaggagcagaactttgtggtccagaatgagatcaacaacatgtccttcctgactgctgacaacaaaagcaaaatggct

SEQ ID NO: 701544 - DNA, 120 bp, Artificial Sequence
  ENSG00000196218_86 (sequence is synthesized)
aaggcgggagatatacagtccggtggctcggaccaggaacgcaccaagaagaagcgccggggggaccggtactctgtgcagacgtcactgatcgtggccacactgaagaagatgctgccc

SEQ ID NO: 701545 - DNA, 120 bp, Artificial Sequence
  ENSG00000196218_87 (sequence is synthesized)
atcggcctgaatatgtgtgcgcccaccgaccaagacctcatcacgctggccaagacccgttacgccctgaaagacacagatgaggaggtccgggaatttctgcacaacaaccttcacctt

SEQ ID NO: 701546 - DNA, 120 bp, Artificial Sequence
  ENSG00000196218_88 (sequence is synthesized)
cagggaaaggtcgaaggctccccgtctctgcgctggcagatggctctgtaccggggcgtcccgggtcgcgaggaggacgccgatgaccccgagaaaatcgtgcgcagagtccaggaagtg

SEQ ID NO: 701547 - DNA, 120 bp, Artificial Sequence
  ENSG00000196218_89 (sequence is synthesized)
tcagccgtgctctactacctggaccagaccgagcacccttacaagtctaagaaggccgtgtggcacaagcttttgtccaaacagcgccggcgggcagtcgtggcctgtttccgtatgacg

SEQ ID NO: 701548 - DNA, 120 bp, Artificial Sequence
  ENSG00000196218_90 (sequence is synthesized)
cccctgtacaacctgcccacgcaccgggcatgtaacatgttcctggagagctacaaggctgcatggatcctgactgaagaccacagttttgaggaccgcatgatagatgacctttcaaaa

SEQ ID NO: 701549 - DNA, 120 bp, Artificial Sequence
  ENSG00000196218_91 (sequence is synthesized)
gctggggagcaggaggaggaggaggaagaggtggaagagaagaagccagaccccctgcaccagttggtcctgcacttcagccgcactgccctgacggaaaagagcaaactggatgaggat

SEQ ID NO: 701550 - DNA, 120 bp, Artificial Sequence
  ENSG00000196218_92 (sequence is synthesized)
tacctgtacatggcctatgctgatatcatggcaaagagctgccacctggaggagggaggggagaacggtgaagctgaagaggaggttgaggtctcctttgaggagaaacagatggagaag

SEQ ID NO: 701551 - DNA, 120 bp, Artificial Sequence
  ENSG00000196218_93 (sequence is synthesized)
cagaggctcttgtaccagcaagcacggctgcacacccggggggcggccgagatggtgctgcagatgatcagtgcctgcaaaggagagacaggtgccatggtgtcctccaccctgaagctg

SEQ ID NO: 701552 - DNA, 120 bp, Artificial Sequence
  ENSG00000196218_94 (sequence is synthesized)
ggcatctccatcctcaatggaggcaatgctgaggtccagcagaaaatgctggattatcttaaggacaagaaggaagttggcttcttccagagtatccaggcactgatgcaaacatgcagc

SEQ ID NO: 701553 - DNA, 120 bp, Artificial Sequence
  ENSG00000196218_95 (sequence is synthesized)
gtcctggatctcaatgcctttgagagacagaacaaggccgaggggctgggcatggtgaatgaggatggcactgtcatcaatcgccagaacggagagaaggtcatggcggatgatgaattc

SEQ ID NO: 701554 - DNA, 120 bp, Artificial Sequence
  ENSG00000196218_96 (sequence is synthesized)
acacaagacctgttccgattcctacaattgctctgtgaggggcacaataatgatttccagaactacctacggacacagacagggaacacgaccactattaacatcatcatttgcactgtg

SEQ ID NO: 701555 - DNA, 120 bp, Artificial Sequence
  ENSG00000196218_97 (sequence is synthesized)
gactacctcctgcggctgcaggaatccatcagcgacttctactggtactactcgggcaaggatgtcattgaagagcagggcaagaggaacttctccaaagccatgtcggtggctaagcag

SEQ ID NO: 701556 - DNA, 120 bp, Artificial Sequence
  ENSG00000196218_98 (sequence is synthesized)
gtgttcaacagcctcactgagtacatccagggtccctgcaccgggaaccagcagagcctggcgcacagtcgcctatgggacgcagtggtgggattcctgcacgtgttcgcccacatgatg

SEQ ID NO: 701557 - DNA, 120 bp, Artificial Sequence
  ENSG00000196218_99 (sequence is synthesized)
atgaagctcgctcaggactcaagccagatcgagctgctgaaggagctgctggatctgcagaaggacatggtggtgatgttgctgtcgctactagaagggaacgtggtgaacggcatgatc

SEQ ID NO: 701558 - DNA, 120 bp, Artificial Sequence
  ENSG00000196218_100 (sequence is synthesized)
gcccggcagatggtggacatgctcgtggaatcctcatccaatgtggagatgatcctcaagttcttcgacatgttcctgaaactcaaggacattgtgggctctgaagccttccaggactac

SEQ ID NO: 701559 - DNA, 120 bp, Artificial Sequence
  ENSG00000196218_101 (sequence is synthesized)
gtaacggatccccgtggcctcatctccaagaaggacttccagaaggccatggacagccagaagcagttcagcggtccagaaatccagttcctgctttcgtgctccgaagcggatgagaac

SEQ ID NO: 701560 - DNA, 120 bp, Artificial Sequence
  ENSG00000196218_102 (sequence is synthesized)
gaaatgatcaactgcgaagagttcgccaaccgcttccaggagccagcacgcgacatcggcttcaacgtggcggtgctgctgaccaacctgtcggagcatgtgccgcatgaccctcgcctg

SEQ ID NO: 701561 - DNA, 120 bp, Artificial Sequence
  ENSG00000196218_103 (sequence is synthesized)
cacaacttcctggagctggccgagagcatccttgagtacttccgcccctacctgggccgcatcgagatcatgggcgcgtcacgccgcatcgagcgcatctacttcgagatctcagagacc

SEQ ID NO: 701562 - DNA, 120 bp, Artificial Sequence
  ENSG00000196218_104 (sequence is synthesized)
aaccgcgcccagtgggagatgccccaggtgaaggagtccaagcgccagttcatcttcgacgtggtgaacgagggcggcgaggctgagaagatggagctcttcgtgagtttctgcgaggac

SEQ ID NO: 701563 - DNA, 120 bp, Artificial Sequence
  ENSG00000196218_105 (sequence is synthesized)
accatcttcgagatgcagatcgccgcgcagatctcggagcccgagggcgagccggagaccgacgaggacgagggcgcgggcgcggcggaggcgggcgcggaaggcgcggaggagggcgcg

SEQ ID NO: 701564 - DNA, 80 bp, Artificial Sequence
  ENSG00000196218_106 (sequence is synthesized)
caggccgggccctgcgaggcctcagctaccgcagcctgcggcggcgcgtgcggcggctgcggcggcttacggcccgcgag

SEQ ID NO: 701565 - DNA, 80 bp, Artificial Sequence
  ENSG00000196218_107 (sequence is synthesized)
ctgcggcggcttacggcccgcgaggcggccaccgcagtggcggcgctgctctgggcagcagtgacgcgcgctggggccgc

SEQ ID NO: 701566 - DNA, 120 bp, Artificial Sequence
  ENSG00000196218_108 (sequence is synthesized)
ggctcgctgttcggcggcggcctggtggagggcgccaagaaggtgacggtgaccgagctcctggcaggcatgcccgaccccaccagcgacgaggtgcacggcgagcagccggccgggccg

SEQ ID NO: 701567 - DNA, 120 bp, Artificial Sequence
  ENSG00000196218_109 (sequence is synthesized)
gagacgcagacggcgagggtgccagcgagggcgctggagacgccgcggagggcgctggagacgaggaggaggcggtgcacgaggccgggccgggcggtgccgacggggcggtggccgtga

SEQ ID NO: 701568 - DNA, 120 bp, Artificial Sequence
  ENSG00000196218_110 (sequence is synthesized)
gtgaccgatgggggccccttccggcccgaaggggctggcggtctcggggacatgggggacacgacgcctgcggaaccgcccacacccgagggctctcccatcctcaagaggaaattgggg

SEQ ID NO: 701569 - DNA, 120 bp, Artificial Sequence
  ENSG00000196218_111 (sequence is synthesized)
gtggatggagtggaggaggagctcccgccagagccagagcccgagccggaaccagagctggagccggagaaagccgatgccgagaatggggagaaggaagaagttcccgagcccacacca

SEQ ID NO: 701570 - DNA, 120 bp, Artificial Sequence
  ENSG00000196218_112 (sequence is synthesized)
gagccccccaagaagcaagcacctccctcaccccctccaaagaaggaggaagctggaggcgaattctggggagaactggaggtgcagagggtgaagttcctgaactacctgtcccggaac

SEQ ID NO: 701571 - DNA, 120 bp, Artificial Sequence
  ENSG00000196218_113 (sequence is synthesized)
ttttacaccctgcggttccttgccctcttcttggcatttgccatcaacttcatcttgctgttttataaggtctcagactctccaccaggggaggacgacatggaaggctcagctgctggg

SEQ ID NO: 701572 - DNA, 120 bp, Artificial Sequence
  ENSG00000196218_114 (sequence is synthesized)
gatgtgtcaggtgcaggctctggtggcagctctggctggggcttgggggccggagaggaggcagagggcgatgaggatgagaacatggtgtactacttcctggaggaaagcacaggctac

SEQ ID NO: 701573 - DNA, 120 bp, Artificial Sequence
  ENSG00000196218_115 (sequence is synthesized)
atggaacccgccctgcggtgtctgagcctcctgcatacactggtggcctttctctgcatcattggctataattgtctcaaggtgcccctggtaatctttaagcgggagaaggagctggcc

SEQ ID NO: 701574 - DNA, 120 bp, Artificial Sequence
  ENSG00000196218_116 (sequence is synthesized)
cggaagctggagtttgatggcctgtacatcacggagcagcctgaggacgatgacgtgaaggggcagtgggaccgactggtgctcaacacgccgtctttccctagcaactactgggacaag

SEQ ID NO: 701575 - DNA, 120 bp, Artificial Sequence
  ENSG00000196218_117 (sequence is synthesized)
tttgtcaagcgcaaggtcctggacaaacatggggacatctacgggcgggagcggattgctgagctactgggcatggacctggccacactagagatcacagcccacaatgagcgcaagccc

SEQ ID NO: 701576 - DNA, 120 bp, Artificial Sequence
  ENSG00000196218_118 (sequence is synthesized)
aacccgccgccagggctgctgacctggctcatgtccatcgatgtcaagtaccagatctggaagttcggggtcatcttcacagacaactccttcctgtacctgggctggtatatggtgatg

SEQ ID NO: 701577 - DNA, 120 bp, Artificial Sequence
  ENSG00000196218_119 (sequence is synthesized)
tccctcttgggacactacaacaacttcttctttgctgcccatctcctggacatcgccatgggggtcaagacgctgcgcaccatcctgtcctctgtcacccacaatgggaaacagctggtg

SEQ ID NO: 701578 - DNA, 120 bp, Artificial Sequence
  ENSG00000196218_120 (sequence is synthesized)
atgaccgtgggccttctggcggtggtcgtctacctgtacaccgtggtggccttcaacttcttccgcaagttctacaacaagagcgaggatgaggatgaacctgacatgaagtgtgatgac

SEQ ID NO: 701579 - DNA, 120 bp, Artificial Sequence
  ENSG00000196218_121 (sequence is synthesized)
atgatgacgtgttacctgtttcacatgtacgtgggtgtccgggctggcggaggcattggggacgagatcgaggaccccgcgggtgacgaatacgagctctacagggtggtcttcgacatc

SEQ ID NO: 701580 - DNA, 120 bp, Artificial Sequence
  ENSG00000196218_122 (sequence is synthesized)
accttcttcttcttcgtcatcgtcatcctgttggccatcatccagggtctgatcatcgacgcttttggtgagctccgagaccaacaagagcaagtgaaggaggatatggagaccaagtgc

SEQ ID NO: 701581 - DNA, 120 bp, Artificial Sequence
  ENSG00000196218_123 (sequence is synthesized)
ttcatctgtggaatcggcagtgactactttgatacgacaccgcatggcttcgagactcacacgctggaggagcacaacctggccaattacatgtttttcctgatgtatttgataaacaag

SEQ ID NO: 701582 - DNA, 120 bp, Artificial Sequence
  ENSG00000196218_124 (sequence is synthesized)
gatgagacagaacacacgggtcaggagtcttatgtctggaagatgtaccaagagagatgttgggatttcttcccagctggtgattgtttccgtaagcagtatgaggaccagcttagctga

SEQ ID NO: 701583 - DNA, 120 bp, Artificial Sequence
  ENSG00000196218_125 (sequence is synthesized)
atctacctcgcgggtgcctctggtgtctccagaggtctccgaccccagcccgcccccagccctcccgcccagcccgcagccccctccctctgttccccgacctcagaccctgggcttccg

SEQ ID NO: 701584 - DNA, 120 bp, Artificial Sequence
  ENSG00000196218_126 (sequence is synthesized)
cccacctcaagtgccttattctcacagcaagccccttagtccccaagcccctccccctaaggcagctgggggagaggtgacctagtactggaaaataaatctgtgctacgccccccagca

SEQ ID NO: 701585 - DNA, 120 bp, Artificial Sequence
  ENSG00000196218_127 (sequence is synthesized)
cgtggtcctggctctgtgggacctggcctaggatggaaacttaggtctggaggcggagtcaggaccctgactctgttggtggagacaaggttttccttctgccgtaccgagcacccttac

SEQ ID NO: 701586 - DNA, 120 bp, Artificial Sequence
  ENSG00000196218_128 (sequence is synthesized)
taatggcgctctgcagtggctgccaaagttctatacacgtggtggatttctgtactttaggtccagaaaagacctaagggaaaaaactgcctggcatttaaaaataaatctattagaatc

SEQ ID NO: 701587 - DNA, 120 bp, Artificial Sequence
  ENSG00000196218_129 (sequence is synthesized)
gcgggagcaccctctaggacttcctacctggcctgtcctcacccagccagcccgtcctgggcgcaatccctgcagtcctcagagcagcccctcttacctcctctccctctcccttcctcc

SEQ ID NO: 701588 - DNA, 120 bp, Artificial Sequence
  ENSG00000196218_130 (sequence is synthesized)
ccagctccttcctcctcctgtatcttctccctcctcccatctccctcctcctctccatctccctcttctctcatctctgtctccttcctcctcctgtatcttctccctcctcccatttcc

SEQ ID NO: 701589 - DNA, 120 bp, Artificial Sequence
  ENSG00000196220_0 (sequence is synthesized)
agtccagccttgtgttcaccggagcttaagcgttgcagcaggaaaacttccatctcgctctcctggctttgatcctcactggacatcagaccagaggcaccgaagggagggaggatgcga

SEQ ID NO: 701590 - DNA, 120 bp, Artificial Sequence
  ENSG00000196220_1 (sequence is synthesized)
gatgaccggccctttggcaacctgaccatcgacttagcagagccttcaaaagcaagccaggggctggctgcacgaccaaagaggcgccgcgcctctcgtggatgtgtgtgtgtgagtgat

SEQ ID NO: 701591 - DNA, 120 bp, Artificial Sequence
  ENSG00000196220_2 (sequence is synthesized)
ccagcgagtgtgtgtgcgtgtgagggtgtgtgtgtgtatgcctgtgtgcacagcacaactgtgtgcgtgtcccggtgagtgtgcctgtgcatgcgtgagtgtgtgtacgtgtgcatgtgt

SEQ ID NO: 701592 - DNA, 120 bp, Artificial Sequence
  ENSG00000196220_3 (sequence is synthesized)
gtgtgagtgcgcttggttattactattattattatttttggaagaaaaatctttgaaaatctggggcaggttactgtgctcctagggtgattcttcttttgcaagaggagctgaccaggg

SEQ ID NO: 701593 - DNA, 120 bp, Artificial Sequence
  ENSG00000196220_4 (sequence is synthesized)
caagctactagagccatttctcggcaagtaaagagatttttccttccagaaggagaaggatttttctccctgctctgcagccaagtgaaagagattagtccctaaacctgtgaaatcgac

SEQ ID NO: 701594 - DNA, 120 bp, Artificial Sequence
  ENSG00000196220_5 (sequence is synthesized)
cagagctgtgtgattaccagggcttgagagaggactcgaaaagaaaaggagaaataaatcaaacagcctgtcagttcctttggccacgtcagaagatgtcatctcaaactaagttcaaga

SEQ ID NO: 701595 - DNA, 120 bp, Artificial Sequence
  ENSG00000196220_6 (sequence is synthesized)
aagacaaagagatcattgctgaatatgaagcccaaataaaagagatccgcacgcagctggtggagcagttcaaatgtctggagcagcaatcagagtcgcgactgcagctgcttcaagacc

SEQ ID NO: 701596 - DNA, 120 bp, Artificial Sequence
  ENSG00000196220_7 (sequence is synthesized)
tccaggagtttttccgccggaaagctgagattgagctcgagtactcccgcagcctggagaagctggctgagcgcttctcctccaaaatccgcagctcccgggagcaccagttcaagaagg

SEQ ID NO: 701597 - DNA, 120 bp, Artificial Sequence
  ENSG00000196220_8 (sequence is synthesized)
accagtacctcctctcgcctgtgaactgttggtatctggttctgcatcagacccggcgggagagccgagaccatgccaccctcaatgacatcttcatgaacaatgtcatcgtccgcctct

SEQ ID NO: 701598 - DNA, 120 bp, Artificial Sequence
  ENSG00000196220_9 (sequence is synthesized)
cccagatcagtgaggatgtcatcagactcttcaaaaagagcaaggagattggcctgcagatgcacgaggagctcctgaaggtgaccaatgagctctacacagtcatgaaaacctaccaca

SEQ ID NO: 701599 - DNA, 120 bp, Artificial Sequence
  ENSG00000196220_10 (sequence is synthesized)
tgtaccatgcagagagcatcagtgcggaaagcaagctgaaggaggctgagaagcaggaggagaagcagttcaataagtcaggagacctcagcatgaacctgctccggcacgaggaccggc

SEQ ID NO: 701600 - DNA, 120 bp, Artificial Sequence
  ENSG00000196220_11 (sequence is synthesized)
cccagcgccgcagctctgtgaagaagattgagaagatgaaggagaagaggcaggccaagtactctgagaacaagctgaaatgcacaaaggcccggaatgactacttgctcaatctggcag

SEQ ID NO: 701601 - DNA, 120 bp, Artificial Sequence
  ENSG00000196220_12 (sequence is synthesized)
ccaccaacgcagctataagcaaatactacatccatgatgtctctgatctgatcgattgctgtgatttgggcttccatgccagcctggcccgcaccttccggacctatctctcagctgaat

SEQ ID NO: 701602 - DNA, 120 bp, Artificial Sequence
  ENSG00000196220_13 (sequence is synthesized)
acaacctggagacctctcgccacgaagggctggatgtcattgagaatgcagtggacaacctggattcccgaagtgacaagcacacagtcatggacatgtgcaatcaagtcttctgccctc

SEQ ID NO: 701603 - DNA, 120 bp, Artificial Sequence
  ENSG00000196220_14 (sequence is synthesized)
cactcaagttcgagttccagccccacatgggggatgaggtctgccaggtcagcgctcagcagcccgtccagacagaactgctcatgcgttatcaccagctgcagtccagactggccaccc

SEQ ID NO: 701604 - DNA, 120 bp, Artificial Sequence
  ENSG00000196220_15 (sequence is synthesized)
tcaagatagagaatgaggaggttaggaaaaccctggatgccaccatgcagacattacaggacatgctgactgtggaggactttgatgtctccgatgccttccaacacagtcgatcgacag

SEQ ID NO: 701605 - DNA, 120 bp, Artificial Sequence
  ENSG00000196220_16 (sequence is synthesized)
agtccgtcaagtcggctgcctctgagacctacatgagcaagatcaacattgccaagaggagagccaaccagcaggaaacagaaatgttttattttacaaaatttaaagagtatgtgaatg

SEQ ID NO: 701606 - DNA, 120 bp, Artificial Sequence
  ENSG00000196220_17 (sequence is synthesized)
gcagtaacctcatcaccaagctgcaggccaagcacgatttactcaagcagaccctgggcgaaggggaaagagcagaatgcggcaccaccaggcccccctgtcttccccctaaaccacaga

SEQ ID NO: 701607 - DNA, 120 bp, Artificial Sequence
  ENSG00000196220_18 (sequence is synthesized)
aaatgaggagacctaggcctctctcagtgtatagccataaactctttaacggcagtatggaagcattcattaaggattcaggacaagctataccgcttgtagtcgagagctgcatccgtt

SEQ ID NO: 701608 - DNA, 120 bp, Artificial Sequence
  ENSG00000196220_19 (sequence is synthesized)
acatcaatttatatggactccagcagcaggggatcttcagagtgccaggatctcaggtggaagtcaatgacatcaaaaattcctttgagagaggtgaagacccccttgtggacgatcaaa

SEQ ID NO: 701609 - DNA, 120 bp, Artificial Sequence
  ENSG00000196220_20 (sequence is synthesized)
atgaacgagatatcaattcagtcgctggtgttttaaaactgtatttccgaggactggaaaacccactctttcctaaggaaaggtttcaagatttgatatctactattaaactggagaacc

SEQ ID NO: 701610 - DNA, 120 bp, Artificial Sequence
  ENSG00000196220_21 (sequence is synthesized)
cagccgagagggtgcaccagatccaacaaatcctcgtcacccttccccgcgtggtcattgtggtcatgagatacctcttcgctttcctcaaccacctctcccagtatagcgacgagaaca

SEQ ID NO: 701611 - DNA, 120 bp, Artificial Sequence
  ENSG00000196220_22 (sequence is synthesized)
tgatggatccctacaacctggccatctgcttcgggcctaccctcatgcacatccctgatgggcaggaccctgtgtcctgccaggcacacatcaatgaagtcatcaaaaccatcatcatcc

SEQ ID NO: 701612 - DNA, 120 bp, Artificial Sequence
  ENSG00000196220_23 (sequence is synthesized)
atcatgaagccatcttccccagcccccgggagctagagggacctgtgtatgaaaaatgcatggctggaggggaagaatattgtgacagcccacacagcgagccaggggccatcgatgaag

SEQ ID NO: 701613 - DNA, 120 bp, Artificial Sequence
  ENSG00000196220_24 (sequence is synthesized)
ttgaccatgacaatggcactgagcctcataccagcgatgaagaagtggagcagatcgaggctattgccaagtttgactacatggggcggtccccgcgtgagctatccttcaagaaggggg

SEQ ID NO: 701614 - DNA, 120 bp, Artificial Sequence
  ENSG00000196220_25 (sequence is synthesized)
cctcgctgctcctgtaccaccgcgcctcggaggactggtgggagggccggcacaacggcgtggatggactcatcccccatcagtacatagttgtacaggacatggatgatgccttctccg

SEQ ID NO: 701615 - DNA, 120 bp, Artificial Sequence
  ENSG00000196220_26 (sequence is synthesized)
acagcctgagccagaaggctgacagcgaggccagcagtgggccattgctggatgacaaggcctcttccaaaaacgacctccagtcccccacggagcacatctcggattacggctttgggg

SEQ ID NO: 701616 - DNA, 120 bp, Artificial Sequence
  ENSG00000196220_27 (sequence is synthesized)
gggtgatgggccgagtgcggttacgatctgatggagcagccatccccagacgccgaagcgggggcgacacacacagcccgccccggggcctgggccccagcatagacacaccaccccggg

SEQ ID NO: 701617 - DNA, 120 bp, Artificial Sequence
  ENSG00000196220_28 (sequence is synthesized)
ctgctgcctgccccagcagcccccacaaaatccccctcacccgggggaggatcgagagccctgagaagcggaggatggcgacgttcgggagcgctggcagcatcaactaccctgacaaga

SEQ ID NO: 701618 - DNA, 120 bp, Artificial Sequence
  ENSG00000196220_29 (sequence is synthesized)
aggcgctctccgaagggcactcgatgaggtcgacctgcggttccaccaggcacagcagcctaggggaccacaagtccctggaggccgaggccctggcagaagacatcgagaagaccatga

SEQ ID NO: 701619 - DNA, 120 bp, Artificial Sequence
  ENSG00000196220_30 (sequence is synthesized)
gcacggctctgcacgagttgcgggaactcgagaggcagaacacggtcaagcaggcgccagatgtggtgctggacaccctggagcccctgaagaacccgccaggccccgtcagctcggagc

SEQ ID NO: 701620 - DNA, 120 bp, Artificial Sequence
  ENSG00000196220_31 (sequence is synthesized)
ccgccagtccccttcacaccatcgtcatccgcgaccccgatgccgccatgcgccgcagcagcagctcctccaccgagatgatgaccaccttcaagccagccctgtccgcccgcctggctg

SEQ ID NO: 701621 - DNA, 120 bp, Artificial Sequence
  ENSG00000196220_32 (sequence is synthesized)
gcgcccagctccgcccgccccccatgcggcccgtgcggccggtggtccagcaccggtccagcagcagcagcagctcgggcgtgggcagcccggccgtgacgcccaccgagaagatgttcc

SEQ ID NO: 701622 - DNA, 120 bp, Artificial Sequence
  ENSG00000196220_33 (sequence is synthesized)
ccaacagctcagcggacaagtcgggcaccatgtgacctgcaggatgggccgcgccgccgtggcccgctgtggctcaccacggcccagggtggccttggtggcttccacgtgcttcccagt

SEQ ID NO: 701623 - DNA, 120 bp, Artificial Sequence
  ENSG00000196220_34 (sequence is synthesized)
gaccctggccttggagggcagaggtccgtctgggagggtgtgtctgtgcagagctgaggcccgggcgctggctgcagctcacgtccagccatgggaatcccacggacctctcgcgtgtca

SEQ ID NO: 701624 - DNA, 120 bp, Artificial Sequence
  ENSG00000196220_35 (sequence is synthesized)
acagacgaccagaggagtgctggagctccagcagccccaaccacagcattccctaacatggaggcaaaataccacatggcttctcccgcatatcgtcactggaaacttcctctctcgaca

SEQ ID NO: 701625 - DNA, 120 bp, Artificial Sequence
  ENSG00000196220_36 (sequence is synthesized)
ttctctctacatacgtatatgtgtgtgtatatcgatgtgtgcatatatacacatgtatacgtatgtacgtgtctgtaggtgtgtgtatatatatatatatttatgcatctatatacatat

SEQ ID NO: 701626 - DNA, 120 bp, Artificial Sequence
  ENSG00000196220_37 (sequence is synthesized)
tttttctttttatgaaacttagatttacctcagatccatgccaccaaacatctcccaccgagttatttggtgggatttgcagggacttttctgggagaacttaaaggcccatagtaactg

SEQ ID NO: 701627 - DNA, 120 bp, Artificial Sequence
  ENSG00000196220_38 (sequence is synthesized)
cgaatgaagcaatataccactaacctgcagaaaaacacaaacaaaaacagactcccactgtctccagaagtcgtggccttccagaacagtctgcccctcaaggaagggtggggcaggcag

SEQ ID NO: 701628 - DNA, 120 bp, Artificial Sequence
  ENSG00000196220_39 (sequence is synthesized)
tacccccaagcaggctgctcccagaggtggggaacccttcataggaaatccccacccccgtccaccccagagaccctgcccttccacccggaggccaaaggccaactgtactcccaaagg

SEQ ID NO: 701629 - DNA, 120 bp, Artificial Sequence
  ENSG00000196220_40 (sequence is synthesized)
catgggagaaggttggcgagaagacccctgactaccacatccttgtgtttgtgtgtagagacgggggatagtgagaacctaagccccatcgtagcacagtattacatgtggttgggaaaa

SEQ ID NO: 701630 - DNA, 120 bp, Artificial Sequence
  ENSG00000196220_41 (sequence is synthesized)
ataaaaatacagtggtgtggaatactccaaaacctagaaatgctgtaggaataaatctgtggtaactatagaggtttaacttatatcattttcaaactatttaattttttcttttcctgg

SEQ ID NO: 701631 - DNA, 120 bp, Artificial Sequence
  ENSG00000196220_42 (sequence is synthesized)
ttctactaattatactgtgtcagatttggaactaaacaggcaaggaggctttgagtcacatcgttttcattttaaatcaggctgtgatgcactgtggctggtgccgtcttgcatgaaacg

SEQ ID NO: 701632 - DNA, 120 bp, Artificial Sequence
  ENSG00000196220_43 (sequence is synthesized)
catgagccgtgagcgcccagttcagactggggccagggaggggcagtccttggcactttctgtcctagaggacactgtcagttgagttaatacaagtgacatagcttcccttccctcccc

SEQ ID NO: 701633 - DNA, 120 bp, Artificial Sequence
  ENSG00000196220_44 (sequence is synthesized)
cttcacccactccctccagaacatttagtgtagatgaaaatgtggtgatagaaatgggtgcatgatcttcacgtgtgacagccaggcctttgcctcttggccaagtaaagcccttccggg

SEQ ID NO: 701634 - DNA, 120 bp, Artificial Sequence
  ENSG00000196220_45 (sequence is synthesized)
tcgctctccttcgattccattttacctcctcttctgatcacttccagagatgagctgtttctggataatggcacacgggcaaatctgtgtgccctgtgggccgctgttacttaccctctc

SEQ ID NO: 701635 - DNA, 120 bp, Artificial Sequence
  ENSG00000196220_46 (sequence is synthesized)
ctgcgagacccaggggcttttccctactgttcccacgcttcctctctctcgaggccactgaagtttggagtcaaaaggcccagagtctgagtcccagccctgagcacttaggagccttct

SEQ ID NO: 701636 - DNA, 120 bp, Artificial Sequence
  ENSG00000196220_47 (sequence is synthesized)
gacttagggtttgtcactccacctcattgagcctgactgttctgctccataaaatagggtaataaaggtcaaacatcagtgagcaagctgtgtacactggaaaacactgaatcaatacaa

SEQ ID NO: 701637 - DNA, 120 bp, Artificial Sequence
  ENSG00000196220_48 (sequence is synthesized)
tgcgtttgtgattatcattagtaaggtaagtcttagatcagagccctccagcccttctttttgaaacctcccaatggcatttcagaagtgagcagtggaattttcctgccatcctaataa

SEQ ID NO: 701638 - DNA, 120 bp, Artificial Sequence
  ENSG00000196220_49 (sequence is synthesized)
gagccctggattccatcattaacatttcagcccattggatgaagtggtgccctctcctctggtcccccgcgaaaaggtaaatacacccaaagggagggacctagttaagtcactggcacc

SEQ ID NO: 701639 - DNA, 120 bp, Artificial Sequence
  ENSG00000196220_50 (sequence is synthesized)
tagataagttaggagggtaaagccactacctcgtctgaaggactggacttgacaccccacagtggaagggagcatcaggagaggaacaaaaaaagggatctcagggagaggccagtgtca

SEQ ID NO: 701640 - DNA, 120 bp, Artificial Sequence
  ENSG00000196220_51 (sequence is synthesized)
aacttgacctcccttgtttggcctagaatgaacccttctctttagctcctggatatgaaaggccatctgcttggagcacagaaagatattgccattttacagcttaagagagtaaggcct

SEQ ID NO: 701641 - DNA, 120 bp, Artificial Sequence
  ENSG00000196220_52 (sequence is synthesized)
tgggctgtgctgtgacctgcccaagatttgacactggctaggagcagaggctgcgtcaggctcttaaagtcatgtgtttgcatgctggatgctatactgtccagccaggacacaagactt

SEQ ID NO: 701642 - DNA, 120 bp, Artificial Sequence
  ENSG00000196220_53 (sequence is synthesized)
ctgatttctaccctcaagatactcccagatcctaaatccagtagcctcccaggcaaaatatagcaatctgccacaactgccagatgaaaagcaacaatcagagtagaaaaatctgttgcc

SEQ ID NO: 701643 - DNA, 120 bp, Artificial Sequence
  ENSG00000196220_54 (sequence is synthesized)
tgatatacataacaccaatcagaccgtgtggatttttctctgaattgactgattttgtttttttcttactgaaaatggacctgcctttcactgaattttctgagggcagagtcttagctg

SEQ ID NO: 701644 - DNA, 120 bp, Artificial Sequence
  ENSG00000196220_55 (sequence is synthesized)
ttttctttaagcaccttttttttttttttccattgggaaatggctgatgagttcacatttagggatgtacacacacagatggcagacgtctccccactcatccagccccagatctgagcc

SEQ ID NO: 701645 - DNA, 120 bp, Artificial Sequence
  ENSG00000196220_56 (sequence is synthesized)
ttgacgcaggccaagtggaaaaatactttcccgcccccctcccctgttcccacttcctcatctggcactatgcatgtctcactcaccctccacagcactcagtcccatcgacgttcactg

SEQ ID NO: 701646 - DNA, 120 bp, Artificial Sequence
  ENSG00000196220_57 (sequence is synthesized)
aacattggctttctctttctgactcctgcctgttttagtccactatatattgctgtatttgcttaaatgctggaaagtaactgttaaaatgtgaaattgtaatttttaaaaaggctacaa

SEQ ID NO: 701647 - DNA, 120 bp, Artificial Sequence
  ENSG00000196220_58 (sequence is synthesized)
ttaaattttagccaatgccactcaccaaatctttgcacctagtagatagatcaatgtaaaaacaaatacctaactgtacagtgagtgtgggggaaatgtagtaacctagttagtagtctt

SEQ ID NO: 701648 - DNA, 120 bp, Artificial Sequence
  ENSG00000196220_59 (sequence is synthesized)
caatataaccaattgtacaaggggaagtggtgtttacctacttgttcatcaccattattgaaagccgtactgatcagttagttgacaacgggcatttttttttctttgcttcatggaatg

SEQ ID NO: 701649 - DNA, 120 bp, Artificial Sequence
  ENSG00000196220_60 (sequence is synthesized)
atttcttttcttaaccttcgacttatcctgaggtcaagccttttgtctttatgtgtaaccgacgttcagtctattctaggaatgaaccagcaagttgttcatttaaaactgaccaaagac

SEQ ID NO: 701650 - DNA, 120 bp, Artificial Sequence
  ENSG00000196220_61 (sequence is synthesized)
aattaattcctggtctagtttcctgggccttgtggctcagctgccactaaagagctttttggataaaattgagaacaagctgtgcttcctaccccactctccccgtccccttttattccc

SEQ ID NO: 701651 - DNA, 120 bp, Artificial Sequence
  ENSG00000196220_62 (sequence is synthesized)
ttttcctcttaaagagctgctctgagctgtgggattctatgaaaaattcttgcctttccttgtttcagtgctaacgatttctcacctcgaagcgccttttgaaccccggacagagtgcac

SEQ ID NO: 701652 - DNA, 120 bp, Artificial Sequence
  ENSG00000196220_63 (sequence is synthesized)
aatcggagggaattgcgagcttgggaattagactttggagtcttttctctgaagtcaccaggccaggggtcaggagagagatggattcccaagggatgaaaggtttctattcaatgaaga

SEQ ID NO: 701653 - DNA, 120 bp, Artificial Sequence
  ENSG00000196220_64 (sequence is synthesized)
aatcggagtgggaagagacacagggaaattgagccatattttggctatcggctggaaccagcagttcagagatctgccttataaacatttaaaaccggtttgtggtacacaaagaggaac

SEQ ID NO: 701654 - DNA, 120 bp, Artificial Sequence
  ENSG00000196220_65 (sequence is synthesized)
cagtgtgggaaggggcctttatgtggggctttcttctctgttggagtcccttggagtgccttgttgggtatatttctctgtcattcaggaggcacgaatgtggaggacttctcgtgacct

SEQ ID NO: 701655 - DNA, 120 bp, Artificial Sequence
  ENSG00000196220_66 (sequence is synthesized)
ggtcgtgatgtggcattcagtgcatgtccacagctaatggaaaaacacgaggactcgggtaatggttcttcctctcagtctttctattcctaacttttcacacatccagatggttccaca

SEQ ID NO: 701656 - DNA, 120 bp, Artificial Sequence
  ENSG00000196220_67 (sequence is synthesized)
ctagtgcaaatgcctcactctcctgagaaacccagaaagaagagtggctggctcacaaccatggggttagcccctgctgggctgggagtcggggtggcggccaggaggaaaggcagaaag

SEQ ID NO: 701657 - DNA, 120 bp, Artificial Sequence
  ENSG00000196220_68 (sequence is synthesized)
gggtgagccgaggtgttgcctagctgattttctgctgtgcagagctaatgctgacatttcatgtcaacttccccggttctctggggtctcctctcctctgagcagccacatagaacattc

SEQ ID NO: 701658 - DNA, 120 bp, Artificial Sequence
  ENSG00000196220_69 (sequence is synthesized)
cccacatatccaaagctgcccaggggagccgagagaagggactttgctgtcaggtccaagccctcctgacctccctgagattgatctgccagtgtcctgctgtccctctgggactggcca

SEQ ID NO: 701659 - DNA, 120 bp, Artificial Sequence
  ENSG00000196220_70 (sequence is synthesized)
catggccatcgctgccccttgttgacacctcctttctgtgtgagttgtccccggccaataacaaagctgttccttgaaccagaacaaccagagtgcacttttccttccttagacggaagt

SEQ ID NO: 701660 - DNA, 120 bp, Artificial Sequence
  ENSG00000196220_71 (sequence is synthesized)
agatcctggctagggtttctgcccaggcccttgttcccggcagtgtgactgtttacatggtttggcaataggtttgattctgattgcttcagagtggctggtctattttgtttcctttgg

SEQ ID NO: 701661 - DNA, 120 bp, Artificial Sequence
  ENSG00000196220_72 (sequence is synthesized)
tttccttcctccccaaattgtgacaggaaaaacagaccaaaaccaccctaggaaattgctggttgcctgtccccacgtgatgataaatgttgccctcttctggatatcgtttctctacct

SEQ ID NO: 701662 - DNA, 120 bp, Artificial Sequence
  ENSG00000196220_73 (sequence is synthesized)
tacgaccaaacgcccgtcctatagagtgtctgattggatcctctgtcgcgtattctgatggtgcctgctggtttgacgtggagctatcctgtgaaataaaacagcttaacttttctcaaa

SEQ ID NO: 701663 - DNA, 120 bp, Artificial Sequence
  ENSG00000196220_74 (sequence is synthesized)
aatagggcttgctgggtcagcgaagaagcagccatgggactcacccagtggggcttcctccccataagaaccaccccccagaaagtgctgcctcccacttctcagggtaaaggttcacag

SEQ ID NO: 701664 - DNA, 120 bp, Artificial Sequence
  ENSG00000196220_75 (sequence is synthesized)
tggcccccagaatgcatgagtcagagctttgggtccccctccgagatgatccttcttctttttgttctttgtaaggctgctggtttctgggaatgacaaaggcaggaaaaatcattctgg

SEQ ID NO: 701665 - DNA, 120 bp, Artificial Sequence
  ENSG00000196220_76 (sequence is synthesized)
gaaggaagaagccacagtctgggagagccagtttcatgttccctgaaggctctcaaagtatcctgtgtgtattagtggggggtattgaatcaggggcactctttggtggaaaatcaattg

SEQ ID NO: 701666 - DNA, 120 bp, Artificial Sequence
  ENSG00000196220_77 (sequence is synthesized)
gggagtccttatggtcatgtaatctgaggcaagccacatcacctctggcctctatttccttatctataaaatgggaatgacagcaccaagcaaattatggcatgggttaaaatgaggtga

SEQ ID NO: 701667 - DNA, 120 bp, Artificial Sequence
  ENSG00000196220_78 (sequence is synthesized)
catatgtgaaggagcctagcacagtgcctgggacagggaggtggataagaaacatcaatggactctgtatcaaacagacatccttcctaatcctgatagaaaaactgagtcctggagaat

SEQ ID NO: 701668 - DNA, 120 bp, Artificial Sequence
  ENSG00000196220_79 (sequence is synthesized)
tttcttgacctaactggcattggcagttactggtcattggcaaccagaacctcctgatttgtttacctgtttcctcttagacatttcatttaggggatcatcaatatctgtcttctttgc

SEQ ID NO: 701669 - DNA, 120 bp, Artificial Sequence
  ENSG00000196220_80 (sequence is synthesized)
tcttgacagcacccggtatgaatggaatccagcaggcctcaaaggtcaaatcaggcagagaaccatgagtccaggtctttgccatgcatgaatcagccaatgaatgccaaattgcaggaa

SEQ ID NO: 701670 - DNA, 120 bp, Artificial Sequence
  ENSG00000196220_81 (sequence is synthesized)
tcagccaatgaatgccaaattgcaggaacaatttagttgtttgtgtatctgttgcctttcttgtctcaaagattctgtaccaactgggcgtggtggctcacacctgtaaccccaacactt

SEQ ID NO: 701671 - DNA, 79 bp, Artificial Sequence
  ENSG00000196220_82 (sequence is synthesized)
ctccgtctctacaaaaaaaacggtcccagcaactcaggaggctgaagtgggagaattacttaagcccagggaggttgag

SEQ ID NO: 701672 - DNA, 63 bp, Artificial Sequence
  ENSG00000196220_83 (sequence is synthesized)
aggcatggtggcatatgcctgtggtcccagcaactcaggaggctgaagtgggagaattactta

SEQ ID NO: 701673 - DNA, 120 bp, Artificial Sequence
  ENSG00000196220_84 (sequence is synthesized)
gggtggcttccgtggtgtggctcatgtgctgcggtcttgtcagtttttagccatggctcgggaaagtgacttggcccctcagtacctccgtttcctcatccattacatcggagcctgtcc

SEQ ID NO: 701674 - DNA, 120 bp, Artificial Sequence
  ENSG00000196220_85 (sequence is synthesized)
ttattttacaaaggggcctgatgatgttttccccatttgccatccaagactctgatgaggcttaaacgtacgtgtgtgaaaactgtcaagtgctctgtggatacaagtcgagtgactctt

SEQ ID NO: 701675 - DNA, 120 bp, Artificial Sequence
  ENSG00000196220_86 (sequence is synthesized)
aatggccaataggccaggtcctgggagcctaggaccatggaaaaggagagaggacaccacaacctcccaccagcccagtcgttccagaaacccatcaagaaatttaaagagtatgtgaat

SEQ ID NO: 701676 - DNA, 120 bp, Artificial Sequence
  ENSG00000196220_87 (sequence is synthesized)
cttttaagcaggattttgaaggatgaatagaagctctccaggtggtgaaaggcattacctgaagagaagacagcatgtgcaaaggtatgggggtcacaaaagggtcagggtacttgagaa

SEQ ID NO: 701677 - DNA, 120 bp, Artificial Sequence
  ENSG00000196220_88 (sequence is synthesized)
atggtgaggagtttgaggtggctaaaatcctgagtaggtggaacaaaatggtggtgggagatgaggctggaaaggagaagagcttgaagttcctgtctgatcatcagatcctgtaagtct

SEQ ID NO: 701678 - DNA, 120 bp, Artificial Sequence
  ENSG00000196220_89 (sequence is synthesized)
ttgaccttgaagatggtatggatgagagtcgtatttatttgttgtggtaaaatacacaaacacaaagtttaccgtcttacccatttttaattgtgcagcttagtggtattaaatgcattc

SEQ ID NO: 701679 - DNA, 120 bp, Artificial Sequence
  ENSG00000196220_90 (sequence is synthesized)
attcacattaaatgccacccatcttcataacttttttcatcttgtgaaatgcaactctgtacccattaaacaatagctccttggccgggcgcggtggctcgtgcttgtaatcccagcact

SEQ ID NO: 701680 - DNA, 120 bp, Artificial Sequence
  ENSG00000196220_91 (sequence is synthesized)
tgcccgaggtgggagtgggatggggctggggaggcactgccaggagctggagaagcagggatggcttcttcaccaatgtccccaagggccggtgtgggtgtgcccaggtgaggcacagtt

SEQ ID NO: 701681 - DNA, 120 bp, Artificial Sequence
  ENSG00000196220_92 (sequence is synthesized)
gctgctttgcttgttctagcattagactgacaaagccacgcccctccaggctggcgatggaaggggcgcttttggggctgctgtgtggcagtggggcaccctccctttgcgctggccatc

SEQ ID NO: 701682 - DNA, 120 bp, Artificial Sequence
  ENSG00000196220_93 (sequence is synthesized)
gggtgagacagtattgtctactcagagtggctgagggcagcctgtaggggccagaggctgtggggtggctgttgacctctcttcccacctgctacaccatgctgagcaaactgcccagcc

SEQ ID NO: 701683 - DNA, 120 bp, Artificial Sequence
  ENSG00000196220_94 (sequence is synthesized)
atgctgcgaggcccagcctgaggtccccatgtaccaaggctttgggccaggctcagattgcgcgcagctgggcacacgcatgtgcataggcgtgcacagactctcctgccgtccacaccc

SEQ ID NO: 701684 - DNA, 120 bp, Artificial Sequence
  ENSG00000196220_95 (sequence is synthesized)
tagcttggacctcacgggcacttggatgagctgacggaaagtaacacacgggcaacttctgctttctcttcagcttgttcaacattcccttttgcgctttttcctgagcagaccagagcc

SEQ ID NO: 701685 - DNA, 120 bp, Artificial Sequence
  ENSG00000196220_96 (sequence is synthesized)
agtgaacactttccactcagcagctgatagcccaggggctgactttacttccctttcagagagcttagatccataagtggctctgtcactggccaggttgtttgcttagagcctatttca

SEQ ID NO: 701686 - DNA, 120 bp, Artificial Sequence
  ENSG00000196220_97 (sequence is synthesized)
tttctatgttcctattaagagatattgcactgcctagctggaattcagccagtggcccagaggcctgcacttttccatcacacggcagtagagcgctactttttgcctcactttctgggc

SEQ ID NO: 701687 - DNA, 120 bp, Artificial Sequence
  ENSG00000196220_98 (sequence is synthesized)
ccagggacctgagggcattctttcttttcccacaaatgctttccagtggccccaaatcctgggaagccctcatgtttggcaagagcaaagatgaactcccaactctctcctgctccttgg

SEQ ID NO: 701688 - DNA, 120 bp, Artificial Sequence
  ENSG00000196220_99 (sequence is synthesized)
gaagggagttgggcaaagtcttggcaacctctggggttttcagtttcctgggctcaggatggggagacggagggcttggcagaagttcagcccgtacagctgttcctctgggctctggca

SEQ ID NO: 701689 - DNA, 120 bp, Artificial Sequence
  ENSG00000196220_100 (sequence is synthesized)
atttggaaacatcaggatgattcacaccaggcaaggcccttccagcacacggggcggcagatgtgcagggtcactttcgaagaaccttttagaaacgaacccattataatttttttttct

SEQ ID NO: 701690 - DNA, 120 bp, Artificial Sequence
  ENSG00000196220_101 (sequence is synthesized)
tttctggcgagagaatgttgtcatagtctcaaaacaacagaagctgtattttacaccaaattctgcaaatagtgaaacagatgggggatgaattgagctgtccctcacttcctcctaatt

SEQ ID NO: 701691 - DNA, 120 bp, Artificial Sequence
  ENSG00000196220_102 (sequence is synthesized)
cctagaactcacgcagagaagtttgttccagcagagtgtgggagaggagatctgtaatcaaacacttggccaggtctcagggtcttccctcaggggaaagttgagggtttgtgtgttttg

SEQ ID NO: 701692 - DNA, 120 bp, Artificial Sequence
  ENSG00000196220_103 (sequence is synthesized)
ttttgttttgttttgttttgttttgtgttttaaataaagccctctgaagtgttgtcttccacaccctccttgacctagggcctgggaaatccaagctgagtttatcagacctcccactta

SEQ ID NO: 701693 - DNA, 120 bp, Artificial Sequence
  ENSG00000196220_104 (sequence is synthesized)
gacaccctgcattcaactgcagctaccctgcgttcaattgcagacatagccctgtgtactctggttcctggtcaaggtcaaagacaactttgttagtaaactaaaagtctccccttacct

SEQ ID NO: 701694 - DNA, 120 bp, Artificial Sequence
  ENSG00000196220_105 (sequence is synthesized)
caatgtctctgtcctatggctctctctgtatcttccatggactcccacacgaggtggatatcatttctggatggttatttgagcaggatcccctcagctaagttgctgttgaccttgtat

SEQ ID NO: 701695 - DNA, 120 bp, Artificial Sequence
  ENSG00000196220_106 (sequence is synthesized)
agaggaactggtgttgcatatgggctgcagcatgttatatttttctcacacttcagaaccttatcttagaatagaccaaattcataataaccctgtaattcaggatggccagatgtgata

SEQ ID NO: 701696 - DNA, 120 bp, Artificial Sequence
  ENSG00000196220_107 (sequence is synthesized)
atgcacttaagtttaaaagcgtattgcaaatgtcaaagcaagatgcaaatataaggtttgattattgtgattcaaatgaatgtctggctccccttacccaggttgacatgccctcgtggt

SEQ ID NO: 701697 - DNA, 120 bp, Artificial Sequence
  ENSG00000196220_108 (sequence is synthesized)
ctggattagaggtgaaatcacttgagatcttgttcaggcagatgcaacgcagtacacagcccatgaatagcctccaagggcccgactggcattgccctacagcattgccaccatttggga

SEQ ID NO: 701698 - DNA, 120 bp, Artificial Sequence
  ENSG00000196220_109 (sequence is synthesized)
tgttgacctccaagtctattaggttatctaggggaatttttcatcacatccctttagttgcaggataattttgaggctatttcctgtgttgccaacgtgtgttaattttcatcttgatta

SEQ ID NO: 701699 - DNA, 120 bp, Artificial Sequence
  ENSG00000196220_110 (sequence is synthesized)
aaaggcagaaaggggacattggtctctggtttctctttcttcctctctgtggctttctctgttcctgttttccctgcctctctttctttctttctttcctttttgctctgcatctgagca

SEQ ID NO: 701700 - DNA, 120 bp, Artificial Sequence
  ENSG00000196220_111 (sequence is synthesized)
gcagaagagatggaaggcttaggctgccccactttccttggccgagctgcccccctgctccccactttgtgccccacccagcacttcagtaagtcgatatagatttgatattgtgcaaag

SEQ ID NO: 701701 - DNA, 120 bp, Artificial Sequence
  ENSG00000196220_112 (sequence is synthesized)
ttgggatagctacgtttccttgtcagagattccagacagtgcacagagcaccacacaaagaaagaaatcctcgtgtgattcacacagtcctttgctttctggattgggcaggaaaaatgg

SEQ ID NO: 701702 - DNA, 120 bp, Artificial Sequence
  ENSG00000196220_113 (sequence is synthesized)
gaaaacatatgctatttccccttttttccactttgtagaatttaagaaaaaacaaaaaacacttaggactttcttttaaggaaaccctccagttgggcaccgtaggttttttgatattga

SEQ ID NO: 701703 - DNA, 120 bp, Artificial Sequence
  ENSG00000196220_114 (sequence is synthesized)
gtgtccaacacctgcttttagagtctccgctcttcctggccatgagaatttaacagataatttaatgttacttctggatgttctatgataaaatcactttcatactcacactagatcctt

SEQ ID NO: 701704 - DNA, 120 bp, Artificial Sequence
  ENSG00000196220_115 (sequence is synthesized)
gagagtaggaagagctgaattttaccaccagcctcaatcacattttatttgtgtgaccttaggcaagtttcttcatcttttgtgggctcactggccttgtatgtaaagtgaattgaatat

SEQ ID NO: 701705 - DNA, 120 bp, Artificial Sequence
  ENSG00000196220_116 (sequence is synthesized)
tctttcccagcctcacagggttgttgtgaggttgtcatgcaatgtgataaggaaatgatctgggaatgttcaaaaacaagccaaacactatgaaaacagggtgacaatgttgctatcatc

SEQ ID NO: 701706 - DNA, 120 bp, Artificial Sequence
  ENSG00000196220_117 (sequence is synthesized)
aagttatttctaatccccaaacttaaaacctttggccttgtgtcacatttttgacactctcttttgcctttggtatttgaaaatttaagagcagctcttgtaagaaatcccaccccacat

SEQ ID NO: 701707 - DNA, 120 bp, Artificial Sequence
  ENSG00000196220_118 (sequence is synthesized)
acatacatcctcaaaaaaaaataagtaatttttgaaaaataaatgacatggacttagctaaccaaattgacatagatccaagatgggcttgaaagaatcttgcctgttgtttcttttcaa

SEQ ID NO: 701708 - DNA, 120 bp, Artificial Sequence
  ENSG00000196220_119 (sequence is synthesized)
aattttgatctgtgctgttattttgtttccattgtttgggtggcatgatatttggattcacctggtttttgcccatgcatgtactggagctagcagcatttgctcaatactcaaacacct

SEQ ID NO: 701709 - DNA, 120 bp, Artificial Sequence
  ENSG00000196220_120 (sequence is synthesized)
aggagaagttggttagaggtccctggggatggctggcttaccgaaggagacaggtaccacaagcccagtcagcagaggcagcatgaatctcattaatcctgattggctgcatagtctgga

SEQ ID NO: 701710 - DNA, 120 bp, Artificial Sequence
  ENSG00000196220_121 (sequence is synthesized)
agatttcttgcccgctcacagaaatcaatcaagacttgggggaccaggtctttgcttgtcatgtgtggacattatctgtgcctggctgagtccccacttgttgctacccaaattttgaac

SEQ ID NO: 701711 - DNA, 120 bp, Artificial Sequence
  ENSG00000196220_122 (sequence is synthesized)
caagccatttgaaaatgaactgcctctcttggttaggggccctcttcttaaccttcaaaaggcctttgccccagaaggctggcaccattgagtcaggccaacttgtgtggtgaaatgagc

SEQ ID NO: 701712 - DNA, 120 bp, Artificial Sequence
  ENSG00000196220_123 (sequence is synthesized)
aaataagccaacacaggtatatgcatggtgagcaattctggaaacgggtccagtgtttgtggctgtttctctggtgaactgtggtgtggttacccctccctgtggccaagagtggagcac

SEQ ID NO: 701713 - DNA, 120 bp, Artificial Sequence
  ENSG00000196220_124 (sequence is synthesized)
actttaggaatggaaatcctaaagtaaagcaagacactttcaacctgatcccatggcaaaggttactggggtagatgagtccttggctggaaataaaaaagtgccctaaggctccatgat

SEQ ID NO: 701714 - DNA, 120 bp, Artificial Sequence
  ENSG00000196220_125 (sequence is synthesized)
ggtggcctggtaggaaaagccctgaacttggagccaaagagtcctgggtttgggctccagctctgtcagttctccttcacaggaggcttcagtctctgcctctgtaaaatggggccacat

SEQ ID NO: 701715 - DNA, 120 bp, Artificial Sequence
  ENSG00000196220_126 (sequence is synthesized)
taaaatggggccacatgcacagggttgagatggtattaagtataataatggatttgaaagtgctttaattgaaaatgtacttgaggctgggtaaggaggctcatgcctgtaatctcagca

SEQ ID NO: 701716 - DNA, 120 bp, Artificial Sequence
  ENSG00000196220_127 (sequence is synthesized)
tgtgagctccctggggagtctgggactgagcagggcccacaccagggctggcacatgtcactggctgaaggaggggctggtctttgtctttacctgacattctcgggtagccacagctct

SEQ ID NO: 701717 - DNA, 120 bp, Artificial Sequence
  ENSG00000196220_128 (sequence is synthesized)
tttgagccctgctggaggggaagggcagtgatttggggaggtggaaaatgaatgttacctcgtggtgtctattttcacgagtgggacatgggcctctggtggccccagtgcagttggctt

SEQ ID NO: 701718 - DNA, 120 bp, Artificial Sequence
  ENSG00000196220_129 (sequence is synthesized)
ctttgctgggtttgaggggttcaggggggaaccatacacagttcatgccttgggggatttcccagtgtggtaaaggagatgttattagtaaaatgtttggcgcccctagggccactcagc

SEQ ID NO: 701719 - DNA, 120 bp, Artificial Sequence
  ENSG00000196220_130 (sequence is synthesized)
cagacacgtgtacatgcgaaagaaagtagcgaatgagacagacttaattatacagatcagctttgtgtggggaagttatctcgggagaaatcgggcagcttaagcaaatggagaacggaa

SEQ ID NO: 701720 - DNA, 120 bp, Artificial Sequence
  ENSG00000196220_131 (sequence is synthesized)
cactgactcccgagtacccgctgtgcaggacacgccacagggacaagcagactgggagaaagaacactgtgagcggtggtgctggggagggcttctgtgtcatctaagtaggagccagga

SEQ ID NO: 701721 - DNA, 120 bp, Artificial Sequence
  ENSG00000196220_132 (sequence is synthesized)
ctgtttctctcatgtcctccttcctgcaccgatgggggagctggccctgtccatgtttagtaaaggcttggtatggtcgatggactcttttcctggtgtatcctgtcgggaagtcagggg

SEQ ID NO: 701722 - DNA, 120 bp, Artificial Sequence
  ENSG00000196220_133 (sequence is synthesized)
gctcctgcttttcccgtggctccagagggggccccattgtcagcatcgcaaggagagggagctcccaaatggcccaaggccagaccttcctctttcctgcttttcgctttctttttttgc

SEQ ID NO: 701723 - DNA, 120 bp, Artificial Sequence
  ENSG00000196220_134 (sequence is synthesized)
cctttcagcccctttattcattcatttaccatatattaattgagcacctgctgttgtctggaacttgaggagcaggagcagtgggttggccctcggggagcttacctcgccaaggacatg

SEQ ID NO: 701724 - DNA, 120 bp, Artificial Sequence
  ENSG00000196220_135 (sequence is synthesized)
ttgataggtgattttaatactaagtggcaggggtcacagtgagagaggtagagggaaatgtggacccctggaggaggatcacctgaccagctctgagtggggagaacatcaaggaagctt

SEQ ID NO: 701725 - DNA, 120 bp, Artificial Sequence
  ENSG00000196220_136 (sequence is synthesized)
tcctggaggaagtgacctctaaactgaattccgaaagaagggtattccaggcagaggggatgcatgcacaccaccctaaagaagagaaagatgggctcacgcttgtaatctgagcacttt

SEQ ID NO: 701726 - DNA, 86 bp, Artificial Sequence
  ENSG00000196220_137 (sequence is synthesized)
gggctcacgcttgtaatctgtgtcacgagttcgagaccagtctggccaacacagtaaatccctgtctctgttaaaaatacaaaaat

SEQ ID NO: 701727 - DNA, 120 bp, Artificial Sequence
  ENSG00000196220_138 (sequence is synthesized)
aaatctatgattggggctggggtggggtcagggattggctgcaaagggccatgagggatctttctggtgcagtggaagttctatattttgcttgtggtcctggatacatggatgtaaagt

SEQ ID NO: 701728 - DNA, 120 bp, Artificial Sequence
  ENSG00000196220_139 (sequence is synthesized)
ctggcatctctgcactgatactttgcacctccgagcctcagtttccctgtttgtcaaactagaaggttgttggattagatgatgtctagaatttcttctggctcagaaatttcccctgtc

SEQ ID NO: 701729 - DNA, 120 bp, Artificial Sequence
  ENSG00000196220_140 (sequence is synthesized)
gagtgccatcacccaccagggctctcagtatccaggggatcctgccatgtgcctccacctcctaggcctcccctgcctacggttctacactccagaggtagctctcttaggggatgggca

SEQ ID NO: 701730 - DNA, 120 bp, Artificial Sequence
  ENSG00000196220_141 (sequence is synthesized)
atcctgttcatgtctgatttgggagaagcacaagggcagagaggagagaaggagcctactgcagccccttgttccccacaaaatgaaatgggcacactgggcgggctggctggcattggc

SEQ ID NO: 701731 - DNA, 120 bp, Artificial Sequence
  ENSG00000196220_142 (sequence is synthesized)
ccaagaaggccaggtatagaaccatccagcctgtgttgcagggaggaggaggaggaaagacatgtgttgggaacccagtgcttttttatttaaaataataataatgtgtgagagagatac

SEQ ID NO: 701732 - DNA, 120 bp, Artificial Sequence
  ENSG00000196220_143 (sequence is synthesized)
gcccccggaaacggaagtcaggctacgagtcacggtggctccgcgctggcggcgggttcccccacaaggtcttggggaaaggagcatgcgctggaagctgtgtgctgttggttttgagga

SEQ ID NO: 701733 - DNA, 120 bp, Artificial Sequence
  ENSG00000196220_144 (sequence is synthesized)
tcttcagtaagctgaaagcggagagtcaggggccttgtgtcctaccatggtatttgctaacgtttagagagtgcttccccttgccgagcactggatgatgtcagaagtgggatccgaagt

SEQ ID NO: 701734 - DNA, 120 bp, Artificial Sequence
  ENSG00000196220_145 (sequence is synthesized)
agtgctgagtgaacacgcaagaacccaaagattggatcttctgagaacatcagagaaagactgtccttaccatccacaccacagcaaaactttggagccttgaacattgggttcataatc

SEQ ID NO: 701735 - DNA, 120 bp, Artificial Sequence
  ENSG00000196224_0 (sequence is synthesized)
gggctcagagaactccacacctgcacacctccctctcacctgctcctctacctgctccaccctcaacccaccagaaccatgggctgctctggctgctctggaggctgtggctccagctgt

SEQ ID NO: 701736 - DNA, 120 bp, Artificial Sequence
  ENSG00000196224_1 (sequence is synthesized)
gggggctgtggctccagctgtgggggctgtggctccggctatgggggctgtggctccggctgctgtgtacctgtctgctgctgcaagcccgtgtgctgctgtgtgccagcctgttcctgc

SEQ ID NO: 701737 - DNA, 120 bp, Artificial Sequence
  ENSG00000196224_2 (sequence is synthesized)
tccagctgtggctcctgtgggggctccaagggggtctgtggctcttgtgggggctgcaaggggggctgtggctcctgtggaggctccaaggggggctgtggctccagctgctgtgtgccc

SEQ ID NO: 701738 - DNA, 120 bp, Artificial Sequence
  ENSG00000196224_3 (sequence is synthesized)
tgggggctccaaggggggctgcggttcttgtggctgctcccagtgcagctgctataagccctgctgctgctcctcaggctgtgggtcatcctgctgccagtccagctgctgcaagcccag

SEQ ID NO: 701739 - DNA, 120 bp, Artificial Sequence
  ENSG00000196224_4 (sequence is synthesized)
ctgctcccagtccagctgctgtaagccctgctgttcccagtccagctgctgtaagccctgctgctgctcctcaggctgtgggtcatcctgctgccagtccagctgctgcaaaccctgctg

SEQ ID NO: 701740 - DNA, 120 bp, Artificial Sequence
  ENSG00000196224_5 (sequence is synthesized)
ttcccagtccagctgctgtaagccctgctgctgctcctcaggctgtgggtcatcctgctgccagtccagctgctgcaagccctgctcctcccagtccagctgctgtgtcccaatttgctg

SEQ ID NO: 701741 - DNA, 120 bp, Artificial Sequence
  ENSG00000196224_6 (sequence is synthesized)
ccagtgcaagatctgaggctctgcccacaaacctcagtgggtcctacagatccgggctctccaggaatgattgcagctgtgtcctgaattcctgaagcacgtctctgaatctgtcctcct

SEQ ID NO: 701742 - DNA, 120 bp, Artificial Sequence
  ENSG00000196227_0 (sequence is synthesized)
atcccccccacccccgccaacgctcgccggggtcgcccgaggcctgagccaagggggacgctgtgggcgcggctcaggccaggccctcagtgctctggctattgctgaaaacaccttcta

SEQ ID NO: 701743 - DNA, 120 bp, Artificial Sequence
  ENSG00000196227_1 (sequence is synthesized)
gttccaccttgtaactggactcccaaaagatgaatgctgacatcttctgatgcttaacaagaaataaaaatagtcaccttaatcatcaaaaagttccggtggtgaggagacctttccaaa

SEQ ID NO: 701744 - DNA, 120 bp, Artificial Sequence
  ENSG00000196227_2 (sequence is synthesized)
tataagaggaataaagaagtcacctccccagctgtcatcatcttccagcagattgagcaagaatattttgagcactacaggaaagacagtccatcaaacccgagatgatgatcagccacg

SEQ ID NO: 701745 - DNA, 120 bp, Artificial Sequence
  ENSG00000196227_3 (sequence is synthesized)
tgattttttcaagaagaggaatagggtgaatgaatctcatcagaaaagcagcaatatgaatgctggcccatcttggaataaagtgcaacattcaaagaattcttcaggaaaaaggcagag

SEQ ID NO: 701746 - DNA, 120 bp, Artificial Sequence
  ENSG00000196227_4 (sequence is synthesized)
taaatcccaagtaccccacgcttcttcccagccgagaagcagcctcacagctgtcacccagcctactgaagaaaaacttaaagaaagcatttccccggaagcaagacgcaaaaggaatcc

SEQ ID NO: 701747 - DNA, 120 bp, Artificial Sequence
  ENSG00000196227_5 (sequence is synthesized)
actcggttccaggtgtcagggggcctcagggaataaactgtttcttgattttcagtcaatgaaaattattaaagagaatgctgatgaggacagtgcaagtgatctctctgattcggaaag

SEQ ID NO: 701748 - DNA, 120 bp, Artificial Sequence
  ENSG00000196227_6 (sequence is synthesized)
aattcccattcctccttctcccctcacacctccagatctcaatcttcgagctgaagaaattgatccagtttactttgatcttcaccctggtcagggccatacaaaacctgaatactatta

SEQ ID NO: 701749 - DNA, 120 bp, Artificial Sequence
  ENSG00000196227_7 (sequence is synthesized)
tcctaatttccttccatcccctttcagctcctgggacctacgagatatggccctgcttctgaacgcagagaacaaaacggaagccgtgccccgagtgggaggacttcttgggaagtatat

SEQ ID NO: 701750 - DNA, 120 bp, Artificial Sequence
  ENSG00000196227_8 (sequence is synthesized)
cgatagacttattcagcttgagtggctgcaagtccagactgtacagtgtgaaaaagcaaaggggggcaaagcaaggccccccactgcccctgggacctcaggggcactgaaaagccctgg

SEQ ID NO: 701751 - DNA, 120 bp, Artificial Sequence
  ENSG00000196227_9 (sequence is synthesized)
gagaagtaagctaattgctagtgctctgtccaagccactacctcaccaggaaggggcttcaaagtcaggcccttcccgaaagaaagcttttcaccatgaagaaatccacccatcacatta

SEQ ID NO: 701752 - DNA, 120 bp, Artificial Sequence
  ENSG00000196227_10 (sequence is synthesized)
tgcatttgagacttcccctagacccattgatgtgcttggtggtaccaggttttgttctcagaggcaaacccttgaaatgaggacagaagaaaagaaaaagaaatcaagtaagagtacgaa

SEQ ID NO: 701753 - DNA, 120 bp, Artificial Sequence
  ENSG00000196227_11 (sequence is synthesized)
gctgcagcgctgggatctgtccggcagtggaagcagctctaaggtggaaaccagcggtcacattcgagttcccaaacaggcagctgtgattctggactcagcagattcctgtaaggcctc

SEQ ID NO: 701754 - DNA, 120 bp, Artificial Sequence
  ENSG00000196227_12 (sequence is synthesized)
caaaacacaagcacatgcacatcctaggaaaaagggaaaggcagagagctgtggtcatgccactgtatcgagtgagaaaaaactgaaaacaaacggagtaaagcaaaacacatataaact

SEQ ID NO: 701755 - DNA, 120 bp, Artificial Sequence
  ENSG00000196227_13 (sequence is synthesized)
aaaataaatatctaaaatgctgaattgccaagacctgcaggtacctcaatgttagagcgcttccaaaagtcaaaatactgtgaattttaaggaattttacaaatactgacatttaagtag

SEQ ID NO: 701756 - DNA, 120 bp, Artificial Sequence
  ENSG00000196227_14 (sequence is synthesized)
ttgactggcatttttgtccacctttatttctaccctgagtggggttattttcaaagggaagtgtctttcaataagcctttctttgtattgtcagtcttaggcaaatgagagccctttaga

SEQ ID NO: 701757 - DNA, 120 bp, Artificial Sequence
  ENSG00000196227_15 (sequence is synthesized)
taaaaattatgtaaaatatgtgccatataaaggaataaaatggcacctctccagggaaagtgtcagtgaaacctcagctacagtagccggtctgtgtagagcagctagtggtgttacctc

SEQ ID NO: 701758 - DNA, 120 bp, Artificial Sequence
  ENSG00000196227_16 (sequence is synthesized)
cccattttcacatgcacgtaagtatatgaaatagtgcagactgtttcaaatggtgtggaatcctaaatgtttaaaataaggtccttcttgcccactccctcgcttacttttttataaact

SEQ ID NO: 701759 - DNA, 120 bp, Artificial Sequence
  ENSG00000196227_17 (sequence is synthesized)
cctcaagcaaaatttctgttcattttacccttaggagaagctttagttcttcctcaagtcagggagtagtgagtttgtattttgagtagtcatttctcactaagctggttgctttctaga

SEQ ID NO: 701760 - DNA, 120 bp, Artificial Sequence
  ENSG00000196227_18 (sequence is synthesized)
gagacagtggaatctagtactttaatacattttctctgacatggttttttttttcttttttgaggggcattttaaacttagaggtggtggtaaaacctacttttgagttctccgaactga

SEQ ID NO: 701761 - DNA, 120 bp, Artificial Sequence
  ENSG00000196227_19 (sequence is synthesized)
ggttaaaataacttgcagaattttccaaagtcaatgggcttagcatgattactgctgtttggtggggctgagaatgaaatatttgacattctggaattgctggcatgtaaagcttctcca

SEQ ID NO: 701762 - DNA, 120 bp, Artificial Sequence
  ENSG00000196227_20 (sequence is synthesized)
gagaggcaccccagggaaatcactctttacaatttgtaaaggaagggcctgtaaaaggatcaaaacacatggacctacattcagtgtaatagttacaaagttactgatttgggttccaca

SEQ ID NO: 701763 - DNA, 120 bp, Artificial Sequence
  ENSG00000196227_21 (sequence is synthesized)
tgaattctaaactcgcttatctggtcttcaggcttcccaactctctccaagccttcttatttcactgcagttaaataacatcttcttgttcctatagttgtgctgtgagttttctgttca

SEQ ID NO: 701764 - DNA, 120 bp, Artificial Sequence
  ENSG00000196227_22 (sequence is synthesized)
tatttgcgcagtgtattttaatacggcccatgtcattatagttgattttatccctttaaacaattactgtatttgtttttgacgtagaggtttcaattttttcaccttgggggcaaatga

SEQ ID NO: 701765 - DNA, 120 bp, Artificial Sequence
  ENSG00000196227_23 (sequence is synthesized)
aaaacttggcatttttcatttgggaacatataatagcttgtaaacttttcagacagcagtaaatgtctgaaaaaatatcaaaaacagcataaagacaagattatgtagctctaattatac

SEQ ID NO: 701766 - DNA, 120 bp, Artificial Sequence
  ENSG00000196227_24 (sequence is synthesized)
gtatataattataaaaaacaatgtgcaagggttatattttaaggtcttttaaaatctgattttgatcataccaaatgacataatattttttatggtagccttttactttcaagacttaat

SEQ ID NO: 701767 - DNA, 120 bp, Artificial Sequence
  ENSG00000196227_25 (sequence is synthesized)
tttcagacttgtacaagttccttcttacattctttccctctcacaccatcctactggagaaagcatacttttatgctaagatcttactttaagctttttatgtgaacaaaagatgtacat

SEQ ID NO: 701768 - DNA, 120 bp, Artificial Sequence
  ENSG00000196227_26 (sequence is synthesized)
atagtaagtattacttccgtagtcctcaaatttactataacttttgtacttagtatatgttttatatttggaaaacagcactacgcttagttttcctgtagttcctgagtgatgtctgtg

SEQ ID NO: 701769 - DNA, 120 bp, Artificial Sequence
  ENSG00000196227_27 (sequence is synthesized)
tgttccttgcctgcccttttttgtgagcacagattagtctgttatccatggctggcacttcacttatgatcctttctctgctagatttttatgcagctctctatgaagtttcatggccca

SEQ ID NO: 701770 - DNA, 120 bp, Artificial Sequence
  ENSG00000196227_28 (sequence is synthesized)
tagatattcaaaagcaagatattctatacatatgtgtatatgtatatatactccttatgttaatactaaagtgtttatgctgagttgctgcctttccccgtcatgtatccatgtgcatgc

SEQ ID NO: 701771 - DNA, 120 bp, Artificial Sequence
  ENSG00000196227_29 (sequence is synthesized)
tcttagagaccttgaatggttgagggtaaagtgatttattagtaattctacttgccttgtgtatgtctgagctgaaaacaatcgtgattaagaaatttagaggtggctgggcgtggtggc

SEQ ID NO: 701772 - DNA, 120 bp, Artificial Sequence
  ENSG00000196227_30 (sequence is synthesized)
gcaacaagagggaaactccgtttcaaaaaaaaaagaaaaagaaagaaattgagaagtaacgcctcataatatttgttcccagctttttaaattgaagctggttgcataatctggggaata

SEQ ID NO: 701773 - DNA, 120 bp, Artificial Sequence
  ENSG00000196227_31 (sequence is synthesized)
gtcataatttcatgtgttatacagtttaaaaagcctgcaaaagtgactttgcttgtttactttctgcctcagattgactattttaaccaatattgtcacgactagatcatagctcctagt

SEQ ID NO: 701774 - DNA, 120 bp, Artificial Sequence
  ENSG00000196227_32 (sequence is synthesized)
gaataacatgaggtgttttaaagttaggtctattacagaattaacataagcacaattttaattttatgatatctgatatgcctatctaatacatcttaatgcattaaatgctgcagataa

SEQ ID NO: 701775 - DNA, 120 bp, Artificial Sequence
  ENSG00000196227_33 (sequence is synthesized)
gaatcttgctatttttcaagtagacaacattagaaagttgaatcatgaactcattcaattcatcaagtcaaaagcactgagtgttttgctagtctagtgacatgggttattgtatttccg

SEQ ID NO: 701776 - DNA, 120 bp, Artificial Sequence
  ENSG00000196227_34 (sequence is synthesized)
ggttattgtatttccgagaagtgcctctcatttctggggagttgtttacatataccctgcatttaaaccaattaaaacaatccaagtttctttaaaaaaaaaaagaaaaagaaaaagaaa

SEQ ID NO: 701777 - DNA, 120 bp, Artificial Sequence
  ENSG00000196227_35 (sequence is synthesized)
gcttagaattatctaatggaaaaaatgtaaaaaagtacaaaaatgaactaaaagtatatcagtatttgcagtatttgctgtgattacttaggtttagactttctcaacttcttagatgac

SEQ ID NO: 701778 - DNA, 120 bp, Artificial Sequence
  ENSG00000196227_36 (sequence is synthesized)
taaatgggctgaagacttgtaactaacttgaataggatagacttcataccctgtgacaaaaaggatggggaagagaatatcattggtcttgccatatacctcctagctaaaaggaaaatg

SEQ ID NO: 701779 - DNA, 120 bp, Artificial Sequence
  ENSG00000196227_37 (sequence is synthesized)
gtttgtagttgttcttgggcctactgtgttgcttttcagaaggacataagactttctactttatctgatatggatatcgtctacttcctcattcctttatgctcacttatggagtagtta

SEQ ID NO: 701780 - DNA, 120 bp, Artificial Sequence
  ENSG00000196227_38 (sequence is synthesized)
catagaaatataactcttggtggtactgtattttaaggtaattcagaagcagtatgtattatttatgtacatgtacaggacaccattcaaaatggcttgaaaatattcagcatgtttgtt

SEQ ID NO: 701781 - DNA, 120 bp, Artificial Sequence
  ENSG00000196227_39 (sequence is synthesized)
atttgctgttatattgtatgtttagttttgtatgtgataaacagaattgatgtaagtttttgtggacttgaatttctccttccttgagatcaattaaacagcagaaaaatattgtctgga

SEQ ID NO: 701782 - DNA, 120 bp, Artificial Sequence
  ENSG00000196227_40 (sequence is synthesized)
cagccagggagctcagcggagctgcgcgcctccgcctccagctcccctgccgcagcgcgccgcagccgggcgtccccgcgcgggcgccggagaggaaggaaggctggcagcctcgtcacg

SEQ ID NO: 701783 - DNA, 120 bp, Artificial Sequence
  ENSG00000196228_0 (sequence is synthesized)
atggcgaagattgagaaaaacgctcccacgatggaaaaaaagccagaactgtttaacatcatggaagtagatggagtccctacgttgatattatcaaaagaatggtgggaaaaagtatgt

SEQ ID NO: 701784 - DNA, 120 bp, Artificial Sequence
  ENSG00000196228_1 (sequence is synthesized)
aatttccaagccaagcctgatgatcttattctggcaacttacccaaagtcaggtacaacatggatgcatgaaattttagacatgattctaaatgatggtgatgtggagaaatgcaaaaga

SEQ ID NO: 701785 - DNA, 120 bp, Artificial Sequence
  ENSG00000196228_2 (sequence is synthesized)
gcccagactctagatagacacgctttccttgaactgaaatttccccataaagaaaaaccagatttggagttcgttcttgaaatgtcctcaccacaactgataaaaacacatctcccttca

SEQ ID NO: 701786 - DNA, 120 bp, Artificial Sequence
  ENSG00000196228_3 (sequence is synthesized)
gtgtcctactaccactttcacaggatggcttcctttatgcctgatcctcagaacttagaggaattttatgagaaattcatgtccggaaaagttgttggcgggtcctggtttgaccatgtg

SEQ ID NO: 701787 - DNA, 120 bp, Artificial Sequence
  ENSG00000196228_4 (sequence is synthesized)
aaaggatggtgggctgcaaaagacatgcaccggatcctctacctcttctacgaggatattaaaaaagacccaaagcgggaaattgagaagatactgaagttcctggaaaaagacatatca

SEQ ID NO: 701788 - DNA, 120 bp, Artificial Sequence
  ENSG00000196228_5 (sequence is synthesized)
gaggaaattctgaataaaatcatctatcacacctcctttgatgtaatgaagcaaaacccaatgaccaactataccactttgcccaccagcattatggaccactccatctccccttttatg

SEQ ID NO: 701789 - DNA, 120 bp, Artificial Sequence
  ENSG00000196228_6 (sequence is synthesized)
aggaaagggatgcctggagactggaagaactattttactgtggcccaaaatgaagaatttgacaaggactaccagaagaagatggcaggaagcaccctaaccttccgcacagagatctga

SEQ ID NO: 701790 - DNA, 120 bp, Artificial Sequence
  ENSG00000196230_0 (sequence is synthesized)
ctctcagaaccttcctgccgtcgcgtttgcacctcgctgctccagcctctggggcgcattccaaccttccagcctgcgacctgcggagaaaaaaaattacttattttcttgccccataca

SEQ ID NO: 701791 - DNA, 120 bp, Artificial Sequence
  ENSG00000196230_1 (sequence is synthesized)
taccttgaggcgagcaaaaaaattaaattttaaccatgagggaaatcgtgcacatccaggctggtcagtgtggcaaccagatcggtgccaagttctgggaggtgatcagtgatgaacatg

SEQ ID NO: 701792 - DNA, 120 bp, Artificial Sequence
  ENSG00000196230_2 (sequence is synthesized)
gcatcgaccccaccggcacctaccacggggacagcgacctgcagctggaccgcatctctgtgtactacaatgaagccacaggtggcaaatatgttcctcgtgccatcctggtggatctag

SEQ ID NO: 701793 - DNA, 120 bp, Artificial Sequence
  ENSG00000196230_3 (sequence is synthesized)
aacctgggaccatggactctgttcgctcaggtccttttggccagatctttagaccagacaactttgtatttggtcagtctggggcaggtaacaactgggccaaaggccactacacagagg

SEQ ID NO: 701794 - DNA, 120 bp, Artificial Sequence
  ENSG00000196230_4 (sequence is synthesized)
gcgccgagctggttgattctgtcctggatgtggtacggaaggaggcagagagctgtgactgcctgcagggcttccagctgacccactcactgggcgggggcacaggctctggaatgggca

SEQ ID NO: 701795 - DNA, 120 bp, Artificial Sequence
  ENSG00000196230_5 (sequence is synthesized)
ctctccttatcagcaagatccgagaagaataccctgatcgcatcatgaataccttcagtgtggtgccttcacccaaagtgtctgacaccgtggtcgagccctacaatgccaccctctccg

SEQ ID NO: 701796 - DNA, 120 bp, Artificial Sequence
  ENSG00000196230_6 (sequence is synthesized)
tccatcagttggtagagaatactgatgagacctattgcattgacaacgaggccctctatgatatctgcttccgcactctgaagctgaccacaccaacctacggggatctgaaccaccttg

SEQ ID NO: 701797 - DNA, 120 bp, Artificial Sequence
  ENSG00000196230_7 (sequence is synthesized)
tctcagccaccatgagtggtgtcaccacctgcctccgtttccctggccagctcaatgctgacctccgcaagttggcagtcaacatggtccccttcccacgtctccatttctttatgcctg

SEQ ID NO: 701798 - DNA, 120 bp, Artificial Sequence
  ENSG00000196230_8 (sequence is synthesized)
gctttgcccctctcaccagccgtggaagccagcagtatcgagctctcacagtgccggaactcacccagcaggtcttcgatgccaagaacatgatggctgcctgtgacccccgccacggcc

SEQ ID NO: 701799 - DNA, 120 bp, Artificial Sequence
  ENSG00000196230_9 (sequence is synthesized)
gatacctcaccgtggctgctgtcttccgtggtcggatgtccatgaaggaggtcgatgagcagatgcttaacgtgcagaacaagaacagcagctactttgtggaatggatccccaacaatg

SEQ ID NO: 701800 - DNA, 120 bp, Artificial Sequence
  ENSG00000196230_10 (sequence is synthesized)
catgttccgccggaaggccttcctccactggtacacaggcgagggcatggacgagatggagttcaccgaggctgagagcaacatgaacgacctcgtctctgagtatcagcagtaccagga

SEQ ID NO: 701801 - DNA, 120 bp, Artificial Sequence
  ENSG00000196230_11 (sequence is synthesized)
tgccaccgcagaagaggaggaggatttcggtgaggaggccgaagaggaggcctaaggcagagcccccatcacctcaggcttctcagttcccttagccgtcttactcaactgcccctttcc

SEQ ID NO: 701802 - DNA, 120 bp, Artificial Sequence
  ENSG00000196230_12 (sequence is synthesized)
tctccctcagaatttgtgtttgctgcctctatcttgttttttgttttttcttctggggggggtctagaacagtgcctggcacatagtaggcgctcaataaatacttgtttgttgaatgtc

SEQ ID NO: 701803 - DNA, 120 bp, Artificial Sequence
  ENSG00000196230_13 (sequence is synthesized)
tcctctctctttccactctgggaaacctaggtttctgccattctgggtgaccctgtatttctttctggtgcccattccatttgtccagttaatacttcctcttaaaaatctccaagaagc

SEQ ID NO: 701804 - DNA, 120 bp, Artificial Sequence
  ENSG00000196230_14 (sequence is synthesized)
tgggtctccagatcccatttagaaccaaccaggtgctgaaaacacatgtagataatggccatcatcctaagcccaaagtagaaaatggtagaaggtagtgggtagaagtcactatataag

SEQ ID NO: 701805 - DNA, 120 bp, Artificial Sequence
  ENSG00000196230_15 (sequence is synthesized)
gaaggggatgggattttccattctaaaagttttggagagggaaatccaggctattaaagtcactaaatttctaagtatgtccatttcccatctcagcttcaagggaggtgtcagcagtat

SEQ ID NO: 701806 - DNA, 120 bp, Artificial Sequence
  ENSG00000196230_16 (sequence is synthesized)
tatctccactttcaatctccctccaagctctactctggaggagtctgtcccactctgtcaagtggaatccttccctttccaactctacctccctcactcagctcctttcccctgatcaga

SEQ ID NO: 701807 - DNA, 120 bp, Artificial Sequence
  ENSG00000196230_17 (sequence is synthesized)
gaaagggatcaagggggttgggaggggggaaagagaccagccttggtccctaagcctccagaaacgtcttcttaatccccaccttttcttactcccaaaaaagaatgaacacccctgact

SEQ ID NO: 701808 - DNA, 120 bp, Artificial Sequence
  ENSG00000196230_18 (sequence is synthesized)
ctggagtggtgtatactgccacatcagtgtttgagtcagtccccagaggagaggggaaccctcctccatcttttttgcaacatctcatttcttccttttgctgttgcttcccccctcaca

SEQ ID NO: 701809 - DNA, 120 bp, Artificial Sequence
  ENSG00000196230_19 (sequence is synthesized)
cacttggttttgttctatcctacatttgagatttctattttatgttgaacttgctgctttttttcatattgaaaagatgacatcgccccaagagccaaaaataaatgggaattgaaaaaa

SEQ ID NO: 701810 - DNA, 120 bp, Artificial Sequence
  ENSG00000196230_20 (sequence is synthesized)
tggggcggtgcccagcttgggggaaggagagcggcgcttatcgaagtgtggtcgacctccatccgcccaccgagcacttgggacccgctgcacatatccagagcagggaaagctgtggct

SEQ ID NO: 701811 - DNA, 120 bp, Artificial Sequence
  ENSG00000196230_21 (sequence is synthesized)
ttctcgggggagcgagtgtctaggggaagggtgtggcaggcccacgggatgccatgccctagaacaacggcctgagcgcttgtggaattaaaatgggagatgtggggccgaggtgggcga

SEQ ID NO: 701812 - DNA, 120 bp, Artificial Sequence
  ENSG00000196230_22 (sequence is synthesized)
attgggatccctccaggtcaggggttcgagaccatcctgggcaacaaagcgagaccctcccccatgccacgtttctacaaaaaataaaagtaaaaaattagctgggcgtggtggcgcgcg

SEQ ID NO: 701813 - DNA, 120 bp, Artificial Sequence
  ENSG00000196230_23 (sequence is synthesized)
tctgtggtcccagctactcgagaggctgagatgggaggatcggttgagcctgggagttccacgctgtagtcatccgtgattgcaccactgcactgcaggctgggcaacaggaagaccctg

SEQ ID NO: 701814 - DNA, 61 bp, Artificial Sequence
  ENSG00000196230_24 (sequence is synthesized)
tgcaccactgcactgcaggctgggcaacaggaagaccctgtcttaaaaattagaagaagct

SEQ ID NO: 701815 - DNA, 120 bp, Artificial Sequence
  ENSG00000196233_0 (sequence is synthesized)
agaagatggcgagggtgtgtaggcggcagcaatgctccgttgagagacgcggctttcggcaagaactggattcgtggcgccacaagctcattcactgtgtaggtcccgtttccctctgtg

SEQ ID NO: 701816 - DNA, 120 bp, Artificial Sequence
  ENSG00000196233_1 (sequence is synthesized)
cggcggccggcgggaccataagggcttaactcatatatttaacccccctccaaaaaggtttgaaagtattcttgaagggctgtttggacctgcattattaaaagatctcagtttatttaa

SEQ ID NO: 701817 - DNA, 120 bp, Artificial Sequence
  ENSG00000196233_2 (sequence is synthesized)
agactgtgaacctgaaagcatttctgattggacttttgatgaaaactgtttattctgttgcttgagaagagataaagtaaagggacacttagtcggtctggatgaaccagcttcgggagc

SEQ ID NO: 701818 - DNA, 120 bp, Artificial Sequence
  ENSG00000196233_3 (sequence is synthesized)
tgggcaagaagctctgcttaaacaagagcaagcaaaaatcattcgattcgagagacaagcagaagaattcctcaatgcagtcttttatagaaaagacagtccctgggtctccgaccccaa

SEQ ID NO: 701819 - DNA, 120 bp, Artificial Sequence
  ENSG00000196233_4 (sequence is synthesized)
tattcccctagtggcccgtgagatcatgcagcgaatgatccaacaatttgctgctgaatatacctcaaaaaatagctctactcaggaccccagccagcccaatagcacaaagaaccaaag

SEQ ID NO: 701820 - DNA, 120 bp, Artificial Sequence
  ENSG00000196233_5 (sequence is synthesized)
cctgccgaaagcatctccagtcaccacctctcccacggctgcaactactcagaaccctgtgctcagcaaacttctcatggctgaccaagactcacctctggaccttactgtcagaaagtc

SEQ ID NO: 701821 - DNA, 120 bp, Artificial Sequence
  ENSG00000196233_6 (sequence is synthesized)
tcagtcagaacctagcgaacaagacggtgtacttgatctgtccactaagaaaagtccatgtgctggcagcacttccctgagccactctccaggctgctccagtactcaagggaacggtga

SEQ ID NO: 701822 - DNA, 120 bp, Artificial Sequence
  ENSG00000196233_7 (sequence is synthesized)
gaactcaacagaggcaaaagcagtagattctaacaatcagtcgaagtccccactggagaaatttatggtcaaactgtgtactcatcatcaaaagcaattcattcgtgttctgaacgacct

SEQ ID NO: 701823 - DNA, 120 bp, Artificial Sequence
  ENSG00000196233_8 (sequence is synthesized)
gtacactgaatctcaaccaggcactgaggacctgcagccttctgattcgggagcaatggatgtatccacttgcaatgctggctgtgcccagctcagcaccaaacataaggaaaaagatgc

SEQ ID NO: 701824 - DNA, 120 bp, Artificial Sequence
  ENSG00000196233_9 (sequence is synthesized)
tctgtgtctcgatatgaagtcttctgcttctgtagatttgttcgtagactcgtcagactctcacagccctctacacttgacggaacagaccccgaagaagcctcctcctgagataaaccc

SEQ ID NO: 701825 - DNA, 120 bp, Artificial Sequence
  ENSG00000196233_10 (sequence is synthesized)
tgtagatggaagagagaatgccttgactgttgtccagaaagattcctctgaacttccaaccactaaatcgaattctattaatagcagttcagtggatagtttcactccgggatacctcac

SEQ ID NO: 701826 - DNA, 120 bp, Artificial Sequence
  ENSG00000196233_11 (sequence is synthesized)
tgcatctaattgttcctcagtgaacttccaccacatccctaaaatcttggaggggcagaccactggacaagagcaagacacaaatgtgaacatatgtgaggatggtaaagaccatatgca

SEQ ID NO: 701827 - DNA, 120 bp, Artificial Sequence
  ENSG00000196233_12 (sequence is synthesized)
gagttcagctttagtagaaagtctaattacagtaaaaatggcagctgagaatagtgaggaaggcaatacctgtattattcctcaaagaaatttgttcaaagctttatcagaagaggcttg

SEQ ID NO: 701828 - DNA, 120 bp, Artificial Sequence
  ENSG00000196233_13 (sequence is synthesized)
gaactcagggtttatggggaactcatctagaactgctgacaaagagaatactttacagtgtccaaaaacacctttgcgccaggatttagaggcaaatgaacaagatgcaaggccaaagca

SEQ ID NO: 701829 - DNA, 120 bp, Artificial Sequence
  ENSG00000196233_14 (sequence is synthesized)
agagaaccatcttcactctctgggaagaaataaggtgggttaccatttacatcccagtgataagggccagtttgatcattccaaagatggttggttaggccccggccctatgccagctgt

SEQ ID NO: 701830 - DNA, 120 bp, Artificial Sequence
  ENSG00000196233_15 (sequence is synthesized)
acacaaagcggcaaatggacactcaagaaccaagatgatatcaacctccatcaagacagctcggaaaagtaaaagggcatcagggctgaggataaatgattatgataaccagtgtgatgt

SEQ ID NO: 701831 - DNA, 120 bp, Artificial Sequence
  ENSG00000196233_16 (sequence is synthesized)
tgtttatatcagtcaaccaataacagaatgccactttgagaatcaaaaatcaatattatcttctcggaaaacagccagaaagagtactcgaggatactttttcaatggtgactgttgtga

SEQ ID NO: 701832 - DNA, 120 bp, Artificial Sequence
  ENSG00000196233_17 (sequence is synthesized)
gctgccaactgttcgtacactggccagaaatttacactcccaggaaaaagcaagctgctcagcattggcatcagaggcagttttcactcctaagcagacccttacaattccagcccctag

SEQ ID NO: 701833 - DNA, 120 bp, Artificial Sequence
  ENSG00000196233_18 (sequence is synthesized)
acatacagtagatgtgcagcttcccagagaagacaaccctgaagaacctagcaaggaaatcacctctcacgaggaaggaggtggagacgtttcacctcgaaaagaacctcaagagcctga

SEQ ID NO: 701834 - DNA, 120 bp, Artificial Sequence
  ENSG00000196233_19 (sequence is synthesized)
ggtttgccccacaaagattaagccgaacctgagcagctcccctaggtcagaggaaacgacagcctccagcctggtgtggcctctccctgctcaccttcctgaagaggacctgccagaagg

SEQ ID NO: 701835 - DNA, 120 bp, Artificial Sequence
  ENSG00000196233_20 (sequence is synthesized)
tggctccacagtctcagctcccacagcaagtgggatgtcttctcctgaacacaaccaaccaccagttgcactgttggatacggaggagatgagtgtaccccaggactgtcacctccttcc

SEQ ID NO: 701836 - DNA, 120 bp, Artificial Sequence
  ENSG00000196233_21 (sequence is synthesized)
ctccactgaaagcttttccgggggagtcagtgaagatgtcatttctaggcctcattctcctcctgaaatagtcagtagagaagaaagtcctcagtgctcagaaaatcagagttccccaat

SEQ ID NO: 701837 - DNA, 120 bp, Artificial Sequence
  ENSG00000196233_22 (sequence is synthesized)
gggcttggagccccccatgagtctgggaaaggctgaggacaaccaaagcatcagtgctgaggttgagtctggagacacccaggagctaaatgtcgacccactcttgaaggaaagcagcac

SEQ ID NO: 701838 - DNA, 120 bp, Artificial Sequence
  ENSG00000196233_23 (sequence is synthesized)
ttttactgatgaaaaccccagtgaaactgaggaaagtgaggcagcaggtggtataggaaaattagagggagaggacggtgatgtaaaatgcctgtcagaaaaagacacgtatgatacaag

SEQ ID NO: 701839 - DNA, 120 bp, Artificial Sequence
  ENSG00000196233_24 (sequence is synthesized)
cattgactcactcgaagagaatttggacaagaagaaaaaaggtaaaaaattccctgaggcctctgataggtgcctaagaagtcaactttcggattcttcctctgctgacagatgcctaag

SEQ ID NO: 701840 - DNA, 120 bp, Artificial Sequence
  ENSG00000196233_25 (sequence is synthesized)
aaatcagagttcagattcttcctcagcttgtcttgaaatcaaagttcctaaaaatcctagtgcaaaacgttcaaaaaaagaagggcaccctggtgggacaacacctaagggccttctacc

SEQ ID NO: 701841 - DNA, 120 bp, Artificial Sequence
  ENSG00000196233_26 (sequence is synthesized)
tgacagtttccacacggaaactctggaggacacagaaaagccaagtgtcaatgaacgcccctctgagaaagatgctgagcaggagggcgaaggcggggggatcatcaccaggcagacttt

SEQ ID NO: 701842 - DNA, 120 bp, Artificial Sequence
  ENSG00000196233_27 (sequence is synthesized)
gaaaaacatgctggacaaagaagtcaaggagttacgaggagagattttccccagcagggaccccataaccacagctggacagccactgcctggagagagattggaaatctatgttcagtc

SEQ ID NO: 701843 - DNA, 120 bp, Artificial Sequence
  ENSG00000196233_28 (sequence is synthesized)
taaaatggatgagaagaatgctcatatcccctcagaaagtattgcttgtaagagggacccagaacaggcaaaagaagagccagggcatattcccacacagcatgtggaggaggctgtgaa

SEQ ID NO: 701844 - DNA, 120 bp, Artificial Sequence
  ENSG00000196233_29 (sequence is synthesized)
tgaggtagacaacgaaaacacccagcagaaagatgatgagagtgatgccccatgcagctctcttgggttgtcgagtagtggaagtggtgatgctgctagggcaccaaaatcggtgccaag

SEQ ID NO: 701845 - DNA, 120 bp, Artificial Sequence
  ENSG00000196233_30 (sequence is synthesized)
gcctaaaagattgacctcttcaacctacaacctaagacacgctcattctctgggctccttggatgcttcaaaagtgacttcagaaaaggaagctgcacaagtaaaccccataatgccaaa

SEQ ID NO: 701846 - DNA, 120 bp, Artificial Sequence
  ENSG00000196233_31 (sequence is synthesized)
ggaaaatggagcttcagagagtggagaccccctagatgaggacgatgttgacaccgtggtagatgaacagccaaagtttatggaatggtgtgctgaggaggagaaccaagagctcatcgc

SEQ ID NO: 701847 - DNA, 120 bp, Artificial Sequence
  ENSG00000196233_32 (sequence is synthesized)
caacttcaatgcccagtacatgaaagttcagaagggctggatccagttggagaaagaaggacagccaacaccaagagcaaggaacaaatcagataaactgaaagagatttggaaaagcaa

SEQ ID NO: 701848 - DNA, 120 bp, Artificial Sequence
  ENSG00000196233_33 (sequence is synthesized)
gaaaaggtcacggaaatgtaggagttcattggagagtcagaagtgttctcctgttcagatgctctttatgacaaactttaaattatctaatgtttgtaaatggttcttagagacaactga

SEQ ID NO: 701849 - DNA, 120 bp, Artificial Sequence
  ENSG00000196233_34 (sequence is synthesized)
aacccggtctctagtcattgtgaagaagctcaatactcgccttccaggagacgttccccctgtcaagcatcctcttcagaaatacgctccttccagcctatatcccagttcactacaggc

SEQ ID NO: 701850 - DNA, 120 bp, Artificial Sequence
  ENSG00000196233_35 (sequence is synthesized)
tgagcgcttgaaaaagcacttgaagaaatttcctggagctacccctgctaagaataattggaaaatgcagaagctctgggccaaatttcgagagaatcctgatcaagtggagccagaaga

SEQ ID NO: 701851 - DNA, 120 bp, Artificial Sequence
  ENSG00000196233_36 (sequence is synthesized)
tggcagtgatgtcagccccggccctaattctgaagacagcatagaggaagtcaaggaagatagaaacagtcatcctccagcaaacctgcccactccagccagtacccggattcttagaaa

SEQ ID NO: 701852 - DNA, 120 bp, Artificial Sequence
  ENSG00000196233_37 (sequence is synthesized)
atattccaatattcgaggaaagctcagagcccagcaacgtttaatcaagaatgagaaaatggaatgcccagatgctctggctgtggaaagtaagccaagtcgtaagagcgtatgcatcaa

SEQ ID NO: 701853 - DNA, 120 bp, Artificial Sequence
  ENSG00000196233_38 (sequence is synthesized)
ccctctgatgtcccccaagcttgccctgcaagtggatgcagatgggtttcctgttaagcccaagagtactgaaggaatgaagggaaggaaggggaagcaggtgtctgaaatcttgcctaa

SEQ ID NO: 701854 - DNA, 120 bp, Artificial Sequence
  ENSG00000196233_39 (sequence is synthesized)
agcagaagttcagagtaaacgcaagagaacagaaggcagcagccctccagatagtaagaacaaggggcctacggtgaaagccagcaaagaaaagcatgctgatggagccaccaaaacccc

SEQ ID NO: 701855 - DNA, 120 bp, Artificial Sequence
  ENSG00000196233_40 (sequence is synthesized)
tgctgccaagaggccagctgcaagggacagaagcagccaaccccccaaaaagacgtctttgaaagagaataaagtgaagatccctaaaaagtccgctgggaagagctgccctccctccag

SEQ ID NO: 701856 - DNA, 120 bp, Artificial Sequence
  ENSG00000196233_41 (sequence is synthesized)
gaaagaaaaagagaatacaaacaaaaggccttcccagtctattgcctcggaaacactgacgaaacctgcaaaacagaagggggccggtgaatcctcttcaaggcctcagaaagccacgaa

SEQ ID NO: 701857 - DNA, 120 bp, Artificial Sequence
  ENSG00000196233_42 (sequence is synthesized)
taggaagcagagtagtggaaagactcgggccagaccctcaacgaaaaccccagagagcagtgcagctcagagaaagcgaaagctgaaggcaaagctggactgttcgcacagcaaacggag

SEQ ID NO: 701858 - DNA, 120 bp, Artificial Sequence
  ENSG00000196233_43 (sequence is synthesized)
gcggctggatgcaaagtgattggaaagatggtagccaagagtaaaactgttctatagaagtaaccttttattttgcattaactaaatctgcttttataagcttatcaagcctttcaaatt

SEQ ID NO: 701859 - DNA, 120 bp, Artificial Sequence
  ENSG00000196233_44 (sequence is synthesized)
tacagttaatggagaacaccgtaatttgagatgtcagaaaatgcatctcagatggagaagggaacttgcagagtccttctctgaggctaagggaagttatatattatattctggttgttc

SEQ ID NO: 701860 - DNA, 120 bp, Artificial Sequence
  ENSG00000196233_45 (sequence is synthesized)
cttgggttttaaacttggaaccaagcagttttcgtttttaaaagtacagtgccttatttatcctttttgtttttaaatttacaaaagctaaaaagctgatctatgtgattaaaggcttgt

SEQ ID NO: 701861 - DNA, 120 bp, Artificial Sequence
  ENSG00000196233_46 (sequence is synthesized)
attttatacttgatgcacaagcacttgtactgtagccgagaagaccaccatcatgcacataaaaggagcttttcagcagccaccctgcagcatctgcccacgaacagatgcccttctttg

SEQ ID NO: 701862 - DNA, 120 bp, Artificial Sequence
  ENSG00000196233_47 (sequence is synthesized)
caaaccccagcagtgaacttccctctctgtcttgtttgtttgtttagatgatgtttgaaagctaaaccaaatcattttatggtatgcagaggatttataattataaaagattactatttc

SEQ ID NO: 701863 - DNA, 120 bp, Artificial Sequence
  ENSG00000196233_48 (sequence is synthesized)
tgttacccccttttaaaaaagatcatgttcattgttggtccctcctctcacctttgatgttttgtcatttgagagcatgtattctaaattatgtgcccatgggacaagagatatgtcaca

SEQ ID NO: 701864 - DNA, 120 bp, Artificial Sequence
  ENSG00000196233_49 (sequence is synthesized)
agtgttaatttttgtttacaaactctaaaaaatcatttgcatccccaaactgtattactaattctcaccatcttcttcatttctggtcttgctagcactcctgcaaggcttccatcctac

SEQ ID NO: 701865 - DNA, 120 bp, Artificial Sequence
  ENSG00000196233_50 (sequence is synthesized)
ttcgggaggaaaaagcctaggattttttttttccatcttgtagctgtaatttgatgattaggatgaaaatgactcttattttctttcttacccagagtacttccatattcaaagaaagcc

SEQ ID NO: 701866 - DNA, 120 bp, Artificial Sequence
  ENSG00000196233_51 (sequence is synthesized)
gaactattatttccagtaatagaaaggtttaagaatatgtatgtccatgtgtgtttgggtgcatttgcatgtggttatcagccacaaatgtctcccaatcccaattttacagtaaaattt

SEQ ID NO: 701867 - DNA, 120 bp, Artificial Sequence
  ENSG00000196233_52 (sequence is synthesized)
tttccctatgcagtgtgcttgggtgtccctgagttgagtaattagcaaaggacagatggtttaaaagtagcccagtgtctctgtgagcatccccaataccactttggtaccagactcaga

SEQ ID NO: 701868 - DNA, 120 bp, Artificial Sequence
  ENSG00000196233_53 (sequence is synthesized)
aagatctaaaacagcatggagttatgtaaaggttagagcagccttgcagttggaggaagcagctccagcatctgtgaagagcccacacaccccctacacccagagctgatgttcagctgt

SEQ ID NO: 701869 - DNA, 120 bp, Artificial Sequence
  ENSG00000196233_54 (sequence is synthesized)
atgctccaatgtgaatgtacttgttggagtagacgttcattctgattgattaacaccatcctagtagttaaatgcttgtagtatcactcctgccatgtcatgtcaggctctattccgtgt

SEQ ID NO: 701870 - DNA, 120 bp, Artificial Sequence
  ENSG00000196233_55 (sequence is synthesized)
ctcagaagtgagagccacaatgttttaatgactttgtttgcctttcccaggtgaagcctgagacaggcgcattggcttcaacctagtgcctgtgaccttgctccattattatagtgcagc

SEQ ID NO: 701871 - DNA, 120 bp, Artificial Sequence
  ENSG00000196233_56 (sequence is synthesized)
gtgtacttgacttttccattgggccgctctacaaaaaaaggcttggttgttgaagcctcagtcagcttccttaaccggttctgtcaccaaaatcagcttgtatggacagctgctgccctg

SEQ ID NO: 701872 - DNA, 120 bp, Artificial Sequence
  ENSG00000196233_57 (sequence is synthesized)
tcctttttatttgaaaattttccatttaggttgtttcagatctctttagataagcccagatggacttttttcatgcaaatcatgataatacaggccttctacccattctgttaaaggttt

SEQ ID NO: 701873 - DNA, 120 bp, Artificial Sequence
  ENSG00000196233_58 (sequence is synthesized)
gctgtatatcatgggaacttctgatgattggataagactggagaaaagtatttgatttgtgagaaatttagaattgtgttgaatttcatagctagagaagcttgctgtcttatgaagccc

SEQ ID NO: 701874 - DNA, 120 bp, Artificial Sequence
  ENSG00000196233_59 (sequence is synthesized)
tgattttttttcatgtcttctctatctgatgagtctttttctttttagtatctttgactttggccattcaagagctacctacattaataaaactgctgagtgtgtatgttggcaaccctt

SEQ ID NO: 701875 - DNA, 120 bp, Artificial Sequence
  ENSG00000196233_60 (sequence is synthesized)
tctcagcattaagttgcacagaggcattaatgtgttttgaataggttcatttaatcttaaaaaatggttttaaggttttaaaaatgtcttttcatatagttgtcactggatattgtgttt

SEQ ID NO: 701876 - DNA, 120 bp, Artificial Sequence
  ENSG00000196233_61 (sequence is synthesized)
gtggtgacttaaacagctgatgtttgccaatgtcaggcatgctgattcctgtacagaagaggtgccccgttggctgcataccgactaccttgtaaggtgcttggattaggttagggagag

SEQ ID NO: 701877 - DNA, 120 bp, Artificial Sequence
  ENSG00000196233_62 (sequence is synthesized)
gtgtaaggtagtaagtgggtggaacttttccagttccaagtttgtaattcattccattccttttctaagttctttttcatttttaaaagctcagttaaagataatagccttctttcccat

SEQ ID NO: 701878 - DNA, 120 bp, Artificial Sequence
  ENSG00000196233_63 (sequence is synthesized)
tctaggctgtgtgtgagaaaaggtgttaatgtgtatgtatgtattttatatacctaacaatgcaatggatcatctttaaaatcaacttatactttataataaggacatttaaatagacca

SEQ ID NO: 701879 - DNA, 120 bp, Artificial Sequence
  ENSG00000196233_64 (sequence is synthesized)
agagtctacataattatgacacttaaaagtttagaattttttatatttgttgaatctcatttttgctgattcagttaattttgttaatagaagaaagaaaacagcaaaacttgagggcta

SEQ ID NO: 701880 - DNA, 120 bp, Artificial Sequence
  ENSG00000196233_65 (sequence is synthesized)
atcctgcaaggccctttgatacctacagcaggtactggcaaagcagtttcccagatacctccaagctcaggtgtggtattgactcaagtctgctattgttttccctaccttgcaaaaacc

SEQ ID NO: 701881 - DNA, 120 bp, Artificial Sequence
  ENSG00000196233_66 (sequence is synthesized)
caaaagcagtccatcccacattccgatccaaatcagaaaggaattctcctgggtgtacactcagtgaaatgactgttccagtcttggggctgaagttgatgaccaaaggacactggtatt

SEQ ID NO: 701882 - DNA, 120 bp, Artificial Sequence
  ENSG00000196233_67 (sequence is synthesized)
ctctgagtttctggagaagctggaagatgcctgggaagcaatcactgaagctctgccatagctcccgtagaggagggccctcttcaggacacccatcttctatcctacgagactccctgc

SEQ ID NO: 701883 - DNA, 120 bp, Artificial Sequence
  ENSG00000196233_68 (sequence is synthesized)
tatagatggacatgcaggagaccactccctcacttggggtcctgagcctcacccctagcacttcctcagacaggtaacaatcttgcagcacagcaggaaggttgtgaacctttattctgc

SEQ ID NO: 701884 - DNA, 120 bp, Artificial Sequence
  ENSG00000196233_69 (sequence is synthesized)
tcctgaggcttccttcataggaatgctgtcagtttctgtaagtcaccagtcactagccccttggattccttgttaaagacttctgtgcagccttatctaaaatgataatcttaggctgtg

SEQ ID NO: 701885 - DNA, 120 bp, Artificial Sequence
  ENSG00000196233_70 (sequence is synthesized)
agtctcctgctgtattgttcctaaaatcgtatggatagaagaggtgcccttagtcatccctttacatatgtggtgctttctaatgggatctctatgcatcacatactatgcaggtgaatt

SEQ ID NO: 701886 - DNA, 120 bp, Artificial Sequence
  ENSG00000196233_71 (sequence is synthesized)
tctcactgttcagataggtcatcagtaaaaggcatcacttcaagataattactttgaattgaggtttggcctcttttcctgctttgtaatgggttcggtcatgagggtgggagctgtcat

SEQ ID NO: 701887 - DNA, 120 bp, Artificial Sequence
  ENSG00000196233_72 (sequence is synthesized)
tcacatttatgggcagcattcctgttgattagtggacctaagagccaagtaggaaaatatagcatgctatgtgatacaagctggagatgctgtagtgttactatcagcaagttctgtgca

SEQ ID NO: 701888 - DNA, 120 bp, Artificial Sequence
  ENSG00000196233_73 (sequence is synthesized)
gactgcctttcggattccagatgatctgtcaagggtctgccaactgtgggctggtcgcttgtttgtgtaaataaaatgtgtttggaatatagccacacccattttcttaagttctgtctg

SEQ ID NO: 701889 - DNA, 120 bp, Artificial Sequence
  ENSG00000196233_74 (sequence is synthesized)
cggctgctttcgcactgcaagagcagagttgagtagctgcggcagagacccgtgtggcccttacagcctaagatactatctggaccttcagaaaacatctgctgatccctgcttgagaaa

SEQ ID NO: 701890 - DNA, 120 bp, Artificial Sequence
  ENSG00000196233_75 (sequence is synthesized)
gtcatccttttcaggaacaaatattcttgattttccttctctcttctgcccttttctctctgttcttctttacttctcattttccttgtctccattttttcttttcaaaggagacatgtt

SEQ ID NO: 701891 - DNA, 120 bp, Artificial Sequence
  ENSG00000196233_76 (sequence is synthesized)
atatcgatatgcactactatccccttaaacttgagcaaccttagcattccatcttcttaaaaaaaaccatcacagtagccaaaatgaggccaccttaccgtatcgagccggaacccatga

SEQ ID NO: 701892 - DNA, 120 bp, Artificial Sequence
  ENSG00000196233_77 (sequence is synthesized)
gcaaatagggattcagagttctaaaattatgtggcctgggcctctcatttcactcacacagaactgactctggctttatttcttgtttattaaagtaagccaagattttgtttctggtaa

SEQ ID NO: 701893 - DNA, 120 bp, Artificial Sequence
  ENSG00000196233_78 (sequence is synthesized)
aattagttgagactactttagttggacttttagtcctctgaatgtcacatttagatatggaaaatgttttttcacagagtagaaacaaagtctgatcacaatcccaaagctttgtttatt

SEQ ID NO: 701894 - DNA, 120 bp, Artificial Sequence
  ENSG00000196233_79 (sequence is synthesized)
cttatataatattttggtactgataccttttcagccacatactttcaaaataattttattaaaggtaagccaacaaataaaacatagaggcttttgaagtgctttaatattgatttaaaa

SEQ ID NO: 701895 - DNA, 120 bp, Artificial Sequence
  ENSG00000196233_80 (sequence is synthesized)
gctttaatattgatttaaaaaattggagttataaccagagtatgactgaaaagctattatagtcttcctccttttccaaaaactcaaggataaggatatatatatatatatatatatttt

SEQ ID NO: 701896 - DNA, 82 bp, Artificial Sequence
  ENSG00000196233_81 (sequence is synthesized)
gacgaggttacgctatgttgccgaggctgatctgaaactcctggcctcaagcagtgctcccacctcagcctcccaaagtgct

SEQ ID NO: 701897 - DNA, 120 bp, Artificial Sequence
  ENSG00000196233_82 (sequence is synthesized)
gtatgagtttctatgctggtttttttttaatgtgattcaatgtcctgtcagtgaaaaatttttgtcagtggccccaaatcactgatcgttttagttgttttgaaacaattatcattttga

SEQ ID NO: 701898 - DNA, 120 bp, Artificial Sequence
  ENSG00000196233_83 (sequence is synthesized)
attcttagtattactttgatgtcttattgtgacttgatatccactgaaatactggaattttttttaagtataaaattgatctgtgtaaggcggtcttcatatcctagcagtaagtgctat

SEQ ID NO: 701899 - DNA, 120 bp, Artificial Sequence
  ENSG00000196233_84 (sequence is synthesized)
tccccatgcttgctctcaaatccttttcaggggaaaaataaaaagattattgtatttaaaacgagcagaattgtgggagggccttcccctccccctgcccagcccccagacagggtctca

SEQ ID NO: 701900 - DNA, 120 bp, Artificial Sequence
  ENSG00000196233_85 (sequence is synthesized)
ctctgtcgccccaggctggagtgcaatgggcatatggtcttatctattagggtatgtagtttaaaagtacagttttttgaaagtatagtcatcttcatttttatgacgcccactgcaggc

SEQ ID NO: 701901 - DNA, 89 bp, Artificial Sequence
  ENSG00000196233_86 (sequence is synthesized)
ttttttttttttttccagttttagcagaaatgaggtctcactgtgttgcccagactgggaagtcttttgaggcagccttcaatataatt

SEQ ID NO: 701902 - DNA, 120 bp, Artificial Sequence
  ENSG00000196233_87 (sequence is synthesized)
ccagactgggaagtcttttgaggcagccttcaatataattcatcctttgaaacatcagaacagagtcctgtattctacaatggatggattggaagacttgaggatccagtctctttcctt

SEQ ID NO: 701903 - DNA, 120 bp, Artificial Sequence
  ENSG00000196233_88 (sequence is synthesized)
tatagataattagactcaggcagaaactcagagctctcagggctttgctgtgctgtgctgtgtcatgccgtcctggggcccggggaaccaccctgagcactttgtggagtgtgtccttgc

SEQ ID NO: 701904 - DNA, 120 bp, Artificial Sequence
  ENSG00000196233_89 (sequence is synthesized)
tcaggcttttgccttgggattgaaccgaagctgctcagttccttccacttacctcctctctgtctgatcttccttttcccagagcctcagtgcttgatgctcagtgctcaggagatgtcc

SEQ ID NO: 701905 - DNA, 120 bp, Artificial Sequence
  ENSG00000196233_90 (sequence is synthesized)
tttgctccatccttcagaggggcagttgtgtagttatgctgccgggtgagcacagacacacatactttctcccctagctgggaccatcccacacggggtgctcaatatgcatgcctcatg

SEQ ID NO: 701906 - DNA, 120 bp, Artificial Sequence
  ENSG00000196233_91 (sequence is synthesized)
aaagcatagactgtccatttaaaaaaaaatcaggtactcatggtattacaatatgccaggggttggacaaatggattttttacccttttttaaagggttatgtaaaaaaaaaaaaaaaaa

SEQ ID NO: 701907 - DNA, 120 bp, Artificial Sequence
  ENSG00000196233_92 (sequence is synthesized)
aaaaaagcaactatatgtggcccgcatagcctgaaatatttacttcctgacccttttgtggaaaagctctactgatccttatagtagtcattaaagatcaaattgtgtagacaggcacaa

SEQ ID NO: 701908 - DNA, 120 bp, Artificial Sequence
  ENSG00000196233_93 (sequence is synthesized)
cttttttttttcatatgctccaacatttttttcatacagtccagcaattcttttagattttagagtgtcttgcctgttcatctcagtacacagctgctgttacagattattcctgaataa

SEQ ID NO: 701909 - DNA, 120 bp, Artificial Sequence
  ENSG00000196233_94 (sequence is synthesized)
tgcttttgcgttaagaaaaattatccccctttgccagttgtctacttgttaataagttgtgggccatgtgatcatatctattagggtatgtagtgaaaactaaaagtgcagtctttaaaa

SEQ ID NO: 701910 - DNA, 120 bp, Artificial Sequence
  ENSG00000196233_95 (sequence is synthesized)
gtacagtcttcatttttatgaatcagagtgaacttgactgtggtagacattccattaacagcagttcagcacaaacaaattactcatgaacttaaagccaagaatagtgcctctccctga

SEQ ID NO: 701911 - DNA, 120 bp, Artificial Sequence
  ENSG00000196233_96 (sequence is synthesized)
aagtatgcgatgtgttggttttacccctagaacccttcatttctcttttgtatcatatacttgaaggtttctcactcttcaagctctggtcgtgatatgagaacatagatgcctggtgtt

SEQ ID NO: 701912 - DNA, 120 bp, Artificial Sequence
  ENSG00000196233_97 (sequence is synthesized)
tgcctgtttgactttcgagtgcagaccacacattctcttaaaaataccagcatgtctgtggcatcttgtcaggacaccggcagctttagacagaacaagttcagggctctccagcccagc

SEQ ID NO: 701913 - DNA, 120 bp, Artificial Sequence
  ENSG00000196233_98 (sequence is synthesized)
ccgagtcactgctcgttctgaggagccatccttggcaccttgccctccctcctcctgcctctgcttatgccgccagcccccttccaggaggcatattctctgggacagtcccccacttcc

SEQ ID NO: 701914 - DNA, 120 bp, Artificial Sequence
  ENSG00000196233_99 (sequence is synthesized)
ccagtgtggccctgaacacaaatttgtcacattggaagcatttttctctcaaaactcttttcctctagtatttagttgttgggtttaaatgctattcaatttatccacttttttttaaac

SEQ ID NO: 701915 - DNA, 120 bp, Artificial Sequence
  ENSG00000196233_100 (sequence is synthesized)
cccagttttctgtgatctgcacctcatagttgtcttgtagctaaagctgaggtatttgggagctaatttttgggaaagagactataccaacaagatttgcataattttttatatttatac

SEQ ID NO: 701916 - DNA, 120 bp, Artificial Sequence
  ENSG00000196233_101 (sequence is synthesized)
cacaggtagggattatttttagagtcactatagcttaaggttattgatttcactagtgtggtttctgcattctaaatagttctcggagactgtgttagtaactggtttcaaatacatata

SEQ ID NO: 701917 - DNA, 120 bp, Artificial Sequence
  ENSG00000196233_102 (sequence is synthesized)
tataatatttatacacaccactgtggaatttatttcactgtgtaaatagtgatattttcctgttcagatacttctatagaaagtatttattttaacaagaaaattaactgtcaaaagggc

SEQ ID NO: 701918 - DNA, 120 bp, Artificial Sequence
  ENSG00000196233_103 (sequence is synthesized)
tttccaaaaagtgttctttctagccacccatcctccccagctaccatgctcaaccattgagcccccaaacaacagtgaaagcagaaaggtgtggccttgaaaccttcactgtatttggac

SEQ ID NO: 701919 - DNA, 120 bp, Artificial Sequence
  ENSG00000196233_104 (sequence is synthesized)
agatgcaacagaagcacgtctcccccactgtcaccccatcccacaacaaagtgggaatcccatcatgggtatggctgtgccaggcatggcatcgggtgtgccccatgcagcctacttctt

SEQ ID NO: 701920 - DNA, 120 bp, Artificial Sequence
  ENSG00000196233_105 (sequence is synthesized)
gcatgcacagttggtacatttagctgtatggcatcgggtgtgccccacgcagcctacttcttgcatgcacagttggtacattcagctgtacacttaacagcctgtacaggaaaatgagcc

SEQ ID NO: 701921 - DNA, 120 bp, Artificial Sequence
  ENSG00000196233_106 (sequence is synthesized)
ttagttgtagccccaaggaaatccaaacccatgcttgtgagatatggagaaaccactggttgcctagagaaagcattaaggtgtatttccagttcccctttcatgttggtgaaagacacc

SEQ ID NO: 701922 - DNA, 120 bp, Artificial Sequence
  ENSG00000196233_107 (sequence is synthesized)
tattcacactctaattaatcatgggagataagcatgttaccttctgcaccttgactttgctcgtgagcacctggctttcctcttcctccttctcccctctctccctgtctcagtgtgcat

SEQ ID NO: 701923 - DNA, 120 bp, Artificial Sequence
  ENSG00000196233_108 (sequence is synthesized)
ctgtgcagatgtgggccagtccccctgtaaccagtggttacagaatgataccatctgttctaagatgtggtcagctttacttctcaggagtcctgtcctacaattcagagcacccctaga

SEQ ID NO: 701924 - DNA, 120 bp, Artificial Sequence
  ENSG00000196233_109 (sequence is synthesized)
tgggatggaaccagtgctttatgatcatgttcctcttctctgtgccctgtccttcggcacccccatgttagtcatgatcctcattgtgcagggctggctggactgagaattgcaactcca

SEQ ID NO: 701925 - DNA, 120 bp, Artificial Sequence
  ENSG00000196233_110 (sequence is synthesized)
ggacagcagggagctttgggactaggcacgcaggggttttgtcatccatttgaaccataatttgcatattttcttacggcctccctttgtcttttctaaacaaatgaggcagacacttga

SEQ ID NO: 701926 - DNA, 120 bp, Artificial Sequence
  ENSG00000196233_111 (sequence is synthesized)
acagtaatgctggagaatgttttttctaggagactttgtaagcaaatctgattttaagatgaaatgtgaatgagaaactaggtgccagggaatttagcactgaactagacagtcaaaact

SEQ ID NO: 701927 - DNA, 120 bp, Artificial Sequence
  ENSG00000196233_112 (sequence is synthesized)
tttttaactttgcaggaagaaataaattttgctctcgtctaaatgttcacaagaagtaatgttgtaaatagttttctaaaaatatttattacttgtgctgtatacaaattcatgttctga

SEQ ID NO: 701928 - DNA, 120 bp, Artificial Sequence
  ENSG00000196233_113 (sequence is synthesized)
gtgatgttggtttgcattgtagtattatagaatatattttgagcagtggacttcctttcataacacagttcacacatggagaaagaacaaaaaccagcaggttgagagctgtttggggcc

SEQ ID NO: 701929 - DNA, 120 bp, Artificial Sequence
  ENSG00000196233_114 (sequence is synthesized)
tttgatctgtaatgttacatcaaatctgagctttaactgccccctcttctcatctggttatgttatattatatatatatattatatatatatatatacaggtgtatgataaactggtcag

SEQ ID NO: 701930 - DNA, 120 bp, Artificial Sequence
  ENSG00000196233_115 (sequence is synthesized)
tggtcagtactcagatctgcagagcagatttccagatgttctttctgatgtgttgcccataagcaataagatcctaggtaataacatttattccagggcccacattggcccttgtctcag

SEQ ID NO: 701931 - DNA, 120 bp, Artificial Sequence
  ENSG00000196233_116 (sequence is synthesized)
aggatagggtgggggtagaacagctcttgctaagacctcttgcctttgctggagaggttgctgtacttgaatttttgcttctgtttgtctgcacgctccttcatgtcatagaactctagc

SEQ ID NO: 701932 - DNA, 120 bp, Artificial Sequence
  ENSG00000196233_117 (sequence is synthesized)
aatggatgagaaatctgccagcaccagacacatcaaaattgggcacatagatggaaaattttgcaatttttcatgaatttatagggtttccagaatctagttgaggcaaagctcatttgg

SEQ ID NO: 701933 - DNA, 120 bp, Artificial Sequence
  ENSG00000196233_118 (sequence is synthesized)
ctatagagtaaatgtaagacttgttacaacagaaatttaagtggccagttcaatgtcctttggctatatttgacctacctttaaaacctagcccatttcatatcagcctcttctgtgcct

SEQ ID NO: 701934 - DNA, 120 bp, Artificial Sequence
  ENSG00000196233_119 (sequence is synthesized)
gggcttgaaatgtctaaagctgccttcgtgtctgggattacaccatgtaggtcagtataaagagggcagtcactcctccatttctcccagcgtgtccagttcagcagatttctaaagctg

SEQ ID NO: 701935 - DNA, 120 bp, Artificial Sequence
  ENSG00000196233_120 (sequence is synthesized)
ttaagcagcctctctttttgaccgtcctaaactttgtgaaaataaataccccacacccagataaccattaatagaagtaatgtagttttttaggcttttggaatatgtcttctcttttgt

SEQ ID NO: 701936 - DNA, 120 bp, Artificial Sequence
  ENSG00000196233_121 (sequence is synthesized)
atttatgatggtgtttggaatttttcactagtgtatttttagactgaagtgggtgcattaggataaaactttcccttgctgagcctgaaggcaagcaagagggaagaaattgacctgtat

SEQ ID NO: 701937 - DNA, 120 bp, Artificial Sequence
  ENSG00000196233_122 (sequence is synthesized)
tgtatcattggggaggcgactacttcttgtggtggtagggggtggggggaatggggcattgtagattatgtgggggtacaatagaattctggcctgaggctccccaagtcttattacctt

SEQ ID NO: 701938 - DNA, 120 bp, Artificial Sequence
  ENSG00000196233_123 (sequence is synthesized)
gtatgaaaaatccccatattagcctcacttaatctcaatagaagcctgctgtttaccctcagggaacaagtagttttcaaaattgagctcctccaaggtcattggccaatgctgtgtgca

SEQ ID NO: 701939 - DNA, 120 bp, Artificial Sequence
  ENSG00000196233_124 (sequence is synthesized)
ggcattggtcatctttgtaaactcatggcattatttcctcatatgcattatgatactaagaaattcaaccccaacctgtatgaaaagcacagcccagggccctaattgaggctagcatga

SEQ ID NO: 701940 - DNA, 120 bp, Artificial Sequence
  ENSG00000196233_125 (sequence is synthesized)
atgcctttgaggggccagggggccataggaggcccatgcaatttaactgaagctcaggtgccacgttggatttttattcttattaggccgcaacctttctgaatgagtttagggcagggg

SEQ ID NO: 701941 - DNA, 120 bp, Artificial Sequence
  ENSG00000196233_126 (sequence is synthesized)
ctgctgatccggctgtggattcagggagctctaaaatgaatctctaccgttcctttaaaggtctttctggttcctcccagtgttgtcattgctgaggtcgatctcgtagttgttcagttg

SEQ ID NO: 701942 - DNA, 120 bp, Artificial Sequence
  ENSG00000196233_127 (sequence is synthesized)
tgctctttttgctgtcttgtgagtcttagccagtgatccagctgcccaaggacagggcctccagagggcctagcgccctcctggtaccaagcgtgtgctcctggcctgtgtgacagtgtc

SEQ ID NO: 701943 - DNA, 120 bp, Artificial Sequence
  ENSG00000196233_128 (sequence is synthesized)
tttcccgaagcagtgaaatgagaaattctgcaagtggccacccggaagatcagtctgtagctcttgggcctggatttctactatgttagtgagtgtaggaatatactgtgtctttaatgg

SEQ ID NO: 701944 - DNA, 120 bp, Artificial Sequence
  ENSG00000196233_129 (sequence is synthesized)
atgaaaattcaatgtatgctgtgaatttgttggtttgaaacattgaaatttttcattagacaatgtttacatacctcacctgaagaacctttgagagtgtatatataaaattttaaaata

SEQ ID NO: 701945 - DNA, 120 bp, Artificial Sequence
  ENSG00000196233_130 (sequence is synthesized)
tattaagttgctttaaaacaatatgtatagctataaaagttggagttattttaactttgaatatgtaccaagtctcttaaatattgaaatcttgtagacttcttgtgcttctgtgttttg

SEQ ID NO: 701946 - DNA, 120 bp, Artificial Sequence
  ENSG00000196233_131 (sequence is synthesized)
ctttcctatcaggccatgtaggaaactgtgttcttgttattggtagaggggccctcactgaaatccaagcttggaaggatgtcctgtgttgtttcagattctcttgtttggttttgaagg

SEQ ID NO: 701947 - DNA, 120 bp, Artificial Sequence
  ENSG00000196233_132 (sequence is synthesized)
atgcggtgtggagccagaggatgtgtgggaggggtttctctaacactgacttctattccatgagctttttcaaggcgcttattttatggcagcgtattaaacttctttgatattcaagtg

SEQ ID NO: 701948 - DNA, 120 bp, Artificial Sequence
  ENSG00000196233_133 (sequence is synthesized)
gtatggtttcatacttagttatgaaagagtttgatagtaatcctgggttttgcaatttaagttatttccatcctgttgattagcctattaagaaacctatatcctaccatgcatttattg

SEQ ID NO: 701949 - DNA, 80 bp, Artificial Sequence
  ENSG00000196233_134 (sequence is synthesized)
ttgagacggagtctctctgtgatgcccaggctggagtgaaatggcacgatctctgctcactgcagccgccgcctcctggg

SEQ ID NO: 701950 - DNA, 120 bp, Artificial Sequence
  ENSG00000196233_135 (sequence is synthesized)
ccgcccagacggacttcggagtggtgatggggtacctccaagaagcttacaggatggaaccagggaaggttttggacactccacatcactcaaagttccactggctcgatccctgcagat

SEQ ID NO: 701951 - DNA, 120 bp, Artificial Sequence
  ENSG00000196233_136 (sequence is synthesized)
tagtgaagaactactgagcagaaaccaattgtccacagctgccagccttgggccatctggattacagaatcatggacaacacttaatattatccagggaagcctcttgggcaaaaccaca

SEQ ID NO: 701952 - DNA, 120 bp, Artificial Sequence
  ENSG00000196233_137 (sequence is synthesized)
acatcagtgaccttccttttcttgcagaaaactctgcctttccaaaaatggcacttcaagcaaaacaagatggaaaaaaggatgtgagccattcatctcctgtagatttaaagataccac

SEQ ID NO: 701953 - DNA, 120 bp, Artificial Sequence
  ENSG00000196233_138 (sequence is synthesized)
aagttcgaggaatggatctttcttgggagtctcgcactggtgatcagtacagctatagctctttggtaatgggttcacaaacggagagcgcgcttagtaaaaaattaagggctattcttc

SEQ ID NO: 701954 - DNA, 120 bp, Artificial Sequence
  ENSG00000196233_139 (sequence is synthesized)
caaaacaaagtagaaaaagcatgttagatgctggacccgattcttggggctcagatgctgagcagtctacctctggacagccatatcccacatcggatcaagaaggagaccctggctcca

SEQ ID NO: 701955 - DNA, 120 bp, Artificial Sequence
  ENSG00000196233_140 (sequence is synthesized)
agcagcctcggaagaaaagagggcgttacagacagtacaacagtgagatactggaggaagcaatctcagtggttatgagtggaaaaatgagtgtttccaaagctcagagtatttatggga

SEQ ID NO: 701956 - DNA, 120 bp, Artificial Sequence
  ENSG00000196233_141 (sequence is synthesized)
ttccccacagtacactggagtacaaagtaaaggagaggctgggcactttgaaaaaccctccaaagaaaaagatgaaattaatgagtggatgacaatcgagcagcagaagaatggtgtgcc

SEQ ID NO: 701957 - DNA, 120 bp, Artificial Sequence
  ENSG00000196233_142 (sequence is synthesized)
taccctttaatgctgcagtttaagagaacttgtattgtgtcatttcagattgtaggctgagagttgtaaatagtgaaaatttgagtacttctattatttgttttggttagaaagtgaatt

SEQ ID NO: 701958 - DNA, 120 bp, Artificial Sequence
  ENSG00000196233_143 (sequence is synthesized)
taaaaaacaaaccaaactctaaactttctcagattaaaagtcctgagacctgaagattgtaatattcatgtctgtgaagcttttaaacattacacttgagatcagtcatgacttgatatt

SEQ ID NO: 701959 - DNA, 120 bp, Artificial Sequence
  ENSG00000196233_144 (sequence is synthesized)
caggtaaattttcttttccaagaagcttttgaataagcatatttcctccaaaggtctctctctttctctctctttttttgagtgtagattattttaaagcactaattgcattacattggt

SEQ ID NO: 701960 - DNA, 120 bp, Artificial Sequence
  ENSG00000196233_145 (sequence is synthesized)
acattggtaactgcaatataaaatagccattattgttttgtgaagcatggttgaaattagctagtggtcccttttgaatttcatgagcctctcaaaaaagaaaaacttaaaaaaaaaaaa

SEQ ID NO: 701961 - DNA, 120 bp, Artificial Sequence
  ENSG00000196233_146 (sequence is synthesized)
ggcggagggagctggagctgtcacagtccccgggtgcgcctgaccgagccaagtggggtgtcatggccgcggggggcagcggctgcacttcctcagcgggcggcggtggccggggagtta

SEQ ID NO: 701962 - DNA, 120 bp, Artificial Sequence
  ENSG00000196233_147 (sequence is synthesized)
ccccagggagaggcagcacaaagtgcaaatgaatcaaaaaacgagtaggaatactgtagagtgccaattactgtacaaactgggtgagcactactgcatcattgttcagctatcattgct

SEQ ID NO: 701963 - DNA, 120 bp, Artificial Sequence
  ENSG00000196233_148 (sequence is synthesized)
tgcacgtaatttcatttactgtgacacttgcttctttgcagattttgcattgacttgtgtgtacagagatgaaatgtgcattctgaatgttgcatattttaaatttttcatgtgcagtat

SEQ ID NO: 701964 - DNA, 120 bp, Artificial Sequence
  ENSG00000196233_149 (sequence is synthesized)
ggctcggaatatgtttggccttttgcatgtttctctacaaaagagaattgagttacctcacagagaacagatacatggaagtggactccttgcctgtagagcctgcatgcttttttgttt

SEQ ID NO: 701965 - DNA, 120 bp, Artificial Sequence
  ENSG00000196233_150 (sequence is synthesized)
ttttttgttgttgttgttttttcttaagttatatttgtttttactttttaaaaaagaagaggaaacaaagcccccttttagaaactacgtctgtcatactgggagctttatcactgcaaa

SEQ ID NO: 701966 - DNA, 120 bp, Artificial Sequence
  ENSG00000196233_151 (sequence is synthesized)
ttggaaagccatcttatacaaaattattcacatttttcatctacgattcaactaatcgaaggattaaactaaagaaaaaactaagaagaacaatgaacctttgactttgagaaatttggt

SEQ ID NO: 701967 - DNA, 120 bp, Artificial Sequence
  ENSG00000196233_152 (sequence is synthesized)
tctcactattaaatttatttaaattagcaagctattagtgctcacccagaggggaaggtggtggaaaatgtgcacacactaccttcagaaatgcttcagttaattactttgaacactacc

SEQ ID NO: 701968 - DNA, 120 bp, Artificial Sequence
  ENSG00000196233_153 (sequence is synthesized)
tttgctgtaatttcatttgagattttctaagggtagaatttggtctcaccaacaagtgaggatatagccttatctcatggaggacgagctccgtatttactcaggagcagtcagggtaca

SEQ ID NO: 701969 - DNA, 120 bp, Artificial Sequence
  ENSG00000196233_154 (sequence is synthesized)
ttacataaaacaatggaggatgcctcattttagcaaactaggtttctttgtattcttcagtccttttacagaattgatgtgctaactgaatatcattgcagcaactagactaagatattc

SEQ ID NO: 701970 - DNA, 120 bp, Artificial Sequence
  ENSG00000196233_155 (sequence is synthesized)
aagatctctttattggggatgggagaaatagggaaagaaatgtgtataagtaattatgatattgcaaaagtgatacttagattttacagcctcagtagtctgcccagtgtccacattaat

SEQ ID NO: 701971 - DNA, 120 bp, Artificial Sequence
  ENSG00000196233_156 (sequence is synthesized)
gaaggatccatgtttgtagtgagagaaaaaaaccccaaggtaacccgatatgatttaggatgcatatcagttctaacaattcaatcagaagtcaagctcattggaattccttttttaact

SEQ ID NO: 701972 - DNA, 120 bp, Artificial Sequence
  ENSG00000196233_157 (sequence is synthesized)
gatccaaatactagtagaagggggagggagaggtgttgggttttttttttaagtttttatttaattttgttggttagaatttttttctgtttttggcatcctacataataccccccttct

SEQ ID NO: 701973 - DNA, 120 bp, Artificial Sequence
  ENSG00000196233_158 (sequence is synthesized)
tgactttttctgataattagctgatattcatggttgtttagcacacagttcaggacctttgagatcatgtttgtataagcactccttgaagaatatctaagctttttctgagatgggctt

SEQ ID NO: 701974 - DNA, 120 bp, Artificial Sequence
  ENSG00000196233_159 (sequence is synthesized)
ttaaaattataataagggaagtttattttctgcggtttttgcaagaataagcaaagcccatggaatttaatttttcattgtgatcagattaaaattactatttgtgcaaaacaaattcca

SEQ ID NO: 701975 - DNA, 120 bp, Artificial Sequence
  ENSG00000196233_160 (sequence is synthesized)
caccacatgtactgtatattctaatctgctgagaaaggtggtcaggcccttctaaatgcttaaccaaaaacaaacattattggagtttcagtgtaaaataaaattaaaattggagggttg

SEQ ID NO: 701976 - DNA, 120 bp, Artificial Sequence
  ENSG00000196233_161 (sequence is synthesized)
gttagattgatttcagatggatactaacagtttgaggggaggtccagatatttccaaggcataaattcttgcctggaaactttggagcaattaattaaattaggttaagttttccctcag

SEQ ID NO: 701977 - DNA, 120 bp, Artificial Sequence
  ENSG00000196233_162 (sequence is synthesized)
caacctgtgtgttcaaaggttaggcacaccattgctgttactaaaatacatgcactgctcattcttgacatagcttgggtgtgggttcctcttgttttggttattttgtgtagcagttta

SEQ ID NO: 701978 - DNA, 120 bp, Artificial Sequence
  ENSG00000196233_163 (sequence is synthesized)
atcagtggataactgagcctgtttcctcttagctttctagacttcttaacagaaaaaacagtttgggttcaatagcattttatgattctacaatattttgtcacctagctggaagttgca

SEQ ID NO: 701979 - DNA, 120 bp, Artificial Sequence
  ENSG00000196233_164 (sequence is synthesized)
ataaaaattccttatgaaatatatggttttcatctgtaattgaaggaaatcatagaaagtttgctgaaagcaaagggctaagcttatgaaggaatgcctcctttgttacacactcaagaa

SEQ ID NO: 701980 - DNA, 120 bp, Artificial Sequence
  ENSG00000196233_165 (sequence is synthesized)
tttgtcagcacacaattaattgcagccatagtacctttttgcgtaatgtttgggatattcagtagcccaggattgctacaaaaaggtcctttgagaaaattaatttgtgcttgcttttat

SEQ ID NO: 701981 - DNA, 120 bp, Artificial Sequence
  ENSG00000196233_166 (sequence is synthesized)
cccctctcagaaagacatcactaaaggcccattaaaaatctggccctaaaagttcaacttttgtagagtttattgttcagagaggtttaatcctatgtggtagtctatataagtgatgta

SEQ ID NO: 701982 - DNA, 120 bp, Artificial Sequence
  ENSG00000196233_167 (sequence is synthesized)
tgagttgagttatgtaaattttgtcattgtagtgtacatggagtgatcattttactaacataaatattttctatgtgtgtttcagtggatgacaatcgagcagcagaagaatggtgtgcc

SEQ ID NO: 701983 - DNA, 120 bp, Artificial Sequence
  ENSG00000196233_168 (sequence is synthesized)
gttaaattttgtgttcagagttccattataccatgtatttctcggaggtggctcatcacacggctggtggcagtcttggtgccgcagtgattccttaatatttgatttctctcttgattt

SEQ ID NO: 701984 - DNA, 120 bp, Artificial Sequence
  ENSG00000196233_169 (sequence is synthesized)
gccactattctgtattggcactttcagtgtagatattctagtttggggatgtcctcacaatgtgtaatagagattggtctattagcatgcttaatttctgctaatcagagttttgcatgg

SEQ ID NO: 701985 - DNA, 120 bp, Artificial Sequence
  ENSG00000196233_170 (sequence is synthesized)
ttatggtatgggaaagtgtagttcacaactgtctttgtcacgaaagccgtttttcctcacattttccagtaggcagataacattacttaaattattaatatataacactcttggaactat

SEQ ID NO: 701986 - DNA, 120 bp, Artificial Sequence
  ENSG00000196233_171 (sequence is synthesized)
tgataggaaataatgtatttaaaataattttttgcattttcagagaccttgatgttatagggtagataagctatggcactataaaatcaaaaacactaattctgtggaaggatatctagt

SEQ ID NO: 701987 - DNA, 120 bp, Artificial Sequence
  ENSG00000196233_172 (sequence is synthesized)
tggtatttttatctttagctttctcatttctgagacagcatagtcatccagcttgatggtaatgtagtatattactttgttcagtgggcttataagtgactctgaattatgtttgtgatg

SEQ ID NO: 701988 - DNA, 120 bp, Artificial Sequence
  ENSG00000196233_173 (sequence is synthesized)
agctatacactttttttctgttccccaaataccatgaaggacaaggtcactctttcaggaaaaataatttatatttgtgtataatactttttaatattaagtttgttgttctgaagttta

SEQ ID NO: 701989 - DNA, 120 bp, Artificial Sequence
  ENSG00000196233_174 (sequence is synthesized)
gatgttgcttgataaacctttgctgcagcagatcatgaatatgagtaaggctttgtgtgataataggggtccttatgtgaagttaattactgttcagttctggtgagcaagctcaacaag

SEQ ID NO: 701990 - DNA, 120 bp, Artificial Sequence
  ENSG00000196233_175 (sequence is synthesized)
tgtgaagtgtgtattagctttatttggtacacttttactttacaatatcgaagtgcttttagaactctggttatcttatataaaccattacctcaaccaattggcatttcttttccccaa

SEQ ID NO: 701991 - DNA, 120 bp, Artificial Sequence
  ENSG00000196233_176 (sequence is synthesized)
catttaccttagctataatatgagctatgtgggatcagatggtaaaactataaaaggcacaatgagaagtttagttcccaagttttggagagaactctaaattagactaaaaacaactac

SEQ ID NO: 701992 - DNA, 120 bp, Artificial Sequence
  ENSG00000196233_177 (sequence is synthesized)
ctgttaacaccaatatcataactaccttctgtcgttaggcagtacatagcaacctttgagctgctagtgagctatctgttctccccctacccccaagtaagcacacagtgccaggcctgg

SEQ ID NO: 701993 - DNA, 120 bp, Artificial Sequence
  ENSG00000196233_178 (sequence is synthesized)
ttctaagcctttgtgattctcttacatctcattgacccataatagtgaagcatggattcatttattttcataagacaaattgagtcagctcgatgtcagaagttgaaaatattttgagta

SEQ ID NO: 701994 - DNA, 120 bp, Artificial Sequence
  ENSG00000196233_179 (sequence is synthesized)
gtttaacagttatatgagagattggcatcattttctttaacagcttttatctttgtagatttccttttgagacatgtatttttgcttttataatcctttcattaaatgccagaggttgtt

SEQ ID NO: 701995 - DNA, 120 bp, Artificial Sequence
  ENSG00000196233_180 (sequence is synthesized)
ttcatattaatcactcttttctgtatattcaggttgctgtcattggtgatagaatatggcaatagacagaattgtgctccactttatgttttttaggagatattgaaagttataggttaa

SEQ ID NO: 701996 - DNA, 120 bp, Artificial Sequence
  ENSG00000196233_181 (sequence is synthesized)
attttggccttcttgaagatatcaaagattgttttccttgttacctttaattagaatttggtcttcattaatgctttggtcaggctagcattactaaaaacttgatggcttcagcagaac

SEQ ID NO: 701997 - DNA, 120 bp, Artificial Sequence
  ENSG00000196233_182 (sequence is synthesized)
agcccgtttaggagactattaagctatctagggattttttttcaaattaattgctttcaaaatctgaaaaggaaaaaagtataattgtggtacaaagaagacagatctccaggctctttc

SEQ ID NO: 701998 - DNA, 120 bp, Artificial Sequence
  ENSG00000196233_183 (sequence is synthesized)
ttctcagtttattttggtttaattctgtactggagacttgaataggatttgtgaacatggtgatggaaagaaaaatagaggacattatttgtgtaccctcattcctgaataatcttgcag

SEQ ID NO: 701999 - DNA, 120 bp, Artificial Sequence
  ENSG00000196233_184 (sequence is synthesized)
tcaccttttaaagaagcagacattagccctgtaacacaacactgtagctataaactctaagtgttaggaaggagattggggtggggagggtggagtaggatggaaaaagcatgtagactt

SEQ ID NO: 702000 - DNA, 120 bp, Artificial Sequence
  ENSG00000196233_185 (sequence is synthesized)
ctgagaagaggctaaaaattctgccctataatactaaaaatgagtcacaagataatgtggtgaagttaggccatcttgatttgatagaaaaatcttttacattgtttaaaaatgagaatc

SEQ ID NO: 702001 - DNA, 120 bp, Artificial Sequence
  ENSG00000196233_186 (sequence is synthesized)
gaggctaattaatgttgatttgacaatagaacatgagctaattctgcaaccgtttggggggtaattttatggtttccagttcatttagagctgtatcaagaaaagctaaaaagcaagcac

SEQ ID NO: 702002 - DNA, 120 bp, Artificial Sequence
  ENSG00000196233_187 (sequence is synthesized)
ttttagttaatcatagatttattggatatagcaaatattattataatatttaatctctattatttgaatgtggaaatgaactcttttaccccatcttgaactgtcattgaacatgctcaa

SEQ ID NO: 702003 - DNA, 120 bp, Artificial Sequence
  ENSG00000196233_188 (sequence is synthesized)
gatgatcaacactggaaatgaccctacacacataccaaaaaaatctaaagcagtaagacatatttgaagatccatacctcttaaactttttagatttgtcttgggaaagaatttatgaac

SEQ ID NO: 702004 - DNA, 120 bp, Artificial Sequence
  ENSG00000196233_189 (sequence is synthesized)
ctgtaaccagtattagtgcagtcttgggttccttgttctgcataattgcaccctttctcaggtatgtcctgacaacataaattttaaaataatctcattagagattagattctcagtgga

SEQ ID NO: 702005 - DNA, 120 bp, Artificial Sequence
  ENSG00000196233_190 (sequence is synthesized)
tagtgtgtaaggggactaggggtggggggttgggggtagttggacacaggacactgacacagtagagcagggatttttaacagtcaatagccaaatagaatttcaatctagaatattttt

SEQ ID NO: 702006 - DNA, 120 bp, Artificial Sequence
  ENSG00000196233_191 (sequence is synthesized)
accccctcagaatgagtgaaacaacttctattatttggtgtacccggtgctacactcctaaaagtcttttttttttttcatccaggtgacgttttttatttttcctgcttggtggtggaa

SEQ ID NO: 702007 - DNA, 120 bp, Artificial Sequence
  ENSG00000196233_192 (sequence is synthesized)
ggttatatagtaaacttcactgtcattaagaaagcgcttgtccaaaatgtttaaagtactagaaaagggataattcagcactttttctgttacaacactaaagtcttaatttatcttcag

SEQ ID NO: 702008 - DNA, 120 bp, Artificial Sequence
  ENSG00000196233_193 (sequence is synthesized)
tcagagtcttaggtactgtaagtttttggatgattatttaaaaatataaaacatactacataatatggggtcagatcacatttatataaataattcttattttaaaaaagacaataacat

SEQ ID NO: 702009 - DNA, 120 bp, Artificial Sequence
  ENSG00000196233_194 (sequence is synthesized)
tacctttctagcaattccaagtgattgcctcattttctcttgttaagcatttcaagcttaagaatttggaatttgagagaaggtgagggggaaaattccctaaaataaaaatttgtttca

SEQ ID NO: 702010 - DNA, 120 bp, Artificial Sequence
  ENSG00000196233_195 (sequence is synthesized)
aaccattttagaaaaataaatcactaggaaaataggtagggattctctccccctttaagtcttcagggaatgagcagtatttagaatctttggctgaaattcaagcctttttactttgta

SEQ ID NO: 702011 - DNA, 120 bp, Artificial Sequence
  ENSG00000196233_196 (sequence is synthesized)
aatttttaatattaattcactgacatgctttttacaccagaggactgaaaatggatcttaatgtttttaagttgtggaagggtatatttctaaaatgaggggggatgattaactaggtta

SEQ ID NO: 702012 - DNA, 120 bp, Artificial Sequence
  ENSG00000196233_197 (sequence is synthesized)
gtattaccagcattagtaagtttaaggaattttagtatgtaatagcaaagtgtttgattaaaagtctaatcctatattactagtcaaaattagttacattctgatctaggaaagataata

SEQ ID NO: 702013 - DNA, 120 bp, Artificial Sequence
  ENSG00000196233_198 (sequence is synthesized)
gtcattggatattgatatgctgtgctgtcagaaaaccagactaagatagaaacctttatctgactcccacatgttgcttgttgtgatgggatgtatactttacagcagcttattgctgct

SEQ ID NO: 702014 - DNA, 120 bp, Artificial Sequence
  ENSG00000196233_199 (sequence is synthesized)
ttgaaaaaaaatgtataaactatacatttggagtgtttgcatataattctttataacctccacttaaagctgtcagacattggtattttatcagtccacattgttgaataaaactaatgt

SEQ ID NO: 702015 - DNA, 120 bp, Artificial Sequence
  ENSG00000196233_200 (sequence is synthesized)
tcttaggaatccagcttgtacacactgtttaaaaaccctcagggacagtttacacactcttctcactcaattcaggtactttgatgctattcttaaacctaacagtgacttgtatttttc

SEQ ID NO: 702016 - DNA, 120 bp, Artificial Sequence
  ENSG00000196233_201 (sequence is synthesized)
tgttttgcttttatttcaacgtgctggtagcacatctgatgaatgtcaacttaaaaaactcagttcaggtatccaggtataactcagccaaacagattttaaagctgcatataactctcc

SEQ ID NO: 702017 - DNA, 120 bp, Artificial Sequence
  ENSG00000196233_202 (sequence is synthesized)
agcacatggtgcctcacactcttatagtggcattctatatattcagttattactactgagcagataatatgggggttcctgttaacagtgtattttttaaaaaaagcgcataaatgtata

SEQ ID NO: 702018 - DNA, 120 bp, Artificial Sequence
  ENSG00000196233_203 (sequence is synthesized)
gccagcacactacacacacacacacaaacatgcacagttaaactatatatttttaaatgccactaatagccagcacaactaaaacaaaagacattcctaactgctctgtaagctgttaac

SEQ ID NO: 702019 - DNA, 120 bp, Artificial Sequence
  ENSG00000196233_204 (sequence is synthesized)
agatgcagttccttcttgatgtggctcttgcttcttcacgataactactactaaattcaagcactggtccttgggtgtctgacctctacattctagtttatgcaatgtctttagagaatt

SEQ ID NO: 702020 - DNA, 120 bp, Artificial Sequence
  ENSG00000196233_205 (sequence is synthesized)
ttgtgcactggccactgtgatggaaccattgggccaggagtgctttgagtttatcagtagtgattctgccaaagttggtgttgtaacatgagtatgtaaaatgtcaaaaaaattagcaga

SEQ ID NO: 702021 - DNA, 120 bp, Artificial Sequence
  ENSG00000196233_206 (sequence is synthesized)
ggtctaggtctgcatatcagcagacagttttgtccgtgtattttgtagccttgaagttctcagtgacaagttttttctgatgcgaagttctaattccagtgttttagtcctttgcatctt

SEQ ID NO: 702022 - DNA, 120 bp, Artificial Sequence
  ENSG00000196233_207 (sequence is synthesized)
taatgttaagacttgcctctttaaaattgcttttgttttctgcagtactatctgtggttaacaaaatagattatttctctgctttaatatttgatatcttacatctaaaataaattctct

SEQ ID NO: 702023 - DNA, 120 bp, Artificial Sequence
  ENSG00000196233_208 (sequence is synthesized)
ccacatataaaacccatagcctttggagatatggaaaatggtatctttcagatttctagaagttcaagtgtcatacaacaaaacaggaaccccctttactcttatggacctcatttcaat

SEQ ID NO: 702024 - DNA, 120 bp, Artificial Sequence
  ENSG00000196233_209 (sequence is synthesized)
atactgtttacagtttgatggaattgtataatttaatatttctcttgtactgtagtttatatttatttacagatttttttgtactgtgtgatttgaactttttgttccttgctatgatca

SEQ ID NO: 702025 - DNA, 120 bp, Artificial Sequence
  ENSG00000196233_210 (sequence is synthesized)
atgtttatgtagtagagcacttatgatcacaaattaagttttttggtttgattgcactacattaaattttttaatgcagttctgatttttgactggactaaaactgtgtcttaatgtatg

SEQ ID NO: 702026 - DNA, 120 bp, Artificial Sequence
  ENSG00000196233_211 (sequence is synthesized)
tgatgagtacttaaaattttaatccatgtggtccccccccttttttttttttttgcattgtatgtcaaaagcgcttgttctttcgtgcatgtgtaagatttaatggttccattgtattat

SEQ ID NO: 702027 - DNA, 120 bp, Artificial Sequence
  ENSG00000196233_212 (sequence is synthesized)
ttgaccatgacattttggagaaacattcccagctgtaatgttgtgtatggtagttctcactggatgctagagttttcaaaaccactattcttctaataaattttgttgtgaaaaactgtt

SEQ ID NO: 702028 - DNA, 120 bp, Artificial Sequence
  ENSG00000196235_0 (sequence is synthesized)
agtcaggcgtcgtgcgaacagcagctggtaccgaaggcggaggtggagcccgagagggaaccagcggggaaactgaggctcggggtggagcgcaggattgtgggacgcgccaaggctgct

SEQ ID NO: 702029 - DNA, 120 bp, Artificial Sequence
  ENSG00000196235_1 (sequence is synthesized)
gtctttcccagcagcagcggaagatgtcggacagcgaggacagcaacttttccgaggaggaggacagcgagcgcagcagtgacggcgaggaggccgaggtagacgaagagcggcggagtg

SEQ ID NO: 702030 - DNA, 120 bp, Artificial Sequence
  ENSG00000196235_2 (sequence is synthesized)
cagcgggcagtgagaaagaagaagagcctgaggacgaagaggaggaggaagaggaggaggaatacgatgaggaagaggaggaagaagatgatgaccgaccccccaagaaaccccgccatg

SEQ ID NO: 702031 - DNA, 120 bp, Artificial Sequence
  ENSG00000196235_3 (sequence is synthesized)
gaggcttcattctggacgaggctgatgttgacgatgagtatgaggacgaggaccagtgggaggatggagcagaggacattctagagaaagaagagattgaagcctccaatatcgataatg

SEQ ID NO: 702032 - DNA, 120 bp, Artificial Sequence
  ENSG00000196235_4 (sequence is synthesized)
ttgtcctggatgaagatcgttctggggctcgccgcctgcaaaacctctggagggaccagcgagaagaagaactgggcgagtattacatgaagaaatacgccaagtcatctgtgggagaga

SEQ ID NO: 702033 - DNA, 120 bp, Artificial Sequence
  ENSG00000196235_5 (sequence is synthesized)
cggtgtatggaggatctgatgagctctcagacgacatcacccagcagcagctgctcccaggagtcaaggatcccaatctgtggactgtcaaatgtaagattggggaggaacgggccacgg

SEQ ID NO: 702034 - DNA, 120 bp, Artificial Sequence
  ENSG00000196235_6 (sequence is synthesized)
ccatttccttgatgcgcaagttcattgcctaccagttcacagacacgcccctgcagatcaagtcagtagtggcaccagagcatgtgaagggctacatctacgtggaggcctacaagcaga

SEQ ID NO: 702035 - DNA, 120 bp, Artificial Sequence
  ENSG00000196235_7 (sequence is synthesized)
cccacgtgaagcaggccattgagggggtgggcaacctgcggcttggctactggaaccagcagatggtgcccatcaaggagatgacagacgtgctcaaagtggtgaaggaggtggccaacc

SEQ ID NO: 702036 - DNA, 120 bp, Artificial Sequence
  ENSG00000196235_8 (sequence is synthesized)
tgaaaccaaagtcctgggtccgcctcaagcggggcatctacaaggatgacattgctcaggtggactacgtggagcccagccagaacaccatctccctgaagatgatcccacgcatcgact

SEQ ID NO: 702037 - DNA, 120 bp, Artificial Sequence
  ENSG00000196235_9 (sequence is synthesized)
acgatcgcatcaaggcccgcatgagcttgaaagactggtttgccaaaaggaagaagtttaagcggcctccacagaggctgtttgatgctgagaagatcaggtccctggggggtgatgttg

SEQ ID NO: 702038 - DNA, 120 bp, Artificial Sequence
  ENSG00000196235_10 (sequence is synthesized)
cctctgatggtgacttcctcatctttgaggggaaccgttacagccggaagggctttctgttcaagagcttcgccatgtctgctgtgatcacggagggtgtgaagccaacactctctgagc

SEQ ID NO: 702039 - DNA, 120 bp, Artificial Sequence
  ENSG00000196235_11 (sequence is synthesized)
tggaaaagtttgaggaccagccagagggcattgacctggaggtggtgactgagagcacagggaaggagcgggagcacaacttccaacctggggacaacgtggaggtctgtgagggtgagc

SEQ ID NO: 702040 - DNA, 120 bp, Artificial Sequence
  ENSG00000196235_12 (sequence is synthesized)
tcatcaacctgcagggcaagatcctcagcgtggatggcaacaagatcaccatcatgcccaagcatgaggacctcaaggacatgttggagttcccagcccaggaacttagaaaatacttca

SEQ ID NO: 702041 - DNA, 120 bp, Artificial Sequence
  ENSG00000196235_13 (sequence is synthesized)
agatgggggaccacgtgaaggtgattgctggccgattcgagggcgacacaggcctcattgtgcgggtggaggagaatttcgttatcctgttctctgacctcaccatgcatgagctgaagg

SEQ ID NO: 702042 - DNA, 120 bp, Artificial Sequence
  ENSG00000196235_14 (sequence is synthesized)
tgctcccccgggacctgcagctctgctcagagacagcatcaggtgtggatgttgggggccagcatgaatggggcgagctggtgcagctggatccccagactgtgggtgtcatcgtgcgac

SEQ ID NO: 702043 - DNA, 120 bp, Artificial Sequence
  ENSG00000196235_15 (sequence is synthesized)
aggacaaccgctttgctgtggccttggactcagagcagaacaacatccatgtgaaagacatcgttaaggtcattgatggcccccactcaggccgagaaggggagattcgccatctcttcc

SEQ ID NO: 702044 - DNA, 120 bp, Artificial Sequence
  ENSG00000196235_16 (sequence is synthesized)
gaagcttcgccttcctacattgcaagaaactggtggagaacgggggcatgtttgtctgcaagacccgccacctggtgctggctgggggctcaaagccccgtgatgtgaccaacttcaccg

SEQ ID NO: 702045 - DNA, 120 bp, Artificial Sequence
  ENSG00000196235_17 (sequence is synthesized)
tgggtggctttgcgcctatgagtccccggatcagcagccccatgcaccccagtgctggaggtcagcgtggcggctttggtagcccaggtggcggcagtggtggcatgagcaggggccggg

SEQ ID NO: 702046 - DNA, 120 bp, Artificial Sequence
  ENSG00000196235_18 (sequence is synthesized)
gccggagggacaacgaactcatcggccagaccgtgcgcatctcccaggggccctacaaaggctacatcggtgtggtgaaagatgccacagagtccacggcccgtgtggagctgcactcca

SEQ ID NO: 702047 - DNA, 120 bp, Artificial Sequence
  ENSG00000196235_19 (sequence is synthesized)
cctgccagaccatctctgtggaccgtcagcggctcaccacggtgggctcacggcgcccgggcggcatgacctcgacctatgggaggacgcccatgtatggctcccagacgcccatgtatg

SEQ ID NO: 702048 - DNA, 120 bp, Artificial Sequence
  ENSG00000196235_20 (sequence is synthesized)
gctctggctcccgaacacccatgtacggctcacagacacccctccaggatggtagccgcaccccacactacggctcacagacgcccctgcatgatggcagccgcactcctgcccagagtg

SEQ ID NO: 702049 - DNA, 120 bp, Artificial Sequence
  ENSG00000196235_21 (sequence is synthesized)
gggcctgggaccccaacaaccccaacacgccgtcacgggctgaggaagaatatgagtatgctttcgatgatgagcccaccccgtccccgcaggcctatgggggaacccccaatccccaaa

SEQ ID NO: 702050 - DNA, 120 bp, Artificial Sequence
  ENSG00000196235_22 (sequence is synthesized)
cacctggctacccagacccctcgtccccacaggtcaacccacaatacaacccgcagacgccagggacgccggccatgtacaacacagaccagttctctccctatgctgccccctccccac

SEQ ID NO: 702051 - DNA, 120 bp, Artificial Sequence
  ENSG00000196235_23 (sequence is synthesized)
aaggttcctaccagcccagccccagcccccagagctaccaccaggtggcgccaagcccagcaggctaccagaatacccactccccagccagctaccaccctacaccgtcgcccatggcct

SEQ ID NO: 702052 - DNA, 120 bp, Artificial Sequence
  ENSG00000196235_24 (sequence is synthesized)
atcaggctagccccagcccgagccccgttggctacagtcctatgacacctggagctccctcccctggtggctacaacccacacacgccaggctcaggcatcgagcagaactccagcgact

SEQ ID NO: 702053 - DNA, 120 bp, Artificial Sequence
  ENSG00000196235_25 (sequence is synthesized)
gggtaaccactgacattcaggtgaaggtgcgggacacctacctggatacacaggtggtgggacagacaggtgtcatccgcagtgtcacggggggcatgtgctctgtgtacctgaaggaca

SEQ ID NO: 702054 - DNA, 120 bp, Artificial Sequence
  ENSG00000196235_26 (sequence is synthesized)
gtgagaaggttgtcagcatttccagtgagcacctggagcctatcacccccaccaagaacaacaaggtgaaagtgatcctgggcgaggatcgggaagccacgggcgtcctactgagcattg

SEQ ID NO: 702055 - DNA, 120 bp, Artificial Sequence
  ENSG00000196235_27 (sequence is synthesized)
atggtgaggatggcattgtccgtatggaccttgatgagcagctcaagatcctcaacctccgcttcctggggaagctcctggaagcctgaagcaggcagggccggtggacttcgtcggatg

SEQ ID NO: 702056 - DNA, 120 bp, Artificial Sequence
  ENSG00000196235_28 (sequence is synthesized)
aagagtgatcctccttccttccctggcccttggctgtgacacaagatcctcctgcagggctaggcggattgttctggatttccttttgtttttccttttagttttccatcttttccctcc

SEQ ID NO: 702057 - DNA, 120 bp, Artificial Sequence
  ENSG00000196235_29 (sequence is synthesized)
ctggtgctcattggaatctgagtagagtctgggggagggtccccaccttcctgtacctcctccccacagcttgcttttgttgtaccgtctttcaataaaaagaagctgtttggtctaaaa

SEQ ID NO: 702058 - DNA, 120 bp, Artificial Sequence
  ENSG00000196235_30 (sequence is synthesized)
agagaacagattcggaaactggggaggtctagcatgtggcgtaggagggggtcctcactccgcttcgcgattgccaaaacgagcctgccggaagcgccctaaggggttttcttctcccag

SEQ ID NO: 702059 - DNA, 120 bp, Artificial Sequence
  ENSG00000196235_31 (sequence is synthesized)
aagccttttcttccctctaggccagaggaccccacctggagccctagtagccaaggggaagagttaagaaggaggaaagtaagatgtcggccccgcactccgcccaggccagccctgcct

SEQ ID NO: 702060 - DNA, 120 bp, Artificial Sequence
  ENSG00000196235_32 (sequence is synthesized)
tcagggtcggtgggcagcaggcctgcctggtggtgtctgtctctggagagtgacttggtctatcttttgtttctgaaaagcaagatatctgggtagtactgggttgagagtgtgattaac

SEQ ID NO: 702061 - DNA, 120 bp, Artificial Sequence
  ENSG00000196235_33 (sequence is synthesized)
caaggagtaatctgaggcttgactttgtttgcttagagcggggtgtgtgtttgtctgtgtctggtgtatgtctgaggggttgtgcaggcccagtgtgatgtgtggggtgaggctgtctcc

SEQ ID NO: 702062 - DNA, 120 bp, Artificial Sequence
  ENSG00000196235_34 (sequence is synthesized)
gggtggggctgaggagctgtccagtcgggggtcctgtgtctgaggggcaggctctctgtgtgggtataggtaggcatcgtgtgtcttgagggcgggctggggtaaaggttgtccaggttg

SEQ ID NO: 702063 - DNA, 120 bp, Artificial Sequence
  ENSG00000196235_35 (sequence is synthesized)
agctgtttctggggcagtctgaggggtcgtccaggtggactaaggtagtctggggtgggtggtaagagcctgaagtggggtttttgagaacatgcgtagattctgaagacaggaggggca

SEQ ID NO: 702064 - DNA, 120 bp, Artificial Sequence
  ENSG00000196235_36 (sequence is synthesized)
atgcttcccttgctgattgggtcaccctgtccaccctgacatgcaccacaggccccaggccttggaaccaggcccagccttggcctttcctgcccccatttcaccttgagttctcagaat

SEQ ID NO: 702065 - DNA, 120 bp, Artificial Sequence
  ENSG00000196235_37 (sequence is synthesized)
tgtacaccccaactcccaccgtcctcaccttgcttctttctgtccttcccagagagaccagctccctgctttttccttttaggcccatgagtggggggtggggccctggggtggggatgt

SEQ ID NO: 702066 - DNA, 120 bp, Artificial Sequence
  ENSG00000196235_38 (sequence is synthesized)
tatgtactcagaatgcccttggcacgtagtaagtgtgatccatggtgtgatatattgaaatgggattcatggactatgtcaggctttagaaagtctcctttcctgatctgcttatgccca

SEQ ID NO: 702067 - DNA, 120 bp, Artificial Sequence
  ENSG00000196235_39 (sequence is synthesized)
cttgagatgggggggtatggagtgcctttccctcaggatgccccccagactccctagctgggtagagaattggagcagcccaggaatttcaacatcccagggccaactgggggctccggc

SEQ ID NO: 702068 - DNA, 120 bp, Artificial Sequence
  ENSG00000196235_40 (sequence is synthesized)
agggagggcaggagaggaggacatggagaaacgagaggtgccagtgacactcttccctctggtcctgttctagaactaattgtgtgtgattcagccagtcaggttttccttcagataaag

SEQ ID NO: 702069 - DNA, 120 bp, Artificial Sequence
  ENSG00000196235_41 (sequence is synthesized)
gaagagctgtggaatgcacctttgagtctgcacccaagggccttgctaatacttcacctgcctgagttcggacccatttataccactggtttcgactcacctgaacctctctttgcaaag

SEQ ID NO: 702070 - DNA, 120 bp, Artificial Sequence
  ENSG00000196235_42 (sequence is synthesized)
aacaaaccctagtgctcccttaccccccagcaagccagctgaccaagtaccccagcatgcccagcagagcatgctggcccctctcccagattcaccatgggagaaggcgattgcatgagc

SEQ ID NO: 702071 - DNA, 120 bp, Artificial Sequence
  ENSG00000196235_43 (sequence is synthesized)
gcaggaggaacttgacctgctcctccatgaaggaggctccttccccaccccggagactcggaacaggcactaagcggccgccactccacatttggggccgggagctgcaggcttgggagt

SEQ ID NO: 702072 - DNA, 120 bp, Artificial Sequence
  ENSG00000196235_44 (sequence is synthesized)
cccacctgcctgcttttgaatcctgtcaagactgtggcttggcacccttgggcatgtgatgtgaccttcctgagcctgcattccctcacctggaaatgatgagcagttactgatgccaca

SEQ ID NO: 702073 - DNA, 120 bp, Artificial Sequence
  ENSG00000196235_45 (sequence is synthesized)
gatttggggaagagcctgtgaggtcatgagtgtgcaggccaggctgagcgctctgcgaatattcactggtatcattgtctgaaactgttattttgttcagctaatgtttactgcatactt

SEQ ID NO: 702074 - DNA, 120 bp, Artificial Sequence
  ENSG00000196235_46 (sequence is synthesized)
tctgtgtactgggcactattcttggtgaaatttagtgaatgttacatccctgaccttctggagctgacatgctagttagggggacaggtcaaacactagattgtcagatggtgatcggtg

SEQ ID NO: 702075 - DNA, 120 bp, Artificial Sequence
  ENSG00000196235_47 (sequence is synthesized)
ctcaaagataaatcagggaatgggtggaggagtgcagggaggtgggaggcgggcctttggggtttgtgagaagtcactgctgccaagagggtgtgtgctgggatgggatgggtcagtctg

SEQ ID NO: 702076 - DNA, 120 bp, Artificial Sequence
  ENSG00000196235_48 (sequence is synthesized)
cctgtggtcctctccttctgttgccagctgagaagactgaggtacagcaagattttcttcttgactctcccttctaatcttctctcccccatcaaattccaggtccctggggggtgatgt

SEQ ID NO: 702077 - DNA, 120 bp, Artificial Sequence
  ENSG00000196235_49 (sequence is synthesized)
gcaggcatcctctccttggtaccccctaaactggagacagacctgtccccagatggtgacagcccagagtgggcagagctgggattgaggaagcctagagggcaaggggagctatgtgaa

SEQ ID NO: 702078 - DNA, 120 bp, Artificial Sequence
  ENSG00000196235_50 (sequence is synthesized)
cccaaaggaggcatcttacctgatttagcggggaatcagggagggctgcctggggaaggagaaatctgagccaagacctgacaaatgaataggagtaagctaaggaaagtgactggggtg

SEQ ID NO: 702079 - DNA, 120 bp, Artificial Sequence
  ENSG00000196235_51 (sequence is synthesized)
agtgagttccaaatggagggaactgcatgtgcagaggcctggaggtgaggggaacctgggcacattccaggagctgaagggtttgttgtggctggaacataaagagccaaagggggccaa

SEQ ID NO: 702080 - DNA, 120 bp, Artificial Sequence
  ENSG00000196235_52 (sequence is synthesized)
gagtgtcgtgtgcggactgaagccctctgaagataccagcgagtggggagcagagccagcagacggggaaaacaaaaatgatgacaccctctacaccccagatgatctctcaatgtcggc

SEQ ID NO: 702081 - DNA, 120 bp, Artificial Sequence
  ENSG00000196235_53 (sequence is synthesized)
gcaggaccctgtgcgttgggtacctggctcagctctccaagcctcctctggccccagaagtgataagattgggcttgtgagggattaggagagcagtgtcattgtcaggtccttggcaaa

SEQ ID NO: 702082 - DNA, 120 bp, Artificial Sequence
  ENSG00000196235_54 (sequence is synthesized)
atgaggggtggcgggggagttcccctcatccacttcagccttccagtctgctcccccttcctgtacctctctcttccagaaccccaggccaagcaccagagaaggcctgggagtgagcaa

SEQ ID NO: 702083 - DNA, 120 bp, Artificial Sequence
  ENSG00000196235_55 (sequence is synthesized)
ctctgaagataccagcgagtggggagcagagccagcagacggggaaaacaaaaatgatgacaccctctacaccccagatgatctctcaataccaggtcactttgtccctactgtgtgtcc

SEQ ID NO: 702084 - DNA, 120 bp, Artificial Sequence
  ENSG00000196235_56 (sequence is synthesized)
tgctgagactctaggctgctccaggttggagctgtctgtgattgggtttgaggagggaccatctatgggaactgctgtgttccagctacagtacctgctggatctcctggggtcccggct

SEQ ID NO: 702085 - DNA, 120 bp, Artificial Sequence
  ENSG00000196235_57 (sequence is synthesized)
ccagagggaagaacattgtcaacttcaggggtaccaggtgcctctgttgtgagcagagctgcctgctgagtgagctgcttgagctggaataagaccactgcctagatggaagggctcttc

SEQ ID NO: 702086 - DNA, 120 bp, Artificial Sequence
  ENSG00000196235_58 (sequence is synthesized)
gacatttcctccttcctgaggcacctgccctcaccggtagcctccccaccagccccggtctggccctgagggctctgacccatgtaggatccagagtcagggagttctggggccaggtat

SEQ ID NO: 702087 - DNA, 120 bp, Artificial Sequence
  ENSG00000196235_59 (sequence is synthesized)
accccagttgttgacctgggaaagcacggatgtgtctgtctgggactgagcatttgtgggtggtagcgatgtgtggggtggggtgcagtccagggtgtgcctggactttgagatgggaac

SEQ ID NO: 702088 - DNA, 120 bp, Artificial Sequence
  ENSG00000196235_60 (sequence is synthesized)
agctggaagccccccaacttgctgggccccatccccagtctttttgacaagaagcaggatgctgagtaggacagagtaggggatgaggggttgggatttcctctgtgagatgtcatcttc

SEQ ID NO: 702089 - DNA, 120 bp, Artificial Sequence
  ENSG00000196235_61 (sequence is synthesized)
tgaattggttagcttggcagtatagcctcaggcaagtcacttcacatccctgtgcctcagtttcttctgctataaagattgatgaggctgggcgcagcgggagggagcactttggaaggc

SEQ ID NO: 702090 - DNA, 80 bp, Artificial Sequence
  ENSG00000196235_62 (sequence is synthesized)
aggctaaggcaggaggcttggagatcccatcttttaaaataataataataataaaaagaaaaaagttaaaaaaatattta

SEQ ID NO: 702091 - DNA, 120 bp, Artificial Sequence
  ENSG00000196236_0 (sequence is synthesized)
ctctttctcttcccgacgcgtgagttaggccgtaatgccttggctgctctcagcccccaagctggttcccgctgtagcaaacgtccgcggcctctcaggatgtatgttgtgttcacagcg

SEQ ID NO: 702092 - DNA, 120 bp, Artificial Sequence
  ENSG00000196236_1 (sequence is synthesized)
aaggtactcccttcagcctgtcccagaaaggaggattccaaaccgatacttaggccagcccagcccctttacacacccacacctcctcagaccaggggaggtaactccaggactatctca

SEQ ID NO: 702093 - DNA, 120 bp, Artificial Sequence
  ENSG00000196236_2 (sequence is synthesized)
ggtggaatatgcacttcgcagacacaaactaatgtctctgatccagaaggaagctcaagggcagagtgggacagaccagacagtggttgtgctctccaaccctacatactacatgagcaa

SEQ ID NO: 702094 - DNA, 120 bp, Artificial Sequence
  ENSG00000196236_3 (sequence is synthesized)
cgatattccctatactttccaccaagacaacaatttcctgtacctatgtggattccaagagcctgatagcattcttgtccttcagagcctccctggcaaacaattaccatcacacaaagc

SEQ ID NO: 702095 - DNA, 120 bp, Artificial Sequence
  ENSG00000196236_4 (sequence is synthesized)
catactttttgtgcctcggcgagatcccagtcgagaactttgggatggtccgcgatctggcactgatggagcaatagctctaactggagtagacgaagcctatacgctagaagaatttca

SEQ ID NO: 702096 - DNA, 120 bp, Artificial Sequence
  ENSG00000196236_5 (sequence is synthesized)
acatcttctaccaaaaatgaaagctgagacgaacatggtttggtatgactggatgaggccctcacatgcacagcttcactctgactatatgcagcccctgactgaggccaaagccaagag

SEQ ID NO: 702097 - DNA, 120 bp, Artificial Sequence
  ENSG00000196236_6 (sequence is synthesized)
caagaacaaggttcggggtgttcagcagctgatacagcgcctccggctgatcaagtctcctgcagaaattgaacgaatgcagattgctgggaagctgacatcacaggctttcatagaaac

SEQ ID NO: 702098 - DNA, 120 bp, Artificial Sequence
  ENSG00000196236_7 (sequence is synthesized)
catgttcaccagtaaagcccctgtggaagaagcctttctttatgctaagtttgaatttgaatgccgggctcgtggcgcagacattttagcctatccacctgtggtggctggtggtaatcg

SEQ ID NO: 702099 - DNA, 120 bp, Artificial Sequence
  ENSG00000196236_8 (sequence is synthesized)
gtcaaacactttgcactatgtgaaaaataatcaactcatcaaggatggggaaatggtgcttctggatggaggttgtgagtcttcctgctatgtgagtgacatcacacgtacgtggccagt

SEQ ID NO: 702100 - DNA, 120 bp, Artificial Sequence
  ENSG00000196236_9 (sequence is synthesized)
caatggcaggttcaccgcacctcaggcagaactctatgaagccgttctagagatccaaagagattgtttggccctctgcttccctgggacaagcttggagaacatctacagcatgatgct

SEQ ID NO: 702101 - DNA, 120 bp, Artificial Sequence
  ENSG00000196236_10 (sequence is synthesized)
gaccctgataggacagaagcttaaagacttggggatcatgaagaacattaaggaaaataatgccttcaaggctgctcgaaaatactgtcctcatcatgttggccactacctcgggatgga

SEQ ID NO: 702102 - DNA, 120 bp, Artificial Sequence
  ENSG00000196236_11 (sequence is synthesized)
tgtccatgacactccagacatgccccgttccctccctctgcagcctgggatggtaatcacaattgagcccggcatttatattccagaggatgacaaagatgccccagagaagtttcgggg

SEQ ID NO: 702103 - DNA, 120 bp, Artificial Sequence
  ENSG00000196236_12 (sequence is synthesized)
tcttggtgtacgaattgaggatgatgtagtggtgactcaggactcacctctcatcctttctgcagactgtcccaaagagatgaatgacattgaacagatatgcagccaggcttcttgacc

SEQ ID NO: 702104 - DNA, 120 bp, Artificial Sequence
  ENSG00000196236_13 (sequence is synthesized)
ttcactgcggcccacatgcacctcaggttcaaaatgggtgtcttctggcagccctgcacgtgtgctttctgagtgtctctgtgtgtgcattaatatatgcattccatttgggagcatagc

SEQ ID NO: 702105 - DNA, 120 bp, Artificial Sequence
  ENSG00000196236_14 (sequence is synthesized)
agctgtgtgaatgtatgtaattgtgtgtggggggttttttgttttaagtagttagaagtctgggaaaatgaatttttgaatagtatgttactgcagctttggtaacattaattctataga

SEQ ID NO: 702106 - DNA, 120 bp, Artificial Sequence
  ENSG00000196236_15 (sequence is synthesized)
attaatgatcagagcaagtttaatttttaaacataaaggtcttggttacacatgtccatgcattccagttaacacatttaaacatatagaaaattcacttcttctttcaagtccttccct

SEQ ID NO: 702107 - DNA, 120 bp, Artificial Sequence
  ENSG00000196236_16 (sequence is synthesized)
ttctatacttttgctgagatcaacccaatatcataagaagtttgtgtgatgcctgtatttttagctaattaccaaggtctctgcctatgcaaaaattcatctttcggtgattgtgggcgg

SEQ ID NO: 702108 - DNA, 120 bp, Artificial Sequence
  ENSG00000196236_17 (sequence is synthesized)
ccaatacataccttctgtaactcctccctacctattctagatcctgcatatctactggagccatatgagccctcaggggcactggtgtcctgcagtcttactagtcagccacagtccagg

SEQ ID NO: 702109 - DNA, 120 bp, Artificial Sequence
  ENSG00000196236_18 (sequence is synthesized)
ttccagcaacactagctacctaccaaacaaaacacttctgagcttttcttgccatttggttgcctgggacctggaaagtgtttagattcttgataaagatggaaatggaagagaaagaaa

SEQ ID NO: 702110 - DNA, 120 bp, Artificial Sequence
  ENSG00000196236_19 (sequence is synthesized)
tttagattcttgataaagatggaaatggaagagaaagaaaattatatatgtatatactaaagatccagacatcagggctgggcacagcggttccgcctgtaatcccagcactttgggagg

SEQ ID NO: 702111 - DNA, 90 bp, Artificial Sequence
  ENSG00000196236_20 (sequence is synthesized)
tgcctcaaaaaaacaaataaataaataaaatcctgacatcctgccatcttttctcttcaatttaaagttgatttcttaatgatgacttca

SEQ ID NO: 702112 - DNA, 120 bp, Artificial Sequence
  ENSG00000196236_21 (sequence is synthesized)
tcctgacatcctgccatcttttctcttcaatttaaagttgatttcttaatgatgacttcaaaaattaataaaaagaaaagaaaaaaatgatttctggccgggcgtggtggctcaagcctg

SEQ ID NO: 702113 - DNA, 120 bp, Artificial Sequence
  ENSG00000196236_22 (sequence is synthesized)
aaaaaaagaaaaaaaaaagaaagatttctttcgcagatatccctgctccctctatagattcttaatgcactgaccctcacaggttacccttttagctgttgtgctgcgcaggagcagatc

SEQ ID NO: 702114 - DNA, 120 bp, Artificial Sequence
  ENSG00000196236_23 (sequence is synthesized)
agcagatcctctacttacgtaccctgtcagagtcacagtagtagcgcccagttttcagagaagtacccctgttatcattctgtgatttcctctagtgctaatagaaacaaaatatggaat

SEQ ID NO: 702115 - DNA, 120 bp, Artificial Sequence
  ENSG00000196236_24 (sequence is synthesized)
tatggaatctaccaagtacccgtaaatatcctatgattcttatctttctttgatactagcactgggagtgcagtggtaaagagtcatacttcttttttttttttttttttggagacagag

SEQ ID NO: 702116 - DNA, 60 bp, Artificial Sequence
  ENSG00000196236_25 (sequence is synthesized)
gtgcagtggcgtaatctcagctcactacaacctccaccgctgccatgcccagctaatttt

SEQ ID NO: 702117 - DNA, 62 bp, Artificial Sequence
  ENSG00000196236_26 (sequence is synthesized)
gtgcacccaggccggtctcaaactcctgagctccggcaatccgcccacctcagcctcccaaa

SEQ ID NO: 702118 - DNA, 120 bp, Artificial Sequence
  ENSG00000196236_27 (sequence is synthesized)
attacaggcatgagccactgcgcccggtgtaagagtcatatttttttaaacacaaacattggatacaattatacagcaactcagtttgcaagatgaacagggctagattaccacagatag

SEQ ID NO: 702119 - DNA, 120 bp, Artificial Sequence
  ENSG00000196236_28 (sequence is synthesized)
cttatttaggagcgtctgtgatagagggaagctttaagaaccagtgtgttcacctcctttaaacctggatatgaggtcaagatgtataaaacatgccaattgttagaacacaaatttgag

SEQ ID NO: 702120 - DNA, 120 bp, Artificial Sequence
  ENSG00000196236_29 (sequence is synthesized)
ggtttcttaaaaaaacaatttgtattagggaagcacaagctaggggattaacaatctctgtaatgctggaagtttgcctatcttatcagggaaacccagggtacagagtgaaaagcagac

SEQ ID NO: 702121 - DNA, 120 bp, Artificial Sequence
  ENSG00000196236_30 (sequence is synthesized)
gagacagataatgtgaaaacaaaagtgatacaaatcatatcctgacagtgctagcctaggaatgcctggctttgcgcaccttatctaagcagctctcagaatggaggctgcacagctgga

SEQ ID NO: 702122 - DNA, 120 bp, Artificial Sequence
  ENSG00000196236_31 (sequence is synthesized)
gtctccatcccccatacccaccttcccacctccctccaatttctcaatccagagctttttaaaaaaaggggagggaaataactccacagctctggctgctcacttcccaggctctgtgcc

SEQ ID NO: 702123 - DNA, 120 bp, Artificial Sequence
  ENSG00000196236_32 (sequence is synthesized)
aggctctgtgcccccaacagccctttccttggattgtgtttcctttgttcatttgtaatccaggaataaggaatttccttttcttcttgtatcattttcttttcttttcttttttttttt

SEQ ID NO: 702124 - DNA, 62 bp, Artificial Sequence
  ENSG00000196236_33 (sequence is synthesized)
ggggctggtgtgcaatagcgagacctcagctccctgcaacctccatctcccaggttcaagcg

SEQ ID NO: 702125 - DNA, 120 bp, Artificial Sequence
  ENSG00000196236_34 (sequence is synthesized)
gctgcgattacagacgtgagccaccgcacctcctgtatcattttctatggtctaaacttttctagctaaaagcctaggtagcttgtatgtatagcagcatacttggacatgaaacacact

SEQ ID NO: 702126 - DNA, 120 bp, Artificial Sequence
  ENSG00000196236_35 (sequence is synthesized)
tctggttagattccagtcaagttctataggtgttattggtaggcagaaaggctgttgtagaattcttctggtgattttcagtccctgacccaggtatattgtcctttgagtcccagatta

SEQ ID NO: 702127 - DNA, 120 bp, Artificial Sequence
  ENSG00000196236_36 (sequence is synthesized)
actaactatagcagctaagcatttgaatcagacttctcatagcaatgttatgggctgtctgatatattcaggatttgttgagcagataagctgtgtgtgatcttactcattctcagccat

SEQ ID NO: 702128 - DNA, 120 bp, Artificial Sequence
  ENSG00000196236_37 (sequence is synthesized)
gccgcagacatacccatttccctttagtaattttttaatacagagaatgctattaactgttactggatatcaaataattttatttttctaatagtattttccaaatatttcttaaaattc

SEQ ID NO: 702129 - DNA, 120 bp, Artificial Sequence
  ENSG00000196236_38 (sequence is synthesized)
ttaaaatttaggttaaagtttgctggtctcttacatttaataaagctgggacttgaagacttaccatagttttcaactgcctttgcaagttcataaacttctaagggtaaaaagtgaata

SEQ ID NO: 702130 - DNA, 120 bp, Artificial Sequence
  ENSG00000196236_39 (sequence is synthesized)
acttctaagggtaaaaagtgaataagataaattcagagttttaaggtaaaggctttatattagctttttttttttttaaaggttttttgtggggtttttttgttttttttttttttgaga

SEQ ID NO: 702131 - DNA, 120 bp, Artificial Sequence
  ENSG00000196236_40 (sequence is synthesized)
actgcacccagcctttttaaagtttttaattgacatataattgtacgtatttacagggtaaataatgatgttttgatacatatataatgatcagatcagaacaattagcatatccatcac

SEQ ID NO: 702132 - DNA, 79 bp, Artificial Sequence
  ENSG00000196236_41 (sequence is synthesized)
tatataatgatcagatcagaacaattagcatatccatcacattgaacatttatcatttatttgtgttgagcctttagtt

SEQ ID NO: 702133 - DNA, 120 bp, Artificial Sequence
  ENSG00000196236_42 (sequence is synthesized)
cgtgcccagccgagcctttagttctaagtataataaataatatatataccaggcattcctattaaaaatcttaacttaaaaaaaattactcaaatgttactactggaatttttctccctg

SEQ ID NO: 702134 - DNA, 120 bp, Artificial Sequence
  ENSG00000196236_43 (sequence is synthesized)
aattgaagatacatggttagatcattaacaataccacctaaatgaaggaaacatatctggatatccagtgtcacatacttttatgtatttatttcaggaattactattttgtcaccataa

SEQ ID NO: 702135 - DNA, 120 bp, Artificial Sequence
  ENSG00000196236_44 (sequence is synthesized)
tattttgtcaccataattaggaaacagactgtgttctttatttgaaacacaacagtataaatactatagtaaagttgggtgcagtggatcacagctataatcccagcactttgggagacc

SEQ ID NO: 702136 - DNA, 78 bp, Artificial Sequence
  ENSG00000196236_45 (sequence is synthesized)
agagaccttgtctcaacaaaaaaatttaaagttagccaggtgtggtggtttgcacctatagtcccagctactcaggag

SEQ ID NO: 702137 - DNA, 90 bp, Artificial Sequence
  ENSG00000196236_46 (sequence is synthesized)
gtgagccatgattgtgccacttcactaaaaaagaagagaaaaactggagtgagaactctcctcctctcataatcatagtatccacgttag

SEQ ID NO: 702138 - DNA, 120 bp, Artificial Sequence
  ENSG00000196236_47 (sequence is synthesized)
gagaactctcctcctctcataatcatagtatccacgttaggaaaatgcttctgagagtaacttaaagtactgtgtgtgcatcttccttcaaaaccttgcttttttctccgtttttgtaag

SEQ ID NO: 702139 - DNA, 120 bp, Artificial Sequence
  ENSG00000196236_48 (sequence is synthesized)
gtgagaaagggaaaaaccttcaccgtagaaatactgtcttgagattaagatacaaataaaacatgttaaacctccatctaaagacattgcaacttattaaaacagaaaaatgtacctttg

SEQ ID NO: 702140 - DNA, 120 bp, Artificial Sequence
  ENSG00000196236_49 (sequence is synthesized)
ttatgtctttccaaatatccacacccacaccctgttcagctttgttaataatacagagatcagaaatgtgaagcacaaatgctgcttctccccctcctgttcccatgtcagagatggaga

SEQ ID NO: 702141 - DNA, 120 bp, Artificial Sequence
  ENSG00000196236_50 (sequence is synthesized)
agaaagcacagtgagctgttcaccagtccagcggtgacctcggagtcctttgtaacagtgtttccaataacttctgccaataaaacagaatttgagttagaacctatctgctgtccctca

SEQ ID NO: 702142 - DNA, 120 bp, Artificial Sequence
  ENSG00000196236_51 (sequence is synthesized)
actagtgtctgatagctgagaatgtaattcgtttgtgtgtctattagaaaattaggcaggcaccacagacagtagcaacataaaggaacctgcttagaagaggtttttatggtgtgattg

SEQ ID NO: 702143 - DNA, 120 bp, Artificial Sequence
  ENSG00000196236_52 (sequence is synthesized)
tgtttttttttttttaatttttgtttcctgaagtagaatccatagctcaaaacaagttttaagcctgagaaaatataatttgaggtgttttttatgctcctaatgaaaagatgaatgaat

SEQ ID NO: 702144 - DNA, 120 bp, Artificial Sequence
  ENSG00000196236_53 (sequence is synthesized)
gcatcattaaaccttaacagtagagcagaatttcactgttacaaaccacatgggttctcctggttgtgctgctgttctctacctgtgtgtcactgagtttgagcatcattattgtttgaa

SEQ ID NO: 702145 - DNA, 120 bp, Artificial Sequence
  ENSG00000196236_54 (sequence is synthesized)
tcagaggacccactggaatcaaggcttcttggaattgcgcaagaatctgagaaaacttcaatctttaccagcatttcttaatgctttccatgacttttgtgcaattatataagttcagtt

SEQ ID NO: 702146 - DNA, 120 bp, Artificial Sequence
  ENSG00000196236_55 (sequence is synthesized)
tagacaaaatgctgttactttttaaggcattactaataactgaaaatagttacgtcattgcccatcaagggaaaagcacttgtaactgtcatttaaaaaaaataaaactataaaacaata

SEQ ID NO: 702147 - DNA, 120 bp, Artificial Sequence
  ENSG00000196236_56 (sequence is synthesized)
ccagaccatcctgaatcctctggactgtttcccctgtatgtttccctggaagcttcaggcagtgcctcataagccaatggaatctgttgctaatagccacagcatatcccttgcataata

SEQ ID NO: 702148 - DNA, 120 bp, Artificial Sequence
  ENSG00000196236_57 (sequence is synthesized)
tgacctctagattactgcgccttaattgcttcccagctcttctatgctttggtttagaaaaatgaagtactgacttacgggtgaagaaagtattcaaacagttgacatatttatttcagt

SEQ ID NO: 702149 - DNA, 120 bp, Artificial Sequence
  ENSG00000196236_58 (sequence is synthesized)
gcttcccgagtagctgggactacaggagcttcctggacgatttaacaggtcctcaagcgagtcttcaaagaagtgaaaagaaaatggatccctttcatgaaaaatttctttaaaaacatc

SEQ ID NO: 702150 - DNA, 120 bp, Artificial Sequence
  ENSG00000196236_59 (sequence is synthesized)
atctggcttatggaatgtgaagccgtactcacattcatcatcaaaatgacttccacctccgtttaatccttctgtgccatatttatcataaatgtcccgtttctcatcatttgataatac

SEQ ID NO: 702151 - DNA, 120 bp, Artificial Sequence
  ENSG00000196236_60 (sequence is synthesized)
ctcgtatgcctcagctacttctttgaattttctctctgcttcttctttattttctggatttttatcagggtgccatttaagtgccactttatgataagcttttttaatgtcctcaggtga

SEQ ID NO: 702152 - DNA, 120 bp, Artificial Sequence
  ENSG00000196236_61 (sequence is synthesized)
agctcaggctctgctggtggtggtgatagaggtagtgactgcaaataggtacacttttatgttaaagacaatgttattaccatgtgctaagagatgaggatactgattatgtggcaagca

SEQ ID NO: 702153 - DNA, 120 bp, Artificial Sequence
  ENSG00000196236_62 (sequence is synthesized)
aaacaagtaacttagttacaatataatagttatgatgagaggaagtactggatgctaaacaattatatgagagacagctcaggctgggggtgtcaatgaaagcctcttggaggaagtagc

SEQ ID NO: 702154 - DNA, 120 bp, Artificial Sequence
  ENSG00000196236_63 (sequence is synthesized)
ctgatatgttaactttctgcatgccagtggtaagtcatttgagattatagtatctttgtccacccaaggtttactgctgtaaaacatgtaattaaagatttggaaagttgtgtgtttatg

SEQ ID NO: 702155 - DNA, 120 bp, Artificial Sequence
  ENSG00000196236_64 (sequence is synthesized)
aacccacaagaaatcagagtttttcaaagctgtaaggtaagcttaatagcaacccagttggtattaattttagtatttatctaccctatcaacctacctgtagactcgagttattttttt

SEQ ID NO: 702156 - DNA, 120 bp, Artificial Sequence
  ENSG00000196236_65 (sequence is synthesized)
aagtagaattgatagttttaccagctttgaaaattactgatttcttgtggtgagatatttttacatggtaagctgcattttccaggccttaaacctagtaattatattgtcaagataatg

SEQ ID NO: 702157 - DNA, 120 bp, Artificial Sequence
  ENSG00000196240_0 (sequence is synthesized)
cccaaggagcttgtcatggaccatgggcatggagggtcttctccagaactccactaacttcgtcctcacaggcctcatcacccatcctgccttccccgggcttctctttgcaatagtctt

SEQ ID NO: 702158 - DNA, 120 bp, Artificial Sequence
  ENSG00000196240_1 (sequence is synthesized)
ctccatctttgtggtggctataacagccaacttggtcatgattctgctcatccacatggactcccgcctccacacacccatgtacttcttgctcagccagctctccatcatggataccat

SEQ ID NO: 702159 - DNA, 120 bp, Artificial Sequence
  ENSG00000196240_2 (sequence is synthesized)
ctacatctgtatcactgtccccaagatgctccaggacctcctgtccaaggacaagaccatttccttcctgggctgtgcagttcagatcttcctctacctgaccctgattggaggggaatt

SEQ ID NO: 702160 - DNA, 120 bp, Artificial Sequence
  ENSG00000196240_3 (sequence is synthesized)
cttcctgctgggtctcatggcctatgaccgctatgtggctgtgtgcaaccctctacggtaccctctcctcatgaaccgcagggtttgcttattcatggtggtcggctcctgggttggtgg

SEQ ID NO: 702161 - DNA, 120 bp, Artificial Sequence
  ENSG00000196240_4 (sequence is synthesized)
gtgctgaagttgtcttgcacagacacgtcactctatgagaccctgatgtatgcctgctgcgtgctgatgctgcttatccctctatctgtcatctctgtctcctacacgcacatcctcctg

SEQ ID NO: 702162 - DNA, 120 bp, Artificial Sequence
  ENSG00000196240_5 (sequence is synthesized)
actgtccacaggatgaactctgctgagggccggcgcaaagcctttgctacgtgttcctcccacattatggtggtgagcgttttctacggggcagccttctacaccaacgtgctgccccac

SEQ ID NO: 702163 - DNA, 120 bp, Artificial Sequence
  ENSG00000196240_6 (sequence is synthesized)
tcctaccacactccagagaaagataaagtggtgtctgccttctacaccatcctcacccccatgctcaacccactcatctacagcttgaggaataaagatgtggctgcagctctgaggaaa

SEQ ID NO: 702164 - DNA, 120 bp, Artificial Sequence
  ENSG00000196240_7 (sequence is synthesized)
gtactagggagatgtggttcctcccagagcatcagggtggcgactgtgatcaggaagggctagcagggactcccacagcatcagagtggtgactgtgatcgggaaggattagcggggact

SEQ ID NO: 702165 - DNA, 120 bp, Artificial Sequence
  ENSG00000196240_8 (sequence is synthesized)
cttggattaattgctaacccaggaattcttcctgggggatgtgggactctattagtgaaaagactttttgacctagcctcacccctacacaatgtatttaataagaagtctgacattcca

SEQ ID NO: 702166 - DNA, 120 bp, Artificial Sequence
  ENSG00000196240_9 (sequence is synthesized)
ctactgctttagaaagacttggacccagcttctctgagcgttagcagggtggactggatgggccatatgccagatcctttgatttctatttgccaccacacgaactgacactgctgccca

SEQ ID NO: 702167 - DNA, 120 bp, Artificial Sequence
  ENSG00000196240_10 (sequence is synthesized)
gaagcattcccctgcacatccacatcacagccctcctgctggcagcttggaatttagaccttttactctcaatgctccaggaaaccagatgtacttctttctttcttgtccattggtgat

SEQ ID NO: 702168 - DNA, 120 bp, Artificial Sequence
  ENSG00000196240_11 (sequence is synthesized)
atccttgacaatgtagtttagctttacaggtacgttgtgtcaagtggagaagatcagttctggttagcagctttattgccacagaaaggacactggcagatacttctcatagctctagtc

SEQ ID NO: 702169 - DNA, 120 bp, Artificial Sequence
  ENSG00000196240_12 (sequence is synthesized)
aatatggtattggttctgaagaatgttcagtgtcactttcagcaattcaaaattaacaggcaaaatcatcctgttgcaaggattacttaggaacagtagcgaagttggtgagcatctccg

SEQ ID NO: 702170 - DNA, 120 bp, Artificial Sequence
  ENSG00000196240_13 (sequence is synthesized)
cattagtcaactttgttcaactggattcacaaacatttccagagggcattctcagtcaagtagccctacaaaccattcatggcacgccaagcagctcttggaagtgcccatgttaacatg

SEQ ID NO: 702171 - DNA, 120 bp, Artificial Sequence
  ENSG00000196240_14 (sequence is synthesized)
tgaccatgagtccttcctgtctgtattgctaacgtgtgatcatgagtcctgcctgcctgtattgctgacgtgtgatcatgagtcctgcctgtctgtattgctaacgtgtgatgagtcctt

SEQ ID NO: 702172 - DNA, 120 bp, Artificial Sequence
  ENSG00000196240_15 (sequence is synthesized)
ctgtgtctgtattgctaacgtgtgatcgtgagtccttcctgtctatattgctaatgtgtgaccatgagtcctgcctgtctgtattgctaacgtgtgaccatgagtcctgcctgtctgtat

SEQ ID NO: 702173 - DNA, 120 bp, Artificial Sequence
  ENSG00000196240_16 (sequence is synthesized)
tgctaacgtgtgatcatgggtcctgcctgtctgtattgctaacgtgtgatcatgggtcctgcctgtctgtattgctaacacgtgattgagtcctgcctgtctctattgttaacctgtgat

SEQ ID NO: 702174 - DNA, 120 bp, Artificial Sequence
  ENSG00000196240_17 (sequence is synthesized)
catgagtcctgcctgtctgtctgtattgctgaccaacttttgaatggaaattggaaggagcatttgccacctccttgatgacttaatttcaaacattcaatacaagtaaaatattttcta

SEQ ID NO: 702175 - DNA, 120 bp, Artificial Sequence
  ENSG00000196240_18 (sequence is synthesized)
gtgctaaatgtgtagcaattttattagaaaacatttaggaaggtgatactatttttggttccatgttcttagttacattttatgaatgttatcacttacctctgaaattaaatacttgcc

SEQ ID NO: 702176 - DNA, 120 bp, Artificial Sequence
  ENSG00000196240_19 (sequence is synthesized)
ctgcctttattcacatggagtccaatatattcctggaaatattgattcattgattgaaaattgactctgccattaagattgttacatggccaaaaacctacaaaactgccatttatgctc

SEQ ID NO: 702177 - DNA, 120 bp, Artificial Sequence
  ENSG00000196240_20 (sequence is synthesized)
aaattgttaatagataaatgtagaatgaataaaccaagacattttattagctaacttagttcccgtggaataagttgctcaattttcttattctcaacatcttcattgatatgctgaaga

SEQ ID NO: 702178 - DNA, 120 bp, Artificial Sequence
  ENSG00000196240_21 (sequence is synthesized)
caagtatttttgtaattagttggagttaggtgtggtgctttgatagatgtgtaactttggtggaatactaactaagcaaagactacactgaccccaccattcatgtaactttagtttctc

SEQ ID NO: 702179 - DNA, 120 bp, Artificial Sequence
  ENSG00000196240_22 (sequence is synthesized)
ctgtgtgtaaggtcctgaaatatgagacataaaaaatattgacggacctggtgtttattttctttgttgatacgaggcttagaaaacattggacagagcggttacatagttgacaaagac

SEQ ID NO: 702180 - DNA, 120 bp, Artificial Sequence
  ENSG00000196240_23 (sequence is synthesized)
taagcaaaggttactcagccttatgttgttctagtgtcaacacagatagaaggaaaaatgtttcctccattgttgctgacgtagataaagaatattcccttcaatatgctaacccctagg

SEQ ID NO: 702181 - DNA, 120 bp, Artificial Sequence
  ENSG00000196240_24 (sequence is synthesized)
tggcttttcattcagaaggttcctaataatttgatctttaccctgaaatcaaacacatggaaaagagatggaagaatgtcctggagggattaagtgaagaaacagaccaggattcattta

SEQ ID NO: 702182 - DNA, 120 bp, Artificial Sequence
  ENSG00000196240_25 (sequence is synthesized)
tgaaatatcctcggtgttatttcaattcagctccattcacattttattcttttgtgtctctgcactaatgccctccatattctccattctcctgccttagctagcaccttctcgatcttc

SEQ ID NO: 702183 - DNA, 120 bp, Artificial Sequence
  ENSG00000196240_26 (sequence is synthesized)
cctctacaaaactccttcagttcacattgcatttgtgctctatcctgggatatgtgttttctttcccatttcctcagttgctatgtattaaaaattaggacttttattcttatgtttcca

SEQ ID NO: 702184 - DNA, 120 bp, Artificial Sequence
  ENSG00000196242_0 (sequence is synthesized)
agtgctttctgctagttcaatcccattgtgatttaaatacttaataatgtgtcctttagacatgaatttgaacagaatctaacacgtctgctaccaccgacttagagatttccactattt

SEQ ID NO: 702185 - DNA, 120 bp, Artificial Sequence
  ENSG00000196242_1 (sequence is synthesized)
gcagggctttaaaatcccctggctaaactcctatttttttaatgccacacgcattgaattcatgaatgttatcagtctttttaataaaatattgcccattttacaacatttccaccctgc

SEQ ID NO: 702186 - DNA, 120 bp, Artificial Sequence
  ENSG00000196242_2 (sequence is synthesized)
ataaatagagatgatgctgctagctcaccattaaaatcaactgacaaatggcagattcataggagaaaagacatacacatttatttgatcatagttttacataacagaggagccttcaga

SEQ ID NO: 702187 - DNA, 120 bp, Artificial Sequence
  ENSG00000196242_3 (sequence is synthesized)
tgagaatccaaagatacaagagaaacttcccatttttatgcttaggttcaaagccatatggacagccatgtagaaatatgattgaacatgaagggcatgatctaatactgatggactgag

SEQ ID NO: 702188 - DNA, 120 bp, Artificial Sequence
  ENSG00000196242_4 (sequence is synthesized)
tgaagaagcccagcaagacccatcgtgagattctttttggcctctctgagcagtgttccttttttcttggtatgcaataagacctctctggaatggaggtcttatgatctacaatccagt

SEQ ID NO: 702189 - DNA, 120 bp, Artificial Sequence
  ENSG00000196242_5 (sequence is synthesized)
aaggtggccttttgccccacccccagcatacaatgatggaaatagccaatgtgagttctccagaagtctttgtcctcctgggcttctccacacgaccctcactagaaactgtcctcttca

SEQ ID NO: 702190 - DNA, 120 bp, Artificial Sequence
  ENSG00000196242_6 (sequence is synthesized)
tagttgtcttgagtttttacatggtatcgatcttgggcaatggcatcatcattctggtctcccatacagatgtgcacctccacacacctatgtacttctttcttgccaacctccccttcc

SEQ ID NO: 702191 - DNA, 120 bp, Artificial Sequence
  ENSG00000196242_7 (sequence is synthesized)
tggacatgagcttcaccacgagcattgtcccacagctcctggctaacctctggggaccacagaaaaccataagctatggagggtgtgtggtccagttctatatctcccattggctggggg

SEQ ID NO: 702192 - DNA, 120 bp, Artificial Sequence
  ENSG00000196242_8 (sequence is synthesized)
caaccgagtgtgtcctgctggccaccatgtcctatgaccgctacgctgccatctgcaggccactccattacactgtcattatgcatccacagctttgccttgggctagctttggcctcct

SEQ ID NO: 702193 - DNA, 120 bp, Artificial Sequence
  ENSG00000196242_9 (sequence is synthesized)
ggctggggggtctgaccaccagcatggtgggctccacgctcaccatgctcctaccgctgtgtgggaacaattgcatcgaccacttcttttgcgagatgcccctcattatgcaactggctt

SEQ ID NO: 702194 - DNA, 120 bp, Artificial Sequence
  ENSG00000196242_10 (sequence is synthesized)
gtgtggataccagcctcaatgagatggagatgtacctggccagctttgtctttgttgtcctgcctctggggctcatcctggtctcttacggccacattgcccgggccgtgttgaagatca

SEQ ID NO: 702195 - DNA, 120 bp, Artificial Sequence
  ENSG00000196242_11 (sequence is synthesized)
ggtcagcagaagggcggagaaaggcattcaacacctgttcttcccacgtggctgtggtgtctctgttttacgggagcatcatcttcatgtatctccagccagccaagagcacctcccatg

SEQ ID NO: 702196 - DNA, 120 bp, Artificial Sequence
  ENSG00000196242_12 (sequence is synthesized)
agcagggcaagttcatagctctgttctacaccgtagtcactcctgcgctgaacccacttatttacaccctgaggaacacggaggtgaagagcgccctccggcacatggtattagagaact

SEQ ID NO: 702197 - DNA, 120 bp, Artificial Sequence
  ENSG00000196242_13 (sequence is synthesized)
gctgtggctctgcaggcaagctggcgcaaatttagagactccagtgccttctgagaaggaagatcaagtttacatcgagcaaagtgaccttggaagacagggcacttgggatgtcgtttt

SEQ ID NO: 702198 - DNA, 120 bp, Artificial Sequence
  ENSG00000196242_14 (sequence is synthesized)
tcttctaatattgtttgagctcaaggtagatggaaatctgaaaggagtgtgctcatgccatttccagaccaagaaaatacatttattatttgctaattatcatagttttgttcaattgcg

SEQ ID NO: 702199 - DNA, 120 bp, Artificial Sequence
  ENSG00000196242_15 (sequence is synthesized)
ttgttggtttttgctatatatacacatgttgactgtcatcttgttttgtaaactccttgcgttgttgttcagctgttcctcagtatccgaagcgggtggattccaggacgctccgtggat

SEQ ID NO: 702200 - DNA, 120 bp, Artificial Sequence
  ENSG00000196242_16 (sequence is synthesized)
aataaactttgacgacgctgagagcgcgcggggagaccggagccggcctgttccccagagcccccggagccctcccagccctcaggcctgcgcctggggtgagctgagcccgggactccg

SEQ ID NO: 702201 - DNA, 120 bp, Artificial Sequence
  ENSG00000196242_17 (sequence is synthesized)
ccttgcaggctccggaaccctcgctgtggctcccccgctcggcccaggccttgaagccgcggcgaacctcttcctaccctacctcggggacctggtggcagcggcggcctcccccagcct

SEQ ID NO: 702202 - DNA, 120 bp, Artificial Sequence
  ENSG00000196242_18 (sequence is synthesized)
ggaccccgccggccgcgggtctcccggcccaaccccaccgacccagaccaagaccgcgccgagccgccgggactcagcgccttcgggtggcggcggtaagcggggaggaaacatggcgcc

SEQ ID NO: 702203 - DNA, 120 bp, Artificial Sequence
  ENSG00000196242_19 (sequence is synthesized)
gcccaaatgcgcccggaggccgttaggctgtggagggcgaggaaggcggtccagaggcggccggcaggtccacgtcctgggcgaccgctctgtcgcagttgggcgagacctacctagtcc

SEQ ID NO: 702204 - DNA, 120 bp, Artificial Sequence
  ENSG00000196242_20 (sequence is synthesized)
tgacgggtcgtatttccaagacattttcatattctatccattgttttgtgtgcattttattacttctgtatatagaggtaacaacgctaagcttttttgagatgtctgtttcttctagat

SEQ ID NO: 702205 - DNA, 120 bp, Artificial Sequence
  ENSG00000196242_21 (sequence is synthesized)
gttctgaagtacctgatacatgttaaaattagaggtagtaaaatgacacattttgtaaataactttttgttaaaattcataggaaatgttattttgtgggggggggatggcatggtgttt

SEQ ID NO: 702206 - DNA, 120 bp, Artificial Sequence
  ENSG00000196242_22 (sequence is synthesized)
gtggactggttcagggaaggaggggaaaagggaggtgcagagagctctaagccagtgtgcttacagtgaggcgagattcaccattgtttcttatgattgtgcattttgttttacttatct

SEQ ID NO: 702207 - DNA, 120 bp, Artificial Sequence
  ENSG00000196242_23 (sequence is synthesized)
atgtatacagtgtatctaaaggacaaacgagtcctaatttacaacagctagtctttccagatgttaaagaacttctatcaatagagtaacctatcactagagttcacctctatcaataga

SEQ ID NO: 702208 - DNA, 120 bp, Artificial Sequence
  ENSG00000196242_24 (sequence is synthesized)
gtaacctcattctctgcctgatgattcaaaggcatgggaagaccaaaaccatgtggcagttcctgtttttgattttattatatatatgtatataatatgaaagtagtcattaaagtagtc

SEQ ID NO: 702209 - DNA, 120 bp, Artificial Sequence
  ENSG00000196242_25 (sequence is synthesized)
cagggttctccagagaaacagaaccaaaaatatgtgtaaaagagaatacacacacacacacacaccctgagggggagagagagaaaaaagagtgagagagattgagagttaagaaatagg

SEQ ID NO: 702210 - DNA, 120 bp, Artificial Sequence
  ENSG00000196242_26 (sequence is synthesized)
gagaaaaaagagtgagagagattgagagttaagaaataggctcacacaatttagggaactggcaagtctgaaatttgcagggcaagccagcaggctgtaaattttgacagaggttgatgt

SEQ ID NO: 702211 - DNA, 120 bp, Artificial Sequence
  ENSG00000196242_27 (sequence is synthesized)
tgcagcttgagttcaaagtctggaggcaaaattccctctttttggaagcaggtcagtcttttctcttaaggctttcaactgatgggatgagacccactcacattataaagggtaatctgc

SEQ ID NO: 702212 - DNA, 89 bp, Artificial Sequence
  ENSG00000196242_28 (sequence is synthesized)
cacagtaacaccgaggcttgtgtttgaacaaaaactgggcaccatagtccaaccaagttgatatgtaaaatgaaccatcacaccaaacc

SEQ ID NO: 702213 - DNA, 120 bp, Artificial Sequence
  ENSG00000196242_29 (sequence is synthesized)
caaccaagttgatatgtaaaatgaaccatcacaccaaacccaaactttcagtgaagtgaagcaacattcttcaactggattattatgcatcatgtacgagacactctcatgtcttgttgg

SEQ ID NO: 702214 - DNA, 120 bp, Artificial Sequence
  ENSG00000196242_30 (sequence is synthesized)
tttctggactcatgtatcaggttacggtgactgcaggtttagggcatacactgcagcctgcaggaaagcagtgcttatttacacagtattgtttctcagcttcaataactaaaccttcag

SEQ ID NO: 702215 - DNA, 120 bp, Artificial Sequence
  ENSG00000196242_31 (sequence is synthesized)
caggccattccatcattcaataaagcccattccatcattcagtcaagcccactgcttctgaatattgaggtatgaagtatgaatcatgaattccaagggcaattctattgccacacccct

SEQ ID NO: 702216 - DNA, 120 bp, Artificial Sequence
  ENSG00000196242_32 (sequence is synthesized)
tttgctgtgaaatatgtttcctggttacaggtgatattgcaggggatgccatggtgatgattaaggctttgttcactatgtaaatggttcgggcatggaagacaaaactgtccccacaat

SEQ ID NO: 702217 - DNA, 120 bp, Artificial Sequence
  ENSG00000196242_33 (sequence is synthesized)
attattctgtccctataaagactaacattgcttactctatgctcaaaggagtccagagtaatcactatgctactagtccagccagacgcctggaaatagtgccaaatcacatgctaacct

SEQ ID NO: 702218 - DNA, 120 bp, Artificial Sequence
  ENSG00000196242_34 (sequence is synthesized)
tggtgagagaaatgtcataatgctgagcccattcatagtttccatccctgcttccatgttaaatttctcataggctcaatgagcaagcctgctggcaaaagagattgactgattacctac

SEQ ID NO: 702219 - DNA, 120 bp, Artificial Sequence
  ENSG00000196242_35 (sequence is synthesized)
tttatgtcagacagatatcttcatgatctgtgcacttttcaggaaattcttcaatgtcctcttctccagatttgcctgccattaattttccagccttattcttcacaaatctctcagcaa

SEQ ID NO: 702220 - DNA, 120 bp, Artificial Sequence
  ENSG00000196242_36 (sequence is synthesized)
aataataacttgttatccaatgctcctaaatcagtgcatatccaaacttctgtgcctgtctccttctataaaaaattaacaaccagctaaactgcctgtagtttgaccactgggaagttt

SEQ ID NO: 702221 - DNA, 120 bp, Artificial Sequence
  ENSG00000196242_37 (sequence is synthesized)
cccttcctcaccatctttcagcaacacctggaggggtactgtggtttaatgccatttgcttctttctgttgctggtgtataatgcagattcatttgtaaactggcccatgctttttcctt

SEQ ID NO: 702222 - DNA, 120 bp, Artificial Sequence
  ENSG00000196242_38 (sequence is synthesized)
ctttaacagttggctaaacatgaaatatgggtgagatcatgcaggatttgtccctttgtgtttggcttatttcacttaacacaatgtcttctaggttcatgcatgttgtgaagacaggat

SEQ ID NO: 702223 - DNA, 120 bp, Artificial Sequence
  ENSG00000196242_39 (sequence is synthesized)
tttgaacgctctcaccacaaagaaatgacaagtgtttgaggtaatggatatgttaattaccttgatttgatcattacacaagtatacatgtatcaaaacatcatactgcaccccataagt

SEQ ID NO: 702224 - DNA, 120 bp, Artificial Sequence
  ENSG00000196242_40 (sequence is synthesized)
gtgtacaattgttatttgtgaattaaaaacaaactaaaatgaaatttaaaaaataattatacaattttgggggcttgggggtgggggaaggggaagtaaaaaagcagacagcaggtactc

SEQ ID NO: 702225 - DNA, 120 bp, Artificial Sequence
  ENSG00000196242_41 (sequence is synthesized)
taggagtcagagacacatgataacattattatgagtcaggaaggtaggaaatcaagttactgacattttttactcagtttagaacccaaagaccgaagaaacagaaacaaatgggggaaa

SEQ ID NO: 702226 - DNA, 120 bp, Artificial Sequence
  ENSG00000196242_42 (sequence is synthesized)
tcataacttttaaagtattagataaaatttttgagaaagttaaatactgcatgttctcattcatctgtgaaagctaaaaaagggttgatctcatagaaataagtagaacagaggatactt

SEQ ID NO: 702227 - DNA, 120 bp, Artificial Sequence
  ENSG00000196242_43 (sequence is synthesized)
gaggctgggaatggatagcaggggtgggggaatgagaagagatttgttaaaggatacaaaattacagctccattggaggagtaagttctagtgttctataccactgcgggatgaccataa

SEQ ID NO: 702228 - DNA, 120 bp, Artificial Sequence
  ENSG00000196242_44 (sequence is synthesized)
caataatatattctgtattttcaaacagctagaaggaggatattgaatgttcccagcacgaagaaacgataaatgtttgagatgatggatattctaatcacacttatctgatcactatac

SEQ ID NO: 702229 - DNA, 120 bp, Artificial Sequence
  ENSG00000196242_45 (sequence is synthesized)
attatgtgcttccaaacatcactgtttaccccagaaatatgttcaattattatatgtccactaaaagctaaaataaaaaaattttcaaacattcaagatctgaagaaaaacttcaatctg

SEQ ID NO: 702230 - DNA, 120 bp, Artificial Sequence
  ENSG00000196242_46 (sequence is synthesized)
aatactaaaaactttccctaacctcttgaaaagactaattaaaaatctctggagtttggatgcactgtaattttcatctgccagttcatggctttgtttaagctcagtagtcaagttggt

SEQ ID NO: 702231 - DNA, 120 bp, Artificial Sequence
  ENSG00000196242_47 (sequence is synthesized)
agaacctccagagaaagcaatgaggaagtggcagtaggaccctctgggacccgttaccccaaatatctgtcatcttcttgacctcaaggctgggtgtcaactcaggacaggagtgcaggt

SEQ ID NO: 702232 - DNA, 120 bp, Artificial Sequence
  ENSG00000196242_48 (sequence is synthesized)
cctcatcagtttatgtggggatagcagacaacgcagaccctcccagaaccatgaggacagcactgtgctttgccctgaccatccatcagcccctgtttggcacagaggagaatgatgacc

SEQ ID NO: 702233 - DNA, 120 bp, Artificial Sequence
  ENSG00000196242_49 (sequence is synthesized)
ataactcacactctcctccaactgccttaaatgctcaggctgattggtcatgtgctcacccaactgctccctaaatgcttaacagaaaatgaagacatcctctccagaacccaaggaaat

SEQ ID NO: 702234 - DNA, 120 bp, Artificial Sequence
  ENSG00000196242_50 (sequence is synthesized)
acacttgaaatgtgatttgtacctcagattggcatccaagaactgaaagaaacaccaggcattccacacaatttctggctccacatccagtagaactattggaatcctccaacataacca

SEQ ID NO: 702235 - DNA, 120 bp, Artificial Sequence
  ENSG00000196242_51 (sequence is synthesized)
tcttgaggcagtaaatcctgaaagaaagtgaaagaagacctttctaaatagagggaagtcccatcttacttggatttaagttatagtaaatgaagaggaaaatgctaacatgccatattg

SEQ ID NO: 702236 - DNA, 120 bp, Artificial Sequence
  ENSG00000196242_52 (sequence is synthesized)
gacaccacttgtctttcgatgccaggtcccttttcagccgaatatgtcagaattttctaggctccatcttttcttttattcctcttgcagcaaccataggctttgatggcttctcacagg

SEQ ID NO: 702237 - DNA, 120 bp, Artificial Sequence
  ENSG00000196242_53 (sequence is synthesized)
acagaaaacctggatcatcccaaacctgctctgtgaaccctctacttcatgtatgggtttcctcccatgctgcacactgtgagggtcatgcatcaccacagcatgcacagctgagaaatg

SEQ ID NO: 702238 - DNA, 120 bp, Artificial Sequence
  ENSG00000196242_54 (sequence is synthesized)
tggagagtgaaggacccaggccacattgactgtggggatgtaagccagtggagacacacttcctgaagtaagatgcatttcacaaagctcccagtttccagaaggatggagcaccagtca

SEQ ID NO: 702239 - DNA, 120 bp, Artificial Sequence
  ENSG00000196242_55 (sequence is synthesized)
cccttggtcatggccaaaccctctttgtccttgccctttcctgctctctgggatcacagaacatgtgcactggacacagcttctgccttggaaacacccagactaaggtaatttctcaca

SEQ ID NO: 702240 - DNA, 120 bp, Artificial Sequence
  ENSG00000196242_56 (sequence is synthesized)
caccagtttatcttccagcttctgtcagaactttaggtcaggtattatgagccagatagagtaaaaaatataaactttaaaaattataatcaccctcaacatggcaagcttctcatggta

SEQ ID NO: 702241 - DNA, 120 bp, Artificial Sequence
  ENSG00000196242_57 (sequence is synthesized)
agaaaggaatgcaagaattcagaaactaacccagggaatagcaggctcaagatttcttggcaaataaattcacttaatagatcacagatattttctcatctcaacacatgctgtgcacag

SEQ ID NO: 702242 - DNA, 120 bp, Artificial Sequence
  ENSG00000196242_58 (sequence is synthesized)
gtatatttcaaacctaatcaccgtggaatttctcattttcattattacaaacaaagctacaataagttcatgtgtattgaaatccttgcaaacttgactagtagctcaagataaatttta

SEQ ID NO: 702243 - DNA, 120 bp, Artificial Sequence
  ENSG00000196242_59 (sequence is synthesized)
gaataaaaaatcaaatggtattcacatgtatatactctgaagcatatatttggtcttcaacaggtttccaggcatacaactactaaaatccttggattccttaaagtggtacttgtatgt

SEQ ID NO: 702244 - DNA, 120 bp, Artificial Sequence
  ENSG00000196242_60 (sequence is synthesized)
taatgagttgacaaatggctagtagtccctacgtagcttcaggatgggagctgggcacctgaaagaccaaggcagaattagagaattaagatagtcagacccagcccccaacctccatgg

SEQ ID NO: 702245 - DNA, 120 bp, Artificial Sequence
  ENSG00000196242_61 (sequence is synthesized)
agggaagaagggatgaatgttaagcagaacaccaatggccagtgatttaatcagtcatgcctacagaatgatgcctccataaaaaccctcaaggactgggttcagagggcttccagatag

SEQ ID NO: 702246 - DNA, 120 bp, Artificial Sequence
  ENSG00000196242_62 (sequence is synthesized)
ctgaagacgtggaggttcctggaaggtggtgaacctggagagagcatgcaagctccacagcctttccctatacctcaccctatgcatctcttcatctgcatctcttgcgatatcctttac

SEQ ID NO: 702247 - DNA, 120 bp, Artificial Sequence
  ENSG00000196242_63 (sequence is synthesized)
aataaactgctaaatgtagatgcctccatgagttctgtgggctgctctagcaaattaattgaacccaagaagggggctgtggtaacccagacttacagctgattgactggtcagacacac

SEQ ID NO: 702248 - DNA, 120 bp, Artificial Sequence
  ENSG00000196242_64 (sequence is synthesized)
aggtaaaaagaacttgaggcttataattggtattggaaacggggatgtcttatgagacttagccctcacccagcagacctggcgttatttccaggtagatagtgtcaaaactgaattgaa

SEQ ID NO: 702249 - DNA, 120 bp, Artificial Sequence
  ENSG00000196242_65 (sequence is synthesized)
ggacacccagctggtgtctgccataggattgattgtttgcttggtgtatgggcttaaccccatcacctttagtcacagaagtcttctgtgttgattgttgagtgagagaatagaaaaagc

SEQ ID NO: 702250 - DNA, 120 bp, Artificial Sequence
  ENSG00000196242_66 (sequence is synthesized)
gctttagtttgtttttccttatagaacatgttgacattatgtggacatatttaaatttcccttcagacaccaaattcgtacttttgccaataatgtgtacaaaggcatatattctcacag

SEQ ID NO: 702251 - DNA, 120 bp, Artificial Sequence
  ENSG00000196242_67 (sequence is synthesized)
tttcactaacatttgattttgttagtaactttagttttacttgcaaatcttacctcagtatcattttatttggcattgatttaatcattagtgaggtttaacatcttctggtatgttttg

SEQ ID NO: 702252 - DNA, 120 bp, Artificial Sequence
  ENSG00000196242_68 (sequence is synthesized)
gggctatttgtgtttcttcaataaattgtttttttcttaaattttcattgttttacctttttgcttactgatttgtagcggtagttgacatgattctacacatctttgtcatcatataag

SEQ ID NO: 702253 - DNA, 120 bp, Artificial Sequence
  ENSG00000196242_69 (sequence is synthesized)
tgttgaatcgtttttctagtgggacgttttatccttttgctatgttttgtttgtttcctttgtggtacaaaagttttaaatgttatatgtattaaataaactatcaatcatgcctttatg

SEQ ID NO: 702254 - DNA, 120 bp, Artificial Sequence
  ENSG00000196247_0 (sequence is synthesized)
aatcaggcacgcagctggagcggacaggacggcttccgggatttggcggggcctttgtctctggctgcagccggagctcctgctctcctcctcactgctcagtgtcctctgctcctagag

SEQ ID NO: 702255 - DNA, 120 bp, Artificial Sequence
  ENSG00000196247_1 (sequence is synthesized)
gcccagcctctgtgtccctgtgacctgcagatattgggagatccacagctaagacgccgggactccctggaaacctagaaatggaaccactgacatttaaagatgtcgccatagaattct

SEQ ID NO: 702256 - DNA, 120 bp, Artificial Sequence
  ENSG00000196247_2 (sequence is synthesized)
ctctggaggagtggcaatgcctggatactgcacagcgggatttatataggaatgtgttgttagagaactacagaaacctggtctttttgggtattgctgtctctaagccatatctgatca

SEQ ID NO: 702257 - DNA, 120 bp, Artificial Sequence
  ENSG00000196247_3 (sequence is synthesized)
cctgtctggagcaaaaaaaagagccctggaatataaaaagacatgagatggtagccaaacccccagtaatgtcttttcattttgcccaagacctttggccagagcagaacataaaagatt

SEQ ID NO: 702258 - DNA, 120 bp, Artificial Sequence
  ENSG00000196247_4 (sequence is synthesized)
ctttccagaaagtgacactgagaagatacggaaaatgtgaatatgagaatttacagttaagaaaaggctgtaaacatgtggatgagtgtacggggcacaaaggaggtcataatacagtta

SEQ ID NO: 702259 - DNA, 120 bp, Artificial Sequence
  ENSG00000196247_5 (sequence is synthesized)
accaatgtttgacagctaccccaagcaaaatattccagtgtaataaatatgtgaaagtctttgataaattttcaaattcaaatagatataagagaagacatacaggaaacaaacacttca

SEQ ID NO: 702260 - DNA, 120 bp, Artificial Sequence
  ENSG00000196247_6 (sequence is synthesized)
aatgtaaagaatgtagcaaatcattttgcgtgctttcacaactaactcagcatagaagaattcatactagagtgaattcctacaaatgtgaagaatgtggaaaagcctttaactggttct

SEQ ID NO: 702261 - DNA, 78 bp, Artificial Sequence
  ENSG00000196247_7 (sequence is synthesized)
tacaaatgtgaagaatgtggaaaagcctttaactggttctcaactcttactaaacataagagaattcatactggagaa

SEQ ID NO: 702262 - DNA, 120 bp, Artificial Sequence
  ENSG00000196247_8 (sequence is synthesized)
agaaacccaacaaatgtgaagaatgtggcaaggcctttaaacaggcctcacaccttactatacataaaataattcatactggagaaaaaccttacaaatatgaagaatgtggcaaagtct

SEQ ID NO: 702263 - DNA, 120 bp, Artificial Sequence
  ENSG00000196247_9 (sequence is synthesized)
ttagccagtcctcacaccttactacacaaaagatacttcacactggagagaacctctacaagtgtaaagaatgtggaaaagcttttaacctattctcaaatcttactaaccataagagaa

SEQ ID NO: 702264 - DNA, 120 bp, Artificial Sequence
  ENSG00000196247_10 (sequence is synthesized)
accctacaaatgtaaagaatgtggcagagcttttaacatatcctcaaaccttaataaacaggagaaaattcatactggagggaaactcaacaaatgtgaagaatgtgacaaagcttttaa

SEQ ID NO: 702265 - DNA, 120 bp, Artificial Sequence
  ENSG00000196247_11 (sequence is synthesized)
ttcatactggagggaaactcaacaaatgtgaagaatgtgacaaagcttttaaccgatccttaaaacttactgcacataagaaaattctaatggaagagaaaccctacaaatgtgaagaat

SEQ ID NO: 702266 - DNA, 87 bp, Artificial Sequence
  ENSG00000196247_12 (sequence is synthesized)
aatgtaaagaatgtggcaaagcttttaaccaatcttcaaaccttactgaacataagaaaattcatactgcagagaaatcctatcact

SEQ ID NO: 702267 - DNA, 120 bp, Artificial Sequence
  ENSG00000196247_13 (sequence is synthesized)
tgaagaatgtggcaaagcttttaaccaacactcaaacctaattaaccataggaaaatttattctggagagaaaccatacaaatgtgaagaatgtggaaaagcttttaatcgatcctcaac

SEQ ID NO: 702268 - DNA, 86 bp, Artificial Sequence
  ENSG00000196247_14 (sequence is synthesized)
agaaaccctacaaatgtgaagaatgtgacagagcttttagccagtcttcaaaccttactgtaaatgtgaggaatgtggcaaagctt

SEQ ID NO: 702269 - DNA, 120 bp, Artificial Sequence
  ENSG00000196247_15 (sequence is synthesized)
agaaaccctataaatgtgaggaatgtggcaaagcttttaaccgattctcaacccttactaaacataagagaattcatactggagaaaaaccctataaatgtgaagaatgtggaaaagcct

SEQ ID NO: 702270 - DNA, 120 bp, Artificial Sequence
  ENSG00000196247_16 (sequence is synthesized)
ttaatcaatcctatcaacttactagacataagatagttcatactaaagagaaactcaacaaatgtgaagaatttggcaaggcctttaaacagtcctcacaccgtactatacataaaatta

SEQ ID NO: 702271 - DNA, 120 bp, Artificial Sequence
  ENSG00000196247_17 (sequence is synthesized)
ggagagaaaccctacaaatgtgaagaacatggcaaagtttttaaccagtcctcaaaccttactacacaaaagataattcatactggagagaacctctacaaatttgaagaacatggaaaa

SEQ ID NO: 702272 - DNA, 120 bp, Artificial Sequence
  ENSG00000196247_18 (sequence is synthesized)
atggaaaagcttttaacctattctcaaacattactaaccataagataatttatactggagagaaaccccacaaatgtgaagaatgtggaaaagcttataaccgattctcaaacctaacta

SEQ ID NO: 702273 - DNA, 120 bp, Artificial Sequence
  ENSG00000196247_19 (sequence is synthesized)
cctaactatacataagagaattcatacgggagagaaaccttaccaatgtgcagaatgtggcaaagcctttaactgctcctcaacccttaatagacataagataattcatactggagagaa

SEQ ID NO: 702274 - DNA, 85 bp, Artificial Sequence
  ENSG00000196247_20 (sequence is synthesized)
tgaagaatgtggcaaagcttttaaccaatcctcaaaccttactacacataagaaaattcatacttccctttaaccagttctcatc

SEQ ID NO: 702275 - DNA, 77 bp, Artificial Sequence
  ENSG00000196247_21 (sequence is synthesized)
catctcttaataagattatggcagagctttcaacctatcctcaaatcttactacacataagaaaattcatactggag

SEQ ID NO: 702276 - DNA, 120 bp, Artificial Sequence
  ENSG00000196247_22 (sequence is synthesized)
aaactacaaatgtgaagaatgtgttaaagcctttaacaagtcttcaactttttctgcacacacgaggtattttatactggtgagaaaccttacaatgtaaagaatgtggcacagctttta

SEQ ID NO: 702277 - DNA, 120 bp, Artificial Sequence
  ENSG00000196247_23 (sequence is synthesized)
actaatcttcaaaccttactgaaagttgagaaaattcgtactggagagaatcctacaaatgtgaaaaatgtggcaaatcctttaactgatcctcaacttttactaaacataaggtaattc

SEQ ID NO: 702278 - DNA, 120 bp, Artificial Sequence
  ENSG00000196247_24 (sequence is synthesized)
atactggagaaaagccatacaaatgagaagaatgtggcaatgcctttaatcagtcctcacacctttctacacataagataatttatactggagaggaactctatagttgtgaagaatgtg

SEQ ID NO: 702279 - DNA, 120 bp, Artificial Sequence
  ENSG00000196247_25 (sequence is synthesized)
gcaaagcttttaaccaatcctcataccttactatacagaaattcatactggagagaaagcctacaattgtgaagaatgtggcaaagcttttaaccttccttaacccttaactgtagataa

SEQ ID NO: 702280 - DNA, 120 bp, Artificial Sequence
  ENSG00000196247_26 (sequence is synthesized)
tggaaagaaaccctacaaatgtgaagtctgtggcaaagcttttaactgattctcaactcttactacatgtaagagtatttatactggaaagaaaccctacaaatgtaaaaaacgtggcaa

SEQ ID NO: 702281 - DNA, 120 bp, Artificial Sequence
  ENSG00000196247_27 (sequence is synthesized)
aaaacgtggcaatgcctttaactggtcctcacaccttgctacatataagacagtttatactttgagagaaaccctgcaaatgtgaataatgtggcaatactttaaaccaatcctcaaacc

SEQ ID NO: 702282 - DNA, 120 bp, Artificial Sequence
  ENSG00000196247_28 (sequence is synthesized)
tcactaaacataagataatactgaaaactttacaaacctgaatgatgtgacaataattttgacaacacctcgaactttctaacataaatcatactggtgaaaaatcctagaaatgtgaaa

SEQ ID NO: 702283 - DNA, 120 bp, Artificial Sequence
  ENSG00000196247_29 (sequence is synthesized)
aatatcacaaagcctttaaatggttgtcacacttgattgtaggtaagaatccatactgaagaaaactcctggaagtgtaaaaaatgtggcaacacttttaataaatgctcaccccttatt

SEQ ID NO: 702284 - DNA, 120 bp, Artificial Sequence
  ENSG00000196247_30 (sequence is synthesized)
gcacaggaaagcatttatacttcagaaagattgtacaaatacaaggaatgtggaaaagccattattatctgctcagattttactcaacattagagagttagtacgtaataaaagcattat

SEQ ID NO: 702285 - DNA, 120 bp, Artificial Sequence
  ENSG00000196247_31 (sequence is synthesized)
gtacgtaataaaagcattataaatgcaatttttgtcaagagatctttcagaaaatataagcctttaaagtgaagaagaggagccagttgtgctggctcacatctgtaatgccagcacttt

SEQ ID NO: 702286 - DNA, 120 bp, Artificial Sequence
  ENSG00000196247_32 (sequence is synthesized)
gccaacatagcaaaaccccatctctattaaaaattttacaaaaattagctgcgtgtggtggcaggcccctgtaatcccagctaattgggaggctgaagcaggagaattgctcaaacctgg

SEQ ID NO: 702287 - DNA, 120 bp, Artificial Sequence
  ENSG00000196247_33 (sequence is synthesized)
gaggctgaagcaggagaattgctcaaacctgggaggcgaagattgcagtgagctgaaatcacaccactacactccagccaaagcaacaagagcaaaaacttcgtctcaaaaacaaaacaa

SEQ ID NO: 702288 - DNA, 120 bp, Artificial Sequence
  ENSG00000196247_34 (sequence is synthesized)
aaaaagagtattcattgtgaggacaaacaatacaaatacgaagagggttgtagtacctttacttgtatcacagatacttttgtacccattttgcactagaggaaaaccatgaagcagttg

SEQ ID NO: 702289 - DNA, 120 bp, Artificial Sequence
  ENSG00000196247_35 (sequence is synthesized)
ctcaaatgttgttcaacaccagaaaatttatattggagaaaagcactgtaaatgtaatgcatttgtgaaaacattttttaaaaaactacagcttagaaaataccagaggcctcatactaa

SEQ ID NO: 702290 - DNA, 120 bp, Artificial Sequence
  ENSG00000196247_36 (sequence is synthesized)
aatatatttttgcaagtgaagtaaatataaaaataatttaatccaaaattaagtctatataaatatcagagaattcacagtagaaatatctaaggtactgacacttcagacattgctgag

SEQ ID NO: 702291 - DNA, 120 bp, Artificial Sequence
  ENSG00000196247_37 (sequence is synthesized)
ttgctgagtatagaatcagaatgctgagtatagaaaataatttaaaactaaagttggtaggtaaataatgtgtatataactttaaaagaagtagaatttttttgtagatgtataattaca

SEQ ID NO: 702292 - DNA, 120 bp, Artificial Sequence
  ENSG00000196247_38 (sequence is synthesized)
atattttttcttgaaaaattagtttttgaaaagcaaatgatgtaattcaactcaaattcatgctcttcattcctattgtattcacatgtgaaagcatgtgattaatttttcatgcatcaa

SEQ ID NO: 702293 - DNA, 120 bp, Artificial Sequence
  ENSG00000196247_39 (sequence is synthesized)
agatatgagaaatcatttctgttaggtcggtattatttatgacactttctatgaaagaataaggacattaaaatgtaagatgcatgatgaaaacctgagtgaagaggctgtttgtgttta

SEQ ID NO: 702294 - DNA, 120 bp, Artificial Sequence
  ENSG00000196247_40 (sequence is synthesized)
acttataatattgagtgatccatgaagtaggttttcagagcaatattcttctgcattatagtaagagaaaaccatttttaatcttagttaaaattaaagtgaattagtagtatatcattt

SEQ ID NO: 702295 - DNA, 120 bp, Artificial Sequence
  ENSG00000196247_41 (sequence is synthesized)
tactatttgtacttttatgtaataaaatgcaatgtgtttaaaaatttttggattatgcgtgaacttagttttttaattaaactttttttaacatgttaaaactattgtgcattcaatgaa

SEQ ID NO: 702296 - DNA, 120 bp, Artificial Sequence
  ENSG00000196247_42 (sequence is synthesized)
gtgttttcatgccactgactttacctatcccacattactcaagggtttaggtaaaagagggtaacagtatactacttgataacataatgggctaacatctctaataattatttttgctag

SEQ ID NO: 702297 - DNA, 120 bp, Artificial Sequence
  ENSG00000196247_43 (sequence is synthesized)
tgactttaaactgctaataaagaatattgttcccataggttagatttttattctttttaaaatttaaacttatttctcttaatttttgtggatacatagtatgtgtatatctttatgcca

SEQ ID NO: 702298 - DNA, 120 bp, Artificial Sequence
  ENSG00000196247_44 (sequence is synthesized)
tgtatggcatattttgatacaggcatataattttatgtattaatcacatcagggcaaaagatgtatccatcaactccagcatttctcctttgtattacaaaccaattctgcacttttaga

SEQ ID NO: 702299 - DNA, 120 bp, Artificial Sequence
  ENSG00000196247_45 (sequence is synthesized)
tactttagaatgtacagtcgttactacagggtcattttatggttataataaaaattatatacaagtataaataaaccatgagaaaattctgagttctgaataaacatttaaaaaatgtta

SEQ ID NO: 702300 - DNA, 120 bp, Artificial Sequence
  ENSG00000196247_46 (sequence is synthesized)
atattgggagatccacagctaagacgccgggactccctggaaacctagaaatgatggagtctcgctctgttgctcaggctgaagggcagtggtgcgatctcggctcactgaaacctccgc

SEQ ID NO: 702301 - DNA, 120 bp, Artificial Sequence
  ENSG00000196247_47 (sequence is synthesized)
attacaggcatgcaccaccatgcccagactgtgccataacacacatttgatgctgaaatccgggataggggaactcctttgggagtcgtgtcccttaaccccttcccccgacttcttgaa

SEQ ID NO: 702302 - DNA, 120 bp, Artificial Sequence
  ENSG00000196247_48 (sequence is synthesized)
ccttaaccccttcccccgacttcttgaagagacccacccgcgacctcggtacctcggaccagctctgtaaaagccccgcctctgccttcggataggtctggccccaccctggagtcttgc

SEQ ID NO: 702303 - DNA, 120 bp, Artificial Sequence
  ENSG00000196247_49 (sequence is synthesized)
tagaggcccagcctctgtgtccctgtgacctgcagatattgggagatccacagctaagacgccgggactccctggaaacctagaaatgactgtgccataacacacatttgatgctgaaat

SEQ ID NO: 702304 - DNA, 120 bp, Artificial Sequence
  ENSG00000196247_50 (sequence is synthesized)
catcttaaagcttccctttgagagtgttgctcttagaacttttcagatcttgttcagtgacctgctacagttatgtgagaggatccaggtgtaaatagaatctgatgacagattctgtaa

SEQ ID NO: 702305 - DNA, 120 bp, Artificial Sequence
  ENSG00000196247_51 (sequence is synthesized)
gcgtaaacaagcatcttaggggtgagagatgaaggccacaaagtatcgagagtcatgatcacaattatacctacccgtaaaatgtaatactggactagagtattttttctttccttttgc

SEQ ID NO: 702306 - DNA, 120 bp, Artificial Sequence
  ENSG00000196247_52 (sequence is synthesized)
ccaagagctagctaattaggacccgtaatctggagctccactgtggcagttccactttctatttagaatcagcctgagtctctcctgcctgccttatccttggccatcagcccagggtca

SEQ ID NO: 702307 - DNA, 120 bp, Artificial Sequence
  ENSG00000196247_53 (sequence is synthesized)
ctgggaactctctcacaatcacctaggcatctttgagatatttgaggatgtccagagcagaattgtgtcaggttgacaagagtggttaattctgcctctgtctcagtgtaagagaaatga

SEQ ID NO: 702308 - DNA, 120 bp, Artificial Sequence
  ENSG00000196247_54 (sequence is synthesized)
gacatcctgtgtttgctcctcccctcatacaagagatgtctttggttggtatccagttgagagtttcccagtttcctgatagttggatgaaaaacaaggaggaggtctggagactcaagc

SEQ ID NO: 702309 - DNA, 120 bp, Artificial Sequence
  ENSG00000196247_55 (sequence is synthesized)
agataaactaattgctaccatttcatatggcccttagaaaaatagataaagcagtcatggtccctaccatctaggaactgttagtctagactagcaactgaatacgtggttgaattaagc

SEQ ID NO: 702310 - DNA, 120 bp, Artificial Sequence
  ENSG00000196247_56 (sequence is synthesized)
atcatatggttggcaaagtgaatagatgtgtgggaaaacgtgtgggctttatttgggccactttctttatatcgttgtgacttctgaggtcatcatttgaatgaatgtttatgaccacaa

SEQ ID NO: 702311 - DNA, 120 bp, Artificial Sequence
  ENSG00000196247_57 (sequence is synthesized)
gagttttaaatatttttatttcttttactttgctaagaatacatatttatcttataataaaattaccctagaaaaccccaggagatttgtttaaatggctaattagtatatttacacagt

SEQ ID NO: 702312 - DNA, 120 bp, Artificial Sequence
  ENSG00000196247_58 (sequence is synthesized)
tgatgggttgagcagagtaatatatagggtttactcccagctgcagttctgttcagattcaccctttttggaggctttatttaggtctggccccaccctggagtcttgcctcacagaact

SEQ ID NO: 702313 - DNA, 120 bp, Artificial Sequence
  ENSG00000196247_59 (sequence is synthesized)
gattagaagagatcagagttttggctggtgcctttccggagtggttgctaacaattcccgaattccacaaggagataaatgggaaaaaaaggaaccactgacatttaaagatgtcgccat

SEQ ID NO: 702314 - DNA, 120 bp, Artificial Sequence
  ENSG00000196248_0 (sequence is synthesized)
gaccaaggtggtgtggcttgatggataatgacatctcaggaaagggatacagctatttattccattaatgtcagttttgttgcaaaggggatgactagccgctctgtgtgtgagaagatg

SEQ ID NO: 702315 - DNA, 120 bp, Artificial Sequence
  ENSG00000196248_1 (sequence is synthesized)
accatgacaacggagaaccccaaccagactgtggtgagccacttcttcctggagggtttgaggtacaccgctaaacattctagcctcttcttcctcctcttcctcctcatctacagcatc

SEQ ID NO: 702316 - DNA, 120 bp, Artificial Sequence
  ENSG00000196248_2 (sequence is synthesized)
actgtggctgggaatctcctcatcctcctaactgtgggctctgactctcacctcagcttacccatgtaccacttcctggggcacctctccttcctggatgcctgtttgtctacagtgaca

SEQ ID NO: 702317 - DNA, 120 bp, Artificial Sequence
  ENSG00000196248_3 (sequence is synthesized)
gtgcccaaggtcatggcaggcctgctgactctggatgggaaggtgatctcctttgagggctgtgccgtacagctttattgcttccactttctggccagcactgagtgcttcctgtacaca

SEQ ID NO: 702318 - DNA, 120 bp, Artificial Sequence
  ENSG00000196248_4 (sequence is synthesized)
gcactacccagtggccatgaacagaaggatgtgtgcagaaatggctggaatcacctgggccataggtgccacgcacgctgcaatccacacctccctcaccttccgcctgctctactgtgg

SEQ ID NO: 702319 - DNA, 120 bp, Artificial Sequence
  ENSG00000196248_5 (sequence is synthesized)
gccttgccacattgcctacttcttctgcgacataccccctgtcctaaagctcgcctgtacagacaccaccattaatgagctagtcatgcttgccagcattggcatcgtggctgcaggctg

SEQ ID NO: 702320 - DNA, 120 bp, Artificial Sequence
  ENSG00000196248_6 (sequence is synthesized)
cctcatcctcatcgttatttcctacatcttcatcgtggcagctgtgttgcgcatccgcacagcccagggccggcagcgggccttctccccctgcactgcccagctcactggggtgctcct

SEQ ID NO: 702321 - DNA, 120 bp, Artificial Sequence
  ENSG00000196248_7 (sequence is synthesized)
gtactacgtgccacctgtctgtatctacctgcagcctcgctccagtgaggcaggagctggggcccctgctgtcttctacacaatcgtaactccaatgctcaacccattcatttacacttt

SEQ ID NO: 702322 - DNA, 120 bp, Artificial Sequence
  ENSG00000196248_8 (sequence is synthesized)
gcggaacaaggaggtgaagcatgctctgcaaaggcttttgtgcagcagcttccgagagtctacagcaggcagcccacccccatagtctgtgctatcaaaactcacaatttgcctgccagg

SEQ ID NO: 702323 - DNA, 120 bp, Artificial Sequence
  ENSG00000196260_0 (sequence is synthesized)
gtagaaacaggcctgttaaggagaggccaccgggacttcagtgtctcctccatcccaggagcgcagtggccactatggggtctgggctgccccttgtcctcctcttgaccctccttggca

SEQ ID NO: 702324 - DNA, 120 bp, Artificial Sequence
  ENSG00000196260_1 (sequence is synthesized)
ctggaattgcttgaaaagctctgcctcctcctccatctcccttcagggaccagcgtcaccctccaccatgcaagatctcaacaccatgttgtctgcaacacatgacagccattgaagcct

SEQ ID NO: 702325 - DNA, 120 bp, Artificial Sequence
  ENSG00000196260_2 (sequence is synthesized)
gtgtccttcttggcccgggcttttgggccggggatgcaggaggcaggccccgaccctgtctttcagcaggcccccaccctcctgagcggcaataaataaaattcggtatgctgaattcaa

SEQ ID NO: 702326 - DNA, 120 bp, Artificial Sequence
  ENSG00000196260_3 (sequence is synthesized)
ccgaggtgtactccccgagggctgggggagcgcattccctcccgtcctactgattaactttcagcaaatggggatgcccaaaggagcagatagcgagtgacctgtggccctgctgtttga

SEQ ID NO: 702327 - DNA, 120 bp, Artificial Sequence
  ENSG00000196260_4 (sequence is synthesized)
ttctggatggagttacgtttaggagcctggcagcaaactggggcacctgttcaattagtgatgatgccatactctgtcccggaaatagaaattgtgagtccggttcctcatccaggaaag

SEQ ID NO: 702328 - DNA, 120 bp, Artificial Sequence
  ENSG00000196260_5 (sequence is synthesized)
gggcagagcatggaagagccagggctgggcgcctactccaagatcaccgtggggaagggatctggcccatgccaagattctgctgctccatcaggtagaccgggttgatttctgtggggc

SEQ ID NO: 702329 - DNA, 120 bp, Artificial Sequence
  ENSG00000196260_6 (sequence is synthesized)
aatcattctctcccatctgtccagcgtggatacctttctgtgagccatctttattgagggccgggtatgactttgcaactgaagctgaaggagtcttttctgacaaattcctcctatgag

SEQ ID NO: 702330 - DNA, 120 bp, Artificial Sequence
  ENSG00000196260_7 (sequence is synthesized)
cgcagtggccactatggggtctgggctgccccttgtcctcctcttgaccctccttggcagctcacatggaacaggtgagggctagagggcaggactcctgggtccctgtggcaagaagag

SEQ ID NO: 702331 - DNA, 120 bp, Artificial Sequence
  ENSG00000196260_8 (sequence is synthesized)
gccagagaaaaggggtgggacttcatggtccctgagagtgacagagacaccccagtcctgagcttccaagaggctctggaggggcattgctggggaagaggaactgtgccggggagcgtg

SEQ ID NO: 702332 - DNA, 120 bp, Artificial Sequence
  ENSG00000196262_0 (sequence is synthesized)
gttttgcagacgccaccgccgaggaaaaccgtgtactattagccatggtcaaccccaccgtgttcttcgacattgccgtcgacggcgagcccttgggccgcgtctcctttgagctgtttg

SEQ ID NO: 702333 - DNA, 69 bp, Artificial Sequence
  ENSG00000196262_1 (sequence is synthesized)
gacggcgagcccttgggccgcgtctcctttgagctgtttgcagacaaggtcccaaagacagcagaaaat

SEQ ID NO: 702334 - DNA, 74 bp, Artificial Sequence
  ENSG00000196262_2 (sequence is synthesized)
gggtggtgacttcacacggatgagaacttcatcctaaagcatacgggtcctggcatcttgtccatggcaaatgc

SEQ ID NO: 702335 - DNA, 70 bp, Artificial Sequence
  ENSG00000196262_3 (sequence is synthesized)
tgagtggttggatggcaagcatgtggtgtttggcaaagtgaaagaaggcatgaatattgtggaggccatg

SEQ ID NO: 702336 - DNA, 120 bp, Artificial Sequence
  ENSG00000196262_4 (sequence is synthesized)
gatcaccattgctgactgtggacaactcgaataagtttgacttgtgttttatcttaaccaccagatcattccttctgtagctcaggagagcacccctccaccccatttgctcgcagtatc

SEQ ID NO: 702337 - DNA, 86 bp, Artificial Sequence
  ENSG00000196262_5 (sequence is synthesized)
cttaaccaccagatcattccttctgtagctcaggagagcacccctccaccccatttgctcgcagtatcctagaatctttgtgctct

SEQ ID NO: 702338 - DNA, 120 bp, Artificial Sequence
  ENSG00000196262_6 (sequence is synthesized)
tgattatgaaataaaaactaaataacaattgtcctcgtttgagttaagagtgttgatgtaggctttattttaagcagtaatgggttacttctgaaacatcacttgtttgcttaattctac

SEQ ID NO: 702339 - DNA, 120 bp, Artificial Sequence
  ENSG00000196262_7 (sequence is synthesized)
acagtacttagattttttttactttccagtcccaggaagtgtcaatgtttgttgagtggaatattgaaaatgtaggcagcaactgggcatggtggctcactgtctgtaatgtattacctg

SEQ ID NO: 702340 - DNA, 120 bp, Artificial Sequence
  ENSG00000196262_8 (sequence is synthesized)
caagatcagcctgggcaacatagtgagacgctgtctctacaaaaaataattagcctggcctggtggtgcatgcctagtcctagctgatctggaggctgacgtgggaggattgcttgagcc

SEQ ID NO: 702341 - DNA, 120 bp, Artificial Sequence
  ENSG00000196262_9 (sequence is synthesized)
ttgtgtctcaaaggtaggcagaggcaggaaaagcaaggagccagaattaagaggttgggtcagtctgcagtgagttcatgcatttagaggtgttcttcaagatgactaatgtcaaaaatt

SEQ ID NO: 702342 - DNA, 76 bp, Artificial Sequence
  ENSG00000196262_10 (sequence is synthesized)
catttagaggtgttcttcaagatgactaatgtcaaaaattgagacatctgttgcggttttttttttttttttttcc

SEQ ID NO: 702343 - DNA, 90 bp, Artificial Sequence
  ENSG00000196262_11 (sequence is synthesized)
tttgtatttttagtatagatggggtttcatcattttgaccaggctggtctcaaactcttgacctcagctgatgcgcctgatgtgagccac

SEQ ID NO: 702344 - DNA, 120 bp, Artificial Sequence
  ENSG00000196262_12 (sequence is synthesized)
cttggcctcccaaactgctgagattacagatgtgagccaccgcaccctacctcattttctgtaacaaagctaagcttgaacactgttgatgttcttgagggaagcatattgggctttagg

SEQ ID NO: 702345 - DNA, 120 bp, Artificial Sequence
  ENSG00000196262_13 (sequence is synthesized)
ctgtaggtcaagtttatacatcttaattatggtggaattcctatgtagagtctaaaaagccaggtacttggtgctacagtcagtctccctgcagagggttaaggcgcagactacctgcag

SEQ ID NO: 702346 - DNA, 120 bp, Artificial Sequence
  ENSG00000196262_14 (sequence is synthesized)
tgaggaggtactgcttgtagcatatagagcctctccctagctttggttatggaggctttgaggttttgcaaacctgaccaatttaagccataagatctggtcaaagggatacccttccca

SEQ ID NO: 702347 - DNA, 120 bp, Artificial Sequence
  ENSG00000196262_15 (sequence is synthesized)
ctaaggacttggtttctcaggaaattatatgtacagtgcttgctggcagttagatgtcaggacaatctaagctgagaaaaccccttctctgcccaccttaacagacctctagggttctta

SEQ ID NO: 702348 - DNA, 120 bp, Artificial Sequence
  ENSG00000196262_16 (sequence is synthesized)
acccagcaatcaagtttgcctatcctagaggtggcggatttgatcatttggtgtgttgggcaatttttgttttactgtctggttccttctgcgtgaattaccaccaccaccacttgtgca

SEQ ID NO: 702349 - DNA, 120 bp, Artificial Sequence
  ENSG00000196262_17 (sequence is synthesized)
tctcagtcttgtgtgttgtctggttacgtattccctgggtgataccattcaatgtcttaatgtacttgtggctcagacctgagtgcaaggtggaaataaacatcaaacatcttttcatta

SEQ ID NO: 702350 - DNA, 120 bp, Artificial Sequence
  ENSG00000196262_18 (sequence is synthesized)
gttttgcagacgccaccgccgaggaaaaccgtgtactattagccatggtcaaccccaccgtgttcttcgacattgccgtcgacggcgagcccttgggccgcgtctcctttgaggtaaggg

SEQ ID NO: 702351 - DNA, 120 bp, Artificial Sequence
  ENSG00000196262_19 (sequence is synthesized)
taccatttcggttctatttaacccttctattcagtttgaacttgggtttaaagtttgaaccttgcagatttggcacacttcatggttatgttgtcagaagtgacatttttcctatatgtt

SEQ ID NO: 702352 - DNA, 120 bp, Artificial Sequence
  ENSG00000196262_20 (sequence is synthesized)
caccccaccccacctatgagtgtagtcaaagctggtaagtgacaagggctttcgtggaaacttggcctgacctaatgttgggcatcaggttacccaaagagcttcagggaaatgagaaag

SEQ ID NO: 702353 - DNA, 120 bp, Artificial Sequence
  ENSG00000196262_21 (sequence is synthesized)
gacttgcaggtcttgatgagaatggaggggtaactgccaatgagggctttggctttagcgaaagtctgaaagggaagccataggaacttaaacgtaccgactataaagctctgagaaaag

SEQ ID NO: 702354 - DNA, 120 bp, Artificial Sequence
  ENSG00000196262_22 (sequence is synthesized)
ctataaagctctgagaaaagctgatgttttagaaagaccatacattctaggtacaaatacctaaaaactaaaaaataagtacgttggccaggcgggcggatcacgaagtcaggagattga

SEQ ID NO: 702355 - DNA, 120 bp, Artificial Sequence
  ENSG00000196262_23 (sequence is synthesized)
tgccactgcactccagcctggtgacagtgagactcttgtctcaaaaaaaaaaaagtacattgctataagagaagtgcacacggatactagtagttaattcagtcacatctgtgaaatagc

SEQ ID NO: 702356 - DNA, 120 bp, Artificial Sequence
  ENSG00000196262_24 (sequence is synthesized)
acatctgtgaaatagcttataaaatgctacttttaaacaagctgtttttatgaaagggcttgtaaatgtttatggtatttaagctacctctctagccataacgtattatacattcaagaa

SEQ ID NO: 702357 - DNA, 120 bp, Artificial Sequence
  ENSG00000196262_25 (sequence is synthesized)
aggttcaaaaccagatatactagaaaccaatctttattttttaccccactactaggtaaggggcctggataccaagaagtgactgctcatctaatccataaagctatgttaacagattgg

SEQ ID NO: 702358 - DNA, 120 bp, Artificial Sequence
  ENSG00000196262_26 (sequence is synthesized)
aggtagtagcattttcattacaagtgactaaaagaacagctgtttacccctgatcgtgcagcagtgcttgctgttccttagaattttgccttgtaagttctagctcaagttggggggtgg

SEQ ID NO: 702359 - DNA, 120 bp, Artificial Sequence
  ENSG00000196262_27 (sequence is synthesized)
ttttggcatgtctttgggtttcatgtttcttaacccaactgcctgcagggccttatggctgtcaggagcagttcttgggaattaaagtaattactgaagaagtattctagtgagaaaatg

SEQ ID NO: 702360 - DNA, 120 bp, Artificial Sequence
  ENSG00000196262_28 (sequence is synthesized)
gttttgcagacgccaccgccgaggaaaaccgtgtactattagccatggtcaaccccaccgtgttcttcgacattgccgtcgacggcgagcccttgggccgcgtctcctttgagtgtgtct

SEQ ID NO: 702361 - DNA, 120 bp, Artificial Sequence
  ENSG00000196262_29 (sequence is synthesized)
ctatgcatggagtaagaaagaaaccatcctacaatagcaccaaatccagcatggatggctgtgttggtgcaggactttcacatgtctttggagtagaataagatgtgccaatccagactc

SEQ ID NO: 702362 - DNA, 120 bp, Artificial Sequence
  ENSG00000196262_30 (sequence is synthesized)
tcatcctccaccctgctactggacttgtctttgtactctcaaagcagtgtgaggagattcatcaaccggtggtgtggacatgtgaacagcgtgaggcagagagttataagcttcttgagg

SEQ ID NO: 702363 - DNA, 120 bp, Artificial Sequence
  ENSG00000196262_31 (sequence is synthesized)
gtggcagccagacagtagcagtttgtgtgcaaagcccctgcagtggcatatggaagactttcaatacatcaggaccagaggatgagctggaaatgaaatcacactcactggtgggagaaa

SEQ ID NO: 702364 - DNA, 120 bp, Artificial Sequence
  ENSG00000196262_32 (sequence is synthesized)
cacactaaccacctgactaaatgaaaagttgccctggggggaacggaacaaacactacttttcttcaacctttgcttccacagactttttcatccctaagatactagaagaagagcatac

SEQ ID NO: 702365 - DNA, 120 bp, Artificial Sequence
  ENSG00000196263_0 (sequence is synthesized)
ggggttccagcgtcgactcacggagtccttcggatgagagcgtctgggtgccagacgaggccggggccttgccctcccaagacactgttcttcaagagaaagaccagaagagaaggcaaa

SEQ ID NO: 702366 - DNA, 120 bp, Artificial Sequence
  ENSG00000196263_1 (sequence is synthesized)
aatgaatgttgaagtagtaaaagtcatgccccaggacttagtgacattcaaggatgtggcaatagatttttcccaggaagaatggcaatggatgaaccctgctcagaagcgtttatacag

SEQ ID NO: 702367 - DNA, 120 bp, Artificial Sequence
  ENSG00000196263_2 (sequence is synthesized)
gagtatgatgttggagaactatcagagcctggtatcacttggtctttgcatttctaagccatatgtgatctccttattggagcaagggagagagccttgggagatgacgagtgagatgac

SEQ ID NO: 702368 - DNA, 120 bp, Artificial Sequence
  ENSG00000196263_3 (sequence is synthesized)
aagaagcccattctcagattgggaatctatatatgtgacacaggaattacctctgaagcagttcatgtatgatgatgcatgcatggagggaattactagctatggacttgagtgttccac

SEQ ID NO: 702369 - DNA, 120 bp, Artificial Sequence
  ENSG00000196263_4 (sequence is synthesized)
ttttgaagaaaattggaaatgggaagacctttttgagaagcagatgggaagtcatgagatgtttagcaagaaagaaataatcactcataaagaaaccatcactaaggaaacagaattcaa

SEQ ID NO: 702370 - DNA, 120 bp, Artificial Sequence
  ENSG00000196263_5 (sequence is synthesized)
atatactaaatttgggaaatgtatccatctggaaaacatagaagagagtatttataatcacacatcagataaaaaaagcttctccaaaaattctatggtaataaaacacaagaaagtcta

SEQ ID NO: 702371 - DNA, 120 bp, Artificial Sequence
  ENSG00000196263_6 (sequence is synthesized)
tgtaggaaagaagctttttaaatgtaatgaatgtgacaaaaccttcacccatagctcatcccttactgttcattttagaattcatactggtgaaaaaccatatgcatgtgaggaatgtgg

SEQ ID NO: 702372 - DNA, 120 bp, Artificial Sequence
  ENSG00000196263_7 (sequence is synthesized)
aaaagccttcaagcaaaggcaacaccttgctcaacatcacagaacacatactggagagaaactctttgaatgtaaagaatgtaggaaagccttcaaacaaagtgaacaccttattcagca

SEQ ID NO: 702373 - DNA, 120 bp, Artificial Sequence
  ENSG00000196263_8 (sequence is synthesized)
tcaaagaattcatactggagaaaaaccatataaatgtaaggaatgcagaaaagccttcagacagcctgcacaccttgctcagcatcagagaattcatactggagagaaaccctatgaatg

SEQ ID NO: 702374 - DNA, 120 bp, Artificial Sequence
  ENSG00000196263_9 (sequence is synthesized)
taaagaatgtggcaaagccttcagtgatggctcgtcttttgctcgacatcagagatgtcacactggcaaaagaccctatgaatgtattgagtgtgggaaggcttttaggtataacacatc

SEQ ID NO: 702375 - DNA, 120 bp, Artificial Sequence
  ENSG00000196263_10 (sequence is synthesized)
ttttattcgtcactggaggagttatcatactggagagaagccttttaattgcattgattgtgggaaagccttcagtgttcacataggacttattctgcataggagaattcatacaggaga

SEQ ID NO: 702376 - DNA, 120 bp, Artificial Sequence
  ENSG00000196263_11 (sequence is synthesized)
gaaaccttacaaatgtggtgtgtgtggaaaaaccttcagctcgggttcatcccgtactgtacatcagagaattcatacaggagagaaaccttatgaatgtgatatatgtgggaaagattt

SEQ ID NO: 702377 - DNA, 120 bp, Artificial Sequence
  ENSG00000196263_12 (sequence is synthesized)
tagccatcatgcatcactcactcagcatcaaagagtacattctggagagaaaccgtatgaatgcaaggaatgtgggaaagcctttaggcagaatgtacaccttgttagtcatttgagaat

SEQ ID NO: 702378 - DNA, 120 bp, Artificial Sequence
  ENSG00000196263_13 (sequence is synthesized)
tcatactggtgaaaaaccctatgaatgtaaagaatgtggaaaagcttttagaatcagttcacagctggctactcatcagagaattcatactggagagaagccttatgaatgtattgaatg

SEQ ID NO: 702379 - DNA, 120 bp, Artificial Sequence
  ENSG00000196263_14 (sequence is synthesized)
tggaaatgctttcaaacagagatcacaccttgcccaacatcagaaaactcatacaggagagaaaccttatgagtgtaatgaatgcgggaaagccttcagccaaacttccaatcttactca

SEQ ID NO: 702380 - DNA, 120 bp, Artificial Sequence
  ENSG00000196263_15 (sequence is synthesized)
acatcaaagaattcatactggagagaaaccctataaatgtactgaatgtggaaaggcttttagtgatagctcatcctgtgctcagcatcaaagactccacactggccaaaggccctatca

SEQ ID NO: 702381 - DNA, 120 bp, Artificial Sequence
  ENSG00000196263_16 (sequence is synthesized)
gtgttttgaatgtgggaaggcgttcagaagaaagttatccttaatttgtcatcaaagaagtcatactggagaagaaccttaagaatgtagtgcatgtggccaagcctttagttatcacca

SEQ ID NO: 702382 - DNA, 120 bp, Artificial Sequence
  ENSG00000196263_17 (sequence is synthesized)
tagttatcaccaatcccctactgttaatcagagatgtcccactggataaaaaacatataaatgtaagaaatgtagaaaaaccttcagccaggaggctggcaagatggccgaataggaaca

SEQ ID NO: 702383 - DNA, 80 bp, Artificial Sequence
  ENSG00000196263_18 (sequence is synthesized)
aagatggccgaataggaacagctctgatctgcagttcccagtgagatcaacgcagaaggtgggtgctttctgtatttcca

SEQ ID NO: 702384 - DNA, 64 bp, Artificial Sequence
  ENSG00000196263_19 (sequence is synthesized)
gagggtgagctgaagcagggtggggcgtaacctcacctgggaagtgcaaggagtcggggactcc

SEQ ID NO: 702385 - DNA, 120 bp, Artificial Sequence
  ENSG00000196263_20 (sequence is synthesized)
aggaatggtgcactccggcacagatactacgcttttcccatggtcttcgcaacccacagaccaggagatcccccttgggtgcctatgccaccaaggccctgggtttcaagcacaaaactg

SEQ ID NO: 702386 - DNA, 120 bp, Artificial Sequence
  ENSG00000196263_21 (sequence is synthesized)
taggagtttttttgatagcccagtggcacctggaatgccagtgaaacagaaccgcttactcccttgttaagggggctgaagccggggagccaagtggttcccatgcccactgagcccagc

SEQ ID NO: 702387 - DNA, 120 bp, Artificial Sequence
  ENSG00000196263_22 (sequence is synthesized)
aagctaagatccactggcttggaattctccctgccagcacagcagtctgaagtcaacctgggatgatcaagcttggtggggggaggggcgccaaccattaccaaagcttgaataggtggt

SEQ ID NO: 702388 - DNA, 120 bp, Artificial Sequence
  ENSG00000196263_23 (sequence is synthesized)
aaccattaccaaagcttgaataggtggttttcccctcacagcgtaaacaaagccatggggaagttccagctgagcagagccctccacagctcagcaaagcctctgtagccagactgcctc

SEQ ID NO: 702389 - DNA, 120 bp, Artificial Sequence
  ENSG00000196263_24 (sequence is synthesized)
tctagattcctcctctctgggcagcgcatctttgaaaaaagtgcagataaaaccctcatctccctgggacaaagcacgtgggggaaaggggtggctgtgggcacagcttcagcagactta

SEQ ID NO: 702390 - DNA, 120 bp, Artificial Sequence
  ENSG00000196263_25 (sequence is synthesized)
caaactccagcagacctgcagccgaggggcctcactgttagaaggaaaactaacaggaatataatcaacatcaacaaaggacatccacacagaaaccccatctgaaggttaccagcatca

SEQ ID NO: 702391 - DNA, 90 bp, Artificial Sequence
  ENSG00000196263_26 (sequence is synthesized)
acatccacacagaaaccccatctgaaggtttcacgaagatgaggagaaaccagtgcaaaaagcctgaaaattccaaaaaccagaatgcct

SEQ ID NO: 702392 - DNA, 72 bp, Artificial Sequence
  ENSG00000196263_27 (sequence is synthesized)
tcctccaaaggatcacaactccttgccggcaagggaacaaaactggaaaataacaaactcctctgagctaaa

SEQ ID NO: 702393 - DNA, 120 bp, Artificial Sequence
  ENSG00000196263_28 (sequence is synthesized)
cttcagccagattgaatgctttacagggaagaattcatactgcagagcggtcttaacaatgtaaagaatgtgcaaatgtcctcagacaagatgcacaccttgctcattagtgagttcatt

SEQ ID NO: 702394 - DNA, 120 bp, Artificial Sequence
  ENSG00000196263_29 (sequence is synthesized)
tcaggcagccagctcttcctcacccactacatcaccaagtcctgtggatatatctgctaaatatttttggaatttatccacttcttttggttccccagtccaaaacacagtcatttcacc

SEQ ID NO: 702395 - DNA, 120 bp, Artificial Sequence
  ENSG00000196263_30 (sequence is synthesized)
tggactatttcaatcattacacaggtgtccaaccttttgtcttccctgggccacattggaagaagaaaaattgtcttgtgccacacatacaatacactaacattaacaatagctgatgag

SEQ ID NO: 702396 - DNA, 120 bp, Artificial Sequence
  ENSG00000196263_31 (sequence is synthesized)
ctaagaaaaaaaaaaagtctgtgcatagttttagtgatacaccacctccgataagcaaaaaagtcctcacattcaatgggttgcatacccatgaattctaaaacttcatcctcttttgtc

SEQ ID NO: 702397 - DNA, 120 bp, Artificial Sequence
  ENSG00000196263_32 (sequence is synthesized)
cctttcgagttaacattacagccacagtgacctttcaaaaatgcaaattaagttactcttaaaactctagttaaaatacttgatgtacataaagtgcttagcaaaatgaccaactcatac

SEQ ID NO: 702398 - DNA, 120 bp, Artificial Sequence
  ENSG00000196263_33 (sequence is synthesized)
taagtgcttagtaaatgttagataagtattctccagaattgatgtaaattatttttaaacagtgcattcttgaaagcagtatggcagtcataaaaattttggaaccaaaacagtatcttt

SEQ ID NO: 702399 - DNA, 120 bp, Artificial Sequence
  ENSG00000196263_34 (sequence is synthesized)
ttttaagctaaaaaaaaagttttaaatggtgtctttctatgttgcccagggtggtctcaaactcctgtgctcaagtgaccctcccacctcattctcaagtggctgcaattacaggcaacc

SEQ ID NO: 702400 - DNA, 120 bp, Artificial Sequence
  ENSG00000196263_35 (sequence is synthesized)
agcctgacttaaaacagtatcttaaggtagatggtgattagcacatgtagtatgcttaacatttaatattataataagacatcacagcggctgtctcatgattaaggctgtgttcccttg

SEQ ID NO: 702401 - DNA, 120 bp, Artificial Sequence
  ENSG00000196263_36 (sequence is synthesized)
ttggtgaggaaattaattatgacttgataaatagaacatgttttaagaagtggctatatagctctggataaaacgaacaaaagaattagaattcctgcggggaatatatacaagacttta

SEQ ID NO: 702402 - DNA, 120 bp, Artificial Sequence
  ENSG00000196263_37 (sequence is synthesized)
tttagtcaagtaaaaaaaaatcactaatgtttaactgaagaaagagaaattgaataatatagttctatttcaacatgtgggttcacagatttattctaaccttccaagtaaagttgttcc

SEQ ID NO: 702403 - DNA, 120 bp, Artificial Sequence
  ENSG00000196263_38 (sequence is synthesized)
actagtaaagttgttctggagtatattttttttaaaaaaaacacttaaaatgttccacttctttcatgaggctaagtcaactctgatatcaaaccaaggggaaagaaatgaaattatagg

SEQ ID NO: 702404 - DNA, 120 bp, Artificial Sequence
  ENSG00000196263_39 (sequence is synthesized)
tgagtttacttagttatatacaaaaggaaattattagcctctgctgatggagaacagaggctgtgaataaatggagatccataacatgatcctacatgaatgtttcaatattgtaatcct

SEQ ID NO: 702405 - DNA, 120 bp, Artificial Sequence
  ENSG00000196263_40 (sequence is synthesized)
gtaagttacttttacattgacagttctgaaattcatgttgagtgttaattaggcaggaatcagaagggaggttttgtagaaggtcgtatccatgggttttttatatttgaaaagtgtttt

SEQ ID NO: 702406 - DNA, 120 bp, Artificial Sequence
  ENSG00000196263_41 (sequence is synthesized)
cgatgtatcattgggggagattaaatgtctttgacagttgtccaactagaaataaagtcagcatcccatttgactccttacacagaagttcattctatactcattacagatgtaagaggt

SEQ ID NO: 702407 - DNA, 120 bp, Artificial Sequence
  ENSG00000196263_42 (sequence is synthesized)
taagatggtagaggagaatgtagagtatttctgtgcctttaggttcaggaggtctttgataagcaggacaaggtccagaagccatgaagagagaatgacaggactgtgtagaagatttaa

SEQ ID NO: 702408 - DNA, 120 bp, Artificial Sequence
  ENSG00000196263_43 (sequence is synthesized)
acctttttcatggcgtaagatactgtatgcaaagttaaaaggcatatgacaggctgagagatatcttaaacatacattagaaaggatatagcccttgaaaaagggctgttggaaagcagc

SEQ ID NO: 702409 - DNA, 120 bp, Artificial Sequence
  ENSG00000196263_44 (sequence is synthesized)
aaggataaggtgcacagtcttgcagagcatgtcaacaaaatttattggatgaagaaattaaaatggttaaatagaagaagttctcaacctcactaatgatcagataagtgcagattgtaa

SEQ ID NO: 702410 - DNA, 120 bp, Artificial Sequence
  ENSG00000196263_45 (sequence is synthesized)
aagtcctcatccccaccaacacaaaccagcagaaattttatgtgaatgtgaagtttggataatatccagtattgtcgcaggtgtgagaaaccgtattttcaaatattgagagggtaaatt

SEQ ID NO: 702411 - DNA, 120 bp, Artificial Sequence
  ENSG00000196263_46 (sequence is synthesized)
agaggaaagccattttagagggcaatgtggtgttacctgtcagcattttgaatataattaccctttgccacaattctacacctagtcagttatgttctcaaaaagcacaagtgcagaaat

SEQ ID NO: 702412 - DNA, 120 bp, Artificial Sequence
  ENSG00000196263_47 (sequence is synthesized)
atagatgcataagcaaatgtgttgcagaattgtgaaaaatttggaaaaaatgtttagtgctattaaagttatgggttacttaagttacagaaaatcagtttagtagatcactgtgtagtt

SEQ ID NO: 702413 - DNA, 120 bp, Artificial Sequence
  ENSG00000196263_48 (sequence is synthesized)
acggaaaatgagatggatctctactcaaagatgtcttgcagtttatgaactgagatgtaacttcatgactaacatgatgacatcgttattaactacataaactttataaagcttaaaaaa

SEQ ID NO: 702414 - DNA, 120 bp, Artificial Sequence
  ENSG00000196263_49 (sequence is synthesized)
tggactggtaggttgtgagagggtgtatcacagtatgaaaaagattggagtgagagtgaccagtatgtattttgtgtgcatgagataaagcagttggaatatgagagatcagagtgtgtt

SEQ ID NO: 702415 - DNA, 120 bp, Artificial Sequence
  ENSG00000196263_50 (sequence is synthesized)
tgtgtatctgtgtgagacactggagcatttgagtaactgaggcctctttgaaagataccattgaatgtgtatgtatgagagaccatcatgtttatattgtaatgaatgcgggaaagcctt

SEQ ID NO: 702416 - DNA, 120 bp, Artificial Sequence
  ENSG00000196263_51 (sequence is synthesized)
cctccgtgtgaccatgaaacctgtgttagtgtttgtatgtcaccctgtatacccataattgtggccctgtatgactgctgtgtatggagagactacttggaagattgataggattggatt

SEQ ID NO: 702417 - DNA, 120 bp, Artificial Sequence
  ENSG00000196263_52 (sequence is synthesized)
ctttatgagtgtggctgtttggaattgtgtgttgccgggataggaaatgtggaatagaattcctgtccccagtccaagggtttcagtaagaagcaaagctggggtgactgaagctcctaa

SEQ ID NO: 702418 - DNA, 120 bp, Artificial Sequence
  ENSG00000196267_0 (sequence is synthesized)
agcgctgcgcgtcagtttccgtctacctggactaaacatttgcttcgccccgtctgcctgaatcgaacgtgcacttggcagtcttcccttgtccatacccgtttcctggggatcgctacg

SEQ ID NO: 702419 - DNA, 120 bp, Artificial Sequence
  ENSG00000196267_1 (sequence is synthesized)
gggatcgctacggaccttaaaataccagcaacagccccttcgccccaagtaaggtcttgctctgtcagactagagtacagtgccatgatctccgctcactgcagcctcaacctcctgggc

SEQ ID NO: 702420 - DNA, 120 bp, Artificial Sequence
  ENSG00000196267_2 (sequence is synthesized)
tctgcctcagagtgctgggattacagacgggagccaccacgccaggcctacgagatttgacttgtaaagaattaattatattgactgagagagaagcccagaagaggaagaagaggaaag

SEQ ID NO: 702421 - DNA, 120 bp, Artificial Sequence
  ENSG00000196267_3 (sequence is synthesized)
ttgactgagagagaagcccagaagaggaagaagaggaaagaaaaggagtcagggatggctcttacacagggacctttgacattcagggatgtagccatagaattctctcaggaggagtgg

SEQ ID NO: 702422 - DNA, 120 bp, Artificial Sequence
  ENSG00000196267_4 (sequence is synthesized)
tgatgttggagaactacaggaacctggtcttcctgggtatccttcctaaatgtatgaccaaggaattaccaccaatagggaacagtaatacaggagaaaaatgccaaacagtgacgctgg

SEQ ID NO: 702423 - DNA, 120 bp, Artificial Sequence
  ENSG00000196267_5 (sequence is synthesized)
aaagacatgaatgttatgatgttgaaaatttttacttaagggaaatccagaaaaatctacaggaccttgagtttcaatggaaagatggtgaaataaattataaagaagtgccaatgacct

SEQ ID NO: 702424 - DNA, 120 bp, Artificial Sequence
  ENSG00000196267_6 (sequence is synthesized)
ataaaaacaatcttaatggtaaaagaggtcaacatagtcaagaggatgtagaaaacaaatgtattgaaaatcagcttacattaagctttcagtcacgtctgactgaactgcagaaatttc

SEQ ID NO: 702425 - DNA, 120 bp, Artificial Sequence
  ENSG00000196267_7 (sequence is synthesized)
aaactgaagggaaaatttatgagtgtaaccaatctgagaagacagttaataacagttccctagtttcaccacttcaaagaattcttcctagtgtccaaaccaacatttctaaaaaatatg

SEQ ID NO: 702426 - DNA, 120 bp, Artificial Sequence
  ENSG00000196267_8 (sequence is synthesized)
agaatgagtttttgcagctgtcattacccacccaacttgagaaaacacacattagggaaaaaccttatatgtgtaaagggtgtggcaaagcctttagagtgtcttcaagtcttattaacc

SEQ ID NO: 702427 - DNA, 120 bp, Artificial Sequence
  ENSG00000196267_9 (sequence is synthesized)
atcagatggtacatactacagagaaaccttacaaatgcaatgaatgtggcaaagcctttcatcggggctcactactaactatacatcagatagtccatacaagggggaagccatatcaat

SEQ ID NO: 702428 - DNA, 120 bp, Artificial Sequence
  ENSG00000196267_10 (sequence is synthesized)
gtggtgtatgtggcaagatcttcagacaaaattcagatcttgtaaatcaccggagaagtcacactggagagaaaccgtacaaatgtaatgaatgtggcaagtcctttagtcaaagttata

SEQ ID NO: 702429 - DNA, 120 bp, Artificial Sequence
  ENSG00000196267_11 (sequence is synthesized)
gagaaaccttacaaatgtaatgagtgtgggaaaaccttcaaacaaggctcatgcctcactacacatcagataatccatacaggagagaaaccatatcaatgtgatatatgtggcaaggtc

SEQ ID NO: 702430 - DNA, 120 bp, Artificial Sequence
  ENSG00000196267_12 (sequence is synthesized)
aaccatatcaatgtgatatatgtggcaaggtcttcaggcagaattctaatcttgtaaatcaccagagaatccacactggagagaaaccatacaaatgcaacatatgtggaaagtccttta

SEQ ID NO: 702431 - DNA, 120 bp, Artificial Sequence
  ENSG00000196267_13 (sequence is synthesized)
agctccagcctcactacacatcagataatccatacaggagagaaaccatatacatgtgatgtatgcgacaaggtcttcagtcaacgttcacaacttgcaaggcaccagagaagtcatact

SEQ ID NO: 702432 - DNA, 120 bp, Artificial Sequence
  ENSG00000196267_14 (sequence is synthesized)
gcaaggcaccagagaagtcatactggagagaaaccttacaaatgcaatgaatgtggcaaggtcttcagtcagacttcacatcttgtggggcatcggagaattcatactggagagaaacct

SEQ ID NO: 702433 - DNA, 120 bp, Artificial Sequence
  ENSG00000196267_15 (sequence is synthesized)
gcctttaaacagggctcattactcactcgacataagataattcataccagagagaaacgttaccaatgcggtgaatgtggaaaggtctttagtgaaaattcatgccttgtaagacattta

SEQ ID NO: 702434 - DNA, 120 bp, Artificial Sequence
  ENSG00000196267_16 (sequence is synthesized)
agaattcatactggggagcaaccttacaaatgtaatgtgtgtggcaaggtcttcaattacagtggaaacctttcaattcataagagaatacatacgggagagaaacctttccaatgtaat

SEQ ID NO: 702435 - DNA, 120 bp, Artificial Sequence
  ENSG00000196267_17 (sequence is synthesized)
gaatgtggcacagtcttcaggaactactcatgcctagcacgtcatctaagaattcatactgggcagaaaccttacaaatgtaatgtgtgtggcaaggtcttcaatgacagtggaaacctt

SEQ ID NO: 702436 - DNA, 120 bp, Artificial Sequence
  ENSG00000196267_18 (sequence is synthesized)
tcaaatcataagagaattcatactggagagaagccgtttcaatgtaacgaatgcggcaaggttttcagttactactcatgcctagcacgtcatcggaaaattcataccggagagaaacct

SEQ ID NO: 702437 - DNA, 120 bp, Artificial Sequence
  ENSG00000196267_19 (sequence is synthesized)
gtcatcggaaaattcataccggagagaaaccttacaaatgtaatgattgtggcaaagcctatactcagcgttcaagcctcactaaacatctgataattcatactggagagaaaccttaca

SEQ ID NO: 702438 - DNA, 120 bp, Artificial Sequence
  ENSG00000196267_20 (sequence is synthesized)
agttcaaaacttgcaagatatcacagaaatcctactggggagaaaccacacaaatgtagccattgtggtagaacttttagtcatataacaggcctgacgtaccatcagagaaggcatact

SEQ ID NO: 702439 - DNA, 120 bp, Artificial Sequence
  ENSG00000196267_21 (sequence is synthesized)
acgtaccatcagagaaggcatactggagagatgccatacaaatgtattgaatgtggccaggtctttaattccacttcgaaccttgcaaggcatcggagaattcacactggagagaaacct

SEQ ID NO: 702440 - DNA, 120 bp, Artificial Sequence
  ENSG00000196267_22 (sequence is synthesized)
gtctttcgtcatcaatcaacactagcacgtcatcggagtattcatactggagagaaaccttacgtgtgtaatgagtgtggcaaagcctttagagtgcgttcaattctggttaatcatcag

SEQ ID NO: 702441 - DNA, 120 bp, Artificial Sequence
  ENSG00000196267_23 (sequence is synthesized)
aaaatgcatactggggacaaaccttacaaatgtaatgaatgtggtaaagcttttattgaaaggtcaaagctggtgtaccatcaaagaaatcacactggagagaagccatacaaatgtatt

SEQ ID NO: 702442 - DNA, 120 bp, Artificial Sequence
  ENSG00000196267_24 (sequence is synthesized)
gaatgtggcaaggcctttgggcggttttcttgcctcaacaaacaccaaatgattcattctggagaaaaaccttataaatgtaatgagtgtggcaaatctttcattagtcgctcaggcctc

SEQ ID NO: 702443 - DNA, 120 bp, Artificial Sequence
  ENSG00000196267_25 (sequence is synthesized)
actaaacatcagacaaaacatactgcagagagtcttaaaacaaaattcaatgtggaaaagcctttagatgttctcctaacttctgggttcaaataattcatacttattgatatagcttgt

SEQ ID NO: 702444 - DNA, 120 bp, Artificial Sequence
  ENSG00000196267_26 (sequence is synthesized)
ctttaccacagatgtctgaagtttcctccaggttgggcagtttaaagagtgagtgcctcttttaggatggcataccacaaaagcaaaaataaataaatgttttcctttatctttttctgg

SEQ ID NO: 702445 - DNA, 120 bp, Artificial Sequence
  ENSG00000196267_27 (sequence is synthesized)
aaacatcagacaaaacatactgcagagagtcttaaaacaaaattcaatgtggaaaagcctttagatgttctcctaacttctgggttcaaataattcatacttattgatatagcttgtata

SEQ ID NO: 702446 - DNA, 120 bp, Artificial Sequence
  ENSG00000196267_28 (sequence is synthesized)
tttgtcacttccgtctgaaatctcatgtggaattttaatcccctttattggaggtggggcctggtgggagatgattggatcacaggggtggatttctcaagaatggtttagcaccacccg

SEQ ID NO: 702447 - DNA, 90 bp, Artificial Sequence
  ENSG00000196267_29 (sequence is synthesized)
tttctcaagaatggtttagcaccacccgctttttgctcttcttgggatagtgagttctggtgagatcttgtttttttgtttgttttgcag

SEQ ID NO: 702448 - DNA, 120 bp, Artificial Sequence
  ENSG00000196267_30 (sequence is synthesized)
aaaaaaaaaaaaaaaaaaaagtgtatggaactttcctctctcttgctcctattcttgccatgtgacatgcccactcccctttttccttccaccatgattttaacattcctgaggcttcct

SEQ ID NO: 702449 - DNA, 120 bp, Artificial Sequence
  ENSG00000196267_31 (sequence is synthesized)
gcccactcccctttttccttccaccatgattttaacattcctgaggcttcctcggaaggtgagcagatgccagcaccatgtttcctgtaaagcctgcagaactgtgagtcaattaaactt

SEQ ID NO: 702450 - DNA, 120 bp, Artificial Sequence
  ENSG00000196267_32 (sequence is synthesized)
agggttcccaaatctggccagtctttctgccctttcccttgcgggtcgcaccccgcccaggcccctctcccgccccaggtctctcagtcttttttctcagggcgtgtagcttcctgcaca

SEQ ID NO: 702451 - DNA, 120 bp, Artificial Sequence
  ENSG00000196267_33 (sequence is synthesized)
ttaagatctgccctcgtgtatttttgtattttctctgttgtctttcttgggagcccttccattatttgactgagactgaagccttgttgactcacaaataaaaagcttcataatgctgca

SEQ ID NO: 702452 - DNA, 120 bp, Artificial Sequence
  ENSG00000196268_0 (sequence is synthesized)
ggccattgtttctctctgctgccggagctccaggtctacccttcactgctctgtgtcctcagcgtgtgtggcttcgtgacctgaagatactgggaaatccatagctaagatgccaggacc

SEQ ID NO: 702453 - DNA, 87 bp, Artificial Sequence
  ENSG00000196268_1 (sequence is synthesized)
tgcctggacactgctcagcaggatttgtataggaaagtgatgttagagaactacagaaacctggtcttcttgggtattgctgtctct

SEQ ID NO: 702454 - DNA, 120 bp, Artificial Sequence
  ENSG00000196268_2 (sequence is synthesized)
gaactacagaaacctggtcttcttgggtattgctgtctctaagccagatctggtcacctgtctggagcaaggaaaagatccctggaatatgaagggacacagtacggtagtcaaaccccc

SEQ ID NO: 702455 - DNA, 120 bp, Artificial Sequence
  ENSG00000196268_3 (sequence is synthesized)
agttatatgttctcattttgctgaagacttttgcccagggccaggcattaaagattcttttcaaaaagtgatactgagagaatatgtaaaatgtggacataaggatttacagttaagaaa

SEQ ID NO: 702456 - DNA, 120 bp, Artificial Sequence
  ENSG00000196268_4 (sequence is synthesized)
aggatgtaaaagtatgaatgagtgtaatgtgcacaaagaaggttataatgaactaaaccagtatttgacaactacccagagcaaaatatttcaatgtgataaatatgtgaaagtctttca

SEQ ID NO: 702457 - DNA, 120 bp, Artificial Sequence
  ENSG00000196268_5 (sequence is synthesized)
taaacttttaaattcaaatagacataacacaaaacatactggaaagaaacctttcaaatgtaaaaaatgtggcaaatcattttgcatgcttttacacctatgtcagcataaaagaattca

SEQ ID NO: 702458 - DNA, 120 bp, Artificial Sequence
  ENSG00000196268_6 (sequence is synthesized)
tattagagagaattcttaccgatgtgaagaatgtggcaaagcctttatctggttttcaacccttactagacacaggagagttcatactggagagaaatcctacaaatatgaatgtggcaa

SEQ ID NO: 702459 - DNA, 90 bp, Artificial Sequence
  ENSG00000196268_7 (sequence is synthesized)
attcatactggaccatctttctaccaattctcataccttactaggcataagctaattcatactagagagaaaccctataaatgtgaacaa

SEQ ID NO: 702460 - DNA, 120 bp, Artificial Sequence
  ENSG00000196268_8 (sequence is synthesized)
gctaattcatactagagagaaaccctataaatgtgaacaatatggcaaaacttttaaccaatcttcaacccttactggacataagataattcataatggagaaaaaccctataaatgtga

SEQ ID NO: 702461 - DNA, 120 bp, Artificial Sequence
  ENSG00000196268_9 (sequence is synthesized)
agaatgtggcaaagcctttagtattttctcaacccctactaaacataagataattcacactgaagagaaatcccacagatgtgaagaatattgcaaagcttataaggagtcctcacacct

SEQ ID NO: 702462 - DNA, 120 bp, Artificial Sequence
  ENSG00000196268_10 (sequence is synthesized)
aaatgtgaagaatgtggcaaagcctttagtattttctcaacccttactaaacataagataattcacactgaagagaaatcccacagatgtgaagaatgtggcaaagcttataaggagtct

SEQ ID NO: 702463 - DNA, 120 bp, Artificial Sequence
  ENSG00000196268_11 (sequence is synthesized)
cccttactaaacataagataattcacactgaagagaaatcccacagatgtgaagaatgtggcaaagcttataaggagtcttcacaccttactacacataaaagaattcatactggagaga

SEQ ID NO: 702464 - DNA, 74 bp, Artificial Sequence
  ENSG00000196268_12 (sequence is synthesized)
ctacaaatgtgaagaatgtggcaaaacctttagtgtattctcaattcttactaaacataaaataattcatacag

SEQ ID NO: 702465 - DNA, 64 bp, Artificial Sequence
  ENSG00000196268_13 (sequence is synthesized)
gtgaagaatgtggcaaagcttttaaccaatcttcaacccttagtatacataaaatgatcttcaa

SEQ ID NO: 702466 - DNA, 72 bp, Artificial Sequence
  ENSG00000196268_14 (sequence is synthesized)
gtgaagaatgtggcaaagcttttaaacgatcttcaacccttactatacataaaatgattcaccggtcctcac

SEQ ID NO: 702467 - DNA, 90 bp, Artificial Sequence
  ENSG00000196268_15 (sequence is synthesized)
atactggacactcctttagtgtattctcaacccttactaaacacaagataattcatactgataagaaaccctacaaatgtgaagaatgtg

SEQ ID NO: 702468 - DNA, 75 bp, Artificial Sequence
  ENSG00000196268_16 (sequence is synthesized)
acaagataattcatactgaatcttcaatccttagtatacataagaaaattcatactggagaaaaaccctacaaat

SEQ ID NO: 702469 - DNA, 81 bp, Artificial Sequence
  ENSG00000196268_17 (sequence is synthesized)
gtgaagaatgtggcaaagcttttaagcggtcctcacacctcgctgggcacaagcaaattcatagtgtacatatattctcaa

SEQ ID NO: 702470 - DNA, 88 bp, Artificial Sequence
  ENSG00000196268_18 (sequence is synthesized)
atactgaagagaaaccctacaaatgtgaaaaatgtggcaaaactttctaccgattctcaaaccttaatacgcaaatgtgaagaatgtg

SEQ ID NO: 702471 - DNA, 120 bp, Artificial Sequence
  ENSG00000196268_19 (sequence is synthesized)
ttcctcaaaccttattaaacataagctaattcatactggagacaaaccctacaaatgtgaagcatgtggcaaagcttttaggcggtcttcacatcttagtagacataagataattcatat

SEQ ID NO: 702472 - DNA, 88 bp, Artificial Sequence
  ENSG00000196268_20 (sequence is synthesized)
tttctattgattctcataccttactaaatataagataattcatattggagagaaattctacagatgtgaagaatgtggcaaaggcttt

SEQ ID NO: 702473 - DNA, 120 bp, Artificial Sequence
  ENSG00000196268_21 (sequence is synthesized)
agagaaattctacagatgtgaagaatgtggcaaaggctttaattagttctcatcccttactaaacataagagaattcataccatagagaaatcctacaaatatgaagaatgtgacaaagc

SEQ ID NO: 702474 - DNA, 120 bp, Artificial Sequence
  ENSG00000196268_22 (sequence is synthesized)
ttttaaccacttctcaaccctgcctacacgtaagataattcatactggaaggaaaccctacaaatatgaggaatgtctcaaagctttttactgattcttataccttactaaacataaaat

SEQ ID NO: 702475 - DNA, 89 bp, Artificial Sequence
  ENSG00000196268_23 (sequence is synthesized)
ggcaaagcttttaacaaatcctcatccattagacctacaaatgtgaggaatgtggcaaagcctttagcctgtccctccaatttactgca

SEQ ID NO: 702476 - DNA, 120 bp, Artificial Sequence
  ENSG00000196268_24 (sequence is synthesized)
atgtggcaaagcctttagcctgtccctccaatttactgcacataagataatttatactggagagaagccctacaaatgtgaaaaatgtggcaaaccttttaaccaatcctcaacccttac

SEQ ID NO: 702477 - DNA, 120 bp, Artificial Sequence
  ENSG00000196268_25 (sequence is synthesized)
agagaaaccctacaaatgtgaaaaatgtggcaaagcttttaaccaattttcaaaccttactaaacataagataactcatactggagaaaaatcttacaaatgtgaagaatgtggcaaagc

SEQ ID NO: 702478 - DNA, 89 bp, Artificial Sequence
  ENSG00000196268_26 (sequence is synthesized)
aaatcttccagtcctcaactcctagtaaacataattaatgatggagagaaaccatacaactgtgaagaatgtggcaaagcttttaacca

SEQ ID NO: 702479 - DNA, 87 bp, Artificial Sequence
  ENSG00000196268_27 (sequence is synthesized)
actttattgaacaaaataattcataccaaagcctttaaccagtcctcaatttttactaaacataagaaaattcatactggagagaaa

SEQ ID NO: 702480 - DNA, 120 bp, Artificial Sequence
  ENSG00000196268_28 (sequence is synthesized)
ccctatgattgtgaaaaatatggcaaaggctttaactagtcctcagttcttaacacacatacgataattcttactgcagagaaactctacaaaccagtaagatgtgacagtgcttctgac

SEQ ID NO: 702481 - DNA, 120 bp, Artificial Sequence
  ENSG00000196268_29 (sequence is synthesized)
aacatctcaaacttttctaatcataaaagaaatcatattggtgagaaatcctagaaatgtggagaatgtaacaaagtatttaaatggttgtcacacttgattataggtaatattcatatt

SEQ ID NO: 702482 - DNA, 120 bp, Artificial Sequence
  ENSG00000196268_30 (sequence is synthesized)
ggaaaaatttcctacaagtaagaacaatgtggcaaagtttttaactaatacaccttattgcacagaaaatcatttatatttgagaaaaattgtagaaatatagactgtgaaaaagacgtc

SEQ ID NO: 702483 - DNA, 120 bp, Artificial Sequence
  ENSG00000196268_31 (sequence is synthesized)
aatatctgctcacatcttactaaacaccagagagttcatgcttaataaaagcatgataagtgcaattactgccaaaagatctttcagaaaatattatcctttaaagtgaaggagagtatt

SEQ ID NO: 702484 - DNA, 120 bp, Artificial Sequence
  ENSG00000196268_32 (sequence is synthesized)
tatattaaagatgaacattacaaccataaagagggttgaagtacctttacttgtatcagatcttattgtccacattttgtactacagaaaaactctgaagaggtcactcaaactttgttc

SEQ ID NO: 702485 - DNA, 120 bp, Artificial Sequence
  ENSG00000196268_33 (sequence is synthesized)
aacatcagggaatttatattggagagctgtcttgcaaatgtaataaatttgggaaaacaaattttcaaaaactacagcttagaaaacaccagagtttatacgaaaatatattttcaaagg

SEQ ID NO: 702486 - DNA, 120 bp, Artificial Sequence
  ENSG00000196268_34 (sequence is synthesized)
tgtagtaaaaataaaaaaaattttaatccaaatttgtctatgtaaataccagaatttatagtagaaatatatgaggaagcgacacttcgaatattctactaaatgagagttctgagtata

SEQ ID NO: 702487 - DNA, 120 bp, Artificial Sequence
  ENSG00000196268_35 (sequence is synthesized)
ttggtagaaaaattatttgtatataatgttaagaggagtaaaagattttttgtagaataataactatattcggattatactttgtttcttgaaaaaattacagattttttgaaaagcaaa

SEQ ID NO: 702488 - DNA, 120 bp, Artificial Sequence
  ENSG00000196268_36 (sequence is synthesized)
ttttttgaaaagcaaatgatgtaactcaactcattattttctgctgtttcttcattcttattcacttgtgaaagcttgtgatcatttgttgctgcatcagaggtatgagagattcttctt

SEQ ID NO: 702489 - DNA, 120 bp, Artificial Sequence
  ENSG00000196268_37 (sequence is synthesized)
cattagatgggcattatttatgatcttttctatggatgagtaagaatattaaaatgtaagatgcatggtgaaaatctaagtggagaggttctttgtggttaacttatactattgagtgat

SEQ ID NO: 702490 - DNA, 120 bp, Artificial Sequence
  ENSG00000196268_38 (sequence is synthesized)
ggttaacttatactattgagtgatgcacaaggtaggtgttaagagtaatattcttttgcattatgagaaaactagtatattattcatatattttactaattgtactttttttattatact

SEQ ID NO: 702491 - DNA, 120 bp, Artificial Sequence
  ENSG00000196268_39 (sequence is synthesized)
cttttatataataaaatgcagtacattttaaaaaattttaaattctgtgtgaaggtaactgtttcaacatttttaacatggtaaatattattgtgcattcaataaagtgttgttatgcca

SEQ ID NO: 702492 - DNA, 120 bp, Artificial Sequence
  ENSG00000196268_40 (sequence is synthesized)
acatcacgagagaggggaaggagttgctcggaaccggtgggaagtggctgtggcgggactcaggcctccccgcagtcagctccacaatctgctccctgagttctccttgcccagctcggc

SEQ ID NO: 702493 - DNA, 120 bp, Artificial Sequence
  ENSG00000196268_41 (sequence is synthesized)
ctcagtctccttcagccgtaagttggcggctgcgccaacagccggggccccgggcgtcctgtctcttccctgcactgtgactgtgccctgcctggagtcctctctggcagttctgcaccc

SEQ ID NO: 702494 - DNA, 120 bp, Artificial Sequence
  ENSG00000196268_42 (sequence is synthesized)
gcagcgccgcgtctttctcagattgtgcggggaccacgggagggtcatcaggggagaatcctgacttggggtgcgggttcatgaatgggaagagctttggtccgtggggttcccagttgc

SEQ ID NO: 702495 - DNA, 120 bp, Artificial Sequence
  ENSG00000196268_43 (sequence is synthesized)
tattttctcctattaaaaatttatgggcgtcactgcaaaaatattaaagaatgtaatcaaagagtggttctagaattgtagagcacccagctatggtttgtagtttgtggtctgtgggag

SEQ ID NO: 702496 - DNA, 120 bp, Artificial Sequence
  ENSG00000196268_44 (sequence is synthesized)
aggcttgaaggaaagtcttttataaaatgcatgatgaagaaaccaaatttactaattggttaggtacagttacatggtttcttaatatgtgcgttaaaggtgaaaatttcctggttatgt

SEQ ID NO: 702497 - DNA, 120 bp, Artificial Sequence
  ENSG00000196268_45 (sequence is synthesized)
aatcagagcttaattggcagtttacagttgctgaagcctgaattttgtttctctgaatgtagtaattaaaaataatgcacctgagttagattttttttttaaagtaagaattcagggact

SEQ ID NO: 702498 - DNA, 120 bp, Artificial Sequence
  ENSG00000196268_46 (sequence is synthesized)
aagcagagtcttggaaccaatcccccatttctccggcctcactctggcttgcagtaagataatttccagtttcctctgacgttcctaaatgccaccttttcctccctaattcacattatc

SEQ ID NO: 702499 - DNA, 120 bp, Artificial Sequence
  ENSG00000196268_47 (sequence is synthesized)
gcctatttgtcttttactgtacttttttataccatattttaattatttttttggcaaagcattaaatggttaaatggtgcatttaaagagatttgttatctgtttgtaaatatttcccat

SEQ ID NO: 702500 - DNA, 120 bp, Artificial Sequence
  ENSG00000196268_48 (sequence is synthesized)
gaaaagaaggcaaataataataccctgacactgcattgtagtaaatctctgtctcttttgctttcatcttgtctaggcacagagatgttaccagaatgtttttgggtcgaagttctcctt

SEQ ID NO: 702501 - DNA, 120 bp, Artificial Sequence
  ENSG00000196268_49 (sequence is synthesized)
tggaaaatctatggggtgatgtgtcctcagccaccctttggttttttcctggtcatgggtttcagtactatctggggataaaccaagataactgccatggttatgttagctagagtgtcc

SEQ ID NO: 702502 - DNA, 120 bp, Artificial Sequence
  ENSG00000196268_50 (sequence is synthesized)
attggatctcagcttctggtttattttctcccataagatgacctgaggtatggagtgtatcctctcaagggagcaagtggatattctggggctgaggggaatcttccggtgtactcttat

SEQ ID NO: 702503 - DNA, 120 bp, Artificial Sequence
  ENSG00000196268_51 (sequence is synthesized)
tttgaaacgggtaaccctttgaaatgttaaaattgccttccctcaaccaggcttccatttcttggagacaaattgctggtcagccaatcagatgctggtaatgaggggaaaacacagaaa

SEQ ID NO: 702504 - DNA, 120 bp, Artificial Sequence
  ENSG00000196268_52 (sequence is synthesized)
taatttctgccccctggattctctaagggggcagaaaaatagtgaaattaatatagtaaaagaaaaagagtaaaaaaaaaaaagtgaaaaatttgtggcccaaaaaatagtatcccaaaa

SEQ ID NO: 702505 - DNA, 72 bp, Artificial Sequence
  ENSG00000196268_53 (sequence is synthesized)
cgcccgcctcagataaaaatttttttatttctattgtatccaatagcttgttttaagtgtgtagaacaataa

SEQ ID NO: 702506 - DNA, 120 bp, Artificial Sequence
  ENSG00000196268_54 (sequence is synthesized)
tatccaatagcttgttttaagtgtgtagaacaataacttacacttttatgttaattttatattttgttaatttactgactgtattattagtttagacaaatttcaatgtactgtggtttt

SEQ ID NO: 702507 - DNA, 120 bp, Artificial Sequence
  ENSG00000196268_55 (sequence is synthesized)
ttatgtgtaagattatatgttcctcaaacagcaactttttacttatttgtcttcagtttcaatggctttaaaaagaattcttttttcattattctgccacatgcttccagtgctatgtta

SEQ ID NO: 702508 - DNA, 120 bp, Artificial Sequence
  ENSG00000196268_56 (sequence is synthesized)
aagatcttcttttcttgtgttccccagggttttgggatgccctctgggtttgtagtggagtggggttgtaacttggttgcaaggctgctggttctacattagggtccatatttagttgtc

SEQ ID NO: 702509 - DNA, 75 bp, Artificial Sequence
  ENSG00000196268_57 (sequence is synthesized)
aaggctgctggttctacattagggtccatatttagttgtcatgttacaagaggcttgggtagttgtacgtctcgc

SEQ ID NO: 702510 - DNA, 89 bp, Artificial Sequence
  ENSG00000196268_58 (sequence is synthesized)
ggtgctgggattacagacgtgagccaccacccccggccacttgtttcttttaaatgcttattaaaagtttctcatcagaatattttatt

SEQ ID NO: 702511 - DNA, 120 bp, Artificial Sequence
  ENSG00000196268_59 (sequence is synthesized)
ttaaatgcttattaaaagtttctcatcagaatattttatttataattatactgcatattctctgaaattttactgccaatttttcaaaatacctgcttttgatgagtacagttacagtca

SEQ ID NO: 702512 - DNA, 120 bp, Artificial Sequence
  ENSG00000196268_60 (sequence is synthesized)
aatactgtagttagacaaattcttttttaatggtatattaatgttgcataccaaattgtatgagttaaacgtctcttcctgtgcagtttcatattagtggtgttttcagtgtaggtatct

SEQ ID NO: 702513 - DNA, 120 bp, Artificial Sequence
  ENSG00000196268_61 (sequence is synthesized)
taatatcagcttatcgtggtttttggttatgtattataattttagtcaatttgcaattctgtctgtatactttatgtcaatgtgaggttgaattaaaagatagccatatgtctatcacaa

SEQ ID NO: 702514 - DNA, 120 bp, Artificial Sequence
  ENSG00000196268_62 (sequence is synthesized)
tctgtgacagcttcttgatctgtcccaaggtgggtggctgtgttcgacgtgtgttgcttgtgacgcttggggttgtcctcagcatcaatcttgacatggctgcaacgagggggtcctcgg

SEQ ID NO: 702515 - DNA, 120 bp, Artificial Sequence
  ENSG00000196268_63 (sequence is synthesized)
cttcctcagcatctggctcatgataaagtttcaggtatcttgatggtatccaaatcagctgttgattttggcctggaggaacacaagcataatctctaccccaagttattttacccattt

SEQ ID NO: 702516 - DNA, 74 bp, Artificial Sequence
  ENSG00000196268_64 (sequence is synthesized)
aatcagctgttgattttggcctggaggaacacaagcataatctctaccccaagttattttacccatttttctct

SEQ ID NO: 702517 - DNA, 70 bp, Artificial Sequence
  ENSG00000196268_65 (sequence is synthesized)
ctgttttaatagaagctggaatgcccaccaccacaaaacactgcaaaaggtgatgtttaaagaaaaggtg

SEQ ID NO: 702518 - DNA, 68 bp, Artificial Sequence
  ENSG00000196268_66 (sequence is synthesized)
cacatacatgtaagagttaggttccaatcctcgaggattaacccctcctgtaaaagatgaggaatgta

SEQ ID NO: 702519 - DNA, 71 bp, Artificial Sequence
  ENSG00000196268_67 (sequence is synthesized)
ttagcaactaggcaatcagccctaatgtgagtgatgtaaaaaggatgcattgtactcctaactgctatttg

SEQ ID NO: 702520 - DNA, 120 bp, Artificial Sequence
  ENSG00000196268_68 (sequence is synthesized)
tcctggaagaggtgtatgagcgagccctaatgtgagtgatgtaaaaaggatgcattgtactcctaactgctatttgcaattgggtaaataaagtgatcagttgttcatctgtatgaaatc

SEQ ID NO: 702521 - DNA, 120 bp, Artificial Sequence
  ENSG00000196268_69 (sequence is synthesized)
atcccttatataccctaaagttttcatttctctgttttcatagaataatttttggtaatttatgctttgcataagtgagtttctggtgcctgttttaaagaaatcttgaagaactgtccg

SEQ ID NO: 702522 - DNA, 120 bp, Artificial Sequence
  ENSG00000196268_70 (sequence is synthesized)
tgtggaaaaaaatttcttcaggatgttttatcttggcctgatctttttacatttctgagccggtctgtatccttcactctacagtagtggtaatttcagaaatttagtagtataaaatat

SEQ ID NO: 702523 - DNA, 120 bp, Artificial Sequence
  ENSG00000196268_71 (sequence is synthesized)
aaatctatatgccaccactaattttttatccatgaatactgggtggcaaaattaagcacctacaaatttaaaatattttctaaatgttaagaactttctgtcattaaatagtattttggg

SEQ ID NO: 702524 - DNA, 120 bp, Artificial Sequence
  ENSG00000196268_72 (sequence is synthesized)
ataaattttctagaatattctattacatcctctttactaagcatggtactaggtaggtaattagagaatatgagcaagattcatgttatttatttttaataaagcaggtattgctgtctc

SEQ ID NO: 702525 - DNA, 84 bp, Artificial Sequence
  ENSG00000196268_73 (sequence is synthesized)
tttcaaattttgaacaggagcatgctgaagagtgtgttgtttaatttctatgtatttgtacattttttttctctatcttataca

SEQ ID NO: 702526 - DNA, 120 bp, Artificial Sequence
  ENSG00000196268_74 (sequence is synthesized)
cttaaggcacagatggctcctgctattgtttatggtttaagaatgcctttaagtggtcttccaccctgggtgggccaggtattccttgccctcattccggtaaaccgacagccttccagc

SEQ ID NO: 702527 - DNA, 61 bp, Artificial Sequence
  ENSG00000196268_75 (sequence is synthesized)
gagatttatgtctcttctttgatttgcaaatcaataaaggcaaaggcagctttgtcacggt

SEQ ID NO: 702528 - DNA, 120 bp, Artificial Sequence
  ENSG00000196268_76 (sequence is synthesized)
atttgcaaatcaataaaggcaaaggcagctttgtcacggtgagctacttctcgcaggagtcaggatccacatctgcagactatcagcacagattaaaagcacaatcatctttgaaatcac

SEQ ID NO: 702529 - DNA, 120 bp, Artificial Sequence
  ENSG00000196268_77 (sequence is synthesized)
actagctgctaatctgtctgcagctccattaagcactccagttcttggcattaacatcaggtgtgcttgggatgctttaaatattttaattttgcaatatccaaaaacaactttgtagag

SEQ ID NO: 702530 - DNA, 80 bp, Artificial Sequence
  ENSG00000196268_78 (sequence is synthesized)
ttggcattaacatcaggtgtgcttgggatgctttaaatattttaattttgcaatatccaaaaacaactttgtagagtgtc

SEQ ID NO: 702531 - DNA, 120 bp, Artificial Sequence
  ENSG00000196268_79 (sequence is synthesized)
ctatactgccatggttccagataatagaactcttgccatacttcttatcatttctatcatctgaccattttgttcagatcagctgaacacagtgtggctgtggcacacagactgagaggt

SEQ ID NO: 702532 - DNA, 83 bp, Artificial Sequence
  ENSG00000196268_80 (sequence is synthesized)
cttcttatcatttctatcatctgaccattttgttcagatcagctgaacacagtgtggctgtggcacacagagaccagctaata

SEQ ID NO: 702533 - DNA, 83 bp, Artificial Sequence
  ENSG00000196268_81 (sequence is synthesized)
ttccatgggaatcatctaaagaagtacattcattttttctggccaggtactattttgtttacaaataggtttttgagggcggt

SEQ ID NO: 702534 - DNA, 73 bp, Artificial Sequence
  ENSG00000196268_82 (sequence is synthesized)
aatttaaagttaataatgctagattcaggagcatctgtggggttacatattgtctatttccccccgtctcctt

SEQ ID NO: 702535 - DNA, 80 bp, Artificial Sequence
  ENSG00000196275_0 (sequence is synthesized)
ggcgagcaggggcttcggccgccacccacacgccccgaagcgtgctcgtcccccgcgcggggctctcggccgccgccctc

SEQ ID NO: 702536 - DNA, 120 bp, Artificial Sequence
  ENSG00000196275_1 (sequence is synthesized)
gcggccggcccggcgcggcccagcgccctcaggtgtataccaaggactggaattgatgggccaagctttgtgttttaaggaaaaaaaaatcatgttttagtttcgtgctggtaatttgaa

SEQ ID NO: 702537 - DNA, 120 bp, Artificial Sequence
  ENSG00000196275_2 (sequence is synthesized)
gtaagcagatgtctagatataagcttggaaactggccagttggagattgctcacggctgcaattgaagactccagcagcctcttctcctctttgcttccatttggagaggaaggcgtcat

SEQ ID NO: 702538 - DNA, 120 bp, Artificial Sequence
  ENSG00000196275_3 (sequence is synthesized)
aggctgtgtgacttccgtggacgcggggcttggcaccggcttgcagttgggatcaatcttcagtggcggtttggagtgggtcacggttcttcctgcttgccttccagtttagtccctgac

SEQ ID NO: 702539 - DNA, 120 bp, Artificial Sequence
  ENSG00000196275_4 (sequence is synthesized)
gtctgctccccagggccctggctcttcccccacgccttcagcctgcacagtcccttctctcattctcaggctgcagaacctggaagtacagttgtccccccttacccgctgtttcagtta

SEQ ID NO: 702540 - DNA, 120 bp, Artificial Sequence
  ENSG00000196275_5 (sequence is synthesized)
cctgaggtcaaccgtggtctgaaaatactacatggaaaattccggaaataaacaattcgtaagttttaaattgcacgctgtgatgaaatctcgcgctgtgcagcctgggcagtgaatcgt

SEQ ID NO: 702541 - DNA, 120 bp, Artificial Sequence
  ENSG00000196275_6 (sequence is synthesized)
cccctttgttcagcgtccccacgctgtggacgctccacacccatagtcacttagtagctggctcggttatcagatcgaccgtcacagtgtcccagtgtatgtgttcaagtcacccttatt

SEQ ID NO: 702542 - DNA, 120 bp, Artificial Sequence
  ENSG00000196275_7 (sequence is synthesized)
ttccgtcataatggccccaaagcacaagagtagtgatgctgggaatttggataggccaaagagaagccgtaaagtgcttcctctaagtgaaaaggtgaaagttctcgacttaatcaggaa

SEQ ID NO: 702543 - DNA, 120 bp, Artificial Sequence
  ENSG00000196275_8 (sequence is synthesized)
agacaaaaaatcctatgctgaggttgctaagatctacgggaagaatgaatcttccatccgtgaaattgtgaagaaggaaaaagaaattcgtgctagttttgctgtctcacctccaactgc

SEQ ID NO: 702544 - DNA, 120 bp, Artificial Sequence
  ENSG00000196275_9 (sequence is synthesized)
taaagtgacggccacagtgcgtgataagtgcttagttaagatggaacaggcactgcatttgtgggtggaagagatgaacagaaaacgtgttcccattgacagcaacatgttgcgccagaa

SEQ ID NO: 702545 - DNA, 120 bp, Artificial Sequence
  ENSG00000196275_10 (sequence is synthesized)
agctttgagcctataccaagacttctgcaagggatgctctgaaactgacaccaagccatttactgcgagtaagggatggttacacagattcaggcatagattctcacatcattacaagaa

SEQ ID NO: 702546 - DNA, 120 bp, Artificial Sequence
  ENSG00000196275_11 (sequence is synthesized)
gaagaagaaggggatcatggcccaggtagcagtgtccaccctgcctgttgaagaagagtcctcctcagagaccaggatggtggtgacattcctcgtgtctgccctcgaatccatgtgtaa

SEQ ID NO: 702547 - DNA, 120 bp, Artificial Sequence
  ENSG00000196275_12 (sequence is synthesized)
agaactggccaagtccaaggcagaagtggcctgcatcgcagtgtacgaaacagacgtgtttgtcgtcggaaccgagagaggatgcgcttttgttaatgccaggacggattttcagaaaga

SEQ ID NO: 702548 - DNA, 120 bp, Artificial Sequence
  ENSG00000196275_13 (sequence is synthesized)
ttttgcaaaatactgcgttgcagagggactgtgtgaggtgaaacctccctgccctgtgaacgggatgcaggtccactcaggcgaaacggaaatactcaggaaggcagtggaggactattt

SEQ ID NO: 702549 - DNA, 120 bp, Artificial Sequence
  ENSG00000196275_14 (sequence is synthesized)
ctgcttttgttatggtaaagccttagggacaacagtgatggtgcctgttccctatgagaagatgctgcgagaccagtcggctgtggtagtgcaggggcttccggaaggcgttgcctttca

SEQ ID NO: 702550 - DNA, 120 bp, Artificial Sequence
  ENSG00000196275_15 (sequence is synthesized)
acaccctgagaattacgaccttgcaaccctgaaatggattttggagaacaaagcagggatttcattcatcataaatagacccttcctaggaccagagagtcagctgggtggccctgggat

SEQ ID NO: 702551 - DNA, 120 bp, Artificial Sequence
  ENSG00000196275_16 (sequence is synthesized)
ggtaacagatgcggagagatccatagtatcaccaagtgaaagctgcggccccatcaatgtgaaaactgaacccatggaagattctggcatttcactgaaagcagaagctgtctcagtcaa

SEQ ID NO: 702552 - DNA, 120 bp, Artificial Sequence
  ENSG00000196275_17 (sequence is synthesized)
gaaagaatcagaagatcctaattactatcaatataatatgcaaggaagccacccttcttccacaagcaatgaagtaatagaaatggaattaccaatggaagattccactccgctggtccc

SEQ ID NO: 702553 - DNA, 120 bp, Artificial Sequence
  ENSG00000196275_18 (sequence is synthesized)
ttcagaagaaccaaatgaggaccctgaagccgaggtgaaaatcgaaggaaacacaaattcatccagtgttacaaattctgcagcaggtgttgaagatcttaacatcgttcaagtgactgt

SEQ ID NO: 702554 - DNA, 120 bp, Artificial Sequence
  ENSG00000196275_19 (sequence is synthesized)
gtggatttccctgtgaaagttccctacaggaagatcacattcaaccctggctgtgtggtgattgatggcatgcccccgggggtggtattcaaggcccccggctatctggaaatcagttcc

SEQ ID NO: 702555 - DNA, 120 bp, Artificial Sequence
  ENSG00000196275_20 (sequence is synthesized)
atgaggaggatcttggaggcagctgagtttatcaaattcacagtcatcaggccgcttccagggcttgagctcagtaatgtgggaaaacgcaagatagaccaggagggccgtgtgtttcaa

SEQ ID NO: 702556 - DNA, 120 bp, Artificial Sequence
  ENSG00000196275_21 (sequence is synthesized)
gaaaagtgggagagagcgtatttcttcgtggaagtacagaatattccaacatgtctcatatgcaaacaaagcatgtctgtgtccaaagaatataacctaagacgccactatcaaaccaat

SEQ ID NO: 702557 - DNA, 120 bp, Artificial Sequence
  ENSG00000196275_22 (sequence is synthesized)
cacagcaagcattatgaccagtatatggaaagaatgcgtgacgagaagcttcacgagctgaaaaaagggctcaggaagtatctcttaggctcatcagacaccgagtgtcccgagcaaaaa

SEQ ID NO: 702558 - DNA, 120 bp, Artificial Sequence
  ENSG00000196275_23 (sequence is synthesized)
caagtgtttgcaaacccaagtccaacccagaaatcccccgtgcagcctgtagaggacctagctgggaacttatgggagaagttacgtgaaaaaatcaggtcttttgtggcatattctatc

SEQ ID NO: 702559 - DNA, 120 bp, Artificial Sequence
  ENSG00000196275_24 (sequence is synthesized)
gcaatcgatgagatcacggatataaataataccacccagttggccatattcatccgtggtgtcgatgagaatttcgatgtgtccgaagaacttctggacacggtgcccatgacgggtaca

SEQ ID NO: 702560 - DNA, 120 bp, Artificial Sequence
  ENSG00000196275_25 (sequence is synthesized)
aaatctggcaacgagatcttttcgcgtgttgagaaaagcctgaaaaacttctgtatcgactggtcgaaattagtaagcgtggcctccactggcaccccagcgatggtggatgccaataac

SEQ ID NO: 702561 - DNA, 120 bp, Artificial Sequence
  ENSG00000196275_26 (sequence is synthesized)
gggcttgtcacaaaactgaagtccagggtggcgacgttctgcaagggtgcggaactgaagtccatctgttgtataattcatccggaatcactctgtgctcagaagttgaagatggaccac

SEQ ID NO: 702562 - DNA, 120 bp, Artificial Sequence
  ENSG00000196275_27 (sequence is synthesized)
gtcatggacgtggtagtgaagtccgtgaactggatatgctcccggggactgaaccacagtgagttcacaaccttgctctatgagctggacagccagtatggtagcctcctgtactacacg

SEQ ID NO: 702563 - DNA, 120 bp, Artificial Sequence
  ENSG00000196275_28 (sequence is synthesized)
gagattaagtggctcagtcgcgggctcgtgctaaagagatttttcgaatccttggaagaaatcgactccttcatgtcatccagagggaaacccctgcctcaactgagctccatagattgg

SEQ ID NO: 702564 - DNA, 120 bp, Artificial Sequence
  ENSG00000196275_29 (sequence is synthesized)
atccgagacctggccttcttggttgacatgacgatgcatctgaacgctttgaacatctctctccaaggacactcccaaatcgtcacgcagatgtatgacctgatccgggcgttcctagca

SEQ ID NO: 702565 - DNA, 120 bp, Artificial Sequence
  ENSG00000196275_30 (sequence is synthesized)
aaactgtgcctctgggagactcatttgacgaggaataatctggcccactttcccaccctgaaattggcttccagaaatgaaagcgatggcctgaactacattcccaaaatcgcggaactc

SEQ ID NO: 702566 - DNA, 120 bp, Artificial Sequence
  ENSG00000196275_31 (sequence is synthesized)
cagaccgaattccagaaaaggctgtctgatttcaaactctacgaaagcgaactgactctgttcagctccccgttctccacgaagatcgacagtgtgcacgaggagctccagatggaggtt

SEQ ID NO: 702567 - DNA, 120 bp, Artificial Sequence
  ENSG00000196275_32 (sequence is synthesized)
atcgacctgcaatgcaacacggtcctgaagacgaaatacgacaaggtgggaataccagaattctacaagtacctctggggtagctacccgaaatacaagcaccattgcgcaaagattctt

SEQ ID NO: 702568 - DNA, 120 bp, Artificial Sequence
  ENSG00000196275_33 (sequence is synthesized)
tccatgttcgggagcacctacatctgcgaacagctgttctccattatgaaactgagcaaaacaaaatactgctcccagttaaaggattcccagtgggattctgtactccacatcgcaacg

SEQ ID NO: 702569 - DNA, 120 bp, Artificial Sequence
  ENSG00000196275_34 (sequence is synthesized)
tcgcaacgtgatggagagaaaactcctggcagggccctatggtgggaaaggctggagtcttctagtcccaagggattgggagatgacaaaatgaatttttttttcttttttgagatggag

SEQ ID NO: 702570 - DNA, 120 bp, Artificial Sequence
  ENSG00000196275_35 (sequence is synthesized)
gcatgaaccactgtgcccagctgacaaaatgagttcttaaacttttttttttttcagttttttttccactttgaatcagaaatataatctgcagtatcatacttgtttatattacattgt

SEQ ID NO: 702571 - DNA, 120 bp, Artificial Sequence
  ENSG00000196275_36 (sequence is synthesized)
acacactctgcacccccgccccttcagttcatttaaagatgaaaccaatagcctaattttaattcactcgtgcatcccgcctgctgcgtttcagagctgactgttcagatgtgtcatgct

SEQ ID NO: 702572 - DNA, 120 bp, Artificial Sequence
  ENSG00000196275_37 (sequence is synthesized)
ttggtccgtgctgggtaatggtgttgcttttcttgcagacccttcctaggaccagagagtcagctgggtaagtgacagcttctcaggtttggtggctcttctgagctgctgaaccacttc

SEQ ID NO: 702573 - DNA, 63 bp, Artificial Sequence
  ENSG00000196275_38 (sequence is synthesized)
tctcaggtttggtggctcttctgagctgctgaaccacttcttcttcattaaaacttgaattgg

SEQ ID NO: 702574 - DNA, 87 bp, Artificial Sequence
  ENSG00000196275_39 (sequence is synthesized)
ctggctaacacggtgaagcccagtctgtactaaaaatacgtgtagtcccagctactcgggtgtctgaggcaggagaatggcgtgaac

SEQ ID NO: 702575 - DNA, 73 bp, Artificial Sequence
  ENSG00000196275_40 (sequence is synthesized)
cttgaatttgggtgaggggagggaacttagaggatgggccaataggtgcagcaagccattgtggcacacatgt

SEQ ID NO: 702576 - DNA, 120 bp, Artificial Sequence
  ENSG00000196275_41 (sequence is synthesized)
atgggccaataggtgcagcaagccattgtggcacacatgtgcctaggaaacaaacctgcacattctgcagatgtatccccccctttttttttttagaagaaataaagaatattttttaaa

SEQ ID NO: 702577 - DNA, 67 bp, Artificial Sequence
  ENSG00000196275_42 (sequence is synthesized)
ggtgaaaccccatccctactaaaaataccaaagttagccaggcatggtggcgggtgcgtgtagaatt

SEQ ID NO: 702578 - DNA, 63 bp, Artificial Sequence
  ENSG00000196275_43 (sequence is synthesized)
tgaacccgagatgtagaagtgcctcaaaaataaataaataaagaagaataaaagaagatgtct

SEQ ID NO: 702579 - DNA, 120 bp, Artificial Sequence
  ENSG00000196275_44 (sequence is synthesized)
cagctaagagaacaagttaatgacctctttagccgaaaatttggtaagtttttatatctttttatatccagaattcatatacctaaaatacttctttttaaaagaatacttggccaggtg

SEQ ID NO: 702580 - DNA, 85 bp, Artificial Sequence
  ENSG00000196275_45 (sequence is synthesized)
acctaaaatacttctttttaaaagaatacttggccaggtgcattggctcatacctgtaatcctagcactttaggaggctaaggct

SEQ ID NO: 702581 - DNA, 120 bp, Artificial Sequence
  ENSG00000196275_46 (sequence is synthesized)
gatgcctggacccatgggtagtacagaacccttcatatactatgtttttccctagccatacctacctaagagaaagtttaatttataaatcaagcacaggccaggtgtggtggctcacgc

SEQ ID NO: 702582 - DNA, 120 bp, Artificial Sequence
  ENSG00000196275_47 (sequence is synthesized)
acagagcaagatccatctcagtaaataaatcaataaatcaagcaaagtaggagattaacagcaataactaaagataaaataaaatgattataacaatatgccttcattactactcttgca

SEQ ID NO: 702583 - DNA, 120 bp, Artificial Sequence
  ENSG00000196275_48 (sequence is synthesized)
ctttggggctattatgaagtcaaataaaggtgacttgagcacaagcaccctggccttcccaggactgtcagtctgataacagagccagctactcagtgactagtgggagagtagtgtaga

SEQ ID NO: 702584 - DNA, 120 bp, Artificial Sequence
  ENSG00000196275_49 (sequence is synthesized)
cagcgtggattgcaggacaaagggatgagtcacgtcccaggcgggacggcacgacacttcatcacgctgctcagaacaacgtgtgatttcaaacttctgaattatttctggaattttccg

SEQ ID NO: 702585 - DNA, 120 bp, Artificial Sequence
  ENSG00000196275_50 (sequence is synthesized)
tttactctttgcagactttggttgaccttggggagcaaaccgaggaccgcgaaaccacagatcaagggggagctcgtgtcatagcagctctaacttagtgcttacaacatgcaggcactg

SEQ ID NO: 702586 - DNA, 120 bp, Artificial Sequence
  ENSG00000196275_51 (sequence is synthesized)
ttctagtcattttgcgtatattcatgaatcctcccacaaccaccgtgttcacgaggaagcggaggcagagggaggtttagtgagttgctggaggcagcccagctggtgagctgaggctca

SEQ ID NO: 702587 - DNA, 120 bp, Artificial Sequence
  ENSG00000196275_52 (sequence is synthesized)
gaccgtgctctggccccaaaacactcctcggtaacccccatcctgcccacacaaatggccccggaacacagcggctgctttgagtcagtttctctctcgatgacttttccacgttggctt

SEQ ID NO: 702588 - DNA, 120 bp, Artificial Sequence
  ENSG00000196275_53 (sequence is synthesized)
cgatctgggagttccgttttctgtgtatttgctgtcaatttctatgcctttggatgttagtcattttccgaggtgctaaaaggggctggtgtgtgttttttcattcctctacaggtggcc

SEQ ID NO: 702589 - DNA, 120 bp, Artificial Sequence
  ENSG00000196275_54 (sequence is synthesized)
ctgggatggtaacagatgcggagagatccatagtatcaccaagtgaaagctgcggccccatcaatgtgaaaactgaacccatggaagattctggtgggtaccaagatgcttttagaatca

SEQ ID NO: 702590 - DNA, 74 bp, Artificial Sequence
  ENSG00000196275_55 (sequence is synthesized)
agcaagaccctgtctcaaaaaaacaaacaaggctgcgcacggtggagcctgagctcaggagttcaagaccatcc

SEQ ID NO: 702591 - DNA, 84 bp, Artificial Sequence
  ENSG00000196275_56 (sequence is synthesized)
gtatctagcaggttatcatttgacacctttcttttgttttatcaaataaataaataaataaagaccagggcgtgaattaacctc

SEQ ID NO: 702592 - DNA, 120 bp, Artificial Sequence; identical to SEQ ID NO: 599314
  ENSG00000196275_57 (sequence is synthesized)

SEQ ID NO: 702593 - DNA, 120 bp, Artificial Sequence
  ENSG00000196275_58 (sequence is synthesized)
caagacttccacagtattttcttctaagctatcataagcattctcctagaaacgatcctaacacatcttcttggattcagcttaccaaataaacactgcttaacactgcagagtccaaga

SEQ ID NO: 702594 - DNA, 80 bp, Artificial Sequence; identical to SEQ ID NO: 599307
  ENSG00000196275_59 (sequence is synthesized)

SEQ ID NO: 702595 - DNA, 120 bp, Artificial Sequence; identical to SEQ ID NO: 599308
  ENSG00000196275_60 (sequence is synthesized)

SEQ ID NO: 702596 - DNA, 120 bp, Artificial Sequence; identical to SEQ ID NO: 599309
  ENSG00000196275_61 (sequence is synthesized)

SEQ ID NO: 702597 - DNA, 67 bp, Artificial Sequence; identical to SEQ ID NO: 599310
  ENSG00000196275_62 (sequence is synthesized)

SEQ ID NO: 702598 - DNA, 120 bp, Artificial Sequence
  ENSG00000196275_63 (sequence is synthesized)
tacacagattcaggcatagattctcacatcattacaagaagaagaagaagggaaatggattgcatgattgttttgaccatttttcttcatgctaaataaagtatgcagacttaagcattg

SEQ ID NO: 702599 - DNA, 120 bp, Artificial Sequence
  ENSG00000196277_0 (sequence is synthesized)
agtgctgggctgttggagagagcgagcagcaagccggtgagcgcgagcgcggcgcgccggccggctaacccgagagcgcgaggcgccccaggctggcaggcgccgcgggacccctcaccc

SEQ ID NO: 702600 - DNA, 120 bp, Artificial Sequence
  ENSG00000196277_1 (sequence is synthesized)
tctctggtcgcccctccccggattcccccaccctccgtgcctgcaggagcccctgggctttcccggaggagctcgccctgaagggcccggacctcggcgagcccaccaccgttccctcca

SEQ ID NO: 702601 - DNA, 120 bp, Artificial Sequence
  ENSG00000196277_2 (sequence is synthesized)
gcgccgccgccgccaccgcagcagccggagcagcatggtccagctgaggaagctgctccgcgtcctgactttgatgaagttcccctgctgcgtgctggaggtgctcctgtgcgcgctggc

SEQ ID NO: 702602 - DNA, 120 bp, Artificial Sequence
  ENSG00000196277_3 (sequence is synthesized)
ggcggcggcgcgcggccaggagatgtacgccccgcactcaatccggatcgagggggacgtcaccctcggggggctgttccccgtgcacgccaagggtcccagcggagtgccctgcggcga

SEQ ID NO: 702603 - DNA, 120 bp, Artificial Sequence
  ENSG00000196277_4 (sequence is synthesized)
catcaagagggaaaacgggatccacaggctggaagcgatgctctacgccctggaccagatcaacagtgatcccaacctactgcccaacgtgacgctgggcgcgcggatcctggacacttg

SEQ ID NO: 702604 - DNA, 120 bp, Artificial Sequence
  ENSG00000196277_5 (sequence is synthesized)
ttccagggacacttacgcgctcgaacagtcgcttactttcgtccaggcgctcatccagaaggacacctccgacgtgcgctgcaccaacggcgaaccgccggttttcgtcaagccggagaa

SEQ ID NO: 702605 - DNA, 120 bp, Artificial Sequence
  ENSG00000196277_6 (sequence is synthesized)
agtagttggagtgattggggcttcggggagttcggtctccatcatggtagccaacatcctgaggctcttccagatcccccagattagttatgcatcaacggcacccgagctaagtgatga

SEQ ID NO: 702606 - DNA, 120 bp, Artificial Sequence
  ENSG00000196277_7 (sequence is synthesized)
ccggcgctatgacttcttctctcgcgtggtgccacccgattccttccaagcccaggccatggtagacattgtaaaggccctaggctggaattatgtgtctaccctcgcatcggaaggaag

SEQ ID NO: 702607 - DNA, 120 bp, Artificial Sequence
  ENSG00000196277_8 (sequence is synthesized)
ttatggagagaaaggtgtggagtccttcacgcagatttccaaagaggcaggtggactctgcattgcccagtccgtgagaatcccccaggaacgcaaagacaggaccattgactttgatag

SEQ ID NO: 702608 - DNA, 120 bp, Artificial Sequence
  ENSG00000196277_9 (sequence is synthesized)
aattatcaaacagctcctggacacccccaactccagggccgtcgtgatttttgccaacgatgaggatataaagcagatccttgcagcagccaaaagagctgaccaagttggccattttct

SEQ ID NO: 702609 - DNA, 120 bp, Artificial Sequence
  ENSG00000196277_10 (sequence is synthesized)
ttgggtgggatcagacagctggggatccaaaataaacccactgcaccagcatgaagatatcgcagaaggggccatcaccattcagcccaagcgagccacggtggaagggtttgatgccta

SEQ ID NO: 702610 - DNA, 120 bp, Artificial Sequence
  ENSG00000196277_11 (sequence is synthesized)
ctttacgtcccgtacacttgaaaacaacagaagaaatgtatggtttgccgaatactgggaggaaaacttcaactgcaagttgacgattagtgggtcaaaaaaagaagacacagatcgcaa

SEQ ID NO: 702611 - DNA, 120 bp, Artificial Sequence
  ENSG00000196277_12 (sequence is synthesized)
atgcacaggacaggagagaattggaaaagattccaactatgagcaggagggtaaagtccagttcgtgattgacgcagtctatgctatggctcacgcccttcaccacatgaacaaggatct

SEQ ID NO: 702612 - DNA, 120 bp, Artificial Sequence
  ENSG00000196277_13 (sequence is synthesized)
ctgtgctgactaccggggtgtctgcccagagatggagcaagctggaggcaagaagttgctgaagtatatacgcaatgttaatttcaatggtagtgctggcactccagtgatgtttaacaa

SEQ ID NO: 702613 - DNA, 120 bp, Artificial Sequence
  ENSG00000196277_14 (sequence is synthesized)
gaacggggatgcacctgggcgttatgacatctttcagtaccagaccacaaacaccagcaacccgggttaccgtctgatcgggcagtggacagacgaacttcagctcaatatagaagacat

SEQ ID NO: 702614 - DNA, 120 bp, Artificial Sequence
  ENSG00000196277_15 (sequence is synthesized)
gcagtggggtaaaggagtccgagagatacccgcctcagtgtgcacactaccatgtaagccaggacagagaaagaagacacagaaaggaactccttgctgttggacctgtgagccttgcga

SEQ ID NO: 702615 - DNA, 120 bp, Artificial Sequence
  ENSG00000196277_16 (sequence is synthesized)
tggttaccagtaccagtttgatgagatgacatgccagcattgcccctatgaccagaggcccaatgaaaatcgaaccggatgccaggatattcccatcatcaaactggagtggcactcccc

SEQ ID NO: 702616 - DNA, 120 bp, Artificial Sequence
  ENSG00000196277_17 (sequence is synthesized)
catccgctacaatgacacgcccattgtccgggcatctgggcgggaactcagctatgttcttttgacgggcatctttctttgctacatcatcactttcctgatgattgccaaaccagatgt

SEQ ID NO: 702617 - DNA, 120 bp, Artificial Sequence
  ENSG00000196277_18 (sequence is synthesized)
ggcagtgtgttctttccggcgagttttcttgggcttgggtatgtgcatcagttatgcagccctcttgacgaaaacaaatcggatttatcgcatatttgagcagggcaagaaatcagtaac

SEQ ID NO: 702618 - DNA, 120 bp, Artificial Sequence
  ENSG00000196277_19 (sequence is synthesized)
agctcccagactcataagcccaacatcacaactggcaatcacttccagtttaatatcagttcagcttctaggggtgttcatttggtttggtgttgatccacccaacatcatcatagacta

SEQ ID NO: 702619 - DNA, 120 bp, Artificial Sequence
  ENSG00000196277_20 (sequence is synthesized)
tgatgaacacaagacaatgaaccctgagcaagccagaggggttctcaagtgtgacattacagatctccaaatcatttgctccttgggatatagcattcttctcatggtcacatgtactgt

SEQ ID NO: 702620 - DNA, 120 bp, Artificial Sequence
  ENSG00000196277_21 (sequence is synthesized)
gtatgccatcaagactcggggtgtacccgagaattttaacgaagccaagcccattggattcactatgtacacgacatgtatagtatggcttgccttcattccaattttttttggcaccgc

SEQ ID NO: 702621 - DNA, 120 bp, Artificial Sequence
  ENSG00000196277_22 (sequence is synthesized)
tcaatcagcggaaaagctctacatacaaactaccacgcttacaatctccatgaacctaagtgcatcagtggcgctggggatgctatacatgccgaaagtgtacatcatcattttccaccc

SEQ ID NO: 702622 - DNA, 120 bp, Artificial Sequence
  ENSG00000196277_23 (sequence is synthesized)
tgaactcaatgtccagaaacggaagcgaagcttcaaggcggtagtcacagcagccaccatgtcatcgaggctgtcacacaaacccagtgacagacccaacggtgaggcaaagaccgagct

SEQ ID NO: 702623 - DNA, 120 bp, Artificial Sequence
  ENSG00000196277_24 (sequence is synthesized)
ctgtgaaaacgtagacccaaacagccctgctgcaaaaaagaagtatgtcagttataataacctggttatctaacctgttccattccatggaaccatggaggaggaagaccctcagttatt

SEQ ID NO: 702624 - DNA, 120 bp, Artificial Sequence
  ENSG00000196277_25 (sequence is synthesized)
ttgtcacccaacctggcataggactctttggtcctacccgcttcccatcaccggaggagcttccccggccgggagaccagtgttagaggatccaagcgacctaaacagctgctttatgaa

SEQ ID NO: 702625 - DNA, 120 bp, Artificial Sequence
  ENSG00000196277_26 (sequence is synthesized)
atatccttactttatctgggcttaataagtcactgacatcagcactgccaactcggctgcaattgtggaccttccctaccaaagggagtgttgaaactcaagtcccgccctggctcttta

SEQ ID NO: 702626 - DNA, 120 bp, Artificial Sequence
  ENSG00000196277_27 (sequence is synthesized)
gaatggaccactgagagccacaggaccgttttggggctgacctgtcttattacgtatgtacttctaggttgcaaggttttgaaattttctgtacagtttgtgaggacctttgcactttgc

SEQ ID NO: 702627 - DNA, 120 bp, Artificial Sequence
  ENSG00000196277_28 (sequence is synthesized)
catctgatgtcgtacctcggttcactgtttgttttcgaatgccttgttttcatagagccctattctctcagacggtggaatatttggaaaaattttaaaacaattaaaattttaaagcaa

SEQ ID NO: 702628 - DNA, 120 bp, Artificial Sequence
  ENSG00000196277_29 (sequence is synthesized)
tcttggcagactaaaacaagtacatctgtacatgactgtataattacgattatagtaccactgcacatcatgtttttttttttaagacaaaaaagatgtttaaagaccaaaaactgtgct

SEQ ID NO: 702629 - DNA, 120 bp, Artificial Sequence
  ENSG00000196277_30 (sequence is synthesized)
gagaaagtatgccccacctatctttggtatatgataggttacataaaaggaaggtattggctgaactgaatagaggtcttgatctttggaatgcatgccagtaatgtattttacagtaca

SEQ ID NO: 702630 - DNA, 120 bp, Artificial Sequence
  ENSG00000196277_31 (sequence is synthesized)
acagtacatgtttattatgttcaatatttgtatttgtgttctcttttgttatttttaattagggtatatgaatattttgcaataattttaataattattaagctgtttgaaggaaagaat

SEQ ID NO: 702631 - DNA, 120 bp, Artificial Sequence
  ENSG00000196277_32 (sequence is synthesized)
ttcatgtcttgaggttttgttcatgccccctttgactgatcagtgtgataaggactttaggaaaaaaagcatgtatgttttttactgtttgtaataagtactttcgttaatcttgctgct

SEQ ID NO: 702632 - DNA, 120 bp, Artificial Sequence
  ENSG00000196277_33 (sequence is synthesized)
tatgtgccaatttagtggaaaaaaacaacccttgctgaaaaattccctctttccattctctttcaattctgtgatattgtccaagaatgtatcaataaaatactttggttaactttttta

SEQ ID NO: 702633 - DNA, 120 bp, Artificial Sequence
  ENSG00000196277_34 (sequence is synthesized)
gcttgttcttcttgagctgacccaacacttaggaaaacatgacatggatcagcaactccattttctgtgagaagtgcaactgctactgaccatctgcactggcatctagtcaagcgattg

SEQ ID NO: 702634 - DNA, 120 bp, Artificial Sequence
  ENSG00000196277_35 (sequence is synthesized)
actgctttcccaaagatttttttttttggctgtacagtggaacttggattacactttaaattaactttctctaggaatcaaagtaacctctgaggacctcagcttgcacaaagaggattg

SEQ ID NO: 702635 - DNA, 120 bp, Artificial Sequence
  ENSG00000196277_36 (sequence is synthesized)
tagtcaagcgattgtctgaggcaagattttggagattcccatctgatattcttctatttggtctcttgtacccattgtcatcctgtaccacacataataaagtttaagaatgtcaagcaa

SEQ ID NO: 702636 - DNA, 120 bp, Artificial Sequence
  ENSG00000196277_37 (sequence is synthesized)
gtgtgcatgttgaggactgaagggaggagaaactttgcttcttatttatcacctgtcaggtctggagaagcacagatgccaagtgcatggaacacagaagctgctcagtgaatggccttt

SEQ ID NO: 702637 - DNA, 120 bp, Artificial Sequence
  ENSG00000196277_38 (sequence is synthesized)
gattatgagataggagaattacaagatgatgttagaaggatgggatagagaccatttgtgcctgctacagaatgttggcatggaaagtccttccaggacatcgtagtacccttagtagta

SEQ ID NO: 702638 - DNA, 120 bp, Artificial Sequence
  ENSG00000196277_39 (sequence is synthesized)
tcctgcaaaagacatgactcatgcttttttatggctgtacagtattccatggtctcaggctttccctgaatcattgtaagataatggagacgcagcaatgactgttcttgttatcctccc

SEQ ID NO: 702639 - DNA, 120 bp, Artificial Sequence
  ENSG00000196277_40 (sequence is synthesized)
cgaccggactaaatgaagacggggcctctgtcctatttattttcctgagcatctaatggtgcctggacacacactgtcattgtttgaaaaatgagtacatgttcactctaaagttacaag

SEQ ID NO: 702640 - DNA, 67 bp, Artificial Sequence
  ENSG00000196277_41 (sequence is synthesized)
attcggccatcttggctcctcccccgaagtgttatggaatacaaggtattacacagaagcagcaatt

SEQ ID NO: 702641 - DNA, 120 bp, Artificial Sequence
  ENSG00000196277_42 (sequence is synthesized)
agtgttatggaatacaaggtattacacagaagcagcaatttggaaagaccatcttgagagattcttcataaaaacagaaccccagtctataaggaaacatccatgtctgattagcatgaa

SEQ ID NO: 702642 - DNA, 120 bp, Artificial Sequence
  ENSG00000196277_43 (sequence is synthesized)
gtaagtaactctccgtttctttcatcttcccaccctgcatcaggaagctctagaagatgtggggtgtgcttgcctctctggagaaatactgtgatcgttcttgtcttatgggctgggttg

SEQ ID NO: 702643 - DNA, 120 bp, Artificial Sequence
  ENSG00000196277_44 (sequence is synthesized)
ccttggtgaatgccagcttctgctcttttgagtttgactcattcctgccaccattttctttttgttccttgttggaaagaagcttttggaggctctgcttcagaagtgtgaagcctcccc

SEQ ID NO: 702644 - DNA, 120 bp, Artificial Sequence
  ENSG00000196277_45 (sequence is synthesized)
cttcccttgcttcttgtcctctggtactgaatcctccaactgacaaatgcacctatcaggttgttcttttcttgcacccttcctgctaaggcaacaactttttgtcagggaaacttccat

SEQ ID NO: 702645 - DNA, 120 bp, Artificial Sequence
  ENSG00000196277_46 (sequence is synthesized)
acttaatgaactgtatcggtgggaattaattaggattttggaagcgaaacttttttcctctagcatgtgaatgttgaaaaagttattttgtactaatcaggtcttctagaaacatataaa

SEQ ID NO: 702646 - DNA, 120 bp, Artificial Sequence
  ENSG00000196277_47 (sequence is synthesized)
atattggaaaaagttgtcaaatccaggtacacagggccagacactaccatgataacggcatcatactgtggggaaaaacatatctaccataccactggagaagagttttattctatgcaa

SEQ ID NO: 702647 - DNA, 120 bp, Artificial Sequence
  ENSG00000196277_48 (sequence is synthesized)
gacaaaccttagggaagaaatcaaggaaaaaaaacattggatttaagatgctattatatggcatatctgcaaaactctaggagcctttagtcatgcatgcaaatgtccccaggtaaaatg

SEQ ID NO: 702648 - DNA, 120 bp, Artificial Sequence
  ENSG00000196277_49 (sequence is synthesized)
ggcatatagctatcactttgtaagtaacacaagaccagctcaaaggttaaatgcttagaattcccaattgctaactttactaacaatatggtggtaagagtaaatttcagatttaaaata

SEQ ID NO: 702649 - DNA, 120 bp, Artificial Sequence
  ENSG00000196277_50 (sequence is synthesized)
ctagttttaagatttgttttccaggaatattttggctagttgcatttagaatgaggcagattcaaatatttgtgatacttcctgttgtttaaggcagaagggatttcaggttatccatta

SEQ ID NO: 702650 - DNA, 120 bp, Artificial Sequence
  ENSG00000196277_51 (sequence is synthesized)
agtcattcacgacatactgtatttcagttagaagctgatcttggtgtcaaatgcttaatgccaaatagaaggaagtctcaattttaagtactcttgaagaaatcctttttgctctgcaaa

SEQ ID NO: 702651 - DNA, 120 bp, Artificial Sequence
  ENSG00000196277_52 (sequence is synthesized)
taagagagatatctttaataaaaaccaagaagccaactgggtttgatcctgacaaacactacacaaagaactgtgattttggcctgtctctatttatgaatagttgagtgaatgtcgtga

SEQ ID NO: 702652 - DNA, 120 bp, Artificial Sequence
  ENSG00000196277_53 (sequence is synthesized)
aatactttgaaaatatgtagacaaagtaacaaggttaattaacaacattgtgggctccagtttgactttgtgacagaagtcctaggacaagtctaaaggaacatactgagaagggaggaa

SEQ ID NO: 702653 - DNA, 120 bp, Artificial Sequence
  ENSG00000196277_54 (sequence is synthesized)
cagaatgaatgatataggctctgttgtgtctccagagcaagtggccaattgagaggagggcaagtggatggtgacttgctgtggcattcagtgtgatgtaggaagaggctttgggttgag

SEQ ID NO: 702654 - DNA, 120 bp, Artificial Sequence
  ENSG00000196277_55 (sequence is synthesized)
acatacctgggttcaaatgtaaaccactccatttaccagccatgtggcattaagaatcactgagcttttctaaaactcaacataattatgtataaaagagataataactatgtcataagt

SEQ ID NO: 702655 - DNA, 120 bp, Artificial Sequence
  ENSG00000196277_56 (sequence is synthesized)
gtatcacaaaatactatattgagaaaatactatatcaactaaatgtcaacgtctttcccttcctgaagaggcaaaaagctttgcttagaaataagtttcagcataatttattaagatata

SEQ ID NO: 702656 - DNA, 120 bp, Artificial Sequence
  ENSG00000196277_57 (sequence is synthesized)
gcataatttattaagatatagtagctaaaaagatgcagttaagtgtagattaaacaccacagggtagataaaactcaatcctcaaaagaagaatttatggctgggcgtggtggctcacgc

SEQ ID NO: 702657 - DNA, 120 bp, Artificial Sequence
  ENSG00000196277_58 (sequence is synthesized)
aaaatgaagatggtaaccaggcaacatggttcttctatagttattaaaaataaaacgtgaagcttctacaatgcacaataattttctgacaagtttgtctggctttctttctgtcattgc

SEQ ID NO: 702658 - DNA, 120 bp, Artificial Sequence
  ENSG00000196277_59 (sequence is synthesized)
agtattgcatatccgggattcagaatctcctcctcatctaccttccttggctcctttgacatctctgtggaaacattattgacactatgttttcttctcttaaacaggtggactctgcat

SEQ ID NO: 702659 - DNA, 120 bp, Artificial Sequence
  ENSG00000196277_60 (sequence is synthesized)
agatggaaatgcagaaatcacccgtattcggccatcttggctcctcccccgaaacatccatgtctgattagcatgaaggttatgaggagaacgtgatcacagccaaggtagtcttctcaa

SEQ ID NO: 702660 - DNA, 120 bp, Artificial Sequence
  ENSG00000196277_61 (sequence is synthesized)
actatctccctgacgcagaccccaagccaaatcctcggcttggaggacgattcccggagcgaggcatgaaggcgcccgttgggaggcagaggggtgcgtgaagcggggccccgtggtcct

SEQ ID NO: 702661 - DNA, 120 bp, Artificial Sequence
  ENSG00000196277_62 (sequence is synthesized)
cctgctccggtgccggagggagacggagaaaaaatgggaggaaggcggatccggggccgctgagcggtgggttctgccgcagtgttctctcgcctcctgctccagcagcctctgccccat

SEQ ID NO: 702662 - DNA, 120 bp, Artificial Sequence
  ENSG00000196284_0 (sequence is synthesized)
cacagccgagtcaccttttccctttctacactccacactctcagtcccccaccccgcccctttccaagcgtgtcccgggccgcagcagcagaaaccgcaccatctccacccccacattct

SEQ ID NO: 702663 - DNA, 120 bp, Artificial Sequence
  ENSG00000196284_1 (sequence is synthesized)
cctcgcgggaagcgcagcagtgcctccaagggttcttaaagcagagatgaataatacggcagctagtccaatgtctactgcaacttcaagtagtggaaggagtacagggaagtctataag

SEQ ID NO: 702664 - DNA, 120 bp, Artificial Sequence
  ENSG00000196284_2 (sequence is synthesized)
ctttgcaacagaattacagagtatgataaactgcttatcaataacagctgtagcactgtggcttttctccatggactcatggtggtctttggaacaacgttcttcaactttgacagcttc

SEQ ID NO: 702665 - DNA, 120 bp, Artificial Sequence
  ENSG00000196284_3 (sequence is synthesized)
atagggaaaacagattctatagaaataattggaaaatcagtttttccctattgttatcacaatatccttccactgctgaatgattctggcaggtattctttaggtgatgctagaaggcct

SEQ ID NO: 702666 - DNA, 120 bp, Artificial Sequence
  ENSG00000196284_4 (sequence is synthesized)
cttcatgaaacagcagttttggtagaagatgtggtacacactcagttaattaatctgttacagcaagctgctgaagtttctcagctgcggggagcaagggtaatcactcctgaagatctt

SEQ ID NO: 702667 - DNA, 120 bp, Artificial Sequence
  ENSG00000196284_5 (sequence is synthesized)
ctgtttttgatgcgcaaagataagaaaaaacttagaagactgctaaaatacatgtttatccgagactacaaatcaaagattgtcaaaggcatcgatgaggatgatcttctcgaagacaaa

SEQ ID NO: 702668 - DNA, 120 bp, Artificial Sequence
  ENSG00000196284_6 (sequence is synthesized)
ttgagtggcagcaataatgcgaacaaaagacaaaagattgctcaggacttcctcaactctattgaccagacaggagaacttttagcaatgtttgaagatgacgaaattgatgaagttaaa

SEQ ID NO: 702669 - DNA, 120 bp, Artificial Sequence
  ENSG00000196284_7 (sequence is synthesized)
caagaaagaatggagagagcagaaagacaaactcgaattatggattcagctcaatatgcagaattctgtgaaagtcgacaattaagtttctccaaaaaagcttccaaatttcgagactgg

SEQ ID NO: 702670 - DNA, 120 bp, Artificial Sequence
  ENSG00000196284_8 (sequence is synthesized)
ttggactgcagcagtatggagataaaacccaatgttgtcgcaatggaaatcttagcatatttagcgtatgaaactgtggcacagttagtggatctggctcttcttgtgaggcaagacatg

SEQ ID NO: 702671 - DNA, 120 bp, Artificial Sequence
  ENSG00000196284_9 (sequence is synthesized)
ccatccagccctgccacatcagagaggccattcgacgctacagccacaggattggcccactttccccattcacaaatgcctaccgcaggaatgggatggcttttctagcctgctgatgtg

SEQ ID NO: 702672 - DNA, 120 bp, Artificial Sequence
  ENSG00000196284_10 (sequence is synthesized)
acaactgtgatgtgcctgcaacaacaggaaaggcaatgttatattaaggtgatttcttgtgaacaaaataaaatacaaatttacctttcttttatctgagggagtgggctggtctgttgt

SEQ ID NO: 702673 - DNA, 120 bp, Artificial Sequence
  ENSG00000196284_11 (sequence is synthesized)
gactttcaacttgctgactcctcctcttttccagcccctcaaccatcggtcttgtttactagatgggctgttcagctaattaatggcaggatgtttaggatagtctgtaggtggacaaga

SEQ ID NO: 702674 - DNA, 120 bp, Artificial Sequence
  ENSG00000196284_12 (sequence is synthesized)
atgcagatcacacagttttgaaattttaatttgagtagatttactgccctcagctcacataccttaaaagcagtggttgcccccgtccagcgttttgtctgcattttatttgatatattt

SEQ ID NO: 702675 - DNA, 120 bp, Artificial Sequence
  ENSG00000196284_13 (sequence is synthesized)
tataatccaggtttggaacaaggaaacaaaattaaaaggacagtgagttttcgccttcccttacaccaccaactttactttccaacatttgttgacatgtgttttagtgacagctatcca

SEQ ID NO: 702676 - DNA, 120 bp, Artificial Sequence
  ENSG00000196284_14 (sequence is synthesized)
ttttataaacttacagtaatcaaagatctaacagacctgataaatcacctgttcccacctcctttccccttcactccacttatagtatgtgtcattttcaatgcctgcttcccaacttcc

SEQ ID NO: 702677 - DNA, 120 bp, Artificial Sequence
  ENSG00000196284_15 (sequence is synthesized)
tgccatctgcctttcatgtgtgtttttcctcacacagaacctcttcctccatcttcatttccctccttttcctgttcctccaatccccagatccaccactcctgcacatgccatacacat

SEQ ID NO: 702678 - DNA, 120 bp, Artificial Sequence
  ENSG00000196284_16 (sequence is synthesized)
ttagaagccaagtattcagaatcagtagaaggggagcagagtgatttcttgcttcctcccttcaaagcactaccacacctagactggaaatgtgggctgggtaatttcttgctgttagca

SEQ ID NO: 702679 - DNA, 120 bp, Artificial Sequence
  ENSG00000196284_17 (sequence is synthesized)
gccgagctacccttctggcatctatactttctccagtaaatgaggaaccgtaactctttggaacaaaccaaaatatagcagatgtaattgtacagttcctgattaaacttcagttgcaaa

SEQ ID NO: 702680 - DNA, 120 bp, Artificial Sequence
  ENSG00000196284_18 (sequence is synthesized)
aaagaaagttatttctttaattctgtgggagttttgtataattttacttttatggtttttacacatacttgaaacactctttctaaagaattaataaaaacagaaatgagaaacatgaaa

SEQ ID NO: 702681 - DNA, 120 bp, Artificial Sequence
  ENSG00000196284_19 (sequence is synthesized)
aagaaagtagaaatagttctcccttcacccaaatttggaagtataaaactttctgaacatgccatttagaggttatgtcattagctttcctgccttcttatattgtaatagttgcgattc

SEQ ID NO: 702682 - DNA, 120 bp, Artificial Sequence
  ENSG00000196284_20 (sequence is synthesized)
aaaaacactgtttcaattttaaattcaagactttttatttgaaaaccatcagactcaaagaattatgaggctcagttaatattattatgccacattatttacatttgttaactgtcattt

SEQ ID NO: 702683 - DNA, 120 bp, Artificial Sequence
  ENSG00000196284_21 (sequence is synthesized)
acctgctctatgttaatctttttagaaaaaatttgcatttcagaaacaaaaagcacggatagatatataatatcaaaatattcccaaaggattttgatgttccatctatgcttgttaaaa

SEQ ID NO: 702684 - DNA, 120 bp, Artificial Sequence
  ENSG00000196284_22 (sequence is synthesized)
tgtatgattatgattaaactttttatcattcttattttccttggcatccataatcatggaaaattacaagcttgcagtaaacatcctaacttaacttaacttttaaacgatagcatttat

SEQ ID NO: 702685 - DNA, 120 bp, Artificial Sequence
  ENSG00000196284_23 (sequence is synthesized)
tgtatttggttttgatctgccaggcttatagatggtataaaattttcaggggataatttttcacatcaaaattccttctctcccacattatacattttaaagtatgcacaaggcagaaaa

SEQ ID NO: 702686 - DNA, 120 bp, Artificial Sequence
  ENSG00000196284_24 (sequence is synthesized)
tatagggtttgggtttttttccttcgttttattccacctgatctccttatagtcccagagaaggaagactcaatgtacatttctctcagaaatatgacaggtctgtgtttttgttggtct

SEQ ID NO: 702687 - DNA, 120 bp, Artificial Sequence
  ENSG00000196284_25 (sequence is synthesized)
ggcatatgtttgtctatcttgaacagtctgacaggtaattatttataaaatctggttttgcccagtaagttcatataaaacctttcatttttcatcataagccagtaagctgaatttaga

SEQ ID NO: 702688 - DNA, 120 bp, Artificial Sequence
  ENSG00000196284_26 (sequence is synthesized)
ataaagcaaggtcatttatgtctgtcctgaaccagcctacatgtccccataattgctcaatatttttaattcccttttctattttttatacttaggttctttctctgactctttgcacaa

SEQ ID NO: 702689 - DNA, 120 bp, Artificial Sequence
  ENSG00000196284_27 (sequence is synthesized)
tactaaatttgaagtgaaataaaacttccttcagcagtgactatagaaacaaaagaaaatttacagaaggaatgtttaagaaaacttcagtaaattattttctcaataatcataatgtta

SEQ ID NO: 702690 - DNA, 120 bp, Artificial Sequence
  ENSG00000196284_28 (sequence is synthesized)
gagcagaagatagtcttagagatcattaagaacagctgctcatcttgcaaatgaaaaaaccatggcctagagagggaaagtgagtttcctaagatcactcaataatgtagtgacagacca

SEQ ID NO: 702691 - DNA, 120 bp, Artificial Sequence
  ENSG00000196284_29 (sequence is synthesized)
gagatgagaatcgatggtccctaattttcagtcggtattatacagtattttctaccatactgggttagcataagaatattactaagacatgttggggttttatggcatatttatcctaga

SEQ ID NO: 702692 - DNA, 120 bp, Artificial Sequence
  ENSG00000196284_30 (sequence is synthesized)
caacgatgtaaatttatttaaaaactgtactaattatggatacatcctaaagcatacgtgttatatagtaaaatcttcagtgtgactgtggtattaagtaaacagtctgttatcttacac

SEQ ID NO: 702693 - DNA, 120 bp, Artificial Sequence
  ENSG00000196284_31 (sequence is synthesized)
atcaggcttaactctaagtcaaatggaaatatacaaagctagtttctattttttgtcccttgtattttagagactgaatttgaaaataaataagccaataaataaatagcgtctcttgat

SEQ ID NO: 702694 - DNA, 120 bp, Artificial Sequence
  ENSG00000196284_32 (sequence is synthesized)
actgcttcctagatttaagggtaaagaaagtagaaatatttctcccttcacctaaatttggaagtataactttctgaacgtgccatttagagggttatgccattagctttcctgccttct

SEQ ID NO: 702695 - DNA, 120 bp, Artificial Sequence
  ENSG00000196284_33 (sequence is synthesized)
tagattgtaatcgttgtgattcaaaaatactgtttcaattttaaaaccaagactttttatttgaaaaccatcagaagcacaaatattttttaaatggtgtatataattcctgtatctggg

SEQ ID NO: 702696 - DNA, 120 bp, Artificial Sequence
  ENSG00000196284_34 (sequence is synthesized)
gagaacccttcatttattgctgttctttgtttttataaaataataaacaagccatgtctgatgcttttaccatgtagaagacaaataaacataactggtgattcttggtctgaaagaaaa

SEQ ID NO: 702697 - DNA, 120 bp, Artificial Sequence
  ENSG00000196284_35 (sequence is synthesized)
ggggcattatggctgcctctgttgccccacgcaggtcgccagggaagtgggggaaagccagcagccgcaggcctcacccagctcccatgcagcccacagcccgaaaggccggtctcactc

SEQ ID NO: 702698 - DNA, 120 bp, Artificial Sequence
  ENSG00000196284_36 (sequence is synthesized)
caccatgccctctgcccgtaacagcaccaactttatttccaggcagctggtgagcagggctgagaactttccccaggctaccggcttcctagctgagaaagcaagcctactcacagttcc

SEQ ID NO: 702699 - DNA, 120 bp, Artificial Sequence
  ENSG00000196284_37 (sequence is synthesized)
cccattcacaatttctttttctttgacagaatgcctaccgcaggaatgggatggcttttctagcctgctgatgtgacaactgtgatgtgcctgcaacaacaggaaaggcaatgttatatt

SEQ ID NO: 702700 - DNA, 120 bp, Artificial Sequence
  ENSG00000196284_38 (sequence is synthesized)
agacctgctctcaaaacaagcttccttcgtttaattctgcattttctgcttaggcaaccaccctatcaatatacttgaacaatgaaacaatttggctacggaagcactgtctctgaattc

SEQ ID NO: 702701 - DNA, 120 bp, Artificial Sequence
  ENSG00000196284_39 (sequence is synthesized)
ggaatcattaaagagggaaattgttgctttatggcacggcgagagaagagttaggtagttagtgggagtgtagcatccagaaagaggaaaagatccgctgtgttctctgtgggatgaata

SEQ ID NO: 702702 - DNA, 120 bp, Artificial Sequence
  ENSG00000196284_40 (sequence is synthesized)
gtagtggaaggagtacagggaagtctataagctttgcaacagaattacagagtatgatctcgtattgttgctgttgagaagtcctggctgggaacggtggctaacacctgtaatcccagc

SEQ ID NO: 702703 - DNA, 81 bp, Artificial Sequence
  ENSG00000196284_41 (sequence is synthesized)
actctgggaggctgaggaaggaggttagcgagaaccctgtctctactaaaaatgaaaaaataaaaatagctggtgtggtag

SEQ ID NO: 702704 - DNA, 120 bp, Artificial Sequence
  ENSG00000196289_0 (sequence is synthesized)
atgtcttccatccgcttcctgtgccagcgctgccaccaggccctgaagctgagcggctcctcggagtctaggagcctccctgcagccccggcgcccacctctgggcaggctgagcccgga

SEQ ID NO: 702705 - DNA, 120 bp, Artificial Sequence
  ENSG00000196289_1 (sequence is synthesized)
gacacccgggagcccggcgtcaccaccagggaggtgacagacgctgaggagcaacaggacggtgcctctagcagatcccctccaggcgatggcagtgtgtccaagggccatgccaacatc

SEQ ID NO: 702706 - DNA, 120 bp, Artificial Sequence
  ENSG00000196289_2 (sequence is synthesized)
ttcaccctgctgggggagcttggcgccatgcacatgctcagtagcatccagaaggcagctggtgacatttttgacatagtctctggccaagcagttgtggaccatcccctgtgtgaagaa

SEQ ID NO: 702707 - DNA, 120 bp, Artificial Sequence
  ENSG00000196289_3 (sequence is synthesized)
tgcaccgacagtcttttagagcagctggacatccagctcgctctcacagaagctgacagtcagaactaccaacgctgcctggagaccggggagctggcgaccagcgaggacgaggcggcg

SEQ ID NO: 702708 - DNA, 120 bp, Artificial Sequence
  ENSG00000196289_4 (sequence is synthesized)
gcgctgcgggcggagctgcgggacctggagctggaggaggccaggctggtgcaggagctggaggatgtggacaggaacaatgcaagagcagcggcggatctccaggcagcccaggcagag

SEQ ID NO: 702709 - DNA, 120 bp, Artificial Sequence
  ENSG00000196289_5 (sequence is synthesized)
gagaaccagctgcagtatgccagggtccagagggaccggctgaaggaaatcaactgtttcaccgccacgtttgagatctgggtggagggccccttgggcgtcatcaataacttcaggttg

SEQ ID NO: 702710 - DNA, 120 bp, Artificial Sequence
  ENSG00000196289_6 (sequence is synthesized)
ggccgcctccccactgtccgtgtgggctggaatgagattaacactgcctggggacaggcggccttgctgctccttaccctggccaatacaattggactgcagtttcagaggtatcgactc

SEQ ID NO: 702711 - DNA, 120 bp, Artificial Sequence
  ENSG00000196289_7 (sequence is synthesized)
atcccctgcggaaaccattcgtatctgaagtctttaacagatgaccgcactgagctgccgttgttctgttatggggggcaggatgttttcctcaataacaagtatgaccgcgcgatggtg

SEQ ID NO: 702712 - DNA, 120 bp, Artificial Sequence
  ENSG00000196289_8 (sequence is synthesized)
gccttcctggactgcatgcagcagttcaaggaagaggctgagaagggtgagctgggcctctctctgccctacgggatccaggtggagacaggcctgatggaggacgttggcggccgaggg

SEQ ID NO: 702713 - DNA, 120 bp, Artificial Sequence
  ENSG00000196289_9 (sequence is synthesized)
gaatgctattccatcagaacccatctgaacacgcaggagctgtggacaaaggcactcaagttcatgcttataaatttcaagtggagtctcatctgggttgcctcaaggtatcaaaagtag

SEQ ID NO: 702714 - DNA, 120 bp, Artificial Sequence
  ENSG00000196290_0 (sequence is synthesized)
gggactggtgagtagtgggcgatttaaaaacccgcgagtgtagttgtgaccttcgcggtaggtgccggttggggccggctgtgattgttatcttggtgctgcagaggacagcagaagagg

SEQ ID NO: 702715 - DNA, 120 bp, Artificial Sequence
  ENSG00000196290_1 (sequence is synthesized)
agattgggtcagaaaactgccctgccgcaccagagcacagcgcactagtgggacaggggtcctgactcagacttaactggctgtgtctcgtggtttttcactgtcctggaaaaggcctga

SEQ ID NO: 702716 - DNA, 120 bp, Artificial Sequence
  ENSG00000196290_2 (sequence is synthesized)
agtggcactgaaatgaggcatagatgagaaacttgaactttacctgatttctgtatgttgtcatcttgcgtacgcccagtccccacgacagtccggtttgtagattccctgatctgcaat

SEQ ID NO: 702717 - DNA, 120 bp, Artificial Sequence
  ENSG00000196290_3 (sequence is synthesized)
tcttcccgttccttcatggatttgaaggctctcctttcttccttgaatgactttgcatccctctcgtttgctgagagttgggacaatgttggattactggtggaaccaagcccaccacat

SEQ ID NO: 702718 - DNA, 120 bp, Artificial Sequence
  ENSG00000196290_4 (sequence is synthesized)
actgtaaatacactcttcctgaccaatgacctgactgaggaagtgatggaggaggtgctgcaaaagaaggcagacctcattctctcctaccatccgcctatcttccgacccatgaagcgc

SEQ ID NO: 702719 - DNA, 120 bp, Artificial Sequence
  ENSG00000196290_5 (sequence is synthesized)
ataacctggaacacatggaaggagcgcctggtgatccgggctctggagaacagagtcggtatctactctcctcatacagcctatgatgctgcgccccagggcgtcaacaactggttggct

SEQ ID NO: 702720 - DNA, 120 bp, Artificial Sequence
  ENSG00000196290_6 (sequence is synthesized)
aaagggcttggagcttgtacctccaggcccatacatccttccaaagctcccaactaccctacagagggaaaccaccgagtagaattcaacgttaactacacccaagacctggacaaagtc

SEQ ID NO: 702721 - DNA, 120 bp, Artificial Sequence
  ENSG00000196290_7 (sequence is synthesized)
atgtctgcagtgaaaggaattgacggtgtttctgtcacttctttttctgctaggactggtaatgaggaacaaacacggattaatctgaattgtactcagaaggctttgatgcaggtggta

SEQ ID NO: 702722 - DNA, 120 bp, Artificial Sequence
  ENSG00000196290_8 (sequence is synthesized)
gattttctttcccggaacaaacaactttatcagaagacggaaattctgtcactggagaagcctttgcttctacatactggaatgggacggttatgcacactggatgaatctgtctccctg

SEQ ID NO: 702723 - DNA, 120 bp, Artificial Sequence
  ENSG00000196290_9 (sequence is synthesized)
gcaaccatgattgatcgaataaaaagacacctaaaactatctcatattcgcttagcccttggggtggggagaaccttagagtctcaagtcaaagtcgtggccctgtgtgctggttctggg

SEQ ID NO: 702724 - DNA, 120 bp, Artificial Sequence
  ENSG00000196290_10 (sequence is synthesized)
agcagcgttctgcagggtgttgaggctgacctttacctcacaggtgagatgtcccatcatgatactttggatgctgcttcccaaggaataaatgtcatcctctgtgaacacagcaacact

SEQ ID NO: 702725 - DNA, 120 bp, Artificial Sequence
  ENSG00000196290_11 (sequence is synthesized)
gaacgaggctttctttctgaccttcgagatatgctggattctcacttggagaataagataaatattatcctatcagagactgacagggaccctcttcaggtggtataattgcagaaacat

SEQ ID NO: 702726 - DNA, 120 bp, Artificial Sequence
  ENSG00000196290_12 (sequence is synthesized)
caggataacacattctacaaatcagctggatgccaacttaaatttgtaacatgagtcagtgggactggtgtgcttccagagagtgtcttcgagggtatcatcatttccggtttgttaatc

SEQ ID NO: 702727 - DNA, 120 bp, Artificial Sequence
  ENSG00000196290_13 (sequence is synthesized)
ttattcaccaaatgttctatcgctcgtaaggtaaaactgtaatataactaccatattaaataacaaatgttcattataaactctaggaaagattgaataaaatctgtttacttaacattc

SEQ ID NO: 702728 - DNA, 120 bp, Artificial Sequence
  ENSG00000196290_14 (sequence is synthesized)
acgcagagaagtttccgggactggtgagaaaacaagattggagaggttaaatggcttacctaagttacagtgtgctggtaagtggcagagccactatttgaacccagatctctatgacga

SEQ ID NO: 702729 - DNA, 120 bp, Artificial Sequence
  ENSG00000196296_0 (sequence is synthesized)
ggccggctgctcaagtgggacgggggtcagagctttgtggagggaagaaaaacctggagggggcaggagagtaaaaagaagaaacccaggcagacaggcagttggacacactgaggaaga

SEQ ID NO: 702730 - DNA, 120 bp, Artificial Sequence
  ENSG00000196296_1 (sequence is synthesized)
ccccccacgagtgggaaccccctggaaggaacacaccggccccggcccccaggaagggagcacaatggaggccgctcatgctaaaaccacggaggaatgtttggcctattttggggtgag

SEQ ID NO: 702731 - DNA, 120 bp, Artificial Sequence
  ENSG00000196296_2 (sequence is synthesized)
tgagaccacgggcctcaccccggaccaagttaagcggaatctggagaaatacggcctcaatgagctccctgctgaggaagggaagaccctgtgggagctggtgatagagcagtttgaaga

SEQ ID NO: 702732 - DNA, 120 bp, Artificial Sequence
  ENSG00000196296_3 (sequence is synthesized)
cctcctggtgcggattctcctcctggccgcatgcatttccttcgtgctggcctggtttgaggaaggtgaagagaccatcactgcctttgttgaaccctttgtcatcctcttgatcctcat

SEQ ID NO: 702733 - DNA, 120 bp, Artificial Sequence
  ENSG00000196296_4 (sequence is synthesized)
tgccaatgccatcgtgggggtttggcaggagcggaacgcagagaacgccatcgaggccctgaaggagtatgagccagagatggggaaggtctaccgggctgaccgcaagtcagtgcaaag

SEQ ID NO: 702734 - DNA, 120 bp, Artificial Sequence
  ENSG00000196296_5 (sequence is synthesized)
gatcaaggctcgggacatcgtccctggggacatcgtggaggtggctgtgggggacaaagtccctgcagacatccgaatcctcgccatcaaatccaccacgctgcgggttgaccagtccat

SEQ ID NO: 702735 - DNA, 120 bp, Artificial Sequence
  ENSG00000196296_6 (sequence is synthesized)
cctgacaggcgagtctgtatctgtcatcaaacacacggagcccgttcctgacccccgagctgtcaaccaggacaagaagaacatgcttttctcgggcaccaacattgcagccggcaaggc

SEQ ID NO: 702736 - DNA, 120 bp, Artificial Sequence
  ENSG00000196296_7 (sequence is synthesized)
cttgggcatcgtggccaccactggtgtgggcaccgagattgggaagatccgagaccaaatggctgccacagaacaggacaagacccccttgcagcagaagctggatgagtttggggagca

SEQ ID NO: 702737 - DNA, 120 bp, Artificial Sequence
  ENSG00000196296_8 (sequence is synthesized)
gctctccaaggtcatctccctcatctgtgtggctgtctggcttatcaacattggccacttcaacgaccccgtccatgggggctcctggttccgcggggccatctactactttaagattgc

SEQ ID NO: 702738 - DNA, 120 bp, Artificial Sequence
  ENSG00000196296_9 (sequence is synthesized)
cgtggccttggctgtggctgccatccccgaaggtcttcctgcagtcatcaccacctgcctggccctgggtacccgtcggatggcaaagaagaatgccattgtaagaagcttgccctccgt

SEQ ID NO: 702739 - DNA, 120 bp, Artificial Sequence
  ENSG00000196296_10 (sequence is synthesized)
agagaccctgggctgcacctctgtcatctgttccgacaagacaggcaccctcaccaccaaccagatgtctgtctgcaagatgtttatcattgacaaggtggatggggacatctgcctcct

SEQ ID NO: 702740 - DNA, 120 bp, Artificial Sequence
  ENSG00000196296_11 (sequence is synthesized)
gaatgagttctccatcaccggctccacttacgctccagagggagaggtcttgaagaatgataagccagtccggccagggcagtatgacgggctggtggagctggccaccatctgtgccct

SEQ ID NO: 702741 - DNA, 120 bp, Artificial Sequence
  ENSG00000196296_12 (sequence is synthesized)
ctgcaatgactcctccttggacttcaacgaggccaaaggtgtctatgagaaggtcggcgaggccaccgagacagcactcaccaccctggtggagaagatgaatgtgttcaacacggatgt

SEQ ID NO: 702742 - DNA, 120 bp, Artificial Sequence
  ENSG00000196296_13 (sequence is synthesized)
gagaagcctctcgaaggtggagagagccaacgcctgcaactcggtgatccgccagctaatgaagaaggaattcaccctggagttctcccgagacagaaagtccatgtctgtctattgctc

SEQ ID NO: 702743 - DNA, 120 bp, Artificial Sequence
  ENSG00000196296_14 (sequence is synthesized)
ctgagggcgtcatcgaccgctgtaactatgtgcgagttggcaccacccgggtgccactgacggggccggtgaaggaaaagatcatggcggtgatcaaggagtggggcactggccgggaca

SEQ ID NO: 702744 - DNA, 120 bp, Artificial Sequence
  ENSG00000196296_15 (sequence is synthesized)
ccctgcgctgcttggccctggccacccgggacacccccccgaagcgagaggaaatggtcctggatgactctgccaggttcctggagtatgagacggacctgacattcgtgggtgtagtgg

SEQ ID NO: 702745 - DNA, 120 bp, Artificial Sequence
  ENSG00000196296_16 (sequence is synthesized)
gcatgctggaccctccgcgcaaggaggtcacgggctccatccagctgtgccgtgacgccgggatccgggtgatcatgatcactggggacaacaagggcacagccattgccatctgccggc

SEQ ID NO: 702746 - DNA, 120 bp, Artificial Sequence
  ENSG00000196296_17 (sequence is synthesized)
gaattggcatctttggggagaacgaggaggtggccgatcgcgcctacacgggccgagagttcgacgacctgcccctggctgaacagcgggaagcctgccgacgtgcctgctgcttcgccc

SEQ ID NO: 702747 - DNA, 120 bp, Artificial Sequence
  ENSG00000196296_18 (sequence is synthesized)
gtgtggagccctcgcacaagtccaagattgtggagtacctgcagtcctacgatgagatcacagccatgacaggtgatggcgtcaatgacgcccctgccctgaagaaggctgagattggca

SEQ ID NO: 702748 - DNA, 120 bp, Artificial Sequence
  ENSG00000196296_19 (sequence is synthesized)
ttgccatgggatctggcactgccgtggccaagactgcctctgagatggtgctggctgacgacaacttctccaccatcgtagctgctgtggaggagggccgcgccatctacaacaacatga

SEQ ID NO: 702749 - DNA, 120 bp, Artificial Sequence
  ENSG00000196296_20 (sequence is synthesized)
agcagttcatccgctacctcatttcctccaacgtgggcgaggtggtctgtatcttcctgaccgctgccctggggctgcctgaggccctgatcccggtgcagctgctatgggtgaacttgg

SEQ ID NO: 702750 - DNA, 120 bp, Artificial Sequence
  ENSG00000196296_21 (sequence is synthesized)
tgaccgacgggctcccagccacagccctgggcttcaacccaccagacctggacatcatggaccgccccccccggagccccaaggagcccctcatcagtggctggctcttcttccgctaca

SEQ ID NO: 702751 - DNA, 120 bp, Artificial Sequence
  ENSG00000196296_22 (sequence is synthesized)
tggcaatcgggggctatgtgggtgcagccaccgtgggagcagctgcctggtggttcctgtacgctgaggatgggcctcatgtcaactacagccagctgactcacttcatgcagtgcaccg

SEQ ID NO: 702752 - DNA, 120 bp, Artificial Sequence
  ENSG00000196296_23 (sequence is synthesized)
aggacaacacccactttgagggcatagactgtgaggtcttcgaggcccccgagcccatgaccatggccctgtccgtgctggtgaccatcgagatgtgcaatgcactgaacagcctgtccg

SEQ ID NO: 702753 - DNA, 120 bp, Artificial Sequence
  ENSG00000196296_24 (sequence is synthesized)
agaaccagtccctgctgcggatgccaccctgggtgaacatctggctgctgggctccatctgcctctccatgtccctgcacttcctcatcctctatgttgaccccctgccgatgatcttca

SEQ ID NO: 702754 - DNA, 120 bp, Artificial Sequence
  ENSG00000196296_25 (sequence is synthesized)
agctccgggccctggacctcacccagtggctcatggtcctcaagatctcactgccagtcattgggctcgacgaaatcctcaagttcgttgctcggaactacctagagggataactgttcc

SEQ ID NO: 702755 - DNA, 120 bp, Artificial Sequence
  ENSG00000196296_26 (sequence is synthesized)
ccctcctccatctctgagcccgtgtcacagatccagaagatgaaagaaggaagtgagcatccttttgctctgtcctccccaccccgatagtgacacatcttcaggcagagctgtggcaca

SEQ ID NO: 702756 - DNA, 120 bp, Artificial Sequence
  ENSG00000196296_27 (sequence is synthesized)
gacccccgtcctgtcccccacacccgtgtcatgtgtctgtttataaacatgtccccttccctttccttccccctcggccacccgcctccctctcaaccttgtaaattccccttcccaacc

SEQ ID NO: 702757 - DNA, 120 bp, Artificial Sequence
  ENSG00000196296_28 (sequence is synthesized)
ccgaggggcttgcagggacaaggcgaccgactgcgctgagctgcttatttattgaaaataaacgacggaaaagtctggccttgcctctgtgcaagcttggaggcctgggtcgccgctgtg

SEQ ID NO: 702758 - DNA, 120 bp, Artificial Sequence
  ENSG00000196296_29 (sequence is synthesized)
cccatgaactagaaattgctgttctgagaagcaagggctgtgtggtcagatcaggatgtttatcattgacaaggtggatggggacatctgcctcctgaatgagttctccatcaccggctc

SEQ ID NO: 702759 - DNA, 120 bp, Artificial Sequence
  ENSG00000196296_30 (sequence is synthesized)
atttgaaagccttagaggaggctgactgtgtaaagaagacggattctgctttgccccagaggttcccaagttttttttctgaccacagaacttttttgtcttggaacccatcttaaccat

SEQ ID NO: 702760 - DNA, 120 bp, Artificial Sequence
  ENSG00000196296_31 (sequence is synthesized)
ctctcttctcgggaatgaaaagcccagtctctgttgcgtttgcccaggattcaggatgtttatcattgacaaggtggatggggacatctgcctcctgaatgagttctccatcaccggctc

SEQ ID NO: 702761 - DNA, 120 bp, Artificial Sequence
  ENSG00000196296_32 (sequence is synthesized)
cctaaaggttagagtcctgtccggggcagaagtctcccaggcgctttctccttgaagcagccaacccttgaactgccccccactttgccgagtctgtttctggactccaggcgagcttct

SEQ ID NO: 702762 - DNA, 120 bp, Artificial Sequence
  ENSG00000196296_33 (sequence is synthesized)
tagcccttctctgggcaccaagctgtctgcccaccaccctagagcctccccactgcaggccggagtccagggcgctccatcccagaccttcacccactagaccttaacccggggccctcc

SEQ ID NO: 702763 - DNA, 120 bp, Artificial Sequence
  ENSG00000196296_34 (sequence is synthesized)
cacgcgtttctcccttcagggtttcttaaggaagagctgggccgttgtccaatgctcgcagggggaagaagatactgagaaaacagagtcccgagatccagagttttgggaggttttaat

SEQ ID NO: 702764 - DNA, 120 bp, Artificial Sequence
  ENSG00000196296_35 (sequence is synthesized)
gggatgaacttgatgaacctcaaggtggcctgattctcttagccacaaagtcttgggtgtggggggcatgaggctgaaccccaaatgaatctgtccttttcttctttttcctgggtagag

SEQ ID NO: 702765 - DNA, 120 bp, Artificial Sequence
  ENSG00000196296_36 (sequence is synthesized)
gttccccctcctccatctctgagcccgtgtcacaggtatcacccccttcttgccctcagcccagctgctgtgcccctgccacccgcgccccctcagccccttgcgcgtcgcatccaaggt

SEQ ID NO: 702766 - DNA, 120 bp, Artificial Sequence
  ENSG00000196305_0 (sequence is synthesized)
tccgtgcgcccggttgcagcgtggacgccggatgagttgcttttaggcttgctggcccgcggggctgtccaggcacgcgaggcccctcaggtacgccctctcttccctgcaggatccggc

SEQ ID NO: 702767 - DNA, 120 bp, Artificial Sequence
  ENSG00000196305_1 (sequence is synthesized)
cctcaaagacgagggtcacgcacgcgttacaaccccgaaacagtagcacaagatttaatttttaaaagagcgtgtttcttcggggcttgccgttcgttcgtttccagcctcaggaattta

SEQ ID NO: 702768 - DNA, 120 bp, Artificial Sequence
  ENSG00000196305_2 (sequence is synthesized)
tggtcgcctttttgaatgagcaacaaaatgcttcaacaagttccagaaaacataaattttcctgctgaagaagagaaaatcttggagttttggactgaatttaattgttttcaggaatgc

SEQ ID NO: 702769 - DNA, 120 bp, Artificial Sequence
  ENSG00000196305_3 (sequence is synthesized)
ttaaagcaatcaaaacataaaccaaaatttaccttctatgatggtcctccttttgcaactggactgcctcactatggacatatacttgcgggtacaattaaagatatagttacaagatat

SEQ ID NO: 702770 - DNA, 120 bp, Artificial Sequence
  ENSG00000196305_4 (sequence is synthesized)
gctcaccagagtgggtttcatgttgacagaagatttggatgggattgccatggcttacctgtggaatatgaaattgataagacactgggaatcagaggaccagaggatgtggccaaaatg

SEQ ID NO: 702771 - DNA, 120 bp, Artificial Sequence
  ENSG00000196305_5 (sequence is synthesized)
gggattacagagtataacaatcagtgccgagcaattgtgatgagatattctgctgagtggaagtctactgttagcagacttggccgatggattgactttgacaatgactataaaactctg

SEQ ID NO: 702772 - DNA, 120 bp, Artificial Sequence
  ENSG00000196305_6 (sequence is synthesized)
tatccacaattcatggaatcagtctggtgggtcttcaaacaactctatgataaaggccttgtttatagaggtgtgaaagtcatgcccttctctacggcatgtaacactccactttccaac

SEQ ID NO: 702773 - DNA, 120 bp, Artificial Sequence
  ENSG00000196305_7 (sequence is synthesized)
ttcgagtcacaccagaattataaggatgttcaagatccttcagtatttgtaactttccctttggaagaagatgaaactgtatctttagttgcttggacaaccactccctggactctacct

SEQ ID NO: 702774 - DNA, 120 bp, Artificial Sequence
  ENSG00000196305_8 (sequence is synthesized)
agtaaccttgctgtgtgtgttaatccagaaatgcaatatgtgaaaattaaagatgttgccagaggacgattactcattttaatggaagccagattgtcagccctctataaattggagagt

SEQ ID NO: 702775 - DNA, 120 bp, Artificial Sequence
  ENSG00000196305_9 (sequence is synthesized)
gactatgagatccttgaaagatttcctggtgcctatcttaaaggcaagaagtacaggcccctgtttgactatttcctgaagtgtaaagagaatggcgctttcactgtgcttgttgacaac

SEQ ID NO: 702776 - DNA, 120 bp, Artificial Sequence
  ENSG00000196305_10 (sequence is synthesized)
tatgtgaaggaagaagaaggcacaggggttgtccaccaagctccttacttcggtgctgaggactatcgggtctgtatggactttaacattattcggaaagactcactccctgtttgccct

SEQ ID NO: 702777 - DNA, 120 bp, Artificial Sequence
  ENSG00000196305_11 (sequence is synthesized)
gtggatgcttcaggctgcttcacaacggaggtgacagatttcgcaggacagtatgtgaaggatgctgacaaaagtatcatcaggactttgaaggaacaaggccgacttctggttgccacc

SEQ ID NO: 702778 - DNA, 120 bp, Artificial Sequence
  ENSG00000196305_12 (sequence is synthesized)
accttcactcacagctaccctttttgctggagatcagacactcctctaatttacaaagcagtgcccagctggtttgtgcgagtggagaacatggtggaccagctcctaaggaacaatgac

SEQ ID NO: 702779 - DNA, 120 bp, Artificial Sequence
  ENSG00000196305_13 (sequence is synthesized)
ctgtgctactgggtcccagagttggtacgagaaaaacgatttggaaattggctgaaagatgcacgtgactggacaatttccagaaacagatactggggcacccccatcccactgtgggtc

SEQ ID NO: 702780 - DNA, 120 bp, Artificial Sequence
  ENSG00000196305_14 (sequence is synthesized)
agcgatgactttgaggaggtggtatgcattgggtcagtggcggaacttgaagaactgtcaggagcaaagatctcagatctccacagagagagtgttgaccacctgaccattccttcacgc

SEQ ID NO: 702781 - DNA, 120 bp, Artificial Sequence
  ENSG00000196305_15 (sequence is synthesized)
tgtgggaagggatccttgcaccgcatctctgaagtgtttgactgttggtttgagagtggcagcatgccctatgctcaggttcattacccgtttgaaaacaagagggagtttgaggatgct

SEQ ID NO: 702782 - DNA, 120 bp, Artificial Sequence
  ENSG00000196305_16 (sequence is synthesized)
tttcctgcagatttcattgccgagggcatcgaccaaaccagaggatggttttataccctgctggtgctggccacggccctctttggacaaccgcctttcaagaacgtaattgtgaatggg

SEQ ID NO: 702783 - DNA, 120 bp, Artificial Sequence
  ENSG00000196305_17 (sequence is synthesized)
cttgtcctggcaagtgatggccaaaaaatgagcaaacggaaaaagaattatccagatccagtttccatcatccagaagtatggtgctgatgccctcagattatatctgattaactcccct

SEQ ID NO: 702784 - DNA, 120 bp, Artificial Sequence
  ENSG00000196305_18 (sequence is synthesized)
gtggtgagagcagaaaacctccgctttaaagaagagggtgtgcgggacgtccttaaggatgtactgctcccatggtacaatgcctatcgcttcttaatccagaacgttctgaggctccag

SEQ ID NO: 702785 - DNA, 120 bp, Artificial Sequence
  ENSG00000196305_19 (sequence is synthesized)
attggcttctttgagactgaaatggcagcttataggctttatactgtggtgcctcgcctggtcaagtttgtagatattctgaccaattggtatgttagaatgaaccgcagaagattaaag

SEQ ID NO: 702786 - DNA, 120 bp, Artificial Sequence
  ENSG00000196305_20 (sequence is synthesized)
ggtgaaaatgggatggaggattgtgtcatggccctagaaaccttgtttagtgttctgctttctctttgcagacttatggctccctacacaccttttctcactgaattgatgtaccagaat

SEQ ID NO: 702787 - DNA, 120 bp, Artificial Sequence
  ENSG00000196305_21 (sequence is synthesized)
ctaaaggtgctgattgaccctgtttctgttcaggacaaggacacactcagcattcactacctcatgctgccccgtgttcgagaagaattgattgacaagaaaacagagagtgcagtatct

SEQ ID NO: 702788 - DNA, 120 bp, Artificial Sequence
  ENSG00000196305_22 (sequence is synthesized)
cagatgcagtctgtgattgaacttggaagagtgatcagagaccgaaaaactattcccataaagtatcctttgaaagaaattgtggttatccatcaagatccagaagctcttaaagatatc

SEQ ID NO: 702789 - DNA, 120 bp, Artificial Sequence
  ENSG00000196305_23 (sequence is synthesized)
aagtctttggagaagtatatcattgaggaactcaatgttcgaaaagttacactgtctacagataaaaacaagtatggcattcggctaagggcagaaccagatcacatggtcctggggaag

SEQ ID NO: 702790 - DNA, 120 bp, Artificial Sequence
  ENSG00000196305_24 (sequence is synthesized)
cgtctgaagggagcctttaaggcagtgatgacgtccatcaagcagttgagcagtgaggagctggagcagttccagaagactgggaccattgttgtggaaggccatgaattgcacgatgaa

SEQ ID NO: 702791 - DNA, 120 bp, Artificial Sequence
  ENSG00000196305_25 (sequence is synthesized)
gacatccgcctcatgtacacctttgatcaggccacaggtgggactgcgcaatttgaagcacactcagatgctcaggctttggtcctcttagatgtcactcctgaccagtcaatggtagat

SEQ ID NO: 702792 - DNA, 120 bp, Artificial Sequence
  ENSG00000196305_26 (sequence is synthesized)
gaaggaatggctcgggaagtcatcaatcgcatacagaaacttcgcaaaaagtgcaatctggttccaactgatgaaatcacagtgtactataaagcaaagtctgaaggaacatatctgaat

SEQ ID NO: 702793 - DNA, 120 bp, Artificial Sequence
  ENSG00000196305_27 (sequence is synthesized)
agtgttattgaaagccacacagagttcatatttaccaccataaaggctcccttgaaaccatatccagtttctccatcggataaagtccttattcaagaaaaaacacagttgaagggatct

SEQ ID NO: 702794 - DNA, 120 bp, Artificial Sequence
  ENSG00000196305_28 (sequence is synthesized)
gaactggaaattacactcaccagaggatcttcccttcctggtcctgcttgtgcatatgtcaatcttaacatttgtgcaaatggcagtgaacaaggtggagtattgctcctggaaaatcca

SEQ ID NO: 702795 - DNA, 120 bp, Artificial Sequence
  ENSG00000196305_29 (sequence is synthesized)
aaaggtgacaataggttggaccttttaaagctgaagagtgttgtcactagcatttttggtgtgaaaaatacagagctggctgtcttccatgatgaaacagaaatacaaaaccaaactgac

SEQ ID NO: 702796 - DNA, 120 bp, Artificial Sequence
  ENSG00000196305_30 (sequence is synthesized)
ttactgagtcttagtggaaaaacactttgtgtgactgcaggatcggctccctctctgatcaacagttctagtactcttctttgtcagtatatcaacctacagctcctgaatgcaaagcca

SEQ ID NO: 702797 - DNA, 120 bp, Artificial Sequence
  ENSG00000196305_31 (sequence is synthesized)
caagagtgtttaatggggacagtgggcactctcctgcttgaaaacccacttgggcagaatggactcacccaccaaggtcttctgtatgaagcagccaaggtgtttggccttcggagcagg

SEQ ID NO: 702798 - DNA, 120 bp, Artificial Sequence
  ENSG00000196305_32 (sequence is synthesized)
aagctaaagctgtttctgaatgagacccaaacgcaggaaattacagaagacatccccgtgaagactttgaatatgaagactgtgtatgtttctgtgttaccaacaacagcagacttctag

SEQ ID NO: 702799 - DNA, 120 bp, Artificial Sequence
  ENSG00000196305_33 (sequence is synthesized)
catgtacttatcaatgttgttcggtcagcccttccctaattacacctatcccctacacatacatgcacatagacacacacatgaacacactgaagatatttccttcaggtgtgtgtaaaa

SEQ ID NO: 702800 - DNA, 120 bp, Artificial Sequence
  ENSG00000196305_34 (sequence is synthesized)
tatgctgcttggattgaaattcaaatgggattgattagtcaagtaacttgagacctcacagtaatcttcacacttaaccttagacacctatgcagtcatgttgggagcaggttacaatgt

SEQ ID NO: 702801 - DNA, 120 bp, Artificial Sequence
  ENSG00000196305_35 (sequence is synthesized)
tacttcagcccacagtttatttctatacttgagttcttaagtacagaagatagaagtgatttaaatggcatagtatatatatcattttctggccttttaaaatttatttgagacctcttg

SEQ ID NO: 702802 - DNA, 120 bp, Artificial Sequence
  ENSG00000196305_36 (sequence is synthesized)
atgaaatggacatattatatatttctgccacctggattttcctggataatttgatggaatattttaagtttcagtaaatcagaacaataaacaaactcagatataaatgtgttgaaagta

SEQ ID NO: 702803 - DNA, 120 bp, Artificial Sequence
  ENSG00000196305_37 (sequence is synthesized)
attcattctcccatagataaatgaaacttgaaatgtgtaaactttgaagaacataaaaacttcatggtggtttcttattaagacagtggactagacatctaataaaacttctttccaaaa

SEQ ID NO: 702804 - DNA, 120 bp, Artificial Sequence
  ENSG00000196305_38 (sequence is synthesized)
acagacgtgagccactgcgcccagcctgccagttgcttttcttaacattatgtgttaaatatcattcgatatcagtagatattagcattttaatgtctgcctgatgtcttactatattga

SEQ ID NO: 702805 - DNA, 120 bp, Artificial Sequence
  ENSG00000196305_39 (sequence is synthesized)
ctgatgtcttactatattgatctgttataatttaccagccagtctcccaatgaaagacattgttttttcacttatttggcagacagaaactctaaaaagaaaatggcataaatgtttgca

SEQ ID NO: 702806 - DNA, 120 bp, Artificial Sequence
  ENSG00000196305_40 (sequence is synthesized)
agcgcgttgcatcacctccgtgcgcccggttgcagcgtggacgccggatgagttgcttttaggcttgctggcccgcggggctgtccaggcacgcgaggcccctcagcaacaaaatgcttc

SEQ ID NO: 702807 - DNA, 120 bp, Artificial Sequence
  ENSG00000196305_41 (sequence is synthesized)
agtagaatgaacagcaaatgtagttactaaatgggcattgaaatggtttatggtcccttgtgctttttttattaatttattttttgtagaaaaagtgttagcttccaccttcaaccctat

SEQ ID NO: 702808 - DNA, 120 bp, Artificial Sequence
  ENSG00000196305_42 (sequence is synthesized)
tacttaaacggttagcttaaactgaaccatctctcttctgacttctgtgtgcttaattggtctaactttcttgcatgatcaccaatagggaaaaattctaataagtataacatgatatat

SEQ ID NO: 702809 - DNA, 120 bp, Artificial Sequence
  ENSG00000196305_43 (sequence is synthesized)
aggccttttctttttttctcaaatacttttttcaatttttttaacttttcattttgaaataatttgacttattaaacaattgaaaaagtagtatgatgggttcccctatatccttcatcc

SEQ ID NO: 702810 - DNA, 120 bp, Artificial Sequence
  ENSG00000196305_44 (sequence is synthesized)
cagtctctcattggcttctttgagactgaaatggcaggtgagtctctcttggtctgtcctcccaggaataaggactattctctttgtaactgcccttttgatatttaatagtggaaatat

SEQ ID NO: 702811 - DNA, 120 bp, Artificial Sequence
  ENSG00000196305_45 (sequence is synthesized)
tgagagatacagaaaattaaataattgtttccttttacctctcatatagttttgttaaggcttgttaattgtcgtgatatctttgtttcaagaccctggggacttctggcctggtgtggt

SEQ ID NO: 702812 - DNA, 120 bp, Artificial Sequence
  ENSG00000196305_46 (sequence is synthesized)
acttcgcaaaaaggttagtttgtcagttaagaataagctactgttttggctttttgtttgttttggttgtttggagaagataggagaggcaggtaatataaaccatagtgatcaatgcat

SEQ ID NO: 702813 - DNA, 120 bp, Artificial Sequence
  ENSG00000196305_47 (sequence is synthesized)
aacaatcactaatccatagtccatttggaatgtattctgcagaaaagtcactcctcttcctctccccacgtgttcactcccaagtcgtagctttcagccagcctgtgccttttcccatcc

SEQ ID NO: 702814 - DNA, 120 bp, Artificial Sequence
  ENSG00000196305_48 (sequence is synthesized)
ttttttttagctccgttgggcttctacagaatatcccctgtgactggagcagaaggtaatcagagctgatagtgtctttgcagaagggcagaggtgcagtcagcatagacaggcttctag

SEQ ID NO: 702815 - DNA, 120 bp, Artificial Sequence
  ENSG00000196305_49 (sequence is synthesized)
cttaggggagattcccggatttggacagagttgggtagtttttccttattagagagctgaggaatatgcagggagctcatcctggagcgcagaggggctgcaaagcccctgctagtgaga

SEQ ID NO: 702816 - DNA, 120 bp, Artificial Sequence
  ENSG00000196305_50 (sequence is synthesized)
gaatcaggaatttcttgccctgtagagggcagtgacagctaacatacatctttcttcccagacggttcaaggtctgaggaggctgttccagcagatgagtgggtgcttgtgacctctgaa

SEQ ID NO: 702817 - DNA, 120 bp, Artificial Sequence
  ENSG00000196305_51 (sequence is synthesized)
tcagttcagagctttgtaagtgggttctaagtaatttcttggtttcaacattcatgaggtactgattgttctaggaaaagaaacatgccctatcccccaaagagtggtgaaaaagacaca

SEQ ID NO: 702818 - DNA, 120 bp, Artificial Sequence
  ENSG00000196305_52 (sequence is synthesized)
aagttaatcatgtactgagtgcagttagtcttacggatcacccagcagggagggaagggtgactgcccttctgtgatgattcagcatgggatctgtagcccttgttcaacagtaccttcc

SEQ ID NO: 702819 - DNA, 120 bp, Artificial Sequence
  ENSG00000196305_53 (sequence is synthesized)
ttaagagaattggaataattatttaatcatgtttaatagataactttttcttcttgtcatcaaaatgaattcactaggcgagatgcagtggatcattcctgaaatctaccacttttggaa

SEQ ID NO: 702820 - DNA, 90 bp, Artificial Sequence
  ENSG00000196305_54 (sequence is synthesized)
ggaagccaaggtgataaccttgccaacataataagatcctgcctcaattaaaaaaaaaaaaagggccaggcatggtagctcacacctgta

SEQ ID NO: 702821 - DNA, 61 bp, Artificial Sequence
  ENSG00000196305_55 (sequence is synthesized)
attacttgaggtcaggagttcaagacctgatgtacctataatcccagctactcaggaggct

SEQ ID NO: 702822 - DNA, 120 bp, Artificial Sequence
  ENSG00000196305_56 (sequence is synthesized)
ttttattgcttttgctcatttgtgtgaaaaaatagtgctgcattatagactctccagatttaaataacattttgctgagttgggaagaagtgtttctccttatttgattgtcatggtgtg

SEQ ID NO: 702823 - DNA, 120 bp, Artificial Sequence
  ENSG00000196312_0 (sequence is synthesized)
atgagcgtggagccgccgccggagctggaggagaaggcggcgtcggagcccgaggcgggagccatgccggagaagcgcgcgggcgcgcaggccgcggggagcacctggctacaaggcttt

SEQ ID NO: 702824 - DNA, 120 bp, Artificial Sequence
  ENSG00000196312_1 (sequence is synthesized)
gaaacattttctcaacacacattcctcatgaatggtctcattcaaggtgtaaagggcctgctctcttttttgagtgccccactcattggtgccctgtctgatgtgtgggggaggaagccc

SEQ ID NO: 702825 - DNA, 120 bp, Artificial Sequence
  ENSG00000196312_2 (sequence is synthesized)
cctgtctgatgtgtgggggaggaagccctttctcctcggcactgtattctttacctgcttcccaatcccactgatgaggatcagcccatgccgggtgtggtggcgtgcacctgtagtccc

SEQ ID NO: 702826 - DNA, 120 bp, Artificial Sequence
  ENSG00000196312_3 (sequence is synthesized)
ctccaaccgtgcagcccgcccctgacgccgccggtaactgcgacagtcggggtcggtgcggtttgctaagtggtcggttcctggagctgcggtcttctgctagcctgatccgcagcttca

SEQ ID NO: 702827 - DNA, 120 bp, Artificial Sequence
  ENSG00000196312_4 (sequence is synthesized)
gcggtcttctgctagcctgatccgcagcttcagcctccgccgcctcctcagccctcggcgccgccgcctgacccgcaggccgccgcgggccgcagagcccatgagggcgcgggcaccgcc

SEQ ID NO: 702828 - DNA, 120 bp, Artificial Sequence
  ENSG00000196312_5 (sequence is synthesized)
ctgatgaggatcagcccatgtttatgcaaataccgtatacgtgataaacgtccctacaacatgatctttggaatgaactaagacaaaggaaactctgaggaaggaccatggcctgagagg

SEQ ID NO: 702829 - DNA, 120 bp, Artificial Sequence
  ENSG00000196312_6 (sequence is synthesized)
tggaattcatccttccgaggactgagatgaggacggaaaatgaaccatcggggggattgacggtgaagatgctaatacctgcccagcatcgaccctagtgcgggtcccaagaccatcccc

SEQ ID NO: 702830 - DNA, 120 bp, Artificial Sequence
  ENSG00000196312_7 (sequence is synthesized)
ctgtgcaggctccaccaccgctgtgctaactggaccgcggcagaagagtggaagttttcatgggctgagctgctgagttcagcctgggaactgaggccaacaagggagtctcctcggcac

SEQ ID NO: 702831 - DNA, 120 bp, Artificial Sequence
  ENSG00000196312_8 (sequence is synthesized)
acaagtttgaaagaagtcctggtgacttcaagctcagaaccatggacggcagggctccctctggatgtggaattctccgtccctttccagggagggaacaaagcccacagcaccggaact

SEQ ID NO: 702832 - DNA, 62 bp, Artificial Sequence
  ENSG00000196312_9 (sequence is synthesized)
ggccagtcatgccaaggagttttaagaccagcgtgggcaacatggcaaaaccccatctctac

SEQ ID NO: 702833 - DNA, 120 bp, Artificial Sequence
  ENSG00000196312_10 (sequence is synthesized)
ttgtaatcgcagctacttcggatcctgagagactccttcagggtgagcaaaggcctggaaacctgtatgcagttaaagaaaaggaaagaaagagataatcagtgcatgcagttgtcagct

SEQ ID NO: 702834 - DNA, 120 bp, Artificial Sequence
  ENSG00000196312_11 (sequence is synthesized)
ggctgggacctgaggagagtcacttgtggaggcaactggtctttatccctattgtccggtacaaggcaggcattaatcctgtgatccttatctgaagctcaggtttgattttattctttt

SEQ ID NO: 702835 - DNA, 120 bp, Artificial Sequence
  ENSG00000196312_12 (sequence is synthesized)
acctcctgactgcttgttttgagtcacatgtaaattatatttgcagagcacttcttaactattacaaagcagttgtgcttgtgttttcatttgatctctctggtaatactgaaaaccagt

SEQ ID NO: 702836 - DNA, 120 bp, Artificial Sequence
  ENSG00000196312_13 (sequence is synthesized)
ttggacagttgtcattatatccattttataaatggggtagtgaagacattctagaattaagtctgagataagttacttaggtgaagaaattttattttttcacattgctagaagaaacat

SEQ ID NO: 702837 - DNA, 120 bp, Artificial Sequence
  ENSG00000196312_14 (sequence is synthesized)
cctccccccagccccatgtgatgtgcccctggccattgacactcagttcgagggaaggcactggggtgtacactcaaagacctaaacccagggtgggtgcggtggctcacgtctgcaatc

SEQ ID NO: 702838 - DNA, 60 bp, Artificial Sequence
  ENSG00000196312_15 (sequence is synthesized)
cagggtgggtccaggagttcaagaccagcctgcttaacatagtgaaaccccgtctctact

SEQ ID NO: 702839 - DNA, 120 bp, Artificial Sequence
  ENSG00000196312_16 (sequence is synthesized)
ccaatcccactgatgaggatcagcccatgtagccaaaaagtgaaaacaacccaaatgttcatcacctgatgaatgaataagtttcaggatatccaccaatggaatattattcagcaataa

SEQ ID NO: 702840 - DNA, 120 bp, Artificial Sequence
  ENSG00000196312_17 (sequence is synthesized)
aaaggtttgatgtaatgatagatgctaaaaacatggatgaaccttggaaatatttaaagtaaaataagacaggtgtgaaagacatacattgtatgattccattcatatgcaagtccagag

SEQ ID NO: 702841 - DNA, 120 bp, Artificial Sequence
  ENSG00000196312_18 (sequence is synthesized)
tgtaaagctatatagaaagtcagttcgtggttatgtaggcctaggatgtagatcggtggggggcagggagtgatagctaaaggacaaggggttttttttcttcttcattttttgagatgg

SEQ ID NO: 702842 - DNA, 120 bp, Artificial Sequence
  ENSG00000196312_19 (sequence is synthesized)
caggcgtgagccactgcacccagcctaggggttttctttttgaggtgataaaaatgttctaaagtttatagtgatgatgcttgcaatttctataagtagacttaatgcagtgatggttgc

SEQ ID NO: 702843 - DNA, 120 bp, Artificial Sequence
  ENSG00000196312_20 (sequence is synthesized)
atggttgcaaattctataaatatatttaatgtggtgatggttgcaaattctatgaaaaacccaaattgtacaatttcaatgagtgaaagcatgctatgtgaatgtcttcataaaggtttt

SEQ ID NO: 702844 - DNA, 120 bp, Artificial Sequence
  ENSG00000196312_21 (sequence is synthesized)
atttaaaaaatgagcaaacggtagaatgttaacatggcccacgtctatgtggtgtctatattggtttctattatatgttttctatgtggttgaaacattcctaataaaatgtgcatagtt

SEQ ID NO: 702845 - DNA, 120 bp, Artificial Sequence
  ENSG00000196312_22 (sequence is synthesized)
ttttaaaaaagaaaacacatcagtggacgtgaatgcaggatgtcttatgaatgctcacacagaagctcccattcgtgaggaatgcagggaaaagcagaagatggagtaggagttggcatg

SEQ ID NO: 702846 - DNA, 120 bp, Artificial Sequence
  ENSG00000196312_23 (sequence is synthesized)
gcccagctagctcagatgacacacgatggtcccagtggcatgacttggtttgtgtgatttgtgccttggggttttattttggcacattataaaggagtaaataaagcctgtatacagtca

SEQ ID NO: 702847 - DNA, 120 bp, Artificial Sequence
  ENSG00000196312_24 (sequence is synthesized)
ggctaaataggggagtagaatgggaatgtgataaaaagtaccacctctgcatccttcaagtccttgatggtggtactaatctctgcaagctctacaagaatgcagtattgtttttggttt

SEQ ID NO: 702848 - DNA, 120 bp, Artificial Sequence
  ENSG00000196312_25 (sequence is synthesized)
gctgtttttctagatagaggcaggtaagtggcttccactttatagcgtaattgccctcactcttcaggtcaggaaaccagtgtagggattctgctaattgttgagtatgtctattccaat

SEQ ID NO: 702849 - DNA, 120 bp, Artificial Sequence
  ENSG00000196312_26 (sequence is synthesized)
tattctgcagctacagagataacaagacgacccactgcaagacagacctaaactaaaactccattgatcacctaacctccctaagcccctactctcacttgtgaaccagagtgatgcatt

SEQ ID NO: 702850 - DNA, 120 bp, Artificial Sequence
  ENSG00000196312_27 (sequence is synthesized)
agttttcctggggtaccctgagtctgagttcagaaccaatgtccagtaattcccccaaagtctgattattcccttttccccaatgcacagtcaacttggtaaagtgctataggtcccttt

SEQ ID NO: 702851 - DNA, 120 bp, Artificial Sequence
  ENSG00000196312_28 (sequence is synthesized)
ggggaaggctgagagaaaaatgaacagtatacaattttggtaatgcagtggggacacagcctcctcattatttaaggagatatgggtctgcaaactggcccaagtcttggaattgattca

SEQ ID NO: 702852 - DNA, 120 bp, Artificial Sequence
  ENSG00000196312_29 (sequence is synthesized)
ggagctgtgactccgtttttttgattcgagttagacttttattcacttgattcttctttttatacagaacagataagaatttagtaggctttccatctcttttatttctatggatactat

SEQ ID NO: 702853 - DNA, 120 bp, Artificial Sequence
  ENSG00000196312_30 (sequence is synthesized)
gaccagctagctaatgccataagtctctgtaaatcggactttctaactacagttttgactttactgtccattacagtaaccatgttcaccttgtctttggtgattaaatgctgccacttg

SEQ ID NO: 702854 - DNA, 120 bp, Artificial Sequence
  ENSG00000196312_31 (sequence is synthesized)
gcccctgccatcctgggatccagttactctccttatacttaagaatcccattcagtggcagcagttcccactgtaatttctgacctatacagaagagcaaccacagagctctttaaaaat

SEQ ID NO: 702855 - DNA, 120 bp, Artificial Sequence
  ENSG00000196312_32 (sequence is synthesized)
acagaagagcaaccacagagctctttaaaaatattggaactccctcacaaatttatttctcatagtcataacagaaagtgtgtcctgagctagatgtggtagctcacacctataatccca

SEQ ID NO: 702856 - DNA, 120 bp, Artificial Sequence
  ENSG00000196312_33 (sequence is synthesized)
cgcttgagctcaggagtttgaagcctgcttgggcaacgtagcaagaccttgcctctataaaaatttttaaaattagccaggtatgatggtgcatatagtcccagctactcaggaggctga

SEQ ID NO: 702857 - DNA, 83 bp, Artificial Sequence
  ENSG00000196312_34 (sequence is synthesized)
ctatggccctgactctaaaaaataataataaatagaaaaagaaagcatgtcctcttgttaaagatttttcaatgacacttgtt

SEQ ID NO: 702858 - DNA, 120 bp, Artificial Sequence
  ENSG00000196312_35 (sequence is synthesized)
agcatgtcctcttgttaaagatttttcaatgacacttgttcaaggatggtaaggctgactttttcaagatcatcagaatagatacagggaccaatgcaatagcattttacagcgagggag

SEQ ID NO: 702859 - DNA, 120 bp, Artificial Sequence
  ENSG00000196312_36 (sequence is synthesized)
agagattgggctcaactctgaatacagtttgggtaagtgggaatttattgccaaggagtagggtgggggtcagtggattgaaaattactaagaggaaacttcaagagtaaggaaagattc

SEQ ID NO: 702860 - DNA, 120 bp, Artificial Sequence
  ENSG00000196312_37 (sequence is synthesized)
tggcttaactgacctaacaggattcttgctgaaaacaggctggggtgttgagacactacctgggagatggtggaggatgaagccctgatcagatatggaggatgatcagatattgagcat

SEQ ID NO: 702861 - DNA, 120 bp, Artificial Sequence
  ENSG00000196312_38 (sequence is synthesized)
ttgtttcctgactttttaatgatcagatagcctcctattttttaactatgagttggaatttgctgcttttgatatgataagaaagttcaaagtttctcttccttgctttgttgtgtgttc

SEQ ID NO: 702862 - DNA, 120 bp, Artificial Sequence
  ENSG00000196312_39 (sequence is synthesized)
ccttgctttgttgtgtgttctaattcttttctgcccatcccccagtaaagaaaaggctcagtatgatttcttgaatagattgtttaagctattttcaaaacaggacttggtcaggggcag

SEQ ID NO: 702863 - DNA, 120 bp, Artificial Sequence
  ENSG00000196312_40 (sequence is synthesized)
gtagtcttaaatgttcagaagccactggatggaaaattgtgagcacataagtgtttttcttggtcaaccatgtcattttatagccaaagtttgacttgacatactggaattaatccacac

SEQ ID NO: 702864 - DNA, 120 bp, Artificial Sequence
  ENSG00000196312_41 (sequence is synthesized)
gactttgaaaagaataaactctttaaaaagagagtgagcgctccgagggtgttatgagagtcactgtctgaaaccctattgatcatattgtggcagaagaaatagagtcctgccatgaat

SEQ ID NO: 702865 - DNA, 120 bp, Artificial Sequence
  ENSG00000196312_42 (sequence is synthesized)
tatacttttcaggttaaaaaaaaaaaaagcaatttgtaggacagtttgaataatttagtacaattgttaaaaatacagacatgcacattcctgtatgtgcatttttaaatgttcacgaat

SEQ ID NO: 702866 - DNA, 120 bp, Artificial Sequence
  ENSG00000196312_43 (sequence is synthesized)
gatataagccagatatatttcttagaggtgcttgaaaaaagttatttcttcttgggctttattatctcaatttaaaaaaattaagatgcataattctcataagataacagattcagaaga

SEQ ID NO: 702867 - DNA, 120 bp, Artificial Sequence
  ENSG00000196312_44 (sequence is synthesized)
atatagttcaagaaaaaaaattaaagaactcataaaggagaaggaggaggaggaagagagtgtgaaacaggagcctcagataacttggtaaaggcatgtctcccatttgggaactgatgt

SEQ ID NO: 702868 - DNA, 120 bp, Artificial Sequence
  ENSG00000196312_45 (sequence is synthesized)
tcctaagatccgcactgacgctgctcagccggtccatcacacagcaaaggcgtgaggaagggtcactgcccagctggactccagggtggtccacgcatgacagtcacaccgaaccttcat

SEQ ID NO: 702869 - DNA, 120 bp, Artificial Sequence
  ENSG00000196312_46 (sequence is synthesized)
gaggatgtgaactgttggctccaatttaccattcccagcaattccactcagatatttgtatactaatgttcacagcagcgtgaactccacagcaggtggagtaatgttccattgtgtgca

SEQ ID NO: 702870 - DNA, 120 bp, Artificial Sequence
  ENSG00000196312_47 (sequence is synthesized)
tctgttgatgcacatttcggttgttcccacctttgggctattattaataatgctgctgtgaacattcccaagagaaataggaagacggctttgctaagaactaaaaaagggatggacaac

SEQ ID NO: 702871 - DNA, 120 bp, Artificial Sequence
  ENSG00000196312_48 (sequence is synthesized)
aagggcatatacccaggggcagtgttctatcatgacagctttactgagagcagagtagttctgctcagaatcagaacacttgttccctatagcccccctgattgccccacaaccaccacc

SEQ ID NO: 702872 - DNA, 120 bp, Artificial Sequence
  ENSG00000196312_49 (sequence is synthesized)
gcatactccccttttcccaaccatgggcagcagattgagctattaacagaagtgtcctttcgctggatttctcaaccctttcctcatcgtccacatagagaaacagtaacagattgctac

SEQ ID NO: 702873 - DNA, 120 bp, Artificial Sequence
  ENSG00000196312_50 (sequence is synthesized)
attgctactcacccaacacccaggtcaagtccaatgcaggtaggaataacagcaaatccttcaatttcttgattctgctcttaaaaatcttaacagaggccgggcacggtggctcacgcc

SEQ ID NO: 702874 - DNA, 120 bp, Artificial Sequence
  ENSG00000196312_51 (sequence is synthesized)
aaaaaaaaaaagacttaacagagcatttcacggggaagggccatgagggaacatcacctgggtgatggtaacattctgtatcttgataaggatttgagttatacaagtatatacatctgt

SEQ ID NO: 702875 - DNA, 120 bp, Artificial Sequence
  ENSG00000196312_52 (sequence is synthesized)
caaaattcaaagaatgtacactcaagatctgtgcatttcattatatgtaaatgttacattaaaatgttgtaaacaaatattgaacaaatatacgcatgctaaagtatttaagaggaagta

SEQ ID NO: 702876 - DNA, 120 bp, Artificial Sequence
  ENSG00000196312_53 (sequence is synthesized)
ctggtgtctgcaaaacaaaaattttttttccattttctgtggtaaaatatacataatataaatgtattattttaagtgtacaattcagtggcattaaatacactcagaaagttgtgcaaa

SEQ ID NO: 702877 - DNA, 120 bp, Artificial Sequence
  ENSG00000196312_54 (sequence is synthesized)
catcccatttattcatttccacagattttttaattctcattccaaacagaagccctgtacccaaagagcaataactccgcatcctccaatccccactctctggtaacctctattctactt

SEQ ID NO: 702878 - DNA, 120 bp, Artificial Sequence
  ENSG00000196312_55 (sequence is synthesized)
tctgcctctatgaatttgccaattctaggtacctcatataagtggaatacagtatttatccttttgtgtctggcttctttcacttagcataatattttcaaggttcattcatgttttaca

SEQ ID NO: 702879 - DNA, 120 bp, Artificial Sequence
  ENSG00000196312_56 (sequence is synthesized)
tgtatcagaatcttgttttttcaggtggagtaatgttctattgtgtgcatatgccacatttggtttatccattcatcagttgatgcacatttcggttgttcccacctttgggctattatg

SEQ ID NO: 702880 - DNA, 120 bp, Artificial Sequence
  ENSG00000196312_57 (sequence is synthesized)
aataatgttgctgtgaacactggtatacaaatatctgagtggaattgctggatcatatggtaattctgcatttaactttttaaggaactgccaaactgttttccacagagctgtaacatt

SEQ ID NO: 702881 - DNA, 120 bp, Artificial Sequence
  ENSG00000196312_58 (sequence is synthesized)
ttacatccaaaccagcaataggacctggataaaaggtggctaaggcacagttaaataaaatactgttagttactgcccatttgcattgggtttctagtggcaaataatctagccgtgtcc

SEQ ID NO: 702882 - DNA, 120 bp, Artificial Sequence
  ENSG00000196312_59 (sequence is synthesized)
ttgactggatctcccaatgattcttttcagtcatttgaatgagtatggtggtggtgacactggcaggaggctggagggtactttaattaacacgcgaacacacacaaatccattgcaccc

SEQ ID NO: 702883 - DNA, 120 bp, Artificial Sequence
  ENSG00000196312_60 (sequence is synthesized)
cactaagccgcccaaacacacatgaaacacaaaaactatccttgctagggaaacacagccctggaacaaaccccctggaccccttgtcaccaccagcccatcctgtaagaaaatgatggt

SEQ ID NO: 702884 - DNA, 120 bp, Artificial Sequence
  ENSG00000196312_61 (sequence is synthesized)
tgaagctgcagtgacagaattggagagatgctctgttagacaagtctgtcagctgaaaggggcagaaaccattgttgaactgcttatatgagaggaagacctgggtggcacaggcctggc

SEQ ID NO: 702885 - DNA, 120 bp, Artificial Sequence
  ENSG00000196312_62 (sequence is synthesized)
tggacgcagggctcacagagcgtcatcagcacttcatctcttcccctgcgggacctgctgtcctctgcgttgcacacaccccccgccaggctcatccctgtatcctccttggaggaaagt

SEQ ID NO: 702886 - DNA, 120 bp, Artificial Sequence
  ENSG00000196312_63 (sequence is synthesized)
gccaggctggtgctacttggccctgcctgggtcacacgcctgcctcgggatgtggaggatggtcagcccagccacagcacatggattgctatgtgaaggatgatgttccacaagaaaacc

SEQ ID NO: 702887 - DNA, 120 bp, Artificial Sequence
  ENSG00000196312_64 (sequence is synthesized)
aggacggcttcaccagggaggcaagagcagcagatgcccatgacagagggtgtatactctgaataaaagaatttggatttttaaaaagagacaggaagaaaaggacttccaaactctaga

SEQ ID NO: 702888 - DNA, 120 bp, Artificial Sequence
  ENSG00000196312_65 (sequence is synthesized)
aagtttaaaactagtagaatgaaacatattgtgtataaatgtaaagctctttgttgagattaaatatacgtatcagttaaattttatttaaacatatatatacacatatacacacacaca

SEQ ID NO: 702889 - DNA, 120 bp, Artificial Sequence
  ENSG00000196312_66 (sequence is synthesized)
catacatatatatgacccaagtacaggataaagatgaaattaataagtactctttaaaaatcttagttttggggctgggcgcggtggctcacgcctctaatccaagcactttgggaggcc

SEQ ID NO: 702890 - DNA, 65 bp, Artificial Sequence
  ENSG00000196312_67 (sequence is synthesized)
agaatcgcttgaacccgggaggcggagatcgcagtgagccaagatggtgccatggttttgggata

SEQ ID NO: 702891 - DNA, 120 bp, Artificial Sequence
  ENSG00000196312_68 (sequence is synthesized)
aaaaaaaaaattagttttgggataccagtaatttcagtattattaacaacctgacttgggcaccccaaaagtttgcaataatggcattaaatggctggatagagaaagagatggtggcgt

SEQ ID NO: 702892 - DNA, 120 bp, Artificial Sequence
  ENSG00000196312_69 (sequence is synthesized)
gaatgcctgcttcctggtgtcatgtctggaatttcatgtccagtcctgaaagctgcattttaggaagggtgctactgagcgtccagagaagacagcatttcgcttggtgaagggagtggg

SEQ ID NO: 702893 - DNA, 120 bp, Artificial Sequence
  ENSG00000196312_70 (sequence is synthesized)
cttatgatgcatggcaggaggagtaatgtagaaagaaataagctttgcggtgcatagtgtagagaaattcctgctttgcgtcaaacagactgaccaggcaggcctcacagttttgcaaag

SEQ ID NO: 702894 - DNA, 120 bp, Artificial Sequence
  ENSG00000196312_71 (sequence is synthesized)
ccctggaagcacaggcttggctgcagatgttggatgactttccagaccagttttggaaaaagctcttgaggatcagaagctcctgggatttctgttatcacctgatttcatggagagaga

SEQ ID NO: 702895 - DNA, 120 bp, Artificial Sequence
  ENSG00000196312_72 (sequence is synthesized)
cagtccagggccgggaattatgtggcatctatgtgttccccagttgtgggatccatctggccgatggttatggtggtcagtgactttcagaggcctggaattcatgacagatgcttttgc

SEQ ID NO: 702896 - DNA, 120 bp, Artificial Sequence
  ENSG00000196312_73 (sequence is synthesized)
taatgtgcttggtgccccactgaggctgctgagcagtgcttaccatgcgcccgatgtctcttctgtgtgcctctgagagcaaaagtggcctcagagtctgaaggagggcaaagtggccac

SEQ ID NO: 702897 - DNA, 120 bp, Artificial Sequence
  ENSG00000196312_74 (sequence is synthesized)
agctgcagacacaaagtccagactagctcttgaccacatccaagtgcatcctgcattaagctcaggcacatcaaacctgcccaatcaaggtctgccaaaggaaggagtctgcaaatgaca

SEQ ID NO: 702898 - DNA, 120 bp, Artificial Sequence
  ENSG00000196312_75 (sequence is synthesized)
tttctcataatcaaacacactcttaatttgtttttatattattcactccattttttgattattataacttttaaaattatgtctagtagttttatcaattgctgagaagagtgttgaagt

SEQ ID NO: 702899 - DNA, 120 bp, Artificial Sequence
  ENSG00000196312_76 (sequence is synthesized)
ccaacttacaattgtggatttgttgatttcttctttcagctttattggttttggtttatgcattttaaggctctgctcttggtgtgtacacatgtaaaaccattttgtcttcatagtaaa

SEQ ID NO: 702900 - DNA, 120 bp, Artificial Sequence
  ENSG00000196312_77 (sequence is synthesized)
ttaatttttaaaaatcattatgtaatgtccctctttgctccagtaattctttgctctgaggtctactgtattagtattaatatagcgacttctacttttaagttaatatttgcatggtac

SEQ ID NO: 702901 - DNA, 83 bp, Artificial Sequence
  ENSG00000196312_78 (sequence is synthesized)
tatagcgacttctacttttaagttaatatttgcatggtacatttattttaatgctgtaagttttagggtacatgtgcacaaca

SEQ ID NO: 702902 - DNA, 120 bp, Artificial Sequence
  ENSG00000196312_79 (sequence is synthesized)
cttccacaatggttgaactagtttacttttcattttcagtctacctatgtcattgtatttcaagtgagtttttgtagatccagcataatgttgtatcatgtttggttttttgttttttag

SEQ ID NO: 702903 - DNA, 120 bp, Artificial Sequence
  ENSG00000196312_80 (sequence is synthesized)
tttgttttttagtccactctgccaatctctgtcttttaattactgtacgtagaccacttgaagaattgccttgtagcaattctgatatatgagggctgaagtctgccattttgttatttg

SEQ ID NO: 702904 - DNA, 120 bp, Artificial Sequence
  ENSG00000196313_0 (sequence is synthesized)
gagatctgaagccgagcaacttgcccaagtccttcttcttttcccattaacaagatatgatatcaccaagccaaacgtcatcattaagttggagcagggagaggagctgtggataacggg

SEQ ID NO: 702905 - DNA, 120 bp, Artificial Sequence
  ENSG00000196313_1 (sequence is synthesized)
aggtgaatttccatgtcaacatagtccagggattgtgggactttaccaaatcggtttgtaataacacctagaagacgctatccgatccatcaggcccagtattcctgtctgggggtactt

SEQ ID NO: 702906 - DNA, 120 bp, Artificial Sequence
  ENSG00000196313_2 (sequence is synthesized)
cccaccgtgtgctggaatggttatcacaagaaggctgtgctgtcccctcgcaactccaggatggtgtgtagcccagtgactgtgaggatcgcccctcctgacagaagattttcgcgttct

SEQ ID NO: 702907 - DNA, 120 bp, Artificial Sequence
  ENSG00000196313_3 (sequence is synthesized)
gcgataccagagcagataatcagctcaacactgtcctcaccatcaagtaacgccccagacccatgtgcaaaggagacagtactgagtgccctcaaagagaaggagaagaaaaggacagtg

SEQ ID NO: 702908 - DNA, 120 bp, Artificial Sequence
  ENSG00000196313_4 (sequence is synthesized)
gaggaagaagaccaaatattccttgatggccaggaaaataaaagaaggcgccatgatagcagtggcagtggacattcagcatttgagcccctggtggccaatggagtccccgcttctttt

SEQ ID NO: 702909 - DNA, 120 bp, Artificial Sequence
  ENSG00000196313_5 (sequence is synthesized)
gtgcctaagcctgggtctctgaagagaggcctcaattctcagagctcagatgaccacttgaataagagatcccgaagctcttccatgagctccttgacaggcgcttacgcaagtggcatc

SEQ ID NO: 702910 - DNA, 120 bp, Artificial Sequence
  ENSG00000196313_6 (sequence is synthesized)
cctagctccagccgcaatgccattaccagttcctacagctccactcgaggcatctcacagctctggaagagaaatggccccagttcatcacccttctctagcccagcctcctcccgctcc

SEQ ID NO: 702911 - DNA, 120 bp, Artificial Sequence
  ENSG00000196313_7 (sequence is synthesized)
cagacaccggagaggccagcaaagaaaataagagaagaggagctgtgtcatcattccagttcttcaactccattggcagcagacagggagtcccagggagaaaaggctgcagatacaacc

SEQ ID NO: 702912 - DNA, 120 bp, Artificial Sequence
  ENSG00000196313_8 (sequence is synthesized)
ccaaggaagaaacaaaactcgaattctcagtctacacctggcagctctgggcagcgtaagcggaaagttcagctgctgccttctcggcgaggggaacagctgaccttgcctccacctccc

SEQ ID NO: 702913 - DNA, 120 bp, Artificial Sequence
  ENSG00000196313_9 (sequence is synthesized)
cagcttggctattcgatcactgccgaggacctagacttagagaagaaggcttcattacagtggttcaaccaggccttggaggacaagagcgatgctgcctcgaactctgtcactgagacc

SEQ ID NO: 702914 - DNA, 120 bp, Artificial Sequence
  ENSG00000196313_10 (sequence is synthesized)
ccacctatcactcagccttcatttacctttaccctgcctgctgctgcacctgcctccccacccacctccctcctggccccaagcaccaacccactgttagagagcttgaagaagatgcag

SEQ ID NO: 702915 - DNA, 120 bp, Artificial Sequence
  ENSG00000196313_11 (sequence is synthesized)
actcccccgagcctgccaccctgcccagaatctgctggagcagcaaccactgaggccctctcacctccaaagacacccagcctcctacccccgctgggtttatcacagtcagggccgcca

SEQ ID NO: 702916 - DNA, 120 bp, Artificial Sequence
  ENSG00000196313_12 (sequence is synthesized)
gggctgctccccagcccctcctttgactccaaacccccgaccactttgctggggctgatccctgctccatccatggtaccagccactgacaccaaggcacctccaacccttcaggcagag

SEQ ID NO: 702917 - DNA, 120 bp, Artificial Sequence
  ENSG00000196313_13 (sequence is synthesized)
acggctaccaaaccccaagccacatctgccccgtcccccgcccccaagcaaagcttcctgtttggaacacagaacacctcaccttccagccctgccgcccctgctgcatcttcagcacct

SEQ ID NO: 702918 - DNA, 120 bp, Artificial Sequence
  ENSG00000196313_14 (sequence is synthesized)
cccatgttcaagcccattttcacggctccacccaagagtgagaaggaaggccccacaccgcctggcccttcagtcacagccacagcgccctccagctcctccctccccacgaccaccagc

SEQ ID NO: 702919 - DNA, 120 bp, Artificial Sequence
  ENSG00000196313_15 (sequence is synthesized)
accacagccccgaccttccagcctgtctttagcagcatggggccacctgcatctgtgcccttgcctgctcccttcttcaagcagacaactactcccgccactgctcccaccacaactgcc

SEQ ID NO: 702920 - DNA, 120 bp, Artificial Sequence
  ENSG00000196313_16 (sequence is synthesized)
ccgctcttcactggcctggccagcgccacctctgctgtggctcccatcacctctgccagtccatccacagactctgcttcgaagcctgcgtttggctttggcataaacagtgtgagcagc

SEQ ID NO: 702921 - DNA, 120 bp, Artificial Sequence
  ENSG00000196313_17 (sequence is synthesized)
agcagtgtgagtaccacgaccagcaccgccactgccgcctcacagcctttcctcttcggggcgccccaggcctctgctgccagcttcaccccggccatgggctccatattccagtttggc

SEQ ID NO: 702922 - DNA, 120 bp, Artificial Sequence
  ENSG00000196313_18 (sequence is synthesized)
aaacctcctgccttgcccacaaccaccacagtcaccaccttcagccagtccctgcacactgccgtgccaacggccaccagcagcagcgctgccgactttagtggttttggcagcaccctc

SEQ ID NO: 702923 - DNA, 120 bp, Artificial Sequence
  ENSG00000196313_19 (sequence is synthesized)
gccacctccgccccggccaccagcagccagcccactctgacgttcagtaacacgagcacccccacgttcaacattccctttggctcaagcgccaagtccccgctcccatcatatccggga

SEQ ID NO: 702924 - DNA, 120 bp, Artificial Sequence
  ENSG00000196313_20 (sequence is synthesized)
gccaacccccagcccgcatttggggccgctgaggggcagccaccgggggccgccaagccggcccttgcccccagctttggcagctctttcacttttggaaactctgcagccccggctgct

SEQ ID NO: 702925 - DNA, 120 bp, Artificial Sequence
  ENSG00000196313_21 (sequence is synthesized)
gcacccacacctgcacctccgtccatgatcaaggtcgtgcctgcgtacgtgcctacgcccatccatcctatctttggcggtgccacgcactcggcgtttgggttgaaagccacggcttcg

SEQ ID NO: 702926 - DNA, 120 bp, Artificial Sequence
  ENSG00000196313_22 (sequence is synthesized)
gctccactgctgtcttcttcggtgcagccaccagctccggctttggagccaccacccagaccgccagcagcgggagcagcagctcggtgtttggcagcacaacaccatcacccttcacgt

SEQ ID NO: 702927 - DNA, 120 bp, Artificial Sequence
  ENSG00000196313_23 (sequence is synthesized)
ttgggggttcggcagcccccgctggcagtgggagctttgggatcaatgtggccaccccaggctccagcaccaccaccggagctttcagctttggagcaggacagagtgggagcacagcca

SEQ ID NO: 702928 - DNA, 120 bp, Artificial Sequence
  ENSG00000196313_24 (sequence is synthesized)
cctccacccccttcgcagggggcttaggtcagaacgccctgggcaccaccggccagagcacaccgtttgccttcaacgtgagcagcacaactgagagcaaacctgtgtttggaggcaccg

SEQ ID NO: 702929 - DNA, 120 bp, Artificial Sequence
  ENSG00000196313_25 (sequence is synthesized)
ccacccccacctttggtctgaacacccctgcgcctggagtgggcacatcaggcagcagcctctcctttggggcatcctcagcacccgcccaaggctttgttggtgttgcacctttcggat

SEQ ID NO: 702930 - DNA, 120 bp, Artificial Sequence
  ENSG00000196313_26 (sequence is synthesized)
cggcggccctttcattttccattggtgcgggatccaagaccccaggggctcgacagcgactgcaggcccgaaggcagcacacccgcaaaaagtagcctttgtcccctgtccctgttcccc

SEQ ID NO: 702931 - DNA, 120 bp, Artificial Sequence
  ENSG00000196313_27 (sequence is synthesized)
ccaccccttccctaaatctggaccttggcacctgctaggaagagccttggacccttccagttgcgtaaagcaaacctaccccggatctctggcttcagccgccagggggcagtggcagcc

SEQ ID NO: 702932 - DNA, 120 bp, Artificial Sequence
  ENSG00000196313_28 (sequence is synthesized)
ctggggccctttcccttctggaggaagcacaagcctcagggaaggggaagcaggatgcggagggccaaagcccgggacctctacttgaacagttctactggggaggctggagaactaagg

SEQ ID NO: 702933 - DNA, 120 bp, Artificial Sequence
  ENSG00000196313_29 (sequence is synthesized)
aaacacctgtacatagtgtccgctgccctgactcccgcttagcacacccttaggcaggcgccccttccacctttccccgagaccgtcgtcgctggagggggcagggtccagcccgcctgg

SEQ ID NO: 702934 - DNA, 120 bp, Artificial Sequence
  ENSG00000196313_30 (sequence is synthesized)
atcggtggtgtgcacctgatgggatttgggaaatgggctatccgtaaagctttatcttgcttggcttagctgtgagaagtggttctcttcctctggtcccttctggggactctgtttccc

SEQ ID NO: 702935 - DNA, 120 bp, Artificial Sequence
  ENSG00000196313_31 (sequence is synthesized)
catttcttgctgctgtgtccctcaccagttccttgcaggattccttcgtttttaaatgcccttgaatctagctttgccttggagaccccagtgggtgctgctcctgccgttttcttcctg

SEQ ID NO: 702936 - DNA, 120 bp, Artificial Sequence
  ENSG00000196313_32 (sequence is synthesized)
ccaagcctgaatcaatgtttcatctccaaccctctgccagtttggcccctcagagcttggtggctcaagactgttagcctggcagagccaggggtgaagggagaagctcttggagcaggc

SEQ ID NO: 702937 - DNA, 120 bp, Artificial Sequence
  ENSG00000196313_33 (sequence is synthesized)
aggatgcccaccgctgcttcagctgcctcctcgcccagctaccctttggccccattgggccctcgtctgcctctccaggattgtatgtttcaagccttgtcctgtgttcctttgtctgat

SEQ ID NO: 702938 - DNA, 120 bp, Artificial Sequence
  ENSG00000196313_34 (sequence is synthesized)
gctctgtgtattgctctttgaatcgagtttggaggaagagttgagttgtatgagtggcggcatgttggtagtgccggacttcctgtttcaagttttctggggcctcgctaattgaatgtg

SEQ ID NO: 702939 - DNA, 120 bp, Artificial Sequence
  ENSG00000196313_35 (sequence is synthesized)
gaaagtagcaccacttgacggctacaagtgccgactcctgaattttcccatggtgttctgacttcaagggctggcagccagggagaatgggcccaggggaagcaaagacctcttccctct

SEQ ID NO: 702940 - DNA, 120 bp, Artificial Sequence
  ENSG00000196313_36 (sequence is synthesized)
gccgtttctgtcccacttaactgacctcactggaggctacatcacccaaagtagatgttagaaaacctaaattaatgaaccatatttttaaaatcctatttttcccaaacagggccctct

SEQ ID NO: 702941 - DNA, 120 bp, Artificial Sequence
  ENSG00000196313_37 (sequence is synthesized)
gcagcccatcctttccttccgtccttctgaaaccacataccccaggcccaagcgccttgctgccacgcccaacctctttgggagaagtatgaatgcgtgtgtctaaattaaaagaaaaaa

SEQ ID NO: 702942 - DNA, 120 bp, Artificial Sequence
  ENSG00000196313_38 (sequence is synthesized)
atatttaaacgttttttaacaaaaatttatttttgtatttaagctaaattgccttttaaattccttcaagcttggttcattgaggtggttaagtataaatgctattaactaggaattagc

SEQ ID NO: 702943 - DNA, 120 bp, Artificial Sequence
  ENSG00000196313_39 (sequence is synthesized)
tgtatagttaagttatgcctgtgcaaagaagaggctcaaatgctgtccccggcagctttcctgggggactagagctccttctggccatgttatatgaaatgtaattcttattttataaat

SEQ ID NO: 702944 - DNA, 120 bp, Artificial Sequence
  ENSG00000196313_40 (sequence is synthesized)
aatgtgatgtaaatgtaactggtgccccctccccgatgtgactgagggtgagtgagtggtggcggggctgctccttcccacccctcagaacagctctgatcctcgttaatacctggctgc

SEQ ID NO: 702945 - DNA, 120 bp, Artificial Sequence
  ENSG00000196313_41 (sequence is synthesized)
gtgtgcagctgaggagggagtgaacctcaagcctaaatacctgttaggattggagggtctgggtgggcctgggcctagcaatcaagcttctacctgtaccttatgtaaggtagaccctcc

SEQ ID NO: 702946 - DNA, 120 bp, Artificial Sequence
  ENSG00000196313_42 (sequence is synthesized)
tagtgtcagtacctgagctagtttacctcagttccgcaggcaggacagccggtccgggaaccctgagtgagaatgagtgtggatgtgtacagtacacgcactggacggcagcgggaggct

SEQ ID NO: 702947 - DNA, 120 bp, Artificial Sequence
  ENSG00000196313_43 (sequence is synthesized)
gggactttccattacaaatagagacttcattcctgttgagtctagttggaatttttagtatgaatgtgagatttttctcctgcttgtgacattaagaataaaaaactgtgatctatcgta

SEQ ID NO: 702948 - DNA, 120 bp, Artificial Sequence
  ENSG00000196313_44 (sequence is synthesized)
gggccagtgtcattcaaagatgtggctgtggatttcacccaggaggagtggtggcaactggaccctgatgagaagataacatacggggatgtgatgttggagaactacagccatctagtt

SEQ ID NO: 702949 - DNA, 120 bp, Artificial Sequence
  ENSG00000196313_45 (sequence is synthesized)
cgcttcctgcgcctcttcaggtcaccgcttgctctagttcccaggctttggcctctagtggatgagaatcaccgagtctgcggggctggacgctgaccgcccgggccagcacctaggcgg

SEQ ID NO: 702950 - DNA, 120 bp, Artificial Sequence
  ENSG00000196313_46 (sequence is synthesized)
ccgggtagaggctcgagccgggacccccgagcgtgaaccccggagccagcggcgctggggccagaggggccaggcgggaggtggtggcggaggcgaaggggcgacgggacctgggcctgg

SEQ ID NO: 702951 - DNA, 120 bp, Artificial Sequence
  ENSG00000196313_47 (sequence is synthesized)
ggaggcgaaggggcgacgggacctgggcctggcccgtgtgtgtcctcggcggcctggcgccggccgtcgctgtacggtgagccccagggaggcggatctgggccccgagaaggacacccg

SEQ ID NO: 702952 - DNA, 120 bp, Artificial Sequence
  ENSG00000196313_48 (sequence is synthesized)
cctggatttgccccgtaggcccggcccgggcccctcgggagcagaacagccttggtgaggtggacgggaggggacttcgcgagcagacgcgcgcgccagcgacagcagcccgccccggcc

SEQ ID NO: 702953 - DNA, 120 bp, Artificial Sequence
  ENSG00000196313_49 (sequence is synthesized)
gcatcttcctttcccaccaggaaggagtgagcccggagcctctgctatgtgcaaggcggtgtgcaagcaccggctgcagctttttgctctcttctttctctttggggctgggctgggtgt

SEQ ID NO: 702954 - DNA, 120 bp, Artificial Sequence
  ENSG00000196313_50 (sequence is synthesized)
gcgttctggtgctgatgctttggcctgtgaggctgagctagagaaatgtagatgttagatgtgccagtaccatcctgcgcctcccaagcatgcccccactcactcacgtcggcatctcga

SEQ ID NO: 702955 - DNA, 120 bp, Artificial Sequence
  ENSG00000196313_51 (sequence is synthesized)
cccgttcaattacagcaacgaagaagccaccgctaagcgtggtcttgggggaagcccggaggcagtgctcggcacccgggaacgtgctcaggcctcggtggggccgggcaggcagggcgg

SEQ ID NO: 702956 - DNA, 120 bp, Artificial Sequence
  ENSG00000196313_52 (sequence is synthesized)
gagctagcctgcaagagaaacagccccaatgctgggtaagagagcagttcaccccatccccccctccacgaccctggcgcacgccctgtacctgaaggcgcccgggttctgctgcagcgc

SEQ ID NO: 702957 - DNA, 120 bp, Artificial Sequence
  ENSG00000196313_53 (sequence is synthesized)
atcttgtaccatgtcttcattctcctcctggcagagggagcacatggagtagacgagccgctgcagggaagggaaagtgagcgcgtggcacagggctcgctgctggaaccctgccagggc

SEQ ID NO: 702958 - DNA, 120 bp, Artificial Sequence
  ENSG00000196313_54 (sequence is synthesized)
atgcagacgcaccgggctaggtgtccctgccccgggctcctccagctgtctgctcggcatacctaaggaaaagcgtgtctcggttacacagcttcacaggctgcctcagtcctgaaatcc

SEQ ID NO: 702959 - DNA, 120 bp, Artificial Sequence
  ENSG00000196313_55 (sequence is synthesized)
tcgctcctgaaatcctcgcttcacagaggagaacttttgctccagggtcccaagcccattaaagtgtcagaactaagaccaaaacagatgactccaggtctaagctgctgtggacctctg

SEQ ID NO: 702960 - DNA, 120 bp, Artificial Sequence
  ENSG00000196313_56 (sequence is synthesized)
agtccctcagccacgccttctcaccatctcacccgagccactgcaggaaggatccagcaggacatagtggacctcacgatagcgcggatctaagggggagaccgccaggaagtcctcctc

SEQ ID NO: 702961 - DNA, 120 bp, Artificial Sequence
  ENSG00000196313_57 (sequence is synthesized)
agccagctcacagcaggagacgccagcccaggccagcagcgtggccatggatgccagccgcctggcatccaggtcaaaggcaaagatcttcctagggcagagggcagagcaggggtgagc

SEQ ID NO: 702962 - DNA, 120 bp, Artificial Sequence
  ENSG00000196313_58 (sequence is synthesized)
tgagcatgcatggagcagctaagggcctgtcacagctgacacagacaaccagaacatgcaggttaagccaggacacacaatattgaaacagcctatatttaaagggcccagggtcagagg

SEQ ID NO: 702963 - DNA, 120 bp, Artificial Sequence
  ENSG00000196313_59 (sequence is synthesized)
taactggcctggggtctctgccccaagggctaagggatccacatctcacacctgcagtggggaaagcttagcttggggcaaataccgtgaactactttggtgcagcaggaaagagttaag

SEQ ID NO: 702964 - DNA, 120 bp, Artificial Sequence
  ENSG00000196313_60 (sequence is synthesized)
cgaaagtcatcctttcagccttcattacccactgaaaggcacaaaatcaaaccccatgtcctcctcctcctcctgtggcactcacccttggttcttcagaagagcagccaagtgactggt

SEQ ID NO: 702965 - DNA, 120 bp, Artificial Sequence
  ENSG00000196313_61 (sequence is synthesized)
ctttattgcctggggtggcacaggcatccatgacatgggagcctggcgggggtccagcagcatggctgggagacagctggcctggcaggcagaacacaggggccgggtaaacagagaccc

SEQ ID NO: 702966 - DNA, 120 bp, Artificial Sequence
  ENSG00000196313_62 (sequence is synthesized)
caggctaggcccttcccgtgcctacacattcttcccttttctattcctcttgcctaccctgtcctgcagaatgaggtgtccggcccggtacagtgggtgttcatgcagatctgtctgggc

SEQ ID NO: 702967 - DNA, 120 bp, Artificial Sequence
  ENSG00000196313_63 (sequence is synthesized)
gggaaacaccagcagctccggcatcaaggggtccaggagaaaatgcttccccttgagggctcgtaagtcatcgaggctgccagggaagaaccattcattcatcatttcctgaatttctcc

SEQ ID NO: 702968 - DNA, 120 bp, Artificial Sequence
  ENSG00000196313_64 (sequence is synthesized)
ctgccaggccctatttcaacggtccattcatgcaacaaatgttaccacagctatggagaaatcaacagggtgataagggaatccgggatccgcagttgagggaatgggttgtcaagccag

SEQ ID NO: 702969 - DNA, 120 bp, Artificial Sequence
  ENSG00000196313_65 (sequence is synthesized)
acttatgggtcaggagccccctctactgtttaccagcagtgggagcctgggcaagtgattcaatctcaagccccactggcatctctgtaaaatagtaggtgtgaggattcaatgagccaa

SEQ ID NO: 702970 - DNA, 120 bp, Artificial Sequence
  ENSG00000196313_66 (sequence is synthesized)
tatatccaagatacttacgtgccacaatttaataaatgttagctattcctgttgaagcataaccttggagaaaggttactttacaggggggtgaggagtggggaagtgagagctgagctc

SEQ ID NO: 702971 - DNA, 120 bp, Artificial Sequence
  ENSG00000196313_67 (sequence is synthesized)
attcttgatggatgaggagttagtcatgtgaggcgcttaggttaaaactacattcactataactcagtaaagcagtcccgcccactctccgacccatgcagaaataggcctagggagtca

SEQ ID NO: 702972 - DNA, 120 bp, Artificial Sequence
  ENSG00000196313_68 (sequence is synthesized)
catgtctcagttcagaaatctatcgaagtggcagagctggaattcaaacacaagcagccgttctctgctattccaccctggtgtccaagcaacatggtagggcagaaggaagaggatctt

SEQ ID NO: 702973 - DNA, 120 bp, Artificial Sequence
  ENSG00000196313_69 (sequence is synthesized)
acaaagagtaagggaaagggagaggggcagaggctgcttctcagagccaccaaaggacaaaataagacaggtgtgagcccagtggaggaggcacggggcagagaccagccactgttgctg

SEQ ID NO: 702974 - DNA, 120 bp, Artificial Sequence
  ENSG00000196313_70 (sequence is synthesized)
gctggcacgctggtgcacgtagcactgtggcagatggacctggagaggaagcaggagggacagcacaatggagccaagaaaggacttagcatggccgggcgcggtggttcatgcctgtaa

SEQ ID NO: 702975 - DNA, 64 bp, Artificial Sequence
  ENSG00000196313_71 (sequence is synthesized)
tgttactgtgtctttggctgagatgctgttaatttgtgactttgccccaaatttgagctcacaa

SEQ ID NO: 702976 - DNA, 77 bp, Artificial Sequence
  ENSG00000196313_72 (sequence is synthesized)
ccattttgacctgtaccttgaacaattggttggctgagatgctgttaatttgtgactttgccccaaaaggatctagg

SEQ ID NO: 702977 - DNA, 120 bp, Artificial Sequence
  ENSG00000196313_73 (sequence is synthesized)
ggctggagcaggcgagcggcggcggcccatagcgagtgtcagggacggccggggccggggctgcggcgggccggccagggcggtgctcctgggcctgtcgctggttggcctcttactgta

SEQ ID NO: 702978 - DNA, 120 bp, Artificial Sequence
  ENSG00000196313_74 (sequence is synthesized)
ctggttggcctcttactgtacctcgtgccggctgcggctgcactggcctggctgaccgtgggggctaccgcggcctggtggggactgagccgcgagccccgaggttcgcgccccttgtcc

SEQ ID NO: 702979 - DNA, 120 bp, Artificial Sequence
  ENSG00000196313_75 (sequence is synthesized)
tccttcgttcggaaggcgcgtcatcggcgccccttgtcctccttcgttcggaaggcgcgtcatcggcgaacactgttcgcttcgcctctggccaagtcgacagccaacggaaacctccta

SEQ ID NO: 702980 - DNA, 120 bp, Artificial Sequence
  ENSG00000196313_76 (sequence is synthesized)
gagccgcggaccctgctcgaaggacctgaccctgcggaactgctactcatgggcagttacctgggcaagcccgggccgccgcagcccgccgccgctccggagggccaggacctgcgggat

SEQ ID NO: 702981 - DNA, 120 bp, Artificial Sequence
  ENSG00000196313_77 (sequence is synthesized)
cgcccggcgccgcgctccccaccgccgcgctccccaccgccgcgctcccccccgccctccccgccgacccatcgcgctcaccacgtttacccctctctgcccactcctcttctccgaccc

SEQ ID NO: 702982 - DNA, 120 bp, Artificial Sequence
  ENSG00000196323_0 (sequence is synthesized)
cacaaacaaagtgcccccaaacaggctggagtgagcggagcggcaacggcggcggcgccggccgcacgcgcgcggcggcggctccctcccaacctccccctcccctcccctcagtcccct

SEQ ID NO: 702983 - DNA, 120 bp, Artificial Sequence
  ENSG00000196323_1 (sequence is synthesized)
cttccccaccccgccccgctgggaacacgcgagccgtcgccgcgctccccaaacaaccgcctgccctcggccaaccgtccccaacggtcgccagcgcgcggctcccgggccccctcgctc

SEQ ID NO: 702984 - DNA, 120 bp, Artificial Sequence
  ENSG00000196323_2 (sequence is synthesized)
gctcctcccctctggcccctccgagcgctgggggtgcttccctccccgcctcctcgcactcccactcgcgggcacgccggtggctgtgccgccatgccccaccacaggctgctcacgggc

SEQ ID NO: 702985 - DNA, 120 bp, Artificial Sequence
  ENSG00000196323_3 (sequence is synthesized)
tggctgtgccgccatgccccaccacaggctgctcacgggcctaggcgcggcggcccgagataggggcccctgagcctcccgggggaggagagaggcagcgagccgcgctccgccccctcc

SEQ ID NO: 702986 - DNA, 120 bp, Artificial Sequence
  ENSG00000196323_4 (sequence is synthesized)
gcgggagaaggaggaggagcagcaggcctccgggcccggcgccgccgcccgcaggacatttctgatttatttgcatccttgaagagcatctgtagaagaggaagtaaaagatgggtgtga

SEQ ID NO: 702987 - DNA, 120 bp, Artificial Sequence
  ENSG00000196323_5 (sequence is synthesized)
aaacatttactcatagctcctcttcccacagccaggaaatgcttggaaagctaaatatgctgcgaaatgatggacatttttgtgatatcactattcgtgtccaggacaaaatcttccggg

SEQ ID NO: 702988 - DNA, 120 bp, Artificial Sequence
  ENSG00000196323_6 (sequence is synthesized)
cacataaggtggtactagcagcttgcagtgatttctttcgcaccaaacttgtaggccaagccgaggatgagaacaagaatgtgttggatctgcatcatgttacagtgactggctttatac

SEQ ID NO: 702989 - DNA, 120 bp, Artificial Sequence
  ENSG00000196323_7 (sequence is synthesized)
ctcttttagaatatgcttacacagccactctatcaattaacacagaaaatattattgatgttctagcagcagccagctatatgcaaatgttcagtgttgccagcacctgctcagagttca

SEQ ID NO: 702990 - DNA, 120 bp, Artificial Sequence
  ENSG00000196323_8 (sequence is synthesized)
tgaaatcaagcattttatggaatacacccaacagccaacctgaaaagggtctagatgctggacaagaaaataattctaactgcaattttacttctcgagatgggagcatttctcccgtgt

SEQ ID NO: 702991 - DNA, 120 bp, Artificial Sequence
  ENSG00000196323_9 (sequence is synthesized)
cctcagagtgcagtgtggtagaaagaaccattcctgtctgccgagaatcccggagaaagcgcaaaagctacattgttatgtctcctgaaagtcctgtaaagtgtggcacacaaacaagct

SEQ ID NO: 702992 - DNA, 120 bp, Artificial Sequence
  ENSG00000196323_10 (sequence is synthesized)
caccccaggtattgaattcttcagcttcctactcagaaaatagaaaccaaccagttgactcttccttagcttttccttggacttttccttttggaattgatcgaaggattcagcctgaga

SEQ ID NO: 702993 - DNA, 120 bp, Artificial Sequence
  ENSG00000196323_11 (sequence is synthesized)
aagttaagcaagcagaaaatacccggactttagaattacctggcccatctgagaccggtagaagaatggctgattatgtgacttgtgagagcacaaaaactaccttgcctttaggtaccg

SEQ ID NO: 702994 - DNA, 120 bp, Artificial Sequence
  ENSG00000196323_12 (sequence is synthesized)
aagaagatgtccgggtcaaagtagaaagattaagtgatgaggaggtccatgaggaagtgtcccagcctgtcagtgcatctcagagttcgctgagtgatcagcagacagttccaggaagtg

SEQ ID NO: 702995 - DNA, 120 bp, Artificial Sequence
  ENSG00000196323_13 (sequence is synthesized)
aacaagtccaagaggaccttctgattagtccacagtcttcctctataggctcagtagatgaaggcgtttctgagggcttgcctacacttcaaagcacgtctagcactaatgctcctccgg

SEQ ID NO: 702996 - DNA, 120 bp, Artificial Sequence
  ENSG00000196323_14 (sequence is synthesized)
atgatgatgatcgattggaaaatgttcagtatccctaccaactctacattgctccttccaccagcagtacagagcgaccaagtccaaatggtcccgacagaccttttcagtgtccaacct

SEQ ID NO: 702997 - DNA, 120 bp, Artificial Sequence
  ENSG00000196323_15 (sequence is synthesized)
gcggggtgcgattcacccgtattcagaacctaaagcagcacatgctcatccactcaggaattaaaccatttcagtgtgaccgctgtgggaaaaagttcaccagggcttactcgctaaaga

SEQ ID NO: 702998 - DNA, 120 bp, Artificial Sequence
  ENSG00000196323_16 (sequence is synthesized)
tgcatcgcctaaagcatgaaggtaaacgctgtttccggtgccagatatgtagtgccactttcacttccttcggggaatataaacaccacatgagggtttcccggcacattatccgcaagc

SEQ ID NO: 702999 - DNA, 120 bp, Artificial Sequence
  ENSG00000196323_17 (sequence is synthesized)
ctcggatttacgagtgcaaaacatgtggcgccatgttcaccaactctggaaatttaatcgtgcacctgaggagtctgaaccatgaagcatcagagctagcaaactacttccagagcagtg

SEQ ID NO: 703000 - DNA, 120 bp, Artificial Sequence
  ENSG00000196323_18 (sequence is synthesized)
atttcctagtaccggactacttaaaccaggaacaagaagagacccttgttcaatatgatcttggagaacacggttttgaaagcaactcctctgttcaaatgcctgtcatttcacaggtct

SEQ ID NO: 703001 - DNA, 120 bp, Artificial Sequence
  ENSG00000196323_19 (sequence is synthesized)
cctcaacccagaattgtgaaagcacttttcccttggggtctcttggtgggctggcagaaaaagaggaagaagtgccagagcagccaaagagcagtgcttgtgctgaggcaaccagagatg

SEQ ID NO: 703002 - DNA, 120 bp, Artificial Sequence
  ENSG00000196323_20 (sequence is synthesized)
accccccaaaatcagagctgtcttctataactattgagtagttttgtgatttggcttcagttttgttttttggaaagtgcctgtgcttggtcttgtacatttaaatttaatttaattttt

SEQ ID NO: 703003 - DNA, 120 bp, Artificial Sequence
  ENSG00000196323_21 (sequence is synthesized)
taaacaaaaaaagccgggtgggagggagggggagattgggaaagaatttccctttttactttctgagccctgaaactgattttatttttcctaactgagagattgcttctgtaagtacac

SEQ ID NO: 703004 - DNA, 120 bp, Artificial Sequence
  ENSG00000196323_22 (sequence is synthesized)
aataacatgatgttgaaacagaaactatgagacttaaggagaactggttgacttaaaacatataccagttccttcttccattgttaaaagtaggctaacaacagatcattagctagagag

SEQ ID NO: 703005 - DNA, 120 bp, Artificial Sequence
  ENSG00000196323_23 (sequence is synthesized)
gaaatcagatgattattgaccttcttgagacaagagggtacatgagaaactaattactaaacagcttgacaaatggcctgagtagatacttactgctgtacacaggatgttgtataatat

SEQ ID NO: 703006 - DNA, 120 bp, Artificial Sequence
  ENSG00000196323_24 (sequence is synthesized)
tttgtaaagcctgttgtttttggaagtatttatggtaagctttcttaaaaattattatggtaaatacttctgaaatccggcgtacttttctttaagctttgtcatttctgttatgatttt

SEQ ID NO: 703007 - DNA, 120 bp, Artificial Sequence
  ENSG00000196323_25 (sequence is synthesized)
tcatggtgaaattttggtactgagatgggcattctctgtacctttatagtaccactccaaaggcaaggaaccatgattgacaacagtcaagctgtggatgaaatgaccaggaacggagaa

SEQ ID NO: 703008 - DNA, 120 bp, Artificial Sequence
  ENSG00000196323_26 (sequence is synthesized)
tgaagtatgtaaatcccagcttcataggaactcttctcatactgcttttcagattaaaattgctgtttacctggtctccgaatgtaatgcctgactgtgtcattgcccggatcagttttc

SEQ ID NO: 703009 - DNA, 120 bp, Artificial Sequence
  ENSG00000196323_27 (sequence is synthesized)
cccctgccccatcaatatgttctcttgcatatattggcgtgctgccatataaagtaaaaatactggagatattctatattttatatataggtttatgtgttgttggggatgttttcattg

SEQ ID NO: 703010 - DNA, 120 bp, Artificial Sequence
  ENSG00000196323_28 (sequence is synthesized)
tgttggggatgttttcattgtgctcttttggacataataaataattctctattgaggctacattctttttttttttctttttttttaaaagaatggcatctcactctgttgcccaggctg

SEQ ID NO: 703011 - DNA, 120 bp, Artificial Sequence
  ENSG00000196323_29 (sequence is synthesized)
agctcactgcagcttcgaactcctgggctcaggccattctcctgcctcagcctcttgagtatctaggattataggcatgctccaccacacctggttaacttcatttttattttttgtaga

SEQ ID NO: 703012 - DNA, 120 bp, Artificial Sequence
  ENSG00000196323_30 (sequence is synthesized)
gatgaggtctcactatggtgcccaggctggtcttgaactcctagaccaagtgatcctcctcctttggcctcccagactgctgggatcactgcaccggccaaggctgcattcttaacccaa

SEQ ID NO: 703013 - DNA, 120 bp, Artificial Sequence
  ENSG00000196323_31 (sequence is synthesized)
ctagattgtttactgaatcccatatgacagcgatacattgtccttacatatttatttttagacattgcaaagttattaaaaacagttaactatagtttttacacaacgtaggcaacaatg

SEQ ID NO: 703014 - DNA, 120 bp, Artificial Sequence
  ENSG00000196323_32 (sequence is synthesized)
aagagtatagactgtaagattttcatctatgactcataaatctgggagaaaaaaattattaagactaatgagaaactgaaaaccttaaactaatgaatattatttctgctgctaaaaata

SEQ ID NO: 703015 - DNA, 120 bp, Artificial Sequence
  ENSG00000196323_33 (sequence is synthesized)
tgaaactttctggtctgtagttgaaatttgtatgatcctctagacttgggtatacttttcatctggtgccattaaagcatctctaatattgatcctaaatatttgtaagtccatgagcag

SEQ ID NO: 703016 - DNA, 120 bp, Artificial Sequence
  ENSG00000196323_34 (sequence is synthesized)
tgaactttggaataagtttctgtgtagatacccaaagtttaataattatgagagcacctgatttgatagacagaaaatacagttctttagtcaaaacacaagatctgaattttgttcagg

SEQ ID NO: 703017 - DNA, 120 bp, Artificial Sequence
  ENSG00000196323_35 (sequence is synthesized)
tgctagaccatactaaatgtatatatttttaattatagtgatttgtttcatttttttagattggctaattctgtaattttttccccaaaaacatgtgaagaaaggaaaagtaaattaaat

SEQ ID NO: 703018 - DNA, 120 bp, Artificial Sequence
  ENSG00000196323_36 (sequence is synthesized)
tccttagaactgttttaggttaagattctctgtgtctgcccatattctgcagtccttaacttgttttcaactctttacctcactcatgaacttgtttttacccatttgctgccaaacata

SEQ ID NO: 703019 - DNA, 120 bp, Artificial Sequence
  ENSG00000196323_37 (sequence is synthesized)
ggtgtgttcccttcaggagaatcagcatatacaggttatgataggctcccaccatttatgcttcttcactgatagggttgcattactttctgcagcagactataatacttcatatagtac

SEQ ID NO: 703020 - DNA, 120 bp, Artificial Sequence
  ENSG00000196323_38 (sequence is synthesized)
tgctgtgtctcaactggaaaggtcaggaattttaatgttacgttgtggtctttgaaaactgttaggcctagcaatagataaatctcaaaattaattttaaaatctgtattgacaagaata

SEQ ID NO: 703021 - DNA, 120 bp, Artificial Sequence
  ENSG00000196323_39 (sequence is synthesized)
ggtaaaattatgaccaggaatcattgttacccttagttccaagaggtggtttttgaaagagcaagaggaaagaaaaaagaaaagaaggaaagaagaataaagaagagaaacgtgtaagaa

SEQ ID NO: 703022 - DNA, 120 bp, Artificial Sequence
  ENSG00000196323_40 (sequence is synthesized)
cacatccccaaccctgaaaacttcgcattaagagccaagcacaatgttggtagctccaagatattctgactgtgttctcagaatgagggattacccatcactgggtattccttcccaagt

SEQ ID NO: 703023 - DNA, 120 bp, Artificial Sequence
  ENSG00000196323_41 (sequence is synthesized)
agaaactttagattttcactggtaatacacattgccaagttttatgggaaatctgaatatactgtgaaaatgcatatctggttagttgtctgctgcccagatcttatcaataccagtaac

SEQ ID NO: 703024 - DNA, 120 bp, Artificial Sequence
  ENSG00000196323_42 (sequence is synthesized)
taaccagtatttaacataaaatgatacaaataaaggcctttttctatttcagtgagggtacatttttcttgatatatatgtactttaaggatattggatctgtttatggatctgttttag

SEQ ID NO: 703025 - DNA, 120 bp, Artificial Sequence
  ENSG00000196323_43 (sequence is synthesized)
gaaacagatttgcaagggataattgtatatatagtagtatttaggtttatttcaaattcatcttagggatgcctagatgcataatttttaccaggacatattgaaaatattgcaaagaga

SEQ ID NO: 703026 - DNA, 120 bp, Artificial Sequence
  ENSG00000196323_44 (sequence is synthesized)
tagccagttatattatcccattcattagaaattaccagtgtaactaaacataaatattccagtttagagtgcttaaacgtagctatctttcttaaggccaggagggtaactttgtggtat

SEQ ID NO: 703027 - DNA, 120 bp, Artificial Sequence
  ENSG00000196323_45 (sequence is synthesized)
ctaaagggcttaaatttcagaatgcagaataaattgcctttttaaaaccaagcattttgtacaagcttttattttcagttttttaactaccaaataggtgtgatgtactttagaagtaaa

SEQ ID NO: 703028 - DNA, 120 bp, Artificial Sequence
  ENSG00000196323_46 (sequence is synthesized)
caaagatgttcacccatgataatggatgttaaagctcctgcagttgttcttttcgtgtttaaagggtatattctaatagtggaagcatcaaacatgtcagtgatttcatctcattcagaa

SEQ ID NO: 703029 - DNA, 120 bp, Artificial Sequence
  ENSG00000196323_47 (sequence is synthesized)
ataaagagattaatattggtctttattttttggcattttaagttttatataaatggatgcagatggagattatcacccacaaatatatttaaatggatttttcttaatttgaatttcaag

SEQ ID NO: 703030 - DNA, 120 bp, Artificial Sequence
  ENSG00000196323_48 (sequence is synthesized)
taatctttttatttcaagtaattagttacgcatttagttacattgccagttttttttttttatcaatttcagtaagacaaaatatactaaaatgtttaaatagcctcattcaatcttaca

SEQ ID NO: 703031 - DNA, 120 bp, Artificial Sequence
  ENSG00000196323_49 (sequence is synthesized)
tagcctcattcaatcttacattttgacatttcagcaatcattctggcttacagtaattagatcccctgttacgacacatgccctttgttcttaataactagcaaaaaaaaaaaaaaaaaa

SEQ ID NO: 703032 - DNA, 120 bp, Artificial Sequence
  ENSG00000196323_50 (sequence is synthesized)
tactttgccaaatgaaatagactagtcaatacatctgatgtccataattattggtaactcagttaccttctaactaataggctggttcaggagactctcccagtttataaatggttctct

SEQ ID NO: 703033 - DNA, 120 bp, Artificial Sequence
  ENSG00000196323_51 (sequence is synthesized)
tgggagcctttggaagctgtattaaatctttcagtcttttatttctaattttttctcttaatctaaatagaggccagttatctattttatcagcttttattcttgaagattctcagatta

SEQ ID NO: 703034 - DNA, 120 bp, Artificial Sequence
  ENSG00000196323_52 (sequence is synthesized)
tgttttagtcccttttagctttaatagtccttgaaaaatacattactgtataatgtggcaattctgtaacagagacttattacttgaatgaataatcctaaaattttaatattttagctg

SEQ ID NO: 703035 - DNA, 120 bp, Artificial Sequence
  ENSG00000196323_53 (sequence is synthesized)
aagtttgagatttgtggaatgaacaaaagaattagaaactttcatatgttactttgtttcagtcatctgcaaagtatgaagctgtaattctgaaatacacatccaagtgaatgagaatta

SEQ ID NO: 703036 - DNA, 120 bp, Artificial Sequence
  ENSG00000196323_54 (sequence is synthesized)
aaaattttctaaatattaatactaactgggaaaaaaaaactagtgtgaagtttacagttagaagaaacagacccaaagttgccagaaggtaataaataaatgtagttttcactgtaagta

SEQ ID NO: 703037 - DNA, 120 bp, Artificial Sequence
  ENSG00000196323_55 (sequence is synthesized)
agttattgacgtaagatgctttatttgtaatatatttagattttgaaagttattgagagatgaatgtataaaagctaaattttcttttctgaagcagtgaaacaaaattggggtaacaag

SEQ ID NO: 703038 - DNA, 120 bp, Artificial Sequence
  ENSG00000196323_56 (sequence is synthesized)
gaagctctgttgtggcaaacatgtctatgaggaatattaaaactaagcatactcccacaggctttaaactcaaactatgaacatttaaattaagttgttccttattttgcctatacccat

SEQ ID NO: 703039 - DNA, 120 bp, Artificial Sequence
  ENSG00000196323_57 (sequence is synthesized)
ttttatctttcattgtcgtttttgcttgacagtatggtgacagagtatttttatttggaaagtcctcagcaagatgaattagccaaaagcaataatggttcagattaaacaataaagtgg

SEQ ID NO: 703040 - DNA, 120 bp, Artificial Sequence
  ENSG00000196323_58 (sequence is synthesized)
aattgattcaatcccaggctcaactaagaacagtcgctctctggatgtttcattttagacgatagataagttgagatgttgtaatatttatggggggttaagcctgtgtcagttatggga

SEQ ID NO: 703041 - DNA, 120 bp, Artificial Sequence
  ENSG00000196323_59 (sequence is synthesized)
tgaagacttgtagtaccagtaccatcagtggtcatacttttttttaactttttactaaactaatacagttagacatttccactctatcgtgattatatttttatgatgggaaaataaaaa

SEQ ID NO: 703042 - DNA, 120 bp, Artificial Sequence
  ENSG00000196323_60 (sequence is synthesized)
cacttccatgtttttataaatagtctctgcaaagatttcagatgttattggtatctcggtttggcagtatctgaaaaattgagattgtctttgaaatgtttgtgctacttttacttaagt

SEQ ID NO: 703043 - DNA, 120 bp, Artificial Sequence
  ENSG00000196323_61 (sequence is synthesized)
aaacccccactgtgcaagacccaggccggcttcagctaataccaaggtttctgtgtgcataatagtttacagagaacttaagagtaaggactgcggattaaaaacaaaactttttttaac

SEQ ID NO: 703044 - DNA, 120 bp, Artificial Sequence
  ENSG00000196323_62 (sequence is synthesized)
tttaaaatttttagtttttgttcaaagtacctggtttataaagtcaaattcttttattagttcctttctcgtttaaattgactgatgttgctgatgaagcttaaagtcccaggcacggtt

SEQ ID NO: 703045 - DNA, 120 bp, Artificial Sequence
  ENSG00000196323_63 (sequence is synthesized)
gtggcgatatactgataaaattggtgcctagtggtgggaggagctccagtgtcaggacttttattaaaaggcccttgttttcccaaatgccaatctagccacatttagatttcattattc

SEQ ID NO: 703046 - DNA, 120 bp, Artificial Sequence
  ENSG00000196323_64 (sequence is synthesized)
aataaaacagatgaaaaatcatcccataaatgaatgttgaggttaccaaagtacatcacctgctgaggaaggataaatcttcctgctttaagggagccctgtcatctctcctcttaatgc

SEQ ID NO: 703047 - DNA, 120 bp, Artificial Sequence
  ENSG00000196323_65 (sequence is synthesized)
acgtttcccttggtattagtggaagctgtgttcaagatgggaagcctttcctgcagttcttagaaacacctgctttctaaggagagccttttctaggattagcttatgtgtgttttctct

SEQ ID NO: 703048 - DNA, 120 bp, Artificial Sequence
  ENSG00000196323_66 (sequence is synthesized)
aggcgattttttatttcagttaccaatttaattttcaagttgacagatgctgtgtaaagtctctcataatgagagtagtccattaaattgttgaaagttgcactgcttttcatctttcag

SEQ ID NO: 703049 - DNA, 120 bp, Artificial Sequence
  ENSG00000196323_67 (sequence is synthesized)
gtacctgaaatgagtgacatcaggtatttggaaggagtaagatcataaactgtattcattttcttccttgtacaaagtgatgacttctaatgcttatatctcaaggtattttttaaaaaa

SEQ ID NO: 703050 - DNA, 120 bp, Artificial Sequence
  ENSG00000196323_68 (sequence is synthesized)
gcaacggtccctaatagagtaaaatttggttttggtccaagttcccaataatgtatttaatgtttctgttgtttactggtgcctcccgttgcatcaggtagagattgcctgcctctttgt

SEQ ID NO: 703051 - DNA, 120 bp, Artificial Sequence
  ENSG00000196323_69 (sequence is synthesized)
agggcagccttgtggcaccttatgtccaacttggaggatagtatatggcttctttgtgcctctactatcttttcaaaagccattttataaaaatcctaggtagcctattttaatatttaa

SEQ ID NO: 703052 - DNA, 120 bp, Artificial Sequence
  ENSG00000196323_70 (sequence is synthesized)
atatatatatttgtgaaagaacttttagaacagaccttttctttttactttaaaattcctgtatttccatttttaagagtaaatttaatctccaggatttagaagtgtctttccagagaa

SEQ ID NO: 703053 - DNA, 120 bp, Artificial Sequence
  ENSG00000196323_71 (sequence is synthesized)
gcataatgagaaagtcagactgaggtaataagaccagaattaagtgatagaagaaactgttgtttggttaaaggacacagatttgaaggaaaaaaattttgatgtaacaattttttaaat

SEQ ID NO: 703054 - DNA, 120 bp, Artificial Sequence
  ENSG00000196323_72 (sequence is synthesized)
aaaattttgtttttctgtaatgtcatatttgctgctacagtagctcaatattttacagggctaacataaagctggctccatttaaaaactggagtacttcctagtgcagccagcctaggc

SEQ ID NO: 703055 - DNA, 120 bp, Artificial Sequence
  ENSG00000196323_73 (sequence is synthesized)
ggaaactgtacaccatggtcttccagatgggtgactgatggctttgggtagctgatgcatgctttaatatttgcctatagcccggcagcaaggaagtcggggcggggggacttttttacc

SEQ ID NO: 703056 - DNA, 120 bp, Artificial Sequence
  ENSG00000196323_74 (sequence is synthesized)
ctgccagttatagcattgtgattctttctgggcactggcattttgtgaaactctcaagggaaggtgatgcaggggagaaaatgtgaattaaattacatagatgggtgtttttatgtcttc

SEQ ID NO: 703057 - DNA, 120 bp, Artificial Sequence
  ENSG00000196323_75 (sequence is synthesized)
tacccctttcctagaattagtacaactcttaactgtgccagtccccagttcaccagctttgtatccagtcgtcatctcattcaagtatggctttacttggtgacactggccatagctaag

SEQ ID NO: 703058 - DNA, 120 bp, Artificial Sequence
  ENSG00000196323_76 (sequence is synthesized)
ttaacttggcatgtttgacttttgacaataacaaaaatggttttggattttgttttatttccaaaaaatgtatacaatatcagaacttcacattttatatactagtatctggctattagt

SEQ ID NO: 703059 - DNA, 120 bp, Artificial Sequence
  ENSG00000196323_77 (sequence is synthesized)
attttacaggaaccatagttcttggtgactacatatatatatatatttttgtgaccttttttgtaaactaagtgccgtttcaacgttacaatcatttttagggttattgtaatcaatgtg

SEQ ID NO: 703060 - DNA, 120 bp, Artificial Sequence
  ENSG00000196323_78 (sequence is synthesized)
aatatcatgttttttcaaatctgttctgagcctatagtgtttgctttgtgaacatgtgtattgtatatattctgtatagttatattgtactgaaattagcttgtttgatataaggaaaat

SEQ ID NO: 703061 - DNA, 120 bp, Artificial Sequence
  ENSG00000196323_79 (sequence is synthesized)
atgtattgagtacctttttgctagcctgattgtttaatctttttaaaaaaggtttaaactttttttaaaaaaaaaatctttaaactggcctttattacatggtcacacataaagttgcag

SEQ ID NO: 703062 - DNA, 120 bp, Artificial Sequence
  ENSG00000196323_80 (sequence is synthesized)
ttaggaaagggatgggcagggaaaaactagttttgagtgtctttagatagaaacatgagactaaggtttgattttgttttcgttttctcattaaaatatcttatgctttatggaataaaa

SEQ ID NO: 703063 - DNA, 120 bp, Artificial Sequence
  ENSG00000196323_81 (sequence is synthesized)
aaactctcttttcctgcttttagggcagccttctgtgtttttacatcaggttgccagctagtcagtcacatttgttacggattcccactgttcatactctaatctcctgatctgataaaa

SEQ ID NO: 703064 - DNA, 120 bp, Artificial Sequence
  ENSG00000196323_82 (sequence is synthesized)
ttgtgtttacaactccaaattcaagcatttcatctcaagagttgtagaagtttattacaacctcacttcagtatacttttcaaagtaatgaagtagcatcatcacattataaattagagt

SEQ ID NO: 703065 - DNA, 120 bp, Artificial Sequence
  ENSG00000196323_83 (sequence is synthesized)
acctatacaaggcttttttttttccccagcatttccaaaactacctagtcccattgctttaaatcgtatctgtaccaagtgttggcaaactatgaaccacaggccaattccagcctacca

SEQ ID NO: 703066 - DNA, 120 bp, Artificial Sequence
  ENSG00000196323_84 (sequence is synthesized)
cctttatttgtaaatcaagtattactggaacacaaccaggctcatttgctgacatattgtttgtggatggcagagttgagtggttgaaacagactgtatggtgtgcaaagtcagaatgtg

SEQ ID NO: 703067 - DNA, 120 bp, Artificial Sequence
  ENSG00000196323_85 (sequence is synthesized)
tgctgtacggactgctgtgaaaaacatctgccaaagtctgatctgtatacccataactccctccctgcttgatatttccacataaatgtataaagggcatttcacatttaacaaggccaa

SEQ ID NO: 703068 - DNA, 120 bp, Artificial Sequence
  ENSG00000196323_86 (sequence is synthesized)
gacagaactcttgatttctaactccttgtctgaatcctgcttctccagcctttctcccatttcagtaagcatcatcattatcccctaatttctcaagcaaaatctctgaggattgttctt

SEQ ID NO: 703069 - DNA, 120 bp, Artificial Sequence
  ENSG00000196323_87 (sequence is synthesized)
aatcttttttccttaccactcttcatctccctcgtagttaatccttaagtcctgtcaactctgcctataaaatatatccctgtctacttttctaatctgtactgtagccaccctactcta

SEQ ID NO: 703070 - DNA, 120 bp, Artificial Sequence
  ENSG00000196323_88 (sequence is synthesized)
agtcaccaccatcttttgccttgactactgcaataaccttcaaagtagcctctgattgcattcttcccctaatccattttccatgtagcagccaaaatcatcttttcttttttaattaag

SEQ ID NO: 703071 - DNA, 120 bp, Artificial Sequence
  ENSG00000196323_89 (sequence is synthesized)
tcagattatgtcactgttttaagctatagattcttaacattctttattcatacctaaaatctataggccttgctatgccttctaaagccctacacgatatgacttctgcctaactccgtc

SEQ ID NO: 703072 - DNA, 120 bp, Artificial Sequence
  ENSG00000196329_0 (sequence is synthesized)
atgacaggaagtgacccgttaaggaagcagcacatcgctgcattcggctggttttcagggtcttgttcccaatcagtttccagccaacaccagggtgtcctagtccgcagaggtgtgggg

SEQ ID NO: 703073 - DNA, 120 bp, Artificial Sequence
  ENSG00000196329_1 (sequence is synthesized)
gacacactccataatctctacttttctttttgtgcagctgagtcatggagctttcagccccagcacatggctcctccttaactgcgtctgctcaacctccctcagccctgtgaacagcat

SEQ ID NO: 703074 - DNA, 120 bp, Artificial Sequence
  ENSG00000196329_2 (sequence is synthesized)
ccccgcacacagacgcagagcaggactctctctgctgccacttcaccttcctgagagaggaccagcggccagagcctcagtgactgccaccctggaggacagggcacaacaaccgtttct

SEQ ID NO: 703075 - DNA, 120 bp, Artificial Sequence
  ENSG00000196329_3 (sequence is synthesized)
ggagagaatgggaggattccagaggggcaaatatggaactatggctgaaggtagatcagaagataacttgtctgcaacaccaccggcattgaggattatcctagtgggcaaaacaggctg

SEQ ID NO: 703076 - DNA, 120 bp, Artificial Sequence
  ENSG00000196329_4 (sequence is synthesized)
cgggaaaagtgccacagggaacagcatccttggccagcccgtgtttgagtccaagctgagggcccagtcagtgaccaggacgtgccaggtgaaaacaggaacatggaacgggaggaaagt

SEQ ID NO: 703077 - DNA, 120 bp, Artificial Sequence
  ENSG00000196329_5 (sequence is synthesized)
cctggtggttgacacgccctccatctttgagtcacaggccgatacccaagagctgtacaagaacatcggggactgctacctgctctctgccccggggccccacgtcctgcttctggtgat

SEQ ID NO: 703078 - DNA, 120 bp, Artificial Sequence
  ENSG00000196329_6 (sequence is synthesized)
ccagctggggcgtttcactgctcaggacacagtggccatcaggaaggtgaaagaggtctttgggacaggggccatgagacatgtggtcatcctcttcacccacaaagaggacttaggggg

SEQ ID NO: 703079 - DNA, 120 bp, Artificial Sequence
  ENSG00000196329_7 (sequence is synthesized)
ccaggccctggatgactatgtagcaaacacggacaactgcagcctgaaagacctggtgcgggagtgtgagagaaggtactgtgccttcaacaactggggctctgtggaggagcagaggca

SEQ ID NO: 703080 - DNA, 120 bp, Artificial Sequence
  ENSG00000196329_8 (sequence is synthesized)
gcagcaggcagagctcctggctgtgattgagaggctggggagggagcgagagggctccttccacagcaatgacctcttcttggatgcccagctgctccaaagaactggagctggggcctg

SEQ ID NO: 703081 - DNA, 120 bp, Artificial Sequence
  ENSG00000196329_9 (sequence is synthesized)
acaggcagtaccaggccaaagtggaatggcaggtggagaagcacaagcaagagctgagggagaacgagagtaactgggcatacaaggcgctcctcagagtcaaacacttgatgcttttgc

SEQ ID NO: 703082 - DNA, 120 bp, Artificial Sequence
  ENSG00000196329_10 (sequence is synthesized)
attatgagatttttgtttttctattgttgtgcagcatactttttttcattatttttctgttcatctttcattacatttaaatctctggaccctggagcacttctaatgtatcaccccatg

SEQ ID NO: 703083 - DNA, 120 bp, Artificial Sequence
  ENSG00000196329_11 (sequence is synthesized)
gagtcattgttctaataatcaccaattcagactcagatcctcgtggtctatggagcatgctgcttgctgtctgtgcagctcccatttccccttcttcctgatagacttggagctgtgtgc

SEQ ID NO: 703084 - DNA, 120 bp, Artificial Sequence
  ENSG00000196329_12 (sequence is synthesized)
ctccactccaaggctgcctgcctgctgtaaacactattccactctgtctgccaacaactgcttcaggaatgggcctgagatcccatgcaggtccctgagaagtgagtaaaagtccgcaga

SEQ ID NO: 703085 - DNA, 120 bp, Artificial Sequence
  ENSG00000196329_13 (sequence is synthesized)
ggtggggatggaagatctctccttagatagaacctgtcttcctccctggcattgtggggtctgggcgtgacactgggactctcagcagctttgtgctgccaacctgagattgaaggcagt

SEQ ID NO: 703086 - DNA, 120 bp, Artificial Sequence
  ENSG00000196329_14 (sequence is synthesized)
gcctcagagcagcacagagagttggggccccctgagccctgagccaccagccctgcagcctgccctatctccgcatttccagttgtattagccaatagatttcctacttatttaagctat

SEQ ID NO: 703087 - DNA, 120 bp, Artificial Sequence
  ENSG00000196329_15 (sequence is synthesized)
ttgagctccgggtctcttctacctgcattctaaaacattcaaagtaataaaaatttctccacattcctttttatcctttaaatctgttggaacttcccagtccacatgcttcctttgagc

SEQ ID NO: 703088 - DNA, 120 bp, Artificial Sequence
  ENSG00000196329_16 (sequence is synthesized)
aagtggcatctagaataaaggaacagggttggcttttcttgttcctaaaattaggaagaacctcctgctcctactgaagtgcctgccacatagtggacattccctgaactctgagtaaag

SEQ ID NO: 703089 - DNA, 120 bp, Artificial Sequence
  ENSG00000196329_17 (sequence is synthesized)
caaaacactttcagatggatggattgcattgacgaatgggagtgggagagggtcaaggaaatggggtgccctgtacgcagggctttctctgtgctttcttctcagtttggccaggggccc

SEQ ID NO: 703090 - DNA, 120 bp, Artificial Sequence
  ENSG00000196329_18 (sequence is synthesized)
aaaagaaacacagctcacatttcaatgctctgcaaggaatcactttggcaaatgttcacacatgagaaaggttaagcaaactctttctccttctccactgtaaaatgtccttggatcaac

SEQ ID NO: 703091 - DNA, 120 bp, Artificial Sequence
  ENSG00000196329_19 (sequence is synthesized)
gaggaggagggagtgtgcgcaggcgccctagggtcttccccagcacacgttgggaagaaggggtctgcaagcatgcgcacaattgccagctcaggctaaggactgcaggaggttccagct

SEQ ID NO: 703092 - DNA, 120 bp, Artificial Sequence
  ENSG00000196329_20 (sequence is synthesized)
gcggccagagcctcagtgactgccaccctggaggacagggcacaacaaccgtttctggatgacaggaaattaaaagtgtaatattactaagtgcctgtgaagatttggggacttcttata

SEQ ID NO: 703093 - DNA, 120 bp, Artificial Sequence
  ENSG00000196329_21 (sequence is synthesized)
aatgggtggtgcaaataggagttaactcaactccctgggagtcatatttggcaataaccagtcacgtggaaaatgtacatccccaatactgttgcacaatgctggaaacccggagcaggc

SEQ ID NO: 703094 - DNA, 120 bp, Artificial Sequence
  ENSG00000196329_22 (sequence is synthesized)
tccaccaaccgtcagggtgggaaagcggtcataccggtccccctataccatttcctctcacgtcagttcttcgtgtccctgatccccacttccatcctcccactggacagtaccttgtaa

SEQ ID NO: 703095 - DNA, 120 bp, Artificial Sequence
  ENSG00000196329_23 (sequence is synthesized)
tatggctgaaggaggatcagcagcagcagtgatcctggagccaacctgccttctcctcagcctgtgagagcgggtgaagagtgagggtataaaaactgcattctgaggaggaggtgccaa

SEQ ID NO: 703096 - DNA, 120 bp, Artificial Sequence
  ENSG00000196329_24 (sequence is synthesized)
atgctaataatgggtatagtgcccgtgaagaagaaaatgagacactcactgaaaatctgagaagcaaagtaactgctataaaatctttttccattgaaataggccatgaagttaaaaccc

SEQ ID NO: 703097 - DNA, 120 bp, Artificial Sequence
  ENSG00000196329_25 (sequence is synthesized)
aaaataaattattagctgtaatggattcacaatttgattctacaactggatttctaggtaaaactatgggcaaactggagattttatccataaggagccaaacaaagctgctgtgctctg

SEQ ID NO: 703098 - DNA, 120 bp, Artificial Sequence
  ENSG00000196329_26 (sequence is synthesized)
aggactctctctgctgccacttcaccttcctgagagaggaccagcggccagagcctcagtgactgccaccctggaggacagggcacaacaaccgtttctgaagataacttgtctgcaaca

SEQ ID NO: 703099 - DNA, 120 bp, Artificial Sequence
  ENSG00000196329_27 (sequence is synthesized)
ggactctctctgctgccacttcaccttcctgagagaggaccagcggccagagcctcagtgactgccaccctggaggacagggcacaacaaccgtttctggtaaggagaactgggtttatg

SEQ ID NO: 703100 - DNA, 120 bp, Artificial Sequence
  ENSG00000196329_28 (sequence is synthesized)
ctcacagagactttgggaattgaaaggatcacagtttggtcacagctgttcatttctgacatgaccttgcacagatcccctcacttctgggttcgctggtcagtaaaacggggcaatggt

SEQ ID NO: 703101 - DNA, 120 bp, Artificial Sequence
  ENSG00000196329_29 (sequence is synthesized)
gatgagtgttgcgggcatcagcaggtgcacagctggtggagcacagcctgaagaatctgtgcctgcactcacagcccagtcccaggacagcgggctttgctgccccattgcccattactt

SEQ ID NO: 703102 - DNA, 120 bp, Artificial Sequence
  ENSG00000196329_30 (sequence is synthesized)
agccaagtcgatctccatgaaactctcagggagtaaggctgaactgatcctctcatcagtgggacagatgggagaactgaagctcccagagggtgataggctttcccccatctcccctag

SEQ ID NO: 703103 - DNA, 120 bp, Artificial Sequence
  ENSG00000196329_31 (sequence is synthesized)
catgccggggcattcttctcaattttaccctcctaatttctcctgtcccagaccagccagacacgtaccatgtctcagacaagcctgggagctgaggatggattcttagggctccccagg

SEQ ID NO: 703104 - DNA, 120 bp, Artificial Sequence
  ENSG00000196329_32 (sequence is synthesized)
gcaaatgtgggatattttcccaccccaggagcctcatgttccaaacaagacccctgagtggaccttgtcttgtgactttcaacttctgaaaactaccccatgctcccccagatgccccac

SEQ ID NO: 703105 - DNA, 120 bp, Artificial Sequence
  ENSG00000196329_33 (sequence is synthesized)
atttttcctatgacaccctgccggacgcacaccaaaccgcaaaacacatgattccaatacctggaaatacatgggctggggcagatgggtgaaggagatacttatgaacaaggaagacaa

SEQ ID NO: 703106 - DNA, 120 bp, Artificial Sequence
  ENSG00000196329_34 (sequence is synthesized)
gaagtggtttgatcttttctaaaatagtatggaagaggctgctttcttgtaatttgctaaaataagctcttctcatggtaaaatcaggttcatgcaattttcaaatcggaatgtgcattt

SEQ ID NO: 703107 - DNA, 120 bp, Artificial Sequence
  ENSG00000196329_35 (sequence is synthesized)
tgttcatttgcttcacccttttccctgagccagaccctcccaccagcttgccagaggctgctactgtcttgcttgcacactgccttccaatctctcatgaactttggtctcttttgtggg

SEQ ID NO: 703108 - DNA, 120 bp, Artificial Sequence
  ENSG00000196329_36 (sequence is synthesized)
acgattagtaaaatttttcctttggagaagacgcctgtcttcattctcaattcctccacttttgtctgccctgtagaccaacacgtatcacattccttcaagcctacggtgtgtccacca

SEQ ID NO: 703109 - DNA, 120 bp, Artificial Sequence
  ENSG00000196329_37 (sequence is synthesized)
cgctctattcagttcttttataatcttctccatgactcattttagcattgccatcagtatcctttctgactcacctgtgaacactttgttatttgtgaatatctgccaaaaaatgtattc

SEQ ID NO: 703110 - DNA, 120 bp, Artificial Sequence
  ENSG00000196329_38 (sequence is synthesized)
ctcaatgcagcctgatccactcagaaagcttggattgggagagctattgttgctggtcattggctaacataacatagtttgactggcttttgtgacaggcaattggctgttttaaaagaa

SEQ ID NO: 703111 - DNA, 120 bp, Artificial Sequence
  ENSG00000196329_39 (sequence is synthesized)
aagacctcaattcagagaaactcctgccaccagcaattttatttttgaataaccttttataagaaatgcactcaagattttgcaataaaattctgtgtgttggttttagggtaggcttct

SEQ ID NO: 703112 - DNA, 120 bp, Artificial Sequence
  ENSG00000196329_40 (sequence is synthesized)
agctgtccaattaatttgtctcctgaccagggagtggcagcattgtacacatgttccaagaggtttgttgacttttttggaaaagtctctttttccacctgtggaatcaaggacaataca

SEQ ID NO: 703113 - DNA, 120 bp, Artificial Sequence
  ENSG00000196329_41 (sequence is synthesized)
cagcaaaaggagccatttcctgatgctagctccattgtaaatatgtgacctttggcaggtcatttaatgctcagtttccttgcattttaatagaaattttaagatcagttttgatcacat

SEQ ID NO: 703114 - DNA, 120 bp, Artificial Sequence
  ENSG00000196329_42 (sequence is synthesized)
cacagggaatttgagagagcaattaaaataagaaggatgaaataactttgaaaattataaatgtattcacagaggcttattacaattatgatgttcataatcaatatcattaccactgtc

SEQ ID NO: 703115 - DNA, 120 bp, Artificial Sequence
  ENSG00000196329_43 (sequence is synthesized)
atcttgacccttaccacatcattatgttgattccaaacctcagaaaacgtcatctaaagtagagaggatgtcagggaactggtgctattttagcaaaagccagaagcataatttaccaga

SEQ ID NO: 703116 - DNA, 120 bp, Artificial Sequence
  ENSG00000196329_44 (sequence is synthesized)
gacgagaacagggtgtgggagagaggaaaatgttcttctctgggcttaagaaaaagaaagaaaggagagaggggagggtaaagaggaaaggaggaagaaaagaaagaagggaaagggagg

SEQ ID NO: 703117 - DNA, 120 bp, Artificial Sequence
  ENSG00000196329_45 (sequence is synthesized)
gaggcaggaagctgtcttaatacattctgataatataaaaatagatttcttgacctaaagaaggccaagaaaatccactgaatgaatagaaaaatgtggaaaagatagaaatcacagaag

SEQ ID NO: 703118 - DNA, 120 bp, Artificial Sequence
  ENSG00000196329_46 (sequence is synthesized)
tacagcaaggcaatttttttttctctattctggtaagtttgttactttaatttcaatttttttaatgcctactctttgttccatagaagaatgctttctccatttcatgcctttctggtt

SEQ ID NO: 703119 - DNA, 120 bp, Artificial Sequence
  ENSG00000196329_47 (sequence is synthesized)
gggggagataatcaactgatttgcttcaaaatatttcctgattttctgtaagttgaggggagggaagtaatcgtgcactattttagcataacctaacatctaacatcacctgctttgttt

SEQ ID NO: 703120 - DNA, 120 bp, Artificial Sequence
  ENSG00000196329_48 (sequence is synthesized)
aaagttatttacagatgtttcaaagtaaagtatgagttagaaaattagggatggaaatggctcatttgagaatgattattcttagatgtctgaattgaggtgccctcaggctctaccagc

SEQ ID NO: 703121 - DNA, 120 bp, Artificial Sequence
  ENSG00000196335_0 (sequence is synthesized)
gcggtcgaagctcacgcggtaagccgctgcacgtgtgctacggcgggcggagggccgaaagtccagtatgtgggtccagggtcactcttctagagcttccgcaacggaaagtgtgagttt

SEQ ID NO: 703122 - DNA, 120 bp, Artificial Sequence
  ENSG00000196335_1 (sequence is synthesized)
ttcaggaattgttcaaatggatgaagatacacattacgataaagtggaagatgtggttggaagtcacatagaagatgcagtaacattttgggcccagagtatcaatagaaataaggatat

SEQ ID NO: 703123 - DNA, 120 bp, Artificial Sequence
  ENSG00000196335_2 (sequence is synthesized)
catgaagattggttgctcactgtctgaagtttgcccccaggccagttcagttttggggaatcttgacccaaacaagatttatggtggattattttctgaagatcagtgttggtacagatg

SEQ ID NO: 703124 - DNA, 120 bp, Artificial Sequence
  ENSG00000196335_3 (sequence is synthesized)
caaagtactgaaaatcatcagcgttgaaaagtgtctggtgaggtacattgactatggaaatactgaaattctaaatcgatctgatatagttgaaattcctttggagctgcagttttctag

SEQ ID NO: 703125 - DNA, 120 bp, Artificial Sequence
  ENSG00000196335_4 (sequence is synthesized)
tgttgccaaaaagtataaactttggggactacacattccttctgatcaagaagttacccagtttgatcagggcacaacctttttggggagcttgatttttgaaaaggaaataaaaatgag

SEQ ID NO: 703126 - DNA, 120 bp, Artificial Sequence
  ENSG00000196335_5 (sequence is synthesized)
aattaaagcaacctctgaagatggaacagttattgctcaggctgagtatggcagtgtggatataggggaagaggtgcttaagaaaggatttgcagagaaatgcagacttgcttccagaac

SEQ ID NO: 703127 - DNA, 120 bp, Artificial Sequence
  ENSG00000196335_6 (sequence is synthesized)
tgacatctgtgaggaaaaaaaattggatcctggtcaacttgttctcaggaacctcaaaagccccattcctttgtgggggcatagatcaaaccagtcaaccttcagcaggcccaaggggca

SEQ ID NO: 703128 - DNA, 120 bp, Artificial Sequence
  ENSG00000196335_7 (sequence is synthesized)
cttaagtgagaaaatgactcttgacttgaaggatgaaaatgatgcaggcaatcttataacatttccaaaggaaagtttggctgttggtgactttaatttagggtctaacgtcagcctgga

SEQ ID NO: 703129 - DNA, 120 bp, Artificial Sequence
  ENSG00000196335_8 (sequence is synthesized)
aaaaattaagcaggaccagaaactgattgaagaaaatgaaaaacttaaaacagagaaggacgctcttcttgaaagttataaggcgttagaattgaaagtagagcagattgcccaggagct

SEQ ID NO: 703130 - DNA, 120 bp, Artificial Sequence
  ENSG00000196335_9 (sequence is synthesized)
gcagcaagagaaggcagctgctgtggatttgactaaccacttagaatacactctgaagacctatatagataccagaatgaaaaatctggcagctaagatggaaatactgaaagaaatgag

SEQ ID NO: 703131 - DNA, 120 bp, Artificial Sequence
  ENSG00000196335_10 (sequence is synthesized)
gcatgtcgacatcagtgtccgtttcggaaaagacctttcagatgctatacaagtgttggatgaagggtgctttactactccagcttctttgaatggattagagataatatgggcagaata

SEQ ID NO: 703132 - DNA, 120 bp, Artificial Sequence
  ENSG00000196335_11 (sequence is synthesized)
cagtctggctcaggagaatattaaaacttgtgaatatgtgagtgaagggaatattttgattgcccaaagaaatgaaatgcagcagaagctgtacatgtcagtagaagattttattctgga

SEQ ID NO: 703133 - DNA, 120 bp, Artificial Sequence
  ENSG00000196335_12 (sequence is synthesized)
agttgatgagtcatctcttaataaacgcttaaaaacattgcaggatttgtcagtctctttagaagcagtgtatggacaagccaaagaaggagcaaattctgatgaaatacttaaaaaatt

SEQ ID NO: 703134 - DNA, 120 bp, Artificial Sequence
  ENSG00000196335_13 (sequence is synthesized)
accagtgttagaagtgaaacagacgcttctctgcaccgtcttgtagcatggttccaaagaaccttaaaggtttttgacctatctgtggaaggatcactgatttcagaagacgcaatggat

SEQ ID NO: 703135 - DNA, 120 bp, Artificial Sequence
  ENSG00000196335_14 (sequence is synthesized)
aatattgatgaaatcctagagaagactgagtcaagtgtctgcaaagagctggagatagctctggttgatcaaggtgatgcagacaaggagataatttcaaatacatatagtcaagtactg

SEQ ID NO: 703136 - DNA, 120 bp, Artificial Sequence
  ENSG00000196335_15 (sequence is synthesized)
caaaagattcattcagaggaaaggctcattgccacagtacaagctaagtacaaggacagtattgagtttaaaaagcagcttattgaatatttaaataagagtcccagtgtggatcacttg

SEQ ID NO: 703137 - DNA, 120 bp, Artificial Sequence
  ENSG00000196335_16 (sequence is synthesized)
ctatccattaagaagacattgaaaagcttaaaagctctactcagatggaaattggttgaaaagagtaatttggaagagtcagatgatcctgatggctctcaaattgagaaaataaaagaa

SEQ ID NO: 703138 - DNA, 120 bp, Artificial Sequence
  ENSG00000196335_17 (sequence is synthesized)
gaaataactcagctgcgcaataatgtctttcaggaaatttatcatgagagagaggaatatgagatgctaactagtttggcacagaaatggttccctgagctgcctctgcttcatcctgaa

SEQ ID NO: 703139 - DNA, 120 bp, Artificial Sequence
  ENSG00000196335_18 (sequence is synthesized)
ataggattactcaaatacatgaactctggtggtctccttacaatgagcttggaacgagatcttcttgatgctgagcccatgaaggaacttagcagcaagcgtcctttggtacgttctgag

SEQ ID NO: 703140 - DNA, 120 bp, Artificial Sequence
  ENSG00000196335_19 (sequence is synthesized)
gttaatgggcagataattctgttaaagggctattctgtggatgttgacacagaagccaaggtgattgagagagcagccacctaccatagagcttggagagaagctgaaggagactcaggg

SEQ ID NO: 703141 - DNA, 120 bp, Artificial Sequence
  ENSG00000196335_20 (sequence is synthesized)
ttactgccattgatattcctgtttttatgtaagtctgatcctatggcttatctgatggtcccatactaccctagggcaaacctgaatgctgttcaagccaacatgcctttaaattcagaa

SEQ ID NO: 703142 - DNA, 120 bp, Artificial Sequence
  ENSG00000196335_21 (sequence is synthesized)
gaaactttaaaggtcatgaaaggtgttgcccagggtctgcatacattgcataaggctgacataattcatggatcacttcatcagaacaatgtatttgctttaaaccgtgaacaaggaatt

SEQ ID NO: 703143 - DNA, 120 bp, Artificial Sequence
  ENSG00000196335_22 (sequence is synthesized)
gttggagattttgacttcaccaaatctgtgagtcagcgagcctcggtgaacatgatggttggtgacttgagtttgatgtcacctgagttgaaaatgggaaaacctgcttctccaggttca

SEQ ID NO: 703144 - DNA, 120 bp, Artificial Sequence
  ENSG00000196335_23 (sequence is synthesized)
gacttatatgcttatggctgcctcttattatggctttctgttcaaaatcaggagtttgagataaataaagatggaatccccaaagtggatcagtttcatctggatgataaagtcaaatcc

SEQ ID NO: 703145 - DNA, 120 bp, Artificial Sequence
  ENSG00000196335_24 (sequence is synthesized)
ctcctctgtagcttgatatgttatagaagttcaatgactgctgaacaagttttaaatgctgaatgtttcttgatgccaaaggagcaatcagttccaaacccagaaaaagatactgaatac

SEQ ID NO: 703146 - DNA, 120 bp, Artificial Sequence
  ENSG00000196335_25 (sequence is synthesized)
accctatataaaaaggaagaagaaataaagacggagaacttggataaatgtatggagaagacaagaaatggtgaagccaactttgattgttaaattattattgttgttgttgcagaggtt

SEQ ID NO: 703147 - DNA, 120 bp, Artificial Sequence
  ENSG00000196335_26 (sequence is synthesized)
ctttttaaaaactttggtttggttaatacacagaaatatctagaaatgttctgggactagttgagttgtatctttagtattcaggttgtgaaaaataaagatgtttggctatgcacaaaa

SEQ ID NO: 703148 - DNA, 120 bp, Artificial Sequence
  ENSG00000196335_27 (sequence is synthesized)
aaagtgtgaggtcagtagtagtttttgtggtacgtgcagtggtggccgcttcaaggactattttcgtcgctgcttgcgttttaagtctccaatcctgggacgaggcccatttcagggttt

SEQ ID NO: 703149 - DNA, 120 bp, Artificial Sequence
  ENSG00000196335_28 (sequence is synthesized)
tctgtcaccttctagccgcccgccaccccagaggggtgccagatgccccagtttttgagtgcatgcaggcaggcgaaagtggctcgaaaagacctccggcctgaatgatctccatgaaga

SEQ ID NO: 703150 - DNA, 120 bp, Artificial Sequence
  ENSG00000196335_29 (sequence is synthesized)
cgcggtcacgcagcctccacactctcttccccttctcgaaaattctgtgccatttaagtttcaaaatcccttataaaataagtgtcagagagctacgtgtacccgtttcttccaaatttt

SEQ ID NO: 703151 - DNA, 120 bp, Artificial Sequence
  ENSG00000196335_30 (sequence is synthesized)
acttaaatttttctattgttgtttaatactcagtgtcagtaaattgttattactagaattcactgtcaactggaaatggtgatttttgatgatataaatatatcaaattttttattgttt

SEQ ID NO: 703152 - DNA, 120 bp, Artificial Sequence
  ENSG00000196335_31 (sequence is synthesized)
taaatattttattatgtccatgagaaccacaatttttaacatcattttctttttgcctgtatgagtctactgtagataatttgctatatacagaaagataagaaataaaacattgcttat

SEQ ID NO: 703153 - DNA, 120 bp, Artificial Sequence
  ENSG00000196335_32 (sequence is synthesized)
aattcccttagcctaagagatagttttagagtatttactcactggatgtgcatctgtatgtttgtgagcatatatatatgcattgcattgttttttaagttacttcaaacatactttctt

SEQ ID NO: 703154 - DNA, 120 bp, Artificial Sequence
  ENSG00000196335_33 (sequence is synthesized)
catttaatggtatattatgaacatttttctatatgatttttctatactgtcatcttgagtgactaaatcctcatccctatgtagatgtacaacaacattaacctttcatgtgtgttggac

SEQ ID NO: 703155 - DNA, 120 bp, Artificial Sequence
  ENSG00000196335_34 (sequence is synthesized)
attaaggttacttccaatttttcctaccataaataacactgtacatatgtttgtgcataattttttgtttttatttctcagatttctaaattctataattactgagttaaaaggaatgga

SEQ ID NO: 703156 - DNA, 120 bp, Artificial Sequence
  ENSG00000196335_35 (sequence is synthesized)
cattattaattaaaacttgatacatattttcaaaccacttttgggaaagatgatttcagtttacatcctcactagaaattcctttttcatccatactaacaatgtgtgttttattgtatg

SEQ ID NO: 703157 - DNA, 120 bp, Artificial Sequence
  ENSG00000196335_36 (sequence is synthesized)
tctcagtttgaaatattacttttgtctttgttactttgagtgctggaactgatattcttctaaatagaaacatggattaaaaaggaaatctattgaattgtcttgttgaaaattatagat

SEQ ID NO: 703158 - DNA, 120 bp, Artificial Sequence
  ENSG00000196335_37 (sequence is synthesized)
tttcttggtatttcagtctgaactcagtaaatactagttgaatcttaacagagaaataataaatgatcactgttcaataaatacttttcttatgtgtttgaaaatacgtaacttttgttt

SEQ ID NO: 703159 - DNA, 89 bp, Artificial Sequence
  ENSG00000196335_38 (sequence is synthesized)
aatgatcgtcattctaactgagtgaagggaatattttgattgcccaaagaaatgaaatgcagcagaagctgtacatgtcagtagaagat

SEQ ID NO: 703160 - DNA, 120 bp, Artificial Sequence
  ENSG00000196335_39 (sequence is synthesized)
aaaaatttgatgcttatttagcccttcattgcttattcgtagtactgatacctggttcagtgattaaaacacagaagaaattaattgctaaaaaacatgttgttttataatcacctcaga

SEQ ID NO: 703161 - DNA, 120 bp, Artificial Sequence
  ENSG00000196335_40 (sequence is synthesized)
ttgctaaaaaacatgttgttttataatcacctcagattattcaagaatagattatataatatgtaggttatttttggtgactagttatttttacctcagttctttttttttttttttttt

SEQ ID NO: 703162 - DNA, 72 bp, Artificial Sequence
  ENSG00000196335_41 (sequence is synthesized)
gtttacctactcaagcctcagcagtggcggacgcccctcccccagcctcgccgccgccttgcagttcatctg

SEQ ID NO: 703163 - DNA, 77 bp, Artificial Sequence
  ENSG00000196335_42 (sequence is synthesized)
gttccgttgctggcgaggagctgcgttcttttggagaagaggcgctctgatttttagaattttcggcttttctgctt

SEQ ID NO: 703164 - DNA, 78 bp, Artificial Sequence
  ENSG00000196335_43 (sequence is synthesized)
agcggaggctgcagaacagcaaatattgcggaatggcagatgttgctgcctgatcgttcgactcagggtgcttccaca

SEQ ID NO: 703165 - DNA, 120 bp, Artificial Sequence
  ENSG00000196335_44 (sequence is synthesized)
ggactcagggtgcttccacaaatattagaaggtgaagaggagccagtgtctgtagattacatggtgagagaggaagcaaagggaggaagaggtgccaggctcttttcaacaaccagttct

SEQ ID NO: 703166 - DNA, 120 bp, Artificial Sequence
  ENSG00000196335_45 (sequence is synthesized)
cttaggaactatgagtgaaaactcattcacttccacgagaatggcaccaagccgtttttagggatctgcctctactatccaatcacctcctaccaggcccccctccaacattgggaatca

SEQ ID NO: 703167 - DNA, 120 bp, Artificial Sequence
  ENSG00000196335_46 (sequence is synthesized)
gattttaacatgagatttggtggatgatatccaaatgatatccatctaaatcatagacaccttcaggagacatttgacagtgtttggagacgtttttgcttgtcacaactggaagtggtg

SEQ ID NO: 703168 - DNA, 120 bp, Artificial Sequence
  ENSG00000196335_47 (sequence is synthesized)
ctactggcatctagtgtctagaggccagaagggatgttggtaaatatcttacaatgcacaggacagaggacagccccactctgccactcaacacagactcatctggtcccaagtgccagt

SEQ ID NO: 703169 - DNA, 120 bp, Artificial Sequence
  ENSG00000196337_0 (sequence is synthesized)
tgcaggaatggctcaagtagaggagggttgaggcttcagtccagcacctttctcgggtcacggcctcctcctggttcccaagaccccaccataggcagaggcaggccttcctacacccta

SEQ ID NO: 703170 - DNA, 120 bp, Artificial Sequence
  ENSG00000196337_1 (sequence is synthesized)
ctctctgtgcctccagcctcgactagtccctagcactcgacgactgagtctcagaggtcacttcaccgtggtctccgcctcatccttggcgctagaccactgaggggagaggactggggt

SEQ ID NO: 703171 - DNA, 120 bp, Artificial Sequence
  ENSG00000196337_2 (sequence is synthesized)
gctccgctgagccactcctgtgcctccctggccttgtctacttctcgccccccgaagggttagtgtccagctcactccagcatcctacaacctcctggtggccttgacgcccccacaaac

SEQ ID NO: 703172 - DNA, 120 bp, Artificial Sequence
  ENSG00000196337_3 (sequence is synthesized)
tgctgagcatgggcgggacatgggcatccagggagatgcttcggccacggtgccgccccatcaatgccaccctggctgtggagaaggagggctgccccgtgtgcatcaccgtcaacacca

SEQ ID NO: 703173 - DNA, 120 bp, Artificial Sequence
  ENSG00000196337_4 (sequence is synthesized)
ccatctgtgccggctactgccccaccatgacccgcgtgctgcagggggtcctgccggccctgcctcaggtggtgtgcaactaccgcgatgtgcgcttcgagtccatccggctccctggct

SEQ ID NO: 703174 - DNA, 120 bp, Artificial Sequence
  ENSG00000196337_5 (sequence is synthesized)
gcccgcgcggcgtgaaccccgtggtctcctacgccgtggctctcagctgtcaatgtgcactctgccgccgcagcaccactgactgcgggggtcccaaggaccaccccttgacctgtgatg

SEQ ID NO: 703175 - DNA, 120 bp, Artificial Sequence
  ENSG00000196337_6 (sequence is synthesized)
acccccgcttccaggcctcctcttcctcaaaggcccctccccccagccttccaagtccatcccgactcccggggccctcagacaccccgatcctcccacaataaaggcttctcaatccgc

SEQ ID NO: 703176 - DNA, 120 bp, Artificial Sequence
  ENSG00000196337_7 (sequence is synthesized)
gcatccacgccaggccagaaggaccaggggctggaaactcgccttcagggctcctaagctgctgcggagctagacggcgggctgtgggctctaatcgcctgcacgaagaaccccgcgctg

SEQ ID NO: 703177 - DNA, 120 bp, Artificial Sequence
  ENSG00000196337_8 (sequence is synthesized)
tctggcccacccttcacagtatccgaccggggcgtcctgaaccgccgccagctctatctgaccacctcggcgcgggactttcggttctatcccaagacggagccgtccggatacccccgc

SEQ ID NO: 703178 - DNA, 120 bp, Artificial Sequence
  ENSG00000196337_9 (sequence is synthesized)
aaggactacctgacctactggagcttagaagagacgccccaactctggagtcacgacccgcagcggcagccctgtctctgctcttccaggccgcctcgagcgccgcacggcgggccatgt

SEQ ID NO: 703179 - DNA, 120 bp, Artificial Sequence
  ENSG00000196337_10 (sequence is synthesized)
ctccggctcaggaaacctacagctcctcgccgcacccgctccgccggctcgaccgcttccgcccgctggaggcgacttggggtggcccccactggaagcccctgccgggcatacacagcg

SEQ ID NO: 703180 - DNA, 120 bp, Artificial Sequence
  ENSG00000196337_11 (sequence is synthesized)
tcccgaaagcctacagcaccgagaactcccgctcaggccgctgtaagccggggctagtgggagcctgccgggccagccccaccccagacacgccccctggcgtgggggcggagcagagct

SEQ ID NO: 703181 - DNA, 120 bp, Artificial Sequence
  ENSG00000196337_12 (sequence is synthesized)
ctgggcagccgctcactacgcggtgtcggacctaggtgggctcgcactcattaagtctatccgcagtgtggggacaggactagcccagacacgcccactcagctgcggctggatcgcggg

SEQ ID NO: 703182 - DNA, 120 bp, Artificial Sequence
  ENSG00000196337_13 (sequence is synthesized)
gaagggactaagtccagacaatgtcctccgaggctgcggccccgcgggcaggacacacctcctgcgggcctattcaataatcagttaaatcacctgaagcacacgcatttccggggaccg

SEQ ID NO: 703183 - DNA, 120 bp, Artificial Sequence
  ENSG00000196337_14 (sequence is synthesized)
ctccgggcatcctggcttgagggtagggtgggcggaggttcctaagggagaggtggggctcgggctgaatccctcgttggggggcatctgggtcaagtggcttccctggcagcacagtca

SEQ ID NO: 703184 - DNA, 120 bp, Artificial Sequence
  ENSG00000196337_15 (sequence is synthesized)
ctttcattggctggattggggtgggcgggttctgtcacctggggcaacagcaacaaaccagctcctgcttggctacagggagggggtggaaccatggccagtggcaccctggctgtgcgc

SEQ ID NO: 703185 - DNA, 120 bp, Artificial Sequence
  ENSG00000196337_16 (sequence is synthesized)
tgtggccccccgtggtctttcatctctgcaaccgagatgcctgaatcctggcccaactggcatctcaccagcagctacgttacccatggcattatcccacccgtacccttccccccgccc

SEQ ID NO: 703186 - DNA, 120 bp, Artificial Sequence
  ENSG00000196337_17 (sequence is synthesized)
acggtgcaggtgggcagaccctaggctgaagccctgcggggcctggggacccagaaagatgggggctgagaaaaggggattgggagcttggactcctctctgaaggaggagggtcctgga

SEQ ID NO: 703187 - DNA, 120 bp, Artificial Sequence
  ENSG00000196337_18 (sequence is synthesized)
gtcctgggtctgagagaggaggcgccagggaatttggatgccagggactgcagaggaaagggctgggggccgactggaagaggtcagagtttggggtggggggtgatagggactcctgag

SEQ ID NO: 703188 - DNA, 120 bp, Artificial Sequence
  ENSG00000196337_19 (sequence is synthesized)
tctttctagctgatgtgcggcgccttctctccagtccacggtcgcggaccctctacctccgactgcaaagcaggattctcgcatctgggctttcgacgaggtcctcagcagatgggagac

SEQ ID NO: 703189 - DNA, 120 bp, Artificial Sequence
  ENSG00000196337_20 (sequence is synthesized)
aacctctggctcggcctacgtgcccaagacccatggcgggccctgcgcccagcccagagccccagagcctgcagaccccacgcggactgtggggatcaaggattcaggagaaaagctcag

SEQ ID NO: 703190 - DNA, 120 bp, Artificial Sequence
  ENSG00000196337_21 (sequence is synthesized)
acaccgcagctgaaccctcctactgaccacaaagtaccagagcagcgagacgagggcgcagtacacttgctctcccggcccggacgcgcgcgcccccaaatacgtcgggccccagcccct

SEQ ID NO: 703191 - DNA, 120 bp, Artificial Sequence
  ENSG00000196337_22 (sequence is synthesized)
cacaactctcggaccaccaccgcggggggccttcccaggtgtctgggtggaagccggcgctggcgagaccagcggagctccgggagcctggggcggggccagaaggaaatcacagctttg

SEQ ID NO: 703192 - DNA, 120 bp, Artificial Sequence
  ENSG00000196337_23 (sequence is synthesized)
gggcgtggctaaaggatctggggcgggatcgggaggttagaggagcgggaggaagggctgggcatccacgccaggccagaaggaccaggggctggaaactcgccttcagggctcctaagc

SEQ ID NO: 703193 - DNA, 120 bp, Artificial Sequence
  ENSG00000196337_24 (sequence is synthesized)
tgctgcggagctagacggcgggctgtgggtggggaggagactagaatattctgagacgtggtagggtgggagttaggagaggtaacctggagttgttgcccaagatgcagctcagctcca

SEQ ID NO: 703194 - DNA, 120 bp, Artificial Sequence
  ENSG00000196337_25 (sequence is synthesized)
gtggccacaccaagaaggcttgagaccgggggcagaaccagggggattttgtggtggctgggggcctgcatttgagttccttgaccagcaggagggcttggatttagggaggtgaggctg

SEQ ID NO: 703195 - DNA, 120 bp, Artificial Sequence
  ENSG00000196337_26 (sequence is synthesized)
ggaagggttcgggtatgagaaaggaagctgaagttccctggcgtgggtggcaggaagggctctgaccctggggcggggtgtgagggccgtggccgtcatggctgtcgaggccgaaggaga

SEQ ID NO: 703196 - DNA, 120 bp, Artificial Sequence
  ENSG00000196338_0 (sequence is synthesized)
gggcacagcagccaggctgccggagagctgatctcggggattcgggtgcggagcccttggcctggaggcgatatgggtggtccgtggcccggttcagtcgcttgcagcagcccggggaac

SEQ ID NO: 703197 - DNA, 120 bp, Artificial Sequence
  ENSG00000196338_1 (sequence is synthesized)
aggcctgtctggccctgagggagtcccctttctgaagctgtggtgcttggacgacctgctctctacattgctgggcacctgtaggtgtccctcgagagctcagttttgaggttcaagtca

SEQ ID NO: 703198 - DNA, 120 bp, Artificial Sequence
  ENSG00000196338_2 (sequence is synthesized)
gtgtggccatgaaggggctgcctattgggctgatgctgtgaccctggagtctgcctctcctgccagtccccctgcccggaacatgtggctgcggcttggcccgccctcgctgtccctgag

SEQ ID NO: 703199 - DNA, 120 bp, Artificial Sequence
  ENSG00000196338_3 (sequence is synthesized)
ccccaagcccacggttggcaggagcctgtgcctcaccctgtggttcctcagtttggcgctgagggccagtacccaggccccagcacccacagtcaacactcactttgggaagctaagggg

SEQ ID NO: 703200 - DNA, 120 bp, Artificial Sequence
  ENSG00000196338_4 (sequence is synthesized)
tgcccgagtaccactgcccagtgagatcctggggcctgtggaccaatacctgggggtgccctacgcagctcccccgatcggcgagaaacgtttcctgccccctgaaccacccccatcctg

SEQ ID NO: 703201 - DNA, 120 bp, Artificial Sequence
  ENSG00000196338_5 (sequence is synthesized)
gtcgggcatccggaacgccacacactttcccccagtgtgcccccagaacatccacacagctgtgcccgaagtcatgctgccggtctggttcactgccaacttggatatcgtcgctactta

SEQ ID NO: 703202 - DNA, 120 bp, Artificial Sequence
  ENSG00000196338_6 (sequence is synthesized)
catccaggagcccaacgaagactgtctctacctgaacgtctatgtgccgacggaggatggatccggcgctaagaaacagggcgaggacttagcggataatgacggggatgaagatgaaga

SEQ ID NO: 703203 - DNA, 120 bp, Artificial Sequence
  ENSG00000196338_7 (sequence is synthesized)
catccgggacagtggtgctaaacccgtcatggtctacatccacggaggctcttacatggaagggacaggcaacatgattgatggcagcatcctcgccagttatggcaatgtcatcgtcat

SEQ ID NO: 703204 - DNA, 120 bp, Artificial Sequence
  ENSG00000196338_8 (sequence is synthesized)
caccctcaactatcgggttggagtgctaggtttcctgagtactggagatcaggctgccaagggcaactatgggctccttgaccagatccaggccctccgctgggtgagcgagaatattgc

SEQ ID NO: 703205 - DNA, 120 bp, Artificial Sequence
  ENSG00000196338_9 (sequence is synthesized)
cttcttcgggggagacccccgccggatcactgtctttggctcgggcattggtgcatcctgcgtcagcctcctcacgttgtcacatcactcagagggacttttccagagagccatcatcca

SEQ ID NO: 703206 - DNA, 120 bp, Artificial Sequence
  ENSG00000196338_10 (sequence is synthesized)
aagtggctctgctctgtccagctgggctgtgaactaccaaccagtgaagtacaccagcctgctggcagacaaagtgggctgtaatgtgctggacaccgtggatatggtggactgtcttcg

SEQ ID NO: 703207 - DNA, 120 bp, Artificial Sequence
  ENSG00000196338_11 (sequence is synthesized)
gcaaaagagtgccaaggagctggtagagcaggacatccagccagcccgctaccacgtggcctttggccctgtgattgatggtgatgtcattcctgatgaccctgagatcctcatggagca

SEQ ID NO: 703208 - DNA, 120 bp, Artificial Sequence
  ENSG00000196338_12 (sequence is synthesized)
gggcgagttcctcaactatgacatcatgctaggtgtcaaccagggcgagggtctcaagtttgtggaaggggtggtggaccctgaggatggtgtctctggcactgactttgactattccgt

SEQ ID NO: 703209 - DNA, 120 bp, Artificial Sequence
  ENSG00000196338_13 (sequence is synthesized)
ctccaattttgtggacaatctgtatggctatcctgagggtaaggacaccctgcgagagaccatcaagttcatgtatacagactgggcagaccgtgacaaccctgagacccgccgtaaaac

SEQ ID NO: 703210 - DNA, 120 bp, Artificial Sequence
  ENSG00000196338_14 (sequence is synthesized)
actggtggcactcttcactgaccaccagtgggtggagccctcagtggtgacagccgatctgcatgcccgctacggctcgcctacctacttctacgccttctatcatcactgccagagcct

SEQ ID NO: 703211 - DNA, 120 bp, Artificial Sequence
  ENSG00000196338_15 (sequence is synthesized)
catgaagcctgcttggtcagatgcagctcatggggatgaagtaccctatgtttttggggttcctatggtaggccccactgaccttttcccctgcaacttctccaagaatgatgttatgct

SEQ ID NO: 703212 - DNA, 120 bp, Artificial Sequence
  ENSG00000196338_16 (sequence is synthesized)
accaagttcattcacaccaaggccaaccgctttgaggaagtggcctggtccaaatacaatccccgagaccagctctaccttcacatcgggctgaaaccaagggtccgagatcattaccgg

SEQ ID NO: 703213 - DNA, 120 bp, Artificial Sequence
  ENSG00000196338_17 (sequence is synthesized)
gccactaaggtggccttttggaaacatctggtgccccacctatacaacctgcatgacatgttccactatacgtccaccaccaccaaagtgccgcctccggataccacccacagctcccac

SEQ ID NO: 703214 - DNA, 120 bp, Artificial Sequence
  ENSG00000196338_18 (sequence is synthesized)
atcacccgcaggcccaatggcaagacctggagcaccaagcggccagccatctcacctgcctacagcaacgagaatgcccaggggtcctggaacggggaccaggatgcagggccactcctg

SEQ ID NO: 703215 - DNA, 120 bp, Artificial Sequence
  ENSG00000196338_19 (sequence is synthesized)
gtggagaaccctcgtgactactccactgaattaagtgtcaccatcgccgtgggggcctccctcctgttccttaacgttctggccttcgctgccctctactaccgtaaggacaaacggcgc

SEQ ID NO: 703216 - DNA, 120 bp, Artificial Sequence
  ENSG00000196338_20 (sequence is synthesized)
caggagcccctgcggcagcctagccctcagcggggagccggggccccggagttgggagctgctccagaggaggagctggcagcattacaactgggccccacccaccacgagtgtgaggcc

SEQ ID NO: 703217 - DNA, 120 bp, Artificial Sequence
  ENSG00000196338_21 (sequence is synthesized)
ggtcccccccatgacacgctgcgcctcactgcattgcccgactacaccctgaccctgcggcgctccccggatgacatcccactcatgacccccaacaccatcactatgatccccaactcc

SEQ ID NO: 703218 - DNA, 120 bp, Artificial Sequence
  ENSG00000196338_22 (sequence is synthesized)
ctggtagggctgcagacattgcacccctataacacctttgccgcagggttcaacagtaccgggctgccccactcacactccactacccgggtatagctccaactcagagcacagccaatc

SEQ ID NO: 703219 - DNA, 120 bp, Artificial Sequence
  ENSG00000196338_23 (sequence is synthesized)
tccaggctccctccctcccagatccaggaacacatgcacacacacacacacacacacgcagacacacacacacacacacatatatgtatacgcacgcacccacaccctacagcagatcca

SEQ ID NO: 703220 - DNA, 120 bp, Artificial Sequence
  ENSG00000196338_24 (sequence is synthesized)
cctgcacaaacatagacagatgtggacatgcacccgcatgtacaaaaacacaaatacggaagtaaacctgaacaaaccctttaaatggggacgcagatgagtcctcggtaaaccgaggac

SEQ ID NO: 703221 - DNA, 120 bp, Artificial Sequence
  ENSG00000196338_25 (sequence is synthesized)
ccatgaaacagcagctgaagccagctccctgaatctgaccacagacactcctggggggcctgaaagcaacagctggacacccccttggtgctcgccttcggcctctcttggaactgcacc

SEQ ID NO: 703222 - DNA, 120 bp, Artificial Sequence
  ENSG00000196338_26 (sequence is synthesized)
accgaccaactccagacttgggagctttaaagagcaggatagctcttcctccccaggacttggtcttttttctgggtcttgttttgttgatttttcttttttaattttggaacaaatgct

SEQ ID NO: 703223 - DNA, 120 bp, Artificial Sequence
  ENSG00000196338_27 (sequence is synthesized)
tttccaacccatgagtgctaagagcctctggaagggagggcttcaggcccgaaggtctctctggctctaggacccccagtgctcacacaatcagaccaaggaacaagacccccaggaagg

SEQ ID NO: 703224 - DNA, 120 bp, Artificial Sequence
  ENSG00000196338_28 (sequence is synthesized)
aaacagatttaagcaagaccatggggtggaaggagaaaggggctagcactggatggagctggagggtcgtaggggagagatctccaactctctctgtgtccgtgtggagggctgcagagc

SEQ ID NO: 703225 - DNA, 120 bp, Artificial Sequence
  ENSG00000196338_29 (sequence is synthesized)
ctgcagggtgacctgcttccccaaaggccaacagcattggcctggccagaccaggtgaccttagatttggtgaacaacgtactatggaagccacatcactattgggcccccaggtctgat

SEQ ID NO: 703226 - DNA, 120 bp, Artificial Sequence
  ENSG00000196338_30 (sequence is synthesized)
ctgggttttgcctctgcccttggggaaatgctatcagaaattcgccccattttctttacagtcttttgtgtctgtcatttctctttcaaaaaggcggtgttttttgttgttgttggtttt

SEQ ID NO: 703227 - DNA, 120 bp, Artificial Sequence
  ENSG00000196338_31 (sequence is synthesized)
tttttttttttaaagaaaagttcttaaaacactaacggaaacccatggagtttgtcctttgtaaaaattttaaacacagtgtcttgatataaaaataaaaaatccagttagcactcccaa

SEQ ID NO: 703228 - DNA, 120 bp, Artificial Sequence
  ENSG00000196338_32 (sequence is synthesized)
gactgtctctacctgaacgtctatgtgccgacggaggatgtaaagcggatttccaaggaatgcgcccgaaagcccaacaagaaaatttgtaggaaaggaggatccggcgctaagaaacag

SEQ ID NO: 703229 - DNA, 120 bp, Artificial Sequence
  ENSG00000196341_0 (sequence is synthesized)
ttggaagagcagtgagggtccatgttaaggtaattcatactttctattttcacagaaatgcctaaagaagaatgaccatggaaaattattctatggcagctcagtttgtcttagatggtt

SEQ ID NO: 703230 - DNA, 120 bp, Artificial Sequence
  ENSG00000196341_1 (sequence is synthesized)
taacacagcaagcagagctccagctgcccctcttcctcctgttcctgggaatctatgtggtcacagtagtgggcaacctgggcatgattctcctgattgcagtcagccctctacttcaca

SEQ ID NO: 703231 - DNA, 120 bp, Artificial Sequence
  ENSG00000196341_2 (sequence is synthesized)
cccccatgtactatttcctcagcagcttgtccttcgtcgatttctgctattcctctgtcattactcccaaaatgctggtgaacttcctaggaaagaagaatacaatcctttactctgagt

SEQ ID NO: 703232 - DNA, 120 bp, Artificial Sequence
  ENSG00000196341_3 (sequence is synthesized)
gcatggtccagctctttttctttgtggtctttgtggtggctgagggttacctcctgactgccatggcatatgatcgctatgttgccatctgtagcccactgctttataatgcgatcatgt

SEQ ID NO: 703233 - DNA, 120 bp, Artificial Sequence
  ENSG00000196341_4 (sequence is synthesized)
atacaagtgccatgatgaaactgtccttttgcaaatcccacattatcaaccattacttctgtgatgttcttcccctcctcaatctctcctgctccaacacacacctcaatgagcttctac

SEQ ID NO: 703234 - DNA, 120 bp, Artificial Sequence
  ENSG00000196341_5 (sequence is synthesized)
tttttatcattgcggggtttaacaccttggtgcccaccctagctgttgctgtctcctatgccttcatcctctacagcatccttcacatccgctcctcagagggccggtccaaagcttttg

SEQ ID NO: 703235 - DNA, 120 bp, Artificial Sequence
  ENSG00000196341_6 (sequence is synthesized)
gaacatgcagctctcatctcatggctgtggtgatcttctttgggtccattaccttcatgtatttcaagcccccttcaagtaactccctggaccaggagaaggtgtcctctgtgttctaca

SEQ ID NO: 703236 - DNA, 120 bp, Artificial Sequence
  ENSG00000196341_7 (sequence is synthesized)
ccacggtgatccccatgctgaaccctttaatatacagtctgaggaataaggatgtgaagaaagcattaaggaaggtcttagtaggaaaatgagtcctgatttgggggatttatagatggg

SEQ ID NO: 703237 - DNA, 120 bp, Artificial Sequence
  ENSG00000196341_8 (sequence is synthesized)
gattgggggagctggatatcatgatctgcttcaaggtccaagagttgtttgtactatttaataaattttgatgttttacttttagccaaccaaataattcagcccttggcatataaatgt

SEQ ID NO: 703238 - DNA, 120 bp, Artificial Sequence
  ENSG00000196341_9 (sequence is synthesized)
gtgtataaggtagtgggaaagactttgttctttgttggctattacagggatctgcgacctgagcaaagtgaacaattcctaagaaattctgtttctgtgcaggaccaagggcccaaacca

SEQ ID NO: 703239 - DNA, 120 bp, Artificial Sequence
  ENSG00000196341_10 (sequence is synthesized)
ccaagggtaccacgctttggaaagttcaagatttacacccatagcaacattcttctcagacaccttcagaagcaccttttcctgccaccgtaagaaatgcctaaagaagaatgaccatgg

SEQ ID NO: 703240 - DNA, 120 bp, Artificial Sequence
  ENSG00000196341_11 (sequence is synthesized)
caatgaacatatattccttttttctattttcatgttcttctgttgtaacatacataatatctagattttaaaaatactttcccatctatgattgattcaactttctcaacaaaataaaag

SEQ ID NO: 703241 - DNA, 120 bp, Artificial Sequence
  ENSG00000196341_12 (sequence is synthesized)
aattgtgtaaagcaggtattaacattcttatcttttgataggaaaactaaggtctaggtagttttaatttcttttaccaattgtgatagaaaagacatgagaattcagattttctccaat

SEQ ID NO: 703242 - DNA, 120 bp, Artificial Sequence
  ENSG00000196341_13 (sequence is synthesized)
gttagtcctctcttcctaatatcccatgtttgcttgttgaatacttgctatgtgggaggtactgagttgtccactgatatgaatgctaagaggtatgttagcctgatcccagatatctat

SEQ ID NO: 703243 - DNA, 120 bp, Artificial Sequence
  ENSG00000196341_14 (sequence is synthesized)
taattcttcagggaattagacaaatacacaagggaaaagaacagaaaagaaaagaaaaaagaaaagaaaaggaaagaatagaaaagaaaagaaaaagttaagaacaagaatggcaattct

SEQ ID NO: 703244 - DNA, 120 bp, Artificial Sequence
  ENSG00000196341_15 (sequence is synthesized)
agtcagcaggtcttattcgaatcgcttttactatttttttttctactcagtatattaaaaatctctttattttcatttccttgttgttcttcatggatctggttttgttttttttgtatt

SEQ ID NO: 703245 - DNA, 120 bp, Artificial Sequence
  ENSG00000196341_16 (sequence is synthesized)
tgtatatctactttaacaccacagttctacactaagggacctctgaccatgtgttttcactatctattgcaatggagttgcctaaggttgaaaaaccttcctcatagggaagatataacc

SEQ ID NO: 703246 - DNA, 120 bp, Artificial Sequence
  ENSG00000196341_17 (sequence is synthesized)
cccacatttgtttcagttggagaactgtcctctgcagattcctgaactgaagctgtggtccatgtttttgagcatgtgaccttacagtaaaagtaggtaccaagagctctgtatacaatg

SEQ ID NO: 703247 - DNA, 120 bp, Artificial Sequence
  ENSG00000196341_18 (sequence is synthesized)
cttttcttgggttttcacaggtcttaggtctcatgtaacatttccttctgtttttgtttttagcttttgtatgttgctgggtagtaataagatgcctctactgttctgcatccctcagct

SEQ ID NO: 703248 - DNA, 120 bp, Artificial Sequence
  ENSG00000196341_19 (sequence is synthesized)
gttttctcttcttcccaggaatattccattgaatttctagcattttaacttccatatcaagttagttttcttcactctatatcacatattaaaccattagtgtttgctgaaattagttgc

SEQ ID NO: 703249 - DNA, 120 bp, Artificial Sequence
  ENSG00000196341_20 (sequence is synthesized)
ctttctccctttactttttctttgtttttgccaaaataatttttacaacctaatactctagattttagcttaaagaatcattccaagcaagaaataagaaatcagtaaattttgtatcta

SEQ ID NO: 703250 - DNA, 120 bp, Artificial Sequence
  ENSG00000196341_21 (sequence is synthesized)
ccaaaatcctactgttctaacaaagcttgtctacctttagctcctacattttgataatctcacccagaatacatcttcctatcagtttgttgaaccaggtcctaaacatttaccgtggcc

SEQ ID NO: 703251 - DNA, 120 bp, Artificial Sequence
  ENSG00000196341_22 (sequence is synthesized)
ttgctcaccttccccttaatacatcttctcttctgtatgccttgctctaatattttttaatgttatcttagagtttctcagatacagtgcctatatcttctcaagtcctcccattcctta

SEQ ID NO: 703252 - DNA, 120 bp, Artificial Sequence
  ENSG00000196341_23 (sequence is synthesized)
agatctttttgagggggacacatagtacttactctttttcagcagctttaatagtgcaattaacacttttctgaatccaggatcctgaccttcaaattatcatttggtgccacatagttt

SEQ ID NO: 703253 - DNA, 120 bp, Artificial Sequence
  ENSG00000196341_24 (sequence is synthesized)
tctaacctgtcctcttctctctcttattccagtttaattaacttattttacttttagtctcatttttcttctgctcttgttagggttataaaactgaagcattctttctaaatcacttta

SEQ ID NO: 703254 - DNA, 120 bp, Artificial Sequence
  ENSG00000196341_25 (sequence is synthesized)
ttttctaagcagatttgattcttagaaacagggtgttccaaacccagattttaaaactgtattcttagttgttagctttgcaataattcaattgaactgtttctctttctcagtatattt

SEQ ID NO: 703255 - DNA, 120 bp, Artificial Sequence
  ENSG00000196341_26 (sequence is synthesized)
agatgcaatattatttttatgctaagaccctcttcccccgttatttttatttttattttttattttttggttcatgagtgaaatctaccacccctttaaagggaaagctccaatttagaa

SEQ ID NO: 703256 - DNA, 120 bp, Artificial Sequence
  ENSG00000196341_27 (sequence is synthesized)
gatgggtatttgtagccctgctcagaacttatacatttaacaaatccagggagagcttgagaccatttggtgagagttaaccctcaagcatgtggacaagctggaaaactgtgaaaataa

SEQ ID NO: 703257 - DNA, 120 bp, Artificial Sequence
  ENSG00000196341_28 (sequence is synthesized)
ccaattattatcccatcccctgtgtctaaaatacctttatatgaaaatattctcttttccctataatcatatcatgactttcttgaaaaaagcttcccctttgtgttcaattttaagctg

SEQ ID NO: 703258 - DNA, 120 bp, Artificial Sequence
  ENSG00000196341_29 (sequence is synthesized)
caccaatattttctgattcttaagtggctttcgcagttgctaaggttgctcaaactatccagcctacaattacttaggattataggacccagggctttgtggagcctcactttgctcaca

SEQ ID NO: 703259 - DNA, 120 bp, Artificial Sequence
  ENSG00000196341_30 (sequence is synthesized)
tttttcagaagacagcctttcctgaggcatttgccttttgcttagggcctagcactagcagcatgatctccaggggaatgaatctgtgctcttctaaagttattcacttatttgtaaaca

SEQ ID NO: 703260 - DNA, 120 bp, Artificial Sequence
  ENSG00000196341_31 (sequence is synthesized)
actcttctgtatatgcaccagtggaagttaaaatcttacattgtcagaggtcaggaaccacagctgcctgctgggatcactacagttaaaagttacacataaactgtaaactataaaata

SEQ ID NO: 703261 - DNA, 120 bp, Artificial Sequence
  ENSG00000196341_32 (sequence is synthesized)
ttgcaaaataaatgtcactgcatgctcctgaggtcaaaatcctctctcctcatggaaagtcccaaacttgtaagtacacttttgtacttaaatctacttttgctgttaagttcttcataa

SEQ ID NO: 703262 - DNA, 120 bp, Artificial Sequence
  ENSG00000196341_33 (sequence is synthesized)
ccctggtccaaaccaccagatactggttgtttggcaaggtatattttggggcaaataaatttcttaataccaagctctagcattagacaaaattgccacttgaaccatagaaaatgctgg

SEQ ID NO: 703263 - DNA, 120 bp, Artificial Sequence
  ENSG00000196341_34 (sequence is synthesized)
gtaggtctctattagtagaggtagaatttcataggcaaggataaccaaggatatattgtttctaaaatatgctaactctcaaaaagaacaacaaaaaagagaaccatttctttttcacaa

SEQ ID NO: 703264 - DNA, 120 bp, Artificial Sequence
  ENSG00000196341_35 (sequence is synthesized)
ctaatcatcagaaaagtcatcccaccttcctggggaaagtgagtaaaggtgtgaaacagaggcgggagtattagagtaataggtgttcctcctcagggatgggaacatcagaagccagga

SEQ ID NO: 703265 - DNA, 120 bp, Artificial Sequence
  ENSG00000196341_36 (sequence is synthesized)
gaggtgtctcattcttcctacatataccctaggatttagaaaaacagattccaatcagttaagagtaaaaaaaatggcaaggctattttagagaaaagtagaatcaagaaatacagaaga

SEQ ID NO: 703266 - DNA, 120 bp, Artificial Sequence
  ENSG00000196341_37 (sequence is synthesized)
ttcaaaattataattgggaaattcgaagtaactcttaagaaaagtgacacaaaatcctttttctgctgaaaaaaccctcatcagcacactattaggatgtttttgtcttactacagaagg

SEQ ID NO: 703267 - DNA, 120 bp, Artificial Sequence
  ENSG00000196341_38 (sequence is synthesized)
gaaaataaggacaatggagaagagaaaaagaattttagctgaccaaaataaaaatacgtaaatggtgatttgaagttaatacaaaaaagattaatatcccatagaaaagtatgcagaagt

SEQ ID NO: 703268 - DNA, 120 bp, Artificial Sequence
  ENSG00000196341_39 (sequence is synthesized)
taataaatcttaaaggtgaggtaaacaagaatgataatatatatagataactgtattaatttctgtaagacaggttgataatatatatcaaataatatacgccaaataattccacacaat

SEQ ID NO: 703269 - DNA, 120 bp, Artificial Sequence
  ENSG00000196341_40 (sequence is synthesized)
taatatacgccaaataattccacacaattttaccacgttattcaatttctaggcatgcatacttaagaaataaaagtgacattgtcaaaggcagagctataaatatattgacagtaacaa

SEQ ID NO: 703270 - DNA, 120 bp, Artificial Sequence
  ENSG00000196341_41 (sequence is synthesized)
aataatgaattgagttaaatgttcttcaaagttataggtttgagtaagattcagatatccagtagaataaatatggtatcattaaaataattttgtgaaatagtactggcagggacaata

SEQ ID NO: 703271 - DNA, 120 bp, Artificial Sequence
  ENSG00000196341_42 (sequence is synthesized)
tgcaaagtatatagtaagttaagaagacgggcatgataaatgatactgatatgtatgacggcttgaatgaaaaatccgtagtgctttaacagacattctttcttttcatattgaaagaag

SEQ ID NO: 703272 - DNA, 120 bp, Artificial Sequence
  ENSG00000196341_43 (sequence is synthesized)
tgtgtagcataaaataaatgaggataatgttttaggggtgttttaacattatttttgtgtgtctgtgttgaatacaggggattcaaagggctttatcttctactccaatcagtttttaag

SEQ ID NO: 703273 - DNA, 120 bp, Artificial Sequence
  ENSG00000196341_44 (sequence is synthesized)
atattcctccactgcattttaatgaattttatatatgtatacacagaaaatgcaccaagagtatagctctttaaattgctaatgatgtttatatctatttagtgactctccaggtaaaga

SEQ ID NO: 703274 - DNA, 120 bp, Artificial Sequence
  ENSG00000196341_45 (sequence is synthesized)
tatagaatattagcatcactcctggaggcccccttttgcttttcccgagtcaatacccatcttcaagaagtacccactatattgacttgtacaattggtcattttcttttttttttgaac

SEQ ID NO: 703275 - DNA, 120 bp, Artificial Sequence
  ENSG00000196341_46 (sequence is synthesized)
tgtatacaaacttttctcatactccattataatccttccctcaacctttttccaccctttcctaggcaatcatgaatccacttttgtcattgtagattattagcatttccaagaattttg

SEQ ID NO: 703276 - DNA, 120 bp, Artificial Sequence
  ENSG00000196341_47 (sequence is synthesized)
tgtttataaggccatacagtatatactctttacttgatgtcttttattcggcataattactttcagattcaccatgatttgcatgcatcatagcactatcaacttgccttgacattttcc

SEQ ID NO: 703277 - DNA, 120 bp, Artificial Sequence
  ENSG00000196341_48 (sequence is synthesized)
tttgttaagatcaactgaccatctatatagggacctactttgtaccctatattctattgtctatctttattattttcaggcatacgcactgatggaaatcaatgaggaaaagaaaatctg

SEQ ID NO: 703278 - DNA, 120 bp, Artificial Sequence
  ENSG00000196341_49 (sequence is synthesized)
ttcaacagattgttctgattgactagatgtctgtatccaaaagctgaacctgattcaatgcctgacaccatacacacacactaactagagattgattacagaagggagcataagagctat

SEQ ID NO: 703279 - DNA, 120 bp, Artificial Sequence
  ENSG00000196341_50 (sequence is synthesized)
ctttgtgactgggaggtagtcaaacatttcttacatagaataccaagaaaaatgataaatgtgactccatcaaaatttaaaattttttattattaaaagacactattttagaataaaaaa

SEQ ID NO: 703280 - DNA, 120 bp, Artificial Sequence
  ENSG00000196341_51 (sequence is synthesized)
agtgcacacacaggctggaaaaataatgtacacacacacatatacaaacacaaaacaaatgtgtccaacaaatgacttatatccaacttttataaataattcctacaaccaattattaaa

SEQ ID NO: 703281 - DNA, 120 bp, Artificial Sequence
  ENSG00000196341_52 (sequence is synthesized)
aaaatgagtaaaagaaactttatatgaactgtatactagggcttacaaatacattaggccatttcaatattaatagtcatcaggaaaattcaaattaaaaccatgaagagataccattac

SEQ ID NO: 703282 - DNA, 120 bp, Artificial Sequence
  ENSG00000196341_53 (sequence is synthesized)
acacccactagaagggttaaaatttaaaagattaaaatatccagtattggagaggattcagagaaatggcatctctcaaattttacatgttgtagtgtaaaatgttaaacagtgcagaaa

SEQ ID NO: 703283 - DNA, 120 bp, Artificial Sequence
  ENSG00000196341_54 (sequence is synthesized)
taaaaatatactagaatgtctattaaatctttattcataatagcaaaaaaatcaagaaatgtccgtcatctgataaatggagaaggaaattatggaatatatgtataatggaacaccact

SEQ ID NO: 703284 - DNA, 120 bp, Artificial Sequence
  ENSG00000196341_55 (sequence is synthesized)
tagtaataaaaagggacaatctatcgaggcatgcaaccaaacagatgaatatcatttaataatatgtctaggccaagaaaccacaaacacaagagtacacacagtataaatcaatttatt

SEQ ID NO: 703285 - DNA, 120 bp, Artificial Sequence
  ENSG00000196341_56 (sequence is synthesized)
tcaagtgcaagaataggcaatataaacctgtgaagataaaattcataatgatgattgtttctttggaagaagtaaatactcatactggatataaacacaaaaaaactttctcaggtgata

SEQ ID NO: 703286 - DNA, 120 bp, Artificial Sequence
  ENSG00000196341_57 (sequence is synthesized)
gcaatggcctacattagagactgacatgttttctctaaaaaaccagataacaaatagtttagagttcacagaccataaggattccattgtaactactgaactattatattgtaatgaatg

SEQ ID NO: 703287 - DNA, 120 bp, Artificial Sequence
  ENSG00000196341_58 (sequence is synthesized)
ttatttataaacactaaaatttaaattttatgtaattttattttgatttttttcaaccatttaaaaatgtaaaaagtgatattagctcataaacaatactaaactctgggctggatttgc

SEQ ID NO: 703288 - DNA, 120 bp, Artificial Sequence
  ENSG00000196341_59 (sequence is synthesized)
tactaaactctgggctggatttgccccataacccatattttgcaccactactctttatcttgataggtgtgctagttatttgaatgaatgtatttatcaaaactcattgaattatatact

SEQ ID NO: 703289 - DNA, 120 bp, Artificial Sequence
  ENSG00000196341_60 (sequence is synthesized)
tacttaatacctgttcattttgctatatgtaattattttgaaatgattataatataaaaataagaaaacagaggactttatgacttcaagtgagcataatttttaaagaaaatgaatcat

SEQ ID NO: 703290 - DNA, 120 bp, Artificial Sequence
  ENSG00000196341_61 (sequence is synthesized)
acagccacattaaaaaactttacaataaaaggcatcatacataaagctaaaggcaagctacaaatcagaaaaggataactgaaacacaaaataattgatatctataattttaaaagcccc

SEQ ID NO: 703291 - DNA, 120 bp, Artificial Sequence
  ENSG00000196341_62 (sequence is synthesized)
acaaattaataagcaaaggacaaaaagcctaatagaaaaccaggcaaaagatataagcagcaatttacattgaaaacagaacgtccagtagccaataaacaaatggaacaatgtttaact

SEQ ID NO: 703292 - DNA, 120 bp, Artificial Sequence
  ENSG00000196341_63 (sequence is synthesized)
tcacagaatcagccaaatacgaccgtttactatactacatgtcaaggactcatatggtttagccctgtgtccacatccacgtgtcgacagagggacctgtaatccccgtgtgtcaagaga

SEQ ID NO: 703293 - DNA, 87 bp, Artificial Sequence
  ENSG00000196341_64 (sequence is synthesized)
gtgtcgacagagggacctgtaatccccgtgtgtcaagagagggaggtggttggattatgggggcagtttcctccatgctgttcttgt

SEQ ID NO: 703294 - DNA, 120 bp, Artificial Sequence
  ENSG00000196341_65 (sequence is synthesized)
gtaagtttcctgaggcttccccagccatgtagaactgtgagtcaattaaacctctcttctttatgaataacctagtctccagcagttccttatagcaatgtgaaaacggattaatacaga

SEQ ID NO: 703295 - DNA, 120 bp, Artificial Sequence
  ENSG00000196341_66 (sequence is synthesized)
agcagttccttatagcaatgtgaaaacggattaatacagactcatttctgaactgtctgtagttttggtctccttattccttcctagtaaggagttcatgagtaaatcaggagacaggaa

SEQ ID NO: 703296 - DNA, 120 bp, Artificial Sequence
  ENSG00000196341_67 (sequence is synthesized)
gccctggctccagattcacttgtgaaactgcattcctgcatatactcatttgtaaagaaatcacactactccaattcttcctttcttataaaaccgttatgagagtaagataagttaaat

SEQ ID NO: 703297 - DNA, 120 bp, Artificial Sequence
  ENSG00000196341_68 (sequence is synthesized)
ggaatagtacaggagcagaggctgaacgattactgaattctggtaattaaaaattggttcagtggaaaagattccatggaagatatttctcaggatcgtagaagatttctgatctgaact

SEQ ID NO: 703298 - DNA, 120 bp, Artificial Sequence
  ENSG00000196344_0 (sequence is synthesized)
ctgttttcatttatatttaattccagaaaccacatcaagtctttgcagaatgaagtagagcattaagaagtagagatgtacacacgcatctctaaaatcagccatgcctaggcaaagcag

SEQ ID NO: 703299 - DNA, 120 bp, Artificial Sequence
  ENSG00000196344_1 (sequence is synthesized)
cttgcacttaaacacccaatacatttttcatgattgtgttgaagtgaagtaacctaacccgtttttatatccttcaaaataaggtggataggaatgctttcagcccttttcaatagcttt

SEQ ID NO: 703300 - DNA, 120 bp, Artificial Sequence
  ENSG00000196344_2 (sequence is synthesized)
gattatcttgtttttgttagatccctcctcttggtttgatcatagtagttactgtatttctttttataagttggtctgcaaagggtagggcttgcagaccattgcaaagttgtgacggct

SEQ ID NO: 703301 - DNA, 120 bp, Artificial Sequence
  ENSG00000196344_3 (sequence is synthesized)
gtgagtcatattgctgaaggtggaactctgaagccagactatctatgtgaaggcacaagctgctgttatatacaacagagtgaactgagcatcagtcagaaaaagtctatgtttgcagaa

SEQ ID NO: 703302 - DNA, 120 bp, Artificial Sequence
  ENSG00000196344_4 (sequence is synthesized)
atacagatccaagacaaagacaggatgggcactgctggaaaagttattaaatgcaaagcagctgtgctttgggagcagaagcaacccttctccattgaggaaatagaagttgccccacca

SEQ ID NO: 703303 - DNA, 120 bp, Artificial Sequence
  ENSG00000196344_5 (sequence is synthesized)
aagactaaagaagttcgcattaagattttggccacaggaatctgtcgcacagatgaccatgtgataaaaggaacaatggtgtccaagtttccagtgattgtgggacatgaggcaactggg

SEQ ID NO: 703304 - DNA, 120 bp, Artificial Sequence
  ENSG00000196344_6 (sequence is synthesized)
attgtagagagcattggagaaggagtgactacagtgaaaccaggtgacaaagtcatccctctctttctgccacaatgtagagaatgcaatgcttgtcgcaacccagatggcaacctttgc

SEQ ID NO: 703305 - DNA, 120 bp, Artificial Sequence
  ENSG00000196344_7 (sequence is synthesized)
attaggagcgatattactggtcgtggagtactggctgatggcaccaccagatttacatgcaagggcaaaccagtccaccacttcatgaacaccagtacatttaccgagtacacagtggtg

SEQ ID NO: 703306 - DNA, 120 bp, Artificial Sequence
  ENSG00000196344_8 (sequence is synthesized)
gatgaatcttctgttgctaagattgatgatgcagctcctcctgagaaagtctgtttaattggctgtgggttttccactggatatggcgctgctgttaaaactggcaaggtcaaacctggt

SEQ ID NO: 703307 - DNA, 120 bp, Artificial Sequence
  ENSG00000196344_9 (sequence is synthesized)
tccacttgcgtcgtctttggcctgggaggagttggcctgtcagtcatcatgggctgtaagtcagctggtgcatctaggatcattgggattgacctcaacaaagacaaatttgagaaggcc

SEQ ID NO: 703308 - DNA, 120 bp, Artificial Sequence
  ENSG00000196344_10 (sequence is synthesized)
tcttgaaaccatgattgatgccctggcatcctgccacatgaactatgggaccagcgtggttgtaggagttcctccatcagccaagatgctcacctatgacccgatgttgctcttcactgg

SEQ ID NO: 703309 - DNA, 120 bp, Artificial Sequence
  ENSG00000196344_11 (sequence is synthesized)
acgcacatggaagggatgtgtctttggaggtttgaaaagcagagatgatgtcccaaaactagtgactgagttcctggcaaagaaatttgacctggaccagttgataactcatgttttacc

SEQ ID NO: 703310 - DNA, 120 bp, Artificial Sequence
  ENSG00000196344_12 (sequence is synthesized)
atttaaaaaaatcagtgaaggatttgagctgctcaattcaggacaaagcattcgaacggtcctgacgttttgagatccaaagtggcaggaggtctgtgttgtcatggtgaactggagttt

SEQ ID NO: 703311 - DNA, 120 bp, Artificial Sequence
  ENSG00000196344_13 (sequence is synthesized)
ctcttgtgagagttccctcatctgaaatcatgtatctgtctcacaaatacaagcataagtagaagatttgttgaagacatagaacccttataaagaattattaacctttataaacattta

SEQ ID NO: 703312 - DNA, 120 bp, Artificial Sequence
  ENSG00000196344_14 (sequence is synthesized)
aagtcttgtgagcacctgggaattagtataataacaatgttaatatttttgatttacattttgtaaggctataattgtatcttttaagaaaacatacacttggatttctatgttgaaatg

SEQ ID NO: 703313 - DNA, 120 bp, Artificial Sequence
  ENSG00000196344_15 (sequence is synthesized)
gagatttttaagagttttaaccagctgctgcagatatataactcaaaacagatatagcgtataaagatatagtaaatgcatctcctagagtaatattcacttaacacattgaaactatta

SEQ ID NO: 703314 - DNA, 120 bp, Artificial Sequence
  ENSG00000196344_16 (sequence is synthesized)
ttttttagatttgaatataaatgtattttttaaacacttgttatgagttaagttggattacattttgaaatcagttcattccatgatgcatattactggattagattaagaaagacagaa

SEQ ID NO: 703315 - DNA, 120 bp, Artificial Sequence
  ENSG00000196344_17 (sequence is synthesized)
aagattaagggacgggcacatttttcaacgattaagaatcatcattacataacttggtgaaactgaaaaagtatatcatatgggtacacaaggctatttgccagcatatattaatatttt

SEQ ID NO: 703316 - DNA, 120 bp, Artificial Sequence
  ENSG00000196344_18 (sequence is synthesized)
agaaaatattccttttgtaatactgaatataaacatagagctagaatcatattatcatacttatcataatgttcaatttgatacagtagaattgcaagtccctaagtccctattcactgt

SEQ ID NO: 703317 - DNA, 120 bp, Artificial Sequence
  ENSG00000196344_19 (sequence is synthesized)
cctattcactgtgcttagtagtgactccatttaataaaaagtgtttttagtttttaacaactacactgatgtatctatatatatctataacatgttaaaaattcttaagaaaattaaaaa

SEQ ID NO: 703318 - DNA, 67 bp, Artificial Sequence
  ENSG00000196344_20 (sequence is synthesized)
cttttgtttcttatgctgggacaaatacagcttatttgtacactgctgggaatgatctaacacaggg

SEQ ID NO: 703319 - DNA, 120 bp, Artificial Sequence
  ENSG00000196344_21 (sequence is synthesized)
cagcttatttgtacactgctgggaatgatctaacacagggaaagtcatagtgcaggaaagagaaggaataaatataacataataaaagataaggattatttagtaatgtctaaagagaaa

SEQ ID NO: 703320 - DNA, 120 bp, Artificial Sequence
  ENSG00000196344_22 (sequence is synthesized)
gtctatgtttgcagaaatacagatccaagacaaagacaggatgggcactgctggaaaattttttccataggtcctttgcctgctatgtatctcccaggatgtaagtgtggtatgtggaag

SEQ ID NO: 703321 - DNA, 120 bp, Artificial Sequence
  ENSG00000196344_23 (sequence is synthesized)
aagctttaacctgcctatcaagccctaccaggtgcaagaactgggctaggtgcaaatgggatgcagagatgcagacacaaattcaatcatccaggaactcacagtcataatctgttatta

SEQ ID NO: 703322 - DNA, 120 bp, Artificial Sequence
  ENSG00000196344_24 (sequence is synthesized)
aattaaacacttggagatattccttgaggaatgaaatgcttggtgagcaggcatacagtgagggaaacactggatatggtgtttcagagaatgtcagtggaagcaggggttattaaatgc

SEQ ID NO: 703323 - DNA, 120 bp, Artificial Sequence
  ENSG00000196345_0 (sequence is synthesized)
attgtttttggtctaacgggcagtagagtgtccggcttcggtgccgagtgccaccgcgagtgggccgagacgcggagggaggcgcggccggagctcgggtcgccgacgctggccaggacc

SEQ ID NO: 703324 - DNA, 120 bp, Artificial Sequence
  ENSG00000196345_1 (sequence is synthesized)
gcgcttcttcccggcggcaggcggcgcggtccccgtgactctcagaagccgcccgatgtagagccgcttctttgtctcatacccctgaccattcgtgcgtggcacggagccgggtatctg

SEQ ID NO: 703325 - DNA, 120 bp, Artificial Sequence
  ENSG00000196345_2 (sequence is synthesized)
cgggtacagcgatgaacagggcagacgtggccaggtgagcggcgctgctgaagcctggtttaacacgaaaggccacactaccatcacccctttctccaaccctgaaaaacagttcctgag

SEQ ID NO: 703326 - DNA, 120 bp, Artificial Sequence
  ENSG00000196345_3 (sequence is synthesized)
acctgaactattgaccatcattttaatcggaccaactgcagctgtaacaagcttctctttggggtcacaatgaccactgcaggcaggggaaatttaggcctcatccccaggagcactgct

SEQ ID NO: 703327 - DNA, 120 bp, Artificial Sequence
  ENSG00000196345_4 (sequence is synthesized)
ttccagaagcaagaggggcgcctgactgtgaagcaggagccagcaaaccagacctgggggcagggcagcagtctccagaagaactatcctcctgtctgcgaaatcttccggctacacttc

SEQ ID NO: 703328 - DNA, 120 bp, Artificial Sequence
  ENSG00000196345_5 (sequence is synthesized)
aggcaattgtgttaccacgagatgtctgggccgcaggaagcattgagccggcttcgggagctctgccgctggtggctcatgccagaggtgcacaccaaggagcagatcctggagctgctg

SEQ ID NO: 703329 - DNA, 120 bp, Artificial Sequence
  ENSG00000196345_6 (sequence is synthesized)
gtgcttgagcagttcctgagcatcctccctggggagctccggacctgggtgcagctgcatcaccctgagagtggtgaggaggctgtggctgtggtggaggatttccagagacacctcagt

SEQ ID NO: 703330 - DNA, 120 bp, Artificial Sequence
  ENSG00000196345_7 (sequence is synthesized)
ggatcagaggaggtttcagccccagcacagaaacaggaaatgcattttgaggagacaacagctctgggtacaacaaaggaatctcctcctacctcacccctcagtgggggctcagcccct

SEQ ID NO: 703331 - DNA, 120 bp, Artificial Sequence
  ENSG00000196345_8 (sequence is synthesized)
ggagcccacctggagcctccttatgacccagggacacaccacctccccagtggggacttcgctcaatgtacttctccagttcctacccttcctcaagtggggaactcaggagaccaagca

SEQ ID NO: 703332 - DNA, 120 bp, Artificial Sequence
  ENSG00000196345_9 (sequence is synthesized)
ggggcaactgtacttcggatggtcaggccccaggatactgtggcatatgaggacctatctgtagactacactcagaagaaatggaaaagtctcacactcagtcagagagccctgcagtgg

SEQ ID NO: 703333 - DNA, 120 bp, Artificial Sequence
  ENSG00000196345_10 (sequence is synthesized)
aacatgatgccagaaaatcaccatagcatggcctccttggcaggtgagaacatgatgaagggttcagagttgactccaaagcaggaattttttaaaggatcagagtcatctaacaggaca

SEQ ID NO: 703334 - DNA, 120 bp, Artificial Sequence
  ENSG00000196345_11 (sequence is synthesized)
tcagggggactctttggggtggttcctggggcagcagagactggagatgtttgtgaagatactttcaaggagttagaaggacaaacctcagatgaagaagggagcagactagaaaatgat

SEQ ID NO: 703335 - DNA, 120 bp, Artificial Sequence
  ENSG00000196345_12 (sequence is synthesized)
ttcttggaaataacagatgaagataagaaaaaatccacaaaagacagatatgacaaatataaggaagttggggaacatccacctctgtcttccagtcctgttgaacatgaaggagtttta

SEQ ID NO: 703336 - DNA, 120 bp, Artificial Sequence
  ENSG00000196345_13 (sequence is synthesized)
aagggacagaaatcctatcgatgtgatgaatgtggcaaagctttcaatcggagttctcaccttattggccatcagagaatccacactggagagaaaccctatgagtgtaatgagtgtggg

SEQ ID NO: 703337 - DNA, 120 bp, Artificial Sequence
  ENSG00000196345_14 (sequence is synthesized)
caccagagactccataatggggagaaaccctataaatgtaatgaatgtgcaaaagcctttactcagagttcccgactcactgaccaccagagaacccatactggggagaaaccttatgaa

SEQ ID NO: 703338 - DNA, 120 bp, Artificial Sequence
  ENSG00000196345_15 (sequence is synthesized)
tgcaatgagtgtggagaggcattcattcgaagcaaaagtcttgctcgacatcaggtcctgcacactggtaagaaaccttacaaatgcaatgagtgtgggagagcattctgttccaataga

SEQ ID NO: 703339 - DNA, 120 bp, Artificial Sequence
  ENSG00000196345_16 (sequence is synthesized)
aatctcattgaccatcagagaatccacactggggagaagccttatgagtgtagtgaatgtggcaaagccttcagtcggagtaaatgtcttattcgacatcagagcctccatactggggaa

SEQ ID NO: 703340 - DNA, 120 bp, Artificial Sequence
  ENSG00000196345_17 (sequence is synthesized)
aagccatacaaatgtagtgaatgtgggaaagccttcaatcagaactctcaactcattgagcatgagcgaattcatactggagaaaaaccttttgaatgtagcgagtgtggtaaggcattt

SEQ ID NO: 703341 - DNA, 120 bp, Artificial Sequence
  ENSG00000196345_18 (sequence is synthesized)
ggtctgagtaaatgtcttattcggcaccagagacttcacacgggtgaaaagccctataaatgcaatgagtgtggaaaatccttcaatcaaaactcacaccttattatacaccagagaatt

SEQ ID NO: 703342 - DNA, 120 bp, Artificial Sequence
  ENSG00000196345_19 (sequence is synthesized)
cacactggtgagaaaccctatgaatgtaatgagtgtgggaaggtattcagttatagctccagccttatggtacatcagagaacccatactggggaaaaaccctataaatgcaatgattgt

SEQ ID NO: 703343 - DNA, 120 bp, Artificial Sequence
  ENSG00000196345_20 (sequence is synthesized)
gggaaagcttttagtgacagctcacagcttattgtacaccagagagtccacaccggagagaaaccttatgaatgtagtgaatgtgggaaagcctttagtcagcgttccacttttaatcac

SEQ ID NO: 703344 - DNA, 120 bp, Artificial Sequence
  ENSG00000196345_21 (sequence is synthesized)
caccagcgaactcacactggagagaagtcctcaggtctggcttggtcagtttcttaaggtatggttctctgagacagagagcaacgacctttgagttaagctgtctttataagcaggatg

SEQ ID NO: 703345 - DNA, 120 bp, Artificial Sequence
  ENSG00000196345_22 (sequence is synthesized)
ctcatagtggtttcccggagccagtagtcacggtggaccattccctacttgcttttccttggatcactaaggtgggagagtaggagtaacttattccagttcttacccattattaggaag

SEQ ID NO: 703346 - DNA, 120 bp, Artificial Sequence
  ENSG00000196345_23 (sequence is synthesized)
gtaaggactacacatgtcattgaattgtaggtttcctttttttttctttacttttaaattttaacttttaaaatctatttcatttcttagttatgcatctcataatcagactccatgctt

SEQ ID NO: 703347 - DNA, 120 bp, Artificial Sequence
  ENSG00000196345_24 (sequence is synthesized)
tttaaagacagagataatatcttctctattctattctacttcctccatttcaccatttatacaaagtcattcaaaaaggctgattcatgccttcctgcctcttggctatggccctcccca

SEQ ID NO: 703348 - DNA, 120 bp, Artificial Sequence
  ENSG00000196345_25 (sequence is synthesized)
tctactctttaaactttaatctataacttttcatcagttttgttccctatctagaaaacattttcttctgtttgctaatctttgtccctcacaatttttgaaatccatctcatcactgaa

SEQ ID NO: 703349 - DNA, 120 bp, Artificial Sequence
  ENSG00000196345_26 (sequence is synthesized)
atactttcttcttcaagtacttttttatttttcttcaacttctcttgatttgacctcagtgctttgaattcactggtgctacaatatgtaactgtggttaattgccttgtaaattttgcg

SEQ ID NO: 703350 - DNA, 120 bp, Artificial Sequence
  ENSG00000196345_27 (sequence is synthesized)
tgtctgtatacttttataccaacttattgtaggctctttgaggtcaggtatgtatttctttcccatatagatagtattttgtacataccagttgttaaataaataatttttaaaatctca

SEQ ID NO: 703351 - DNA, 120 bp, Artificial Sequence
  ENSG00000196345_28 (sequence is synthesized)
tcattcctgaaaaatcagaatcatacatactttcaagagaattccacagagacattgcccaggaagtcaaaatttagaaggctcctctgaagggaaagagaagactagagaggacactgg

SEQ ID NO: 703352 - DNA, 120 bp, Artificial Sequence
  ENSG00000196345_29 (sequence is synthesized)
cttgatgtagtggcagtagtcttgtgctcttcaggagagtgtcccgagttctacgtcccacatcaactgagggtgtgaacttgtggaggacttttgtctgaatctctttttcaatctcta

SEQ ID NO: 703353 - DNA, 120 bp, Artificial Sequence
  ENSG00000196345_30 (sequence is synthesized)
tacaatgtggcggagttgtgccacctacatgagccaatggagaagaaagctcctggtatactttaagtactcaacaatattaaatactgaatatttgtcaattgacgaagtacttcaaaa

SEQ ID NO: 703354 - DNA, 87 bp, Artificial Sequence
  ENSG00000196345_31 (sequence is synthesized)
caatgagtgtggagaggcattcattcgaagcaaaagtcttgctcgacatcaggtcctgcacacttcaatctccagctcccgagttca

SEQ ID NO: 703355 - DNA, 120 bp, Artificial Sequence
  ENSG00000196350_0 (sequence is synthesized)
gcagttcccggtctcgccttcactgctgtgtgtcctcagcctctgtggccctgtaacctgcggcattggaagatccacagctaacatgccaggtgcccctggcagcctagaaatgggacc

SEQ ID NO: 703356 - DNA, 120 bp, Artificial Sequence
  ENSG00000196350_1 (sequence is synthesized)
attgacatttagagatgtgaccatagaattctctctggaggagtggcaatgcctggacacggttcagcagaatttatatagggatgtgatgttagagaactacagaaacctggtcttcct

SEQ ID NO: 703357 - DNA, 120 bp, Artificial Sequence
  ENSG00000196350_2 (sequence is synthesized)
gggtatggctgtctttaagccagacttgataacttgtctgaagcaagggaaagagccttggaatatgaagagacatgagatggtaactaaacccccagttatgcgttctcattttacaca

SEQ ID NO: 703358 - DNA, 120 bp, Artificial Sequence
  ENSG00000196350_3 (sequence is synthesized)
agacctttggccagatcagagcacaaaagattctttccaagaagtaatactgagaacatatgcaagatgtggacataagaatttacgattaagaaaagattgtaaaagtgccaatgaggg

SEQ ID NO: 703359 - DNA, 120 bp, Artificial Sequence
  ENSG00000196350_4 (sequence is synthesized)
taagatgcacaaagaaggttataataaacttaaccaatgcaggacagctacccagagaaaaatatttcagtgtaacaaacatatgaaagtctttcataaatattcaaatagaaataaggt

SEQ ID NO: 703360 - DNA, 120 bp, Artificial Sequence
  ENSG00000196350_5 (sequence is synthesized)
tagacacactaaaaagaaaactttcaaatgtataaaatgtagcaaatcatttttcatgctttcatgcttaattcgacataagagaattcatattagacagaatatctacaaatgtgaaga

SEQ ID NO: 703361 - DNA, 120 bp, Artificial Sequence
  ENSG00000196350_6 (sequence is synthesized)
acgtggcaaagcctttaaatcgttctcaacccttactaaacataagataattcatactgaagacaaaccttacaaatataagaaatgtggcaatgcctttaaattttcttcaacgttcac

SEQ ID NO: 703362 - DNA, 82 bp, Artificial Sequence
  ENSG00000196350_7 (sequence is synthesized)
agagacacctttcagatcttactgaccataagagaattcatactggagagaaaacctacaaatgtgaagaatgtggcaaagc

SEQ ID NO: 703363 - DNA, 120 bp, Artificial Sequence
  ENSG00000196350_8 (sequence is synthesized)
tgtgaagaatgtggcaaagcttttaaggggtcctcaaattttaatgcacataaggtaattcatactgcagagaaaccctacaaatgtgaagattgtggcaaaacttttaaccatttctca

SEQ ID NO: 703364 - DNA, 89 bp, Artificial Sequence
  ENSG00000196350_9 (sequence is synthesized)
aaaacatagcgtgaagaatgtggcaaagcttttagccagtcctcaacccttagaaaacatgagataattcatactggagagaaacccta

SEQ ID NO: 703365 - DNA, 72 bp, Artificial Sequence
  ENSG00000196350_10 (sequence is synthesized)
cataaagcttttaagtggtcttcaaaacttactgtacataaggtagttcatactggagagaaaccctacaaa

SEQ ID NO: 703366 - DNA, 68 bp, Artificial Sequence
  ENSG00000196350_11 (sequence is synthesized)
gttcctcaacccttatgaaacataagataattcatactggggagaaaccatacaaatgtgaagaatgt

SEQ ID NO: 703367 - DNA, 88 bp, Artificial Sequence
  ENSG00000196350_12 (sequence is synthesized)
aagcttttaacagttcctcaacccttatgaaacataagataattcatactggggagaaaccagcaatcctcacaccttactagacata

SEQ ID NO: 703368 - DNA, 73 bp, Artificial Sequence
  ENSG00000196350_13 (sequence is synthesized)
aagacataaaagcttttagccagtcctcaacccttagaaaccatcagataattcatactggagagaaacccta

SEQ ID NO: 703369 - DNA, 72 bp, Artificial Sequence
  ENSG00000196350_14 (sequence is synthesized)
ttagaaaccataaagcttttaagtggtcatcaaaacttactgtacataaggtaattcatactggagagaaac

SEQ ID NO: 703370 - DNA, 86 bp, Artificial Sequence
  ENSG00000196350_15 (sequence is synthesized)
tgtgaagaatgtggcaaagcttttaagcatttctcagccctcagaaaacataaggtaattcatactagggagaaattgattcctca

SEQ ID NO: 703371 - DNA, 88 bp, Artificial Sequence
  ENSG00000196350_16 (sequence is synthesized)
tgtgaagaatgtggcaaagcttttaacaattcctcaatccttgctaaacataagataattcatactgggaagaaaccggcaatcctca

SEQ ID NO: 703372 - DNA, 85 bp, Artificial Sequence
  ENSG00000196350_17 (sequence is synthesized)
tgtgaagaatgtggcaaagcttttagccatttctcagcccttagaagacataagataattcatactggaaagaaaccgtttctca

SEQ ID NO: 703373 - DNA, 81 bp, Artificial Sequence
  ENSG00000196350_18 (sequence is synthesized)
aaagcttttaagtggtcatcaaaacttactgtacataaggtaattcatactgcagagaaaccctgcaaatgtgaagaatgt

SEQ ID NO: 703374 - DNA, 120 bp, Artificial Sequence
  ENSG00000196350_19 (sequence is synthesized)
cctgcaaatgtgaagaatgtggcaaatcttttaagcatttctcagcccttagaaaacataaggtaattcatactagggagaaattgtacaaatgtgaagaatgtgtcaaagcttttaaca

SEQ ID NO: 703375 - DNA, 73 bp, Artificial Sequence
  ENSG00000196350_20 (sequence is synthesized)
aattcatactagggagaaattgtacaaatgtgaagaatgtgtcaaagcttttaacagtttctcagcccttatg

SEQ ID NO: 703376 - DNA, 62 bp, Artificial Sequence
  ENSG00000196350_21 (sequence is synthesized)
tgtgaagaatgtggcaaagcttttaagcatttctcagcccttagaaaacataaggatcctca

SEQ ID NO: 703377 - DNA, 120 bp, Artificial Sequence
  ENSG00000196350_22 (sequence is synthesized)
tgtgaagaatgtggcaaagcttttagccaatcctcatcccttagaaaacatgagataattcatagtggagagaaaccatacaaatgtgaagaatgtggtaaagcttttaagtggttgtca

SEQ ID NO: 703378 - DNA, 90 bp, Artificial Sequence
  ENSG00000196350_23 (sequence is synthesized)
caaatgtgaagaatgtggtaaagcttttaagtggttgtcaaaacttactgtacataaggtaattcatactgcagagaaaccctgtcattt

SEQ ID NO: 703379 - DNA, 120 bp, Artificial Sequence
  ENSG00000196350_24 (sequence is synthesized)
tgtgaagaatgtggcaaagcttttaatgattcctcaacccttatgaagcataagataattcatactgggaagaaaccatacaaatgtgcagaatgtggcaaagcttttaagcaatcctca

SEQ ID NO: 703380 - DNA, 120 bp, Artificial Sequence
  ENSG00000196350_25 (sequence is synthesized)
aagcaatcctcacatcttactagacataaagcaattcatactggggagaaaccctacaaatgcgaagaatgtggcaaagattttaacaattcctcaacccttaagaaacataagctaatt

SEQ ID NO: 703381 - DNA, 120 bp, Artificial Sequence
  ENSG00000196350_26 (sequence is synthesized)
catactagggagaaattgtacaaatgtgaagaatgtgtcaaagcttttaacaatttctcagcccttatgaaacataagataattcatactggggagaaaccctacaaatgtgaagaatgt

SEQ ID NO: 703382 - DNA, 90 bp, Artificial Sequence
  ENSG00000196350_27 (sequence is synthesized)
aggtaattcatactgacaaagcttttaagcatttctcagcccttagaaaacataaggtaattcatactggaaagaaaccctaccaatgtg

SEQ ID NO: 703383 - DNA, 120 bp, Artificial Sequence
  ENSG00000196350_28 (sequence is synthesized)
cataaggtaattcatactggaaagaaaccctaccaatgtgacgaatgtggcaaagcttttaacaattcctcaacccttacgaaacataagataattcatactggggagaaaccctacaaa

SEQ ID NO: 703384 - DNA, 78 bp, Artificial Sequence
  ENSG00000196350_29 (sequence is synthesized)
catactggtcagtcctcaatccttactaaacataagataattcattctgtagagaaaccctacaaatgtgaagaatgt

SEQ ID NO: 703385 - DNA, 86 bp, Artificial Sequence
  ENSG00000196350_30 (sequence is synthesized)
tcagtgctcataccttattagacataaaacaattcataccagagagaaacctacaaatgtgaagaaagtaccaaagcttttaagca

SEQ ID NO: 703386 - DNA, 120 bp, Artificial Sequence
  ENSG00000196350_31 (sequence is synthesized)
tagacataaaacaattcataccagagagaaacctacaaatgtgaagaaagtaccaaagcttttaagcaatcctcacaccttactagacaaaacaattcatactggagagaaaccctacaa

SEQ ID NO: 703387 - DNA, 120 bp, Artificial Sequence
  ENSG00000196352_0 (sequence is synthesized)
gtgtttacgtagcgaggagatatttaggtttctagaaggcaggtcatcgcaggccccacccagcagtggagagagtgagtcccagagggtgttgccagcgagctcctcctccttcccctc

SEQ ID NO: 703388 - DNA, 120 bp, Artificial Sequence
  ENSG00000196352_1 (sequence is synthesized)
cccactctccccgagtctagggcccccggggcgtatgacgccggagccctctgaccgcacctctgaccacaacaaacccctactccacccgtcttgtttgtcccacccttggtgacgcag

SEQ ID NO: 703389 - DNA, 120 bp, Artificial Sequence
  ENSG00000196352_2 (sequence is synthesized)
agccccagcccagaccccgcccaaagcactcatttaactggtattgcggagccacgaggcttctgcttactgcaactcgctccggccgctgggcgtagctgcgactcggcggagtcccgg

SEQ ID NO: 703390 - DNA, 120 bp, Artificial Sequence
  ENSG00000196352_3 (sequence is synthesized)
cggcgcgtccttgttctaacccggcgcgccatgaccgtcgcgcggccgagcgtgcccgcggcgctgcccctcctcggggagctgccccggctgctgctgctggtgctgttgtgcctgccg

SEQ ID NO: 703391 - DNA, 120 bp, Artificial Sequence
  ENSG00000196352_4 (sequence is synthesized)
gccgtgtggggtgactgtggccttcccccagatgtacctaatgcccagccagctttggaaggccgtacaagttttcccgaggatactgtaataacgtacaaatgtgaagaaagctttgtg

SEQ ID NO: 703392 - DNA, 120 bp, Artificial Sequence
  ENSG00000196352_5 (sequence is synthesized)
aaaattcctggcgagaaggactcagtgatctgccttaagggcagtcaatggtcagatattgaagagttctgcaatcgtagctgcgaggtgccaacaaggctaaattctgcatccctcaaa

SEQ ID NO: 703393 - DNA, 120 bp, Artificial Sequence
  ENSG00000196352_6 (sequence is synthesized)
cagccttatatcactcagaattattttccagtcggtactgttgtggaatatgagtgccgtccaggttacagaagagaaccttctctatcaccaaaactaacttgccttcagaatttaaaa

SEQ ID NO: 703394 - DNA, 120 bp, Artificial Sequence
  ENSG00000196352_7 (sequence is synthesized)
tggtccacagcagtcgaattttgtaaaaagaaatcatgccctaatccgggagaaatacgaaatggtcagattgatgtaccaggtggcatattatttggtgcaaccatctccttctcatgt

SEQ ID NO: 703395 - DNA, 120 bp, Artificial Sequence
  ENSG00000196352_8 (sequence is synthesized)
aacacagggtacaaattatttggctcgacttctagtttttgtcttatttcaggcagctctgtccagtggagtgacccgttgccagagtgcagagaaatttattgtccagcaccaccacaa

SEQ ID NO: 703396 - DNA, 120 bp, Artificial Sequence
  ENSG00000196352_9 (sequence is synthesized)
attgacaatggaataattcaaggggaacgtgaccattatggatatagacagtctgtaacgtatgcatgtaataaaggattcaccatgattggagagcactctatttattgtactgtgaat

SEQ ID NO: 703397 - DNA, 120 bp, Artificial Sequence
  ENSG00000196352_10 (sequence is synthesized)
aatgatgaaggagagtggagtggcccaccacctgaatgcagaggaaaatctctaacttccaaggtcccaccaacagttcagaaacctaccacagtaaatgttccaactacagaagtctca

SEQ ID NO: 703398 - DNA, 120 bp, Artificial Sequence
  ENSG00000196352_11 (sequence is synthesized)
ccaacttctcagaaaaccaccacaaaaaccaccacaccaaatgctcaagcaacacggagtacacctgtttccaggacaaccaagcattttcatgaaacaaccccaaataaaggaagtgga

SEQ ID NO: 703399 - DNA, 120 bp, Artificial Sequence
  ENSG00000196352_12 (sequence is synthesized)
actacccgtcttctatctgggcacacgtgtttcacgttgacaggtttgcttgggacgctagtaaccatgggcttgctgacttagccaaagaagagttaagaagaaaatacacacaagtat

SEQ ID NO: 703400 - DNA, 120 bp, Artificial Sequence
  ENSG00000196352_13 (sequence is synthesized)
acagactgttcctagtttcttagacttatctgcatattggataaaataaatgcaattgtgctcttcatttaggatgctttcattgtctttaagatgtgttaggaatgtcaacagagcaag

SEQ ID NO: 703401 - DNA, 120 bp, Artificial Sequence
  ENSG00000196352_14 (sequence is synthesized)
gagaaaaaaggcagtcctggaatcacattcttagcacacctacacctcttgaaaatagaacaacttgcagaattgagagtgattcctttcctaaaagtgtaagaaagcatagagatttgt

SEQ ID NO: 703402 - DNA, 120 bp, Artificial Sequence
  ENSG00000196352_15 (sequence is synthesized)
tcgtatttagaatgggatcacgaggaaaagagaaggaaagtgatttttttccacaagatctgtaatgttatttccacttataaaggaaataaaaaatgaaaaacattatttggatatcaa

SEQ ID NO: 703403 - DNA, 120 bp, Artificial Sequence
  ENSG00000196352_16 (sequence is synthesized)
aagcaaataaaaacccaattcagtctcttctaagcaaaattgctaaagagagatgaaccacattataaagtaatctttggctgtaaggcattttcatctttccttcgggttggcaaaata

SEQ ID NO: 703404 - DNA, 120 bp, Artificial Sequence
  ENSG00000196352_17 (sequence is synthesized)
ttttaaaggtaaaacatgctggtgaaccaggggtgttgatggtgataagggaggaatatagaatgaaagactgaatcttcctttgttgcacaaatagagtttggaaaaagcctgtgaaag

SEQ ID NO: 703405 - DNA, 120 bp, Artificial Sequence
  ENSG00000196352_18 (sequence is synthesized)
gtgtcttctttgacttaatgtctttaaaagtatccagagatactacaatattaacataagaaaagattatatattatttctgaatcgagatgtccatagtcaaatttgtaaatcttattc

SEQ ID NO: 703406 - DNA, 120 bp, Artificial Sequence
  ENSG00000196352_19 (sequence is synthesized)
tatttatttatatttatttatgacagtgaacattctgattttacatgtaaaacaagaaaagttgaagaagatatgtgaagaaaaatgtatttttcctaaatagaaataaatgatcccatt

SEQ ID NO: 703407 - DNA, 120 bp, Artificial Sequence
  ENSG00000196352_20 (sequence is synthesized)
atcccattttttggtatcatgtagtatgtgaaatttattcttaaacgtgactactttatttctaaataagaaattccctacctgcttcctacaagcagttcagaatgccatgccttggtt

SEQ ID NO: 703408 - DNA, 120 bp, Artificial Sequence
  ENSG00000196352_21 (sequence is synthesized)
gtcctagtgtgaataattttcagctactttaaaattatattgtactttctcaagcatgtcatatcctttcctattagagtatctatattacttgttactgatttacctgaaggcaatctg

SEQ ID NO: 703409 - DNA, 120 bp, Artificial Sequence
  ENSG00000196352_22 (sequence is synthesized)
attaatttctaggtttttaccatattcttgtcatcttgccaattacattttaagtgttagactagactaagatgtactagttgtatagaatataactagatttattatggcaatgtttat

SEQ ID NO: 703410 - DNA, 120 bp, Artificial Sequence
  ENSG00000196352_23 (sequence is synthesized)
tttgtcattttgcttcatctgttttgttgttgaagtactttaaatttcatacgttcatggcatttcactgtaaagactttaatgtgtatttcttaaaataaaactttttttcctccttaa

SEQ ID NO: 703411 - DNA, 120 bp, Artificial Sequence
  ENSG00000196352_24 (sequence is synthesized)
ccgtcttctatctggttctcgtcctgtcacccaggctggtatgcggtggtgtgatcgtagctcactgcagtctcgaactcctgggttcaagcgatccttccacttcagcctcccaagtag

SEQ ID NO: 703412 - DNA, 85 bp, Artificial Sequence
  ENSG00000196352_25 (sequence is synthesized)
ttgtaagcgatttttccggcctcccaaaacgttgcgattataagtgtgagccactgcacctggccccacattttctttatccatt

SEQ ID NO: 703413 - DNA, 120 bp, Artificial Sequence
  ENSG00000196352_26 (sequence is synthesized)
gtgagccactgcacctggccccacattttctttatccatttgtacattgatggacacttaagatgattccatatctttgctattgtgaatagtgcttcaataaatatgtgaatgcacata

SEQ ID NO: 703414 - DNA, 120 bp, Artificial Sequence
  ENSG00000196352_27 (sequence is synthesized)
atgctcaaggtacagagactccatcagttcttcaaaaacacaccacagaaaatgtttcagctacaagaaccccaccaactcctcagaaacccaccacagtaaatgtcccagctacaatag

SEQ ID NO: 703415 - DNA, 120 bp, Artificial Sequence
  ENSG00000196352_28 (sequence is synthesized)
tcacaccaacacctaaacccaccacaataaatgttccagctacaggagtctcatcaacacctcaaagacacaccatagtaaatgtttcagctacaggaaccctaccaactcttcagaaac

SEQ ID NO: 703416 - DNA, 120 bp, Artificial Sequence
  ENSG00000196352_29 (sequence is synthesized)
ccaccagagcaaatgattcagccaccaaatccccagcagcagctcagacatctttcatatcaaaaaccctatctacaaagaccccttctgcagctcagaatcccatgatgacaaatgctt

SEQ ID NO: 703417 - DNA, 120 bp, Artificial Sequence
  ENSG00000196352_30 (sequence is synthesized)
ctgctacacaggccacactaacagcccaaaaattcaccacagcaaaagttgcatttacgcagagtccttcagcagcacgtaagtccactaatgtacattccccagtgactaatggtctca

SEQ ID NO: 703418 - DNA, 120 bp, Artificial Sequence
  ENSG00000196352_31 (sequence is synthesized)
tcacagtgagtgttacagctcttaaaggcggcgcgtctggagttgtttgttcccttcagtgggttcgtggtctcgctggcctcaggaatgaagctgcagaccttcgtgaattataactgg

SEQ ID NO: 703419 - DNA, 120 bp, Artificial Sequence
  ENSG00000196352_32 (sequence is synthesized)
ataactggacatcttttgccaggtgacttttcagtgccttccactatagtagatggaatatacttccccactccattgagtccattttttgttggctaacctgtagttttaagattgtaa

SEQ ID NO: 703420 - DNA, 120 bp, Artificial Sequence
  ENSG00000196352_33 (sequence is synthesized)
tttttttaaatctagttaccttgattgctttttagagagctattagtcccaataacttagaccaccattatttaaaaatggaattcctaaccacaatgtgtgcacctcatcataggaagg

SEQ ID NO: 703421 - DNA, 120 bp, Artificial Sequence
  ENSG00000196352_34 (sequence is synthesized)
aacacaaatgggggagtagaagaaaacagaaatgtattaataggcgacagtgagtacttcagctttatgtgtaatgttttatttcttgtattacaaagtaaaagatatgaagcatttgac

SEQ ID NO: 703422 - DNA, 120 bp, Artificial Sequence
  ENSG00000196352_35 (sequence is synthesized)
taaaaatgttaatttatataatttgaatgatgggtacatgggcagttgttatatttatatatacttttatgtattctaaatttttttctcaaaataaaaaagagaaacagtcaagggtta

SEQ ID NO: 703423 - DNA, 120 bp, Artificial Sequence
  ENSG00000196352_36 (sequence is synthesized)
actgttcaggtttactgagtatggatctaatgtgctatggtggaaatatgaacttgaccaagattgcaggattaaatggtctctaatttattgtagccagggtttttcatactaatactt

SEQ ID NO: 703424 - DNA, 120 bp, Artificial Sequence
  ENSG00000196352_37 (sequence is synthesized)
tttactttatttggaagcggacttggattgtactagggcaaatctttaaaaaaagaaacatttacaataatagagaaaaagactgtggccccattaaaaaaatgctaaattaagattggt

SEQ ID NO: 703425 - DNA, 120 bp, Artificial Sequence
  ENSG00000196352_38 (sequence is synthesized)
ccgcggcgctgcccctcctcggggagctgccccggctgctgctgctggtgctgttgtgcctgccggccgtgtgggagtccagccgtgtggagcacacgatgctgcaaacttgcatgtcat

SEQ ID NO: 703426 - DNA, 89 bp, Artificial Sequence
  ENSG00000196352_39 (sequence is synthesized)
taaaggaagtggaaccacttcaggtactacccgtcttctatctgagtcttactctgtcacccaggcaggagtgtggtggtgtgatcttc

SEQ ID NO: 703427 - DNA, 120 bp, Artificial Sequence
  ENSG00000196352_40 (sequence is synthesized)
tatgctagagagaaattgagacaacgaatacaagcaaatttgcaagagtgattatgatgtactacaccatcaaaactgagaaagaagagtgtgtagaagggactaatggatgattatcat

SEQ ID NO: 703428 - DNA, 120 bp, Artificial Sequence
  ENSG00000196352_41 (sequence is synthesized)
tattgagaaattttttttaatttcttcctagcatttagaaatattctactttaaaaggtaagataaataaaagaagagatgaaaaaggagacattacaaccaataccacaaaaattcaaa

SEQ ID NO: 703429 - DNA, 120 bp, Artificial Sequence
  ENSG00000196352_42 (sequence is synthesized)
agatcattagaaggtattatgagcaactgtatgcaaatgaattggaaaacctgaaagaaatggataagttcctagacatatatacctactgagattgaatcatgaagagatagaccacct

SEQ ID NO: 703430 - DNA, 120 bp, Artificial Sequence
  ENSG00000196352_43 (sequence is synthesized)
aaataggccaataacaagtaataagatagacacagtaataaaaagtgttccatcaaagaaaatcccagaaccttatggctttcctgctaaattccactaaacacttcaagaagaactaat

SEQ ID NO: 703431 - DNA, 120 bp, Artificial Sequence
  ENSG00000196352_44 (sequence is synthesized)
atcaatcctactcaaactatttcaaaaaattacagagaagaaaatacatccaaattcattttataaggccagcattacccagatatcaaaaacagacaaagatacacaacaatgaaaaaa

SEQ ID NO: 703432 - DNA, 120 bp, Artificial Sequence
  ENSG00000196353_0 (sequence is synthesized)
gctcctgccatacgccagacagttttgtagacacgaaggatccagagattagcaacacctttaccatttttggtgacagttaagcacccatctaagaagttttctttggtgagtgccaaa

SEQ ID NO: 703433 - DNA, 120 bp, Artificial Sequence
  ENSG00000196353_1 (sequence is synthesized)
aagtgtaactcccattccccccacacccgcgccgcgatacgaccgctccaccctagagtggagatggagaccaagcacttggagatctaaatcaagtgtccccaggagctcagttgagcg

SEQ ID NO: 703434 - DNA, 120 bp, Artificial Sequence
  ENSG00000196353_2 (sequence is synthesized)
acaaagctgagcagaaagcccagactgcgggcgcggcaggaccacggagagcgccgccgccaaggcctgggcggggcctgagctcgggttcccggggcaatgctcgtctccgtcagcaac

SEQ ID NO: 703435 - DNA, 120 bp, Artificial Sequence
  ENSG00000196353_3 (sequence is synthesized)
ccccagggggcgctcgcgcggaggtttcggaaccagtctcttgccgggttgctgggtgcatgggattcgtcagaaggtggaaatctctctgtgagaagctgccatctccccgccacccgc

SEQ ID NO: 703436 - DNA, 120 bp, Artificial Sequence
  ENSG00000196353_4 (sequence is synthesized)
tcgtccccttctctttctgccaccctcctttccttcctccctcgctccactccactccctccctcttttctcagtaccctcctctttactctccgagttaactgagagccgacctgacat

SEQ ID NO: 703437 - DNA, 120 bp, Artificial Sequence
  ENSG00000196353_5 (sequence is synthesized)
ctccaacattttcaccctcttcccccacccccatcaccgagaatggagtcagggtttccggagagaccgaactctgctctcagcacctttcccagccgctgttgctaaactgacctcgga

SEQ ID NO: 703438 - DNA, 120 bp, Artificial Sequence
  ENSG00000196353_6 (sequence is synthesized)
ggacgagaggggaaggaggtgcgacgccccttacatcagtacaaaactaccacaccaaccacctccacttcaaagccggattttgcatcctgggggcgggacagacctcgtcccgggctg

SEQ ID NO: 703439 - DNA, 120 bp, Artificial Sequence
  ENSG00000196353_7 (sequence is synthesized)
aattctctctccactcttcgagattggcacacccagaatgaagaagatgagcaacatttatgagtccgctgccaacacactgggaatctttaacagcccctgcctgaccaaagttgagct

SEQ ID NO: 703440 - DNA, 120 bp, Artificial Sequence
  ENSG00000196353_8 (sequence is synthesized)
gcgtgtggcgtgcaaaggcatttctgacagagatgccctttccaaaccagacccctgtgtcatcctcaagatgcagtctcatgggcagtggtttgaggttgacaggactgaggtgattcg

SEQ ID NO: 703441 - DNA, 120 bp, Artificial Sequence
  ENSG00000196353_9 (sequence is synthesized)
cacctgcataaacccagtgtactcaaaactgtttactgtggacttttactttgaggaggtgcagcgcctgcggtttgaagtccatgacatcagcagcaaccacaatgggctgaaggaggc

SEQ ID NO: 703442 - DNA, 120 bp, Artificial Sequence
  ENSG00000196353_10 (sequence is synthesized)
cgacttccttggtggcatggagtgcacacttggccagattgtttcccagagaaagctgtccaaatccttgctgaagcatgggaacacagcagggaaatcttccatcacggtgattgctga

SEQ ID NO: 703443 - DNA, 120 bp, Artificial Sequence
  ENSG00000196353_11 (sequence is synthesized)
agaattatctggcaatgacgactatgttgagcttgcattcaatgcacggaaattggatgacaaggatttcttcagtaaatctgacccatttctggaaatttttcgtatgaatgatgatgc

SEQ ID NO: 703444 - DNA, 120 bp, Artificial Sequence
  ENSG00000196353_12 (sequence is synthesized)
aactcagcagctggtgcaccgaactgaggttgtgatgaataacttaagcccagcctggaaatcattcaaagtatctgtaaattctctatgcagcggagacccagaccgccggctaaagtg

SEQ ID NO: 703445 - DNA, 120 bp, Artificial Sequence
  ENSG00000196353_13 (sequence is synthesized)
catagtatgggactgggactccaatggcaagcatgacttcattggagaattcacctcgacattcaaggagatgagaggagcaatggaagggaaacaggtgcagtgggagtgcatcaatcc

SEQ ID NO: 703446 - DNA, 120 bp, Artificial Sequence
  ENSG00000196353_14 (sequence is synthesized)
caagtacaaagccaagaagaagaattacaagaactcaggcactgtgattctgaatctgtgcaagattcacaagatgcattctttcttggactacatcatgggtggctgccaaatccagtt

SEQ ID NO: 703447 - DNA, 120 bp, Artificial Sequence
  ENSG00000196353_15 (sequence is synthesized)
tacagtagctatagatttcactgcctcaaacggggaccccaggaacagctgttccttgcactacatccacccttaccaacccaatgagtatctgaaagctttggtagctgtgggggagat

SEQ ID NO: 703448 - DNA, 120 bp, Artificial Sequence
  ENSG00000196353_16 (sequence is synthesized)
ttgccaagactatgacagtgacaaaatgttccctgcctttgggtttggcgccaggatacctccagagtacacggtctctcatgactttgcaatcaactttaatgaagacaacccagaatg

SEQ ID NO: 703449 - DNA, 120 bp, Artificial Sequence
  ENSG00000196353_17 (sequence is synthesized)
cagcgtcagaggaaactaacaccaaggaggcatcgcaatacttcatcctgctgatcctgacagatggtgttatcacagacatggccgacacccgggaggccattgtccatgcctcccacc

SEQ ID NO: 703450 - DNA, 120 bp, Artificial Sequence
  ENSG00000196353_18 (sequence is synthesized)
tccccatgtcagtcatcatcgtgggagtagggaacgctgacttcagtgacatgcagatgctggacggtgatgatgggattctgaggtcacccaagggagagcctgttcttcgagacatcg

SEQ ID NO: 703451 - DNA, 120 bp, Artificial Sequence
  ENSG00000196353_19 (sequence is synthesized)
tccagttcgtgcccttcaggaacttcaaacacgcatctccagctgccctggcaaagagcgtgctggctgaagtcccaaaccaagttgtggactattacaatggcaaaggaattaaaccaa

SEQ ID NO: 703452 - DNA, 120 bp, Artificial Sequence
  ENSG00000196353_20 (sequence is synthesized)
aatgttcatcagaaatgtatgaatcttccagaacactagcaccatgaactccccacacagttttacagagttctgaaatactattcctgctaatatttcatatttaatacttctactact

SEQ ID NO: 703453 - DNA, 120 bp, Artificial Sequence
  ENSG00000196353_21 (sequence is synthesized)
cctgtactttaaaaaaccaacaacatatacacatttaaaaatagcacgttttggtgatttttaactatctgacaattttttttgcatgtgtagccctgaggcctggatctgttaagccct

SEQ ID NO: 703454 - DNA, 120 bp, Artificial Sequence
  ENSG00000196353_22 (sequence is synthesized)
tgtattgttaactttttacaaagaaacacagataacaataacttactatttacattacagcatgtcgccttgaaataaaatggtatctgtatccattttttatacaggtttgttgaaatt

SEQ ID NO: 703455 - DNA, 120 bp, Artificial Sequence
  ENSG00000196353_23 (sequence is synthesized)
ttgctaaatttcttatctttacactctaaagcattttgaaacatttactgaatgttgatagacgaaatatacttggttttatctgctataggatgagagactttttaaaatggcagatgc

SEQ ID NO: 703456 - DNA, 120 bp, Artificial Sequence
  ENSG00000196353_24 (sequence is synthesized)
atggactgtattttgcatgtttaaaataaaaaaagaaaaacccacatggtttttgcagttgttatctctaattcctccctgctgagaatggtctctctactaaagaagaggtttatttac

SEQ ID NO: 703457 - DNA, 120 bp, Artificial Sequence
  ENSG00000196353_25 (sequence is synthesized)
ttcttctttctgaggtgagtctttttgaggtaagtctgggtcatctagcccagcacctctcatactttatactgtgtacacaaatcacctgagagtcttattaaaattcagattgtgata

SEQ ID NO: 703458 - DNA, 120 bp, Artificial Sequence
  ENSG00000196353_26 (sequence is synthesized)
cataggtctgtgtgggacccaagattctgcatctttaactaggtcccaggtgatgctaatgcagtccctggactataccaagaggagtgaggatctagactttagggtgtcatgatggag

SEQ ID NO: 703459 - DNA, 120 bp, Artificial Sequence
  ENSG00000196353_27 (sequence is synthesized)
accatcaaaaacagcgtggcttctagtctgcttgagaatggcacctcttcctgacagtagcacaaaagtcctgcctgtctccagaggtgacagtagaaagtaatgagactgactccagaa

SEQ ID NO: 703460 - DNA, 120 bp, Artificial Sequence
  ENSG00000196353_28 (sequence is synthesized)
gctgcacacctcaaatcagtctcgctgctttatactcacacctcttccttagataagactagaaagtgctcctcctggccagtccctgccctcttaaaagtggcatcacacaccactgca

SEQ ID NO: 703461 - DNA, 120 bp, Artificial Sequence
  ENSG00000196353_29 (sequence is synthesized)
tggatggtgtcaatccctagaagtgatctcaaagcgtcttcactggaaccacaacaatagaaacttacacatggcaaatggctatgcagtacagctcccgatatctggtccactaaattg

SEQ ID NO: 703462 - DNA, 120 bp, Artificial Sequence
  ENSG00000196353_30 (sequence is synthesized)
acctttgagcttagtgtgggaatttcttgcctcctttctatcacttctgagaacaaattctataagcagaaatgcctggaattattgtctggggtcgaggtgttttgtttcaatataagc

SEQ ID NO: 703463 - DNA, 120 bp, Artificial Sequence
  ENSG00000196353_31 (sequence is synthesized)
tggccagtctggaaccaaaaggacgaatgtttaacttgtataatcttcttgcagggaaacaggcaagtgtttttgcaagcataaaaggcacaaagtggagtttatttttggtcagagaga

SEQ ID NO: 703464 - DNA, 120 bp, Artificial Sequence
  ENSG00000196353_32 (sequence is synthesized)
tgaagaagtaaatcacaaggcaaaatttgttgtttgtttgaagaggggagcagtattaacaagcaaataaaatgccttctatgatttccacagttacaattatagatcctaatcttgcaa

SEQ ID NO: 703465 - DNA, 120 bp, Artificial Sequence
  ENSG00000196353_33 (sequence is synthesized)
atacatgtcaccaaatgcacaacattttgggaatgatggtaaaattgtatgactgaaaaaatcataaatatttaagctatattgttttattaataaattgggtacttacagaattcttct

SEQ ID NO: 703466 - DNA, 120 bp, Artificial Sequence
  ENSG00000196353_34 (sequence is synthesized)
gagtctagtcctcaactctaaccaaagtaaaggaaactggaaagacacacgctttttcagtcattaatagaaagttgtccagaaacccggcgagtgaatctacccagagctgaagcttcc

SEQ ID NO: 703467 - DNA, 120 bp, Artificial Sequence
  ENSG00000196353_35 (sequence is synthesized)
acaccagcggctggacattgagaggatcacagcagtggaaaaagacacaagcacctagccgttgagaggaacgcactggcctaagaacatactgacagacgccggtaggccagcagggcg

SEQ ID NO: 703468 - DNA, 120 bp, Artificial Sequence
  ENSG00000196353_36 (sequence is synthesized)
gcaggccatcaacccgcggaaggacacggactttggccagggcggtataaggagcctaaaggacgtcatacccatgggccagacctaacattcctttctgctgatcccaagtttttagac

SEQ ID NO: 703469 - DNA, 120 bp, Artificial Sequence
  ENSG00000196353_37 (sequence is synthesized)
aaagtttcccttccttaaccaattgcgaatcagaaaatcctcgaatccaccaatgacctataccagtaaagatgtcatctggccaatttgtgtgaaaaaagagaataattctcatccaaa

SEQ ID NO: 703470 - DNA, 120 bp, Artificial Sequence
  ENSG00000196353_38 (sequence is synthesized)
ccgcctgtctctggaaataagaaaagctctgagggtctccaaagttaccagaggaaggctgaattttatggtgattgataatatttccaagcttatggagaaaaaaatatcattagtctt

SEQ ID NO: 703471 - DNA, 120 bp, Artificial Sequence
  ENSG00000196353_39 (sequence is synthesized)
ttccatggtagaaaagagtaaagcctgtaacaaaaaaagtgatacagtggatgggatgatgagacccttgaaataagcaaggatggaccagaaactggtaacactcacccatggaatttc

SEQ ID NO: 703472 - DNA, 120 bp, Artificial Sequence
  ENSG00000196353_40 (sequence is synthesized)
attatgaagtcgtggcaagggccaagccgacctggatttgaaacccatctcttcaacgatgtagattttgacaacatatttgatttctctgggcctcagtttgttatctgcacaaaaggg

SEQ ID NO: 703473 - DNA, 120 bp, Artificial Sequence
  ENSG00000196353_41 (sequence is synthesized)
agatatgagtggttacgttattggattgtcatgaacattaaataggataatgtcaaatcattcagccaagtttctagcatatagtacaggttcaaatattatcttttttttcccaccaac

SEQ ID NO: 703474 - DNA, 120 bp, Artificial Sequence
  ENSG00000196353_42 (sequence is synthesized)
ctcttttccaggaaaatgcaaagctactctttagccaaattttaaaacaggggatatttattttgggaatcattaatacccatctgccccttttttggtccattggacatattgaaatga

SEQ ID NO: 703475 - DNA, 120 bp, Artificial Sequence
  ENSG00000196353_43 (sequence is synthesized)
aatgctcaccctgactcattcagggaaggatccaaggtttttgatgcagggcactgactctctgcctgtttttccccttcatcatctgctccccttaaaaaatggtatcaactgcattga

SEQ ID NO: 703476 - DNA, 120 bp, Artificial Sequence
  ENSG00000196353_44 (sequence is synthesized)
tttgcaacttgggaacaccagggccacagtgactttgtggcttggctttagataaatttgaccatggctgtagaacccagcagctcagaatccattaaaaggagagctgggaggagaatg

SEQ ID NO: 703477 - DNA, 120 bp, Artificial Sequence
  ENSG00000196353_45 (sequence is synthesized)
attccaggatttcacttgtcacactgatgggtgagatgcctttcatattggcataagacactgagcggatgcctcctcttatcttatcaaacagaaacccggcgagtgaatctacccaga

SEQ ID NO: 703478 - DNA, 120 bp, Artificial Sequence
  ENSG00000196353_46 (sequence is synthesized)
agaacagaagtgtatttggctcatggttttggagtctgggaagtccaagagcatagcaccagcacctacaagggtcatctcatggcagaagtatggaaggcacaagcaaacatgcatctc

SEQ ID NO: 703479 - DNA, 120 bp, Artificial Sequence
  ENSG00000196353_47 (sequence is synthesized)
gggtctcacagaatgaggctttgaagcctgtcctcctaactcttggcctgctgctctttctttgtaactgtcagtgaggtagttattataattaagctataattgccatgcctaccttta

SEQ ID NO: 703480 - DNA, 120 bp, Artificial Sequence
  ENSG00000196353_48 (sequence is synthesized)
agctccattcatcagaaccctaagcctttaggactatcagcacattcaaaaaatgtctgtcatcactgttgctttggtcaatgtgcagtgaggccacctgggtgtctaactggtattgta

SEQ ID NO: 703481 - DNA, 120 bp, Artificial Sequence
  ENSG00000196353_49 (sequence is synthesized)
gttggagagccagtgacatcccaggcttttgcccaaatgtccttgagttctacaccctgagccttgaaatgcagcttttctggggctgacttcccaggatcggtggtgctgtactttcag

SEQ ID NO: 703482 - DNA, 120 bp, Artificial Sequence
  ENSG00000196353_50 (sequence is synthesized)
gagatggtgtttgctggccagtgaagcacaaaatcagagtgaatgtggttcacatacagctttatgtaggtgcatcaacgagcctggaactaggtgccgggtgccctctaagacaccaag

SEQ ID NO: 703483 - DNA, 120 bp, Artificial Sequence
  ENSG00000196357_0 (sequence is synthesized)
ggcgagctagttagctccgcaaggacccggacgcgaccaggggaggcagaaggactctgcacttgtccaagagaagaatccagagaaatcagagcaggtcaaatagttctaaaagccatg

SEQ ID NO: 703484 - DNA, 120 bp, Artificial Sequence
  ENSG00000196357_1 (sequence is synthesized)
gcccagggactggtgacattcagggacgtggccatagagttctctctggaagaatggaagtgcctggaacctgctcagagggacttgtacagggaggtgactctggagaactttggtcac

SEQ ID NO: 703485 - DNA, 120 bp, Artificial Sequence
  ENSG00000196357_2 (sequence is synthesized)
ttggcctcactaggactctccatttctaagcctgatgtcgtctccttattggagcaagggaaagagccctggatgattgcaaatgatgtgacaggaccatggtgcccagacttggagtcc

SEQ ID NO: 703486 - DNA, 120 bp, Artificial Sequence
  ENSG00000196357_3 (sequence is synthesized)
aggtgtgagaaatttctacaaaaagacatttttgaaatcggggcattcaactgggagataatggaaagccttaaatgcagtgacctggagggctccgattttagagctgactgggaatgc

SEQ ID NO: 703487 - DNA, 120 bp, Artificial Sequence
  ENSG00000196357_4 (sequence is synthesized)
gaaggccagtttgagagacaagtcaatgaagagtgctattttaagcaagtgaacgtcacctatggacatatgcccgtgttccagcatcacacgtctcacactgtacgtcagagcagggag

SEQ ID NO: 703488 - DNA, 120 bp, Artificial Sequence
  ENSG00000196357_5 (sequence is synthesized)
actggtgagaaactgatggaatgtcatgaatgtgggaaagcatttagccgtggctcacaccttattcaacatcagaaaattcacactggtgaaaaaccctttggatgtaaggaatgtggg

SEQ ID NO: 703489 - DNA, 120 bp, Artificial Sequence
  ENSG00000196357_6 (sequence is synthesized)
aaggccttcagccgtgcctcacaccttgttcagcatcagagaattcacacgggtgagaaaccttatgactgtaaggactgtgggaaggcctttggtcgtacatcagaacttattctacat

SEQ ID NO: 703490 - DNA, 120 bp, Artificial Sequence
  ENSG00000196357_7 (sequence is synthesized)
cagagacttcatactggtgtcaaaccttatgaatgtaaagaatgtgggaagacctttaggcagcattcacagctgattctgcatcaaagaactcacacaggcgagaaaccctacgtatgt

SEQ ID NO: 703491 - DNA, 120 bp, Artificial Sequence
  ENSG00000196357_8 (sequence is synthesized)
ttagacagcactcacagctgactgtacaccagcgaatccacactggtgagaaaccctacgagtgtaaggaatgcggaaagggctttattcacagctcagaagttactcgacatcaaagaa

SEQ ID NO: 703492 - DNA, 120 bp, Artificial Sequence
  ENSG00000196357_9 (sequence is synthesized)
ttcattctggggagaaaccctatgagtgtaaggaatgtgggaaggccttcagacagcacgcacagctcacacgacatcagagagtccatactggcgacagaccctatgaatgtaaggact

SEQ ID NO: 703493 - DNA, 120 bp, Artificial Sequence
  ENSG00000196357_10 (sequence is synthesized)
gcgggaaggcatttagtcgtagctcatacctcattcaacatcaaagaattcatacaggtgacaaaccctacgaatgtaaggaatgtgggaaggcctttattcgtgtttcacaactgactc

SEQ ID NO: 703494 - DNA, 120 bp, Artificial Sequence
  ENSG00000196357_11 (sequence is synthesized)
atcatcagcgaattcacacttgtgagaaaccctatgaatgcagggagtgtggaatggcctttattcgtagttcacaacttaccgaacatcagagaattcatcctggtatcaaaccttacg

SEQ ID NO: 703495 - DNA, 120 bp, Artificial Sequence
  ENSG00000196357_12 (sequence is synthesized)
aatgtagagagtgtgggcaggcatttattcttggctcacaactcattgaacactacagaattcatactggttagaaagccttgagtgtaagggataaagataagcctttatgtggagttc

SEQ ID NO: 703496 - DNA, 120 bp, Artificial Sequence
  ENSG00000196357_13 (sequence is synthesized)
acatctggctcagtactaggtaatttttaatgtagtgtaattaatgtcagaaaacacctgtcacttccatcatagaacatcagaaaactcacacccaaagaaaattaaataaatgtggga

SEQ ID NO: 703497 - DNA, 120 bp, Artificial Sequence
  ENSG00000196357_14 (sequence is synthesized)
attctttttgcctcactcactgtttcctaagcatcagataatctatgctaaaaaaaaatgaatatagaaaagctgcttcttgccattcaaaatatgttaaatttctgacaattcctaata

SEQ ID NO: 703498 - DNA, 64 bp, Artificial Sequence
  ENSG00000196357_15 (sequence is synthesized)
tgccattcaaaatatgttaaatttctgacaattcctaatacaaaaatgacccgattaaaagatt

SEQ ID NO: 703499 - DNA, 120 bp, Artificial Sequence
  ENSG00000196357_16 (sequence is synthesized)
agtctccgcgacgcggcccgcctcggtcaccgcggccaggcccaggctggtactgaattaccttctattaccagcaacgtcgcttctcaggccttggactacatttcccttgaggcttta

SEQ ID NO: 703500 - DNA, 120 bp, Artificial Sequence
  ENSG00000196357_17 (sequence is synthesized)
ctggtcgactctctgtctcctcccctccccccgcgaacttggccgcctccttctgtgacgatggagctcttgaggactctgcacttgtccaagagaagaatccagagaaatcagagcagg

SEQ ID NO: 703501 - DNA, 120 bp, Artificial Sequence
  ENSG00000196357_18 (sequence is synthesized)
aaatgggtgaggagaggaaactgtcacaggagacgctacaaactacagccatagagagaggcccggccagcaatagctgtagctacttccagagctcctgggtcaaaggagggagagagg

SEQ ID NO: 703502 - DNA, 120 bp, Artificial Sequence
  ENSG00000196357_19 (sequence is synthesized)
agccatagggcatgggtaatgcagtccttacggtgagctgtcgggatcccagagctgggcacagaacaaggccaggagcatcaaggaatagattggaggggaaggaggggttcatggaga

SEQ ID NO: 703503 - DNA, 120 bp, Artificial Sequence
  ENSG00000196357_20 (sequence is synthesized)
aaacaaaaaattaaaaattatctgagtgtggtggcccacacctgtggtcccagctacccgggaagctgaggtgggaggatctcgagcttgagaggtcaaggctgcagtgagccgtgtttg

SEQ ID NO: 703504 - DNA, 120 bp, Artificial Sequence
  ENSG00000196357_21 (sequence is synthesized)
aaccactgcattccagtctagaacctttgaagttaggacagattctggccctggacaggagtgacctcagccttctgagtgacactggatttaggcagatgcctggtgttctgtgaccac

SEQ ID NO: 703505 - DNA, 120 bp, Artificial Sequence
  ENSG00000196357_22 (sequence is synthesized)
agcgtcagatgacttcaagcttgctggaaggtctggagtggcgacgccctctccgaagactcgtgggcgcaaaaatgtcaaaacgagccaggccccgactcagagataagagaacgccat

SEQ ID NO: 703506 - DNA, 120 bp, Artificial Sequence
  ENSG00000196357_23 (sequence is synthesized)
tctgtccgtggccgatctagctctggactacaattcccagagcccacagcggcctgacgttacgtcgttcttgacgtcgtggcgagctagttagctccgcaaggacccggacgcgaccag

SEQ ID NO: 703507 - DNA, 120 bp, Artificial Sequence
  ENSG00000196357_24 (sequence is synthesized)
acacacggagacgtgcgcgcacacccacttgtgcagagacacgcgcacgcagacacgtgcgcacagagacgcacacagacacacgtgtgcacacaggcaaacaggcacgcgcagagacgc

SEQ ID NO: 703508 - DNA, 120 bp, Artificial Sequence
  ENSG00000196357_25 (sequence is synthesized)
acacagacacgcgtgtgcaccacaggcaaacagacacgtgcagagacgcacacacaggcacacgtgtgcacacacagagatgcaaacacagacacacgcgtgcacacactgacgcgcgca

SEQ ID NO: 703509 - DNA, 120 bp, Artificial Sequence
  ENSG00000196357_26 (sequence is synthesized)
cagagagacacacgcgcgcacacacacgtctcccccgcgccagctccggctccagcagccttggggtccccgcccagacccgggctcctgactccctcaacgactgcatctcgcggggcg

SEQ ID NO: 703510 - DNA, 120 bp, Artificial Sequence
  ENSG00000196357_27 (sequence is synthesized)
atcccggtcgggttccgcctgagccaaggccccgcacccaaaccgagacagcggatccagtagcccgaggcccgcagctgggcgaaggaaccgggactcaagagtagcctccggcaccga

SEQ ID NO: 703511 - DNA, 120 bp, Artificial Sequence
  ENSG00000196357_28 (sequence is synthesized)
gccctccaagaaaagcagcccgggaccccgacaaccgtggacggagccagggtgggtcatagctcgaggcatcgtcaacggagggtccttaagagaccctgaacccattcacccgggcac

SEQ ID NO: 703512 - DNA, 120 bp, Artificial Sequence
  ENSG00000196357_29 (sequence is synthesized)
cagagactctgccaaagcaccaattcgggcaggtggtagcctcgaagctgggaggctgcatctcaagcctcctcctagatccgcggtggaccctgggaaatgtagtccagagcaagccac

SEQ ID NO: 703513 - DNA, 120 bp, Artificial Sequence
  ENSG00000196358_0 (sequence is synthesized)
ccggagggtggcggtcctcggccctcccaggtctccgcgccgggaagccgctccgagccggggctggagggttgttttgccgttgtgttgagcacgtcacccattaagagccctttaaag

SEQ ID NO: 703514 - DNA, 120 bp, Artificial Sequence
  ENSG00000196358_1 (sequence is synthesized)
acctggattgattggaaggacaaaaattaaaagcaatctgatccagcctcatgcaggatccctgcggattttctccttatcccatttccatccactgtcacaatttgagaatctgcctga

SEQ ID NO: 703515 - DNA, 120 bp, Artificial Sequence
  ENSG00000196358_2 (sequence is synthesized)
tttgatcagattcacctccaggggaggtgtgataccagggttaggaggacgtgaagttatgggcaactttctgatctgtccatcagcagtctgagaaacgctggctctgaattttccgtg

SEQ ID NO: 703516 - DNA, 120 bp, Artificial Sequence
  ENSG00000196358_3 (sequence is synthesized)
tcggccttttggaaacaacaagttcctcgctgtttgcaaagcttcagtgctcgggtccctgggacaccccggccaccctcgcctggtagatgtggcatttccatgctgaggccgcgagtc

SEQ ID NO: 703517 - DNA, 120 bp, Artificial Sequence
  ENSG00000196358_4 (sequence is synthesized)
ccgcctgaccccgtcgctgcctctccagggcttctctgggccgcgcctctgcagactgcgcagccatgctgcatctgctggcgctcttcctgcactgcctccctctggcctctggggact

SEQ ID NO: 703518 - DNA, 120 bp, Artificial Sequence
  ENSG00000196358_5 (sequence is synthesized)
atgacatctgcaaatcctgggtgaccacagatgagggccccacctgggagttctacgcctgccagcccaaggtgatgcgcctgaaggactacgtcaaggtgaaggtggagccctcaggca

SEQ ID NO: 703519 - DNA, 120 bp, Artificial Sequence
  ENSG00000196358_6 (sequence is synthesized)
tcacatgtggagacccccctgagaggttctgctcccatgagaatccctacctatgcagcaacgagtgtgacgcctccaacccggacctggcccacccgcccaggctcatgttcgacaagg

SEQ ID NO: 703520 - DNA, 120 bp, Artificial Sequence
  ENSG00000196358_7 (sequence is synthesized)
aggaggagggcctggccacctactggcagagcatcacctggagccgctaccccagcccgctggaagccaacatcaccctttcgtggaacaagaccgtggagctgaccgacgacgtggtga

SEQ ID NO: 703521 - DNA, 120 bp, Artificial Sequence
  ENSG00000196358_8 (sequence is synthesized)
tgaccttcgagtacggccggcccacggtcatggtcctggagaagtccctggacaacgggcgcacctggcagccctaccagttctacgccgaggactgcatggaggccttcggtatgtccg

SEQ ID NO: 703522 - DNA, 120 bp, Artificial Sequence
  ENSG00000196358_9 (sequence is synthesized)
cccgccgggcccgcgacatgtcatcctccagcgcgcaccgcgtgctctgcaccgaggagtactcgcgctgggcaggctccaagaaggagaagcacgtgcgcttcgaggtgcgggaccgct

SEQ ID NO: 703523 - DNA, 120 bp, Artificial Sequence
  ENSG00000196358_10 (sequence is synthesized)
tcgccatctttgccggccccgacctgcgcaacatggacaacctctacacgcggctggagagcgccaagggcctcaaggagttcttcaccctcaccgacctgcgcatgcggctgctgcgcc

SEQ ID NO: 703524 - DNA, 120 bp, Artificial Sequence
  ENSG00000196358_11 (sequence is synthesized)
cggcgctgggcggcacctatgtgcagcgggagaacctctacaagtacttctacgccatctccaacatcgaggtcatcggcaggtgcaagtgcaacctgcacgccaacctgtgctccatgc

SEQ ID NO: 703525 - DNA, 120 bp, Artificial Sequence
  ENSG00000196358_12 (sequence is synthesized)
gcgagggcagcctgcagtgcgagtgcgagcacaacaccaccggccccgactgcggcaagtgcaagaagaatttccgcacccggtcctggcgggccggctcctacctgccgctgccccatg

SEQ ID NO: 703526 - DNA, 120 bp, Artificial Sequence
  ENSG00000196358_13 (sequence is synthesized)
gctctcccaacgcctgtgccactgcaggttcctttggcaactgcgaatgctacggtcactccaaccgctgcagctacattgacttcctgaatgtggtgacctgcgtcagctgcaagcaca

SEQ ID NO: 703527 - DNA, 120 bp, Artificial Sequence
  ENSG00000196358_14 (sequence is synthesized)
acacgcgaggtcagcactgccagcactgccggctgggctactaccgcaacggctcggcagagctggatgatgagaacgtctgcattgagtgtaactgcaaccagataggctccgtgcacg

SEQ ID NO: 703528 - DNA, 120 bp, Artificial Sequence
  ENSG00000196358_15 (sequence is synthesized)
accggtgcaacgagaccggcttctgcgagtgccgcgagggcgcggcgggccccaagtgcgacgactgcctccccacgcactactggcgccagggctgctaccccaacgtgtgcgacgacg

SEQ ID NO: 703529 - DNA, 120 bp, Artificial Sequence
  ENSG00000196358_16 (sequence is synthesized)
accagctgctgtgccagaacggaggcacctgcctgcagaaccagcgctgcgcctgcccgcgcggctacaccggcgtgcgctgcgagcagccccgctgcgaccccgccgacgatgacggcg

SEQ ID NO: 703530 - DNA, 80 bp, Artificial Sequence
  ENSG00000196358_17 (sequence is synthesized)
acgatgacggcggtctggactgcgaccgcgcgcccggggccgccccgcgccccgccaccctgctcggctgcctgctgctg

SEQ ID NO: 703531 - DNA, 120 bp, Artificial Sequence
  ENSG00000196358_18 (sequence is synthesized)
gcccggcccgcgctcccgcccgcactgccctccccccgcagcaggggcgccttgggactccggtccccgcgcctgcgatttggtttcgtttttcttttgtattatccgccgcccagttcc

SEQ ID NO: 703532 - DNA, 120 bp, Artificial Sequence
  ENSG00000196358_19 (sequence is synthesized)
ctctctctctctttttttttttttttttctggcggtgagccagagggtcgggagaaacgctgctcgccccacaccccgtcctgcctcccaccacacttacacacacgggactgtggccga

SEQ ID NO: 703533 - DNA, 120 bp, Artificial Sequence
  ENSG00000196358_20 (sequence is synthesized)
gactgtggccgacaccccctggcctgtgccaggctcacgggcggcggcggaccccgacctccagttgcctacaattccagtcgctgacttggtcctgttttctattctttatttttcctg

SEQ ID NO: 703534 - DNA, 120 bp, Artificial Sequence
  ENSG00000196358_21 (sequence is synthesized)
caacccaccagaccccaggcctcaccggaggcccggtgaccacggaactcaccgtctgggggaggaggagagaaggaaggggtggggggcctggaaacttcgttctgtagagaactattt

SEQ ID NO: 703535 - DNA, 120 bp, Artificial Sequence
  ENSG00000196358_22 (sequence is synthesized)
ttgtttgtattcactgtcccctgcaagggggacggggcgggagcactggtcaccgcgggggccgatggtggagaatccgaggagtaaagagtttgctcactgctgcctccacggcctgtt

SEQ ID NO: 703536 - DNA, 120 bp, Artificial Sequence
  ENSG00000196358_23 (sequence is synthesized)
ttctttctgtgttggggacggtgggcaggtgtggggcttacagaggaatccacaacacagccttaaagaaacggtttccctactggggccaccatttccctgggcctttctgtggattcc

SEQ ID NO: 703537 - DNA, 120 bp, Artificial Sequence
  ENSG00000196358_24 (sequence is synthesized)
agcaggcagtgccccctccccgcaggcttggctggcagagttttccaccccgcggccaggctgcaggtgccccacctgttaggagcctccccacactgaaaggctgcctccctcctttcc

SEQ ID NO: 703538 - DNA, 120 bp, Artificial Sequence
  ENSG00000196358_25 (sequence is synthesized)
caaaaaagaaatccggagtgtattggcccttttctacagaagtccaagggaaatgactcagggagaatcctagcagaggttgaatccaatgctctgatttatactgtgtctcggtggcca

SEQ ID NO: 703539 - DNA, 120 bp, Artificial Sequence
  ENSG00000196358_26 (sequence is synthesized)
cctccgatggatgtgtcatctcagacctgttgcagccggagcctcaagtccaatatcagatgaagctgaacccacaattcggccaccgcctccttccagagtttcagatggccaggtggg

SEQ ID NO: 703540 - DNA, 120 bp, Artificial Sequence
  ENSG00000196358_27 (sequence is synthesized)
cagaggcgggcagtgcagagaccccagacgtgccggccctgtcctccctaccttctcaagattaggaaggggtgctggaggggacaggggcagcttgggagtggtgaggaagctcctaga

SEQ ID NO: 703541 - DNA, 120 bp, Artificial Sequence
  ENSG00000196358_28 (sequence is synthesized)
ttcggggctcatcccctggggcctctgattcagaggatccagcagttctcccatctccgcttggtgtctccagccctggggccacacttccccctcggtccagcctcctgtccacctatg

SEQ ID NO: 703542 - DNA, 120 bp, Artificial Sequence
  ENSG00000196358_29 (sequence is synthesized)
tttatttcagagcagtgccgggggtccggtcctggttgctaactgctgccactgctccacctgcaggtgctcccagcactggcttctgccaccacacctgttctttcccagctgcgaggt

SEQ ID NO: 703543 - DNA, 120 bp, Artificial Sequence
  ENSG00000196358_30 (sequence is synthesized)
ttagacctgggtccttcccttgagtccccaaagctaagctaagaccaagtggaacaaacttggccttggggacagcaggagattacaacacagaaaaggagggggaggcacaacgggaca

SEQ ID NO: 703544 - DNA, 120 bp, Artificial Sequence
  ENSG00000196358_31 (sequence is synthesized)
ctgcataggactcacagtgtcccgagcccacacaccagcccctcctggcctcctctctctgctcccacccccagcaccctgctgacccggaagtgccttccgacaggccctgcatcctcc

SEQ ID NO: 703545 - DNA, 120 bp, Artificial Sequence
  ENSG00000196358_32 (sequence is synthesized)
tgcagctggcccatctctaccctcacattcttccttacgcacagaaccccactgcctgggacccaaagtgcccagataaaataaaacacctctctggggcttcttgtggataggagtggc

SEQ ID NO: 703546 - DNA, 120 bp, Artificial Sequence
  ENSG00000196358_33 (sequence is synthesized)
caggggacacagctctgggcagtgagatgtaagcaggactgatgggtgggcttccagaaagttcttaaaagtcatcccttcctccacgccccacaaagcctcagttgtccaagtttgtgg

SEQ ID NO: 703547 - DNA, 120 bp, Artificial Sequence
  ENSG00000196358_34 (sequence is synthesized)
ctctggtttttctctctcatccctccctctgctcttcagtcagcaggatggggaaggagccttcttgagacactgagcataacagtgtcaccctcaggatagtgaagggtggagccgggg

SEQ ID NO: 703548 - DNA, 120 bp, Artificial Sequence
  ENSG00000196358_35 (sequence is synthesized)
gtggagccgggggtggaagttgcagagcctgggacacctgccttggctgcaacctctgcactgcttttatttatctacttatttttatagagttgaggtctcactatgttgcccaggctg

SEQ ID NO: 703549 - DNA, 72 bp, Artificial Sequence
  ENSG00000196358_36 (sequence is synthesized)
taggctcaagtgagcctccgacctgcctgtcttactgtgtgagaaaaaaaataaacggtgatgtgattaaaa

SEQ ID NO: 703550 - DNA, 120 bp, Artificial Sequence
  ENSG00000196358_37 (sequence is synthesized)
cgcagcccggatcagaccgagagataaaagccccgatggtgatcacaagtcagaccccaggtacctggatggattgagagctgagatctcagcaactttctgatctgtccatcagcagtc

SEQ ID NO: 703551 - DNA, 120 bp, Artificial Sequence
  ENSG00000196358_38 (sequence is synthesized)
gagaggactggccaatgtcaaagagccagccgggagcagaccccaaatctcagagatgcttctggggtgcaccgtcaccctccaccagggctctgtggggccccacatcccacccaagtt

SEQ ID NO: 703552 - DNA, 120 bp, Artificial Sequence
  ENSG00000196358_39 (sequence is synthesized)
gtccctcccggacccagggggcccctggctgggaagccagtgagccgagagggcgccagaaagaagctggaccctgcagggacgctggtctgcacagccgtcgtaagttgcttctctgtg

SEQ ID NO: 703553 - DNA, 120 bp, Artificial Sequence
  ENSG00000196358_40 (sequence is synthesized)
gtgtccccaccccggcaaccccccaaccctctcttgcttttcccatctctcaccaggcatcagcaggtcccagaaagaccccgaccccaaaggccctgtggccactgcggccaccacagc

SEQ ID NO: 703554 - DNA, 120 bp, Artificial Sequence
  ENSG00000196358_41 (sequence is synthesized)
catgacaggggcccctactactcctgtcccctccacgtccactgcctgggcccccatggcgcccagcaccccacagcccacaggtgggtgccagggtacagcgacccctgtcatcccacc

SEQ ID NO: 703555 - DNA, 120 bp, Artificial Sequence
  ENSG00000196358_42 (sequence is synthesized)
ctgcctctcttggggtgggagggtcggcagccctgggcagagagcaggggcttggctcttagaatagagacgctagaaccctagagctgggaggccacaggccaaaggggcttgaggaca

SEQ ID NO: 703556 - DNA, 120 bp, Artificial Sequence
  ENSG00000196358_43 (sequence is synthesized)
cctgggtcaacctgttcctgagcccagccaggggattcagggatcagttcagcttccaaagtcgtcttcctcctgcccttcaagccattgcttggaagggctcccagaccattgtggcca

SEQ ID NO: 703557 - DNA, 120 bp, Artificial Sequence
  ENSG00000196358_44 (sequence is synthesized)
gacggctgcaggaactgagaggaaaggtgctgggggcagcgaggccatcctgacatgcagccaaagactggccttatctcccaatggtgcttctgcctccgtggtccctggagccccgcc

SEQ ID NO: 703558 - DNA, 120 bp, Artificial Sequence
  ENSG00000196358_45 (sequence is synthesized)
cacaccctgtccccacctggcccccagggcctctctgtccttagcccctcagcagcacaccggtgggatggatggagcagggttagcccagaaagcaaatgtctctgatcagcagggcaa

SEQ ID NO: 703559 - DNA, 120 bp, Artificial Sequence
  ENSG00000196358_46 (sequence is synthesized)
agggagcctctggagctgagtttggacaccgtgggctgctgggaatgtggaggctgtgtgtgtagtgcaaggccaggccagggccagacgtcctgccccctcaggggtctgccacagaca

SEQ ID NO: 703560 - DNA, 120 bp, Artificial Sequence
  ENSG00000196358_47 (sequence is synthesized)
ggcatggaaacctgattctcgctcccctccaacggagggattcacgtgtattcaaggctgggggtgctggagtgggcctctgctctcacctggactcacctggggagtatccctgcactc

SEQ ID NO: 703561 - DNA, 120 bp, Artificial Sequence
  ENSG00000196358_48 (sequence is synthesized)
tgtgcagtgcaggtgccaggggtctgaaaggatttatccttcccagagggcaccaggaagacgatgaccaaggggaattcttcctggtcccagccagggaggggtgctccaatagcctgc

SEQ ID NO: 703562 - DNA, 120 bp, Artificial Sequence
  ENSG00000196358_49 (sequence is synthesized)
cacaccctgtcccccgccaccctgcagggaggacctggtggggactcctggccccttgggtagtgccctggccctccatctctctgatccaaggagacctgccccactgatccttccccc

SEQ ID NO: 703563 - DNA, 120 bp, Artificial Sequence
  ENSG00000196358_50 (sequence is synthesized)
ttggggggtggcatttctaaagggcagagtcccctccatcagctcctgcctcggcctgttgctgggtggacactcaggctccccagacaggggcaaatgctgagagaaagacctcctcct

SEQ ID NO: 703564 - DNA, 120 bp, Artificial Sequence
  ENSG00000196358_51 (sequence is synthesized)
tcctaggccatccagagcagctcccctgggggcagcacaccccacctctttctacatccttccttttctgcaggaggcatttacaggaggcaggggctagccaaaagattggaggatttc

SEQ ID NO: 703565 - DNA, 120 bp, Artificial Sequence
  ENSG00000196358_52 (sequence is synthesized)
cgggaagcctcctgacccaggaatcctctttggggtggaagacatgggtcactctgagaattctggacttcagacataggttggcccagccacaagggacctgtgctttgctgctgagcc

SEQ ID NO: 703566 - DNA, 120 bp, Artificial Sequence
  ENSG00000196358_53 (sequence is synthesized)
tgtggtgggcagacagaagcaaaaacagtggtggtgggtgctgtgcctgtctccaaacaggggtttggctgggaggccagatactctccatatcacatgtgcaagtgcacacatgcacac

SEQ ID NO: 703567 - DNA, 120 bp, Artificial Sequence
  ENSG00000196358_54 (sequence is synthesized)
acacacatgcatgcacacacacaggcatgcacacgcacatgtacacacacacacacacagaggaatccatttgcagagctgcttctgacttggtgccagggcagccgtgggaggctgggc

SEQ ID NO: 703568 - DNA, 120 bp, Artificial Sequence
  ENSG00000196358_55 (sequence is synthesized)
agattgtgcaaagttgggaattaaagaggaaaagtcagaggccagagtgggaaatgcaggggaggtgagggtccccaggaccccctcagtgagcagaaggcacaccctccctctcggcaa

SEQ ID NO: 703569 - DNA, 120 bp, Artificial Sequence
  ENSG00000196358_56 (sequence is synthesized)
gacagtgctgctctgcaccctcagccctgtatcaagaagcaggacattaggggaggaggtggctccaatgtgacagccagtggcccctacagcccacatctaggggctcctccctcctct

SEQ ID NO: 703570 - DNA, 120 bp, Artificial Sequence
  ENSG00000196358_57 (sequence is synthesized)
tcagcaactgaagcccctgtccagagcccccattaatgaaaacgatcattgcagtagctgagggtgagttctcctgggctgtgctcgtatcattgtatcatcatatcattgtattctggg

SEQ ID NO: 703571 - DNA, 120 bp, Artificial Sequence
  ENSG00000196358_58 (sequence is synthesized)
ctcacagctccgtgagatggaggctgttattttcctagtcccacaggtgaggggatcgaggcttaggaagaagcagctggattttatgatatgtaaattacacctcaatcaagctgtttc

SEQ ID NO: 703572 - DNA, 120 bp, Artificial Sequence
  ENSG00000196358_59 (sequence is synthesized)
gcgacccctctagttgcccagagaggggaaggggctgacccaggccacaccagtgccagggcggggaaggtggggctgggacgtgtttgatcccaaggaaggaagccagagtcttctctc

SEQ ID NO: 703573 - DNA, 120 bp, Artificial Sequence
  ENSG00000196358_60 (sequence is synthesized)
caggcctggccaccctgggaagtccccacctgccgtccagccgcgggctcacgtggacccagtgtggggagcatcccctggggagtgtggagatgctccctgcgaggccgggagagtggg

SEQ ID NO: 703574 - DNA, 120 bp, Artificial Sequence
  ENSG00000196361_0 (sequence is synthesized)
agagcgcggagcgcgcagcgcgggccggagggagggagggagggtgggcgaggggagaggacttgaacacacgggaccggacaggaccgaccgaggggcggcggcgaaaggcagagcgcc

SEQ ID NO: 703575 - DNA, 120 bp, Artificial Sequence
  ENSG00000196361_1 (sequence is synthesized)
cgaaaggcagagcgccgcgatctctgtcgggaagcgcaacctccccgggccccgcggggccgcgcagggggcgtcctcaaccccgcgcccgctccctctttccatcccctgccgcccgca

SEQ ID NO: 703576 - DNA, 120 bp, Artificial Sequence
  ENSG00000196361_2 (sequence is synthesized)
gcgcgcgcatccccgggttcgggcccgtccctggccctcgagggagccgccgccttcatcgccacatctgcagcggccgcaccagaggccgcccgggcgggaccccagcgtgagcatcgg

SEQ ID NO: 703577 - DNA, 120 bp, Artificial Sequence
  ENSG00000196361_3 (sequence is synthesized)
agcatcgggcgcccccctaggagtgcaccacccccggagcccccctcaacacggaccgcgcccgccgggcacacaagaatggtcactcagatactgggggccatggagtctcaggtgggg

SEQ ID NO: 703578 - DNA, 120 bp, Artificial Sequence
  ENSG00000196361_4 (sequence is synthesized)
gggggcccggccggcccggccctgcccaacgggccactccttggtacaaatggagccactgacgacagcaagaccaacctcatcgtcaactacctgccccagaacatgacccaggatgag

SEQ ID NO: 703579 - DNA, 120 bp, Artificial Sequence
  ENSG00000196361_5 (sequence is synthesized)
ttcaagagtctcttcggcagcattggcgacatcgagtcctgcaagttggttcgggacaagatcacagggcagagccttggctacgggtttgtgaactattctgaccccaatgatgcagac

SEQ ID NO: 703580 - DNA, 120 bp, Artificial Sequence
  ENSG00000196361_6 (sequence is synthesized)
aaagccatcaacaccctcaacggcctcaaattacagacgaagaccatcaaggtgtcctatgccagacccagttcagcatccatccgggatgctaacctgtacgtcagcgggctccccaag

SEQ ID NO: 703581 - DNA, 120 bp, Artificial Sequence
  ENSG00000196361_7 (sequence is synthesized)
accatgagccagaaagagatggagcagctcttctcccagtacggccgcatcatcacgtcccgcatcctggtggaccaggtcacaggtgtctctcggggtgtgggattcatccgctttgac

SEQ ID NO: 703582 - DNA, 120 bp, Artificial Sequence
  ENSG00000196361_8 (sequence is synthesized)
aagaggattgaggccgaagaggctatcaaaggactgaatgggcagaagccgctgggcgcagctgagcccatcacagtcaagttcgcgaacaacccaagtcagaagacggggcaggcgctg

SEQ ID NO: 703583 - DNA, 120 bp, Artificial Sequence
  ENSG00000196361_9 (sequence is synthesized)
ctcacccacctctaccagtcatccgcccggcgctacgcaggccccctacaccatcagacccagcgtttccggctggacaatttgctcaacatggcctacggcgtcaagagtcccctgtcg

SEQ ID NO: 703584 - DNA, 120 bp, Artificial Sequence
  ENSG00000196361_10 (sequence is synthesized)
ctcatcgccaggttctcgccgatcgccatcgatggtatgagcggcctggcgggcgtgggcctgtcggggggcgcggcgggcgccggctggtgcatcttcgtgtacaacctgtcaccggag

SEQ ID NO: 703585 - DNA, 120 bp, Artificial Sequence
  ENSG00000196361_11 (sequence is synthesized)
gcagacgagagcgtgctgtggcagctgttcgggccttttggggcagtcaccaacgtcaaggtcatccgtgatttcaccaccaacaagtgcaagggtttcggcttcgtgaccatgaccaac

SEQ ID NO: 703586 - DNA, 120 bp, Artificial Sequence
  ENSG00000196361_12 (sequence is synthesized)
tatgacgaggcggccatggccatcgccagcctgaacggctatcgcctgggcgagcgcgtgctgcaggtctccttcaagaccagcaaacagcacaaggcgtgagcccaccccgcctgccct

SEQ ID NO: 703587 - DNA, 120 bp, Artificial Sequence
  ENSG00000196361_13 (sequence is synthesized)
gagagaaagagagagagagagagagaaggggcccaagagagacagcacaggcagccccacggacgacgcgagggccccacgtccctgcggaagccacagggtgagcactctggggtggga

SEQ ID NO: 703588 - DNA, 120 bp, Artificial Sequence
  ENSG00000196361_14 (sequence is synthesized)
ggaagccacagggtgagcactctggggtgggagggtctgcagggaattgggggggtgcccggggatcccccgccccatcctcctgcccccaccccaggctgggctgttcactctctcgtc

SEQ ID NO: 703589 - DNA, 120 bp, Artificial Sequence
  ENSG00000196361_15 (sequence is synthesized)
ttggtttggttcatggtgaaggtttttgtttcttttttcggctaaaaagaatgcagagatgtgcccccacccccaccctcgaccacccccgatgggatggcttggggggctccagggggt

SEQ ID NO: 703590 - DNA, 120 bp, Artificial Sequence
  ENSG00000196361_16 (sequence is synthesized)
gccctcccagacccccttgcccaggcctccccagcacctaggtggggcctggggtaggaggaacaggtttaaaaatccccaaaaaagcgaaccgtgaggaggggtgtgggcacccccggc

SEQ ID NO: 703591 - DNA, 120 bp, Artificial Sequence
  ENSG00000196361_17 (sequence is synthesized)
ccagtgccccctggtggaatgcgggggagcaggcagtggggctggaagcagaaacaaaatgaaaaaaaaaggggggtgggaggggaagaaaaactctatttttgtaaaaagggaaaaaga

SEQ ID NO: 703592 - DNA, 78 bp, Artificial Sequence
  ENSG00000196361_18 (sequence is synthesized)
tttggcaggttatgtttaccaactggggcgggggtggggggggcccagggagcagggcttaggggctagcagcccacg

SEQ ID NO: 703593 - DNA, 120 bp, Artificial Sequence
  ENSG00000196361_19 (sequence is synthesized)
cgcagacagtcacaccacggggacacacggacagacgcagacggacacagcgacatgccccagacacgttaagggactggttggccaaactcagacacgtggacagggatagacagaaag

SEQ ID NO: 703594 - DNA, 120 bp, Artificial Sequence
  ENSG00000196361_20 (sequence is synthesized)
agacagaagctggggctacgtccatgtggacacagaccacagatgtgggcacacgaatccatccacctgtccacgtgcacacgtgaatgtagcgatagatatttggacatcaaatttgga

SEQ ID NO: 703595 - DNA, 120 bp, Artificial Sequence
  ENSG00000196361_21 (sequence is synthesized)
caccaggtcacggagaaacacaaacaccacccaggaacacgcagacatatgcccatagcatcccacaggcccaggcaggaggtcccaccccagaccctgccccagacgctccctcaccct

SEQ ID NO: 703596 - DNA, 120 bp, Artificial Sequence
  ENSG00000196361_22 (sequence is synthesized)
ctcggccccctcgccctggcccccaggttctctgcagagatctctcctggacccccagcggtctccttggcgcccacgaacacaggcgtgcacacgcagcgcacatgcattgagacacac

SEQ ID NO: 703597 - DNA, 120 bp, Artificial Sequence
  ENSG00000196361_23 (sequence is synthesized)
gatacctcgttccaccttggcgtcacggtgggctggaggcagcccccccccccacaacacttgaggccaaaggacacccctgtccccggggctcagcctccccctgggccgaggccttgg

SEQ ID NO: 703598 - DNA, 120 bp, Artificial Sequence
  ENSG00000196361_24 (sequence is synthesized)
cccacacagctgagggagaggcccagccctgagcctcccccaccaggactgggcctccccggcagcaagaccccggcactccccgccaggcccagggtggggtggatgggcccaaaggcc

SEQ ID NO: 703599 - DNA, 120 bp, Artificial Sequence
  ENSG00000196361_25 (sequence is synthesized)
cagccccacactcctttcccgtccacttgtcacctacctatcccctttcggtttgttgggtttttcgtctttccagattgcagtggacacagcccccgatctcgagccccggcccccggc

SEQ ID NO: 703600 - DNA, 120 bp, Artificial Sequence
  ENSG00000196361_26 (sequence is synthesized)
ttctgtctggacattgcatcgccctagttttctttctttaaaaaaaaaaaattccaacagaagccacaggccggagcccctgggagccctcgcaccgctccccaccccactcagcggccc

SEQ ID NO: 703601 - DNA, 120 bp, Artificial Sequence
  ENSG00000196361_27 (sequence is synthesized)
catcggaactgagaattgcaaaacccccgactttagctatagttaagttgccttcccccggtgtccccacgtttggtgtctggctatggcgcccccatctgactgtccagctctctctcc

SEQ ID NO: 703602 - DNA, 120 bp, Artificial Sequence
  ENSG00000196361_28 (sequence is synthesized)
cccacccctcccggtgttgttattaaacgtctgtggagcttctgctgcaaggaacaaaaaagaaaaaaatcaaaaaagcgacaaaaaaacacaaacagaagaggaaaaaaaagcaacaaa

SEQ ID NO: 703603 - DNA, 120 bp, Artificial Sequence
  ENSG00000196361_29 (sequence is synthesized)
aaaaaggaaaaaaaaaaaagacataaactggcaccagttaactttcttgtacttttttgctgaatttagcttcttgtagttttaacttattgctatgttaactatttattctcctcgttg

SEQ ID NO: 703604 - DNA, 120 bp, Artificial Sequence
  ENSG00000196361_30 (sequence is synthesized)
attgctatgttaactatttattctcctcgttgccctgtaaggacatccgtgtatatttctgttacttcatccggtttgcaagttaaaggaacgacaatgttctctttgtttctttaagtt

SEQ ID NO: 703605 - DNA, 120 bp, Artificial Sequence
  ENSG00000196361_31 (sequence is synthesized)
ttgccgagacatggttatgcctaatttatttataaaaggggaagtggaatcattaaagtaataataattattaataacagtaatggtagccgagtggcacgcgggggcgtgtgctctgcg

SEQ ID NO: 703606 - DNA, 120 bp, Artificial Sequence
  ENSG00000196361_32 (sequence is synthesized)
ggacagtccccacggccagcgacgtccaggtcaccaatgggattctttttgctcttgtcttgagaattttttcagtcctatttagctggtgaaatccctagcttgttcttgatacacgaa

SEQ ID NO: 703607 - DNA, 120 bp, Artificial Sequence
  ENSG00000196361_33 (sequence is synthesized)
cctatttattctcgtggttttaagtcctccctgccctctctcctctcccctgcagcagggcagggacccctctcccctgctgtctcttggggctctctcccctccgccctctgcattcgg

SEQ ID NO: 703608 - DNA, 120 bp, Artificial Sequence
  ENSG00000196361_34 (sequence is synthesized)
gaacacgcacgtccgcgtgggaagcttgcagcagggcgtccgagcaataagggctgggtttgtcccccaccctggggggggccaggctccagagagggggcacctccccacacacccccc

SEQ ID NO: 703609 - DNA, 120 bp, Artificial Sequence
  ENSG00000196361_35 (sequence is synthesized)
ccccaccgaggcctaggcccctgccacccccaagactgggaggggacttctttttctaaaacacaaaactcagcccagccaggccccctccctggaggccagcccctccccgcagggggc

SEQ ID NO: 703610 - DNA, 120 bp, Artificial Sequence
  ENSG00000196361_36 (sequence is synthesized)
caggccggggctcccaggcgagggggacttggggcttccacgtccctggggggcaggggccaggccaggggggagggggctcagcccctccacccctcccttcatcctgttatttattcg

SEQ ID NO: 703611 - DNA, 78 bp, Artificial Sequence
  ENSG00000196361_37 (sequence is synthesized)
tcagcccctccacccctcccttcatcctgttatttattcggaaggtttcaaatcacgacagagtccatgttggaggtg

SEQ ID NO: 703612 - DNA, 120 bp, Artificial Sequence
  ENSG00000196361_38 (sequence is synthesized)
cgttgcgtttagactatttattaccgggatcacaggcctggccgcggtaacagacttttacatggaattgtttaattatttgtacttttcatgccagaaaataaaagttcagaatcttaa

SEQ ID NO: 703613 - DNA, 80 bp, Artificial Sequence
  ENSG00000196363_0 (sequence is synthesized)
cctggcgcccgcccgagctgccgccttgtcgagctgagtccgcgctcccgcccaggcggcggccgacgcgacgccccgag

SEQ ID NO: 703614 - DNA, 120 bp, Artificial Sequence
  ENSG00000196363_1 (sequence is synthesized)
ctgtcaccgggtccctccacccttgtctcctgtgcggccagcgtcagagccatggcgacggaggagaagaagcccgagaccgaggccgccagagcacagccaaccccttcgtcatccgcc

SEQ ID NO: 703615 - DNA, 120 bp, Artificial Sequence
  ENSG00000196363_2 (sequence is synthesized)
actcagagcaagcctacacctgtgaagccaaactatgctctaaagttcacccttgctggccacaccaaagcagtgtcctccgtgaaattcagcccgaatggagagtggctggcaagttca

SEQ ID NO: 703616 - DNA, 120 bp, Artificial Sequence
  ENSG00000196363_3 (sequence is synthesized)
tctgctgataaacttattaaaatttggggcgcgtatgatgggaaatttgagaaaaccatatctggtcacaagctgggaatatccgatgtagcctggtcgtcagattctaaccttcttgtt

SEQ ID NO: 703617 - DNA, 120 bp, Artificial Sequence
  ENSG00000196363_4 (sequence is synthesized)
tctgcctcagatgacaaaaccttgaagatatgggacgtgagctcgggcaagtgtctgaaaaccctgaagggacacagtaattatgtcttttgctgcaacttcaatccccagtccaacctt

SEQ ID NO: 703618 - DNA, 120 bp, Artificial Sequence
  ENSG00000196363_5 (sequence is synthesized)
attgtctcaggatcctttgacgaaagcgtgaggatatgggatgtgaaaacagggaagtgcctcaagactttgccagctcactcggatccagtctcggccgttcattttaatcgtgatgga

SEQ ID NO: 703619 - DNA, 120 bp, Artificial Sequence
  ENSG00000196363_6 (sequence is synthesized)
tccttgatagtttcaagtagctatgatggtctctgtcgcatctgggacaccgcctcaggccagtgcctgaagacgctcatcgatgacgacaacccccccgtgtcttttgtgaagttctcc

SEQ ID NO: 703620 - DNA, 120 bp, Artificial Sequence
  ENSG00000196363_7 (sequence is synthesized)
ccgaacggcaaatacatcctggccgccacgctggacaacactctgaagctctgggactacagcaaggggaagtgcctgaagacgtacactggccacaagaatgagaaatactgcatattt

SEQ ID NO: 703621 - DNA, 120 bp, Artificial Sequence
  ENSG00000196363_8 (sequence is synthesized)
gccaatttctctgttactggtgggaagtggattgtgtctggctcagaggataaccttgtttacatctggaaccttcagacgaaagagattgtacagaaactacaaggccacacagatgtc

SEQ ID NO: 703622 - DNA, 120 bp, Artificial Sequence
  ENSG00000196363_9 (sequence is synthesized)
gtgatctcaacagcttgtcacccaacagaaaacatcatcgcctctgctgcgctagaaaatgacaaaacaattaaactgtggaagagtgactgctaagtccctttgctcctgcccgcgaga

SEQ ID NO: 703623 - DNA, 120 bp, Artificial Sequence
  ENSG00000196363_10 (sequence is synthesized)
gactgtcgggaagttgacccggattggcaagaaacagggtgtcttggaggtggtcccccagatctgcgcctgggggtcaggacagggcctgatttgagcctcctctctgaagatgatttg

SEQ ID NO: 703624 - DNA, 120 bp, Artificial Sequence
  ENSG00000196363_11 (sequence is synthesized)
gccgagcggaaggtgtggaccaccggaaagttcttaaaagttgctggtgacatttcttgccaattctaacactgtctagggaagagttcctagtctattgtgttcaaacagagtcaacaa

SEQ ID NO: 703625 - DNA, 120 bp, Artificial Sequence
  ENSG00000196363_12 (sequence is synthesized)
aagtttttaattttttattacagaagggtgaagttcaatttaacatgcgttgtgttttttcagtaaacgttctgtatctttttgatattccatgacccagtgcacgctgtggcctgtcac

SEQ ID NO: 703626 - DNA, 120 bp, Artificial Sequence
  ENSG00000196363_13 (sequence is synthesized)
tttggcccacgccggccgcccccattctctgctgcgtagatgccctggcccagggccctgactcctccattcccgccagtagctgttcctagtgtattttcgtctttctggaaaacagca

SEQ ID NO: 703627 - DNA, 120 bp, Artificial Sequence
  ENSG00000196363_14 (sequence is synthesized)
ttgagtggttgttttctgtgtaaagagccgtttgtgtcttgggagtttgtggcccacatgccgatagcacggtcatcgcacatgactctcccgtttgtctcagtgtccctgcaacaagca

SEQ ID NO: 703628 - DNA, 120 bp, Artificial Sequence
  ENSG00000196363_15 (sequence is synthesized)
gcaccgcagactgtaataaaaggtggggttttgtgaatggttgtggcaagtgcgtccttgtgaagctcgtctccatgtggctttcttggagaaaggctcccctggggcaagagggtggaa

SEQ ID NO: 703629 - DNA, 120 bp, Artificial Sequence
  ENSG00000196363_16 (sequence is synthesized)
ggtttctttggacaggaggtgctgaggctggctgcacctgctctctgaagacgccttcctctctaggttcattgttcagtgttgctgggggcggggaacgggggtggggaggttcttagt

SEQ ID NO: 703630 - DNA, 120 bp, Artificial Sequence
  ENSG00000196363_17 (sequence is synthesized)
tgcgaaggagccaagctcctgatggacttgcgttgggatgtgggggacacctgtggcatggtaaggctccctgagtcccttactccaggtcagatgccagtgggactcatgcgccctatg

SEQ ID NO: 703631 - DNA, 120 bp, Artificial Sequence
  ENSG00000196363_18 (sequence is synthesized)
agggctgcagggccagtgctgcccctcggactcctcgaggggttgggtgctaagcgcgagcctcgccgtccctgctggagccctcgcctgcctgcccctctgcctgtgctcctggcagtg

SEQ ID NO: 703632 - DNA, 120 bp, Artificial Sequence
  ENSG00000196363_19 (sequence is synthesized)
tggcttcccggtgctcacctgcacagcagttaacagcagaggccgagcgggagcctctggggagcgaggctgaaacctgaacctgcccatggagacagttgtggtgagggttgccacaca

SEQ ID NO: 703633 - DNA, 120 bp, Artificial Sequence
  ENSG00000196363_20 (sequence is synthesized)
cagtgagggcggagcagggtggctgagggcacaggtgcctgggtctgtcccacggggcagggctttggggctgtgatgctctgggaagccagcttgggtcctgggtctacagagggccct

SEQ ID NO: 703634 - DNA, 120 bp, Artificial Sequence
  ENSG00000196363_21 (sequence is synthesized)
ggccccggagcccagccagctctgcctctctcagggcctggagtcctgggggagctcagccagctctgcctttctcagggcctggagtcctggatgaatcctgcaggtttttggttgcac

SEQ ID NO: 703635 - DNA, 120 bp, Artificial Sequence
  ENSG00000196363_22 (sequence is synthesized)
cggcccagggaggaagcggggggtttgtcaggtgggctctcctggaggtcctcgagtggcaggggtgaggaggggattatctgaggcatctggagatgtatatcctgtggtttcccctgc

SEQ ID NO: 703636 - DNA, 120 bp, Artificial Sequence
  ENSG00000196363_23 (sequence is synthesized)
ccctctgtttccgatgaggtgtacggatgagtgacctgcactaagaagtgagttgccacagtgaaaatgggttggtttttgtcttcgacgctcagggtctgggcgcctcgcatttgcagt

SEQ ID NO: 703637 - DNA, 120 bp, Artificial Sequence
  ENSG00000196363_24 (sequence is synthesized)
ctgttgtgacagacacggggagctccgcgtgccagcctgtggctgccctgctgtgggggtcctggggccggcgaggccccttcagtcttgttctggggggacggcccactccggggaggg

SEQ ID NO: 703638 - DNA, 120 bp, Artificial Sequence
  ENSG00000196363_25 (sequence is synthesized)
ggtgtgctgtgctgagcgctgtatccctgaatatagtttattttttctacatttgaattctgttgtagatttatgtaaaaatacattctttttgaaaataaaaattttcatgtcttctaa

SEQ ID NO: 703639 - DNA, 120 bp, Artificial Sequence
  ENSG00000196363_26 (sequence is synthesized)
gtgagtttgcgcactgcggagcgggcgcgggtgactccagagcggccctgccagtccgcggggctggcggggagcaggttcgtgcaccgcgggctctgtgcatgcagaggcgggaagagc

SEQ ID NO: 703640 - DNA, 120 bp, Artificial Sequence
  ENSG00000196363_27 (sequence is synthesized)
ccccagcccggcagccggccccgcgggaaggcgcagcccgggcttccgaaccctgtgaacgcgcaggttcctggtcttccagatgggcaggaatcgtcctgcccgcccggggtgggaggc

SEQ ID NO: 703641 - DNA, 120 bp, Artificial Sequence
  ENSG00000196363_28 (sequence is synthesized)
gaggtgccccggcccgaatcgactccggagacaacgccgggcgacgccacctgcgcaggtcccggagggccgctggtgtctgtgtacagggcgtgctgtctgtggaaacgcgagggcaca

SEQ ID NO: 703642 - DNA, 120 bp, Artificial Sequence
  ENSG00000196365_0 (sequence is synthesized)
agtatggccgggctatggcggcgagcactggctacgtgcgactgtggggagcggcgcggtgctgggtgctgcggcggccgatgctggccgccgccggggggcgggttcccactgcagcag

SEQ ID NO: 703643 - DNA, 120 bp, Artificial Sequence
  ENSG00000196365_1 (sequence is synthesized)
gagcgtggttgctccgaggccagcggacctgcgacgcctctcctccttgggcactgtggggccgaggcccggcaattgggggccaatggcgggggttttgggaagcgagcagccgcggcg

SEQ ID NO: 703644 - DNA, 120 bp, Artificial Sequence
  ENSG00000196365_2 (sequence is synthesized)
cgcattctcggggggcgaggacgcctccgagggcggcgcggaggaaggagccggcggcgcggggggcagcgcgggcgccggggaaggcccggtcataacggcgctcacgcccatgacgat

SEQ ID NO: 703645 - DNA, 120 bp, Artificial Sequence
  ENSG00000196365_3 (sequence is synthesized)
cgatccccgatgtgtttccgcacctgccgctcatcgccatcacccgcaacccggtgttcccgcgctttatcaagattatcgaggttaaaaataagaagttggttgagctgctgagaagga

SEQ ID NO: 703646 - DNA, 120 bp, Artificial Sequence
  ENSG00000196365_4 (sequence is synthesized)
aagttcgtctcgcccagccttatgtcggcgtctttctaaagagagatgacagcaatgagtcggatgtggtcgagagcctggatgaaatctaccacacggggacgtttgcccagatccatg

SEQ ID NO: 703647 - DNA, 120 bp, Artificial Sequence
  ENSG00000196365_5 (sequence is synthesized)
agatgcaggaccttggggacaagctgcgcatgatcgtcatgggacacagaagagtccatatcagcagacagctggaggtggagcccgaggagccggaggcggagaacaagcacaagcccc

SEQ ID NO: 703648 - DNA, 120 bp, Artificial Sequence
  ENSG00000196365_6 (sequence is synthesized)
gcaggaagtcaaagcggggcaagaaggaggcggaggacgagctgagcgccaggcacccggcggagctggcgatggagcccacccctgagctcccggctgaggtgctcatggtggaggtag

SEQ ID NO: 703649 - DNA, 120 bp, Artificial Sequence
  ENSG00000196365_7 (sequence is synthesized)
agaacgttgtccacgaggacttccaggtcacggaggaggtgaaagccctgactgcagagatcgtgaagaccatccgggacatcattgccttgaaccctctctacagggagtcagtgctgc

SEQ ID NO: 703650 - DNA, 120 bp, Artificial Sequence
  ENSG00000196365_8 (sequence is synthesized)
agatgatgcaggctggccagcgggtggtggacaaccccatctacctgagcgacatgggcgccgcgctcaccggggccgagtcccatgagctgcaggacgtcctggaagagaccaatattc

SEQ ID NO: 703651 - DNA, 120 bp, Artificial Sequence
  ENSG00000196365_9 (sequence is synthesized)
ctaagcggctgtacaaggccctctccctgctgaagaaggaatttgaactgagcaagctgcagcagcgcctggggcgggaggtggaggagaagatcaagcagacccaccgtaagtacctgc

SEQ ID NO: 703652 - DNA, 120 bp, Artificial Sequence
  ENSG00000196365_10 (sequence is synthesized)
tgcaggagcagctaaagatcatcaagaaggagctgggcctggagaaggacgacaaggatgccatcgaggagaagttccgggagcgcctgaaggagctcgtggtccccaagcacgtcatgg

SEQ ID NO: 703653 - DNA, 120 bp, Artificial Sequence
  ENSG00000196365_11 (sequence is synthesized)
atgttgtggacgaggagctgagcaagctgggcctgctggacaaccactcctcggagttcaatgtcacccgcaactacctagactggctcacgtccatcccttggggcaagtacagcaacg

SEQ ID NO: 703654 - DNA, 120 bp, Artificial Sequence
  ENSG00000196365_12 (sequence is synthesized)
gttagccagctccgcggctccacccagggcaagatcctctgcttctatggcccccctggcgtgggtaagaccagcattgctcgctccatcgcccgcgccctgaaccgagagtacttccgc

SEQ ID NO: 703655 - DNA, 120 bp, Artificial Sequence
  ENSG00000196365_13 (sequence is synthesized)
ttcagcgtcgggggcatgactgacgtggctgagatcaagggccacaggcggacctacgtgggcgccatgcccgggaagatcatccagtgtttgaagaagaccaagacggagaaccccctg

SEQ ID NO: 703656 - DNA, 120 bp, Artificial Sequence
  ENSG00000196365_14 (sequence is synthesized)
atcctcatcgacgaggtggacaagatcggccgaggctaccagggggacccgtcgtcggcactgctggagctgctggacccagagcagaatgccaacttcctggaccactacctggacgtg

SEQ ID NO: 703657 - DNA, 120 bp, Artificial Sequence
  ENSG00000196365_15 (sequence is synthesized)
cccgtggacttgtccaaggtgctgttcatctgcacggccaacgtcacggacaccatccccgagccgctgcgagaccgtatggagatgatcaacgtgtcgggctacgtggcccaggagaag

SEQ ID NO: 703658 - DNA, 120 bp, Artificial Sequence
  ENSG00000196365_16 (sequence is synthesized)
ctggccattgcggagcgctacctggtgccccaggctcgcgccctgtgtggcttggatgagagcaaggccaagctgtcatcggacgtgctgacgctgctcatcaagcagtactgccgcgag

SEQ ID NO: 703659 - DNA, 120 bp, Artificial Sequence
  ENSG00000196365_17 (sequence is synthesized)
agcggtgtccgcaacctgcagaagcaagtggagaaggtgttacggaaatcggcctacaagattgtcagcggcgaggccgagtccgtggaggtgacgcccgagaacctgcaggacttcgtg

SEQ ID NO: 703660 - DNA, 120 bp, Artificial Sequence
  ENSG00000196365_18 (sequence is synthesized)
gggaagcccgtgttcaccgtggagcgcatgtatgacgtgacaccgcccggcgtggtcatggggctggcctggaccgcaatgggaggctccacgctgtttgtggagacatccctgagacgg

SEQ ID NO: 703661 - DNA, 120 bp, Artificial Sequence
  ENSG00000196365_19 (sequence is synthesized)
ccacaggacaaggatgccaagggtgacaaggatggcagcctggaggtgacaggccagctgggggaggtgatgaaggagagcgcccgcatagcctacaccttcgccagagccttcctcatg

SEQ ID NO: 703662 - DNA, 120 bp, Artificial Sequence
  ENSG00000196365_20 (sequence is synthesized)
cagcacgcccccgccaatgactacctggtgacctcacacatccacctgcatgtgcccgagggcgccacccccaaggacggcccaagcgcaggctgcaccatcgtcacggccctgctgtcc

SEQ ID NO: 703663 - DNA, 120 bp, Artificial Sequence
  ENSG00000196365_21 (sequence is synthesized)
ctggccatgggcaggcctgtccggcagaatctggccatgactggcgaagtctccctcacgggcaagatcctgcctgttggtggcatcaaggagaagaccattgcggccaagcgcgcaggg

SEQ ID NO: 703664 - DNA, 120 bp, Artificial Sequence
  ENSG00000196365_22 (sequence is synthesized)
gtgacgtgcatcgtcctgccagccgagaacaagaaggacttctacgacctggcagccttcatcaccgagggcctggaggtgcacttcgtggaacactaccgggagatcttcgacatcgcc

SEQ ID NO: 703665 - DNA, 120 bp, Artificial Sequence
  ENSG00000196365_23 (sequence is synthesized)
ttcccggacgagcaggcagaggcgctggccgtggaacggtgacggccaccccgggactgcaggcggcggatgtcaggccctgtctgggccagaactgagcgctgtggggagcgcgcccgg

SEQ ID NO: 703666 - DNA, 120 bp, Artificial Sequence
  ENSG00000196365_24 (sequence is synthesized)
acctggcagtggagccaccgagcgagcagctcggtccagtgacccagatcccagggacctcagtcggcttaatcagagtgtggcatagaagctatttaatgattaaagtcatttgcagta

SEQ ID NO: 703667 - DNA, 80 bp, Artificial Sequence
  ENSG00000196365_25 (sequence is synthesized)
agtatggccgggctatggcggcgagcactggctacgtgcgactgtggggagcggcgcggtgctgggtgctgcggcggccg

SEQ ID NO: 703668 - DNA, 120 bp, Artificial Sequence
  ENSG00000196365_26 (sequence is synthesized)
gaggatgctgcatgcctttccagcccaggacgggtgggccctgaactctggagaacaagcagcagagctggctcccagcgagcacccctagaccgtgcccatagctacaggggacaggga

SEQ ID NO: 703669 - DNA, 120 bp, Artificial Sequence
  ENSG00000196365_27 (sequence is synthesized)
gatgatgcaggctggccagcgggtggtggacaaccccatctacctgagcgacatgggcgccgcgctcaccggggccgagtcccatgagctgcaggacgtcctggaagagaccaatgtgga

SEQ ID NO: 703670 - DNA, 120 bp, Artificial Sequence
  ENSG00000196365_28 (sequence is synthesized)
agacgaatcccgggaagcccgaatccgcgcaccccaaagtgcgctcagagcctgagtatgcgcacccggccacccgtggccagtctagagtctgagcatgcgcatgttgtccgcgcgcct

SEQ ID NO: 703671 - DNA, 120 bp, Artificial Sequence
  ENSG00000196365_29 (sequence is synthesized)
aagcatgtgcacaggctgctcatgagttcctaaacgttgcgtttgcaacactaccagtgttttgtacgggcgctggcgcctgctcacagccttccacgtgaccggaaaaggccttcagcg

SEQ ID NO: 703672 - DNA, 120 bp, Artificial Sequence
  ENSG00000196365_30 (sequence is synthesized)
cataaagtgggagaccggaagaggcggagacgatccgatgctcgaactccgccccctcttctccgcgtaggcccagctccctgaagcggctgtttcgagccacgcgcccatcgggttaaa

SEQ ID NO: 703673 - DNA, 120 bp, Artificial Sequence
  ENSG00000196365_31 (sequence is synthesized)
gattagtatccaggatgcggatcagcatgtccccagagaataatctacacagcgttagagcggctctgctgtcaaaaaatgtcagctacaaaagctaccctgggaggccgggcgtggtag

SEQ ID NO: 703674 - DNA, 120 bp, Artificial Sequence
  ENSG00000196365_32 (sequence is synthesized)
tcatcaggcctggtcccctccgttctgcagagcgacagatgccccttgctcccggtgcctgagcagagagatgattcttctaagagagttcagacggcccacgtggagctagccaggaga

SEQ ID NO: 703675 - DNA, 120 bp, Artificial Sequence
  ENSG00000196365_33 (sequence is synthesized)
gttaaatgagtggctgcagatagtatttgggagactggcaggtggttctcattgtatttctggttgatgatgcattgtaaatcataaaaatggatcctgccaaggccaggaggcagatgc

SEQ ID NO: 703676 - DNA, 120 bp, Artificial Sequence
  ENSG00000196365_34 (sequence is synthesized)
ttaaaaaatggaggaaagaaaacacagtctctttttttcccctgagatagcttatcctaaggacaaggctctgaggggtaaggagacagggtttggttttagttttgactctcttggtcc

SEQ ID NO: 703677 - DNA, 120 bp, Artificial Sequence
  ENSG00000196365_35 (sequence is synthesized)
gttggcggaggggagggagttgatggagctggtgggtggggctcccagggccatgctcccacccagcccaccccctgctggagcactgctgggccccagcgaccctgccccatacttggc

SEQ ID NO: 703678 - DNA, 120 bp, Artificial Sequence
  ENSG00000196365_36 (sequence is synthesized)
cctcatcgacgaggtgcgtgcggagaggcccggagaccccctaacccggcaatgccgtgtgcaagatgaagccgagccttccgggtcctaggatccccgagccaactcaggggccatcgc

SEQ ID NO: 703679 - DNA, 120 bp, Artificial Sequence
  ENSG00000196365_37 (sequence is synthesized)
caggctgcccgtccaaggcagggtgtgggtgccgctctcactcggggtctccccagccctgaccctggggtctccccactgggcgggctggccaggggcacggcgaggggcaccacctgc

SEQ ID NO: 703680 - DNA, 120 bp, Artificial Sequence
  ENSG00000196365_38 (sequence is synthesized)
gtcatgggacacagaagggaggcctcagccgggtccagctcccagcctcagcggctgattcacacctgccttgctcccgtgtcagagtccatatcagcagacagctggaggtggagcccg

SEQ ID NO: 703681 - DNA, 80 bp, Artificial Sequence
  ENSG00000196367_0 (sequence is synthesized)
cgcgccggggcctggtgctcggtcggcgggtgctgccgctttaagcgggggcgggactgcgcgcggccgagcggttgcga

SEQ ID NO: 703682 - DNA, 120 bp, Artificial Sequence
  ENSG00000196367_1 (sequence is synthesized)
ctgcaggagccgggccgccgaggtcggggctggttgaactcatggacctgatacttttctcttgagaagcaaaccagcccaaaagaaaaatggcgtttgttgcaacacagggggccacgg

SEQ ID NO: 703683 - DNA, 120 bp, Artificial Sequence
  ENSG00000196367_2 (sequence is synthesized)
tggttgaccagaccactttgatgaaaaagtaccttcagtttgtggcagctctcacagatgtgaatacacctgatgaaacaaagttgaaaatgatgcaagaagttagtgaaaattttgaga

SEQ ID NO: 703684 - DNA, 120 bp, Artificial Sequence
  ENSG00000196367_3 (sequence is synthesized)
atgtcacgtcatctcctcagtattctacattcctagaacatatcatccctcgattccttacatttctccaagatggagaagttcagtttcttcaggagaaaccagcacagcaactgcgga

SEQ ID NO: 703685 - DNA, 120 bp, Artificial Sequence
  ENSG00000196367_4 (sequence is synthesized)
agctcgtacttgaaataattcatagaataccaaccaacgaacatcttcgtcctcacacaaaaaatgttttgtctgtgatgtttcgctttttagagacggaaaatgaagaaaatgttctta

SEQ ID NO: 703686 - DNA, 120 bp, Artificial Sequence
  ENSG00000196367_5 (sequence is synthesized)
tttgtctaagaataattattgagctacacaaacagttcaggccaccgatcacacaagaaattcatcattttctggattttgtgaaacagatttacaaggagcttccaaaagtagtgaacc

SEQ ID NO: 703687 - DNA, 120 bp, Artificial Sequence
  ENSG00000196367_6 (sequence is synthesized)
gctactttgagaaccctcaagtgatccccgagaacacagtgcctcccccagaaatggttggtatgataacaacgattgctgtgaaagtcaacccggagcgtgaggacagtgagactcgaa

SEQ ID NO: 703688 - DNA, 120 bp, Artificial Sequence
  ENSG00000196367_7 (sequence is synthesized)
cacattccatcattccgaggggatcactttctctgaaagtgttggcagaattgcccattattgttgttttaatgtatcagctctacaaactgaacatccacaatgttgttgctgagtttg

SEQ ID NO: 703689 - DNA, 120 bp, Artificial Sequence
  ENSG00000196367_8 (sequence is synthesized)
tgcccttgatcatgaacaccattgccattcaggtgtctgcacaagcgaggcaacataagctttacaacaaggagttgtatgctgacttcattgctgctcagattaaaacattgtcatttt

SEQ ID NO: 703690 - DNA, 120 bp, Artificial Sequence
  ENSG00000196367_9 (sequence is synthesized)
tagcttacattatcaggatttaccaggagttggtgactaagtattctcagcagatggtgaaaggaatgctccagttactttcaaattgtccagcagagactgcacacctcagaaaggagc

SEQ ID NO: 703691 - DNA, 120 bp, Artificial Sequence
  ENSG00000196367_10 (sequence is synthesized)
ttctgattgctgccaaacacatcctcaccacagagctgagaaaccagttcattccttgcatggacaagctgtttgatgaatccatactaattggctcaggatatactgccagagagactc

SEQ ID NO: 703692 - DNA, 120 bp, Artificial Sequence
  ENSG00000196367_11 (sequence is synthesized)
taaggcccctcgcctacagcacgctggccgacctcgtgcaccatgtccgccagcacctgcccctcagcgacctctccctcgccgtccagctcttcgccaagaacatcgacgatgagtccc

SEQ ID NO: 703693 - DNA, 120 bp, Artificial Sequence
  ENSG00000196367_12 (sequence is synthesized)
tgcccagcagcatccagaccatgtcctgcaagctcctgctgaacctggtggactgcatccgttccaagagcgagcaggagagtggcaatgggagagacgtcctgatgcggatgctggagg

SEQ ID NO: 703694 - DNA, 120 bp, Artificial Sequence
  ENSG00000196367_13 (sequence is synthesized)
ttttcgttctcaaattccacacaattgctcggtaccagctctctgccatttttaagaagtgtaagcctcagtcagaacttggagccgtggaagcagctctgcctggggtgcccactgccc

SEQ ID NO: 703695 - DNA, 120 bp, Artificial Sequence
  ENSG00000196367_14 (sequence is synthesized)
ctgcagctcctggccctgctccctccccagcccctgtccctgccccacctccacccccgcccccacccccacctgccacccctgtgaccccggcccccgtgcctcccttcgagaagcaag

SEQ ID NO: 703696 - DNA, 120 bp, Artificial Sequence
  ENSG00000196367_15 (sequence is synthesized)
gagaaaaggacaaggaagacaagcagacattccaagtcacagactgtcgaagtttggtcaaaaccttggtgtgtggtgtcaagacaatcacgtggggcataacatcatgcaaagcacctg

SEQ ID NO: 703697 - DNA, 120 bp, Artificial Sequence
  ENSG00000196367_16 (sequence is synthesized)
gtgaagctcagttcattcccaacaagcagttacaacccaaagagacacagatttacatcaaacttgtgaaatatgcaatgcaagctttagatatttatcaggtccagatagcaggaaatg

SEQ ID NO: 703698 - DNA, 120 bp, Artificial Sequence
  ENSG00000196367_17 (sequence is synthesized)
gacagacatacatccgtgtggccaactgccagactgtgagaatgaaagaggagaaggaggtattggagcatttcgctggtgtgttcacaatgatgaaccccttaacgttcaaagaaatct

SEQ ID NO: 703699 - DNA, 120 bp, Artificial Sequence
  ENSG00000196367_18 (sequence is synthesized)
tccaaactacggtcccttatatggtggagagaatctcaaaaaattatgctcttcagattgttgccaattccttcttggcaaatcctactacctctgctctgtttgctacgattctggtgg

SEQ ID NO: 703700 - DNA, 120 bp, Artificial Sequence
  ENSG00000196367_19 (sequence is synthesized)
aatatctccttgatcgcctgccagaaatgggctccaacgtggagctctccaacctgtacctcaagctgttcaagctggtctttggctctgtctccctctttgcagctgaaaatgaacaaa

SEQ ID NO: 703701 - DNA, 120 bp, Artificial Sequence
  ENSG00000196367_20 (sequence is synthesized)
tgctgaagcctcacttgcacaagattgtgaacagctctatggagctcgcgcagactgccaaggaaccctacaactacttcttgctgctacgggcgctgtttcgctctattggtggaggta

SEQ ID NO: 703702 - DNA, 120 bp, Artificial Sequence
  ENSG00000196367_21 (sequence is synthesized)
gccacgatctcttgtatcaggagttcttgcctctccttccaaacctcctgcaagggctgaacatgcttcagagtggcctgcacaagcagcacatgaaggacctctttgtggagctgtgtc

SEQ ID NO: 703703 - DNA, 120 bp, Artificial Sequence
  ENSG00000196367_22 (sequence is synthesized)
tcaccgtccctgtgcggctgagctcgcttttgccgtacctgcccatgcttatggatcccttggtgtctgcactcaatgggtctcagacattggtcagccaaggcctcaggacgctggagc

SEQ ID NO: 703704 - DNA, 120 bp, Artificial Sequence
  ENSG00000196367_23 (sequence is synthesized)
tgtgtgtggacaacctgcagcccgacttcctctacgaccacatccagccggtgcgcgcagagctcatgcaggctctgtggcgcaccttacgcaaccctgctgacagcatctcccacgtgg

SEQ ID NO: 703705 - DNA, 120 bp, Artificial Sequence
  ENSG00000196367_24 (sequence is synthesized)
cctaccgtgtgctcggtaagtttggcggcagtaacaggaagatgctgaaggagtcgcagaagctgcactacgttgtgaccgaggttcagggccccagcatcactgtggagttttccgact

SEQ ID NO: 703706 - DNA, 120 bp, Artificial Sequence
  ENSG00000196367_25 (sequence is synthesized)
gcaaagcttctctccagctccccatggagaaggccattgaaactgctctggactgcctgaaaagcgccaacactgagccctactaccggaggcaggcgtgggaagtgatcaaatgcttcc

SEQ ID NO: 703707 - DNA, 120 bp, Artificial Sequence
  ENSG00000196367_26 (sequence is synthesized)
tggtggccatgatgagcctggaggacaacaagcacgcactctaccagctcctggcacaccccaactttacagaaaagaccatccccaatgttatcatctcacatcgctacaaagcccagg

SEQ ID NO: 703708 - DNA, 120 bp, Artificial Sequence
  ENSG00000196367_27 (sequence is synthesized)
acactccagcccggaagacttttgagcaggccctgacaggcgccttcatgtctgctgtcattaaggacctgcggcccagcgccctgccctttgtcgccagcttgatccgccactatacga

SEQ ID NO: 703709 - DNA, 120 bp, Artificial Sequence
  ENSG00000196367_28 (sequence is synthesized)
tggtggcagtcgcccagcagtgtggccctttcttgctgccttgctaccaggtgggcagccagcccagcacagccatgtttcacagtgaagaaaatggctcgaaaggaatggatcctttgg

SEQ ID NO: 703710 - DNA, 120 bp, Artificial Sequence
  ENSG00000196367_29 (sequence is synthesized)
ttctcattgatgcaattgctatttgtatggcatatgaagaaaaggagctttgcaaaatcggggaggtggccctagctgtgatatttgatgttgcaagtatcatcctgggctccaaggaga

SEQ ID NO: 703711 - DNA, 120 bp, Artificial Sequence
  ENSG00000196367_30 (sequence is synthesized)
gggcctgccagctgcccctgttttcttacatcgtggagcgcctgtgtgcatgttgttatgaacaggcgtggtatgcaaagctggggggtgtggtgtctattaagtttctcatggagcggc

SEQ ID NO: 703712 - DNA, 120 bp, Artificial Sequence
  ENSG00000196367_31 (sequence is synthesized)
tgcctctcacttgggttctccagaaccagcagacattcctgaaagcacttctctttgtcatgatggacttaactggagaggtttccaatggggcagtcgctatggcaaagaccacgctgg

SEQ ID NO: 703713 - DNA, 120 bp, Artificial Sequence
  ENSG00000196367_32 (sequence is synthesized)
agcagcttctgatgcggtgcgcaacgcctttaaaagacgaggagagagccgaagagatcgtggccgcccaggaaaagtctttccaccatgtgacacacgacttggttcgagaagtcacct

SEQ ID NO: 703714 - DNA, 120 bp, Artificial Sequence
  ENSG00000196367_33 (sequence is synthesized)
ctccaaactccactgtgaggaagcaggccatgcattcgctgcaggtgttggcccaggtcactgggaagagtgtcacggtgatcatggaaccccacaaagaggtcctgcaggatatggtcc

SEQ ID NO: 703715 - DNA, 120 bp, Artificial Sequence
  ENSG00000196367_34 (sequence is synthesized)
cccctaagaagcacctgctccgacaccagcctgccaacgcacagattggcctgatggaggggaacacgttctgtaccacgttgcagcccaggctcttcacaatggaccttaacgtggtgg

SEQ ID NO: 703716 - DNA, 120 bp, Artificial Sequence
  ENSG00000196367_35 (sequence is synthesized)
agcataaggtgttctacacagagctgttgaatttgtgtgaggctgaagattcagctttaacaaagctgccctgttataaaagccttccgtcactcgtacctttacgaattgcggcattaa

SEQ ID NO: 703717 - DNA, 120 bp, Artificial Sequence
  ENSG00000196367_36 (sequence is synthesized)
atgcacttgctgcctgcaattaccttcctcagtccagggagaaaatcatcgctgcactcttcaaagccctgaattccaccaatagtgagctccaagaggccggagaagcctgtatgagaa

SEQ ID NO: 703718 - DNA, 120 bp, Artificial Sequence
  ENSG00000196367_37 (sequence is synthesized)
agtttttagaaggtgctaccatagaagtcgatcaaatccacacacatatgcgacctttgctgatgatgctgggagattaccggagcttgacgctgaatgttgtgaatcgcctgacttcgg

SEQ ID NO: 703719 - DNA, 120 bp, Artificial Sequence
  ENSG00000196367_38 (sequence is synthesized)
tcacgaggctcttcccaaattccttcaatgataaattttgtgatcagatgatgcaacatctgcgcaagtggatggaagtggtggtgatcacccacaaagggggccagaggagcgacggaa

SEQ ID NO: 703720 - DNA, 120 bp, Artificial Sequence
  ENSG00000196367_39 (sequence is synthesized)
acgaaatgaagatttgctcagcaattataaacctttttcatctgatcccggctgctcctcagacactggtgaagcctttgctagaggttgtcatgaaaacggagcgggcgatgctgatcg

SEQ ID NO: 703721 - DNA, 120 bp, Artificial Sequence
  ENSG00000196367_40 (sequence is synthesized)
aggcggggagtccattccgagagcccctgatcaagttcctgactcgacatccctcgcagacagtggagctgttcatgatggaagccacactgaacgatccccagtggagcagaatgttta

SEQ ID NO: 703722 - DNA, 120 bp, Artificial Sequence
  ENSG00000196367_41 (sequence is synthesized)
tgagttttttaaaacacaaagacgccagacctctgcgggatgtgctggctgccaaccccaacaggttcatcaccctgctgctgccggggggtgcccagacggctgtgcgccccggttcgc

SEQ ID NO: 703723 - DNA, 120 bp, Artificial Sequence
  ENSG00000196367_42 (sequence is synthesized)
ccagcaccagcaccatgcgcctggacctccagttccaggccatcaagatcataagcattatagtgaaaaacgatgactcctggctggccagccagcactctctggtgagccagttgcgac

SEQ ID NO: 703724 - DNA, 120 bp, Artificial Sequence
  ENSG00000196367_43 (sequence is synthesized)
gtgtgtgggtgagtgagaacttccaagagaggcaccgcaaggagaacatggcagccaccaactggaaggagcccaagctgctggcctactgcctgctgaactactgcaaaaggaattacg

SEQ ID NO: 703725 - DNA, 120 bp, Artificial Sequence
  ENSG00000196367_44 (sequence is synthesized)
gagatatagaattgctgttccagctgctccgagcctttactggtcgttttctctgcaacatgacattcttaaaagagtatatggaggaagagattcccaaaaattacagcatcgctcaga

SEQ ID NO: 703726 - DNA, 120 bp, Artificial Sequence
  ENSG00000196367_45 (sequence is synthesized)
aacgtgccctgttctttcgctttgtagacttcaacgaccccaacttcggagatgaattaaaagctaaagttctgcagcatatcttgaatcctgctttcttgtacagctttgagaaggggg

SEQ ID NO: 703727 - DNA, 120 bp, Artificial Sequence
  ENSG00000196367_46 (sequence is synthesized)
aaggagagcagctcttgggacctcccaatccagaaggagataacccagaaagcatcaccagtgtgtttattaccaaggtcctggaccccgagaagcaggcggacatgctggactcgctgc

SEQ ID NO: 703728 - DNA, 120 bp, Artificial Sequence
  ENSG00000196367_47 (sequence is synthesized)
ggatctacctgctgcagtacgccacgctgctggtggagcacgccccccaccacatccatgacaacaacaagaaccgcaacagcaagctgcgccgcctcatgaccttcgcctggccctgcc

SEQ ID NO: 703729 - DNA, 120 bp, Artificial Sequence
  ENSG00000196367_48 (sequence is synthesized)
tgctctccaaggcctgcgtggacccagcctgcaagtacagcggacacttgctcctggcgcacattatcgccaaattcgccatacacaagaagatcgtcctgcaggtttttcatagtctcc

SEQ ID NO: 703730 - DNA, 120 bp, Artificial Sequence
  ENSG00000196367_49 (sequence is synthesized)
tcaaggctcacgcaatggaagctcgagcgatcgtcagacaggcgatggccattctgaccccggcggtgccggccaggatggaggacgggcaccagatgctgacccactggacccggaaga

SEQ ID NO: 703731 - DNA, 120 bp, Artificial Sequence
  ENSG00000196367_50 (sequence is synthesized)
tcattgtggaggaggggcacaccgtcccgcagctggtccacattctgcacctgatagtgcaacacttcaaggtgtactacccggtacggcaccacttggtgcagcacatggtgagcgcca

SEQ ID NO: 703732 - DNA, 120 bp, Artificial Sequence
  ENSG00000196367_51 (sequence is synthesized)
tgcagaggctgggcttcacgcccagtgtcaccatcgagcagaggcggctggccgtggacctgtctgaagtcgtcatcaagtgggagctgcagaggatcaaggaccagcagccggattcag

SEQ ID NO: 703733 - DNA, 120 bp, Artificial Sequence
  ENSG00000196367_52 (sequence is synthesized)
ggagccatcagtgcagtctttgggaggagccagtcgctacctggagcagactctctcctcgccaagcccattgacaagcagcacacagacactgtggtgaacttccttatccgcgtggcc

SEQ ID NO: 703734 - DNA, 120 bp, Artificial Sequence
  ENSG00000196367_53 (sequence is synthesized)
tgtcaggttaatgacaacaccaacacagcggggtcccctggggaggtgctctctcgccggtgtgtgaaccttctgaagactgcgttgcggccagacatgtggcccaagtccgaactcaag

SEQ ID NO: 703735 - DNA, 120 bp, Artificial Sequence
  ENSG00000196367_54 (sequence is synthesized)
ctgcagtggttcgacaagctgctgatgactgtggagcagccaaaccaagtgaactatgggaatatctgcacgggcctagaagtgctgagcttcctgctaactgtcctccagtccccagcc

SEQ ID NO: 703736 - DNA, 120 bp, Artificial Sequence
  ENSG00000196367_55 (sequence is synthesized)
atcctcagtagcttcaaacctctgcagcgtggaattgccgcctgcatgacatgtggaaacaccaaggtgttgcgagccgtccacagccttctctcgcgcctgatgagcattttcccaaca

SEQ ID NO: 703737 - DNA, 120 bp, Artificial Sequence
  ENSG00000196367_56 (sequence is synthesized)
gagccgagtacttccagtgtggcctccaaatatgaagagctggagtgcctctacgcagccgtcggaaaggtcatctatgaagggctcaccaactacgagaaggccaccaatgccaatccc

SEQ ID NO: 703738 - DNA, 120 bp, Artificial Sequence
  ENSG00000196367_57 (sequence is synthesized)
tcccagctcttcgggacccttatgatcctcaagtctgcctgcagcaacaaccccagctacatagacaggctgatctccgtctttatgcgctccctgcagaagatggtccgggagcattta

SEQ ID NO: 703739 - DNA, 120 bp, Artificial Sequence
  ENSG00000196367_58 (sequence is synthesized)
aaccctcaggcagcgtcaggaagcaccgaagccacctcaggtacaagcgagctggtgatgctgagtctggagctggtgaagacgcgcctggcagtgatgagcatggagatgcggaagaac

SEQ ID NO: 703740 - DNA, 120 bp, Artificial Sequence
  ENSG00000196367_59 (sequence is synthesized)
ttcatccaggccatcctgacatccctcatcgaaaaatcaccagatgccaaaatcctccgggctgtggtcaaaatcgtggaagaatgggtcaagaataactccccaatggcagccaatcag

SEQ ID NO: 703741 - DNA, 120 bp, Artificial Sequence
  ENSG00000196367_60 (sequence is synthesized)
acacctacactccgggagaagtccattttgcttgtgaagatgatgacttacatagaaaaacgctttccggaagaccttgaattaaatgcccagtttttagatcttgttaactatgtctac

SEQ ID NO: 703742 - DNA, 120 bp, Artificial Sequence
  ENSG00000196367_61 (sequence is synthesized)
agggatgagaccctctctggcagcgagctgacggcgaaacttgagcctgcctttctctctgggctgcgctgtgcccagccactcatcagggcaaagtttttcgaggtttttgacaactcc

SEQ ID NO: 703743 - DNA, 120 bp, Artificial Sequence
  ENSG00000196367_62 (sequence is synthesized)
atgaaacgtcgtgtctacgagcgcttgctctatgtgacctgttcgcagaactgggaagccatggggaaccacttctggatcaagcagtgcattgagctgcttctggccgtgtgtgagaag

SEQ ID NO: 703744 - DNA, 120 bp, Artificial Sequence
  ENSG00000196367_63 (sequence is synthesized)
agcacccccattggcaccagctgccaaggagccatgctcccgtccatcaccaacgtcatcaacctggccgatagccacgaccgtgccgccttcgccatggtcacacatgtcaagcaggag

SEQ ID NO: 703745 - DNA, 120 bp, Artificial Sequence
  ENSG00000196367_64 (sequence is synthesized)
ccccgggagcgggagaacagcgagtccaaagaggaggatgtagagatagacatcgaactagctcctggggatcagaccagcacgcccaaaaccaaagaactttcagaaaaggacattgga

SEQ ID NO: 703746 - DNA, 120 bp, Artificial Sequence
  ENSG00000196367_65 (sequence is synthesized)
aaccagctgcacatgctaaccaacaggcacgacaagtttctggacactctccgagaggtgaagactggagcgctgctcagcgctttcgttcagctgtgccacatttccacgacgctggca

SEQ ID NO: 703747 - DNA, 120 bp, Artificial Sequence
  ENSG00000196367_66 (sequence is synthesized)
gagaagacgtgggtccagcttttccccagattgtggaagatcctctctgacagacagcagcatgcactcgcgggtgagataagtccatttctgtgcagcggcagtcaccaggtgcagcgg

SEQ ID NO: 703748 - DNA, 120 bp, Artificial Sequence
  ENSG00000196367_67 (sequence is synthesized)
gactgccagcccagcgcgctgaactgctttgtggaagccatgtcccagtgcgtgccgccaatccccatccgaccctgcgtcctgaagtacctggggaagacacacaacctctggttccgg

SEQ ID NO: 703749 - DNA, 120 bp, Artificial Sequence
  ENSG00000196367_68 (sequence is synthesized)
tccacgctgatgttggagcaccaggcttttgaaaagggtctgagtcttcagattaagccgaagcaaacaacggagttttatgagcaggagagcatcaccccgccgcagcaggagatactg

SEQ ID NO: 703750 - DNA, 120 bp, Artificial Sequence
  ENSG00000196367_69 (sequence is synthesized)
gattcccttgcggagctttactccctgttacaagaggaagatatgtgggctggtctgtggcagaagcggtgcaagtactcggagacagcgactgcgattgcttacgagcagcacgggttc

SEQ ID NO: 703751 - DNA, 120 bp, Artificial Sequence
  ENSG00000196367_70 (sequence is synthesized)
tttgagcaggcacaagaatcctatgaaaaggcaatggataaagccaaaaaagaacatgagaggagtaacgcctcccctgctattttccctgaataccagctctgggaagaccactggatt

SEQ ID NO: 703752 - DNA, 120 bp, Artificial Sequence
  ENSG00000196367_71 (sequence is synthesized)
cgatgctccaaggaattgaaccagtgggaagccctgacggagtacggtcagtccaaaggccacatcaacccctacctcgtcctggagtgcgcctggcgggtgtccaactggactgccatg

SEQ ID NO: 703753 - DNA, 120 bp, Artificial Sequence
  ENSG00000196367_72 (sequence is synthesized)
aaggaggcgctggtgcaggtggaagtgagctgtccgaaggagatggcctggaaggtgaacatgtaccgcggatacctggccatctgccaccccgaggagcagcagctcagcttcatcgag

SEQ ID NO: 703754 - DNA, 120 bp, Artificial Sequence
  ENSG00000196367_73 (sequence is synthesized)
cgcctggtggagatggccagcagcctggccatccgcgagtggcggcggctgccccacgtagtgtcccacgtgcacacgcctctcctacaggcagcccagcaaatcatcgaactccaggaa

SEQ ID NO: 703755 - DNA, 120 bp, Artificial Sequence
  ENSG00000196367_74 (sequence is synthesized)
gctgcacaaatcaacgcaggcttacagccaaccaacctgggaaggaacaacagcctgcacgacatgaagacggtggtgaagacctggaggaaccgactgcccatcgtgtctgacgacttg

SEQ ID NO: 703756 - DNA, 120 bp, Artificial Sequence
  ENSG00000196367_75 (sequence is synthesized)
tcccactggagcagcatcttcatgtggaggcagcatcattaccaggcgattgtaactgcctatgagaatagctctcagcatgatcccagttcaaataacgctatgcttggggttcatgca

SEQ ID NO: 703757 - DNA, 120 bp, Artificial Sequence
  ENSG00000196367_76 (sequence is synthesized)
tcagcttcagcgatcatccagtatggaaaaatcgcccggaaacaaggactggtcaatgtagctctggatatattaagtcggattcatactattccaactgttcctatcgtggattgcttc

SEQ ID NO: 703758 - DNA, 120 bp, Artificial Sequence
  ENSG00000196367_77 (sequence is synthesized)
cagaagattcgacagcaagttaaatgctacctccagctggcaggcgtcatgggcaaaaacgagtgcatgcagggccttgaagttattgaatctacaaatttaaaatacttcacaaaagag

SEQ ID NO: 703759 - DNA, 120 bp, Artificial Sequence
  ENSG00000196367_78 (sequence is synthesized)
atgacagccgaattttatgcactgaagggaatgttcttggctcagatcaacaagtccgaggaggcaaacaaagccttctctgcagctgtgcagatgcacgatgtgctggtgaaagcctgg

SEQ ID NO: 703760 - DNA, 120 bp, Artificial Sequence
  ENSG00000196367_79 (sequence is synthesized)
gccatgtggggcgactacctggagaacatctttgtgaaggagcggcagctgcacctgggcgtgtctgccatcacctgctacctgcacgcctgccggcatcagaacgagagcaaatcgagg

SEQ ID NO: 703761 - DNA, 120 bp, Artificial Sequence
  ENSG00000196367_80 (sequence is synthesized)
aaatacttagccaaggtgctgtggcttttgagttttgatgatgacaaaaacactttggcagatgccgtcgacaagtactgcattggtgtgccacccatccagtggctggcctggatccca

SEQ ID NO: 703762 - DNA, 120 bp, Artificial Sequence
  ENSG00000196367_81 (sequence is synthesized)
cagctgctcacctgcctggttggctcggagggaaagctgctcttgaacctcattagccaggttggacgcgtgtatccccaagcggtctactttcccatccggaccctgtacctgaccctg

SEQ ID NO: 703763 - DNA, 120 bp, Artificial Sequence
  ENSG00000196367_82 (sequence is synthesized)
aaaatagaacagcgggaacgctacaagagcgatccagggcccataagagcaacagcacccatgtggcgctgcagccgaatcatgcacatgcagcgagagctccaccccacccttctgtct

SEQ ID NO: 703764 - DNA, 120 bp, Artificial Sequence
  ENSG00000196367_83 (sequence is synthesized)
tccctggaaggcatcgtcgatcagatggtctggttcagagaaaattggcatgaagaggttctcaggcagctccaacagggcctggcgaaatgttactccgtggcgtttgagaaaagtgga

SEQ ID NO: 703765 - DNA, 120 bp, Artificial Sequence
  ENSG00000196367_84 (sequence is synthesized)
gcggtgtccgatgctaaaatcaccccccacactctcaattttgtgaagaagttggtgagcacgtttggggtgggcctggagaatgtgtccaacgtctcgaccatgttctccagcgcagcc

SEQ ID NO: 703766 - DNA, 120 bp, Artificial Sequence
  ENSG00000196367_85 (sequence is synthesized)
tctgagtctctggcccggcgggcgcaggccactgcacaagaccctgtctttcagaagctgaaaggccagttcacgacggattttgacttcagcgttccaggatccatgaagcttcataat

SEQ ID NO: 703767 - DNA, 120 bp, Artificial Sequence
  ENSG00000196367_86 (sequence is synthesized)
cttatttctaagttgaaaaagtggatcaaaatcttggaggccaagaccaagcaactccccaaattcttcctcatagaggaaaagtgccggttcttgagcaatttctcggcacagacagct

SEQ ID NO: 703768 - DNA, 120 bp, Artificial Sequence
  ENSG00000196367_87 (sequence is synthesized)
gaagtggaaattcctggggagtttctgatgccaaagccaacgcattattacatcaagattgcacggttcatgccccgggtagagattgtgcagaagcacaacaccgcagcccggcggctg

SEQ ID NO: 703769 - DNA, 120 bp, Artificial Sequence
  ENSG00000196367_88 (sequence is synthesized)
tacatccggggacacaatggcaagatctacccatacctcgtcatgaacgacgcctgcctcacagagtcacggcgagaggagcgtgtgttgcagctgctgcgtctgctgaacccctgtttg

SEQ ID NO: 703770 - DNA, 120 bp, Artificial Sequence
  ENSG00000196367_89 (sequence is synthesized)
gagaagagaaaggagaccaccaagaggcacttgtttttcacagtgccccgggttgtggcagtttccccacagatgcgcctcgtggaggacaacccctcttcactttcccttgtggagatc

SEQ ID NO: 703771 - DNA, 120 bp, Artificial Sequence
  ENSG00000196367_90 (sequence is synthesized)
tacaagcagcgctgcgccaagaagggcatcgagcatgacaaccccatctcccgttactatgaccggctggctacggtgcaggcgcggggaacccaagccagccaccaggtcctccgcgac

SEQ ID NO: 703772 - DNA, 120 bp, Artificial Sequence
  ENSG00000196367_91 (sequence is synthesized)
atcctcaaggaggttcagagtaacatggtgccgcgcagcatgctcaaggagtgggcgctgcacaccttccccaatgccacggactactggacgttccggaagatgttcaccatccagctg

SEQ ID NO: 703773 - DNA, 120 bp, Artificial Sequence
  ENSG00000196367_92 (sequence is synthesized)
gctctgataggcttcgcggaattcgtcctgcatttaaatagactcaaccccgagatgttacagatcgctcaggacactggcaaactgaatgttgcctactttcgatttgacataaacgac

SEQ ID NO: 703774 - DNA, 120 bp, Artificial Sequence
  ENSG00000196367_93 (sequence is synthesized)
gcgactggagacctggatgccaaccgtcctgtcccatttcgactcacgcccaacatttctgagtttctgaccaccatcggggtctccggcccgttgacagcgtccatgattgcggtcgcc

SEQ ID NO: 703775 - DNA, 120 bp, Artificial Sequence
  ENSG00000196367_94 (sequence is synthesized)
cggtgcttcgcccagccaaactttaaggtggatggcattctgaaaacggttctccgggacgagatcattgcttggcacaaaaaaacacaagaggacacgtcctctcctctctcggccgcc

SEQ ID NO: 703776 - DNA, 120 bp, Artificial Sequence
  ENSG00000196367_95 (sequence is synthesized)
gggcagccagagaacatggacagccagcaactggtgtccctggttcagaaagccgtcaccgccatcatgacccgcctgcacaacctcgcccagttcgaaggcggggaaagcaaggtgaac

SEQ ID NO: 703777 - DNA, 120 bp, Artificial Sequence
  ENSG00000196367_96 (sequence is synthesized)
accctggtggccgcggcaaacagcctggacaatctgtgccgcatggaccccgcctggcacccctggctgtgactgtggccgccacggccacccggaatgtgaagggcgctccgggctctg

SEQ ID NO: 703778 - DNA, 120 bp, Artificial Sequence
  ENSG00000196367_97 (sequence is synthesized)
agcccgcagcttttacgacttctccctgcctcgttccttatattcacagaagccccatagtttcactgggttgcggttattttcctggtagtttgcgtgtaagaaagggagaatatagtt

SEQ ID NO: 703779 - DNA, 120 bp, Artificial Sequence
  ENSG00000196367_98 (sequence is synthesized)
ttagaggaagctgaactatgacgatgctgggcgaagcggttggaaatggcagagctgaaacttattccaagctttcaaaataatcttttaagaagccaggattctccggtctggaatttc

SEQ ID NO: 703780 - DNA, 120 bp, Artificial Sequence
  ENSG00000196367_99 (sequence is synthesized)
tgagtgagtcctttttttatggtgtcctccctctgtgaatgtacaggcggaactgtacgaacagctcccttccatccatttttaactctttcggaaataacacctcacagcagcttcgtg

SEQ ID NO: 703781 - DNA, 120 bp, Artificial Sequence
  ENSG00000196367_100 (sequence is synthesized)
cttttgtacagacctttgtaacaagtgtacagaaaactcattttgtttgagaaacaggagttgatgaacccatcatgctggtttttctctgagcacaaagttttaggctgtacacagcca

SEQ ID NO: 703782 - DNA, 120 bp, Artificial Sequence
  ENSG00000196367_101 (sequence is synthesized)
gccttgggaatctcgttgagcgttcggcgtggatccacggggccaggccaccctgcgggagcgccacacgcatccacttcggattcagtgggtgaagacagaactctgagagtctgcagg

SEQ ID NO: 703783 - DNA, 120 bp, Artificial Sequence
  ENSG00000196367_102 (sequence is synthesized)
cggctcctgtgctttttatttctggctcttcggatgtcttctagacatttactatcactgcacctgaagaaaaaatcacttttaccttcctaatttaaaaagacaaaacagaaatgtacg

SEQ ID NO: 703784 - DNA, 120 bp, Artificial Sequence
  ENSG00000196367_103 (sequence is synthesized)
ttccttcgctagctttagtctttctgttcccatttttataaatctgagcattgataatgttctatctaaatttgtacagtgtgatttttttttttagaataaatattttataaaagggtt

SEQ ID NO: 703785 - DNA, 120 bp, Artificial Sequence
  ENSG00000196367_104 (sequence is synthesized)
caaacccgcaggtctcctccacggctgtcagcagcttctcgtagagcttctcataggactcatatggtggaatgtcgatccggttaaagctgaaaaaggacaaaagagagtcaccgtgtg

SEQ ID NO: 703786 - DNA, 120 bp, Artificial Sequence
  ENSG00000196367_105 (sequence is synthesized)
aggacaaaagagagtcaccgtgtgggcagtccagccctaggaccaacctcaaggccaaggacaggcagtgagaaagacagggtctcgctaggttgcccaggctgctctcaaactcctggc

SEQ ID NO: 703787 - DNA, 120 bp, Artificial Sequence
  ENSG00000196367_106 (sequence is synthesized)
ctctcaacgtgctgggagccactgtgcccaatcaacacacagtaaaggggaagctcatttccagtatttgtgcaaagaaaaagacatcctttaagaagctatcgtagcaaaccaaaaaat

SEQ ID NO: 703788 - DNA, 120 bp, Artificial Sequence
  ENSG00000196367_107 (sequence is synthesized)
acaaaattgtgacccagaggatgtacagtgacttctggctttctagggtgctgtggcttttgagttctgatgatgacaaaaatattttggcagagactccatctcaaaaaaaaacaacaa

SEQ ID NO: 703789 - DNA, 120 bp, Artificial Sequence
  ENSG00000196367_108 (sequence is synthesized)
aaaaaaaacgtgaacgtcagcatcctctggggctcccaggacgccgtgacttcctggccgcggtgcttaccagggtggctgaagccagtgcatgatggcccgactgctccaaggagacat

SEQ ID NO: 703790 - DNA, 120 bp, Artificial Sequence
  ENSG00000196367_109 (sequence is synthesized)
atccacacagcagagaaggtgaatgaacaagcagctcacctggccacaccaccgtaatccaaaccttcttccccacggaatttcaccatcagccgttttttcaagtctttcggtcgcatc

SEQ ID NO: 703791 - DNA, 120 bp, Artificial Sequence
  ENSG00000196367_110 (sequence is synthesized)
ttcattatctggcgggtctgggcagtggccctgaactctctacctcaaagatttcttctctggacacttcgatgcggcaatgaccagcttggggctgctgaagcgacagttcgtgtctga

SEQ ID NO: 703792 - DNA, 120 bp, Artificial Sequence
  ENSG00000196367_111 (sequence is synthesized)
ggactttcagcttctggactagatctctttcgtatctctgggcaggaagctcctcgtcctccagagagccctcactgggcagtggcagcggctggctgggctccttgagttggcactggt

SEQ ID NO: 703793 - DNA, 120 bp, Artificial Sequence
  ENSG00000196367_112 (sequence is synthesized)
gacttgagaagaagagatgcagaaagtcactccgaagccccggccaggggagctgcaagcacccacgtacgcgacagggtcagaggagagagctagctgcacacaacttcagggagaatt

SEQ ID NO: 703794 - DNA, 120 bp, Artificial Sequence
  ENSG00000196367_113 (sequence is synthesized)
tgtttccctgatgacgtaaccaggtacctagctagctgtgtcaaacttgctgatggccacattagcctaaatgtatgtctacagtaccataaaggaggtaccccaggccgggcgtggtgg

SEQ ID NO: 703795 - DNA, 120 bp, Artificial Sequence
  ENSG00000196367_114 (sequence is synthesized)
tctggagctggtgctactggtgaggaagaggcccggcctgctgccaggttcgcccacaccttccccctggttgttgggaaaaccaaccttggaatggccaaggcaggagatagcacctcc

SEQ ID NO: 703796 - DNA, 120 bp, Artificial Sequence
  ENSG00000196367_115 (sequence is synthesized)
ccggtgaagatccaggagctctcatgagctccacgtggaaagatcaaggatctggagtctggagcccttcaggcagcaactcagtgaccatgaacctcagctctgtccacccggcacagc

SEQ ID NO: 703797 - DNA, 120 bp, Artificial Sequence
  ENSG00000196367_116 (sequence is synthesized)
attgctgggagctggacccgggaggctgccggctccagagtgaggagggtccagaccatgcagacaatatgccctttttctccaaacaccatttcaagagacagggtctcgctaggttgc

SEQ ID NO: 703798 - DNA, 120 bp, Artificial Sequence
  ENSG00000196367_117 (sequence is synthesized)
gccagactctctctctcaaaaaaaaggaggtaccacaattccaagcaaacacttatctcacacattaccaccacaaataaaaatggaaatggctgtcatttattatgcatctattacgca

SEQ ID NO: 703799 - DNA, 120 bp, Artificial Sequence
  ENSG00000196367_118 (sequence is synthesized)
cccatgagatgaaccaaagcatcatcagatgcaccttggcagttagaatgaaatggagatgatgggaaaaaattttaaaggaggtaacagtggagaactcaaatgaaatctcatgatagg

SEQ ID NO: 703800 - DNA, 120 bp, Artificial Sequence
  ENSG00000196367_119 (sequence is synthesized)
cacaacagcagaccgctcgagtgaaatctaatgaaaaccatccctcatttttaccgccaagagatttctacacctgctcattgagagcaaaatttcagtaaaaggagtaggattagtacg

SEQ ID NO: 703801 - DNA, 120 bp, Artificial Sequence
  ENSG00000196367_120 (sequence is synthesized)
gagtaggattagtacggtgacaaagtggcatttgtcctgttcaagttttgccactgagacacagagctgtcggttaaaagagctatgtcgggggcaggcgcagtggctcatgcctataat

SEQ ID NO: 703802 - DNA, 88 bp, Artificial Sequence
  ENSG00000196367_121 (sequence is synthesized)
cagagctctatgtggaatgtttggctctgagaacacgacaggcctggaacactaaatatgggatccaagataattcccagttccaagg

SEQ ID NO: 703803 - DNA, 120 bp, Artificial Sequence
  ENSG00000196367_122 (sequence is synthesized)
acactaaatatgggatccaagataattcccagttccaaggtatccagttccccaccgtgcaggcactagggggatagcacgtatctctacttctcaacctaagggccacgtgtctcatga

SEQ ID NO: 703804 - DNA, 120 bp, Artificial Sequence
  ENSG00000196367_123 (sequence is synthesized)
gagcgctgcgtgcggaaacttccttcgtgcagccgcctaatactgccatctcggtaaattttatgtaggctgcaagtaagaaaagggtagcaacaacatagggcttcagtgctcttcaca

SEQ ID NO: 703805 - DNA, 120 bp, Artificial Sequence
  ENSG00000196367_124 (sequence is synthesized)
gctaatttaagagtttaaaatatgcaattatccgccagatatttaacatcattttgaccatgcttattatccaaccagcaagacagtcaataaattcacaaaaataccagtccaagaaag

SEQ ID NO: 703806 - DNA, 120 bp, Artificial Sequence
  ENSG00000196367_125 (sequence is synthesized)
cattcgattaccaatgaaagaggtcagcaaaaaatatttttaaagtcttacttcatgatgtggtgtaaccttgggtctgtaaactgggttgttcggttattatgatctacaaaatatatc

SEQ ID NO: 703807 - DNA, 120 bp, Artificial Sequence
  ENSG00000196367_126 (sequence is synthesized)
ctcccagaaactgtacttctgacttcccagcctggcggcagtggtccaagttcatcacagttcacactgttaaggtctctaccaaaatggaagatacagagaggtttgtccaactgagta

SEQ ID NO: 703808 - DNA, 120 bp, Artificial Sequence
  ENSG00000196367_127 (sequence is synthesized)
tggaggaatgagaccaaaagtcagcaacagaagccacagaggttccttatcaaggtgtctgtgtcccagctctgctaagatggaccttcgtggtgctacttacgccaaacctctactcag

SEQ ID NO: 703809 - DNA, 120 bp, Artificial Sequence
  ENSG00000196367_128 (sequence is synthesized)
ccttcgtggtgctacttacgccaaacctctactcagtccaggcctctctgctgcaaacagcagcaacatccgagagatttaaaaccaaactttcaggctgggcgcggtagctcacgcctg

SEQ ID NO: 703810 - DNA, 64 bp, Artificial Sequence
  ENSG00000196367_129 (sequence is synthesized)
caaaaaaaaaaataggcagtttcagagcttataaccatgataaggaacaggggctccccacggc

SEQ ID NO: 703811 - DNA, 120 bp, Artificial Sequence
  ENSG00000196367_130 (sequence is synthesized)
gagcttataaccatgataaggaacaggggctccccacggcatatcatttcttatatgaaagaaggccctaatagtaggaagtatcttagtgctgtcagaaaactatctgaattcacaagt

SEQ ID NO: 703812 - DNA, 120 bp, Artificial Sequence
  ENSG00000196367_131 (sequence is synthesized)
gtcattaaatgttcccggccagaagggtttcttcattggaaagttcccagacagcaccaagcttttcagggctaagggaggtacaggaacatgcgttcagaaactcgcaattctaaacag

SEQ ID NO: 703813 - DNA, 120 bp, Artificial Sequence
  ENSG00000196367_132 (sequence is synthesized)
ttgcagcaggacgaggcattctcattttcaaatgggctttttgctcaacaagtattttccactctaagaatgattaattattctcctgattaataatttcaacacaatctacagtcagaa

SEQ ID NO: 703814 - DNA, 120 bp, Artificial Sequence
  ENSG00000196367_133 (sequence is synthesized)
gggagcacagctttactgaccaagatgtgtttctaattaacacaaaagcctgtcatttctaacagggggtacaaaagagacacctcattcatttgcaggtaatatatttccagtctcatt

SEQ ID NO: 703815 - DNA, 120 bp, Artificial Sequence
  ENSG00000196367_134 (sequence is synthesized)
ataggtactgagtcatacattaaacatagtcttggaaaatcagacaggaagtttattctcagatgaaacaaatcatgaataaaaaggaactaaatattaccaaaaatcatattaggtagt

SEQ ID NO: 703816 - DNA, 120 bp, Artificial Sequence
  ENSG00000196367_135 (sequence is synthesized)
cagaggccccagagacagtgtgggctcctcagcgtagcctcttggtgacagcgtgcgctgcctgggcaggcacagtgctgctgtgatcacaggggaggccatgacttggcacctgggaag

SEQ ID NO: 703817 - DNA, 120 bp, Artificial Sequence
  ENSG00000196367_136 (sequence is synthesized)
ccagctcagagcatattcagtcaagttgatgaggaatggcggcccgacctcagcagcaggtcggcgtgcgggactctcagaatggcggcctgatctcagcagcgggtcggcatgccagac

SEQ ID NO: 703818 - DNA, 120 bp, Artificial Sequence
  ENSG00000196367_137 (sequence is synthesized)
tctcggagccctcagctatcttcatgtgtttcaggactgctgccatgtaacgtgtgtgtgtggagagtgtgcggagtgtacacgaagcatgcccggaggctcagcatgaagcactctgta

SEQ ID NO: 703819 - DNA, 120 bp, Artificial Sequence
  ENSG00000196367_138 (sequence is synthesized)
cccagctctacctcctcattgtccttcatccagtgtgtaccttcagccaggcctgccctcgtgtgggaggggcagtccccaaggagcacacgccatgatgtcagaaacatcttcttcgag

SEQ ID NO: 703820 - DNA, 120 bp, Artificial Sequence
  ENSG00000196367_139 (sequence is synthesized)
gaagatggccctttacaggccccaggggacgggggcagcacggagccctctctggacctctgccgcaggccacagaaccttctccagcccttgactctccttgcctttcatttaccctcc

SEQ ID NO: 703821 - DNA, 120 bp, Artificial Sequence
  ENSG00000196367_140 (sequence is synthesized)
attgttccaggctaccacggaatgatgattacagctgagtttacccaaatcccaccacagggtcaaatgaaagggccttgacaagatgtcccttggcagcttgagatcgcagttgtgttg

SEQ ID NO: 703822 - DNA, 120 bp, Artificial Sequence
  ENSG00000196367_141 (sequence is synthesized)
ctgggttatggcctgggtgcaggctggtttgcagtgggcggtactggcagctaccatcaaggtctctgtgctgggctccagccctcagcccagaggggtggttccccactttatagagag

SEQ ID NO: 703823 - DNA, 120 bp, Artificial Sequence
  ENSG00000196367_142 (sequence is synthesized)
ggggtttccagctcacagaaggtgagaagcttgtcccaggcctggagcagctgtggagaaactgggagggaagcccgtccagcctgattccaagcccacatgctgctcacaggtcaaggc

SEQ ID NO: 703824 - DNA, 120 bp, Artificial Sequence
  ENSG00000196367_143 (sequence is synthesized)
cgagggactgatttttgccggtctgactggactcaagttacttcccagttccttgcagagagctgtctttgtgagacagtgtcttgggttctggaatgatgggagccgtgctttgcaaat

SEQ ID NO: 703825 - DNA, 120 bp, Artificial Sequence
  ENSG00000196367_144 (sequence is synthesized)
gaggagtgattgcgtgctcatctggcagctggtgggtgtcctgctggcatcaggcctgagcggtgaccgtgctcctctgattgtcctcactgcgtgtgacaaggcctgggccactgtgtg

SEQ ID NO: 703826 - DNA, 120 bp, Artificial Sequence
  ENSG00000196367_145 (sequence is synthesized)
tggccgcggtgcttaccagcacacatctcagaaaaacatcccagccaccttccagctcttcctgcccacagcgcacatagacgcgtcatcgaatagccctgcctccacgtcagtcacctt

SEQ ID NO: 703827 - DNA, 120 bp, Artificial Sequence
  ENSG00000196367_146 (sequence is synthesized)
gcaaagccttgaagccttggagcgggactcgcgtggacccagtcacaaactgcaggagcctggccctcctttcttcatcgaacgtctccaccgcttgccagaaccaccgcacgatgttgc

SEQ ID NO: 703828 - DNA, 120 bp, Artificial Sequence
  ENSG00000196367_147 (sequence is synthesized)
tgtcggccacacagtgcttcagccgcgtgttcgacttccagtcgttcaagtctattttatccaggccgcctatgatcagctgaggaggtgcagaaaggtgaattacttccaaaatgcata

SEQ ID NO: 703829 - DNA, 120 bp, Artificial Sequence
  ENSG00000196367_148 (sequence is synthesized)
aacccacgtcaggatgcgcctcctaggtacccgacacacaacagtgaaaagtcgattcccaagcaaagcagcagctgtgtactaggcagatgttgagacaggaagaaagctacaaacagg

SEQ ID NO: 703830 - DNA, 120 bp, Artificial Sequence
  ENSG00000196367_149 (sequence is synthesized)
aggcctgtggcacatgcttccgtccgcctcctccaaacgggtctccaaccccaaggaccgcggtgcacagctgttgatgggatgttattttataaccaaagcggggtttttgctctgcat

SEQ ID NO: 703831 - DNA, 120 bp, Artificial Sequence
  ENSG00000196367_150 (sequence is synthesized)
cggtgaggagtatcaaagaaccaaccggtgacactgaacagagctaaccatgaataacggcacgtcccagggtctctccaggacactcaaggacatgtggagtttcaagtctgaagagag

SEQ ID NO: 703832 - DNA, 120 bp, Artificial Sequence
  ENSG00000196367_151 (sequence is synthesized)
tcaagtctgaagagaggagaattcagcaagagttaggtggggctggggccgatagggcatgtttccgcaattggcttaaaaagttcaacccctgctgggtgcagtggctcacgcctgtag

SEQ ID NO: 703833 - DNA, 83 bp, Artificial Sequence
  ENSG00000196367_152 (sequence is synthesized)
ggcaaatacaaaaattagccaggcatgatgacgtgcacctgtagcctcagctactcgggaggcggaggtgggaggatggcttc

SEQ ID NO: 703834 - DNA, 80 bp, Artificial Sequence
  ENSG00000196367_153 (sequence is synthesized)
aaatacaaaaattagccaggcatgatgacgtgcacctgtagcctcagctactcgggaggcggaggtgggaggatggcttc

SEQ ID NO: 703835 - DNA, 120 bp, Artificial Sequence
  ENSG00000196367_154 (sequence is synthesized)
accatggcttcccaccactcaggatctgtgggcttttactctaacatggcattttctcagatctttgaaactttgaaagtggaggagcatcggtaatgtatgagacagatcatgggtgtc

SEQ ID NO: 703836 - DNA, 120 bp, Artificial Sequence
  ENSG00000196367_155 (sequence is synthesized)
ttctgagcgtggttgtgcgaggcacccccagcccgtggccatctcagcctgttgtctttctgttcatagactggagcgctgctcagcgctttcgttcagctgtgccacatttccacgacg

SEQ ID NO: 703837 - DNA, 120 bp, Artificial Sequence
  ENSG00000196367_156 (sequence is synthesized)
aggcctctctccatccagttttgatggaggtagctctgcctgccatgtggatccagcctcggagggtctcggtccatctccagccgtcaccttcccaaagaccctcctggcctcctctcc

SEQ ID NO: 703838 - DNA, 120 bp, Artificial Sequence
  ENSG00000196367_157 (sequence is synthesized)
attctgcgggccgagaagaaccccaggagagcagcggggaccgggagcgaggagtgggggtggcaaaccctaccctgcctgccaccttcagtccagtggtggacaatacctggaccccat

SEQ ID NO: 703839 - DNA, 120 bp, Artificial Sequence
  ENSG00000196368_0 (sequence is synthesized)
agacggaggcgcctctctttccccgcccctcgcctcggccctttctcttcccagcacctcggctgttccccggcggcggcagcggcagcggcggcccacacagcagcgagaggcgagagg

SEQ ID NO: 703840 - DNA, 120 bp, Artificial Sequence
  ENSG00000196368_1 (sequence is synthesized)
aggctgcctcgaggaggctgcctcgaggatgaagtgcaaacccaaccagacgcggacctacgaccccgaggggttcaagaagcgggcggcgtgcctgtgcttccggagcgaacgcgagga

SEQ ID NO: 703841 - DNA, 120 bp, Artificial Sequence
  ENSG00000196368_2 (sequence is synthesized)
cgaggtcctgttagtgagtagcagccggtacccggaccgctggatcgtgccgggcgggggcatggagcccgaggaggagccgggcggtgcggcggtccgagaggtgtacgaagaagcggg

SEQ ID NO: 703842 - DNA, 120 bp, Artificial Sequence
  ENSG00000196368_3 (sequence is synthesized)
agtcaaggggaagttaggccggctcctgggcgtcttcgaacagaaccaggatcgcaagcacagaacgtacgtgtatgtactgactgtcacggagctgctggaggattgggaagattcggt

SEQ ID NO: 703843 - DNA, 120 bp, Artificial Sequence
  ENSG00000196368_4 (sequence is synthesized)
tagcattgggaggaagcgagagtggttcaaagtcgaagatgccatcaaggttctccagtgccacaagcccgtgcacgccgaatatctggagaaactaaagctgggcggttccccaaccaa

SEQ ID NO: 703844 - DNA, 120 bp, Artificial Sequence
  ENSG00000196368_5 (sequence is synthesized)
tggaaactccatggccccatcctcgccagatagcgatccctaatgaacagcaaagatgttcagtattgtgctgaaagaaacattgatgtgaacccagtgatcagtggaattgtcaagtac

SEQ ID NO: 703845 - DNA, 120 bp, Artificial Sequence
  ENSG00000196368_6 (sequence is synthesized)
aggtgagcacttctgtgttcccaagaagacagctcatctggtttcttcctgcatcttgggacactccttccctgtctataccactgactcttgctctggttgttgtactcttatacgtga

SEQ ID NO: 703846 - DNA, 120 bp, Artificial Sequence
  ENSG00000196368_7 (sequence is synthesized)
atagactcttaattcagcacctatagccttttgttgtgcttttttgatgtgtctgccttcattagactatgatgtctttgagagcaaagactatttttccttactctttgcatattctgc

SEQ ID NO: 703847 - DNA, 120 bp, Artificial Sequence
  ENSG00000196368_8 (sequence is synthesized)
atctgagacactacttgaaatatggttggcatcactgaaggttctttgattcaattaatattttgtaatcaccgtgtggcaaaacattccccttccaatctggtgctagtagagtatatg

SEQ ID NO: 703848 - DNA, 120 bp, Artificial Sequence
  ENSG00000196368_9 (sequence is synthesized)
ctatgtcataccacacagtagctgcacagttttaagattatgccatcacctagggtaatgttttgtagaatcagtccttcgtgtaacaactctagtgtttttgtactgttgatgatttgc

SEQ ID NO: 703849 - DNA, 120 bp, Artificial Sequence
  ENSG00000196368_10 (sequence is synthesized)
tgatttgcttaaattttattcaaaaactatcacttgctataaaggtaattgtaaaaataaatacagtggacgcaaaataatgttgtgagtttttataaaaataaattttaaaatgatata

SEQ ID NO: 703850 - DNA, 120 bp, Artificial Sequence
  ENSG00000196368_11 (sequence is synthesized)
ttttttgcaatgcctgccctaaccacttcttacatgtcatcttaacatctctttgaggaaacactgtttcctcattttacagatttaacatactgtattatttgatgccagagccaacag

SEQ ID NO: 703851 - DNA, 120 bp, Artificial Sequence
  ENSG00000196368_12 (sequence is synthesized)
gctatatcataggcagtttccaaacttaattatgccatttagtttgtctagatttcttttgcctctctcactgatccatttggctgtagttttcatcccttttccagtacacacagctag

SEQ ID NO: 703852 - DNA, 120 bp, Artificial Sequence
  ENSG00000196368_13 (sequence is synthesized)
ctcctcatcctacctggtttctgcatatgagaatgcagagggctgagagagggcaaaattgttgtcatttagaaaaggcatttaggaaagaggctgctattagaggggaacacaaagtga

SEQ ID NO: 703853 - DNA, 120 bp, Artificial Sequence
  ENSG00000196368_14 (sequence is synthesized)
aggtttttttaaaaaagaggacttgcatcagctgcctccagaacaattttaagaaaataacaaagatgtttagaagaaatcttacggagtttgccatgggatgtgtgatatcagcagtct

SEQ ID NO: 703854 - DNA, 120 bp, Artificial Sequence
  ENSG00000196368_15 (sequence is synthesized)
tcagctccttacaaattaccaaaagtggttctaatatgctagtttgtttgattttttcttttatattataaagcaattgcatcgataaaagcttggactccattttagtgtgacactctt

SEQ ID NO: 703855 - DNA, 120 bp, Artificial Sequence
  ENSG00000196368_16 (sequence is synthesized)
cctcatgataccagtgaaatgtattgattgtgtccccagttgttacataatttgaaataaaaatataacttcttgatttattgttttttaagatgtgatatggtactgtggttatgttgt

SEQ ID NO: 703856 - DNA, 120 bp, Artificial Sequence
  ENSG00000196368_17 (sequence is synthesized)
tttaaaaaatgattatcttttagagaagtatactgaaaaatgtacaggtgaaatgatatgttactggtattcgcttcaaaatcatctgagtgtggggtaattgagtacatagatgaaaca

SEQ ID NO: 703857 - DNA, 120 bp, Artificial Sequence
  ENSG00000196368_18 (sequence is synthesized)
agattggccataaattggtaattgctgaagctgtgtgatggatgtttgagagttcattatactattctctatacttttgtatatgtttgaaattttccataataaaaattgaaaaaagta

SEQ ID NO: 703858 - DNA, 120 bp, Artificial Sequence
  ENSG00000196369_0 (sequence is synthesized)
aatctgtgaccacgcctcggcagtgctagtcacacctccaagttttgccagctcctccccctcattccgggcctctcgggatcagctcttcctattggctatgggccccatcggtcgata

SEQ ID NO: 703859 - DNA, 120 bp, Artificial Sequence
  ENSG00000196369_1 (sequence is synthesized)
gaaaacgggcggtgattggtaaaggggtgggctctacttcccggcggggtcctgcggagttggcggaggctcctccagggactggggcacagatctgcgtagaaacgggtggcggggaag

SEQ ID NO: 703860 - DNA, 120 bp, Artificial Sequence
  ENSG00000196369_2 (sequence is synthesized)
agaggggaggagagctctgagtgggaagcggagccgggggcctgggacccgtcgcgtcagagccaggcaagtgaaccggagcaaacgacttccgatccagtctgcgctgttgcggctccc

SEQ ID NO: 703861 - DNA, 120 bp, Artificial Sequence
  ENSG00000196369_3 (sequence is synthesized)
gtttgggatttgatttgcagcatctttgagcctctacgacaaaaaaccgcgaagcacgcccagccctcccccggcaccccgaaaagcacccactccctcccggggacacagctgggcgcg

SEQ ID NO: 703862 - DNA, 120 bp, Artificial Sequence
  ENSG00000196369_4 (sequence is synthesized)
tccacacccccgcagccccacaccatgttgtgcggaaggacttccactccccgcctgtgtcgttgatgtcagaccccaggccagcctccgggcgctgcagttctcccggctaatgctgag

SEQ ID NO: 703863 - DNA, 120 bp, Artificial Sequence
  ENSG00000196369_5 (sequence is synthesized)
gctgcggctccggctctagcacaggcaccagccgccgccgcacccggcctcagcgcccaccgtctgcatgtgcccgccgtagccgtctgcccagcccgcagcccgcgctccacggagcgc

SEQ ID NO: 703864 - DNA, 120 bp, Artificial Sequence
  ENSG00000196369_6 (sequence is synthesized)
tggagaccaccgtggggggccccttctgccctcgagagaagcggtcttggaggtattgatttaggtggttggattttttccgtggatctatcaattcacaattcgaatttggaagaaaga

SEQ ID NO: 703865 - DNA, 120 bp, Artificial Sequence
  ENSG00000196369_7 (sequence is synthesized)
aggaaaacatgacgtctccagccaaattcaaaaaggataaggagatcatagcagagtacgatactcaggtcaaagagatccgtgctcagctcacagagcagatgaaatgcctggaccagc

SEQ ID NO: 703866 - DNA, 120 bp, Artificial Sequence
  ENSG00000196369_8 (sequence is synthesized)
agtgtgagcttcgggtgcaactgttgcaggacctccaggacttcttccgaaagaaggcagagattgagatggactactcccgcaacctggagaagctggcagaacgcttcctggccaaga

SEQ ID NO: 703867 - DNA, 120 bp, Artificial Sequence
  ENSG00000196369_9 (sequence is synthesized)
agcgggaaagcagggaccataccaccctgagtgacatctacctgaataatatcattcctcgatttgtacaagtcagcgaggactcaggaagactctttaaaaagagtaaagaagtcggcc

SEQ ID NO: 703868 - DNA, 120 bp, Artificial Sequence
  ENSG00000196369_10 (sequence is synthesized)
agcagctccaagatgatttgatgaaggtcctgaacgagctctactcggtcatgaagacatatcacatgtacaatgccgacagcatcagtgctcagagcaaactaaaggaggcggagaagc

SEQ ID NO: 703869 - DNA, 120 bp, Artificial Sequence
  ENSG00000196369_11 (sequence is synthesized)
aggaggagaagcaaattggtaaatcggtaaagcaggaggaccggcagaccccacgctcccctgactccacggccaacgttcgcattgaggagaaacatgtccggaggagctcagtgaaga

SEQ ID NO: 703870 - DNA, 120 bp, Artificial Sequence
  ENSG00000196369_12 (sequence is synthesized)
agattgagaagatgaaggagaagcgccaagccaagtacacggagaataagctgaaggccatcaaagcccggaatgagtacttgctggctttggaggcaaccaatgcatctgtcttcaagt

SEQ ID NO: 703871 - DNA, 120 bp, Artificial Sequence
  ENSG00000196369_13 (sequence is synthesized)
actacatccatgacctatctgaccttattgatcagtgttgtgacttaggctaccatgcaagtctgaaccgggctctacgcaccttcctctctgctgagttaaacctggaacagtcgaagc

SEQ ID NO: 703872 - DNA, 120 bp, Artificial Sequence
  ENSG00000196369_14 (sequence is synthesized)
atgagggtctggatgccatcgagaatgcagtagaaaacctggatgccaccagtgacaagcagcgcctcatggagatgtacaacaacgtcttctgcccccctatgaagtttgagtttcagc

SEQ ID NO: 703873 - DNA, 120 bp, Artificial Sequence
  ENSG00000196369_15 (sequence is synthesized)
cccacatgggggatatggcttcccagctctgtgcccagcagcctgtccagagtgagctgctacagagatgccaacaactgcagtctcgcttatccactctaaagattgaaaacgaagagg

SEQ ID NO: 703874 - DNA, 120 bp, Artificial Sequence
  ENSG00000196369_16 (sequence is synthesized)
taaagaagacaatggaggccaccctgcaaaccatccaggacattgtgactgtcgaggacttcgatgtgtctgactgcttccagtacagcaactccatggagtccgtcaagtccacggtct

SEQ ID NO: 703875 - DNA, 120 bp, Artificial Sequence
  ENSG00000196369_17 (sequence is synthesized)
ctgaaaccttcatgagcaagcccagcattgctaagaggagagccaaccagcaagagacagagcagttttatttcacagtgagggagtgctatggcttttaaagagcgtcagcatgcactg

SEQ ID NO: 703876 - DNA, 120 bp, Artificial Sequence
  ENSG00000196369_18 (sequence is synthesized)
cagcactcaagggagatttggaactcagagtccttgttaagtgtctgaaggacaggcgttgaatatcttagatacgaatgtgggcatactcagagaccatccctacagttaaaggtgcaa

SEQ ID NO: 703877 - DNA, 120 bp, Artificial Sequence
  ENSG00000196369_19 (sequence is synthesized)
caagagaaaggatgctcccaagtatacaactaagaagattttcttttttaagaaatttttaactagctagtaggctttcactggaaagtttccttctcaggcacaggggatcctgaaagg

SEQ ID NO: 703878 - DNA, 120 bp, Artificial Sequence
  ENSG00000196369_20 (sequence is synthesized)
ggaacttcatcttttagttcttggagagtacatacaaatattcataataacacatattttgtttataaaaatctataatctcttctaggtgatatgatgacattattttataacttttat

SEQ ID NO: 703879 - DNA, 120 bp, Artificial Sequence
  ENSG00000196369_21 (sequence is synthesized)
tgttgggaaactattttttctaattattgctaaaacttaaaggatgggtaatatgcagcattactattttgcacataattccaaaacatcgtattttcttattcatgtatctctagtctt

SEQ ID NO: 703880 - DNA, 120 bp, Artificial Sequence
  ENSG00000196369_22 (sequence is synthesized)
tttttttttttttttttaagtattgttaacaatcctttggaagtcactactggtctttgtgtgctgctttttaataattgagttattttgagcttgccaagtaggatctattgcctggac

SEQ ID NO: 703881 - DNA, 120 bp, Artificial Sequence
  ENSG00000196369_23 (sequence is synthesized)
attttgagcttgccaagtaggatctattgcctggactaaaatttatttcctaatcttctgatgaccaagaaaggaaaaattaagtttgcagatgtgagatgaaatatagccagtgaatat

SEQ ID NO: 703882 - DNA, 120 bp, Artificial Sequence
  ENSG00000196369_24 (sequence is synthesized)
gcatactgattctgaatgaaaggaattaacttttcagtcaagaaacagtctgcatgcagtaaattgaatttttcctgcaactggaatgatttgtttaattcttctttgaacactgccctt

SEQ ID NO: 703883 - DNA, 120 bp, Artificial Sequence
  ENSG00000196369_25 (sequence is synthesized)
tctccagtaagaacactaatgatttgctaatattttttaaagaaatctgtttttttaattagttaagctcagacttcctcttattttttatcctagagaaaactgctaaaagggaatgat

SEQ ID NO: 703884 - DNA, 120 bp, Artificial Sequence
  ENSG00000196369_26 (sequence is synthesized)
atatcagtactattcttctaaaacaactttttaaaaatgattatacaaagccaaatatgctcattatataaaatttagaagcaaaaagaaggaaataaaaattttccataattctaccag

SEQ ID NO: 703885 - DNA, 120 bp, Artificial Sequence
  ENSG00000196369_27 (sequence is synthesized)
ctagagataatggtgttagaatatattcctttctaatctgttttctatgcatgcacaaacacatatgtgagcacatatttataattttattctaaaaaataggatactgctgtacatatt

SEQ ID NO: 703886 - DNA, 120 bp, Artificial Sequence
  ENSG00000196369_28 (sequence is synthesized)
catatttatgagtaaaatattaaaacctatacaaaaaaataatagaatggcattttagctcattcattgatttttataaaatatttaacacactccctggtttgtagttagcgttcaata

SEQ ID NO: 703887 - DNA, 120 bp, Artificial Sequence
  ENSG00000196369_29 (sequence is synthesized)
aatgctaaaaatttatcttcaccatcatcattaatttatttattaatcattattaaattattcattgatcattttttgaggatttactattgccagacactgtgctacaagctgggaatg

SEQ ID NO: 703888 - DNA, 120 bp, Artificial Sequence
  ENSG00000196369_30 (sequence is synthesized)
ctgacagtataagataaagagggaaatgatgggggatgggtcatgtaaagggagaactttcatttttacttcatatatatctaagcagttataataggttgatttttgtaatttaaaaaa

SEQ ID NO: 703889 - DNA, 120 bp, Artificial Sequence
  ENSG00000196369_31 (sequence is synthesized)
tgtaaaaatgcatacatgcactagtgcatgaatggcagccaggatgagtggaattggagaagcatcacacacacagtgacttttgtgtttgatcttgaagaatgagcgaaccaggcaggg

SEQ ID NO: 703890 - DNA, 120 bp, Artificial Sequence
  ENSG00000196369_32 (sequence is synthesized)
agtcggggaggagaatcgcattccttgaggaaagagcagcatgtgggaaaacataaatgcacgcaataacctggctcacatgttaagagaactttctgactataatgagggatgtgttgc

SEQ ID NO: 703891 - DNA, 120 bp, Artificial Sequence
  ENSG00000196369_33 (sequence is synthesized)
tgccccaagcttcattatctaaggagtttgttgaacactctctagaggcttttaataataggattgtttagctggtctgtctggactggttagatataacactatttaaatgacccaatc

SEQ ID NO: 703892 - DNA, 120 bp, Artificial Sequence
  ENSG00000196369_34 (sequence is synthesized)
tcattacattgtgaagatttccattttttaggttacgtaagaaattttggacctaaaaatcttgcattttaagacagtctttgtcagaattactttttggctctaaatgaattctgtaac

SEQ ID NO: 703893 - DNA, 120 bp, Artificial Sequence
  ENSG00000196369_35 (sequence is synthesized)
atttgtattctaaattgacctttagtaaaagcaggaatggccatattcaaactggtaacctcgcaaatcctgcccaccctttcactttctgtctcaatacattgatgtcctctaacccat

SEQ ID NO: 703894 - DNA, 120 bp, Artificial Sequence
  ENSG00000196369_36 (sequence is synthesized)
ttcctgtcttatgtggctttagtgccacttatcaaaattgtgtgcaaatttccttggctaacagtaacagtttttgtctgggcttgtctagcagtggaattctgcctgagttcatcattt

SEQ ID NO: 703895 - DNA, 120 bp, Artificial Sequence
  ENSG00000196369_37 (sequence is synthesized)
ttgtgactggtacttgaagtgcatcagatgattaatttcatgataagagggctttttggggtggtgaaatagacatttatggaaaatgggatacccacattaagcagggtgactacctgt

SEQ ID NO: 703896 - DNA, 120 bp, Artificial Sequence
  ENSG00000196369_38 (sequence is synthesized)
ttaccatacaacccacacaaagccaatacaactatagatgtgctttatttagtctgttgcctctgcaaacattgcccgtgtgtttctctatgcccttcaaaaacatcagagcagcacatc

SEQ ID NO: 703897 - DNA, 120 bp, Artificial Sequence
  ENSG00000196369_39 (sequence is synthesized)
ctggaagatcctatcttttgtaagtttaagaagcagcctcttgtcacaggttgactcctaggtagtgtgcctagtgaccaagagggctgctaagaaagctttctgaccacttgtggctgt

SEQ ID NO: 703898 - DNA, 120 bp, Artificial Sequence
  ENSG00000196369_40 (sequence is synthesized)
cattggactgatttgcccagatgacatcaattgggaatttgaggcatgacctataaagatcagttgcttgcaagagtctcaggaaaataattgtggagttaagaaacttgaagcgatttt

SEQ ID NO: 703899 - DNA, 120 bp, Artificial Sequence
  ENSG00000196369_41 (sequence is synthesized)
taaaaattacctaacccaaccttctcatttgaaaaattaaaaaataaataggccagatatggcagctcatgcctgtaatcccagcgctgtgggagcctgaggcgggtgggtctcttgagg

SEQ ID NO: 703900 - DNA, 61 bp, Artificial Sequence
  ENSG00000196369_42 (sequence is synthesized)
tactcaggaggctaaggtgggaggattacttgaaccggggaggcataggttgaaaaaaaaa

SEQ ID NO: 703901 - DNA, 88 bp, Artificial Sequence
  ENSG00000196369_43 (sequence is synthesized)
gagaaacctcgtctctactaaaaacacgcattcacgtacatgggagagtctacaaagtcacacgtattcataggttaagccacatgct

SEQ ID NO: 703902 - DNA, 120 bp, Artificial Sequence
  ENSG00000196369_44 (sequence is synthesized)
agcacaaagccagtctgcatggcctacagacatattttgctggacaatgattacttgcttttctttttgtttttcttgtatttgcctgtttgattggctcctgacataccagaaaatcac

SEQ ID NO: 703903 - DNA, 120 bp, Artificial Sequence
  ENSG00000196369_45 (sequence is synthesized)
agtgtggctcattcaaaggaacaaaataaagtgacagaaaatatccctaaagaaacccagacatcaaacttaccagacaaagactttaaaacaactgtcttcattatactcaaatgtcaa

SEQ ID NO: 703904 - DNA, 79 bp, Artificial Sequence
  ENSG00000196369_46 (sequence is synthesized)
ttaagagtatatttgcacacacagaggaagccatgaacttgaagagaagaaaatggaaaatagactaatgaatctgtgg

SEQ ID NO: 703905 - DNA, 61 bp, Artificial Sequence
  ENSG00000196369_47 (sequence is synthesized)
tttaccattctttcttttcacctttcttccttcttccttccccctcctcctcctttttact

SEQ ID NO: 703906 - DNA, 62 bp, Artificial Sequence
  ENSG00000196369_48 (sequence is synthesized)
tttctgatgcttttaaggatgttttataacaagttgtgtagctttttccaatggaatgttta

SEQ ID NO: 703907 - DNA, 120 bp, Artificial Sequence
  ENSG00000196369_49 (sequence is synthesized)
accgcagcgcagccggcacccagccgcctctccctttcctccgcacacgggcagccgcggtccaccgtagggcagtcgtcgttggcatcgcgcgcaagtgaaccggagcaaacgacttcc

SEQ ID NO: 703908 - DNA, 120 bp, Artificial Sequence
  ENSG00000196369_50 (sequence is synthesized)
gtcctggctcacggaccgcagcgcagccggcacccagccgcctctccctttcctccgcacacgggcagccgcggtccaccgtagggcaagtgaaccggagcaaacgacttccgatccagt

SEQ ID NO: 703909 - DNA, 120 bp, Artificial Sequence; identical to SEQ ID NO: 312774
  ENSG00000196371_0 (sequence is synthesized)

SEQ ID NO: 703910 - DNA, 120 bp, Artificial Sequence
  ENSG00000196371_1 (sequence is synthesized)
cctgctcctgcgcggcagctgctttagaaggtctcgagcctcctgtaccttcccagggatgaaccgggccttccctctggaaggcgagggttcgggccacagtgagcgagggccagggcg

SEQ ID NO: 703911 - DNA, 120 bp, Artificial Sequence
  ENSG00000196371_2 (sequence is synthesized)
gtgggcgcgcgcagagggaaaccggatcagttgagagagaatcaagagtagcggatgaggcgcttgtggggcgcggcccggaagccctcgggcgcgggctgggagaaggagtgggcggag

SEQ ID NO: 703912 - DNA, 120 bp, Artificial Sequence
  ENSG00000196371_3 (sequence is synthesized)
gaaggagtgggcggaggcgccgcaggaggctcccggggcctggtcgggccggctgggccccgggcgcagtggaagaaagggacgggcggtgcccggttgggcgtcctggccagctcacct

SEQ ID NO: 703913 - DNA, 120 bp, Artificial Sequence
  ENSG00000196371_4 (sequence is synthesized)
cccgcccggcacttgggaggagcagggcagggcccgcggcctttgcattctgggaccgcccccttccattcccgggccagcggcgagcggcagcgacggctggagccgcagctacagcat

SEQ ID NO: 703914 - DNA, 120 bp, Artificial Sequence
  ENSG00000196371_5 (sequence is synthesized)
cagctacagcatgagagccggtgccgctcctccacgcctgcggacgcgtggcgagcggaggcagcgctgcctgttcgcgccatgggggcaccgtggggctcgccgacggcggcggcgggc

SEQ ID NO: 703915 - DNA, 120 bp, Artificial Sequence
  ENSG00000196371_6 (sequence is synthesized)
tggcgccgaggccgggggctgccatggaccgtctgtgtgctggcggccgccggcttgacgtgtacggcgctgatcacctacgcttgctgggggcagctgccgccgctgccctgggcgtcg

SEQ ID NO: 703916 - DNA, 120 bp, Artificial Sequence
  ENSG00000196371_7 (sequence is synthesized)
ccaaccccgtcgcgaccggtgggcgtgctgctgtggtgggagcccttcggggggcgcgatagcgccccgaggccgccccctgactgccggctgcgcttcaacatcagcggctgccgcctg

SEQ ID NO: 703917 - DNA, 120 bp, Artificial Sequence
  ENSG00000196371_8 (sequence is synthesized)
ctcaccgaccgcgcgtcctacggagaggctcaggccgtgcttttccaccaccgcgacctcgtgaaggggccccccgactggcccccgccctggggcatccaggcgcacactgccgaggag

SEQ ID NO: 703918 - DNA, 120 bp, Artificial Sequence
  ENSG00000196371_9 (sequence is synthesized)
gtggatctgcgcgtgttggactacgaggaggcagcggcggcggcagaagccctggcgacctccagccccaggcccccgggccagcgctgggtttggatgaacttcgagtcgccctcgcac

SEQ ID NO: 703919 - DNA, 120 bp, Artificial Sequence
  ENSG00000196371_10 (sequence is synthesized)
tccccggggctgcgaagcctggcaagtaacctcttcaactggacgctctcctaccgggcggactcggacgtctttgtgccttatggctacctctaccccagaagccaccccggcgacccg

SEQ ID NO: 703920 - DNA, 120 bp, Artificial Sequence
  ENSG00000196371_11 (sequence is synthesized)
ccctcaggcctggccccgccactgtccaggaaacaggggctggtggcatgggtggtgagccactgggacgagcgccaggcccgggtccgctactaccaccaactgagccaacatgtgacc

SEQ ID NO: 703921 - DNA, 120 bp, Artificial Sequence
  ENSG00000196371_12 (sequence is synthesized)
gtggacgtgttcggccggggcgggccggggcagccggtgcccgaaattgggctcctgcacacagtggcccgctacaagttctacctggctttcgagaactcgcagcacctggattatatc

SEQ ID NO: 703922 - DNA, 120 bp, Artificial Sequence
  ENSG00000196371_13 (sequence is synthesized)
accgagaagctctggcgcaacgcgttgctcgctggggcggtgccggtggtgctgggcccagaccgtgccaactacgagcgctttgtgccccgcggcgccttcatccacgtggacgacttc

SEQ ID NO: 703923 - DNA, 120 bp, Artificial Sequence
  ENSG00000196371_14 (sequence is synthesized)
ccaagtgcctcctccctggcctcgtacctgcttttcctcgaccgcaaccccgcggtctatcgccgctacttccactggcgccggagctacgctgtccacatcacctccttctgggacgag

SEQ ID NO: 703924 - DNA, 120 bp, Artificial Sequence
  ENSG00000196371_15 (sequence is synthesized)
ccttggtgccgggtgtgccaggctgtacagagggctggggaccggcccaagagcatacggaacttggccagctggttcgagcggtgaagccgcgctcccctggaagcgacccaggggagg

SEQ ID NO: 703925 - DNA, 120 bp, Artificial Sequence
  ENSG00000196371_16 (sequence is synthesized)
ccaagttgtcagctttttgatcctctactgtgcatctccttgactgccgcatcatgggagtaagttcttcaaacacccatttttgctctatgggaaaaaaacgatttaccaattaatatt

SEQ ID NO: 703926 - DNA, 120 bp, Artificial Sequence
  ENSG00000196371_17 (sequence is synthesized)
actcagcacagagatgggggcccggtttccatattttttgcacagctagcaattgggctccctttgctgctgatgggcatcattgtttaggggtgaaggagggggttcttcctcaccttg

SEQ ID NO: 703927 - DNA, 120 bp, Artificial Sequence
  ENSG00000196371_18 (sequence is synthesized)
taaccagtgcagaaatgaaatagcttagcggcaagaagccgttgaggcggtttcctgaatttccccatctgccacaggccatatttgtggcccgtgcagcttccaaatctcatacacaac

SEQ ID NO: 703928 - DNA, 120 bp, Artificial Sequence
  ENSG00000196371_19 (sequence is synthesized)
tgttcccgattcacgtttttctggaccaaggtgaagcaaatttgtggttgtagaaggagccttgttggtggagagtggaaggactgtggctgcaggtgggactttgttgtttggattcct

SEQ ID NO: 703929 - DNA, 120 bp, Artificial Sequence
  ENSG00000196371_20 (sequence is synthesized)
cacagccttggctcctgagaaaggtgaggagggcagtccaagaggggccgctgacttctttcacaagtactatctgttcccctgtcctgtgaatggaagcaaagtgctggattgtccttg

SEQ ID NO: 703930 - DNA, 120 bp, Artificial Sequence
  ENSG00000196371_21 (sequence is synthesized)
gaggaaacttaagatgaatacatgcgtgtacctcactttacataagaaatgtattcctgaaaagctgcatttaaatcaagtcccaaattcattgacttaggggagttcagtatttaatga

SEQ ID NO: 703931 - DNA, 120 bp, Artificial Sequence
  ENSG00000196371_22 (sequence is synthesized)
aaccctatggagaatttatccctttacaatgtgaatagtcatctcctaatttgtttcttctgtctttatgtttttctataacctggattttttaaatcatattaaaattacagatgtgaa

SEQ ID NO: 703932 - DNA, 120 bp, Artificial Sequence
  ENSG00000196371_23 (sequence is synthesized)
aataaagcagaagcaacctttttccctcttcccagaaaaccagtctgtgtttacagacagaagagaaggaagccatagtgtcacttccacacaattatttatttcatgtctttactggac

SEQ ID NO: 703933 - DNA, 120 bp, Artificial Sequence
  ENSG00000196371_24 (sequence is synthesized)
ctgaaatttaaactgcaatgccagtcctgcaggagtgctggcattaccctctgcagaacagtgaaaggtattgcactacattatggaatcatgcaaaaggaaaaaaagtttcatgatatc

SEQ ID NO: 703934 - DNA, 120 bp, Artificial Sequence
  ENSG00000196371_25 (sequence is synthesized)
aactacattagtgcctactattaacttactctgtctcttgttaaaggctaaatctgcgcttctccctggtgccagcaggttcccctcacagtcaatgcagtggtatagcatatcctcaca

SEQ ID NO: 703935 - DNA, 120 bp, Artificial Sequence
  ENSG00000196371_26 (sequence is synthesized)
tttctagtgcccttgagactgtgctatggaaccaatcttgaacatacatgcattgacttgacaagttactgagtaagcagcatattcagcaggtgccactacatgcctactctgccagac

SEQ ID NO: 703936 - DNA, 120 bp, Artificial Sequence
  ENSG00000196371_27 (sequence is synthesized)
actgagcttggggccctagggaagatagagaattatacaaggcaaagtccttctctttagggctcttacaatctatcacttccaaaaagtaaatggtgactgataaaacaattggcagaa

SEQ ID NO: 703937 - DNA, 120 bp, Artificial Sequence
  ENSG00000196371_28 (sequence is synthesized)
cctgtttgattactgtgacagtcttaatgataccataaatcaatattagaaagctagttgacttaaagcctgaaataatgggagttttctcctccacttattagaataaggaccctcagt

SEQ ID NO: 703938 - DNA, 120 bp, Artificial Sequence
  ENSG00000196371_29 (sequence is synthesized)
gactaattattgtgggtagggtcaagattaactagttttatacagagttctgctgtaaatagtcattttgcatttgattagtgcagttctctgaatcataaagcaagttttacctctctg

SEQ ID NO: 703939 - DNA, 120 bp, Artificial Sequence
  ENSG00000196371_30 (sequence is synthesized)
tacatgtttttgcagacatacttgaaaagctcacttaaatctaggtgcttcaattcactttcttgagaggacaaatgaaaagctgtggagaaaatgtcctcattaaagtattaaagtgtg

SEQ ID NO: 703940 - DNA, 120 bp, Artificial Sequence
  ENSG00000196371_31 (sequence is synthesized)
ggcagaattacaattacaaagtgccagccaccgaataaagataaaagttcagttcttaaaatgagtttttatgagataacagtcagtgatcttggtgttaccgggattccacatggggca

SEQ ID NO: 703941 - DNA, 120 bp, Artificial Sequence
  ENSG00000196371_32 (sequence is synthesized)
gtgggaaagagttcaggttttgaaggtaacctagtttagatttgaattccagctatgtgacattgggtaaattagtagtagtcctgagcctcagcgtcctcatctataaaatgactggcg

SEQ ID NO: 703942 - DNA, 120 bp, Artificial Sequence
  ENSG00000196371_33 (sequence is synthesized)
aaaatacttcacaagctcattttgagcactttaggaagtaagtgaaagtacctaaaatagcaggcacccaattgatgattttatatcttccttctttgcttgcagtgatttcaggatgtc

SEQ ID NO: 703943 - DNA, 120 bp, Artificial Sequence
  ENSG00000196371_34 (sequence is synthesized)
ctcatatctatttataggtctaaaattatatcttaaggtatgttgtagaataaattaaaaggataatctaaatcaccatttagattaagcttgacttgcaaactaggaagaagcacctag

SEQ ID NO: 703944 - DNA, 120 bp, Artificial Sequence
  ENSG00000196371_35 (sequence is synthesized)
gctttctttgaaaatatttttttggttcgttttggtaaagctctataaattggtatctattattttaccaatttttttttagtattaagtccatttagaactaaccatattatttatgga

SEQ ID NO: 703945 - DNA, 87 bp, Artificial Sequence
  ENSG00000196371_36 (sequence is synthesized)
agtattaagtccatttagaactaaccatattatttatggaataattagcatgaggaaggtataattgcaagccccagctggactgca

SEQ ID NO: 703946 - DNA, 120 bp, Artificial Sequence
  ENSG00000196371_37 (sequence is synthesized)
tgaccttgtgatccacctgcctcggcctctcagagagctgggattacaggtgtgagccgccgtgcccagccattgcatttttattcacatacacattgttaatgtggaacaatttaacac

SEQ ID NO: 703947 - DNA, 120 bp, Artificial Sequence
  ENSG00000196371_38 (sequence is synthesized)
acaatttaacactaatctcatcagagagcgagatgaatgtggcaattgctcattttattttgcatatattaaattgagtaggttcagctctaacataccttaagaaaaatgcatatcggt

SEQ ID NO: 703948 - DNA, 120 bp, Artificial Sequence
  ENSG00000196371_39 (sequence is synthesized)
gcactgtatgtatttcaaaatgcctttcctatgattgtcatgtcctcctttaaggcttttccctcaaatttattacaaatttagtatttttagtacttgatgactctaattacatgaatg

SEQ ID NO: 703949 - DNA, 120 bp, Artificial Sequence
  ENSG00000196371_40 (sequence is synthesized)
cacctggaatgacatttgtaacagaagacggtctgacttgctttcagtattcacaagttctttccagtttccaagtcttttcctagcagtaatttaggggagacagaggagtttcatgta

SEQ ID NO: 703950 - DNA, 120 bp, Artificial Sequence
  ENSG00000196371_41 (sequence is synthesized)
aagagcatgcagtttggagtcagaacctgggtatgactctgtggccttgatgaagcaagttacttaaactcttgagttttagctttctcctttacaatgcatgaatgcctatccccctac

SEQ ID NO: 703951 - DNA, 120 bp, Artificial Sequence
  ENSG00000196371_42 (sequence is synthesized)
aaaacaaagattaaatgtgatgatgtatgccaaggtgctttgtatattgtaaagtgctatataattataagatgttctaaattttcaaggatctaaaccagggattggcaaacgtttttc

SEQ ID NO: 703952 - DNA, 120 bp, Artificial Sequence
  ENSG00000196371_43 (sequence is synthesized)
cagggagtaaatattttacgctttgcatatataatttatggaggtgttgagaggatagattagacacttgaagtactcaggatagtgcctggcatgtaggaagcacctggaaaatattcg

SEQ ID NO: 703953 - DNA, 120 bp, Artificial Sequence
  ENSG00000196371_44 (sequence is synthesized)
ctgtgattaccatcagtccattttaccgaggaaggagccaaggtccaggcccactgaaggacttgcataacattacaatagcagtggcagaaccagccatgcttctgcaaatcacaacct

SEQ ID NO: 703954 - DNA, 120 bp, Artificial Sequence
  ENSG00000196371_45 (sequence is synthesized)
ctttgagcctctgtcacctgaactgcaaaatgagtgggttagacaaaatcatctgttgggacctcctagttccacgtgctatcattctactaactggcaccctaaggttgaaagtgctta

SEQ ID NO: 703955 - DNA, 120 bp, Artificial Sequence
  ENSG00000196371_46 (sequence is synthesized)
tctgctttccaatgtggcttccttacagtctggaactgacaatatgcaggagcagtaaactggcagaaaaccaggaatcagagaaagaaaatataatttaactttaaagatgtaaattat

SEQ ID NO: 703956 - DNA, 120 bp, Artificial Sequence
  ENSG00000196371_47 (sequence is synthesized)
atatatagtatattatatatatttttaaagctttatatgcctcaaatatcagggaaaggagccaagtccttggtatttagtttggtgaatacttgcattgaatacatgtcaagatgtcaa

SEQ ID NO: 703957 - DNA, 120 bp, Artificial Sequence
  ENSG00000196371_48 (sequence is synthesized)
gtcatttttgaatgtgtctcagggatttctatgctacacattcttttaacaaatcaagtatttatgtacacatgttcagattttttgacaaaatgattaaaataatgagatggaaaatga

SEQ ID NO: 703958 - DNA, 120 bp, Artificial Sequence
  ENSG00000196372_0 (sequence is synthesized)
aggtcccggcgcccagagtcgccgcgcggccgccggtgagccgcatggagccccgggcggcggacggctgcttcctgggcgacgtgggtttctgggtggagcggacccctgtgcacgagg

SEQ ID NO: 703959 - DNA, 120 bp, Artificial Sequence
  ENSG00000196372_1 (sequence is synthesized)
cagcccagcggggtgagagcctgcagctgcaacagctgatcgagagcggcgcctgcgtgaaccaggtcaccgtggactccatcacgcccctgcacgcagccagtctgcagggccaggcgc

SEQ ID NO: 703960 - DNA, 120 bp, Artificial Sequence
  ENSG00000196372_2 (sequence is synthesized)
ggtgtgtgcagctgctgctggcggctggggcccaggtggatgctcgcaacatcgacggcagcaccccgctctgcgatgcctgcgcctcgggcagcatcgagtgtgtgaagctcttgctgt

SEQ ID NO: 703961 - DNA, 120 bp, Artificial Sequence
  ENSG00000196372_3 (sequence is synthesized)
cctacggggccaaggtcaaccctcccctgtacacagcgtcccccctgcacgaggcctgcatgagcgggagttccgaatgtgtgaggcttcttattgacgtcggggccaatctggaagcgc

SEQ ID NO: 703962 - DNA, 120 bp, Artificial Sequence
  ENSG00000196372_4 (sequence is synthesized)
acgattgccattttgggacccctctgcacgttgcctgtgcccgggagcatctggactgtgtcaaagtgctgctcaatgcaggggccaacgtgaatgcggcaaagcttcatgagactgccc

SEQ ID NO: 703963 - DNA, 120 bp, Artificial Sequence
  ENSG00000196372_5 (sequence is synthesized)
ttcaccacgcggccaaggtcaagaatgttgacctcatcgagatgcttatcgagtttggcggcaacatctacgcccgggacaaccgcgggaagaagccgtctgactacacgtggagcagca

SEQ ID NO: 703964 - DNA, 120 bp, Artificial Sequence
  ENSG00000196372_6 (sequence is synthesized)
gcgctcccgccaagtgcttcgagtactacgaaaagacacctctgactctgtcacagctctgcagggtgaacttgaggaaggccactggcgtccgagggctggagaagattgccaagttaa

SEQ ID NO: 703965 - DNA, 120 bp, Artificial Sequence
  ENSG00000196372_7 (sequence is synthesized)
acatcccgccccggctcattgattacctctcctacaactgaattgcaggtggggtccggaccgtggctgcccccgttgtgcccagcattgcccgggtgagggctctgcctgttcctctga

SEQ ID NO: 703966 - DNA, 120 bp, Artificial Sequence
  ENSG00000196372_8 (sequence is synthesized)
agcagcgtgattgctgtagatagaacaacgctccttcgagtcccttcctgcgatcctgtttaggcttctctcctggatcctggataatgtttccagggtgttgggaaggcctgcgtctca

SEQ ID NO: 703967 - DNA, 120 bp, Artificial Sequence
  ENSG00000196372_9 (sequence is synthesized)
ggtcacagttgtgggtgtggccctgcgctgttctacagaacctaccctctcaatgggcatgggcccaaccatccagttttcctcttttacggaccatcctcaaaggcactctcaggacag

SEQ ID NO: 703968 - DNA, 120 bp, Artificial Sequence
  ENSG00000196372_10 (sequence is synthesized)
acggcgtggggagcacagaggaggctggcagagctggggactgagggcattgttgctgattctcactcaccggggcagcctgccgcagatgcacaggccccaggtgcaggccaccacctc

SEQ ID NO: 703969 - DNA, 120 bp, Artificial Sequence
  ENSG00000196372_11 (sequence is synthesized)
gggactgctgctctgctggctgctgtgtggatgcttttcctggagcactttccaaggcatcccccagccccaagcctgcgcgcatctgtcactcagggactttctatgggtctttgtggg

SEQ ID NO: 703970 - DNA, 120 bp, Artificial Sequence
  ENSG00000196372_12 (sequence is synthesized)
ggaaggccctggctttgtattccccacaagtagcactgagtttcttaggaaatttgtcttcagtattaggtctccaactcttgtaaaaagtttatatgtaggataaaaaccttttagagg

SEQ ID NO: 703971 - DNA, 120 bp, Artificial Sequence
  ENSG00000196372_13 (sequence is synthesized)
acacgtaggcggtaccactaaggttttggtaatgagccattcaaaccgacagcagtgtgaaggtgtgtcaaggtgtatattctcgtggctcggcattctcagtgcaaaggcctgtttgga

SEQ ID NO: 703972 - DNA, 120 bp, Artificial Sequence
  ENSG00000196372_14 (sequence is synthesized)
gactctgtgggaattgtttttcatctgtttctatggttgtcaaatgaattcttcacccaccctacagtttgctaactccttgaagctatcaaattagtaagaccatctatcacatccagc

SEQ ID NO: 703973 - DNA, 120 bp, Artificial Sequence
  ENSG00000196372_15 (sequence is synthesized)
attgtcccagtgctttgagttggacgggaatgggactctgcagccaaggcaggataagaaaatcttgcaatcccgtcctgcagtgatagaaacaggtcgttctgcattataagccatagg

SEQ ID NO: 703974 - DNA, 120 bp, Artificial Sequence
  ENSG00000196372_16 (sequence is synthesized)
tggagcattcggtagcgtattcagactgcatgggccggcctaggagtctttgccttcataaattttaagaaccccgcccacaacagggagttaaactggaggactttgcatgattagttc

SEQ ID NO: 703975 - DNA, 120 bp, Artificial Sequence
  ENSG00000196372_17 (sequence is synthesized)
aggagtttgaaaccagcctggccaacttgatgaaaccccatctctacccattctggagaacaggtcacgcctgtcctggagacagtgtgccgggaaaagggaacgtggtactcactggat

SEQ ID NO: 703976 - DNA, 120 bp, Artificial Sequence
  ENSG00000196372_18 (sequence is synthesized)
gccgggaaaagggaacgtggtactcactggatgcacccaggccggcccgagcctcccaccgcagacagtgtggaacagagtgagcctgagctgcccaaggcgatgccctttgtgctgtat

SEQ ID NO: 703977 - DNA, 120 bp, Artificial Sequence
  ENSG00000196372_19 (sequence is synthesized)
gactggaggcctctccgcgtgggtacttgggggtggggccacaaatctggcgaaaaacttcatgctggccgccgtgaggttttactccagcgttcccgccattgtcatggcgggtcttcg

SEQ ID NO: 703978 - DNA, 120 bp, Artificial Sequence
  ENSG00000196372_20 (sequence is synthesized)
tcctaaactgagaagaaaagcattcctgtttgatcaccgccttagttaccagttctggatcagtcagtgtttctgcatggaataacaaccattaaaaaaagcactgggttctgccctttc

SEQ ID NO: 703979 - DNA, 120 bp, Artificial Sequence
  ENSG00000196372_21 (sequence is synthesized)
atctttgtaagagattcttgcctctagcaatgacaacctgtgatgtctcacagtagagcacttagcgcagaatcaggtccccacggctgttgctcaataaaagtggcggaataaagtgca

SEQ ID NO: 703980 - DNA, 120 bp, Artificial Sequence
  ENSG00000196372_22 (sequence is synthesized)
gaacgagatgacttctctactcaggaggccgtcggtgctccgcagccacgtgctatctctttcagtgtcgttgcctagcacataatagcaaagcaaaccggtgcttctaagaagcatctt

SEQ ID NO: 703981 - DNA, 120 bp, Artificial Sequence
  ENSG00000196376_0 (sequence is synthesized)
acagacggtagctttccgaccgagcggggcacaggctgaggcggcgccagcacaactgccgccgcgcgccccgaggagacccgggcacgaggaaacaaggagaaatcaggactccttccc

SEQ ID NO: 703982 - DNA, 120 bp, Artificial Sequence
  ENSG00000196376_1 (sequence is synthesized)
ggactccttccccggaaccgaccggcagctccgcgcccccgcgcgacacccttcgcagccacttcgcggggcgggccaggacttggggacgcggctcgggaagagccggggcgggcggcg

SEQ ID NO: 703983 - DNA, 80 bp, Artificial Sequence
  ENSG00000196376_2 (sequence is synthesized)
cgggcgcgagggtgcgcgcactgggactggagaggagtgagtggcgggctgggcggcggcggccgtagccgcgggtgcct

SEQ ID NO: 703984 - DNA, 120 bp, Artificial Sequence
  ENSG00000196376_3 (sequence is synthesized)
cgcggccgcccggccgggtcctctgcgcgttcccgggcccggaaccggcacacgatgcacccggctgcgttctgatcgccgccgcgcctcagcctctgccgcgatgatcccccctgagca

SEQ ID NO: 703985 - DNA, 120 bp, Artificial Sequence
  ENSG00000196376_4 (sequence is synthesized)
gccgcagcagcagctgcagccgccgtcgccagccccgccgaaccatgtggtgaccaccatcgagaacctgccggccgagggcagcggcggcggcgggagcctgtccgcctcctcccgggc

SEQ ID NO: 703986 - DNA, 120 bp, Artificial Sequence
  ENSG00000196376_5 (sequence is synthesized)
tggcgtgcgccagaggatccgcaaagtgctgaacagggagatgttaatctctgtggccctaggccaggtgttatccctccttatttgtggaattggcttgactagcaagtatctgtcaga

SEQ ID NO: 703987 - DNA, 120 bp, Artificial Sequence
  ENSG00000196376_6 (sequence is synthesized)
agatttccacgccaacacaccagtcttccagagtttcctcaattacattcttctcttcttggtctataccaccacactagccgtcagacaaggagaagaaaacctcctggcaattttacg

SEQ ID NO: 703988 - DNA, 120 bp, Artificial Sequence
  ENSG00000196376_7 (sequence is synthesized)
acgaagatggtggaagtacatgattttgggactcatagacctggaagcaaattatctggtggtcaaggcttaccaatacacaactctgaccagtatccagctcctggactgttttgtgat

SEQ ID NO: 703989 - DNA, 120 bp, Artificial Sequence
  ENSG00000196376_8 (sequence is synthesized)
cccagtcgtgattttgctctcctggttcttcctgctgatccggtacaaggctgtgcatttcatcggcatcgttgtctgcatcctgggaatgggctgcatggtgggagcagatgtgcttgt

SEQ ID NO: 703990 - DNA, 120 bp, Artificial Sequence
  ENSG00000196376_9 (sequence is synthesized)
gggaagacatcagggagcaggggaaaataagctggtaggggaccttctggtcttaggaggagccacactctatggtatttctaacgtctgggaagaatacatcatccgaactctgagccg

SEQ ID NO: 703991 - DNA, 120 bp, Artificial Sequence
  ENSG00000196376_10 (sequence is synthesized)
agtggaattcctgggaatgattggtctctttggagcatttttcagtggaattcaattagctataatggagcataaggaactgttgaaggtgccctgggactggcaaataggactgctcta

SEQ ID NO: 703992 - DNA, 120 bp, Artificial Sequence
  ENSG00000196376_11 (sequence is synthesized)
cgttggctttagtgcctgcatgtttggtctctacagctttatgccagtcgtcataaagaaaaccagtgccacttcagtcaacctctccttgctcacagcagacttgtacagcctgttctg

SEQ ID NO: 703993 - DNA, 120 bp, Artificial Sequence
  ENSG00000196376_12 (sequence is synthesized)
tggattgtttctcttccactacaagttttcaggactttatctcctgtctttcttcaccatcctcattgggctggtgctctactcctccacctccacctacatagcccaggacccccgagt

SEQ ID NO: 703994 - DNA, 120 bp, Artificial Sequence
  ENSG00000196376_13 (sequence is synthesized)
gtataagcagttccgcaatccttcaggacctgttgtggacttaccgaccacagctcaggtggaaccctcagtcacctacaccagcctgggccaggagaccgaagaggagcctcatgttcg

SEQ ID NO: 703995 - DNA, 120 bp, Artificial Sequence
  ENSG00000196376_14 (sequence is synthesized)
tgtggcctagggtgaggcccgccctgccaactgaggccaactcattggccatgtttttgcccatcatctctgtattgtacatagagaaaggtatttactaggtgcagtttacacaggtgg

SEQ ID NO: 703996 - DNA, 120 bp, Artificial Sequence
  ENSG00000196376_15 (sequence is synthesized)
actgcaaggtagcaaatcctccaaaagcttgtgaaaggaacaagctcaacatcactggagacacaggctctaatccacctgacttggaaggatgcctagctaacgtgtatcctgatcaca

SEQ ID NO: 703997 - DNA, 120 bp, Artificial Sequence
  ENSG00000196376_16 (sequence is synthesized)
actcccctgcattcattactgtgaaaatttttgaatcaaaagcaagtattattgttattatgatttgtattattattattgctgttactgttattacaccaactttcaggaggatgtttt

SEQ ID NO: 703998 - DNA, 120 bp, Artificial Sequence
  ENSG00000196376_17 (sequence is synthesized)
gtactcctgatggaaactattgccagacccacatgtagtcaacataaaccccacttttctatggcaattcactttttaagagtcatactttatttttttgcacagactatatgagtgatg

SEQ ID NO: 703999 - DNA, 120 bp, Artificial Sequence
  ENSG00000196376_18 (sequence is synthesized)
catgccacaggagctccacccctgagaagtttccttttcctagggacctggtggttaatggtttcctctgttacctgttggattgcctgctcaataagtattttgtgctgtgacctttgt

SEQ ID NO: 704000 - DNA, 120 bp, Artificial Sequence
  ENSG00000196376_19 (sequence is synthesized)
ggggaggggcaactgaccatatacttctctattctaggaatagatataaaagaaacattttagcctttttatatttcgatctctgattactccaggccattgcctttctgttgtgccacg

SEQ ID NO: 704001 - DNA, 120 bp, Artificial Sequence
  ENSG00000196376_20 (sequence is synthesized)
tgattctgctaatcaagtccctgtaataacaggataaggactgttccattactgtggcttttgggagcccccagaaataatatcatttgtgtttaggacaatatataattataaaatctt

SEQ ID NO: 704002 - DNA, 120 bp, Artificial Sequence
  ENSG00000196376_21 (sequence is synthesized)
tatggaaattaatcaaggcactggaaaaagccatggtcctctgcccttttaattctgtgacacctttttaaaaatacaccagcatggaaattacctttattgtggaaaatcattggttgt

SEQ ID NO: 704003 - DNA, 120 bp, Artificial Sequence
  ENSG00000196376_22 (sequence is synthesized)
gccacctcctaacaaagtcaaggtgctgatgtggagcagtctttgaaaatggcttaattgatttggccactttgcagtggtaacaatgtcatcattgaaaaagtctggcattttggtcat

SEQ ID NO: 704004 - DNA, 75 bp, Artificial Sequence
  ENSG00000196376_23 (sequence is synthesized)
taacaatgtcatcattgaaaaagtctggcattttggtcatatttggcatccattcaataacagatatattgacac

SEQ ID NO: 704005 - DNA, 120 bp, Artificial Sequence
  ENSG00000196376_24 (sequence is synthesized)
tatggacccagagaatactgcaggatcctgataagaccttgagtgatatgtcactagtctaatctgttgcccttaaaatagcccttttttcaaacacaggaaattaagaaacaccacaga

SEQ ID NO: 704006 - DNA, 120 bp, Artificial Sequence
  ENSG00000196376_25 (sequence is synthesized)
cctctattatttagaatagattctatgtgtcagtatgtgatgtactcttttagtttgactgacttcaataccattcaaaaagatcctcaatggagttacagggtttataggggaaaaata

SEQ ID NO: 704007 - DNA, 120 bp, Artificial Sequence
  ENSG00000196376_26 (sequence is synthesized)
catgtttatgagacattgggcaattcaaatcaacatgtgttacataagcaagcaaagcaaaacaccagtggggtctctggaaagtaaaaggacagactacagtagaaggactgatcccag

SEQ ID NO: 704008 - DNA, 120 bp, Artificial Sequence
  ENSG00000196376_27 (sequence is synthesized)
agtgcctgtacaaggcctaaatctggcaggcaaaagcatcccacactgtctgtcagcacccacatggcctttttgcctgccttctataacgggtaagtggacctacccttggagatagag

SEQ ID NO: 704009 - DNA, 120 bp, Artificial Sequence
  ENSG00000196376_28 (sequence is synthesized)
aagaaaaattatcttctctgatattcggatgtaatggtcatctcagttcagccccctaggaaacatgttttattttccatggggaaaatatcagcgttaaagctctatcaaatcaaaaca

SEQ ID NO: 704010 - DNA, 120 bp, Artificial Sequence
  ENSG00000196376_29 (sequence is synthesized)
actttgccaacatcttctctctgctaccttttaaaccaattaaatacctttctctgaatattttgtccattcagatccgaagacctttaaagactgtggttttatttttgtgtttacatt

SEQ ID NO: 704011 - DNA, 120 bp, Artificial Sequence
  ENSG00000196376_30 (sequence is synthesized)
cctttggtttgaataatttgcttgatttattgcatttttagtatttattttaagccagatgttttcatctttgattcatttttatgacattaatttgtagacacttagtaaagtcttatg

SEQ ID NO: 704012 - DNA, 120 bp, Artificial Sequence
  ENSG00000196376_31 (sequence is synthesized)
agaagcaagtggatgaaattatctccaagtccactcagtagactggagttttttaaaaatataaatttccaaaaagtttgcaatcaacagatggctaaaggttgccatctgaattatttt

SEQ ID NO: 704013 - DNA, 120 bp, Artificial Sequence
  ENSG00000196376_32 (sequence is synthesized)
ataggatattttaattgactccattgtatggaaaccaagtgtgaatgttaagatgaatttgccgtataccctttatcattcggtgtccttgtactcagactttcatgtccctgggtgacc

SEQ ID NO: 704014 - DNA, 120 bp, Artificial Sequence
  ENSG00000196376_33 (sequence is synthesized)
tcaatgtgttggtttgtctccatttagaaaggttgataatatattgaattgttcaagatcaggagttccagactgaccctccaggaaaaaaaaaatcgcaaagaacaaattctttttctg

SEQ ID NO: 704015 - DNA, 120 bp, Artificial Sequence
  ENSG00000196376_34 (sequence is synthesized)
tgtaaaaaacactgatcctttgggaatggggcgggaaatgggagtaggacaacattaactttagctgttttagtttctgagatttcataacctcagtagacaccagcaaaattttcagtt

SEQ ID NO: 704016 - DNA, 120 bp, Artificial Sequence
  ENSG00000196376_35 (sequence is synthesized)
tctaactccaccaccaatctctcctcaatgaataagactttagcaatttatatagaatttgatcaggtaagagcgaaccacaattctcctgaaccctgctagagattaagtggtggttct

SEQ ID NO: 704017 - DNA, 120 bp, Artificial Sequence
  ENSG00000196376_36 (sequence is synthesized)
cacttcctcaatgaaaacttgcactggggacagcgcttgccttggtcagaccttcccacatctacatactctcaaatacatgaccaggtgatcaagcaatggaaaaatttgcaccaccgt

SEQ ID NO: 704018 - DNA, 120 bp, Artificial Sequence
  ENSG00000196376_37 (sequence is synthesized)
gtcccatgaaattgtttcaatgtttagtttagatattgctaacttgtgctattaaccttttgacaagcgtgtagtattgtttgttttgggtttctttttgatttataactatttagtagt

SEQ ID NO: 704019 - DNA, 120 bp, Artificial Sequence
  ENSG00000196376_38 (sequence is synthesized)
ccccagctagctaccagtacagattttaccccatgggtaggattctattgttaagccacataacaaagcacactaattctgacaacactgcaaatggaaaatacgaaccaaaaaaaagtt

SEQ ID NO: 704020 - DNA, 120 bp, Artificial Sequence
  ENSG00000196376_39 (sequence is synthesized)
acaccgataagttcaacaaactgtccatttttgatatttgcatgctcccctatggactggctgtggcaatgtaatgcctgtataatgttttcaaataaaaataaatgctttatgaaagca

SEQ ID NO: 704021 - DNA, 120 bp, Artificial Sequence
  ENSG00000196378_0 (sequence is synthesized)
ctgccgtgctgctcggcggcgctgaggccaaatagttgcatcacatgtatctaatccgagagtctcatgcttctgctcctcagtgaccagctcctgctcactgccctcagaaagcccaac

SEQ ID NO: 704022 - DNA, 120 bp, Artificial Sequence
  ENSG00000196378_1 (sequence is synthesized)
cctcaggcaatggcggccttgttcctgtctgccccaccccaggccgaggtgaccttcgaggacgtggctgtgtacctctcccgggaggaatggggccgcctgggccctgctcagaggggc

SEQ ID NO: 704023 - DNA, 120 bp, Artificial Sequence
  ENSG00000196378_2 (sequence is synthesized)
ctctacagggacgtgatgctggagacctacgggaacctagtctcactgggagtaggacctgcaggccccaagcctggagtgatctcgcagttggagcgaggggatgagccctgggtcctg

SEQ ID NO: 704024 - DNA, 120 bp, Artificial Sequence
  ENSG00000196378_3 (sequence is synthesized)
gatgttcagggcacctctgggaaagagcacctgagagtcaacagcccagctcttgggaccagaactgagtacaaggagttgacttcacaggagacatttggtgaggaagatccccaggga

SEQ ID NO: 704025 - DNA, 120 bp, Artificial Sequence
  ENSG00000196378_4 (sequence is synthesized)
tctgagccagtagaagcctgtgaccacatcagtaagtcagaggggagcctggaaaagctagtggagcagagaggccccagggcagtcacactgaccaacggggagagcagcagggagtct

SEQ ID NO: 704026 - DNA, 120 bp, Artificial Sequence
  ENSG00000196378_5 (sequence is synthesized)
gggggaaacctcaggttgctgtcaagacctgttcctgatcagagacctcacaaatgtgatatatgtgagcaaagttttgaacagagatcatatctcaacaaccataagcgtgtacacagg

SEQ ID NO: 704027 - DNA, 120 bp, Artificial Sequence
  ENSG00000196378_6 (sequence is synthesized)
tcaaaaaaaacaaatacagttcgtaactctggggaaatcttcagtgcaaacttagttgttaaagaagatcagaaaattcctactgggaaaaaattgcattattgcagttactgtgggaaa

SEQ ID NO: 704028 - DNA, 120 bp, Artificial Sequence
  ENSG00000196378_7 (sequence is synthesized)
cgagttcatcaatcaccgaaggatgcactcaggagagattccctaccggtgtgacgagtgtgggaagacattcacccggaggcccaacctcatgaagcaccagaggattcacactgggga

SEQ ID NO: 704029 - DNA, 120 bp, Artificial Sequence
  ENSG00000196378_8 (sequence is synthesized)
gaaaccctacaagtgtggggagtgtgggaagcactttagcgcctactcttccctgatttatcaccagagaatccacaccggagagaaaccctataaatgtaatgactgcgggaaagcctt

SEQ ID NO: 704030 - DNA, 120 bp, Artificial Sequence
  ENSG00000196378_9 (sequence is synthesized)
cagtgatggctcaatccttatccgacatcgtcggactcacaccggagagaagccatttgagtgcaaggaatgtggcaaaggctttacacaaagttctaaccttatccaacatcagagaat

SEQ ID NO: 704031 - DNA, 120 bp, Artificial Sequence
  ENSG00000196378_10 (sequence is synthesized)
tcacactggagagaaaccctataaatgtaatgaatgtgagaaagctttcattcaaaaaaccaaactcgtggaacatcagagaagccacactggagagaagccctatgaatgcaatgactg

SEQ ID NO: 704032 - DNA, 120 bp, Artificial Sequence
  ENSG00000196378_11 (sequence is synthesized)
tggcaaagttttcagccaaagcacacacctcatccagcaccagagaatccacacaggagagaagccctacaagtgcagcgagtgtgggaaggccttccacaacagttccagactcatcca

SEQ ID NO: 704033 - DNA, 120 bp, Artificial Sequence
  ENSG00000196378_12 (sequence is synthesized)
ccaccagaggctgcaccacggagagaaaccctacagatgcagcgattgcaagaaagccttcagccagagcacgtacttgattcagcaccggaggatccacaccggggagaagccctacaa

SEQ ID NO: 704034 - DNA, 120 bp, Artificial Sequence
  ENSG00000196378_13 (sequence is synthesized)
gtgcagcgagtgtgggaaggccttccggcacagttccaacatgtgtcagcatcagcggattcacctccgggaggacttctccatgtaacagtggcgcggtgtccgagggcagagtccagc

SEQ ID NO: 704035 - DNA, 120 bp, Artificial Sequence
  ENSG00000196378_14 (sequence is synthesized)
tgagcacttcctgcatgcgcccccggcacctgactctgccctttatgtattatccacacgatgttttcacagagtgaaaggacgtttctcattaaacaaacctcttttcttaaatcaaaa

SEQ ID NO: 704036 - DNA, 120 bp, Artificial Sequence
  ENSG00000196378_15 (sequence is synthesized)
ggccgaacgggcgaggttgggctgccgtgctgctcggcggcgctgaggccaaatagttgcatcacatgtatctaatccgagagtctcatgcttctggtagctcctcagtgaccagctcct

SEQ ID NO: 704037 - DNA, 120 bp, Artificial Sequence
  ENSG00000196378_16 (sequence is synthesized)
gcccaaccctcaggcaatggcggccttgttcctgtctgccccaccccaggtgagtgtctgtcctcctgggaggagtgaagtttttacccagggctttccttggcaaacactgccaggtgt

SEQ ID NO: 704038 - DNA, 120 bp, Artificial Sequence
  ENSG00000196378_17 (sequence is synthesized)
ctctggtttgggatgctgacatgatggtaggggtggccctgagacccccatgcagccaccccttgggatgtattagctggctcggtggcagatgggtcaggccacccactgtgctgctgc

SEQ ID NO: 704039 - DNA, 120 bp, Artificial Sequence
  ENSG00000196381_0 (sequence is synthesized)
acaaacgcggcggaaccggttgcggggaggttgcttgaattctctcagctgcgccccctgacctagtagtcgctggcacaagctgcgcccggagacgtgggagcgttctcttgttttccg

SEQ ID NO: 704040 - DNA, 120 bp, Artificial Sequence
  ENSG00000196381_1 (sequence is synthesized)
agtgcgcggactcatcgggtcacagtttatgcttttatgacgcgggaacacaacagatttgagaagcctcggattaaggaataatttatgaagctccgttgactaccgtggagagatcat

SEQ ID NO: 704041 - DNA, 120 bp, Artificial Sequence
  ENSG00000196381_2 (sequence is synthesized)
aatttggggttcaagattccagtctgtgtttttccagaggtgccctgaggagcagggaagcatggctattgtggatgtaaaagccatgttcaagatatgctgtctagatatgagaccaag

SEQ ID NO: 704042 - DNA, 120 bp, Artificial Sequence
  ENSG00000196381_3 (sequence is synthesized)
gagttaactcttaagaatggcacttttgaaaaggaatcattaaaatggaaaataatagaaagtgtcagaagttcttgccttgaggaatcttttttgggaaatgattggaaatgcaaagga

SEQ ID NO: 704043 - DNA, 120 bp, Artificial Sequence
  ENSG00000196381_4 (sequence is synthesized)
ctctttgagagacaacaggaaactacagaggaatatttcaggcatgtaactgtgccatttgaaaaaatatccgaattcatccagcctacatattttcttctaaatcaaataattcatact

SEQ ID NO: 704044 - DNA, 120 bp, Artificial Sequence
  ENSG00000196381_5 (sequence is synthesized)
ggaaagaaactctatgaacaaaaaaaaaaatgagaaaatgttactcaacagggaagaattcatatcagtgacaagcttgacgaaatgtgtgggaacacctctgtattttgcacaaatcat

SEQ ID NO: 704045 - DNA, 120 bp, Artificial Sequence
  ENSG00000196381_6 (sequence is synthesized)
atgaaacatcagacaaattttaatgcaaagaaatgcaatgtatttaaagaatgtggcagagactgcttgtaactttcaactaactcaatatcaaataagtcatgctaatcagaaacccta

SEQ ID NO: 704046 - DNA, 120 bp, Artificial Sequence
  ENSG00000196381_7 (sequence is synthesized)
tgaatgtcagatatgtggaaagccctttagaaagcgtgcccaccttacccaacataatcgaattcacactggtgggaaaccatatgaatgcaaagaatgtgggaaagtgtttatctgttg

SEQ ID NO: 704047 - DNA, 120 bp, Artificial Sequence
  ENSG00000196381_8 (sequence is synthesized)
ttcaacattgattcaacataagagaactcacactagtgagaaaccctatgaatgtctggaatgtagaaagacgtttaggcggagtgcacatcttattcgacatcaaagaattcatactgg

SEQ ID NO: 704048 - DNA, 120 bp, Artificial Sequence
  ENSG00000196381_9 (sequence is synthesized)
tgagaaaccttataaatgtaagcaatgttggaaggcctttgcttctgtttctgatttaatagacatcggaaaattcacactgatgagagactttacgaatgtacagaatgtgggaaggca

SEQ ID NO: 704049 - DNA, 120 bp, Artificial Sequence
  ENSG00000196381_10 (sequence is synthesized)
tttaacaatcgctcaactcttattcagcatcagagaattcacactggtgagaagtcctttgaatgtaaggaatgtggcaaagcattcaataattgctcaacacttactcaacaccagaga

SEQ ID NO: 704050 - DNA, 120 bp, Artificial Sequence
  ENSG00000196381_11 (sequence is synthesized)
actcatactaatgagaaatcttatgaatgtcaggaatgtaaaaaggcttttaggcaaagtgcacatcttactcaacatcaaagaattcatactggtgagaaaccatatgagtgtaagtaa

SEQ ID NO: 704051 - DNA, 120 bp, Artificial Sequence
  ENSG00000196381_12 (sequence is synthesized)
tgtgggaaggctttcacttgtgtttctgattttaatagacatcagagaattcacactggtgaaaaaccctatgaatgtaaagaatgtggtagagcttttaacaattgttcagctcttatt

SEQ ID NO: 704052 - DNA, 120 bp, Artificial Sequence
  ENSG00000196381_13 (sequence is synthesized)
tggtgagaaggcttatgaatataagcagtgtgggaaggtttttgtctcctgtccaacacttgttcaacatcagagaacacatactaatgaaaaaccttatgaatgtcagtaatgcaagaa

SEQ ID NO: 704053 - DNA, 120 bp, Artificial Sequence
  ENSG00000196381_14 (sequence is synthesized)
ggccttcaagcataatgcacatctaatgagacatcagagaattcacagtggggagaaaccctatgaatgtaatgaatgtgggaatgccttcatttgtttttttgattttaatagacatca

SEQ ID NO: 704054 - DNA, 120 bp, Artificial Sequence
  ENSG00000196381_15 (sequence is synthesized)
gagaattcacaaaggagagaaaccctatcagtgtaaagaatgtgggaaggtttttaataattatccaactcttactcaacatcaaagaattcataccagtgtgaaaccctatgaatgtaa

SEQ ID NO: 704055 - DNA, 120 bp, Artificial Sequence
  ENSG00000196381_16 (sequence is synthesized)
ggaatgtgtaaagacctttacttggctttcaaacttgaataaacatcagacaattcacactggtgacaaaccctatgaatgtaaagattgtaaaaaagcttttctttgttattcaacatt

SEQ ID NO: 704056 - DNA, 120 bp, Artificial Sequence
  ENSG00000196381_17 (sequence is synthesized)
tattcaacactatagaactcatactaatgagaaacctatgaatgtcaggaatgcagcaaggcctttaagcagagagcccatcttagtcaacatcaaaatattcatactggtgagaaaccc

SEQ ID NO: 704057 - DNA, 120 bp, Artificial Sequence
  ENSG00000196381_18 (sequence is synthesized)
tatgagtttaaggaatgtgggaaggcctttgcttgtttcctaccttaatagaaatcagagaattcacactagtgagaaaccgtatcagtgtaaaaaatgtagaaaatcctttattgattg

SEQ ID NO: 704058 - DNA, 120 bp, Artificial Sequence
  ENSG00000196381_19 (sequence is synthesized)
ttcaactcttaacaccagagaattcacactggtgagaaaccctttgaatgtcaggaatgtaggaaggcctttaggcagagggcgcatcttactcaacatcaaagaattcctactggtgag

SEQ ID NO: 704059 - DNA, 120 bp, Artificial Sequence
  ENSG00000196381_20 (sequence is synthesized)
aaaccctatgaatgtaatgaatgtgagaaggcctcttcttgtctttcataggtgaaaaagcaccagagaatacatacatgaagggacaaatcttatgtatttgaatagcgtctttttatt

SEQ ID NO: 704060 - DNA, 120 bp, Artificial Sequence
  ENSG00000196381_21 (sequence is synthesized)
taacaatccttatctaacatcaccaaattcacattgcagagaaacttcagaaatataagaaatgtgggaaacacttttacctgtccctcagctatactttttcataacagaatttgtaca

SEQ ID NO: 704061 - DNA, 120 bp, Artificial Sequence
  ENSG00000196381_22 (sequence is synthesized)
ggtgagaagcctaatgaaagcccgatatgtgtaaagatctactctcacaatatactcaacattatataatgtatagtgtgattaatataggaaatccttgattttgaaattatcaattat

SEQ ID NO: 704062 - DNA, 120 bp, Artificial Sequence
  ENSG00000196381_23 (sequence is synthesized)
ggaatagcaaacaatttgtaagtgaagaaaatccagtgactgtaaatttttttacctcataattcacaatttattaagcatcagaatttatatggaaaaaatagaatatcaattattaat

SEQ ID NO: 704063 - DNA, 120 bp, Artificial Sequence
  ENSG00000196381_24 (sequence is synthesized)
aaaaacattaccactaaaattttatttgacttatagagaatagcatatagagaataatcatgttgactttgtgaatgtagaaaagcttttatctattacacgaatctttttcagcatcat

SEQ ID NO: 704064 - DNA, 120 bp, Artificial Sequence
  ENSG00000196381_25 (sequence is synthesized)
tatactttcaccagtttccacgtctgttttattaccaagtaatttaaactgtatacttcagattacaaatttcttacattgtgataaggttattgtgaagattaaatgagtttatccaaa

SEQ ID NO: 704065 - DNA, 120 bp, Artificial Sequence
  ENSG00000196381_26 (sequence is synthesized)
tatgagaaaattatctttgataatatagagtaacttgaagtctgtttcatctgatattaatatagccattccaacaatttttttctgcaaattaaatgccaagatttaaaagttatctaa

SEQ ID NO: 704066 - DNA, 120 bp, Artificial Sequence
  ENSG00000196381_27 (sequence is synthesized)
gctactcgggaggctgagatgggaggatccacttgagcccaggaggtcaagtccagcctggacaactatcaagaccccatctctaaaaataaataaataacattttaaaaaagattgaaa

SEQ ID NO: 704067 - DNA, 120 bp, Artificial Sequence
  ENSG00000196387_0 (sequence is synthesized)
tttactttcctaataaacttgctttcaccttatggattcgcctcaaattctttcttgtgcaagatccaagaaccctctcttagagtctgagatccggacccctttccagtagcaaaaggt

SEQ ID NO: 704068 - DNA, 120 bp, Artificial Sequence
  ENSG00000196387_1 (sequence is synthesized)
gacccctttccagtagcaaaaggtcttagactgaagtactgactccacagtcgttgttaagaatcctagttgtttaatagaggcggtcttgggctcttgctgggccgcggtgtgttctgg

SEQ ID NO: 704069 - DNA, 120 bp, Artificial Sequence
  ENSG00000196387_2 (sequence is synthesized)
gaagtgtagtcacctgagtctccagttccttgtctctgggccgtgtgtgcacgccagcgaagcactgtgggagtcgtagtaggggaggaaaaccctataccctctggcgtgcggcgcagg

SEQ ID NO: 704070 - DNA, 120 bp, Artificial Sequence
  ENSG00000196387_3 (sequence is synthesized)
agtttgggggaatgtagtcgccagagctctgcgttgtcttccggctttgggcgtggccacgatgcactctgggagtcgtagtaggggaagaacgtcctccgctcttttgcgcacggtcgc

SEQ ID NO: 704071 - DNA, 120 bp, Artificial Sequence
  ENSG00000196387_4 (sequence is synthesized)
tagaggttctgggaagtgtagttgcctgaagctcgtgttctttgtctttcgatgatgtgcgcttggcctcaaagcaccctgggagttgcagtggggcggggaaagccatatgctctctcg

SEQ ID NO: 704072 - DNA, 120 bp, Artificial Sequence
  ENSG00000196387_5 (sequence is synthesized)
cgcggggtcgcggttgtttctgggaagtgtggtggcctgagttccacgttcttcgtttctccgctagttgtgcgcttggccgcgagacactctggcagttataggaacacaaaggtctgt

SEQ ID NO: 704073 - DNA, 120 bp, Artificial Sequence
  ENSG00000196387_6 (sequence is synthesized)
gtactcttccgcggggggccgcggttatttctgggaaatgtagttgcctaggacccgggttctttgtttctcggctctgggcgtgggaggatagcccctatgctctggcgcaccgggccg

SEQ ID NO: 704074 - DNA, 120 bp, Artificial Sequence
  ENSG00000196387_7 (sequence is synthesized)
cgatggctctgggaattgtagttgtcgcaggccctcgttctttgtctcctggcgttctgggcacggcagcgaggcgctctgggagttccagtaggaacgaaaagcccttgcgcgcagggc

SEQ ID NO: 704075 - DNA, 120 bp, Artificial Sequence
  ENSG00000196387_8 (sequence is synthesized)
cgcattggtttctgggaattgtagtttcttgaggccggcggcctggttggggtgacgtcggcgaggcttctgaagacgcaattcctgcgacgcccgcggaggggccctggggggcggcgc

SEQ ID NO: 704076 - DNA, 120 bp, Artificial Sequence
  ENSG00000196387_9 (sequence is synthesized)
cgagcgtctggcctgtgttggctgtaggcaacgaaaggagccctcccggtctgcgccggatggccccgggcggtgactcggtccggagccctggaacgctacgcccacctggcggaaagc

SEQ ID NO: 704077 - DNA, 120 bp, Artificial Sequence
  ENSG00000196387_10 (sequence is synthesized)
accacggaaacgcatccttctgtggccactgttaggtctgccattttacacttttctgatctcctccttcccttctgtgagctatgtctcaggggtcagtgacattcagagatgtggcca

SEQ ID NO: 704078 - DNA, 120 bp, Artificial Sequence
  ENSG00000196387_11 (sequence is synthesized)
tagacttctcccaggaggagtggaaatggcttcagcctgctcaaagagatttgtacagatgtgtaatgttggagaactatggccatctggtctcactgggtctttccatttctaagccag

SEQ ID NO: 704079 - DNA, 120 bp, Artificial Sequence
  ENSG00000196387_12 (sequence is synthesized)
atgtggtttccttattggagcaagggaaagaaccctggctggggaaaagggaagtgaaaagagatctgttttcagtttcagagtcaagtggtgagatcaaagacttttcaccaaaaaatg

SEQ ID NO: 704080 - DNA, 120 bp, Artificial Sequence
  ENSG00000196387_13 (sequence is synthesized)
tcatttatgatgactcatcccagtatttgatcatggaaagaattctaagtcaaggccctgtgtattccagttttaaaggaggctggaaatgcaaggatcatactgagatgctgcaagaaa

SEQ ID NO: 704081 - DNA, 120 bp, Artificial Sequence
  ENSG00000196387_14 (sequence is synthesized)
tgtggagaggccctatggatgccatgaatgtggaaaaacttttggtcgacgcttttccctggtgttacaccagaggactcatactggagagaaaccatatgcatgtaaggaatgtggcaa

SEQ ID NO: 704082 - DNA, 120 bp, Artificial Sequence
  ENSG00000196387_15 (sequence is synthesized)
aacctttagccagatttcaaaccttgtgaaacaccaaatgatacatactggaaagaaaccccatgagtgtaaggactgtaataaaacattcagttacctttcatttcttattgaacacca

SEQ ID NO: 704083 - DNA, 120 bp, Artificial Sequence
  ENSG00000196387_16 (sequence is synthesized)
gagaacgcacactggggagaaaccttatgaatgtactgagtgtggaaaggcctttagccgtgcctccaacctcactcgacatcaaagaattcacataggaaagaaacaatatatatgtag

SEQ ID NO: 704084 - DNA, 120 bp, Artificial Sequence
  ENSG00000196387_17 (sequence is synthesized)
gaaatgtggtaaagcatttagcagtggctcagaactcattcgccaccagattacacatactggagagaaaccttatgaatgcattgaatgtgggaaggcatttcgccgtttctcacacct

SEQ ID NO: 704085 - DNA, 120 bp, Artificial Sequence
  ENSG00000196387_18 (sequence is synthesized)
tactcgacatcagagcatccatacaaccaaaaccccgtatgaatgtaatgaatgtaggaaagctttccgttgtcactcattccttattaaacatcagagaattcatgctggagaaaagct

SEQ ID NO: 704086 - DNA, 120 bp, Artificial Sequence
  ENSG00000196387_19 (sequence is synthesized)
ctatgaatgtgatgaatgtggtaaagttttcacttggcatgcatcccttattcaacatacgaagagtcacactggagagaaaccctatgcgtgtgctgaatgtgataaagccttcagccg

SEQ ID NO: 704087 - DNA, 120 bp, Artificial Sequence
  ENSG00000196387_20 (sequence is synthesized)
gagcttttccctcattctacatcagagaactcatactggagagaaaccctatgtatgtaaggtatgcaacaaatccttcagctggagctcaaaccttgctaaacatcagaggacacacac

SEQ ID NO: 704088 - DNA, 120 bp, Artificial Sequence
  ENSG00000196387_21 (sequence is synthesized)
tcttgacaacccctatgaatatgaaaattcatttaattaccactcattccttactgaacaccagtgaatttacactgcaaagaaaaactatgaatgtatggaattttttaaaaagaagta

SEQ ID NO: 704089 - DNA, 120 bp, Artificial Sequence
  ENSG00000196387_22 (sequence is synthesized)
taatgccttacttcagagaactcttggaaagaagccttatgtgaaagtgatgactgtgaagtaatatggcccacactttattcaccaccctggagaaaaaaaaacccaggaatatgtgga

SEQ ID NO: 704090 - DNA, 120 bp, Artificial Sequence
  ENSG00000196387_23 (sequence is synthesized)
aaagccattaataaccactcttttatttttttgcaataacaaggtgaaatcaatattgttgagaagattcttccatctggtaatgttgagaagacttcatttggtaggagtcccttactt

SEQ ID NO: 704091 - DNA, 120 bp, Artificial Sequence
  ENSG00000196387_24 (sequence is synthesized)
tacgtgtgtaaattcctaccaggaaagaatacatatccaatagattggagaaagccagagattagccctcattccgcatctgtcaaccaggacagaaagcatggacaagggatgagcttt

SEQ ID NO: 704092 - DNA, 120 bp, Artificial Sequence
  ENSG00000196387_25 (sequence is synthesized)
acaaagatgatgcactttggagatcagaaaattcatatttaagcaaagtgatacaaacacagtgatttgggaatgccttcatttacaatgcaatacttacattttaatactcttgtagga

SEQ ID NO: 704093 - DNA, 120 bp, Artificial Sequence
  ENSG00000196387_26 (sequence is synthesized)
gaaaaagcaactgtataaatgaatgtagagtgactttctgcaatatttcaaacctatatcagagaattacactgtgggaaaactaccattgtaataagtgtagcaaaatctccttagata

SEQ ID NO: 704094 - DNA, 120 bp, Artificial Sequence
  ENSG00000196387_27 (sequence is synthesized)
tctgaaaagtcatactggatggaatctgtaggaaacggttctattttgagggaagggggattcctttttgttttttaagtgaattcagaaaatgttataaataaatcttttggtttatta

SEQ ID NO: 704095 - DNA, 120 bp, Artificial Sequence
  ENSG00000196387_28 (sequence is synthesized)
taaaccttctgcttgctgattttttcccacagcatgtgattctgaaaatgtaactacaatattgacataaaaaataaacagtagtttttcttgttgaaacatacaaacataacaaagtgt

SEQ ID NO: 704096 - DNA, 120 bp, Artificial Sequence
  ENSG00000196387_29 (sequence is synthesized)
ggaccctgtcccttgttcctccttttcaggtgcttatacttaagtatacatgaagagagtgacaggaagctatccagatgtgggcggggtttctgacctggctggcatgttttagggtga

SEQ ID NO: 704097 - DNA, 120 bp, Artificial Sequence
  ENSG00000196387_30 (sequence is synthesized)
gagggtagggtgccagctgttacatcgcctcctctttcccacagtgttagaatgaggagtgctttacgttactccagcgcccctttattcatttattcaatatgtttttactgaacctct

SEQ ID NO: 704098 - DNA, 120 bp, Artificial Sequence
  ENSG00000196387_31 (sequence is synthesized)
actttcagtggttcccacagtgtgatccttggaccagcagtatcagcatcatctgagaacgtattagaaatgaatattcttgagtcctaccccagaccttctgaatcagaaactgagaat

SEQ ID NO: 704099 - DNA, 120 bp, Artificial Sequence
  ENSG00000196387_32 (sequence is synthesized)
ttggcccagcagtctaacagtccttccaagtgattctaatgtgcaactcattctaagtcttgaggatgcagaagtgaccaaaacaaaatctccgaatcctcagagctcatttttcagaca

SEQ ID NO: 704100 - DNA, 120 bp, Artificial Sequence
  ENSG00000196387_33 (sequence is synthesized)
tgacataaggaacacatttttattttgatttggcctaagggcttggctggtaattgtgcttcacagcagtggggataacagggtcaactattcaaaatgagtccctcatttcagttccac

SEQ ID NO: 704101 - DNA, 120 bp, Artificial Sequence
  ENSG00000196387_34 (sequence is synthesized)
ttctttatcctactttttgtcatacttctctccaaattcagaggttctctgagttttgctggggaatccaatttccacctctgctgcagatcttgctgtgtaggaaacagctgctttatt

SEQ ID NO: 704102 - DNA, 120 bp, Artificial Sequence
  ENSG00000196387_35 (sequence is synthesized)
agtcaacagtctttaatcacttttttattaaacttcaaaactgtaaattataactgccatccatctgggactgctactagtttgagacattttaaattcccattcatgccttatagatca

SEQ ID NO: 704103 - DNA, 120 bp, Artificial Sequence
  ENSG00000196387_36 (sequence is synthesized)
atgtggatcactcaagtggtgcaaaaccaggctgcaaagcaagggcttatatattattccccctaactctgagggaaagtgctttaggttctgtcctgggaggtattacattctcttctt

SEQ ID NO: 704104 - DNA, 120 bp, Artificial Sequence
  ENSG00000196387_37 (sequence is synthesized)
atcctccttgttctgtgacattgctaaaattaccactaagtttcacaggtatttctttaggattagggataactgtgacaaacttgagactgtatgccccatttgaagggtggtgctgtt

SEQ ID NO: 704105 - DNA, 120 bp, Artificial Sequence
  ENSG00000196387_38 (sequence is synthesized)
atctgctgtagcgaattattaccctgaagaaattctggctgaattatattaaaataggctggtattaaggaaaatatacattgtttattaacataaaggaatactgtaaaatcttaagaa

SEQ ID NO: 704106 - DNA, 120 bp, Artificial Sequence
  ENSG00000196387_39 (sequence is synthesized)
tttttacaaccaatgccaaaaatccatattgttcatgtgtataatcctttattttgaataaaattgtaaattatctcaggacagataatttatgtttttctccttttctccagttataca

SEQ ID NO: 704107 - DNA, 120 bp, Artificial Sequence
  ENSG00000196387_40 (sequence is synthesized)
acaaaacacaagagctaggctcttcattatataattactcagaattctgaaaactctcactgttactacttagacacattgcctaacctccacagtgagactcattttattccttgatga

SEQ ID NO: 704108 - DNA, 120 bp, Artificial Sequence
  ENSG00000196387_41 (sequence is synthesized)
ttccatttctaagccagatgtggtttccttattggagcaagggaaagaaccctggctggggaaaagggaagtgaaaagagatctgttttcaggctttttttcagctaactgtgtcagctt

SEQ ID NO: 704109 - DNA, 120 bp, Artificial Sequence
  ENSG00000196387_42 (sequence is synthesized)
ctccgctttcttggtagatggaaacttcttttgtaagtttttcagagtcaagtggtgagatcaaagacttttcaccaaaaaatgtcatttatgatgactcatcccagtatttgatcatgg

SEQ ID NO: 704110 - DNA, 120 bp, Artificial Sequence
  ENSG00000196387_43 (sequence is synthesized)
agggaagtgaaaagagatctgttttcaggtgtcttttttgttcccattgttagttctgtctggtctctgaatttcatttctttttgttttttctttcctttctttcttcaaatggacata

SEQ ID NO: 704111 - DNA, 120 bp, Artificial Sequence
  ENSG00000196388_0 (sequence is synthesized)
gctcaggccccgccctcagacgagcaccgcccgccggctcctcccgcggctcgaatcgccgtctctctcctccccgccccgccgagttctagaattcgccgcgcagctgcttcagcccct

SEQ ID NO: 704112 - DNA, 120 bp, Artificial Sequence
  ENSG00000196388_1 (sequence is synthesized)
cagccccagccggaccctcgggtcctcatccaccctcgcaggcgcaggccgtggctaccccgaagtcaactgtggaggatccttcctggcttccttcagctccatcctgcccttggatct

SEQ ID NO: 704113 - DNA, 120 bp, Artificial Sequence
  ENSG00000196388_2 (sequence is synthesized)
aggtcacccgcttggacccaactatctgaggcccgaatgccccgcagctcccgctgctccctcgcgttctgctgacccccctccgagtcaggacatcccctttagaccccactttaggcc

SEQ ID NO: 704114 - DNA, 120 bp, Artificial Sequence
  ENSG00000196388_3 (sequence is synthesized)
ctttcagcccaactccaactagccccatctgccgcttccgcacgcaccaaaaaggagactaactacccagccccgtccagtcatgcaggtgcaggatgatggagtcaacctcatcccctt

SEQ ID NO: 704115 - DNA, 120 bp, Artificial Sequence
  ENSG00000196388_4 (sequence is synthesized)
tgccaagtgttccagggtggtcagccgatctccacccccaaggttgccttcccagagcctcagacccatgccccagcgttatggagatgtcttctggaagaaccttaatcaaaggcccac

SEQ ID NO: 704116 - DNA, 120 bp, Artificial Sequence
  ENSG00000196388_5 (sequence is synthesized)
gagaagaaagaagaggaggccatgtttggaaggaatgcagcagcagggccttgggggagtccccgcccgggtgagggctgtcacttaccacctggaggacctaagaaggcgtcagagcat

SEQ ID NO: 704117 - DNA, 120 bp, Artificial Sequence
  ENSG00000196388_6 (sequence is synthesized)
catcaacgaactgaagaaggcccagtggggcagctctggggctgcatctgagccagtggtgcttggcgaagagggctgtggattccccagcaccaatgaataccctgatctggaagagga

SEQ ID NO: 704118 - DNA, 120 bp, Artificial Sequence
  ENSG00000196388_7 (sequence is synthesized)
gagagcaacctatccacaggaagaggaccgttttctcactcctggcagggcccagctgctttggtctccctggagccccctggatcaggaggaggcttgtgcctccaggcagctgcactc

SEQ ID NO: 704119 - DNA, 120 bp, Artificial Sequence
  ENSG00000196388_8 (sequence is synthesized)
tctggcctcgttcagcactgtcacagccagaaggaacccccttcacaatccctgggggatggagttggcagcgtctgaagagtaaggagaaaccaccgatgccgagaggctagtggtgcc

SEQ ID NO: 704120 - DNA, 120 bp, Artificial Sequence
  ENSG00000196388_9 (sequence is synthesized)
ccagggacccaagactagttccgtcactagagtcaccctcattgctgacatgaaggcgtttccccttccttcgtctctccaactgcctttcccatcctctgaactaggcattaacagccc

SEQ ID NO: 704121 - DNA, 120 bp, Artificial Sequence
  ENSG00000196388_10 (sequence is synthesized)
ccgtgggctcccatctcaacccaccgctctcacaggagcaccccaagtcctgttttcctccaggccccgctcctggccttgtattctctctgctctgttattaaaaagcaagcaagtgga

SEQ ID NO: 704122 - DNA, 79 bp, Artificial Sequence
  ENSG00000196388_11 (sequence is synthesized)
caaaaaggagactaactacccagccccgtccagtcatgcaggtgcaggatgatggagtcaacctcatcccctttgccaa

SEQ ID NO: 704123 - DNA, 120 bp, Artificial Sequence
  ENSG00000196391_0 (sequence is synthesized)
gtgtccccacagccctgtcacgaatcccggtcgggttctgggaggcacagcctcggggttgcgggccgggtgcggctcggcggtggaggactcacttcctgctccatccccggctgggcc

SEQ ID NO: 704124 - DNA, 120 bp, Artificial Sequence
  ENSG00000196391_1 (sequence is synthesized)
ctggggcggaactgatgacgcttgataatgtggctggggacttcagggaagagtgggttacctggacactgcttagagaatcctctccaggaatgccacccagcacagttagaagaatgg

SEQ ID NO: 704125 - DNA, 120 bp, Artificial Sequence
  ENSG00000196391_2 (sequence is synthesized)
gctctcaaaggaatttccaggcctagtgtaatctcccagccggagcagaaagaagagccatgggtcctaccactccaaaactttgaggcgaggaagatcccgagggaaagccacacagac

SEQ ID NO: 704126 - DNA, 120 bp, Artificial Sequence
  ENSG00000196391_3 (sequence is synthesized)
tgtgagcatcaggtggcaaagctcaatcaggacaattctgaaacagcagaacaatgtggaacatcctcagaaaggaccaataaagatctttctcatactcttagttggggaggaaactgg

SEQ ID NO: 704127 - DNA, 120 bp, Artificial Sequence
  ENSG00000196391_4 (sequence is synthesized)
gagcaaggcctagaattagaagggcaacatggaacccttccaggagagggccagctggagtccttttcacaggagagggatttaaacaagctcctggatggatatgtaggagagaagcct

SEQ ID NO: 704128 - DNA, 120 bp, Artificial Sequence
  ENSG00000196391_5 (sequence is synthesized)
atgtgtgcagaatgcgggaaaagctttaaccagagttcctatctcataagacacctaagaacccacactggcgagaggccctatacgtgcattgagtgtgggaaaggcttcaaacagagc

SEQ ID NO: 704129 - DNA, 120 bp, Artificial Sequence
  ENSG00000196391_6 (sequence is synthesized)
tcagaccttgtcacccatcgcagaacacacacaggagagaagccctaccaatgcaaggggtgtgagaagaaattcagcgacagctcaacactcatcaaacatcagagaacccacacaggg

SEQ ID NO: 704130 - DNA, 120 bp, Artificial Sequence
  ENSG00000196391_7 (sequence is synthesized)
gagagaccctatgagtgcccagagtgtggaaagacttttgggcggaagccacacctcataatgcaccaaagaacccacacaggcgagaagccctacgcgtgcctggaatgtcacaaaagc

SEQ ID NO: 704131 - DNA, 120 bp, Artificial Sequence
  ENSG00000196391_8 (sequence is synthesized)
ttcagtcgaagctcaaatttcatcactcaccagaggacccacacaggggtgaagccttacaggtgtaatgactgtggggagagttttagccagagctcggatttgattaagcaccaacga

SEQ ID NO: 704132 - DNA, 120 bp, Artificial Sequence
  ENSG00000196391_9 (sequence is synthesized)
acccacacgggagaacggcccttcaaatgcccggagtgcgggaagggcttcagagatagttctcattttgtagctcacatgagcactcattcaggagagaggcctttcagttgtcctgac

SEQ ID NO: 704133 - DNA, 120 bp, Artificial Sequence
  ENSG00000196391_10 (sequence is synthesized)
tgccacaaaagcttcagtcagagctcacatttggtcacgcaccaaagaacacacacaggtgagagaccttttaagtgcgaaaactgtgggaaaggattcgccgacagctccgccctcatt

SEQ ID NO: 704134 - DNA, 120 bp, Artificial Sequence
  ENSG00000196391_11 (sequence is synthesized)
aagcaccaacgaatccacaccggagaaagaccctacaaatgtggagagtgtgggaagagcttcaatcagagctcccactttattacccatcagcgaatccacttaggagacaggccctat

SEQ ID NO: 704135 - DNA, 120 bp, Artificial Sequence
  ENSG00000196391_12 (sequence is synthesized)
cgatgtcctgagtgtggcaagaccttcaatcagcgttcccatttcctcacacaccagagaacgcatacaggagaaaaacctttccactgtagtaaatgtaacaagagcttccgtcagaaa

SEQ ID NO: 704136 - DNA, 120 bp, Artificial Sequence
  ENSG00000196391_13 (sequence is synthesized)
tagtctttggtgttcagctgctcccttgcacattttcattgctactgtcttcaagcaccccaaatagagaaaacctgggcgtcagtggctcaatttgggccctgatctattctccctctt

SEQ ID NO: 704137 - DNA, 120 bp, Artificial Sequence
  ENSG00000196391_14 (sequence is synthesized)
tcttgtctatgttataacagagaggataaacttaaagggtccaaataacggtccgaatacaaaaggcattccttcagtgtgtgactgactcttagggaaatgtgagtttaatagttgatg

SEQ ID NO: 704138 - DNA, 120 bp, Artificial Sequence
  ENSG00000196391_15 (sequence is synthesized)
cctgggcaacagagagagactctgtctccaaaaaaattaaaaagttgatgcctagttactaaatgagaagtgagaaaaatgtggcctagagatcacatgttcaccacctagtacagtgcc

SEQ ID NO: 704139 - DNA, 120 bp, Artificial Sequence
  ENSG00000196391_16 (sequence is synthesized)
cacctagtacagtgcctggcacaacatagatgctcaataactaaatggtcccatcattattaatgattaatagttgaggtcttatataaaggctttaatgcagtacctggcccttaaaag

SEQ ID NO: 704140 - DNA, 120 bp, Artificial Sequence
  ENSG00000196391_17 (sequence is synthesized)
acactcagtacaagattggtggcttttatcagtcttattactcaattagaaatttattagtgtagtccccccgccccaaactcagaacgtgaaagaaattagattggaactagaaggttt

SEQ ID NO: 704141 - DNA, 120 bp, Artificial Sequence
  ENSG00000196391_18 (sequence is synthesized)
ggggttggaatacacaaattgaataaaatggaaatgcactgccagttcagtgctgtgcaggcattagtcaccagaggtctcactgccatgacaaggccaaattatcgtagaggatgtttg

SEQ ID NO: 704142 - DNA, 120 bp, Artificial Sequence
  ENSG00000196391_19 (sequence is synthesized)
cggtcttgtgacttggaggctgaaagaatttcagaagctcttttaaatggcagtgtatggcagtgtatctaccagaggtttgctgtcatctgacacagagaaaatatcctacaatgaaca

SEQ ID NO: 704143 - DNA, 120 bp, Artificial Sequence
  ENSG00000196391_20 (sequence is synthesized)
agccagagggacctggtagaggactataaaattgtggaagcaaaattgctgagaatgtcaaatgatattacagggatcctccctggcatttagctgaaggaagcaactcttgttttctaa

SEQ ID NO: 704144 - DNA, 120 bp, Artificial Sequence
  ENSG00000196391_21 (sequence is synthesized)
tttgctgggtcattggccatttagttttaggttaatataattctctgatccttttagggccatccaggttatgcactagtacattcctacattcaattgaaataaattgagggacggcaa

SEQ ID NO: 704145 - DNA, 120 bp, Artificial Sequence
  ENSG00000196391_22 (sequence is synthesized)
gtgtgttggaaagaacaccgacttcattgagaaggtaaagtatttgagtcctggccctgacgcttaatttggccagactttcatcttctcccagcctcaagttttacctacctcacaagg

SEQ ID NO: 704146 - DNA, 68 bp, Artificial Sequence
  ENSG00000196391_23 (sequence is synthesized)
aaggttgttgtgaggatggttaactataaatgtaatatctctatgttataattctgttgctaatgtct

SEQ ID NO: 704147 - DNA, 89 bp, Artificial Sequence
  ENSG00000196391_24 (sequence is synthesized)
ctagtacattcctacattcaattgaaataaattgagggacggcaagtgtgttggaaagaacaccgacttcattgagaaggtgaatggca

SEQ ID NO: 704148 - DNA, 75 bp, Artificial Sequence
  ENSG00000196391_25 (sequence is synthesized)
gcctccggagtagctgggattacagatgcatgtcaccatgcccagctaattttatatgcctcctgacctcaggtg

SEQ ID NO: 704149 - DNA, 120 bp, Artificial Sequence
  ENSG00000196391_26 (sequence is synthesized)
gtgctgggattacaggcgagagccacctcacctggccacctatcactttgattttcatgttgtttggctatggtaaaatgtgagctctcgaagggcaatgtgagatttgctttgtggccc

SEQ ID NO: 704150 - DNA, 120 bp, Artificial Sequence
  ENSG00000196391_27 (sequence is synthesized)
tgagctctcgaagggcaatgtgagatttgctttgtggccctgccaatcccctccctcctccctgtcttcctgcccacccccccccactcccccgccagccatgagcagggaatatttcaa

SEQ ID NO: 704151 - DNA, 120 bp, Artificial Sequence
  ENSG00000196391_28 (sequence is synthesized)
tgctattgctgagagtggaggtaaccctttctatagttttcttttgtttctacctcatgactagatgattcactgcttgaacatgctccacacatccgttctttctcactccaaaattga

SEQ ID NO: 704152 - DNA, 120 bp, Artificial Sequence
  ENSG00000196391_29 (sequence is synthesized)
ggtcatcaccaagccccattaattttacctcccagattcctctcgaacctatctgtcaaatctgtccatcttcactgccacccttcagtaccaaatgaccagtctcttacctgaattcct

SEQ ID NO: 704153 - DNA, 120 bp, Artificial Sequence
  ENSG00000196391_30 (sequence is synthesized)
gtagcagcctccaaactgatcttcctgatatgatttttgctctgaaaaaactggtttcactcacagaaaccagagtgaacttttaaaatcctaaatcgaatcacatcacttctcagcagc

SEQ ID NO: 704154 - DNA, 120 bp, Artificial Sequence
  ENSG00000196391_31 (sequence is synthesized)
tttccattgcttttagaatgaagacccaaatccttacccaggcctaagaggcccttgtggttttgtcccctccccctccatcctcttgtgatatccccttccctctcccttgcctcacct

SEQ ID NO: 704155 - DNA, 120 bp, Artificial Sequence
  ENSG00000196391_32 (sequence is synthesized)
cagcactcttgagttctctgctccttggtcatgccaaggttgtgtgctctttagacccttggtactaactgttccctctgcccagaatgttcctcgcccagtcctttgtgttgcctccta

SEQ ID NO: 704156 - DNA, 120 bp, Artificial Sequence
  ENSG00000196391_33 (sequence is synthesized)
tttgtcaaccaggtttcagcctaaacctatctccttaggaagactttccctaactatcccatctaaattagtcaccctccatcacattatcctcttttttcatcaaagtccttacacctg

SEQ ID NO: 704157 - DNA, 120 bp, Artificial Sequence
  ENSG00000196391_34 (sequence is synthesized)
tctggcaatttcttattaattgatttgtttttggtaaactccacgaaaggtgggagtcatttctcttgtttccattctttccacagcacttagaacagtgcctggcacatggtaggtgct

SEQ ID NO: 704158 - DNA, 120 bp, Artificial Sequence
  ENSG00000196391_35 (sequence is synthesized)
caatatgtgtttactggatgaattaatgagtgcatgctcatgggcaaggatctcattgtgctggaaaagcagcagagtgagacaaaactggacaggtgagtgaaggtcacaccaagaagg

SEQ ID NO: 704159 - DNA, 120 bp, Artificial Sequence
  ENSG00000196391_36 (sequence is synthesized)
ttcttagctgccaaactaaagggtttggatcttactctctggagaaaagggtgtagctagtggttttataggagaggagaggcgcgatccgcacttgagaaggtcaatttggccgctgtg

SEQ ID NO: 704160 - DNA, 120 bp, Artificial Sequence
  ENSG00000196391_37 (sequence is synthesized)
tgtaggtcatattacggagaaaaaaactaaaggctttgagacaatccatgatgtaaagggcttagcacagtgcccagcacgcagtaggtctccagcgagtcgttatcaccaagcaccagg

SEQ ID NO: 704161 - DNA, 120 bp, Artificial Sequence
  ENSG00000196391_38 (sequence is synthesized)
gcaggcaccacaacaaaaagataagatccctaacccttcttttacctcgaaataattcctcctagaccctatcatcgcattccttctcttccccttttgtcaaacttccactcacatgta

SEQ ID NO: 704162 - DNA, 120 bp, Artificial Sequence
  ENSG00000196391_39 (sequence is synthesized)
gatattctcagggttatcatgcctaggcctttttaatagggccacttaccctagcatgcttctacaactggaccctcaaaggtcttttagggctgagtgtggtggctcacacctgtaatg

SEQ ID NO: 704163 - DNA, 120 bp, Artificial Sequence
  ENSG00000196391_40 (sequence is synthesized)
ccagcattttgggaggccgaagccagaggactgcttgagcccagaggttcaagaccagcctgggcaccatagccagaccctgtctctacaaaaaatagtttcaacaaattagccaggcat

SEQ ID NO: 704164 - DNA, 120 bp, Artificial Sequence
  ENSG00000196391_41 (sequence is synthesized)
caaaaaatagtttcaacaaattagccaggcatggtgatgtgcgcctgtcatcccaagtacttgggaggctgaggtgggaggattgcggattgcctgagcccaggagttcaaggctgcagt

SEQ ID NO: 704165 - DNA, 120 bp, Artificial Sequence
  ENSG00000196391_42 (sequence is synthesized)
cgtgacagagctagaacttgtctcttaaaaaaaaaaaaagacttaatttccacatctgaaggcctcttgttagtcttcttctgattcaacaactctttactgtttgatgccatttacata

SEQ ID NO: 704166 - DNA, 90 bp, Artificial Sequence
  ENSG00000196391_43 (sequence is synthesized)
ctgattcaacaactctttactgtttgatgccatttacatatgtttattattttttagagatggggtctcattcttttgctgaggctggag

SEQ ID NO: 704167 - DNA, 82 bp, Artificial Sequence
  ENSG00000196391_44 (sequence is synthesized)
taatatggtgaaaccccgtctctagtaaaagtacaaaaattagccaggcgtggtcgtgggcgcctgtgatcccagctactcg

SEQ ID NO: 704168 - DNA, 88 bp, Artificial Sequence
  ENSG00000196391_45 (sequence is synthesized)
gctgagatcgtgtcattgcactccagcccaggtgacaagagcgaaactccatcttttgctagagacagggttcccctatgttgcccag

SEQ ID NO: 704169 - DNA, 120 bp, Artificial Sequence
  ENSG00000196391_46 (sequence is synthesized)
tgggattacaggtgtgagctactgcaccaggcccatatgcctttttaaaaaaattatcttttccattggtgactatgaggttgagagatgattctcctacatttctggctgctcctcttc

SEQ ID NO: 704170 - DNA, 80 bp, Artificial Sequence
  ENSG00000196391_47 (sequence is synthesized)
attggtgactatgaggttgagagatgattctcctacatttctggctgctcctcttcaagtaccttccctggctcctctgg

SEQ ID NO: 704171 - DNA, 86 bp, Artificial Sequence
  ENSG00000196391_48 (sequence is synthesized)
ccaggttcaagggattctggccagctaatttttgtacttttggtagagatgggggtttcaccaggctggtcttgaactcctgcctc

SEQ ID NO: 704172 - DNA, 79 bp, Artificial Sequence
  ENSG00000196391_49 (sequence is synthesized)
taggcatgagccaccgcgcctggcctggctcctcttcttcttccactcagatatgcctgaccctgtcaacactttggtt

SEQ ID NO: 704173 - DNA, 120 bp, Artificial Sequence
  ENSG00000196391_50 (sequence is synthesized)
cttccactcagatatgcctgaccctgtcaacactttggttgaggtcttctttcttctttcttttttgctccgcacatttagcttatgacttcaaccatcatttctcagagcatgggtctg

SEQ ID NO: 704174 - DNA, 120 bp, Artificial Sequence
  ENSG00000196391_51 (sequence is synthesized)
gctcaacctctctcctgaatttcagacctacaagtctagctacttggtggagacctccccagaatgacctgctgcttcccaaaagcagactctccaaattacagtcagtatctcccccgg

SEQ ID NO: 704175 - DNA, 120 bp, Artificial Sequence
  ENSG00000196391_52 (sequence is synthesized)
aagcattcccccaggcatttctctttctgccttcaattccccattctcctacattgccttgccagaagcctgctggtcagcttggatttctttttgtccttttttttctatattttgctg

SEQ ID NO: 704176 - DNA, 120 bp, Artificial Sequence
  ENSG00000196391_53 (sequence is synthesized)
gtgcctagtcatgtagttgctgcctctacactttctcttctttaaaaaaaattattaaagcaccacgtgcttgttgtaaacatttccagaaaatacagaagtgctcaaagtgaaaaaatg

SEQ ID NO: 704177 - DNA, 120 bp, Artificial Sequence
  ENSG00000196391_54 (sequence is synthesized)
gaaatgccttgtcccttcctcattccctgccctaacctcacgccccagattcagctatgtaatagtctgtcatgccaagtcttatttccagctcctcttttccatccccactgccatcat

SEQ ID NO: 704178 - DNA, 120 bp, Artificial Sequence
  ENSG00000196391_55 (sequence is synthesized)
ctgaactaaacggattgttttccatctggtctccttggcttttcctttcagtgcagctcaacagacattaatcaagtgccttccacacaccaaagtcctaccctagatcctagaggttca

SEQ ID NO: 704179 - DNA, 120 bp, Artificial Sequence
  ENSG00000196391_56 (sequence is synthesized)
gagacaagtaagatagttaaagagatccacattccagagctgtttaactttgggcaagttacttaatctctctgacccttacttccttatctgtaaaatgatgctaatcccagcaccttt

SEQ ID NO: 704180 - DNA, 120 bp, Artificial Sequence
  ENSG00000196391_57 (sequence is synthesized)
ttcatgggtttggacgagcattaatgagatgatccatgtaaaactctttgtactaactacctggtacactgtatctgctccataaatgtcagtgacaacaatgataataatgacaatgtt

SEQ ID NO: 704181 - DNA, 120 bp, Artificial Sequence
  ENSG00000196391_58 (sequence is synthesized)
tggaggagtttatagcttaatggagagacttaaagcataagaattatctaggcgaagaatgatgagaaaatatttttggaaaaggaaaacaaacagttctactaaaattaaaaggctgat

SEQ ID NO: 704182 - DNA, 120 bp, Artificial Sequence
  ENSG00000196391_59 (sequence is synthesized)
gtagagacttgggaaactgggaggtaagagctcggactgtgtcctctaagacagtaattcccgaagtgtgagcaaaagtccacctgcatcagtcttacttggggtgattgctcaaaatga

SEQ ID NO: 704183 - DNA, 120 bp, Artificial Sequence
  ENSG00000196391_60 (sequence is synthesized)
ggatttaatggctgcacctccgagcaagttggtaatttacatatcggaatgctatccatcaaggaaaatgggcagactacagttacatgcatcaacacagacaagcttcaaacaatattg

SEQ ID NO: 704184 - DNA, 120 bp, Artificial Sequence
  ENSG00000196391_61 (sequence is synthesized)
agtgtaaaaagcaagacatagaaatatatatttagtaagagtaaaaatacagtaaaggtaaaaaagaggcaaaactaaacaatatattgcttaagcaataaggatacacaaactaatgaa

SEQ ID NO: 704185 - DNA, 120 bp, Artificial Sequence
  ENSG00000196391_62 (sequence is synthesized)
aatcaaaggatttactaatacaaacttcagtatagtaattaattggaatgggagagaaagatgcaaagtttctatttctttttttgttttgttttgagacagtgtctcattctgttgcca

SEQ ID NO: 704186 - DNA, 120 bp, Artificial Sequence
  ENSG00000196391_63 (sequence is synthesized)
tttttgttttgttttgagacagtgtctcattctgttgccaaggcaggagtgcagtggcaggatctcagatcactgcaagctcagcctcctgggttcaagtggttcttctgcctcagcctc

SEQ ID NO: 704187 - DNA, 90 bp, Artificial Sequence
  ENSG00000196391_64 (sequence is synthesized)
taagtaatccgcccacctctgccatcaaagtttctgtttcttaagttggctgccgagtacacaggttttctttgtaaaataattatttaa

SEQ ID NO: 704188 - DNA, 120 bp, Artificial Sequence
  ENSG00000196391_65 (sequence is synthesized)
tgccgagtacacaggttttctttgtaaaataattatttaaattgttaatatgcattacttatatgcttttcatttacaatgtatttcacaagaaaaataaaacaaagcaaataagaaaac

SEQ ID NO: 704189 - DNA, 120 bp, Artificial Sequence
  ENSG00000196396_0 (sequence is synthesized)
atgaagaagcagcagcggctagggcggcggtagctgcaggggtcggggattgcagcgggcctcggggctaagagcgcgacgcggcctagagcggcagacggcgcagtgggccgagaagga

SEQ ID NO: 704190 - DNA, 120 bp, Artificial Sequence
  ENSG00000196396_1 (sequence is synthesized)
ggcgcagcagccgccctggcccgtcatggagatggaaaaggagttcgagcagatcgacaagtccgggagctgggcggccatttaccaggatatccgacatgaagccagtgacttcccatg

SEQ ID NO: 704191 - DNA, 120 bp, Artificial Sequence
  ENSG00000196396_2 (sequence is synthesized)
tagagtggccaagcttcctaagaacaaaaaccgaaataggtacagagacgtcagtccctttgaccatagtcggattaaactacatcaagaagataatgactatatcaacgctagtttgat

SEQ ID NO: 704192 - DNA, 120 bp, Artificial Sequence
  ENSG00000196396_3 (sequence is synthesized)
aaaaatggaagaagcccaaaggagttacattcttacccagggccctttgcctaacacatgcggtcacttttgggagatggtgtgggagcagaaaagcaggggtgtcgtcatgctcaacag

SEQ ID NO: 704193 - DNA, 120 bp, Artificial Sequence
  ENSG00000196396_4 (sequence is synthesized)
agtgatggagaaaggttcgttaaaatgcgcacaatactggccacaaaaagaagaaaaagagatgatctttgaagacacaaatttgaaattaacattgatctctgaagatatcaagtcata

SEQ ID NO: 704194 - DNA, 120 bp, Artificial Sequence
  ENSG00000196396_5 (sequence is synthesized)
ttatacagtgcgacagctagaattggaaaaccttacaacccaagaaactcgagagatcttacatttccactataccacatggcctgactttggagtccctgaatcaccagcctcattctt

SEQ ID NO: 704195 - DNA, 120 bp, Artificial Sequence
  ENSG00000196396_6 (sequence is synthesized)
gaactttcttttcaaagtccgagagtcagggtcactcagcccggagcacgggcccgttgtggtgcactgcagtgcaggcatcggcaggtctggaaccttctgtctggctgatacctgcct

SEQ ID NO: 704196 - DNA, 120 bp, Artificial Sequence
  ENSG00000196396_7 (sequence is synthesized)
cttgctgatggacaagaggaaagacccttcttccgttgatatcaagaaagtgctgttagaaatgaggaagtttcggatggggctgatccagacagccgaccagctgcgcttctcctacct

SEQ ID NO: 704197 - DNA, 120 bp, Artificial Sequence
  ENSG00000196396_8 (sequence is synthesized)
ggctgtgatcgaaggtgccaaattcatcatgggggactcttccgtgcaggatcagtggaaggagctttcccacgaggacctggagcccccacccgagcatatccccccacctccccggcc

SEQ ID NO: 704198 - DNA, 120 bp, Artificial Sequence
  ENSG00000196396_9 (sequence is synthesized)
acccaaacgaatcctggagccacacaatgggaaatgcagggagttcttcccaaatcaccagtgggtgaaggaagagacccaggaggataaagactgccccatcaaggaagaaaaaggaag

SEQ ID NO: 704199 - DNA, 120 bp, Artificial Sequence
  ENSG00000196396_10 (sequence is synthesized)
ccccttaaatgccgcaccctacggcatcgaaagcatgagtcaagacactgaagttagaagtcgggtcgtggggggaagtcttcgaggtgcccaggctgcctccccagccaaaggggagcc

SEQ ID NO: 704200 - DNA, 120 bp, Artificial Sequence
  ENSG00000196396_11 (sequence is synthesized)
gtcactgcccgagaaggacgaggaccatgcactgagttactggaagcccttcctggtcaacatgtgcgtggctacggtcctcacggccggcgcttacctctgctacaggttcctgttcaa

SEQ ID NO: 704201 - DNA, 120 bp, Artificial Sequence
  ENSG00000196396_12 (sequence is synthesized)
cagcaacacatagcctgaccctcctccactccacctccacccactgtccgcctctgcccgcagagcccacgcccgactagcaggcatgccgcggtaggtaagggccgccggaccgcgtag

SEQ ID NO: 704202 - DNA, 120 bp, Artificial Sequence
  ENSG00000196396_13 (sequence is synthesized)
agagccgggccccggacggacgttggttctgcactaaaacccatcttccccggatgtgtgtctcacccctcatccttttactttttgccccttccactttgagtaccaaatccacaagcc

SEQ ID NO: 704203 - DNA, 120 bp, Artificial Sequence
  ENSG00000196396_14 (sequence is synthesized)
attttttgaggagagtgaaagagagtaccatgctggcggcgcagagggaaggggcctacacccgtcttggggctcgccccacccagggctccctcctggagcatcccaggcgggcggcac

SEQ ID NO: 704204 - DNA, 120 bp, Artificial Sequence
  ENSG00000196396_15 (sequence is synthesized)
gccaacagccccccccttgaatctgcagggagcaactctccactccatatttatttaaacaattttttccccaaaggcatccatagtgcactagcattttcttgaaccaataatgtatta

SEQ ID NO: 704205 - DNA, 120 bp, Artificial Sequence
  ENSG00000196396_16 (sequence is synthesized)
ttgcatcaagggctttatcaaaaagtacaataataaatcctcaggtagtactgggaatggaaggctttgccatgggcctgctgcgtcagaccagtactgggaaggaggacggttgtaagc

SEQ ID NO: 704206 - DNA, 120 bp, Artificial Sequence
  ENSG00000196396_17 (sequence is synthesized)
agttgttatttagtgatattgtgggtaacgtgagaagatagaacaatgctataatatataatgaacacgtgggtatttaataagaaacatgatgtgagattactttgtcccgcttattct

SEQ ID NO: 704207 - DNA, 120 bp, Artificial Sequence
  ENSG00000196396_18 (sequence is synthesized)
cctccctgttatctgctagatctagttctcaatcactgctcccccgtgtgtattagaatgcatgtaaggtcttcttgtgtcctgatgaaaaatatgtgcttgaaatgagaaactttgatc

SEQ ID NO: 704208 - DNA, 120 bp, Artificial Sequence
  ENSG00000196396_19 (sequence is synthesized)
tctgcttactaatgtgccccatgtccaagtccaacctgcctgtgcatgacctgatcattacatggctgtggttcctaagcctgttgctgaagtcattgtcgctcagcaatagggtgcagt

SEQ ID NO: 704209 - DNA, 120 bp, Artificial Sequence
  ENSG00000196396_20 (sequence is synthesized)
tttccaggaataggcatttgcctaattcctggcatgacactctagtgacttcctggtgaggcccagcctgtcctggtacagcagggtcttgctgtaactcagacattccaagggtatggg

SEQ ID NO: 704210 - DNA, 120 bp, Artificial Sequence
  ENSG00000196396_21 (sequence is synthesized)
aagccatattcacacctcacgctctggacatgatttagggaagcagggacaccccccgccccccacctttgggatcagcctccgccattccaagtcaacactcttcttgagcagaccgtg

SEQ ID NO: 704211 - DNA, 120 bp, Artificial Sequence
  ENSG00000196396_22 (sequence is synthesized)
atttggaagagaggcacctgctggaaaccacacttcttgaaacagcctgggtgacggtcctttaggcagcctgccgccgtctctgtcccggttcaccttgccgagagaggcgcgtctgcc

SEQ ID NO: 704212 - DNA, 120 bp, Artificial Sequence
  ENSG00000196396_23 (sequence is synthesized)
ccaccctcaaaccctgtggggcctgatggtgctcacgactcttcctgcaaagggaactgaagacctccacattaagtggctttttaacatgaaaaacacggcagctgtagctcccgagct

SEQ ID NO: 704213 - DNA, 120 bp, Artificial Sequence
  ENSG00000196396_24 (sequence is synthesized)
actctcttgccagcattttcacattttgcctttctcgtggtagaagccagtacagagaaattctgtggtgggaacattcgaggtgtcaccctgcagagctatggtgaggtgtggataagg

SEQ ID NO: 704214 - DNA, 120 bp, Artificial Sequence
  ENSG00000196396_25 (sequence is synthesized)
cttaggtgccaggctgtaagcattctgagctgggcttgttgtttttaagtcctgtatatgtatgtagtagtttgggtgtgtatatatagtagcatttcaaaatggacgtactggtttaac

SEQ ID NO: 704215 - DNA, 120 bp, Artificial Sequence
  ENSG00000196396_26 (sequence is synthesized)
ctcctatccttggagagcagctggctctccaccttgttacacattatgttagagaggtagcgagctgctctgctatatgccttaagccaatatttactcatcaggtcattattttttaca

SEQ ID NO: 704216 - DNA, 120 bp, Artificial Sequence
  ENSG00000196396_27 (sequence is synthesized)
atggccatggaataaaccatttttacaaaaataaaaacaaaaaaagcaaggtgttttggtataataccttttcaggtgtgtgtggatacgtggctgcatgaccgggtgggtgggggggag

SEQ ID NO: 704217 - DNA, 120 bp, Artificial Sequence
  ENSG00000196396_28 (sequence is synthesized)
tgtctcagggtcttctgtgacctcacagaactgtcagactgtacagttttccaacttgccatattcatgatgggtttgcattttagctgcaacaataaaatttttttctaaagaacatga

SEQ ID NO: 704218 - DNA, 120 bp, Artificial Sequence
  ENSG00000196396_29 (sequence is synthesized)
atttggggtgcttcccatttttttctttgcttaatagagctaaaccaggatgagtaactcctgtttctttctatccctgctgatgtgaaacagatgttgtcaatcagctggggttagagt

SEQ ID NO: 704219 - DNA, 120 bp, Artificial Sequence
  ENSG00000196396_30 (sequence is synthesized)
tttccacttctaagaattaacctcagcatccctgcattgccagcaccctcaggctggagcgctttccttgactgtgagcttgttgaacaccttaggcctcagcccatttccttcccaaat

SEQ ID NO: 704220 - DNA, 120 bp, Artificial Sequence
  ENSG00000196396_31 (sequence is synthesized)
tgacgctttgcctgtgtagggccctcagataacttaacaaacttaccagtgttgtttgaagaacagtgttttgagttgtaatctcaaaaccatatcccttacccaattacctgtaagaca

SEQ ID NO: 704221 - DNA, 120 bp, Artificial Sequence
  ENSG00000196396_32 (sequence is synthesized)
caatggttaccacatctcagtacgtaaagtccacttgatatagaattgacttagaaataagacagattagtatagtttttcatttgtgtacaaaattaaacaatgtaaattccccccaaa

SEQ ID NO: 704222 - DNA, 120 bp, Artificial Sequence
  ENSG00000196405_0 (sequence is synthesized)
gtggtcctctgatcaacataggctggtgggagtacaggactcgcctcctcagggttccctgtgctgccacttttcagccatggccacaagtgaacagagtatctgccaagcccgggcttc

SEQ ID NO: 704223 - DNA, 120 bp, Artificial Sequence
  ENSG00000196405_1 (sequence is synthesized)
cgtgatggtctacgatgacaccagtaagaaatgggtaccaatcaaacctggccagcagggattcagccggatcaacatctaccacaacactgccagcaacaccttcagagtcgttggagt

SEQ ID NO: 704224 - DNA, 120 bp, Artificial Sequence
  ENSG00000196405_2 (sequence is synthesized)
caagttgcaggatcagcaggttgtgatcaattattcaatcgtgaaagggctgaagtacaatcaggccacgccaaccttccaccagtggcgagatgcccgccaggtctacggcttaaactt

SEQ ID NO: 704225 - DNA, 120 bp, Artificial Sequence
  ENSG00000196405_3 (sequence is synthesized)
tgcaagtaaagaagaggcaaccacgttctccaatgcaatgctgtttgccctgaacatcatgaattcccaagaaggaggcccctccagccagcgtcaggtgcagaatggcccctctcctga

SEQ ID NO: 704226 - DNA, 120 bp, Artificial Sequence
  ENSG00000196405_4 (sequence is synthesized)
tgagatggacatccagagaagacaagtgatggagcagcaccagcagcagcgtcaggaatctctagaaagaagaacctcggccacagggcccatcctcccaccaggacatccttcatctgc

SEQ ID NO: 704227 - DNA, 120 bp, Artificial Sequence
  ENSG00000196405_5 (sequence is synthesized)
agccagcgcccccgtctcatgtagtgggcctccaccgccccccccacccccagtcccacctccacccactggggctaccccacctcccccacccccactgccagccggaggagcccaggg

SEQ ID NO: 704228 - DNA, 120 bp, Artificial Sequence
  ENSG00000196405_6 (sequence is synthesized)
gtccagccacgacgagagctccatgtcaggactggccgctgccatagctggggccaagctgagaagagtccaacggccagaagacgcatctggaggctccagtcccagtgggacctcaaa

SEQ ID NO: 704229 - DNA, 120 bp, Artificial Sequence
  ENSG00000196405_7 (sequence is synthesized)
ggaggaggcctcatggaggaaatgaacaaactgctggccaagaggagaaaagcagcctcccagtcagacaagccagccgagaagaaggaagatgaaagccaaatggaagatcctagtacc

SEQ ID NO: 704230 - DNA, 120 bp, Artificial Sequence
  ENSG00000196405_8 (sequence is synthesized)
tccccctctccggggacccgagcagccagccagccacctaactcctcagaggctggccggaagccctgggagcggagcaactcggtggagaagcctgtgtcctcgattctgtccagaacc

SEQ ID NO: 704231 - DNA, 120 bp, Artificial Sequence
  ENSG00000196405_9 (sequence is synthesized)
ccgtctgtggcaaagagccccgaagctaagagcccccttcagtcgcagcctcactctaggatgaagcctgctgggagcgtgaatgacatggccctggatgccttcgacttggaccggatg

SEQ ID NO: 704232 - DNA, 120 bp, Artificial Sequence
  ENSG00000196405_10 (sequence is synthesized)
aagcaggagatcctagaggaggtggtgagagagctccacaaggtgaaggaggagatcatcgacgccatcaggcaggagctgagtgggatcagcaccacgtaaggggccggcctcgctgcg

SEQ ID NO: 704233 - DNA, 120 bp, Artificial Sequence
  ENSG00000196405_11 (sequence is synthesized)
ctgattcgtcgagcccatccggcgacagaggacagccagaagcccagccagccccagactccagtgcaccagagcacgcacaggagcctgggcgcgctgctgtgaaacgtcctgacctgt

SEQ ID NO: 704234 - DNA, 120 bp, Artificial Sequence
  ENSG00000196405_12 (sequence is synthesized)
gatcacacatgacagtgaggaaaccaagtgcaactcctgggtttttttagattctgcctgacacggaacaccaggtctgctcgtcttttttgtgttttatatttgcttatttaaggtaca

SEQ ID NO: 704235 - DNA, 120 bp, Artificial Sequence
  ENSG00000196405_13 (sequence is synthesized)
tttctttgggtttctagagacgcccctaagtcacctgcttcattagacggtttccaggttttctcccaggtgacgctgttagcgcctcagctggcggtgacagccggcccagcgtggcgc

SEQ ID NO: 704236 - DNA, 120 bp, Artificial Sequence
  ENSG00000196405_14 (sequence is synthesized)
caccacacaccgcagagctgtccaggcacagctccgtccccagcgctcatggtgttgaaactgtctgtcatgcaccacggtgtctgtgtccacacagtaataaacggtttactgtccgca

SEQ ID NO: 704237 - DNA, 120 bp, Artificial Sequence
  ENSG00000196405_15 (sequence is synthesized)
ggtggggccccgcgccttttgtgtcgggctttgaccgccgcgcgcgctcattcacctcagcggccgcgggcggaggggcgcacgcgcgcgcagtcccctcggagggcggtggggcgaaca

SEQ ID NO: 704238 - DNA, 120 bp, Artificial Sequence
  ENSG00000196405_16 (sequence is synthesized)
gcaacgcgcgtaccctagctcttggctgctgtgctgagactagcccgcgcgcccgcgcgcctctccctcgaggactcggagccgcccgcgcactcgccaggggccgccgccccgagtctc

SEQ ID NO: 704239 - DNA, 80 bp, Artificial Sequence
  ENSG00000196405_17 (sequence is synthesized)
cgcactcgccaggggccgccgccccgagtctcaggcggacgcgcacgcgttcccgccgcccggaccccagccggctcgcc

SEQ ID NO: 704240 - DNA, 80 bp, Artificial Sequence
  ENSG00000196405_18 (sequence is synthesized)
gccaagatggcaggggccggggcccagctgtcagtcgccgccgccgcggcccttccccgcagctagcggccccgacgccc

SEQ ID NO: 704241 - DNA, 80 bp, Artificial Sequence
  ENSG00000196405_19 (sequence is synthesized)
ccgccgccgccgccgccgccgccgggtcgcccctggcccggcgcgcccgtccccggcagcgacaatgagtgaacagagta

SEQ ID NO: 704242 - DNA, 120 bp, Artificial Sequence
  ENSG00000196405_20 (sequence is synthesized)
agtgctggaattacagattatacccgtgagcctgcgcaccacctcctcaccgcccaccccttacacacatgtatcattaagaggtcagaacaaaaaggtcaatattcggaatcagaggac

SEQ ID NO: 704243 - DNA, 120 bp, Artificial Sequence
  ENSG00000196405_21 (sequence is synthesized)
ctgggctcagattttgactccatatcctcatagttcaaagtatgacaccttaagcacactgtttcctggatttcactttttacctatgtcatatggagacagtaatccgcaccctgccta

SEQ ID NO: 704244 - DNA, 120 bp, Artificial Sequence
  ENSG00000196405_22 (sequence is synthesized)
tgactctgatgtcaccctgtatcgctttcatcgtggcccccacatgtgtgtgttgattgacataatctgttattcagctgtctttaaaatgaggaggcctgagaacctcatcccagcacc

SEQ ID NO: 704245 - DNA, 120 bp, Artificial Sequence
  ENSG00000196405_23 (sequence is synthesized)
tgcaggctggcacctgcttttgcctctcgaccagagcctcccgggacttactcgttcaccacacagatacgcagggcgttcctgattctcgtgtggggatgtagtgagcagaggagacaa

SEQ ID NO: 704246 - DNA, 120 bp, Artificial Sequence
  ENSG00000196405_24 (sequence is synthesized)
cctctgcccacggtgacaagggagaggttctttgcttcagatcagaatgacacatcaggttgggtggccgcctgtcaacagctcaaatgctgtgcattctgcttcatcaagtggaaggat

SEQ ID NO: 704247 - DNA, 120 bp, Artificial Sequence
  ENSG00000196405_25 (sequence is synthesized)
tactcttattacttaatcagtggcatgttcctgatgctgaaaaaccatcctgacgcacatgccatgcatgatgagtgttaggtgtccccactgctggatgaacacgtccactgttcgagc

SEQ ID NO: 704248 - DNA, 120 bp, Artificial Sequence
  ENSG00000196405_26 (sequence is synthesized)
actgccacagacctattacacgggcaggaagatcctagtacctccccctctccggggacccgagcagccagccagccacctaactcctcagaggctggccggaagccctgggagcggagc

SEQ ID NO: 704249 - DNA, 120 bp, Artificial Sequence
  ENSG00000196405_27 (sequence is synthesized)
cgacggtgagtgcagccccaccggggagggtggcacccaggtgtggccgcaggacaagggtccctgtcacccaggctgggggcctccagttttgagctggagcccatactgcactgggcc

SEQ ID NO: 704250 - DNA, 120 bp, Artificial Sequence
  ENSG00000196405_28 (sequence is synthesized)
gctccctggtagcatgacacccgaatctgaccttccacatccccggcaccttcctggaagacccacgtgggaagagcatggaggggagaccccagcatcgttccagagccaggtctggag

SEQ ID NO: 704251 - DNA, 120 bp, Artificial Sequence
  ENSG00000196405_29 (sequence is synthesized)
gagccacctgagctgctgtcattccaccccctggcggtttatactgccttcttgatactgccacctccagtcactggtgttgggcttctgaggtgaccactctgccttcctgggggtaca

SEQ ID NO: 704252 - DNA, 120 bp, Artificial Sequence
  ENSG00000196405_30 (sequence is synthesized)
accacttcctgatatgacccagtcaggaagagaagccaggatgagaacatgctcctcttctcctccagtgcctggaagtgtggtgggagcagcttggtctagcaggaagagtgcatgtcc

SEQ ID NO: 704253 - DNA, 120 bp, Artificial Sequence
  ENSG00000196405_31 (sequence is synthesized)
tggagccgggctacgttgggtctgtgtgaccctgagcaagtcacctcctccatcagcaggtggaatgacaccacaggcccgtggcagttcacatgacacgaagatgcccggtgcctggta

SEQ ID NO: 704254 - DNA, 120 bp, Artificial Sequence
  ENSG00000196405_32 (sequence is synthesized)
tgtggccttcagggccgtgccccatgctgctcctctttttgtccccacatccagcagttttccattaaaccactgtaggtcctctcagaacttactagagtcatcgtgtcatcgtctccc

SEQ ID NO: 704255 - DNA, 120 bp, Artificial Sequence
  ENSG00000196405_33 (sequence is synthesized)
aggcaagaccccaagctgatggcactcgaccacatagtgggagtgaattttaaagaaaatccccctcaaagcctctgctggtgtagaaggcagatagtctaggccggggtagggccagtg

SEQ ID NO: 704256 - DNA, 120 bp, Artificial Sequence
  ENSG00000196405_34 (sequence is synthesized)
agtgggagccagggaaggaggcttgggtgtcatgagactgggtttacatttacagatgacaaaaccaagacccagtgagggggaggatgtgtgcaggccacaggacaagtctgagcagaa

SEQ ID NO: 704257 - DNA, 120 bp, Artificial Sequence
  ENSG00000196405_35 (sequence is synthesized)
ccatggccacgcccaacgttcctccactagcattccctcatgaaagatcactttttccaggccaaggaccagaaaaggaccaggctttaggaagagggccgaggtgcatggaaagcagtg

SEQ ID NO: 704258 - DNA, 120 bp, Artificial Sequence
  ENSG00000196405_36 (sequence is synthesized)
ctggtgaggagagggttgagtaactggattttgactgtttcttcgcatttggttctcactaatgaaatcttgtcagacgtgcccctgctgctggattgggtgggggtgggacagaagcat

SEQ ID NO: 704259 - DNA, 120 bp, Artificial Sequence
  ENSG00000196405_37 (sequence is synthesized)
gtgtggtcaaaggcaagtttatttgcagtttgggggttgaatgcagtggatttcaaactggatattttgaggagttccaggggtccaccaaggtataccagggtcctcgccctgatgcaa

SEQ ID NO: 704260 - DNA, 120 bp, Artificial Sequence
  ENSG00000196405_38 (sequence is synthesized)
ccagagtagttcttcatcgactttatacagtgggactctgaagaaaagaaaaaggaaaaccccatagcttagtgggaatccgggcgaattaaaacacaggatgaagtgcttgttctcttt

SEQ ID NO: 704261 - DNA, 120 bp, Artificial Sequence
  ENSG00000196405_39 (sequence is synthesized)
ggctcttggagcataatgtatgtccttttcctacttggtttgcgtgtaataacatcattggtatatttcaaaatatgaagctcctggtgctggataataaatgttttcccagtttttcaa

SEQ ID NO: 704262 - DNA, 120 bp, Artificial Sequence
  ENSG00000196405_40 (sequence is synthesized)
agtagtccacgagaactaccttgaaagagcaaaaccagccaggtgcaggggctcacgcccataatcccagcactctgggaggcccaggtgggtggatctcgtgaggtcaggagttcaaga

SEQ ID NO: 704263 - DNA, 66 bp, Artificial Sequence
  ENSG00000196405_41 (sequence is synthesized)
aaaccccatctctgctgaaaatacaaaagttagctgaaaatacaaaagtggcacatgcctgtaatg

SEQ ID NO: 704264 - DNA, 120 bp, Artificial Sequence
  ENSG00000196405_42 (sequence is synthesized)
agccaagattgcgccattgcactccaatctggggaacaagagcaaaactctgtctgaaaaaaaaaaagcgacaccacatgggaggatgtttcttgggggaggtgtgctatgcccgagcag

SEQ ID NO: 704265 - DNA, 120 bp, Artificial Sequence
  ENSG00000196405_43 (sequence is synthesized)
ttgggggaggtgtgctatgcccgagcaggctccagcaccaggggcgctggtgtgtcaggagcgcgcctccaggccggtgtgaactctgcaacttcacattgtgcctcctgccgccgctgc

SEQ ID NO: 704266 - DNA, 120 bp, Artificial Sequence
  ENSG00000196405_44 (sequence is synthesized)
tgcttccccgagccccaagctcaacctggagcatgagctcccaccctgaggaggaggctgtcaatactgtgtttctttccagggaggcaacgggtgggtgcgatgttgtcacttaagttg

SEQ ID NO: 704267 - DNA, 120 bp, Artificial Sequence
  ENSG00000196405_45 (sequence is synthesized)
ccacctctgcataagagctctctgatcagaaagcagtttctttgttgaccccagccagccttggctctcgggttgggaaatacagtcacggtatccatggagacctcttgaggtggagac

SEQ ID NO: 704268 - DNA, 120 bp, Artificial Sequence
  ENSG00000196405_46 (sequence is synthesized)
ttgccctgaacatcatgaattcccaagaaggaggtaagtagggctttgtcttggcctgatgctgagaccctctcttgttctacctctgccctcccacagctctggctctccgggtatcct

SEQ ID NO: 704269 - DNA, 120 bp, Artificial Sequence
  ENSG00000196405_47 (sequence is synthesized)
tcgggagctggcattttcgttgacccggacgaggaggagtctgctctgcggagatcatggggacagcctcccaagctgaaggaaggatgacttcaaggggaacgtgtaccaccacccctc

SEQ ID NO: 704270 - DNA, 120 bp, Artificial Sequence
  ENSG00000196405_48 (sequence is synthesized)
gcactttgcaccatctgactaactaaatggttgtcctccataccaaaaagactaccacacaatctaaggaaattgtctctgactaggtcatgtttgcatttgaagaattcagagctgtaa

SEQ ID NO: 704271 - DNA, 120 bp, Artificial Sequence
  ENSG00000196405_49 (sequence is synthesized)
acttacctccctgaagtcttgttgctggcaaacaatagagccagacctggggcagagctggagctgttgtccacagtgttctcacttccccgcgctgactccatgtgaacagagtatctg

SEQ ID NO: 704272 - DNA, 120 bp, Artificial Sequence
  ENSG00000196405_50 (sequence is synthesized)
agagctgaacaggtggtgagagcagagcagtgcaggtggacagagatgaggaagtcttagcagtcagctggggtttgtccaaggcttgtggtcagccaggccgtgtgctggggacagtcc

SEQ ID NO: 704273 - DNA, 120 bp, Artificial Sequence
  ENSG00000196405_51 (sequence is synthesized)
gtgaacaaggccactgtggtcctgaggggtgctctggacagggtgcagggccacatggtggaagggacagggtgctttgcggagtggggtggggcaagcctctgtcgggagctggcattt

SEQ ID NO: 704274 - DNA, 120 bp, Artificial Sequence
  ENSG00000196405_52 (sequence is synthesized)
tcgttgacccggacgaggaggagtctgctctgcggagatcatggggacagcctcccaagctgaaggaagggatgaagcctgctgggagcgtgaatgacatggccctggatgccttcgact

SEQ ID NO: 704275 - DNA, 120 bp, Artificial Sequence
  ENSG00000196405_53 (sequence is synthesized)
ccagacaagaagctctcaccagagacaaagtggaaacggagagctgttggcgatttaggggacagcggggacaggtgcacattgcaatgtgcaggatcatcctgcgcagtgaagtcttgt

SEQ ID NO: 704276 - DNA, 120 bp, Artificial Sequence
  ENSG00000196405_54 (sequence is synthesized)
tgttttaagaaaaagcacttatttttttaaccaggtttagtatgtgctgaattttctaggaatttgactactgcatccgtcaaaagaaaatcatacttaattttgtttgtaactttacca

SEQ ID NO: 704277 - DNA, 120 bp, Artificial Sequence
  ENSG00000196405_55 (sequence is synthesized)
agagttgttttctgtttcgtaaagtcctatctccagcatcgtcactgtgacgtttcagtcatccatagacctccccttcgtcacatcccatttgcagcagcagcactcccagtgggtctg

SEQ ID NO: 704278 - DNA, 120 bp, Artificial Sequence
  ENSG00000196405_56 (sequence is synthesized)
tgggtaggtgcaagcgtggaccgcctccgtctcctagtgtagctgggtctggccctttatgtgttgtaatgcacattttattatagactgcttctcttttctctctcctttgcagtacat

SEQ ID NO: 704279 - DNA, 120 bp, Artificial Sequence
  ENSG00000196405_57 (sequence is synthesized)
gtaaggcattatatccgaatttaggtaggtaggttatgtaatctatgaatttcacttcaggataatgcaaggatcattacaaaacattataataaaaagaggaccatcgggcctgagagg

SEQ ID NO: 704280 - DNA, 120 bp, Artificial Sequence
  ENSG00000196405_58 (sequence is synthesized)
gttttgctaattataaaagtcatatgtgttcattgggaacatttggaaaactgaggttttatgaagtgtccaatgatgtcctgccctggccccaggtggccttcctaaacagactccctt

SEQ ID NO: 704281 - DNA, 120 bp, Artificial Sequence
  ENSG00000196405_59 (sequence is synthesized)
gccccgaagctaagagcccccttcagtcgcagcctcactctaggtaccgaacaaccctcctgctcacatgtcccccagggtttggggctcctctgtcccccgtcccgtgactaacaccct

SEQ ID NO: 704282 - DNA, 120 bp, Artificial Sequence
  ENSG00000196405_60 (sequence is synthesized)
tgcacgctgtctcacgtcctggcatttaacaacttgctctgcgaaggtggtctgttctttcagacccaggacctcggggtcctgtcagtcagctgctccgtcttttccctctgagagaga

SEQ ID NO: 704283 - DNA, 120 bp, Artificial Sequence
  ENSG00000196405_61 (sequence is synthesized)
gcgtgcatcctctaatgacaaagcaaccttgtatttccttccacaaatgaatggaggcagcctaacgtcatgtggtatgttccaggctcatgatagaggataagtacacctccttggctg

SEQ ID NO: 704284 - DNA, 120 bp, Artificial Sequence
  ENSG00000196405_62 (sequence is synthesized)
acaaaatataatccaataccacttaaaaaagacaagccagccagaatgggacagagccaggcgcagcatgggaggcagactaaggagcccctcagtagcaggtgccgggccgaggggcct

SEQ ID NO: 704285 - DNA, 120 bp, Artificial Sequence
  ENSG00000196405_63 (sequence is synthesized)
ggccgccacaccacacgtgggagcaaggctgtgctgggatgtccggggaggtcgtgcttgctcgccctgtggctctagtcactgggtcccttaccagcaggctcacattccagagagacc

SEQ ID NO: 704286 - DNA, 120 bp, Artificial Sequence
  ENSG00000196405_64 (sequence is synthesized)
tggcacagtgaagggctcagaaccagatcacaggtcagggtcaacctgacctaggccatgggggactgagaacaaggtgccaggttttggcttaactcaatcagaccttcctgccacggg

SEQ ID NO: 704287 - DNA, 120 bp, Artificial Sequence
  ENSG00000196405_65 (sequence is synthesized)
agttcccagcctggagcctaagcatacactgcattaatcagacttgctggaatgatcacatggttttctagctgcctcccctgttagctgccgcttgtcagcagctggcggagctggagg

SEQ ID NO: 704288 - DNA, 120 bp, Artificial Sequence
  ENSG00000196405_66 (sequence is synthesized)
ctgcaggcccctgtctgcagaaagccttttacttcagaatattggggggtgtggaaaccccgcctcatttttctgcactttgcaccatctgactaactaaatggttgtcctccataccaa

SEQ ID NO: 704289 - DNA, 120 bp, Artificial Sequence
  ENSG00000196405_67 (sequence is synthesized)
tgggcaagttaggggacctctccaagcctctgttttccccccacaaagtgaggtctgttaacccctgctgcacagggtggtggtggggacagctgtgagcaacagctggacatggggtgt

SEQ ID NO: 704290 - DNA, 120 bp, Artificial Sequence
  ENSG00000196405_68 (sequence is synthesized)
cagaatcagtttccccacagacatactgaccatatttcccaagccaaaagctggcatgacaacatgatagaatatttggaactgagattgcccaaaaaggcagaggcagccagccacata

SEQ ID NO: 704291 - DNA, 120 bp, Artificial Sequence
  ENSG00000196405_69 (sequence is synthesized)
gtatctggaggtacatgtggcctgaattggaaggcctctagaacctgcgtcaagaatgtctccatcgccaccacaaattgaagggaaaccacccttatcacagagcaggaggcattgaaa

SEQ ID NO: 704292 - DNA, 120 bp, Artificial Sequence
  ENSG00000196405_70 (sequence is synthesized)
cctgcagccacccgccaagctcccccgcacctccacctggaagcagacaggccatggggcaggggaacgggaagggtgaggaagagggtgtgggggagcgcggagttagaagtttgcatt

SEQ ID NO: 704293 - DNA, 120 bp, Artificial Sequence
  ENSG00000196405_71 (sequence is synthesized)
gtgttcatgcgcagggcccagtcatggaacttgaggcacagggtgccatggtggaggctgggaaggggaaggcaaccagagtgggcaaaacgagggccctggagcagacacggcagcaag

SEQ ID NO: 704294 - DNA, 120 bp, Artificial Sequence
  ENSG00000196405_72 (sequence is synthesized)
gggagcctgcagcgctcccagcggactccgccacgtcctgctggtggagcaaaggcgggctgccatgttgtgagtggccaagggtcgctcactgggcaggaacattgtcaaggccattca

SEQ ID NO: 704295 - DNA, 120 bp, Artificial Sequence
  ENSG00000196405_73 (sequence is synthesized)
tgcttggaatagggtctctcttcagctctgaggcaaatctgttctctaattttcagatgacttcaaggggaacgtgtaccaccacccctctggtgcgtcacattgcttaggaagcctgct

SEQ ID NO: 704296 - DNA, 120 bp, Artificial Sequence
  ENSG00000196405_74 (sequence is synthesized)
gtgtttatcactgggtggctgtcagggctgagatggagagggccagggcctggcgaggtggagcagtcggcccaggtgtcccagcaattgttgctggaacagggtctggaacccacagga

SEQ ID NO: 704297 - DNA, 120 bp, Artificial Sequence
  ENSG00000196405_75 (sequence is synthesized)
gaggcctgaaggacccagggccctctggctggatgcgtttgcctatcaggacccagaattacttacagacctgtttagggctaggcttggcctctttcttgagctcatctggaggggtgt

SEQ ID NO: 704298 - DNA, 120 bp, Artificial Sequence
  ENSG00000196405_76 (sequence is synthesized)
ggcaacactcattcttcatccttattctccctggctgtgggcaacactggtcctcagtgtcaccagatggtcctcctctgtgcccatgacccctcagcagccaaggctggccctgccaga

SEQ ID NO: 704299 - DNA, 120 bp, Artificial Sequence
  ENSG00000196405_77 (sequence is synthesized)
taaatgtgtgtgcccatgatcacacccaggggcacaggccacatacgtttccctgaaaccttgggctccagcctccatcccgtccatgtgggagggaacttgggtcccagcagtgtgtct

SEQ ID NO: 704300 - DNA, 120 bp, Artificial Sequence
  ENSG00000196405_78 (sequence is synthesized)
ttcagcaccaagtcatgtttaaaagaccagagagacaagcattttgccaagatcttccagggaagatgcatgtgtgacacattaacattcaaatcaggccagcgcggtgctcatgcctgt

SEQ ID NO: 704301 - DNA, 120 bp, Artificial Sequence
  ENSG00000196406_0 (sequence is synthesized)
attaaacatggagaaatgaggagcggcggcagatcggtttgggatgcatcttcaggggatgctgaaacaacagcagcatttggtttgctctacacccctgtcacccctcgcccgcaagcc

SEQ ID NO: 704302 - DNA, 120 bp, Artificial Sequence
  ENSG00000196406_1 (sequence is synthesized)
cagggagtggtcagcagtggggctttgtgacgtcgaagccaccctagggctgccattggctgggacactgcctgtatgatcaaacaaagctcaagggtgtggctttgccttgtcaccagg

SEQ ID NO: 704303 - DNA, 120 bp, Artificial Sequence
  ENSG00000196406_2 (sequence is synthesized)
ccaatatatacaatggacaaacaatccagtgccggcggggtgaagaggagcgtcccctgtgattccaacgaggccaacgagatgatgccggagacctcgagtgggtactcagacccgcaa

SEQ ID NO: 704304 - DNA, 120 bp, Artificial Sequence
  ENSG00000196406_3 (sequence is synthesized)
cctgctccgaaaaaactaaaaacatctgagtcctcgaccatactagtggttcgctacaggaggaactttaaaagaacatctccagaggaactggtgaatgaccacgcccgaaagaacaga

SEQ ID NO: 704305 - DNA, 120 bp, Artificial Sequence
  ENSG00000196406_4 (sequence is synthesized)
atcaaccccctccaaatggaggaggaggaattcatggaaataatggttgaaatacctgcaaagtagcaagaagctacatctctcaaccttgggcaatgacaataaagtttgagaagctga

SEQ ID NO: 704306 - DNA, 120 bp, Artificial Sequence
  ENSG00000196407_0 (sequence is synthesized)
gcagcacaccagcccagcctcgcctagctctctgaaagaaagcctgcaacagaagggagagaagcggccccaagtgcagctgaaagcactccttgggagtcagccaagaccctccatcca

SEQ ID NO: 704307 - DNA, 120 bp, Artificial Sequence
  ENSG00000196407_1 (sequence is synthesized)
agcagggctggatccttgcacttggccatgataaggagatgcttccaggtggcagcaagacttggccaccacagaggccttcttgaggccccccgtatcctgcccagactcaaccctgcc

SEQ ID NO: 704308 - DNA, 120 bp, Artificial Sequence
  ENSG00000196407_2 (sequence is synthesized)
tcagcatttggatcctccacagactccatgttctcaagattcttgccagagaagacagacttgaaggattatgctcttcccaatgccagctggtgttcggacatgctgagcctgtaccaa

SEQ ID NO: 704309 - DNA, 120 bp, Artificial Sequence
  ENSG00000196407_3 (sequence is synthesized)
gaatttctggagaagactaagtctagcggctggatcaagctgccctccttcaagtccaacagagaccacatccggggactcaagctcccatctggactggcagtttcctcagacaaaggt

SEQ ID NO: 704310 - DNA, 120 bp, Artificial Sequence
  ENSG00000196407_4 (sequence is synthesized)
aagtcggtctgtcttttccaaccaggctcctacctggaggggcccccagggtttgctcacggcgggtccctggcagccatgatggacgagaccttttctaaaactgccttcctggctgga

SEQ ID NO: 704311 - DNA, 120 bp, Artificial Sequence
  ENSG00000196407_5 (sequence is synthesized)
gaggggctgttcacactaagtctcaacatcaggttcaaaaacttgatccccgtggactctctggttgtaatggacgtagaactggacaagattgaggaccagaagctttacatgtcctgc

SEQ ID NO: 704312 - DNA, 120 bp, Artificial Sequence
  ENSG00000196407_6 (sequence is synthesized)
atcgcccacagcagagaccagcagacagtttatgccaagtcctcaggtgttttccttcagctgcagttggaagaagagtctccccagtaacagtcactgtgcctgcaggagagccactgc

SEQ ID NO: 704313 - DNA, 120 bp, Artificial Sequence
  ENSG00000196407_7 (sequence is synthesized)
ctcccctgcctgcctcctgcctcctgcctcccctgcctgcctcctgcctcctgcctcccctgcctgcctcctgcctcccctgcctgcctcctgcctcctgcctcccctgcctgcctcctg

SEQ ID NO: 704314 - DNA, 120 bp, Artificial Sequence
  ENSG00000196407_8 (sequence is synthesized)
cctcctgcctcccctgcctgcctgggacccatcaaagagcagggaggggtcctcaagcagcaattggtgaggcgagggaaaggacccttttctctgagtaaataaagtctcacagtccca

SEQ ID NO: 704315 - DNA, 120 bp, Artificial Sequence
  ENSG00000196408_0 (sequence is synthesized)
tcttgcacgcctccagggctggaaagctcattcttcttcttcctcccagcagctctgcctggaagtcccccaatccctgtgctcctgcccccagatcgtgggcttgggggacagcaagaa

SEQ ID NO: 704316 - DNA, 120 bp, Artificial Sequence
  ENSG00000196408_1 (sequence is synthesized)
agctgcaaaggactcagctggggcggctccacaaggaccccacaggcttgaggtgttgccaggattctatcccagggggttttctgggtcccccagagccctctcaagcacggggaggca

SEQ ID NO: 704317 - DNA, 120 bp, Artificial Sequence
  ENSG00000196408_2 (sequence is synthesized)
gaagggtcctcgcccatttcaggaatctgcagcctggaagccacagccatggcaggcccccgatacccagtttcagtgcaaggggcagccctggtgcagatcaagaggctccaaacgttt

SEQ ID NO: 704318 - DNA, 120 bp, Artificial Sequence
  ENSG00000196408_3 (sequence is synthesized)
gccttctctgtgcgctggtcagacggcagcgacaccttcgtgcgcaggagttgggacgaattcaggcagctcaagaagaccctcaaggagaccttcccggtggaggcgggcctgctgcgg

SEQ ID NO: 704319 - DNA, 120 bp, Artificial Sequence
  ENSG00000196408_4 (sequence is synthesized)
agatctgaccgcgttctcccaaagcttctcgatgcaccactgttgggacgcgtggggcgcacgagccgcggcctggcgcgcctgcagctgttggaaacctattctcggaggctgctggcg

SEQ ID NO: 704320 - DNA, 120 bp, Artificial Sequence
  ENSG00000196408_5 (sequence is synthesized)
actgcagagcgcgtggcacggagcccgacgatcactggcttcttcgcaccgcaacccctggacctggagcccgcgctgccacccggcagccgggtgatcctgcccaccccagaggagcag

SEQ ID NO: 704321 - DNA, 120 bp, Artificial Sequence
  ENSG00000196408_6 (sequence is synthesized)
ccttttcaggcgcaggcccaggagagcctggacgtgctgctgcggcacccctcaggctggtggctggtggagaacgaagaccggcagaccgcctggtttccagcgccctacctggaggag

SEQ ID NO: 704322 - DNA, 120 bp, Artificial Sequence
  ENSG00000196408_7 (sequence is synthesized)
gcggccccgggccaaggccgggagggaggcccgtccctagggagcagcggtccccagttctgtgcttcccgcgcctacgagagcagccgcgcagatgagctgtccgtgcccgcgggggcg

SEQ ID NO: 704323 - DNA, 120 bp, Artificial Sequence
  ENSG00000196408_8 (sequence is synthesized)
cgcgtgcgcgtgttggaaacgtcagaccgcggctggtggctatgcaggtacggcgaccgggcgggcctactccccgcggtgctgctgcggccggaagggctgggcgctctcctgagcggg

SEQ ID NO: 704324 - DNA, 120 bp, Artificial Sequence
  ENSG00000196408_9 (sequence is synthesized)
acggggttccgtggaggagacgacccggcgggtgaggcccggggcttccctgaaccctcccaggccaccgcccctccccccaccgtgcccacccgaccttcgccgggcgccatccagagc

SEQ ID NO: 704325 - DNA, 120 bp, Artificial Sequence
  ENSG00000196408_10 (sequence is synthesized)
cgctgctgcaccgtcacacgcagggccctggagcggcgcccacggcgccagggccgccctcgagggtgcgtggactctgtgccgcaccccacgacggagcagtgagcgcgaggatcccga

SEQ ID NO: 704326 - DNA, 120 bp, Artificial Sequence
  ENSG00000196408_11 (sequence is synthesized)
tgaggggatggaccgcgccatcccagggctggggaggagcggggagggcggatctccctggccagcagggatgggagggggccatttgctgttcctctgagtaaagcttgttctgcatga

SEQ ID NO: 704327 - DNA, 120 bp, Artificial Sequence
  ENSG00000196408_12 (sequence is synthesized)
ccccgccgtcagcagactcaagcaaggagaatgtggagaagggtgcgggcgggcctcgtcctctgtggccccgcggtgactccaaacacccactcccaccaggtccccagttctgtgctt

SEQ ID NO: 704328 - DNA, 77 bp, Artificial Sequence
  ENSG00000196408_13 (sequence is synthesized)
ccctgcctcggcctcccaaagtacttggattacagctctgcctggaagtcccccaatccctgtgctcctgcccccag

SEQ ID NO: 704329 - DNA, 120 bp, Artificial Sequence
  ENSG00000196408_14 (sequence is synthesized)
ggcccttcgtccctgctgaagctcccagcccctgccatccgggtgagggaccccgccctctcaagggtgcacagtgggctctggaagaccaatgccctggttcccgccctcagaagaccc

SEQ ID NO: 704330 - DNA, 120 bp, Artificial Sequence
  ENSG00000196408_15 (sequence is synthesized)
tcaaggagaccttcccggtggaggcgggcctgctgcggagatctgaccgcgttctcccaaagcttctcggtcaggccagcctgggtacgggagcggggaaggcggtggcttgcctggggg

SEQ ID NO: 704331 - DNA, 120 bp, Artificial Sequence
  ENSG00000196411_0 (sequence is synthesized)
cgcccggctccgcgccgcagtctccctccctcccgctccgtccccgctcgggctcccaccatccccgcccgcgaggagagcactcggcccggcggcgcgagcagagccactccagggagg

SEQ ID NO: 704332 - DNA, 80 bp, Artificial Sequence
  ENSG00000196411_1 (sequence is synthesized)
gagaccgcgagcggccggctcagcccccgccacccggggcgggaccccgaggccccggagggaccccaactccagccacg

SEQ ID NO: 704333 - DNA, 80 bp, Artificial Sequence
  ENSG00000196411_2 (sequence is synthesized)
ggaccccaactccagccacgtcttgctgcgcgcccgcccggcgcggccactgccagcacgctccgggcccgccgcccgcg

SEQ ID NO: 704334 - DNA, 120 bp, Artificial Sequence
  ENSG00000196411_3 (sequence is synthesized)
tgggcccgcgctgagggccccgacgaggagtcccgcgcggagtatcggcgtccacccgcccagggagagtcagacctgggggggcgagggccccccaaactcagttcggatcctacccga

SEQ ID NO: 704335 - DNA, 120 bp, Artificial Sequence
  ENSG00000196411_4 (sequence is synthesized)
gtgaggcggcgccatggagctccgggtgctgctctgctgggcttcgttggccgcagctttggaagagaccctgctgaacacaaaattggaaactgctgatctgaagtgggtgacattccc

SEQ ID NO: 704336 - DNA, 120 bp, Artificial Sequence
  ENSG00000196411_5 (sequence is synthesized)
tcaggtggacgggcagtgggaggaactgagcggcctggatgaggaacagcacagcgtgcgcacctacgaagtgtgtgacgtgcagcgtgccccgggccaggcccactggcttcgcacagg

SEQ ID NO: 704337 - DNA, 120 bp, Artificial Sequence
  ENSG00000196411_6 (sequence is synthesized)
ttgggtcccacggcggggcgccgtccacgtgtacgccacgctgcgcttcaccatgctcgagtgcctgtccctgcctcgggctgggcgctcctgcaaggagaccttcaccgtcttctacta

SEQ ID NO: 704338 - DNA, 120 bp, Artificial Sequence
  ENSG00000196411_7 (sequence is synthesized)
tgagagcgatgcggacacggccacggccctcacgccagcctggatggagaacccctacatcaaggtggacacggtggccgcggagcatctcacccggaagcgccctggggccgaggccac

SEQ ID NO: 704339 - DNA, 120 bp, Artificial Sequence
  ENSG00000196411_8 (sequence is synthesized)
cgggaaggtgaatgtcaagacgctgcgtctgggaccgctcagcaaggctggcttctacctggccttccaggaccagggtgcctgcatggccctgctatccctgcacctcttctacaaaaa

SEQ ID NO: 704340 - DNA, 120 bp, Artificial Sequence
  ENSG00000196411_9 (sequence is synthesized)
gtgcgcccagctgactgtgaacctgactcgattcccggagactgtgcctcgggagctggttgtgcccgtggccggtagctgcgtggtggatgccgtccccgcccctggccccagccccag

SEQ ID NO: 704341 - DNA, 120 bp, Artificial Sequence
  ENSG00000196411_10 (sequence is synthesized)
cctctactgccgtgaggatggccagtgggccgaacagccggtcacgggctgcagctgtgctccggggttcgaggcagctgaggggaacaccaagtgccgagcctgtgcccagggcacctt

SEQ ID NO: 704342 - DNA, 120 bp, Artificial Sequence
  ENSG00000196411_11 (sequence is synthesized)
caagcccctgtcaggagaagggtcctgccagccatgcccagccaatagccactctaacaccattggatcagccgtctgccagtgccgcgtcgggtacttccgggcacgcacagacccccg

SEQ ID NO: 704343 - DNA, 120 bp, Artificial Sequence
  ENSG00000196411_12 (sequence is synthesized)
gggtgcaccctgcaccacccctccttcggctccgcggagcgtggtttcccgcctgaacggctcctccctgcacctggaatggagtgcccccctggagtctggtggccgagaggacctcac

SEQ ID NO: 704344 - DNA, 120 bp, Artificial Sequence
  ENSG00000196411_13 (sequence is synthesized)
ctacgccctccgctgccgggagtgccgacccggaggctcctgtgcgccctgcgggggagacctgacttttgaccccggcccccgggacctggtggagccctgggtggtggttcgagggct

SEQ ID NO: 704345 - DNA, 120 bp, Artificial Sequence
  ENSG00000196411_14 (sequence is synthesized)
acgtcctgacttcacctatacctttgaggtcactgcattgaacggggtatcctccttagccacggggcccgtcccatttgagcctgtcaatgtcaccactgaccgagaggtacctcctgc

SEQ ID NO: 704346 - DNA, 120 bp, Artificial Sequence
  ENSG00000196411_15 (sequence is synthesized)
agtgtctgacatccgggtgacgcggtcctcacccagcagcttgagcctggcctgggctgttccccgggcacccagtggggctgtgctggactacgaggtcaaataccatgagaagggcgc

SEQ ID NO: 704347 - DNA, 120 bp, Artificial Sequence
  ENSG00000196411_16 (sequence is synthesized)
cgagggtcccagcagcgtgcggttcctgaagacgtcagaaaaccgggcagagctgcgggggctgaagcggggagccagctacctggtgcaggtacgggcgcgctctgaggccggctacgg

SEQ ID NO: 704348 - DNA, 120 bp, Artificial Sequence
  ENSG00000196411_17 (sequence is synthesized)
gcccttcggccaggaacatcacagccagacccaactggatgagagcgagggctggcgggagcagctggccctgattgcgggcacggcagtcgtgggtgtggtcctggtcctggtggtcat

SEQ ID NO: 704349 - DNA, 120 bp, Artificial Sequence
  ENSG00000196411_18 (sequence is synthesized)
caatgggagagaagcagaatattcggacaaacacggacagtatctcatcggacatggtactaaggtctacatcgaccccttcacttatgaagaccctaatgaggctgtgagggaatttgc

SEQ ID NO: 704350 - DNA, 120 bp, Artificial Sequence
  ENSG00000196411_19 (sequence is synthesized)
aaaagagatcgatgtctcctacgtcaagattgaagaggtgattggtgcaggtgagtttggcgaggtgtgccgggggcggctcaaggccccagggaagaaggagagctgtgtggcaatcaa

SEQ ID NO: 704351 - DNA, 120 bp, Artificial Sequence
  ENSG00000196411_20 (sequence is synthesized)
gaccctgaagggtggctacacggagcggcagcggcgtgagtttctgagcgaggcctccatcatgggccagttcgagcaccccaatatcatccgcctggagggcgtggtcaccaacagcat

SEQ ID NO: 704352 - DNA, 120 bp, Artificial Sequence
  ENSG00000196411_21 (sequence is synthesized)
gcccgtcatgattctcacagagttcatggagaacggcgccctggactccttcctgcggctaaacgacggacagttcacagtcatccagctcgtgggcatgctgcggggcatcgcctcggg

SEQ ID NO: 704353 - DNA, 120 bp, Artificial Sequence
  ENSG00000196411_22 (sequence is synthesized)
catgcggtaccttgccgagatgagctacgtccaccgagacctggctgctcgcaacatcctagtcaacagcaacctcgtctgcaaagtgtctgactttggcctttcccgattcctggagga

SEQ ID NO: 704354 - DNA, 120 bp, Artificial Sequence
  ENSG00000196411_23 (sequence is synthesized)
gaactcttccgatcccacctacacgagctccctgggaggaaagattcccatccgatggactgccccggaggccattgccttccggaagttcacttccgccagtgatgcctggagttacgg

SEQ ID NO: 704355 - DNA, 120 bp, Artificial Sequence
  ENSG00000196411_24 (sequence is synthesized)
gattgtgatgtgggaggtgatgtcatttggggagaggccgtactgggacatgagcaatcaggacgtgatcaatgccattgaacaggactaccggctgcccccgcccccagactgtcccac

SEQ ID NO: 704356 - DNA, 120 bp, Artificial Sequence
  ENSG00000196411_25 (sequence is synthesized)
ctccctccaccagctcatgctggactgttggcagaaagaccggaatgcccggccccgcttcccccaggtggtcagcgccctggacaagatgatccggaaccccgccagcctcaaaatcgt

SEQ ID NO: 704357 - DNA, 120 bp, Artificial Sequence
  ENSG00000196411_26 (sequence is synthesized)
ggcccgggagaatggcggggcctcacaccctctcctggaccagcggcagcctcactactcagcttttggctctgtgggcgagtggcttcgggccatcaaaatgggaagatacgaagaaag

SEQ ID NO: 704358 - DNA, 120 bp, Artificial Sequence
  ENSG00000196411_27 (sequence is synthesized)
tttcgcagccgctggctttggctccttcgagctggtcagccagatctctgctgaggacctgctccgaatcggagtcactctggcgggacaccagaagaaaatcttggccagtgtccagca

SEQ ID NO: 704359 - DNA, 120 bp, Artificial Sequence
  ENSG00000196411_28 (sequence is synthesized)
catgaagtcccaggccaagccgggaaccccgggtgggacaggaggaccggccccgcagtactgacctgcaggaactccccaccccagggacaccgcctccccattttccggggcagagtg

SEQ ID NO: 704360 - DNA, 120 bp, Artificial Sequence
  ENSG00000196411_29 (sequence is synthesized)
gggactcacagaggcccccagccctgtgccccgctggattgcactttgagcccgtggggtgaggagttggcaatttggagagacaggatttgggggttctgccataataggaggggaaaa

SEQ ID NO: 704361 - DNA, 120 bp, Artificial Sequence
  ENSG00000196411_30 (sequence is synthesized)
tcaccccccagccacctcggggaactccagaccaagggtgagggcgcctttccctcaggactgggtgtgaccagaggaaaaggaagtgcccaacatctcccagcctccccaggtgccccc

SEQ ID NO: 704362 - DNA, 120 bp, Artificial Sequence
  ENSG00000196411_31 (sequence is synthesized)
ctcaccttgatgggtgcgttcccgcagaccaaagagagtgtgactcccttgccagctccagagtgggggggctgtcccagggggcaagaaggggtgtcagggcccagtgacaaaatcatt

SEQ ID NO: 704363 - DNA, 120 bp, Artificial Sequence
  ENSG00000196411_32 (sequence is synthesized)
ggggtttgtagtcccaacttgctgctgtcaccaccaaactcaatcatttttttcccttgtaaatgcccctcccccagctgctgccttcatattgaaggtttttgagttttgtttttggtc

SEQ ID NO: 704364 - DNA, 120 bp, Artificial Sequence
  ENSG00000196411_33 (sequence is synthesized)
ttaatttttctccccgttccctttttgtttcttcgttttgtttttctaccgtccttgtcataactttgtgttggagggaacctgtttcactatggcctcctttgcccaagttgaaacagg

SEQ ID NO: 704365 - DNA, 120 bp, Artificial Sequence
  ENSG00000196411_34 (sequence is synthesized)
ggcccatcatcatgtctgtttccagaacagtgccttggtcatcccacatccccggaccccgcctgggacccccaagctgtgtcctatgaaggggtgtggggtgaggtagtgaaaagggcg

SEQ ID NO: 704366 - DNA, 120 bp, Artificial Sequence
  ENSG00000196411_35 (sequence is synthesized)
gtagttggtggtggaacccagaaacggacgccggtgcttggaggggttcttaaattatatttaaaaaagtaactttttgtataaataaaagaaaatgggacgtgtcccagctccaggggt

SEQ ID NO: 704367 - DNA, 120 bp, Artificial Sequence
  ENSG00000196411_36 (sequence is synthesized)
atgcgaactgacagatcaaagcgtggctgcagctgagctgggacgcagaaagggagcctgcgcttgctctgggctgcggacagcccgaggcagagacagtgtgtaaattggagacaggaa

SEQ ID NO: 704368 - DNA, 120 bp, Artificial Sequence
  ENSG00000196411_37 (sequence is synthesized)
aacactatcccggctggaacaatggagggtggagacggcagcctctatccacccccttcccagaacccgggcatcctgtccccagtgagcagggctgtctcttgccacccatggggacct

SEQ ID NO: 704369 - DNA, 120 bp, Artificial Sequence
  ENSG00000196411_38 (sequence is synthesized)
tgcgcctctcacctcaggctggctggcttcccatctgacccctagctggaggacatcatttggtccccaggaagaggctgcctcacccaccctctttctcttctctcctgcagctcccat

SEQ ID NO: 704370 - DNA, 120 bp, Artificial Sequence
  ENSG00000196411_39 (sequence is synthesized)
ggggtgggagccaggtgttctggctcccctctccacccttcccagcgcccaatgccccccacattgccggcccccgaggggattcctgtaccctccctcctccactctccactgccaggg

SEQ ID NO: 704371 - DNA, 120 bp, Artificial Sequence
  ENSG00000196411_40 (sequence is synthesized)
gctgtgcagtttttcctaatccccccccttcctccagtgcctgtcccctcccccgatgatccgagccaagccaggtgtgttcacccctcccattcataccgccccccagaatctcctccc

SEQ ID NO: 704372 - DNA, 120 bp, Artificial Sequence
  ENSG00000196411_41 (sequence is synthesized)
ctctgccttcccataaccaaatccagatgtgaggcctcggcgggagcctgggaaccctagcatcccgacctccagtgcttcctgatcagggcactcgtggggagggaggtactgggatgg

SEQ ID NO: 704373 - DNA, 120 bp, Artificial Sequence
  ENSG00000196411_42 (sequence is synthesized)
gggccagggctatgccccaggcacggagcgctcccttcaaggagggaaggacggggtgtttggtctgaaagcagagaggggtcttggacagggaatgaaattgtggggtagagaggctga

SEQ ID NO: 704374 - DNA, 120 bp, Artificial Sequence
  ENSG00000196411_43 (sequence is synthesized)
ttctgggacttaggggaggaaacgtggaggctgagacaagaggttcccctcccacaccagcagcctctgctcgtgggggtcaggaccagggcgcagctctcattttaaccctttctgagc

SEQ ID NO: 704375 - DNA, 120 bp, Artificial Sequence
  ENSG00000196411_44 (sequence is synthesized)
tgccgccccttctccccgtacattttgatctccctccctcctccagggaggcctagatctggggtatcccaagggagccccatgcctaccagatgttgggggtggggttggcacttagca

SEQ ID NO: 704376 - DNA, 120 bp, Artificial Sequence
  ENSG00000196411_45 (sequence is synthesized)
gaagaggccagaaatcaggcgggtgcagagggcagggcttgctcccctcttggccccccaactcctctagctcagagctaagaggatccacctgcctcggttcccagggatctggtcttc

SEQ ID NO: 704377 - DNA, 120 bp, Artificial Sequence
  ENSG00000196411_46 (sequence is synthesized)
aaaaaaaaaaaaaaaaaaaaaccacggagacaggggtttggggctaaaagctatgagccgagcctccgagtccagtgggagttaattcccagctgacggggccctgcctgatttctcagg

SEQ ID NO: 704378 - DNA, 120 bp, Artificial Sequence
  ENSG00000196411_47 (sequence is synthesized)
cagagagtcatcactgctgggttcttgagaccatggagatgacaaaaaggagaattgatctttgtatcaaagagttgagatacagggccaggcctagtggctcaagcctgtaatcccagc

SEQ ID NO: 704379 - DNA, 62 bp, Artificial Sequence
  ENSG00000196411_48 (sequence is synthesized)
gcagatcacaatacaaaaaattagcccagcatgatgggcgggtgcctgtaatcccagctact

SEQ ID NO: 704380 - DNA, 76 bp, Artificial Sequence
  ENSG00000196411_49 (sequence is synthesized)
tttttttttttttttttggagatgggatctcgatatgttgcccaggctggtcttgaaccccttgcgaggcatgagc

SEQ ID NO: 704381 - DNA, 120 bp, Artificial Sequence
  ENSG00000196415_0 (sequence is synthesized)
ggaccccaccatggctcaccggccccccagccctgccctggcgtccgtgctgctggccttgctgctgagcggtgctgcccgagctgcggagatcgtgggcgggcacgaggcgcagccaca

SEQ ID NO: 704382 - DNA, 120 bp, Artificial Sequence
  ENSG00000196415_1 (sequence is synthesized)
ctcccggccctacatggcctccctgcagatgcgggggaacccgggcagccacttctgcggaggcaccttgatccaccccagcttcgtgctgacggccgcgcactgcctgcgggacatacc

SEQ ID NO: 704383 - DNA, 120 bp, Artificial Sequence
  ENSG00000196415_2 (sequence is synthesized)
ccagcgcctggtgaacgtggtgctcggagcccacaacgtgcggacgcaggagcccacccagcagcacttctcggtggctcaggtgtttctgaacaactacgacgcggagaacaaactgaa

SEQ ID NO: 704384 - DNA, 120 bp, Artificial Sequence
  ENSG00000196415_3 (sequence is synthesized)
cgacgttctcctcatccagctgagcagcccagccaacctcagtgcctccgtcgccacagtccagctgccacagcaggaccagccagtgccccacggcacccagtgcctggccatgggctg

SEQ ID NO: 704385 - DNA, 120 bp, Artificial Sequence
  ENSG00000196415_4 (sequence is synthesized)
agcccaggtcctgcaggagctcaatgtcaccgtggtcaccttcttctgccggccacataacatttgcactttcgtccctcgccgcaaggccggcatctgcttcggagactcaggtggccc

SEQ ID NO: 704386 - DNA, 120 bp, Artificial Sequence
  ENSG00000196415_5 (sequence is synthesized)
cctgatctgtgatggcatcatccaaggaatagactccttcgtgatctggggatgtgccacccgccttttccctgacttcttcacgcgggtagccctctacgtggactggatccgttccac

SEQ ID NO: 704387 - DNA, 120 bp, Artificial Sequence
  ENSG00000196415_6 (sequence is synthesized)
gctgcgccgtgtggaggccaagggccgcccctgaaccgcccctcccacagcgctggccgggaccccgagcctggctccaaaccctcgaggcggatctttggacagaagcagctcttcccc

SEQ ID NO: 704388 - DNA, 120 bp, Artificial Sequence
  ENSG00000196415_7 (sequence is synthesized)
gaacactgtggcgtccgggacggccccacccgtccccccacactccctcccacggggctccgggagacaggccggccctgcacctcaccccaccgtgacctcaataaacgttgaaactcc

SEQ ID NO: 704389 - DNA, 120 bp, Artificial Sequence
  ENSG00000196415_8 (sequence is synthesized)
aggcactgaccgggttgcagatcgggagacggaggctcggagaggcccaggggctgctctgccatcccccctttccctgcagcctgggggctccctgacgcctggactccccccctgcag

SEQ ID NO: 704390 - DNA, 120 bp, Artificial Sequence
  ENSG00000196417_0 (sequence is synthesized)
agacccggaagcggacggcgtggagtgactatcccaccgccgcgggattgacttctaaagactcttggtatgtgaggaagaaacctggaagaggaagaggaaagcaaaggagtcagggat

SEQ ID NO: 704391 - DNA, 120 bp, Artificial Sequence
  ENSG00000196417_1 (sequence is synthesized)
taggaacctggtctccctggatatctcttccaaatgcatgatgaaggagttctcgtcaacagcacaaggcaatagagaagtgttccatgcagggacatctcaaagacatgaaagtcatca

SEQ ID NO: 704392 - DNA, 120 bp, Artificial Sequence
  ENSG00000196417_2 (sequence is synthesized)
caatggagatttttgtttccaggatattgataaagatattcatgacattgagtttcagtggcaagaagatgaaagaaatggccatgaagcactcatgacaaaaatcaaaaagttgacagg

SEQ ID NO: 704393 - DNA, 120 bp, Artificial Sequence
  ENSG00000196417_3 (sequence is synthesized)
tagtacagagcgatatgatcaaaattatgctggaaacaagcctgttaaatatcagcttggattcagctttcattcgcatctgcctgaactgcacatatttcacactgaagagaaaattga

SEQ ID NO: 704394 - DNA, 120 bp, Artificial Sequence
  ENSG00000196417_4 (sequence is synthesized)
taatcaagttgtgaagtctatccacgatgcttccttggtttcaacagcccaaagaatttcttgtaggcctgaaacccatatttctaatgactatgggaataatttcctgaattcttcatt

SEQ ID NO: 704395 - DNA, 120 bp, Artificial Sequence
  ENSG00000196417_5 (sequence is synthesized)
attcacacaaaaacaggaagtacatatgagggaaaaatctttccaatgcaatgacagtggcaaagcctataattgtagctcactcttaaggaaacatcagttaatccatttaggagagaa

SEQ ID NO: 704396 - DNA, 120 bp, Artificial Sequence
  ENSG00000196417_6 (sequence is synthesized)
aggaaacatcagttaatccatttaggagagaaacaatataaatgcgatatatgtggcaaggtctttaattcgaagcgatacgttgcacgccatcgtagatgtcacactggtgagaaacct

SEQ ID NO: 704397 - DNA, 82 bp, Artificial Sequence
  ENSG00000196417_7 (sequence is synthesized)
tttccatttcaaatcaaagcttcaaatacataggagaattcatactggagagaaaccgtacaagtgtaatgagtgtggcaag

SEQ ID NO: 704398 - DNA, 90 bp, Artificial Sequence
  ENSG00000196417_8 (sequence is synthesized)
tccatttcaaatcaaagcttcaaatacataggagaattcatactggagagaaaccgagtcagaagtcgtaccttacatgccatcgtaggc

SEQ ID NO: 704399 - DNA, 75 bp, Artificial Sequence
  ENSG00000196417_9 (sequence is synthesized)
ttttacatgccatagcaagacctttagtcacaagtcatctcttacataccatcgtagacttcatactgaagagaa

SEQ ID NO: 704400 - DNA, 81 bp, Artificial Sequence
  ENSG00000196417_10 (sequence is synthesized)
agtgtaatgagtgtggcaagaccttcaatcagcagttaacccttaacatttgtagacttcatagctacagtttcaaatcaa

SEQ ID NO: 704401 - DNA, 85 bp, Artificial Sequence
  ENSG00000196417_11 (sequence is synthesized)
ttacaaatgtgaagaatgtgacaaagcctacagtttcaaatcaaaccttgaaatacatcagaaaattcatactgaagagaatccg

SEQ ID NO: 704402 - DNA, 120 bp, Artificial Sequence
  ENSG00000196417_12 (sequence is synthesized)
tacataccatcatagacttcatactggacagaaaccttacaaatgtgaagattgtgatgaagctttcagtttcaaatcaaaccttgaaagacataggagaatttatactggagagaaact

SEQ ID NO: 704403 - DNA, 120 bp, Artificial Sequence
  ENSG00000196417_13 (sequence is synthesized)
tgaaagacataggagaatttatactggagagaaactacacgtgtaatgagtgtggtaagaccttcaatcaggagttaacccttacatgccatcgtaggcttcatagtggagagaaacctt

SEQ ID NO: 704404 - DNA, 89 bp, Artificial Sequence
  ENSG00000196417_14 (sequence is synthesized)
gaatgagtcatacgtcatcttttgtgtaccatcataaacttcatagtggagagaccttacaaatgtgaagaatgtgaagaagctttctg

SEQ ID NO: 704405 - DNA, 120 bp, Artificial Sequence
  ENSG00000196417_15 (sequence is synthesized)
agagaccttacaaatgtgaagaatgtgaagaagctttctgtttcaaatccaaccttgaaagacataggagaattcacactggtgagaaaccttacaggtgtaatgagtgtggcaagacct

SEQ ID NO: 704406 - DNA, 88 bp, Artificial Sequence
  ENSG00000196417_16 (sequence is synthesized)
ggtgagaaaccttacaggtgtaatgagtgtggcaagaccttcagccagacctcatcccttacatgccattgtagacttcgttgagttt

SEQ ID NO: 704407 - DNA, 120 bp, Artificial Sequence
  ENSG00000196417_17 (sequence is synthesized)
agtgtaatgagtgtggcaagacctttagtcagaactcataccttacacgccatcgtagacttcatactggaggataccttacaaatgtaatgagtgtggcaagacctttagtcagaactc

SEQ ID NO: 704408 - DNA, 120 bp, Artificial Sequence
  ENSG00000196417_18 (sequence is synthesized)
cagaactcataccttacatgccatcatagacttcatactggagagataccttaaaagtgtagtgagtgtggcaagacctttagtctgaagtcataccttacgcaccatcgtagacttcat

SEQ ID NO: 704409 - DNA, 120 bp, Artificial Sequence
  ENSG00000196417_19 (sequence is synthesized)
actggagaggtaccttacaaggataatgagtgtagaaaaacctttcatgggcagtcagcattttacaaatgtaatgattgtcaccaagtcttgagtaatgctacaactattgcaaatcat

SEQ ID NO: 704410 - DNA, 120 bp, Artificial Sequence
  ENSG00000196417_20 (sequence is synthesized)
tggagaatccataatgaagagagatcctacaagtgtgataaatgcagaataaatgcagaaaatttttcagacatccttcatacctttgcagttcatgggtgaagtcgtattagaaacctt

SEQ ID NO: 704411 - DNA, 120 bp, Artificial Sequence
  ENSG00000196417_21 (sequence is synthesized)
acaaatgtgaagaatgtgatgaagctttcagattcaaatcaaaccttgatagtcatagaattcatactagagagaaaccttagcagtgtaatgaacgtggcaaggttttaaatcaaaaag

SEQ ID NO: 704412 - DNA, 120 bp, Artificial Sequence
  ENSG00000196417_22 (sequence is synthesized)
caaagcttgcacatcatcatagaattcatactggagataaacgttacaaatgtgaagcatgtgacaaagtttacagtcgcaaatcaagcctccaaagacaggagaattcatactggagag

SEQ ID NO: 704413 - DNA, 120 bp, Artificial Sequence
  ENSG00000196417_23 (sequence is synthesized)
aaagcttacatatgtgaagaatgtcaccaagttttcagtcacactcaaaccttgaaagacacaggagaattcctactggagagatagcataaaaatgtaagagtttgtgacaaggctttc

SEQ ID NO: 704414 - DNA, 120 bp, Artificial Sequence
  ENSG00000196417_24 (sequence is synthesized)
aggcataattcgcacctggcacaacatcctagaattcacattggagagaaagcttacaagtataatgaatgtgacaggtctttagtgggcagtcaacacttgtttaccatcaggcaatcc

SEQ ID NO: 704415 - DNA, 120 bp, Artificial Sequence
  ENSG00000196417_25 (sequence is synthesized)
atggtgtagggaaactttacttatgtaatgattgtcacaaagtcttcagttacactacaaccattgcgaatcattggagaatccataatgaagagagatcatactagtttaataaatttg

SEQ ID NO: 704416 - DNA, 120 bp, Artificial Sequence
  ENSG00000196417_26 (sequence is synthesized)
gcaaatttttcagacattgttcataacttgcagttcatcggcgaactcgtactggagagaaaccttacaaatgtcatgattgtgacaaggtctcagtcaagcttcattctatgcaaaaca

SEQ ID NO: 704417 - DNA, 120 bp, Artificial Sequence
  ENSG00000196417_27 (sequence is synthesized)
taggagaattcatacaggagagaaacctcacaagtgtgatgattgcggcaaagcctttaattcacattcacacctcactagacatcagagaatgcatactggacagaaatcttataaatg

SEQ ID NO: 704418 - DNA, 120 bp, Artificial Sequence
  ENSG00000196417_28 (sequence is synthesized)
tcatcagtgtgccaaagtcttcagtctgagctcactccttgcaggatatcagaaaattcattttggagatagttgttccaaatacaatgtgtatagcaaaccatcaagcattaattgaca

SEQ ID NO: 704419 - DNA, 120 bp, Artificial Sequence
  ENSG00000196417_29 (sequence is synthesized)
aattgacactagagtcagttcagcattgacttgagtttgacttaacattgagttgaagccttaattgacattaaagtgtttatgttaagaggactgggccaggcacagtggctcacacct

SEQ ID NO: 704420 - DNA, 120 bp, Artificial Sequence
  ENSG00000196417_30 (sequence is synthesized)
agcgctttgggaggccagcaccggtagatcacttgagttcaggagtttgaggtcagcctggccaacagacgtgagccattttcccagcctgttttttgtttctttaacaaaaactgatag

SEQ ID NO: 704421 - DNA, 120 bp, Artificial Sequence
  ENSG00000196417_31 (sequence is synthesized)
acaggcgtgagccactgcgcccagccccagtgataaggatttttatgggtaccgtgttgaatctaaatcacattgggttatataatcatttaacaatattaatttttccaaaccataagt

SEQ ID NO: 704422 - DNA, 120 bp, Artificial Sequence
  ENSG00000196417_32 (sequence is synthesized)
atcatttaacaatattaatttttccaaaccataagtatgggttgtagctctatgtttctaatcattttgatcaatgtttgtagatttcaaggtaaaaacctctgacctttttacgtttat

SEQ ID NO: 704423 - DNA, 120 bp, Artificial Sequence
  ENSG00000196417_33 (sequence is synthesized)
ttctaagtatttcttactttaagttctccagccaatggaagtgttttaaaattttcttttaaagttgtttgttgttaaaagtatggaaattcaactaatttttggtgctgatactgtatt

SEQ ID NO: 704424 - DNA, 120 bp, Artificial Sequence
  ENSG00000196417_34 (sequence is synthesized)
gtgcaaatccactgaatatgttacttagttccagtagtattttggttgactctttgtgattttctgcacagaagatcatgtcgtctacaaacaaatataattttacttctttctttctga

SEQ ID NO: 704425 - DNA, 120 bp, Artificial Sequence
  ENSG00000196417_35 (sequence is synthesized)
gtcaggggagtgtccattggcagcacctgcctcctgagtgtctcccaggccatcaccatcagccccaggagctcaggtgggcagagcttaaagggaacgcccccaagcacgctggctcct

SEQ ID NO: 704426 - DNA, 120 bp, Artificial Sequence
  ENSG00000196417_36 (sequence is synthesized)
gtgtgttcctcagctggctcctccctggtcaatatcattgttctcatgcacgtgaccggcaagtggagcaacaaaaataccacgaagacaaaagatctgggatactgttctgctgctgat

SEQ ID NO: 704427 - DNA, 120 bp, Artificial Sequence
  ENSG00000196417_37 (sequence is synthesized)
cacgagggcaccagagagtcgctgacgcggcactgctgtccttccctgatgtgatctgcctggggctcatgctctggggcagcagctccatcgtttgcatcctgcacaggcacaagcggc

SEQ ID NO: 704428 - DNA, 120 bp, Artificial Sequence
  ENSG00000196417_38 (sequence is synthesized)
gggtccagcacattcataggaccagcgtgtcccccacatcctcccctgagtccggagctaccaaaaccatcctcctggtgagcacgtttgtgtccttttacactctctcttcacctttca

SEQ ID NO: 704429 - DNA, 120 bp, Artificial Sequence
  ENSG00000196417_39 (sequence is synthesized)
agtttgtttggctcttttgaataatcccagtcagctggtggtgaacatctctgcaatgatcagtgcaggtttcccaactgtcagccgctttcttctcatgagtggagactcctgtgtatc

SEQ ID NO: 704430 - DNA, 120 bp, Artificial Sequence
  ENSG00000196417_40 (sequence is synthesized)
caagctttgctttgcttagataagtaacacaaaaccccctaatcttatcagaaatatgtgaattggacatgtttgtacaatgtttatgtttcttcattgatctctagagacccataaaca

SEQ ID NO: 704431 - DNA, 120 bp, Artificial Sequence
  ENSG00000196417_41 (sequence is synthesized)
cggttatgaaacgaggcttgttagtgctgtgcttgccagcaggggccactgttttattctgtacctcctgatcccccctccaaccacaccgccctggagcagctctgtggaaaaagtgga

SEQ ID NO: 704432 - DNA, 120 bp, Artificial Sequence
  ENSG00000196417_42 (sequence is synthesized)
atcagcttagaggttttggagaggaagatactgaaacgtaaacgatataagaaagtcacggtgcacaaatatacatacctcatttctgtgtcccttggagcagatgggggaatgtgcgca

SEQ ID NO: 704433 - DNA, 120 bp, Artificial Sequence
  ENSG00000196417_43 (sequence is synthesized)
gatgcgaagctcttgctgtaatttatgtgacaaataataaaatatatgttttgtcggatccagaaatctcatgccttcagccaacatccataaactgacagtctaacttgttggcttgta

SEQ ID NO: 704434 - DNA, 68 bp, Artificial Sequence
  ENSG00000196417_44 (sequence is synthesized)
aaaaatctccgaagcagacggattaactgaggtcgagaatttgagaccagcctgacaaacatggagaa

SEQ ID NO: 704435 - DNA, 69 bp, Artificial Sequence
  ENSG00000196417_45 (sequence is synthesized)
aaaaaagaaaagaaaaaagaaaaaacattagccaggcatggtggcactccaggaggcggtggttgcggt

SEQ ID NO: 704436 - DNA, 120 bp, Artificial Sequence
  ENSG00000196417_46 (sequence is synthesized)
atcacttgaatccaggaggcggtggttgcggtgaaccgagatcgcgccacagcactccattctgtgtgacaagagtgatactctgtctcaaaaaaaaatctaaaacattttgcaatttct

SEQ ID NO: 704437 - DNA, 120 bp, Artificial Sequence
  ENSG00000196417_47 (sequence is synthesized)
gatagttttggtgatgctgagacagatatgactttgtgtaagaggaaggtagaaagattcttcactggcgtggttagtaggcagaaaatggctctctggaacaagcagcgaattctcacc

SEQ ID NO: 704438 - DNA, 73 bp, Artificial Sequence
  ENSG00000196417_48 (sequence is synthesized)
gcagaaaatggctctctggaacaagcagcgaattctcacccaaactgaggtgaaatgacagtaagacttctcc

SEQ ID NO: 704439 - DNA, 82 bp, Artificial Sequence
  ENSG00000196417_49 (sequence is synthesized)
ttgagccacagtgcccgaccaagattcctccattctataacccttgaatgggactgttgtgtgagagggaggattgaaatga

SEQ ID NO: 704440 - DNA, 120 bp, Artificial Sequence
  ENSG00000196417_50 (sequence is synthesized)
cttgaatgggactgttgtgtgagagggaggattgaaatgaactgtccgaatgtgatttatctgttgctcattctcttcctggcaggagcaggaaaggacaaggagtccccgaagctgaca

SEQ ID NO: 704441 - DNA, 120 bp, Artificial Sequence
  ENSG00000196417_51 (sequence is synthesized)
ctgagttcatggggttgagctgacagcggccaacaggctgtggtaaacgctaatgaaacgagccttgttagtgctgtgcttgccagcaggggtcactgtttccttctgtacctcctgatc

SEQ ID NO: 704442 - DNA, 120 bp, Artificial Sequence
  ENSG00000196417_52 (sequence is synthesized)
cctccctccacccacaccgcactgcagcagctctggggaaaaagtggaatcagcttagaagtttttgggaggaagacactgaaagtcctacttttttttttcagatgggatctcactctg

SEQ ID NO: 704443 - DNA, 120 bp, Artificial Sequence
  ENSG00000196417_53 (sequence is synthesized)
tcggccaggctggaatgcaatggtgccaacttggctcagtgcaacctccccaccccgggctccaacaatcctcccatctcagcctctgaagtagctgggactacaggtgtgcctcatcac

SEQ ID NO: 704444 - DNA, 120 bp, Artificial Sequence
  ENSG00000196417_54 (sequence is synthesized)
agcctctgaagtagctgggactacaggtgtgcctcatcaccatgggctatttttatttttgtattttgtagaggcaaggtcttgccatgtttctcaggctggtctcaaactcctgggctc

SEQ ID NO: 704445 - DNA, 120 bp, Artificial Sequence
  ENSG00000196417_55 (sequence is synthesized)
acagacgtgagccaccgtacctggcctaaaactcttttactcctgttgcatgcaaggatttaagtcaccaacgtacgtggattccagcaagaagggtcagtagacgcaggggtgggtaaa

SEQ ID NO: 704446 - DNA, 120 bp, Artificial Sequence
  ENSG00000196417_56 (sequence is synthesized)
ggtgctaaggatggtggggtgaagtgtggctgcaaacaggcagaaagagacaagcttctgaccctgaatagtcaccaaatgctggatggtgcaatgctaagaatgcagcacaggccgggc

SEQ ID NO: 704447 - DNA, 120 bp, Artificial Sequence
  ENSG00000196417_57 (sequence is synthesized)
aaattagctgggcgtggtggcatctctttgtctgtgtctttatttattacaatctctcatctccgcatacaggcgttatctcctgtccggggaagaggtgggcctctctccgtcgtggga

SEQ ID NO: 704448 - DNA, 120 bp, Artificial Sequence
  ENSG00000196417_58 (sequence is synthesized)
ggagctctgaacttctccttcatccagggatgggccccagggacccaccagtggggctgggagaagcccccctcagcaggaagacagaggtgcctgggtggccgaggcctggaaggtctg

SEQ ID NO: 704449 - DNA, 120 bp, Artificial Sequence
  ENSG00000196417_59 (sequence is synthesized)
caccatggtgcacagaggccccggagctgggtgaggccagaaagctgctctggggtcagcggggaatgtgcctgctgaatctgtacctgagctacgtcttcacaaatggcctcagaccta

SEQ ID NO: 704450 - DNA, 120 bp, Artificial Sequence
  ENSG00000196417_60 (sequence is synthesized)
gagtgcagggagatcccctggcttttctgaagtggtggcaggtggtctcctgggtagcaggatctgggctgcttacttcccttacccagtgagggcccgcggggagctcttaagttgggc

SEQ ID NO: 704451 - DNA, 120 bp, Artificial Sequence
  ENSG00000196417_61 (sequence is synthesized)
atcatggggctgcgtgatgtggctgctgtgcccacatcagagggtttttgtttcttttccaaagtcaagctgcactaatctagaccagggatccccacccctgggctgcagaccggtccc

SEQ ID NO: 704452 - DNA, 120 bp, Artificial Sequence
  ENSG00000196417_62 (sequence is synthesized)
cacagcaggaggtgagcagtgggtgagtgcgcgtgaccacctgagctctgccttctgtgagatcagcagcgccactgcatctcagaggaatgccaaccctactgtgaactgtgcatgcga

SEQ ID NO: 704453 - DNA, 120 bp, Artificial Sequence
  ENSG00000196417_63 (sequence is synthesized)
gggatctgggttgcatgctctttatgagatcaaactaatgcctgatgatctcaggtggaacagtttaatcctgaaaccatccccccatctgtggaaaaactgccttccactaaaccagtc

SEQ ID NO: 704454 - DNA, 120 bp, Artificial Sequence
  ENSG00000196417_64 (sequence is synthesized)
cctggtgccaaaaacactgggaaccgctaatctagacagttctctgctaaggaagcacgtggttgagaagcatcagaatcgttcccacggaccatgctccggagtctcagcaggctcctg

SEQ ID NO: 704455 - DNA, 120 bp, Artificial Sequence
  ENSG00000196417_65 (sequence is synthesized)
caggtgagccccactggcctctcctcttccttccggacctcctcagctttggtaatggaaagctgcatcctcttctgtccccagttcctctctgggtgtcaggatctctaaaaccctctc

SEQ ID NO: 704456 - DNA, 120 bp, Artificial Sequence
  ENSG00000196417_66 (sequence is synthesized)
agccgctgagaagtctgtctgtctgtctcacagtgtgtttatccgtgcatcatgaaggaccctcatacggctgacgtgccttggctgatgcgaataacactgcagcaagcgtggcagtgc

SEQ ID NO: 704457 - DNA, 120 bp, Artificial Sequence
  ENSG00000196417_67 (sequence is synthesized)
agatagctcttggaaatacccatttccttcagacgcatactcagaggtaggattgctggattgtttggtcattttgatttttaaaattaaaaagaattttaattctcatattgttttgag

SEQ ID NO: 704458 - DNA, 120 bp, Artificial Sequence
  ENSG00000196417_68 (sequence is synthesized)
taaaattaaattataacttgtaaggcaactccatgttttttagaatttttaagaaaaataattgctctaccaattgactgtcccaacaacaacgtacaggggtattttttttcctccgca

SEQ ID NO: 704459 - DNA, 120 bp, Artificial Sequence
  ENSG00000196417_69 (sequence is synthesized)
tcctcaccacttgttaccttttgtctttttaataatagcaatcctaagacatgtgaagtgatacctcactgtgattttgattggcattttccagatgattagtctattcaggccctttac

SEQ ID NO: 704460 - DNA, 60 bp, Artificial Sequence
  ENSG00000196417_70 (sequence is synthesized)
ttggcattttccagatgattagtctattcaggccctttacttttttttgttgttgttgtt

SEQ ID NO: 704461 - DNA, 70 bp, Artificial Sequence
  ENSG00000196417_71 (sequence is synthesized)
ttcaccatcttggccaggctggtctcgaccccctgatctcaggtgatccactttgccctttgctcttttt

SEQ ID NO: 704462 - DNA, 120 bp, Artificial Sequence
  ENSG00000196417_72 (sequence is synthesized)
acaggtgtgagccaccacgcccagcccctttgctcttttttaatagggttattactattaccatatttgcttttgagttgtgagtgttccttatatattttggatataaactccttatca

SEQ ID NO: 704463 - DNA, 120 bp, Artificial Sequence
  ENSG00000196417_73 (sequence is synthesized)
caggtatggtatatatggtttgaaatattttctcccattatcatgccccaatatcactaagttacatttcactgctccctcttgaacacctgaaaaaatttcctatttccatgtgtctgt

SEQ ID NO: 704464 - DNA, 120 bp, Artificial Sequence
  ENSG00000196417_74 (sequence is synthesized)
atttccatgtgtctgtatccaggttattgtcacttttacctgaagacacatttatatatgctgatattccccaataactaatatatttttactcttttttttttttttgagatggagtcc

SEQ ID NO: 704465 - DNA, 64 bp, Artificial Sequence
  ENSG00000196417_75 (sequence is synthesized)
ggttgctgggattacaggcacatgccaccaccactagctaatttttttgtatttttattagaga

SEQ ID NO: 704466 - DNA, 120 bp, Artificial Sequence
  ENSG00000196417_76 (sequence is synthesized)
atttttttgtatttttattagagatgcggtttcaccacatgggtcaggctggtcttgaactccggacgtcatatgatccacccgcccttggtctcccaaggtgctgggattataggcatg

SEQ ID NO: 704467 - DNA, 120 bp, Artificial Sequence
  ENSG00000196417_77 (sequence is synthesized)
agccgctgcacccggccctaactaatatattttaaataactttttgctcttggcacatggactaaaaccacatcaccaggccttcaatgacgtccaatgtctgccatcttatttccactc

SEQ ID NO: 704468 - DNA, 120 bp, Artificial Sequence
  ENSG00000196417_78 (sequence is synthesized)
cagctccgccccaggcatagttgcctttctttttattgaagccttctccttgccaagttaattaaagagaatgttttcttcatcaaattagaaattacatcctcagagctttccagtatt

SEQ ID NO: 704469 - DNA, 120 bp, Artificial Sequence
  ENSG00000196417_79 (sequence is synthesized)
tgtagttcttacaggccacatttattacaagtttatagactccaaacttctccactgaacagttaataaaaaggacacaggcttattgtaaaataattcatttagtgcctgccattctga

SEQ ID NO: 704470 - DNA, 120 bp, Artificial Sequence
  ENSG00000196417_80 (sequence is synthesized)
ttacactagaaatttagttctcctgctcagcgttctgttatgtgactgttcaatgcattacttaaaactgcaagattgaatagagagatcagcttctgacactgatgaatgcaaaccaca

SEQ ID NO: 704471 - DNA, 120 bp, Artificial Sequence
  ENSG00000196417_81 (sequence is synthesized)
agaaaccaagtctcctctgcaaaatgatgaaaacactcgcaaagtcactaaaatcaatcatttcagacttctgaaatttaccaaagccacagaacaaagtgaaaagtatctatcccacag

SEQ ID NO: 704472 - DNA, 120 bp, Artificial Sequence
  ENSG00000196417_82 (sequence is synthesized)
aaagtaccaaacttcagtaagacagcagcatttgtgtcattttaatgtggaggcattaccattaccctccatccttcgttcagtgtagagcactgacctcttttgaagctccttttaaac

SEQ ID NO: 704473 - DNA, 120 bp, Artificial Sequence
  ENSG00000196417_83 (sequence is synthesized)
ggctcaagcctgtaatcccagcactttggacgacagagcgagactccatctgaaaaaaagaaagaaaaaaaaaagagaaagtgacttttcaagactgtgatttatggtctcccctgggaa

SEQ ID NO: 704474 - DNA, 120 bp, Artificial Sequence
  ENSG00000196417_84 (sequence is synthesized)
gtgatttatggtctcccctgggaaccaacagtatctgtgctgagagcagatatttgggtggaaggggctctggtgtgcagggcatgccttctgtagctcagtgcttctgacaatgggtcc

SEQ ID NO: 704475 - DNA, 120 bp, Artificial Sequence
  ENSG00000196417_85 (sequence is synthesized)
gaggggagaaacattggcattaacagggaacttgttaaagatgccaatttataaatgctacctcaaacctgcagaatcaaacattattacagtgggttgtggagtgccagatgacttata

SEQ ID NO: 704476 - DNA, 120 bp, Artificial Sequence
  ENSG00000196417_86 (sequence is synthesized)
ttcaccttaaagcttgagagtcagtgcttagctaagaggctctcagcccaggcttccagttggatcaaatggtcatattcagttactaccatcacctgtgccctccccatagcgtctgtc

SEQ ID NO: 704477 - DNA, 120 bp, Artificial Sequence
  ENSG00000196417_87 (sequence is synthesized)
tattggtgtcgggggaaacatccatgctgtttcaattaactaccctgcccccaggtgattctagggtgaggagaagtccagcatgagggcttccatatgcatttgtgaaggttgatggca

SEQ ID NO: 704478 - DNA, 120 bp, Artificial Sequence
  ENSG00000196417_88 (sequence is synthesized)
gactgttccaaatgagaataatggtttccgtgatatgataaaagcaatgctattgaatatgatgatgactgatgagaagttttgcatagcattcgctgtaaaaaagccacttataggctg

SEQ ID NO: 704479 - DNA, 77 bp, Artificial Sequence
  ENSG00000196417_89 (sequence is synthesized)
gcattcgctgtaaaaaagccacttcggaggctgaggtgagcagatcaccggaggtcaagagttcaagaccagcctgg

SEQ ID NO: 704480 - DNA, 61 bp, Artificial Sequence
  ENSG00000196417_90 (sequence is synthesized)
agaggtgtaggttgcagtgagctgacatcatgcctctgcactccagcctgggtgagagagc

SEQ ID NO: 704481 - DNA, 120 bp, Artificial Sequence
  ENSG00000196417_91 (sequence is synthesized)
tccagcctgggtgagagagcaagactacgtccaaaaaaaaaaaaaaagagagagagaattttcctgtaaataattaaaaagactaagcagccccagagataagacctcctgggatcattg

SEQ ID NO: 704482 - DNA, 120 bp, Artificial Sequence
  ENSG00000196417_92 (sequence is synthesized)
attgtccctttatattgagtgataaagtaaccttccttgaagtatatcaatccataaccaatcaccttgctgcaccctatgtactggtcttgaatggaaaatgtggtgattcttctaaag

SEQ ID NO: 704483 - DNA, 120 bp, Artificial Sequence
  ENSG00000196417_93 (sequence is synthesized)
cttctctgtctttccgtgtgtgtgaaacctaagggaacgctgatcccattcatttggagttgatgtttccaggtggctatcctcatgctttgtgttcaaataaactctgtgcttaatcat

SEQ ID NO: 704484 - DNA, 120 bp, Artificial Sequence
  ENSG00000196417_94 (sequence is synthesized)
agctgcactaatctagaccagggatccccacccctgggctgcagaccggtccccatgggtggcctgttaggaactggaccgcacagcaggaggtgagcagtggcacgtggttgagaagca

SEQ ID NO: 704485 - DNA, 120 bp, Artificial Sequence
  ENSG00000196417_95 (sequence is synthesized)
attattgaaaagggcaataggatcttggaagggggagaacacagtataaagcgacacaaatgctgcagaggcactggccctgcaagcttcacatgggggagttggaaatccctgacaact

SEQ ID NO: 704486 - DNA, 120 bp, Artificial Sequence
  ENSG00000196417_96 (sequence is synthesized)
gcacaatcttgcgtgtggatttcaacatcccgaagcaaccagattcctgctgtggctagactcggggataaggtgctgcgaaagacaggtttgaagcagaaagaccaagaaaacactcat

SEQ ID NO: 704487 - DNA, 120 bp, Artificial Sequence
  ENSG00000196417_97 (sequence is synthesized)
attctggacagtcggcggtgacccggagggagaaggaaaggtcgtcgagggggcggagcctgaaccggtgcttgggcggggccagaaggtggaggccgctttggaagccgggccaggatt

SEQ ID NO: 704488 - DNA, 120 bp, Artificial Sequence
  ENSG00000196418_0 (sequence is synthesized)
cgcttctccttcactctcggcggttcaggaggctctgccgcagccggggccctcctgtgacctgcatgtactgggggattcgcagggaggatgtcgggacaccccggaagctgggaaatg

SEQ ID NO: 704489 - DNA, 120 bp, Artificial Sequence
  ENSG00000196418_1 (sequence is synthesized)
aactcggttgcctttgaggatgtggctgtgaacttcacccaggaggagtgggctttgttggatccttcccagaagaatctctatagagacgtgatgcaggaaaccttcaggaatctggct

SEQ ID NO: 704490 - DNA, 120 bp, Artificial Sequence
  ENSG00000196418_2 (sequence is synthesized)
tccataggaaacaaaggggaagaccagagcattgaagatcagtacaaaaattcttcaagaaatctaaggcacatcatatctcattctggaaacaacccatatgggtgtgaggaatgcgga

SEQ ID NO: 704491 - DNA, 120 bp, Artificial Sequence
  ENSG00000196418_3 (sequence is synthesized)
aagaagccatgtacatgtaaacaatgtcagaaaacttccctttctgtcacaagggttcacagagacacagtaatgcacactggaaatggacattatggttgtacaatatgtgagaaagtt

SEQ ID NO: 704492 - DNA, 120 bp, Artificial Sequence
  ENSG00000196418_4 (sequence is synthesized)
tttaatattcccagttcatttcagatacatcagagaaatcacactggagagaaaccctatgaatgtatggaatgtgggaaagccttaggtttttcccgttctcttaatagacataaaagg

SEQ ID NO: 704493 - DNA, 120 bp, Artificial Sequence
  ENSG00000196418_5 (sequence is synthesized)
tggagagaaaccctatgaatgtaagcactgtgggaaagccttccgttactccaattgccttcattaccatgaaagaactcacactggagagaaaccttatgtgtgcatggaatgtggcaa

SEQ ID NO: 704494 - DNA, 120 bp, Artificial Sequence
  ENSG00000196418_6 (sequence is synthesized)
agctttcagttgtctcagttccttgcaaggacatataaaggctcatgctggtgaagaaccctatccatgtaagcaatgtgggaaagccttcagatacgccagttcccttcagaaacacga

SEQ ID NO: 704495 - DNA, 120 bp, Artificial Sequence
  ENSG00000196418_7 (sequence is synthesized)
gaaaactcatattgcacagaaaccctatgtatgtaacaattgtggtaaaggcttcagatgttccagttcccttcgtgaccatgaaaggactcatactggagagaaaccctatgaatgtca

SEQ ID NO: 704496 - DNA, 120 bp, Artificial Sequence
  ENSG00000196418_8 (sequence is synthesized)
gaaatgtggcaaagcctttagtcgtgctagtaccctttggaagcataaaaaaactcatactggagaaaagccctataaatgtaaaaaaatgtaaaggctttaatcactacagtttttgtc

SEQ ID NO: 704497 - DNA, 120 bp, Artificial Sequence
  ENSG00000196418_9 (sequence is synthesized)
aaaaacatgaacagtcacatacttgagagaaactgtgaatgtaaggtgtaggaaagtacttaattttcccagatttcctcaaatacatgaaacgaatcaaactggagataaaccctatga

SEQ ID NO: 704498 - DNA, 120 bp, Artificial Sequence
  ENSG00000196418_10 (sequence is synthesized)
tttttgaaaacttgaaaggactcactgaagaaaatccatatgaatgtttaaaatgtggtaaggcctgcagttgttccagtggtatttgatggtataacataactcattctagagaaaaac

SEQ ID NO: 704499 - DNA, 120 bp, Artificial Sequence
  ENSG00000196418_11 (sequence is synthesized)
tttatgaaggtatcgaatgtgagaatgccttcatttatcctataactcactcagagacacatggtaacacatactccagattgaccttataaataaaagaatgcccaccagattgaaatc

SEQ ID NO: 704500 - DNA, 120 bp, Artificial Sequence
  ENSG00000196418_12 (sequence is synthesized)
ctagaaatacagaaaattctgaattttaacaattactttaaaggtcatgtgaaaactcccactggaaataaatcctgtaaatgtaaatattatggaaaaccttatggaaaataattatag

SEQ ID NO: 704501 - DNA, 120 bp, Artificial Sequence
  ENSG00000196418_13 (sequence is synthesized)
tacaattctcaagaaaattcactatgtgaatgagatgttttaggagctataaataaattgaatatattggttgctcatttttgaagagagtctctagaatatagattttcacttcttttg

SEQ ID NO: 704502 - DNA, 120 bp, Artificial Sequence
  ENSG00000196418_14 (sequence is synthesized)
cattcaggatgtcatcttgaaagcagagaccaaggtcttcaccagagacagtctgccaatggcttgattttgcacttcccagcctatataactatgtactggttcatgaagatgtgctta

SEQ ID NO: 704503 - DNA, 120 bp, Artificial Sequence
  ENSG00000196418_15 (sequence is synthesized)
tgggtttctactctaatgaggtttatataactttccaagacaaggaagttgtgcaaagcctcacagctactaagaggctgggctgggactcaggattaacttcgtgactccaaagcccat

SEQ ID NO: 704504 - DNA, 120 bp, Artificial Sequence
  ENSG00000196418_16 (sequence is synthesized)
aagcagcttctctaaacctttgaagtcctggaaagtaactcttctgcaatagaagcaagaatcctgtgagattgggatccatctagtactcttcaccatttggaacaactgcctccagag

SEQ ID NO: 704505 - DNA, 120 bp, Artificial Sequence
  ENSG00000196418_17 (sequence is synthesized)
aatgcttctgacgcatcttggaagaacttggaataacctgaggaaatggtcgatttgctaatttaggaaaccaatgttcgatacgtgtgtgatcccaataaagctattaacaaaaaacgg

SEQ ID NO: 704506 - DNA, 120 bp, Artificial Sequence
  ENSG00000196418_18 (sequence is synthesized)
gactccgtctcagaaaaaaaaaaaaagaacataatatgtgtattgtgtctcatgtacactgttgaagaggtagcagcccatgattgatgaaatagtccagtgatcttatgagatacaagt

SEQ ID NO: 704507 - DNA, 120 bp, Artificial Sequence
  ENSG00000196418_19 (sequence is synthesized)
tgcttattccttcatggtccaagttggctgtcccacctccaggcatcaaaccacattccaaacagcaaccaggaggaaatagtaagctgataggtcatggggaattaggttggaagccat

SEQ ID NO: 704508 - DNA, 120 bp, Artificial Sequence
  ENSG00000196418_20 (sequence is synthesized)
tgctttttaatttacagaagtccattctccccaggcacttctttctaagtctcattgatcagaactcaaccacgtggccaccatcagcagaaacatctctctgtagcaccgtgaaacaca

SEQ ID NO: 704509 - DNA, 120 bp, Artificial Sequence
  ENSG00000196418_21 (sequence is synthesized)
tgagaacataactggggatgaccgttgttacttgaactattttgaaagatctgacataaaggtcatcgccttgtgcacttcaatgggtgttactgcaaaactcccagggctaggcatggc

SEQ ID NO: 704510 - DNA, 120 bp, Artificial Sequence
  ENSG00000196418_22 (sequence is synthesized)
gctgaggtgggaggattgcttgagcccacgagtttgaggctgaagtgtgcctgtgaatagctactgcactccagtgcctaggacacatagggagacctcacttttttatggctgcatagt

SEQ ID NO: 704511 - DNA, 120 bp, Artificial Sequence
  ENSG00000196418_23 (sequence is synthesized)
tttatggctgcatagtattccatggtaaagaaatgtaccacattttctttatccacttcactgttgatgggcatttatccacttcactgttggtgggaatttaggttgaatccatgtctt

SEQ ID NO: 704512 - DNA, 120 bp, Artificial Sequence
  ENSG00000196418_24 (sequence is synthesized)
gttgaatccatgtctttgctattgaagtcacactttttaatcaagttatttaactttcctgtgttcatttgtgttatataccagaacatttttatttctatggttttaatgccacctaat

SEQ ID NO: 704513 - DNA, 120 bp, Artificial Sequence
  ENSG00000196418_25 (sequence is synthesized)
atgattatcaatgtgtcattctccataaatcattgtgttatacatgttaaacgattaggtattaagtgtataggtataaatcacttagaataatgactaacacattgtatgaactaaata

SEQ ID NO: 704514 - DNA, 120 bp, Artificial Sequence
  ENSG00000196418_26 (sequence is synthesized)
agtactgattcatctgattcatcaaatttccattattcataccattcattatttattaagtggtgtagtatttgttcttatcaacatttgcttttctgtcctatctaaatattaatgaaa

SEQ ID NO: 704515 - DNA, 120 bp, Artificial Sequence
  ENSG00000196418_27 (sequence is synthesized)
cagtggatgtgggctcagtgtgctgtcttgaaataatccaaagtcaaatggcatgcttcactggtttcctttagatgcaataactcatttgactcacacaataaaaatgagtattaagta

SEQ ID NO: 704516 - DNA, 120 bp, Artificial Sequence
  ENSG00000196418_28 (sequence is synthesized)
aattagtccagaatttttatgttttatttcttctaaaacaaacgaaaacgggatacgtgtagaacatgtgagtttgttacatgggtatacatgtgccgcggtggtttgctgcacctattg

SEQ ID NO: 704517 - DNA, 120 bp, Artificial Sequence
  ENSG00000196418_29 (sequence is synthesized)
gtcctctaagttccctcccctcaccccccaacccccaacagcccctggtgtgtgttgttccccctctgtttccatgtgttctcaatgttcagctctcacttatgagtgagaacgtgcagt

SEQ ID NO: 704518 - DNA, 88 bp, Artificial Sequence
  ENSG00000196418_30 (sequence is synthesized)
acatgatctcattcctttttatgtctacatagtgttctatggtatatatatacacatatatatatacaccacattttctttatccagt

SEQ ID NO: 704519 - DNA, 120 bp, Artificial Sequence
  ENSG00000196419_0 (sequence is synthesized)
gcgggccgttatccatttgtgttgttcgccagctaggcctggcctcgtcccgcttcgctcggtcggtctcgcgcgcccccatagccttgctagagggttagcgttagccttaagtgtgcg

SEQ ID NO: 704520 - DNA, 120 bp, Artificial Sequence
  ENSG00000196419_1 (sequence is synthesized)
aatccgaggagcagcgacagactcgagaccacgctccttcctcgggaaggaggcggcacctcgcgtttgaggcccgcctgcgtttgaggcccgcctgcgcttgcggcccgcctgcgcttg

SEQ ID NO: 704521 - DNA, 120 bp, Artificial Sequence
  ENSG00000196419_2 (sequence is synthesized)
aggcctgtctgcgtttgagatctcattgggcgtgattgaggaatttggggaggtttttgggcggtattgaggacgagggggtccgttagtcagcatagaatcctggagcgggaatccctc

SEQ ID NO: 704522 - DNA, 120 bp, Artificial Sequence
  ENSG00000196419_3 (sequence is synthesized)
accgtctaaatggcgtcgggggcgggacctccgggatctggcttccgcgggccgccgccggccctgaaacgtgagggatagctgagatgaggcagctactgggatggcccccatgcgcat

SEQ ID NO: 704523 - DNA, 120 bp, Artificial Sequence
  ENSG00000196419_4 (sequence is synthesized)
ttacatgcagtccgactgccgagctttcgaggcagcaggatttaccgtccacattcctcactactaaccaagcttttagaacagatctcacaagaacctagaggtcggtattttttcgat

SEQ ID NO: 704524 - DNA, 120 bp, Artificial Sequence
  ENSG00000196419_5 (sequence is synthesized)
ttaaatttgcctgttactgacgttaacgtctttcgcctagtgagcagtagccaacatgtcagggtgggagtcatattacaaaaccgagggcgatgaagaagcagaggaagaacaagaaga

SEQ ID NO: 704525 - DNA, 120 bp, Artificial Sequence
  ENSG00000196419_6 (sequence is synthesized)
gaaccttgaagcaagtggagactataaatattcaggaagagatagtttgatttttttggttgatgcctccaaggctatgtttgaatctcagagtgaagatgagttgacaccttttgacat

SEQ ID NO: 704526 - DNA, 120 bp, Artificial Sequence
  ENSG00000196419_7 (sequence is synthesized)
gagcatccagtgtatccaaagtgtgtacatcagtaagatcataagcagtgatcgagatctcttggctgtggtgttctatggtaccgagaaagacaaaaattcagtgaattttaaaaatat

SEQ ID NO: 704527 - DNA, 120 bp, Artificial Sequence
  ENSG00000196419_8 (sequence is synthesized)
ttacgtcttacaggagctggataatccaggtgcaaaacgaattctagagcttgaccagtttaaggggcagcagggacaaaaacgtttccaagacatgatgggccacggatctgactactc

SEQ ID NO: 704528 - DNA, 120 bp, Artificial Sequence
  ENSG00000196419_9 (sequence is synthesized)
actcagtgaagtgctgtgggtctgtgccaacctctttagtgatgtccaattcaagatgagtcataagaggatcatgctgttcaccaatgaagacaacccccatggcaatgacagtgccaa

SEQ ID NO: 704529 - DNA, 120 bp, Artificial Sequence
  ENSG00000196419_10 (sequence is synthesized)
agccagccgggccaggaccaaagccggtgatctccgagatacaggcatcttccttgacttgatgcacctgaagaaacctgggggctttgacatatccttgttctacagagatatcatcag

SEQ ID NO: 704530 - DNA, 120 bp, Artificial Sequence
  ENSG00000196419_11 (sequence is synthesized)
ggttcgcgccaaggagaccaggaagcgagcactcagcaggttaaagctgaagctcaacaaagatatagtgatctctgtgggcatttataatctggtccagaaggctctcaagcctcctcc

SEQ ID NO: 704531 - DNA, 120 bp, Artificial Sequence
  ENSG00000196419_12 (sequence is synthesized)
aataaagctctatcgggaaacaaatgaaccagtgaaaaccaagacccggacctttaatacaagtacaggcggtttgcttctgcctagcgataccaagaggtctcagatctatgggagtcg

SEQ ID NO: 704532 - DNA, 120 bp, Artificial Sequence
  ENSG00000196419_13 (sequence is synthesized)
tcagattatactggagaaagaggaaacagaagagctaaaacggtttgatgatccaggtttgatgctcatgggtttcaagccgttggtactgctgaagaaacaccattacctgaggccctc

SEQ ID NO: 704533 - DNA, 120 bp, Artificial Sequence
  ENSG00000196419_14 (sequence is synthesized)
cctgttcgtgtacccagaggagtcgctggtgattgggagctcaaccctgttcagtgctctgctcatcaagtgtctggagaaggaggttgcagcattgtgcagatacacaccccgcaggaa

SEQ ID NO: 704534 - DNA, 120 bp, Artificial Sequence
  ENSG00000196419_15 (sequence is synthesized)
catccctccttattttgtggctttggtgccacaggaagaagagttggatgaccagaaaattcaggtgactcctccaggcttccagctggtctttttaccctttgctgatgataaaaggaa

SEQ ID NO: 704535 - DNA, 120 bp, Artificial Sequence
  ENSG00000196419_16 (sequence is synthesized)
gatgccctttactgaaaaaatcatggcaactccagagcaggtgggcaagatgaaggctatcgttgagaagcttcgcttcacatacagaagtgacagctttgagaaccccgtgctgcagca

SEQ ID NO: 704536 - DNA, 120 bp, Artificial Sequence
  ENSG00000196419_17 (sequence is synthesized)
gcacttcaggaacctggaggccttggccttggatttgatggagccggaacaagcagtggacctgacattgcccaaggttgaagcaatgaataaaagactgggctccttggtggatgagtt

SEQ ID NO: 704537 - DNA, 120 bp, Artificial Sequence
  ENSG00000196419_18 (sequence is synthesized)
taaggagcttgtttacccaccagattacaatcctgaagggaaagttaccaagagaaaacacgataatgaaggttctggaagcaaaaggcccaaggtggagtattcagaagaggagctgaa

SEQ ID NO: 704538 - DNA, 120 bp, Artificial Sequence
  ENSG00000196419_19 (sequence is synthesized)
gacccacatcagcaagggtacgctgggcaagttcactgtgcccatgctgaaagaggcctgccgggcttacgggctgaagagtgggctgaagaagcaggagctgctggaagccctcaccaa

SEQ ID NO: 704539 - DNA, 120 bp, Artificial Sequence
  ENSG00000196419_20 (sequence is synthesized)
gcacttccaggactgaccagaggccgcgcgtccagctgcccttccgcagtgtggccaggctgcctggccttgtcctcagccagttaaaatgtgtttctcctgagctaggaagagtctacc

SEQ ID NO: 704540 - DNA, 120 bp, Artificial Sequence
  ENSG00000196419_21 (sequence is synthesized)
cgacataagtcgagggactttatgtttttgaggctttctgttgccatggtgatggtgtagccctcccactttgctgttccttactttactgcctgaataaagagccctaagtttgtacta

SEQ ID NO: 704541 - DNA, 120 bp, Artificial Sequence
  ENSG00000196419_22 (sequence is synthesized)
gtaggaaggggcggggctttgccgaagggggcggggctctcgctgatgggttggctttcgtcagggacataggtagaagctggttggggagtgtgcgtgccagcctgacgcgatatagtg

SEQ ID NO: 704542 - DNA, 120 bp, Artificial Sequence
  ENSG00000196419_23 (sequence is synthesized)
cgcacatgcgtgatgacgtagagggcgttgattgggaccgagtacagggcccgcgcatgcgtggattgtcgtcttctgtccaagttggtcgcttccctgcgccaaagtgagcagtagcca

SEQ ID NO: 704543 - DNA, 120 bp, Artificial Sequence
  ENSG00000196419_24 (sequence is synthesized)
tggacatgtgggctatttttaaaaattgcttttatgatagtcttatcacagtgggcaatatcctttcagaaatatctattcacagtctagttaaaatggcttttatccaaaaaacagaca

SEQ ID NO: 704544 - DNA, 120 bp, Artificial Sequence
  ENSG00000196420_0 (sequence is synthesized)
cagccccctctcagccctggactctctctttgccctgtccccgactttaataatgggacactcctcgatatcagagctgcacactgtgatggagactcctctggagaaggccctgaccac

SEQ ID NO: 704545 - DNA, 120 bp, Artificial Sequence
  ENSG00000196420_1 (sequence is synthesized)
tatggtgaccacgtttcacaaatattcggggagagagggtagcaaactgaccctgagtaggaaggaactcaaggagctgatcaagaaagagctgtgtcttggggagatgaaggagagcag

SEQ ID NO: 704546 - DNA, 120 bp, Artificial Sequence
  ENSG00000196420_2 (sequence is synthesized)
acaagaacagcgaccaggagatcgacttcaaggagtactcggtgttcctgaccatgctgtgcatggcctacaacgacttctttctagaggacaacaagtgaccagggctgccctccaccc

SEQ ID NO: 704547 - DNA, 120 bp, Artificial Sequence
  ENSG00000196420_3 (sequence is synthesized)
tcaccctccaccctttgctgctgacctcggctgctcctctcacagaccctctttggccccctgccctcctctccctcccagatggacccttccatgggaggaaataaagtttccatcgca

SEQ ID NO: 704548 - DNA, 120 bp, Artificial Sequence
  ENSG00000196420_4 (sequence is synthesized)
tcccacacttctgaggttttctttccaggacagcctggtttcccttcttcggcttattgttccatcagatttcagattttgagttctgatttttggtcagaagagtaaagtttctgggat

SEQ ID NO: 704549 - DNA, 120 bp, Artificial Sequence
  ENSG00000196420_5 (sequence is synthesized)
tggggacgtgtgtgctatgggaactcagtgtgtccccagcccttgtttgtaaacaaggaagggacagagatcagggaaataaaggcagaaggcagtgagagggaggctatgcctgctgct

SEQ ID NO: 704550 - DNA, 120 bp, Artificial Sequence
  ENSG00000196421_0 (sequence is synthesized)
cccctctgcagtcctccaggcagcctgtccagggaagcggttggctggtgttggacctggtgcggcagtgcacaccctgcccaaggaccccaggatcatgtgcgtggcctgctggcggga

SEQ ID NO: 704551 - DNA, 120 bp, Artificial Sequence
  ENSG00000196421_1 (sequence is synthesized)
gtgagggagggcaagaccctgaaaggcccatggtaccccctaagcctgcactctgggcgctcctgctggcgctgctggggaccgcgccaagccgcgcctattccccggcctgcagcgtcc

SEQ ID NO: 704552 - DNA, 120 bp, Artificial Sequence
  ENSG00000196421_2 (sequence is synthesized)
ccgacgtgctccgccactatcgcgccatcatcttcgaggatctgcaggccgccgtgaagtggggcggggcgggggccgaaaagaccaggccaggctccagacactttcatttcatacaga

SEQ ID NO: 704553 - DNA, 120 bp, Artificial Sequence
  ENSG00000196421_3 (sequence is synthesized)
aaaacctgactagacccgggagctcgggacggcggggacggcctcgggcctcctgtggcgcccagaaggagcacagtatcctcctgtccatctcgtccctgggtcggaccctgcgcgggg

SEQ ID NO: 704554 - DNA, 120 bp, Artificial Sequence
  ENSG00000196421_4 (sequence is synthesized)
ggtggccgggggccgccgcggggccctggagagagctgcttggaccgtggctgtgcgcaccgaggcggtgatgcggcgccactgcaggacgctgcgccagcggagccggcggcccaagat

SEQ ID NO: 704555 - DNA, 120 bp, Artificial Sequence
  ENSG00000196421_5 (sequence is synthesized)
gcgccctgcccggcgtcgcggcggccgaaggcagctcctgctgcgcgccctggacgccgtcgccacctgctgggagaagctcttcgcgctgcgcgccccggcctccagggactcctagcg

SEQ ID NO: 704556 - DNA, 120 bp, Artificial Sequence
  ENSG00000196421_6 (sequence is synthesized)
cggcccgtcctggccctgcgcggggaggagaaccagcggggccgcggcagagcctggagacgcgcctcgttctgtagacttgttggtgacctcggcccctcgctcgacgcagcccgcgct

SEQ ID NO: 704557 - DNA, 120 bp, Artificial Sequence
  ENSG00000196421_7 (sequence is synthesized)
ccccggagggcccaggacttggagaagggagcgcgcctggccgccgctgggtcacggaggaggcccgccctccacgcgccgaaggcctcaataaacggagctggcgctgcgggtccggca

SEQ ID NO: 704558 - DNA, 120 bp, Artificial Sequence
  ENSG00000196421_8 (sequence is synthesized)
ggagatccctgcctgcacgtggggcggtcctggtagaccagaatgtgggtgtgggtcccccttccctgtggttctggggaccttgaggacatggtcaatcccgggcaagggacctgccac

SEQ ID NO: 704559 - DNA, 120 bp, Artificial Sequence
  ENSG00000196421_9 (sequence is synthesized)
ccctgtatggggtcaggaactgctggttggtctctgctgggcaggcaacctggggtccagctcaaatcgttggaatgtggaagtccttcctctcgccccgtcctgaggagcagctgcagg

SEQ ID NO: 704560 - DNA, 120 bp, Artificial Sequence
  ENSG00000196421_10 (sequence is synthesized)
agcttcatgagtgttttcactggaacttgtggaggagtttcctttgatccctcatggagagacggaagcatgagggagccctcaacatttattctgaagatgaagagagtcctgcagctt

SEQ ID NO: 704561 - DNA, 120 bp, Artificial Sequence
  ENSG00000196421_11 (sequence is synthesized)
tttggagtttgtgaagtcagcccggccctgtacagatgtggaaaccgaggcccaggaagtttgtgagccagcccggccctgtacaggtgtggaaaccgaggcccaggaagtttgtgagcc

SEQ ID NO: 704562 - DNA, 120 bp, Artificial Sequence
  ENSG00000196421_12 (sequence is synthesized)
agcccggccctgtacagatgtggaaaccgaggcccaggaagtttgtgagccagcctggccctgtacagatgtggaaaccgaggcgtaggaaggaagcccttctctgacctcagagctgaa

SEQ ID NO: 704563 - DNA, 120 bp, Artificial Sequence
  ENSG00000196421_13 (sequence is synthesized)
atggccagtgctgggtgggcattgaggggtcacacagaaaagaatgtttcaggccatgttcaggggatacttcctgcagggcccttggaaagttccggagcgcttacattgtccatgtgt

SEQ ID NO: 704564 - DNA, 120 bp, Artificial Sequence
  ENSG00000196421_14 (sequence is synthesized)
gagtgtctcctctttcttgcctgtgtggggttttctcaaatgctttgagttggccaaaccacagttgtgcgccacttaacagtgcggatacattctgagaaaaacctcgttaggtgatgt

SEQ ID NO: 704565 - DNA, 120 bp, Artificial Sequence
  ENSG00000196421_15 (sequence is synthesized)
cgtcttgcaaacattaaagagtgcatttacacaaggctggcaggcacggcctcctgcacccccaggctgtgtgcccgggtgccagagcctggggctcctgggctgcagacctgcacagcc

SEQ ID NO: 704566 - DNA, 120 bp, Artificial Sequence
  ENSG00000196421_16 (sequence is synthesized)
tgtcacagcatttaatcacatccaaacacggaaaaggcaaaaacgtaaagatgcagtgttacaatcctaggggactcctgtcacctgtgtggtctgttcttgactattgtgagtcactga

SEQ ID NO: 704567 - DNA, 120 bp, Artificial Sequence
  ENSG00000196421_17 (sequence is synthesized)
cttttccccctgggaaactaccttaacttgtcttcaactgaaattttttcagcctgcaaagatgagttgtgcctcagaggttgctcgtgttctgaggtgcctcttcaccactgcctgtca

SEQ ID NO: 704568 - DNA, 120 bp, Artificial Sequence
  ENSG00000196421_18 (sequence is synthesized)
ggctgctaaccagagtgccccagaccacagcagaagcgacagcagccaaggatcgggggagcccaccctgctcctgggtatctttacggcaggcagcagagtaacagcctcagacttacc

SEQ ID NO: 704569 - DNA, 120 bp, Artificial Sequence
  ENSG00000196421_19 (sequence is synthesized)
tcttcagccagagacccctcagcccaggaggagtgaggccgggccagcagcgggggcccgggaagccccatgtcttgggacctgctggggcagggccccctggatgtcaggctgcaggtc

SEQ ID NO: 704570 - DNA, 120 bp, Artificial Sequence
  ENSG00000196421_20 (sequence is synthesized)
cggcagctggggaggggatgagggcctcccaccagctctgcccatcagccagatccctgggagaggcagcacttgctggccacagagtcggccccagtctcacctggctcccctccccca

SEQ ID NO: 704571 - DNA, 120 bp, Artificial Sequence
  ENSG00000196421_21 (sequence is synthesized)
ccagctgggccctgcactgccccagcccacgcggcgcctcacccctccttgacagaacagtatctctgggacggacaagttaatccaagacccacagtagccctggatcccctgggagag

SEQ ID NO: 704572 - DNA, 120 bp, Artificial Sequence
  ENSG00000196421_22 (sequence is synthesized)
gagggggcttacttgggtggaggggctgggggtacacacagctcaggagacactgcttgttcccctgagccccaccaggaaatctccggttggctctggtcactgcgtccctgtgggtgg

SEQ ID NO: 704573 - DNA, 120 bp, Artificial Sequence
  ENSG00000196421_23 (sequence is synthesized)
tactaacaggccagttgggactcccagggcagccagtctgccccacctgggtgggacacagcaggtgctggacatccttgcagctccagctggcctgctcaggagtcaggctctggttct

SEQ ID NO: 704574 - DNA, 120 bp, Artificial Sequence
  ENSG00000196421_24 (sequence is synthesized)
cgctatgacctctgacccagagcaggcagagggaatgacgtggcaattctgagcccaccaagttggctgtggcgtgtgtggttgggggggtcaggtttcaggaaggggccacagcaagcc

SEQ ID NO: 704575 - DNA, 120 bp, Artificial Sequence
  ENSG00000196421_25 (sequence is synthesized)
atctgctcttccagccattgctgctttgtgctctgagcaggagctgccaccgcccaccaggcccccagctctatgcaagggttggggtgctgcttgttcaggctcccctgacagggctag

SEQ ID NO: 704576 - DNA, 120 bp, Artificial Sequence
  ENSG00000196421_26 (sequence is synthesized)
gaagccgagtcgagtcctcttatcttggttgggttcgcatgattaatttccagccctagatctgctgtctgactccatcctgggggcccaggggaagggttggggctggccccttttggg

SEQ ID NO: 704577 - DNA, 120 bp, Artificial Sequence
  ENSG00000196421_27 (sequence is synthesized)
tggctgggaacctgggggccgtcagctgtctccttgatgtttgggctttatccctgcgggcgcaggccctccattttgggtcgggggaggcctgtggcacaggctgcccggagggatggc

SEQ ID NO: 704578 - DNA, 120 bp, Artificial Sequence
  ENSG00000196421_28 (sequence is synthesized)
gtggggcggctggtacaggcagaggggccttttgcgactgttggttggggctggatgtggtggctccttcctcctctatagcttctgggtgtccccctagctttccccttccaatagggt

SEQ ID NO: 704579 - DNA, 120 bp, Artificial Sequence
  ENSG00000196421_29 (sequence is synthesized)
gtggcttggagctctgagcccctgccccagttgggttgggggtacaaggagtccccagttcccacgtctctgtgagctaacccagagggcgccagtatgggaggtgtggagttgaatggg

SEQ ID NO: 704580 - DNA, 120 bp, Artificial Sequence
  ENSG00000196421_30 (sequence is synthesized)
catggccatgagtgagacaggctgtactgggacaacttcctactgtacccccaagagcctgcagaccagccccactagagctgtacggggctggtggggggccctgctctgtgcggtcct

SEQ ID NO: 704581 - DNA, 120 bp, Artificial Sequence
  ENSG00000196421_31 (sequence is synthesized)
gagggtgctccaccccttgctggccccactcccacgtggaccacagagccaggctctcctgactctgggcctgccccctctatctcctgatgggttcttcaggactcagtgacatcgcct

SEQ ID NO: 704582 - DNA, 120 bp, Artificial Sequence
  ENSG00000196421_32 (sequence is synthesized)
cccagccgacatcactcacccctttcacatctttgcagggagcatagaactgtctggtttgcagacctatctcttgtgtctcctgatttatcccgccaggcctgtgcctacagcctttct

SEQ ID NO: 704583 - DNA, 120 bp, Artificial Sequence
  ENSG00000196421_33 (sequence is synthesized)
tgattggtgacacgtccatttcattcgctcagagatcccgtggggtggggcagggggtggggcttctacggaaacaaagtgcaggtgggctggctgctccctgtgctgggaacacccccc

SEQ ID NO: 704584 - DNA, 120 bp, Artificial Sequence
  ENSG00000196421_34 (sequence is synthesized)
ctgactagacccgggagctcgggacggcggggacggcctcgggcctcctgtggcgcccagaaggtatggaggaggcgcccctacccaagctcgccggcctgctcctctctcagtttcccc

SEQ ID NO: 704585 - DNA, 120 bp, Artificial Sequence
  ENSG00000196421_35 (sequence is synthesized)
cctcggtggcggggggcggtggagggggaatgcggagacccgcacttcctgtggcacctggacggggcggagccgccgctcccagcctcgggcagcagagggcggacgcgggacgctggg

SEQ ID NO: 704586 - DNA, 120 bp, Artificial Sequence
  ENSG00000196421_36 (sequence is synthesized)
ggctctgtcagcggctcccggctgggcggagggcagagcgggggactcctggggcccctaaaacgtcacgtatccgtcctgctccactttggaccggggccgggggtggaaattgagggg

SEQ ID NO: 704587 - DNA, 120 bp, Artificial Sequence
  ENSG00000196421_37 (sequence is synthesized)
aggggaaggctggacttggtgaattcggagcaaaacaaccggataaaggaaacgggcccgaagggaagcgggagctgcgggccttggctgtgagcttggccaggctatttcctgctgcct

SEQ ID NO: 704588 - DNA, 120 bp, Artificial Sequence
  ENSG00000196421_38 (sequence is synthesized)
ccggaggggtgaccacggcctgggctcagagactgcccagccccctctgcaggactggccaggctggggcccgctttctggcccctggaaccctccatttgctgggggactgtcccctgg

SEQ ID NO: 704589 - DNA, 120 bp, Artificial Sequence
  ENSG00000196421_39 (sequence is synthesized)
ttcccccatctgatgcgcaggtctgggagtctgtcacccccctcccccaatctcggcccatggaggagcaggggaggtaaagtacctgacacctgttaccctccccttcccggaaaggcc

SEQ ID NO: 704590 - DNA, 120 bp, Artificial Sequence
  ENSG00000196421_40 (sequence is synthesized)
gcgagcaggctgtgcctctggcattctgtgggatcaggggcagcagcagaagaaagaagtaacctcccaagctgaccctgacccagccccacactctgtgttaatgtatttagtctgtgc

SEQ ID NO: 704591 - DNA, 120 bp, Artificial Sequence
  ENSG00000196421_41 (sequence is synthesized)
cacggccctaggctgaagtcgggctgggtcgcgtctcccttcccgggccgggccgggcgcgggggccgtgcgcattcgctgaccgccctgtccccgacagcggagccggcggcccaagat

SEQ ID NO: 704592 - DNA, 120 bp, Artificial Sequence
  ENSG00000196421_42 (sequence is synthesized)
cccaaatcacagccagcaatgtaagagctggcctcagacccaggcccagggcatgggatctgccacatgtcccctgcctggaggctgggggccaagcttcctggacttcagagccttgga

SEQ ID NO: 704593 - DNA, 120 bp, Artificial Sequence
  ENSG00000196422_0 (sequence is synthesized)
cctccggcccgcccccggcccgccgcctcccccgggacgtgggacgcgggcgcaggcggggtccgcgcggcgggcggcgggggacgggcggagtcaaaagtctattgaaaaagcagagag

SEQ ID NO: 704594 - DNA, 120 bp, Artificial Sequence
  ENSG00000196422_1 (sequence is synthesized)
gtcaaaagtctattgaaaaagcagagagagaatgcctcggtgtgtaagtggagtgatgaggacctgatctctgggccgtgtgggaacactggctgccatttcatcacagtcaacctggac

SEQ ID NO: 704595 - DNA, 120 bp, Artificial Sequence
  ENSG00000196422_2 (sequence is synthesized)
tcacagaatttcaagagcttgtcggttgggtcaagaatgaacctacgcatgacggcgtgctgatcctgggtttctagtcatcctttttaagctgcaaagaagcatttgcagacgttgtct

SEQ ID NO: 704596 - DNA, 120 bp, Artificial Sequence
  ENSG00000196422_3 (sequence is synthesized)
catgggtaccgcttgccaactttggaggatgtgaagccggtagagaaataaagcatcgcccctctgcgcgcccctccccgtctgctagaatgtttctcatgaacgcttctccagtggttg

SEQ ID NO: 704597 - DNA, 120 bp, Artificial Sequence
  ENSG00000196422_4 (sequence is synthesized)
ctctccagtccaaatgggaggcctttggcccgccagggagctgtaggttccccaggtgcttctcggaggctgacgagggcgtggagagcgcgtcggtgagcgcccgggtgcagatgctta

SEQ ID NO: 704598 - DNA, 120 bp, Artificial Sequence
  ENSG00000196422_5 (sequence is synthesized)
tcagcactctgcagcgcgacggggctgctcggggcaccagcgatgagcgcgccgcacagaggggccacagggcagagggatgccacgacgccaggccggctgccaagcccaccgtgcaca

SEQ ID NO: 704599 - DNA, 120 bp, Artificial Sequence
  ENSG00000196422_6 (sequence is synthesized)
aggagccacccgcgttggctgtctgtggtctcgttgctgactttgaccccatgggggaggaggaaactacagactttggcccgttggtgctagattcagacagtgatgattccgtggaca

SEQ ID NO: 704600 - DNA, 120 bp, Artificial Sequence
  ENSG00000196422_7 (sequence is synthesized)
gggacattgaggaggccatccaggagtacctgaaggcaaagagtggagccgcacagcccggggccggcggggcccagccaggtgcagcccagccttccagggccgcaggcggaggcagta

SEQ ID NO: 704601 - DNA, 120 bp, Artificial Sequence
  ENSG00000196422_8 (sequence is synthesized)
gatgtaagccggaaccggctcacggcagtgccccgactgccctgtgtcccccaaaacttgtacctggatcaggtggtggccccggcagccaggtgggatccagcaaggaccagggctccg

SEQ ID NO: 704602 - DNA, 120 bp, Artificial Sequence
  ENSG00000196422_9 (sequence is synthesized)
cctccccggtcagtgtgagcagcgatgactccttcgagcagagcatcagggcggaaatagaacagtttctgaatgagaagagacagcatgagacccaaaaatgtgatgggtcagtggaga

SEQ ID NO: 704603 - DNA, 120 bp, Artificial Sequence
  ENSG00000196422_10 (sequence is synthesized)
agaaaccagacacaaatgaaaattccgccaagtcactcttgaaatcccaccaagagccgcctacaaaggtggtgcatcggcagggcctgctgggcgtccagaaggagtttgccttccgca

SEQ ID NO: 704604 - DNA, 120 bp, Artificial Sequence
  ENSG00000196422_11 (sequence is synthesized)
aacctccccggttagcgaagatgaacgtccagcccagaagcctcaggtccaaggtcacaaccacgcaggagaacgagggcagcacgaagccggcaaccccctgccgcccttcagaagcag

SEQ ID NO: 704605 - DNA, 120 bp, Artificial Sequence
  ENSG00000196422_12 (sequence is synthesized)
cacagaataaaggtgggatcaaaaggagcgccagcgctgcaaggaggggaaagcgagtcatgagtgcggcacaggcgtccgaggcgtccgactccagcagcgacgatggcattgaggagg

SEQ ID NO: 704606 - DNA, 120 bp, Artificial Sequence
  ENSG00000196422_13 (sequence is synthesized)
ccatccagctgtaccagctgcagaaaacacgcaaggaggccgacggggacctgccccagagggtccaactccgagaggagagagcgcctgaccctcccgcacacagcacaagcagtgcca

SEQ ID NO: 704607 - DNA, 120 bp, Artificial Sequence
  ENSG00000196422_14 (sequence is synthesized)
caaaaagtgccttgcccgagacccacaggaaaacacccagcaagaagaagctagtggccaccaagaccatggaccctggtccagggggcctggacactgaccatgcccccaagctcctga

SEQ ID NO: 704608 - DNA, 120 bp, Artificial Sequence
  ENSG00000196422_15 (sequence is synthesized)
aggaaaccaaagctccacctccagcgagccctgcttccaggagtgagtttgtggaacggtcctcgtgccgggcggacacatctgctgagctgatgtgtgcagaagcaatcctggacatct

SEQ ID NO: 704609 - DNA, 120 bp, Artificial Sequence
  ENSG00000196422_16 (sequence is synthesized)
ccaagacgatcctgccggcccctgtagagggcagtgacgggtccctgtccgcaagcccactcttctactccccgaacgtgccttcccgctctgacggcgacagtagctccgtggacagcg

SEQ ID NO: 704610 - DNA, 120 bp, Artificial Sequence
  ENSG00000196422_17 (sequence is synthesized)
atgacagcatcgagcaggaaatccggacatttttggccctaaaggcgcagtcagggagtttgctggccagaggtgagagctgcccgcaggctgcccagggtccacttttgccgcctggcc

SEQ ID NO: 704611 - DNA, 120 bp, Artificial Sequence
  ENSG00000196422_18 (sequence is synthesized)
tcaacagccagaccggcggccacaagacccctctctctaaaacaccagacccactgctgggctgcaaaaggaagcgtagaggtggtggccatgtgaggccatccacgcccaagaaaatgc

SEQ ID NO: 704612 - DNA, 120 bp, Artificial Sequence
  ENSG00000196422_19 (sequence is synthesized)
cgaccacagccaggggagagctgagcccggccatgagaggcgagacctgcccatccagggcaaagccagtgaggccctgggaggggagggcaccgccaggggccctggcgacactcgcat

SEQ ID NO: 704613 - DNA, 120 bp, Artificial Sequence
  ENSG00000196422_20 (sequence is synthesized)
gtcacagggccagggtaagacagacgaggcaaggcgcctagacgagaaagagagctctgaagacaaaagcagctccctggacagtgacgaggacctggacacagccatcaaggacttgtt

SEQ ID NO: 704614 - DNA, 120 bp, Artificial Sequence
  ENSG00000196422_21 (sequence is synthesized)
aaggtccaagcgaaagctcaagaagaggtgcagggagcccagggctgcgtgcaggaagaaggtcaggttcagcacagcccagacgcacttcttggagcagctgggcgggctccggagaga

SEQ ID NO: 704615 - DNA, 120 bp, Artificial Sequence
  ENSG00000196422_22 (sequence is synthesized)
ctggaaagacaggggcccgccagtgctgaagagctgcctctccaagtccaagagagacagtggcgagggtcctgggaagaaaccccccagtgtctttggcagcacggcagagaggatgag

SEQ ID NO: 704616 - DNA, 120 bp, Artificial Sequence
  ENSG00000196422_23 (sequence is synthesized)
gcaggagggtgccgcgagccaggacgcggccctggccttccgggtgaggagacccgcctccgcctctgcctccgaagggaatccattccccagggagtcccagggcccagctcccagccc

SEQ ID NO: 704617 - DNA, 120 bp, Artificial Sequence
  ENSG00000196422_24 (sequence is synthesized)
cggctccctgtctgatgacagcagttcagtggacagcaacgacagcatcgaactggagattaggaagtttttggcggaaaaggccaaggagtcagtgagcagttcagaagttcaggcaga

SEQ ID NO: 704618 - DNA, 120 bp, Artificial Sequence
  ENSG00000196422_25 (sequence is synthesized)
gggccccaccgctcttgggacagggggcccagccaggccagaggtgctgtgcaggaaggagcctgccccaccgcctggcgtgtgcacacgcagccagagggccaggggggtcccacatct

SEQ ID NO: 704619 - DNA, 120 bp, Artificial Sequence
  ENSG00000196422_26 (sequence is synthesized)
ggccgaagggcttcgaggcacagagagcgcaggagcacagggcacagctggtctgttcagccagggcgggaaggggctccctgctgctcctgcccgaggggatccggtgccgcccaggag

SEQ ID NO: 704620 - DNA, 120 bp, Artificial Sequence
  ENSG00000196422_27 (sequence is synthesized)
caccagcggcggtgtctccgccaaggggctctcagtgagcaggagaaatgtttacgttcacaaagaccagagcccacgaggggctgagcctgctgccaaaagtgcttttggtcagctgcc

SEQ ID NO: 704621 - DNA, 120 bp, Artificial Sequence
  ENSG00000196422_28 (sequence is synthesized)
cagctgtgccacagcgggcaccgaggcaggaggcgccagaggaacctttcacatgggctgcgggagcccgagcttcctgacccccagcccgggagcggagagggacgctggagcccaggc

SEQ ID NO: 704622 - DNA, 120 bp, Artificial Sequence
  ENSG00000196422_29 (sequence is synthesized)
cgaccgcacaccgccctggagcgacttcgcccaccagagtcggctgcccagcccgtgggtgctgcgctccgaaggcagagatgcagtgtggagggggggcgtcgggagcgagagagacaa

SEQ ID NO: 704623 - DNA, 120 bp, Artificial Sequence
  ENSG00000196422_30 (sequence is synthesized)
ggggtccgagggccccgcccggggcctgcccagcctgccccttgcgggcttctcgccgctgctgtccacccagctcttccactttggaaagggtgtctcctgggggggcaggcaggctgg

SEQ ID NO: 704624 - DNA, 120 bp, Artificial Sequence
  ENSG00000196422_31 (sequence is synthesized)
cctcttcagcccccacctggggctgcctctgcagggcccctccttctcggccttcagggaggcccaggccggacccagccctgtctttggaagcccacacttgctggcaaagaaggacgg

SEQ ID NO: 704625 - DNA, 120 bp, Artificial Sequence
  ENSG00000196422_32 (sequence is synthesized)
cggcccctggccaaccaggaaggcacaggcagggctgagtttgcatgacaggaggagctcgggctcggaggaaagcattttagacctgaggtatcgacgaagggtcaacagggatgacca

SEQ ID NO: 704626 - DNA, 120 bp, Artificial Sequence
  ENSG00000196422_33 (sequence is synthesized)
ggagcaggacgccttgggcagtgacgccagtgacttcagcgacacctccacggaggacagtggcggcagctcagtagtgaaggtctaagccctcgagctgtgggttcgcgtcctgggttg

SEQ ID NO: 704627 - DNA, 120 bp, Artificial Sequence
  ENSG00000196422_34 (sequence is synthesized)
cgtgcattcgtggaaagcggcgtagccgtgcgtgtgtgtgatggttccgtggctgcaaggaagggaaacagtctattatacatagccctgtatatatgtacaccaacatgaaacttttat

SEQ ID NO: 704628 - DNA, 120 bp, Artificial Sequence
  ENSG00000196422_35 (sequence is synthesized)
ttaacagacgtgtcctggtaaatatgatttttgtagctttttgtaaattatttaaagtgatgtaaaagatatttttggaaaatactgttgttcaattttgtagggtgttcctaactgcag

SEQ ID NO: 704629 - DNA, 120 bp, Artificial Sequence
  ENSG00000196422_36 (sequence is synthesized)
ttttctgtgttctgcatacaagtcttagcttaggaaacatttggttcttaccatcacagccaggttcacagaggctctgatgctttttggttgattgctggtgagaatggccggcggtgg

SEQ ID NO: 704630 - DNA, 120 bp, Artificial Sequence
  ENSG00000196422_37 (sequence is synthesized)
ctgcagtggtagcctgaggaaggccaagctgccctccctgggaatcactcagatgccccaagatgtccgttgggaagctcccaggacagcactttttatacagaggacaccgcctcggcc

SEQ ID NO: 704631 - DNA, 120 bp, Artificial Sequence
  ENSG00000196422_38 (sequence is synthesized)
ccacgtccttagaggccagagcacatctgaaaactgcaatcacagccgtccgctggaaaaacgtttcgaagcacagtggccagcgagcgagcacgtggctactccctgttgcatgtcaaa

SEQ ID NO: 704632 - DNA, 120 bp, Artificial Sequence
  ENSG00000196422_39 (sequence is synthesized)
tccacacagatgtcagcggcagctgctcggcagcccagccctgggcctgggtgggttcatgtccaatcttgttcgatcactagatgattctaacatcgaaataaacctctttttatatgg

SEQ ID NO: 704633 - DNA, 120 bp, Artificial Sequence
  ENSG00000196422_40 (sequence is synthesized)
ctggttaaccggagaaagctcctggtaaagaagaatccataacagaggcaaaacatactggccagttttcgcccactgctgaggtcctgagggcagccacagcctctgagccaaggggag

SEQ ID NO: 704634 - DNA, 120 bp, Artificial Sequence
  ENSG00000196427_0 (sequence is synthesized)
attgcaactgcagaccgttacctggtacgctggctgctacctccctcactcttgtcagagtcggagctacaggcagtgccttcagctctgagctcaggcatcccggtccctgtttttgcg

SEQ ID NO: 704635 - DNA, 120 bp, Artificial Sequence
  ENSG00000196427_1 (sequence is synthesized)
tgagctcaggcatcccggtccctgtttttgcggttaaggactctaaagtgttgtgtcgtgttcatcaactttttctcaacttccctggctctacctcttctgccacaaacgtcagcatgg

SEQ ID NO: 704636 - DNA, 120 bp, Artificial Sequence
  ENSG00000196427_2 (sequence is synthesized)
gcagagatgaacatcctagaaatcaaccaggaattgcgctcgcagctggcagagagcaatcagcagttccgagacctcaaagagaaattccttataactcaagctactgcctactccctg

SEQ ID NO: 704637 - DNA, 120 bp, Artificial Sequence
  ENSG00000196427_3 (sequence is synthesized)
gccaaccagctgaagaaatacaagtgtgaagagtacaaagacatcatagactctgtgctgagggatgaactgcagtccatggagaagctggcagagaagctcaggcaagctgaggagctc

SEQ ID NO: 704638 - DNA, 120 bp, Artificial Sequence
  ENSG00000196427_4 (sequence is synthesized)
ggagaagctggcagagaagctcaggcaagctgaggagctcaggcagtataaagccctggttcactctcaggcaaaagagctgacccagttacgggagaagttacgggaagggagagatgc

SEQ ID NO: 704639 - DNA, 120 bp, Artificial Sequence
  ENSG00000196427_5 (sequence is synthesized)
cctgatgaccctgacaagtcccagggtcaggacctccgagagcagctggctgaggggcacaggctggcagagcaccttgttcacaagctgagcccagaaaatgatgaagatgaagatgag

SEQ ID NO: 704640 - DNA, 120 bp, Artificial Sequence
  ENSG00000196427_6 (sequence is synthesized)
gatgaagacgacaaagacgaggaggttgagaaagtacaggaatcacctgcccccagagaggtgcagaagactgaagaaaaggaagtccctcaggactcactggaggaatgtgctgtcact

SEQ ID NO: 704641 - DNA, 120 bp, Artificial Sequence
  ENSG00000196427_7 (sequence is synthesized)
tgttcaaatagtcacaacccttctaactccaaccagcctcacaggagcaccaaaatcacatttaaggaacacgaagtcgactctgctctggttgtagagagtgaacaccctcatgatgaa

SEQ ID NO: 704642 - DNA, 120 bp, Artificial Sequence
  ENSG00000196427_8 (sequence is synthesized)
gaggaggaagctctaaacattcccccagaaaatcaaaatgaccatgaggaggaggaggggaaagcgccagtgccccccagacaccatgacaagtccaactcttaccggcatcgtgaagtc

SEQ ID NO: 704643 - DNA, 120 bp, Artificial Sequence
  ENSG00000196427_9 (sequence is synthesized)
tctttcttggcattggatgaacagaaagtttgctccgctcaggatgttgccagggattactccaatcccaaatgggatgaaacctcacttggcttcctcgaaaagcaaagtgatcttgaa

SEQ ID NO: 704644 - DNA, 120 bp, Artificial Sequence; identical to SEQ ID NO: 675354
  ENSG00000196427_10 (sequence is synthesized)

SEQ ID NO: 704645 - DNA, 120 bp, Artificial Sequence; identical to SEQ ID NO: 675355
  ENSG00000196427_11 (sequence is synthesized)

SEQ ID NO: 704646 - DNA, 120 bp, Artificial Sequence; identical to SEQ ID NO: 675356
  ENSG00000196427_12 (sequence is synthesized)

SEQ ID NO: 704647 - DNA, 120 bp, Artificial Sequence
  ENSG00000196427_13 (sequence is synthesized)
gtccccaagggacttggagtggagacttgagccaccaccagtcagaggtgcaagtttcacaggcacagctggaaccaagcaccctggtgcccagttgtctgcgactacagctggatcaag

SEQ ID NO: 704648 - DNA, 120 bp, Artificial Sequence; identical to SEQ ID NO: 675358
  ENSG00000196427_14 (sequence is synthesized)

SEQ ID NO: 704649 - DNA, 120 bp, Artificial Sequence; identical to SEQ ID NO: 675359
  ENSG00000196427_15 (sequence is synthesized)

SEQ ID NO: 704650 - DNA, 120 bp, Artificial Sequence
  ENSG00000196427_16 (sequence is synthesized)
tcagaagaagactcccgttcagcaagtggagactggcattcagattcgctggcccgcatgctgagagcgcagagataccaaatactgctggaaggacgcaaaggatggcaggatgaaaga

SEQ ID NO: 704651 - DNA, 120 bp, Artificial Sequence; identical to SEQ ID NO: 675361
  ENSG00000196427_17 (sequence is synthesized)

SEQ ID NO: 704652 - DNA, 120 bp, Artificial Sequence
  ENSG00000196427_18 (sequence is synthesized)
tcttgatgacttcaagccactatgctcctttgatttgagaagccacattccatccccctccaattgtgatcaatacctagggagaccaatgcccagatggacaaatagcattgaccggcg

SEQ ID NO: 704653 - DNA, 120 bp, Artificial Sequence
  ENSG00000196427_19 (sequence is synthesized)
ttagccctgtttctcaattcccatcgtgtagagaacaggagtccgcagctgctggcaggagacagcatgtcagccgggactctgccagggcagagtatgagcaatgccatgttcttgctg

SEQ ID NO: 704654 - DNA, 120 bp, Artificial Sequence
  ENSG00000196428_0 (sequence is synthesized)
cccagcatccctggcgcggccatttcagccccatcttggcccagcggagggagctgcagccgccgcttcagcagtttgaatttcagtttcttcggggtttaggaattgggcgcaccgagg

SEQ ID NO: 704655 - DNA, 120 bp, Artificial Sequence
  ENSG00000196428_1 (sequence is synthesized)
aggagccggagaagccaccaccgctacctcacacagccggggcgcctccggtcccgtgccagcggtctgccgccgccgcccctctctgagagaagccgcgaggggaggccgagaccgccg

SEQ ID NO: 704656 - DNA, 120 bp, Artificial Sequence
  ENSG00000196428_2 (sequence is synthesized)
tcgccgcccgcccgcaggggtggttccccctgtaaggggaggaccgagccggctttcccctcccccagagcgggtttccgcctgaggcagtcgacatgtccctggggctgagctccggct

SEQ ID NO: 704657 - DNA, 120 bp, Artificial Sequence
  ENSG00000196428_3 (sequence is synthesized)
agagccggggagggagggccgcctgcccgcgccacagccccaccgcccgcccgcggaccttcagccagctccggcccgcggctcccggctgaattaggcatctccgactccggactcgcc

SEQ ID NO: 704658 - DNA, 120 bp, Artificial Sequence
  ENSG00000196428_4 (sequence is synthesized)
gctccttccctcagtcagagagcccagcgctgacgccggcaccggcctgaggagcccgagcggggcagcaccgcccctcacgccgccgccaccgcctcctcctcctcctcttcgccctcc

SEQ ID NO: 704659 - DNA, 120 bp, Artificial Sequence
  ENSG00000196428_5 (sequence is synthesized)
cactcccacccccagccaaggcctgctgaccgcgccgagcgccgagctggactgaccacggctgcccggagacgagagaggaagcagccggcccgcccctgggttcgcgctctcgccgcc

SEQ ID NO: 704660 - DNA, 120 bp, Artificial Sequence
  ENSG00000196428_6 (sequence is synthesized)
tctgagggaattgaattgaggcgccgcggctgcgagagctaaaaaggaaggaggagccgccgcgggactgagacgggggcagagccgaagagaccgacacagagaaggaaacgaggagga

SEQ ID NO: 704661 - DNA, 120 bp, Artificial Sequence
  ENSG00000196428_7 (sequence is synthesized)
ggatgtctcaccgggcggccagcgcctggatcagcccgtgactcttaacagcggcgggcctcagaccccagcgcagactcggactttgtctttgggggcccgtgctctgccctccccggt

SEQ ID NO: 704662 - DNA, 120 bp, Artificial Sequence
  ENSG00000196428_8 (sequence is synthesized)
ttccgacaggacccagaggagccggcgtgcctctctgccctccagccttcttcaccatgtccaagatgccggccaagaagaagagctgcttccagatcaccagtgtcaccacggcccagg

SEQ ID NO: 704663 - DNA, 120 bp, Artificial Sequence
  ENSG00000196428_9 (sequence is synthesized)
tggccactagcatcaccgaggacaccgagagcttggacgacccggacgagtcacgcacagaggacgtctcctccgagattttcgacgtctctcgggccacggattatggccctgaggagg

SEQ ID NO: 704664 - DNA, 120 bp, Artificial Sequence
  ENSG00000196428_10 (sequence is synthesized)
tctgcgagcgcagctcttccgaagagacgcttaacaatgttggggatgcggagactcccgggaccgtctccccaaacctcctcctagatgggcagctggcagcggcggctgctgctcccg

SEQ ID NO: 704665 - DNA, 120 bp, Artificial Sequence
  ENSG00000196428_11 (sequence is synthesized)
cggaggaggagtcgtttcggcccggagcgtgtctggggcgctcgccagtaccctggcggcggctgccacttcggcccccgcccccggagcacccggcggcccccagctcgcgggctcatc

SEQ ID NO: 704666 - DNA, 120 bp, Artificial Sequence
  ENSG00000196428_12 (sequence is synthesized)
catccgccgggccagtgactgcagccccatctcagcctcccaccacatgtagttcccgttttcgcgtgatcaagctggaccacgggagcggagagccctatagacgcggccgatggacgt

SEQ ID NO: 704667 - DNA, 120 bp, Artificial Sequence
  ENSG00000196428_13 (sequence is synthesized)
gtatggaatactatgagagggattcagacagcagcgtcctgactagatccggggattgcattagacacagcagtacttttgaccagactgcggagcgggacagcggcctgggcgccaccg

SEQ ID NO: 704668 - DNA, 120 bp, Artificial Sequence
  ENSG00000196428_14 (sequence is synthesized)
gagggtcggtggtggtagtagtggcctccatgcagggggcgcacgggcccgagtcgggaactgacagctccttgactgctgtgtcacagctacccccgtcggagaaaatgagccagccca

SEQ ID NO: 704669 - DNA, 120 bp, Artificial Sequence
  ENSG00000196428_15 (sequence is synthesized)
ctccggcccagccgcagagttttagcgttgggcagccacagccgccgccgccacccgtaggtggggctgtggctcaaagctcggctccgctgccgccgttcccgggagccgcgaccgggc

SEQ ID NO: 704670 - DNA, 120 bp, Artificial Sequence
  ENSG00000196428_16 (sequence is synthesized)
cgcagccaatgatggcagccgcgcagcccagccagccccagggagcggggcccgggggacagactctgccgccgacgaatgtaaccctggcgcagccggctatgtccctgcctccgcagc

SEQ ID NO: 704671 - DNA, 120 bp, Artificial Sequence
  ENSG00000196428_17 (sequence is synthesized)
cgggccctgcagtgggcgcccccgcggcgcagcagccccagcagttcgcgtatcctcagcctcagataccgcccggacatttgctgcccgtccagccctccggccagagtgagtacctgc

SEQ ID NO: 704672 - DNA, 120 bp, Artificial Sequence
  ENSG00000196428_18 (sequence is synthesized)
cagagtgagtacctgcagcagcacgtggccggcctgcagccgccaagccccgcgcagccctcgtccaccggcgccgcagcgagccccgccacggcggccacccttcccgtgggcaccggc

SEQ ID NO: 704673 - DNA, 120 bp, Artificial Sequence
  ENSG00000196428_19 (sequence is synthesized)
tgggcgcgcagctcatgggcgcgtcttcccagcccagcgaagccatggccccccggacgggaccagcgcaaggcgggcaggtcgcgccttgtcagccgactggagtgcccccggctactg

SEQ ID NO: 704674 - DNA, 120 bp, Artificial Sequence
  ENSG00000196428_20 (sequence is synthesized)
tgggaggcgtggtgcagccgtgcctcggtcctgccggggctgggcagccccagtccgtgcctccgccgcagatgggtggcagtggtccgctgtcagccgtacctggtggccctcacgccg

SEQ ID NO: 704675 - DNA, 120 bp, Artificial Sequence
  ENSG00000196428_21 (sequence is synthesized)
tggtgcccggagttccaaacgtgcctgcagccgtgcccgctccaagcgtgcctagtgtgtctaccacttctgttactatgccaaatgtacccgcgcctctggcccagtcgcaacagctga

SEQ ID NO: 704676 - DNA, 120 bp, Artificial Sequence
  ENSG00000196428_22 (sequence is synthesized)
gcagccatacgccagtcagcaggagcagcagcataatccagcatgttgggctgcccttagcgccaggcacacacagcgcaccaacaagtctaccacagtctgacctaagccagtttcaaa

SEQ ID NO: 704677 - DNA, 120 bp, Artificial Sequence
  ENSG00000196428_23 (sequence is synthesized)
ctcagacccagcctttagtcgggcaagtcgacgatactagaagaaaatcagaacccctacctcaaccaccactttctctcattgctgaaaataagcctgttgtgaagccgcctgttgcag

SEQ ID NO: 704678 - DNA, 120 bp, Artificial Sequence
  ENSG00000196428_24 (sequence is synthesized)
attccctggcaaacccccttcagttaacacctatgaacagtctggccacctctgtattcagcatagctattcctgttgatggtgatgaagacaggaatccttcaactgctttctaccaag

SEQ ID NO: 704679 - DNA, 120 bp, Artificial Sequence
  ENSG00000196428_25 (sequence is synthesized)
cgttccatttgaacacgttaaaggaatcaaagagcctctgggatagtgcatctgggggaggtgttgtagccattgacaacaaaatagaacaagcaatggatctggtgaaaagccatttga

SEQ ID NO: 704680 - DNA, 120 bp, Artificial Sequence
  ENSG00000196428_26 (sequence is synthesized)
tgtatgcagtaagagaagaagtggaagttttaaaggaacaaataaaagaattagttgaaagaaactctttacttgaacgagaaaatgcactgttaaaatctctttcaagcaatgatcaat

SEQ ID NO: 704681 - DNA, 120 bp, Artificial Sequence
  ENSG00000196428_27 (sequence is synthesized)
tatcccaactcccaacccaacaggccaatcctggtagcacttctcaacagcaagcagtgatagcacagcctccgcagccaacgcaacctccacagcagccgaatgtctcctcagcataaa

SEQ ID NO: 704682 - DNA, 120 bp, Artificial Sequence
  ENSG00000196428_28 (sequence is synthesized)
gctttcttaagcctcattaagaaaaaaactgaaagcaatctatccttgtgtgccactggtgttctttccactttatacgaaagcaagtagccatgctttggttgtgtgtttggccttttc

SEQ ID NO: 704683 - DNA, 120 bp, Artificial Sequence
  ENSG00000196428_29 (sequence is synthesized)
agtattagacaatcattctacaagagcttttcctctctctgagatgtcatgcagcgctgttgatgtccagttctatgtcatcagtacacaaggagaataatagatggggtttattaaagc

SEQ ID NO: 704684 - DNA, 120 bp, Artificial Sequence
  ENSG00000196428_30 (sequence is synthesized)
gagcaaagtctgcattttacctggtgcgcatgagtggggtctttaagagttttggtggctctcccatgtttcctattacccatggatttaccctgagccttcctatcacattataaataa

SEQ ID NO: 704685 - DNA, 120 bp, Artificial Sequence
  ENSG00000196428_31 (sequence is synthesized)
cagttcatctaaagagccacttttctttctgattcagtaacatttgcctacataagttttcatttatttgtgttttatttattacagggctgctattttcataatgtacatgaacaatgt

SEQ ID NO: 704686 - DNA, 120 bp, Artificial Sequence
  ENSG00000196428_32 (sequence is synthesized)
cacagaacttttttaatttttttgaataattataagtatcagtaaaggaagtgaaagacaggattgcatttaatagataaaacgtttaggcaataattgaacaaaagaatcctggcatat

SEQ ID NO: 704687 - DNA, 120 bp, Artificial Sequence
  ENSG00000196428_33 (sequence is synthesized)
ttctaacactaatggcaatttacttatggtatttattttcagtagtaaagacccagcttgaatgtaaattttgtatagtgtaagtatgaagaacatagtgcaactgtacaggtagtcacc

SEQ ID NO: 704688 - DNA, 120 bp, Artificial Sequence
  ENSG00000196428_34 (sequence is synthesized)
agttattgtgatatgataaataattgggctattttgatgaagaaaactttgttcatttgtttctactttctaagagaaattgccacgattcctctgcttttcaacatttcgtatgacttt

SEQ ID NO: 704689 - DNA, 120 bp, Artificial Sequence
  ENSG00000196428_35 (sequence is synthesized)
catttcgtatgacttttttttcgggtgggaataaaaagctgtgaaattgttcaacctactttgtaaccaaagaagcaaagctgtgtaatggagtttggtttttttttgttgttttttttt

SEQ ID NO: 704690 - DNA, 120 bp, Artificial Sequence
  ENSG00000196428_36 (sequence is synthesized)
ttttataatgcacattctttatgtatttttatttagtgttttctcagtcacaattttctttactgtctagcatgatctgcatgacctataatctttgaaccactttcgtacctcatgttt

SEQ ID NO: 704691 - DNA, 120 bp, Artificial Sequence
  ENSG00000196428_37 (sequence is synthesized)
ttatccagcactcttattgtaatatgtactagtctgtgaacaatgtcaaataaaagagaacgaacaggtagtttggtggagctgagctagtgtacaatacactagttgtaaaaaaaaaaa

SEQ ID NO: 704692 - DNA, 120 bp, Artificial Sequence
  ENSG00000196428_38 (sequence is synthesized)
aaaaaaaaagtgagccatcttttgttcatttaaaatggtgttttgaatttcgtatgcagaaaacgttttgttacattgcagattttaatgtatttaataaatgcaacatgcagattaagt

SEQ ID NO: 704693 - DNA, 120 bp, Artificial Sequence
  ENSG00000196428_39 (sequence is synthesized)
gcagtgtatactgagtatttaaattaaaatgtacatttcataaatacagtttcaaaagaaagcatcattttgtgtatactaacacattaagtgtatgtcagaaattgatgtataaatata

SEQ ID NO: 704694 - DNA, 120 bp, Artificial Sequence
  ENSG00000196428_40 (sequence is synthesized)
tattttaacattttctgaaattaaactgcagttttgttgaaatatttggctctatatgtgttcaaaatttgactagatttgtattttcacagttcaaaatactccttaaagacctgttaa

SEQ ID NO: 704695 - DNA, 120 bp, Artificial Sequence
  ENSG00000196428_41 (sequence is synthesized)
taatgacttactgatagttcttaaattttcaaagtaaaacaatttaaagaatgcaaaaatagtgagcaatatttgtactcaatattcatattatgttagtgatacttaagtaggaaatcc

SEQ ID NO: 704696 - DNA, 120 bp, Artificial Sequence
  ENSG00000196428_42 (sequence is synthesized)
ttgtctaccaaaacttttacttgaattcagaaaggtgcctgtagaaattaacatgcactgcatctgtagccagctagctaatcagagttaatgagaaccagtagttagttctccgtgtta

SEQ ID NO: 704697 - DNA, 120 bp, Artificial Sequence
  ENSG00000196428_43 (sequence is synthesized)
aaagacttatttgaagtaaaaatttaatcagattagccacaaacaaacaaggcataaaattgggatgtacatgagattgccaaatattttctattctagttgtgctgcaagacattgaac

SEQ ID NO: 704698 - DNA, 120 bp, Artificial Sequence
  ENSG00000196428_44 (sequence is synthesized)
aaaatgttaatgaataacattataaatcaaggaactaagtacataggcttgagtaagcaaccctaaggatgtgtagtaagattccaagtagagctgctacaggtgagatacttaatggaa

SEQ ID NO: 704699 - DNA, 120 bp, Artificial Sequence
  ENSG00000196428_45 (sequence is synthesized)
tgtgaaacttcactgttggactgttaaccgaaaaggtttgctggctgtgcccctccagtgctaactgtgacatgtgatatttaatacaggtggagaaaaactagtcttagaaatgggatt

SEQ ID NO: 704700 - DNA, 120 bp, Artificial Sequence
  ENSG00000196428_46 (sequence is synthesized)
tacttttatattaagaaaaacagtagaaaaggagagaaaatatgggtagttcacagaagagataaatggcagtttctaaaggttcaacctctagtaacctaagaaatgcaaattaatgtt

SEQ ID NO: 704701 - DNA, 120 bp, Artificial Sequence
  ENSG00000196428_47 (sequence is synthesized)
tttggcgaattgtaataagtgtcctaagtagcaggacttaacatagaaagaaagacaggctttcctgtgtacttttagaaagtaatttggcagtatgtatctagagccttaaataataag

SEQ ID NO: 704702 - DNA, 120 bp, Artificial Sequence
  ENSG00000196428_48 (sequence is synthesized)
ctttccagtgtaacgacaggagaagatactcaactcatggtccattgttcaaaaatgcagaattattgtggtgtctgccctctgctttcccatcatcccctcccctcaaaatccaaacta

SEQ ID NO: 704703 - DNA, 120 bp, Artificial Sequence
  ENSG00000196428_49 (sequence is synthesized)
tccctactgtcaacccttcccccagctgattgtttaggatcttaagtaacttccaattcagctttggagatttagtctcctgctccaaatagttgtaaatattaactgattgagatccca

SEQ ID NO: 704704 - DNA, 120 bp, Artificial Sequence
  ENSG00000196428_50 (sequence is synthesized)
atttggaggcacagtcttacaggaatgccatctatctaattctgtcagtgtaatgcccatagagcaaggtcccacataagcttttctgttttaatttagccggtaaatcataagtagaaa

SEQ ID NO: 704705 - DNA, 120 bp, Artificial Sequence
  ENSG00000196428_51 (sequence is synthesized)
tttttctgatacggtaattgtctacaattcaaacctaactttccccaaataaaatttagtttgttccgatgtgatctcacagcttgccacaccaaaaacaaatagtaggggttaggaggc

SEQ ID NO: 704706 - DNA, 120 bp, Artificial Sequence
  ENSG00000196428_52 (sequence is synthesized)
attaaataaacagtttccttaactcctgattgtccaaaatagctgaatttttccaattctatttataatatcctatgctaattagaagtattgagataacgttttataatcaagcctcca

SEQ ID NO: 704707 - DNA, 120 bp, Artificial Sequence
  ENSG00000196428_53 (sequence is synthesized)
gtgactggggatcacagctgccattattcacaagaattttcacaggtgaatgattatatttctccaagttgcaaactccagtaattcatggacctttttttaaaaaaaaaaaaagtctta

SEQ ID NO: 704708 - DNA, 120 bp, Artificial Sequence
  ENSG00000196428_54 (sequence is synthesized)
atagaaccagaatatctctgttcttgaaaatttatctttgcagaaccagaaatagctaattgtctggaaacaatttttaagatttgaagtcacatttttaaaagaagctttatggctcag

SEQ ID NO: 704709 - DNA, 120 bp, Artificial Sequence
  ENSG00000196428_55 (sequence is synthesized)
tggcaagcactttgtgacatttctttaataatcctatgaaaaggacaaaacccagccctcaaaattgacaatttgaggacataataagccaactgataatgcagtgaggaatacttgtta

SEQ ID NO: 704710 - DNA, 120 bp, Artificial Sequence
  ENSG00000196428_56 (sequence is synthesized)
ctatgtacagtcagggatggttttgtcagggtaggtttcctcaaaaacatgacacctgagtcttgaaggtcataagagccagagggaagggtgttccaagcacaagaaaagagaactcaa

SEQ ID NO: 704711 - DNA, 120 bp, Artificial Sequence
  ENSG00000196428_57 (sequence is synthesized)
tggcttaaaagtataaacaaggctcctagggcagccacagaattgcattggagacaggcaggcagtgacttccccactgacctagtattttggcatctattcagaaagcaagaatgattt

SEQ ID NO: 704712 - DNA, 120 bp, Artificial Sequence
  ENSG00000196428_58 (sequence is synthesized)
attgaatggttttaagcaatgggatactatgctcaaattatgctggatgtgcacaattccagtggcagatgggaggtaggttagagtagctgaaactggaagctgagaaataatttagga

SEQ ID NO: 704713 - DNA, 120 bp, Artificial Sequence
  ENSG00000196428_59 (sequence is synthesized)
gggatgacaatccggaaaataaatgaaagggcaaaattacataggcaattttgtgaaggtcatgaaggaagtttgtcttgggtctttctgtaccattttcctctccacaatgaacatccc

SEQ ID NO: 704714 - DNA, 65 bp, Artificial Sequence
  ENSG00000196428_60 (sequence is synthesized)
ggtctttctgtaccattttcctctccacaatgaacatcccattcccagtgtcaggtatcaggtgc

SEQ ID NO: 704715 - DNA, 60 bp, Artificial Sequence
  ENSG00000196428_61 (sequence is synthesized)
catctccccctattttcttgtccctccaaaaaaagattaaagagtcccaactcatacttg

SEQ ID NO: 704716 - DNA, 120 bp, Artificial Sequence
  ENSG00000196428_62 (sequence is synthesized)
tccctccaaaaaaagattaaagagtcccaactcatacttgaaagtttgactcggtcttttccttccaacagttataaatctgtgaaatgaaagtctttgtttccttaaagggatttcaag

SEQ ID NO: 704717 - DNA, 120 bp, Artificial Sequence
  ENSG00000196428_63 (sequence is synthesized)
aatttaacaaaagggttggggaatggaacctttgctgtcactatgcctgtctctcaattctaccctaaaggtaaactaaatggaatccttttatggtgactaggattaggatgttgattc

SEQ ID NO: 704718 - DNA, 120 bp, Artificial Sequence
  ENSG00000196428_64 (sequence is synthesized)
caaagcctttccctaaaatctattccttgctccctggaaaggataatacaggttctggcccccactgtaggtactgacagcccaaggcagaataggttttgctaggctttagccttttat

SEQ ID NO: 704719 - DNA, 120 bp, Artificial Sequence
  ENSG00000196428_65 (sequence is synthesized)
tctttgacataggtcagtcctgcaggcttcttttttctaagtctcctgcctatccaaaaccagaccttttctcccacctccttctgcttcaagcctcttaataatccatatttctatttt

SEQ ID NO: 704720 - DNA, 120 bp, Artificial Sequence
  ENSG00000196428_66 (sequence is synthesized)
ctagcaatagtaatagtttattatttagtgatgtatacttgcaccccatttactccttttcaatatttcaggatacatctttgtcctgtatttctgtaccagttcacagaatttctacag

SEQ ID NO: 704721 - DNA, 120 bp, Artificial Sequence
  ENSG00000196428_67 (sequence is synthesized)
caagatccctttaaatgtatggctttccttcataggttgcaaggattactttatacaagtgctactgtaactatatcttttgtggagtacaattggtatgacatgctgtgttcatagatg

SEQ ID NO: 704722 - DNA, 120 bp, Artificial Sequence
  ENSG00000196428_68 (sequence is synthesized)
aaaatgctaagtgaggcactctgaagcaagttaaagttcacagacattcttgcttgcccaccacccccccgaaccccgccatggaatcatcaaataagaaaaataagacagattttcaga

SEQ ID NO: 704723 - DNA, 120 bp, Artificial Sequence
  ENSG00000196428_69 (sequence is synthesized)
ttggtgatggcaaagtaagacgctggtattttgcactggcgcagtccatttagttgttgaatttgttcagcatacctggatggtgagtgagttagctttatttttcattctcagcaggga

SEQ ID NO: 704724 - DNA, 120 bp, Artificial Sequence
  ENSG00000196428_70 (sequence is synthesized)
aactgatagactaggcagtttggggaattttcccattgtctactgtcatgggtccatagtatttaagtttacagactacaacattgtccacagaagccatatttatccccttggagggaa

SEQ ID NO: 704725 - DNA, 120 bp, Artificial Sequence
  ENSG00000196428_71 (sequence is synthesized)
gggaaaggtgtgctaacttagatcataaaaacaactgaattttaaaacaaggcaaatgccacagttcaacttctccataaaaaagttaagttcatctctccattcttttgcatgcctaca

SEQ ID NO: 704726 - DNA, 120 bp, Artificial Sequence
  ENSG00000196428_72 (sequence is synthesized)
atatttccatataacaactgtaaaatactcttgcctgctgcaatccaaatgttatccggatcacagttcttgctgtcatttcacaggcatgcaatgtatctatagataggtcatatcata

SEQ ID NO: 704727 - DNA, 120 bp, Artificial Sequence
  ENSG00000196428_73 (sequence is synthesized)
cctgaggaagatcagagacagcaagggaacattttccccacacttgagatggaaataataacaggtcagtggctaataaaaagaaacatgtatgactttgtaaaaccctaaaagtgatgt

SEQ ID NO: 704728 - DNA, 120 bp, Artificial Sequence
  ENSG00000196428_74 (sequence is synthesized)
tttcaagaaatttaggtttcttttttttattttataaaaaaaatgttgacatgcaatttaattctatttcaatttaggtgctgcaacctgtactggatgtttggggatagaaagatgaat

SEQ ID NO: 704729 - DNA, 120 bp, Artificial Sequence
  ENSG00000196428_75 (sequence is synthesized)
gggacatgatttgtgtgctccaatgagctcagtccagtgtaagtgtaaaagttaaagtgccatattgtttattcagagtatatgttatagtttgtgaaccttatatcatttgttaaatga

SEQ ID NO: 704730 - DNA, 120 bp, Artificial Sequence
  ENSG00000196428_76 (sequence is synthesized)
aaggtttttataaatcaacagtaatattgccatcccatgtaaaaatcctttgatattgccaggaaacaactttaaatcaccagaaagctttaacatcaaataatacttttagaaggaggg

SEQ ID NO: 704731 - DNA, 120 bp, Artificial Sequence
  ENSG00000196428_77 (sequence is synthesized)
gaaaagccttccacctcgacatcgagcctatgaagtattccctaaaaaagaggaactaatctgagaaaagtttacacatttttaatactctaagttgtagataatgaaattgatttaaat

SEQ ID NO: 704732 - DNA, 120 bp, Artificial Sequence
  ENSG00000196428_78 (sequence is synthesized)
caaagttaactagaataggattcatgtgtcatgaattatattgtctattgtctcataagcaacaagtgacacttattatcttggctgacaaaatcagctaccatttaatgaaccaagtta

SEQ ID NO: 704733 - DNA, 120 bp, Artificial Sequence
  ENSG00000196428_79 (sequence is synthesized)
agaataactcaggtgactgataccaaaaataaatctctaatacagctgagaatccagaaacacaaataatatgttgagtaagtaataaaagtgacatttcaaattagtaaggaaaaaatg

SEQ ID NO: 704734 - DNA, 120 bp, Artificial Sequence
  ENSG00000196428_80 (sequence is synthesized)
gattattcaacaaatagtatgggatagcataacaatttagaagaaatataaagttagatctttcacaaaaattaattctagctagactagcagttagtcttctactttttggttactccc

SEQ ID NO: 704735 - DNA, 120 bp, Artificial Sequence
  ENSG00000196428_81 (sequence is synthesized)
ttttagaaattggaagctatgaagctatataccctgtccatttgaaaatgcacataagcaaagaactttacaaataggttataaagagaagctcaatctcagcaaaataagggaagtgca

SEQ ID NO: 704736 - DNA, 120 bp, Artificial Sequence
  ENSG00000196428_82 (sequence is synthesized)
cattaaaacacaagaaaccatctcagatccaactaatatttagcgtgcatacaaatcaaaagctggaaagggtgtggaaaaacaggaatacattgctagtgagcatacaaattggcacag

SEQ ID NO: 704737 - DNA, 120 bp, Artificial Sequence
  ENSG00000196428_83 (sequence is synthesized)
cctcttttaaagacaattgtgtatcacccattaaattttaaaagtcacataccctgtgacctaacaattccaacttttaatgtcctaaagaaacatacatgtgttcacaagatagcctgt

SEQ ID NO: 704738 - DNA, 120 bp, Artificial Sequence
  ENSG00000196428_84 (sequence is synthesized)
acaatgatgtcaattgcacctttgcttgtacagtagacccccttatctgcattttcactttttgaggtttcagtcatccaaggtcaaccacaatacaaaaatattaaatggaaaattcca

SEQ ID NO: 704739 - DNA, 120 bp, Artificial Sequence
  ENSG00000196428_85 (sequence is synthesized)
gaaacgaacataagttttaaacttcaaacctttctgcatagtataataaaaatctctcactatccctctccatcctgcctgggacaggaatcatccctttgtccagtgtatccacaatgt

SEQ ID NO: 704740 - DNA, 120 bp, Artificial Sequence
  ENSG00000196428_86 (sequence is synthesized)
atacactcattatatacccattttataatgcccattagtcatttctattatcagatcataaaaaaacatagtacatagagggtttggtattattcatggtttcaggcattcagtgagggt

SEQ ID NO: 704741 - DNA, 120 bp, Artificial Sequence
  ENSG00000196428_87 (sequence is synthesized)
cttggaaaatatcctccatgatgggggagctactgtaatactatgaaattggaaaaaccaaaatactcatcaagaggatggactatggtacacatgatgaagtattaagtatcaatgaaa

SEQ ID NO: 704742 - DNA, 120 bp, Artificial Sequence
  ENSG00000196428_88 (sequence is synthesized)
aagagagagtcctacatgtccggcatggaaggatctccaggagacaatgttaaaagtttgggggaaaaattgaaagacaatacctgtaatacatatgatactagtgatgttaaatcacat

SEQ ID NO: 704743 - DNA, 120 bp, Artificial Sequence
  ENSG00000196428_89 (sequence is synthesized)
cacacacacacacacacacaaatactgtatagtgtacttctacaagtacatatttgtgtattatatagagagaaggtctggaaggatactaaccaaactgtcaacagtagtttggtagcg

SEQ ID NO: 704744 - DNA, 120 bp, Artificial Sequence
  ENSG00000196428_90 (sequence is synthesized)
cagtagtttggtagcgtgcattagctttaactgtaatgtttgatgtttttgaatatgcatttatgtattgtttgtgtaatgacaaattaataaattagaaataaaataaaataatgtgtt

SEQ ID NO: 704745 - DNA, 120 bp, Artificial Sequence
  ENSG00000196428_91 (sequence is synthesized)
aataagctattttaaattactgtatatttggttttaagtgaaacacaaatgtcttttacattcttttaagagttggaagggaggttaaattttttagaataataacatattctaattttt

SEQ ID NO: 704746 - DNA, 120 bp, Artificial Sequence
  ENSG00000196428_92 (sequence is synthesized)
gatctcacaggaatccttcaactgctttctaccaagcgttccatttgaacacgttaaaggaatcaaagagcctctgggataggggggaaatcacatggtatctagcatgggacaaagcag

SEQ ID NO: 704747 - DNA, 120 bp, Artificial Sequence
  ENSG00000196428_93 (sequence is synthesized)
aagtatatctatatttttgaagggttcatactgtgttgaatttttcttatgaaatagtcacttccccagtgtattttaatgcaaatgcatattctataaaataaactatattttaatttt

SEQ ID NO: 704748 - DNA, 120 bp, Artificial Sequence
  ENSG00000196431_0 (sequence is synthesized)
gacatgttccctgggcctatctcggaaggggccacaatgaccctgcaatgcacaaagtcagcgggaccctggaagatggtggtgtgggatgaggacggcttccagggccggcggcacgag

SEQ ID NO: 704749 - DNA, 120 bp, Artificial Sequence
  ENSG00000196431_1 (sequence is synthesized)
ttcacggccgagtgccccagcgtgctggagcttggcttcgagactgtgcgatctttgaaagtgctgagtggagcgtgggtgggctttgagcatgctggcttccaagggcagcagtacatt

SEQ ID NO: 704750 - DNA, 120 bp, Artificial Sequence
  ENSG00000196431_2 (sequence is synthesized)
ctggaacgaggcgaatatccaagctgggatgcctggggcggcaacacggcctaccccgccgagaggctcacctccttccggcctgcggcctgtgctaaccaccgtgactcgaggctgaca

SEQ ID NO: 704751 - DNA, 120 bp, Artificial Sequence
  ENSG00000196431_3 (sequence is synthesized)
agtagggtccttccacgtccactctggggcctgggtttgctcccagtttccgggctaccgaggatttcagtatgtgctggaatgcgatcaccattccggtgactacaaacatttccggga

SEQ ID NO: 704752 - DNA, 120 bp, Artificial Sequence
  ENSG00000196431_4 (sequence is synthesized)
gtggggctctcatgccccgaccttccaggtgcagagcatccgcaggatccagcagtgaacaggggtgcggcacggaggagcgcatgcgtgcttatctgcaatggaggcgctctggaggct

SEQ ID NO: 704753 - DNA, 120 bp, Artificial Sequence
  ENSG00000196431_5 (sequence is synthesized)
gtggtgtgttctctccttctgcctccccctgtaacctgtgtgaacccagcacccatgtgaactggtccgtgcacagtcagcacaaaaaactcaaacgaataaaaaagagaaagtctggta

SEQ ID NO: 704754 - DNA, 120 bp, Artificial Sequence
  ENSG00000196433_0 (sequence is synthesized)
gtttgagtactgggcaggcagcagggagagtcaggcagcagctgtgagcgggtggctcttccccaccttgccagcaggctctgtgctccttgaagcaagcgctccagaggctccggaagc

SEQ ID NO: 704755 - DNA, 120 bp, Artificial Sequence
  ENSG00000196433_1 (sequence is synthesized)
cacggctggattggagacaagatgggatcctcagaggaccaggcctatcgcctccttaatgactacgccaacggcttcatggtgtcccaggttctcttcgccgcctgcgagctgggcgtg

SEQ ID NO: 704756 - DNA, 120 bp, Artificial Sequence
  ENSG00000196433_2 (sequence is synthesized)
tttgaccttctcgccgaggccccagggcccctggacgtggcggcagtggctgcaggtgtgagggccagcgcccatgggacagagctcctgctggacatctgtgtgtccctgaagctgctg

SEQ ID NO: 704757 - DNA, 120 bp, Artificial Sequence
  ENSG00000196433_3 (sequence is synthesized)
aaagtggagacgaggggaggaaaagctttctatcgaaacacagagctgtccagcgactacctgaccacggtcagcccgacgtcacaatgcagcatgctgaagtacatgggcaggaccagc

SEQ ID NO: 704758 - DNA, 120 bp, Artificial Sequence
  ENSG00000196433_4 (sequence is synthesized)
taccggtgctggggccacctggcagacgccgtgagagaaggaaggaaccagtacctggagacgtttggcgttcccgctgaagagctttttacggccatctacaggtccgagggcgagcgg

SEQ ID NO: 704759 - DNA, 120 bp, Artificial Sequence
  ENSG00000196433_5 (sequence is synthesized)
tgcaagctctgcaggaggtctggagcgtcaacgggagaagcgtgctgaccgcctttgacctgtcagtgttcccacttatgtgtgaccttggtgggacatggataaagctggaaaccatca

SEQ ID NO: 704760 - DNA, 120 bp, Artificial Sequence
  ENSG00000196433_6 (sequence is synthesized)
accgcgtgttctcactcataggtggggctggagctctggctaaggaatgcatgtctctgtaccctggatgtaagatcaccgtttttgacatcccagaagtggtgtggacggcaaagcagc

SEQ ID NO: 704761 - DNA, 120 bp, Artificial Sequence
  ENSG00000196433_7 (sequence is synthesized)
ttgacatcccagaagtggtgtggacggcaaagcagcacttctcattccaggaggaagaacagattgacttccaggaaggggatttcttcaaagaccctcttccggaagctgatctgtaca

SEQ ID NO: 704762 - DNA, 120 bp, Artificial Sequence
  ENSG00000196433_8 (sequence is synthesized)
tcctggccagggtcctccatgactgggcagacggaaagtgctcacacctgctggagaggatctaccacacttgcaagccaggtggtggcattctggtaattgaaagcctcctggatgaag

SEQ ID NO: 704763 - DNA, 120 bp, Artificial Sequence
  ENSG00000196433_9 (sequence is synthesized)
acaggcgaggtcctctgctcacgcagctctactctctgaacatgcttgtgcagacggaagggcaggagaggacccccacccactaccacatgctcctctcttctgctggcttcagagact

SEQ ID NO: 704764 - DNA, 120 bp, Artificial Sequence
  ENSG00000196433_10 (sequence is synthesized)
tccagtttaagaaaacaggagccatttatgatgccattttagccaggaaataactgtttcttgtgacctggaactaacgtcaaagcacacaagacataataataaagacatgtacctcca

SEQ ID NO: 704765 - DNA, 120 bp, Artificial Sequence
  ENSG00000196433_11 (sequence is synthesized)
gaagagctttttacggccatctacaggtaacacccatcactttgaaaccaacaactcagataagattctgtttatttttaaaggacttaggaaacccaatccatttactcaaatggcaca

SEQ ID NO: 704766 - DNA, 120 bp, Artificial Sequence
  ENSG00000196433_12 (sequence is synthesized)
acccaggaggaagctgccatttaatttaaaataacatcccctatccccactactaccccagattttgctcatctgatgtttaaattgatcaaattcctgaggaggtgcaacgtgaccctt

SEQ ID NO: 704767 - DNA, 120 bp, Artificial Sequence
  ENSG00000196433_13 (sequence is synthesized)
tttatgtagaaaatggagccaccgcgcccgacctcagtattttcttatctttctcctaagcctttttgttttctgaggctaggtctgcaggtgactagcctggaagacctgggaaaggcg

SEQ ID NO: 704768 - DNA, 120 bp, Artificial Sequence
  ENSG00000196433_14 (sequence is synthesized)
tgacccatccaggtgaccttttgtgcccagaataggtttagtcaaatgggattggattgcaggctgacctcggtgtgcctgccctgtgttccaggggatttcttcaaagaccctcttccg

SEQ ID NO: 704769 - DNA, 88 bp, Artificial Sequence
  ENSG00000196436_0 (sequence is synthesized)
acccacccctgtcatcaatagtctggctgtctatcgtcatcgtgagactgactttggtgtaggagttcgagaccaccctggccaacat

SEQ ID NO: 704770 - DNA, 120 bp, Artificial Sequence
  ENSG00000196436_1 (sequence is synthesized)
ggcaaaaccccatctccacaaaaattggataatttgataattatcattattgggtttctgagacgtgacacatttaccattctcttctgcacaagttacctttgtgtgtctttcctgaag

SEQ ID NO: 704771 - DNA, 71 bp, Artificial Sequence
  ENSG00000196436_2 (sequence is synthesized)
ctggccctacctcacagctgaagctttaaaaaacaggatgggccgccagccacctcctccaactcaacaac

SEQ ID NO: 704772 - DNA, 84 bp, Artificial Sequence
  ENSG00000196436_3 (sequence is synthesized)
tgtctccttcatccccttccaccctcagtggatgataatatcaaggagtgtcctcttgctcctcttccaccctcagtggatgat

SEQ ID NO: 704773 - DNA, 88 bp, Artificial Sequence
  ENSG00000196436_4 (sequence is synthesized)
tcatccccttccaccctcagtggatgataatatcaaggagtgtcctcttgaaggagtatctcctggtccctcttccaccctctcctct

SEQ ID NO: 704774 - DNA, 120 bp, Artificial Sequence
  ENSG00000196436_5 (sequence is synthesized)
tcttccaccctcagtggatgataatctcaagactcctcccttagctactcaggaggccgaggcggaaaaaccacccaaacccaagaggtggagggtggatgaggtggaacaatcaccgaa

SEQ ID NO: 704775 - DNA, 120 bp, Artificial Sequence
  ENSG00000196436_6 (sequence is synthesized)
gaggtggaacaatcaccgaaacccaagaggcggagggcggatgaggtggaacaatcgcccaagcccaagaggcagagggaggccgaggcacaacaattacccaaacccaagaggcggagg

SEQ ID NO: 704776 - DNA, 120 bp, Artificial Sequence
  ENSG00000196436_7 (sequence is synthesized)
acaattacccaaacccaagaggcggaggttgagtaagctgagaacacgccattgcactcaagcctgggcaataagaataaatccgtgggtcgaaaaaaagaaaaaaatcaaaaaacaaaa

SEQ ID NO: 704777 - DNA, 120 bp, Artificial Sequence
  ENSG00000196437_0 (sequence is synthesized)
gcaggaagcagcggaacgattcgattcttctcagcaccaagttgcgctcccaatctctcagagctgggctcgcgggaggccgctcgtgcaaaacctaggctgagctcccctgcgcggagc

SEQ ID NO: 704778 - DNA, 120 bp, Artificial Sequence
  ENSG00000196437_1 (sequence is synthesized)
tgtgagccctggaacaccgtggtctgcttctcaggacgcgcaaacagtgaagccagtcccgcccgggtgagccgcgggggcctctgggaagcgtcgcccctggtgtaacggaccgagact

SEQ ID NO: 704779 - DNA, 120 bp, Artificial Sequence
  ENSG00000196437_2 (sequence is synthesized)
tgtggcgctctcagccaccgacagcgccggcctcagtgccgcctctgtcccagcccgcgccggctctgccactttggcagcgttaagtgtggaatcggggcctgtgtccgcgggcttggt

SEQ ID NO: 704780 - DNA, 120 bp, Artificial Sequence
  ENSG00000196437_3 (sequence is synthesized)
gagttcttcatatattaaggattcattcattcatagactcatttattgaaggctgtctgtgtaacaggcacaatcctaggtgcttgggatatagcagtgaacaagagacaaaccccctac

SEQ ID NO: 704781 - DNA, 120 bp, Artificial Sequence
  ENSG00000196437_4 (sequence is synthesized)
tatcatggtacttacatttttgtgggctggataataaacaagctctacttctgcaggccccatcccttcccagaaagaagaggaaatgactgagtcccagggaacagtaacattcaaaga

SEQ ID NO: 704782 - DNA, 120 bp, Artificial Sequence
  ENSG00000196437_5 (sequence is synthesized)
tgtggctatcgacttcactcaggaggagtggaagagattggatcctgctcagagaaaactgtaccggaatgtgatgctagaaaactataacaacttaatcacagtaggctatccgttcac

SEQ ID NO: 704783 - DNA, 120 bp, Artificial Sequence
  ENSG00000196437_6 (sequence is synthesized)
caaacctgatgtgattttcaaattggagcaagaagaagaaccatgggtgatggaggaagaagtattaaggagacactggcaaggagaaatatggggagttgatgagcatcagaaaaacca

SEQ ID NO: 704784 - DNA, 120 bp, Artificial Sequence
  ENSG00000196437_7 (sequence is synthesized)
ggacagacttttgagacaagttgaagttaaattccagaaaacactgactgaagaaaaaggcaatgaatgtcaaaagaaatttgcaaatgtatttcctctgaactctgattttttcccttc

SEQ ID NO: 704785 - DNA, 120 bp, Artificial Sequence
  ENSG00000196437_8 (sequence is synthesized)
cagacacaatctctatgagtatgacttatttggaaagtgtttagaacataattttgactgtcataataatgtgaaatgccttatgagaaaggagcattgtgaatataatgaacctgtgaa

SEQ ID NO: 704786 - DNA, 120 bp, Artificial Sequence
  ENSG00000196437_9 (sequence is synthesized)
atcatatggtaatagctcatcccattttgtcattaccccctttaagtgtaatcattgtggaaaaggcttcaatcagactttggacctcatcagacatctgagaattcatactggagagaa

SEQ ID NO: 704787 - DNA, 120 bp, Artificial Sequence
  ENSG00000196437_10 (sequence is synthesized)
gccctatgaatgtagtaactgtagaaaagccttcagtcacaaggaaaaacttattaaacattataaaattcacagtagggagcagtcttacaaatgtaatgaatgtggtaaagctttcat

SEQ ID NO: 704788 - DNA, 120 bp, Artificial Sequence
  ENSG00000196437_11 (sequence is synthesized)
taaaatgtcaaatctcattagacatcaaagaattcatactggagagaagccctatgcatgtaaggaatgtgagaagtccttcagccagaaatcaaatcttattgatcatgaaaaaattca

SEQ ID NO: 704789 - DNA, 120 bp, Artificial Sequence
  ENSG00000196437_12 (sequence is synthesized)
tactggagagaaaccttatgaatgtaatgagtgtggaaaagcattcagccagaagcaaagcctcattgcacatcagaaagttcatactggggagaaaccttatgcatgtaatgaatgtgg

SEQ ID NO: 704790 - DNA, 120 bp, Artificial Sequence
  ENSG00000196437_13 (sequence is synthesized)
taaagccttccctcgaattgcatcccttgctcttcatatgagaagtcatacaggagaaaaaccttataaatgtgataaatgtggtaaagccttctctcagttttccatgcttattataca

SEQ ID NO: 704791 - DNA, 120 bp, Artificial Sequence
  ENSG00000196437_14 (sequence is synthesized)
tgttagaattcatacaggtgaaaaaccctatgaatgtaatgagtgtggaaaagccttctctcaaagctcagcccttactgtacatatgagaagtcacactggtgagaaaccctatgaatg

SEQ ID NO: 704792 - DNA, 120 bp, Artificial Sequence
  ENSG00000196437_15 (sequence is synthesized)
taaggaatgcagaaaagccttcagccacaagaaaaacttcattacacaccagaaaattcatactagagagaaaccttatgagtgtaatgaatgtgggaaagcttttatacagatgtcaaa

SEQ ID NO: 704793 - DNA, 120 bp, Artificial Sequence
  ENSG00000196437_16 (sequence is synthesized)
cattctggagagaaaccctatgaatgcaatgaatgtggtaaagccttcagccaaaagcaaaacttcattacacatcaaaaagttcatactggagagaaaccttatgattgtaatgaatgt

SEQ ID NO: 704794 - DNA, 120 bp, Artificial Sequence
  ENSG00000196437_17 (sequence is synthesized)
ggtaaagccttctctcaaattgcatcccttacccttcatttgagaagtcatacaggggaaaagccttatgaatgtgataaatgtggtaaagccttctctcagtgctcactgcttaattta

SEQ ID NO: 704795 - DNA, 120 bp, Artificial Sequence
  ENSG00000196437_18 (sequence is synthesized)
catatgagaagtcacacaggtgagaagccctatgtatgtaatgaatgtgggaaagccttctctcaaagaacttcccttattgtgcacatgagaggccatacaggtgaaaaaccctatgaa

SEQ ID NO: 704796 - DNA, 120 bp, Artificial Sequence
  ENSG00000196437_19 (sequence is synthesized)
tgtaataaatgtggaaaagccttctcccaaagctcatcccttactatacatatacgaggacatacaggtgagaaacccttcgactgtagtaaatgtggaaaagccttctctcaaatctca

SEQ ID NO: 704797 - DNA, 120 bp, Artificial Sequence
  ENSG00000196437_20 (sequence is synthesized)
tctcttacccttcatatgagaaaacatacaggtgagaagccctatcactgtattgagtgtggcaaggctttcagccaaaagtcgcaccttgttagacaccagagaattcatactcattag

SEQ ID NO: 704798 - DNA, 120 bp, Artificial Sequence
  ENSG00000196437_21 (sequence is synthesized)
aaaccctatgaatattgtgaatatggcaaggccatctgaaggaattaacacctcattgcacattacatgatcacttccagagtagaaaactatgaatgtgggatagccttctgaaaaagc

SEQ ID NO: 704799 - DNA, 120 bp, Artificial Sequence
  ENSG00000196437_22 (sequence is synthesized)
cacaaatttatgaaacattagagaattcttccaaggtgacaaattatataatgaaaaagctgttaccagaaactttcagcagacatcttattgataatatttaatcagcattctcattga

SEQ ID NO: 704800 - DNA, 120 bp, Artificial Sequence
  ENSG00000196437_23 (sequence is synthesized)
aatctgaaacaaggtatcttccatcagcataacaacacaacacttgagctcctagccaatgtattaagtaaggaaaacaagtatcaacgaagaactataaaaataacttttatacaagaa

SEQ ID NO: 704801 - DNA, 120 bp, Artificial Sequence
  ENSG00000196437_24 (sequence is synthesized)
ataattagaaaatgtgttgatagaaaacctaagaataaacacaacaatgagttaggtctttatcaagttataaaatatgttgaaaggcacaaaagaacacctgaaaaatgatattttgtc

SEQ ID NO: 704802 - DNA, 120 bp, Artificial Sequence
  ENSG00000196437_25 (sequence is synthesized)
tgaaaagacttgacattgtaaaaatataatttctctcccaaatcactaagtttaatatacttctgaagtttacatcagttttattttaaggaacttcacaaacttatccaaaaattttat

SEQ ID NO: 704803 - DNA, 120 bp, Artificial Sequence
  ENSG00000196437_26 (sequence is synthesized)
gtggaaaagtaaagaaacacaaatagctgaaacaaacttgacaaagcaagtagagaagacacactctattattagatatatcatgtacttatttaaagctgctgtcatttaaacaatgta

SEQ ID NO: 704804 - DNA, 120 bp, Artificial Sequence
  ENSG00000196437_27 (sequence is synthesized)
ttaccaagtgaataaatcaagcagtagtaagatagtgagcattcatacaaaaatccaagaagatacaggaattctgtgtatgacagtgctattgaaatcactggggaatgaatggcttat

SEQ ID NO: 704805 - DNA, 120 bp, Artificial Sequence
  ENSG00000196437_28 (sequence is synthesized)
ttaataaatggaaggttcataggagaaaaattttagctttctactttatatcatatacaaaaataaaatccaactaaagaccagaatataaaaagcaaaattttaaaactatgatgaaag

SEQ ID NO: 704806 - DNA, 120 bp, Artificial Sequence
  ENSG00000196437_29 (sequence is synthesized)
tagaatccgttactttagggtaacaagatttctttaaaaaacatgtaaacatggaatagtctgttgaattttggtgtattggcctcacaggcacccacaaatgtacacaaagagatatat

SEQ ID NO: 704807 - DNA, 120 bp, Artificial Sequence
  ENSG00000196437_30 (sequence is synthesized)
atcactgtgttcctgaatcatggtttgtattgcccaaaattggatataacaaatttttatcaattgtggaatagatgaataagtgtgatcatttctgtgataaaatacagaatttagaaa

SEQ ID NO: 704808 - DNA, 120 bp, Artificial Sequence
  ENSG00000196437_31 (sequence is synthesized)
caaaatctacctatagttatatggatagattacaatatataatattgagagaaaaaattaaaatgcacaaaggaacacagtataacatttgtataatttaataagatcttgcaaagaaca

SEQ ID NO: 704809 - DNA, 120 bp, Artificial Sequence
  ENSG00000196437_32 (sequence is synthesized)
gtactgtgtattggtcatggatccatatatgacttggttgccttttgggatgtgggaaaggtttggtgggagttgttatatttatctgtaatatttctttaataaaagagtgaaagcaaa

SEQ ID NO: 704810 - DNA, 120 bp, Artificial Sequence
  ENSG00000196437_33 (sequence is synthesized)
agaaaaggtcgcggcgtcgcagtgtctggcagcagcggtgcagctccgcgcagggtttgtaacacggcctcctccccaccaggtcctcccacactggcctctccccggccttccagagag

SEQ ID NO: 704811 - DNA, 120 bp, Artificial Sequence
  ENSG00000196437_34 (sequence is synthesized)
cccgaaagtccggattccctgcagctccgagcctggcccggtcacagggacggggcccagcgtcacactacacgggctggtgtggaagtgcgcaggcacaagcgctctgcgcgcctccct

SEQ ID NO: 704812 - DNA, 120 bp, Artificial Sequence
  ENSG00000196437_35 (sequence is synthesized)
caagggatgtaaacagctggaaagaactttgcttcaatcattacaacaaggaaactacaaacttctaccgtacaacaaggaaatggacaaactacaaaataatttttctaggacccttca

SEQ ID NO: 704813 - DNA, 120 bp, Artificial Sequence
  ENSG00000196437_36 (sequence is synthesized)
gagaactgaggtcacagggcaaccaagtaatcttaaatctggggaaagaaagatgccagctgagagaaacaggactcaagctttacttacctgggatggactctgccagacaccatataa

SEQ ID NO: 704814 - DNA, 120 bp, Artificial Sequence
  ENSG00000196437_37 (sequence is synthesized)
ggttagtggaagggaaccagacaggtgaggagaggtcagggcctattaatgattaatcagtgaatggttgatccctctaaaatattcttcaaagatattttcagaggttggcacagtggt

SEQ ID NO: 704815 - DNA, 120 bp, Artificial Sequence
  ENSG00000196437_38 (sequence is synthesized)
aatattcttcaaagatattttcagaggttggcacagtggttcatacctatagtcccagcactttgggaagccaaggtggaaggattgcttgagtccaggagtttgggaccagcctgggca

SEQ ID NO: 704816 - DNA, 120 bp, Artificial Sequence
  ENSG00000196437_39 (sequence is synthesized)
ctccttgtagccaccacacgggaaatgtgctgggtcacacctgaagccagcatgtctctgagtctcacccaaggcccatgggaacagtaacattcaaagatgtggctatcgacttcactc

SEQ ID NO: 704817 - DNA, 120 bp, Artificial Sequence
  ENSG00000196440_0 (sequence is synthesized)
ggtgtactgccaagagaagcaagaggagaggagggaactgcctcggatcattacaggtccacctccagaggcagctgtagtggcctttgagtggctgaagaccagcaccctcacaggcct

SEQ ID NO: 704818 - DNA, 120 bp, Artificial Sequence
  ENSG00000196440_1 (sequence is synthesized)
acacccacaactaccactctctttaccccagcccgagtgcgctctaccataccttgttcgtgcttttagcaggggtgattacatgggccgcattcaggaagtgggctgggtgactgcagg

SEQ ID NO: 704819 - DNA, 120 bp, Artificial Sequence
  ENSG00000196440_2 (sequence is synthesized)
actggtgatctgggctggcacctgctactacatttacaaatttaccaagggaagagcccagagtgtgaggactcttgccagaaatggatccacagttaagatggagactgtggttggggt

SEQ ID NO: 704820 - DNA, 120 bp, Artificial Sequence
  ENSG00000196440_3 (sequence is synthesized)
acagagccagaccttggccataaatgaagcagagattaagactaaaccccaagtcgagattggagcagaaactggagcaagaagtgggcctagggctgaagtagagaccaaggccactgc

SEQ ID NO: 704821 - DNA, 120 bp, Artificial Sequence
  ENSG00000196440_4 (sequence is synthesized)
tatagccatacacagagccaactctcaggccaaggcaatggttggggcagagccagagactcaatctgagtccaaagtggtggctggaacactggtcatgacagaggcagtgactctgac

SEQ ID NO: 704822 - DNA, 120 bp, Artificial Sequence
  ENSG00000196440_5 (sequence is synthesized)
tgaggtcaaggccaaagccagggaagtggccatgaaagaagcagtgacccaaactgatgctgaggctggcaaaatagttaagaaagaagcagtgacacagaccaaggctaaagcttgggc

SEQ ID NO: 704823 - DNA, 120 bp, Artificial Sequence
  ENSG00000196440_6 (sequence is synthesized)
gctggttgccaagacagaggccaagagagaagcaatgacccagaccaaagctgaaactcatatattggctgaaaaagagacagagattaacagagtaatggttacacagagtgagacctt

SEQ ID NO: 704824 - DNA, 120 bp, Artificial Sequence
  ENSG00000196440_7 (sequence is synthesized)
ggcagtacccagggaagtggccaagatgggggccacgaacaagactggaattgtggatgaaaccaagacaagagctctggaagagactgtgagtgtggctaagactcagtctgaggccag

SEQ ID NO: 704825 - DNA, 120 bp, Artificial Sequence
  ENSG00000196440_8 (sequence is synthesized)
gcctggtgccacagttgatgctaggggaaatcccaatggcatgtccagggaggtggctggagtggacatgaagtcctgtgcacagtctcaggctgtgaccaagatccagggtgatgacat

SEQ ID NO: 704826 - DNA, 120 bp, Artificial Sequence
  ENSG00000196440_9 (sequence is synthesized)
gcctggtactggggttgaggacatggggaattgtaaaaccatgtctagggcagagtctggggcagacacgagggcttctgctcagcctcaaatttttgccaaaacccagactgaggccat

SEQ ID NO: 704827 - DNA, 120 bp, Artificial Sequence
  ENSG00000196440_10 (sequence is synthesized)
tcctggggcaaagattgatgccgggggtaacaccaatgccatgtgtaaggtgggggcaggggcagatgtgagagcttgtatacaacctcagactgtggccaagaaacaggctgaggtgac

SEQ ID NO: 704828 - DNA, 120 bp, Artificial Sequence
  ENSG00000196440_11 (sequence is synthesized)
gtctggtgccagggttgatggtaggggaaataccaatgtcatatctaaggcaataactggagctgacatgagagctgctgctcagcctcaagctgttgccagtactcacgctgaggccat

SEQ ID NO: 704829 - DNA, 120 bp, Artificial Sequence
  ENSG00000196440_12 (sequence is synthesized)
gtctgatgctaaggttaagaacagaggcaatcccaatgccatgactaaagcaggggccaaggcaaacttgagggccaattcccaggttgaggccttgcctgatgccagggataagagcag

SEQ ID NO: 704830 - DNA, 120 bp, Artificial Sequence
  ENSG00000196440_13 (sequence is synthesized)
aggcaatcccaatgttatggctaaggtgggggatgggacagacatgttgtcctgtacacagcctcagcttgtggccagtgttcaggctgataccttgtctgatggcaaaattaaggtcag

SEQ ID NO: 704831 - DNA, 120 bp, Artificial Sequence
  ENSG00000196440_14 (sequence is synthesized)
gggcaatgtcaataccatgcctaaggaaggagctggggtggatatgaaggctcaaggtatggcccagagccagggtgaagccttacctaatactagaggtaaggctaggggcaaagccaa

SEQ ID NO: 704832 - DNA, 120 bp, Artificial Sequence
  ENSG00000196440_15 (sequence is synthesized)
agccaagtgtaagacagggcctgggatggacatgaaaacctgtacacaacctcaggctggggtcaagaccccagctgaggccttgcttgattccagggttgatggtaggggcaatcctaa

SEQ ID NO: 704833 - DNA, 120 bp, Artificial Sequence
  ENSG00000196440_16 (sequence is synthesized)
tgccacttctaaagccgggactaaggcagaccagagggtctgtggtcagcccctggttgtggccaatccccagggtgaggccttgcctggtgccaagaataaagtcaagggcaatcccca

SEQ ID NO: 704834 - DNA, 120 bp, Artificial Sequence
  ENSG00000196440_17 (sequence is synthesized)
tactgtgcttaaggtgggggctggagaaggtacaacagactctgcccagcctgaggcagtggtcagtttccagggtgaggccttgcttggcaccaagaataaagttaagggtaatcccaa

SEQ ID NO: 704835 - DNA, 120 bp, Artificial Sequence
  ENSG00000196440_18 (sequence is synthesized)
tgttgtgcttaaggcagaagttggggaaggtgcaatgggcactgcccagcttcagattatggccagttccaagggtgaggccttgcttgattctaagaataaggtcaagggtaattccaa

SEQ ID NO: 704836 - DNA, 120 bp, Artificial Sequence
  ENSG00000196440_19 (sequence is synthesized)
tgctgtgtctaaggcaggggctgggacagatacaacaggctctgtccagccccagattgtggccaattcccagggtgaggtcttgcctggtgccaagaataagatcagaggcaatcccac

SEQ ID NO: 704837 - DNA, 120 bp, Artificial Sequence
  ENSG00000196440_20 (sequence is synthesized)
tactgtgcctaattcaggggttgggccatatacaacagactctgcccggctccaggctgtggccaattctcagggtgaggtcttgcctggtgccaaaaataaggtcaaggccaatcttaa

SEQ ID NO: 704838 - DNA, 120 bp, Artificial Sequence
  ENSG00000196440_21 (sequence is synthesized)
tgctgtgtctaaggcagaagctgggatgggtgcaacaggctctgtccagccccaggctgtggctaattcccattgtgagaccttgcctggtgccaagaataaggtcaggggaaattggaa

SEQ ID NO: 704839 - DNA, 120 bp, Artificial Sequence
  ENSG00000196440_22 (sequence is synthesized)
tgctgtgtctaaggcaggggctgggatggatacaaggggctctgcccagccccaggctgtggccaattcccagggtgaagtcttgcctggtgccaagaataaggtcaagggcaatcccaa

SEQ ID NO: 704840 - DNA, 120 bp, Artificial Sequence
  ENSG00000196440_23 (sequence is synthesized)
tgtcgtgtctaaggcaggggccagagaagatacagtgggctctacccagcctcaggttttggccagctcccagcgtgagaccttgcctggtgccaggaataaggtcaagggcaattccaa

SEQ ID NO: 704841 - DNA, 120 bp, Artificial Sequence
  ENSG00000196440_24 (sequence is synthesized)
tgttgtgtctaaggcaggggccagagaagatacaatgggctctgcccagcctcaggttgtggccaactcccagcgtgagaccttgcctggtgccaggaataaggtcaagggcaattccaa

SEQ ID NO: 704842 - DNA, 120 bp, Artificial Sequence
  ENSG00000196440_25 (sequence is synthesized)
tgctatttctaaggcagaggctggggcaggcataatgggctctgtccaggtccaggttgtggccagttttcagggtgaggtcttgcctggggccaaaaataaggtcaggggcaattccaa

SEQ ID NO: 704843 - DNA, 120 bp, Artificial Sequence
  ENSG00000196440_26 (sequence is synthesized)
tgctgtgcctaaggcagaggctggggcagatacagtgggctctgcccagccccaagctgtcgctaattcccagagtgagaccttgcttggtgccaggaataaggtcaagggcaataccat

SEQ ID NO: 704844 - DNA, 120 bp, Artificial Sequence
  ENSG00000196440_27 (sequence is synthesized)
tgctgtgcctaaagcagggactggggcaggcacaaggcactctgcccagcctcagattgtggccggttcccagggtgagaccttgcctggggcaagggacaagtctatgtccacttctga

SEQ ID NO: 704845 - DNA, 120 bp, Artificial Sequence
  ENSG00000196440_28 (sequence is synthesized)
ggcagaagccacagcagaagatgaggcctatgcaaagcctgaggctgaggccatgcccacttctgagagtgagggtgggtcaggcactcaagcctgcagaaagactcagcctaacatcca

SEQ ID NO: 704846 - DNA, 120 bp, Artificial Sequence
  ENSG00000196440_29 (sequence is synthesized)
tgactactactggaatgggattggtgttgaagactggattgctgctgagcggtggatcaaatttaggtttcagaccatggatggagactgggaaaatagcgtgtcctgggctgatgatga

SEQ ID NO: 704847 - DNA, 120 bp, Artificial Sequence
  ENSG00000196440_30 (sequence is synthesized)
gggccagggctgagaatgtggttggtattgggacttgggctagagctggggagcaggccagtggagggctctgggctgggggtcagactagtgaggggacctgggctggggacaaggcca

SEQ ID NO: 704848 - DNA, 120 bp, Artificial Sequence
  ENSG00000196440_31 (sequence is synthesized)
gtggaggagcctggactggggctgagaaccaggccagtggggggtcttgggctctcgctgggaatcaggccattggagagctttgggctgcgggtcaggccagtgatgggtcctggcctg

SEQ ID NO: 704849 - DNA, 120 bp, Artificial Sequence
  ENSG00000196440_32 (sequence is synthesized)
ggggacaggccagtggggtgtcctgggttggggaagaggccattggagggtcctggactggggctgagaaccaagccagtgaagggtcttgggctggagctggggctgggaatatgagta

SEQ ID NO: 704850 - DNA, 120 bp, Artificial Sequence
  ENSG00000196440_33 (sequence is synthesized)
gtgtttcatactgggctggggttgtggatcaggccggtggagggtcctgggctgggactagtgatcaatctggtggtgggtccaagcctagatttgaggatcaagccagtggagaagggt

SEQ ID NO: 704851 - DNA, 120 bp, Artificial Sequence
  ENSG00000196440_34 (sequence is synthesized)
cctgggctggggctggtggccaggctagtggagggtcaatgttggggcctgaggaccagtccagtggaaggtcttgggctgacactgcagaccaagccagtggagggtctaggctgggcc

SEQ ID NO: 704852 - DNA, 120 bp, Artificial Sequence
  ENSG00000196440_35 (sequence is synthesized)
acgtagatcagtccagtggtggggcctgggctgggacacttgatcagtctggtggtgggtccaagcctagatttgaaaatcagaccacagaagaagggtcttgggctggggctggtggcc

SEQ ID NO: 704853 - DNA, 120 bp, Artificial Sequence
  ENSG00000196440_36 (sequence is synthesized)
aggctggtggagggtccaaggtggggcctgaagaccagtccagtggaaggtcatgggctaactctggggaccaaatcagtggaggattcttagttgggattgtggaccaggccaatggag

SEQ ID NO: 704854 - DNA, 120 bp, Artificial Sequence
  ENSG00000196440_37 (sequence is synthesized)
ggtcctggactggggctgggcatccagctagtgttgggccaaagcctatatttgaggatcaggtcagtggcagagggtcctgggctgatgccagggagcaggttgttggagattctaggc

SEQ ID NO: 704855 - DNA, 120 bp, Artificial Sequence
  ENSG00000196440_38 (sequence is synthesized)
tggggcttagggaccagtctagtggagattcctgggctggcactggggaccaggccagtggatggttctgtgtttgccctgggagtcagacgaatggagggtcttggggtggggctagtg

SEQ ID NO: 704856 - DNA, 120 bp, Artificial Sequence
  ENSG00000196440_39 (sequence is synthesized)
gccaggatgttggagggtctaggccagggcccacgaaccagtccagtgctgggtcctgggatagccctgggagtcaggtcagtggaagctgctggactggggctggggctgtggatcagg

SEQ ID NO: 704857 - DNA, 120 bp, Artificial Sequence
  ENSG00000196440_40 (sequence is synthesized)
ctggtggttgttccaaacctggatttgaggatcaggccattggaggggggttctggcctggtgctggggaccagactggtggaggctccaggccagggtctgaggatcagtccagtggaa

SEQ ID NO: 704858 - DNA, 120 bp, Artificial Sequence
  ENSG00000196440_41 (sequence is synthesized)
taggttcctggggtgtggctggtggccaggtccttgggggagctaggccggggcctgcagaccagtccagtggtgggtcctgggctggcactgggaatcagtccagtggaaggtcctgga

SEQ ID NO: 704859 - DNA, 120 bp, Artificial Sequence
  ENSG00000196440_42 (sequence is synthesized)
ttgggcctggggatcaggctgttgactgttccaagcctgaatttgaggatcaggcttgtggaggaggctcctgggctggtgctgggagccaagccagtggagaatcctgggctggatcta

SEQ ID NO: 704860 - DNA, 120 bp, Artificial Sequence
  ENSG00000196440_43 (sequence is synthesized)
ggcctgggaatgaggccattggaggatctaggatgggatctgaggaccaggccactggaggatcctgggctagatctgaggaccaggccagtggaaggttccaggtcagttttgaggtgg

SEQ ID NO: 704861 - DNA, 120 bp, Artificial Sequence
  ENSG00000196440_44 (sequence is synthesized)
aggccaatgaaggattctggtttgggcctggagctgaggccgttatagggtcttggtgctggacagaggaaaaagctgatattgtgtccaggcctgatgataaagatgaggccactactg

SEQ ID NO: 704862 - DNA, 120 bp, Artificial Sequence
  ENSG00000196440_45 (sequence is synthesized)
catccagatcaggggctggggaagaggccatgatttgttctaggattgaggctgagaacaaggctagtagtggctcctggattagatctgaggaggtggcttatatgggctcctgtgtag

SEQ ID NO: 704863 - DNA, 120 bp, Artificial Sequence
  ENSG00000196440_46 (sequence is synthesized)
gggctggggctgaggctggggctggggctgaggctggggctggggctggggctgaggctggggctgaggctggggctggggctggggctgggcctgggactgagtctggggctgggattt

SEQ ID NO: 704864 - DNA, 120 bp, Artificial Sequence
  ENSG00000196440_47 (sequence is synthesized)
gggctgggatttggtcctgggatggagatgcaaccactgtagagtctaggcttggggctggggaagaggctggtgtagagtcctggaccttggctaggaatgtgggagaggatgagctaa

SEQ ID NO: 704865 - DNA, 120 bp, Artificial Sequence
  ENSG00000196440_48 (sequence is synthesized)
gtagagagtccagccctgatattgaggagatcagtttaaggtctttgttttgggctgagagtgagaacagtaatacgttcagatctaagagtgggaaagatgccagttttgagtctggag

SEQ ID NO: 704866 - DNA, 120 bp, Artificial Sequence
  ENSG00000196440_49 (sequence is synthesized)
ctggggataacaccagcatcaaggataagtttgaggctgctggtggagttgatatagggtcttggttctgtgctggtaatgaaaacacaagtgaggacaaatctgcacctaaggctaaag

SEQ ID NO: 704867 - DNA, 120 bp, Artificial Sequence
  ENSG00000196440_50 (sequence is synthesized)
ccaaaaagtcatctgagtcaagaggcatatatccgtacatggtccctggggcaggaatggggtcatgggatggagccatgatctggtcggaaactaagtttgcacaccaaagtgaggcca

SEQ ID NO: 704868 - DNA, 120 bp, Artificial Sequence
  ENSG00000196440_51 (sequence is synthesized)
gcttcccagttgaagatgagtccagaaaacaaaccaggactggggaaaaaactcggccctggtcttgccgctgtaaacacgaagctaatatggatccacgagatcttgaaaaactcattt

SEQ ID NO: 704869 - DNA, 120 bp, Artificial Sequence
  ENSG00000196440_52 (sequence is synthesized)
gcatgattgagatgactgaagatccttctgttcatgaaatagccaataatgctttatataacagtgctgattattcttattctcatgaagttgttcgtaatgtaggtggaatttcagtta

SEQ ID NO: 704870 - DNA, 120 bp, Artificial Sequence
  ENSG00000196440_53 (sequence is synthesized)
ttgaaagcttgctcaataatccctaccccagtgttaggcagaaggctttaaatgcactgaataatatctcagtggctgctgaaaaccataggaaggttaaaacttacttaaaccaagtat

SEQ ID NO: 704871 - DNA, 120 bp, Artificial Sequence
  ENSG00000196440_54 (sequence is synthesized)
gtgaagacactgtcacctatcccttgaattcaaatgtgcagttggctggactaaggttgataaggcatctgactattaccagtgaatatcagcatatggttacaaattatatttcagaat

SEQ ID NO: 704872 - DNA, 120 bp, Artificial Sequence
  ENSG00000196440_55 (sequence is synthesized)
ttcttcgtttgttaacggtgggaagtggagaaactaaagaccatgttttgggaatgcttttgaatttctctaaaaatccatctatgacaaaagacttgctcattgccaatgcaccaacat

SEQ ID NO: 704873 - DNA, 120 bp, Artificial Sequence
  ENSG00000196440_56 (sequence is synthesized)
cactgattaacatttttagcaagaaagagacaaaggagaatattcttaatgctctttcactatttgaaaatataaattaccattttaaaagaagagcaaaagcatttacccaggacaaat

SEQ ID NO: 704874 - DNA, 120 bp, Artificial Sequence
  ENSG00000196440_57 (sequence is synthesized)
tcagtaaaaattccctttatttcctattccaacgacctaaagcatgtgccaagaaacttcgagccttagcagcagaatgcaatgaccctgaggtgaaagagagagttgagctattaataa

SEQ ID NO: 704875 - DNA, 120 bp, Artificial Sequence
  ENSG00000196440_58 (sequence is synthesized)
gtaaactctgattggctgtatgttcccaaacaaatttgagtaatattttggttttgcactctggaagtaatgcacattgtaaattgcattataactttgaaactgatgttacctatgatg

SEQ ID NO: 704876 - DNA, 120 bp, Artificial Sequence
  ENSG00000196440_59 (sequence is synthesized)
gtctatagctggaccattttatgaacaccaaatgaattcaagcttgtactaaaaatacatgtgttgatttttatcttgtctggattgagatatttttagtatgcttcatgagcagaaact

SEQ ID NO: 704877 - DNA, 120 bp, Artificial Sequence
  ENSG00000196440_60 (sequence is synthesized)
gaatggattcttcataagtaaggtaatctttggtcctttgtgtggacttatgtttatacatttaagactatttttatgtcatcaataaagttgtgtgttttaagcagcagaaaaaagtca

SEQ ID NO: 704878 - DNA, 120 bp, Artificial Sequence
  ENSG00000196440_61 (sequence is synthesized)
gtcactcgcatctggctaccagctccccgctgccctgcgctcggcgggctggcatcgggcccggggaaagcggagcagttcggtgtagcactgtttgcggcgaggagaaaggaaggagag

SEQ ID NO: 704879 - DNA, 120 bp, Artificial Sequence
  ENSG00000196440_62 (sequence is synthesized)
gagaaaactgcactggatcaaggaggtcttcccataggcctgcagtagggctgtttaccattggaagcaagggaaagaggaggagatcaatctagaagcatggagatctgcctgcatgtc

SEQ ID NO: 704880 - DNA, 120 bp, Artificial Sequence
  ENSG00000196440_63 (sequence is synthesized)
aagagactgtgttgatcccaagagcattccctagtaaaaacgcttcatgctgaactctatctctgggcctgcttcctgggaagccaacctgcaacagttggtacaagaagtggttcgaga

SEQ ID NO: 704881 - DNA, 120 bp, Artificial Sequence
  ENSG00000196440_64 (sequence is synthesized)
aagcaaacactgtgatgaaattttggagatgaatcacctgctacccagctgtcaatgaagactccatcattggtggtagaaggtggagaaatctgaggagtagactcaggatttgttaaa

SEQ ID NO: 704882 - DNA, 120 bp, Artificial Sequence
  ENSG00000196440_65 (sequence is synthesized)
agcaagcttcaaagaaagttaaaattctaaccaagacaagtcttctatgccgagttatgtgccatggttaagaaggaatgggactctgacacttggaatgggggacatctggattgatgt

SEQ ID NO: 704883 - DNA, 120 bp, Artificial Sequence
  ENSG00000196440_66 (sequence is synthesized)
ccctaaaaatcttatatccccagattcccctgagccccttgagaagtgtcctactcctccctattaagggctggcactccatcttgcttcaatatatggaatcctttcccctgtaagata

SEQ ID NO: 704884 - DNA, 120 bp, Artificial Sequence
  ENSG00000196440_67 (sequence is synthesized)
acctgggttttcctcagaatctgcccgcacctcctatcctggccactgggcctataactagggttaagccacgcataatctagctggtgatgtgctgggtgtaataaggaaagaaagaga

SEQ ID NO: 704885 - DNA, 120 bp, Artificial Sequence
  ENSG00000196440_68 (sequence is synthesized)
gtgcgcactggggcaccgagcacagaccagagaacggggatgtctgtgcgtgcggagtggaggaggggggagttcctggtgactggccgccggcccttggtgggtggtagggggtgctgg

SEQ ID NO: 704886 - DNA, 120 bp, Artificial Sequence
  ENSG00000196440_69 (sequence is synthesized)
ggaggagggcgagctcggcggtgacgcgcggtcctcacgtgacccggagctgcagagctacgcagccttcgttgcagtcgtcactcgcatctggctaccagctccccgctgccctgcgct

SEQ ID NO: 704887 - DNA, 120 bp, Artificial Sequence
  ENSG00000196440_70 (sequence is synthesized)
tacccagctgtcaatgaagactccatcattggtggtaggtggagtagataggcctctggaataaggtagcagaggaattgttaaaattttcaatggtggttaactgggttggcatactgg

SEQ ID NO: 704888 - DNA, 120 bp, Artificial Sequence
  ENSG00000196440_71 (sequence is synthesized)
taaaatgggacacattaactggtgccatgtatcagacctttgagaaatatgggatatattaaatataaggaaggccagaaaattgggcggctgttgctaagcagattgagctctggaaaa

SEQ ID NO: 704889 - DNA, 120 bp, Artificial Sequence
  ENSG00000196440_72 (sequence is synthesized)
gaataacaaaaagctgaattaaattaatcaacaattgaaagctatgtttgaaagtcagatggctttattcataacatataaagaggctctcatcttttccaggtagaaggtggagaaatc

SEQ ID NO: 704890 - DNA, 120 bp, Artificial Sequence
  ENSG00000196440_73 (sequence is synthesized)
ggagcttgatcaggagggctggaatataaactggaatatgggagaattaatcaatttgaaagtgctttcccagaatacaggatttaataccctggagaaaaccacaggaaatgacacgaa

SEQ ID NO: 704891 - DNA, 120 bp, Artificial Sequence
  ENSG00000196440_74 (sequence is synthesized)
ctcattactgcgatggctcctcgaagtatggaaaaagccatggcgtacataaagtgaggtgtaaatgccagagttgccatagaagatggcgggaaaagggatcaaagactcagagagaca

SEQ ID NO: 704892 - DNA, 120 bp, Artificial Sequence
  ENSG00000196440_75 (sequence is synthesized)
taaaggagaagatttgggagagggagaggattaatcctgatttgaactcttcgaatttgaagtgcttatgtactatgatttgaatatggtttatccccatccaaagtcatgttgaggatg

SEQ ID NO: 704893 - DNA, 120 bp, Artificial Sequence
  ENSG00000196440_76 (sequence is synthesized)
ggttcccaatgtgacagtgttgggaggtggtacccttaagaggcatttgtgtcatggggaatctctcctgatgagggtatgaatgcagtctctttggagtgggagagttcttgtgctcat

SEQ ID NO: 704894 - DNA, 120 bp, Artificial Sequence
  ENSG00000196440_77 (sequence is synthesized)
gggactggattagttactgtgaggaggttggttgttataaagtgagtctgcctcttgtgcttggtgtcttttgcgtgtacctgtttccccttttgtttctttgccatgttttgatgccct

SEQ ID NO: 704895 - DNA, 120 bp, Artificial Sequence
  ENSG00000196440_78 (sequence is synthesized)
caaaagaagttgtcggatgtgactgcccagtcttgaacttcccagccctcaaaactaacagaacatatcttccagtagcttcctgagaaagtgtatatgcaaagcacacttctgagatct

SEQ ID NO: 704896 - DNA, 90 bp, Artificial Sequence
  ENSG00000196440_79 (sequence is synthesized)
tcctgagaaagtgtatatgcaaagcacacttctgagatctttcagatggttttgccacattgcccaggaacttgccttggccccccaaag

SEQ ID NO: 704897 - DNA, 120 bp, Artificial Sequence
  ENSG00000196440_80 (sequence is synthesized)
attaactaaagaacgttcaattcctcaactgtagttatatctgcatccaaatctctaacaaatgtgtcgtgttattagagcttcagttgtattataatacggtaattttggagtcctaat

SEQ ID NO: 704898 - DNA, 120 bp, Artificial Sequence
  ENSG00000196440_81 (sequence is synthesized)
aaaggaaaaggagtcaggctggcgggagcaggagaaagcaagaagagaaagcagataatctataagcctgtctttcttcatggtccaggacacacacccctcctgcgcagataactcaca

SEQ ID NO: 704899 - DNA, 120 bp, Artificial Sequence
  ENSG00000196440_82 (sequence is synthesized)
atcttcttgtgtccagctattaccaaaccctcgtctgatagaaaaatgcaagttagctcactgcagccttggcattatcagtactgcacgcagccctctccagcacaagcaccgtcctaa

SEQ ID NO: 704900 - DNA, 120 bp, Artificial Sequence
  ENSG00000196440_83 (sequence is synthesized)
aaaatcgccagcaagcctttgtctttttgcagtcagctcctctcttcctgatttgcttgttgctttcttgcagcatattttcatactttctctaataaatttacctttatttacctacaa

SEQ ID NO: 704901 - DNA, 120 bp, Artificial Sequence
  ENSG00000196440_84 (sequence is synthesized)
gcggccgcggccgggctggggcttcagcgggaggcagcagaggggaagtggtcagcgtggcgaatgacggaagaaactcgcattgtctactggatcaaggacagacagctcaccaaccgt

SEQ ID NO: 704902 - DNA, 120 bp, Artificial Sequence
  ENSG00000196440_85 (sequence is synthesized)
gtgctcagagcatgaaaattttctgctgtctttggaactttgtctacaaacagttagaagatgcagcccaagggctcaccatgggtggcgatgttgaagaacatgaagaccttactgctg

SEQ ID NO: 704903 - DNA, 120 bp, Artificial Sequence
  ENSG00000196440_86 (sequence is synthesized)
atagcaccatcttcaaatttgtggaagcttatgtgagttggataggaaaatttcctacatataatgttggctcttccatttgtttctaatttagtatttctcaattgatattttttttgt

SEQ ID NO: 704904 - DNA, 120 bp, Artificial Sequence
  ENSG00000196440_87 (sequence is synthesized)
tcagacaacaatctgataatgaaacaaacaaatgtgaagagaagacgcttagatgatgttggccctgaattggaaaaggctgtctgggagctcggctgcccacccagcattcagtgtctg

SEQ ID NO: 704905 - DNA, 120 bp, Artificial Sequence
  ENSG00000196440_88 (sequence is synthesized)
cggctgcccacccagcattcagtgtctgctacctcctgtctgttatgcttgtgtctggttttttcaagttttaattttttttttaattcttagtttttgtgggtacatagtaggtgtata

SEQ ID NO: 704906 - DNA, 120 bp, Artificial Sequence
  ENSG00000196440_89 (sequence is synthesized)
tacaggcatgcaatatgtaataatcacctcatggagaatggggtacccatcacatcaagcatttatcctttgtgttacaaacggtccagttagactcttttagttattattaaaatgtac

SEQ ID NO: 704907 - DNA, 120 bp, Artificial Sequence
  ENSG00000196440_90 (sequence is synthesized)
tatgcctggactcaacaacacgaacttctactcaccaaggctgatcttgtactaatactaagtgcccaacctgacaacagagaagatgatgagcctttataagacaccattccttagggg

SEQ ID NO: 704908 - DNA, 120 bp, Artificial Sequence
  ENSG00000196440_91 (sequence is synthesized)
catcagccagtcccatggtgttaggattattacatgggacacctttcatcatcatgaaaacagaaacttttcctcatggaaatgaatatgtattttagacacacatttaccttctttgct

SEQ ID NO: 704909 - DNA, 120 bp, Artificial Sequence
  ENSG00000196440_92 (sequence is synthesized)
gacaatgattctgtcatcaccatctccatggacttccagaatgccttaatcatcatcagagtatcctacacaaagttgtctctgaccaaggaactcatttaatgggactgcatcccccag

SEQ ID NO: 704910 - DNA, 120 bp, Artificial Sequence
  ENSG00000196440_93 (sequence is synthesized)
actccatttgtaattgacttctgcttgggtttggtcaatggaatgccctggcacagctttggagggaagaagagagaagacaatgtatttcttcactgctcccactctgatttgggctat

SEQ ID NO: 704911 - DNA, 120 bp, Artificial Sequence
  ENSG00000196440_94 (sequence is synthesized)
gttttattggcagggactgcatcccttcaagattttagcttcttccagaagtcccctcctccatgactctagctctcactaggctccagaaatactatttcttcctcttgccctcttagg

SEQ ID NO: 704912 - DNA, 120 bp, Artificial Sequence
  ENSG00000196440_95 (sequence is synthesized)
cctagggtaacagctacctgctattgctaacctctgggtgccacaaaattgcttgttgggtctcataatcttgcatatacctctgtaagtagtccctacattaaagtcccttgaaccatc

SEQ ID NO: 704913 - DNA, 120 bp, Artificial Sequence
  ENSG00000196440_96 (sequence is synthesized)
tttcctctgcagaaaaaccttaaaatgttctaccttttccttgaaacctcctcccactccttagttcacattgacttgtctttaaatgtttttgagaaaataatcagaaatgcacaatta

SEQ ID NO: 704914 - DNA, 120 bp, Artificial Sequence
  ENSG00000196440_97 (sequence is synthesized)
ataaatttataaattcaagaagtttcatgaattccaaatggaataatctcaaagaaaaccacctctaggcacatcttattgaactgctgaaaatgaaaagtaaagaaaaaattttagact

SEQ ID NO: 704915 - DNA, 82 bp, Artificial Sequence
  ENSG00000196440_98 (sequence is synthesized)
cagcttccagtgtgatcgttttagcatcgatattatggaagctatgcctggactcaacaacacgaacttctactcaccaagg

SEQ ID NO: 704916 - DNA, 120 bp, Artificial Sequence
  ENSG00000196440_99 (sequence is synthesized)
aagtgcacatccaaagattcactagtctttactacttactttaccatgcagaagcagcttgccttacacaaaaataaataacttactggaagcttagttatgggatcagctgttcctggg

SEQ ID NO: 704917 - DNA, 120 bp, Artificial Sequence
  ENSG00000196440_100 (sequence is synthesized)
agtactgtacgacaagattgcaatagatgctttaacagagccacccatatatggtgctttttttccccatagtgaggttacacaggactaggaataaagaagtcatgaaagcagtggccc

SEQ ID NO: 704918 - DNA, 120 bp, Artificial Sequence
  ENSG00000196440_101 (sequence is synthesized)
ttttcactattgcaccagttaacctactgaagaagtatgtgattctttttttctgtctccacaaccttgggctcttaggtatatcagggatgaatgctttcaccagggaataaagccatg

SEQ ID NO: 704919 - DNA, 120 bp, Artificial Sequence
  ENSG00000196440_102 (sequence is synthesized)
gttccattatattaaaagctgagactacattctggccatttttgtcctctcgtgccactgaactgacaggcagggaaaggggctgctatagtggctagagggattgagcccaattactaa

SEQ ID NO: 704920 - DNA, 120 bp, Artificial Sequence
  ENSG00000196440_103 (sequence is synthesized)
ggggaaataaggttgctgatatacaaacagggagagcaatgctcagagcccagggatactcactggggcacctcctagtactgctttgcctaatagtcctgggaagtgggaaagtgcaga

SEQ ID NO: 704921 - DNA, 120 bp, Artificial Sequence
  ENSG00000196440_104 (sequence is synthesized)
aattcaataaatacaggattgaagattagggtcactacatcagggaaataattttgaccaggtttctgtaaggggaatatgaaatgggtggtagaagaatgaagttgattattgactttg

SEQ ID NO: 704922 - DNA, 120 bp, Artificial Sequence
  ENSG00000196440_105 (sequence is synthesized)
gcctcatgatcagcttcagtgggaaactgtaacagctatgcacatctttgttaatttatttttctcttcctttcctctgattatatgaaaaatacttgagataattgttataaatcaggt

SEQ ID NO: 704923 - DNA, 120 bp, Artificial Sequence
  ENSG00000196440_106 (sequence is synthesized)
ttcaggtgggcgaatatgattgaattagcattatcccgtgacagtacggtggctgatgggattttttttgtccctgcctccctgttgggagaatagaataacaagaatagatgctgaatg

SEQ ID NO: 704924 - DNA, 120 bp, Artificial Sequence
  ENSG00000196440_107 (sequence is synthesized)
tgaaaggagtgggccatggtggttagtctttattttcccacacatcctgattcatttcctgtccttctctgtcttgttctatgccctgggcggctgatccttagggactgcatcccccag

SEQ ID NO: 704925 - DNA, 120 bp, Artificial Sequence
  ENSG00000196449_0 (sequence is synthesized)
acttcctcccggaagcgggcctgggcggatgtctccggcgcgtcggtgcagggggatgagggccgcggtggctgccagcgtggggttgagcgaggggcctgctggctcccggagcggtcg

SEQ ID NO: 704926 - DNA, 80 bp, Artificial Sequence
  ENSG00000196449_1 (sequence is synthesized)
gttgagcgaggggcctgctggctcccggagcggtcgcctcttccgcccgccgagtcccgctccggcggcccccggcgccc

SEQ ID NO: 704927 - DNA, 120 bp, Artificial Sequence
  ENSG00000196449_2 (sequence is synthesized)
ggccgccgtggccgagctgcgcgccggcgccgtggtggccgtccccaccgatacgctgtacggcctggcctgcgcggcgagctgctcggcggctctgcgcgctgtgtaccgcctcaaggg

SEQ ID NO: 704928 - DNA, 120 bp, Artificial Sequence
  ENSG00000196449_3 (sequence is synthesized)
tcgcagcgaggccaagcctctggccgtatgcctcggccgcgtggccgacgtctacagatactgccgtgtgagagtacctgaggggctcctgaaagacctactgccaggaccagtgaccct

SEQ ID NO: 704929 - DNA, 120 bp, Artificial Sequence
  ENSG00000196449_4 (sequence is synthesized)
ggtgatggaacgctcggaggagctcaacaaggacctaaacccttttacgcctcttgtaggcattcggattcctgatcatgcttttatgcaagacttggctcagatgtttgagggtccgct

SEQ ID NO: 704930 - DNA, 120 bp, Artificial Sequence
  ENSG00000196449_5 (sequence is synthesized)
tgctctcactagtgccaacctcagctcccaggccagttctctgaatgtcgaggagttccaggatctctggcctcagttgtccttggttattgatgggggacaaattggggatggccagag

SEQ ID NO: 704931 - DNA, 120 bp, Artificial Sequence
  ENSG00000196449_6 (sequence is synthesized)
ccccgagtgtcgccttggctcaactgtggttgatttgtctgtgcccggaaagtttggcatcattcgtccaggctgtgccctggaaagtactacagccatcctccaacagaagtacggact

SEQ ID NO: 704932 - DNA, 120 bp, Artificial Sequence
  ENSG00000196449_7 (sequence is synthesized)
cccaagacctggtgctggatactatgtgtctgtccactgacgactgtcaaggcctcatttgcagaggccaccggagctagggcactagcctgacttttaaggcagtgtgtctttctgagc

SEQ ID NO: 704933 - DNA, 120 bp, Artificial Sequence
  ENSG00000196449_8 (sequence is synthesized)
actgtagaccaagcccttggagctgctggtttagccttgcacctggggaaaggatgtatttatttgtattttcatatatcagccaaaagctgaatggaaaagttaagaacattcctaggt

SEQ ID NO: 704934 - DNA, 120 bp, Artificial Sequence
  ENSG00000196449_9 (sequence is synthesized)
ggccttattctaataagtttcttctgtctgttttgtttttcaattgaaaagtaattaaataacagatttagaatctagtgagagcctcctctctggtgggtggtggcatttaaggttcaa

SEQ ID NO: 704935 - DNA, 88 bp, Artificial Sequence
  ENSG00000196449_10 (sequence is synthesized)
agagcctcctctctggtgggtggtggcatttaaggttcaaaccagccagaagtgctggtgctgtttaaaaagtctcaggtggctgcct

SEQ ID NO: 704936 - DNA, 120 bp, Artificial Sequence
  ENSG00000196449_11 (sequence is synthesized)
agaatcagcctgggcaacatagcaatactccgtctcataaaaattaataaataaaaagtctcaggtgaccaaaggctcctgaagctagaaccaggtttggataaagattgaagagccaca

SEQ ID NO: 704937 - DNA, 120 bp, Artificial Sequence
  ENSG00000196449_12 (sequence is synthesized)
ggccactcttccctctgagccattgggcctagtggtgtcatgtattgtaattgctcgcagggagagcagtctttttggtgtaatagtgggatgtctgcttagttggcaggggttcagtcc

SEQ ID NO: 704938 - DNA, 120 bp, Artificial Sequence
  ENSG00000196449_13 (sequence is synthesized)
aaatggaagaatattgggaaataaacctccactatcctttatagccagggacttttttcttatttattcataaaataaattatagttaattatacccataacacctttatttaaatccag

SEQ ID NO: 704939 - DNA, 120 bp, Artificial Sequence
  ENSG00000196449_14 (sequence is synthesized)
tgttctccgcagccttttgtctatttatatgtgtaccaagtgttaaacataattattattgggcatttgaactttgtttttctttaaagaaatgctgctattaaacatatttgtaaatgg

SEQ ID NO: 704940 - DNA, 120 bp, Artificial Sequence
  ENSG00000196453_0 (sequence is synthesized)
acatgaactccgggctttctctggtgtgacgggtttcttagatccctttgtgagcgcaggttttgaaagggaacgaccccgggttctgggtgtgagaggcgcaggggatcggcgggagga

SEQ ID NO: 704941 - DNA, 120 bp, Artificial Sequence
  ENSG00000196453_1 (sequence is synthesized)
aggctgtcggagccaatcaagccgcctccagaccccagcacgtcgcctgggctgcgcgctccgactgcgcctccgcccgcgcgcctcccggcctcgcccgagggtgcctgggcaggcgag

SEQ ID NO: 704942 - DNA, 120 bp, Artificial Sequence
  ENSG00000196453_2 (sequence is synthesized)
gaccccaggttcagcagctggacatggagaaccaacgctcatcacctctgtcgttccccagtgttccacaagaagaaaccttacgtcaggcccctgctggactcccccgagaaactctgt

SEQ ID NO: 704943 - DNA, 120 bp, Artificial Sequence
  ENSG00000196453_3 (sequence is synthesized)
tccaatcccgcgttcttcctcccaaagaaattccttctttgtctcccaccattccccgtcaaggctccctgccccaaacttccagtgctcccaagcaagagacttctggccggatgccac

SEQ ID NO: 704944 - DNA, 120 bp, Artificial Sequence
  ENSG00000196453_4 (sequence is synthesized)
atgtgctccagaagggaccctcactcctgtgttctgccgcttctgagcaagagacttctctccagggccccctggcttcccaggaagggacccagtatccacccccagctgctgctgaac

SEQ ID NO: 704945 - DNA, 120 bp, Artificial Sequence
  ENSG00000196453_5 (sequence is synthesized)
aagaagtctcccttctctcccactccccccaccaccaggaagcccccgttcactcccctgaagctcctgagaaagaccccctgaccctttccccaacagttcccgagactgacatggacc

SEQ ID NO: 704946 - DNA, 120 bp, Artificial Sequence
  ENSG00000196453_6 (sequence is synthesized)
cgctgctccagagcccggtttcccaaaaggacacccctttccagatctcttctgcagtccagaaggaacagccgctccccacggcagagatcacccgcttggctgtgtgggctgccgtcc

SEQ ID NO: 704947 - DNA, 120 bp, Artificial Sequence
  ENSG00000196453_7 (sequence is synthesized)
aagcagtggagaggaagctggaggcccaggccatgaggctactgaccctggaaggcaggacggggacaaatgaaaagaagatagccgactgcgagaagacagccgtggagttcgcgaacc

SEQ ID NO: 704948 - DNA, 120 bp, Artificial Sequence
  ENSG00000196453_8 (sequence is synthesized)
atctggagagcaagtgggtcgtgttggggaccctgctgcaggagtatgggctgctgcagaggcggctggagaacatggagaacctgctgaaaaacagaaatttctggatcctgcggctgc

SEQ ID NO: 704949 - DNA, 120 bp, Artificial Sequence
  ENSG00000196453_9 (sequence is synthesized)
cccccggcagcaatggagaagttcccaaggtccctgtcacatttgatgatgttgctgtgcacttctcggagcaggagtggggaaacctgtctgagtggcagaaggagctctacaagaacg

SEQ ID NO: 704950 - DNA, 120 bp, Artificial Sequence
  ENSG00000196453_10 (sequence is synthesized)
tgatgaggggcaactacgagtccctggtttccatggactatgcaatttccaaaccagacctcatgtcacagatggagcgcggggagcggcccaccatgcaggagcaggaagactctgagg

SEQ ID NO: 704951 - DNA, 120 bp, Artificial Sequence
  ENSG00000196453_11 (sequence is synthesized)
agggcgaaacgccgacagatcccagtgctgcgcacgatgggatcgtgattaagatcgaggtacagaccaacgacgagggctcagaaagtttggagacacctgagcccctgatgggacagg

SEQ ID NO: 704952 - DNA, 120 bp, Artificial Sequence
  ENSG00000196453_12 (sequence is synthesized)
tggaagagcacggcttccaggactcagagctgggtgacccctgtggggaacagccagacctggacatgcaggagccagagaacacgctggaggagtccacggaaggctccagcgagttca

SEQ ID NO: 704953 - DNA, 120 bp, Artificial Sequence
  ENSG00000196453_13 (sequence is synthesized)
gatcaagacagaggaacaagacgaggaggaagaagaggaggaggaggatgagctgccgcagcacttgcaatcccttgggcagctgtccgggagatatgaggccagtatgtaccagacccc

SEQ ID NO: 704954 - DNA, 120 bp, Artificial Sequence
  ENSG00000196453_14 (sequence is synthesized)
gctgcccggggagatgtcccccgagggcgaggagagccccccgcccctgcagctaggaaaccccgcagtgaaaaggctggcgccctccgtgcacggtgagcggcacctgagcgagaaccg

SEQ ID NO: 704955 - DNA, 120 bp, Artificial Sequence
  ENSG00000196453_15 (sequence is synthesized)
cggggcctcgagccagcagcagcggaaccggcgcggcgagcggcccttcacatgcatggagtgcggcaagagcttccgcctgaagatcaacctcatcatccaccagcgcaaccacatcaa

SEQ ID NO: 704956 - DNA, 120 bp, Artificial Sequence
  ENSG00000196453_16 (sequence is synthesized)
ggaggggccctacgagtgcgccgaatgcgagatcagcttccggcacaagcaacagctcacgctgcaccagcgcatccaccgcgtgcgcggaggctgcgtctcacccgaacgcgggcccac

SEQ ID NO: 704957 - DNA, 120 bp, Artificial Sequence
  ENSG00000196453_17 (sequence is synthesized)
gttcaaccccaagcacgcgctcaagccgcgtcccaagtcacccagctctggtagcggcggcggtggccctaagccctacaagtgccccgagtgcgacagcagcttcagccacaagtccag

SEQ ID NO: 704958 - DNA, 120 bp, Artificial Sequence
  ENSG00000196453_18 (sequence is synthesized)
cctgaccaaacaccagatcacgcacacgggtgagcggccctacacgtgccccgagtgcaagaagagcttccgcctgcacatcagcttggtgatccatcagcgcgtgcacgcgggcaagca

SEQ ID NO: 704959 - DNA, 120 bp, Artificial Sequence
  ENSG00000196453_19 (sequence is synthesized)
tgaggtctccttcatctgcagcctgtgcggcaagagcttcagccgcccctcgcacctgctgcgccaccagcggactcacacaggcgagcggcccttcaagtgccccgagtgcgagaagag

SEQ ID NO: 704960 - DNA, 120 bp, Artificial Sequence
  ENSG00000196453_20 (sequence is synthesized)
cttcagcgagaagtccaagctcaccaaccactgccgcgtgcactcgcgcgagcggccgcacgcctgccccgagtgcggcaagagcttcatccgcaagcaccacctcctggaacaccggcg

SEQ ID NO: 704961 - DNA, 120 bp, Artificial Sequence
  ENSG00000196453_21 (sequence is synthesized)
catccacacaggcgagcggccctaccactgcgccgagtgcggcaagcgcttcacgcagaagcatcacctgctggagcaccagcgcgcgcacacgggcgagcggccctacccctgcacgca

SEQ ID NO: 704962 - DNA, 120 bp, Artificial Sequence
  ENSG00000196453_22 (sequence is synthesized)
ctgcgccaagtgcttccgctacaagcagtcgctcaagtaccacctgcggacccacacgggcgagtgagcgcgcgccccgccgccgccgcccggccaggtgcgcgggccgtgccccccctc

SEQ ID NO: 704963 - DNA, 120 bp, Artificial Sequence
  ENSG00000196453_23 (sequence is synthesized)
ggacaccgccaggcccgagcccagcgggcgggggcggggcgccccccagcccctttgccgtgagctccccctctcctctcgtccctcctcccaaggacatgggggcagtgagaccaggtc

SEQ ID NO: 704964 - DNA, 120 bp, Artificial Sequence
  ENSG00000196453_24 (sequence is synthesized)
ccttgctgccgcgtttccccgggggccccaggggggagggcgcggacctggggaaccctttcgggctgttaatttccttgacaataaaatggatgaaaccaatcagcacggggggcgtga

SEQ ID NO: 704965 - DNA, 120 bp, Artificial Sequence
  ENSG00000196453_25 (sequence is synthesized)
tttggccgccggccactcagaggggcggtgtagggcccatctagttggggatagaactttataattaccttttggatactgtggttctatttgataataatagagtaatttttaaaagaa

SEQ ID NO: 704966 - DNA, 120 bp, Artificial Sequence
  ENSG00000196455_0 (sequence is synthesized)
gaggtcagaccggttgctttcccgggagttcggcgtttgctggggctgcagcagctgaagtgtagtgttttcttgggactggcggtctgcacttctctcccgggttccatctccccccgc

SEQ ID NO: 704967 - DNA, 120 bp, Artificial Sequence
  ENSG00000196455_1 (sequence is synthesized)
ccggtggtgaggccctcgaggagggctcggacgggtgtagcgatccgcgctagaggaagacgaggcccgggaacgcatgtcccccagggcaggttagggggctggaggggtcaaatcccg

SEQ ID NO: 704968 - DNA, 120 bp, Artificial Sequence
  ENSG00000196455_2 (sequence is synthesized)
gggtacttgtggagactctttagcgtggcttcttctctctgctgagaccccgagagctttcccagttctcctcccaggaccaccggggttcctgaagatcgggacttttctgcgcccctc

SEQ ID NO: 704969 - DNA, 120 bp, Artificial Sequence
  ENSG00000196455_3 (sequence is synthesized)
caccaacagcccatctcctgtctatgaagaaagacccttcgtagaaacaacttccccgctgctgacgcgttttcccgtcccgtccccgaagtagtctactatgacctcgttgtgagcctc

SEQ ID NO: 704970 - DNA, 120 bp, Artificial Sequence
  ENSG00000196455_4 (sequence is synthesized)
tgaacgattttgacactttcccgaggcctagggtattatatcctaaccttactaaagaccacagaggtgcttgccattatgggaaatcagcttgctggcattgctccctcccagatcctt

SEQ ID NO: 704971 - DNA, 120 bp, Artificial Sequence
  ENSG00000196455_5 (sequence is synthesized)
tctgtagagagttatttttcagatattcatgactttgaatatgataaaagcctggggagtactcggttttttaaagttgctcgagccaagcaccgagaaggcctggtcgttgtgaaggtt

SEQ ID NO: 704972 - DNA, 120 bp, Artificial Sequence
  ENSG00000196455_6 (sequence is synthesized)
tttgcaattcaggatcccacattgcctttaaccagctataaacaagagctggaggaactgaaaatcaggcttaattctgcacagaattgtctacctttccagaaagcatcagaaaaagca

SEQ ID NO: 704973 - DNA, 120 bp, Artificial Sequence
  ENSG00000196455_7 (sequence is synthesized)
tctgagaaagcagctatgctctttaggcagtatgtgcgagacaatctctatgatcgcatcagtacccgtccattcttgaataacattgagaagcgctggattgctttccagatcctgaca

SEQ ID NO: 704974 - DNA, 120 bp, Artificial Sequence
  ENSG00000196455_8 (sequence is synthesized)
gctgtggaccaagcacacaaatctggagttcgtcatggggacatcaagactgagaatgtgatggtcaccagttggaattgggttcttctaactgattttgccagttttaagcccacttat

SEQ ID NO: 704975 - DNA, 120 bp, Artificial Sequence
  ENSG00000196455_9 (sequence is synthesized)
cttccagaagacaacccggcagatttcaattatttctttgacacatcacggaggagaacttgctatattgctcctgaacgttttgttgatggtgggatgtttgccactgagttagaatat

SEQ ID NO: 704976 - DNA, 120 bp, Artificial Sequence
  ENSG00000196455_10 (sequence is synthesized)
atgagagatccttcaactccgcttgtagacttaaatagcaatcagagaacaagaggagagttgaagagagcaatggacatcttttcagcaggttgtgtgatagctgagctttttacagaa

SEQ ID NO: 704977 - DNA, 120 bp, Artificial Sequence
  ENSG00000196455_11 (sequence is synthesized)
ggtgtaccattatttgatctctctcaacttttggcttatagaaatggacattttttccctgaacaagtgctaaataaaattgaagatcacagtatcagagaattggtaactcagatgatt

SEQ ID NO: 704978 - DNA, 120 bp, Artificial Sequence
  ENSG00000196455_12 (sequence is synthesized)
caccgtgagccagataaacgtttagaggcagaagattacttaaaacagcagcgtggcaatgcctttcctgaaatattttacacttttcttcagccctacatggcccagtttgccaaggaa

SEQ ID NO: 704979 - DNA, 120 bp, Artificial Sequence
  ENSG00000196455_13 (sequence is synthesized)
acgtttctttctgcagatgagcgtattctggttatacggaaggatttgggcaacattattcacaatctctgtggacatgatctgccagaaaaagccgaaggagagcctaaggaaaatggg

SEQ ID NO: 704980 - DNA, 120 bp, Artificial Sequence
  ENSG00000196455_14 (sequence is synthesized)
ctggttatcttggtatctgttataacatcctgcctacagacccttaaatactgtgattccaaactagctgctttggaactgattcttcatttggctccaagattaagtgttgaaatcctt

SEQ ID NO: 704981 - DNA, 120 bp, Artificial Sequence
  ENSG00000196455_15 (sequence is synthesized)
ttggatcgtattactccatatcttttgcatttcagcaatgactctgttcctagggtgagggctgaagccttgaggacgttgaccaaagttcttgctctcgtcaaagaggttcctcgtaat

SEQ ID NO: 704982 - DNA, 120 bp, Artificial Sequence
  ENSG00000196455_16 (sequence is synthesized)
gatatcaatatttatccggaatacattctgccaggcatagcccacttagcccaagatgatgctactatcgttagactagcctatgctgaaaacatagctctgctggcagaaacagctctg

SEQ ID NO: 704983 - DNA, 120 bp, Artificial Sequence
  ENSG00000196455_17 (sequence is synthesized)
agattcctggaattagtacagttaaaaaatcttaatatggaaaatgaccccaataatgaagaaatagatgaggttacacatccaaatggaaattatgacacagagctccaagccttacat

SEQ ID NO: 704984 - DNA, 120 bp, Artificial Sequence
  ENSG00000196455_18 (sequence is synthesized)
gaaatggtccagcagaaagttgttactttgctaagtgaccctgaaaatattgtaaaacaaaccttgatggaaaatggaataacacggctgtgtgtattctttggacgtcagaaagccaac

SEQ ID NO: 704985 - DNA, 120 bp, Artificial Sequence
  ENSG00000196455_19 (sequence is synthesized)
gatgttttgttgtcccacatgattactttcctaaatgataagaatgattggcatctacgtggagcattttttgatagtatagttggtgttgctgcctatgttggctggcaaagctcctca

SEQ ID NO: 704986 - DNA, 120 bp, Artificial Sequence
  ENSG00000196455_20 (sequence is synthesized)
ctgctacaaaaaccccatgtttacgaatttgccagtgatattgcccccttcctgtgtcatcccaatttatggatacgttatggtgccgtgggatttatcacagtggtagctcgtcaaata

SEQ ID NO: 704987 - DNA, 120 bp, Artificial Sequence
  ENSG00000196455_21 (sequence is synthesized)
agtacagctgatgtctactgtaaactgatgccttatcttgacccatatattacccaaccaataatacagattgaaagaaaacttgttctgctcagtgttttaaaggaaccagtaagtcgt

SEQ ID NO: 704988 - DNA, 120 bp, Artificial Sequence
  ENSG00000196455_22 (sequence is synthesized)
tctatatttgattatgctttgaggtctaaagatattactagcttgttcagacatcttcacatgcgtcagaagaaacgaaatggttctcttcccgactgccctccgccagaggatcctgcc

SEQ ID NO: 704989 - DNA, 120 bp, Artificial Sequence
  ENSG00000196455_23 (sequence is synthesized)
atagcacagcttctgaagaagttgctctcacagggaatgacagaggaagaggaagacaaacttctggcactgaaagacttcatgatgaaatctaataaagcaaaggccaatatagtggac

SEQ ID NO: 704990 - DNA, 120 bp, Artificial Sequence
  ENSG00000196455_24 (sequence is synthesized)
cagagccatcttcatgatagtagtcagaaaggtgtaattgacttggcagctttaggcataactgggagacaagttgatcttgttaaaaccaaacaagaaccagatgacaaacgggccaga

SEQ ID NO: 704991 - DNA, 120 bp, Artificial Sequence
  ENSG00000196455_25 (sequence is synthesized)
aaacatgtaaaacaagactcaaatgtaaatgaagaatggaaaagcatgtttgggtcactggacccaccaaacatgccacaggccctacctaaagggagtgatcaggaggtgattcagact

SEQ ID NO: 704992 - DNA, 120 bp, Artificial Sequence
  ENSG00000196455_26 (sequence is synthesized)
gggaaacctcctcgttccgagtcctctgctggcatttgtgtccctttgtcaacttcttcacaggttccagaagtgacaactgtccaaaataaaaaaccagtaataccggttttaagtagt

SEQ ID NO: 704993 - DNA, 120 bp, Artificial Sequence
  ENSG00000196455_27 (sequence is synthesized)
acaatcttaccatccacctatcagattcgaattacaacttgtaaaactgaacttcagcaactcatccagcaaaagcgggagcagtgcaatgctgagagaatagctaagcagatgatggaa

SEQ ID NO: 704994 - DNA, 120 bp, Artificial Sequence
  ENSG00000196455_28 (sequence is synthesized)
aatgctgaatgggagagtaaaccaccaccacctggatggcgtcctaaagggctgttagttgcccatcttcatgagcataaatctgctgtgaatcgaattagagtctctgatgaacactca

SEQ ID NO: 704995 - DNA, 120 bp, Artificial Sequence
  ENSG00000196455_29 (sequence is synthesized)
ctttttgcaacatgttcaaatgatggcacagtgaaaatctggaacagtcaaaagatggaggggaagaccaccactaccagatctattcttacatacagccgaattggaggacgagtcaag

SEQ ID NO: 704996 - DNA, 120 bp, Artificial Sequence
  ENSG00000196455_30 (sequence is synthesized)
acgctcacattctgccaaggctcccactatttagccatagcatctgataatggtgctgtccagcttcttggaattgaggcttctaagctgcccaagtctcctaaaatccatcctctacaa

SEQ ID NO: 704997 - DNA, 120 bp, Artificial Sequence
  ENSG00000196455_31 (sequence is synthesized)
agcagaattctagatcagaaggaggacggttgtgttgtggatatgcatcacttcaactctggagcacagtctgttcttgcctatgccactgtgaatggctctctggttggctgggacctt

SEQ ID NO: 704998 - DNA, 120 bp, Artificial Sequence
  ENSG00000196455_32 (sequence is synthesized)
aggtcttcaagcaatgcgtggactttaaagcatgatttaaagtcgggcctcatcacttcctttgctgtggacatccaccaatgctggctctgcattggtacaagcagtggtaccatggct

SEQ ID NO: 704999 - DNA, 120 bp, Artificial Sequence
  ENSG00000196455_33 (sequence is synthesized)
tgttgggacatgaggttccagttgccaatttcaagtcactgtcatccttccagggctcgaatcagacgcctctcaatgcaccctctgtatcagtcctgggtgattgcagctgttcagggc

SEQ ID NO: 705000 - DNA, 120 bp, Artificial Sequence
  ENSG00000196455_34 (sequence is synthesized)
aacaacgaagtgtccatgtgggacatggagactggtgacagaagatttactctctgggccagcagtgcaccaccactttctgaattacagccttctcctcatagcgtccatggtatctac

SEQ ID NO: 705001 - DNA, 120 bp, Artificial Sequence
  ENSG00000196455_35 (sequence is synthesized)
tgtagtcctgcagatggaaatcctatcctactaacagctggctcagatatgaaaataaggttttgggacttggcttacccagaaaggtcctatgttgttgcaggaagtactagttcccca

SEQ ID NO: 705002 - DNA, 120 bp, Artificial Sequence
  ENSG00000196455_36 (sequence is synthesized)
tctgtgtcctactacaggaaaataattgaaggcactgaagttgtccaggaaattcagaataagcagaaagtaggaccaagtgatgacacccctcgaaggggcccagagtccctgcccgtg

SEQ ID NO: 705003 - DNA, 120 bp, Artificial Sequence
  ENSG00000196455_37 (sequence is synthesized)
ggacatcatgacatcatcactgatgtcgccacattccagaccacacagggcttcatcgtaactgcttctagagatgggattgtgaaggtgtggaaataaaacctactgatttgtataaat

SEQ ID NO: 705004 - DNA, 120 bp, Artificial Sequence
  ENSG00000196455_38 (sequence is synthesized)
tttaatagttataaatataatactataactcgagaaaaggcatttctagagaacagattcatttgcttaattttcaaaattatgtctccatattactgtttcatgactgactgactaaat

SEQ ID NO: 705005 - DNA, 120 bp, Artificial Sequence
  ENSG00000196455_39 (sequence is synthesized)
gacacccaaaatggttaagatgtacttgactagtttacttatgcatctctttgcaagaatcagccagccaacaatgtctgggatttttattgtatatgttatagaggtgagaaatgtaaa

SEQ ID NO: 705006 - DNA, 120 bp, Artificial Sequence
  ENSG00000196455_40 (sequence is synthesized)
atatgaaaatgaatatgtttattttgtattgaaaaagatggttgaaaagatggttgtaagctattatagtataaacacatttttgctattaaaaatgctattcaaagcagttaaactgta

SEQ ID NO: 705007 - DNA, 120 bp, Artificial Sequence
  ENSG00000196455_41 (sequence is synthesized)
cttctaacctccattgttgctgaagattatataattacagtctgattcttcttcctttttaggagacctatattttcatttctgtgttgctgcctatgttggctggcaaagctcctcaat

SEQ ID NO: 705008 - DNA, 120 bp, Artificial Sequence
  ENSG00000196455_42 (sequence is synthesized)
tttctgtaagttcttaggatcttagcttttctgtggtgtccgagaatttcctgatgatttgccttgctgtgggtctttttaactttatcatgctgggtaggaagtgcaatgttctttcct

SEQ ID NO: 705009 - DNA, 120 bp, Artificial Sequence
  ENSG00000196455_43 (sequence is synthesized)
aagtgctgcacacccatccagtgtgaaataggctttacttagtccttgcctgttggaagggtgttgctgcctatgttggctggcaaagctcctcaattctcaagcctctgctgcaacaag

SEQ ID NO: 705010 - DNA, 120 bp, Artificial Sequence
  ENSG00000196455_44 (sequence is synthesized)
aataattgaaggcactgaagttgtccaggtactgtagtcttttcattcctttcaccttttgtaagcacaaacatggcttttgtaaacagaattgattaaaataaatggcttgaccaagcg

SEQ ID NO: 705011 - DNA, 120 bp, Artificial Sequence
  ENSG00000196456_0 (sequence is synthesized)
agcccggtgcccaagtcgccctcggggtggcagttcccgttaaccttagccacaaagtcaaagatggcaggaaagggacacagccggcgctgatgctgggaggcctccagggatggagag

SEQ ID NO: 705012 - DNA, 120 bp, Artificial Sequence
  ENSG00000196456_1 (sequence is synthesized)
tggcctggctggcaacggcacaggagctgggctggtgatgaaggtcaagcaggagaagccggagcggctgctgcagacgctggcgccgcaggccatgcttgtggagaaggacaaggagaa

SEQ ID NO: 705013 - DNA, 120 bp, Artificial Sequence
  ENSG00000196456_2 (sequence is synthesized)
catatttcagcagcaccggggcctcccgccacgccagaccatggggcggcctcgagccctggggggacaggaggagtctgggagtccaaggtgggcccctcccactgagcaggatgcggg

SEQ ID NO: 705014 - DNA, 120 bp, Artificial Sequence
  ENSG00000196456_3 (sequence is synthesized)
gctggcaggccgggctcccgggtcagcctccggccccctgagcccctcgctttcctccggcgagggtcactttgtatgcctggactgcgggaagaggttcagctggtggtcgtccctgaa

SEQ ID NO: 705015 - DNA, 120 bp, Artificial Sequence
  ENSG00000196456_4 (sequence is synthesized)
gatccaccagcgcacccacaccggggagaagccgtacctctgcggcaagtgcggcaagagcttcagccagaagccgaacctggcgcgccaccagcggcaccacacgggcgagcgaccctt

SEQ ID NO: 705016 - DNA, 120 bp, Artificial Sequence
  ENSG00000196456_5 (sequence is synthesized)
ctgctgccccgagtgcgcgcggcgcttcagccagaagcagcacctgctcaagcaccagaagacccactcccggcccgccacccactcgtgccccgagtgcgagcgctgcttccgtcacca

SEQ ID NO: 705017 - DNA, 120 bp, Artificial Sequence
  ENSG00000196456_6 (sequence is synthesized)
gctgcttccgtcaccaggtgggcctccgcatccaccagcgcgcgcacgcccgggaccgccagggctcccgcgccggcctgcacgagctgattcaggacgcggcggcgcgccgggcctgtc

SEQ ID NO: 705018 - DNA, 120 bp, Artificial Sequence
  ENSG00000196456_7 (sequence is synthesized)
ctggctggggctctgccagggctggtggggccagcccggggcccgggccgcggtctccggccccgaggggccgggcgagccgcgccagttcatctgcaacgagtgtggcaagagcttcac

SEQ ID NO: 705019 - DNA, 120 bp, Artificial Sequence
  ENSG00000196456_8 (sequence is synthesized)
caacgagtgtggcaagagcttcacctggtggtcgtcgctgaacatccaccagcgcatccacactggcgagcgcccctatgcgtgccccgagtgcggccgccgcttcagccagaagcccaa

SEQ ID NO: 705020 - DNA, 120 bp, Artificial Sequence
  ENSG00000196456_9 (sequence is synthesized)
cagaagcagcacctgctcaagcacctgcgcacgcacctgcccggcgcccaggctgcgccctgccccagctgcggtaagagctgccgcagccgcgccgcgctgcgcgcccaccagcgcgcc

SEQ ID NO: 705021 - DNA, 120 bp, Artificial Sequence
  ENSG00000196456_10 (sequence is synthesized)
gggcttggccgcgaggccgcggagctcccaacggtccccgggggcccgggacacgctgtggggccggggacaagcgggcctcgctgggcctggcgagccgcgccagttcatctgcaacga

SEQ ID NO: 705022 - DNA, 120 bp, Artificial Sequence
  ENSG00000196456_11 (sequence is synthesized)
tcgctgggcctggcgagccgcgccagttcatctgcaacgagtgcggcaagagcttctcgtggtggtcggcgctcaccatccaccagcgcatccacacgggtgagcggccctacccgtgcc

SEQ ID NO: 705023 - DNA, 120 bp, Artificial Sequence
  ENSG00000196456_12 (sequence is synthesized)
ccgagtgcggccgccgcttcagccagaagcccaacctgacgcggcaccggcgcaaccacacaggcgagcggccctacctgtgtcccgcctgcggccgcggcttcagccagaagcagcacc

SEQ ID NO: 705024 - DNA, 120 bp, Artificial Sequence
  ENSG00000196456_13 (sequence is synthesized)
tgctcaagcaccagcgcgtgcaccgcgcggcccctgcgtgcagccccaaggaggaggcgcgctagtggactggacctcagcggacccgtggtggtgcgggggatgtttgcggggtgtgtg

SEQ ID NO: 705025 - DNA, 120 bp, Artificial Sequence
  ENSG00000196456_14 (sequence is synthesized)
tggggagtgggggtggccaggattgctggctcttagaaccccttagagcgggaccggtggattccttaaggctctgaagggctgagaacagttctagaagcgtcccaaagggtgctggga

SEQ ID NO: 705026 - DNA, 120 bp, Artificial Sequence
  ENSG00000196456_15 (sequence is synthesized)
aaggtcccagcgtgggttgagggaggagggaagatccgagttcctcaccgcgggccgggatgtgaccaccctcttcagaggttggaccccaggcttcaagcaccgagtgaggggtctgtt

SEQ ID NO: 705027 - DNA, 120 bp, Artificial Sequence
  ENSG00000196456_16 (sequence is synthesized)
ggggacgctgggagagtctctggtgtgaagtggcttaggtctggactggtcagctgtggcaccagccggtcctgcccacgcttcaggatggccgggggctgcccctgtgggagagttgcc

SEQ ID NO: 705028 - DNA, 120 bp, Artificial Sequence
  ENSG00000196456_17 (sequence is synthesized)
aagactcggcgataccaaggatggaagccagaggctgtggcgagggagagccaagcatattcccagcaccagggccactgctggcacgtcgtagacatccaataaatatttttggaagga

SEQ ID NO: 705029 - DNA, 120 bp, Artificial Sequence
  ENSG00000196456_18 (sequence is synthesized)
attgtctctagggctttctgtcttgctgtaacgtctctccagccagctgcagctcctgctgacttatcccaccccagcgcaggtcatccaacggtgacttatggccccggcctcctggct

SEQ ID NO: 705030 - DNA, 120 bp, Artificial Sequence
  ENSG00000196456_19 (sequence is synthesized)
cccggcggggggaggttggggacgggcctggcagttgtgaactcgaacctgccgctgtcgccgcggcggggcggggagcgagagtgggccgcggaggccggccttcgggctccatggacg

SEQ ID NO: 705031 - DNA, 120 bp, Artificial Sequence
  ENSG00000196458_0 (sequence is synthesized)
gtagttctgcgcgttcacgtccccgatcgggccgtgtccgccgcggccctgcgaggtccgagggactcattctgatgaaggaaagagcgtccctgtgcagctgcgtgtccttcagttctt

SEQ ID NO: 705032 - DNA, 120 bp, Artificial Sequence
  ENSG00000196458_1 (sequence is synthesized)
tggctctgattccgtgtctggcttcatctaagtggcctggtccatgggcagtgaagaaatgtaaagtgcaatagccctctggaacaagacaattcatgtgagataagaaagaagagccca

SEQ ID NO: 705033 - DNA, 120 bp, Artificial Sequence
  ENSG00000196458_2 (sequence is synthesized)
caagaccaaggatgtattctcagtttacagaccactgaccagaggccactccagggtgtcaggactaagagaagtcacaaaacagcagatttcccaagagcagcggaaaatgatccagtc

SEQ ID NO: 705034 - DNA, 120 bp, Artificial Sequence
  ENSG00000196458_3 (sequence is synthesized)
acagatatcatttgaggatgtggctgtggatttcacgctggaggaatggcagctacttaatcctactcagaagaacttgtacagagatgtgatgttggagaactatagcaatctggtttt

SEQ ID NO: 705035 - DNA, 120 bp, Artificial Sequence
  ENSG00000196458_4 (sequence is synthesized)
cttggaagtctggctagataatcccaaaatgtggctccgagataatcaagacaaccttaaaagtatggagagaggccataaatatgatgtttttggaaaaatatttaattcaagcataaa

SEQ ID NO: 705036 - DNA, 120 bp, Artificial Sequence
  ENSG00000196458_5 (sequence is synthesized)
cattgttcatgtaggactgcgatcccataaatgtggcacaggagaaaaaagtttgaaatgtccttttgatttgcttattccaaaaaataattgtgaaagaaagaaaattgatgaactcaa

SEQ ID NO: 705037 - DNA, 120 bp, Artificial Sequence
  ENSG00000196458_6 (sequence is synthesized)
taagaaattattgttctgtatcaaacctggcagaacccatggtgggataaaatactgtgattgcagtacatgtagaaaatccagcaacgaagagccatggctcactgctaatcacataac

SEQ ID NO: 705038 - DNA, 120 bp, Artificial Sequence
  ENSG00000196458_7 (sequence is synthesized)
acacacaggagtctatttatgcatggaatgtggcagattttttaacaagaagtcacaacttgttatacaccagagaactcatacaggagagaagccctatcaatgcagtgagtgtggaaa

SEQ ID NO: 705039 - DNA, 120 bp, Artificial Sequence
  ENSG00000196458_8 (sequence is synthesized)
agccttttcacagaagtcactgctcacggttcatcaaagaactcactcaggagaaaaaccgcatgggtgcagcgaatgtcagaaagcttttagtaggaagtcactcctcattttacatca

SEQ ID NO: 705040 - DNA, 120 bp, Artificial Sequence
  ENSG00000196458_9 (sequence is synthesized)
gagaattcatactggagagaagccgtatggatgcagtgaatgtggaaaagccttcagtaggaagtcgcagcttaaaagacatcagataacgcacacaatagagaaaccctacagttgcag

SEQ ID NO: 705041 - DNA, 120 bp, Artificial Sequence
  ENSG00000196458_10 (sequence is synthesized)
tgagtgtgggaaagcattctcccagaaattaaaactcatcacacatcagagagcgcacacaggagagaaaccctatccatgtagtcactgtggaaaagccttcttttggaagtcgcagct

SEQ ID NO: 705042 - DNA, 120 bp, Artificial Sequence
  ENSG00000196458_11 (sequence is synthesized)
gattactcatcagaggacccacacagggaagaaaccttacggatgtggtgagtgtcaaaaagccttcagcaggaactcacttctcattaggcatcagaggattcatacaggagagaagcc

SEQ ID NO: 705043 - DNA, 120 bp, Artificial Sequence
  ENSG00000196458_12 (sequence is synthesized)
ctacgaatgcaacgaatgtggtgaagccttcatcagaaaaccacagctgattaaacatcagataactcacacaggagagaagaactatcgatgcagtgattgtgaggaggccttctttaa

SEQ ID NO: 705044 - DNA, 120 bp, Artificial Sequence
  ENSG00000196458_13 (sequence is synthesized)
gaagtcagagttaataagacatcaaaaaattcacttaggagagaaaccatatggatgcattcaatgtgggaaaaccttctttgggaagtcccagctcctaacgcatcacagaacacacac

SEQ ID NO: 705045 - DNA, 120 bp, Artificial Sequence
  ENSG00000196458_14 (sequence is synthesized)
tggggagaagccttatgaatgcagtgagtgtgggaaggccttcacccagaagtcaagcctgatatcacatcagagaacacatacaggtgagaaaccctatgaatgcagtgaatgcaggaa

SEQ ID NO: 705046 - DNA, 120 bp, Artificial Sequence
  ENSG00000196458_15 (sequence is synthesized)
aaccttcagtgagaagtcaagtctcattcatcatcagagaacccatactggagaaaagccctttgaatgtagtgaatgtaggaaagcttttgcctggaagccacagcttcttaggcatca

SEQ ID NO: 705047 - DNA, 120 bp, Artificial Sequence
  ENSG00000196458_16 (sequence is synthesized)
gagaattcatacaggggagaaaccctatgaatgcagtgaatgtgggaaagcatttgttcagaaagtgcagctcattaagcatcaaagaaatcacacaggagagaaaacctatggatgcag

SEQ ID NO: 705048 - DNA, 120 bp, Artificial Sequence
  ENSG00000196458_17 (sequence is synthesized)
cgattgtgcaaaagctttctttgagaaggcacagctgattatacatcagagaattcatacaggagagagaccatataaatgtggtgaatgtgggaaatctttcacaagaaagtcacacct

SEQ ID NO: 705049 - DNA, 120 bp, Artificial Sequence
  ENSG00000196458_18 (sequence is synthesized)
tatgaggcatcagaggattcatacaggagataaatactatggatgcaatgagtgtgggaccaccttcaacaggaagtcgcagcttatgatacatcagagaaatcatataatataaaaatc

SEQ ID NO: 705050 - DNA, 120 bp, Artificial Sequence
  ENSG00000196458_19 (sequence is synthesized)
atgactttggcgaatgcagaaaggttgctatcaagtgtcatactttctgacacttttgaggatgcatgtgggagagaaaccctattgaggcagtgactgttgaaaaagcttgaattgagg

SEQ ID NO: 705051 - DNA, 120 bp, Artificial Sequence
  ENSG00000196458_20 (sequence is synthesized)
agtcaagagtcactaagcagaatttagaaagagaagtttttaaaaagcaaacagtgtaaaaaaagtcatctcccagaagacactactcgttacatattggatgactcattgaggtgaaaa

SEQ ID NO: 705052 - DNA, 120 bp, Artificial Sequence
  ENSG00000196458_21 (sequence is synthesized)
ccttattagtgttgtgatagtagagaagcttttagtcaaaagtcagtttattaaatgtttagaatacctaaacaggaagaaaattctattgttttttataacaaagtggaagatttcaag

SEQ ID NO: 705053 - DNA, 120 bp, Artificial Sequence
  ENSG00000196458_22 (sequence is synthesized)
aaaggacaactcactgtacacttgagaataatacctacagaggttcatactgaagagtagtctcaataatgtaaagaatttgacaagcatgatgctattgaaatagttctgtaaggaagt

SEQ ID NO: 705054 - DNA, 120 bp, Artificial Sequence
  ENSG00000196458_23 (sequence is synthesized)
ggtgttctttatacatcaattattacaaaaagcagtgaattgtaagtgtgaggtgtgtttacttagatgtgaagagttctccttactgctgtgatggaataacaagggtcagatttcctc

SEQ ID NO: 705055 - DNA, 120 bp, Artificial Sequence
  ENSG00000196458_24 (sequence is synthesized)
tcctgccttaaacaactggaagctatacaatacgtataataggtaatggtttttagacataggacaagcacaggtttgtgatcctcaggagactgcagacagagtgaggtgagcaccatg

SEQ ID NO: 705056 - DNA, 120 bp, Artificial Sequence
  ENSG00000196458_25 (sequence is synthesized)
gtttctcagcctgcccccgcatggcagttcctaggttgcagttcagggaagggaaacaataaatctcgctgaattgaagagacaggactggcagttggggaggccacagcagctagaatt

SEQ ID NO: 705057 - DNA, 120 bp, Artificial Sequence
  ENSG00000196458_26 (sequence is synthesized)
tccaggggaaagtactggagagatgggatccttctagatacagggctcaagaagtctgctgggagtcccctgagtcctttgacttagtactgacttgcactgaggccaggaaaagaagca

SEQ ID NO: 705058 - DNA, 120 bp, Artificial Sequence
  ENSG00000196458_27 (sequence is synthesized)
ctggaaagcagcaggctgaacaattcctggaactcatgcagggctgggaatagtttatgttctcagcagccagagtggaaacagagtggaaacacatggagcatcaggtagaattctcag

SEQ ID NO: 705059 - DNA, 120 bp, Artificial Sequence
  ENSG00000196458_28 (sequence is synthesized)
aaaggttttgttttagtagtgcagctaattaactctagattaaaagctactctggacctacagtgtccggcatccaaaaaaactaatgtgttatgcaaagaagcaataaaatatgactta

SEQ ID NO: 705060 - DNA, 120 bp, Artificial Sequence
  ENSG00000196458_29 (sequence is synthesized)
taaccaggagaaaaatcagtagaaacccagaaaagacagaggtgatggaattagtagacaaggatattaaaagagctattgtaaatataaagtagaggaaaacataagattgatgaaacc

SEQ ID NO: 705061 - DNA, 120 bp, Artificial Sequence
  ENSG00000196458_30 (sequence is synthesized)
tgaggtataagagatatttttactggccaaaatggaacttctagggatgaaatcaacttctgattttgttaaaatcccgagtggagagattagatacagaaaaagaagaaaaaatcaatg

SEQ ID NO: 705062 - DNA, 120 bp, Artificial Sequence
  ENSG00000196458_31 (sequence is synthesized)
aacttgaagagtaagaataaaaactaccaaagtgatatacagagagaaaaaaagacttagagaagaggaagagaataggaaaaccattacagtagtgtaatatatgtttaactggagtcc

SEQ ID NO: 705063 - DNA, 120 bp, Artificial Sequence
  ENSG00000196458_32 (sequence is synthesized)
cagaaggagaggagaaaatgaagaggcatgaagaagtatttgaataaataatggctaaagattttccaaatctggtgaaaacaatacccccacatattcaagaagctcaaatgacctgaa

SEQ ID NO: 705064 - DNA, 120 bp, Artificial Sequence
  ENSG00000196458_33 (sequence is synthesized)
gtagaataaacataatttacatcacagcagtgcacctcagagtcacattcatgaaaagcactgataaacagaatacttttaaaacaccttgagaaaaaaagataatacatacacatgaac

SEQ ID NO: 705065 - DNA, 120 bp, Artificial Sequence
  ENSG00000196458_34 (sequence is synthesized)
aaagaatggcagcatatttctggtgagaactatgcaagctataagacaatggagtattatctctaaattccttaatgaaataaacaacaaaccctgcaacctagaattctgttactgtca

SEQ ID NO: 705066 - DNA, 120 bp, Artificial Sequence
  ENSG00000196458_35 (sequence is synthesized)
aaaacgttttcaaaaatgaaggcaaaataaagactgtttctgagaaactaaatcaaaggtaattttattacctgtagacctgtctttgggaaacattaaaggatgtttgagggcagcagg

SEQ ID NO: 705067 - DNA, 120 bp, Artificial Sequence
  ENSG00000196458_36 (sequence is synthesized)
aaaataatacaaaacttaagtttgggtctgtacaaaggaatgaagttctgaaaatggtgaatatgtgggtaaatataaaagatatttctctctttttaaaatctttttaaaagggaattg

SEQ ID NO: 705068 - DNA, 120 bp, Artificial Sequence
  ENSG00000196458_37 (sequence is synthesized)
gctgcttaaagccaaagtaatgataacgtatttggagtttatttagaagtaaagtgtgatgacgataacacttaagtgtgaatttttaaatatagttgagtagactgcatcatctgagtt

SEQ ID NO: 705069 - DNA, 120 bp, Artificial Sequence
  ENSG00000196458_38 (sequence is synthesized)
tttctttgatcccttttcccccattttctgctctgctcccccctgaggctgtcttctagagactggggtttcttcataggtttgaacagtgggagataccagaggtgggaggagaaaaag

SEQ ID NO: 705070 - DNA, 120 bp, Artificial Sequence
  ENSG00000196458_39 (sequence is synthesized)
ttatttattaccgttcccttcctcctgcctggaccatggtagcttctgtgttcccgtaaggatacagcttcctttgggaagccccatctatggctgtagatctctcggtttcagttgaca

SEQ ID NO: 705071 - DNA, 120 bp, Artificial Sequence
  ENSG00000196458_40 (sequence is synthesized)
ccattccctctccatgatcttcagacttaactactactgggtgcttccccaacccactggttgggtgtctttaattgtgaacacatatttgtaaatagtgcctttattaattgttcttga

SEQ ID NO: 705072 - DNA, 120 bp, Artificial Sequence
  ENSG00000196458_41 (sequence is synthesized)
gttaatattctgagtgtgccatttattttctgtgccatctgttaaatgatgagcatttaataaaattgtgataatcagttatcagtacaagtgccgcatagtgcataggctgaaatgtct

SEQ ID NO: 705073 - DNA, 120 bp, Artificial Sequence
  ENSG00000196458_42 (sequence is synthesized)
caagattccccacactacatatcagtattttctatctgtatctggacaatgcagtagaaattataacaaatacaaagttctttgtgcttttctgctgcatatgtcagtggctctggagat

SEQ ID NO: 705074 - DNA, 120 bp, Artificial Sequence
  ENSG00000196458_43 (sequence is synthesized)
tgttaccatctgctacatatataaatagacttgcagttattactaagctcctcttcagtaatagaaagacttatgaagtcttttactacctctgggttagccaaacaaccttcaaaaagc

SEQ ID NO: 705075 - DNA, 120 bp, Artificial Sequence
  ENSG00000196458_44 (sequence is synthesized)
attgttatttaggttaaatatctgtggacaagaaacaagataatcagttactgagtgaagaaagacgggaatgatgtcccatacttcccagctctctaaagtgttatgctgtacaattaa

SEQ ID NO: 705076 - DNA, 120 bp, Artificial Sequence
  ENSG00000196458_45 (sequence is synthesized)
aatacccctgacccatcatctgctaccattcgttgtggataattcatgtaatctctaacctgtgggcaagtctttacccttcagtagtcaagattacgttagagacttcgtccacgaatc

SEQ ID NO: 705077 - DNA, 120 bp, Artificial Sequence
  ENSG00000196458_46 (sequence is synthesized)
cacaccacctttcccatcagttctcaccggaaatatgctgccaaaaagaaaatcagcttttctaagatcaagccagagttgcttctcttacaaccttacggcgctaatgcattaagttga

SEQ ID NO: 705078 - DNA, 120 bp, Artificial Sequence
  ENSG00000196458_47 (sequence is synthesized)
agtcgactgccaaagaggcccagcagagggcagcacccccatcatttttttgaatttctcccttaggaattttgccttcctttgtcttctgtccaccaggccttctctccagctggacac

SEQ ID NO: 705079 - DNA, 120 bp, Artificial Sequence
  ENSG00000196458_48 (sequence is synthesized)
aaacctcctttgaagggaaataattgccgttaggcttcacagtagtgctttttcctttcacttggatttgcattttaacctgcatttcgaagatttttatacatgttttctatttccgac

SEQ ID NO: 705080 - DNA, 120 bp, Artificial Sequence
  ENSG00000196458_49 (sequence is synthesized)
aatgccaggaggcttcattgacgttgtagtctgtgttaataaacttgtgtatcactctgctctgatcttttaggaattaacttgcaaatgaaatgaatatgttgggactttggcataatt

SEQ ID NO: 705081 - DNA, 120 bp, Artificial Sequence
  ENSG00000196458_50 (sequence is synthesized)
tgaatatagcattgtgtgagttgtgattgtctcttcctaattgtgctgtaataacctgtgtatgagaataaaatgatttccaccatcaggattctcccatgcccccctttattttgccat

SEQ ID NO: 705082 - DNA, 120 bp, Artificial Sequence
  ENSG00000196458_51 (sequence is synthesized)
agactaaaggggaaaggccattctcactctccttaccttagaaaattttatttgcctcatgatgactgtctgccgcttagaagtagacaatataaaatctcatcactatttcacaagaat

SEQ ID NO: 705083 - DNA, 120 bp, Artificial Sequence
  ENSG00000196458_52 (sequence is synthesized)
aaaattcaaatcagttatatccaaagtaacttttcaactgggggtggtgtctcacacctgtaatcccagtgcttggggaggccaaattgggaggaccgcttgagcccaggcgtttgagac

SEQ ID NO: 705084 - DNA, 120 bp, Artificial Sequence
  ENSG00000196458_53 (sequence is synthesized)
cccaggcgtttgagaccagctggacaacatagcaagactcatctctacaaaaaaaaaatttaattagccatgagaggctgggtgcagtgacgcaagcctgtaatcccagcactttgggag

SEQ ID NO: 705085 - DNA, 78 bp, Artificial Sequence
  ENSG00000196458_54 (sequence is synthesized)
ggcagaaggggggccactgcattccagcctgagtgacagagtgaaaccttgcctcttaaatgaataaaaataaagtaa

SEQ ID NO: 705086 - DNA, 120 bp, Artificial Sequence
  ENSG00000196458_55 (sequence is synthesized)
gagtgaaaccttgcctcttaaatgaataaaaataaagtaagctttcttcaacaagttttcttccaacgccacacactccatcaccatattaatttaaattatttagtatgtagcagattt

SEQ ID NO: 705087 - DNA, 120 bp, Artificial Sequence
  ENSG00000196458_56 (sequence is synthesized)
actttgagaccaaatctgtgaagttggtgatgatatttaataattctttatttcccttatgggatctttgcaacttagaacacaattattactcattgtatccgggtcatttaacatctt

SEQ ID NO: 705088 - DNA, 62 bp, Artificial Sequence
  ENSG00000196458_57 (sequence is synthesized)
cacaattattactcattgtatccgggtcatttaacatcttgtcagaatgctaacattaaata

SEQ ID NO: 705089 - DNA, 90 bp, Artificial Sequence
  ENSG00000196458_58 (sequence is synthesized)
gctctgtctcaaaaaaataaataaatcaggcgctgggcgcggtggctcacacctgtaatcataacactttgggaggctaaggcaggcaga

SEQ ID NO: 705090 - DNA, 63 bp, Artificial Sequence
  ENSG00000196458_59 (sequence is synthesized)
tctactaaaaatgcaaaaattagccgggcttggtggcacgtcgatgttgcagtgagctgagat

SEQ ID NO: 705091 - DNA, 120 bp, Artificial Sequence
  ENSG00000196458_60 (sequence is synthesized)
catcacacacacacacaaaaaaacagggaacaccaaacttatttagtgatacctaaatctcgaaatgtgcacagcaaaaagaatgtagctatcgaggcattcactgttaagatgaaaaga

SEQ ID NO: 705092 - DNA, 120 bp, Artificial Sequence
  ENSG00000196458_61 (sequence is synthesized)
gaatgtagctatcgaggcattcactgttaagatgaaaagaaatgtaagtgaagggacatttataacttgaagttctcatttaagaattactggccagggccgggcatggtggctcatgcc

SEQ ID NO: 705093 - DNA, 65 bp, Artificial Sequence
  ENSG00000196458_62 (sequence is synthesized)
gtgagctgagatcgcgccactgcactcactctggcctgctggccagatgtggtggctcatgcctg

SEQ ID NO: 705094 - DNA, 120 bp, Artificial Sequence
  ENSG00000196458_63 (sequence is synthesized)
aaaaaaggcattactggccagatgtggtggctcatgcctgcaatcccaggactttgggaggcccagctgggaggagaggagagcttgagcccaagagtttgaggccagcctgggcaacat

SEQ ID NO: 705095 - DNA, 120 bp, Artificial Sequence
  ENSG00000196458_64 (sequence is synthesized)
agtggcactttgttctccacaaaaataattaataaagcaagtaagcattcctatcactaaaagtacttaaaaaaacaaatcaagcttaaacttacaatagggggtgggagaagtgaatta

SEQ ID NO: 705096 - DNA, 120 bp, Artificial Sequence
  ENSG00000196458_65 (sequence is synthesized)
actttttattttcattagtgcgtgctcatgtgaaaggagcagttaggcaatggagtgttaccactgcagccaggcaggtctagtgtagattcgtccccaaaccatggtatttgccaggca

SEQ ID NO: 705097 - DNA, 120 bp, Artificial Sequence
  ENSG00000196458_66 (sequence is synthesized)
gctctgagggtatgaacaaggcatgtgcattgtgtcctgttgtgtgtaatgcgtttgtatgaagcagattctgtaagaagatgatgttggctgagatgtgggccagctgtacttcactgc

SEQ ID NO: 705098 - DNA, 71 bp, Artificial Sequence
  ENSG00000196458_67 (sequence is synthesized)
atgatgttggctgagatgtgggccagctgtacttcactgcttcattacaagggtaaggctggccaggtgcg

SEQ ID NO: 705099 - DNA, 120 bp, Artificial Sequence
  ENSG00000196458_68 (sequence is synthesized)
ggcaaaaccctatctctactaaacatacaaaacaaaaaaaatagccgggtgtggtggagcacctgtaaacccagctgctcgggaggctgaggtgggcaaatcacatgaacccaggagttg

SEQ ID NO: 705100 - DNA, 83 bp, Artificial Sequence
  ENSG00000196458_69 (sequence is synthesized)
gagaaaacaagggtggggctaaaaggctaatagctaactgaaaatgagcagctgtttttcattctgtgaggagcatcttgtat

SEQ ID NO: 705101 - DNA, 120 bp, Artificial Sequence
  ENSG00000196458_70 (sequence is synthesized)
atgagcagctgtttttcattctgtgaggagcatcttgtataagccgtagtgtttgatccactcatcattgcatgggcagctgtgcgaggtcagacctgttactgacacttccttctgtgc

SEQ ID NO: 705102 - DNA, 120 bp, Artificial Sequence
  ENSG00000196458_71 (sequence is synthesized)
tctgtttgaaaagaaaatctctgtatgcaaatgttaactgagtaaactgtttcatgaattcatatgtgtgagtgtgatcactgggagcaatttgcaaataaactctggtttccattccaa

SEQ ID NO: 705103 - DNA, 120 bp, Artificial Sequence
  ENSG00000196458_72 (sequence is synthesized)
gacacacaaagacgagaaaagggctcttgctgtaggtcttctcgctcagtttacctcactttctggaaaggtgccactggcctcgtgccacttgttatcttcctggctagccggttagcc

SEQ ID NO: 705104 - DNA, 120 bp, Artificial Sequence
  ENSG00000196458_73 (sequence is synthesized)
ccttgcctgtggggcccttgccgtgtgcttgggagtcacctgcttcagccctgggagcttcagagctgctcgacaaccattcctaggccacgtggcctcgctccacaggtgtagatggca

SEQ ID NO: 705105 - DNA, 120 bp, Artificial Sequence
  ENSG00000196458_74 (sequence is synthesized)
agtcacaggtgggttatcggtttatcctctgtttcatgaaaatgatccagtcacaggtgggttatcggtttatcctctgtttcatgaaaatgatccagtcacaggtgggttatcggttta

SEQ ID NO: 705106 - DNA, 120 bp, Artificial Sequence
  ENSG00000196458_75 (sequence is synthesized)
gtgttatgaggcttacagaaatctctgcaacacacagaagggtctaaatacatttaaataagagaaaatataaacttgggaaagaagatgtccaaagaagcacaaagtagattatagaaa

SEQ ID NO: 705107 - DNA, 66 bp, Artificial Sequence
  ENSG00000196458_76 (sequence is synthesized)
aaagaagatgtccaaagaagcacaaagtagattatagaaacatacaaaagtcagggcagatcattt

SEQ ID NO: 705108 - DNA, 120 bp, Artificial Sequence
  ENSG00000196458_77 (sequence is synthesized)
ccagccagggtgacagagtgagaaaaagaatcatacaaaagtcttaaagttggaagagatcaataagaaatgggatccttccctgttacagagttgaactgcaagcttttctgttatttc

SEQ ID NO: 705109 - DNA, 120 bp, Artificial Sequence
  ENSG00000196458_78 (sequence is synthesized)
cagaagccataacagaaagggaagtaggaatagttaacgtgggttcctcttgtcaaaaggaaaaagcagacaaattactctggagaagcaaatacttccgataattacacataaagaaaa

SEQ ID NO: 705110 - DNA, 120 bp, Artificial Sequence
  ENSG00000196458_79 (sequence is synthesized)
tatactgaattgaaagattttcattcacttgctttattttgcagcctttataataaaacattctacatatttaagactcttagcccaggcagttaggtccaagtcctctgtgtttccaat

SEQ ID NO: 705111 - DNA, 120 bp, Artificial Sequence
  ENSG00000196459_0 (sequence is synthesized)
acatcccagggtatcgcgagaactgcttcggcgttctggctacaggttcggggcgcgggtctcttccgcggaaactgacattgcgtttccgttgtcggcctcccactgcaggagccatat

SEQ ID NO: 705112 - DNA, 120 bp, Artificial Sequence
  ENSG00000196459_1 (sequence is synthesized)
attgaagaccatgtctgggagcttctactttgtaattgttggccaccatgataatccagtttttgaaatggagtttttgccagctgggaaggcagaatccaaagacgaccatcgtcatct

SEQ ID NO: 705113 - DNA, 120 bp, Artificial Sequence
  ENSG00000196459_2 (sequence is synthesized)
gaaccagttcatagctcatgctgctctcgacctcgtagatgagaacatgtggctatcgaacaacatgtacttgaaaactgtggacaagttcaacgagtggtttgtgtcggcatttgtcac

SEQ ID NO: 705114 - DNA, 120 bp, Artificial Sequence
  ENSG00000196459_3 (sequence is synthesized)
tgcggggcatatgaggtttattatgcttcatgacataagacaagaagatggaataaagaacttctttactgatgtttatgatttatatataaagttttcaatgaatccattttatgaacc

SEQ ID NO: 705115 - DNA, 120 bp, Artificial Sequence
  ENSG00000196459_4 (sequence is synthesized)
caattctcctattcgatcaagtgcatttgacagaaaagttcagtttcttgggaagaaacaccttttaagctgaatgcagaaaattccaaaataaatgatgtcaccacaatggtgtatact

SEQ ID NO: 705116 - DNA, 120 bp, Artificial Sequence
  ENSG00000196459_5 (sequence is synthesized)
caggaatgtgtacattgtaagttacttgattaaatagcctggaaaacttttgtgtattctcagcttatctaaacctaatgaaattccttttatatttaaaaatagtacattctgtctcat

SEQ ID NO: 705117 - DNA, 120 bp, Artificial Sequence
  ENSG00000196459_6 (sequence is synthesized)
gtcacgtatcaatagatcaattggtatttccttgtgaacagtgttatttataaagagttcattatcaataatcatgttttttttttttttttttttctgatacagagtctcactctgttg

SEQ ID NO: 705118 - DNA, 88 bp, Artificial Sequence
  ENSG00000196459_7 (sequence is synthesized)
ttacaggcgtgagccaccgtgcccaaccatgaaatatttttacttaaaaattgggaataagctcgtgttgtgcaggctgtagtgcagt

SEQ ID NO: 705119 - DNA, 120 bp, Artificial Sequence
  ENSG00000196459_8 (sequence is synthesized)
agtgctgggattacaggcgtgtgagccaccacgcccggccatgaaatatttttacttaaaaattgggaataagctttttggttttttgtgggtttttgtttttgttttttgttttttgtt

SEQ ID NO: 705120 - DNA, 82 bp, Artificial Sequence
  ENSG00000196459_9 (sequence is synthesized)
ttacaggcatgaaccaccgtgcccggccaggaataagcttttgacttacccaattcagataggttgatctttggggtccagg

SEQ ID NO: 705121 - DNA, 60 bp, Artificial Sequence
  ENSG00000196459_10 (sequence is synthesized)
gggggttgtttcaccgtaacctctgcctcctgacttcaagcaattctcctgcctcagcct

SEQ ID NO: 705122 - DNA, 120 bp, Artificial Sequence
  ENSG00000196459_11 (sequence is synthesized)
gcccagataggttgatcttaatgtaacaacccaaaaataaatgtcatagtcaagatttggtagataaatttaaaattaaaatattctgcagttgggagtgaaatgtgatagcacatacgt

SEQ ID NO: 705123 - DNA, 120 bp, Artificial Sequence
  ENSG00000196459_12 (sequence is synthesized)
tgacattatgcatttagagatgttataaaaatgtataggcagtatacacagcactactcaagaagccaaagaaacacttgtgcagtgctaagtgtcacatgtctgcttccaccagaggct

SEQ ID NO: 705124 - DNA, 120 bp, Artificial Sequence
  ENSG00000196459_13 (sequence is synthesized)
aggaatagtgatcctgctataatgtgagaacccaaatcatgtttataaaataggacgctgggagcagttgcaggccacagtgaagtgtgttgcttctgtcactttatattcttatatttc

SEQ ID NO: 705125 - DNA, 120 bp, Artificial Sequence
  ENSG00000196459_14 (sequence is synthesized)
ctttccctcagacagtaaactgttgatactcgtacttgtaaaaaattgtaaggcaatttttagtattgttgtcaaagaaaagcttggattacattaacatttgtattcagtcttttaggt

SEQ ID NO: 705126 - DNA, 120 bp, Artificial Sequence
  ENSG00000196459_15 (sequence is synthesized)
gatacaccagagggggctgggaattgtctctttgttcctataagtagatcttaatgtaaaatagtaaatgtccattgaaaagcaagtaatacagcctgtgctaattgggagcacttgaac

SEQ ID NO: 705127 - DNA, 120 bp, Artificial Sequence
  ENSG00000196459_16 (sequence is synthesized)
aattttgttccattctgagtaacttttgagcaagtaattctaagctttgtcttgtatccttgtgtgaaattgcataatttttaccctatttgatttcttaaataaagatgtttgctcaag

SEQ ID NO: 705128 - DNA, 120 bp, Artificial Sequence
  ENSG00000196459_17 (sequence is synthesized)
gcgagaactgcttcggcgttctggctacaggttcggggcgcgggtctcttccgcggaaactgacattgcgtttccgttgtcggcctcccactgcagtatcaccttctcccccaagtgtga

SEQ ID NO: 705129 - DNA, 120 bp, Artificial Sequence
  ENSG00000196459_18 (sequence is synthesized)
caaccaaagatgtctccagatattgccagatgtcctcttggaagcaagatcgctccgggttgagatccacagagctaaacgttttagagtaccaaccattgtgtgctgtgaggtaaagga

SEQ ID NO: 705130 - DNA, 120 bp, Artificial Sequence
  ENSG00000196459_19 (sequence is synthesized)
ttttttttttttttttttttgctgctgcttaaatgtactgaagaaagtaagaagcccttcccttggcaaactccagctctgaaatctagtccagcaagaattcatgatatcattgtttac

SEQ ID NO: 705131 - DNA, 120 bp, Artificial Sequence
  ENSG00000196459_20 (sequence is synthesized)
atcattgtttacttggttcaaatttcaactccctgtccttcccttcactttggagaattattgccagttcttctagttttgcatagcttttttatcattccagctcgtctttgttatcca

SEQ ID NO: 705132 - DNA, 120 bp, Artificial Sequence
  ENSG00000196459_21 (sequence is synthesized)
ctttttctgtttggacctttttcttatctttcccctaaaacaggggcaaacattttctttaaagggccagatagtaaatattgttggctttgtgggacagctggtctgtgtcacaggtgc

SEQ ID NO: 705133 - DNA, 120 bp, Artificial Sequence
  ENSG00000196459_22 (sequence is synthesized)
ttaactctgccattgaagcgtgagagcagccttagatggtcgcaaaatgatgggcaaggctagatttggcctgcagtctatagtcccccacccctccacccctgccccaaatagcatttt

SEQ ID NO: 705134 - DNA, 120 bp, Artificial Sequence
  ENSG00000196459_23 (sequence is synthesized)
aaatcttacgtcatcatgccaggagttctgatctgccttttcttccatagtcatggccttccaattctagagttaaaagtgccagctgtgccttgatttcctttataaaatgtgtcattc

SEQ ID NO: 705135 - DNA, 120 bp, Artificial Sequence
  ENSG00000196459_24 (sequence is synthesized)
attagcaagtacatatcagatttcttctgatttcattgtgtgttctgtgtgaatcagcagaaggcccaatgaggcttgctaagtcttggcttctaacacacctcagatgtatgttctagg

SEQ ID NO: 705136 - DNA, 120 bp, Artificial Sequence
  ENSG00000196459_25 (sequence is synthesized)
agactgactgtaactcccggtttacttgatttccactccgtgttgagaagttactagtcaccacatcccagtgtgcatacggtctcccatgttattccactaacattaattgagcatgta

SEQ ID NO: 705137 - DNA, 120 bp, Artificial Sequence
  ENSG00000196459_26 (sequence is synthesized)
ctgtgggtcagacactgtactgggtactttacatgcattagattgtgtgatcctcataagtgcaccataaggtgctacagtgttagcactatttaacagatgagaaaacggacattagga

SEQ ID NO: 705138 - DNA, 120 bp, Artificial Sequence
  ENSG00000196459_27 (sequence is synthesized)
agttaaggactgcctgtggtcacactgccagtaagtagcagagctagacctgaacctaactttgactccaaagtccttgtgttaaaaatacacaccgtggggttaccttggggtaaatcc

SEQ ID NO: 705139 - DNA, 120 bp, Artificial Sequence
  ENSG00000196459_28 (sequence is synthesized)
atccatgcccccacccatccatcattcatctagatttcaattatctgtgctaaaagccatggaatcacttatatttttccccccagtttctcgtagtttcatctcttctgccaatctgtt

SEQ ID NO: 705140 - DNA, 86 bp, Artificial Sequence
  ENSG00000196459_29 (sequence is synthesized)
ttgagacagggtctcattttgtcacttagagccctgacctccctgggctcaggtgatcctcctgcgtcagcctcctgagtagctgg

SEQ ID NO: 705141 - DNA, 75 bp, Artificial Sequence
  ENSG00000196459_30 (sequence is synthesized)
ctactttttgtatttctcctgggctgaagcaatctgcccatctcagccctccaaagtgctgggattacaggcgtg

SEQ ID NO: 705142 - DNA, 120 bp, Artificial Sequence
  ENSG00000196459_31 (sequence is synthesized)
tttatggattatttcttccatcttttctagaatacaaaactcttcctttcttataaattggtatataaagaggcatatcataggctcttagatttgcaaagacttacatttatagcacac

SEQ ID NO: 705143 - DNA, 120 bp, Artificial Sequence
  ENSG00000196459_32 (sequence is synthesized)
atacttcaagtagaaagaagacaaatacagcacacgcagtctgcgaatcagtgatacagtgtctgtcctttctaggtaagtgacatgaggtagagttggttttagcttcccccgacggat

SEQ ID NO: 705144 - DNA, 120 bp, Artificial Sequence
  ENSG00000196459_33 (sequence is synthesized)
gcctcctggaaatttctaaggcaaggtaattacttccttggtcttcccactactctgtattgtccttgacttaccaccaccttctgttaatccttctaggtgtccgtgctgctactaact

SEQ ID NO: 705145 - DNA, 120 bp, Artificial Sequence
  ENSG00000196459_34 (sequence is synthesized)
ggtccagtccaaatgaagcccagcttactctaccagacacttagggccccttgagctgaatgagccatattttcagatcatgagaatgttgtctttgtgatttcatgttagaggtcttcc

SEQ ID NO: 705146 - DNA, 120 bp, Artificial Sequence
  ENSG00000196459_35 (sequence is synthesized)
agtttacttaagaaaatacattagattcacagattcatatcatagatacataatttgtttattccagaagctacgtatcttcgctagtatactggaaactgccaagcttagtagcatctt

SEQ ID NO: 705147 - DNA, 120 bp, Artificial Sequence
  ENSG00000196459_36 (sequence is synthesized)
tctgatgagaaaggattcgacctttgtcaggaaactggcctattgaagtaactcccttaggctgcagtttacctttcagactagctttcccccatcagaactatctctggcaactccctc

SEQ ID NO: 705148 - DNA, 120 bp, Artificial Sequence
  ENSG00000196459_37 (sequence is synthesized)
cgcaggtaagtcttcacagccaggtgaatatgtatttaggaacacaacttcatggtagttacctttagatgattgtgaaggtaaattggtttcattcttcaccttgttgtcctcatagct

SEQ ID NO: 705149 - DNA, 120 bp, Artificial Sequence
  ENSG00000196459_38 (sequence is synthesized)
gattttattagggatccctaaagacagcaagaaagcagcctatataagggaaaattacttcataatttaatctaaaatgtttccatctactttacaaataagttacagtgcaatagagat

SEQ ID NO: 705150 - DNA, 120 bp, Artificial Sequence
  ENSG00000196459_39 (sequence is synthesized)
cataaactggcaggaagtgatttttatatgatcaaatagccactcaagaagaatggcgccacttgcatttcttgattttgaaaaataaaataataataggacgtcatggttacactgcag

SEQ ID NO: 705151 - DNA, 120 bp, Artificial Sequence
  ENSG00000196459_40 (sequence is synthesized)
acatagatgccaggctctgagtctgtagacttcacagtcaggtgaaaatgtaagtttccatttatggggctacttttctttttttaggggggaaaaacattttgtttaatagctaatttt

SEQ ID NO: 705152 - DNA, 120 bp, Artificial Sequence
  ENSG00000196459_41 (sequence is synthesized)
ttatgttctctttatgataaaactaagctaattttaaacccagtttatatattcaacttttccatcacaaatacactgcatgtgactaatttgaagaatactgtatcaacgaactggttg

SEQ ID NO: 705153 - DNA, 120 bp, Artificial Sequence
  ENSG00000196460_0 (sequence is synthesized)
ataactccaacgctcaagcaagtcaaggacacccacggactcaacaccgcgaccagattggaaaaggtgttggtcgacaacttctgcatttgcgaagagtgcagcgtccctcgctgtctc

SEQ ID NO: 705154 - DNA, 120 bp, Artificial Sequence
  ENSG00000196460_1 (sequence is synthesized)
atgtatgagatttacgtggagacctgtgggcaaaacactgagaaccaagtcaacccggccacctttgggaagcttgtgagattggtttttccggaccttggcacccggaggctgggcact

SEQ ID NO: 705155 - DNA, 120 bp, Artificial Sequence
  ENSG00000196460_2 (sequence is synthesized)
agaggaagtgccaggtatcattatgatggaatctgtatcaagaaaagctctttcttctatgcccagtattgctacctgataggtgaaaaaaggtatcacagtggagatgccattgccttt

SEQ ID NO: 705156 - DNA, 120 bp, Artificial Sequence
  ENSG00000196460_3 (sequence is synthesized)
gaaaaatctactaattataacagcattatccaacaagaagcaacatgtgaagatcattcaccgatgaagacagacccagttggatcccctttgtctgaattcaggagatgtccatttctg

SEQ ID NO: 705157 - DNA, 120 bp, Artificial Sequence
  ENSG00000196460_4 (sequence is synthesized)
gagcaagaacaggcaaagaaatactcctgtaatatgatggccttccttgctgacgaatactgcaactattgtcgagacattttacgaaatgtggaggacttgcttacttccttctggaag

SEQ ID NO: 705158 - DNA, 120 bp, Artificial Sequence
  ENSG00000196460_5 (sequence is synthesized)
tctctgcagcaagacacagtcatgctgatgtcattgcctgacgtgtgccagctctttaaatgctacgacgtccagctgtacaagggaattgaggatgttctccttcatgacttcttggaa

SEQ ID NO: 705159 - DNA, 120 bp, Artificial Sequence
  ENSG00000196460_6 (sequence is synthesized)
gatgtttctattcagtacctgaaatctgtgcagttatttagtaagaaatttaagctgtggctccttaatgctttggaaggtgttccagccctcttgcagatctccaaactcaaagaagtt

SEQ ID NO: 705160 - DNA, 120 bp, Artificial Sequence
  ENSG00000196460_7 (sequence is synthesized)
actctatttgtcaaaagactaagaagaaagacgtacctttccaacatggctaagactatgcgaatggtattgaaaagtaagaggcgtgtcagcgttttgaagtcagatctacaggccatc

SEQ ID NO: 705161 - DNA, 120 bp, Artificial Sequence
  ENSG00000196460_8 (sequence is synthesized)
cttctaagaaagccctggcaagtgaccggagtggcgcagatgaactggagaacaacccagagatgaaatgtttaagaaacttaatttctttgctgggaacatcaacagatctcagggtat

SEQ ID NO: 705162 - DNA, 120 bp, Artificial Sequence
  ENSG00000196460_9 (sequence is synthesized)
tcctcagctgtctgtcttcacatctccaagcatttgtgttccagacaagcagaagcaaagaagagtttaccaaattggccgccagcttccagctgagatggaatcttcttctcactgctg

SEQ ID NO: 705163 - DNA, 120 bp, Artificial Sequence
  ENSG00000196460_10 (sequence is synthesized)
taagcaaagccatgaccctctgccacagagatagttttggctcctggcatctgtttcacttgttgcttttggaatatatgattcatatacttcagtcatgcctagaggaggaagaggagg

SEQ ID NO: 705164 - DNA, 120 bp, Artificial Sequence
  ENSG00000196460_11 (sequence is synthesized)
aggaggacatggggactgtcaaggaaatgctaccagatgacccgactctcggccagccagaccaggcacttttccattctctgaattcctcactgtcgcaggcgtgtgccagccccagca

SEQ ID NO: 705165 - DNA, 120 bp, Artificial Sequence
  ENSG00000196460_12 (sequence is synthesized)
tggagccactgggggtgatgcccacacacatgggccagggccgatatcccgtgggtgtgagcaacatggtcctcaggatcctgggcttcctggtggacactgccatgggcaataagctca

SEQ ID NO: 705166 - DNA, 120 bp, Artificial Sequence
  ENSG00000196460_13 (sequence is synthesized)
tccaggtgctgttggaagatgaaaccactgaaagcgcagttaaactcagccttcctatgggacaagaagccctcataaccctaaaagatggacaacaatttgtgattcagatatcagatg

SEQ ID NO: 705167 - DNA, 120 bp, Artificial Sequence
  ENSG00000196460_14 (sequence is synthesized)
taccccaaagctctgaagatatttatttcagagaaaacaatgctaatgtgtgagattatttatttgaatagagaataagaaaactgatagacttgcattcttaaaaatattaaatactaa

SEQ ID NO: 705168 - DNA, 120 bp, Artificial Sequence
  ENSG00000196460_15 (sequence is synthesized)
agtttttctattgacgaaagatgatgttatgtatataatagatgtagcattgtctattttatgtttatatgtatttcaaggaggtggtttcgataaaatatgtaaactgatttggagaat

SEQ ID NO: 705169 - DNA, 120 bp, Artificial Sequence
  ENSG00000196460_16 (sequence is synthesized)
acaaaggaagtgaacttggagatggccagcagctccatgtcacacagcaatgacactgacataaatggctcttgagagcaaggactggcaggacctggctacagatatggggactcacgt

SEQ ID NO: 705170 - DNA, 120 bp, Artificial Sequence
  ENSG00000196460_17 (sequence is synthesized)
tgaggtggcactgctcacctggagcagcacactggagtcacctgggaccagcctcctagaagtccagatgcgcccgcctgccagagagctccgagatttttcaaaactcctagagacagt

SEQ ID NO: 705171 - DNA, 120 bp, Artificial Sequence
  ENSG00000196460_18 (sequence is synthesized)
ggttttcagcaacggcgggcacattagcatcacccgggaccctgaaaaagccggttggcccaggcggccctcgcccagaccaattcatcagaacctcttggggtggggtggggcggggct

SEQ ID NO: 705172 - DNA, 120 bp, Artificial Sequence
  ENSG00000196460_19 (sequence is synthesized)
ttggggagctgtggcctcccgtactcgccgcgcgccttccgcgcccccgggctcgggcctggaggactgggctcccgccccgcgccccgcgcgccccccgcgcgctcctttctaaagtaa

SEQ ID NO: 705173 - DNA, 120 bp, Artificial Sequence
  ENSG00000196460_20 (sequence is synthesized)
tttctaaagtaaacaccgaggagcggcggtagcaggaccggtgcaacccagcgccgcccacggccgccgctcgctgcctgcctcggtgctgcaggcccggggccgagccatggccgaggg

SEQ ID NO: 705174 - DNA, 120 bp, Artificial Sequence
  ENSG00000196460_21 (sequence is synthesized)
cagaagagggagaggttcgtcttccaggctgcaccgcgctggcggcgagcgggttcacagggagccggcggcggtggtaccacagcctggtgatgtcagacaccagtggttctttcagag

SEQ ID NO: 705175 - DNA, 120 bp, Artificial Sequence
  ENSG00000196460_22 (sequence is synthesized)
gggtctctccagccccaagcaggaagctgttttccttctgtgtgtgcagccaaggcccctggaggggctgagagtcggggctgagtcttcctggggccagggccccccaacaaggcctcc

SEQ ID NO: 705176 - DNA, 120 bp, Artificial Sequence
  ENSG00000196460_23 (sequence is synthesized)
tcgagacattttacgaaatgtgaggaactgagaacttgagagggtagggttttatctataaaatacaagcatttatgactccttattaatcatttttatttgaagagaccccgtcaacag

SEQ ID NO: 705177 - DNA, 120 bp, Artificial Sequence
  ENSG00000196460_24 (sequence is synthesized)
atgtccaatggtaacccactgcactgaagtgcttacatgctatgtacctatgttgtagtcattgagttctggaaggtgagatcgatattcagtgtaatcagttggaaattctccaaggtg

SEQ ID NO: 705178 - DNA, 120 bp, Artificial Sequence
  ENSG00000196460_25 (sequence is synthesized)
ctaatacagataactttaggctctaaatacaaattcagctattttttagatcctaattctgctcattttgaataaagtgttggtaataaaattcaccctggaattttcaatggtgccgaa

SEQ ID NO: 705179 - DNA, 120 bp, Artificial Sequence
  ENSG00000196465_0 (sequence is synthesized)
agtcaccaaccaccgccatgggccggaagccaccgccctcgcgtcaactgcaatctagagcgcggcgcatcccgtgagcccgcggggaactacgactcccggcatgctccgcggccaccg

SEQ ID NO: 705180 - DNA, 120 bp, Artificial Sequence
  ENSG00000196465_1 (sequence is synthesized)
gaattaacccttcagggctgggggccgcgctatgccccgccccctccccagccccagacacggaccccgcaggccaactggctccctgcccctgcccccgccccttgacatcccagactc

SEQ ID NO: 705181 - DNA, 120 bp, Artificial Sequence
  ENSG00000196465_2 (sequence is synthesized)
cctggctatttaaacagagatgggtgcccccatccgcacactgtcctttggccaccggacatcatgcctcccaagaaggatgttcccgtgaagaaaccagcagggccctccatctccaaa

SEQ ID NO: 705182 - DNA, 120 bp, Artificial Sequence
  ENSG00000196465_3 (sequence is synthesized)
cctgctgctaagccagcagcagcaggggctcctccagccaagaccaaagctgagccagctgtcccccaggcccctcagaaaacccaggagcctccagtcgatctctccaaagtggtgatc

SEQ ID NO: 705183 - DNA, 120 bp, Artificial Sequence
  ENSG00000196465_4 (sequence is synthesized)
cctgtacagccagtgtggggacgtgatgagggccctgggccagaaccccaccaacgccgaggtgctcaaggtcctggggaaccccaagagtgatgagctgaagtcgcggcgtgtggactt

SEQ ID NO: 705184 - DNA, 120 bp, Artificial Sequence
  ENSG00000196465_5 (sequence is synthesized)
tgagactttcctgcccatgctccaggcagtggccaagaaccgaggccaaggcacatatgaggactacttggaggggtttcgtgtgtttgacaaggaggggaacggcaaagtcatgggagc

SEQ ID NO: 705185 - DNA, 120 bp, Artificial Sequence
  ENSG00000196465_6 (sequence is synthesized)
agagctcagacatgttctcaccacccttggagagaagatgactgaggaggaggtggagaccgttctggcaggacacgaggacagcaacggctgcatcaactacgaggccttcttgaaaca

SEQ ID NO: 705186 - DNA, 120 bp, Artificial Sequence
  ENSG00000196465_7 (sequence is synthesized)
catcctaagcgtctgagtgctgcagatccagtggggtccggacactgggccccgcaggcgaaagcacgttccagccaccaggaggccacctattgtttcaaaataaagactgggttcctc

SEQ ID NO: 705187 - DNA, 120 bp, Artificial Sequence
  ENSG00000196465_8 (sequence is synthesized)
ctttcagcagtaggtccaggaaaacagccgccccgccccctccacctcccgagactaggagcccgccagggttaagtaggagggataccctaggggccccgcagggtttttagggttggg

SEQ ID NO: 705188 - DNA, 120 bp, Artificial Sequence
  ENSG00000196465_9 (sequence is synthesized)
cctcccaccccttcgccgcgccttacgaggcaagtctcccgcccttctctcagccaacatagaaaagcagcggagttcattctgctgtccggttgctgcacgggctccagcgcttcgcaa

SEQ ID NO: 705189 - DNA, 120 bp, Artificial Sequence
  ENSG00000196465_10 (sequence is synthesized)
ctttggtttttttccacagatccagtggggtccggacactgggccccgcaggcgaaagcacgttccagccaccaggaggccacctattgtttcaaaataaagactgggttcctctcttgg

SEQ ID NO: 705190 - DNA, 70 bp, Artificial Sequence
  ENSG00000196465_11 (sequence is synthesized)
agctacttcgaaggccgatgtgaatcactggagcccaggaggtggaagttgcagtgagccatgatgaaaa

SEQ ID NO: 705191 - DNA, 71 bp, Artificial Sequence
  ENSG00000196465_12 (sequence is synthesized)
ttacaattgttatgtttatattgttgtttacaaaaatatatggaaaaagccaggcgcggtggctcacgcct

SEQ ID NO: 705192 - DNA, 78 bp, Artificial Sequence
  ENSG00000196465_13 (sequence is synthesized)
agcactttgggaggccgaggcaggtgtatgacctgaggtcaagagtttgagagcagcctgcccaacatggccctgtaa

SEQ ID NO: 705193 - DNA, 120 bp, Artificial Sequence
  ENSG00000196465_14 (sequence is synthesized)
ggagcgaaactccgtctcaaaaaaaaaaaggaaaagcgtggcctgggtgagtgaaggagggaaaggagggcctcagacgttgtgtctgggattcaggagagaagatgactgaggaggagg

SEQ ID NO: 705194 - DNA, 120 bp, Artificial Sequence
  ENSG00000196465_15 (sequence is synthesized)
atgccccgccccctccccagccccagacacggaccccgcaggttcacacaagcctccctggctgctacccctcaccccacccttcaagaagactaaagctgctggatcacctgctttgcc

SEQ ID NO: 705195 - DNA, 120 bp, Artificial Sequence
  ENSG00000196465_16 (sequence is synthesized)
tcaccacccccatctcagtgccactggcaagcatcctatcctcaccctggaggttaactacctcattctgggcagtctctggcttcctcccctacccctaaaggaaacattgttcttttc

SEQ ID NO: 705196 - DNA, 120 bp, Artificial Sequence
  ENSG00000196465_17 (sequence is synthesized)
gggtgggccagaaagactggacagataagcagagctagcaggaggcttactgtcctgcaggttgtcggcaggagactgagaaggtcagagctatgggggtagaatctgaaggactcgctc

SEQ ID NO: 705197 - DNA, 120 bp, Artificial Sequence
  ENSG00000196465_18 (sequence is synthesized)
ttccagaggctaaagtgccatccggagggcagaggaaaagggatgaggcgggaaacctgaattttcattttggaagagacgtgtgggttgtgtgttctggtacaagtctcgtaacctcct

SEQ ID NO: 705198 - DNA, 120 bp, Artificial Sequence
  ENSG00000196465_19 (sequence is synthesized)
gggattgtttccttgtgggtcaatactttcagcagtactagggtgaaatggaaagcaagaggcatccatgaccaggggaggattcccttgaggactgaggctatgggagaagaagaggta

SEQ ID NO: 705199 - DNA, 65 bp, Artificial Sequence
  ENSG00000196465_20 (sequence is synthesized)
gattcccttgaggactgaggctatgggagaagaagaggtaccactctaaagagcgtggcgggcgg

SEQ ID NO: 705200 - DNA, 75 bp, Artificial Sequence
  ENSG00000196465_21 (sequence is synthesized)
atcaccttagctcgttagtaatataaaaactaggcgggcatggtggcacgcacctataatcccagctacccagga

SEQ ID NO: 705201 - DNA, 120 bp, Artificial Sequence
  ENSG00000196465_22 (sequence is synthesized)
gaaacacatcctaagcgtctgagtgctgcagtgtgacttcaccgaagaccagaccgcagagttcaaggaggccttccagctgtttgaccgaacaggtgatggcaagatcctgtacagcca

SEQ ID NO: 705202 - DNA, 120 bp, Artificial Sequence
  ENSG00000196465_23 (sequence is synthesized)
tcatctaaggccactgtcccatccccaatcccctggtcagattctctttctattcccctaaccccagtcctgaccttgaaacctcccatactagtcctcttttcctcccttgttctgttc

SEQ ID NO: 705203 - DNA, 120 bp, Artificial Sequence
  ENSG00000196465_24 (sequence is synthesized)
acatagtttctgaaattcccttctgtctgggggtgatgggaaccctagtcagtgtctacactgacccttccttatactttagagttcaaggaggccttcgagctgtttgaccgagtgggg

SEQ ID NO: 705204 - DNA, 120 bp, Artificial Sequence
  ENSG00000196466_0 (sequence is synthesized)
gtcaatcaggcgcgcttcccagaggagtgtgtggttgaaaaagcccgcggcgtcttctccacccacctgcgctgggcgctcggtgctcggctctgtagctaagagacgacctggaagttc

SEQ ID NO: 705205 - DNA, 120 bp, Artificial Sequence
  ENSG00000196466_1 (sequence is synthesized)
cgtggcagcctgtgtcccgcgggaacccgcattggcagcgggagccgtccggaggacctgggacaccgcggaagtcgggaaatggcctcagtggctttagaggatgtggctgtgaacttc

SEQ ID NO: 705206 - DNA, 120 bp, Artificial Sequence
  ENSG00000196466_2 (sequence is synthesized)
acccgagaagagtgggctttgctgggtccttgtcagaagaatctctacaaagatgtgatgcaggaaaccatcaggaacctggattgtgtaggaatgaaatggaaagaccagaacattgaa

SEQ ID NO: 705207 - DNA, 120 bp, Artificial Sequence
  ENSG00000196466_3 (sequence is synthesized)
gatcaatatagatatcccaggaaaaatctaagatgtcgtatgttagagagatttgttgaaagtaaagatggaactcaatgtggagaaacatctagccagattcaagatagtattgtgacc

SEQ ID NO: 705208 - DNA, 120 bp, Artificial Sequence
  ENSG00000196466_4 (sequence is synthesized)
aagaacactcttcctggagtaggtccatatgaaagccgtatgagtggagaagtcatcatgggtcattcatcccttaattgttacatcagagttggtgctgggcacaaaccatatgagtat

SEQ ID NO: 705209 - DNA, 120 bp, Artificial Sequence
  ENSG00000196466_5 (sequence is synthesized)
catgaatgtggagagaagccagatacgcataaacaacgtgggaaagccttcagttaccacaactcacttcaaacacatgagaggcttcacactggaaagaaaccatataattgtaaagaa

SEQ ID NO: 705210 - DNA, 120 bp, Artificial Sequence
  ENSG00000196466_6 (sequence is synthesized)
tgtgggaagtccttcagttctttgggaaaccttcaaagacacatggcagtgcagcgtggagatggaccttataaatgtaagttgtgtgggaaagcgtttttttggcccagtttattacat

SEQ ID NO: 705211 - DNA, 120 bp, Artificial Sequence
  ENSG00000196466_7 (sequence is synthesized)
atgcatgagagaacgcacactggagagaaaccatatgaatgtaagcagtgttctaaagccttttctttttacagttcctatctaagacatgaaagaacacatactggggagaaactgtat

SEQ ID NO: 705212 - DNA, 120 bp, Artificial Sequence
  ENSG00000196466_8 (sequence is synthesized)
gaatgtaaacagtgttctaaagccttccctgattacagttcttgtctaagacatgaaagaactcacactggaaagaaaccctatacatgtaaacaatgtgggaaagccttcagtgcttcc

SEQ ID NO: 705213 - DNA, 120 bp, Artificial Sequence
  ENSG00000196466_9 (sequence is synthesized)
acttcccttcgaagacacgaaacaactcacactgatgagaaaccctatgcatgtcagcaatgtgggaaagcgtttcatcatctgggaagctttcaaagacacatggtaatgcacacgaga

SEQ ID NO: 705214 - DNA, 120 bp, Artificial Sequence
  ENSG00000196466_10 (sequence is synthesized)
catgaaagaactcacactggagagaaactctatgaatgcaagcagtgtgggaaagcgttatctcatagctcaagctttcgaagacacatgacaatgcacactggagatggacctcacaaa

SEQ ID NO: 705215 - DNA, 120 bp, Artificial Sequence
  ENSG00000196466_11 (sequence is synthesized)
tgcaagatatgtgggaaagcctttgtttatcccagtgtatttcaaaggcatgaaaagactcacactgcagagaaaccctataaatgtaaacaatgtggcaaagcctaccgtatttccagt

SEQ ID NO: 705216 - DNA, 120 bp, Artificial Sequence
  ENSG00000196466_12 (sequence is synthesized)
tctcttcgaaggcatgaaacaactcatactggagagaaaccctataaatgcaaatgtgggaaagcctttattgatttctattcctttcaaaatcacaaaacaactcatgctggagagaag

SEQ ID NO: 705217 - DNA, 120 bp, Artificial Sequence
  ENSG00000196466_13 (sequence is synthesized)
ccatatgagtgtaaggaatgtgggaaagcattcagttgtttccaatacctttctcaacatagaaggactcacacaggagagaaaccttatgagtgtaacacatgtaagaaagccttcagt

SEQ ID NO: 705218 - DNA, 120 bp, Artificial Sequence
  ENSG00000196466_14 (sequence is synthesized)
cattttggtaacttaaaagtacatgaaagaattcactctggagagaagccgtatgaatgtaaggaatgtgggaaagcattctcttggctcacttgctttctacgacatgaaagaattcac

SEQ ID NO: 705219 - DNA, 120 bp, Artificial Sequence
  ENSG00000196466_15 (sequence is synthesized)
atgagagagaaaccctatgagtgtcaacaatgtggtaaagccttcactcattcccgttttcttcaaggacatgaaaaaactcatactggagagaacccgtatgaatgtaaggaatgtggg

SEQ ID NO: 705220 - DNA, 120 bp, Artificial Sequence
  ENSG00000196466_16 (sequence is synthesized)
aaagcatttgcttctctcagttccttgcatagacataaaaagactcactggaaaaaaactcacactggagagaacccgtatggatgtaaggaatgtgggaaagcatttgcttctctcagt

SEQ ID NO: 705221 - DNA, 120 bp, Artificial Sequence; identical to SEQ ID NO: 636591
  ENSG00000196466_17 (sequence is synthesized)

SEQ ID NO: 705222 - DNA, 120 bp, Artificial Sequence
  ENSG00000196466_18 (sequence is synthesized)
tgtgaatgtaagcacttggtaaaaccttaagtaatttcagtttctttccagtacagtcatcccttgatacctgctgggtattggttccagcactccgtgagccatgtccagtccctttta

SEQ ID NO: 705223 - DNA, 120 bp, Artificial Sequence
  ENSG00000196466_19 (sequence is synthesized)
taaaatgacatatttgtatgtaacttacccacatcctcttgtatactctcaattatgtctagattacttaaaatacctcatgcattgtaaaagctatgcaaatagttgttctattgtatt

SEQ ID NO: 705224 - DNA, 120 bp, Artificial Sequence
  ENSG00000196466_20 (sequence is synthesized)
gtttagggactcatgataaggaaaagagtctatgtattttcagtatagatgcagtaattgtcagcctatcaacatagtatagtcagccagaacattaaagtttctttgtttcaactctca

SEQ ID NO: 705225 - DNA, 120 bp, Artificial Sequence
  ENSG00000196466_21 (sequence is synthesized)
cgggatagtccttatacagattggaaaatgcaaggcaataatttgcaaataagatctgatatgctgtctctagaattagtgtccagggttctataccgggaactcaggctgctgtgttca

SEQ ID NO: 705226 - DNA, 120 bp, Artificial Sequence
  ENSG00000196466_22 (sequence is synthesized)
agactggtattgatagggggagggattgggccaaggacaaataaaagctccacaagacttttctaccagttttcatttttctttatatatatatttatctctctgttaatagtacggggt

SEQ ID NO: 705227 - DNA, 120 bp, Artificial Sequence
  ENSG00000196466_23 (sequence is synthesized)
gccaaataaaatcctttatttgtttttggaatgctgcactttcttggtgagaaggctttcagcattttttagatactgtgagttctattagatttggtaatgtaatttttgttgactact

SEQ ID NO: 705228 - DNA, 120 bp, Artificial Sequence
  ENSG00000196466_24 (sequence is synthesized)
aaaagatttgttttagtttcttagtaagtattataaatattcatgagagatgacactgagttctttctaagaatatgtgcagtctttccccttctttctttcccctttggcgttactcaa

SEQ ID NO: 705229 - DNA, 120 bp, Artificial Sequence
  ENSG00000196466_25 (sequence is synthesized)
aatgtttaaaatttttcctttgaggtggtgtaatatcttttctcagtctgttgtcatacttcagtacatttgatctaaaggaaactagttgccagcttccaaatattctctgtaagtata

SEQ ID NO: 705230 - DNA, 120 bp, Artificial Sequence
  ENSG00000196466_26 (sequence is synthesized)
atcacataggatgggctaaatcccccaaataacaagttgcaacaaaacgtgaaatgttatctacccagaaagttcattatagacccaatgcccagagtgtttctttgtagctgtcttagc

SEQ ID NO: 705231 - DNA, 120 bp, Artificial Sequence
  ENSG00000196466_27 (sequence is synthesized)
ctgtttcttgttattcataacagaattactgaacctcggtaatttataagaaacagtatttaatttttacatttctggaggctgggaagtccaaggttaaggctgggcatctggtgagaa

SEQ ID NO: 705232 - DNA, 120 bp, Artificial Sequence
  ENSG00000196466_28 (sequence is synthesized)
ccttcttgctggtggggactctgcagagtccctaggcggcatagagtatcacatggtgagggagctgagtgtctagctcagatctcttactcttctcagaaggacatgagatagctcatt

SEQ ID NO: 705233 - DNA, 120 bp, Artificial Sequence
  ENSG00000196466_29 (sequence is synthesized)
tattcattcacccgttacggattaatctattcatgaggtccaaacccttaggactacatcacctcttaaacctcacttttttttttttactgccactttggagattaacattcagtgtgc

SEQ ID NO: 705234 - DNA, 120 bp, Artificial Sequence
  ENSG00000196466_30 (sequence is synthesized)
attttggaggggacaaccattcaaacctagcagtggctgatcaggtgcactccctgtgctgagtatgtaacaaaattccaaactctcagaaggaagatggggttaaggaaatactgtatt

SEQ ID NO: 705235 - DNA, 120 bp, Artificial Sequence
  ENSG00000196466_31 (sequence is synthesized)
ttttttgcgtaaacaatttaggcacactccacccctattattagttacgctcctggggccctcccctaaatacactgtctagataccatgaaaagcccaactttgtgaaaaagcatttgt

SEQ ID NO: 705236 - DNA, 120 bp, Artificial Sequence
  ENSG00000196466_32 (sequence is synthesized)
aaggacacacagtctcagcactgctaatggtaactcccttttgcacaataagtagtaggactttatcgtgccaaggactgcagacccactgtggaaatcaacattaggggtgatccaggc

SEQ ID NO: 705237 - DNA, 120 bp, Artificial Sequence
  ENSG00000196466_33 (sequence is synthesized)
tatgtgattcactcactcagttcgccaacaagtggcatgtttctatcccactgttaatttaccaaacatgtttaactgtagcttcagagttactgtgtaggagaaagtgagtgtagacag

SEQ ID NO: 705238 - DNA, 120 bp, Artificial Sequence
  ENSG00000196466_34 (sequence is synthesized)
agaataagagtgggtttaccatgtcattgaataaaatggttggaaaccacagcatcatgtgaaatttatgaagtgagtatagattctcagtactgtgattttcacccttcctcctctgta

SEQ ID NO: 705239 - DNA, 120 bp, Artificial Sequence
  ENSG00000196466_35 (sequence is synthesized)
aagggctactccgggatctacggacccgggttcccctggcgtaggtcggccctcggccgcagggtggggctgggcatgcagccgggaccccgggcgtcctgtcccgttcctgcgcggcga

SEQ ID NO: 705240 - DNA, 120 bp, Artificial Sequence
  ENSG00000196466_36 (sequence is synthesized)
ctgcggccccggcgccctctctgggcagctccgcgcccgcagcctcgcgtctcccgagattgtgcggctgtaagcaacacaggttcgcggcccgactcactgcaccgagacgctgagggc

SEQ ID NO: 705241 - DNA, 120 bp, Artificial Sequence
  ENSG00000196466_37 (sequence is synthesized)
tgcagcagaaacagtttaatagccagagaggggaggacaccccagatccgcctccctgagggatttggggtctggacgggggcggctgggtgtagggtcgttggttggtggggaagtgag

SEQ ID NO: 705242 - DNA, 120 bp, Artificial Sequence
  ENSG00000196466_38 (sequence is synthesized)
gggtgaatcctgggacaggaggtgaagaaaccgcattctgctgaatgggctccctcgttgggacttcaacctgattggcgccagcctttgctgggattcaggatctgagaactccggcga

SEQ ID NO: 705243 - DNA, 120 bp, Artificial Sequence
  ENSG00000196466_39 (sequence is synthesized)
ctcttgagcagttctcagagatcttatccccaggcacaatggggaagccggcggtcagcgtctgctgtgacctgactctcagggaggcggccccttgaggcagcggggctgagggcacct

SEQ ID NO: 705244 - DNA, 120 bp, Artificial Sequence
  ENSG00000196468_0 (sequence is synthesized)
ggacgaagccagctatgagaggccgggggagatggatgcggaggggaagaggcactttgactgagagcaaggtcaggagcacgctgccccgcgctccccgccactgagaagttccttgga

SEQ ID NO: 705245 - DNA, 120 bp, Artificial Sequence
  ENSG00000196468_1 (sequence is synthesized)
cgcgaacagacgtcgactgcagctcggcagagcgcggagcaagcgagctagcgagggagcgccgccgaaccgcccgcgcccgctgcggggagaggcagttcgcgccccgtggccccggct

SEQ ID NO: 705246 - DNA, 120 bp, Artificial Sequence
  ENSG00000196468_2 (sequence is synthesized)
cggcccgcgcgcgcccagcacaaccagcgccgcaatcggcccagccatggcagaggtggggggcgtcttcgcctccttggactgggatctacacggcttctcctcgtctctggggaacgt

SEQ ID NO: 705247 - DNA, 120 bp, Artificial Sequence
  ENSG00000196468_3 (sequence is synthesized)
gcccttagctgactccccaggtttcctgaacgagcgcctgggccaaatcgaggggaagctgcagcgtggctcacccacagacttcgcccacctaaaggggatcctgcggcgccgccagct

SEQ ID NO: 705248 - DNA, 120 bp, Artificial Sequence
  ENSG00000196468_4 (sequence is synthesized)
ctactgccgcaccggcttccacctggagatcttccccaacggcacggtgcacgggacccgccacgaccacagccgcttcggaatcctggagtttatcagcctggctgtggggctgatcag

SEQ ID NO: 705249 - DNA, 120 bp, Artificial Sequence
  ENSG00000196468_5 (sequence is synthesized)
catccggggagtggactctggcctgtacctaggaatgaatgagcgaggagaactctatgggtcgaagaaactcacacgtgaatgtgttttccgggaacagtttgaagaaaactggtacaa

SEQ ID NO: 705250 - DNA, 120 bp, Artificial Sequence
  ENSG00000196468_6 (sequence is synthesized)
cagaaattcactcactttttacccaggcctgtagatccttctaagttgccctccatgtccagagacctctttcactataggtaatgaacctctggtgtgccctctgtgacccatgtaccc

SEQ ID NO: 705251 - DNA, 120 bp, Artificial Sequence
  ENSG00000196468_7 (sequence is synthesized)
tggggccacggttgtctctgcaagcactatattcatagcttttcaatccttccttcctatcattttagataacagaaaagcacttactgttgaactcaacccagctgttcccttgttgtt

SEQ ID NO: 705252 - DNA, 120 bp, Artificial Sequence
  ENSG00000196468_8 (sequence is synthesized)
caaagtgtatatcaaggttgggttattttggggagggatggggggctgggctcgagggaatcttgtatatacttttttctttactcatgttccttcccctgaggtagcataacaaagaat

SEQ ID NO: 705253 - DNA, 120 bp, Artificial Sequence
  ENSG00000196468_9 (sequence is synthesized)
gggagcccctgctaagggccaggggtgtcttaccccacaatttactcaaataccttgacaatgggtataaatgaaaggccaaggaatctgccacagatgctacctacagagctttggaaa

SEQ ID NO: 705254 - DNA, 120 bp, Artificial Sequence
  ENSG00000196468_10 (sequence is synthesized)
agtctcattaagaaaatccttggggctacagccttgctgcaagccttccctgcattggctctgcagatttctcatctgtcctgacatgcagttttcctgtcattggaagtgggagatggg

SEQ ID NO: 705255 - DNA, 120 bp, Artificial Sequence
  ENSG00000196468_11 (sequence is synthesized)
tggggtaggttgtaagaaaatgatattaaaatgtaagcatggatactgtgcataaggacaaactatttataaaatgtatatgctatttattttatatatttatttatttcaaaataataa

SEQ ID NO: 705256 - DNA, 120 bp, Artificial Sequence
  ENSG00000196468_12 (sequence is synthesized)
atttttaatgagagatgcgatggctggattttcatcagaaagaataaggtcctactgaaacaggataaaatgagttattaaaggcttttactgacaataaaatttgtctttatattgtaa

SEQ ID NO: 705257 - DNA, 120 bp, Artificial Sequence
  ENSG00000196470_0 (sequence is synthesized)
tttcacccccaagacaaatagtggcctgccattttccagcccaggtagcttcctgggaaaagttgcttgttttatctttgactcagcctggctagttacattgtcgattatttcttccag

SEQ ID NO: 705258 - DNA, 120 bp, Artificial Sequence
  ENSG00000196470_1 (sequence is synthesized)
atgatatttacctgttaaataatgtttattactctgctgatgaatgttttcagcaacgctggagaaccctaggctgcaaggggttcttcacctgttgactccatcccccacccccagtat

SEQ ID NO: 705259 - DNA, 120 bp, Artificial Sequence
  ENSG00000196470_2 (sequence is synthesized)
ggcatatatctctgccgtgctatcatctttattctttcctttttcattgtctcttcctgactgtcctcctttgttcattatgtctgacacatattgtggattgaaagtagaacagaaaga

SEQ ID NO: 705260 - DNA, 120 bp, Artificial Sequence
  ENSG00000196470_3 (sequence is synthesized)
tatactttctctaccagactaaaaagttttgagatggccctccatttctcccatgcctcacttcaccttagttgtgtttttatttatttttatattttcgccaccttcactagcgagtac

SEQ ID NO: 705261 - DNA, 120 bp, Artificial Sequence
  ENSG00000196470_4 (sequence is synthesized)
atcccctcactcttgaggtgggcactgatcagtaggaaataagattaatacctggctggtgataatttggggggaagacttaattagatagagatggataatgggatggcagcagacctt

SEQ ID NO: 705262 - DNA, 120 bp, Artificial Sequence
  ENSG00000196470_5 (sequence is synthesized)
tccccttgtgacccttcccctcatttccaaaatacacctctagagtagataattgcttaccattaagaagagttaatggaaggtgatactctgattctttggcattggaactacattcaa

SEQ ID NO: 705263 - DNA, 120 bp, Artificial Sequence
  ENSG00000196470_6 (sequence is synthesized)
tccgcggtatcctcggattagttctaggacccccttctccataccaaaacctgaggatgctcaagtccctgatagaaaatggtgtcatatttgtatgtgcatattctcttgtataattta

SEQ ID NO: 705264 - DNA, 120 bp, Artificial Sequence
  ENSG00000196470_7 (sequence is synthesized)
agtgatctctggattacttaatacaatgtaaacaatatgtaaatagttgttatagactgtattttaaaaattttgtattctttataaatttttctgaatattttcaatccatggctggtg

SEQ ID NO: 705265 - DNA, 120 bp, Artificial Sequence
  ENSG00000196470_8 (sequence is synthesized)
aagtcctcggatgcagaccgtgtggatacagagtgccgattttatacaggagttcacctgtaactccctgtacctatcaacagctgactccaaattagaaagaaatagagtaagggagcc

SEQ ID NO: 705266 - DNA, 120 bp, Artificial Sequence
  ENSG00000196470_9 (sequence is synthesized)
tcagggagagtcctagcaaaacggattcgattaaacttcagttccttgtatagtttctttagttgtttatggtccattttctattttagcatttattattctatgtagtctatccaaaga

SEQ ID NO: 705267 - DNA, 120 bp, Artificial Sequence
  ENSG00000196470_10 (sequence is synthesized)
cgattaagggagttccacatgttttccggaacattttgaaaagagagcttatccagtgtacagatcctaataaagtgcacattcagtgtaattttatttttttaatatcttttttaatcc

SEQ ID NO: 705268 - DNA, 120 bp, Artificial Sequence
  ENSG00000196470_11 (sequence is synthesized)
tatttttcttcctcttttgctcagtaaattttgtatgaaactttaaaaggacttatggcatgtaaacattatttataaagtaagtcatggttataattatttttctcctgcctccttatg

SEQ ID NO: 705269 - DNA, 120 bp, Artificial Sequence
  ENSG00000196470_12 (sequence is synthesized)
tatttatttcagaaatgagccgtcagactgctacagcattacctaccggtacctcgaagtgtccaccatcccagagggtgcctgccctgactggcacaactgcatccaacaatgacttgg

SEQ ID NO: 705270 - DNA, 120 bp, Artificial Sequence
  ENSG00000196470_13 (sequence is synthesized)
aacttgccggggccctttgggatccattcgcaacttggctatggagaaagtggctaattcagtacttttcccctgtaaatatgcgtcttctggatgtgaaataactctgccacacacaga

SEQ ID NO: 705271 - DNA, 120 bp, Artificial Sequence
  ENSG00000196470_14 (sequence is synthesized)
aaaagcagaccatgaagagctctgtgagtttaggccttattcctgtccgtgccctggtgcttcctgtaaatggcaaggctctctggatgctgtaatgccccatctgatgcatcagcataa

SEQ ID NO: 705272 - DNA, 120 bp, Artificial Sequence
  ENSG00000196470_15 (sequence is synthesized)
gtccattacaaccctacagggagaggatatagtttttcttgctacagacattaatcttcctggtgctgttgactgggtgatgatgcagtcctgttttggctttcacttcatgttagtctt

SEQ ID NO: 705273 - DNA, 120 bp, Artificial Sequence
  ENSG00000196470_16 (sequence is synthesized)
agagaaacaggaaaaatacgatggtcaccagcagttcttcgcaatcgtacagctgataggaacacgcaagcaagctgaaaattttgcttaccgacttgagctaaatggtcataggcgacg

SEQ ID NO: 705274 - DNA, 120 bp, Artificial Sequence
  ENSG00000196470_17 (sequence is synthesized)
attgacttgggaagcgactcctcgatctattcatgaaggaattgcaacagccattatgaatagcgactgtctagtctttgacaccagcattgcacagctttttgcagaaaatggcaattt

SEQ ID NO: 705275 - DNA, 120 bp, Artificial Sequence
  ENSG00000196470_18 (sequence is synthesized)
aggcatcaatgtaactatttccatgtgttgaaatggcaatcaaacattttctggccagtgtttaaaacttcagtttcacagaaaataaggcacccatctgtctgccaacctaaaactctt

SEQ ID NO: 705276 - DNA, 120 bp, Artificial Sequence
  ENSG00000196470_19 (sequence is synthesized)
tcggtaggtggaagctagacacatgaaggtaaataaaaagaaaggctgttaaatacaggaaacagttgcatgtagtaacactaatatatttaaaaataagtcaacagtaaaccactgaaa

SEQ ID NO: 705277 - DNA, 120 bp, Artificial Sequence
  ENSG00000196470_20 (sequence is synthesized)
aaatatatgtatatacacccaagatgggcatcttttgtattaagaaaggaagcattgtaaaataattctgagttttgtgtttgttgtagattgattgtattgttgaaaaagtttgttttt

SEQ ID NO: 705278 - DNA, 120 bp, Artificial Sequence
  ENSG00000196470_21 (sequence is synthesized)
gcgtgggagtgtgtgcctgcgtgggtgtgtgcgtgtttgggtttttttcctttaactgacaagccatcttgagtggtcatgggccactgcttttccctttgtgagtcaatacatagtgct

SEQ ID NO: 705279 - DNA, 120 bp, Artificial Sequence
  ENSG00000196470_22 (sequence is synthesized)
gctgtgtgctttttttgtgtgtatttgctaatttttattaattttagtttttcattaaataaatttgacttttctgtaattcaggtttttcctttttttgtaccattttaaagttagtat

SEQ ID NO: 705280 - DNA, 120 bp, Artificial Sequence
  ENSG00000196470_23 (sequence is synthesized)
cttttgatatgcatatttgtttatggtaaaaaatttataacgtgttcaatattttcttttcccccattaatcagttcattagaaatattttaaaatcagctattttgtgaagccatgagt

SEQ ID NO: 705281 - DNA, 120 bp, Artificial Sequence
  ENSG00000196470_24 (sequence is synthesized)
tccagaaagtaaaggtgacatcggaaaaataatcaaaagctatttaaagcatctataaggtgctctctttctgtcttctacagatgagtcacacctttgagcttaatctttgaaaggtta

SEQ ID NO: 705282 - DNA, 120 bp, Artificial Sequence
  ENSG00000196470_25 (sequence is synthesized)
gagaataaattgatttttataaatactgcaaatcaggcttttgtttcctttttcagatatcttggacaaatcacatattttaaaatttgttcttgtatttattggttttgcagaagaagg

SEQ ID NO: 705283 - DNA, 120 bp, Artificial Sequence
  ENSG00000196470_26 (sequence is synthesized)
catcgtcatgcacagtatttgtaattaaaagcaaatcatttgtttaaaaaggcagtttgcaaaaaatgtttttggtcttttataattctcattaaaagaatatctggcaaattaaaaaaa

SEQ ID NO: 705284 - DNA, 80 bp, Artificial Sequence
  ENSG00000196470_27 (sequence is synthesized)
gagccggggcggccgttgcggggcgcgctctcgagaggcggcggcggcccagggtgtcccgtcggtctcggcgccgggaa

SEQ ID NO: 705285 - DNA, 120 bp, Artificial Sequence
  ENSG00000196470_28 (sequence is synthesized)
gcaggcaggctcctgcagtaactcttgagctggctcagggagcgcacttccttctcagccagcgcgtcgccccctgcatccgtggcctccactggagctgggcaggaccctacccagtga

SEQ ID NO: 705286 - DNA, 120 bp, Artificial Sequence
  ENSG00000196470_29 (sequence is synthesized)
atctggagaaaacaaacttgggagacagacgaaagcttagggcacattggaggacagcgcagctgtggctcccatttttggagatgcagtcgaatttgagctcacagggaggtgtggttg

SEQ ID NO: 705287 - DNA, 120 bp, Artificial Sequence
  ENSG00000196470_30 (sequence is synthesized)
cctcctggggatggaaaggcttcctttctccacctctgtaactggtgcttctgagaagtaaatggtatttggatcctgacctcagacgcgaatttgggtcttctgtgcttaggagcagaa

SEQ ID NO: 705288 - DNA, 120 bp, Artificial Sequence
  ENSG00000196470_31 (sequence is synthesized)
agagcccaggaggggcctgttcctttacttcttgggggaaacgcaatgcgtggcctgacttctcatgacgggaaaggctactccaccttctctgtactcctggaggggagtcttgttcac

SEQ ID NO: 705289 - DNA, 120 bp, Artificial Sequence
  ENSG00000196470_32 (sequence is synthesized)
ccgtctgggaactgaggagtgtctctgccagaccgccaccccgtctgggaggagtctataaagcatcaactcaaagtgacaagaagtggacacatattctaagggagctccccaggacaa

SEQ ID NO: 705290 - DNA, 120 bp, Artificial Sequence
  ENSG00000196470_33 (sequence is synthesized)
aagggagctccccaggacaaaaggaagatggaggaaatggtctctgaagggaagtggggaaagtaagaagtaacttggactcttctagaggagagcaggcacaaactaagccaagaaaag

SEQ ID NO: 705291 - DNA, 120 bp, Artificial Sequence
  ENSG00000196470_34 (sequence is synthesized)
ggaactgaagtacttcaaataatgtgagcttaaacatgttacttcattgaaacaaccaaaactacttgatgtttacatctaaaatcctggttaaaataaattttagatttggaaagggaa

SEQ ID NO: 705292 - DNA, 120 bp, Artificial Sequence
  ENSG00000196470_35 (sequence is synthesized)
gggcagtgtggatggcatgcagtgggatggtgaaggatggggccagaggaaggaaggacatgcccgcccagctgtgtttgggatgctgcctccctggagaggggtcatgaagcctagcag

SEQ ID NO: 705293 - DNA, 120 bp, Artificial Sequence
  ENSG00000196470_36 (sequence is synthesized)
gcagtggagcccaggtaatggtggaccttgaggggaacgccagtgggaaacttagacccatgaactccagactgtacattgaggccatcagtttcaaatgtttactttttggtatttgct

SEQ ID NO: 705294 - DNA, 120 bp, Artificial Sequence
  ENSG00000196470_37 (sequence is synthesized)
attccaagctgaacacagggaggtgggtgagttggaagcttgtttgtgcttggaagcttgtttgtgctggatgtactttagcaggacttccccggactacagggggcttctgagccactg

SEQ ID NO: 705295 - DNA, 120 bp, Artificial Sequence
  ENSG00000196470_38 (sequence is synthesized)
ggctccccagagtgatgagagacctgctgtgtagactactcctgaaagactttcatgaaggcacaaaagcaacaggtttgctgagtggtgctgcccgtgccccataaggagaacggtgta

SEQ ID NO: 705296 - DNA, 120 bp, Artificial Sequence
  ENSG00000196470_39 (sequence is synthesized)
tactgtttccacacgatgcagcaagccaagctccaggctgcacacttggggtctttaaaggatgcctcattagagtaaaatgggacttacttttttttttataactcaattttattctga

SEQ ID NO: 705297 - DNA, 120 bp, Artificial Sequence
  ENSG00000196470_40 (sequence is synthesized)
gcccctgttatgctaggtggcagaaatgtcatctcaggcaatgttgggggcctgcccctttcctcagggcttgctatcgaggaagtcatcgagggcttgcgatcaaggcctggggtccca

SEQ ID NO: 705298 - DNA, 120 bp, Artificial Sequence
  ENSG00000196470_41 (sequence is synthesized)
cctgtcctcacagcttgctgctgggacacctgctcctccgtgccccaggtctagagtctctgctggtgttgggcgcctggcagcgtttcactggggaggcctccttggctccagctcatt

SEQ ID NO: 705299 - DNA, 120 bp, Artificial Sequence
  ENSG00000196470_42 (sequence is synthesized)
cctctttctctgtgtctggtgcctgcccagggcctttcccattaaatggtactgggtgctctctggtcatcggctccacagtctggatggatgttttgcctcccatctgaagcttagaca

SEQ ID NO: 705300 - DNA, 120 bp, Artificial Sequence
  ENSG00000196470_43 (sequence is synthesized)
aggcacgagggtcaaggatccccactcaggacccatcaacatctgtattcccccacctggggaagggtgctggttttcttcattatgcaccccccatctttaggagtctataaagcatca

SEQ ID NO: 705301 - DNA, 120 bp, Artificial Sequence
  ENSG00000196470_44 (sequence is synthesized)
actcaaagtgacaagaagtggacacatattctaagggagctccccaggacaaaaggaagatggaggaaatggtctctgaaggctcaaagcagctccccctgccccgtgtaaagcgctgat

SEQ ID NO: 705302 - DNA, 120 bp, Artificial Sequence
  ENSG00000196470_45 (sequence is synthesized)
gagatggcaatttaaactgctttgatgaccaggtttcattaggatcaagggatgaaaagactgagattgtatacatgtaaataccaagttcagtgagtttccatggcctcttctgtctta

SEQ ID NO: 705303 - DNA, 120 bp, Artificial Sequence
  ENSG00000196470_46 (sequence is synthesized)
tgttgatttacccagggaagtggggaaagtaagaagtaacttggactcttctagaggagagcaggcacaaactaagccaagaaaagcacgtttgagaattccagaggcagaagttgcttc

SEQ ID NO: 705304 - DNA, 120 bp, Artificial Sequence
  ENSG00000196470_47 (sequence is synthesized)
catgacttctgcagggctgtccttggttcctactgcagggcgcctgtgtggttgggattccttttctgtttcaagatggagctgggttccacccttggagctttgagaggctttagcagt

SEQ ID NO: 705305 - DNA, 120 bp, Artificial Sequence
  ENSG00000196470_48 (sequence is synthesized)
tgctgtcctgtaatacctccgttcccaagaaataccgttcacatttcgcttctttttcacactttgaataggagttaaaatgtgctttctgtagtgtttggaaaatggcaaagatatatt

SEQ ID NO: 705306 - DNA, 120 bp, Artificial Sequence
  ENSG00000196470_49 (sequence is synthesized)
gtaatgtgagcccgaactgttgttgataaatgtataactattgctaggtcaagaaattgtgaacaacagtgttttgcttggtccgtagctatattgtgttaaatataaactgagtttact

SEQ ID NO: 705307 - DNA, 120 bp, Artificial Sequence
  ENSG00000196475_0 (sequence is synthesized)
agagctgctgagccgacctactggtgtcatggcagccccaaagacagcagctgtggggccgttggtgggagcggtggtccagggcaccaactccactcgctttctggttttcaattcaaa

SEQ ID NO: 705308 - DNA, 120 bp, Artificial Sequence
  ENSG00000196475_1 (sequence is synthesized)
aacagcggaactacttagtcatcacaaagtggaattaacacaagagttcccaaaagaaggatgggtggaacaagaccctaaagaaattcttcagtctgtctacgagtgtatagcgagaac

SEQ ID NO: 705309 - DNA, 120 bp, Artificial Sequence
  ENSG00000196475_2 (sequence is synthesized)
gtgtgagaaacttgacgaactgaatattgatatatccaacataaaagctgttggtgtcagcaatcagagggaaaccactgtaatctgggacaagttaacaggagagcctctctacaatgc

SEQ ID NO: 705310 - DNA, 120 bp, Artificial Sequence
  ENSG00000196475_3 (sequence is synthesized)
tgtggtgtggcttgatctaagaacccagactactgttgaggatcttagtaaaaaaattccaggaaatagtaacttcgtcaagtctaagacaggccttccactcagcacttacttcagtgc

SEQ ID NO: 705311 - DNA, 120 bp, Artificial Sequence
  ENSG00000196475_4 (sequence is synthesized)
agtaaaacttcgttggatgcttgacaatgtgagaaacgtccaaaaggctgttgaagaaggtagagctctttttggtaccattgattcatggcttatctggagtttgacaggaggagttaa

SEQ ID NO: 705312 - DNA, 120 bp, Artificial Sequence
  ENSG00000196475_5 (sequence is synthesized)
tggaggcgtgcattgtacagatgtaacaaatgcaagtaggacaatgctttttaatatccattctttggaatgggataaagagctctgtgacttttttgaaattccaatggaccttcttcc

SEQ ID NO: 705313 - DNA, 120 bp, Artificial Sequence
  ENSG00000196475_6 (sequence is synthesized)
aaatgtcttcagttcttctgagatctatggcctaattaaaactggagccctggaaggtgtgccaatatctgggtgtttgggggaccaatgtgctgcattagtaggacaaatgtgcttcca

SEQ ID NO: 705314 - DNA, 120 bp, Artificial Sequence
  ENSG00000196475_7 (sequence is synthesized)
tgttttctgaacatggccttttgaccacagtagcttacaaactaggcagagagaagccagcatattatgcactggaaggttctgttgctatagcaggtgctgttattcgttggctaagag

SEQ ID NO: 705315 - DNA, 120 bp, Artificial Sequence
  ENSG00000196475_8 (sequence is synthesized)
acaatcttggaattatagagacctcaggagacattgaaagacttgctaaagaagtaggaacttcttatggctgttactttgtcccagccttttcagggttatatgcaccttattgggagc

SEQ ID NO: 705316 - DNA, 120 bp, Artificial Sequence
  ENSG00000196475_9 (sequence is synthesized)
ccagtgcaagagggatactctgtggcctcactcagtttaccaataaatgtcatattgcttttgctgcattagaagctgtttgtttccaaacccgagagattttggaagccatgaaccgtg

SEQ ID NO: 705317 - DNA, 120 bp, Artificial Sequence
  ENSG00000196475_10 (sequence is synthesized)
actgtggaattccacttcgtcatttgcaggtagatggaggaatgaccaacaacaaagttcttatgcagctacaagcagatattcttcatattccagtaataaaaccctttatgcctgaaa

SEQ ID NO: 705318 - DNA, 120 bp, Artificial Sequence
  ENSG00000196475_11 (sequence is synthesized)
caactgcactaggagctgccatggcagcaggggctgcagagggagtaagcgtttggagccttgaaccccaggctttgtcagttctcaggatggaacgatttgaaccacagatccaggcca

SEQ ID NO: 705319 - DNA, 120 bp, Artificial Sequence
  ENSG00000196475_12 (sequence is synthesized)
cagaaagtgaaattcgttatgccacatggaagaaagccgtaatgaagtcaatgggttgggttaccagtcagtctcctgaaggtggtgatccttctatcttctctagtctgcctttgggat

SEQ ID NO: 705320 - DNA, 120 bp, Artificial Sequence
  ENSG00000196475_13 (sequence is synthesized)
tttttatagtgagtagcatggtaatgctaattggagcaagatatatctcgggtgtgccataataataccagctatggagtcccaagatgtaaacattttacataatgaaagcatatagca

SEQ ID NO: 705321 - DNA, 120 bp, Artificial Sequence
  ENSG00000196475_14 (sequence is synthesized)
gttctgcctcttaatataatgacactattatagactctgattttgtttataaaccacttgctacatgacccatgaaaaccctagacttgtgacctgaaataaagaaaatacgttagaaga

SEQ ID NO: 705322 - DNA, 120 bp, Artificial Sequence
  ENSG00000196476_0 (sequence is synthesized)
gaaagcatcgggtctcgggacttctgagtggcctgggttaccgcgcgatctacactgagacaaggaagttggaaaagccgagtagttataccagaagatcagggtctcacagactcgcaa

SEQ ID NO: 705323 - DNA, 120 bp, Artificial Sequence
  ENSG00000196476_1 (sequence is synthesized)
cttctcttccattttccccaatggcgcatgtcttacaaaaacccaagcactctgggactcactccatagtccaggagttccaggttccggattatgttccatggcagcagtccaagcagg

SEQ ID NO: 705324 - DNA, 120 bp, Artificial Sequence
  ENSG00000196476_2 (sequence is synthesized)
aaaccaagccatctactctgcctccagtccaacaagccaacagccttcatacaagcaaaatgaagactttgactagggtccaaccagtgtttcacttcaagcccactacggtggtgacaa

SEQ ID NO: 705325 - DNA, 120 bp, Artificial Sequence
  ENSG00000196476_3 (sequence is synthesized)
gctgccagccgaagaatccaagagaactacatagaaggcggaagttggaccctgggaagatgcatgccaaaatctggttaatgaagacctcgctcaggagcgggagggccgctctgcgag

SEQ ID NO: 705326 - DNA, 120 bp, Artificial Sequence
  ENSG00000196476_4 (sequence is synthesized)
agctccgaagccgtgagaacttcctcagcaagctcaaccgggagctgatcgagaccatccaggagatggagaacagcacgaccctgcacgtgcgggccctgctgcagcagcaggacaccc

SEQ ID NO: 705327 - DNA, 120 bp, Artificial Sequence
  ENSG00000196476_5 (sequence is synthesized)
tggcgaccatcatcgacatcttggagtactcaaacaagaagaggctgcagcaattgaaatctgagcttcaggagtgggaagaaaagaagaaatgcaagatgagctatcttgagcagcagg

SEQ ID NO: 705328 - DNA, 120 bp, Artificial Sequence
  ENSG00000196476_6 (sequence is synthesized)
caagattgagaagacccaggaggaagtgaacttcctgagcacttacatggaccatgagtattccatcaagtctgtccagatctccactcttatgcgccagctgcagcaggttaaggacag

SEQ ID NO: 705329 - DNA, 120 bp, Artificial Sequence
  ENSG00000196476_7 (sequence is synthesized)
ccagcaggatgagctggatgacctcggtgagatgcgcagaaaggtcctggaatccttgtctgacaagattcagaagaagaagaaaaaaattctgagttctgtggtggcggaaacccagcg

SEQ ID NO: 705330 - DNA, 120 bp, Artificial Sequence
  ENSG00000196476_8 (sequence is synthesized)
tccctatgaagaggctctcctacagaagatgtgggaaagccaggacttcctgaaatgcatgcaaaggttcagagaaattattgaccagtttgaggagaacatgcctgtattaagggccga

SEQ ID NO: 705331 - DNA, 120 bp, Artificial Sequence
  ENSG00000196476_9 (sequence is synthesized)
ggtggaagagctccaagcccagacccgggaaccccgagaggtcatatttgaggatgttctgcttcggagacccaagtgcaccccagacatggatgtcatcctcaacattcctgtggaaga

SEQ ID NO: 705332 - DNA, 120 bp, Artificial Sequence
  ENSG00000196476_10 (sequence is synthesized)
gccactacccttctagatggcagtgccatgggccgccctcccctcctgctctcttcccagcacctggagccttggatcatttacttccaggaccggatctccattcagaccctgatctac

SEQ ID NO: 705333 - DNA, 120 bp, Artificial Sequence
  ENSG00000196476_11 (sequence is synthesized)
agtctccctgctccctctgcccttcctccctctttctttccctccctccctccctcccttcttccccccttcccttccctcctccttccttcctcctctccctccctccctcctttcttt

SEQ ID NO: 705334 - DNA, 120 bp, Artificial Sequence
  ENSG00000196476_12 (sequence is synthesized)
cttcctgtggttttttcctctcttcttcccttctttctggttggtgctgctgggccaggtgggaatttctgattaaatctgctattccttttttaccaataaagctggatttacatttgc

SEQ ID NO: 705335 - DNA, 120 bp, Artificial Sequence
  ENSG00000196476_13 (sequence is synthesized)
gggctattgtccccggtaaactgcagtttctggttcgagactccaatcctgtttcgaattgctgcttgctgccccttgggctggggataatggaagttctttcccttcccaactctttcc

SEQ ID NO: 705336 - DNA, 120 bp, Artificial Sequence
  ENSG00000196482_0 (sequence is synthesized)
ggttttgtagactttcatagccaaagaaaccggcttcggcttctttaaaatccccgacgactcacctgattaacctgctgcagttctgaccctgccaagagctgacaatttactggttca

SEQ ID NO: 705337 - DNA, 120 bp, Artificial Sequence
  ENSG00000196482_1 (sequence is synthesized)
tcaatgaaacaatattaaattatgaagatgtaaggaaaaaatcctacgctaacactgtcgcagtttgaaaggcttctctgcagaatgtcaaacaaagatcgacacattgattccagctgt

SEQ ID NO: 705338 - DNA, 120 bp, Artificial Sequence
  ENSG00000196482_2 (sequence is synthesized)
tcgtccttcatcaagacggaaccttccagcccagcctccctgacggacagcgtcaaccaccacagccctggtggctcttcagacgccagtgggagctacagttcaaccatgaatggccat

SEQ ID NO: 705339 - DNA, 120 bp, Artificial Sequence
  ENSG00000196482_3 (sequence is synthesized)
cagaacggacttgactcgccacctctctacccttctgctcctatcctgggaggtagtgggcctgtcaggaaactgtatgatgactgctccagcaccattgttgaagatccccagaccaag

SEQ ID NO: 705340 - DNA, 120 bp, Artificial Sequence
  ENSG00000196482_4 (sequence is synthesized)
tgtgaatacatgctcaactcgatgcccaagagactgtgtttagtgtgtggtgacatcgcttctgggtaccactatggggtagcatcatgtgaagcctgcaaggcattcttcaagaggaca

SEQ ID NO: 705341 - DNA, 120 bp, Artificial Sequence
  ENSG00000196482_5 (sequence is synthesized)
attcaaggcaatatagaatacagctgccctgccacgaatgaatgtgaaatcacaaagcgcagacgtaaatcctgccaggcttgccgcttcatgaagtgtttaaaagtgggcatgctgaaa

SEQ ID NO: 705342 - DNA, 120 bp, Artificial Sequence
  ENSG00000196482_6 (sequence is synthesized)
gaaggggtgcgtcttgacagagtacgtggaggtcggcagaagtacaagcgcaggatagatgcggagaacagcccatacctgaaccctcagctggttcagccagccaaaaagccatataac

SEQ ID NO: 705343 - DNA, 120 bp, Artificial Sequence
  ENSG00000196482_7 (sequence is synthesized)
aagattgtctcacatttgttggtggctgaaccggagaagatctatgccatgcctgaccctactgtccccgacagtgacatcaaagccctcactacactgtgtgacttggccgaccgagag

SEQ ID NO: 705344 - DNA, 120 bp, Artificial Sequence
  ENSG00000196482_8 (sequence is synthesized)
ttggtggttatcattggatgggcgaagcatattccaggcttctccacgctgtccctggcggaccagatgagccttctgcagagtgcttggatggaaattttgatccttggtgtcgtatac

SEQ ID NO: 705345 - DNA, 120 bp, Artificial Sequence
  ENSG00000196482_9 (sequence is synthesized)
cggtctctttcgtttgaggatgaacttgtctatgcagacgattatataatggacgaagaccagtccaaattagcaggccttcttgatctaaataatgctatcctgcagctggtaaagaaa

SEQ ID NO: 705346 - DNA, 120 bp, Artificial Sequence
  ENSG00000196482_10 (sequence is synthesized)
tacaagagcatgaagctggaaaaagaagaatttgtcaccctcaaagctatagctcttgctaattcagactccatgcacatagaagatgttgaagccgttcagaagcttcaggatgtctta

SEQ ID NO: 705347 - DNA, 120 bp, Artificial Sequence
  ENSG00000196482_11 (sequence is synthesized)
catgaagcgctgcaggattatgaagctggccagcacatggaagaccctcgtcgagctggcaagatgctgatgacactgccactcctgaggcagacctctaccaaggccgtgcagcatttc

SEQ ID NO: 705348 - DNA, 120 bp, Artificial Sequence
  ENSG00000196482_12 (sequence is synthesized)
tacaacatcaaactagaaggcaaagtcccaatgcacaaactttttttggaaatgttggaggccaaggtctgactaaaagctccctgggccttcccatccttcatgttgaaaaagggaaaa

SEQ ID NO: 705349 - DNA, 120 bp, Artificial Sequence
  ENSG00000196482_13 (sequence is synthesized)
taaacccaagagtgatgtcgaagaaacttagagtttagttaacaacatcaaaaatcaacagactgcactgataatttagcagcaagactatgaagcagctttcagattcctccataggtt

SEQ ID NO: 705350 - DNA, 120 bp, Artificial Sequence
  ENSG00000196482_14 (sequence is synthesized)
cctgatgagtttctttctactttctccatcatcttctttcctctttcttcccacatttctctttctctttattttttctccttttcttctttcacctcccttatttctttgcttctttca

SEQ ID NO: 705351 - DNA, 120 bp, Artificial Sequence
  ENSG00000196482_15 (sequence is synthesized)
ttcctagttcccattctcctttattttcttcccgtctgcctgccttctttcttttctttacctactctcattcctctcttttctcatccttccccttttttctaaatttgaaatagcttt

SEQ ID NO: 705352 - DNA, 120 bp, Artificial Sequence
  ENSG00000196482_16 (sequence is synthesized)
agtttaaaaaaaaatcctcccttccccctttcctttccctttctttcctttttccctttccttttccctttcctttcctttcctcttgaccttctttccatctttctttttcttccttct

SEQ ID NO: 705353 - DNA, 120 bp, Artificial Sequence
  ENSG00000196482_17 (sequence is synthesized)
gctgctgaacttttaaaagaggtctctaactgaagagagatggaagccagccctgccaaaggatggagatccataatatggatgccagtgaacttattgtgaaccatactgtccccaatg

SEQ ID NO: 705354 - DNA, 120 bp, Artificial Sequence
  ENSG00000196482_18 (sequence is synthesized)
actaaggaatcaaagagagagaaccaacgttcctaaaagtacagtgcaacatatacaaattgactgagtgcagtattagatttcatgggagcagcctctaattagacaacttaagcaacg

SEQ ID NO: 705355 - DNA, 120 bp, Artificial Sequence
  ENSG00000196482_19 (sequence is synthesized)
ttgcatcggctgcttcttatcattgcttttccatctagatcagttacagccatttgattccttaattgttttttcaagtcttccaggtatttgttagtttagctactatgtaactttttc

SEQ ID NO: 705356 - DNA, 120 bp, Artificial Sequence
  ENSG00000196482_20 (sequence is synthesized)
agggaatagtttaagctttattcattcatgcaatactaaagagaaataagaatactgcaattttgtgctggctttgaacaattacgaacaataatgaaggacaaatgaatcctgaaggaa

SEQ ID NO: 705357 - DNA, 120 bp, Artificial Sequence
  ENSG00000196482_21 (sequence is synthesized)
gatttttttgtaccagctttaccacttttcagccatttattaatatgggaatttaacttactcaagcaatagttgaagggaaggtgcatattatcacggatgcaatttatgttgtgtgcc

SEQ ID NO: 705358 - DNA, 120 bp, Artificial Sequence
  ENSG00000196482_22 (sequence is synthesized)
agtctggtcccaaacatcaatttcttaacatgagctccagtttacctaaatgttcactgacacaaaggatgagattacacctacagtgactctgagtagtcacatatataagcactgcac

SEQ ID NO: 705359 - DNA, 120 bp, Artificial Sequence
  ENSG00000196482_23 (sequence is synthesized)
atgagatatagatccgtagaattgtcaggagtgcacctctctacttgggaggtacaattgccatatgatttctagctgccatggtggttaggaatgtgatactgcctgtttgcaaagtca

SEQ ID NO: 705360 - DNA, 120 bp, Artificial Sequence
  ENSG00000196482_24 (sequence is synthesized)
cagaccttgcctcagaaggagctgtgagccagtattcatttaagaggcaataaggcaaatgccagaattaaaaaaaaaaatcatcaaagacagaaaatgcctgaccaaattctaaaacct

SEQ ID NO: 705361 - DNA, 120 bp, Artificial Sequence
  ENSG00000196482_25 (sequence is synthesized)
aatccatataagtttattcatttaggaatgttcgtttaaattaatctgcagtttttaccaagagctaagccaatatatgtgcttttcaaccagtattgtcacagcatgaaagtcaagtca

SEQ ID NO: 705362 - DNA, 120 bp, Artificial Sequence
  ENSG00000196482_26 (sequence is synthesized)
ggttccagactgttaagaggtgtaatctaatgaagaaatcaattagatgccccgaaatctacagtcgctgaataaccaataaacagtaacctccatcaaatgctataccaatggaccagt

SEQ ID NO: 705363 - DNA, 120 bp, Artificial Sequence
  ENSG00000196482_27 (sequence is synthesized)
gttagtagctgctccctgtattatgtgaacagtcttattctatgtacacagatgtaattaaaattgtaatcctaacaaacaaaagaaatgtagttcagcttttcaatgtttcatgtttgc

SEQ ID NO: 705364 - DNA, 120 bp, Artificial Sequence
  ENSG00000196482_28 (sequence is synthesized)
tgtgcttttctgaattttatgttgcattcaaagactgttgtcttgttcttgtggtgtttggattcttgtggtgtgtgcttttagacacagggtagaattagagacaatattggatgtaca

SEQ ID NO: 705365 - DNA, 120 bp, Artificial Sequence
  ENSG00000196482_29 (sequence is synthesized)
attcctcaggagactacagtagtatattctattccttaccagtaataaggttcttcctaataataattaagagattgaaactccaaacaagtattcattatgaacagatacacatcaaaa

SEQ ID NO: 705366 - DNA, 120 bp, Artificial Sequence
  ENSG00000196482_30 (sequence is synthesized)
tgaacagatacacatcaaaatcataataatattttcaaaacaaggaataatttctctaatggtttattatagaataccaatgtatagcttagaaataaaactttgaatatttcaagaata

SEQ ID NO: 705367 - DNA, 120 bp, Artificial Sequence
  ENSG00000196482_31 (sequence is synthesized)
atgctgtatatatggctttcactcaatcatctctcagatgttgttattaactcgctctgtgttgttgcaaaactttttggtgcagattcgtttccaaaactattgctactttgtgtgctt

SEQ ID NO: 705368 - DNA, 120 bp, Artificial Sequence
  ENSG00000196482_32 (sequence is synthesized)
taaacaaaataccttgggttgatgaaacatcaacccagtgctaggaatactgtgtatctatcattagctatatgggactatattgtagattgtggtttctcagtagagaagtgactgtag

SEQ ID NO: 705369 - DNA, 120 bp, Artificial Sequence
  ENSG00000196482_33 (sequence is synthesized)
tgtgattctagataaatcatcattagcaattcattcagatggtcaataacttgaaatttatagctgtgataggagttcagaaattggcacatccctttaaaaataacaacagaaaataca

SEQ ID NO: 705370 - DNA, 120 bp, Artificial Sequence
  ENSG00000196482_34 (sequence is synthesized)
actcctgggaaaaaaggtgctgattctataagattatttatatatgtaagtgtttaaaaagattattttccagaaagtttgtgcagggtttaagttgctactattcaactacactatata

SEQ ID NO: 705371 - DNA, 120 bp, Artificial Sequence
  ENSG00000196482_35 (sequence is synthesized)
taaataaaatatatacaatatatacattgttttcactgtatcacattaaagtacttgggcttcagaagtaagagccaaccaactgaaaacctgagatggagatatgttcaaagaatgaga

SEQ ID NO: 705372 - DNA, 120 bp, Artificial Sequence
  ENSG00000196482_36 (sequence is synthesized)
tacaattttttagttttcagtttaagtaactctcagcattacaaaagagtaagtatctcacaaataggaaataaaactaaaacgtggatttaaaaagaactgcacgggctttagggtaaa

SEQ ID NO: 705373 - DNA, 120 bp, Artificial Sequence
  ENSG00000196482_37 (sequence is synthesized)
tgctcatcttaaacctcactagagggaagtcttctcaagtttcaagcaagaccatttacttaatgtgaagttttggaaagttataaaggtgtatgttttagccatatgattttaatttta

SEQ ID NO: 705374 - DNA, 120 bp, Artificial Sequence
  ENSG00000196482_38 (sequence is synthesized)
attttgcttcttttaggttcgttcttatttaaagcaatatgattgtgtgactccttgtagttacacttgtgtttcaatcagatcagattgttgtatttattccactattttgcatttaaa

SEQ ID NO: 705375 - DNA, 120 bp, Artificial Sequence
  ENSG00000196482_39 (sequence is synthesized)
tgataacataaaagatataaaaaatttaaaactgctatttttcttatagaagagaaaatgggtgttggtgattgtattttaattatttaagcgtctctgtttacctgcctaggaaaacat

SEQ ID NO: 705376 - DNA, 120 bp, Artificial Sequence
  ENSG00000196482_40 (sequence is synthesized)
tttatggcagtcttatgtgcaaagatcgtaaaaggacaaaaaatttaaactgcttataataatccaggagttgcattatagccagtagtaaaaataataataataataataaaaccatgt

SEQ ID NO: 705377 - DNA, 120 bp, Artificial Sequence
  ENSG00000196482_41 (sequence is synthesized)
ctatagctgtagatgggcttcacatctgtaaagcaatcaattgtatatttttgtgatgtgtaccatactgtgtgctccagcaaatgtccatttgtgtaaatgtatttattttatattgta

SEQ ID NO: 705378 - DNA, 120 bp, Artificial Sequence
  ENSG00000196482_42 (sequence is synthesized)
tatattgttaaatgcaaaaaggagatatgattctgtaactccaatcagttcagatgtgtaactcaaattattatgcctttcaggatgatggtagagcaatattaaacaagcttccacttt

SEQ ID NO: 705379 - DNA, 120 bp, Artificial Sequence
  ENSG00000196482_43 (sequence is synthesized)
tatccacacacagcatcggaatattgctagctaactcaacaaatgtgcaaatcaggggactgttgtgtgtgtaccgattcatgtctatactgtttttattggtgaagtaggaaattagtc

SEQ ID NO: 705380 - DNA, 120 bp, Artificial Sequence
  ENSG00000196482_44 (sequence is synthesized)
taaatatttgattctgcagttgcatgtcaccaaattcagtgaggttagatgttaaatcatcttgttggctttgggctgaatttgatctaagagacaaaagtctcaaacaacagactactt

SEQ ID NO: 705381 - DNA, 120 bp, Artificial Sequence
  ENSG00000196482_45 (sequence is synthesized)
actgccaccacatctcgattcaaagaatagttttcacatgttcgtggtgtggaaaggactttctgtttctcactaatttcttcagctataccaagagtggtgttgtctttgaacaggaag

SEQ ID NO: 705382 - DNA, 120 bp, Artificial Sequence
  ENSG00000196482_46 (sequence is synthesized)
cttcttataagaaaccttcctagtcagagaattcaactttcttcttttcttcattcatgaaaatgcagatccactgagaaagggaataaggcttctctgcagaatgtcaaacaaagatcg

SEQ ID NO: 705383 - DNA, 120 bp, Artificial Sequence
  ENSG00000196482_47 (sequence is synthesized)
agctgacaatttactggttcatcaatgaaacaatattaaattatgaagatgtaaggaaaaaatcctacgctaacactgtcgcagtttgaaagacttgaatgagacctgcctcatcagtca

SEQ ID NO: 705384 - DNA, 120 bp, Artificial Sequence
  ENSG00000196482_48 (sequence is synthesized)
tgggatcatagtgtcacagatggaaaagcaactatcagctgaattgtactgaactacacacttggctaattcatcttattgctctacacatctaaaggaaggctcattctgttcttggag

SEQ ID NO: 705385 - DNA, 86 bp, Artificial Sequence
  ENSG00000196482_49 (sequence is synthesized)
ggagggcgagggcgggctcctctggaggcggcgggctccaggccgggctccctaaacgggtcagcaattggagcgggaaggccgga

SEQ ID NO: 705386 - DNA, 120 bp, Artificial Sequence
  ENSG00000196482_50 (sequence is synthesized)
aagctccaatcggggctttaagtccttgattaggagagtgtgagagctttggtcccaactggctgtgcctataggcttgtcactaggagaacatttgtgttaattgcactgtgctctgtc

SEQ ID NO: 705387 - DNA, 120 bp, Artificial Sequence
  ENSG00000196482_51 (sequence is synthesized)
aaggaaactttgatttatagctggggtgcacaaataatggttgccggtcgcacatggattcggtagaactttgccttcctgaatctttttccctgcactacgaggaagagtagacttgaa

SEQ ID NO: 705388 - DNA, 120 bp, Artificial Sequence
  ENSG00000196482_52 (sequence is synthesized)
tgacaatttactggttcatcaatgaaacaatattaaattatgaagatgtaaggaaaaaatcctacgctaacactgtcgcagtttgaaaggtccgtgagagaaaagttaattatgatgtta

SEQ ID NO: 705389 - DNA, 120 bp, Artificial Sequence
  ENSG00000196482_53 (sequence is synthesized)
gagggcgagggcgggctcctctggaggcggcgggctccaggccgggctccctaaacgggtcagcaattggagcgggaaggccggacagagctgacaatttactggttcatcaatgaaaca

SEQ ID NO: 705390 - DNA, 120 bp, Artificial Sequence
  ENSG00000196482_54 (sequence is synthesized)
attctgggcaaagtgtggtgacttgtggattttcactgtgacgatgttgctacacggtccttcacttggagttagtgcaacaaggagacatctgagcttaaaatttatgaaacatctaaa

SEQ ID NO: 705391 - DNA, 120 bp, Artificial Sequence
  ENSG00000196482_55 (sequence is synthesized)
gaaatcaagctttatataggatcaccgttgtgggttgaattgtgtatccccaaaagatgttgaagtcctgaccacctccctataccttacaatatagccttttacggaagtagggtcttt

SEQ ID NO: 705392 - DNA, 120 bp, Artificial Sequence
  ENSG00000196482_56 (sequence is synthesized)
gcagaagatcaagttaagatgaaatcatttgattgggccctagttcaatatatcttatgtccttataaaaggagacaatttggacacagggacaaggggagaatgccacataaagattgg

SEQ ID NO: 705393 - DNA, 120 bp, Artificial Sequence
  ENSG00000196482_57 (sequence is synthesized)
aattatgctgccataagccaaggaactccaaagatcgctggcaagctgctaaaagctagcacagattcatggaacagagtctccgtcatagcctacaaaaggaatcaaccctgctgacat

SEQ ID NO: 705394 - DNA, 120 bp, Artificial Sequence
  ENSG00000196482_58 (sequence is synthesized)
tgggaatcaggtttttctgtcagaggaataaaggcctttctttccaggtcaattcctgttgtgctgaaggctgggaatcatcacgcccttttggtgtgggccccagctttgagcctctgt

SEQ ID NO: 705395 - DNA, 120 bp, Artificial Sequence
  ENSG00000196482_59 (sequence is synthesized)
gatgatggtagaatctggaagtcagaagcccatatcctagatcagctgctttgctgggctgaccttcagtgtgatcctgcatcccaaactcctgacctctccagagaacttggggtgttc

SEQ ID NO: 705396 - DNA, 120 bp, Artificial Sequence
  ENSG00000196482_60 (sequence is synthesized)
tcccaagatgctgggcctctgggaagcatctccttaggtgaacagccccagatgcctccttcttaagttggtctgttactccacgctgactatcaacccccaagtgtgaaagatcacgtt

SEQ ID NO: 705397 - DNA, 120 bp, Artificial Sequence
  ENSG00000196482_61 (sequence is synthesized)
tattcctgagggaaacacggagttgttcctaactctactttgccttcttagaacacgtttgcttctggttgaaatgaaaattttcagtaaagtgttttggttttttttttctgtattatt

SEQ ID NO: 705398 - DNA, 120 bp, Artificial Sequence
  ENSG00000196482_62 (sequence is synthesized)
tttgtttttttatttccttaaacctctgttttgggtgaagcactacagcagaagtctagtgtcatacaaaagtacaactggaatctttgaatgtaaccctcatccaatagcagacattta

SEQ ID NO: 705399 - DNA, 120 bp, Artificial Sequence
  ENSG00000196482_63 (sequence is synthesized)
aaaaatcactcttataaatgttttaaatgtgttccaaacagcattgacctcctcaataggtaattttgttaaaggactgggctttggctgtttttttttttttttttctgacttgttgat

SEQ ID NO: 705400 - DNA, 120 bp, Artificial Sequence
  ENSG00000196482_64 (sequence is synthesized)
ttagagaccagctgcctcctaggaaattgtgatcaaaagctataaaagcagaccataactatgtcaaatgcatgagtaggaattgggaaacttgatttgtcctgtgattcaatctgggtt

SEQ ID NO: 705401 - DNA, 120 bp, Artificial Sequence
  ENSG00000196482_65 (sequence is synthesized)
aaagattggtgccacttgaaattactatccttagggaagtcattaacaaccccccaaatgtttgtatgtgcctgtatgcaagtgtatgttgtatatttacaatttcatcccatgttctgt

SEQ ID NO: 705402 - DNA, 120 bp, Artificial Sequence
  ENSG00000196482_66 (sequence is synthesized)
ctctccaattttatgattctagctttggtgacctctgactcctccttctctattcctaacactgtgtaacttagagaggatcagggaagctaggatgtcccaaatgcaatttcattaaat

SEQ ID NO: 705403 - DNA, 120 bp, Artificial Sequence
  ENSG00000196482_67 (sequence is synthesized)
taaagagaaatacactaagaagtagaaaaaatgtgatgagtgtgataaaatgatttagtgcaagatggcggatgcagtagagacaaggagcacagagtaggagcttcctgtgcagcaggg

SEQ ID NO: 705404 - DNA, 120 bp, Artificial Sequence
  ENSG00000196482_68 (sequence is synthesized)
ggcttaaaaggcaaattagaattagccagatgaaagtgagcaggtaggacaaaaagtgttgcagagggaatagcaaagaacaaagcccatgactcctgagaaagaaaaactatttttatt

SEQ ID NO: 705405 - DNA, 120 bp, Artificial Sequence
  ENSG00000196482_69 (sequence is synthesized)
tattttaaacctacaataataactatttctcaaaagggtataggagaagaataattgaaaatatggcagaaagtggaaataaaaggtttgactaattggactatacccttgccctattct

SEQ ID NO: 705406 - DNA, 120 bp, Artificial Sequence
  ENSG00000196482_70 (sequence is synthesized)
taacttattcactggtttgatatttaattgctctctaagaggatattgactgtctctatgccagtgaattctgcaactaggtagtatgagatctacttgaaaactgtggaattttcagta

SEQ ID NO: 705407 - DNA, 120 bp, Artificial Sequence
  ENSG00000196482_71 (sequence is synthesized)
ggaacatagaaaaattttgaaggaaagaaattctgagaataaaataaaattttattcacttgaattctatttcattgtgagcttaaggaaaaaataaagcttttcaaaaaatgctataat

SEQ ID NO: 705408 - DNA, 120 bp, Artificial Sequence
  ENSG00000196482_72 (sequence is synthesized)
ttctctattttctaaattggccctttattctacattgtcctattctcatatatatcagtgattctaaaagtgtggtcctgggaccagcaccatcagcattcacagagagcctgttagaaa

SEQ ID NO: 705409 - DNA, 120 bp, Artificial Sequence
  ENSG00000196482_73 (sequence is synthesized)
tgcagatccttaagctccatcccaggcctactgaatcagaaactctgggcatcggacccaacaatctatgcttttacactccctccaggcaattctgatgggtatcaaagtttaagaatc

SEQ ID NO: 705410 - DNA, 120 bp, Artificial Sequence
  ENSG00000196482_74 (sequence is synthesized)
gatgggtatcaaagtttaagaatcactggtctctactttttttcatgtattttgtacaaaacagtttatattatcttcttattcattacattaattttgtacatatattttctttcaata

SEQ ID NO: 705411 - DNA, 120 bp, Artificial Sequence
  ENSG00000196482_75 (sequence is synthesized)
caataatcttatctttgtttgtaccagctctatgagttataactgaaatataataaactgcacattacagtatataattggatccattttgacgtacatatacatccatgaaaccaatac

SEQ ID NO: 705412 - DNA, 120 bp, Artificial Sequence
  ENSG00000196482_76 (sequence is synthesized)
cttaatcaacgtaataaacggggatctcaccccaaaagttttcttttgctaccttataatccttttctctgacccctttactgacctacttcccccatctcaaggctaatcacttatctg

SEQ ID NO: 705413 - DNA, 120 bp, Artificial Sequence
  ENSG00000196482_77 (sequence is synthesized)
ctttttgcctctatggataagtctgcattttgtagactttcatgtaagtggaatcctacagtatatattcttttttatctggtttgtctcaatcagtataattattttaacatatatcca

SEQ ID NO: 705414 - DNA, 120 bp, Artificial Sequence
  ENSG00000196482_78 (sequence is synthesized)
tgttgttgaatcagtagttagttcctttttattactgaggtaccatcaaattgtataagctacgatgtgtttattaagttactgtcagtggatttttgtgttattttagcctgggctttt

SEQ ID NO: 705415 - DNA, 120 bp, Artificial Sequence
  ENSG00000196482_79 (sequence is synthesized)
cactttgaacatcagcacgtgcatgtgggaattcaaactcctgacggttcattcacgatcacacatttacctggatgcttctctgcagaatgtcaaacaaagatcgacacattgattcca

SEQ ID NO: 705416 - DNA, 120 bp, Artificial Sequence
  ENSG00000196482_80 (sequence is synthesized)
acacaaccagggagcaaatcaaccagcacatttaaagcagcctttttaaccctgagactttccaagatctcctcttcacacaggaagtttccttctctgttgtcagatttagcactgtgc

SEQ ID NO: 705417 - DNA, 120 bp, Artificial Sequence
  ENSG00000196482_81 (sequence is synthesized)
tcttgtcatcagatccgagccaggctccctgctgcacagtagagaggcttccttaagacatttgtccttgaaactgcaccaaactcttggaagaacccagaacgtagctgacaatttact

SEQ ID NO: 705418 - DNA, 120 bp, Artificial Sequence
  ENSG00000196482_82 (sequence is synthesized)
attaggaattgtgcatttagatcctgaatgtggcgagaatgtgattggggtcttggagcagtcaagtctgatctggcctgtgttccttcagctaaaaggcttctctgcagaatgtcaaac

SEQ ID NO: 705419 - DNA, 120 bp, Artificial Sequence
  ENSG00000196482_83 (sequence is synthesized)
tgtggtcaccatatgtgacagccttgctttctatcttgtcttcagtttctgggaactgatgtaaagttcccatcatgaatgtaattaggaattgtgcatttagatcctgaatgtggcgag

SEQ ID NO: 705420 - DNA, 120 bp, Artificial Sequence
  ENSG00000196482_84 (sequence is synthesized)
acacaccgggaatgcaactgagagatgcaagtcagcaagtgcgagccgcgaacatgagtgtctggccctgggtggatgctcctcgctgtcttggtgccgattctctgcctgggcccgagc

SEQ ID NO: 705421 - DNA, 120 bp, Artificial Sequence
  ENSG00000196482_85 (sequence is synthesized)
tgcatgggggttttgtagactttcatagccaaagaaaccggcttcggcttctttaaaatccccgacgactcacctgattaacctgctgcagttctgaccctgccaagatgccatctacct

SEQ ID NO: 705422 - DNA, 120 bp, Artificial Sequence
  ENSG00000196482_86 (sequence is synthesized)
aacgaagcagggtgcgtcttgacagagtacgtggaggtcggcagaagtacaagcgcaggatagatgcggagaacagcccatacctgaaccctcagctggttcagccagccaaaaagccat

SEQ ID NO: 705423 - DNA, 120 bp, Artificial Sequence
  ENSG00000196497_0 (sequence is synthesized)
ggcccagtagcggcggctcagttgctgccatggagtcagccgggctagagcagctcctacgggagctgctgctaccggacaccgagcgcatccgtcgggccacggaacagctccagatcg

SEQ ID NO: 705424 - DNA, 120 bp, Artificial Sequence
  ENSG00000196497_1 (sequence is synthesized)
ttcttcgggcccccgccgctttgccggctctctgcgacctgctagcctcggcggccgacccccagatccgccagtttgcggccgtgctgacccgcagacgactgaacacccgctggcgac

SEQ ID NO: 705425 - DNA, 120 bp, Artificial Sequence
  ENSG00000196497_2 (sequence is synthesized)
ggctggcggcggagcaacgggagagcctcaagtccctgatcctgacggccctgcagagagaaacagagcactgtgtgagcctcagcctggcccagctctcagccaccatttttcgaaagg

SEQ ID NO: 705426 - DNA, 120 bp, Artificial Sequence
  ENSG00000196497_3 (sequence is synthesized)
aaggcttggaggcctggccacagcttttgcagctgcttcagcacagtacccacagcccccacagcccagagagagagatggggcttttgctgctaagtgtggtggtgacctcccggcccg

SEQ ID NO: 705427 - DNA, 120 bp, Artificial Sequence
  ENSG00000196497_4 (sequence is synthesized)
aggccttccaaccccaccaccgggagcttcttcggcttctgaatgagactcttggtgaggtgggctctcctgggctgctcttctactccctgcgcactctgaccaccatggctccctacc

SEQ ID NO: 705428 - DNA, 120 bp, Artificial Sequence
  ENSG00000196497_5 (sequence is synthesized)
tcagcactgaagatgtgcctctcgctcggatgttggtgcccaagctgatcatggccatgcagactctgatccccatagatgaggcaaaggcctgtgaggcccttgaggctttggatgaac

SEQ ID NO: 705429 - DNA, 120 bp, Artificial Sequence
  ENSG00000196497_6 (sequence is synthesized)
tgttggagtcagaggtgccggtcatcaccccctacctctctgaagtcctcacattctgcctggaggtagctagaaatgtggccctgggcaatgcgatacgcatacgtattctctgctgcc

SEQ ID NO: 705430 - DNA, 120 bp, Artificial Sequence
  ENSG00000196497_7 (sequence is synthesized)
tcactttcttggtcaaagtcaagagcaaggccttactgaagaatcgtctcctgccacccttgctgcacacccttttccccattgtggctgctgagcccccaccaggccagttggatcccg

SEQ ID NO: 705431 - DNA, 120 bp, Artificial Sequence
  ENSG00000196497_8 (sequence is synthesized)
aggaccaggattcagaagaggaagagttggagattgagctgatgggggagactcccaagcatttcgctgtacaagttgtggacatgctggcactacacctgccccccgagaagctctgtc

SEQ ID NO: 705432 - DNA, 120 bp, Artificial Sequence
  ENSG00000196497_9 (sequence is synthesized)
cccagctgatgcccatgttggaagaggctttgcggagcgagagcccataccagcgcaaagctggactcctggtgctggccgtgctgtctgacggagctggcgaccacatcaggcagagac

SEQ ID NO: 705433 - DNA, 120 bp, Artificial Sequence
  ENSG00000196497_10 (sequence is synthesized)
tgctgcccccactgctgcagattgtgtgcaagggcctggaggacccctcgcaagttgtacgcaatgctgcgctgtttgccctgggccagttctcagaaaacctacagccccatatcagca

SEQ ID NO: 705434 - DNA, 120 bp, Artificial Sequence
  ENSG00000196497_11 (sequence is synthesized)
gctattcaagggaggtaatgccactgctcctcgcctacttgaagtcggtgcctcttggacacacacaccacctagccaaggcctgctatgccctggagaattttgtggagaacctagggc

SEQ ID NO: 705435 - DNA, 120 bp, Artificial Sequence
  ENSG00000196497_12 (sequence is synthesized)
ccaaggtgcagccctaccttccggagcttatggaatgcatgctgcagcttctgaggaaccccagcagtccccgggccaaggagctggctgtgagcgccctgggagccattgctacggctg

SEQ ID NO: 705436 - DNA, 120 bp, Artificial Sequence
  ENSG00000196497_13 (sequence is synthesized)
cccaggcctcgctgctgccctacttccctgccatcatggagcacctgcgggaattcctgttaacaggccgtgaggaccttcagcctgtgcagatccagagcctggagacactgggggtgc

SEQ ID NO: 705437 - DNA, 120 bp, Artificial Sequence
  ENSG00000196497_14 (sequence is synthesized)
agcccatgaggccgctggctgaggaatgctgccagctgggtctgggcctctgcgaccaggtagacgaccctgacttgcggcgctgcacgtacagcctatttgcagccttatcgggtctga

SEQ ID NO: 705438 - DNA, 120 bp, Artificial Sequence
  ENSG00000196497_15 (sequence is synthesized)
tgggtgagggcctggcgccccacttggaacagatcaccacgctcatgctgctgtcactgcgttccaccgagggcattgtgcctcagtatgacgggagcagctccttccttctgtttgacg

SEQ ID NO: 705439 - DNA, 120 bp, Artificial Sequence
  ENSG00000196497_16 (sequence is synthesized)
atgagagtgatggggaagaagaggaggagctcatggatgaggatgtggaagaagaggatgactcagagatctcagggtacagcgtggagaatgccttcttcgatgagaaggaagacacct

SEQ ID NO: 705440 - DNA, 120 bp, Artificial Sequence
  ENSG00000196497_17 (sequence is synthesized)
gtgctgccgtgggggagatctctgtgaacaccagtgtggccttccttccatacatggaaagtgtctttgaagaagtatttaaactgctggagtgccctcacctgaatgtgcggaaggcag

SEQ ID NO: 705441 - DNA, 120 bp, Artificial Sequence
  ENSG00000196497_18 (sequence is synthesized)
cccatgaggctctgggtcagttttgctgtgcactgcacaaggcctgtcaaagctgcccctcggaacccaacactgctgctttgcaggctgccctggcccgagtcgtgccatcctacatgc

SEQ ID NO: 705442 - DNA, 120 bp, Artificial Sequence
  ENSG00000196497_19 (sequence is synthesized)
aggcagtgaacagggagcgggaacgccaggtggtgatggccgtgctggaggccctgacaggggtgctccgcagctgtgggaccctcacactgaagccccctgggcgcctcgctgagctct

SEQ ID NO: 705443 - DNA, 120 bp, Artificial Sequence
  ENSG00000196497_20 (sequence is synthesized)
gtggcgtgctcaaggctgtgctgcagaggaagacagcctgtcaggatactgacgaggaggaggaagaggaagatgatgatcaggctgaatacgacgccatgttgctggagcacgctggag

SEQ ID NO: 705444 - DNA, 120 bp, Artificial Sequence
  ENSG00000196497_21 (sequence is synthesized)
aggccatccctgccctggcagccgcggctgggggagactcctttgccccattctttgccggtttcctgccattattggtgtgcaagacaaaacagggctgcacagtggcagagaagtcct

SEQ ID NO: 705445 - DNA, 120 bp, Artificial Sequence
  ENSG00000196497_22 (sequence is synthesized)
ttgcagtggggaccttggcagagactattcagggcctgggtgctgcctcagcccagtttgtgtctcggctgctccctgtgctgttgagcaccgcccaagaggcagaccccgaggtgcgaa

SEQ ID NO: 705446 - DNA, 120 bp, Artificial Sequence
  ENSG00000196497_23 (sequence is synthesized)
gcaatgccatcttcgggatgggcgtgctggcagagcatgggggccaccctgcccaggaacacttccccaagctgctggggctcctttttcccctcctggcgcgggagcgacatgatcgtg

SEQ ID NO: 705447 - DNA, 120 bp, Artificial Sequence
  ENSG00000196497_24 (sequence is synthesized)
tccgtgacaacatctgtggggcacttgcccgcctgttgatggccagtcccaccaggaaaccagagccccaggtgctggctgccctactgcatgccctgccactgaaggaggacttggagg

SEQ ID NO: 705448 - DNA, 120 bp, Artificial Sequence
  ENSG00000196497_25 (sequence is synthesized)
agtgggtcaccattgggcgcctcttcagcttcctgtaccagagcagccctgaccaggttatagatgtggctcccgagcttctgcgtatctgcagcctcattctggctgacaacaagatcc

SEQ ID NO: 705449 - DNA, 120 bp, Artificial Sequence
  ENSG00000196497_26 (sequence is synthesized)
caccagacaccaaggccgcactgttgctgctcctgacgttcctggccaaacagcacaccgacagctttcaagcagctctgggctcactgcctgttgacaaggctcaggagctccaggctg

SEQ ID NO: 705450 - DNA, 120 bp, Artificial Sequence
  ENSG00000196497_27 (sequence is synthesized)
tactgggcctctcctagactgcaggctgcagccagtccagagagaatagagcctgcccaggccttaagaccacctctcagcccagttcagttctgccttaccaaagattctgagactcat

SEQ ID NO: 705451 - DNA, 120 bp, Artificial Sequence
  ENSG00000196497_28 (sequence is synthesized)
acccatttggagccagccccacttgctgccttacagggctgtccctgaggctggatctgttacaaatgagtcatgacatcatactgtaataaaagcagcttgttttctgcttgaacaata

SEQ ID NO: 705452 - DNA, 120 bp, Artificial Sequence
  ENSG00000196497_29 (sequence is synthesized)
cacctgccacctgtgttccagcctcaagtccctgatcctgacggccctgcagagagaaacagagtaagtacctacccacttctctcgggatcttgacgactttgtctaggtttctgcctt

SEQ ID NO: 705453 - DNA, 120 bp, Artificial Sequence
  ENSG00000196497_30 (sequence is synthesized)
aaaacggggaccaggcggtccaggcagtctccacagggacaggggtggacagtgtatttgggcttggcctggggcagccagggccactaaaagagactggtaatggccagagggatacaa

SEQ ID NO: 705454 - DNA, 120 bp, Artificial Sequence
  ENSG00000196497_31 (sequence is synthesized)
ccctgatcccactaagccagtgggagttcagggaaggagagcagtgtggactggggtgtgcttggagtgataggtaggagcagaagagccaggggaagaagctgggtcatggaaacaccc

SEQ ID NO: 705455 - DNA, 120 bp, Artificial Sequence
  ENSG00000196497_32 (sequence is synthesized)
tgtgtctctctctgtagtgtggccttccttccatacatggaaagtgtctttgaagaagtatttaaactgctggaggtgagcgggccggcgggtggagtgggtggggttctcaggctgggg

SEQ ID NO: 705456 - DNA, 120 bp, Artificial Sequence
  ENSG00000196497_33 (sequence is synthesized)
taaagttcttgaggaagggtgatgatgatctgccaaacccaagtcagaagaataagactgaaattcaggctaagttagactgaacttaccagattacatgcccacagtgctgttgggctc

SEQ ID NO: 705457 - DNA, 120 bp, Artificial Sequence
  ENSG00000196497_34 (sequence is synthesized)
cctctgagctgctgtctcatgtgtcccaacttggcaaagaccctgtgcccacacctcctgaaagtttctgtcctggctgccccattgagcctggccactgtgtgcagaggaaggtattga

SEQ ID NO: 705458 - DNA, 120 bp, Artificial Sequence
  ENSG00000196497_35 (sequence is synthesized)
cttttcggcccagtagcggcggctcagttgctgccatggagtcagccgggctagagcagctcctacgggagctgctgctaccggacaccgagcgcatccgtcggcttccccccaggccac

SEQ ID NO: 705459 - DNA, 120 bp, Artificial Sequence
  ENSG00000196497_36 (sequence is synthesized)
atcctgacggccctgcagagagaaacagagtaagtacctacccacttctctcgggatcttgacgactttgtctaggtttctgccttccttttcggctccaggctgggacttgtggggcag

SEQ ID NO: 705460 - DNA, 120 bp, Artificial Sequence
  ENSG00000196497_37 (sequence is synthesized)
ggcaggagggagggcctgagaggctggatagaccttgtaagcttgctctcccatcctctattcttggacagatggggcttttgctgctaagtgtggtggtgacctcccggcccgaggcct

SEQ ID NO: 705461 - DNA, 120 bp, Artificial Sequence
  ENSG00000196497_38 (sequence is synthesized)
tttgccggctctctgcgacctgctagcctcggcggccgacccccaggtgagacccctgactctcccctccgagcttcccactgtacgccaccggtcaagccccagtattcgcccactgcg

SEQ ID NO: 705462 - DNA, 120 bp, Artificial Sequence
  ENSG00000196498_0 (sequence is synthesized)
catgtcgggatccacacagcctgtggcacagacgtggagggccactgagccccgctacccgccccacagcctttcctacccagtgcagatcgcccggacgcacacggacgtcgggctcct

SEQ ID NO: 705463 - DNA, 120 bp, Artificial Sequence
  ENSG00000196498_1 (sequence is synthesized)
ggagtaccagcaccactcccgcgactatgcctcccacctgtcgcccggctccatcatccagccccagcggcggaggccctccctgctgtctgagttccagcccgggaatgaacggtccca

SEQ ID NO: 705464 - DNA, 120 bp, Artificial Sequence
  ENSG00000196498_2 (sequence is synthesized)
ggagctccacctgcggccagagtcccactcatacctgcccgagctggggaagtcagagatggagttcattgaaagcaagcgccctcggctagagctgctgcctgaccccctgctgcgacc

SEQ ID NO: 705465 - DNA, 120 bp, Artificial Sequence
  ENSG00000196498_3 (sequence is synthesized)
gtcacccctgctggccacgggccagcctgcgggatctgaagacctcaccaaggaccgtagcctgacgggcaagctggaaccggtgtctccccccagccccccgcacactgaccctgagct

SEQ ID NO: 705466 - DNA, 120 bp, Artificial Sequence
  ENSG00000196498_4 (sequence is synthesized)
ggagctggtgccgccacggctgtccaaggaggagctgatccagaacatggaccgcgtggaccgagagatcaccatggtagagcagcagatctctaagctgaagaagaagcagcaacagct

SEQ ID NO: 705467 - DNA, 120 bp, Artificial Sequence
  ENSG00000196498_5 (sequence is synthesized)
ggaggaggaggctgccaagccgcccgagcctgagaagcccgtgtcaccgccgcccatcgagtcgaagcaccgcagcctggtgcagatcatctacgacgagaaccggaagaaggctgaagc

SEQ ID NO: 705468 - DNA, 120 bp, Artificial Sequence
  ENSG00000196498_6 (sequence is synthesized)
tgcacatcggattctggaaggcctggggccccaggtggagctgccgctgtacaaccagccctccgacacccggcagtatcatgagaacatcaaaataaaccaggcgatgcggaagaagct

SEQ ID NO: 705469 - DNA, 120 bp, Artificial Sequence
  ENSG00000196498_7 (sequence is synthesized)
aatcttgtacttcaagaggaggaatcacgctcggaaacaatgggagcagaagttctgccagcgctatgaccagctcatggaggcctgggagaagaaggtggagcgcatcgagaacaaccc

SEQ ID NO: 705470 - DNA, 120 bp, Artificial Sequence
  ENSG00000196498_8 (sequence is synthesized)
ccggcggcgggccaaggagagcaaggtgcgcgagtactacgagaagcagttccctgagatccgcaagcagcgcgagctgcaggagcgcatgcagagcagggtgggccagcggggcagtgg

SEQ ID NO: 705471 - DNA, 120 bp, Artificial Sequence
  ENSG00000196498_9 (sequence is synthesized)
gctgtccatgtcggccgcccgcagcgagcacgaggtgtcagagatcatcgatggcctctcagagcaggagaacctggagaagcagatgcgccagctggccgtgatcccgcccatgctgta

SEQ ID NO: 705472 - DNA, 120 bp, Artificial Sequence
  ENSG00000196498_10 (sequence is synthesized)
cgacgctgaccagcagcgcatcaagttcatcaacatgaacgggcttatggccgaccccatgaaggtgtacaaagaccgccaggtcatgaacatgtggagtgagcaggagaaggagacctt

SEQ ID NO: 705473 - DNA, 120 bp, Artificial Sequence
  ENSG00000196498_11 (sequence is synthesized)
ccgggagaagttcatgcagcatcccaagaactttggcctgatcgcatcattcctggagaggaagacagtggctgagtgcgtcctctattactacctgactaagaagaatgagaactataa

SEQ ID NO: 705474 - DNA, 120 bp, Artificial Sequence
  ENSG00000196498_12 (sequence is synthesized)
tcctctattactacctgactaagaagaatgagaactataagagcctggtgagacggagctatcggcgccgcggcaagagccagcagcagcaacaacagcagcagcagcagcagcagcagc

SEQ ID NO: 705475 - DNA, 120 bp, Artificial Sequence
  ENSG00000196498_13 (sequence is synthesized)
agatgagaaggagaaggaaaaggaggcggagaaggaggaggagaagccggaggtggagaacgacaaggaagacctcctcaaggagaagacagacgacacctcaggggaggacaacgacga

SEQ ID NO: 705476 - DNA, 120 bp, Artificial Sequence
  ENSG00000196498_14 (sequence is synthesized)
gaaggaggctgtggcctccaaaggccgcaaaactgccaacagccagggaagacgcaaaggccgcatcacccgctcaatggctaatgaggccaacagcgaggaggccatcaccccccagca

SEQ ID NO: 705477 - DNA, 120 bp, Artificial Sequence
  ENSG00000196498_15 (sequence is synthesized)
gagcgccgagctggcctccatggagctgaatgagagttctcgctggacagaagaagaaatggaaacagccaagaaaggtctcctggaacacggccgcaactggtcggccatcgcccggat

SEQ ID NO: 705478 - DNA, 120 bp, Artificial Sequence
  ENSG00000196498_16 (sequence is synthesized)
ggtgggctccaagactgtgtcgcagtgtaagaacttctacttcaactacaagaagaggcagaacctcgatgagatcttgcagcagcacaagctgaagatggagaaggagaggaacgcgcg

SEQ ID NO: 705479 - DNA, 120 bp, Artificial Sequence
  ENSG00000196498_17 (sequence is synthesized)
gaggaagaagaagaaagcgccggcggcggccagcgaggaggctgcattcccgcccgtggtggaggatgaggagatggaggcgtcgggcgtgagcggaaatgaggaggagatggtggagga

SEQ ID NO: 705480 - DNA, 120 bp, Artificial Sequence
  ENSG00000196498_18 (sequence is synthesized)
ggctgaagccttacatgcctctgggaatgaggtgcccagaggggaatgcagtggcccagccactgtcaacaacagctcagacaccgagagcatcccctctcctcacactgaggccgccaa

SEQ ID NO: 705481 - DNA, 120 bp, Artificial Sequence
  ENSG00000196498_19 (sequence is synthesized)
ccaaggacacagggcagaatgggcccaagcccccagccaccctgggcgccgacgggccacccccagggccacccaccccaccaccggaggacatcccggcccccactgagcccaccccgg

SEQ ID NO: 705482 - DNA, 120 bp, Artificial Sequence
  ENSG00000196498_20 (sequence is synthesized)
tgaagccaccggagcccctacgcccccaccagcacccccatcgccctctgcacctcctcctgtggtccccaaggaggagaaggaggaggagaccgcagcagcgcccccagtggaggaggg

SEQ ID NO: 705483 - DNA, 120 bp, Artificial Sequence
  ENSG00000196498_21 (sequence is synthesized)
ggaggagcagaagccccccgcggctgaggagctggcagtggacacagggaaggccgaggagcccgtcaagagcgagtgcacggaggaagccgaggaggggccggccaagggcaaggacgc

SEQ ID NO: 705484 - DNA, 120 bp, Artificial Sequence
  ENSG00000196498_22 (sequence is synthesized)
ggaggccgctgaggccacggccgagggggcgctcaaggcagagaagaaggagggcgggagcggcagggccaccacagccaagagctcgggcgccccccaggacagcgactccagtgctac

SEQ ID NO: 705485 - DNA, 120 bp, Artificial Sequence
  ENSG00000196498_23 (sequence is synthesized)
ctgcagtgcagacgaggtggatgaggccgagggcggcgacaagaaccggctgctgtccccaaggcccagcctcctcaccccgactggcgacccccgggccaatgcctcaccccagaagcc

SEQ ID NO: 705486 - DNA, 120 bp, Artificial Sequence
  ENSG00000196498_24 (sequence is synthesized)
actggacctgaagcagctgaagcagcgagcggctgccatcccccccatccaggtcaccaaagtccatgagcccccccgggaggacgcagctcccaccaagccagctcccccagccccacc

SEQ ID NO: 705487 - DNA, 120 bp, Artificial Sequence
  ENSG00000196498_25 (sequence is synthesized)
gccaccgcaaaacctgcagccggagagcgacgcccctcagcagcctggcagcagcccccggggcaagagcaggagcccggcaccccccgccgacaaggaggccttcgcagccgaggccca

SEQ ID NO: 705488 - DNA, 120 bp, Artificial Sequence
  ENSG00000196498_26 (sequence is synthesized)
gaagctgcctggggaccccccttgctggacttccggcctgcccttccccgtgcccccccgtgaggtgatcaaggcctccccgcatgccccggacccctcagccttctcctacgctccacc

SEQ ID NO: 705489 - DNA, 120 bp, Artificial Sequence
  ENSG00000196498_27 (sequence is synthesized)
tggtcacccactgcccctgggcctccatgacactgcccggcccgtcctgccgcgcccacccaccatctccaacccgcctcccctcatctcctctgccaagcaccccagcgtcctcgagag

SEQ ID NO: 705490 - DNA, 120 bp, Artificial Sequence
  ENSG00000196498_28 (sequence is synthesized)
gcaaataggtgccatctcccaaggaatgtcggtccagctccacgtcccgtactcagagcatgccaaggccccggtgggccctgtcaccatggggctgcccctgcccatggaccccaaaaa

SEQ ID NO: 705491 - DNA, 120 bp, Artificial Sequence
  ENSG00000196498_29 (sequence is synthesized)
gctggcacccttcagcggagtgaagcaggagcagctgtccccacggggccaggctgggccaccggagagcctgggggtgcccacagcccaggaggcgtccgtgctgagagggacagctct

SEQ ID NO: 705492 - DNA, 120 bp, Artificial Sequence
  ENSG00000196498_30 (sequence is synthesized)
gggctcagttccgggcggaagcatcaccaaaggcattcccagcacacgggtgccctcggacagcgccatcacataccgcggctccatcacccacggcacgccagctgacgtcctgtacaa

SEQ ID NO: 705493 - DNA, 120 bp, Artificial Sequence
  ENSG00000196498_31 (sequence is synthesized)
gggcaccatcaccaggatcatcggcgaggacagcccgagtcgcttggaccgcggccgggaggacagcctgcccaagggccacgtcatctacgaaggcaagaagggccacgtcttgtccta

SEQ ID NO: 705494 - DNA, 120 bp, Artificial Sequence
  ENSG00000196498_32 (sequence is synthesized)
tgagggtggcatgtctgtgacccagtgctccaaggaggacggcagaagcagctcaggacccccccatgagacggccgcccccaagcgcacctatgacatgatggagggccgcgtgggcag

SEQ ID NO: 705495 - DNA, 120 bp, Artificial Sequence
  ENSG00000196498_33 (sequence is synthesized)
agccatctcctcagccagcatcgaaggtctcatgggccgtgccatcccgccggagcgacacagcccccaccacctcaaagagcagcaccacatccgcgggtccatcacacaagggatccc

SEQ ID NO: 705496 - DNA, 120 bp, Artificial Sequence
  ENSG00000196498_34 (sequence is synthesized)
tcggtcctacgtggaggcacaggaggactacctgcgtcgggaggccaagctcctaaagcgggagggcacgcctccgcccccaccgccctcacgggacctgaccgaggcctacaagacgca

SEQ ID NO: 705497 - DNA, 120 bp, Artificial Sequence
  ENSG00000196498_35 (sequence is synthesized)
ctgaagctgaagccggcccatgagggcctggtggccacggtgaaggaggcgggccgctccatccatgagatcccgcgcgaggagctgcggcacacgcccgagctgcccctggccccgcgg

SEQ ID NO: 705498 - DNA, 120 bp, Artificial Sequence
  ENSG00000196498_36 (sequence is synthesized)
ccgctcaaggagggctccatcacgcagggcaccccgctcaagtacgacaccggcgcgtccaccactggctccaaaaagcacgacgtacgctccctcatcggcagccccggccggacgttc

SEQ ID NO: 705499 - DNA, 120 bp, Artificial Sequence
  ENSG00000196498_37 (sequence is synthesized)
ccacccgtgcacccgctggatgtgatggccgacgcccgggcactggaacgtgcctgctacgaggagagcctgaagagccggccagggaccgccagcagctcggggggctccattgcgcgc

SEQ ID NO: 705500 - DNA, 120 bp, Artificial Sequence
  ENSG00000196498_38 (sequence is synthesized)
ggcgccccggtcattgtgcctgagctgggtaagccgcggcagagccccctgacctatgaggaccacggggcaccctttgccggccacctcccacgaggttcgcccgtgaccacgcgggag

SEQ ID NO: 705501 - DNA, 120 bp, Artificial Sequence
  ENSG00000196498_39 (sequence is synthesized)
cccacgccgcgcctgcaggagggcagcctttcgtccagcaaggcatcccaggaccgaaagctgacgtcgacgcctcgtgagatcgccaagtccccgcacagcaccgtgcccgagcaccac

SEQ ID NO: 705502 - DNA, 120 bp, Artificial Sequence
  ENSG00000196498_40 (sequence is synthesized)
ccacaccccatctcgccctatgagcacctgcttcggggcgtgagtggcgtggacctgtatcgcagccacatccccctggccttcgaccccacctccataccccgcggcatccctctggac

SEQ ID NO: 705503 - DNA, 120 bp, Artificial Sequence
  ENSG00000196498_41 (sequence is synthesized)
gcagccgctgcctactacctgccccgacacctggcccccaaccccacctacccgcacctgtacccaccctacctcatccgcggctaccccgacacggcggcgctggagaaccggcagacc

SEQ ID NO: 705504 - DNA, 120 bp, Artificial Sequence
  ENSG00000196498_42 (sequence is synthesized)
atcatcaatgactacatcacctcgcagcagatgcaccacaacgcggccaccgccatggcccagcgagctgatatgctgaggggcctctcgccccgcgagtcctcgctggcactcaactac

SEQ ID NO: 705505 - DNA, 120 bp, Artificial Sequence
  ENSG00000196498_43 (sequence is synthesized)
gctgcgggtccccgaggcatcatcgacctgtcccaagtgccacacctgcctgtgctcgtgcccccgacaccaggcaccccagccaccgccatggaccgccttgcctacctccccaccgcg

SEQ ID NO: 705506 - DNA, 120 bp, Artificial Sequence
  ENSG00000196498_44 (sequence is synthesized)
ccccagcccttcagcagccgccacagcagctccccactctccccaggaggtccaacacacttgacaaaaccaaccaccacgtcctcgtccgagcgggagcgagaccgggatcgagagcgg

SEQ ID NO: 705507 - DNA, 120 bp, Artificial Sequence
  ENSG00000196498_45 (sequence is synthesized)
gaccgggatcgggagcgggaaaagtccatcctcacgtccaccacgacggtggagcacgcacccatctggagacctggtacagagcagagcagcggcagcagcggcgggggtgggggcagc

SEQ ID NO: 705508 - DNA, 120 bp, Artificial Sequence
  ENSG00000196498_46 (sequence is synthesized)
agcagccgccccgcctcccactcccatgcccaccagcactcgcccatctcccctcggacccaggatgccctccagcagagacccagtgtgcttcacaacacaggcatgaagggtatcatc

SEQ ID NO: 705509 - DNA, 120 bp, Artificial Sequence
  ENSG00000196498_47 (sequence is synthesized)
accgctgtggagcccagcacgcccacggtcctgaggtccacctccacctcctcacccgttcgcccggctgccacattcccacctgccacccactgcccactgggcggcaccctcgatggg

SEQ ID NO: 705510 - DNA, 120 bp, Artificial Sequence
  ENSG00000196498_48 (sequence is synthesized)
gtctaccctaccctcatggagcccgtcttgctgcccaaggaggccccccgggtcgcccggccagagcggccccgagcagacaccggccatgccttcctcgccaagcccccagcccgctcc

SEQ ID NO: 705511 - DNA, 120 bp, Artificial Sequence
  ENSG00000196498_49 (sequence is synthesized)
gggctggagcccgcctcctcccccagcaagggctcggagccccggcccctagtgcctcctgtctctggccacgccaccatcgcccgcacccctgcgaagaacctcgcacctcaccacgcc

SEQ ID NO: 705512 - DNA, 120 bp, Artificial Sequence
  ENSG00000196498_50 (sequence is synthesized)
agcccggacccgccggcgccacctgcctcggcctcggacccgcaccgggaaaagactcaaagtaaacccttttccatccaggaactggaactccgttctctgggttaccacggcagcagc

SEQ ID NO: 705513 - DNA, 120 bp, Artificial Sequence
  ENSG00000196498_51 (sequence is synthesized)
tacagccccgaaggggtggagcccgtcagccctgtgagctcacccagtctgacccacgacaaggggctccccaagcacctggaagagctcgacaagagccacctggagggggagctgcgg

SEQ ID NO: 705514 - DNA, 120 bp, Artificial Sequence
  ENSG00000196498_52 (sequence is synthesized)
cccaagcagccaggccccgtgaagcttggcggggaggccgcccacctcccacacctgcggccgctgcctgagagccagccctcgtccagcccgctgctccagaccgccccaggggtcaaa

SEQ ID NO: 705515 - DNA, 120 bp, Artificial Sequence
  ENSG00000196498_53 (sequence is synthesized)
ggtcaccagcgggtggtcaccctggcccagcacatcagtgaggtcatcacacaggactacacccggcaccacccacagcagctcagcgcacccctgcccgcccccctctactccttccct

SEQ ID NO: 705516 - DNA, 120 bp, Artificial Sequence
  ENSG00000196498_54 (sequence is synthesized)
ggggccagctgccccgtcctggacctccgccgcccacccagtgacctctacctcccgcccccggaccatggtgccccggcccgtggctccccccacagcgaagggggcaagaggtctcca

SEQ ID NO: 705517 - DNA, 120 bp, Artificial Sequence
  ENSG00000196498_55 (sequence is synthesized)
gagccaaacaagacgtcggtcttgggtggtggtgaggacggtattgaacctgtgtccccaccggagggcatgacggagccagggcactcccggagtgctgtgtacccgctgctgtaccgg

SEQ ID NO: 705518 - DNA, 120 bp, Artificial Sequence
  ENSG00000196498_56 (sequence is synthesized)
gatggggaacagacggagcccagcaggatgggctccaagtctccaggcaacaccagccagccgccagccttcttcagcaagctgaccgagagcaactccgccatggtcaagtccaagaag

SEQ ID NO: 705519 - DNA, 120 bp, Artificial Sequence
  ENSG00000196498_57 (sequence is synthesized)
caagagatcaacaagaagctgaacacccacaaccggaatgagcctgaatacaatatcagccagcctgggacggagatcttcaatatgcccgccatcaccggaacaggccttatgacctat

SEQ ID NO: 705520 - DNA, 120 bp, Artificial Sequence
  ENSG00000196498_58 (sequence is synthesized)
agaagccaggcggtgcaggaacatgccagcaccaacatggggctggaggccataattagaaaggcactcatgggtaaatatgaccagtgggaagagtccccgccgctcagcgccaatgct

SEQ ID NO: 705521 - DNA, 120 bp, Artificial Sequence
  ENSG00000196498_59 (sequence is synthesized)
tttaaccctctgaatgccagtgccagcctgcccgctgctatgcccataaccgctgctgacggacggagtgaccacacactcacctcgccaggtggcggcgggaaggccaaggtctctggc

SEQ ID NO: 705522 - DNA, 120 bp, Artificial Sequence
  ENSG00000196498_60 (sequence is synthesized)
agacccagcagccgaaaagccaagtccccggccccgggcctggcatctggggaccggccaccctctgtctcctcagtgcactcggagggagactgcaaccgccggacgccgctcaccaac

SEQ ID NO: 705523 - DNA, 120 bp, Artificial Sequence
  ENSG00000196498_61 (sequence is synthesized)
cgcgtgtgggaggacaggccctcgtccgcaggttccacgccattcccctacaaccccctgatcatgcggctgcaggcgggtgtcatggcttccccacccccaccgggcctccccgcgggc

SEQ ID NO: 705524 - DNA, 120 bp, Artificial Sequence
  ENSG00000196498_62 (sequence is synthesized)
agcgggcccctcgctggcccccaccacgcctgggacgaggagcccaagccactgctctgctcgcagtacgagacactctccgacagcgagtgactcagaacagggcgggggggggggcgg

SEQ ID NO: 705525 - DNA, 120 bp, Artificial Sequence
  ENSG00000196498_63 (sequence is synthesized)
tgtcaggtcccagcgagccacaggaacggccctgcaggagcagggcggctgccgactcccccaaccaaggaaggagcccctgagtccgcctgcgcctccatccatctgtccgtccagagc

SEQ ID NO: 705526 - DNA, 120 bp, Artificial Sequence
  ENSG00000196498_64 (sequence is synthesized)
cggcatccttgcctgtctaaagccttaactaagactcccgccccgggctggccctgtgcagaccttactcaggggatgtttacctggtgctcgggaagggaggggaaggggccggggagg

SEQ ID NO: 705527 - DNA, 120 bp, Artificial Sequence
  ENSG00000196498_65 (sequence is synthesized)
gggcacggcaggcgtgtggcagccacacgcaggcggccagggcggccagggacccaaagcaggatgaccacgcacctccacgccactgcctcccccgaatgcatttggaaccaaagtcta

SEQ ID NO: 705528 - DNA, 120 bp, Artificial Sequence
  ENSG00000196498_66 (sequence is synthesized)
aactgagctcgcagcccccgcgccctccctccgcctcccatcccgcttagcgctctggacagatggacgcaggccctgtccagcccccagtgcgctcgttccggtccccacagactgccc

SEQ ID NO: 705529 - DNA, 120 bp, Artificial Sequence
  ENSG00000196498_67 (sequence is synthesized)
cagccaacgagattgctggaaaccaagtcaggccaggtgggcggacaaaagggccaggtgcggcctggggggaacggatgctccgaggactggactgtttttttcacacatcgttgccgc

SEQ ID NO: 705530 - DNA, 120 bp, Artificial Sequence
  ENSG00000196498_68 (sequence is synthesized)
agcggtgggaaggaaaggcagatgtaaatgatgtgttggtttacagggtatatttttgataccttcaatgaattaattcagatgttttacgcaaggaaggacttacccagtattactgct

SEQ ID NO: 705531 - DNA, 120 bp, Artificial Sequence
  ENSG00000196498_69 (sequence is synthesized)
gctgtgcttttgatctctgcttaccgttcaagaggcgtgtgcaggccgacagtcggtgaccccatcactcgcaggaccaagggggcggggactgctggctcacgccccgctgtgtcctcc

SEQ ID NO: 705532 - DNA, 120 bp, Artificial Sequence
  ENSG00000196498_70 (sequence is synthesized)
ctccctcccttccttgggcagaatgaattcgatgcgtattctgtggccgccatctgcgcagggtggtggtattctgtcatttacacacgtcgttctaattaaaaagcgaattatactcca

SEQ ID NO: 705533 - DNA, 120 bp, Artificial Sequence
  ENSG00000196498_71 (sequence is synthesized)
gagtctttgaggacacagcctcgctggaggcagtttctggtgccagtgacggggtggcccgtgagctgatgacgaggactggcttttaatccttggtggtgattaagagaaagcttattg

SEQ ID NO: 705534 - DNA, 120 bp, Artificial Sequence
  ENSG00000196498_72 (sequence is synthesized)
tgtgcccacatccactcctgcacacacaagacccgtgccagtgcacatgcgtgctcctgcctgccacacgtccacacactgctgatgtatcggtgcacacgcgtgctcctgcctgcccgc

SEQ ID NO: 705535 - DNA, 120 bp, Artificial Sequence
  ENSG00000196498_73 (sequence is synthesized)
acctccactctgctgtatcggtgcacgcgtgctgctgcctgccacacatccacactctgctgctgatgtatcggtgcacgtgtgctcctgcctgccacacatccacacactgctgatgcg

SEQ ID NO: 705536 - DNA, 120 bp, Artificial Sequence
  ENSG00000196498_74 (sequence is synthesized)
tccttgctcacgtgcatgtgtgtgcacttgttcacgccccatgtcggcacccgtgggtgtggacacagactcacgtgctcatgtggtcacaggcacacccttgcttgcagacagagcacc

SEQ ID NO: 705537 - DNA, 120 bp, Artificial Sequence
  ENSG00000196498_75 (sequence is synthesized)
ctggagggctagggtacagggtgcaggcagcgtgccctgcatctcccaccgtgcaaccccctggaaaagctcctgggtcctgctggcaggcccccagggcctgcaggctgccagctccct

SEQ ID NO: 705538 - DNA, 120 bp, Artificial Sequence
  ENSG00000196498_76 (sequence is synthesized)
ctggaggcctcggctgtgaggctttgtgacggggccagcatggaagcactgctggctcctgcctaccggctctgcctgtcctgcctgcccaccgtggtcctgggcccgtgcccagctcct

SEQ ID NO: 705539 - DNA, 120 bp, Artificial Sequence
  ENSG00000196498_77 (sequence is synthesized)
agggagagacacagccagagtgtggtgggaactcaggacaagtatgcagaaaggcctgcagcacacatgtacatgatcagtacgtgagctacggagcaagggtgtctcttacttatttca

SEQ ID NO: 705540 - DNA, 120 bp, Artificial Sequence
  ENSG00000196498_78 (sequence is synthesized)
aaacaaaaacaaaaagcaaaataccaccgatcacccctgtgcttttaggtgtcacatagcaactgtcctgtgcttggcactaacccaggtgccacctgcgtatcgttttacagaacatcc

SEQ ID NO: 705541 - DNA, 120 bp, Artificial Sequence
  ENSG00000196498_79 (sequence is synthesized)
tggtgaggcacatgcgattgggagaggcttggagagctccgagaactctttcaggttctcgcggctggtccatggcacagccagctactgtgaacttggcagctttgtgggttttatttt

SEQ ID NO: 705542 - DNA, 120 bp, Artificial Sequence
  ENSG00000196498_80 (sequence is synthesized)
tctttaatgaatggatctgtgattctgacttcgactgcgcccccatctccctctttgcgcctgtgtccagggagcagggatggggctgcgggagggctcgggcctacgcccccacctgcc

SEQ ID NO: 705543 - DNA, 120 bp, Artificial Sequence
  ENSG00000196498_81 (sequence is synthesized)
ggctgcctggatgctgtcggactgggggaagtggaggcaggcggtgcaaggagaagctgaggcggggcagggacctgcgctgtcgaggaggagctgggtctggctcttgcatcttgccct

SEQ ID NO: 705544 - DNA, 120 bp, Artificial Sequence
  ENSG00000196498_82 (sequence is synthesized)
gtccccagcccctgtaccccagaaaaaggggagccctctgcctctggacccctgccttggccctagttcatggctcctctctgttggactgggatggccgaggctatagcccaggcgggg

SEQ ID NO: 705545 - DNA, 120 bp, Artificial Sequence
  ENSG00000196498_83 (sequence is synthesized)
ccccggggacccagggtcactcccagccacacccccacttctcactccgccccacacactccttccccagagacccatgctgcccccatctcacgctggcctcgcccggcctccaccacc

SEQ ID NO: 705546 - DNA, 120 bp, Artificial Sequence
  ENSG00000196498_84 (sequence is synthesized)
tgaacccatctctgtcccttcttgcctaatctctctctgtgtctccctctctgtctgtctctgtcccgggctctgcatctctctccacctctcccttggcctccctgtctctccccaaca

SEQ ID NO: 705547 - DNA, 120 bp, Artificial Sequence
  ENSG00000196498_85 (sequence is synthesized)
cccctctctgccttactgtctttgggagcccaaaccctacccctagcttgggttccccttgacccccccggggtcccagccagctgggagggcagccctgcccctcgggctccgaaaccc

SEQ ID NO: 705548 - DNA, 120 bp, Artificial Sequence
  ENSG00000196498_86 (sequence is synthesized)
cttgtcacctttgcacctgggggcaccaggcctggagaggggatggggaaccccacagcccttctgtcctggcggggtggctgggggatccagggcatggcgctggggggatccagggcg

SEQ ID NO: 705549 - DNA, 120 bp, Artificial Sequence
  ENSG00000196498_87 (sequence is synthesized)
tgggtgagggtgagatcccaaagccccgagcaccggcaccatcaccgccccctaatccatgggaggagcctgtgatgcgagccgatggcatcttcacgggcaatgaggccttcctggtgg

SEQ ID NO: 705550 - DNA, 120 bp, Artificial Sequence
  ENSG00000196498_88 (sequence is synthesized)
cccaggtttctcagtgtcatgggctggtctcatcagccatctgccaactaccagcttgggaccgctgaccacagccccactcccatgcacactgggacacggaggcccagagggtggcgg

SEQ ID NO: 705551 - DNA, 120 bp, Artificial Sequence
  ENSG00000196498_89 (sequence is synthesized)
ccacccaggattctgccccgagctccgtctagcccctccccacccccagaaggttctgtcaggagagtgctgcctgactctgggcccccccacttgcctgcaggaggtcatcacacagga

SEQ ID NO: 705552 - DNA, 120 bp, Artificial Sequence
  ENSG00000196498_90 (sequence is synthesized)
ggggcctgcaggctcccggggaagcatggggccacaggtgggcgggtggcctgcctgggcagctggagccgcccagtggcagaaacccacggtgcaccttcgaaagctaagtggccctgc

SEQ ID NO: 705553 - DNA, 120 bp, Artificial Sequence
  ENSG00000196498_91 (sequence is synthesized)
tgaccacctccccccaggccctttgcctcacatttggggagccccagggcagtttcttgatttgctgggctttccataggagcttactggcacagaagaatagcacccagcacatagtag

SEQ ID NO: 705554 - DNA, 120 bp, Artificial Sequence
  ENSG00000196498_92 (sequence is synthesized)
gtgcccagtgaatacctgcatgaatactgggaccaggggttggatccctcccacacaagggccgggcgcctcccacactcagcacctgtgtggctttgcacccattgacgtggttgctgg

SEQ ID NO: 705555 - DNA, 120 bp, Artificial Sequence
  ENSG00000196498_93 (sequence is synthesized)
gtatgaacgccccactctgcttcccagtccctagcacagcgcctggcagttagcagatccaccagggaatacgtgagtgggtgggcaaataaagaatctgtcacagtccccgaccccaag

SEQ ID NO: 705556 - DNA, 120 bp, Artificial Sequence
  ENSG00000196498_94 (sequence is synthesized)
aagcctcatctgccagggaagtttggacaaatcacagatgcttttcccttcctggggctggagtagaaaccttgcagatagtcactggcttgccgggcacggtggctcatgcctataggc

SEQ ID NO: 705557 - DNA, 120 bp, Artificial Sequence
  ENSG00000196498_95 (sequence is synthesized)
ccgggcacggtggctcatgcctataggcccagcactttgggaggatgaggcaggaggattgcttgaagccaggagttcgagaccagtctgtgcaacatagcaagaccccatctctacaaa

SEQ ID NO: 705558 - DNA, 85 bp, Artificial Sequence
  ENSG00000196498_96 (sequence is synthesized)
catctctacaaaaaactttaaaaacaggcacacacctatagtccaagctactggggaggctgagataggaggatttcttgagcct

SEQ ID NO: 705559 - DNA, 120 bp, Artificial Sequence
  ENSG00000196498_97 (sequence is synthesized)
cgtcgaggggctttgccaccgaagcgcgggtggaatcaaggtgggtattgaggtacccgtcccaggcctgcaggggcgagcagagagaggggtgttaatgtgtctgagagggagggtagc

SEQ ID NO: 705560 - DNA, 120 bp, Artificial Sequence
  ENSG00000196498_98 (sequence is synthesized)
tgagctggctgggtcctgccccaggcactcagggcctcgtccctggggggtcactctgtattgcagtcaagggcatggctcaggaaccaggctgtgtggcctcaggcaagttacttaacc

SEQ ID NO: 705561 - DNA, 120 bp, Artificial Sequence
  ENSG00000196498_99 (sequence is synthesized)
tcctgtttcccccactgcgaaatggaagggcaaatgcaaggggctcagagggcatggccccttcacaggggagggggccgaggcttgggagtagcagtgacttgtctgccgtcacacagc

SEQ ID NO: 705562 - DNA, 120 bp, Artificial Sequence
  ENSG00000196498_100 (sequence is synthesized)
ggtgtgcctcctggaagccggcagcacagcctgtgtgtgtggactctgctggcccgctggctggcactttttttctttttctttttttttcttgtgagagagttacttcaagttgtgttt

SEQ ID NO: 705563 - DNA, 120 bp, Artificial Sequence
  ENSG00000196498_101 (sequence is synthesized)
cgctgctgtgatttcagcactcacccttgttggaaatgttgctttttcttcatgcacatggctgttttttcaaaagtgctgcagaaatgtggccaagacagcagaaaaggtgtgagcatc

SEQ ID NO: 705564 - DNA, 120 bp, Artificial Sequence
  ENSG00000196498_102 (sequence is synthesized)
cctggctacaaacgtatttgaaaccaaaagggaaaagaaaacgcaggcagccagcagttgctacagaaacgtgattttcaaagcatctgcatcacccgcaacctcatggaagcctcggtt

SEQ ID NO: 705565 - DNA, 120 bp, Artificial Sequence
  ENSG00000196498_103 (sequence is synthesized)
tggtttacaaaggagcgagtggtcggaaagacgatttgaccactttgtattcgtatgattcattcggagcagaagtttaaaactccatgaaacacttgccccgtggtgggcacggtggaa

SEQ ID NO: 705566 - DNA, 120 bp, Artificial Sequence
  ENSG00000196498_104 (sequence is synthesized)
tggggcttcactgggggcttttgaaagcaaaggctggtttaacaaaagttctgaaaagacagcacctctggggggtgtgcaaaggcccccacctccacgtggttcacaagaaagaaaaaa

SEQ ID NO: 705567 - DNA, 120 bp, Artificial Sequence
  ENSG00000196498_105 (sequence is synthesized)
agcagacgccaaccagcagcctcgcagagccgaccgcggccgcccagcctgccggcccacttcggcccgctccctggggcatcttcccagccctatgtttccggaaaacttggccgaggg

SEQ ID NO: 705568 - DNA, 80 bp, Artificial Sequence
  ENSG00000196498_106 (sequence is synthesized)
cctgcgctccgcgatgcgcgccaacttgcgggccggggacccagggccggcgccctaggaggcggcggcgggaggatcgc

SEQ ID NO: 705569 - DNA, 80 bp, Artificial Sequence
  ENSG00000196498_107 (sequence is synthesized)
aggatcgcgtcccgacccgaggccgggcctgctgcgcgcccccagcccgatcggcaccgccacttgcctgagcgccccgg

SEQ ID NO: 705570 - DNA, 120 bp, Artificial Sequence
  ENSG00000196502_0 (sequence is synthesized)
cctgcattccccacacaacacccacaatcagccactgcgggcgaggagggcacgaggccaggttcccaagagctcaggaacatggagctgatccaggacacctcccgcccgccactggag

SEQ ID NO: 705571 - DNA, 120 bp, Artificial Sequence
  ENSG00000196502_1 (sequence is synthesized)
tacgtgaagggggtcccgctcatcaagtactttgcagaggcactggggcccctgcagagcttccaggcccggcctgatgacctgctcatcagcacctaccccaagtccggcactacctgg

SEQ ID NO: 705572 - DNA, 120 bp, Artificial Sequence
  ENSG00000196502_2 (sequence is synthesized)
gtaagccagattctggacatgatctaccagggtggtgacctggagaagtgtcaccgagctcccatcttcatgcgggtgcccttccttgagttcaaagccccagggattccctcagggatg

SEQ ID NO: 705573 - DNA, 120 bp, Artificial Sequence
  ENSG00000196502_3 (sequence is synthesized)
gagactctgaaagacacaccggccccacgactcctgaagacacacctgcccctggctctgctcccccagactctgttggatcagaaggtcaaggtggtctatgttgcccgcaacgcaaag

SEQ ID NO: 705574 - DNA, 120 bp, Artificial Sequence
  ENSG00000196502_4 (sequence is synthesized)
agttcatggtcggagaagtgtcctacggatcctggtaccagcacgtgcaggagtggtgggagctgagccgcacccaccctgttctctacctcttctatgaagacatgaaggagaacccga

SEQ ID NO: 705575 - DNA, 120 bp, Artificial Sequence
  ENSG00000196502_5 (sequence is synthesized)
aaagggagattcaaaagatcctggagtttgtggggcgctccctgccagaggagaccgtggacttcgtggttcagcacacgtcgttcaaggagatgaagaagaaccctatgaccaactaca

SEQ ID NO: 705576 - DNA, 120 bp, Artificial Sequence
  ENSG00000196502_6 (sequence is synthesized)
ccaccgtcccccaggagttcatggaccacagcatctcccccttcatgaggaaaggcatggctggggactggaagaccaccttcaccgtggcgcagaatgagcgcttcgatgcggactatg

SEQ ID NO: 705577 - DNA, 120 bp, Artificial Sequence
  ENSG00000196502_7 (sequence is synthesized)
cggagaagatggcaggctgcagcctcagcttccgctctgagctgtgagaggggctcctggagtcactgcagagggagtgtgcgaatcaaacctgaccaagcggctcaagaataaaatatg

SEQ ID NO: 705578 - DNA, 86 bp, Artificial Sequence
  ENSG00000196502_8 (sequence is synthesized)
gcgaatcaaacctgaccaagcggctcaagaataaaatatgaattgagggcccgggacggtaggtcatgtctgtaatcccagcaatt

SEQ ID NO: 705579 - DNA, 120 bp, Artificial Sequence
  ENSG00000196502_9 (sequence is synthesized)
tttccacatgtgaggggctgaggggctcaaggaggggagcatctccactgggtggaggctgggggtcccagcaggaagtggtgagacaaagggcgctggctggcagggagacagcacagg

SEQ ID NO: 705580 - DNA, 120 bp, Artificial Sequence
  ENSG00000196502_10 (sequence is synthesized)
aaggtcctagagcttcctcagtgcagctggactctcctggagaccttcacacaccctgacatctgggccttgcccgacgagggtgctttcactggtctgcaccatggcccaggccctggg

SEQ ID NO: 705581 - DNA, 120 bp, Artificial Sequence
  ENSG00000196502_11 (sequence is synthesized)
gcggtgcaggaagcctccgaccacgcgggctcctgatcgcgggcgcccacagcgcggacatggcgggctggtggccggcgttgtcgcgcacggcccggcgccacccgtggcccaccaacg

SEQ ID NO: 705582 - DNA, 120 bp, Artificial Sequence
  ENSG00000196502_12 (sequence is synthesized)
ggcccaccaacgtgctgctctacgttgctcgagcaacgtagctctacgctctacgagcgtgccgtagctcgctcgtctccgccggggacgtgctgcagcaacggctgcagggccgctagg

SEQ ID NO: 705583 - DNA, 120 bp, Artificial Sequence
  ENSG00000196502_13 (sequence is synthesized)
ccgactggcgccagacgcggcgcgtggccacgttggtggtgaccttccacgccaacttcaactacgtgtggctgggcctgctggagcgcgcgctcccgggccgagcgccgcgcgccatgc

SEQ ID NO: 705584 - DNA, 120 bp, Artificial Sequence
  ENSG00000196502_14 (sequence is synthesized)
tggccaagttgctgtgcgaccaggtggtcggtgcgcccatcgcggtctcggccttctacgccggtatgagcattctccagggaaaggatgacatatttttggacctgaaacagaaattct

SEQ ID NO: 705585 - DNA, 120 bp, Artificial Sequence
  ENSG00000196502_15 (sequence is synthesized)
ggaacacctatatgcaaactcagtcgtggctttggagatcactttaagcttgtctccagctggcacactaaggagggtaatggagaagctcccccacccccaaccccaccccttccttcc

SEQ ID NO: 705586 - DNA, 120 bp, Artificial Sequence
  ENSG00000196502_16 (sequence is synthesized)
tcatgcctgtaatcccagcaatttgagaagttgaggctagaggatcactggaggacaggagtttgggaccagcctgttcaacattacaagacatcatccctacaaaaatttgagaaaatt

SEQ ID NO: 705587 - DNA, 120 bp, Artificial Sequence
  ENSG00000196502_17 (sequence is synthesized)
atctgtacgtgatggtgggcacctgtagtcccagctacttgacaagtgaaggcaggaggatcgcctgagccagggaggttatggctgcagtgggctgactgggctaatccactcaagcct

SEQ ID NO: 705588 - DNA, 120 bp, Artificial Sequence
  ENSG00000196502_18 (sequence is synthesized)
gactgggctaatccactcaagcctgagggacagagcaaatcttgcttgagaaataaataaaatacaatttacttaacataaattatgattcaggaccagtctggccaacatggtgaaacc

SEQ ID NO: 705589 - DNA, 120 bp, Artificial Sequence
  ENSG00000196502_19 (sequence is synthesized)
acacccacaatcagccactgcgggcgaggagggcacgaggccaggttcccaagagctcagggaacgggcctggctctggcccctgacgcaggaacatggagctgatccaggacacctccc

SEQ ID NO: 705590 - DNA, 120 bp, Artificial Sequence
  ENSG00000196502_20 (sequence is synthesized)
tggcggtggaactccggggaggagctggctggggcggaggtgatgatccaggatgcgggccagcgtaggggtcttggtgggcatgctggggtcggatggagcgcaggagagagaagaggg

SEQ ID NO: 705591 - DNA, 120 bp, Artificial Sequence
  ENSG00000196502_21 (sequence is synthesized)
gggacaggtgggtacctgggctggaggcgcggcctgaggtgggcaggtgcagggggcgtgacttcatttaggggcagggcctggggctaggctgaagccggcagtgaggaccccgctctc

SEQ ID NO: 705592 - DNA, 120 bp, Artificial Sequence
  ENSG00000196502_22 (sequence is synthesized)
gggtggaattggaggggacccgcggttgggcgcggcagggctcacagggacacccccgttctcctccccagggagaaagtgctcgtcgtgcacggcttcccgcccgccgtggcaaccctt

SEQ ID NO: 705593 - DNA, 120 bp, Artificial Sequence
  ENSG00000196502_23 (sequence is synthesized)
cgggtaaggaaggagaccaggcggcggcaggcgggcaagggcttggggtccgcccccctgcctggagccgccctaactcctccgtatcctgccgctgttggagtgggcctggaaccccct

SEQ ID NO: 705594 - DNA, 120 bp, Artificial Sequence
  ENSG00000196502_24 (sequence is synthesized)
ccataggcgcgcctcctactcccgctgcaccccgacctccgccgggacctctatgcgccgcgccgcacgggcgatggccttcgggcctccccggccccagggcaccgcgcaggtcccttt

SEQ ID NO: 705595 - DNA, 120 bp, Artificial Sequence
  ENSG00000196502_25 (sequence is synthesized)
gctggcaccaagcccgagcctgagccggacccggggcccaagaggcctgtgcgccctgcgagcccttgagctccaggggaggtccgccccaggcagggcggctcatcccccagaccactt

SEQ ID NO: 705596 - DNA, 120 bp, Artificial Sequence
  ENSG00000196502_26 (sequence is synthesized)
cggatccagctgtttgttgaggagccaggaaacgccctgacacttttgcggccctgtccccgtctctaagatggggatgatagtatttctggccattcctgagcacagcaggacctgcct

SEQ ID NO: 705597 - DNA, 120 bp, Artificial Sequence
  ENSG00000196502_27 (sequence is synthesized)
tttccctttgactggaaggttcttctctacacctatcttgataacctgccacctccacagggaggtcttctctatctcccgatttaaaattgcagctctgagaagccgggcatggtggca

SEQ ID NO: 705598 - DNA, 120 bp, Artificial Sequence
  ENSG00000196502_28 (sequence is synthesized)
tatgcctgtagtcccagctacggggggaggctgaggtgggaggatcgcttggtcccaggagttggaggctgcagtgagctctgatcgctccactgcactatagcctgggcaaaagagcaa

SEQ ID NO: 705599 - DNA, 120 bp, Artificial Sequence
  ENSG00000196502_29 (sequence is synthesized)
gaaactgtctctaaaaatataaaataaaattgcacctcttgtgtacttccccgtctgcttctttacctgaatacttactatctcaccggctaggtgctttatgactctcgttagtctctc

SEQ ID NO: 705600 - DNA, 120 bp, Artificial Sequence
  ENSG00000196502_30 (sequence is synthesized)
ccaccccaacctttgcactacattgcccgagggcagctcttgtcactgctgtagaacaaagtcctgcacagagacgatagccaagaaatagttaataaaataatggaaaacgggtgcctt

SEQ ID NO: 705601 - DNA, 120 bp, Artificial Sequence
  ENSG00000196502_31 (sequence is synthesized)
ctactgagcacccgctaatagtgagtgagtagaggacttgccctggggacattcagtgacctgctgggtgttgctgagctgtgaggaagttcaggtctggctgcagtggtgaggctgtga

SEQ ID NO: 705602 - DNA, 120 bp, Artificial Sequence
  ENSG00000196502_32 (sequence is synthesized)
ctcaatcaatcactgctgatgctcccaggacctgcaccagcttagtcccaggggcaaggattttaaacccccacctccatttcctcatctgtaagatgcaaataacagtcacctctgcct

SEQ ID NO: 705603 - DNA, 120 bp, Artificial Sequence
  ENSG00000196502_33 (sequence is synthesized)
cacgggatggagctgtgtaatgcccggaacagtgcctgctgcatagaggggttgctgccagctgcctctccctccttgtctcttacctgcctgctgcctgggacaggatgaagcggggcc

SEQ ID NO: 705604 - DNA, 120 bp, Artificial Sequence
  ENSG00000196502_34 (sequence is synthesized)
cttgtgttgccccaaccctggctgttggctaagagcccacgtgatctgcctgtgagaggagttccttccggaagaaccagggcagcttctgcccctagagggccaatgccctagctgagt

SEQ ID NO: 705605 - DNA, 120 bp, Artificial Sequence
  ENSG00000196502_35 (sequence is synthesized)
gcagtcccccggccccagcctggtccagctttgggaagagggtgcccagttgtgcaatccaggccggggcagccgtgtcctgatcttggtattcagggctgagcctggagggggcttgtg

SEQ ID NO: 705606 - DNA, 120 bp, Artificial Sequence
  ENSG00000196502_36 (sequence is synthesized)
atgcctgactctgtctctctctctggccccatgccttggtagctgtgaggcgtcactgctttgggtgacctgatctggctgtgatggatgagcacgggggaaatagtggaagactcggaa

SEQ ID NO: 705607 - DNA, 120 bp, Artificial Sequence
  ENSG00000196502_37 (sequence is synthesized)
ttagaagacgtgagtgggctttggccccagcctccctaccccactccctgtcctgggctgcctgtgaccaaccttgtttctgcaggcacactggatagccctgctggagctcagtgtccc

SEQ ID NO: 705608 - DNA, 120 bp, Artificial Sequence
  ENSG00000196502_38 (sequence is synthesized)
taatcccctccagatactggtggcctaggggaggtcatcaaagaccggtgggacatcgacctcagcccgtttccacgcttttttttgttttgttttgtttttttgagaccgagtttcact

SEQ ID NO: 705609 - DNA, 120 bp, Artificial Sequence
  ENSG00000196502_39 (sequence is synthesized)
acaggagtgagccaccgtgccaggccttctccaggctcttggcaccttagccagaaacaatttaaggacaagtgcaaaagtcatgaatgtaggcagatttcctgcagagtaaagggactc

SEQ ID NO: 705610 - DNA, 120 bp, Artificial Sequence
  ENSG00000196502_40 (sequence is synthesized)
actgaagaagaggaacgtgggggtcctcaagagagtgtctcatgccctacaaggtgtggggctgacctttatgggcttcttcaactaaagaggggtatattcatgaagagtccaggaaaa

SEQ ID NO: 705611 - DNA, 120 bp, Artificial Sequence
  ENSG00000196502_41 (sequence is synthesized)
ggtaaagatttctcaagaccgtggtgccacaatttacacccaaatacaggtgttcctggagccgtcttggcactggtgggtgtacggtttcatatgttactgatcatacaatgagatcct

SEQ ID NO: 705612 - DNA, 120 bp, Artificial Sequence
  ENSG00000196502_42 (sequence is synthesized)
aggtgaaacctacatcaaatacagcgccatgttgtgtctggttggtcgtagccagcttggtcctcatcctatttttcagggacttattggcccttagcgcatgcagctatttcaagtttc

SEQ ID NO: 705613 - DNA, 120 bp, Artificial Sequence
  ENSG00000196502_43 (sequence is synthesized)
cttcttctcctcatgtgaaactgctgcctgggattttgtattcacttgctaccactctattaatctcacattctcgcctcttttctgtgtcaccccgtgtgggtccgacaggttgttact

SEQ ID NO: 705614 - DNA, 120 bp, Artificial Sequence
  ENSG00000196502_44 (sequence is synthesized)
agagtgcaatacaaagtcttagtcaagggaacctcctgagggttgctgagggcaggggtggagctagtagcctgaggacctgccagtcacggggattcctcatgggcacagaggagggag

SEQ ID NO: 705615 - DNA, 120 bp, Artificial Sequence
  ENSG00000196502_45 (sequence is synthesized)
gaggggtccatggccctagcatatgagaagcctctcctctgcctggaattcccatgcctcagcttcccccacactcccacctgtccgcttgcctctgaactcacgcatttcttggaagtc

SEQ ID NO: 705616 - DNA, 120 bp, Artificial Sequence
  ENSG00000196502_46 (sequence is synthesized)
ttgggagattcacctttactcagatggttgtttacctgtctcgtgcacagcttgaccttggactttaaagtgaggataaagaacgaggaggatggggggatgccccccttccacggggcc

SEQ ID NO: 705617 - DNA, 120 bp, Artificial Sequence
  ENSG00000196502_47 (sequence is synthesized)
ctgtggcttccaaacctcggcctcctctggtctcttgtctgtggagcctccttcaaacccagggaaataaaaccacctgccacgggttgtggttcttctaggatcttctatcaatgttct

SEQ ID NO: 705618 - DNA, 120 bp, Artificial Sequence
  ENSG00000196502_48 (sequence is synthesized)
ctgaggtccccaggagccatgaagctggggctgactcccagggcaatgggactgcagtgtccttgttctttcttgttctatgcatccatgctctgctccacccctgccccttcactctgc

SEQ ID NO: 705619 - DNA, 120 bp, Artificial Sequence
  ENSG00000196502_49 (sequence is synthesized)
ccacacacatccctctagactggccttgtggtcagagcctggagtgcatgggctgctgggggcctgtgggctgcactgggccagaacccctggcaccttcaagactggcctggagccagc

SEQ ID NO: 705620 - DNA, 120 bp, Artificial Sequence
  ENSG00000196502_50 (sequence is synthesized)
aggtaggtgacctttccagggcctgcctatcccagctttctcctccaatccctcccctctcttgcctgggtcaattagagagagcttgtctgttggctgcctggcagggtggagttcagg

SEQ ID NO: 705621 - DNA, 120 bp, Artificial Sequence
  ENSG00000196502_51 (sequence is synthesized)
ggtgagtgacacagtggaacggcccagggcgccctcaccctgctcagcttgtggctctaacattccagaagctgaggcctctggcatccctgccctttccccatggatatcccatttcag

SEQ ID NO: 705622 - DNA, 120 bp, Artificial Sequence
  ENSG00000196502_52 (sequence is synthesized)
acaaccctggcctgcgtgaatccccctcccttcccttgtttgtttgtttttttccccggggaggccaggtcttgctgtcacccaggctggagtgctgtgggatcctggccactgcagcct

SEQ ID NO: 705623 - DNA, 120 bp, Artificial Sequence
  ENSG00000196502_53 (sequence is synthesized)
attctcttgcctcagcctctggagtagctaggactacaggccctcatcatcctgcctggttaatgtttaagaatttttttaaagatttttagagatggggtcttgcaatgctgcaccagg

SEQ ID NO: 705624 - DNA, 120 bp, Artificial Sequence
  ENSG00000196502_54 (sequence is synthesized)
tcttgcaatgctgcaccaggttggtctccaactcctggcctcagcctccctagggtctgggattataggtgggagccaccctgcctaggcctgtgcttttgctgagtcatcagagttttg

SEQ ID NO: 705625 - DNA, 120 bp, Artificial Sequence
  ENSG00000196502_55 (sequence is synthesized)
ttcattcccacagcagctctggcccctagtagcagctcagttcctcaatgggccgtgtttgtcctggagcccagatggactgtggccaggcaagtggatcacaggcctggctggcctggg

SEQ ID NO: 705626 - DNA, 120 bp, Artificial Sequence
  ENSG00000196502_56 (sequence is synthesized)
caagtcactcagcctccctaggcctcagtgacttccctgaaagcaagaattccactttcttgctgttgtgatggtggtaagggaacgggcctggctctggcccctgacgcaggaacatgg

SEQ ID NO: 705627 - DNA, 120 bp, Artificial Sequence
  ENSG00000196502_57 (sequence is synthesized)
gacacaccggccccacgactcctgaagacacacctgcccctggctctgctcccccagactctgttggatcagaaggtcaaggtgaggcagggcacagtgtttcacatccataatcccagc

SEQ ID NO: 705628 - DNA, 120 bp, Artificial Sequence
  ENSG00000196502_58 (sequence is synthesized)
agacaggagaatcacttgaacccgggagaaggaggttgtggtgagccagagatcccaccattgcattccagcctgagcaacaagagcaaaactcacaaaaataaataaataaataaatat

SEQ ID NO: 705629 - DNA, 120 bp, Artificial Sequence
  ENSG00000196502_59 (sequence is synthesized)
tcacaaaaataaataaataaataaatatataaataaaaataaaactgtggcacctgtggtggctcactgctgtaatgccagcactttgggaggccaaattgggtggatcacttgagctca

SEQ ID NO: 705630 - DNA, 120 bp, Artificial Sequence
  ENSG00000196502_60 (sequence is synthesized)
ggagttacagaccagcccgggaaacatggggagtctccatctctataaaaatgcaaaatatcagcagggcatggtggcatagcgctgtagttccagctactggaaagtctgaggttggag

SEQ ID NO: 705631 - DNA, 120 bp, Artificial Sequence
  ENSG00000196502_61 (sequence is synthesized)
gattgcttgagcctggaaggtcaaggttgcagtgagttattatcactccagtgcactccaacttgggcgacagaaaaaaagaaagaccacggtccttttttttttttttttttttttgag

SEQ ID NO: 705632 - DNA, 120 bp, Artificial Sequence
  ENSG00000196502_62 (sequence is synthesized)
ataaataaaataaaataaaataaaataaatcccacaataaaaagaaaaagcaaaggtccaggtgtggggcatgtgaatccagggaaggaggccctggctcagcccagctttggtcctgtt

SEQ ID NO: 705633 - DNA, 120 bp, Artificial Sequence
  ENSG00000196502_63 (sequence is synthesized)
agcccagctttggtcctgttcttctgggaaagtcgcctcacttcctccagccttgtctcatcttctgcggcggggactgtctgcctcttgctctgatgaccaagaacgtaagactcttca

SEQ ID NO: 705634 - DNA, 120 bp, Artificial Sequence
  ENSG00000196502_64 (sequence is synthesized)
gtgtagacctaagaaagctagagggtgggtcctcacaggcccacaaaatttggtggcggtgggatcacggctggtggagcatgccttgctccagattggggtgtgacgcattgatgcaga

SEQ ID NO: 705635 - DNA, 120 bp, Artificial Sequence
  ENSG00000196502_65 (sequence is synthesized)
ttatattactatagaatatgatggtctcagggaccaggcaggactttggcttctgagcagggttcagctcctgacttggccctaccggtgccgtgagatctcaaacaagtcagcctctaa

SEQ ID NO: 705636 - DNA, 120 bp, Artificial Sequence
  ENSG00000196502_66 (sequence is synthesized)
gcctcaggttcctcctttgccaatccaagagatgagctggcctgggacaggctgtgtggtgatggtgctggggttgagtcttctgcccctgcaggtggtctatgttgcccgcaacgcaaa

SEQ ID NO: 705637 - DNA, 120 bp, Artificial Sequence
  ENSG00000196503_0 (sequence is synthesized)
acgtctctgtcgggcgtgcacctcgggagccacacctggggcccagagccaccgctcagcacgcgggcacgcggcgggagggaaggaaaccgcggcgctggggatggagagggggaaagt

SEQ ID NO: 705638 - DNA, 120 bp, Artificial Sequence
  ENSG00000196503_1 (sequence is synthesized)
gaagaagaaagagaaggaaaaggagacgcaggaggagaaaatcggagaaaagggtagggaagagaaagtgaaaagaaaggaggtggagcagaaaattaaacaaaagcaagagaagcagga

SEQ ID NO: 705639 - DNA, 120 bp, Artificial Sequence
  ENSG00000196503_2 (sequence is synthesized)
gaggagaaagggaaaagagaaagaggaaaagaggacaaagcaagggaaggagacaaacaaagagaaggaacaatttaagggacaagaagagaaaggggagaacaaggacagcaccttgac

SEQ ID NO: 705640 - DNA, 120 bp, Artificial Sequence
  ENSG00000196503_3 (sequence is synthesized)
aaggaccccgctcgagccgctggagaaaaacaagcaaatcctagtgctgggcctggatggagcaggaaaaaccagtgtcctgcactctctagcttcaaacagagtccagcacagtgtggc

SEQ ID NO: 705641 - DNA, 120 bp, Artificial Sequence
  ENSG00000196503_4 (sequence is synthesized)
acccacccaaggtttccatgcagtttgcatcaacactgaagacagccagatggagttcctggagattggtggcagtaaaccttttcggtcctactgggaaatgtacctatccaagggatt

SEQ ID NO: 705642 - DNA, 120 bp, Artificial Sequence
  ENSG00000196503_5 (sequence is synthesized)
gctgctgatctttgtggtggattcagcagatcacagccgattacctgaagccaagaaataccttcatcagctaattgcagcaaacccagtacttcctctggttgtgtttgcaaacaaaca

SEQ ID NO: 705643 - DNA, 120 bp, Artificial Sequence
  ENSG00000196503_6 (sequence is synthesized)
ggatcttgaagcagcctatcacattacagatatccatgaagctttggcattatctgaagtgggaaatgacaggaagatgttcttgtttggaacctacctgactaagaatggctcagagat

SEQ ID NO: 705644 - DNA, 120 bp, Artificial Sequence
  ENSG00000196503_7 (sequence is synthesized)
accctccaccatgcaagatgccaaagacttgattgcacagctggctgcagatgtgcagtgaccaggactcagcccactgtgcggctcacgactgagatgtcatcagtgttgaatggcagg

SEQ ID NO: 705645 - DNA, 120 bp, Artificial Sequence
  ENSG00000196503_8 (sequence is synthesized)
cttgaagccaaaggtttccacctcaaataaaaattaagccatttcctattttctcagtgcatgggatgtatatagttagccctccatatccatgggttccacatctggggattcaagaac

SEQ ID NO: 705646 - DNA, 120 bp, Artificial Sequence
  ENSG00000196503_9 (sequence is synthesized)
tgtggatccaaaacattcaaaaagtaaacccactgaagaataataacacaacaataaaaataatacacattttaaaatacaatataacaactatttacatagcattttcattgtattagg

SEQ ID NO: 705647 - DNA, 120 bp, Artificial Sequence
  ENSG00000196503_10 (sequence is synthesized)
tgaggatcttggaatcagtctccctgagaataccaacggacaactgtacaaagataatgctaacataataacagcatctctatttggattttgaatgttaaaaatatttgtaaaacagtg

SEQ ID NO: 705648 - DNA, 120 bp, Artificial Sequence
  ENSG00000196503_11 (sequence is synthesized)
tattgggggtattgggatttttaatcaacaaaggtaaaatgaacattagcaagcatttgtcccatttattgttttgcaatggcatgaaatttatatgaaatttttttgtgggggtggata

SEQ ID NO: 705649 - DNA, 79 bp, Artificial Sequence
  ENSG00000196503_12 (sequence is synthesized)
ggagtgcagtggcatgatctcagctcaggtgatcctccctcctcagtctcccaagtagctgggaccagcagagatgggg

SEQ ID NO: 705650 - DNA, 90 bp, Artificial Sequence
  ENSG00000196503_13 (sequence is synthesized)
tatttttagcagagatggggttttgccatgtggctgatctgcccacctcggtctcataaagtcctgggattacaggaatgagccactgca

SEQ ID NO: 705651 - DNA, 120 bp, Artificial Sequence
  ENSG00000196503_14 (sequence is synthesized)
tgcacctggccttgaatatattttagtatgttttctcttttcaagtaaaaaactgggtgtctttccattaagtggatctgtttaacactataagaaatatcagggtaggacaatgaggac

SEQ ID NO: 705652 - DNA, 120 bp, Artificial Sequence
  ENSG00000196503_15 (sequence is synthesized)
agtgaactttgtcaaacccccagagaaataaacattaacagtattcagaaagagttaggaagggcttcttttccaggagcttgttagacgagatgaggaacattgtggggatttgttttt

SEQ ID NO: 705653 - DNA, 120 bp, Artificial Sequence
  ENSG00000196503_16 (sequence is synthesized)
aaaattcttaacattttgcttttatatagataaactttcttcactagaaagagtgataactatatttatttgcagacactctgtaaatccaacttgtaactatagtgccttgctttggtt

SEQ ID NO: 705654 - DNA, 120 bp, Artificial Sequence
  ENSG00000196503_17 (sequence is synthesized)
cttgctttggttttaagaaaaattgtaaagagagtttgctctataaatccttccttttaaaatttggaatctgtggtgaaataatacaaatatggggtcaggcgtggtggctcacacctg

SEQ ID NO: 705655 - DNA, 120 bp, Artificial Sequence
  ENSG00000196503_18 (sequence is synthesized)
ctatttgtctttaataatcctgggtaatagtcaactaataatcctgggtagtagtctggagacactcctagcggagtttactcgggagagggcggagaaatacatgacatgagcagtaca

SEQ ID NO: 705656 - DNA, 120 bp, Artificial Sequence
  ENSG00000196503_19 (sequence is synthesized)
ggctcatggttgggagctgagggaaggctgagaatcctcccggaacctctggattctgacgccccaggggttcttcacacaggctggccggtctcgggattgaagccggagacgtcagac

SEQ ID NO: 705657 - DNA, 120 bp, Artificial Sequence
  ENSG00000196504_0 (sequence is synthesized)
actcagatcgcttcttgttggtatgtgtagcggcagtggccgccggcggagcagtctgagcccgacgatgaggccggggacgggagctgagcgtggaggcctcatgatggggcaccctgg

SEQ ID NO: 705658 - DNA, 120 bp, Artificial Sequence
  ENSG00000196504_1 (sequence is synthesized)
catgcattatgccccaatgggaatgcaccctatgggtcagagagcgaatatgcctcctgtacctcatggaatgatgccgcagatgatgccccctatgggagggccaccaatgggacaaat

SEQ ID NO: 705659 - DNA, 120 bp, Artificial Sequence
  ENSG00000196504_2 (sequence is synthesized)
gcctggaatgatgtcgtcagtaatgcctggaatgatgatgtctcatatgtctcaggcttccatgcagcctgccttaccgccaggagtaaatagtatggatgtagcagcaggtacagcatc

SEQ ID NO: 705660 - DNA, 120 bp, Artificial Sequence
  ENSG00000196504_3 (sequence is synthesized)
tggtgcaaaatcaatgtggactgaacataaatcacctgatggaaggacttactactacaacactgaaaccaaacagtctacctgggagaaaccagatgatcttaaaacacctgctgagca

SEQ ID NO: 705661 - DNA, 120 bp, Artificial Sequence
  ENSG00000196504_4 (sequence is synthesized)
actcttatctaaatgcccctggaaggaatacaaatcagattctggaaagccttactattataattctcaaacaaaagaatctcgctgggccaaacctaaagaacttgaggatcttgaagg

SEQ ID NO: 705662 - DNA, 120 bp, Artificial Sequence
  ENSG00000196504_5 (sequence is synthesized)
ataccagaataccattgttgctggaagtcttattacaaaatcaaacctgcatgcaatgatcaaagctgaagaaagcagtaagcaagaagagtgcaccacaacatcaacagccccagtccc

SEQ ID NO: 705663 - DNA, 120 bp, Artificial Sequence
  ENSG00000196504_6 (sequence is synthesized)
tacaacagaaattccgaccacaatgagcaccatggctgctgccgaagcagcagctgctgttgttgcagcagcagcagcggcagcagcagcagcagctgcagccaatgctaatgcttccac

SEQ ID NO: 705664 - DNA, 120 bp, Artificial Sequence
  ENSG00000196504_7 (sequence is synthesized)
ttctgcttctaatactgtcagtggaactgttccagttgttcctgagcctgaagttacttccattgttgctactgttgtagataatgagaatacagtaactatttcaactgaggaacaagc

SEQ ID NO: 705665 - DNA, 120 bp, Artificial Sequence
  ENSG00000196504_8 (sequence is synthesized)
acaacttactagtacccctgctattcaggatcaaagtgtggaagtatccagtaatactggagaagaaacatctaagcaagaaactgtagctgattttactcccaaaaaagaagaggagga

SEQ ID NO: 705666 - DNA, 120 bp, Artificial Sequence
  ENSG00000196504_9 (sequence is synthesized)
gagccaaccagcaaagaaaacatacacttggaatacaaaggaagaggcaaagcaagcttttaaagaattattgaaagaaaagcgggtaccatcgaatgcttcatgggagcaggctatgaa

SEQ ID NO: 705667 - DNA, 120 bp, Artificial Sequence
  ENSG00000196504_10 (sequence is synthesized)
aatgattattaatgatccacgatacagtgctttggcaaagttaagtgaaaaaaagcaagcctttaatgcctataaagtccagacagaaaaagaagaaaaagaagaagcaagatcaaagta

SEQ ID NO: 705668 - DNA, 120 bp, Artificial Sequence
  ENSG00000196504_11 (sequence is synthesized)
tctacaaccagatacaaaaaagcagagcaaatgtttggagagatggaagtttggaatgcaatatcagaacgtgatcgtcttgaaatctatgaagatgttttgttctttctttcaaaaaaa

SEQ ID NO: 705669 - DNA, 120 bp, Artificial Sequence
  ENSG00000196504_12 (sequence is synthesized)
gaaaaggaacaagcaaagcagttgcgaaagagaaattgggaagccttaaaaaacatacttgacaacatggctaatgtaacatactctaccacttggtctgaagcccagcagtatctgatg

SEQ ID NO: 705670 - DNA, 120 bp, Artificial Sequence
  ENSG00000196504_13 (sequence is synthesized)
gataatccaacttttgcagaagatgaggagttacaaaatatggacaaagaagatgcattaatttgctttgaagaacacattcgggctttagaaaaggaggaagaagaagaaaaacagaag

SEQ ID NO: 705671 - DNA, 120 bp, Artificial Sequence
  ENSG00000196504_14 (sequence is synthesized)
agtttgctgagagaaaggagacgacagcgaaaaaatagggaatctttccagatatttttagatgaattacatgaacatggacaactgcattctatgtcatcttggatggaattgtatcca

SEQ ID NO: 705672 - DNA, 120 bp, Artificial Sequence
  ENSG00000196504_15 (sequence is synthesized)
actattagttctgatattagattcactaatatgcttggtcagcctggatcaactgcacttgatcttttcaagttttatgttgaggatcttaaagcacgttatcatgacgagaagaagata

SEQ ID NO: 705673 - DNA, 120 bp, Artificial Sequence
  ENSG00000196504_16 (sequence is synthesized)
ataaaagacattctaaaggataaaggatttgtagttgaagtaaacactacttttgaagattttgtggcgataatcagttcaactaaaagatcaactacattagatgctggaaatatcaaa

SEQ ID NO: 705674 - DNA, 120 bp, Artificial Sequence
  ENSG00000196504_17 (sequence is synthesized)
ttggctttcaatagtttactagaaaaggcagaagcccgtgaacgtgaaagagaaaaagaagaggctcggaagatgaaacgaaaagaatctgcatttaagagtatgttaaaacaagctgct

SEQ ID NO: 705675 - DNA, 120 bp, Artificial Sequence
  ENSG00000196504_18 (sequence is synthesized)
cctccgatagaattggatgctgtctgggaagatatccgtgagagatttgtaaaagagccagcatttgaggacataactctagaatctgaaagaaaacgaatatttaaagattttatgcat

SEQ ID NO: 705676 - DNA, 120 bp, Artificial Sequence
  ENSG00000196504_19 (sequence is synthesized)
gtgcttgagcatgaatgtcagcatcatcattcaaagaacaagaaacattctaagaaatctaaaaaacatcataggaaacgttcccgctctcgatcggggtcagattcagatgatgatgat

SEQ ID NO: 705677 - DNA, 120 bp, Artificial Sequence
  ENSG00000196504_20 (sequence is synthesized)
agccattcaaagaaaaaaagacagcgatcagagtctcgttctgcttcagaacattcttctagtgcagagtctgagagaagttataaaaagtcaaaaaagcataagaagaaaagtaagaag

SEQ ID NO: 705678 - DNA, 120 bp, Artificial Sequence
  ENSG00000196504_21 (sequence is synthesized)
aggagacataaatctgactctccagaatccgatgctgagcgagagaaggataaaaaagaaaaagatcgggaaagtgaaaaagacagaactagacaaagatcagaatcaaaacacaaatcg

SEQ ID NO: 705679 - DNA, 120 bp, Artificial Sequence
  ENSG00000196504_22 (sequence is synthesized)
cctaagaaaaagactggaaaggattctggtaattgggatacttctggcagcgaactgagtgaaggggaattggaaaagcgcagaagaacccttttggagcaactggatgatgatcaataa

SEQ ID NO: 705680 - DNA, 120 bp, Artificial Sequence
  ENSG00000196504_23 (sequence is synthesized)
ccctccgcctcgagcaccgcgcgcgcgcattcggtcccagccaccgctaacactacaggctgcttacccccgccccctccaccctacccctggcggcctcagcggcagtggccgccggcg

SEQ ID NO: 705681 - DNA, 120 bp, Artificial Sequence
  ENSG00000196504_24 (sequence is synthesized)
cagcctgccttaccggtaatcatgtgaaaataactattttctgtgaagtaatgttttgattgattgcttttatatatatggaataatatctatgtattttataggcaatcatgttagctg

SEQ ID NO: 705682 - DNA, 120 bp, Artificial Sequence
  ENSG00000196504_25 (sequence is synthesized)
gatcgaaccctctcctccgaacccctcctttcgccttccccgcctcctcccctccgcctcgagcaccgcgcgcgcgcattcggtcccagccaccgctaacactacaggctgcttaccccc

SEQ ID NO: 705683 - DNA, 120 bp, Artificial Sequence
  ENSG00000196504_26 (sequence is synthesized)
gccccctccaccctacccctggcggcctcaggtttgtggggcgtacgtaactcgggcggggagggtgaaggtggcagacccccactgccccaccccctacggggtgaggcggtctaagct

SEQ ID NO: 705684 - DNA, 120 bp, Artificial Sequence
  ENSG00000196504_27 (sequence is synthesized)
cgggaagctgggacactgttgtcttcccttcccctggggaagttggtagagttttcccgacggaggactcggcgcagaaacttcctccgtcctcctcctcccccccccccatgcaggcga

SEQ ID NO: 705685 - DNA, 120 bp, Artificial Sequence
  ENSG00000196504_28 (sequence is synthesized)
cgccgagtgaggctgaggctgggggcgaatcgccgcagagctgcgtgtcggcggcgcattctgattggacagcggggaagcccgtcagcctgttggccccgctgatcccgccccgtagcg

SEQ ID NO: 705686 - DNA, 120 bp, Artificial Sequence
  ENSG00000196504_29 (sequence is synthesized)
atgatttaaagtctgattcagaccagggactctattttaagttcaactgaaataacactgggttttaattatatcacaggaaaaaaaaagtgcatttaagtattgttatcgtggacttta

SEQ ID NO: 705687 - DNA, 120 bp, Artificial Sequence
  ENSG00000196504_30 (sequence is synthesized)
taaaagcaaaggaaattgaaagtaacttttgattctgtatcaagaatcatattttcatacagtcataactgtctttctgtgaccctttcacagggcactgtaggatggattaaaggtggc

SEQ ID NO: 705688 - DNA, 120 bp, Artificial Sequence
  ENSG00000196504_31 (sequence is synthesized)
aatttactgataactgcagatgtctctactttgttctaaaatctaagtcatgaggtgatttgatttactttatagaagctggattttgaagatctaatgaaaaattttttgataatatag

SEQ ID NO: 705689 - DNA, 120 bp, Artificial Sequence
  ENSG00000196504_32 (sequence is synthesized)
tagtacaaaaaaagcaccagcaactgataaaaattgcttttttgtgcgctacccaactggttaaagccaatgtgatcttttatggtgaaactcctaagaaacaggtggttttgctggaaa

SEQ ID NO: 705690 - DNA, 120 bp, Artificial Sequence
  ENSG00000196504_33 (sequence is synthesized)
cttggtagacccttaattatagtggtgctaatgagcactactgtaatataaagccaccattattttttatcaaacatctgaatacattttacaaaggctattgtgagggcattattttga

SEQ ID NO: 705691 - DNA, 120 bp, Artificial Sequence
  ENSG00000196504_34 (sequence is synthesized)
tttgaggtgatgtttaaaaaaactttaacatcaaatcaaattgtaaattaatttaaatatattgccttaaggacctactaaagaatgtgccaccagactttaagtgatagttgcaatatc

SEQ ID NO: 705692 - DNA, 120 bp, Artificial Sequence
  ENSG00000196504_35 (sequence is synthesized)
cttgtctaaaaaaaaaaaaaaagttgacttaaacattttctttaacagttgtcttttttttctaaattcagtctttctcttgcttttttttccctgctattgaggaagtattttgccttc

SEQ ID NO: 705693 - DNA, 120 bp, Artificial Sequence
  ENSG00000196504_36 (sequence is synthesized)
cctactcactgagaagtattgacttcgtggtacacattctaaagcatttctgatttgaatatttttgtacatttttatcaattattaaaccttctcttctagtgtgtactagtatttatt

SEQ ID NO: 705694 - DNA, 120 bp, Artificial Sequence
  ENSG00000196504_37 (sequence is synthesized)
tctacttaaactgctcagctctaaagaaattgtatgatcactttaaaggtactaaatccctgaaattttgcttcatcttacccacaccgctagtttactttccttttttaatatttaaga

SEQ ID NO: 705695 - DNA, 120 bp, Artificial Sequence
  ENSG00000196504_38 (sequence is synthesized)
atattataaatcagtgcatttgaggtccctagatttgtttttcacctatgaattttttacagactattttagagaggctgtggtttgaagacagaatactctttacatgctaacttttga

SEQ ID NO: 705696 - DNA, 120 bp, Artificial Sequence
  ENSG00000196504_39 (sequence is synthesized)
aggttggtaatgtaatttatactattttccttcagtgcaggagattttttaagtaaataagtaaattttagcacctattcttcggtattatctgtgttattcttttaatgtgtacacttg

SEQ ID NO: 705697 - DNA, 120 bp, Artificial Sequence
  ENSG00000196504_40 (sequence is synthesized)
aagagatcctatttcaaagttgggattttgaagaacaaaaagtttttttcttacccatcctagtgagttttgaaagtgggcctgaccagaatgtctctttcccattttgccccgtttgaa

SEQ ID NO: 705698 - DNA, 120 bp, Artificial Sequence
  ENSG00000196504_41 (sequence is synthesized)
ttaaatataatgtctactctttaaaggctgaaggggtgggtgaggggattgtttctcattttgtctcccaagtcatttttctgctgtgaaatatgaccaggcttgtaggaagactcatct

SEQ ID NO: 705699 - DNA, 120 bp, Artificial Sequence
  ENSG00000196504_42 (sequence is synthesized)
tggagaaaatgtgaagtaatcaaattgcttgagattagtctcctattgtatattagagccaaaacacataataactttggcaacagggagttgtctagactcaattttcagaggtcccat

SEQ ID NO: 705700 - DNA, 120 bp, Artificial Sequence
  ENSG00000196504_43 (sequence is synthesized)
tgtagtgagttaatattgctaatcatgtcaatcacttgacatggaagtcagtggcaaatctttaaagtatgcatttgatactggcaaatatatactactgatgtttcacaaaagaatctt

SEQ ID NO: 705701 - DNA, 120 bp, Artificial Sequence
  ENSG00000196504_44 (sequence is synthesized)
agaatctgtagaaaacattaattacttccatgaattatttctaaagtataactttaaagttttgatttttctatttaaataaaaagctattgatgtgttttagcatgtcctcaaaataga

SEQ ID NO: 705702 - DNA, 120 bp, Artificial Sequence
  ENSG00000196504_45 (sequence is synthesized)
ttcctgtatttcttacagagataatcttactataaccgcaaatccctacaacacagtataaagtttccctgtagttcacccatgaaaattatttgacttaaaaacaaccatagtagtaag

SEQ ID NO: 705703 - DNA, 120 bp, Artificial Sequence
  ENSG00000196504_46 (sequence is synthesized)
ccaattgcaattcaaaatgcaacatccttgccataaaagatgtaacttaagtgactgtgatcctttgtctacctttcaggatcccatcaaatgggatttagttgctagaaagatacttga

SEQ ID NO: 705704 - DNA, 120 bp, Artificial Sequence
  ENSG00000196504_47 (sequence is synthesized)
cagtctgaaggcacaggtgataagattttgttctctgtgaatatttttaaactaataggttatgtttttaaatcttcaatttggtaaaaaactgaaacgtcttggaatattggttctatt

SEQ ID NO: 705705 - DNA, 120 bp, Artificial Sequence
  ENSG00000196504_48 (sequence is synthesized)
agagttaaatatggtaaaacaggaaagcgtgtttattttcagataaggggaatttatacttttcattaaagtcttggagtcttaggaaaatgttgagggtttgtcttcccccagtgtcat

SEQ ID NO: 705706 - DNA, 120 bp, Artificial Sequence
  ENSG00000196504_49 (sequence is synthesized)
taatactaatgaactattagatcaaattcacttatacatttaatatcatagttattcaaaatcaggactttaaatatttttttctcccagttcatatttctttgtgcgaaaattgaattt

SEQ ID NO: 705707 - DNA, 120 bp, Artificial Sequence
  ENSG00000196504_50 (sequence is synthesized)
gtatgaaaagttagataattaagctaatcaagtatgaagtatacactcttcctaagtgaatttaaataatgtaatgcttttaaataaaagcagtggtcccaccacatttttttcagcata

SEQ ID NO: 705708 - DNA, 120 bp, Artificial Sequence
  ENSG00000196504_51 (sequence is synthesized)
gtagctggcattttgttatcattagccagagtagcttcagcatataagttattgatgttttccaacttcaaaagtgcattttatgcctcccagtaaatttgataatgatttgtcacagct

SEQ ID NO: 705709 - DNA, 120 bp, Artificial Sequence
  ENSG00000196504_52 (sequence is synthesized)
ttgtcatcttttgacttttgcttatgggcctcacttcgtacaactataacatgaaaaaggattgtcctaaagtaagggaatcagttaatggtaggatgaagaaactgtaaaaactcctag

SEQ ID NO: 705710 - DNA, 120 bp, Artificial Sequence
  ENSG00000196504_53 (sequence is synthesized)
aaaaaaacctgtgtgcatttttctggaaagttttcaaactgtgtaattcagttttcattcaattatataatttggttatatgctttaaaaaacatttgtctaaatgttcccggttttctt

SEQ ID NO: 705711 - DNA, 120 bp, Artificial Sequence
  ENSG00000196504_54 (sequence is synthesized)
ctggtcttagagtcagctgagtgctggctatgcagccactcgtatttttgcatccagaaaggagtaactccctttatatgaagatttttttttttaagcttagatgctatgtaagagaaa

SEQ ID NO: 705712 - DNA, 120 bp, Artificial Sequence
  ENSG00000196504_55 (sequence is synthesized)
actatttgtaatcacatagtacccagggaggagtgatgaatgcttttttaaaaaaggatatttaagtatattatgtaatttaaatataaattatcaaactaaaaaacttcagcttttaaa

SEQ ID NO: 705713 - DNA, 120 bp, Artificial Sequence
  ENSG00000196504_56 (sequence is synthesized)
actttctaaacaaaatgaagcaaagtacattaattccttctatcttaaatctgagactttttattttcccttgggtatatatttctctcagtgttaggtagatgttaattcaaccatcct

SEQ ID NO: 705714 - DNA, 120 bp, Artificial Sequence
  ENSG00000196504_57 (sequence is synthesized)
acattctctatataaaattacactcattttacatgaaagcaaaataatgtcgttactttcatggaactgtgttctaacaggcttataatctcattctgtgcttctggtaatggcgtatac

SEQ ID NO: 705715 - DNA, 120 bp, Artificial Sequence
  ENSG00000196504_58 (sequence is synthesized)
cagtctgatgattcttaccatccttattcttacattactcttccaattgttttgattttaactggtggtcatgtaagttcctcggtggcagggatttatctggttcatttactgttatat

SEQ ID NO: 705716 - DNA, 120 bp, Artificial Sequence
  ENSG00000196504_59 (sequence is synthesized)
atccttgtggaataggacagtgcctggcatataataggcacttttggaatgaatgtaaaatactagttgaaatatgtattcatctggcatccatggtacccatcatctgtattaaagggc

SEQ ID NO: 705717 - DNA, 120 bp, Artificial Sequence
  ENSG00000196504_60 (sequence is synthesized)
ttaaaaaagcatcattgcaataaaccatactaacccaccactaaagtcacagtcataattgaagtgcacccaaaataaggtccagtgactgtaccttagcttttacttcagacatgtcca

SEQ ID NO: 705718 - DNA, 120 bp, Artificial Sequence
  ENSG00000196504_61 (sequence is synthesized)
aaacttgtgagaacatacaatttaaagttgaaaactcatcattttgggctatttttgaatagggctgaaatatggtgacatgtcaggcactcagttttttggagctgtcttaaaggtgag

SEQ ID NO: 705719 - DNA, 120 bp, Artificial Sequence
  ENSG00000196504_62 (sequence is synthesized)
gtggaaagtgagagatgattttgctctaattacccacacattctccctaaccctccattttaagacacttagctataatagcttaagactatcaaaactgcttttgtgattctcagtagg

SEQ ID NO: 705720 - DNA, 120 bp, Artificial Sequence
  ENSG00000196504_63 (sequence is synthesized)
atctagttcaaagccatctcagtgctagtgattggtaattgttaatttgatggtaattaccctacttgtaaagttgacattcatactggctaatcctccctgcccctagtcgtggacaat

SEQ ID NO: 705721 - DNA, 120 bp, Artificial Sequence
  ENSG00000196504_64 (sequence is synthesized)
gaaacagtgagtggctggtgaattagatcagattcaaactaagccattccttgatgctattcttcactgctgttccttagggtatctaaatgtgttatttataaacatttttgggggctc

SEQ ID NO: 705722 - DNA, 120 bp, Artificial Sequence
  ENSG00000196504_65 (sequence is synthesized)
ctgcctgcaaacttcggtaggtgttggtcttccccacctctacaactgagccaaggacttgttctgaaaggtgagtaataaataagggaacaaggtttctattttctgtgtttgtaatta

SEQ ID NO: 705723 - DNA, 120 bp, Artificial Sequence
  ENSG00000196504_66 (sequence is synthesized)
aggtttctattttctgtgtttgtaattaccagattttcacctctgtttatatattattctgatgtaaaagaacctcatagttatataaaattagaccttttgtaaataaatataatttat

SEQ ID NO: 705724 - DNA, 120 bp, Artificial Sequence
  ENSG00000196504_67 (sequence is synthesized)
ggatttgtgtcagttttttcctttaagcaccactcaggcagcaagctctatgctgtgagagttgctggaggcccacgttatgttttctcagtgtaattcctctttttcttgataaaaaga

SEQ ID NO: 705725 - DNA, 120 bp, Artificial Sequence
  ENSG00000196504_68 (sequence is synthesized)
tttttttttttaattaaatgattagaacatttaaaatggcgtataacagttttttgggctcttattttcttgttgctttagatctcagttctgtagattttaaatagatttttatttgat

SEQ ID NO: 705726 - DNA, 120 bp, Artificial Sequence
  ENSG00000196504_69 (sequence is synthesized)
gtgcagagtctggtgagcatttctatttatttgattaaatcattgacactgatatactcaaagtctgacactttttatccttttgtgctactcagagagaagttataaaaagtcaaaaaa

SEQ ID NO: 705727 - DNA, 120 bp, Artificial Sequence
  ENSG00000196504_70 (sequence is synthesized)
gatgtggagtttcatgttcatgtagggcaggttttgccactatagtgagttttggtaccatacttgaaaaaagttggctttcagagggttttggtttccagaattgtgggtaaaggattg

SEQ ID NO: 705728 - DNA, 120 bp, Artificial Sequence
  ENSG00000196504_71 (sequence is synthesized)
aggaccttgtgtacacttggtgaccatataacatttaaactactcccgtagtctcggttgctgatctcttttacaatttatagcaagctcggggaactgagaccactaaaagttttgcta

SEQ ID NO: 705729 - DNA, 120 bp, Artificial Sequence
  ENSG00000196504_72 (sequence is synthesized)
gagcgtggaggcctcatggtgagtgaaatggagagccatcctccctcgcagggtcctggggacggggagcggagattgtccggctcaagcctctgctccggctcttgggtctctgctgac

SEQ ID NO: 705730 - DNA, 120 bp, Artificial Sequence
  ENSG00000196504_73 (sequence is synthesized)
aggcaatcatgttagctgttgaagtgcctctgtagtactgtaataaaatacaagaattaccgtggactttcagtttcagtttcttttcttttctttgtttttttgagacagagtcttgct

SEQ ID NO: 705731 - DNA, 120 bp, Artificial Sequence
  ENSG00000196504_74 (sequence is synthesized)
tgataacagctcactacagcctcaacctcgtgggctcaagtaatcctccgacctcagccttctgagtagctgagaccacaggcacgtgccaccacgccgagctaatttttaaattttttt

SEQ ID NO: 705732 - DNA, 90 bp, Artificial Sequence
  ENSG00000196504_75 (sequence is synthesized)
ggcacgtgccaccacgccgagctaatttttaaattttttttgtagagatgaggtctccctgtgttgcctaagctggtgtcacggcctccc

SEQ ID NO: 705733 - DNA, 120 bp, Artificial Sequence
  ENSG00000196505_0 (sequence is synthesized)
agccggtgtttcgcagcccagagcatttgcagctggtcactccagtctcctgggactttgactcgccgtactcggcgcgctcctgctgagggtcgccggagatgtcgctcggccgccttc

SEQ ID NO: 705734 - DNA, 120 bp, Artificial Sequence
  ENSG00000196505_1 (sequence is synthesized)
taccaggagcctgatccgtgccgcccgccgcccggatgggaccaccagagtgctctaaagtctccagtgaatattgaattgctgaggattttgggaaaagacaaatcaaagttcccattc

SEQ ID NO: 705735 - DNA, 120 bp, Artificial Sequence
  ENSG00000196505_2 (sequence is synthesized)
catggatcccttaggtgcaccttcccagtttgtggatgtggatacactaccaagctggggtgactcatgccaagatgaattaaattcctctgatactacagctgaaatatttcaggaaga

SEQ ID NO: 705736 - DNA, 120 bp, Artificial Sequence
  ENSG00000196505_3 (sequence is synthesized)
cactgttcgatcaccttttctttataataaggacgtcaatggaaaagtggttctttggaaaggagatgtggcattactgaactgtacagccattgtgaataccagcaatgaaagtctcac

SEQ ID NO: 705737 - DNA, 120 bp, Artificial Sequence
  ENSG00000196505_4 (sequence is synthesized)
agataagaatcctgtgtcagaaagtatcttcatgcttgcagggcctgatttgaaggaagatctccagaaacttaaagggtgccgaacaggtgaagcaaaattgacaaaaggattcaatct

SEQ ID NO: 705738 - DNA, 120 bp, Artificial Sequence
  ENSG00000196505_5 (sequence is synthesized)
agctgcccggttcatcattcacacagtgggacctaaatataaaagccgctatcgcacagcagctgagagttccctttatagctgctacagaaacgtacttcaactagcaaaagagcagtc

SEQ ID NO: 705739 - DNA, 120 bp, Artificial Sequence
  ENSG00000196505_6 (sequence is synthesized)
aatgtcttctgttggcttctgtgtcatcaattctgcaaaacgtggttatcctttagaggatgcaacacacatagcacttcgcactgtaagaagattcctagagattcatggggaaaccat

SEQ ID NO: 705740 - DNA, 120 bp, Artificial Sequence
  ENSG00000196505_7 (sequence is synthesized)
tgaaaaagtagtatttgctgtctctgatcttgaagagggtacttaccaaaagctgctacctctctacttcccaaggtcattaaaagaggagaatcgatcattgccctacctacctgcaga

SEQ ID NO: 705741 - DNA, 120 bp, Artificial Sequence
  ENSG00000196505_8 (sequence is synthesized)
tattggaaatgcagaaggggagcctgtggtacctgaacgacagattagaataagtgagaaacctggtgctccagaagataaccaagaagaggaggatgaaggcttgggagttgatctctc

SEQ ID NO: 705742 - DNA, 120 bp, Artificial Sequence
  ENSG00000196505_9 (sequence is synthesized)
tttcattggctctcatgcttttgctcgaatggaaggagatattgacaagcaaagaaaactgatccttcagggacaattatcagaggcagctctgcagaagcagcatcaaagaaattataa

SEQ ID NO: 705743 - DNA, 120 bp, Artificial Sequence
  ENSG00000196505_10 (sequence is synthesized)
tcgctggttatgtcaagcaagatctgaggatctgtctgatattgcttctctaaaagccttataccaaacaggtgttgataactgtggtcgaacagtgatggtggtagttggaagaaacat

SEQ ID NO: 705744 - DNA, 120 bp, Artificial Sequence
  ENSG00000196505_11 (sequence is synthesized)
tcctgtaacattaatagatatggacaaggctctcttatatttcattcatgtaatggatcacattgctgtgaaggagtatgtattagtgtattttcacaccctgaccagcgaatacaatca

SEQ ID NO: 705745 - DNA, 120 bp, Artificial Sequence
  ENSG00000196505_12 (sequence is synthesized)
cctggactccgacttcctgaagaaactctacgatgttgttgatgtcaagtacaagaggaatttgaaggctgtttattttgtacatcccacatttcgttcaaaggtgtcaacatggttttt

SEQ ID NO: 705746 - DNA, 120 bp, Artificial Sequence
  ENSG00000196505_13 (sequence is synthesized)
taccaccttttctgtctcaggactgaaggacaaaatccaccatgtggacagcctccaccagctgttttctgccatatcaccagaacagattgactttcctccttttgtccttgaatatga

SEQ ID NO: 705747 - DNA, 120 bp, Artificial Sequence
  ENSG00000196505_14 (sequence is synthesized)
tgccagggaaaacgggccttactatacatcatatcccccatcaccagatttgtgacctgccatctttcagtgcttcttggttcccaggatgccacttcctccacgaatagctacctgttg

SEQ ID NO: 705748 - DNA, 120 bp, Artificial Sequence
  ENSG00000196505_15 (sequence is synthesized)
aagtgatattcattgttgctgtacagatccagagagccttttgtccccacctctctggtatttttttattgactgtatattttctggcacataagcaatctaaaaatggtaggccattct

SEQ ID NO: 705749 - DNA, 120 bp, Artificial Sequence
  ENSG00000196505_16 (sequence is synthesized)
gaactgcacacattttaaatttgtatatttatatgaaatggaaatgttcatttttagattgttaatagaaattggggagcaacttttgagtatctttagtttcctgaaggacaccgaatt

SEQ ID NO: 705750 - DNA, 120 bp, Artificial Sequence
  ENSG00000196505_17 (sequence is synthesized)
ctccattagataaaccaccaagactgttcacatcatctctctaacattgcacgcttcctttgtgtacttaagtgattctcgaaatatacagaaccaatgtatgctaaccagatgcattgt

SEQ ID NO: 705751 - DNA, 120 bp, Artificial Sequence
  ENSG00000196505_18 (sequence is synthesized)
ttgcttcagatccatggtgttaataccatgtatattttataaagataatttggctgtgttaaaagagaattacctgagtccaagaatgtggaaatgtatctgacaaaaaacatcaaaatc

SEQ ID NO: 705752 - DNA, 120 bp, Artificial Sequence
  ENSG00000196505_19 (sequence is synthesized)
attagcaaaacataggacttagaatgttaatgtacaagttaagactaaagtttaaggactaaggttccttggattatatgacttgttaagattgccacagttccgatctcaacagtgtgg

SEQ ID NO: 705753 - DNA, 120 bp, Artificial Sequence
  ENSG00000196505_20 (sequence is synthesized)
ggtgaaacaagaagactgtatcttcagcctttttcctataatcatggatgatttggtcttattcaaaaggaccgcacatattagtactcttaagagcatcttccaagactccagcagtga

SEQ ID NO: 705754 - DNA, 120 bp, Artificial Sequence
  ENSG00000196505_21 (sequence is synthesized)
gcatttagagagtgtgttgtcttccagagtcatgaatgattttgtttagctatcaggtctactacctctaaggacatttcatagcagcatctcttgagttgcctgcatcagtgtggagga

SEQ ID NO: 705755 - DNA, 120 bp, Artificial Sequence
  ENSG00000196505_22 (sequence is synthesized)
agtgtgtcacagtgaacaaatccagggagctgataattggcaaaagaccacttttaccactcaggctctatttgtgccttagcttggttatgagtaaaaattagaattatgctgcctacc

SEQ ID NO: 705756 - DNA, 120 bp, Artificial Sequence
  ENSG00000196505_23 (sequence is synthesized)
tcacagaggtatcatgaagatagcatttagaaagggctttgttgtggtggggtatcttcagttagtttttaaatgggaataaatatatatgagggaatgctacacagcactcctcttgtc

SEQ ID NO: 705757 - DNA, 120 bp, Artificial Sequence
  ENSG00000196505_24 (sequence is synthesized)
cttgataccatttgagtgatttttctttttgtgtggcaatacctgttagtgtaaaattccaaccctgatgacctccttcctcttttgtccagaatctcttctggcctgctcatcccctga

SEQ ID NO: 705758 - DNA, 120 bp, Artificial Sequence
  ENSG00000196505_25 (sequence is synthesized)
tgctatacttcaataagaggcatctgttggccattttaaacatttcttcttgaattaaggtcaaaccattattattcccatctgggtagctttgtactttttttgattcctacagccacc

SEQ ID NO: 705759 - DNA, 120 bp, Artificial Sequence
  ENSG00000196505_26 (sequence is synthesized)
tccccacagccccatcttcctcaccccatcacgtacattggcagttcagagaaaaaaaaaagcagaacctttctgttctatcatgtgctccagatcagtgcttccaagggtcccattctt

SEQ ID NO: 705760 - DNA, 120 bp, Artificial Sequence
  ENSG00000196505_27 (sequence is synthesized)
ttctgcccaaactaattcttcattggagatcaaagaaacatattctcttcatttatgatagggaaatgcccctatagtgcattaaattcatcctgtattttcccatataaacaagaagag

SEQ ID NO: 705761 - DNA, 120 bp, Artificial Sequence
  ENSG00000196505_28 (sequence is synthesized)
actttacattttttagataaaggttcttatcttttgcatgtattgaacacattttctttgtgtcagacctcaaaattacttgatccttatatatacatctatgttaagattttctcttat

SEQ ID NO: 705762 - DNA, 120 bp, Artificial Sequence
  ENSG00000196505_29 (sequence is synthesized)
gtcccctaggtcatcacatccaggcagccagtcagatgtcggatgttaagctttctctcaaacagtactttttttttaaccccttgggcactgtaccttaaaagtctgcaactttaactt

SEQ ID NO: 705763 - DNA, 120 bp, Artificial Sequence
  ENSG00000196505_30 (sequence is synthesized)
catcttctacagtcaatcgtgagatcatatttgaggtatcttcttcacaaggagcagctatgaaagtctgccaacttttctttgttaaaggggaacttggctacctcaagaacctggccc

SEQ ID NO: 705764 - DNA, 120 bp, Artificial Sequence
  ENSG00000196505_31 (sequence is synthesized)
aaaccattttctgtagagataatagaggccgtaagctactttgccaatttgaaaggaagcaaatttatatatacaatttcttacaggcaatgattttgaaaggatgttcctttgctatat

SEQ ID NO: 705765 - DNA, 120 bp, Artificial Sequence
  ENSG00000196505_32 (sequence is synthesized)
tcataccagtatattaatgtttagtaacacaagcaggattctacatatgctgagattttagtacaattgatgtcctagggtataaaggtgatacagaactatatacatatcaactgtgtt

SEQ ID NO: 705766 - DNA, 120 bp, Artificial Sequence
  ENSG00000196505_33 (sequence is synthesized)
ttataattcaatgatgactaaagaaagataaggaccactcttctcactgaaactaaatttgatgtgggaccaagttcatgcttttatagatgtctaaagtgttatagaatgaagttgctt

SEQ ID NO: 705767 - DNA, 120 bp, Artificial Sequence
  ENSG00000196505_34 (sequence is synthesized)
caaagtaccaaatcctagaggagaaatataatgaccttgatattgaaatgattaagcaacatttggtataccaatctgcctttgtgaaaaggtttagcctgaataatacatgccattttc

SEQ ID NO: 705768 - DNA, 120 bp, Artificial Sequence
  ENSG00000196505_35 (sequence is synthesized)
aaggacatattagaggataaaggggatactggatggagatgaccaccagcatctgatgttaattcaaagcaccaccaagtctttaatttaattaaactttggtcatgccaaatgctaatt

SEQ ID NO: 705769 - DNA, 120 bp, Artificial Sequence
  ENSG00000196505_36 (sequence is synthesized)
gatttttaaaacaagtacacttcttgcttccacgtgtatttgggttcttaattcatctatatccaagtttcttgatagtgaaaattacctcttaaaaaaggttcagcctttattagactc

SEQ ID NO: 705770 - DNA, 120 bp, Artificial Sequence
  ENSG00000196505_37 (sequence is synthesized)
gtgagggcaaatggtacatattttaaagacgttttctcctttaatgtatattatgtttcattggcggatgctttatatttcctttttctttttcttttttttttggagacagtcttactc

SEQ ID NO: 705771 - DNA, 74 bp, Artificial Sequence
  ENSG00000196505_38 (sequence is synthesized)
cctttttctttttcttttttttttggagacagtcttactctgtcggcctcccaggtttaagtggttctcctgcc

SEQ ID NO: 705772 - DNA, 120 bp, Artificial Sequence
  ENSG00000196505_39 (sequence is synthesized)
agtgttgggcttaccagtatgagccaccgtgcccatcctgtatttcctttttcaaaggaatacatctgcagtattttgagagtaattagcagagggttttttgagtatttttggtaggaa

SEQ ID NO: 705773 - DNA, 120 bp, Artificial Sequence
  ENSG00000196505_40 (sequence is synthesized)
aaatagatgtagttttttaatcaaatttctgaaattgaaaatatcacttctttttaaagagggataagtatagtcactctagtagaaaaacatggcttgcctatttcctcttcttttctg

SEQ ID NO: 705774 - DNA, 120 bp, Artificial Sequence
  ENSG00000196505_41 (sequence is synthesized)
tttgcttggatattgtttaatgaattcaaactgtaggtttagtcttgtctttataacagttaatggagaagtgataaaattaagtattcagcataaactaaagatcactctttgtatttc

SEQ ID NO: 705775 - DNA, 120 bp, Artificial Sequence
  ENSG00000196505_42 (sequence is synthesized)
cccgatacattgacagtatgtatgtatatagagtttaaattgcttaatatatgcacagaaatgattagaatttgaagtactatatagaggagagttacatggttctagtggcagtggatt

SEQ ID NO: 705776 - DNA, 120 bp, Artificial Sequence
  ENSG00000196505_43 (sequence is synthesized)
agttacatggttctagtggcagtggattgattgtattaaggaccaaaagaactgcaggataatataaaaacaccttgaaaactggagttagttaggtttctttttctttttctttttttt

SEQ ID NO: 705777 - DNA, 75 bp, Artificial Sequence
  ENSG00000196505_44 (sequence is synthesized)
tttcttttttttttttaaagggccttactgtactttttttttttttttgtctctgtctcctgggttcaagagatt

SEQ ID NO: 705778 - DNA, 120 bp, Artificial Sequence
  ENSG00000196505_45 (sequence is synthesized)
ttacaggcataagccactgtgcctggccaggtttctgattatagttttcttaagttgtaatcatcataattaacgtgcgctagagtgttttaactgtgctggcactaatgcttcttggca

SEQ ID NO: 705779 - DNA, 120 bp, Artificial Sequence
  ENSG00000196505_46 (sequence is synthesized)
ggcatataattaactcttgttttgcaaaaagaccatgaagaatgaaaggagggctttaccttaccttagtcattttgggtgaataccgtaaactgggtggcgtaacaaaacacatttatt

SEQ ID NO: 705780 - DNA, 120 bp, Artificial Sequence
  ENSG00000196505_47 (sequence is synthesized)
tctcacagttggaggctgagaaaccccaagatcaaagtgccatccagcgcaattcctgatgagggccctcttctggcttcttgctgtattctcacttggcagagagagagagacatcgtt

SEQ ID NO: 705781 - DNA, 120 bp, Artificial Sequence
  ENSG00000196505_48 (sequence is synthesized)
actttcctgtctcttcttataagggcactaatctcattcatgagggctccaccctcatgacatgattaccacccagaggccccacctccaaatgccatcactttgtatgttagggcttca

SEQ ID NO: 705782 - DNA, 120 bp, Artificial Sequence
  ENSG00000196505_49 (sequence is synthesized)
acatatgaatttgcagacgaggaggagaacataagcattcagttcataacatacctataatctaggtcatatcataaacccagagatgataaggattgcctggtaggcctaaccatatat

SEQ ID NO: 705783 - DNA, 120 bp, Artificial Sequence
  ENSG00000196505_50 (sequence is synthesized)
acatatacatgcatgcacacacacatatatgcataatctgccttgttttacattctttgagtcggacttctgtggtccatatgtagagaacatagagcaataaataacctagttcaatct

SEQ ID NO: 705784 - DNA, 120 bp, Artificial Sequence
  ENSG00000196505_51 (sequence is synthesized)
ttgagtcttactgaactagtccttaaacagatggtatcaagatcattttagatattagtgactctcttgtatattagttattttttacacttttaagaacagcatctttgaatcttttca

SEQ ID NO: 705785 - DNA, 120 bp, Artificial Sequence
  ENSG00000196505_52 (sequence is synthesized)
agtacagtatgccttaaatgtataggaccactgagttcaggaagaaaagcataggtattctgtaggtgaattacactaacaaaatcacaactgcagaatgtgatctgatacttttgttgg

SEQ ID NO: 705786 - DNA, 120 bp, Artificial Sequence
  ENSG00000196505_53 (sequence is synthesized)
acagtaaagctaatacattttatatacacagtcataccttttttttttgtaatgtgtttcgttaacgtaagcacacagtcatcacagactgagacaggactttgttagaccagatcttgt

SEQ ID NO: 705787 - DNA, 120 bp, Artificial Sequence
  ENSG00000196505_54 (sequence is synthesized)
gagctaaatatttaagagcttaacatatataaatgattttaattggtattgggcgaaggaaacctaaaaatgcttaaattgacagatcttacaatttgcttactgaaaattcagaaagct

SEQ ID NO: 705788 - DNA, 120 bp, Artificial Sequence
  ENSG00000196505_55 (sequence is synthesized)
tttatgaaaactttgtattttaaaatattttttgctcattctgaattagaagttagatcccttttaaagagggtctcactctatacaaatatagcctatgaagaatcaatagtgaaataa

SEQ ID NO: 705789 - DNA, 120 bp, Artificial Sequence
  ENSG00000196505_56 (sequence is synthesized)
tagtgtttatattgaaccccaggatgggacattattttttgaccatttacatgaggtctttctctaattaccaaagttaaccttaagagtagttaaaaactcagtgaattttagtcaaca

SEQ ID NO: 705790 - DNA, 120 bp, Artificial Sequence
  ENSG00000196505_57 (sequence is synthesized)
ttctctgtggagacctggactagtgtttcccaaactttcatgtgcatgtatcaaatcagctgaggatattattaaatggagattcagattcaatagttctggggtggcctctgggattat

SEQ ID NO: 705791 - DNA, 120 bp, Artificial Sequence
  ENSG00000196505_58 (sequence is synthesized)
cagtttctaacaagctcttaggtgttatcaattctcctggtccccagaccatagttagagtaaaagagtatagactgcatttagcttccagattttctctttcaaggaaaggagacagaa

SEQ ID NO: 705792 - DNA, 120 bp, Artificial Sequence
  ENSG00000196505_59 (sequence is synthesized)
ctgtcattgtaattcttcctgtggtccaggcactctaacgttcatcgtctcttctaatgctcttacaaatcctgtgaggttggtgataatagaagttacctcctgaagacgacattcaca

SEQ ID NO: 705793 - DNA, 120 bp, Artificial Sequence
  ENSG00000196505_60 (sequence is synthesized)
agcaggaccgaccgtgtagaccagttttctcaaactgaataatgtacttcactttttaataaggaaaaaaatctcttagctcctcagtttttgcttaatttatatttattataatgttat

SEQ ID NO: 705794 - DNA, 120 bp, Artificial Sequence
  ENSG00000196505_61 (sequence is synthesized)
ctaaatatatataaacataaaactaggtataaatgctttatgtttatatgtcttgcacaagtataaaaccaaaacaagtttatgggttaacacaagcaaaactataaaactaataaaatt

SEQ ID NO: 705795 - DNA, 120 bp, Artificial Sequence
  ENSG00000196505_62 (sequence is synthesized)
taaaatagtattaaatagtgatgttttgacaaaatgaaattgtcacttgtaatgtgattatggtactgagtgctacagtacaggctcttttcagttcaacaggcatgtactgccatgtac

SEQ ID NO: 705796 - DNA, 120 bp, Artificial Sequence
  ENSG00000196505_63 (sequence is synthesized)
tatgtgatgacccaattcaccctgttttctcctattcagactattactttaatttgttcagcacatagtgatgttatttggtcctcatctagcctgaatccatcattcccctattaaaac

SEQ ID NO: 705797 - DNA, 120 bp, Artificial Sequence
  ENSG00000196505_64 (sequence is synthesized)
agcctctgttctccataagccttccaccactaatgtagaactgggccttaacagggaagtcaatacaaatacaaacctaagcactgagatggttctgccaatatttggttttaatacaat

SEQ ID NO: 705798 - DNA, 120 bp, Artificial Sequence
  ENSG00000196505_65 (sequence is synthesized)
tatccaaataattcagagcatgaatattattttaaaatgtttcatcaacatgaataatgcataattctcatagtaagttcatgggcactttcctacacccaacacatatatactccacaa

SEQ ID NO: 705799 - DNA, 120 bp, Artificial Sequence
  ENSG00000196505_66 (sequence is synthesized)
ggattttgcatggaccccagtttaagaagcaacaatttagtggtcagtagcattggcgctttggcttctgacacactcagaccttgggcctgtttctcaactttttctgaacctcagtgt

SEQ ID NO: 705800 - DNA, 120 bp, Artificial Sequence
  ENSG00000196505_67 (sequence is synthesized)
ttttgtgtattcaacagggataatattaattgaataattaggaggaacaaatgcaataatgtacataaagcatgcatagtagtgtttataaatagcagccaccactgctttgattagaaa

SEQ ID NO: 705801 - DNA, 120 bp, Artificial Sequence
  ENSG00000196505_68 (sequence is synthesized)
taataacagctaacatttgaggatttactgtgtgccttgaacgctgctaagctctttatatatattacatattgagtggtagaatcaggattcaaatccagatctgactccaaagcgcat

SEQ ID NO: 705802 - DNA, 120 bp, Artificial Sequence
  ENSG00000196505_69 (sequence is synthesized)
tgactccaaagcgcatgcttttataaaacataatttaaatatagaatatcaatgtaaattgcttatttagaaagtttattttcttatattttctcaaaaatatttattgtcaaatcagtg

SEQ ID NO: 705803 - DNA, 120 bp, Artificial Sequence
  ENSG00000196505_70 (sequence is synthesized)
aatagctaaatttccttttaaaaattgtatgatgtgctgatttcaaattgatgtgaaatacagatttcatttaaaggcagtcatgccagattgtgctacagtaaaggaatattcagacca

SEQ ID NO: 705804 - DNA, 120 bp, Artificial Sequence
  ENSG00000196505_71 (sequence is synthesized)
ttaaagctgtgcctggggttctggaatccagaaactctctagttgagcatctccagagaataaacttcttccctgctgctctggtgggtgccgaacaggtgaagcaaaattgacaaaagg

SEQ ID NO: 705805 - DNA, 120 bp, Artificial Sequence
  ENSG00000196505_72 (sequence is synthesized)
cgagcacaacatcctgtcattaccagatattaatgtaaattagtgagtcttaataaacttggtaatatcatttaacatactttccctatgataactttaggaaaaggatttgtcccaaga

SEQ ID NO: 705806 - DNA, 120 bp, Artificial Sequence
  ENSG00000196505_73 (sequence is synthesized)
gaggcattttctccagataaacgtttcagtgggagatctctctgctgtgagttcagaaccaattttcgtttgtattgtaagttttctaccatatttaaaacagatacctctgcctaattt

SEQ ID NO: 705807 - DNA, 120 bp, Artificial Sequence
  ENSG00000196505_74 (sequence is synthesized)
tcttaagattgaatggctttccatctacacagagccagaagaatttattggtgatcacttttagaattaattgcaaatcatgtggcctatctcagtagtctttaccctgctaaaagtttc

SEQ ID NO: 705808 - DNA, 120 bp, Artificial Sequence
  ENSG00000196505_75 (sequence is synthesized)
atttatctaaaaggttgtataatgtttttaagagcatcatctgataatattattgttgttatttatagatgcgtttatggatctgttacataagcactagtcacaggactactcgtgaat

SEQ ID NO: 705809 - DNA, 120 bp, Artificial Sequence
  ENSG00000196505_76 (sequence is synthesized)
ttcatcaatttattctattgtgtttattcatgatatcaccttagtaatttttgaaaaaaaaaaagtaacacacttggccaaaagctcatcaagctgattgtttaactgttgctgattgct

SEQ ID NO: 705810 - DNA, 120 bp, Artificial Sequence
  ENSG00000196505_77 (sequence is synthesized)
tatctttatattgtatgaaccaggggatagatttgaaagttatattaagtttgaaatgaattattcttccctaattattgtgcagtgtttatacagcaaaataaaaattctgcaacacaa

SEQ ID NO: 705811 - DNA, 120 bp, Artificial Sequence
  ENSG00000196505_78 (sequence is synthesized)
ttccaatttatttttcatgacaatcagtgaggaagatatcgtcctcattttggaggtgcaaaaactcaaagttaagaaagttatcagtggccacagttaatatgtggtgaaaccagtggt

SEQ ID NO: 705812 - DNA, 120 bp, Artificial Sequence
  ENSG00000196505_79 (sequence is synthesized)
atgttgttgatgtcaagttagttatttttgcaaattatgaaggggaaatagtttctttcttttctaatattaagcagtggcaaacattgctttgtattctgtgaaaggatatttcatgta

SEQ ID NO: 705813 - DNA, 120 bp, Artificial Sequence
  ENSG00000196505_80 (sequence is synthesized)
acaaagacttttatcatacctagattagatacttcaatcataggagaccctccgtaactgaaacttattttgcattaaagtaaattcatatgtaaactttttacattaccaatctttgtg

SEQ ID NO: 705814 - DNA, 120 bp, Artificial Sequence
  ENSG00000196505_81 (sequence is synthesized)
tgtggataaaataacaaaaatactaccttctatttatatgatgtattatacttatcaaaatacatttataaacattatttactttgatcctttaacccaggagttggttaggagagatat

SEQ ID NO: 705815 - DNA, 120 bp, Artificial Sequence
  ENSG00000196505_82 (sequence is synthesized)
tgtgtttgaaagatggaagatattgacattctgcaaggtgaagtatgtgcccaaagtctcacaacagtaaatgcagaatttggacttgaacccaggttactgacttggagctagaaaatt

SEQ ID NO: 705816 - DNA, 120 bp, Artificial Sequence
  ENSG00000196505_83 (sequence is synthesized)
attttcattaaagcatatttcccttgaaatgataatggaaattttaaccagaaaatacatgataccccactatagcaaagatgaaatgtagtgttttacattttttcttatttttttttc

SEQ ID NO: 705817 - DNA, 120 bp, Artificial Sequence
  ENSG00000196507_0 (sequence is synthesized)
ccgcccgcccgccctgcggtccggtcctggcgcccgcgcagaaccagctgtctgagctgcccgggcagcgggggagcagcgagcgggcttccgcgagccggagaaggcacaggcctgtcc

SEQ ID NO: 705818 - DNA, 120 bp, Artificial Sequence
  ENSG00000196507_1 (sequence is synthesized)
gagaaggcacaggcctgtcccgggtcccggcaggtcagtgtgaaggtctgcgcgtctgttcccagcgctctgcgaggcctaaaaaggaggagcaacctgtccagaatccctgcaggacag

SEQ ID NO: 705819 - DNA, 120 bp, Artificial Sequence
  ENSG00000196507_2 (sequence is synthesized)
gaaaaggaggggaaatctcgacatggaaaaaccctacaataaaaatgaaggaaacctggaaaacgagggaaagccagaagatgaagtagagcctgatgatgaaggaaagtcagacgagga

SEQ ID NO: 705820 - DNA, 120 bp, Artificial Sequence
  ENSG00000196507_3 (sequence is synthesized)
agaaaagccagacgtggaggggaagacagaatgcgagggaaagagagaggatgagggagagccaggtgatgagggacaactggaagatgagggaagccaggaaaagcagggcaggtccga

SEQ ID NO: 705821 - DNA, 120 bp, Artificial Sequence
  ENSG00000196507_4 (sequence is synthesized)
caaagccagagagccagccgcgggccgccgaaaagcgcccggctgaagattatgtgccccggaaagcaaaaagaaaaacggacagggggacggacgattcccccaaggactctcaggagg

SEQ ID NO: 705822 - DNA, 120 bp, Artificial Sequence
  ENSG00000196507_5 (sequence is synthesized)
acttacaggaaaggcatctgagcagtgaggagatgatgagagaatgtggagatgtgtcaagggctcaagaggagctaaggaaaaaacagaaaatgggtggttttcattggatgcaaagag

SEQ ID NO: 705823 - DNA, 120 bp, Artificial Sequence
  ENSG00000196507_6 (sequence is synthesized)
atgtacaggatccattcgccccaaggggacaacggggtgtcaggggagtgaggggtggaggtaggggccagaggggcttacacgatatcccatacctttaatgcctttggccttccattc

SEQ ID NO: 705824 - DNA, 120 bp, Artificial Sequence
  ENSG00000196507_7 (sequence is synthesized)
tgatttctctgatgagaatattgctggccctgctttccctggtaggtatttgccaggcccaatgctttaaccttaagctgatactttgctttagatgtcagtctcgttaccagcagcctt

SEQ ID NO: 705825 - DNA, 120 bp, Artificial Sequence
  ENSG00000196507_8 (sequence is synthesized)
ttgacccaactacggcgctctatattttagtagaggattttcacccatgtgcatggaaaagatgttcatggtacattgtaaaaaaataaaattaaaattaaaaaaagtttgcagaaccgc

SEQ ID NO: 705826 - DNA, 120 bp, Artificial Sequence
  ENSG00000196507_9 (sequence is synthesized)
gcagaaccagctgtctgagctgcccgggcagcgggggagcagcgagcgggcttccgcgagccggagaaggcacaggcctgtcccgggtcccggcaggtctgcgcgtctgttcccagcgct

SEQ ID NO: 705827 - DNA, 120 bp, Artificial Sequence
  ENSG00000196507_10 (sequence is synthesized)
gggagacagaacttgaggactgaggagagaggaggcccaggacagaaccctaggaacactgccactcaaggtggcagctcagcttcctggcaggcagcaccaccctgggctctggagtca

SEQ ID NO: 705828 - DNA, 120 bp, Artificial Sequence
  ENSG00000196507_11 (sequence is synthesized)
ggcagagacagtcttgaaagcgggctctggagttctggggctgagcgctcttggcaaagtcgggtaccctctttgatcagctgtcacacctggcgataatggcatcagagagagataccc

SEQ ID NO: 705829 - DNA, 120 bp, Artificial Sequence
  ENSG00000196507_12 (sequence is synthesized)
cctaaaaaggaggagcaacctgtccagaatccctgcaggactgcccagtggatcagatgaggtattgaacatgtgagctgtccttacaggagcaggacccagcaccctgtcagacactta

SEQ ID NO: 705830 - DNA, 120 bp, Artificial Sequence
  ENSG00000196507_13 (sequence is synthesized)
aaagaagagctgaagatggaatctcttattggccaggctggagtacagtggcacaatcacggctcactgaagccttgagttcccaggcctctaacctcggcctcccaaggaactggacca

SEQ ID NO: 705831 - DNA, 120 bp, Artificial Sequence
  ENSG00000196507_14 (sequence is synthesized)
cctgggaccgcagatgaggaagctgagtcacagaagattgagtagattgcctagtgtgtctcacagaatggaaggggaaagaaccagaatagaagctgtggcaattttaagctgtcaagg

SEQ ID NO: 705832 - DNA, 120 bp, Artificial Sequence
  ENSG00000196507_15 (sequence is synthesized)
aaacatgctgaatgagcctaaatggacatgatggagatacggatgtggattaaaactgagagtgttgggatataaggatataatactgatttatgaaggtgaacagtcaaacgtcagtgc

SEQ ID NO: 705833 - DNA, 120 bp, Artificial Sequence
  ENSG00000196507_16 (sequence is synthesized)
aggatctgaactgcaggggaaataaggggccttggtggctaaggaagggaggaggggagaaagaggtggtactaggggaagtagcacagaggaagaggcaatactacccgagactagatg

SEQ ID NO: 705834 - DNA, 120 bp, Artificial Sequence
  ENSG00000196507_17 (sequence is synthesized)
cggaccgtctctggcaaccaggaaaaggcaaatacaaagagaggtctgctggtcacagcggggcacctcgaggagaggacgactaggagcacacggcccggaaaggtccaggtcagggaa

SEQ ID NO: 705835 - DNA, 120 bp, Artificial Sequence
  ENSG00000196507_18 (sequence is synthesized)
ggggtacgcagtgggccgggactggggcgcgagggtggacgccgaaaggcatggagtctgcaggccgcactgtcccgcccctgtcactgcgggcgaggcctgtagcaaagcctgctggga

SEQ ID NO: 705836 - DNA, 120 bp, Artificial Sequence
  ENSG00000196510_0 (sequence is synthesized)
gatggaccccggcgacgccgccattttggagtcttccctaaggatcctctaccggcttttcgagtcagtgctgccgccgctgcccgcggctttgcagagcaggatgaatgtgatagacca

SEQ ID NO: 705837 - DNA, 120 bp, Artificial Sequence
  ENSG00000196510_1 (sequence is synthesized)
cgtgcgggacatggcggccgcggggctgcactccaacgtgcggctcctcagcagcttgttacttacaatgagtaataacaaccctgagttattctccccacctcagaagtaccagctttt

SEQ ID NO: 705838 - DNA, 120 bp, Artificial Sequence
  ENSG00000196510_2 (sequence is synthesized)
ggtgtatcatgcagattctctctttcatgataaggaatatcggaatgctgtgagtaagtataccatggctttacagcagaagaaagcgctaagtaaaacttcaaaagtgagaccttcaac

SEQ ID NO: 705839 - DNA, 120 bp, Artificial Sequence
  ENSG00000196510_3 (sequence is synthesized)
tggaaattctgcatctactccacaaagtcagtgtcttccatctgaaattgaagtgaaatacaaaatggctgaatgttatacaatgctaaaacaagataaagatgccattgctatacttga

SEQ ID NO: 705840 - DNA, 120 bp, Artificial Sequence
  ENSG00000196510_4 (sequence is synthesized)
tgggatcccttcaagacaaagaactcccaaaataaacatgatgctggcaaacctgtacaagaaggctggtcaggagcgcccttcagtcaccagctataaggaggtgctgaggcagtgccc

SEQ ID NO: 705841 - DNA, 120 bp, Artificial Sequence
  ENSG00000196510_5 (sequence is synthesized)
attagcccttgatgccattctaggcttgttgtccctttctgtaaaaggggcagaggtggcatccatgacaatgaatgtgatccaaaccgtgcctaacttggactggctctctgtgtggat

SEQ ID NO: 705842 - DNA, 120 bp, Artificial Sequence
  ENSG00000196510_6 (sequence is synthesized)
caaagcgtatgcttttgtgcacactggtgacaactcaagagcaatcagtaccatctgttcactagagaaaaaatccttattgcgagataacgtggacctattgggaagcttggcagatct

SEQ ID NO: 705843 - DNA, 120 bp, Artificial Sequence
  ENSG00000196510_7 (sequence is synthesized)
gtacttcagagctggagacaataaaaactctgtcctcaagtttgaacaggcacagatgttggatccttatctgataaaaggaatggatgtatatggctacctactggcacgagaagggcg

SEQ ID NO: 705844 - DNA, 120 bp, Artificial Sequence
  ENSG00000196510_8 (sequence is synthesized)
gctagaggatgttgagaaccttggatgccgccttttcaatatctctgatcagcatgcagaaccgtgggtggtttctggctgtcacagcttctatagcaaacgctactcccgggccctcta

SEQ ID NO: 705845 - DNA, 120 bp, Artificial Sequence
  ENSG00000196510_9 (sequence is synthesized)
tttaggagccaaggccattcagctgaacagtaatagtgttcaagctctgctacttaagggagcagcacttaggaacatgggcagagtccaagaagcaataatccactttcgggaggccat

SEQ ID NO: 705846 - DNA, 120 bp, Artificial Sequence
  ENSG00000196510_10 (sequence is synthesized)
acggctcgcaccttgtcgcttagattgttatgaaggtcttatcgaatgttacttagcctccaacagtattcgagaagcaatggtaatggctaacaacgtttacaaaactctgggagcaaa

SEQ ID NO: 705847 - DNA, 120 bp, Artificial Sequence
  ENSG00000196510_11 (sequence is synthesized)
tgcacagacccttacccttttagccaccgtttgtcttgaagacccagtgacacaggagaaagccaaaacattattagataaagccctgacccaaaggccagattacattaaggctgtggt

SEQ ID NO: 705848 - DNA, 120 bp, Artificial Sequence
  ENSG00000196510_12 (sequence is synthesized)
aattgctttgctgaggaacgcactggctaatcagagtgactgtgtcctgcatcggatcctaggagatttccttgtagctgtcaatgagtatcaggaggcaatggaccagtatagtatagc

SEQ ID NO: 705849 - DNA, 120 bp, Artificial Sequence
  ENSG00000196510_13 (sequence is synthesized)
actaagtttggaccccaatgaccagaagtctctagaggggatgcagaagatggagaaggaggagagtcccacggatgccactcaggaggaggatgtggacgacatggaagggagtgggga

SEQ ID NO: 705850 - DNA, 120 bp, Artificial Sequence
  ENSG00000196510_14 (sequence is synthesized)
agaaggggacctggagggcagcgacagtgaggcggcccagtgggctgaccaggagcagtggttcggcatgcagtgagggggcggcagctccatggccgcagtggcctgccctgctctgag

SEQ ID NO: 705851 - DNA, 120 bp, Artificial Sequence
  ENSG00000196510_15 (sequence is synthesized)
cacttccgtggactgaaggaaccgtaggagcctgctctcagaaggacaatgattcagcatgtgattgcagcaggggtctctgccccctcgctcccaattcctagtcgtgacttcatttct

SEQ ID NO: 705852 - DNA, 120 bp, Artificial Sequence
  ENSG00000196510_16 (sequence is synthesized)
aaaacagagcctgaccaaccttccatgtatctccatcctcccctgctccagccagggaggactgagggagtgccccgagacccacgcacatgttggggcttctgggccaagagtactttt

SEQ ID NO: 705853 - DNA, 120 bp, Artificial Sequence
  ENSG00000196510_17 (sequence is synthesized)
tatataactaatttctaaatccaaaagctcaaggaatagacagtgttctgtgacatggattggtttgaaggagttacccaccatcccagcacgataatgtcatctcccaagttggatggc

SEQ ID NO: 705854 - DNA, 120 bp, Artificial Sequence
  ENSG00000196510_18 (sequence is synthesized)
agcacgatctggccctagggagcttcctgttcccagaagtcattgtcctgggctatccagatgtccctagtaaatcttgcttccttctgcaatgttagtaatgccttaagctgacagttg

SEQ ID NO: 705855 - DNA, 120 bp, Artificial Sequence
  ENSG00000196510_19 (sequence is synthesized)
ctattttgcagaacagttttcctctttgcttagctagtaacttgcctctgagcctgggctgatctgagaaacaggtgtgacaagagcatgaaccagaggtgcacctggggcagttcccta

SEQ ID NO: 705856 - DNA, 120 bp, Artificial Sequence
  ENSG00000196510_20 (sequence is synthesized)
ataaaactggtttgtacagtcatggtgttggggtgatcagaatggaagcccttttcaaaatagactcttagtatttttgtcttattcgcaatgcattgattcagccccagaattatttgc

SEQ ID NO: 705857 - DNA, 120 bp, Artificial Sequence
  ENSG00000196510_21 (sequence is synthesized)
cagaaatagactttcttcccctggtgttgggagccaggagggttggaaagctcaggaaccctgagctggttcatctgtttgcatattgggtaggttaatttccctggagcctgagagtct

SEQ ID NO: 705858 - DNA, 120 bp, Artificial Sequence
  ENSG00000196510_22 (sequence is synthesized)
ttggccagatttcagctgcgtctgcctggctcttttgctgcagctgtgagattggggtctggttccagcagtctgtcactggtcagcctgagtatcacaccctgagctctggggctggga

SEQ ID NO: 705859 - DNA, 120 bp, Artificial Sequence
  ENSG00000196510_23 (sequence is synthesized)
gtttcttcccacaccctctcccttgtgccttaagttgcgatggctctgagtatacaattaatcggaggtgaggggtgggtgtcacagctaatcccaaattcaaaaattagtccaaggtgc

SEQ ID NO: 705860 - DNA, 120 bp, Artificial Sequence
  ENSG00000196510_24 (sequence is synthesized)
tgcaaaatataaatttgatgtcagtagaaagtcgtatcctaaaatgtaaaaactgtaagtgtacagtagttaatgagctcagaacatctgataactgcaatttaaaatgggcaaaaagtt

SEQ ID NO: 705861 - DNA, 75 bp, Artificial Sequence
  ENSG00000196510_25 (sequence is synthesized)
gaggctgaggcgggtggaactaccatctctactaaaaatagaaacaaatttagccaggcatggtggtgcacgcct

SEQ ID NO: 705862 - DNA, 120 bp, Artificial Sequence
  ENSG00000196510_26 (sequence is synthesized)
gactccatttcaaaaaaaaaaaaaaaaatagttagagttaggtaatttctggttaagtaaccatagtgtgtggaagggtgtgcatgaatgttataaatgctgctagggtggaggagtatg

SEQ ID NO: 705863 - DNA, 120 bp, Artificial Sequence
  ENSG00000196510_27 (sequence is synthesized)
atgctgctagggtggaggagtatgcagagaaaatctgccaaggattgtgtgggtttggggttttaagctgtttttttgttttgatgagcactttgtgccaaaaagttattcctctgttct

SEQ ID NO: 705864 - DNA, 120 bp, Artificial Sequence
  ENSG00000196510_28 (sequence is synthesized)
cctcaacttactggcatgaagagttgagagttgactcttctcaaggtggcctcctcatagggcgtctcgctgtgggtgtggaaagaggcaagggctgccagttgcagtctgtttggtgca

SEQ ID NO: 705865 - DNA, 120 bp, Artificial Sequence
  ENSG00000196510_29 (sequence is synthesized)
ggggtgctcacatgctgcaggttccttacatgtgcttgtttccttccctaaactgaaggtgcctttgaaggcagtctttttctacatccatcaagttctctggggaagagcacttcttag

SEQ ID NO: 705866 - DNA, 120 bp, Artificial Sequence
  ENSG00000196510_30 (sequence is synthesized)
ctattccatcaacactcttgccagtctaatctcaccatcagtttcccgtggcctgccctttgtctgaaactttgaaggttagcaatttggagagctgtcagagtggaagcatgggttgga

SEQ ID NO: 705867 - DNA, 120 bp, Artificial Sequence
  ENSG00000196510_31 (sequence is synthesized)
gtaccatctggtgagagccacaaagttaattcagtgttcttgaggccctttgcttgtctggaagtctgatgtatctgaagtagcaaaaagaaaaatgagatgctttgctgttggtgctgc

SEQ ID NO: 705868 - DNA, 120 bp, Artificial Sequence
  ENSG00000196510_32 (sequence is synthesized)
agcagaataataatagtaatggtagaagagttatttgtgaattcatgacttctaaaaattttttcttaaaatatattaacaacattagagaactgtttcactcataaccatcccacacca

SEQ ID NO: 705869 - DNA, 120 bp, Artificial Sequence
  ENSG00000196510_33 (sequence is synthesized)
ctataacatctgtgttcatttgtatagctcatcttctgtccttgcccacacacacatatttttatagggctgtacctagtatatattttatattcttctttttcaaatcaaagtattgta

SEQ ID NO: 705870 - DNA, 120 bp, Artificial Sequence
  ENSG00000196510_34 (sequence is synthesized)
agtactttcccatgtttctatctactgtagtcattaagaacttgaggtctgaagttttgaatactaccttcaccacctgtgatcttgggcaagttactaacacatttccttgtctatatc

SEQ ID NO: 705871 - DNA, 120 bp, Artificial Sequence
  ENSG00000196510_35 (sequence is synthesized)
tagctaccttattagatattaaatgatcgaatgagggttaaatgattatttcatgtaaagctcttagccctgtgcctggtacatagtaaatgctaaataaatagtggtattcttactgtt

SEQ ID NO: 705872 - DNA, 120 bp, Artificial Sequence
  ENSG00000196510_36 (sequence is synthesized)
ctgtctctctctctctctctctctctcccaggctagagtgcagtggcgcagtcacagctcagtgtagccttgacctgtcaatctcccgggctcaaaccatcctcctgctcagcctcctga

SEQ ID NO: 705873 - DNA, 63 bp, Artificial Sequence
  ENSG00000196510_37 (sequence is synthesized)
ggcgcagtcacagctcagtgtagccttgacctgtcaatctcccgggctcaaaccatcctcctg

SEQ ID NO: 705874 - DNA, 71 bp, Artificial Sequence
  ENSG00000196510_38 (sequence is synthesized)
tttggtgtatcattcttcagcctggaagaaaatcattttgcactcaccagaagcttggtttattgcagtgt

SEQ ID NO: 705875 - DNA, 120 bp, Artificial Sequence
  ENSG00000196510_39 (sequence is synthesized)
atcattttgcactcaccagaagcttggtttattgcagtgtctaacctagcttgcctgcttaggactagggattttctttatattcagataaagttcaaggacaagaagagacttgggctt

SEQ ID NO: 705876 - DNA, 120 bp, Artificial Sequence
  ENSG00000196510_40 (sequence is synthesized)
gtgttatgcaaagtcgtttacttgagtaataaataggtgtcacttgtgaatgacattacctttaacaccatgtagcgtatgttgtgttctgaagaactgcaaccacagagttatttgttg

SEQ ID NO: 705877 - DNA, 120 bp, Artificial Sequence
  ENSG00000196510_41 (sequence is synthesized)
gaattttatatttatgcaaaagaaaatagtatctgtatgaccaatcatccagattcagcaactaagaggatttataatagatttaaaggttcaatgtttaataaatatcttaaagttcac

SEQ ID NO: 705878 - DNA, 120 bp, Artificial Sequence
  ENSG00000196510_42 (sequence is synthesized)
gctacttaagggagcagcacttaggaacatgggcagagtccaagaagcaataatccactttcgggaggccatacggctcgcaccttgtcgcttagattgttatgaaggcagagaacagaa

SEQ ID NO: 705879 - DNA, 82 bp, Artificial Sequence
  ENSG00000196510_43 (sequence is synthesized)
acctcgtgatccacctgcctcggcttctacctgggttttgcattttaatagtcactttgtaggaaactggaaatagtagttg

SEQ ID NO: 705880 - DNA, 120 bp, Artificial Sequence
  ENSG00000196510_44 (sequence is synthesized)
ttttaatagtcactttgtaggaaactggaaatagtagttggaggagcctgtgatggtggaaagggcttagcccctgcaggagctggggcctcagcatggggtctgatgttgggtgctact

SEQ ID NO: 705881 - DNA, 120 bp, Artificial Sequence
  ENSG00000196510_45 (sequence is synthesized)
ataaaataaagaccctaggagtcttccatcttaaacctagccctacaggtgaccgaatgcagctggagaataactgcttgttaagaggcagcaaaaccttgggttttgttgggaacatca

SEQ ID NO: 705882 - DNA, 120 bp, Artificial Sequence
  ENSG00000196511_0 (sequence is synthesized)
aaggctcctcagccgagcgccgagcggtcgatcgccgtagctcccgcagcctgcgatctccagtctgtggctcctaccagccattgtaggccaataatccgttatggagcatgcctttac

SEQ ID NO: 705883 - DNA, 120 bp, Artificial Sequence
  ENSG00000196511_1 (sequence is synthesized)
cccgttggagcccctgctttccactgggaatttgaagtactgccttgtaattcttaatcagcctttggacaactattttcgtcatctttggaacaaagctcttttaagagcctgtgccga

SEQ ID NO: 705884 - DNA, 120 bp, Artificial Sequence
  ENSG00000196511_2 (sequence is synthesized)
tggaggtgccaaccgcttatatgatatcaccgaaggagagagagaaagctttttgcctgaattcatcaatggagactttgattctattaggcctgaagtcagagaatactatgctactaa

SEQ ID NO: 705885 - DNA, 120 bp, Artificial Sequence
  ENSG00000196511_3 (sequence is synthesized)
gggatgtgagctcatttcaactcctgatcaagaccacactgactttactaagtgccttaaaatgctccaaaagaagatagaagaaaaagacttaaaggttgatgtgatcgtgacactggg

SEQ ID NO: 705886 - DNA, 120 bp, Artificial Sequence
  ENSG00000196511_4 (sequence is synthesized)
aggccttgctgggcgttttgaccagattatggcatctgtgaataccttgttccaagcgactcacatcactccttttccaattataataatccaagaggaatcgctgatctacctgctcca

SEQ ID NO: 705887 - DNA, 120 bp, Artificial Sequence
  ENSG00000196511_5 (sequence is synthesized)
accaggaaagcacaggttgcatgtagacactggaatggagggtgattggtgtggccttattcctgttggacagccttgtatgcaggttacaaccacaggcctcaagtggaacctcacaaa

SEQ ID NO: 705888 - DNA, 120 bp, Artificial Sequence
  ENSG00000196511_6 (sequence is synthesized)
tgatgtgcttgcttttggaacattggtcagtacttccaatacctacgacgggtctggtgttgtgactgtggaaactgaccacccactcctctggaccatggccatcaaaagctaacctgt

SEQ ID NO: 705889 - DNA, 120 bp, Artificial Sequence
  ENSG00000196511_7 (sequence is synthesized)
tgactggcatccataagtgtgcctctgccttatctcatttctcaacagttcattgctcaacaagaacgattcacctgggtttgcaagaatctaaacctctctaggggaagcccactgggt

SEQ ID NO: 705890 - DNA, 120 bp, Artificial Sequence
  ENSG00000196511_8 (sequence is synthesized)
ttaaagatgttagtgtttagataatacaggtaacattataaatgacagatctcaattttatagtagtgggaaagatacatgctaagaaagcaaataagctctattatattcggttggaac

SEQ ID NO: 705891 - DNA, 120 bp, Artificial Sequence
  ENSG00000196511_9 (sequence is synthesized)
ctaatgggaatcattccactatacaattcagtactgattattcttcttacattattaatcattccatttatcctagaaaattgtttttaatttgaatcagagaaaactgttgaggttcct

SEQ ID NO: 705892 - DNA, 120 bp, Artificial Sequence
  ENSG00000196511_10 (sequence is synthesized)
gctacctctgagtaccttttagtattagttttctgtatatgatatatattatcttatactgaaaaaaaattcctttcagattggggtgttagaagtgcaccaggtcactctgaccttatt

SEQ ID NO: 705893 - DNA, 120 bp, Artificial Sequence
  ENSG00000196511_11 (sequence is synthesized)
actgtctttggtattgtcttaaataaatcaagaatcattgacctaattgttaaatttaaaaataggtagttagcaataggtggaaagagaaatgatgtgaaagataaatgatgattcgtg

SEQ ID NO: 705894 - DNA, 120 bp, Artificial Sequence
  ENSG00000196511_12 (sequence is synthesized)
gagccctactcacacattaacccccaaattcaaaagtaagaatgcaaaagtctagagggggtaacagtctgcatcatcatcacaacctaaatggagaaagctgtgcagaggaaacttaag

SEQ ID NO: 705895 - DNA, 120 bp, Artificial Sequence
  ENSG00000196511_13 (sequence is synthesized)
cataaaaattgaattcgtttctgacataccttagactgaaaaactgttggttcatccagaagtgtattcatattaccagaaaatgagtttgtctatggggatacatgaacttcatatact

SEQ ID NO: 705896 - DNA, 120 bp, Artificial Sequence
  ENSG00000196511_14 (sequence is synthesized)
aaggagcctaactccaaagcctgcgttctcatcccagtctgatattcacctaagtttccggacccttttccttagctgtaaaatggaagcggttggactgatggtgtctgaggttctttc

SEQ ID NO: 705897 - DNA, 120 bp, Artificial Sequence
  ENSG00000196511_15 (sequence is synthesized)
ccacactgaaattctaaatattgacacttagcagtcatagggctgataatacacacagttactgacttagcctaaacaacctggtgcatcgaaatgtattcacctttcttttgtaaagag

SEQ ID NO: 705898 - DNA, 120 bp, Artificial Sequence
  ENSG00000196511_16 (sequence is synthesized)
accatcttctatcttctttccacctttctctgttttatgaaaccaactgttgacatacaaaccatgattgaaggagaacctgtccaacatgttttatgtacacaaatccctatgttgcta

SEQ ID NO: 705899 - DNA, 120 bp, Artificial Sequence
  ENSG00000196511_17 (sequence is synthesized)
taagaaaagtgaaagtaactgttttcttcttggtgctatgacagtgtgagactcaggttgtctgtagagaatgaaaggagcagtggcccgcgtgattgtggcatttaaggagcagtggcc

SEQ ID NO: 705900 - DNA, 120 bp, Artificial Sequence
  ENSG00000196511_18 (sequence is synthesized)
catgtgactgtggcattttcggcacttttcattactttctgcttgaccggaagttgaggcttagctatgtttccatcttcagtttctgaagactagttatatattccttactagaaatat

SEQ ID NO: 705901 - DNA, 120 bp, Artificial Sequence
  ENSG00000196511_19 (sequence is synthesized)
attcataatatataaaagaaatatatctgtgattttaaaattttgctaccaaagaatgcatgttctgtgtgccctgaaaatgttaccagtgttaataaatggatacttatcaaaaaagaa

SEQ ID NO: 705902 - DNA, 120 bp, Artificial Sequence
  ENSG00000196511_20 (sequence is synthesized)
tgccatagctctgtaacatgaacagtgtttccaataaactgtccaccgcaaaacccgttaaaaaatgagtgagctccatgagctgaggagctagcagattgccgggattacaaagacaac

SEQ ID NO: 705903 - DNA, 120 bp, Artificial Sequence
  ENSG00000196511_21 (sequence is synthesized)
tgactgtgaatggagcttacagtactttcctggaagttgctctggctcttttaagagcctgtgccgatggaggtgccaaccgcttatatgatatcaccgaaggagagagagaaagattcc

SEQ ID NO: 705904 - DNA, 120 bp, Artificial Sequence
  ENSG00000196511_22 (sequence is synthesized)
tctgacagtatcctccaagacctgacatggacaatgtgtgaaaaagcgctcaagtatgtgttgtaaaaaaagggtctaggccagttacttcagataagagcataatgcccatgaggccaa

SEQ ID NO: 705905 - DNA, 120 bp, Artificial Sequence
  ENSG00000196511_23 (sequence is synthesized)
gatctccagtctgtggctcctaccagccattgtaggccaataatccgttatggagcatgcctttaccccgttggagcccctgctttccactggtactgtatttctttccacggtttagtg

SEQ ID NO: 705906 - DNA, 120 bp, Artificial Sequence
  ENSG00000196511_24 (sequence is synthesized)
tcactgacgtgcccctccccagcgacgggaacaggtcgaaaggacggggctctagagccagcgtgacttccagcctgggttctgtccctgatttcctagctctgtaccgctaagcatatc

SEQ ID NO: 705907 - DNA, 120 bp, Artificial Sequence
  ENSG00000196511_25 (sequence is synthesized)
ttacgtatcagtccttgctgtgaggacgaaatgacaagatacagtgtgtgtagtccgtgtggagcccagtaagcgcttcccggctgttgcgcctccaccaacagcgcgaacaaatctgga

SEQ ID NO: 705908 - DNA, 120 bp, Artificial Sequence
  ENSG00000196511_26 (sequence is synthesized)
acatagcggaacattagacattgcaggcattaaggacggtcatcgttgcctgaccgtgatgcatttttaatccattgaaagtgccccgagcttatctaataaaagattggcaaatgatta

SEQ ID NO: 705909 - DNA, 120 bp, Artificial Sequence
  ENSG00000196511_27 (sequence is synthesized)
aggaaactatggtcatggtccttaaatgatgaaagaaaatcaaggaatacagagtgatcatttgtgttatatatatctgatggctttttgcctgaattcatcaatggagactttgattct

SEQ ID NO: 705910 - DNA, 120 bp, Artificial Sequence
  ENSG00000196511_28 (sequence is synthesized)
tcatcaggacaccgaaagacacccattactgtggagcttccaagggtcttggcaactcttttatcggaaacgagagctttttgcctgaattcatcaatggagactttgattctattaggc

SEQ ID NO: 705911 - DNA, 120 bp, Artificial Sequence
  ENSG00000196511_29 (sequence is synthesized)
taaagaagaaacagtgaaaggaatactgttcaattccaacatcagctgtgtaaccgaggcatcgtaatacttttatgacaagtttcactacctttttgcctgtgccagtgtacctcaaag

SEQ ID NO: 705912 - DNA, 120 bp, Artificial Sequence
  ENSG00000196511_30 (sequence is synthesized)
aaagtactgtgcattttatgtactgcttgactacaacatcgtttgctttgctcttttaagagcctgtgccgatggaggtgccaaccgcttatatgatatcaccgaaggagagagagaaag

SEQ ID NO: 705913 - DNA, 120 bp, Artificial Sequence
  ENSG00000196511_31 (sequence is synthesized)
attcctagctcttgtaatctctgttacttgtacatttctgtttttctgcctgcccgcacttctttctgtgtgtctggcagcctgcctgtctgcctgcttatgcccatttatttactgtga

SEQ ID NO: 705914 - DNA, 120 bp, Artificial Sequence
  ENSG00000196511_32 (sequence is synthesized)
tgtgaaaacaatttgtgtttattttttcactcagctgaaatggatatttacttttgtgctttttctttttttttaaattgctgtcaggttttttttcccctgtagagcagataagtctgc

SEQ ID NO: 705915 - DNA, 120 bp, Artificial Sequence
  ENSG00000196511_33 (sequence is synthesized)
acttagctgccaaaacattaacatgtgcacttaaaccagggaacacaaatgtaaacatcttacagtggcatggtaataaaatgggtgaactggaccgtgtgtcaagtaatcaaaactggg

SEQ ID NO: 705916 - DNA, 120 bp, Artificial Sequence
  ENSG00000196511_34 (sequence is synthesized)
aactcattcttgcctgaaagcgactagctactattcgtctctagttgattgttgccatgaagagctatatgtatttttggactgtgtctatttacatattatataggcaaaacaaatatg

SEQ ID NO: 705917 - DNA, 120 bp, Artificial Sequence
  ENSG00000196511_35 (sequence is synthesized)
gccttgatttggcccctgggctatcattgcaaatttttatttaaacgaatatcagctttttttaagccagagaagagtctactgctttgcattctgtgctctttaaggtattcagtactg

SEQ ID NO: 705918 - DNA, 120 bp, Artificial Sequence
  ENSG00000196511_36 (sequence is synthesized)
attttcacctagcatccaaatgtttaattgcattaattagtacaccagtttatactttattgtttgatacctgttgaaatggtatgcaaagtttcttaagactgtgtttaatgaacagct

SEQ ID NO: 705919 - DNA, 120 bp, Artificial Sequence
  ENSG00000196511_37 (sequence is synthesized)
acaaaattaaacctgaagcaatgaatgacaattgacctttttttcccccactagcaggggcaataagttttaagctgagatgaatgatcagttgtgtaattttaaaccaagaaaagtagg

SEQ ID NO: 705920 - DNA, 120 bp, Artificial Sequence
  ENSG00000196511_38 (sequence is synthesized)
aaaacacccttgtatattagaacgattttgatagtacaagtaacagaaaacacatgtcaacctgctctcaataaccaagtgatgtagggcagtcttgagacagagcttaatcagaactca

SEQ ID NO: 705921 - DNA, 120 bp, Artificial Sequence
  ENSG00000196511_39 (sequence is synthesized)
tgccctttttcttttatttatcttggcttcactttgtaggttttgtcttcacactagcttccttgattgtctccaactgccacctgcagtaacattttacccttcacatgtagggggatt

SEQ ID NO: 705922 - DNA, 120 bp, Artificial Sequence
  ENSG00000196511_40 (sequence is synthesized)
aagacatagagctggtgagatacatcacttcccaccatcattggacttaacccttaagatctctccattaaaccactcttgcttttggcaaaggagaacgagagaatcctgattgtcttg

SEQ ID NO: 705923 - DNA, 120 bp, Artificial Sequence
  ENSG00000196511_41 (sequence is synthesized)
ggctggagccaggtgtgggatcaatccacgtggcttatatattcaaactacgtggctaaaacatatttggcaggatgggatagatatcagagtggcagctctaacaaaaatttactctct

SEQ ID NO: 705924 - DNA, 120 bp, Artificial Sequence
  ENSG00000196511_42 (sequence is synthesized)
agcaaaagtttgttaaagatacactgtagcatatatttactaagttgcagttagtagtaaattcttttctccctttgaaataaaaccttgctaactatcacaattggcaagtagctcaat

SEQ ID NO: 705925 - DNA, 120 bp, Artificial Sequence
  ENSG00000196511_43 (sequence is synthesized)
ctgcgaactcaaacaaaaataattgagtgaacatttctcatctctgatgtagctttgctgatctatatcaaatgtattgtgatatttccagcagtaaattgatataattaagtatttgtt

SEQ ID NO: 705926 - DNA, 120 bp, Artificial Sequence
  ENSG00000196511_44 (sequence is synthesized)
taatgaaagcaggaaacagcaaattgagagttacttatttcatccagatatcagtgatttggtgtttctttggaaaaacagtgtaaatattcacagctgtcttttgtttttcccatcacc

SEQ ID NO: 705927 - DNA, 120 bp, Artificial Sequence
  ENSG00000196511_45 (sequence is synthesized)
tccactgacatgattaaaagctaagacgcaattatgtgagtctaatgagttgtgtctaatcgatagtatcagtaatacagtattctgtcgttgaggcttgaaacaaatcatcatatctta

SEQ ID NO: 705928 - DNA, 120 bp, Artificial Sequence
  ENSG00000196511_46 (sequence is synthesized)
agtagctgttagagggcccctgcactgggcagaaatagcaacaaccttgtactccaactgtgcttagtcacagactagagggtgctcatgaggagggtggacttggcttagaggttgcca

SEQ ID NO: 705929 - DNA, 120 bp, Artificial Sequence
  ENSG00000196511_47 (sequence is synthesized)
aggaagagtacagacttggtggctgtgatgtgctgcctcctgaaggggttgcagcgggggctgatgacggatgactggcctccacacagcctaacagtgagttcttttttgaagagcaat

SEQ ID NO: 705930 - DNA, 120 bp, Artificial Sequence
  ENSG00000196511_48 (sequence is synthesized)
gcagtggtacactgcctgtgctgcctcaggccccaacatgctttggacccaatgcattctccagccccatcctacaccagtgtttctccttgttcttaaactatgccgcattttctcctc

SEQ ID NO: 705931 - DNA, 120 bp, Artificial Sequence
  ENSG00000196511_49 (sequence is synthesized)
cctcctactttaatgtgtttttatatatgttgccccctctgcttggaatcttatttttccttttctttgtctagaccatgcatgctagagggcttctttttctttttttttttttttcag

SEQ ID NO: 705932 - DNA, 120 bp, Artificial Sequence
  ENSG00000196511_50 (sequence is synthesized)
gtctgatacatttatttatttttatatattttttatttcaatgggttttggggtacatgtggtttttggttacatggatgaattgtacattattgaagtccgagagttgagtgcacctgt

SEQ ID NO: 705933 - DNA, 120 bp, Artificial Sequence
  ENSG00000196511_51 (sequence is synthesized)
taccccagtgtagtgtacattgtacccaataggtagtttttcatccctcaaccccctcccaccctctcctcttctgagtcttctgtgtccattgtatcactatgcctttgcacactctta

SEQ ID NO: 705934 - DNA, 87 bp, Artificial Sequence
  ENSG00000196511_52 (sequence is synthesized)
tgggcatggcagagtttgactggctgtccttaactatcactctaggttaggtttagttactctacatttccataccctcctttattt

SEQ ID NO: 705935 - DNA, 120 bp, Artificial Sequence
  ENSG00000196511_53 (sequence is synthesized)
taggtttagttactctacatttccataccctcctttattttttctttagggtattctgaacaattttgatcattttactaattgtttctaattgtttgcctaaagtcattcttgccagct

SEQ ID NO: 705936 - DNA, 120 bp, Artificial Sequence
  ENSG00000196511_54 (sequence is synthesized)
tgactgtacagcccatgaagctgagctcaggtttgcttgttcataacttgacagcagtattttgcataaaagaagtattccttgaaagtttggtacgttttatgcaccacaagaacacac

SEQ ID NO: 705937 - DNA, 120 bp, Artificial Sequence
  ENSG00000196511_55 (sequence is synthesized)
gaacacacaggagagtggaacataacacagttaggagaaggctttttagagaaggctgagacatagtaagcaaataggaggtagacagtgcattagtccattttgcattgctataaagga

SEQ ID NO: 705938 - DNA, 120 bp, Artificial Sequence
  ENSG00000196511_56 (sequence is synthesized)
ggctgggtaatttataaaggtaagagttgtatttggtgtatgcctatgctggctgtacgagcatggcatcagaatctatttggcttctcatgacccctcaggaagcttttactcatggca

SEQ ID NO: 705939 - DNA, 120 bp, Artificial Sequence
  ENSG00000196511_57 (sequence is synthesized)
ggcaaaaggtgaaggggcagcaggcctgtcacatggcaagaagggagcgagaaagatgacaggctcttcgtaagaaccagttctcttggcccagcatggtggctcacacctataatccca

SEQ ID NO: 705940 - DNA, 120 bp, Artificial Sequence
  ENSG00000196511_58 (sequence is synthesized)
gaatcacttgaacccaggaggcagagtgccgggtccaacccgcagaccctgacccagcaacagatgaaagacatacactgacacaggtattttgcctgtcagtgggactaaggggctctg

SEQ ID NO: 705941 - DNA, 120 bp, Artificial Sequence
  ENSG00000196511_59 (sequence is synthesized)
attttgcctgtcagtgggactaaggggctctgacgcctgagtctgcagctttcgcctccataaaatggcaaagtttgcgtttatttagtacaaattaaatgacaaagttctcaagtaaac

SEQ ID NO: 705942 - DNA, 120 bp, Artificial Sequence
  ENSG00000196511_60 (sequence is synthesized)
accactagagggtaatttacattgttgatctcctgagtagagagcagtcatgagcccacagatgatcaaaggttggtcttaggaccacatgagtaaaaaagctatttagataaactcctt

SEQ ID NO: 705943 - DNA, 120 bp, Artificial Sequence
  ENSG00000196511_61 (sequence is synthesized)
tacattcctatgtatctttgccctaagcttttaagagaattcagttgccttcagccaaatccttcactgaagctatgcaaacccactggccttccaagaaggtttgtgtctgtttcctat

SEQ ID NO: 705944 - DNA, 78 bp, Artificial Sequence
  ENSG00000196511_62 (sequence is synthesized)
acccactggccttccaagaaggtttgtgtctgtttcctataactttataatctcccaccaccctgaccgatatcctat

SEQ ID NO: 705945 - DNA, 120 bp, Artificial Sequence
  ENSG00000196511_63 (sequence is synthesized)
tctaccacttgagtagactagaagaaaacattggccctgcttgggtcttcgaactgtgagtggaattgaacatgtgcgctttcttgtggccactttagttttgccccaggtcactgacca

SEQ ID NO: 705946 - DNA, 120 bp, Artificial Sequence
  ENSG00000196511_64 (sequence is synthesized)
gcaaaaatgtgaaggagaatcctgaaagttttcattttattgtgtctaaaaaacaagagaaagtgttgtaactctaaattgactaagaattaaattgagcacttttgcgttttgaacagc

SEQ ID NO: 705947 - DNA, 120 bp, Artificial Sequence
  ENSG00000196517_0 (sequence is synthesized)
gatgcaactttccctttaagaaagccacctgggcgcaccgcggtgcggacccagcacgcctgggccgggggctgcagcatgctcttgagatctgtggcctgaaaggcgctggaagcagag

SEQ ID NO: 705948 - DNA, 120 bp, Artificial Sequence
  ENSG00000196517_1 (sequence is synthesized)
cctgtgagtgtggtccccgtcaccagagccccaacccaccgccgccatggtaggaaaaggtgccaaagggatgctgaatggtgctgtgcccagcgaggccaccaagagggaccagaacct

SEQ ID NO: 705949 - DNA, 120 bp, Artificial Sequence
  ENSG00000196517_2 (sequence is synthesized)
caaacggggcaactggggcaaccagatcgagtttgtactgacgagcgtgggctatgccgtgggcctgggcaatgtctggcgcttcccatacctctgctatcgcaacgggggaggcgcctt

SEQ ID NO: 705950 - DNA, 120 bp, Artificial Sequence
  ENSG00000196517_3 (sequence is synthesized)
catgttcccctacttcatcatgctcatcttctgcgggatccccctcttcttcatggagctctccttcggccagtttgcaagccaggggtgcctgggggtctggaggatcagccccatgtt

SEQ ID NO: 705951 - DNA, 120 bp, Artificial Sequence
  ENSG00000196517_4 (sequence is synthesized)
caaaggagtgggctatggtatgatggtggtgtccacctacatcggcatctactacaatgtggtcatctgcatcgccttctactacttcttctcgtccatgacgcacgtgctgccctgggc

SEQ ID NO: 705952 - DNA, 120 bp, Artificial Sequence
  ENSG00000196517_5 (sequence is synthesized)
ctactgcaataacccctggaacacgcatgactgcgccggtgtactggacgcctccaacctcaccaatggctctcggccagccgccttgcccagcaacctctcccacctgctcaaccacag

SEQ ID NO: 705953 - DNA, 120 bp, Artificial Sequence
  ENSG00000196517_6 (sequence is synthesized)
cctccagaggaccagccccagcgaggagtactggaggctgtacgtgctgaagctgtcagatgacattgggaactttggggaggtgcggctgcccctccttggctgcctcggtgtctcctg

SEQ ID NO: 705954 - DNA, 120 bp, Artificial Sequence
  ENSG00000196517_7 (sequence is synthesized)
gttggtcgtcttcctctgcctcatccgaggggtcaagtcttcagggaaagtggtgtacttcacggccacgttcccctacgtggtgctgaccattctgtttgtccgcggagtgaccctgga

SEQ ID NO: 705955 - DNA, 120 bp, Artificial Sequence
  ENSG00000196517_8 (sequence is synthesized)
gggagcctttgacggcatcatgtactacctaaccccgcagtgggacaagatcctggaggccaaggtgtggggtgatgctgcctcccagatcttctactcactgggctgcgcgtggggagg

SEQ ID NO: 705956 - DNA, 120 bp, Artificial Sequence
  ENSG00000196517_9 (sequence is synthesized)
cctcatcaccatggcttcctacaacaagttccacaataactgttaccgggacagtgtcatcatcagcatcaccaactgtgccaccagcgtctatgctggcttcgtcatcttctccatcct

SEQ ID NO: 705957 - DNA, 120 bp, Artificial Sequence
  ENSG00000196517_10 (sequence is synthesized)
cggcttcatggccaatcacctgggcgtggatgtgtcccgtgtggcagaccacggccctggcctggccttcgtggcttaccccgaggccctcacactacttcccatctccccgctgtggtc

SEQ ID NO: 705958 - DNA, 120 bp, Artificial Sequence
  ENSG00000196517_11 (sequence is synthesized)
tctgctcttcttcttcatgcttatcctgctggggctgggcactcagttctgcctcctggagacgctggtcacagccattgtggatgaggtggggaatgagtggatcctgcagaaaaagac

SEQ ID NO: 705959 - DNA, 120 bp, Artificial Sequence
  ENSG00000196517_12 (sequence is synthesized)
ctatgtgaccttgggcgtggctgtggctggcttcctgctgggcatccccctcaccagccaggcaggcatctattggctgctgctgatggacaactatgcggccagcttctccttggtggt

SEQ ID NO: 705960 - DNA, 120 bp, Artificial Sequence
  ENSG00000196517_13 (sequence is synthesized)
atcatgtgtgtggccatcatgtacatctacgggcaccggaactacttccaggacatccagatgatgctgggattcccaccacccctcttctttcagatctgctggcgcttcgtctctccc

SEQ ID NO: 705961 - DNA, 120 bp, Artificial Sequence
  ENSG00000196517_14 (sequence is synthesized)
gccatcatcttctttattctagttttcactgtgatccagtaccagccgatcacctacaaccactaccagtacccaggctgggccgtggccattggcttcctcatggctctgtcctccgtc

SEQ ID NO: 705962 - DNA, 120 bp, Artificial Sequence
  ENSG00000196517_15 (sequence is synthesized)
ctctgcatccccctctacgccatgttccggctctgccgcacagacggggacaccctcctccagcgtttgaaaaatgccacaaagccaagcagagactggggccctgccctcctggagcac

SEQ ID NO: 705963 - DNA, 120 bp, Artificial Sequence
  ENSG00000196517_16 (sequence is synthesized)
cggacagggcgctacgcccccaccatagccccctctcctgaggacggcttcgaggtccagccactgcacccggacaaggcgcagatccccattgtgggcagtaatggctccagccgcctc

SEQ ID NO: 705964 - DNA, 120 bp, Artificial Sequence
  ENSG00000196517_17 (sequence is synthesized)
caggactcccggatatgagcacagctgccaggggagtggccccacccccaccccgtgctcccaccgcagagactggtgaggcagaggccaggtgtctctgcctgccccctgccacgccct

SEQ ID NO: 705965 - DNA, 120 bp, Artificial Sequence
  ENSG00000196517_18 (sequence is synthesized)
ggccaggacggctgctgtcaccttggtcaccactgctagtgcagtcattcatgctcatgtccccagtgtttacatgtcctttggatgccaagatagcagctggggggaggggtgggagtg

SEQ ID NO: 705966 - DNA, 120 bp, Artificial Sequence
  ENSG00000196517_19 (sequence is synthesized)
gagggttgctgggaggtccaaagcactttggaggggtctcgggccaggtccccagcagcctggatggctttacgtggcctccgatacccttataccctgccctgagctgaggttctgggt

SEQ ID NO: 705967 - DNA, 120 bp, Artificial Sequence
  ENSG00000196517_20 (sequence is synthesized)
gggcctccagccccatgactagtgctcctgccctcagagccgaccccagcctctgccaggcacatttggctattcctccctaggggcaggatgaagggctgggggactgcccagtgttac

SEQ ID NO: 705968 - DNA, 120 bp, Artificial Sequence
  ENSG00000196517_21 (sequence is synthesized)
ttgtcaggctgtgctgcccagccctgtttatctgtgtaattatttttgtaaacattgtattctctgtggtcgccacctcctcgcccccagcctcgggttcagtctgtcttccaggcctgc

SEQ ID NO: 705969 - DNA, 120 bp, Artificial Sequence
  ENSG00000196517_22 (sequence is synthesized)
ttgcacctcactgggctgctccggggtctctgcccctcattccaggcctggctgtcaggcccagccagcaggggcccgtgacccagcagcctgcccaaagcatttgtttctgggggatgg

SEQ ID NO: 705970 - DNA, 120 bp, Artificial Sequence
  ENSG00000196517_23 (sequence is synthesized)
ggtgggggctgctccacaggaggtttgagcccagcaccctggggaaggggaccctgcacgacacccccttgccctccctccatgaggctaaaggcccagtcttcccaaatgtgctgccct

SEQ ID NO: 705971 - DNA, 120 bp, Artificial Sequence
  ENSG00000196517_24 (sequence is synthesized)
cgttcatgtgccaaatggccccagcccacatgcccctcccctctctggagtgggagccccttctgaagtgtctgaatccctgaagtgttcatttgtccgtcctctgtgcagtgacagccc

SEQ ID NO: 705972 - DNA, 120 bp, Artificial Sequence
  ENSG00000196517_25 (sequence is synthesized)
cggccaagccacctctaatcctctgtagcaataacggtgcgccgcccatccctgcccattgtgcaccactaggattttaaagtccatagattttaatgaaatttctattcctgtctctga

SEQ ID NO: 705973 - DNA, 120 bp, Artificial Sequence
  ENSG00000196517_26 (sequence is synthesized)
cccacacaccccactccagctccggagcacccgtgctgggctgcatggggactggccggaggggcagggccaggggagcgggtaggcagagcttcgggaggagatgaggtgaaagtaatt

SEQ ID NO: 705974 - DNA, 120 bp, Artificial Sequence
  ENSG00000196517_27 (sequence is synthesized)
gacgctgcccagcccggcagtgggagaggcaggggatgcgtcagtgtcgcgctggagctggcagaggtgtgaatgagcggcggagacacgcgggctgcgatcgctcgccccaggatggcc

SEQ ID NO: 705975 - DNA, 120 bp, Artificial Sequence
  ENSG00000196517_28 (sequence is synthesized)
ctgtggccccctcttccccagaacagacagcagtgctgagataccaagagtggaagtggcttgcccagggctctactggaggagcgggccctagagcaccagggctctcacctgcaccgg

SEQ ID NO: 705976 - DNA, 120 bp, Artificial Sequence
  ENSG00000196517_29 (sequence is synthesized)
tgtcccgcctctgccaagcccagggctgagtgggagatctggattctgccctcggagctgagcagccttaattccaggggctcagccagagcagtaaataagccaagcagagggctgtgt

SEQ ID NO: 705977 - DNA, 120 bp, Artificial Sequence
  ENSG00000196517_30 (sequence is synthesized)
aacaaaccccacacaccccactccagctccggagcacccgtgctgggctgcatggggactggccggaggggcagggccaggggagcgggtaggcagagcttcgggaggagatgaggtgtg

SEQ ID NO: 705978 - DNA, 120 bp, Artificial Sequence
  ENSG00000196517_31 (sequence is synthesized)
ctgtcctcaaagtctggcatggggcctacaactctggtctccttccccaactcatggcccagcactccctagccatggcccagaatggtgctgtgcccagcgaggccaccaagagggacc

SEQ ID NO: 705979 - DNA, 120 bp, Artificial Sequence
  ENSG00000196517_32 (sequence is synthesized)
ttttccagggtccagggcaagtgcccgcatgggctgggagccggtgtgtcctcatccctggacgccggggacgggtggagatgtcagcggatggcagcgagggtgaggagactcgaaagc

SEQ ID NO: 705980 - DNA, 120 bp, Artificial Sequence
  ENSG00000196517_33 (sequence is synthesized)
tccaccgccgcctcccccagaatcctcttcacttcgcgtcgctcccggagcggaacgtgctcctccaccagctcccacagcgagggggagtgccggagcatgacccaccgacgccgccgt

SEQ ID NO: 705981 - DNA, 120 bp, Artificial Sequence
  ENSG00000196517_34 (sequence is synthesized)
ccccggctcggacctacgggccgcaggtcagagtgcgggaggtaccgcgggcccgccggcaacgctcaccaaaccccgcccctctatgggccccgccctctcccaagccccacccgtgct

SEQ ID NO: 705982 - DNA, 120 bp, Artificial Sequence
  ENSG00000196517_35 (sequence is synthesized)
ctgccgctggtcccctcggctgggattgcccgttccggaactgccagtccttggcgctctcttctgcccggcttttggccgactcggatgccgggggcccagaaaccaggcagtgggaac

SEQ ID NO: 705983 - DNA, 120 bp, Artificial Sequence
  ENSG00000196517_36 (sequence is synthesized)
cagggccctagccccacctcttccgcgtggccatcacccgggaaaccacgccgcgactctagggccccgccccctcccgtgtttggtccggcgggcggcgcgtgccggctgggagttcag

SEQ ID NO: 705984 - DNA, 120 bp, Artificial Sequence
  ENSG00000196517_37 (sequence is synthesized)
acatctacggtgagcactcgagcctccggcctcccgcgacccggcccttggcccgcccactctgtcctgcgggtctgctgaccccccatctctccagggcaccggaactacttccaggac

SEQ ID NO: 705985 - DNA, 120 bp, Artificial Sequence
  ENSG00000196517_38 (sequence is synthesized)
gggcctgggccaccctctccctggcacagacccactccagataaaggctggcctctggccctggcctccttcgcccccatccctggcttaggcaccctttgcctaaggcaggccacccca

SEQ ID NO: 705986 - DNA, 120 bp, Artificial Sequence
  ENSG00000196517_39 (sequence is synthesized)
gaccctggcagtctgttgttgggggctggccctgccagttggccccctttgaggtgaggagaggtgagaaaaggacctaacccccccccccccccgcccacaaggctccctgttctattc

SEQ ID NO: 705987 - DNA, 120 bp, Artificial Sequence
  ENSG00000196517_40 (sequence is synthesized)
cctggggttcagcagcccccctaaatggttcagggatgttgaggatctcagcaacttatgcttgtgaaatcgcttgtttaaaccatcaaatcccacccaagtatggaggctctgggacct

SEQ ID NO: 705988 - DNA, 120 bp, Artificial Sequence
  ENSG00000196517_41 (sequence is synthesized)
ggattccactccaagcagaattcctgagagcctctgtcaagttgaaagacaggctgggggtggtgtgcctcagcccaggctcctgctcaagcctggcacactcctccctgggtcctaccc

SEQ ID NO: 705989 - DNA, 80 bp, Artificial Sequence
  ENSG00000196526_0 (sequence is synthesized)
gcggggccgtgtgcgcctgcgtggtgtctgtcccggccgcagccccacgccggctgcagctccgcgagccgagccggatc

SEQ ID NO: 705990 - DNA, 120 bp, Artificial Sequence
  ENSG00000196526_1 (sequence is synthesized)
tcgagcggggtacacgggctgaggcggcggcggcggccccgccccggggctccattgttaaggcggctgcggctctgtcggctgttcagctgcgctccagtcggcccaggcgccgcggcg

SEQ ID NO: 705991 - DNA, 120 bp, Artificial Sequence
  ENSG00000196526_2 (sequence is synthesized)
aggagcgagcgctgcgaggtggcggcctgagcaatggaagagttaatagttgaacttcgtctctttcttgaactcctggaccatgaatatctaacctcaactgtcagggagaaaaaggca

SEQ ID NO: 705992 - DNA, 120 bp, Artificial Sequence
  ENSG00000196526_3 (sequence is synthesized)
gtgataaccaacattctgctaagaatacagtcatccaaaggttttgatgtgaaggaccatgctcagaagcaggagaccgctaacagcctgccagcccctcctcagatgcccctgccggag

SEQ ID NO: 705993 - DNA, 120 bp, Artificial Sequence
  ENSG00000196526_4 (sequence is synthesized)
atccctcagccctggctgcctcctgacagtgggcctccaccattgccaacatcctccctcccagaaggttattatgaggaagctgtgccgctgagccccggaaaagctccggaatacatc

SEQ ID NO: 705994 - DNA, 120 bp, Artificial Sequence
  ENSG00000196526_5 (sequence is synthesized)
acatcaaattatgattccgatgcgatgagcagctcttatgagtcgtatgatgaagaggaggaggatgggaaggggaagaaaacccggcaccagtggccctccgaggaggcctccatggac

SEQ ID NO: 705995 - DNA, 120 bp, Artificial Sequence
  ENSG00000196526_6 (sequence is synthesized)
ctggtcaaggacgccaaaatctgcgccttcctgctgcggaagaagcggttcggccagtggaccaagttgctctgcgtcatcaaagacaccaaactgctgtgctataaaagttccaaggac

SEQ ID NO: 705996 - DNA, 120 bp, Artificial Sequence
  ENSG00000196526_7 (sequence is synthesized)
cagcagcctcagatggaactgccactccaaggctgtaacattacgtacatcccgaaagacagcaaaaagaagaagcacgagctgaagattactcagcagggcacggacccgcttgttctc

SEQ ID NO: 705997 - DNA, 120 bp, Artificial Sequence
  ENSG00000196526_8 (sequence is synthesized)
gccgtccagagcaaggaacaggccgagcagtggctgaaggtgatcaaagaagcctacagtggttgtagtggccccgtggattcagagtgtcctcctccaccaagctccccggtgcacaag

SEQ ID NO: 705998 - DNA, 120 bp, Artificial Sequence
  ENSG00000196526_9 (sequence is synthesized)
gcagaactggagaagaaactgtcttcagagagacccagctcagatggggagggtgttgtggaaaatggaattaccacatgtaatggaaaggagcaagtgaagaggaagaaaagttccaaa

SEQ ID NO: 705999 - DNA, 120 bp, Artificial Sequence
  ENSG00000196526_10 (sequence is synthesized)
tcagaggccaagggcactgtgtcgaaagtcactgggaaaaaaatcaccaagatcatcagtctgggaaagaaaaagccgtccacagacgagcagacctcctcagctgaggaagatgttccc

SEQ ID NO: 706000 - DNA, 120 bp, Artificial Sequence
  ENSG00000196526_11 (sequence is synthesized)
acctgcggctatctgaacgtgctctccaacagccgctggcgagagcgctggtgccgagtgaaagataacaagctcattttccacaaggacaggaccgacctgaagacccatattgtgtct

SEQ ID NO: 706001 - DNA, 120 bp, Artificial Sequence
  ENSG00000196526_12 (sequence is synthesized)
attccgctccgtggctgcgaggtgatcccgggtttggattctaaacatcctctgacgttccggctgctgcgcaacggccaggaggttgcagtattggaggcatcttcttctgaagacatg

SEQ ID NO: 706002 - DNA, 120 bp, Artificial Sequence
  ENSG00000196526_13 (sequence is synthesized)
ggcaggtggattgggattttactcgcagagacgggatcgtccacagacccggaggctctgcactatgactacattgatgtggagatgtctgcaagtgtcattcagacagccaaacagacc

SEQ ID NO: 706003 - DNA, 120 bp, Artificial Sequence
  ENSG00000196526_14 (sequence is synthesized)
ttctgtttcatgaacaggcgtgttatatctgctaacccatatctagggggcacctccaacggctatgcccaccccagcgggacggcacttcattatgacgatgtcccgtgcatcaacggc

SEQ ID NO: 706004 - DNA, 120 bp, Artificial Sequence
  ENSG00000196526_15 (sequence is synthesized)
tcgctcaagggtaaaaagccccccgtggcgtctaatggggtcacaggaaaagggaagactctgagcagtcagccaaagaaagcggatcccgcggctgttgtgaaaaggacgggttcgaat

SEQ ID NO: 706005 - DNA, 120 bp, Artificial Sequence
  ENSG00000196526_16 (sequence is synthesized)
gctgcccagtacaagtatggcaagaaccgggtagaagcagatgccaagcggctacagaccaaagaggaggagctgctgaagaggaaagaggccctgcggaataggctggcccagctccgc

SEQ ID NO: 706006 - DNA, 120 bp, Artificial Sequence
  ENSG00000196526_17 (sequence is synthesized)
aaggaaagaaaagaccttcgagcggctattgaagtgaacgccggcaggaagccgcaggcgatcctggaggagaagctgaagcagctggaggaggagtgccggcagaaggaggcggagcgt

SEQ ID NO: 706007 - DNA, 120 bp, Artificial Sequence
  ENSG00000196526_18 (sequence is synthesized)
gtcagcctggagctggagctgacggaggtcaaggagagcctgaagaaagcgctggcgggcggagtcaccctggggctggccatcgagcccaagtcagggacatcgagtccacagtctcca

SEQ ID NO: 706008 - DNA, 120 bp, Artificial Sequence
  ENSG00000196526_19 (sequence is synthesized)
gtgttccggcaccggaccctggaaaactcgcccatctccagctgtgacaccagtgacaccgagggccccgtgccggtgaacagcgcggccgtcttgaagaagagccaggctgccccgggc

SEQ ID NO: 706009 - DNA, 120 bp, Artificial Sequence
  ENSG00000196526_20 (sequence is synthesized)
agctccccctgccgagggcatgtgctgcggaaggccaaggaatgggaattgaagaacgggacctaggggacagcagcaccactccagcctcagagactgcacacccccttgcctgtatcc

SEQ ID NO: 706010 - DNA, 120 bp, Artificial Sequence
  ENSG00000196526_21 (sequence is synthesized)
tcatctgtgtgacggcaggaagctctgcccagagtggcctcagctgcacgactccagaggctccacgactgagctctgaggccagtgcctgtcccccaggcccacttgtattctttctac

SEQ ID NO: 706011 - DNA, 120 bp, Artificial Sequence
  ENSG00000196526_22 (sequence is synthesized)
tgtaaaatggcgcctttaaaaaagatgtaagactttggttcccaactttgttaaaaaacaaaaaaagtgatggaaaggtgtttgaaaggatgctatcaggcgaagtgacatctttctaac

SEQ ID NO: 706012 - DNA, 120 bp, Artificial Sequence
  ENSG00000196526_23 (sequence is synthesized)
cagataggccattgctttcaccgattccaacccagccctggactgaggatggatggttccatgagcccccagatgaaaacctggattcgacagggaagagcttggatccccggctgcccc

SEQ ID NO: 706013 - DNA, 120 bp, Artificial Sequence
  ENSG00000196526_24 (sequence is synthesized)
gggcatgagtgtggctggccatgggcactgggctcgccttgcacgcccaccaggagggccaggggcatacgcagtcctgacgtggactttgtgtcttggcgtaccctctccacgtgcccg

SEQ ID NO: 706014 - DNA, 120 bp, Artificial Sequence
  ENSG00000196526_25 (sequence is synthesized)
tccccctcgtcatcagaggtaaaggcatgagaaaatcgcgctgtgaaacgttttttaccttttattattattttttggacagatgcttttgtcaccaagacatgaaaagctgccattctt

SEQ ID NO: 706015 - DNA, 120 bp, Artificial Sequence
  ENSG00000196526_26 (sequence is synthesized)
cttaacctgttttttaggaatgtctttttactgtgtgtcacacttagatcaaggagttttcagaggttccttattttattaattaattatttgtgctgcttttgacaggtagcagagggt

SEQ ID NO: 706016 - DNA, 120 bp, Artificial Sequence
  ENSG00000196526_27 (sequence is synthesized)
tttaatacttcactaacagtacaccctcctcccccttgggctagcatccccagcccttaatccacgtcggagccggcaggtgcttctcacaccaggagcctctgggggcaggggctggct

SEQ ID NO: 706017 - DNA, 120 bp, Artificial Sequence
  ENSG00000196526_28 (sequence is synthesized)
cctcgccgctgtacaggacgtttactgctgcttggggccagggcagtcctttgaaagggaagcaagttccggaatttgttcgctcatggaactataacaccttagagcaagaggcaggaa

SEQ ID NO: 706018 - DNA, 120 bp, Artificial Sequence
  ENSG00000196526_29 (sequence is synthesized)
ttccagggcctcctgcccctccccttcctccagcttgtcaagttaaaccactaatgtgttggtgggcctggccgtgctgcctctcctgagtagggtgggtgcaagtagggcctctttccc

SEQ ID NO: 706019 - DNA, 120 bp, Artificial Sequence
  ENSG00000196526_30 (sequence is synthesized)
agctttcttgcttgccttctgtgcaatatttcttggagaatttggatgcctaaggcataaaggaaaaaaacagagttcatagtttgagctggtatttaccccctgggtttaaaaatcaga

SEQ ID NO: 706020 - DNA, 120 bp, Artificial Sequence
  ENSG00000196526_31 (sequence is synthesized)
agtcacccctgaacgcctccgcaggcagattcatggagaccagtcccagtagcaaccgccccttccccaagcatagaatacagaggtgccatacttggtgtaagccttccttctgtccac

SEQ ID NO: 706021 - DNA, 120 bp, Artificial Sequence
  ENSG00000196526_32 (sequence is synthesized)
tgtccagaatgtcctttttcacacagaggaagagatggcgggaaaacactgactgactccttgggtttcccccagacatactttcagagcgctagctgtgtggtgcacgggactttacag

SEQ ID NO: 706022 - DNA, 120 bp, Artificial Sequence
  ENSG00000196526_33 (sequence is synthesized)
ttaggattcatgtttaaggtggtggcgcttgaggcctgcaagggccacgttggattactgaagcggaaagcggtctcccatgtataagaaaaagttttacaacacgaattggaagctgct

SEQ ID NO: 706023 - DNA, 120 bp, Artificial Sequence
  ENSG00000196526_34 (sequence is synthesized)
tgagtccacctgaacttgaattgattgcaaagccatctgctgggaacggttttgggttcctgagccatcagccagcctttctttcccctctgatgcacgttcctcccggcctagtccgtg

SEQ ID NO: 706024 - DNA, 120 bp, Artificial Sequence
  ENSG00000196526_35 (sequence is synthesized)
gaggcccatcacaccagcatccgtgacgccagcttcccactaggacatccaggcaggtcgggcggggacgccacacacctcagggccgtccgctgcattgccatagaggagccctccctc

SEQ ID NO: 706025 - DNA, 120 bp, Artificial Sequence
  ENSG00000196526_36 (sequence is synthesized)
cagtggtcacttcccaccattgcaggcagacttcccaccattgcaggcagctgggcccacttcatatcacacaaaatgaattttctataaagggaaaaaagtttgctcctccatagattt

SEQ ID NO: 706026 - DNA, 120 bp, Artificial Sequence
  ENSG00000196526_37 (sequence is synthesized)
ttgctgccttcgggtcaaatagtttccctggttgacactcttgggccactctgattggcagcctgctttgccaaagagaactgtgtgaggttttggtggttagtaagagaagggggagat

SEQ ID NO: 706027 - DNA, 120 bp, Artificial Sequence
  ENSG00000196526_38 (sequence is synthesized)
ggccagcctgaagtcacggtcctggcccagcacaggtgggcagcagcgagctggcaggtgaagtgtgagcagcacgcaaagtgtcacgtgggccttagccgtcacccaccagcttcctca

SEQ ID NO: 706028 - DNA, 120 bp, Artificial Sequence
  ENSG00000196526_39 (sequence is synthesized)
ccaggcaaggaggccccggagccttagcagggacttgcccaacggcacagctgattggtgctcgactcccagcatgcatattttgttgtaaaaacccaggtttgtaattcacatccacaa

SEQ ID NO: 706029 - DNA, 120 bp, Artificial Sequence
  ENSG00000196526_40 (sequence is synthesized)
ccctaagccttttaaagcggaggcaaacgttaacaaaccccatcgtggtccatggagcctttcaaaatgggtgccctggaggggcctgacagtgggttccttccatggcggatactccct

SEQ ID NO: 706030 - DNA, 120 bp, Artificial Sequence
  ENSG00000196526_41 (sequence is synthesized)
tgaaatttcacattccatcaaagtttaaagcatttacttcagaataagttatttatgtgtatatgttcaataaatatagtttttaatttatatctgtacatattagacacacgcgagcca

SEQ ID NO: 706031 - DNA, 120 bp, Artificial Sequence
  ENSG00000196526_42 (sequence is synthesized)
tcttgccagaattctgacagtgatgtcattttattcccctcccaaaacatgccccaggaacaagcaccccttgcctctgtggcagctgcgagtgtgtctgatttcataacgaagccaggc

SEQ ID NO: 706032 - DNA, 120 bp, Artificial Sequence
  ENSG00000196526_43 (sequence is synthesized)
tgagggcaagaggcccgacaggcaggccagggtccccggagaagccggatttcttcgcaatgtcactggtacttagcagatggtcgtgttcacaggggctagccacctgtactacggtgc

SEQ ID NO: 706033 - DNA, 120 bp, Artificial Sequence
  ENSG00000196526_44 (sequence is synthesized)
cgaccgcaatgcgaggaatgtggtggccacgcgatggagctggccggaggacaggtcaggtgagggggccgacccctgcggggctcagggctccttccattctaaccttgagccacagtg

SEQ ID NO: 706034 - DNA, 120 bp, Artificial Sequence
  ENSG00000196526_45 (sequence is synthesized)
tcactcttcagggctctgctcctggctctattttgttaaggtgtcatcagccttcaacctccatttatatatttttataatgttaagccactgaccaactttttcatagaaacaactatc

SEQ ID NO: 706035 - DNA, 120 bp, Artificial Sequence
  ENSG00000196526_46 (sequence is synthesized)
agattcgagggctccctttgtccccctgacctgggcacaggcatgggcgatggctccctcttcccagaatctgcggggaactggggcaaggcccatctgtctgcaaggctggtagctctc

SEQ ID NO: 706036 - DNA, 120 bp, Artificial Sequence
  ENSG00000196526_47 (sequence is synthesized)
tccctcggcttccagagtccacggcagttgcaaggtaaccagtgtggatctgctgagtcaccccaggcaccagacttaccccaggagcatgggccactgtccatggggccttccttgaga

SEQ ID NO: 706037 - DNA, 120 bp, Artificial Sequence
  ENSG00000196526_48 (sequence is synthesized)
ccttcccttggggctggcgggcggcggcttaccagctgggtcagtcccatctcgcccctctgtgcctatgccctggcgttgccaggcttaaccttcccctgtatcttactcatcccagaa

SEQ ID NO: 706038 - DNA, 120 bp, Artificial Sequence
  ENSG00000196526_49 (sequence is synthesized)
ttattactggccatttctaaatagacaaaaactaccctaaaatgtggagatttactccttttgaaaagtctgtttcaaaaagtgtggcctcagctctggaggccacccccaggaaggagt

SEQ ID NO: 706039 - DNA, 120 bp, Artificial Sequence
  ENSG00000196526_50 (sequence is synthesized)
ttgaggttcattgtcattatggccacagtttggtgcttgtgcacgggactcaaagggcagcgtcgaagctggggttaggtgtagggttgtgagcaaagctcccctgtttgtggccacacc

SEQ ID NO: 706040 - DNA, 120 bp, Artificial Sequence
  ENSG00000196526_51 (sequence is synthesized)
ttccctttccaaaaaggctattaattctactcacccactatttggggggatgtaaattttgcccacagactttgccacccaggtgaggtgctgtgttcatgcacggaactgatgtcatta

SEQ ID NO: 706041 - DNA, 120 bp, Artificial Sequence
  ENSG00000196526_52 (sequence is synthesized)
gacaccatccaaggatgggcagcctgcagtgtggccggcgactgccatccagagaaaaggcaccttgtgccacagggcggggccgacaccctgagctcacaggtggcccctgcattcagg

SEQ ID NO: 706042 - DNA, 120 bp, Artificial Sequence
  ENSG00000196526_53 (sequence is synthesized)
tggatgtccatccttgaaacagcctcttctgggaacacagcactggaggtctccaggcatcagggttggccggcagggtgccctgcagcttacataaaggtcgtggcaatgtttcaatgt

SEQ ID NO: 706043 - DNA, 120 bp, Artificial Sequence
  ENSG00000196526_54 (sequence is synthesized)
taaactaaactattgccttcctcttacttttcctaaaatgattttctaatgggaacagtcacttcaagttcatgacatagtttgaaggaggataattcattttttcctggttgtcactgt

SEQ ID NO: 706044 - DNA, 120 bp, Artificial Sequence
  ENSG00000196526_55 (sequence is synthesized)
cttcttatccccttggtgggctgggttcatactgtgaaataaactaaaatgaaaccaaaacgttcctgccgtaaatacgtggcacagcactgcagaaaaagcagtcacctctattcgtga

SEQ ID NO: 706045 - DNA, 120 bp, Artificial Sequence
  ENSG00000196526_56 (sequence is synthesized)
gtccccaagccatagcagggcgtctgtaaaagaagggaaactgcacccaggaagtggtgggcgtcagacgcatcctttcgcccgtagttcatgaaatagttccggctttggtcttccaga

SEQ ID NO: 706046 - DNA, 120 bp, Artificial Sequence
  ENSG00000196526_57 (sequence is synthesized)
aaatctcaacttcaccgtgcacaagtgttaccgggtctttttagtgtagccatggaagatactttcaaaaggacatcttcagatcataagtcttaggaccaaaggtgtttttaatgagat

SEQ ID NO: 706047 - DNA, 120 bp, Artificial Sequence
  ENSG00000196526_58 (sequence is synthesized)
aatctttttgattttctaacaagaaaggaaatattcactttacattttaacatcaacttttaagtgatattcagaattaattgaccatggtgatacgttgtaaaatgttttcatattaag

SEQ ID NO: 706048 - DNA, 120 bp, Artificial Sequence
  ENSG00000196526_59 (sequence is synthesized)
aatgtaattatttccttattgtattttttaaaagctaaagtcatatttaaaattctctttgaaagaaacaggcaaagaaacagcaaagatttttttaaattaaatatgttagtagtgccc

SEQ ID NO: 706049 - DNA, 120 bp, Artificial Sequence
  ENSG00000196526_60 (sequence is synthesized)
acttcaaatgactgtaaatatattttcactgtttctcaatgtatttaattcataaagtaaaaattttatgaaaagaaacttgcaaggaaaatcctagttttcagtccactcgccccactt

SEQ ID NO: 706050 - DNA, 120 bp, Artificial Sequence
  ENSG00000196526_61 (sequence is synthesized)
tgtagtagcttcactgaatttcctgctttcctggttgaattttctactgtttcacgtggtgtaaccctagactggcgcccttggcgtgcccctttgtgtatgaataaacttctctccccc

SEQ ID NO: 706051 - DNA, 120 bp, Artificial Sequence
  ENSG00000196526_62 (sequence is synthesized)
ctcccagttgaattttgctgccttaaagcagaagcaaaggagtagtgcatttgttaagaagaagacgcctgaatcttttagtggacctgctttcagcaaacttgttttttaggtcagaat

SEQ ID NO: 706052 - DNA, 120 bp, Artificial Sequence
  ENSG00000196526_63 (sequence is synthesized)
actatatccaatgatcaagctaaacatgaaatgcttcgagtaagactcagtattcatactttgacatttgcaaatcactgggtctaataatactcttcctcttttgttgtcagcaatgga

SEQ ID NO: 706053 - DNA, 120 bp, Artificial Sequence
  ENSG00000196526_64 (sequence is synthesized)
ccgcacatctttgcccgctactctcctgctgacagaaaggcctctaggctgtctgctgacaagctgtcctctaaccattacaaataccctgcctccgctcagtctgtcactaatacctct

SEQ ID NO: 706054 - DNA, 120 bp, Artificial Sequence
  ENSG00000196526_65 (sequence is synthesized)
gccgctggaaggagaaagacccaaggcagtacggcccagggcacaggggaggggatggtccctgtggccaggctttattcattcctccatttactgcctctcgctgacagaaagtataca

SEQ ID NO: 706055 - DNA, 120 bp, Artificial Sequence
  ENSG00000196526_66 (sequence is synthesized)
tagcgctgtctccctaaaagccttccaatgaggcatttaattagaaaaccttaaatatgtattttttaaaaatcaaaatcttttactgtggaactcttaaatgttcaagttttgctgtgc

SEQ ID NO: 706056 - DNA, 120 bp, Artificial Sequence
  ENSG00000196526_67 (sequence is synthesized)
ctaatttttgtattttttgtggagacggggtttttccatgtttcccaggctagtcttgaactcctgggcttaagtgattctcccacctcaccctcctgagtagcggggactacagatgtg

SEQ ID NO: 706057 - DNA, 120 bp, Artificial Sequence
  ENSG00000196526_68 (sequence is synthesized)
gtgcagaccctgaccacggccaaagcttttgttctctctcagcttctttacccaccgtaaaacacgaatgctgagctagagtcagtgtaccttgtaaacatttatgtaggctgaaaactg

SEQ ID NO: 706058 - DNA, 120 bp, Artificial Sequence
  ENSG00000196526_69 (sequence is synthesized)
gagggtggatggcggtggaaaaaagctgaaaacttaaataaagaaactgtactcttgatgtaacaatgcgggtctcccatgagagctctgacagcagatctgagaagggttgcaaggaga

SEQ ID NO: 706059 - DNA, 120 bp, Artificial Sequence
  ENSG00000196526_70 (sequence is synthesized)
tcctgcagtggtgtcggtacccagttcatccaaggctcgttaatttgagctcttttgcattggacttggaatcattcagatagtgggaaatgtattaaatgtttacatttttgcctctta

SEQ ID NO: 706060 - DNA, 120 bp, Artificial Sequence
  ENSG00000196526_71 (sequence is synthesized)
gggtagtcagctgcctgcgccagcttggttagcatttgtggtctgccagtagaaaggggccacttctgcagtgttccagcggaacacatcctacagagcctctgccgtaccctccttagc

SEQ ID NO: 706061 - DNA, 120 bp, Artificial Sequence
  ENSG00000196526_72 (sequence is synthesized)
cattccccagaatcccagcagcccagtgtttggaaaccatcttggttttctttcactttcgatttttcctccatctatgccagtttctacaatacttagagactgaaagaaatgactcca

SEQ ID NO: 706062 - DNA, 120 bp, Artificial Sequence
  ENSG00000196526_73 (sequence is synthesized)
gcaggaagggcagcactcaggtgtcagccaggtgccctgagctagccgcagtaccatgccaggggcccccacatgccatcagggagcactcgcccgtgttgtgtgttcaaggttgccggt

SEQ ID NO: 706063 - DNA, 120 bp, Artificial Sequence
  ENSG00000196526_74 (sequence is synthesized)
ttcccagctccaaaagcagccagcgaacaaaatcattcccattcccgggcagggcctgtggtttgcgtctgtggaaatgcacaagattttaacttgccaggagttgcaagatggattttc

SEQ ID NO: 706064 - DNA, 120 bp, Artificial Sequence
  ENSG00000196526_75 (sequence is synthesized)
tcatttgtagtgagtcagtggattcctcaaagccagctcatagaagtgggacggggagcagccaggaaaggaaattcttctggaaagcttggggccaattcccatttttttttttttttt

SEQ ID NO: 706065 - DNA, 120 bp, Artificial Sequence
  ENSG00000196531_0 (sequence is synthesized)
aaataaataaatgttgactggtttagctaattcaggtacagcaaatatttgttgagttcttttgtagggctgtgggaagatatgggaggcttttcattaacacaacactgattttacatt

SEQ ID NO: 706066 - DNA, 120 bp, Artificial Sequence
  ENSG00000196531_1 (sequence is synthesized)
ctacttttcaaaaatacagttgtacaaagcatggtttaaggtggggtcccagacacctagaataaataagcttagaatatccaagaagtgccaggggcggtagttcacgcctgtaatccc

SEQ ID NO: 706067 - DNA, 86 bp, Artificial Sequence
  ENSG00000196531_2 (sequence is synthesized)
tcgcttgacccgggaagggcccagcctgggcaataaaagtgagactgtcccaaaaacaaaacaaacaggctgggcatggtggctca

SEQ ID NO: 706068 - DNA, 78 bp, Artificial Sequence
  ENSG00000196531_3 (sequence is synthesized)
cgtgcctttgcaccccagcctgggcaataaaagtgagactgtcccaaaaacaaaagtttgggaggccgaggcaggcgg

SEQ ID NO: 706069 - DNA, 70 bp, Artificial Sequence
  ENSG00000196531_4 (sequence is synthesized)
tctctactaaaaataaaaaattagccggggaactgcttgagccctggaggcggagattgcagtgagccga

SEQ ID NO: 706070 - DNA, 120 bp, Artificial Sequence
  ENSG00000196531_5 (sequence is synthesized)
gatcgtgccactgcactctagcctggccgacagagcgactcaaaaaaaaaaaaaaaaaaatccaagaagtgcccaaaatagcaagcaaaggaattgtatatgtgcctatgttcttttttt

SEQ ID NO: 706071 - DNA, 120 bp, Artificial Sequence
  ENSG00000196531_6 (sequence is synthesized)
tgttctttttttctgggaaggagaatctgcagctttataatttcaacatcggctaaattgtcgtgaacctaaaacaatcaaaagggccggaatctatttaaagagtttattcaagggcag

SEQ ID NO: 706072 - DNA, 120 bp, Artificial Sequence
  ENSG00000196531_7 (sequence is synthesized)
tgtgaggatggaccaaccagaaaacctccaaagaatggagtcagccttcagaagtagagaagttacgatttcatttatttagggagacagaggagtttttagctggattacgttatccat

SEQ ID NO: 706073 - DNA, 120 bp, Artificial Sequence
  ENSG00000196531_8 (sequence is synthesized)
acaaggttggaacataattacagaatttggttacaagaagtgttttttttggggggggggcgggggtacagctaacattgttttacgaagagtttaacacgcatgagttgctgtcatctg

SEQ ID NO: 706074 - DNA, 120 bp, Artificial Sequence
  ENSG00000196531_9 (sequence is synthesized)
attaaatttataatctgaactgaagttatatgtgacccatcacatctctcaagttttaaaatgggtttttttgttgttgttgatggggggggagagggtccagcagcttttaaatgtttt

SEQ ID NO: 706075 - DNA, 120 bp, Artificial Sequence
  ENSG00000196531_10 (sequence is synthesized)
cacatcgtgtgttccaaaaataactggttagcctaagtcacttccaccctccaatgttgtgaatgcagtctctagcattcgctatttaatgtcttcttcctgcactatttgagaaatcgc

SEQ ID NO: 706076 - DNA, 120 bp, Artificial Sequence
  ENSG00000196531_11 (sequence is synthesized)
gaggtcgacttaataccgcagtcgccacttcgcggaccggagggcggagtctgcttagttctgaggactgcgtgggtccgcgcagagagctcctgctaggcctgcgcgtcccgttctaaa

SEQ ID NO: 706077 - DNA, 120 bp, Artificial Sequence
  ENSG00000196531_12 (sequence is synthesized)
ttcttaccctttagtccttgtcaccacccccgccgtgggaacggcctgacagtcactcgtcaaaggaagtggctgccggcagctcttgacccggaatcggatcctagtcccaccccctcc

SEQ ID NO: 706078 - DNA, 120 bp, Artificial Sequence
  ENSG00000196531_13 (sequence is synthesized)
gctccaggcttccttctgcaacaggcgtgggtcacgctctcgctcggtctttctgccgccatcttggttccgcgttccctgcacaaaatgcccggcgaagccacagaaaccgtccctgct

SEQ ID NO: 706079 - DNA, 120 bp, Artificial Sequence
  ENSG00000196531_14 (sequence is synthesized)
acagagcaggagttgccgcagccccaggctgagacagggtctggaacagaatctgacagtgatgaatcagtaccagagcttgaagaacaggattccacccaggcaaccacacaacaagcc

SEQ ID NO: 706080 - DNA, 120 bp, Artificial Sequence
  ENSG00000196531_15 (sequence is synthesized)
cagctggcggcagcagctgaaattgatgaagaaccagtcagtaaagcaaaacagagtcggagtgaaaagaaggcacggaaggctatgtccaaactgggtcttcggcaggttacaggagtt

SEQ ID NO: 706081 - DNA, 120 bp, Artificial Sequence
  ENSG00000196531_16 (sequence is synthesized)
actagagtcactatccggaaatctaagaatatcctctttgtcatcacaaaaccagatgtctacaagagccctgcttcagatacttacatagtttttggggaagccaagatcgaagattta

SEQ ID NO: 706082 - DNA, 120 bp, Artificial Sequence
  ENSG00000196531_17 (sequence is synthesized)
tcccagcaagcacaactagcagctgctgagaaattcaaagttcaaggtgaagctgtctcaaacattcaagaaaacacacagactccaactgtacaagaggagagtgaagaggaagaggtc

SEQ ID NO: 706083 - DNA, 120 bp, Artificial Sequence
  ENSG00000196531_18 (sequence is synthesized)
gatgaaacaggtgtagaagttaaggacattgaattggtcatgtcacaagcaaatgtgtcgagagcaaaggcagtccgagccctgaagaacaacagtaatgatattgtaaatgcgattatg

SEQ ID NO: 706084 - DNA, 120 bp, Artificial Sequence
  ENSG00000196531_19 (sequence is synthesized)
gaattaacaatgtaaccatatggaagcaactttttttggtgtctcaaaggagtaactgcagcttggtttgaaatttgtactgtttctatcataaataaagttatggcttcttgttggatg

SEQ ID NO: 706085 - DNA, 120 bp, Artificial Sequence
  ENSG00000196531_20 (sequence is synthesized)
gcacagtaagtactttctgtgccgctactgtctatccgcagccatccgcctttctttcgggctaagccgccccggggactgagagttaaggagagttggaggctttactgggccacaggg

SEQ ID NO: 706086 - DNA, 120 bp, Artificial Sequence
  ENSG00000196531_21 (sequence is synthesized)
ttcctactcgcccctgggcctccggacaaaatggggtctgcggttggtgtcctggcaaaagcagggtagaagggctgcggggcgggcccagaatccgagcctgcagagatgggagcagtt

SEQ ID NO: 706087 - DNA, 120 bp, Artificial Sequence
  ENSG00000196531_22 (sequence is synthesized)
tatccagatcttagattctggttaactaatagctgttttatcttcttagctggcggcagcagctgaaattgatgaagaaccagtcagtaaagcaaaacagagtcggagtgaaaagaaggc

SEQ ID NO: 706088 - DNA, 120 bp, Artificial Sequence
  ENSG00000196531_23 (sequence is synthesized)
acagagtcggagtgaaaagaaggcacggaaggtaagatttgaaaaggatttcaggatcttatgaagcacctttatacagagtggaactgtttatttccataggtttttggggaacaggtg

SEQ ID NO: 706089 - DNA, 120 bp, Artificial Sequence
  ENSG00000196531_24 (sequence is synthesized)
cttggttccgcgttccctgcacaaaatgcccggcgaagccacagaaaccgtccctgctacagagcaggagttgccgcagccccaggctgagacagttgtttctcatcttagggtctggaa

SEQ ID NO: 706090 - DNA, 120 bp, Artificial Sequence
  ENSG00000196531_25 (sequence is synthesized)
tcttggttccgcgttccctgcacaaaatgcccggcgaagccacagaaaccgtccctgctacagagcaggagttgccgcagccccaggctgagacagtggctgcatttcctttggaaagtg

SEQ ID NO: 706091 - DNA, 120 bp, Artificial Sequence
  ENSG00000196531_26 (sequence is synthesized)
gtgacaagcaagtgttggacttaaaacaccgtctttcccctcctggtaccccaaagtcggcaaacgtagtccaggaggccccagcccagccagtaaatgcccggcgaagccacagaaacc

SEQ ID NO: 706092 - DNA, 120 bp, Artificial Sequence
  ENSG00000196531_27 (sequence is synthesized)
gcctcttctgagttgccgtataggttttagtggcctaaattctcctgatttgcctgtaagagttttagtgacctgaattctcctgatttgcctataagaaccgctaattatcttttctct

SEQ ID NO: 706093 - DNA, 120 bp, Artificial Sequence
  ENSG00000196531_28 (sequence is synthesized)
gttacaggaattaacaatgtaaccatatggaagcaactttttttggtgtctcaaaggagtaactgcagcttggtttgaaatttgtactgtttctatcataaataaagttatggcttcttg

SEQ ID NO: 706094 - DNA, 75 bp, Artificial Sequence
  ENSG00000196531_29 (sequence is synthesized)
aactatatatgtgtcttaaacctcaaagtaaattttccttgagaaataatttatgttgaaaagatttcctggcca

SEQ ID NO: 706095 - DNA, 120 bp, Artificial Sequence
  ENSG00000196531_30 (sequence is synthesized)
cctatgtcttcagccttgagtgtcactgctgccttagggcagcctggacctaccctcccccctccttgctctcctgccccacaacagtgccctctctcagctgctaaccaggcttcccca

SEQ ID NO: 706096 - DNA, 120 bp, Artificial Sequence
  ENSG00000196531_31 (sequence is synthesized)
ttcccttccccctctactattgcctcgacccctttagaagttccttttccccagtcatcctctggaacagccctacctttgggaactgcccctgaagccccaaccttcctaccaaaccta

SEQ ID NO: 706097 - DNA, 120 bp, Artificial Sequence
  ENSG00000196531_32 (sequence is synthesized)
atagggcctcccatctccccagctgccttagctctagcctctcccatgatagctccaactctgaaagggaccccttcctcttcagctcccttagctctggttgccctggctccccactca

SEQ ID NO: 706098 - DNA, 120 bp, Artificial Sequence
  ENSG00000196531_33 (sequence is synthesized)
gttcagaagagttctgcttttccacctaaccttcttacttcacctccttcagtggctgtagctgagtcagggtcagtgataactctgtcagctcccattgctccctcagaaccaaagact

SEQ ID NO: 706099 - DNA, 120 bp, Artificial Sequence
  ENSG00000196531_34 (sequence is synthesized)
aatcttaataaagttccctctgaggtagtccctaatccaaaaggcacccccagccctccatgtatagtcagtactgttccttaccactgtgtgactcccatggcctctattcaatctgga

SEQ ID NO: 706100 - DNA, 120 bp, Artificial Sequence
  ENSG00000196531_35 (sequence is synthesized)
gtggcctcccttcctcagacaacacccacaactaccctagccatcgcttcccctcaagtcaaagataccaccatttcctcagttctgatttctccacaaaacccaggaagcctcagcctg

SEQ ID NO: 706101 - DNA, 120 bp, Artificial Sequence
  ENSG00000196531_36 (sequence is synthesized)
aaggggcctgttagtccacctgctgccttatctctttcaactcagtctcttcctgtggtgacctcttctcaaaagactgcgggtcccaacacccccccagattttcccatttctctgggc

SEQ ID NO: 706102 - DNA, 120 bp, Artificial Sequence
  ENSG00000196531_37 (sequence is synthesized)
tctcatcttgcacctttacatcagagttcttttggttctgtccaacttttaggtcaaacaggtcctagtgctttgtcagaccctacagtgaagaccatttctgtagatcattcttccaca

SEQ ID NO: 706103 - DNA, 120 bp, Artificial Sequence
  ENSG00000196531_38 (sequence is synthesized)
ggggcctcttatccttctcagagatctgtaattcctccccttccttccagaaatgaggtagttcctgctactgtggctgcctttccagtggtggctccatctgttgacaaaggtccctct

SEQ ID NO: 706104 - DNA, 120 bp, Artificial Sequence
  ENSG00000196531_39 (sequence is synthesized)
accatctctagcataacctgcagcccttctggctccttaaatgtagctacctctttttcattatctcctacaacctctctcattctcaaaagctctcctaatgccacttatcattatcct

SEQ ID NO: 706105 - DNA, 120 bp, Artificial Sequence
  ENSG00000196531_40 (sequence is synthesized)
ttagtggcccaaatgcccgtttcttctgttggaaccaccccacttgtggtgactaacccctgtacaattgctgcagcacctactactacctttgaggtagctacttgtgtttctcctcca

SEQ ID NO: 706106 - DNA, 120 bp, Artificial Sequence
  ENSG00000196531_41 (sequence is synthesized)
atgtcatcaggtcccataagtaacatagaaccaacttcccctgctgccttggttatggcacctgtggctcccaaagagccttctactcaagtagcaaccactctgaggataccagtctct

SEQ ID NO: 706107 - DNA, 120 bp, Artificial Sequence
  ENSG00000196531_42 (sequence is synthesized)
cctcctctgccagaccctgaagacctcaaaaatctccccagttcagtattggttaaatttccaacacaaaaagacctccaaactgtacctgcctctcttgaaggagcccctttctctcca

SEQ ID NO: 706108 - DNA, 120 bp, Artificial Sequence
  ENSG00000196531_43 (sequence is synthesized)
gcccaagcaggactcaccaccaagaaagaccctactgtattaccgttagtccaggcagcccctaaaaattccccttctttccaaagtacatcctcttctccagagatacctctttctcct

SEQ ID NO: 706109 - DNA, 120 bp, Artificial Sequence
  ENSG00000196531_44 (sequence is synthesized)
gaagccaccctagcaaagaaaagccttggggagcctctccctataggtaagccagccagcagtatgacctcccctctgggtgttaactcctcggcctctgtaatcaagacagattcttat

SEQ ID NO: 706110 - DNA, 120 bp, Artificial Sequence
  ENSG00000196531_45 (sequence is synthesized)
gcaggcccagactctgctggtccgcttctcaaaagttctctcattaccccaacagtggctgcatttcctttggaaagtgctgaccctgccggggtggctcccacaactgccaaaggtacc

SEQ ID NO: 706111 - DNA, 120 bp, Artificial Sequence
  ENSG00000196531_46 (sequence is synthesized)
tcaacttatacaactacagccagcccttttctagaaggaactgtctctttagctcctaaaaaccacccagttaaggaaggtactcttactactttacccttggttcctacagcttcagaa

SEQ ID NO: 706112 - DNA, 120 bp, Artificial Sequence
  ENSG00000196531_47 (sequence is synthesized)
aattgccctgtggctccatccccccagaatacctgtgctcctctggctaccttagtgctggcccctgaaatcccaaagtctgtgccctcaccctctcttcccccagctgggactcctcca

SEQ ID NO: 706113 - DNA, 120 bp, Artificial Sequence
  ENSG00000196531_48 (sequence is synthesized)
ggtacaaaaaaggttgatggtatttctcatacttcagcattggcacctgttgcttcctctcccaaagagtgcccaactgaggactctggtgcttctgctactgcatcttccaaaggaact

SEQ ID NO: 706114 - DNA, 120 bp, Artificial Sequence
  ENSG00000196531_49 (sequence is synthesized)
ctgacttacctagctgattccccatctcctttaggggttagtgtgtctcctcagactaaaagacctccaaccaagaagggttctgctggccctgatactcctattggaaatctctcatcc

SEQ ID NO: 706115 - DNA, 120 bp, Artificial Sequence
  ENSG00000196531_50 (sequence is synthesized)
cctgtttctccagttgaagcttcatttcttccagagaatagtctttctttccaaggctctaaagactcaccagccacgacgcattctcccactcctccatcccccaaaggggcccctact

SEQ ID NO: 706116 - DNA, 120 bp, Artificial Sequence
  ENSG00000196531_51 (sequence is synthesized)
ccctcagctgtgactcctctgtctcccaaaggagtaacactaccccccaaagagacccccactccttcagtggtgaatctgcccttccccaaagagggtccagctactccagcacccaaa

SEQ ID NO: 706117 - DNA, 120 bp, Artificial Sequence
  ENSG00000196531_52 (sequence is synthesized)
caggctcctgctctatccatgacttcttcctcccccaaaaaggcccgagcaactccagcccctaaaggaatcccagcttccccatcccccaaaggggcccccacacccccagctgcaact

SEQ ID NO: 706118 - DNA, 120 bp, Artificial Sequence
  ENSG00000196531_53 (sequence is synthesized)
cctccctcccctaaaggaggcccagctaccccatccccgaaatgggcccccacacccccagctgcaactcctccctccccaaaaggaggtccagctactccatcccccaaaggggccccc

SEQ ID NO: 706119 - DNA, 120 bp, Artificial Sequence
  ENSG00000196531_54 (sequence is synthesized)
caaaggaggtccagctactccatcccccaaaggggcccccacacccccagctgtgactcctccctcccccaaaggaagtccagcagctaccccattccccaaaggggcatccacaccccc

SEQ ID NO: 706120 - DNA, 120 bp, Artificial Sequence
  ENSG00000196531_55 (sequence is synthesized)
agctgcaactcctccctcccccaaaggaagtccagcagctaccccactccccaaaggggcccccacaaccccagctgcaactcttccctccccaaaaggaggtccagctaccccatccct

SEQ ID NO: 706121 - DNA, 120 bp, Artificial Sequence
  ENSG00000196531_56 (sequence is synthesized)
caagggggcccccactcccccagctgcgactcctccctccccaaaaggaggcccagctaccccatcccccaaaggggcccccatgcccccagctgcaactcctccctccccaaaaggagg

SEQ ID NO: 706122 - DNA, 120 bp, Artificial Sequence
  ENSG00000196531_57 (sequence is synthesized)
tctagctaccccaccccacaaaggggcacccacaaccccagctgcaactcctccctccccaaaaggaggtctagctaccccacccccaaaaggggcccccacaaccccagctgcaactcc

SEQ ID NO: 706123 - DNA, 120 bp, Artificial Sequence
  ENSG00000196531_58 (sequence is synthesized)
tccttccccaaaaggaggtctagctaccccacccccaaaaggggcccccacaaccccagctgcaactcctccttccccaaaaggaggtctagctaccccatcccccaaaggggcccccac

SEQ ID NO: 706124 - DNA, 120 bp, Artificial Sequence
  ENSG00000196531_59 (sequence is synthesized)
aaccccagctgcaactcctccctccccaaaaggaggtctagctaccccatcccccaaaggggcccccacaaccccagctgcaactcctccctccccaaaaggaggtctggctaccccatc

SEQ ID NO: 706125 - DNA, 120 bp, Artificial Sequence
  ENSG00000196531_60 (sequence is synthesized)
ccccaaaggggcccccacaaccccagctgcaactcctccctccccaaaaggaggcccagctaccccaccccccaaaggggcccccactcccccagctgcaactcctccctccctaaaagg

SEQ ID NO: 706126 - DNA, 120 bp, Artificial Sequence
  ENSG00000196531_61 (sequence is synthesized)
aggtctagctaccccaccccacaaaggggcccccaatcccgcagttgtaactcctccctctccaaaaggaggcccagctacctcaccccccaaaggggcccccactcctccagctgcaac

SEQ ID NO: 706127 - DNA, 120 bp, Artificial Sequence
  ENSG00000196531_62 (sequence is synthesized)
tcctccctccccaaaaggaagcccaggtaccccaccccccaaaggggcccccactcccccagctgtaactcctccctcccctaaagggacccctactctcccagctacaactccctcctc

SEQ ID NO: 706128 - DNA, 120 bp, Artificial Sequence
  ENSG00000196531_63 (sequence is synthesized)
taaaggaggcccaactactccatcctccaaagagggccccactcccccagctgcaaccccctcccacaaaggaggtcccgctatgactcctccctcccccaaaagaggaccagctatccc

SEQ ID NO: 706129 - DNA, 120 bp, Artificial Sequence
  ENSG00000196531_64 (sequence is synthesized)
atctcccaaaggggaccccacttccccagcagtgattcctctctcccccaaaaaggctccagcaactccagtcaccagagaaggcgcagccaccccatccaaaggagatctcactccccc

SEQ ID NO: 706130 - DNA, 120 bp, Artificial Sequence
  ENSG00000196531_65 (sequence is synthesized)
agcagtgactcctgtctccctcaaaaaggccccagcaacttcagcccccaaaggaggcccagctaccccatcctccaaaggggatcccaccctcccagcagtgactcctccttcccccaa

SEQ ID NO: 706131 - DNA, 120 bp, Artificial Sequence
  ENSG00000196531_66 (sequence is synthesized)
ggagcccccagcccccaaacaagttgccacttcttcctctcccaaaaaggccccagcaactccagcccccatgggggcccccactctgccagctgtgattccttcttcccccaaagaggt

SEQ ID NO: 706132 - DNA, 120 bp, Artificial Sequence
  ENSG00000196531_67 (sequence is synthesized)
cccagctaccccatcctccagaagggaccccattgccccaacagcgactcttctctctaaaaagaccccagcaactctagcccccaaagaggccctcattcccccagctatgactgttcc

SEQ ID NO: 706133 - DNA, 120 bp, Artificial Sequence
  ENSG00000196531_68 (sequence is synthesized)
ctcccctaaaaagaccccagcaattccaacccccaaagaagccccagctaccccatcctccaaagaggcctccagtcccccagcagtgactccttccacttacaaaggggccccatcccc

SEQ ID NO: 706134 - DNA, 120 bp, Artificial Sequence
  ENSG00000196531_69 (sequence is synthesized)
caaagagctcctcattccaccagctgtgacttctccttcccccaaagaggcacctactcctccagctgtgactcctccatcccccgaaaagggcccagcaactccagcccccaaagggac

SEQ ID NO: 706135 - DNA, 120 bp, Artificial Sequence
  ENSG00000196531_70 (sequence is synthesized)
tcccacttccccacctgtgactccttcctccctcaaagactcccctacttccccagcttctgtcacatgtaaaatgggggccactgttcctcaagcatctaaagggcttccagcaaagaa

SEQ ID NO: 706136 - DNA, 120 bp, Artificial Sequence
  ENSG00000196531_71 (sequence is synthesized)
aggccccacagctctgaaagaagtacttgttgccccagctccagaaagcacgccaatcatcacagctcccactcggaaaggtccacagaccaaaaagagttctgctacttcacctcctat

SEQ ID NO: 706137 - DNA, 120 bp, Artificial Sequence
  ENSG00000196531_72 (sequence is synthesized)
atgcccagatccctcagctaagaatggttctaaaggacccctttccacagtggctccagcccctctactccctgttcagaaagactcttcaaagacagcaaaaggcaaagatgcttctca

SEQ ID NO: 706138 - DNA, 120 bp, Artificial Sequence
  ENSG00000196531_73 (sequence is synthesized)
ttccccaaagggccccttggctcctcctgagtctaaggcgtccacccctctaacagcagctgcctttgagaaggtccttcctaaacctgaatcagcatctgtctctgcagcaccctcccc

SEQ ID NO: 706139 - DNA, 120 bp, Artificial Sequence
  ENSG00000196531_74 (sequence is synthesized)
accagtctctctgcctcttgctccctccccagttcccactctgcctcctaaacagcaatttctgccgtcctctcctgggctggtgttggaatcaccctctaaaccccttgcccctgctga

SEQ ID NO: 706140 - DNA, 120 bp, Artificial Sequence
  ENSG00000196531_75 (sequence is synthesized)
tgaggatgagctgctgcctctgattcccccggaaccaatctctgggggagtgcctttccagtcggtcctcgtcaacatgcccacccctaaatctgctggaatccctgtcccaaccccctc

SEQ ID NO: 706141 - DNA, 120 bp, Artificial Sequence
  ENSG00000196531_76 (sequence is synthesized)
atatatctcctgggagacctaactaccccctagttgagaaccactgctctaaacctaaacaactactctttctactgtgagggcaagcagtttaaagctgtacaataagttacctgaatg

SEQ ID NO: 706142 - DNA, 120 bp, Artificial Sequence
  ENSG00000196531_77 (sequence is synthesized)
attttggtgcacctgtcacccaagcagtatacactgaacccaattcttagtagtggtagaatcccgttgaaagtaacagaagtagctaggttggtggctcacacctgttatcccagcaca

SEQ ID NO: 706143 - DNA, 63 bp, Artificial Sequence
  ENSG00000196531_78 (sequence is synthesized)
atatagcagggcatggtggtaacgctcctgtaatcccagctactaaggtggctgaggcacggc

SEQ ID NO: 706144 - DNA, 120 bp, Artificial Sequence
  ENSG00000196531_79 (sequence is synthesized)
tatatagcagggcatggtggtaacgctcctgtaatcccagctactaaggtggctgaggcacggcaattgcttgaacctgggagacggacattacattgagccgagattgcaccactgcac

SEQ ID NO: 706145 - DNA, 120 bp, Artificial Sequence
  ENSG00000196535_0 (sequence is synthesized)
agctgcgccgcgctgcgctctgctccatccctgaccgggccgaggctgctggatgccgcgtctccgcttctgctgcctgccgggcgggctccggtggccgcagcaaagtggggcaccaag

SEQ ID NO: 706146 - DNA, 120 bp, Artificial Sequence
  ENSG00000196535_1 (sequence is synthesized)
gccctgtgctaagcactcataatcctctgggggtgctacccctacaaacagcacccccaccatgtttaacctaatgaagaaagacaaggacaaagatggcgggcggaaggagaagaagga

SEQ ID NO: 706147 - DNA, 120 bp, Artificial Sequence
  ENSG00000196535_2 (sequence is synthesized)
gaaaaaggagaaaaaggagcggatgtcagcggcagagcttcggagcctggaggagatgagcctgcgacgtggcttcttcaacctgaaccgctcctccaagcgtgaatccaagacgcgcct

SEQ ID NO: 706148 - DNA, 120 bp, Artificial Sequence
  ENSG00000196535_3 (sequence is synthesized)
ggaaatctccaaccccatccccatcaaggtggccagcggctctgacctgcacctgactgacattgactccgatagtaaccggggcagcgtcatcctggactcgggccacctaagtacagc

SEQ ID NO: 706149 - DNA, 120 bp, Artificial Sequence
  ENSG00000196535_4 (sequence is synthesized)
cagctccagcgatgacctcaagggtgaggagggtagcttccgtggctcggtgctgcagcgggcagccaagttcggctcactggccaagcagaactcacagatgattgtcaagcgcttttc

SEQ ID NO: 706150 - DNA, 120 bp, Artificial Sequence
  ENSG00000196535_5 (sequence is synthesized)
cttctcccagcgtagccgggatgagagcgcctcagaaacctcgacgccctcagagcactctgccgccccctcgccacaggtggaggtgaggactctagagggacagctggtgcagcatcc

SEQ ID NO: 706151 - DNA, 120 bp, Artificial Sequence
  ENSG00000196535_6 (sequence is synthesized)
tggcccaggcatccctcgaccagggcaccgatcccgagcccctgagctagtgactaaaaagttcccagtcgacctgcgcctgccccccgtggtgcccctgcccccacctaccctccggga

SEQ ID NO: 706152 - DNA, 120 bp, Artificial Sequence
  ENSG00000196535_7 (sequence is synthesized)
gctggagctgcaacgacggcccactggagactttggcttctccctgcggcgcacaaccatgctggatcggggccccgagggccaggcctgtcggcgtgtggtccactttgctgagcctgg

SEQ ID NO: 706153 - DNA, 120 bp, Artificial Sequence
  ENSG00000196535_8 (sequence is synthesized)
tgcaggcaccaaggacctggccctggggctggtgccaggagatcgactggtggagattaatgggcacaatgtggagagcaagtccagggatgagattgtggagatgatccggcagtcagg

SEQ ID NO: 706154 - DNA, 120 bp, Artificial Sequence
  ENSG00000196535_9 (sequence is synthesized)
ggacagcgtgcggctcaaggtgcagcccattccagagctcagcgagctcagcaggagctggctgcggagcggcgagggacctcgcagggagccatccgatgcgaaaacagaagaacagat

SEQ ID NO: 706155 - DNA, 120 bp, Artificial Sequence
  ENSG00000196535_10 (sequence is synthesized)
tgcagcagaagaggcctggaatgagacggagaaggtgtggctggtccatagggacggcttctcactggccagtcaactcaaatctgaggagctcaacttgcctgaggggaaggtgcgtgt

SEQ ID NO: 706156 - DNA, 120 bp, Artificial Sequence
  ENSG00000196535_11 (sequence is synthesized)
gaagctggaccacgatggggccatcctggatgtggatgaggatgacgttgagaaggctaatgctccctcctgcgaccgtctggaggatctggcctcactggtgtacctcaatgagtccag

SEQ ID NO: 706157 - DNA, 120 bp, Artificial Sequence
  ENSG00000196535_12 (sequence is synthesized)
cgtcctgcacaccttgcgccagcgctatggcgctagcctgctgcacacgtatgctggccccagcctgctggttcttggcccccgtggggcccctgctgtgtactctgagaaggtgatgca

SEQ ID NO: 706158 - DNA, 120 bp, Artificial Sequence
  ENSG00000196535_13 (sequence is synthesized)
catgttcaagggttgtcggcgggaggacatggcaccccacatctatgcagtggcccagaccgcatacagggcgatgctgatgagccgtcaggatcagtcaatcatcctcctgggcagtag

SEQ ID NO: 706159 - DNA, 120 bp, Artificial Sequence
  ENSG00000196535_14 (sequence is synthesized)
tggcagtggcaagaccaccagctgccagcatctggtgcagtacctggccaccatcgcgggcatcagcgggaacaaggtgttttctgtggagaagtggcaggctctgtacaccctcctgga

SEQ ID NO: 706160 - DNA, 120 bp, Artificial Sequence
  ENSG00000196535_15 (sequence is synthesized)
agcctttgggaacagccccaccatcattaatggcaatgccacccgcttctcccagatcctctccctggactttgaccaagctggccaggtggcctcagcctccattcagacaatgcttct

SEQ ID NO: 706161 - DNA, 120 bp, Artificial Sequence
  ENSG00000196535_16 (sequence is synthesized)
ggagaagctgcgtgtggctcggcgcccagccagtgaagccacattcaacgtcttctactacctgctggcctgtggggatggcaccctcaggacagagctccacctcaaccacttggcaga

SEQ ID NO: 706162 - DNA, 120 bp, Artificial Sequence
  ENSG00000196535_17 (sequence is synthesized)
gaacaatgtgtttgggattgtgccactggccaagcctgaggaaaagcagaaggcagctcagcagtttagtaagctgcaggcggccatgaaggtgctgggcatctcccccgatgaacagaa

SEQ ID NO: 706163 - DNA, 120 bp, Artificial Sequence
  ENSG00000196535_18 (sequence is synthesized)
ggcctgctggttcattctggctgccatctaccacctgggggctgcgggagccaccaaagaagctgctgaagctgggcgcaagcagtttgcccgccatgagtgggcccagaaggctgcgta

SEQ ID NO: 706164 - DNA, 120 bp, Artificial Sequence
  ENSG00000196535_19 (sequence is synthesized)
cctactgggctgcagcctggaggagctgtcctcagccatcttcaagcaccagcacaagggtggcaccctgcagcgctccacctccttccgccagggccccgaggagagtggcctgggaga

SEQ ID NO: 706165 - DNA, 120 bp, Artificial Sequence
  ENSG00000196535_20 (sequence is synthesized)
tgggacaggcccgaaactgagtgcactggagtgccttgagggcatggcggccggcctctacagcgagctcttcacccttctcgtctccctggtgaatagggctctcaagtccagccagca

SEQ ID NO: 706166 - DNA, 120 bp, Artificial Sequence
  ENSG00000196535_21 (sequence is synthesized)
ctcactctgctccatgatgattgtcgacaccccgggcttccagaaccctgagcagggtgggtcagcccgcggagcctcctttgaggagctgtgccacaactacacccaagaccggctgca

SEQ ID NO: 706167 - DNA, 120 bp, Artificial Sequence
  ENSG00000196535_22 (sequence is synthesized)
gaggctcttccacgagcgcaccttcgtgcaggagttggaaagatacaaggaggagaacatcgagctggcgtttgacgacttggaacccccgacggatgactctgtggctgctgtggacca

SEQ ID NO: 706168 - DNA, 120 bp, Artificial Sequence
  ENSG00000196535_23 (sequence is synthesized)
ggcctcccatcagtccctggtccgctcgctggcccgcacagacgaggcgaggggcctgctctggctattggaagaggaggctctggtgccaggggccagtgaggacaccctcctggagcg

SEQ ID NO: 706169 - DNA, 120 bp, Artificial Sequence
  ENSG00000196535_24 (sequence is synthesized)
ccttttctcctattatggcccccaggaaggtgacaaaaaaggccaaagcccccttctgcacagcagcaaaccacaccactttctcctgggccacagccatggcaccaactgggtagagta

SEQ ID NO: 706170 - DNA, 120 bp, Artificial Sequence
  ENSG00000196535_25 (sequence is synthesized)
caatgtgactggctggctgaactacaccaagcagaacccagccacccagaatgccccccggctcctgcaggactcccagaaaaaaatcatcagcaacctgtttctgggccgcgcaggcag

SEQ ID NO: 706171 - DNA, 120 bp, Artificial Sequence
  ENSG00000196535_26 (sequence is synthesized)
tgccacggtgctctctggctccatcgcgggcctggagggcggctcgcagctggcactgcgccgggccaccagcatgcggaaaacctttaccacaggcatggcggctgtcaaaaagaagtc

SEQ ID NO: 706172 - DNA, 120 bp, Artificial Sequence
  ENSG00000196535_27 (sequence is synthesized)
actgtgcatccagatgaagctacaggtggacgccctcatcgacaccatcaagaagtcaaagctgcattttgtgcactgcttcctgcctgtagctgagggctgggctggggagccccgttc

SEQ ID NO: 706173 - DNA, 120 bp, Artificial Sequence
  ENSG00000196535_28 (sequence is synthesized)
cgcctcctcccgccgagtcagcagcagcagtgagctggacctgccctcgggagaccactgcgaggctgggctcctgcagctcgacgtgcccctgctccgcacccagctccgcggctcccg

SEQ ID NO: 706174 - DNA, 120 bp, Artificial Sequence
  ENSG00000196535_29 (sequence is synthesized)
cctgctcgatgccatgcgcatgtaccgccaaggttaccctgaccacatggtgttttccgagttccgccgccgctttgatgtcctggccccgcacctgaccaagaaacacgggcgtaacta

SEQ ID NO: 706175 - DNA, 120 bp, Artificial Sequence
  ENSG00000196535_30 (sequence is synthesized)
catcgtggtggatgaaaggcgggcagtggaggagctgctggagtgcttggatctggagaagagcagctgctgcatgggcctgagccgggtgttcttccgggcgggcaccttggcacggct

SEQ ID NO: 706176 - DNA, 120 bp, Artificial Sequence
  ENSG00000196535_31 (sequence is synthesized)
ggaggagcagcgggatgaacaaaccagcaggaacctaaccctgttccaagcagcctgcaggggctacctggcccgccagcacttcaagaagagaaagatccaggacctggccattcgctg

SEQ ID NO: 706177 - DNA, 120 bp, Artificial Sequence
  ENSG00000196535_32 (sequence is synthesized)
tgtacagaagaacatcaagaagaacaaaggggtgaaggactggccctggtggaagctttttaccacagtgaggcccctcatcgaagtacagctgtcagaggagcagatccggaacaaaga

SEQ ID NO: 706178 - DNA, 120 bp, Artificial Sequence
  ENSG00000196535_33 (sequence is synthesized)
cgaggagatccagcagctgcggagcaagctcgagaaggcggagaaggagaggaacgagctgcggctcaacagtgaccggctggagagccggatctcagagctgacatcggagctgacaga

SEQ ID NO: 706179 - DNA, 120 bp, Artificial Sequence
  ENSG00000196535_34 (sequence is synthesized)
tgagcgtaacacaggagagtccgcctcccagctgctggacgcggagacagcagagaggctccgggctgagaaggagatgaaggaactgcagacccagtacgatgcactgaagaagcagat

SEQ ID NO: 706180 - DNA, 120 bp, Artificial Sequence
  ENSG00000196535_35 (sequence is synthesized)
ggaggttatggaaatggaggtgatggaggcccgtctcatccgggcagcggagatcaacggggaagtggatgatgatgatgcaggtggcgagtggcggctgaagtatgagcgggctgtgcg

SEQ ID NO: 706181 - DNA, 120 bp, Artificial Sequence
  ENSG00000196535_36 (sequence is synthesized)
ggaggtggacttcaccaagaaacggctccagcaggagtttgaggacaagctggaggtggagcagcagaacaagaggcagctggaacggcggctcggggacctgcaggcagatagtgagga

SEQ ID NO: 706182 - DNA, 120 bp, Artificial Sequence
  ENSG00000196535_37 (sequence is synthesized)
gagtcagcgggctctgcagcagctcaagaagaagtgccagcgactgacggctgagctgcaagacaccaagctgcacctggagggccagcaggtccgcaaccacgaactggagaagaagca

SEQ ID NO: 706183 - DNA, 120 bp, Artificial Sequence
  ENSG00000196535_38 (sequence is synthesized)
gaggaggtttgacagtgagctctcgcaggcgcatgaggaggcccagcgggagaagctgcagcgggagaagctgcagcgggagaaggacatgctcctcgctgaggctttcagcctgaagca

SEQ ID NO: 706184 - DNA, 120 bp, Artificial Sequence
  ENSG00000196535_39 (sequence is synthesized)
gcaactagaggaaaaagacatggacattgcagggttcacccagaaggttgtgtctctagaggcagagctccaggacatttcttcccaagagtccaaggatgaggcttctctggccaaggt

SEQ ID NO: 706185 - DNA, 120 bp, Artificial Sequence
  ENSG00000196535_40 (sequence is synthesized)
caagaaacagctccgggacctggaggccaaagtcaaggatcaggaagaagagctggatgagcaggcagggaccatccagatgctggaacaggccaagctgcgtctggagatggagatgga

SEQ ID NO: 706186 - DNA, 120 bp, Artificial Sequence
  ENSG00000196535_41 (sequence is synthesized)
agagtcgggatgaggaggtggaggaggcccggcagtcgtgtcagaagaagttaaaacagatggaggtgcagctagaggaagagtatgaggacaagcagaaggttctgcgagagaagcggg

SEQ ID NO: 706187 - DNA, 120 bp, Artificial Sequence
  ENSG00000196535_42 (sequence is synthesized)
agctggagggcaagctcgccaccctcagcgaccaggtgaaccggcgggactttgagtcagagaagcggctgcggaaggacctgaagcgcaccaaggccctgctggcagatgcccagctca

SEQ ID NO: 706188 - DNA, 120 bp, Artificial Sequence
  ENSG00000196535_43 (sequence is synthesized)
tgctggaccacctgaagaacagtgctcccagcaagcgagagattgcccagctcaagaaccagctggaggagtcagagttcacctgtgcggcagccgtgaaagcacggaaagcaatggagg

SEQ ID NO: 706189 - DNA, 120 bp, Artificial Sequence
  ENSG00000196535_44 (sequence is synthesized)
tggagatcgaagacctgcacctgcagattgatgacatcgccaaagccaagacagcgctggaggagcagctgagccgccttcagcgtgagaagaatgagatccagaaccggctggaggaag

SEQ ID NO: 706190 - DNA, 120 bp, Artificial Sequence
  ENSG00000196535_45 (sequence is synthesized)
atcaggaagacatgaacgaattgatgaagaagcacaaggctgccgtggctcaggcttcccgggacctggctcagataaatgatctccaagctcagctagaagaagccaacaaagagaagc

SEQ ID NO: 706191 - DNA, 120 bp, Artificial Sequence
  ENSG00000196535_46 (sequence is synthesized)
aggagctgcaggagaagctacaagccctccagagccaggtggagttcctggagcagtccatggtggacaagtccctggtgagcaggcaggaagctaagatacgggagctggagacacgcc

SEQ ID NO: 706192 - DNA, 120 bp, Artificial Sequence
  ENSG00000196535_47 (sequence is synthesized)
tggagtttgaaaggacgcaagtgaaacggctggagagcctggctagccgtctcaaggaaaacatggagaagctgactgaggagcgggatcagcgcattgcagccgagaaccgggagaagg

SEQ ID NO: 706193 - DNA, 120 bp, Artificial Sequence
  ENSG00000196535_48 (sequence is synthesized)
aacagaacaagcggctacagaggcagctccgggacaccaaggaggagatgggcgagcttgccaggaaggaggccgaggcgagccgcaagaagcacgaactggagatggatctagaaagcc

SEQ ID NO: 706194 - DNA, 120 bp, Artificial Sequence
  ENSG00000196535_49 (sequence is synthesized)
tggaggctgctaaccagagcctgcaggctgacctaaagttggcattcaagcgcatcggggacctgcaggctgccattgaggatgagatggagagtgatgagaatgaggacctcatcaaca

SEQ ID NO: 706195 - DNA, 120 bp, Artificial Sequence
  ENSG00000196535_50 (sequence is synthesized)
gtttgcaggacatggtgacaaagtatcagaaaagaaagaataaacttgagggagactctgatgtggactcggagctggaggaccgtgttgacggggtcaagtcctggttgtcaaaaaaca

SEQ ID NO: 706196 - DNA, 120 bp, Artificial Sequence
  ENSG00000196535_51 (sequence is synthesized)
agggaccttccaaggcagcttctgatgatggcagcttaaagagttccagccccaccagctactggaagtcccttgcccctgatcggtcagatgatgagcacgaccctctcgacaacacct

SEQ ID NO: 706197 - DNA, 120 bp, Artificial Sequence
  ENSG00000196535_52 (sequence is synthesized)
ccagaccgcgatactcccacagttatctgagtgacagcgacacagaggccaagctgacggagactaacgcatagcccaggggagtggttggcagccctctcaccccagggcctgtggctg

SEQ ID NO: 706198 - DNA, 120 bp, Artificial Sequence
  ENSG00000196535_53 (sequence is synthesized)
cctgggcacctctcccaggaagtggtggggcaccggtctcccccacccgactgctgatctgcatgggaaacaccctgaccttcttctgtcaggggcactttccaggctatgggtgtctga

SEQ ID NO: 706199 - DNA, 120 bp, Artificial Sequence
  ENSG00000196535_54 (sequence is synthesized)
tgtctccacgtggaagaggtgggggaaagaggagtttctgaagagaactttttgctcctctgtctcaaaatgccagactcttggcttctaccctgtgtcaccgtgggcagtggcaggtgg

SEQ ID NO: 706200 - DNA, 120 bp, Artificial Sequence
  ENSG00000196535_55 (sequence is synthesized)
cctggcactgcatggagccagcacgttgacctccctctcagctccctgctcagggacggtggacaggttgcctactgggacactctaggttgctgggtccatggggaggattgggggagg

SEQ ID NO: 706201 - DNA, 120 bp, Artificial Sequence
  ENSG00000196535_56 (sequence is synthesized)
agaagcagtgccttccctctcgtgtggggtgggggctctctcttcttggtgcctgctgtctttctactttttaatttaaatacccaacctctccatcacagctgcatccctgagagtggg

SEQ ID NO: 706202 - DNA, 120 bp, Artificial Sequence
  ENSG00000196535_57 (sequence is synthesized)
agggggctgtagtggtagctggggctcccaagaacgactcgggaatgtcatctccatcttcacccttcagagagcagtcctttctctgtgcagctggagacgctggtgaggagagccggg

SEQ ID NO: 706203 - DNA, 120 bp, Artificial Sequence
  ENSG00000196535_58 (sequence is synthesized)
tccaggttcttaagaatgaggtgcggaggggctctccggtgctgctgggctgggttgagcaagcctacgcagacaagtgtgtgtgtggaccatccgcacctccagcccccaccccaccct

SEQ ID NO: 706204 - DNA, 120 bp, Artificial Sequence
  ENSG00000196535_59 (sequence is synthesized)
ctttgtctcagcgtgttatgtgcaatgacctatttaaggtaaacccattccaactacagcagttcagggctgatccaagcactgcctccctcctgctctgtccaggtggtctggaccata

SEQ ID NO: 706205 - DNA, 120 bp, Artificial Sequence
  ENSG00000196535_60 (sequence is synthesized)
aactcaacttgagagggaaggcttggggttgaggacttgtgatcagaaaaactgaagatggaagttttggccggtgctcattagacatgagtcctcactctgtgtcctgagcccgtgtca

SEQ ID NO: 706206 - DNA, 120 bp, Artificial Sequence
  ENSG00000196535_61 (sequence is synthesized)
ttcttccaacctccctgcccccacacacttatcccagacacaacaccatgtggtctggaggtcccagcccccaccctaaaaaggttatccctgagaactccaccagacttgggagcccaa

SEQ ID NO: 706207 - DNA, 120 bp, Artificial Sequence
  ENSG00000196535_62 (sequence is synthesized)
gtgcagtgcctggtgctgctcccatctgccgccccccttctctcctgcaattggtttgtactcactgggctgtgctctcccctgtttacccgatgtatggaaataaaggcccttttcctc

SEQ ID NO: 706208 - DNA, 120 bp, Artificial Sequence
  ENSG00000196535_63 (sequence is synthesized)
ctggctgcgccagttttcctgcctgttccttcaggctcaggcaaagtctggattggtcctgggggtggtgggcagaggcaggattctgatggggaccgtgagggcatcaccctggtctct

SEQ ID NO: 706209 - DNA, 120 bp, Artificial Sequence
  ENSG00000196535_64 (sequence is synthesized)
ggcctgctccccaaagtgtcagaccagtgccacttaaagagcctaggcagctcattttggggcaggcagaggtagtggaatgaggggattggccaaggaagacacaagccccacctttta

SEQ ID NO: 706210 - DNA, 120 bp, Artificial Sequence
  ENSG00000196535_65 (sequence is synthesized)
tgtgaagagcctagggactgtgattcaggttagcaagggtggcagagactccaagcctcatcctccctagcctccacaagggaatgttgaggtccctctgattgttaaatctcaccaatt

SEQ ID NO: 706211 - DNA, 120 bp, Artificial Sequence
  ENSG00000196535_66 (sequence is synthesized)
acagagattctcttctcttctcttctcttcctccttccgtccctccctctctccctctctctctctctttctttctttcattctctttctttttggattcaagcccttctcattagaaca

SEQ ID NO: 706212 - DNA, 120 bp, Artificial Sequence
  ENSG00000196535_67 (sequence is synthesized)
ttttttaaaagcttaattttagccatttcaaaggtgactttttgatcaaaacttggcagaactagctcgggcccacagggcaatgtgaataggttgggagtgctgtctctgccctgctcg

SEQ ID NO: 706213 - DNA, 120 bp, Artificial Sequence
  ENSG00000196535_68 (sequence is synthesized)
gtccctgtcttcatgccctactccatgctttgttccttcattgacagctaagaggcagctcatgcagaaaggcaagaaacaaatgacacccctcctcctcttctaccttctaccttctca

SEQ ID NO: 706214 - DNA, 120 bp, Artificial Sequence
  ENSG00000196535_69 (sequence is synthesized)
ttctgtagtgtggccagttataatccctgaatgaataaagtagtttggacagatgggtgggaaaaaatagcaaacagcccaagtgccgaggctctgataatgtcagccatccagaaagag

SEQ ID NO: 706215 - DNA, 120 bp, Artificial Sequence
  ENSG00000196535_70 (sequence is synthesized)
tccaaaagggaagaagggagaaaagtctcccccaaaatgaatgggacagagtgtgaagtggatctgtctcgaacagagactgccccctccattgccccacgatagaacagagaagaggat

SEQ ID NO: 706216 - DNA, 120 bp, Artificial Sequence
  ENSG00000196535_71 (sequence is synthesized)
ccacgatagaacagagaagaggatagaaacaatagtaaaagggaagttacttgtcttttggagacagagtcttgctatgtcgcccaagctggaatgcagtggcatgatctcaactcactg

SEQ ID NO: 706217 - DNA, 85 bp, Artificial Sequence
  ENSG00000196535_72 (sequence is synthesized)
tgatctcaactcactgcaacctctacctcccgaggttcaagcgattctcctgcctaaaccctccgagtagctgggacttaacaga

SEQ ID NO: 706218 - DNA, 80 bp, Artificial Sequence
  ENSG00000196535_73 (sequence is synthesized)
taagttacttttttttacaaaaaaaaaaaaaaaaaaaaaaaggctgctagcttatgttcagttctgtcactctcatcttt

SEQ ID NO: 706219 - DNA, 120 bp, Artificial Sequence
  ENSG00000196535_74 (sequence is synthesized)
aggctgctagcttatgttcagttctgtcactctcatcttttattcctgttttcacatagcgtggtacattttctgtttctactagggactagtgtgacaaactccctgccacctttagat

SEQ ID NO: 706220 - DNA, 120 bp, Artificial Sequence
  ENSG00000196535_75 (sequence is synthesized)
gaattcccaaatctgttcactcatactgagtcaagcctctggttaactggaaactccaacatcaacctccaataacccggcctggggtaaaaagctttgttcaagtcagaaaacatattc

SEQ ID NO: 706221 - DNA, 120 bp, Artificial Sequence
  ENSG00000196535_76 (sequence is synthesized)
atttgcttaacagttgagaaatatttcatgactgcctgctgtgcctaggccccattctgggtgctggtgatggataaggtcccttccttcataaagtggaggaaggtagacacaaaatac

SEQ ID NO: 706222 - DNA, 120 bp, Artificial Sequence
  ENSG00000196535_77 (sequence is synthesized)
atgctgcacctgctagtatgcataagcttagagtgggtagagaggaacacatcatagtatccatcctccagggttttgcggacgagggctggagcagacccatgtggaaataattacata

SEQ ID NO: 706223 - DNA, 120 bp, Artificial Sequence
  ENSG00000196535_78 (sequence is synthesized)
agacctaacaaggatgaagaggttgctttggacatactatggagggagatgctctctttggcggggaggattgggaaagcctctaaaaggagctgctattttgaccagggcttgaaaata

SEQ ID NO: 706224 - DNA, 120 bp, Artificial Sequence
  ENSG00000196535_79 (sequence is synthesized)
gcacttccacaggtacagttgctgggaaaggcatattgagaagaagaagagtttaagtaaaggtcctggggcagggaaagagaggtgctggtagaacatgccacaggctggctgtgcatt

SEQ ID NO: 706225 - DNA, 120 bp, Artificial Sequence
  ENSG00000196535_80 (sequence is synthesized)
gtcacatgaccagtgcttctccaagtttcagttgagaaggagacaattcccttggccccagaggagtccaggagcctttagggccaccaaagcccatctttattttgggtgtaccttgaa

SEQ ID NO: 706226 - DNA, 120 bp, Artificial Sequence
  ENSG00000196535_81 (sequence is synthesized)
ggctctgctgttgaccttacctgtacactcatggtacctctggtccctaagatgttgcagaaggcaaatctggccctttgccaggctcaaagccagcctgctagatcctcctctataact

SEQ ID NO: 706227 - DNA, 120 bp, Artificial Sequence
  ENSG00000196535_82 (sequence is synthesized)
gcagatccccgggattgctctgactcctgaataagcatgggcgggaaccagtgcccctgtgggactccccatggtgcccagtctgtgcccagaaaataaagtggcaggcagtgaccccta

SEQ ID NO: 706228 - DNA, 120 bp, Artificial Sequence
  ENSG00000196535_83 (sequence is synthesized)
gcagggagtcacccggcgctgcggagctcagcacagccggccgggaggaggctccccctggagcacggggccaggccaggtgctggctacccctccggccgctgctacaacccttggcga

SEQ ID NO: 706229 - DNA, 120 bp, Artificial Sequence
  ENSG00000196535_84 (sequence is synthesized)
gaggcctgtgcctgggagggccaggagaggactggtgccttgtgtcggtccagtgaactctgggggcaggcaggcctggctggaatggatcggggaggctggcatgttagcttcttggtg

SEQ ID NO: 706230 - DNA, 120 bp, Artificial Sequence
  ENSG00000196535_85 (sequence is synthesized)
caggggcaatcaggagcaagctatcattagagcttcttcagttccctgggagacccgacttcctcctgcatccctgggtcttcccctcactcacccacttccctctcctcaccttctcca

SEQ ID NO: 706231 - DNA, 120 bp, Artificial Sequence
  ENSG00000196535_86 (sequence is synthesized)
ttttttttttttttttttttttttaagaccataagacattattttgtctgggttatcactgaggcatagacttggagggctggaaagcatcttggggattgggatgtagccttcctccca

SEQ ID NO: 706232 - DNA, 120 bp, Artificial Sequence
  ENSG00000196535_87 (sequence is synthesized)
tggaaagcatcttggggattgggatgtagccttcctcccagctggtcagctaccccacaaccccccatttgcatacctcactgactactaggagcttacttctctctgaaggaggctgtt

SEQ ID NO: 706233 - DNA, 120 bp, Artificial Sequence
  ENSG00000196535_88 (sequence is synthesized)
ccttttttgggccttcctatccccctgtggagcaggcctgattgtcctcctgaccttctcttcctcttccctgcctaccccctctcctttctaggcctgccttcaaccacaggctcccca

SEQ ID NO: 706234 - DNA, 120 bp, Artificial Sequence
  ENSG00000196535_89 (sequence is synthesized)
ccccctgcagtttcttcccttttggtgactctccactgactgcccaggcacagtggctactggggtgtgctgggagcaggtggcgttgacaggcctggctctgggctgctctctctaggt

SEQ ID NO: 706235 - DNA, 120 bp, Artificial Sequence
  ENSG00000196535_90 (sequence is synthesized)
agtctccttgctctgggctgctccaggccaggccatgcggaaagtgtgttgttatgaggattcaatgaggagacctgtatgaagtgccttcccctgtgcctggctcatagcgaaaacaga

SEQ ID NO: 706236 - DNA, 120 bp, Artificial Sequence
  ENSG00000196535_91 (sequence is synthesized)
agcccagtaacaagatggatggggcagagaaggagccaacacagtcattttggtttggaattacaggctaatagattcattcatttcctgaagctgctgttggatctctcttcccctccc

SEQ ID NO: 706237 - DNA, 120 bp, Artificial Sequence
  ENSG00000196535_92 (sequence is synthesized)
ccaaggaggggactggctgtcggggctggatgcccagggagtgggcagtcccagggaaaatgagagtctaagccaggagaccttcgcagacttgaggggtccttccctggggcctgaagg

SEQ ID NO: 706238 - DNA, 120 bp, Artificial Sequence
  ENSG00000196535_93 (sequence is synthesized)
gggcagagtgcacgcaggccagggcctggactgatagtgccaggatgatgggtcatttgttctgggcagaccttttctgccttctcattagcctcaaaggagctgccaggaagcagctgt

SEQ ID NO: 706239 - DNA, 120 bp, Artificial Sequence
  ENSG00000196535_94 (sequence is synthesized)
cattcagctcagaggcccagggtctgcctgtactgcacacagccctttccctcatctccctggtccagagcgggacaggcagctccttgagcatcactagtcctgggacccaccccagca

SEQ ID NO: 706240 - DNA, 120 bp, Artificial Sequence
  ENSG00000196535_95 (sequence is synthesized)
ccagccaagcctgaagccccaaagaagcagcgctccccagccccaccggaagagctggtgaccccaggctccaccggcccgaagtcagacctcactggagagcagcagtccaagtcacca

SEQ ID NO: 706241 - DNA, 120 bp, Artificial Sequence
  ENSG00000196535_96 (sequence is synthesized)
agcatatcaagagggcaggccaggaagctagcggcactggagactccctcagatgaggcttggaccccacagcccagcagcaacagagcggaaaaggctctggcagcctgtgtcagccct

SEQ ID NO: 706242 - DNA, 120 bp, Artificial Sequence
  ENSG00000196535_97 (sequence is synthesized)
caggtagcacccccatgaccggaaagtacttgaagcaggcttcttctggccatctaggggagaagctagccctcctgcaaactgggctgcccccttcctcctaggagatggatctagaaa

SEQ ID NO: 706243 - DNA, 120 bp, Artificial Sequence
  ENSG00000196535_98 (sequence is synthesized)
attactgggatgcggccagtacaggcagctccttgagcatcactggtcctgggacccaccccagtgggcaggccccttgggcagggaatggggcaggggaggaggctgggctgggctggt

SEQ ID NO: 706244 - DNA, 120 bp, Artificial Sequence
  ENSG00000196535_99 (sequence is synthesized)
ggcttcatggcccctgagctagtcacctagctgctgagagatgccaatctcacgggcttgatttatccccatgacatttgtgctcctcagcagttctcagctggaggagcagctgagccg

SEQ ID NO: 706245 - DNA, 120 bp, Artificial Sequence
  ENSG00000196535_100 (sequence is synthesized)
ttttgagctgctaacggagccagagcagcatcagagcggagtctccttgctctgggctgctccaggccaggccatgcggctggactctgaggccgcctctcatgcccacagccaggcgaa

SEQ ID NO: 706246 - DNA, 120 bp, Artificial Sequence
  ENSG00000196535_101 (sequence is synthesized)
agagcgggacaggcagctccttgagcatcactagtcctgggacccaccccagcaggcaggctcagcccattatcatcttctctacaatgcccctgccattggaggcagctggagcccaca

SEQ ID NO: 706247 - DNA, 120 bp, Artificial Sequence
  ENSG00000196535_102 (sequence is synthesized)
tgaaccttagtttcagccctggagcccttgagagagctctgctgttggttagtaattaccgtgaaagtattcagcttcttcattacaaggacagaaagtgtgttgttatgaggattcaat

SEQ ID NO: 706248 - DNA, 120 bp, Artificial Sequence
  ENSG00000196535_103 (sequence is synthesized)
cttcccctgtgcctggctcataggcacaggttaccttcagcgccatggccttttcatcaaggttcgccttctgggagcaaaaggaaagttggattttaaaatctttatgtttttcctgtg

SEQ ID NO: 706249 - DNA, 120 bp, Artificial Sequence
  ENSG00000196535_104 (sequence is synthesized)
caacggtgctgggatagaccaagctctgcctgaaccttagtttcagccctggagcccttgagagagctctgctgttggttagtaattaccgtgaaagtattcagcttcttcattacaagg

SEQ ID NO: 706250 - DNA, 120 bp, Artificial Sequence
  ENSG00000196535_105 (sequence is synthesized)
ccatcttggcccctagctcggggacctgcaggcagacggagaagctgcaggactgtccccaccccagctgcctctctgtgggcctatgccagacctctagtaagggagttcagctgctct

SEQ ID NO: 706251 - DNA, 120 bp, Artificial Sequence
  ENSG00000196535_106 (sequence is synthesized)
gcggagtctccttgctctgggctgctccaggccaggccatgcggtgtttatcctggcaggttctggcctttgggaagactcagagacactgagagaccctgccccccatttcttctctga

SEQ ID NO: 706252 - DNA, 120 bp, Artificial Sequence
  ENSG00000196535_107 (sequence is synthesized)
cccagggcacaggttaccttcagcgccatggccttttcatcaaggttcgccttctgggagcaaaaggaaaaggaggacaaaactctgccaaagcctggctctcctggcaaggaggaaggg

SEQ ID NO: 706253 - DNA, 120 bp, Artificial Sequence
  ENSG00000196535_108 (sequence is synthesized)
gctctagagggcagctcaaaggaaggcagtggcccatctaggagtcctcagcctcccaccagcccgatacccccagagacttcccagagagccaggagccctgcacccacactcgccatg

SEQ ID NO: 706254 - DNA, 120 bp, Artificial Sequence
  ENSG00000196535_109 (sequence is synthesized)
aacggcccgggagctgccacagcagaaggcctaagcgaagaggcccagggcctgtcccggaagcgggtggcaaatgcagtgaggaaggtggtgagtaaggtgctgcccagcgaggagctt

SEQ ID NO: 706255 - DNA, 120 bp, Artificial Sequence
  ENSG00000196535_110 (sequence is synthesized)
ccaagccgccaccccctcccccacctccccctgctccgcctaagcctgaagtgaagaaggaggcagccaaggatgagctctccctgggcctgcggagcctgatgtctcggggcaggggca

SEQ ID NO: 706256 - DNA, 120 bp, Artificial Sequence
  ENSG00000196535_111 (sequence is synthesized)
agcaggaggcaggagctgccaaggtccagctgacccccgtggaagaggcccaccagcggctggagaggatcttcacagcttctctggactctgaggccgcctctcatgcccacagccagg

SEQ ID NO: 706257 - DNA, 120 bp, Artificial Sequence
  ENSG00000196535_112 (sequence is synthesized)
atacagtgtgtttccttgggagctgtttcatttgggatgatggagggagctcctgcacggcacagaaggaggttggccttgctgatctcagagccccttcccagcctactcacaaggctg

SEQ ID NO: 706258 - DNA, 120 bp, Artificial Sequence
  ENSG00000196535_113 (sequence is synthesized)
cagcctctctaaggaggccccgggggtggaggagaggccgtcctcggtggtgagctccctgagctatcggaagcggctcaccctaaaggactccatcgggggcaccggggacgcggattc

SEQ ID NO: 706259 - DNA, 120 bp, Artificial Sequence
  ENSG00000196535_114 (sequence is synthesized)
gctcttcacctccctgagcgagcgggcggcctcccctgagaggccccctaggaaggcccatgtgggccccagggaggagccatgcccaggcaggaagtccgaggagccggaggagtgcgg

SEQ ID NO: 706260 - DNA, 120 bp, Artificial Sequence
  ENSG00000196535_115 (sequence is synthesized)
gagtgcggctccgtccgctcggggaccggggggcgcgctggccgggggccgcagaagcggtggggctccgacttcagcccggcctccaccgtctctgcaccggtcagccgggcctcctcg

SEQ ID NO: 706261 - DNA, 120 bp, Artificial Sequence
  ENSG00000196535_116 (sequence is synthesized)
gcggggctctggcgaagacagggctggctcttccctgagtttctcgctgtcgggctcgcccggttcccgccgcagcacctcccggctcgacagcctctccaggacactcagcccttccct

SEQ ID NO: 706262 - DNA, 120 bp, Artificial Sequence
  ENSG00000196535_117 (sequence is synthesized)
gagccgggcctctggcctaggccgggagagccctgattctcgcctgtccctgggccggagctgcctagaggagtgggatgatggagccagtatggccctgagcgaggcctgctcgcagta

SEQ ID NO: 706263 - DNA, 120 bp, Artificial Sequence
  ENSG00000196535_118 (sequence is synthesized)
cacccgtcgctggcccgcagtctgtcggtgccaccccggccacgcagctctgcctcggcagtggatgagcctcccagctccagcgtccgctccgtcagccgtcactcctacctggaccca

SEQ ID NO: 706264 - DNA, 120 bp, Artificial Sequence
  ENSG00000196535_119 (sequence is synthesized)
gacctggaggctgccgtcaacgaggtcttgagctacaagcctgttccattccagcggagcagcctggagcccgactccgaggaggatgacaggaagagcatccaaagtgcccggagcgcc

SEQ ID NO: 706265 - DNA, 120 bp, Artificial Sequence
  ENSG00000196535_120 (sequence is synthesized)
caactggaccccccggagcgagctgccagcatccgccgctccgcctctgctgctgatgtgtcccggtcccgcagcggccggaagagccggagccggcgaaggagcggaaggagcagctcc

SEQ ID NO: 706266 - DNA, 120 bp, Artificial Sequence
  ENSG00000196535_121 (sequence is synthesized)
agctccagctccagctccggctccgaagcttcctcagagcacaagaggcggaagaaggggcgctctcggaagagcaagaagtccaagtcgagaagaaagagaacggagacggagtctgag

SEQ ID NO: 706267 - DNA, 120 bp, Artificial Sequence
  ENSG00000196535_122 (sequence is synthesized)
tcctcctcgtcgtcatccagcggctcgaccgtctccagccacagctgctccagtgtgaagaagggcccagctgcagaaagtgaagaaactgggcagacgcaccggccgtcgaggaaggag

SEQ ID NO: 706268 - DNA, 120 bp, Artificial Sequence
  ENSG00000196535_123 (sequence is synthesized)
gaaaagaagcgcaagaaagaggtggacagcctgatgatgcggtacctgtaccggcccgagagcgactagtgcaccccaccagctactggaagtcccttgcccctgatcggtcagatgatg

SEQ ID NO: 706269 - DNA, 120 bp, Artificial Sequence; identical to SEQ ID NO: 653149
  ENSG00000196539_0 (sequence is synthesized)

SEQ ID NO: 706270 - DNA, 120 bp, Artificial Sequence; identical to SEQ ID NO: 653150
  ENSG00000196539_1 (sequence is synthesized)

SEQ ID NO: 706271 - DNA, 120 bp, Artificial Sequence
  ENSG00000196539_2 (sequence is synthesized)
gtgactgtgcccaagatgcttgtgggccaggtcactggagatgataccatttccccgtcaggctgtgggatccagatgttcttctacctgaccctggctggagctgaggttttcctcctg

SEQ ID NO: 706272 - DNA, 120 bp, Artificial Sequence; identical to SEQ ID NO: 653152
  ENSG00000196539_3 (sequence is synthesized)

SEQ ID NO: 706273 - DNA, 120 bp, Artificial Sequence
  ENSG00000196539_4 (sequence is synthesized)
tataagacgctcatgtacctgtgctgcatcctcatgcttctcgcccccatcatggtcatctccagctcatacaccctcatcctgcatctcatccacaggatgaattctgccgccggccac

SEQ ID NO: 706274 - DNA, 120 bp, Artificial Sequence
  ENSG00000196539_5 (sequence is synthesized)
aggaaggccttggccacctgctcctcccacatgatcatagtgctgctgctcttcggtgcttccttctacacctacatgctcccgagttcctaccacacagctgagcaggacatgatggtg

SEQ ID NO: 706275 - DNA, 120 bp, Artificial Sequence; identical to SEQ ID NO: 653155
  ENSG00000196539_6 (sequence is synthesized)

SEQ ID NO: 706276 - DNA, 120 bp, Artificial Sequence
  ENSG00000196542_0 (sequence is synthesized)
attcatcaaaagaggctttcgctcccggactcccctgggcctcgagcagaaagcgtctcggccacggagatacagaaccgggagccttcaaggtcctccgccactctcagcaagccctgc

SEQ ID NO: 706277 - DNA, 120 bp, Artificial Sequence
  ENSG00000196542_1 (sequence is synthesized)
tctcgatggagaggagatcgctgggtgatggatgtgggcttccagggaaggtgctcgcgctggtcccgagccctccggggaagatattcgagcgcggagcgtaagcgcagggcacgccag

SEQ ID NO: 706278 - DNA, 120 bp, Artificial Sequence
  ENSG00000196542_2 (sequence is synthesized)
ccccgggagccgcgggagcaggcgccgcgcgtctctgcaccaccgggccgcctcccagccttctttccccagtttgccctcctgccgcagtccgggccgagattaattctctgcacttgt

SEQ ID NO: 706279 - DNA, 120 bp, Artificial Sequence
  ENSG00000196542_3 (sequence is synthesized)
gagtgggcacacacaagttctccgggcacgatcctttcatctatttccctgggggagtccacctttttaacgattaacctcctagctaccgcgggcaaggtggcaggatgcgagtggggc

SEQ ID NO: 706280 - DNA, 120 bp, Artificial Sequence
  ENSG00000196542_4 (sequence is synthesized)
ggggaggggcgtttcacacgttcagaggcaccaaaattagctgccagtgctaaaaggctttgctttcttcggtttttgacaaataaatggggtgggatgcttgcttggccgcccgctgcc

SEQ ID NO: 706281 - DNA, 120 bp, Artificial Sequence
  ENSG00000196542_5 (sequence is synthesized)
ccagcccgagccctgggctcacttagcagcctgatgccgagtttcagacgcagtcctgctgcgcttacacccgggcttcttcgcccccttgccaaagtctgcagcccgatggatgctggg

SEQ ID NO: 706282 - DNA, 120 bp, Artificial Sequence
  ENSG00000196542_6 (sequence is synthesized)
cgcgggctttccctgagcgctttaacgcagcttaggctaaagccccagagctcccaccttctacctcctgtttatccgcccgcccctctaccaccgccaaaggacgtgccccttcagtag

SEQ ID NO: 706283 - DNA, 120 bp, Artificial Sequence
  ENSG00000196542_7 (sequence is synthesized)
agtcggggatcccagccccagagcgggggagggcgcctccctatcccctcctccccgtccccgcctcggctcggggttttactgcagcagccggaggtgacagcgacgcctcagccgcct

SEQ ID NO: 706284 - DNA, 120 bp, Artificial Sequence
  ENSG00000196542_8 (sequence is synthesized)
ctgttgctctcggagccccggcttcccctgcaccgggaaagcgccccctctcgagaggctggtccctggagaactgcgaacgagctgcagaaaaccagattttaaaatgtagaagtcgtt

SEQ ID NO: 706285 - DNA, 120 bp, Artificial Sequence
  ENSG00000196542_9 (sequence is synthesized)
gggctgcattcctccgaggaccagtctgatcgcccaggactaagagtggcagcgtatgagaagttgggaccatagagcaagggggggaggggagtgttgcagcaggcattctcttctgga

SEQ ID NO: 706286 - DNA, 120 bp, Artificial Sequence
  ENSG00000196542_10 (sequence is synthesized)
aggagtcgctgggagcagtgcggttggacacaagtttgcgtaggagtgttttccttttgtcaataattaatcaccggaattagccaggtagaatttgagttttagcaagagtcctgaggg

SEQ ID NO: 706287 - DNA, 120 bp, Artificial Sequence
  ENSG00000196542_11 (sequence is synthesized)
cggggccgaacacctaactccgggaggctcccaggcgcccggcgcagtgggaagctcgcagcagctggggaggagccaaagcctcggcgctcacctaagccgcagggagatacacccaac

SEQ ID NO: 706288 - DNA, 120 bp, Artificial Sequence
  ENSG00000196542_12 (sequence is synthesized)
aacttactgcagcttgaaggagccaaccatggatttgaggcgtgtgaaggaatatttctcctggctctactatcaataccaaatcattagctgctgtgctgttttagagccctgggagcg

SEQ ID NO: 706289 - DNA, 120 bp, Artificial Sequence
  ENSG00000196542_13 (sequence is synthesized)
atctatgtttaacaccatcttactaaccattattgctatggtggtatacactgcctatgtctttattccaatccacattcgcctggcttgggaatttttctcaaaaatatgtggatatca

SEQ ID NO: 706290 - DNA, 120 bp, Artificial Sequence
  ENSG00000196542_14 (sequence is synthesized)
cagtacaatttctaattgatcctgttcacattcagtgaaatggcattgcatatttatatgttgcttacagcttattgatttaggtaactattgtgtcttccttcactatctgacctgaaa

SEQ ID NO: 706291 - DNA, 120 bp, Artificial Sequence
  ENSG00000196542_15 (sequence is synthesized)
agcactctcttctctatgcactcttatattctgcctttctgcctggagtttgaaatacatgtctctttagtttcttttgcacatgctacattgtgctttagaccggagataatacagtga

SEQ ID NO: 706292 - DNA, 120 bp, Artificial Sequence
  ENSG00000196542_16 (sequence is synthesized)
ctttacctcacaaatcatattctgtcaacacaaatctatgaatttagtttatttaaaatcagaacaatttcctacaaaatttttctggaaaatagactcctaacagacctaccagaatca

SEQ ID NO: 706293 - DNA, 120 bp, Artificial Sequence
  ENSG00000196542_17 (sequence is synthesized)
tgcttaaagtgctcccttgacacttattctatactaaaggataaattttaaaaaatctttataggctactgtcagaagtatcctatccttgtttacgatgtataaaaagatgtgaataaa

SEQ ID NO: 706294 - DNA, 120 bp, Artificial Sequence
  ENSG00000196542_18 (sequence is synthesized)
ttatatggaccccctaagtcttattttctagtaaactgatgatactggaaattcttttacttcaaatgcaaaagaataagctggaggcaattatttcctttcatacagagttcatgaatt

SEQ ID NO: 706295 - DNA, 120 bp, Artificial Sequence
  ENSG00000196542_19 (sequence is synthesized)
gttttaaatgcttcttaaagtctggctttataaccgtttaaaatcaacaatgttgattttagataaccaagtaagtattataatacaaaataattttaagtgtaagaaactaaagtataa

SEQ ID NO: 706296 - DNA, 120 bp, Artificial Sequence
  ENSG00000196542_20 (sequence is synthesized)
tcaaagtaaattcagttattgtatttgtggtgttgccttgccttgcatgatgctgggggaaaaagagaaaagaaatggttttctttttgtactttcattcagtgtagagggaaaaaagca

SEQ ID NO: 706297 - DNA, 120 bp, Artificial Sequence
  ENSG00000196542_21 (sequence is synthesized)
tgtattgggccaccggaagacaagctaataaataggctggaagtaatattctaccagcaggaactcaacagctccagttaaatgctttgatatagtggctcctttgcagagccaaaacaa

SEQ ID NO: 706298 - DNA, 120 bp, Artificial Sequence
  ENSG00000196542_22 (sequence is synthesized)
gatttattaaatttccttcaaactgtttatctttaaaacaaatataaggttttaattatactgctgaagcaaatgtgaatgccaaagactacgttttgcagttttgctttcctcccaata

SEQ ID NO: 706299 - DNA, 120 bp, Artificial Sequence
  ENSG00000196542_23 (sequence is synthesized)
aatattaatgtatgtaattctagagggtaaaaatgtaaataggtttggacaatatttgcacccttgtttgtgttatgaaaaaaatttttccaaggtgagctagagagaaagatgtttggc

SEQ ID NO: 706300 - DNA, 120 bp, Artificial Sequence
  ENSG00000196542_24 (sequence is synthesized)
atgccaaattaacttgcatgtttgttaaaaaaacaaacacatgttttgaagagaaaccagatctgaacatgtatttgttgagttttgcaaaataaaattaattttgtaagtaaatatcta

SEQ ID NO: 706301 - DNA, 120 bp, Artificial Sequence
  ENSG00000196542_25 (sequence is synthesized)
gaaggagcaaggctgaagaaccagacctggactttcttagtgctcattcctgggccctcgatcactgcatgtttgttacatggtccagtttgctgcttcctggaagagcatctcctgact

SEQ ID NO: 706302 - DNA, 120 bp, Artificial Sequence
  ENSG00000196542_26 (sequence is synthesized)
cacaggatcatttcgtgaaggagcaaggctgaagaaccagacctggactttcttaggcaagtaaattctgattatatcacggagacttgctttgagaaatctgccccttttcactgtgag

SEQ ID NO: 706303 - DNA, 120 bp, Artificial Sequence
  ENSG00000196542_27 (sequence is synthesized)
gagatgatacaaaggaataaaatggggcaattagctctagtaatttggaggtctcaacttacggatattccaagttcctttgaaacgtgtgcagaaaaatgtttatgcaaaatttgccta

SEQ ID NO: 706304 - DNA, 120 bp, Artificial Sequence
  ENSG00000196542_28 (sequence is synthesized)
cattgcaaggggtccataggaccctccccccaagtccttgacctccaggttaagaactcctagcctagaagaggccaatcccagcacaagtgccagtgttagaattgcatagcactagct

SEQ ID NO: 706305 - DNA, 120 bp, Artificial Sequence
  ENSG00000196542_29 (sequence is synthesized)
actgtcttatttatgggtctactggttaaaggctgcttgtgtttcgacatccttcatcttttatttaaatggagcagcatcttacccttgaagacctttggtacaagagaggaatatatg

SEQ ID NO: 706306 - DNA, 120 bp, Artificial Sequence
  ENSG00000196544_0 (sequence is synthesized)
ggggcgaaccaattcctccgttgcggcccccacctgcagtatggagtcgtctcgggggcggcccgggcccgagacggaccttctggctgtagcggaacatcaggccctagtctttggcgg

SEQ ID NO: 706307 - DNA, 120 bp, Artificial Sequence
  ENSG00000196544_1 (sequence is synthesized)
cgggccgggccgaacgtcctctgagccgcccgcaggcctccgggtgtccggggaggaagagaccgagaacgttgggggcgcgaaccgccaccccaggacgtccccgaagacgtcaagctg

SEQ ID NO: 706308 - DNA, 120 bp, Artificial Sequence
  ENSG00000196544_2 (sequence is synthesized)
cggcgtcgtccaccggccggaacgggaggctctggagaacgagcccggccctcaagggacgctgtctggggccgggagccgcaggggggcgccgggtgcagagcacgaaccttccctgtc

SEQ ID NO: 706309 - DNA, 120 bp, Artificial Sequence
  ENSG00000196544_3 (sequence is synthesized)
ctcccggcacaagaacccggcgccgcccgagggcaagccctcctccgggagggactgccgtcgagggggaccaggcggcgggatggatgttgagcagcaggaggaggaagacaacgacga

SEQ ID NO: 706310 - DNA, 120 bp, Artificial Sequence
  ENSG00000196544_4 (sequence is synthesized)
ggaggcggccgcgggcagcagagccggccgctcgttctccagccgtcttcaggacagccgcagcctggacgggctgagcgaggcgtgcggtggcgccgggtcctcagggagtgccgagtc

SEQ ID NO: 706311 - DNA, 120 bp, Artificial Sequence
  ENSG00000196544_5 (sequence is synthesized)
cggcgcgggcggcggacgccgcgccaccatctccagtcccctggagctcgaaggcacagtgagccgccacggcgaccttacccactttgtcgccaacaacctgcaactcaagatccgtct

SEQ ID NO: 706312 - DNA, 120 bp, Artificial Sequence
  ENSG00000196544_6 (sequence is synthesized)
gagcggcgcgcctccacccccgccttctgcccctgcgcggccctgcccagcgcctgcacccacacccacaccggccattcccccaatcgaccccgaggtgctgcgggatctggagcggtt

SEQ ID NO: 706313 - DNA, 120 bp, Artificial Sequence
  ENSG00000196544_7 (sequence is synthesized)
tcgcggtctgggtggcgcggtgcaggagctgacggcgctgagcgtgggttgcatccagacctaccgcgatgctgtggactccttaggtgaagccgtggacatgagcatcaagggcatgta

SEQ ID NO: 706314 - DNA, 120 bp, Artificial Sequence
  ENSG00000196544_8 (sequence is synthesized)
caccctgctggcgcgctgcgaggagctggagcgggctctgcagccggttcaggggctggcgcgccaagtccgggatatccgacgtactctggaggtgttggaggccctgtgcaagtgacc

SEQ ID NO: 706315 - DNA, 120 bp, Artificial Sequence
  ENSG00000196544_9 (sequence is synthesized)
aggaggacaggagaggccggtcctggccagggcagggcccagcaggaccctaaggactcttcagggagtcctggtgggaagtgcccactgaggggaggcctgtgtgttggaggctcttcc

SEQ ID NO: 706316 - DNA, 120 bp, Artificial Sequence
  ENSG00000196544_10 (sequence is synthesized)
agatgcgttcagctggcccgtgcccactcgctgggccttaggctggtgtatgtggggaagttctaacggctctcctggtgggaagggatgttgctctgcttgtattcagttggccatctg

SEQ ID NO: 706317 - DNA, 120 bp, Artificial Sequence
  ENSG00000196544_11 (sequence is synthesized)
tagctaccctgttcttcccaactctcctccctagctagagcaccagccctgggaacacggggctttaggtctgcttgaaggtgaggacgtgactcccacatgtaatcaggagaaagggac

SEQ ID NO: 706318 - DNA, 120 bp, Artificial Sequence
  ENSG00000196544_12 (sequence is synthesized)
agaggaagccccagcccccactgtggctatcctgactccagtggccacatctcaggtgccaggggctgtgggagcttgtgccgtccttggccaaacaccccgcaggcaaagatgcacccc

SEQ ID NO: 706319 - DNA, 120 bp, Artificial Sequence
  ENSG00000196544_13 (sequence is synthesized)
tgctgatggagagccttctgcttctgccctctggccctctaccataccacttccccagccagaaccggcgtgcagctaggaggaatgggttgcacggcggagggggtgaggtgggaggcg

SEQ ID NO: 706320 - DNA, 120 bp, Artificial Sequence
  ENSG00000196544_14 (sequence is synthesized)
tctcactgctctcagggttcaggtagaatgttgctggttttgaagctcacctgttgtggagtgttctaatcagttttggctttctgagtttttgtggaattaaagtgctgctgctgcgaa

SEQ ID NO: 706321 - DNA, 120 bp, Artificial Sequence
  ENSG00000196547_0 (sequence is synthesized)
gtgtgtgtggaggccagtatgaagctgaaaaagcaggtgacagtgtgtggggctgccatcttctgtgtggcagtcttctcgctctacctcatgctggaccgagtgcaacacgatcccacc

SEQ ID NO: 706322 - DNA, 120 bp, Artificial Sequence
  ENSG00000196547_1 (sequence is synthesized)
cgacaccagaatggtgggaacttcccccggagccaaatttctgtgctgcagaaccgcattgagcagctggagcagcttttggaggagaaccatgagattatcagccatatcaaggactcc

SEQ ID NO: 706323 - DNA, 120 bp, Artificial Sequence
  ENSG00000196547_2 (sequence is synthesized)
gtgctggagctgacagccaacgcagagggcccgcccgccatgctgccctactacacggtcaatggctcctgggtggtgccaccggagccccggcccagcttcttctccatctccccgcag

SEQ ID NO: 706324 - DNA, 120 bp, Artificial Sequence
  ENSG00000196547_3 (sequence is synthesized)
gactgccagtttgctttggggggccggggtcagaagccagagctgcagatgctcactgtgtcggaggagctgccgtttgacaacgtggatggtggtgtgtggaggcaaggcttcgacatc

SEQ ID NO: 706325 - DNA, 120 bp, Artificial Sequence
  ENSG00000196547_4 (sequence is synthesized)
tcctacgacccgcacgactgggatgctgaagacctgcaggtgtttgtggtgccccactctcacaatgacccaggctggatcaagacctttgacaagtactacacagagcagacccaacac

SEQ ID NO: 706326 - DNA, 120 bp, Artificial Sequence
  ENSG00000196547_5 (sequence is synthesized)
atcctcaatagcatggtgtctaagctgcaggaggacccccggcggcgcttcctctgggcagaggtctccttcttcgccaagtggtgggacaacatcaatgtccaaaagagagcggcagtc

SEQ ID NO: 706327 - DNA, 120 bp, Artificial Sequence
  ENSG00000196547_6 (sequence is synthesized)
cgaaggctggtgggaaacgggcagctggagattgcgacaggaggctgggtgatgccagatgaggccaattcccactactttgcattgattgaccagctcatcgaaggacaccagtggctg

SEQ ID NO: 706328 - DNA, 120 bp, Artificial Sequence
  ENSG00000196547_7 (sequence is synthesized)
gagagaaatcttggtgcaaccccccgctctggctgggcagtggacccctttggatacagctccaccatgccttacctgctgcgccgtgccaacctcaccagcatgctgattcagagagtg

SEQ ID NO: 706329 - DNA, 120 bp, Artificial Sequence
  ENSG00000196547_8 (sequence is synthesized)
cactatgccatcaagaagcactttgctgccacccacagcctagagttcatgtggaggcagacatgggactcggactccagcacagacatcttctgtcacatgatgcccttctacagctat

SEQ ID NO: 706330 - DNA, 120 bp, Artificial Sequence
  ENSG00000196547_9 (sequence is synthesized)
gacgtcccccatacctgtggcccagatcccaagatctgctgccaatttgatttcaaacgcctgcctggtgggcgcatcaactgcccttggaaggtgccaccccgggccatcacagaggcc

SEQ ID NO: 706331 - DNA, 120 bp, Artificial Sequence
  ENSG00000196547_10 (sequence is synthesized)
aacgtggcagagagggcagccctgcttctggaccaataccggaagaagtcccagctgttccgaagcaacgtcctcctggtgcctcttggagatgacttccgatatgacaagccccaggag

SEQ ID NO: 706332 - DNA, 120 bp, Artificial Sequence
  ENSG00000196547_11 (sequence is synthesized)
tgggatgcccagttcttcaactaccaacggctctttgacttcttcaacagcaggcctaacctccatgtgcaggcccagtttggcactctttctgactattttgatgccctgtacaagagg

SEQ ID NO: 706333 - DNA, 120 bp, Artificial Sequence
  ENSG00000196547_12 (sequence is synthesized)
acaggggtggagccaggggcccggcctccagggtttcctgtgctgagcggggatttcttctcctatgcggaccgggaggatcattactggacaggctattacacttcccggcccttctac

SEQ ID NO: 706334 - DNA, 120 bp, Artificial Sequence
  ENSG00000196547_13 (sequence is synthesized)
aagagcttagaccgagtcctggaagcccacctgcggggggcagaggttctgtacagcctggctgcagctcacgctcgccgctctggtctggctggccggtacccactgtctgatttcacc

SEQ ID NO: 706335 - DNA, 120 bp, Artificial Sequence
  ENSG00000196547_14 (sequence is synthesized)
ctcctgacggaagctcggcgcacattggggctcttccagcatcacgatgccatcactggcacggccaaggaggctgtggtggtggactatggggtcaggcttctgcgctcccttgtcaac

SEQ ID NO: 706336 - DNA, 120 bp, Artificial Sequence
  ENSG00000196547_15 (sequence is synthesized)
ctgaagcaggtcatcattcatgcagcccactatctggtgctgggggacaaggagacctaccactttgaccctgaggcgcccttcctccaagtggatgacactcgcttaagtcacgacgcc

SEQ ID NO: 706337 - DNA, 120 bp, Artificial Sequence
  ENSG00000196547_16 (sequence is synthesized)
ctcccagagcgcacggtgatccagctggattcctcgcccaggtttgtggtcctattcaacccactggaacaggagcgattcagcatggtgtccctgctggtcaactctccccgcgtgcgt

SEQ ID NO: 706338 - DNA, 120 bp, Artificial Sequence
  ENSG00000196547_17 (sequence is synthesized)
gtcctttcggaggagggtcagcccctggccgtgcagatcagcgcacactggagctctgccaccgaggcggtccctgacgtctaccaggtgtctgtgcctgtccgcctgccagccctgggc

SEQ ID NO: 706339 - DNA, 120 bp, Artificial Sequence
  ENSG00000196547_18 (sequence is synthesized)
ctgggcgtgctgcagctacagctgggcctggatgggcaccgcacgctgccctcctctgtgcgcatctacctgcacggccggcagctgtccgtcagcaggcacgaagcgtttcctctccgt

SEQ ID NO: 706340 - DNA, 120 bp, Artificial Sequence
  ENSG00000196547_19 (sequence is synthesized)
gtcattgactctggcaccagcgacttcgccctcagcaaccgctacatgcaggtctggttctcaggccttactgggctcctcaagagcatccgaagggtggatgaggagcacgagcagcag

SEQ ID NO: 706341 - DNA, 120 bp, Artificial Sequence
  ENSG00000196547_20 (sequence is synthesized)
gtggacatgcaggtccttgtctatggcacccgtacgtccaaagacaagagtggagcctacctcttcctgcccgatggcgaggccaagccctacgtccccaaggagccccccgtgctgcgt

SEQ ID NO: 706342 - DNA, 120 bp, Artificial Sequence
  ENSG00000196547_21 (sequence is synthesized)
gtcactgaaggccctttcttctcagaggtggttgcgtactatgagcacattcaccaggcggtccggctttacaatctgccaggggtggaggggctgtctctggacatatcatccctggtg

SEQ ID NO: 706343 - DNA, 120 bp, Artificial Sequence
  ENSG00000196547_22 (sequence is synthesized)
gacatccgggactacgtcaacaaggagctggccctgcacatccatacagacatcgacagccagggtatcttcttcacagacctcaatggctttcaggtgcagccccgacggtatctgaag

SEQ ID NO: 706344 - DNA, 120 bp, Artificial Sequence
  ENSG00000196547_23 (sequence is synthesized)
aagctccccctccaggccaacttctaccccatgccagtcatggcctatatccaggacgcacagaagcgcctcacgctgcacactgcccaggccctgggtgtctctagcctcaaagatggc

SEQ ID NO: 706345 - DNA, 120 bp, Artificial Sequence
  ENSG00000196547_24 (sequence is synthesized)
cagctggaggtgatcttggaccggcggctgatgcaggatgacaaccggggcctaggccaagggctcaaggacaacaagagaacctgcaaccgtttccgcctcctgctagagcggcgaacc

SEQ ID NO: 706346 - DNA, 120 bp, Artificial Sequence
  ENSG00000196547_25 (sequence is synthesized)
gtgggcagtgaggtccaagatagccactctaccagctacccatccctcctcagccacctgacctccatgtacctgaacgccccggcgctcgctctgcctgtagccaggatgcagctccca

SEQ ID NO: 706347 - DNA, 120 bp, Artificial Sequence
  ENSG00000196547_26 (sequence is synthesized)
tggcttcctcactgccctgtgacttccacctgctcaacctacgtacgctccaggctgaggaggacaccctaccctcggcggagaccgcactcatcttacaccgcaagggttttgactgcg

SEQ ID NO: 706348 - DNA, 120 bp, Artificial Sequence
  ENSG00000196547_27 (sequence is synthesized)
gcctggaggccaagaacttgggcttcaactgcaccacaagccaaggcaaggtagccctgggcagccttttccatggcctggatgtggtattccttcagccaacctccttgacgttactgt

SEQ ID NO: 706349 - DNA, 120 bp, Artificial Sequence
  ENSG00000196547_28 (sequence is synthesized)
accctctggcctccccgtccaacagcactgacgtctatttggagcccatggagattgctacctttcgcctccgcttgggttagggcttcttgtggcctgaagagaaagttcattcacaga

SEQ ID NO: 706350 - DNA, 120 bp, Artificial Sequence
  ENSG00000196547_29 (sequence is synthesized)
gactgcctcttaacatgaagatcattggacaagccacacgggtatcccatcccgatctgcctcccagaactgtgacacactgggctctgccctcattttctgtttattgctgctgctgtg

SEQ ID NO: 706351 - DNA, 120 bp, Artificial Sequence
  ENSG00000196547_30 (sequence is synthesized)
ttttcggcgcaacccacaaacccagtgatgggtaaatagggcagacgccagtgagatcagggagagaaggcccttggtcagagtgggcagtgccaggctctgctttgggttgtgagtgga

SEQ ID NO: 706352 - DNA, 120 bp, Artificial Sequence
  ENSG00000196547_31 (sequence is synthesized)
cacccaactgggcacaggctcaggcacccatcctttttccaaacagggatatagaagtggtggaagcagacagaagaggtaagggaggctaagtgggtaacagcccagcatcagggtcac

SEQ ID NO: 706353 - DNA, 120 bp, Artificial Sequence
  ENSG00000196547_32 (sequence is synthesized)
tgtggcaacagcaggctctaggggaatcctgtggttatgtagagactccatgtcctggtgtgatgagcaggatcagagtgactctgggaggacaggggtggggacccagagttagcagtg

SEQ ID NO: 706354 - DNA, 120 bp, Artificial Sequence
  ENSG00000196547_33 (sequence is synthesized)
gggatggagcagtagaaggaatcactgtttctcctaggagtctgaaggcctcgctgctttctgtgatggctttgcagtaagtgccgcctggcctgcatgcattggctaacaggctgcaga

SEQ ID NO: 706355 - DNA, 120 bp, Artificial Sequence
  ENSG00000196547_34 (sequence is synthesized)
atggcaggaaggactcgctagagattgtcatggccagagatcataggtcacttcaggtagcaagacccctggcaaactgggcacttggcctatgtactgatttgtgggatggtggcaggg

SEQ ID NO: 706356 - DNA, 120 bp, Artificial Sequence
  ENSG00000196547_35 (sequence is synthesized)
gtgtggggtccttcaccctgcctgaattctctttggcttctgtgctctgtatgctgctgtccccaagggctctttcttattatggcagggagtggggattggtcctactttctttctctg

SEQ ID NO: 706357 - DNA, 120 bp, Artificial Sequence
  ENSG00000196547_36 (sequence is synthesized)
gaaaggaaagcctccaagactccatgtgcttgggcagcttgagaaggcgttcagcaccacgcctagcaggcagaccttgaagcctcacctttagtctatctgcagaggtattcagttcct

SEQ ID NO: 706358 - DNA, 120 bp, Artificial Sequence
  ENSG00000196547_37 (sequence is synthesized)
ggcacaggggactaggggcatgtagagtatatgaggaggcagtatggctgtgcaggagccttcatttcagcttcaattaatagggaagaatttatgatagctctatagatgctgaaaagg

SEQ ID NO: 706359 - DNA, 120 bp, Artificial Sequence
  ENSG00000196547_38 (sequence is synthesized)
tatttcgtaagatttaaaatccatcccttattaaaactcttagtaaattaagtctggaaagaaacaccctaatctagataaaggtctgtttcagaaaccaacagtgatggcattctaaag

SEQ ID NO: 706360 - DNA, 120 bp, Artificial Sequence
  ENSG00000196547_39 (sequence is synthesized)
agtcagacgccacaggcattcccattaaagtcagaaactagccaagggcaagctattattcagcagtgtcccggcactactaacccctgcaacaagccagatgaggaacataaggaagaa

SEQ ID NO: 706361 - DNA, 120 bp, Artificial Sequence
  ENSG00000196547_40 (sequence is synthesized)
ttataattgtcattatttgtagacaataaaactgcctacctgtaaaacctaagaatcaactgaagacctgttaagagtattctgtaagtcaacccaatgatacacatcatgttcctgtcc

SEQ ID NO: 706362 - DNA, 120 bp, Artificial Sequence
  ENSG00000196547_41 (sequence is synthesized)
acatactggttttccccaaatcagctgataaattcagtgtaattccaatgagattgaaactttggaattgacagttctaaagtgcatttgggagagtgaatgtgtgagaacactaagacc

SEQ ID NO: 706363 - DNA, 120 bp, Artificial Sequence
  ENSG00000196547_42 (sequence is synthesized)
actctgaacgatgataatgagttggggggtggactgctcgggggtgatcctgccagattcccagaggattctcacgccaccattacctcactcagtgtgacctggagggggtcagacaga

SEQ ID NO: 706364 - DNA, 120 bp, Artificial Sequence
  ENSG00000196547_43 (sequence is synthesized)
cgggagagtccagaaacagacccagggctacaggaatttagtatatggtaagagggatgttttaagtggggaaaaaggtggattatttaataaacagcacttttagacaactagctatca

SEQ ID NO: 706365 - DNA, 76 bp, Artificial Sequence
  ENSG00000196547_44 (sequence is synthesized)
aaaccctgtgtctactaaaaatacaaaaactagccaggaatggtggcgcgcatcaacctgggaggcggaggttgca

SEQ ID NO: 706366 - DNA, 120 bp, Artificial Sequence
  ENSG00000196547_45 (sequence is synthesized)
ccactgcactccagcctgggtgacacagccaaaaaaaaaaccactaagttagatctctacctcacagtgtccatacaaattagttccagagggaagatataccacaaaattactcaaaaa

SEQ ID NO: 706367 - DNA, 120 bp, Artificial Sequence
  ENSG00000196547_46 (sequence is synthesized)
accacaaaattactcaaaaatttttatacctctggtgtgggacggtcttttctaaactttaacatgagacttaaaagatataataagggaaaagataagcagatttcgcaaccaaaaaat

SEQ ID NO: 706368 - DNA, 120 bp, Artificial Sequence
  ENSG00000196547_47 (sequence is synthesized)
atcgaaagtctctgtgtgatggaaaacatcaaggttaaaacacaaatgacagatatggaagaaaatatttgcagcacataaaaaaatcaacgagtacaattactttaggagaaaagcttg

SEQ ID NO: 706369 - DNA, 120 bp, Artificial Sequence
  ENSG00000196547_48 (sequence is synthesized)
cttcagggtccttagagaaagtcactggggcctgccaagctgccacctaaagacaagagtgagagggctgagttcttccaggtcatcagagttgttgctgcccgtattaggccacacagt

SEQ ID NO: 706370 - DNA, 120 bp, Artificial Sequence
  ENSG00000196547_49 (sequence is synthesized)
ggaaccccatttatatcatagcagaagaaataggattatcaatgtgaactgcttagcatggtgcctggtatatacgagagctccacaaatgtgagctataatcctactagtaaaggatgc

SEQ ID NO: 706371 - DNA, 120 bp, Artificial Sequence
  ENSG00000196547_50 (sequence is synthesized)
taagcagttccactgtggcaggtgtcatttgctagtagaatttgtaatcaaacaataggaggggaatctgtgaacgcctagaaaatgagcagaataaaggatattatctttggaagtctt

SEQ ID NO: 706372 - DNA, 120 bp, Artificial Sequence
  ENSG00000196547_51 (sequence is synthesized)
agatcgcgctaagtagggcacaacgcagaggcgacaaagctcctcggccccagggcccgcggagcagactccggagcgcggtcccgcccacgctcggctccgcagttagcgtcctccttc

SEQ ID NO: 706373 - DNA, 80 bp, Artificial Sequence
  ENSG00000196547_52 (sequence is synthesized)
gtgggcgggcgcccgccttcgcctgcgtcgctgcctgcacgcgggccgccgtccccgggcgtgtgagagccggcagctcg

SEQ ID NO: 706374 - DNA, 120 bp, Artificial Sequence
  ENSG00000196547_53 (sequence is synthesized)
ggccggagccgggtgaggccgcggagaacgcaccccgctacgcgtctgccgagacggaggcgggcgtttcgaccactgcccgatcatgcgcttactcaactccacccacattggcctaga

SEQ ID NO: 706375 - DNA, 120 bp, Artificial Sequence
  ENSG00000196547_54 (sequence is synthesized)
gagtgactcagcttctgtctctcgagctgcgcttttccgtcagggcctgtggcttgggattctcctttgaaagccacctgacctccatgtacctgaacgccccggcgctcgctctgcctg

SEQ ID NO: 706376 - DNA, 120 bp, Artificial Sequence
  ENSG00000196547_55 (sequence is synthesized)
tcaaatatcacttgagaatcataaagtctgatgaggaagaaagggcaaatcagatcacctccactttggaggaggggcagaggcccagcgggtgcaggggcttgctcaagccctctgtta

SEQ ID NO: 706377 - DNA, 120 bp, Artificial Sequence
  ENSG00000196547_56 (sequence is synthesized)
gctttcaggtgactcctgggcctgggtctcggagaccccacagagtagaacttggactctgcttttgcccctgtcacaggccctgggggatgatctgccctgatggagaaagatgaatga

SEQ ID NO: 706378 - DNA, 120 bp, Artificial Sequence
  ENSG00000196547_57 (sequence is synthesized)
gaggcgaagagttatcggggactccttcagtctggggaccgcttgggcccacatggtgcccgggtgcccttgatctgctggccttgcccccacaggtgcagccccgacggtatctgaaga

SEQ ID NO: 706379 - DNA, 120 bp, Artificial Sequence
  ENSG00000196547_58 (sequence is synthesized)
tacgtccccaaggagccccccgtgctgcgtgtcactgaaggccctttcttctcagaggtggttgcgtactatgagcacattcaccaggcggtccggctttacaatctgccaggtgcagcc

SEQ ID NO: 706380 - DNA, 120 bp, Artificial Sequence
  ENSG00000196547_59 (sequence is synthesized)
gcattctctaagcctgtgctccaaccccgctcatctcatggctttctttgccccaccagcctgactttttctccaaactggcagccatgtttaggggcttgatctttcacagcagcagga

SEQ ID NO: 706381 - DNA, 120 bp, Artificial Sequence
  ENSG00000196547_60 (sequence is synthesized)
gagtgactcagcttctgtctctcgagctgcgcttttccgtcagggcctgtggcttgggattctcctttgaaaggtcagtgcctgcttgggggtgggggcgggccagcactcactgtttgc

SEQ ID NO: 706382 - DNA, 120 bp, Artificial Sequence
  ENSG00000196547_61 (sequence is synthesized)
tccctcagcgtgacatgctgagagcagagttctgatggtgtccctccctgctcagctccttccttagcctccaggatgaggtccagaccccttagcaggtattcggctccaaacctccag

SEQ ID NO: 706383 - DNA, 120 bp, Artificial Sequence
  ENSG00000196547_62 (sequence is synthesized)
gaccaggttttggcctttccttacccacacgcctccctgtgccagcactgcctctgggcagaggcgctgctgcatctccgatctctgaaagccctgcgcccacttccctgggcactgtct

SEQ ID NO: 706384 - DNA, 120 bp, Artificial Sequence
  ENSG00000196547_63 (sequence is synthesized)
gtcatccaggaggacaccctaccctcggcggagaccgcactcatcttacaccgcaagggttttgactgcggcctggaggccaagaacttgggcttcaactgcaccacaagccaaggcaag

SEQ ID NO: 706385 - DNA, 120 bp, Artificial Sequence
  ENSG00000196547_64 (sequence is synthesized)
agtttgacccgaaagggcactgagaaaggctttcctatcagtctctttgggttctggctaaacttttaaatcaaacaaaatagagactagcttattcacctgaaactagaagcacatggc

SEQ ID NO: 706386 - DNA, 120 bp, Artificial Sequence
  ENSG00000196547_65 (sequence is synthesized)
cgaggagcctgaacaggcacctcctatctaggcagggaagctgtgtaatcaggagcttgtgtggtgcgctccagtcggagctgggactcttatcctgggcccgtttttcatagcaccagc

SEQ ID NO: 706387 - DNA, 120 bp, Artificial Sequence
  ENSG00000196547_66 (sequence is synthesized)
ggctctcaggcccctctgccccagcatgtgctgaaccagtgcagggcgcttgccctggtcggaagcagcagcctcctgggtcagcccaccttctacgcacaggtttgtggtcctattcaa

SEQ ID NO: 706388 - DNA, 120 bp, Artificial Sequence
  ENSG00000196547_67 (sequence is synthesized)
gtttcctctccgtgtcattgactctggcaccagcgacttcgccctcagcaaccgctacatgcaggtctggttctcaggccttactgggctcctcaagccctacgtccccaaggagccccc

SEQ ID NO: 706389 - DNA, 120 bp, Artificial Sequence
  ENSG00000196547_68 (sequence is synthesized)
ctttgctgccacccacagcctagagttcatgtggaggcagacatgggccctaggtccagttacagcctcgcggtctatcagggctgcctttagcctgaacagatccttgcccccctggcg

SEQ ID NO: 706390 - DNA, 120 bp, Artificial Sequence
  ENSG00000196547_69 (sequence is synthesized)
tccagaggctgcctgctggtggtgaccacgtggtgtgtctcctgcagactcggactccagcacagacatcttctgtcacatgatgcccttctacagctatgacgtcccccatacctgtgg

SEQ ID NO: 706391 - DNA, 120 bp, Artificial Sequence
  ENSG00000196547_70 (sequence is synthesized)
atgagttctgtgcccagtgcagccgctggtccacacctgggacaggtggggtgggaggaggctgagcccatgatggttcttcccttccggctcactgaattccaggatgacactcgctta

SEQ ID NO: 706392 - DNA, 120 bp, Artificial Sequence
  ENSG00000196547_71 (sequence is synthesized)
aaacagccaagaaaagtctgtgtcttgttcactcgctggcaggaaacatagagcaggcacggaaaggaaagggactcgaggaatgcgctgtaccgacaggaggcagcacccctttgcccg

SEQ ID NO: 706393 - DNA, 120 bp, Artificial Sequence
  ENSG00000196547_72 (sequence is synthesized)
cagggacagaagtccagaatattcagcccaggcctgtgagtctgacgtccaggtgagctgctaaggagtagccctgctggcagagccccggccgcgctgggcctgagagccaggctggca

SEQ ID NO: 706394 - DNA, 120 bp, Artificial Sequence
  ENSG00000196547_73 (sequence is synthesized)
ggccttactgggctcctcaaggtaaaaggccagggtggtggggaagggccaggggccagagtagggcgtgtgtggtggtggcactgtgcagagcggcctcccggccctgtgagcattctg

SEQ ID NO: 706395 - DNA, 120 bp, Artificial Sequence
  ENSG00000196547_74 (sequence is synthesized)
ccacctgacccacagtggaccggggcctgggccatctcagctccagcctgacagcatggggaagcagggcacggctccttggggaagctattccgtgtcctcccaggaggcaggcctgac

SEQ ID NO: 706396 - DNA, 120 bp, Artificial Sequence
  ENSG00000196547_75 (sequence is synthesized)
cagctgagcactgggccccgtctctcccttcccagggggccttcggcgtcactgcaggcttcctaggggtcccctaagtgctctgcaaaccgcggctggaagtttcccactgcagtgaac

SEQ ID NO: 706397 - DNA, 120 bp, Artificial Sequence
  ENSG00000196547_76 (sequence is synthesized)
agtagagaaacagggagaacacacagggcttgctttatgctagaaacacaagcatctttcttctttattagaaagaaactcattctgtgtttctgagaaaggatcgtgccaggcactgtt

SEQ ID NO: 706398 - DNA, 120 bp, Artificial Sequence
  ENSG00000196549_0 (sequence is synthesized)
tgggggctgggaatttgccattctgctgtacagacactgatttttttttcttctttttaaaaagcaagattttaggtgatgggcaagtcagaaagtcagatggatataactgatatcaac

SEQ ID NO: 706399 - DNA, 120 bp, Artificial Sequence
  ENSG00000196549_1 (sequence is synthesized)
actccaaagccaaagaagaaacagcgatggactccactggagatcagcctctcggtccttgtcctgctcctcaccatcatagctgtgacaatgatcgcactctatgcaacctacgatgat

SEQ ID NO: 706400 - DNA, 120 bp, Artificial Sequence
  ENSG00000196549_2 (sequence is synthesized)
ggtatttgcaagtcatcagactgcataaaatcagctgctcgactgatccaaaacatggatgccaccactgagccttgtacagactttttcaaatatgcttgcggaggctggttgaaacgt

SEQ ID NO: 706401 - DNA, 120 bp, Artificial Sequence
  ENSG00000196549_3 (sequence is synthesized)
aatgtcattcccgagaccagctcccgttacggcaactttgacattttaagagatgaactagaagtcgttttgaaagatgtccttcaagaacccaaaactgaagatatagtagcagtgcag

SEQ ID NO: 706402 - DNA, 120 bp, Artificial Sequence
  ENSG00000196549_4 (sequence is synthesized)
aaagcaaaagcattgtacaggtcttgtataaatgaatctgctattgatagcagaggtggagaacctctactcaaactgttaccagacatatatgggtggccagtagcaacagaaaactgg

SEQ ID NO: 706403 - DNA, 120 bp, Artificial Sequence
  ENSG00000196549_5 (sequence is synthesized)
gagcaaaaatatggtgcttcttggacagctgaaaaagctattgcacaactgaattctaaatatgggaaaaaagtccttattaatttgtttgttggcactgatgataagaattctgtgaat

SEQ ID NO: 706404 - DNA, 120 bp, Artificial Sequence
  ENSG00000196549_6 (sequence is synthesized)
catgtaattcatattgaccaacctcgacttggcctcccttctagagattactatgaatgcactggaatctataaagaggcttgtacagcatatgtggattttatgatttctgtggccaga

SEQ ID NO: 706405 - DNA, 120 bp, Artificial Sequence
  ENSG00000196549_7 (sequence is synthesized)
ttgattcgtcaggaagaaagattgcccatcgatgaaaaccagcttgctttggaaatgaataaagttatggaattggaaaaagaaattgccaatgctacggctaaacctgaagatcgaaat

SEQ ID NO: 706406 - DNA, 120 bp, Artificial Sequence
  ENSG00000196549_8 (sequence is synthesized)
gatccaatgcttctgtataacaagatgacattggcccagatccaaaataacttttcactagagatcaatgggaagccattcagctggttgaatttcacaaatgaaatcatgtcaactgtg

SEQ ID NO: 706407 - DNA, 120 bp, Artificial Sequence
  ENSG00000196549_9 (sequence is synthesized)
atattctgccagagatcttcaaaatttaatgtcctggagattcataatggatcttgtaagcagcctcagccgaacctacaaggagtccagaaatgctttccgcaaggccctttatggtac

SEQ ID NO: 706408 - DNA, 120 bp, Artificial Sequence
  ENSG00000196549_10 (sequence is synthesized)
aacctcagaaacagcaacttggagacgttgtgcaaactatgtcaatgggaatatggaaaatgctgtggggaggctttatgtggaagcagcatttgctggagagagtaaacatgtggtcga

SEQ ID NO: 706409 - DNA, 120 bp, Artificial Sequence
  ENSG00000196549_11 (sequence is synthesized)
ggatttgattgcacagatccgagaagtttttattcagactttagatgacctcacttggatggatgccgagacaaaaaagagagctgaagaaaaggccttagcaattaaagaaaggatcgg

SEQ ID NO: 706410 - DNA, 120 bp, Artificial Sequence
  ENSG00000196549_12 (sequence is synthesized)
ctatcctgatgacattgtttcaaatgataacaaactgaataatgagtacctcgagttgaactacaaagaagatgaatacttcgagaacataattcaaaatttgaaattcagccaaagtaa

SEQ ID NO: 706411 - DNA, 120 bp, Artificial Sequence
  ENSG00000196549_13 (sequence is synthesized)
acaactgaagaagctccgagaaaaggtggacaaagatgagtggataagtggagcagctgtagtcaatgcattttactcttcaggaagaaatcagatagtcttcccagccggcattctgca

SEQ ID NO: 706412 - DNA, 120 bp, Artificial Sequence
  ENSG00000196549_14 (sequence is synthesized)
gccccccttctttagtgcccagcagtccaactcattgaactatgggggcatcggcatggtcataggacacgaaatcacccatggcttcgatgacaatggcagaaactttaacaaagatgg

SEQ ID NO: 706413 - DNA, 120 bp, Artificial Sequence
  ENSG00000196549_15 (sequence is synthesized)
agacctcgttgactggtggactcaacagtctgcaagtaactttaaggagcaatcccagtgcatggtgtatcagtatggaaacttttcctgggacctggcaggtggacagcaccttaatgg

SEQ ID NO: 706414 - DNA, 120 bp, Artificial Sequence
  ENSG00000196549_16 (sequence is synthesized)
aattaatacactgggagaaaacattgctgataatggaggtcttggtcaagcatacagagcctatcagaattatattaaaaagaatggcgaagaaaaattacttcctggacttgacctaaa

SEQ ID NO: 706415 - DNA, 120 bp, Artificial Sequence
  ENSG00000196549_17 (sequence is synthesized)
tcacaaacaactatttttcttgaactttgcacaggtgtggtgtggaacctataggccagagtatgcggttaactccattaaaacagatgtgcacagtccaggcaatttcaggattattgg

SEQ ID NO: 706416 - DNA, 120 bp, Artificial Sequence
  ENSG00000196549_18 (sequence is synthesized)
gactttgcagaactctgcagagttttcagaagcctttcactgccgcaagaattcatacatgaatccagaaaagaagtgccgggtttggtgatcttcaaaagaagcattgcagcccttggc

SEQ ID NO: 706417 - DNA, 120 bp, Artificial Sequence
  ENSG00000196549_19 (sequence is synthesized)
gagagcgccgagacgcgcggggcgcggagatgtgcaagtggcgaagcttgaccgagagcaggctggagcagccgcccaactcctggcgcgggatctgctgaggggtcacgattttaggtg

SEQ ID NO: 706418 - DNA, 120 bp, Artificial Sequence
  ENSG00000196549_20 (sequence is synthesized)
cattaggttgtcctagaaagggtgtggagggaggaagggggtctaaggtctatcaagtcaatcatttctcactgtgtacataatgcttaatttctaaagataatattactgtttatttct

SEQ ID NO: 706419 - DNA, 120 bp, Artificial Sequence
  ENSG00000196549_21 (sequence is synthesized)
gtttctcatatggtctaccagtttgctgatgtccctagaaaacaatgcaaaacctttgaggtagaccaggatttctaatcaaaagggaaaagaagatgttgaagaatacagttaggcacc

SEQ ID NO: 706420 - DNA, 120 bp, Artificial Sequence
  ENSG00000196549_22 (sequence is synthesized)
ttcttatacacattggggccttggagcttacatagttttaaactcatttttgccatacatcagttattcattctgtgatcatttattttaagcactcttaaagcaaaaaatgaatgtcta

SEQ ID NO: 706421 - DNA, 120 bp, Artificial Sequence
  ENSG00000196549_23 (sequence is synthesized)
aaattgttttttgttgtacctgctttgactgatgctgagattcttcaggcttcctgcaattttctaagcaatttcttgctctatctctcaaaacttggtatttttcagagatttatataa

SEQ ID NO: 706422 - DNA, 120 bp, Artificial Sequence
  ENSG00000196549_24 (sequence is synthesized)
atatttaattattaactacatttatgagtaactattattataggtaatcaatgaatattgaagtttcagcttaaaataaacagttgtgaaccaagatctataaagcgatatacagatgaa

SEQ ID NO: 706423 - DNA, 120 bp, Artificial Sequence
  ENSG00000196549_25 (sequence is synthesized)
taaagcgatatacagatgaaaatttgagactatttaaacttataaatcatattgatgaaaagatttaagcacaaactttagggtaaaaattgccattggacagttgtctagagatatata

SEQ ID NO: 706424 - DNA, 120 bp, Artificial Sequence
  ENSG00000196549_26 (sequence is synthesized)
tacttgtggttttcaaattggactttcaaaattaaatctgtccctgagagtgtctctgataaaagggcaaatctgcacctatgtagctctgcatctcctgtcttttcaggtttgtcatca

SEQ ID NO: 706425 - DNA, 120 bp, Artificial Sequence
  ENSG00000196549_27 (sequence is synthesized)
gatggaaatattttgataataaattgaaattgtgaactcattgctccctaagactgtgacaactgtctaactttagaagtgcatttctgaatagaaatgggaggcctctgatggaccttc

SEQ ID NO: 706426 - DNA, 120 bp, Artificial Sequence
  ENSG00000196549_28 (sequence is synthesized)
tagaattataagtcacaaagagttctggaaaagaactgtttactgcttgataggaattcatcttttgaggcttctgttcctctcttttcctgttgtattgactattttcgttcattactt

SEQ ID NO: 706427 - DNA, 120 bp, Artificial Sequence
  ENSG00000196549_29 (sequence is synthesized)
gattaagattttacaaaagaggagcacttccaaaattcttatttttcctaacaaaagatgaaagcagggaatttctatctaaatgatgagtattagttccctgtctcttgaaaaatgccc

SEQ ID NO: 706428 - DNA, 120 bp, Artificial Sequence
  ENSG00000196549_30 (sequence is synthesized)
atttgcctttaaaaaaaaaagttacagaaatactataacatatgtacataaattgcataaagcataagtatacagttcaataaacttaactttaactgaacaatggccctgtagccagca

SEQ ID NO: 706429 - DNA, 120 bp, Artificial Sequence
  ENSG00000196549_31 (sequence is synthesized)
cctgtaagaaacagagcagtaccagcgctctaaaagcacctccttgtcactttattactcccagaacaacaactatcctgacttctaatatcattcactagctttgcctggttttgtctt

SEQ ID NO: 706430 - DNA, 120 bp, Artificial Sequence
  ENSG00000196549_32 (sequence is synthesized)
ttatgcagatagaatcaatcagtatgtattcttttgtgcctggcttctttctctcagccttacatttgtgagattcctctgtattgtgctgattgtggatcttttcattctcattgcaga

SEQ ID NO: 706431 - DNA, 120 bp, Artificial Sequence
  ENSG00000196549_33 (sequence is synthesized)
ataatgttctattgtgggacttattacaatttgttcatcctattgttgatgggcacttgagaactttccattttggcgctattacaaatagtgcaactatgaatgtactgcatgttacca

SEQ ID NO: 706432 - DNA, 120 bp, Artificial Sequence
  ENSG00000196549_34 (sequence is synthesized)
tcttacttgagcctttaatggacttatttcttcaaatccttccaaaaattattataagcattgaaattatagtttcaagccaactgtggatacccttaccctttcctcctttatcacaac

SEQ ID NO: 706433 - DNA, 120 bp, Artificial Sequence
  ENSG00000196549_35 (sequence is synthesized)
caccgttacaagtatacttatatttccctaaaatacatttaaaacttacctaagtgacatttgtagttggagtaataggagcttccagctctaataaaacagctgtctctaacttatttt

SEQ ID NO: 706434 - DNA, 120 bp, Artificial Sequence
  ENSG00000196549_36 (sequence is synthesized)
atttccatcatgtcagagcaggtgaagagccagaagtgaagagtgactagtacaaattataaaaagccactagactcttcactgttagctttttaaaacattaggctcccatccctatgg

SEQ ID NO: 706435 - DNA, 120 bp, Artificial Sequence
  ENSG00000196549_37 (sequence is synthesized)
aggaacaactctccagtgcctggatcccctctgtctacaaatataagattttctgggcctaaaggatagatcaaagtcaaaaatagcaatgcctccctatccctcacacatccagacatc

SEQ ID NO: 706436 - DNA, 120 bp, Artificial Sequence
  ENSG00000196549_38 (sequence is synthesized)
atgaattttacatggtactcttgttgagttctgtagagccttctgatgtctctaaagcactaccgattctttggagttgtcacatcagataagacatatctctaattccatccataaatc

SEQ ID NO: 706437 - DNA, 120 bp, Artificial Sequence
  ENSG00000196549_39 (sequence is synthesized)
cagttctactatggctgagttctggtcaaagaaagaaagtttagaagctgagacacaaagggttgggagctgatgaaactcacaaatgatggtaggaagaagctctcgacaatacccgtt

SEQ ID NO: 706438 - DNA, 120 bp, Artificial Sequence
  ENSG00000196549_40 (sequence is synthesized)
ggcaaggagtctgcctccatgctgcagtgttcgagtggattgtaggtgcaagatggaaaggattgtaggtgcaagctgtccagagaaaagagtccttgttccagccctattctgccactc

SEQ ID NO: 706439 - DNA, 120 bp, Artificial Sequence
  ENSG00000196549_41 (sequence is synthesized)
ctgacagggtgaccttgggtatttgcaatattcctttgggcctctgcttctctcacctaaaaaaagagaattagattatattggtggttctcagcaagagaaggagtatgtgtccaatgc

SEQ ID NO: 706440 - DNA, 120 bp, Artificial Sequence
  ENSG00000196549_42 (sequence is synthesized)
tgccttcccatgaatctgtctcccagttatgaatcagtgggcaggataaactgaaaactcccatttacgtgtctgaatcgagtgagacaaaattttagtccaaataacaagtaccaaagt

SEQ ID NO: 706441 - DNA, 120 bp, Artificial Sequence
  ENSG00000196549_43 (sequence is synthesized)
tttatcaagtttgggtctgtgctgctgttactgttaaccatttaagtggggcaaaaccttgctaattttctcaaaagcatttatcattcttgttgccacagctggagctctcaaactaaa

SEQ ID NO: 706442 - DNA, 120 bp, Artificial Sequence
  ENSG00000196549_44 (sequence is synthesized)
agacatttgttattttggaaagaagaaagactctattctcaaagtttcctaatcagaaatttttatcagtttccagtctcaaaaatacaaaataaaaacaaacgtttttaatactattgc

SEQ ID NO: 706443 - DNA, 120 bp, Artificial Sequence
  ENSG00000196549_45 (sequence is synthesized)
agagccagccgaggggagcggctgccgggaggtgcgctgagcagggtccgcagctaaggtccagcgcgatccgagcgcccaggaccctgcggccgtggaggaggcgtgccctgggaagga

SEQ ID NO: 706444 - DNA, 120 bp, Artificial Sequence
  ENSG00000196549_46 (sequence is synthesized)
gccgctactgggacctgaagagtgaggggagggagaggggcccagagggtgacctggaggagggctctggaagtcacgtcagattttaggtgatgggcaagtcagaaagtcagatggata

SEQ ID NO: 706445 - DNA, 120 bp, Artificial Sequence
  ENSG00000196549_47 (sequence is synthesized)
acattcctactgagtatgacgaatggttgttgatggttatcactggagattgaaaactgggattcctttttcaccaggaattggtgcctaccatggctggggatacacagtgatggattt

SEQ ID NO: 706446 - DNA, 120 bp, Artificial Sequence
  ENSG00000196549_48 (sequence is synthesized)
gtgacttgctcctctgaaagctggcccaagggtgtacagcatatgaatgtgggggagtttacactacacacgctcttggctattttaggtgatgggcaagtcagaaagtcagatggatat

SEQ ID NO: 706447 - DNA, 120 bp, Artificial Sequence
  ENSG00000196549_49 (sequence is synthesized)
aagtagtagattaattaacttgtttactctgaaaaatatattactattttcagccctgggctgtatagcagggcaatagaaaactatatcgctatttgtatggagcttgccatgtagttg

SEQ ID NO: 706448 - DNA, 120 bp, Artificial Sequence
  ENSG00000196549_50 (sequence is synthesized)
aagaaagaaaatgaacacatatgaaatggtaagtttcgtatcattgtgttaaatgtctcagtgcacctcactaggtgggtgagaagaagggagtgagatgtaggcatgtaaatctaggtg

SEQ ID NO: 706449 - DNA, 89 bp, Artificial Sequence
  ENSG00000196549_51 (sequence is synthesized)
gagaagaagggagtgagatgtaggcatgtaaatctaggtggagaagttaaaatctgggaagaaatttcagagacagagtctcgctctgt

SEQ ID NO: 706450 - DNA, 120 bp, Artificial Sequence
  ENSG00000196549_52 (sequence is synthesized)
gtagagcagcactaaccaggggagtaatatggttggcacttcgtgtccagaactccgtatttcaggctgggaaacacctaattaatgtctgggaaacaagaagatgatttatcctgagta

SEQ ID NO: 706451 - DNA, 120 bp, Artificial Sequence
  ENSG00000196549_53 (sequence is synthesized)
cctctgtcctcagcttctgcagacacagtttaaatatggaaactgtttctccttcttcctgtgcctcagtttccatagaacaaactgtaattgcatagcacagcttcaggaacctgcaga

SEQ ID NO: 706452 - DNA, 120 bp, Artificial Sequence
  ENSG00000196549_54 (sequence is synthesized)
agcctggagcccgcgcgccttgggcggatgcacggactgagaggcgcttggctgggctctcagcccgccactgccacccggccccgtgcgctcattggtcgggatgtgtcggctcagcag

SEQ ID NO: 706453 - DNA, 120 bp, Artificial Sequence
  ENSG00000196549_55 (sequence is synthesized)
ggtgacctggaggagggctctggaagtcacgtcaggttggctcttcaggttcatttccatagttccctgcggcctctgccttggggagttatgttttgttaccgagatccgcgctaccag

SEQ ID NO: 706454 - DNA, 120 bp, Artificial Sequence
  ENSG00000196549_56 (sequence is synthesized)
caagattgcacgactgcactccagcctggaagacagcgcaagactctatctccaaaaaaaagaaaaagacaacagagaattgaggggtctgcagaagcatatgttagaagtgtggtccta

SEQ ID NO: 706455 - DNA, 120 bp, Artificial Sequence
  ENSG00000196549_57 (sequence is synthesized)
tggtcctaaattatccagaggccagagaagccaagctaagacgtgatcaatacagtttacaagagaaagtgggaccacctccacctgtatagtcatgcaggttgtacactgcatatttgt

SEQ ID NO: 706456 - DNA, 120 bp, Artificial Sequence
  ENSG00000196549_58 (sequence is synthesized)
cgatggcagccttgacagacaggcttgtggaacatcaagacctggatgaaacacctctcagaactgtccactccttttattttaattctgcacataccaagaaaacttttgatgattact

SEQ ID NO: 706457 - DNA, 120 bp, Artificial Sequence
  ENSG00000196549_59 (sequence is synthesized)
taattattaatacaaggagaggtggcattctgttacttgaaagatattttcatcatggtgagataatgcacagcggtccccttcttatcctctgaggatcccccaagacctcagtggatg

SEQ ID NO: 706458 - DNA, 84 bp, Artificial Sequence
  ENSG00000196549_60 (sequence is synthesized)
cttcttatcctctgaggatcccccaagacctcagtggatgtctgacactggactgaaccctatatatgctatattttttctgta

SEQ ID NO: 706459 - DNA, 120 bp, Artificial Sequence
  ENSG00000196549_61 (sequence is synthesized)
gaccattttcagaatgttgtctaaccagttaatagatactggtatcagtagtagtagtaattttgaactgtaaaaataaaggttgtttttatgactaaaataaactacttcatgtgttca

SEQ ID NO: 706460 - DNA, 120 bp, Artificial Sequence
  ENSG00000196549_62 (sequence is synthesized)
ataaaggaagccactggagcaagatataaaattaaccattgatgttagtccagagttcaaaaggattttaggtgatgggcaagtcagaaagtcagatggatataactgatatcaacactc

SEQ ID NO: 706461 - DNA, 120 bp, Artificial Sequence
  ENSG00000196549_63 (sequence is synthesized)
gcctgaaattccaaaatgaaataatatgaaataatatttattagtacgtataggggctgggtaacatgctcaaagttacagaggcagaaaaccataaggtgtctcacagaaactgaatat

SEQ ID NO: 706462 - DNA, 120 bp, Artificial Sequence
  ENSG00000196549_64 (sequence is synthesized)
actcatttaactgtgacagatggctcatgcgagaaagtagcaaaggagaagcttcattcgttctattagtgttagaatgtgctatggaatctggattttattatgattgcaaaaggatgg

SEQ ID NO: 706463 - DNA, 120 bp, Artificial Sequence
  ENSG00000196549_65 (sequence is synthesized)
gtattttgagaatatgaatctgcctgtggagtacagaatggacataggtaagaagaggcctggggccacaactttgtcaaaagggcacaaatagagtctgagagaaagagggtttgagac

SEQ ID NO: 706464 - DNA, 120 bp, Artificial Sequence
  ENSG00000196549_66 (sequence is synthesized)
tgctgataatggaggtcttggtcaagcatacagagtaagtaaaaaagattttctttccattttagtgatttagagtgtttctcatatttaataattcatttaaaaccttttgcaaaaaaa

SEQ ID NO: 706465 - DNA, 120 bp, Artificial Sequence
  ENSG00000196549_67 (sequence is synthesized)
aacaaaaaacaaaaggttgtgactgagacctgtcaaattcatttggctctatatactttgcattcagcaacaaaattttgacttctcaacagcaaaaatattttaggtgatgggcaagtc

SEQ ID NO: 706466 - DNA, 120 bp, Artificial Sequence
  ENSG00000196549_68 (sequence is synthesized)
tcaactggtataagaattgctgctttacattgctttgaaattaagcttacacttaaaatagtaatttattctgttggtaatattgtcgagctgaagtttgcaggttcttgttatcttaga

SEQ ID NO: 706467 - DNA, 120 bp, Artificial Sequence
  ENSG00000196549_69 (sequence is synthesized)
cctcctaattctctattctcgtctgtggcagtgtccacttttccgtttaaactttttatttaacacatcttcagttgaagtgaaatattttaagaatacaggtatgtttttgcgtaccct

SEQ ID NO: 706468 - DNA, 120 bp, Artificial Sequence
  ENSG00000196549_70 (sequence is synthesized)
attttttttttttttgtattcttttgtttacttgtcccccttactcttctctatgggattgggtgtggttaagttggatattcaggtatttggggtttagtcatatgttccacagtgaga

SEQ ID NO: 706469 - DNA, 120 bp, Artificial Sequence
  ENSG00000196549_71 (sequence is synthesized)
tgtcttaaagaaaaattgtgaaccttccagaattaactggaaatgaacgacaaagttaattaggagattaaacttgcatcatttctgcttttgctcaatgcttttgaaaaaaggctacta

SEQ ID NO: 706470 - DNA, 120 bp, Artificial Sequence
  ENSG00000196549_72 (sequence is synthesized)
agagcaaaagacttcctttaagaatttacagggcatttacaagagggggagatggaggaagactttgcagattttaggtgatgggcaagtcagaaagtcagatggatataactgatatca

SEQ ID NO: 706471 - DNA, 120 bp, Artificial Sequence
  ENSG00000196550_0 (sequence is synthesized)
ggcaggaaaagcggaagagggagcgaaaaccaacgtgttcggtgacagaccccagcgccgactgagcctctaaagcgacttcagctctgccccaccaacaccaccgcgcgcccgggaaca

SEQ ID NO: 706472 - DNA, 120 bp, Artificial Sequence
  ENSG00000196550_1 (sequence is synthesized)
gccgctccgggaagaaacctgaggggactgcggggggcacgagggacagctgagggaagggaggacgcgagagaaacagcgcgagcacgctgagggccgggggttgccaggagaggggcc

SEQ ID NO: 706473 - DNA, 120 bp, Artificial Sequence
  ENSG00000196550_2 (sequence is synthesized)
cgcggacccgcagagcggaggaaggtccgggagaaaaggggcgggacggaggagaatccgggatcgcctggcagaaaaagagaagggagtttctgaatcctgggaagaggaggcgtgggt

SEQ ID NO: 706474 - DNA, 120 bp, Artificial Sequence
  ENSG00000196550_3 (sequence is synthesized)
agggacgcttagcccgagatccgacagcagggaaccggagcgctccgggggaggggcttaatgctggggaagggatgtcttaaaagaggagaagctttaaattagacgatcggagaaggc

SEQ ID NO: 706475 - DNA, 120 bp, Artificial Sequence
  ENSG00000196550_4 (sequence is synthesized)
tgagggaattgctatgaaggggcgggagctgaagtgtagaggactcctttagacagcagaaagggaaagccgttgagaagttcccttcaaactccacctgcctcctctccaattcaaact

SEQ ID NO: 706476 - DNA, 120 bp, Artificial Sequence
  ENSG00000196550_5 (sequence is synthesized)
ccactcccttctccaaaagttaaaaggaaagccaagtttgccacgctcccctgttcctactcaataaatacttcttctactccgccaccgggaaaacagaaaaaaaaactaatttccttc

SEQ ID NO: 706477 - DNA, 120 bp, Artificial Sequence
  ENSG00000196550_6 (sequence is synthesized)
ccaatattaggacttagaaaagctctaggtcccgcaatttgaattttagcctaggggaatcaaaatagtaggagcattactcttgtttcctttttcaaaatcccacacctcatccttcct

SEQ ID NO: 706478 - DNA, 120 bp, Artificial Sequence
  ENSG00000196550_7 (sequence is synthesized)
gcgacgccatgtctaccaacatttgtagtttcaaggacaggtgcgtgtccatcctgtgttgcaaattctgtaaacaagtgctcagctctaggggaatgaaggctgttttgctggctgata

SEQ ID NO: 706479 - DNA, 120 bp, Artificial Sequence
  ENSG00000196550_8 (sequence is synthesized)
ctgaaatagaccttttctctacagacatccctcctaccaacgcagtggacttcactggaagatgctatttcaccaaaatctgcaaatgtaaactgaaggacatcgcatgtttaaaatgtg

SEQ ID NO: 706480 - DNA, 120 bp, Artificial Sequence
  ENSG00000196550_9 (sequence is synthesized)
cacaggtgtaaacgtcctactttggggcaacttgccagagatagaagagagtacagatgaagatgtgttaaatatctcagcagaggagtgtattagataaatggaattatgatatatatg

SEQ ID NO: 706481 - DNA, 120 bp, Artificial Sequence
  ENSG00000196550_10 (sequence is synthesized)
atatacaaacttttttctatttaaaaatatattaatggatcaactttaaaattgttagttgccagtgatcttttttggaaaacaaaaatggggcatttgttgatttatttattttccgtc

SEQ ID NO: 706482 - DNA, 120 bp, Artificial Sequence
  ENSG00000196550_11 (sequence is synthesized)
tctaattagttacctcagtttgattgaagccagtgaagttgtgcttttcctctacttctacttcctctccccgacctttttctgcccagtgtaggtgtattcttaaattcagacagggga

SEQ ID NO: 706483 - DNA, 120 bp, Artificial Sequence
  ENSG00000196550_12 (sequence is synthesized)
agattctttcacatatcactcagttacctcccaatctgggggagtttttcttacaacttgataccagataccattaattttacattcctgaataaaggcctagtacccacgcatatttca

SEQ ID NO: 706484 - DNA, 120 bp, Artificial Sequence
  ENSG00000196550_13 (sequence is synthesized)
accatgcatatatcaagttcaaccgagttttaataggggattaaaaaaacaagctgttaggtttccatgggcactggttctcataggttctattggtgataactgctttaacatggagca

SEQ ID NO: 706485 - DNA, 120 bp, Artificial Sequence
  ENSG00000196550_14 (sequence is synthesized)
agagtttgtgaatcaggaaatagaataaattaaaatttaaaatatatagaggaatcctcttgattgctcagcatgatgttagataaatgagtttgtcagaaaatatcagtatacgctgtt

SEQ ID NO: 706486 - DNA, 120 bp, Artificial Sequence
  ENSG00000196550_15 (sequence is synthesized)
taccaatgttatttatttacattcttctaaagccattatggatattgtattatgagagctaaacctaaataagttatcctgttccctaggaccttctctgtaaatagtgaattttagacg

SEQ ID NO: 706487 - DNA, 120 bp, Artificial Sequence
  ENSG00000196550_16 (sequence is synthesized)
agtagtctgtcctaaatcttaaatagaaaaaaaactaaagcgatttgcttaagccattgtacattataaagagctgttttgttttgctttgctttgctttgttttgtttttttaaagctg

SEQ ID NO: 706488 - DNA, 120 bp, Artificial Sequence
  ENSG00000196550_17 (sequence is synthesized)
cattcagagccacaaaggaataggaaagtagggtagtgttggattctggttttatgtaactctaaaataaatgtatctctttaatatctcagttgtagggattttgtcaataccaaagca

SEQ ID NO: 706489 - DNA, 120 bp, Artificial Sequence
  ENSG00000196550_18 (sequence is synthesized)
gactgagttgtggttttgtaaataaagttttttctaaaaatgaccattcttcctttaattttttgttatgcccacatattgtatgtaaaaatataaataaatagtacttaaagtatagaa

SEQ ID NO: 706490 - DNA, 120 bp, Artificial Sequence; identical to SEQ ID NO: 693209
  ENSG00000196550_19 (sequence is synthesized)

SEQ ID NO: 706491 - DNA, 120 bp, Artificial Sequence
  ENSG00000196550_20 (sequence is synthesized)
gaaagggagaggcggctgggtgccggctgcgctgcggtccgtgagccaggacggagtcccaggctgtacagtgatgggcggagagactcgcagtcctgagaacgcagtggacttcactgg

SEQ ID NO: 706492 - DNA, 120 bp, Artificial Sequence
  ENSG00000196550_21 (sequence is synthesized)
ggaacaagacagggagcagaggcggcggggttcaggcgagcgggaagcgggaagcgagaggcgggtgtgagatggggtcctgaggctggaagggagcccggggacaattggagttgcaca

SEQ ID NO: 706493 - DNA, 120 bp, Artificial Sequence
  ENSG00000196550_22 (sequence is synthesized)
ctaccaagtaagtcatgctagtggcgggcaacggtagcttttaactaaatgggaacacttatggcttggatctgtgggagtcaacaaggaggttatcatttcggtgtttcagccactccc

SEQ ID NO: 706494 - DNA, 120 bp, Artificial Sequence
  ENSG00000196550_23 (sequence is synthesized)
accagtttgatgatccccttggaatatatctaagtgggcagactgtctggacaaagtctgtggtttagccaaggtggtcagtcctgatgtaatgcttctagttcaattgcagtcatgcga

SEQ ID NO: 706495 - DNA, 120 bp, Artificial Sequence
  ENSG00000196550_24 (sequence is synthesized)
ccacacatctcttaagtttgatccctggttcagtgccctgcccaaccatcctatttcactgaatcaagtccgtggcgtagactttaggtaaattcaggcaaaattttccgtactgttgga

SEQ ID NO: 706496 - DNA, 120 bp, Artificial Sequence
  ENSG00000196550_25 (sequence is synthesized)
gaggagaggtcatttaagtttttcatttttatccatgaaattttgcaccaaaaaaaaaaaaatccgttttctatcattatttgcaattggcatcctaaatcagatccgttgttcatcaaa

SEQ ID NO: 706497 - DNA, 120 bp, Artificial Sequence
  ENSG00000196550_26 (sequence is synthesized)
ttcagttttctttcctcaaaactctctctctctgaaagagatgtaaatagatttttatgggatgaaaaatagagacttagccttaatccttatctccaataaagactattttggacatta

SEQ ID NO: 706498 - DNA, 120 bp, Artificial Sequence
  ENSG00000196550_27 (sequence is synthesized)
gaggagcctccgccaactccgcaggaccccgccgggaagtagagcccacccctttaccaatcaccgcccgttttctatcgaccgatggggcccatagccaataggaagagctgatcccga

SEQ ID NO: 706499 - DNA, 120 bp, Artificial Sequence
  ENSG00000196550_28 (sequence is synthesized)
gaggcccggaatgagggggaggagctggcaaaacttggaggtgtgactagcactgccgaggcgtggtcacagattaagctccaccccgggttgttgaacccctaagtagaactgatgggc

SEQ ID NO: 706500 - DNA, 120 bp, Artificial Sequence
  ENSG00000196550_29 (sequence is synthesized)
gggattaaggtggaaccgacgaccaaacacaaactcttgagctaaggcacggccaattgggccggggtagagaggaggggtgttgcggggagttttaaccaataaagagtagagaccggt

SEQ ID NO: 706501 - DNA, 120 bp, Artificial Sequence
  ENSG00000196553_0 (sequence is synthesized)
gctgtagctaagatcagtccactgcagcaggagtttcaagaacagcagcacaaaaataatgacttaactggatagaaaaaaaggcacatattttcaggaaggcctctttattcttagaag

SEQ ID NO: 706502 - DNA, 120 bp, Artificial Sequence
  ENSG00000196553_1 (sequence is synthesized)
ttacccttcaagatgacaagtggtgcaaactcttcaggatcttacctgccctcagaaataagaagttctaaaatagatgacaactacttgaaggaattgaatgaggacttaaagctaagg

SEQ ID NO: 706503 - DNA, 120 bp, Artificial Sequence
  ENSG00000196553_2 (sequence is synthesized)
aagcaggaactgctagagatgctcaaacctctagaagataaaaacaacctcttatttcaaaagttaatgtctaacttggaggaaaaacaaaggagtcttcagatcatgagacagatcatg

SEQ ID NO: 706504 - DNA, 120 bp, Artificial Sequence
  ENSG00000196553_3 (sequence is synthesized)
gcagggaaggggtgtgaggaatcctcggtcatggagctccttaaggaagcagaggagatgaaacagaacttggaaaggaaaaacaagatgcttcggaaggaaatggagatgctatggaac

SEQ ID NO: 706505 - DNA, 120 bp, Artificial Sequence
  ENSG00000196553_4 (sequence is synthesized)
gatcaacaaaaagcaccacagacaaaaaacaaggcagacttgcaggatggaaaggctcccaaatccccctcatcacctaggaagactgagagtgaactggagaaatcatttgcagagaaa

SEQ ID NO: 706506 - DNA, 120 bp, Artificial Sequence
  ENSG00000196553_5 (sequence is synthesized)
gtgaaggagataaggaaggaaaagcaacagaggaaaatggaatgggtcaagtatcaggaacaaaataacatccttcagaatgattttcatggcaaagtgattgagctgagaattgaagcc

SEQ ID NO: 706507 - DNA, 120 bp, Artificial Sequence
  ENSG00000196553_6 (sequence is synthesized)
ttgaagaactaccagaaggccaatgacctgaaattatcactgtatttgcagcagaattttgagccaatgcaagcatttttaaatcttcctgggtcccaaggtactatgggcattacaact

SEQ ID NO: 706508 - DNA, 120 bp, Artificial Sequence
  ENSG00000196553_7 (sequence is synthesized)
atggacagagtgactactggcagaaatgaacaccatgtgagaattctgggaacaaagatctacacagaacaacaaggaactaaaggaagtcagcttgataatacaggagggagactcttt

SEQ ID NO: 706509 - DNA, 120 bp, Artificial Sequence
  ENSG00000196553_8 (sequence is synthesized)
tttctgaggtcattgccagatgaagcactgaagaattagcaggctttcgctccatttgctttggacagatttaaagactaggcacagccatttgtgttaattaaaatctctcgcaccttt

SEQ ID NO: 706510 - DNA, 120 bp, Artificial Sequence
  ENSG00000196553_9 (sequence is synthesized)
tagtgctgttttccctctctcccccgaccaatctgggtggaaatgttggatgtctggccttaaacatgtatggaatgtagtcatttagggattgtaaacaacctctgattattttgatag

SEQ ID NO: 706511 - DNA, 120 bp, Artificial Sequence
  ENSG00000196553_10 (sequence is synthesized)
ctctaaattcaactgaatttcccatcatatctgctggtgtttaaagaagaggtttatcttcagcaataatataacttgtgttaagacatttgattctgatagctttgcttttctctcctc

SEQ ID NO: 706512 - DNA, 120 bp, Artificial Sequence
  ENSG00000196553_11 (sequence is synthesized)
tgctggaatagactctgctacttcaaagcagaaggccaaggagacagacatctgacaaagcatttccttgagctcttctgagaaaaacctgaacgttggatgtactatgggcattacaac

SEQ ID NO: 706513 - DNA, 120 bp, Artificial Sequence
  ENSG00000196553_12 (sequence is synthesized)
aagtaaggtgttggcagaatcatgctccctctttagcttcttgtgggggccaacaatccttgacattccttgtctttcagccacgccactccaatctctgcctccattatcacacggttt

SEQ ID NO: 706514 - DNA, 120 bp, Artificial Sequence
  ENSG00000196553_13 (sequence is synthesized)
tgttgcctgtgcgtttatgtccaaatatatcgcttcttataaaagcaccagtgattggcttatggcccaccctaatccagtaggacctcgatttagcttgattgcatcctcaaaggccct

SEQ ID NO: 706515 - DNA, 120 bp, Artificial Sequence
  ENSG00000196553_14 (sequence is synthesized)
atttccaaataaggccgcattcatagctctgctgcagatgttgtcataatttctttggctgtctttaatggaatttgggtggaaggaaggagagttaagtatgtgcatcaaaatcaccat

SEQ ID NO: 706516 - DNA, 120 bp, Artificial Sequence
  ENSG00000196553_15 (sequence is synthesized)
cttaaagtgaaataatgttacatcacagtcttcattaatattttacttattgataaatgttaaatggaattaataatggtcactagaagagaataatggtgccatggctgtcagctatta

SEQ ID NO: 706517 - DNA, 120 bp, Artificial Sequence
  ENSG00000196553_16 (sequence is synthesized)
aggaaatacaaataaaatgatcaacggtgtcaaaaatctctgccttgagtcacccctgcaacagctcaaggcacattctttccttccactgaagagtaatcttcctccagagaacttgcc

SEQ ID NO: 706518 - DNA, 120 bp, Artificial Sequence
  ENSG00000196553_17 (sequence is synthesized)
tatgtgcctagctcagaaaatatctaagagtatttctcaaaaagtatttaacgtctgtaaaaatggaaagataatgtgcagtgacattttctaattcttcttgttgacgggagaagggaa

SEQ ID NO: 706519 - DNA, 120 bp, Artificial Sequence
  ENSG00000196553_18 (sequence is synthesized)
gtcttgaggcacaagtcgaacttagggaacatcatagagtcagcagcatggaagaggcagaaggcctggatgtgagaagagataaggcgtattttctgtgcccacccatgaccaggcgct

SEQ ID NO: 706520 - DNA, 120 bp, Artificial Sequence
  ENSG00000196553_19 (sequence is synthesized)
atggtgtgaaccagggaggcagagcttccagtgagaagttctaaaatagatgacaactacttgaaggaattgaatgaggacttaaagctaaggaagcaggaactgctagagatgctcaaa

SEQ ID NO: 706521 - DNA, 120 bp, Artificial Sequence
  ENSG00000196553_20 (sequence is synthesized)
tcctgggtcccaagaattggacagcataaaattggaaagaatcctggaatgcaacaagaagcagtattaaatcattaagatacaaatttaaaagacagaagagaagagggttatgaggaa

SEQ ID NO: 706522 - DNA, 120 bp, Artificial Sequence
  ENSG00000196553_21 (sequence is synthesized)
gacagacaagtccctgttttacttcattcaaaattagctgaaggtcatctcaagggatctatatgcccagtaggtggcaccaaccacatccaggcttcaagtccacagagtggtaattca

SEQ ID NO: 706523 - DNA, 80 bp, Artificial Sequence
  ENSG00000196557_0 (sequence is synthesized)
agcccgaagtttcctgcgccgcgcgcggacgggctcgaggctcgctcgctgcctcaccggtccccggcccgcgccccgcg

SEQ ID NO: 706524 - DNA, 80 bp, Artificial Sequence
  ENSG00000196557_1 (sequence is synthesized)
acccgtccgctcagcggcctccacgccgcgccgaggccgccgccgtcgcctccgccgggcgagccggagccggagtcgag

SEQ ID NO: 706525 - DNA, 80 bp, Artificial Sequence
  ENSG00000196557_2 (sequence is synthesized)
cggtgaccgcgccgcccgggcgatgcccgcggggacgccgccggccagcagagcgaggtgctgccggccgccaccatgac

SEQ ID NO: 706526 - DNA, 80 bp, Artificial Sequence
  ENSG00000196557_3 (sequence is synthesized)
cagagcgaggtgctgccggccgccaccatgaccgagggcgcacgggccgccgacgaggtccgggtgcccctgggcgcgcc

SEQ ID NO: 706527 - DNA, 120 bp, Artificial Sequence
  ENSG00000196557_4 (sequence is synthesized)
ccgggacgcgaggcggagcgggggtccgagctcggcgtgtcaccctccgagagcccggcggccgagcgcggcgcggagctgggtgccgacgaggagcagcgcgtcccgtacccggccttg

SEQ ID NO: 706528 - DNA, 120 bp, Artificial Sequence
  ENSG00000196557_5 (sequence is synthesized)
cggccttggcggccacggtcttcttctgcctcggtcagaccacgcggccgcgcagctggtgcctccggctggtctgcaacccatggttcgagcacgtgagcatgctggtaatcatgctca

SEQ ID NO: 706529 - DNA, 120 bp, Artificial Sequence
  ENSG00000196557_6 (sequence is synthesized)
actgcgtgaccctgggcatgttccggccctgtgaggacgttgagtgcggctccgagcgctgcaacatcctggaggcctttgacgccttcattttcgccttttttgcggtggagatggtca

SEQ ID NO: 706530 - DNA, 120 bp, Artificial Sequence
  ENSG00000196557_7 (sequence is synthesized)
tcaagatggtggccttggggctgttcgggcagaagtgttacctgggtgacacgtggaacaggctggatttcttcatcgtcgtggcgggcatgatggagtactcgttggacggacacaacg

SEQ ID NO: 706531 - DNA, 120 bp, Artificial Sequence
  ENSG00000196557_8 (sequence is synthesized)
tgagcctctcggctatcaggaccgtgcgggtgctgcggcccctccgcgccatcaaccgcgtgcctagcatgcggatcctggtcactctgctgctggatacgctgcccatgctcgggaacg

SEQ ID NO: 706532 - DNA, 120 bp, Artificial Sequence
  ENSG00000196557_9 (sequence is synthesized)
tccttctgctgtgcttcttcgtcttcttcattttcggcatcgttggcgtccagctctgggctggcctcctgcggaaccgctgcttcctggacagtgcctttgtcaggaacaacaacctga

SEQ ID NO: 706533 - DNA, 120 bp, Artificial Sequence
  ENSG00000196557_10 (sequence is synthesized)
ccttcctgcggccgtactaccagacggaggagggcgaggagaacccgttcatctgctcctcacgccgagacaacggcatgcagaagtgctcgcacatccccggccgccgcgagctgcgca

SEQ ID NO: 706534 - DNA, 120 bp, Artificial Sequence
  ENSG00000196557_11 (sequence is synthesized)
tgccctgcaccctgggctgggaggcctacacgcagccgcaggccgagggggtgggcgctgcacgcaacgcctgcatcaactggaaccagtactacaacgtgtgccgctcgggtgactcca

SEQ ID NO: 706535 - DNA, 120 bp, Artificial Sequence
  ENSG00000196557_12 (sequence is synthesized)
acccccacaacggtgccatcaacttcgacaacatcggctacgcctggattgccatcttccaggtgatcacgctggaaggctgggtggacatcatgtactacgtcatggacgcccactcat

SEQ ID NO: 706536 - DNA, 120 bp, Artificial Sequence
  ENSG00000196557_13 (sequence is synthesized)
tctacaacttcatctatttcatcctgctcatcatcgtgggctccttcttcatgatcaacctgtgcctggtggtgattgccacgcagttctcggagacgaagcagcgggagagtcagctga

SEQ ID NO: 706537 - DNA, 120 bp, Artificial Sequence
  ENSG00000196557_14 (sequence is synthesized)
tgcgggagcagcgggcacgccacctgtccaacgacagcacgctggccagcttctccgagcctggcagctgctacgaagagctgctgaagtacgtgggccacatattccgcaaggtcaagc

SEQ ID NO: 706538 - DNA, 120 bp, Artificial Sequence
  ENSG00000196557_15 (sequence is synthesized)
ggcgcagcttgcgcctctacgcccgctggcagagccgctggcgcaagaaggtggaccccagtgctgtgcaaggccagggtcccgggcaccgccagcgccgggcaggcaggcacacagcct

SEQ ID NO: 706539 - DNA, 120 bp, Artificial Sequence
  ENSG00000196557_16 (sequence is synthesized)
cggtgcaccacctggtctaccaccaccatcaccaccaccaccaccactaccatttcagccatggcagcccccgcaggcccggccccgagccaggcgcctgcgacaccaggctggtccgag

SEQ ID NO: 706540 - DNA, 120 bp, Artificial Sequence
  ENSG00000196557_17 (sequence is synthesized)
ctggcgcgcccccctcgccaccttccccaggccgcggaccccccgacgcagagtctgtgcacagcatctaccatgccgactgccacatagaggggccgcaggagagggcccgggtggcac

SEQ ID NO: 706541 - DNA, 120 bp, Artificial Sequence
  ENSG00000196557_18 (sequence is synthesized)
atgccgcagccactgccgctgccagcctcagactggccacagggctgggcaccatgaactaccccacgatcctgccctcaggggtgggcagcggcaaaggcagcaccagccccggaccca

SEQ ID NO: 706542 - DNA, 120 bp, Artificial Sequence
  ENSG00000196557_19 (sequence is synthesized)
aggggaagtgggccggtggaccgccaggcaccggggggcacggcccgttgagcttgaacagccctgatccctacgagaagatcccgcatgtggtcggggagcatggactgggccaggccc

SEQ ID NO: 706543 - DNA, 120 bp, Artificial Sequence
  ENSG00000196557_20 (sequence is synthesized)
ctggccatctgtcgggcctcagtgtgccctgccccctgcccagccccccagcgggcacactgacctgtgagctgaagagctgcccgtactgcacccgtgccctggaggacccggagggtg

SEQ ID NO: 706544 - DNA, 120 bp, Artificial Sequence
  ENSG00000196557_21 (sequence is synthesized)
agctcagcggctcggaaagtggagactcagatggccgtggcgtctatgaattcacgcaggacgtccggcacggtgaccgctgggaccccacgcgaccaccccgtgcgacggacacaccag

SEQ ID NO: 706545 - DNA, 120 bp, Artificial Sequence
  ENSG00000196557_22 (sequence is synthesized)
gcccaggcccaggcagcccccagcggcgggcacagcagagggcagccccgggcgagccaggctggatgggccgcctctgggttaccttcagcggcaagctgcgccgcatcgtggacagca

SEQ ID NO: 706546 - DNA, 120 bp, Artificial Sequence
  ENSG00000196557_23 (sequence is synthesized)
agtacttcagccgtggcatcatgatggccatccttgtcaacacgctgagcatgggcgtggagtaccatgagcagcccgaggagctgactaatgctctggagatcagcaacatcgtgttca

SEQ ID NO: 706547 - DNA, 120 bp, Artificial Sequence
  ENSG00000196557_24 (sequence is synthesized)
ccagcatgtttgccctggagatgctgctgaagctgctggcctgcggccctctgggctacatccggaacccgtacaacatcttcgacggcatcatcgtggtcatcagcgtctgggagatcg

SEQ ID NO: 706548 - DNA, 120 bp, Artificial Sequence
  ENSG00000196557_25 (sequence is synthesized)
tggggcaggcggacggtggcttgtctgtgctgcgcaccttccggctgctgcgtgtgctgaagctggtgcgctttctgccagccctgcggcgccagctcgtggtgctggtgaagaccatgg

SEQ ID NO: 706549 - DNA, 120 bp, Artificial Sequence
  ENSG00000196557_26 (sequence is synthesized)
acaacgtggctaccttctgcacgctgctcatgctcttcattttcatcttcagcatcctgggcatgcaccttttcggctgcaagttcagcctgaagacagacaccggagacaccgtgcctg

SEQ ID NO: 706550 - DNA, 120 bp, Artificial Sequence
  ENSG00000196557_27 (sequence is synthesized)
acaggaagaacttcgactccctgctgtgggccatcgtcaccgtgttccagatcctgacccaggaggactggaacgtggtcctgtacaacggcatggcctccacctcctcctgggccgccc

SEQ ID NO: 706551 - DNA, 120 bp, Artificial Sequence
  ENSG00000196557_28 (sequence is synthesized)
tctacttcgtggccctcatgaccttcggcaactatgtgctcttcaacctgctggtggccatcctcgtggagggcttccaggcggagggcgatgccaacagatccgacacggacgaggaca

SEQ ID NO: 706552 - DNA, 120 bp, Artificial Sequence
  ENSG00000196557_29 (sequence is synthesized)
agacgtcggtccacttcgaggaggacttccacaagctcagagaactccagaccacagagctgaagatgtgttccctggccgtgacccccaacgggcacctggagggacgaggcagcctgt

SEQ ID NO: 706553 - DNA, 120 bp, Artificial Sequence
  ENSG00000196557_30 (sequence is synthesized)
cccctcccctcatcatgtgcacagctgccacgcccatgcctacccccaagagctcaccattcctggatgcagcccccagcctcccagactctcggcgtggcagcagcagctccggggacc

SEQ ID NO: 706554 - DNA, 120 bp, Artificial Sequence
  ENSG00000196557_31 (sequence is synthesized)
cgccactgggagaccagaagcctccggccagcctccgaagttctccctgtgccccctggggccccagtggcgcctggagcagccggcgctccagctggagcagcctgggccgtgccccca

SEQ ID NO: 706555 - DNA, 120 bp, Artificial Sequence
  ENSG00000196557_32 (sequence is synthesized)
gcctcaagcgccgcggccagtgtggggaacgtgagtccctgctgtctggcgagggcaagggcagcaccgacgacgaagctgaggacggcagggccgcgcccgggccccgtgccaccccac

SEQ ID NO: 706556 - DNA, 120 bp, Artificial Sequence
  ENSG00000196557_33 (sequence is synthesized)
tgcggcgggccgagtccctggacccacggcccctgcggccggccgccctcccgcctaccaagtgccgcgatcgcgacgggcaggtggtggccctgcccagcgacttcttcctgcgcatcg

SEQ ID NO: 706557 - DNA, 120 bp, Artificial Sequence
  ENSG00000196557_34 (sequence is synthesized)
cgcctgcataaagtgctggagccctacaagccccagtggtgccggagccgcgaggcctgggccctctacctcttctccccacagaaccggttccgcgtctcctgccagaaggtcatcaca

SEQ ID NO: 706558 - DNA, 120 bp, Artificial Sequence
  ENSG00000196557_35 (sequence is synthesized)
cacaagatgtttgatcacgtggtcctcgtcttcatcttcctcaactgcgtcaccatcgccctggagaggcctgacattgatcccggcagcaccgagcgggtcttcctcagcgtctccaat

SEQ ID NO: 706559 - DNA, 120 bp, Artificial Sequence
  ENSG00000196557_36 (sequence is synthesized)
tacatcttcacggccatcttcgtggcggagatgatggtgaaggtggtggccctggggctgctgtccggcgagcacgcctacctgcagagcagctggaacctgctggatgggctgctggtg

SEQ ID NO: 706560 - DNA, 120 bp, Artificial Sequence
  ENSG00000196557_37 (sequence is synthesized)
ctggtgtccctggtggacattgtcgtggccatggcctcggctggtggcgccaagatcctgggtgttctgcgcgtgctgcgtctgctgcggaccctgcggcctctgagggtcatcagccgg

SEQ ID NO: 706561 - DNA, 120 bp, Artificial Sequence
  ENSG00000196557_38 (sequence is synthesized)
gccccgggcctcaagctggtggtggagacgctgatatcatcactcaggcccattgggaacatcgtcctcatctgctgcgccttcttcatcatttttggcattttgggtgtgcagctcttc

SEQ ID NO: 706562 - DNA, 120 bp, Artificial Sequence
  ENSG00000196557_39 (sequence is synthesized)
aaagggaagttctactactgcgagggccccgacaccaggaacatctccaccaaggcacagtgccgggccgcccactaccgctgggtgcgacgcaagtacaacttcgacaacctgggccag

SEQ ID NO: 706563 - DNA, 120 bp, Artificial Sequence
  ENSG00000196557_40 (sequence is synthesized)
gccctgatgtcgctgttcgtgctgtcatccaaggatggatgggtgaacatcatgtacgacgggctggatgccgtgggtgtcgaccagcagcctgtgcagaaccacaacccctggatgctg

SEQ ID NO: 706564 - DNA, 120 bp, Artificial Sequence
  ENSG00000196557_41 (sequence is synthesized)
ctgtacttcatctccttcctgctcatcgtcagcttcttcgtgctcaacatgttcgtgggcgtcgtggtcgagaacttccacaagtgccggcagcaccaggaggcggaggaggcgcggcgg

SEQ ID NO: 706565 - DNA, 120 bp, Artificial Sequence
  ENSG00000196557_42 (sequence is synthesized)
cgagaggagaagcggctgcggcgcctagagaggaggcgcaggagcactttccccagcccagaggcccagcgccggccctactatgccgactactcgcccacgcgccgctccattcactcg

SEQ ID NO: 706566 - DNA, 120 bp, Artificial Sequence
  ENSG00000196557_43 (sequence is synthesized)
ctgtgcaccagccactatctcgacctcttcatcaccttcatcatctgtgtcaacgtcatcaccatgtccatggagcactataaccaacccaagtcgctggacgaggccctcaagtactgc

SEQ ID NO: 706567 - DNA, 120 bp, Artificial Sequence
  ENSG00000196557_44 (sequence is synthesized)
aactacgtcttcaccatcgtgtttgtcttcgaggctgcactgaagctggtagcatttgggttccgtcggttcttcaaggacaggtggaaccagctggacctggccatcgtgctgctgtca

SEQ ID NO: 706568 - DNA, 120 bp, Artificial Sequence
  ENSG00000196557_45 (sequence is synthesized)
ctcatgggcatcacgctggaggagatagagatgagcgccgcgctgcccatcaaccccaccatcatccgcatcatgcgcgtgcttcgcattgcccgtgtgctgaagctgctgaagatggct

SEQ ID NO: 706569 - DNA, 120 bp, Artificial Sequence
  ENSG00000196557_46 (sequence is synthesized)
acgggcatgcgcgccctgctggacactgtggtgcaagctctcccccaggtggggaacctgggccttcttttcatgctcctgttttttatctatgctgcgctgggagtggagctgttcggg

SEQ ID NO: 706570 - DNA, 120 bp, Artificial Sequence
  ENSG00000196557_47 (sequence is synthesized)
aggctggagtgcagtgaagacaacccctgcgagggcctgagcaggcacgccaccttcagcaacttcggcatggccttcctcacgctgttccgcgtgtccacgggggacaactggaacggg

SEQ ID NO: 706571 - DNA, 120 bp, Artificial Sequence
  ENSG00000196557_48 (sequence is synthesized)
atcatgaaggacacgctgcgcgagtgctcccgtgaggacaagcactgcctgagctacctgccggccctgtcgcccgtctacttcgtgaccttcgtgctggtggcccagttcgtgctggtg

SEQ ID NO: 706572 - DNA, 120 bp, Artificial Sequence
  ENSG00000196557_49 (sequence is synthesized)
aacgtggtggtggccgtgctcatgaagcacctggaggagagcaacaaggaggcacgggaggatgcggagctggacgccgagatcgagctggagatggcgcagggccccgggagtgcacgc

SEQ ID NO: 706573 - DNA, 120 bp, Artificial Sequence
  ENSG00000196557_50 (sequence is synthesized)
cgggtggacgcggacaggcctcccttgccccaggagagtccgggcgccagggacgccccaaacctggttgcacgcaaggtgtccgtgtccaggatgctctcgctgcccaacgacagctac

SEQ ID NO: 706574 - DNA, 120 bp, Artificial Sequence
  ENSG00000196557_51 (sequence is synthesized)
atgttcaggcccgtggtgcctgcctcggcgccccacccccgcccgctgcaggaggtggagatggagacctatggggccggcacccccttgggctccgttgcctctgtgcactctccgccc

SEQ ID NO: 706575 - DNA, 120 bp, Artificial Sequence
  ENSG00000196557_52 (sequence is synthesized)
gcagagtcctgtgcctccctccagatcccattggctgtgtcgtccccagccaggagcggcgagcccctccacgccctgtcccctcggggcacagcccgctcccccagtctcagccggctg

SEQ ID NO: 706576 - DNA, 120 bp, Artificial Sequence
  ENSG00000196557_53 (sequence is synthesized)
ctctgcagacaggaggctgtgcacaccgattccttggaagggaagattgacagccctagggacaccctggatcctgcagagcctggtgagaaaaccccggtgaggccggtgacccagggg

SEQ ID NO: 706577 - DNA, 120 bp, Artificial Sequence
  ENSG00000196557_54 (sequence is synthesized)
ggctccctgcagtccccaccacgctccccacggcccgccagcgtccgcactcgtaagcataccttcggacagcgctgcgtctccagccggccggcggccccaggcggagaggaggccgag

SEQ ID NO: 706578 - DNA, 120 bp, Artificial Sequence
  ENSG00000196557_55 (sequence is synthesized)
gcctcggacccagccgacgaggaggtcagccacatcaccagctccgcctgcccctggcagcccacagccgagccccatggccccgaagcctctccggtggccggcggcgagcgggacctg

SEQ ID NO: 706579 - DNA, 120 bp, Artificial Sequence
  ENSG00000196557_56 (sequence is synthesized)
cgcaggctctacagcgtggatgctcagggcttcctggacaagccgggccgggcagacgagcagtggcggccctcggcggagctgggcagcggggagcctggggaggcgaaggcctggggc

SEQ ID NO: 706580 - DNA, 120 bp, Artificial Sequence
  ENSG00000196557_57 (sequence is synthesized)
cctgaggccgagcccgctctgggtgcgcgcagaaagaagaagatgagccccccctgcatctcggtggaaccccctgcggaggacgagggctctgcgcggccctccgcggcagagggcggc

SEQ ID NO: 706581 - DNA, 120 bp, Artificial Sequence
  ENSG00000196557_58 (sequence is synthesized)
agcaccacactgaggcgcaggaccccgtcctgtgaggccacgcctcacagggactccctggagcccacagagggctcaggcgccgggggggaccctgcagccaagggggagcgctggggc

SEQ ID NO: 706582 - DNA, 120 bp, Artificial Sequence
  ENSG00000196557_59 (sequence is synthesized)
caggcctcctgccgggctgagcacctgaccgtccccagctttgcctttgagccgctggacctcggggtccccagtggagaccctttcttggacggtagccacagtgtgaccccagaatcc

SEQ ID NO: 706583 - DNA, 120 bp, Artificial Sequence
  ENSG00000196557_60 (sequence is synthesized)
agagcttcctcttcaggggccatagtgcccctggaacccccagaatcagagcctcccatgcccgtcggtgaccccccagagaagaggcgggggctgtacctcacagtcccccagtgtcct

SEQ ID NO: 706584 - DNA, 120 bp, Artificial Sequence
  ENSG00000196557_61 (sequence is synthesized)
ctggagaaaccagggtccccctcagccacccctgccccagggggtggtgcagatgaccccgtgtagctcggggcttggtgccgcccacggctttggccctggggtctgggggccccgctg

SEQ ID NO: 706585 - DNA, 120 bp, Artificial Sequence
  ENSG00000196557_62 (sequence is synthesized)
gggtggaggcccaggcagaaccctgcatggaccctgacttgggtcccgtcgtgagcagaaaggcccggggaggatgacggcccaggccctggttctctgcccagcgaagcaggagtagct

SEQ ID NO: 706586 - DNA, 120 bp, Artificial Sequence
  ENSG00000196557_63 (sequence is synthesized)
gccgggccccacgagcctccgtccgttctggttcgggtttctccgagttttgctaccagccgaggctgtgcgggcaactgggtcagcctcccgtcaggagagaagccgcgtctgtgggac

SEQ ID NO: 706587 - DNA, 120 bp, Artificial Sequence
  ENSG00000196557_64 (sequence is synthesized)
gaagaccgggcacccgccagagaggggaaggtaccaggttgcgtcctttcaggccccgcgttgttacaggacactcgctgggggccctgtgcccttgccggcggcaggttgcagccaccg

SEQ ID NO: 706588 - DNA, 120 bp, Artificial Sequence
  ENSG00000196557_65 (sequence is synthesized)
cggcccaatgtcaccttcactcacagtctgagttcttgtccgcctgtcacgccctcaccaccctccccttccagccaccaccctttccgttccgctcgggccttcccagaagcgtcctgt

SEQ ID NO: 706589 - DNA, 120 bp, Artificial Sequence
  ENSG00000196557_66 (sequence is synthesized)
gactctgggagaggtgacacctcactaaggggccgaccccatggagtaacgcgcccggccccgatgcgaatcaggcctcccctacatctgggggcgttggccgcgagattcccattgaca

SEQ ID NO: 706590 - DNA, 120 bp, Artificial Sequence
  ENSG00000196557_67 (sequence is synthesized)
cctttgtttcgtgtgcttttaaattcaggttaaatgttgcaataatctgatgcagaagactcagcttctcaagggagagggagggggcggagcggaataaatagtaacttatttaagaaa

SEQ ID NO: 706591 - DNA, 120 bp, Artificial Sequence
  ENSG00000196557_68 (sequence is synthesized)
gtcgcagacagggtctgccttcccagcgtggctcccagcagcgccgctgcgggacggggagggacagctcgggcctcactcgcgccccaggaagtccggtgtggggtggggcacaggcca

SEQ ID NO: 706592 - DNA, 120 bp, Artificial Sequence
  ENSG00000196557_69 (sequence is synthesized)
ccctgcccaccatgcagataacgcaccatgtggctccaccgccccacgtggctctgcccaccgtgcagtcacccgccccgccactgctgtccccgtcatggctccgtccaccatgctgtc

SEQ ID NO: 706593 - DNA, 120 bp, Artificial Sequence
  ENSG00000196562_0 (sequence is synthesized)
cacttgagccgaagttaatttctcggggagttctcgggcgcgcacaggcagctcggtttgccctgcgattgagctgcgggtcgcggccggcgccggcctctccaatggcaaatgtgtgtg

SEQ ID NO: 706594 - DNA, 120 bp, Artificial Sequence
  ENSG00000196562_1 (sequence is synthesized)
gctggaggcgagcgcgaggctttcggcaaaggcagtcgagtgtttgcagaccggggcgagtcctgtgaaagcagataaaagaaaacatttattaacgtgtcattacgaggggagcgcccg

SEQ ID NO: 706595 - DNA, 120 bp, Artificial Sequence
  ENSG00000196562_2 (sequence is synthesized)
gccggggctgtcgcactccccgcggaacatttggctccctccagctccgagagaggagaagaagaaagcggaaaagaggcagattcacgtcgtttccagccaagtggacctgatcgatgg

SEQ ID NO: 706596 - DNA, 120 bp, Artificial Sequence
  ENSG00000196562_3 (sequence is synthesized)
ccctcctgaatttatcacgatatttgatttattagcgatgccccctggtttgtgtgttacgcacacacacgtgcacacaaggctctggctcgcttccctccctcgtttccagctcctggg

SEQ ID NO: 706597 - DNA, 120 bp, Artificial Sequence
  ENSG00000196562_4 (sequence is synthesized)
cgaatcccacatctgtttcaactctccgccgagggcgagcaggagcgagagtgtgtcgagtgagtgtgcgtctgtgtgtcccggcgagggtgcgcgctcggcgccgggagcgcggccagc

SEQ ID NO: 706598 - DNA, 120 bp, Artificial Sequence
  ENSG00000196562_5 (sequence is synthesized)
cgagtccggaggcatcgggaggtcgagagccgccgggaccccagctctgcgttcactgccccgtccggagctggacttcggggccggggccggggccgtgcgccggggacaggcagggcc

SEQ ID NO: 706599 - DNA, 120 bp, Artificial Sequence
  ENSG00000196562_6 (sequence is synthesized)
gggtcgcgggccgcgcgtcccccaggccggagatctgcgagtgaagagggacgagggaaaagaaacaaagccacagacgcaacttgagactcccgcatcccaaaagaagcaccagatcag

SEQ ID NO: 706600 - DNA, 120 bp, Artificial Sequence
  ENSG00000196562_7 (sequence is synthesized)
caaaaaaagaagatgggccccccgagcctcgtgctgtgcttgctgtccgcaactgtgttctccctgctgggtggaagctcggccttcctgtcgcaccaccgcctgaaaggcaggtttcag

SEQ ID NO: 706601 - DNA, 120 bp, Artificial Sequence
  ENSG00000196562_8 (sequence is synthesized)
agggaccgcaggaacatccgccccaacatcatcctggtgctgacggacgaccaggatgtggagctgggttccatgcaggtgatgaacaagacccggcgcatcatggagcagggcggggcg

SEQ ID NO: 706602 - DNA, 120 bp, Artificial Sequence
  ENSG00000196562_9 (sequence is synthesized)
cacttcatcaacgccttcgtgaccacacccatgtgctgcccctcacgctcctccatcctcactggcaagtacgtccacaaccacaacacctacaccaacaatgagaactgctcctcgccc

SEQ ID NO: 706603 - DNA, 120 bp, Artificial Sequence
  ENSG00000196562_10 (sequence is synthesized)
tcctggcaggcacagcacgagagccgcacctttgccgtgtacctcaatagcactggctaccggacagctttcttcgggaagtatcttaatgaatacaacggctcctacgtgccacccggc

SEQ ID NO: 706604 - DNA, 120 bp, Artificial Sequence
  ENSG00000196562_11 (sequence is synthesized)
tggaaggagtgggtcggactccttaaaaactcccgcttttataactacacgctgtgtcggaacggggtgaaagagaagcacggctccgactactccaaggattacctcacagacctcatc

SEQ ID NO: 706605 - DNA, 120 bp, Artificial Sequence
  ENSG00000196562_12 (sequence is synthesized)
accaatgacagcgtgagcttcttccgcacgtccaagaagatgtacccgcacaggccagtcctcatggtcatcagccatgcagccccccacggccctgaggattcagccccacaatattca

SEQ ID NO: 706606 - DNA, 120 bp, Artificial Sequence
  ENSG00000196562_13 (sequence is synthesized)
cgcctcttcccaaacgcatctcagcacatcacgccgagctacaactacgcgcccaacccggacaaacactggatcatgcgctacacggggcccatgaagcccatccacatggaattcacc

SEQ ID NO: 706607 - DNA, 120 bp, Artificial Sequence
  ENSG00000196562_14 (sequence is synthesized)
aacatgctccagcggaagcgcttgcagaccctcatgtcggtggacgactccatggagacgatttacaacatgctggttgagacgggcgagctggacaacacgtacatcgtatacaccgcc

SEQ ID NO: 706608 - DNA, 120 bp, Artificial Sequence
  ENSG00000196562_15 (sequence is synthesized)
gaccacggttaccacatcggccagtttggcctggtgaaagggaaatccatgccatatgagtttgacatcagggtcccgttctacgtgaggggccccaacgtggaagccggctgtctgaat

SEQ ID NO: 706609 - DNA, 120 bp, Artificial Sequence
  ENSG00000196562_16 (sequence is synthesized)
ccccacatcgtcctcaacattgacctggcccccaccatcctggacattgcaggcctggacatacctgcggatatggacgggaaatccatcctcaagctgctggacacggagcggccggtg

SEQ ID NO: 706610 - DNA, 120 bp, Artificial Sequence
  ENSG00000196562_17 (sequence is synthesized)
aatcggtttcacttgaaaaagaagatgagggtctggcgggactccttcttggtggagagaggcaagctgctacacaagagagacaatgacaaggtggacgcccaggaggagaactttctg

SEQ ID NO: 706611 - DNA, 120 bp, Artificial Sequence
  ENSG00000196562_18 (sequence is synthesized)
cccaagtaccagcgtgtgaaggacctgtgtcagcgtgctgagtaccagacggcgtgtgagcagctgggacagaagtggcagtgtgtggaggacgccacggggaagctgaagctgcataag

SEQ ID NO: 706612 - DNA, 120 bp, Artificial Sequence
  ENSG00000196562_19 (sequence is synthesized)
tgcaagggccccatgcggctgggcggcagcagagccctctccaacctcgtgcccaagtactacgggcagggcagcgaggcctgcacctgtgacagcggggactacaagctcagcctggcc

SEQ ID NO: 706613 - DNA, 120 bp, Artificial Sequence
  ENSG00000196562_20 (sequence is synthesized)
atgccgcccagccccgaaacctcaccaagcggcactggccaggggcccctgaggaccaagatgacaaggatggtggggacttcagtggcactggaggccttcccgactactcagccgcca

SEQ ID NO: 706614 - DNA, 120 bp, Artificial Sequence
  ENSG00000196562_21 (sequence is synthesized)
accccattaaagtgacacatcggtgctacatcctagagaacgacacagtccagtgtgacctggacctgtacaagtccctgcaggcctggaaagaccacaagctgcacatcgaccacgaga

SEQ ID NO: 706615 - DNA, 120 bp, Artificial Sequence
  ENSG00000196562_22 (sequence is synthesized)
ttgaaaccctgcagaacaaaattaagaacctgagggaagtccgaggtcacctgaagaaaaagcggccagaagaatgtgactgtcacaaaatcagctaccacacccagcacaaaggccgcc

SEQ ID NO: 706616 - DNA, 120 bp, Artificial Sequence
  ENSG00000196562_23 (sequence is synthesized)
tcaagcacagaggctccagtctgcatcctttcaggaagggcctgcaagagaaggacaaggtgtggctgttgcgggagcagaagcgcaagaagaaactccgcaagctgctcaagcgcctgc

SEQ ID NO: 706617 - DNA, 120 bp, Artificial Sequence
  ENSG00000196562_24 (sequence is synthesized)
agaacaacgacacgtgcagcatgccaggcctcacgtgcttcacccacgacaaccagcactggcagacggcgcctttctggacactggggcctttctgtgcctgcaccagcgccaacaata

SEQ ID NO: 706618 - DNA, 120 bp, Artificial Sequence
  ENSG00000196562_25 (sequence is synthesized)
acacgtactggtgcatgaggaccatcaatgagactcacaatttcctcttctgtgaatttgcaactggcttcctagagtactttgatctcaacacagacccctaccagctgatgaatgcag

SEQ ID NO: 706619 - DNA, 120 bp, Artificial Sequence
  ENSG00000196562_26 (sequence is synthesized)
tgaacacactggacagggatgtcctcaaccagctacacgtacagctcatggagctgaggagctgcaagggttacaagcagtgtaacccccggactcgaaacatggacctgggacttaaag

SEQ ID NO: 706620 - DNA, 120 bp, Artificial Sequence
  ENSG00000196562_27 (sequence is synthesized)
atggaggaagctatgagcaatacaggcagtttcagcgtcgaaagtggccagaaatgaagagaccttcttccaaatcactgggacaactgtgggaaggctgggaaggttaagaaacaacag

SEQ ID NO: 706621 - DNA, 120 bp, Artificial Sequence
  ENSG00000196562_28 (sequence is synthesized)
aggtggacctccaaaaacatagaggcatcacctgactgcacaggcaatgaaaaaccatgtgggtgatttccagcagacctgtggtattggccaggaggcctgagaaagcaagcacgcact

SEQ ID NO: 706622 - DNA, 120 bp, Artificial Sequence
  ENSG00000196562_29 (sequence is synthesized)
ctcagtcaacatgacagattctggaggataaccagcaggagcagagataacttcaggaagtccatttttgcccctgcttttgctttggattatacctcaccagctgcacaaaatgcattt

SEQ ID NO: 706623 - DNA, 120 bp, Artificial Sequence
  ENSG00000196562_30 (sequence is synthesized)
tttcgtatcaaaaagtcaccactaaccctcccccagaagctcacaaaggaaaacggagagagcgagcgagagagatttccttggaaatttctcccaagggcgaaagtcattggaattttt

SEQ ID NO: 706624 - DNA, 120 bp, Artificial Sequence
  ENSG00000196562_31 (sequence is synthesized)
aaatcataggggaaaagcagtcctgttctaaatcctcttattcttttggtttgtcacaaagaaggaactaagaagcaggacagaggcaacgtggagaggctgaaaacagtgcagagacgt

SEQ ID NO: 706625 - DNA, 120 bp, Artificial Sequence
  ENSG00000196562_32 (sequence is synthesized)
ttgacaatgagtcagtagcacaaaagagatgacatttacctagcactataaaccctggttgcctctgaagaaactgccttcattgtatatatgtgactatttacatgtaatcaacatggg

SEQ ID NO: 706626 - DNA, 120 bp, Artificial Sequence
  ENSG00000196562_33 (sequence is synthesized)
aacttttaggggaacctaataagaaatcccaattttcaggagtggtggtgtcaataaacgctctgtggccagtgtaaaagaaaatccctcgcagttgtggacatttctgttcctgtccag

SEQ ID NO: 706627 - DNA, 120 bp, Artificial Sequence
  ENSG00000196562_34 (sequence is synthesized)
ataccatttctcctagtatttctttgttatgtcccagaactgatgttttttttttaaggtactgaaaagaaatgaagttgatgtatgtcccaagttttgatgaaactgtatttgtaaaaa

SEQ ID NO: 706628 - DNA, 120 bp, Artificial Sequence
  ENSG00000196562_35 (sequence is synthesized)
aaattttgtagtttaagtattgtcatacagtgttcaaaaccccagccaatgaccagcagttggtatgaagaacctttgacattttgtaaaaggccatttcttgggagttttttggtgtgt

SEQ ID NO: 706629 - DNA, 120 bp, Artificial Sequence
  ENSG00000196562_36 (sequence is synthesized)
ctgtttttttaaagtattcaagatactaccagtcaacatctttttggaagaaaatgccttgggtttagaagattttcttaaaaggggagtagatggttgtagattgactaaaaagtctac

SEQ ID NO: 706630 - DNA, 120 bp, Artificial Sequence
  ENSG00000196562_37 (sequence is synthesized)
catacttcaagggactacaggtaagtctcatagtataccagctttggtacttcattttttaaaaaagtattaatcaattgcaaagaaattcgccttggccaacccttctttgtgtatcag

SEQ ID NO: 706631 - DNA, 120 bp, Artificial Sequence
  ENSG00000196562_38 (sequence is synthesized)
gtagtctaacctgatacaagtagttgacagatttcaactatcaatcaccagtccaacccatttctcatttaacagatgacggagataatccctaaaagcacccacatttgtttcaatgcc

SEQ ID NO: 706632 - DNA, 120 bp, Artificial Sequence
  ENSG00000196562_39 (sequence is synthesized)
ccaaacaggccaaggctccctagcaactccctagtggcgttttttaacttctcagaaactgttaccattatttgaaataggcttccttaacctcctttacccttaacccaacagggattt

SEQ ID NO: 706633 - DNA, 120 bp, Artificial Sequence
  ENSG00000196562_40 (sequence is synthesized)
tcccaaacgcatctcagcacatgtaagcctcagcactctgcctgccagaggcactgcttagcatgaagggggagggtcaggctttagcaacagtactgtcaccaccatgacttcactgtg

SEQ ID NO: 706634 - DNA, 120 bp, Artificial Sequence
  ENSG00000196562_41 (sequence is synthesized)
cctcctctctaatcctcctggtttaaagaccccaagaacatactgcttgtccatggtgaaactgggatgcaactccagacagcctgggcaacagaccaaggcaggagaatttttaacttg

SEQ ID NO: 706635 - DNA, 120 bp, Artificial Sequence
  ENSG00000196562_42 (sequence is synthesized)
ggatacacggcctcccaccaagaggtgtgtggatggaactgcatagaataggtttccttttaatgccatgtgtattttatttaagacatctaaaaacattcttttgaggagggggtctat

SEQ ID NO: 706636 - DNA, 120 bp, Artificial Sequence
  ENSG00000196562_43 (sequence is synthesized)
agttttaccagactaattatttgccaccatttattgagctgtgggctatgtagcaggtgctgtgctaagcccttggcattattgtccagtccctgaatattcacagtgacccttggtgta

SEQ ID NO: 706637 - DNA, 120 bp, Artificial Sequence
  ENSG00000196562_44 (sequence is synthesized)
ccagttatctattgccatgtaacaaatcatcccagaatctagcaacttaaaacaacaaacacaaattatctcacggtgtctgtgagtcaggaatctgggagtggctgttctgagcttctg

SEQ ID NO: 706638 - DNA, 120 bp, Artificial Sequence
  ENSG00000196562_45 (sequence is synthesized)
gacttaaagatggaggaagctatgagcaatacaggtatttcgttttattattaaagcctaaacaaagttctcctatcttggcccatccttcagtctcatctctgtgagtctgcacctgtt

SEQ ID NO: 706639 - DNA, 120 bp, Artificial Sequence
  ENSG00000196562_46 (sequence is synthesized)
atcttgagaaactgcccttccctctggtctgcccgagaccaggatcacccaccaaagataggtgtcacctaggagaccttctttgtatagttctttggggactttttctttcttggtgat

SEQ ID NO: 706640 - DNA, 120 bp, Artificial Sequence
  ENSG00000196562_47 (sequence is synthesized)
cacacatgcctccggggctcctccagagctgagaggccggccccgcggctcctgctctctgccccatagcaagctgctacacaagagagacaatgacaaggtggacgcccaggaggagaa

SEQ ID NO: 706641 - DNA, 120 bp, Artificial Sequence
  ENSG00000196562_48 (sequence is synthesized)
agtcagctgatgaaagtcaacactgcactctgatgaatctggtgaaggctgggtttgagggcatggcttccttctgagagcatttgggcttcctgactaaactccagagtgtgacagact

SEQ ID NO: 706642 - DNA, 120 bp, Artificial Sequence
  ENSG00000196562_49 (sequence is synthesized)
tcccactgatgcaggtccacacctctcctccccgcgcagacaggacaagcctcctgaaaactagccctccccgggggcagctcagtccccagaggaaaagcaagggaagggattgggcta

SEQ ID NO: 706643 - DNA, 120 bp, Artificial Sequence
  ENSG00000196562_50 (sequence is synthesized)
tgcatgcccacttcggcccttcaaatccactaggcacatgctaggggtcagcaaaccacagccaatggacctaaccaggccctccatttgttttagtaaataaagttttattggaacata

SEQ ID NO: 706644 - DNA, 120 bp, Artificial Sequence
  ENSG00000196562_51 (sequence is synthesized)
acacacggaattccgtctcatttcattgtcctcccttttgtccactcatgcattcaacaaacacttcctgagaacttacacctgaaaccatgttgactaaagatgaccccatcctcgctg

SEQ ID NO: 706645 - DNA, 80 bp, Artificial Sequence
  ENSG00000196562_52 (sequence is synthesized)
gccgggctgcggcagaggcggcggcggcgccccgctccgggtgaggttgccggggccgtgcgcgctgatctgcgagtgaa

SEQ ID NO: 706646 - DNA, 120 bp, Artificial Sequence
  ENSG00000196565_0 (sequence is synthesized)
acactcgcttctggaacgtctgaggttatcaataagctcctagtccagacgccatgggtcatttcacagaggaggacaaggctactatcacaagcctgtggggcaaggtgaatgtggaag

SEQ ID NO: 706647 - DNA, 120 bp, Artificial Sequence
  ENSG00000196565_1 (sequence is synthesized)
atgctggaggagaaaccctgggaaggctcctggttgtctacccatggacccagaggttctttgacagctttggcaacctgtcctctgcctctgccatcatgggcaaccccaaagtcaagg

SEQ ID NO: 706648 - DNA, 120 bp, Artificial Sequence
  ENSG00000196565_2 (sequence is synthesized)
tgtggatcctgagaacttcaagctcctgggaaatgtgctggtgaccgttttggcaatccatttcggcaaagaattcacccctgaggtgcaggcttcctggcagaagatggtgactggagt

SEQ ID NO: 706649 - DNA, 120 bp, Artificial Sequence
  ENSG00000196565_3 (sequence is synthesized)
ggccagtgccctgtcctccagataccactgagctcactgcccatgatgcagagctttcaaggataggctttattctgcaagcaatcaaataataaatctattctgctaagagatcacaca

SEQ ID NO: 706650 - DNA, 87 bp, Artificial Sequence
  ENSG00000196565_4 (sequence is synthesized)
agtccgggggtatatcttcattagcagcgtgaaaacggacaaatacagcttcagtttcccctcactccactccccattaggggatag

SEQ ID NO: 706651 - DNA, 120 bp, Artificial Sequence
  ENSG00000196565_5 (sequence is synthesized)
gcttcagtttcccctcactccactccccattaggggatagtttttgtccagattaaagaaaaacctattgtttatggtggtgctaggggaaatgaagaggaaagtcttgcctctccattt

SEQ ID NO: 706652 - DNA, 120 bp, Artificial Sequence
  ENSG00000196569_0 (sequence is synthesized)
cagcgactcctctggctcccgagaagtggatccggtcgcggccactacgatgccgggagccgccggggtcctcctccttctgctgctctccggaggcctcgggggcgtacaggcgcagcg

SEQ ID NO: 706653 - DNA, 120 bp, Artificial Sequence
  ENSG00000196569_1 (sequence is synthesized)
gccgcagcagcagcggcagtcacaggcacatcagcaaagaggtttattccctgctgtcctgaatcttgcttctaatgctcttatcacgaccaatgcaacatgtggagaaaaaggacctga

SEQ ID NO: 706654 - DNA, 120 bp, Artificial Sequence
  ENSG00000196569_2 (sequence is synthesized)
aatgtactgcaaattggtagaacatgtccctgggcagcctgtgaggaacccgcagtgtcgaatctgcaatcaaaacagcagcaatccaaaccagagacacccgattacaaatgctattga

SEQ ID NO: 706655 - DNA, 120 bp, Artificial Sequence
  ENSG00000196569_3 (sequence is synthesized)
tggaaagaacacttggtggcagagtcccagtattaagaatggaatcgaataccattatgtgacaattaccctggatttacagcaggtgttccagatcgcgtatgtgattgtgaaggcagc

SEQ ID NO: 706656 - DNA, 120 bp, Artificial Sequence
  ENSG00000196569_4 (sequence is synthesized)
taactccccccggcctggaaactggattttggaacgctctcttgatgatgttgaatacaagccctggcagtatcatgctgtgacagacacggagtgcctaacgctttacaatatttatcc

SEQ ID NO: 706657 - DNA, 120 bp, Artificial Sequence
  ENSG00000196569_5 (sequence is synthesized)
ccgcactgggccaccgtcatatgccaaagatgatgaggtcatctgcacttcattttactccaagatacaccccttagaaaatggagagattcacatctctttaatcaatgggagaccaag

SEQ ID NO: 706658 - DNA, 120 bp, Artificial Sequence
  ENSG00000196569_6 (sequence is synthesized)
tgccgatgatccttctccagaactgctagaatttacctccgctcgctatattcgcctgagatttcagaggatccgcacactgaatgctgacttgatgatgtttgctcacaaagacccaag

SEQ ID NO: 706659 - DNA, 120 bp, Artificial Sequence
  ENSG00000196569_7 (sequence is synthesized)
agaaattgaccccattgtcaccagaagatattactactcggtcaaggatatttcagttggagggatgtgcatctgctatggtcatgccagggcttgtccacttgatccagcgacaaataa

SEQ ID NO: 706660 - DNA, 120 bp, Artificial Sequence
  ENSG00000196569_8 (sequence is synthesized)
atctcgctgtgagtgtgagcataacacatgtggcgatagctgtgatcagtgctgtccaggattccatcagaaaccctggagagctggaacttttctaactaaaactgaatgtgaagcatg

SEQ ID NO: 706661 - DNA, 120 bp, Artificial Sequence
  ENSG00000196569_9 (sequence is synthesized)
caattgtcatggaaaagctgaagaatgctattatgatgaaaatgttgccagaagaaatctgagtttgaatatacgtggaaagtacattggagggggtgtctgcattaattgtacccaaaa

SEQ ID NO: 706662 - DNA, 120 bp, Artificial Sequence
  ENSG00000196569_10 (sequence is synthesized)
cactgctggtataaactgcgagacatgtactgatggcttcttcagacccaaaggggtatctccaaattatccaaggccatgccagccatgtcattgcgatccaattggttccttaaatga

SEQ ID NO: 706663 - DNA, 120 bp, Artificial Sequence
  ENSG00000196569_11 (sequence is synthesized)
agtctgtgtcaaggatgagaaacatgctcgacgaggtttggcacctggatcctgtcattgcaaaactggttttggaggtgtgagctgtgatcggtgtgccaggggctacactggctaccc

SEQ ID NO: 706664 - DNA, 120 bp, Artificial Sequence
  ENSG00000196569_12 (sequence is synthesized)
ggactgcaaagcctgtaactgcagtgggttagggagcaaaaatgaggatccttgttttggcccctgtatctgcaaggaaaatgttgaaggaggagactgtagtcgttgcaaatccggctt

SEQ ID NO: 706665 - DNA, 120 bp, Artificial Sequence
  ENSG00000196569_13 (sequence is synthesized)
cttcaatttgcaagaggataattggaaaggctgcgatgagtgtttctgttcaggggtttcaaacagatgtcagagttcctactggacctatggcaaaatacaagatatgagtggctggta

SEQ ID NO: 706666 - DNA, 120 bp, Artificial Sequence
  ENSG00000196569_14 (sequence is synthesized)
tctgactgaccttcctggccgcattcgagtggctccccagcaggacgacttggactcacctcagcagatcagcatcagtaacgcggaggcccggcaagccctgccgcacagctactactg

SEQ ID NO: 706667 - DNA, 120 bp, Artificial Sequence
  ENSG00000196569_15 (sequence is synthesized)
gagcgcgccggctccctatctgggaaacaaactcccagcagtaggaggacagttgacatttaccatatcatatgaccttgaagaagaggaagaagatacagaacgtgttctccagcttat

SEQ ID NO: 706668 - DNA, 120 bp, Artificial Sequence
  ENSG00000196569_16 (sequence is synthesized)
gattatcttagagggtaatgacttgagcatcagcacagcccaagatgaggtgtacctgcacccatctgaagaacatactaatgtattgttacttaaagaagaatcatttaccatacatgg

SEQ ID NO: 706669 - DNA, 120 bp, Artificial Sequence
  ENSG00000196569_17 (sequence is synthesized)
cacacattttccagtccgtagaaaggaatttatgacagtgcttgcgaatttgaagagagtcctcctacaaatcacatacagctttgggatggatgccatcttcaggttgagctctgttaa

SEQ ID NO: 706670 - DNA, 120 bp, Artificial Sequence
  ENSG00000196569_18 (sequence is synthesized)
ccttgaatccgctgtctcctatcctactgatggaagcattgcagcagctgtagaagtgtgtcagtgcccaccagggtatactggctcctcttgtgaatcttgttggcctaggcacaggcg

SEQ ID NO: 706671 - DNA, 120 bp, Artificial Sequence
  ENSG00000196569_19 (sequence is synthesized)
agttaacggcactatttttggtggcatctgtgagccatgtcagtgctttggtcatgcggagtcctgtgatgacgtcactggagaatgcctgaactgtaaggatcacacaggtggcccata

SEQ ID NO: 706672 - DNA, 120 bp, Artificial Sequence
  ENSG00000196569_20 (sequence is synthesized)
ttgtgataaatgtcttcctggtttctatggcgagcctactaaaggaacctctgaagactgtcaaccctgtgcctgtccactcaatatcccatccaataactttagcccaacgtgccattt

SEQ ID NO: 706673 - DNA, 120 bp, Artificial Sequence
  ENSG00000196569_21 (sequence is synthesized)
agaccggagtcttggattgatctgtgatggatgccctgtcgggtacacaggaccacgctgtgagaggtgtgcagaaggctattttggacaaccctctgtacctggaggatcatgtcagcc

SEQ ID NO: 706674 - DNA, 120 bp, Artificial Sequence
  ENSG00000196569_22 (sequence is synthesized)
atgccaatgcaatgacaaccttgacttctccatccctggcagctgtgacagcttgtctggctcctgtctgatatgtaaaccaggtacaacaggccggtactgtgagctctgtgctgatgg

SEQ ID NO: 706675 - DNA, 120 bp, Artificial Sequence
  ENSG00000196569_23 (sequence is synthesized)
atattttggagatgcagttgatgcgaagaactgtcagccctgtcgctgtaatgccggtggctctttctctgaggtttgccacagtcaaactggacagtgtgagtgcagagccaacgttca

SEQ ID NO: 706676 - DNA, 120 bp, Artificial Sequence
  ENSG00000196569_24 (sequence is synthesized)
gggtcagagatgtgacaaatgcaaggctgggacctttggcctacaatcagcaaggggctgtgttccctgcaactgcaattcttttgggtctaagtcattcgactgtgaagagagtggaca

SEQ ID NO: 706677 - DNA, 120 bp, Artificial Sequence
  ENSG00000196569_25 (sequence is synthesized)
atgttggtgccaacctggagtcacagggaagaaatgtgaccgctgtgcccacggctatttcaacttccaagaaggaggctgcacagcttgtgaatgttctcatctgggtaataattgtga

SEQ ID NO: 706678 - DNA, 120 bp, Artificial Sequence
  ENSG00000196569_26 (sequence is synthesized)
cccaaagactgggcgatgcatttgccctcccaataccattggagagaaatgttctaaatgtgcacccaatacctggggccacagcattaccactggttgtaaggcttgtaactgcagcac

SEQ ID NO: 706679 - DNA, 120 bp, Artificial Sequence
  ENSG00000196569_27 (sequence is synthesized)
agtgggatccttggatttccaatgcaatgtaaatacaggccaatgcaactgtcatccaaaattctctggtgcaaaatgtacagagtgcagtcgaggtcactggaactaccctcgctgcaa

SEQ ID NO: 706680 - DNA, 120 bp, Artificial Sequence
  ENSG00000196569_28 (sequence is synthesized)
tctctgtgactgcttcctccctgggacagatgccacaacctgtgattcagagactaaaaaatgctcctgtagtgatcaaactgggcagtgcacttgtaaggtgaatgtggaaggcatcca

SEQ ID NO: 706681 - DNA, 120 bp, Artificial Sequence
  ENSG00000196569_29 (sequence is synthesized)
ctgtgacagatgccggcctggcaaattcggactcgatgccaagaatccacttggctgcagcagctgctattgcttcggcactactacccagtgctctgaagcaaaaggactgatccggac

SEQ ID NO: 706682 - DNA, 120 bp, Artificial Sequence
  ENSG00000196569_30 (sequence is synthesized)
gtgggtgactctgaaggctgagcagaccattctacccctggtagatgaggctctgcagcacacgaccaccaagggcattgtttttcaacatccagagattgttgcccacatggacctgat

SEQ ID NO: 706683 - DNA, 120 bp, Artificial Sequence
  ENSG00000196569_31 (sequence is synthesized)
gagagaagatctccatttggaacctttttattggaaacttccagaacaatttgaaggaaagaagttgatggcctatgggggcaaactcaagtatgcaatctatttcgaggctcgggaaga

SEQ ID NO: 706684 - DNA, 120 bp, Artificial Sequence
  ENSG00000196569_32 (sequence is synthesized)
aacaggtttctctacatataatcctcaagtgatcattcgaggtgggacacctactcatgctagaattatcgtcaggcatatggctgctcctctgattggccaattgacaaggcatgaaat

SEQ ID NO: 706685 - DNA, 120 bp, Artificial Sequence
  ENSG00000196569_33 (sequence is synthesized)
tgaaatgacagagaaagaatggaaatattatggggatgatcctcgagtccatagaactgtgacccgagaagacttcttggatatactatatgatattcattacattcttatcaaagctac

SEQ ID NO: 706686 - DNA, 120 bp, Artificial Sequence
  ENSG00000196569_34 (sequence is synthesized)
ttatggaaatttcatgcgacaaagcaggatttctgaaatctcaatggaggtagctgaacaaggacgtggaacaacaatgactcctccagctgacttgattgaaaaatgtgattgtcccct

SEQ ID NO: 706687 - DNA, 120 bp, Artificial Sequence
  ENSG00000196569_35 (sequence is synthesized)
gggctattctggcctgtcctgtgaggcatgcttgccgggattttatcgactgcgttctcaaccaggtggccgcacccctggaccaaccctgggcacctgtgttccatgtcaatgtaatgg

SEQ ID NO: 706688 - DNA, 120 bp, Artificial Sequence
  ENSG00000196569_36 (sequence is synthesized)
acacagcagcctgtgtgaccctgaaacatcgatatgccagaattgtcaacatcacactgctggtgacttctgtgaacgatgtgctcttggatactatggaattgtcaagggattgccaaa

SEQ ID NO: 706689 - DNA, 120 bp, Artificial Sequence
  ENSG00000196569_37 (sequence is synthesized)
tgactgtcagcaatgtgcctgccctctgatttcttccagtaacaatttcagcccctcttgtgtcgcagaaggacttgacgactaccgctgcacggcttgtccacggggatatgaaggcca

SEQ ID NO: 706690 - DNA, 120 bp, Artificial Sequence
  ENSG00000196569_38 (sequence is synthesized)
gtactgtgaaaggtgtgcccctggctatactggcagtccaggcaaccctggaggctcctgccaagaatgtgagtgtgatccctatggctcactgcctgtgccctgtgaccctgtcacagg

SEQ ID NO: 706691 - DNA, 120 bp, Artificial Sequence
  ENSG00000196569_39 (sequence is synthesized)
attctgcacgtgccgacctggagccacgggaaggaagtgtgacggctgcaagcactggcatgcacgcgagggctgggagtgtgttttttgtggagatgagtgcactggccttcttctcgg

SEQ ID NO: 706692 - DNA, 120 bp, Artificial Sequence
  ENSG00000196569_40 (sequence is synthesized)
ctcactggtccgctgcctgcgccatataaaatgctgtatggtcttgaaaatatgactcaggagctaaagcacttgctgtcacctcagcgggccccagagaggcttattcagctggcagag

SEQ ID NO: 706693 - DNA, 120 bp, Artificial Sequence
  ENSG00000196569_41 (sequence is synthesized)
ggcaatctgaatacactcgtgaccgaaatgaacgagctgctgaccagggctaccaaagtgacagcagatggcgagcagaccggacaggatgctgagaggaccaacacaagagcaaagtcc

SEQ ID NO: 706694 - DNA, 120 bp, Artificial Sequence
  ENSG00000196569_42 (sequence is synthesized)
ctgggagaattcattaaggagcttgcccgggatgcagaagctgtaaatgaaaaagctataaaactaaatgaaactctaggaactcgagacgaggcctttgagagaaatttggaagggctt

SEQ ID NO: 706695 - DNA, 120 bp, Artificial Sequence
  ENSG00000196569_43 (sequence is synthesized)
cagaaagagattgaccagatgattaaagaactgaggaggaaaaatctagagacacaaaaggaaattgctgaagatgagttggtagctgcagaagcccttctgaaaaaagtgaagaagctg

SEQ ID NO: 706696 - DNA, 120 bp, Artificial Sequence
  ENSG00000196569_44 (sequence is synthesized)
tttggagagtcccggggggaaaatgaagaaatggagaaggatctccgggaaaaactggctgactacaaaaacaaagttgatgatgcttgggaccttttgagagaagccacagataaaatc

SEQ ID NO: 706697 - DNA, 120 bp, Artificial Sequence
  ENSG00000196569_45 (sequence is synthesized)
agagaagctaatcgcctatttgcagtaaatcagaaaaacatgactgcattggagaaaaagaaggaggctgttgaaagcggcaaacgacaaattgagaacactttaaaagagggcaatgac

SEQ ID NO: 706698 - DNA, 120 bp, Artificial Sequence
  ENSG00000196569_46 (sequence is synthesized)
atactcgatgaagccaaccgtcttgcagatgaaatcaactccatcatagactatgttgaagacatccaaactaaattgccacctatgtctgaggagcttaatgataaaatagatgacctc

SEQ ID NO: 706699 - DNA, 120 bp, Artificial Sequence
  ENSG00000196569_47 (sequence is synthesized)
tcccaagaaataaaggacaggaagcttgctgagaaggtgtcccaggctgagagccacgcagctcagttgaatgactcatctgctgtccttgatggaatccttgatgaggctaaaaacatc

SEQ ID NO: 706700 - DNA, 120 bp, Artificial Sequence
  ENSG00000196569_48 (sequence is synthesized)
tccttcaatgccactgcagccttcaaagcttacagcaatattaaggactatattgatgaagctgagaaagttgccaaagaagccaaagatcttgcacatgaagctacaaaactggcaaca

SEQ ID NO: 706701 - DNA, 120 bp, Artificial Sequence
  ENSG00000196569_49 (sequence is synthesized)
ggtcctcggggtttattaaaggaagatgccaaaggctgtcttcagaaaagcttcaggattcttaacgaagccaagaagttagcaaatgatgtaaaagaaaatgaagaccatctaaatggc

SEQ ID NO: 706702 - DNA, 120 bp, Artificial Sequence
  ENSG00000196569_50 (sequence is synthesized)
ttaaaaaccaggatagaaaatgctgatgctagaaatggggatctcttgagaactttgaatgacactttgggaaagttatcagctattccaaatgatacagctgctaaactgcaagctgtt

SEQ ID NO: 706703 - DNA, 120 bp, Artificial Sequence
  ENSG00000196569_51 (sequence is synthesized)
aaggacaaagccagacaagccaacgacacagctaaagatgtactggcacagattacagagctccaccagaacctcgatggcctgaagaagaattacaataaactagcagacagcgtcgcc

SEQ ID NO: 706704 - DNA, 120 bp, Artificial Sequence
  ENSG00000196569_52 (sequence is synthesized)
aaaacgaatgctgtggttaaagatccttccaagaacaaaatcattgccgatgcagatgccactgtcaaaaatttagaacaggaagctgaccggctaatagataaactcaaacccatcaag

SEQ ID NO: 706705 - DNA, 120 bp, Artificial Sequence
  ENSG00000196569_53 (sequence is synthesized)
gaacttgaggataacctaaagaaaaacatctctgagataaaggaattgataaaccaagctcggaaacaagccaattctatcaaagtatctgtgtcttcaggaggtgactgcattcgaaca

SEQ ID NO: 706706 - DNA, 120 bp, Artificial Sequence
  ENSG00000196569_54 (sequence is synthesized)
tacaaaccagaaatcaagaaaggaagttacaataatattgttgtcaacgtaaagacagctgttgctgataacctcctcttttatcttggaagtgccaaatttattgactttctggctata

SEQ ID NO: 706707 - DNA, 120 bp, Artificial Sequence
  ENSG00000196569_55 (sequence is synthesized)
gaaatgcgtaaaggcaaagtcagcttcctctgggatgttggatctggagttggacgtgtagagtacccagatttgactattgatgactcatattggtaccgtatcgtagcatcaagaact

SEQ ID NO: 706708 - DNA, 120 bp, Artificial Sequence
  ENSG00000196569_56 (sequence is synthesized)
gggagaaatggaactatttctgtgagagccctggatggacccaaagccagcattgtgcccagcacacaccattcgacgtctcctccagggtacacgattctagatgtggatgcaaatgca

SEQ ID NO: 706709 - DNA, 120 bp, Artificial Sequence
  ENSG00000196569_57 (sequence is synthesized)
atgctgtttgttggtggcctgactgggaaattaaagaaggctgatgctgtacgtgtgattacattcactggctgcatgggagaaacatactttgacaacaaacctataggtttgtggaat

SEQ ID NO: 706710 - DNA, 120 bp, Artificial Sequence
  ENSG00000196569_58 (sequence is synthesized)
ttccgagaaaaagaaggtgactgcaaaggatgcactgtcagtcctcaggtggaagatagtgaggggactattcaatttgatggagaaggttatgcattggtcagccgtcccattcgctgg

SEQ ID NO: 706711 - DNA, 120 bp, Artificial Sequence
  ENSG00000196569_59 (sequence is synthesized)
taccccaacatctccactgtcatgttcaagttcagaacattttcttcgagtgctcttctgatgtatcttgccacacgagacctgagagatttcatgagtgtggagctcactgatgggcac

SEQ ID NO: 706712 - DNA, 120 bp, Artificial Sequence
  ENSG00000196569_60 (sequence is synthesized)
ataaaagtcagttacgatctgggctcaggaatggcttccgttgtcagcaatcaaaaccataatgatgggaaatggaaatcattcactctgtcaagaattcaaaaacaagccaatatatca

SEQ ID NO: 706713 - DNA, 120 bp, Artificial Sequence
  ENSG00000196569_61 (sequence is synthesized)
attgtagatatagatactaatcaggaggagaatatagcaacttcgtcttctggaaacaactttggtcttgacttgaaagcagatgacaaaatatattttggtggcctgccaacgctgaga

SEQ ID NO: 706714 - DNA, 120 bp, Artificial Sequence
  ENSG00000196569_62 (sequence is synthesized)
aacttgagtatgaaagcaaggccagaagtaaatctgaagaaatattccggctgcctcaaagatattgaaatttcaagaactccgtacaatatactcagtagtcccgattatgttggtgtt

SEQ ID NO: 706715 - DNA, 120 bp, Artificial Sequence
  ENSG00000196569_63 (sequence is synthesized)
accaaaggatgttccctggagaatgtttacacagttagctttcctaagcctggttttgtggagctctcccctgtgccaattgatgtaggaacagaaatcaacctgtcattcagcaccaag

SEQ ID NO: 706716 - DNA, 120 bp, Artificial Sequence
  ENSG00000196569_64 (sequence is synthesized)
aatgagtccggcatcattcttttgggaagtggagggacaccagcaccacctaggagaaaacgaaggcagactggacaggcctattatgcaatactcctcaacaggggccgtctggaagtg

SEQ ID NO: 706717 - DNA, 120 bp, Artificial Sequence
  ENSG00000196569_65 (sequence is synthesized)
catctctccacaggggcacgaacaatgaggaaaattgtgatcagaccagagccgaatctgtttcatgatggaagagaacattccgttcatgtagagcgaactagaggcatctttacagtt

SEQ ID NO: 706718 - DNA, 120 bp, Artificial Sequence
  ENSG00000196569_66 (sequence is synthesized)
caagtggatgaaaacagaagatacatgcaaaacctgacagttgaacagcctatcgaagttaaaaagcttttcgttgggggtgctccacctgaatttcaaccttccccactcagaaatatt

SEQ ID NO: 706719 - DNA, 120 bp, Artificial Sequence
  ENSG00000196569_67 (sequence is synthesized)
cctccttttgaaggctgcatatggaatcttgttattaactctgtccccatggactttgcaaggcctgtgtccttcaaaaatgctgacattggtcgctgtgcccatcagaaactccgtgaa

SEQ ID NO: 706720 - DNA, 120 bp, Artificial Sequence
  ENSG00000196569_68 (sequence is synthesized)
gatgaagatggagcagctccagctgaaatagttatccagcctgagccagttcccaccccagcctttcctacgcccaccccagttctgacacatggtccttgtgctgcagaatcagaacca

SEQ ID NO: 706721 - DNA, 120 bp, Artificial Sequence
  ENSG00000196569_69 (sequence is synthesized)
gctcttttgatagggagcaagcagttcgggctttcaagaaacagtcacattgcaattgcatttgatgacaccaaagttaaaaaccgtctcacaattgagttggaagtaagaaccgaagct

SEQ ID NO: 706722 - DNA, 120 bp, Artificial Sequence
  ENSG00000196569_70 (sequence is synthesized)
gaatccggcttgcttttttacatggctcgcatcaatcatgctgattttgcaacagttcagctgagaaatggattgccctacttcagctatgacttggggagtggggacacccacaccatg

SEQ ID NO: 706723 - DNA, 120 bp, Artificial Sequence
  ENSG00000196569_71 (sequence is synthesized)
atccccaccaaaatcaatgatggccagtggcacaagattaagataatgagaagtaagcaagaaggaattctttatgtagatggggcttccaacagaaccatcagtcccaaaaaagccgac

SEQ ID NO: 706724 - DNA, 120 bp, Artificial Sequence
  ENSG00000196569_72 (sequence is synthesized)
atcctggatgtcgtgggaatgctgtatgttggtgggttacccatcaactacactacccgaagaattggtccagtgacctatagcattgatggctgcgtcaggaatctccacatggcagag

SEQ ID NO: 706725 - DNA, 120 bp, Artificial Sequence
  ENSG00000196569_73 (sequence is synthesized)
gcccctgccgatctggaacaacccacctccagcttccatgttgggacatgttttgcaaatgctcagaggggaacatattttgacggaaccggttttgccaaagcagttggtggattcaaa

SEQ ID NO: 706726 - DNA, 120 bp, Artificial Sequence
  ENSG00000196569_74 (sequence is synthesized)
gtgggattggaccttcttgtagaatttgaattccgcacaactacaacgactggagttcttctggggatcagtagtcaaaaaatggatggaatgggtattgaaatgattgatgaaaagttg

SEQ ID NO: 706727 - DNA, 120 bp, Artificial Sequence
  ENSG00000196569_75 (sequence is synthesized)
atgtttcatgtggacaatggtgcgggcagattcactgctgtctatgatgctggggttccagggcatttgtgtgatggacaatggcataaagtcactgccaacaagatcaaacaccgcatt

SEQ ID NO: 706728 - DNA, 120 bp, Artificial Sequence
  ENSG00000196569_76 (sequence is synthesized)
gagctcacagtcgatgggaaccaggtggaagcccaaagcccaaacccagcatctacatcagctgacacaaatgaccctgtgtttgttggaggcttcccagatgacctcaagcagtttggc

SEQ ID NO: 706729 - DNA, 120 bp, Artificial Sequence
  ENSG00000196569_77 (sequence is synthesized)
ctaacaaccagtattccgttccgaggttgcatcagatccctgaagctcaccaaaggcacaggcaagccactggaggttaattttgccaaggccctggaactgaggggcgttcaacctgta

SEQ ID NO: 706730 - DNA, 120 bp, Artificial Sequence
  ENSG00000196569_78 (sequence is synthesized)
tcatgcccagccaactaataaaaataagtgtaaccccaggaagagtctgtcaaaacaagtatatcaagtaaaacaaacaaatatattttacctatatatgttaattaaactaatttgtgc

SEQ ID NO: 706731 - DNA, 120 bp, Artificial Sequence
  ENSG00000196569_79 (sequence is synthesized)
atgtacatagaattctttctgtattcagatggtgctaattcagactccagactgaattttaattcaagttctttctcaagtctataaataatattaaactgattatttcattctaaataa

SEQ ID NO: 706732 - DNA, 120 bp, Artificial Sequence
  ENSG00000196569_80 (sequence is synthesized)
ttttctgaaattctcgtctcaggaaaccaccgacactcttagcaaggaagctgaacctcctgggttttgccaacacatttttccatagtttggtaaagaaagaaacctcaaaattctaca

SEQ ID NO: 706733 - DNA, 120 bp, Artificial Sequence
  ENSG00000196569_81 (sequence is synthesized)
cctgtcgctgtaatgccggtggctctttctctgaggtttgccacagtcaaactggacagtgtgagtgcagagccaacgttcagggtcagagatgtgacaaatgcaagcccaatatgtggc

SEQ ID NO: 706734 - DNA, 120 bp, Artificial Sequence
  ENSG00000196569_82 (sequence is synthesized)
gggatccagagaagcgattctgtgtgctatgtgactgcgatcccgttggctctgtgtcaccgcaatgtgatattacaggaagatgtgtctgtaaatcaggcttcgtagggaaacagtgca

SEQ ID NO: 706735 - DNA, 120 bp, Artificial Sequence
  ENSG00000196569_83 (sequence is synthesized)
cggccgcagcagcagcggcagtcacaggcacatcagcaaagaggcatagtaccaattctgtgtcaggcattttattcactttgtttcaactgttcttgagatcccggaggattaggacta

SEQ ID NO: 706736 - DNA, 120 bp, Artificial Sequence
  ENSG00000196569_84 (sequence is synthesized)
aagatatttagagtatgatataaagacagtctctttttaaaaacagcattttaaaggtttattccctgctgtcctgaatcttgcttctaatgctcttatcacgaccaatgcaacatgtgg

SEQ ID NO: 706737 - DNA, 120 bp, Artificial Sequence
  ENSG00000196570_0 (sequence is synthesized)
gcctcacagcgccgcaggccttccccgcgtggcgcctctatatttccccgagaggtgcgaggcggctgggcgcactcggagcgcgatgggcgactggaaggtctacatcagtgcagtgct

SEQ ID NO: 706738 - DNA, 120 bp, Artificial Sequence
  ENSG00000196570_1 (sequence is synthesized)
gcgggaccagcgcatcgacgacgtggccatcgtgggccatgcggacaacagctgcgtgtgggcttcgcggcccgggggcctgctggcggccatctcgccgcaggaggtgggcgtgctcac

SEQ ID NO: 706739 - DNA, 120 bp, Artificial Sequence
  ENSG00000196570_2 (sequence is synthesized)
cacctgctggccgagggtgacggcgtgctggacgcacgcaccaaggggctggacgcgcgcgccgtgtgcgtgggccgtgcgccgcgcgcgctcctggtgctaatgggccgacgcggcgta

SEQ ID NO: 706740 - DNA, 120 bp, Artificial Sequence
  ENSG00000196570_3 (sequence is synthesized)
catgggggcatcctcaacaagacggtgcacgaactcatacgcgggctgcgcatgcagggcgcctagccggccagccaggccgcccactggtagcgcgggccaaataaactgtgacctggg

SEQ ID NO: 706741 - DNA, 120 bp, Artificial Sequence
  ENSG00000196576_0 (sequence is synthesized)
acacaaaggccccgtctccatggcagcagcgcgggccagagcgcagcgccgagcgcggcccgggcgccatcgagccttggcggcggacgtgcagagaatctcgatgctggcctggagcag

SEQ ID NO: 706742 - DNA, 120 bp, Artificial Sequence
  ENSG00000196576_1 (sequence is synthesized)
aaactgagctggaccactggagcctcggtgagggggtgcggggggcaatggcactgcagctctgggccctgaccctgctgggcctgctgggcgcaggtgccagcctgaggccccgcaagc

SEQ ID NO: 706743 - DNA, 120 bp, Artificial Sequence
  ENSG00000196576_2 (sequence is synthesized)
tggacttcttccgcagcgagaaagagctgaaccacctggctgtggatgaggcctcaggcgtggtgtacctgggggcggtgaatgccctctaccagctggatgcgaagctgcagctggagc

SEQ ID NO: 706744 - DNA, 120 bp, Artificial Sequence
  ENSG00000196576_3 (sequence is synthesized)
agcaggtggccacgggcccggccctggacaacaagaagtgcacgccgcccatcgaggccagccagtgccatgaggctgagatgactgacaatgtcaaccagctgctgctgctcgaccctc

SEQ ID NO: 706745 - DNA, 120 bp, Artificial Sequence
  ENSG00000196576_4 (sequence is synthesized)
ccaggaagcgcctggtggagtgcggcagcctcttcaagggcatctgcgctctgcgcgccctgagcaacatctccctccgcctgttctacgaggacggcagcggggagaagtctttcgtgg

SEQ ID NO: 706746 - DNA, 120 bp, Artificial Sequence
  ENSG00000196576_5 (sequence is synthesized)
ccagcaatgatgagggcgtggccacagtggggctggtgagctccacgggtcctggtggtgaccgcgtgctgtttgtgggcaaaggcaatgggccacacgacaacggcatcatcgtgagca

SEQ ID NO: 706747 - DNA, 120 bp, Artificial Sequence
  ENSG00000196576_6 (sequence is synthesized)
ctcggctgttggaccggactgacagcagggaggcctttgaagcctacacggaccacgccacctacaaggccggctacctgtccaccaacacacagcagttcgtggcggccttcgaggacg

SEQ ID NO: 706748 - DNA, 120 bp, Artificial Sequence
  ENSG00000196576_7 (sequence is synthesized)
gcccctacgtcttctttgtcttcaaccagcaggacaagcacccggcccggaaccgcacgctgctggcacgcatgtgcagagaagaccccaactactactcctacctggagatggacctgc

SEQ ID NO: 706749 - DNA, 120 bp, Artificial Sequence
  ENSG00000196576_8 (sequence is synthesized)
agtgccgggaccccgacatccacgccgctgcctttggcacctgcctggccgcctccgtggctgcgcctggctctggcagggtgctatatgctgtcttcagcagagacagccggagcagtg

SEQ ID NO: 706750 - DNA, 120 bp, Artificial Sequence
  ENSG00000196576_9 (sequence is synthesized)
gggggcccggtgcgggcctctgcctgttcccgctggacaaggtgcacgccaagatggaggccaaccgcaacgcctgttacacaggcacccgggaggcccgtgacatcttctacaagccct

SEQ ID NO: 706751 - DNA, 120 bp, Artificial Sequence
  ENSG00000196576_10 (sequence is synthesized)
tccacggcgatatccagtgcggcggccacgcgccgggctccagcaagagcttcccatgtggctcggagcacctgccctacccgctgggcagccgcgacgggctcagaggcacagccgtgc

SEQ ID NO: 706752 - DNA, 120 bp, Artificial Sequence
  ENSG00000196576_11 (sequence is synthesized)
tgcagcgtggaggcctgaacctcacggccgtgacggtcgccgccgagaacaaccacactgttgcttttctgggcacctctgatggccggatcctcaaggtgtacctcaccccagatggca

SEQ ID NO: 706753 - DNA, 120 bp, Artificial Sequence
  ENSG00000196576_12 (sequence is synthesized)
cctcctcagagtacgactctatccttgtggagataaacaagagagtcaagcgcgacctggtactgtctggagacctgggcagcctgtacgccatgacccaggacaaggtgttccggctgc

SEQ ID NO: 706754 - DNA, 120 bp, Artificial Sequence
  ENSG00000196576_13 (sequence is synthesized)
cggtgcaggagtgcctgagctacccgacctgcacccagtgccgcgactcccaggacccctactgcggctggtgcgtcgtcgagggacgatgcacccggaaggccgagtgtccgcgggccg

SEQ ID NO: 706755 - DNA, 120 bp, Artificial Sequence
  ENSG00000196576_14 (sequence is synthesized)
aggaggccagccactggctgtggagccgaagcaagtcctgcgtggccgtcaccagcgcccagccacagaacatgagccggcgggcccagggggaggtgcagctgaccgtcagccccctcc

SEQ ID NO: 706756 - DNA, 120 bp, Artificial Sequence
  ENSG00000196576_15 (sequence is synthesized)
ctgccctgagcgaggaggacgagttgctgtgcctttttggggagtcgccgccacaccccgcccgcgtggagggcgaggccgtcatctgcaactccccaagcagcatccccgtcacaccgc

SEQ ID NO: 706757 - DNA, 120 bp, Artificial Sequence
  ENSG00000196576_16 (sequence is synthesized)
caggccaggaccacgtggccgtgaccatccagctcctccttagacgaggcaacatcttcctcacgtcctaccagtaccccttctacgactgccgccaggccatgagcctggaggagaacc

SEQ ID NO: 706758 - DNA, 120 bp, Artificial Sequence
  ENSG00000196576_17 (sequence is synthesized)
tgccgtgcatctcctgcgtgagcaaccgctggacctgccagtgggacctgcgctaccacgagtgccgggaggcttcgcccaaccctgaggacggcatcgtccgtgcccacatggaggaca

SEQ ID NO: 706759 - DNA, 120 bp, Artificial Sequence
  ENSG00000196576_18 (sequence is synthesized)
gctgtccccagttcctgggacccagccccctggtgatccccatgaaccacgagacagatgtgaacttccagggcaagaacctggacaccgtgaagggttcctccctgcacgtgggcagtg

SEQ ID NO: 706760 - DNA, 120 bp, Artificial Sequence
  ENSG00000196576_19 (sequence is synthesized)
acttgctcaagttcatggagccggtgaccatgcaggaatctgggaccttcgcctttcggaccccaaagctgtcccacgatgccaacgagacgctgcccctgcacctctacgtcaagtctt

SEQ ID NO: 706761 - DNA, 120 bp, Artificial Sequence
  ENSG00000196576_20 (sequence is synthesized)
acggcaagaatatcgacagcaagctccatgtgaccctctacaactgctcctttggccgcagcgactgcagcctgtgccgggccgctaaccccgactacaggtgtgcgtggtgcgggggcc

SEQ ID NO: 706762 - DNA, 120 bp, Artificial Sequence
  ENSG00000196576_21 (sequence is synthesized)
agagcaggtgcgtgtatgaggccctgtgcaacaccacctccgagtgcccgccgcccgtcatcaccaggatccagcctgagacgggccccctgggtgggggcatccgcatcaccatcctgg

SEQ ID NO: 706763 - DNA, 120 bp, Artificial Sequence
  ENSG00000196576_22 (sequence is synthesized)
ggtccaatttgggcgtccaagcaggggacatccagaggatctctgtggccggccggaactgctcctttcagccggaacgttactccgtgtccacccggatcgtgtgtgtgatcgaggctg

SEQ ID NO: 706764 - DNA, 120 bp, Artificial Sequence
  ENSG00000196576_23 (sequence is synthesized)
cggagacgcctttcacggggggtgtcgaggtggacgtcttcgggaaactgggccgttcgcctcccaatgtccagttcaccttccaacagcccaagcctctcagtgtggagccgcagcagg

SEQ ID NO: 706765 - DNA, 120 bp, Artificial Sequence
  ENSG00000196576_24 (sequence is synthesized)
gaccgcaggcgggcggcaccacactgaccatccacggcacccacctggacacgggctcccaggaggacgtgcgggtgaccctcaacggcgtcccgtgtaaagtgacgaagtttggggcgc

SEQ ID NO: 706766 - DNA, 120 bp, Artificial Sequence
  ENSG00000196576_25 (sequence is synthesized)
agctccagtgtgtcactggcccccaggcgacacggggccagatgcttctggaggtctcctacggggggtcccccgtgcccaaccccggcatcttcttcacctaccgcgaaaaccccgtac

SEQ ID NO: 706767 - DNA, 120 bp, Artificial Sequence
  ENSG00000196576_26 (sequence is synthesized)
caacgtcacgggtcagggcttcagcctgatccagaggtttgccatggtggtcatcgcggagcccctgcagtcctggcagccgccgcgggaggctgaatccctgcagcccatgacggtggt

SEQ ID NO: 706768 - DNA, 120 bp, Artificial Sequence
  ENSG00000196576_27 (sequence is synthesized)
gggtacagactacgtgttccacaatgacaccaaggtcgtcttcctgtccccggctgtgcctgaggagccagaggcctacaacctcacggtgctgatcgagatggacgggcaccgtgccct

SEQ ID NO: 706769 - DNA, 120 bp, Artificial Sequence
  ENSG00000196576_28 (sequence is synthesized)
gctcagaacagaggccggggccttcgagtacgtgcctgaccccacctttgagaacttcacaggtggcgtcaagaagcaggtcaacaagctcatccacgcccggggcaccaatctgaacaa

SEQ ID NO: 706770 - DNA, 120 bp, Artificial Sequence
  ENSG00000196576_29 (sequence is synthesized)
ggcgatgacgctgcaggaggccgaggccttcgtgggtgccgagcgctgcaccatgaagacgctgacggagaccgacctgtactgtgagcccccggaggtgcagcccccgcccaagcggcg

SEQ ID NO: 706771 - DNA, 120 bp, Artificial Sequence
  ENSG00000196576_30 (sequence is synthesized)
gcagaaacgagacaccacacacaacctgcccgagttcattgtgaagttcggctctcgcgagtgggtgctgggccgcgtggagtacgacacacgggtgagcgacgtgccgctcagcctcat

SEQ ID NO: 706772 - DNA, 120 bp, Artificial Sequence
  ENSG00000196576_31 (sequence is synthesized)
cttgccgctggtcatcgtgcccatggtggtcgtcatcgcggtgtctgtctactgctactggaggaagagccagcaggccgaacgagagtatgagaagatcaagtcccagctggagggcct

SEQ ID NO: 706773 - DNA, 120 bp, Artificial Sequence
  ENSG00000196576_32 (sequence is synthesized)
ggaggagagcgtgcgggaccgctgcaagaaggaattcacagacctgatgatcgagatggaggaccagaccaacgacgtgcacgaggccggcatccccgtgctggactacaagacctacac

SEQ ID NO: 706774 - DNA, 120 bp, Artificial Sequence
  ENSG00000196576_33 (sequence is synthesized)
cgaccgcgtcttcttcctgccctccaaggacggcgacaaggacgtgatgatcaccggcaagctggacatccctgagccgcggcggccggtggtggagcaggccctctaccagttctccaa

SEQ ID NO: 706775 - DNA, 120 bp, Artificial Sequence
  ENSG00000196576_34 (sequence is synthesized)
cctgctgaacagcaagtctttcctcatcaatttcatccacaccctggagaaccagcgggagttctcggcccgcgccaaggtctacttcgcgtccctgctgacggtggcgctgcacgggaa

SEQ ID NO: 706776 - DNA, 120 bp, Artificial Sequence
  ENSG00000196576_35 (sequence is synthesized)
actggagtactacacggacatcatgcacacgctcttcctggagctcctggagcagtacgtggtggccaagaaccccaagctgatgctgcgcaggtctgagactgtggtggagaggatgct

SEQ ID NO: 706777 - DNA, 120 bp, Artificial Sequence
  ENSG00000196576_36 (sequence is synthesized)
gtccaactggatgtccatctgcctgtaccagtacctcaaggacagtgccggggagcccctgtacaagctcttcaaggccatcaaacatcaggtggaaaagggcccggtggatgcggtaca

SEQ ID NO: 706778 - DNA, 120 bp, Artificial Sequence
  ENSG00000196576_37 (sequence is synthesized)
gaagaaggccaagtacactctcaacgacacggggctgctgggggatgatgtggagtacgcacccctgacggtgagcgtgatcgtgcaggacgagggagtggacgccatcccggtgaaggt

SEQ ID NO: 706779 - DNA, 120 bp, Artificial Sequence
  ENSG00000196576_38 (sequence is synthesized)
cctcaactgtgacaccatctcccaggtcaaggagaagatcattgaccaggtgtaccgtgggcagccctgctcctgctggcccaggccagacagcgtggtcctggagtggcgtccgggctc

SEQ ID NO: 706780 - DNA, 120 bp, Artificial Sequence
  ENSG00000196576_39 (sequence is synthesized)
cacagcgcagatcctgtcggacctggacctgacgtcacagcgggagggccggtggaagcgcgtcaacacccttatgcactacaatgtccgggatggagccaccctcatcctgtccaaggt

SEQ ID NO: 706781 - DNA, 120 bp, Artificial Sequence
  ENSG00000196576_40 (sequence is synthesized)
gggggtctcccagcagccggaggacagccagcaggacctgcctggggagcgccatgccctcctggaggaggagaaccgggtgtggcacctggtgcggccgaccgacgaggtggacgaggg

SEQ ID NO: 706782 - DNA, 120 bp, Artificial Sequence
  ENSG00000196576_41 (sequence is synthesized)
caagtccaagagaggcagcgtgaaagagaaggagcggacgaaggccatcaccgagatctacctgacgcggctgctctcagtcaagggcacactgcagcagtttgtggacaacttcttcca

SEQ ID NO: 706783 - DNA, 120 bp, Artificial Sequence
  ENSG00000196576_42 (sequence is synthesized)
gagcgtgctggcgcctgggcacgcggtgccacctgcagtcaagtacttcttcgacttcctggacgagcaggcagagaagcacaacatccaggatgaagacaccatccacatctggaagac

SEQ ID NO: 706784 - DNA, 120 bp, Artificial Sequence
  ENSG00000196576_43 (sequence is synthesized)
gaacagcttaccgctccggttctgggtgaacatcctcaagaacccccacttcatctttgacgtgcatgtccacgaggtggtggacgcctcgctgtcagtcatcgcgcagaccttcatgga

SEQ ID NO: 706785 - DNA, 120 bp, Artificial Sequence
  ENSG00000196576_44 (sequence is synthesized)
tgcctgcacgcgcacggagcataagctgagccgcgattctcccagcaacaagctgctgtacgccaaggagatctccacctacaagaagatggtggaggattactacaaggggatccggca

SEQ ID NO: 706786 - DNA, 120 bp, Artificial Sequence
  ENSG00000196576_45 (sequence is synthesized)
gatggtgcaggtcagcgaccaggacatgaacacacacctggcagagatttcccgggcgcacacggactccttgaacaccctcgtggcactccaccagctctaccaatacacgcagaagta

SEQ ID NO: 706787 - DNA, 120 bp, Artificial Sequence
  ENSG00000196576_46 (sequence is synthesized)
ctatgacgagatcatcaatgccttggaggaggatcctgccgcccagaagatgcagctggccttccgcctgcagcagattgccgctgcactggagaacaaggtcactgacctctgacctac

SEQ ID NO: 706788 - DNA, 120 bp, Artificial Sequence
  ENSG00000196576_47 (sequence is synthesized)
aatctccagtgctgccttgggacataggtacctgaggtacctgagagcccctcaggggaggaggccgagtggctgtggctgaggcccccaccctcccctggaacgcgccccaagccggag

SEQ ID NO: 706789 - DNA, 120 bp, Artificial Sequence
  ENSG00000196576_48 (sequence is synthesized)
tgggtgcagccggaacccgcccagcgtctagactgtagcatcttcctctgagcaataccgccgggcaccgcaccagcaccagccccagccccagctccctccggccgcagaaccagcatc

SEQ ID NO: 706790 - DNA, 120 bp, Artificial Sequence
  ENSG00000196576_49 (sequence is synthesized)
gggtgttcactgtcgagtctccagtgatttgaaaatgtgccttacgctgccacgctgggggcagctggcctccgcctccgcccacgcaccagcagccgcctccatgccctaggttgggcc

SEQ ID NO: 706791 - DNA, 120 bp, Artificial Sequence
  ENSG00000196576_50 (sequence is synthesized)
cctgggggatctgagggcctgtggcccccagggcaagttcccagatcctatgtctgtctgtccaccacgagatgggaggaggagaaaaagcggtacgatgccttcctgacctcaccggcc

SEQ ID NO: 706792 - DNA, 120 bp, Artificial Sequence
  ENSG00000196576_51 (sequence is synthesized)
tccccaagggtgccggcactctgggtggactcacggctgctgggccccacgtcaaaggtcaagtgagacgtaggtcaagtcctacgtcggggcccagacatcctggggtcctggtctgtc

SEQ ID NO: 706793 - DNA, 120 bp, Artificial Sequence
  ENSG00000196576_52 (sequence is synthesized)
agacaggctgccctagagccccacccagtccggggggactgggagcagttccaagaccaccccacccctttttgtaaatcttgttcattgtaaatcaaatacagcgtctttttcactctg

SEQ ID NO: 706794 - DNA, 120 bp, Artificial Sequence
  ENSG00000196576_53 (sequence is synthesized)
atgtcctgtcctgatgagttggtggttcctgctgtagccatcggcctcgtgtgccccgagcgcctggcggtgcccacccctcccacaggaggtcctcaggaagcacggagacatcgagaa

SEQ ID NO: 706795 - DNA, 120 bp, Artificial Sequence
  ENSG00000196576_54 (sequence is synthesized)
aacctgcccgagttcattgtgcgtgagcggggactggcggggggtgcccccacgggaccgcgctgaacccggccccccacacaggtgaagttcggctctcgcgagtgggtgctgggccgc

SEQ ID NO: 706796 - DNA, 120 bp, Artificial Sequence
  ENSG00000196576_55 (sequence is synthesized)
ctgcccgtctgcacacaggcgcccatgtgcctggcctgtgtcctggggcggtatcctgcctggccagctttctcatatgggagtggtgggcagtgggaggaacctgggtggctggggccc

SEQ ID NO: 706797 - DNA, 120 bp, Artificial Sequence
  ENSG00000196576_56 (sequence is synthesized)
aagctgggctgtctcttcccacagagtggcgtccgggctccacagcgcagatcctgtcggacctggacctgacgtcacagcgggagggccggtggaagcgcgtcaacacccttatgcact

SEQ ID NO: 706798 - DNA, 120 bp, Artificial Sequence
  ENSG00000196576_57 (sequence is synthesized)
acttcctcctagaaacccagatgggcacaccagaggctccacgctcaccaggccccgtgtgccccccgcccacttgcggcacagtctcgtgctcagcacgtcccaccgcgttgccccttt

SEQ ID NO: 706799 - DNA, 120 bp, Artificial Sequence
  ENSG00000196576_58 (sequence is synthesized)
gcccaccgagacccacacatgcacctggaagccccgtgtggtcagggccagggtgggcggggacgggagggcggaggctgcagggaccacccctgccagccgagcccacgaaggcactgc

SEQ ID NO: 706800 - DNA, 120 bp, Artificial Sequence
  ENSG00000196576_59 (sequence is synthesized)
agacagatgtgaacttccagggcaagaacctggacaccgtgaaggtgtggatgagtggtggaggtggccgtgggaaacccacagaggacgttcagaggcttctgcagacacagggttcct

SEQ ID NO: 706801 - DNA, 120 bp, Artificial Sequence
  ENSG00000196578_0 (sequence is synthesized)
atggatatatcagagggaaataagactcttgtgacagagtttgttctcacaggacttacagatcgaccatggctgcacgtcctcttctttgttgtgtttttggtggtctatctcatcacc

SEQ ID NO: 706802 - DNA, 120 bp, Artificial Sequence
  ENSG00000196578_1 (sequence is synthesized)
atggtgggcaaccttggactgatagttctaatttggaacgacccccatcttcatatgcccatgtacttattccttggtggtttagccttttcagatgcttgtacttcaacctctataacc

SEQ ID NO: 706803 - DNA, 120 bp, Artificial Sequence
  ENSG00000196578_2 (sequence is synthesized)
cctaggatgctggtcaatttcttagacaagactgcaatgatatccctagctgagtgcatcacccagttttacttttttgcttccagtgcaactacagaatgcttcctcctggtgatgatg

SEQ ID NO: 706804 - DNA, 120 bp, Artificial Sequence
  ENSG00000196578_3 (sequence is synthesized)
tatgtaattggtttcctgcatcctctggttcatgtgagtttactattgcgactaactttctgcaggtttaacataatacattatttctactgtgaaattttacaactgttcaaaatttca

SEQ ID NO: 706805 - DNA, 120 bp, Artificial Sequence
  ENSG00000196578_4 (sequence is synthesized)
tgcaatggtccatctattaacgcactaatgatatttatttttggtgcttttatacaaatacccactttaatgactatcataatctcttatactcgtgtgctctttgatattctgaaaaaa

SEQ ID NO: 706806 - DNA, 120 bp, Artificial Sequence
  ENSG00000196578_5 (sequence is synthesized)
aagtctgaaaagggcagaagcaaagccttctccacatgcggcgcccatctgctttctgtctcattgtactacggaactctgatcttcatgtatgtgcgtcctgcatctggcttagctgaa

SEQ ID NO: 706807 - DNA, 120 bp, Artificial Sequence
  ENSG00000196578_6 (sequence is synthesized)
gaccaagacaaagtgtattctctgttttacacgattataattcccctgctaaacccatttatttacagcttgagaaataaaaaagtcatgcatgcattgagaagagttataaggaagtaa

SEQ ID NO: 706808 - DNA, 120 bp, Artificial Sequence
  ENSG00000196581_0 (sequence is synthesized)
cacgccccgcgctccacggcgccctcgccccgcgcgcctctcgtgcccgcctcctgccagtctccgggccgcggccgtctgcagagcgagcgctcagacggagcccccgggcaacttgag

SEQ ID NO: 706809 - DNA, 120 bp, Artificial Sequence
  ENSG00000196581_1 (sequence is synthesized)
tggcgccgatcggcggcggagcctctggcagagccccccgacccggcagcgcggaggggactcgcgtccgtccgcgtcgcgtcaccccaaaccctaagcagcgccgccccatcggcgcgg

SEQ ID NO: 706810 - DNA, 120 bp, Artificial Sequence
  ENSG00000196581_2 (sequence is synthesized)
aaaccctaagcagcgccgccccatcggcgcggagctccggctggaggcaagagccgcgcgccgggagacacgcaccgtgagcggcagcgccgccggcctccctcctcgccgccccggagg

SEQ ID NO: 706811 - DNA, 80 bp, Artificial Sequence
  ENSG00000196581_3 (sequence is synthesized)
ttgctgcgccgcgacagcgccggaacacgccccgcctcgctgccgccttcgctgtgccgccggcggagggggccgcgagc

SEQ ID NO: 706812 - DNA, 80 bp, Artificial Sequence
  ENSG00000196581_4 (sequence is synthesized)
cctgagccatgcgccccaacggcggcggcgcgccggccggcatggagccccgcgcggccgcgctctgactcgctgtgcgc

SEQ ID NO: 706813 - DNA, 120 bp, Artificial Sequence
  ENSG00000196581_5 (sequence is synthesized)
gaccggcgccgcgggacggaagcgagcgggcgcgggcgccgcgcagatggcctgggcgagccaggtctgaggccccgctccccgaaacgtgaccatgtggattcaacagcttttaggact

SEQ ID NO: 706814 - DNA, 120 bp, Artificial Sequence
  ENSG00000196581_6 (sequence is synthesized)
cagctccatgtccatccgctggccgggccgccccctcggaagccatgcctggatactgatagccatgtttcagctcgccgtggacctgcccgcctgtgaggccctgggcccggggccgga

SEQ ID NO: 706815 - DNA, 120 bp, Artificial Sequence
  ENSG00000196581_7 (sequence is synthesized)
gttctggctcctgccgcggtcgccgccccggccgccccggctgtggagttttaggagtggacagccagcgcgggtcccggccccggtgtggagcccccggccgccccgagtggagcggat

SEQ ID NO: 706816 - DNA, 120 bp, Artificial Sequence
  ENSG00000196581_8 (sequence is synthesized)
ccacgggcagatgcagatgcctcgagccagacgggcccacaggccccgggaccaggcggccgccctcgtgcccaaggcaggactggccaagcccccagctgctgccaaatccagcccttc

SEQ ID NO: 706817 - DNA, 120 bp, Artificial Sequence
  ENSG00000196581_9 (sequence is synthesized)
ctcagcagcttcgactccagaggcagccggcccaccacagagactgagttcatcgcctgggggcccacgggggacgaggaggccctggagtccaacacatttccgggcgtttacggcccc

SEQ ID NO: 706818 - DNA, 120 bp, Artificial Sequence
  ENSG00000196581_10 (sequence is synthesized)
accacggtctccatcctacaaacacggaagacaactgtggccgccaccaccaccaccaccaccacggccacccccatgacgctgcagactaaggggttcaccgagtccttggatccccgg

SEQ ID NO: 706819 - DNA, 120 bp, Artificial Sequence
  ENSG00000196581_11 (sequence is synthesized)
agaaggatcccaggtggggttagcacaacggagccttccaccagtcccagcaacaacggggaagtcacccagcccccaaggattctgggggaggcctcaggtctggctgtccatcagatc

SEQ ID NO: 706820 - DNA, 120 bp, Artificial Sequence
  ENSG00000196581_12 (sequence is synthesized)
atcaccatcaccgtctccctcatcatggtcatagctgctctcatcacaactcttgtcttaaaaaattgctgtgcccaaagcgggaacactcgtcggaacagccaccagcggaagaccaac

SEQ ID NO: 706821 - DNA, 120 bp, Artificial Sequence
  ENSG00000196581_13 (sequence is synthesized)
cagcaggaggagagctgccagaacctcacggacttcccctcggcccgggtgcccagcagcctggacatattcacggcctataacgagaccctgcagtgttctcacgagtgcgtcagggca

SEQ ID NO: 706822 - DNA, 120 bp, Artificial Sequence
  ENSG00000196581_14 (sequence is synthesized)
tctgtgcccgtgtacaccgatgagacgctgcactcgacgacgggggagtacaaatccacatttaatggaaaccgaccctcctcttctgatcggcatcttattcctgtggccttcgtgtct

SEQ ID NO: 706823 - DNA, 120 bp, Artificial Sequence
  ENSG00000196581_15 (sequence is synthesized)
gagaaatggtttgaaatctcctgctgactggccgaagtcttttttacctcctgggggcagggcagacgccgtgtgtctgtttcacggcggttgtccggaatgccagtggctcctgggcag

SEQ ID NO: 706824 - DNA, 120 bp, Artificial Sequence
  ENSG00000196581_16 (sequence is synthesized)
atgtgcaccccagattcagcctttgtgatagattccaacacgttctggcctcagaccacctttgtggtggggccagactgctctgggcaaagtgaagctggcctttatgctccaaggaag

SEQ ID NO: 706825 - DNA, 120 bp, Artificial Sequence
  ENSG00000196581_17 (sequence is synthesized)
ggggcctcgagagcaggcctgcattggctctcggactaattcgcgatcatctttcatacagcaggtacacttcagcaaacctcgttaatgttgatctctttccctttgccaaggccgctt

SEQ ID NO: 706826 - DNA, 120 bp, Artificial Sequence
  ENSG00000196581_18 (sequence is synthesized)
cgttctgaacggagcctgcaaagtcataaaagctcttgaatccgaagcaagtgagaaataaatcatgcactattattattttcaaaaacacattgatcactaataaaaaataagaagtgt

SEQ ID NO: 706827 - DNA, 120 bp, Artificial Sequence
  ENSG00000196581_19 (sequence is synthesized)
aaagacaaaacctaaaactgagctatctaagggggagggtccccgcacctaccacttctgtttgccggtgggaaactcacagagcaggacgctctaggccaaatctatttttgtaaaaat

SEQ ID NO: 706828 - DNA, 120 bp, Artificial Sequence
  ENSG00000196581_20 (sequence is synthesized)
gctcatgcctatgggtgactgccttctcccagagttttctttggagaacagaaagaagaaaggaaagaaaggaaccagaggcagagagacgaggatacccagcgaaagggacgggaggaa

SEQ ID NO: 706829 - DNA, 120 bp, Artificial Sequence
  ENSG00000196581_21 (sequence is synthesized)
gcatccgaaacctaggattcgtcctacgattctgaacctgtgccaataataccattatgtgccatgtactgacccgaaaggctcggccgcagagccggggcccagcgaatcacgcagaga

SEQ ID NO: 706830 - DNA, 120 bp, Artificial Sequence
  ENSG00000196581_22 (sequence is synthesized)
aatcttacagaaaacaggggtgggaatctcttccgatagagtcgctatttctggttaatatacatatataaatatataaatacaaacacacacacacactttttttgtactgtagcaatt

SEQ ID NO: 706831 - DNA, 120 bp, Artificial Sequence
  ENSG00000196581_23 (sequence is synthesized)
tttgaagatcttaaatgttcctttttaaaaaaaagaattgtgttataggttacaaaatctgatttatttaacatgcttagtatgagcagaataaaccagtgttttctactttggcaactc

SEQ ID NO: 706832 - DNA, 120 bp, Artificial Sequence
  ENSG00000196581_24 (sequence is synthesized)
acgtcacacacatattacacacatgtgcgcattacacacacacaatacacatacatgcatatagacgcatctattggaaatgcagttccacaggtgagcatgttctttctggtgacctgg

SEQ ID NO: 706833 - DNA, 120 bp, Artificial Sequence
  ENSG00000196581_25 (sequence is synthesized)
tattccatcaccattcaccccaggggacagcctcgaccgagacaaggaggcccttaaatgacagcctgcatttgctagacggttggtgagtggcatcaaatgtgtgacttactatcttgg

SEQ ID NO: 706834 - DNA, 64 bp, Artificial Sequence
  ENSG00000196581_26 (sequence is synthesized)
ggttggtgagtggcatcaaatgtgtgacttactatcttgggccagaactaagaatgccaaggtt

SEQ ID NO: 706835 - DNA, 120 bp, Artificial Sequence
  ENSG00000196581_27 (sequence is synthesized)
gtgtatatatatgtttgtgtatatatatacacatatgcatacatatgatttttttttttcatttaagtgttggaagatgctacctaacagccacgttcacatttacgtagctggttgctt

SEQ ID NO: 706836 - DNA, 120 bp, Artificial Sequence
  ENSG00000196581_28 (sequence is synthesized)
acaaacgggcctgagcccctggttgggtgggtggtggattcttggacgtgtgtgtcatacaagcatagactggattaaagaagttttccagttccaaaaattaaaggaatatatccttat

SEQ ID NO: 706837 - DNA, 120 bp, Artificial Sequence
  ENSG00000196581_29 (sequence is synthesized)
gatgtgtgtgtgtaatatcagggcagaacttagacatacgtgaagggccccggttggtttgaaaacgaaaaatagtcattctgtgtgcaaaccacaaggctgccccagtcaggcagcgcc

SEQ ID NO: 706838 - DNA, 120 bp, Artificial Sequence
  ENSG00000196581_30 (sequence is synthesized)
ctgacctggcctgtgctgcattgccttcccttgcgcaggtgggcaggtgtggcccgctttttctagggcccaagggtgacttggaatcttgggggaagcctcggcaaagatgccgttctc

SEQ ID NO: 706839 - DNA, 120 bp, Artificial Sequence
  ENSG00000196581_31 (sequence is synthesized)
ccgtcagcttccattggccgatggatgtttctgttttgtcaccgagaatcctactataaactacccagtggaaacaggggccccagacctgagcctcagtacagagaatcccaaccacac

SEQ ID NO: 706840 - DNA, 120 bp, Artificial Sequence
  ENSG00000196581_32 (sequence is synthesized)
acactttattaaaaatactgccatgccgccgggcctccctcacaagcctcacctgaaacgggctcactggtgccccagacttgctgtcaacagcgggtgctgtagggatctagggatgca

SEQ ID NO: 706841 - DNA, 120 bp, Artificial Sequence
  ENSG00000196581_33 (sequence is synthesized)
tctcatggcccacgctgtgcctccttaaaggatgtttcctgtccatgggagacgcctaacatggtgtgggtccctgtctccaaagactatatttctcacgcgtggcccacgtgcagcttt

SEQ ID NO: 706842 - DNA, 120 bp, Artificial Sequence
  ENSG00000196581_34 (sequence is synthesized)
aatttcagcagtagagtgcatgagccaattcagtgaaatgtcacaggccaggcaaaaaggttaaagatcagacagacagctgaccttactgccctcaatggccaggctgatgacctgatt

SEQ ID NO: 706843 - DNA, 120 bp, Artificial Sequence
  ENSG00000196581_35 (sequence is synthesized)
cttcccttgggctcagtctccctctaaaacaccttgtgatatgcttcagaagttcacttttgtatctcctgaaacatgtgaacctagagtaaggcctccggaggtgaaaggattgttttt

SEQ ID NO: 706844 - DNA, 120 bp, Artificial Sequence
  ENSG00000196581_36 (sequence is synthesized)
gtgatgcagcagtgttgagatctgtatccatggtattgctcacaaattaggaaaagttgttctttagtttttgttctgtcatttattttccccccaagctttggcacatcctgagacaat

SEQ ID NO: 706845 - DNA, 120 bp, Artificial Sequence
  ENSG00000196581_37 (sequence is synthesized)
gcaaacatccgccactggcatttggccgtctccaggttcctggcactcacctgcatggcgctccagcctgcagctctctctgcgcgccatccggcctcgtccatcccattctccttcaat

SEQ ID NO: 706846 - DNA, 120 bp, Artificial Sequence
  ENSG00000196581_38 (sequence is synthesized)
cactccctcccgctgaggtgggcctcctgactccaggtgagcacagcgtggtgcgagtgcatggtgagggctggcggcggccaacaggcagtggggtggctgctctggtctctgacattc

SEQ ID NO: 706847 - DNA, 120 bp, Artificial Sequence
  ENSG00000196581_39 (sequence is synthesized)
tgagctccagagtgagcccaactaaggaggaggtgacggccggggggccctgttggttcgctgatcatgagaacctaggattcccgagggactcctggtatctgctctgtcaactcccag

SEQ ID NO: 706848 - DNA, 120 bp, Artificial Sequence
  ENSG00000196581_40 (sequence is synthesized)
ctgctcagcccccttctctgaccatgtgcggcaccctggatgccctgaactctttcctgggtccataagacatcgagccttggaaggaagcgtaatgcaacaaccctcttgtccccgata

SEQ ID NO: 706849 - DNA, 120 bp, Artificial Sequence
  ENSG00000196581_41 (sequence is synthesized)
agagccacagattcaaggcagggctgtgagacccacacaggcacaaacaccagacaagcaagtgcatgcccattccacacccaaaagtctggttctgtaccaacatgacatccgtcaagg

SEQ ID NO: 706850 - DNA, 120 bp, Artificial Sequence
  ENSG00000196581_42 (sequence is synthesized)
taaatccacacaaaggctgctatttctggatgattgaggcagtgtctgtagacgtgttactttacttttttaaatggttacctgctctcccagacccctcacctgggattgtcgtctagg

SEQ ID NO: 706851 - DNA, 120 bp, Artificial Sequence
  ENSG00000196581_43 (sequence is synthesized)
taagaggagataatgagtgaaagtgactgggcctcggaaatgcagccccacccacggtgaagtctgcaccagagcacagacttgtcctacttcgggccatatgtataggtaatgcccatg

SEQ ID NO: 706852 - DNA, 120 bp, Artificial Sequence
  ENSG00000196581_44 (sequence is synthesized)
tactttgtgtgtcggtggctgctgatttggcctgatcagtccttctgcagccttggggcagtgtttcaagctagttggtgtcctctttcctctgcttgacccctggaattcagagtctaa

SEQ ID NO: 706853 - DNA, 120 bp, Artificial Sequence
  ENSG00000196581_45 (sequence is synthesized)
tagtagacacctcccatcccccacccaaggcctggtcctttcctttgcttgagcttttattcctcaagaaaagaactccaaggaagggtgatgtggtttgttagggttccccagttttcg

SEQ ID NO: 706854 - DNA, 120 bp, Artificial Sequence
  ENSG00000196581_46 (sequence is synthesized)
tccacttccatcttattcctcggagatcccgcaattgcaaaccccctggcagcctcctggcacctgcatttgcctttaaagcttagaaacagctgggaatgcactccttgtacagtccag

SEQ ID NO: 706855 - DNA, 120 bp, Artificial Sequence
  ENSG00000196581_47 (sequence is synthesized)
tccgttttcagacaaagtcgctgctagtcttcacacgcttgatgtcactttgtctgattggaatatgcgtgtcattgctcttgtttccgagtttggcgtgagaaaggcagggttctccag

SEQ ID NO: 706856 - DNA, 120 bp, Artificial Sequence
  ENSG00000196581_48 (sequence is synthesized)
gcatggtcagggagcttccccaccgtttcccattgggctcagattccagccattaccgagacaaatccaagccttctcacgcaacgtggaagcgtggtgacaccctggggtgtgtggagg

SEQ ID NO: 706857 - DNA, 120 bp, Artificial Sequence
  ENSG00000196581_49 (sequence is synthesized)
tggctgctagtgttcctatttactgccctccttgcacacagaagggagaggccacttaggggaccttgtcttctccgtagtatttctagtccttgccaatcttgaacttgagtggacttc

SEQ ID NO: 706858 - DNA, 120 bp, Artificial Sequence
  ENSG00000196581_50 (sequence is synthesized)
tcatattacattcagctcccagaaattcactccagtccttcctggagcattgtgaaattagaaacctgaactcatcagcaaaccccacccactctttgaatcgggacaccaggaaacccg

SEQ ID NO: 706859 - DNA, 120 bp, Artificial Sequence
  ENSG00000196581_51 (sequence is synthesized)
tggtcttcaaaattttgtgtgtgatgcccaatgtgtaggccatattgaaaggtgaacgcaccaaaggatcgaccctgtcaccttggatggtctctattttgaccctgttgcccatggaga

SEQ ID NO: 706860 - DNA, 120 bp, Artificial Sequence
  ENSG00000196581_52 (sequence is synthesized)
ggtattttacccttttgcttctttgctcaggtggtccagggttgtctgtagcccaggaagcggactgaccctgtatcttgaaagataagaccaggaaccgggagtgaggctgggactctc

SEQ ID NO: 706861 - DNA, 120 bp, Artificial Sequence
  ENSG00000196581_53 (sequence is synthesized)
actcagccttttcacggtcagtcttggtcttctcatacttatttcaagatggcaccaggacacaccttcttttgtccacctgttgacaccatcaccctctttcatcaaggtgatctcttt

SEQ ID NO: 706862 - DNA, 120 bp, Artificial Sequence
  ENSG00000196581_54 (sequence is synthesized)
catcagggcatatatgagacttggtgctccaccagactgtcttctcccctacccctgccccttccacaaagccatttctcaagtcgcagtgggaaaagataccaagacacctgatttctt

SEQ ID NO: 706863 - DNA, 120 bp, Artificial Sequence
  ENSG00000196581_55 (sequence is synthesized)
gaaccattcttgcttcagcatgtgaattctttaagacactactcacatatgccattggagagaaacaacccgttctgcatcaccataatgaaccgatcagtcattcatcctcttattcaa

SEQ ID NO: 706864 - DNA, 120 bp, Artificial Sequence
  ENSG00000196581_56 (sequence is synthesized)
caaatacttgttccacttctaccacactggccatacagttggaggcaagatgggcacagttatggccttgtgggctttatattctacagtgggaggaggtggatggttaatgtgaaagca

SEQ ID NO: 706865 - DNA, 120 bp, Artificial Sequence
  ENSG00000196581_57 (sequence is synthesized)
aaccaaaataatttccagagagagaagaggcaggaagagagcagagcagagtgatggggctgggggcagagaaggagagaggggaagagggagagagtggggggcattgaaggggaagaa

SEQ ID NO: 706866 - DNA, 120 bp, Artificial Sequence
  ENSG00000196581_58 (sequence is synthesized)
agagaggcaggggttgtctacgtctcctcctcctgcgacccatcacctactggaaaattaccacttgctgcttgagggttggtctggtgttggatggaggaagaaggccttagtcttagc

SEQ ID NO: 706867 - DNA, 120 bp, Artificial Sequence
  ENSG00000196581_59 (sequence is synthesized)
tcttggataaaatgcagtgcagcactgaagataagacatcgcagttgttacgacgcctggttctccaccaaattcctctgtcattccagcaagagtggaagcagaggggcaggggcaggg

SEQ ID NO: 706868 - DNA, 120 bp, Artificial Sequence
  ENSG00000196581_60 (sequence is synthesized)
gcaggatgagggctgctgccctggtgatgagcttgccccatccctgggcactggctctgcccagcccctcccatgttggtcccatctgtcaggttgccaggccaagcaggtctcaggtca

SEQ ID NO: 706869 - DNA, 120 bp, Artificial Sequence
  ENSG00000196581_61 (sequence is synthesized)
gccaggtctcaaggaggataagggggttcaacgtcagcgacttggcccacggggcacgggcaccttggggatgccattcttcttggtgccagaaggcagctgcatctccagaagctcccc

SEQ ID NO: 706870 - DNA, 120 bp, Artificial Sequence
  ENSG00000196581_62 (sequence is synthesized)
cagcactgagctcacttagtggcatccttcttaaacagcatctgcttttaagtaagcagctattccaaaacatgccgtgattcatgtaatttttgagtggttactttggtgcagtttgtc

SEQ ID NO: 706871 - DNA, 120 bp, Artificial Sequence
  ENSG00000196581_63 (sequence is synthesized)
aatttgctctaccatactgttttttgattatttgtttgttttctagtgtaaatagcacagcccacataaatgagcgaaactcatcatctgaggatctttgattattcttccccacttatt

SEQ ID NO: 706872 - DNA, 120 bp, Artificial Sequence
  ENSG00000196581_64 (sequence is synthesized)
gtacattgatgtgccgcctgctaggaagataaactccctctttgctcactctgagccaggatctctgtgttagttacactcagccttatctgagcattccagggaggtcttaaatgaatg

SEQ ID NO: 706873 - DNA, 120 bp, Artificial Sequence
  ENSG00000196581_65 (sequence is synthesized)
tttggggttttgaaacatgctaccagcccttccttccaaagagcatgaagcatggctctgtgtggttttgtgtgtctaggtttagagcttgtatttggatgtaaggagtgactaaaaaca

SEQ ID NO: 706874 - DNA, 120 bp, Artificial Sequence
  ENSG00000196581_66 (sequence is synthesized)
ggtctaggcagagaactgctatcttttaaaccaccccagccctcagtcgaacagaaagaatgagcgtcttctgatgtcaaatcattctagaaaggtcttagctagtgagcacaaagtagc

SEQ ID NO: 706875 - DNA, 120 bp, Artificial Sequence
  ENSG00000196581_67 (sequence is synthesized)
caatcccgggagtttatatgggcctccatgtgaccaagccatccctagctaggaaacttaactctttgcacaacctccctttatgctgaagggcccttgggaacatgggaacatttgcac

SEQ ID NO: 706876 - DNA, 120 bp, Artificial Sequence
  ENSG00000196581_68 (sequence is synthesized)
tttgtcagaggagtggccccaccctactctctgcctgaaacacaaagcagctcccctcagaacagccagcccggtgcagaagcacttgaacttctcatcttccatcttatttcactttgg

SEQ ID NO: 706877 - DNA, 120 bp, Artificial Sequence
  ENSG00000196581_69 (sequence is synthesized)
ttgcagggagttaaatacataggccacagcagactaagggagcggtgtgcacaatggcccccagaatatccagtgacccaagtgatgttagtcttagggtccctaaggcagtagggcatg

SEQ ID NO: 706878 - DNA, 120 bp, Artificial Sequence
  ENSG00000196581_70 (sequence is synthesized)
gggaggaaagttctctccatcgattcccaaacacaccagccacaagtccacactccacacctgtaaacgcacagcccatgccccattgtaaaggtgactgaagagaatggtcaactcggt

SEQ ID NO: 706879 - DNA, 120 bp, Artificial Sequence
  ENSG00000196581_71 (sequence is synthesized)
ggtgatgggcctgttttggagctaaaagcataaaatgaatcctccctgtagctccattgccttttcctcgtgaaggattccctgctaaatgttctaagagttactgtacatagaatcaag

SEQ ID NO: 706880 - DNA, 120 bp, Artificial Sequence
  ENSG00000196581_72 (sequence is synthesized)
agagcagttttgaatgagccgtaaatctgagtcatatataagaggcataatataaattgggccaagcttgcccatgtgggacacacaggtttatagagattaaacactagtgagtagcgg

SEQ ID NO: 706881 - DNA, 120 bp, Artificial Sequence
  ENSG00000196581_73 (sequence is synthesized)
gggaagggaacagtgactgtataaatggccatataaatgacctacttgtcttctcatgtaggctggaatcagaacctacgtatgctgtagataacagtcaattaaatgggttaatgttct

SEQ ID NO: 706882 - DNA, 120 bp, Artificial Sequence
  ENSG00000196581_74 (sequence is synthesized)
aagccaagagagttctaagccaagacatgtgcttgggactggattaactcttgtcaatatcttggattccatagtaaaacatctgttaagtaacatgcggcaggaaaggatgcagggagc

SEQ ID NO: 706883 - DNA, 120 bp, Artificial Sequence
  ENSG00000196581_75 (sequence is synthesized)
attggactgtaggaaattctcctttatacaagttaattagttttgtctctggtggctgtctcttaaaacagaatcccctggagacccgggttttcattttgtaattcaacacccaaatat

SEQ ID NO: 706884 - DNA, 120 bp, Artificial Sequence
  ENSG00000196581_76 (sequence is synthesized)
ttgcaacactaaataacaactccctaaagacttcagtcttgcatgggcataagcaactcacactggttagcttttgtcagatttcgtcgtttccgcagcaaaatttcttagtgttgatgt

SEQ ID NO: 706885 - DNA, 120 bp, Artificial Sequence
  ENSG00000196581_77 (sequence is synthesized)
tgatagcttctgggttggcaaactggcagttcactctagtcttactgggttgggcaagtccttgcccctagaaaattggggatagctttggccatgggaggagcaagaacactacgcagt

SEQ ID NO: 706886 - DNA, 120 bp, Artificial Sequence
  ENSG00000196581_78 (sequence is synthesized)
tgttttgttttgttttgttttgttttcggcaccattatgtacgatgaagacttacagccactgctaatacagcataggggacactttgaggagccctagtatcattgtttgaaatcattg

SEQ ID NO: 706887 - DNA, 120 bp, Artificial Sequence
  ENSG00000196581_79 (sequence is synthesized)
ttgtttgaaatcattgtacagggaactgcaggggtgaacaccattgtaccaatccccgggccagtgtctcatttcctaacagaatcatcccattcttgttcactcttcagtcatcccaag

SEQ ID NO: 706888 - DNA, 120 bp, Artificial Sequence
  ENSG00000196581_80 (sequence is synthesized)
ccaaaagggaaaattcgaaacccactgtgacaccccaaccctaatttccaacctttggaggactcacctggggcagaagggagaaagggctttgctgaagtctcaggctgccgagagcca

SEQ ID NO: 706889 - DNA, 120 bp, Artificial Sequence
  ENSG00000196581_81 (sequence is synthesized)
tgtatgggcataggagcaagctgatggcatggctcttgacaaggttttctatagggcagcagctgctgctcccaggggaaccctctcctgttgcctccgcagtctattctggggtggaaa

SEQ ID NO: 706890 - DNA, 120 bp, Artificial Sequence
  ENSG00000196581_82 (sequence is synthesized)
caccattctctattatttctctcacatacatgtggatttctaatatcaagttatgtgactgcctaccacttaaggcctacaaaaccacatgggagtttctttattgcgtatgcagccagt

SEQ ID NO: 706891 - DNA, 120 bp, Artificial Sequence
  ENSG00000196581_83 (sequence is synthesized)
caacatgaatgggaccctagaaactgtgaggagcaggattctctaaggtgctcttagatacggtgtcacttccacatacaagcacaattctcccagttaaggggctggaagacaagcggg

SEQ ID NO: 706892 - DNA, 120 bp, Artificial Sequence
  ENSG00000196581_84 (sequence is synthesized)
gcaactggttttgaaaagcccgctggcgtgccagagggggtgtttgcccacaccctccttgaatttaactgccacaatctatccgcagatgtgttttgttctatttcttgtttttcacta

SEQ ID NO: 706893 - DNA, 120 bp, Artificial Sequence
  ENSG00000196581_85 (sequence is synthesized)
gcgtttgcgttgcttcctctgaagccagagggtgaaaggccctagcaaagttagttatcagtcaactgatgataactgtgatccttaaagatgaattcccagcctgaggtgacacacaga

SEQ ID NO: 706894 - DNA, 120 bp, Artificial Sequence
  ENSG00000196581_86 (sequence is synthesized)
ggttcagcagacgtctcaggatctgtcatatgtcatgttgcttggtgtgaagatggaagaacaaagtccacatcagtttctgctccttcaaacagtgtgtcgatatgaaacattgagatt

SEQ ID NO: 706895 - DNA, 120 bp, Artificial Sequence
  ENSG00000196581_87 (sequence is synthesized)
tgctccttcaaacagtgtgtcgatatgaaacattgagatttggcagaaacatgtgcctagtttgcagcaccaaatactggtcttctcagaagtgtttctgtttttttgtttttgtttttg

SEQ ID NO: 706896 - DNA, 120 bp, Artificial Sequence
  ENSG00000196581_88 (sequence is synthesized)
gcatcccaatttggatcatttcctctctttctttcctggagaaacaggatggcaggtgctggagcccagagagggggtcaccctccagctaaaatgatttaaatggaaaggagaatgaca

SEQ ID NO: 706897 - DNA, 120 bp, Artificial Sequence
  ENSG00000196581_89 (sequence is synthesized)
gcaaagcctcacgtgaactttaatgaccttatcaatgacctttactaactgactcttggtacccggattgttgagaggtgagtgggactaaaagccaggatcaagatcaggttgctccac

SEQ ID NO: 706898 - DNA, 120 bp, Artificial Sequence
  ENSG00000196581_90 (sequence is synthesized)
acatttgcagatcaggaaccccgggaatatgagttagacccagaaagtattgaactggacattgaatgaagcttgaggccatgcattgataacatttttagagtctgttacattattttc

SEQ ID NO: 706899 - DNA, 120 bp, Artificial Sequence
  ENSG00000196581_91 (sequence is synthesized)
tcaaaaggaacacatgtttactacaaaccatttagaaaataccaataaccaaacagaagggaaatgtctggaaccttccagttgtttaattctgtagaaactgttcacgaaaggctgaat

SEQ ID NO: 706900 - DNA, 120 bp, Artificial Sequence
  ENSG00000196581_92 (sequence is synthesized)
gagtggggacaagtcacagagatctcgccatggttagcaccagggacaagtctggctctaatgtatgttttatgaagtctgattagctttgaaatgcatctttgccagctgaacttgtca

SEQ ID NO: 706901 - DNA, 120 bp, Artificial Sequence
  ENSG00000196581_93 (sequence is synthesized)
tgcactaaacttcccattgatcattagagtgtctacgattaagtggaaaaggtggtcaaccatttggatgtttgactttcacaacatcaagcattggccattgggcgtatctgggcattg

SEQ ID NO: 706902 - DNA, 120 bp, Artificial Sequence
  ENSG00000196581_94 (sequence is synthesized)
gtatggaataaacaggatactcagtgaaacatccaaactattgactggatttttcccatggggcatctgtctaagagtcacagatctgagaaatagaaggaccaggtccgtgtggatgct

SEQ ID NO: 706903 - DNA, 120 bp, Artificial Sequence
  ENSG00000196581_95 (sequence is synthesized)
cctagtgcgttcaaataacccttgaattcaccaggtctcattgcatttatttaaagatggagcccattgtcccccctcctcctcagctcacccatggaactagaaattcacaaacctgaa

SEQ ID NO: 706904 - DNA, 120 bp, Artificial Sequence
  ENSG00000196581_96 (sequence is synthesized)
gctgaaccacaggacaagaaattaaacagcaacggccacatggcctcttttttcacaggttttgcattgaatgttttagaactttattcccccgccccctcacccatgtataccaaaact

SEQ ID NO: 706905 - DNA, 120 bp, Artificial Sequence
  ENSG00000196581_97 (sequence is synthesized)
ggttttattttcattttcctaaattattttctgatacaataaactgttaactgtttatttatacttttacaaggagcacttgttatttttcaaaaggaaaacaaaagcctctctgttttc

SEQ ID NO: 706906 - DNA, 120 bp, Artificial Sequence
  ENSG00000196581_98 (sequence is synthesized)
atgttctccgtatatctataccacagctgtctctatagacgtatttatatatcatcttcttgagagagttaacctcctgtagtttaatgttgtgtttcttttctttaaatgcatatcata

SEQ ID NO: 706907 - DNA, 120 bp, Artificial Sequence
  ENSG00000196581_99 (sequence is synthesized)
atcatgttaataaacaaaaatgacacaatatatgtgggtggggggcggggggcaggtggctgggtgtgatttccgtacaggtgaacttttattccagatttttttaagttgtttctgtat

SEQ ID NO: 706908 - DNA, 120 bp, Artificial Sequence
  ENSG00000196581_100 (sequence is synthesized)
ttctgtatttcaaagctatgtatttggaaaacattgtaaatgaaacacctatattaactttcctgtgtatatttagtactctgatgttgctattaaaaaaaaaaacataatatgaaaaaa

SEQ ID NO: 706909 - DNA, 120 bp, Artificial Sequence
  ENSG00000196584_0 (sequence is synthesized)
agttggtgaatggcgttggtggcgggaaagttgagtctctcctgcgccgagccttcggggcgatgtgtagtgccttccatagggctgagtctgggaccgagctccttgcccgacttgaag

SEQ ID NO: 706910 - DNA, 120 bp, Artificial Sequence
  ENSG00000196584_1 (sequence is synthesized)
gtagaagttccttgaaagaaatagaaccaaatctgtttgctgatgaagattcacctgtgcatggtgatattcttgaatttcatggcccagaaggaacaggaaaaacagaaatgctttatc

SEQ ID NO: 706911 - DNA, 120 bp, Artificial Sequence
  ENSG00000196584_2 (sequence is synthesized)
acctaacagcacgatgtatacttcccaaatcagaaggtggcctggaagtagaagtcttatttattgatacagattaccactttgatatgctccggctagttacaattcttgagcacagac

SEQ ID NO: 706912 - DNA, 120 bp, Artificial Sequence
  ENSG00000196584_3 (sequence is synthesized)
tatcccaaagctctgaagaaataatcaaatactgcctgggaagattttttttggtgtactgcagtagtagcacccacttacttcttacactttactcactagaaagtatgttttgtagtc

SEQ ID NO: 706913 - DNA, 120 bp, Artificial Sequence
  ENSG00000196584_4 (sequence is synthesized)
acccatctctctgccttttgattttggatagcctgtcagctttttactggatagaccgcgtcaatggaggagaaagtgtgaacttacaggagtctactctgaggaaatgttctcagtgct

SEQ ID NO: 706914 - DNA, 120 bp, Artificial Sequence
  ENSG00000196584_5 (sequence is synthesized)
tagagaagcttgtaaatgactatcgcctggttctttttgcaacgacacaaactataatgcagaaagcctcgagctcatcagaagaaccttctcatgcctctcgacgactgtgtgatgtgg

SEQ ID NO: 706915 - DNA, 120 bp, Artificial Sequence
  ENSG00000196584_6 (sequence is synthesized)
acatagactacagaccttatctctgtaaggcatggcagcaactggtgaagcacaggatgtttttctccaaacaagatgattctcaaagcagcaaccaattttcattagtttcacgttgtt

SEQ ID NO: 706916 - DNA, 120 bp, Artificial Sequence
  ENSG00000196584_7 (sequence is synthesized)
taaaaagtaacagtttaaaaaaacatttttttattattggagaaagtggggttgaattttgttgatatacatcataaaatagtcttttgcagggtactacgcaagccttaaaatttttct

SEQ ID NO: 706917 - DNA, 120 bp, Artificial Sequence
  ENSG00000196584_8 (sequence is synthesized)
ttacaggcgtgagccactgctcgtggccaaaagttttctttttttttttttttctttttgaaacagtcttactctgtctcccaggctgctggagtgcagtggcacaatctcggcccgctg

SEQ ID NO: 706918 - DNA, 77 bp, Artificial Sequence
  ENSG00000196584_9 (sequence is synthesized)
cgtgcccagccctaaagttttaaactctaggggaattaacagtatttctttacagaatggatttgttaaactagcac

SEQ ID NO: 706919 - DNA, 120 bp, Artificial Sequence
  ENSG00000196584_10 (sequence is synthesized)
aacagtatttctttacagaatggatttgttaaactagcacagtaaaagtaaagactattctgtttctaggctgttgaatcaaagtgattttagcaattaaactttgtattaatttaccac

SEQ ID NO: 706920 - DNA, 120 bp, Artificial Sequence
  ENSG00000196584_11 (sequence is synthesized)
caatatttcttcacaaaggaacttttaaaagattatctcagaaagtaaatctgagaggtaagaagtaataatgagtaaatggtaagtacttgagtaaatctaaagaaatattgatagtaa

SEQ ID NO: 706921 - DNA, 69 bp, Artificial Sequence
  ENSG00000196584_12 (sequence is synthesized)
ctaccccacaaaaacacacgtagactgatggaacagaatagagaatttagaaatgagaccacacaccta

SEQ ID NO: 706922 - DNA, 120 bp, Artificial Sequence
  ENSG00000196584_13 (sequence is synthesized)
ggaacagaatagagaatttagaaatgagaccacacacctataatttttttgatcttcgatgaacctgacaaaaacaagcaatgggcaatggattctctattcaataaatcgtgctgggat

SEQ ID NO: 706923 - DNA, 87 bp, Artificial Sequence
  ENSG00000196584_14 (sequence is synthesized)
atgggcaatggattctctattcaataaatcgtgctgggataactggccagccatatggaaaagattgaaaatggacgccttccttat

SEQ ID NO: 706924 - DNA, 80 bp, Artificial Sequence
  ENSG00000196584_15 (sequence is synthesized)
aaatcctggaagacaacccaggcagaagacgccaaaaacaattgcaacagaagcaaaaattcacaaatgggatctaatta

SEQ ID NO: 706925 - DNA, 120 bp, Artificial Sequence
  ENSG00000196584_16 (sequence is synthesized)
gcacagcaaaagaaactatcaagagagtaaacagacagcttacagaatgggagaaaattgttgcaaactatgcatctgagaaaggtctgaaatccagcatctatacgtaatttaaacaaa

SEQ ID NO: 706926 - DNA, 120 bp, Artificial Sequence
  ENSG00000196584_17 (sequence is synthesized)
gaaaaaagcccagcatcactgatcattagagaaatgcaaatcgaaacaacaacgagataccatctcacaccagtccaaatggctattataaaaatgtcagaaaataacagatgctggtga

SEQ ID NO: 706927 - DNA, 120 bp, Artificial Sequence
  ENSG00000196584_18 (sequence is synthesized)
ggttgtggagaaaaagatatgcttatacactgttggtggaaatgtaaattaaattagttcagccattgtggaagacagtgtggggataaagacagagataccattcaacccagcaatctc

SEQ ID NO: 706928 - DNA, 120 bp, Artificial Sequence
  ENSG00000196584_19 (sequence is synthesized)
attactgggtatatacccaaaggaatagaaatcattgttataaagacacatgcacgcgtatgttcgttgcagcactgcccatcagtgacagactggattaaaaaaatgtggtacatacac

SEQ ID NO: 706929 - DNA, 120 bp, Artificial Sequence
  ENSG00000196584_20 (sequence is synthesized)
accagggaatactatacagccataaaaaggaacaagactgactgggcgtggtggctcatgcctgtgatcctagcactttgcgaggccgaggtgggtggattgcccgcgctcaggaggtca

SEQ ID NO: 706930 - DNA, 120 bp, Artificial Sequence
  ENSG00000196584_21 (sequence is synthesized)
tgagctgagatcgcgccattgcactcccgcctgggcgactccatctctaaaaaataaaaaataaaatataaggaacaagatcatacctttgccagggacatggatggagctggacgctat

SEQ ID NO: 706931 - DNA, 120 bp, Artificial Sequence
  ENSG00000196584_22 (sequence is synthesized)
taaggaacaagatcatacctttgccagggacatggatggagctggacgctattatccttagcaaactaacataggaacagaaaaccagatactgcatgttttcacttataagtgggagct

SEQ ID NO: 706932 - DNA, 120 bp, Artificial Sequence
  ENSG00000196584_23 (sequence is synthesized)
acacacacacacacacacacaccctctcacagacttagaatacgtggcaagaaaagcatataatttgacattaggagcagaagaattagtgtgctaaggtccttgcattgtccgggagaa

SEQ ID NO: 706933 - DNA, 120 bp, Artificial Sequence
  ENSG00000196584_24 (sequence is synthesized)
tgtccgggagaaggggaaaagtatcaacattagacattgataaagggtctgcaccttttgatttcttaaccactcaaggatagaaaaggggcataactttaaaatgaaacaggaaaatgg

SEQ ID NO: 706934 - DNA, 120 bp, Artificial Sequence
  ENSG00000196584_25 (sequence is synthesized)
tgggctgatttttaaatttaaaagaaccgaatacagcaggacagatccaaagcacagaggagatggtgtatttaactccatccacaccaatcattacattacatgcaaagggactgagga

SEQ ID NO: 706935 - DNA, 120 bp, Artificial Sequence
  ENSG00000196584_26 (sequence is synthesized)
cattacatgcaaagggactgaggactccagttaaaatgacagttttaggctggtttttaaaatacatatttgctgttttatttttagagacaaggtctcgctccgttgcccaggctggag

SEQ ID NO: 706936 - DNA, 120 bp, Artificial Sequence
  ENSG00000196584_27 (sequence is synthesized)
agcctcgaactcctgggttccagtgagcctccacctcagcctccaaagtagctgtgattacaggtgtgtgccaccttgcctagctgagtcccttgaattgataaaaggtatatacaaaaa

SEQ ID NO: 706937 - DNA, 120 bp, Artificial Sequence
  ENSG00000196584_28 (sequence is synthesized)
tccctcagtaaacattagttaatagtgaaatattagaagtgtctcttttaaaatcaagaacaagagtgcctgctattactacttgtattcaacattgtactgaaagtgtcaacacagtaa

SEQ ID NO: 706938 - DNA, 120 bp, Artificial Sequence
  ENSG00000196584_29 (sequence is synthesized)
agcaaggaaaatgaaaaagcatgaaaaaaaggcatatggaagaaacaaaactgtcattctttaaaggttagatgattgtatgtatggaaatccaatatcatctataagcagattattaga

SEQ ID NO: 706939 - DNA, 120 bp, Artificial Sequence
  ENSG00000196584_30 (sequence is synthesized)
attaagagtttagcaaatttgcgagctaaaacatcaacatttaagtttttctaagtaccagcaacagaattaaaaaatagaattttaggctgagtgcagtggctcacaactgtaatccca

SEQ ID NO: 706940 - DNA, 85 bp, Artificial Sequence
  ENSG00000196584_31 (sequence is synthesized)
aggagggaggattgcttgagttaagaccctgtctctataaaaataaattttaaaaaagaaaatggaattttaaatatatataata

SEQ ID NO: 706941 - DNA, 120 bp, Artificial Sequence
  ENSG00000196584_32 (sequence is synthesized)
atataatatttaatcataactaaaaatataaagtttctagaaataaatctaataaaaatatgcaagacctttttggagaaaattacaaagctttattgtaagaagcagagtttaaccctt

SEQ ID NO: 706942 - DNA, 120 bp, Artificial Sequence
  ENSG00000196584_33 (sequence is synthesized)
taacccttttcccatttagaaaaaaaaagtgcagctcactgccagcgctcatttaattttacgtaaacacactcttggaggctgaagcaaatcttactgattttcaatgtgaaaataaaa

SEQ ID NO: 706943 - DNA, 120 bp, Artificial Sequence
  ENSG00000196584_34 (sequence is synthesized)
catcagaatcatctgaatcatcagaatcatctctttcagaaaaatcggactcatcgaatgaatcttcggctaactgttgagaacgatgttaacatcacgtgtaggaatactacattttcc

SEQ ID NO: 706944 - DNA, 120 bp, Artificial Sequence
  ENSG00000196584_35 (sequence is synthesized)
gaacgatgttaacatcacgtgtaggaatactacattttccaggatttgacattttcagcgatcaagaattactatgttttgtaaatggaaataccactactaaagacagaatgctataaa

SEQ ID NO: 706945 - DNA, 120 bp, Artificial Sequence
  ENSG00000196586_0 (sequence is synthesized)
ggagaccgactcgggatctgtccgagcaggaagccagcctcagcccggccgctgtcgccgccctgtcctggtgcccgtccgcgtcgtcgccctcttcactggccctcatcacttctcacc

SEQ ID NO: 706946 - DNA, 120 bp, Artificial Sequence
  ENSG00000196586_1 (sequence is synthesized)
gcgccctccagcttcacccgtacaggtagccccgccgccgcgcacctgccttcgctcccgcaccggtgacagtggatagtggaaacaggagatcgtggatcctccttcaaaaatggagga

SEQ ID NO: 706947 - DNA, 120 bp, Artificial Sequence
  ENSG00000196586_2 (sequence is synthesized)
tggaaagcccgtttgggcgccacaccctacagatggatttcagatgggcaatattgtggatattggccccgacagcttaacaattgaacccttgaatcagaaaggcaagacatttttggc

SEQ ID NO: 706948 - DNA, 120 bp, Artificial Sequence
  ENSG00000196586_3 (sequence is synthesized)
tctcataaaccaagtgtttcctgcagaagaggacagtaaaaaagatgtggaagataactgttcactaatgtatttaaatgaagccacactgctccataatatcaaagttcgatatagtaa

SEQ ID NO: 706949 - DNA, 120 bp, Artificial Sequence
  ENSG00000196586_4 (sequence is synthesized)
agacagaatttatacatatgtcgccaacattctgattgcagtgaatccatactttgacatacctaaaatatattcttcagaagcaataaagtcatatcaaggaaaatctcttgggacaag

SEQ ID NO: 706950 - DNA, 120 bp, Artificial Sequence
  ENSG00000196586_5 (sequence is synthesized)
accacctcatgtctttgcaattgctgataaagcttttcgagacatgaaggtgctcaagatgagtcagtctatcattgtatctggagaatcaggagccggcaaaacagaaaatacaaaatt

SEQ ID NO: 706951 - DNA, 120 bp, Artificial Sequence
  ENSG00000196586_6 (sequence is synthesized)
tgttctaagatacctgactgaatcctatggaacaggtcaagatattgatgacagaattgttgaagctaacccactcctagaagcctttggaaatgcgaagactgttcgcaacaataatag

SEQ ID NO: 706952 - DNA, 120 bp, Artificial Sequence
  ENSG00000196586_7 (sequence is synthesized)
cagtcgatttgggaaatttgtagaaatacattttaatgaaaagagctcagttgttggaggatttgtttcacattatctcctagagaaatctaggatctgtgttcaaggcaaagaggaaag

SEQ ID NO: 706953 - DNA, 120 bp, Artificial Sequence
  ENSG00000196586_8 (sequence is synthesized)
aaattatcatatcttttataggttgtgtgctggtgcttctgaagatattagagaaaaacttcatttgagttcaccagataattttcggtatttaaaccgaggctgcactagatactttgc

SEQ ID NO: 706954 - DNA, 120 bp, Artificial Sequence
  ENSG00000196586_9 (sequence is synthesized)
taacaaagaaactgacaaacagattttacagaaccgcaaaagtcctgagtaccttaaggcaggttctatgaaagatcctctgctagatgaccatggtgattttattagaatgtgcacggc

SEQ ID NO: 706955 - DNA, 120 bp, Artificial Sequence
  ENSG00000196586_10 (sequence is synthesized)
tatgaaaaaaattggtttggatgatgaagaaaagcttgatctcttccgggtagtagctggcgtcctgcaccttggaaatattgattttgaggaagctggcagcacttcaggtggttgtaa

SEQ ID NO: 706956 - DNA, 120 bp, Artificial Sequence
  ENSG00000196586_11 (sequence is synthesized)
tctgaagaataaatctgctcagtctttggaatattgtgctgaattactgggtttggaccaagatgatcttcgagtaagtttgaccacaagagtcatgctaacaacagcagggggcaccaa

SEQ ID NO: 706957 - DNA, 120 bp, Artificial Sequence
  ENSG00000196586_12 (sequence is synthesized)
aggaacagttataaaggtacctctgaaagtggagcaagcaaacaatgctcgtgatgccctggcaaagacagtgtatagccatctttttgatcatgtggtaaacagagtaaatcagtgttt

SEQ ID NO: 706958 - DNA, 120 bp, Artificial Sequence
  ENSG00000196586_13 (sequence is synthesized)
tccttttgaaacatcatcctattttattggagtcctagatattgctggttttgagtactttgagcataacagttttgaacaattttgcatcaactattgcaatgaaaaacttcaacaatt

SEQ ID NO: 706959 - DNA, 120 bp, Artificial Sequence
  ENSG00000196586_14 (sequence is synthesized)
ttttaatgaaaggattctgaaggaggaacaagaactctatcaaaaagaaggtttaggtgttaatgaagtgcattatgtggataatcaggactgtatagatttaattgaagccaaattagt

SEQ ID NO: 706960 - DNA, 120 bp, Artificial Sequence
  ENSG00000196586_15 (sequence is synthesized)
gggaatactggatattttggatgaagaaaatcgccttccccagccaagtgatcaacactttacatctgcagttcaccaaaagcacaaggatcattttcgactcactattcccagaaaatc

SEQ ID NO: 706961 - DNA, 120 bp, Artificial Sequence
  ENSG00000196586_16 (sequence is synthesized)
taagctggcagttcataggaatatcagagacgacgaaggcttcattatcaggcattttgcgggggcagtgtgctatgaaacaacccagtttgtggagaaaaataatgatgctttacatat

SEQ ID NO: 706962 - DNA, 120 bp, Artificial Sequence
  ENSG00000196586_17 (sequence is synthesized)
gtctcttgaatccttaatatgtgaatccagagataagtttatacgggaattatttgaatcatccacaaataacaacaaagatactaaacaaaaagcaggaaaacttagcttcatcagcgt

SEQ ID NO: 706963 - DNA, 120 bp, Artificial Sequence
  ENSG00000196586_18 (sequence is synthesized)
gggaaacaagtttaagacacagttaaatttgcttctggataaacttcgaagtactggagcaagctttattcgttgcatcaaacctaacttaaagatgacaagccaccactttgaaggtgc

SEQ ID NO: 706964 - DNA, 120 bp, Artificial Sequence
  ENSG00000196586_19 (sequence is synthesized)
tcaaattctgtctcagcttcagtgttcagggatggtgtctgttttggacttgatgcagggtggttacccatcacgagcttcatttcatgaactctacaacatgtacaaaaagtatatgcc

SEQ ID NO: 706965 - DNA, 120 bp, Artificial Sequence
  ENSG00000196586_20 (sequence is synthesized)
agataaacttgcaagattggatccaagactattttgtaaggctttgtttaaagctttgggcttaaatgaaaatgactacaagtttgggttaaccaaagtattttttagacctggcaagtt

SEQ ID NO: 706966 - DNA, 120 bp, Artificial Sequence
  ENSG00000196586_21 (sequence is synthesized)
tgcagaatttgatcagatcatgaagtctgaccctgaccacttagcagagttggttaaaagagtcaatcactggctcacatgcagtcgctggaagaaagttcagtggtgctcactctcagt

SEQ ID NO: 706967 - DNA, 120 bp, Artificial Sequence
  ENSG00000196586_22 (sequence is synthesized)
catcaaattgaaaaacaaaataaaatatcgagctgaagcctgcattaaaatgcaaaaaactattcgaatgtggctttgcaagaggagacacaaacctcgcattgatggtctggttaaggt

SEQ ID NO: 706968 - DNA, 120 bp, Artificial Sequence
  ENSG00000196586_23 (sequence is synthesized)
gggcacactgaaaaaacgacttgataaatttaatgaggtagtcagtgtgttgaaagatggaaaacccgagatgaataaacagatcaagaatctggaaatttctattgatactttgatggc

SEQ ID NO: 706969 - DNA, 120 bp, Artificial Sequence
  ENSG00000196586_24 (sequence is synthesized)
caaaattaagtccactatgatgacgcaggaacaaatccagaaagaatatgatgcactggttaaaagctcagaggaactcctcagtgcattacagaaaaaaaaacagcaggaagaggaagc

SEQ ID NO: 706970 - DNA, 120 bp, Artificial Sequence
  ENSG00000196586_25 (sequence is synthesized)
agaaaggctgaggcgtattcaagaagaaatggaaaaggaaagaaaaagacgtgaagaagacgaaaaacgtcgaagaaaggaagaggaggaaaggcggatgaaacttgagatggaagcaaa

SEQ ID NO: 706971 - DNA, 120 bp, Artificial Sequence
  ENSG00000196586_26 (sequence is synthesized)
gagaaaacaagaagaagaagagagaaagaaaagggaagatgatgaaaaacgcattcaagctgaagtggaggcacagctggcccgacagaaggaggaggaatcccaacagcaagcagttct

SEQ ID NO: 706972 - DNA, 120 bp, Artificial Sequence
  ENSG00000196586_27 (sequence is synthesized)
ggagcaggagcgcagggaccgggagctggccctgaggattgcccagagtgaagccgagctcatcagtgatgaggcccaggccgacctggcgctgcggagaggtcctgctgtactagccac

SEQ ID NO: 706973 - DNA, 120 bp, Artificial Sequence
  ENSG00000196586_28 (sequence is synthesized)
caaagcagctgctggtactaagaaatatgatcttagtaaatggaaatatgcagaactacgtgataccatcaatacttcttgtgatattgagctcctggcagcttgcagagaagaatttca

SEQ ID NO: 706974 - DNA, 120 bp, Artificial Sequence
  ENSG00000196586_29 (sequence is synthesized)
taggagactaaaagtgtatcatgcttggaaatctaagaacaagaagagaaatactgaaacagagcaacgtgctccaaagtctgttactgattatgattttgcaccatttttgaacaattc

SEQ ID NO: 706975 - DNA, 120 bp, Artificial Sequence
  ENSG00000196586_30 (sequence is synthesized)
acctcagcaaaacccagcagctcagattcctgccaggcagcgggagattgaaatgaaccgacagcaacgcttcttccgcatcccattcatccgccctgccgaccagtacaaagaccctca

SEQ ID NO: 706976 - DNA, 120 bp, Artificial Sequence
  ENSG00000196586_31 (sequence is synthesized)
gagtaagaaaaaaggctggtggtatgcccattttgatggaccatggattgcccggcaaatggaactccatcctgacaagccacccatcctacttgtggctggtaaggacgacatggagat

SEQ ID NO: 706977 - DNA, 120 bp, Artificial Sequence
  ENSG00000196586_32 (sequence is synthesized)
gtgtgagctgaatcttgaggagactggcctgactcggaagcgtggtgctgagatcttgccaagacagtttgaagaaatctgggaacgctgtggaggcatccagtaccttcagaatgcgat

SEQ ID NO: 706978 - DNA, 120 bp, Artificial Sequence
  ENSG00000196586_33 (sequence is synthesized)
tgagagcagacaggctcggcccacctatgcaacagccatgctgcagagtctgttaaagtagatgttgcacaccagccttacagctgggagcctttgccatggtacttaggtagggtgtgt

SEQ ID NO: 706979 - DNA, 120 bp, Artificial Sequence
  ENSG00000196586_34 (sequence is synthesized)
gcccccagatttaaccattccataatcatgttagagttacttctataaagtgaacagattttattaatcacggcttttggtgaatttgtttaaggttaattatggtagcaaattttggac

SEQ ID NO: 706980 - DNA, 120 bp, Artificial Sequence
  ENSG00000196586_35 (sequence is synthesized)
tgtaattcccaaaactctcattattctctaactattacacatgggcatattctgatgtttctcatcctttgccagaagactaccttacatccatcgtaattgttctctaggaaaagagaa

SEQ ID NO: 706981 - DNA, 120 bp, Artificial Sequence
  ENSG00000196586_36 (sequence is synthesized)
cttttttcaaaattcaaaatactttttaaggatggcacagtaccatataactggagtaataaaacatgagcttacattcttacaataactaaaccacttaaaatgatcaaggcactaatg

SEQ ID NO: 706982 - DNA, 120 bp, Artificial Sequence
  ENSG00000196586_37 (sequence is synthesized)
ttttggtctgaaaagctgtgtactttatagacattttcagacatttttggaaatttccattaaaggtggaaaatctatttttttcctcctttgcagtgtcttagtttgaatgaaacactt

SEQ ID NO: 706983 - DNA, 120 bp, Artificial Sequence
  ENSG00000196586_38 (sequence is synthesized)
cgaagttctagaattctagaaagagccttaatgtatttgatgtattctgtgataagaggtactaatagtatccagcacagatttgcttttctttgctagcacaatgtgtgttgctgtcag

SEQ ID NO: 706984 - DNA, 120 bp, Artificial Sequence
  ENSG00000196586_39 (sequence is synthesized)
aatattctttttatattctgtggaaaaataaaggaaattcagattgtttaaatgcctaaaagttttgagataagttttgtttcaattagaaaaggaaataggttttaggtggcatagtgg

SEQ ID NO: 706985 - DNA, 120 bp, Artificial Sequence
  ENSG00000196586_40 (sequence is synthesized)
cttaactggactgaattcaaatattctttcaacttcatctcaatagtgatttttgtatcagaatcttgtccaagttgtttcattgatttagtaagtgttctgcttccaacatctttcttt

SEQ ID NO: 706986 - DNA, 120 bp, Artificial Sequence
  ENSG00000196586_41 (sequence is synthesized)
ttaagaaattcctagtgtcttttttggcctttgaggttttggtaattgtagacctgtttcataagctttgtaattcagaaatccttgtatttagtaagtgcttgttttacataactgata

SEQ ID NO: 706987 - DNA, 120 bp, Artificial Sequence
  ENSG00000196586_42 (sequence is synthesized)
attttaaaatgttttctttgtgtgctgttagtattgattcaaatgtcagcagctttaagcctaatatttatgactttcacatttggaatttaaagacaaaaatacatcaaggagttatgc

SEQ ID NO: 706988 - DNA, 120 bp, Artificial Sequence
  ENSG00000196586_43 (sequence is synthesized)
tgacataattctaaggagttttgttgtattttagaataaaattataaagtaaaatgattctctgtactgctttttcccccagtttttagagaccctaacctttgaaatgaaattccagtg

SEQ ID NO: 706989 - DNA, 120 bp, Artificial Sequence
  ENSG00000196586_44 (sequence is synthesized)
atttcttttttccctagaaagattacctcagttagggaagtatttcccagctgactagtgtttgtgagccacagacactgtcttcagaattgcttctctcatgtcttagtagagaaatat

SEQ ID NO: 706990 - DNA, 120 bp, Artificial Sequence
  ENSG00000196586_45 (sequence is synthesized)
ttatttattatgatacattcaaatgattgtcaagttaaattaaatggttgtgtctgtgctattgagaatgcaaatgtgattatcttttgaaggctgtattactgcatagcttcacccacc

SEQ ID NO: 706991 - DNA, 120 bp, Artificial Sequence
  ENSG00000196586_46 (sequence is synthesized)
ctcgggtcatttcgtccctgtgattggggacagaaggtgtagctactgaagtaaatgacctattctctctcttccatctctcgcctttaactggtgtttttatttgtgtaggatagtgaa

SEQ ID NO: 706992 - DNA, 120 bp, Artificial Sequence
  ENSG00000196586_47 (sequence is synthesized)
tgataagcttttttcctaaccagtagtgagtaaagttcttgaacaaaatttagtagccaaattgttttttaatgacatgtctctttagtacaatagttttgtgtatcttttagatacatt

SEQ ID NO: 706993 - DNA, 120 bp, Artificial Sequence
  ENSG00000196586_48 (sequence is synthesized)
aataggcactagatggaaaattaaagagttaaacatatttaaatgagagaatctaatgtttcagaaatttgtaagaaatgtatcacagcaaagggttgttataagtccttagtttttgac

SEQ ID NO: 706994 - DNA, 120 bp, Artificial Sequence
  ENSG00000196586_49 (sequence is synthesized)
tctaatagttaatacaattatagttaatcttaagccataatgtttctaatcatgtcacacagctgtcctagaacttatctatttaaaatagtttcctgagttaattttggccagcagggc

SEQ ID NO: 706995 - DNA, 120 bp, Artificial Sequence
  ENSG00000196586_50 (sequence is synthesized)
aactgccctaattcagatagatttacagtaacctacgtacagtagatgcacatacacacagacacccctttgctggagaaacttaggaccctgtcagccttttaaaggaaacagcaggag

SEQ ID NO: 706996 - DNA, 120 bp, Artificial Sequence
  ENSG00000196586_51 (sequence is synthesized)
tggtgtcctaaatgatgttcatgcagctgctttaccatgttcacagtcaagcccatgcatgccaggttaaaactgtggaaatcaaaagtaaattcactcatattttaatcattttaactg

SEQ ID NO: 706997 - DNA, 120 bp, Artificial Sequence
  ENSG00000196586_52 (sequence is synthesized)
agatttaaaattagaagtttaaaccactatatataaagaactaatcttttcttaataccagttctttccatagcatatgctttgcaaaggcagcatgcataaaatatttaaaatgagagg

SEQ ID NO: 706998 - DNA, 120 bp, Artificial Sequence
  ENSG00000196586_53 (sequence is synthesized)
acagaatgttttcacatttgattcaattttaatataattcctaattgtggtaacacagttgagatatgtattatgagttatgggaactaattgagaaaaggaagttactctaatccacgt

SEQ ID NO: 706999 - DNA, 120 bp, Artificial Sequence
  ENSG00000196586_54 (sequence is synthesized)
atgttaagagaatattgagttttcttagttgtaaagttggggagatggcaccttctcagaggattgtgaaaatatgaggaagaaacaaaacagtgcatgtaggagcacagggccacacaa

SEQ ID NO: 707000 - DNA, 120 bp, Artificial Sequence
  ENSG00000196586_55 (sequence is synthesized)
aggcattctattgttatgctcattctgcttctgtaatgacttttcataggtcattcttgtgaaccattttgttttgcaagcaaccaaggaaagaacatcttaagtggaaaatcagtggtg

SEQ ID NO: 707001 - DNA, 120 bp, Artificial Sequence
  ENSG00000196586_56 (sequence is synthesized)
gttgtgaacacttagagaatagcaatccacaggcaagaataatggtattgtttgtagagctttattaattggatattttttaaaagacattttcattcacaggtcattactatggttctc

SEQ ID NO: 707002 - DNA, 120 bp, Artificial Sequence
  ENSG00000196586_57 (sequence is synthesized)
agcgatccaaatatgtagatcattggtttttttttttacctgaagtagcttaagagtacttggatcagtagaataaatatttattgaatcaatcagtcagccaattaatatgatgttagt

SEQ ID NO: 707003 - DNA, 120 bp, Artificial Sequence
  ENSG00000196586_58 (sequence is synthesized)
gatagacctgcctccttttatggaagaggtaacagatccagagaggtcaagtaatttagttgtagactgaaaaatatatcaaagcctttgctgcaatcatatgtaacaaaaagaaccaaa

SEQ ID NO: 707004 - DNA, 120 bp, Artificial Sequence
  ENSG00000196586_59 (sequence is synthesized)
acaaacactttttagtggcacctgtggatttacaaagggttgcctctctgtcattccacaacttcagaaggtgtgacaggttttccctatttatcattaccaataataacaagtattgag

SEQ ID NO: 707005 - DNA, 120 bp, Artificial Sequence
  ENSG00000196586_60 (sequence is synthesized)
agttttaaaatttctcccagaagataaactaacaaggatggaaggggagggcaaaggatatctaaacatgagaataaggacatgttagagggggggaaacagttgtaacaataaggaaag

SEQ ID NO: 707006 - DNA, 120 bp, Artificial Sequence
  ENSG00000196586_61 (sequence is synthesized)
agaagagcaacagtggaagagacaggttgtgtgcccctaaagattctgcacccccagtttggaaacactgatacattttaggacacagagcactcctagatctctacgaaattttagaat

SEQ ID NO: 707007 - DNA, 120 bp, Artificial Sequence
  ENSG00000196586_62 (sequence is synthesized)
gaataatgtgtaatttataggatcagaacgtatggttattaaaacttggatcaagatatgcccggtgtatacattcttagcacataggaatggcactgccatactggagaaggtcagcag

SEQ ID NO: 707008 - DNA, 120 bp, Artificial Sequence
  ENSG00000196586_63 (sequence is synthesized)
taaataggcattctgtacataagcctcatggaagggtaagatggagagactggcagaagtagcacctactctgctgggagcacttctctgagtacgctttagttcaattcaaatcactgt

SEQ ID NO: 707009 - DNA, 120 bp, Artificial Sequence
  ENSG00000196586_64 (sequence is synthesized)
attctttccccattgctaacctaatatatgaaacaagcttagctgtctcagaagtttttcaagagatgatcaggaaaaattaatgcacattcaaaaggagaatcttcagtacaaatttgt

SEQ ID NO: 707010 - DNA, 120 bp, Artificial Sequence
  ENSG00000196586_65 (sequence is synthesized)
aacaagagcgaaattccatctcaaaaaataaaatagatttagggggtacaagtgcagttttgttacatgggtatattgcatagtggtaaaatgtgggcttttagtgtacctaacacccag

SEQ ID NO: 707011 - DNA, 120 bp, Artificial Sequence
  ENSG00000196586_66 (sequence is synthesized)
tagtggtaaaatgtgggcttttagtgtacctaacacccagagaagcatacattgtgcccagtaggtaatttttcatccctaaaccttttctcagcctcccactttctggagtctccaatg

SEQ ID NO: 707012 - DNA, 120 bp, Artificial Sequence
  ENSG00000196586_67 (sequence is synthesized)
tcggttattccactctttatgtccatatctacacattcaatcctaatttgtaccaagtagcatctcacctttaaatcacaggcttattagttgggtgttttctttttacttatgaaaatt

SEQ ID NO: 707013 - DNA, 120 bp, Artificial Sequence
  ENSG00000196586_68 (sequence is synthesized)
catctagtcaaactgtcaattaatttttcctcatttcattaaaagtgtatatctaatgctttctctaaaaattgatgtactggaaatacaaataaataaatgctccctgtgtagaatttc

SEQ ID NO: 707014 - DNA, 120 bp, Artificial Sequence
  ENSG00000196586_69 (sequence is synthesized)
gtccgcgtcgtcgccctcttcactggccctcatcacttctcaccgcgccctccagcttcacccgtacaggtagccccgccgccgcgcacctgccttcgctcccgcaccgatggagtctcg

SEQ ID NO: 707015 - DNA, 120 bp, Artificial Sequence
  ENSG00000196586_70 (sequence is synthesized)
gttgcatcagaatgattgggagtctttatgtgtaactgactagccgcctagggcaggctcttaaacgaaccaaactcttacagctgctatccctgatgtctgtgaggaagtactgcagtt

SEQ ID NO: 707016 - DNA, 120 bp, Artificial Sequence
  ENSG00000196586_71 (sequence is synthesized)
gacagagttgattttattatggcagaagtcaatttctaagggacttgttaatggagtcattgttggtactcatcatcaagctttatatttatgcacttgaaatgttaagctgtatccagt

SEQ ID NO: 707017 - DNA, 120 bp, Artificial Sequence
  ENSG00000196586_72 (sequence is synthesized)
gccattccatatactgtatacaagatactgtctcatatgtggaccccttcccatcttcagaaaggtacatgtcttccaggttgagaagagtggatcgtttaggacctttaacataaacaa

SEQ ID NO: 707018 - DNA, 120 bp, Artificial Sequence
  ENSG00000196586_73 (sequence is synthesized)
gttacctgtaatttaaattaagcagaattagctaggtaatgggaccatattaagtaatgaggagatattcaaacccttatgacctgaaaggcagaagagctagttttagttatgtggttc

SEQ ID NO: 707019 - DNA, 120 bp, Artificial Sequence
  ENSG00000196586_74 (sequence is synthesized)
aggcctaggggtggtatgaagaatgcccttcaaatcctttctgtcagctctccaggaagctttccctgaccctcaggtcctcatgagctccttcccttctggtcgtcgtggttattttat

SEQ ID NO: 707020 - DNA, 120 bp, Artificial Sequence
  ENSG00000196586_75 (sequence is synthesized)
actgtgaactacaagcattagcacttcattatgaatgatgttctatacagatatcacatgtttgatagtttaatcttactccatgggctatagctaaatgtttttgaatgtttattttac

SEQ ID NO: 707021 - DNA, 120 bp, Artificial Sequence
  ENSG00000196586_76 (sequence is synthesized)
ctttgttagcactgagttttttctctaacaaatttatgagtaagaactaagtaaactgttcttaatctatagcatgatgttgttgggttctatgctgtgttaaaaaatgtatatattata

SEQ ID NO: 707022 - DNA, 120 bp, Artificial Sequence
  ENSG00000196586_77 (sequence is synthesized)
gatagattctgcttcaataagcaattttaagttacttttccagcttggattcctatccggtaacttctaagtaagaattgttttctatgtatgtcatatgttctgaaatataatttcaat

SEQ ID NO: 707023 - DNA, 120 bp, Artificial Sequence
  ENSG00000196586_78 (sequence is synthesized)
caattacacatatgattcttgatgcaaagagatggtttcaaattacctaaaattgtaaaataatatccagattctattaaaaacaaacctcacaatatatgaattttctaatctagatgt

SEQ ID NO: 707024 - DNA, 120 bp, Artificial Sequence
  ENSG00000196586_79 (sequence is synthesized)
aatgtatttgctctttaattttcactgcatgccttattttccaatcatttttaatgaatacttaaaaatatattaaaattctgagtgatctcatgttgattacaaataattgagttttta

SEQ ID NO: 707025 - DNA, 120 bp, Artificial Sequence
  ENSG00000196586_80 (sequence is synthesized)
aaatcaatgagtaaagtaattgaaacacaaatttgcacaatccagattttcacagttcacaattggttacgatattaactaaaatatattcttttcacagaaatgatggaacaagaccca

SEQ ID NO: 707026 - DNA, 120 bp, Artificial Sequence
  ENSG00000196588_0 (sequence is synthesized)
aaatctgtgtcatcttgactcgcctgaagggtggataaattggtaactgcactgagaaggggatattctcacagtctgatttgagcataaggcatcagattgaatttgtgaaagctttca

SEQ ID NO: 707027 - DNA, 120 bp, Artificial Sequence
  ENSG00000196588_1 (sequence is synthesized)
agacagcttttctcctgtgactttgactttcttcattatatttgtggatttttgtttctggaagaatccgtcatgactctactggaacctgagatgttaatgatggcagtacagtcagtg

SEQ ID NO: 707028 - DNA, 120 bp, Artificial Sequence
  ENSG00000196588_2 (sequence is synthesized)
ctacagttgaaactccagcagcgccggacccgggaagaactggtgagccaagggatcatgccgcctttgaaaagtccagccgcatttcatgagcagagaaggagcttggagcgggccagg

SEQ ID NO: 707029 - DNA, 120 bp, Artificial Sequence
  ENSG00000196588_3 (sequence is synthesized)
acagaggactatctcaaacggaagattcgttcccggccggagagatcggagctggtcaggatgcacattttggaagagacctcggctgagccatccctccaggccaagcagctgaagctg

SEQ ID NO: 707030 - DNA, 120 bp, Artificial Sequence
  ENSG00000196588_4 (sequence is synthesized)
aagagagccagactagccgatgacctcaatgagaagattgcacagaggcctggccccatggagctggtggagaagaacatccttcctgttgagtccagcctgaaggaagccatcattgtg

SEQ ID NO: 707031 - DNA, 120 bp, Artificial Sequence
  ENSG00000196588_5 (sequence is synthesized)
ggccaggtgaactatcccaaagtagcagacagctcttccttcgatgaggacagcagcgatgccttatcccccgagcagcctgccagccatgagtcccagggttctgtgccgtcacccctg

SEQ ID NO: 707032 - DNA, 120 bp, Artificial Sequence
  ENSG00000196588_6 (sequence is synthesized)
gaggcccgagtcagcgaaccactgctcagtgccacctctgcatcccccacccaggttgtgtctcaacttccgatgggccgggattccagagaaatgcttttcctggcagagcagcctcct

SEQ ID NO: 707033 - DNA, 120 bp, Artificial Sequence
  ENSG00000196588_7 (sequence is synthesized)
ctgcctcccccacctctgctgcctcccagcctcaccaatggaaccactatccccactgccaagtccacccccacactcattaagcaaagccaacccaagtctgccagtgagaagtcacag

SEQ ID NO: 707034 - DNA, 120 bp, Artificial Sequence
  ENSG00000196588_8 (sequence is synthesized)
cgcagcaagaaggccaaggagctgaagccaaaggtgaagaagctcaagtaccaccagtacatccccccggaccagaagcaggacaggggggcaccccccatggactcatcctacgccaag

SEQ ID NO: 707035 - DNA, 120 bp, Artificial Sequence
  ENSG00000196588_9 (sequence is synthesized)
atcctgcagcagcagcagctcttcctccagctgcagatcctcaaccagcagcagcagcagcaccacaactaccaggccatcctgcctgccccgccaaagtcagcaggcgaggccctggga

SEQ ID NO: 707036 - DNA, 120 bp, Artificial Sequence
  ENSG00000196588_10 (sequence is synthesized)
agcagcgggacccccccagtacgcagcctctccactaccaatagcagctccagctcgggcgcccctgggccctgtgggctggcacgtcagaacagcacctcactgactggcaagccggga

SEQ ID NO: 707037 - DNA, 120 bp, Artificial Sequence
  ENSG00000196588_11 (sequence is synthesized)
gccctgccggccaacctggacgacatgaaggtggcagagctgaagcaggagctgaagttgcgatcactgcctgtctcgggcaccaaaactgagctgattgagcgccttcgagcctatcaa

SEQ ID NO: 707038 - DNA, 120 bp, Artificial Sequence
  ENSG00000196588_12 (sequence is synthesized)
gaccaaatcagccctgtgccaggagcccccaaggcccctgccgccacctctatcctgcacaaggctggcgaggtggtggtagccttcccagcggcccggctgagcacggggccagccctg

SEQ ID NO: 707039 - DNA, 120 bp, Artificial Sequence
  ENSG00000196588_13 (sequence is synthesized)
gtggcagcaggcctggctccagctgaggtggtggtggccacggtggccagcagtggggtggtgaagtttggcagcacgggctccacgccccccgtgtctcccaccccctcggagcgctca

SEQ ID NO: 707040 - DNA, 120 bp, Artificial Sequence
  ENSG00000196588_14 (sequence is synthesized)
ctgctcagcacgggcgatgaaaactccacccccggggacacctttggtgagatggtgacatcacctctgacgcagctgaccctgcaggcctcgccactgcagatcctcgtgaaggaggag

SEQ ID NO: 707041 - DNA, 120 bp, Artificial Sequence
  ENSG00000196588_15 (sequence is synthesized)
ggcccccgggccgggtcctgttgcctgagccctggggggcgggcggagctagaggggcgcgacaaggaccagatgctgcaggagaaagacaagcagatcgaggcgctgacgcgcatgctc

SEQ ID NO: 707042 - DNA, 120 bp, Artificial Sequence
  ENSG00000196588_16 (sequence is synthesized)
cggcagaagcagcagctggtggagcggctcaagctgcagctggagcaggagaagcgagcccagcagcccgcccccgcccccgcccccctcggcacccccgtgaagcaggagaacagcttc

SEQ ID NO: 707043 - DNA, 120 bp, Artificial Sequence
  ENSG00000196588_17 (sequence is synthesized)
tccgtggtggtgaagcaggaagccttgcagcctgagcccgagccggtccccgccccccagttgcttctggggcctcagggccccagcctcatcaagggggttgcacctcccaccctcatc

SEQ ID NO: 707044 - DNA, 120 bp, Artificial Sequence
  ENSG00000196588_18 (sequence is synthesized)
accgactccacagggacccaccttgtcctcaccgtgaccaataagaatgcagacagccctggcctgtccagtgggagcccccagcagccctcgtcccagcctggctctccagcgcctgcc

SEQ ID NO: 707045 - DNA, 120 bp, Artificial Sequence
  ENSG00000196588_19 (sequence is synthesized)
ccctctgcccagatggacctggagcacccactgcagcccctctttgggacccccacttctctgctgaagaaggaaccacctggctatgaggaagccatgagccagcagcccaaacagcag

SEQ ID NO: 707046 - DNA, 120 bp, Artificial Sequence
  ENSG00000196588_20 (sequence is synthesized)
gaaaatggttcctcaagccagcagatggacgacctgtttgacattctcattcagagcggagaaatttcagcagatttcaaggagccgccatccctgccagggaaggagaagccatccccg

SEQ ID NO: 707047 - DNA, 120 bp, Artificial Sequence
  ENSG00000196588_21 (sequence is synthesized)
aagacagtctgtgggtcccccctggcagcacagccatcaccttctgctgagctcccccaggctgccccacctcctccaggctcaccctccctccctggacgcctggaggacttcctggag

SEQ ID NO: 707048 - DNA, 120 bp, Artificial Sequence
  ENSG00000196588_22 (sequence is synthesized)
agcagcacggggctgcccctgctgaccagtgggcatgacgggccagagcccctttccctcattgacgacctccatagccagatgctgagcagcactgccatcctggaccaccccccgtca

SEQ ID NO: 707049 - DNA, 120 bp, Artificial Sequence
  ENSG00000196588_23 (sequence is synthesized)
cccatggacacctcggaattgcactttgttcctgagcccagcagcaccatgggcctggacctggctgatggccacctggacagcatggactggctggagctgtcgtcaggtggtcccgtg

SEQ ID NO: 707050 - DNA, 120 bp, Artificial Sequence
  ENSG00000196588_24 (sequence is synthesized)
ctgagcctagcccccctcagcaccacagcccccagcctcttctccacagacttcctcgatggccatgatttgcagctgcactgggattcctgcttgtagctctctggctcaagacggggt

SEQ ID NO: 707051 - DNA, 120 bp, Artificial Sequence
  ENSG00000196588_25 (sequence is synthesized)
ggggaaggggctgggagccagggtactccaatgcgtggctctcctgcgtgattcggcctctccacatggttgtgagtcttgacaatcacagcccctgctttttcccttccctgggaggct

SEQ ID NO: 707052 - DNA, 120 bp, Artificial Sequence
  ENSG00000196588_26 (sequence is synthesized)
agaacagagaagcccttactcctggttcagtgccacgcagggcagaggagagcagctgtcaagaagcagccctggctctcacgctggggttttggacacacggtcagggtcagggccatt

SEQ ID NO: 707053 - DNA, 120 bp, Artificial Sequence
  ENSG00000196588_27 (sequence is synthesized)
tcagcttgacctccttttttgaggtcagggggcactgtctgtctggctacaatttggctaaggtaggtgaagcctggccaggcgggaggcttctcttctgacccagggctgagacaggtt

SEQ ID NO: 707054 - DNA, 120 bp, Artificial Sequence
  ENSG00000196588_28 (sequence is synthesized)
aaggggtgaatctccttcctttctctccctgctttgctgtgaagggagaaattagcctgggcctctaccccctattccctgtgtctgccaaccccaggatcccagggctccctgccattt

SEQ ID NO: 707055 - DNA, 120 bp, Artificial Sequence
  ENSG00000196588_29 (sequence is synthesized)
tagtgtcttggtgtagtgtaaccatttagtggttggtggcaacaattttatgtacaggtgtatatacctctatattatatatcgacatacatatatatttttgggggggggcggacagga

SEQ ID NO: 707056 - DNA, 120 bp, Artificial Sequence
  ENSG00000196588_30 (sequence is synthesized)
gatgggtgcaactccctcccatcctactctcacagaagggcctggatgcaaggttacccttgagctgtgtgccacagtctggtgcccagtctggcatgcagctacccaggcccacccatc

SEQ ID NO: 707057 - DNA, 120 bp, Artificial Sequence
  ENSG00000196588_31 (sequence is synthesized)
acgtgtgattgacatgtaggtaccctgccacggcctatgccccacctgccctgcttcctggctccttatcagtgccatgagggcagaggtgctacctggccttcctgccaggagctctcc

SEQ ID NO: 707058 - DNA, 120 bp, Artificial Sequence
  ENSG00000196588_32 (sequence is synthesized)
acccactcacattccgtccccgccgcctcactgcagccagcgtggccctaggacaggaggagcttcgggcccagcttcaccctgcggtggggctgaggggtggccatctcctgccctggg

SEQ ID NO: 707059 - DNA, 120 bp, Artificial Sequence
  ENSG00000196588_33 (sequence is synthesized)
gccactggcttcacattctgggctgactcataggggagtaggggtggagtcaccaaaaccagtgctgggacaaagatggggaaggtgtgtgaactttttaaaataaacacaaaaacacag

SEQ ID NO: 707060 - DNA, 120 bp, Artificial Sequence
  ENSG00000196588_34 (sequence is synthesized)
ggctgagaggagccggcggcggcagtgtctgtggtggccgcggcggcgagagcgacggtcccatctttcccaccctcttggttgccgctggccacacgccctccgctggcggcgacttct

SEQ ID NO: 707061 - DNA, 120 bp, Artificial Sequence
  ENSG00000196588_35 (sequence is synthesized)
cagctccgtgcgcccgggctggacagtgagcctcgagaggagacgcgggcggctagagccggagtggggcgagccgcggaacccggccgggagccgcgcgaggcgtgatcggagggtatg

SEQ ID NO: 707062 - DNA, 120 bp, Artificial Sequence
  ENSG00000196588_36 (sequence is synthesized)
cccttccgtcattgctgtgaatgggctggacggaggaggggccggcgaaaatgatgatgaaccagtgctcgtgtccttatctgcggcacccagtccccagagtgaagctgttgccaatga

SEQ ID NO: 707063 - DNA, 120 bp, Artificial Sequence
  ENSG00000196588_37 (sequence is synthesized)
actgcaggagctctccttgcagcccgagctgaccctaggcctccaccctggcaggaatcccaatttgcctccacttagtgagcggaagaatgaaaaatgtctcaaattgggtataacaaa

SEQ ID NO: 707064 - DNA, 120 bp, Artificial Sequence
  ENSG00000196588_38 (sequence is synthesized)
agcccagagacctctcccaaacctcaaggggccaggcaccccctgcagggttgagggccccccatcctgtattccttcctacctagtggctttcatgaaagctccctaaaagccagtgcc

SEQ ID NO: 707065 - DNA, 120 bp, Artificial Sequence
  ENSG00000196588_39 (sequence is synthesized)
tcccatcttccctcctagagtgtgagaggccctggccctatccccgccccccgccccctacaaggcaggtctgcacccccagccccctggccactggtcctctccctgctctcctgtcca

SEQ ID NO: 707066 - DNA, 120 bp, Artificial Sequence
  ENSG00000196588_40 (sequence is synthesized)
acttctgcaattacagacagttgcacttcaaggggacccttctttcacactacatccttctgtttttagactttttttgcgtttgaaaatgtgttttttgaggtggaatacccaactgac

SEQ ID NO: 707067 - DNA, 87 bp, Artificial Sequence
  ENSG00000196588_41 (sequence is synthesized)
cgtcattgctgtgaatgggctggacggaggaggggccggcgaaaatgatgatgaaccagtgctcgtgtccttatctgcggcacccag

SEQ ID NO: 707068 - DNA, 120 bp, Artificial Sequence
  ENSG00000196588_42 (sequence is synthesized)
ctgcacccagcccattgtaactaaccatttttaagtgtatggttcagtggtattaaatacattcataatgtgtacagccatcactgccatccatctccctttcttttgatctcgtaaaac

SEQ ID NO: 707069 - DNA, 120 bp, Artificial Sequence
  ENSG00000196588_43 (sequence is synthesized)
tgaaactatccccattaaacagtaacttcccatttggcccttccgccagcctgtagcaactgccattctactttctgtctctatgattttgactaagtgcaatcatgaattgtcttttgt

SEQ ID NO: 707070 - DNA, 120 bp, Artificial Sequence
  ENSG00000196588_44 (sequence is synthesized)
gacaggctgttgcactaagcatagtatcacttccttcatccattgatggacataggttgcttccacattctactgttgtgaatgcacttatcaacacctgtgtacaaatacctgagaccc

SEQ ID NO: 707071 - DNA, 120 bp, Artificial Sequence
  ENSG00000196588_45 (sequence is synthesized)
tgcttccaattcttttgggtatatgcccagcagtggaattgctagatcatatggtaattctatttttaagtaagtaagtgttggaggaacctccatactgtttttcatagcagctgcacc

SEQ ID NO: 707072 - DNA, 120 bp, Artificial Sequence
  ENSG00000196588_46 (sequence is synthesized)
attttgcatttctaccacagggcacaagggctccagtttctctgtatcctcaccaatactttcttaaaaatttaattttacagtagccactccagtgggtttgaggtgtatctcactgtg

SEQ ID NO: 707073 - DNA, 120 bp, Artificial Sequence
  ENSG00000196588_47 (sequence is synthesized)
gtctccctcatgactagtgatattgagctcttttcatgtgctgttggccatttgtatatcatctttggaaaaatgtctgttcaaatctttcttttacctattcttgagtcaagtttggtt

SEQ ID NO: 707074 - DNA, 120 bp, Artificial Sequence
  ENSG00000196588_48 (sequence is synthesized)
tcacttctttatcaaatatgtgatttgcaaatatttttaaagagttttatagtcttagctcttacatttaagtaagtctttgatccgttttatttttgtaaatggtgtgacgttgggggg

SEQ ID NO: 707075 - DNA, 120 bp, Artificial Sequence
  ENSG00000196588_49 (sequence is synthesized)
tccaccttcattcttttgcatgtagatatacaggcttggcttctgatatccatttactctcttgattgattggcagaaatttcagcagatttcaaggagccgccatccctgccagggaag

SEQ ID NO: 707076 - DNA, 120 bp, Artificial Sequence
  ENSG00000196588_50 (sequence is synthesized)
ccaccctgtgtgagaggcagctgagatgcaggaggggagggagtgccaggctgaagcagaattgggctgaggctcttgacttcttaatctttgacttcctgcttagccttgggagaacca

SEQ ID NO: 707077 - DNA, 120 bp, Artificial Sequence
  ENSG00000196588_51 (sequence is synthesized)
aggcacagagtttgagagcctcatgcacaggttgtatgaacttgggatagtgcctgttgctttaagaaacagggacatacaacaataaataataacagaggccttgctctgttcactttc

SEQ ID NO: 707078 - DNA, 120 bp, Artificial Sequence
  ENSG00000196588_52 (sequence is synthesized)
gcatgagaagagagggcagcactggtaggtaacgctaaaacaacatcgccttcatctctcaaccctgatctctttccaagaagtgagctgactaaatgaaatattacacaaaaccctcca

SEQ ID NO: 707079 - DNA, 120 bp, Artificial Sequence
  ENSG00000196588_53 (sequence is synthesized)
aggtttgagaagagttctagagggtagtctctaagtgagaaggaccatctctataggtggccctgagttttatcctcaaatttccttctacgccatgtacccatcctcactcatttttcg

SEQ ID NO: 707080 - DNA, 120 bp, Artificial Sequence
  ENSG00000196588_54 (sequence is synthesized)
ggtcccaccaagcctaaactcaggggtagttttccatttaaaattctgcctcacaggtggacacatcttttttattgtttcccttaagcacagattagactaactttattaaaagagatc

SEQ ID NO: 707081 - DNA, 120 bp, Artificial Sequence
  ENSG00000196588_55 (sequence is synthesized)
ggctgttttgccacttaagcctggagtgatacaaaaaagggctatgcctctcagcaaatgagagctggcaagggcaaaatgagaaaccatcgtatccagcgcaagggaccctgcatcgtc

SEQ ID NO: 707082 - DNA, 120 bp, Artificial Sequence
  ENSG00000196588_56 (sequence is synthesized)
tctaatgaagatgattgtattgtcaaagccttccgaaacattcctagaattattctgcttaatgtaagcaaactgaacattttgaaacttgctcctgatgggcatgtgggacatttctgc

SEQ ID NO: 707083 - DNA, 120 bp, Artificial Sequence
  ENSG00000196588_57 (sequence is synthesized)
atttggactgaaagtgctttctagaagttagacaattgtgtggcacttggtgtaaagctgtttcctcaagagtaactgcaatctttgcatgcacaagatgatcaatacagaccttagcag

SEQ ID NO: 707084 - DNA, 120 bp, Artificial Sequence
  ENSG00000196589_0 (sequence is synthesized)
ccaagggctgtctgtgcctcaggagtggggtcagcaggaggaactctacagctatgggagaacctgcgttcacctcttttccaagcctgcctgttctggggaagctcaaaaggaacatga

SEQ ID NO: 707085 - DNA, 120 bp, Artificial Sequence
  ENSG00000196589_1 (sequence is synthesized)
tgccctgggctttacagaagaaacgagaaatccacatggccaaggcccatcggagacgagctgcgaggtctgctctccccatgagactcaccagctgcatcttccggaggccggtgacaa

SEQ ID NO: 707086 - DNA, 120 bp, Artificial Sequence
  ENSG00000196589_2 (sequence is synthesized)
ggatcaggtctcatcctgacaaccaggtcagacgcagaaaaggggacgagcacctggagaagccgcagcaactctgcgcctaccggagactgcaggccctgcagccctgcagcagccaag

SEQ ID NO: 707087 - DNA, 120 bp, Artificial Sequence
  ENSG00000196589_3 (sequence is synthesized)
catttggagagcgtcttaagtatccttgcaccggggacggccggtgaatctctggacagagctggtgctgagcgtgtgcgcagcccgcttgagcccacccctgggcggtttccagctgtg

SEQ ID NO: 707088 - DNA, 120 bp, Artificial Sequence
  ENSG00000196589_4 (sequence is synthesized)
gcaggggggccaaccccaggaatgggttgtcagctcccaccgcccctctctggccaattggtgactcctgcagatatccggagacaggccaggagggtgaagaaagccagggagagactg

SEQ ID NO: 707089 - DNA, 120 bp, Artificial Sequence
  ENSG00000196589_5 (sequence is synthesized)
gccaaggccttgcaggcagacaggctggccaggcgggcagaaatgtgacaggtggatgaagtgcaggaggagggggtgctgagaagctgtggggtgtggccccgcagttggggggtgagt

SEQ ID NO: 707090 - DNA, 120 bp, Artificial Sequence
  ENSG00000196589_6 (sequence is synthesized)
cagtggggacagtcctgggttttgaatccctatcttttaatgcccgtcctctttcctgctatgaattgtcacactttgtacttccccaccagttctttattaaaagcatttgaaaggcaa

SEQ ID NO: 707091 - DNA, 120 bp, Artificial Sequence
  ENSG00000196589_7 (sequence is synthesized)
tggatgaagtgcagtcctgggttttgaatccctatcttttaatgcccgtcctctttcctgctatgaattgtcacactttgtacttccccaccagttctttattaaaagcatttgaaaggc

SEQ ID NO: 707092 - DNA, 120 bp, Artificial Sequence
  ENSG00000196591_0 (sequence is synthesized)
cccctcctcgcgagttggtgccgctgccacctccgattccgagctttcggcacctctgccgggtggtaccgagccttcccggcgccccctcctctcctcccaccggcctgcccttccccg

SEQ ID NO: 707093 - DNA, 120 bp, Artificial Sequence
  ENSG00000196591_1 (sequence is synthesized)
cgggactatcgcccccacgtttccctcagcccttttctctcccggccgagccgcggcggcagcagcagcagcagcagcagcaggaggaggagcccggtggcggcggtggccggggagccc

SEQ ID NO: 707094 - DNA, 120 bp, Artificial Sequence
  ENSG00000196591_2 (sequence is synthesized)
atggcgtacagtcaaggaggcggcaaaaaaaaagtctgctactactacgacggtgatattggaaattattattatggacagggtcatcccatgaagcctcatagaatccgcatgacccat

SEQ ID NO: 707095 - DNA, 120 bp, Artificial Sequence
  ENSG00000196591_3 (sequence is synthesized)
aacttgctgttaaattatggcttatacagaaaaatggaaatatataggccccataaagccactgccgaagaaatgacaaaatatcacagtgatgagtatatcaaatttctacggtcaata

SEQ ID NO: 707096 - DNA, 120 bp, Artificial Sequence
  ENSG00000196591_4 (sequence is synthesized)
agaccagataacatgtctgagtatagtaagcagatgcagagatttaatgttggagaagattgtccagtgtttgatggactctttgagttttgtcagctctcaactggcggttcagttgct

SEQ ID NO: 707097 - DNA, 120 bp, Artificial Sequence
  ENSG00000196591_5 (sequence is synthesized)
ggagctgtgaagttaaaccgacaacagactgatatggctgttaattgggctggaggattacatcatgctaagaaatcagaagcatcaggattctgttacgttaatgatattgtgcttgcc

SEQ ID NO: 707098 - DNA, 120 bp, Artificial Sequence
  ENSG00000196591_6 (sequence is synthesized)
atccttgaattactaaagtatcatcagagagtcttatatattgatatagatattcatcatggtgatggtgttgaagaagctttttatacaacagatcgtgtaatgacggtatcattccat

SEQ ID NO: 707099 - DNA, 120 bp, Artificial Sequence
  ENSG00000196591_7 (sequence is synthesized)
aaatatggggaatactttcctggcacaggagacttgagggatattggtgctggaaaaggcaaatactatgctgtcaattttccaatgagagatggtatagatgatgagtcatatgggcag

SEQ ID NO: 707100 - DNA, 120 bp, Artificial Sequence
  ENSG00000196591_8 (sequence is synthesized)
atatttaagcctattatctcaaaggtgatggagatgtatcaacctagtgctgtggtattacagtgtggtgcagactcattatctggtgatagactgggttgtttcaatctaacagtcaaa

SEQ ID NO: 707101 - DNA, 120 bp, Artificial Sequence
  ENSG00000196591_9 (sequence is synthesized)
ggtcatgctaaatgtgtagaagttgtaaaaacttttaacttaccattactgatgcttggaggaggtggctacacaatccgtaatgttgctcgatgttggacatatgagactgcagttgcc

SEQ ID NO: 707102 - DNA, 120 bp, Artificial Sequence
  ENSG00000196591_10 (sequence is synthesized)
cttgattgtgagattcccaatgagttgccatataatgattactttgagtattttggaccagacttcaaactgcatattagtccttcaaacatgacaaaccagaacactccagaatatatg

SEQ ID NO: 707103 - DNA, 120 bp, Artificial Sequence
  ENSG00000196591_11 (sequence is synthesized)
gaaaagataaaacagcgtttgtttgaaaatttgcgcatgttacctcatgcacctggtgtccagatgcaagctattccagaagatgctgttcatgaagacagtggagatgaagatggagaa

SEQ ID NO: 707104 - DNA, 120 bp, Artificial Sequence
  ENSG00000196591_12 (sequence is synthesized)
gatccagacaagagaatttctattcgagcatcagacaagcggatagcttgtgatgaagaattctcagattctgaggatgaaggagaaggaggtcgaagaaatgtggctgatcataagaaa

SEQ ID NO: 707105 - DNA, 120 bp, Artificial Sequence
  ENSG00000196591_13 (sequence is synthesized)
ggagcaaagaaagctagaattgaagaagataagaaagaaacagaggacaaaaaaacagacgttaaggaagaagataaatccaaggacaacagtggtgaaaaaacagataccaaaggaacc

SEQ ID NO: 707106 - DNA, 120 bp, Artificial Sequence
  ENSG00000196591_14 (sequence is synthesized)
aaatcagaacagctcagcaacccctgaatttgacagtctcaccaatttcagaaaatcattaaaaagaaaatattgaaaggaaaatgttttctttttgaagacttctggcttcattttata

SEQ ID NO: 707107 - DNA, 120 bp, Artificial Sequence
  ENSG00000196591_15 (sequence is synthesized)
ctactttggcatggactgtatttattttcaaatggctttttcgtttttgtttttcttggcaagttttattgtgagtttttctaattatgaagcaaaatttcttttctccaccatgcttta

SEQ ID NO: 707108 - DNA, 120 bp, Artificial Sequence
  ENSG00000196591_16 (sequence is synthesized)
tgtgatagtatttaaaattgatgtgagttattatgtcaaaaaaactgatctattaaagaagtaattggcctttctgagctgatttttccatcttttgtaattatctttattaaaaaattg

SEQ ID NO: 707109 - DNA, 120 bp, Artificial Sequence
  ENSG00000196591_17 (sequence is synthesized)
tacttggattatcttttgtctgtttattactacaatatgaagtcttgtttcagtggctaatgacatcatttctgtagacttacaatacactctaggtgaaagataatgattacagcttga

SEQ ID NO: 707110 - DNA, 120 bp, Artificial Sequence
  ENSG00000196591_18 (sequence is synthesized)
aagataactatttgctgtttctttgggaagagtatttatagtaattattacttatctttgcaatagaaattctaccaccttgccctctatagcttagccagttagtatcagtgaagatta

SEQ ID NO: 707111 - DNA, 120 bp, Artificial Sequence
  ENSG00000196591_19 (sequence is synthesized)
acatcccattacaatttatgaaataatacagactctgcaattgagatgtaggagttctttgagttgacccaaagattctcaaaattgaaatggaaattctgaattgaaagaagaaactga

SEQ ID NO: 707112 - DNA, 120 bp, Artificial Sequence
  ENSG00000196591_20 (sequence is synthesized)
ccagaacttgtattgaccagacttgcctatagtatattgctggtttaaaatggaacctgcagacaaaacctgtttcttttactgcatttacatggcatccaggttccattattatttacg

SEQ ID NO: 707113 - DNA, 120 bp, Artificial Sequence
  ENSG00000196591_21 (sequence is synthesized)
tgacatccaggtttctaactcaaggaaataaacacaactgatttatcattcagcaactacttattgtgtgtctgcccattttaagactgtaggagtgtaactgaatataatggaaaaatg

SEQ ID NO: 707114 - DNA, 120 bp, Artificial Sequence
  ENSG00000196591_22 (sequence is synthesized)
ctttcactcagagcttacactcagagcttacattctagtagcaggaagcagacaaatgggggtaactcctgctactaagatgtgcaaagaagacaaaacattttaggaacttgccaaaat

SEQ ID NO: 707115 - DNA, 120 bp, Artificial Sequence
  ENSG00000196591_23 (sequence is synthesized)
cagtgaaatctccctttttgtcaggcccacattgattcttttgagattaaaaattacagaatgccagaagataattcagtcaaaagtatttctcttcagtgcagtaaaatattaaaagaa

SEQ ID NO: 707116 - DNA, 120 bp, Artificial Sequence
  ENSG00000196591_24 (sequence is synthesized)
aaaatatttctctacaagcctcttaaatgtttcagacattcacaatagcacctagacttttgtaatgaacagctgtgcacccaccccgacttaacaaatattttacttttgctatatttg

SEQ ID NO: 707117 - DNA, 120 bp, Artificial Sequence
  ENSG00000196591_25 (sequence is synthesized)
cttcggtgtttttttcttaaaatacaccgaaattgaagctctctttgtgtactttgtcgtttgtaatcctccctccctcccagccttaagaagtaatcaccattgtgattattttatcca

SEQ ID NO: 707118 - DNA, 120 bp, Artificial Sequence
  ENSG00000196591_26 (sequence is synthesized)
tgtttttgtgaatattttacccatgtttttgtacttttgctacatatttgttatcaatctgtaaacctttatgacattaggaactaagaaacttagtcccttcgttagggggataatgaa

SEQ ID NO: 707119 - DNA, 120 bp, Artificial Sequence
  ENSG00000196591_27 (sequence is synthesized)
tgaaatgtatttagtgtttgtgaaacatagatggtatgtatttggacaattctgtaactttgctttttttatttttatttttccatagcttattggggaacaggtggtgtttggttacat

SEQ ID NO: 707120 - DNA, 120 bp, Artificial Sequence
  ENSG00000196591_28 (sequence is synthesized)
aagttctttagtggtgatttgtgggattttggtggacccatcacccaagcagtgtacactgcaccctatttgtaatcttttatccctcgcccccctcccaccatgcctcccgtctaccat

SEQ ID NO: 707121 - DNA, 120 bp, Artificial Sequence
  ENSG00000196591_29 (sequence is synthesized)
gatgatcctgttttaaataagaaaataccatttcgcaggctccagatgttctggcatcctccctgtggatttcccagtgcctgcagctcacaggacaacaggggctgtggtagagtcacc

SEQ ID NO: 707122 - DNA, 120 bp, Artificial Sequence
  ENSG00000196591_30 (sequence is synthesized)
tatgagatcctggagtagtggatggaggagatggaacagtgaagacggaaactgagctcagtatccgggtgccaggagacaaaggccctttgctttttttcatttaatattctgatctac

SEQ ID NO: 707123 - DNA, 120 bp, Artificial Sequence
  ENSG00000196591_31 (sequence is synthesized)
ccctgttgacacatgttaagtatagttcattttgactgctatgtattatgttccattgtgtgaacatactgaaattgtacacttcaatactatactggatctccttgggtgtatttaaga

SEQ ID NO: 707124 - DNA, 120 bp, Artificial Sequence
  ENSG00000196591_32 (sequence is synthesized)
ggttttgtttttctaagtagttggttatatacaactaaaacctcaagagaactatctaaagcaatttcagcaaggtgatttggtacagcattaataaacagaaatcagtaacacttagtg

SEQ ID NO: 707125 - DNA, 120 bp, Artificial Sequence
  ENSG00000196591_33 (sequence is synthesized)
accaagtctgttggaagaacaaagacccccatttgtaataacaaaatttttagaaataatatgtaaagaagctatggttcttgtgtctagtaaggtcaatgtaacatagtaagatgtcag

SEQ ID NO: 707126 - DNA, 120 bp, Artificial Sequence
  ENSG00000196591_34 (sequence is synthesized)
aataccctaatactttaaaaaattcatataggataaaaatgatatttgaaattggcaaggaaagacattattttgtaagtggaattgggacaacaactggtaaccaaatggaaaacccag

SEQ ID NO: 707127 - DNA, 120 bp, Artificial Sequence
  ENSG00000196591_35 (sequence is synthesized)
ttttctgccctccactagaagatttaaataggaaaagataaaactaccaaaaacctaaactcttaaagcaaatggattgaagaaggcctaagtgtgacaccaaactcaactataaaagat

SEQ ID NO: 707128 - DNA, 120 bp, Artificial Sequence
  ENSG00000196591_36 (sequence is synthesized)
atatttgataacaaaaaaaaaattagttcagtggaccaacaaaaacttagaagacaagtcaagaaaaatgacaaaagacagagtgggaggcagatttgtaactcatccaggtcaaaaggc

SEQ ID NO: 707129 - DNA, 120 bp, Artificial Sequence
  ENSG00000196591_37 (sequence is synthesized)
tcatatctaaagatagtagaggaacaaaatgtataaggatgtgaactgggaaacaaatacatataaatagtttgtaaatatgaaaagatctttaacctcagtaaataaaaagctatagag

SEQ ID NO: 707130 - DNA, 120 bp, Artificial Sequence
  ENSG00000196591_38 (sequence is synthesized)
tgaaaagatctttaacctcagtaaataaaaagctatagagagacttattttttaacttagttttttaaacctattatgtttatttattttttctttttttgagacggagtctcgctgttg

SEQ ID NO: 707131 - DNA, 83 bp, Artificial Sequence
  ENSG00000196591_39 (sequence is synthesized)
tggctgtttatctcttttttttagagaaaggatctcggtcacccaggatggagtgtggtagcctgatcatatctcactacatc

SEQ ID NO: 707132 - DNA, 120 bp, Artificial Sequence
  ENSG00000196591_40 (sequence is synthesized)
ctcttttttttagagaaaggatctcggtcacccaggatggagtgtggtagcctgatcatatctcactacatcttagaacttctaggcttagggtattctcccacctcagcctcccaagta

SEQ ID NO: 707133 - DNA, 120 bp, Artificial Sequence
  ENSG00000196591_41 (sequence is synthesized)
gctgatttttacatttttattttggagagatggtgtctccctgtgttgcccaggctggtcacaaactcctaggctcaagcgattctcctgactcaggcatgagccaccgtacccggccta

SEQ ID NO: 707134 - DNA, 120 bp, Artificial Sequence
  ENSG00000196591_42 (sequence is synthesized)
aacctatcatgttacagacttagaaagcaactattgtcaagtgtttgaggaaactcaggtcaggtttggtaaactaagatattaactcaagtaaagctctttaattcatttaatgaaggt

SEQ ID NO: 707135 - DNA, 120 bp, Artificial Sequence
  ENSG00000196591_43 (sequence is synthesized)
gccacattgtctcagttctctatggcatgggtgaatgctgttctaagtcagcattggtactctaagctagttacatcatatctaagctttgcccttctaccagagctgctagcattctgt

SEQ ID NO: 707136 - DNA, 120 bp, Artificial Sequence
  ENSG00000196591_44 (sequence is synthesized)
caatgggcaattatttgaagttcttacattgaagttagtcacctacatcttctgttttttatggttttgatgtagtaatactgctgaagtttttttgataactgcgattcataatatttg

SEQ ID NO: 707137 - DNA, 120 bp, Artificial Sequence
  ENSG00000196591_45 (sequence is synthesized)
ttattcatattgtgatataaatgataagggcttttgaaaacaagtagtaatcatttcaatagcttaggatctccaccataatcttaggaaaattactaacctctgtgcctcagttgcttc

SEQ ID NO: 707138 - DNA, 120 bp, Artificial Sequence
  ENSG00000196591_46 (sequence is synthesized)
atcatttaaaatgaggaaaataatagtccctacttaataggtttgttgtgaggattgagttaataacatagttaatgctcagtaagggttagctgctatttttttttcttttttttttga

SEQ ID NO: 707139 - DNA, 85 bp, Artificial Sequence
  ENSG00000196591_47 (sequence is synthesized)
cctctgcttcctaggttcaggtgattctcatgcttcagcctcccaagcagctgggagtacaggtgtgcaccaccacacctggcta

SEQ ID NO: 707140 - DNA, 70 bp, Artificial Sequence
  ENSG00000196591_48 (sequence is synthesized)
ttctcaccatattgtccaggctggtcttgaactccttacctcaaatgatccacccgcctgggcctcccaa

SEQ ID NO: 707141 - DNA, 120 bp, Artificial Sequence
  ENSG00000196591_49 (sequence is synthesized)
gattacaagcatgagccaccgcgcctggcttgctattgttatgaggtaaaggtagatagatgggtgagagtggtgccaggggaagtgttaaatttttgagtgttcctttagatgccagat

SEQ ID NO: 707142 - DNA, 120 bp, Artificial Sequence
  ENSG00000196591_50 (sequence is synthesized)
tgccagatgggttgtatctgagccttttattgcagtttgatgcctactagtgtgaagactactaggtcatagtggatagagaagcaatcttttggagacctgattttagcaaggatacga

SEQ ID NO: 707143 - DNA, 120 bp, Artificial Sequence
  ENSG00000196591_51 (sequence is synthesized)
ataatatttgacaactttggggggatcttgatgcctctgtaatttactcaaggataatctcaagaaaaatggcattaagtagattacagaaaaaatagaactatcatattgttattattg

SEQ ID NO: 707144 - DNA, 120 bp, Artificial Sequence
  ENSG00000196591_52 (sequence is synthesized)
gctatttacatgagcaatgcggagaaatgtttaggattacagcatttagaagcttctcaattgctgcatttcctcactgtaccacaagatggcagatactgcatttaaaatttttttttc

SEQ ID NO: 707145 - DNA, 120 bp, Artificial Sequence
  ENSG00000196591_53 (sequence is synthesized)
tgtgtgttttctcttatagtcacttggtggccatgtaacaagcagagcaacatgtattaacagattctttttgaatgcaatattggattaaaaactttgaattaaactacaattaagttt

SEQ ID NO: 707146 - DNA, 120 bp, Artificial Sequence
  ENSG00000196591_54 (sequence is synthesized)
actgatttaggttttcctataagaattataacactaatttctaagttttacatctgcaaaacacagtagagtgtatctggtagtcattgactaattgtgactttgctagtcagacaaaat

SEQ ID NO: 707147 - DNA, 120 bp, Artificial Sequence
  ENSG00000196591_55 (sequence is synthesized)
ggaactgaatattagagccagaataattttctgttttgactggtggtaagaatcagttagtatacagaatgggaaagaattgaaatttatttctaggaattatagttatagtgaagttaa

SEQ ID NO: 707148 - DNA, 120 bp, Artificial Sequence
  ENSG00000196591_56 (sequence is synthesized)
tattcaggggcattgggtgcttgttccacgacttttgtttactgaactaagtacctaacccctttggtctttgaacactgcagagttatgattaggattattaatgaaaaattctttttt

SEQ ID NO: 707149 - DNA, 120 bp, Artificial Sequence
  ENSG00000196591_57 (sequence is synthesized)
agtagaacaaacagttaaggacagaagacaccttgattagattctgttatttgctctttttattaagattgtttttactctaaatgttaaagaaatgtataattatttctaaggtaaaat

SEQ ID NO: 707150 - DNA, 120 bp, Artificial Sequence
  ENSG00000196591_58 (sequence is synthesized)
gagtagcaggattctgaataggagattttttttggccagacccattttgcagccagtggtttgtatttaggagtgagttgaacaaagaagactctaatctgtttttgtgttgtggatttt

SEQ ID NO: 707151 - DNA, 120 bp, Artificial Sequence
  ENSG00000196591_59 (sequence is synthesized)
ttattctattgataaatcagtagcttccagcttctcttgtatcctctactagtcatcttttttgtttcttcagaaataaacatccagggtcacttccctgcccttgccatatacttacta

SEQ ID NO: 707152 - DNA, 120 bp, Artificial Sequence
  ENSG00000196591_60 (sequence is synthesized)
ggatgatgtacaggtaaaacttttaaaggaaagtacggacaggcaattcctaaagtaaaagagagcacattatcaaaactggctgtacttaacaaataccaacaaaaagtcattacactt

SEQ ID NO: 707153 - DNA, 120 bp, Artificial Sequence
  ENSG00000196591_61 (sequence is synthesized)
ctggcaacaaataatgtttgatttaaaaagacaagaatttccccttttgctcttattttttaaatatgctatgtccttaagtgagaaatgcacttcaaaaattttcttattctgaagtct

SEQ ID NO: 707154 - DNA, 120 bp, Artificial Sequence
  ENSG00000196591_62 (sequence is synthesized)
agccggaaagtttgaacttgtgttgcctttggctagactaggtgaaattaaggggcttaagagggcactgttgtgtggccctgtggtagataatagccctccaagcatgaggatgggaga

SEQ ID NO: 707155 - DNA, 120 bp, Artificial Sequence
  ENSG00000196591_63 (sequence is synthesized)
tctaccattcaccagtatttccaaagttatattcttaaaaaggctagatttctaatttccgtagaatctaggtatgttcttttcaactcagcatctgataagaaagtttgggcaagtagg

SEQ ID NO: 707156 - DNA, 120 bp, Artificial Sequence
  ENSG00000196591_64 (sequence is synthesized)
tgcgaaaaatttactctagataccattttccaggaaaaaatataattcaagtccaacgtattactagctgtcaccttccccaacaatcaaataagcattgttattgtcaaacacatttac

SEQ ID NO: 707157 - DNA, 120 bp, Artificial Sequence
  ENSG00000196591_65 (sequence is synthesized)
ttgtatagttcagtgttatatgtaatggacttaggtataattcctgtgctattcccttttgatgccaaacacccttttgtaagctgttttgtttgaaatccaaatttatatgtcttaaag

SEQ ID NO: 707158 - DNA, 120 bp, Artificial Sequence
  ENSG00000196591_66 (sequence is synthesized)
taaatggcagcattgggctttcttaatgtaatgactcttctgccatcctatttctagagttaggcagaaaattctgtaaatctatcttatttccagtctgtttgtgactatggtgggcaa

SEQ ID NO: 707159 - DNA, 120 bp, Artificial Sequence
  ENSG00000196591_67 (sequence is synthesized)
taaatctgatttcccagaaaaacacatctggacccctataggtaaggtaaacaagcctcatcttaaattgtttgtacttccgacctgacctcaaaacaccatcatcatctagagcagcaa

SEQ ID NO: 707160 - DNA, 120 bp, Artificial Sequence
  ENSG00000196591_68 (sequence is synthesized)
caagtaaagaacaatgcactggaaatcacatatatgggtctagcaccagcctttacattacacaactttgctttgggcaagtcatttaaatttctgtgcttcagtttactaaatctatga

SEQ ID NO: 707161 - DNA, 120 bp, Artificial Sequence
  ENSG00000196591_69 (sequence is synthesized)
aactgactaggtaacagctgacatgcttttccagcactccgtcttttacctgtctgatgtcacaaattgatcattcctttctggccttgagatgcgtatcaacccagatagtcattaacc

SEQ ID NO: 707162 - DNA, 120 bp, Artificial Sequence
  ENSG00000196591_70 (sequence is synthesized)
cagatagttggcattcaggataaaatgtttttgcctttcctgtcctgcaagctctttaaagtccaaaatatgcctttatatctttatgtgtaataggtatgaaatctatttcttggttgt

SEQ ID NO: 707163 - DNA, 120 bp, Artificial Sequence
  ENSG00000196591_71 (sequence is synthesized)
tgaataggataggcttattagacattctaaagtcaacttttttctcatatttaaacatttacccgtagaaattcagttttttaaagttttaagtcagttgattgtaccaaacattactat

SEQ ID NO: 707164 - DNA, 120 bp, Artificial Sequence
  ENSG00000196591_72 (sequence is synthesized)
taaaaaaaaatcaaagtcagagaccagagtttccctgcatcagcgttcagtcaggagacaggaactatactaatttgaacatgtaaagttaaatataatccttaataataacaggattgg

SEQ ID NO: 707165 - DNA, 120 bp, Artificial Sequence
  ENSG00000196591_73 (sequence is synthesized)
aagaaagagaattccttctatatatatgtatacacacacatatatatatatacatgtgtatatatgtgtgtgtatgtatattatataatatacatacacacacacaaagaatgtcagaca

SEQ ID NO: 707166 - DNA, 120 bp, Artificial Sequence
  ENSG00000196591_74 (sequence is synthesized)
gaatgtcagacaaggagcagccaccattctgcttactttcactggattaagagtttcataagggcaagggttttgtttgtcttacactccactggggattaatctccagtgtctagaaca

SEQ ID NO: 707167 - DNA, 120 bp, Artificial Sequence
  ENSG00000196591_75 (sequence is synthesized)
gtgcctaacacataaataaagcctcaattattatttgtggaatggaatggaatttgagtgaaatggaatgggaatagaatggactggaatggaaatagaagtgggaaggggaatggaagg

SEQ ID NO: 707168 - DNA, 120 bp, Artificial Sequence
  ENSG00000196591_76 (sequence is synthesized)
ggatagaagaggattgaagaggacagaaggagatgggataagatgggatgggataggatcgaatctcaggtccaggagtcagaataactgaatcctattccagttctgccatcaacaagt

SEQ ID NO: 707169 - DNA, 120 bp, Artificial Sequence
  ENSG00000196591_77 (sequence is synthesized)
cctgtgaaatttggaaagtcacttaaccctctggccttgtagaatatctcagtgggcatgtctgatgtttcttcatggttagatataggttgcatgttttgggcaagaatatcacaggaa

SEQ ID NO: 707170 - DNA, 120 bp, Artificial Sequence
  ENSG00000196591_78 (sequence is synthesized)
tgatgctgtgttctcagtgcacccagtcaggtaatgcatgatttcaatttctctcattactgatgatgttaactttaatcacttagtgaatgagaacatgagcatcattttgaaagcaaa

SEQ ID NO: 707171 - DNA, 120 bp, Artificial Sequence
  ENSG00000196591_79 (sequence is synthesized)
ctgcaaagttttgatgtcaacattttagcaattacgtataatttcccccaaggatactggctttgagataatgtaaatatacatgggaaagacaaagctcaaataaaggaaaaagaccca

SEQ ID NO: 707172 - DNA, 120 bp, Artificial Sequence
  ENSG00000196591_80 (sequence is synthesized)
actgtgaaactttgtctattattccccttttgagggcatttagcagatgaaaagatctggaagaaaacaaacttcttttttcgtttattcttaggagatgaataagaatgagagctatac

SEQ ID NO: 707173 - DNA, 120 bp, Artificial Sequence
  ENSG00000196591_81 (sequence is synthesized)
cctctttttccttttcctttaaccatttaaaaaagttccccctaccctaggctttcatggttctggagaacaactcagtatagcaacaactcagtgtagcatattaagtatttttttttt

SEQ ID NO: 707174 - DNA, 120 bp, Artificial Sequence
  ENSG00000196591_82 (sequence is synthesized)
tcagatttaaaagttgatctgaacttggtgtgttatctttcgggttatttgtgtaaaacagaagttttaatgattgtgaattttgataacaaaaggaaatcagtatgtttatagtaaagt

SEQ ID NO: 707175 - DNA, 120 bp, Artificial Sequence
  ENSG00000196591_83 (sequence is synthesized)
acaatttactttcaaacctctatgttttatgattatgacttaaacgctttttaaacttattttcacttggagacttcattcattccctttgtcttctaggtatcattgttactaccactt

SEQ ID NO: 707176 - DNA, 120 bp, Artificial Sequence
  ENSG00000196591_84 (sequence is synthesized)
tccacataaaccattatttaatctcaggttgcagctctaggagaatatttttctaaggagtaactcctatttgtgttatagatgatttctgttaactttcatgattttaagctcttgctt

SEQ ID NO: 707177 - DNA, 120 bp, Artificial Sequence
  ENSG00000196591_85 (sequence is synthesized)
ttcacaattggaatggaatttcagaatgttattggagatgctaacatttgttatcttgtgtgtagattatctcaaaggtgatggagatgtatcaacctagtgctgtggtattacagtgtg

SEQ ID NO: 707178 - DNA, 120 bp, Artificial Sequence
  ENSG00000196591_86 (sequence is synthesized)
gtgcagactcattatctggtgatagactgggttgtttcaatctaacagtcaaaggtaagcaattcaaagggtggtatttccagaaaaaaatggtttttcttccacccaagaactccccgt

SEQ ID NO: 707179 - DNA, 120 bp, Artificial Sequence
  ENSG00000196591_87 (sequence is synthesized)
aaaagttctcattgtagtttcttgcctgctgttttaacactgtactctgcatttttcatggggttttgtctgttgtatgtatgactagagttattcttgtttcattatggcagatttata

SEQ ID NO: 707180 - DNA, 120 bp, Artificial Sequence
  ENSG00000196591_88 (sequence is synthesized)
tatacatttatacaagactagttttttaaggtttattgtagtttgaacccaaggcagctatttttgaatggttgttgactcagtgtaaataaaacatgcatacttttttacttaattgga

SEQ ID NO: 707181 - DNA, 120 bp, Artificial Sequence
  ENSG00000196591_89 (sequence is synthesized)
ttatttatttctcattaaggaagaagagggtttagctctcctcaccattttgcccacaacatacttgtacccttcccatacctctatttttacaaatcagaatttgattgtgatacttag

SEQ ID NO: 707182 - DNA, 120 bp, Artificial Sequence
  ENSG00000196591_90 (sequence is synthesized)
tgtttacggcagcatctttaaacacttttcagcttatccagttgttctttgctgcataattgttcctaagtttctcatttgcttagttttctctccacttattgctgaactactggtgtc

SEQ ID NO: 707183 - DNA, 120 bp, Artificial Sequence
  ENSG00000196591_91 (sequence is synthesized)
tcagtatcttcatgtgttcagattcattgaatattctgtcactttcaccttcttgaaaaacagccttctcatctgttcatgtttggatgactatctttggtagacctggcaggacacata

SEQ ID NO: 707184 - DNA, 120 bp, Artificial Sequence
  ENSG00000196591_92 (sequence is synthesized)
gctgttctctgctttttttctgttgtattggttctccctggtggctctgttctctgtccttaatttttttctcatgttttggtggagtgccttctgaagtagcttcctgataaaaagtgt

SEQ ID NO: 707185 - DNA, 120 bp, Artificial Sequence
  ENSG00000196591_93 (sequence is synthesized)
gtgggggattaggagtgctgcagtacatactaaattttgatcatgtgttgaaatcagcatatgattgaaggctaggccaaagcaaaatatcaccattctggaatgaacttctagggtgta

SEQ ID NO: 707186 - DNA, 120 bp, Artificial Sequence
  ENSG00000196591_94 (sequence is synthesized)
agaataaatctgaaattttatttaataagatattataatgtatatgtagattagaaatgatttttatcatgagtgtttgtgtatgattttagaggtttttttccacgtgaacttttaggt

SEQ ID NO: 707187 - DNA, 120 bp, Artificial Sequence
  ENSG00000196591_95 (sequence is synthesized)
agcaagttgacagtgtgctttgtattctctaagatgtggagaattctcaaatagaactttctccagaacaattgctggtcttaatggaattggataactaaatacagatattaaaagctt

SEQ ID NO: 707188 - DNA, 120 bp, Artificial Sequence
  ENSG00000196591_96 (sequence is synthesized)
ctttatttaatgttatgattgctactataccagctatattagaattatggtataatctgttattctatgttaagtggaatgatattaaattaattgtccctttgtaggtcaacagtggtt

SEQ ID NO: 707189 - DNA, 120 bp, Artificial Sequence
  ENSG00000196591_97 (sequence is synthesized)
gaaccgcagtttcatattgtaacttaatgtgttaataaccatcttttgcctcaaaatgtttataaactttctaaaatgatctacctaatgtactcttaaaagtgtatattaactatcagt

SEQ ID NO: 707190 - DNA, 120 bp, Artificial Sequence
  ENSG00000196591_98 (sequence is synthesized)
gacttgaaagtccttaatgtttttgtacttaatattttttataatcataaactgcagcagttcactcttagaaaaaaatttactttgtatttcagctaatagagtttcagttgcataaag

SEQ ID NO: 707191 - DNA, 120 bp, Artificial Sequence
  ENSG00000196591_99 (sequence is synthesized)
cgtgtaaggatatttgtaattccaagtcttaaacttcattctgagtttctctgctgccagctttgattcagctttttcagatctgctgaagttagttatctcttttccatctccttgctg

SEQ ID NO: 707192 - DNA, 120 bp, Artificial Sequence
  ENSG00000196591_100 (sequence is synthesized)
ccatcagctatgttcttcctcttgtattgtctcccattcttcatttttacaaattttggcctttaaaaaaatccctttcgagtcatttttgtcaagttttgggatgaaggaaaagtaaac

SEQ ID NO: 707193 - DNA, 120 bp, Artificial Sequence
  ENSG00000196591_101 (sequence is synthesized)
atctttgtttagccagctatctttacttggaagcctgtaagttaacttttagtatgtttgttttttctttaaaaatatccaaatggtttttatctgttaaaagaaacttttctagtagca

SEQ ID NO: 707194 - DNA, 120 bp, Artificial Sequence
  ENSG00000196591_102 (sequence is synthesized)
ataataaaaattgagtgctagaattatgtaaatcacatgttgcaactattgaagaatgcttaatgaaaattcccacagtatacagttacatgaagagaacagataaactttgtaaaatta

SEQ ID NO: 707195 - DNA, 120 bp, Artificial Sequence
  ENSG00000196591_103 (sequence is synthesized)
actctgaaatggaaggaaatatagaaaaacgatttttgaataatgtcatttttaggtggttagttttttcattgtccctttttaattttttcccaaatactcttcagtatgcacaaatgt

SEQ ID NO: 707196 - DNA, 120 bp, Artificial Sequence
  ENSG00000196591_104 (sequence is synthesized)
cttttgtaattgaaggattttcttttcttctttaaagattgagttatgtgcctaactggtaatattccgagaagggaacttactggaaacttataaatgtttattgaattatgacattta

SEQ ID NO: 707197 - DNA, 120 bp, Artificial Sequence
  ENSG00000196591_105 (sequence is synthesized)
aaatatttacttttatgttaggtttactattaatattaaatttctacacgtagaagttgaagtttttgaaaattaatagatgtttttaactcttaagttaggaaaactactcagtaccac

SEQ ID NO: 707198 - DNA, 120 bp, Artificial Sequence
  ENSG00000196591_106 (sequence is synthesized)
agtaccactacctaaagttaactcagggttaaactatgttgtttagctttccataattattttacacatgtccatagggaaagaaaagtcaataaaaattaatttagatgatacataatg

SEQ ID NO: 707199 - DNA, 120 bp, Artificial Sequence
  ENSG00000196591_107 (sequence is synthesized)
ttttattgtaacatgatgaatttcaccatgtaaccctacatgaacatctttctgtgttaataaaataggtgtatattcatattataatcttaatatagttgtgtacttgacttttccatc

SEQ ID NO: 707200 - DNA, 120 bp, Artificial Sequence
  ENSG00000196591_108 (sequence is synthesized)
agggacacctgctaaaatagctagttatatcttaattttttaatatgtattattgtataacgtgtttggaaaggagttttagacttgacattttttacatttttatttgtttttaaaata

SEQ ID NO: 707201 - DNA, 120 bp, Artificial Sequence
  ENSG00000196591_109 (sequence is synthesized)
attttgcagagattattaatgtttatattatgctaattattaatatgtgatagtgtgctgacctcatccaaaaacttatatttttattaccagagaacattgttttgtcagcttacaaaa

SEQ ID NO: 707202 - DNA, 120 bp, Artificial Sequence
  ENSG00000196591_110 (sequence is synthesized)
gtagcaatactaattctttttttattgtgagaagagaatgcaaggaaaggagcttctgtatcaaagaatcgtgactttaaggtgatattggaaattattattatggacagggtcatccca

SEQ ID NO: 707203 - DNA, 86 bp, Artificial Sequence
  ENSG00000196591_111 (sequence is synthesized)
accctatgctcaggcccgctcccacactgtggagtgtaccttcattttcaataaatctcttcattccctccttgctttgtgcattt

SEQ ID NO: 707204 - DNA, 120 bp, Artificial Sequence
  ENSG00000196591_112 (sequence is synthesized)
gacaccctccactggtaacgtattttgatgagccagtcaggagaaattccaggagaagccttcaccctgccatttctagtgaatctgtgatattggaaattattattatggacagggtca

SEQ ID NO: 707205 - DNA, 120 bp, Artificial Sequence
  ENSG00000196591_113 (sequence is synthesized)
acagttagaacgagaccctcttcctggcgcagcccccgcggttcctgcgggcgggaatcagggggcccgcccgtcttgtctcctgcctctcccccttcggccgtgcagtccgcagcctcg

SEQ ID NO: 707206 - DNA, 120 bp, Artificial Sequence
  ENSG00000196591_114 (sequence is synthesized)
aaggtggccgccgctggggacggcgccggcctaccccgccttggtggtggcggcggcgaagggggcggcccattctctcccttctcccgcccaccattcgtggcaacgcagcccattcac

SEQ ID NO: 707207 - DNA, 120 bp, Artificial Sequence
  ENSG00000196591_115 (sequence is synthesized)
attcgtggcaacgcaggtttggggtgccccgcgtcggcctcctaccccctcgacccgtcccccgcgaggcaaaatttctatcccggccttgactctacacaaagccccgcggccgcgaga

SEQ ID NO: 707208 - DNA, 120 bp, Artificial Sequence
  ENSG00000196591_116 (sequence is synthesized)
gctccgcccctcccgtccccttccctcctcctcgcctgctcgcctcccctaccctgcgttcggtctggccggagcgtcttctccttcctcggcttaccctttccccggacccctcctccc

SEQ ID NO: 707209 - DNA, 120 bp, Artificial Sequence
  ENSG00000196591_117 (sequence is synthesized)
gtaagcagatgcagagatgtacgtttctaagtaaaaagtagttttgctttgataaatgtaaattagtatttttaggagcttagaatgatctaaatctgaatatttttcctgttggtctaa

SEQ ID NO: 707210 - DNA, 120 bp, Artificial Sequence
  ENSG00000196591_118 (sequence is synthesized)
tatgttacagttatttactgatttgaaaagtcattttaacactactaaagctacttaagaaaaaagtaaacctatctgaagcttattggtttgcaaaactgctgtttgggtattcttcta

SEQ ID NO: 707211 - DNA, 120 bp, Artificial Sequence
  ENSG00000196591_119 (sequence is synthesized)
aatgtgtgatcgtttatctgtaaatgttttccttgttgtctttagtatcctatgttttggctcccatgaacctagttaattcttagcaactttcaagatcaagattagccatgggaatag

SEQ ID NO: 707212 - DNA, 120 bp, Artificial Sequence
  ENSG00000196591_120 (sequence is synthesized)
gcaaccagctgttacatctttttggtttagtaacttactgacatgcatttcaaagttacagatattataggtatttaaggagtttcaaagaaagtaaattataaagcaattgaagttgct

SEQ ID NO: 707213 - DNA, 120 bp, Artificial Sequence
  ENSG00000196591_121 (sequence is synthesized)
tttagaatgttaacttattgtaatattaaggggaaaggcctagaaaatttaagcctgtgttttaattaaataagaattgttgtacttagacaactattgagttcttgttaatagacagaa

SEQ ID NO: 707214 - DNA, 120 bp, Artificial Sequence
  ENSG00000196591_122 (sequence is synthesized)
atactgtgaagtgtatgtttgatgattgcatcaagcaaaaaagtatttgtgggaaatagtttttgtaagaaaaggctttcattaatttgcagaatgtgttgaaattaatgaaatccatct

SEQ ID NO: 707215 - DNA, 120 bp, Artificial Sequence
  ENSG00000196597_0 (sequence is synthesized)
agagccccgcctcctcatttgggttctcgagactcccgggaagcggtttgggaagctcgggggtcggctcggaaagtagagggggcgcagctggggcgggaggacagcgtttgtgcccgg

SEQ ID NO: 707216 - DNA, 120 bp, Artificial Sequence
  ENSG00000196597_1 (sequence is synthesized)
aagcgggagaggaagcgggaagtttgtgggatccccgccccctgtgtcagtggatgcgaccgggcgggccctcggccttcccggccgctggagagggacttcggccgctggctcccgggg

SEQ ID NO: 707217 - DNA, 120 bp, Artificial Sequence
  ENSG00000196597_2 (sequence is synthesized)
cggctgaggctgagcgttggtccggagcaggtgccgggtgcgggccgcggtgtgcgggaccggagcccggcgcgagcggcggcgggggtggggaaagcgcatttgtaacgcgggcgacaa

SEQ ID NO: 707218 - DNA, 120 bp, Artificial Sequence
  ENSG00000196597_3 (sequence is synthesized)
cgtgcccgaaatccccggacggtgggtctgcatcgagaccccgagctctggagctggaaaaacccggatgccatactgctgttaacatatgtgacactggagactttgtccctacctcat

SEQ ID NO: 707219 - DNA, 120 bp, Artificial Sequence
  ENSG00000196597_4 (sequence is synthesized)
agaatcccatgcatgatgatacatgaagggttttccgtggctatctacttctgattcttttgaaagctttaaagacattgggcatgaaaggttcagtgagtttccggggatccctcgttt

SEQ ID NO: 707220 - DNA, 120 bp, Artificial Sequence
  ENSG00000196597_5 (sequence is synthesized)
gtggtagagccaggaggaaaacagttccgttcattctttcacagctgaggctttacagttctctatactctcccaagagccacagaaaatgaacacatttcaggcatcagtgtcattcca

SEQ ID NO: 707221 - DNA, 120 bp, Artificial Sequence
  ENSG00000196597_6 (sequence is synthesized)
ggacgtgactgtggaattcagccaggaggagtggcagcacatgggccctgttgagaggaccctgtacagagatgtgatgctggagaactacagccacctcgtctcagtgggctactgctt

SEQ ID NO: 707222 - DNA, 120 bp, Artificial Sequence
  ENSG00000196597_7 (sequence is synthesized)
tacaaaaccagaactgatcttcacattggaacaaggagaagatccatggttattagagaaagagaaaggatttctaagcaggaactccccagaagactcccaacctgatgaaatctcaga

SEQ ID NO: 707223 - DNA, 120 bp, Artificial Sequence
  ENSG00000196597_8 (sequence is synthesized)
gaagagcccagaaaatcaaggcaaacatttgttgcaagttttattcaccaataaattattgactacagagcaagaaatttcaggaaaaccacataatcgagacataaacatttttcgtgc

SEQ ID NO: 707224 - DNA, 120 bp, Artificial Sequence
  ENSG00000196597_9 (sequence is synthesized)
aagaatgatgccttgtaaatgtgacattgcggggtctgcttgccaggggctcagcctgatggccccacactgtcagtattcaaaagaaaaggctcatgagcgtaatgtttgtgacaaatg

SEQ ID NO: 707225 - DNA, 120 bp, Artificial Sequence
  ENSG00000196597_10 (sequence is synthesized)
gctcatcagtattaaggatggcagaactaacactcaagagaaatctttcgcttatagtaaaattgtgaaaaccctccatcataaggaggaagttattcaacatcagacaattcagactct

SEQ ID NO: 707226 - DNA, 120 bp, Artificial Sequence
  ENSG00000196597_11 (sequence is synthesized)
ggggcaagattttgaatataatgaaagtagaaaagcttttcttgaaaaggctgcccttgttacatctaacagtacccacccaaaaggaaaatcttacaatttcaataaatttggggaaaa

SEQ ID NO: 707227 - DNA, 120 bp, Artificial Sequence
  ENSG00000196597_12 (sequence is synthesized)
caaatatgataaatcaacctttattattcctcagaacatgaatccagagaagagtcactatgagtttaatgatactggaaattgtttctgtagaatcactcacaaaactctcacaggagg

SEQ ID NO: 707228 - DNA, 120 bp, Artificial Sequence
  ENSG00000196597_13 (sequence is synthesized)
gaaatccttcagccaaaagtcacacattagagaacatcatagagttcatataggggtgaaaccctttgaatatggaaaaagtttcaaccgtaattcaaccctcccagtgcatcagagaac

SEQ ID NO: 707229 - DNA, 120 bp, Artificial Sequence
  ENSG00000196597_14 (sequence is synthesized)
tcatgcaacagataaatactctgattatcacccatgtacagagacattcagctaccagtcaactttcagtgtacatcagaaggttcacataagggcaaaaccctatgagtataatgaatg

SEQ ID NO: 707230 - DNA, 120 bp, Artificial Sequence
  ENSG00000196597_15 (sequence is synthesized)
tgggaaatcctgctctatgaattcacacttgatttggcctcagaaaagtcacacaggggagaaaccctatgaatgtcctgagtgcgggaaagccttcagtgagaagtcacgcctaagaaa

SEQ ID NO: 707231 - DNA, 120 bp, Artificial Sequence
  ENSG00000196597_16 (sequence is synthesized)
acatcagagaactcacacgggagagaaaccatacaaatgtgatggatgtgataaagctttcagtgcaaagtcaggcctaagaatacaccagagaacccacacaggggagaaaccattcga

SEQ ID NO: 707232 - DNA, 120 bp, Artificial Sequence
  ENSG00000196597_17 (sequence is synthesized)
atgtcatgaatgtgggaaatcttttaactataagtcaatcctcatagtgcatcagagaactcacacaggggagaaaccttttgaatgtaatgaatgcgggaaatctttcagccatatgtc

SEQ ID NO: 707233 - DNA, 120 bp, Artificial Sequence
  ENSG00000196597_18 (sequence is synthesized)
gcctaaggaatcaccgaagaactcacacaggggaaagaccatataaatgtgatgaatgtgggaaagctttcaaactgaagtcaggcctgaggaaacatcatagaacacacacaggggaga

SEQ ID NO: 707234 - DNA, 120 bp, Artificial Sequence
  ENSG00000196597_19 (sequence is synthesized)
agccctacaaatgtaatcagtgtggaaaagctttcggtcagaaatcacaactcagaggacatcatagaattcacacaggggaaaaaccctataaatgtaatcattgtggggaagctttca

SEQ ID NO: 707235 - DNA, 120 bp, Artificial Sequence
  ENSG00000196597_20 (sequence is synthesized)
gtcagaaatcaaacctcagagtacatcacagaactcatactggggagaaaccctatcaatgtgaggagtgtggaaaaacattcaggcagaaatcaaatctcagagggcatcagagaactc

SEQ ID NO: 707236 - DNA, 120 bp, Artificial Sequence
  ENSG00000196597_21 (sequence is synthesized)
acactggggagaagccctatgaatgtaatgaatgtggaaaagctttcagtgagaagtcagtcctaagaaaacatcagcgaactcacaccggggagaaaccatataattgtaatcagtgtg

SEQ ID NO: 707237 - DNA, 120 bp, Artificial Sequence
  ENSG00000196597_22 (sequence is synthesized)
gggaagctttcagtcagaaatccaatctcagagtacatcagagaactcacacaggggagaaaccctataaatgtgataaatgtgggagaactttcagtcaaaaatcaagccttagagaac

SEQ ID NO: 707238 - DNA, 120 bp, Artificial Sequence
  ENSG00000196597_23 (sequence is synthesized)
atcagaaagcccacccaggggattaaatgtatgcatataaagaatacgaaaaaactctgagctggaaatcaaacctcacaatacataaatgaacacacaggagagaactgttaacatagt

SEQ ID NO: 707239 - DNA, 120 bp, Artificial Sequence
  ENSG00000196597_24 (sequence is synthesized)
gagcactggaatttcctctacaatttcagcctccaccaaatatcaaagaatagaagataaattgttgaaatctattttatatgggcattctttcagccagagcccagtcttctatggata

SEQ ID NO: 707240 - DNA, 120 bp, Artificial Sequence
  ENSG00000196597_25 (sequence is synthesized)
tacagaactcacacagcaaagaaaccctataaacataatgaatatggaaaatactcttgcgaactcactcctcagaaaactcacgctgcagaaaagctctgagaaagtaataaaaatgtg

SEQ ID NO: 707241 - DNA, 120 bp, Artificial Sequence
  ENSG00000196597_26 (sequence is synthesized)
aaaactttgtgccaacaatcaaaactcattcaccatcagagaaatcacacaatgacaaaagctagaatataataagtgtgtgataaactttaatgaaaagtcagtacagcagaaaataca

SEQ ID NO: 707242 - DNA, 120 bp, Artificial Sequence
  ENSG00000196597_27 (sequence is synthesized)
ttcaagatagagacctcatagtatattaaaacaaacaagaaatgaagttaatggatgtgggaaattcttctgccatgtcaaccctcattttaacctacacagaggtaatccctatatgtc

SEQ ID NO: 707243 - DNA, 120 bp, Artificial Sequence
  ENSG00000196597_28 (sequence is synthesized)
gtataataactattgaaatgttcactagtaatcattttcacttctccctcatgccacacctggcctaaatttctcaaccactctctcatctaaacggggtcatattgttaccctctagct

SEQ ID NO: 707244 - DNA, 120 bp, Artificial Sequence
  ENSG00000196597_29 (sequence is synthesized)
agtggaatatggggtcagtgacaggtcttaaatacatcagtcaaattctcaatattttcttctatccctcattagaatggaatggaggaaaaccttgggactcaggctctgatgatggaa

SEQ ID NO: 707245 - DNA, 120 bp, Artificial Sequence
  ENSG00000196597_30 (sequence is synthesized)
agtacaagatggtaggaacccgggtcagagaaggatcctgtggcatggagttttctcctccctgtacacagttggacttcttgcagtgaggaaataaatgtgttccctgctgaacttcta

SEQ ID NO: 707246 - DNA, 120 bp, Artificial Sequence
  ENSG00000196597_31 (sequence is synthesized)
aaggtttgggtatacttgatactgacagaaactcaacaaccctcacataataaaacttaggagtatgatttttcaggacatctgaactcagtgtatgtcagaaaagtcacataggacaaa

SEQ ID NO: 707247 - DNA, 120 bp, Artificial Sequence
  ENSG00000196597_32 (sequence is synthesized)
tctcggacagcatcctgaatgaccatggcttttatccccaaagtcttcctcatcagacaggtaatatcataagaaatctgacattttaacaaatataggaaattcttcacacacacagac

SEQ ID NO: 707248 - DNA, 120 bp, Artificial Sequence
  ENSG00000196597_33 (sequence is synthesized)
acacactcacacatacacacccaaagtctcattaaatatatgataatttagttttgaatgtgtaaaagttttcaacaaattatcatattttatatcagagcttgttacaaggagaaaatc

SEQ ID NO: 707249 - DNA, 120 bp, Artificial Sequence
  ENSG00000196597_34 (sequence is synthesized)
tatcaatttgagaaaggtaagtaatagcctttatctagatattgctttatcagaactgttgtttcacatataatatcaaaacttttaatgaaatataagacattcactataataaaaagc

SEQ ID NO: 707250 - DNA, 120 bp, Artificial Sequence
  ENSG00000196597_35 (sequence is synthesized)
ttaaaaagaacaaaaaataaactgcataaactgaaaagcagtgttgcaaatatgtgaatgttttgtgagttattgattgtttatgtatgtatatatgcatggtacttaccaggtatttgt

SEQ ID NO: 707251 - DNA, 120 bp, Artificial Sequence
  ENSG00000196597_36 (sequence is synthesized)
tttatgtttcttagacctcaacattgctgtaaaagaattgtgttccccttgctttataactactttgacatcagctacaatttgccacatgaatattaataacaaaccttttacagaaaa

SEQ ID NO: 707252 - DNA, 120 bp, Artificial Sequence
  ENSG00000196597_37 (sequence is synthesized)
agtgcgaaccttggggaaagcgcatgcccgcggcggcagaggagagcccgtttataaacgttgaccaaagtgccagaactcgtgggcgctgtgtctgtggcaagaccccgagctgtggag

SEQ ID NO: 707253 - DNA, 120 bp, Artificial Sequence
  ENSG00000196597_38 (sequence is synthesized)
accgaaagagctgcataaattccagctttattacctgatctcactttgtcactcaggttggagtgcagtggcacaatcacagttcattgcagcctcaacctcctgggctcaggctgcctg

SEQ ID NO: 707254 - DNA, 120 bp, Artificial Sequence
  ENSG00000196600_0 (sequence is synthesized)
atggcctttcaggacctcctagatcaagttggaggcctggggagattccagatccttcagatggttttccttataatgttcaacgtcatagtataccatcaaactcagctggagaacttc

SEQ ID NO: 707255 - DNA, 120 bp, Artificial Sequence
  ENSG00000196600_1 (sequence is synthesized)
gcagcattcatacttgatcatcgctgctgggttcatatactggacaatgacactatccctgacaatgaccctgggaccctcagccaggatgccctcctgagaatctccatcccattcgac

SEQ ID NO: 707256 - DNA, 120 bp, Artificial Sequence
  ENSG00000196600_2 (sequence is synthesized)
tcaaatctgaggccagagaagtgtcgtcgctttgtccatccccagtggaagctcattcatctgaatgggaccttccccaacacgagtgagccagatacagagccctgtgtggatggctgg

SEQ ID NO: 707257 - DNA, 120 bp, Artificial Sequence
  ENSG00000196600_3 (sequence is synthesized)
gtatatgaccaaagctccttcccttccaccattgtgactaagtgggatctggtatgcgaatctcaaccactgaattcagtagctaaatttctattcatggctggaatgatggtgggaggc

SEQ ID NO: 707258 - DNA, 120 bp, Artificial Sequence
  ENSG00000196600_4 (sequence is synthesized)
aacctatatggccatttgtcagacaggtttgggagaaagttcgtgctcagatggtcttacctccagctcgccattgtaggcacctgtgcggcctttgctcccaccatcctcgtatactgc

SEQ ID NO: 707259 - DNA, 120 bp, Artificial Sequence
  ENSG00000196600_5 (sequence is synthesized)
tccctgcgcttcttggctggggctgctacatttagcatcattgtaaatactgttttgttaattgtagagtggataactcaccaattctgtgccatggcattgacattgacactttgtgct

SEQ ID NO: 707260 - DNA, 120 bp, Artificial Sequence
  ENSG00000196600_6 (sequence is synthesized)
gctagtattggacatataaccctgggaagcctggcttttgtcattcgagaccagtgcatcctccagttggtgatgtctgcaccatgctttgtcttctttctgttctcaaggtggctggca

SEQ ID NO: 707261 - DNA, 120 bp, Artificial Sequence
  ENSG00000196600_7 (sequence is synthesized)
tggctcattatcaacaacaaaccagaagagggcttaaaggaacttagaaaagctgcacacaggaatggaatgaagaatgctgaagacatcctaaccatggaggttttgaaatccaccatg

SEQ ID NO: 707262 - DNA, 120 bp, Artificial Sequence
  ENSG00000196600_8 (sequence is synthesized)
aagcaagaactggaggcagcacagaaaaagcattctctttgtgaattgctccgcatacccaacatatgtaaaagaatctgtttcctgtcctttgtgagatttgcaagtaccatccctttt

SEQ ID NO: 707263 - DNA, 120 bp, Artificial Sequence
  ENSG00000196600_9 (sequence is synthesized)
tggggccttactttgcacctccagcatctgggaaacaatgttttcctgttgcagactctctttggtgcagtcaccctcctggccaattgtgttgcaccttgggcactgaatcacatgagc

SEQ ID NO: 707264 - DNA, 120 bp, Artificial Sequence
  ENSG00000196600_10 (sequence is synthesized)
cgtcgactaagccagatgcttctcatgttcctactggcaacctgccttctggccatcatatttgtgcctcaagaaatgcagaccctgcgtgtggttttggcaaccctgggtgtgggagct

SEQ ID NO: 707265 - DNA, 120 bp, Artificial Sequence
  ENSG00000196600_11 (sequence is synthesized)
gcttctcttggcattacctgttctactgcccaagaaaatgaactaattccttccataatcaggggaagagctactggaatcactggaaactttgctaatattgggggagccctggcttcc

SEQ ID NO: 707266 - DNA, 120 bp, Artificial Sequence
  ENSG00000196600_12 (sequence is synthesized)
ctcatgatgatcctaagcatatattctcgacccctgccctggatcatctatggagtctttgccatcctctctggccttgttgtcctcctccttcctgaaaccaggaaccagcctcttctt

SEQ ID NO: 707267 - DNA, 120 bp, Artificial Sequence
  ENSG00000196600_13 (sequence is synthesized)
gacagcatccaggatgtggaaaatgagggagtaaatagcctagctgcccctcagaggagctctgtgctataggtctgtgctgaggaaagcaaaacaccatttagggctaccatcccccaa

SEQ ID NO: 707268 - DNA, 120 bp, Artificial Sequence
  ENSG00000196600_14 (sequence is synthesized)
cctatatggccatttgtcagacaggaaaccattatcatcgcccaaccatgtctccactgattgtgacgagggacttgaggtgcccattgccatccaccagcatcacgtcttctggtatct

SEQ ID NO: 707269 - DNA, 120 bp, Artificial Sequence
  ENSG00000196600_15 (sequence is synthesized)
ctcctgaaaccctgaatgaaaatggcctccatctgcatccatgttgctgcagaagacatgatttcattcttttttgtggctacatagtattccagtctaccattggtgggcattgaggtt

SEQ ID NO: 707270 - DNA, 120 bp, Artificial Sequence
  ENSG00000196600_16 (sequence is synthesized)
gctggaggtccactccagatcctgtttgcttgggtatcaccagcggaggttgcagaacagcaaagattcctgcctgctccttcctctggaagcttcattttagaggagcacctgcctgat

SEQ ID NO: 707271 - DNA, 120 bp, Artificial Sequence
  ENSG00000196600_17 (sequence is synthesized)
tagaggagcacctgcctgatgccagccagagctctcctgtatgaagtgtctgttgacccctgctgggaagtgtctcccagtcaggaggcacaggtgttagtgacccacttaaggaggcag

SEQ ID NO: 707272 - DNA, 120 bp, Artificial Sequence
  ENSG00000196600_18 (sequence is synthesized)
tctatcccttagcagagctcaagcactgtgctgagagatccactgctctcttcagagctggcaagcaagaatgtttaagtccactgaagctgcacccacagccaccccttccccaaagtg

SEQ ID NO: 707273 - DNA, 120 bp, Artificial Sequence
  ENSG00000196600_19 (sequence is synthesized)
gctgcacccacagccaccccttccccaaagtgctctgtcccaggtgatgggagttttatctataagcccttgactggggctgctgcctttctctcagagatgccctgcccagtgaggagg

SEQ ID NO: 707274 - DNA, 86 bp, Artificial Sequence
  ENSG00000196600_20 (sequence is synthesized)
gaggggaaaactgcctacacaagcctcagtaatggtggacattcctctcccaccaaggttgatcatcccagttcgacctcagactg

SEQ ID NO: 707275 - DNA, 120 bp, Artificial Sequence
  ENSG00000196600_21 (sequence is synthesized)
gagaccacttggctttctggcatcagccccttctccaggagagtgaatggttctgtctcactgaggttccaggtcccactgggggaaaaaaaaaaaactcctgcagctagctcagtgtct

SEQ ID NO: 707276 - DNA, 120 bp, Artificial Sequence
  ENSG00000196600_22 (sequence is synthesized)
ccccaaacagccacctagttttgcacttgaaacccagggccctggtagcattggcacacaagggaatctcctggtctgcgtgttgcaaaaactatgggaaaagcataatttctgggctgg

SEQ ID NO: 707277 - DNA, 120 bp, Artificial Sequence
  ENSG00000196600_23 (sequence is synthesized)
gcaaaaactatgggaaaagcataatttctgggctggatagcacagtccctatggcttccttgggtaggtgaggaagttccctggccctttggacttcctgggtgaggtgatgccccaccc

SEQ ID NO: 707278 - DNA, 120 bp, Artificial Sequence
  ENSG00000196600_24 (sequence is synthesized)
tacctcagttggaaatgcagaaatcactcaccttccgcattgctctcgctgggagctgcagaccagagctcttcctattcggccatcttgccagctgtctctatcgactacctcttattc

SEQ ID NO: 707279 - DNA, 120 bp, Artificial Sequence
  ENSG00000196600_25 (sequence is synthesized)
tgccagctgtctctatcgactacctcttattccaaaaaataaaaccataatgaagttagacaccattaaatatacataatataaaaataggttttcttattctaatctagatttgctaca

SEQ ID NO: 707280 - DNA, 120 bp, Artificial Sequence
  ENSG00000196600_26 (sequence is synthesized)
caagaccatctacagaatgaatgccatgaatatacaatctgtacccaataagttgtacattttagtaaacattcctgattgtaagggtggcaaatggaaattttggcttcttagatcttt

SEQ ID NO: 707281 - DNA, 120 bp, Artificial Sequence
  ENSG00000196600_27 (sequence is synthesized)
actgtgagtttgactgacatcagtacatttttatttttaattgtatattttcattactgtgaatttttttgcagtgatttttgatgccatgtggctacattggttttagaatactaataa

SEQ ID NO: 707282 - DNA, 120 bp, Artificial Sequence
  ENSG00000196600_28 (sequence is synthesized)
aatccattgcttttaaaataaataaataaaccccatagcacatcctccatacaacatctgttgtccctcaagatacaattgttaccactatcatctaaccattattttatgataacttta

SEQ ID NO: 707283 - DNA, 120 bp, Artificial Sequence
  ENSG00000196600_29 (sequence is synthesized)
aaatatcaacttgcaagaaaatattccacaaaacacactctgcctttttactttaaagagtccttggctacctgggccaatattattctcatttgtaggatttaggttccacagattata

SEQ ID NO: 707284 - DNA, 120 bp, Artificial Sequence
  ENSG00000196604_0 (sequence is synthesized)
gcgggagcttctcctgccaggcaggaagacgagtagaagggagcggcatgctggaggctggagcctgagcccctggggctcgccttgctgtgtttggtggtgacgtgggacactgcagct

SEQ ID NO: 707285 - DNA, 120 bp, Artificial Sequence
  ENSG00000196604_1 (sequence is synthesized)
cggccagagtggtagaaatgtcctggtgtaggcttttctggctttgcccgtctagctgctccaagccaggctggaggaggaggagaaggaatcacctgtggtacgctggagcctgcatgt

SEQ ID NO: 707286 - DNA, 120 bp, Artificial Sequence
  ENSG00000196604_2 (sequence is synthesized)
ggcgtgactctgcagctcgcctcgtgtgactgatggcagccacggagactgcagctcgacaggagtgattggaaacccggagttacctgctagttggtgaaactggttggtagacgcgat

SEQ ID NO: 707287 - DNA, 120 bp, Artificial Sequence
  ENSG00000196604_3 (sequence is synthesized)
ctgttggctactactggcttctcctggctgttaaaagcagatggtggttgaggttgattccatgccggctgcctcttctgtgaagaagccatttggtctcaggagcaagatgggcaagtg

SEQ ID NO: 707288 - DNA, 120 bp, Artificial Sequence
  ENSG00000196604_4 (sequence is synthesized)
gcaagatgggcaagtggtgctgccgttgcttcccctgctgcagggagagcggcaagagcaacgtgggcacttctggagaccacgacgactctgctatgaagacactcaggagcaagatgg

SEQ ID NO: 707289 - DNA, 120 bp, Artificial Sequence
  ENSG00000196604_5 (sequence is synthesized)
ctgcttcccctgctgcagggggagtggcaagagcaacgtgggcgcttctggagaccacgacgactctgctatgaagacactcaggaacaagatgggcaagtggtgctgccactgcttccc

SEQ ID NO: 707290 - DNA, 120 bp, Artificial Sequence
  ENSG00000196604_6 (sequence is synthesized)
tcccctgctgcagggggagcagcaagagcaaggtgggcgcttggggagactacgatgacagtgccttcatggagcccaggtaccacgtccgtggagaagatctggacaagctccacagag

SEQ ID NO: 707291 - DNA, 120 bp, Artificial Sequence
  ENSG00000196604_7 (sequence is synthesized)
cccagaaaggatctcatcgtcatgctcagggacactgacgtgaacaagcaggacaagcaaaagaggactgctctacatctggcctctgccaatgggaattcagaagtagtaaaactcctg

SEQ ID NO: 707292 - DNA, 120 bp, Artificial Sequence
  ENSG00000196604_8 (sequence is synthesized)
agtagtaaaactcctgctggacagacgatgtcaacttaatgtccttgacaacaaaaagaggacagctctgataaaggccgtacaatgccaggaagatgaatgtgcgttaatgttgctgga

SEQ ID NO: 707293 - DNA, 120 bp, Artificial Sequence
  ENSG00000196604_9 (sequence is synthesized)
aagatgaatgtgcgttaatgttgctggaacatggcactgatccaaatattccagatgagtatggaaataccactctgcactacgctatctataatgaagataaattaatggccaaagcac

SEQ ID NO: 707294 - DNA, 120 bp, Artificial Sequence
  ENSG00000196604_10 (sequence is synthesized)
aaaaaacaagcatggcctcacaccactgttacttggtgtacatgagcaaaaacagcaagtcgtgaaatttttaattaagaaaaaagcgaatttaaatgcactggatagatatggaagaac

SEQ ID NO: 707295 - DNA, 78 bp, Artificial Sequence
  ENSG00000196604_11 (sequence is synthesized)
taaatgcactggatagatatggaagaactgcccttctacttgagcaaaatattgatgtatcttctcaagatctatctg

SEQ ID NO: 707296 - DNA, 80 bp, Artificial Sequence
  ENSG00000196604_12 (sequence is synthesized)
atgtcgaagaagaaatgaagaagcatgaaagtaataatgtgggattactagaaaacctgactaatggtgtcactgctggc

SEQ ID NO: 707297 - DNA, 120 bp, Artificial Sequence
  ENSG00000196604_13 (sequence is synthesized)
gggattactagaaaacctgactaatggtgtcactgctggcaatggtgataatggattaattcctcaaaggaagagcagaacacctgaaaatcagcaatttcctgacaacgaaagtgaaga

SEQ ID NO: 707298 - DNA, 120 bp, Artificial Sequence
  ENSG00000196604_14 (sequence is synthesized)
acaacgaaagtgaagagtatcacagaatttgtgaattactttctgactacaaagaaaagcagatgccaaaatactcttctgaaaacagcaacccagaacaagacttaaagctgacatcag

SEQ ID NO: 707299 - DNA, 84 bp, Artificial Sequence
  ENSG00000196604_15 (sequence is synthesized)
ctagaaaattttatggctatcgaagaaatgaagaagcacagaagtactcatgtcggattcccagaaaacctgactaatggtgcc

SEQ ID NO: 707300 - DNA, 120 bp, Artificial Sequence
  ENSG00000196604_16 (sequence is synthesized)
tactcatgtcggattcccagaaaacctgactaatggtgccactgctggcaatggtgatgatggattaattcctccaaggaagagcagaacacctgaaagccagcaatttcctgacactga

SEQ ID NO: 707301 - DNA, 120 bp, Artificial Sequence
  ENSG00000196604_17 (sequence is synthesized)
gtgacgaacaaaatgatactcagaagcaattttgtgaagaacagaacactggaatattacacgatgagattctgattcatgaagaaaagcagatagaagtggttgaaaaaatgaattctg

SEQ ID NO: 707302 - DNA, 120 bp, Artificial Sequence
  ENSG00000196604_18 (sequence is synthesized)
agctttctcttagttgtaagaaagaaaaagacatcttgcatgaaaatagtacgttgcgggaagaaattgccatgctaagactggagctagacacaatgaaacatcagagccagctaagag

SEQ ID NO: 707303 - DNA, 120 bp, Artificial Sequence
  ENSG00000196604_19 (sequence is synthesized)
aaaagaaatatttggaggatattgaaagtgtgaaaaaaaggaatgataatcttttaaaggctctacaattgaatgagctcaccatggatgatgataccgctgtgctcgtcattgacaacg

SEQ ID NO: 707304 - DNA, 120 bp, Artificial Sequence
  ENSG00000196604_20 (sequence is synthesized)
gctctggcatgtgcaaggccggctttgcgggcgacgatgccccccgggctgtcttcccttccatcgtggggcgccccaggcagcagggcatgatggggggcatgcatcagaaagagtcct

SEQ ID NO: 707305 - DNA, 90 bp, Artificial Sequence
  ENSG00000196604_21 (sequence is synthesized)
cagcagggcatgatggggggcatgcatcagaaagagtcctatgtgggcaaggaggcccagagcaaagaacacggcatcatcaccaactgg

SEQ ID NO: 707306 - DNA, 120 bp, Artificial Sequence
  ENSG00000196604_22 (sequence is synthesized)
gcaccacaccttctacaacgagctgcgtgtggctcccgaggagcaccccgtcctgctgaccgaggccaccctgaaccctaaggccaaccgcgagaagatgacccagatcatgtttgagac

SEQ ID NO: 707307 - DNA, 120 bp, Artificial Sequence
  ENSG00000196604_23 (sequence is synthesized)
acgtggccatccaggctgtgctgtccctgtacacctctggccgtactactggcatcgtgatggactctggtgacggggtcacccacactgtgcccatctatgaggggaatgccctccccc

SEQ ID NO: 707308 - DNA, 120 bp, Artificial Sequence
  ENSG00000196604_24 (sequence is synthesized)
atgccaccctgcgcctagacctggctgggcgggaactgcctgactacctcatgaagatcctcaccgagcatggctataggttcaccaccatggccgagcgggaaatcgtgcgtgacatca

SEQ ID NO: 707309 - DNA, 120 bp, Artificial Sequence
  ENSG00000196604_25 (sequence is synthesized)
aagagaagctgtgctatgttgccctggacttcgagcaggagatggccacggtggcctccagctcctccctagagaagagctacgagctgcccgatggccaggtcatcaccatcggcaacg

SEQ ID NO: 707310 - DNA, 120 bp, Artificial Sequence
  ENSG00000196604_26 (sequence is synthesized)
agcggttccgctgccccgaggcgctcttccagccttgcttcctgggcatggaatcctgtggcatccatgaaactaccttcaactccatcatgaagtctgatgtggacatccgcaaagacc

SEQ ID NO: 707311 - DNA, 120 bp, Artificial Sequence
  ENSG00000196604_27 (sequence is synthesized)
tgtacaccaacacagtgctgtctggcggcaccaccatgtaccctggcatggcccacagaatgcagaaggagatcgctgccctggcgcctagcatgatgaagatcaggatcattgctcctc

SEQ ID NO: 707312 - DNA, 68 bp, Artificial Sequence
  ENSG00000196604_28 (sequence is synthesized)
ctggcgcctagcatgatgaagatcaggatcattgctcctcccaagcgcaagtactccgtgtgggtcgg

SEQ ID NO: 707313 - DNA, 120 bp, Artificial Sequence
  ENSG00000196604_29 (sequence is synthesized)
aatgcttgtaggtggactctgacttagttgcgttacaccctttcttgacaaaaccaaacttctcagaaaacaacatgagattggcatggctttatttgttttcttgtttcattttttgtt

SEQ ID NO: 707314 - DNA, 120 bp, Artificial Sequence
  ENSG00000196604_30 (sequence is synthesized)
ttgttttttattggcttgactcaggatttaaaaaccggaatggtgaaggtgacagcagtcggttggaggaagcttcctccaaagttctacaatgtggccaaggactttgattgtaccttg

SEQ ID NO: 707315 - DNA, 120 bp, Artificial Sequence
  ENSG00000196604_31 (sequence is synthesized)
tgtggccaaggactttgattgtaccttgttcttcttttcaatagtcattccaaatattgtgagacgcattgtttcaggaagccccttgccctgctaaaagccaccccacttctctctaag

SEQ ID NO: 707316 - DNA, 120 bp, Artificial Sequence
  ENSG00000196604_32 (sequence is synthesized)
acacaggggaggtgatagcattgcttttgtgcaaattacataatgcaaaattttttgaatcttcgccttaatactttttaattttgttttattttgaatgatcagccttcgtggcccccc

SEQ ID NO: 707317 - DNA, 120 bp, Artificial Sequence
  ENSG00000196604_33 (sequence is synthesized)
tcttttgtaccccaacttggggtgtatgaaggcttttggtctccctgagagtggctggaggcagccagggcttacctgtactctgacttgaggagagttggataaaagtgcacaccttaa

SEQ ID NO: 707318 - DNA, 120 bp, Artificial Sequence
  ENSG00000196604_34 (sequence is synthesized)
aacaaattgaggaagcacagtatttcagtacagtggacagcttagcatgttgacaactgagaataaaatgctcagttctgaactggacaatgtaagacacaacgaggaaacactggaaat

SEQ ID NO: 707319 - DNA, 120 bp, Artificial Sequence
  ENSG00000196604_35 (sequence is synthesized)
cttggattgacgttttctctctcgtgttcctttgctgggcttgaccttttctctgctgggtttggcattcccttgggtgggctgggtgttttcttgggggcgggggttggccctttctgg

SEQ ID NO: 707320 - DNA, 81 bp, Artificial Sequence
  ENSG00000196604_36 (sequence is synthesized)
gctgggtgttttcttgggggcgggggttggccctttctggggtgggcgtggggtcgcccagggggggcgtgggctttcctc

SEQ ID NO: 707321 - DNA, 120 bp, Artificial Sequence
  ENSG00000196604_37 (sequence is synthesized)
acagcaatccaggtaaagaagcagaagaagaatgtttggcagaaggaacatgcagcgaggtcgtgtgtttgccagaaggaacatctaatgagattgcctgtttgggaggaagagcagcaa

SEQ ID NO: 707322 - DNA, 120 bp, Artificial Sequence
  ENSG00000196605_0 (sequence is synthesized)
gtgacgctccggacttctgctaggtctgagacgcgccggcctcccgctgctgctccggagaagcggcgcctcctccccgccaggaccccgaggcggggggttcccgccttctcttctgag

SEQ ID NO: 707323 - DNA, 120 bp, Artificial Sequence
  ENSG00000196605_1 (sequence is synthesized)
cgcctcttcccgctgcgcccgcatcagtctgggcctggcccagggtccccggtggagacgtgtttttttctccaaccaccgtgcccctctgtttaaaagcagccagtcaacctttgtgtc

SEQ ID NO: 707324 - DNA, 120 bp, Artificial Sequence
  ENSG00000196605_2 (sequence is synthesized)
ctttctccagaaggaaaagcatctcagctgttgtggaaaagggccccagcgtcctcttgtcaccgacagggcgattgcagtgcgttccggtcattttttccaggacactttctgtcttca

SEQ ID NO: 707325 - DNA, 120 bp, Artificial Sequence
  ENSG00000196605_3 (sequence is synthesized)
tgacaggaacatcgagaagccaaggctagtggctgggttactgatggattactgatggattcttctcagcacttagtgacctttgaggatgtggctgtggactttacccaggaggagtgg

SEQ ID NO: 707326 - DNA, 120 bp, Artificial Sequence
  ENSG00000196605_4 (sequence is synthesized)
actttgttggatcaagcccagagagatctctacagagatgtgatgttggagaactacaagaatctcattatactagcagggtctgaattattcaaacgtagtctcatgtctggattggaa

SEQ ID NO: 707327 - DNA, 120 bp, Artificial Sequence
  ENSG00000196605_5 (sequence is synthesized)
caaatggaagagctgaggacaggagtgacaggagttctgcaggaattggatttgcaactcaaaaccaaaggctccccactgctgcaagatatttctgcagaaagatcaccaaatggagta

SEQ ID NO: 707328 - DNA, 120 bp, Artificial Sequence
  ENSG00000196605_6 (sequence is synthesized)
caattggagagaagcaatactgcagagaaactgtatgactctaaccattctggaaaagtcttcaatgaacacccatttcttatgactcacatgataactcacattggagagaaaacttct

SEQ ID NO: 707329 - DNA, 120 bp, Artificial Sequence
  ENSG00000196605_7 (sequence is synthesized)
gaggataatcagagtggaaaagccttaagaaagaactttcctcatagtttttacaagaaaagtcatgctgaggggaaaatgcctaagtgtgttaaacatgaaaaagccttcaaccagttt

SEQ ID NO: 707330 - DNA, 120 bp, Artificial Sequence
  ENSG00000196605_8 (sequence is synthesized)
ttacatataagatctcacaatggagacaaacactatgtatgtaaggaatgtgggaaagccttcagtaattcctcacaccttataggacatggaagaattcacagtggagagaagccctat

SEQ ID NO: 707331 - DNA, 120 bp, Artificial Sequence
  ENSG00000196605_9 (sequence is synthesized)
gtctgtaaagaatgtggtaaagctttcactcaatccacaggacttaaattacacatcagaactcacagtggagaaaaaccatataaatgtaaagagtgtgggaaagccttcacccattct

SEQ ID NO: 707332 - DNA, 120 bp, Artificial Sequence
  ENSG00000196605_10 (sequence is synthesized)
tcataccttactgatcatacaagaatccacagtggaaagaagccctatgtatgtatggaatgtggaaaagccttcactagatccacaggacttattttacacatgcgaattcacactgga

SEQ ID NO: 707333 - DNA, 120 bp, Artificial Sequence
  ENSG00000196605_11 (sequence is synthesized)
gaaaagccatatgaatgtaaggagtgtggaaaagcttttattcattcctcataccttacaaaacatgtaaggattcacagtggagagaagctgtatttatgtaaggcatgtgggaaagct

SEQ ID NO: 707334 - DNA, 120 bp, Artificial Sequence
  ENSG00000196605_12 (sequence is synthesized)
tttactcgttcctcaggacttgttttacacatgagaacacatactggagaaaagccctatgaatgtaaagaatgtgggaaagcctttaataattcctcaatgcttagtcaacatgtaagg

SEQ ID NO: 707335 - DNA, 120 bp, Artificial Sequence
  ENSG00000196605_13 (sequence is synthesized)
attcacactggagagaagccatatgaatgcaaagaatgtgggaaagctttcactcaatcctcgggccttagtacccatttaagaactcacactggagaaaaggcctgtgaatgtaaggaa

SEQ ID NO: 707336 - DNA, 120 bp, Artificial Sequence
  ENSG00000196605_14 (sequence is synthesized)
tgcggtaaagcatttgctcgttccacaaatcttaatatgcacatgcgaacgcacacaggagaaaagccttatgcatgtaaagaatgtgggaaagccttcaggtattccacataccttaac

SEQ ID NO: 707337 - DNA, 120 bp, Artificial Sequence
  ENSG00000196605_15 (sequence is synthesized)
gttcacacacgaactcacactggagcaaaaccatatgaatgtaagaaatgtgggaaaaacttcactcaatcttcagcacttgctaaacatctaagaactaaggcatgtgaaaaaacctga

SEQ ID NO: 707338 - DNA, 120 bp, Artificial Sequence
  ENSG00000196605_16 (sequence is synthesized)
gccgaccctcccaccgcctcacgcctcggagaccgggtccagagccctcagccgcttccgagccccgagaggggaatcagaagtgcgcgtgatcagagcggcacccccttcccaggaacc

SEQ ID NO: 707339 - DNA, 120 bp, Artificial Sequence
  ENSG00000196605_17 (sequence is synthesized)
gcagctgaaccaacggtttcccctgcaccagcctttgcgaccaggtcattttttccaggacactttctgtcttcatgacaggaacatcgagaagccaaggctagtggctgggttactgat

SEQ ID NO: 707340 - DNA, 120 bp, Artificial Sequence
  ENSG00000196605_18 (sequence is synthesized)
tcttgaactcctaacctcaagtgatctccctgccttggcttcccaaagtgctgaggtatgaggcatgagccattatacctgggcaacatttttgttattttaaaaatagttttagtgcat

SEQ ID NO: 707341 - DNA, 120 bp, Artificial Sequence
  ENSG00000196605_19 (sequence is synthesized)
attttaaaaatagttttagtgcatgtattggaaatgttatatgattagtttgctatttgtaaagttacacttgaccatctttagaatccccgaaggcaaaagtattggttccccattgaa

SEQ ID NO: 707342 - DNA, 120 bp, Artificial Sequence
  ENSG00000196605_20 (sequence is synthesized)
ataaagttggggaaaacaatctgctggccggaagagagtaagatgcaggaggatgattgccggttctccgcagcacgagtcagggaggccatgagatggaagagccaccccacaatggga

SEQ ID NO: 707343 - DNA, 120 bp, Artificial Sequence
  ENSG00000196605_21 (sequence is synthesized)
agaacctggagacaaggttctccttgtctatgcccaagagaagccacccttcaggagagagtttctgagtttcatgaacttggggaacattctaaacctattcaaaatatgcttactcac

SEQ ID NO: 707344 - DNA, 120 bp, Artificial Sequence
  ENSG00000196605_22 (sequence is synthesized)
agagaggtctcacaagtaggcacgtcgtccataaatgagactcgcatgttgaatatttacacagaattcagtttttgtttagatgactatcagaataaaatatctgtgtatgaaaagcct

SEQ ID NO: 707345 - DNA, 120 bp, Artificial Sequence
  ENSG00000196605_23 (sequence is synthesized)
gttccttctgaaaccctggagcggaatcagaagtgcgcgtggccacagcggcgcctcctgccctttagccgccgctggcccaacggtttccccagcagtagcctctgcgaccaggtcatt

SEQ ID NO: 707346 - DNA, 83 bp, Artificial Sequence
  ENSG00000196605_24 (sequence is synthesized)
tttgttggatcaagcccagagagatctctacagagatgtgatgttggagaactacaagaatctcattatactagtagagagga

SEQ ID NO: 707347 - DNA, 78 bp, Artificial Sequence
  ENSG00000196605_25 (sequence is synthesized)
cgtgagccaccgcgcccggcctgagacgaagtttcatcatgttgtccaggctggtgaagtgctgggattacaggcatg

SEQ ID NO: 707348 - DNA, 120 bp, Artificial Sequence
  ENSG00000196605_26 (sequence is synthesized)
agccttaccttgttatcgtgtattcaagcatcttaaagaaatgatggtcctgctcaggaaataactccccagaacatcaaaggagatggtacttagctgaagctggcatgtatttaatgg

SEQ ID NO: 707349 - DNA, 120 bp, Artificial Sequence
  ENSG00000196605_27 (sequence is synthesized)
ttggcctcccaaagtgctgggattatggacgtgagccaccacacccgcccttgaaatactgtttctaaaaggtatatggaagaacaataggcaaggataatcaagacccagctgataaaa

SEQ ID NO: 707350 - DNA, 120 bp, Artificial Sequence
  ENSG00000196605_28 (sequence is synthesized)
aaaaaaggtggaagaacttgccctaatgaatatcaagattaaaactatagtaattaagatgctgttgcattgtacacagacaactagactattggtacaaaatagtctggaaatagtcac

SEQ ID NO: 707351 - DNA, 120 bp, Artificial Sequence
  ENSG00000196611_0 (sequence is synthesized)
atattggagcagcaagaggctgggaagccatcacttaccttgcactgagaaagaagacaaaggccagtatgcacagctttcctccactgctgctgctgctgttctggggtgtggtgtctc

SEQ ID NO: 707352 - DNA, 120 bp, Artificial Sequence
  ENSG00000196611_1 (sequence is synthesized)
acagcttcccagcgactctagaaacacaagagcaagatgtggacttagtccagaaatacctggaaaaatactacaacctgaagaatgatgggaggcaagttgaaaagcggagaaatagtg

SEQ ID NO: 707353 - DNA, 120 bp, Artificial Sequence
  ENSG00000196611_2 (sequence is synthesized)
gcccagtggttgaaaaattgaagcaaatgcaggaattctttgggctgaaagtgactgggaaaccagatgctgaaaccctgaaggtgatgaagcagcccagatgtggagtgcctgatgtgg

SEQ ID NO: 707354 - DNA, 120 bp, Artificial Sequence
  ENSG00000196611_3 (sequence is synthesized)
ctcagtttgtcctcactgaggggaaccctcgctgggagcaaacacatctgacctacaggattgaaaattacacgccagatttgccaagagcagatgtggaccatgccattgagaaagcct

SEQ ID NO: 707355 - DNA, 120 bp, Artificial Sequence
  ENSG00000196611_4 (sequence is synthesized)
tccaactctggagtaatgtcacacctctgacattcaccaaggtctctgagggtcaagcagacatcatgatatcttttgtcaggggagatcatcgggacaactctccttttgatggacctg

SEQ ID NO: 707356 - DNA, 120 bp, Artificial Sequence
  ENSG00000196611_5 (sequence is synthesized)
gaggaaatcttgctcatgcttttcaaccaggcccaggtattggaggggatgctcattttgatgaagatgaaaggtggaccaacaatttcagagagtacaacttacatcgtgttgcagctc

SEQ ID NO: 707357 - DNA, 120 bp, Artificial Sequence
  ENSG00000196611_6 (sequence is synthesized)
atgaactcggccattctcttggactctcccattctactgatatcggggctttgatgtaccctagctacaccttcagtggtgatgttcagctagctcaggatgacattgatggcatccaag

SEQ ID NO: 707358 - DNA, 120 bp, Artificial Sequence
  ENSG00000196611_7 (sequence is synthesized)
ccatatatggacgttcccaaaatcctgtccagcccatcggcccacaaaccccaaaagcgtgtgacagtaagctaacctttgatgctataactacgattcggggagaagtgatgttcttta

SEQ ID NO: 707359 - DNA, 120 bp, Artificial Sequence
  ENSG00000196611_8 (sequence is synthesized)
atttcatttctgttttctggccacaactgccaaatgggcttgaagctgcttacgaatttgccgacagagatgaagtccggtttttcaaagggaataagtactgggctgttcagggacaga

SEQ ID NO: 707360 - DNA, 120 bp, Artificial Sequence
  ENSG00000196611_9 (sequence is synthesized)
atgtgctacacggataccccaaggacatctacagctcctttggcttccctagaactgtgaagcatatcgatgctgctctttctgaggaaaacactggaaaaacctacttctttgttgcta

SEQ ID NO: 707361 - DNA, 120 bp, Artificial Sequence
  ENSG00000196611_10 (sequence is synthesized)
acaaatactggaggtatgatgaatataaacgatctatggatccaggttatcccaaaatgatagcacatgactttcctggaattggccacaaagttgatgcagttttcatgaaagatggat

SEQ ID NO: 707362 - DNA, 120 bp, Artificial Sequence
  ENSG00000196611_11 (sequence is synthesized)
ttttctatttctttcatggaacaagacaatacaaatttgatcctaaaacgaagagaattttgactctccagaaagctaatagctggttcaactgcaggaaaaattgaacattactaattt

SEQ ID NO: 707363 - DNA, 120 bp, Artificial Sequence
  ENSG00000196611_12 (sequence is synthesized)
gaatggaaaacacatggtgtgagtccaaagaaggtgttttcctgaagaactgtctattttctcagtcatttttaacctctagagtcactgatacacagaatataatcttatttatacctc

SEQ ID NO: 707364 - DNA, 120 bp, Artificial Sequence
  ENSG00000196611_13 (sequence is synthesized)
agtttgcatatttttttactatttagaatgtagccctttttgtactgatataatttagttccacaaatggtgggtacaaaaagtcaagtttgtggcttatggattcatataggccagagt

SEQ ID NO: 707365 - DNA, 120 bp, Artificial Sequence
  ENSG00000196611_14 (sequence is synthesized)
tgcaaagatcttttccagagtatgcaactctgacgttgatcccagagagcagcttcagtgacaaacatatcctttcaagacagaaagagacaggagacatgagtctttgccggaggaaaa

SEQ ID NO: 707366 - DNA, 120 bp, Artificial Sequence
  ENSG00000196611_15 (sequence is synthesized)
gcagctcaagaacacatgtgcagtcactggtgtcaccctggataggcaagggataactcttctaacacaaaataagtgttttatgtttggaataaagtcaaccttgtttctactgtttta

SEQ ID NO: 707367 - DNA, 120 bp, Artificial Sequence
  ENSG00000196616_0 (sequence is synthesized)
atgcactcaagcagagaagaaatccacaaagactcacagtctgctggtgggcagagaagacagaaacgacatgagcacagcaggaaaagtaatcaaatgcaaagcagctgtgctatggga

SEQ ID NO: 707368 - DNA, 120 bp, Artificial Sequence
  ENSG00000196616_1 (sequence is synthesized)
ggtaaagaaacccttttccattgaggatgtggaggttgcacctcctaaggcttatgaagttcgcattaagatggtggctgtaggaatctgtcacacagatgaccacgtggttagtggcaa

SEQ ID NO: 707369 - DNA, 120 bp, Artificial Sequence
  ENSG00000196616_2 (sequence is synthesized)
cctggtgaccccccttcctgtgattttaggccatgaggcagccggcatcgtggagagtgttggagaaggggtgactacagtcaaaccaggtgataaagtcatcccgctctttactcctca

SEQ ID NO: 707370 - DNA, 120 bp, Artificial Sequence
  ENSG00000196616_3 (sequence is synthesized)
gtgtggaaaatgcagagtttgtaaaaacccggagagcaactactgcttgaaaaatgatctaggcaatcctcgggggaccctgcaggatggcaccaggaggttcacctgcagggggaagcc

SEQ ID NO: 707371 - DNA, 120 bp, Artificial Sequence
  ENSG00000196616_4 (sequence is synthesized)
cattcaccacttccttggcaccagcaccttctcccagtacacggtggtggatgagaatgcagtggccaaaattgatgcagcctcgcccctggagaaagtctgcctcattggctgtggatt

SEQ ID NO: 707372 - DNA, 120 bp, Artificial Sequence
  ENSG00000196616_5 (sequence is synthesized)
ctcgactggttatgggtctgcagttaacgttgccaaggtcaccccaggctctacctgtgctgtgtttggcctgggaggggtcggcctatctgctgttatgggctgtaaagcagctggagc

SEQ ID NO: 707373 - DNA, 120 bp, Artificial Sequence
  ENSG00000196616_6 (sequence is synthesized)
agccagaatcattgcggtggacatcaacaaggacaaatttgcaaaggccaaagagttgggtgccactgaatgcatcaaccctcaagactacaagaaacccattcaggaagtgctaaagga

SEQ ID NO: 707374 - DNA, 120 bp, Artificial Sequence
  ENSG00000196616_7 (sequence is synthesized)
aatgactgatggaggtgtggatttttcgtttgaagtcatcggtcggcttgacaccatgatggcttccctgttatgttgtcatgaggcatgtggcacaagcgtcatcgtaggggtacctcc

SEQ ID NO: 707375 - DNA, 120 bp, Artificial Sequence
  ENSG00000196616_8 (sequence is synthesized)
tgcttcccagaacctctcaataaaccctatgctgctactgactggacgcacctggaagggggctgtttatggtggctttaagagtaaagaaggtatcccaaaacttgtggctgattttat

SEQ ID NO: 707376 - DNA, 120 bp, Artificial Sequence
  ENSG00000196616_9 (sequence is synthesized)
ggctaagaagttttcactggatgcgttaataacccatgttttaccttttgaaaaaataaatgaaggatttgacctgcttcactctgggaaaagtatccgtaccgtcctgacgttttgagg

SEQ ID NO: 707377 - DNA, 120 bp, Artificial Sequence
  ENSG00000196616_10 (sequence is synthesized)
caatagagatgccttcccctgtagcagtcttcagcctcctctaccctacaagatctggagcaacagctaggaaatatcattaattcagctcttcagagatgttatcaataaattacacat

SEQ ID NO: 707378 - DNA, 120 bp, Artificial Sequence
  ENSG00000196616_11 (sequence is synthesized)
gggggctttccaaagaaatggaaattgatgggaaattatttttcaggaaaatttaaaattcaagtgagaagtaaataaagtgttgaacatcagctggggaattgaagccaacaaaccttc

SEQ ID NO: 707379 - DNA, 120 bp, Artificial Sequence
  ENSG00000196616_12 (sequence is synthesized)
cttcttaaccattctactgtgtcacctttgccattgaggaaaaatattcctgtgacttcttgcatttttggtatcttcataatctttagtcatcgaatcccagtggaggggaccctttta

SEQ ID NO: 707380 - DNA, 120 bp, Artificial Sequence
  ENSG00000196616_13 (sequence is synthesized)
cttgccctgaacatacacatgctgggccattgtgattgaagtcttctaactctgtctcagttttcactgtcgacattttcctttttctaataaaaatgtaccaaatccctggggtaaaag

SEQ ID NO: 707381 - DNA, 120 bp, Artificial Sequence
  ENSG00000196616_14 (sequence is synthesized)
ctagggtaaggtaaaggatagactcacatttacaagtagtgaaggtccaagagttctaaatacaggaaatttcttaggaactcaaataaaatgccccacattttactacagtaaatggca

SEQ ID NO: 707382 - DNA, 120 bp, Artificial Sequence
  ENSG00000196616_15 (sequence is synthesized)
gtgtttttatgacttttatactatttctttatggtcgatatacaattgattttttaaaataatagcagatttcttgcttcatatgacaaagcctcaattactaattgtaaaaactgaact

SEQ ID NO: 707383 - DNA, 120 bp, Artificial Sequence
  ENSG00000196616_16 (sequence is synthesized)
aaaatgtgtataaagtaattaaaagtaatatggtggctttaagtgtagagatgggatggcaaatgctgtgaatgcagaatgtaaaattggtaactaagaaatggcacaaacaccttaagc

SEQ ID NO: 707384 - DNA, 120 bp, Artificial Sequence
  ENSG00000196616_17 (sequence is synthesized)
atggcacaaacaccttaagcaatatattttcctagtagatatatatatacacatacatatatacacatatacaaatgtatatttttgcaaaattgttttcaatctagaacttttctatta

SEQ ID NO: 707385 - DNA, 120 bp, Artificial Sequence
  ENSG00000196616_18 (sequence is synthesized)
agtctataatcctagcattagtttaatattttgaatatgtaaagacctgtgttaatgctttgttaatgcttttcccactctcatttgttaatgctttcccactctcaggggaaggatttg

SEQ ID NO: 707386 - DNA, 120 bp, Artificial Sequence
  ENSG00000196616_19 (sequence is synthesized)
cattttgagctttatctctaaatgtgacatgcaaagattattcctggtaaaggaggtagctgtctccaaaaatgctattgttgcaatatctacattctatttcatattatgaaagacctt

SEQ ID NO: 707387 - DNA, 120 bp, Artificial Sequence
  ENSG00000196616_20 (sequence is synthesized)
agacataaagtaaaatagtttatcatttactgtgtgatcttcagtaagtctctcaggctctctgagcttgttcatcctttgttttgaaaaaattactcaaccaatccattacagcttaac

SEQ ID NO: 707388 - DNA, 120 bp, Artificial Sequence
  ENSG00000196616_21 (sequence is synthesized)
caagattaaatgggatgatgttaatgaaagagcttcgccaattaagaagggccatgtaaatgtgggtaacctgattgttttgtcaaaaatgctaaagcggggtggggggtggcgcagtgg

SEQ ID NO: 707389 - DNA, 120 bp, Artificial Sequence
  ENSG00000196616_22 (sequence is synthesized)
aggaggctgaggcaagagaatcgctggagcctgggaggcggaggttgcagtgagcagaaatcttgccactgcacagcagcctaggcgacaagagcaaaactctgtcaaaagaaaagaaaa

SEQ ID NO: 707390 - DNA, 120 bp, Artificial Sequence
  ENSG00000196616_23 (sequence is synthesized)
ctaggcgacaagagcaaaactctgtcaaaagaaaagaaaagaaaatgctgaaggagttactcagggtcaagaaagttttcagaatgtccgtaagataacatcatcatgggacactacctg

SEQ ID NO: 707391 - DNA, 120 bp, Artificial Sequence
  ENSG00000196616_24 (sequence is synthesized)
ttgctgggtgctctgcggcttttacactgatgctgattgtgtgagatccagaaaaagaaaatggagttctacatgcccatctcacagcagggtcatcaaatcctgctagtgacacagaag

SEQ ID NO: 707392 - DNA, 120 bp, Artificial Sequence
  ENSG00000196616_25 (sequence is synthesized)
ctgacatccagctcccacccgccttcctcccaggttcggggagcaggtagagtgggagccattaggtgggctctgccagtgttgtcatagagtggcaagtcctccatgggatgggagtgg

SEQ ID NO: 707393 - DNA, 120 bp, Artificial Sequence
  ENSG00000196616_26 (sequence is synthesized)
catgggatgggagtggcatgtgggagccttctgcatcatgcactatgaaaaaagaaaatttactatggggcaagtggttcatatagttaagtgattgtatatatatatatatatatatat

SEQ ID NO: 707394 - DNA, 120 bp, Artificial Sequence
  ENSG00000196616_27 (sequence is synthesized)
atatatatacactatggggcaagtggttcatatagttaagtgattgtatatatatatatatatatatatgtattccagtgtagaaagtattggctgggtctgtaatcaagtattccacag

SEQ ID NO: 707395 - DNA, 120 bp, Artificial Sequence
  ENSG00000196616_28 (sequence is synthesized)
aagtgccttcataggtgctgaaacaggattatgagagtgacagacacaggactgaagacagggagaaaatgtgcatggctgtgagaatatattgctttgattctttgacttctcatgata

SEQ ID NO: 707396 - DNA, 120 bp, Artificial Sequence
  ENSG00000196616_29 (sequence is synthesized)
tatgaaaacaaataaagtgggggggggtgacttcaataatatcacgaacatatttaaaatgaaattctgagcatggagaaaaatttcaaattctggtataaacaaataatctaaaaatat

SEQ ID NO: 707397 - DNA, 120 bp, Artificial Sequence
  ENSG00000196616_30 (sequence is synthesized)
agataaggaaaaaatgttttcatttttttggtcatattgatttgggtcatatatgattgaccaaaaaaaaagatatttctaaaatcctggtgctttttcatttaaaaatagacaaccaaa

SEQ ID NO: 707398 - DNA, 120 bp, Artificial Sequence
  ENSG00000196616_31 (sequence is synthesized)
gaggaaaatgaacaatgatggaaattcgtggaagaggaaactaaaatggcaaaatagcatattaaatggcactgagccttggtgtgatcaaaaaaaaaaataaagcaaaatgagatatta

SEQ ID NO: 707399 - DNA, 120 bp, Artificial Sequence
  ENSG00000196616_32 (sequence is synthesized)
cactcaagcagagaagaaatccacaaagactcacagtctgctggtgggcagagaagacagaaacgacatgagcacagcaggaaaagaaagttgtctgacagaagtttgatgagaggaatt

SEQ ID NO: 707400 - DNA, 120 bp, Artificial Sequence
  ENSG00000196616_33 (sequence is synthesized)
tgactcagaagactgaaatatcctttaaccttactataaaatatcttacaaaatactcattgatttcacagcattagaatcatcaaggttaagcaagacatcaacatgcaaattctgatt

SEQ ID NO: 707401 - DNA, 120 bp, Artificial Sequence
  ENSG00000196616_34 (sequence is synthesized)
aaaaggggtccattatgatacaattcagggaatttccacaaaaatcctatggaacagtatcttccccatttaaaagttaatatggttttacagaaaatcaatgatacaatttgaataata

SEQ ID NO: 707402 - DNA, 120 bp, Artificial Sequence
  ENSG00000196616_35 (sequence is synthesized)
atacaatttgaatcacttagcactaggaatacagatatttggttttttcttctataaatttgtacttatttgctcaatgtgtttacaggtgcatgtggtcattcaatataatcaattgat

SEQ ID NO: 707403 - DNA, 120 bp, Artificial Sequence
  ENSG00000196616_36 (sequence is synthesized)
ttttttaattgtttaattacataaacctgtgcaactatgtccagtcctttttttgtgttaggagtgtaccacactgtaaaatatctcactatgataattcaatttaaaggttctgaggct

SEQ ID NO: 707404 - DNA, 120 bp, Artificial Sequence
  ENSG00000196616_37 (sequence is synthesized)
tctctctgcattgtgtgacaaacaggctcatatcaataagactggttgatggagctagaggacgttattctaagtaaagtaactcatgaatggaacaccaaatatccaatgttctcactt

SEQ ID NO: 707405 - DNA, 120 bp, Artificial Sequence
  ENSG00000196616_38 (sequence is synthesized)
aaaagtggtagctaaactatgaggacacaaaggatgagaatgatataatggactttggggactgagggaaaagggcagtaggaggaataagacataaaagactacatattgggttcagtc

SEQ ID NO: 707406 - DNA, 120 bp, Artificial Sequence
  ENSG00000196616_39 (sequence is synthesized)
tacactgcttgtgtgaggggtgcaccaaaatatcagaaatcaccactaaagaacttatccgtgtaaccaaaaaccatctgcaccccaaaaactattgaaattaaaaattaatcaatgaat

SEQ ID NO: 707407 - DNA, 120 bp, Artificial Sequence
  ENSG00000196616_40 (sequence is synthesized)
aaattttaagataaaaataatgcatgtaatttacccagcacaggtcacaatgtgcctgtcacatcataagcacctcataataagaatcttcctactattagtaccttctgtctaagtatt

SEQ ID NO: 707408 - DNA, 120 bp, Artificial Sequence
  ENSG00000196616_41 (sequence is synthesized)
ctggtatttattttggcattgaccatgttgaacatcctacaaagttgaaaattttgacaaataaataatgaaaatgaattggcagaaaaataaatctcaattgaatttttaaattatatt

SEQ ID NO: 707409 - DNA, 120 bp, Artificial Sequence
  ENSG00000196616_42 (sequence is synthesized)
tgcaattatgttggttctttctagaaagggctctgcgaattatacatgctttaccacaacgaagatgggttttacagtacactgccaagcactagaaatatatgctgaactttattttta

SEQ ID NO: 707410 - DNA, 120 bp, Artificial Sequence
  ENSG00000196616_43 (sequence is synthesized)
agaacatctatggataagctctgctaaacagaaatccaagcacactgtttctccagttttaaaatatacatgcgtgggtctgagtgtatacacacacacacacgtgcacacacacacacc

SEQ ID NO: 707411 - DNA, 120 bp, Artificial Sequence
  ENSG00000196616_44 (sequence is synthesized)
accaactctaatctctataatatttggctcaaatctaagctgaaagaagtctctacacataaattagattacaaaacaggctgccaaagctaagtttcaaatgagtaggaaacaagtagc

SEQ ID NO: 707412 - DNA, 120 bp, Artificial Sequence
  ENSG00000196616_45 (sequence is synthesized)
acacagaagtagtggagagagaaaattaaaagaggacaataagcaaatagggagagaaagaaatgtcattgtgcgcaggaaggtaaatgtataattgctcttatagagtcagatcctttt

SEQ ID NO: 707413 - DNA, 120 bp, Artificial Sequence
  ENSG00000196616_46 (sequence is synthesized)
ggcctaagcagaaaattgagcaataaagcagtgtattttatgtagacagacactgactctgtcagcaaaataaaggtgacttctaacttcatatatcagctaatagttgtgggtagacga

SEQ ID NO: 707414 - DNA, 120 bp, Artificial Sequence
  ENSG00000196616_47 (sequence is synthesized)
atgtcttattatactttgtttatctttccttatgttattgctttttaaaagatacttttattctctttataaaccagagtacttcatttccatggagcacttgttaggtaccagacatgg

SEQ ID NO: 707415 - DNA, 120 bp, Artificial Sequence
  ENSG00000196616_48 (sequence is synthesized)
gacgcaatattacatgtacaaagatgaaaagacacaacttatgacttcaagagtgggaaaacactgtcaccatctctctgtttgattttctaggtaatcaaatgcaaagcagctgtgcta

SEQ ID NO: 707416 - DNA, 120 bp, Artificial Sequence
  ENSG00000196616_49 (sequence is synthesized)
aacatacctgctttatgcactcaagcagagaagaaatccacaagtactcaccagcctcctggtctgcagagaagacagaatcaatatgagcacagcaggaaaagtaatcaaatgcaaagc

SEQ ID NO: 707417 - DNA, 120 bp, Artificial Sequence
  ENSG00000196616_50 (sequence is synthesized)
ctgtgctatgggaggtaaagaaacccttttccattgaggatgtggaggttgcacctcctaaggcttatgaagttcgcattaaggtgaaatatttttccatttatatttcattttacattt

SEQ ID NO: 707418 - DNA, 120 bp, Artificial Sequence
  ENSG00000196616_51 (sequence is synthesized)
aaaaaactcagagaacattaaaaatggaaacatccaaaaatccactaagaggcatatcttatatgatcacccagaagataaaattacatttgttgtcaaggaaaggtataaatataaatt

SEQ ID NO: 707419 - DNA, 120 bp, Artificial Sequence
  ENSG00000196616_52 (sequence is synthesized)
ttaaatttttaaaaaatgatcaaagagtacatacagtataattccagtaaaatacaaaagaatttatgtttgtacagaaaaaaattccaaaggatatatatcaagacttcaaaatcaatt

SEQ ID NO: 707420 - DNA, 120 bp, Artificial Sequence
  ENSG00000196616_53 (sequence is synthesized)
aatattagatattttccatgtgttactttgctatttctacttctattttttaaagcgtgcattcttacataagacttaaatatttcagaatcaattatttcacagattattctaaattgt

SEQ ID NO: 707421 - DNA, 120 bp, Artificial Sequence
  ENSG00000196616_54 (sequence is synthesized)
ttaattcaagaagggaaggtagagaagggctttagactgaataaccttggggataaactgaatctttcatatttaggaatagtagggattagtagcaaaaccctcaaatacattttagaa

SEQ ID NO: 707422 - DNA, 120 bp, Artificial Sequence
  ENSG00000196616_55 (sequence is synthesized)
acacaatttcaggaatttgggtatgttaaattcatctagttacaatcttttctgaatctgaacagcttctctttattctgtagatggtggctgtaggaatctgtcacacagatgaccacg

SEQ ID NO: 707423 - DNA, 120 bp, Artificial Sequence
  ENSG00000196616_56 (sequence is synthesized)
gggaacacgtgtggttcaccatccaggatttcccagcctggataaggaaaccaaggcaatgagagacgaaagtgcttgcacaaggtcaccgcgcagccaggacttcaggagtttcctctt

SEQ ID NO: 707424 - DNA, 120 bp, Artificial Sequence
  ENSG00000196616_57 (sequence is synthesized)
tccctctctgcctgcctgacccaagcatgtatgcattcaggcactcatgtattgtacccttcaaccattatgtaccgagtatctactagaagccaggcaccaggttagagcctggagata

SEQ ID NO: 707425 - DNA, 120 bp, Artificial Sequence
  ENSG00000196616_58 (sequence is synthesized)
tgtgaggatcaaaagagacacagtgcctaccagtgtggcattcatagtccagtaattctgtgttagtgttggctgaacactgtcttctgtcagggcccagatagaagtagaaacgggagg

SEQ ID NO: 707426 - DNA, 120 bp, Artificial Sequence
  ENSG00000196616_59 (sequence is synthesized)
agggaaaaaaagtaaatgtggaaactgttctgtgctgagttcacaaaatggaggctacatggctacggatgaataaacatgaccttttcttaggtgacctatgcagctccttcaccaatt

SEQ ID NO: 707427 - DNA, 120 bp, Artificial Sequence
  ENSG00000196616_60 (sequence is synthesized)
tcctcttccaacatggtgtctcttcctgagcatggaatcaatgaaacaggctaggtgaaaggaaatgaaagaaacgtagaaggaaccatcccaccatcaacaatgtctgccttgttacct

SEQ ID NO: 707428 - DNA, 120 bp, Artificial Sequence
  ENSG00000196616_61 (sequence is synthesized)
tcagccatgcttaaatgcaactggttacagattactaattatttcatcttcaatatttattttaccctaaacttatgtattaatgtaaatacttttagaagtaaagggttaataactagg

SEQ ID NO: 707429 - DNA, 120 bp, Artificial Sequence
  ENSG00000196616_62 (sequence is synthesized)
acattgccataccatcattttcacataaactttacctataaaatgttaatgcaccaacaatttttcttgatcatgtggaatgtatagcataggtgattagaaataaaaattatgtttaat

SEQ ID NO: 707430 - DNA, 120 bp, Artificial Sequence
  ENSG00000196616_63 (sequence is synthesized)
tttaaaaagttgctttagcctgtagattcaccctgcccccttaccaaataccaatttaaactgtgaacagaaaataataaaataaactatccaaagtatgttttagctctattttcttta

SEQ ID NO: 707431 - DNA, 120 bp, Artificial Sequence
  ENSG00000196616_64 (sequence is synthesized)
gttagaaataaattaacaacaaaatgacagccttactttttacccctactccctccaccataacaggaaaagtagataattcgcaaattatcagctaaaaatatttgttaagtccattct

SEQ ID NO: 707432 - DNA, 120 bp, Artificial Sequence
  ENSG00000196616_65 (sequence is synthesized)
tatcctaaaagaaagtgcctaacttgttgtgaagagctgaagttttcagagaaatttctggaattcttctttgtcccatttttgtttttctcaaaaaaaaaagacctaggattttttaaa

SEQ ID NO: 707433 - DNA, 120 bp, Artificial Sequence
  ENSG00000196616_66 (sequence is synthesized)
gcattcatttcataaaaaaagataagcatagtcactttgaaaagtcaagaattggttaaaaattctcatatttattgtaaatcaatcttttacaaaataccagatcatcccaatatctac

SEQ ID NO: 707434 - DNA, 120 bp, Artificial Sequence
  ENSG00000196616_67 (sequence is synthesized)
aggcactataatagatcactttcaactaaaatttatatttatacttatagtaagaatatttaagatttaattagttaaagtttaaataaaaagatgtttgcaaagcctccaggagaaatc

SEQ ID NO: 707435 - DNA, 120 bp, Artificial Sequence
  ENSG00000196616_68 (sequence is synthesized)
agtacactgtgtaaaagttaactattagtacagtggaagtaatttttttaatctgtgtggtctcccacatttgcgatttctcagtaggaatcctcaggcacttataaactcaaactgaaa

SEQ ID NO: 707436 - DNA, 120 bp, Artificial Sequence
  ENSG00000196616_69 (sequence is synthesized)
acaatgctgtggcaggcattgaaagatgacatagttattattgaactctattccttaaagacttttaaagaaacatgcttctaatcaatacatgtgagctttaagtctttgctctattaa

SEQ ID NO: 707437 - DNA, 120 bp, Artificial Sequence
  ENSG00000196616_70 (sequence is synthesized)
ttactgcatagaaatttaagaagaacttgttttattcctctccaggtgataaagtcatcccgctctttactcctcagtgtggaaaatgcagagtttgtaaaaacccggagagcaactact

SEQ ID NO: 707438 - DNA, 120 bp, Artificial Sequence
  ENSG00000196616_71 (sequence is synthesized)
tgccaaggtgagaatgacaatgggtgataaaactgcttacatgcagactgtcggaaaccaaaagggaagcaatttcttgcaagaatcagaaattatttttgtagatttaaagtgtcgatt

SEQ ID NO: 707439 - DNA, 120 bp, Artificial Sequence
  ENSG00000196616_72 (sequence is synthesized)
atgagtagaaaaatggcccagaaagaattgagtacacatgctagaaatttcaccaatttattgcagataaaaagttgttacgaataaagatgtcatttacaataatttttcttctgaatt

SEQ ID NO: 707440 - DNA, 120 bp, Artificial Sequence
  ENSG00000196616_73 (sequence is synthesized)
tgctgtttatgggatcatgaaattttagacctaagaattcatttagtaattcattcaacgattagagagcacctataaatgcctcaggcaccataggttctgctaggctctgacagcaaa

SEQ ID NO: 707441 - DNA, 120 bp, Artificial Sequence
  ENSG00000196616_74 (sequence is synthesized)
agtaaatgaaatgaagcgtttgcccttgaggaccatctagtctgtggatcctctcctcccagaaataggatcaacagtagagtccaaaaccttacctgatgcacctccaaaccaaggctc

SEQ ID NO: 707442 - DNA, 120 bp, Artificial Sequence
  ENSG00000196616_75 (sequence is synthesized)
acccactctgtggattcttagacggaaagtaataaagactcagtgatgcataattcactcattatgggatttcactgctaaaactaactcccctggcatgaacacacacatatacttcag

SEQ ID NO: 707443 - DNA, 120 bp, Artificial Sequence
  ENSG00000196616_76 (sequence is synthesized)
aagtggtaaatttcaagcagaaattctttaaaggctcctcatctgagtaggctgaaaatctagtagtatgctttattttatgaaaccgaggttcagatatataaagatatttgcccaaag

SEQ ID NO: 707444 - DNA, 120 bp, Artificial Sequence
  ENSG00000196616_77 (sequence is synthesized)
cctcagtgctgagactaaaatatatttttaatatgagagctgagactaaaatatctttttcaaatctcctgctgaatcttagctcgcaatacataattattagtgtttttaaatcacagt

SEQ ID NO: 707445 - DNA, 120 bp, Artificial Sequence
  ENSG00000196616_78 (sequence is synthesized)
cacaagtcttgtgtttttctaagtaaggtagaaaatggtgttgtcccccatagtatgaataatatttggtgaatgaatgagtgaatagacacccttaagggaatataaggatgagattac

SEQ ID NO: 707446 - DNA, 120 bp, Artificial Sequence
  ENSG00000196616_79 (sequence is synthesized)
ttgggacaggaaagcatgttacccacaatgaagactgactatgggagactaggtttaataaatagcccctagccaaccacaaagaaaaaattcagaaggcatcttttccaaatttctgtg

SEQ ID NO: 707447 - DNA, 120 bp, Artificial Sequence
  ENSG00000196616_80 (sequence is synthesized)
actttagcacttagccccttgttcagttgcctcatacgtgttagcagatggtcaaagtgatcctacccaagaacagaagatgaggatactcataacaatagattgtatttgttattgaaa

SEQ ID NO: 707448 - DNA, 120 bp, Artificial Sequence
  ENSG00000196616_81 (sequence is synthesized)
tatagacaaacatttcattgctgtgttgttcgctagtgtatttttaaagcagggatatactggtcacaactaccgaacataaatgaaccaatgagttaattactgagggcttaagtggaa

SEQ ID NO: 707449 - DNA, 120 bp, Artificial Sequence
  ENSG00000196616_82 (sequence is synthesized)
tatttttcagtctcctggagtagccttttccacttattttgttttccaaatattgccgttgtgtatgtatgagttactgaagctggctatcaagggatttcagcaattgacagtcccttc

SEQ ID NO: 707450 - DNA, 120 bp, Artificial Sequence
  ENSG00000196616_83 (sequence is synthesized)
aagattgtaatcactgccatctggatctcaaagatcatccagtcccctggttcccagcctgaccttcccattggagtcacctggggactgagtccacctgcagagattcctcatttaatt

SEQ ID NO: 707451 - DNA, 120 bp, Artificial Sequence
  ENSG00000196616_84 (sequence is synthesized)
gacatgggctgtgacctggactgtgggatattttgtaaagctccccagatgaatctaatatgcatcagtttgaaaaccactcaactagttcatccccttgaatttaaaaataaagcaact

SEQ ID NO: 707452 - DNA, 120 bp, Artificial Sequence
  ENSG00000196616_85 (sequence is synthesized)
gaagccaaaagaggttttgataaacggttggacaaaagagtctgagtagttcttgataaacacctacgcatggcactttatgaagcttaggcactttctaacaatcatcacttaatctat

SEQ ID NO: 707453 - DNA, 120 bp, Artificial Sequence
  ENSG00000196616_86 (sequence is synthesized)
gtgtggatttttcgtttgaagtcatcggtcggcttgacaccatggtatgtaccatgacatgccctgagatttctgcctctgcaacctggaagatgcatttaggcagcaaaatatatgttt

SEQ ID NO: 707454 - DNA, 120 bp, Artificial Sequence
  ENSG00000196616_87 (sequence is synthesized)
tatgtataaaggatatttttaatgatgaatggaaatttcccatcatctgtttgttatgtggcttgtttaatttttgttatgagaaatcttctcttccatcaattacccaaacctgtctca

SEQ ID NO: 707455 - DNA, 120 bp, Artificial Sequence
  ENSG00000196616_88 (sequence is synthesized)
ctcaagtcatatttcctctagaggaaaagaaaagggtttgtttttcttaactgagcaattatagatttactttattaatttttagttaaaaaatataagttcaagtaaacataaataata

SEQ ID NO: 707456 - DNA, 120 bp, Artificial Sequence
  ENSG00000196620_0 (sequence is synthesized)
aacaactggaaaagaagcattgcataagaccaggatgtctctgaaatggacgtcagtctttctgctgatacagctcagttgttactttagctctggaagctgtggaaaggtgctagtgtg

SEQ ID NO: 707457 - DNA, 120 bp, Artificial Sequence
  ENSG00000196620_1 (sequence is synthesized)
gcccacagaatacagccattggataaatatgaagacaatcctggaagagcttgttcagaggggtcatgaggtgactgtgttgacatcttcggcttctactcttgtcaatgccagtaaatc

SEQ ID NO: 707458 - DNA, 120 bp, Artificial Sequence
  ENSG00000196620_2 (sequence is synthesized)
atctgctattaaattagaagtttatcctacatctttaactaaaaattatttggaagattctcttctgaaaattctcgatagatggatatatggtgtttcaaaaaatacattttggtcata

SEQ ID NO: 707459 - DNA, 120 bp, Artificial Sequence
  ENSG00000196620_3 (sequence is synthesized)
tttttcacaattacaagaattgtgttgggaatattatgactacagtaacaagctctgtaaagatgcagttttgaataagaaacttatgatgaaactacaagagtcaaagtttgatgtcat

SEQ ID NO: 707460 - DNA, 120 bp, Artificial Sequence
  ENSG00000196620_4 (sequence is synthesized)
tctggcagatgcccttaatccctgtggtgagctactggctgaactatttaacataccctttctgtacagtcttcgattctctgttggctacacatttgagaagaatggtggaggatttct

SEQ ID NO: 707461 - DNA, 120 bp, Artificial Sequence
  ENSG00000196620_5 (sequence is synthesized)
gttccctccttcctatgtacctgttgttatgtcagaattaagtgatcaaatgattttcatggagaggataaaaaatatgatacatatgctttattttgacttttggtttcaaatttatga

SEQ ID NO: 707462 - DNA, 120 bp, Artificial Sequence
  ENSG00000196620_6 (sequence is synthesized)
tctgaagaagtgggaccagttttatagtgaagttctaggaagacccactacattatttgagacaatggggaaagctgaaatgtggctcattcgaacctattgggattttgaatttcctcg

SEQ ID NO: 707463 - DNA, 120 bp, Artificial Sequence
  ENSG00000196620_7 (sequence is synthesized)
cccattcttaccaaatgttgattttgttggaggacttcactgtaaaccagccaaacccctgcctaaggaaatggaagagtttgtgcagagctctggagaaaatggtattgtggtgttttc

SEQ ID NO: 707464 - DNA, 120 bp, Artificial Sequence
  ENSG00000196620_8 (sequence is synthesized)
gatggcaagaagccaaatactttaggttccaatactcgactgtacaagtggttaccccagaatgaccttcttggtcatcccaaaaccaaagcttttataactcatggtggaaccaatggc

SEQ ID NO: 707465 - DNA, 120 bp, Artificial Sequence
  ENSG00000196620_9 (sequence is synthesized)
atctatgaggcgatctaccatgggatccctatggtgggcattcccttgtttgcggatcaacatgataacattgctcacatgaaagccaagggagcagccctcagtgtggacatcaggacc

SEQ ID NO: 707466 - DNA, 120 bp, Artificial Sequence
  ENSG00000196620_10 (sequence is synthesized)
atgtcaagtagagatttgctcaatgcattgaagtcagtcattaatgaccctgtctataaagagaatgtcatgaaattatcaagaattcatcatgaccaaccaatgaagcccctggatcga

SEQ ID NO: 707467 - DNA, 120 bp, Artificial Sequence
  ENSG00000196620_11 (sequence is synthesized)
gcagtcttctggattgagtttgtcatgcgccacaaaggagccaagcaccttcgagtcgcagctcacaacctcacctggatccagtaccactctttggatgtgatagcattcctgctggcc

SEQ ID NO: 707468 - DNA, 120 bp, Artificial Sequence
  ENSG00000196620_12 (sequence is synthesized)
tgcgtggcaactgtgatatttatcatcacaaaattttgcctgttttgtttccgaaagcttgccaaaaaaggaaagaagaagaaaagagattagttatatcaaaagcctgaagtggaatga

SEQ ID NO: 707469 - DNA, 120 bp, Artificial Sequence
  ENSG00000196620_13 (sequence is synthesized)
ctgaaagatgggactcctcctttatttcagcatggagggttttaaatggaggatttcctttttcctgtgacaaaacatcttttcacaacttaccttgttaagacaaaatttattttccag

SEQ ID NO: 707470 - DNA, 120 bp, Artificial Sequence
  ENSG00000196620_14 (sequence is synthesized)
agacaaaatttattttccagggatttaatacgtactttagctgaattattctatgtcaatgatttttaagctatgaaaaatacaatggggggaaggatagcatttggagatatacctaat

SEQ ID NO: 707471 - DNA, 66 bp, Artificial Sequence
  ENSG00000196620_15 (sequence is synthesized)
caaaaaaaaaaaatacaactcttttttttaaaccaggaaggaaaatgtgaacatggaaacaacttc

SEQ ID NO: 707472 - DNA, 120 bp, Artificial Sequence
  ENSG00000196620_16 (sequence is synthesized)
aaatacaactcttttttttaaaccaggaaggaaaatgtgaacatggaaacaacttctagtattggatctgaaaataaagtgtcatccaagccataaaaaaaaaagaaaagaaaaataaaa

SEQ ID NO: 707473 - DNA, 120 bp, Artificial Sequence
  ENSG00000196628_0 (sequence is synthesized)
gtgtgtggatgtgtgagtgagagggaacgagagtaagagaaagaaagaagtgaggggatgtaaactcgaataaatttcaaagtgcctccgagggatgcaacgggcaaaaactgaactgtt

SEQ ID NO: 707474 - DNA, 120 bp, Artificial Sequence
  ENSG00000196628_1 (sequence is synthesized)
caggcttcagattgtaactgacgatctgaggaaaaatgaggtgctcgatgaattttcgtttgtattttttggcgaggcgggggaggtgttgagattttttttttttcccctcggggtggg

SEQ ID NO: 707475 - DNA, 120 bp, Artificial Sequence
  ENSG00000196628_2 (sequence is synthesized)
tgcgagggggatgcatcctagcctgcccgacccggagcaagtcgcgtctccccgccggagcccccccacccatttctttgctgaacttgcaattccgtgcgcctcggcgtgtttccccct

SEQ ID NO: 707476 - DNA, 120 bp, Artificial Sequence
  ENSG00000196628_3 (sequence is synthesized)
ccccccttccctccgtcccctcccctccccggagaagagagttggtgttaagagtcagggatcttggctgtgtgtctgcggatctgtagtggcggcggcggcggcggcggcggggaggca

SEQ ID NO: 707477 - DNA, 120 bp, Artificial Sequence
  ENSG00000196628_4 (sequence is synthesized)
gcgcgggagcgggcgcaggagcaggcggcggcggtggcggcggcggttagacatgaacgccgcctcggcgccggcggtgcacggagagccccttctcgcgcgcgggcggtttgtgtgatt

SEQ ID NO: 707478 - DNA, 120 bp, Artificial Sequence
  ENSG00000196628_5 (sequence is synthesized)
gattttgctaaaatgcatcaccaacagcgaatggctgccttagggacggacaaagagctgagtgatttactggatttcagtgcgatgttttcacctcctgtgagcagtgggaaaaatgga

SEQ ID NO: 707479 - DNA, 120 bp, Artificial Sequence
  ENSG00000196628_6 (sequence is synthesized)
ccaacttctttggcaagtggacattttactggctcaaatgtagaagacagaagtagctcagggtcctgggggaatggaggacatccaagcccgtccaggaactatggagatgggactccc

SEQ ID NO: 707480 - DNA, 120 bp, Artificial Sequence
  ENSG00000196628_7 (sequence is synthesized)
tatgaccacatgaccagcagggaccttgggtcacatgacaatctctctccaccttttgtcaattccagaatacaaagtaaaacagaaaggggctcatactcatcttatgggagagaatca

SEQ ID NO: 707481 - DNA, 120 bp, Artificial Sequence
  ENSG00000196628_8 (sequence is synthesized)
aacttacagggttgccaccagcagagtctccttggaggtgacatggatatgggcaacccaggaaccctttcgcccaccaaacctggttcccagtactatcagtattctagcaataatccc

SEQ ID NO: 707482 - DNA, 120 bp, Artificial Sequence
  ENSG00000196628_9 (sequence is synthesized)
cgaaggaggcctcttcacagtagtgccatggaggtacagacaaagaaagttcgaaaagttcctccaggtttgccatcttcagtctatgctccatcagcaagcactgccgactacaatagg

SEQ ID NO: 707483 - DNA, 120 bp, Artificial Sequence
  ENSG00000196628_10 (sequence is synthesized)
gactcgccaggctatccttcctccaaaccagcaaccagcactttccctagctccttcttcatgcaagatggccatcacagcagtgacccttggagctcctccagtgggatgaatcagcct

SEQ ID NO: 707484 - DNA, 120 bp, Artificial Sequence
  ENSG00000196628_11 (sequence is synthesized)
ggctatgcaggaatgttgggcaactcttctcatattccacagtccagcagctactgtagcctgcatccacatgaacgtttgagctatccatcacactcctcagcagacatcaattccagt

SEQ ID NO: 707485 - DNA, 120 bp, Artificial Sequence
  ENSG00000196628_12 (sequence is synthesized)
cttcctccgatgtccactttccatcgtagtggtacaaaccattacagcacctcttcctgtacgcctcctgccaacgggacagacagtataatggcaaatagaggaagcggggcagccggc

SEQ ID NO: 707486 - DNA, 120 bp, Artificial Sequence
  ENSG00000196628_13 (sequence is synthesized)
agctcccagactggagatgctctggggaaagcacttgcttcgatctattctccagatcacactaacaacagcttttcatcaaacccttcaactcctgttggctctcctccatctctctca

SEQ ID NO: 707487 - DNA, 120 bp, Artificial Sequence
  ENSG00000196628_14 (sequence is synthesized)
gcaggcacagctgtttggtctagaaatggaggacaggcctcatcgtctcctaattatgaaggacccttacactctttgcaaagccgaattgaagatcgtttagaaagactggatgatgct

SEQ ID NO: 707488 - DNA, 120 bp, Artificial Sequence
  ENSG00000196628_15 (sequence is synthesized)
attcatgttctccggaaccatgcagtgggcccatccacagctatgcctggtggtcatggggacatgcatggaatcattggaccttctcataatggagccatgggtggtctgggctcaggg

SEQ ID NO: 707489 - DNA, 120 bp, Artificial Sequence
  ENSG00000196628_16 (sequence is synthesized)
tatggaaccggccttctttcagccaacagacattcactcatggtggggacccatcgtgaagatggcgtggccctgagaggcagccattctcttctgccaaaccaggttccggttccacag

SEQ ID NO: 707490 - DNA, 120 bp, Artificial Sequence
  ENSG00000196628_17 (sequence is synthesized)
cttcctgtccagtctgcgacttcccctgacctgaacccaccccaggacccttacagaggcatgccaccaggactacaggggcagagtgtctcctctggcagctctgagatcaaatccgat

SEQ ID NO: 707491 - DNA, 120 bp, Artificial Sequence
  ENSG00000196628_18 (sequence is synthesized)
gacgagggtgatgagaacctgcaagacacgaaatcttcggaggacaagaaattagatgacgacaagaaggatatcaaatcaattactagcaataatgacgatgaggacctgacaccagag

SEQ ID NO: 707492 - DNA, 120 bp, Artificial Sequence
  ENSG00000196628_19 (sequence is synthesized)
cagaaggcagagcgtgagaaggagcggaggatggccaacaatgcccgagagcgtctgcgggtccgtgacatcaacgaggctttcaaagagctcggccgcatggtgcagctccacctcaag

SEQ ID NO: 707493 - DNA, 120 bp, Artificial Sequence
  ENSG00000196628_20 (sequence is synthesized)
agtgacaagccccagaccaagctcctgatcctccaccaggcggtggccgtcatcctcagtctggagcagcaagtccgagaaaggaatctgaatccgaaagctgcgtgtctgaaaagaagg

SEQ ID NO: 707494 - DNA, 120 bp, Artificial Sequence
  ENSG00000196628_21 (sequence is synthesized)
gaggaagagaaggtgtcctcagagcctccccctctctccttggccggcccacaccctggaatgggagacgcatcgaatcacatgggacagatgtaaaagggtccaagttgccacattgct

SEQ ID NO: 707495 - DNA, 120 bp, Artificial Sequence
  ENSG00000196628_22 (sequence is synthesized)
tcattaaaacaagagaccacttccttaacagctgtattatcttaaacccacataaacacttctccttaacccccatttttgtaatataagacaagtctgagtagttatgaatcgcagacg

SEQ ID NO: 707496 - DNA, 120 bp, Artificial Sequence
  ENSG00000196628_23 (sequence is synthesized)
acagaaaaacaaaaaaaagaaagaaaaaagtgcaacttgagggacgactttctttaacatatcattcagaatgtgcaaagcagtatgtacaggctgagacacagcccagagactgaacgg

SEQ ID NO: 707497 - DNA, 120 bp, Artificial Sequence
  ENSG00000196628_24 (sequence is synthesized)
acaggctgagacacagcccagagactgaacggcaatctttccacactgtggaacaatgcatttgtgcctaaacttcttttggaaaaaaaaaatataattaatttgtaagtctgaaaaaaa

SEQ ID NO: 707498 - DNA, 120 bp, Artificial Sequence
  ENSG00000196628_25 (sequence is synthesized)
aatatttaatttaaaaaaaattgtaaacttgcaataatgaaaaagtgtacttctgaagaaaactacatgaacgtttttgttggtattcaagtcagctagtgtttataattactggatatt

SEQ ID NO: 707499 - DNA, 120 bp, Artificial Sequence
  ENSG00000196628_26 (sequence is synthesized)
gaattaggggaagctcggctgccctagtaacaaaaccagcaaacgtcctgatgacaacgaagtgatgacattagccattccttagggtaggaggaacagatggatcttatagacctatga

SEQ ID NO: 707500 - DNA, 120 bp, Artificial Sequence
  ENSG00000196628_27 (sequence is synthesized)
taaatatatattaaaaatttagtgactatggtaagcttttgttcatttgtttcagacttttttctcctgtaaaaaaatagtactgattaacttttttaaaagaaagattttactgtaaat

SEQ ID NO: 707501 - DNA, 120 bp, Artificial Sequence
  ENSG00000196628_28 (sequence is synthesized)
taaaagaaagattttactgtaaatatggatttttttttttttggtcttatttctgtccctttccctggtttgttatcgtaacctgtagtgccaactctgcttccagaggggtagtgcagg

SEQ ID NO: 707502 - DNA, 120 bp, Artificial Sequence
  ENSG00000196628_29 (sequence is synthesized)
atgaaatgctgaccctgatgttgcttctcattcataaataagtagaaagttgtttctccagtcttttgggaacacaggacttaaaagtcacatcatgtgtagatattacaagcagcatta

SEQ ID NO: 707503 - DNA, 120 bp, Artificial Sequence
  ENSG00000196628_30 (sequence is synthesized)
ccaagacatggcaaaaagagtttgtctgaattgtaatgttgcgtttgtgaacctattctgggattttcagaggtacaaggttagaatgctacaatgttaccactgtgccttccaatgttt

SEQ ID NO: 707504 - DNA, 120 bp, Artificial Sequence
  ENSG00000196628_31 (sequence is synthesized)
atatcatcggaaacataacataatcaaagtggctgtgatttaacaaaatgattaaagtgttacctacctgtgtagccgaagtagtgtgcagtgaggcgtttctgaatacatggtcagatt

SEQ ID NO: 707505 - DNA, 120 bp, Artificial Sequence
  ENSG00000196628_32 (sequence is synthesized)
aaaacaaaaacaaaaaaaacaagtaaagttcaaaaaccgtcaaatgagaaaattgcaagtagtgtgacagagctgattgattttgttgctttcttgattttttttttcaaaatgggttta

SEQ ID NO: 707506 - DNA, 120 bp, Artificial Sequence
  ENSG00000196628_33 (sequence is synthesized)
tgggtttactaaaatgtagatgacttaactgcctcctccttcgtctgaaaaatgccaatattcaatcatcatgcagcattataacaagccttataagtcctaaagcattaagttgcactt

SEQ ID NO: 707507 - DNA, 120 bp, Artificial Sequence
  ENSG00000196628_34 (sequence is synthesized)
atgaatgaagtttatacttaccatatttgatagaaacatagatcaagctatggcacagcgactcatcagatagctagctttgacgtctgggcacaattgaaccaacttccatcgtgaatc

SEQ ID NO: 707508 - DNA, 120 bp, Artificial Sequence
  ENSG00000196628_35 (sequence is synthesized)
tttataatgattgactttggtgtatagtgcagtaaacaaatagtgctcctagttaagtatttgtcagcatccttttgtctctaacttgtttctatttttacagccacacaattcttggca

SEQ ID NO: 707509 - DNA, 120 bp, Artificial Sequence
  ENSG00000196628_36 (sequence is synthesized)
tgtattaagaaaaaaaaaaatccctgttcaagtagtttttccacctatcagcactgagtaaatgccataaatccattgaaatggtctaaatgttccatctgttctcctgttttgccagtt

SEQ ID NO: 707510 - DNA, 120 bp, Artificial Sequence
  ENSG00000196628_37 (sequence is synthesized)
atatagtaatgaaatacatttgtaaattttatgcaacaaatggcaaacgtatcattattttgaaattgtgtatgtaaaagttatatttttacatgtagactcttgttattatgtgtttta

SEQ ID NO: 707511 - DNA, 120 bp, Artificial Sequence
  ENSG00000196628_38 (sequence is synthesized)
atacattgtatcagtttttgtttttttttaaaaactgtggtttaaaaagaagtctcatttaaatgaaatagctacaagaatcagaattttatgttcatttctgaaaatgtaagaacaaat

SEQ ID NO: 707512 - DNA, 120 bp, Artificial Sequence
  ENSG00000196628_39 (sequence is synthesized)
aagatagttaccacgtggtcatcttttacaaacccataaacattttgattagctgtgtgtgtgttgaaaaactgtaaatatgttcagtagcgataaaactaaaataactttgatttgttg

SEQ ID NO: 707513 - DNA, 120 bp, Artificial Sequence
  ENSG00000196628_40 (sequence is synthesized)
ataagttcctaaaatgtggaggtggattaaaaccttaggagaatagcagaaatcaaacttcatgaaaagttattttggggctttcctgtgaaatgtatgaacaaagaggctcagagaagg

SEQ ID NO: 707514 - DNA, 120 bp, Artificial Sequence
  ENSG00000196628_41 (sequence is synthesized)
acatggaagacaataatgtatactctctcctcctccctgaataatgaaaaccatgtgtatttgttccctccgtatgttaaagatttccttttagtggtacattctgcactcattttgtat

SEQ ID NO: 707515 - DNA, 120 bp, Artificial Sequence
  ENSG00000196628_42 (sequence is synthesized)
agtctaccaaggcgggtatccctaggaacaatattatataggaagcaggtatactctgatcacattcaggataagtgtacagaagaaaatacggtgtttactctttagggaactggaaac

SEQ ID NO: 707516 - DNA, 120 bp, Artificial Sequence
  ENSG00000196628_43 (sequence is synthesized)
actccctgcattgatgtacattttaagaatggcacttttgatacatgttatcataaaggtgcttaatagagctgaattaaagtttttcaaatctgtaaacaaagcaaaaaagtaaattgt

SEQ ID NO: 707517 - DNA, 120 bp, Artificial Sequence
  ENSG00000196628_44 (sequence is synthesized)
agtcatttgattattttttaaattggtgctttatattttgttctcactcagagtaaaagctgcaatttattgttcaccagctttgatgtattcattactcagtaatgcaatacctctatt

SEQ ID NO: 707518 - DNA, 120 bp, Artificial Sequence
  ENSG00000196628_45 (sequence is synthesized)
gttgaattccctttggaaataagtgaaaattctaacggccactgaaagctgctcgctaggttttgcttggtggagaaacataatctgcacctatccatattaattgggttgtatccccat

SEQ ID NO: 707519 - DNA, 120 bp, Artificial Sequence
  ENSG00000196628_46 (sequence is synthesized)
taaaaaagaaaaaaagggaatgtggcctttttagtgtgttttttattgttgttgttttgtaattatcaaacccaggtaagatattggtatcctgcactggattttcaaatgaagttcagc

SEQ ID NO: 707520 - DNA, 120 bp, Artificial Sequence
  ENSG00000196628_47 (sequence is synthesized)
agaagacagttaagattaaagtactatacaaaaatttcaaaagggtccatactacgctatctgtatgacgacacttaggctggggatctctttcagaaactcggactttaaaagcaactt

SEQ ID NO: 707521 - DNA, 120 bp, Artificial Sequence
  ENSG00000196628_48 (sequence is synthesized)
ggagcagttgatccacctccacattcaagtaatttatgaatatgcagaatagggatctgttcatctagaaatttttaccatttgtcttctgtgtagctgcaaggaacactaatgtttata

SEQ ID NO: 707522 - DNA, 120 bp, Artificial Sequence
  ENSG00000196628_49 (sequence is synthesized)
caactgtcagtccacccagtggtgcaactggttctgattcagtcttccgattcctttttatttttcactttttcctatttctgaatttttttttttatttgtgatcttgattttgatgag

SEQ ID NO: 707523 - DNA, 120 bp, Artificial Sequence
  ENSG00000196628_50 (sequence is synthesized)
gggttggggagtggggagggagtcgaaccaagacttggagttaagaggattttcatcttttgcatccaacaggcagaatatgatctgtgtccaaaagtgaacttgagtcaggaatgaatc

SEQ ID NO: 707524 - DNA, 120 bp, Artificial Sequence
  ENSG00000196628_51 (sequence is synthesized)
aatttcagcataaacaagcacaaaaatttagtctgctggctgactggaagcaaaaaagtcaagatggaatatgatgaattccaacacaatggggcaccaaggcctttaggcctctctttt

SEQ ID NO: 707525 - DNA, 120 bp, Artificial Sequence
  ENSG00000196628_52 (sequence is synthesized)
tattttgctttggttttgtttgtttttctttagagacatgctctttctcatgggacttgaagtggactcatctttgtgcagtgctggttttgccatactcatttcaagtattatagacat

SEQ ID NO: 707526 - DNA, 120 bp, Artificial Sequence
  ENSG00000196628_53 (sequence is synthesized)
atgtaatggtgaaaatatatgaactgtggcctttttcattcttgttacttgtgatgcaattaagtgaagataagaaaaaaaaaaaaaaagcagagatttaccatgtatcagtgcctggct

SEQ ID NO: 707527 - DNA, 120 bp, Artificial Sequence
  ENSG00000196628_54 (sequence is synthesized)
ttttgttataaagctttgtttgtctagtgctcttttgctataaaatagactgtagtacaccctagtaggaaaaaaaaaaaactaaatttaaaaataaaaaatatatttggcttatttttc

SEQ ID NO: 707528 - DNA, 120 bp, Artificial Sequence
  ENSG00000196628_55 (sequence is synthesized)
gcaggagcaatccttttataccatgaatattacaaaaaaattgtcagattctgaatatttcttctttgtagatttttggaatcattatgagtaaaagtttgttactttattttactattt

SEQ ID NO: 707529 - DNA, 90 bp, Artificial Sequence
  ENSG00000196628_56 (sequence is synthesized)
atcattatgagtaaaagtttgttactttattttactatttaaaagatgttattttaccatgtgttaccaagatgaaactgtatgggtagc

SEQ ID NO: 707530 - DNA, 120 bp, Artificial Sequence
  ENSG00000196628_57 (sequence is synthesized)
tttttgcgactgtacacatagctgcagcattaaaaacttaaaaaaattgttaaaaaaaaaaaaagggaaaacatttcaaaaaaaaaaaaaaagataaacagttacaccttgttttcaatg

SEQ ID NO: 707531 - DNA, 120 bp, Artificial Sequence
  ENSG00000196628_58 (sequence is synthesized)
tgtggctgagtgcctcgattttttcatgtttttggtgtatttctgatttgtagaagtgtccaaacaggttgtgtgctggagttccttcaagacaaaaacaaacccagcttggtcaaggcc

SEQ ID NO: 707532 - DNA, 120 bp, Artificial Sequence
  ENSG00000196628_59 (sequence is synthesized)
attacctgtttcccatctgtagttattcgatgaagtcatgtacatgaccgttctgtagcaataaatgtgccatttttataaactgtttctgacacttgtttcatttcattttgcattgtc

SEQ ID NO: 707533 - DNA, 120 bp, Artificial Sequence
  ENSG00000196628_60 (sequence is synthesized)
catatagctatgattctcttctgtaagtaaaacgcatctatatttcattttccaagtgttggaggtattgacagcttaacaaacaaaacatacaaaaaaaatcacaaaaacaaattgaaa

SEQ ID NO: 707534 - DNA, 120 bp, Artificial Sequence
  ENSG00000196628_61 (sequence is synthesized)
agcaaagcacatgattgatcaaggaagagatgcccttaatgaaaatggaacgggatgcatgcaaaacaaaaagaaaactgtctagaggattaactaattgaaggaatataattaatgtgt

SEQ ID NO: 707535 - DNA, 120 bp, Artificial Sequence
  ENSG00000196628_62 (sequence is synthesized)
gtgtaacactgaagctatgcatttgaagagctctgaactgcaccagtgttttcggttgtgctgcaggttgctaagtcaagtcagccttaaccttttgcaccagttggtcggctgtttggc

SEQ ID NO: 707536 - DNA, 120 bp, Artificial Sequence
  ENSG00000196628_63 (sequence is synthesized)
agaacattctcagatcttttcagtcaaaaatctaagatgatttattttgtatcactttgttaaaagctgaatattgttaactacagttaatattaacactgtatttatactttctcaaac

SEQ ID NO: 707537 - DNA, 120 bp, Artificial Sequence
  ENSG00000196628_64 (sequence is synthesized)
tacatccgccccaccacttctggttgcctctgttgactattaatccagatgtaaacaaccagatgtttttttctaacttgtacaaactgacgtgtgtcaactatcatggaaggaaaaaaa

SEQ ID NO: 707538 - DNA, 120 bp, Artificial Sequence
  ENSG00000196628_65 (sequence is synthesized)
tgtacagattaaaattattcagtgttatgtactgtaagttaatatttttgtagaatggacatcaatctactttgcaaaatttggaggctatttcaacattgcactgtagaaatgtaaagt

SEQ ID NO: 707539 - DNA, 120 bp, Artificial Sequence
  ENSG00000196628_66 (sequence is synthesized)
aatgtatgcaatgtaaaggaaagcccgcggtagctgagcgcttcataacagaatgttctaatcaagtacgtggtatttggggatgtctccaatattgctcttgtattctttctaattggg

SEQ ID NO: 707540 - DNA, 120 bp, Artificial Sequence
  ENSG00000196628_67 (sequence is synthesized)
tttagtgactagttgaaggaaaatgttataacgccatttggttcacatgtgaagtgccctccatagccaaatgttgggatttttttttttttcgtttttggttggactgtttgcagatat

SEQ ID NO: 707541 - DNA, 120 bp, Artificial Sequence
  ENSG00000196628_68 (sequence is synthesized)
ttaaattttatgaaatttccaaagattttggttgataacccccttttaccttctaaatgatttgagatgttcttatgttcttactgtgtgttttaaatatatataaaagagccacaagca

SEQ ID NO: 707542 - DNA, 120 bp, Artificial Sequence
  ENSG00000196628_69 (sequence is synthesized)
ttttttttttttgctattgctgcctattccatcttaaaaaaacaaaaccaaacccaacccaacaacaagtctcccatcccttcctcctttccaccttaatcccacccgcccccacgtccc

SEQ ID NO: 707543 - DNA, 120 bp, Artificial Sequence
  ENSG00000196628_70 (sequence is synthesized)
atcttcaataaacggaatgtgttggaaaggacaacaaataagaagttaaatatgtggaaatgacatggaaagcacctgtttcttccctttgttttcttctacgtcatcaggaaataatat

SEQ ID NO: 707544 - DNA, 120 bp, Artificial Sequence
  ENSG00000196628_71 (sequence is synthesized)
ttaaccatagaatatggtgtccctctaagaaaatgtttataattgaatgttcaaagtagaatatagattaaataagtaaagatgacttgccaaaaaaaattaaagaacatttgaaacaaa

SEQ ID NO: 707545 - DNA, 120 bp, Artificial Sequence
  ENSG00000196628_72 (sequence is synthesized)
acttccccccaaatcccaaagctttaacattcctataacagacaaatacaaagggtgggagagacaaattaccagataacagtatagtcgtttacatccaaaccttttcttaaaaattag

SEQ ID NO: 707546 - DNA, 120 bp, Artificial Sequence
  ENSG00000196628_73 (sequence is synthesized)
attatctttttaaaatatacaggcatatggaaaatgtatttcttacacttttcttagctctgcagaagacacccaacggcagaataatgtattccaataaaacgtctcagatgaaaaaaa

SEQ ID NO: 707547 - DNA, 120 bp, Artificial Sequence
  ENSG00000196628_74 (sequence is synthesized)
cgggctagatagcctgggcgacaagcctctgagtgctgtgtctctggtgtaaagctctcagttcctgcagaagaccgtgttcctgtgggtctggtttctgagggtcaaggcggaggtcat

SEQ ID NO: 707548 - DNA, 120 bp, Artificial Sequence
  ENSG00000196628_75 (sequence is synthesized)
tagagttttggggagaagaaagttgacaacatccttcctttctgcagatggtcatggcagaggtctctgttttcgctgggcccctttttctggtcattgagagaataggcttcctcaccc

SEQ ID NO: 707549 - DNA, 120 bp, Artificial Sequence
  ENSG00000196628_76 (sequence is synthesized)
ctgtatcctttcttactaataggaattggcgtgattcctcacagacacaaagatttcctctgctgagtaagcgtgaggccccttaacttgtgaaagcatcatccagaccgtgtgagtctg

SEQ ID NO: 707550 - DNA, 120 bp, Artificial Sequence
  ENSG00000196628_77 (sequence is synthesized)
cagaacgggaagaaactattcagttttttcctggcaggtaaatttacagctgaaaagaaaattaaaggcctactctagaagtactaaaagtatcgtttcagatacctgtactctattgga

SEQ ID NO: 707551 - DNA, 120 bp, Artificial Sequence
  ENSG00000196628_78 (sequence is synthesized)
gcctaaactgttttggcatttatgaatctggacccaatgctaatgacacacagtgaaaaaatttgtctctgattcaagtacagtttatttgtaaaactatacttattctacaaatttggt

SEQ ID NO: 707552 - DNA, 120 bp, Artificial Sequence
  ENSG00000196628_79 (sequence is synthesized)
cagaaatgttgtgtctataatatttctaaaaagagattgtagccatgttaaaaactcaactgatgtatgtgccaactataactcttttcttacctctaaagtaagaaaataatttcctag

SEQ ID NO: 707553 - DNA, 120 bp, Artificial Sequence
  ENSG00000196628_80 (sequence is synthesized)
atttatcctaaacatgctgatgtatataagagtaataccttaattgtttatggtttttcttcctggacactcttttctacagaaaacacaactgcaggaaaatagcttctgtctggtttt

SEQ ID NO: 707554 - DNA, 120 bp, Artificial Sequence
  ENSG00000196628_81 (sequence is synthesized)
cttaaatatctgctatctttaaattcaaatctatatctccttgaactttaatctggtaatcagatggtttttgaataccaacacccgtgtactttgcctcaattccctgaggttgttttt

SEQ ID NO: 707555 - DNA, 120 bp, Artificial Sequence
  ENSG00000196628_82 (sequence is synthesized)
attcacaaattcaaccaattgtcctaagactacagctttccttctaaaggctgtggttctcaaggttctatctggaatcttttgtgaattaagaacatgctgcctctttatgttgctgtt

SEQ ID NO: 707556 - DNA, 120 bp, Artificial Sequence
  ENSG00000196628_83 (sequence is synthesized)
gtaattattgagataaattccgtgtcttgccacaagtttaaaaatgccgaatacttctagataacccctttccttccttgttgtctttttctgattcttggccactttggcaagaaatcc

SEQ ID NO: 707557 - DNA, 120 bp, Artificial Sequence
  ENSG00000196628_84 (sequence is synthesized)
caaggaggggatttcatacctttagcagcttctgtgttagaccagtcagttcttggtaatttaacttattgtggccaaacttatgcatgttaatggattctttgaagttttggaacaaca

SEQ ID NO: 707558 - DNA, 120 bp, Artificial Sequence
  ENSG00000196628_85 (sequence is synthesized)
ctttttcaaatctaggcagttttatttgcataactagtttatttgtaagtgaataaccaattctaattggtcgttagcctgaaaatctttggaagaaaagttcctattttccagtctcct

SEQ ID NO: 707559 - DNA, 120 bp, Artificial Sequence
  ENSG00000196628_86 (sequence is synthesized)
ttgtgtaaggtgtagcatttgttggatgtataaaaatatcacccaaatgctcagcttccggacaggcctggcagagactgttttcatttgctttttacagcctatttgcatagtagaata

SEQ ID NO: 707560 - DNA, 120 bp, Artificial Sequence
  ENSG00000196628_87 (sequence is synthesized)
taggagtgaattaatcattactgatttccttggcactggcagcagttgggggtgagggcagaggagggatccgcagaaggcagagaaagagggccttttccagtggactcagttgacttc

SEQ ID NO: 707561 - DNA, 120 bp, Artificial Sequence
  ENSG00000196628_88 (sequence is synthesized)
catgtttaccatacacacctgtggcagacagtgccatctggaaaggcgcttacgctatggagagagaggagcctggtcttacagcatccttctgtggtgtcatcctccttgcccctaact

SEQ ID NO: 707562 - DNA, 120 bp, Artificial Sequence
  ENSG00000196628_89 (sequence is synthesized)
tttctccttcacccaagtgttcttgacttacgtgcattatctttatgtgtaacgtatacttgcaaccgaagaataccactcccacttttgattgattggagcttctcaagtgtaattggt

SEQ ID NO: 707563 - DNA, 120 bp, Artificial Sequence
  ENSG00000196628_90 (sequence is synthesized)
ccttattgccacttggaagttacccagagattctccaaaatggaacatcagagtcatatattttaaaccagcattcattaaatatacatttaattgagtagataatttcccacatcttcc

SEQ ID NO: 707564 - DNA, 120 bp, Artificial Sequence
  ENSG00000196628_91 (sequence is synthesized)
aactccgaaatgttgtgattaatcatctttattctgtgaacatttccaatgtgtgaaattaccctttaggttaattgttagtcacttccatggagtttcttgtgatggggagtctactga

SEQ ID NO: 707565 - DNA, 120 bp, Artificial Sequence
  ENSG00000196628_92 (sequence is synthesized)
tgttcagtgaagtttgtttcattttctgtgtctctcataagccccccaaaagtcctcactcatgtttattcacaatagtcattcagagctttatagcacgtgctgctctgccttcttgag

SEQ ID NO: 707566 - DNA, 120 bp, Artificial Sequence
  ENSG00000196628_93 (sequence is synthesized)
acaagacgtcgtgcacacttctcttttttacatgacagcccttggaatatttgaaccctgctgctgtgacgacttcctcatatgatatgctttccaggtggctcatcatcctctttgcct

SEQ ID NO: 707567 - DNA, 120 bp, Artificial Sequence
  ENSG00000196628_94 (sequence is synthesized)
tccattcaaaagtttctaatttgtcactgtaacactcagaaatggacagaaccgatcttatcttttcagactattctgggcccggccatgcatttgttatgaatcatggaatattttggt

SEQ ID NO: 707568 - DNA, 89 bp, Artificial Sequence
  ENSG00000196628_95 (sequence is synthesized)
cccggccatgcatttgttatgaatcatggaatattttggttttcacaattagaaattacagagacagagtctggctgtgttgcccaggc

SEQ ID NO: 707569 - DNA, 90 bp, Artificial Sequence
  ENSG00000196628_96 (sequence is synthesized)
cacctcagcctcctgagtagctgagaccgcaggtgtgcatcactgtgcccagctaatttttttatcgtccaggctggggttataggcatg

SEQ ID NO: 707570 - DNA, 120 bp, Artificial Sequence
  ENSG00000196628_97 (sequence is synthesized)
gtccaggctggggttataggcatgagccactgcacccagctttctggcttcatttttgactcacaatgaggtcatggtcattcataagctgcaggtgtttggtttgttgaatcgttttgc

SEQ ID NO: 707571 - DNA, 120 bp, Artificial Sequence
  ENSG00000196628_98 (sequence is synthesized)
atgactgatatcagttcaggtttcccaaacttgttctgtggatcataaacatctataagattaaagaccatggaagtcatgtttttgtaactttttgtttaatacatagagaaaatgaga

SEQ ID NO: 707572 - DNA, 120 bp, Artificial Sequence
  ENSG00000196628_99 (sequence is synthesized)
ctcacatagtgggttgaccaggccttcaaagcaaggtaatggggacacctgaataaaagcctcactgtcttcactcccattgctctggtgtcttacatataggcctttcttcttactcct

SEQ ID NO: 707573 - DNA, 120 bp, Artificial Sequence
  ENSG00000196628_100 (sequence is synthesized)
gttaagctgccttgtatttttttgacctatcaaaatcatttttcaattacttgtttcccctagatttcagatgtcacggtatgaaaggttttatatatatttaaaaaataaagtataaac

SEQ ID NO: 707574 - DNA, 120 bp, Artificial Sequence
  ENSG00000196628_101 (sequence is synthesized)
ataaagtctttttgaagcgtggttatgcaacatatgctaggcgtaagttggtgaatgcctgctttgcagagtgtaaccccattgaataaaaaaagctttgttttccctttctgcccccct

SEQ ID NO: 707575 - DNA, 120 bp, Artificial Sequence
  ENSG00000196628_102 (sequence is synthesized)
gtatcagtatgggcacaccctgcactctaactttaatctacgtcaccctcacctgtttggtttgggtttaatgtctgcgagaaaaccaaatatcttgtgtattgtgaactgtcaaagcca

SEQ ID NO: 707576 - DNA, 120 bp, Artificial Sequence
  ENSG00000196628_103 (sequence is synthesized)
tctaaaccaatcccaaggtcaagtggatataaaaattctgccaaaaacatggcataagatggaaaagttccctgaaaactctggaagaaaacaaagtaatgtagacaccttctttttccc

SEQ ID NO: 707577 - DNA, 120 bp, Artificial Sequence
  ENSG00000196628_104 (sequence is synthesized)
tcggattacaagtgtaatgaatgtggatgggaaatcgcagaagatgtagaagacagaagtagctcagggtcctgggggaatggaggacatccaagcccgtccaggaactatggagatggg

SEQ ID NO: 707578 - DNA, 120 bp, Artificial Sequence
  ENSG00000196628_105 (sequence is synthesized)
gattacaatgtatctttcagggaaacctattattatcaatgtgactccacgggggagtccatggtgatgatgatgaggaggaggatgatgatgatgagacacctctaaacttggaacaag

SEQ ID NO: 707579 - DNA, 120 bp, Artificial Sequence
  ENSG00000196628_106 (sequence is synthesized)
tttaagactttatgagagaagaaaaaaaatcaccaacaagaattgtttgaggaaaaattataactatcctgtgttcatttttttttttataaacaataagaaaaagttgttggatttttt

SEQ ID NO: 707580 - DNA, 120 bp, Artificial Sequence
  ENSG00000196628_107 (sequence is synthesized)
tttaatgatttcttttttgggggagggaattttgttgcagttttatggtggaaaatgcaaaaaccagagccaggtgcataatcttgtaatctgtggatatccctggagcaggactgagta

SEQ ID NO: 707581 - DNA, 120 bp, Artificial Sequence
  ENSG00000196628_108 (sequence is synthesized)
ccagttaaaatactttttggggatacacatgtgagatactaagtacttgcagaagatttttgtctctctttttaaagtctctttccttggaatattgtgagaatatttgtggccatttaa

SEQ ID NO: 707582 - DNA, 120 bp, Artificial Sequence
  ENSG00000196628_109 (sequence is synthesized)
agtgcccattctcttgatgtctacagtatcacctttcttgtagattggcacttatgcggccaaaggaacaacaccatgttttctaaaaggctggagaaaataccacaggtgcctctcctc

SEQ ID NO: 707583 - DNA, 120 bp, Artificial Sequence
  ENSG00000196628_110 (sequence is synthesized)
tttcccttcatcttcatcattttgacaaattactcaaagatggagggtgcagttgaaagccagccatcattttttaaaacttctcaggacattgtaacatgcacttgggttgagaactgc

SEQ ID NO: 707584 - DNA, 62 bp, Artificial Sequence
  ENSG00000196628_111 (sequence is synthesized)
cccagcactttgggaggccaagatggagtctcattctgtcatccagacccctcctgcctcag

SEQ ID NO: 707585 - DNA, 120 bp, Artificial Sequence
  ENSG00000196628_112 (sequence is synthesized)
agattcacgccacaacagtttattcatccacatgctttttggcgactcttcatcacgtatttgggcttagatcttctggtgcctccctcggcgtgctacccataaggtcgaaagaaaagt

SEQ ID NO: 707586 - DNA, 120 bp, Artificial Sequence
  ENSG00000196628_113 (sequence is synthesized)
acagctgtgaaaaaaacaaaacaaaaacccaaacacttcagctagaaaccagtaggaatctaaaggacagtaataatttttaattggctgaatccttgatgttttcacctcctgtgagca

SEQ ID NO: 707587 - DNA, 120 bp, Artificial Sequence
  ENSG00000196628_114 (sequence is synthesized)
attggaatgacagtttttggaagtgtggagcagtttggctaagaataggaatgaaggatatttttttccagtttatcatagccagagtgaggaagtgttattccctctcttgcttgcata

SEQ ID NO: 707588 - DNA, 120 bp, Artificial Sequence
  ENSG00000196628_115 (sequence is synthesized)
tttgacaagttttattgtcgcagggatgagcatcctaggtggtgatcattgtttgcaaagttgtgcaggactgccgcaccttcctgggtgccatgaaatatttatcatttgccaatccta

SEQ ID NO: 707589 - DNA, 120 bp, Artificial Sequence
  ENSG00000196628_116 (sequence is synthesized)
agatcttcttcttgcctacttcttctccttcgtctttttttccccccactcctcccccagagtagaaaaatagatgctttcagagctttagagagtggatcctagagcgaaagtttgcag

SEQ ID NO: 707590 - DNA, 120 bp, Artificial Sequence
  ENSG00000196628_117 (sequence is synthesized)
tcaggtaaagttgagaggtggtatgattttttttttttaaagagttttggaaaattcttattccttccaaatgactgttagaaaggaaaagcagatatgagaagcagaattgagaaagcc

SEQ ID NO: 707591 - DNA, 120 bp, Artificial Sequence
  ENSG00000196628_118 (sequence is synthesized)
tgaaaaaagggacagcgagtttgaaataaaagttgttagagtggtactgaggagaaaaaagaatccgagaccatgtactgcgcatacacaatcccgggcatgggcggcaactctttgatg

SEQ ID NO: 707592 - DNA, 120 bp, Artificial Sequence
  ENSG00000196628_119 (sequence is synthesized)
tccaggtttgccatcttcacaaatagaggaagcggggcagccggcagctcccagactggagatgctctggggaaagcacttgcttcgatctattctccagatcacactaacaacagcttt

SEQ ID NO: 707593 - DNA, 120 bp, Artificial Sequence
  ENSG00000196628_120 (sequence is synthesized)
atcattaactcatgttctgtttccatggagcacaggagagtaacaaggaaggccccttaaaagaaaggccttttaaagtggaggtctcagttcacaaactttaaaagtttacgaagtagt

SEQ ID NO: 707594 - DNA, 120 bp, Artificial Sequence
  ENSG00000196628_121 (sequence is synthesized)
ataactactactgaaaaggggtgggggggaatgtgcctgtgcacccctacagtatcttgtgtagtgtctattaacattgttctcttttagaggaccacattaaaaggtacattaatctta

SEQ ID NO: 707595 - DNA, 120 bp, Artificial Sequence
  ENSG00000196628_122 (sequence is synthesized)
atggctgaatttctgggccttgggaggttcgttttgaggcattaatgtccaggaaaattcttttgtatatagcactatgactgcatatgcttttcttaaaaagccttcgtaatgtagccg

SEQ ID NO: 707596 - DNA, 120 bp, Artificial Sequence
  ENSG00000196628_123 (sequence is synthesized)
tggagtgtggagattccttcattcttaatttgtgcttcatggttgtgagtcttgcaagagtctactatctctgtgcttagcgtggtcgcagcaatctccataaacagtgtgattacttag

SEQ ID NO: 707597 - DNA, 120 bp, Artificial Sequence
  ENSG00000196628_124 (sequence is synthesized)
ggataaataaaagtgaaattttggaaatttgctgacagagggaaaatagggactgaagatgaaaaatgtacagagtatgaatttctgctttctgtgaaatttgagaatagaacagaccat

SEQ ID NO: 707598 - DNA, 120 bp, Artificial Sequence
  ENSG00000196628_125 (sequence is synthesized)
agtgtgtcttccagtgaatcagtttctcttgtgccgtattgttatttgaatccctgtctacaacatcagctatgcaaaccaaagagaaaggcaaaatctcagtatcttgggcttcaagtc

SEQ ID NO: 707599 - DNA, 120 bp, Artificial Sequence
  ENSG00000196628_126 (sequence is synthesized)
atattcggcatctgaaagatttgttgcattgaggtgaacagtgcttggttaagagctcctgccggagtgcagttcatggcagtttgtttggaaagaattctgcaggaaagaaatttacag

SEQ ID NO: 707600 - DNA, 120 bp, Artificial Sequence
  ENSG00000196628_127 (sequence is synthesized)
ggcaaatcctatacgagatggaaatggacattgccacgtttatggccaaggttttcaatataaaacaaaacaacttttttcttctccttggtgaaactagtgtttttctagagaggctgc

SEQ ID NO: 707601 - DNA, 120 bp, Artificial Sequence
  ENSG00000196628_128 (sequence is synthesized)
tggcctccaacctgaatcttgataacattatggggactgtgtttgttccaaatgtagcagtagtactgcttggccatctaatgaacctgaggaaaaagaaagaacagagtgataatgggg

SEQ ID NO: 707602 - DNA, 120 bp, Artificial Sequence
  ENSG00000196628_129 (sequence is synthesized)
gctggggtgggatctgtaatgttgtttctcttttagttttaagttggatggtgatgtattttactaaataaacccttagcataaactctaagctgtttggtaacagtatgaaagatcttt

SEQ ID NO: 707603 - DNA, 120 bp, Artificial Sequence
  ENSG00000196628_130 (sequence is synthesized)
gatgcttgtgataatgcagcaaaaagtaatgtctaaatgtaagatattattttgagatgagaacaccgaatggggatggaagacaggaatcttcaccatgtgtgaatgtacaggaaacaa

SEQ ID NO: 707604 - DNA, 120 bp, Artificial Sequence
  ENSG00000196628_131 (sequence is synthesized)
gtcttgcttcaaattgctctcctgttagagacgaaatgagaatttagtgcaggtggcacttttatttttatttgggttcacatatgacaggcaaatcctatacgagatggaaatggacat

SEQ ID NO: 707605 - DNA, 120 bp, Artificial Sequence
  ENSG00000196628_132 (sequence is synthesized)
tcagccatttctgagatcgatcattcaaaactctcatcagtgtatcagccataaaagtgaatttcacccaaattgacagatattttctttcatggaaaaagaattttttttaaaaaaagc

SEQ ID NO: 707606 - DNA, 120 bp, Artificial Sequence
  ENSG00000196628_133 (sequence is synthesized)
attatccactagatacgtcgaagaagagggaaaccaattagggtcgaaataaatgctggagagagagggagtgaaagagagagtgagagtgagagagagagagagtcttgcttcaaattg

SEQ ID NO: 707607 - DNA, 84 bp, Artificial Sequence
  ENSG00000196628_134 (sequence is synthesized)
atttgtattctgctcaataatggaccctgttccacttttaccctaaggcagttgagtggaaattttagagaagaaaagggtgcc

SEQ ID NO: 707608 - DNA, 120 bp, Artificial Sequence
  ENSG00000196628_135 (sequence is synthesized)
aaaaaagaaaagaaaaagaaaaaagtgaagactgcagaaatttgtaagaatcggcattattcgaggaactaataaaaacccctcggaaaagttgaatcgatctcgcgtatgcattaggat

SEQ ID NO: 707609 - DNA, 120 bp, Artificial Sequence
  ENSG00000196628_136 (sequence is synthesized)
ggatttcgagctccatcagggccgggctgccttccagctccgctgcgcaaagttgagcgtctgacagcagcgccgcggcctcccccgcccgccaggaatggtctcttcctgctttgcata

SEQ ID NO: 707610 - DNA, 120 bp, Artificial Sequence
  ENSG00000196628_137 (sequence is synthesized)
gagacagatggcagagttattagatgtgcatcatacgattcccttcctgccactcgctttttaatcaaattaaaacaaaaaagaaagagagggagagagagagagggggagtcaattaac

SEQ ID NO: 707611 - DNA, 120 bp, Artificial Sequence
  ENSG00000196628_138 (sequence is synthesized)
agatggaaatcccaattttaaagcaatgctcttgggtattgaggggtatatttgcgaagtcacagtcatcatttattccatgttcccttgccttcttttctgtcaagtactctgagagtc

SEQ ID NO: 707612 - DNA, 120 bp, Artificial Sequence
  ENSG00000196628_139 (sequence is synthesized)
ttgatgttgaggatttattggaagcaaacgttgttacctaaatgaagtctagtgaacaaaaccaccaaaagaggacatgaagtgactgctatatgtagaagacagaagtagctcagggtc

SEQ ID NO: 707613 - DNA, 120 bp, Artificial Sequence
  ENSG00000196628_140 (sequence is synthesized)
gaaaaatgcagaagaactcagacgactcttggaaatgattcttgcctcaattaaaaagacctcaccactcacctccatgtaaaggacaggtcgtgaattattcaaatgattcagaaatca

SEQ ID NO: 707614 - DNA, 120 bp, Artificial Sequence
  ENSG00000196628_141 (sequence is synthesized)
acatttaaaaaaatgaacataaattccttttcataattaaagagcggtggaaaatggctcttttcttaggtctagattatattgctgttaaaggaattgctgcctagtatacaatttttt

SEQ ID NO: 707615 - DNA, 120 bp, Artificial Sequence
  ENSG00000196628_142 (sequence is synthesized)
gacattgttttctacaacatcaatcttatttgttgtccttttttgtcacgcctgttaaatgtgtatttttctgtgttgatattgaaactaatgtacaaagtgtgacatctccaaaaactg

SEQ ID NO: 707616 - DNA, 120 bp, Artificial Sequence
  ENSG00000196628_143 (sequence is synthesized)
gcattatccactagatacgtcgaagaagagggaaaccaattagggtcgaaataaatgctggagagagagggagtgaaagagagagtgagaatgttttcacctcctgtgagcagtgggaaa

SEQ ID NO: 707617 - DNA, 120 bp, Artificial Sequence
  ENSG00000196628_144 (sequence is synthesized)
attttactggctcaagcttttgaggaggacgagatattctgaagcatatttgaaataaattgaggaccgtaacttggcaagtatgaggtgcaggaataatccatgtgcaggagagacggt

SEQ ID NO: 707618 - DNA, 120 bp, Artificial Sequence
  ENSG00000196628_145 (sequence is synthesized)
gaaagattactcagaggtacagagccatggagagtcggaaggaacactggaagtttctcgtggagatggaaacctgagaacttgactgtggttaggacaggttggaggagtcctgggtgg

SEQ ID NO: 707619 - DNA, 120 bp, Artificial Sequence
  ENSG00000196628_146 (sequence is synthesized)
tgctgaagaggctcggttccggagtcaggccgttgaggttgaagcctggctctgccattcgctaacattgtgaccttggaaaagcttacctacctctctgagtctcagtttgctcatctg

SEQ ID NO: 707620 - DNA, 120 bp, Artificial Sequence
  ENSG00000196628_147 (sequence is synthesized)
aaagcaccagaagtattagctgtgattgattgcaggagccacagcatgcagcaggagaatgatttttgaggtgtttgaagaataatatgtaaagagggctgggtgatatgactcacgcct

SEQ ID NO: 707621 - DNA, 120 bp, Artificial Sequence
  ENSG00000196628_148 (sequence is synthesized)
cagagtgagacttcgtgtcatagaaaaaaaaaaagaataacatgaggatgtgtttggtgttggcattttggtcacattgaagcagggagggaatggacatttctttcagaaccatgcagc

SEQ ID NO: 707622 - DNA, 120 bp, Artificial Sequence
  ENSG00000196628_149 (sequence is synthesized)
cctaaacgttaaacagagaggtttttggggataagtgttaagattttgatgtggatattttagaaggttgggcgtaacagctgattcaacccttttttatcaccatcaatgaaaagggct

SEQ ID NO: 707623 - DNA, 120 bp, Artificial Sequence
  ENSG00000196628_150 (sequence is synthesized)
acataaagatttaagaagaggaggacattcttttctccacagctggtcatgcgcccagtgtagttggcaggaaaacggattgtttggaatgtgtccctaaaatcctgtaatttaattttc

SEQ ID NO: 707624 - DNA, 120 bp, Artificial Sequence
  ENSG00000196628_151 (sequence is synthesized)
attatttatataacgcagtccgtatatgtggcgctgtactacatgcacacaagaccaaatttctggccagtgtaattttaccaaagaagagactgtaactgaaatatttgtacctactaa

SEQ ID NO: 707625 - DNA, 120 bp, Artificial Sequence
  ENSG00000196628_152 (sequence is synthesized)
attatctgcagcttggtaactcaccgttagggagtccatgtgatcccaatcagcaacagggattggaggaacgcattgttggcagtgaaataaggggtcaggaactagaataaatagtgc

SEQ ID NO: 707626 - DNA, 120 bp, Artificial Sequence
  ENSG00000196628_153 (sequence is synthesized)
tgggatggtaaacgggcccatgttatactaaatgtaatataaagtcactgactttgaggagtccagaaaaataagtttgtaaatattgacattaaagtagcaaccagtttgcatgctact

SEQ ID NO: 707627 - DNA, 120 bp, Artificial Sequence
  ENSG00000196628_154 (sequence is synthesized)
ataggaaagtacttttatttgtgacccaagtatgagaatttctggcaaactttttttttaatattaaaaaaaaccccccaaaccctccaccttttcccttctttccttttccctttcaag

SEQ ID NO: 707628 - DNA, 120 bp, Artificial Sequence
  ENSG00000196628_155 (sequence is synthesized)
cctgtttcccaaatgtaaattccatcatcatcttgatcatgatggggttcactcctgggaaagggagtttttaaaaaagagagagagagagagactcagaattttgaatagtttctttgc

SEQ ID NO: 707629 - DNA, 120 bp, Artificial Sequence
  ENSG00000196628_156 (sequence is synthesized)
taaattcaccatctggagagcctgtgattgattagttttggcctcactattaagtgtcaatataatcaatgggaattactaggctagggtcattacatagataatttgcctgctgtgtaa

SEQ ID NO: 707630 - DNA, 120 bp, Artificial Sequence
  ENSG00000196628_157 (sequence is synthesized)
ggggaagagcagtagatgtctgttacctggaggagatttttttttaaggaaaaacacaatttacacttttttgtcgtttctcttggcaggtaaaacagaaaggggctcatactcatctta

SEQ ID NO: 707631 - DNA, 70 bp, Artificial Sequence
  ENSG00000196628_158 (sequence is synthesized)
ctcctcctcctcctccttctcctcctcctcctcctcttctagaccttcttttggagaaatggctttcgga

SEQ ID NO: 707632 - DNA, 120 bp, Artificial Sequence
  ENSG00000196628_159 (sequence is synthesized)
ctcctcttctagaccttcttttggagaaatggctttcggaagttttgccaggaaacgtagccctaggcaggcagctttgcagccccctttctgcttgttgcactttctccattcgttcct

SEQ ID NO: 707633 - DNA, 120 bp, Artificial Sequence
  ENSG00000196628_160 (sequence is synthesized)
ctctttttccctttcataactgaatagcaattaggcactaaatattagtcacatgacagaatgaacacacaaatgtaccaaacagaagtaaaatcactggcttgagcataaccatatttt

SEQ ID NO: 707634 - DNA, 120 bp, Artificial Sequence
  ENSG00000196628_161 (sequence is synthesized)
tcgtcacaagacactgaaatttagctacgttctacgttgcaagtcattagattgaacaagggttcaaacagaccaaaactatcttgttcctcacattcaaaaagagtgaacaaagtcata

SEQ ID NO: 707635 - DNA, 120 bp, Artificial Sequence
  ENSG00000196628_162 (sequence is synthesized)
agatgagccatcagtgactagtgagctacaaagcagaatagctcttaatggtagttattgaccacttcccaaaattccagtcattgtgctaggctcttatccatgatgtgccactgtctt

SEQ ID NO: 707636 - DNA, 120 bp, Artificial Sequence
  ENSG00000196628_163 (sequence is synthesized)
ccgaggactggttaatgtgaaattctcaggtgactgctaataactacatgaggttaatctcctggagaatgtgacactgtggagtccctcagaggggaagaagtatttgttcacttatga

SEQ ID NO: 707637 - DNA, 120 bp, Artificial Sequence
  ENSG00000196628_164 (sequence is synthesized)
gagaggagatgcgtgggcatcagttggccagaaattatttgctgcttttttaaattaattaattaattaatttttaccaaggacatttactaatgagttaaggtccaagaagaatgctgt

SEQ ID NO: 707638 - DNA, 120 bp, Artificial Sequence
  ENSG00000196628_165 (sequence is synthesized)
tcccatgaactgagccatcatcctctcatttcttgtgatgttcactgtagtcttttccataggtggttccccagtcagtattcccactttgaggaatgaactgggctggatgtccagctg

SEQ ID NO: 707639 - DNA, 120 bp, Artificial Sequence
  ENSG00000196628_166 (sequence is synthesized)
cccctggagggaagaggtggagttggtggggagatagctacctgcttctgaaccagctttgacaccttgttgttcagatgagcagcacagcttagtgccccagggtcttattaaaacctc

SEQ ID NO: 707640 - DNA, 120 bp, Artificial Sequence
  ENSG00000196628_167 (sequence is synthesized)
agacttctcaggtagtcactttctgcggttatagctcaaactaactccttgcttggcctgaatgtcactgtcagagcgtcggtggggagaatactcagtgtatgtctttgagagaagatg

SEQ ID NO: 707641 - DNA, 120 bp, Artificial Sequence
  ENSG00000196628_168 (sequence is synthesized)
gcgcaacagaataatgctgctgttgagtcctcttagctctttgcacttgttttctttagagagtgtgtagaatttggggaagtggcgtgaatcacttatgtaggaaagtttttgatgttg

SEQ ID NO: 707642 - DNA, 120 bp, Artificial Sequence
  ENSG00000196628_169 (sequence is synthesized)
gaggagagatgtgttttgaaatgttggaaatataatttctgcctcaataatgccctccctgcgtattcaataatatatctcacacttgagatgagctatctcgcagcctctccactccgc

SEQ ID NO: 707643 - DNA, 120 bp, Artificial Sequence
  ENSG00000196628_170 (sequence is synthesized)
tatcctgtctaagaagcaaattgaggagagagtttccattttttttaacttttcctaaccaagcttctacaaatatgttgcatcagtttgaccttggagagctacagacagaggtcacat

SEQ ID NO: 707644 - DNA, 120 bp, Artificial Sequence
  ENSG00000196628_171 (sequence is synthesized)
ggggaagtttgttagctatcaatgcagttttggcagatttgaaaaacaagaagaaagaaagcagtgcagaactgaaagagtgagaaaagcatatttcacttcagtgtggtttgacaaatg

SEQ ID NO: 707645 - DNA, 120 bp, Artificial Sequence
  ENSG00000196628_172 (sequence is synthesized)
gaaagcccctttctgcagtcatgaggtctggttataaagaaggatgaccggtcattcatccttttacaagacagatttcctgtctacttgtggtttgagtaattttcttttttaggaagg

SEQ ID NO: 707646 - DNA, 120 bp, Artificial Sequence
  ENSG00000196628_173 (sequence is synthesized)
tatgaaggtggagcagaaccttgagttgaggaaaacatacttaggctctgtttgaaaaaaaactttttctgattgatttgcaaaacagtcctcttgagagagaggcactatgacttggaa

SEQ ID NO: 707647 - DNA, 120 bp, Artificial Sequence
  ENSG00000196628_174 (sequence is synthesized)
gggacatatcaggaaatagggtggttatctccatgagctgtagacagcttagccacagctctcagtgggaatgagttttgcttggttttagctggtcatcttcattagtttgtggatgaa

SEQ ID NO: 707648 - DNA, 120 bp, Artificial Sequence
  ENSG00000196628_175 (sequence is synthesized)
caggagaatctacttgttggtctagccagagtggagcaataggtgacttctatatgctgagaatagacttaacttgttaaaaaccatagggccttatttaagggtcttgacaataataaa

SEQ ID NO: 707649 - DNA, 120 bp, Artificial Sequence
  ENSG00000196628_176 (sequence is synthesized)
ggagctataatttaaaaacaaaagtatgagatttttagaacccagaaaagggctttttagaaatttatttcatacattattttacaataatggatgcacttgtcaaaatccactagcgga

SEQ ID NO: 707650 - DNA, 120 bp, Artificial Sequence
  ENSG00000196628_177 (sequence is synthesized)
atgagaaaaagatgcataatctttaaggaaataggtagacatggtaattcagcattttggaggagcaaacctttattattatgcatagatacagatattactttaaggttactttaaggg

SEQ ID NO: 707651 - DNA, 120 bp, Artificial Sequence
  ENSG00000196628_178 (sequence is synthesized)
aatgtttttctttaaaataatatgttcaccaattgcgtacgtgaaaatgcagaggaaaatttaagcataataagccttagtattgcgtgatgtctgagtggcccatgttttttcacactt

SEQ ID NO: 707652 - DNA, 120 bp, Artificial Sequence
  ENSG00000196628_179 (sequence is synthesized)
aagttctcttaggctttggtttgattttttgagtgtggtagaagtcagtgatggcagcgtgtctgtataacaagaagagaagctttctcttctgatgttagtgatactaccctaacaaac

SEQ ID NO: 707653 - DNA, 120 bp, Artificial Sequence
  ENSG00000196628_180 (sequence is synthesized)
agtatggattaataggatacatctgcagacttttgaaaatatttggcatatactcactcattctgaaacgcaggaagtaaagaaatattacgttgcctgtatctcaaagaacaaacagag

SEQ ID NO: 707654 - DNA, 120 bp, Artificial Sequence
  ENSG00000196628_181 (sequence is synthesized)
ctaattaaataattggcaaatagggaacacatagcctgacacatgtttgagattacacacgattctgtagaaaatgactgtaagcaatactaatgccttaagaatggggttcgagcacta

SEQ ID NO: 707655 - DNA, 120 bp, Artificial Sequence
  ENSG00000196628_182 (sequence is synthesized)
acacatggacatcacatttttcacgttttcctggtaaaaagttgcaagacagtgcagtcttttcatacatggtgttgatgtcttaggaagctgctttttcagttcagaagagggctgctg

SEQ ID NO: 707656 - DNA, 120 bp, Artificial Sequence
  ENSG00000196628_183 (sequence is synthesized)
cccttcgtctcagtgtcatgttataatatgtctttctggtggtcagcagttgtcctgaactgacactagaacaacgcagtgcatgtggggtgagatacaagctctagaactctcggaagg

SEQ ID NO: 707657 - DNA, 120 bp, Artificial Sequence
  ENSG00000196628_184 (sequence is synthesized)
gaacctctctgtaaccacattccctttcttcttctgttctctgcatctcaaaggtggaagatgcccactgaggtttgctgtttgtttggcttgggggagtgaccaggtgtttcttgtttt

SEQ ID NO: 707658 - DNA, 120 bp, Artificial Sequence
  ENSG00000196628_185 (sequence is synthesized)
gttttcttttgccctataatacccaatatcattttttgagaaatccataagaaggataaagcttacttggattacattaatgagagattttttttttttcatgacacattcatccatgga

SEQ ID NO: 707659 - DNA, 120 bp, Artificial Sequence
  ENSG00000196628_186 (sequence is synthesized)
ttttcaagagaattgtagaacaaggtattttactcattgcatacagtccactacttttctcaagccttgctggcaaactctggagatcatattagacctttctgaattgaaaaggtcatc

SEQ ID NO: 707660 - DNA, 120 bp, Artificial Sequence
  ENSG00000196628_187 (sequence is synthesized)
taattagccctccaattagaggaatataatgtatgggacacagcatggattcacagtagttcagctggtggcgcacccagttaaggaaagaagctgtcaggggtctttgggagttaccag

SEQ ID NO: 707661 - DNA, 120 bp, Artificial Sequence
  ENSG00000196628_188 (sequence is synthesized)
catcagcaccttctactcagttcttcaaactttttcaatgttatgccactgggtattctcagaagcagtgcagttcagtgcctctgcatctgagcatacatacggaggaggaagtgtagt

SEQ ID NO: 707662 - DNA, 120 bp, Artificial Sequence
  ENSG00000196628_189 (sequence is synthesized)
aagttattagataccagctatagagaataggaatgtctgcaggatattaaccatacacatttggttagccacatacttccttcctatttgcaataatatccagtagcccttcctgatgga

SEQ ID NO: 707663 - DNA, 120 bp, Artificial Sequence
  ENSG00000196628_190 (sequence is synthesized)
aagaagtaagaggacctcctaccatagcacagaccactgagactgctcaagggtgagaatgcgtcgtctccccattgggacataccatctgtatacattcacagggtgtgaccctttgtg

SEQ ID NO: 707664 - DNA, 120 bp, Artificial Sequence
  ENSG00000196628_191 (sequence is synthesized)
gtttgaggctacacacactcccttgccctcagagagaactggtcatataactaacataatggttataataactattattgttttattagtctttaactggcctgcattctaatacgtggt

SEQ ID NO: 707665 - DNA, 120 bp, Artificial Sequence
  ENSG00000196628_192 (sequence is synthesized)
cttttccacgtttttaaacctcaaaccaaacagggttgaaggaacagactaccaagattgatttaatacaccatatgctaaagattaccctggaatatctatctggttcatgaattaatc

SEQ ID NO: 707666 - DNA, 120 bp, Artificial Sequence
  ENSG00000196628_193 (sequence is synthesized)
tggcttagaactttaacttcgaatgacatgttagtatgtggcttgtctagtagaaacattatgtccttttctctttgaggacttggtttcacagtaattttattattagagtagtcacat

SEQ ID NO: 707667 - DNA, 120 bp, Artificial Sequence
  ENSG00000196628_194 (sequence is synthesized)
aatgttcactttatattttacaagaatattgagccttgaagtagtcaggcgatgaacaagcacagagcataagagtaataagaattgtatccagcaatgtgaaggcatcttagttaccaa

SEQ ID NO: 707668 - DNA, 120 bp, Artificial Sequence
  ENSG00000196628_195 (sequence is synthesized)
gaccaccagcagagaacaataaactagtttgatttaaatctcctccatttcctgtgcacgatcaggaagcccaacttccccctgaattcctaggaatccctcctgttaaaaaatagtgca

SEQ ID NO: 707669 - DNA, 120 bp, Artificial Sequence
  ENSG00000196628_196 (sequence is synthesized)
ttgtagtctatatacttgcgtttgtattttaaaatggttgtagtaggagtgctggaaatgttccttctttttgtcatctttatagataagcacatggcattgttatgctgtttctaatgg

SEQ ID NO: 707670 - DNA, 120 bp, Artificial Sequence
  ENSG00000196628_197 (sequence is synthesized)
tttaataacacgagggtcactcggacacagtttagaaaaacctactttgaaagcagtcatcttctctcaggcaaacacagtgtgaattgtgctgcttattcttttgatgccttcatgatg

SEQ ID NO: 707671 - DNA, 120 bp, Artificial Sequence
  ENSG00000196628_198 (sequence is synthesized)
ttcccagccttagatgatgggtgtgcattaaaggggcaacacattttccaaattctgatttttagtagttgatcccaaggcaccactcatcccagtgttttgttgagggtgtgttctaat

SEQ ID NO: 707672 - DNA, 120 bp, Artificial Sequence
  ENSG00000196628_199 (sequence is synthesized)
gggaatgaacatttccccaaagctgaggctgagacagagggtggtctagcatgtaacccaagatacaaaacctttctttctgcttcatcttctagccagcaacaccacctgtgttcaagc

SEQ ID NO: 707673 - DNA, 120 bp, Artificial Sequence
  ENSG00000196628_200 (sequence is synthesized)
catctgaacaatacttgggtggcaggcagtgtcgaagcctcctacaaaaattacagttcctcttaataactgctcatcttccattcatatttgtatgttacagctctacttagggactga

SEQ ID NO: 707674 - DNA, 120 bp, Artificial Sequence
  ENSG00000196628_201 (sequence is synthesized)
ttatatttctcttgggcaagataaattgattagagccaaaattagaaatcgataaagtctttaccaagcaaatgcattagttttcatctttctgttacatggacattttgatcatctcta

SEQ ID NO: 707675 - DNA, 120 bp, Artificial Sequence
  ENSG00000196628_202 (sequence is synthesized)
atatgaattgacaaaaatcttgggcctcaaagagtaatcaagtcctgttacatcaaacccacattttcagctttaatgtatcttgctaaacatggcccacttctcaatgcaaaaaaaaaa

SEQ ID NO: 707676 - DNA, 120 bp, Artificial Sequence
  ENSG00000196628_203 (sequence is synthesized)
gggacagacagtataatggcaaatagaggaagcggggcagccggcagctcccagactggagatgctctggggaaagcacttgcttcggtgaggaaatattgactttggactccatatgta

SEQ ID NO: 707677 - DNA, 120 bp, Artificial Sequence
  ENSG00000196628_204 (sequence is synthesized)
cagtcactggaaaatttgagaaggctctgaagcttccagtatatagtctctttctctcatcctcaaaatggtactaagctgcactcaattatggatgtgggaatattctcctggtctttg

SEQ ID NO: 707678 - DNA, 120 bp, Artificial Sequence
  ENSG00000196628_205 (sequence is synthesized)
ggtttataggttttttatactgatgtcttatttttctctaaagtaatatgggtgcacattgaccagctaagactgtcttagcaaggaatagttctaaaacactttgaaagaggcatttga

SEQ ID NO: 707679 - DNA, 120 bp, Artificial Sequence
  ENSG00000196628_206 (sequence is synthesized)
acacattctgtactttatcaaggacagtaattagttcagtcagtaaaagttgattacaagtaacgataaagttagatttttagtacttaattttaaaatttctttattaaatagtaaatt

SEQ ID NO: 707680 - DNA, 120 bp, Artificial Sequence
  ENSG00000196628_207 (sequence is synthesized)
tgttcttaatataaatggtactatctactcttgttttattgcatatcagaataattaaaagaacaatgtgttcaatgcagagtataatcaagcgatttatatattatggcagagtctcct

SEQ ID NO: 707681 - DNA, 120 bp, Artificial Sequence
  ENSG00000196628_208 (sequence is synthesized)
gagtttcatatatccagcatgaagttccctctctccctcccattatgaattctgggctgtggtcctgcttgctccttgtgtgtcagattgaagttctgatgctgtcagccatgtctgacc

SEQ ID NO: 707682 - DNA, 120 bp, Artificial Sequence
  ENSG00000196628_209 (sequence is synthesized)
aatcagcaaacaacaccacaggatgaaatttaaacaatgcagatgctcagatacagggctatgttgcctggaccacgaagggaaagcagaggtctatgctccatcagcaagcactgccga

SEQ ID NO: 707683 - DNA, 120 bp, Artificial Sequence
  ENSG00000196628_210 (sequence is synthesized)
gccagaattggcacggacgccgaggaggcatgagagcgagcaagggctctgagggctgccagcatgctgtcacctctcaattggttacaggagcaggaggggaccaaacagagatgtttt

SEQ ID NO: 707684 - DNA, 120 bp, Artificial Sequence
  ENSG00000196628_211 (sequence is synthesized)
aggaaaaggatttcaatattttcaaatcggtctatgctccatcagcaagcactgccgactacaatagggactcgccaggctatccttcctccaaaccagcaaccagcactttccctagct

SEQ ID NO: 707685 - DNA, 120 bp, Artificial Sequence
  ENSG00000196628_212 (sequence is synthesized)
agagctctctgcagctctgacaaggttgccctgcctgccaaccctcagacttctaggcagcataattgaagagatcagaaaagaatattaacccgttgaccatcttgggctgaggtgtaa

SEQ ID NO: 707686 - DNA, 120 bp, Artificial Sequence
  ENSG00000196628_213 (sequence is synthesized)
tgaccaaaaagtcactttttaaggtgactgtgagtctttcttagtagaggaagacatgagattctctgtcagaagagtcaggccagtaggaagtgctatttcttggtagtgattgttcgt

SEQ ID NO: 707687 - DNA, 120 bp, Artificial Sequence
  ENSG00000196628_214 (sequence is synthesized)
ttttctttttttacttataaacaccgttcccagaggctgagagaggatgagctatgttttgtcatcttcacttacactttagctcaaaaaagtggtcaagtaggtaaaacagaaaggggc

SEQ ID NO: 707688 - DNA, 120 bp, Artificial Sequence
  ENSG00000196628_215 (sequence is synthesized)
ttcttttagatgttttcacctcctgtgagcagtgggaaaaatggaccaacttctttggcaagtggacattttactggctcaagtaaaacagaaaggggctcatactcatcttatgggaga

SEQ ID NO: 707689 - DNA, 120 bp, Artificial Sequence
  ENSG00000196632_0 (sequence is synthesized)
ctcagctccgggccgagcgcgagcttgggctcgtaccccgctcccctctctccgcccgctctttacctaccggccgtagctggcccggtgggctcgcggggagacgctcgcgcgcgcaag

SEQ ID NO: 707690 - DNA, 120 bp, Artificial Sequence
  ENSG00000196632_1 (sequence is synthesized)
cgcacacgacgcggagcggagctcgagacatcgaggagaggagtaagaagcatcggaggaggcgatcgaggaggaggcggtgtgtgtgtatgtgtctattctacggtgtggctcgtcgtg

SEQ ID NO: 707691 - DNA, 120 bp, Artificial Sequence
  ENSG00000196632_2 (sequence is synthesized)
gggcgagaggaggctcgagagagggcgagggagaagcgaaaagagtaagagagtcttcctttgcgagagcctctaatctggttgctatggaaatacatgaccacgcaaaaggaagtccat

SEQ ID NO: 707692 - DNA, 120 bp, Artificial Sequence
  ENSG00000196632_3 (sequence is synthesized)
tctgataattctgatacctgagatgtaactggactgaagagtagaaacaggaaaaattttagtgccaactttaattacaatggccactgattcaggggatccagccagcacagaagattc

SEQ ID NO: 707693 - DNA, 120 bp, Artificial Sequence
  ENSG00000196632_4 (sequence is synthesized)
tgagaaacctgatggaatttcatttgaaaacagagttccccaggtcgctgcaactttgacagtagaagctagactaaaggagaaaaacagtaccttctctgcttctggggaaactgtaga

SEQ ID NO: 707694 - DNA, 120 bp, Artificial Sequence
  ENSG00000196632_5 (sequence is synthesized)
aaggaagagatttttccgaaagagtgttgaaatgacggaagatgacaaagttgccgaatcatcccccaaagatgagagaattaaggctgcaatgaatattccaagagtagataagcttcc

SEQ ID NO: 707695 - DNA, 120 bp, Artificial Sequence
  ENSG00000196632_6 (sequence is synthesized)
ttcaaatgtgttgagaggtggacaagaagttaaatatgaacagtgttcaaagtcaacctcagaaatctcaaaagattgtttcaaggagaaaaatgaaaaggaaatggaagaagaagcaga

SEQ ID NO: 707696 - DNA, 120 bp, Artificial Sequence
  ENSG00000196632_7 (sequence is synthesized)
aatgaaggctgtagctacttctcctagtggcagattcctgaaatttgacatagaactaggaagaggagcatttaaaacagtatataaaggactggacactgaaacatgggttgaggttgc

SEQ ID NO: 707697 - DNA, 120 bp, Artificial Sequence
  ENSG00000196632_8 (sequence is synthesized)
ttggtgtgagctgcaggaccgaaagttaaccaaagctgagcagcaaagattcaaggaagaagcagagatgttgaagggtctccagcaccccaatatagttcgattttatgattcctggga

SEQ ID NO: 707698 - DNA, 120 bp, Artificial Sequence
  ENSG00000196632_9 (sequence is synthesized)
atctatattaaaaggaaagaaatgtattgtattagtgactgaactaatgacatctgggaccttaaagacgtacttaaaacgatttaaagtcatgaaaccaaaggtcttaaggagctggtg

SEQ ID NO: 707699 - DNA, 120 bp, Artificial Sequence
  ENSG00000196632_10 (sequence is synthesized)
caggcaaattttaaaggggttgcagttcttgcacactaggactcctcctattattcaccgggatctgaagtgtgacaatattttcatcacgggacccactggatctgtgaagattggtga

SEQ ID NO: 707700 - DNA, 120 bp, Artificial Sequence
  ENSG00000196632_11 (sequence is synthesized)
tctaggattagccaccttaatgcgtacctcatttgctaagagtgtcattggaactcctgagtttatggctccagagatgtatgaagaacactatgatgaatccgtagatgtttatgcttt

SEQ ID NO: 707701 - DNA, 120 bp, Artificial Sequence
  ENSG00000196632_12 (sequence is synthesized)
tggaatgtgtatgctggaaatggccacatcggagtatccttattctgagtgtcagaatgcagctcaaatataccggaaagtaactagtggcataaaaccagccagcttcaataaagtcac

SEQ ID NO: 707702 - DNA, 120 bp, Artificial Sequence
  ENSG00000196632_13 (sequence is synthesized)
tgatcctgaagtcaaagaaatcattgaaggatgtattcgtcaaaacaaatctgaaaggttgtctatcagggacctattaaaccatgcattttttgctgaggatacaggactgagggtgga

SEQ ID NO: 707703 - DNA, 120 bp, Artificial Sequence
  ENSG00000196632_14 (sequence is synthesized)
gttagcagaagaagatgattgctcaaattcatcccttgctttaagactctgggttgaagaccctaaaaaattgaaaggcaaacacaaagacaatgaagctattgaatttagtttcaactt

SEQ ID NO: 707704 - DNA, 120 bp, Artificial Sequence
  ENSG00000196632_15 (sequence is synthesized)
agaaacagatacacctgaggaagtagcatatgaaatggtcaagtctgggttcttccatgaaagtgattccaaagctgttgctaaatccattagagaccgggtgacgccaataaagaagac

SEQ ID NO: 707705 - DNA, 120 bp, Artificial Sequence
  ENSG00000196632_16 (sequence is synthesized)
aagagagaagaagcctgctggctgtttggaagaacgcagggattctcagtgcaagtctatggggaatgtattccctcagccccagaatacaactttaccccttgctcccgctcagcaaac

SEQ ID NO: 707706 - DNA, 120 bp, Artificial Sequence
  ENSG00000196632_17 (sequence is synthesized)
tggggctgaatgtgaagaaactgaagttgatcaacatgttagacaacagcttctacaaagaaaaccacagcagcactgctcctctgttacaggtgacaatttgtctgaggcaggagctgc

SEQ ID NO: 707707 - DNA, 120 bp, Artificial Sequence
  ENSG00000196632_18 (sequence is synthesized)
atcagttatacattcagatacttcaagtcagcccagtgtagcctattcctcaaatcaaacgatgggctctcaaatggtttctaatatcccgcaggctgaagtaaatgttccagggcaaat

SEQ ID NO: 707708 - DNA, 120 bp, Artificial Sequence
  ENSG00000196632_19 (sequence is synthesized)
ttattcatctcagcaactagtaggacattaccagcaagtttcagggttacagaagcattcaaagctgactcagccgcagattttgcctttggttcaaggtcagtccactgttttacctgt

SEQ ID NO: 707709 - DNA, 120 bp, Artificial Sequence
  ENSG00000196632_20 (sequence is synthesized)
acatgtccttggaccgacagttgtttcacaaccccaggtttccccattaactgttcagaaggtcccacagataaagcctgtatcccaaccagttggagctgaacaacaagcagctcttct

SEQ ID NO: 707710 - DNA, 120 bp, Artificial Sequence
  ENSG00000196632_21 (sequence is synthesized)
aaaaccagatttagttcgaagcttgaatcaagatgtggcaactacgaaggaaaacgtcagtagccctgataacccaagtggaaatggcaaacaggatcggatcaaacagagaagagcttc

SEQ ID NO: 707711 - DNA, 120 bp, Artificial Sequence
  ENSG00000196632_22 (sequence is synthesized)
ctgtccccgaccagagaaggggactaaatttcagcttaccgtccttcaggtatcaacctctggagataacatggtagagtgtcagctggagacacacaacaacaagatggtcaccttcaa

SEQ ID NO: 707712 - DNA, 120 bp, Artificial Sequence
  ENSG00000196632_23 (sequence is synthesized)
gtttgatgttgatggtgatgcgccagaggatattgcagactatatggttgaagataactttgtgctggaaagtgagaaagaaaaatttgtagaagaattgagagctattgtaggtcaagc

SEQ ID NO: 707713 - DNA, 120 bp, Artificial Sequence
  ENSG00000196632_24 (sequence is synthesized)
ccaggagatccttcatgtccactttgccacagaaagagccactggagttgattctattactgtggactccaacagtagccagacagggtcatctgaacaagtacagataaattctacatc

SEQ ID NO: 707714 - DNA, 120 bp, Artificial Sequence
  ENSG00000196632_25 (sequence is synthesized)
tactcaaaccagcaatgaatctgctcctcagtcatccccagttggtcggtggcgattctgtatcaatcagacgataagaaaccgtgagactcagtctcctccttctcttcagcattccat

SEQ ID NO: 707715 - DNA, 120 bp, Artificial Sequence
  ENSG00000196632_26 (sequence is synthesized)
gtctgcggttcctggccgacatccacttcctagtccaaaaaacacaagtaataaggaaatatcacgggacacattgctcactatagaaaataatccatgccaccgtgcacttttcacctc

SEQ ID NO: 707716 - DNA, 120 bp, Artificial Sequence
  ENSG00000196632_27 (sequence is synthesized)
caaatcagaacacaaggatgtggttgatggtaagatttctgaatgtgctagtgtagaaaccaagcagccagctatactttatcaagtggaagataacaggcagataatggcaccagttac

SEQ ID NO: 707717 - DNA, 120 bp, Artificial Sequence
  ENSG00000196632_28 (sequence is synthesized)
taatagttccagttactctactacttcagttcgtgcagttccagctgaatgtgagggactcaccaaacaagcaagcatattcatacctgtgtatccatgtcaccaaactgccagtcaggc

SEQ ID NO: 707718 - DNA, 120 bp, Artificial Sequence
  ENSG00000196632_29 (sequence is synthesized)
tgatgcacttatgtcccatcctggcgaatcaactcagacttctggtaactctcttacaactctggcatttgatcaaaagcctcaaaccttatcagtacagcagccagctatggatgcaga

SEQ ID NO: 707719 - DNA, 120 bp, Artificial Sequence
  ENSG00000196632_30 (sequence is synthesized)
gtttatttctcaagaaggagaaactacagtgaacactgaagcaagttctcctaagacagtcattcccactcagacccctggccttgaaccaactacccttcaacccactactgtcctgga

SEQ ID NO: 707720 - DNA, 120 bp, Artificial Sequence
  ENSG00000196632_31 (sequence is synthesized)
atcagatggagaaagacctccaaaactggagtttgcagacaaccgaattaaaactctggatgaaaaattaagaaacttgctctatcaggagcacagcatctctagcatctatcccgagag

SEQ ID NO: 707721 - DNA, 120 bp, Artificial Sequence
  ENSG00000196632_32 (sequence is synthesized)
tcagaaggatacccaaagcatagactctccattttcttcctctgctgaagataccctctcctgtccagtgacagaagtcatagccatcagtcactgtggaattaaagatagccctgtaca

SEQ ID NO: 707722 - DNA, 120 bp, Artificial Sequence
  ENSG00000196632_33 (sequence is synthesized)
atcccctaatttccaacagacaggctctaagcttctgtccaatgtggctgcaagtcagcctgctaatatatcagtgttcaaaagggacctgaatgtgataacttctgtacccagcgaatt

SEQ ID NO: 707723 - DNA, 120 bp, Artificial Sequence
  ENSG00000196632_34 (sequence is synthesized)
gtgtttacatgagatgtcctcagatgcttcacttccaggggatccagaggcctatcctgctgctgtgtcaagcggtggagccattcatctgcagacaggaggtggatattttggcctaag

SEQ ID NO: 707724 - DNA, 120 bp, Artificial Sequence
  ENSG00000196632_35 (sequence is synthesized)
ctttacttgtcctagtctcaaaaatcctattagcaagaaatcctggactcgcaaattaaaaagctgggcatacaggctacggcagtcaaccagctttttcaagagatcaaaagtccgtca

SEQ ID NO: 707725 - DNA, 120 bp, Artificial Sequence
  ENSG00000196632_36 (sequence is synthesized)
agtggaaacagaagagatgagatcagcaattgctcctgatcccattcctctgacacgggagtccacagctgatactagggctttgaatagatgtaaagcgatgagtggatcatttcagcg

SEQ ID NO: 707726 - DNA, 120 bp, Artificial Sequence
  ENSG00000196632_37 (sequence is synthesized)
gggtcggttccaggtgattacaattcctcagcagcagtcagcaaaaatgacatcttttggaatagaacacatatcagtgttcagtgagacaaaccattctagtgaagaagcctttattaa

SEQ ID NO: 707727 - DNA, 120 bp, Artificial Sequence
  ENSG00000196632_38 (sequence is synthesized)
aacagcaaagtctcagttggtagaaatagaacctgccacacaaaatccaaaaacttcgttttcttatgagaagttacaagctcttcaggaaacctgtaaagaaaataaaggagttcccaa

SEQ ID NO: 707728 - DNA, 120 bp, Artificial Sequence
  ENSG00000196632_39 (sequence is synthesized)
acaaggtgacaacttcttatctttcagcgcagcttgtgagactgatgtatcttcagtgaccccagaaaaggaatttgaagaaacttcagccacaggaagtagcatgcagtctggatctga

SEQ ID NO: 707729 - DNA, 120 bp, Artificial Sequence
  ENSG00000196632_40 (sequence is synthesized)
actgttgcttaaagagagagagatattgactgctgggaaacagcctagctctgatagtgaattttcagccagtcttgctggcagtggaaagtcagtggcaaagactggtccagagagtaa

SEQ ID NO: 707730 - DNA, 120 bp, Artificial Sequence
  ENSG00000196632_41 (sequence is synthesized)
tcagtgcttaccacaccacgaagaacaagcttatgctcaaacacagagttcactcttctattcgccatcttccccaatgagcagtgatgatgaatcagaaatagaggatgaggacttgaa

SEQ ID NO: 707731 - DNA, 120 bp, Artificial Sequence
  ENSG00000196632_42 (sequence is synthesized)
ggtggagcttcaaagattacgagaaaaacacattcaggaggtggtaaatcttcaaacccagcagaataaggagctgcaggagctctatgaacgccttcggtcaattaaagatagcaaaac

SEQ ID NO: 707732 - DNA, 120 bp, Artificial Sequence
  ENSG00000196632_43 (sequence is synthesized)
ccaatctactgagattcctttgccacctgcatcaccacgtcgaccaagatctttcaaaagcaaacttcgaagccgcccccagtccttgacacatgtggacaatggcatagttgctacagg

SEQ ID NO: 707733 - DNA, 120 bp, Artificial Sequence
  ENSG00000196632_44 (sequence is synthesized)
gaaaagctgccttataaatgagttggaaaatccactgtgtgtggagagtaatgcagcatcatgccaacagtctccagccagtaaaaaagggatgttcacagatgacttacacaagctggt

SEQ ID NO: 707734 - DNA, 120 bp, Artificial Sequence
  ENSG00000196632_45 (sequence is synthesized)
ggatgactggacaaaggaagcagtaggaaattctcttattaagccaagtttaaaccaacttaaacaaagtcaacacaaactagagacagaaaactggaataaagtatctgaaaatactcc

SEQ ID NO: 707735 - DNA, 120 bp, Artificial Sequence
  ENSG00000196632_46 (sequence is synthesized)
gtctactatgggctacacatcaacatggatttcttctctgtcccaaatccgtggagctgtcccaacttccttgccacaaggactctcactcccttcatttcctgggccattatcatcata

SEQ ID NO: 707736 - DNA, 120 bp, Artificial Sequence
  ENSG00000196632_47 (sequence is synthesized)
gtaggaatttcaggaacaacacaacaatctgtagtaattcccgcccaatctgggggaccattccagccagggatgaatatgcaggcatttccaacttcatcagtgcagaatcctgccaca

SEQ ID NO: 707737 - DNA, 120 bp, Artificial Sequence
  ENSG00000196632_48 (sequence is synthesized)
atccctcctggtcctaaatgaatcagagtagatggtgataaaaagggaggttttttcagaattattttcaggacacccaagatattaaagtttcttcctcttgggttctgtcatattttc

SEQ ID NO: 707738 - DNA, 120 bp, Artificial Sequence
  ENSG00000196632_49 (sequence is synthesized)
cctcatttgagtttactttagactatatattttttgttccagtgtggtatttgatacagctcatcattctgtagaaatgtgcagtttgcagatagaacactgcacacagaaatgtttttt

SEQ ID NO: 707739 - DNA, 120 bp, Artificial Sequence
  ENSG00000196632_50 (sequence is synthesized)
cacttcaaattctatcctctttgatacttgattttttaaaaatactgttcagaatgctttaataagctcagcttgagcattaccatttccaggacactttccatgaattgttgagaagct

SEQ ID NO: 707740 - DNA, 120 bp, Artificial Sequence
  ENSG00000196632_51 (sequence is synthesized)
ccccatcccccgccttttttttttttttttttaactgctgctatctgcagctggatactcttctttaaaaatgtttaaaaattatttagattgattctccccaaatgtggatgaactgag

SEQ ID NO: 707741 - DNA, 120 bp, Artificial Sequence
  ENSG00000196632_52 (sequence is synthesized)
accctccatcagccagagtcttatgggatcttcacttcacatgtttgtcttaggtttacctttcacagaaggcagggtaacttgctgcaggaaacgttttggtgtataaaattagaatca

SEQ ID NO: 707742 - DNA, 120 bp, Artificial Sequence
  ENSG00000196632_53 (sequence is synthesized)
atccgccctccttagcccccccaaaaaattacaataattttgtcaaccaatacagaacatgagccctttttaaatgtgatttcccgtcatcacagcagtaggatgaagccttgttttggg

SEQ ID NO: 707743 - DNA, 120 bp, Artificial Sequence
  ENSG00000196632_54 (sequence is synthesized)
tgagacagagggaaagggaaaaaacagaattgtaacagttccttgattctgcagatactgctgctgttttacgatttcagtaataattcaaagcagctgtctccttgtttctcacatgca

SEQ ID NO: 707744 - DNA, 120 bp, Artificial Sequence
  ENSG00000196632_55 (sequence is synthesized)
tactacattggttttgagcatctgagaggcattggtttgtcttgcattcttttgcaaggcatatattgcagctgatatgaatctcgtttggggggaatccttgtattcctaacaaggggg

SEQ ID NO: 707745 - DNA, 120 bp, Artificial Sequence
  ENSG00000196632_56 (sequence is synthesized)
attaaagctacacctcaatccattcttctgaagtgaaatttacttgacacagtaggtttcgagacttacatatgaaacactggctttacagggttctcagagatgtggggtatacactgt

SEQ ID NO: 707746 - DNA, 120 bp, Artificial Sequence
  ENSG00000196632_57 (sequence is synthesized)
cctgcagtgagatagtagaccctagaaggatactatttaagttgtccttagctctttttaattacaatttttagttgttagaatttctttttagtatctatagtatcttagatgatttta

SEQ ID NO: 707747 - DNA, 120 bp, Artificial Sequence
  ENSG00000196632_58 (sequence is synthesized)
gatcttaaatgagtttggcagcctctttagaatctgagagagatcactgtcaagttgcactttactgggttttatccagttttaggaggaggggaggcaatgtcaaaatgtacacctttg

SEQ ID NO: 707748 - DNA, 120 bp, Artificial Sequence
  ENSG00000196632_59 (sequence is synthesized)
gtttttaagaaggttaactataataatgttaaaggctagtcacagggttacctaatgctcagtctgtgaaacctaaatagaattcttaaaatgttatttaccaactaagtattcatgttc

SEQ ID NO: 707749 - DNA, 120 bp, Artificial Sequence
  ENSG00000196632_60 (sequence is synthesized)
aaattacttaccttccactctgaagactttaaggtcatttctaatacacatttacctaattaggagttctgtctactagtaaacattccaaattgctacccaacattactgttaacagat

SEQ ID NO: 707750 - DNA, 120 bp, Artificial Sequence
  ENSG00000196632_61 (sequence is synthesized)
tttcctccgtattcttctaaaaattataccccatgggcttgccaggtaatgacgaaaacttaatgggtgtacttttttttttttttgcacagtctactttgtgacattaagtacctcttt

SEQ ID NO: 707751 - DNA, 120 bp, Artificial Sequence
  ENSG00000196632_62 (sequence is synthesized)
tccaaaaaaaaaaaaaaatgtgttttatgttgcttacctgaggatcacatccattatcaagaagattctgtcgctataatttgaggcatctagggcagcattttgagaattgctgttgat

SEQ ID NO: 707752 - DNA, 120 bp, Artificial Sequence
  ENSG00000196632_63 (sequence is synthesized)
aagatccactgtttcttttcatagaacatgatctgttttgtatgagtctttccaaatgttaagtacagattcttcaaatttcttgtacagtattggtttgcagtttaaagtgattttagg

SEQ ID NO: 707753 - DNA, 120 bp, Artificial Sequence
  ENSG00000196632_64 (sequence is synthesized)
acattagtgtaatgcaaatgcttgcattgcactgttttccatatgtataaaaacaatgctcctaaaatccctaattctttaaaactgcctgtgtttcattataaaaagttggctttgtgt

SEQ ID NO: 707754 - DNA, 120 bp, Artificial Sequence
  ENSG00000196632_65 (sequence is synthesized)
aattacaccgagccatacaacctataaagtgaaaatactgcagattttaggaccccttcttctctagtcacaatcattttaaacagtgtaccccaggatgaaaaaagctccatggctgac

SEQ ID NO: 707755 - DNA, 120 bp, Artificial Sequence
  ENSG00000196632_66 (sequence is synthesized)
atgtacaattacatgtattaatgactgctctacatcctatgttctgcctttggccaccacctctattccacatataattcatcattcttgtttgcctgcagactcttgcagtgccttgta

SEQ ID NO: 707756 - DNA, 120 bp, Artificial Sequence
  ENSG00000196632_67 (sequence is synthesized)
atatttacaatcttttcaggtttttgctggaaagaaaagtagtcttctaaagtttgaagatggtgaatagtgtactgctgtctccatgctgactgcagtaaccgggttatcatatatgtt

SEQ ID NO: 707757 - DNA, 120 bp, Artificial Sequence
  ENSG00000196632_68 (sequence is synthesized)
atgtatacattatgtatatataacatgtgtacatttaaaaatacagaaaaaagtgagcttgtgcagaaatggagaaaacaatgttattctcatcactgtggggttttattaaaattattt

SEQ ID NO: 707758 - DNA, 120 bp, Artificial Sequence
  ENSG00000196632_69 (sequence is synthesized)
tttcccatgacttacatgtttggttcagattatagtcactttgactgtaaatactggctagttttctatccagggcttttgcattatttcataattttgctaaatcatataatagtgcta

SEQ ID NO: 707759 - DNA, 120 bp, Artificial Sequence
  ENSG00000196632_70 (sequence is synthesized)
ttttcatccttgtctgaggtacttttcctccccagaaataattaacttgaggtaaagctcagaaattcccttcttaacaaagagcctactatataaaaagggccttcctttccaaaaaac

SEQ ID NO: 707760 - DNA, 120 bp, Artificial Sequence
  ENSG00000196632_71 (sequence is synthesized)
acacaaacctgtccttttcattttccttcttgtagaggagaaaatggttgtacttaaccatcctgcttgtaaagtttattcagaggatagtctgtatgtccagccaccatgtttacttct

SEQ ID NO: 707761 - DNA, 120 bp, Artificial Sequence
  ENSG00000196632_72 (sequence is synthesized)
caaagtgcaagtctgatgaatagtactgtatctccatatgtggtaatgtgagcatttcatcatgaagtacctgctgctatgtctgtgaagttgggtgtaacatcataagaatatgaaacc

SEQ ID NO: 707762 - DNA, 120 bp, Artificial Sequence
  ENSG00000196632_73 (sequence is synthesized)
agtattggtgtaaatctaatgaaaataaccctatgtatatttgtagcagtcttgaatctctatttaaggtaatttgctgtaatataacaaatattcattctgtttttcatcccttccttg

SEQ ID NO: 707763 - DNA, 120 bp, Artificial Sequence
  ENSG00000196632_74 (sequence is synthesized)
ccagttttatatcaagcatgaattccaatggtttgacagcaaaattatctgtgaaagtttaaaaggcacttttctgctgtgatttttggattgagtgtggagtgttatgtacagtttgat

SEQ ID NO: 707764 - DNA, 120 bp, Artificial Sequence
  ENSG00000196632_75 (sequence is synthesized)
gggatatatcattttagaaccccagatttaattctagtccaattaattttgtttaactacctcgttttcagtgctgttttgggtgcacaagtaaacactacctgtgaaacttgctttttt

SEQ ID NO: 707765 - DNA, 120 bp, Artificial Sequence
  ENSG00000196632_76 (sequence is synthesized)
gccttgattctcagtattctttcagattataaatctggtctgcctcttttttcccagtgctagccaacagtttgagatgagagggatcatcactctcatctgtgtttaagtggagagcca

SEQ ID NO: 707766 - DNA, 120 bp, Artificial Sequence
  ENSG00000196632_77 (sequence is synthesized)
tgtgcttctgtgaaatatgctttggggatttgggggtggagagcagaagaataattgaaattggtggcaatataggatttaggtgtaggagttagttataaaataaacaaatggtaagaa

SEQ ID NO: 707767 - DNA, 120 bp, Artificial Sequence
  ENSG00000196632_78 (sequence is synthesized)
agtacctgaattagacaatccagtgcctataactttgcattttttattagagatgcatttctcgtctgtgtgcctaaagggcaatgggttgaaattgctttaactaccacagcgaaatat

SEQ ID NO: 707768 - DNA, 120 bp, Artificial Sequence
  ENSG00000196632_79 (sequence is synthesized)
ttgacaaatccttcagcaatggcctatcattcaacatatattagcacagtgctaggtatttgcagtggtattttgttaccttaaaacggccaaatgcatttagttgaaatgtagttgata

SEQ ID NO: 707769 - DNA, 120 bp, Artificial Sequence
  ENSG00000196632_80 (sequence is synthesized)
gtaagggttttatataactttatccaatctctaaagtttatggaagcattgactttcttctttgctgtcttttctgagtgatgaaaatgatgcattccttttttttccttgaaaactcag

SEQ ID NO: 707770 - DNA, 120 bp, Artificial Sequence
  ENSG00000196632_81 (sequence is synthesized)
caaatgtttgtaaccagatgttccttgtttcacatgtttactgtgtaacactacagcatatttaatattggtaaatactgtatttcagtcattatgcataagtacattcctgaggtatat

SEQ ID NO: 707771 - DNA, 120 bp, Artificial Sequence
  ENSG00000196632_82 (sequence is synthesized)
ttgccatcattttgggattcagttattttatcttctgtttgggtcagaaaaacttgaactatctgaggtggtatgcaggccattttctagaagattgttttttgaatctgtagtttatca

SEQ ID NO: 707772 - DNA, 120 bp, Artificial Sequence
  ENSG00000196632_83 (sequence is synthesized)
aggacttgttccccccctccctttgtttagaagaggaatcagaaaaggggggtggtgtgtagaaaaggcctttgatttgataggtgtaatttctaagattgaaattttaaaaatgcagat

SEQ ID NO: 707773 - DNA, 120 bp, Artificial Sequence
  ENSG00000196632_84 (sequence is synthesized)
cgtaagatagtaacactcaaacttgataaaatcctttgaattgaaattagtatgaaatttttatggaaccaaatgccttcaggtcaccctggaaatagtctttgtatgtgaaagatcaac

SEQ ID NO: 707774 - DNA, 120 bp, Artificial Sequence
  ENSG00000196632_85 (sequence is synthesized)
acaaacattggtcaggaaccctgacagccaatatatgaaggagcctgggatagtaactaggttacactaaagttattttcaactaagatagctagacgagtgtacaaaccaatagctcct

SEQ ID NO: 707775 - DNA, 120 bp, Artificial Sequence
  ENSG00000196632_86 (sequence is synthesized)
attctggaaggttttctttttattaaaaaaaattcaaacaaggttaaaagtcaagcaagaagggaagagagaaactgggttctgagaaaaaaatgtgccagtataaaataaactcctaaa

SEQ ID NO: 707776 - DNA, 120 bp, Artificial Sequence
  ENSG00000196632_87 (sequence is synthesized)
tgcgtgcttgtcatcctctagtttttttttaagttgaatttcttttccactgtaacttaagatttgagattgaggtttgcggtccagaacataccctcagcagatacagtgactaactgg

SEQ ID NO: 707777 - DNA, 120 bp, Artificial Sequence
  ENSG00000196632_88 (sequence is synthesized)
aaagtgcagttgttcaaggtctgtcatgctcaatcacctaaagctataatttgtttgatatattaagcatgtagacctagtgcagcatgggagccactcaggaagtttatgcaattaata

SEQ ID NO: 707778 - DNA, 120 bp, Artificial Sequence
  ENSG00000196632_89 (sequence is synthesized)
aactttcagcataatttactatgaagtatgcagaatttcaccctcttctccacacttaacatttagttgtatatgtgaactctcctttcttaattggggaatgtagcattatatagaatg

SEQ ID NO: 707779 - DNA, 120 bp, Artificial Sequence
  ENSG00000196632_90 (sequence is synthesized)
ttgttaaagttaattttaatcctttttgacattaacctttttttttttttggtaaaccaagtgatctgcctttcagcaactgtcttattttggttctttgaaactgtgatttttatttca

SEQ ID NO: 707780 - DNA, 120 bp, Artificial Sequence
  ENSG00000196632_91 (sequence is synthesized)
tttgtacccaaccattgtaagtattttgttttgtttcctggaaattctgttttgaaacagaaaataaaggctgtgttaaatgagtatgttatcttattaaaatgctgccatagtcactgc

SEQ ID NO: 707781 - DNA, 120 bp, Artificial Sequence
  ENSG00000196632_92 (sequence is synthesized)
gggggcgggggagacatgccgtggctgttgcccccgcaacgtaactgggaggccagtatttgtaaatcggtgcttcgacttctaatcccaaagccggcaggttgctatggaaatacatga

SEQ ID NO: 707782 - DNA, 120 bp, Artificial Sequence
  ENSG00000196636_0 (sequence is synthesized)
agcctgtgattggctgaagctcagctacttgtcacaagaatatactctcagttgcagttaatttacatactaagttaggttgcagttccctacatagcaactcagagtagggaggaaatt

SEQ ID NO: 707783 - DNA, 120 bp, Artificial Sequence
  ENSG00000196636_1 (sequence is synthesized)
ttaggccaaatttaatttaaattatgttggagcatgaccaaagttggtcatgaccagaagctgaacacagatatggaagctaacacaatatccagtggagagagattgtggtagagtaca

SEQ ID NO: 707784 - DNA, 120 bp, Artificial Sequence
  ENSG00000196636_2 (sequence is synthesized)
tggggcgaaatggttgatttctgcatttttgttggtgacgccatcaggatttgctgaagaaccaaacgtgtgacaggaaaggacaacacaaggagctgccagctttggaaaccagttcta

SEQ ID NO: 707785 - DNA, 120 bp, Artificial Sequence
  ENSG00000196636_3 (sequence is synthesized)
ctctcagtattaccttcgcaaaagatagagctttgtaaatttctagattcctcgttcttattatcctagactatttaaccagaatctccagggtcgtggtcctggaaacaatacgtttaa

SEQ ID NO: 707786 - DNA, 120 bp, Artificial Sequence
  ENSG00000196636_4 (sequence is synthesized)
aactcttcccaaggatccttcagcagccaacttgactttggctaaggagtccgccagctctgggctcacttgggttgtttgcaaggaagagcccatgcccagagtataaattgggagaac

SEQ ID NO: 707787 - DNA, 120 bp, Artificial Sequence
  ENSG00000196636_5 (sequence is synthesized)
agcgctgtgcaaagagcgtgggttggtgagctagtggatggcgagattaatctcactctgatccctaaagcagggtgcagtaatactctaaatgcctcaaatgggttgggaaccatggaa

SEQ ID NO: 707788 - DNA, 120 bp, Artificial Sequence
  ENSG00000196636_6 (sequence is synthesized)
ggaatcccggaggagcccgatcttaacgaagcttttctcaggcctttggtaggaggacagaaacgaagttgaatgaaaaagacagtggagtgggactgagaaatgacaacggcccaccac

SEQ ID NO: 707789 - DNA, 120 bp, Artificial Sequence
  ENSG00000196636_7 (sequence is synthesized)
agacctctctctttcaaggcctgtgtcgtcaggacgcaggccagaagaagccacgacgaggcgcaggcgcgactccacgagggccacgcccctcctagagaaggaccgacccgttttccg

SEQ ID NO: 707790 - DNA, 120 bp, Artificial Sequence
  ENSG00000196636_8 (sequence is synthesized)
tccgggaggacctgattgtgcaagggaccaaaccggatagaggtcgcgcgccctctttcgtctgccttccggttcactaatacgcaagttcgcagaagtgcgggaacgcgccgtccctct

SEQ ID NO: 707791 - DNA, 120 bp, Artificial Sequence
  ENSG00000196636_9 (sequence is synthesized)
gcgcaggcgcagtcggcggtcggcgtggggcgctatgccggggcggcacgtttctcgagtccgggcattgtacaagcgcgtcttgcagctgcaccgtgttctgcccccggacctcaaatc

SEQ ID NO: 707792 - DNA, 120 bp, Artificial Sequence
  ENSG00000196636_10 (sequence is synthesized)
cctgggcgaccagtacgtgaaagacgaatttaggagacataagaccgttggttctgacgaggcacagcgtttcttgcaagaatgggaggtgtatgcaacagcgttattgcaacaggctaa

SEQ ID NO: 707793 - DNA, 120 bp, Artificial Sequence
  ENSG00000196636_11 (sequence is synthesized)
cgaaaacagacaaaattcaactggaaaagcatgttttggcaccttcctcccagaagaaaaacttaatgactttcgtgatgaacaaattggacagttgcaggagctgatgcaagaagccac

SEQ ID NO: 707794 - DNA, 120 bp, Artificial Sequence
  ENSG00000196636_12 (sequence is synthesized)
aaaacccaataggcaatttagtatttctgagtctatgaaaccaaaattttagtctatacaacaaagcttaataagacatgcaaaaatttagaacccctactttaactgtcattggttttt

SEQ ID NO: 707795 - DNA, 120 bp, Artificial Sequence
  ENSG00000196636_13 (sequence is synthesized)
gaaatatatttaagctttgaaaacacctgttattaatgaaatactcttttattttggatattatgattgcagtatatggatcaagatcactagtgacaattgaaaaaaactattggaata

SEQ ID NO: 707796 - DNA, 120 bp, Artificial Sequence
  ENSG00000196636_14 (sequence is synthesized)
atagcacttgtatgaaattcagttttggaactaaacagcaaatttctagaattttgctgaaaatgttttaaaatgctattctcatccagccatattagtcttctggcttttctttagctt

SEQ ID NO: 707797 - DNA, 120 bp, Artificial Sequence
  ENSG00000196636_15 (sequence is synthesized)
catcaaataagcatgttgtgataatgatagatgtacaattccaacaaggttattattttttaaatacattgtcattctgaacattttatcacttctagtttaataatacatacatgattt

SEQ ID NO: 707798 - DNA, 120 bp, Artificial Sequence
  ENSG00000196636_16 (sequence is synthesized)
ttcttctgaatgtctcttctccctgcatcactgttcattcacaatgaaaggttaggaagaagctttaaaattcactattttactatcaatcatttgtataataaactatacaaagtataa

SEQ ID NO: 707799 - DNA, 120 bp, Artificial Sequence
  ENSG00000196636_17 (sequence is synthesized)
ttaaggaatttaagatcttgaagtggaaaaggcctagaagagccataactgctgagtcttggaaagaaaatgaaacagagtgtctgcatgcagtttccttaaggtacaaatgaacaccac

SEQ ID NO: 707800 - DNA, 120 bp, Artificial Sequence
  ENSG00000196639_0 (sequence is synthesized)
agtattggagtgttacagggagacatacaggatttaagaagcccatcatggagaagaccttcaattacagagataaaaagtttttcttgtgaacaagttacactagatggaagataacag

SEQ ID NO: 707801 - DNA, 120 bp, Artificial Sequence
  ENSG00000196639_1 (sequence is synthesized)
actgaggagtgagctgcttctgactcgattaaaaagggagtgagccataactggtggctgctcttgcgccaatgagcctccccaattcctcctgcctcttagaagacaagatgtgtgagg

SEQ ID NO: 707802 - DNA, 120 bp, Artificial Sequence
  ENSG00000196639_2 (sequence is synthesized)
gcaacaagaccactatggccagcccccagctgatgcccctggtggtggtcctgagcactatctgcttggtcacagtagggctcaacctgctggtgctgtatgccgtacggagtgagcgga

SEQ ID NO: 707803 - DNA, 120 bp, Artificial Sequence
  ENSG00000196639_3 (sequence is synthesized)
agctccacactgtggggaacctgtacatcgtcagcctctcggtggcggacttgatcgtgggtgccgtcgtcatgcctatgaacatcctctacctgctcatgtccaagtggtcactgggcc

SEQ ID NO: 707804 - DNA, 120 bp, Artificial Sequence
  ENSG00000196639_4 (sequence is synthesized)
gtcctctctgcctcttttggctttccatggactatgtggccagcacagcgtccattttcagtgtcttcatcctgtgcattgatcgctaccgctctgtccagcagcccctcaggtacctta

SEQ ID NO: 707805 - DNA, 120 bp, Artificial Sequence
  ENSG00000196639_5 (sequence is synthesized)
agtatcgtaccaagacccgagcctcggccaccattctgggggcctggtttctctcttttctgtgggttattcccattctaggctggaatcacttcatgcagcagacctcggtgcgccgag

SEQ ID NO: 707806 - DNA, 120 bp, Artificial Sequence
  ENSG00000196639_6 (sequence is synthesized)
aggacaagtgtgagacagacttctatgatgtcacctggttcaaggtcatgactgccatcatcaacttctacctgcccaccttgctcatgctctggttctatgccaagatctacaaggccg

SEQ ID NO: 707807 - DNA, 120 bp, Artificial Sequence
  ENSG00000196639_7 (sequence is synthesized)
tacgacaacactgccagcaccgggagctcatcaataggtccctcccttccttctcagaaattaagctgaggccagagaaccccaagggggatgccaagaaaccagggaaggagtctccct

SEQ ID NO: 707808 - DNA, 120 bp, Artificial Sequence
  ENSG00000196639_8 (sequence is synthesized)
gggaggttctgaaaaggaagccaaaagatgctggtggtggatctgtcttgaagtcaccatcccaaacccccaaggagatgaaatccccagttgtcttcagccaagaggatgatagagaag

SEQ ID NO: 707809 - DNA, 120 bp, Artificial Sequence
  ENSG00000196639_9 (sequence is synthesized)
tagacaaactctactgctttccacttgatattgtgcacatgcaggctgcggcagaggggagtagcagggactatgtagccgtcaaccggagccatggccagctcaagacagatgagcagg

SEQ ID NO: 707810 - DNA, 120 bp, Artificial Sequence
  ENSG00000196639_10 (sequence is synthesized)
gcctgaacacacatggggccagcgagatatcagaggatcagatgttaggtgatagccaatccttctctcgaacggactcagataccaccacagagacagcaccaggcaaaggcaaattga

SEQ ID NO: 707811 - DNA, 120 bp, Artificial Sequence
  ENSG00000196639_11 (sequence is synthesized)
ggagtgggtctaacacaggcctggattacatcaagtttacttggaagaggctccgctcgcattcaagacagtatgtatctgggttgcacatgaaccgcgaaaggaaggccgccaaacagt

SEQ ID NO: 707812 - DNA, 120 bp, Artificial Sequence
  ENSG00000196639_12 (sequence is synthesized)
tgggttttatcatggcagccttcatcctctgctggatcccttatttcatcttcttcatggtcattgccttctgcaagaactgttgcaatgaacatttgcacatgttcaccatctggctgg

SEQ ID NO: 707813 - DNA, 120 bp, Artificial Sequence
  ENSG00000196639_13 (sequence is synthesized)
gctacatcaactccacactgaaccccctcatctaccccttgtgcaatgagaacttcaagaagacattcaagagaattctgcatattcgctcctaagggaggctctgaggggatgcaacaa

SEQ ID NO: 707814 - DNA, 120 bp, Artificial Sequence
  ENSG00000196639_14 (sequence is synthesized)
aatgatccttatgatgtccaacaaggaaatagaggacgaaggcctgtgtgttgccaggcaggcacctgggctttctggaatccaaaccacagtcttaggggcttggtagtttggaaagtt

SEQ ID NO: 707815 - DNA, 120 bp, Artificial Sequence
  ENSG00000196639_15 (sequence is synthesized)
cttaggcaccatagaagaacagcagatggcggtgatcagcagagagattgaactttgaggaggaagcagaatctttgcaagaaagtcagacctgtttcttgtaactgggttcaaaaagaa

SEQ ID NO: 707816 - DNA, 120 bp, Artificial Sequence
  ENSG00000196639_16 (sequence is synthesized)
aaaaataataaaaataaaagagagagagaatcagacctgggtggaactctcctgctcctcaggaactatgggagcctcagactcattgtaattcaagctttccgagtcaagtgattgaca

SEQ ID NO: 707817 - DNA, 120 bp, Artificial Sequence
  ENSG00000196639_17 (sequence is synthesized)
actgaagagacacgtggctagggttccactggagaattgaaaaggactcttgagccctcctggaatggagctgtataactgtgcagagactttatccatgccaatagttgctgtcccctt

SEQ ID NO: 707818 - DNA, 120 bp, Artificial Sequence
  ENSG00000196639_18 (sequence is synthesized)
ccaggggtcaccttgagaggcatgacagctgttccacaggggctatcccttctcagaaaacttctcttctgagcctctttaacagctttctccagaaccagtgtctgaaccaccctggaa

SEQ ID NO: 707819 - DNA, 120 bp, Artificial Sequence
  ENSG00000196639_19 (sequence is synthesized)
tttagagtggatagaaaattatgcagcttgcacacccatcgtctttaaccccaaatttcctttggctattaaaaaagtggtggcaaaagacatcctcaaaagaaagagaaatgaaatatt

SEQ ID NO: 707820 - DNA, 120 bp, Artificial Sequence
  ENSG00000196639_20 (sequence is synthesized)
tttgaatggttgcacgttaaaaattaaaagaaggaatgggggcagaatgccatatttttgagggctgtactaggtttatctcatttaagccccacaacaccccacaggagggtaattttc

SEQ ID NO: 707821 - DNA, 120 bp, Artificial Sequence
  ENSG00000196639_21 (sequence is synthesized)
taactctagtttgcagaggagcaaattgaggttcagcaaggtgagagaggtacccaaggtcacatagctagttatgtgagaaagttagagtacagatcctctggggtttcagcttattgt

SEQ ID NO: 707822 - DNA, 120 bp, Artificial Sequence
  ENSG00000196639_22 (sequence is synthesized)
tcagcttattgtagcatattttctccgaaaggcaaaaatgtgcccttttggccgggcatggtagctcaagcctataatcccagcatgttgagaggctgaggtgggcagatcatttgaggc

SEQ ID NO: 707823 - DNA, 120 bp, Artificial Sequence
  ENSG00000196639_23 (sequence is synthesized)
accagtctggccaatatggagaaaccttgtctctactaaaaacacaaaaattatctgggcatggtggggcatgcctgtagtcccacttacttgggaggccgaggcacgagaattgcttga

SEQ ID NO: 707824 - DNA, 69 bp, Artificial Sequence
  ENSG00000196639_24 (sequence is synthesized)
acaatattttaacaatgtgccctcttaagtgtgcacagatacacatacacggtattcccaagagtggtg

SEQ ID NO: 707825 - DNA, 120 bp, Artificial Sequence
  ENSG00000196639_25 (sequence is synthesized)
tgtgcacagatacacatacacggtattcccaagagtggtggcagctcaaaatgatatgtttgagtagacgaacagctgacatggagttcccgtgcacctacggaaggggacgctttgaag

SEQ ID NO: 707826 - DNA, 120 bp, Artificial Sequence
  ENSG00000196639_26 (sequence is synthesized)
gaaccaagtgcatttttatctgtgagttctgttgtgtttgtcaaaaagtcattgtaatctttcatagccatacctggtaagcaaaaactagtaaagacataggaacatgtagttttactt

SEQ ID NO: 707827 - DNA, 120 bp, Artificial Sequence
  ENSG00000196639_27 (sequence is synthesized)
ggtgtttatgttgcaatctggttgtgatttatattttaaagcttggtgctaaaccacaatatgtatagcatatggagtgcctgtacaagctgatgttttgtattttgtgttcctctttgc

SEQ ID NO: 707828 - DNA, 120 bp, Artificial Sequence
  ENSG00000196639_28 (sequence is synthesized)
atgatctgtcaaagtgagatatttttacctgcctaaaatatgatgtttaaaagcatactctatgtgatttatttatttctacctttctgagtctcttggactaagaagatgttttgaaat

SEQ ID NO: 707829 - DNA, 120 bp, Artificial Sequence
  ENSG00000196639_29 (sequence is synthesized)
gtaccatcaaatgttaacagagtttgatatgggctttctctttggtttctcatcacatttgtaaatgtcttttcaaaaggatttactttttgtaaaaagcttcattctcactctgctttg

SEQ ID NO: 707830 - DNA, 120 bp, Artificial Sequence
  ENSG00000196639_30 (sequence is synthesized)
catcccccaaacttcttgttcaaaacggggggagtttaggagactttaatcccggtttcagaagctgcagctggtctgtttccaggtcagaaaccattgttcagaagacctccctgtgag

SEQ ID NO: 707831 - DNA, 120 bp, Artificial Sequence
  ENSG00000196639_31 (sequence is synthesized)
agagttgctcctcagggtccctcaggaccaaagaacactcgaaaagagcacttcacacagacaagtggctaagtgtccattatttaccttgaacaatcaaggcaactagtggagagaact

SEQ ID NO: 707832 - DNA, 120 bp, Artificial Sequence
  ENSG00000196639_32 (sequence is synthesized)
gattgtgagctctgcctctgggtcagagagacctggatttgagtctgacaagaacaagaaatggtcaataaatataaattaccagcgtctaaggaacaaggtctatgcattattgtatac

SEQ ID NO: 707833 - DNA, 120 bp, Artificial Sequence
  ENSG00000196639_33 (sequence is synthesized)
agtgtctctagtgcttgtatagtgtctggtatacagagggcactcctatgcatttttaaaacatgctgagcacataccatgtgccaggctttgtgttttatctaatgttatctaatggta

SEQ ID NO: 707834 - DNA, 120 bp, Artificial Sequence
  ENSG00000196639_34 (sequence is synthesized)
ttggtgccattatgtaatgttgcctttacaacaacctcatgagggagatttccatctttacaaataggcaaactgaggcccagagagattgaggaactgctccgaggtctgattctggaa

SEQ ID NO: 707835 - DNA, 120 bp, Artificial Sequence
  ENSG00000196639_35 (sequence is synthesized)
tgtgcttcctttccactttatcaatctgctcttcgtactcctgtctgaacgatggaaattaatttttgaatgtataaaagacaacagactatgatacagaaatgtcagccccagcccact

SEQ ID NO: 707836 - DNA, 120 bp, Artificial Sequence
  ENSG00000196639_36 (sequence is synthesized)
aagaaagccccagcccatcagtggctaatggctttaataaattggtcatttggctacttggcttgtggacaatctctgacctcttttgaagatgggcactgcatggacttccaggaggtg

SEQ ID NO: 707837 - DNA, 120 bp, Artificial Sequence
  ENSG00000196639_37 (sequence is synthesized)
aggaggtggatttaatagtcttaactcagcatgaaaaagatgctgggatgctcctggctatttatgcaccctaagtgccatagagacatgctgttggcaaggcatggtggctcatgcctg

SEQ ID NO: 707838 - DNA, 76 bp, Artificial Sequence
  ENSG00000196639_38 (sequence is synthesized)
cctgtaatcccagcacactgggaggctgacgcgggcagatggctggagtccaggagttcgagacaagcctgggcac

SEQ ID NO: 707839 - DNA, 120 bp, Artificial Sequence
  ENSG00000196639_39 (sequence is synthesized)
atttcaaagcacaccatgccggcagcacttggaggtggtatgtgctgggaaactgaccaacagtttagtcagactgagtcacttcaaggaggggagtggagacagcagtgggtgccagat

SEQ ID NO: 707840 - DNA, 120 bp, Artificial Sequence
  ENSG00000196639_40 (sequence is synthesized)
gacacggagctgtcggcttccgtgtgcattttcttttgatagtagccgtagagaagttgtccgccaggcagccctcaatgggatttttcatttaagaaaaatcactctgctcgtgcactg

SEQ ID NO: 707841 - DNA, 120 bp, Artificial Sequence
  ENSG00000196639_41 (sequence is synthesized)
ttcccggcaggagagcagcatttgtaaaggtatggggtgtacacgagcagggcctatttggggagagtggagaatcagagatgaggctgcacagtaaggtgagaccaggtggaaaaagct

SEQ ID NO: 707842 - DNA, 120 bp, Artificial Sequence
  ENSG00000196639_42 (sequence is synthesized)
ctgtgtgatgggtcgaaggtattgacatatactagccactgcccggcaccctccctccgtttccggagtagacctgtttgcttatctcgtgggcatttgccaggctgattagagtaatga

SEQ ID NO: 707843 - DNA, 120 bp, Artificial Sequence
  ENSG00000196639_43 (sequence is synthesized)
aagaagggaaaagggaattaaaggggaaccaaggcaacctgaagtttttgagagagagagcaggaagatttgaggatgagcaggtgatgctgtagctggcgctatgtagcgacagatggg

SEQ ID NO: 707844 - DNA, 120 bp, Artificial Sequence
  ENSG00000196639_44 (sequence is synthesized)
agaagttctttgtgatggttttgcctctttgagagtcttcagtaaagggagtgagccataactggtggctgctcttgcgccaatgagcctccccaattcctcctgcctcttagaagacaa

SEQ ID NO: 707845 - DNA, 80 bp, Artificial Sequence
  ENSG00000196642_0 (sequence is synthesized)
agatggcggcgctgactcctggagagcggtcgcgccggaggccgcgggggccggagcggagcagccgcggctgaggttcc

SEQ ID NO: 707846 - DNA, 120 bp, Artificial Sequence
  ENSG00000196642_1 (sequence is synthesized)
cgggggggccggggccgccgggacatggtgccagtcgcaccccttccccgccgccgctgagctcgccggccgcgcccgggctgggacgtccgagcgggaagatgttttccgccctgaaga

SEQ ID NO: 707847 - DNA, 120 bp, Artificial Sequence
  ENSG00000196642_2 (sequence is synthesized)
agcgggaagatgttttccgccctgaagaagctggtggggtcggaccaggccccgggccgggacaagaacatccccgccgggctgcagtccatgaaccaggcgttgcagaggcgcttcgcc

SEQ ID NO: 707848 - DNA, 120 bp, Artificial Sequence
  ENSG00000196642_3 (sequence is synthesized)
aagggggtgcagtacaacatgaagatagtgatccggggagacaggaacacgggcaagacagcgctgtggcaccgcctgcagggccggccgttcgtggaggagtacatccccacacaggag

SEQ ID NO: 707849 - DNA, 120 bp, Artificial Sequence
  ENSG00000196642_4 (sequence is synthesized)
atccaggtcaccagcatccactggagctacaagaccacggatgacatcgtgaaggttgaagtctgggatgtagtagacaaaggaaaatgcaaaaagcgaggcgacggcttaaagatggag

SEQ ID NO: 707850 - DNA, 120 bp, Artificial Sequence
  ENSG00000196642_5 (sequence is synthesized)
aacgacccccaggaggcggagtctgaaatggccctggatgctgagttcctggacgtgtacaagaactgcaacggggtggtcatgatgttcgacattaccaagcagtggaccttcaattac

SEQ ID NO: 707851 - DNA, 120 bp, Artificial Sequence
  ENSG00000196642_6 (sequence is synthesized)
attctccgggagcttccaaaagtgcccacccacgtgccagtgtgcgtgctgggaaactaccgggacatgggcgagcaccgagtcatcctgccggacgacgtgcgtgacttcatcgacaac

SEQ ID NO: 707852 - DNA, 120 bp, Artificial Sequence
  ENSG00000196642_7 (sequence is synthesized)
ctggacagacctccaggttcctcctacttccgctatgctgagtcttccatgaagaacagcttcggcctaaagtaccttcataagttcttcaatatcccatttttgcagcttcagagggag

SEQ ID NO: 707853 - DNA, 120 bp, Artificial Sequence
  ENSG00000196642_8 (sequence is synthesized)
acgctgttgcggcagctggagacgaaccagctggacatggacgccacgctggaggagctgtcggtgcagcaggagacggaggaccagaactacggcatcttcctggagatgatggaggct

SEQ ID NO: 707854 - DNA, 120 bp, Artificial Sequence
  ENSG00000196642_9 (sequence is synthesized)
cgcagccgtggccatgcgtccccactggcggccaacgggcagagcccatccccgggctcccagtcaccagtggtgcctgcaggcgctgtgtccacggggagctccagccccggcacaccc

SEQ ID NO: 707855 - DNA, 120 bp, Artificial Sequence
  ENSG00000196642_10 (sequence is synthesized)
cagcccgccccacagctgcccctcaatgccgccccaccatcctctgtgccccctgtaccaccctcagaggccctgcccccacctgcgtgcccctcagcccccgccccacggcgcagcatc

SEQ ID NO: 707856 - DNA, 120 bp, Artificial Sequence
  ENSG00000196642_11 (sequence is synthesized)
atctctaggctgtttgggacgtcacctgccaccgaggcagcccctccacctccagagccagtcccggccgcagagggcccagcaacggtccagagtgtggaggactttgttcctgacgac

SEQ ID NO: 707857 - DNA, 120 bp, Artificial Sequence
  ENSG00000196642_12 (sequence is synthesized)
gggcggcaacccgatggtggcagggttccaggacgatgtggacctcgaagaccagccacgtgggagtcccccgctgcctgcaggccccgtccccagtcaagacatcactctttcgagtga

SEQ ID NO: 707858 - DNA, 120 bp, Artificial Sequence
  ENSG00000196642_13 (sequence is synthesized)
ggaggaagcagaagtggcagctcccacaaaaggccctgccccagctccccagcagtgctcagagccagagaccaagtggtcctccataccagcttcgaagccacggagggggacagctcc

SEQ ID NO: 707859 - DNA, 120 bp, Artificial Sequence
  ENSG00000196642_14 (sequence is synthesized)
cacgaggaccgcagcacccccctggccaggcggtgtctctgttcgcacaggtccggagaagcgcagcagcaccaggccccctgctgagatggagccggggaagggtgagcaggcctcctc

SEQ ID NO: 707860 - DNA, 120 bp, Artificial Sequence
  ENSG00000196642_15 (sequence is synthesized)
gtcggagagtgaccccgagggacccattgctgcacaaatgctgtccttcgtcatggatgaccccgactttgagagcgagggatcagacacacagcgcagggcggatgactttcccgtgcg

SEQ ID NO: 707861 - DNA, 120 bp, Artificial Sequence
  ENSG00000196642_16 (sequence is synthesized)
agatgacccctccgatgtgactgacgaggatgagggccctgccgagccgcccccaccccccaagctccctctccccgccttcagactgaagaatgactcggacctcttcgggctggggct

SEQ ID NO: 707862 - DNA, 120 bp, Artificial Sequence
  ENSG00000196642_17 (sequence is synthesized)
ggaggaggccggacccaaggagagcagtgaggaaggtaaggagggcaaaaccccctctaaggagaagaagaagaagaagaaaaaaggcaaagaggaagaagaaaaagctgccaagaagaa

SEQ ID NO: 707863 - DNA, 120 bp, Artificial Sequence
  ENSG00000196642_18 (sequence is synthesized)
gagcaaacacaagaagagcaaggacaaggaggagggcaaggaggagcggcgacggcggcagcagcggcccccgcgcagcagggagaggacggctgccgatgagctggaggctttcctggg

SEQ ID NO: 707864 - DNA, 120 bp, Artificial Sequence
  ENSG00000196642_19 (sequence is synthesized)
ccccgggcggccgccaccctgggggtggcgactacgaggagctctaggccggcgtgggcagtggccgccctggggcggggggcgtgcctgtcactgcctggggaggcatttgcctctgta

SEQ ID NO: 707865 - DNA, 120 bp, Artificial Sequence
  ENSG00000196642_20 (sequence is synthesized)
cctctgtaccatcgcctttgccgctgccccgtggctgccgtgtgcgcttctgagctggaagaggccgggcattggtggtccccaggctgggccctgcaggtgctgggccttcaggcccag

SEQ ID NO: 707866 - DNA, 120 bp, Artificial Sequence
  ENSG00000196642_21 (sequence is synthesized)
tgtgagcctgctctgcaagaagggaggggacagctggcttcagccaggctcggtggacaccctggccctctcggggcagagccgccagtgtttctcagggatgtgactgaggcccaggag

SEQ ID NO: 707867 - DNA, 120 bp, Artificial Sequence
  ENSG00000196642_22 (sequence is synthesized)
ggacctgtgagggtctgtttacagaggctgggcaggggccgcttggctgtggggtgtgcgctgccccggcacctgcttgccctccgcgctcatctggggccgcagcatgcctatggttcc

SEQ ID NO: 707868 - DNA, 120 bp, Artificial Sequence
  ENSG00000196642_23 (sequence is synthesized)
gcttccggccgggagccctgaacacgggtgtgcagactcaccctaaagggcggcccaggccccacgctagaaggctggcgagaccgaaggcagcatgtgaggcctctcctgggagtgggg

SEQ ID NO: 707869 - DNA, 120 bp, Artificial Sequence
  ENSG00000196642_24 (sequence is synthesized)
gttgtgtttcccacagtggcctcagctgcgcccccgctcaggtgagcccgaaggcaggagccgggaggcactcctcccaaacactccactcagaccataaagcactcctgtttcactctg

SEQ ID NO: 707870 - DNA, 120 bp, Artificial Sequence
  ENSG00000196642_25 (sequence is synthesized)
gaaaggggctgtgctgtcgtcctggtgtcagaagaagtgaggatgcctgcaggctgggactgctgctggggacgtttgggttggaaggaaggcggcagtcagacttgtcctgtgccggca

SEQ ID NO: 707871 - DNA, 120 bp, Artificial Sequence
  ENSG00000196642_26 (sequence is synthesized)
ctgctggggaggcccctccttcctgcagagccgtcccctcatcactgggttgattactccttagagagctccccactgctcagctgctccattccctaatggtttgccctccaaaccctt

SEQ ID NO: 707872 - DNA, 120 bp, Artificial Sequence
  ENSG00000196642_27 (sequence is synthesized)
ccaaagcctcccagggagagaacgggaccctggacagagtcttgagctggaagcgtagggctgagctgtgtgtgactatccttttgctatggatgtgttcaagcagatctgatgtcctcg

SEQ ID NO: 707873 - DNA, 120 bp, Artificial Sequence
  ENSG00000196642_28 (sequence is synthesized)
cctgtctcagcagcgggacccctgtttcctctttgtcttgcccctggattgcctggaagcaaatttcaggccttctttatgtcacctaaaaatatttcaaacacatctctaaaaaaatca

SEQ ID NO: 707874 - DNA, 120 bp, Artificial Sequence
  ENSG00000196642_29 (sequence is synthesized)
gttgtttttttaacctgaccgtagtacctaatgtaataccgcatgttaaactcacagaaggtttttcttggagaaataagccacaataacaaattgaaaaaataaaattcccaaagagtt

SEQ ID NO: 707875 - DNA, 120 bp, Artificial Sequence
  ENSG00000196642_30 (sequence is synthesized)
actcccgggaaagacccggagacgggaccaccgcatgtggaaaccaccgggaagcacagcgcgtgggccgcctgagcggtgccggggcggggaggcagggccgccgctcaggccgtggac

SEQ ID NO: 707876 - DNA, 120 bp, Artificial Sequence
  ENSG00000196642_31 (sequence is synthesized)
ctcggggccgcgggacggacgtggatggcgccgccgttctctcgcgggcccagcgaggctatgcgtgcgcggcccgggcagtctctgcgagcccgggctgctgctcatctgggggggacg

SEQ ID NO: 707877 - DNA, 80 bp, Artificial Sequence
  ENSG00000196642_32 (sequence is synthesized)
gacggcggccgcccgactgagcccagagctgtgggccgcgcccgggttcctgcctcgggccggaggagggagggcgccgc

SEQ ID NO: 707878 - DNA, 120 bp, Artificial Sequence
  ENSG00000196642_33 (sequence is synthesized)
tggctgcgctgagcgcctgcggctccgcttggggctgctgtgctctccacaggccgggccgccgggctggagggcgctgcaggcggcctctgttctccaagttctccgcgggagagggag

SEQ ID NO: 707879 - DNA, 120 bp, Artificial Sequence
  ENSG00000196642_34 (sequence is synthesized)
ccttccgcggggtgggctcggccgggagaagcgcggagcctcctggctgcccccagccggtgcggccgccaccgtggccgtgagggcgcctgggtcccctctggaggttttgccgcagcg

SEQ ID NO: 707880 - DNA, 120 bp, Artificial Sequence
  ENSG00000196642_35 (sequence is synthesized)
aggttttgccgcagcgctggccggcgccgagatatgaccagaggcgttgaaagttggcgcgttgaggtacctaggatgggcgaggaaatgaacaagcttcaggggagaagaaatgactgt

SEQ ID NO: 707881 - DNA, 120 bp, Artificial Sequence
  ENSG00000196642_36 (sequence is synthesized)
gttcccgcaggggtgctgggcccctgcggctcccaccacattgcgctggactcttgtggcccgtgctgacctggtgttccagatgctgtctctgcagagctctgcgtggtctctggtgtt

SEQ ID NO: 707882 - DNA, 120 bp, Artificial Sequence
  ENSG00000196642_37 (sequence is synthesized)
agagaggtggccacccaccgccctatcattgtcctcatccccactgtgaggagaagctatcagatctgcctgtggcccccaggtggctcaggaagggccgtcctgacccccatcctggcc

SEQ ID NO: 707883 - DNA, 120 bp, Artificial Sequence
  ENSG00000196642_38 (sequence is synthesized)
cctttcggagctgcagagatttcctgtgcctccagctctggcttcctgggtctgtccttggcgtggagcgggcacaggcttcccgtagacacggttgcccagagtggggttcataactgg

SEQ ID NO: 707884 - DNA, 120 bp, Artificial Sequence
  ENSG00000196642_39 (sequence is synthesized)
gcactgtaaagggtgtggtctccacggcttaggatgggcccccccttcctggtggcctgctgtgcccggggctggtgtggaggcctgtgggtgcagaggccgcctggccctgggcttcct

SEQ ID NO: 707885 - DNA, 120 bp, Artificial Sequence
  ENSG00000196642_40 (sequence is synthesized)
ctggggttacatgtgtacccttgcacccacctgttagcacccaccgggagagtctcactcagcctaaaccagggcccctcaggaggaaaaggtccccagcttcatgatggggcccagtgt

SEQ ID NO: 707886 - DNA, 120 bp, Artificial Sequence
  ENSG00000196642_41 (sequence is synthesized)
gccttccatccccgccctgactcagtgcccactgtgcgaggtgtgagcactgtccacagcagccagggcggccggtggggagtgcattggagggggttgaggtctcttgggcacctggtg

SEQ ID NO: 707887 - DNA, 120 bp, Artificial Sequence
  ENSG00000196642_42 (sequence is synthesized)
agttctcaagggtgagaggaagccgaggccatcaggcttagctgacgctgcatggggcaggctgccaagagggaggctgaatggagcagcctcaggtgagccgacaatcctcacctccgc

SEQ ID NO: 707888 - DNA, 120 bp, Artificial Sequence
  ENSG00000196642_43 (sequence is synthesized)
ctggtcagccaggacccggctcccctccagtcccgcctgctttccccaaagcagatccagccagtctcaatggctcgcccggggggtgctggttaggctgtgagcatccttcctgggtgc

SEQ ID NO: 707889 - DNA, 120 bp, Artificial Sequence
  ENSG00000196642_44 (sequence is synthesized)
aggcccccgacagccagcagtgctgtgctgtgtgtgtgttggggactctgctgagccctttgtggccagactggggaggctcctccgggctggctctgtcccctgtaccttgtgagggag

SEQ ID NO: 707890 - DNA, 120 bp, Artificial Sequence
  ENSG00000196642_45 (sequence is synthesized)
gggctgaccccctgactgggttacatcgtggtgagcagttcagaaacaagctgtggaatgaagtggacgtggcgttttaaacacatgagccccatctgttcttaggggttttgtttgttg

SEQ ID NO: 707891 - DNA, 120 bp, Artificial Sequence
  ENSG00000196642_46 (sequence is synthesized)
tcccagtccgtgactccaagactgggacccccagagttcccaggatggtctggagcctttatcctcaggtcagcattgtggagttaaagggaggggaccacggcccctcattctcaggag

SEQ ID NO: 707892 - DNA, 120 bp, Artificial Sequence
  ENSG00000196642_47 (sequence is synthesized)
agccatggtgaccttgatggcggaggctcagggggacctggaccgtggacaccacacagctgccctcctccctcccgaggccatttcagggctggaatccctgcccccctctcctttcct

SEQ ID NO: 707893 - DNA, 120 bp, Artificial Sequence
  ENSG00000196642_48 (sequence is synthesized)
cccgggctggttgttgccttgagagtccgtgcgctcatctccccacttttaccccagggggaggcccctcaccttcccaccatatcccttgtacttcctcccaccctggacttgggggag

SEQ ID NO: 707894 - DNA, 120 bp, Artificial Sequence
  ENSG00000196642_49 (sequence is synthesized)
ctggggggagggggcccttccttcagcagcaaaccctcctggtgtagggctgtaggccatcccaccgcagcctgtccaggagctgctgagcctgtcagccccaactagcacctcctgtcc

SEQ ID NO: 707895 - DNA, 120 bp, Artificial Sequence
  ENSG00000196642_50 (sequence is synthesized)
aggcccggcccagccctgcctccagagcctacagaggggcctcgcccaggtcctgctgctccagagcttgtgggtgcccacgctgcaggctgtttggggtggtggagtagagcacccgct

SEQ ID NO: 707896 - DNA, 120 bp, Artificial Sequence
  ENSG00000196642_51 (sequence is synthesized)
ggagctgggggctgagtggccatggggggaccatgctcctcctatggcccaaggcccaggggttccacctcgtaatttttgtttgtttttaaataaggaaaatgcaaaaagcgaggcgac

SEQ ID NO: 707897 - DNA, 120 bp, Artificial Sequence
  ENSG00000196642_52 (sequence is synthesized)
gttaacgttagcatggggcccggcggatgtgggtctcgccgctgagtggggctcactgaagcctgggtctccccgatggcagggccgggaactgtgtgctggggaactgtgtgccagggt

SEQ ID NO: 707898 - DNA, 120 bp, Artificial Sequence
  ENSG00000196642_53 (sequence is synthesized)
gaagtgctggcactgtggggtcacctgcagaagggcactcggcttagctgcttagcagggctcagcagggtcctgtggcctcaggagcctgcaggaggagggagggcagtgcggacccac

SEQ ID NO: 707899 - DNA, 120 bp, Artificial Sequence
  ENSG00000196642_54 (sequence is synthesized)
caccaaggagacagcagaggggagtgtcccctgtttggggtaaattagtcacctttgggcacgggtggaggaggactcaggtttgcactgcccccagcagcccccccacagtcacccctg

SEQ ID NO: 707900 - DNA, 120 bp, Artificial Sequence
  ENSG00000196642_55 (sequence is synthesized)
gcgtggactcctcatacaggtcatgctgtgcctgccactctgagtaccgctgaccgtggccaggtgctggtgctcatggagtgctgctggggctgcctgcccatcaggggcttggcctcc

SEQ ID NO: 707901 - DNA, 120 bp, Artificial Sequence
  ENSG00000196642_56 (sequence is synthesized)
cagattgatgccagcatggggtgtgctttctggggagctgcttgactttgggaagctccctgtgttgaagaggcatacaggccaggacatggaggtctctggtcctcgatagcagagggc

SEQ ID NO: 707902 - DNA, 120 bp, Artificial Sequence
  ENSG00000196642_57 (sequence is synthesized)
ggctcagagcatcctcctgagtgggcctgggcagtgcatagccccggggttgcggccagtgggacagctggcccgttctctgcctcaggctcctgtacagctaggggcttggtgcctccc

SEQ ID NO: 707903 - DNA, 120 bp, Artificial Sequence
  ENSG00000196642_58 (sequence is synthesized)
ctgggacccaggcagggaccacggaatcagtggccctcctgaggccccccaggaggtctctgtttccagaaggagagccctgtgggtcaccttggatctggctgttggctcagacacagc

SEQ ID NO: 707904 - DNA, 120 bp, Artificial Sequence
  ENSG00000196642_59 (sequence is synthesized)
aagagaccgagagggaaggcagtttgatgcctggagagggacccgtggcttccagctgccaggccagccccagaatggagccccccgcatgggcgcttctctgttgaaccaatcctggca

SEQ ID NO: 707905 - DNA, 120 bp, Artificial Sequence
  ENSG00000196642_60 (sequence is synthesized)
tttcctgggcctgagagttgggtcagctggatgctgcgatggccgcacgtgctccaccaagccccagccccctcctcttcccagaaacccccgctcacgggaaggtccagttgctgccat

SEQ ID NO: 707906 - DNA, 120 bp, Artificial Sequence
  ENSG00000196642_61 (sequence is synthesized)
ctggccacctctgcatggagcccccaacagctgtgcctcagaacagatccgaagtgactttcaggggagctggacacatgtacgctggtgcctgctgtccccaccctttggcactgctgc

SEQ ID NO: 707907 - DNA, 120 bp, Artificial Sequence
  ENSG00000196642_62 (sequence is synthesized)
ctggatcacctgaggtcaggagttcgtgaggctccggcgtttgtatttcatttgaatctaaagtgagcagccacagggacccgcagctcatcagaccagcctggggttccaggccaggag

SEQ ID NO: 707908 - DNA, 120 bp, Artificial Sequence
  ENSG00000196642_63 (sequence is synthesized)
ggcagtggtttgctccagagccagctgcttgtgggtgtgggacggtggcgacgcgtgcaccggggatgtgtcctgccaccagaggaggtgtgcgtggcggggagcagaggggctttgttt

SEQ ID NO: 707909 - DNA, 120 bp, Artificial Sequence
  ENSG00000196642_64 (sequence is synthesized)
cccaggtgaaggtgcggcttcttcactcttagaggtgcgtgtgtgggtgggggtgcttgctgttgaggtttatgcctgtgactgacagctgtcccccaagccatgctggcagtgtgtagg

SEQ ID NO: 707910 - DNA, 120 bp, Artificial Sequence
  ENSG00000196642_65 (sequence is synthesized)
tgtcgtgccggccaccgcagaggaatcctctgggcttctgtggttcaagtggggcccagcgcagagctccatgagttgctgagcagccagccctgcagcatctcctggttttggcagcag

SEQ ID NO: 707911 - DNA, 120 bp, Artificial Sequence
  ENSG00000196642_66 (sequence is synthesized)
gaggcgtcccctgtgcattcaggggctgtggggctggggcactcgcagcaggaaggagccctgctcaggcctgcgtgctccctttctgcagagggagacgctgttgcggcagctggagac

SEQ ID NO: 707912 - DNA, 120 bp, Artificial Sequence
  ENSG00000196642_67 (sequence is synthesized)
ctgctgcccttggaagtggatggggatgatggcctctgtggggcgggtggcccagaacacagtggctcttcccagccccagcagcagcagcagagagccccctgtcacctgagggcctca

SEQ ID NO: 707913 - DNA, 120 bp, Artificial Sequence
  ENSG00000196642_68 (sequence is synthesized)
gagtggctgctggtctctcacctccttccaggtgtctcctgtgtagcaacgggtctccctcctaacccctgagaaagctgtggacctgctcggagattggctgctggcaagggcccagcg

SEQ ID NO: 707914 - DNA, 120 bp, Artificial Sequence
  ENSG00000196642_69 (sequence is synthesized)
ttctactgcacctgcctgctctgggtggcagagggtacagggtcctgagggctagacccagtcccaggagcccctccacctctgcggggaccccttgctcagtttcccccagtgtttttg

SEQ ID NO: 707915 - DNA, 83 bp, Artificial Sequence
  ENSG00000196642_70 (sequence is synthesized)
ggcctcaaactccggggctcaggcaatcctcccacctgtctcccaaagtgctgggatgccaggcgtgagtcaccgaggtactc

SEQ ID NO: 707916 - DNA, 120 bp, Artificial Sequence
  ENSG00000196642_71 (sequence is synthesized)
caaagtgctgggatgccaggcgtgagtcaccgaggtactcgctgttcacatctcacatttccctggtgcttgtgtcaaaaccaaggaaccaactttggcctacggactaaactcactttc

SEQ ID NO: 707917 - DNA, 120 bp, Artificial Sequence
  ENSG00000196642_72 (sequence is synthesized)
ctttgtagaaacaagggccaggccagctgtggctgcaaagtagcccagcaaatgatgaggcttgaacctcctcgccctgggctgccctgattgggtctgggggacctgaacctcctcgcc

SEQ ID NO: 707918 - DNA, 85 bp, Artificial Sequence
  ENSG00000196642_73 (sequence is synthesized)
ggctgccccagctggaccgcctgggtctgggggacctgaacctccttgcctgggctgccccgcctgggtctgggggacctgaacc

SEQ ID NO: 707919 - DNA, 80 bp, Artificial Sequence
  ENSG00000196642_74 (sequence is synthesized)
ccccgcccagctgggtctgggggacctgtacctcctcgccctgggctgccccgcctgggtctgggggacctgaacctcct

SEQ ID NO: 707920 - DNA, 89 bp, Artificial Sequence
  ENSG00000196642_75 (sequence is synthesized)
cctgaacctcctcgccctgggctgccccgactgggtctgggggacctgaatctcctcaccctgggctgccccagctgggtctccagctg

SEQ ID NO: 707921 - DNA, 120 bp, Artificial Sequence
  ENSG00000196642_76 (sequence is synthesized)
ggacctgaacctcctcgccctgggctgccccgactgggtctgggggacctggggcccagctgcagctgcagcagccttggtctttctccagaaggatgtcaggcttgcccaggaaagggg

SEQ ID NO: 707922 - DNA, 120 bp, Artificial Sequence
  ENSG00000196646_0 (sequence is synthesized)
gctagtcccagaggcccagagtggctcgcctggagtctctgtggcgcggtttcctgtacctgccttgggatccggagggaggaagctgggacacccgggagtcaggaaatggactcggtg

SEQ ID NO: 707923 - DNA, 120 bp, Artificial Sequence
  ENSG00000196646_1 (sequence is synthesized)
gcttttgaggatgtagatgtgaacttcacccaggaggagtgggctttgctagatccttcccagaagaatctctacagagatgtgatgtgggaaaccatgaggaatctggcctctataggg

SEQ ID NO: 707924 - DNA, 120 bp, Artificial Sequence
  ENSG00000196646_2 (sequence is synthesized)
aaaaaatggaaggaccagaacattaaagatcactacaaacaccgagggagaaatctaagaagtcatatgttagaaagactctatcaaactaaggatggtagtcagcgtggaggaattttt

SEQ ID NO: 707925 - DNA, 120 bp, Artificial Sequence
  ENSG00000196646_3 (sequence is synthesized)
agccagtttgcaaatcagaatctgagcaagaaaatccctggagtgaaactctgtgaaagcattgtatatggagaagtcagcatgggtcagtcatcccttaatagacacatcaaagatcac

SEQ ID NO: 707926 - DNA, 120 bp, Artificial Sequence
  ENSG00000196646_4 (sequence is synthesized)
agtggacatgaaccaaaggaatatcaggaatatggagagaagccagatacacgtaaccagtgttggaaacccttcagttctcaccactcctttcgaacacatgagataattcacactgga

SEQ ID NO: 707927 - DNA, 120 bp, Artificial Sequence
  ENSG00000196646_5 (sequence is synthesized)
gagaaactctatgattgtaaggaatgtggaaaaaccttcttttctctcaaaagaattagaagacacatcatcacacacagtggatatacaccatataaatgtaaggtgtgtgggaaagct

SEQ ID NO: 707928 - DNA, 120 bp, Artificial Sequence
  ENSG00000196646_6 (sequence is synthesized)
tttgattatcccagtagatttcgaacacatgaaagaagtcacactggagagaaaccctatgaatgtcaggaatgtggaaaagccttcacttgtatcacaagtgttcgaagacacatgata

SEQ ID NO: 707929 - DNA, 120 bp, Artificial Sequence
  ENSG00000196646_7 (sequence is synthesized)
aagcacactggagatggaccttataaatgtaaggtatgtgggaaaccctttcattctctgagttcatttcaagtgcatgaaagaattcacactggagaaaaaccctttaaatgtaagcaa

SEQ ID NO: 707930 - DNA, 120 bp, Artificial Sequence
  ENSG00000196646_8 (sequence is synthesized)
tgtggtaaagccttcagttgttccccaaccttacgaatacatgaaagaacccatactggagagaaaccttatgaatgcaagcagtgtgggaaggccttcagttatctcccctcccttcga

SEQ ID NO: 707931 - DNA, 120 bp, Artificial Sequence
  ENSG00000196646_9 (sequence is synthesized)
ctacatgaaagaattcacactggtgagaaacccttcgtatgtaaacaatgtggtaaagcctttagatctgccagtacctttcaaatacatgaaaggactcacactggagaaaaaccttat

SEQ ID NO: 707932 - DNA, 120 bp, Artificial Sequence
  ENSG00000196646_10 (sequence is synthesized)
gaatgtaaggaatgtggggaagcattcagttgtatcccaagtatgcgaagacacatgataaaacatactggagaaggaccttataaatgtaaggtatgtgggaaaccctttcattctctg

SEQ ID NO: 707933 - DNA, 120 bp, Artificial Sequence
  ENSG00000196646_11 (sequence is synthesized)
agtccatttcgaatacatgaaagaactcacactggagagaaaccttatgtatgtaaacattgtggtaaagctttcgtttcttcaacatcaattcgaatacatgaaagaactcatactgga

SEQ ID NO: 707934 - DNA, 120 bp, Artificial Sequence
  ENSG00000196646_12 (sequence is synthesized)
gagtgtaagcaatgtgggaaagccttcagttatctcaactcctttcgaacacatgaaatgattcacactggtgagaaaccctttgaatgtaagcgatgtggtaaagcctttagatcttct

SEQ ID NO: 707935 - DNA, 120 bp, Artificial Sequence
  ENSG00000196646_13 (sequence is synthesized)
tttagatcttctagttcctttcgactacatgaaaggactcacactggacagaaaccctatcattgcaaggaatgtgggaaagcctattcttgccgtgccagctttcagagacacatgtta

SEQ ID NO: 707936 - DNA, 120 bp, Artificial Sequence
  ENSG00000196646_14 (sequence is synthesized)
acacatgctgaagatggaccaccttataaatgcatgtgggaaagcctttaatgctctgggttcatgtcagatacattaaaatactcactgaagagaagccctatgaatgtaagtaacgtg

SEQ ID NO: 707937 - DNA, 120 bp, Artificial Sequence
  ENSG00000196646_15 (sequence is synthesized)
gaaagcatgaaattctgtcagtgccttttttaatacatgaaagaattctagagagaagccatatacatgtaagtaacatgggaaagctttcaatcattttagttcctttcaaatacatga

SEQ ID NO: 707938 - DNA, 120 bp, Artificial Sequence
  ENSG00000196646_16 (sequence is synthesized)
aagaactcatcatggagaaaaccaaacaaatgctttttggaaaggaacccatatttgagagaaaccctgggtaaagggtgtaggaaaggttttgtcatcacacaaccctgtcacacatga

SEQ ID NO: 707939 - DNA, 120 bp, Artificial Sequence
  ENSG00000196646_17 (sequence is synthesized)
atgtgtagtggagagaaccttggtaaatgtaaagagtgtgggagagcctttagtcattttagttccacttgaagccatgaaagaacacacaaaagagaaagctcttgaatataagcaatg

SEQ ID NO: 707940 - DNA, 120 bp, Artificial Sequence
  ENSG00000196646_18 (sequence is synthesized)
tccacacgtttttagccagcccacatgctttcaacaacatgtaagaatgtaccctggatcaaaacactataaatgtgaaaactacaaggaaggttttccattatacttttaaagtcattt

SEQ ID NO: 707941 - DNA, 120 bp, Artificial Sequence
  ENSG00000196646_19 (sequence is synthesized)
gagggctctggctctgtggctttgtgggttaaagtacttgtctggcaaacaggagatgctggatttcaatcccagcagggcctcactagttgaggtattgaatttgaacagatgttttgg

SEQ ID NO: 707942 - DNA, 64 bp, Artificial Sequence
  ENSG00000196646_20 (sequence is synthesized)
caaaacatagcaagacctcatctcagaaaaaaaaaaaaagtcatttgaaaacttctaatacagc

SEQ ID NO: 707943 - DNA, 120 bp, Artificial Sequence
  ENSG00000196646_21 (sequence is synthesized)
agaaaaaaaaaaaaagtcatttgaaaacttctaatacagcaaaatcctataaatgtaagtacttcaaaaagcctcatgcatagcgggtcatgtagtctctagaaaatacataacctgatg

SEQ ID NO: 707944 - DNA, 120 bp, Artificial Sequence
  ENSG00000196646_22 (sequence is synthesized)
gaaatgtagaagctatatgtatattttgttaattagtggctcatatttaaaatagttctctgactatggatttcaaatgcttaatctcacaaagaaatgttaaattgatataatcctgta

SEQ ID NO: 707945 - DNA, 120 bp, Artificial Sequence
  ENSG00000196646_23 (sequence is synthesized)
agtaatctgaaagcaatagtgcatgaatttcataggtagtgttgttttaggtcagtaaataaaatatttgtctttccattttgaaatgtgtttaatccaacaatgaatttaaatgtgttt

SEQ ID NO: 707946 - DNA, 120 bp, Artificial Sequence
  ENSG00000196646_24 (sequence is synthesized)
ctcatattcaggtatgttaaattgtatatggttgcttaattgttctgtgattgaggaccactgaaaaataagtcttaataaatgttggtatgaacctacttgcttcatttagcaggttct

SEQ ID NO: 707947 - DNA, 120 bp, Artificial Sequence
  ENSG00000196646_25 (sequence is synthesized)
aatgttggtatgaacctacttgcttcatttagcaggttcttgattccctttccacattatatacattccatcatatttattggaacagctccttttttttccttttttcttttttctttc

SEQ ID NO: 707948 - DNA, 75 bp, Artificial Sequence
  ENSG00000196646_26 (sequence is synthesized)
tcaccatgttggccaggctggtactgggattacacgtgtgagccatcacacctagcccattttttttttcttggc

SEQ ID NO: 707949 - DNA, 120 bp, Artificial Sequence
  ENSG00000196646_27 (sequence is synthesized)
gtgtgagccatcacacctagcccattttttttttcttggctcaaataattttattttgcttcctattaaagagttgttgttaattctaagtatgtaaagtttatcacagactgtagtctc

SEQ ID NO: 707950 - DNA, 120 bp, Artificial Sequence
  ENSG00000196646_28 (sequence is synthesized)
gtgaattattattttaacctgttgttctttactccttgttatttattctggctgctctttgtataattgattttgggataaggagacagctatgatagaataataaaatctaaaatggga

SEQ ID NO: 707951 - DNA, 120 bp, Artificial Sequence
  ENSG00000196646_29 (sequence is synthesized)
tgatctgcaggataggtacaagcttgcaagtattctctcttagtataataacagaagatgggcttaattttcccagtaaccaattgtgagaacacatgcgaaatgcttcctggagtgttt

SEQ ID NO: 707952 - DNA, 120 bp, Artificial Sequence
  ENSG00000196646_30 (sequence is synthesized)
ctgggggctcatcaggtgggcactatgtgttgcgcgtgtaacaaattcccaaactctcagaaggtgggacgccagaaattttcatattttttccataaagagtttaggcaccgagctact

SEQ ID NO: 707953 - DNA, 120 bp, Artificial Sequence
  ENSG00000196646_31 (sequence is synthesized)
cttacataggtcattgggctccttccccaaatccgtttcccagataccaggaatggatgtgatgcaggacaggtgcgccctaaaattggggcttatcccaggatggtttccagctttgcc

SEQ ID NO: 707954 - DNA, 120 bp, Artificial Sequence
  ENSG00000196646_32 (sequence is synthesized)
cagggaagaattcaagggcaggccagtggtgttagataacagtgttttatttaacagtactggtctttgtggatcagtgctaactcataggcagtacacccagagtcagcaacatatggt

SEQ ID NO: 707955 - DNA, 120 bp, Artificial Sequence
  ENSG00000196646_33 (sequence is synthesized)
ctcttggcaactatatttatacccactttcaattatatgcaaattaagtggtgggttatttaaaactttctaaggaaggaatgataactttcaggtcattgccatggcatttgtaagctg

SEQ ID NO: 707956 - DNA, 120 bp, Artificial Sequence
  ENSG00000196646_34 (sequence is synthesized)
tcatagcattggtgggagtgttttatgctaatgagcagtgagagcatctagagatcgctgttcttgtcgtctgctggttttggcccctttctttactttatcctacctgtgccagatctt

SEQ ID NO: 707957 - DNA, 120 bp, Artificial Sequence
  ENSG00000196646_35 (sequence is synthesized)
gttttggccagtagggttgtgatcagaatacaagtcctgttggtctcctacctcagatgaatgttgtgaggagtgaggagcctttttttaagggtaagcagtctcaggactgctaatata

SEQ ID NO: 707958 - DNA, 120 bp, Artificial Sequence
  ENSG00000196646_36 (sequence is synthesized)
aactcttttgcatagtaggtggtaggacttcgttatgacaggttctacaggtccactgtatgagcagacattagctgggactcaggcagcacgtattactccttgcaaccaccaccaaga

SEQ ID NO: 707959 - DNA, 120 bp, Artificial Sequence
  ENSG00000196646_37 (sequence is synthesized)
aagatgatcagacactgctattgttctacccgatagttccattctagtatgagagttgctgtgtggaaggaagtgagtatgatgaccaaacagtggagtaaatgtttgcagacccctgaa

SEQ ID NO: 707960 - DNA, 120 bp, Artificial Sequence
  ENSG00000196646_38 (sequence is synthesized)
tttctcgcgtctgccgtacttggtttcgcttcgctagtcccagaggcccagagtggctcgcctggagtctctgtggcgcggtttcctgtacctgccttgggatccggagggaggaagctg

SEQ ID NO: 707961 - DNA, 66 bp, Artificial Sequence
  ENSG00000196646_39 (sequence is synthesized)
tgtacctgccttgggatccggagggaggaagctgggacacccgggagtcaggaaatgacggagtct

SEQ ID NO: 707962 - DNA, 120 bp, Artificial Sequence
  ENSG00000196646_40 (sequence is synthesized)
ctcccagagtgctgggattacaggcgtaactgtacccggcctcaaaaaaataattttcgtctgataaatgtgggtccttttaaatgaacgggcacatagagacattcaagtgatacagca

SEQ ID NO: 707963 - DNA, 120 bp, Artificial Sequence
  ENSG00000196646_41 (sequence is synthesized)
ggagtgggctttgctagatccttcccagaagaatctctacagagatgtgatgtgggaaaccatgaggaatctggcctctataggtaaggattgtatacttccatcacttagcaattaaag

SEQ ID NO: 707964 - DNA, 120 bp, Artificial Sequence
  ENSG00000196646_42 (sequence is synthesized)
gtggctcgcctggagtctctgtggcgcggtttcctgtacctgccttgggatccggagggaggaagctgggacacccgggagtcaggaaatgatattgtgctttcattgtttatttttcaa

SEQ ID NO: 707965 - DNA, 120 bp, Artificial Sequence
  ENSG00000196652_0 (sequence is synthesized)
gttccgggaacagctggcccctgcgactcgcgggtgtgacgttgaagatgtcggccttctgagccgactgcggtggtcaagagtgtaacacagccagcctcgaagacttccctctgagtt

SEQ ID NO: 707966 - DNA, 120 bp, Artificial Sequence
  ENSG00000196652_1 (sequence is synthesized)
ggaatgataatgaccgaatcccgagaagttatagacttagaccccccagctgagacttcccaggagcaggaagaccttttcatagtgaaggtggaagaagaagactgcacctggatgcag

SEQ ID NO: 707967 - DNA, 120 bp, Artificial Sequence
  ENSG00000196652_2 (sequence is synthesized)
gagtacaacccgccaacgtttgagactttttaccagcgcttcaggcacttccagtaccatgaggcttcaggaccccgggaggctctcagccaactccgggtgctctgctgtgagtggctg

SEQ ID NO: 707968 - DNA, 120 bp, Artificial Sequence
  ENSG00000196652_3 (sequence is synthesized)
aggcccgagctgcacacgaaggagcagatcctggagctgctggtgctggagcagttcctgaccatcctgcctgaagagttccagccctgggtgagggaacatcaccctgaaagtggagaa

SEQ ID NO: 707969 - DNA, 120 bp, Artificial Sequence
  ENSG00000196652_4 (sequence is synthesized)
gaggcggtggccgtgatagaaaatatacagcgagaacttgaggaacgcagacagcagattgttgcctgccctgatgtgcttcctcggaagatggcaacacctggagcagtgcaggagtcc

SEQ ID NO: 707970 - DNA, 120 bp, Artificial Sequence
  ENSG00000196652_5 (sequence is synthesized)
tgcagcccccatcccctgaccgtggacacccagcctgagcaagcgccacagaagcctcgtctcctggaggaaaatgcccttcctgttctccaagttccttcccttcccctgaaggacagc

SEQ ID NO: 707971 - DNA, 120 bp, Artificial Sequence
  ENSG00000196652_6 (sequence is synthesized)
caggagctgacagcttcacttctctcaactgggtcccagaagttggtgaaaattgaagaggtggctgatgtggctgtatccttcatcctggaggaatgggggcatttggaccagtcccag

SEQ ID NO: 707972 - DNA, 120 bp, Artificial Sequence
  ENSG00000196652_7 (sequence is synthesized)
aagtccctttatagggatgacaggaaggagaactatgggagtattacttccatgggttatgagtccagggacaatatggagctcatagtgaagcagatttctgatgactctgaatcacac

SEQ ID NO: 707973 - DNA, 120 bp, Artificial Sequence
  ENSG00000196652_8 (sequence is synthesized)
tgggtggcgccagaacacaccgaaaggagcgttcctcaggatccagactttgcagaagtcagtgaccttaaaggcatggtacaaaggtggcaggtcaaccccactgtggggaaatcaagg

SEQ ID NO: 707974 - DNA, 120 bp, Artificial Sequence
  ENSG00000196652_9 (sequence is synthesized)
cagaatccttcccagaaaagggatctggatgcaatcacagacatcagccctaagcaaagcacacatggcgagagagggcacagatgcagcgattgtggcaaattcttcctccaagcctca

SEQ ID NO: 707975 - DNA, 120 bp, Artificial Sequence
  ENSG00000196652_10 (sequence is synthesized)
aactttattcagcatcggcgcatccacactggagaaaaaccgtttaagtgcggagaatgtgggaagagctacaatcagcgggtgcacctcacccagcaccagcgcgtccacacaggggag

SEQ ID NO: 707976 - DNA, 120 bp, Artificial Sequence
  ENSG00000196652_11 (sequence is synthesized)
aaaccctacaaatgtcaggtgtgcggaaaggctttccgggtgagttcccacctggttcagcaccacagtgtccacagcggagagaggccctatggctgcaatgagtgtgggaagaacttc

SEQ ID NO: 707977 - DNA, 120 bp, Artificial Sequence
  ENSG00000196652_12 (sequence is synthesized)
ggtcgccattcgcatctgatcgaacacctaaaacgccacttcagggagaaatcccagagatgcagtgacaaaagaagtaagaacacaaaattaagtgttaagaagaaaatttcagaatat

SEQ ID NO: 707978 - DNA, 120 bp, Artificial Sequence
  ENSG00000196652_13 (sequence is synthesized)
tcagaagcagacatggaactatctggaaaaacccaaagaaatgtttctcaagttcaagattttggagaaggctgtgagtttcaaggcaagctggatagaaagcagggaattcccatgaaa

SEQ ID NO: 707979 - DNA, 120 bp, Artificial Sequence
  ENSG00000196652_14 (sequence is synthesized)
gagatactaggacaaccatcttcaaagaggatgaactacagtgaagtcccatatgtccacaaaaaatcctccactggagagagaccacataaatgtaacgagtgtgggaaaagcttcatt

SEQ ID NO: 707980 - DNA, 120 bp, Artificial Sequence
  ENSG00000196652_15 (sequence is synthesized)
cagagtgcacatcttattcaacatcaaagaatacacactggggagaaaccattcaggtgtgaggaatgtgggaaaagctacaaccaacgcgtgcacctaactcagcatcagcgcgtccac

SEQ ID NO: 707981 - DNA, 120 bp, Artificial Sequence
  ENSG00000196652_16 (sequence is synthesized)
acaggtgagaagccctacacctgtcccttatgtgggaaagccttcagagtgaggtcccaccttgttcagcatcagagcgtgcacagtggggagagacccttcaagtgtaacgaatgtggg

SEQ ID NO: 707982 - DNA, 120 bp, Artificial Sequence
  ENSG00000196652_17 (sequence is synthesized)
gtacgttagcctaattgaacatcaggtgctccacatgggtcagaaaaatgaaaaaaatggcatctgtgaggaagcatatagttggaacttgacagtgattgaagacaagaagattgagtt

SEQ ID NO: 707983 - DNA, 120 bp, Artificial Sequence
  ENSG00000196652_18 (sequence is synthesized)
acaagagcagccttatcagtgtgatatctgtggaaaagcctttggttatagctcagacctcattcagcattacagaactcatacagcagagaagccctatcaatgtgatatatgtagaga

SEQ ID NO: 707984 - DNA, 120 bp, Artificial Sequence
  ENSG00000196652_19 (sequence is synthesized)
aaatgttggccagtgttcccacaccaaacaacatcaaaaaatctactccagcacaaaatcccatcaatgtcatgaatgtggcagaggcttcactctgaagtcacatcttaatcaacatca

SEQ ID NO: 707985 - DNA, 120 bp, Artificial Sequence
  ENSG00000196652_20 (sequence is synthesized)
gagaatccatactggtgagaaaccttttcaatgtaaagaatgtggaatgaatttcagctggagttgtagcctctttaaacacctgagaagccatgagaggacagatcccataaatacctt

SEQ ID NO: 707986 - DNA, 120 bp, Artificial Sequence
  ENSG00000196652_21 (sequence is synthesized)
aagtgtagaggggtctctgttgtagaatagctcttaattttagagaaaccttcctggagggaaaccatactcctataatgagcaaagtaacaacttcaagcatttttccagcgttaccat

SEQ ID NO: 707987 - DNA, 120 bp, Artificial Sequence
  ENSG00000196652_22 (sequence is synthesized)
caaactcacaaataggttgaaatcctttagttataactcagcctttaggaacaccggagaacccacaataatagaaatcttttcgtgttccccattgagaaatgctttagttagcatctt

SEQ ID NO: 707988 - DNA, 120 bp, Artificial Sequence
  ENSG00000196652_23 (sequence is synthesized)
catgcttggaaatctagacaagaagagaatccatggatggacatggtcgaggaattcggaaagcctgcagttgacattcagtcttcacttgaaactcaaaactgacactaggaacagctt

SEQ ID NO: 707989 - DNA, 120 bp, Artificial Sequence
  ENSG00000196652_24 (sequence is synthesized)
catgagttcagtagaagtaagctttatttgtagcttctgccttgtttgacggcgtatctattcagggaagcgcacagtaaaagaattccttagcatgatgtctgttttggtacctcagca

SEQ ID NO: 707990 - DNA, 120 bp, Artificial Sequence
  ENSG00000196652_25 (sequence is synthesized)
atgaaccttttctagaaattattattccaaccactagaataccctagtcactattcccactttgagcattaacccctttgaaaagaaatggacttaaagtatctctgttttggcaaaatt

SEQ ID NO: 707991 - DNA, 120 bp, Artificial Sequence
  ENSG00000196652_26 (sequence is synthesized)
caggttcaggggctggatggtatgtgtttctgctgccttattcaatccaccacttctctgtgaaacactctaccttgtttttggtttgattctactgatgtcagggtttagccggtagaa

SEQ ID NO: 707992 - DNA, 120 bp, Artificial Sequence
  ENSG00000196652_27 (sequence is synthesized)
ggagtagttcagtttgtcaattcaggagaaactgtactggtcagtcacatcttacggcgaagggagagggaccttaggggagcagagaagacaggcaaagttgtggactgtttgatcttg

SEQ ID NO: 707993 - DNA, 120 bp, Artificial Sequence
  ENSG00000196652_28 (sequence is synthesized)
tattacccacaggaatgagggcagctaaacccatagaaggagttggaccaaggcgaattacgagtcctggtcccagcagtatgtgtgctgacttctgggtgccccagaaatagacctctc

SEQ ID NO: 707994 - DNA, 120 bp, Artificial Sequence
  ENSG00000196652_29 (sequence is synthesized)
ctgtagagtggtgatatacagaatgagtttcagtttgcattgcagctgggattgaaagtaatcagtcgtgagcaggcaggcaggaggtcctgttagccctgccttccaggaaggttgggg

SEQ ID NO: 707995 - DNA, 120 bp, Artificial Sequence
  ENSG00000196652_30 (sequence is synthesized)
tgggagttttgagtgggaaagaggatgacatgtgtgagagagttctgagcctgtttgctagggagagtgagtgagtgctcttgggcactgctcaggccgtttctgctgacttgcctggct

SEQ ID NO: 707996 - DNA, 120 bp, Artificial Sequence
  ENSG00000196652_31 (sequence is synthesized)
tacaataaatgcccaataaatatttgttgaccatatgtgttgtacactgtggtgccctgtccagtcccctctaccaagctgagacccccatccccagctgctctgagtttgggctgcaag

SEQ ID NO: 707997 - DNA, 120 bp, Artificial Sequence
  ENSG00000196652_32 (sequence is synthesized)
tgctcacagctcttgttctccagaaactggagaattgccctcaggagatgagagccatctcacctcacccaggagtcacttcctctctacaccccaacacctggttcatttgattaaagc

SEQ ID NO: 707998 - DNA, 120 bp, Artificial Sequence
  ENSG00000196652_33 (sequence is synthesized)
ggagaaaactccagggtgctatgactgctctggcacccttggatcaggccaagctagactttttctgagccttcatccgtgctaagctctctcccttctctatcctgtttcattccctcc

SEQ ID NO: 707999 - DNA, 120 bp, Artificial Sequence
  ENSG00000196652_34 (sequence is synthesized)
cttccccgccccacggaaaggggaggagcttgggctgtttgaatggctttgggatggagcaggggagagagtggctccgtttgcctccccgctttggtgatgctgtgcgagcggcttcgg

SEQ ID NO: 708000 - DNA, 120 bp, Artificial Sequence
  ENSG00000196652_35 (sequence is synthesized)
gggccctggagacgtccgagtcactgagggtgggctgggactcggggcccgcgtcccatctccccgccgattggtccgccccccgtgcgagtgtaacacagccagcctcgaagacttccc

SEQ ID NO: 708001 - DNA, 120 bp, Artificial Sequence
  ENSG00000196652_36 (sequence is synthesized)
gactcgcgggtgtgacgttgaagatgtcggccttctgagccgactgcggtggtcaagaggttgcatgctactgaaagtgtccttcagaagatattaaagagcagaaaaacaattgtttca

SEQ ID NO: 708002 - DNA, 120 bp, Artificial Sequence
  ENSG00000196652_37 (sequence is synthesized)
ggacttggttacttccggcgaggaagtgttggggagtgtcggcttcggtttctctccgtgggaagaaccgcatcttcccagcctcggctgcggggagcttgatgttccaggagagctccc

SEQ ID NO: 708003 - DNA, 120 bp, Artificial Sequence
  ENSG00000196652_38 (sequence is synthesized)
ctagagtggggccttgaggggagggggcaggggcttcgtgactggacgggggtcctgtccctaaccttgaccgggccacagtctctgtatctcggggtcaggggccattctgaggaatcc

SEQ ID NO: 708004 - DNA, 120 bp, Artificial Sequence
  ENSG00000196652_39 (sequence is synthesized)
aggtccagatctgtaccttataaacgctgcttctctttgggaccgatggagtctccccttggcctgtcaagctcttgtagcttagagaacaggctcagttttgaccattataatgatttt

SEQ ID NO: 708005 - DNA, 120 bp, Artificial Sequence
  ENSG00000196652_40 (sequence is synthesized)
cacccttattccgacttaagttcgtcttatggtagagagaaagagcggctgcgtctggactagttagtctcgtcccgttatttatatggaatgtaaagttcttcactctaaaactgtgtt

SEQ ID NO: 708006 - DNA, 120 bp, Artificial Sequence
  ENSG00000196652_41 (sequence is synthesized)
ttaggttgggcctgatgtcagatttgtatggctctcttttacacttttaaaatgttggggttattccttattatcattttgtgggtgaagtgatggctaccttgtagtacctatttttaa

SEQ ID NO: 708007 - DNA, 120 bp, Artificial Sequence
  ENSG00000196652_42 (sequence is synthesized)
gtaaattactttgttgagtggtcgtctttagtatagatgacctctttgccatctgtctttgctaataatgatgcccaatacatcagtaggttgcatgctactgaaagtgtccttcagaag

SEQ ID NO: 708008 - DNA, 120 bp, Artificial Sequence
  ENSG00000196652_43 (sequence is synthesized)
aacctgatctaagacatttggtgccacaagtggtcataggaagctgctgtgagagtggattgtggagttggtcactcgccaggagggagtgaagacccgcatcactgttaatagtcctgg

SEQ ID NO: 708009 - DNA, 120 bp, Artificial Sequence
  ENSG00000196652_44 (sequence is synthesized)
catgtggtacctgtccagtcactaagtcattcacttgtggggaactgggatgagatacaggtggaaagcgatctattgacttgtagaggtttgggacaaacaggaaaataaagattatgg

SEQ ID NO: 708010 - DNA, 120 bp, Artificial Sequence
  ENSG00000196652_45 (sequence is synthesized)
aattgggtggctcttgctgaaagtcactgaatccttgaagagaagaaaatgacagggcaaataaccaccaatttaatgccaagtgtgtgtcagaggaccttcttggtagctttttaattt

SEQ ID NO: 708011 - DNA, 65 bp, Artificial Sequence
  ENSG00000196652_46 (sequence is synthesized)
aagtgtgtgtcagaggaccttcttggtagctttttaatttttttatagacagggtcttgctctgc

SEQ ID NO: 708012 - DNA, 72 bp, Artificial Sequence
  ENSG00000196652_47 (sequence is synthesized)
tctagagtggctaatttttaaaaaacatactttagctgggcgcggtggctcatgcctataaacccagcactt

SEQ ID NO: 708013 - DNA, 120 bp, Artificial Sequence
  ENSG00000196653_0 (sequence is synthesized)
attcttccggtttcagaagttaaggctggtgtcctggccccagtccacctctgggagcgcctgcgccgctccgcggagagtccgtggatctcacagtgaaaaatgtttgctgacccttga

SEQ ID NO: 708014 - DNA, 120 bp, Artificial Sequence
  ENSG00000196653_1 (sequence is synthesized)
cattgacaaactgctgacagctcagatgatccatgattggaaggatgtggtcatcaccaagatgtctttctttctccggttcccagttttccagacctgaagtgttttccaatcaaagcg

SEQ ID NO: 708015 - DNA, 120 bp, Artificial Sequence
  ENSG00000196653_2 (sequence is synthesized)
aagagacgatctgtggatgttgaatatgcaaggagctgaagagagagacattagaagagagacttgtccaggctgggtaaacaagaacaagcctgctctggagcaggatgtctgtaaaat

SEQ ID NO: 708016 - DNA, 120 bp, Artificial Sequence
  ENSG00000196653_3 (sequence is synthesized)
tgactcatcagggatagtagtaaagaggttccaagaggatgaataccaagattctacatttgaagaaaaatatgcatgtgagggcatgaaggaaaactctcctagggagattgctgaatc

SEQ ID NO: 708017 - DNA, 120 bp, Artificial Sequence
  ENSG00000196653_4 (sequence is synthesized)
atgccttttccaggaaggaggttttgggagaataactttcatccacaaagaagcaccccctgaaattattagtcaaggatataattttgagaaaagcttgcttttgacctcaagccttgt

SEQ ID NO: 708018 - DNA, 120 bp, Artificial Sequence
  ENSG00000196653_5 (sequence is synthesized)
tacacgtctcagggtttctacagaagagagtctgcatcagtgggaaacaagtaatatacaaaccaatgatatttcagaccaaagtaaatgtccaactctctgcacacagaaaaaatcttg

SEQ ID NO: 708019 - DNA, 120 bp, Artificial Sequence
  ENSG00000196653_6 (sequence is synthesized)
gaaatgtaatgaatgtggaaaaacctttactcagagctcatcccttacccaacatcagagaactcatactggagagagaccctacacatgtgaggaatgtgggaaagcctttagtcgtag

SEQ ID NO: 708020 - DNA, 120 bp, Artificial Sequence
  ENSG00000196653_7 (sequence is synthesized)
ttcattccttgttcaacatcaaagaattcacactggagtgaaaccatatggatgtgagcagtgtgggaaaacatttcgatgtcgatcatttcttactcagcatcaaagaattcacactgg

SEQ ID NO: 708021 - DNA, 120 bp, Artificial Sequence
  ENSG00000196653_8 (sequence is synthesized)
agagaaaccttataaatgcaatgaatgtgggaattccttccgcaatcactcacatctcactgaacaccagagaattcacactggagagaaaccttataaatgcaataggtgtgggaaggc

SEQ ID NO: 708022 - DNA, 120 bp, Artificial Sequence
  ENSG00000196653_9 (sequence is synthesized)
attcaatcagaatacacaccttattcatcatcagagaattcacactggtgagaagccttacatatgcagtgaatgtggctcttcttttcgaaaacactcaaatcttacgcaacatcagag

SEQ ID NO: 708023 - DNA, 120 bp, Artificial Sequence
  ENSG00000196653_10 (sequence is synthesized)
aattcacactggggaaaaaccccataaatgtgacgaatgtgggaaaactttccaaacaaaggcaaacctctctcagcatcagagaattcatagtggagagaaaccctataaatgtaaaga

SEQ ID NO: 708024 - DNA, 120 bp, Artificial Sequence
  ENSG00000196653_11 (sequence is synthesized)
atgtggcaaagccttttgtcagagcccatctcttattaaacaccagcgaattcatactggagaaaaaccatataagtgtaaagaatgtggcaaagcgtttactcagagcaccccactcac

SEQ ID NO: 708025 - DNA, 120 bp, Artificial Sequence
  ENSG00000196653_12 (sequence is synthesized)
taaacatcagagaatacatacaggggagagaccctacaaatgcagtgaatgtggtaaagccttcattcagagcatttgccttattcggcaccagagaagtcacactggagaaaaacccta

SEQ ID NO: 708026 - DNA, 120 bp, Artificial Sequence
  ENSG00000196653_13 (sequence is synthesized)
tcagaacacctgcctcactcagcatatgagaattcatactggagagaagccctataaatgtaaagaatgtgggaaagcctttgctcatagctcatctcttactgaacatcatagaactca

SEQ ID NO: 708027 - DNA, 120 bp, Artificial Sequence
  ENSG00000196653_14 (sequence is synthesized)
cactggtgagaagctctataaatgtagtgagtgtgagaaaaccttccgcaagtatgcacaccttagtgaacattacagaattcacactggtgagaagccttatgagtgtattgagtgtgg

SEQ ID NO: 708028 - DNA, 120 bp, Artificial Sequence
  ENSG00000196653_15 (sequence is synthesized)
aaagttcttcagacatagttcagtccttttcagacatcagaaacttcacagtggtgactaatgctgccatttaggttatgacagtttctctagcgaggatgactacgaatctgactggga

SEQ ID NO: 708029 - DNA, 120 bp, Artificial Sequence
  ENSG00000196653_16 (sequence is synthesized)
gtagaggggcaggtagagttcctggagggaaggatgaaggagccttggctactgtactctgagaggaatgtttccagaaatggaggtgggagcttagggaatgcagagcctacttgaggt

SEQ ID NO: 708030 - DNA, 120 bp, Artificial Sequence
  ENSG00000196653_17 (sequence is synthesized)
gggcatctgggaatacagggtagaaagaaattcctgcttttcagataaagcctacacattgccactgtctccccatgtgactcttacagcttgaggaggcatttgttagcacttctgttc

SEQ ID NO: 708031 - DNA, 120 bp, Artificial Sequence
  ENSG00000196653_18 (sequence is synthesized)
actttactacatcctgccccacattctgacttgtcacccattttcgttggctggcaggttgagatgtttttcttaaacactgcctgtcagtgtgaagtggcacagctctgatgtagtgct

SEQ ID NO: 708032 - DNA, 120 bp, Artificial Sequence
  ENSG00000196653_19 (sequence is synthesized)
aagtctagcctccagatttgaggcagccctgaccatgctaccatgggggaggctcccaacctgtggaagtggtcctgtgaaaaggagacagaaacaagtaagagccaaaaaaaaaaaaaa

SEQ ID NO: 708033 - DNA, 120 bp, Artificial Sequence
  ENSG00000196653_20 (sequence is synthesized)
aaaaaatccatatccattcattaaaaaaatgagatataaagcaacaactgggctgacctctatagatctgccagtaaagaaggctttctttcattatcagggtgaaggtctttcctgatt

SEQ ID NO: 708034 - DNA, 120 bp, Artificial Sequence
  ENSG00000196653_21 (sequence is synthesized)
cttccaagctttgaggtgactcagagctaagaatgaaataggagaccaagttagaattcatgatactggtttatggggaggcagtcatacctgttcagagaaccaggaagactcaatatc

SEQ ID NO: 708035 - DNA, 120 bp, Artificial Sequence
  ENSG00000196653_22 (sequence is synthesized)
tatctcagaggaaatatggttacccaggaaagaaatggtctgctagagtgataagactcagaacaggaagcctgcatgtgactgagcaagtcacctacataaccctgcctgtactaaggt

SEQ ID NO: 708036 - DNA, 120 bp, Artificial Sequence
  ENSG00000196653_23 (sequence is synthesized)
gtacacctgtctattgtaagtttgcctaggctgttggtgtacagagaccagaggagagagacacactaggactaacaatgtcctaacaaaatggtacttagtttgttggtctttaggaga

SEQ ID NO: 708037 - DNA, 120 bp, Artificial Sequence
  ENSG00000196653_24 (sequence is synthesized)
aagcattagtaatgaaagaagaaagaattttcacttggttggacattggggctcttaagaaagttgacatttgtcgtggaatgactttggaaagacttctaaaagaatctttttcaaatc

SEQ ID NO: 708038 - DNA, 120 bp, Artificial Sequence
  ENSG00000196653_25 (sequence is synthesized)
cctgaaaatcaggatagcacattttgctactgactgtgacagtgttttattcttttgagagaaatgacatagttttccctttatttcccaaattcctttcatgttcttaactgctaccca

SEQ ID NO: 708039 - DNA, 120 bp, Artificial Sequence
  ENSG00000196653_26 (sequence is synthesized)
gaaattgagcttcagaagattgaggatagcctttgattggtatttaaaataatttctaagctgtgaagcttatagcatttttaaagtatggctattaaaaacactaagttgattctggaa

SEQ ID NO: 708040 - DNA, 120 bp, Artificial Sequence
  ENSG00000196653_27 (sequence is synthesized)
agaagttaaggctggtgtcctggccccagtccacctctgggagcgcctgcgccgctccgcggagagtccgtggatctcacaggttcccagttttccagacctgaagtgttttccaatcaa

SEQ ID NO: 708041 - DNA, 120 bp, Artificial Sequence
  ENSG00000196653_28 (sequence is synthesized)
accattcttccggtttcagaagttaaggctggtgtcctggccccagtccacctctgggagcgcctgcgccgctccgcggagagtccgtggatctcacagtgaggttcccagttttccaga

SEQ ID NO: 708042 - DNA, 120 bp, Artificial Sequence
  ENSG00000196655_0 (sequence is synthesized)
gaataccagtttccgagcggcaaggcagcgatggcgatttttagtgtgtatgtggtgaacaaagctggcggcttgatttaccagttggacagctacgcgccacgggctgaggctgagaaa

SEQ ID NO: 708043 - DNA, 120 bp, Artificial Sequence
  ENSG00000196655_1 (sequence is synthesized)
actttcagttatccgctggatctgctgctcaagctacacgatgagcgtgtgttggttgctttcggccagcgggacggcatccgagtgggtcatgcagtgctggccatcaatggcatggac

SEQ ID NO: 708044 - DNA, 120 bp, Artificial Sequence
  ENSG00000196655_2 (sequence is synthesized)
gtgaatggcaggtacacggccgacgggaaagaggtgctggagtatctgggtaaccctgctaattacccggtgtccattcgatttggccggccccgcctcacttctaatgagaagcttatg

SEQ ID NO: 708045 - DNA, 120 bp, Artificial Sequence
  ENSG00000196655_3 (sequence is synthesized)
ctggcctccatgttccactcgctctttgccatcggctcccagctgtctcctgaacagggaagctcaggcattgagatgctggagacagacacattcaaattgcactgctaccagacactg

SEQ ID NO: 708046 - DNA, 120 bp, Artificial Sequence
  ENSG00000196655_4 (sequence is synthesized)
acagggatcaagtttgtggttctagcagatcctaggcaagctggaatagattctcttctccgaaagatttatgagatttactcagactttgccctcaagaatccattctattccttagaa

SEQ ID NO: 708047 - DNA, 120 bp, Artificial Sequence
  ENSG00000196655_5 (sequence is synthesized)
gacccccaaattctgagagttcctgcaacaagaatactgctgttgacactccagtggaaatcccagcagccttgttagtgcacttgaaagtgggagaatgctgaccctgatgacttgtac

SEQ ID NO: 708048 - DNA, 120 bp, Artificial Sequence
  ENSG00000196655_6 (sequence is synthesized)
tgattcctgagccttaacactgtgctctttccttctgtatataccatggtcttactttccaactctgtacagatttatttatggaggagctaggtccataaatgttgtaataaatattcc

SEQ ID NO: 708049 - DNA, 120 bp, Artificial Sequence
  ENSG00000196655_7 (sequence is synthesized)
tttgatcttggtgtttgcaatctgtcttaatcgatggttttgggggaaagatacaggaagtgagtcaaaaatggttagggaattctgggaagatgattatgtgctagtaaaaaacataac

SEQ ID NO: 708050 - DNA, 120 bp, Artificial Sequence
  ENSG00000196655_8 (sequence is synthesized)
aaatatgtgttcattaaataaatgaacataagattttgaagcatgagcattggatctagtcccagaattgctgctgatttcctggggtcctggggtggtggcagcagtggtggtggctgt

SEQ ID NO: 708051 - DNA, 120 bp, Artificial Sequence
  ENSG00000196655_9 (sequence is synthesized)
tatgatgatgatgatgatggaacatatttcaagcacttacagccaggcattcctgctttatctcacttgatcttcaccctaactccagggggtacattctgttacagataagagatttag

SEQ ID NO: 708052 - DNA, 120 bp, Artificial Sequence
  ENSG00000196655_10 (sequence is synthesized)
cagactttctgcctcaaagtttccaagctagttactgacagtctgggtttgaaccaggctttctggctacacactcagtaaaccactgttacacttcttccctccatcaagttatttaat

SEQ ID NO: 708053 - DNA, 120 bp, Artificial Sequence
  ENSG00000196655_11 (sequence is synthesized)
aggccagaggagtgtgatggagaaggtggggaagagatactgataagtttgcatctccaggtgggccagaggagtgtggtggagaaggtgggaggagggggttgaccaaagacacctttg

SEQ ID NO: 708054 - DNA, 120 bp, Artificial Sequence
  ENSG00000196655_12 (sequence is synthesized)
aaggtgggaggagggggttgaccaaagacacctttggtaagcaagaagagggggtgtgcttttcctggcacaattctttttttttttgaaatgtttcactcttgttgcccaggctggaat

SEQ ID NO: 708055 - DNA, 120 bp, Artificial Sequence
  ENSG00000196655_13 (sequence is synthesized)
gcatgtgtcaccacacccggctaatttttctgtttttattagagatggtgtttctccatattggtcatggtggtctcaaactcccgacctcaggtgattgcccgcctcccaaagtgttgg

SEQ ID NO: 708056 - DNA, 73 bp, Artificial Sequence
  ENSG00000196655_14 (sequence is synthesized)
atggtgtttctccatattggtcatggtggtctcaaactcccgacctcaggtgattgacccacagttctttttt

SEQ ID NO: 708057 - DNA, 120 bp, Artificial Sequence
  ENSG00000196655_15 (sequence is synthesized)
gaaaaacgcaaccgatccagatctagattttaggtaataacggcagtggtgtcatctttttttgctgggtggggaggggccgcggagttacccaggctggagcgcagtggcgggatctcg

SEQ ID NO: 708058 - DNA, 120 bp, Artificial Sequence
  ENSG00000196655_16 (sequence is synthesized)
ttacttaaagtcaacttctcttctctgagccttagtttcttcatatttaaagaaagccagtttaactaaatgacctttaaactttttctgctctcaattgtgatatcagatgtgccggcc

SEQ ID NO: 708059 - DNA, 120 bp, Artificial Sequence
  ENSG00000196655_17 (sequence is synthesized)
tttgcttaaacacaagcttagtaagcgtggcacatattcctagagtattcattttacccaaagttttagatgtaaaatgtcttgtaacaaagtatgaatgtaaaatattcacagaattca

SEQ ID NO: 708060 - DNA, 120 bp, Artificial Sequence
  ENSG00000196655_18 (sequence is synthesized)
cactactgccagtcagttcacactacttctcctgactgtcccaggctgtaatgtgaactcctcagcaaatagggacacttcagtggaagtttgagaagcactccttccttagagcaactt

SEQ ID NO: 708061 - DNA, 64 bp, Artificial Sequence
  ENSG00000196655_19 (sequence is synthesized)
tttttttgttttgtcttggctcactgcagccaccactacccgggttcaagcaattctcctgcct

SEQ ID NO: 708062 - DNA, 120 bp, Artificial Sequence
  ENSG00000196655_20 (sequence is synthesized)
aggcatgagccaccgcgcccggccttcctggcacaattttatagacacatctgtttgtttgttttgtgaatacaaaaccaatatttaatctgaaactgattttgtccatgccacccagca

SEQ ID NO: 708063 - DNA, 120 bp, Artificial Sequence
  ENSG00000196655_21 (sequence is synthesized)
agcatgttcagcagaggttatcttgtgttcagataaaactcaccttaatgctatttcctgttgcgtgtactttggaaggtgttaagtgtttttccaaaatgaaatttgaaagcaaaatgg

SEQ ID NO: 708064 - DNA, 120 bp, Artificial Sequence
  ENSG00000196655_22 (sequence is synthesized)
atatgacctttggattgccagtgtcattgcttcaccctcttcatttattgaaaactgcctgactttgtcccctgcctggcaatgtttctgctgagggactccaaaactgttagtaagtgg

SEQ ID NO: 708065 - DNA, 120 bp, Artificial Sequence
  ENSG00000196655_23 (sequence is synthesized)
cagagctagaactcaaagcctggtcttaatcaggtgggtgacataacaaagttacttcacttctctggtctcatcggtagattcaaagtcttgcctttcctgcattatgtggtaaaaaga

SEQ ID NO: 708066 - DNA, 120 bp, Artificial Sequence
  ENSG00000196655_24 (sequence is synthesized)
tgggagggccccagtgctgtagaagtgggctggttgtaggtgcggggttgggggaaaaggggttgtgtcgggtcccttgtcccctcggcggaatccccgggctgcaccttcgctgaccgt

SEQ ID NO: 708067 - DNA, 120 bp, Artificial Sequence
  ENSG00000196655_25 (sequence is synthesized)
agagcgtgcagggggaaggccaccgtgggatggtgctccggaacctggactctcttcactcagccttcttggacactcggcccatcttggtgcggatgtttcgtaggaggaagaaggcag

SEQ ID NO: 708068 - DNA, 120 bp, Artificial Sequence
  ENSG00000196655_26 (sequence is synthesized)
ccgtgctggccgcacaaatcacttcagccacccagaaggctgtgctccaactgtagtgcttggcaatggtgctgaagggcagcccagccagaaagccgcccactgtcagggggaaaggga

SEQ ID NO: 708069 - DNA, 120 bp, Artificial Sequence
  ENSG00000196655_27 (sequence is synthesized)
agaacctaagccagtggtgctagctccagcttctcactggtctatatgcaaagcacaggtgggggtgagggagagactctagaagttaacacttaccattggccatgagtcccacaatgg

SEQ ID NO: 708070 - DNA, 120 bp, Artificial Sequence
  ENSG00000196655_28 (sequence is synthesized)
cgtgggaggtgccacacaagttgggaggggcactctcgttggctatgactccaaacagggcaatggggccatacgaggagaaaccaaatacagctcccaataccaggatccagagctgcc

SEQ ID NO: 708071 - DNA, 120 bp, Artificial Sequence
  ENSG00000196655_29 (sequence is synthesized)
aagggcagagtggagtggcattcagagtcggaaagccgacctgcctacccacccctgccaaagcaagaagaaggcttggtccccagaaacaaacagtagtcataaaaggacagtaagtaa

SEQ ID NO: 708072 - DNA, 73 bp, Artificial Sequence
  ENSG00000196655_30 (sequence is synthesized)
ctatcaggctggaatgcaatggtgccatcacggctcaccacaacctctgccttccgggttcaggcgattcttt

SEQ ID NO: 708073 - DNA, 120 bp, Artificial Sequence
  ENSG00000196655_31 (sequence is synthesized)
ccatattggccaggctagtctcaaagtcctgacctcagctgatccgcccacctcagccttccatgatatatgttgttcttcaagcagtttcccctggcttaagtggggagaaagcctcag

SEQ ID NO: 708074 - DNA, 120 bp, Artificial Sequence
  ENSG00000196655_32 (sequence is synthesized)
ggtgttatgaaaaacgcaaccgatccagatctagattttaggtaataacggcagtggtgtcatctttttttgctgggtggggaggggccgcggagttacccaggctggagcgcagtggcg

SEQ ID NO: 708075 - DNA, 120 bp, Artificial Sequence
  ENSG00000196659_0 (sequence is synthesized)
atagtaaccgcacccataacagccgtggtggttatggctggcctgagcggcgcgcagatccccgacggggagttcaccgcggtcgtgtaccgcctcatccgcaatgcacgctacgccgag

SEQ ID NO: 708076 - DNA, 120 bp, Artificial Sequence
  ENSG00000196659_1 (sequence is synthesized)
gcggtgcagctgctgggcggagaactgcagcggagccctaggagccgcgccggcctgtcgctgctaggctactgctactaccgcctgcaggagttcgcgctggcggccgagtgctatgag

SEQ ID NO: 708077 - DNA, 120 bp, Artificial Sequence
  ENSG00000196659_2 (sequence is synthesized)
cagctgggccagctgcacccggaactggagcagtaccgcctgtaccaggcccaggccctgtacaaggcctgcctttatgcggaggccacccgggtcgccttccttctcctggataacccc

SEQ ID NO: 708078 - DNA, 120 bp, Artificial Sequence
  ENSG00000196659_3 (sequence is synthesized)
gcctaccacagccgggtcctccgcctgcaagctgctatcaagtacagcgagggcgatctgccagggtccaggagcctggtagagcagctgccgagtagggaagggggagaggaaagtggg

SEQ ID NO: 708079 - DNA, 120 bp, Artificial Sequence
  ENSG00000196659_4 (sequence is synthesized)
ggcgagaatgagaccgatggccagatcaacctgggttgtttgctctacaaggagggacagtatgaagctgcatgctccaagttttttgccgccctgcaggcctcgggctaccagcctgac

SEQ ID NO: 708080 - DNA, 120 bp, Artificial Sequence
  ENSG00000196659_5 (sequence is synthesized)
ctttcctacaacctggctttggcctattacagcagccgacagtatgcttcagcactgaagcatatcgctgagattattgagcgtggcatccgccagcaccctgagctaggtgtgggcatg

SEQ ID NO: 708081 - DNA, 120 bp, Artificial Sequence
  ENSG00000196659_6 (sequence is synthesized)
accactgagggcattgatgttcgcagtgttggcaacaccttagtcctccatcagactgctctggtggaagccttcaaccttaaggcagctatagaataccaactgagaaactatgaggca

SEQ ID NO: 708082 - DNA, 120 bp, Artificial Sequence
  ENSG00000196659_7 (sequence is synthesized)
gctcaagaagccctcactgacatgccacccagggcagaggaagagttggaccctgtgaccctacacaaccaggcactaatgaacatggatgccaggcctacagaagggtttgaaaagcta

SEQ ID NO: 708083 - DNA, 120 bp, Artificial Sequence
  ENSG00000196659_8 (sequence is synthesized)
cagtttttgctccaacagaatccctttcctccagagacttttggcaacctgttgctgctctactgtaaatatgagtattttgacctggcagcagatgtcctggcagaaaatgcccatttg

SEQ ID NO: 708084 - DNA, 120 bp, Artificial Sequence
  ENSG00000196659_9 (sequence is synthesized)
atttataagttcctcacaccctatctctatgacttcttggacgctgtgatcacttgccagacagctcctgaagaggctttcattaagcttgatgggctagcagggatgctgactgaggtc

SEQ ID NO: 708085 - DNA, 120 bp, Artificial Sequence
  ENSG00000196659_10 (sequence is synthesized)
ctccggaaacttaccatacaagtacaggaagcaagacacaatagagatgatgaagctatcaaaaaggcagtgaatgaatatgatgaaaccatggagaaatacattcctgtgttgatggct

SEQ ID NO: 708086 - DNA, 120 bp, Artificial Sequence
  ENSG00000196659_11 (sequence is synthesized)
caggcaaaaatctactggaatcttgaaaattatccaatggtggaaaagatcttccgcaaatctgtggaattctgtaacgaccatgatgtgtggaagttgaatgtggctcatgttctgttc

SEQ ID NO: 708087 - DNA, 120 bp, Artificial Sequence
  ENSG00000196659_12 (sequence is synthesized)
atgcaggaaaacaaatacaaagaagccattggtttctatgaacccatagtcaagaagcattatgataacatcctgaatgtcagtgctattgtactggctaatctctgtgtttcctatatt

SEQ ID NO: 708088 - DNA, 120 bp, Artificial Sequence
  ENSG00000196659_13 (sequence is synthesized)
atgacaagtcaaaatgaagaagcagaggagttgatgaggaagattgaaaaggaggaagagcagctctcttatgatgacccagataagaaaatgtaccatctctgcattgtgaatttggtg

SEQ ID NO: 708089 - DNA, 120 bp, Artificial Sequence
  ENSG00000196659_14 (sequence is synthesized)
ataggaactctttattgtgccaaaggaaattatgactttggtatttctcgagttatcaaaagcttggaaccttacaacaaaaagctgggaacagacacctggtattatgccaaaagatgc

SEQ ID NO: 708090 - DNA, 120 bp, Artificial Sequence
  ENSG00000196659_15 (sequence is synthesized)
tagaacactgtgaacttcatggcagaaacatacctgctgttattgaacaacccctggaagaagaaagaatgcatgttggaaagaatacagtcacatatgagtctaggcagttaaaagctt

SEQ ID NO: 708091 - DNA, 120 bp, Artificial Sequence
  ENSG00000196659_16 (sequence is synthesized)
tgatttatgagattataggatggaatatatagtaatagctgatagtggcatttatcaaatggctttgttatgtaaatttgcatcgctttatttaccctttggcatctttatatttgttac

SEQ ID NO: 708092 - DNA, 120 bp, Artificial Sequence
  ENSG00000196659_17 (sequence is synthesized)
atgttgaactttgtacacttatgcattataaaaaaaaaagtagctaaaacttttgctgttaaatttcccagaaagtgacatattctaagaacttttaccccaggagttatgaaaaattcc

SEQ ID NO: 708093 - DNA, 120 bp, Artificial Sequence
  ENSG00000196659_18 (sequence is synthesized)
aaacttatgaggaatgtttatatcagaagttgtaatacgtttgtttcctttcctctgttatcttttgtgctttgacgtatcttgaggggtctttgcacaaggattacatcattcagggac

SEQ ID NO: 708094 - DNA, 120 bp, Artificial Sequence
  ENSG00000196659_19 (sequence is synthesized)
caagcactatctcagtaatagttaagagtagtctttaaataatcatttcagggattgtgtgagagtagtctcacaatttacactcattaatttgtaatgcatactttttatatagacttt

SEQ ID NO: 708095 - DNA, 120 bp, Artificial Sequence
  ENSG00000196659_20 (sequence is synthesized)
aggatattttggcagtgtttattcatatggatataattctttacctaaccaaaattccttaggttataagtggttttaacgtgcaaaagtcagtaaaaaattttgttgccttaacaaaat

SEQ ID NO: 708096 - DNA, 120 bp, Artificial Sequence
  ENSG00000196659_21 (sequence is synthesized)
tatggtgctataatgtagagacaatgaacgattatcaaagaacaaatttccctggttttcttttgttccctttaataatttaaatatatgaacaagatacactgttactattttccatga

SEQ ID NO: 708097 - DNA, 120 bp, Artificial Sequence
  ENSG00000196659_22 (sequence is synthesized)
taactttttaaatatctctgtgagaaataacagagctatcctgagaactcaggggtttgtttaagagacacaggttttgttatgtttgttgcccaggctagtatccagctcctaggctta

SEQ ID NO: 708098 - DNA, 120 bp, Artificial Sequence
  ENSG00000196659_23 (sequence is synthesized)
cttcagcttcccaagtagctgggactactggcacaaatcactgggtccagttctcagttcttaattcctacctttgtgtttgcaatttaggatatgctggctgtacagtgtttccatgtt

SEQ ID NO: 708099 - DNA, 120 bp, Artificial Sequence
  ENSG00000196659_24 (sequence is synthesized)
tgtttccatgttgtagcctcttgaataaggaaaaatctcagccaccaggtctgaccaaaaaggtcaattctaagttgtaatgttcatttcatgtccgcaactcccaagagttatttggag

SEQ ID NO: 708100 - DNA, 120 bp, Artificial Sequence
  ENSG00000196659_25 (sequence is synthesized)
ttcccactgggaaccacatgcattctgatcaggcattttattttctgaaccttacaagagccttactatttgatttcccactcctcactcctctcttcccacaaaaagtaactgtcaatc

SEQ ID NO: 708101 - DNA, 120 bp, Artificial Sequence
  ENSG00000196659_26 (sequence is synthesized)
ctaacttgacctggcttagaaaaatcaagtgtattagactgaatcatatgcagttgttgattttgacagtttttgatgtacaaaactagcagtttctcatagctcaacctagtagctttc

SEQ ID NO: 708102 - DNA, 120 bp, Artificial Sequence
  ENSG00000196659_27 (sequence is synthesized)
ttctgaatgatagggaacctctgccataatgagatgattttttccttcaaggaaaaggaaccacttagccacataagtactgataagaaacatgctcagcataattcctctgtagcatga

SEQ ID NO: 708103 - DNA, 120 bp, Artificial Sequence
  ENSG00000196659_28 (sequence is synthesized)
cctcctgagtgctcaaattgtattataccaggaaatttggcttattgtgaagttcaatggttttgaatttatggcattttaaatcttaattatctgagctgctatcatttaccactgatg

SEQ ID NO: 708104 - DNA, 120 bp, Artificial Sequence
  ENSG00000196659_29 (sequence is synthesized)
ctttagtctcacatgtggaggacaagcaatgtttagtgacctcttcactgcatcccatagcacattcaatgtctgggaaatgttctttgtttgacaacttctgtactaaaagtgttgctg

SEQ ID NO: 708105 - DNA, 120 bp, Artificial Sequence
  ENSG00000196659_30 (sequence is synthesized)
cagtagctttgtgcccctgtcagtcttggtagccccttaagatttggaaagtaaatgaactgaaatcttgttttcaatggccatattaaaattctttttttttttcctgtttcttctaaa

SEQ ID NO: 708106 - DNA, 120 bp, Artificial Sequence
  ENSG00000196660_0 (sequence is synthesized)
ctcggcctcgcgttataaaaagcggtggggcagggccggcgagacaatctgggaggcgggtaccgggcctcacggatccgcgccgcgccccccacctgtggctgcgcgcggggtgggctg

SEQ ID NO: 708107 - DNA, 120 bp, Artificial Sequence
  ENSG00000196660_1 (sequence is synthesized)
cgctcccctgggcggcgccgggcgcccggggctggtggcgagatgggccgctactctggcaagacgtgccggctgctcttcatgctggtgctcaccgtcgccttcttcgtggcggagctg

SEQ ID NO: 708108 - DNA, 120 bp, Artificial Sequence
  ENSG00000196660_2 (sequence is synthesized)
gtctccggctacctgggcaactccatcgcgctgctctccgactccttcaacatgctctccgacctgatctcgctgtgcgtgggcctgagcgccggctacatcgcccggcgccccacccgg

SEQ ID NO: 708109 - DNA, 120 bp, Artificial Sequence
  ENSG00000196660_3 (sequence is synthesized)
ggcttcagcgccacctacggctacgcccgcgccgaggtggtgggcgcgctgagcaacgcggtcttcctcaccgcgctctgcttcaccatcttcgtggaggccgtgctgcgcctggcccgg

SEQ ID NO: 708110 - DNA, 120 bp, Artificial Sequence
  ENSG00000196660_4 (sequence is synthesized)
cccgagcgcatcgatgaccccgagctggtgctcatcgtcggcgtcctggggctgttggtcaacgtggtggggctgctcatcttccaggactgcgccgcctggttcgcgtgctgcctccgg

SEQ ID NO: 708111 - DNA, 120 bp, Artificial Sequence
  ENSG00000196660_5 (sequence is synthesized)
actgcgccgcctggttcgcgtgctgcctccggggacgcagtcgccgcctgcagcagcggcagcagctggcggagggctgtgtccccggcgctttcggggggcctcagggcgcggaggacc

SEQ ID NO: 708112 - DNA, 120 bp, Artificial Sequence
  ENSG00000196660_6 (sequence is synthesized)
tcggactcggccgtaaccctccgggggacctcggtggaaaggaagcgggagaagggggcgaccgtgttcgcaaacgtagcaggtgattccttcaacacccagaatgagccagaagacatg

SEQ ID NO: 708113 - DNA, 120 bp, Artificial Sequence
  ENSG00000196660_7 (sequence is synthesized)
ttcccctgaagagtgaggacccgtgtaactggcagtgttacattgaccccagcctgactgtcctcatggtcatcatcattttgtcatctgccttcccgcttatcaaggagaccgctgcca

SEQ ID NO: 708114 - DNA, 120 bp, Artificial Sequence
  ENSG00000196660_8 (sequence is synthesized)
ttctgctacagatggtcccaaaaggagtcaacatggaagagctgatgagtaaactctctgctgtgcctggaattagcagtgtacatgaagtgcacatctgggaacttgtaagtggaaaga

SEQ ID NO: 708115 - DNA, 120 bp, Artificial Sequence
  ENSG00000196660_9 (sequence is synthesized)
ttattgccaccctgcacatcaagtatcctaaggacaggggatatcaagatgccagcacaaaaattcgagaaatcttccaccatgcgggaatccacaatgtgaccatccagtttgaaaatg

SEQ ID NO: 708116 - DNA, 120 bp, Artificial Sequence
  ENSG00000196660_10 (sequence is synthesized)
tggacttgaaggaacccctggagcagaaggacttactgttgctctgcaactcaccctgcatctccaagggctgtgctaagcagctgtgttgtccccccggggcactgcctctggctcacg

SEQ ID NO: 708117 - DNA, 120 bp, Artificial Sequence
  ENSG00000196660_11 (sequence is synthesized)
tcaatggctgtgctgagcacaatggtgggccctctctagacacatacggaagtgatggcctcagtagaagagacgcaagagaagtggctattgaagtgtctttggatagctgtctgagtg

SEQ ID NO: 708118 - DNA, 120 bp, Artificial Sequence
  ENSG00000196660_12 (sequence is synthesized)
accacggacaaagtcttaacaaaactcaggaggaccaatgttatgtcaacagaacgcatttttaatctggtactcacataatcagaccatatagacgaggcactttggaaccacaagctt

SEQ ID NO: 708119 - DNA, 120 bp, Artificial Sequence
  ENSG00000196660_13 (sequence is synthesized)
ggctcacaaaaagagctttctgggttgtaggcccagactagacttgcagcatgcatgctctgtgttcactaggggttggctgtttgggattttagttaaacgtgtctgtgaatttttatg

SEQ ID NO: 708120 - DNA, 120 bp, Artificial Sequence
  ENSG00000196660_14 (sequence is synthesized)
taactaactcctttccattcccctgggtgtctcatgctgctctttgactgtttcagcttgaacatgcattttctaaagcaaactgcactagtgtatatatcagggacattaaagtctggg

SEQ ID NO: 708121 - DNA, 120 bp, Artificial Sequence
  ENSG00000196660_15 (sequence is synthesized)
aaacgtagcagaacttatacacaacacaaggtttcttctttgaatgcaggtgattccttcaacacccagaatgagccagaagacatgatgaaaaaagagaaaaagtctgaagctctgaat

SEQ ID NO: 708122 - DNA, 120 bp, Artificial Sequence
  ENSG00000196660_16 (sequence is synthesized)
catagcttaaatacattgaaaaaactaaagtaccacaatagctgtatttttcccaatccccttaacgatcataaaagaggcaagttaagtatttctggcactgaagaaatatcttttttc

SEQ ID NO: 708123 - DNA, 120 bp, Artificial Sequence
  ENSG00000196660_17 (sequence is synthesized)
tttgattcatttttgaataaatataaaatgaataactattaaggtagaaaatattctcagaacattctagaggaggtaaaggttagtaggagggcgttggccatctctacattttgtgag

SEQ ID NO: 708124 - DNA, 120 bp, Artificial Sequence
  ENSG00000196660_18 (sequence is synthesized)
gtgagagaaaactaatgtttactttctgctgtgaactgaactgcagctatagaatgtttcaaatgcttaaatatataatacatttttttccatggaagtgagggaatatttcagtttcct

SEQ ID NO: 708125 - DNA, 120 bp, Artificial Sequence
  ENSG00000196660_19 (sequence is synthesized)
gaagtatgacacaaatactcatatactgtcttttagagtcagtatagttggagctgttttcatttagtgctttgataatgatttacttatttttccaaatttcgtttgaattttctttca

SEQ ID NO: 708126 - DNA, 120 bp, Artificial Sequence
  ENSG00000196660_20 (sequence is synthesized)
tatgattgcattgatctatgcagcatttaccagaaaagagtattcctgggatagcagaatgcataacactgagtgttaattcttgtgaaataaataagctagactgccttctctttaatt

SEQ ID NO: 708127 - DNA, 120 bp, Artificial Sequence
  ENSG00000196660_21 (sequence is synthesized)
agacatattttaaagtatttattatagttgtcaactagtaactcaatgaaaaagttgatgcccaagggagaaatgagaattagcttaattgctgcctttaatgtgtttttgaggaactta

SEQ ID NO: 708128 - DNA, 120 bp, Artificial Sequence
  ENSG00000196660_22 (sequence is synthesized)
aaattttctttcatgtcgctgatccatattaccaagttcaaataaaatttttataatcggattcagacccataaccaaactatgttggtagtagagaagcatctgtcatgtttttaacac

SEQ ID NO: 708129 - DNA, 120 bp, Artificial Sequence
  ENSG00000196660_23 (sequence is synthesized)
attgctcagacatcagtatttaaatcagaacagtctcacaggtatgagaaaatgggaagtgcctcactagacaactagtatcatctctggtagactgcaagattgtctgaaaataaccat

SEQ ID NO: 708130 - DNA, 120 bp, Artificial Sequence
  ENSG00000196660_24 (sequence is synthesized)
ctcttagtgtgtaaagtcctgttcagaatctgcacagggtttttcagaggtgctgggttgataatgaaggcagcatccacagaacaaacatcatatttaaacaatgtatcttagtcctaa

SEQ ID NO: 708131 - DNA, 120 bp, Artificial Sequence
  ENSG00000196660_25 (sequence is synthesized)
atatttaaacaatgtatcttagtcctaaatttgaaggctaaaataaataagcagctatgatccgtaggataggaaattattatttttttctttttttgtagagacagggtctcgctatgt

SEQ ID NO: 708132 - DNA, 120 bp, Artificial Sequence
  ENSG00000196660_26 (sequence is synthesized)
caagtgattctctcgccttggcctcccaaagcactgggagaacagtcatgagccactgcacctggccaggaaattctttattccttgaaaatgtattatctgagtttaaattggctgtga

SEQ ID NO: 708133 - DNA, 120 bp, Artificial Sequence
  ENSG00000196660_27 (sequence is synthesized)
agtaggtaaatagaaaaatgcctaaaaatgtttttatttctaggagcttattgggctaggttatatgccctttataagctcaaaggggttaataagtaagaatttctatttttagtatta

SEQ ID NO: 708134 - DNA, 120 bp, Artificial Sequence
  ENSG00000196660_28 (sequence is synthesized)
aaagtgtggcatgtactcacacaaaacagtgcatcctcttaagaaacttggcatggagatcagtgggccagattctcctacataaacattggttgaaattccttagagccaaaaaagaaa

SEQ ID NO: 708135 - DNA, 120 bp, Artificial Sequence
  ENSG00000196660_29 (sequence is synthesized)
cttcaatgttcttaactatgtcatcttcttggactgctgttactgcgcagcacccaagccccagggagacatggaagcaggtgattccttcaacacccagaatgagccagaagacatgat

SEQ ID NO: 708136 - DNA, 120 bp, Artificial Sequence
  ENSG00000196660_30 (sequence is synthesized)
acagatggtcccaaaaggagtcaacatggaagagctgatctggtaacaaatagttaatggactgacactggtatgcagaccaaggctttgagtggcactgcgtgcatggaaaagagaaga

SEQ ID NO: 708137 - DNA, 120 bp, Artificial Sequence
  ENSG00000196660_31 (sequence is synthesized)
gaatcaaggacggagccctggggcactctgacctttggagatctggcagctgggggaggagccaacaaaaaagctggaggaagagcagccatgagtccagcctgaggaatgcctgctcaa

SEQ ID NO: 708138 - DNA, 120 bp, Artificial Sequence
  ENSG00000196660_32 (sequence is synthesized)
ctggtttgatcattttgactgaaacaagcggtcatttcatgtcctatgggatgcttgctgaggacattaaacacagaaacaagtagaacatgaattcagagtgaaggagatgttaaaggg

SEQ ID NO: 708139 - DNA, 120 bp, Artificial Sequence
  ENSG00000196660_33 (sequence is synthesized)
atggagaaatggagaaagagagttgaaataactctcctattaccatcaagcaaatcaaacacagaatgggaccagcatgccacattccctctgtgaagccttggagtgcaactgcattag

SEQ ID NO: 708140 - DNA, 120 bp, Artificial Sequence
  ENSG00000196660_34 (sequence is synthesized)
ggtcccacttttctgctttacagtggtagttgagaatgtcatacccctaaggacatggggaagatgtgtccttgactgattgatccctgtgacacagtctgacactttgcttttgttcag

SEQ ID NO: 708141 - DNA, 120 bp, Artificial Sequence
  ENSG00000196660_35 (sequence is synthesized)
caattctcaaagcactggattgcaatgatgccctgttgacagcactgttcaaaagtcgacctgttgttgctggaacctccaagaatacagtgtttgatctcagccaggatcctgtcttgg

SEQ ID NO: 708142 - DNA, 120 bp, Artificial Sequence
  ENSG00000196660_36 (sequence is synthesized)
aagaggagagggaatcccaaaaactacttgtgaagaagatcccattgttcaatcaaatcctcgtcactgtagcaatccatgcatgccattgcagttggcattctgacacgtgtacacagt

SEQ ID NO: 708143 - DNA, 120 bp, Artificial Sequence
  ENSG00000196660_37 (sequence is synthesized)
gttttcatctcttccctggagttgcagccaaagcctgagattcctttcgacacgaccctgaaaaaactctgggtttgtgctcccctctgctctgcaataacataccagctctgtgatgtg

SEQ ID NO: 708144 - DNA, 120 bp, Artificial Sequence
  ENSG00000196660_38 (sequence is synthesized)
gccaatgtttacctagttggtgggaggactttttaatatcaaaaggaaaacatttcttctgcattccacatagaatctgccaaggacattcccaaagatctacttacttattagagaaac

SEQ ID NO: 708145 - DNA, 120 bp, Artificial Sequence
  ENSG00000196660_39 (sequence is synthesized)
caagagagtcccagcagcacagagggatcgagaagactgagaacagaactggagaacaaaagtgaagtggtggcaaagtgctggaccagatgttagaagtctccaatttgctctcgacaa

SEQ ID NO: 708146 - DNA, 120 bp, Artificial Sequence
  ENSG00000196660_40 (sequence is synthesized)
caacaatccacaagtaaccctgagaaaagtcatctctgtttccccactggtaaataatggtaagaaaaatagtgcctagtggggcttacgtagaggactgggaagctgaactgtgaaaaa

SEQ ID NO: 708147 - DNA, 120 bp, Artificial Sequence
  ENSG00000196660_41 (sequence is synthesized)
tgattccaaggtttctggtcaccatggctactactcttttgtacccagttctttgctcctcaaggagccttgttttctatacttgtgaatatttcaaccaactaataaagatttaatggc

SEQ ID NO: 708148 - DNA, 120 bp, Artificial Sequence
  ENSG00000196660_42 (sequence is synthesized)
ctcttaaaccaaatgccatttaaatgaccacagactaaatacaaagtaggtaaatgcttacagggaaaggggaaagtggatcaaggtagaaaaaagacaatttgttttaaacactcttaa

SEQ ID NO: 708149 - DNA, 120 bp, Artificial Sequence
  ENSG00000196660_43 (sequence is synthesized)
tacaacttgttctctctccccttaaacatgtttaaaacaacgtaaagcacagatgattgtctgaaagaaaaagaaatcatttgcacagcccctgttttccagcttggtgccctttgatgg

SEQ ID NO: 708150 - DNA, 120 bp, Artificial Sequence
  ENSG00000196660_44 (sequence is synthesized)
gtggtgagtggtagcgatgtggcccagtgagacggcacagtcgctcttcctgcaggtcagaatcttcctaggctgttgctcttccaaggtactctgagtcctgcgatggtggcctggggt

SEQ ID NO: 708151 - DNA, 120 bp, Artificial Sequence
  ENSG00000196660_45 (sequence is synthesized)
tttgtttcctaagaagtagttgccattattttgattcatcctactgttctaaccaaaacaaaaaccaaaaaactccaaatggtaacagatattcatatacccggacacccaagtcagtga

SEQ ID NO: 708152 - DNA, 120 bp, Artificial Sequence
  ENSG00000196660_46 (sequence is synthesized)
gtgtcacgtggcttccagatttgcatctgtgctgcagtagtctttcttcctggcaggtgtacttttgcatgtgatgggagatgccctggggtccgtggttgtggtcatcacggccatcat

SEQ ID NO: 708153 - DNA, 120 bp, Artificial Sequence
  ENSG00000196663_0 (sequence is synthesized)
acttgtggctctgccgctctagcccccggcggagccagctgctgctcttcggtgctggccccggtgccggccccgttgcccagggaacaggctcccggcagcccccgcggcccggagtcc

SEQ ID NO: 708154 - DNA, 120 bp, Artificial Sequence
  ENSG00000196663_1 (sequence is synthesized)
atcccgcctcctccggcccggcggggccgacgagtccggaggggctgccgcgggagcccccaggtttccctagatgacaaataaacattccttttcctgcgtgaagatagtctgtggaaa

SEQ ID NO: 708155 - DNA, 120 bp, Artificial Sequence
  ENSG00000196663_2 (sequence is synthesized)
ccttggccatggcatcgatatcagagcctgttacattcagagagttctgcccgttgtactatctcctcaatgccattccgacaaagatccagaagggtttccgctctatcgtggtctatc

SEQ ID NO: 708156 - DNA, 120 bp, Artificial Sequence
  ENSG00000196663_3 (sequence is synthesized)
tcacggccctcgacaccaacggggactacatcgcggtgggcagcagcatcggcatgctctatctgtactgccggcacctcaaccagatgaggaagtacaactttgaggggaagacggaat

SEQ ID NO: 708157 - DNA, 120 bp, Artificial Sequence
  ENSG00000196663_4 (sequence is synthesized)
ctatcactgtggtgaagctgctgagctgctttgatgacctggtggcagcaggcacagcctctggcagggttgcagtttttcaacttgtatcttcattgccagggagaaataaacagcttc

SEQ ID NO: 708158 - DNA, 120 bp, Artificial Sequence
  ENSG00000196663_5 (sequence is synthesized)
ggagatttgatgtcactggtattcacaaaaatagcattacagctctggcttggagccccaatggaatgaaattgttctctggagatgacaaaggcaaaattgtttattcttctctggatc

SEQ ID NO: 708159 - DNA, 120 bp, Artificial Sequence
  ENSG00000196663_6 (sequence is synthesized)
tagaccaggggctctgtaactcccagctggtgttggaggagccatcttccattgtgcagctggattatagccagaaagtgctgctggtctctactctgcaaagaagtctgctcttttaca

SEQ ID NO: 708160 - DNA, 120 bp, Artificial Sequence
  ENSG00000196663_7 (sequence is synthesized)
ctgaagaaaagtctgtaaggcaaattggaacacaaccaaggaaaagtactgggaaatttggtgcttgttttataccaggactctgtaagcaaagtgatctaaccttgtatgcgtcacggc

SEQ ID NO: 708161 - DNA, 120 bp, Artificial Sequence
  ENSG00000196663_8 (sequence is synthesized)
ccgggctccggctatggaaggctgatgtccacgggactgttcaagccacgtttatcttaaaagatgcttttgccgggggagtcaagccttttgaactgcacccgcgtctggaatccccca

SEQ ID NO: 708162 - DNA, 120 bp, Artificial Sequence
  ENSG00000196663_9 (sequence is synthesized)
acagtggaagttgcagcttacctgagaggcacctggggcttgtttcatgtttctttcaagaaggctgggtgctgagttggaatgaatatagtatctatctcctagacacagtcaaccagg

SEQ ID NO: 708163 - DNA, 120 bp, Artificial Sequence
  ENSG00000196663_10 (sequence is synthesized)
ccacagttgctggtttggaaggatccggtgatattgtgtctgtttcgtgcacagaaaatgaaatatttttcttgaaaggagataggaacattataagaatttcaagcaggcctgaaggat

SEQ ID NO: 708164 - DNA, 120 bp, Artificial Sequence
  ENSG00000196663_11 (sequence is synthesized)
taacatcaacagtgagagatggtctggagatgtctggatgctcagagcgtgtccacgtgcagcaagcggagaagctgccaggggccacagtttctgagacgaggctcagaggctcttcca

SEQ ID NO: 708165 - DNA, 120 bp, Artificial Sequence
  ENSG00000196663_12 (sequence is synthesized)
tggccagctccgtggccagcgagccaaggagcaggagcagctcgctcaactccaccgacagcggctccgggctcctgccccctgggctccaggccacccctgagctgggcaagggcagcc

SEQ ID NO: 708166 - DNA, 120 bp, Artificial Sequence
  ENSG00000196663_13 (sequence is synthesized)
agcccctgtcacagagattcaacgccatcagctcagaggactttgaccaggagcttgtcgtgaagcctatcaaagtgaaaaggaagaagaagaagaagaagacagaaggtggaagcagga

SEQ ID NO: 708167 - DNA, 120 bp, Artificial Sequence
  ENSG00000196663_14 (sequence is synthesized)
gcacctgtcacagctccctggaatcgacaccctgctccgaatttcctggggacagtccccagtccttgaacacagacttgctgtcgatgacctcaagtgtcctgggcagtagcgtggatc

SEQ ID NO: 708168 - DNA, 120 bp, Artificial Sequence
  ENSG00000196663_15 (sequence is synthesized)
agttaagtgcagagtctccagaccaggaaagcagcttcaatggtgaagtgaacggtgtcccacaggaaaatactgaccccgaaacgtttaatgtcctggaggtgtcaggatcaatgcctg

SEQ ID NO: 708169 - DNA, 120 bp, Artificial Sequence
  ENSG00000196663_16 (sequence is synthesized)
attctctggctgaggaagatgacattagaactgaaatgccacactgtcaccatgcacatgggcgggagctgctcaatggagcgagggaagatgtgggaggcagtgatgtcacgggactcg

SEQ ID NO: 708170 - DNA, 120 bp, Artificial Sequence
  ENSG00000196663_17 (sequence is synthesized)
gagatgagccgtgtcctgcagatgatggaccaaatagcacacagttacccttccaagaacaggacagctctcctggggcgcatgatggggaagacatccaacccattggcccccaaagca

SEQ ID NO: 708171 - DNA, 120 bp, Artificial Sequence
  ENSG00000196663_18 (sequence is synthesized)
ctttttgtgaagtccccctcctgaactcactcactgtgccttccagcctcagctgggccccaagtgctgaacagtggctgcctgggaccagagctgatgaaggcagccccgtggagccca

SEQ ID NO: 708172 - DNA, 120 bp, Artificial Sequence
  ENSG00000196663_19 (sequence is synthesized)
gccaagagcaggacatcctaaccagcatggaggcctctggccacctcagcacaaatctctggcatgctgtcactgatgatgacacaggtcagaaagaaatacccatttctgaacgtgtct

SEQ ID NO: 708173 - DNA, 120 bp, Artificial Sequence
  ENSG00000196663_20 (sequence is synthesized)
tggggagtgtgggaggacagctgactccggtctctgccttggcagccagcactcacaagccctggcttgagcagcctccacgggatcagacattgacgtccagcgatgaggaggacatct

SEQ ID NO: 708174 - DNA, 120 bp, Artificial Sequence
  ENSG00000196663_21 (sequence is synthesized)
atgcccacgggcttccttcttcatcctcagagacgagtgtgacagagctcggacctagttgctcccagcaggacctgagccggctgggtgcagaggacgccgggctgctcaagccagatc

SEQ ID NO: 708175 - DNA, 120 bp, Artificial Sequence
  ENSG00000196663_22 (sequence is synthesized)
agtttgcagaaagctggatgggctactcgggtcccggctatggcatcctcagcttggtggtctccgagaagtatatctggtgcctggactacaaaggcggcctgttctgcagcgcgttgc

SEQ ID NO: 708176 - DNA, 120 bp, Artificial Sequence
  ENSG00000196663_23 (sequence is synthesized)
cgggcgccgggctgcgctggcagaagtttgaagatgctgtccagcaggtggcagtctcgccctcaggagcccttctctggaagattgaacagaaatctaaccgggcttttgcttgtggga

SEQ ID NO: 708177 - DNA, 120 bp, Artificial Sequence
  ENSG00000196663_24 (sequence is synthesized)
aagtcaccatcaaggggaagcggcactggtacgaagccctgccccaggcagtgtttgtggccctgagcgatgacacggcctggatcatcaggaccagtggggacctatacttgcagacag

SEQ ID NO: 708178 - DNA, 120 bp, Artificial Sequence
  ENSG00000196663_25 (sequence is synthesized)
gtctgagcgtggatcgcccttgtgccagagccgtaaaggtggactgtccctacccgctgtcccagatcacagcccggaacaatgtggtgtgggcgctgacagagcagagggccctcctgt

SEQ ID NO: 708179 - DNA, 120 bp, Artificial Sequence
  ENSG00000196663_26 (sequence is synthesized)
accgggagggcgtgagcagcttctgtccggaaggcgagcagtggaagtgtgacattgtcagcgaaaggcaagctttagaacccgtctgcataacgctcggggatcagcagactctctggg

SEQ ID NO: 708180 - DNA, 120 bp, Artificial Sequence
  ENSG00000196663_27 (sequence is synthesized)
ccctggacatccatgggaacctgtggttcagaactggcattatttccaagaagccccaaggagatgacgaccattggtggcaagtgagcatcacggactatgtggtgtttgaccagtgca

SEQ ID NO: 708181 - DNA, 120 bp, Artificial Sequence
  ENSG00000196663_28 (sequence is synthesized)
gcttatttcagacgataatccatgccactcactcggtggccacagcagcccaagcccccgtagaaaaggtggcagataagctgcgcatggcgttttggtcccagcagcttcagtgccagc

SEQ ID NO: 708182 - DNA, 120 bp, Artificial Sequence
  ENSG00000196663_29 (sequence is synthesized)
caagccttctcggggtcaataacagcggtgtctggatctcctcgggcaagaatgaattccacgtcgctaagggaagtctcataggcacctactggaatcatgtggttccccgtgggacag

SEQ ID NO: 708183 - DNA, 120 bp, Artificial Sequence
  ENSG00000196663_30 (sequence is synthesized)
cttctgctacaaaatgggcctttgtgttggcttctgcagctcccacgaaggaaggaagcttcctgtggctgtgccagagcagcaaggacctgtgcagcgtcagcgcccagagcgcacagt

SEQ ID NO: 708184 - DNA, 120 bp, Artificial Sequence
  ENSG00000196663_31 (sequence is synthesized)
cgcggccctccacggtgcagctgcctcccgaagccgagatgcgcgcctatgccgcctgccaggatgcgctgtgggcgctggacagcctcggccaggtgttcatcaggacgctctccaaga

SEQ ID NO: 708185 - DNA, 120 bp, Artificial Sequence
  ENSG00000196663_32 (sequence is synthesized)
gctgccccacgggcatgcactggaccaggctggacctctcccagctaggagctgtaaaattgacaagcttggcatgtggaaatcagcacatctgggcctgtgattccaggggtggagttt

SEQ ID NO: 708186 - DNA, 120 bp, Artificial Sequence
  ENSG00000196663_33 (sequence is synthesized)
acttccgtgtagggactcagcctctcaatcccagtctcatgcttccagcctggataatgattgagccacctgtccagcccgccggggtcagcttggtcagcgtccattccagccccaacg

SEQ ID NO: 708187 - DNA, 120 bp, Artificial Sequence
  ENSG00000196663_34 (sequence is synthesized)
accagatgctgtgggtgcttgacagcaggtggaacgtgcacgtgcggaccgggatcaccgaggagatgcctgtggggaccgcctgggagcatgtgccagggttgcaggcctgccagctgg

SEQ ID NO: 708188 - DNA, 120 bp, Artificial Sequence
  ENSG00000196663_35 (sequence is synthesized)
cgctgagcaccaggaccgtgtgggcccgctgtccaaacggagacctcgcccggcggtacggcgtcacagacaagaaccccgccggggactactggaagaaaattcccggcagcgtgtcgt

SEQ ID NO: 708189 - DNA, 120 bp, Artificial Sequence
  ENSG00000196663_36 (sequence is synthesized)
gctgacaaagacgttcagccactcgcacggcacccagaagagcagccaggccgccatgccccaccctgaggacctggaggacgagtgggaggtcatctgaaggagccctggccgagtcac

SEQ ID NO: 708190 - DNA, 120 bp, Artificial Sequence
  ENSG00000196663_37 (sequence is synthesized)
gcggaggggcccggcgtctgtggcgggcacaggggcttcagagtgactccctggtggacgcgctgcctcaacacttgtccagacacctctggccaggttggacccgcacacttactttca

SEQ ID NO: 708191 - DNA, 120 bp, Artificial Sequence
  ENSG00000196663_38 (sequence is synthesized)
tctatgttggtttctgtctcgttccagaacccacagcctccacccgtggctggcgtgattgctgcagcagtggcgcctcctagctcaggacagtggcgactgcccggctgcatgcactcc

SEQ ID NO: 708192 - DNA, 120 bp, Artificial Sequence
  ENSG00000196663_39 (sequence is synthesized)
gattacccacgtgctgccgtcctggtctcatccacagatagctccagcttttgttggtgggagtggtctccggaggcctcccagaaccaagggtagccgggcagctggtttggcccaggg

SEQ ID NO: 708193 - DNA, 120 bp, Artificial Sequence
  ENSG00000196663_40 (sequence is synthesized)
cctccttccacattagtagccccagggccagatggagccaaaggtcagctctctgcagcgcgggatgtgctcggtgatggctttgtcccatcataggggggtgtccccccagagacaaag

SEQ ID NO: 708194 - DNA, 120 bp, Artificial Sequence
  ENSG00000196663_41 (sequence is synthesized)
ctgcagagcacattccatgccagacgctctggccaggaagctgaggccgggcttgagaggagagcgctggccatgccaggagagaacccacgcacatgcacaccacaacacacaacacac

SEQ ID NO: 708195 - DNA, 120 bp, Artificial Sequence
  ENSG00000196663_42 (sequence is synthesized)
ctcacctcacaccacagcacacctcaccacaccacaccgcactgcaccatacctcaccacatctcaccacaccacagcacacctcaccacacaacacaccacaccccacaccgcactgca

SEQ ID NO: 708196 - DNA, 120 bp, Artificial Sequence
  ENSG00000196663_43 (sequence is synthesized)
ccgcaccgcaccgcaccgtacctcgccacatctcaccacaccacaccacaccacacctcactgcccacacacggcgcaggctgcccgcctcctggagagcacacttcagctgaaacagta

SEQ ID NO: 708197 - DNA, 120 bp, Artificial Sequence
  ENSG00000196663_44 (sequence is synthesized)
aagcctgatgggtgcaaatggaacctggatgtgtgcacgtgtgtcccaggtagggacggcacaggagggtgcatggggcgtgggggagctgagcaagggtcgctcacttagaaatgtctt

SEQ ID NO: 708198 - DNA, 120 bp, Artificial Sequence
  ENSG00000196663_45 (sequence is synthesized)
tggaatggtgtttaactaatgctgctggcggacatcctaaaaccagatgcatcctcagaggacgagtctactaattattgcctttgttgttgtattacaaatctgcataaaatacctcat

SEQ ID NO: 708199 - DNA, 120 bp, Artificial Sequence
  ENSG00000196663_46 (sequence is synthesized)
ttcaaatcaaatcttacaaatttagaagagagatatgttttccgaaaacagtggaagccctttgttccttcccgggtttgtcctgagcctgcactgtcctcgcctgcagcctcagagggg

SEQ ID NO: 708200 - DNA, 120 bp, Artificial Sequence
  ENSG00000196663_47 (sequence is synthesized)
caggcatccccgcacagacttgactggcagggcggtcacgggacctgcgggctggctccgagtggcagcccatgccttctgcggggtatgggttgacacttgacaggttgaaaccagtgc

SEQ ID NO: 708201 - DNA, 120 bp, Artificial Sequence
  ENSG00000196663_48 (sequence is synthesized)
ctctatggacggctgctgtggccccttcagacaatgggcagtgcccaccccgcccactggcatctgcgtgtgagggctaggccgccctgccacacatcccgccccctcccggaggcagct

SEQ ID NO: 708202 - DNA, 120 bp, Artificial Sequence
  ENSG00000196663_49 (sequence is synthesized)
tcaggacaggacaccaggctggctgctttttttagcctgcccctggcccaggcccagtccttggtgtcagggagcccccaggccgcaggtggagggtgataaaatatgttctctgacagg

SEQ ID NO: 708203 - DNA, 120 bp, Artificial Sequence
  ENSG00000196663_50 (sequence is synthesized)
acccagccagccacataggtggaggttttccatgtccaaatgaggtcaagatgccgaaatcccagatctgacttcacacttcccttttctagaaccttttgtaaaagttggtggcagcag

SEQ ID NO: 708204 - DNA, 120 bp, Artificial Sequence
  ENSG00000196663_51 (sequence is synthesized)
aggcagccccaggccgggctgcatctctctgtgtctgttgtgccttgcccggcgcctcacggatggcaaagctctcctcacccatgggactgtagtgcaattaaacccgcgtctaggtga

SEQ ID NO: 708205 - DNA, 120 bp, Artificial Sequence
  ENSG00000196663_52 (sequence is synthesized)
tgcttttaaagttgtagcttcgtgctttgtacagttttctttctggttttaatttttagttgtgctttgagtcagtgcaataaactagactttttccaaacctggccgagtgtggtgcct

SEQ ID NO: 708206 - DNA, 120 bp, Artificial Sequence
  ENSG00000196663_53 (sequence is synthesized)
gagctgtgagaagtgtcctcagccgacactcacgagggcagtgcaagggagaacctgccagcccagccccaccacagggagagtgcgtcagcagacctgtcctggcctggctggtgttga

SEQ ID NO: 708207 - DNA, 120 bp, Artificial Sequence
  ENSG00000196663_54 (sequence is synthesized)
aatacacaccggtttgcccaagtggctgttatgggggaatggccgctccagagctggctgtaccccatggtagcctctgaggaggacgctgtggggtgaggtccagggctgcctcctcat

SEQ ID NO: 708208 - DNA, 120 bp, Artificial Sequence
  ENSG00000196663_55 (sequence is synthesized)
ggagctgtgtgtgagcaggcgttggaggggttcgagcccctggttctgtatcttcagccagcaaacgaaaccatatcgcaaaccagagctgctggaaaccagcacacgcaaaagatgacg

SEQ ID NO: 708209 - DNA, 120 bp, Artificial Sequence
  ENSG00000196663_56 (sequence is synthesized)
cccagcacagcagcaggacacaccatgtgccaggaaatgacctcagcaagaaacctcaggccgtgtgaagagcagcaaagctttccagaaggcataaaaggaaacttgaataaaggaaga

SEQ ID NO: 708210 - DNA, 120 bp, Artificial Sequence
  ENSG00000196663_57 (sequence is synthesized)
tatgttccacattcctggatggaggactacacacattatggaaagacctcattctttccaaaggaatttataggtgtagcttgatttcagttcaaatccccactgggattgttttgttgg

SEQ ID NO: 708211 - DNA, 120 bp, Artificial Sequence
  ENSG00000196663_58 (sequence is synthesized)
ggcaggcagggaggaataatgttagtacccacaaatgcccatgactgtgcccaatgtgcttctcaccagagccctgcaaggggaagtctcattagccccttgagactcagagaggttagg

SEQ ID NO: 708212 - DNA, 120 bp, Artificial Sequence
  ENSG00000196663_59 (sequence is synthesized)
taacttgctcaaggtcacacagcactgggactggaagccagctctgtagaactgcagacctgtgctgtttgatgcctcctcactgtcccgtcactcctgggaagaagaaacgggtgagaa

SEQ ID NO: 708213 - DNA, 120 bp, Artificial Sequence
  ENSG00000196663_60 (sequence is synthesized)
ctgctaagtgatgacaggtggagccccagcaggggccactctattgaatggcatggcccagaccctcggagggccaggcaacaggctagcaaggcccacagggagggagcagaatggaga

SEQ ID NO: 708214 - DNA, 120 bp, Artificial Sequence
  ENSG00000196663_61 (sequence is synthesized)
gggcatctcagatgcgcttaaggagcggcgggggcggggcatggggggtgtcacaactaatgtggccactgcttcattctctgggcaaaataatattaaatggattaaagaatctaaaac

SEQ ID NO: 708215 - DNA, 120 bp, Artificial Sequence
  ENSG00000196663_62 (sequence is synthesized)
cagtgggaaaactgtctgatttctggatggcaaaggctttctaaactcaaaagtgataggacaagctacagaggaaaataagtacatagatttgatttctccaaaatacagaaatgctgc

SEQ ID NO: 708216 - DNA, 70 bp, Artificial Sequence
  ENSG00000196663_63 (sequence is synthesized)
actatgatcacaccactgcactccagcctcggcgacagagcaagaccttgtttctcaaaaataaataaat

SEQ ID NO: 708217 - DNA, 120 bp, Artificial Sequence
  ENSG00000196663_64 (sequence is synthesized)
ggcgacagagcaagaccttgtttctcaaaaataaataaatagaaggaaataaatgtaaaaatgctgcaaattaaaaacctcaaagaagggaaataattgcaacaaatgggaattgatgtt

SEQ ID NO: 708218 - DNA, 120 bp, Artificial Sequence
  ENSG00000196663_65 (sequence is synthesized)
ggaattgatgttgaatatttaccttaaaaacctatacaacaataagaggagtgcgcccttcagcagcatgtatacaaaaattgcaacgatacagagattagcatggcccctgcacaagga

SEQ ID NO: 708219 - DNA, 120 bp, Artificial Sequence
  ENSG00000196663_66 (sequence is synthesized)
tcataaagctttccataaatatatttattaaaaaccaataggaggagcacttcgagtcgagtgtaagggcccttcacaaaagcagaaggaacactggcccaaacccccagcaccccggaa

SEQ ID NO: 708220 - DNA, 120 bp, Artificial Sequence
  ENSG00000196663_67 (sequence is synthesized)
gcagaggtgagatgggagcagcttgggagccccccattggcgccgccctactggggaagccggtccgtacgtaggccttgcatctcgccacctccacttctgtcctcaagaacaagtcct

SEQ ID NO: 708221 - DNA, 120 bp, Artificial Sequence
  ENSG00000196663_68 (sequence is synthesized)
aggtcaagggaaacagcacagcctgtttataattaggaaacacttaaaacagcctggcatttgggaacagccatgttaacgtgagcaaattcctctcatgaaatagcctgcagctattaa

SEQ ID NO: 708222 - DNA, 120 bp, Artificial Sequence
  ENSG00000196663_69 (sequence is synthesized)
gaagcacgtgtgtgcaggaagcggaggcgcaggacctcaccgcgccagcgtgaagttcccgggcatggtcatgaaagcgtggttctgtaagaaatcagagggagaaagggagagaagggg

SEQ ID NO: 708223 - DNA, 120 bp, Artificial Sequence
  ENSG00000196663_70 (sequence is synthesized)
gagggagacaacccaaacgttggagggtatttgttgtaaacttcaaacttttggcaggtttgaaatttttcataactccggggaggagcaagaggggtgaaaagaaacaagttctctact

SEQ ID NO: 708224 - DNA, 120 bp, Artificial Sequence
  ENSG00000196663_71 (sequence is synthesized)
tgtgatcagcagctggtcatagtggttgcctggagtatatgcctttttgtatcctttgaatttccagccatgtaaatgtattatttattccaaaaataaagcagatttacattttaaaaa

SEQ ID NO: 708225 - DNA, 120 bp, Artificial Sequence
  ENSG00000196663_72 (sequence is synthesized)
aactcactcttcagtaagacagaaactgtgaggatgctggtactgggaaaaaggatctgcacagcctctagaggcctcccagcaaatgcggggagccatgcccccagggtctacacactc

SEQ ID NO: 708226 - DNA, 120 bp, Artificial Sequence
  ENSG00000196663_73 (sequence is synthesized)
tcgttcatcaacatcacaactggaattcgggatttgtgaagtttagagctgaacagactgttacagattatgagtcaacacgtatattttctctttcaaaataataatatttcgtttttg

SEQ ID NO: 708227 - DNA, 120 bp, Artificial Sequence
  ENSG00000196663_74 (sequence is synthesized)
cgtttttgactttttactaagtgaatattattttttaaatctgcctatatattggaacctctattttataataataatgataataaatcagtacccagaagtataaagaaggtaaaagtt

SEQ ID NO: 708228 - DNA, 120 bp, Artificial Sequence
  ENSG00000196663_75 (sequence is synthesized)
gcatgctgccactaacatgtccccagttccggaagtctcctgtcctttctcttgtcacccaactcctgccttccctgaaagtcccttcccgcttccagcccgccggggtcagcttggtca

SEQ ID NO: 708229 - DNA, 120 bp, Artificial Sequence
  ENSG00000196663_76 (sequence is synthesized)
agacatcttagtacagggctcccctgcagcagctctgggctcacgctgccgtgcgttcaccaggtttgcctcttcaggaacgtttgaggggttgtctccaaagaacgtgaattgcttcat

SEQ ID NO: 708230 - DNA, 120 bp, Artificial Sequence
  ENSG00000196663_77 (sequence is synthesized)
tggatgtcaattcgtagtgtaaatgggtgttcagtttgagtttttgttttctttattaattgcaatggagcccttctctggaagattgaacagaaatctaaccgggcttttgcttgtggg

SEQ ID NO: 708231 - DNA, 120 bp, Artificial Sequence
  ENSG00000196663_78 (sequence is synthesized)
cgtggagcccagccaagagcaggacatcctaaccagcatggaggcctctggccacctcagcacaaatctctggcatgctgtcactgatgatgacacagagacgagtgtgacagagctcgg

SEQ ID NO: 708232 - DNA, 120 bp, Artificial Sequence
  ENSG00000196664_0 (sequence is synthesized)
acttcatctcagaagactccagatataggatcactccatgccatcaagaaagttgatgctattgggcccatctcaagctgatcttggcacctctcatgctctgctctcttcaaccagacc

SEQ ID NO: 708233 - DNA, 120 bp, Artificial Sequence
  ENSG00000196664_1 (sequence is synthesized)
tctacattccattttggaagaagactaaaaatggtgtttccaatgtggacactgaagagacaaattcttatcctttttaacataatcctaatttccaaactccttggggctagatggttt

SEQ ID NO: 708234 - DNA, 120 bp, Artificial Sequence
  ENSG00000196664_2 (sequence is synthesized)
cctaaaactctgccctgtgatgtcactctggatgttccaaagaaccatgtgatcgtggactgcacagacaagcatttgacagaaattcctggaggtattcccacgaacaccacgaacctc

SEQ ID NO: 708235 - DNA, 120 bp, Artificial Sequence
  ENSG00000196664_3 (sequence is synthesized)
accctcaccattaaccacataccagacatctccccagcgtcctttcacagactggaccatctggtagagatcgatttcagatgcaactgtgtacctattccactggggtcaaaaaacaac

SEQ ID NO: 708236 - DNA, 120 bp, Artificial Sequence
  ENSG00000196664_4 (sequence is synthesized)
atgtgcatcaagaggctgcagattaaacccagaagctttagtggactcacttatttaaaatccctttacctggatggaaaccagctactagagataccgcagggcctcccgcctagctta

SEQ ID NO: 708237 - DNA, 120 bp, Artificial Sequence
  ENSG00000196664_5 (sequence is synthesized)
cagcttctcagccttgaggccaacaacatcttttccatcagaaaagagaatctaacagaactggccaacatagaaatactctacctgggccaaaactgttattatcgaaatccttgttat

SEQ ID NO: 708238 - DNA, 120 bp, Artificial Sequence
  ENSG00000196664_6 (sequence is synthesized)
gtttcatattcaatagagaaagatgccttcctaaacttgacaaagttaaaagtgctctccctgaaagataacaatgtcacagccgtccctactgttttgccatctactttaacagaacta

SEQ ID NO: 708239 - DNA, 120 bp, Artificial Sequence
  ENSG00000196664_7 (sequence is synthesized)
tatctctacaacaacatgattgcaaaaatccaagaagatgattttaataacctcaaccaattacaaattcttgacctaagtggaaattgccctcgttgttataatgccccatttccttgt

SEQ ID NO: 708240 - DNA, 120 bp, Artificial Sequence
  ENSG00000196664_8 (sequence is synthesized)
gcgccgtgtaaaaataattctcccctacagatccctgtaaatgcttttgatgcgctgacagaattaaaagttttacgtctacacagtaactctcttcagcatgtgcccccaagatggttt

SEQ ID NO: 708241 - DNA, 120 bp, Artificial Sequence
  ENSG00000196664_9 (sequence is synthesized)
aagaacatcaacaaactccaggaactggatctgtcccaaaacttcttggccaaagaaattggggatgctaaatttctgcattttctccccagcctcatccaattggatctgtctttcaat

SEQ ID NO: 708242 - DNA, 120 bp, Artificial Sequence
  ENSG00000196664_10 (sequence is synthesized)
tttgaacttcaggtctatcgtgcatctatgaatctatcacaagcattttcttcactgaaaagcctgaaaattctgcggatcagaggatatgtctttaaagagttgaaaagctttaacctc

SEQ ID NO: 708243 - DNA, 120 bp, Artificial Sequence
  ENSG00000196664_11 (sequence is synthesized)
tcgccattacataatcttcaaaatcttgaagttcttgatcttggcactaactttataaaaattgctaacctcagcatgtttaaacaatttaaaagactgaaagtcatagatctttcagtg

SEQ ID NO: 708244 - DNA, 120 bp, Artificial Sequence
  ENSG00000196664_12 (sequence is synthesized)
aataaaatatcaccttcaggagattcaagtgaagttggcttctgctcaaatgccagaacttctgtagaaagttatgaaccccaggtcctggaacaattacattatttcagatatgataag

SEQ ID NO: 708245 - DNA, 120 bp, Artificial Sequence
  ENSG00000196664_13 (sequence is synthesized)
tatgcaaggagttgcagattcaaaaacaaagaggcttctttcatgtctgttaatgaaagctgctacaagtatgggcagaccttggatctaagtaaaaatagtatattttttgtcaagtcc

SEQ ID NO: 708246 - DNA, 120 bp, Artificial Sequence
  ENSG00000196664_14 (sequence is synthesized)
tctgattttcagcatctttctttcctcaaatgcctgaatctgtcaggaaatctcattagccaaactcttaatggcagtgaattccaacctttagcagagctgagatatttggacttctcc

SEQ ID NO: 708247 - DNA, 120 bp, Artificial Sequence
  ENSG00000196664_15 (sequence is synthesized)
aacaaccggcttgatttactccattcaacagcatttgaagagcttcacaaactggaagttctggatataagcagtaatagccattattttcaatcagaaggaattactcatatgctaaac

SEQ ID NO: 708248 - DNA, 120 bp, Artificial Sequence
  ENSG00000196664_16 (sequence is synthesized)
tttaccaagaacctaaaggttctgcagaaactgatgatgaacgacaatgacatctcttcctccaccagcaggaccatggagagtgagtctcttagaactctggaattcagaggaaatcac

SEQ ID NO: 708249 - DNA, 120 bp, Artificial Sequence
  ENSG00000196664_17 (sequence is synthesized)
ttagatgttttatggagagaaggtgataacagatacttacaattattcaagaatctgctaaaattagaggaattagacatctctaaaaattccctaagtttcttgccttctggagttttt

SEQ ID NO: 708250 - DNA, 120 bp, Artificial Sequence
  ENSG00000196664_18 (sequence is synthesized)
gatggtatgcctccaaatctaaagaatctctctttggccaaaaatgggctcaaatctttcagttggaagaaactccagtgtctaaagaacctggaaactttggacctcagccacaaccaa

SEQ ID NO: 708251 - DNA, 120 bp, Artificial Sequence
  ENSG00000196664_19 (sequence is synthesized)
ctgaccactgtccctgagagattatccaactgttccagaagcctcaagaatctgattcttaagaataatcaaatcaggagtctgacgaagtattttctacaagatgccttccagttgcga

SEQ ID NO: 708252 - DNA, 120 bp, Artificial Sequence
  ENSG00000196664_20 (sequence is synthesized)
gcttttgcatcataatcggtttctgtgcacctgtgatgctgtgtggtttgtctggtgggttaaccatacggaggtgactattccttacctggccacagatgtgacttgtgtggggccagg

SEQ ID NO: 708253 - DNA, 120 bp, Artificial Sequence
  ENSG00000196664_21 (sequence is synthesized)
agcacacaagggccaaagtgtgatctccctggatctgtacacctgtgagttagatctgactaacctgattctgttctcactttccatatctgtatctctctttctcatggtgatgatgac

SEQ ID NO: 708254 - DNA, 120 bp, Artificial Sequence
  ENSG00000196664_22 (sequence is synthesized)
agcaagtcacctctatttctgggatgtgtggtatatttaccatttctgtaaggccaagataaaggggtatcagcgtctaatatcaccagactgttgctatgatgcttttattgtgtatga

SEQ ID NO: 708255 - DNA, 120 bp, Artificial Sequence
  ENSG00000196664_23 (sequence is synthesized)
cactaaagacccagctgtgaccgagtgggttttggctgagctggtggccaaactggaagacccaagagagaaacattttaatttatgtctcgaggaaagggactggttaccagggcagcc

SEQ ID NO: 708256 - DNA, 120 bp, Artificial Sequence
  ENSG00000196664_24 (sequence is synthesized)
agttctggaaaacctttcccagagcatacagcttagcaaaaagacagtgtttgtgatgacagacaagtatgcaaagactgaaaattttaagatagcattttacttgtcccatcagaggct

SEQ ID NO: 708257 - DNA, 120 bp, Artificial Sequence
  ENSG00000196664_25 (sequence is synthesized)
catggatgaaaaagttgatgtgattatcttgatatttcttgagaagccctttcagaagtccaagttcctccagctccggaaaaggctctgtgggagttctgtccttgagtggccaacaaa

SEQ ID NO: 708258 - DNA, 120 bp, Artificial Sequence
  ENSG00000196664_26 (sequence is synthesized)
cccgcaagctcacccatacttctggcagtgtctaaagaacgccctggccacagacaatcatgtggcctatagtcaggtgttcaaggaaacggtctagcccttctttgcaaaacacaactg

SEQ ID NO: 708259 - DNA, 120 bp, Artificial Sequence
  ENSG00000196664_27 (sequence is synthesized)
cctagtttaccaaggagaggcctggctgtttaaattgttttcatatatatcacaccaaaagcgtgttttgaaattcttcaagaaatgagattgcccatatttcaggggagccaccaacgt

SEQ ID NO: 708260 - DNA, 120 bp, Artificial Sequence
  ENSG00000196664_28 (sequence is synthesized)
ctgtcacaggagttggaaagatggggtttatataatgcatcaagtcttctttcttatctctctgtgtctctatttgcacttgagtctctcacctcagctcctgtaaaagagtggcaagta

SEQ ID NO: 708261 - DNA, 120 bp, Artificial Sequence
  ENSG00000196664_29 (sequence is synthesized)
aaaaacatggggctctgattctcctgtaattgtgataattaaatatacacacaatcatgacattgagaagaactgcatttctacccttaaaaagtactggtatatacagaaatagggtta

SEQ ID NO: 708262 - DNA, 120 bp, Artificial Sequence
  ENSG00000196664_30 (sequence is synthesized)
tatatacagaaatagggttaaaaaaaactcaagctctctctatatgagaccaaaatgtactagagttagtttagtgaaataaaaaaccagtcagctggccgggcatggtggctcatgctt

SEQ ID NO: 708263 - DNA, 68 bp, Artificial Sequence
  ENSG00000196664_31 (sequence is synthesized)
cgccactgcaatgcagcccgggcaacagagctagactgtctcaaaagaacaaaaaaaaaaaaacacaa

SEQ ID NO: 708264 - DNA, 120 bp, Artificial Sequence
  ENSG00000196664_32 (sequence is synthesized)
acaaaaaaaaaaaaacacaaaaaaactcagtcagcttcttaaccaattgcttccgtgtcatccagggccccattctgtgcagattgagtgtgggcaccacacaggtggttgctgcttcag

SEQ ID NO: 708265 - DNA, 120 bp, Artificial Sequence
  ENSG00000196664_33 (sequence is synthesized)
tgcttcctgctctttttccttgggcctgcttctgggttccatagggaaacagtaagaaagaaagacacatccttaccataaatgcatatggtccacctacaaatagaaaaatatttaaat

SEQ ID NO: 708266 - DNA, 120 bp, Artificial Sequence
  ENSG00000196664_34 (sequence is synthesized)
gatctgcctttatacaaagtgatattctctacctttgataatttacctgcttaaatgtttttatctgcactgcaaagtactgtatccaaagtaaaatttcctcatccaatatctttcaaa

SEQ ID NO: 708267 - DNA, 120 bp, Artificial Sequence
  ENSG00000196664_35 (sequence is synthesized)
ctgttttgttaactaatgccatatatttgtaagtatctgcacacttgatacagcaacgttagatggttttgatggtaaaccctaaaggaggactccaagagtgtgtatttatttatagtt

SEQ ID NO: 708268 - DNA, 120 bp, Artificial Sequence
  ENSG00000196664_36 (sequence is synthesized)
ttatcagagatgacaattatttgaatgccaattatatggattcctttcattttttgctggaggatgggagaagaaaccaaagtttatagaccttcacattgagaaagcttcagttttgaa

SEQ ID NO: 708269 - DNA, 120 bp, Artificial Sequence
  ENSG00000196664_37 (sequence is synthesized)
cttcagctatcagattcaaaaacaacagaaagaaccaagacattcttaagatgcctgtactttcagctgggtataaattcatgagttcaaagattgaaacctgaccaatttgctttattt

SEQ ID NO: 708270 - DNA, 120 bp, Artificial Sequence
  ENSG00000196664_38 (sequence is synthesized)
catggaagaagtgatctacaaaggtgtttgtgccatttggaaaacagcgtgcatgtgttcaagccttagattggcgatgtcgtattttcctcacgtgtggcaatgccaaaggctttactt

SEQ ID NO: 708271 - DNA, 120 bp, Artificial Sequence
  ENSG00000196664_39 (sequence is synthesized)
tacctgtgagtacacactatatgaattatttccaacgtacatttaatcaataagggtcacaaattcccaaatcaatctctggaataaatagagaggtaattaaattgctggagccaacta

SEQ ID NO: 708272 - DNA, 120 bp, Artificial Sequence
  ENSG00000196664_40 (sequence is synthesized)
agttgatgctattgggcccatctcaagctgatcttggcacctctcatgctctgctctcttcaaccagacctctacattccattttggaagaagactaaaaatgttaatcttccttctggc

SEQ ID NO: 708273 - DNA, 120 bp, Artificial Sequence
  ENSG00000196664_41 (sequence is synthesized)
gtgtggagagccaagagatgttttgtttggcataaagcattccaagggtcagtgggcttgggctcaactattgagcataggacaagggcagccccatcctgactgtgactcttcccacaa

SEQ ID NO: 708274 - DNA, 120 bp, Artificial Sequence
  ENSG00000196666_0 (sequence is synthesized)
agctgaggtgtgtggcaggcagatgagggagcagagaactgctgaacagagtgagactcagaggacgtggttgagcatggctgcgaccctgcagttcctggtttgcctggtggtagccat

SEQ ID NO: 708275 - DNA, 120 bp, Artificial Sequence
  ENSG00000196666_1 (sequence is synthesized)
ttgtctcctctctggtgtgactacaacccagccccatgcagggcagcccatggacagcaccagcgtgggaggtggcctgcaggagccagaggccccggaagtgatgtttgagctgctctg

SEQ ID NO: 708276 - DNA, 120 bp, Artificial Sequence
  ENSG00000196666_2 (sequence is synthesized)
ggctgggctggagctggatgtcatggggcagctgcacatccaggatgaggaactagcgtccacacacccaggccgccgactcagactcctcctgcagcaccacgtgcccagtgacttgga

SEQ ID NO: 708277 - DNA, 120 bp, Artificial Sequence
  ENSG00000196666_3 (sequence is synthesized)
gggcactgagcagtggctgcagcagctccaggacctgcggaaggggcctcctcttagcacttgggactttgaacatctgctcctcacaggcctgtcctgcgtctaccggctccacgcagc

SEQ ID NO: 708278 - DNA, 120 bp, Artificial Sequence
  ENSG00000196666_4 (sequence is synthesized)
tagtgaggctgaggaacggggccgctgggcccaggtcttcgctctcctggcacaggaaacactctgggacctgtgcaaaggtttctgcccccaggaccggcccccttccctggggtcctg

SEQ ID NO: 708279 - DNA, 120 bp, Artificial Sequence
  ENSG00000196666_5 (sequence is synthesized)
atctcctcctcaaccccccaggcagacccatcttgcgcaggggcttctgtctggcatctgattcttttcaccgtgttcagatctctgggcttggcttgcaccctggacaccccctctctg

SEQ ID NO: 708280 - DNA, 120 bp, Artificial Sequence
  ENSG00000196666_6 (sequence is synthesized)
cttaccccgaccagatcttgtttcctagatcttgagaggctaagaacccaggctctgggtcgcaaggagtgcgcaaggagtgggcacagagctaagggcacgacttgcaggcagtgtgtg

SEQ ID NO: 708281 - DNA, 120 bp, Artificial Sequence
  ENSG00000196666_7 (sequence is synthesized)
tgtgtgtgtgtgtgtgtgtgtggagatcaggggtcagggttgagaagtgtgttcaagagatgctgaagggaagctgccccaagtaaggcctggtcagaccttccaactcctaccctggca

SEQ ID NO: 708282 - DNA, 120 bp, Artificial Sequence
  ENSG00000196666_8 (sequence is synthesized)
ttccaactcctaccctggcagtctgtgacaggtcctgtggaattcacaggaatcctctaggtgctgagcatccccttttaggcacaaccaaggatttggggtctctgagcctccaagttc

SEQ ID NO: 708283 - DNA, 120 bp, Artificial Sequence
  ENSG00000196666_9 (sequence is synthesized)
ccatctgggttgggagaatcgactttttgagttctgtcagttggaagagtggagggaagcagggggagggaggaacattatctcttttggggtagggaggcaatatctcaacaagcgtcg

SEQ ID NO: 708284 - DNA, 120 bp, Artificial Sequence
  ENSG00000196666_10 (sequence is synthesized)
ggtgaatacctcagaggggggagtaaggctgggagaccaaggagagacaagcggaggtgggctggagcaggtgtggccctgattctgtgttgctcttctcataaaatgttctgtttcggc

SEQ ID NO: 708285 - DNA, 120 bp, Artificial Sequence
  ENSG00000196670_0 (sequence is synthesized)
gtgcggtccgcgcttttgtcccgctggcggccgggttcccgcggcgccgccacagccagttgccttcttcctcatctctgcagtaactgtcttcatggtttcatagccttctccctgata

SEQ ID NO: 708286 - DNA, 120 bp, Artificial Sequence
  ENSG00000196670_1 (sequence is synthesized)
cccctccccagtgtcacatttgaagacgagcactgaggatgaggaaccaactgaagaatatgaaaatgttggaaatgcagcatctaagtggccaaaagtggaggatcctatgcctgaatc

SEQ ID NO: 708287 - DNA, 120 bp, Artificial Sequence
  ENSG00000196670_2 (sequence is synthesized)
taaggttggtgacacatgtgtttgggatagcaaggtagagaatcaacagaaaaagcctgtggaaaacaggatgaaggaggacaaaagcagcatcagggaagcaatcagcaaagccaagag

SEQ ID NO: 708288 - DNA, 120 bp, Artificial Sequence
  ENSG00000196670_3 (sequence is synthesized)
tacagcaaatataaagacagaacaggaaggtgaggcatctgagaagagcttgcatctgagcccacagcatatcacacaccagactatgcctataggacagagaggcagtgagcaaggcaa

SEQ ID NO: 708289 - DNA, 120 bp, Artificial Sequence
  ENSG00000196670_4 (sequence is synthesized)
acgtgtggagaacattaatggaacctcctaccctagtctacagcagaaaaccaatgctgttaagaaattacataaatgtgatgaatgtgggaaatccttcaaatataattcccgccttgt

SEQ ID NO: 708290 - DNA, 120 bp, Artificial Sequence
  ENSG00000196670_5 (sequence is synthesized)
tcaacataaaattatgcacactggggaaaagcgctatgaatgtgatgactgtggagggactttccggagcagctcgagccttcgggtccacaaacggatccacactggggagaagccgta

SEQ ID NO: 708291 - DNA, 120 bp, Artificial Sequence
  ENSG00000196670_6 (sequence is synthesized)
caagtgtgaggaatgtgggaaagcctacatgtcctactccagccttataaaccacaaaagcacccattctggggagaagaactgtaaatgtgatgaatgtggaaaatccttcaattatag

SEQ ID NO: 708292 - DNA, 120 bp, Artificial Sequence
  ENSG00000196670_7 (sequence is synthesized)
ctctgttctggaccagcataaaaggatccacactggggagaagccctatgaatgtggtgagtgtgggaaggccttcaggaacagctctgggctcagagtccacaaaaggatccacacggg

SEQ ID NO: 708293 - DNA, 120 bp, Artificial Sequence
  ENSG00000196670_8 (sequence is synthesized)
ggagaagccctatgaatgcgacatctgtgggaaaaccttcagtaacagctctggccttagggtccataaaaggatccacacaggtgagaaaccttacgaatgtgatgagtgtgggaaggc

SEQ ID NO: 708294 - DNA, 120 bp, Artificial Sequence
  ENSG00000196670_9 (sequence is synthesized)
cttcattacttgtagaacacttctcaaccataaaagcatccactttggagataaaccctataaatgtgatgagtgtgagaaatcttttaattatagctctcttctcattcagcataaagt

SEQ ID NO: 708295 - DNA, 120 bp, Artificial Sequence
  ENSG00000196670_10 (sequence is synthesized)
catccacactggagagaaaccttatgaatgtgatgaatgtgggaaggctttcaggaacagctcaggcctcatagtgcataaaaggatccacacaggagagaaaccttacaagtgtgatgt

SEQ ID NO: 708296 - DNA, 120 bp, Artificial Sequence
  ENSG00000196670_11 (sequence is synthesized)
ctgtggcaaagcattcagctatagctcaggcctcgcagtccataaaagcattcaccctgggaagaaagcccatgaatgtaaggagtgtgggaaatcctttagttataactcactacttct

SEQ ID NO: 708297 - DNA, 120 bp, Artificial Sequence
  ENSG00000196670_12 (sequence is synthesized)
tcaacacagaactattcataccggagagagaccttatgtatgtgatgtgtgtgggaaaacgttcagaaacaatgcaggcctcaaagtccacaggaggctccatactggggaaaaaccata

SEQ ID NO: 708298 - DNA, 120 bp, Artificial Sequence
  ENSG00000196670_13 (sequence is synthesized)
taagtgtgatgtgtgtgggaaagcctatatctcacgctctagccttaaaaatcacaaaggaatccaccttggggagaagccctataaatgtagctattgtgagaaatccttcaactacag

SEQ ID NO: 708299 - DNA, 120 bp, Artificial Sequence
  ENSG00000196670_14 (sequence is synthesized)
ctctgcccttgaacagcataaaaggattcataccagggaaaaaccctttgggtgtgatgagtgtggtaaagctttcagaaataattctggccttaaagtacataaacgaatccacactgg

SEQ ID NO: 708300 - DNA, 120 bp, Artificial Sequence
  ENSG00000196670_15 (sequence is synthesized)
ggaacgaccttacaaatgtgaagaatgtgggaaagcatacatctctctctcgagccttataaatcataaaagtgtacaccctggggagaagccctttaagtgtgacgagtgtgagaaggc

SEQ ID NO: 708301 - DNA, 120 bp, Artificial Sequence
  ENSG00000196670_16 (sequence is synthesized)
agaagccctacaaatgtgatgtgtgtgagaaatcttttaattacacatcgctcctttctcagcacagaagggtccacactagagagaaaccctatgaatgtgacaggtgtgagaaggtct

SEQ ID NO: 708302 - DNA, 120 bp, Artificial Sequence
  ENSG00000196670_17 (sequence is synthesized)
tcagaaacaactcaagccttaaagttcataaaagaatccatactggggagaggccctatgaatgtgatgtgtgtggaaaagcctacatctcacactcaagccttattaaccataagagta

SEQ ID NO: 708303 - DNA, 120 bp, Artificial Sequence
  ENSG00000196670_18 (sequence is synthesized)
cccaccctggcaggacaccccatacatgtgatgaatgtggaaaagcttttttctcaagcagaactcttataagccataaaagagtccatcttggggagaaacccttcaagtgtgttgagt

SEQ ID NO: 708304 - DNA, 120 bp, Artificial Sequence
  ENSG00000196670_19 (sequence is synthesized)
gtgggaaatctttcagttacagctctctcctttctcagcacaagaggatccacacaggggagaaaccctatgtgtgtgataggtgtgggaaggccttcaggaacagctcaggcctcacag

SEQ ID NO: 708305 - DNA, 120 bp, Artificial Sequence
  ENSG00000196670_20 (sequence is synthesized)
tgcataaaaggatccacacaggtgagaaaccctatgaatgtgatgagtgtgggaaggcatacatctcacactcaagtcttatcaatcataaaagtgtccaccaggggaagcagccctata

SEQ ID NO: 708306 - DNA, 120 bp, Artificial Sequence
  ENSG00000196670_21 (sequence is synthesized)
attgtgagtgtgggaaatccttcaattatagatcagtccttgaccagcacaaaaggatccacactggaaagaagccataccgatgtaatgagtgtggtaaggcttttaatatcagatcaa

SEQ ID NO: 708307 - DNA, 120 bp, Artificial Sequence
  ENSG00000196670_22 (sequence is synthesized)
atctcaccaagcataaaagaacccatactggagaggaatctttaaatgtgatatatgtgggaagttatagtggcacatcccagaagagaacctatgagggagggaatgccctggatgggg

SEQ ID NO: 708308 - DNA, 120 bp, Artificial Sequence
  ENSG00000196670_23 (sequence is synthesized)
gcaggatgaggatgcctctgtagcaggcagagcttaccaagtctctccgaactcaaatggaagaaataccttatgaatgtaagaatgtagggggtcatggcttgtaatttacacagtgta

SEQ ID NO: 708309 - DNA, 120 bp, Artificial Sequence
  ENSG00000196670_24 (sequence is synthesized)
aatgaaaccatcctagaggattatgaggaatcctttctatgtgattttcaatcatagcaagcaagaaaggctccagtgtcaaggtagttcagctcttacaggatataaaacagtccatac

SEQ ID NO: 708310 - DNA, 120 bp, Artificial Sequence
  ENSG00000196670_25 (sequence is synthesized)
ttgagagaaaaacttagatctgagtgatggaatgtgaagcaaatcttcaaaatcagtagacatttctggacataaaacacagatgaggaaagggcttcaattagaagttacgtaatcacc

SEQ ID NO: 708311 - DNA, 120 bp, Artificial Sequence
  ENSG00000196670_26 (sequence is synthesized)
atcagaaagttcatgtttggtaaattctgttactagaaatgtaggaaattcaggtatagctttgaatcccaattacacattggtcagtgggaaaactaagggcctccaacaggcaaattc

SEQ ID NO: 708312 - DNA, 120 bp, Artificial Sequence
  ENSG00000196670_27 (sequence is synthesized)
agggaggataggtttcagggaatataaatttatttaatattagtggtctttaagtataaacttgatgtaattggtttgggagggggcagtgatgatgacttctgaaacaaaatttggatt

SEQ ID NO: 708313 - DNA, 120 bp, Artificial Sequence
  ENSG00000196670_28 (sequence is synthesized)
tccttttaggaaaagtagaaagcatagacttacaagtctaacaggagataggagagagtcactcataaaaaatgcaaattgatgaacgtactattgtgatacattagttgaatggatgaa

SEQ ID NO: 708314 - DNA, 120 bp, Artificial Sequence
  ENSG00000196670_29 (sequence is synthesized)
acttttttaaagtttcagatgaactcccataatgaatgatgaatttgtgatgagggataacctggaagtggtattcacacattatgctacaataaaaggttctaccgtggagaggatttt

SEQ ID NO: 708315 - DNA, 120 bp, Artificial Sequence
  ENSG00000196670_30 (sequence is synthesized)
gacacattcagtaactaatggaacacaccgtcaacatgaattcgcaccttacatgacagaagtgattcagggattcctatgaatagaaatgctgagaaggaacgcattttattgcagaag

SEQ ID NO: 708316 - DNA, 120 bp, Artificial Sequence
  ENSG00000196670_31 (sequence is synthesized)
ctaaaaagctaaagtaccagtcatctagagagaaggaaattaatgtttcttaataatcctgttaaatgtttgattgtttttggaatgtgttattgtaaagatgtcatgcaggacatgtat

SEQ ID NO: 708317 - DNA, 120 bp, Artificial Sequence
  ENSG00000196670_32 (sequence is synthesized)
atgttgtctgttgtaaaatgttaacgaatactttgttcagggctcactctctctttgtcatgaaagccagctccttgtggcgaggtaaagtggaattccaataaagaaattccttaaatc

SEQ ID NO: 708318 - DNA, 120 bp, Artificial Sequence
  ENSG00000196670_33 (sequence is synthesized)
ccgctgcaggtgtgaatagagaccccggaggtgcgtcctagccctcatctggggaagcgcacctgcatacagacgggtgcaccggggaggaggcgacctgccgcgtgttcctgcaagcag

SEQ ID NO: 708319 - DNA, 120 bp, Artificial Sequence
  ENSG00000196670_34 (sequence is synthesized)
gtgcggtccgcgcttttgtcccgctggcggccgggttcccgcggcgccgccacagccagtacgttgccttcttcctcatctctgcagtaactgtcttcatggtttcatagccttctccct

SEQ ID NO: 708320 - DNA, 120 bp, Artificial Sequence
  ENSG00000196678_0 (sequence is synthesized)
gacttccggcagctggacttggaaaagcaaggagtgtcgggaatggcgaccaagcggctcgcgcggcagcttggattaattaggagaaagtcaattgcgccagcaaatggaaatctcgga

SEQ ID NO: 708321 - DNA, 120 bp, Artificial Sequence
  ENSG00000196678_1 (sequence is synthesized)
agaagcaaatccaagcagttgtttgactacttaattgtcattgattttgaatcgacatgctggaatgatgggaagcaccaccatagccaggaaataattgagtttccagcagtgttgctg

SEQ ID NO: 708322 - DNA, 120 bp, Artificial Sequence
  ENSG00000196678_2 (sequence is synthesized)
aacacatcaactggacagattgactctgagttccaggcttatgttcaacctcaggaacatccaattctttcagaattttgcatggaattgacaggcataaagcaggctcaagttgatgaa

SEQ ID NO: 708323 - DNA, 120 bp, Artificial Sequence
  ENSG00000196678_3 (sequence is synthesized)
ggagtccctctgaagatttgcttatctcagttctgtaaatggattcataagattcagcaacagaagaacattatttttgctactgggatttcagagccttctgcttctgaagtaaaatta

SEQ ID NO: 708324 - DNA, 120 bp, Artificial Sequence
  ENSG00000196678_4 (sequence is synthesized)
tgtgcatttgttacttggtcagactgggacttgggggtttgcctggagtatgagtgtaaaagaaagcagctgttaaaacctgtgtttttaaattcttggattgatctcagagcaacttac

SEQ ID NO: 708325 - DNA, 120 bp, Artificial Sequence
  ENSG00000196678_5 (sequence is synthesized)
aagcttttctataggagaaaaccaaaaggactaagtggtgccttgcaggaagtaggaatagaattctcaggacgagaacattctgggttggacgattctcggaatactgcccttcttgct

SEQ ID NO: 708326 - DNA, 120 bp, Artificial Sequence
  ENSG00000196678_6 (sequence is synthesized)
tggaaaatgatcagagatggttgtgtaatgaaaattacaaggtcgttgaacaaggttcccactaagaagaatttcagcattctggccagaaatttgaatacaattcaagttgaagaaatg

SEQ ID NO: 708327 - DNA, 120 bp, Artificial Sequence
  ENSG00000196678_7 (sequence is synthesized)
tctgcctgtaacattagcatccagggtcccagcatatataataaggagcctaaaaatataataaatcctcatgaaaaagttcaaatgaagtcaatttgtgcaaattctcctataaaggca

SEQ ID NO: 708328 - DNA, 120 bp, Artificial Sequence
  ENSG00000196678_8 (sequence is synthesized)
caacaggatcaattacaagtaaaaaacaatataaaagcaagtcttcacaatgtcaaaagttccttacctctttttaatactaagtcctctacttctgtggggcagttgcagtctcctacc

SEQ ID NO: 708329 - DNA, 120 bp, Artificial Sequence
  ENSG00000196678_9 (sequence is synthesized)
ttgaattcacctatctatatgcaaaagcaaggaaaaaatgaacatcttgcatttaataccaaatctaaggcttcaacagttggttcagaattggtacttgtttctaccaccgttccaact

SEQ ID NO: 708330 - DNA, 120 bp, Artificial Sequence
  ENSG00000196678_10 (sequence is synthesized)
gttcatcatgtttctgatttggaaatgagctctactctggactgtttacctgtgttggctgattgggaggatgtggttttactgccagcatctcagcctgaggaaaacgtagactgtaca

SEQ ID NO: 708331 - DNA, 120 bp, Artificial Sequence
  ENSG00000196678_11 (sequence is synthesized)
gttcccattagtgactcagacttagagatttcatttaattctggagaaagattaatggttttgaaagaattggaaatgtcaagtcatgaaaactttggagacatagaggaaactcctcaa

SEQ ID NO: 708332 - DNA, 120 bp, Artificial Sequence
  ENSG00000196678_12 (sequence is synthesized)
aaatctgagacttctaagtctattgtgtacaagagtcctcacactactatttataatgtaaaagaagccaaagatccaggttcagatatttctgcctttaagttacctgaacacaaatca

SEQ ID NO: 708333 - DNA, 120 bp, Artificial Sequence
  ENSG00000196678_13 (sequence is synthesized)
agtaccttcaacagagttaatgccaatatgtctcatcctttagttttggggaaacatcctcttctttcaggtggtaccaaaaggaatccatgcagtccccaagctttcccaccagcaaaa

SEQ ID NO: 708334 - DNA, 120 bp, Artificial Sequence
  ENSG00000196678_14 (sequence is synthesized)
aagaaaagcctacatcatctgattgctccccagtaagaagttcttcctggaggcgtctcccatctatattaacttctacagttaacctacaagagccatggaagagtgggaaaatgacac

SEQ ID NO: 708335 - DNA, 120 bp, Artificial Sequence
  ENSG00000196678_15 (sequence is synthesized)
ctccattatgcaagtgtggtcggagatctaagagacttgttgtttctaataatggaccgaaccatggaaaagtcttctattgttgccctatcgggaaataccaagaaaacagaaaatgtt

SEQ ID NO: 708336 - DNA, 120 bp, Artificial Sequence
  ENSG00000196678_16 (sequence is synthesized)
gtggttatttcaaatgggaacaaacacttcaaaaggaaagagccaacagcatggttccatctcattccacagggggactcacttttagttctccagaaacaagccatatttgtgacagaa

SEQ ID NO: 708337 - DNA, 120 bp, Artificial Sequence
  ENSG00000196678_17 (sequence is synthesized)
atttaagtatttccaccaaaaattctttgagactcaggccttcaatgaggaattgataacctttcatgtatgaatcctaattgttccttgaatttccaaacatgagtattctgataacat

SEQ ID NO: 708338 - DNA, 120 bp, Artificial Sequence
  ENSG00000196678_18 (sequence is synthesized)
cttacactattttatttttattttatatattaatgtttactgcatttaccatactttcttcaggaaccacaagtgtaatcttttgtaaacagtatttattagattacatataataagcaa

SEQ ID NO: 708339 - DNA, 120 bp, Artificial Sequence
  ENSG00000196678_19 (sequence is synthesized)
caatagtatatgatccttcttttatagttagaccttgaaacaagtctaaactatttttaaattatttgcaaaaaatgtgactaataaaaatccctagtctattttcaggtagattcttgt

SEQ ID NO: 708340 - DNA, 120 bp, Artificial Sequence
  ENSG00000196678_20 (sequence is synthesized)
actttgagattatcataatcttctaactgatattttatatttttctaaaaacttttataagttctttagttttatttcaggcttgaacattggttctgatttgtatatcaacatatcaga

SEQ ID NO: 708341 - DNA, 120 bp, Artificial Sequence
  ENSG00000196678_21 (sequence is synthesized)
agaattagtcaactaaagtttgaaaacctatgtagcagagatctggttcagaaactgcttctatactatacatttaaaaattaatcagcaattgatggtattatttttatattaagaaat

SEQ ID NO: 708342 - DNA, 120 bp, Artificial Sequence
  ENSG00000196678_22 (sequence is synthesized)
gataggaacattgacactaatgtggaggaatttgccaaatattttatttcaaaatttagcctctgatatcataaccacaagatattttaaatcaacagtttctaagcatactaccacagt

SEQ ID NO: 708343 - DNA, 120 bp, Artificial Sequence
  ENSG00000196678_23 (sequence is synthesized)
ttttatgacctctccatcatcttgtggtttctagagattgacagatactatgtttgttttatagatatggtaattaatgaaacaactttaaattgtcttccattctttcttcctcagttc

SEQ ID NO: 708344 - DNA, 120 bp, Artificial Sequence
  ENSG00000196678_24 (sequence is synthesized)
atttctttttgtcttcccactgatagtctttggcagctcttgaataaattctacctgttggcatcaaggggaagaaaattagcctggaaatttttatctttacataaagccaattatata

SEQ ID NO: 708345 - DNA, 120 bp, Artificial Sequence
  ENSG00000196678_25 (sequence is synthesized)
gcagtttgattatgaattctaggtggaagaattagaatagtctttggaatgggttttgggtaacagccaaaatagggaaaagggtattgttaggaaagttgtcttgatattaagtattta

SEQ ID NO: 708346 - DNA, 120 bp, Artificial Sequence
  ENSG00000196678_26 (sequence is synthesized)
ctgtgagtccagtaagccaaaggaccaaacaaaataggttcagggtttcattttaatctcaaagattctgattcttacccatatgtcatcagttcagtttgggacatgtggtgcagcatg

SEQ ID NO: 708347 - DNA, 120 bp, Artificial Sequence
  ENSG00000196678_27 (sequence is synthesized)
tgtgaagaaaatattcattaaaatgtaaaaataaacacttgaaattgtccacaacactgagcaaatattcgttataattaggatgcctacctttctgggatatttgtaaggtgctgtagt

SEQ ID NO: 708348 - DNA, 120 bp, Artificial Sequence
  ENSG00000196678_28 (sequence is synthesized)
ttttttaacatgctcctgaatctcctttattagttgttcttgatcatgtgacttgtaatcaggatttagaacgacaaaagcctttactacctaaaataaatatttgaaacaccaggaaaa

SEQ ID NO: 708349 - DNA, 120 bp, Artificial Sequence
  ENSG00000196678_29 (sequence is synthesized)
gacagtgccctgcagactggttggaggtctcaggcaggccacacactgaatctgtcaaggtgttcaacctgttcgaaatgctcgttcctcggtgctgtaaagaaatagaacttaaactta

SEQ ID NO: 708350 - DNA, 65 bp, Artificial Sequence
  ENSG00000196678_30 (sequence is synthesized)
gtaaagaaatagaacttaaactgccagcagttttgccaggagagtacactgaacaaaggagacag

SEQ ID NO: 708351 - DNA, 90 bp, Artificial Sequence
  ENSG00000196678_31 (sequence is synthesized)
ggagaacaaaggaagacagcttggattaattaggagaaagtcaattgcgccagcaaatggaaatctcggaagaagcaaatccattgtttg

SEQ ID NO: 708352 - DNA, 120 bp, Artificial Sequence
  ENSG00000196678_32 (sequence is synthesized)
aaaagcaaggagtgtcgggaatggcgaccaagcggctcgcgcggtactcgagggagttccgggtcgggggcgggtagctccgggtccagcgctggcgttggccgcagagcagggcacggc

SEQ ID NO: 708353 - DNA, 120 bp, Artificial Sequence
  ENSG00000196678_33 (sequence is synthesized)
aggtggcatctgcggtgagggcctctattccccgcagccccggcgtctgcgacctgccctctctggcacggttggaaaggcgcctccctggacctcggtcttcagccttgggccaccttc

SEQ ID NO: 708354 - DNA, 120 bp, Artificial Sequence
  ENSG00000196678_34 (sequence is synthesized)
tttaggccttgggaaacgactggacgtgacagtgccctgcagactggttggaggtctcaggcaggccacacactgaatctgtcaaggtgttcaacctgttcgaaatgctcgttcctcggt

SEQ ID NO: 708355 - DNA, 120 bp, Artificial Sequence
  ENSG00000196678_35 (sequence is synthesized)
gctgcagcttggattaattaggagaaagtcaattgcgccagcaaatggaaatctcggaagaagcaaatccaagcagttgtttgactacttaattgtcattgattttgaatcgacatgctg

SEQ ID NO: 708356 - DNA, 120 bp, Artificial Sequence
  ENSG00000196678_36 (sequence is synthesized)
aacgggcgtctgcctggcaaagaaggaaggtgctgccgagcggcttcgccgcctaaaaccactccccacgccccctagcccgggaaacgcagaagagaagacgggcggggagcagaggtt

SEQ ID NO: 708357 - DNA, 120 bp, Artificial Sequence
  ENSG00000196678_37 (sequence is synthesized)
ctcccctccttagccacagctgccaacaacaaccgcccctcagcctcgcgggctttttgaacggaccggaagtagaagtcgagcgacttccggcagctggacttggaaaagcaaggagtg

SEQ ID NO: 708358 - DNA, 120 bp, Artificial Sequence
  ENSG00000196678_38 (sequence is synthesized)
tcttttaaatatatctttttttattggttagcttttctataggagaaaaccaaaaggactaagtggtgccttgcaggaagtaggaatagaattctcaggacgagaacattctggttagta

SEQ ID NO: 708359 - DNA, 120 bp, Artificial Sequence
  ENSG00000196678_39 (sequence is synthesized)
tacattaaaaattatgtaagccatttgacttttaaaaaatacttcatatgaatttcattttttggtaatgtcattagtaagggatatcttcagcctaaaaaaaaaaaactcctaatctaa

SEQ ID NO: 708360 - DNA, 120 bp, Artificial Sequence
  ENSG00000196678_40 (sequence is synthesized)
acaattcacattgtttctaagactttcaaattaccactttcataaactattgtaagatacactgccatctagtggctttctagttgctaagaagaatgaaaagaatgagccaaatcaaat

SEQ ID NO: 708361 - DNA, 120 bp, Artificial Sequence
  ENSG00000196678_41 (sequence is synthesized)
ggagattaaacaagtgctcaaataatagaatggactagtgaaaaaactgaacaagactattagattattcacaaatcctggttcctgcagaacgctggccacattttggggaactgtcta

SEQ ID NO: 708362 - DNA, 120 bp, Artificial Sequence
  ENSG00000196678_42 (sequence is synthesized)
atacattttcatatcctcctctataaatgtggacgagcttgtctttcactggtaatgctgccatagccttccacttccaagaccagtttatcatgattaaaattagtagatggtcataaa

SEQ ID NO: 708363 - DNA, 120 bp, Artificial Sequence
  ENSG00000196678_43 (sequence is synthesized)
actaaaactgtgttccaatttctacacaagtggtgtttttctttttaagttatttctttagtactaaggaaatagtactagtaccactaaattcagtgtttgatatctgtatcctcaggg

SEQ ID NO: 708364 - DNA, 120 bp, Artificial Sequence
  ENSG00000196678_44 (sequence is synthesized)
ttggacgattctcggaatactgcccttcttgcttggaaaatgatcagagatggttgtgtaatgaaaattacaaggtcgttgaacaaggttagtagtgtcttgcctttttattctgtcatc

SEQ ID NO: 708365 - DNA, 120 bp, Artificial Sequence
  ENSG00000196678_45 (sequence is synthesized)
tcaaacttcataaacagtcatacgttctttgaaacgtagatttaatgtgtgcagtcatttataaatcaatgacatttctcttttttgtcataaaactgtatactgaagaaattaacgaat

SEQ ID NO: 708366 - DNA, 120 bp, Artificial Sequence
  ENSG00000196678_46 (sequence is synthesized)
gcattgatagtcatatttggtttccagttactataaaatgtttggtttctcaataacattaatattttcctagaatatagaaaatatagtccttgtaatttaacatgttactcttctttc

SEQ ID NO: 708367 - DNA, 120 bp, Artificial Sequence
  ENSG00000196678_47 (sequence is synthesized)
tgaaataaggttttactgggtgtttaagaaatcattttgaaatttagtcatcaacctaacttgttaatagtaagttatataaagtgaataatttttagatattagcagagcaatgaaatc

SEQ ID NO: 708368 - DNA, 120 bp, Artificial Sequence
  ENSG00000196678_48 (sequence is synthesized)
atactgttctattttatatgatcttctagcattctatttgtaaatggtggcagcataagtaaaaaatgctggcatcattgactttgttctattttaatgtacctaatgcagactgggact

SEQ ID NO: 708369 - DNA, 120 bp, Artificial Sequence
  ENSG00000196678_49 (sequence is synthesized)
tgatctggcctcaggggaccagcatgcttttcttcagcaagaatttgggtatttcttcaatttcttgtcttttggattactattcaggacaaccaatctctcaagaaagggtcaagtacc

SEQ ID NO: 708370 - DNA, 120 bp, Artificial Sequence
  ENSG00000196678_50 (sequence is synthesized)
ggaggcggtggcagtggtggaagaagaggcggcggcggcgggggtagggagcctggaaacgcgagcggggatggtaggtggtttggacccgccgggccgccgtcgtttccagaaagggtt

SEQ ID NO: 708371 - DNA, 120 bp, Artificial Sequence
  ENSG00000196678_51 (sequence is synthesized)
tgactggaggaacctctggagcagctgcttttggacaaactcttctgaaaggtgggcaacctagaaagccagttgatgccacttgctattggagttgtgggcagcttggattaattagga

SEQ ID NO: 708372 - DNA, 120 bp, Artificial Sequence
  ENSG00000196678_52 (sequence is synthesized)
tgtgcatttgttacttggtcagcttttctataggagaaaaccaaaaggactaagtggtgccttgcaggaagtaggaatagaattctcaggacgagaacattctgtgtttgatatctgtat

SEQ ID NO: 708373 - DNA, 120 bp, Artificial Sequence
  ENSG00000196678_53 (sequence is synthesized)
acttcagaagcccaatatgagtaaacaggaaaaggggaatattctctggttgacaatggtgtggctgtcactggcatgtctgcaaaggaaaaactacaatgactgcatgttaaacacagc

SEQ ID NO: 708374 - DNA, 120 bp, Artificial Sequence
  ENSG00000196678_54 (sequence is synthesized)
atcacagactgttaccactgaaaaattttgagaagctctccacttgaacctcttcatgtcatgaatcaggtgccagtggcttagcttgaattacagggtaaaagccatcactttctctat

SEQ ID NO: 708375 - DNA, 120 bp, Artificial Sequence
  ENSG00000196678_55 (sequence is synthesized)
ccttttaggtgctttctagaatcaaaactaaactttgtcatcaaaggcccatttataatagctgctttcctagctttttattctatgataaagaaggattgaagcatttttaaaacttga

SEQ ID NO: 708376 - DNA, 120 bp, Artificial Sequence
  ENSG00000196678_56 (sequence is synthesized)
gatttttatcatacctccagcagagtaaggagtctgtgtgatcttgcaatcatggataaggaagaattttccccttccctcccctatggatgctttaaaatgtgattttttaaaaatgag

SEQ ID NO: 708377 - DNA, 120 bp, Artificial Sequence
  ENSG00000196678_57 (sequence is synthesized)
tatgttaatacaatacatgttagtaaaagccatgggtactgatgggccaacacactacagcctactggcaaaatctgacttgcctcttgtttctgtaaataaaatgttattgcccattca

SEQ ID NO: 708378 - DNA, 120 bp, Artificial Sequence
  ENSG00000196683_0 (sequence is synthesized)
ctcctttccctttcggattcccgacgctgtggttgctgtaaggggtcctccctgcgccacacggccgtcgccatggtgaagctgagcaaagaggccaagcagagactacagcagctcttc

SEQ ID NO: 708379 - DNA, 120 bp, Artificial Sequence
  ENSG00000196683_1 (sequence is synthesized)
aaggggagccagtttgccattcgctggggctttatccctcttgtgatttacctgggatttaagaggggtgcagatcccggaatgcctgaaccaactgttttgagcctactttggggataa

SEQ ID NO: 708380 - DNA, 120 bp, Artificial Sequence
  ENSG00000196683_2 (sequence is synthesized)
aggattatttggtcttctggatttggaggcaatcagcggacagcatggaagatgtgtgctctggctcggataagagatgggacatcattcagtcactagttggatggcacaaggctcttc

SEQ ID NO: 708381 - DNA, 120 bp, Artificial Sequence
  ENSG00000196683_3 (sequence is synthesized)
taaatgtttttaacagtgttatgcttgagtcttttttgaattgaacatgctaggattatcaggtaaaaattaagccttttggtactttctcaaaacagggaatttatgtgtgtacctagg

SEQ ID NO: 708382 - DNA, 120 bp, Artificial Sequence
  ENSG00000196683_4 (sequence is synthesized)
tttgggaggccagggcgggtggatcacgatataaaaaaatttttccaagttattcctgcccattgacctaacatatggattacagtttccctttgcagtgaattaataactccttctagg

SEQ ID NO: 708383 - DNA, 120 bp, Artificial Sequence
  ENSG00000196683_5 (sequence is synthesized)
ttgcagtgaattaataactccttctaggatattccgaggtagtaagaatacagatagttctgtttgtgacaaaccaagctgttacttcctcctctgcattaaagttctgactgcaagaaa

SEQ ID NO: 708384 - DNA, 120 bp, Artificial Sequence
  ENSG00000196683_6 (sequence is synthesized)
gagtgagactctgtctcaaaaagaaaggaataagatagcttgttcttcctactgattagtcctggacataatttcatactctaatgaagattggagacttctgtagcgtaggtaaattta

SEQ ID NO: 708385 - DNA, 120 bp, Artificial Sequence
  ENSG00000196683_7 (sequence is synthesized)
gattggagacttctgtagcgtaggtaaatttagatagtactggttggtctagatatcattctaactatcctaggttggattacaaagaagaaaaagtcttgattgtaaatgttttgtctg

SEQ ID NO: 708386 - DNA, 120 bp, Artificial Sequence
  ENSG00000196683_8 (sequence is synthesized)
tctcggggtgtttttcctcaccgctccatgtggtcctaagtggaaagagtcctgttcagggaatcgagacacctcgtgaaagtaccactgccatgaaagcatgattataataatagtcgt

SEQ ID NO: 708387 - DNA, 120 bp, Artificial Sequence
  ENSG00000196683_9 (sequence is synthesized)
gagctttatcagtcagtatagttttgggctattggaaaactgcaactactttctcttccccctcctaatttgtatttactgtaccatgttataactacaatgaagcatattttaacagaa

SEQ ID NO: 708388 - DNA, 120 bp, Artificial Sequence
  ENSG00000196683_10 (sequence is synthesized)
aaagaatttattatcctaccactttaaaatacgaactgttttaaatttctcatattcccgtcttatcctcattcagatgaatacaaccttttatatcgctctgacaagggtatgcaggat

SEQ ID NO: 708389 - DNA, 120 bp, Artificial Sequence
  ENSG00000196684_0 (sequence is synthesized)
attgacgtgcagaccttgaatcgaaacccaggctcctgcaggcactggcacagctacagcgagggcctcggccatccaagggtctcccaggtgaccttccctccaccccaggaagctatg

SEQ ID NO: 708390 - DNA, 120 bp, Artificial Sequence
  ENSG00000196684_1 (sequence is synthesized)
acagaggccgggaagctgcccctaccgctacccccacggctggactggtttgtgcacacccagatgggccagctggcccaagacggggtccccgagtggttccatggtgcaatctcaaga

SEQ ID NO: 708391 - DNA, 120 bp, Artificial Sequence
  ENSG00000196684_2 (sequence is synthesized)
gaggatgctgagaacttgctggagtcacagccactgggatcctttctcatcagggtcagtcacagccatgtgggctacacactctcctacaaagcccaaagcagctgctgccatttcatg

SEQ ID NO: 708392 - DNA, 120 bp, Artificial Sequence
  ENSG00000196684_3 (sequence is synthesized)
gtgaagctcttggatgatgggactttcatgatccccggggagaaggtggcccacacctcgctggacgccctggtcaccttccaccagcagaagccaattgagccgcgcagggagctgctg

SEQ ID NO: 708393 - DNA, 120 bp, Artificial Sequence
  ENSG00000196684_4 (sequence is synthesized)
acacagccctgcaggcagaaggatcccgcaaacgtggattacgaggatctcttcctctactccaacgcagtggccgaggaagctgcctgcccggtgtctgcccctgaggaggcctcccca

SEQ ID NO: 708394 - DNA, 120 bp, Artificial Sequence
  ENSG00000196684_5 (sequence is synthesized)
aagccagtcctgtgtcaccaatcaaaggaaaggaagccgtcagcagagatgaacagaataaccaccaaggaagccacttcctcctgccccccaaaatcccctcttggagagacccgccag

SEQ ID NO: 708395 - DNA, 120 bp, Artificial Sequence
  ENSG00000196684_6 (sequence is synthesized)
aaactctggaggagcctcaaaatgctccccgagagaggccagagggtccggcagcagctaaaaagccacctcgccactgtgaacttgtcgtcactcttggatgtccggagatccacggtg

SEQ ID NO: 708396 - DNA, 120 bp, Artificial Sequence
  ENSG00000196684_7 (sequence is synthesized)
atctcaggccctgggaccggaaaaggcagccaagatcactcaggggatcccacctcgggggacagaggctacacggatccctgtgtggccacatctctcaaaagcccctcacagccccag

SEQ ID NO: 708397 - DNA, 120 bp, Artificial Sequence
  ENSG00000196684_8 (sequence is synthesized)
agaggtcggtcagctgcattgaggtgaccccaggggacaggagttggcaccaaatggtagtgagagccctatcctcccaggagtccaagccagagcaccagggcttggcagagcctgaga

SEQ ID NO: 708398 - DNA, 120 bp, Artificial Sequence
  ENSG00000196684_9 (sequence is synthesized)
acgaccagctcccggaggagtaccaacaaccgccaccctttgcccctgggtactgctagagaacaggtccaccctggctctgggactcgctgccaggggctgccacactcctgaatgcct

SEQ ID NO: 708399 - DNA, 120 bp, Artificial Sequence
  ENSG00000196684_10 (sequence is synthesized)
taacatttcttccatggccccacaccatggcatccgggggtcttcgggaacccgggaaatggaataaagatgtttttggggtctgttcctgcactcacccatggggtgagctggttattt

SEQ ID NO: 708400 - DNA, 120 bp, Artificial Sequence
  ENSG00000196684_11 (sequence is synthesized)
tagcaacaatcatcagagtgacgctgatggtttggggcaccagctatacatcagccccagtgccagaccttctattcattattttacgcctcagagcaaggccctcagggagggtcatcc

SEQ ID NO: 708401 - DNA, 120 bp, Artificial Sequence
  ENSG00000196684_12 (sequence is synthesized)
tccatgttttgaagaagagactgaggttcagagaggataagaggcgtgaccaaggccacagagctatgggtgtcagcaccaggatttgaagccaggtgaatccgagcccttttcccatat

SEQ ID NO: 708402 - DNA, 120 bp, Artificial Sequence
  ENSG00000196684_13 (sequence is synthesized)
cttttcccatatcatctgtttgttctgttgtctaaaagcacactgcaagccgggctcagtggctcatgcctgtagtcccagcactctgtggggccgaggcaggcagatcgcttgaggtca

SEQ ID NO: 708403 - DNA, 120 bp, Artificial Sequence
  ENSG00000196684_14 (sequence is synthesized)
gtccttcccaagaccacacccaggtccagtcattccctaggacttggcagagagctgtactcacagccaagatcacagcaaaatcagcaaagggaaaaggcatgcagagtgaagtccaga

SEQ ID NO: 708404 - DNA, 120 bp, Artificial Sequence
  ENSG00000196684_15 (sequence is synthesized)
cagaggcaaccagacagaagcatccagaatcctctcacagtggggtcacacaccccatgcttaactcccccaacaatgagttgtaacaacagtcaggtgtggtggtgtgtgcctgtagtc

SEQ ID NO: 708405 - DNA, 67 bp, Artificial Sequence
  ENSG00000196684_16 (sequence is synthesized)
cagttcaagaactctgtctctaaaatagggctcacctgcttgaggaaacaggaactgcctcggggca

SEQ ID NO: 708406 - DNA, 120 bp, Artificial Sequence
  ENSG00000196684_17 (sequence is synthesized)
gggcaggtgggctcttgggtttccttggagggggcaaggggtgcttcatgtcatagcttctcagaaagcagcagtaactgaggctgtggatctgagaacgggagctgctagccaagcaat

SEQ ID NO: 708407 - DNA, 120 bp, Artificial Sequence
  ENSG00000196684_18 (sequence is synthesized)
gagtgaagcttttgtccgtagtggcatgttttatctgaggccagcctttgtactcctgtgttataaatgggggaaactgaggcacagcgaggttagtaacctgctgggtgttgcatggcc

SEQ ID NO: 708408 - DNA, 120 bp, Artificial Sequence
  ENSG00000196684_19 (sequence is synthesized)
caggaggctggcacctcccacctggctgaggggcaggagtggaggtggtcaacagcttccagaggaggctccttctagaatgagaatgcgatcctacagcttggtgctttaaacctttcc

SEQ ID NO: 708409 - DNA, 120 bp, Artificial Sequence
  ENSG00000196684_20 (sequence is synthesized)
agtgcttttgcaacaccgagattaaaattcaaactacaatctgaggtcctctttctgcctgtcacctacccagcgccagccctgctgccataccgtctgttgttcagacacaccaagcta

SEQ ID NO: 708410 - DNA, 120 bp, Artificial Sequence
  ENSG00000196684_21 (sequence is synthesized)
gcctcggggtctctgcgtgtgccggccccacctcaggtcctttgcacaaactgtgtgccctgcccctagatttcccatgtcttcattcatttctccttcaagtgcctccttccccaggcc

SEQ ID NO: 708411 - DNA, 120 bp, Artificial Sequence
  ENSG00000196684_22 (sequence is synthesized)
agaccttgaatcgaaacccaggctcctgcaggcactggcacagctacagcgagggcctcggccatccaagggtctcccagcagccttggaagtggagtttactctccccttgaggaagct

SEQ ID NO: 708412 - DNA, 120 bp, Artificial Sequence
  ENSG00000196684_23 (sequence is synthesized)
gaaggtcagaaagggagagacgattgcctgaggtcacacagctgatggacagtagagctgggttatgaactcgaatgcatctgagcatacagggatgctgagaacttgctggagtcacag

SEQ ID NO: 708413 - DNA, 120 bp, Artificial Sequence
  ENSG00000196689_0 (sequence is synthesized)
ctgccgctcaccctattccagggacacagtctgcttggctcttctggactgagccatcctcatcaccgagatcctccctgaattcagcccacgacagccaccccggccgttttccttgtt

SEQ ID NO: 708414 - DNA, 120 bp, Artificial Sequence
  ENSG00000196689_1 (sequence is synthesized)
ctgtgtggggagggaggcagcgcggtggttatcaacctcaccctgcagaggaggcacctgaggcccagagacgaggagggatgggtctaacccagaaccacagatggctctgagccgggg

SEQ ID NO: 708415 - DNA, 120 bp, Artificial Sequence
  ENSG00000196689_2 (sequence is synthesized)
gcctgtccaccctcccaggccgacgtcagtggccgcaggactgcctgggccctgctaggcctgctcacctctgaggcctctggggtgagaggttcagtcctggaaacacttcagttctag

SEQ ID NO: 708416 - DNA, 120 bp, Artificial Sequence
  ENSG00000196689_3 (sequence is synthesized)
ggggctgggggcagcagcaagttggagttttggggtaccctgcttcacagggcccttggcaaggagggcaggtggggtctaaggacaagcagtccttactttgggagtcaaccccggcgt

SEQ ID NO: 708417 - DNA, 120 bp, Artificial Sequence
  ENSG00000196689_4 (sequence is synthesized)
ggtggctgctgcaggttgcacactgggccacagaggatccagcaaggatgaagaaatggagcagcacagacttgggggcagctgcggacccactccaaaaggacacctgcccagaccccc

SEQ ID NO: 708418 - DNA, 120 bp, Artificial Sequence
  ENSG00000196689_5 (sequence is synthesized)
tggatggagaccctaactccaggccacctccagccaagccccagctctccacggccaagagccgcacccggctctttgggaagggtgactcggaggaggctttcccggtggattgccctc

SEQ ID NO: 708419 - DNA, 120 bp, Artificial Sequence
  ENSG00000196689_6 (sequence is synthesized)
acgaggaaggtgagctggactcctgcccgaccatcacagtcagccctgttatcaccatccagaggccaggagacggccccaccggtgccaggctgctgtcccaggactctgtcgccgcca

SEQ ID NO: 708420 - DNA, 120 bp, Artificial Sequence
  ENSG00000196689_7 (sequence is synthesized)
gcaccgagaagaccctcaggctctatgatcgcaggagtatctttgaagccgttgctcagaataactgccaggatctggagagcctgctgctcttcctgcagaagagcaagaagcacctca

SEQ ID NO: 708421 - DNA, 120 bp, Artificial Sequence
  ENSG00000196689_8 (sequence is synthesized)
cagacaacgagttcaaagaccctgagacagggaagacctgtctgctgaaagccatgctcaacctgcacgacggacagaacaccaccatccccctgctcctggagatcgcgcggcaaacgg

SEQ ID NO: 708422 - DNA, 120 bp, Artificial Sequence
  ENSG00000196689_9 (sequence is synthesized)
acagcctgaaggagcttgtcaacgccagctacacggacagctactacaagggccagacagcactgcacatcgccatcgagagacgcaacatggccctggtgaccctcctggtggagaacg

SEQ ID NO: 708423 - DNA, 120 bp, Artificial Sequence
  ENSG00000196689_10 (sequence is synthesized)
gagcagacgtccaggctgcggcccatggggacttctttaagaaaaccaaagggcggcctggattctacttcggtgaactgcccctgtccctggccgcgtgcaccaaccagctgggcatcg

SEQ ID NO: 708424 - DNA, 120 bp, Artificial Sequence
  ENSG00000196689_11 (sequence is synthesized)
tgaagttcctgctgcagaactcctggcagacggccgacatcagcgccagggactcggtgggcaacacggtgctgcacgccctggtggaggtggccgacaacacggccgacaacacgaagt

SEQ ID NO: 708425 - DNA, 120 bp, Artificial Sequence
  ENSG00000196689_12 (sequence is synthesized)
ttgtgacgagcatgtacaatgagattctgatgctgggggccaaactgcacccgacgctgaagctggaggagctcaccaacaagaagggaatgacgccgctggctctggcagctgggaccg

SEQ ID NO: 708426 - DNA, 120 bp, Artificial Sequence
  ENSG00000196689_13 (sequence is synthesized)
ggaagatcggggtcttggcctatattctccagcgggagatccaggagcccgagtgcaggcacctgtccaggaagttcaccgagtgggcctacgggcccgtgcactcctcgctgtacgacc

SEQ ID NO: 708427 - DNA, 120 bp, Artificial Sequence
  ENSG00000196689_14 (sequence is synthesized)
tgtcctgcatcgacacctgcgagaagaactcggtgctggaggtgatcgcctacagcagcagcgagacccctaatcgccacgacatgctcttggtggagccgctgaaccgactcctgcagg

SEQ ID NO: 708428 - DNA, 120 bp, Artificial Sequence
  ENSG00000196689_15 (sequence is synthesized)
acaagtgggacagattcgtcaagcgcatcttctacttcaacttcctggtctactgcctgtacatgatcatcttcaccatggctgcctactacaggcccgtggatggcttgcctcccttta

SEQ ID NO: 708429 - DNA, 120 bp, Artificial Sequence
  ENSG00000196689_16 (sequence is synthesized)
cgtcgatgaagaccctgtttgtggacagctacagtgagatgcttttctttctgcagtcactgttcatgctggccaccgtggtgctgtacttcagccacctcaaggagtatgtggcttcca

SEQ ID NO: 708430 - DNA, 120 bp, Artificial Sequence
  ENSG00000196689_17 (sequence is synthesized)
tggtattctccctggccttgggctggaccaacatgctctactacacccgcggtttccagcagatgggcatctatgccgtcatgatagagaagatgatcctgagagacctgtgccgtttca

SEQ ID NO: 708431 - DNA, 120 bp, Artificial Sequence
  ENSG00000196689_18 (sequence is synthesized)
tgtttgtctacatcgtcttcttgttcgggttttccacagcggtggtgacgctgattgaagacgggaagaatgactccctgccgtctgagtccacgtcgcacaggtggcgggggcctgcct

SEQ ID NO: 708432 - DNA, 120 bp, Artificial Sequence
  ENSG00000196689_19 (sequence is synthesized)
gcaggccccccgatagctcctacaacagcctgtactccacctgcctggagctgttcaagttcaccatcggcatgggcgacctggagttcactgagaactatgacttcaaggctgtcttca

SEQ ID NO: 708433 - DNA, 120 bp, Artificial Sequence
  ENSG00000196689_20 (sequence is synthesized)
tcatcctgctgctggcctatgtaattctcacctacatcctcctgctcaacatgctcatcgccctcatgggtgagactgtcaacaagatcgcacaggagagcaagaacatctggaagctgc

SEQ ID NO: 708434 - DNA, 120 bp, Artificial Sequence
  ENSG00000196689_21 (sequence is synthesized)
agagagccatcaccatcctggacacggagaagagcttccttaagtgcatgaggaaggccttccgctcaggcaagctgctgcaggtggggtacacacctgatggcaaggacgactaccggt

SEQ ID NO: 708435 - DNA, 120 bp, Artificial Sequence
  ENSG00000196689_22 (sequence is synthesized)
ggtgcttcagggtggacgaggtgaactggaccacctggaacaccaacgtgggcatcatcaacgaagacccgggcaactgtgagggcgtcaagcgcaccctgagcttctccctgcggtcaa

SEQ ID NO: 708436 - DNA, 120 bp, Artificial Sequence
  ENSG00000196689_23 (sequence is synthesized)
gcagagtttcaggcagacactggaagaactttgccctggtcccccttttaagagaggcaagtgctcgagataggcagtctgctcagcccgaggaagtttatctgcgacagttttcagggt

SEQ ID NO: 708437 - DNA, 120 bp, Artificial Sequence
  ENSG00000196689_24 (sequence is synthesized)
ctctgaagccagaggacgctgaggtcttcaagagtcctgccgcttccggggagaagtgaggacgtcacgcagacagcactgtcaacactgggccttaggagaccccgttgccacgggggg

SEQ ID NO: 708438 - DNA, 120 bp, Artificial Sequence
  ENSG00000196689_25 (sequence is synthesized)
ctgctgagggaacaccagtgctctgtcagcagcctggcctggtctgtgcctgcccagcatgttcccaaatctgtgctggacaagctgtgggaagcgttcttggaagcatggggagtgatg

SEQ ID NO: 708439 - DNA, 120 bp, Artificial Sequence
  ENSG00000196689_26 (sequence is synthesized)
tacatccaaccgtcactgtccccaagtgaatctcctaacagactttcaggtttttactcactttactaaacagtttggatggtcagtctctactgggacatgttaggcccttgttttctt

SEQ ID NO: 708440 - DNA, 120 bp, Artificial Sequence
  ENSG00000196689_27 (sequence is synthesized)
tgattttattcttttttttgagacagaatttcactcttctcacccaggctggaatgcagtggcacaattttggctccctgcaacctccgcctcctggattccagcaattctcctgcctcg

SEQ ID NO: 708441 - DNA, 120 bp, Artificial Sequence
  ENSG00000196689_28 (sequence is synthesized)
aggtgtgagccgctgcgctcggccttctttgattttatattattaggagcaaaagtaaatgaagcccaggaaaacacctttgggaacaaactcttcctttgatggaaaatgcagaggccc

SEQ ID NO: 708442 - DNA, 120 bp, Artificial Sequence
  ENSG00000196689_29 (sequence is synthesized)
gcagagtgtgcagtatagattcagcgtttgtcgactgactgaatgatagcacaatcccggctgcttcctgttggctgggtttggttggactgggacccgtcagaggaaaaggcaacgccg

SEQ ID NO: 708443 - DNA, 120 bp, Artificial Sequence
  ENSG00000196689_30 (sequence is synthesized)
aatcaagctgttgcagcagtgccttcttcatccttccttacgatcaatcacagtctccagaagatcagctcaattgctgtgcaggttaaaactacagaaccacatcccaaaggtacctgg

SEQ ID NO: 708444 - DNA, 120 bp, Artificial Sequence
  ENSG00000196689_31 (sequence is synthesized)
taagaatgtttgaaagatcttccatttctaggaaccccagtcctgcttctccgcaatggcacatgcttccactccatccatactggcatcctcaaataaacagatatgtatacatatata

SEQ ID NO: 708445 - DNA, 120 bp, Artificial Sequence
  ENSG00000196689_32 (sequence is synthesized)
ccgaagggcgtccacagcgactcctgctagtgcagggcagctgctgccagggccgggcccgggaccccacggaggcggggagaccactcttctcccacacgagcccagctctcccttcga

SEQ ID NO: 708446 - DNA, 89 bp, Artificial Sequence
  ENSG00000196689_33 (sequence is synthesized)
gagtttgggaagcagtcgtgtatccatgacagtgtgatggagagtctctgccgtgccatctgggatgcaaaccgtccctgtgttcccca

SEQ ID NO: 708447 - DNA, 120 bp, Artificial Sequence
  ENSG00000196689_34 (sequence is synthesized)
gccgtgccatctgggatgcaaaccgtccctgtgttccccacgtccaggccgtagatgctccccgccggtcagtcacttagtcgtcagatcgcccgtcctggtatcacagtgcttctgttc

SEQ ID NO: 708448 - DNA, 77 bp, Artificial Sequence
  ENSG00000196689_35 (sequence is synthesized)
aacattcaaggccaggatgcttgacagatgttgattcataaaaatgacaaaaagcacaaaatccaaaatctcgtata

SEQ ID NO: 708449 - DNA, 120 bp, Artificial Sequence
  ENSG00000196689_36 (sequence is synthesized)
ataaaaatgacaaaaagcacaaaatccaaaatctcgtataagctcagtggctgtggcagcgaggttgaagagcaaaggcaggccgggcacctggctgatgatgtgtggacccgttgcaca

SEQ ID NO: 708450 - DNA, 120 bp, Artificial Sequence
  ENSG00000196689_37 (sequence is synthesized)
agcccaaccctagctcctattgcggcctgcagtctggacctctgagcggcctgtgaccttttgttctgggggtgccaggcctcctgggttcccgtagacggagctttctgcccctccacc

SEQ ID NO: 708451 - DNA, 120 bp, Artificial Sequence
  ENSG00000196693_0 (sequence is synthesized)
ccttttgtttgtctcacgttttgcgtgggaggcggtcccgggatttcaggggtctaccggctctcttatggcgaatgcaacccgaagagagagtgagctgtatcttcagagttgtctccg

SEQ ID NO: 708452 - DNA, 120 bp, Artificial Sequence
  ENSG00000196693_1 (sequence is synthesized)
tctttccaagaacagaacaaaatgaacaaggtagatcagaagttccaggggtcagtatcatttaaagatgtgactgtgggcttcacccaggaggagtggcagcacctggaccctagtcag

SEQ ID NO: 708453 - DNA, 120 bp, Artificial Sequence
  ENSG00000196693_2 (sequence is synthesized)
agggctctgtatagagatgtgatgctggagaactacagcaaccttgtctcagtggggtattgtgctcacaaaccagaggtgatcttcaggctggaacaaggagaagaaccatggagactg

SEQ ID NO: 708454 - DNA, 120 bp, Artificial Sequence
  ENSG00000196693_3 (sequence is synthesized)
gaggaagaattcccaagccagagctttccagaagtctggacagctgatcacctgaaagagaggagccaagaaaatcaatctaaacatttgtgggaagttgtattcatcaataatgaaatg

SEQ ID NO: 708455 - DNA, 120 bp, Artificial Sequence
  ENSG00000196693_4 (sequence is synthesized)
ctgactaaggaacaaggtaatgtaataggaataccatttaacatggacgtaagttcttttccttccagaaaaatgttctgtcagtatgactcacgtggaatgagtttcaacactgtttca

SEQ ID NO: 708456 - DNA, 120 bp, Artificial Sequence
  ENSG00000196693_5 (sequence is synthesized)
gaattggttatcagtaagataaactatttaggaaaaaagtctgacgaatttaatgcatgtgggaaattgttactcaatattaagcatgatgaaactcatactcgagagaaaaatgaagtt

SEQ ID NO: 708457 - DNA, 120 bp, Artificial Sequence
  ENSG00000196693_6 (sequence is synthesized)
ttgaaaaataggaacactctgagtcatcgtgagaacactttgcagcatgagaagattcaaactttagaccacaattttgaatacagtatatgtcaggaaaccctccttgaaaaggcagta

SEQ ID NO: 708458 - DNA, 120 bp, Artificial Sequence
  ENSG00000196693_7 (sequence is synthesized)
ttcaatacacggaagagagagaatgcagaagagaataactgtgactataatgaatttgggagaactttctgtgatagttcatccctcttgttccatcagatacctccatcaaaggacagt

SEQ ID NO: 708459 - DNA, 120 bp, Artificial Sequence
  ENSG00000196693_8 (sequence is synthesized)
cactatgaatttagtgattgtgagaagttcttatgtgtgaagtccaccctttctaaacatgatggggtacctgtgaaacactatgattgtggtgaaagtgggaataatttcaggaggaaa

SEQ ID NO: 708460 - DNA, 120 bp, Artificial Sequence
  ENSG00000196693_9 (sequence is synthesized)
ttgtgtctgtcacagcttcagaaaggtgataaaggagagaaacactttgaatgtaatgaatgtgggaaagctttctgggagaagtcacatctcactcgacatcagagggtgcacacagga

SEQ ID NO: 708461 - DNA, 120 bp, Artificial Sequence
  ENSG00000196693_10 (sequence is synthesized)
gagaaacactttcaatgtaatcaatgtggaaaaactttctgggagaagtcaaacctcactaaacatcagagatcacacacaggggagaaaccttttgaatgcaatgaatgtgggaaagcc

SEQ ID NO: 708462 - DNA, 120 bp, Artificial Sequence
  ENSG00000196693_11 (sequence is synthesized)
tttagccataagtcagccctcacattacaccagagaacacatacaggggagaaaccctatcagtgtaatgcatgtgggaaaactttttaccagaaatctgacctcactaaacatcagaga

SEQ ID NO: 708463 - DNA, 120 bp, Artificial Sequence
  ENSG00000196693_12 (sequence is synthesized)
acacacacagggcagaaaccctatgaatgttatgaatgtggaaaatccttctgtatgaattcacaccttacagtacaccagagaactcacacaggtgagaaaccttttgaatgtcttgag

SEQ ID NO: 708464 - DNA, 120 bp, Artificial Sequence
  ENSG00000196693_13 (sequence is synthesized)
tgtgggaaatccttttgtcaaaagtcacatcttacacagcatcagagaactcacataggagataaaccttatgaatgtaatgcatgtgggaaaactttctaccacaagtcagtactcacc

SEQ ID NO: 708465 - DNA, 120 bp, Artificial Sequence
  ENSG00000196693_14 (sequence is synthesized)
aggcatcagataattcatacagggttgaaaccttatgaatgttatgaatgtgggaaaaccttctgcttgaagtcagacctcacaatacatcagagaacgcacacaggggagaaacccttt

SEQ ID NO: 708466 - DNA, 120 bp, Artificial Sequence
  ENSG00000196693_15 (sequence is synthesized)
gcatgtcctgaatgtgggaaattctttagccataagtcaaccctctctcaacattatagaacacacacgggggagaaaccctatgaatgtcatgaatgtggaaaaatcttttacaataaa

SEQ ID NO: 708467 - DNA, 120 bp, Artificial Sequence
  ENSG00000196693_16 (sequence is synthesized)
tcatacctaacaaaacataatagaacacatacaggggagaaaccctatgaatgtaatgaatgtggaaaaaccttctgccagaagtcacaactcactcagcatcagagaattcacataggg

SEQ ID NO: 708468 - DNA, 120 bp, Artificial Sequence
  ENSG00000196693_17 (sequence is synthesized)
gagaaaccctatgaatgtaatgagtgtggaaaagctttctgccataagtcagctctaattgtacatcagagaacccatacacaagaaaagccttataaatgtaacgaatgtggaaaatct

SEQ ID NO: 708469 - DNA, 120 bp, Artificial Sequence
  ENSG00000196693_18 (sequence is synthesized)
ttctgtgtgaagtcaggacttattttacatgagagaaagcacacgggggagaaaccctatgaatgcaatgaatgtgggaaatccttcagtcacaaatcatcactcacagtacatcacagg

SEQ ID NO: 708470 - DNA, 120 bp, Artificial Sequence
  ENSG00000196693_19 (sequence is synthesized)
gctcacacaggagagaaatcttgtcagtgtaatgaatgtggaaaaatcttttaccgtaaatcagaccttgctaaacatcagagatcacatacaggggaaaagccctatgaatgtaacaca

SEQ ID NO: 708471 - DNA, 120 bp, Artificial Sequence
  ENSG00000196693_20 (sequence is synthesized)
tgcaggaaaaccttctctcaaaagtcaaatctcattgtacatcagagaacacacataggagaaaaaccttatgaatgaattggatattagaaatttccagccacaagtcagcctccataa

SEQ ID NO: 708472 - DNA, 120 bp, Artificial Sequence
  ENSG00000196693_21 (sequence is synthesized)
tgcctcagagtcttcacactgtggagaagggcctgttgacatcctgaatgttcaataactatccacaaactcgccttatgttactccaaagtaacagtaggggataaacccatagactac

SEQ ID NO: 708473 - DNA, 120 bp, Artificial Sequence
  ENSG00000196693_22 (sequence is synthesized)
aacaactataggatggcttttgttaggaagtgatattctgttgaatatcagatggttaatactggcataaaacctcacagatttttttgaatttgtgaaagtttttggcaaaactacaaa

SEQ ID NO: 708474 - DNA, 120 bp, Artificial Sequence
  ENSG00000196693_23 (sequence is synthesized)
taggattatgttagcatttacactgaggagaaaattgtcaatttaagaaatctaaagtgaaaattttgcttagaaataaaatatgacaagttctgttttgagtttgatgccataatagtt

SEQ ID NO: 708475 - DNA, 120 bp, Artificial Sequence
  ENSG00000196693_24 (sequence is synthesized)
atgagtacagagaattcccgtgtacccttcaccaagcttcctctaaggataatatataatcatagtatatggtcaagtccaagaaatcgatgttaccttgctagtagatgcagacttact

SEQ ID NO: 708476 - DNA, 120 bp, Artificial Sequence
  ENSG00000196693_25 (sequence is synthesized)
cagattttgctatggtttgcgtgcactctgtgtgtgtacgtgtatgtgtgtgtgtgtggttataacaaactggtacttttacatttgagtaaccatcaacacaattagtttacagaatgg

SEQ ID NO: 708477 - DNA, 120 bp, Artificial Sequence
  ENSG00000196693_26 (sequence is synthesized)
aaaaggagtctgagatctgtactgtttcaggattacaaaggaatcaggatttagcctcaagtagttcccttgttgtattaataaccacaccctttctgcatccctgtccctggcatccac

SEQ ID NO: 708478 - DNA, 120 bp, Artificial Sequence
  ENSG00000196693_27 (sequence is synthesized)
ttgactatgaagctttttgtaaagcatagataaattgaataatcagggcaacagcattaagcacatctgtgaattatccctgaagttcataggacttacatatgtacaagtggtatgtga

SEQ ID NO: 708479 - DNA, 120 bp, Artificial Sequence
  ENSG00000196693_28 (sequence is synthesized)
tataaatcgtgtgtttcatatgcataatggtatttaacgtaattgtgaataggaagtaggtatcctaatttagtagtggttacttcatcaggcccatcccaggtgtttgtcgtgtcctga

SEQ ID NO: 708480 - DNA, 120 bp, Artificial Sequence
  ENSG00000196693_29 (sequence is synthesized)
aacaatttaaatagagacccacagagctaatgtttatccatttaaaagttataaatcaaaataacagattatctgaaaaaaaatctatcctgtacgtgtgaagatctaggcctgcctcca

SEQ ID NO: 708481 - DNA, 120 bp, Artificial Sequence
  ENSG00000196693_30 (sequence is synthesized)
tgttactccctttctcttactacctgtggctcatcccatgccatgaactgcctggggtacatatgtgaacactccagccttcagcgtaagtgatagtccaaattttctttaagcagctgc

SEQ ID NO: 708482 - DNA, 120 bp, Artificial Sequence
  ENSG00000196693_31 (sequence is synthesized)
tctccaagacagggccctggaaagaggcccacacatacagcccagttgctgcccagggctgttggactgtcatttcattgctcattgtacccagacagggatctgggccttcagagactt

SEQ ID NO: 708483 - DNA, 120 bp, Artificial Sequence
  ENSG00000196693_32 (sequence is synthesized)
ttgagaatatgaagaggagggttgaggctggagaagagccagaatcaagctggcatggggcttttattgacagtgtgaagattgtacactacattacatgatcagatcatacaaataatc

SEQ ID NO: 708484 - DNA, 120 bp, Artificial Sequence
  ENSG00000196693_33 (sequence is synthesized)
taagattttacagtctggtgaccctagattacacaagtaatctaagcttccactttggaaaactagaaaaagaagagcaaattaaatccaaagtaacctggaaaaaaattagagtaaaaa

SEQ ID NO: 708485 - DNA, 120 bp, Artificial Sequence
  ENSG00000196693_34 (sequence is synthesized)
tcagtgaaattgaaaagagaaaatcaataaaacccaaaactgttctttgaaaaggtgggtaaaattgataaacctctagctagattaagaaaaaacagaagacaaatactgctaatacca

SEQ ID NO: 708486 - DNA, 120 bp, Artificial Sequence
  ENSG00000196693_35 (sequence is synthesized)
aaagtgaaagaggccatcatagctgatcctatggtcaccaaaaggattagaaagaaatatggacaactctgtccataaatttgataacttagctaaaatggatcaattccttgcaagatg

SEQ ID NO: 708487 - DNA, 120 bp, Artificial Sequence
  ENSG00000196693_36 (sequence is synthesized)
cattctctcaaagctcataaaaggtagatctcagtaggcatatatatctattaaataaattgaagcagtaattaataaccttccaagaccaggcgcggtggctaaaaatacaaaaagtta

SEQ ID NO: 708488 - DNA, 120 bp, Artificial Sequence
  ENSG00000196693_37 (sequence is synthesized)
tgacagagtgagactccatctcaataaaattaataataataaaaccttccaaaaaaagtgccgggaccaaatggattcactgatgtgcatttttcgagatacttaaggtagaaatgatac

SEQ ID NO: 708489 - DNA, 120 bp, Artificial Sequence
  ENSG00000196693_38 (sequence is synthesized)
ataccaagtctgtactgtctctttcagaaaataaaagcagggataacacttcccaaatcattttgtgaggccaggattaccctaataccaaagccaggcaaaaacattacaagaaaggaa

SEQ ID NO: 708490 - DNA, 120 bp, Artificial Sequence
  ENSG00000196693_39 (sequence is synthesized)
aactacagatcaatatttccagtgaacacagatgcagaaatccttaaaatgttagcaaatcaggaatgcaagccttgttcaacatttgatattcagtgcaatccattgcatgcattagca

SEQ ID NO: 708491 - DNA, 120 bp, Artificial Sequence
  ENSG00000196693_40 (sequence is synthesized)
gttcaaagattaaatatgatcatatcaataggtacagaaaaagcatttgacaaaatccaatatccattcatgataaaacctctcaacacagaaggaatacaggagaacttactcaatttg

SEQ ID NO: 708492 - DNA, 120 bp, Artificial Sequence
  ENSG00000196693_41 (sequence is synthesized)
ataaagaactactacaaaaaaccctacatctagcatcatccttgatgtttccaactaaatgctttcctactaagatcaggaacatggcaaggaacaccactgcttttcagcattgtactg

SEQ ID NO: 708493 - DNA, 120 bp, Artificial Sequence
  ENSG00000196693_42 (sequence is synthesized)
gaagtgctatctaatgcagtgataccaaaaaaaaaggaaataaaatgcacataaatttggaaggaggaaatacaactgtctttgttctcaaataacatgattgtctttgtagaaaattct

SEQ ID NO: 708494 - DNA, 120 bp, Artificial Sequence
  ENSG00000196693_43 (sequence is synthesized)
aaataacaaaaacctgctgacattaataagcaattatagcagggttgtagaatgtagtcctcaggtatatgataaaaaagaattagacatcaagtcattaaaagacatataggaacccta

SEQ ID NO: 708495 - DNA, 120 bp, Artificial Sequence
  ENSG00000196693_44 (sequence is synthesized)
aatgcttattgttaagtgaaaaccaatctgaaaaggctttctatgttgtatgattgcaattatatgacattctgggagaggcaaaactatcgagcgagtcaaaggaccagtggttgctga

SEQ ID NO: 708496 - DNA, 120 bp, Artificial Sequence
  ENSG00000196693_45 (sequence is synthesized)
gagttgaggggaaaggagggatggcaggtaggtgatttttaggacagtgaaagtactctgtagggtactgtaatttgtcaaaatgcagagaatggaaaacagtgaacggaaaacacagag

SEQ ID NO: 708497 - DNA, 120 bp, Artificial Sequence
  ENSG00000196693_46 (sequence is synthesized)
taaaccctagtgtcaactctggacttcagttaataacagtgtaccactattggctcatcaattgtaacaaatgaaccataatgatgcaagatgttaataattggggagcctgtggaggat

SEQ ID NO: 708498 - DNA, 120 bp, Artificial Sequence
  ENSG00000196693_47 (sequence is synthesized)
gggagggttaaaggtttatatgagaattctctgtactttttgctcaatttttctgtaaccctaaagctgctctaaaaaatgaagtgtattaagtaaataaataagtaaataaccaaccaa

SEQ ID NO: 708499 - DNA, 120 bp, Artificial Sequence
  ENSG00000196693_48 (sequence is synthesized)
tgggttaatatgtactgcacagattcacatcaggggatttgttgtttcccagtagttaattcagggtttggcaactttggaacatttttcaagaacatctccataggggtcctaacctct

SEQ ID NO: 708500 - DNA, 120 bp, Artificial Sequence
  ENSG00000196693_49 (sequence is synthesized)
tccaagaacagaacaaaatgaacaaggtaagttgtttattaattccctactttattttgcggtggactttgtgagatttgtaagagtcagtatggtttttttgttttgttttgtttgtga

SEQ ID NO: 708501 - DNA, 120 bp, Artificial Sequence
  ENSG00000196693_50 (sequence is synthesized)
cactgcctgccacaccaggactggaagatcaatggccttcccttcttccaaactaccttcccatgaggtggggatggtggtcacatctccaacactggcgtgctgtggaagagacatcag

SEQ ID NO: 708502 - DNA, 120 bp, Artificial Sequence
  ENSG00000196693_51 (sequence is synthesized)
cattctctgcaacaaatttggaaacagcctaaagagacgtttctacttcaaagagatgcactgaggaagtgcactggcactgctggggactcacctggggcccagggctgaggcttctcg

SEQ ID NO: 708503 - DNA, 120 bp, Artificial Sequence
  ENSG00000196693_52 (sequence is synthesized)
tgtccttggagctgctgtcctcccgaggagcgtccacactgcagccagctcagcctcaggtgtcctatctggttttgaaaccaaatctaagtgggaaaagaagattcaagttttatccga

SEQ ID NO: 708504 - DNA, 120 bp, Artificial Sequence
  ENSG00000196693_53 (sequence is synthesized)
caaaatgaacaagggtattgtgctcacaaaccagaggtgatcttcaggctggaacaaggagaagaaccatggagactggaggaagaattcccaagccagagctttccaggctcctcttgg

SEQ ID NO: 708505 - DNA, 120 bp, Artificial Sequence
  ENSG00000196693_54 (sequence is synthesized)
gatgggtgtgtgtccactcttccttcacctcttccccaccctacagttgtttttgtctcatgctcacttgctctttctgcctccctctcactctttaggtctcacaaaggctttggtcaa

SEQ ID NO: 708506 - DNA, 120 bp, Artificial Sequence
  ENSG00000196693_55 (sequence is synthesized)
ggactgactgactttccttggctctctgtcatctccccataatcaaaggcatttcataacacacaatccatgtgaagggacctctgatcaaaattcacttaaagaggagctcactaatta

SEQ ID NO: 708507 - DNA, 120 bp, Artificial Sequence
  ENSG00000196693_56 (sequence is synthesized)
ccagtacttactgctgagcctggaatcattcgtatataccccagagttcattcattccagacacagtactagataaggagactcctatgagccaaaaacctaactctgaatagactgtga

SEQ ID NO: 708508 - DNA, 120 bp, Artificial Sequence
  ENSG00000196693_57 (sequence is synthesized)
ctgtcataatcaaaccctgtggctgcctccttcttactggagggcatagaggaatgcagatttttgtttgtttgttttgagacagagtgtcgctgcaatgcccaggctgaagtacaatgg

SEQ ID NO: 708509 - DNA, 120 bp, Artificial Sequence
  ENSG00000196693_58 (sequence is synthesized)
caggaatgtgcttttaatcatttcttagtgtttcatgtggggacttgataactcacaataaggattctatcctaaaagacaagcaatacctgttgacctgctcttatgtcccaggcagtt

SEQ ID NO: 708510 - DNA, 120 bp, Artificial Sequence
  ENSG00000196693_59 (sequence is synthesized)
tgtaaaactgtttcatctattctctcaatatgtcacttcaaatatgatcaggaaagaagtcttaaacatggctggaaatgtgggggcaacaaatacattagtgaacaccctggcggatcc

SEQ ID NO: 708511 - DNA, 120 bp, Artificial Sequence
  ENSG00000196693_60 (sequence is synthesized)
agccaagaaaatcaatctaaacatttgtgggaagttgtattcatcaataatgaaatgctgactaaggaacaagatgtcatcagcctcaggagagagtggtatgtaccttgaaataactca

SEQ ID NO: 708512 - DNA, 120 bp, Artificial Sequence
  ENSG00000196693_61 (sequence is synthesized)
ccgagacacaaacttgctgacttcttgtcctccatctcagagaagatatggaagatatgaaggatggagaaaaagaggaagaggaaatgtgatggtggagtgggtaacataaaaaaggga

SEQ ID NO: 708513 - DNA, 120 bp, Artificial Sequence
  ENSG00000196693_62 (sequence is synthesized)
ggctgctcttagccgggaccacacttgtgctttgaaaacaacccccaaaatccctgcaggcaattgaaggatgtcccgagaacatcctcccagggagcagatacccattctgtagaagct

SEQ ID NO: 708514 - DNA, 120 bp, Artificial Sequence
  ENSG00000196693_63 (sequence is synthesized)
ctaagcctgctgggctaagccctccataggccactttaatgaggaggagaggctgtaggtggtggtaggaccaccatgttgcatgacttttctgtgtgccccgtcttttgactctgtctc

SEQ ID NO: 708515 - DNA, 80 bp, Artificial Sequence
  ENSG00000196700_0 (sequence is synthesized)
gccccccgccccggcccggcccggcccggccgcagccccgctgggcgccgcagagatgacggatcctttctgcgttggag

SEQ ID NO: 708516 - DNA, 120 bp, Artificial Sequence
  ENSG00000196700_1 (sequence is synthesized)
tgacggatcctttctgcgttggaggccgtcggctcccggggtccagcaagagtggtcccgggaaggatggcagccgaaaggaggtccgacttccaatgctgcatgacccaccgaagatgg

SEQ ID NO: 708517 - DNA, 120 bp, Artificial Sequence
  ENSG00000196700_2 (sequence is synthesized)
ggatgccggtggtccgtggtggacagacagtgcccggccaggcccctctctgctttgacccgggaagtccagccagtgacaagacagaagggaagaaaaaggggcggccaaaagccgaga

SEQ ID NO: 708518 - DNA, 120 bp, Artificial Sequence
  ENSG00000196700_3 (sequence is synthesized)
accaggccctccgagacattcctctctccctgatgaacgactggaaggatgagttcaaggcacactcgagggtgaagtgtccaaactcagggtgctggctggagttccccagcatctacg

SEQ ID NO: 708519 - DNA, 120 bp, Artificial Sequence
  ENSG00000196700_4 (sequence is synthesized)
ggctcaagtaccattaccagcggtgccaagggggtgccatctcagatcgcctggccttcccctgccccttctgcgaggccgcattcacctctaagacccagctggagaaacaccggatct

SEQ ID NO: 708520 - DNA, 120 bp, Artificial Sequence
  ENSG00000196700_5 (sequence is synthesized)
ggaaccacatggaccgacccctgcctgcctccaagcctgggcccatcagcaggccggtcaccatcagccggcctgttggggtcagcaagcccatcggagtgagcaaacctgtcactattg

SEQ ID NO: 708521 - DNA, 120 bp, Artificial Sequence
  ENSG00000196700_6 (sequence is synthesized)
gcaaacctgtgggtgtcagcaaacccattggcatcagcaagccagtctcggtcggcagacccatgccagtcaccaaggccatcccggtcactaggcccgtgccagtcaccaaacctgtca

SEQ ID NO: 708522 - DNA, 120 bp, Artificial Sequence
  ENSG00000196700_7 (sequence is synthesized)
cagtcagcaggcccatgcccgtcaccaaggccatgccggtcaccaaacccatcacagtcaccaagtctgtgccggtcaccaaacccgtacctgtcaccaaacccattacggtaacaaagc

SEQ ID NO: 708523 - DNA, 120 bp, Artificial Sequence
  ENSG00000196700_8 (sequence is synthesized)
ttgtgacagttacgaaacccgtgccggtcaccaagccagtgacagtcagcaggcccattgtggtcagcaagccggtgacagtcagcaggcccattgctatcagcagacacacaccgccct

SEQ ID NO: 708524 - DNA, 120 bp, Artificial Sequence
  ENSG00000196700_9 (sequence is synthesized)
gcaaaatggtgctgctgaccaggtcggagaacaaagcacctcgtgccacagggaggaacagtggtaagaaaagggctgcggacagcctggacacctgcccaattccacccaagcaggcca

SEQ ID NO: 708525 - DNA, 120 bp, Artificial Sequence
  ENSG00000196700_10 (sequence is synthesized)
ggccagagaatggggagtacggcccctcctccatgggccagagctcggccttccagctgagtgcagacaccagcagtggctccttgtcgccaggcagcaggccgtcagggggcatggagg

SEQ ID NO: 708526 - DNA, 120 bp, Artificial Sequence
  ENSG00000196700_11 (sequence is synthesized)
cactgaaggctgcaggccctgcgtccccgcctgaggaggacccggagcgcacaaagcacagaaggaaacagaaaacacccaaaaagtttacaggggagcagccatccatctcagggacct

SEQ ID NO: 708527 - DNA, 120 bp, Artificial Sequence
  ENSG00000196700_12 (sequence is synthesized)
ttgggctcaaaggcctggtcaaagctgaggacaaggcccgagttcaccgctccaagaagcaggaggggccaggccctgaggacgcccggaagaaggtgccagctgcccccatcactgtca

SEQ ID NO: 708528 - DNA, 120 bp, Artificial Sequence
  ENSG00000196700_13 (sequence is synthesized)
gcaaggaggcaccggcccctgtggcccacccagctccaggtggccctgaagagcagtggcagagggccatccatgagcgcggggaagccgtctgccccacctgcaacgtggtcacccgga

SEQ ID NO: 708529 - DNA, 120 bp, Artificial Sequence
  ENSG00000196700_14 (sequence is synthesized)
agactctcgtggggcttaagaagcacatggaggtgtgtcagaagcttcaggatgcactcaagtgccagcactgccggaagcagttcaagtccaaagccggcctcaactaccacactatgg

SEQ ID NO: 708530 - DNA, 120 bp, Artificial Sequence
  ENSG00000196700_15 (sequence is synthesized)
ccgagcacagtgccaagccctctgacgccgaggcctccgaagggggcgagcaggaggagcgcgagaggctgcgcaaggtgctgaagcagatgggacggctgcgctgcccccaggagggtt

SEQ ID NO: 708531 - DNA, 120 bp, Artificial Sequence
  ENSG00000196700_16 (sequence is synthesized)
gcggggctgccttctccagcctcatgggctaccagtaccaccagcggcgctgcgggaagccgccctgcgaggtggacagcccctccttcccctgcacccactgtggcaagacgtaccgat

SEQ ID NO: 708532 - DNA, 120 bp, Artificial Sequence
  ENSG00000196700_17 (sequence is synthesized)
ccaaggctggccacgactaccacgtgcgctcggagcacacggcccccccccctgaggagcccacagacaagtcccctgaggctgaggacccgctgggtgtggagcggaccccaagcgggc

SEQ ID NO: 708533 - DNA, 120 bp, Artificial Sequence
  ENSG00000196700_18 (sequence is synthesized)
gtgtccgccgcacgtcggcccaggtggcggtgttccacctgcaggagatagcggaggacgagctggcccgcgactggaccaagcggcgcatgaaggatgaccttgtgcccgagaccgcac

SEQ ID NO: 708534 - DNA, 120 bp, Artificial Sequence
  ENSG00000196700_19 (sequence is synthesized)
ggctcaactacactcgaccagggctccccacgctgaacccccagctgctagaggcatggaagaatgaagtgaaggagaaaggccacgtcaactgtcccaacgactgctgtgaagccatct

SEQ ID NO: 708535 - DNA, 120 bp, Artificial Sequence
  ENSG00000196700_20 (sequence is synthesized)
actccagcgtgtccggactcaaggctcatctcgccagctgcagtaagggggcccacctggcagggaagtaccgctgtctgctgtgtccgaaggagttcagttctgagagtggcgtcaaat

SEQ ID NO: 708536 - DNA, 120 bp, Artificial Sequence
  ENSG00000196700_21 (sequence is synthesized)
accacatcctgaagacccacgcagagaactggttccgaacatcagcagacccacctcccaaacacaggagccaggactcattggtgcccaagaaggaaaagaagaaaaatctggcaggtg

SEQ ID NO: 708537 - DNA, 120 bp, Artificial Sequence
  ENSG00000196700_22 (sequence is synthesized)
gaaagaagcggggccgaaagcccaaggagcggaccccagaggagcctgtggccaagctgcccccgcgccgggacgactggcctccaggatgcagagacaagggggcccggggctccaccg

SEQ ID NO: 708538 - DNA, 120 bp, Artificial Sequence
  ENSG00000196700_23 (sequence is synthesized)
gccggaaggtgggagtcagcaaggcgcctgaaaagtgagcatggtgcgtggggcctggcccccatgcagccgccacaccgccctctgttcaaggcagggccagctccgggacctctgtcc

SEQ ID NO: 708539 - DNA, 120 bp, Artificial Sequence
  ENSG00000196700_24 (sequence is synthesized)
agggcacacctgggttggggctccccaaggtgtgcccagcagaagtgcaatagccaggagggttgcccctcctcatgggaatgtgtctggggtcttggtgccacaggggctgcagcgcag

SEQ ID NO: 708540 - DNA, 120 bp, Artificial Sequence
  ENSG00000196700_25 (sequence is synthesized)
agtaggcagatggcctttggccccccggctccgcttcctcaggccctgccgggtcccttccctggctaccccaaggctcaggcatccctggtgacctgtggttctgggctggtgagggca

SEQ ID NO: 708541 - DNA, 120 bp, Artificial Sequence
  ENSG00000196700_26 (sequence is synthesized)
cctgagcaacctggcacgggcagccaccatcctggcctcacctccacccaacactggaactccagcacccccagctacctcccaggacagacccctgtctgaccactgccatgctgacct

SEQ ID NO: 708542 - DNA, 120 bp, Artificial Sequence
  ENSG00000196700_27 (sequence is synthesized)
gacaggctccggcctgcccttggccacccacttggtccccttgcttctgttttctacctctccaggcctgcccactacccccacccctgctcctcctttgtcagtgcgatccctgctgtg

SEQ ID NO: 708543 - DNA, 120 bp, Artificial Sequence
  ENSG00000196700_28 (sequence is synthesized)
ctcaggccctgccccccaggcctgtctgtaattctcccagcttggggcaagggaggggttttgcttcttgtacctacagggcagcagaagcttgatgcccttcaacacagctgccagccc

SEQ ID NO: 708544 - DNA, 120 bp, Artificial Sequence
  ENSG00000196700_29 (sequence is synthesized)
tgggggtgtggggcccctggagtgtgctctcctccagtgttcagccttctggcactgcaggcctaggttggagcagcctcgtggagtagggacggactagttcgggccctggggtcttgc

SEQ ID NO: 708545 - DNA, 120 bp, Artificial Sequence
  ENSG00000196700_30 (sequence is synthesized)
tggggcccataggcatgtggggcaggaagctgggcagagctggcctggctctgagtggccactgggggaaaggcagccttctgtctgccaatctgggtaggcccagtggccaagctctca

SEQ ID NO: 708546 - DNA, 120 bp, Artificial Sequence
  ENSG00000196700_31 (sequence is synthesized)
tgggagccccctccccacttttttttttaacctgcccccattgtttctggttgtgtggtcatttgatatgggaactgaaggccagccaggggaggggcttggccaaagtcacagcaggtt

SEQ ID NO: 708547 - DNA, 120 bp, Artificial Sequence
  ENSG00000196700_32 (sequence is synthesized)
gatggcagctccagagctgtctttgcccctttgtggccctgaggacggctgggtctataggtagggcaggggtcaggcagggagtccagggtgcctggaagaggtggccacagcctgtgg

SEQ ID NO: 708548 - DNA, 120 bp, Artificial Sequence
  ENSG00000196700_33 (sequence is synthesized)
ctccctccctggggtcctgccttccaaccacggcattgcagggaggatgaggctcagagggggtaggtttggagggaggccattttccagggtgggtgggagtgggctgagggctcggcc

SEQ ID NO: 708549 - DNA, 120 bp, Artificial Sequence
  ENSG00000196700_34 (sequence is synthesized)
ccactgaccctggacgatgagaattttgatgtttgcccgtgtgcgtgtgtctcctgggtgtagtggatgccagtcttgttgctgtgacaagtaacaaccttttttttaaattgtttttta

SEQ ID NO: 708550 - DNA, 120 bp, Artificial Sequence
  ENSG00000196700_35 (sequence is synthesized)
tacaaacactcgcaatccgacatttggtgctaagggtttcctggtgcagacggtgggcctgggggctgggctggaccagggcgtgggtctctggggttggggtcccttgctgctcaggga

SEQ ID NO: 708551 - DNA, 120 bp, Artificial Sequence
  ENSG00000196700_36 (sequence is synthesized)
ggcagtactgactgggcactgcctctgcccccagcacccaccctcccccattccccagggagaaggggccccactgggcttggcctgcagtagtagggagacaagttccaggagcacttt

SEQ ID NO: 708552 - DNA, 120 bp, Artificial Sequence
  ENSG00000196700_37 (sequence is synthesized)
ggggactggggttgcagaacacttcctgtctctggcttcatccttgggccagaaggctccaaccctcagcagcccttgccagatgtgccagggagtgggtgtggagacccggactccccc

SEQ ID NO: 708553 - DNA, 120 bp, Artificial Sequence
  ENSG00000196700_38 (sequence is synthesized)
cacccacgcacacctcggcctgatgagaggatggaggctggggcagagatgggcgtgacccagcgtcagagggtcgggggaggcattccttcctgtgtcccagagcttcactggtggagc

SEQ ID NO: 708554 - DNA, 120 bp, Artificial Sequence
  ENSG00000196700_39 (sequence is synthesized)
tggaggagccggaggtggagggtggggtctggcagctgctgctggggcagcctcatgaggggaggggaggggaggggaggggagcaggcactgggcgggggcctaggtgcactttgtcct

SEQ ID NO: 708555 - DNA, 120 bp, Artificial Sequence
  ENSG00000196700_40 (sequence is synthesized)
tgccaccaatggcgggaggagggtggacctgaacacctgcagggtgtggtgcctgccccagcctctcaggtacttggcccttggggagaagagaagagggtctggtttttgctgggggtg

SEQ ID NO: 708556 - DNA, 120 bp, Artificial Sequence
  ENSG00000196700_41 (sequence is synthesized)
agtttccgggacactcccaaagcccacagataatccctggtgtgggaagaggagtcctggataccttgatgtttagcactttaaccccctttgtctttaaggtaggcgtgggggctactg

SEQ ID NO: 708557 - DNA, 120 bp, Artificial Sequence
  ENSG00000196700_42 (sequence is synthesized)
ccagaagtggctgttgggtctgaccccctcctttctgccctccctctgccacatgctggtccgcagagccctcctcccaaggggtggggccctgggtggagctcagcagggtctgcccac

SEQ ID NO: 708558 - DNA, 120 bp, Artificial Sequence
  ENSG00000196700_43 (sequence is synthesized)
tccctacgctggcccacataggcctccaggagccctcagtgagagggaccagcatagctgacccccagagtgtggtgggcgccggccctgcccgaggcccagtcggggccctttctgcag

SEQ ID NO: 708559 - DNA, 120 bp, Artificial Sequence
  ENSG00000196700_44 (sequence is synthesized)
atctacctctggctcagcgcacgccccctgccctgagaacaggaaagggcccggaagggctgactcaccgggccgacgctcacacgaaaatgggatgcactttatttgctggtgcaaagg

SEQ ID NO: 708560 - DNA, 120 bp, Artificial Sequence
  ENSG00000196700_45 (sequence is synthesized)
caggtgagggtgcctcctgtgtgaccgttggccctcctgcctggtggcgctgaagggaaggagccagtgagcctgaccccgggaggggccgtccccgtgtgccgcgtttggcggggcccc

SEQ ID NO: 708561 - DNA, 120 bp, Artificial Sequence
  ENSG00000196700_46 (sequence is synthesized)
aggcggctcccccaggcccgggtctggggccccaggctttcccctgcctcgcggccgggcgtcccgtgctttgggtttcttggtttgggttttttaatgccagttctcagtacataagtg

SEQ ID NO: 708562 - DNA, 120 bp, Artificial Sequence
  ENSG00000196700_47 (sequence is synthesized)
cattttgaaagaggttccagctatcacttgtaaccatatatatatacatatatattctatctacaaagtgtttatttgcgagatgtttcaacggtgagttcgggccccgcccgccttgtg

SEQ ID NO: 708563 - DNA, 120 bp, Artificial Sequence
  ENSG00000196700_48 (sequence is synthesized)
accatctgtccccggtcctcgtccccgccccgcgccctggtcccgagtggcgtggggacgggccatcactgtatgtattaaaatgactgtatcaaataaatgtttattgatttttttcca

SEQ ID NO: 708564 - DNA, 120 bp, Artificial Sequence
  ENSG00000196704_0 (sequence is synthesized)
agtgcgaagggacgcggtgcgcatgcgcgtgagggctgccgcgggtgggtggtatcgaggcctgtcgggtcagggcggttcgcgggtgctgtcagagctgggccggggcccctaggcagg

SEQ ID NO: 708565 - DNA, 120 bp, Artificial Sequence
  ENSG00000196704_1 (sequence is synthesized)
gtagccgggtcgtagaggcgggggccggtcgcggtcggtggagcgggatgaggatgtaggaggggcggacgtggcggaagccgcggggtccgcggggtcggtgcctctagggagccaggg

SEQ ID NO: 708566 - DNA, 120 bp, Artificial Sequence
  ENSG00000196704_2 (sequence is synthesized)
aggcctttcccgaggctcctggggaagaagaggcgaagcgagagtccctggggaacccccactccactcccagctggagactgggttgtgtctgcatggaccagagcccacagtgcgagt

SEQ ID NO: 708567 - DNA, 120 bp, Artificial Sequence
  ENSG00000196704_3 (sequence is synthesized)
tgctataggcaaccagccagggtggccagctccttcccgtttgcccgtgatgttctggttttgggaccaaagcatcctaggcctccagcccactgcagtgaccgaattctgcgccccctg

SEQ ID NO: 708568 - DNA, 120 bp, Artificial Sequence
  ENSG00000196704_4 (sequence is synthesized)
cccatcttctcccgcagcttccctagattaggcttgggaggcaagaggaggcctcctgacctttcacactgcctttttaatattaagatgaagtcacactccacaactttcttccagcca

SEQ ID NO: 708569 - DNA, 120 bp, Artificial Sequence
  ENSG00000196704_5 (sequence is synthesized)
ggcccagacatgtccgtccttgtaagttaaaagcttccatgggagccttccttcctaatcaagatgcaaataatacggcactccgaacagacactaaaaacagctctcatctcaaagaac

SEQ ID NO: 708570 - DNA, 120 bp, Artificial Sequence
  ENSG00000196704_6 (sequence is synthesized)
ccagtgcttgtatcacagtatgagaaattaaatgctggggaacaacgtttaatgaatgaagccttccagccagccagtgatctctttggacccattaccttgcattctccatcagattgg

SEQ ID NO: 708571 - DNA, 120 bp, Artificial Sequence
  ENSG00000196704_7 (sequence is synthesized)
atcacctcccaccctgaggctccccaagactttgaacagttcttcagtgatccttacagaaagacaccctctccaaacaaacgcagcatttatatacagtccattggctctctaggaaac

SEQ ID NO: 708572 - DNA, 120 bp, Artificial Sequence
  ENSG00000196704_8 (sequence is synthesized)
agtgaagaatatattaaatggctcacgggctactgtaaagcatatttctatggcttgagagtaaaactcctagaaccagttcctgtttctgtaacaagatgttcctttagagtcaatgag

SEQ ID NO: 708573 - DNA, 120 bp, Artificial Sequence
  ENSG00000196704_9 (sequence is synthesized)
aacacacacaacctacaaattcatgcaggggacatcctgaagttcttgaaaaagaagaaacctgaagatgccttctgtgttgtgggaataacaatgattgatctttacccaagagactcg

SEQ ID NO: 708574 - DNA, 120 bp, Artificial Sequence
  ENSG00000196704_10 (sequence is synthesized)
tggaattttgtctttggacaggcctctttgacagatggtgtggggatattcagctttgccaggtatggcagtgatttttatagcatgcactataaaggcaaagtgaagaagctcaagaaa

SEQ ID NO: 708575 - DNA, 120 bp, Artificial Sequence
  ENSG00000196704_11 (sequence is synthesized)
acatcttcaagtgactattcaattttcgacaactattatattccagaaataactagtgttttactacttcgatcctgtaagactttaacccatgagatcggacacatatttggactgcga

SEQ ID NO: 708576 - DNA, 120 bp, Artificial Sequence
  ENSG00000196704_12 (sequence is synthesized)
cactgccagtggcttgcatgcctcatgcaaggctccaaccacttggaagaagctgaccggcgccctctaaacctttgccctatctgtttgcacaagttgcagtgtgctgttggcttcagc

SEQ ID NO: 708577 - DNA, 120 bp, Artificial Sequence
  ENSG00000196704_13 (sequence is synthesized)
attgtagaaagatacaaagcactggtgaggtggattgatgatgaatcttctgacacacctggagcaactccagaacacagtcacgaggataatgggaatttaccgaaacccgtggaagcc

SEQ ID NO: 708578 - DNA, 120 bp, Artificial Sequence
  ENSG00000196704_14 (sequence is synthesized)
tttaaggaatggaaagagtggataataaaatgcctggctgttctccaaaaatgaggaccttcaaataggagtgattgaaataaataactacttgcatgttatgctttcatttgggtggaa

SEQ ID NO: 708579 - DNA, 120 bp, Artificial Sequence
  ENSG00000196704_15 (sequence is synthesized)
tacttcattggaataaactactgatcttgtgctgtgtcaaagtaacagactagaaccttctttcaagtacctgaattgaaatgaaactcattttgaataataaaaactctagaaactctt

SEQ ID NO: 708580 - DNA, 120 bp, Artificial Sequence
  ENSG00000196704_16 (sequence is synthesized)
aaattgcagaaatgatagggcttacattagttttgtttttatttgatgttgaagatctttgagtcacattagaaacgatgagtatttttcatgtggcactgatgagttaattcatattat

SEQ ID NO: 708581 - DNA, 120 bp, Artificial Sequence
  ENSG00000196704_17 (sequence is synthesized)
tattttttgagacagagtctctattgcccaggctggactgcagtggcacgatcacggcccactgcagcctcgacctcctgggctcagatgatcctcccatcttagcctgccaagtagctg

SEQ ID NO: 708582 - DNA, 120 bp, Artificial Sequence
  ENSG00000196704_18 (sequence is synthesized)
ggactacaagtgcacatcaccacatccggctaatttttttgtagatatggggttttgccatgatgtcgaagctgatttcagactcctaggctcaagtaatccttctgccttggcctccca

SEQ ID NO: 708583 - DNA, 120 bp, Artificial Sequence
  ENSG00000196704_19 (sequence is synthesized)
ggattataagcgtgagccactgtgccaggccaatattattccccaaaagaaggaagttgggtgtgaggtcctgctcctgtggtcaccgtgaggttttttttttttgttttggactcttgc

SEQ ID NO: 708584 - DNA, 120 bp, Artificial Sequence
  ENSG00000196704_20 (sequence is synthesized)
acagtcatggctcactgcagcctcaagctcctgggctcaagtgattctcctgtctcagcctccctggtagctaggaccacagatgtgcacaactatgcccagggaatttttaaatttttt

SEQ ID NO: 708585 - DNA, 88 bp, Artificial Sequence
  ENSG00000196704_21 (sequence is synthesized)
tctcagcctccctggtagctaggaccacagatgtgcacaactatgcccagggaatttttaaattgagctgttctcaaactcctggcct

SEQ ID NO: 708586 - DNA, 120 bp, Artificial Sequence
  ENSG00000196704_22 (sequence is synthesized)
tgagccaccacacctggccaccactagtttttgtaatgggagcaggttccatatgagatggaggaatggatttcatgattgtctttttaatttcttagatctccaagaaattggacatga

SEQ ID NO: 708587 - DNA, 120 bp, Artificial Sequence
  ENSG00000196704_23 (sequence is synthesized)
ggaaaccactctaagtgtgaccactctaaagcattagcaatcagtcatttcactctagggagaaatcagagctgaaatatagaggataggtaaagtccccaatgtagatatgtattttta

SEQ ID NO: 708588 - DNA, 120 bp, Artificial Sequence
  ENSG00000196704_24 (sequence is synthesized)
ggcgtaaggggcgtggcgccagtgggcgtggcgtggcgcagtgcgaagggacgcggtgcgcatgcgcgtgagggctgccgcgggtgggtggtatcgaggcctgtcgggtcagggcggttc

SEQ ID NO: 708589 - DNA, 120 bp, Artificial Sequence
  ENSG00000196704_25 (sequence is synthesized)
tattttcagttgagacattatgccataatgggaagtgtgctgttggtagattgtgataatctaggttctggttggccactcactacctacaggaccttaaaggcactggtgaggtggatt

SEQ ID NO: 708590 - DNA, 120 bp, Artificial Sequence
  ENSG00000196704_26 (sequence is synthesized)
tccgtccttgtaagttaaaagcttccatgggagccttccttcctaatcaagcctcgtggtggaacatcggacccattcaagaggaaggatgaaagctctatataggaacacgatgtgaat

SEQ ID NO: 708591 - DNA, 120 bp, Artificial Sequence
  ENSG00000196704_27 (sequence is synthesized)
cctcgtggtggaacatcggacccattcaagaggaaggatgaaagctctatataggaacacgatgtgaatggaagaaacctgtcattatctccaagaaattggacatgaggaaaccactct

SEQ ID NO: 708592 - DNA, 120 bp, Artificial Sequence
  ENSG00000196704_28 (sequence is synthesized)
tggcatgggtgggtcgtgagttgggcggggcccacagggcgtgcgcgacgcagcggcgcggcgcgtggcgtaaggggcgtggcgccagtgggcgtggcgtggcgcagtgcgaagggacgc

SEQ ID NO: 708593 - DNA, 120 bp, Artificial Sequence
  ENSG00000196704_29 (sequence is synthesized)
taaaagcttccatgggagccttccttcctaatcaaggtaggtagactacaggaaggtacatcttgttttatattttgtcctgtagaagtcagatttcagcccagttgtgtaggagtgagg

SEQ ID NO: 708594 - DNA, 120 bp, Artificial Sequence
  ENSG00000196704_30 (sequence is synthesized)
atgagcctatgcttatatcagagctttgagtacagagacatttggtctggaattttagtcagcctcttcaaccccagaatttataggttcaatcagaacagacattagcttaagttttcc

SEQ ID NO: 708595 - DNA, 120 bp, Artificial Sequence
  ENSG00000196704_31 (sequence is synthesized)
catcaatcgtctatcattaaactggcaaaatctaaataattagaaaatatgacaaagatgatccagacagagatgttcaactttttccttaattcaaaaagcctcgtggtggaacatcgg

SEQ ID NO: 708596 - DNA, 120 bp, Artificial Sequence
  ENSG00000196704_32 (sequence is synthesized)
actggtaatgtgctggttttggttcagttttgcagtggcgctcttgtcaggaatagtccaggctatgggtctgattcagatgggccgttttaggatcgtttttgatattcattgcggcgg

SEQ ID NO: 708597 - DNA, 120 bp, Artificial Sequence
  ENSG00000196704_33 (sequence is synthesized)
tacaagttttgtagccaaactgacttaaaagataacattttgtttctttttgtttcatagcaacaccaatgaatgataaaggttattgaaaatttagagttggttttgtttctaatttga

SEQ ID NO: 708598 - DNA, 120 bp, Artificial Sequence
  ENSG00000196705_0 (sequence is synthesized)
gtctctcgccgcagcctgagctccaggtctccccttcgctgctctgtgtcctctgctcctagaggcccaacatctgtggccctgtgacctgcaggtattgggagacccacagctaagaca

SEQ ID NO: 708599 - DNA, 120 bp, Artificial Sequence
  ENSG00000196705_1 (sequence is synthesized)
ccgggaccccctgaaagcctagaaatggacgacttgaaatatggagtgtatcctctcaaggaagcaagtggatgccctggggctgagaggaatcttctagtttactcttattttgaaaag

SEQ ID NO: 708600 - DNA, 120 bp, Artificial Sequence
  ENSG00000196705_2 (sequence is synthesized)
gccatagaattctctctggaggagtgggaatgcctgaaccctgctcagcagaatttatatatgaatgtgatgttagaaaactacaaaaacctggtcttcttgggtgttgctgtctctaag

SEQ ID NO: 708601 - DNA, 120 bp, Artificial Sequence
  ENSG00000196705_3 (sequence is synthesized)
ttcttgggtgttgctgtctctaagcaagacccagtcacctgtctggagcaagaaaaagagccctggaatatgaagagacatgagatggtggatgaacccccagctatgtgttcttatttt

SEQ ID NO: 708602 - DNA, 120 bp, Artificial Sequence
  ENSG00000196705_4 (sequence is synthesized)
accaaagacctttggccagagcaagacataaaagattcttttcaacaagtaatactgagaagatatggcaaatgtgaacatgagaatttacagttaagaaaaggctccgcaagtgtagat

SEQ ID NO: 708603 - DNA, 120 bp, Artificial Sequence
  ENSG00000196705_5 (sequence is synthesized)
gagtataaggtgcacaaagaaggttataatgagctaaaccagtgtttgacaactacccagagcaaaatatttccatgtgataaatatgtgaaagtctttcataaatttttaaatgcaaat

SEQ ID NO: 708604 - DNA, 120 bp, Artificial Sequence
  ENSG00000196705_6 (sequence is synthesized)
agacataagacaagacatactggaaagaaacctttcaaatgtaaaaaatgtggcaaatcattttgcatgcttttacacctaagtcaacataaaagaattcatattagagagaattcttac

SEQ ID NO: 708605 - DNA, 120 bp, Artificial Sequence
  ENSG00000196705_7 (sequence is synthesized)
attcttaccaatgtgaagaatgtggcaaagcttttaaatggttctcaacccttactagacacaagagaattcatactggagagaaacccttcaaatgtgaagaatgtggcaaagctttta

SEQ ID NO: 708606 - DNA, 80 bp, Artificial Sequence
  ENSG00000196705_8 (sequence is synthesized)
tttaagcggagaaaccatatagatgtgaagaatgtggcaaagccttcaaccggtcctcacaccttactacacataagata

SEQ ID NO: 708607 - DNA, 120 bp, Artificial Sequence
  ENSG00000196705_9 (sequence is synthesized)
agaatgtggcaaagcttttaaccagtcttcaacccttagtacacataagttcattcatgctggagagaaaccctacaaatgtgaggaatgtgacaaagcttttaatcgattctcatacct

SEQ ID NO: 708608 - DNA, 120 bp, Artificial Sequence
  ENSG00000196705_10 (sequence is synthesized)
tttaatcgattctcataccttactaaacataagataattcatactggagaaaaatcttacaaatgtgaagaatgtggcaaaggctttaattggtcctcaacccttactaaacataaaaga

SEQ ID NO: 708609 - DNA, 78 bp, Artificial Sequence
  ENSG00000196705_11 (sequence is synthesized)
tgtgtggcaaagcctttaatgagtcctcaaaccttactacacataagatgattcatactggagagaaaccctacaaat

SEQ ID NO: 708610 - DNA, 120 bp, Artificial Sequence
  ENSG00000196705_12 (sequence is synthesized)
gtgaagaatgtggcaaagcttttaaccgatcctcaaatcttactaaacataagataattcatacaggagagaaatcttacaaatgtgaagaatgtggtaaagcctttaaccaatcctcaa

SEQ ID NO: 708611 - DNA, 120 bp, Artificial Sequence
  ENSG00000196705_13 (sequence is synthesized)
aaatgtgaagaatgtggtaaagcctttaaccaatcctcaactcttactaaacataggaaaattcatactagacagaaaccctacaactgtgaagaatgtgacaatacatttaaccagtcc

SEQ ID NO: 708612 - DNA, 120 bp, Artificial Sequence
  ENSG00000196705_14 (sequence is synthesized)
tcaaaccttattaaacaaaataattcatactggagagaaactctacaaatgtcaagaatgtgggaaagcctttaagcagtcctcaactcttactaagcattaaatattggccgggtgcgg

SEQ ID NO: 708613 - DNA, 73 bp, Artificial Sequence
  ENSG00000196705_15 (sequence is synthesized)
atacaaaaattatctgggtgtggtggcacgtgcctgtattcccatctactcgggaggcttaggcaggaaccac

SEQ ID NO: 708614 - DNA, 120 bp, Artificial Sequence
  ENSG00000196705_16 (sequence is synthesized)
aacagagtgagactccgtctcaaaaaaaatttatactgtacaaaaaccccacaagtgtgaaaaacatggcaaagcctttaagaagccctcaattcttaacagacataagataatttatac

SEQ ID NO: 708615 - DNA, 120 bp, Artificial Sequence
  ENSG00000196705_17 (sequence is synthesized)
atttatactggagagaaactctacaaatcagaaagatgtgactacttttgacaacgcctcaaacttttctaaccataaaagtaattatactggtgagaaatcctagaaatctgaagagtg

SEQ ID NO: 708616 - DNA, 120 bp, Artificial Sequence
  ENSG00000196705_18 (sequence is synthesized)
agataaagcctttaaatggttgtcacacttcattgtaggtaagataattcatactggagaaaacgcctacatgtgtgaacaatatggcaaaacttaatgctcacactttattgctaggaa

SEQ ID NO: 708617 - DNA, 120 bp, Artificial Sequence
  ENSG00000196705_19 (sequence is synthesized)
agcatttatacttgagataaattatacaaatataaagactgtgaaaaagccatcattatctgctcacattttactcaacacagagagttcctgcttaataaaagcattataagtgcaatt

SEQ ID NO: 708618 - DNA, 120 bp, Artificial Sequence
  ENSG00000196705_20 (sequence is synthesized)
actgtcaaaagatctttcagaaaatataagcttttttagtgaagagtatttattttgaagttgaacatcacaaatataaaaagggttgtagtgcctttacttgtatcacagatctttttg

SEQ ID NO: 708619 - DNA, 120 bp, Artificial Sequence
  ENSG00000196705_21 (sequence is synthesized)
tagacattttcttctagaggaaaactctgaagcagttgatcaaactttgttcaacatcagggaatttatattgaaaaattgtgcaaatataataaatttggaaaaacaatttttcaaaaa

SEQ ID NO: 708620 - DNA, 120 bp, Artificial Sequence
  ENSG00000196705_22 (sequence is synthesized)
ctacagcttagaaatcaacagttatactagaatatattttttccagatgcagtaaaagtaaaatatttaatccataattaagtctatgcaaatatcagagaatttatggtagaaatatat

SEQ ID NO: 708621 - DNA, 120 bp, Artificial Sequence
  ENSG00000196705_23 (sequence is synthesized)
aaggtactgacacttcagatatactaaatcagagtgctaagtatagaaaatctgaaactaaagttggtagaaaagttatttgtatagaactttaagaggatcagaaggttttttgcagag

SEQ ID NO: 708622 - DNA, 120 bp, Artificial Sequence
  ENSG00000196705_24 (sequence is synthesized)
ttataattacattcaaagtatactttatttcttgaaaaatattacagattttttgaaaattgaataatgtcatcattcaactctgaaattatttcctgttgtttcttcattcctattgga

SEQ ID NO: 708623 - DNA, 120 bp, Artificial Sequence
  ENSG00000196705_25 (sequence is synthesized)
ctattggattcacatgtgaaagcatggggttaattgttgctacatcaaagagagagattcttttgtttgtttgttcgtttgttttttgagactgagtttcactctttcgcccaggctgga

SEQ ID NO: 708624 - DNA, 89 bp, Artificial Sequence
  ENSG00000196705_26 (sequence is synthesized)
gatctcagctcactacaacctctgccttctggtttcaagcaactcttctgcctcagcatcccaagtagctgggatagtgtatttctagt

SEQ ID NO: 708625 - DNA, 120 bp, Artificial Sequence
  ENSG00000196705_27 (sequence is synthesized)
ctgtagcatattttaataggagaatacaatatataatagtagcagggttaagtaaggcatccatcatctgtagcatttctcctttgttttacaaacaatccaattctacactttaaaaaa

SEQ ID NO: 708626 - DNA, 120 bp, Artificial Sequence
  ENSG00000196705_28 (sequence is synthesized)
gtacaattaaatttttatttaccacagtgttatttttatcgtcataataaaaattatatacgagtataaatgaaattcatttctaaattcttaataaatattttctcatgccaggtgtgg

SEQ ID NO: 708627 - DNA, 82 bp, Artificial Sequence
  ENSG00000196705_29 (sequence is synthesized)
caggctgagcgagggagtggatcttgaggtcagcagttcgagaccagcatggccaatatggagaaatcccgtctctactaaa

SEQ ID NO: 708628 - DNA, 120 bp, Artificial Sequence
  ENSG00000196705_30 (sequence is synthesized)
gcaacagagcgagactccatctcaaaaagtaaaatatattttcaaattttctatatatttttctttgaacatgtggcctgtctgcctgcaaacatatacagacttttagttttgattcat

SEQ ID NO: 708629 - DNA, 120 bp, Artificial Sequence
  ENSG00000196705_31 (sequence is synthesized)
gacttttagttttgattcatatagagttaaatacatgttagtctaaagacaaatcttaggtgtaagaaaattatggagttaagtatgtgtgtgtgagtatgagtttgtacatattttcag

SEQ ID NO: 708630 - DNA, 120 bp, Artificial Sequence
  ENSG00000196705_32 (sequence is synthesized)
aaggaaagaatgatacgggaacaaaaatcattttaatatggtgactactataaaactaaaaacctaaaaaatgctgaaagcaaatgtatactttttggtttgtattgaatttattactgt

SEQ ID NO: 708631 - DNA, 120 bp, Artificial Sequence
  ENSG00000196705_33 (sequence is synthesized)
acagtctatgacttagagttctgaatcttcccaagcaaattctctgtatatacttgcctggtactcatgctagacccatactttttttgtttcttacattttttttgttttatattttat

SEQ ID NO: 708632 - DNA, 120 bp, Artificial Sequence
  ENSG00000196705_34 (sequence is synthesized)
gaagtattcattatgtgagctggtctgcgattataagaatttttatgaaatttagtgcacacaaaataatctttagatgtaattccaaaagtagtgtattaagttacattttatttagtt

SEQ ID NO: 708633 - DNA, 120 bp, Artificial Sequence
  ENSG00000196705_35 (sequence is synthesized)
agagcactccattttgttcttttaagaggagaacaatatataggttttctttagtgatttgttcctttcactttttataattgacataagcatatttattgagtcaatttgttcagctaa

SEQ ID NO: 708634 - DNA, 120 bp, Artificial Sequence
  ENSG00000196705_36 (sequence is synthesized)
gtactagggaggcttcattagtcatgaggatgtttttatatataaatgtagcaaacatatattacagttttcactgtgtaatagattatccataataattcataaatattcctgctgaag

SEQ ID NO: 708635 - DNA, 120 bp, Artificial Sequence
  ENSG00000196705_37 (sequence is synthesized)
ttagtttgtaacttcaagtcaaagatgaaaaatatcaatggtgaagattgattgttcatatagagaggacattttttttccagactgtaaaactgaatcttgttgaatttaaagagaaat

SEQ ID NO: 708636 - DNA, 80 bp, Artificial Sequence
  ENSG00000196705_38 (sequence is synthesized)
tgaggtcaggagtttgagaccagcctgatgaatatggtgaaacccagtctctactaaaactactcgggaggctgagtcag

SEQ ID NO: 708637 - DNA, 87 bp, Artificial Sequence
  ENSG00000196705_39 (sequence is synthesized)
gtggtgggtgcctgtaatcccactcgaggtgaagattggagtaagccaagattgtgccgttgcactacagcctgggcgacagagcga

SEQ ID NO: 708638 - DNA, 120 bp, Artificial Sequence
  ENSG00000196705_40 (sequence is synthesized)
gtgtggcgagattgcaccattgcactccagtctgggcgacaagagggaaactccatctgaaaaaaaagagaaattcttttattttctacttctcttcagatttgtcttatgcattttcca

SEQ ID NO: 708639 - DNA, 120 bp, Artificial Sequence
  ENSG00000196705_41 (sequence is synthesized)
actatgtatgcatcacagctattctttttctgagttatagctacagttttcttactgttgtcttcatgccatttcatttcacatggtactttgtagattttgatgaggaagttggtattt

SEQ ID NO: 708640 - DNA, 120 bp, Artificial Sequence
  ENSG00000196705_42 (sequence is synthesized)
gtagattttgatgaggaagttggtatttttagtgcacacaaaaattggttttaactgtagagtttgcttatcagaacagttaaaaggcagccaggtgtggctcacgcctgtaatcccagc

SEQ ID NO: 708641 - DNA, 88 bp, Artificial Sequence
  ENSG00000196705_43 (sequence is synthesized)
tttagccacgcgtggtgacgcacgcctgtaatcccagctactcggaaggccgagggagcagaatcgcttgaacctgggaggtagaggt

SEQ ID NO: 708642 - DNA, 90 bp, Artificial Sequence
  ENSG00000196705_44 (sequence is synthesized)
gtgagccgagactgggccacttctgtctaaaaaaaaaaaaaaaagataaaaggtgcaatactgtccacaggtaagataattaaattagtc

SEQ ID NO: 708643 - DNA, 120 bp, Artificial Sequence
  ENSG00000196705_45 (sequence is synthesized)
aggtgcaatactgtccacaggtaagataattaaattagtcagctttgtttttaaaagaaaaatcttactagattcttatacaaagtgtggcaaatataaaacttgcttgaaaatacagaa

SEQ ID NO: 708644 - DNA, 120 bp, Artificial Sequence
  ENSG00000196705_46 (sequence is synthesized)
attaaatttttaagagagttaatggtaagtaaacaattttaaagttaattttctatgatatacttacagcacaacttatatttccatgcagaatcttttatttttaagtgtgagtgttaa

SEQ ID NO: 708645 - DNA, 120 bp, Artificial Sequence
  ENSG00000196705_47 (sequence is synthesized)
aggttacaaaataatgaaatgacttcagtggatttaaaattttgaaaaataatgtcttttctatattgattttacaatttggagaaatttttcactcattttttatatattttttagtgg

SEQ ID NO: 708646 - DNA, 120 bp, Artificial Sequence
  ENSG00000196705_48 (sequence is synthesized)
gagaggtttagtctacagtttttatttttagtcaccaaactgtagccaactcttgggtcattttctctgaaaaacatttggagatcatgacagcgtttggattaaaacatttctgttact

SEQ ID NO: 708647 - DNA, 120 bp, Artificial Sequence
  ENSG00000196705_49 (sequence is synthesized)
ttgcatgcaaactagtttactgtgttcacagagtggccagtcatgggaccataagcaacacctgctctttgagtgtctttcataccgttaccatcagcaccagaaactccaggtgcccca

SEQ ID NO: 708648 - DNA, 120 bp, Artificial Sequence
  ENSG00000196705_50 (sequence is synthesized)
agcttaaagtaaaaatcctaaagtacgttggctcctcccatgcaatgtgctgggtccaaaccatgctgttaaatatcagaagtttctatggttatgattaaaaaattaaatgacaataat

SEQ ID NO: 708649 - DNA, 120 bp, Artificial Sequence
  ENSG00000196705_51 (sequence is synthesized)
attttaatgtgacaggtagaatctgtactttttctgtagaacgtaatattttgaagtatatatatagttaaattattatttctaggtaattaataatttatctcacattggtcagacatg

SEQ ID NO: 708650 - DNA, 80 bp, Artificial Sequence
  ENSG00000196705_52 (sequence is synthesized)
gcaggcagatcacatgaggtcaggagttcgggaccagcctggcgacagcgtgtggtgacacatgcctgtaatccagctac

SEQ ID NO: 708651 - DNA, 120 bp, Artificial Sequence
  ENSG00000196705_53 (sequence is synthesized)
aatacaaaataagcagcgtgtggtgacacatgcctgtaatccagctaccctggaggctaaggcaggaaaatggctcaaatctgggaggtggttgttgcagggagccgagattgcaccact

SEQ ID NO: 708652 - DNA, 120 bp, Artificial Sequence
  ENSG00000196705_54 (sequence is synthesized)
gactgggggacagagtgactatcaaaaaaaaaaaaaactttacctcatatggtgaacatttttgttttgagaccacatgacactgtcatcatttttcaaaaatccaaatacattattatg

SEQ ID NO: 708653 - DNA, 120 bp, Artificial Sequence
  ENSG00000196705_55 (sequence is synthesized)
aactatagtcaccatgttgtgcaataaatctcttgaacttatttcttccatttgactataattatgtattatttcacaaacatgtttccagccttccatttcttataaataacttgcatc

SEQ ID NO: 708654 - DNA, 120 bp, Artificial Sequence
  ENSG00000196705_56 (sequence is synthesized)
tgatggtcaccattttactctctacatcaatgggattaagttttttggaatccatgtgtaagtgaaattatgagacactaatctttctgtgccttgcttatcccaactaatacaatgtcc

SEQ ID NO: 708655 - DNA, 90 bp, Artificial Sequence
  ENSG00000196705_57 (sequence is synthesized)
atctttctgtgccttgcttatcccaactaatacaatgtcctccaacttcatccatgtgattgagaataatagtttttgttttttttttaa

SEQ ID NO: 708656 - DNA, 89 bp, Artificial Sequence
  ENSG00000196705_58 (sequence is synthesized)
cccatctctactaaaaatacaaaaacaacaaaacaaaaacaaaaaacacctcagctgggtgtggtggtgcaggcctgtaatctccttga

SEQ ID NO: 708657 - DNA, 120 bp, Artificial Sequence
  ENSG00000196705_59 (sequence is synthesized)
ggaaaataaggcatttttctcatttaaataataaatagtattccattatgtatatcaaccacattgtctttatttactcattagatgttgaactgtttattctgtattttggctattgtg

SEQ ID NO: 708658 - DNA, 120 bp, Artificial Sequence
  ENSG00000196705_60 (sequence is synthesized)
aaacaagtgctgcaaacagaagtgcaaatgtttctttattcttattttgttttggatatatacccagtagtgcgattgctgtattacctggtagtttttttgataaatctgtattttgtt

SEQ ID NO: 708659 - DNA, 120 bp, Artificial Sequence
  ENSG00000196705_61 (sequence is synthesized)
tttcgtaatggctatcctcatttacgttcacaccaacagtgtgcaaggattccgttttcttcacatctttaccaacacttttttctttttcttttaataagagttattctaacaggaatg

SEQ ID NO: 708660 - DNA, 120 bp, Artificial Sequence
  ENSG00000196705_62 (sequence is synthesized)
agttgatatagggattttttttttggcttgtctttttgtgataatagtcaacattgagcatttaaaaatatatccgttggacatatgtatgacttttcttgaaaaatatttatttcagct

SEQ ID NO: 708661 - DNA, 120 bp, Artificial Sequence
  ENSG00000196705_63 (sequence is synthesized)
acaggcatgagccaccgcgtccggcctattatttttaataattttttattgttgtcattttaaatacacttttgatattaacctcttgtcacatgtataatttgcaaattttttctccca

SEQ ID NO: 708662 - DNA, 120 bp, Artificial Sequence
  ENSG00000196705_64 (sequence is synthesized)
cttgtcacatgtataatttgcaaattttttctcccatgttctagttgtcacattctgttgattgtatcagattttgtccagcagctttttaatttgaagtgatctgacttatttttcctt

SEQ ID NO: 708663 - DNA, 76 bp, Artificial Sequence
  ENSG00000196705_65 (sequence is synthesized)
gcagctttttaatttgaagtgatctgacttatttttccttttgtgtcctgggatgtttaggttaaatcaaaaaact

SEQ ID NO: 708664 - DNA, 85 bp, Artificial Sequence
  ENSG00000196705_66 (sequence is synthesized)
aatacaaatattagccgggcgtggttgcacgtgtgaacggcttaaacccagaggcggaggttgtagtgagccaaggtcatgccac

SEQ ID NO: 708665 - DNA, 87 bp, Artificial Sequence
  ENSG00000196705_67 (sequence is synthesized)
tgcactccagccttggcaactttgctgcccagaacaatgttatagggcttttgctctatattttggcagtagtagtttcagagtgtc

SEQ ID NO: 708666 - DNA, 120 bp, Artificial Sequence
  ENSG00000196705_68 (sequence is synthesized)
cttttgctctatattttggcagtagtagtttcagagtgtcaggccttacatttaagtactaatttatttcgagtttatttttacatatggtgtgagatgagggtctcaatttttatctct

SEQ ID NO: 708667 - DNA, 120 bp, Artificial Sequence
  ENSG00000196705_69 (sequence is synthesized)
gcatgtggatataaagttttcttaattgaagattctgttctttccctttaaagtcacctgtatttaaaatcaactgtaaatacatggatatatttctgctgtttttttcttctgctccat

SEQ ID NO: 708668 - DNA, 120 bp, Artificial Sequence
  ENSG00000196705_70 (sequence is synthesized)
tgacctatgtctctgtttttattcaagtaccatactgttggttaccatagctatgtagtgtatttcaaagttagtcacttcttttgtcttgattgctttggctattcagggtcttttgtg

SEQ ID NO: 708669 - DNA, 120 bp, Artificial Sequence
  ENSG00000196705_71 (sequence is synthesized)
ataccatatgaattttagatatacttttaaaacttttctatgaagtatatcacgtatttcgatagaggttgcattatacctgtaggtcattttgtgtaatacaaatattaatgtcagttc

SEQ ID NO: 708670 - DNA, 120 bp, Artificial Sequence
  ENSG00000196705_72 (sequence is synthesized)
atgaatagtccatttatgtattaatttctatttagaatgtaaggcgtttcaactttttggttaaatttatttcaaactatagttattgtagatgtaattgtttttgaatttcattttggg

SEQ ID NO: 708671 - DNA, 120 bp, Artificial Sequence
  ENSG00000196705_73 (sequence is synthesized)
tttttgaatttcattttgggatagttattaatgtagagaaatgctgtgactttttgatggtgcttttgtattttgaaagtttaataaattttgtttatttatttatttattttgagatgg

SEQ ID NO: 708672 - DNA, 120 bp, Artificial Sequence
  ENSG00000196705_74 (sequence is synthesized)
ggctcactgcaacctctgcctccctggctgaagcggttctcctgcctcagcttcctaagtagctgaaactacaggcgcctcctactacacccagctaatttttttatttctatagagatg

SEQ ID NO: 708673 - DNA, 75 bp, Artificial Sequence
  ENSG00000196705_75 (sequence is synthesized)
aagtagctgaaactacaggcgcctcctactacacccagctaatttttttatttctatagagatggggtttcccta

SEQ ID NO: 708674 - DNA, 120 bp, Artificial Sequence
  ENSG00000196705_76 (sequence is synthesized)
ctgcaccttgcctgtttataatttttaagatttactaaggtcttaggcttttttatacttcagattatgtatagggataaaagaaaattatacaggaataattccttttcctcaatttgg

SEQ ID NO: 708675 - DNA, 120 bp, Artificial Sequence
  ENSG00000196705_77 (sequence is synthesized)
atgcctttgatttttttctctaatttctttgtcttggatatttagtaccatgtttagtaagtctgactagagtgggcatccttgccttgttctagctcttagagtaaaagcttacaacat

SEQ ID NO: 708676 - DNA, 120 bp, Artificial Sequence
  ENSG00000196705_78 (sequence is synthesized)
atccctgtttagtatgttgttagcagtttttttggttatatatggcatttattggctgaagtgcatttgttctatacctaattttttcagcgatttatcataagggaatgtcaaattctg

SEQ ID NO: 708677 - DNA, 120 bp, Artificial Sequence
  ENSG00000196705_79 (sequence is synthesized)
tcaaacttctattgtgcatccatttttttctctttgcactctgcatatatttaagttttagagatgtgaaatcacaactaattctgcatacatacaaaaaaagtcagagactactatgaa

SEQ ID NO: 708678 - DNA, 120 bp, Artificial Sequence
  ENSG00000196705_80 (sequence is synthesized)
catctctatgcctgcaaaatagaaaatttggagaaaataaataaactcctggaaacatacaactttccaggattaaaccaggaaggaacagaactcttgaacagggcaaaaatgtataaa

SEQ ID NO: 708679 - DNA, 120 bp, Artificial Sequence
  ENSG00000196705_81 (sequence is synthesized)
atatataatgaaattgaattaataatttaaaaaacctaccaactataaggagccctggattatataaaatcacagccgaattttaacacatatacagagatgagctggtattacttctac

SEQ ID NO: 708680 - DNA, 120 bp, Artificial Sequence
  ENSG00000196705_82 (sequence is synthesized)
tattacttctactgaatgtattactgaatgtattccaaaaaatccaggtggagttccaccctaactcattatataaaatctgtatcgctgcacgaggtggctcacgcctgtaatcccagc

SEQ ID NO: 708681 - DNA, 66 bp, Artificial Sequence
  ENSG00000196705_83 (sequence is synthesized)
tgagtgaaactccatctcaaaataaattaattaataaaataaaaacctgtgtcatcttgataccga

SEQ ID NO: 708682 - DNA, 120 bp, Artificial Sequence
  ENSG00000196705_84 (sequence is synthesized)
ttaattaataaaataaaaacctgtgtcatcttgataccgaagtctagtgaagacaacaacaacaaaactataggccaatattttgggtgaacattgaaacaaaaatcctccatgaaataa

SEQ ID NO: 708683 - DNA, 120 bp, Artificial Sequence
  ENSG00000196705_85 (sequence is synthesized)
tagcaagctgagttcacaggcaaatcaaaaagttattttgccacacttgtgaactttatatcacatgtgcaaggatgtttcatcatatacaagtcaataagtgtgtttcaccatacaatt

SEQ ID NO: 708684 - DNA, 120 bp, Artificial Sequence
  ENSG00000196705_86 (sequence is synthesized)
aaaagcaaaaatttatatgattaacacaatagatgcagaaaaagcattcaagaaaatccagtattcatttatgaaaatattctctaagcaatgatgaaacatacctcacaataataagag

SEQ ID NO: 708685 - DNA, 120 bp, Artificial Sequence
  ENSG00000196705_87 (sequence is synthesized)
ccatctatgacaaatcctcagctaacatactgaacagacaaaaggggcatgcatttctcattagaaaaaaaataagactatctaaacaattctatttaacatagttctggaagtgctgga

SEQ ID NO: 708686 - DNA, 120 bp, Artificial Sequence
  ENSG00000196705_88 (sequence is synthesized)
taaatctaacaaaatgaaaaaataaatggcatccaaataggaaaagaagaagtgaaattaccttcactcatgatataattctctacctagaaaactttaaggattttaccaaaagactcc

SEQ ID NO: 708687 - DNA, 120 bp, Artificial Sequence
  ENSG00000196705_89 (sequence is synthesized)
taaggttaaaaatgacttcagcaaagtctcaggatacaaaattgatatacaaaaatgaatagcattgccttacaccaataacattcaagctgagaacaaaatcaagaacagttttcttta

SEQ ID NO: 708688 - DNA, 120 bp, Artificial Sequence
  ENSG00000196705_90 (sequence is synthesized)
caatagccataaacaaaaaataatatacttagaaatacatcaaaccagggaggtaaaatatctctacaagaactagaaaacattactgaaagtaatcagagacaattcaaataaaaaagc

SEQ ID NO: 708689 - DNA, 120 bp, Artificial Sequence
  ENSG00000196705_91 (sequence is synthesized)
tttctatgctcatggatttgaagaatgaatagaaaatgtctatgctgcctagagcagcctacaaaataagtttttgtttttttatcaaaatgtcgattactttttttttttttttgagac

SEQ ID NO: 708690 - DNA, 120 bp, Artificial Sequence
  ENSG00000196705_92 (sequence is synthesized)
catgcctggcccaaccccatattatttctggtaacaaagcacagaaacatgatttctcgaattttgctaggattttaatttacaaaagaaaggtgaatgccattaaaaggtgtttaatac

SEQ ID NO: 708691 - DNA, 120 bp, Artificial Sequence
  ENSG00000196705_93 (sequence is synthesized)
actcccaccagaaacaagaggcaaggcaggccctgggggcctcacaaaggcggtcttatgcaagggtgagaaagcagagttatcagggaggtgggactattgctttatgaacgtgatgat

SEQ ID NO: 708692 - DNA, 120 bp, Artificial Sequence
  ENSG00000196705_94 (sequence is synthesized)
tggaagcaaaaacgtggggctttttcctattgaatacaaagtaaaataatgaatgctggtgtcagtggttgggaataacaacatttgcaggctcatgagagctgcctgacaaaaagcgtg

SEQ ID NO: 708693 - DNA, 120 bp, Artificial Sequence
  ENSG00000196705_95 (sequence is synthesized)
taaacaacagtgattgctcctgtggccctgtgattcagcaggtttatggagcagttaagaatcgcagatgtcaaatggccaacacagaatctaacgacatgcttaatacaaattattatt

SEQ ID NO: 708694 - DNA, 120 bp, Artificial Sequence
  ENSG00000196705_96 (sequence is synthesized)
agtagaaatgctgaattgcttcatttctgcaatttctgctgcttcttaagatgcttttaatgaataaaatctgccttaaaatttgatacctggtaacttctctctgtgagttttgaattg

SEQ ID NO: 708695 - DNA, 120 bp, Artificial Sequence
  ENSG00000196705_97 (sequence is synthesized)
gctgatgtaaccaaaatgccagctcttgccatctaactaccattaaaaggaacttctaaagctccgaagtggtcaacagtttcacttccaacttttttaaaagatacacaattttctaaa

SEQ ID NO: 708696 - DNA, 120 bp, Artificial Sequence
  ENSG00000196705_98 (sequence is synthesized)
aaatttttctttatgggcgattgaatagttgggctttggctaattcctcattagcaatagaattatgtatattttgcaaactctaatacagaacacttaatgtatcagacaaccatgatt

SEQ ID NO: 708697 - DNA, 120 bp, Artificial Sequence
  ENSG00000196705_99 (sequence is synthesized)
atgatgtatatacctggtataaacaatcttttttgcatattgaattctgcatttttttcttccttgatacgtatgagattcaccagtaccagtttttctcttgtggtggcatatagttga

SEQ ID NO: 708698 - DNA, 120 bp, Artificial Sequence
  ENSG00000196705_100 (sequence is synthesized)
ttgtcatttgcattatctattaaaaacctgtggcagctcatggtattattgaccatatgttctagtgtcttcttgcagatttaaatattttattgcagtgtaaagtttaatatttagatg

SEQ ID NO: 708699 - DNA, 120 bp, Artificial Sequence
  ENSG00000196705_101 (sequence is synthesized)
tgtgatacatctttggataatctgtaattaaattgatcttttgtaatggtgatagtgattagcacacactgaaaatccagcaaagcaattatttttctctttttaactggaaatcatatt

SEQ ID NO: 708700 - DNA, 120 bp, Artificial Sequence
  ENSG00000196705_102 (sequence is synthesized)
cgtaagttgtggtagatattatcatcagtgtattcatgattcgatttatattttgtgttatctggttataaattttatatagcattcaatttgacaaaatataaatctatttgatttgaa

SEQ ID NO: 708701 - DNA, 120 bp, Artificial Sequence
  ENSG00000196705_103 (sequence is synthesized)
aacgcctcaaacttttctaaccataaaagtaattatactggtgagaaatcctagaaatctgaagagtgagataaagcctttaaatggttgtcacacttcattgtaggccaggagtggtgg

SEQ ID NO: 708702 - DNA, 120 bp, Artificial Sequence
  ENSG00000196705_104 (sequence is synthesized)
aggaaaaactgatcatgatctgcggctcagagagctggaactgagtcaataaactgcttcagggaccacagtaaaaaccaagctatgtgttcttattttaccaaagacctttggccagag

SEQ ID NO: 708703 - DNA, 120 bp, Artificial Sequence
  ENSG00000196711_0 (sequence is synthesized)
agtgcagctccagccgacccccgggacgtagacaagggcaggcgcgcggtgaagactgcggccggccgcgtagccgcgctgtggtcccgctggccttctcttgggccgcgcaccctccgg

SEQ ID NO: 708704 - DNA, 120 bp, Artificial Sequence
  ENSG00000196711_1 (sequence is synthesized)
acctgcgtcgggatcctcccggagtctcccgctctctcctcccggcttgcgaacatgcggccccttaagcccggcgcccctttgcccgcactcttcctgctggcgctggctttgtccccg

SEQ ID NO: 708705 - DNA, 120 bp, Artificial Sequence
  ENSG00000196711_2 (sequence is synthesized)
cacggagcccacgggaggccccgggggcgcaggggagcgcgcgtcacggataaggagcccaagccgttgcttttcctccccgcggccggggccggccggactcccagcggctcccggagc

SEQ ID NO: 708706 - DNA, 120 bp, Artificial Sequence
  ENSG00000196711_3 (sequence is synthesized)
gcagaaatattcccaagagactctaacttaaaagacaaattcataaagcatttcacagggccggtcacattttcaccagaatgcagcaaacatttccaccgactctattacaataccagg

SEQ ID NO: 708707 - DNA, 120 bp, Artificial Sequence
  ENSG00000196711_4 (sequence is synthesized)
agtccactgtgctcccagacctagcaaaactaccctacatttcctaagaatgtacatctaatttgaagaaaaagtgcctcaaatcatgcaaaatgtaaaaaaagatgaaatttatatttt

SEQ ID NO: 708708 - DNA, 120 bp, Artificial Sequence
  ENSG00000196711_5 (sequence is synthesized)
tatggatattaagatgagtaaaataagagacttcccagaaataactggttagctgtttcctgtcatagaatggagtctttcttgctttatctttttgtgtatacagtaatttataatttt

SEQ ID NO: 708709 - DNA, 120 bp, Artificial Sequence
  ENSG00000196711_6 (sequence is synthesized)
tgtgtaaattatatctgtgagtgccagtgagaaataatgatttttttgtatatgactgttagtatatatttgtcaaatcatcgtgtaccaagttaaattttataattcttatttaatatt

SEQ ID NO: 708710 - DNA, 120 bp, Artificial Sequence
  ENSG00000196711_7 (sequence is synthesized)
taaatacatttatttagaacttgttgtcttcacttgcattaatttgaactgtgaattttattaaagttgaaatatgaaaaaatgtgttgtttcctttgaattaaagatgtttgtaataga

SEQ ID NO: 708711 - DNA, 120 bp, Artificial Sequence
  ENSG00000196712_0 (sequence is synthesized)
aatctctagctcgctcgcgctccctctccccgggccgtggaaaggatcccacttccggtggggtgtcatggcggcgtctcggactgtgatggctgtggggagacggcgctagtggggaga

SEQ ID NO: 708712 - DNA, 120 bp, Artificial Sequence
  ENSG00000196712_1 (sequence is synthesized)
gcgaccaagaggccccctcccctccccgggtccccttcccctatccccctccccccagcctccttgccaacgccccctttccctctccccctcccgctcggcgctgaccccccatcccca

SEQ ID NO: 708713 - DNA, 120 bp, Artificial Sequence
  ENSG00000196712_2 (sequence is synthesized)
cccccgtgggaacactgggagcctgcactccacagaccctctccttgcctcttccctcacctcagcctccgctccccgccctcttcccggcccagggcgccggcccacccttccctccgc

SEQ ID NO: 708714 - DNA, 120 bp, Artificial Sequence
  ENSG00000196712_3 (sequence is synthesized)
cgccccccggccgcggggaggacatggccgcgcacaggccggtggaatgggtccaggccgtggtcagccgcttcgacgagcagcttccaataaaaacaggacagcagaacacacatacca

SEQ ID NO: 708715 - DNA, 120 bp, Artificial Sequence
  ENSG00000196712_4 (sequence is synthesized)
aagtcagtactgagcacaacaaggaatgtctaatcaatatttccaaatacaagttttctttggttataagcggcctcactactattttaaagaatgttaacaatatgagaatatttggag

SEQ ID NO: 708716 - DNA, 120 bp, Artificial Sequence
  ENSG00000196712_5 (sequence is synthesized)
aagctgctgaaaaaaatttatatctctctcagttgattatattggatacactggaaaaatgtcttgctgggcaaccaaaggacacaatgagattagatgaaacgatgctggtcaaacagt

SEQ ID NO: 708717 - DNA, 120 bp, Artificial Sequence
  ENSG00000196712_6 (sequence is synthesized)
tgctgccagaaatctgccattttcttcacacctgtcgtgaaggaaaccagcatgcagctgaacttcggaattctgcctctggggttttattttctctcagctgcaacaacttcaatgcag

SEQ ID NO: 708718 - DNA, 120 bp, Artificial Sequence
  ENSG00000196712_7 (sequence is synthesized)
tctttagtcgcatttctaccaggttacaggaattaactgtttgttcagaagacaatgttgatgttcatgatatagaattgttacagtatatcaatgtggattgtgcaaaattaaaacgac

SEQ ID NO: 708719 - DNA, 120 bp, Artificial Sequence
  ENSG00000196712_8 (sequence is synthesized)
tcctgaaggaaacagcatttaaatttaaagccctaaagaaggttgcgcagttagcagttataaatagcctggaaaaggcattttggaactgggtagaaaattatccagatgaatttacaa

SEQ ID NO: 708720 - DNA, 120 bp, Artificial Sequence
  ENSG00000196712_9 (sequence is synthesized)
aactgtaccagatcccacagactgatatggctgaatgtgcagaaaagctatttgacttggtggatggttttgctgaaagcaccaaacgtaaagcagcagtttggccactacaaatcattc

SEQ ID NO: 708721 - DNA, 120 bp, Artificial Sequence
  ENSG00000196712_10 (sequence is synthesized)
tccttatcttgtgtccagaaataatccaggatatatccaaagacgtggttgatgaaaacaacatgaataagaagttatttctggacagtctacgaaaagctcttgctggccatggaggaa

SEQ ID NO: 708722 - DNA, 120 bp, Artificial Sequence
  ENSG00000196712_11 (sequence is synthesized)
gtaggcagctgacagaaagtgctgcaattgcctgtgtcaaactgtgtaaagcaagtacttacatcaattgggaagataactctgtcattttcctacttgttcagtccatggtggttgatc

SEQ ID NO: 708723 - DNA, 120 bp, Artificial Sequence
  ENSG00000196712_12 (sequence is synthesized)
ttaagaacctgctttttaatccaagtaagccattctcaagaggcagtcagcctgcagatgtggatctaatgattgactgccttgtttcttgctttcgtataagccctcacaacaaccaac

SEQ ID NO: 708724 - DNA, 120 bp, Artificial Sequence
  ENSG00000196712_13 (sequence is synthesized)
actttaagatctgcctggctcagaattcaccttctacatttcactatgtgctggtaaattcactccatcgaatcatcaccaattccgcattggattggtggcctaagattgatgctgtgt

SEQ ID NO: 708725 - DNA, 120 bp, Artificial Sequence
  ENSG00000196712_14 (sequence is synthesized)
attgtcactcggttgaacttcgaaatatgtttggtgaaacacttcataaagcagtgcaaggttgtggagcacacccagcaatacgaatggcaccgagtcttacatttaaagaaaaagtaa

SEQ ID NO: 708726 - DNA, 120 bp, Artificial Sequence
  ENSG00000196712_15 (sequence is synthesized)
caagccttaaatttaaagaaaaacctacagacctggagacaagaagctataagtatcttctcttgtccatggtgaaactaattcatgcagatccaaagctcttgctttgtaatccaagaa

SEQ ID NO: 708727 - DNA, 120 bp, Artificial Sequence
  ENSG00000196712_16 (sequence is synthesized)
aacaggggcccgaaacccaaggcagtacagcagaattaattacagggctcgtccaactggtccctcagtcacacatgccagagattgctcaggaagcaatggaggctctgctggttcttc

SEQ ID NO: 708728 - DNA, 120 bp, Artificial Sequence
  ENSG00000196712_17 (sequence is synthesized)
atcagttagatagcattgatttgtggaatcctgatgctcctgtagaaacattttgggagattagctcacaaatgcttttttacatctgcaagaaattaactagtcatcaaatgcttagta

SEQ ID NO: 708729 - DNA, 120 bp, Artificial Sequence
  ENSG00000196712_18 (sequence is synthesized)
gcacagaaattctcaagtggttgcgggaaatattgatctgcaggaataaatttcttcttaaaaataagcaggcagatagaagttcctgtcactttctccttttttacggggtaggatgtg

SEQ ID NO: 708730 - DNA, 120 bp, Artificial Sequence
  ENSG00000196712_19 (sequence is synthesized)
atattccttctagtggaaataccagtcaaatgtccatggatcatgaagaattactacgtactcctggagcctctctccggaagggaaaagggaactcctctatggatagtgcagcaggat

SEQ ID NO: 708731 - DNA, 120 bp, Artificial Sequence
  ENSG00000196712_20 (sequence is synthesized)
gcagcggaacccccccgatttgccgacaagcccagaccaaactagaagtggccctgtacatgtttctgtggaaccctgacactgaagctgttctggttgccatgtcctgtttccgccacc

SEQ ID NO: 708732 - DNA, 120 bp, Artificial Sequence
  ENSG00000196712_21 (sequence is synthesized)
tctgtgaggaagcagatatccggtgtggggtggatgaagtgtcagtgcataacctcttgcccaactataacacattcatggagtttgcctctgtcagcaatatgatgtcaacaggaagag

SEQ ID NO: 708733 - DNA, 120 bp, Artificial Sequence
  ENSG00000196712_22 (sequence is synthesized)
cagcacttcagaaaagagtgatggcactgctgaggcgcattgagcatcccactgcaggaaacactgaggcttgggaagatacacatgcaaaatgggaacaagcaacaaagctaatcctta

SEQ ID NO: 708734 - DNA, 120 bp, Artificial Sequence
  ENSG00000196712_23 (sequence is synthesized)
actatccaaaagccaaaatggaagatggccaggctgctgaaagccttcacaagaccattgttaagaggcgaatgtcccatgtgagtggaggaggatccatagatttgtctgacacagact

SEQ ID NO: 708735 - DNA, 120 bp, Artificial Sequence
  ENSG00000196712_24 (sequence is synthesized)
ccttgggggagtgtgcctccagcagagaagcaattctggcctggcaacctatagcccacccatgggtccagtcagtgaacgtaagggttctatgatttcagtgatgtcttcagagggaaa

SEQ ID NO: 708736 - DNA, 120 bp, Artificial Sequence
  ENSG00000196712_25 (sequence is synthesized)
gtaagggttctatgatttcagtgatgtcttcagagggaaacgcagatacacctgtcagcaaatttatggatcggctgttgtccttaatggtgtgtaaccatgagaaagtgggacttcaaa

SEQ ID NO: 708737 - DNA, 120 bp, Artificial Sequence
  ENSG00000196712_26 (sequence is synthesized)
tacggaccaatgttaaggatctggtgggtctagaattgagtcctgctctgtatccaatgctatttaacaaattgaagaataccatcagcaagttttttgactcccaaggacaggttttat

SEQ ID NO: 708738 - DNA, 84 bp, Artificial Sequence
  ENSG00000196712_27 (sequence is synthesized)
accatcagcaagttttttgactcccaaggacaggttttattgactgataccaatactcaatttgtagaacaaaccatagctata

SEQ ID NO: 708739 - DNA, 120 bp, Artificial Sequence
  ENSG00000196712_28 (sequence is synthesized)
taaatctggtcaggtatgttcgtgtgcttgggaatatggtccatgcaattcaaataaaaacgaaactgtgtcaattagttgaagtaatgatggcaaggagagatgacctctcattttgcc

SEQ ID NO: 708740 - DNA, 82 bp, Artificial Sequence
  ENSG00000196712_29 (sequence is synthesized)
gaagtaatgatggcaaggagagatgacctctcattttgccaagagatgaaatttaggaataagatggtagaatacctgacag

SEQ ID NO: 708741 - DNA, 120 bp, Artificial Sequence
  ENSG00000196712_30 (sequence is synthesized)
tggaagcagtagtttcacttctagctggtctccctctgcagcctgaagaaggagatggtgtggaattgatggaagccaaatcacagttatttcttaaatacttcacattatttatgaacc

SEQ ID NO: 708742 - DNA, 120 bp, Artificial Sequence
  ENSG00000196712_31 (sequence is synthesized)
ttttgaatgactgcagtgaagttgaagatgaaagtgcgcaaacaggtggcaggaaacgtggcatgtctcggaggctggcatcactgaggcactgtacggtccttgcaatgtcaaacttac

SEQ ID NO: 708743 - DNA, 120 bp, Artificial Sequence
  ENSG00000196712_32 (sequence is synthesized)
tcaatgccaacgtagacagtggtctcatgcactccataggcttaggttaccacaaggatctccagacaagagctacatttatggaagttctgacaaaaatccttcaacaaggcacagaat

SEQ ID NO: 708744 - DNA, 120 bp, Artificial Sequence
  ENSG00000196712_33 (sequence is synthesized)
ttgacacacttgcagaaacagtattggctgatcggtttgagagattggtggaactggtcacaatgatgggtgatcaaggagaactccctatagcgatggctctggccaatgtggttcctt

SEQ ID NO: 708745 - DNA, 120 bp, Artificial Sequence
  ENSG00000196712_34 (sequence is synthesized)
gttctcagtgggatgaactagctcgagttctggttactctgtttgattctcggcatttactctaccaactgctctggaacatgttttctaaagaagtagaattggcagactccatgcaga

SEQ ID NO: 708746 - DNA, 120 bp, Artificial Sequence
  ENSG00000196712_35 (sequence is synthesized)
ctctcttccgaggcaacagcttggccagtaaaataatgacattctgtttcaaggtatatggtgctacctatctacaaaaactcctggatcctttattacgaattgtgatcacatcctctg

SEQ ID NO: 708747 - DNA, 120 bp, Artificial Sequence
  ENSG00000196712_36 (sequence is synthesized)
attggcaacatgttagctttgaagtggatcctaccaggttagaaccatcagagagccttgaggaaaaccagcggaacctccttcagatgactgaaaagttcttccatgccatcatcagtt

SEQ ID NO: 708748 - DNA, 120 bp, Artificial Sequence
  ENSG00000196712_37 (sequence is synthesized)
cctcctcagaattcccccctcaacttcgaagtgtgtgccactgtttataccaggtggttagccagcgtttccctcagaacagcatcggtgcagtaggaagtgccatgttcctcagattta

SEQ ID NO: 708749 - DNA, 120 bp, Artificial Sequence
  ENSG00000196712_38 (sequence is synthesized)
tcaatcctgccattgtctcaccgtatgaagcagggattttagataaaaagccaccacctagaatcgaaaggggcttgaagttaatgtcaaagatacttcagagtattgccaatcatgttc

SEQ ID NO: 708750 - DNA, 120 bp, Artificial Sequence
  ENSG00000196712_39 (sequence is synthesized)
tcttcacaaaagaagaacatatgcggcctttcaatgattttgtgaaaagcaactttgatgcagcacgcaggtttttccttgatatagcatctgattgtcctacaagtgatgcagtaaatc

SEQ ID NO: 708751 - DNA, 120 bp, Artificial Sequence
  ENSG00000196712_40 (sequence is synthesized)
atagtctttccttcataagtgacggcaatgtgcttgctttacatcgtctactctggaacaatcaggagaaaattgggcagtatctttccagcaacagggatcataaagctgttggaagac

SEQ ID NO: 708752 - DNA, 120 bp, Artificial Sequence
  ENSG00000196712_41 (sequence is synthesized)
gaccttttgataagatggcaacacttcttgcatacctgggtcctccagagcacaaacctgtggcagatacacactggtccagccttaaccttaccagttcaaagtttgaggaatttatga

SEQ ID NO: 708753 - DNA, 120 bp, Artificial Sequence
  ENSG00000196712_42 (sequence is synthesized)
ctaggcatcaggtacatgaaaaagaagaattcaaggctttgaaaacgttaagtattttctaccaagctgggacttccaaagctgggaatcctattttttattatgttgcacggaggttca

SEQ ID NO: 708754 - DNA, 120 bp, Artificial Sequence
  ENSG00000196712_43 (sequence is synthesized)
aaactggtcaaatcaatggtgatttgctgatataccatgtcttactgactttaaagccatattatgcaaagccatatgaaattgtagtggaccttacccataccgggcctagcaatcgct

SEQ ID NO: 708755 - DNA, 120 bp, Artificial Sequence
  ENSG00000196712_44 (sequence is synthesized)
ttaaaacagactttctctctaagtggtttgttgtttttcctggctttgcttacgacaacgtctccgcagtctatatctataactgtaactcctgggtcagggagtacaccaagtatcatg

SEQ ID NO: 708756 - DNA, 120 bp, Artificial Sequence
  ENSG00000196712_45 (sequence is synthesized)
agcggctgctgactggcctcaaaggtagcaaaaggcttgttttcatagactgtcctgggaaactggctgagcacatagagcatgaacaacagaaactacctgctgccaccttggctttag

SEQ ID NO: 708757 - DNA, 120 bp, Artificial Sequence
  ENSG00000196712_46 (sequence is synthesized)
aagaggacctgaaggtattccacaatgctctcaagctagctcacaaagacaccaaagtttctattaaagttggttctactgctgtccaagtaacttcagcagagcgaacaaaagtcctag

SEQ ID NO: 708758 - DNA, 120 bp, Artificial Sequence
  ENSG00000196712_47 (sequence is synthesized)
ggcaatcagtctttctaaatgacatttattatgcttcggaaattgaagaaatctgcctagtagatgagaaccagttcaccttaaccattgcaaaccagggcacgccgctcaccttcatgc

SEQ ID NO: 708759 - DNA, 120 bp, Artificial Sequence
  ENSG00000196712_48 (sequence is synthesized)
accaggagtgtgaagccattgtccagtctatcattcatatccggacccgctgggaactgtcacagcccgactctatcccccaacacaccaagattcggccaaaagatgtccctgggacac

SEQ ID NO: 708760 - DNA, 120 bp, Artificial Sequence
  ENSG00000196712_49 (sequence is synthesized)
tgctcaatatcgcattacttaatttaggcagttctgacccgagtttacggtcagctgcctataatcttctgtgtgccttaacttgtacctttaatttaaaaatcgagggccagttactag

SEQ ID NO: 708761 - DNA, 120 bp, Artificial Sequence
  ENSG00000196712_50 (sequence is synthesized)
agacatcaggtttatgtatccctgccaacaacaccctctttattgtctctattagtaagacactggcagccaatgagccacacctcacgttagaatttttggaagagtgtatttctggat

SEQ ID NO: 708762 - DNA, 120 bp, Artificial Sequence
  ENSG00000196712_51 (sequence is synthesized)
agcaaatctagtattgaattgaaacacctttgtttggaatacatgactccatggctgtcaaatctagttcgtttttgcaagcataatgatgatgccaaacgacaaagagttactgctatt

SEQ ID NO: 708763 - DNA, 120 bp, Artificial Sequence
  ENSG00000196712_52 (sequence is synthesized)
cttgacaagctgataacaatgaccatcaatgaaaaacagatgtacccatctattcaagcaaaaatatggggaagccttgggcagattacagatctgcttgatgttgtactagacagtttc

SEQ ID NO: 708764 - DNA, 120 bp, Artificial Sequence
  ENSG00000196712_53 (sequence is synthesized)
atcaaaaccagtgcaacaggtggcttgggatcaataaaagctgaggtgatggcagatactgctgtagctttggcttctggaaatgtgaaattggtttcaagcaaggttattggaaggatg

SEQ ID NO: 708765 - DNA, 120 bp, Artificial Sequence
  ENSG00000196712_54 (sequence is synthesized)
tgcaaaataattgacaagacatgcttatctccaactcctactttagaacaacatcttatgtgggatgatattgctattttagcacgctacatgctgatgctgtccttcaacaattccctt

SEQ ID NO: 708766 - DNA, 120 bp, Artificial Sequence
  ENSG00000196712_55 (sequence is synthesized)
gatgtggcagctcatcttccctacctcttccacgttgttactttcttagtagccacaggtccgctctcccttagagcttccacacatggactggtcattaatatcattcactctctgtgt

SEQ ID NO: 708767 - DNA, 120 bp, Artificial Sequence
  ENSG00000196712_56 (sequence is synthesized)
acttgttcacagcttcattttagtgaagagaccaagcaagttttgagactcagtctgacagagttctcattacccaaattttacttgctgtttggcattagcaaagtcaagtcagctgct

SEQ ID NO: 708768 - DNA, 120 bp, Artificial Sequence
  ENSG00000196712_57 (sequence is synthesized)
gtcattgccttccgttccagttaccgggacaggtcattctctcctggctcctatgagagagagacttttgctttgacatccttggaaacagtcacagaagctttgttggagatcatggag

SEQ ID NO: 708769 - DNA, 120 bp, Artificial Sequence
  ENSG00000196712_58 (sequence is synthesized)
gcatgcatgagagatattccaacgtgcaagtggctggaccagtggacagaactagctcaaagatttgcattccaatataatccatccctgcaaccaagagctcttgttgtctttgggtgt

SEQ ID NO: 708770 - DNA, 120 bp, Artificial Sequence
  ENSG00000196712_59 (sequence is synthesized)
attagcaaacgagtgtctcatgggcagataaagcagataatccgtattcttagcaaggcacttgagagttgcttaaaaggacctgacacttacaacagtcaagttctgatagaagctaca

SEQ ID NO: 708771 - DNA, 120 bp, Artificial Sequence
  ENSG00000196712_60 (sequence is synthesized)
gtaatagcactaaccaaattacagccacttcttaataaggactcgcctctgcacaaagccctcttttgggtagctgtggctgtgctgcagcttgatgaggtcaacttgtattcagcaggt

SEQ ID NO: 708772 - DNA, 120 bp, Artificial Sequence
  ENSG00000196712_61 (sequence is synthesized)
accgcacttcttgaacaaaacctgcatactttagatagtctccgtatattcaatgacaagagtccagaggaagtatttatggcaatccggaatcctctggagtggcactgcaagcaaatg

SEQ ID NO: 708773 - DNA, 120 bp, Artificial Sequence
  ENSG00000196712_62 (sequence is synthesized)
gatcattttgttggactcaatttcaactctaactttaactttgcattggttggacaccttttaaaagggtacaggcatccttcacctgctattgttgcaagaacagtcagaattttacat

SEQ ID NO: 708774 - DNA, 120 bp, Artificial Sequence
  ENSG00000196712_63 (sequence is synthesized)
acactactaactctggttaacaaacacagaaattgtgacaaatttgaagtgaatacacagagcgtggcctacttagcagctttacttacagtgtctgaagaagttcgaagtcgctgcagc

SEQ ID NO: 708775 - DNA, 120 bp, Artificial Sequence
  ENSG00000196712_64 (sequence is synthesized)
ctaaaacatagaaagtcacttcttcttactgatatttcaatggaaaatgttcctatggatacatatcccattcatcatggtgacccttcctataggacactaaaggagactcagccatgg

SEQ ID NO: 708776 - DNA, 120 bp, Artificial Sequence
  ENSG00000196712_65 (sequence is synthesized)
tcctctcccaaaggttctgaaggataccttgcagccacctatccaactgtcggccagaccagtccccgagccaggaaatccatgagcctggacatggggcaaccttctcaggccaacact

SEQ ID NO: 708777 - DNA, 120 bp, Artificial Sequence
  ENSG00000196712_66 (sequence is synthesized)
aagaagttgcttggaacaaggaaaagttttgatcacttgatatcagacacaaaggctcctaaaaggcaagaaatggaatcagggatcacaacaccccccaaaatgaggagagtagcagaa

SEQ ID NO: 708778 - DNA, 120 bp, Artificial Sequence
  ENSG00000196712_67 (sequence is synthesized)
actgattatgaaatggaaactcagaggatttcctcatcacaacagcacccacatttacgtaaagtttcagtgtctgaatcaaatgttctcttggatgaagaagtacttactgatccgaag

SEQ ID NO: 708779 - DNA, 120 bp, Artificial Sequence
  ENSG00000196712_68 (sequence is synthesized)
atccaggcgctgcttcttactgttctagctacactggtaaaatataccacagatgagtttgatcaacgaattctttatgaatacttagcagaggccagtgttgtgtttcccaaagtcttt

SEQ ID NO: 708780 - DNA, 120 bp, Artificial Sequence
  ENSG00000196712_69 (sequence is synthesized)
cctgttgtgcataatttgttggactctaagatcaacaccctgttatcattgtgccaagatccaaatttgttaaatccaatccatggaattgtgcagagtgtggtgtaccatgaagaatcc

SEQ ID NO: 708781 - DNA, 120 bp, Artificial Sequence
  ENSG00000196712_70 (sequence is synthesized)
ccaccacaataccaaacatcttacctgcaaagttttggttttaatggcttgtggcggtttgcaggaccgttttcaaagcaaacacaaattccagactatgctgagcttattgttaagttt

SEQ ID NO: 708782 - DNA, 120 bp, Artificial Sequence
  ENSG00000196712_71 (sequence is synthesized)
cttgatgccttgattgacacgtacctgcctggaattgatgaagaaaccagtgaagaatccctcctgactcccacatctccttaccctcctgcactgcagagccagcttagtatcactgcc

SEQ ID NO: 708783 - DNA, 120 bp, Artificial Sequence
  ENSG00000196712_72 (sequence is synthesized)
aaccttaacctttctaattccatgacctcacttgcaacttcccagcattccccaggaatcgacaaggagaacgttgaactctcccctaccactggccactgtaacagtggacgaactcgc

SEQ ID NO: 708784 - DNA, 120 bp, Artificial Sequence
  ENSG00000196712_73 (sequence is synthesized)
cacggatccgcaagccaagtgcagaagcaaagaagcgctggcagtttcaaacgtaatagcattaagaagatcgtgtgaagcttgcttgctttcttttttaaaatcaacttaacatgggct

SEQ ID NO: 708785 - DNA, 120 bp, Artificial Sequence
  ENSG00000196712_74 (sequence is synthesized)
cttcactagtgaccccttccctgtccttgccctttccccccatgttgtaatgctgcacttcctgttttataatgaacccatccggtttgccatgttgccagatgatcaactcttcgaagc

SEQ ID NO: 708786 - DNA, 120 bp, Artificial Sequence
  ENSG00000196712_75 (sequence is synthesized)
cttgcctaaatttaatgctgccttttctttaactttttttcttctacttttggcgtgtatctggtatatgtaagtgttcagaacaactgcaaagaaagtgggaggtcaggaaacttttaa

SEQ ID NO: 708787 - DNA, 120 bp, Artificial Sequence
  ENSG00000196712_76 (sequence is synthesized)
ctgagaaatctcaattgtaagagaggatgaattcttgaatactgctactactggccagtgatgaaagccatttgcacagagctctgccttctgtggttttcccttcttcatcctacagag

SEQ ID NO: 708788 - DNA, 120 bp, Artificial Sequence
  ENSG00000196712_77 (sequence is synthesized)
taaagtgttagtcctatttatacatttttcaagatacaagtttatgagagaaatagtattataaccccagtatgtttaatcttttagctgtggactttttttttaaccgtacaaaactga

SEQ ID NO: 708789 - DNA, 120 bp, Artificial Sequence
  ENSG00000196712_78 (sequence is synthesized)
aagaaccatagaggtcaagcctcagtgacttgacaccataaagccacagacaaggtacttgggggggagggcagggaaatttcatattttatagtggattcttaagaaatactaacactt

SEQ ID NO: 708790 - DNA, 120 bp, Artificial Sequence
  ENSG00000196712_79 (sequence is synthesized)
gagtattagcaataattacaggaaaataagtgcgaccacatatatcttaacattactgaattaaaactatggcttctaagtccttatccaaactcagtcatccaaactagtttatttttt

SEQ ID NO: 708791 - DNA, 120 bp, Artificial Sequence
  ENSG00000196712_80 (sequence is synthesized)
tgattatcttttaatttttaattttgctaaaggtggtttttttgtgttttgttttttgtaaaccaaaactatactaagtatagtaattatatatatatatatattttttcccctccccct

SEQ ID NO: 708792 - DNA, 120 bp, Artificial Sequence
  ENSG00000196712_81 (sequence is synthesized)
ctccccctcttctttcctaactaattctgagcagggtaatcagtgaacaaagtgttgaaaattgttcccagaaggtaattttcatagatgtttgcattagctccatagcaaaatggaatg

SEQ ID NO: 708793 - DNA, 120 bp, Artificial Sequence
  ENSG00000196712_82 (sequence is synthesized)
gtacgtgacatttagggtagctgatatttttattttgttaaataatttccaagaatagagtatggtgtatattataaatttctttgataagatgtattttgaatgtcttttaatcttcct

SEQ ID NO: 708794 - DNA, 120 bp, Artificial Sequence
  ENSG00000196712_83 (sequence is synthesized)
cctcctctccaaaaaaatcagaaacctctttaagaaaacatgtaggttatatatgctagaattgcatttaatcactgtgaaaagactggtcagcctgcattagtatgacagtaggggggc

SEQ ID NO: 708795 - DNA, 120 bp, Artificial Sequence
  ENSG00000196712_84 (sequence is synthesized)
tgttagaattgctgctatactggtggtatggattatcatggcattggaattttcatagtaatgcagatccaatttctttgtggtacctgcagtttacaaaataatttgacttcagtgagc

SEQ ID NO: 708796 - DNA, 120 bp, Artificial Sequence
  ENSG00000196712_85 (sequence is synthesized)
atattggtatctggatgttccaatttagaactaaaccatatttattacaaaaagatattaatccctctactcccaggttccctttatatgttaagatataatggctttgaggggggaaaa

SEQ ID NO: 708797 - DNA, 120 bp, Artificial Sequence
  ENSG00000196712_86 (sequence is synthesized)
aataaacctaggggagaggggagtttcctgtagtgctgtttcattagaggatttcagtaaattaaattccacagctaattcaataaataatggtacatttaagtgttctgattttaataa

SEQ ID NO: 708798 - DNA, 120 bp, Artificial Sequence
  ENSG00000196712_87 (sequence is synthesized)
tatatttcacatttatccacacagtaacaatgtaatatgttaatgtaaataaaattggttttgatactcagaaataacaagaatttaattttttaaatttgtttacagtcctgggaaaag

SEQ ID NO: 708799 - DNA, 120 bp, Artificial Sequence
  ENSG00000196712_88 (sequence is synthesized)
taagaattatttgccaaaataagaggaaagaaaaccttagtattattaatgagtttaccatagaattgttggaaatactgaagacaggtgcaatttactaaacttttgtttttaaactat

SEQ ID NO: 708800 - DNA, 120 bp, Artificial Sequence
  ENSG00000196712_89 (sequence is synthesized)
tgtagaggctgcattagaagaaaatgtttataatgacagagcaactatgactatataaaaaagctgaaattagaactgtgtttagaaatagatcagtaacccagtgccaaggatgccaag

SEQ ID NO: 708801 - DNA, 120 bp, Artificial Sequence
  ENSG00000196712_90 (sequence is synthesized)
ctgccaccatggtcttggctctcccacaacccagtgtttctggggtaagtttcacagtttctaggccctggaatagcaggcagtgtaagcctttgataactttagttcgatgtttttctt

SEQ ID NO: 708802 - DNA, 120 bp, Artificial Sequence
  ENSG00000196712_91 (sequence is synthesized)
gtttttgtttgttggtttggtgcatatgatagtgggtgttatgctattttgctcttcccatcaaaataaagaaacttccagaggtttactgttaaaaatactgatatttccataaacggg

SEQ ID NO: 708803 - DNA, 120 bp, Artificial Sequence
  ENSG00000196712_92 (sequence is synthesized)
tttaccaagggtgtagtatttcataccgcctgaaatgatcagcattggcacaaatcaaaattcagccgcctttgaaatgcaaaaatacctttgactagtaagtacatcctaggagtttga

SEQ ID NO: 708804 - DNA, 120 bp, Artificial Sequence
  ENSG00000196712_93 (sequence is synthesized)
aaacttaactaaggtttaaaatttaccttgtttaaagaacttctgacttttgaggaaaatctagctttccaagtaactaaaatgtacatgagataaacctctcaccactatgtgtccctt

SEQ ID NO: 708805 - DNA, 120 bp, Artificial Sequence
  ENSG00000196712_94 (sequence is synthesized)
gagaaatgcaacacttttttagtcttcatacttgtaatctataaaagaaattctgaagtttagaccaagttgcccatttctgcgtaattgacataagttctgttaaaaatattataagta

SEQ ID NO: 708806 - DNA, 120 bp, Artificial Sequence
  ENSG00000196712_95 (sequence is synthesized)
attcgtttcggtttgtagatgtttcccctgacttgttaaagaggaaaccaggaactcagtcatgtttttgtcctggataatctacctgttatgccagtactcccatccgaggggcatgcc

SEQ ID NO: 708807 - DNA, 120 bp, Artificial Sequence
  ENSG00000196712_96 (sequence is synthesized)
cttagttgcccagatggagatgcagttcagtagatttggggcaaagtggctacagctctgtcttccattcactcaacacctgttcatgactgagccaggtgcccaggacacatcctaaac

SEQ ID NO: 708808 - DNA, 120 bp, Artificial Sequence
  ENSG00000196712_97 (sequence is synthesized)
agtcagcttctatcctgtgtcctagttggggagacagagtgccagccagcaaccctcccaggtttgtaggttttaggggttttcagttttgtttgggttttttgttttttgtttttgttt

SEQ ID NO: 708809 - DNA, 120 bp, Artificial Sequence
  ENSG00000196712_98 (sequence is synthesized)
ctacatccttccccgactcccaggcataatgaggcatgtcttactcaatgttatgcaatggatttaggcaaaaattcattcttagtgtcagccacacaattttttttaatgcagtatatt

SEQ ID NO: 708810 - DNA, 120 bp, Artificial Sequence
  ENSG00000196712_99 (sequence is synthesized)
cacctgtaaatagtttgtgtaaaatttgacaaaaaaagtatatttactatactgtaaatatatgtgatgatatattgtattattttgcttttttgtaaagcagttagttgctgcacatgg

SEQ ID NO: 708811 - DNA, 120 bp, Artificial Sequence
  ENSG00000196712_100 (sequence is synthesized)
ataacaacaaaaatttgattattctcgtgttagtattgttaacttctttttgcgactgcgttacatcatttaaagaaaatgctgtgtattgtaaacttaaattgtatatgataacttact

SEQ ID NO: 708812 - DNA, 120 bp, Artificial Sequence
  ENSG00000196712_101 (sequence is synthesized)
gtcctttccatccgggcctaaactttggcagttcctttgtctacaaccttgttaatactgtaaacagttgtacgccagcaggaaaaatactgcccaacagacaaaatcgatcattgtagg

SEQ ID NO: 708813 - DNA, 120 bp, Artificial Sequence
  ENSG00000196712_102 (sequence is synthesized)
ggaaaatcatagaaatccatttcagatctttattgttcctcaccccattttcctccttgtgtatgtacttcccccacccccctttttttaagtaaaatgtaaattcaatctgctctaaga

SEQ ID NO: 708814 - DNA, 120 bp, Artificial Sequence
  ENSG00000196712_103 (sequence is synthesized)
cctcctcagaattcccccctcaacttcgaagtgtgtgccactgtttataccaggcaacttgccactccctactgaataaagctacagtaaaagaaaaaaaggaaaacaaaaaatcagtgg

SEQ ID NO: 708815 - DNA, 120 bp, Artificial Sequence
  ENSG00000196712_104 (sequence is synthesized)
ctccagcctgggccacagagcgagaccctatcaaaagaaaaaaatagtgttaatacatgattacatgattagagaaactaaaagccaaatgggagataatgctacttgctatttttgaag

SEQ ID NO: 708816 - DNA, 120 bp, Artificial Sequence
  ENSG00000196712_105 (sequence is synthesized)
ctatttttgaagcatctcccagtgtatctggtttttagtattttcaggcatgcatatctttttttcaaagcttaaaaaattaaaatcaaactctgctttcttcctaagcttggaaattac

SEQ ID NO: 708817 - DNA, 120 bp, Artificial Sequence
  ENSG00000196712_106 (sequence is synthesized)
tcatgtattaatgagtagttcttggcaccagcagcgtttcttaaactgaaaagactggtcagacatagttgacctttgctactgaataatgcctaccattgcatttattatcagttatca

SEQ ID NO: 708818 - DNA, 120 bp, Artificial Sequence
  ENSG00000196712_107 (sequence is synthesized)
tatttgttgatttacctccagtgtagtttggtttacctccagtgtacagaatacaatctcagtttaatttgcaccagtaaggtgcaacctatcctgaaacagaaagctatgggaacaaaa

SEQ ID NO: 708819 - DNA, 120 bp, Artificial Sequence
  ENSG00000196712_108 (sequence is synthesized)
ccctttgagaagatggaaaataaaggaaagaaactgctccagggatgtattagagctttctttgagtcctcagtgaaagcttaaacactttatgtccaaacattttctttttagtgtatt

SEQ ID NO: 708820 - DNA, 120 bp, Artificial Sequence
  ENSG00000196712_109 (sequence is synthesized)
tgtttattttccagccatttcttagaatctttagagtgaaatatagaaacgtttgccatttctcaaaagataaactctaccattcaagacagttatcttgaagcttgtgtaaaaattaat

SEQ ID NO: 708821 - DNA, 120 bp, Artificial Sequence
  ENSG00000196712_110 (sequence is synthesized)
catatatattatatacagcattgtaaataggtagccaaaacttttgtgtaggcgaatagtaattctctatgatgtttatgttagtattttaagtatctactaaagaaagctgttgaattt

SEQ ID NO: 708822 - DNA, 120 bp, Artificial Sequence
  ENSG00000196712_111 (sequence is synthesized)
caaatttttattccagtctacttttaggaggcccttaaatattaaaaacatgaataggatacagtcttctacttctcacccaaacagataacaattcagccacaaagtaaaaatgttgtg

SEQ ID NO: 708823 - DNA, 120 bp, Artificial Sequence
  ENSG00000196712_112 (sequence is synthesized)
tgtttacttttttgcatcttggcaggctacactggtaaaatataccacagatgagtttgatcaacgaattctttatgaatacttagcagaggccagtgttgtgtttcccaaagtctttcc

SEQ ID NO: 708824 - DNA, 120 bp, Artificial Sequence
  ENSG00000196712_113 (sequence is synthesized)
tgttgtgtaagtatctccttttgattttaattcaccttcgtgcctgtctttaagttaaatgcttacccagtaatgtgcactggttgcaaagagggcaaaatgagatattgtgatagtgat

SEQ ID NO: 708825 - DNA, 120 bp, Artificial Sequence
  ENSG00000196712_114 (sequence is synthesized)
tttagctttgagacagtaggtttaatgagggttaagattagttttgacctactagatctattagaaagtttataaggaaagacttttaaaaaatctggttgatttatttaagtggtttat

SEQ ID NO: 708826 - DNA, 120 bp, Artificial Sequence
  ENSG00000196712_115 (sequence is synthesized)
tttgatgatcattgctcattttcctcacttagaagcaaactattagactgctatatctaaatcagcatatctgttttggtttactttttagtagagcttttgtatttatccacagctgag

SEQ ID NO: 708827 - DNA, 120 bp, Artificial Sequence
  ENSG00000196712_116 (sequence is synthesized)
tgaaaacaaaattgaccttctgtttaggaggtgaattgtttactctctcttaaggactaaaaaatattaacctcaaagtgttcaaatttaaatagttcaaataaattcttttcctgatct

SEQ ID NO: 708828 - DNA, 120 bp, Artificial Sequence
  ENSG00000196712_117 (sequence is synthesized)
aggccttctatatcatgtcattattttctttttttaatctcatgttagaattttagagagttagaactcagttatttttattaatggagtgtagccgggttagaaataatttttttccta

SEQ ID NO: 708829 - DNA, 120 bp, Artificial Sequence
  ENSG00000196712_118 (sequence is synthesized)
agtttcagttggatcatgtatttcactccctctaaactattttgctttccctatttgatctgactcagcattttaaaagcactgattaacattaaatttaatttttttctttttgttttg

SEQ ID NO: 708830 - DNA, 120 bp, Artificial Sequence
  ENSG00000196712_119 (sequence is synthesized)
cacagatcctaaatttagttttaacttcctaagcgcatgtcagtatacaacagatggaaatagtactaaaacatgctaagtagcagacagagccaaccttgtcttaagcaaacatttacc

SEQ ID NO: 708831 - DNA, 120 bp, Artificial Sequence
  ENSG00000196712_120 (sequence is synthesized)
gtatatggttacacatggttatatgacactaccagttgtttgttttcacaatttcttccctggtgactaaaaacaaaagacaaacaaaaacagacacacacacatgttcattgtagaaaa

SEQ ID NO: 708832 - DNA, 120 bp, Artificial Sequence
  ENSG00000196712_121 (sequence is synthesized)
tttggaaaatgaagaaatgccccagaaagtaaaaagcactcatctccctttaattttggcacattattctggggaatgtatattatgttttccactacatattttcatttaattttcctc

SEQ ID NO: 708833 - DNA, 120 bp, Artificial Sequence
  ENSG00000196712_122 (sequence is synthesized)
gttcatacttttatttccatattccatttttttactctctcaactgtatgtccaatgtaactggttgacaactttttatgctgagtatattttaagtaggttttagttgctttgacactc

SEQ ID NO: 708834 - DNA, 120 bp, Artificial Sequence
  ENSG00000196712_123 (sequence is synthesized)
attctaaaaacatgttttcaacatgtacatagggtttatatatcatcagctatatgacttatttaatttctgttacaattaaaagataccttgcttgttataagagtaaaatttgatttg

SEQ ID NO: 708835 - DNA, 120 bp, Artificial Sequence
  ENSG00000196712_124 (sequence is synthesized)
ttgcaggttttggttttaatggcttgtggcggtttgcaggaccgttttcaaaggtaagaaaatatatttttctctaacttttggcaaaatgaaggtttctgttcaaattagtatgcctgc

SEQ ID NO: 708836 - DNA, 120 bp, Artificial Sequence
  ENSG00000196712_125 (sequence is synthesized)
tttaagaacacacaatgtgctgaaaaccagaaaaataattcacaataaacacatatgttacttttataaaaagtttctcatcacaaggtttttttccaggaggcagcatggtgttggggt

SEQ ID NO: 708837 - DNA, 120 bp, Artificial Sequence
  ENSG00000196712_126 (sequence is synthesized)
gtgtgtattcacttttacaaacaaagtcaacttatgatcaatttttcagaagagtatgataaacctctgtgatacttttctgccacagtcccttgtgtatttgataatcttaatgcacac

SEQ ID NO: 708838 - DNA, 120 bp, Artificial Sequence
  ENSG00000196712_127 (sequence is synthesized)
agttagatatcttatgactagcaaggagcattaccatggttaaaatctatttcatgaaaacatttttatttccagcctattagattagattaatttctctctggatttgtcctcatttgc

SEQ ID NO: 708839 - DNA, 74 bp, Artificial Sequence
  ENSG00000196712_128 (sequence is synthesized)
tagattagattaatttctctctggatttgtcctcatttgctcttattcagtttttttgtttgtttgtttgtttt

SEQ ID NO: 708840 - DNA, 81 bp, Artificial Sequence
  ENSG00000196712_129 (sequence is synthesized)
tttgttttttgattggcattagtttatgtagtgctacataagatgtatatgatcattttctctgtatgtgggctctctcca

SEQ ID NO: 708841 - DNA, 120 bp, Artificial Sequence
  ENSG00000196712_130 (sequence is synthesized)
gatgtatatgatcattttctctgtatgtgggctctctccaaattgatcaaagttccttgaagacagggtttctgtttcttccttaaacagttcctggtgcagtgttttagatacaggggg

SEQ ID NO: 708842 - DNA, 120 bp, Artificial Sequence
  ENSG00000196712_131 (sequence is synthesized)
tgctaaatcaatatgaattgtataaaccttgttccagtttttaagaattgggtattttatttatttcctttcactattacttgaatatctgtcaacatgcaaaggttgtcacttaaaaaa

SEQ ID NO: 708843 - DNA, 120 bp, Artificial Sequence
  ENSG00000196712_132 (sequence is synthesized)
tgggcctgaagttacagaaataagtatatcatacagaagtttttgcatttggattgccagtaaccctctgagccctttacagtgtctagtgagtggaatctaaatggcagctggaatgat

SEQ ID NO: 708844 - DNA, 120 bp, Artificial Sequence
  ENSG00000196712_133 (sequence is synthesized)
gatgctctgctcattttctctgttttggaaaattggctagacatcattcctggtgattgtattgtctcagtattacattcagtctgtcttgtgcatggctttcagaaaatgcaggttcat

SEQ ID NO: 708845 - DNA, 120 bp, Artificial Sequence
  ENSG00000196712_134 (sequence is synthesized)
ctggaagctttaagctgaatagaactccctgttgtaagtcctatggtagtctataaatattactccactccccttttttaatgataagtaatacaaaggaagaaaaatagtaaattaagt

SEQ ID NO: 708846 - DNA, 120 bp, Artificial Sequence
  ENSG00000196712_135 (sequence is synthesized)
ccaaacaaaattaatatttttggcttcagatggggatttacttaaaaaaaaggaactaaaataatttcctattttccattacagcaaacacaaattccagactatgctgagcttattgtt

SEQ ID NO: 708847 - DNA, 120 bp, Artificial Sequence
  ENSG00000196712_136 (sequence is synthesized)
attcccttgtgatcagtttatagcaaattttgctcctttttcttatgagattcaccttacatttcttctttaccttgtaactgacttgacttttgttattctatgaagctttctactttc

SEQ ID NO: 708848 - DNA, 120 bp, Artificial Sequence
  ENSG00000196712_137 (sequence is synthesized)
aaacaagttgtacataagacagtaaaatgttaaaatgtccacatgatattccaaggttgacaagtttgtagagtttgggcaggaagaggaacttaaaacacattattctgtaagtgaaca

SEQ ID NO: 708849 - DNA, 120 bp, Artificial Sequence
  ENSG00000196712_138 (sequence is synthesized)
cattattctgtaagtgaacagaactataatttatttactagatatactaacattgccctaagggcctctttctctgtctctgatacagcatactatatcaaaaaaaaaaaaaaaaaaaaa

SEQ ID NO: 708850 - DNA, 120 bp, Artificial Sequence
  ENSG00000196712_139 (sequence is synthesized)
aacacaaaatctattaggtacctcactttcctgctgccagcaataactcaaccatccatagaccatcctgaaaatctggaagtaaataaataatcaaacaaaaaattcatctcaagaaaa

SEQ ID NO: 708851 - DNA, 120 bp, Artificial Sequence
  ENSG00000196712_140 (sequence is synthesized)
taacatcttaaagcccataagcatatatataccaattcgtaatgcaacttagatttgaatacactgagaaatactaatagctaatagctccagtgggactgagataaacaaggtgggaga

SEQ ID NO: 708852 - DNA, 120 bp, Artificial Sequence
  ENSG00000196712_141 (sequence is synthesized)
aatggcaaacctacagaactctggacttattcagtgtcatagtgaatggtttcatacaactctggttgaccctggaggtgctattcattatagaacttaaactattgtgtgtgttattat

SEQ ID NO: 708853 - DNA, 120 bp, Artificial Sequence
  ENSG00000196712_142 (sequence is synthesized)
gacagtgagtaatgaaggaaagcttttgttatggttgtgttttctatttagaaagatattcttctaaaatggttaaaaataaaagaaactttagttgtttaacgttccattatctgaaaa

SEQ ID NO: 708854 - DNA, 120 bp, Artificial Sequence
  ENSG00000196712_143 (sequence is synthesized)
ttttctttcagattatttaaattaggtactcacagtttttaaaaatttccaaaaaattgcagaaagaagagtcatctcaatgtaggggtcagcttgcctcttaggaactctggtgtgtat

SEQ ID NO: 708855 - DNA, 120 bp, Artificial Sequence
  ENSG00000196712_144 (sequence is synthesized)
gtgtgcctaagggtatacgtgccctgtgtatgggtacgagtgtctgcgtatatctgtatgcttatttggctctatgcctgtgggtgcacttactctgtgtgtttagatcagtcagtttca

SEQ ID NO: 708856 - DNA, 120 bp, Artificial Sequence
  ENSG00000196712_145 (sequence is synthesized)
gactttcacttacatttttactttttttcctcttctgattttatatctgtggtatcctgtaactgaaggaactctgaaggaactttttggtaggccacattgagaaatccaccaaaattc

SEQ ID NO: 708857 - DNA, 120 bp, Artificial Sequence
  ENSG00000196712_146 (sequence is synthesized)
tgataataaaagcaaagcggcaagagtttggtactttacacacctctggaccacttacaaagtattttcttcactgttgcagtttaattagcttcagcatttctcttcatagcagaaaag

SEQ ID NO: 708858 - DNA, 120 bp, Artificial Sequence
  ENSG00000196712_147 (sequence is synthesized)
tccacataagtatccatgttgcctccttaattttagagaactagtcattttctcttttctttaggttgactttgaacaatgaatttattgtaaatgtacagttcacggagagcacagtgg

SEQ ID NO: 708859 - DNA, 120 bp, Artificial Sequence
  ENSG00000196712_148 (sequence is synthesized)
cacataatacagggcccagagtcagttctgactttgttttaactaagtcttataaatttaatatccactctttatatttgtccatctttatatcctatagttttataaatgttgatcttc

SEQ ID NO: 708860 - DNA, 120 bp, Artificial Sequence
  ENSG00000196712_149 (sequence is synthesized)
tcccagcatatttcctgaccttttcttccctttcctttccctgtaatatataaaacttttttttctgcattcaaacacatttcttgacttttatatattagataattaaaagcttcagca

SEQ ID NO: 708861 - DNA, 120 bp, Artificial Sequence
  ENSG00000196712_150 (sequence is synthesized)
attcactaagactctttgtcaggtaagagatgtaggactataaccctaacaaaaaaatgtgtaggactgacaaaacaagaaaagtataaactttattcataaatattaatatgagagaag

SEQ ID NO: 708862 - DNA, 120 bp, Artificial Sequence
  ENSG00000196712_151 (sequence is synthesized)
atttgagtgaatgtaaaggcatattgtgttcctgcatgaacagttcttcccagattattacaaatttaatgtaatttcatcaaaataaccatgggatttgaggattgagaatggagatag

SEQ ID NO: 708863 - DNA, 120 bp, Artificial Sequence
  ENSG00000196712_152 (sequence is synthesized)
aacttaaatgattctaaattctacataaaagtgcaataatagctaagaaaatattgaaaggaaagagacttgagacttaatagtacagatgtctgaacactttatagcagtacaataatt

SEQ ID NO: 708864 - DNA, 120 bp, Artificial Sequence
  ENSG00000196712_153 (sequence is synthesized)
aaaacatacatgtgcaagaatcagccatcagatcagtttaagagaaacagattgataaagaagcatcacaaactgatgagggagagattaaatcatttaataaatgaggctgggaaatga

SEQ ID NO: 708865 - DNA, 120 bp, Artificial Sequence
  ENSG00000196712_154 (sequence is synthesized)
gctgggaaatgacttaaattaggtcttcgtcttcaccgtacaccataagataccaagtatgttctgcctgtatttaagagttgagtagggctgtgtgtggtggctctcgcctgtaatccc

SEQ ID NO: 708866 - DNA, 120 bp, Artificial Sequence
  ENSG00000196712_155 (sequence is synthesized)
ggttgaggcaagaggattgtggcaggaggattgcttgagccccagaggtcagggctatagtgagctatcatcgtaccactgcactccagcctggatgatagagtgagacccttctctatt

SEQ ID NO: 708867 - DNA, 120 bp, Artificial Sequence
  ENSG00000196712_156 (sequence is synthesized)
tttgggagattaggtatatgtacttttattttttaaattcaacttttaaattttattttgtatttttgtcttgaaatattaactctgtagtacttagtacattgtaaaacttacacttcc

SEQ ID NO: 708868 - DNA, 120 bp, Artificial Sequence
  ENSG00000196712_157 (sequence is synthesized)
tatggttttgtattttatttgacttcaaattattagaatttcttgttttaactgtaagaaaagtatcacagcaatttagaaaataaattttaagaatagtgctaaattttgtcaccctaa

SEQ ID NO: 708869 - DNA, 120 bp, Artificial Sequence
  ENSG00000196712_158 (sequence is synthesized)
cataagtactgttgtttggtatattacttttttcagatttcaatgtggttactactgtatttttaatagattttcatagttataagcctagaatgataaaattttgtaacaatactgttt

SEQ ID NO: 708870 - DNA, 120 bp, Artificial Sequence
  ENSG00000196712_159 (sequence is synthesized)
tttcagttttttgaactatgatctttcataaactttctgtaataccaatgctttcgatgaatgaattaataatggacacctgcttagaagaaaaaaatgtatgcagaattttgtggtctg

SEQ ID NO: 708871 - DNA, 120 bp, Artificial Sequence
  ENSG00000196712_160 (sequence is synthesized)
cttcctagattatacaaatcattacattttaatgagcatgaagtcaccacacggaggaaaatgtaaatgtgtaaacctcaagtttgccattatcttataagaatgggtgtgctaagttac

SEQ ID NO: 708872 - DNA, 120 bp, Artificial Sequence
  ENSG00000196712_161 (sequence is synthesized)
ttggcagctgaattaaaccttactctagagtagtgctgtccactagtaatataatgagaaccccatatgttaaaaacttttttacttactacattaaagagtaaaaagaagcaggtaaaa

SEQ ID NO: 708873 - DNA, 120 bp, Artificial Sequence
  ENSG00000196712_162 (sequence is synthesized)
aaagaagcaggtaaaattaattgtaattatgttttgtttaacccggtgtatattatctataatttcaacatgtaatcaatataaaagttattaatgacatttcattctcttttttttaat

SEQ ID NO: 708874 - DNA, 120 bp, Artificial Sequence
  ENSG00000196712_163 (sequence is synthesized)
gaattcccccctcaacttcgaagtgtgtgccactgtttataccagagtcatcgcagccatttgcttttttagcacacggcttcagttgcttagagacgttaacagcatcattgaaatcac

SEQ ID NO: 708875 - DNA, 120 bp, Artificial Sequence
  ENSG00000196712_164 (sequence is synthesized)
cattttaaaagctgtttgaggctgctctatgtgaattttttcaccattgctatttttaaagatgtatctgttctatctgtaaaaaagcttttcacggtatacatagatgataaaacatac

SEQ ID NO: 708876 - DNA, 120 bp, Artificial Sequence
  ENSG00000196712_165 (sequence is synthesized)
taggaaaatcctgtatagttttttcaactagttaagtctgagtctaaagggtagtttagttataatatgaaacttaatacagtgaatatcttctcaagtttgggctgtattcaggtttct

SEQ ID NO: 708877 - DNA, 120 bp, Artificial Sequence
  ENSG00000196712_166 (sequence is synthesized)
ctttaaattttatttagtaattgttctattgatgaaactaggcagacaggaaatagcacatattaaaaatagtctgggtcagcttcttggttggcctagtagtaactggtttcagagagc

SEQ ID NO: 708878 - DNA, 120 bp, Artificial Sequence
  ENSG00000196712_167 (sequence is synthesized)
aagtgggtttctaaaatgacagaggctttgactttagctggttaaaagtgaatggggactgactacatgattacatggtctaggagattgtagtagaatttcttcatgtggttgtcatcc

SEQ ID NO: 708879 - DNA, 120 bp, Artificial Sequence
  ENSG00000196712_168 (sequence is synthesized)
taaaagaaaaatctttttgtatcatgagcaaagttggagaccgttttgagaccatgattctaataatgtaaaaggaacaggtcttagcacttatttagtacttaggaaatatttaatgaa

SEQ ID NO: 708880 - DNA, 120 bp, Artificial Sequence
  ENSG00000196712_169 (sequence is synthesized)
gaaataaatttcccatccctcccacctaagtaaacaagattcttgccagctttcacagctaagaaaggaggaaaatagtgaaaatagatttttaaacactatatgtggtgattattaaac

SEQ ID NO: 708881 - DNA, 120 bp, Artificial Sequence
  ENSG00000196712_170 (sequence is synthesized)
aaacagtatgttatgctttttagagcacttcacagtaaaatatcctatattattttaataacaaacctggtttattatgttaaaatttcacataaaattattatctttaaaaacatgaat

SEQ ID NO: 708882 - DNA, 120 bp, Artificial Sequence
  ENSG00000196712_171 (sequence is synthesized)
ggtggtatcagtgcattgtttaagtattgggtaaaagcattgttgaagagcagagacagcatgctgtgttgttattaaataaggctttattttttaattagtaactggtaacagggaatg

SEQ ID NO: 708883 - DNA, 120 bp, Artificial Sequence
  ENSG00000196712_172 (sequence is synthesized)
ttacatttactgattagaaagaaagataggaaaaaagctttggtctcaagatagtattttattgagtctgcttcccaaacctagtttatttcttttggtttgctcttttgtttttattca

SEQ ID NO: 708884 - DNA, 120 bp, Artificial Sequence
  ENSG00000196712_173 (sequence is synthesized)
tcttccctcttctggctttttcttgcccctttgcctttggcagtaacagaaaggtaccttcctgctcttctgtgttctgcctggagggatagtagtccctttgggacctactggggaaat

SEQ ID NO: 708885 - DNA, 120 bp, Artificial Sequence
  ENSG00000196712_174 (sequence is synthesized)
gttgaaagggaagtgagtatattgctagctaataaacttccctggactttagctccttttttgagttcatatcttggcctttaagccttttcaaatcatgtgttaaccagctctattact

SEQ ID NO: 708886 - DNA, 120 bp, Artificial Sequence
  ENSG00000196712_175 (sequence is synthesized)
ttatataccttccttccttagttgactggattaaggttatttaagaatagccaactgtgaacatgtgtcagatttataattaaatcattttctcatgtgttgttttcacttctcctgatg

SEQ ID NO: 708887 - DNA, 120 bp, Artificial Sequence
  ENSG00000196712_176 (sequence is synthesized)
gttttaggataaagataaaatgattcccaaagtggatattctcgtatggtgagagaattctaagaactaatttatgattctaaataaatctcaccctttttcagtaaatctgcttctcca

SEQ ID NO: 708888 - DNA, 120 bp, Artificial Sequence
  ENSG00000196712_177 (sequence is synthesized)
aactgaagtagtttacacacagttttaaggctataaatgatagttatataccactgttactaatacatttgtatatagtctaaagtttgaaacaaagctctgtgagctaaggggctgtgt

SEQ ID NO: 708889 - DNA, 120 bp, Artificial Sequence
  ENSG00000196712_178 (sequence is synthesized)
cttgttgttttactgctatttcccaatgcctagaatggtatttgacctgtaggtacacagtaactctttggatggatgaatgggtgggtggatgaatggatgtctaactaacttaaagcc

SEQ ID NO: 708890 - DNA, 120 bp, Artificial Sequence
  ENSG00000196712_179 (sequence is synthesized)
caagttatgggttatggtgttggatgtccagaattcccagaataagatgccatctatttgtggattaaataattctaacatggttttaaaaatatttttaaaataattattctgcctagg

SEQ ID NO: 708891 - DNA, 120 bp, Artificial Sequence
  ENSG00000196712_180 (sequence is synthesized)
ctagtccaatcaagagtcttttaattttgaaagaaatctttggtctagaaagagctctgagagatgaaaccaatatgtgcctggagttttgggggttttttaggtggctttttttttttt

SEQ ID NO: 708892 - DNA, 120 bp, Artificial Sequence
  ENSG00000196712_181 (sequence is synthesized)
tttttttaagatattttgataaatggtcaactgtaatatgtgaaaagttttaagcaggcctacagttttgttctgtaattttctctgcagtttcttcactttaataatattaatgcttct

SEQ ID NO: 708893 - DNA, 120 bp, Artificial Sequence
  ENSG00000196712_182 (sequence is synthesized)
tactagttgagctgataaccttcttctcccaaatgttgcagagcttttaacctcctctgattagaaccatttcaggaagtagcctgcaaacattgaaaaatatgtgaaatgttaagagta

SEQ ID NO: 708894 - DNA, 120 bp, Artificial Sequence
  ENSG00000196712_183 (sequence is synthesized)
atcttttttagagagagaggtctttaattcagaatttctaaagtgaatttttatatttatccatataatttttatttctttattcagtaggatcataattaaatgccaggtgttggaaaa

SEQ ID NO: 708895 - DNA, 120 bp, Artificial Sequence
  ENSG00000196712_184 (sequence is synthesized)
agaacttaaagtcaattgaaggatacacagagaagaattttacataccaagaaaaaattatgtagacacaaatgtttttagtgtgtgatctacttgtaatgaatattttatattacattt

SEQ ID NO: 708896 - DNA, 120 bp, Artificial Sequence
  ENSG00000196712_185 (sequence is synthesized)
ctcaaaagctaggaattaaccaaaatgtaaatatttaatatcctcaaattcacttggagagagtttttctgtgattcatagccagaaatagtagacatgattgggtctcaacatttcttg

SEQ ID NO: 708897 - DNA, 120 bp, Artificial Sequence
  ENSG00000196712_186 (sequence is synthesized)
ctgttttagtgcttggcttaaaaatgtaataaaaattaaaacccagaattaaaattcattcctcaaaattcagttgatttctaattttttgttgattccatttgtgttacattttatggt

SEQ ID NO: 708898 - DNA, 120 bp, Artificial Sequence
  ENSG00000196712_187 (sequence is synthesized)
gtaattttatgtacaagccaacattgtttttgttgctgtatgtagtcggtgctgtgacttgtttgtgctcatctctgttctgtaggcaacttgccactccctactgaataaagctacagt

SEQ ID NO: 708899 - DNA, 120 bp, Artificial Sequence
  ENSG00000196712_188 (sequence is synthesized)
aaaagaaaaaaaggaaaacaaaaaatcagtaagtttggagaactttttattagctgtttctttcaaagcaaaacaaaaatcttttgctgtttgttaagaatatcttcacttcagcctatt

SEQ ID NO: 708900 - DNA, 120 bp, Artificial Sequence
  ENSG00000196712_189 (sequence is synthesized)
tgaccttcactgtaaaatcattctactaattctggcacaaaatagctttcatttcaattaaccctggaattaagttacattgaaacattctctgtgttcctttggtttgatttatcccaa

SEQ ID NO: 708901 - DNA, 120 bp, Artificial Sequence
  ENSG00000196712_190 (sequence is synthesized)
aggcaatttgtgggcatttgttgcattggatatccttggtctaattttattattgttactttttaaattataaatgaatgcaaagaaacttaatttcaaggccttaggaaacgctgactg

SEQ ID NO: 708902 - DNA, 120 bp, Artificial Sequence
  ENSG00000196712_191 (sequence is synthesized)
tcttcattcttgcttcttgtttgaaggtaatgtgagtggtttcttttcccagagatgacagtgtttcttaattgttagaagtatatggtgggaaagagtcactttctaaatcttacctaa

SEQ ID NO: 708903 - DNA, 120 bp, Artificial Sequence
  ENSG00000196712_192 (sequence is synthesized)
aagttgctaaattttatttttttactcttcatatttttatctaggcagtctcaggcataatttagatatttgtgcatagattatagaaattttaatggtaaaactacttttacctcaaaa

SEQ ID NO: 708904 - DNA, 120 bp, Artificial Sequence
  ENSG00000196712_193 (sequence is synthesized)
aaataagaggtaaatgataagatagtacttttgagataaaagaaaactgagttcatatttgtagaaaaacacatcattctgcaaacataatgtgaatatactatctgcttctatgaactt

SEQ ID NO: 708905 - DNA, 120 bp, Artificial Sequence
  ENSG00000196712_194 (sequence is synthesized)
gccttgatttatttaaaaggaagaaaattatgagagtcgtaattattttcttccagtgaatggaatttgtccaaaatataatatgcattcattttacatttgccattatctgtcacagtg

SEQ ID NO: 708906 - DNA, 120 bp, Artificial Sequence
  ENSG00000196712_195 (sequence is synthesized)
acttatcaggctgagccctgtctttgttcatataatccaaatgattgtagagtaagatgtaaagaaaactaagtaggtagttttcttaaaagggtgtaatttagaatacagtgttcatct

SEQ ID NO: 708907 - DNA, 90 bp, Artificial Sequence
  ENSG00000196712_196 (sequence is synthesized)
ttttcttaaaagggtgtaatttagaatacagtgttcatctggtttcatctttcatgccttatctaaactttacatataataaaagcttta

SEQ ID NO: 708908 - DNA, 120 bp, Artificial Sequence
  ENSG00000196712_197 (sequence is synthesized)
tgagcccaagagttaaagaccagcttgggcaacatagcgagtcgtctctacaaataatttttttttttttttaattagccaggcgtggtggtgtactcctgtagtcccagctactcggga

SEQ ID NO: 708909 - DNA, 120 bp, Artificial Sequence
  ENSG00000196712_198 (sequence is synthesized)
gaggcaggaggattgcttgagcccaggtggttgaggctgcagtgagctgtgattgtatcactgtactccaccatgagtgacagagtaagaccctgtctcacaaaaaaaaaaaaaaaaaaa

SEQ ID NO: 708910 - DNA, 120 bp, Artificial Sequence
  ENSG00000196712_199 (sequence is synthesized)
acacccttaggctagtctagcaattctgaactgcctggcttgaagagttgattcccatgggatgttgaggaggggccagaggttctggaagaatagtaaaaaacctacaaccaagtggta

SEQ ID NO: 708911 - DNA, 120 bp, Artificial Sequence
  ENSG00000196712_200 (sequence is synthesized)
gcatctcagtattcctcttccacaaagtagcccatccccccccatcaccaagggaagcccctagtggtggcaggcatcttgggaatttaccttcattactaattctcccttgtctaccag

SEQ ID NO: 708912 - DNA, 120 bp, Artificial Sequence
  ENSG00000196712_201 (sequence is synthesized)
actgcccatcagaacagcctctgacaaagctgcatccaaattctttaaagggcaattcattgccccaagtaatctgccaaacctgtcttcatttggaaatcagtcttcatattcagcact

SEQ ID NO: 708913 - DNA, 120 bp, Artificial Sequence
  ENSG00000196712_202 (sequence is synthesized)
gctcagcacgcaggcatgtgaggaagctgggcttaaaggagactccagcaaatggagagacagaccacagtcctgggttggaaagctgaatatcgttgaatgccagatcttcccaaataa

SEQ ID NO: 708914 - DNA, 120 bp, Artificial Sequence
  ENSG00000196712_203 (sequence is synthesized)
atgaactggcttaatacaattctgatcaagatgccaacaagaagagagtgtatccagacaaaatgatctttggaaaatattcttcaccttgtggaataaacaggaaagcatggctaacaa

SEQ ID NO: 708915 - DNA, 120 bp, Artificial Sequence
  ENSG00000196712_204 (sequence is synthesized)
gttttgttcttttccaagtgtctgattcagcgggccatagaccgcttgccagaaaatcgccattgcttctaggctgacgcttgcctacttgttttgatcgtctgagagaagagactttgt

SEQ ID NO: 708916 - DNA, 120 bp, Artificial Sequence
  ENSG00000196712_205 (sequence is synthesized)
taaggggaaaatgaattccatgttcttgaaggaaagattgtaactatgtacattcatgatgttcctttggtgtgtggtttctgtgagtaacaggtagatgtcatttctggaaatggtatg

SEQ ID NO: 708917 - DNA, 120 bp, Artificial Sequence
  ENSG00000196712_206 (sequence is synthesized)
tttatgtctatacattgttttataaaactccatggagaaagaaggggtttacttgctttgtatcacatagcaataacattgtacaaattctgatgcttaataaaatagttcgagattttc

SEQ ID NO: 708918 - DNA, 120 bp, Artificial Sequence
  ENSG00000196712_207 (sequence is synthesized)
gatatatccaaagacgtggttgatgaaaacaacatgaataaggtaaggagggcaaaattatttccattatatctagatgtgaagcagtttattttactcaaggtgtgtattactttaggc

SEQ ID NO: 708919 - DNA, 120 bp, Artificial Sequence
  ENSG00000196712_208 (sequence is synthesized)
aagcaaagtatttcagggaaccatttaaatgatcattttaggtttctttgtttgatggacttagaagagacatactcatacataattttatttggcagagggaaaataataccaggcaat

SEQ ID NO: 708920 - DNA, 120 bp, Artificial Sequence
  ENSG00000196712_209 (sequence is synthesized)
gaacaaagatttaaaataatcccttagtttcattcttttgtctgagaagactaaacgatacctctgttattattaaacgtagtttctctaatattcactacaaggattgccctacttgag

SEQ ID NO: 708921 - DNA, 120 bp, Artificial Sequence
  ENSG00000196712_210 (sequence is synthesized)
ttcatcacttttatagtgtgttatttgcatgtacttagggtatgtgtccatatagtgctactgaaattatctagtaactcattttaagtattttagaacagttttcaaagaattttgcca

SEQ ID NO: 708922 - DNA, 120 bp, Artificial Sequence
  ENSG00000196712_211 (sequence is synthesized)
ggaaggtaaggctctcgcatataccatctatagtgaaattggcaccatgacaactggtaattctaggaggctcttaaaatttttttaaatatcacctaggtgattgaaaaaaaaaagaac

SEQ ID NO: 708923 - DNA, 120 bp, Artificial Sequence
  ENSG00000196712_212 (sequence is synthesized)
tgagtattaatcctagggttttactgaaatttcaatatgcagtttgttttgcaaatattttttttttcattttttgctgcttttggagaaatactcttagctggctgaacatgagatggt

SEQ ID NO: 708924 - DNA, 120 bp, Artificial Sequence
  ENSG00000196712_213 (sequence is synthesized)
ttccttcatggtttgcctgtagatggagatgttcagaatcagctgaatgatttattactttgtagaagtattggaccgggaatttatacattaaagggtaaataaatgaaccaggtaatc

SEQ ID NO: 708925 - DNA, 120 bp, Artificial Sequence
  ENSG00000196712_214 (sequence is synthesized)
aggcatgcatgagagatattccaacgtgcaagtggctggaccagtggacagaactagctcaaagttctgtggatcttttaattgcagatttgcattccaatataatccatccctgcaacc

SEQ ID NO: 708926 - DNA, 120 bp, Artificial Sequence
  ENSG00000196712_215 (sequence is synthesized)
gggagaagtcaaaggaggtgctaagtaacgttctcagtccagctaacagtgtctttagttatacatatggaaaagtgaagagcttactcatatctttatcttccccaaaagagaaaacat

SEQ ID NO: 708927 - DNA, 120 bp, Artificial Sequence
  ENSG00000196712_216 (sequence is synthesized)
caggactcgcctctgcacaaagccctcttttgggtagctgtggctgtgctgcagcttgatgaggtcaacttgtattcagcagagtccagaggaagtatttatggcaatccggaatcctct

SEQ ID NO: 708928 - DNA, 80 bp, Artificial Sequence
  ENSG00000196715_0 (sequence is synthesized)
agtctccgcccgccgatccggcctcttcggccgttgcgcactccaccccctccctccgcgcccgcgcgcgccttccccgc

SEQ ID NO: 708929 - DNA, 80 bp, Artificial Sequence
  ENSG00000196715_1 (sequence is synthesized)
actccttttggggcggttgggccgcgcgcctgtgggggcggggcccggagcaggccaccgagccaatggggcgcggcggc

SEQ ID NO: 708930 - DNA, 120 bp, Artificial Sequence
  ENSG00000196715_2 (sequence is synthesized)
acgggcggcggcggctgaggtggaggcggagggaggcggcggcggcggcggcgggaagatggcggctcccgtcctgctaagagtgtcggtgccgcggtgggagcgggtggcccggtatgc

SEQ ID NO: 708931 - DNA, 120 bp, Artificial Sequence
  ENSG00000196715_3 (sequence is synthesized)
agtgtgcgctgccggaatcctgctctccatctacgcctaccacgtggagcgggagaaggagcgggaccccgagcaccgggccctctgcgacctggggccctgggtgaagtgctccgccgc

SEQ ID NO: 708932 - DNA, 120 bp, Artificial Sequence
  ENSG00000196715_4 (sequence is synthesized)
ccttgcctccagatggggtcgaggatttggtcttttgggttccatttttggaaaggatggtgtattaaaccagccaaacagtgtctttggacttatattttatatactacagttattact

SEQ ID NO: 708933 - DNA, 120 bp, Artificial Sequence
  ENSG00000196715_5 (sequence is synthesized)
tggcatgacagcaagcgctgtggcggctttgatcctcatgacgtcctccatcatgtcggtcgtggggtccctgtacctggcctacattctgtactttgtgctgaaggagttctgcatcat

SEQ ID NO: 708934 - DNA, 120 bp, Artificial Sequence
  ENSG00000196715_6 (sequence is synthesized)
ctgcatcgtcacgtacgtgctgaacttccttcttctcattatcaactacaaacgactagtttacttgaacgaggcctggaagcggcagctgcaacccaagcaggactgacgcccgacaga

SEQ ID NO: 708935 - DNA, 120 bp, Artificial Sequence
  ENSG00000196715_7 (sequence is synthesized)
ctccaccctaacagtctcaagcccctttccattcagtttattttgcagcaggtttttattattattattattattattattcacaacagacactttccctaagaatctcaaactgatttt

SEQ ID NO: 708936 - DNA, 120 bp, Artificial Sequence
  ENSG00000196715_8 (sequence is synthesized)
taaaaatccggtaaattagaaggggccctcgctattttctgtgtcagtcttcattttaaatatggatacaaaaaggatacgccgagccaatcaaagacaagctttaactttactttgaag

SEQ ID NO: 708937 - DNA, 120 bp, Artificial Sequence
  ENSG00000196715_9 (sequence is synthesized)
tgtttctgaaatgataaaatgtagccctagccccctgccctcaattgtaaagtgagcaaccattgctagtaattctttaatgtgtataaattcaatttcaggtataacaaatgtgatcat

SEQ ID NO: 708938 - DNA, 120 bp, Artificial Sequence
  ENSG00000196715_10 (sequence is synthesized)
gacatgaaaatattctagaatagatactgtattaaatattgccatgtttacaatatgtaatatgtttttagccgatggatttaaacatgtagattcaactagaatccatttgtgatattt

SEQ ID NO: 708939 - DNA, 120 bp, Artificial Sequence
  ENSG00000196715_11 (sequence is synthesized)
gtaaataaaggtagaaatattagatccatttctgcagaacttactgtacagtttagttggagtgtagcactgaagaactgtcagctcagcgttgactgaggagatagtgaaaatagccta

SEQ ID NO: 708940 - DNA, 120 bp, Artificial Sequence
  ENSG00000196715_12 (sequence is synthesized)
tacacagcatcttgtgaaaagtactggcagccgtggttgcagcaaataatagggcaaaaaaaataataatagggtggtcggttccctttcatctccctcttctgaaaggaaaaaattgaa

SEQ ID NO: 708941 - DNA, 120 bp, Artificial Sequence
  ENSG00000196715_13 (sequence is synthesized)
ttggaacgttcaagtccagtttgtgttcagtcataaaactgggccagttgttaaccttacagaatgagtcatgtggccagaccttcaagtccaaggccttcagacactaaggatgggaaa

SEQ ID NO: 708942 - DNA, 120 bp, Artificial Sequence
  ENSG00000196715_14 (sequence is synthesized)
atgggtatttttctttggagaaaagctggaaatataaacatggcatttttaggtaaagtttcttccactagttgaattttcatgcagatatttttccttaacgttggtgccagtcaagca

SEQ ID NO: 708943 - DNA, 120 bp, Artificial Sequence
  ENSG00000196715_15 (sequence is synthesized)
aagagtattatgatggaaaagaccagtccaagccccatcgctccggagtgggagccagtgttcttgctaattgtttctttctgcactaaccactcagatgtctaatttaattgttttgca

SEQ ID NO: 708944 - DNA, 120 bp, Artificial Sequence
  ENSG00000196715_16 (sequence is synthesized)
gtcaaatactggatttgtaaccttcagggctgacatgctgcccagtttgcttcatcgggagaatagcaacaggtagacacatctcaaggctaaatctgctcatgtcgccactgctctcat

SEQ ID NO: 708945 - DNA, 120 bp, Artificial Sequence
  ENSG00000196715_17 (sequence is synthesized)
aatgacacacatgcagtaagaagacttttgtaaggggatttgagtacacccaaatgaaattgtgacaggatgtttgtatggttaacatctgatatcagaatgttaaaagtgccttctgtc

SEQ ID NO: 708946 - DNA, 120 bp, Artificial Sequence
  ENSG00000196715_18 (sequence is synthesized)
ttaaatctcaaaccaaatattttgtgtgttgaccttgggcagaagaagtgtccttccctcctttcttcaccgtcaggtagaaaacctgcactctgcagaagggtcctgtgtgatcactta

SEQ ID NO: 708947 - DNA, 120 bp, Artificial Sequence
  ENSG00000196715_19 (sequence is synthesized)
atcctctggttgagaagcagcagtaatgtttttgcttccaacctgattaatcattttatgttgaaaatagtcaatgagaccagtatctcttgagtgctttatttgccttctctttgaagg

SEQ ID NO: 708948 - DNA, 120 bp, Artificial Sequence
  ENSG00000196715_20 (sequence is synthesized)
gaggggacgggctctgctctgtaaactcaaatgtgtagagtcagcaacaattccgtagcttccaactgactcagaattgatgcaacgtaggtcttctggcccgaggcaggtatcaagtcc

SEQ ID NO: 708949 - DNA, 120 bp, Artificial Sequence
  ENSG00000196715_21 (sequence is synthesized)
aaatcataatgaacttttcaccagtttcaaccagtttcttaaaagagagcttaagtcaagatttcatcaagacttgtgttttcccatgaatgtgaatctttcaatggctgttggagtatg

SEQ ID NO: 708950 - DNA, 120 bp, Artificial Sequence
  ENSG00000196715_22 (sequence is synthesized)
tatgtactgttcttgcattctgaagtagttaaagaactctagaaagtactgattggccatctggtgtctatggagaaagaagtcctcacgtttgagggctgtacagtgaggccatcttgt

SEQ ID NO: 708951 - DNA, 120 bp, Artificial Sequence
  ENSG00000196715_23 (sequence is synthesized)
agcagcgcatccagctctaccaaggcagtcctctggttcttttttctaagctacagtggaaatggcctaatggttaaaactgtggtatacatgacatcggttgtgctaaacaagttcctc

SEQ ID NO: 708952 - DNA, 120 bp, Artificial Sequence
  ENSG00000196715_24 (sequence is synthesized)
gtgtcccaatatccaatggtttttcatcctattttgtatcaatcaacagagtatagttaaagcttgtcttgatgttgcattcttgcaaatgtcttcaactcttacctgagaaaacatggc

SEQ ID NO: 708953 - DNA, 120 bp, Artificial Sequence
  ENSG00000196715_25 (sequence is synthesized)
cacattcctatggcccagtcgaattaataccctttttctcactgagagaggaacacgtactgcctgtcataacagcattgtaatgccagtgtctcagtaacagaatcctggtgggtgtta

SEQ ID NO: 708954 - DNA, 120 bp, Artificial Sequence
  ENSG00000196715_26 (sequence is synthesized)
attgggtgttttttgccctggagaattcagattcctttctatacctccgattctgcccagaagagggggggaatcaccagtgttacaaaattagaagattgttttgcctgttttagactg

SEQ ID NO: 708955 - DNA, 120 bp, Artificial Sequence
  ENSG00000196715_27 (sequence is synthesized)
aatatttgaacactgcagcattactagccaccagtgttaaaggacagatgaggggaaacatttgtttttagcagtaattccatgcctcatcttttttaagtgatttgttccaaatgaagc

SEQ ID NO: 708956 - DNA, 120 bp, Artificial Sequence
  ENSG00000196715_28 (sequence is synthesized)
catttattgacttgatgttcacaaatatcatttgaagaaataacaggaattggggttagatgataaattctagggaatctaggtgatttggaggatttcatttgttttgcattacagcta

SEQ ID NO: 708957 - DNA, 120 bp, Artificial Sequence
  ENSG00000196715_29 (sequence is synthesized)
gttgctctcactaaaggtaaatttccggtgaaataactcaggtttaactagctgtgtgcccagaatcactgttccttcatacatgtgtcctctccttaaattcattactttcaaatgatg

SEQ ID NO: 708958 - DNA, 78 bp, Artificial Sequence
  ENSG00000196715_30 (sequence is synthesized)
acatgtgtcctctccttaaattcattactttcaaatgatgttcaaagcattgactattttcattcaaagaaactacat

SEQ ID NO: 708959 - DNA, 120 bp, Artificial Sequence
  ENSG00000196715_31 (sequence is synthesized)
ccactgcactccagcctggccaacagagcgagactgtcccccccccaaaaaaaaaagagagagactgcattcaaagaggaccaagactacagtgaaattaaaactgtttgctggctgggc

SEQ ID NO: 708960 - DNA, 67 bp, Artificial Sequence
  ENSG00000196715_32 (sequence is synthesized)
ccccccaaaaaaaaaagagagagactgcattcaaagaggaccaagactacagtgaaattaaaactgt

SEQ ID NO: 708961 - DNA, 71 bp, Artificial Sequence
  ENSG00000196715_33 (sequence is synthesized)
gaggcggttggatcacctgaggtcagaagttcgagatcagcctgaccgacatagtgcacctgtaatgccag

SEQ ID NO: 708962 - DNA, 120 bp, Artificial Sequence
  ENSG00000196715_34 (sequence is synthesized)
taggtggaggttgcagtgagccacagttgcgccattgcactccagcctgggcaatgagtgaaactctgtctcaaataaaaaaataaaaataaaaactatttgttgacttttgtttttcat

SEQ ID NO: 708963 - DNA, 120 bp, Artificial Sequence
  ENSG00000196715_35 (sequence is synthesized)
ttagttttggaaaagactatttgcaaaagtacagagttatcttcagcaattacttcacaacttagattggtaccaagagtgacaggagatcttgtcttggaagatcattattagatgcca

SEQ ID NO: 708964 - DNA, 120 bp, Artificial Sequence
  ENSG00000196715_36 (sequence is synthesized)
acaaggagacccactgtgatttctggtaacctatttggggaaaaagacctaatgacctaatatgcaatttctgtcctcgtgtctttttctctaacacacagtcatgggtgaaacatttca

SEQ ID NO: 708965 - DNA, 120 bp, Artificial Sequence
  ENSG00000196715_37 (sequence is synthesized)
gacacctcaggcagcacttatggtttctaattgtgagaactacccttccatcaaacaaaaagggcaagggtgggagccccggctacttggttaaacattttttactacaaattcgcccag

SEQ ID NO: 708966 - DNA, 120 bp, Artificial Sequence
  ENSG00000196715_38 (sequence is synthesized)
aaaaggtgaaatattttgttataaaactgtattaagcatggcctaagtatttattaggtatatgatctgtgtagtatgttccatcagaaatatttcttactagtgctttaagctccagag

SEQ ID NO: 708967 - DNA, 120 bp, Artificial Sequence
  ENSG00000196715_39 (sequence is synthesized)
taaacagtcatttaaaatggagttcactgggcaggtttcccctttaatctagatagaaatactctttatcagagatttaaggcactgttttgctaactggtaaataaaaccaaatgtaaa

SEQ ID NO: 708968 - DNA, 120 bp, Artificial Sequence
  ENSG00000196715_40 (sequence is synthesized)
tatgtaagaatgtttatttgttgcacataacttttttggtataaaataaatgtagaagttacctgtggaagttgtgctcccattattcttaaactgcagggttgcattccaaaagaactg

SEQ ID NO: 708969 - DNA, 120 bp, Artificial Sequence
  ENSG00000196715_41 (sequence is synthesized)
aaacgaagtctttttagactcagtaggagccttatattcttgaagtcaatactgtaacctcatttctaaggtatacagggttgattctttttctcttaaatcatatgtaacttgcagaag

SEQ ID NO: 708970 - DNA, 120 bp, Artificial Sequence
  ENSG00000196715_42 (sequence is synthesized)
attcagagtcctcagacctctagttcttggaattcctgtaggtttacggtgtatgtgattgtcaagaattaatgacaaaaatgtgtcactgcctacagttctgtgaacactcagaatgta

SEQ ID NO: 708971 - DNA, 120 bp, Artificial Sequence
  ENSG00000196715_43 (sequence is synthesized)
ttaatgagctgtttttccatagttttactttagcttaccttgaatactccctgtataatcctctaaaaaggtagcatcggcaagaaagatgaatccgttggaaatacagctgagccatac

SEQ ID NO: 708972 - DNA, 120 bp, Artificial Sequence
  ENSG00000196715_44 (sequence is synthesized)
atccgttggaaatacagctgagccatacttcacggaatagaacaagtgtgttctgtgctggagctcaagacctgtggaaagggactgcccccactgggtgcaatggctcatgcctgtaat

SEQ ID NO: 708973 - DNA, 70 bp, Artificial Sequence
  ENSG00000196715_45 (sequence is synthesized)
cctctactgaaaaatacagaaaaattagccaggattgtggtgtgcgcctgtaatcccagctattcaggaa

SEQ ID NO: 708974 - DNA, 86 bp, Artificial Sequence
  ENSG00000196715_46 (sequence is synthesized)
gcagcctaggcgacagaggaagactccagctcaagaaaaaaaacaatggactgcccctaatttgtaaaccatttaaatgtgtctat

SEQ ID NO: 708975 - DNA, 120 bp, Artificial Sequence
  ENSG00000196715_47 (sequence is synthesized)
tggactgcccctaatttgtaaaccatttaaatgtgtctattacatttaacttttcttaatgtttgtcaactaaaagttttattcattatactttgacatactggaacacaaaacttgatt

SEQ ID NO: 708976 - DNA, 120 bp, Artificial Sequence
  ENSG00000196715_48 (sequence is synthesized)
cctttgaaaaactaaagagaagttgataaaaaaaatacagaagctctagattcctaattggaactgactacactcatttttaaaaaatggacgatgcctaataaaaccacatgaaattaa

SEQ ID NO: 708977 - DNA, 120 bp, Artificial Sequence
  ENSG00000196724_0 (sequence is synthesized)
ttttggttaatgttgggtgtgtttctgcggtttgtgaggtgagaggcgctggagctatgggtccgaaccgcggtgtctgaacccagaaggtgaagagtccttcttgctgcacagaggcag

SEQ ID NO: 708978 - DNA, 120 bp, Artificial Sequence
  ENSG00000196724_1 (sequence is synthesized)
atcttaggccccgtaacggcgcccgccgctcccggcagtgctttccccgcgtactcgggatggcggcggccgcgctgaggctcccggctcaggcatcatctggctgcaaagaagagaaca

SEQ ID NO: 708979 - DNA, 120 bp, Artificial Sequence
  ENSG00000196724_2 (sequence is synthesized)
cactgtgtttgagggaggaggaaggaggatcagagtttaaactcctgccataatgcagggcactgtggcatttgaagatgtggctgtgaacttttcccaggaggagtggagtctccttag

SEQ ID NO: 708980 - DNA, 120 bp, Artificial Sequence
  ENSG00000196724_3 (sequence is synthesized)
tgaggttcagagatgcctttaccatgacgtgatgctggagaactgggtacttatatcctccctgggttgttggtgtggatcagaagatgaggaggcaccttctaagaagagcatttctat

SEQ ID NO: 708981 - DNA, 120 bp, Artificial Sequence
  ENSG00000196724_4 (sequence is synthesized)
acaaagagtgtctcaggtcagcactcctggggcaggtgtgtctcccaagaaggcccactcttgtgaaatgtgtggcgcgatcttgggagacattttgcacttggcagatcatcaggggac

SEQ ID NO: 708982 - DNA, 120 bp, Artificial Sequence
  ENSG00000196724_5 (sequence is synthesized)
acatcacaagcagaaactgcacaggtgtgaggcatgggggaataaattgtatgatagttcaaaccgtccgcaccagaatcagtaccttggagagaaaccctatagaagcagtgttgagga

SEQ ID NO: 708983 - DNA, 120 bp, Artificial Sequence
  ENSG00000196724_6 (sequence is synthesized)
agcattgtttgtgaagaggtgtaagttccatgtgtcagaggagtcatctatcttcattcagagtggaaaggactttttgcccagctcaggattactgctgcaggaggccactcacactgg

SEQ ID NO: 708984 - DNA, 120 bp, Artificial Sequence
  ENSG00000196724_7 (sequence is synthesized)
ggagaagtcaaacagcaaacctgagtgtgagtctccctttcagtggggagatactcattacagctgtggagaatgcatgaaacattctagcaccaaacacgtatttgttcaacagcagag

SEQ ID NO: 708985 - DNA, 120 bp, Artificial Sequence
  ENSG00000196724_8 (sequence is synthesized)
acttccctctagagaggaatgttattgctgggaatgtgggaaatcctttagcaaatatgatagcgtcagtaatcatcagagagttcacactgggaaaagaccttatgaatgtggagaatg

SEQ ID NO: 708986 - DNA, 120 bp, Artificial Sequence
  ENSG00000196724_9 (sequence is synthesized)
tgggaaatcttttagtcataagggcagccttgttcagcatcagcgagttcacactgggaaaagaccttatgaatgtggagaatgtgggaaatcttttagtcataagggcagccttgttca

SEQ ID NO: 708987 - DNA, 120 bp, Artificial Sequence
  ENSG00000196724_10 (sequence is synthesized)
gcatcagcgagttcatactggagaaagaccttatgagtgtggagaatgtgggaaatcttttagtcaaaatggtactctcattaaacatcaacgagttcacactggagaaagaccttatga

SEQ ID NO: 708988 - DNA, 120 bp, Artificial Sequence
  ENSG00000196724_11 (sequence is synthesized)
gtgtgaagaatgtgggaaatgttttactcagaagggcaatctcattcaacatcaacgaggtcacactagtgaaagaccttatgagtgtgaagaatgtggaaaatgttttagtcaaaaggg

SEQ ID NO: 708989 - DNA, 120 bp, Artificial Sequence
  ENSG00000196724_12 (sequence is synthesized)
caccctaactgaacatcatcgagttcacactagagaacgaccttatgagtgtggagaatgtgggaaatcttttagtcgaaagggacaccttaggaaccatcagcgaggtcacactggaga

SEQ ID NO: 708990 - DNA, 120 bp, Artificial Sequence
  ENSG00000196724_13 (sequence is synthesized)
aagaccttacgagtgtggagaatgtgggaaatcttttagtcgaaagggcaacctcattcagcatcagcgaagccacactggagaaaggccttatgagtgtagagagtgtaggaaattatt

SEQ ID NO: 708991 - DNA, 120 bp, Artificial Sequence
  ENSG00000196724_14 (sequence is synthesized)
taggggcaagtcccacctcattgaacaccagagagttcacactggagaaaggccatatgaatgtaatgaatgtgggaaatcatttcaagacagctctgggtttcgtgttcatcagagagt

SEQ ID NO: 708992 - DNA, 120 bp, Artificial Sequence
  ENSG00000196724_15 (sequence is synthesized)
gaaaggccttatgaatgtggagaatgtggaaagtcatttcatcagagctcttccctccttcgacatcagaaaactcacactgcagaaagaccttatgagtgcagagaatgtgggaaattc

SEQ ID NO: 708993 - DNA, 120 bp, Artificial Sequence
  ENSG00000196724_16 (sequence is synthesized)
ttctccagtctccttgaacacaggagagttcacactggagaaaggccttatgaatgcagggaatgtggaaaaacatttactcgaaggtctgcgcattttaaacatcagagacttcatact

SEQ ID NO: 708994 - DNA, 120 bp, Artificial Sequence
  ENSG00000196724_17 (sequence is synthesized)
cgaggaaagccttacgagtgcagcgaatgtgggaaatcctttgctgaaaccttcagtcttactgaacacaggagagtacacactggagaaaggccttatgagtgcagtgaatgtggaaaa

SEQ ID NO: 708995 - DNA, 120 bp, Artificial Sequence
  ENSG00000196724_18 (sequence is synthesized)
tcatttcatcgaagctcttctctccttcgacatcagagagttcacacagaaagaagtccttacaagtgaaaagaaatttgggaaattctttagctaaacctctgtgcatcttcttgatca

SEQ ID NO: 708996 - DNA, 120 bp, Artificial Sequence
  ENSG00000196724_19 (sequence is synthesized)
gagggttcttactggatcaggaccttatgagtgtgacaaacgtgggatattctttatgcagaagtcttgttttattacatacagaagagctcccactgcagaagggcctcttgagtgcga

SEQ ID NO: 708997 - DNA, 120 bp, Artificial Sequence
  ENSG00000196724_20 (sequence is synthesized)
tgaatgtgagaaagccttctgccttctgtcattggataacagattgttctcataaggaaaacactgtacacgtacaggaaatattatttcttgtaaaacataacactggaggagatgcct

SEQ ID NO: 708998 - DNA, 120 bp, Artificial Sequence
  ENSG00000196724_21 (sequence is synthesized)
tatgacggagccatctgcctaaattgacataccttcagcatctgcataaactcaattatgttggagctgtgtggcatttttcaccctgccgggttcccttgccagacatgatgtcggtta

SEQ ID NO: 708999 - DNA, 120 bp, Artificial Sequence
  ENSG00000196724_22 (sequence is synthesized)
tctggcaaaagccattttatgtcggccacgaggcaggtgttcactgtgcatcattcattcaccccatgatgttctggaagtaaaccttggttgtctttcgttggccagaggaattgaatg

SEQ ID NO: 709000 - DNA, 72 bp, Artificial Sequence
  ENSG00000196724_23 (sequence is synthesized)
cactgcagatctcaagggcatttccctttgcccacctcaccttttcatatttggtaaactgtatgcatttgc

SEQ ID NO: 709001 - DNA, 120 bp, Artificial Sequence
  ENSG00000196724_24 (sequence is synthesized)
cacctcaccttttcatatttggtaaactgtatgcatttgcctccagcccaagattataaatatgaactgattatgatctgcatgttctctctttgggttcaagcatttccttacagaaga

SEQ ID NO: 709002 - DNA, 120 bp, Artificial Sequence
  ENSG00000196724_25 (sequence is synthesized)
gccaccgtggaagtcatgggtaaatatgtgttgaattggtaactccctcttggagaatttcttgtgaattacacagcaataggggaactcatttaactggagacataatctcaatttgta

SEQ ID NO: 709003 - DNA, 120 bp, Artificial Sequence
  ENSG00000196724_26 (sequence is synthesized)
aagtgtggcccattttctaacatttttattttgcataccctcccctctcttctcgattgatgaaactaacaaagaggttaataaaagcccatctcgtcatgtacagggactcatgccttt

SEQ ID NO: 709004 - DNA, 120 bp, Artificial Sequence
  ENSG00000196724_27 (sequence is synthesized)
aattccagtgttttgggagactaaggcaagaacatcctggaggccaggagttcgacactgtataacagatatatctgacagcagtaactcaagcacaccctaagaatgaccctgtggtct

SEQ ID NO: 709005 - DNA, 120 bp, Artificial Sequence
  ENSG00000196724_28 (sequence is synthesized)
aagaagagtgttggttcagcgttccaaacgaagaaatccaggagtggccaacctggaggtttctgaacccctggcctgttccttggaatgaggccctttgttttgagctaggcggagggt

SEQ ID NO: 709006 - DNA, 120 bp, Artificial Sequence
  ENSG00000196724_29 (sequence is synthesized)
gataagtgaaaatactatataaactgcatgcttctttcaaatgatagtggtttttttgtccagcctgccgctcctggactgccctgtatctaagtcctcaataaaccctatgtctcattt

SEQ ID NO: 709007 - DNA, 120 bp, Artificial Sequence
  ENSG00000196724_30 (sequence is synthesized)
cagaggaaagtcgtcattgtagaggggtcaccaagtgcaacacagaagtggaatagggccatggatatctaaagccccacctggttctgtggggatgtggagccatgcaagaaggccttc

SEQ ID NO: 709008 - DNA, 120 bp, Artificial Sequence
  ENSG00000196724_31 (sequence is synthesized)
aaggaacccacagagggaattagagggtgttccattccctcactggccttattccccattcacatgttctctagcttgtgatgtcctgggactcttacttgccattttttcagtcctttg

SEQ ID NO: 709009 - DNA, 120 bp, Artificial Sequence
  ENSG00000196724_32 (sequence is synthesized)
atctgagaacactggagaaaccctaaacccagaatcctaagtccatgacacaggatgtatggaggcatcatctggctgcaaagaagagaacacactgtgtttgagggaggaggaaggagg

SEQ ID NO: 709010 - DNA, 120 bp, Artificial Sequence
  ENSG00000196724_33 (sequence is synthesized)
agcgttctctggtagcgaccattttggttaatgttgggtgtgtttctgcggtttgtgaggtcacctcatcctaacccgaatcctgaagcagcgagagagcggcgactgttcacaggtctg

SEQ ID NO: 709011 - DNA, 120 bp, Artificial Sequence
  ENSG00000196724_34 (sequence is synthesized)
gacactgaggcgttcgcgggagaggtccttgtttctgacacctgtgggatgcggtggggagagcgacaggcacagggaccggcgcgggctatggcctggaggacagacccgggaggatgg

SEQ ID NO: 709012 - DNA, 120 bp, Artificial Sequence
  ENSG00000196724_35 (sequence is synthesized)
aacctggggtccacaggcgcctgtagggaacaacgtgtgaggcgaagcttctcctggaagagcaggctgggggctgtgtattcgctgtgaagacgctagaagccatggagagtttcgaag

SEQ ID NO: 709013 - DNA, 120 bp, Artificial Sequence
  ENSG00000196724_36 (sequence is synthesized)
agcgaccattttggttaatgttgggtgtgtttctgcggtttgtgaggtcacctcatcctaacccgaatcctgaagcagcgagagagcggcgactgttcacaggcatcatctggctgcaaa

SEQ ID NO: 709014 - DNA, 120 bp, Artificial Sequence
  ENSG00000196724_37 (sequence is synthesized)
gtgtttctgcggtttgtgaggtgagaggcgctggagctatgggtccgaaccgcggtgtctgaacccagaaggtcacctcatcctaacccgaatcctgaagcagcgagagagcggcgactg

SEQ ID NO: 709015 - DNA, 120 bp, Artificial Sequence
  ENSG00000196730_0 (sequence is synthesized)
cttcagattgcaaaccttcttgccttcaagcctcggctccaacaccagtccggcagaggaacccagtctaatgaggactggagactgatgcatgagggggctacggaggcgcaggagcgg

SEQ ID NO: 709016 - DNA, 120 bp, Artificial Sequence
  ENSG00000196730_1 (sequence is synthesized)
tggtgatggtctgggaagcggagctgaagtgccctgggctttggtgaggcgtgacagtttatcatgaccgtgttcaggcaggaaaacgtggatgattactacgacaccggcgaggaactt

SEQ ID NO: 709017 - DNA, 120 bp, Artificial Sequence
  ENSG00000196730_2 (sequence is synthesized)
ggcagtggacagtttgcggttgtgaagaaatgccgtgagaaaagcaccggcctccagtatgccgccaaattcatcaagaaaaggaggactaagtccagccggcggggtgtgagccgcgag

SEQ ID NO: 709018 - DNA, 120 bp, Artificial Sequence
  ENSG00000196730_3 (sequence is synthesized)
gacatcgagcgggaggtcagcatcctgaaggagatccagcaccccaatgtcatcaccctgcacgaggtctatgagaacaagacggacgtcatcctgatcttggaactcgttgcaggtggc

SEQ ID NO: 709019 - DNA, 120 bp, Artificial Sequence
  ENSG00000196730_4 (sequence is synthesized)
gagctgtttgacttcttagctgaaaaggaatctttaactgaagaggaagcaactgaatttctcaaacaaattcttaatggtgtttactacctgcactcccttcaaatcgcccactttgat

SEQ ID NO: 709020 - DNA, 120 bp, Artificial Sequence
  ENSG00000196730_5 (sequence is synthesized)
cttaagcctgagaacataatgcttttggatagaaatgtccccaaacctcggatcaagatcattgactttgggttggcccataaaattgactttggaaatgaatttaaaaacatatttggg

SEQ ID NO: 709021 - DNA, 120 bp, Artificial Sequence
  ENSG00000196730_6 (sequence is synthesized)
actccagagtttgtcgctcctgagatagtcaactatgaacctcttggtcttgaggcagatatgtggagtatcggggtaataacctatatcctcctaagtggggcctccccatttcttgga

SEQ ID NO: 709022 - DNA, 120 bp, Artificial Sequence
  ENSG00000196730_7 (sequence is synthesized)
gacactaagcaagaaacgttagcaaatgtatccgctgtcaactacgaatttgaggatgaatacttcagtaataccagtgccctagccaaagatttcataagaagacttctggtcaaggat

SEQ ID NO: 709023 - DNA, 120 bp, Artificial Sequence
  ENSG00000196730_8 (sequence is synthesized)
ccaaagaagagaatgacaattcaagatagtttgcagcatccctggatcaagcctaaagatacacaacaggcacttagtagaaaagcatcagcagtaaacatggagaaattcaagaagttt

SEQ ID NO: 709024 - DNA, 120 bp, Artificial Sequence
  ENSG00000196730_9 (sequence is synthesized)
gcagcccggaaaaaatggaaacaatccgttcgcttgatatcactgtgccaaagattatccaggtcattcctgtccagaagtaacatgagtgttgccagaagcgatgatactctggatgag

SEQ ID NO: 709025 - DNA, 120 bp, Artificial Sequence
  ENSG00000196730_10 (sequence is synthesized)
gaagactcctttgtgatgaaagccatcatccatgccatcaacgatgacaatgtcccaggcctgcagcaccttctgggctcattatccaactatgatgttaaccaacccaacaagcacggg

SEQ ID NO: 709026 - DNA, 120 bp, Artificial Sequence
  ENSG00000196730_11 (sequence is synthesized)
acacctccattactcattgctgctggctgtgggaatattcaaatactacagttgctcattaaaagaggctcgagaatcgatgtccaggataagggcgggtccaatgccgtctactgggct

SEQ ID NO: 709027 - DNA, 120 bp, Artificial Sequence
  ENSG00000196730_12 (sequence is synthesized)
gctcggcatggccacgtcgataccttgaaatttctcagtgagaacaaatgccctttggatgtgaaagacaagtctggagagatggccctccacgtggcagctcgctatggccatgctgac

SEQ ID NO: 709028 - DNA, 120 bp, Artificial Sequence
  ENSG00000196730_13 (sequence is synthesized)
gtggctcagttactgtgcagcttcggctcaaatcccaatatccaggacaaggaagaagaaacccccctgcactgtgctgcttggcacggctattactctgtggccaaagccctttgtgaa

SEQ ID NO: 709029 - DNA, 120 bp, Artificial Sequence
  ENSG00000196730_14 (sequence is synthesized)
gccggctgtaacgtgaacatcaagaaccgagaaggagagacgcccctcctgacagcctctgccaggggctaccacgacatcgtggagtgtctggccgaacatggagccgaccttaatgct

SEQ ID NO: 709030 - DNA, 120 bp, Artificial Sequence
  ENSG00000196730_15 (sequence is synthesized)
tgcgacaaggacggacacattgcccttcatctggctgtaagacggtgtcagatggaggtaatcaagactctcctcagccaagggtgtttcgtcgattatcaagacaggcacggcaatact

SEQ ID NO: 709031 - DNA, 120 bp, Artificial Sequence
  ENSG00000196730_16 (sequence is synthesized)
cccctccatgtggcatgtaaagatggcaacatgcctatcgtggtggccctctgtgaagcaaactgcaatttggacatctccaacaagtatgggcgaacgcctctgcaccttgcggccaac

SEQ ID NO: 709032 - DNA, 120 bp, Artificial Sequence
  ENSG00000196730_17 (sequence is synthesized)
aacggaatcctagacgtggtccggtatctctgtctgatgggagccagcgttgaggcgctgaccacggacggaaagacggcagaagatcttgctagatcggaacagcacgagcacgtagca

SEQ ID NO: 709033 - DNA, 120 bp, Artificial Sequence
  ENSG00000196730_18 (sequence is synthesized)
ggtctccttgcaagacttcgaaaggatacgcaccgaggactcttcatccagcagctccgacccacacagaacctgcagccaagaattaagctcaagctgtttggccactcgggatccggg

SEQ ID NO: 709034 - DNA, 120 bp, Artificial Sequence
  ENSG00000196730_19 (sequence is synthesized)
aaaaccacccttgtagaatctctcaagtgtgggctgctgaggagctttttcagaaggcgtcggcccagactgtcttccaccaactccagcaggttcccaccttcacccctggcttctaag

SEQ ID NO: 709035 - DNA, 120 bp, Artificial Sequence
  ENSG00000196730_20 (sequence is synthesized)
cccacagtctcagtgagcatcaacaacctgtacccaggctgcgagaacgtgagtgtgaggagccgcagcatgatgttcgagccgggtcttaccaaagggatgctggaggtgtttgtggcc

SEQ ID NO: 709036 - DNA, 120 bp, Artificial Sequence
  ENSG00000196730_21 (sequence is synthesized)
ccgacccaccacccgcactgctcggccgatgaccagtccaccaaggccatcgacatccagaacgcttatttgaatggagttggcgatttcagcgtgtgggagttctctggaaatcctgtg

SEQ ID NO: 709037 - DNA, 120 bp, Artificial Sequence
  ENSG00000196730_22 (sequence is synthesized)
tatttctgctgttatgactattttgctgcaaatgatcccacgtcaatccatgttgttgtctttagtctagaagagccctatgagatccagctgaaccaagtgattttctggctcagtttc

SEQ ID NO: 709038 - DNA, 120 bp, Artificial Sequence
  ENSG00000196730_23 (sequence is synthesized)
ttcctcgaccggctggaggcgagtttggatatgacaaagacacatcgttgctgaaagagattaggaacaggtttggaaatgatcttcacatttcaaataagctgtttgttctggatgctg

SEQ ID NO: 709039 - DNA, 120 bp, Artificial Sequence
  ENSG00000196730_24 (sequence is synthesized)
gggcttctgggtcaaaggacatgaaggtacttcgaaatcatctgcaagaaatacgaagccagattgtttcggtctgtcctcccatgactcacctgtgtgagaaaatcatctccacgctgc

SEQ ID NO: 709040 - DNA, 120 bp, Artificial Sequence
  ENSG00000196730_25 (sequence is synthesized)
cttcctggaggaagctcaatggacccaaccagctgatgtcgctgcagcagtttgtgtacgacgtgcaggaccagctgaaccccctggccagcgaggaggacctcaggcgcattgctcagc

SEQ ID NO: 709041 - DNA, 120 bp, Artificial Sequence
  ENSG00000196730_26 (sequence is synthesized)
agctccacagcacaggcgagatcaacatcatgcaaagtgaaacagttcaggacgtgctgctcctggacccccgctggctctgcacaaacgtcctggggaagttgctgtccgtggagaccc

SEQ ID NO: 709042 - DNA, 120 bp, Artificial Sequence
  ENSG00000196730_27 (sequence is synthesized)
cacgggcgctgcaccactaccggggccgctacaccgtggaggacatccagcgcctggtgcccgacagcgacgtggaggagctgctgcagatcctcgatgccatggacatctgcgcccggg

SEQ ID NO: 709043 - DNA, 120 bp, Artificial Sequence
  ENSG00000196730_28 (sequence is synthesized)
acctgagcagcgggaccatggtggacgtcccagccctgatcaagacagacaacctgcaccgctcctgggctgatgaggaggacgaggtgatggtgtatggtggcgtgcgcatcgtgcccg

SEQ ID NO: 709044 - DNA, 120 bp, Artificial Sequence
  ENSG00000196730_29 (sequence is synthesized)
tggaacacctcacccccttcccatgtggcatctttcacaaggtccaggtgaacctgtgccggtggatccaccagcaaagcacagagggcgacgcggacatccgcctgtgggtgaatggct

SEQ ID NO: 709045 - DNA, 120 bp, Artificial Sequence
  ENSG00000196730_30 (sequence is synthesized)
gcaagctggccaaccgtggggccgagctgctggtgctgctggtcaaccacggccagggcattgaggtccaggtccgcggcctggagacggagaagatcaagtgctgcctgctgctggact

SEQ ID NO: 709046 - DNA, 120 bp, Artificial Sequence
  ENSG00000196730_31 (sequence is synthesized)
cggtgtgcagcaccattgagaacgtcatggccaccacgctgccagggctcctgaccgtgaagcattacctgagcccccagcagctgcgggagcaccatgagcccgtcatgatctaccagc

SEQ ID NO: 709047 - DNA, 120 bp, Artificial Sequence
  ENSG00000196730_32 (sequence is synthesized)
cacgggacttcttccgggcacagactctgaaggaaacctcactgaccaacaccatgggggggtacaaggaaagcttcagcagcatcatgtgcttcgggtgtcacgacgtctactcacagg

SEQ ID NO: 709048 - DNA, 120 bp, Artificial Sequence
  ENSG00000196730_33 (sequence is synthesized)
ccagcctcggcatggacatccatgcatcagacctgaacctcctcactcggaggaaactgagtcgcctgctggacccgcccgaccccctggggaaggactggtgccttctcgccatgaact

SEQ ID NO: 709049 - DNA, 120 bp, Artificial Sequence
  ENSG00000196730_34 (sequence is synthesized)
taggcctccctgacctcgtggcaaagtacaacaccagtaacggggctcccaaggatttcctccccagccccctccacgccctgctgcgggaatggaccacctaccctgagagcacagtgg

SEQ ID NO: 709050 - DNA, 120 bp, Artificial Sequence
  ENSG00000196730_35 (sequence is synthesized)
gcaccctcatgtccaaactgagggagctgggtcgccgggatgccgcagactttttgctgaaggcatcctctgtgttcaaaatcaacctggatggcaatggccaggaggcctatgcctcga

SEQ ID NO: 709051 - DNA, 120 bp, Artificial Sequence
  ENSG00000196730_36 (sequence is synthesized)
gctgcaacagcggcacctcttacaattccattagctctgttgtatcccggtgagggcagcctctggcttgggcagggtctgtttggactgcagaagcaagggggtgatgtagcccatcct

SEQ ID NO: 709052 - DNA, 120 bp, Artificial Sequence
  ENSG00000196730_37 (sequence is synthesized)
tccctttggagatgctgagggtgtttcttcctgcacccacagccagggggatgccactcctccctccggcttgacctgtttctctgccgctacctccctccccgtctcattccgttgtct

SEQ ID NO: 709053 - DNA, 120 bp, Artificial Sequence
  ENSG00000196730_38 (sequence is synthesized)
gtggatggtcattgcagtttaagagcagaacagatcttttactttggccgcttgaaaagctagtgtacctcctctcagtgttttggactccatctctcatcctccagtaccttgcttctt

SEQ ID NO: 709054 - DNA, 120 bp, Artificial Sequence
  ENSG00000196730_39 (sequence is synthesized)
actgataattttgctggaattcctaacttttcaatgacattttttttaactactatattgattgtcctttaaaaaagaaaagtgcatatttatccaaaatgtgtatttcttatacgcttt

SEQ ID NO: 709055 - DNA, 120 bp, Artificial Sequence
  ENSG00000196730_40 (sequence is synthesized)
tctttgttataccatttcctcagcttatctcttttatatttgtaggagaaactcccatgtatggaatcccactgtatgatttataaacagacaatatgtgagtgccttttgcagaagagg

SEQ ID NO: 709056 - DNA, 120 bp, Artificial Sequence
  ENSG00000196730_41 (sequence is synthesized)
gtgtgtttgaaatcatcggagtcagccaggagctgtcaccaaggaaacgctacctctctgtcccttgctgtatgctgatcatcgccagaggtgcttcaccctgagttttgttttgtattg

SEQ ID NO: 709057 - DNA, 120 bp, Artificial Sequence
  ENSG00000196730_42 (sequence is synthesized)
ttttctgacagtttttctgttttgtttggcaaggaaaggggagaagggaatcctcctccagggtgattttatgatcagtgttgttgctctaggaagacatttttccgtttgcttttgttc

SEQ ID NO: 709058 - DNA, 120 bp, Artificial Sequence
  ENSG00000196730_43 (sequence is synthesized)
caatgtcaatgtgaacgtccacatgaaacctacacactgtcatgcttcatcattccctctcatctcaggtagaaggttgacacagttgtagggttacagagacctatgtaagaattcaga

SEQ ID NO: 709059 - DNA, 120 bp, Artificial Sequence
  ENSG00000196730_44 (sequence is synthesized)
agacccctgactcatcatttgtggcagtcccttataattggtgcatagcagatggtttccacatttagatcctggtttcataacttcctgtacttgaagtctaaaagcagaaaataaagg

SEQ ID NO: 709060 - DNA, 120 bp, Artificial Sequence
  ENSG00000196730_45 (sequence is synthesized)
aagcaagttttcttccatgattttaaattgtgatcgagttttaaattgataggagggaacatgtcctaattcttctgtcctgagaagcatgtaatgttaatgttatatcatatgtatata

SEQ ID NO: 709061 - DNA, 120 bp, Artificial Sequence
  ENSG00000196730_46 (sequence is synthesized)
gcttcggagtgtgaggaggacagccggaccgagccaacgccggggactttgttccctccgcggaggggactcggcaactcgcagcggcagggtctggggccggcgcctgggagggatctg

SEQ ID NO: 709062 - DNA, 120 bp, Artificial Sequence
  ENSG00000196730_47 (sequence is synthesized)
cgccccccactcactccctagctgtgttcccgccgccgccccggctagtctccggcgctggcgcctatggtcggcctccgacagcgctccggagggaccgggggagctcccaggcgcccg

SEQ ID NO: 709063 - DNA, 120 bp, Artificial Sequence
  ENSG00000196730_48 (sequence is synthesized)
agagcgcgccagcgagcccggagcgcggagctgggaggagcagcgagcgccgcgcagaacccgcagcgccggcctggcagggcagctcggaggactggagactgatgcatgagggggcta

SEQ ID NO: 709064 - DNA, 120 bp, Artificial Sequence
  ENSG00000196730_49 (sequence is synthesized)
ggcgcgggggtgccaccgttgccgcaggctggagagagattgctcccagtgaggcgcgtaccgtctgggcgagggcttcattcttccgcggcgtccctggaggactggagactgatgcat

SEQ ID NO: 709065 - DNA, 120 bp, Artificial Sequence
  ENSG00000196730_50 (sequence is synthesized)
atgtgggcttaatactcactgtgtggtggacaccccaacctcaggtccccatcctagccactataggggcatctgcccaaggtgggtgggtggaaccaaaggggacagagtggaaccagg

SEQ ID NO: 709066 - DNA, 120 bp, Artificial Sequence
  ENSG00000196730_51 (sequence is synthesized)
caggcctgggtgtaggccttgggttctggtctccatagcctgctcacagatgtggctctgaatcaccggctccttttcttctgcagtctggagagatggccctccacgtggcagctcgct

SEQ ID NO: 709067 - DNA, 120 bp, Artificial Sequence
  ENSG00000196730_52 (sequence is synthesized)
gcctggcagggcagctcggaggtgggtgggccgcgccgccagcccgcttgcagggtccccattggccgcctgccggccgccctccgcccaaaaggcggcaaggagccgagaggctgcttc

SEQ ID NO: 709068 - DNA, 120 bp, Artificial Sequence
  ENSG00000196730_53 (sequence is synthesized)
aagtgatctaggggtctagagggaccacaagactcctcagtttgtttccctaagataacaaacttgaatgcagcaaactgtaattaccccgtctcttctctgttccaaagattctgtgaa

SEQ ID NO: 709069 - DNA, 120 bp, Artificial Sequence
  ENSG00000196730_54 (sequence is synthesized)
cttttctatattgtatttaatagttaatattaatttatggcatataacaaaattcatgagttgatcaattgactttggtctctaaataatttttagcttttttagctttagagcaggtac

SEQ ID NO: 709070 - DNA, 120 bp, Artificial Sequence
  ENSG00000196730_55 (sequence is synthesized)
agtgatgttcactgaatccgagacaattctcattgaggactgacattggcaacacgctattaatttttagataaacaaagaaatagatgttttacttatttctatcatccgctgtgttgt

SEQ ID NO: 709071 - DNA, 120 bp, Artificial Sequence
  ENSG00000196730_56 (sequence is synthesized)
tttggaaatgaatttaaaaacatatttgggactccagagtttgtcgctcctgagatagtcaactatgaacctcttggtcttgaggcagatatgtggtaaggagtatgtccttggtgttgt

SEQ ID NO: 709072 - DNA, 120 bp, Artificial Sequence
  ENSG00000196730_57 (sequence is synthesized)
cccccgctgtgagagacatgatgtcatggaaggcagggtggtgcagtctaatgatgacactctgcacctcttcaagcgagtagttcacctggtctcagaaccatgtttcttatcaaaaac

SEQ ID NO: 709073 - DNA, 120 bp, Artificial Sequence
  ENSG00000196730_58 (sequence is synthesized)
tttagatattcctgggcacccctatgaattcagtacagttccctgggttaccttggcacacaatttgggaaccataggcacaaacaaggcttatgggcttgtcctggtattttcactaat

SEQ ID NO: 709074 - DNA, 120 bp, Artificial Sequence
  ENSG00000196730_59 (sequence is synthesized)
taggatgtcttcaatatctgtcttccatgtcttcttccctggctgtgtctaaatttgaactatggtgcagatcttgctggaactctggaccttgagcccttgactcctgtctctttcagg

SEQ ID NO: 709075 - DNA, 120 bp, Artificial Sequence
  ENSG00000196730_60 (sequence is synthesized)
ccagcacagcaggaaacttacttaagttatctttgaagttgtattttgaagctcctcttttaattgcaaagtacttggaaaggttctgcctggctggcctgccccagtggagagcaagtt

SEQ ID NO: 709076 - DNA, 120 bp, Artificial Sequence
  ENSG00000196730_61 (sequence is synthesized)
cctgtgtttatgtgaaaaagtctcagtctttttccttatttgagaatgagcaaaatgaggctctagacagccaggttttaggaacagtggtccctgtcctgtggtttacatgtcagtcgg

SEQ ID NO: 709077 - DNA, 120 bp, Artificial Sequence
  ENSG00000196730_62 (sequence is synthesized)
tataaatgcatcagctccctatctgttttcttctctatttggacttggaaatcatttagcatgtttgcagttgccgtgcctggttttccttctcccactctctctataataaaccactcc

SEQ ID NO: 709078 - DNA, 120 bp, Artificial Sequence
  ENSG00000196730_63 (sequence is synthesized)
acaccgagacgtgctctttgtccacctggcttgcttctcacacctgctatgcttgtttctgcctcagacccacggaattggcgtatggaacacacacagctctccttttcagagaaaaga

SEQ ID NO: 709079 - DNA, 120 bp, Artificial Sequence
  ENSG00000196730_64 (sequence is synthesized)
taaaatggatttaaactaactttctctaactattaaatctttcttaggtaagtacagttgtatcccagctctagagttaatgtgctgggtgggtttttacaaataaaaaatctaaaacct

SEQ ID NO: 709080 - DNA, 120 bp, Artificial Sequence
  ENSG00000196730_65 (sequence is synthesized)
gtctccctcgccctttctggagatgcgcaaatcatagagaaaagagttactaacccagcggtaaaccgcctgatccaagggcctgggggtggaggagaggcagcagttcagggctagatt

SEQ ID NO: 709081 - DNA, 120 bp, Artificial Sequence
  ENSG00000196730_66 (sequence is synthesized)
cattctggtccactttgagcaattttccttgtggcctaggagataggcttatcctgtcgttggccatgctggggccttctagggtcacagtgcacagcaggcgtggggccttcatctctg

SEQ ID NO: 709082 - DNA, 120 bp, Artificial Sequence
  ENSG00000196730_67 (sequence is synthesized)
tggcatgttgcacttgtacctggagagtcggcctgggcatgaggccaacacaccgccctcacctgggcaggagaggcagccaggtaggaggacccaccccctgaagcagttccctctctg

SEQ ID NO: 709083 - DNA, 120 bp, Artificial Sequence
  ENSG00000196730_68 (sequence is synthesized)
tacatgtcccttttctccccagtggcaggggaacagtgacagcttctgcctctcaggggtgacttcaaggactgaggcttgcagagagcactgagagctgggtcgagcacatattatgag

SEQ ID NO: 709084 - DNA, 120 bp, Artificial Sequence
  ENSG00000196730_69 (sequence is synthesized)
gtggtgttcaataaatacttgctgtcatcgtgtatgttcatggtgtagatacagaaacaaatttattcagtgtgaaactgcagcctatgaaaaatctctaaataaaaagcaagcataaaa

SEQ ID NO: 709085 - DNA, 120 bp, Artificial Sequence
  ENSG00000196734_0 (sequence is synthesized)
gttctgaacttctatgtccttacaacaaggtaatctagaaaattcttccaagagagaatgactgtttccccttgagaaacaattttatttccaaacccctttctagattgttttcatgat

SEQ ID NO: 709086 - DNA, 120 bp, Artificial Sequence
  ENSG00000196734_1 (sequence is synthesized)
tcaggtgtgtagttgaagcagaatgtctcctctacatactacatgcttgattttgagaatactttcttaatatcttttggcttcggttttctaattataaaatagttgaaaatgctttat

SEQ ID NO: 709087 - DNA, 120 bp, Artificial Sequence
  ENSG00000196734_2 (sequence is synthesized)
gattttataagtatataaaaagcattaggttcaaaacagaggctataagtgtgtttagccaactattagacacaatgaaacttcccgtgattaattagctacaactacactaagcagttc

SEQ ID NO: 709088 - DNA, 120 bp, Artificial Sequence
  ENSG00000196734_3 (sequence is synthesized)
atcaaaatgtagggattagaaatgatgctgaaagggcaagaataggccggggtggcctctacctgggtctaacttgctgtctgactctctctcagctcctgaacacccgcaccaagatgt

SEQ ID NO: 709089 - DNA, 120 bp, Artificial Sequence
  ENSG00000196734_4 (sequence is synthesized)
tcccaagtgcctcacccctagatgccccccaaagtgtccccctaagtgtcctccagtctcttcctgctgcagtgtcagctccggaggctgctgtggctccagctctgggggaagctgtgg

SEQ ID NO: 709090 - DNA, 120 bp, Artificial Sequence
  ENSG00000196734_5 (sequence is synthesized)
ctccagctctgggggttgctgcagttctgggggaggtggctgctgcctgagccaccacaggcgccgtaggtcccactgccacagaccccagagctctggctgctgcagccagccctccgg

SEQ ID NO: 709091 - DNA, 120 bp, Artificial Sequence
  ENSG00000196734_6 (sequence is synthesized)
gggctccagctgctgtggaggagggagtggccagcactctggaggctgctgctaaagtggatcctgagcctagaagaacacaaatggccaaatatttcccttccgtcttccttctccttc

SEQ ID NO: 709092 - DNA, 120 bp, Artificial Sequence
  ENSG00000196734_7 (sequence is synthesized)
tgggcctgcccatgttgttgagaggtcttggtgagggctcaactcaagcatagaggattcttctgtcttggagttcagaggcccaaaacttctcccccaaagccaagccatttaatgacc

SEQ ID NO: 709093 - DNA, 120 bp, Artificial Sequence
  ENSG00000196734_8 (sequence is synthesized)
tcagtttgcgtatgtgtggttgctctgggaagcccaaagcacagacctatatccctttgcagcttgtctttttgcatagctcagcctgatgtgaaacaataaaaccagaaatatgcattc

SEQ ID NO: 709094 - DNA, 120 bp, Artificial Sequence
  ENSG00000196735_0 (sequence is synthesized)
acaattactctacagctcagaacaccaactgctgaggctgccttgggaagaggatgatcctaaacaaagctctgctgctgggggccctcgctctgaccaccgtgatgagcccctgtggag

SEQ ID NO: 709095 - DNA, 120 bp, Artificial Sequence
  ENSG00000196735_1 (sequence is synthesized)
gtgaagacattgtggctgaccacgttgcctcttgtggtgtaaacttgtaccagttttacggtccctctggccagtacacccatgaatttgatggagatgagcagttctacgtggacctgg

SEQ ID NO: 709096 - DNA, 120 bp, Artificial Sequence
  ENSG00000196735_2 (sequence is synthesized)
agaggaaggagactgcctggcggtggcctgagttcagcaaatttggaggttttgacccgcagggtgcactgagaaacatggctgtggcaaaacacaacttgaacatcatgattaaacgct

SEQ ID NO: 709097 - DNA, 120 bp, Artificial Sequence
  ENSG00000196735_3 (sequence is synthesized)
acaactctaccgctgctaccaatgaggttcctgaggtcacagtgttttccaagtctcccgtgacactgggtcagcccaacaccctcatttgtcttgtggacaacatctttcctcctgtgg

SEQ ID NO: 709098 - DNA, 120 bp, Artificial Sequence
  ENSG00000196735_4 (sequence is synthesized)
tcaacatcacatggctgagcaatgggcagtcagtcacagaaggtgtttctgagaccagcttcctctccaagagtgatcattccttcttcaagatcagttacctcaccttcctcccttctg

SEQ ID NO: 709099 - DNA, 120 bp, Artificial Sequence
  ENSG00000196735_5 (sequence is synthesized)
ctgatgagatttatgactgcaaggtggagcactggggcctggaccagcctcttctgaaacactgggagcctgagattccagcccctatgtcagagctcacagagactgtggtctgtgccc

SEQ ID NO: 709100 - DNA, 120 bp, Artificial Sequence
  ENSG00000196735_6 (sequence is synthesized)
ggggttgtctgtgggcctcatgggcattgtggtgggcactgtcttcatcatccaaggcctgcgttcagttggtgcttccagacaccaagggccattgtgaatcccatcctggaagggaag

SEQ ID NO: 709101 - DNA, 120 bp, Artificial Sequence
  ENSG00000196735_7 (sequence is synthesized)
gtgcatcgccatctacaggagcagaagaatggacttgctaaatgacctagcactattctctggcccgatttatcatatcccttttctcctccaaatatttctcctctcaccttttctctg

SEQ ID NO: 709102 - DNA, 120 bp, Artificial Sequence
  ENSG00000196735_8 (sequence is synthesized)
ggacttaagctgctatatcccctcagagctcacaaatgcctttacattctttccctgacctcctgattttttttttcttttctcaaatgttacctacaaagacatgcctggggtaagcca

SEQ ID NO: 709103 - DNA, 120 bp, Artificial Sequence
  ENSG00000196735_9 (sequence is synthesized)
cccggctacctaattcctcagtaacctccatctaaaatctccaaggaagcaataaattccttttatgagatctatgtcaaatttttccatctttcatccagggctgactgaaactatggc

SEQ ID NO: 709104 - DNA, 120 bp, Artificial Sequence
  ENSG00000196735_10 (sequence is synthesized)
taataattggggtactcttatgtttcaatccaatttaacctcatttcccagatcatttttcatgtccagtaacacagaagccaccaagtacagtatagcctgataatatgttgatttctt

SEQ ID NO: 709105 - DNA, 120 bp, Artificial Sequence
  ENSG00000196735_11 (sequence is synthesized)
agctgacattaatatttcttgcttccttgtgttcccacccttggcactgccacccacccctcaattcaggcaacaatgaaattaatggataccgtctgcccttggcccagaattgttata

SEQ ID NO: 709106 - DNA, 120 bp, Artificial Sequence
  ENSG00000196735_12 (sequence is synthesized)
gcaaaaattttagaaccaaaaaataagtctgtactaatttcaatgtggcttttaaaagtatgacagagaaataagttaggataaaggaaatttgaatctcaaaaatatcaaaagtaaaaa

SEQ ID NO: 709107 - DNA, 120 bp, Artificial Sequence
  ENSG00000196735_13 (sequence is synthesized)
aagagcaaaataatatgaaaagtatttaacaaggaatataaagaatcatcaaagaaaatgttataaaacttctttgagaccacaagagatgatagagatggggtttcactgtgttagcga

SEQ ID NO: 709108 - DNA, 72 bp, Artificial Sequence
  ENSG00000196735_14 (sequence is synthesized)
tcctcatattattttttattgtgcagtttattcaagagagctttccagcacctgtgataagcctcagcccgc

SEQ ID NO: 709109 - DNA, 120 bp, Artificial Sequence
  ENSG00000196735_15 (sequence is synthesized)
ctgccggataatgagcccacatggattgagagaggcctcctatccctgccaaacctattgatgctacagagatgtgagggagcccacctgagaaaagctgaacctgcccagtacataaaa

SEQ ID NO: 709110 - DNA, 120 bp, Artificial Sequence
  ENSG00000196735_16 (sequence is synthesized)
accactcagctcagaacaccaactgctgaggctgccttgggaagaggatgatcctaaacaaagctctgctgctgggggccctcgctctgaccaccgtgatgagcccctgtggaggtgaag

SEQ ID NO: 709111 - DNA, 120 bp, Artificial Sequence
  ENSG00000196735_17 (sequence is synthesized)
ggagcactggggcctggaccagcctcttctgaaacactggggtaaggatgagtttcatcattttttgattctttcttgtctgtcaagttcagaacttcctgccttttactcctatatcca

SEQ ID NO: 709112 - DNA, 120 bp, Artificial Sequence
  ENSG00000196735_18 (sequence is synthesized)
tcctgccttttactcctatatccaaaaacttgttttccacacttcatgggtttcttttctgtctctcttttttttttgaaagaataaagcaaaaaaagcagagatttattgaaaatgaaa

SEQ ID NO: 709113 - DNA, 120 bp, Artificial Sequence
  ENSG00000196735_19 (sequence is synthesized)
gcctgccacttcatggttttctaatgatagacttcactcttctccctaagcctggggccttgagtctttgcagagccaaccctctaccccatcccatcccacacacatgcacatgagcac

SEQ ID NO: 709114 - DNA, 120 bp, Artificial Sequence
  ENSG00000196735_20 (sequence is synthesized)
cggcagtatgaaaggaaggaaagtgggagggcgttgtggacatgaatgtggttgaaagttgtaggggaattgggaagtggcatgatgatgacacaggagccccctcggacccattgatct

SEQ ID NO: 709115 - DNA, 120 bp, Artificial Sequence
  ENSG00000196735_21 (sequence is synthesized)
ggaagtcagaaaaacattagaataagacaataatgtgggtgtctgaaaaggaacaaatacttattcctcacatagggttagtgacaatgggaaaagggacgggagtagaagccacagaca

SEQ ID NO: 709116 - DNA, 120 bp, Artificial Sequence
  ENSG00000196735_22 (sequence is synthesized)
tatctaggagccctgaatagaggcgcagtctgcctcacctcctgaatgaagctgtactagataaccatgtagctttccctgtgccactctggcatgaaggagacagtatagtgaatatgg

SEQ ID NO: 709117 - DNA, 120 bp, Artificial Sequence
  ENSG00000196735_23 (sequence is synthesized)
ctacaggatgtttcttggaaacatgccaatatcttcagaaatccccagccctttcccctaacccctcctgactaaggaaagcatgagcttatgagagaaaccctaggaagaacaacacag

SEQ ID NO: 709118 - DNA, 120 bp, Artificial Sequence
  ENSG00000196735_24 (sequence is synthesized)
ttgagacaatgtagcagcagcagtgggtgctgtgtcctccactggattcgccatctccgaggagaaactctcacagaggaaatgggtcagcagcgacctcatggctctaaacagctatga

SEQ ID NO: 709119 - DNA, 120 bp, Artificial Sequence
  ENSG00000196735_25 (sequence is synthesized)
tttaattggagaaaaaatacaaaacattaatgcaataattgatacagtatagtttggtgcaaagaaccctaaatccaaatccaggactcagtactttgaagctagtattttaaactttat

SEQ ID NO: 709120 - DNA, 120 bp, Artificial Sequence
  ENSG00000196735_26 (sequence is synthesized)
aaatgtgtgaagtctctaacatttctggccttacttttctcatccacaatgtaggagtaataatactttccttgcagagttattgataaaatttgaataattttgatatttagtcaatgc

SEQ ID NO: 709121 - DNA, 120 bp, Artificial Sequence
  ENSG00000196735_27 (sequence is synthesized)
cttacacatagtacatgaacacataagaaaacattgtggttatatttataattaatttatttaaaagaatggatcatattatatgaaaagcacttttgtttttctcagcctcttaatgat

SEQ ID NO: 709122 - DNA, 120 bp, Artificial Sequence
  ENSG00000196735_28 (sequence is synthesized)
ttaggagattcaaatgtagagctatgggtgaatttcttttcatatgataattgaaggatatttttctttttccagaatgagagaggctgagattggattggtaagagaactcttagcact

SEQ ID NO: 709123 - DNA, 120 bp, Artificial Sequence
  ENSG00000196735_29 (sequence is synthesized)
agaagttgtaatatttgactttggttttcaactctctaagagggaatatattccctccttatggcccataagtgtttattcaaggtatatcatatacaacagatctttatgcctgtttac

SEQ ID NO: 709124 - DNA, 120 bp, Artificial Sequence
  ENSG00000196735_30 (sequence is synthesized)
tttggggaagaagtgaagatagttcaaggagaaaataatttaaaacacagactgggaatcagtaagcacaggaaatctgaaccagtgatgatcatgaaaatgtccatcacagagcacaga

SEQ ID NO: 709125 - DNA, 120 bp, Artificial Sequence
  ENSG00000196735_31 (sequence is synthesized)
tgattttcagggcaataaaactattctgtttgataccacaatggtgaaaaatgtcattatacatttgctcaaatccacagaatatataacaccaagagttagacttaatgtaaactatgg

SEQ ID NO: 709126 - DNA, 120 bp, Artificial Sequence
  ENSG00000196735_32 (sequence is synthesized)
actttgggtgataatgatgtgccaatgtaagttcataaattatagcaaatgtaccactcagatgggagatgttgctaatgggggaggctatgcatgtgtgggagcagagtgtatctggca

SEQ ID NO: 709127 - DNA, 120 bp, Artificial Sequence
  ENSG00000196735_33 (sequence is synthesized)
gcagtccccagcctttttggcagcagggaccagttttatggaagacaatttttccacagatagttgggggaatgggggtatgatctggggatgaaactgtgaaactattccacctcagat

SEQ ID NO: 709128 - DNA, 120 bp, Artificial Sequence
  ENSG00000196735_34 (sequence is synthesized)
ctattccacctcagatcaacaagcattagttagattctcataaggaacatgcaacctagatctcttgcatgcacagttaaaaatagggttcgcactcctatgagaatctaatgccaccac

SEQ ID NO: 709129 - DNA, 120 bp, Artificial Sequence
  ENSG00000196735_35 (sequence is synthesized)
ggggctcagttggtaatgctggctcacccactgcgtggtccagtttctaacaggccaccaactggtactggtccatggcccgggggttggggacctctgggatacctctgcaccttctgc

SEQ ID NO: 709130 - DNA, 120 bp, Artificial Sequence
  ENSG00000196735_36 (sequence is synthesized)
tcagtttttctgtgaacctacaaccgctttaaaataaggtctatttttaaaaaggaaaagagaaggtaaccaattatgatcctaaatgtgtaaaataaaaattttagtatgaaaaacagt

SEQ ID NO: 709131 - DNA, 120 bp, Artificial Sequence
  ENSG00000196735_37 (sequence is synthesized)
cacattaaaatgcacaacgtgctaagaagcttttagcaatagggtttcaaatatatttcatatacatttcaatgattcgtgaggcaagaacccagcattttggagttgtgtgcatttgtg

SEQ ID NO: 709132 - DNA, 120 bp, Artificial Sequence
  ENSG00000196735_38 (sequence is synthesized)
tgtgtgtgtgtgtgtgtgtgtgtctgtaatataaggggtatactgaatggcataatgaccagagtcatgcagaaatctacaaatgctgcccaactcagactccttcctcaagcagcactg

SEQ ID NO: 709133 - DNA, 120 bp, Artificial Sequence
  ENSG00000196735_39 (sequence is synthesized)
actgtggaaagcaaatttaatgatagcagtattttattaaaaggatgtattcaaaaaatatttacgtaatgttaaaatagcagaattaaaactaattctaaaaaataagagtaaatagtt

SEQ ID NO: 709134 - DNA, 120 bp, Artificial Sequence
  ENSG00000196735_40 (sequence is synthesized)
ctttttatcagctaaaaatgtagggcctactatcaatagggttacagatctacctgcctgatttaaaatcatgcaattcttaaacaattatttgagctatttgaattatttcagattaca

SEQ ID NO: 709135 - DNA, 120 bp, Artificial Sequence
  ENSG00000196735_41 (sequence is synthesized)
cacataaagtgtgacttcattaatacttaatatcacactatttaaaatttacaaaattagtgggtcacagaggctcgtgcttgtgatcttagcactttggaggccaataggggaggattg

SEQ ID NO: 709136 - DNA, 120 bp, Artificial Sequence
  ENSG00000196735_42 (sequence is synthesized)
attgcttgaagccaggagttcaacagctgcctgggcaacaaagcaagaccttgtctctacaacacaaaaataaattaatgcatggcggcactcctgtagtcccagctactctagaggctg

SEQ ID NO: 709137 - DNA, 120 bp, Artificial Sequence
  ENSG00000196735_43 (sequence is synthesized)
aagaggagtgcttgagcccaggagttcaatacttcagtgggctaagattgtgccactgtgctcactccagcctaggcagcagagcaggactccatctctaaaagtaaataaataaataaa

SEQ ID NO: 709138 - DNA, 120 bp, Artificial Sequence
  ENSG00000196735_44 (sequence is synthesized)
acttacaaaattttaaaaatcaaatgaaatatgtcaggtttgtacctaccacatttaaactagggacttgaagaattaaacattttattacaaatgaagcacttcatgcacagactggca

SEQ ID NO: 709139 - DNA, 120 bp, Artificial Sequence
  ENSG00000196735_45 (sequence is synthesized)
catagtaagtagtcgataggtgttaacaatttgtgttattgttattttctggagtccaactaacaaatcccacagtgaatgacatcacagggatgcaaccaacaagatccagaatatgga

SEQ ID NO: 709140 - DNA, 120 bp, Artificial Sequence
  ENSG00000196735_46 (sequence is synthesized)
aacttctactagataaacaactccatttcttcagcaacaattcaagagagagagagaagagaagctatacattttaaaaggctgaagaaatatatgaaccaaatttgtatgaggcaatca

SEQ ID NO: 709141 - DNA, 120 bp, Artificial Sequence
  ENSG00000196735_47 (sequence is synthesized)
gaaaaactgacaccgactgtattaaggaattatctaattttagtgtggtaatgagattgctgttatgttttctaaaaagtcattatactttagattttcataataaaataattatgaatg

SEQ ID NO: 709142 - DNA, 120 bp, Artificial Sequence
  ENSG00000196735_48 (sequence is synthesized)
acaccaactgctgaggctgccttgggaagaggatgatcctaaacaaagctctgctgctgggggccctcgctctgaccaccgtgatgagcccctgtggaggtgaagacattgtgggatcca

SEQ ID NO: 709143 - DNA, 120 bp, Artificial Sequence
  ENSG00000196735_49 (sequence is synthesized)
tctctgactccctgctcctttatagagatggacagtgggtttgtaaaacaaaagttgaaaagtcagatagttaaaaggggaagtgaactggaaggtactttaaactttcacaactttatt

SEQ ID NO: 709144 - DNA, 120 bp, Artificial Sequence
  ENSG00000196735_50 (sequence is synthesized)
aaccgtggctgctcccattatgattttgttcggcagtggaagtttcacctgcttctccagagcgcttggcgtctttgttccaaatttcctttcttcaacctcacaccagagtgccctggt

SEQ ID NO: 709145 - DNA, 120 bp, Artificial Sequence
  ENSG00000196735_51 (sequence is synthesized)
caggcttggctcattcattaggcacaatgtgggcagtgcaggggaccctccatactgtaaagccacatgagaaggttttaactccttttaaaattagaaaaataatggaatattagagcc

SEQ ID NO: 709146 - DNA, 120 bp, Artificial Sequence
  ENSG00000196735_52 (sequence is synthesized)
taagaaaatgttttaacttttaattcagcctagattatattgtctttataccaattcagtcataaaatataattttccatatttttgtggaggaagaggcccatacaagcaagaatgctc

SEQ ID NO: 709147 - DNA, 120 bp, Artificial Sequence
  ENSG00000196735_53 (sequence is synthesized)
ggggctcacatgtcagaatgcagccttggtcatgactgatcctggccttcgtatggttctgctacctgtgtgcctgcccgtcttccccaaaatctatgtggtcctcgaatatagcaactg

SEQ ID NO: 709148 - DNA, 120 bp, Artificial Sequence
  ENSG00000196735_54 (sequence is synthesized)
tcattcaatacacatgtttgagcacacagtgagctaagttttaaggattcaaagatgaaaagtcatgctgtcttccctgcagagggtgctcagattagtgatggaaacagtatggggtgc

SEQ ID NO: 709149 - DNA, 120 bp, Artificial Sequence
  ENSG00000196735_55 (sequence is synthesized)
aggaaagcagaaggccattgctgagcagggcagtggacccagcagaggctgaaacaatacaagtgacttggttccaggtgggccagcagggtgacgtcctctagcaaaatttggcaccca

SEQ ID NO: 709150 - DNA, 120 bp, Artificial Sequence
  ENSG00000196739_0 (sequence is synthesized)
ccttttcctctcctcccccaggccggcggggaggcagcttccaccgccctccgcgcgccctcacccggccttgctctgcctccggggaccgccagcagcccgcctccaaaagtttgatca

SEQ ID NO: 709151 - DNA, 120 bp, Artificial Sequence
  ENSG00000196739_1 (sequence is synthesized)
tctctctctctctttttcttgcttcttcttcctttttggtggaagcagaaaaggaccgaggcaggggcgagcgcggcgcccggactcctgggaccatgggcctggcgcgggcgcccgcgg

SEQ ID NO: 709152 - DNA, 120 bp, Artificial Sequence
  ENSG00000196739_2 (sequence is synthesized)
ccccgggctcgggagcatgaagtaggggcctgccatgggagcgggatcggcgcggggggcccgaggcacagcggcggcggcggcggcgcgcgggggggggtttctcttctcctggatctt

SEQ ID NO: 709153 - DNA, 120 bp, Artificial Sequence
  ENSG00000196739_3 (sequence is synthesized)
tttctcttctcctggatcttagtctcgtttgcctgtcacctggcctccacccaaggagctcctgaagatgtggacatcctccagcggctgggcctcagctggacgaaggccgggagccct

SEQ ID NO: 709154 - DNA, 120 bp, Artificial Sequence
  ENSG00000196739_4 (sequence is synthesized)
gcacccccgggagtcattcctttccagtcgggcttcatctttacgcagcgggcccggctccaggctcccacgggcaccgtcattcctgccgccttgggcacagagctggcactggtgctg

SEQ ID NO: 709155 - DNA, 120 bp, Artificial Sequence
  ENSG00000196739_5 (sequence is synthesized)
agcctctgctcccaccgggtgaaccatgccttcctcttcgctgtccgcagccagaaacgcaagctgcagctgggcctgcagttcctccccggcaagacggtcgtccacctcgggtcccgg

SEQ ID NO: 709156 - DNA, 120 bp, Artificial Sequence
  ENSG00000196739_6 (sequence is synthesized)
cgctcagtggccttcgacctcgacatgcacgacgggcgctggcaccacctggccctcgagctccgaggccgcacagtcactctggtgactgcctgcgggcagcgccgggtgcctgtcctg

SEQ ID NO: 709157 - DNA, 120 bp, Artificial Sequence
  ENSG00000196739_7 (sequence is synthesized)
ctgcctttccacagggaccctgcactcgaccctgggggctccttcctctttgggaagatgaacccgcatgcagtccagtttgaaggtgctctctgccagttcagtatctaccctgtgacg

SEQ ID NO: 709158 - DNA, 120 bp, Artificial Sequence
  ENSG00000196739_8 (sequence is synthesized)
caggtcgctcacaattactgtacccacctgaggaagcagtgtggacaggctgacacgtaccagtccccactgggacctctcttctcccaagactctggcagaccttttaccttccagtcc

SEQ ID NO: 709159 - DNA, 120 bp, Artificial Sequence
  ENSG00000196739_9 (sequence is synthesized)
gacctcgccctgctaggcctggagaacttgaccactgccacaccagccctggggtcactgccagcaggcaggggacccagggggactgtggcacccgccacgcccaccaagccccaaagg

SEQ ID NO: 709160 - DNA, 120 bp, Artificial Sequence
  ENSG00000196739_10 (sequence is synthesized)
actagccccacaaaccctcaccagcatatggcggtgggaggcccagcccaaaccccgctgctacctgccaagctgtcagccagtaacgcacttgatcccatgctcccagcctctgttggc

SEQ ID NO: 709161 - DNA, 120 bp, Artificial Sequence
  ENSG00000196739_11 (sequence is synthesized)
ggctctaccagaacgcctcgccctgcggccgctcaaccatcacagaagatcacagccaccaaaatccccaaaagcctccctaccaagccttcggccccttctacttcaattgtgcccatc

SEQ ID NO: 709162 - DNA, 120 bp, Artificial Sequence
  ENSG00000196739_12 (sequence is synthesized)
aaaagcccccatcctacccagaaaacagctccatcttcatttacaaagtcagccctacccactcagaagcaagtgccacctacttcccgtccagttcctgccagagtctcccgtcccgca

SEQ ID NO: 709163 - DNA, 120 bp, Artificial Sequence
  ENSG00000196739_13 (sequence is synthesized)
gagaagcccatccagaggaacccgggaatgcccaggcccccaccgcccagcacccggcccctacctcctaccaccagctcctctaaaaaacccattcccacactagctcggactgaggcc

SEQ ID NO: 709164 - DNA, 120 bp, Artificial Sequence
  ENSG00000196739_14 (sequence is synthesized)
aagataaccagccatgccagtaagccggcctctgcccgcaccagcacccacaaacctcccccatttactgctttatcctcatctcctgcccctactcctggttctaccaggagtactcgg

SEQ ID NO: 709165 - DNA, 120 bp, Artificial Sequence
  ENSG00000196739_15 (sequence is synthesized)
ccaccagccacgatggtacctccaacttcgggcaccagcactcccagaacagcacctgccgtccccactcctggctcagctcccactggaagcaagaagcccattggatcggaagcctca

SEQ ID NO: 709166 - DNA, 120 bp, Artificial Sequence
  ENSG00000196739_16 (sequence is synthesized)
aagaaagccggacccaagagcagcccccggaagcctgtccccctcagacctgggaaggcagccagggatgtccccttgagcgatctgacaaccaggcctagccccagacagccccagccc

SEQ ID NO: 709167 - DNA, 120 bp, Artificial Sequence
  ENSG00000196739_17 (sequence is synthesized)
agtcagcagaccaccccggccctggtattggccccggcgcaattcctgtcctccagcccccggcccacgagcagtggctattcgatcttccacctggcaggatctacgcctttccctctg

SEQ ID NO: 709168 - DNA, 120 bp, Artificial Sequence
  ENSG00000196739_18 (sequence is synthesized)
ctgatggggcctccgggacccaagggagactgtggcttgccgggtccccctgggctacctgggctacctggaatccctggtgcacgtgggcctcggggtcctcctgggccttatggaaat

SEQ ID NO: 709169 - DNA, 120 bp, Artificial Sequence
  ENSG00000196739_19 (sequence is synthesized)
ccaggtctccccggccctcctggagccaaaggacagaaaggggacccagggctctcaccaggaaaggcccacgatggggcaaagggtgacatgggcttgcctgggctctccgggaatcca

SEQ ID NO: 709170 - DNA, 120 bp, Artificial Sequence
  ENSG00000196739_20 (sequence is synthesized)
ggacctccgggacgaaagggacacaagggctatcctggaccggcagggcaccccggagaacaggggcagccaggacctgagggcagcccaggggccaaaggttaccctggcaggcagggg

SEQ ID NO: 709171 - DNA, 120 bp, Artificial Sequence
  ENSG00000196739_21 (sequence is synthesized)
ttacctggaccggtaggagatcccggccccaaaggcagcaggggctacattgggctcccagggctcttcggcctgccagggtctgatggagaacgaggcctgcctggcgttcctggcaag

SEQ ID NO: 709172 - DNA, 120 bp, Artificial Sequence
  ENSG00000196739_22 (sequence is synthesized)
aggggcaagatgggtatgccggggtttcctggagtctttggggaaagaggccctcctggactggatggaaatcctggagaactgggcctgccaggcccccctggagtccccggcctcatt

SEQ ID NO: 709173 - DNA, 120 bp, Artificial Sequence
  ENSG00000196739_23 (sequence is synthesized)
ggtgacttaggagtgttgggtccgattggctacccgggacccaagggcatgaagggactgatgggcagcgtgggggagcccggactgaaaggtgataagggtgaacaaggggttccaggt

SEQ ID NO: 709174 - DNA, 120 bp, Artificial Sequence
  ENSG00000196739_24 (sequence is synthesized)
gtgtcaggagatcccggattccaaggagacaaggggagccaggggttgccagggttccccggtgcacgggggaagccagggcctctgggcaaagtcggagacaaaggatccattgggttt

SEQ ID NO: 709175 - DNA, 120 bp, Artificial Sequence
  ENSG00000196739_25 (sequence is synthesized)
cccgggccccctggacccgagggattcccaggagacatcggcccccctggcgacaatggcccagaaggcatgaagggtaagcctggagcccgaggcctgccgggaccccgtgggcagctg

SEQ ID NO: 709176 - DNA, 120 bp, Artificial Sequence
  ENSG00000196739_26 (sequence is synthesized)
gggcccgagggagatgagggacccatggggccgccaggggcccctggcttggagggtcagcctggcaggaaggggtttcctgggaggcccggcctggatggcgtgaagggggaaccaggg

SEQ ID NO: 709177 - DNA, 120 bp, Artificial Sequence
  ENSG00000196739_27 (sequence is synthesized)
gatcctggtcggccggggcctgtgggagagcagggatttatgggattcattggtctggtcggggagccaggaatcgtgggagaaaagggtgatcgtggcatgatgggacccccaggcgtg

SEQ ID NO: 709178 - DNA, 120 bp, Artificial Sequence
  ENSG00000196739_28 (sequence is synthesized)
cctggacccaaggggtcgatgggtcatcctggaatgccaggtggtatggggacccctggagagcctggaccccagggtcctccaggatctcgaggcccaccaggcatgaggggagcaaag

SEQ ID NO: 709179 - DNA, 120 bp, Artificial Sequence
  ENSG00000196739_29 (sequence is synthesized)
ggacgtcggggcccccgaggaccggacggaccagctggggagcaagggtccaggggcctgaagggccctccaggaccccagggcagaccgggccggcctggacagcagggtgtggctggt

SEQ ID NO: 709180 - DNA, 120 bp, Artificial Sequence
  ENSG00000196739_30 (sequence is synthesized)
gagcgaggccacttgggctcgagaggctttcctggcatcccgggtccctcaggccccccaggcaccaagggcctcccaggagaaccgggccctcagggaccccaggggccaattgggcct

SEQ ID NO: 709181 - DNA, 120 bp, Artificial Sequence
  ENSG00000196739_31 (sequence is synthesized)
gacccaaggggccgcctggtgcagtgggagaaccgggccttcctggggaagccgggatgaagggtgaccttggacccctgggcactcctggggagcagggcctcattgggcaacggggag

SEQ ID NO: 709182 - DNA, 120 bp, Artificial Sequence
  ENSG00000196739_32 (sequence is synthesized)
agccaggccttgagggtgacagtggccccatgggacctgatgggctgaagggggacaggggagacccagggcctgatggagaacatggcgagaaaggccaggaagggctgatgggtgagg

SEQ ID NO: 709183 - DNA, 120 bp, Artificial Sequence
  ENSG00000196739_33 (sequence is synthesized)
acgggccccccggcccccctggcgtcactggtgtccggggtcctgaaggaaaatcagggaagcaaggcgagaagggccgcactggagccaagggtgccaagggctatcaaggacagctgg

SEQ ID NO: 709184 - DNA, 120 bp, Artificial Sequence
  ENSG00000196739_34 (sequence is synthesized)
gtgagatgggcgtccctggagaccctggaccccctggcactccaggccctaaagggtcccggggcagcctgggaccaacgggtgctccgggacgcatgggggcccaaggagaaccgggac

SEQ ID NO: 709185 - DNA, 120 bp, Artificial Sequence
  ENSG00000196739_35 (sequence is synthesized)
tggctggttatgatggacacaaaggcattgtgggaccccttggacctcctggaccaaaaggcgaaaagggggagcagggcgaggacggcaaggctgaggggccccctgggccacctggag

SEQ ID NO: 709186 - DNA, 120 bp, Artificial Sequence
  ENSG00000196739_36 (sequence is synthesized)
atcggggccctgtgggtgatcgaggagaccgcggggaaccgggagaccctgggtaccctggacaggagggtgtgcaaggcctccgtggaaagccaggccagcagggccaacccgggcatc

SEQ ID NO: 709187 - DNA, 120 bp, Artificial Sequence
  ENSG00000196739_37 (sequence is synthesized)
cgggaccccgggggtggccgggacccaaaggatcgaaaggcgcagagggaccaaagggaaagcaaggcaaggcaggggccccaggccggaggggggtccagggcctgcaggggctgccag

SEQ ID NO: 709188 - DNA, 120 bp, Artificial Sequence
  ENSG00000196739_38 (sequence is synthesized)
ggccccggggcgtggtggggagacagggcctcgagggcatcgctggaccagatgggcttcctggcagggacgggcaagcaggacagcagggggagcagggagacgatggggaccctggcc

SEQ ID NO: 709189 - DNA, 120 bp, Artificial Sequence
  ENSG00000196739_39 (sequence is synthesized)
ccatgggccctgctgggaagagaggaaatccaggtgtggccggcttacctggagcacagggacccccaggattcaagggtgagagtgggttacccggacagctgggtccccctggcaagc

SEQ ID NO: 709190 - DNA, 120 bp, Artificial Sequence
  ENSG00000196739_40 (sequence is synthesized)
gaggaacagagggcagaacggggctccctggaaaccagggggagcctgggtccaaaggccagccgggcgactctggcgagatgggcttcccaggaatggcaggtctcttcggacccaagg

SEQ ID NO: 709191 - DNA, 120 bp, Artificial Sequence
  ENSG00000196739_41 (sequence is synthesized)
gcccgcctggagacattggcttcaaaggcatccagggccctcgggggccacctggcttgatgggaaaggaaggcatcgtcgggcccctcggaatcctgggaccttcgggactcccgggtc

SEQ ID NO: 709192 - DNA, 120 bp, Artificial Sequence
  ENSG00000196739_42 (sequence is synthesized)
cgaagggtgacaaaggcagccgtggggactggggattgcaaggtccgaggggtcctcccggccccagagggcggcccggccccccgggtcctccagggggtcctatccaattgcaacaag

SEQ ID NO: 709193 - DNA, 120 bp, Artificial Sequence
  ENSG00000196739_43 (sequence is synthesized)
atgatcttggggcagctttccagacgtggatggacaccagtggagcactcaggccagagagttacagctatccagaccggctggtgctggaccagggaggagagatctttaaaaccttac

SEQ ID NO: 709194 - DNA, 120 bp, Artificial Sequence
  ENSG00000196739_44 (sequence is synthesized)
actacctcagcaacctcatccagagcattaagacgcccctgggcaccaaagagaaccccgcccgggtctgcagggacctcatggactgtgagcagaagatggtggatggtacctactggg

SEQ ID NO: 709195 - DNA, 120 bp, Artificial Sequence
  ENSG00000196739_45 (sequence is synthesized)
tggatccaaaccttggctgctcctctgacaccatcgaggtctcctgcaacttcactcatggtggacagacgtgtctcaagcccatcacggcctccaaggtcgagtttgccatcagccggg

SEQ ID NO: 709196 - DNA, 120 bp, Artificial Sequence
  ENSG00000196739_46 (sequence is synthesized)
tccagatgaatttcctgcacctgctaagctccgaggtgacccagcacatcaccatccactgccttaacatgaccgtgtggcaggagggcactgggcagaccccagccaagcaggccgtac

SEQ ID NO: 709197 - DNA, 120 bp, Artificial Sequence
  ENSG00000196739_47 (sequence is synthesized)
gcttccgggcctggaatggacagatttttgaagctgggggtcagttccggcccgaggtgtccatggatggctgcaaggtccaagatggccgctggcatcagacactcttcaccttccgga

SEQ ID NO: 709198 - DNA, 120 bp, Artificial Sequence
  ENSG00000196739_48 (sequence is synthesized)
cccaagacccccaacagctgcccatcatcagtgtggacaacctccctcctgcctcatcagggaagcagtaccgcctggaagttggacctgcgtgcttcctctgacctctgacctcgtggc

SEQ ID NO: 709199 - DNA, 120 bp, Artificial Sequence
  ENSG00000196739_49 (sequence is synthesized)
cactctaggcctcacggaggagggaagaggaagaggcaaggggagggtactgaggggcagatggctccaggagaggcagctcccctgcccaagggtccttgggcagaccccagctgttgt

SEQ ID NO: 709200 - DNA, 120 bp, Artificial Sequence
  ENSG00000196739_50 (sequence is synthesized)
ctgcccagtagaagtgggtgggggtaggaggggatagggtgtccttgggaacaatggatcccagcttagccccaaagaccaaccaaagagccagccagagtaagctggacctgcaacctg

SEQ ID NO: 709201 - DNA, 120 bp, Artificial Sequence
  ENSG00000196739_51 (sequence is synthesized)
cctgagccccgtggcctctcagctctgcggccaccccgttccctccccagcttcctgcccaaagagccccacattcaagccaacttgagggaagggggcgtctcgtcagctggtccctgc

SEQ ID NO: 709202 - DNA, 120 bp, Artificial Sequence
  ENSG00000196739_52 (sequence is synthesized)
tagggagctattgatgtgcaatattagaaaggagacatgaaaaaaggagaaaaggaaagacagaagtgtatatatatattatttaaacaaacaaaaagaaggtgcgttactatttttttt

SEQ ID NO: 709203 - DNA, 120 bp, Artificial Sequence
  ENSG00000196739_53 (sequence is synthesized)
tcacccgggaaagaggtgagaggatgggaaggagcagccaggcgtgggaagcggcgagatcctcgggctgggggtgcccacgtttgctacctcccactgtgaaatcgctggtgctcacaa

SEQ ID NO: 709204 - DNA, 120 bp, Artificial Sequence
  ENSG00000196739_54 (sequence is synthesized)
ttgtctctcacagtgtatgtgatttttttaaggaaaaaaaaaaatccctatttaagattctgaaggtgctaccattattttgccacagactttgaagaaacttttggatgtggggcatca

SEQ ID NO: 709205 - DNA, 120 bp, Artificial Sequence
  ENSG00000196739_55 (sequence is synthesized)
tccgcatctttctctctcctccaaatgacaaagtttggggaatttttgaattttcctagcatcgcccttgtgctcatcaggtaatctgctaaggaggaaaaaagaaaagaaaaaaggaaa

SEQ ID NO: 709206 - DNA, 120 bp, Artificial Sequence
  ENSG00000196739_56 (sequence is synthesized)
aagcaaaacaaaaacaaaaacaaaaaccctaccagaaaccagaagtagagagatttaccatataacttatggactttgaaatgtctgtccttttaaggcagcagggaggcctgggtgcga

SEQ ID NO: 709207 - DNA, 120 bp, Artificial Sequence
  ENSG00000196739_57 (sequence is synthesized)
gcctgggtgcgaagcatgttggcttggcccttcacggtcctggagggaggtgaggctggccttggaaggcgtgccctggagaggtcttgggtgaaaacttgaccttgaagaaaccaatca

SEQ ID NO: 709208 - DNA, 120 bp, Artificial Sequence
  ENSG00000196739_58 (sequence is synthesized)
caaaagcggcgttgggtcagggctaggcttagaggtgaagcatcaacatggaaccatctcaggaagccgcatcgcctcttccgaggtcctcacttccaggagcctgtccttgcaagatgc

SEQ ID NO: 709209 - DNA, 120 bp, Artificial Sequence
  ENSG00000196739_59 (sequence is synthesized)
aatcatcgttcctgctttttcattgtcattaaattctgtagaaacccattgtcattagctccaagtgtaaatttgggtcaaggagacagaataataatgggaatctcggagttcgacacc

SEQ ID NO: 709210 - DNA, 120 bp, Artificial Sequence
  ENSG00000196739_60 (sequence is synthesized)
atagtgacgttcagcgtcctctgaattgtgctacatcagcgaacaagtcggcgcttgaattggattttgaggttattttaaccatggaattatttttatagaaggggaaaatgtatgtga

SEQ ID NO: 709211 - DNA, 120 bp, Artificial Sequence
  ENSG00000196739_61 (sequence is synthesized)
aagtctctatttgtgtatttctctcctaaagttgtgtctctttgggaattggatttgatttttattatttaatacctcactttggcccgtcccccctcccaacacttctgtatcctcgcc

SEQ ID NO: 709212 - DNA, 120 bp, Artificial Sequence
  ENSG00000196739_62 (sequence is synthesized)
ctgccgccccagcctggacgctctgcgtggaagtgcgtgtttgtagcagctcgggcctcatctcagcgctcggatccctcctgctgccagaatccactggcctctgtctcattcttgggt

SEQ ID NO: 709213 - DNA, 120 bp, Artificial Sequence
  ENSG00000196739_63 (sequence is synthesized)
tttcctgctgtcttcgtttacgtctctgtccacatgtcagtgtattaaaaccccaatgggttccgtttctccttttcccctctggattttaaataaatatttaaaactgaggcaatggaa

SEQ ID NO: 709214 - DNA, 82 bp, Artificial Sequence
  ENSG00000196739_64 (sequence is synthesized)
gtgattaccccactgcactccagtctgggcgacagaatgagaccctgtttcaaaaaacaaacaaaaaaagtccttagaacag

SEQ ID NO: 709215 - DNA, 120 bp, Artificial Sequence
  ENSG00000196739_65 (sequence is synthesized)
ccctgtttcaaaaaacaaacaaaaaaagtccttagaacagtacagaacagtacagttagttattaataggatgatggtgttggtgctaattgtcctcctgtcctggcgtgggagaagaag

SEQ ID NO: 709216 - DNA, 120 bp, Artificial Sequence
  ENSG00000196739_66 (sequence is synthesized)
tccgtggacaaggcttacttggaacaggagctctggttggtgttttacgatttctctgtggtccctgggaagaaggaccttccccagctcctcctcccacaccccaaagtcagagctggt

SEQ ID NO: 709217 - DNA, 120 bp, Artificial Sequence
  ENSG00000196739_67 (sequence is synthesized)
ggaaacaggaaggggtgtcgagagctggggctggccctacccacccgcaaggacttttgttcggcttctcctagggtgaccttggacccctgggcactcctggggagcagggcctcattg

SEQ ID NO: 709218 - DNA, 120 bp, Artificial Sequence
  ENSG00000196739_68 (sequence is synthesized)
ggcaacggggagagccaggccttgagggtgacagtggccccatgggacctgatgggctgaaggtaagtgcccttttagggcagggcctggggaccccggcagggcattgctttcccatcc

SEQ ID NO: 709219 - DNA, 120 bp, Artificial Sequence
  ENSG00000196739_69 (sequence is synthesized)
aagacctaagtctcctcccagaaacactgtgttcccatagagatctgagatgacagctccagctcccattgacagcagcttggggaagggtcagcagtgtccagcagccacctcccaccc

SEQ ID NO: 709220 - DNA, 120 bp, Artificial Sequence
  ENSG00000196739_70 (sequence is synthesized)
tgccctctgcactacctgctcaggtgggaccagggccatcaccaccttccagtctttcctgctacccttcttaaaatatcagcttctcttggctaagggtgattcctgagcaccggcact

SEQ ID NO: 709221 - DNA, 120 bp, Artificial Sequence
  ENSG00000196739_71 (sequence is synthesized)
acgccaggcccagagccagagtctttggtctctgttatcttccaaatattctagaaggtcaggaaaataataattaccaccaatgacttataagccacaatttagggaggactagtcaca

SEQ ID NO: 709222 - DNA, 120 bp, Artificial Sequence
  ENSG00000196739_72 (sequence is synthesized)
cacataccaggtacaacgctaagccctttaccagctggatccataggacaacggaagttctgtctttagatgaggaaactgagactcagagtggtgaagcaacttgcccaaggacacacc

SEQ ID NO: 709223 - DNA, 120 bp, Artificial Sequence
  ENSG00000196739_73 (sequence is synthesized)
gctagcaactggcacatccaggacccaaatctgggcccgtttggctccaaagcctctgctcactctgctgtaccatgcacccattctaaaggcgaagaggctgaggctcagaggaaggca

SEQ ID NO: 709224 - DNA, 120 bp, Artificial Sequence
  ENSG00000196739_74 (sequence is synthesized)
tagatacattcaggacctatggctatgagtgaggatccaaaattcaaacccacggctcacaggtgccaaagcctgctggcccaacttgaccctgctgctccctgagagactcctgtcagc

SEQ ID NO: 709225 - DNA, 120 bp, Artificial Sequence
  ENSG00000196739_75 (sequence is synthesized)
cacaaatgtcaggactctgaagagacaccttagctcacctgaattgcaggtgggcaggcgggcacctccctctgactctccagacccatctccaggccagtccctggcctccgtcttggg

SEQ ID NO: 709226 - DNA, 120 bp, Artificial Sequence
  ENSG00000196739_76 (sequence is synthesized)
ccccgctctgaccccacaggtgggctttccccgaggctggccggtcaccctgtgcaagtcagctccccagcccaggttcctaagggccatgccctctcgcccacctactctccaggtgac

SEQ ID NO: 709227 - DNA, 120 bp, Artificial Sequence
  ENSG00000196739_77 (sequence is synthesized)
ctcagagaagcagaccccttctctgaacctcagtttccccatccacaggcttccgcccaccctcgttaccccctccccacagtctcccagggtgccttggcgaccggcccctgctgactc

SEQ ID NO: 709228 - DNA, 120 bp, Artificial Sequence
  ENSG00000196739_78 (sequence is synthesized)
ctcacattttcttgcaagagcgagagcaccccctgtctgtcatctgcctgactcctctcccccaaccctgctgcatccaagcgtacagccgagtcccaagacccggagcatttgacagct

SEQ ID NO: 709229 - DNA, 120 bp, Artificial Sequence
  ENSG00000196739_79 (sequence is synthesized)
gctccacaccctttgccagtgcctgctacactgggtggtgatgctgatgaaggtcatggctaaaatgctttgggcacttgccatgtgcccagtgccacccacccaaagggctttatgtga

SEQ ID NO: 709230 - DNA, 120 bp, Artificial Sequence
  ENSG00000196739_80 (sequence is synthesized)
aactctcccaagcttgatacattaccatcctcactagacggatgaggaaactgaggcacgaagcagcagccttctcactccactctgggcggccacctttcttcttggaaagtccactga

SEQ ID NO: 709231 - DNA, 120 bp, Artificial Sequence
  ENSG00000196739_81 (sequence is synthesized)
ggtgggcgggagggggtcttccagcctgggtgcctcatgcagtcttctgcctccaccttgcatggctttttggccctgacttcatcctcttcccctcccttcaaagccaattctacctga

SEQ ID NO: 709232 - DNA, 120 bp, Artificial Sequence
  ENSG00000196739_82 (sequence is synthesized)
gtccttgtgctcaaatgcacagcatcttccctggtctttacatgaatcccaggagagacccattttcttaaggtgtttgtccaggaatcacccctcatggtgaaaactgcgtctcgaata

SEQ ID NO: 709233 - DNA, 120 bp, Artificial Sequence
  ENSG00000196739_83 (sequence is synthesized)
tgcacagcacttcatagtttatagagtgcttttacacccgttatctcttcgctgatgtccagctgacagtgatgatggtggtggtgaccaataatagttagcttttatccagcattcaca

SEQ ID NO: 709234 - DNA, 120 bp, Artificial Sequence
  ENSG00000196739_84 (sequence is synthesized)
tgccagacacactgctaagctatttacatggtttatctctttcaatccttgcagtaatcctttgatcctgattttacaaacgaggaaacttgcccagggtcacacaactattcagtagcg

SEQ ID NO: 709235 - DNA, 120 bp, Artificial Sequence
  ENSG00000196739_85 (sequence is synthesized)
gtagcaagatttgaacttaggcagcataacccgagggttgagggaggcatcgtcccctgagcagagaatcttggaattagaaggagccagaaccccaggttcacacagcactgactcact

SEQ ID NO: 709236 - DNA, 120 bp, Artificial Sequence
  ENSG00000196739_86 (sequence is synthesized)
cggtggtattagggagtctccacctgtctgcacttcagttgtcccatctgtaactgaagagggttaaggaaggtgacttgcaaggctcctctgagcactggcagatgtctgaggatttgg

SEQ ID NO: 709237 - DNA, 120 bp, Artificial Sequence
  ENSG00000196739_87 (sequence is synthesized)
ggcatctctaggaacccccagagactgttctgcatgagattcacaaggacgcccaccccaggggtccagttagcccctggagtgtggtcttaggcagagcccaggtgagggccctttgtt

SEQ ID NO: 709238 - DNA, 120 bp, Artificial Sequence
  ENSG00000196739_88 (sequence is synthesized)
gaaaacccgactagccacctggaacaggctgtctgcctctgagaggagaacaggtggccaggacgacaagccagaaatggaatcccagagccagaggagtctgcaggagagttattcagg

SEQ ID NO: 709239 - DNA, 120 bp, Artificial Sequence
  ENSG00000196739_89 (sequence is synthesized)
ccagccccctgtcttcatgccaggctgtgcttagaagctgaggctcccagcaggaagggatccgggcacaactttgtgcccagatctgctctacattggcccacgcctcagctcggagtc

SEQ ID NO: 709240 - DNA, 120 bp, Artificial Sequence
  ENSG00000196739_90 (sequence is synthesized)
ttctgcctttatctgtgccatctctggaccgctccattggaaaatcttcccaactgaactagaaactgccccagcaactccctcacacccacctcctgccccagagctcaggcctcagca

SEQ ID NO: 709241 - DNA, 120 bp, Artificial Sequence
  ENSG00000196739_91 (sequence is synthesized)
ggcccagcttgaagcaatgagcaatcatgagttgctttcttgagcctctcttctaggcagggccaagccccaggctccagcttcatgccctctgcttcctgtgctctctctcctctggat

SEQ ID NO: 709242 - DNA, 120 bp, Artificial Sequence
  ENSG00000196739_92 (sequence is synthesized)
gcacaccagtttatcagtgtccctcgtaaaccttggcactgggggacagaactggtaaagacacactatgcttttccaagcctgctcttctcgcccatcccttcctgatggacgccgccc

SEQ ID NO: 709243 - DNA, 120 bp, Artificial Sequence
  ENSG00000196739_93 (sequence is synthesized)
ctcagcagccatgcccgtgctgcactccacacctgctctgctcacggtgatgagggtgacagcccacgccccatcctggaatcctgcatgccccatcctggaaccccacctgcccccaat

SEQ ID NO: 709244 - DNA, 120 bp, Artificial Sequence
  ENSG00000196739_94 (sequence is synthesized)
caatctctctcagagtacgcaaagattaccgtgatgagataaggcaagcttagagtgacactgattgcttcaaaaccataaaaagcccatgccagcctggtgcagtggctcacacctgta

SEQ ID NO: 709245 - DNA, 120 bp, Artificial Sequence
  ENSG00000196739_95 (sequence is synthesized)
gctgccgagtgtcccacgcaccctcgcctacctcattcacggggctctgcctgtcccatatcagagaacatggtctgaccctgagctcttttcaagcctctgagccattgtgatagcctc

SEQ ID NO: 709246 - DNA, 120 bp, Artificial Sequence
  ENSG00000196739_96 (sequence is synthesized)
tcctcctgcactttgtccctggcccgttttcttgtctgcaaaataaagagaaacccaacccgtgctctagccatgaccgtggaaccgagatacctcccaggttgtgagaactgggggctg

SEQ ID NO: 709247 - DNA, 120 bp, Artificial Sequence
  ENSG00000196739_97 (sequence is synthesized)
ctggtcggccggggcctgtgggagagcaggttagttagcaacggtctctgaatgagtggctccatttattgggcccttactctgtgccaagccctttgcccagcaccctccatgcaccac

SEQ ID NO: 709248 - DNA, 120 bp, Artificial Sequence
  ENSG00000196739_98 (sequence is synthesized)
ctcgtgtaattctcagaacaactccagaggtaggttcagtcctctacccctttcacgaatgtggacggtgaccctcagaacggggaagtctgtaaatgagaaagctgtggatcatagtca

SEQ ID NO: 709249 - DNA, 120 bp, Artificial Sequence
  ENSG00000196739_99 (sequence is synthesized)
cccagctacttgggaggctgaggcggcaggatcactaggaggcagaggttgcagtgagcagttatcacaccactgcacttcagcctggatgacagagtgagaccctgtatcatgaaaaaa

SEQ ID NO: 709250 - DNA, 120 bp, Artificial Sequence
  ENSG00000196739_100 (sequence is synthesized)
ctgtatcatgaaaaaaaaagaaggatcccctggacacagcccacctggctgattcttgtcccaggaggtgagacgatctaccttcagcatgaccaagaagagctggtttaggtgagactg

SEQ ID NO: 709251 - DNA, 120 bp, Artificial Sequence
  ENSG00000196739_101 (sequence is synthesized)
gaatttaccaggggagaccctaaagatgtgggggaggaagcttgggtaaggtcagatatgcccccacaaagacatgatctggaaacacacacacaccctcccctgccacactcctctgcc

SEQ ID NO: 709252 - DNA, 120 bp, Artificial Sequence
  ENSG00000196739_102 (sequence is synthesized)
accctctgcaaccagttggacacgcgtttgagcagcttctacataccaggctttgcccgtgcatagctcatatgaacatgccaaactccagaggtggacctgggctctgcttgctttatg

SEQ ID NO: 709253 - DNA, 120 bp, Artificial Sequence
  ENSG00000196739_103 (sequence is synthesized)
accttggccatgtgatgttgcctaaccgagtctcaattttcccatctgtgaaatgggactgataacttttccctcaaagatagatatcaaatgcaaaatgaagtcttgcatgcaaagtga

SEQ ID NO: 709254 - DNA, 120 bp, Artificial Sequence
  ENSG00000196739_104 (sequence is synthesized)
tcatctgtaaaatgggagcaatgacagtagaagactgttgcaaaaataaagaccaggggcatatgccacacagcactgagccaacacactgctggtacctgctgaataattgtaggtgtt

SEQ ID NO: 709255 - DNA, 120 bp, Artificial Sequence
  ENSG00000196739_105 (sequence is synthesized)
tcttactccttctggggcctctcaggtaaggcctctcttgacaagaagggcaaaggttgacagaccccaggggtgagggagctgtgggggccctttacccagtggctgccaagtacagac

SEQ ID NO: 709256 - DNA, 120 bp, Artificial Sequence
  ENSG00000196739_106 (sequence is synthesized)
caaaggcagccgtggggactggggattgcaaggtccgagggtgagtgggctgggcatgagggctgtggggcggggcgtggggcgggcaccctgcattctcctcccggtggtacattctct

SEQ ID NO: 709257 - DNA, 120 bp, Artificial Sequence
  ENSG00000196739_107 (sequence is synthesized)
tgtggtgctgtgaaggacaagctgcggagccagacagacctgagttccaatgtcagttctgcctcagacttggtctgtgagctggggcaagccacggccccatcccgagctgcccttgcc

SEQ ID NO: 709258 - DNA, 120 bp, Artificial Sequence
  ENSG00000196739_108 (sequence is synthesized)
tcctctgcacaagcggctgggactagatggctggttgttccactcttgagctgcaaaggttttggcttcctgagaagcccagtggggaagctagatgtaagcagcagcgctggctgatgg

SEQ ID NO: 709259 - DNA, 120 bp, Artificial Sequence
  ENSG00000196739_109 (sequence is synthesized)
ggtgggagacctgactcctaccctcccccggcaggccctaggaggagccctaggcctcgaagaatccattcaactaggtgatcccccaaacccttgtgcaagtgacccagcctctctcaa

SEQ ID NO: 709260 - DNA, 120 bp, Artificial Sequence
  ENSG00000196739_110 (sequence is synthesized)
tgtcagttgtcttctctgtaaaatggatacatcccagtagcaacataggcaagtacttagccatgtgacccctcctctgggggctctgccagttgtgagctctgcccagaaggtttcctt

SEQ ID NO: 709261 - DNA, 120 bp, Artificial Sequence
  ENSG00000196739_111 (sequence is synthesized)
ccatctcggttggaggaatcccttttctgctcacccaccctgacttcatgctcacctggggctcggcaggtcacaagatgcagggtccatctacagaaccaaggaatgggctcatccccc

SEQ ID NO: 709262 - DNA, 120 bp, Artificial Sequence
  ENSG00000196743_0 (sequence is synthesized)
gcagttaactccgccctgacccacccttcccgatgcagtccctgatgcaggctcccctcctgatcgccctgggcttgcttctcgcggcccctgcgcaagcccacctgaaaaagccatccc

SEQ ID NO: 709263 - DNA, 120 bp, Artificial Sequence
  ENSG00000196743_1 (sequence is synthesized)
agctcagtagcttttcctgggataactgtgatgaagggaaggaccctgcggtgatcagaagcctgactctggagcctgaccccatcatcgttcctggaaatgtgaccctcagtgtcatgg

SEQ ID NO: 709264 - DNA, 120 bp, Artificial Sequence
  ENSG00000196743_2 (sequence is synthesized)
gcagcaccagtgtccccctgagttctcctctgaaggtggatttagttttggagaaggaggtggctggcctctggatcaagatcccatgcacagactacattggcagctgtacctttgaac

SEQ ID NO: 709265 - DNA, 120 bp, Artificial Sequence
  ENSG00000196743_3 (sequence is synthesized)
acttctgtgatgtgcttgacatgttaattcctactggggagccctgcccagagcccctgcgtacctatgggcttccttgccactgtcccttcaaagaaggaacctactcactgcccaaga

SEQ ID NO: 709266 - DNA, 120 bp, Artificial Sequence
  ENSG00000196743_4 (sequence is synthesized)
gcgaattcgttgtgcctgacctggagctgcccagttggctcaccaccgggaactaccgcatagagagcgtcctgagcagcagtgggaagcgtctgggctgcatcaagatcgctgcctctc

SEQ ID NO: 709267 - DNA, 120 bp, Artificial Sequence
  ENSG00000196743_5 (sequence is synthesized)
taaagggcatataacatggcatctgccacagcagaatggagcggtgtgaggaaggtcccttttcctctgttttgtgtttgccaaggccaaactcccactctctgcccccctttaatcccc

SEQ ID NO: 709268 - DNA, 120 bp, Artificial Sequence
  ENSG00000196743_6 (sequence is synthesized)
tttctacagtgagtccactaccctcactgaaaatcattttgtaccacttacattttaggctggggcaagcagccctgacctaagggagaatgagttggacagttcttgatagcccagggc

SEQ ID NO: 709269 - DNA, 120 bp, Artificial Sequence
  ENSG00000196743_7 (sequence is synthesized)
atctgctgggctgaccacgttactcatccccgttaacattctctctaaagagcctcgttcatttccaaagcagttaaggaatgggaaccagagtgttttaggacctgaagaatctttatg

SEQ ID NO: 709270 - DNA, 120 bp, Artificial Sequence
  ENSG00000196743_8 (sequence is synthesized)
actctctctctttcactcttttttttttttgtcactaagttaaaagcgaagtgagagtattaacgtttttgttctcctccggccccctgttacaatgaaggggcaaaagtatttgctctt

SEQ ID NO: 709271 - DNA, 120 bp, Artificial Sequence
  ENSG00000196743_9 (sequence is synthesized)
agtctattcctcccttaacttctgtgactaatttttatttcctttctagatttgcccaattaatactagggtgcagtgtatcctggagaggtagggtgtgtgggggaggaatcccttggg

SEQ ID NO: 709272 - DNA, 120 bp, Artificial Sequence
  ENSG00000196743_10 (sequence is synthesized)
ggagatattaggagtgctctgttgtttacaaactcaggtacccgcagggcctagcaagagacttaaatgactgataagaaccgtgagaaacatgttgcttccaggcttgatttcgatttt

SEQ ID NO: 709273 - DNA, 120 bp, Artificial Sequence
  ENSG00000196743_11 (sequence is synthesized)
gattacaggcatgagccactacacccagccgatttttcctttttgattaaagatgctattacaatgtaaatatttcttacacagaaagtcacagcacatgtgcccattgatacaaggctg

SEQ ID NO: 709274 - DNA, 120 bp, Artificial Sequence
  ENSG00000196743_12 (sequence is synthesized)
catgtgcccattgatacaaggctgctgaggcctggtctccagttggaaatataattaagggtggcaaggactggagtcagttggagagtgcatagccagtctgtgaagacaactgccaga

SEQ ID NO: 709275 - DNA, 120 bp, Artificial Sequence
  ENSG00000196743_13 (sequence is synthesized)
gagtgagactctgtctcaaaaaaaaagtttcaatgtttactcctagagaagccaaaaatccagatttgtatatgaaatcttaccattttaaaagattggcagctaattatttttttaaaa

SEQ ID NO: 709276 - DNA, 120 bp, Artificial Sequence
  ENSG00000196743_14 (sequence is synthesized)
tggcagctaattatttttttaaaaagctgtgcagtgtgatgtgtcccaaacggactggctcatgggtggccacgtcacaacctctgatctcagaccgtgcatgccttgtcctcttaagac

SEQ ID NO: 709277 - DNA, 120 bp, Artificial Sequence
  ENSG00000196743_15 (sequence is synthesized)
aactcctgtggcaccgtttctccctccacagggccaaagccatagtgtccggtcccaaggacaaggctcttccagtgctaggagaggtatgagcagcctctcacctgtgagctgtgggga

SEQ ID NO: 709278 - DNA, 120 bp, Artificial Sequence
  ENSG00000196743_16 (sequence is synthesized)
tcacaaggctgcctgcctcagtcttggagtcctgttgggtgaatgaggcagatgggaaagagcctcaccagcagctgcttttggagcaggggtccaaggaagagagggtggcctcgacat

SEQ ID NO: 709279 - DNA, 120 bp, Artificial Sequence
  ENSG00000196743_17 (sequence is synthesized)
caaactgcctggatttttctaccaccctgttacatcataacaacttctgaaacacacaccagccctgagttctgggctcatttgaagcctggaatagcaataaatctttttaacttgcgg

SEQ ID NO: 709280 - DNA, 120 bp, Artificial Sequence
  ENSG00000196743_18 (sequence is synthesized)
acagtttccccttgccttggctgcatatttcactgatcacatctcaggatttcaaaagcatttttggggtggggctcttttggttggaagggtttgttggaacggtacaggtgagccgag

SEQ ID NO: 709281 - DNA, 120 bp, Artificial Sequence
  ENSG00000196743_19 (sequence is synthesized)
gtgattccagggacggacccttctgcaggagcttgagcttgcttgttgtctctgcttcatcgccatccagctcccttgtttgctattttgctttccatcacatcatgactgcggagagca

SEQ ID NO: 709282 - DNA, 120 bp, Artificial Sequence
  ENSG00000196743_20 (sequence is synthesized)
aaaatcacctagtgaccattgaacaggtcccagagacaaaatctttttatctgaggaatttaaaagggagcaaagaccacctggtgactatcaggccatgcagaggcaaaacgccttatt

SEQ ID NO: 709283 - DNA, 120 bp, Artificial Sequence
  ENSG00000196743_21 (sequence is synthesized)
tggggaaaattaaaagtaattagactttcctattatctaaagcaggcatctggttccagatttcttttccccgaaaaaaaccttagaagtaactaaaatttctgtacatctccggaatgc

SEQ ID NO: 709284 - DNA, 120 bp, Artificial Sequence
  ENSG00000196743_22 (sequence is synthesized)
catgctgaaactcactgcaaccccacggtcccgctttaaggtccataaatatccctaaggaaaaatccaccgtggtacattcagtcctctcaccgaggtgccccatggcagtcttctgca

SEQ ID NO: 709285 - DNA, 120 bp, Artificial Sequence
  ENSG00000196743_23 (sequence is synthesized)
gcattcttctaatacctttcctttttcaaacctatactgttgttggtgaattctttttaccaacccacgagttgaccacttcccaatgccggggatctgacacctcacctggcaatgacc

SEQ ID NO: 709286 - DNA, 120 bp, Artificial Sequence
  ENSG00000196743_24 (sequence is synthesized)
tccacagccgtttccctctgttggatcttccagccttattctcaacagttcatttttagttcacattcttgaccgaatctcagtagctcagttaatctttttatgtctgctctgctcttg

SEQ ID NO: 709287 - DNA, 120 bp, Artificial Sequence
  ENSG00000196743_25 (sequence is synthesized)
ggtcatatgttccgtgaggtttcttaggggtgggggatgaggagttaaaggtggcatcttcaatcgcaggtcaaagcagactttaataaatggtgctgagccaactggaaagccccttgg

SEQ ID NO: 709288 - DNA, 120 bp, Artificial Sequence
  ENSG00000196743_26 (sequence is synthesized)
agaaagttgaagttagacctgtacttcacaccatatgcaagaatgaactccatctggatccaggatccaaatgtaagaaaatgaagccatataaatacagaaggaaacgtggtggaaata

SEQ ID NO: 709289 - DNA, 120 bp, Artificial Sequence
  ENSG00000196743_27 (sequence is synthesized)
tccagtggcaacaaaatattgacacatttgactacatgaagataataaaaatgcttagtaaaaacacaataaaatcaaatgactgggagaaaaatttatccagcctatataatagacaaa

SEQ ID NO: 709290 - DNA, 120 bp, Artificial Sequence
  ENSG00000196743_28 (sequence is synthesized)
cactgtcccttcaaagaagtaagtacttagggaggagagagcgttacccctgtggctaaagagatggggtttggagagaagggtctttgcattctccttctgcagatctgcatgtctctg

SEQ ID NO: 709291 - DNA, 120 bp, Artificial Sequence
  ENSG00000196743_29 (sequence is synthesized)
gatttgtaagccagtgtgacctatcaggaatcacttatcttccgggagcctcagttatccatctacgaaatgggagacttgaacttagatgtgatcttcagggccctttatccataataa

SEQ ID NO: 709292 - DNA, 120 bp, Artificial Sequence
  ENSG00000196743_30 (sequence is synthesized)
tccatgctctacagtgctatggccgtctctcatcttgtgcggctgttttgagaatgggaagaggggtggtagttcatggctgcaatcctagcagtggctctaggagaaagaccccatcag

SEQ ID NO: 709293 - DNA, 120 bp, Artificial Sequence
  ENSG00000196743_31 (sequence is synthesized)
ggtagcaagaaagctgcagaggaggctgccggcagtacaggatgcagggagaacccaggcctggggttgaggccaggagactcaattccagctttactgtgtgcctttagcaggaatgtc

SEQ ID NO: 709294 - DNA, 120 bp, Artificial Sequence
  ENSG00000196743_32 (sequence is synthesized)
atgggtagaagctgctggcgtgtcatctacagccttggaggacaggattgtggccaagcatgaggaggttccagaagtttcagttcagtatgaagaaaaatttcagaaccatcacaaact

SEQ ID NO: 709295 - DNA, 120 bp, Artificial Sequence
  ENSG00000196747_0 (sequence is synthesized)
ggccttttgccatgtctgggcgtggcaagcagggaggcaaagctcgcgccaaggccaagacccgctcttctcgggccgggcttcagtttcccgtaggccgagtgcatcgcctgctccgca

SEQ ID NO: 709296 - DNA, 120 bp, Artificial Sequence
  ENSG00000196747_1 (sequence is synthesized)
aaggcaactatgcggagcgggtcggtgctggagcgccggtgtacctggcggcggtgctggagtacctgaccgccgagatcctggagctggctggcaacgcggcccgcgacaacaagaaga

SEQ ID NO: 709297 - DNA, 120 bp, Artificial Sequence
  ENSG00000196747_2 (sequence is synthesized)
cagctggccatccgcaacgatgaggagctcaacaagcttctgggcaaagtcaccatcgcacagggtggcgtcctgcccaacatccaggccgtgctactgcccaagaagaccgagagccac

SEQ ID NO: 709298 - DNA, 120 bp, Artificial Sequence
  ENSG00000196747_3 (sequence is synthesized)
cacaaggcgaagggcaagtagaagcctggattagtttgcagcaactcaatcccaaaggaaccaaaggctcttttcagagccacctacaattttgtggaagaactgagcactatgtttaat

SEQ ID NO: 709299 - DNA, 120 bp, Artificial Sequence
  ENSG00000196748_0 (sequence is synthesized)
gctgctctgccgcccaggcccatggccgcagccctggcgctcgtggcgggggtcctgtcgggggcggtgctgcccctctggagcgcgcttccgcaatataaaaagaaaatcacagacagg

SEQ ID NO: 709300 - DNA, 120 bp, Artificial Sequence
  ENSG00000196748_1 (sequence is synthesized)
tgtgcccccagggccagaataaccatgatctgcttgccccagaccaagggagctaccaacatcatctgcccttgccggatgggcttgacgtgcatatccaaggacttgatgtgttcccgc

SEQ ID NO: 709301 - DNA, 120 bp, Artificial Sequence
  ENSG00000196748_2 (sequence is synthesized)
cggtgccatatgatttagaggaagatgcaggctggtcactgctcccttggggccataggccctggttgccaccaacttgctccaaatccagctcctgagacattaaagtcacttcctgtc

SEQ ID NO: 709302 - DNA, 120 bp, Artificial Sequence
  ENSG00000196748_3 (sequence is synthesized)
cgccgctgctctgccgcccaggcccatggccgcagccctggcgctcgtggcgggggtcctgtcgggggcggtgctgcccctctggagcgcgcttccgcaatataaaaaggtgagccgggg

SEQ ID NO: 709303 - DNA, 120 bp, Artificial Sequence
  ENSG00000196748_4 (sequence is synthesized)
agcgcgcccagccggccgcgaccgcaggagagggtggccccgccgccggggcactggagcccgaaggcgccgggcagcctgaaagggagagaaaatcacagacaggtgcttccaccactc

SEQ ID NO: 709304 - DNA, 120 bp, Artificial Sequence
  ENSG00000196748_5 (sequence is synthesized)
gcaatataaaaaggtgagccggggagcgcgcccagccggccgcgaccgcaggagagggtggccccgccgccggggcactggagcccgaaggcgccgggcagcctgaaagggagagaccaa

SEQ ID NO: 709305 - DNA, 120 bp, Artificial Sequence
  ENSG00000196754_0 (sequence is synthesized)
agagcaggggttgcctcccctcaccccggtccaggatgcccagtccccacgacacctcccacttcccactgtggcctgggtgggctcaggggctgcccttgacctggcctagagccctcc

SEQ ID NO: 709306 - DNA, 120 bp, Artificial Sequence
  ENSG00000196754_1 (sequence is synthesized)
cccagctggtggtggagctggcactctctgggagggagggggctgggagggaatgagtgggaatggcaagaggccagggtttggtgggatcaggttgaggcaggtttggtttccttaaaa

SEQ ID NO: 709307 - DNA, 120 bp, Artificial Sequence
  ENSG00000196754_2 (sequence is synthesized)
tgccaagttgggggccagtggggcccacatataaatcctcaccctgggagcctggctgccttgctctccttcctgggtctgtctctgccacctggtctgccacagatccatgatgtgcag

SEQ ID NO: 709308 - DNA, 120 bp, Artificial Sequence
  ENSG00000196754_3 (sequence is synthesized)
ttctctggagcaggcgctggctgtgctggtcactaccttccacaagtactcctgccaagagggcgacaagttcaagctgagtaagggggaaatgaaggaacttctgcacaaggagctgcc

SEQ ID NO: 709309 - DNA, 120 bp, Artificial Sequence
  ENSG00000196754_4 (sequence is synthesized)
aagtggatgaggaggggctgaagaagctgatgggcagcctggatgagaacagtgaccagcaggtggacttccaggagtatgctgttttcctggcactcatcactgtcatgtgcaatgact

SEQ ID NO: 709310 - DNA, 120 bp, Artificial Sequence
  ENSG00000196754_5 (sequence is synthesized)
tcttccagggctgcccagaccgaccctgaagcagaactcttgacttcctgccatggatctcttgggcccaggactgttgatgcctttgagttttgtattcaataaactttttttgtctgt

SEQ ID NO: 709311 - DNA, 120 bp, Artificial Sequence
  ENSG00000196754_6 (sequence is synthesized)
tgataatattttaattgctcagtgatgttccataacccggctggctcagctggagtgctgggagatgagggcctcctggatcctgctcccttctgggctctgactctcctggaaatctct

SEQ ID NO: 709312 - DNA, 120 bp, Artificial Sequence
  ENSG00000196754_7 (sequence is synthesized)
ccaaggccagagctatgctttaggtctcaattttggaatttcaaacaccagcaaaaaattggaaatcgagataggttgctgacttttattttgtcaaataaagatattaaaaaaggcaaa

SEQ ID NO: 709313 - DNA, 120 bp, Artificial Sequence
  ENSG00000196754_8 (sequence is synthesized)
gcgcagatgccatcaaaatgggactctggtcaccctgtcatttcccttctggcagacactaaaatggggagccctgccctcaggggggtgtcccaagtgccatcagaggaggcttggtga

SEQ ID NO: 709314 - DNA, 120 bp, Artificial Sequence
  ENSG00000196754_9 (sequence is synthesized)
ctcccagacacaagggaagctttagcgtctgccctcagggtgagatggaggtatcgcctccggcctcagggaaccacagtctgagggggagatgcagcccctgccttcccattcagagag

SEQ ID NO: 709315 - DNA, 120 bp, Artificial Sequence
  ENSG00000196754_10 (sequence is synthesized)
gggttttgtgaggtggcttgggggcatagggcagaagtggatcctacaggctgagctaaggccccaagagcctcagcagtgtacccatcacctggcacctctgcagccacagatccatga

SEQ ID NO: 709316 - DNA, 120 bp, Artificial Sequence
  ENSG00000196757_0 (sequence is synthesized)
cctcaccttcctcgctgcgcgggcggcggttggtaaccggtcagaccagcccgagagggacctggtgcctgtacccaggcttctgtcgctctgtcgcctgcgctatgccctgctgtagtc

SEQ ID NO: 709317 - DNA, 120 bp, Artificial Sequence
  ENSG00000196757_1 (sequence is synthesized)
acaggagctgtagagaggaccccggtacatctgaaagccgggaaatggacccagtggcctttgaggatgtggctgtgaacttcacccaggaagagtggacattgctggatatttcccaga

SEQ ID NO: 709318 - DNA, 120 bp, Artificial Sequence
  ENSG00000196757_2 (sequence is synthesized)
agaatctcttcagggaagtgatgctggaaactttcaggaacctgacctctataggaaaaaaatggagtgaccagaacattgaatatgagtaccaaaaccccagaagaagcttcaggagtc

SEQ ID NO: 709319 - DNA, 120 bp, Artificial Sequence
  ENSG00000196757_3 (sequence is synthesized)
tcatagaagagaaagtcaatgaaattaaagaagacagtcattgtggagaaacttttacccaggttccagatgacagactgaacttccaggagaagaaagcttctcctgaagtaaaatcat

SEQ ID NO: 709320 - DNA, 120 bp, Artificial Sequence
  ENSG00000196757_4 (sequence is synthesized)
gtgacagctttgtgtgtgcagaagttggcataggtaactcatcttttaatatgagcatcagaggtgacactggacacaaggcatatgagtatcaggaatatggaccaaagccatataagt

SEQ ID NO: 709321 - DNA, 120 bp, Artificial Sequence
  ENSG00000196757_5 (sequence is synthesized)
gtcaacaacctaaaaataagaaagccttcaggtatcgcccatccattagaacacaagaaagggatcacactggagagaaaccctatgcttgtaaagtctgtggaaaaacctttattttcc

SEQ ID NO: 709322 - DNA, 120 bp, Artificial Sequence
  ENSG00000196757_6 (sequence is synthesized)
attcaagcattcgaagacacatggtaatgcacagtggggatggaacttataaatgtaaattttgtgggaaagccttccattctttcagtttatatcttatccatgaaagaactcacactg

SEQ ID NO: 709323 - DNA, 120 bp, Artificial Sequence
  ENSG00000196757_7 (sequence is synthesized)
gaaaccatatgaatgtaaacaatgtggtaaatcctttacttattctgctacccttcaaatacatgaaagaactcacactggggagaagccctatgaatgtagcaaatgtgataaagcatt

SEQ ID NO: 709324 - DNA, 120 bp, Artificial Sequence
  ENSG00000196757_8 (sequence is synthesized)
catttcatagttctagttcctatcatagacatgaaagaagtcacatgggagagaagccttatcaatgcaaagaatgtggaaaagcatttgcatataccagttctcttcgtagacatgaaa

SEQ ID NO: 709325 - DNA, 120 bp, Artificial Sequence
  ENSG00000196757_9 (sequence is synthesized)
ggacccactctgggaaaaaaccgtatgaatgtaagcaatatggggaaggcttatcctatcttataagttttcaaacacacataagaatgaactctggagaaagaccttataaatgtaaga

SEQ ID NO: 709326 - DNA, 120 bp, Artificial Sequence
  ENSG00000196757_10 (sequence is synthesized)
tatgtgggaaaggcttttattctgccaagtcatttcaaacacatgaaaaaactcacactggagagaaacgctataaatgcaagcaatgtggtaaagccttcaatctttccagttcctttc

SEQ ID NO: 709327 - DNA, 120 bp, Artificial Sequence
  ENSG00000196757_11 (sequence is synthesized)
cactggagagaaaccctatgaatgtaaggaatgtgggaaagccttcagatctacctcacaccttcgagtgcatggtaggactcatactggagagaaaccctatgaatgtaaggaatgtgg

SEQ ID NO: 709328 - DNA, 120 bp, Artificial Sequence
  ENSG00000196757_12 (sequence is synthesized)
tatgaatgtaaggaatgtgggaaagccttcagatatgtgaagcaccttcaaattcatgaaaggacagaaaaacacataagaatgccctctggagaaagaccttataaatgtagtatatgt

SEQ ID NO: 709329 - DNA, 120 bp, Artificial Sequence
  ENSG00000196757_13 (sequence is synthesized)
gagaaaggcttttattctgccaagtcatttcaaacacatgaaaaaactcacactggagagaaaccctatgaatgcaaccaatgtggtaaagccttcagatgttgcaattcccttcgatat

SEQ ID NO: 709330 - DNA, 65 bp, Artificial Sequence
  ENSG00000196757_14 (sequence is synthesized)
tgagtgtaagcaatgtgggaaagccttcagttgtgcctcaaaccttcgaaagcatggagatctgc

SEQ ID NO: 709331 - DNA, 120 bp, Artificial Sequence
  ENSG00000196757_15 (sequence is synthesized)
cacactggagagaaaccctatgaatgtaaggaatgcgaaaaagcattctgtaaattctcttcttttcaaatacatgaaaggaagcacagaggagagaagccctatgaatgtaagcattgt

SEQ ID NO: 709332 - DNA, 120 bp, Artificial Sequence
  ENSG00000196757_16 (sequence is synthesized)
aagccctatgaatgtaagcattgtgggaatggattcacatctgccaagattcttcaaatacatgcaagaacacacattggagagaaacactatgaatgtaaggaatgcggaaaagcattc

SEQ ID NO: 709333 - DNA, 120 bp, Artificial Sequence
  ENSG00000196757_17 (sequence is synthesized)
aattatttttcttccttgcatatacacgcaaggactcatatgggagagaagccatatgaatgtaaggattgtgggaaagcattcagctagcctggttccttttatggacatgaatagact

SEQ ID NO: 709334 - DNA, 120 bp, Artificial Sequence
  ENSG00000196757_18 (sequence is synthesized)
cacactggaaggaagcactatgaatgcaagcaatgtggcaaaactttcacattttccagttcttttcgatatcatgaaaggactcacactggggagaaaccctatcaatgtaagcagtgt

SEQ ID NO: 709335 - DNA, 120 bp, Artificial Sequence
  ENSG00000196757_19 (sequence is synthesized)
gggaaagccttcattccttttacttcttttcaatgtcatgaaaggactcacacgggagagaaaccctatgagtgtattctagttccgtttgatatcatgaaaggacttacactggagtga

SEQ ID NO: 709336 - DNA, 120 bp, Artificial Sequence
  ENSG00000196757_20 (sequence is synthesized)
ctatgaatgtaagcaatgtgggaaagccttcagatgtgcctcgcaccttcaacggcatggaagggttcacacttgggagaaactctatgaatgtaagcagtatgggaaagccttcagatc

SEQ ID NO: 709337 - DNA, 120 bp, Artificial Sequence
  ENSG00000196757_21 (sequence is synthesized)
ttcagatctgccaagattctttgaatacagataattaatgtaaacaattatcataagtatactaacatgttattctttttaaataagaaggtataataaaatatcccattggttttatgt

SEQ ID NO: 709338 - DNA, 120 bp, Artificial Sequence
  ENSG00000196757_22 (sequence is synthesized)
taacatagttcctagtggggtgggcttactttgtgtctgacccatttttctttcgagacaagacaacactcacactacaagagggaaagggtaaaggtcactcacgcgtggtggtacatg

SEQ ID NO: 709339 - DNA, 120 bp, Artificial Sequence
  ENSG00000196757_23 (sequence is synthesized)
ataaataaataaataaattgctttatggaagaaagtaagtatagatggagagaaagggatctgataaccgaagcagggaataaatgtttggagtccacagcatcctgagaacttcttggg

SEQ ID NO: 709340 - DNA, 120 bp, Artificial Sequence
  ENSG00000196767_0 (sequence is synthesized)
gccacattataactagtaggggatcctcaccgaccatggccacagctgcctcgaatccctacagcattctcagttccacctccctagtccatgcggactctgcgggcatgcagcagggga

SEQ ID NO: 709341 - DNA, 120 bp, Artificial Sequence
  ENSG00000196767_1 (sequence is synthesized)
gtcctttccgcaaccctcagaaacttctccaaagtgattacttgcagggagttcccagcaatgggcatcccctcgggcatcactgggtgaccagtctgagcgacgggggcccatggtcct

SEQ ID NO: 709342 - DNA, 120 bp, Artificial Sequence
  ENSG00000196767_2 (sequence is synthesized)
ccacactggccaccagccccctggaccagcaggacgtgaagcccgggcgcgaagacctgcaactgggtgcgatcatccatcaccgctcgccacacgtagcccaccactcaccgcacacta

SEQ ID NO: 709343 - DNA, 120 bp, Artificial Sequence
  ENSG00000196767_3 (sequence is synthesized)
accaccccaacgcctggggggccagcccggcaccgaacccgtctatcacgtcaagcggccaacccctcaacgtgtactcgcagcctggcttcaccgtgagcggcatgctggaacacgggg

SEQ ID NO: 709344 - DNA, 120 bp, Artificial Sequence
  ENSG00000196767_4 (sequence is synthesized)
gactcaccccacctccagctgccgcctctgcacagagcctgcacccggtgctccgagagcccccggatcacggcgaactgggctcgcaccattgccaggatcactccgacgaggagacgc

SEQ ID NO: 709345 - DNA, 120 bp, Artificial Sequence
  ENSG00000196767_5 (sequence is synthesized)
caacctctgatgagttggaacagttcgccaaacaattcaaacaaagaagaatcaagttgggcttcacgcaggccgacgtggggttggcgctgggcacactgtatggtaacgtgttctcgc

SEQ ID NO: 709346 - DNA, 120 bp, Artificial Sequence
  ENSG00000196767_6 (sequence is synthesized)
agaccaccatctgcaggttcgaggccttgcagctgagcttcaaaaatatgtgcaagctgaagcccctgctgaacaagtggctggaggaggcggattcgtccacagggagcccgaccagca

SEQ ID NO: 709347 - DNA, 120 bp, Artificial Sequence
  ENSG00000196767_7 (sequence is synthesized)
ttgacaagatcgctgcacagggccgcaagcgcaagaagcggacctccatcgaggtgagtgtcaagggcgtactggagacgcatttcctcaagtgtcccaagcctgccgcgcaggagatct

SEQ ID NO: 709348 - DNA, 120 bp, Artificial Sequence
  ENSG00000196767_8 (sequence is synthesized)
cctcgctggcagacagcctccagttggagaaggaagtggtgcgtgtctggttctgtaatcgaagacaaaaagagaaaagaatgactccgccaggggatcagcagccgcatgaggtttatt

SEQ ID NO: 709349 - DNA, 120 bp, Artificial Sequence
  ENSG00000196767_9 (sequence is synthesized)
cgcacaccgtgaaaacagacacatcttgccatgatctctgactggaggaagcgaggaggcggccggccgcactgggagcagcgcggatttctctttctctctcactctcttcctttcatt

SEQ ID NO: 709350 - DNA, 120 bp, Artificial Sequence
  ENSG00000196767_10 (sequence is synthesized)
ctagtattctttattatttttctctctctctcgttcgctcgctctctcgtactctctctcttttccctcctttcctttttctttcctttcccctttttctttcccttctttttccctttc

SEQ ID NO: 709351 - DNA, 120 bp, Artificial Sequence
  ENSG00000196767_11 (sequence is synthesized)
ctttcctttcattttctttcctttccccttcccttcccttcccttccatctcttcctttcctttcctttcttttcttttgctttcctttcctttttttcccttttctttccttttcataa

SEQ ID NO: 709352 - DNA, 120 bp, Artificial Sequence
  ENSG00000196767_12 (sequence is synthesized)
gaggttctaacttctgttgacaaaggaaacacatactctctcattcaggcttctcaatgctgatacacagttacattaagcagtccaagctgggatctcatattcctggctccccgggca

SEQ ID NO: 709353 - DNA, 120 bp, Artificial Sequence
  ENSG00000196767_13 (sequence is synthesized)
acagttccctttagccttttctgctgatcaatacatattgtttactcagagtaaggtttgtttggtcgctcctctctaggaagaacaaggagtgggataacgtgggggcggggtggggcg

SEQ ID NO: 709354 - DNA, 120 bp, Artificial Sequence
  ENSG00000196767_14 (sequence is synthesized)
ggggagggattgggaagacagatgtgtgcctctgaataacctttcagcgccttggttatagcagctgtatttcaggtgaaatttgttttacaatagactagttttgcatttttaaaaact

SEQ ID NO: 709355 - DNA, 120 bp, Artificial Sequence
  ENSG00000196767_15 (sequence is synthesized)
ttgagctgatggctttttaattgcttagaaaagggaggagatgaatgggaataggcggggagagagatgcctatctactcaccgcccccccccttcccaaatctctatgaggaggagagg

SEQ ID NO: 709356 - DNA, 120 bp, Artificial Sequence
  ENSG00000196767_16 (sequence is synthesized)
atacaacgaagagagttattgatgatgatattggttatattttttttccggggtggagtgcctaggaagggcagaatagggaagcctattaggtttgcaaactagtgcgaagtagcagcg

SEQ ID NO: 709357 - DNA, 120 bp, Artificial Sequence
  ENSG00000196767_17 (sequence is synthesized)
gcgatttcgcagctttctgccctccctcctggaagtgtggagcccgcgcaggctaccgcagcatagatcgaggtatctgagaaggattcggcggcaactctgggccaaagaggtggcctg

SEQ ID NO: 709358 - DNA, 120 bp, Artificial Sequence
  ENSG00000196767_18 (sequence is synthesized)
acagtctgggagggctccgcactcaccggactccaggattcctgcgcgcagaaatccaggcccccagcctcgctagggcgaccttccgcgcgacctcacttcggccctcctagaggaaag

SEQ ID NO: 709359 - DNA, 120 bp, Artificial Sequence
  ENSG00000196767_19 (sequence is synthesized)
actttgccttcacacgcgattactttcactggagatcacgacccggagacgctggcgactgggccagcgcctcccatttcggttcacctccagttcaccgccccctctgagtaagaaacc

SEQ ID NO: 709360 - DNA, 120 bp, Artificial Sequence
  ENSG00000196767_20 (sequence is synthesized)
cttggggaggggtggcgagggagtgggggataggcattctctgctcagtgcagaacggcaatgaaatgattggcaaaggtcacagggattctggtccatccgcgtaccacctctcccccc

SEQ ID NO: 709361 - DNA, 120 bp, Artificial Sequence
  ENSG00000196767_21 (sequence is synthesized)
atgtatataccgctgtctgtgtgtgggctcgtggggagctgtctcggcgtttctgataagcacagctggtggaagcccacagcgacgatccagcgagctagcgagcgcccgggaggctgg

SEQ ID NO: 709362 - DNA, 120 bp, Artificial Sequence
  ENSG00000196767_22 (sequence is synthesized)
gttcctgctttttaaaatataaatatatatatatttttaaatctctgtgtgtatgtgtctctgtgcgtgtgtgtgtgtgcgtgcgcgtgcaaacgtgtgtgtgtagatagctgtgtgtat

SEQ ID NO: 709363 - DNA, 120 bp, Artificial Sequence
  ENSG00000196767_23 (sequence is synthesized)
caaaaagtacaaaaaaaaaaaaaaacctggctaggctgtgtagagatcccaaaaatatgcagttgctgtggctttattgctagctagtatccacacaccaggtccacaggcgaacctcat

SEQ ID NO: 709364 - DNA, 120 bp, Artificial Sequence
  ENSG00000196767_24 (sequence is synthesized)
ggtccacaggcgaacctcattcccaaggagcacacacgtgtgaggccggccaagcacccaacacccagccgccgccggccagacctggctgggggcgctgcacgccactgctggccgcct

SEQ ID NO: 709365 - DNA, 120 bp, Artificial Sequence
  ENSG00000196767_25 (sequence is synthesized)
agtccggcctttaggcgcagctgctgtagacaaagcttcaaactacctaaggaccagaaagcccggcccggttgtcgaggatgcgttagtatgagttgccaggcctctggtccaccacac

SEQ ID NO: 709366 - DNA, 120 bp, Artificial Sequence
  ENSG00000196767_26 (sequence is synthesized)
tgtgtctccctcagctgcaggtcgaagagcatgtgttaattcaaatcccggacccttctacttttttgtcaagtctctgcattctgttggtagttaggttttagttctgggattttattt

SEQ ID NO: 709367 - DNA, 120 bp, Artificial Sequence
  ENSG00000196767_27 (sequence is synthesized)
ttttttcccccacactgagttcatgttttacaactgttgggagttttttgtttgtttcgattttttttctttgcagttaattgctatggttcgaacctgagttaacccaaatatttctgc

SEQ ID NO: 709368 - DNA, 120 bp, Artificial Sequence
  ENSG00000196767_28 (sequence is synthesized)
ctgccgactttataactgtacagttttgtatattaaacgtttttgaagttattaatttaaagaaagatcatttagtttattcatttagtaactgatgtataataaacgctattttcatta

SEQ ID NO: 709369 - DNA, 120 bp, Artificial Sequence
  ENSG00000196767_29 (sequence is synthesized)
ttgctttttcaactattttattcaaattgcctattgcagttgccaacaattatttattttcaataaattctgcattgtgtttaaaaggaaattctttcacagataagttggatgtcaaaa

SEQ ID NO: 709370 - DNA, 120 bp, Artificial Sequence
  ENSG00000196767_30 (sequence is synthesized)
agaaaacaattcgctgtaatgtttgatgtgaagttttagtcaaggggtttatattgacgcaatattttattgttgtaaaagattaaaaaggtttaaataaaacatttttccaaaaaaaaa

SEQ ID NO: 709371 - DNA, 120 bp, Artificial Sequence
  ENSG00000196772_0 (sequence is synthesized)
atggcaaatctcacaatcgtgactgaatttatccttatggggttttctaccaataaaaatatgtgcattttgcattcgattctcttcttgttgatttatttgtgtgccctgatggggaat

SEQ ID NO: 709372 - DNA, 120 bp, Artificial Sequence
  ENSG00000196772_1 (sequence is synthesized)
gtcctcattatcatgatcacaactttggaccatcatctccacacccccgtgtatttcttcttgaagaatctatctttcttggatctctgccttatttcagtcacggctcccaaatctatc

SEQ ID NO: 709373 - DNA, 120 bp, Artificial Sequence
  ENSG00000196772_2 (sequence is synthesized)
gccaattctttgatacacaacaactccatttcattccttggctgtgtttcccaggtctttttgttgctttcttcagcatctgcagagctgctcctcctcacggtgatgtcctttgaccgc

SEQ ID NO: 709374 - DNA, 120 bp, Artificial Sequence
  ENSG00000196772_3 (sequence is synthesized)
ggtctgattgctgtgatgcacacagctggcaccttctccttatcctactgtgggtccaacatggtccatcagttcttctgtgacattccccagttattagctatttcttgctcagaaaat

SEQ ID NO: 709375 - DNA, 120 bp, Artificial Sequence
  ENSG00000196772_4 (sequence is synthesized)
ttaataagagaaattgcactcatccttattaatgtagttttggatttctgctgttttattgtcatcatcattacctatgtccacgtcttctctacagtcaagaagatcccttccacagaa

SEQ ID NO: 709376 - DNA, 120 bp, Artificial Sequence
  ENSG00000196772_5 (sequence is synthesized)
ggccagtcaaaagcctactctatttgccttccacacttgctggttgtgttatttctttccactggattcattgcttatctgaagccagcttcagagtctccttctattttggatgctgta

SEQ ID NO: 709377 - DNA, 120 bp, Artificial Sequence
  ENSG00000196772_6 (sequence is synthesized)
atttctgtgttctacactatgctgcccccaacctttaatcccattatatacagtttgagaaacaaggccataaaggtggctctggggatgttgataaagggaaagctcaccaaaaagtaa

SEQ ID NO: 709378 - DNA, 120 bp, Artificial Sequence
  ENSG00000196772_7 (sequence is synthesized)
ggccctgtttcttactagagagagctctattttcttttctctttcctttgcctattaaacctctgctcctgaactcctggtgtgtgtccgtgtcctaaatcttctttgtgggagacagtg

SEQ ID NO: 709379 - DNA, 120 bp, Artificial Sequence
  ENSG00000196772_8 (sequence is synthesized)
aatcctggatatttaccccagacagtgacaccacttcaattgtaaagtttgccaacagaaagatctggcctttagtaagcactctataaatgaataaagaagcattgaaaacaagcctca

SEQ ID NO: 709380 - DNA, 120 bp, Artificial Sequence
  ENSG00000196772_9 (sequence is synthesized)
aagctgttgcttttcttctttcaataatagataccatttataatgtacacacattaattcttcatttttatctctaattcttaaaagtaaaaatttaaaaagacaaatgaaagcaattat

SEQ ID NO: 709381 - DNA, 80 bp, Artificial Sequence
  ENSG00000196776_0 (sequence is synthesized)
tcctgcctgtgacgcgcggcggcggtcggtcctgcctgtaacggcggcggcggctgctgctccggacacctgcggcggcg

SEQ ID NO: 709382 - DNA, 120 bp, Artificial Sequence
  ENSG00000196776_1 (sequence is synthesized)
agcggcgctgttgctgggctcggcgtgctgcggatcagctcagctactatttaataaaacaaaatctgtagaattcacgttttgtaatgacactgtcgtcattccatgctttgttactaa

SEQ ID NO: 709383 - DNA, 120 bp, Artificial Sequence
  ENSG00000196776_2 (sequence is synthesized)
tatggaggcacaaaacactactgaagtatacgtaaagtggaaatttaaaggaagagatatttacacctttgatggagctctaaacaagtccactgtccccactgactttagtagtgcaaa

SEQ ID NO: 709384 - DNA, 120 bp, Artificial Sequence
  ENSG00000196776_3 (sequence is synthesized)
aattgaagtctcacaattactaaaaggagatgcctctttgaagatggataagagtgatgctgtctcacacacaggaaactacacttgtgaagtaacagaattaaccagagaaggtgaaac

SEQ ID NO: 709385 - DNA, 120 bp, Artificial Sequence
  ENSG00000196776_4 (sequence is synthesized)
gatcatcgagctaaaatatcgtgttgtttcatggttttctccaaatgaaaatattcttattgttattttcccaatttttgctatactcctgttctggggacagtttggtattaaaacact

SEQ ID NO: 709386 - DNA, 120 bp, Artificial Sequence
  ENSG00000196776_5 (sequence is synthesized)
gccattcttttcgtcccaggtgaatattcattaaagaatgctactggccttggtttaattgtgacttctacagggatattaatattacttcactactatgtgtttagtacagcgattgga

SEQ ID NO: 709387 - DNA, 120 bp, Artificial Sequence
  ENSG00000196776_6 (sequence is synthesized)
ttaacctccttcgtcattgccatattggttattcaggtgatagcctatatcctcgctgtggttggactgagtctctgtattgcggcgtgtataccaatgcatggccctcttctgatttca

SEQ ID NO: 709388 - DNA, 120 bp, Artificial Sequence
  ENSG00000196776_7 (sequence is synthesized)
ggtttgagtatcttagctctagcacaattacttggactagtttatatgaaatttgtggcttccaatcagaagactatacaacctcctaggaaagctgtagaggaaccccttaatgcattc

SEQ ID NO: 709389 - DNA, 120 bp, Artificial Sequence
  ENSG00000196776_8 (sequence is synthesized)
aaagaatcaaaaggaatgatgaatgatgaataactgaagtgaagtgatggactccgatttggagagtagtaagacgtgaaaggaatacacttgtgtttaagcaccatggccttgatgatt

SEQ ID NO: 709390 - DNA, 120 bp, Artificial Sequence
  ENSG00000196776_9 (sequence is synthesized)
cactgttggggagaagaaacaagaaaagtaactggttgtcacctatgagacccttacgtgattgttagttaagtttttattcaaagcagctgtaatttagttaataaaataattatgatc

SEQ ID NO: 709391 - DNA, 120 bp, Artificial Sequence
  ENSG00000196776_10 (sequence is synthesized)
agaatgatgcctttcaggtcctagggcctctggcctctaggtaaccagtttaaattggttcagggtgataactacttagcactgccctggtgattacccagagatatctatgaaaaccag

SEQ ID NO: 709392 - DNA, 120 bp, Artificial Sequence
  ENSG00000196776_11 (sequence is synthesized)
tggcttccatcaaacctttgccaactcaggttcacagcagctttgggcagttatggcagtatggcattagctgagaggtgtctgccacttctgggtcaatggaataataaattaagtaca

SEQ ID NO: 709393 - DNA, 120 bp, Artificial Sequence
  ENSG00000196776_12 (sequence is synthesized)
ggcaggaatttggttgggagcatcttgtatgatctccgtatgatgtgatattgatggagatagtggtcctcattcttgggggttgccattcccacattcccccttcaacaaacagtgtaa

SEQ ID NO: 709394 - DNA, 120 bp, Artificial Sequence
  ENSG00000196776_13 (sequence is synthesized)
caggtccttcccagatttagggtacttttattgatggatatgttttccttttattcacataaccccttgaaaccctgtcttgtcctcctgttacttgcttctgctgtacaagatgtagca

SEQ ID NO: 709395 - DNA, 120 bp, Artificial Sequence
  ENSG00000196776_14 (sequence is synthesized)
ccttttctcctctttgaacatggtctagtgacacggtagcaccagttgcaggaaggagccagacttgttctcagagcactgtgttcacacttttcagcaaaaatagctatggttgtaaca

SEQ ID NO: 709396 - DNA, 120 bp, Artificial Sequence
  ENSG00000196776_15 (sequence is synthesized)
tatgtattcccttcctctgatttgaaggcaaaaatctacagtgtttcttcacttcttttctgatctggggcatgaaaaaagcaagattgaaatttgaactatgagtctcctgcatggcaa

SEQ ID NO: 709397 - DNA, 120 bp, Artificial Sequence
  ENSG00000196776_16 (sequence is synthesized)
caaaatgtgtgtcaccatcaggccaacaggccagcccttgaatggggatttattactgttgtatctatgttgcatgataaacattcatcaccttcctcctgtagtcctgcctcgtactcc

SEQ ID NO: 709398 - DNA, 120 bp, Artificial Sequence
  ENSG00000196776_17 (sequence is synthesized)
ccttcccctatgattgaaaagtaaacaaaacccacatttcctatcctggttagaagaaaattaatgttctgacagttgtgatcgcctggagtacttttagacttttagcattcgtttttt

SEQ ID NO: 709399 - DNA, 120 bp, Artificial Sequence
  ENSG00000196776_18 (sequence is synthesized)
acctgtttgtggatgtgtgtttgtatgtgcatacgtatgagataggcacatgcatcttctgtatggacaaaggtggggtacctacaggagagcaaaggttaattttgtgcttttagtaaa

SEQ ID NO: 709400 - DNA, 120 bp, Artificial Sequence
  ENSG00000196776_19 (sequence is synthesized)
aacatttaaatacaaagttctttattgggtggaattatatttgatgcaaatatttgatcacttaaaacttttaaaacttctaggtaatttgccacgctttttgactgctcaccaataccc

SEQ ID NO: 709401 - DNA, 120 bp, Artificial Sequence
  ENSG00000196776_20 (sequence is synthesized)
ttatttcttagtccatcagatgttcccgtgtgcctcttttatgccaaattgattgtcatatttcatgttgggaccaagtagtttgcccatggcaaacctaaatttatgacctgctgaggc

SEQ ID NO: 709402 - DNA, 120 bp, Artificial Sequence
  ENSG00000196776_21 (sequence is synthesized)
ctctcagaaaactgagcatactagcaagacagctcttcttgaaaaaaaaaatatgtatacacaaatatatacgtatatctatatatacgtatgtatatacacacatgtatattcttcctt

SEQ ID NO: 709403 - DNA, 120 bp, Artificial Sequence
  ENSG00000196776_22 (sequence is synthesized)
gattgtgtagctgtccaaaataataacatatatagagggagctgtattcctttatacaaatctgatggctcctgcagcactttttccttctgaaaatatttacattttgctaacctagtt

SEQ ID NO: 709404 - DNA, 120 bp, Artificial Sequence
  ENSG00000196776_23 (sequence is synthesized)
tgttactttaaaaatcagttttgatgaaaggagggaaaagcagatggacttgaaaaagatccaagctcctattagaaaaggtatgaaaatctttatagtaaaattttttataaactaaag

SEQ ID NO: 709405 - DNA, 120 bp, Artificial Sequence
  ENSG00000196776_24 (sequence is synthesized)
ttgtaccttttaatatgtagtaaactctcatttatttggggttcgctcttggatctcatccatccattgtgttctctttaatgctgcctgccttttgaggcattcactgccctagacaat

SEQ ID NO: 709406 - DNA, 120 bp, Artificial Sequence
  ENSG00000196776_25 (sequence is synthesized)
gccaccagagatagtgggggaaatgccagatgaaaccaactcttgctctcactagttgtcagcttctctggataagtgaccacagaagcaggagtcctcctgcttgggcatcattgggcc

SEQ ID NO: 709407 - DNA, 120 bp, Artificial Sequence
  ENSG00000196776_26 (sequence is synthesized)
agttccttctctttaaatcagatttgtaatggctcccaaattccatcacatcacatttaaattgcagacagtgttttgcacatcatgtatctgttttgtcccataatatgctttttactc

SEQ ID NO: 709408 - DNA, 120 bp, Artificial Sequence
  ENSG00000196776_27 (sequence is synthesized)
cctgatcccagtttctgctgttgactcttccattcagttttatttattgtgtgttctcacagtgacaccatttgtccttttctgcaacaacctttccagctacttttgccaaattctatt

SEQ ID NO: 709409 - DNA, 120 bp, Artificial Sequence
  ENSG00000196776_28 (sequence is synthesized)
tgtcttctccttcaaaacattctcctttgcagttcctcttcatctgtgtagctgctcttttgtctcttaacttaccattcctatagtactttatgcatctctgcttagttctattagttt

SEQ ID NO: 709410 - DNA, 120 bp, Artificial Sequence
  ENSG00000196776_29 (sequence is synthesized)
tttggccttgctcttctccttgattttaaaattccttctatagctagagcttttctttctttcattctctcttcctgcagtgttttgcatacatcagaagctaggtacataagttaaatg

SEQ ID NO: 709411 - DNA, 120 bp, Artificial Sequence
  ENSG00000196776_30 (sequence is synthesized)
ttgcatacatcagaagctaggtacataagttaaatgattgagagttggctgtatttagatttatcactttttaatagggtgagcttgagagttttctttctttctgttttttttttttgt

SEQ ID NO: 709412 - DNA, 120 bp, Artificial Sequence
  ENSG00000196776_31 (sequence is synthesized)
atttcacatgctctaaaaaccttcaaaggtgattatttttctcctggaaactccaggtccattctgtttaaatccctaagaatgtcagaattaaaataacagggctatcccgtaattgga

SEQ ID NO: 709413 - DNA, 120 bp, Artificial Sequence
  ENSG00000196776_32 (sequence is synthesized)
aatatttcttttttcaggatgctatagtcaatttagtaagtgaccaccaaattgttatttgcactaacaaagctcaaaacacgataagtttactcctccatctcagtaataaaaattaag

SEQ ID NO: 709414 - DNA, 120 bp, Artificial Sequence
  ENSG00000196776_33 (sequence is synthesized)
ctgtaatcaaccttctaggtttctcttgtcttaaaatgggtattcaaaaatggggatctgtggtgtatgtatggaaacacatactccttaatttacctgttgttggaaactggagaaatg

SEQ ID NO: 709415 - DNA, 120 bp, Artificial Sequence
  ENSG00000196776_34 (sequence is synthesized)
attgtcgggcaaccgtttattttttattgtattttatttggttgagggatttttttataaacagttttacttgtgtcatattttaaaattactaactgccatcacctgctggggtccttt

SEQ ID NO: 709416 - DNA, 120 bp, Artificial Sequence
  ENSG00000196776_35 (sequence is synthesized)
gttaggtcattttcagtgactaatagggataatccaggtaactttgaagagatgagcagtgagtgaccaggcagtttttctgcctttagctttgacagttcttaattaagatcattgaag

SEQ ID NO: 709417 - DNA, 120 bp, Artificial Sequence
  ENSG00000196776_36 (sequence is synthesized)
accagctttctcataaatttctctttttgaaaaaaagaaagcatttgtactaagctcctctgtaagacaacatcttaaatcttaaaagtgttgttatcatgactggtgagagaagaaaac

SEQ ID NO: 709418 - DNA, 120 bp, Artificial Sequence
  ENSG00000196776_37 (sequence is synthesized)
attttgtttttattaaatggagcattatttacaaaaagccattgttgagaattagatcccacatcgtataaatatctattaaccattctaaataaagagaactccagtgttgctatgtgc

SEQ ID NO: 709419 - DNA, 120 bp, Artificial Sequence
  ENSG00000196776_38 (sequence is synthesized)
aagatcctctcttggagcttttttgcatagcaattaaaggtgtgctatttgtcagtagccatttttttgcagtgatttgaagaccaaagttgttttacagctgtgttaccgttaaaggtt

SEQ ID NO: 709420 - DNA, 120 bp, Artificial Sequence
  ENSG00000196776_39 (sequence is synthesized)
tttttttttatatgtattaaatcaatttatcactgtttaaagctttgaatatctgcaatctttgccaaggtacttttttatttaaaaaaaaacataactttgtaaatattaccctgtaat

SEQ ID NO: 709421 - DNA, 120 bp, Artificial Sequence
  ENSG00000196776_40 (sequence is synthesized)
attatatatacttaataaaacattttaagctattttgttgggctatttctattgctgctacagcagaccacaagcacatttctgaaaaatttaatttattaatgtatttttaagttgctt

SEQ ID NO: 709422 - DNA, 120 bp, Artificial Sequence
  ENSG00000196776_41 (sequence is synthesized)
gttggactgagtctctgtattgcggcgtgtataccaatgcatggccctcttctgatttcaggtttgagtatcttagctctagcacaattacttggactagtttatatgaaatttgtgggg

SEQ ID NO: 709423 - DNA, 120 bp, Artificial Sequence
  ENSG00000196776_42 (sequence is synthesized)
agatattttcttgttcaatttaaggagaggtaaatttggtatcaatagaaaaaatgtttctgaaaaatttaaaccctggaaatgtatttatggcatggagtcagatgtttcagggagaga

SEQ ID NO: 709424 - DNA, 120 bp, Artificial Sequence
  ENSG00000196776_43 (sequence is synthesized)
agaacaaatcaagaagcattgcaagtatgctcatatggaatgcttaaggcttgtggttaaaaaatatatatatatggctgtcaatgtcttaggctcatggtagcagcagaaatcgtaata

SEQ ID NO: 709425 - DNA, 120 bp, Artificial Sequence
  ENSG00000196776_44 (sequence is synthesized)
attcttttgtcacatgggttatatccatattggagagaattaactcaggtgaaattaacttgtacactgtttggttttataatatttagagggatcacaactgactgatgtccctttgaa

SEQ ID NO: 709426 - DNA, 120 bp, Artificial Sequence
  ENSG00000196776_45 (sequence is synthesized)
gtaccattcttcataaatctttttttttcagaatgggccagccaactgtgacatcccttggatcggagatttagaactagaaagtattctttctacattattagggaagaaaaggagtta

SEQ ID NO: 709427 - DNA, 120 bp, Artificial Sequence
  ENSG00000196776_46 (sequence is synthesized)
cttggcggttagcaatattctattttgttttgttttgtttttagagacagggtctcattatgttgaccaggctggcctcgagctcctgggctcaagcaatgctcccacctcagcctccca

SEQ ID NO: 709428 - DNA, 120 bp, Artificial Sequence
  ENSG00000196776_47 (sequence is synthesized)
gctgggactacaggcatgtgccactacacctggcagtgtttattctgataaatacatttatgagctcaaaaatgtaactctaaaaccttatctctgaacttccatattaccatcagaaat

SEQ ID NO: 709429 - DNA, 120 bp, Artificial Sequence
  ENSG00000196776_48 (sequence is synthesized)
aaatttagatagttgtttagttctctttttctttgtagaacatagatataaggcatggtttcattgaagtcagttgtatatacatgtaactatcctgatgttcccaaataaagctctgta

SEQ ID NO: 709430 - DNA, 120 bp, Artificial Sequence
  ENSG00000196776_49 (sequence is synthesized)
tttctgcttagtttattggggaggctgctaaatgtagtgcatcccaacccattttaccctgttctactttaaaaagaggttggcttcttgtttggatacaaggaccaagtcactccccca

SEQ ID NO: 709431 - DNA, 120 bp, Artificial Sequence
  ENSG00000196776_50 (sequence is synthesized)
ggttcctccacagtaagggaggcctatttaaagccgcccatggcactaacagaaactggactcctatgagctcagatacataactgggcctcacaggggtgggacagtatgtagtctagg

SEQ ID NO: 709432 - DNA, 120 bp, Artificial Sequence
  ENSG00000196776_51 (sequence is synthesized)
aattggaaggatccattccatatcaaagaactgaagcatcgtgttgccctctcagcagcaagagtaaggtgatgcccctgtcagttatagttcctgagttcctctgtctttgattctttg

SEQ ID NO: 709433 - DNA, 120 bp, Artificial Sequence
  ENSG00000196776_52 (sequence is synthesized)
cctattagccagctagctcaccctcttgtttatgccactgttttttatcctattcatgccttctcacagacaacttttcttacctacagctttggactcatccttgtctcctttctgttt

SEQ ID NO: 709434 - DNA, 120 bp, Artificial Sequence
  ENSG00000196776_53 (sequence is synthesized)
ctttttcactttcccttcccatcaccaactttctgggtttttttctgtttcttcttagagtccagtggcagggagaaacttgtcagtccagtctgttgccatttttcctgtttgagaaag

SEQ ID NO: 709435 - DNA, 120 bp, Artificial Sequence
  ENSG00000196776_54 (sequence is synthesized)
actcaccagcttttggctggctcacagattggctttccttgggtcaggacccacccttttccctgccagctttggaagcttgacagaattcgagtgtgcagtggtggtaaataaatagta

SEQ ID NO: 709436 - DNA, 120 bp, Artificial Sequence
  ENSG00000196776_55 (sequence is synthesized)
aggaacacagagcagtcctggaggcgtgcctccatctgctgatgagaaaatccagtgctgtcatccagcccaggtcccagcggaatgggcctctctgttcagtaggatccccctcctgct

SEQ ID NO: 709437 - DNA, 120 bp, Artificial Sequence
  ENSG00000196776_56 (sequence is synthesized)
ggatccccctcctgctgagtggttcatggcatgtttctgttcaacgcttttccatctgtaggattcttattctgtatttatttgtttttttgggtttttttattttttgagatggagtct

SEQ ID NO: 709438 - DNA, 120 bp, Artificial Sequence
  ENSG00000196776_57 (sequence is synthesized)
ctggagtgcagtggcacgaccccagctcgctgcagcctctgcctcccaggacgagggagatcctcccacctcagccttccacgtagctgggactacaggcatgcaccacaggcatgcacc

SEQ ID NO: 709439 - DNA, 84 bp, Artificial Sequence
  ENSG00000196776_58 (sequence is synthesized)
accacggcatcatgttgcccaggctggtcttgaatgcctgagctcaagcaatctatttgccttggcctcccaaagtgctgggat

SEQ ID NO: 709440 - DNA, 120 bp, Artificial Sequence
  ENSG00000196776_59 (sequence is synthesized)
tacaggcatgagccaccacggccagccttctcatttgttttttttataaggaagctatctcttcttccctccccaactagggtattctttttccctttcgtcactttgctcatgtactgt

SEQ ID NO: 709441 - DNA, 120 bp, Artificial Sequence
  ENSG00000196776_60 (sequence is synthesized)
attccttcaacttcattaatgaatccatttggaagcagtgaaaaaggcaactcagaaagctaagaagaaatagatagaggaatactcagagctatctgagtattttctttagtttgttag

SEQ ID NO: 709442 - DNA, 120 bp, Artificial Sequence
  ENSG00000196776_61 (sequence is synthesized)
ctctttggagctttgaaactggaaagacccagggagtgatgtggagaaagagactgagcttgtaagacacaggagcagtgagctaagggagatggagtagtggggacaaattctggcaca

SEQ ID NO: 709443 - DNA, 120 bp, Artificial Sequence
  ENSG00000196776_62 (sequence is synthesized)
ttctgtctacactctgggtagatagaggagggaggatggagcacccatggtgggggtatgttggtgacagcattttcccaccagccagtgtaacaagtggctgatttgggggaaagatgg

SEQ ID NO: 709444 - DNA, 120 bp, Artificial Sequence
  ENSG00000196776_63 (sequence is synthesized)
cataaacaaatgagagaatgtgtttactatttgatgtagatgggttatttgcttcatttttcaaatcagtgtatataatcaagaatattcagcatgtttgaatagactgtcagagctgga

SEQ ID NO: 709445 - DNA, 120 bp, Artificial Sequence
  ENSG00000196776_64 (sequence is synthesized)
actctttcattaacatctctggcacctttagttttagccctgaacattttatcttaaaattaaacattaccaaatgccttagtttatttcatttattaaatttatattcttatttgttat

SEQ ID NO: 709446 - DNA, 120 bp, Artificial Sequence
  ENSG00000196776_65 (sequence is synthesized)
atgcctgtttgcgacaatgctcgctagtcccggtggtggcggtgttcacaggtaacaatgtttaccaccgtgaatggaacttgtttgattaaccctgatcagaggatgaaaacactaaag

SEQ ID NO: 709447 - DNA, 120 bp, Artificial Sequence
  ENSG00000196778_0 (sequence is synthesized)
gacaaggagatttccaggagccatgcttccctctaatatcacctcaacacatccagctgtctttttgttggtaggaattcctggtttggaacacctgcatgcctggatctccatcccctt

SEQ ID NO: 709448 - DNA, 120 bp, Artificial Sequence
  ENSG00000196778_1 (sequence is synthesized)
ctgctttgcttatactctggccctgctaggcaactgtacccttctcttcattatccaggctgatgcagccctccatgaacccatgtacctctttctggccatgttggcaaccattgactt

SEQ ID NO: 709449 - DNA, 120 bp, Artificial Sequence
  ENSG00000196778_2 (sequence is synthesized)
ggttctttcttctacaacgctgcccaaaatgcttgccatattctggttcagggatcaggagatcaacttctttgcctgtctggtccagatgttcttccttcactccttctccatcatgga

SEQ ID NO: 709450 - DNA, 120 bp, Artificial Sequence
  ENSG00000196778_3 (sequence is synthesized)
gtcagcagtgctgctggccatggcctttgaccgctatgtggccatctgcaagccattgcactacacgacggtcctgactgggtccctcatcaccaagattggcatggctgctgtggcccg

SEQ ID NO: 709451 - DNA, 120 bp, Artificial Sequence
  ENSG00000196778_4 (sequence is synthesized)
gcccattgctactgtgaacacatggctgtggtaaggctggcgtgtggggacactagcttcaacaatatctatggcattgctgtggccatgtttattgtggtgttggacctgctctttgtt

SEQ ID NO: 709452 - DNA, 120 bp, Artificial Sequence
  ENSG00000196778_5 (sequence is synthesized)
atcctgtcttatgtcttcatccttcaggcagttctccagcttgcctctcaggaggcccgctacaaggcatttgggacatgtgtgtctcacataggtgccatcctgtccacctacactcca

SEQ ID NO: 709453 - DNA, 120 bp, Artificial Sequence
  ENSG00000196778_6 (sequence is synthesized)
gtagtcatctcttcagtcatgcaccgtgtagcccgccatgctgcccctcgtgtccacatactccttgctattttctatctccttttcccacccatggtcaatcctatcatatatggagtc

SEQ ID NO: 709454 - DNA, 120 bp, Artificial Sequence
  ENSG00000196778_7 (sequence is synthesized)
aagaccaagcagattcgtgagtatgtgctcagtctattccagagaaagaacatgtagatggatagttctctttttttatcccacttgccaagtaatgagaatgctggattggggttgagg

SEQ ID NO: 709455 - DNA, 120 bp, Artificial Sequence
  ENSG00000196778_8 (sequence is synthesized)
cttagactgaaagaggaaggcggcactggtgctgcatgaagctaatgaaaagggcccaggattgtaagtcagactgaggactgtggatacagctgcaacttagggaaatagaaaacaagt

SEQ ID NO: 709456 - DNA, 120 bp, Artificial Sequence
  ENSG00000196778_9 (sequence is synthesized)
gatgttattggggtgagcaggaaggtgggagtgagctggaaggtgggggcactgtcaatttcttcccatagccattcctgatcttaggcatcagctctccaaccctgttattgcttctac

SEQ ID NO: 709457 - DNA, 120 bp, Artificial Sequence
  ENSG00000196778_10 (sequence is synthesized)
tctggtccttcaatagagggaacagaagtctcgatagtcccacccaactgtttggtacacaaactccagatgctctccccaccacagaggatgcctgcttccgtcctatgccaaacactg

SEQ ID NO: 709458 - DNA, 120 bp, Artificial Sequence
  ENSG00000196778_11 (sequence is synthesized)
tgggccatctccaagaagtcttagttgattattccagtttggatctgtcacttctcacctcctgtcattgctttttctaacccctggcaaatgccccatcccagttaaagggcttctgca

SEQ ID NO: 709459 - DNA, 120 bp, Artificial Sequence
  ENSG00000196778_12 (sequence is synthesized)
ttagtcaagaggaagaaaacgaggcctgaactagaaagatggcagggaaaggtattcatgacatcaccaagaacacagaaaacactacatatactccattcctttatgaaagttgtctta

SEQ ID NO: 709460 - DNA, 120 bp, Artificial Sequence
  ENSG00000196778_13 (sequence is synthesized)
gaatattaaatatccatagaattgatatcccatctactcaatgagattcaaatttctttgagggtagaaaatatggattatacttctccatgtctatgaaggctgctaggttattttgtt

SEQ ID NO: 709461 - DNA, 120 bp, Artificial Sequence
  ENSG00000196778_14 (sequence is synthesized)
ataaggaaaatgaggtttcattcctcacagatctacgagtcaggtcaaaccaggagtgcacctatagtctggtctgatagtagaggtttgaccttcccattgtcatagactcatcacatg

SEQ ID NO: 709462 - DNA, 120 bp, Artificial Sequence
  ENSG00000196778_15 (sequence is synthesized)
gctaaggaagacaaacctctcaaagtggtattgtaatctgggtgaaagacagtaggacctttattggctgagattggcccaaacagctgagtcacccaaacaggtgacttctttatccag

SEQ ID NO: 709463 - DNA, 120 bp, Artificial Sequence
  ENSG00000196778_16 (sequence is synthesized)
gtatgagtgaggaaatgtacctcaaattttgtgaccccaaaaccattattccttttagtactgaaattacccccatgtcttttctgacaagtaccctccaccctttgccactctttatag

SEQ ID NO: 709464 - DNA, 120 bp, Artificial Sequence
  ENSG00000196778_17 (sequence is synthesized)
cctactatctcccaattttatttctacagttagacagctccatttataagtagatctatttcttccattaagtcaattcctcttttacttccttcctgatagacatggccaattccttta

SEQ ID NO: 709465 - DNA, 120 bp, Artificial Sequence
  ENSG00000196778_18 (sequence is synthesized)
gtgaacatttatcaaaagagtcctccgatgttcctttttatcaatttatatcatgtatctagcttttcactgcatgtcttttgcctccaaaatacttagtaatatttattaaatgaacgg

SEQ ID NO: 709466 - DNA, 120 bp, Artificial Sequence
  ENSG00000196778_19 (sequence is synthesized)
atagaagagctgaatactatctttgaactatgaaccatgaaaagagaaataacacccttccctcttgaagctgagatttctgaaaataagaaaatacaatactgtcacacactgcataat

SEQ ID NO: 709467 - DNA, 120 bp, Artificial Sequence
  ENSG00000196778_20 (sequence is synthesized)
taacattatagtaccgtatatttactgtatgttttttaacttttaagttacatgtacaggtttgttatctaggtaaagccatgttatgggggttttgttgtacagattatttcatcaccc

SEQ ID NO: 709468 - DNA, 120 bp, Artificial Sequence
  ENSG00000196778_21 (sequence is synthesized)
tagtattcattagctatttttctgtttaaatacacaaatacttattgtgttacaattgcctacaatattgggtttgtagcctaggagcaacaggctataccatatagcttaggtgtatag

SEQ ID NO: 709469 - DNA, 120 bp, Artificial Sequence
  ENSG00000196778_22 (sequence is synthesized)
caagcgataccatctaggtttgtgtaaatacactctatgatgttcacaggttgataaaatcacctgaggacacatttctcagaatgtatccccatcattaagcaatgcatgactagttag

SEQ ID NO: 709470 - DNA, 120 bp, Artificial Sequence
  ENSG00000196778_23 (sequence is synthesized)
acatgattgtagttgtgatagactgtattactgtccaccaatatttagtctcctgtccttctatcatgggtagggtatttccttcactccacgaattttaaactttgctgtatgacttga

SEQ ID NO: 709471 - DNA, 120 bp, Artificial Sequence
  ENSG00000196778_24 (sequence is synthesized)
tttggccaatgaaatttgagtagccctgaaatgtacttcgagaatcagaaagtttattaaaaaaaacagatgctagtgaggttgtagagaaaaggaaacacttatatactgctggtagga

SEQ ID NO: 709472 - DNA, 85 bp, Artificial Sequence
  ENSG00000196778_25 (sequence is synthesized)
tgagtgatcctttagtgggtatgtacccaaaggaacctaagttgttctaccataaagataacatgtatgtgtacattcactgcag

SEQ ID NO: 709473 - DNA, 76 bp, Artificial Sequence
  ENSG00000196778_26 (sequence is synthesized)
gatcctttagtgggtatgtacccaaaggaacctaagttgttctaccataaagataacatgtatgtgtacataaagg

SEQ ID NO: 709474 - DNA, 73 bp, Artificial Sequence
  ENSG00000196778_27 (sequence is synthesized)
gtcaaaaagaattctttgcaaactaaaaggggaatagaaaaataaaataccacatgttctcacttataagtgg

SEQ ID NO: 709475 - DNA, 120 bp, Artificial Sequence
  ENSG00000196778_28 (sequence is synthesized)
ccacatgttctcacttataagtgggaactaaacaatgagaacacatggacacaaagaggagcaggagacactggggcctatttaaggtaggagggagaggatcaggaaaaataactatca

SEQ ID NO: 709476 - DNA, 120 bp, Artificial Sequence
  ENSG00000196778_29 (sequence is synthesized)
ggtactacgcctagtacctaggtgattaaagaacttgtacaacaaactcccgtgacacaagtttatttatataacacacctgcacatgtacctctaacctaaaataaaagttaaaaagga

SEQ ID NO: 709477 - DNA, 120 bp, Artificial Sequence
  ENSG00000196778_30 (sequence is synthesized)
cactatgatattggtgcaaagatcgaatggaaaggaacagaaagacaagaagttgcctggtccatatagacacgtgttattgcagaggtgtgtgatacatatgcaccatggaatactata

SEQ ID NO: 709478 - DNA, 120 bp, Artificial Sequence
  ENSG00000196778_31 (sequence is synthesized)
cagccatcaaaaagaaataagatcacgtcctttgtgggaacatggatggagctagaggccattattctttgcaaattaaagtgtgcattaactttcctgctttctttcccctctgctgca

SEQ ID NO: 709479 - DNA, 120 bp, Artificial Sequence
  ENSG00000196778_32 (sequence is synthesized)
aaacccagcaaagttccagttagaggctgtgacaaagccaaagtccacccacaatgagtaagaagtgtaaatgagaaattgtgtttgagctgctaaaaaaaaaaaataaactttaaaata

SEQ ID NO: 709480 - DNA, 120 bp, Artificial Sequence
  ENSG00000196778_33 (sequence is synthesized)
tggctggaaagcttatctttcattctttccctctaccagaagaataagcgtatcacagcctagactcatgatgaagatccatggagcagatgtgaatctgactcactgcctgtagcatag

SEQ ID NO: 709481 - DNA, 120 bp, Artificial Sequence
  ENSG00000196778_34 (sequence is synthesized)
tcataactgacccacagtgttcatataacatgaacaaggatgattttgttgtttttgtagtgaaccactgaaatttgggagttgtttgtttcacagccttacccaaggagcaccaattgc

SEQ ID NO: 709482 - DNA, 120 bp, Artificial Sequence
  ENSG00000196778_35 (sequence is synthesized)
tggagttgtgagttctatcttgcatttcaactcatgacagctcaagactgaatatttaaaggaaatacagtcttcttacagcatatcataaaattatttcacttatctctgcttttgtct

SEQ ID NO: 709483 - DNA, 120 bp, Artificial Sequence
  ENSG00000196778_36 (sequence is synthesized)
ttcaaactctcataatgaacacttcttcagtcagttctacaaaaagaagctcccatacatacttttacatgatctacttatactgtagggaccagccctacagggtctgtgagtttttcc

SEQ ID NO: 709484 - DNA, 120 bp, Artificial Sequence
  ENSG00000196778_37 (sequence is synthesized)
ccttgtgtgcagagatgagagatcatagaaataaagacaaaagataaagagaagaaaagacagctgggcctgggggaccagtaccaccaagatgcagagaccggtagtggccccgaatgc

SEQ ID NO: 709485 - DNA, 120 bp, Artificial Sequence
  ENSG00000196778_38 (sequence is synthesized)
tgtttggcagccaagaaggagagagagagaggacagcttacaccattatttcttctatgcatttcaaagacttttagtactttcacttattctgctactgctatctggaaggcagagcca

SEQ ID NO: 709486 - DNA, 120 bp, Artificial Sequence
  ENSG00000196778_39 (sequence is synthesized)
ggtgtacagggtggaacgtgaaagtgaaacaggagcgtgactgctgaagcacagcatcacagggatgctggatgctgtggcctccagatggctgtgggtgggcctgactaatgtcaggcc

SEQ ID NO: 709487 - DNA, 120 bp, Artificial Sequence
  ENSG00000196778_40 (sequence is synthesized)
tcccccagggaaagggagactccctttctgggtctgttagtaacgggtgtcttccctaggaactgactactactagaccacagtccactaggtaatgggtgccttcccaggcactggcat

SEQ ID NO: 709488 - DNA, 120 bp, Artificial Sequence
  ENSG00000196778_41 (sequence is synthesized)
ccactaggtaatgggtgccttcccaggcactggcattaccgctagaccaaggagccctctagtggccctgtccgggcgtgacagaggctcacacttgtcttctggtcacttctcaccgcg

SEQ ID NO: 709489 - DNA, 120 bp, Artificial Sequence
  ENSG00000196781_0 (sequence is synthesized)
aatgtaagcggcgcgagaggcgcgggcggcggcggcggtgggagcggcggctgcagaagcagcagcagcagaaacagcggcgggtactctgtgccccgcgtcccggaggcagccgactgc

SEQ ID NO: 709490 - DNA, 120 bp, Artificial Sequence
  ENSG00000196781_1 (sequence is synthesized)
gccaccccaccctcgcacggccgggcgggacccgcgccaccagcccggacctccgtcgtcccgcggcgaccaaaacccccgctggccccaccgctgtgactactctggactcgcccgcag

SEQ ID NO: 709491 - DNA, 120 bp, Artificial Sequence
  ENSG00000196781_2 (sequence is synthesized)
agtttgcccgccggggagggtggccgattggcggagcgcactcctgctgttttccccaccatctcgtggatgtcgtccctcgggtggtgagagaactttgcagtgggctggagcgccctt

SEQ ID NO: 709492 - DNA, 120 bp, Artificial Sequence
  ENSG00000196781_3 (sequence is synthesized)
tgcggagaagcacacgaaggtgaaggaaggaaagaaagaagaccgaggaagaaggagctcggaagaagggtccggagcggccggtccggccgtgcagggcgagtgcgcccgaggcgcggc

SEQ ID NO: 709493 - DNA, 120 bp, Artificial Sequence
  ENSG00000196781_4 (sequence is synthesized)
gccctgatgctccccgggctcgaggagcattgggcacttgcgggactgctctcggtggagtagccccgtcgggcccggagggtttgtgcaaccgcggagaacaccgagtgctggtcgcac

SEQ ID NO: 709494 - DNA, 120 bp, Artificial Sequence
  ENSG00000196781_5 (sequence is synthesized)
ggggcgtgccgagccgcctcccggcgcgccctccgcactttccccgcctcgtcatccgtcgctccccggccaggagcctccgctgcgtcttcaacctcgctcccctttgcgtcccgggag

SEQ ID NO: 709495 - DNA, 120 bp, Artificial Sequence
  ENSG00000196781_6 (sequence is synthesized)
cctgcgagcacccggccgaaggcgcagccgaatcttgcgggagtcgccccgaaagcgtcgggtttgtgtggggttagcgggggccgccgcgccacctgcacctcgcccgccgccgcctcg

SEQ ID NO: 709496 - DNA, 120 bp, Artificial Sequence
  ENSG00000196781_7 (sequence is synthesized)
gggaaagcccgaagaggaggcggaccaggagaagagcaaagaaaagcagtccgtctggatttgtttgcccaggactggcgccgcgcacgcggatcgccgaggggagtgcggtcggagtca

SEQ ID NO: 709497 - DNA, 120 bp, Artificial Sequence
  ENSG00000196781_8 (sequence is synthesized)
gtcaccgcgcccccgcctccccgcccgggcagctgaggccgggggttggagcgctgcccccgcgcacagtccccgagcgcccgacgtctccgcgcaggttcttgaagcagctgggcctgg

SEQ ID NO: 709498 - DNA, 120 bp, Artificial Sequence
  ENSG00000196781_9 (sequence is synthesized)
cttgaagcagctgggcctggggcgcccactaatgtggccctgagggccggagcccgcaccgacgggagcgggagccggagcagctgcgggcgccgagtggccggtgcgcccggcggagcg

SEQ ID NO: 709499 - DNA, 120 bp, Artificial Sequence
  ENSG00000196781_10 (sequence is synthesized)
cgcttctgcttggctttccggcttaattttcctcggcgggattaaagttggaaattgaccggagaattgagttgccggggaacagagccccggccgccgccagagcgatgttcccgcaga

SEQ ID NO: 709500 - DNA, 120 bp, Artificial Sequence
  ENSG00000196781_11 (sequence is synthesized)
gccggcacccgacgccgcaccaggctgcaggccagcccttcaagttcactatcccggagtccctggaccggattaaagaggaattccagttcctgcaggcgcagtatcacagccttaaat

SEQ ID NO: 709501 - DNA, 120 bp, Artificial Sequence
  ENSG00000196781_12 (sequence is synthesized)
tggaatgtgagaaactggcaagtgaaaagacagaaatgcagaggcactatgtgatgtattatgaaatgtcatatggattaaacattgaaatgcacaaacagactgaaatcgccaagagat

SEQ ID NO: 709502 - DNA, 120 bp, Artificial Sequence
  ENSG00000196781_13 (sequence is synthesized)
tgaatacgatttgtgcacaagtcatcccatttctgtctcaggaacatcaacaacaggtggcccaggctgttgaacgtgccaaacaggtgaccatggcagaattgaatgccatcatcgggc

SEQ ID NO: 709503 - DNA, 120 bp, Artificial Sequence
  ENSG00000196781_14 (sequence is synthesized)
agcagcagttgcaagctcagcatctttctcatggccacggacccccagttccccttacgcctcacccttcgggacttcagcctcctggaatcccgcccctcgggggcagtgccggccttc

SEQ ID NO: 709504 - DNA, 120 bp, Artificial Sequence
  ENSG00000196781_15 (sequence is synthesized)
ttgcgctgtctagtgctctgagtgggcagtctcacttggcaataaaagatgacaagaagcaccacgatgcagagcaccacagagacagagagccgggcacaagtaattccctcctggtcc

SEQ ID NO: 709505 - DNA, 120 bp, Artificial Sequence
  ENSG00000196781_16 (sequence is synthesized)
cagacagtctaagaggcacagataaacgcagaaatggacctgaattttccaatgacatcaagaaaaggaaggtggatgataaggactccagccactatgacagtgatggtgacaaaagcg

SEQ ID NO: 709506 - DNA, 120 bp, Artificial Sequence
  ENSG00000196781_17 (sequence is synthesized)
ccctgcccactcgccccgggaaaatggaatcgacaaaaatcgcctgctaaagaaggatgcttctagcagtccagcttccacggcctcctcggcaagttccacttctttgaaatccaaaga

SEQ ID NO: 709507 - DNA, 120 bp, Artificial Sequence
  ENSG00000196781_18 (sequence is synthesized)
aatgagcttgcatgaaaaagccagcacgcctgttctgaaatccagcacaccaacgcctcggagcgacatgccaacgccgggcaccagcgccactccaggcctccgtccaggtctcggcaa

SEQ ID NO: 709508 - DNA, 120 bp, Artificial Sequence
  ENSG00000196781_19 (sequence is synthesized)
gcctccagccatagaccccctcgttaaccaagcggcagctggcttgaggacacccctggcagtgcccggcccatatcctgctccttttgggatggtcccccacgctggcatgaacggcga

SEQ ID NO: 709509 - DNA, 120 bp, Artificial Sequence
  ENSG00000196781_20 (sequence is synthesized)
gctgaccagcccaggcgctgcctacgccagtttacacaacatgtcgccccagatgagcgccgcagccgccgcggccgccgtggtggcctacgggcgctcccccatggtggggtttgatcc

SEQ ID NO: 709510 - DNA, 120 bp, Artificial Sequence
  ENSG00000196781_21 (sequence is synthesized)
tccccctcacatgagagtacctaccattcctccaaacctggcaggaatccctggggggaaacctgcatactccttccacgttactgcagacggtcagatgcagcctgtcccttttccccc

SEQ ID NO: 709511 - DNA, 120 bp, Artificial Sequence
  ENSG00000196781_22 (sequence is synthesized)
cgacgccctcatcggacccggaatcccccggcatgctcgccagatcaacaccctcaaccacggggaggtggtgtgcgctgtgaccatcagcaaccccacgagacacgtgtacacaggcgg

SEQ ID NO: 709512 - DNA, 120 bp, Artificial Sequence
  ENSG00000196781_23 (sequence is synthesized)
gaagggctgcgtcaaggtctgggacatcagccaccctggcaataagagccctgtctcccagctcgactgtctgaacagagacaattatatccgttcctgtaaattgctacccgatggctg

SEQ ID NO: 709513 - DNA, 120 bp, Artificial Sequence
  ENSG00000196781_24 (sequence is synthesized)
cactctcatagtgggaggggaagccagtactttgtccatttgggacctggcggctccaaccccgcgcatcaaggcggagctgacgtcctcggcccccgcctgctacgccctggccatcag

SEQ ID NO: 709514 - DNA, 120 bp, Artificial Sequence
  ENSG00000196781_25 (sequence is synthesized)
ccccgattccaaggtctgcttctcatgctgcagcgacggcaacatcgctgtgtgggatctgcacaaccagacactagtgaggcaattccagggccacacagacggagccagctgtattga

SEQ ID NO: 709515 - DNA, 120 bp, Artificial Sequence
  ENSG00000196781_26 (sequence is synthesized)
catttctaatgatggcaccaagctctggacgggtggtttggacaacacagtcaggtcctgggacctgcgcgaggggcggcagctgcagcagcacgacttcacctcccagatcttctccct

SEQ ID NO: 709516 - DNA, 120 bp, Artificial Sequence
  ENSG00000196781_27 (sequence is synthesized)
ggggtactgccccaccggggagtggctggcagtgggcatggagagcagcaatgtggaggtgctgcacgtgaacaagcctgacaagtaccagctgcacctgcatgagagctgcgtgctgtc

SEQ ID NO: 709517 - DNA, 120 bp, Artificial Sequence
  ENSG00000196781_28 (sequence is synthesized)
cctgaaatttgcttactgtggtaaatggtttgtgagtactggaaaagataacctcctcaatgcttggcggaccccctatggagccagcatattccagtccaaagagtcctcgtcagtgct

SEQ ID NO: 709518 - DNA, 120 bp, Artificial Sequence
  ENSG00000196781_29 (sequence is synthesized)
tagctgtgacatctctgtggatgataagtacatagtcactggctcgggggacaagaaggctacagtctatgaagtcatctactgaaaacattatgtggtttaacgtttatagttgaattg

SEQ ID NO: 709519 - DNA, 120 bp, Artificial Sequence
  ENSG00000196781_30 (sequence is synthesized)
ggccaaaatgtttcgaatttatagaaatagaaaagttgtaactttaaaagagaaaaaaaattacaaacacctgtttccaaaccttgacagaaaactactttgagtctacaaagaggaggc

SEQ ID NO: 709520 - DNA, 120 bp, Artificial Sequence
  ENSG00000196781_31 (sequence is synthesized)
gacaagtccatcagcagaaagtcacctgtctacatagaccaaatggagcaccaaggccaagcggacagaggggccatgggttgtaggattgaggaacggaatctgccgactcacatgaca

SEQ ID NO: 709521 - DNA, 120 bp, Artificial Sequence
  ENSG00000196781_32 (sequence is synthesized)
gcccattctttctttctgggtgatctggggatcacgccttgcccaagtgtgagattacctttctgttccttgcagttcacctcactttccgtcctttgtagagcagtggtgtctccaatg

SEQ ID NO: 709522 - DNA, 120 bp, Artificial Sequence
  ENSG00000196781_33 (sequence is synthesized)
aacttgtttcctggttttgcatcttgtgaaatgtttttttgtatttttgttgaaggttaaacatttgtataaattgtaaatatatttggtttattacagtaaaggctttagtaccaataa

SEQ ID NO: 709523 - DNA, 120 bp, Artificial Sequence
  ENSG00000196781_34 (sequence is synthesized)
tgccccagcacattgagaagtttggaaacgtgtaattgatagaggaagttaggtcctagaactcagaatcttaaatgttgactttggctggaatacttcctcatttatcaacttaggtca

SEQ ID NO: 709524 - DNA, 120 bp, Artificial Sequence
  ENSG00000196781_35 (sequence is synthesized)
tctgtttcttgttttctttgcttgtaatcttcttttacatatccattttaagaagttttgtatttgcctttaaaaaaaataaatgaaaatagagtgtatgcctctaaataaggaaacaaa

SEQ ID NO: 709525 - DNA, 120 bp, Artificial Sequence
  ENSG00000196781_36 (sequence is synthesized)
tagaccccctcgttaaccaagcgggattggattttcatttggaattggtaccagggaatggaaagttcggactgaaagagaaatcttggattttatcgagaaaatcttcttttgagatta

SEQ ID NO: 709526 - DNA, 120 bp, Artificial Sequence
  ENSG00000196781_37 (sequence is synthesized)
agtcagctggcttgaggacacccctggcagtgcccggcccatatcctgctccttttgggatggtcccccacgctggcatgaacggcgagctgaccagcccaggcgctgcctacgccagtt

SEQ ID NO: 709527 - DNA, 120 bp, Artificial Sequence
  ENSG00000196781_38 (sequence is synthesized)
ctttgtcctcatactcttacagtgctgcaaagttgtgtgcatcgctaaagagagccccaacctatacagagagcaaacaatgagataagaggaactgtcgcaaagctttccactgaaaca

SEQ ID NO: 709528 - DNA, 120 bp, Artificial Sequence
  ENSG00000196781_39 (sequence is synthesized)
caggtcaccctggaagtttgcagggtttgctgtgggcatctgtagatttctcgatctcgttagattgcaggcatcttgacatcttggcaactgcctagttaatgccagtggcctgtacca

SEQ ID NO: 709529 - DNA, 120 bp, Artificial Sequence
  ENSG00000196781_40 (sequence is synthesized)
tattatggaaaactgttaactgcttaattgggtaattttcaaagaaagtaatgttgttaaatggggcgaaataagaagttaaatttgaaagtgaatgtgttcaaatgaaaggtttgataa

SEQ ID NO: 709530 - DNA, 120 bp, Artificial Sequence
  ENSG00000196781_41 (sequence is synthesized)
ttgcatctgttactacttagtttcataggctttaattctagtatgcattaaatattgggcaaaattgcacttgactaattttttgaagaaaagtaatttattctgtcaagaaataaaaaa

SEQ ID NO: 709531 - DNA, 120 bp, Artificial Sequence
  ENSG00000196781_42 (sequence is synthesized)
ataggctttgtgtatggttaaactgtaaatcttatgtttacaaaatactgtaattttcaggaaatcactgtattaggaatgtgcaatgacttatataaataaaagccatttttaaaactg

SEQ ID NO: 709532 - DNA, 120 bp, Artificial Sequence
  ENSG00000196782_0 (sequence is synthesized)
actccgctggcatggaggaggaggaggaggtggaggagcgagaggaggaggaggaggcggcggcggcggcggcggcgagcagttgatcattgtgatggtggcaggagcagcggcggcagc

SEQ ID NO: 709533 - DNA, 120 bp, Artificial Sequence
  ENSG00000196782_1 (sequence is synthesized)
ggcagcccagccgagcgttaggtgctgctctctgcgcggcgttttgcaaaggacttcaccgatctacttttgcagtcgcctcggactgtccatgtgtttacttcccccagcccgaggatt

SEQ ID NO: 709534 - DNA, 120 bp, Artificial Sequence
  ENSG00000196782_2 (sequence is synthesized)
cgatatctaggttcctgtgaaatgcaactgagcagccaaagtactttgagaacacggggcggcataaacaccaaaacttttttgtggaaggaaaatgcaataagcaagcttgccgttttc

SEQ ID NO: 709535 - DNA, 120 bp, Artificial Sequence
  ENSG00000196782_3 (sequence is synthesized)
cgatgcggtgtggagtgagtgtgtgtcgcgcgtgtccgcactggaggcatatgcttgtgtgtgtacatggggtgtgtttttcggtatgtagggagaaaatgcttgccaaccaccggaaat

SEQ ID NO: 709536 - DNA, 120 bp, Artificial Sequence
  ENSG00000196782_4 (sequence is synthesized)
ctcctggaatttattagaaaataatggattataaaaagaaggcaagcaaggagcggatctccccttgagttgcaacccgatttgctgctggctcagtttgttgtgattctttttgttgat

SEQ ID NO: 709537 - DNA, 120 bp, Artificial Sequence
  ENSG00000196782_5 (sequence is synthesized)
aggtgtctgatggtattccgataacgttccccccttttcttccccttgagcttttacagtttaaaaaaaggaaacaaaaaccaccccaaaatctccccccccgtttttttcgccccgtcg

SEQ ID NO: 709538 - DNA, 120 bp, Artificial Sequence
  ENSG00000196782_6 (sequence is synthesized)
ggatcgccgtttccatccatgtgcttgcgtctcccccgcgttccacttaaactattttaatccttggacccaaggaggaggctgataggggggtggataaaaaaagttcttccaaaatag

SEQ ID NO: 709539 - DNA, 120 bp, Artificial Sequence
  ENSG00000196782_7 (sequence is synthesized)
tgtgcccggggagcaggatgggggatttcgcagcccccgctgctgccgcgaatggcagtagtatttgcatcaacagtagcctgaacagcagcctcggcggggccgggatcggtgtgaata

SEQ ID NO: 709540 - DNA, 120 bp, Artificial Sequence
  ENSG00000196782_8 (sequence is synthesized)
atactcccaatagtactcccgctgctccgagtagcaatcacccggcagccggtggatgcggcggctccgggggccccggcggcggttcggcggccgttcccaagcacagcaccgtggtgg

SEQ ID NO: 709541 - DNA, 120 bp, Artificial Sequence
  ENSG00000196782_9 (sequence is synthesized)
agcggctccgccagcgcatcgagggctgccgtcggcaccacgtcaactgcgagaacaggtaccagcaggctcaggtggagcagctggagctggagcgccgggacaccgtgagcctctacc

SEQ ID NO: 709542 - DNA, 120 bp, Artificial Sequence
  ENSG00000196782_10 (sequence is synthesized)
agcggaccctggagcagagggccaagaaatcgggcgccggcaccggcaaacagcagcacccgagcaaaccccagcaagatgcggaggctgcctcggcggagcagaggaaccacacgctga

SEQ ID NO: 709543 - DNA, 120 bp, Artificial Sequence
  ENSG00000196782_11 (sequence is synthesized)
tcatgctacaagagactgtgaaaaggaagttggaaggagctcgatcaccacttaatggagaccagcagaatggtgcttgtgatgggaatttttctccgactagcaaacgaattcgaaagg

SEQ ID NO: 709544 - DNA, 120 bp, Artificial Sequence
  ENSG00000196782_12 (sequence is synthesized)
acatttctgcggggatggaagccatcaacaatttgcccagtaacatgccactgccttcagcttctcctcttcaccaacttgacctgaaaccttctttgcccttgcagaacagtggaactc

SEQ ID NO: 709545 - DNA, 120 bp, Artificial Sequence
  ENSG00000196782_13 (sequence is synthesized)
acactcctgggcttctagaagatctaagtaagaatggtaggctccctgagattaaacttcctgtcaacggttgcagtgacctggaggatagcttcaccatcttgcagagcaaagacctca

SEQ ID NO: 709546 - DNA, 120 bp, Artificial Sequence
  ENSG00000196782_14 (sequence is synthesized)
aacaagaacctctcgatgaccctacttgcatagacacatcagaaacatctctttcaaatcagaacaagctgttctcagacattaatctgaatgatcaggagtggcaagaattaatagatg

SEQ ID NO: 709547 - DNA, 120 bp, Artificial Sequence
  ENSG00000196782_15 (sequence is synthesized)
aattggccaacacggttcctgaggatgacatacaggacctgttcaacgaagactttgaagagaagaaggagccagaattctcgcagccagcaactgagacccctctctcccaggagagtg

SEQ ID NO: 709548 - DNA, 120 bp, Artificial Sequence
  ENSG00000196782_16 (sequence is synthesized)
cgagcgtgaagagcgacccctctcactctcccttcgcacatgtctccatgggatctccccaggcgaggccttcttcttctggtcctcccttttctactgtctccacggccactagtttac

SEQ ID NO: 709549 - DNA, 120 bp, Artificial Sequence
  ENSG00000196782_17 (sequence is synthesized)
cttctgttgccagcactcccgcagctccaaaccctgcaagctcaccagcaaactgtgctgtccagtcccctcaaactccaaaccaagcccacactccaggccaagctccacctcggcctg

SEQ ID NO: 709550 - DNA, 120 bp, Artificial Sequence
  ENSG00000196782_18 (sequence is synthesized)
gaaatggttatctcctgaatccggcagcagtgacagtggccggttcagcgtcagggcctgtggctgtgcccagctctgacatgtctccagcagaacagctcaaacagatggctgcacagc

SEQ ID NO: 709551 - DNA, 80 bp, Artificial Sequence
  ENSG00000196782_19 (sequence is synthesized)
atgtctccagcagaacagctcaaacagatggctgcacagcagcaacaaagggccaaactcatgcagcagaaacagcaaca

SEQ ID NO: 709552 - DNA, 120 bp, Artificial Sequence
  ENSG00000196782_20 (sequence is synthesized)
cttcaaattggtctcccttaggacctccctctagtccatatggagcagcttttactgcagaaaaaccaaatagcccaatgatgtacccccaagcctttaacaaccaaaaccctatagtgc

SEQ ID NO: 709553 - DNA, 120 bp, Artificial Sequence
  ENSG00000196782_21 (sequence is synthesized)
ctccaatggcaaacaacctgcagaagacaacaatgaataactacctccctcagaatcacatgaatatgatcaatcagcagccaaataacttgggtacaaactccttaaacaaacagcaca

SEQ ID NO: 709554 - DNA, 120 bp, Artificial Sequence
  ENSG00000196782_22 (sequence is synthesized)
atattctgacttatggcaacactaaacccctgacccacttcaatgcagacctgagtcagaggatgacaccaccagtggccaaccccaacaaaaaccccttgatgccgtatatccagcagc

SEQ ID NO: 709555 - DNA, 120 bp, Artificial Sequence
  ENSG00000196782_23 (sequence is synthesized)
agcaacagcagcagcaacagcaacagcagcagcagcagcagcagcagccgccacctccacagctccaggcccccagggcacacctgagcgaagaccagaaacgcctgcttctcatgaagc

SEQ ID NO: 709556 - DNA, 120 bp, Artificial Sequence
  ENSG00000196782_24 (sequence is synthesized)
agaaaggagtgatgaatcagcccatggcttacgctgcacttccatcccacggtcaggagcagcatccagttggacttccccgaaccacaggccccatgcagtcctccgtgcccccaggct

SEQ ID NO: 709557 - DNA, 120 bp, Artificial Sequence
  ENSG00000196782_25 (sequence is synthesized)
caggtggcatggtctcaggagccagtcccgcaggccccggcttcctgggcagccagccccaagcagccatcatgaagcagatgctcattgatcagcgggcccagttgatagagcagcaga

SEQ ID NO: 709558 - DNA, 120 bp, Artificial Sequence
  ENSG00000196782_26 (sequence is synthesized)
agcaacagttcctgcgggagcaaaggcagcagcagcagcagcagcagcagcagattttggcggaacagcagttgcagcaatcacatctaccccggcagcacctccagccacagcggaatc

SEQ ID NO: 709559 - DNA, 120 bp, Artificial Sequence
  ENSG00000196782_27 (sequence is synthesized)
catacccagtgcagcaggtcaatcagtttcaaggttctccccaggatatagcagccgtaagaagccaagcagccctccagagcatgcgaacgtcacggctgatggcacagaacgcaggca

SEQ ID NO: 709560 - DNA, 120 bp, Artificial Sequence
  ENSG00000196782_28 (sequence is synthesized)
gggaataggaccctcccagaaccctgggacgatggccaccgcagctgcgcagtcggagatgggactggccccttatagcaccacgcctaccagccaaccaggaatgtacaatatgagcac

SEQ ID NO: 709561 - DNA, 120 bp, Artificial Sequence
  ENSG00000196782_29 (sequence is synthesized)
aggcatgacccaaatgttgcagcatccaaaccaaagtggcatgagcatcacacataaccaagcccagggaccgaggcaacctgcctctgggcagggggttggaatggtgagtggctttgg

SEQ ID NO: 709562 - DNA, 120 bp, Artificial Sequence
  ENSG00000196782_30 (sequence is synthesized)
tcagagcatgctggtgaactcagccattacccagcaacatccacagatgaaagggccagtaggccaggccttgcctaggccccaagcccctccaaggctgcagagccttatgggaacagt

SEQ ID NO: 709563 - DNA, 120 bp, Artificial Sequence
  ENSG00000196782_31 (sequence is synthesized)
ccagcaaggagcacaaagctggcaacagaggagcttgcagggcatgcctgggaggactagtggagaattgggaccattcaacaatggcgccagctaccctcttcaagctgggcagccgag

SEQ ID NO: 709564 - DNA, 120 bp, Artificial Sequence
  ENSG00000196782_32 (sequence is synthesized)
actgaccaagcagcacttcccacagggactgagccagtcagtcgtggatgctaacacgggcacagtgaggaccctcaacccagctgccatgggtcggcagatgatgccatcgctcccggg

SEQ ID NO: 709565 - DNA, 120 bp, Artificial Sequence
  ENSG00000196782_33 (sequence is synthesized)
gcagcaaggcaccagccaggcgaggccaatggtcatgtctggcctgagccagggagtcccaggcatgccagcgttcagccagcccccagcacagcagcagatacccagtggcagctttgc

SEQ ID NO: 709566 - DNA, 120 bp, Artificial Sequence
  ENSG00000196782_34 (sequence is synthesized)
tccaagcagccagagccaagcctatgagcggaatgcccctcaggacgtgtcatacaattacagtggcgacggagctgggggttccttccctggcctcccggacggtgcagaccttgtgga

SEQ ID NO: 709567 - DNA, 120 bp, Artificial Sequence
  ENSG00000196782_35 (sequence is synthesized)
ctccatcatcaaaggcgggccaggggacgagtggatgcaggagcttgatgaattgtttggtaacccctaatcaagagaggccccaagatccacaactcgagtggttaaagcttaaaaagt

SEQ ID NO: 709568 - DNA, 120 bp, Artificial Sequence
  ENSG00000196782_36 (sequence is synthesized)
gaaaaagaaacaggatgttgacccatccttgttttttgtttttttgacccacgtaaactgagcaaaactgcagctggctgacaatggaagatccaggtgccaatccacagccccaccagg

SEQ ID NO: 709569 - DNA, 120 bp, Artificial Sequence
  ENSG00000196782_37 (sequence is synthesized)
cctcatttcacctgattttcacacagcaatcgagatgagacgccatgcagatcccggctgcgagagagggagacacccggaggagcaggtgggaagatgaagccggccagagcccctctg

SEQ ID NO: 709570 - DNA, 120 bp, Artificial Sequence
  ENSG00000196782_38 (sequence is synthesized)
cccagcatgccctgtgatcgcctggcccagcaggagctgcttcagccgagagggactattacccaagagaggtatcctcagcccctcctgccccaggtcgggagacagcagctttggaga

SEQ ID NO: 709571 - DNA, 120 bp, Artificial Sequence
  ENSG00000196782_39 (sequence is synthesized)
cacaaaagagacagagcctcagccagggagagtgagtcccccagaagaggctgggtggttgcacaggccaggtgcacaggttggaaatgcactgaactctgggtgccgagagatgtaagg

SEQ ID NO: 709572 - DNA, 120 bp, Artificial Sequence
  ENSG00000196782_40 (sequence is synthesized)
ctttgagacatgctactgaatttggagggcaggcacgaagaacagtgagattgtcaaaaggagacaaccacagatcctacaggactgtctgtctcctgccccatgatgaccctcaggaat

SEQ ID NO: 709573 - DNA, 120 bp, Artificial Sequence
  ENSG00000196782_41 (sequence is synthesized)
tgcaaaggctctgctgtcacaaggagagcaggctgagtttggagcagggtccatccggcagtcctgggacggcttccctctgctggtgcccctggtggcagtccctccaggtggggctgg

SEQ ID NO: 709574 - DNA, 120 bp, Artificial Sequence
  ENSG00000196782_42 (sequence is synthesized)
agcctgctggcgcccaatacaaaacccatacatccaggtgggtcacatctacttctggcggccgcagggcagggaaacccctactggaccctgtgtgtctgccagcctggagcctttgtc

SEQ ID NO: 709575 - DNA, 120 bp, Artificial Sequence
  ENSG00000196782_43 (sequence is synthesized)
tccagccctgcctttattcctccttgcctccacaccagcctccccttgcttctccttacagactatccaagaagtgaagcttatgtctttagggagccttgggcagagtccacataaatg

SEQ ID NO: 709576 - DNA, 120 bp, Artificial Sequence
  ENSG00000196782_44 (sequence is synthesized)
caggaagaacttagacaatgcctgaaatgcaaaggcgacactggagtcttctttctctaacgtgtagcgttgaatgaatatctgcctggaaccaagagggctgctctgatgtttgggagt

SEQ ID NO: 709577 - DNA, 120 bp, Artificial Sequence
  ENSG00000196782_45 (sequence is synthesized)
cggttttttgtgagccacatctgatatttctgatatccccaggaaggagtggcctggaggtcactggttcaggctccctttgggcgaaatcctgggagtgatgctctaaaaatccacctt

SEQ ID NO: 709578 - DNA, 120 bp, Artificial Sequence
  ENSG00000196782_46 (sequence is synthesized)
tcccatcatccctactcatcagaaagacaaatataaaatcccagagaggtggaggagctaaaaaagcaattgctccaccttacaaatttggatagaaaggagatgtagtttatttcatat

SEQ ID NO: 709579 - DNA, 120 bp, Artificial Sequence
  ENSG00000196782_47 (sequence is synthesized)
gggcaaagtagtcctcttccaaagtcctgtacagttgttctctgcaattgacgcacatctgccctaagcgaaatctgtcagaaggaatcaacaaggctccttgcctcccctcccaatccc

SEQ ID NO: 709580 - DNA, 120 bp, Artificial Sequence
  ENSG00000196782_48 (sequence is synthesized)
ccttttggaggacttgtggcttcggtgtcgtcctaagtgagagtggcgtgtgcttttttcctgtcccctcctccctccgtgtcctagacgctggctgccttctgtgcactcccaggcaga

SEQ ID NO: 709581 - DNA, 120 bp, Artificial Sequence
  ENSG00000196782_49 (sequence is synthesized)
tcactacggaagagtcggagcctgtggggttggactggccacactcagtcctgagaaggcgagttgccatggaaagctgggggcagaggtgtttttggagaggaggcggcaggcaaacat

SEQ ID NO: 709582 - DNA, 120 bp, Artificial Sequence
  ENSG00000196782_50 (sequence is synthesized)
tgcctttgacttgctctccgcgtacccggggttgtagagctgctcaggaaggggcaggatgtaaggccagaggtgcctggtgggtgagaagcccaggcaggggctgggcgccctctccga

SEQ ID NO: 709583 - DNA, 120 bp, Artificial Sequence
  ENSG00000196782_51 (sequence is synthesized)
agaggtggcagcagggtgaccctgaactccccaaatggggagtgatgccactggggaaactgagtggatcaaagagatgaaaccaaaaaaaagcaaacaaacaaatgagaagacacaaaa

SEQ ID NO: 709584 - DNA, 120 bp, Artificial Sequence
  ENSG00000196782_52 (sequence is synthesized)
cataattaccttttcctgaaaggtacaggaaataaatatataagcaatgatgagaaactggaggtggctaatggaagtgagacagacaggggtggggggctccattatcttttaaaagct

SEQ ID NO: 709585 - DNA, 120 bp, Artificial Sequence
  ENSG00000196782_53 (sequence is synthesized)
tcctccaaatgctcagtactgggaccaactaataggtagattttaatatggtggttttgttttggttttgtttttactacggtgctgatgtatatgtaatgtctaaaaaaagttatttgt

SEQ ID NO: 709586 - DNA, 120 bp, Artificial Sequence
  ENSG00000196782_54 (sequence is synthesized)
ttttacaatactgcagatatcactgggtctactatctgtaaaaaatatacatataaatatatatatactgtttgtttaaaatagagtatttttatttcattccttaactcatcatcacag

SEQ ID NO: 709587 - DNA, 120 bp, Artificial Sequence
  ENSG00000196782_55 (sequence is synthesized)
catcacagcagtggtattgcacttcagatgacatctaattactaatttgtactgtatgacctctggcaacttgctccattttattcagatttttctagttttctgtttttactttgtaca

SEQ ID NO: 709588 - DNA, 120 bp, Artificial Sequence
  ENSG00000196782_56 (sequence is synthesized)
ttgagcattgcttatttccttttaagaaatgtacagaacgctgaaatgtagaaatgaagtgatgttgacataccacttttaaagaaaacaaaaacaaaaataaaagattatctgaatcaa

SEQ ID NO: 709589 - DNA, 120 bp, Artificial Sequence
  ENSG00000196782_57 (sequence is synthesized)
agagggccaagaaatcgggcgccggcaccggcaaacagcagcacccgagcaaaccccagcaagatgcggaggctgcctcggcggagcagaggaaccacacgctgatcatggagcagcatc

SEQ ID NO: 709590 - DNA, 85 bp, Artificial Sequence
  ENSG00000196782_58 (sequence is synthesized)
atgtctccagcagaacagctcaaacagatggctgcacagcagcaacaaagggccaaactcatgcagcagaaacagcaacaactca

SEQ ID NO: 709591 - DNA, 120 bp, Artificial Sequence
  ENSG00000196782_59 (sequence is synthesized)
gactgtcgatgtgtgatgttctacaagtccactgtagtggggtctaattgcctgcagaaaacctctttacatcctcaggtagtggccaggtttggagtgttctttttccatttctcctaa

SEQ ID NO: 709592 - DNA, 120 bp, Artificial Sequence
  ENSG00000196787_0 (sequence is synthesized)
tgtggttgctcgtagtgagttgcgctcgctatgtctggacgtggcaagcagggaggcaaagcccgcgctaaggccaagactcgctcttctagggccggtctccagttccccgtgggccga

SEQ ID NO: 709593 - DNA, 120 bp, Artificial Sequence
  ENSG00000196787_1 (sequence is synthesized)
gtgcaccgcctgctccgcaaaggcaactatgccgagcgggtcggggccggcgcgccggtgtatctggcagcggtgctggagtacctgaccgccgagatcctggaactggcgggcaacgcg

SEQ ID NO: 709594 - DNA, 120 bp, Artificial Sequence
  ENSG00000196787_2 (sequence is synthesized)
gcccgcgacaacaagaagacccgcatcatcccgcgtcatctccaactggccatccgcaacgacgaggagctcaacaagctgctgggcaaagtcaccatcgcacagggcggtgtcctgccc

SEQ ID NO: 709595 - DNA, 120 bp, Artificial Sequence
  ENSG00000196787_3 (sequence is synthesized)
aacattcaggccgtgctactgcccaaaaagactgagagccaccacaaggcgaagggcaagtaactatctgtactagtttgtggcagctcaagtaaaatcgagtccaaaccaacggctctt

SEQ ID NO: 709596 - DNA, 120 bp, Artificial Sequence
  ENSG00000196787_4 (sequence is synthesized)
ttcagggccacccacgtcttctctaaaagaacttaacatttattccatgtgaaagaaagtgagacatggacaagactctagtcataaattacccatctttttgaaaacagtgtagcgaac

SEQ ID NO: 709597 - DNA, 120 bp, Artificial Sequence
  ENSG00000196787_5 (sequence is synthesized)
accgcagatttaaaagaaaaactagagggaaggtggtccagattttaccacgcttaaaagttaagatgtgaacaaatctcttaggccattacttaattttaaacttaatcagtgtgtgtc

SEQ ID NO: 709598 - DNA, 120 bp, Artificial Sequence
  ENSG00000196787_6 (sequence is synthesized)
cacagagcaccagtggcttcgtgagttcttgaagcactttggcccaaaagagttatcgcccgggctagaatttagcagacagctgttccacgcgggccagggcggcatgaagaagtcccg

SEQ ID NO: 709599 - DNA, 120 bp, Artificial Sequence
  ENSG00000196787_7 (sequence is synthesized)
ccgctacgtgcccggcacagtggccctgcgcgacgttcggcgctaccagaactccgagctgctgatcagcaagctgccgctcctgcgagagctcggcggtgacgccgctgcacgagagcg

SEQ ID NO: 709600 - DNA, 120 bp, Artificial Sequence
  ENSG00000196787_8 (sequence is synthesized)
aggctgaagaactttgtgacacaatagtccacctccctgcaaaggctctgtcagagactcacatctttcctgatggatagctgtgaagcattctcttacccaccctactgcatgttgcaa

SEQ ID NO: 709601 - DNA, 120 bp, Artificial Sequence
  ENSG00000196787_9 (sequence is synthesized)
caagttgcttacctagaagaacttgacaggatagttaataataaaccttaaaacccatgaagaaatctgaggtaaagtgttagcacacagactgttaaaatgtctgcctcacagatagga

SEQ ID NO: 709602 - DNA, 120 bp, Artificial Sequence
  ENSG00000196787_10 (sequence is synthesized)
gggaaaatatatagaggattataatatggttcaacaaatgttgatgagtattagaaatgtacattagaaatattagaaatgtttatgactattagaaaagtacagggtattgggcgttcc

SEQ ID NO: 709603 - DNA, 120 bp, Artificial Sequence
  ENSG00000196787_11 (sequence is synthesized)
tgacacaaactgaggcctcctagcaagactggcagttttctgtaaaggagggttatttactacggtagtgcaaataacttttggtgttgtagctaaataaggaatactcatgccaagatt

SEQ ID NO: 709604 - DNA, 80 bp, Artificial Sequence
  ENSG00000196787_12 (sequence is synthesized)
ttggtgttgtagctaaataaggaatactcatgccaagattgcacaattgtgcctcctccctctgttcactgaactctgat

SEQ ID NO: 709605 - DNA, 76 bp, Artificial Sequence
  ENSG00000196787_13 (sequence is synthesized)
agccaccacgcccggcccactctgaagtaatcttaagaagacgttaactcatttttcttgtgtattgtagacactt

SEQ ID NO: 709606 - DNA, 120 bp, Artificial Sequence
  ENSG00000196787_14 (sequence is synthesized)
gaagacgttaactcatttttcttgtgtattgtagacacttttggctgtctggtaacatggaaaatctcagaatgatgttttaagtatataaaatgccaaacaaagttaaattacagttat

SEQ ID NO: 709607 - DNA, 120 bp, Artificial Sequence
  ENSG00000196787_15 (sequence is synthesized)
caaagtatttttaaaacttcatagtgataaatgagactatatagttatattgttaatatagttaacacattacatgatttggtgagcctaattgctgttactaattagaggagtaaaaat

SEQ ID NO: 709608 - DNA, 120 bp, Artificial Sequence
  ENSG00000196787_16 (sequence is synthesized)
gtttcacgataactcagcaattgtaatgagaaatgaaacatctaatgtcttttgggttacaaagtaacaggtactgagatttgtggcctaaattcataataaagtgaaatgttcaagttc

SEQ ID NO: 709609 - DNA, 120 bp, Artificial Sequence
  ENSG00000196792_0 (sequence is synthesized)
aaagtgagtgagtgagacgggcagatggaggagggattgtaatggcggcagccggcagctccctgctctgacccacggcaggcacacagcaacgaccccttccccgcccctctcccggcc

SEQ ID NO: 709610 - DNA, 80 bp, Artificial Sequence
  ENSG00000196792_1 (sequence is synthesized)
cccttcccccagctgtcggcgtctcgccctgcgccccggccggggccccacacacaatggacgagcttgccggaggcggt

SEQ ID NO: 709611 - DNA, 120 bp, Artificial Sequence
  ENSG00000196792_2 (sequence is synthesized)
cacaatggacgagcttgccggaggcggtggtggcggcccggggatggcggcccctccccggcagcagcagggacctggggggaacctgggcctttcgcccggggggaacggagcggcggg

SEQ ID NO: 709612 - DNA, 120 bp, Artificial Sequence
  ENSG00000196792_3 (sequence is synthesized)
gcgggtcccgcggcaggccccgagctgtcccggccgcagcagtacactatcccggggatactgcactacatccagcacgagtgggctcggttcgagatggagcgggcgcactgggaggtg

SEQ ID NO: 709613 - DNA, 120 bp, Artificial Sequence
  ENSG00000196792_4 (sequence is synthesized)
gaacgggccgaactgcaggcccggattgcatttctacaaggcgaaagaaaaggtcaagagaacctgaagaaggacttagtaagaagaataaagatgttagagtatgcattaaaacaagaa

SEQ ID NO: 709614 - DNA, 120 bp, Artificial Sequence
  ENSG00000196792_5 (sequence is synthesized)
agggcaaaatatcacaaattaaaatatggcacggaactgaaccaaggtgacttgaaaatgccaacctttgagtcagaagaaaccaaagacacagaggctcccacagcacctcagaatagc

SEQ ID NO: 709615 - DNA, 120 bp, Artificial Sequence
  ENSG00000196792_6 (sequence is synthesized)
cagttaacgtggaagcaaggcagacagcttttaagacagtatcttcaggaagtaggttatacagatacaatattagatgtacggtctcagcgggtaaggtcattacttggactatctaat

SEQ ID NO: 709616 - DNA, 120 bp, Artificial Sequence
  ENSG00000196792_7 (sequence is synthesized)
tcagaaccaaatggatcagtagaaacaaagaatttagaacagatcctgaatggaggtgaatctcctaagcaaaagggacaagaaataaaaaggtcctctggtgatgttcttgagacgttc

SEQ ID NO: 709617 - DNA, 120 bp, Artificial Sequence
  ENSG00000196792_8 (sequence is synthesized)
aatttcttagaaaatgccgatgacagtgatgaagatgaggaaaatgacatgatcgaaggcatcccagaaggaaaagacaaacatcggatgaataaacataaaataggtaatgaaggttta

SEQ ID NO: 709618 - DNA, 120 bp, Artificial Sequence
  ENSG00000196792_9 (sequence is synthesized)
gctgctgacctaactgacgatcctgatactgaggaagcactgaaagaatttgattttttagtgactgctgaagatggtgaaggagctggagaagcacggagttcgggggatggcacagaa

SEQ ID NO: 709619 - DNA, 120 bp, Artificial Sequence
  ENSG00000196792_10 (sequence is synthesized)
tgggctgaaccaataacgtttccatctggaggaggcaagtcatttattatgggttctgatgatgttttgttaagtgtactgggccttggagaccttgcagacttgacggtaacaaatgat

SEQ ID NO: 709620 - DNA, 120 bp, Artificial Sequence
  ENSG00000196792_11 (sequence is synthesized)
gcagactatagttatgatttgcctgctaataaagatgcctttcgaaagacatggaatcccaagtatacactacgtagccattttgatggagtacgggcattagcttttcatcctgtagaa

SEQ ID NO: 709621 - DNA, 120 bp, Artificial Sequence
  ENSG00000196792_12 (sequence is synthesized)
cctgtgctggttactgcttctgaggaccataccctgaaactttggaacctgcaaaaaacagttcctgccaaaaagagtgcctctttagatgtagagcctatctacacatttagggcccac

SEQ ID NO: 709622 - DNA, 120 bp, Artificial Sequence
  ENSG00000196792_13 (sequence is synthesized)
atcggccctgttctgtcattagctattagttctaatggagaacagtgttttagtggtggtattgatgcaaccatccagtggtggaatatgccgagtcccagtgtagatccatatgataca

SEQ ID NO: 709623 - DNA, 120 bp, Artificial Sequence
  ENSG00000196792_14 (sequence is synthesized)
tatgagccaaatgttctagctggcactttagttggtcatacagatgcagtttggggtcttgcttatagtggcataaaaaatcaattactgtcttgttcagcagatggcactgttaggtta

SEQ ID NO: 709624 - DNA, 120 bp, Artificial Sequence
  ENSG00000196792_15 (sequence is synthesized)
tggaatccacaagaaaaattgccatgtatttgcacttacaatggagataaaaagcatggaatacctacatcagttgactttataggctgtgatccagctcatatggtaacctctttcaac

SEQ ID NO: 709625 - DNA, 120 bp, Artificial Sequence
  ENSG00000196792_16 (sequence is synthesized)
cagtaatttatgatttagaaacatcacagtcattggtgatactttcatcacaggtagattctggtttacaatctaataatcatatcaacagagtagtaagtcatcccacacttcctgtta

SEQ ID NO: 709626 - DNA, 120 bp, Artificial Sequence
  ENSG00000196792_17 (sequence is synthesized)
caataactgctcatgaagatagacacatcaaattttttgacaataaaacgggtaaaatgatccattctatggtagctcacttggatgctgttacaagtctagcagtagatcctaatggaa

SEQ ID NO: 709627 - DNA, 120 bp, Artificial Sequence
  ENSG00000196792_18 (sequence is synthesized)
tctatttgatgtctggaagccatgactgttccatcagattatggaatttagacagcaagacatgtgtgcaagaaataacagctcacagaaagaaattggatgaatcaatttatgatgttg

SEQ ID NO: 709628 - DNA, 120 bp, Artificial Sequence
  ENSG00000196792_19 (sequence is synthesized)
ctttccactcgtcaaaagcatatatagctagtgcaggagctgatgctcttgccaaagtatttgtatgaatcaacaaaaacttgcatcgtaacaagatttgcttggacagaaagagggtct

SEQ ID NO: 709629 - DNA, 120 bp, Artificial Sequence
  ENSG00000196792_20 (sequence is synthesized)
gcatcactgccatcagaaaggttactgatatgacactacatgtgatctgcctggtgaaggctatctggggcaggcacaaattggtggaaatcacatcttaatgtcaagctcattaagtta

SEQ ID NO: 709630 - DNA, 120 bp, Artificial Sequence
  ENSG00000196792_21 (sequence is synthesized)
actgtaattactgtattttgtgggacaaagaaaaaaggactccagtatttgtggcctgtactggatgtgaactgagcgtatatctgtttttaggtgtctttaagccaatgtggagtctga

SEQ ID NO: 709631 - DNA, 88 bp, Artificial Sequence
  ENSG00000196792_22 (sequence is synthesized)
gtgtgctgccttaggggttaggaatgtggtgctcttgttgggggaagtgagctccaagagtagctttttttcatctcttagtgatctt

SEQ ID NO: 709632 - DNA, 120 bp, Artificial Sequence
  ENSG00000196792_23 (sequence is synthesized)
aagtgagctccaagagtagctttttttcatctcttagtgatcttctgtttatcggttgaatgccacagattcccttttaaacttattttgctttaaaaaaaaaaaaaaagaaaaagaaaa

SEQ ID NO: 709633 - DNA, 120 bp, Artificial Sequence
  ENSG00000196792_24 (sequence is synthesized)
acttaaaatattttagcattagttgcacaaaatgtttggataaaattctagtttttataagtctttttatatatttagcctgtcacaacagtgctcaagattgtattgaagtttttctgc

SEQ ID NO: 709634 - DNA, 120 bp, Artificial Sequence
  ENSG00000196792_25 (sequence is synthesized)
attatacaaccctaaaacacagagatctcactgacccgttgccctgtaaccactttctttccttcttttgcctaatacagctcagctaagtccttccataaagatgctaaataactttca

SEQ ID NO: 709635 - DNA, 120 bp, Artificial Sequence
  ENSG00000196792_26 (sequence is synthesized)
tcatcacataaatgtcttcataaaccaaggactattaagtgtattaaaatgaaacagtggggtttagtactccaaatgaactcttaaagaaaaaaactaatcttggcatcctatcactat

SEQ ID NO: 709636 - DNA, 120 bp, Artificial Sequence
  ENSG00000196792_27 (sequence is synthesized)
gtgatattttgtacatcttactgtatttacaagtttatttatcaaggattatccatcttgctaatggcctattatttatttcactttttgttggtctttatatccttttattaatgtgct

SEQ ID NO: 709637 - DNA, 120 bp, Artificial Sequence
  ENSG00000196792_28 (sequence is synthesized)
aaaggaacctgtatatctattttggaactctttgaatagtctaaaatagactaaaaatggagtattttatagtttaaattacaaaccaaggtggttccccctaagatatatatcttggtt

SEQ ID NO: 709638 - DNA, 120 bp, Artificial Sequence
  ENSG00000196792_29 (sequence is synthesized)
taccatgattccaaacaaaactaacttgtttaaaaatatttggagtaaagttttatttgcattacaaataggatacaaaaatagttgaatcaggatacagaaatctgctgtgttttgact

SEQ ID NO: 709639 - DNA, 120 bp, Artificial Sequence
  ENSG00000196792_30 (sequence is synthesized)
agttatccctgttttatttttttagatgtgcttaattttatggtgtaactaaagattttgtttgtgtaatgcatgattaagacaataaagtattttttctagtcttccgagaaacttttc

SEQ ID NO: 709640 - DNA, 120 bp, Artificial Sequence
  ENSG00000196792_31 (sequence is synthesized)
tgatcagtttgcgagttttgatgagttttgtaaggtttttgttttacaaactatgaatcagcaaatttttaagattgtaccacatagcaaacatacagctgttgaaaaataatgtatata

SEQ ID NO: 709641 - DNA, 120 bp, Artificial Sequence
  ENSG00000196792_32 (sequence is synthesized)
aaatgcatataataaatattaaattgtgtacctgtatgttactgttggctacatcattttgtgttgaataataaagtgcaatactttattctccataattaaactaggaaatggagattt

SEQ ID NO: 709642 - DNA, 120 bp, Artificial Sequence
  ENSG00000196792_33 (sequence is synthesized)
caactgctgaggtttgggatgtagaccagggactaataagtaaactgaaggaacagtacaagaaggaacgaaaggggaagaaaggggtgaagagggccaacaggacaaaactctacgaca

SEQ ID NO: 709643 - DNA, 120 bp, Artificial Sequence
  ENSG00000196792_34 (sequence is synthesized)
attttaatatttctcctgttcttcaatttgtatatccactgcaacaattgctgcaaaacctgctattccaatgggggacaaatggtgcctctttagctttttggatatgtttggatccct

SEQ ID NO: 709644 - DNA, 120 bp, Artificial Sequence
  ENSG00000196792_35 (sequence is synthesized)
agtcattttttccaaagcaaagaggatgaatatgcaaacactctttatatttatggaattcatttgccagaaatttgaatatatttataaataggaaagtggtagctttcagattttttt

SEQ ID NO: 709645 - DNA, 90 bp, Artificial Sequence
  ENSG00000196792_36 (sequence is synthesized)
tgcccagcccagatttaaattattgagtaaaagagcactgatttttttaaaaattgcctgctaataaagatgcctttcgaaagacatgga

SEQ ID NO: 709646 - DNA, 120 bp, Artificial Sequence
  ENSG00000196792_37 (sequence is synthesized)
aaattgcctgctaataaagatgcctttcgaaagacatggaatcccaagtatacactacgtagccattttgatggagtacgggcattagcttttcatcctgtagaacctgtgctggttact

SEQ ID NO: 709647 - DNA, 120 bp, Artificial Sequence
  ENSG00000196792_38 (sequence is synthesized)
ttccactggacattttagccaacagttttaaatatatgtgttaaacacaccaaaaagaaacgaacaaacactccacatgccttccagtttactacttttaccactaaatattgtgctctt

SEQ ID NO: 709648 - DNA, 120 bp, Artificial Sequence
  ENSG00000196793_0 (sequence is synthesized)
ctagtcccgattatggttattacagtttgatgaaatgtggctgagatcattggcactgtggagattaagaaatgtgaggtcagagtgttgggtaaattgttcctgcgagtgttaaggttg

SEQ ID NO: 709649 - DNA, 120 bp, Artificial Sequence
  ENSG00000196793_1 (sequence is synthesized)
tcaggataatggtgggaatggggtgaagatgacaactcagcaatgacacaagaagagagtgacacagaaagattcagtagctgagaacttgagcgtagatatgttgtgggcaggagggaa

SEQ ID NO: 709650 - DNA, 120 bp, Artificial Sequence
  ENSG00000196793_2 (sequence is synthesized)
atgatttggatggaagtagccaagtaagtgagaaaggaaagactttccaacaaaacttggcttagctcactcagatccctgagctgcaaacttcttctatacctttcttaccttttccag

SEQ ID NO: 709651 - DNA, 120 bp, Artificial Sequence
  ENSG00000196793_3 (sequence is synthesized)
tgctgctgacttcaccccacttgcagggcatttgtgcagatggttgtttgttgaggaggaatgtgcttaatgttttaggaaccagttacattcaaggatgcctctgtggccttcaccgag

SEQ ID NO: 709652 - DNA, 120 bp, Artificial Sequence
  ENSG00000196793_4 (sequence is synthesized)
gaggagtgaggtcacctggactctgctcccaggaagctgtgcggagctgtgatgctgggcaactacagaaacttggtcttggagacttgaatgaaaattctgtggagaatcttcagcaga

SEQ ID NO: 709653 - DNA, 120 bp, Artificial Sequence
  ENSG00000196793_5 (sequence is synthesized)
aaacacttcaggatctgttacatgagctttcctcctggctagttttggaaggcatggccagtacaattactggaagtcaggattgtattgtgaatcatcgaggggaagtggatggggagc

SEQ ID NO: 709654 - DNA, 120 bp, Artificial Sequence
  ENSG00000196793_6 (sequence is synthesized)
ctgaactagatatttccccttgtcaacagtggggagaagcatcttctcctatttccagaaacagggacagtgtgatgactcttcaaagtggttgtttcgaaaacattgaaagtgaaacat

SEQ ID NO: 709655 - DNA, 120 bp, Artificial Sequence
  ENSG00000196793_7 (sequence is synthesized)
atttgcctttgaaagtctcaagccaaatagacacacaagactcttcagtgaagttctgtaagaatgagcctcaggatcatcaggaaagcagacgtctctttgtaatggaagaaagcactg

SEQ ID NO: 709656 - DNA, 120 bp, Artificial Sequence
  ENSG00000196793_8 (sequence is synthesized)
agagaaaagtgataaagggggaaagttgttcagagaaccttcaagttaaactggtgtctgatggacaagaactggcctcgccattgttaaatggtgaggcaacttgccagaatggccagt

SEQ ID NO: 709657 - DNA, 120 bp, Artificial Sequence
  ENSG00000196793_9 (sequence is synthesized)
tgaccataataactgtgggaaaatacttaacaccagcccagatggtcatccatatgagaaaatccacactgcagagaaacaatacgaatgtagtcagtgtggtaagaacttcagtcaaag

SEQ ID NO: 709658 - DNA, 120 bp, Artificial Sequence
  ENSG00000196793_10 (sequence is synthesized)
ctcagagctactacttcatcagagagaccacacagaagaaaaaccctacaaatgtgagcaatgtgggaagggcttcacaaggagctcgagtctgcttatccatcaggcagtccacacaga

SEQ ID NO: 709659 - DNA, 120 bp, Artificial Sequence
  ENSG00000196793_11 (sequence is synthesized)
tgagaagccttataagtgtgacaagtgtgggaagggcttcaccaggagctcaagtctgctcatccatcatgccgtccatacaggcgaaaaaccttataaatgtgacaagtgtgggaaggg

SEQ ID NO: 709660 - DNA, 120 bp, Artificial Sequence
  ENSG00000196793_12 (sequence is synthesized)
ctttagtcagagctccaaactgcacatccaccagcgagtccacactggagagaagccctatgagtgtgaggagtgtggtatgagcttcagtcagcgctcaaacctgcacatccaccagcg

SEQ ID NO: 709661 - DNA, 120 bp, Artificial Sequence
  ENSG00000196793_13 (sequence is synthesized)
agtacacacaggagagaggccctacaagtgtggtgagtgtgggaagggcttcagtcagagctcgaaccttcacattcaccggtgcatccacacaggagagaagccttaccaatgctatga

SEQ ID NO: 709662 - DNA, 120 bp, Artificial Sequence
  ENSG00000196793_14 (sequence is synthesized)
gtgtgggaagggtttcagccagagctcggatcttcgcatccatctcagagtccacactggagagaagccctatcactgtggcaagtgtgggaagggatttagccagagttccaaactcct

SEQ ID NO: 709663 - DNA, 120 bp, Artificial Sequence
  ENSG00000196793_15 (sequence is synthesized)
catccaccagagagtacatactggagagaagccctatgagtgcagcaagtgtgggaagggcttcagccagagctccaaccttcacatccaccagcgggttcacaagaaagatcctcgcta

SEQ ID NO: 709664 - DNA, 120 bp, Artificial Sequence
  ENSG00000196793_16 (sequence is synthesized)
actgacattagcccattcaggtcttcacagcgctcatactgtaaaaactgttaaatatttagtatcactcttactttatattctacaaaggagagagatgtaagggttatttagatatgt

SEQ ID NO: 709665 - DNA, 120 bp, Artificial Sequence
  ENSG00000196793_17 (sequence is synthesized)
tccctcactgaaaaatcactcattcaaaatatttaagtatcaagcactttgttatgctgtacaatgaatggattgttcttgtttctcagatgggtagagtaaaagtgtctgtactttaca

SEQ ID NO: 709666 - DNA, 120 bp, Artificial Sequence
  ENSG00000196793_18 (sequence is synthesized)
attcaactacatgttctacccagcattttaacggcaagaactttatatttattctcaagcagggcatgtttccctttgttcacattctctgagaaattgaaactctggtttctcttcaaa

SEQ ID NO: 709667 - DNA, 120 bp, Artificial Sequence
  ENSG00000196793_19 (sequence is synthesized)
gcatccggaatctggcccctgcaggcgtggggttccacgtgggaggaatccatcccctctgggagtaagaaatgaccagggtccgggaaccagttacattcaaggatgcctctgtggcct

SEQ ID NO: 709668 - DNA, 120 bp, Artificial Sequence
  ENSG00000196793_20 (sequence is synthesized)
ttgtatttcggggccctaggcgcgcgagcggtcagcatccggaatctggcccctgcaggcgtggggttccacgtgggaggaaccagttacattcaaggatgcctctgtggccttcaccga

SEQ ID NO: 709669 - DNA, 120 bp, Artificial Sequence
  ENSG00000196800_0 (sequence is synthesized)
atggccaaatctttcccagtattctcacttttgtcctttatcttgatacatttggtgttatcttctgtttcaggccctagacactggtggccaccacgtggaattattaaggtgaaatgt

SEQ ID NO: 709670 - DNA, 120 bp, Artificial Sequence
  ENSG00000196800_1 (sequence is synthesized)
ggcttatatcaacccatctgcggcaccaattttataacctatgataatccctgcattctgtgtgttgagagcttgaaatctcatggaagaatcaggttttaccatgatggaaaatgttag

SEQ ID NO: 709671 - DNA, 120 bp, Artificial Sequence
  ENSG00000196800_2 (sequence is synthesized)
ttatcttgatacatttggtgttatcttctgtttcaggccctagacactggtggccaccacgtggaattattaaggaaatctcatggaagaatcaggttttaccatgatggaaaatgttag

SEQ ID NO: 709672 - DNA, 120 bp, Artificial Sequence
  ENSG00000196805_0 (sequence is synthesized)
gatgtcttatcaacagcagcagtgcaagcagccctgccagccacctcctgtgtgccccacgccaaagtgcccagagccatgtccacccccgaagtgccctgagccctgcccaccaccaaa

SEQ ID NO: 709673 - DNA, 120 bp, Artificial Sequence
  ENSG00000196805_1 (sequence is synthesized)
gtgtccacagccctgcccacctcagcagtgccagcagaaatatcctcctgtgacaccttccccaccctgccagccaaagtatccaccgaagagcaagtaacagcttcaggattcatcagg

SEQ ID NO: 709674 - DNA, 120 bp, Artificial Sequence
  ENSG00000196805_2 (sequence is synthesized)
ataattggctcacctcgttccacagctccaccttcatcttctcatcaaagcttatcatggattcatagggagcttctttccccttagcctgtgatctgcccatgatgttccctgatagca

SEQ ID NO: 709675 - DNA, 120 bp, Artificial Sequence
  ENSG00000196805_3 (sequence is synthesized)
aaaggtttcctttctaaggctgccatactgccactgtccaggtggagactgagcaaaggaaccttggctttgtcagttcccagagcttcagcagaaagagctgcagctgtgtgcctggga

SEQ ID NO: 709676 - DNA, 120 bp, Artificial Sequence
  ENSG00000196805_4 (sequence is synthesized)
accatcagagaattctgttgatgtgttctgtgtctgtctttcacctgggcatgagcttctaccacctgtgcaattgtcacttttctttcactccctgaataaagtatctatgcatatata

SEQ ID NO: 709677 - DNA, 120 bp, Artificial Sequence
  ENSG00000196811_0 (sequence is synthesized)
gccccagaccttggagctgttgtcccacccctgtcactgcagagagctgaggcaccatgcatgggggccaggggccgctgctcctcctgctgctgctggctgtctgcctgggggcccagg

SEQ ID NO: 709678 - DNA, 120 bp, Artificial Sequence
  ENSG00000196811_1 (sequence is synthesized)
gccggaaccaggaggagcgcctgctcgcagacctgatgcaaaactacgaccccaacctgcggcccgcggaacgagactcggatgtggtcaatgtcagcctgaagctaaccctcaccaacc

SEQ ID NO: 709679 - DNA, 120 bp, Artificial Sequence
  ENSG00000196811_2 (sequence is synthesized)
tcatctccctgaacgagcgagaggaagccctcaccaccaatgtctggatagagatgcagtggtgcgactatcgcctgcgctgggatccgcgagactacgaaggcctgtgggtgctgaggg

SEQ ID NO: 709680 - DNA, 120 bp, Artificial Sequence
  ENSG00000196811_3 (sequence is synthesized)
tgccgtccaccatggtgtggcggccggatatcgtgctggagaacaacgtggacggtgtcttcgaggtggccctctactgcaatgtgctcgtgtcccctgacggctgtatctactggctgc

SEQ ID NO: 709681 - DNA, 120 bp, Artificial Sequence
  ENSG00000196811_4 (sequence is synthesized)
cgcctgccatcttccgttccgcctgctctatctcagtcacctacttccccttcgactggcagaactgctcccttatcttccagtcccagacttacagcaccaatgagattgatctgcagc

SEQ ID NO: 709682 - DNA, 120 bp, Artificial Sequence
  ENSG00000196811_5 (sequence is synthesized)
tgagtcaggaagatggccagaccatcgagtggattttcattgaccctgaggccttcacagagaatggggagtgggccatccagcaccgaccagccaagatgctcctggacccagcggcgc

SEQ ID NO: 709683 - DNA, 120 bp, Artificial Sequence
  ENSG00000196811_6 (sequence is synthesized)
cagcccaggaagcaggccaccagaaggtggtgttctacctgctcatccagcgcaagcccctcttctacgtcatcaacatcatcgccccctgtgtgctcatctcctctgtcgccatcctca

SEQ ID NO: 709684 - DNA, 120 bp, Artificial Sequence
  ENSG00000196811_7 (sequence is synthesized)
tccacttccttcctgccaaggctgggggccagaagtgtaccgtcgccatcaacgtgctcctggcccagactgtcttcctcttccttgtggccaagaaggtgcctgaaacctcccaggcgg

SEQ ID NO: 709685 - DNA, 120 bp, Artificial Sequence
  ENSG00000196811_8 (sequence is synthesized)
tgccactcatcagcaagtacctgaccttcctcctggtggtgaccatcctcattgtcgtgaatgctgtggttgtgctcaatgtctccttgcggtctccacacacacactccatggcccgag

SEQ ID NO: 709686 - DNA, 120 bp, Artificial Sequence
  ENSG00000196811_9 (sequence is synthesized)
gggtccgcaaggtgttcctgaggctcttgccccagctgctgaggatgcacgttcgcccgctggccccggcagctgtgcaggacacccagtcccggctacagaatggctcctcgggatggt

SEQ ID NO: 709687 - DNA, 120 bp, Artificial Sequence
  ENSG00000196811_10 (sequence is synthesized)
cgatcacaactggggaggaggtggccctctgcctgcctcgcagtgaactcctcttccagcagtggcagcggcaagggctggtggcggcagcgctggagaagctagagaaaggcccggagt

SEQ ID NO: 709688 - DNA, 120 bp, Artificial Sequence
  ENSG00000196811_11 (sequence is synthesized)
tagggctgagccagttctgtggcagcctgaagcaggctgccccagccatccaggcctgtgtggaagcctgcaacctcattgcctgtgcccggcaccagcagagtcactttgacaatggga

SEQ ID NO: 709689 - DNA, 120 bp, Artificial Sequence
  ENSG00000196811_12 (sequence is synthesized)
atgaggagtggttcctggtgggccgagtgctggaccgcgtctgcttcctggccatgctctcgctcttcatctgtggcacagctggcatcttcctcatggcccactacaaccgggtgccgg

SEQ ID NO: 709690 - DNA, 120 bp, Artificial Sequence
  ENSG00000196811_13 (sequence is synthesized)
ccctgccattccctggagatccacgcccctacctgccctcaccagactgagccaaccaaccactgtggggcatgtgggagtcacacacgtgggtcacactgagtcttatcagccacgttc

SEQ ID NO: 709691 - DNA, 120 bp, Artificial Sequence
  ENSG00000196811_14 (sequence is synthesized)
tcctactgaggtcctaagtgtgctctttgggaagtgcccttcaggactgtgtgagccaaacagccctgagaaaagctggggaaacagtctgagctggagtccgagagtggttgggggtgg

SEQ ID NO: 709692 - DNA, 120 bp, Artificial Sequence
  ENSG00000196811_15 (sequence is synthesized)
gccgtggctagtgtcctgctgcagtcagcacacacgtgggattggctagctcatcctggcaccagccacccctccactcagtgcactcccctcacttaggcaaagcattattcattccca

SEQ ID NO: 709693 - DNA, 120 bp, Artificial Sequence
  ENSG00000196811_16 (sequence is synthesized)
actggctccccttttacaagttctccctgaaagagggcagtcacaagaggtgtgaagagtagcagccgatgctctctccaaagcagggcagcagcccataccagctggcatctccccccc

SEQ ID NO: 709694 - DNA, 120 bp, Artificial Sequence
  ENSG00000196811_17 (sequence is synthesized)
gtgccttctgggtacaataagcacccaattctcaacagccccagtggcctttccattcatgtgcatttttctgccactgaccacaagacgatttcctgagttttgtaatcctcttttttt

SEQ ID NO: 709695 - DNA, 120 bp, Artificial Sequence
  ENSG00000196811_18 (sequence is synthesized)
tttttttttttttttttagtttttgatgtgttgttgttgttttgtttagttttgagatagagcctcactcttgtcatgcaagttggagtggagtggcatgatcatggctcactgcagcct

SEQ ID NO: 709696 - DNA, 120 bp, Artificial Sequence
  ENSG00000196811_19 (sequence is synthesized)
gcctcagcctcccaagtagctggcaccacaggcatgcaccactacacccagctacttttaaatttttagtagagatgaggttttgctatgttgcctaggttggtcttgaactcctgagct

SEQ ID NO: 709697 - DNA, 120 bp, Artificial Sequence
  ENSG00000196811_20 (sequence is synthesized)
aactcctgagctcaagtgatcctcccacttgagtcttgggattacaggcataagccactgtacctggcctcctttttaattaagagctcctcacagcagtatggataagcaagagtcatt

SEQ ID NO: 709698 - DNA, 120 bp, Artificial Sequence
  ENSG00000196811_21 (sequence is synthesized)
gcaagagtcattattccccatgttatataggcaaattgagcctagagtaagcgggactccacacaacagtggtggttaaacaaggtttgaagtccagaattcctgactctgacccaatct

SEQ ID NO: 709699 - DNA, 120 bp, Artificial Sequence
  ENSG00000196811_22 (sequence is synthesized)
gacactctaagattctacggcctgaaaaacaggcccttcttcccaaaggatggttaagacaaggaagagctaggcaagaggaggtgtggagttaacagagagccactgagctcttcattc

SEQ ID NO: 709700 - DNA, 120 bp, Artificial Sequence
  ENSG00000196811_23 (sequence is synthesized)
caggaggagactttgactggcctcccttgaccccactaatcaggtagtaaggctggggtcttcctgggggagaggcaaggtcctgctctgagattacagccggcacacgagtttggctgg

SEQ ID NO: 709701 - DNA, 120 bp, Artificial Sequence
  ENSG00000196811_24 (sequence is synthesized)
ctggtaaccaggggacacccttgggcaagtcacctatgctccctgaggctgttccctcatctgtaaataaggtgcaaaaaataatccattcctggccaggtgtggtggctcacacctgca

SEQ ID NO: 709702 - DNA, 120 bp, Artificial Sequence
  ENSG00000196811_25 (sequence is synthesized)
cagcaccttgggaggacaaggtgggtggactgcttgagctcaggagcccacgaacccaggaacccagcctgggcaacatggggacacccggcctctaccaaaaaatacaaaacttagctg

SEQ ID NO: 709703 - DNA, 85 bp, Artificial Sequence
  ENSG00000196811_26 (sequence is synthesized)
taggctgcagtgagctgtgatcatgtgactgcactccagcctgatgacacagtaagaccctgtctcaaaaaaaataaaaaaatta

SEQ ID NO: 709704 - DNA, 120 bp, Artificial Sequence
  ENSG00000196811_27 (sequence is synthesized)
gacacagtaagaccctgtctcaaaaaaaataaaaaaattacaaaactgaaaaaagaaaagtgaaagtgccacataaaggcctgacgacaggatatgctggcaggaggggaccttggaaat

SEQ ID NO: 709705 - DNA, 120 bp, Artificial Sequence
  ENSG00000196811_28 (sequence is synthesized)
atgccctccctccaagcacaggattgctgtctttgggattcaatcaccagcaagttcgtattatttactccagtgtgagtctgtgtctgtgcatgcacagtgtgtttgaagcaagagcag

SEQ ID NO: 709706 - DNA, 120 bp, Artificial Sequence
  ENSG00000196811_29 (sequence is synthesized)
agtcagagctatagagaactagaggagttagggagagtgggggagaacttcaatcagggagggaatctgatgacagtggggccatttccggttcccaccagccccttactagttgtgtat

SEQ ID NO: 709707 - DNA, 120 bp, Artificial Sequence
  ENSG00000196811_30 (sequence is synthesized)
ctggcacaagtctctcaacctctctgaaagcctcagagggcagaggattagctccttgtacacaataaacactcaaatgttaacattagctgccattactataagttactgtctcatggg

SEQ ID NO: 709708 - DNA, 120 bp, Artificial Sequence
  ENSG00000196811_31 (sequence is synthesized)
atccatacagcaacctaaggaggtaggtcgaggcatacctcaaagacattgcaggttcagttccagaccaacacaagaaagcaagtcacatgaatgtttttggtttcccaatgcatataa

SEQ ID NO: 709709 - DNA, 120 bp, Artificial Sequence
  ENSG00000196811_32 (sequence is synthesized)
aagttatgtttacactatactgtagaccagcaagagtgcaatagcattgtctaataaaacaatatacatacctaaatttaaaaatactttattgctaaaaaatgctgattatcaatctga

SEQ ID NO: 709710 - DNA, 120 bp, Artificial Sequence
  ENSG00000196811_33 (sequence is synthesized)
tcttccagtgaggccatttattggggaggattaagagagctgctctcagaggggcctgggcagtggtggggtaaggcctgggcaaggcttctggccttggctctggcagcacctagaggc

SEQ ID NO: 709711 - DNA, 120 bp, Artificial Sequence
  ENSG00000196811_34 (sequence is synthesized)
ctggctccatctcccctgggcctctgtgcccatctcaggctaagacacctgaaggtgcccaagctctccctgctaagcccgagtcccctcactcatcctttactgcctcagtttcctcac

SEQ ID NO: 709712 - DNA, 120 bp, Artificial Sequence
  ENSG00000196811_35 (sequence is synthesized)
ctgtgctccaaggggagacattcacgcctggggtgcgtgggtgagaaggcacacatgcacacaagatgcgtgtctgcgcacacacgaaaccactgcacactccaggcccacagggaggca

SEQ ID NO: 709713 - DNA, 120 bp, Artificial Sequence
  ENSG00000196812_0 (sequence is synthesized)
gagtctagtctttgttcggggctgtccaaaggacgctagctgttgcacctgttcctccctgcgcgtaagatagaggataaatctcctggcaaagcccagaatgaccacagccctggaacc

SEQ ID NO: 709714 - DNA, 120 bp, Artificial Sequence
  ENSG00000196812_1 (sequence is synthesized)
tgaggaccaaaaaggacttctgataattaaggcagaggaccattactggggacaggattccagctcacaaaagtgcagtcctcacaggagggaactctatagacaacacttcaggaagct

SEQ ID NO: 709715 - DNA, 120 bp, Artificial Sequence
  ENSG00000196812_2 (sequence is synthesized)
ctgctatcaggatgcacctggaccccgtgaagctcttacccagctgtgggagctctgccgtcagtggctgaggccagaatgccacaccaaggagcagattttagacctgctggtgctaga

SEQ ID NO: 709716 - DNA, 120 bp, Artificial Sequence
  ENSG00000196812_3 (sequence is synthesized)
acagttcctgagcattcttcctaaagacctgcaagcatgggtgcgtgcacaccatccagagactggagaggaggcagtgacggtactggaggatctggagagagagcttgatgaacctgg

SEQ ID NO: 709717 - DNA, 120 bp, Artificial Sequence
  ENSG00000196812_4 (sequence is synthesized)
aaagcaggtcccaggcaattcagaaagacgggacatactcatggacaagttggcccccttgggaaggccatatgaatcactgactgtccagctccatcccaaaaagacccagctggagca

SEQ ID NO: 709718 - DNA, 120 bp, Artificial Sequence
  ENSG00000196812_5 (sequence is synthesized)
aaagacaaggaattccttggggagataaatgacagactgaacaaagatactcctcagcatcctaagtccaaagatattattgaaaatgagggcagatcagaatggcaacagagggaaaga

SEQ ID NO: 709719 - DNA, 120 bp, Artificial Sequence
  ENSG00000196812_6 (sequence is synthesized)
agacgatataaatgtgatgaatgtgggaaaagtttcagtcatagctcagaccttagtaaacacaggagaactcacacgggagagaagccctataaatgtgatgagtgtggaaaagccttc

SEQ ID NO: 709720 - DNA, 120 bp, Artificial Sequence
  ENSG00000196812_7 (sequence is synthesized)
attcagcgctcacatctcattggacatcatagagtacacacgggagtaaaaccctataaatgtaaagaatgtgggaaagacttcagtgggcgcacaggtcttattcagcatcagagaatc

SEQ ID NO: 709721 - DNA, 120 bp, Artificial Sequence
  ENSG00000196812_8 (sequence is synthesized)
cacacaggtgaaaaaccctatgaatgtgatgagtgtggaaggcctttccgagtaagttcagctcttattagacatcaaagaattcataccgcaaataaactctactaatatagcagtaat

SEQ ID NO: 709722 - DNA, 120 bp, Artificial Sequence
  ENSG00000196812_9 (sequence is synthesized)
atcaaaagttctttggacactcaggcctaactagttatcaaagaatctattttagaaaccttgagtttcctcaatgtggtcaaagcttcagtcatcattaaacttctctggaccaaagaa

SEQ ID NO: 709723 - DNA, 80 bp, Artificial Sequence
  ENSG00000196814_0 (sequence is synthesized)
ggcgccggctcctgccgcctgggccccgggcccggcccctcccgcgccgcccgggcgatgagaagctgcttctgcgtgag

SEQ ID NO: 709724 - DNA, 120 bp, Artificial Sequence
  ENSG00000196814_1 (sequence is synthesized)
tgagacggagccgggacccgccgccgccgcagccaccgccgccgccgccccagcggggaacagaccagtccaccatgcctgaagtcaaagacctctcagaagccttgccagaaacgtcaa

SEQ ID NO: 709725 - DNA, 120 bp, Artificial Sequence
  ENSG00000196814_2 (sequence is synthesized)
tggatcccatcacgggagtcggggtggtggcttctcggaaccgagccccgacaggctatgacgtagttgcacagacagcagatggtgtggatgctgacctctggaaagacggcttattta

SEQ ID NO: 709726 - DNA, 120 bp, Artificial Sequence
  ENSG00000196814_3 (sequence is synthesized)
aatccaaggttaccagatacctgtgtttcacaagatcattttccaaagaaaatagtcatctggggaacgtgttagtagatatgaagctcattgacatcaaggacacactgcctgtgggct

SEQ ID NO: 709727 - DNA, 120 bp, Artificial Sequence
  ENSG00000196814_4 (sequence is synthesized)
tcatcccaattcaggagacggtggacacacaggaagtggcttttaggaagaagaggctgtgcattaaatttattccacgggattcaacggaagctgcgatttgtgacattcggatcatgg

SEQ ID NO: 709728 - DNA, 120 bp, Artificial Sequence
  ENSG00000196814_5 (sequence is synthesized)
gccggaccaagcaggccccgcctcagtacacgtttattggggaactgaacagcatggggatctggtatcgaatgggcagagtaccaagaaatcatgactcatctcaacccacaacgcctt

SEQ ID NO: 709729 - DNA, 120 bp, Artificial Sequence
  ENSG00000196814_6 (sequence is synthesized)
cccagtcatcagctgcctccaccccagcccccaaccttcccaggcacatctccctaacacttcctgccaccttccgaggcaggaacagcacccggacggactacgagtaccagcactcca

SEQ ID NO: 709730 - DNA, 120 bp, Artificial Sequence
  ENSG00000196814_7 (sequence is synthesized)
atttgtatgccatatcagcaatggatggtgtgccttttatgatttcagagaagttttcttgtgttccagaaagtatgcagccctttgatctcctgggaatcaccatcaaatctctagcag

SEQ ID NO: 709731 - DNA, 120 bp, Artificial Sequence
  ENSG00000196814_8 (sequence is synthesized)
aaatcgaaaaagagtacgagtacagcttccgcacagagcagagcgcagccgccaggctcccgcccagccccaccaggtgtcagcagatcccgcagtcctgaggagccagcggccacctgc

SEQ ID NO: 709732 - DNA, 120 bp, Artificial Sequence
  ENSG00000196814_9 (sequence is synthesized)
ggggagaccaccgccgcccagactactgacggcaggggctgctgcccccgcctcctcctgccgcctccgccagccctccctcccacactgccccagcagggctggcccggagactgggca

SEQ ID NO: 709733 - DNA, 120 bp, Artificial Sequence
  ENSG00000196814_10 (sequence is synthesized)
gctaagtgggcgcatcctgtcttcagctggcctcactgacaccccggcctccctggggacattgttcataaccatgactaatctgtgtgtgctgtagtgaccagcggctcctaacgtgtc

SEQ ID NO: 709734 - DNA, 120 bp, Artificial Sequence
  ENSG00000196814_11 (sequence is synthesized)
tgtgtgatgaccagttgtcctccaaaaacctcactcaccacggagtcaccctgagggccccgggcagttgccctggccgcccagtgacgcccaccggctccctccgctccctcctgtcac

SEQ ID NO: 709735 - DNA, 120 bp, Artificial Sequence
  ENSG00000196814_12 (sequence is synthesized)
ctaccagggcagaccccactaagccgttgagtctcttcctggaagaccctgagggccggcagctttgcctaggactctccagggtcgctgatcctccccggcccagggctgccaggaaca

SEQ ID NO: 709736 - DNA, 120 bp, Artificial Sequence
  ENSG00000196814_13 (sequence is synthesized)
agttcctctctgcaggatctcacagcagccctgagaagacatgggaggaagaagccagtggccctggggtggaccctgccctttggacatcccatggacttgtcacccagtcgcctggaa

SEQ ID NO: 709737 - DNA, 120 bp, Artificial Sequence
  ENSG00000196814_14 (sequence is synthesized)
gtcggggagcagcacccctgcccccggtggaggggttgttgctttctggggaggaggacggttgacggccctgcttggatccaccaccaggacgctgtgctcggccatggcgcgcctccc

SEQ ID NO: 709738 - DNA, 120 bp, Artificial Sequence
  ENSG00000196814_15 (sequence is synthesized)
ccaagggctcatctgtgcaacaaccacatgccaacaatagctccaggtgcctcagccccgtgccctgacccggggaccacagggacaccctctgagacgtgctggccccaggaggataca

SEQ ID NO: 709739 - DNA, 120 bp, Artificial Sequence
  ENSG00000196814_16 (sequence is synthesized)
ggcacacgggcacccagcccctctcagagccaggcgtgtcttgacggtatctgctgacgggaacaagtcattctgaaaggtccctctgacccaggtcaccaaatttgggccagaactggc

SEQ ID NO: 709740 - DNA, 120 bp, Artificial Sequence
  ENSG00000196814_17 (sequence is synthesized)
acttccgagtgcccactggtgctggcgtcctcaaagtgccgggcgccaagttcagccccaggtgcgtttgcctaggcagtggtggctgccatccctcggggcccaggccctcacccgaag

SEQ ID NO: 709741 - DNA, 120 bp, Artificial Sequence
  ENSG00000196814_18 (sequence is synthesized)
ggctgcctcactctgtggtgtcaggcactgggctgtgtcctgattcctcagagtatggggacctgacatctttgggtccccaagagttggctcttggatgtggaggcttgatgctgcggt

SEQ ID NO: 709742 - DNA, 120 bp, Artificial Sequence
  ENSG00000196814_19 (sequence is synthesized)
tgggggctgcactacctgcgtccgtggaagcctctgcctcagcggggacggcctcctgctgcaggtcctgggcagcccacagtagtgctagctgaggcccagaggaacgggaggaaaggg

SEQ ID NO: 709743 - DNA, 120 bp, Artificial Sequence
  ENSG00000196814_20 (sequence is synthesized)
ggggccagaaatacctcatgcccctgcaccagcccctccgtctccaggccccaggcctctttgtggacccatcttcctcctctgccaccccgatcttcactcggatacctcttgatttct

SEQ ID NO: 709744 - DNA, 120 bp, Artificial Sequence
  ENSG00000196814_21 (sequence is synthesized)
gtggataagggaagcggccacttctccctccctgagacccgaggatgcccctggtgggggtggccttctcaggactcctgggtggcacagcagcaggaccttgtcatgggactgatgctg

SEQ ID NO: 709745 - DNA, 120 bp, Artificial Sequence
  ENSG00000196814_22 (sequence is synthesized)
agcagggagggggctgccaggctggctgccgatgctccgttcacataagccagtgtggttctggggacctgaggagccctgtggcacccacagggggcacctatgtctgccgtggctcct

SEQ ID NO: 709746 - DNA, 120 bp, Artificial Sequence
  ENSG00000196814_23 (sequence is synthesized)
cgggtggtgccctgtgtgacaaagcccaacagcaagggtgactcctggcaggtgggggcagcaggagggcagagggcagagctctggccacttctgcccacttcattagggtttgtgaac

SEQ ID NO: 709747 - DNA, 120 bp, Artificial Sequence
  ENSG00000196814_24 (sequence is synthesized)
tttgtccttcacctcttttcgtgccctggttgtgagattgcctctaacaggtaatgccaggggcccttcactccgcccccatgactgggaagaggcctgtggcagcgccgctggacccta

SEQ ID NO: 709748 - DNA, 120 bp, Artificial Sequence
  ENSG00000196814_25 (sequence is synthesized)
ggaggctcagaggcagtggtgtgggagccctgtctgcaaggacgcagaataagcagtgagggcggctgcaggagaggaaggggctcccacagcccccactgatgccgctgcaggcccctg

SEQ ID NO: 709749 - DNA, 120 bp, Artificial Sequence
  ENSG00000196814_26 (sequence is synthesized)
tcgagctggggtcccagccaggtgcccccgcatgccctcctgcagttgctggatggatagggacaccaggaagaggacaaactgcatggactcaagcgagctggagccatcttctccata

SEQ ID NO: 709750 - DNA, 120 bp, Artificial Sequence
  ENSG00000196814_27 (sequence is synthesized)
gcattacggacttagcataagagtaaatgactgtgaacgttgtagtaaacggcagcttaagataagtaagcagagacagtgttaaggacgagttggtgtctgtggtagcttttaggctgc

SEQ ID NO: 709751 - DNA, 88 bp, Artificial Sequence
  ENSG00000196814_28 (sequence is synthesized)
gttaaggacgagttggtgtctgtggtagcttttaggctgctcctaacccaccatttattgccttctgagaggtgggtgaggacaagca

SEQ ID NO: 709752 - DNA, 120 bp, Artificial Sequence
  ENSG00000196814_29 (sequence is synthesized)
cctgagtggggctcgtgcaggagaactgaggcatgaaactctggctcaaacctaggaattgagagcgtttctgtcttttgggagagtacttttctccacgagccctctggccactgtggg

SEQ ID NO: 709753 - DNA, 120 bp, Artificial Sequence
  ENSG00000196814_30 (sequence is synthesized)
agggaaggacaagggttcccttggaaatgtgaagggtcttggcctcatccctcaggtccccccacagcacttcccactactgcttctgtccctgctggcagcctctgtccctccagaacg

SEQ ID NO: 709754 - DNA, 120 bp, Artificial Sequence
  ENSG00000196814_31 (sequence is synthesized)
gctaaccagagcacactgtccccaccgcctcccctttctctctggaaagttgaagtatctccaaaggccttggaaatggcacaaaggtgataaggagcaggtgctttgctgcagtctccc

SEQ ID NO: 709755 - DNA, 120 bp, Artificial Sequence
  ENSG00000196814_32 (sequence is synthesized)
ttgcaaatgtataattaaggcctttcttcccaccccaagtccaagaacaaatgccagccacgtcctccgccacttggagagatgagaacccagtggggtcacgtaaaggaattgcaggtc

SEQ ID NO: 709756 - DNA, 120 bp, Artificial Sequence
  ENSG00000196814_33 (sequence is synthesized)
ggtgagaggacaagagggactcccatgttctaagcacctgttcctggccaggctctaggccaggctctctaagcacatttctcctttcattccccctaaaaacagagtgacctggaagta

SEQ ID NO: 709757 - DNA, 120 bp, Artificial Sequence
  ENSG00000196814_34 (sequence is synthesized)
gatgttctttgctccttgtcagagttgaagaggctgacttggcccactgctaagcggcagaggcagggccagccatcctgtcgcaagcccgtgctggggctgccctttctgtttccagtc

SEQ ID NO: 709758 - DNA, 120 bp, Artificial Sequence
  ENSG00000196814_35 (sequence is synthesized)
cagttacggacttcccggccgccactgggccctgccggtcaccaggccactgtgcagtgggcgcagagcatggtcaggagtggcctgcccgtactcctccacccagatgagggccctcca

SEQ ID NO: 709759 - DNA, 120 bp, Artificial Sequence
  ENSG00000196814_36 (sequence is synthesized)
gagcctgcaggcatctgtggggaatcccagcctgcaggttcttggagaagcaggtgaacctaaggatgaaagcaaaggagggccttgaggaagcagcccccaggcctggcagccacgcag

SEQ ID NO: 709760 - DNA, 120 bp, Artificial Sequence
  ENSG00000196814_37 (sequence is synthesized)
cggctgagctcatgaacttggttcgcagcctgccttgcccctggaggccacgccaggcgctcacccctgagcccacagcccctgcttgggctgcctggcaccctcagggtggcccggcct

SEQ ID NO: 709761 - DNA, 120 bp, Artificial Sequence
  ENSG00000196814_38 (sequence is synthesized)
cctcctgccactctgagcacatgtccgggggttgccaccagagacggctttgttctcccagctaaggccgtggagctgctgtgtgactgtgtcaggcctggacaaggaagacccttaggg

SEQ ID NO: 709762 - DNA, 120 bp, Artificial Sequence
  ENSG00000196814_39 (sequence is synthesized)
atgacgtccccgctgcatatttattcaaggtgactcttgtacttggcaagggaagtccactgtgtgattgtctgtattcttaatataatttgttaaataaacgtttgttttaacctcttt

SEQ ID NO: 709763 - DNA, 120 bp, Artificial Sequence
  ENSG00000196814_40 (sequence is synthesized)
cctgtcctcctctgctggatcctgtgagcaccacagcctcctgtacaccctgagctatgcctctcaaggccctccaccagctcatcccctgctgtgggcacaagccctgctttcagagtt

SEQ ID NO: 709764 - DNA, 120 bp, Artificial Sequence
  ENSG00000196814_41 (sequence is synthesized)
tccctgcccagggaatgaatgccccttgagagaccacacatatgctgcaagtccagccctgctcagagccgttctttgccaaataatcaccttgttattaaagagctgattgttctacta

SEQ ID NO: 709765 - DNA, 120 bp, Artificial Sequence
  ENSG00000196814_42 (sequence is synthesized)
gtgacttcagtttttcgtctttcaacttcagttgctcatctgcagtcaccagctgggatttgaacccagccaatctgactcctgagctcctctttcctcccacttagtcttttcccctga

SEQ ID NO: 709766 - DNA, 120 bp, Artificial Sequence
  ENSG00000196814_43 (sequence is synthesized)
gtccaacagcaccttagagcatgtctaatgcacgtgcttactgccttcatctcattgcagcctgtccctgccagctgtgtcaccttcatcctgctgccagcccctggtgactctcccgtt

SEQ ID NO: 709767 - DNA, 120 bp, Artificial Sequence
  ENSG00000196814_44 (sequence is synthesized)
acagatcagagaccagactccaggggtggagagtaggggttctggaccagccgctctctgctcctagagctcttgtctacacaactgcctggtgctcaggggatgacgaggcgcctgcct

SEQ ID NO: 709768 - DNA, 120 bp, Artificial Sequence
  ENSG00000196814_45 (sequence is synthesized)
ctctcagtaggttgtgtgtcctggcagcaggggtgggacctgtcctctttcatagctccagcacatctgtgctggatgtcacctggctccatccagtgacggattcatattctctgtttc

SEQ ID NO: 709769 - DNA, 120 bp, Artificial Sequence
  ENSG00000196814_46 (sequence is synthesized)
accttcccaggtgaggccttgtcggggtgtcttgcgttgtcctgtggtcttaggtccctgcacaacattttagaacaccaccacttagtgtctgctgaaatactgcaaagtacagctgaa

SEQ ID NO: 709770 - DNA, 120 bp, Artificial Sequence
  ENSG00000196814_47 (sequence is synthesized)
taattgtagaagcaatatatctttagaggagatttttaaaaatccacttggaaatctttgcattacatgaatgcaaaggccattctatagtctattttgtgcgtgttctgcaggcttcta

SEQ ID NO: 709771 - DNA, 120 bp, Artificial Sequence
  ENSG00000196814_48 (sequence is synthesized)
aaattgcagattatgcaacttaaaattggctccctattcaaaagagctgctagctacacacagacacgtgctgtatagccatggggttgggatcactggccttaaggtcaaattccttct

SEQ ID NO: 709772 - DNA, 120 bp, Artificial Sequence
  ENSG00000196814_49 (sequence is synthesized)
ctgtcttggccagcaactcatttgaaacccaggagggtaggtgagttcttatattcttcattttcatataatttctttttccaatgagctataaagtaagaaatgggtagtttgggtatg

SEQ ID NO: 709773 - DNA, 120 bp, Artificial Sequence
  ENSG00000196814_50 (sequence is synthesized)
agagaatagtgaggagtttttcaggaaatgctagttttaacaattgtctccgcaaagaaacttgggtgagccaactgtttgctctgcaactgatttcagtcataacagaggtagtaacag

SEQ ID NO: 709774 - DNA, 120 bp, Artificial Sequence
  ENSG00000196814_51 (sequence is synthesized)
ctgtcaaataaaaatcctgtgcatcactaggagtaaactaagggcaaggaacaaacagcactgatggattaagcttgagaaagggattgcaaaagtaaataaaacaagaacggtgaggca

SEQ ID NO: 709775 - DNA, 120 bp, Artificial Sequence
  ENSG00000196814_52 (sequence is synthesized)
gcaacacttagggattgacataacgtaaatgagaatggatctccaagcttccacgtgggtgaatagagatgaacaaaatctgtcaggaaccggacagaagagtcaccagtaggtcttcct

SEQ ID NO: 709776 - DNA, 120 bp, Artificial Sequence
  ENSG00000196814_53 (sequence is synthesized)
gggccatccacaatacagcctgccctccgggacataccaccagctctctgtactctgttcctctgtgccaagcctccgtctcacttggaagaatgtgctgtaatgaggctccaaagccct

SEQ ID NO: 709777 - DNA, 120 bp, Artificial Sequence
  ENSG00000196814_54 (sequence is synthesized)
gaggactctgtcctctgggacatccccctataaagacaatctggtccttctcatgacagtttcacaaaccaagagtggtatttaaacttaactacccctggaattgcctgaaactttaga

SEQ ID NO: 709778 - DNA, 120 bp, Artificial Sequence
  ENSG00000196814_55 (sequence is synthesized)
agtagttttcagtttcatttggcataaaaagataggaatctctaataagcctcccagagttgcagggtgaacagttgagtctctgttgggttcaagagtgtgaggttcgcactgcccatc

SEQ ID NO: 709779 - DNA, 120 bp, Artificial Sequence
  ENSG00000196814_56 (sequence is synthesized)
agcacttgttcctcacttctgagccagagcgctgtcagctccgccctggagggcactgctgagggtcactgtctcctgtgctcaaggctatatcaggtgtgtcacctgtgctggggagtc

SEQ ID NO: 709780 - DNA, 120 bp, Artificial Sequence
  ENSG00000196814_57 (sequence is synthesized)
agctaagtccatcacctgtgtgtcggggtcctccatcacctgtgctgaggcccatcacttgtacttggagcagctcaagtgtgggctccttgcagaggctggaaagcccccacaggagca

SEQ ID NO: 709781 - DNA, 120 bp, Artificial Sequence
  ENSG00000196814_58 (sequence is synthesized)
gttgccctgaagttgttacagctgctccctgctgacatcatgtggtctagaagggcccagaaatgggcaccacctcaggcaggttttgactttctgtggttaaagaaagaacaccagttc

SEQ ID NO: 709782 - DNA, 120 bp, Artificial Sequence
  ENSG00000196814_59 (sequence is synthesized)
tctcagataaagcagagagagctctcagaagcctgctggtgactgtgagagcaaagtcacttgcacctgaagcaagacagccgagaacaccgagccaccggcagcctggtgggtttggag

SEQ ID NO: 709783 - DNA, 120 bp, Artificial Sequence
  ENSG00000196814_60 (sequence is synthesized)
ggtagtgcgtcagaaccagatgtttataaggcttatgtattttatcacctctgctgtacagtttatggtttacaatggctgcaaggaaatcggatcagttttgttttacttgccaaataa

SEQ ID NO: 709784 - DNA, 120 bp, Artificial Sequence
  ENSG00000196814_61 (sequence is synthesized)
aacaaatgtcaaaatagtcaatataaaatgtattctaatttggctgagttaagtcagccaatatgcaacaggataattgaatgttcattagtgcttccaagtaaaagccatttgtctgtc

SEQ ID NO: 709785 - DNA, 120 bp, Artificial Sequence
  ENSG00000196814_62 (sequence is synthesized)
gcacatctccctaacacttcctgccaccttccgaggcaggaacagcacccggacggactacgagtaccagcactccaatttgtatgccatatcaggtgaggcttctcctccaggggtttt

SEQ ID NO: 709786 - DNA, 120 bp, Artificial Sequence
  ENSG00000196814_63 (sequence is synthesized)
gtgatttgactctggctggtcaccaggtaatctgtccaaagttcagaaggtgtcaggatgctatcctgaggctccacagtgacagcctctcagtctgtgcactgtcccccacgggtggcc

SEQ ID NO: 709787 - DNA, 120 bp, Artificial Sequence
  ENSG00000196814_64 (sequence is synthesized)
ccaaagccagctgcccatttaactgggcacagcatggacactggcctcagctctcagccttctgaggaggaccagtccaccatgcctgaagtcaaagacctctcagaagccttgccagaa

SEQ ID NO: 709788 - DNA, 120 bp, Artificial Sequence
  ENSG00000196821_0 (sequence is synthesized)
agagtgagtttacccctatgagactgtgagaggcccggggcctacctcaaaggagcggggtcgcgaagctagctagcagcggcccccctccaggtccccgggcccggcggcgcggcggcg

SEQ ID NO: 709789 - DNA, 120 bp, Artificial Sequence
  ENSG00000196821_1 (sequence is synthesized)
gcttggttgtgaagaggcggggaagcgggtgtccggtccccgccatggagggcatggacgtagacctggacccggagctgatgcagaagttcagctgcctgggcaccaccgacaaggacg

SEQ ID NO: 709790 - DNA, 120 bp, Artificial Sequence
  ENSG00000196821_2 (sequence is synthesized)
tgctcatctccgagttccagaggctgctcggcttccagctcaatcctgccggttgcgccttcttcctggacatgaccaactggaacctacaagcagcaattggcgcctattatgactttg

SEQ ID NO: 709791 - DNA, 120 bp, Artificial Sequence
  ENSG00000196821_3 (sequence is synthesized)
agagcccaaacatcagtgtgccctctatgtcctttgttgaagatgtcaccataggagaaggggagtcaatacctccggatactcagtttgtaaaaacatggcggatccagaattctgggg

SEQ ID NO: 709792 - DNA, 120 bp, Artificial Sequence
  ENSG00000196821_4 (sequence is synthesized)
cagaggcctggcctccaggggtttgtcttaaatatgtcgggggagaccaatttggacatgtgaacatggtgatggtgagatcgctagagccccaagagattgcagatgtcagcgtccaga

SEQ ID NO: 709793 - DNA, 120 bp, Artificial Sequence
  ENSG00000196821_5 (sequence is synthesized)
tgtgcagccccagcagagcaggaatgtatcagggacagtggcggatgtgcactgctacaggactctactatggagatgtcatctgggtgattctcagtgtggaggtgggtggacttttag

SEQ ID NO: 709794 - DNA, 120 bp, Artificial Sequence
  ENSG00000196821_6 (sequence is synthesized)
gagtaacgcagcagctgtcatcttttgaaacggagttcaacacacagccgcatcgtaaggtagaaggaaacttcaacccttttgcctctccccaaaagaaccgacaatcagatgaaaaca

SEQ ID NO: 709795 - DNA, 120 bp, Artificial Sequence
  ENSG00000196821_7 (sequence is synthesized)
acttaaaagaccctgggggctccgagttcgactcgatcagcaaaaacacatgggctcctgctcctgacacatgggctcctgctcctgaccaaactgagcaagaccagaatagactgtcac

SEQ ID NO: 709796 - DNA, 120 bp, Artificial Sequence
  ENSG00000196821_8 (sequence is synthesized)
agaactctgtaaatctgtctcccagcagtcacgcaaacaacttatcagtagtgacttacagtaaggggctccatgggccttaccccttcggccagtcttaaacgggtgtcagcaagaaga

SEQ ID NO: 709797 - DNA, 120 bp, Artificial Sequence
  ENSG00000196821_9 (sequence is synthesized)
aaaattaacaaaagacagaaggcctgactttggggggttagggcaaggggttcctctggattgcagaccacatcgcacagacccctggctctgaccccctctcatcccggaagaagagga

SEQ ID NO: 709798 - DNA, 120 bp, Artificial Sequence
  ENSG00000196821_10 (sequence is synthesized)
agaagcagaacagactagttttgagtaaactcagtatgcatgtgtgaatgctgaatcacaggaatggtgttgaggctaccaagaagaaatccatgcagccactttgggttttgttatagg

SEQ ID NO: 709799 - DNA, 120 bp, Artificial Sequence
  ENSG00000196821_11 (sequence is synthesized)
catcagtctaacaagtcattaggtcactcgggaagggggaaaaagtttaaaatgggggaaaaaaagccatctttttaaacaaaaattattttgcctacagaaaggttgtagttttgagca

SEQ ID NO: 709800 - DNA, 120 bp, Artificial Sequence
  ENSG00000196821_12 (sequence is synthesized)
catgttaatttttttccctctttccccacttttatttttttaaataagggataacatattctttatagaatagtgcttgttctggaagagattcaggtgaaaagttggcgtggcatgttt

SEQ ID NO: 709801 - DNA, 120 bp, Artificial Sequence
  ENSG00000196821_13 (sequence is synthesized)
gaggactctgcggatcagtgctacaggagtacatctgccctgccacatgactccagaagtctctgaccccatttgtttttaatggcatcagccaatgagttatcacccttttcctcctct

SEQ ID NO: 709802 - DNA, 120 bp, Artificial Sequence
  ENSG00000196821_14 (sequence is synthesized)
tttctctttaatcttctgttgatttacacctttgacatttgtattcgtcaaccctgtggcttgttagcatcagaacctctctgaagaccaaacttccctgtgtggccagcagaggaagcc

SEQ ID NO: 709803 - DNA, 120 bp, Artificial Sequence
  ENSG00000196821_15 (sequence is synthesized)
ttgaggatagatctcgggtgacgtgggattttctaagcctgagaggtgtccttctgcacacccttgtaacaattaaaattgcttttcttccatgtttctcttggcagagagaaatgccat

SEQ ID NO: 709804 - DNA, 120 bp, Artificial Sequence
  ENSG00000196821_16 (sequence is synthesized)
catgcttactgctcttttggattcttcatgcagtggcttcccatttgctctgggaacagtgcctctgtgctggttatatgtatgcaccacatgtgcacacacgggtgttggtgcaactca

SEQ ID NO: 709805 - DNA, 120 bp, Artificial Sequence
  ENSG00000196821_17 (sequence is synthesized)
ccagcaggtgtgcagtaggcaagcttgaaggtggcccatgcttctctgttgtcacacaacacctttccctgtttctcttcagttgtcctctgatattttcacagcctgttagtggcggct

SEQ ID NO: 709806 - DNA, 120 bp, Artificial Sequence
  ENSG00000196821_18 (sequence is synthesized)
aatacagccccaaagggggaatttgtcatggggaagggccagccactgactacttgatcttggagaccacatttagatggaaatgagaggacctccacagccccgcctccctgccaggat

SEQ ID NO: 709807 - DNA, 120 bp, Artificial Sequence
  ENSG00000196821_19 (sequence is synthesized)
gctagattattggctgggaggtgggcaagtggcagcccagctgaagcaagaggctgattgactggctgctcactcaggcaggtggcctgccctggcatcctgtagattctgagcaggttg

SEQ ID NO: 709808 - DNA, 120 bp, Artificial Sequence
  ENSG00000196821_20 (sequence is synthesized)
agatgtggatatctccatgggaagcttgaaccaggctagaacagctgtctgccaaagatacaagaatatgcaaagtccctcttacccccctccttccctcaagtcttagttggtttgaga

SEQ ID NO: 709809 - DNA, 120 bp, Artificial Sequence
  ENSG00000196821_21 (sequence is synthesized)
gccagggatatggatccagggtgctgttgcagggtcacctgcctgttaccacacccccatccagctgggtggtgggtgagggtgtgagacaggcagggagaccaggtaatgagtggctgc

SEQ ID NO: 709810 - DNA, 120 bp, Artificial Sequence
  ENSG00000196821_22 (sequence is synthesized)
aaggagtcatatagcctgggtgtgggtgagggtctgcctgcctgtttctgtctgggtgtctgagttccaaaaaatgtgtgttgtttgttcctcctcatcctcttctgagactgttgtttt

SEQ ID NO: 709811 - DNA, 120 bp, Artificial Sequence
  ENSG00000196821_23 (sequence is synthesized)
tttagagcttgattgtgggagaaaagcttgtgtgaaattccctcttcacctccccaccccccaaaaaataaaagggggcataaactttattccactggagaagccctgggggtggctgga

SEQ ID NO: 709812 - DNA, 120 bp, Artificial Sequence
  ENSG00000196821_24 (sequence is synthesized)
gccagcctgctgagaagcgtggtgcagctgggtctgggacttcactagagcttactctggagcacctattttctgtgcacatgggagtgctccactccctagcagagcagagggaagtct

SEQ ID NO: 709813 - DNA, 120 bp, Artificial Sequence
  ENSG00000196821_25 (sequence is synthesized)
ctgccaggtacccacgccacaggcctcaggatggctttttgtctgagggcctcattaggcccagactgctgctgctggtaccagtctcctgagacactgcctccctggagcccatgcatg

SEQ ID NO: 709814 - DNA, 120 bp, Artificial Sequence
  ENSG00000196821_26 (sequence is synthesized)
cccagctgttcttactgcttagtagccttgaagcagcacatctccactgtccctggcaggattgtgggaggcttcacaacccctgctttcctgacttcctcttctgcccaacactgggtg

SEQ ID NO: 709815 - DNA, 120 bp, Artificial Sequence
  ENSG00000196821_27 (sequence is synthesized)
ccccttcccagtttcccagcaggggcttcatgggccaccgtcagtgggtctgggcctgccagagtcgtcttgctcttcctcttgcttctaggcaaccacacttggcaagttaaatgtccc

SEQ ID NO: 709816 - DNA, 120 bp, Artificial Sequence
  ENSG00000196821_28 (sequence is synthesized)
aagcaccttgtctcccttcccaagaacaaaccatttctgtgcacatccttggaggcgagatgagctccttgcagagggccagagtaagtgcaagtcatggagtgcaggcagaggggtcca

SEQ ID NO: 709817 - DNA, 120 bp, Artificial Sequence
  ENSG00000196821_29 (sequence is synthesized)
tggcttccccagcccagggagggtatcagtatcattcattctctctcccctcactggtatgggttcagagcaatgcctagggcccctctctgctcccctgcctagtggggtggtagtggc

SEQ ID NO: 709818 - DNA, 120 bp, Artificial Sequence
  ENSG00000196821_30 (sequence is synthesized)
tacctctcagccccaatagtccctgctcctcttagaatcttcaccaagtggcaggccacctctgggcaggaccacctgcgtctggcacccaggaggtgaggcagacaccatggttaggtg

SEQ ID NO: 709819 - DNA, 120 bp, Artificial Sequence
  ENSG00000196821_31 (sequence is synthesized)
atagggtctgaacccagttggggagacagaggggttcagacttgggaagaatctgtcagtgtgcatggagtgaggtgtgtgtgtgtggatggatgtgcacgtgtgcatgctttttttctt

SEQ ID NO: 709820 - DNA, 120 bp, Artificial Sequence
  ENSG00000196821_32 (sequence is synthesized)
tttgccgtgaggacagttgaatttggggcatttttctacaagaagcagtcagccttctctcccccataaggactggctgtaaccttaagcccatcaaagttacttccagcctggagagaa

SEQ ID NO: 709821 - DNA, 120 bp, Artificial Sequence
  ENSG00000196821_33 (sequence is synthesized)
cctcaccaaacagctggtgtggcctgagggtggccatggtgggaaatgggcatgagaataaatacctccccaaattcaatctgagcccagcaggagaggatggtagggttgccagggctc

SEQ ID NO: 709822 - DNA, 120 bp, Artificial Sequence
  ENSG00000196821_34 (sequence is synthesized)
agaagtgcaagctgattactcaccccaccctgcctcgccgcacctttcctttgtttccttgggtgaatgcaggagcagcagtggctgcccttcccacctggacagtggtgtgtgtagaaa

SEQ ID NO: 709823 - DNA, 120 bp, Artificial Sequence
  ENSG00000196821_35 (sequence is synthesized)
gccagctggatgtttgtggtggggcctcatggtgcctaggaggagataaagatgaggaggtttttccttattgtataaatgaatatttgtatgattaaattaacacacacaccaaaaaaa

SEQ ID NO: 709824 - DNA, 120 bp, Artificial Sequence
  ENSG00000196821_36 (sequence is synthesized)
gtgtaacctctcctgtttttgtacatgtgtttattcctgaactgttttgggctactcattgttaaccaggttgctgctctacttttcccactgctggctaaggaagattcaactttttca

SEQ ID NO: 709825 - DNA, 120 bp, Artificial Sequence
  ENSG00000196832_0 (sequence is synthesized)
atgcattttctttcccaaaatgatttaaatataaatctgattccccatctatgtttgcaccgtcattcagtaattgctggtgcttttacaattcacaggcacatgaaaatcttcaacagc

SEQ ID NO: 709826 - DNA, 120 bp, Artificial Sequence
  ENSG00000196832_1 (sequence is synthesized)
cccagcaactccagcaccttcactggcttcatcctcctgggcttcccttgccccagggaggggcagatcctcctctttgtgctcttcactgttgtttacctcctgaccctcatgggcaat

SEQ ID NO: 709827 - DNA, 120 bp, Artificial Sequence
  ENSG00000196832_2 (sequence is synthesized)
ggttccatcatctgtgctgtgcactgggatcagagactccacgcccccatgtacatcctgctcgccaacttctccttcttggagatatgttatgtcacctccacagtccccagcatgctg

SEQ ID NO: 709828 - DNA, 120 bp, Artificial Sequence
  ENSG00000196832_3 (sequence is synthesized)
gccaacttcctctctgacaccaagatcatctcgttctctggctgcttcctccagttctactttttcttctccttgggctctacagaatgctttttcctggcagttatggcatttgatcga

SEQ ID NO: 709829 - DNA, 120 bp, Artificial Sequence
  ENSG00000196832_4 (sequence is synthesized)
tgggtacttggtttcatctggttcttgattcctatcgtcaacatctcccaaatgtccttctgtggatctaggattattgaccacttcctatgtgacccagctcctcttctaactctcact

SEQ ID NO: 709830 - DNA, 120 bp, Artificial Sequence
  ENSG00000196832_5 (sequence is synthesized)
tgcaaaaaaggccctgtgatagagcttgtcttttctgtcttaagtcctctgcctgtctttatgctctttctcttcattgtggggtcctatgctctggtcgtgagagctgtgttgagggtc

SEQ ID NO: 709831 - DNA, 120 bp, Artificial Sequence
  ENSG00000196832_6 (sequence is synthesized)
ccttcagcagctgggagaagaaaggctttctccacctgtgggtctcacctggctgtggtttcactgttctacggctcagtactggtcatgtatgggagcccaccatctaagaatgaagct

SEQ ID NO: 709832 - DNA, 120 bp, Artificial Sequence
  ENSG00000196832_7 (sequence is synthesized)
ggaaagcagaagactgtgactctgttttattctgttgttaccccactgcttaaccctgtgatatatagtcttaggaacaaagatatgagaaaagctctgaagaaattttggggaacataa

SEQ ID NO: 709833 - DNA, 120 bp, Artificial Sequence
  ENSG00000196832_8 (sequence is synthesized)
agggctctgttcataatgcctccatcctccagcaaacaccaagagaccttctccctatttctgctccttcattctttgatggctaacatagaaaaggctacctctcctctccaggacaat

SEQ ID NO: 709834 - DNA, 120 bp, Artificial Sequence
  ENSG00000196832_9 (sequence is synthesized)
ggaaaaaaaaaaaaaaaaaactggtcttatacagttaattgttcatcttactattggccaaagctaaaatacctgtgagcatgtttctgttatttctcctttcagatcttgattatttgc

SEQ ID NO: 709835 - DNA, 120 bp, Artificial Sequence
  ENSG00000196832_10 (sequence is synthesized)
ccagttgtgtaacatgcctcaatgttttttaattgactggtgggcattgtattttaaaaactataaagacaatatatgcagtaatgaaggttttgttctagcaagtagatggagtagagg

SEQ ID NO: 709836 - DNA, 120 bp, Artificial Sequence
  ENSG00000196832_11 (sequence is synthesized)
cagatcacattgattctatttaagcactacttgtatgtgtttttaaaatgatctgtgctcgttttagttttactcttagggtgtggctcttactgcaggaacatagcctttctgagacct

SEQ ID NO: 709837 - DNA, 120 bp, Artificial Sequence
  ENSG00000196832_12 (sequence is synthesized)
acttcttgaaccccatgactcctgaaacttccgctttgctctttagactctcagcttttgtttctgctagctattttggggtctcaccgtgtacacacagcttagaaatccaaaaatgcc

SEQ ID NO: 709838 - DNA, 120 bp, Artificial Sequence
  ENSG00000196832_13 (sequence is synthesized)
ttgaaggggaattgcatcatatttttagcctagcttctgtggtccttccctctccaggatttctcaaacgccaggtgctttggcaactttcaaattctctaccttctcagttcagtaaaa

SEQ ID NO: 709839 - DNA, 120 bp, Artificial Sequence
  ENSG00000196832_14 (sequence is synthesized)
ctactgctttctgctcagtccttattcctcctttcctcatactctcccaacccagtaaatggtcaaatatcctcagggaaatacacatggggaatgtgaaactcacctcccttttcttcc

SEQ ID NO: 709840 - DNA, 120 bp, Artificial Sequence
  ENSG00000196832_15 (sequence is synthesized)
cttcatcttggactgtagcccatgaaggcttgcctatgtcagttgctctgagtgccttcaaatggttgttttatgtattttgtccagattttactgttgatagaaattattttgggttta

SEQ ID NO: 709841 - DNA, 120 bp, Artificial Sequence
  ENSG00000196832_16 (sequence is synthesized)
gtacaagtttttcagtcatgaccagaaagttttttctattctatctagattccatacattctcacttcttccttcactttcaggagattatcatgtagcatgtgtcttcaaaagcccaca

SEQ ID NO: 709842 - DNA, 120 bp, Artificial Sequence
  ENSG00000196832_17 (sequence is synthesized)
aatcagagagacaggtggatatagaggctggcataaacacaaatctgggatgcacacctgcttttcttttcattgcaaccagcaaagaatccctgaggactcttcccctgcaggaagcag

SEQ ID NO: 709843 - DNA, 120 bp, Artificial Sequence
  ENSG00000196832_18 (sequence is synthesized)
gggaaaggttacctatggtaaaataaatgataaaatcaggaccacagattttggcctttttttaatggaaggcacccagtaattgtagatcagtaaaaatagtcacccagaatttgtatt

SEQ ID NO: 709844 - DNA, 120 bp, Artificial Sequence
  ENSG00000196832_19 (sequence is synthesized)
agaagcttgggctagttctccttgaactttcccctaggcctggagtgaaaggtcatgctatgattgaagtgtcttcactaatccaaatacctgtttttcaggttaaataaataggaattg

SEQ ID NO: 709845 - DNA, 120 bp, Artificial Sequence
  ENSG00000196832_20 (sequence is synthesized)
ggaatcagggagcaatttgctgaggataatgacttaattccaaaaaaaaaaaaaaaaaaagttcctatccaccacccttttaactagcccaagttccctttgctttgaaaagtaaccctg

SEQ ID NO: 709846 - DNA, 120 bp, Artificial Sequence
  ENSG00000196832_21 (sequence is synthesized)
aatttctctttaggacttctcacttatttgccagtcatatcacaataagtttgtttccttaatataaacgaagctctgtaaaatagtaagagaacagaacagtatcccagtaagaaaatg

SEQ ID NO: 709847 - DNA, 120 bp, Artificial Sequence
  ENSG00000196832_22 (sequence is synthesized)
agcaaaaggatataaacgaataacatccagaaaaagattcttaaacatggaaagggcactaactaattcataaaaaggtaaaagtagaataagcctataaatatatctcactttttatct

SEQ ID NO: 709848 - DNA, 120 bp, Artificial Sequence
  ENSG00000196832_23 (sequence is synthesized)
attaaattgacaaagatcaagaagtttgattacacattgcgtgtctgaggattgtgaaatgggttctctcacacttagctggtgggcgtatcagctttacaaactctatatagggtgaca

SEQ ID NO: 709849 - DNA, 120 bp, Artificial Sequence
  ENSG00000196832_24 (sequence is synthesized)
aggcaacctctatcaaaatttagaagacacatatcctttaaaacagcacctcaacttttaagttgtttaacctacagatatttttacacatgtgggaaatgtttactgcagcattgttgt

SEQ ID NO: 709850 - DNA, 120 bp, Artificial Sequence
  ENSG00000196832_25 (sequence is synthesized)
aatagcaaaatattgagaaaaacatcagttcccattaatagaagactagtaaaatgagctatggtgagttataccatggaatattatgtcttcaatttataaactatgaagcagttccat

SEQ ID NO: 709851 - DNA, 120 bp, Artificial Sequence
  ENSG00000196832_26 (sequence is synthesized)
atgcaatgatatataatatgtccaagacacactgttaaatgaaaaaagcaaagtgaatagcagagtgtattgtagctgccttccatggaaatgtgtatatctcctgaaagagctccaaaa

SEQ ID NO: 709852 - DNA, 120 bp, Artificial Sequence
  ENSG00000196832_27 (sequence is synthesized)
aactgataacaatggttgcttcaggcaagaagaattttgtgtctaaggaacaagatagtaaaggagacttttttttcataactccttttgtgcgttcaaattctttatcatgtgcctata

SEQ ID NO: 709853 - DNA, 120 bp, Artificial Sequence
  ENSG00000196832_28 (sequence is synthesized)
ccttactcaaatccactgtttttctactatgcctgagttgcctaccccttctcataaagggaaaagctgttcttattttcaaggactttgcagaaagtaaataggtgtaatgatatgtag

SEQ ID NO: 709854 - DNA, 120 bp, Artificial Sequence
  ENSG00000196832_29 (sequence is synthesized)
tcaaaatcaagtgaagcagatggatgtgtgctgctgagatcagaacaataatgcttccgatccacactgcctttttgagctagccttggggaaaaagtaaaacatcagagaaatgctttt

SEQ ID NO: 709855 - DNA, 120 bp, Artificial Sequence
  ENSG00000196832_30 (sequence is synthesized)
gtctcatattatgtattatagcacaggagctggctaacttaatgtgggtctaatccaacatttctgagatataatgagggtgaagctgttgttttcttgtttggaaagttaattgaccca

SEQ ID NO: 709856 - DNA, 120 bp, Artificial Sequence
  ENSG00000196832_31 (sequence is synthesized)
atccaagcatcctgtacagcatccacagctttaacaccactgaacctgtattcacacttgcttctgtaaccaactcgggggaatctgcctgccactttggacagctccagtttagccctg

SEQ ID NO: 709857 - DNA, 120 bp, Artificial Sequence
  ENSG00000196834_0 (sequence is synthesized)
taactgcttggctggcctgtagcggcttggcttggctttgcgttctttgcttggcttggtgttggtcgcttggcctggtgttcctccttggattgacgtttcctccttggattggcgttt

SEQ ID NO: 709858 - DNA, 120 bp, Artificial Sequence
  ENSG00000196834_1 (sequence is synthesized)
cctctctcgcgttcccttgctaggcttgaccttttctctgctgggtttggcattcccttgggtgggctgggtgttttcttgggggggggggttggcccttcctcgggtgggcgtgggctt

SEQ ID NO: 709859 - DNA, 120 bp, Artificial Sequence
  ENSG00000196834_2 (sequence is synthesized)
tgtgggttttccctgggtggggtgggttgggcttacctgctggggttggcaggttttggctgggattgacttttctcttcaaacagattggaaacccggagttacctgctagttggtgaa

SEQ ID NO: 709860 - DNA, 120 bp, Artificial Sequence
  ENSG00000196834_3 (sequence is synthesized)
ctagttggtgaaactggttggtagacgtgatctgctcgctactaccggcctccccaggctgttaaaagcagatggtagctgaggttgattcaatgccggctgcctcttctgtgaagaagc

SEQ ID NO: 709861 - DNA, 77 bp, Artificial Sequence
  ENSG00000196834_4 (sequence is synthesized)
gaggttgattcaatgccggctgcctcttctgtgaagaagccatttgttctcaggagcaagatgggcaagtggtgccg

SEQ ID NO: 709862 - DNA, 120 bp, Artificial Sequence
  ENSG00000196834_5 (sequence is synthesized)
tcaggagcaagatgggcaagtggtgctgccactgcttcccctgctgcagggggagtggcaagagcaacgtgggcacttctggagaccacgacgactccgctatgaagacgctcaggagca

SEQ ID NO: 709863 - DNA, 74 bp, Artificial Sequence
  ENSG00000196834_6 (sequence is synthesized)
ggtgctggcttggggagactacgacgacagcgccttcgtggagccgagataccacgtccgtcgagaagatctgg

SEQ ID NO: 709864 - DNA, 120 bp, Artificial Sequence
  ENSG00000196834_7 (sequence is synthesized)
cacagagctgcctggtggggtaaagtcgccagaaaggatctgatcgtcatgctcagggacactgacgtgaacaagcaggacaagcaaaagaggactgctctacatctggcctctgccaat

SEQ ID NO: 709865 - DNA, 120 bp, Artificial Sequence
  ENSG00000196834_8 (sequence is synthesized)
tacatctggcctctgccaatgggaattcaggagtagtaaaactcctgctggacagacgatgtcaacttaatgtccttgacaacaaaaagaggacagctctgacaaaggccgtacaatgcc

SEQ ID NO: 709866 - DNA, 120 bp, Artificial Sequence
  ENSG00000196834_9 (sequence is synthesized)
acaatgccaggaagatgaatgtgcgttaatgttgctggaacatggcactgatccaaacattccagatgagtatggaaataccactctacactacgctatctacaatgaagataaattaat

SEQ ID NO: 709867 - DNA, 120 bp, Artificial Sequence
  ENSG00000196834_10 (sequence is synthesized)
cactgctcttatacggtgctgatatcgaatcaaaaaacaagcatggcctcacaccactgctacttggtgtacatgagcaaaaacagcaagtggtgaaatttttaatcaagaaaaaagcga

SEQ ID NO: 709868 - DNA, 78 bp, Artificial Sequence
  ENSG00000196834_11 (sequence is synthesized)
aaacagcaagtggtgaaatttttaatcaagaaaaaagcgaatttaaatgcgctggatagatatggaagaactgccctt

SEQ ID NO: 709869 - DNA, 69 bp, Artificial Sequence
  ENSG00000196834_12 (sequence is synthesized)
tgacatcagaggaagagtcacaaaggttcaaaggcagtgaaaatagccagccagaagaagaaatgaaga

SEQ ID NO: 709870 - DNA, 120 bp, Artificial Sequence
  ENSG00000196834_13 (sequence is synthesized)
aagaaatgaagaagcatgaaagtaataatgtgggattactagaaaacctgagtaatggtgtcactgctggcaatggtgatgatggattaattcctcaaaggaagagcagaacacctgaaa

SEQ ID NO: 709871 - DNA, 120 bp, Artificial Sequence
  ENSG00000196834_14 (sequence is synthesized)
atcagcaatttcctgacaacgaaagtgaagagtatcacagaatttgcgaattagtttctgactacaaagaaaaacagatgccaaaatactcttctgaaaacagcaacccagaacaagact

SEQ ID NO: 709872 - DNA, 83 bp, Artificial Sequence
  ENSG00000196834_15 (sequence is synthesized)
cagaggaagagtcacaaaggcttaaaggcagtgaaaatggccagccagagaaaagatcctagaaaattttatggctatcgaag

SEQ ID NO: 709873 - DNA, 120 bp, Artificial Sequence
  ENSG00000196834_16 (sequence is synthesized)
tggctatcgaagaaatgaagaagcacggaagtactcacgtcggattcccagaaaacctgactaatggtgccactgctggcaatggtgatgatggattaattcctccaaggaagagcagaa

SEQ ID NO: 709874 - DNA, 120 bp, Artificial Sequence
  ENSG00000196834_17 (sequence is synthesized)
acactgagaatgaagagtatcacagtgacgaacaaaatgatactcagaagcaattttgtgaagaacagaacactggaatattacacgatgagattctgattcatgaagaaaagcagatag

SEQ ID NO: 709875 - DNA, 120 bp, Artificial Sequence
  ENSG00000196834_18 (sequence is synthesized)
tgattcatgaagaaaagcagatagaagtggttgaaaaaatgaattctgagctttctcttagttgtaagaaagaaaaagacttcttgcatgaaaatagtacgttgcgggaagaaattgcca

SEQ ID NO: 709876 - DNA, 120 bp, Artificial Sequence
  ENSG00000196834_19 (sequence is synthesized)
tgctaagactggagctagacacaatgaaacatcagagccagctaagaaaaaagaaatatttggaggatattgaaagtgtgaaaaaaaagaatgataatcttttaaaggctctacaattga

SEQ ID NO: 709877 - DNA, 120 bp, Artificial Sequence
  ENSG00000196834_20 (sequence is synthesized)
atgagctcaccatggatgatgataccgccgtgctcgtcattgacaacggctctggcatgtgcaaggccggctttgcgggcgacgatgccccccgggctgtcttcccttccatcgtggggc

SEQ ID NO: 709878 - DNA, 120 bp, Artificial Sequence
  ENSG00000196834_21 (sequence is synthesized)
atgccccccgggctgtcttcccttccatcgtggggcgccccaggcagcagggcatgatggggggcatgcatcagaaagagtcctatgtgggcaaggaggcccagagcaagagaggcatcc

SEQ ID NO: 709879 - DNA, 120 bp, Artificial Sequence
  ENSG00000196834_22 (sequence is synthesized)
ggagaagatctggcaccacaccttctacaacgagctgcgtgtggcccctgaggagcaccccatcctgctgaccgaggcccccctgaaccccaaggccaaccgcgagaagatgacccagat

SEQ ID NO: 709880 - DNA, 120 bp, Artificial Sequence
  ENSG00000196834_23 (sequence is synthesized)
agaccttcaacaccccagccatgtacgtggccatccaggccatgctgtccctgtacacctctggccgtactactggcatcgtgatggactctggtgacggggtcacccacactgtgccca

SEQ ID NO: 709881 - DNA, 120 bp, Artificial Sequence
  ENSG00000196834_24 (sequence is synthesized)
acggggtcacccacactgtgcccatctatgatgggaatgccctcccccatgccaccctgcgcctagacctggctgggcgggaactgactgactacctcatgaagatcctcaccgagcgtg

SEQ ID NO: 709882 - DNA, 120 bp, Artificial Sequence
  ENSG00000196834_25 (sequence is synthesized)
gctataggttcaccaccatggccgagcgggaaatcgtgcgtgacatcaaagagaagctgtgctatgttgccctggacttcgagcaggagatggccatggcggcctccagctcctccctag

SEQ ID NO: 709883 - DNA, 120 bp, Artificial Sequence
  ENSG00000196834_26 (sequence is synthesized)
agaagagctacgagctgcccgatggccaggtcatcaccatcggcaacgagtggttccgctgccccgaggcgctcttccagccttgcttcctgggcatggaatcctgtggcatccatgaaa

SEQ ID NO: 709884 - DNA, 120 bp, Artificial Sequence
  ENSG00000196834_27 (sequence is synthesized)
ctaccttcaactccatcatgaagtctgatgtggacatccgcaaagacctgtacaccaacacagtgctgtctggcggcaccaccatgtaccctggcatggcccacagaatgcagaaggaga

SEQ ID NO: 709885 - DNA, 80 bp, Artificial Sequence
  ENSG00000196834_28 (sequence is synthesized)
gagtcaggcccctccattgtccaccgcaaatgcttctaggtggactctgacttagttgcgttacaccctttcttgacaaa

SEQ ID NO: 709886 - DNA, 120 bp, Artificial Sequence
  ENSG00000196834_29 (sequence is synthesized)
tggactctgacttagttgcgttacaccctttcttgacaaaaccaaacttctcagaaaacaacatgagattggcatggctttatttgttttcttgtttcattttttgttttgttttttatt

SEQ ID NO: 709887 - DNA, 120 bp, Artificial Sequence
  ENSG00000196834_30 (sequence is synthesized)
ggcttgactcaggatttaaaaaccggaatggtgaaggtgacagcagtcggttggaggaagcttcctccaaagttctacaatgtggccaaggactttgattgtacattgttcttcttttca

SEQ ID NO: 709888 - DNA, 120 bp, Artificial Sequence
  ENSG00000196834_31 (sequence is synthesized)
tgtggccaaggactttgattgtacattgttcttcttttcaatagtcattccaaatattgtgagacgcattgtttcaggaagccccttgccctgctaaaagccaccccacttctctctaag

SEQ ID NO: 709889 - DNA, 120 bp, Artificial Sequence
  ENSG00000196834_32 (sequence is synthesized)
tgatagcattgcttttgtgcagattacataatgcaaaattttttgaatcttcgccttaatactttttaattttgttttattttgaatgatcagccttcgtggcccccctcttttgtaccc

SEQ ID NO: 709890 - DNA, 120 bp, Artificial Sequence
  ENSG00000196834_33 (sequence is synthesized)
caacttggggtgtatgaaggcttttggtctccctgagagtggctggaggcagccagggcttacctgtactctgacttgaggagagttggataaaagtgcacaccttaaaaaaaattgagg

SEQ ID NO: 709891 - DNA, 120 bp, Artificial Sequence
  ENSG00000196834_34 (sequence is synthesized)
aagcacagtatttcagtacagtggacagcttagcatgttgacaactgagaataaaatgctcagttctgaactggacaatgtaagacacaacgaggaaacaccggaaatggaaattcaatt

SEQ ID NO: 709892 - DNA, 120 bp, Artificial Sequence
  ENSG00000196834_35 (sequence is synthesized)
aggaaacaccggaaatggaaattcaattacgtcattgtagactggctgctgctctacatgattgtgaccaaagtcagatagctgaaagagacttctttccagagaacaagacatgaacag

SEQ ID NO: 709893 - DNA, 120 bp, Artificial Sequence
  ENSG00000196834_36 (sequence is synthesized)
atttatctcacctaaaagagaacagattctttctcaacaagtctaacgtagacagtaaaatcaacaggctaaaaattaagctccatgaaacaagataaaactctgagagaaaagacgggg

SEQ ID NO: 709894 - DNA, 120 bp, Artificial Sequence
  ENSG00000196834_37 (sequence is synthesized)
caggccgccatctttcccgttcaggcaacttagtcattccagcctgcgggctttggagagtacaaaccgacgagggacagaagagatcccacagcacagcatagctgctttaccaaatca

SEQ ID NO: 709895 - DNA, 120 bp, Artificial Sequence
  ENSG00000196834_38 (sequence is synthesized)
tggccagactgcttctgtaagcaggcccctgatcctgttccatctcactggacaggacctcccaactggggcctccagctacccccaccagcattccttggccaatggaaatgtgaaatg

SEQ ID NO: 709896 - DNA, 120 bp, Artificial Sequence
  ENSG00000196834_39 (sequence is synthesized)
ttcctgggacagagctcccggagaggggcaggcccccacctttgctctttcggtgactagccattctggcctgcgggctttggagagcccaagctgacaaggggtggaagaggtacctca

SEQ ID NO: 709897 - DNA, 120 bp, Artificial Sequence
  ENSG00000196834_40 (sequence is synthesized)
gcacagcacagccacgctaccaaaacgtggccagactcttgtttacgtcagtccctgaccacatttctagtcagtgggtgaagtctttcaaccagggtctctggctaccttgactgctgt

SEQ ID NO: 709898 - DNA, 120 bp, Artificial Sequence
  ENSG00000196834_41 (sequence is synthesized)
agtcagagctcccagggggaggaccagattgtcatctttgctgttggggcgacccaggcatttcagccttagggcttcagagtgtctgaggcggaccaggggctgaagtgaacccccagc

SEQ ID NO: 709899 - DNA, 120 bp, Artificial Sequence
  ENSG00000196834_42 (sequence is synthesized)
aggcggaccaggggctgaagtgaacccccagcacagcacagctgctctataaaaacgtggccagacttttctttttgaagcaagtccctgttcttgttcgtcctgactaggtaagacttc

SEQ ID NO: 709900 - DNA, 120 bp, Artificial Sequence
  ENSG00000196834_43 (sequence is synthesized)
tcaacttgcctccagccacatcttataggtgtgttcagattggcaacaggttcgtacctcagtggtacagagcttccagaggaaggggcagactatcatcttccctggaaaatacaaggc

SEQ ID NO: 709901 - DNA, 120 bp, Artificial Sequence
  ENSG00000196834_44 (sequence is synthesized)
aattagggactggaggggacccccagcataccacagcagccctacagaaaagtggccaggctctctacttgatgggcagatcctcctggcctgggtctctagccagcccaccactggagc

SEQ ID NO: 709902 - DNA, 120 bp, Artificial Sequence
  ENSG00000196834_45 (sequence is synthesized)
gggtctctagccagcccaccactggagctatcaagccagtagcaactctgcagttcctgggacagagcttccaggagcaaatgaaatcctttctgccactgcctctgcagtggaactgcc

SEQ ID NO: 709903 - DNA, 120 bp, Artificial Sequence
  ENSG00000196834_46 (sequence is synthesized)
caaagaccctaagtgccctatcaacacctccaataagctgcagttgacccaaagaacaagccagtccatctcccacgggtaccacacaccctccactactcatcaccagacagggaaccc

SEQ ID NO: 709904 - DNA, 90 bp, Artificial Sequence
  ENSG00000196834_47 (sequence is synthesized)
gattacactaagtgattgctaactcacatgtctctgggatggagcacccaggaaacaagcaaagtggtggagcagcaagtcaggtgatgt

SEQ ID NO: 709905 - DNA, 120 bp, Artificial Sequence
  ENSG00000196834_48 (sequence is synthesized)
ggtgatgtggagcccagaggtcagggatggctgtctctctagggtccacttgcccttgtgagacactttatcccagcactttaggaatactgaggtcataccagccacatcttatatgca

SEQ ID NO: 709906 - DNA, 120 bp, Artificial Sequence
  ENSG00000196834_49 (sequence is synthesized)
agattgcccagcagagatcaggtccgagagttccctttttaaaaaaaggagacttgcttaataaaagaagtctagccacgtttgtgtagagcggctgtgctgtgctgggggttcactttt

SEQ ID NO: 709907 - DNA, 120 bp, Artificial Sequence
  ENSG00000196834_50 (sequence is synthesized)
gagttctcctctgagacctgatctctggaggctgggcaatcttgcacttgagatggggctggtctgatctcagcactccttagtctgctcgcctctcccatggccccagcctggccacac

SEQ ID NO: 709908 - DNA, 120 bp, Artificial Sequence
  ENSG00000196834_51 (sequence is synthesized)
acacctgcttacggggcactcttagatgcccacaccatagcttccgtgctagtggactgtaccatatcagtggagagctgcagcaaggtggcccctagagccacgcaccagcctgcacat

SEQ ID NO: 709909 - DNA, 120 bp, Artificial Sequence
  ENSG00000196834_52 (sequence is synthesized)
tgcctctccatacggcagccctttatttggaaacttcctaaatcactttgctgtgtgtgtttacacgggtgggttttgctttacttgccctgagagcacacaggagtgcagcacacaccc

SEQ ID NO: 709910 - DNA, 78 bp, Artificial Sequence
  ENSG00000196834_53 (sequence is synthesized)
ttacttgccctgagagcacacaggagtgcagcacacaccccaacccacatcaactgccattaaagaaaagaaatttca

SEQ ID NO: 709911 - DNA, 120 bp, Artificial Sequence
  ENSG00000196834_54 (sequence is synthesized)
aggaagcactaaatatggaaagaaaagatcatcacctgctactacaaaaacacactgaagtacacagtccaatgatgctaaaaagcaagcacatatgtaagtctgcaaaataaccagctg

SEQ ID NO: 709912 - DNA, 120 bp, Artificial Sequence
  ENSG00000196834_55 (sequence is synthesized)
aacacactgaagtacacagtccaatgatgctaaaaagcaagcacatatgtaagtctgcaaaataaccagctgacagcatgacgacaggataaaatccacacataccattactaaccttaa

SEQ ID NO: 709913 - DNA, 120 bp, Artificial Sequence
  ENSG00000196834_56 (sequence is synthesized)
tgctcccattgaaagacacggggcaagctgggtaaagaaccaagacccactggagtatgccgtcttcaagcaacccatctcacgtgcagtgccatacataggctcaaaataaaggaatgg

SEQ ID NO: 709914 - DNA, 77 bp, Artificial Sequence
  ENSG00000196834_57 (sequence is synthesized)
actgaaatgcattcattttaacattgacctgtgtaagggccagtcttccatatttggaagctcaagcataacctgaa

SEQ ID NO: 709915 - DNA, 120 bp, Artificial Sequence
  ENSG00000196839_0 (sequence is synthesized)
gctggccccagggaaagccgagcggccaccgagccggcagagacccaccgagcggcggcggagggagcagcgccggggcgcacgagggcaccatggcccagacgcccgccttcgacaagc

SEQ ID NO: 709916 - DNA, 120 bp, Artificial Sequence
  ENSG00000196839_1 (sequence is synthesized)
ccaaagtggaactgcatgtccacctagacggatccatcaagcctgaaaccatcttatactatggcaggaggagagggatcgccctcccagctaacacagcagaggggctgctgaacgtca

SEQ ID NO: 709917 - DNA, 120 bp, Artificial Sequence
  ENSG00000196839_2 (sequence is synthesized)
ttggcatggacaagccgctcacccttccagacttcctggccaagtttgactactacatgcctgctatcgcgggctgccgggaggctatcaaaaggatcgcctatgagtttgtagagatga

SEQ ID NO: 709918 - DNA, 120 bp, Artificial Sequence
  ENSG00000196839_3 (sequence is synthesized)
aggccaaagagggcgtggtgtatgtggaggtgcggtacagtccgcacctgctggccaactccaaagtggagccaatcccctggaaccaggctgaaggggacctcaccccagacgaggtgg

SEQ ID NO: 709919 - DNA, 120 bp, Artificial Sequence
  ENSG00000196839_4 (sequence is synthesized)
tggccctagtgggccagggcctgcaggagggggagcgagacttcggggtcaaggcccggtccatcctgtgctgcatgcgccaccagcccaactggtcccccaaggtggtggagctgtgta

SEQ ID NO: 709920 - DNA, 120 bp, Artificial Sequence
  ENSG00000196839_5 (sequence is synthesized)
agaagtaccagcagcagaccgtggtagccattgacctggctggagatgagaccatcccaggaagcagcctcttgcctggacatgtccaggcctaccaggaggctgtgaagagcggcattc

SEQ ID NO: 709921 - DNA, 120 bp, Artificial Sequence
  ENSG00000196839_6 (sequence is synthesized)
gacatactcaagacagagcggctgggacacggctaccacaccctggaagaccaggccctttataacaggctgcggcaggaaaacatgcacttcgagatctgcccctggtccagctacctc

SEQ ID NO: 709922 - DNA, 120 bp, Artificial Sequence
  ENSG00000196839_7 (sequence is synthesized)
actggtgcctggaagccggacacggagcatgcagtcattcggctcaaaaatgaccaggctaactactcgctcaacacagatgacccgctcatcttcaagtccaccctggacactgattac

SEQ ID NO: 709923 - DNA, 120 bp, Artificial Sequence
  ENSG00000196839_8 (sequence is synthesized)
cagatgaccaaacgggacatgggctttactgaagaggagtttaaaaggctgaacatcaatgcggccaaatctagtttcctcccagaagatgaaaagagggagcttctcgacctgctctat

SEQ ID NO: 709924 - DNA, 120 bp, Artificial Sequence
  ENSG00000196839_9 (sequence is synthesized)
aaagcctatgggatgccaccttcagcctctgcagggcagaacctctgaagacgccactcctccaagccttcaccctgtggagtcaccccaactctgtggggctgagcaacatttttacat

SEQ ID NO: 709925 - DNA, 120 bp, Artificial Sequence
  ENSG00000196839_10 (sequence is synthesized)
ttattccttccaagaagaccatgatctcaatagtcagttactgatgctcctgaaccctatgtgtccatttctgcacacacgtatacctcggcatggccgcgtcacttctctgattatgtg

SEQ ID NO: 709926 - DNA, 120 bp, Artificial Sequence
  ENSG00000196839_11 (sequence is synthesized)
ccctggccagggaccagcgcccttgcacatgggcatggttgaatctgaaaccctccttctgtggcaacttgtactgaaaatctggtgctcaataaagaagcccatggctggtggcatgca

SEQ ID NO: 709927 - DNA, 120 bp, Artificial Sequence
  ENSG00000196839_12 (sequence is synthesized)
aactatacaattatggtgtgtgtttctgcgacgagcgtccgtctatccggtggaaggcacgccgctcgaggcttgcgatgctcccggggtccccgcttctagcttgggcctggcgcacag

SEQ ID NO: 709928 - DNA, 120 bp, Artificial Sequence
  ENSG00000196839_13 (sequence is synthesized)
ggctggtgagtgggtgtgagccatactggccttgactcgggtttgggagtatggtatctacaggtccagtccggggcctggaatctttggagagagggagtgagtctgcctcaacagtcc

SEQ ID NO: 709929 - DNA, 120 bp, Artificial Sequence
  ENSG00000196839_14 (sequence is synthesized)
gttgagtgcctttaaagaatccagtgaaagctgtcaaccctctccccagaaaggtgtgtgcagcagctatgaagtcttgcacactctcttcaggttgttcttaaatcccaggctgaataa

SEQ ID NO: 709930 - DNA, 120 bp, Artificial Sequence
  ENSG00000196839_15 (sequence is synthesized)
gtccattcctgcacgtgtctgcgaggtgtctctggccccctacatgccaccctgtctctcaaaggtttctccaacttccttctcacagccctttttcatgtaatgacaaattaagaacac

SEQ ID NO: 709931 - DNA, 120 bp, Artificial Sequence
  ENSG00000196839_16 (sequence is synthesized)
gacctcatggtctctactctggcacttgctgccgtgtgacagtggacaaatccttccccctctaagcgtatctgcccatgttgagtgaagaggatggactatcactacattgctaagagc

SEQ ID NO: 709932 - DNA, 120 bp, Artificial Sequence
  ENSG00000196839_17 (sequence is synthesized)
ttgagtggggtccccagctccacccagaggcccctggggaattccagggtcactgttccttcctgtctccctgtgggaatcaagccagctccaggccagaagtgggactgtgaggacatg

SEQ ID NO: 709933 - DNA, 120 bp, Artificial Sequence
  ENSG00000196839_18 (sequence is synthesized)
ctggaaggggccatgctgagggtgtggctgggaggctcagctctgagactggaagggcgaactgctgggaatccctgacccaagcaagaccttgttcttgcccccagtctggtccatggc

SEQ ID NO: 709934 - DNA, 120 bp, Artificial Sequence
  ENSG00000196843_0 (sequence is synthesized)
atctcagagagcgcggggtccggacagccgcgcgctgagggtctcggggcgggcgccgcgggacctctccgggccatggcagcccctgtcaaagggaacaggaagcagtccacggagggt

SEQ ID NO: 709935 - DNA, 120 bp, Artificial Sequence
  ENSG00000196843_1 (sequence is synthesized)
gacgccctagacccacctgcatcccccaaacctgctggcaagcagaacggaatccagaaccccatctcgctggaggactcccccgaggcaggcggggagcgggaggaggagcaggagcgg

SEQ ID NO: 709936 - DNA, 120 bp, Artificial Sequence
  ENSG00000196843_2 (sequence is synthesized)
gaggaggagcaggccttcctggtcagcctctacaagttcatgaaggagcgacacacgcccatcgagagggtgccccatctcggcttcaagcagattaacctgtggaagatctacaaagca

SEQ ID NO: 709937 - DNA, 120 bp, Artificial Sequence
  ENSG00000196843_3 (sequence is synthesized)
gtggagaagctgggggcctatgagctggtgaccgggcgccgcctctggaagaacgtgtacgacgagctggggggcagcccaggcagcaccagcgcggccacgtgcacgcgccgccactac

SEQ ID NO: 709938 - DNA, 120 bp, Artificial Sequence
  ENSG00000196843_4 (sequence is synthesized)
gagaggctggtcctgccatacgtgcggcacctgaagggggaggatgacaagccgctgcccacctccaagcccaggaaacagtacaagatggctaaggagaacaggggggatgatggggcc

SEQ ID NO: 709939 - DNA, 120 bp, Artificial Sequence
  ENSG00000196843_5 (sequence is synthesized)
accgagaggccgaagaaggccaaggaggagcggcgcatggaccagatgatgccaggaaagaccaaagcagatgctgctgacccagcaccacttcccagccaggagccccccaggaacagc

SEQ ID NO: 709940 - DNA, 120 bp, Artificial Sequence
  ENSG00000196843_6 (sequence is synthesized)
acagaacagcagggcctggcctctgggtcttctgtgtcctttgtgggtgccagcggctgtcctgaggcctacaagcggctcctatccagcttctactgcaaggggacacacggcatcatg

SEQ ID NO: 709941 - DNA, 120 bp, Artificial Sequence
  ENSG00000196843_7 (sequence is synthesized)
tcaccactggccaaaaagaagctcctggcccaggtgagcaaggtggaggccttgcagtgccaggaggagggctgccgccatggggcagagccccaggcgtccccagctgttcacctccca

SEQ ID NO: 709942 - DNA, 120 bp, Artificial Sequence
  ENSG00000196843_8 (sequence is synthesized)
gagagtccccagagccccaaagggctgactgagaactccaggcaccggctgacccctcaggagggattgcaggccccaggtggcagcctcagagaggaggcgcaggcaggcccctgcccg

SEQ ID NO: 709943 - DNA, 120 bp, Artificial Sequence
  ENSG00000196843_9 (sequence is synthesized)
tgcttctacacccaccccaccgaggtgctgaagcctgtcagccagcaccccagggacttcttctctagacttaaagatggggtgctattggggcctcctggcaaagaggggctgtcagtg

SEQ ID NO: 709944 - DNA, 120 bp, Artificial Sequence
  ENSG00000196843_10 (sequence is synthesized)
aaagagccccagctggtgtggggcggagacgctaaccgcccttctgcgttccataaaggtggctccagaaagggcatcctctaccccaagcccaaagcctgctgggtgtcccccatggcc

SEQ ID NO: 709945 - DNA, 120 bp, Artificial Sequence
  ENSG00000196843_11 (sequence is synthesized)
aaggtcccagccgagagccccacgctcccgcccaccttccccagtagcccaggcctgggcagcaagcgcagcctggaggaagagggtgctgcccacagtgggaagagactgcgggccgtg

SEQ ID NO: 709946 - DNA, 120 bp, Artificial Sequence
  ENSG00000196843_12 (sequence is synthesized)
tctccctttcttaaggaggcggatgccaagaagtgtggggccaaacctgcagggtccggcctggtctcctgccttctgggcccagccctggggcctgtgcccccagaggcctacaggggc

SEQ ID NO: 709947 - DNA, 120 bp, Artificial Sequence
  ENSG00000196843_13 (sequence is synthesized)
accatgctgcactgcccgctgaacttcactggcaccccgggccccttgaagggccaggctgcactccccttcagccccctggtcatcccggccttcccggcccacttcctggccaccgca

SEQ ID NO: 709948 - DNA, 120 bp, Artificial Sequence
  ENSG00000196843_14 (sequence is synthesized)
ggcccctcgcccatggccgctggcctgatgcacttccccccaacgtccttcgacagtgccctccgccacagactttgcccggcctcatctgcctggcacgcaccaccagtcacaacctat

SEQ ID NO: 709949 - DNA, 120 bp, Artificial Sequence
  ENSG00000196843_15 (sequence is synthesized)
gcagcgccccacttcttccacctcaacaccaagctgtaggccagcccatggtgttgtgtacactgtggagtcgacaggggcctacaacaggcaggtactgctgccagggggctctgaact

SEQ ID NO: 709950 - DNA, 120 bp, Artificial Sequence
  ENSG00000196843_16 (sequence is synthesized)
agtgcctgctacccaggacacccgggccatgcccctggctgggcagcctggcacaagtgaagaagaaggcagtgggaaaactgggtttatctcaaggcagcagcctgagcccaggagcag

SEQ ID NO: 709951 - DNA, 120 bp, Artificial Sequence
  ENSG00000196843_17 (sequence is synthesized)
aggacccagttgttataaggcgctgggagaggatgggcagctcccactgccccagagcggagctcgaagcacccaggttgcccacggaaaatccaataaaaagacaccagtgtgaatcca

SEQ ID NO: 709952 - DNA, 120 bp, Artificial Sequence
  ENSG00000196843_18 (sequence is synthesized)
gctgtccttgcctctggacagaggaagagccaggatccccagtcctacccctgcgtccctgcctccctgccttccccgctggtactctgctgctcaaagcagcttttcagccttccccat

SEQ ID NO: 709953 - DNA, 120 bp, Artificial Sequence
  ENSG00000196843_19 (sequence is synthesized)
ctgttctgcccgccccgtgttgggaaaactgcttgggccagcagtccatggccctaggagagagaatcggctggccgctgctggagccgcagagcagctgccaaactgcagtccttcgag

SEQ ID NO: 709954 - DNA, 120 bp, Artificial Sequence
  ENSG00000196843_20 (sequence is synthesized)
gtttcctgaaaggggctgcgcgggtgtgaagaacttgctcaatgcgctttgtaggatccactgttcctctttcggccgcgggctgcgccgatggtccggggagcccggcttctcgccccc

SEQ ID NO: 709955 - DNA, 120 bp, Artificial Sequence
  ENSG00000196843_21 (sequence is synthesized)
tgccccttccttctcttcccttttctcttttcctctcctgtctctccgcccacccgccgcagccccacaggagaggggtcgcttccctggttgctctcctctcctgtcccttgtgtgtcc

SEQ ID NO: 709956 - DNA, 120 bp, Artificial Sequence
  ENSG00000196843_22 (sequence is synthesized)
ccttgtcttccctcggtctgcagaagggacggggtggcggctggggagcgtcaggggaagagggcaagagcgtgggctacgagcttgcaggcgatgcccggcttcgcgctcggcgggagc

SEQ ID NO: 709957 - DNA, 120 bp, Artificial Sequence
  ENSG00000196843_23 (sequence is synthesized)
gagcttgcaggcgatgcccggcttcgcgctcggcgggagctgcgggccaacccgggcccgcgctccgtccctccgcggtgtctaggggtcgcccgggctggggtcgcgtcaccctccgcc

SEQ ID NO: 709958 - DNA, 120 bp, Artificial Sequence
  ENSG00000196843_24 (sequence is synthesized)
gagggcccagggggtcccaaggcgctgcgggtccagtgtccctttgtttgcagagtcttgggccagtaaggagtgctccgcgggccccaggggaggacaacaggtgcctcttgccccacc

SEQ ID NO: 709959 - DNA, 120 bp, Artificial Sequence
  ENSG00000196843_25 (sequence is synthesized)
cgggctcctctggtgggagcccacacgcacggtggcgtcactgcgcctacaggcaacgctagagcacaggaggggtgggaggtcggggctcgagggcttcaccccgcagcagagctcaga

SEQ ID NO: 709960 - DNA, 120 bp, Artificial Sequence
  ENSG00000196843_26 (sequence is synthesized)
gcccaatccaggccttagggacccgcctggggcctagaacttggtgtggcagaggtagaaagggcctccgataatctgcttctacagttgagagacgtcaactggcacctctgagcctct

SEQ ID NO: 709961 - DNA, 120 bp, Artificial Sequence
  ENSG00000196843_27 (sequence is synthesized)
gccccgtaggtgaaatgggaacacacgaaaccatctgaggagctctcactgtccgtcaccaccaaatgtggcccagactccgtggggagggacagtcccatcctggaactggggctttta

SEQ ID NO: 709962 - DNA, 120 bp, Artificial Sequence
  ENSG00000196844_0 (sequence is synthesized)
acaagagaacaacttgctccttccacaggaagctgcacctgacagaagctccaggatgcttgttctctttctcctgggcacagtctttctgctctgcccatattggggtgaacttcatga

SEQ ID NO: 709963 - DNA, 120 bp, Artificial Sequence
  ENSG00000196844_1 (sequence is synthesized)
ccctataaaagcgactgaaataatgtgttatgaatgtaaaaaatatcatcttgggttatgctatggtgtcatgacatcctgctccctgaagcataaacagtcctgtgcagttgagaactt

SEQ ID NO: 709964 - DNA, 120 bp, Artificial Sequence
  ENSG00000196844_2 (sequence is synthesized)
ttacatccttacaaggaaagggcagagcatgtatcattattcaaaactgtcgtgtatgaccagctgtgaggacatcaacttcctggggttcacgaagagggtagagctcatctgttgtga

SEQ ID NO: 709965 - DNA, 120 bp, Artificial Sequence
  ENSG00000196844_3 (sequence is synthesized)
tcatagtaactactgcaacctccctgagggagtttagttctacgtctctcctggattttgggttctttttcaaccactacgctctttttctcttccctgaacctgaattttgctctcctc

SEQ ID NO: 709966 - DNA, 120 bp, Artificial Sequence
  ENSG00000196844_4 (sequence is synthesized)
ttctatgcattggtagagagtgagaaagccagctcatagtgaaaagacaagcaggcataaggagacgcagtgtggacagcggagcctattgatgatggagcactagactcactctttgca

SEQ ID NO: 709967 - DNA, 120 bp, Artificial Sequence
  ENSG00000196844_5 (sequence is synthesized)
catccctgtcgctaacaggtgggaggggttttgctctccttacgtgatactgccatgaataagctcagacttggtcatttattatctcctgtatgaaaatgtgaacacttgggccataat

SEQ ID NO: 709968 - DNA, 120 bp, Artificial Sequence
  ENSG00000196844_6 (sequence is synthesized)
actgtccttttctgcccgtgggttctggagagggctaaccccagcttcccagtgtgttggcagcatgggccaagtctttctctgatagagctcttgggggaacctcagggcagaaaaaaa

SEQ ID NO: 709969 - DNA, 120 bp, Artificial Sequence
  ENSG00000196844_7 (sequence is synthesized)
aaaactgaacagacatagggatgagcatcaaagaaaacttcagggggcatttcaactggtaaaaactaagatctgagaaataacttgctgtgggtggaattggcttgaattatcattgcc

SEQ ID NO: 709970 - DNA, 120 bp, Artificial Sequence
  ENSG00000196844_8 (sequence is synthesized)
ctggctggccaggcagccttgggcacatggttgaactaggtgattggattgggaacagagtgtttttttaaggatggctagtcaggttcttctcatgggactgagcaaacaaaatgctga

SEQ ID NO: 709971 - DNA, 120 bp, Artificial Sequence
  ENSG00000196844_9 (sequence is synthesized)
taatgtggcaggtggtgtagtagttgaagataataggatgtaaatagataccatgaggtagtgttcaagtaacagagtgccctgtgtaagaggaagttatgagtttgcagaaagtgtgag

SEQ ID NO: 709972 - DNA, 120 bp, Artificial Sequence
  ENSG00000196844_10 (sequence is synthesized)
aaaggtagcatatatgggtaacagtggtgggaagagaagaaggaagacacagaaacagataggaagagaaactgagtagcattgatgttggagcacacctgtggccaaggtggcacattt

SEQ ID NO: 709973 - DNA, 120 bp, Artificial Sequence
  ENSG00000196844_11 (sequence is synthesized)
attgatgttggagcacacctgtggccaaggtggcacattttccttggatacacactaaccctggtgtttctgtccttataaggctgactgcaccctagatgacgggttgatgggtgcagc

SEQ ID NO: 709974 - DNA, 87 bp, Artificial Sequence
  ENSG00000196844_12 (sequence is synthesized)
atgctgcactttctttataaataaataaataaaggccagaaaaattggccaaaaaatctgaatagaaaaagatatacagatagtaaa

SEQ ID NO: 709975 - DNA, 120 bp, Artificial Sequence
  ENSG00000196844_13 (sequence is synthesized)
ccttccacaggaagctgcacctgacagaagctccaggatgcttgttctctttctcctgggcacagtctttctgctctgcccatattggggtgaacttcatgaccctataaaagggcagag

SEQ ID NO: 709976 - DNA, 120 bp, Artificial Sequence
  ENSG00000196850_0 (sequence is synthesized)
gctagtggagcggaagatggcggcggcggcggcggccgctgcagccgggacttcagttgggctgaggcggaggagccgccgcttctgacctcgctctggctccggtgcgcgcggctgagc

SEQ ID NO: 709977 - DNA, 80 bp, Artificial Sequence
  ENSG00000196850_1 (sequence is synthesized)
cactgcgcgccgccctgaggagcgccccagcggcggcgcgactgcggctgaggagagagccggctccgggcctccgcgtc

SEQ ID NO: 709978 - DNA, 120 bp, Artificial Sequence
  ENSG00000196850_2 (sequence is synthesized)
cgtcctcctgctcccccggccccccgcctcctcgggggggcggcggcggcgatgttctcggtcctctcgtacgggcggctggtggcccgcgccgtgctcggcggcctctcgcagaccgac

SEQ ID NO: 709979 - DNA, 120 bp, Artificial Sequence
  ENSG00000196850_3 (sequence is synthesized)
gggccggcggcggcggcggcggcgactacggactggtgacggccggctgcggcttcgggaaggacttccgtaagggcctcctcaagaagggcgcgtgctacggggacgacgcgtgcttcg

SEQ ID NO: 709980 - DNA, 120 bp, Artificial Sequence
  ENSG00000196850_4 (sequence is synthesized)
tggcccggcaccgttccgcggacgtgctcggggttgcagatggtgtaggaggctggagagactatggagttgatccatctcaattctcagggactttaatgcggacgtgtgaacgtttag

SEQ ID NO: 709981 - DNA, 120 bp, Artificial Sequence
  ENSG00000196850_5 (sequence is synthesized)
taaaagaaggacggttcgtacctagtaatcccattggaattctcaccacaagctactgtgagttgctgcaaaataaagtccctttgctcggtagcagcaccgcctgcattgtggtgctgg

SEQ ID NO: 709982 - DNA, 120 bp, Artificial Sequence
  ENSG00000196850_6 (sequence is synthesized)
acagaaccagccaccgcttacacacagcaaacctgggcgattcaggcttcctggttgtcaggggtggtgaagtcgtgcaccgatcagatgagcagcagcattacttcaacactccattcc

SEQ ID NO: 709983 - DNA, 120 bp, Artificial Sequence
  ENSG00000196850_7 (sequence is synthesized)
agctctcaatcgctccccctgaagccgagggagtcgtcttgagcgacagtccggatgctgctgatagcacgtctttcgatgtccagctaggagacattatcctgacggcaacagatggac

SEQ ID NO: 709984 - DNA, 120 bp, Artificial Sequence
  ENSG00000196850_8 (sequence is synthesized)
tctttgacaacatgcctgattatatgattcttcaggagctaaaaaagttaaagaattcaaattatgagagtatacaacagactgccagaagcattgctgagcaagctcatgagctggcct

SEQ ID NO: 709985 - DNA, 120 bp, Artificial Sequence
  ENSG00000196850_9 (sequence is synthesized)
atgacccaaattatatgtcaccttttgcacagtttgcatgtgacaatggattgaatgtgagaggtggaaagccagatgacatcaccgtccttctttcaatagtggctgagtatacagact

SEQ ID NO: 709986 - DNA, 120 bp, Artificial Sequence
  ENSG00000196850_10 (sequence is synthesized)
agctgaggtgtcaagtcctgcctttcctttcatcatcccaaatttcccctgccatgtgtgctgatcctgctggcaggaccacatttctttgccactgatctcaatggccagtgatgtaag

SEQ ID NO: 709987 - DNA, 120 bp, Artificial Sequence
  ENSG00000196850_11 (sequence is synthesized)
tcttttgcctgtcttcttgagactcgttgagatctttgttgagaaccactactatcattcactagctcatatctgccggcagcaattgaagagatccaatatttgaagattggccttcat

SEQ ID NO: 709988 - DNA, 120 bp, Artificial Sequence
  ENSG00000196850_12 (sequence is synthesized)
ttctcgatgttctttccatgatggggatggaggtgttcagtgccaccgtggctgttacttttcaaagtagttgaagtattgaaaatgagtaatgttggtaaagtgaattcaaaatcctag

SEQ ID NO: 709989 - DNA, 120 bp, Artificial Sequence
  ENSG00000196850_13 (sequence is synthesized)
tatgctaaagggatggtacaagtctaacacaaattgtacgtaatgatacatctactagaaacatacattattcatcaaaagaaatgttacatgtgtactccacaggcatagtctttgtta

SEQ ID NO: 709990 - DNA, 120 bp, Artificial Sequence
  ENSG00000196850_14 (sequence is synthesized)
tgatgattggtgtggctttatgtctttgttataaactcctatttttcaggggcttatgattctgctctaaaacattgctctgggttatacagttttgatcccaaaagcttttttgttaca

SEQ ID NO: 709991 - DNA, 120 bp, Artificial Sequence
  ENSG00000196850_15 (sequence is synthesized)
aatcgggagaaaaatccattttagttctatggatggaaatatttcatgcttttaaaaagatgtttgtgttcctgtggttaaagttttggcagtttattgattagtccaaatcacaggcta

SEQ ID NO: 709992 - DNA, 120 bp, Artificial Sequence
  ENSG00000196850_16 (sequence is synthesized)
aggcctgatctccaggaggggtaggggagacactttaccagtatttttttatggaaataatactcaaggttgtaaaacccctcaaagcctagaaatttaattgttatggctgaaattcct

SEQ ID NO: 709993 - DNA, 120 bp, Artificial Sequence
  ENSG00000196850_17 (sequence is synthesized)
cctagttgtctgatagaatgcccctgaatgggaactctaggtcccaaggcctgaagggttgagaacagacagctgtaactttgaattttgttggctttcagtggtcatgctacctaccca

SEQ ID NO: 709994 - DNA, 120 bp, Artificial Sequence
  ENSG00000196850_18 (sequence is synthesized)
tactcgtactctcagaccttttattagtagccttgctttctatagagcatgcaccaaatccagtgagtccatgtggagagagcactgtgtgcgcagcggcagcagcacagacgtccatga

SEQ ID NO: 709995 - DNA, 120 bp, Artificial Sequence
  ENSG00000196850_19 (sequence is synthesized)
ggaaaactcccagtgatgatctgacatttacaattaccccacatggaaatttaggggtttctgaatcaagcttaatgtttacagtttccaaatagccattttgcagtgtatagtttcctt

SEQ ID NO: 709996 - DNA, 120 bp, Artificial Sequence
  ENSG00000196850_20 (sequence is synthesized)
actgctgtaaagatatatatttttgggtcagtttttttccttcattaacttggtggtagaaaaaaatatatacttagaaatccttaaattaaagccatgttttatatataagtcaggtaa

SEQ ID NO: 709997 - DNA, 120 bp, Artificial Sequence
  ENSG00000196850_21 (sequence is synthesized)
cattggtgtatagatgagaatgcaattaaacctgatgagaatctacttgagaatatagaaagtctttctctaaaggagatactgactccctggtttattgcattaaaatttatgtttgag

SEQ ID NO: 709998 - DNA, 120 bp, Artificial Sequence
  ENSG00000196850_22 (sequence is synthesized)
gttacctcaacttgttttaaaagattttgttttgtgaatttgtactgtatatttgagtaactgtcaggcttttatttaaaattgtttaacatgtaccatgtacatgtcattactatattt

SEQ ID NO: 709999 - DNA, 120 bp, Artificial Sequence
  ENSG00000196850_23 (sequence is synthesized)
caatgcatcatgcttgtaacaggcatttcatttataataagaatgagttattcatttgtaagccgttcagtaatttatctactattcctaaattggcataatgttagataatctattttg

SEQ ID NO: 710000 - DNA, 120 bp, Artificial Sequence
  ENSG00000196850_24 (sequence is synthesized)
aatcacctttaattacatgtcagaatgccttaactaccctaacttgacaaaacagaattctttggtagacgcggtgggggcggggtggggggtctggacggagtctctatttaaggagaa

SEQ ID NO: 710001 - DNA, 120 bp, Artificial Sequence
  ENSG00000196850_25 (sequence is synthesized)
atcatcatgctatgataaaacacagaagcatgagtggcaagtggcggggtatttattttgcacaaactatttgcagtctctgtgtatttaaaaagtaaagaaagttgcatccagaagggt

SEQ ID NO: 710002 - DNA, 120 bp, Artificial Sequence
  ENSG00000196850_26 (sequence is synthesized)
tttgttagaatgaatacatttatattaggactgacaacttcagctcttttgtttaggttttcaattatttttggtaagagtatgtagccttatgatctggatatattttgcattcatttt

SEQ ID NO: 710003 - DNA, 120 bp, Artificial Sequence
  ENSG00000196850_27 (sequence is synthesized)
ccaacgcctacatttaattcctggtaagagcagtgctcgtcaagtttctggtttttctctgctctcatttaacccgtcaaacacaatctttgtaaagctagattggtggtgttttataca

SEQ ID NO: 710004 - DNA, 120 bp, Artificial Sequence
  ENSG00000196850_28 (sequence is synthesized)
acttatttactcagcttacctttttgagaaacgattgttagaaattgacgatgtgtttgttccagtgatactgaaagtagtgggggcaagaattgagtttcacagtggaattggctttgg

SEQ ID NO: 710005 - DNA, 120 bp, Artificial Sequence
  ENSG00000196850_29 (sequence is synthesized)
atctggcctatagattagtgacataaaatattttctctattttcccctgttctttttgtgttatgcacttaattttatgactgccgggggggtcagctggagtgctgcttaacaagtatc

SEQ ID NO: 710006 - DNA, 120 bp, Artificial Sequence
  ENSG00000196850_30 (sequence is synthesized)
tctcctactctcagtggtcagaggctgtgttggacccatagtagaattttccaggtcacagacccaagcttccatgggttgttactgtgctgtaccacttggtgggtctgattctgaacc

SEQ ID NO: 710007 - DNA, 120 bp, Artificial Sequence
  ENSG00000196850_31 (sequence is synthesized)
tgatgtgtgtgttaattatattttaagcaacacacacacacacacacgcctcatgtaatggacttttataacaaaagaaaaaatttggatttctaatttacaaatggcaaattatttatc

SEQ ID NO: 710008 - DNA, 120 bp, Artificial Sequence
  ENSG00000196850_32 (sequence is synthesized)
cctctctggatgcaccaaagaccagtaaagtttatagcttttccatctatatttataaagcaatactgtattataaaaatcaatatttttatcacatgcttgaaatttttattttgttgt

SEQ ID NO: 710009 - DNA, 120 bp, Artificial Sequence
  ENSG00000196850_33 (sequence is synthesized)
tttaaaatgtgcactctaaacatatcagaaccttatttcttcctatgaacttaagctgcctgcgcacaaaaaaaaaaaaaatttaccaaatggagatgcagtagagtccataggctctaa

SEQ ID NO: 710010 - DNA, 120 bp, Artificial Sequence
  ENSG00000196850_34 (sequence is synthesized)
aaactaaaagaaatgggatgcagggggaacaagttatttgtcctgagttactgtacttgcttgacatggttgttgggtactaaatcacaaaagaatccattccaggtatgcatgtctggg

SEQ ID NO: 710011 - DNA, 120 bp, Artificial Sequence
  ENSG00000196850_35 (sequence is synthesized)
ggttgggctgtgtctagattagaaactgggtttcaagctttgcatgatgggagagcgtcctctcctctatcagctgcgtgtgttctggataggacagtagcccggagatggaaaccacct

SEQ ID NO: 710012 - DNA, 120 bp, Artificial Sequence
  ENSG00000196850_36 (sequence is synthesized)
tcagtaccattagcccaccataccaagtaacaagttaggcaggaatcgtgggaatttattgagtcagctttgagtgtttgagagaatgtaaacaagattggctcgaattgtaaacgtttg

SEQ ID NO: 710013 - DNA, 120 bp, Artificial Sequence
  ENSG00000196850_37 (sequence is synthesized)
tactttggatgagttcatggttctttaggtcaccttaataccagctatctttggtagaagctacagcattcagtttctctggaaactgtatcacatttttgcattttaaaaattttacag

SEQ ID NO: 710014 - DNA, 120 bp, Artificial Sequence
  ENSG00000196850_38 (sequence is synthesized)
tatcaaaaaaccaaaatctgcttatgaaacaaaacatgaagcaggacatatttggattctatttatttaaaattaaattctttgcaaaattgaacttctcaactaaaacgtgtccatgtc

SEQ ID NO: 710015 - DNA, 120 bp, Artificial Sequence
  ENSG00000196850_39 (sequence is synthesized)
agaattttaactgttagcaggtagtttgtggcaaagatggctaaataatgaagcaaattagaatctgtgtgtatactaatgagctgctttttttctgttgagactatcattatttgtctt

SEQ ID NO: 710016 - DNA, 120 bp, Artificial Sequence
  ENSG00000196850_40 (sequence is synthesized)
attacccaagaggcaattacctgaatttggatgtctgaattataacttatgcaggaatagttctgtaaatacatttaaataaactgtaaagatatttaataaatatagtatttatactaa

SEQ ID NO: 710017 - DNA, 120 bp, Artificial Sequence
  ENSG00000196850_41 (sequence is synthesized)
ggtctctgctagttgtgccattagcctttcagtctagggaagattctgtggcccgtgcacagcaaagctatgcagagttctttgcccagagtctctgtcgaatgaacaggttgattccac

SEQ ID NO: 710018 - DNA, 120 bp, Artificial Sequence
  ENSG00000196850_42 (sequence is synthesized)
aagctgcctgcagaaatttggtcttgttacctcatagtgagtgagtcattagtctccaataaaagttcttcctgacctcaacagatggaaatctggtttaaaattgtagttatgtgccct

SEQ ID NO: 710019 - DNA, 120 bp, Artificial Sequence
  ENSG00000196850_43 (sequence is synthesized)
gtcttaaatgtgagtgaattttgtggccaatgactaataagaaatgtcgggaaaatgtaacattttcattctggcattgaagtattaaaacttaatatctcaacaacatgtttttgagca

SEQ ID NO: 710020 - DNA, 120 bp, Artificial Sequence
  ENSG00000196850_44 (sequence is synthesized)
tttggcatagatgacagcactgttgaaatgaaatagtgtgattaaataccagtcatttttattgctttctgtcaatgcaaatggaagaattcagatcatctgtggcccaattactatgta

SEQ ID NO: 710021 - DNA, 120 bp, Artificial Sequence
  ENSG00000196850_45 (sequence is synthesized)
taatacaaatcctttttctttccccaccgtgttaaccctgatcaggattttattgatattcgtagaggatgtggagcataactaagaaaggtcctgtttaggcaaaggagattgaaatta

SEQ ID NO: 710022 - DNA, 120 bp, Artificial Sequence
  ENSG00000196850_46 (sequence is synthesized)
tggtgtgttgctctgtggggtcatgtgttaaaatgtgtgtgcaaaggcagcctaggaagaaaaaataaatggagatgatttttgtttctaggtagcagcaccgcctgcattgtggtgctg

SEQ ID NO: 710023 - DNA, 120 bp, Artificial Sequence
  ENSG00000196859_0 (sequence is synthesized)
aagagccttggaattcagactctgtggaggtggcttgagcttttcatcctggtgaccacagacctggaacaaactaaagccagacacatactatggacaccaagggctgtacaacaacca

SEQ ID NO: 710024 - DNA, 120 bp, Artificial Sequence
  ENSG00000196859_1 (sequence is synthesized)
attctccttcaaccccatgtcaaaactgctctaggattacaaatgttagtaccatctcttctaacaacggctgccatcctggtggccttacagtcaacaactgtcaaccagctggccacg

SEQ ID NO: 710025 - DNA, 120 bp, Artificial Sequence
  ENSG00000196859_2 (sequence is synthesized)
ttctcagaattccctgggaccagggctgccaacccactcctcgcttttgtcgcaagcccatctacctaatgaacaacttcaatgcccgtttttctctggatgactgcagctggtatggtg

SEQ ID NO: 710026 - DNA, 120 bp, Artificial Sequence
  ENSG00000196859_3 (sequence is synthesized)
aaggcatcaacagtaatgagaaggagaccatgcaaatcttgaacgagcgccttgctaactacctgcaaaaggtgcgaatgctagaacgagagaatgctgaactggaatctaaaatccagg

SEQ ID NO: 710027 - DNA, 120 bp, Artificial Sequence
  ENSG00000196859_4 (sequence is synthesized)
aagaaagtaacaaagagctccctgttctatgtcctgattacctgtcttactacactaccattgaggagctccagcagaagatcttgtgtaccaaggccgagaattccagactggtctcgc

SEQ ID NO: 710028 - DNA, 120 bp, Artificial Sequence
  ENSG00000196859_5 (sequence is synthesized)
aaattgacaacaccaaactgactgcagatgacttgagagccaaatacgaagctgaggtgtctctacgccagctggtagagtcagatgccaatggcctcaagcagatcctgaatgtgctga

SEQ ID NO: 710029 - DNA, 120 bp, Artificial Sequence
  ENSG00000196859_6 (sequence is synthesized)
ccctgggcaaggccgacctagaggcacaagtccagtctctgaaagaggagctcctttgcctcaagaacaaccacaaagaggaaatcaattctttacagtgtcagcttggggagagacttg

SEQ ID NO: 710030 - DNA, 120 bp, Artificial Sequence
  ENSG00000196859_7 (sequence is synthesized)
ccatcatggagacaaaccgcaaagatgtggaacagtggttcaacacgcagatagaggagctgaatcaacaagtggtgaccagctctcaacagcagcaatgctgccaaaaggagatcatag

SEQ ID NO: 710031 - DNA, 120 bp, Artificial Sequence
  ENSG00000196859_8 (sequence is synthesized)
aactgagacgcagtgtgaacactctggaggttgaactgcaggcccagcatcgaatgagagattcccaagagtgcatcctaacggagacagaggctcgctacacggccttgctgacccaga

SEQ ID NO: 710032 - DNA, 120 bp, Artificial Sequence
  ENSG00000196859_9 (sequence is synthesized)
tccagagtctgattgataacctggaagctcagctggcagagatccggtgtgccctggaaagacagaaccaagaatacgagatcctgctggacgtcaagtcccggctggaatgtgagatta

SEQ ID NO: 710033 - DNA, 120 bp, Artificial Sequence
  ENSG00000196859_10 (sequence is synthesized)
ccacataccgcagccttctggagagctcggatggcaagcgtccctgttacccacgtgccaccaaatgtgagccttccccttggacatcttgtaagtccggagccatagaaagcacggccc

SEQ ID NO: 710034 - DNA, 120 bp, Artificial Sequence
  ENSG00000196859_11 (sequence is synthesized)
cagcttgcacatcctcatccccctgcagcttaaaggagcactgcagtgcctgcggacccctgtcccggatactggttaaaatttgcaccatcaccaaggagattaaggatgggaaggtca

SEQ ID NO: 710035 - DNA, 120 bp, Artificial Sequence
  ENSG00000196859_12 (sequence is synthesized)
tttcttcttacgagcatgtgcagccttgtttcatcatcagacctgccaaagtctaacatcccaaggtgatgaaaatgacccacatttatgaaacagaggccaatacatgctcctgccaga

SEQ ID NO: 710036 - DNA, 120 bp, Artificial Sequence
  ENSG00000196859_13 (sequence is synthesized)
gaggtttaagaaaactccccagtcccttaaggtacttagtttcttactactacagcgggtccccattgctaggtagaatatcttttattctgctccttccctaactcaccactgctaaca

SEQ ID NO: 710037 - DNA, 120 bp, Artificial Sequence
  ENSG00000196859_14 (sequence is synthesized)
agagataaaggaaagcagattttagcatagttgatcatttgggttttggatttatttgattaggaaacaataaataaagtgcttggagatctatcagtagtgtcacaaagaaaccatttt

SEQ ID NO: 710038 - DNA, 120 bp, Artificial Sequence
  ENSG00000196859_15 (sequence is synthesized)
ttttaaatgatacaggtcacaggtgacctgggcttaaaggagtcattataaatcctactatccttctccatggtagagagattcccaagagtgcatcctaacggagacagaggctcgcta

SEQ ID NO: 710039 - DNA, 120 bp, Artificial Sequence
  ENSG00000196860_0 (sequence is synthesized)
gctcggcttgtgggacgcccgcggtcggatgccctccgtccgctccctcctccgcctcttggccgccgcggcggcctgtggcgccttcgccttcctgggctattgtatttacctcaaccg

SEQ ID NO: 710040 - DNA, 120 bp, Artificial Sequence
  ENSG00000196860_1 (sequence is synthesized)
gaagcggcgcggggaccccgcgttcaagcgccgcctgcgggacaaaagaagagcagagcctcaaaaggctgaggagcagggcacgcagttgtgggatccaacgaagaataaaaagttgca

SEQ ID NO: 710041 - DNA, 120 bp, Artificial Sequence
  ENSG00000196860_2 (sequence is synthesized)
ttcttgcaagaggtacggatgggagaactttggttatctagaggagagcacagaatggggattcaacacctcggcaatgcccttttagtgtgcgagcaaccacgggaacttctgaaagtt

SEQ ID NO: 710042 - DNA, 120 bp, Artificial Sequence
  ENSG00000196860_3 (sequence is synthesized)
ttcaaacacactctccctcccaaggtatttgagatgctgttgcacaaaattccccttatttgccagcaatttgaggcagacatgaatgaacaggactgcttggaggatgatcctgattga

SEQ ID NO: 710043 - DNA, 120 bp, Artificial Sequence
  ENSG00000196860_4 (sequence is synthesized)
aaaacatttcaacgtatccacagtccagtgagaatactatggtaccatacagtataaacaactgctcagtgatatttccatttattttactttgagtaataaaaatttttctatctcata

SEQ ID NO: 710044 - DNA, 120 bp, Artificial Sequence
  ENSG00000196862_0 (sequence is synthesized)
ctttcctgttggaattggcgactgctgcggggctgagcgctggtttcacgcgtctcgggagccaggttggtggcgcgatgagttgcagcaaggcctacggggagcggtacgtcgcctccg

SEQ ID NO: 710045 - DNA, 120 bp, Artificial Sequence
  ENSG00000196862_1 (sequence is synthesized)
tgcagggctccgccccgtcgcctcgaaagaagtcaacgagaggattctattttgcaaagctgtattatgaagctaaagaatatgatcttgctaaaaaatacatatgtacttacattaatg

SEQ ID NO: 710046 - DNA, 120 bp, Artificial Sequence
  ENSG00000196862_2 (sequence is synthesized)
tgcgagagatggatcccagagctcacagatttctgggtcttctttatgaattggaagaaaacacagagaaagccgttgaatgttacaggcgttcagtggaattaaacccaacacaaaaag

SEQ ID NO: 710047 - DNA, 120 bp, Artificial Sequence
  ENSG00000196862_3 (sequence is synthesized)
atctggtgttgaagattgcagaattgctttgtaaaaatgatgttactgatggaagagcaaaatactgggtggaaagagcagcaaaacttttcccaggaagtcctgcaatttataaactaa

SEQ ID NO: 710048 - DNA, 120 bp, Artificial Sequence; identical to SEQ ID NO: 651021
  ENSG00000196862_4 (sequence is synthesized)

SEQ ID NO: 710049 - DNA, 120 bp, Artificial Sequence
  ENSG00000196862_5 (sequence is synthesized)
atcgctcaactaaaagattgaaggatgctgtggcccgctgccatgaggcagagaggaacatagctttgcgttcaagtttagagtggaattcgtgtgttgtacagacccttaaggaatatc

SEQ ID NO: 710050 - DNA, 120 bp, Artificial Sequence
  ENSG00000196862_6 (sequence is synthesized)
tggagtctttacagtgtttggagtctgataaaagtgactggcgagcaaccaatacagacttactgctggcctatgctaatcttatgcttcttacgctttccactagagatgtgcaggaaa

SEQ ID NO: 710051 - DNA, 120 bp, Artificial Sequence
  ENSG00000196862_7 (sequence is synthesized)
tgctcttcagtctgcgaaatcttctttgggtggaaatgatgaactgtcagctactttcttagaaatgaaaggacatttctacatgcatgctggttctctgctcttgaagatgggtcagca

SEQ ID NO: 710052 - DNA, 120 bp, Artificial Sequence
  ENSG00000196862_8 (sequence is synthesized)
tcttagaaatgaaaggacatttctacatgcatgctggttctctgctcttgaagatgggtcagcatggtaataatgttcaatggcgagctctttctgagctggctgcattgtgctatctca

SEQ ID NO: 710053 - DNA, 120 bp, Artificial Sequence
  ENSG00000196862_9 (sequence is synthesized)
taaaaggtgaagctggacaaaatctgctggaaatgatggcctgtgaccgactgagccaatcagggcacatgttgctaaacttaagtcgtggcaagcaagattttttaaaagtggttgttg

SEQ ID NO: 710054 - DNA, 120 bp, Artificial Sequence
  ENSG00000196862_10 (sequence is synthesized)
aaacttttgccaacaaaagcgggcagtctgcattatatgatgctctgttttctagtcagtcacctaaggatacatcttttcttggtagcgatgatattggaaacattgatgtacaagaac

SEQ ID NO: 710055 - DNA, 120 bp, Artificial Sequence
  ENSG00000196862_11 (sequence is synthesized)
gaagatttggctagatacgatgttggtgctattcgagcacataatggtagtcttcagcaccttacttggcttggcttacagtggaattcattgcctgctttacctggaatccgaaaatgg

SEQ ID NO: 710056 - DNA, 120 bp, Artificial Sequence
  ENSG00000196862_12 (sequence is synthesized)
gaaaatggctaaaacagcttttccatcatttgccccaggaaacctcaaggcttgaaacaaatgcacctgaatcaatatgtattttagatcttgaagtatttctccttggagtagtatata

SEQ ID NO: 710057 - DNA, 120 bp, Artificial Sequence
  ENSG00000196862_13 (sequence is synthesized)
ccagccacttacaattaaaggagaaatgtaattctcaccacagctcctatcagccgttatgcctgccccttcctgtatgtaaacagctttgtacagaaagacaaaaatcttggtgggatg

SEQ ID NO: 710058 - DNA, 120 bp, Artificial Sequence
  ENSG00000196862_14 (sequence is synthesized)
cggtttgtactctgattcacagaaaagcagtacctggaaactcagcaaaattgagacttttagttcagcatgaaataaacactctaagagcccaggaaaaacatggccttcaacctgctc

SEQ ID NO: 710059 - DNA, 120 bp, Artificial Sequence
  ENSG00000196862_15 (sequence is synthesized)
tgcttgtacattgggcaaaatgccttcagaaaatgggcagtggtcttaattctttttatgatcaacgagaatacatagggagaagtgttcattattggaagaaagttttgccattgttga

SEQ ID NO: 710060 - DNA, 120 bp, Artificial Sequence
  ENSG00000196862_16 (sequence is synthesized)
agataataaaaaagaagaacagtattcctgaacctattgatcctctgtttaaacattttcatagtgtagacattcaggcatcagaaattgttgaatatgaagaagacgcacacgtaactt

SEQ ID NO: 710061 - DNA, 120 bp, Artificial Sequence
  ENSG00000196862_17 (sequence is synthesized)
ttgctatattggatgcagtaaatggaaatatagaagatgctatgactgcttttgaatctataaaaagtgttgtttcttattggaatcttgcactgatttttcacaggaaggcagaagaca

SEQ ID NO: 710062 - DNA, 120 bp, Artificial Sequence
  ENSG00000196862_18 (sequence is synthesized)
ttgcaaatgatgccctttctcctgaagaacaagaagaatgcaaaaattatctgagaaagaccaggggctacctaataaagattttagatgacagtgattcaaatctttcagtggtcaaga

SEQ ID NO: 710063 - DNA, 120 bp, Artificial Sequence
  ENSG00000196862_19 (sequence is synthesized)
aattgcctgtgcccctggagtctgtaaaagagatgcttaagtcagtcatgcaggaactcgaaaactatagtgaaggagatcctctctataaaaatggttctttgcgaaatgcggattcag

SEQ ID NO: 710064 - DNA, 120 bp, Artificial Sequence
  ENSG00000196862_20 (sequence is synthesized)
aaataaaacattctacaccatctcctaccaaatattcactatcaccaagtaaaagttacaagtattctcccaaaacaccacctcgatgggcagaagatcagaattctttactgaaaatga

SEQ ID NO: 710065 - DNA, 120 bp, Artificial Sequence
  ENSG00000196862_21 (sequence is synthesized)
ttcgccaagaagtaaaggccattaaggaagaaatgcaggagttgaaactaaatagcagtaagtcagcatcccatcatcgttggcccacagagaattatggaccagactcggtgcctgatg

SEQ ID NO: 710066 - DNA, 120 bp, Artificial Sequence
  ENSG00000196862_22 (sequence is synthesized)
atattatagtcagtcaccagcatataattcccagtatcttctcagaccagcagctaatgttactcccacaaagggttcttctaatacagaatttaagtcaaccaaagaaggattttccat

SEQ ID NO: 710067 - DNA, 120 bp, Artificial Sequence
  ENSG00000196862_23 (sequence is synthesized)
ccctgtgtctgctgatggatttaaatttggcatttcggaaccaggaaatcaagaaaaggaaagtgaaaagcctcttgaaaatgatactggcttccaggctcaggatattagtggccagaa

SEQ ID NO: 710068 - DNA, 120 bp, Artificial Sequence
  ENSG00000196862_24 (sequence is synthesized)
gaatggccgtggtgtgatttttggccaaacaagtagcacttttacatttgcagatgttgcaaaatcaacttcaggagaaggatttcagtttggcaaaaaagaccccaatttcaagggatt

SEQ ID NO: 710069 - DNA, 120 bp, Artificial Sequence
  ENSG00000196862_25 (sequence is synthesized)
ttcaggtgctggagaaaaattattctcatcacaatgcggtaaaatggccaataaagcaaacacttccggtgactttgagaaagatgatgatgcctataagactgaggacagcgatgacat

SEQ ID NO: 710070 - DNA, 120 bp, Artificial Sequence
  ENSG00000196862_26 (sequence is synthesized)
ccattttgaaccagtagttcaaatgcctgaaaaagtagaacttgtaataggagaagaaggtgaaaaagttctgtattcacagggggtaaaactatttagatttgatgctgaggtaaggca

SEQ ID NO: 710071 - DNA, 120 bp, Artificial Sequence
  ENSG00000196862_27 (sequence is synthesized)
gtggaaagaaaggggcttggggaacttaaaaattctcaaaaacgaggtcaatggcaaaccaagaatgctgatgcgaagagaacaagtactaaaagtgtgtgctaatcattggataacgac

SEQ ID NO: 710072 - DNA, 120 bp, Artificial Sequence
  ENSG00000196862_28 (sequence is synthesized)
tacaatgaacctgaagcccctgtctggatcagatagagcatggatgtggtcagccagtgatttctctgatggtgatgccaaactagagcggttagcagcaaaatttaaaacaccagagct

SEQ ID NO: 710073 - DNA, 120 bp, Artificial Sequence
  ENSG00000196862_29 (sequence is synthesized)
ggctgaagaattcaagcagaaatttgaggaatgccagcagcttctgttagacataccacttcaaactccccataaacttgtagatactggcagagctgccaagttaatacagagagctga

SEQ ID NO: 710074 - DNA, 120 bp, Artificial Sequence
  ENSG00000196862_30 (sequence is synthesized)
agaaatgaagagtggactgaaagatttcaaaacatttttgacaaatgatcaaacaaaagtcactgaggaagaaaataagggttcaggtacaggtgcggccggtgcctcagacacaacaat

SEQ ID NO: 710075 - DNA, 120 bp, Artificial Sequence
  ENSG00000196862_31 (sequence is synthesized)
aaaacccaatcctgaaaacactgggcccacattagaatgggataactgtgatttaagggaagatgctttggatgatagtgtcagtagtagctcagtacatgcttctccattggcaagtag

SEQ ID NO: 710076 - DNA, 120 bp, Artificial Sequence
  ENSG00000196862_32 (sequence is synthesized)
ccctgtgagaaaaaatcttttccattttggtgagtcaacaacaggatctaacttcagttttaaatctgctttgagtccatctaagtctcctgccaagttgaatcagagtgggacttcagt

SEQ ID NO: 710077 - DNA, 120 bp, Artificial Sequence
  ENSG00000196862_33 (sequence is synthesized)
tggcactgatgaagaatctgatgttactcaagaagaagagagagatggacagtactttgaacctgttgttcctttacctgatctagttgaagtatccagtggtgaggaaaatgaaaaagt

SEQ ID NO: 710078 - DNA, 120 bp, Artificial Sequence
  ENSG00000196862_34 (sequence is synthesized)
tgtttttagtcacagggcagaactctacagatatgataaagatgttggtcaatggaaagaaaggggcattggtgatataaagattttacagaattatgataataagcaagttcgtatagt

SEQ ID NO: 710079 - DNA, 120 bp, Artificial Sequence
  ENSG00000196862_35 (sequence is synthesized)
gatgagaagggaccaagtattaaaactttgtgccaatcacacaataactccagacatgagtttgcaaaatatgaaagggacagaaagagtatgggtgtggactgcatgtgattttgcaga

SEQ ID NO: 710080 - DNA, 120 bp, Artificial Sequence
  ENSG00000196862_36 (sequence is synthesized)
tggagaaagaaaagtagagcatttagctgttcgttttaaactacaggatgttgcagactcgtttaagaaaatttttgatgaagcaaaaacagcccaggaaaaagattctttgataacacc

SEQ ID NO: 710081 - DNA, 120 bp, Artificial Sequence
  ENSG00000196862_37 (sequence is synthesized)
tcatgtttctcggtcaagcactcccagagagtcaccatgtggcaaaattgctgtagctgtattagaagaaaccacaagagagaggacagatgttattcagggtgatgatgtagcagatgc

SEQ ID NO: 710082 - DNA, 120 bp, Artificial Sequence
  ENSG00000196862_38 (sequence is synthesized)
agcttcagaagttgaagtgtctagcacatctgaaacaacaacaaaagcagtggtttctcctccaaagtttgtatttggttcagagtctgttaaaagaatttttagtagtgaaaaatcaaa

SEQ ID NO: 710083 - DNA, 120 bp, Artificial Sequence
  ENSG00000196862_39 (sequence is synthesized)
accatttgcatttggcaacagttctgccactgggtctttgtttggatttagttttaatgcatctttgaaaagtaacaacagtgaaactagttcagtagcccagagtggatctgaaagcaa

SEQ ID NO: 710084 - DNA, 120 bp, Artificial Sequence
  ENSG00000196862_40 (sequence is synthesized)
agtggaacctaaaaaatgtgaactgtcaaagaactctgatatcgaacagtcttcagatagcaaagtcaaaaatctctctgcttcctttccaatggaagaatcttcaatcaactacacatt

SEQ ID NO: 710085 - DNA, 120 bp, Artificial Sequence
  ENSG00000196862_41 (sequence is synthesized)
taaaacaccagaaaaggagcctccattatggcatgctgaatttaccaaagaagaattggttcagaagctcagttccaccacaaaaagtgcagatcacttaaacggcctgcttcgggaagc

SEQ ID NO: 710086 - DNA, 86 bp, Artificial Sequence
  ENSG00000196862_42 (sequence is synthesized)
aagagcaagaggagtctgcagctaacgtggaacacttgaagaacgtcttgctgcagttcattttcttgaagccaggtagtgaaaga

SEQ ID NO: 710087 - DNA, 120 bp, Artificial Sequence
  ENSG00000196862_43 (sequence is synthesized)
cttgctgcagttcattttcttgaagccaggtagtgaaagagagagacttcttcctgttataaatacgatgttgcagctcagccctgaagaaaagggaaaacttgctgcggttgctcaagg

SEQ ID NO: 710088 - DNA, 120 bp, Artificial Sequence
  ENSG00000196862_44 (sequence is synthesized)
tgaggaataaaatgcttcccgttcttctggatgggcatcctatcttcgtagttggtttggacttcgataggttgatggaaggaatatttttattaaccaaataaaatctatttacaaaaa

SEQ ID NO: 710089 - DNA, 120 bp, Artificial Sequence
  ENSG00000196865_0 (sequence is synthesized)
agtttaattacgtccccgggaactgcgccgatttggacttttggcacttggacctatgctttaaaaagaaaaaagtgtcattggcgtggagtggggctagtggagggtgaggtgaatgcg

SEQ ID NO: 710090 - DNA, 120 bp, Artificial Sequence
  ENSG00000196865_1 (sequence is synthesized)
ccgtttggaaaccacaggacagtgaacgtttcgtctctcccagcgagactctcccgcgggcccggcggccgcatcgggagcccggcggaaacatggcggcgcccggaggccggggccgca

SEQ ID NO: 710091 - DNA, 120 bp, Artificial Sequence
  ENSG00000196865_2 (sequence is synthesized)
gcctctccggcctgctccccgcgcagacctcgctagagtacgccctgctcgacgccgttacccagcaggagaaggacagcctggtctaccagtatctgcagaaggtggacggctgggagc

SEQ ID NO: 710092 - DNA, 120 bp, Artificial Sequence
  ENSG00000196865_3 (sequence is synthesized)
aggacttgtcagtacccgagtttccggaaggattagaatggctgaacacagaagaacctatttctgtctacaaggatctatgtggaaaaatagtcgtccttgatttcttcacctactgct

SEQ ID NO: 710093 - DNA, 120 bp, Artificial Sequence
  ENSG00000196865_4 (sequence is synthesized)
gcataaactgtattcacctattgcctgatctccatgcattagaacacacatactctgataaagatggtcttcttattattggtgttcactcggctaagtttccaaatgaaaaagtcctgg

SEQ ID NO: 710094 - DNA, 120 bp, Artificial Sequence
  ENSG00000196865_5 (sequence is synthesized)
ataacattaagagtgctgttcttcgatacaacatcacccaccctatggttaatgatgcagatgccagcctttggcaagaactagaagtttcctgctggccaactctagtcatacttggac

SEQ ID NO: 710095 - DNA, 120 bp, Artificial Sequence
  ENSG00000196865_6 (sequence is synthesized)
ctcgtggaaacatgttgttttctttgattggagagggacacaaagataaattatttttatatacttcaattgctttaaagtattacaaagacagggggcagatcagagataataaaattg

SEQ ID NO: 710096 - DNA, 120 bp, Artificial Sequence
  ENSG00000196865_7 (sequence is synthesized)
gaataaaactctataaagattctttgccaccttcaccattgctatttcctggcaaagtaacagtagaccaagttactgatagattggtaatagcagacactggacatcatagaattttgg

SEQ ID NO: 710097 - DNA, 120 bp, Artificial Sequence
  ENSG00000196865_8 (sequence is synthesized)
tcgtttggaagaatggacaaattcaatatagcattggaggacccaaccctggaagaaaagatggaatattttcagaatcaacttttaattctccacagggtgtagccataatgaataata

SEQ ID NO: 710098 - DNA, 120 bp, Artificial Sequence
  ENSG00000196865_9 (sequence is synthesized)
tcatatatgtggcagacactgaaaaccaccttataagaaagattgacctagaagctgagaaggtgagcactgtagctggtattggaattcaaggtacagataaagaaggtggagcaaaag

SEQ ID NO: 710099 - DNA, 120 bp, Artificial Sequence
  ENSG00000196865_10 (sequence is synthesized)
gagaacaacaacccattagttccccttgggatgtagtttttggaacatcaggttcagaggtccaaagaggtgacattttatggatagccatggcagggactcatcagatatgggcactcc

SEQ ID NO: 710100 - DNA, 120 bp, Artificial Sequence
  ENSG00000196865_11 (sequence is synthesized)
tgctggactctggcaaactgccaaagaaaaatgagttaacaaaaggaacctgccttaggtttgctggaagtggaaatgaagagaatcgaaacaatgcctatcctcacaaggcaggttttg

SEQ ID NO: 710101 - DNA, 120 bp, Artificial Sequence
  ENSG00000196865_12 (sequence is synthesized)
cccaaccttcaggcctttccttggcctctgaagatccctggagctgcttgtttgtagcagatagtgagagcagtacagtgagaaccgtttcactgaaagatggagcagtgaagcacctcg

SEQ ID NO: 710102 - DNA, 120 bp, Artificial Sequence
  ENSG00000196865_13 (sequence is synthesized)
taggaggagaaagagaccccatgaatttatttgcttttggtgatgttgatggagtaggaatcaatgcaaagcttcaacacccccttggagtaacatgggacaaaaaaaggaatttacttt

SEQ ID NO: 710103 - DNA, 120 bp, Artificial Sequence
  ENSG00000196865_14 (sequence is synthesized)
atgttgcagactcctacaatcacaagattaaagttgtggatccaaaaacaaaaaactgtacaacattagcaggaactggagacacaaataatgttaccagttccagttttacagagtcaa

SEQ ID NO: 710104 - DNA, 120 bp, Artificial Sequence
  ENSG00000196865_15 (sequence is synthesized)
cttttaatgaaccaggaggcttgtgtattggagagaatggagaattattatatgtagcagacaccaataatcatcaaattaaagtgatggatttagaaactaaaatggtatctgtgctcc

SEQ ID NO: 710105 - DNA, 120 bp, Artificial Sequence
  ENSG00000196865_16 (sequence is synthesized)
ccatcttcagatctgaaaatgctgtggtagatggcccgttcctagtagaaaaacagaagacattacccaaactacctaaatctgctccaagcattaggctttcccccgtgactgcgtgtg

SEQ ID NO: 710106 - DNA, 120 bp, Artificial Sequence
  ENSG00000196865_17 (sequence is synthesized)
ctggccagactcttcagttcaaactcagattagacctcccatcaggatcaaagctaactgaaggagtatccagttgctggtttctaacagctgaaggcaatgaatggctacttcaaggac

SEQ ID NO: 710107 - DNA, 120 bp, Artificial Sequence
  ENSG00000196865_18 (sequence is synthesized)
agatagcagctggagatatagagaacatttccagtcaaccaacaatttcactacaaattcctgatgattgcttatcacttgaagccattgtatctgtcagtgtgtttctttattactgta

SEQ ID NO: 710108 - DNA, 120 bp, Artificial Sequence
  ENSG00000196865_19 (sequence is synthesized)
gtgcagacagcagtgcttgtatgatgaaggcaattttgttcagtcagcctttacaaataacggatacacagcaaggttgcatagctccagtagagctcaggtatgtattttagccagcca

SEQ ID NO: 710109 - DNA, 120 bp, Artificial Sequence
  ENSG00000196865_20 (sequence is synthesized)
gctagctagcaacccattgccaccacctactgtctcccatcctgactatcactgtaatttaaggaaagaaaacttcagttctgcctctggataccaagatgcccattgctcagttcagac

SEQ ID NO: 710110 - DNA, 120 bp, Artificial Sequence
  ENSG00000196865_21 (sequence is synthesized)
aactgatattaaaataaagctatgctccttacttacttcttttattataaacaaattcctttgctttggctgatactagctgagtcattgatcatcattggtaccatgatattgtaatct

SEQ ID NO: 710111 - DNA, 120 bp, Artificial Sequence
  ENSG00000196865_22 (sequence is synthesized)
atgctgctatttggcacaagactgaagttcacactacagtagagaatactataagataatttgcaataaatactgataataataataccagatattttaactaactttttctacctttat

SEQ ID NO: 710112 - DNA, 120 bp, Artificial Sequence
  ENSG00000196865_23 (sequence is synthesized)
taatagcaatcagcacacttgaatgtgtaaatttcacagtaactttaggcagaacttaagctccaggccacatttgtataagaacaccaagtattcaaggcataaagtctgttgtaagcc

SEQ ID NO: 710113 - DNA, 120 bp, Artificial Sequence
  ENSG00000196865_24 (sequence is synthesized)
aaaaaaaagtcttttcatcactgtagaagcttaaggagtacatcagtggtaaatacgatctttattctcttctgtggttttctcagttgagatatttttaaaagagagttttgatctatt

SEQ ID NO: 710114 - DNA, 120 bp, Artificial Sequence
  ENSG00000196865_25 (sequence is synthesized)
tttattataaattatttgttatttaacataccattatgaatgccttaaaactttgtacagataaagttggacatagaatctctaaggactgactcctttaactgtttttgagtgactaca

SEQ ID NO: 710115 - DNA, 120 bp, Artificial Sequence
  ENSG00000196865_26 (sequence is synthesized)
ttaccagataatgaatgagtccccagaaatattatgactttcaaggaaaaagggactttaggacacattacttagtgtctgtgataaataatttattgtgacagctaaatctgatggtta

SEQ ID NO: 710116 - DNA, 120 bp, Artificial Sequence
  ENSG00000196865_27 (sequence is synthesized)
catatcttgttttggaaatgtacatttcacttgtaagcattaaatgcagatttgttgagtttaggttttgaggtttttttcgttcccatattcagaatttaaattatgatcatttattgt

SEQ ID NO: 710117 - DNA, 120 bp, Artificial Sequence
  ENSG00000196865_28 (sequence is synthesized)
gatgtttttaaaaatcacttttaagccttaaaagtgaaattttcagtgtgaggtgctttcatgctattaatagatacagtatatcctaatatattagtcttcaaaatattaaggccgaaa

SEQ ID NO: 710118 - DNA, 120 bp, Artificial Sequence
  ENSG00000196865_29 (sequence is synthesized)
cagtgatttaatgatactattttttaatttttgttgttttttatccctaaaaaaagatattggaaaggttttttttctattgtcataatttataactacttaaaagcctaatcttgtttt

SEQ ID NO: 710119 - DNA, 120 bp, Artificial Sequence
  ENSG00000196865_30 (sequence is synthesized)
ccttaagacctattcaacatgtttgtgatttaatcagcttacaagggtttaaaaacatcaggtgaaccatgtttatttattcagtaaatatttatagacaatatggcataatatgcttcc

SEQ ID NO: 710120 - DNA, 120 bp, Artificial Sequence
  ENSG00000196865_31 (sequence is synthesized)
cttccctgtaaaaacagtgctaaatttgaagtgtaatcttttttaaacatcattgtctatttttaattttgtttgaaatgtagtattagtttgttttattcataaggttagctgaatctc

SEQ ID NO: 710121 - DNA, 120 bp, Artificial Sequence
  ENSG00000196865_32 (sequence is synthesized)
tgaagtaaggatgtataaatcatgacattgatttaattagtcatctactgaagctacttttaaagagaaatatagatataaaattaaaaggaatcctgtttaaaattatatgtaattacc

SEQ ID NO: 710122 - DNA, 120 bp, Artificial Sequence
  ENSG00000196865_33 (sequence is synthesized)
tcataaaccttttctctccacaagcaatcaaaaaaatgaaatgttctgtaataaaagggtgtataacatactctcttttatgagaataggccttagttattttattttatttttgagacg

SEQ ID NO: 710123 - DNA, 66 bp, Artificial Sequence
  ENSG00000196865_34 (sequence is synthesized)
tgagaataggccttagttattttattttatttttgagacgtagtctggctctgtagcccaggctga

SEQ ID NO: 710124 - DNA, 120 bp, Artificial Sequence
  ENSG00000196865_35 (sequence is synthesized)
ggattacaggtgtgagccaccttgccctactggccttagttaatttttaatctcatttgacttattatgtttctcatttctagatggacaggatgagaatattttggcccaatcattttc

SEQ ID NO: 710125 - DNA, 120 bp, Artificial Sequence
  ENSG00000196865_36 (sequence is synthesized)
tggcccaatcattttctgtttaaggacttaaacaatttcacactctaaatgaagtatatacaattttaatttactaatttagaaatatctgagtttatttttcaatataatatacaaaca

SEQ ID NO: 710126 - DNA, 120 bp, Artificial Sequence
  ENSG00000196865_37 (sequence is synthesized)
gttatacatgttcatgtacagtgaaaatgcaaaggcattttttagactctattccccttcatttgtctagacagttttaggttagccttagcttatacttttcttgactttcaaaataca

SEQ ID NO: 710127 - DNA, 120 bp, Artificial Sequence
  ENSG00000196865_38 (sequence is synthesized)
gttttattgaacattcttattcttacccactgccagtctgcattgttttttacattaaaagtattatttatagtagactaatatgattttgaataaaatcacacttaagcaatatagata

SEQ ID NO: 710128 - DNA, 120 bp, Artificial Sequence
  ENSG00000196865_39 (sequence is synthesized)
ggttcctagaatttatgacgaggataaacctctcacataagaggaagcactagaaagtttatttttaaaacttgttgatccatattctataaggactaatgcatattttttatcttttgc

SEQ ID NO: 710129 - DNA, 120 bp, Artificial Sequence
  ENSG00000196865_40 (sequence is synthesized)
ttttcttgttggataaattattatgtccagtgatagtttaaaaagaacaagattttagtgtaagtcacctcacttgaaatgccagtaatgtggtattacacacattttatataatacctg

SEQ ID NO: 710130 - DNA, 120 bp, Artificial Sequence
  ENSG00000196865_41 (sequence is synthesized)
gaatctttgccctaaattattctgctggtttgtcgctatttttttcctctcctctttattatttcacaaatggtagaatttcttgatatgattcttgtaaagagtttagcttatcttgaa

SEQ ID NO: 710131 - DNA, 120 bp, Artificial Sequence
  ENSG00000196865_42 (sequence is synthesized)
cattctgtcttaagcaaatatttaacaagagaaaactttgtagtttaatcacccataagtgtaactttagcaaaattcaatgactatgaaaaataatttttttcttaactgttctaataa

SEQ ID NO: 710132 - DNA, 120 bp, Artificial Sequence
  ENSG00000196865_43 (sequence is synthesized)
tatttagttataatattatcaaaccttcagaaagttataaatcctaacagccagaaaaaaaaatttactatgtgtatatttatataggtgtgtgtatacacaaagattaagaattattca

SEQ ID NO: 710133 - DNA, 120 bp, Artificial Sequence
  ENSG00000196865_44 (sequence is synthesized)
tgattcttttatggccaatatacttttgagcttgtataactgagataagttactctttgcttgtttttctgtagttggaaaatttaggaagttattaaaaatacatatctctataatgta

SEQ ID NO: 710134 - DNA, 120 bp, Artificial Sequence
  ENSG00000196865_45 (sequence is synthesized)
cctgcacaaagtttactattaatttatgtctaccagttaaaaatacgatagttagatttggcatcacgtttaaccacaatcatcaaaatctacttaaattctatagttaacagttacata

SEQ ID NO: 710135 - DNA, 120 bp, Artificial Sequence
  ENSG00000196865_46 (sequence is synthesized)
agaatatatgcagagggaaaatgtcaatagttcttgtgaatgaaggaattatggatgtttttattttaattctactttgctgttttttttttcttttcagtgagcaatctgttattttta

SEQ ID NO: 710136 - DNA, 120 bp, Artificial Sequence
  ENSG00000196865_47 (sequence is synthesized)
aaatcacggtggggggaaacccataaagtttaaagagttaaagttaactgaatcgtaagcacttatataataactttttaaaagtcatttttattaccagagctcagaacattgtttgga

SEQ ID NO: 710137 - DNA, 120 bp, Artificial Sequence
  ENSG00000196865_48 (sequence is synthesized)
gtcctttgatctaccggttctcttaagtacgtgatttcgtgaagatagcaatggttatggcttttttgttctgttatttttattgtgtaacgtagtgtagtggttaagagcttggatttt

SEQ ID NO: 710138 - DNA, 120 bp, Artificial Sequence
  ENSG00000196865_49 (sequence is synthesized)
gcagtaacttggattctaatcctttaaaatggggctgatatacctgcctcatattcaatgaaatattgtgtgtacagcacttagtaattaatgaaactggtaattattagcttagttact

SEQ ID NO: 710139 - DNA, 120 bp, Artificial Sequence
  ENSG00000196865_50 (sequence is synthesized)
gtaatgataatttgggaccataaacacatatcaccctacattttctttgcaactacaatttgtgaaggaaaatctcccactaactattggttatgttaatattcttcatagagttgggtt

SEQ ID NO: 710140 - DNA, 120 bp, Artificial Sequence
  ENSG00000196865_51 (sequence is synthesized)
caagaagagaaatgttttataatgaagcatataactattttataaacaacattgtagttataaagaagcatgcctatagtgttattaaaaattttttgtacgactttctggagctacaag

SEQ ID NO: 710141 - DNA, 120 bp, Artificial Sequence
  ENSG00000196865_52 (sequence is synthesized)
taatgaacttgctttgagagggtccagacatactcatcctgaaccacattcctacaacatatgcccaacaacctgcaccagagtacttatatcttaaccaaaaagtttcacttcaatggt

SEQ ID NO: 710142 - DNA, 120 bp, Artificial Sequence
  ENSG00000196865_53 (sequence is synthesized)
ggtgcttcacaaaatcttcaaagtgctttcatgtgtattgcctcatttgagcttcaaataaccttataaatcgggcaggtagatgttagtttacagaggaggagacagctttggaatagt

SEQ ID NO: 710143 - DNA, 120 bp, Artificial Sequence
  ENSG00000196865_54 (sequence is synthesized)
ggtgacgtatctgaagaatagaaaaccggaatagtgctcgatgcctgaagtggtgcctggcgccagcagatgttcacttctgtcaaacaaggggaagtagtggtggagcctttattcagg

SEQ ID NO: 710144 - DNA, 120 bp, Artificial Sequence
  ENSG00000196865_55 (sequence is synthesized)
cacgggtctcctcattcctaactccaagatgcagagggaaaacgaactgctcaattaagagttcttccatggacactttcttaagccttcacataaaataacaagaataatagatattta

SEQ ID NO: 710145 - DNA, 120 bp, Artificial Sequence
  ENSG00000196865_56 (sequence is synthesized)
ttgagtagatatttattgagttctttctattttccagcactcatctattaagtgcttttatgtattaactcatttaatccacacaacaaccttatgtgagaaataccatttttccttatt

SEQ ID NO: 710146 - DNA, 120 bp, Artificial Sequence
  ENSG00000196865_57 (sequence is synthesized)
tgattggtgaagaagcacacagagagggtaagcataatcaaatacaccagcataaccaaaatcacacatttagcgagtggcagggcctggatgggagtctgttcaactctctgctgtatt

SEQ ID NO: 710147 - DNA, 120 bp, Artificial Sequence
  ENSG00000196865_58 (sequence is synthesized)
gcctcttaaagtaggttttcttaaaacataaatctttcataactttatatatttatagtaacttaatccaaagaaccccaaaagtactagcaatgattgtttctgcaatttaaataaatc

SEQ ID NO: 710148 - DNA, 120 bp, Artificial Sequence
  ENSG00000196865_59 (sequence is synthesized)
catttaattatacaactttgcattatatactgttattcagaccttggaacagtctataattgtttgtcaaaagattttatgtactactttttcttaatttcagatattatccagagtttt

SEQ ID NO: 710149 - DNA, 120 bp, Artificial Sequence
  ENSG00000196865_60 (sequence is synthesized)
tcttggcagatggatgtattaaaaaaatagctttccagtgttagttctcaacagtgctgtttcaaaagttgttttaaaagttctaacggttggtcttcaaaacgtaattaagaccttatc

SEQ ID NO: 710150 - DNA, 120 bp, Artificial Sequence
  ENSG00000196865_61 (sequence is synthesized)
ataaagagccttttgcacaggactatctcaaaccctaagaagctattcatatttaagaaaattttgttgtattaaatattagtccaagtgagctctggaaatacagtcttctgctttctt

SEQ ID NO: 710151 - DNA, 120 bp, Artificial Sequence
  ENSG00000196865_62 (sequence is synthesized)
gtttcataaataacactggtatgcagacccctccccatgactcaaatattaatatatgcaattctgttacagtaaagttttcaccatggtcaacctattccagcattaggtactttttgt

SEQ ID NO: 710152 - DNA, 62 bp, Artificial Sequence
  ENSG00000196865_63 (sequence is synthesized)
gggtacaatctcagctcactgcaggctccacctaccgggttcaagtgatcctcctgcctcag

SEQ ID NO: 710153 - DNA, 89 bp, Artificial Sequence
  ENSG00000196865_64 (sequence is synthesized)
ctcctgcctcagcctcccaagtagctggcgctcaccactactggtgcccaccacaaacagggtttctgttggccaggttggtctcgaac

SEQ ID NO: 710154 - DNA, 120 bp, Artificial Sequence
  ENSG00000196865_65 (sequence is synthesized)
attacaggcgtgagccgctgcgcccagcgcactaaatactattaaaaggaattaagcaaaatgctacgtaccaatgattatgattcatgatcacctaaacacagaatgcagacttaactt

SEQ ID NO: 710155 - DNA, 120 bp, Artificial Sequence
  ENSG00000196865_66 (sequence is synthesized)
acttttcattcttagtgtgctaattaagtagtagtatggtgcagtaaggaattttgttaattttgttataaactccctctcctgaaatccgtaaggaaatgtgataataagaaagtgata

SEQ ID NO: 710156 - DNA, 120 bp, Artificial Sequence
  ENSG00000196865_67 (sequence is synthesized)
atagtgtcatattttaaaagtagaatccactgttaagcaccaagattaccttttcttccccctgtggcacagtttatttaaatgaagtattagcaataatcatgtcactattttgtcctg

SEQ ID NO: 710157 - DNA, 120 bp, Artificial Sequence
  ENSG00000196865_68 (sequence is synthesized)
aataattaagagtttgcttttttcccatgtctttgcaataggataatataaagaatagtattaaaagtcagaggctttactaatctacctatatgtattccatggctaacaaaccctggc

SEQ ID NO: 710158 - DNA, 120 bp, Artificial Sequence
  ENSG00000196865_69 (sequence is synthesized)
ccctttacatatgagctctggaggttcgcctggctgcctcaggcttgcagaaggctgccccaatcacagagcctgggtaaggtggaacaggaggcagccccactcggcttttctgattgc

SEQ ID NO: 710159 - DNA, 120 bp, Artificial Sequence
  ENSG00000196865_70 (sequence is synthesized)
atcccacctgtttctgagtgtgttggtttggtttaattcttttcaagggttggagttggaaagtgaaaaccctagacacttgctgtggaatgtttgcctggttgtattggtgtgtccctc

SEQ ID NO: 710160 - DNA, 120 bp, Artificial Sequence
  ENSG00000196865_71 (sequence is synthesized)
ttcttcactggcatgtcgctttcaagtgtaccaaaggacattttgttctgttgaaagccacaggaccaaaaggaaaatattgcaactatttgcaaacatacttccctacctgtacaagca

SEQ ID NO: 710161 - DNA, 120 bp, Artificial Sequence
  ENSG00000196865_72 (sequence is synthesized)
gccatatactaaaaagcactaaacaagcacaaatgaacactaaatagccttataccaaaaagcattcttgtaactgtcagggcatggtatgaattccttcctctttaagcagcaacttac

SEQ ID NO: 710162 - DNA, 120 bp, Artificial Sequence
  ENSG00000196865_73 (sequence is synthesized)
cacaggcttggtggctttaagtaatatagcattaagcaaatggtcagttattttttaatgttgaaaacttccaagtgtgaataatacggacatagtttactaccttttgcttttaatata

SEQ ID NO: 710163 - DNA, 120 bp, Artificial Sequence
  ENSG00000196865_74 (sequence is synthesized)
cctggttatctatttccatttgaaataaaatgaaaggagacctcaaactgatgctgagaagtagacaaaatcagctctcagacttaactctccccaattaaaatagtttttttttccctt

SEQ ID NO: 710164 - DNA, 120 bp, Artificial Sequence
  ENSG00000196865_75 (sequence is synthesized)
attaaaatagtttttttttcccttcccatttttttgtttttaagagatagggtcttgctgtgttgcccaggctagagtgcagcagtgacatgatcatagctcactgcagcctggaactcc

SEQ ID NO: 710165 - DNA, 80 bp, Artificial Sequence
  ENSG00000196865_76 (sequence is synthesized)
ctgcttcggcctcctgagtagctaaaaattttttgtagagatggggacttgctatgttgcccagactggtctcgaactcc

SEQ ID NO: 710166 - DNA, 120 bp, Artificial Sequence
  ENSG00000196865_77 (sequence is synthesized)
tacaagcatgagccaccacacctggcctgttattccttctttatctaatgtgtgctaagcttgtgaaaaatatatgttgaggtaaatagggcaaaacattagttgataaattatgctaat

SEQ ID NO: 710167 - DNA, 120 bp, Artificial Sequence
  ENSG00000196865_78 (sequence is synthesized)
aaaacattagttgataaattatgctaattaatgggaaaaatagacatgttcctctctgaacatttagaaggactctgccctacaactatcttctgtttttagaatttgtagtcactgttc

SEQ ID NO: 710168 - DNA, 120 bp, Artificial Sequence
  ENSG00000196865_79 (sequence is synthesized)
ttagtgccactggaaatatattcattctttgagcatgtacagggtgggctccctgttgtatttattacacttttcaaaatgccagcaagtttttgtttgtatagagttggaatgtattgt

SEQ ID NO: 710169 - DNA, 120 bp, Artificial Sequence
  ENSG00000196865_80 (sequence is synthesized)
tcgtgcatgcctgtgatattcatcatcaaaatatacctgtaaaaaataaactactgcttcctctccacagcttaggcctccctcttactaaaaacaatagtagtttctgtagaagtttca

SEQ ID NO: 710170 - DNA, 120 bp, Artificial Sequence
  ENSG00000196865_81 (sequence is synthesized)
gtgagaaattatggttatataaataacagatatggcagaacaattttgttgtagtatttttttccgtagcatttcttaataatagctcagtttttaaaggaggggaacaataccccatga

SEQ ID NO: 710171 - DNA, 120 bp, Artificial Sequence
  ENSG00000196865_82 (sequence is synthesized)
gttcaaattaattttctctactttgaggtataccttcctaattatattttacataggctgttttttttaagtttaaattctcactgttaagttgcattgagagacaattagaaatgttgt

SEQ ID NO: 710172 - DNA, 120 bp, Artificial Sequence
  ENSG00000196865_83 (sequence is synthesized)
aattgtcatatctttacatgtggattatgaacaaatgaaagtttgctgtgtgattgcagttttaaattataacatttcataaatatgtcaattttagaaactcaaactctttcccatctt

SEQ ID NO: 710173 - DNA, 120 bp, Artificial Sequence
  ENSG00000196865_84 (sequence is synthesized)
ttgtatggataaagtttatggtttcatttctgagaatagagttggtctgctgtgctaacttcatgtttcttattccaaaggcttgattatatttttttctccagtgattaaaaatgcagc

SEQ ID NO: 710174 - DNA, 120 bp, Artificial Sequence
  ENSG00000196865_85 (sequence is synthesized)
gaaaatccaatctacaagttcatatattggtatttctagacatagtctagttctaaaagaatgtacttggtgtgcatttttaagtgtttcatgtagacagattaatatatttttgtacaa

SEQ ID NO: 710175 - DNA, 120 bp, Artificial Sequence
  ENSG00000196865_86 (sequence is synthesized)
cattgtatttctacatttatttcaagactgtacttttcagtgactttttcaagtgcatgtgttaacagaagattgtttggaacgagagtgcagtggcttctttactagcaaagagaagtg

SEQ ID NO: 710176 - DNA, 120 bp, Artificial Sequence
  ENSG00000196865_87 (sequence is synthesized)
taatacaagtgatcatagaaggtgagaatgtgtttatactgtatatggaaacctaatgcctcttttctaaagctttgtacatttttttcgtgaaatagattaaatattttctctctaaaa

SEQ ID NO: 710177 - DNA, 120 bp, Artificial Sequence
  ENSG00000196865_88 (sequence is synthesized)
agagtggctgactcattagctcataggagaatgaacatttggcaaggcttcagggattctaaaagtaatctcttatctatgaattaaagacttcatgtaccttttcataaaggattaagc

SEQ ID NO: 710178 - DNA, 120 bp, Artificial Sequence
  ENSG00000196866_0 (sequence is synthesized)
atgtccggacgcggcaagcaaggcggaaaggcccgagctaaggctaagacccgctcttcgcgggccggactccagttccctgtgggccgcgtacaccgcttgctccgcaagggcaactac

SEQ ID NO: 710179 - DNA, 120 bp, Artificial Sequence
  ENSG00000196866_1 (sequence is synthesized)
ctggcggcggtgttggagtacctgaccgccgagatcctggagctggcgggcaacgccgcccgcgacaacaagaagacccgcatcatcccccgacacctgcagctggccatccgcaacgac

SEQ ID NO: 710180 - DNA, 120 bp, Artificial Sequence
  ENSG00000196866_2 (sequence is synthesized)
gaggagctaaacaagttgctgggtaaagtcacaattgctcagggcggtgttctgcccaacatccaggctgtactgctccccaagaagactgagagtcaccacaaggccaagggcaagtaa

SEQ ID NO: 710181 - DNA, 120 bp, Artificial Sequence
  ENSG00000196867_0 (sequence is synthesized)
cgggcgggtgtggccaggggtgtgggtctgtgagggaccggtcggaagggcgtcgcgcggcctcgggtgacatgcggggggcggcgagcgcgagtgtccgcgagccgacgccgctcccgg

SEQ ID NO: 710182 - DNA, 120 bp, Artificial Sequence
  ENSG00000196867_1 (sequence is synthesized)
gtagaggcgccccccgcacaaagccccgggcgggccgaggcccgactgtagggactccagccaccttggccctccctgcccggggaaggccgcgctcaaggaatggcctcgcatccaaag

SEQ ID NO: 710183 - DNA, 120 bp, Artificial Sequence
  ENSG00000196867_2 (sequence is synthesized)
gccagcgaggagcggcccctacggggcctgggcacagagctctgccttccagggacactgctcttccccaggagagaaacaagaagctggaggctgtggggacaggaattgaacctaaag

SEQ ID NO: 710184 - DNA, 120 bp, Artificial Sequence
  ENSG00000196867_3 (sequence is synthesized)
ccatgtcccagggcttggtgacatttggggatgtggctgtagatttctcccaagaggagtgggagtggctgaaccccattcagaggaacttgtacaggaaggtgatgttggagaactaca

SEQ ID NO: 710185 - DNA, 120 bp, Artificial Sequence
  ENSG00000196867_4 (sequence is synthesized)
ggaacctggcatcgctgggactttgtgtttctaagcccgatgtgatctcctcgttggaacaaggaaaagagccttggacagtgaagcgaaagatgacaagagcctggtgcccagacttga

SEQ ID NO: 710186 - DNA, 120 bp, Artificial Sequence
  ENSG00000196867_5 (sequence is synthesized)
aggctgtgtggaagatcaaggagttacctctcaagaaggacttctgcgaaggaaagctatcccaggcagtgataacagagagactcacaagctataatctggagtactctctgttagggg

SEQ ID NO: 710187 - DNA, 120 bp, Artificial Sequence
  ENSG00000196867_6 (sequence is synthesized)
aacactgggattatgatgctctgtttgagacacagccgggcttggtgactatcaaaaacctggctgttgacttccgccagcagctacacccagctcagaagaatttctgtaagaatggga

SEQ ID NO: 710188 - DNA, 120 bp, Artificial Sequence
  ENSG00000196867_7 (sequence is synthesized)
tatgggagaacaacagtgacctgggatcagcaggacattgtgtggctaagccagatttagtctctttactagagcaagagaaggagccctggatggtgaagcgagagctgacaggaagcc

SEQ ID NO: 710189 - DNA, 120 bp, Artificial Sequence
  ENSG00000196867_8 (sequence is synthesized)
tgttctcaggccagcgatctgtacatgagacccaggaattatttccaaagcaagattcatatgctgaaggggtaacagacagaacctcaaacactaaacttgattgttccagtttcagag

SEQ ID NO: 710190 - DNA, 120 bp, Artificial Sequence
  ENSG00000196867_9 (sequence is synthesized)
aaaattgggattctgactatgtgtttggaaggaagcttgcagtaggtcaagagacacaattcaggcaagagccaattactcataacaaaaccctctctaaggaaagagaacgtacatata

SEQ ID NO: 710191 - DNA, 120 bp, Artificial Sequence
  ENSG00000196867_10 (sequence is synthesized)
acaaatctggaagatggttctatttggacgattcagaagagaaagttcataatcgtgattcaattaaaaattttcaaaaaagttcagtggtaataaaacaaacaggcatctatgcaggaa

SEQ ID NO: 710192 - DNA, 120 bp, Artificial Sequence
  ENSG00000196867_11 (sequence is synthesized)
aaaagcttttcaagtgtaatgaatgtaagaaaacttttacccagagctcatctcttactgttcatcagagaattcacactggagagaaaccttataaatgtaatgaatgtgggaaggcct

SEQ ID NO: 710193 - DNA, 120 bp, Artificial Sequence
  ENSG00000196867_12 (sequence is synthesized)
ttagtgacggctcatcctttgcccgacaccagagatgtcacactggcaagaagccctatgagtgcattgagtgtgggaaagctttcatacagaacacatcccttatccgtcactggagat

SEQ ID NO: 710194 - DNA, 120 bp, Artificial Sequence
  ENSG00000196867_13 (sequence is synthesized)
gtcactggagatactatcatactggggagaaaccctttgattgcatcgattgtgggaaagccttcagtgaccacatagggcttaatcaacacaggagaattcatactggagagaaacctt

SEQ ID NO: 710195 - DNA, 120 bp, Artificial Sequence
  ENSG00000196867_14 (sequence is synthesized)
tatgtcacaaatccttcaggtatggttcctcccttactgtacatcaaaggattcataccggagaaaaaccatatgaatgtgatgtttgcagaaaagccttcagccatcatgcatcactca

SEQ ID NO: 710196 - DNA, 120 bp, Artificial Sequence
  ENSG00000196867_15 (sequence is synthesized)
ctcaacatcaaagagtacattctggagaaaagccttttaagtgtaaagagtgcggaaaagcttttaggcagaatatacaccttgccagtcatttaaggattcatactggggagaagcctt

SEQ ID NO: 710197 - DNA, 120 bp, Artificial Sequence
  ENSG00000196867_16 (sequence is synthesized)
ttgaatgtgcggagtgtggaaaatccttcagcatcagttctcagcttgccactcatcagagaatccatactggagagaagccctatgaatgtaaggtttgtagtaaagcgttcacccaga

SEQ ID NO: 710198 - DNA, 120 bp, Artificial Sequence
  ENSG00000196867_17 (sequence is synthesized)
cagcatcagaaaacccatacaggagagaaaccatatgagtgcaaggaatgcggtaaagccttcagccagaccacacacctcattcaacatcagagagttcacactggtgagaaaccctat

SEQ ID NO: 710199 - DNA, 120 bp, Artificial Sequence
  ENSG00000196867_18 (sequence is synthesized)
aaatgtatggaatgtgggaaggcctttggtgataactcatcctgtactcaacatcaaagactgcacactggccaaagaccttatgaatgtattgagtgtggaaaggcattcaagacaaaa

SEQ ID NO: 710200 - DNA, 120 bp, Artificial Sequence
  ENSG00000196867_19 (sequence is synthesized)
tcctcccttatttgtcatcgcagaagtcatactggagaaaaaccttatgaatgcagtgtgtgtggcaaagcctttagtcatcgtcaatcccttagtgtacatcagagaatccattctgga

SEQ ID NO: 710201 - DNA, 120 bp, Artificial Sequence
  ENSG00000196867_20 (sequence is synthesized)
aagaaaccatatgaatgtaaggaatgtaggaaaaccttcatccaaattggacaccttaatcaacataagagagttcatactggagagagatcttataactataagaaaagcagaaaagtc

SEQ ID NO: 710202 - DNA, 120 bp, Artificial Sequence
  ENSG00000196867_21 (sequence is synthesized)
ttcaggcaaactgctcacttagctcatcatcagcgaattcatactggagagtcgtcaacatgcccctctttaccttccacgtcaaatcctgtggatctgtttcccaaatttctctggaat

SEQ ID NO: 710203 - DNA, 120 bp, Artificial Sequence
  ENSG00000196867_22 (sequence is synthesized)
ccatcctccctcccatcaccatagcctcgagacgtcatttctgtttgactactccagcagtttaaaaccccatctccctgcccttttgttttctttttgtcccttattagttagttcttc

SEQ ID NO: 710204 - DNA, 120 bp, Artificial Sequence
  ENSG00000196867_23 (sequence is synthesized)
acataagtgtaaatgtaacttattcactcctcttgtaaaacttatagtttctttaaattggttaatgtgtgagatgtgctcagcacagtgcctggtccatagtaagtgctcagtaaactt

SEQ ID NO: 710205 - DNA, 120 bp, Artificial Sequence
  ENSG00000196867_24 (sequence is synthesized)
agctgttttaaaaactttgtatttgaacattgaaaagttacagtagtcagctctgataaaaaaatgatgcagtagggtgagggtaggaaaaagcacattttctatcaggaacagaattct

SEQ ID NO: 710206 - DNA, 120 bp, Artificial Sequence
  ENSG00000196867_25 (sequence is synthesized)
ccagtagtgggtgaggttttgcctttgttggttttaaaacttgattctataatgccaagttagttttgtggctttccatctgaccctatgtgaatgtaaggtgatgtgaccttgttggtg

SEQ ID NO: 710207 - DNA, 120 bp, Artificial Sequence
  ENSG00000196867_26 (sequence is synthesized)
agaaaattaaactttacatttgacttgatttgttttagaaagtctagggaccatgaatgaataggccagctgggacaaatgaatttaaaaaatcagaaaaatgcaagatttatatgcatg

SEQ ID NO: 710208 - DNA, 120 bp, Artificial Sequence
  ENSG00000196867_27 (sequence is synthesized)
aagttaaaacaactgacgttactcaagaattagaaaactttgcaagatttgacttgtttaaaaatcacatttataagtgaaccgtattaaaacttttaaggaaccattcattgtgaggta

SEQ ID NO: 710209 - DNA, 120 bp, Artificial Sequence
  ENSG00000196867_28 (sequence is synthesized)
aactgatccagaataggggtcagcaaactatgactcatggccacagtctcactgactgtttttgtatggtccatgatctagaatttaaaaaaattttaaagggttgaaaaaagtgaaaag

SEQ ID NO: 710210 - DNA, 120 bp, Artificial Sequence
  ENSG00000196867_29 (sequence is synthesized)
aatattttcaacatgaaaattatatgaaatttaagttttggtgtctgtaaataaagttttgttggcttcagccacacagtgatttacaccttgattgtgctgcttccaggctgtagcagc

SEQ ID NO: 710211 - DNA, 120 bp, Artificial Sequence
  ENSG00000196867_30 (sequence is synthesized)
agagttgagcagttgtgacaggagaccatgtggcctgcagagcccaaatatctactgtctgatcctacacagaaaatgtgtgtgatccctgctatggagcagaggttatcaaactaaagc

SEQ ID NO: 710212 - DNA, 120 bp, Artificial Sequence
  ENSG00000196867_31 (sequence is synthesized)
ccatggaccaaatcctatctgctgcttgtttttgtaaatagagttttatcaaaccacagccatgcttacttgtttagctattgactatggctgctttagacaactgtgacagactatatg

SEQ ID NO: 710213 - DNA, 120 bp, Artificial Sequence
  ENSG00000196867_32 (sequence is synthesized)
gctcgcaaaactgcaaatatttcctatcctttaacagaaagtttgccaacctctgctctagagtagagaaaaatgtataaaagattttaattttatgagggcaatacaactgtcacatca

SEQ ID NO: 710214 - DNA, 120 bp, Artificial Sequence
  ENSG00000196867_33 (sequence is synthesized)
gaaacaagaaaacaaatgataaaggaactcatttatcaatagaggtgaaaggaaattattaaactatattgaaaaataaagatgtcaataaaaggagaaatgatatttttctagatgaaa

SEQ ID NO: 710215 - DNA, 120 bp, Artificial Sequence
  ENSG00000196867_34 (sequence is synthesized)
tcattcatctcttcttgagactagttaattgtgaagacttacatttttaaggccaggatctggacttttattagttagcatcgtaataaaaaaaaaggagacttgaaggctgtgtggaag

SEQ ID NO: 710216 - DNA, 120 bp, Artificial Sequence
  ENSG00000196867_35 (sequence is synthesized)
tcaggtgagtgcaggagagcctggtgtggaaaatctactgcaagagagagcggagcttttaccaaaaaggctgcatcctcactaatatacagtaggaaactttacccagggtctctgggt

SEQ ID NO: 710217 - DNA, 120 bp, Artificial Sequence
  ENSG00000196867_36 (sequence is synthesized)
ctggaaagaaaattgaactctgggagttccaaataattctttcctcctcctttgcccccttctctccagtaactgccatttccctgaagttccttcttttcttggccactgggacgtgta

SEQ ID NO: 710218 - DNA, 120 bp, Artificial Sequence
  ENSG00000196867_37 (sequence is synthesized)
tcatccacttgcttccttaaatgatcttttctggaccctgatgcacttttgagctgacttccaaaggttttctcttctgtggttaaatggcctattgttttcatcatgcatccattcctg

SEQ ID NO: 710219 - DNA, 120 bp, Artificial Sequence
  ENSG00000196867_38 (sequence is synthesized)
tgagaaccacaaattgaaagttatgggattgagccactctgctgagtattggcaggcgattggaaaaagggagaattacacataaatgtaagccatcagtgaattactctaatggaaagg

SEQ ID NO: 710220 - DNA, 120 bp, Artificial Sequence
  ENSG00000196867_39 (sequence is synthesized)
ataagacatgtttatggatagcttgcatgaagtagagtttgcagaatttcaaatagggcattatagagacaaaggagatgttgttcccagtggtgtctatgttttagtaggacaggtggg

SEQ ID NO: 710221 - DNA, 120 bp, Artificial Sequence
  ENSG00000196867_40 (sequence is synthesized)
tagaagttgaattgcaagaaggtggaagtaaaggatcttttcctcttgatgcacaagggaaagaaaggaaatttccatagaaaataatggtttgtagaaaatgtaattgtttactgtttg

SEQ ID NO: 710222 - DNA, 120 bp, Artificial Sequence
  ENSG00000196867_41 (sequence is synthesized)
tacacgtttttcatgtggattccacgttgtatataccattgctcacttaggttgctttacatttcttagtattaaagatacaattataatagatttttttcaagttaagtgaaaactaca

SEQ ID NO: 710223 - DNA, 120 bp, Artificial Sequence
  ENSG00000196867_42 (sequence is synthesized)
cattttggggattgctgtattcctggatatgagcacctgctaggctctgaaagtttttttgtttttggtgactagcaacaattagatgtatgagtttaattgcatcttgaaagtattggt

SEQ ID NO: 710224 - DNA, 120 bp, Artificial Sequence
  ENSG00000196867_43 (sequence is synthesized)
tatttacatgaaaacttttgctcattatttgttgaaagattatacactaaaattattctttttttatgaaagaagttgaacattttttcgtaaatttggtttttctcttatcttcttgta

SEQ ID NO: 710225 - DNA, 120 bp, Artificial Sequence
  ENSG00000196867_44 (sequence is synthesized)
aaatgtctgtcatttgtacccagttctctcttgtgtgttaaatattttcttaacagtctcagtgactgctatgtatataagcatactaattctgtgatatattgtctcaaactattttca

SEQ ID NO: 710226 - DNA, 120 bp, Artificial Sequence
  ENSG00000196867_45 (sequence is synthesized)
catatggcaataagagttttaattttaattaggtcttttaaaattatgacatgtaaaaattttcaatttttatatagtccagtatattatttctaatgtgatttctcctatttgtgtggc

SEQ ID NO: 710227 - DNA, 120 bp, Artificial Sequence
  ENSG00000196867_46 (sequence is synthesized)
tttaatgactatttagtattatatgaatatatataatttatttaaattatttactgttgagtatatttaaacatttaggaggtcttctccagttttcacctataatcaacagtggtccag

SEQ ID NO: 710228 - DNA, 120 bp, Artificial Sequence
  ENSG00000196867_47 (sequence is synthesized)
ccagttttcacctataatcaacagtggtccagtttgtacatatcttcttgcttacatgtcagaatatttcttgaagatatatgcttggaaatgaatttgcatggtcgaagtatatgtatt

SEQ ID NO: 710229 - DNA, 120 bp, Artificial Sequence
  ENSG00000196867_48 (sequence is synthesized)
tttaaagtgtcatggatattttgctgtaccgttggtaaagaatatatgagaatactgtttctagacatcatcaccaatatgggtattttgtagtttaaaaaaaattttgccaagctgcta

SEQ ID NO: 710230 - DNA, 120 bp, Artificial Sequence
  ENSG00000196867_49 (sequence is synthesized)
gatgaaaaatgttttatttaatttgcatttccccaactacttacgatgttgagaatatgtgctcttaaatctgtttagagtttgtattctattcatagtgtgtttatactcattagtcac

SEQ ID NO: 710231 - DNA, 120 bp, Artificial Sequence
  ENSG00000196867_50 (sequence is synthesized)
atttctattgggttgtatattttcctgtatttatgcaacattgatatgaatgctattttttaataagtttgataaaatttttccccaattttgtgtggtctagaagtttgcatatggtat

SEQ ID NO: 710232 - DNA, 120 bp, Artificial Sequence
  ENSG00000196867_51 (sequence is synthesized)
ttcttactatatagtagcttaacttgggaattatcttcatttatagaagcacgtactttgttgattttttcatttgtttcactcctatctcttaaaaaatgaatagatgtatagtcccat

SEQ ID NO: 710233 - DNA, 120 bp, Artificial Sequence
  ENSG00000196867_52 (sequence is synthesized)
ttgaatcatataatacatttgtttgaccttctgtaacttaattatttctctctcctttatcaccttccttccttttctttctttccttctcatttttcccttctttccttacctttctct

SEQ ID NO: 710234 - DNA, 120 bp, Artificial Sequence
  ENSG00000196867_53 (sequence is synthesized)
tctgtattttgctgtgtggcctgttttttgtttgttttatttacatatttttattatagaagagtacacataaaatttaaccattttgaagtgtacaattcagtgacagtatattatgtg

SEQ ID NO: 710235 - DNA, 120 bp, Artificial Sequence
  ENSG00000196867_54 (sequence is synthesized)
aggtgatatggtaattagcttgattgtggcaaacatttcaccatgtataagcatatcaaaacattttataccttaaatatatacaatttttatttgtcaactatgcctcaataaagctgg

SEQ ID NO: 710236 - DNA, 120 bp, Artificial Sequence
  ENSG00000196867_55 (sequence is synthesized)
gctgactgtctgtgatcctgggcacattacagctcaatattttctcatctgtaaaatgggaatagtaatagtactgactattaggatcgttgtgaggattaaataagctaatatataagt

SEQ ID NO: 710237 - DNA, 120 bp, Artificial Sequence
  ENSG00000196872_0 (sequence is synthesized)
cgcctgcagctgggagctgggagctgggagcgcgccgggcgcagggccgggccggccgcgggagggtagtgtcagcgcccgcgtccagctcttcggccgcagacccgggctgtctggagg

SEQ ID NO: 710238 - DNA, 120 bp, Artificial Sequence
  ENSG00000196872_1 (sequence is synthesized)
gctgtctggaggccgcgcggccacctgctgcgtcgccccggctttgggctggggctagacgcgcaccgcggcgggagcagccccggctcgccgcaccccgcggaaggtgcccttctctgc

SEQ ID NO: 710239 - DNA, 120 bp, Artificial Sequence
  ENSG00000196872_2 (sequence is synthesized)
gcccttctctgcgcgtctcgccgagcccgggccacgctcctgtcccagcgagcttgacatgatttccacaagggtgatggacattaagcttcgggaggctgcagaaggccttggggagga

SEQ ID NO: 710240 - DNA, 120 bp, Artificial Sequence
  ENSG00000196872_3 (sequence is synthesized)
cagcacaggaaagaaaaaatctaaattcaaaacttttaagaagttttttgggaagaagaagagaaaagaatcgccgtcgtccacaggaagtagcacctggaaacaaagtcagacgaggaa

SEQ ID NO: 710241 - DNA, 120 bp, Artificial Sequence
  ENSG00000196872_4 (sequence is synthesized)
tgaggtcattgccatcgaatccgggccagtgggctacgactccgaggatgagctggaggagtcgaggggcacgctgggcagccgggccctttctcacgacagtattttcattcctgagtc

SEQ ID NO: 710242 - DNA, 120 bp, Artificial Sequence
  ENSG00000196872_5 (sequence is synthesized)
cggacaggacgctactcggcctgtgcgggtgttttcccaagaaaatgtgtgtgatcggattaaagctctgcagttaaaaatacagtgtaatgtgaaaatggggccaccacctcctccagg

SEQ ID NO: 710243 - DNA, 120 bp, Artificial Sequence
  ENSG00000196872_6 (sequence is synthesized)
ggggcttcctgccaagcggggagaggatgccggcatgagctctgaggacgacgggctgcccaggagccccccagagatgtctctgctgcacgacgtgggtcctggtaccaccataaaggt

SEQ ID NO: 710244 - DNA, 120 bp, Artificial Sequence
  ENSG00000196872_7 (sequence is synthesized)
ctctgtcgtgtctccagaccacgtgagcgacagcaccgtctctgcccggatctcagacaacagcctggcaccagtggctgacttcagttatcctgcagaatcctcctcctgcctggacaa

SEQ ID NO: 710245 - DNA, 120 bp, Artificial Sequence
  ENSG00000196872_8 (sequence is synthesized)
ctctgcagctaagcacaagctccaggtcaagccccgcaaccagcggtcgagtaagatgaggcggctctcatcgcgcgctcagtctgaatccctgagcgacctgacgtgcaccccagagga

SEQ ID NO: 710246 - DNA, 120 bp, Artificial Sequence
  ENSG00000196872_9 (sequence is synthesized)
ggaggaaaacgaggagaagccacttttggaagtcagcccagaagagcgccccagctctgggcagcaggacgtggcgccagacagaggccctgagcctgggccaccggcgcccttgccgcc

SEQ ID NO: 710247 - DNA, 120 bp, Artificial Sequence
  ENSG00000196872_10 (sequence is synthesized)
cgcctgcagcactcctccgcgctcacggccagcgtggaggaggggggcgtccccggggaggacccctcaagccgcccggccaccccggagctcgccgagcccgagtcggcccccactctc

SEQ ID NO: 710248 - DNA, 120 bp, Artificial Sequence
  ENSG00000196872_11 (sequence is synthesized)
ccgtccccgccggagggccccccgaatcccggtcccgacggcggaaagcaggatggggaggcgccccccgcaggcccgtgtgccccggccacggacaaggcggaggaggtggtctgtgct

SEQ ID NO: 710249 - DNA, 120 bp, Artificial Sequence
  ENSG00000196872_12 (sequence is synthesized)
tgccccggccacggacaaggcggaggaggtggtctgtgctcccgaagacgtcgcgagcccgtttcccaccgccatccctgagggggacacgactccccccgagactgaccccgccgccac

SEQ ID NO: 710250 - DNA, 120 bp, Artificial Sequence
  ENSG00000196872_13 (sequence is synthesized)
ctcagaggcgccctctgctcgcgacgggccagaacgcagtgtcccgaaggaagcggagccgacgccgcccgtgctcccggatgaggagaaggggcccccagggccggcgcctgagcccga

SEQ ID NO: 710251 - DNA, 120 bp, Artificial Sequence
  ENSG00000196872_14 (sequence is synthesized)
gagagaagcggagacggagcccgagagaggagcggggaccgagcccgagagaattgggaccgagccctccacggcgcccgccccgagcccgccggcgcccaagagctgcctgaaacaccg

SEQ ID NO: 710252 - DNA, 80 bp, Artificial Sequence
  ENSG00000196872_15 (sequence is synthesized)
cttgccgctgcggagtctcccccggtggagcccggccccggttccctcgacgcagaggccgccgccccggagcgccccaa

SEQ ID NO: 710253 - DNA, 120 bp, Artificial Sequence
  ENSG00000196872_16 (sequence is synthesized)
cgagagggcggcgccagagcggaaggcggagaggggcggtgccgagctgcgaggcgcgaagaagttctcggtgtcctcgtgccgagcgcggcctcgtccgggcgtctcccgcccgctgga

SEQ ID NO: 710254 - DNA, 120 bp, Artificial Sequence
  ENSG00000196872_17 (sequence is synthesized)
acgggccagcggccgcctgcccctcgcgaggagcggcccggtctggaggagcgaggcggctcttgacgacctccagggtctccccgagccccagcacgcgaaacctggccctcggaagct

SEQ ID NO: 710255 - DNA, 120 bp, Artificial Sequence
  ENSG00000196872_18 (sequence is synthesized)
agcccggccgggccgcgcaagagccctcaggaggcggccgccgcgcccggcacgagagagccctgcccagccgcccaggagccggccccgagtgaggacagaaaccccttccccgtcaag

SEQ ID NO: 710256 - DNA, 120 bp, Artificial Sequence
  ENSG00000196872_19 (sequence is synthesized)
gccggccccgagtgaggacagaaaccccttccccgtcaagctccggtccacctccctctcgctcaaatacagggatggcgcctctcaggaggtgaagggtgtgaagaggtacagtgccga

SEQ ID NO: 710257 - DNA, 120 bp, Artificial Sequence
  ENSG00000196872_20 (sequence is synthesized)
ggtccggttagaaaggtcgctgaccgtgctcccgaaggaggagaagtgtcccctcgggacggcccccgcccttcgaggcaccagggcccccagcgaccaaggaaaggggaaggcccggcc

SEQ ID NO: 710258 - DNA, 120 bp, Artificial Sequence
  ENSG00000196872_21 (sequence is synthesized)
ccccgagccgctcagctccaagccgcccctgccccggaagccgcttctgcagagcttcacgctcccgcaccagcccgcgccccccgacgccggcccgggagagcgggaacccaggaagga

SEQ ID NO: 710259 - DNA, 120 bp, Artificial Sequence
  ENSG00000196872_22 (sequence is synthesized)
gcccaggacggcggagaaaaggccgctgcgcaggggagctgaaaagagtctgccgcctgcagcaacagggcctggagctgatgggcagcctgcgccaccctggatcaccgtcactcggca

SEQ ID NO: 710260 - DNA, 120 bp, Artificial Sequence
  ENSG00000196872_23 (sequence is synthesized)
gaagcggagggggaccttggaccagccacccaaccaggaagacaagcctggggcacggaccctgaagtctgaaccaggaaagcaagccaaggtgcccgagagaggccaggagcctgtgaa

SEQ ID NO: 710261 - DNA, 120 bp, Artificial Sequence
  ENSG00000196872_24 (sequence is synthesized)
gcaagctgactttgttcgcagcaagtctttcctgataacccctgtgaagcccgctgtggaccggaagcagggggcaaagctcaacttcaaggaggggctgcaaagaggaatctcattgtc

SEQ ID NO: 710262 - DNA, 120 bp, Artificial Sequence
  ENSG00000196872_25 (sequence is synthesized)
ccatcagaacttggctcagtctgcagtgatgatggagaaggaactgcatcagctgaagagagccagttatgccagtacagatcagccatcctggatggaacttgccagaaagaaatctca

SEQ ID NO: 710263 - DNA, 120 bp, Artificial Sequence
  ENSG00000196872_26 (sequence is synthesized)
agcttggagtgacatgccccagattataaaataggtgggcagtgtgctgataaagcatgtccactaccctgacaagccacttagttaaaaactgccagtgtattgtggcaaacaaactgt

SEQ ID NO: 710264 - DNA, 120 bp, Artificial Sequence
  ENSG00000196872_27 (sequence is synthesized)
gaaacttaaagattgattttatcatcaagttatgacgaacttggggaagaggaaggaaccaggcaaaacaaagaggataaacacacagccatactcctgggccagagggcccagaaacaa

SEQ ID NO: 710265 - DNA, 120 bp, Artificial Sequence
  ENSG00000196872_28 (sequence is synthesized)
gaacaacattgaaaaagtccaggaaccagttcctgtgcccaaaggtacgaatgtgtcttttcgaattcccttgataaagaagcctcagacaaggaagaaaatagaaatgaaattggacac

SEQ ID NO: 710266 - DNA, 120 bp, Artificial Sequence
  ENSG00000196872_29 (sequence is synthesized)
ataaataggacacccagcaaaggccagaagagaagcccttctaggagaagggacatctgtgcttccagctgagatcagcccatgtctctggtcgctctcttgcctgtggatcctgtcttc

SEQ ID NO: 710267 - DNA, 120 bp, Artificial Sequence
  ENSG00000196872_30 (sequence is synthesized)
tttcatgtttactacgaggcatgacattcatggcaaaacagggatgccgtttccaagagcagctataaaacaatctgttttcctaaagacagccactctgagaaggagatgaaggaacac

SEQ ID NO: 710268 - DNA, 120 bp, Artificial Sequence
  ENSG00000196872_31 (sequence is synthesized)
ggcagggttcatcaattcatagactgtttccaaaaataatttttaaacttttccactaggcatctgtgtctttaaccactgcacaatgcattgcctgtttaataaaaggtttcaaacatg

SEQ ID NO: 710269 - DNA, 120 bp, Artificial Sequence
  ENSG00000196872_32 (sequence is synthesized)
tctgctgtgtgcctgtgcacccgcccaaggagctcacggggcacaggagggctgggcttggcagaagccccacttcctcctggcgcacgggtacttctgtgagagatggggacaagggct

SEQ ID NO: 710270 - DNA, 120 bp, Artificial Sequence
  ENSG00000196872_33 (sequence is synthesized)
cttgatcagcaaccagtggtgacccgtgggccctaggccactcagaggaaagggaggcccactcttctccctgctgctagcttccaggaggatgagagagctggaggctcacagcacact

SEQ ID NO: 710271 - DNA, 120 bp, Artificial Sequence
  ENSG00000196872_34 (sequence is synthesized)
gtcgacaggctatccacaggctgtgggatgggagaaactgtggagccatccagctgtgtggccaggaaggatggctagcctctcccctgccagactactcactgcagggacagggcaggc

SEQ ID NO: 710272 - DNA, 120 bp, Artificial Sequence
  ENSG00000196872_35 (sequence is synthesized)
atttgccagaagtcactgattttctgcatactccatgtaatgaatctggtatgctgagataaggacacctgtgactgagatgatttctttggcgtccgtgcaagataaaagcgagcttga

SEQ ID NO: 710273 - DNA, 120 bp, Artificial Sequence
  ENSG00000196872_36 (sequence is synthesized)
gctttaaaatgtgggcttagctactgccagtatgatttgatgaaagcggatagaggtctcagatccacccccggattccaccgtcaggcccaaggacggacccctggccattgactgatg

SEQ ID NO: 710274 - DNA, 120 bp, Artificial Sequence
  ENSG00000196873_0 (sequence is synthesized)
aaaaagaaaaaattgtcactggttatccttcaggtataaaaattacaattaaaattgtaatgttataaccttccattctttcccctatgaattaaaacttttttttttaacgagactaaa

SEQ ID NO: 710275 - DNA, 120 bp, Artificial Sequence
  ENSG00000196873_1 (sequence is synthesized)
aaatcaagttgataaaatctatgccctgtgggaactggttaggtcaggctacccactccagatttccagcaggctggcctcagctctacctacagccagtagcttattaaggctctaggc

SEQ ID NO: 710276 - DNA, 120 bp, Artificial Sequence
  ENSG00000196873_2 (sequence is synthesized)
gccagtgacaccttcagacaggtggttagtgcgccctaaggactctccgcagcgtcgctcaggttcacagaacacgcccaggggcgtgtccagctgtcgtcggggagagcccacctcccc

SEQ ID NO: 710277 - DNA, 120 bp, Artificial Sequence
  ENSG00000196873_3 (sequence is synthesized)
ggggggtgtggctaagggacgaggcagttctcgtccagagcccaggtaatccgggcgggatcagctagcgtcgcgatgtgatgacgtcaggccccggccaggccgggagtggcgtgctgg

SEQ ID NO: 710278 - DNA, 120 bp, Artificial Sequence
  ENSG00000196873_4 (sequence is synthesized)
gcgtgcgcggctgcggtacggcgtgttggtcccagcggttcagctgaggtagggacgtgctgtaggccggaatgttaccggctgttggatctgtggatgaggaagaggatcctgcggagg

SEQ ID NO: 710279 - DNA, 120 bp, Artificial Sequence
  ENSG00000196873_5 (sequence is synthesized)
aggattgtcctgaattggttcccattgagacgacgcaaagcgaggaggaggaaaagtctggcctcggcgccaagatcccagtcacaattatcaccgggtatttaggtgctgggaagacaa

SEQ ID NO: 710280 - DNA, 120 bp, Artificial Sequence
  ENSG00000196873_6 (sequence is synthesized)
cacttctgaactatattttgacagagcaacatagtaaaagagtagcggtcattttaaatgaatctggggaaggaagtgcgctggagaaatccttagctgtcagccaaggtggagagctct

SEQ ID NO: 710281 - DNA, 120 bp, Artificial Sequence
  ENSG00000196873_7 (sequence is synthesized)
atgaagagtggctggaacttagaaacggttgcctctgctgttcagtgaaggacaatggccttagagctattgagaatttgatgcaaaagaaggggaaatttgatgacatactgttagaga

SEQ ID NO: 710282 - DNA, 120 bp, Artificial Sequence
  ENSG00000196873_8 (sequence is synthesized)
ccactggattagcagaccctggtgcagtggcttctatgttttgggttgatgctgaattagggagtgatatttaccttgatggtatcataactattgtggattcaaaatatggattaaaac

SEQ ID NO: 710283 - DNA, 120 bp, Artificial Sequence
  ENSG00000196873_9 (sequence is synthesized)
acagaagagaaacctgatggccttatcaatgaagctactaggcaagttgctttggcagatatcattctcattaataaaacagacttggttccagaagaagatgtaaagaaattaagaacg

SEQ ID NO: 710284 - DNA, 80 bp, Artificial Sequence
  ENSG00000196873_10 (sequence is synthesized)
atggactaggacaaatcttagaaacacaaagatcgatagtctctctggaataagtttgcagaaaaaacttcagcatgtgc

SEQ ID NO: 710285 - DNA, 120 bp, Artificial Sequence
  ENSG00000196873_11 (sequence is synthesized)
aaacttcagcatgtgccaggaacacaacctcaccttgatcagagtattgttacaatcacatttgaagtaccaggaaatgcaaaggaagaacatcttaatatgtttattcagaatcttctg

SEQ ID NO: 710286 - DNA, 120 bp, Artificial Sequence
  ENSG00000196873_12 (sequence is synthesized)
aaaggaagaacatcttaatatgtttattcagaatcttctgtgggaaaagaatgtgagaaacaaggacaatcactgcatggaggtcataaggctgaagggattggtgtcaatcaaagacaa

SEQ ID NO: 710287 - DNA, 120 bp, Artificial Sequence
  ENSG00000196873_13 (sequence is synthesized)
gatctggaggagactccagtgagctggaaggatgacactgagagaacaaatcgattggtcctcattggcagaaatttagataaggatatccttaaacagctgtttatagctactgtgaca

SEQ ID NO: 710288 - DNA, 120 bp, Artificial Sequence
  ENSG00000196873_14 (sequence is synthesized)
gaaacagaaaagcagtggacaacacatttcaaagaagatcaagtttgtacataacactagaggcatttcttatcaaaaggattggataataaaaataagtttctactgggtatatttcaa

SEQ ID NO: 710289 - DNA, 120 bp, Artificial Sequence
  ENSG00000196873_15 (sequence is synthesized)
gcatttatttattactttagttacgaattccaatatactttaaaatggtatttgttttacagcatacataaaatgtagcaaatcagtactgtaaaacatttaacattcatacaattatat

SEQ ID NO: 710290 - DNA, 120 bp, Artificial Sequence
  ENSG00000196873_16 (sequence is synthesized)
ataatatccttttttttaaagaatggtatttcacaaaaatatcttttgaaattggctttggagtttacatatactgaacatgaaagtttataataatgatgatacaactttcaacattgt

SEQ ID NO: 710291 - DNA, 120 bp, Artificial Sequence
  ENSG00000196873_17 (sequence is synthesized)
cattttttcttagaacttcagctgattgcagagatataatgattacattgttattaaatttttttaacacaagtaagtgtcaccattttatgacatgaaataaaaggttatgactgttat

SEQ ID NO: 710292 - DNA, 120 bp, Artificial Sequence
  ENSG00000196873_18 (sequence is synthesized)
acagctctctattctgaggacttgacacccgggctactgacattgttcttttcagttctacaaatgtgacagcatttaatgcaatagaagcaatgaatgaagttacccagagaaggtcaa

SEQ ID NO: 710293 - DNA, 87 bp, Artificial Sequence
  ENSG00000196873_19 (sequence is synthesized)
agtggatgagtgagcaagtgactaaaatcttctgtgaattcttcagtgtatggtgcttgccaatgcatctgagaatctagggacttt

SEQ ID NO: 710294 - DNA, 120 bp, Artificial Sequence
  ENSG00000196873_20 (sequence is synthesized)
gtatggtgcttgccaatgcatctgagaatctagggactttctgaaatagtacttccttgctatgaggactgaagttggattagaatccttttcaatgaagatcagatgtcctgagtagaa

SEQ ID NO: 710295 - DNA, 120 bp, Artificial Sequence
  ENSG00000196873_21 (sequence is synthesized)
ttcttactattgggtcctgaatcttatattaaatattctctcaaattccttgaggcgtgagccaccgcgcccagcctgtcctctgtgattttctgggcttatgttaaaattataactcaa

SEQ ID NO: 710296 - DNA, 120 bp, Artificial Sequence
  ENSG00000196873_22 (sequence is synthesized)
ccaaacctaatgctaattgtgatatgttatttattctcacctgatttgaatcattggattcaattaaatgagtttaattatcattaaataattctaagagaaataatgtctattcggatg

SEQ ID NO: 710297 - DNA, 120 bp, Artificial Sequence
  ENSG00000196873_23 (sequence is synthesized)
gtgggaattttctttctacatgcagccccattctgaatgaatgaaatcaaatcacgtgacgatcagggtcctagagtaacttaatattttgtacattggttatttgactcctcattttta

SEQ ID NO: 710298 - DNA, 120 bp, Artificial Sequence
  ENSG00000196873_24 (sequence is synthesized)
tattacatgttatatcaagggagggggtataaaagaaatacaaaaattgcagaggtatctggaatgtacctatttgttaattctatttgtcatttcttttgtttcatcttttgagtaata

SEQ ID NO: 710299 - DNA, 120 bp, Artificial Sequence
  ENSG00000196873_25 (sequence is synthesized)
agctgcttggaaaagtttctgttctttagctgattttttagctataaaaatgtatttgaaaagctcataaatttcaggattgaaaagataattgaaagtttaaaaaaaacctaattcatt

SEQ ID NO: 710300 - DNA, 120 bp, Artificial Sequence
  ENSG00000196873_26 (sequence is synthesized)
gaagtaataaccaaataattttcaatcttgattcaactgtgattcaaatcttacaccatttgcccacttctatgaattttatgtataaaattttttaagagtcagagtttttttttcttg

SEQ ID NO: 710301 - DNA, 120 bp, Artificial Sequence
  ENSG00000196873_27 (sequence is synthesized)
ttttttcttttttttttttttcttggcgattttaatgctttggaaaagatctcatggttttatctccaaaggaggaaattaatttgatgccatggaaattagttttctagtcgtatgcct

SEQ ID NO: 710302 - DNA, 120 bp, Artificial Sequence; identical to SEQ ID NO: 408708
  ENSG00000196873_28 (sequence is synthesized)

SEQ ID NO: 710303 - DNA, 120 bp, Artificial Sequence
  ENSG00000196873_29 (sequence is synthesized)
aaatttggtgagagacttggatattttattattttctgtaaaagagtgtaatttgttatacaggtctaatattgatccttttttggaagtatggaaagaatctgagtataaagcagaatt

SEQ ID NO: 710304 - DNA, 120 bp, Artificial Sequence
  ENSG00000196873_30 (sequence is synthesized)
acctctggatggcatgtattctcaaggacactgtcacagtgaaacagtttatttagaagcttgtgtttccaaactgttgaatttgatattcacaaaattggcatgtgtaaactttattaa

SEQ ID NO: 710305 - DNA, 120 bp, Artificial Sequence
  ENSG00000196873_31 (sequence is synthesized)
ttcacaaaattggcatgtgtaaactttattaaactttaagctatttcctaagatgaagatgacaaacttggagggaaacttcattcatttggtttatttttatttttatttttatttatt

SEQ ID NO: 710306 - DNA, 66 bp, Artificial Sequence
  ENSG00000196873_32 (sequence is synthesized)
tatttatttttatctttttgagacagaatctcactctgttggagtgtggtggtgcgccctccgagt

SEQ ID NO: 710307 - DNA, 87 bp, Artificial Sequence
  ENSG00000196873_33 (sequence is synthesized)
gttggtgtcaaactcctggcctcaagcccccatgccccttgtttgtgacctgtcaatataaatatgctcagtagcggggggaggggt

SEQ ID NO: 710308 - DNA, 120 bp, Artificial Sequence
  ENSG00000196873_34 (sequence is synthesized)
acctgtcaatataaatatgctcagtagcggggggaggggtggggggtgaaaaaggaaatatgtttaatattaagactttggccttttagtgtaaactgatattcaaaaatttcttcatag

SEQ ID NO: 710309 - DNA, 120 bp, Artificial Sequence
  ENSG00000196873_35 (sequence is synthesized)
aacatttgcttctttgcttgatcatttttctaattctgtacatctaaaatgcccagaatttgagttgctgttatagtctactaacatagaactttggagtaataagatgggaatttgtct

SEQ ID NO: 710310 - DNA, 120 bp, Artificial Sequence
  ENSG00000196873_36 (sequence is synthesized)
ctcttttgccaagacaagcattcataatctaacacagtattgttgccacgagtacgagtatgtgatagactgttgagaataaagaaagcaggcacagttggtcagtcctaagataaagga

SEQ ID NO: 710311 - DNA, 120 bp, Artificial Sequence
  ENSG00000196873_37 (sequence is synthesized)
gatgttttttcttatatgtttgtgcattaaagaaaaaaaaatcttgaatctgaccaatgatgttttttttccttgtaagaaaatttaacaaatgtttggcaagcttctggaatctaaatt

SEQ ID NO: 710312 - DNA, 120 bp, Artificial Sequence
  ENSG00000196873_38 (sequence is synthesized)
tgaaattatacatttgtcattttctttaaatatttcttcaccttagctttgattatgagaaatcactgtcctctgctgttcttttttttttttttttcttttgaggcggagtctcactct

SEQ ID NO: 710313 - DNA, 65 bp, Artificial Sequence
  ENSG00000196873_39 (sequence is synthesized)
cttttttttttttttttcttttgaggcggagtctcactctaggttcaaatgattctcctgccgca

SEQ ID NO: 710314 - DNA, 120 bp, Artificial Sequence; identical to SEQ ID NO: 408676
  ENSG00000196873_40 (sequence is synthesized)

SEQ ID NO: 710315 - DNA, 120 bp, Artificial Sequence
  ENSG00000196873_41 (sequence is synthesized)
catgactgaaaaggagctttggaaatcactgcataaggcttgatttatttgcacaactttctttagggttgcagctagaacaaacctgtgtgctttgaaatgttaccttctgctctctgt

SEQ ID NO: 710316 - DNA, 120 bp, Artificial Sequence
  ENSG00000196873_42 (sequence is synthesized)
tcccaagtacagagaaataatgttgcaaatctcacttctgctgaacattatgcttcctgatgcatttagcagacactaaacatttgttgtactctaaacaaagttacaaaggactagaag

SEQ ID NO: 710317 - DNA, 120 bp, Artificial Sequence
  ENSG00000196873_43 (sequence is synthesized)
agtggctggaacttagaaacggttgcctctgctgttcagtgaagtgaggaatgtgtttactgtgtacatggtttactagaaatgtttattgattatatttccagctttaattttcttgag

SEQ ID NO: 710318 - DNA, 120 bp, Artificial Sequence
  ENSG00000196873_44 (sequence is synthesized)
gtgtttcttgctgtcttttctatctgctctaatgttttggtccttttattgagtttttattgcttttgatgtcagggcttatttaatctctagtgcatgaaagtctcatatgtaaaaaat

SEQ ID NO: 710319 - DNA, 120 bp, Artificial Sequence
  ENSG00000196873_45 (sequence is synthesized)
gattattctgaatttaatctgtcattggtcatacttctaagtgttcaaccttataaaaaataaatgactatcaaaaaagaaaaaccttacattatgttctagtagttaagtttccaagga

SEQ ID NO: 710320 - DNA, 120 bp, Artificial Sequence
  ENSG00000196873_46 (sequence is synthesized)
cagtgatcactagtctaccatagaccctagaagagttacccaacacatagtagcactcaaatatttgttgaatgaattataaaaatgactacttgtattgttaattttgtgtattctagt

SEQ ID NO: 710321 - DNA, 120 bp, Artificial Sequence
  ENSG00000196873_47 (sequence is synthesized)
gaattaaatctcttcggcatcatttactcccttaggtatttgactttgtgtcaaatgttttggcaaggataaaattataacagactttcttgaacaaccaaaatgtaatctattaaggat

SEQ ID NO: 710322 - DNA, 120 bp, Artificial Sequence
  ENSG00000196873_48 (sequence is synthesized)
tttccttcacttttgataaaataagaaaaaaggaatttaaaaccttgcatcctaatgtaaaatagaattatatggtgtttaatatcagtgtccctttagctattatattaaactactata

SEQ ID NO: 710323 - DNA, 120 bp, Artificial Sequence
  ENSG00000196873_49 (sequence is synthesized)
cctttagctattatattaaactactatagttaataaattttatcattattttgtatgttggtttttaaaaatttcataaagctataaaaagatacttggtcagataaagtttcctctgct

SEQ ID NO: 710324 - DNA, 120 bp, Artificial Sequence
  ENSG00000196873_50 (sequence is synthesized)
caacaggcagccaggagctctgaggctcacagctggcagtctagttccactcagtctctacttgagaaattctttctttggaagtacagcagaggccttagagttgatctctctaatgta

SEQ ID NO: 710325 - DNA, 120 bp, Artificial Sequence
  ENSG00000196873_51 (sequence is synthesized)
gttgagaattttctttagtttttattgggttatgtatccttccagaatgggttctttgccacttgtatgccctattcatttcttcattttgtgttctttcttgctttttattccctgtat

SEQ ID NO: 710326 - DNA, 120 bp, Artificial Sequence
  ENSG00000196873_52 (sequence is synthesized)
gtgtgtatttctttttgtcaggctgtaatacatatgcatacaagtttcttcttgatatgggagaacttctatgtggtgctgatgggaaatatttttaatactccactctccttacccaag

SEQ ID NO: 710327 - DNA, 120 bp, Artificial Sequence; identical to SEQ ID NO: 587559
  ENSG00000196873_53 (sequence is synthesized)

SEQ ID NO: 710328 - DNA, 120 bp, Artificial Sequence
  ENSG00000196873_54 (sequence is synthesized)
cttgaagtaccaagtatttcactcttgggtctgcccaactgcttatgaataaaattcctttgccttgtatggggacatcattcgacctcagacctctcatttctctttgttctgagccct

SEQ ID NO: 710329 - DNA, 120 bp, Artificial Sequence
  ENSG00000196873_55 (sequence is synthesized)
agaatgtgacctgaccttctccttcccaaagcatggagatggttaaaactcactcttgaaatttttttgttgacttttccctctgttgcttattcattcctcggctctactttttgccat

SEQ ID NO: 710330 - DNA, 120 bp, Artificial Sequence
  ENSG00000196873_56 (sequence is synthesized)
attacttgatatttgggtatttaagtcatgaaaggtatttcttctaggaagcagtgattctaaagtgtatgcttaaccagtcagttgagtgtctactcttgtgtgttcacaagtgtgcac

SEQ ID NO: 710331 - DNA, 120 bp, Artificial Sequence
  ENSG00000196873_57 (sequence is synthesized)
tagaagtgagttaaattttcacattcctaaggatacttttgtctcgggttgttgaatacattttaaagtgtttataataatcacttcaaaatatttaggtaattaactgtaaattatgtt

SEQ ID NO: 710332 - DNA, 120 bp, Artificial Sequence
  ENSG00000196873_58 (sequence is synthesized)
ttggtattctccagggacaatggccttagagctattgagaatttgatgcaaaagaaggggaaatttgatgacatactgttagagaccactggattagcagaccctggtaagaagtgagat

SEQ ID NO: 710333 - DNA, 120 bp, Artificial Sequence
  ENSG00000196873_59 (sequence is synthesized)
agtgagattattaataaccagaatatagttctgtgatatattgtaaatagatgtattagaggaatatctaaaatgagtattaaagcttttgttagtattaaaccaaaaactttttttggt

SEQ ID NO: 710334 - DNA, 88 bp, Artificial Sequence
  ENSG00000196873_60 (sequence is synthesized)
tgtacctccattatatctaggaagtaactaactcgcttttgattttacaggcccataggtggaaggttggactgtggacttttgagtt

SEQ ID NO: 710335 - DNA, 120 bp, Artificial Sequence
  ENSG00000196873_61 (sequence is synthesized)
ggactgtggacttttgagttaacactgaaatgaattaatgctgaaatgaattaagactttgggagacggttgagaagccatgactcattttaaaatgtgagacatgcctttcaccttctg

SEQ ID NO: 710336 - DNA, 120 bp, Artificial Sequence
  ENSG00000196873_62 (sequence is synthesized)
cagccatgtggaactgtgaacacacagtgttcatcccctcaggaggacacagcttttgaggtaccatcttggaagcagagaccagccctcactagacacaaacttcctggcacgttgatt

SEQ ID NO: 710337 - DNA, 120 bp, Artificial Sequence
  ENSG00000196873_63 (sequence is synthesized)
acatgcagtgattgatttttcttacttcaagtggatgagtgagcaagtgactaaaatcttctgtgaattcttcagtaatctcactctggtttgagacagaatctcactctgtcccccaag

SEQ ID NO: 710338 - DNA, 120 bp, Artificial Sequence; identical to SEQ ID NO: 408649
  ENSG00000196873_64 (sequence is synthesized)

SEQ ID NO: 710339 - DNA, 120 bp, Artificial Sequence
  ENSG00000196873_65 (sequence is synthesized)
aagatctaagtgcatttaaaaagatttggatccaaaatgttgtttggaatgctcttaataagttagtttggcatatttgactagtacatttgcctgtcttcaaaactaagattacaaagc

SEQ ID NO: 710340 - DNA, 120 bp, Artificial Sequence
  ENSG00000196873_66 (sequence is synthesized)
catgataacactgtgtaagtgtttgcttaatgaggaagaaaagacttccaaacactcgagagggtaactcagtacagaaatctgaagtatattgaggaatcttaatttgaagtgtttaaa

SEQ ID NO: 710341 - DNA, 120 bp, Artificial Sequence; identical to SEQ ID NO: 587584
  ENSG00000196873_67 (sequence is synthesized)

SEQ ID NO: 710342 - DNA, 120 bp, Artificial Sequence; identical to SEQ ID NO: 587595
  ENSG00000196873_68 (sequence is synthesized)

SEQ ID NO: 710343 - DNA, 120 bp, Artificial Sequence
  ENSG00000196873_69 (sequence is synthesized)
tcaaaatatttgtcttttgtttttatattacttgaaggattacttggctcggtataaaatttatcagtcacacttttttccccctcaactttgtaaatgttgttccataatctcctagtg

SEQ ID NO: 710344 - DNA, 120 bp, Artificial Sequence
  ENSG00000196873_70 (sequence is synthesized)
tttgattggctggatttctttgtccaatgttttctccttttattaggaagaatttgtgagtattatagtctctgagtttcaatgcttgctgttttctttaatgcttgagaatgtctgtct

SEQ ID NO: 710345 - DNA, 120 bp, Artificial Sequence
  ENSG00000196873_71 (sequence is synthesized)
attgctttcgttcctgaaaaataacttgtttgggaacactttcattagaactttgtggtcactgttttattattttgggacatctagtgttactgtagaaaagtctgatttttctccctc

SEQ ID NO: 710346 - DNA, 120 bp, Artificial Sequence
  ENSG00000196873_72 (sequence is synthesized)
cctccttgaaggcacttttttttttttaatctaaaatgcctgagagttttcttctttatttttgaaattcagtaatataaacaaggtatatctaagtgtcacttataatcatttttccct

SEQ ID NO: 710347 - DNA, 120 bp, Artificial Sequence
  ENSG00000196873_73 (sequence is synthesized)
aaattataatatgcccttagttcttctaagaacattttccttgtttgttaccatgaatacttttttttggtcaaattattagatcctctacttcatgacaccagtttttttaatactgaa

SEQ ID NO: 710348 - DNA, 120 bp, Artificial Sequence
  ENSG00000196873_74 (sequence is synthesized)
ttttcttttgttcttcgtatgtattctaattgctttgatttgtcttttacctttgcatttactgtgatcatctgaagcctttctttttgtcaataattctgttttctccagtatctgtcc

SEQ ID NO: 710349 - DNA, 120 bp, Artificial Sequence
  ENSG00000196873_75 (sequence is synthesized)
tgtttttgatattttaaatgaattaattggttaagtcattgtgttatataggctctaagtttctttagcactacaaactgcattttcatcttattctgcttcttgcttttgagcttgttt

SEQ ID NO: 710350 - DNA, 120 bp, Artificial Sequence
  ENSG00000196873_76 (sequence is synthesized)
tccccctcccgtcctgtccccatcagtgttgaaatgtatgctacagttattatggttgtaatttgttatgccatgttgatcttcttgtgcttttcatatcagaacaatgtatttttaaca

SEQ ID NO: 710351 - DNA, 120 bp, Artificial Sequence; identical to SEQ ID NO: 330307
  ENSG00000196873_77 (sequence is synthesized)

SEQ ID NO: 710352 - DNA, 120 bp, Artificial Sequence; identical to SEQ ID NO: 408682
  ENSG00000196873_78 (sequence is synthesized)

SEQ ID NO: 710353 - DNA, 120 bp, Artificial Sequence; identical to SEQ ID NO: 408683
  ENSG00000196873_79 (sequence is synthesized)

SEQ ID NO: 710354 - DNA, 120 bp, Artificial Sequence; identical to SEQ ID NO: 330310
  ENSG00000196873_80 (sequence is synthesized)

SEQ ID NO: 710355 - DNA, 120 bp, Artificial Sequence
  ENSG00000196873_81 (sequence is synthesized)
tgattgcaacccatttctaaaacaaattatttaatataacaaaactcctttaacttctcaacttttcccactaaaactgtgaaacattatataaaatctttaatcaataggatatgatac

SEQ ID NO: 710356 - DNA, 120 bp, Artificial Sequence; identical to SEQ ID NO: 330317
  ENSG00000196873_82 (sequence is synthesized)

SEQ ID NO: 710357 - DNA, 120 bp, Artificial Sequence; identical to SEQ ID NO: 330318
  ENSG00000196873_83 (sequence is synthesized)

SEQ ID NO: 710358 - DNA, 120 bp, Artificial Sequence
  ENSG00000196873_84 (sequence is synthesized)
tatcagtaattaatccattaacattgatgctctatttctgcttttaagtttgaactgaggctgattaatgttcagtcaattctcctttgagcagggattggtgtcaatcaaagacaaatc

SEQ ID NO: 710359 - DNA, 120 bp, Artificial Sequence
  ENSG00000196873_85 (sequence is synthesized)
aagtgaaaaatatatttgaaagggatatcatgtgccacttaaacagattaaccattcaggtcctcttttaaaactaaataagcttgtggtcaatgtttcatctttgtcacattacaacgt

SEQ ID NO: 710360 - DNA, 120 bp, Artificial Sequence
  ENSG00000196873_86 (sequence is synthesized)
tcgtaaaagcttgttaggacttttgttcttcttcaattttagaaaagtggttaatccaaggaccaatgtgactttgatgtactgacctggaaagttaaagatggaatcactcaattacta

SEQ ID NO: 710361 - DNA, 120 bp, Artificial Sequence
  ENSG00000196873_87 (sequence is synthesized)
ttctttttgtaaatttttaaacaccataaagcatttaatgaactggaattgataggtgaactgtgtcattttaataagcataatgtaatcacgtcatattttgttttgtttgcaggcaga

SEQ ID NO: 710362 - DNA, 120 bp, Artificial Sequence; identical to SEQ ID NO: 587585
  ENSG00000196873_88 (sequence is synthesized)

SEQ ID NO: 710363 - DNA, 120 bp, Artificial Sequence
  ENSG00000196873_89 (sequence is synthesized)
gtttcaaattccattgtagagagtctctgataatctcacttataccatgagccattcctcagtatctgtcctcttcctgttagtgttctacaattcctttctccttaatttttctccgct

SEQ ID NO: 710364 - DNA, 120 bp, Artificial Sequence
  ENSG00000196873_90 (sequence is synthesized)
ttacaaaatgtcacacagacaagtgcatgatacttaaacaagcttttaaaaataatgctcataaatagctttggttctgtcataatattcgtatttataaacattttaagtcaattctct

SEQ ID NO: 710365 - DNA, 120 bp, Artificial Sequence
  ENSG00000196873_91 (sequence is synthesized)
tcttttattttcatttcagaaatatccatgtcctgaataaaagttgtgtcttgattagtttattatgtaacaatttagtgtgtttgacatttctaacttttatttctaacatttgcttta

SEQ ID NO: 710366 - DNA, 120 bp, Artificial Sequence
  ENSG00000196873_92 (sequence is synthesized)
aattcttactattgggtcctgaatcttatattaaatattctctcaaattccttgaggcatagcaacttgagcttaccagtttagaaactggagatttgggctgggcacggtggctcacgc

SEQ ID NO: 710367 - DNA, 120 bp, Artificial Sequence
  ENSG00000196876_0 (sequence is synthesized)
cccgccgcatcctcggcgcctttgcagtccggccgcgcctcccgggccccgcgttagggccgccgctgcctccctcgccgccgccgctgccagctgacctgtcctggacgcagcataact

SEQ ID NO: 710368 - DNA, 120 bp, Artificial Sequence
  ENSG00000196876_1 (sequence is synthesized)
cgctgccagctgacctgtcctggacgcagcataactaacgaagctgctgcaggatgagaagatggcagcgcggctgcttgcaccaccaggccctgatagtttcaagcctttcacccctga

SEQ ID NO: 710369 - DNA, 120 bp, Artificial Sequence
  ENSG00000196876_2 (sequence is synthesized)
gtcactggcaaacattgagaggcgcattgctgagagcaagctcaagaaaccaccaaaggccgatggcagtcatcgggaggacgatgaggacagcaagcccaagccaaacagcgacctgga

SEQ ID NO: 710370 - DNA, 120 bp, Artificial Sequence
  ENSG00000196876_3 (sequence is synthesized)
agcagggaagagtttgcctttcatctacggggacatcccccaaggcctggttgcagttcccctggaggactttgacccatactatttgacgcagaaaacctttgtagtattaaacagagg

SEQ ID NO: 710371 - DNA, 120 bp, Artificial Sequence
  ENSG00000196876_4 (sequence is synthesized)
gaaaactctcttcagatttagtgccacgcctgccttgtacattttaagtccttttaacctgataagaagaatagctattaaaattttgatacattcagtatttagcatgatcattatgtg

SEQ ID NO: 710372 - DNA, 120 bp, Artificial Sequence
  ENSG00000196876_5 (sequence is synthesized)
cactattttgaccaactgtgtattcatgacttttagtaaccctcctgactggtcgaagaatgtggagtacacgttcacagggatttatacatttgaatcactagtgaaaatcattgcaag

SEQ ID NO: 710373 - DNA, 120 bp, Artificial Sequence
  ENSG00000196876_6 (sequence is synthesized)
aggtttctgcatagatggctttacctttttacgggacccatggaactggttagatttcagtgtcatcatgatggcgtatataacagagtttgtaaacctaggcaatgtttcagctctacg

SEQ ID NO: 710374 - DNA, 120 bp, Artificial Sequence
  ENSG00000196876_7 (sequence is synthesized)
cactttcagggtactgagggctttgaaaactatttcggtaatcccaggcctgaagacaattgtgggtgccctgattcagtctgtgaagaaactgtcagatgtgatgatcctgacagtgtt

SEQ ID NO: 710375 - DNA, 120 bp, Artificial Sequence
  ENSG00000196876_8 (sequence is synthesized)
ctgcctgagtgtttttgccttgatcggactgcagctgttcatggggaaccttcgaaacaagtgtgttgtgtggcccataaacttcaacgagagctatcttgaaaatggcaccaaaggctt

SEQ ID NO: 710376 - DNA, 120 bp, Artificial Sequence
  ENSG00000196876_9 (sequence is synthesized)
tgattgggaagagtatatcaacaataaaacaaatttctacacagttcctggcatgctggaacctttactctgtgggaacagttctgatgctgggcaatgcccagagggataccagtgtat

SEQ ID NO: 710377 - DNA, 120 bp, Artificial Sequence
  ENSG00000196876_10 (sequence is synthesized)
gaaagcaggaaggaaccccaactatggttacacaagttttgacacttttagctgggccttcttggcattatttcgccttatgacccaggactattgggaaaacttgtatcaattgacttt

SEQ ID NO: 710378 - DNA, 120 bp, Artificial Sequence
  ENSG00000196876_11 (sequence is synthesized)
acgagcagccgggaaaacatacatgatcttcttcgtcttggtcatctttgtgggttctttctatctggtgaacttgatcttggctgtggtggccatggcttatgaagaacagaatcaggc

SEQ ID NO: 710379 - DNA, 120 bp, Artificial Sequence
  ENSG00000196876_12 (sequence is synthesized)
aacactggaggaggcagaacaaaaagaggctgaatttaaagcaatgttggagcaacttaagaagcaacaggaagaggcacaggctgctgcgatggccacttcagcaggaactgtctcaga

SEQ ID NO: 710380 - DNA, 120 bp, Artificial Sequence
  ENSG00000196876_13 (sequence is synthesized)
agatgccatagaggaagaaggtgaagaaggagggggctcccctcggagctcttctgaaatctctaaactcagctcaaagagtgcaaaggaaagacgtaacaggagaaagaagaggaagca

SEQ ID NO: 710381 - DNA, 120 bp, Artificial Sequence
  ENSG00000196876_14 (sequence is synthesized)
aaaggaactctctgaaggagaggagaaaggggatcccgagaaggtgtttaagtcagagtcagaagatggcatgagaaggaaggcctttcggctgccagacaacagaatagggaggaaatt

SEQ ID NO: 710382 - DNA, 120 bp, Artificial Sequence
  ENSG00000196876_15 (sequence is synthesized)
ttccatcatgaatcagtcactgctcagcatcccaggctcgcccttcctctcccgccacaacagcaagagcagcatcttcagtttcaggggacctgggcggttccgagacccgggctccga

SEQ ID NO: 710383 - DNA, 120 bp, Artificial Sequence
  ENSG00000196876_16 (sequence is synthesized)
gaatgagttcgcggatgacgagcacagcacggtggaggagagcgagggccgccgggactccctcttcatccccatccgggcccgcgagcgccggagcagctacagcggctacagcggcta

SEQ ID NO: 710384 - DNA, 120 bp, Artificial Sequence
  ENSG00000196876_17 (sequence is synthesized)
cagccagggcagccgctcctcgcgcatcttccccagcctgcggcgcagcgtgaagcgcaacagcacggtggactgcaacggcgtggtgtccctcatcggcggccccggctcccacatcgg

SEQ ID NO: 710385 - DNA, 120 bp, Artificial Sequence
  ENSG00000196876_18 (sequence is synthesized)
cgggcgtctcctgccagaggctacaactgaggtggaaattaagaagaaaggccctggatctcttttagtttccatggaccaattagcctcctacgggcggaaggacagaatcaacagtat

SEQ ID NO: 710386 - DNA, 120 bp, Artificial Sequence
  ENSG00000196876_19 (sequence is synthesized)
aatgagtgttgttacaaatacactagtagaagaactggaagagtctcagagaaagtgcccgccatgctggtataaatttgccaacactttcctcatctgggagtgccacccctactggat

SEQ ID NO: 710387 - DNA, 120 bp, Artificial Sequence
  ENSG00000196876_20 (sequence is synthesized)
aaaactgaaagagattgtgaacttgatagttatggacccttttgtggatttagccatcaccatctgcatcgtcctgaatacactgtttatggcaatggagcaccatcctatgacaccaca

SEQ ID NO: 710388 - DNA, 120 bp, Artificial Sequence
  ENSG00000196876_21 (sequence is synthesized)
atttgaacatgtcttggctgtaggaaatctggttttcactggaattttcacagcggaaatgttcctgaagctcatagccatggatccctactattatttccaagaaggttggaacatttt

SEQ ID NO: 710389 - DNA, 120 bp, Artificial Sequence
  ENSG00000196876_22 (sequence is synthesized)
tgacggatttattgtctccctcagtttaatggaactgagtctagcagacgtggaggggctttcagtgctgcgatctttccgattgctccgagtcttcaaattggccaaatcctggcccac

SEQ ID NO: 710390 - DNA, 120 bp, Artificial Sequence
  ENSG00000196876_23 (sequence is synthesized)
cctgaacatgctaatcaagattattggaaattcagtgggtgccctgggcaacctgacactggtgctggccattattgtcttcatctttgccgtggtggggatgcaactctttggaaaaag

SEQ ID NO: 710391 - DNA, 120 bp, Artificial Sequence
  ENSG00000196876_24 (sequence is synthesized)
ctacaaagagtgtgtctgcaagatcaaccaggactgtgaactccctcgctggcatatgcatgactttttccattccttcctcattgtctttcgagtgttgtgcggggagtggattgagac

SEQ ID NO: 710392 - DNA, 120 bp, Artificial Sequence
  ENSG00000196876_25 (sequence is synthesized)
catgtgggactgcatggaagtggcaggccaggccatgtgcctcattgtctttatgatggtcatggtgattggcaacttggtggtgctgaacctgtttctggccttgctcctgagctcctt

SEQ ID NO: 710393 - DNA, 120 bp, Artificial Sequence
  ENSG00000196876_26 (sequence is synthesized)
cagtgcagacaacctggctgccacagatgacgatggggaaatgaacaacctccagatctcagtgatccgtatcaagaagggtgtggcctggaccaaactaaaggtgcacgccttcatgca

SEQ ID NO: 710394 - DNA, 120 bp, Artificial Sequence
  ENSG00000196876_27 (sequence is synthesized)
ggcccactttaagcagcgtgaggctgatgaggtgaagcctctggatgagttgtatgaaaagaaggccaactgtatcgccaatcacaccggtgcagacatccaccggaatggtgacttcca

SEQ ID NO: 710395 - DNA, 120 bp, Artificial Sequence
  ENSG00000196876_28 (sequence is synthesized)
gaagaatggcaatggcacaaccagcggcattggcagcagcgtggagaagtacatcattgatgaggaccacatgtccttcatcaacaaccccaacttgactgtacgggtacccattgctgt

SEQ ID NO: 710396 - DNA, 120 bp, Artificial Sequence
  ENSG00000196876_29 (sequence is synthesized)
gggcgagtctgactttgagaacctcaacacagaggatgttagcagcgagtcggatcctgaaggcagcaaagataaactagatgacaccagctcctctgaaggaagcaccattgatatcaa

SEQ ID NO: 710397 - DNA, 120 bp, Artificial Sequence
  ENSG00000196876_30 (sequence is synthesized)
accagaagtagaagaggtccctgtggaacagcctgaggaatacttggatccagatgcctgcttcacagaaggttgtgtccagcggttcaagtgctgccaggtcaacatcgaggaagggct

SEQ ID NO: 710398 - DNA, 120 bp, Artificial Sequence
  ENSG00000196876_31 (sequence is synthesized)
aggcaagtcttggtggatcctgcggaaaacctgcttcctcatcgtggagcacaactggtttgagaccttcatcatcttcatgattctgctgagcagtggcgccctggccttcgaggacat

SEQ ID NO: 710399 - DNA, 120 bp, Artificial Sequence
  ENSG00000196876_32 (sequence is synthesized)
ctacattgagcagagaaagaccatccgcaccatcctggaatatgctgacaaagtcttcacctatatcttcatcctggagatgttgctcaagtggacagcctatggcttcgtcaagttctt

SEQ ID NO: 710400 - DNA, 120 bp, Artificial Sequence
  ENSG00000196876_33 (sequence is synthesized)
caccaatgcctggtgttggctggacttcctcattgtggctgtctctttagtcagccttatagctaatgccctgggctactcggaactaggtgccataaagtcccttaggaccctaagagc

SEQ ID NO: 710401 - DNA, 120 bp, Artificial Sequence
  ENSG00000196876_34 (sequence is synthesized)
tttgagacccttaagagccttatcacgatttgaagggatgagggtggtggtgaatgccttggtgggcgccatcccctccatcatgaatgtgctgctggtgtgtctcatcttctggctgat

SEQ ID NO: 710402 - DNA, 120 bp, Artificial Sequence
  ENSG00000196876_35 (sequence is synthesized)
tttcagcatcatgggagttaacttgtttgcgggaaagtaccactactgctttaatgagacttctgaaatccgatttgaaattgaagatgtcaacaataaaactgaatgtgaaaagcttat

SEQ ID NO: 710403 - DNA, 120 bp, Artificial Sequence
  ENSG00000196876_36 (sequence is synthesized)
ggaggggaacaatacagagatcagatggaagaacgtgaagatcaactttgacaatgttggggcaggatacctggcccttcttcaagtagcaaccttcaaaggctggatggacatcatgta

SEQ ID NO: 710404 - DNA, 120 bp, Artificial Sequence
  ENSG00000196876_37 (sequence is synthesized)
tgcagctgtagattcccggaagcctgatgagcagcctaagtatgaggacaatatctacatgtacatctattttgtcatcttcatcatcttcggctccttcttcaccctgaacctgttcat

SEQ ID NO: 710405 - DNA, 120 bp, Artificial Sequence
  ENSG00000196876_38 (sequence is synthesized)
tggtgtcatcattgataacttcaatcaacaaaagaaaaagttcggaggtcaggacatcttcatgaccgaagaacagaagaagtactacaatgccatgaaaaagctgggctcaaagaagcc

SEQ ID NO: 710406 - DNA, 120 bp, Artificial Sequence
  ENSG00000196876_39 (sequence is synthesized)
acagaaacctattccccgccccttgaacaaaatccaaggaatcgtctttgattttgtcactcagcaagcctttgacattgttatcatgatgctcatctgccttaacatggtgacaatgat

SEQ ID NO: 710407 - DNA, 120 bp, Artificial Sequence
  ENSG00000196876_40 (sequence is synthesized)
ggtggagacagacactcaaagcaagcagatggagaacatcctctactggattaacctggtgtttgttatcttcttcacctgtgagtgtgtgctcaaaatgtttgcgttgaggcactacta

SEQ ID NO: 710408 - DNA, 120 bp, Artificial Sequence
  ENSG00000196876_41 (sequence is synthesized)
cttcaccattggctggaacatcttcgacttcgtggtagtcatcctctccattgtgggaatgttcctggcagatataattgagaaatactttgtttccccaaccctattccgagtcatccg

SEQ ID NO: 710409 - DNA, 120 bp, Artificial Sequence
  ENSG00000196876_42 (sequence is synthesized)
attggcccgtattgggcgcatcttgcgtctgatcaaaggcgccaaagggattcgtaccctgctctttgccttaatgatgtccttgcctgccctgttcaacatcggccttctgctcttcct

SEQ ID NO: 710410 - DNA, 120 bp, Artificial Sequence
  ENSG00000196876_43 (sequence is synthesized)
ggtcatgttcatcttctccatttttgggatgtccaattttgcatatgtgaagcacgaggctggtatcgatgacatgttcaactttgagacatttggcaacagcatgatctgcctgtttca

SEQ ID NO: 710411 - DNA, 120 bp, Artificial Sequence
  ENSG00000196876_44 (sequence is synthesized)
aatcacaacctcagctggttgggatggcctgctgctgcccatcctaaaccgcccccctgactgcagcctagataaggaacacccagggagtggctttaagggagattgtgggaacccctc

SEQ ID NO: 710412 - DNA, 120 bp, Artificial Sequence
  ENSG00000196876_45 (sequence is synthesized)
agtgggcatcttcttctttgtaagctacatcatcatctctttcctaattgtcgtgaacatgtacattgccatcatcctggagaacttcagtgtagccacagaggaaagtgcagaccctct

SEQ ID NO: 710413 - DNA, 120 bp, Artificial Sequence
  ENSG00000196876_46 (sequence is synthesized)
gagtgaggatgactttgagaccttctatgagatctgggagaagttcgaccccgatgccacccagttcattgagtactgtaagctggcagactttgcagatgccttggagcatcctctccg

SEQ ID NO: 710414 - DNA, 120 bp, Artificial Sequence
  ENSG00000196876_47 (sequence is synthesized)
agtgcccaagcccaataccattgagctcatcgctatggatctgccaatggtgagcggggatcgcatccactgcttggacatcctttttgccttcaccaagcgggtcctgggagatagcgg

SEQ ID NO: 710415 - DNA, 120 bp, Artificial Sequence
  ENSG00000196876_48 (sequence is synthesized)
cgtggcatccaatccttccaaagtgtcttacgagccaatcacaaccacactgcgtcgcaagcaggaggaggtatctgcagtggtcctgcagcgtgcctaccggggacatttggcaaggcg

SEQ ID NO: 710416 - DNA, 120 bp, Artificial Sequence
  ENSG00000196876_49 (sequence is synthesized)
gggcttcatctgcaaaaagacaacttctaataagctggagaatggaggcacacaccgggagaaaaaagagagcaccccatctacagcctccctcccgtcctatgacagtgtaactaaacc

SEQ ID NO: 710417 - DNA, 120 bp, Artificial Sequence
  ENSG00000196876_50 (sequence is synthesized)
tgaaaaggagaaacagcagcgggcagaggaaggaagaagggaaagagccaaaagacaaaaagaggtcagagaatccaagtgttagaggagaacaaaaattcagtattatacagatctaaa

SEQ ID NO: 710418 - DNA, 120 bp, Artificial Sequence
  ENSG00000196876_51 (sequence is synthesized)
actcgcaagtgaaagattgtttacaaacttcctgaatattatcaatgcagaacagctgtggagactctaacctgaagatctataccaaacgtcgtctgcttaccacgtaacacagctgca

SEQ ID NO: 710419 - DNA, 120 bp, Artificial Sequence
  ENSG00000196876_52 (sequence is synthesized)
tcttgagcagtgacctgccaagggcaaaggaccccgctccctagacttacagattttctaatgcttgggcaggtggttactgcatgttccacatcagtcaatgcaacttaggacaaaact

SEQ ID NO: 710420 - DNA, 120 bp, Artificial Sequence
  ENSG00000196876_53 (sequence is synthesized)
aaccagatacagaaacagaagagaggctgccgggaccagcatatttccgttgcagccaaatggattttattttttcattttattgattctcagaagcagaaagcatcactttaaaagttc

SEQ ID NO: 710421 - DNA, 120 bp, Artificial Sequence
  ENSG00000196876_54 (sequence is synthesized)
gtttgttcatgcaaactatatttgcattcttacattagttaagctaagcagcaaaaagaaaacacacacacacactcacatttagcccatgtcatttaattgtcagtttctttgacataa

SEQ ID NO: 710422 - DNA, 120 bp, Artificial Sequence
  ENSG00000196876_55 (sequence is synthesized)
agcgcatcttctccacatgggcttcacgtggtttggagatgggtgggggaaaacaatcaggtttcttcaggctgaggaggacttgctcaggccgattccaaacattgtgctcgttcaatg

SEQ ID NO: 710423 - DNA, 120 bp, Artificial Sequence
  ENSG00000196876_56 (sequence is synthesized)
cgtagaaatgatttgcatgatggcatgccgtgatcagaagtcatgcatgagatccatacaccacaggacactactaatctagtcccttgcactgggtcagcctttggacaggacccagcc

SEQ ID NO: 710424 - DNA, 120 bp, Artificial Sequence
  ENSG00000196876_57 (sequence is synthesized)
ctgcaccgttcactgtatttggagaaaatggtaagagttccataccggctacaattctttgagttcttaaaagtccttcatacaccttctgggtagggaaacaaccaactaattgactaa

SEQ ID NO: 710425 - DNA, 120 bp, Artificial Sequence
  ENSG00000196876_58 (sequence is synthesized)
caccaccaacaacaaaaaacaaacccaatccaacaagcagatggatccgttgcgtgtatatgtttaacagacatctctaacatacagccattgttgcacattttgcaagatgaactattt

SEQ ID NO: 710426 - DNA, 120 bp, Artificial Sequence
  ENSG00000196876_59 (sequence is synthesized)
aatgctgctctgtgtccagtacatgggggagactttgatcccaaatggcttgtactatttatgtcactgtaaaaccaaatcctagggctaaaaaaaaaattcatttgtatcttgcaatat

SEQ ID NO: 710427 - DNA, 120 bp, Artificial Sequence
  ENSG00000196876_60 (sequence is synthesized)
ttatgacgatcgtttagccttcatactggagaattgacacttatttggggtagagataaaagtgcttttcaaagtagcaccagttatctctaggggtaatttggggaacttaaaatgacc

SEQ ID NO: 710428 - DNA, 120 bp, Artificial Sequence
  ENSG00000196876_61 (sequence is synthesized)
tttcattgggagttatggggtgctcatttcatttcgtatcatgtcctctgcattgtggctttctccaggcatgggtcgataccgcgaggggttcagatattctgaactgacctctctctt

SEQ ID NO: 710429 - DNA, 120 bp, Artificial Sequence
  ENSG00000196876_62 (sequence is synthesized)
ctgcagaggggtcatcgcatactcacacactgcatggctccccctgcctccatcacatttctccactgagcagggcttcccttgcccacagaggtgggtgagggtagcagcattggggtt

SEQ ID NO: 710430 - DNA, 120 bp, Artificial Sequence
  ENSG00000196876_63 (sequence is synthesized)
acggctgtggtttctttcacttattattagaataatagtcactggtgagacctgaggtagagatggagccgcctctgaaccaagcccacttggtttctttactgcactggttttcatgag

SEQ ID NO: 710431 - DNA, 120 bp, Artificial Sequence
  ENSG00000196876_64 (sequence is synthesized)
aaagcaatttaatattaattctttaggatgttccagcttccctcagtgcattcccttgcagccagttttgctatctgcttagcgacctgcccattgtcattgaagtgtggcttctggggg

SEQ ID NO: 710432 - DNA, 120 bp, Artificial Sequence
  ENSG00000196876_65 (sequence is synthesized)
agcgtcatatcttccattccatctcctgctttaggaaagacagtttttagtccaggggtttctcacctaatgactggatttcaaagccaagatgctgcagttgaatgtgtcaggaagtct

SEQ ID NO: 710433 - DNA, 120 bp, Artificial Sequence
  ENSG00000196876_66 (sequence is synthesized)
ctatacaaagagtgaaaagagactttagcatgtgaaccaaatccaaataaattcttcctgaaccatacactagagggggaagaagaaccaacccataatcagacacaccgatctgccttg

SEQ ID NO: 710434 - DNA, 120 bp, Artificial Sequence
  ENSG00000196876_67 (sequence is synthesized)
cagtagaagcactttgaaggtaatttcacagtccaccagactagttttgcatagaacaaaccacagtaagtcggcaagcagagctttctatcttgttggaccactagaaactgtccagct

SEQ ID NO: 710435 - DNA, 120 bp, Artificial Sequence
  ENSG00000196876_68 (sequence is synthesized)
ctcttaagcctgcttctgcagcagcatccgtagaatttttgtactacacccaataccagactgggaaggcctatctttcagtgaccctgctaactgctaggatgaatgtatagtaacatg

SEQ ID NO: 710436 - DNA, 120 bp, Artificial Sequence
  ENSG00000196876_69 (sequence is synthesized)
tacaggctacattgtaaacagcacaaaacagaagctgacatgtgtggttattctttttaagagaattataaatactgtaatatataattttattttattggcatgcctttttgtaaatac

SEQ ID NO: 710437 - DNA, 120 bp, Artificial Sequence
  ENSG00000196876_70 (sequence is synthesized)
aaattattaacttattaaataggaaatggcttctggcttatgccattgtcatgtttatttttattttttatacttttctttcttcttagaacttagatgctgtcagccaatgtacatccc

SEQ ID NO: 710438 - DNA, 120 bp, Artificial Sequence
  ENSG00000196876_71 (sequence is synthesized)
caaaccagacagacagacaaaaaattttttattgctaatggtcttttccaaaacaacaaaaaatatatatttttgttccaatgtgcaataaattctaaccacgtctatgcaagatttggc

SEQ ID NO: 710439 - DNA, 120 bp, Artificial Sequence
  ENSG00000196876_72 (sequence is synthesized)
taaacttaataattgttcttaggtcttgagatgggcaacagagctgtaagatcccgccaagtacaccatgtgctcatgctagtgatgtcattaagctactagggcatagtgatgagattt

SEQ ID NO: 710440 - DNA, 120 bp, Artificial Sequence
  ENSG00000196876_73 (sequence is synthesized)
ttctgagatctaaccgtttccctccgctagctcctgaccccagcccagcaggctgtctcctcagtaacacatgggccttggtatctggcacccatcagccagcctcataggaaagaagcc

SEQ ID NO: 710441 - DNA, 120 bp, Artificial Sequence
  ENSG00000196876_74 (sequence is synthesized)
acctccgctgtatttgaagtttcactttttaaaaaaaaaatgtttcccacctttttatccttcacccactgtccttccacctgctcactcactcactctctcacccatcctgctccacac

SEQ ID NO: 710442 - DNA, 120 bp, Artificial Sequence
  ENSG00000196876_75 (sequence is synthesized)
ttctttggtagtaaatgacaccatcaccagcagtttacacccgcagttaacaggcatcgaactgaaagaatcagtgatgacgtttttgtgcatcttcgctgagtgggtaagtggcaatgc

SEQ ID NO: 710443 - DNA, 120 bp, Artificial Sequence
  ENSG00000196876_76 (sequence is synthesized)
tttgccaaatattaacgaagccaatcaaagagcagcgcagccacagtatcactgcacatatatatatagatatataaatataatataaatatttattttttgtagccaggtccttggtgc

SEQ ID NO: 710444 - DNA, 120 bp, Artificial Sequence
  ENSG00000196876_77 (sequence is synthesized)
agtatttatactccacaatccaccttttaaaaaaaggacaaaaagcaaaaagatgtgtgatgctgttaataatttaaaatgcagagccaaagccactgagcagcagctgacatggttgct

SEQ ID NO: 710445 - DNA, 120 bp, Artificial Sequence
  ENSG00000196876_78 (sequence is synthesized)
ggtttgtgtgtgaaaaacattttccccctcttctttccttaacctccttgttgcttaggatgaggagactctgtaatttaaagcagaggacgagaggaggaagaaacttccatgttaaca

SEQ ID NO: 710446 - DNA, 120 bp, Artificial Sequence
  ENSG00000196876_79 (sequence is synthesized)
tggcctactctcactcctttctaaacgagccacttttggcgtcagaagttgactggagagagataaacaaactcccagtcaaagcccctaaagcgacagtgcccagagttcttttatttt

SEQ ID NO: 710447 - DNA, 120 bp, Artificial Sequence
  ENSG00000196876_80 (sequence is synthesized)
ttgctgcaaccaacgtaaacctgtaaaagaccaacagtgaagattagtgtattagtgaatgcatggaggccaatgctgccctaatgagacgtgataaaaagtccatcactcctctaagcc

SEQ ID NO: 710448 - DNA, 120 bp, Artificial Sequence
  ENSG00000196876_81 (sequence is synthesized)
aaaaggaaacaaaataaaaatgaccctttttactgtacaagggaagcctgtcttggtgtgtttgttgcttgactatcccaattcttgagtcctgggaggggtctgggaattgggacctta

SEQ ID NO: 710449 - DNA, 120 bp, Artificial Sequence
  ENSG00000196876_82 (sequence is synthesized)
gcacatttggggaaaggaggggaatagagggaagagaaatcaaaggggctctcgcaaagttctggctaagaaggagagattggaagaaaagcaaggtcctgaccccccccagatccccac

SEQ ID NO: 710450 - DNA, 120 bp, Artificial Sequence
  ENSG00000196876_83 (sequence is synthesized)
tcacccattgcatgtggcattccccactactggccggtgcttagaggcccataaaacctctcttcacctaatccacctggcagagccctcagagatgacgtcagccaacccagctggact

SEQ ID NO: 710451 - DNA, 120 bp, Artificial Sequence
  ENSG00000196876_84 (sequence is synthesized)
ggccttacttctgcctttttcacctgtatgttaaaaaacaaaaacaaaaaaaccctatccctgtgccccaaagctagggcatgtgcgatgcccaacagcctccactctgcaagctcatac

SEQ ID NO: 710452 - DNA, 120 bp, Artificial Sequence
  ENSG00000196876_85 (sequence is synthesized)
tgggccctgccctccatcgccccagacaggcccacagacgagggctggtctccttcacatttgtgtgggggtgggggcacgcttcctcttccttctctccctgtccccctttggggacat

SEQ ID NO: 710453 - DNA, 120 bp, Artificial Sequence
  ENSG00000196876_86 (sequence is synthesized)
ccctctctaggcctaggccatgtctcctggttcaggaacactctctcaggaggatctcgaagtgcccactctagtccgctccagtagctccactctggagcgagatggctggtaggtcag

SEQ ID NO: 710454 - DNA, 120 bp, Artificial Sequence
  ENSG00000196876_87 (sequence is synthesized)
tccccatcctcctcccctcggcccccagcctccaggcctgctgtggaggtgagatcgccatgggtcatgactttgtgacttgagtcctgggcatcttctgtaatgatgcctctttctttt

SEQ ID NO: 710455 - DNA, 120 bp, Artificial Sequence
  ENSG00000196876_88 (sequence is synthesized)
ctcagatgttgcccacagtttagcaaaaagcttcgttcattttcaggtactccccaccccctaaagaattggctgcaacttgccagccagggggacatcaggagagaagaggaagtctgg

SEQ ID NO: 710456 - DNA, 120 bp, Artificial Sequence
  ENSG00000196876_89 (sequence is synthesized)
gttgggaggggcccaagttttgcaacagagtttccattgttcagctctgtgctttcttggattccctttccaagattaccaagatttcctccattaaaactcctgaggcaccccctgccc

SEQ ID NO: 710457 - DNA, 120 bp, Artificial Sequence
  ENSG00000196876_90 (sequence is synthesized)
ctgccccccactgctgtttgctgtacatagaggctaagtggggtggggtgggtgggtgtgcacatgtggtgtgtgtgtgtgtgtgtgaagaatgtatataggtaaaggggagtgtggtcc

SEQ ID NO: 710458 - DNA, 120 bp, Artificial Sequence
  ENSG00000196876_91 (sequence is synthesized)
agtggttccagaaaagggacagaactgtgttctgtccctagcttgaccgctggctcgctgtgtggccttgggcaagtcacttaacctctctgtgcctcagtttccccatctgtaaaatgg

SEQ ID NO: 710459 - DNA, 120 bp, Artificial Sequence
  ENSG00000196876_92 (sequence is synthesized)
ggataataatactgacctacctcacaggggtgttgtgaggctttaactaaatgttttgtaaagcgttttgagatacagaggcaaaggcgctagggaagggcaaagtattattggacttaa

SEQ ID NO: 710460 - DNA, 120 bp, Artificial Sequence
  ENSG00000196876_93 (sequence is synthesized)
ggaagctgaaatggtaccataaatgctgctattctgagagccattttaaactgcactgctccaaccacccccgcttctcatcaccaggacagcaggtcgagaaaatgtctttcctttcac

SEQ ID NO: 710461 - DNA, 120 bp, Artificial Sequence
  ENSG00000196876_94 (sequence is synthesized)
ttgcttctggggtttgtgattattcaagacaattttttccccttgctgtatctccttccctcacctcctcgacttgttccctgttctgtttatgcggaaatggcagaaatgcttgagaaa

SEQ ID NO: 710462 - DNA, 120 bp, Artificial Sequence
  ENSG00000196876_95 (sequence is synthesized)
tgagaatgtgtaagtggattggaagtttatagtatgaaatttcaattttactttgtactgtacatctttttactttagaatttgcaataaagggttacgtcaatcttgttttcaactctc

SEQ ID NO: 710463 - DNA, 120 bp, Artificial Sequence
  ENSG00000196876_96 (sequence is synthesized)
gatttcagtgtcatcatgatggcatatgtgacagagtttgtggacctgggcaatgtctcagcgctgagaacattcagggttctccgagctttgaaaactatctctgtaattccaggcctg

SEQ ID NO: 710464 - DNA, 120 bp, Artificial Sequence
  ENSG00000196876_97 (sequence is synthesized)
tgtaaggaagaacacaaatagatcgaggctaggcatggcagtctcccccgctccttcccctcctctttccctgctctgcccatcccacttggtctgtctggaccccactcctgttaacac

SEQ ID NO: 710465 - DNA, 120 bp, Artificial Sequence
  ENSG00000196876_98 (sequence is synthesized)
cccagccatttctgtgttcttcctggcctatttctatttctctcttcagttttccccctattactcaccctgtcttctcctttcctttattctttgctccattttccccatcttccctcc

SEQ ID NO: 710466 - DNA, 120 bp, Artificial Sequence
  ENSG00000196876_99 (sequence is synthesized)
ttgtttctgacattccttctcccctatcaactccttcctttattttaccgttttctttctctccatctttatctttgctagtctgtgtgcttgtgtttccctcctcccacctgctttgac

SEQ ID NO: 710467 - DNA, 120 bp, Artificial Sequence
  ENSG00000196876_100 (sequence is synthesized)
tgaatgcctctggccccggagcctgcccggatggaatgagaatgccatggagccaccaccaatgaccaagtctgaaccggtttggaactaccattgcttctcttcccccacgtcttctac

SEQ ID NO: 710468 - DNA, 120 bp, Artificial Sequence
  ENSG00000196876_101 (sequence is synthesized)
cctcctagggaaacagcttggaatttagagatcttatcctttaaatttcaaaaaagtaattgagttttgaataatgttctaagtctcctctgcaagaatgagatgtgctttttctaaaga

SEQ ID NO: 710469 - DNA, 120 bp, Artificial Sequence
  ENSG00000196876_102 (sequence is synthesized)
ggaatgctcatgtgatgtcagggtgggaggtgtgtgccagcagagccaggcaaggagaagttaaagaggccaataggaaactggacccagacttttaaaagggattgaaattgaaataaa

SEQ ID NO: 710470 - DNA, 120 bp, Artificial Sequence
  ENSG00000196876_103 (sequence is synthesized)
tcaaaggaggaaaaagtgggaggttggggcaagaacacattttatatgggggaggaaggaaaggggaagcaaaagatgaattttaaatgtaatcaaatgtcaggctctggaggagttgca

SEQ ID NO: 710471 - DNA, 120 bp, Artificial Sequence
  ENSG00000196876_104 (sequence is synthesized)
tataatagcttcacaaaatcagttatctagaggtttggataatggtgcccctctttgggaagagccatctcctaacatttctttaaattctaagctgtttgtatcttttttattttaaaa

SEQ ID NO: 710472 - DNA, 120 bp, Artificial Sequence
  ENSG00000196876_105 (sequence is synthesized)
ttcttataaccttagtgatcctaatccttcatacctctaatttctaactttcctcagtccctcttcagctggtataaactccttgagatagcatgttagtctatttctttctaacacttc

SEQ ID NO: 710473 - DNA, 120 bp, Artificial Sequence
  ENSG00000196876_106 (sequence is synthesized)
agtttcttctaacacagcatgaagatagccaatcctttaattagcatgatgcatgtatggaggaaaactggacaatcatggataaagtttattgaatgtatagataaaatatcaaaaggc

SEQ ID NO: 710474 - DNA, 120 bp, Artificial Sequence
  ENSG00000196876_107 (sequence is synthesized)
ttgttttgttgtggttttgttttttcctttggtgtttgtgtttgtgtctgtgtttgtcacttgtgtctgtgtgtgacctcccttactacagatatgtgacagagtttgtggacctgggca

SEQ ID NO: 710475 - DNA, 120 bp, Artificial Sequence
  ENSG00000196876_108 (sequence is synthesized)
atgtctcagcgctgagaacattcagggttctccgagctttgaaaactatctctgtaattccaggtgagaaaatttgtacataagactgactttgccacatctcctctttctcctccattc

SEQ ID NO: 710476 - DNA, 120 bp, Artificial Sequence
  ENSG00000196876_109 (sequence is synthesized)
gccgttgggtcctcaggcagttttctctgagtgcttgccaggcatgcagcccccattccatccatgctattgaaaaagcacgtgcttaagaatcacttggatctcaccatatttgaaaaa

SEQ ID NO: 710477 - DNA, 120 bp, Artificial Sequence
  ENSG00000196876_110 (sequence is synthesized)
attgtcacagagctagctgtctctttgtatataaatcatttgcttcctggctccatggaattacagtaattttgacatttgccatcatttcattgcttgtgatttctaggcttcctatcg

SEQ ID NO: 710478 - DNA, 120 bp, Artificial Sequence
  ENSG00000196876_111 (sequence is synthesized)
catggtttgctgatgggacgttattcaaagaattatacatttactattactatattaatgaaattttttaatcacagaagagatctacccagttaactaatccagtatcagagacaaatt

SEQ ID NO: 710479 - DNA, 120 bp, Artificial Sequence
  ENSG00000196876_112 (sequence is synthesized)
taagagacttggagttagtgaactgcacttaaataatcactgtctatcatgttctactgctgtctgtctcactagaataagaaccagtagacatctactgtacatattcagggttcattc

SEQ ID NO: 710480 - DNA, 120 bp, Artificial Sequence
  ENSG00000196876_113 (sequence is synthesized)
tcagacataaatcccaatgaaagcttatgcaggcactgttaaaaaaaaatcaaaggtaagataagatacaactaaaggtatgggcaacaaaaagtatagaagtttgagggggaaaaacag

SEQ ID NO: 710481 - DNA, 120 bp, Artificial Sequence
  ENSG00000196876_114 (sequence is synthesized)
aatcagtaggtgagttgagagttagttgattgacaacctctttaaaatttgtgcctttttctttttggttctggttgagctagcccagtggttcttaaccttttgaaggttttggatccc

SEQ ID NO: 710482 - DNA, 120 bp, Artificial Sequence
  ENSG00000196876_115 (sequence is synthesized)
gattggcaacttggtggttagtactaatttgtagatatttttgttctacaccctgaatattctacccctggcccagaagcccaagtccttctactgcttagtccttctactacccgtcat

SEQ ID NO: 710483 - DNA, 120 bp, Artificial Sequence
  ENSG00000196876_116 (sequence is synthesized)
gtttgttgatttttattctttcttggcccagaaaccctaaggtacaaatgaaggagaggagagagatacttacagagtgcctacttagtcatgacccccacaacttgtcaacccttttcc

SEQ ID NO: 710484 - DNA, 120 bp, Artificial Sequence
  ENSG00000196876_117 (sequence is synthesized)
cctgttccctcttgcccctgatccgctcccggcggcgcggagacgcgagtctgagagcctgcgggcgggcggcgcgctgcaggcgagcgggcgagcgggcgcgccctgcagggagctgac

SEQ ID NO: 710485 - DNA, 120 bp, Artificial Sequence
  ENSG00000196876_118 (sequence is synthesized)
aatcccagcactttgggaggccaaggaaagaggatcacatgaaaccaggagttggagaccagcttggcaacacagtgagaccctgtttgtacaaaaaataaaaataagaaacattagcca

SEQ ID NO: 710486 - DNA, 120 bp, Artificial Sequence
  ENSG00000196876_119 (sequence is synthesized)
gtcccagctacttgggatgctgaggcagggggatcacatgagcccaagagtttaaggctacaatgagctatgatcactacatttcagcctgagtgacagagtgagactctatcaaaaata

SEQ ID NO: 710487 - DNA, 120 bp, Artificial Sequence
  ENSG00000196876_120 (sequence is synthesized)
gtgacagagtgagactctatcaaaaataaaataaagcaaaaatactctcccccttatgtttgtatagctttttataagctacaaattactcttacatgcattatttaatttgtcctaaat

SEQ ID NO: 710488 - DNA, 80 bp, Artificial Sequence
  ENSG00000196876_121 (sequence is synthesized)
gagttcgagacaagcctggccaacatggtttgaaacccatctctactacaaatacaaaagattagccggcagggaggttg

SEQ ID NO: 710489 - DNA, 120 bp, Artificial Sequence
  ENSG00000196876_122 (sequence is synthesized)
agcgagactccatcttaaaaaaaaaaaaatctgtaagggtgactaagtgaagattaatatttctgtttttgagatggggagaaggttcagagaatttgtgttcctttgggtcttacagct

SEQ ID NO: 710490 - DNA, 120 bp, Artificial Sequence
  ENSG00000196876_123 (sequence is synthesized)
ttacagctcatcactgatagagccagaatctcagacccctcagagaccctaatcttccgtgtgccagttaattttaatttgttctctgcctagacacttggccgttgctcttctcaagac

SEQ ID NO: 710491 - DNA, 120 bp, Artificial Sequence
  ENSG00000196876_124 (sequence is synthesized)
ctacttatttaagatcagcaacagtaagaacaataataatcctctggtttctctttagattgtataaatctttcactttttacaacaataataaacagtgggccgggcacggtggctcat

SEQ ID NO: 710492 - DNA, 120 bp, Artificial Sequence
  ENSG00000196876_125 (sequence is synthesized)
acagacgagaacactgaggtttggagaggttgttacaccctttttccctcttgtgattggtggtaggaaaatattaagtagaggagagacacagtaaagtgccaagagctctggcactca

SEQ ID NO: 710493 - DNA, 120 bp, Artificial Sequence
  ENSG00000196876_126 (sequence is synthesized)
cagggaggcagcgcctccccgctcctggcagcaggtccctgtgggctgaaacacgagcctccacctgccgctgattgacttctcgttttttcagtgggcccaagatcctgtaaattgagt

SEQ ID NO: 710494 - DNA, 120 bp, Artificial Sequence
  ENSG00000196876_127 (sequence is synthesized)
tccctgcgcttttggatgtcagaaacttcactgagcgcggcactgttggggggcaggagaaagagctgacctgtcctggacgcagcataactaacgaagctgctgcaggatgagaagatg

SEQ ID NO: 710495 - DNA, 120 bp, Artificial Sequence
  ENSG00000196878_0 (sequence is synthesized)
acattcaagaggagctttcaggcgatctggagaaagaacggcagaacacacagcaaggaaaggtcctttctggggatcaccccattggctgaagatgagaccattcttcctcttgtgttt

SEQ ID NO: 710496 - DNA, 120 bp, Artificial Sequence
  ENSG00000196878_1 (sequence is synthesized)
tgccctgcctggcctcctgcatgcccaacaagcctgctcccgtggggcctgctatccacctgttggggacctgcttgttgggaggacccggtttctccgagcttcatctacctgtggact

SEQ ID NO: 710497 - DNA, 120 bp, Artificial Sequence
  ENSG00000196878_2 (sequence is synthesized)
gaccaagcctgagacctactgcacccagtatggcgagtggcagatgaaatgctgcaagtgtgactccaggcagcctcacaactactacagtcaccgagtagagaatgtggcttcatcctc

SEQ ID NO: 710498 - DNA, 120 bp, Artificial Sequence
  ENSG00000196878_3 (sequence is synthesized)
cggccccatgcgctggtggcagtcacagaatgatgtgaaccctgtctctctgcagctggacctggacaggagattccagcttcaagaagtcatgatggagttccaggggcccatgcccgc

SEQ ID NO: 710499 - DNA, 120 bp, Artificial Sequence
  ENSG00000196878_4 (sequence is synthesized)
cggcatgctgattgagcgctcctcagacttcggtaagacctggcgagtgtaccagtacctggctgccgactgcacctccaccttccctcgggtccgccagggtcggcctcagagctggca

SEQ ID NO: 710500 - DNA, 120 bp, Artificial Sequence
  ENSG00000196878_5 (sequence is synthesized)
ggatgttcggtgccagtccctgcctcagaggcctaatgcacgcctaaatggggggaaggtccaacttaaccttatggatttagtgtctgggattccagcaactcaaagtcaaaaaattca

SEQ ID NO: 710501 - DNA, 120 bp, Artificial Sequence
  ENSG00000196878_6 (sequence is synthesized)
agaggtgggggagatcacaaacttgagagtcaatttcaccaggctggcccctgtgccccaaaggggctaccaccctcccagcgcctactatgctgtgtcccagctccgtctgcaggggag

SEQ ID NO: 710502 - DNA, 120 bp, Artificial Sequence
  ENSG00000196878_7 (sequence is synthesized)
ctgcttctgtcacggccatgctgatcgctgcgcacccaagcctggggcctctgcaggcccctccaccgctgtgcaggtccacgatgtctgtgtctgccagcacaacactgccggcccaaa

SEQ ID NO: 710503 - DNA, 120 bp, Artificial Sequence
  ENSG00000196878_8 (sequence is synthesized)
ttgtgagcgctgtgcacccttctacaacaaccggccctggagaccggcggagggccaggacgcccatgaatgccaaaggtgcgactgcaatgggcactcagagacatgtcactttgaccc

SEQ ID NO: 710504 - DNA, 120 bp, Artificial Sequence
  ENSG00000196878_9 (sequence is synthesized)
cgctgtgtttgccgccagccagggggcatatggaggtgtgtgtgacaattgccgggaccacaccgaaggcaagaactgtgagcggtgtcagctgcactatttccggaaccggcgcccggg

SEQ ID NO: 710505 - DNA, 120 bp, Artificial Sequence
  ENSG00000196878_10 (sequence is synthesized)
agcttccattcaggagacctgcatctcctgcgagtgtgatccggatggggcagtgccaggggctccctgtgacccagtgaccgggcagtgtgtgtgcaaggagcatgtgcagggagagcg

SEQ ID NO: 710506 - DNA, 120 bp, Artificial Sequence
  ENSG00000196878_11 (sequence is synthesized)
ctgtgacctatgcaagccgggcttcactggactcacctacgccaacccgcagggctgccaccgctgtgactgcaacatcctggggtcccggagggacatgccgtgtgacgaggagagtgg

SEQ ID NO: 710507 - DNA, 120 bp, Artificial Sequence
  ENSG00000196878_12 (sequence is synthesized)
gcgctgcctttgtctgcccaacgtggtgggtcccaaatgtgaccagtgtgctccctaccactggaagctggccagtggccagggctgtgaaccgtgtgcctgcgacccgcacaactccct

SEQ ID NO: 710508 - DNA, 120 bp, Artificial Sequence
  ENSG00000196878_13 (sequence is synthesized)
cagcccacagtgcaaccagttcacagggcagtgcccctgtcgggaaggctttggtggcctgatgtgcagcgctgcagccatccgccagtgtccagaccggacctatggagacgtggccac

SEQ ID NO: 710509 - DNA, 120 bp, Artificial Sequence
  ENSG00000196878_14 (sequence is synthesized)
aggatgccgagcctgtgactgtgatttccggggaacagagggcccgggctgcgacaaggcatcaggccgctgcctctgccgccctggcttgaccgggccccgctgtgaccagtgccagcg

SEQ ID NO: 710510 - DNA, 120 bp, Artificial Sequence
  ENSG00000196878_15 (sequence is synthesized)
aggctactgtaatcgctacccggtgtgcgtggcctgccacccttgcttccagacctatgatgcggacctccgggagcaggccctgcgctttggtagactccgcaatgccaccgccagcct

SEQ ID NO: 710511 - DNA, 120 bp, Artificial Sequence
  ENSG00000196878_16 (sequence is synthesized)
aaagagtaagattgagcagatccgagcagttctcagcagccccgcagtcacagagcaggaggtggctcaggtggccagtgccatcctctccctcaggcgaactctccagggcctgcagct

SEQ ID NO: 710512 - DNA, 120 bp, Artificial Sequence
  ENSG00000196878_17 (sequence is synthesized)
ggatctgcccctggaggaggagacgttgtcccttccgagagacctggagagtcttgacagaagcttcaatggtctccttactatgtatcagaggaagagggagcagtttgaaaaaataag

SEQ ID NO: 710513 - DNA, 120 bp, Artificial Sequence
  ENSG00000196878_18 (sequence is synthesized)
cagtgctgatccttcaggagccttccggatgctgagcacagcctacgagcagtcagcccaggctgctcagcaggtctccgacagctcgcgccttttggaccagctcagggacagccggag

SEQ ID NO: 710514 - DNA, 120 bp, Artificial Sequence
  ENSG00000196878_19 (sequence is synthesized)
agaggcagagaggctggtgcggcaggcgggaggaggaggaggcaccggcagccccaagcttgtggccctgaggctggagatgtcttcgttgcctgacctgacacccaccttcaacaagct

SEQ ID NO: 710515 - DNA, 120 bp, Artificial Sequence
  ENSG00000196878_20 (sequence is synthesized)
ctgtggcaactccaggcagatggcttgcaccccaatatcatgccctggtgagctatgtccccaagacaatggcacagcctgtggctcccgctgcaggggtgtccttcccagggccggtgg

SEQ ID NO: 710516 - DNA, 120 bp, Artificial Sequence
  ENSG00000196878_21 (sequence is synthesized)
ggccttcttgatggcggggcaggtggctgagcagctgcggggcttcaatgcccagctccagcggaccaggcagatgattagggcagccgaggaatctgcctcacagattcaatccagtgc

SEQ ID NO: 710517 - DNA, 120 bp, Artificial Sequence
  ENSG00000196878_22 (sequence is synthesized)
ccagcgcttggagacccaggtgagcgccagccgctcccagatggaggaagatgtcagacgcacacggctcctaatccagcaggtccgggacttcctaacagaccccgacactgatgcagc

SEQ ID NO: 710518 - DNA, 120 bp, Artificial Sequence
  ENSG00000196878_23 (sequence is synthesized)
cactatccaggaggtcagcgaggccgtgctggccctgtggctgcccacagactcagctactgttctgcagaagatgaatgagatccaggccattgcagccaggctccccaacgtggactt

SEQ ID NO: 710519 - DNA, 120 bp, Artificial Sequence
  ENSG00000196878_24 (sequence is synthesized)
ggtgctgtcccagaccaagcaggacattgcgcgtgcccgccggttgcaggctgaggctgaggaagccaggagccgagcccatgcagtggagggccaggtggaagatgtggttgggaacct

SEQ ID NO: 710520 - DNA, 120 bp, Artificial Sequence
  ENSG00000196878_25 (sequence is synthesized)
gcggcaggggacagtggcactgcaggaagctcaggacaccatgcaaggcaccagccgctcccttcggcttatccaggacagggttgctgaggttcagcaggtactgcggccagcagaaaa

SEQ ID NO: 710521 - DNA, 120 bp, Artificial Sequence
  ENSG00000196878_26 (sequence is synthesized)
gctggtgacaagcatgaccaagcagctgggtgacttctggacacggatggaggagctccgccaccaagcccggcagcagggggcagaggcagtccaggcccagcagcttgcggaaggtgc

SEQ ID NO: 710522 - DNA, 120 bp, Artificial Sequence
  ENSG00000196878_27 (sequence is synthesized)
cagcgagcaggcattgagtgcccaagagggatttgagagaataaaacaaaagtatgctgagttgaaggaccggttgggtcagagttccatgctgggtgagcagggtgcccggatccagag

SEQ ID NO: 710523 - DNA, 120 bp, Artificial Sequence
  ENSG00000196878_28 (sequence is synthesized)
tgtgaagacagaggcagaggagctgtttggggagaccatggagatgatggacaggatgaaagacatggagttggagctgctgcggggcagccaggccatcatgctgcgctcagcggacct

SEQ ID NO: 710524 - DNA, 120 bp, Artificial Sequence
  ENSG00000196878_29 (sequence is synthesized)
gacaggactggagaagcgtgtggagcagatccgtgaccacatcaatgggcgcgtgctctactatgccacctgcaagtgatgctacagcttccagcccgttgccccactcatctgccgcct

SEQ ID NO: 710525 - DNA, 120 bp, Artificial Sequence
  ENSG00000196878_30 (sequence is synthesized)
ttgcttttggttgggggcagattgggttggaatgctttccatctccaggagactttcatgcagcctaaagtacagcctggaccacccctggtgtgtagctagtaagattaccctgagctg

SEQ ID NO: 710526 - DNA, 120 bp, Artificial Sequence
  ENSG00000196878_31 (sequence is synthesized)
cagctgagcctgagccaatgggacagttacacttgacagacaaagatggtggagattggcatgccattgaaactaagagctctcaagtcaaggaagctgggctgggcagtatcccccgcc

SEQ ID NO: 710527 - DNA, 120 bp, Artificial Sequence
  ENSG00000196878_32 (sequence is synthesized)
tttagttctccactggggaggaatcctggaccaagcacaaaaacttaacaaaagtgatgtaaaaatgaaaagccaaataaaaatctttggaaaagagcctggaggttcaacgaggaaaaa

SEQ ID NO: 710528 - DNA, 120 bp, Artificial Sequence
  ENSG00000196878_33 (sequence is synthesized)
gcgggaggaggactgtatctctggatgcctggggcctggtttcagggcctgatttattcctcttcctgggagctcactcaggaaaggtcctttctggggatcaccccattggctgaagat

SEQ ID NO: 710529 - DNA, 120 bp, Artificial Sequence
  ENSG00000196878_34 (sequence is synthesized)
cttttctcctgcaaagggtccagccttttcctgctccccacgttgtccttacggctgtgtggggtagggcagggtccacactccttcccatccattttagaggaggaagctggagtctgg

SEQ ID NO: 710530 - DNA, 120 bp, Artificial Sequence
  ENSG00000196878_35 (sequence is synthesized)
gaagggatgggattttcccagggcaccctgtgagtcacatgccacttgagacaagggtctagagctccagcattttccaagctacaaatgtatctgctgctccaagtgtcctagatcagg

SEQ ID NO: 710531 - DNA, 120 bp, Artificial Sequence
  ENSG00000196878_36 (sequence is synthesized)
accctaggtaaagacttctgaaaaatacttgagtctagaaacagaaaagaaaaagggctagtgtgctctaggggtttgcactgttgtacccagtttgctttgctgtgtcctaggaaaggt

SEQ ID NO: 710532 - DNA, 120 bp, Artificial Sequence
  ENSG00000196878_37 (sequence is synthesized)
agggggcagcagctccttgggacaccacggtagaggggccactgtgggtgccttccacaagtgctgctcagctaggagaggcctcgtatctctggggaggttagtgggctcctacagtca

SEQ ID NO: 710533 - DNA, 120 bp, Artificial Sequence
  ENSG00000196890_0 (sequence is synthesized)
ctgtttggagagactcagccatcatgccagacccgtccaaatcggctcctgcgcccaagaagggttctaaaaaggctgtcaccaaggcacagaagaaggacggcaagaagcgcaagcgcg

SEQ ID NO: 710534 - DNA, 120 bp, Artificial Sequence
  ENSG00000196890_1 (sequence is synthesized)
gccgcaaggagagctattctatctacgtgtacaaggtgctgaagcaggtgcaccccgacaccggcatctcgtccaaggccatgggcatcatgaactccttcgtcaatgacatcttcgagc

SEQ ID NO: 710535 - DNA, 120 bp, Artificial Sequence
  ENSG00000196890_2 (sequence is synthesized)
gcatcgccagcgaggcctcccgcctggcacactacaacaagcgctccaccatcacgtcccgcgaagtgcagacggccgttcgcctgctgctgcccggcgagctggccaagcacgccgtgt

SEQ ID NO: 710536 - DNA, 120 bp, Artificial Sequence
  ENSG00000196890_3 (sequence is synthesized)
ccgagggcaccaaggctgtcaccaagtacaccagctccaagtgaggcgttcctcggcgtcctgaacccaaaggctcttttcagagccacccacacgatcaagaaagggtttcgaacacgg

SEQ ID NO: 710537 - DNA, 120 bp, Artificial Sequence
  ENSG00000196890_4 (sequence is synthesized)
cacgatcaagaaagggtttcgaacacggtgaagggttatgtaacctaatgtgtctccatgcaccctagcggttgccgggtgcggccgaatctgagccgtgtgtgtgtgtgtgtgtgtgtg

SEQ ID NO: 710538 - DNA, 120 bp, Artificial Sequence
  ENSG00000196890_5 (sequence is synthesized)
gagaaaaactgctcgttacagaaatcggggtagaaactgctcaggtgatgtagctcagtaatgttgggaggcgatcaaggaccccctctccatcccctccctccgcgcagagctattaac

SEQ ID NO: 710539 - DNA, 73 bp, Artificial Sequence
  ENSG00000196890_6 (sequence is synthesized)
ctattaactcacgacgagaagaagtctcgctctgtctctaggctggcgtgcagtggcgcaatctgggctcact

SEQ ID NO: 710540 - DNA, 65 bp, Artificial Sequence
  ENSG00000196890_7 (sequence is synthesized)
caaatgtcttttataagcaagtggtgcattcctggatgttgagcgcttgcgcccggttcaggacc

SEQ ID NO: 710541 - DNA, 120 bp, Artificial Sequence
  ENSG00000196890_8 (sequence is synthesized)
ggtcacctccccccaaaagaccctgtgccaacctccccaaccctacccgccccccatgggcgaggccagacgtggcgcaagaccacgggctctgaggccatgggtgttgtcactttcccc

SEQ ID NO: 710542 - DNA, 120 bp, Artificial Sequence
  ENSG00000196890_9 (sequence is synthesized)
tggcggtggtgcctggctctgcatttgcttaagacttttccatccctgcctggaccagacagacatgtttagatttaagcaatgaacattccgggaggatattttcctggcaggataccg

SEQ ID NO: 710543 - DNA, 120 bp, Artificial Sequence
  ENSG00000196890_10 (sequence is synthesized)
cgatggcaggatgtttgataccgaatcgaagcacggcgtcaaagcagcgtcctgcgcgggggagccggatgtaataagcgaccccagctgccggtaactttaacccttatgggagtgggg

SEQ ID NO: 710544 - DNA, 120 bp, Artificial Sequence
  ENSG00000196890_11 (sequence is synthesized)
gtgggggaaggggttaatttaggaggaaaagaattccctttttctgagcaaatgtagctgcctccctctttagccacattattttctgcgaggcgttagcaacgcagaattcctttccta

SEQ ID NO: 710545 - DNA, 120 bp, Artificial Sequence
  ENSG00000196890_12 (sequence is synthesized)
ccccctccaaattcacggcatttatttggggagtgccattttggcgcaggaaagctctttggcacgaagagttttcactttggaaagggcatcgtttacgttttcatgacttggcttttc

SEQ ID NO: 710546 - DNA, 120 bp, Artificial Sequence
  ENSG00000196890_13 (sequence is synthesized)
ttctttagaaaaagaagatttccagtaattgcttcctcaaaccgttgtgaaaattcgaagtactgagcgtttgtgtcaccatttccagcagggaataaaaattcaataaagttaaatgag

SEQ ID NO: 710547 - DNA, 120 bp, Artificial Sequence
  ENSG00000196890_14 (sequence is synthesized)
ctgggattacaggcgtgagccacttctcctggccgagaaataatttttaaataaaattcaatgaaaaatatttttcccccaagtcatttctccaaagggaacccgtcgcgtgcctgggat

SEQ ID NO: 710548 - DNA, 120 bp, Artificial Sequence
  ENSG00000196890_15 (sequence is synthesized)
caaagggaacccgtcgcgtgcctgggatggggaaagaaaggtcaccgtgaacatcctcgaccaaaacggctttgtcccctattccccaccttttttttcctgcgtgattcctctacaaga

SEQ ID NO: 710549 - DNA, 120 bp, Artificial Sequence
  ENSG00000196900_0 (sequence is synthesized)
agatgagtattccatccattgctgtcaggaatggcttcagggaaagatacttgtcctactttgcctaaactcactaacaactgctctgatgagagtctctataaatctgctaataagtat

SEQ ID NO: 710550 - DNA, 120 bp, Artificial Sequence
  ENSG00000196900_1 (sequence is synthesized)
gtgggatccatactggccctttagaagactctctgtttttgaatcacagtgaaaggctttgccatggggaagatcgtaaagttgtcttccaaaaaggcccaccagaaataaaaattgcag

SEQ ID NO: 710551 - DNA, 120 bp, Artificial Sequence
  ENSG00000196900_2 (sequence is synthesized)
atatgcctttgcattcgcctctctccagataccaaagcactgtgatttcccatggcttcaggaggcgactagtctaatgaaagaagaataaaataataaagtgtttcaatctctgctctc

SEQ ID NO: 710552 - DNA, 120 bp, Artificial Sequence
  ENSG00000196900_3 (sequence is synthesized)
cctaatcatcaggtatgaagagattcatttgccacgattttcattaaagcaagggatgatcccaagacgttatgtcatgccttggaaagaaaacatgatattcaggaatgtgaatctgaa

SEQ ID NO: 710553 - DNA, 120 bp, Artificial Sequence
  ENSG00000196911_0 (sequence is synthesized)
atcttggattgcgaactgggtcgctacgcttcacgccaggggcggagtggcggcccttctgttacccgccacacacgtcgccgctggggactgggaaatcagggcatcggagagtgccac

SEQ ID NO: 710554 - DNA, 120 bp, Artificial Sequence
  ENSG00000196911_1 (sequence is synthesized)
attaatggatgccatggctagtccagggaaagataactatagaatgaaaagttataagaataaagccctaaatcctcaagagatgcgtagacgaagagaagaagaaggaatacagcttag

SEQ ID NO: 710555 - DNA, 120 bp, Artificial Sequence
  ENSG00000196911_2 (sequence is synthesized)
aaaacaaaaaagagaagaacagttgttcaaacgcagaaatgtctatttgcccagaaatgatgaatctatgcttgaaagtcctatacaggatccagatattagttccactgtacccattcc

SEQ ID NO: 710556 - DNA, 120 bp, Artificial Sequence
  ENSG00000196911_3 (sequence is synthesized)
agaggaagaagttgttactacagatatggttcagatgattttttctaataatgctgatcaacagctaacagcaacacagaaatttagaaagctgctttctaaagaacctaatccaccaat

SEQ ID NO: 710557 - DNA, 120 bp, Artificial Sequence
  ENSG00000196911_4 (sequence is synthesized)
agatcaagttatacagaaaccaggagttgtacagagatttgtgaaatttcttgaaagaaatgaaaattgcactttacaatttgaagctgcatgggcattaacaaatatagcatctggaac

SEQ ID NO: 710558 - DNA, 120 bp, Artificial Sequence
  ENSG00000196911_5 (sequence is synthesized)
ttttctgcataccaaggtagtgattgaaactggggctgttccgatttttatcaaacttcttaattctgaacatgaagatgttcaggaacaggctgtttgggcacttggtaatattgctgg

SEQ ID NO: 710559 - DNA, 120 bp, Artificial Sequence
  ENSG00000196911_6 (sequence is synthesized)
tgacaatgcagaatgcagagattttgttttgaattgtgaaatacttccacctcttttagagttattaacaaattcaaacagactcacaacaacaagaaatgccgtgtgggccctctcaaa

SEQ ID NO: 710560 - DNA, 120 bp, Artificial Sequence
  ENSG00000196911_7 (sequence is synthesized)
tttatgtagaggcaaaaaccctcctccaaactttagtaaggtttcaccttgcttaaatgtcctgtcacgactgttgtttagcagtgacccagatgtgttagcagacgtgtgttgggccct

SEQ ID NO: 710561 - DNA, 120 bp, Artificial Sequence
  ENSG00000196911_8 (sequence is synthesized)
ctgcattaagggcagttggtaatattgtgactggtgatgatattcaaacacaggtaattttgaattgttctgcattaccctgtctcttacatttattgagtagcccaaaggagtcaatta

SEQ ID NO: 710562 - DNA, 120 bp, Artificial Sequence
  ENSG00000196911_9 (sequence is synthesized)
gaaaagaagcctgctggactgtttctaacatcactgctggaaatagagctcagattcaggctgttatagatgcaaatatttttcctgttttgattgagattcttcagaaagcagagtttc

SEQ ID NO: 710563 - DNA, 120 bp, Artificial Sequence
  ENSG00000196911_10 (sequence is synthesized)
gtaccagaaaagaagcagcttgggctataactaatgcaacatcaggaggtactccagagcaaataaggtatttggtagctttaggctgcattaaaccactttgtgatcttttgactgtta

SEQ ID NO: 710564 - DNA, 120 bp, Artificial Sequence
  ENSG00000196911_11 (sequence is synthesized)
tggactccaaaatagtccaagtggctttaaatggacttgaaaatattttacgtcttggagaacaagaatctaagcagaatggaataggcattaatccatactgtgctctcattgaagaag

SEQ ID NO: 710565 - DNA, 120 bp, Artificial Sequence
  ENSG00000196911_12 (sequence is synthesized)
catatggtctggataaaattgagtttttgcaaagccatgaaaatcaggaaatttaccagaaggcatttgatctgattgaacattactttggtgtagaagaagatgaccccagcattgtac

SEQ ID NO: 710566 - DNA, 120 bp, Artificial Sequence
  ENSG00000196911_13 (sequence is synthesized)
ctcaggtggatgaaaaccaacaacagtttatatttcagcagcaggaagcaccaatggatggatttcaactttaacttactggaggaaaaaaaatttatggctaaaaagggtagcttcaga

SEQ ID NO: 710567 - DNA, 120 bp, Artificial Sequence
  ENSG00000196911_14 (sequence is synthesized)
aatgacagactttttcattgaatgatgaggacacagcagccatattatgccaagaggaaaaatatcatgatcatattgaaagatcaagcatgagcttccatggtgaagtcttctgtacca

SEQ ID NO: 710568 - DNA, 120 bp, Artificial Sequence
  ENSG00000196911_15 (sequence is synthesized)
atgcaccagagaatgcctaccatccaaaaaagcagtcagctgatggaaaagaagattattaaacctttgttctgggatttactgttaaaaaacaaacaaaaaacaacaaaaaagcggtga

SEQ ID NO: 710569 - DNA, 120 bp, Artificial Sequence
  ENSG00000196911_16 (sequence is synthesized)
caggaaacagttaaggaaatgatttaactgaagggaagcaagatttttttaaagcattgttcttaatccccatgactgtccttcagtcacaattccagaataaaagaatctactttgtgt

SEQ ID NO: 710570 - DNA, 120 bp, Artificial Sequence
  ENSG00000196911_17 (sequence is synthesized)
ttgttgccaatgtaagaatgtttgtttttttacatagaacagtaaagagaatttgatgcacttttagaaagcaaaatgaaacaaaaatttccattcagatgcaacctttcattgtagttt

SEQ ID NO: 710571 - DNA, 120 bp, Artificial Sequence
  ENSG00000196911_18 (sequence is synthesized)
gttgttgttttagttttgttgttgtgcctgtatttatatcttctattgtttggatttttgtatctatttgtgaataattgaatatgcaattatttagtaatttaagcttgaaaaggagaa

SEQ ID NO: 710572 - DNA, 120 bp, Artificial Sequence
  ENSG00000196911_19 (sequence is synthesized)
ttttggtgaagcattacttagtaattctgaattttttcaagcattcttggaaactgcacattagcagtaaacctattgataattgcattttggcagtaagtcttacacatctaatctcta

SEQ ID NO: 710573 - DNA, 120 bp, Artificial Sequence
  ENSG00000196911_20 (sequence is synthesized)
ctaaatctacctctatcttgaagcagaaataaaaacaaaaaagcttcagaagcatgaaataatgcaaatgctaaattagaatgtgaaaatatttattaccttaaattatacatatcactg

SEQ ID NO: 710574 - DNA, 120 bp, Artificial Sequence
  ENSG00000196911_21 (sequence is synthesized)
tgctgtaggttatactttgcaaaaaattgcaacagaaaacctataaaatttatttataaaacagaagaaatattatactgataatccattaaaatgtggcaattgtgaagggagaagctg

SEQ ID NO: 710575 - DNA, 120 bp, Artificial Sequence
  ENSG00000196911_22 (sequence is synthesized)
agggagaagctgtttttcatgttgaacacattaaaaagattactttataaaatgtttaaatatttctgtttttaacatataagtgctatgtatattagtatattttgtatttcaaccaaa

SEQ ID NO: 710576 - DNA, 120 bp, Artificial Sequence
  ENSG00000196911_23 (sequence is synthesized)
tttgaaatagtgttttattgtttttcactcattgttttaaagagcatcatgacagagatgtcatcatgaatctaaagtagtgctgcatatctaaaataataactaattatttctctgatt

SEQ ID NO: 710577 - DNA, 120 bp, Artificial Sequence
  ENSG00000196911_24 (sequence is synthesized)
tttcagagcagtaattgaaaagtttcattttctgtataatagtactagtttaagtttaagtacaagtacaagtttaggtactcgaatgacaaaattaccctgaagaaataaccttattat

SEQ ID NO: 710578 - DNA, 120 bp, Artificial Sequence
  ENSG00000196911_25 (sequence is synthesized)
gtgttaaattgtattaaatgcatttaacatttggatgctaaatgataatgaaaattgctaaaggttctttaatatggttcaaatctataagacttttttcttttagtaatactcagaggg

SEQ ID NO: 710579 - DNA, 120 bp, Artificial Sequence
  ENSG00000196911_26 (sequence is synthesized)
tcattctgctgcttgttatgaatcatagattacattcatgtcagattgatcaatatgtatgttttatgatttaacagcaaaaacctcttcaaacggaaaatttgaaagaaaggtttcaat

SEQ ID NO: 710580 - DNA, 120 bp, Artificial Sequence
  ENSG00000196911_27 (sequence is synthesized)
agaaaaattatatatatatttatacatatatatgtgtgtgtgttactctcacagttcaactactgttgaactcaatcttttaatttatagttatacgtaggctatttatgtgtccaattg

SEQ ID NO: 710581 - DNA, 120 bp, Artificial Sequence
  ENSG00000196911_28 (sequence is synthesized)
tatacctagaatacttacttaaaacttagtttacaactctttttaagatgagaactaaggcaattttgatatgattcatggtctattctttaaaaaaagatttcatttatgatagtattt

SEQ ID NO: 710582 - DNA, 120 bp, Artificial Sequence
  ENSG00000196911_29 (sequence is synthesized)
gtaatgtttctgctggaaatcagaggcacgttccaagaggaaaatgtatataggagtacttttaaagaatatgtcactttgtaaattacatatcatgaaactaagcttttgacaagatac

SEQ ID NO: 710583 - DNA, 120 bp, Artificial Sequence
  ENSG00000196911_30 (sequence is synthesized)
ttaaaacctacagctgtaaaatacaggtttaaatggtgttcgtaatgctgagtgcatctgccagcccttttttattattaagtagaagattgtatctgtgccccttttttcgtagtggaa

SEQ ID NO: 710584 - DNA, 120 bp, Artificial Sequence
  ENSG00000196911_31 (sequence is synthesized)
ggtatatagccgagtataaaatggttttcttttgcattatctgtattcaaaaaacagggtagttatattaaagcttaccaaattgatggtgaatttatcagattaacctttttgtggtgc

SEQ ID NO: 710585 - DNA, 120 bp, Artificial Sequence
  ENSG00000196911_32 (sequence is synthesized)
agatggttctaagtatcaggtgacagggtattctactctttctagtcaattaaaattgataatgcagcatgattcataaactaaccagctgtgcctccttttattttgaggaccctgtag

SEQ ID NO: 710586 - DNA, 120 bp, Artificial Sequence
  ENSG00000196911_33 (sequence is synthesized)
tcactataataaatttctaagccaaatttttcaaacaagatagttcttatagaaggagaaataataaatatgtgtgtgttgatgcatgcacacagaatgacctgtgaaaggaaacttaaa

SEQ ID NO: 710587 - DNA, 120 bp, Artificial Sequence
  ENSG00000196911_34 (sequence is synthesized)
ttttgccggtaaaacaaacatatctctacagactgtgattatacttcataagcatttaaatacagttttatttatttccttaaatatattacttgggtaattaattttagatttgattgc

SEQ ID NO: 710588 - DNA, 120 bp, Artificial Sequence
  ENSG00000196911_35 (sequence is synthesized)
aaagagcactgtatagcagttgggaccagctcttggcttggcttggcttggcttattgttaagagtttattggatcaagactaacaaataactttgtgatgaaaattcttcaaaaatata

SEQ ID NO: 710589 - DNA, 120 bp, Artificial Sequence
  ENSG00000196911_36 (sequence is synthesized)
ctaacaaataactttgtgatgaaaattcttcaaaaatatagctactcttttcaagtataccatttaaaatatttcatcaggcagagccctgaccaggaaaaaaaaaaaaaaagaaagaaa

SEQ ID NO: 710590 - DNA, 120 bp, Artificial Sequence
  ENSG00000196911_37 (sequence is synthesized)
cagtagtcttcactggcccttgtgggaggaaaaatacttttttaacttgcttttctaagatttgttatatttaaatccaagagaaactatgccgaaaaaaagtgttataaagaggaatgc

SEQ ID NO: 710591 - DNA, 120 bp, Artificial Sequence
  ENSG00000196911_38 (sequence is synthesized)
atgtagcattaatgcaaatatcaagaaaatacttgaaagagtccttttcatttatttaattaaatttggtgttttattttgtctgaatctgaatttctcctatttaatctatgcaattat

SEQ ID NO: 710592 - DNA, 120 bp, Artificial Sequence
  ENSG00000196911_39 (sequence is synthesized)
gcttgttttatatttataagcacttgactcactgggtgtggtctttttactgtgttttatttcaaaacgttgttttaagtgatagtgtccttaaattttagtgtcatttggtcaacttac

SEQ ID NO: 710593 - DNA, 120 bp, Artificial Sequence
  ENSG00000196911_40 (sequence is synthesized)
tggtaacaccagaacaagaaagcaaaaaagtaataaattctgctggcacagaactaacatatcatttggtaactgtaaaacctatttgcagttaaaggttgatttattggataagggact

SEQ ID NO: 710594 - DNA, 120 bp, Artificial Sequence
  ENSG00000196911_41 (sequence is synthesized)
aaaagaagcatatattacctttgcctttatattttttcttcttttaagaaggagcattatggaaaaataaatataaagtcttagtgaatttttgttatggttctcaattcagcaatctac

SEQ ID NO: 710595 - DNA, 120 bp, Artificial Sequence
  ENSG00000196911_42 (sequence is synthesized)
tggctgcttgcgaaactgtgaaatcaaattgttcttaacctttattcagtttagtttatagcattactgttttatgaaatgtgacattttaggagccaatataatagagctctaaaagga

SEQ ID NO: 710596 - DNA, 120 bp, Artificial Sequence
  ENSG00000196911_43 (sequence is synthesized)
tagtatatctttaaattctgactggggagtaagaagagaagatattcttaccctactaaataaaccaacttttgagtagtatgcaatattatgaaatgttacaacactatattaaaaata

SEQ ID NO: 710597 - DNA, 120 bp, Artificial Sequence
  ENSG00000196911_44 (sequence is synthesized)
ataaaatattttaaaattgcatttatataaatgtgtccatttcattttttcttaagattgttgtttcctaacagaacaaagacagatgctattattggttaaaaatccatttactttcta

SEQ ID NO: 710598 - DNA, 120 bp, Artificial Sequence
  ENSG00000196911_45 (sequence is synthesized)
aaactaacaaaggagaaaaaatagaattataaaaaatagctaatccaaaactagacagaaaaagagaaaaaacaaatgaagatggaacaaatagcaagaaagatcaaactcagttatatc

SEQ ID NO: 710599 - DNA, 120 bp, Artificial Sequence
  ENSG00000196911_46 (sequence is synthesized)
agtagtcacagtaattactaatgatttaaacatgccaattaaagtgcagaggttatcagttttaataaaaaagtaaggccgtattttgcctctaagaaaatgttttcaagaagcaaattg

SEQ ID NO: 710600 - DNA, 120 bp, Artificial Sequence
  ENSG00000196911_47 (sequence is synthesized)
gtgaaaagggtggaaaaaagatataccatgctatcacaaatcaaaagtaagttggggtggccatataatgcatatcaaggtgcatttcagagcaaggaatatttattgctggagataaag

SEQ ID NO: 710601 - DNA, 120 bp, Artificial Sequence
  ENSG00000196911_48 (sequence is synthesized)
agggtcatttgataaagggatcaattcatgatagtcaaaatgtagaaacaaatgttcatcagccaatggataaataaaatgttatattcataaaatgggatattactcagtaataaaatg

SEQ ID NO: 710602 - DNA, 120 bp, Artificial Sequence
  ENSG00000196911_49 (sequence is synthesized)
atatatggtacaacatggatgaacattgaaaacattaggctaagtgaaagaaaccagattccatttatatgaagtgttcggaatagacaaatctatagaaacagaaataaattagtatct

SEQ ID NO: 710603 - DNA, 120 bp, Artificial Sequence
  ENSG00000196911_50 (sequence is synthesized)
aggactggggaaagttggaaatgggaggtgactgggtacaaagtttcttctttgagcaataaaaataggattttctaataaattcagagatgtgctgccatcaccataagcaaaagttca

SEQ ID NO: 710604 - DNA, 120 bp, Artificial Sequence
  ENSG00000196911_51 (sequence is synthesized)
cttttttactggcactagccatatttcaagtgctcagtagggagtgcagggctacagtatgttttttaaatcacgtgagagtaacacaaagttttaaatgcatattttacaccccaaagc

SEQ ID NO: 710605 - DNA, 120 bp, Artificial Sequence
  ENSG00000196911_52 (sequence is synthesized)
aaccaattcttgttcttggagttagctgagcttcctaggatccatggatttatagttttcatcaaatttgaaaacacagcaattatttaaacattttttcatttccaattccgcttatat

SEQ ID NO: 710606 - DNA, 120 bp, Artificial Sequence
  ENSG00000196911_53 (sequence is synthesized)
tagtctgcctgaaatactcacacagcttattaatgctttgctcatttttggttatttttcattttgtatagttttcattgtttcgtcttcaagttcactaatcttgtcttctgctgtgtc

SEQ ID NO: 710607 - DNA, 120 bp, Artificial Sequence
  ENSG00000196911_54 (sequence is synthesized)
taatctcttaattccattagtgtattttttatgtcagacattgtgtattttatctttaaaaattcaatttggatctgttttatatcttccattttttttatcatactcaagctttcctct

SEQ ID NO: 710608 - DNA, 120 bp, Artificial Sequence
  ENSG00000196911_55 (sequence is synthesized)
gctggcttgaacacagcaagtataatagctgtttgaatggccttgctactaattctgtcatttcttgctctgtttctgtttattgatttttttattatgagttgtatttttcatttgcat

SEQ ID NO: 710609 - DNA, 120 bp, Artificial Sequence
  ENSG00000196911_56 (sequence is synthesized)
gcgtttacatgtttggatattgaatttcccatatttgttcttcttaacacaagttactaggggaaaaaatgtgatcctttaaaggcttgcttttaaactttgtaaggcaggcacagaaca

SEQ ID NO: 710610 - DNA, 120 bp, Artificial Sequence
  ENSG00000196911_57 (sequence is synthesized)
acgtttattttactgctgagtcagtaccattccgagtactctattaccctatgaattacaagggattttcactttggctagtggaacttaaactgttcctgatcattgtgggctccaaaa

SEQ ID NO: 710611 - DNA, 120 bp, Artificial Sequence
  ENSG00000196911_58 (sequence is synthesized)
attgtttccccttgtgctttcaggtgattctttagaaggccttgggtagtagtcacatgtggtcaatagtacttggctgaagactcaaaggggaatcctctgcagataatctggagcaat

SEQ ID NO: 710612 - DNA, 120 bp, Artificial Sequence
  ENSG00000196911_59 (sequence is synthesized)
ctgtgtagttttgtcacatttggtactctaccttgtgaactctagttttgtcctccctggcttcctaactctttctccccatctcagagactttgtggctatacctgaatttcccttcct

SEQ ID NO: 710613 - DNA, 120 bp, Artificial Sequence
  ENSG00000196911_60 (sequence is synthesized)
tgccctgcaatcgtgaaactctaggcagtaagagacagagcagtcatagggctcaactagtttgtttcctctgtttcatagatcacggttcctcattatctgatgtctaatgtctggaaa

SEQ ID NO: 710614 - DNA, 120 bp, Artificial Sequence
  ENSG00000196911_61 (sequence is synthesized)
ctgttgtttcatgtttttgtcctggtccctattactctagtttggcttaaagcagaagttagcataccaatctatgttctttttaaaatctctgtttaatgtgggctttgatcatttttc

SEQ ID NO: 710615 - DNA, 120 bp, Artificial Sequence
  ENSG00000196911_62 (sequence is synthesized)
atattgttttcttggtgcctttttgtctcaatcactttcgctgaattcagttatagtgattatagtctttttacttatttccttagtttttgctcataattttagaatttccaatctttt

SEQ ID NO: 710616 - DNA, 120 bp, Artificial Sequence
  ENSG00000196911_63 (sequence is synthesized)
attctctttggatttattcttaagtctttccctaatttccctaaacatttaaggttgttaaatgtttaatttgggaaggctaaaaatttaccttgaagtaccatttcagctgcattccac

SEQ ID NO: 710617 - DNA, 120 bp, Artificial Sequence
  ENSG00000196911_64 (sequence is synthesized)
ttgaagtaccatttcagctgcattccacaagttattcagctctaagtattttaaagtttatattatgatttattcgtgacctatgaaaattgacagaccgttagcaagactaataaagaa

SEQ ID NO: 710618 - DNA, 64 bp, Artificial Sequence
  ENSG00000196911_65 (sequence is synthesized)
agaaatgtacttttaaatttcagaccttaaaaatatgccactaacttctaagttgtgatgtgat

SEQ ID NO: 710619 - DNA, 120 bp, Artificial Sequence
  ENSG00000196911_66 (sequence is synthesized)
ccttaaaaatatgccactaacttctaagttgtgatgtgattacatgagtttgaaattcgttgatacttgctttatgatctgatatgtgttggttttagtgaaatggcccatgtgtgtaag

SEQ ID NO: 710620 - DNA, 120 bp, Artificial Sequence
  ENSG00000196911_67 (sequence is synthesized)
aaaagaatgtgttttgttaattgattcatgtcttttacatactagtctgcttaattcatcagtttctaactcgccagtttctaagagaggtgtgttaaaatctcccaagatgattggtgg

SEQ ID NO: 710621 - DNA, 120 bp, Artificial Sequence
  ENSG00000196911_68 (sequence is synthesized)
attttgaattttccatatagttctgacgatttttttgtgttttatatgttttttacattattttgtgcatagaaatttagaattacatctttttttttaaggttcagatgagaatttgta

SEQ ID NO: 710622 - DNA, 120 bp, Artificial Sequence
  ENSG00000196912_0 (sequence is synthesized)
gggcgcgcgagagctgctagggcggtttctctgcctcgggcctgttgggcagggccggctaaggtgcgcgtgctcgctggttctaacccttctgttgggcgtttctgcggagaggcggga

SEQ ID NO: 710623 - DNA, 120 bp, Artificial Sequence
  ENSG00000196912_1 (sequence is synthesized)
ggcgctgagagtctgcgcggaggtccgtgcacagactgctttgcctgttgttgctcttcggaggcggcgatccccgaaggcgagctgaaatacggctgcaggctacaatttgcagccgac

SEQ ID NO: 710624 - DNA, 120 bp, Artificial Sequence
  ENSG00000196912_2 (sequence is synthesized)
gattaaggaagacgacgagcgggagaggtggcccaccctcatggagcgcttgtgctcggatggcttcgcatttccccattactacattaaaccgtatcatctgaagaggatccacagagc

SEQ ID NO: 710625 - DNA, 120 bp, Artificial Sequence
  ENSG00000196912_3 (sequence is synthesized)
tgtcttacgtggtaatctggagaaactgaagtaccttctgctcacgtattatgacgccaataagagagacaggaaggaaaggactgccctacatttggcctgtgccactggccaaccgga

SEQ ID NO: 710626 - DNA, 120 bp, Artificial Sequence
  ENSG00000196912_4 (sequence is synthesized)
aatggtacatctcctggtgtccagaagatgtgagcttaacctctgcgaccgtgaagacaggacacctctgatcaaggctgtacaactgaggcaggaggcttgtgcaactcttctgctgca

SEQ ID NO: 710627 - DNA, 120 bp, Artificial Sequence
  ENSG00000196912_5 (sequence is synthesized)
aaatggcgccgatccaaatattacggatgtctttggaaggactgctctgcactacgctgtgtataatgaagatacatccatgatagaaaaacttctttcacatggtacaaatattgaaga

SEQ ID NO: 710628 - DNA, 120 bp, Artificial Sequence
  ENSG00000196912_6 (sequence is synthesized)
atgcagcaagaatgaatatcagccactgttacttgctgtgagtcgaagaaaagtgaaaatggtggaatttttattaaagaaaaaagcaaatgtaaatgccattgattatcttggcagatc

SEQ ID NO: 710629 - DNA, 120 bp, Artificial Sequence
  ENSG00000196912_7 (sequence is synthesized)
agccctcatacttgctgttactcttggagaaaaagatatagtcattcttcttctgcagcacaatattgatgtgttttctcgagatgtgtatggaaagcttgcagaagattatgccagtga

SEQ ID NO: 710630 - DNA, 120 bp, Artificial Sequence
  ENSG00000196912_8 (sequence is synthesized)
ggctgagaatagagtcatttttgatctaatttatgaatacaaaagaaagagatatgaagatcttcctataaatagcaatccagtgtctcctcagaaacaacgagctgagaaggctacaag

SEQ ID NO: 710631 - DNA, 120 bp, Artificial Sequence
  ENSG00000196912_9 (sequence is synthesized)
tgacgacaaagattctgtttcaaatatagccacagaaataaaggagggacctatatctgggacagtgtcttctcagaaacaaccagctgagaaggctacaagtgacgagaaagattctgt

SEQ ID NO: 710632 - DNA, 120 bp, Artificial Sequence
  ENSG00000196912_10 (sequence is synthesized)
ttcaaatatagccacagaaataaaggagggacaacaatctgggacagtgtctcctcagaaacaatcggcccagaaggttatatttaaaaagaaagtttctcttttgaatattgccacaag

SEQ ID NO: 710633 - DNA, 120 bp, Artificial Sequence
  ENSG00000196912_11 (sequence is synthesized)
aataatgggcggtgggaaatctggaacagtgtcttctcagaaacaaccagcctcaaagactgcaagtgacaagacagattctgctttgaatacagctacagaaataaaggatggactaca

SEQ ID NO: 710634 - DNA, 120 bp, Artificial Sequence
  ENSG00000196912_12 (sequence is synthesized)
atgtgggacagtgtcttctcagaaacaacaagccttgaaggctacaactgacgaggaaggttctgtttctaatatagccacagaaataaaggatggagaaaaatctgggacagtgtcttc

SEQ ID NO: 710635 - DNA, 120 bp, Artificial Sequence
  ENSG00000196912_13 (sequence is synthesized)
tcagaaaaaaccagccttgaaggccacaagtgatgagaaagattctttttcgaatataaccagagaaaaaaaggatggagaaatatctaggacagtgtcttctcagaaaccaccagcctt

SEQ ID NO: 710636 - DNA, 120 bp, Artificial Sequence
  ENSG00000196912_14 (sequence is synthesized)
gaaggctacaagtgtcaaggaagattctgttttgaatatagccagagaaaaaaaggatggagaaaaatctaggacagtgtcttttgagcaaccaccaggcttgaaggctacaagagacga

SEQ ID NO: 710637 - DNA, 120 bp, Artificial Sequence
  ENSG00000196912_15 (sequence is synthesized)
gaaagattctcttttgaatatagccagaggaaaaaaagatggagaaaaaactaggagagtgtcttctcataaacaaccatccttgaaggctacaagtgacaaggaagattctgttccgaa

SEQ ID NO: 710638 - DNA, 120 bp, Artificial Sequence
  ENSG00000196912_16 (sequence is synthesized)
tatggccacagaaacaaaggatgaacaaatatctgggacagtgtcttgtcagaaacaaccagccttgaaggctacaagtgacaagaaagattctgtttcgaatatacccacagaaataaa

SEQ ID NO: 710639 - DNA, 120 bp, Artificial Sequence
  ENSG00000196912_17 (sequence is synthesized)
ggatggacaacaatctggaacagtgtcttctcagaaacaaccggcctggaaggctacaagtgtcaagaaagattctgtttcgaatatagccacagaaataaaggatggacaaatacgtgg

SEQ ID NO: 710640 - DNA, 120 bp, Artificial Sequence
  ENSG00000196912_18 (sequence is synthesized)
gacagtgtcttctcagagacgaccagccttgaagactacaggtgatgagaaagattctgtttcgaatatagccagagaaataaaggatggagaaaaatctgggacagtgtctcctcagaa

SEQ ID NO: 710641 - DNA, 120 bp, Artificial Sequence
  ENSG00000196912_19 (sequence is synthesized)
acaatcggcccagaaggttatatttaaaaagaaagtttctcttttgaatattgccacaagaataacgggcggtgggaaatctggaacagagtatcctgagaatctgcgcaccttgaaggc

SEQ ID NO: 710642 - DNA, 120 bp, Artificial Sequence
  ENSG00000196912_20 (sequence is synthesized)
tacaattgaaaataaagattctgttctgaatacagccaccaaaatgaaggaggtacaaacatccacaccagcagaacaagacttagaaatggcatcagagggagagcaaaagaggcttga

SEQ ID NO: 710643 - DNA, 120 bp, Artificial Sequence
  ENSG00000196912_21 (sequence is synthesized)
agaatatgaaaataaccagccacaggtgaaaaaccaaatacattctagggatgaccttgatgacataattcagtcatctcaaacagtctcagaggacggtgactcgctttgctgtaattg

SEQ ID NO: 710644 - DNA, 120 bp, Artificial Sequence
  ENSG00000196912_22 (sequence is synthesized)
taagaatgtcatattactcattgatcaacatgaaatgaagtgtaaagattgtgttcacctattgaaaattaaaaatacattttgtttatggaaaagattaataaaacttaaagataacca

SEQ ID NO: 710645 - DNA, 120 bp, Artificial Sequence
  ENSG00000196912_23 (sequence is synthesized)
ctgtgagcaacttagagtaaaaattcgaaaactgaaaaataaggctagtgtactacaaaagagaatatctgaaaaagaagaaataaaatcgcagttaaagcatgaaatacttgaattgga

SEQ ID NO: 710646 - DNA, 120 bp, Artificial Sequence
  ENSG00000196912_24 (sequence is synthesized)
gagcaatataggatagaagctgatgtgacaaaaccaattaaaccggctctcaaatcagcagaggtggaattgaagacaggaggaaataattcaaatcaggtttctgaaactgatgaaaaa

SEQ ID NO: 710647 - DNA, 120 bp, Artificial Sequence
  ENSG00000196912_25 (sequence is synthesized)
gaagacctgctgcatgaaaaccgcttgatgcaagatgaaattgccaggctcaggctggaaaaagacacaataaaaaaccaaaacctggaaaagaaatacttaaaagactttgaaattgtg

SEQ ID NO: 710648 - DNA, 120 bp, Artificial Sequence
  ENSG00000196912_26 (sequence is synthesized)
aaaagaaagcatgaagaccttcaaaaggctctaaaacggaatggggaaacattagcaaaaacgatagcctgttatagtggacagcttgctgctctgacagatgaaaacacaacgctccgt

SEQ ID NO: 710649 - DNA, 120 bp, Artificial Sequence
  ENSG00000196912_27 (sequence is synthesized)
tccaaactggagaagcaaagagagagcaggcaaagactggaaacagaaatgcaatcataccgttgtagactgaatgctgctcgatgtgatcatgatcaaagtcactcatcaaaaagagac

SEQ ID NO: 710650 - DNA, 120 bp, Artificial Sequence
  ENSG00000196912_28 (sequence is synthesized)
caagagcttgctttccagggcacagtagataaatgtcgtcacttacaggaaaatttgaattctcatgttctgattctttctctgcaactttctaaagctgagagtaagtccagagtcctc

SEQ ID NO: 710651 - DNA, 120 bp, Artificial Sequence
  ENSG00000196912_29 (sequence is synthesized)
aaaactgagctccattacacaggagaggctctgaaagaaaaggctttggtttttgaacacgtgcaaagtgagctaaagcaaaaacagagtcaaatgaaggacattgaaaaaatgtacaaa

SEQ ID NO: 710652 - DNA, 120 bp, Artificial Sequence
  ENSG00000196912_30 (sequence is synthesized)
agtggatacaatacaatggaaaaatgcatagaaaaacaggaaagattttgtcaactaaaaaaacaaaatatgttgcttcaacagcaactggatgatgctcgcaacaaagctgacaatcaa

SEQ ID NO: 710653 - DNA, 120 bp, Artificial Sequence
  ENSG00000196912_31 (sequence is synthesized)
gaaaaagcaatacttaatattcaagccagatgtgatgctagagtacaaaaccttcaagctgagtgcagaaagcaccgtcttttactagaagaagacaataaaatgttggtcaatgaactg

SEQ ID NO: 710654 - DNA, 120 bp, Artificial Sequence
  ENSG00000196912_32 (sequence is synthesized)
aatcattcgaaagaaaaagaatgccaatatgaaaaagagaaagcagaaagagaagtagctgtgagacagcttcaacaaaaacgagatgatgtcttaaacaaaggatcagcaacaaaagct

SEQ ID NO: 710655 - DNA, 120 bp, Artificial Sequence
  ENSG00000196912_33 (sequence is synthesized)
ctgctggatgcttcatcgcgtcactgcacctatttagaaaatgggatgcaggattcaaggaagaaattagaccagatgagaagtcaatttcaagaaatacaggatcaacttacagctact

SEQ ID NO: 710656 - DNA, 120 bp, Artificial Sequence
  ENSG00000196912_34 (sequence is synthesized)
ataagatgtactaaggagatggaaggcgacacacaaaagcttgaagtagaacatgtgatgatgagaaaaattattaaaaaacaggatgaccaaattgagcggcttgagaaaatcctgcag

SEQ ID NO: 710657 - DNA, 120 bp, Artificial Sequence
  ENSG00000196912_35 (sequence is synthesized)
cattcaagtttgatgctgcaggtgtttgagagctagatgaagcatccagccaaactagactacatggagctccacagtgatcgtcttcacctccagctgtttgcatttacttcttccctc

SEQ ID NO: 710658 - DNA, 120 bp, Artificial Sequence
  ENSG00000196912_36 (sequence is synthesized)
tatcctacatgtgttttccttccccttcagatatcaacctatgaattgcctctaccaaaaagcctacaatattgacacaaacctgggctagtatcccttctatgtcttccaataagtgct

SEQ ID NO: 710659 - DNA, 120 bp, Artificial Sequence
  ENSG00000196912_37 (sequence is synthesized)
gtcttatgcttgtcattgtatgtatgactctgtatgggaattgcctgtttgttttttcagattatagcatacagttgttgaggggcggaccgtatcatctttatcttgtaattccagtgc

SEQ ID NO: 710660 - DNA, 120 bp, Artificial Sequence
  ENSG00000196912_38 (sequence is synthesized)
ttgtcctagtaccttagcacatggttgctgaatacatgaacgaagagtgagaaaccagaagctctgatacttaactgccatgataatgaattcggtgtgcaactatgggcaaattatatt

SEQ ID NO: 710661 - DNA, 120 bp, Artificial Sequence
  ENSG00000196912_39 (sequence is synthesized)
taatagtaattgcatattgtacatatttttcattcttattaacactgataagcttttcagcatatactgactttctcttagttaactgtgaaatcatttagataaagaatataattcttt

SEQ ID NO: 710662 - DNA, 120 bp, Artificial Sequence
  ENSG00000196912_40 (sequence is synthesized)
ttcattctaacttctgaatttaaatctgaatcctctatagcaggggtccccaactcccaggccacacacagttccatgacctgttaggaagcaggctgcacagcaggaggtgagtggcag

SEQ ID NO: 710663 - DNA, 120 bp, Artificial Sequence
  ENSG00000196912_41 (sequence is synthesized)
gcaagcgagtgaagcttcatctgtatttccagccactccctgttgctcacattatcacctgagctctgcctcctgtcagatcagcaaagccattagattctcacaggagtgaaaatccta

SEQ ID NO: 710664 - DNA, 120 bp, Artificial Sequence
  ENSG00000196912_42 (sequence is synthesized)
ctgtgaactgctcgttcaagggatctaggtcacatgctccttatgagactctaatgcctgatgatatgtcattgtctcctatctcttcacgatgggaccatctagttacagaaaaacaag

SEQ ID NO: 710665 - DNA, 120 bp, Artificial Sequence
  ENSG00000196912_43 (sequence is synthesized)
ctcaggactcccattgattctccattatgatgagttgtgtaattatttcattatgtattacaatgtagtcataataggaataaagtgcacaatagatgtaatacgcttgaatcaccatcc

SEQ ID NO: 710666 - DNA, 120 bp, Artificial Sequence
  ENSG00000196912_44 (sequence is synthesized)
tgaaaccatcccccaaacccccatctgtggaaaaattatctttcacaaaactgctgcctggtgccaaaaaggctggggactgctgctctatagcttctgcactagaatctactaatgagt

SEQ ID NO: 710667 - DNA, 120 bp, Artificial Sequence
  ENSG00000196912_45 (sequence is synthesized)
aaaatttaaatcaataactagttttaaaagcataacaagaatatgtgctgtctggctgcagtggctcatgcctgtattctcagcactttgggaggccagtgcaggtggatcacttgaggt

SEQ ID NO: 710668 - DNA, 80 bp, Artificial Sequence
  ENSG00000196912_46 (sequence is synthesized)
ctccatctcaaatgcaaaacaaaacagaaagaatacatgctgacgaaaaaaatctaagacaataaaattgtattactagg

SEQ ID NO: 710669 - DNA, 120 bp, Artificial Sequence
  ENSG00000196912_47 (sequence is synthesized)
tgacgaaaaaaatctaagacaataaaattgtattactaggctgttaacatgatattttgtttcccgttaaatgtgtgacatgcaaaagtatttattaaatgaaaatattttttatctttt

SEQ ID NO: 710670 - DNA, 120 bp, Artificial Sequence
  ENSG00000196912_48 (sequence is synthesized)
cagaaagtcacctctgagagccaaatgtctgactatagaaaggagagtcaaagaatgataacgacatctcaggaaaattgtgaaaataatcagcagccggatgtggataaccctttcaaa

SEQ ID NO: 710671 - DNA, 120 bp, Artificial Sequence
  ENSG00000196912_49 (sequence is synthesized)
gaaagattctcttttgaatatagccagaggaaaaaaagatggagaaaaaactaggagagtccgggtagataagaaattctcttccctgaataaatctgcggggggctcgttgaagctgca

SEQ ID NO: 710672 - DNA, 120 bp, Artificial Sequence
  ENSG00000196912_50 (sequence is synthesized)
agcactgtagtatgaaaattgtatcagttatgataattagtatgtctttgtgaagccaaaaaagtttcatttgtaagctatatcgaaatacatcatttttctacattattcctaaatttt

SEQ ID NO: 710673 - DNA, 120 bp, Artificial Sequence
  ENSG00000196912_51 (sequence is synthesized)
gcatattatcaccaaaacacaggtagaaaatgacacagtagcccaatcgtctacttttgtgattgctaagaatttgtgtaattataccttcagaagtttgtttagaatttacatgattta

SEQ ID NO: 710674 - DNA, 120 bp, Artificial Sequence
  ENSG00000196914_0 (sequence is synthesized)
gagacgccgccgcctccgcctcccggaccagggcttccaggccgggccggacgggcatctcccgcccctcgcggggagcgtcggggaggagccgccgcctctggcgattgcggaagagtc

SEQ ID NO: 710675 - DNA, 120 bp, Artificial Sequence
  ENSG00000196914_1 (sequence is synthesized)
cgccgcctctggcgattgcggaagagtccgggcctcaaagggatggggagcagtccgcggcgctgagagacccgggtccctgtcacctcgggccgcgggacctctccgccggcgccagcg

SEQ ID NO: 710676 - DNA, 120 bp, Artificial Sequence
  ENSG00000196914_2 (sequence is synthesized)
gctcgtcccagcaccgggagcctggtgagggcggcgagcacagaaggagccccgggcccgggacatggaatcgcgcgagcccggcgcgggacggccggagacgcggccaacgctgcggcc

SEQ ID NO: 710677 - DNA, 120 bp, Artificial Sequence
  ENSG00000196914_3 (sequence is synthesized)
acgagcagccggcagccccagatagagagccgggagggagggccccggcccttgccgcggcggggagttcgaggccccgagactccggaggaggagccgacacccgtccgtgagctgatc

SEQ ID NO: 710678 - DNA, 120 bp, Artificial Sequence
  ENSG00000196914_4 (sequence is synthesized)
ccgccccagccccggcgggagtcccgggtccccttcccactgcgcgcggatttccctctctgaggaagtttatccttgtgccttctggaggatttctctctagctcgactcactctggac

SEQ ID NO: 710679 - DNA, 120 bp, Artificial Sequence
  ENSG00000196914_5 (sequence is synthesized)
tgactcgctccctggctttctcagttcgttttgggagataacttgttttgctccaagccgcatccgttgaccccttacagtcggatggtctagatgactgaatggagttttgagttggac

SEQ ID NO: 710680 - DNA, 120 bp, Artificial Sequence
  ENSG00000196914_6 (sequence is synthesized)
ttttgtgtccctgacggagttgggcctgatcccagagcactgggggtggggaggaggtgttactgtaaaatgcaagttggataaaaggaggacctctcgccaagggccccaatgagtggc

SEQ ID NO: 710681 - DNA, 120 bp, Artificial Sequence
  ENSG00000196914_7 (sequence is synthesized)
acacagtctactatcaccgacaggtttcccctcaaaaaacctataaggcatggaagtattttgaaccgagagtcaccaacagataagaagcagaaagttgagcgcattgcatcacatgat

SEQ ID NO: 710682 - DNA, 120 bp, Artificial Sequence
  ENSG00000196914_8 (sequence is synthesized)
tttgaccccacagatagctcctccaagaagacaaagtctagttcagaggagagtagatccgagatatatggtcttgttcagcgttgcgtaatcatccagaaagatgacaatggatttggg

SEQ ID NO: 710683 - DNA, 120 bp, Artificial Sequence
  ENSG00000196914_9 (sequence is synthesized)
ctgacggtcagtggagacaatccagtcttcgtacagtctgtcaaagaagatggagcagccatgcgggctggagtacagacaggtgatcgaatcatcaaggtgaatggaactctggtgact

SEQ ID NO: 710684 - DNA, 120 bp, Artificial Sequence
  ENSG00000196914_10 (sequence is synthesized)
cattcaaatcatctggaggtggtgaagctaatcaaatctggttcctatgtagctctcactgttcagggacgcccacctgggtcgccccagattccacttgccgactctgaagtagagccg

SEQ ID NO: 710685 - DNA, 120 bp, Artificial Sequence
  ENSG00000196914_11 (sequence is synthesized)
tcagtcattggacatatgtctcccatcatgacatctcctcattcacctggagcatctgggaatatggagagaatcactagtcctgtgctcatgggggaggaaaacaatgtggttcataac

SEQ ID NO: 710686 - DNA, 120 bp, Artificial Sequence
  ENSG00000196914_12 (sequence is synthesized)
cagaaagtagaaattctgagaaaaatgttacagaaagaacaggaacggctacagttattgcaggaagattacaaccgaacacctgcccaaagattgctaaaagagatccaagaggccaag

SEQ ID NO: 710687 - DNA, 120 bp, Artificial Sequence
  ENSG00000196914_13 (sequence is synthesized)
aaacacattcctcagctgcaagagcagttatccaaagccacaggctctgctcaggatggagctgtagttacaccctccagacctttaggggacaccctaacagtcagtgaggcagaaaca

SEQ ID NO: 710688 - DNA, 120 bp, Artificial Sequence
  ENSG00000196914_14 (sequence is synthesized)
gatcctggagatgtactgggcaggactgactgtagcagtggagatgcttctcggcccagtagtgacaatgcagatagtcccaagagtggcccaaaagagagaatttatctagaggaaaac

SEQ ID NO: 710689 - DNA, 120 bp, Artificial Sequence
  ENSG00000196914_15 (sequence is synthesized)
ccagagaaaagtgaaacaattcaggacactgacactcaatcacttgtcggaagtccctcaacccgtatagcacctcatattattggagcagaagatgatgattttggtactgaacatgaa

SEQ ID NO: 710690 - DNA, 120 bp, Artificial Sequence
  ENSG00000196914_16 (sequence is synthesized)
cagatcaatggacagtgcagctgtttccagagcattgaattactaaaatctcgcccggctcatttggctgttttcttacaccatgtagtttcacaatttgaccctgcgactttgctctgt

SEQ ID NO: 710691 - DNA, 120 bp, Artificial Sequence
  ENSG00000196914_17 (sequence is synthesized)
tatctctattcagacctgtataaacataccaattccaaagaaactcgtcgcatcttccttgagtttcatcagttctttctagatcgatcagcacacctgaaagtttctgttcctgatgaa

SEQ ID NO: 710692 - DNA, 120 bp, Artificial Sequence
  ENSG00000196914_18 (sequence is synthesized)
atgtctgcagatctagaaaagagaagacctgagctcattcctgaggatctgcatcgccactatatccaaactatgcaagaaagagtccatccagaagttcaaaggcacttagaagatttt

SEQ ID NO: 710693 - DNA, 120 bp, Artificial Sequence
  ENSG00000196914_19 (sequence is synthesized)
cggcagaaacgtagtatgggactgaccttggctgaaagcgagctgactaaacttgatgcagagcgagacaaggaccgattgactttggagaaggagcggacatgtgcagaacagattgtt

SEQ ID NO: 710694 - DNA, 120 bp, Artificial Sequence
  ENSG00000196914_20 (sequence is synthesized)
gccaaaattgaagaagtattgatgactgctcaggctgtagaggaagataagagctccaccatgcagtatgttattctcatgtatatgaagcatttgggagtaaaagtgaaagagcctcga

SEQ ID NO: 710695 - DNA, 120 bp, Artificial Sequence
  ENSG00000196914_21 (sequence is synthesized)
aatttggagcacaaacggggtcggattggatttcttcccaaaatcaagcaaagtatgaagaaagataaagaaggggaagaaaaagggaagcgaagaggattccccagcatcctgggaccc

SEQ ID NO: 710696 - DNA, 120 bp, Artificial Sequence
  ENSG00000196914_22 (sequence is synthesized)
ccacggagaccaagccgtcatgacaacagtgcaattggcagagccatggaactacagaaggcgcgccaccctaagcacttatccacaccctcatctgtgagtcctgaacctcaggactct

SEQ ID NO: 710697 - DNA, 120 bp, Artificial Sequence
  ENSG00000196914_23 (sequence is synthesized)
gccaagttgcgccagagtgggttagcaaatgaaggaacagacgctggatacctgcctgccaattccatgtcttctgtagcttcaggggcctctttttcccaggaaggagggaaagagaat

SEQ ID NO: 710698 - DNA, 120 bp, Artificial Sequence
  ENSG00000196914_24 (sequence is synthesized)
gatacaggatcaaagcaagttggagaaacatcagcacctggagacaccttagatggcacacctcgtactctcaatactgtctttgatttcccaccacctccattagaccaagtgcaggag

SEQ ID NO: 710699 - DNA, 120 bp, Artificial Sequence
  ENSG00000196914_25 (sequence is synthesized)
gaggaatgtgaagtagaaagggtgactgaacatgggacaccaaagccctttcgaaagtttgacagtgtagcttttggagaaagtcaaagtgaggatgaacaatttgaaaatgacttagag

SEQ ID NO: 710700 - DNA, 120 bp, Artificial Sequence
  ENSG00000196914_26 (sequence is synthesized)
acagatccacccaactggcagcagcttgttagtcgagaagtgttactgggactaaaaccttgtgaaatcaaaagacaggaagtgattaatgaattgttctacactgaaagagctcatgtt

SEQ ID NO: 710701 - DNA, 120 bp, Artificial Sequence
  ENSG00000196914_27 (sequence is synthesized)
cgaacactgaaggttcttgatcaagtgttctatcagcgagtatccagagaaggaattctgtcaccctcagagctacggaaaattttttcaaacttggaagatattcttcaacttcatatt

SEQ ID NO: 710702 - DNA, 120 bp, Artificial Sequence
  ENSG00000196914_28 (sequence is synthesized)
ggattgaatgaacaaatgaaggctgttcgaaagagaaatgagacctctgttatcgatcagattggggaagatttgctgacatggttcagcggaccaggagaggagaaattgaaacatgct

SEQ ID NO: 710703 - DNA, 120 bp, Artificial Sequence
  ENSG00000196914_29 (sequence is synthesized)
gctgctaccttttgcagtaaccaacctttcgccctggaaatgatcaaatctcgtcagaaaaaggattctcgatttcagacttttgtgcaagatgctgaaagtaatccactgtgtcgtcgt

SEQ ID NO: 710704 - DNA, 120 bp, Artificial Sequence
  ENSG00000196914_30 (sequence is synthesized)
cttcaactgaaggatattattcccactcaaatgcaaaggcttactaagtacccacttctgttggataatattgccaaatacacagaatggccaacagaaagggagaaggtgaagaaagct

SEQ ID NO: 710705 - DNA, 120 bp, Artificial Sequence
  ENSG00000196914_31 (sequence is synthesized)
gcagatcactgtcgtcagatcttaaattatgtaaatcaggctgtcaaggaggcagaaaacaagcagcgcctagaagattatcagcgtcgccttgatacctccagcctgaagttgtcagag

SEQ ID NO: 710706 - DNA, 120 bp, Artificial Sequence
  ENSG00000196914_32 (sequence is synthesized)
tacccaaatgttgaagagctcaggaatttggatttaacaaaaaggaagatgattcatgaagggccattggtttggaaggtgaatagagataaaactattgatttatacacgttgctgctg

SEQ ID NO: 710707 - DNA, 120 bp, Artificial Sequence
  ENSG00000196914_33 (sequence is synthesized)
gaagacattcttgtattgttacaaaagcaggatgatagactggttttaaggtgtcatagtaagattctggcatctacagctgatagcaaacacacgtttagccctgtcattaagttgagt

SEQ ID NO: 710708 - DNA, 120 bp, Artificial Sequence
  ENSG00000196914_34 (sequence is synthesized)
acagtgttggttcgacaagtggcaacagataacaaagctttattcgtcatttccatgtcagacaatggcgctcagatttatgaactggtggcacagacagtttctgaaaagactgtctgg

SEQ ID NO: 710709 - DNA, 120 bp, Artificial Sequence
  ENSG00000196914_35 (sequence is synthesized)
caggacctaatctgtcggatggctgcatcagtgaaggagcaatccacaaagccaattccattaccacagtcaacacctggcgaaggagataatgatgaagaagatccttcaaaattaaaa

SEQ ID NO: 710710 - DNA, 120 bp, Artificial Sequence
  ENSG00000196914_36 (sequence is synthesized)
gaggagcagcatggcatttcagtcactggtttgcagagtccagacagagatttgggattagaatctaccttaatatcgtcaaaacctcagtctcattcactgagtacctctgggaaatca

SEQ ID NO: 710711 - DNA, 120 bp, Artificial Sequence
  ENSG00000196914_37 (sequence is synthesized)
gaggtacgtgatctgtttgtggctgagagacagtttgcaaaggaacaacatacagatgggacactaaaggaagttggagaagattatcaaatcgcaatcccagattcacacctgcctgtc

SEQ ID NO: 710712 - DNA, 120 bp, Artificial Sequence
  ENSG00000196914_38 (sequence is synthesized)
tcagaagaacggtgggcattggatgcactaagaaatttgggtttgttgaagcagttgctggtgcaacagctaggtttgactgagaagagcgttcaggaagactggcaacatttcccaaga

SEQ ID NO: 710713 - DNA, 120 bp, Artificial Sequence
  ENSG00000196914_39 (sequence is synthesized)
tacagaacagcctctcaggggccgcagacagacagtgtcatccagaactctgaaaatattaaggcctatcattctggtgaaggacatatgccctttagaactggaactggtgacattgca

SEQ ID NO: 710714 - DNA, 120 bp, Artificial Sequence
  ENSG00000196914_40 (sequence is synthesized)
acttgttacagtccacggacttcaactgaatcttttgctccacgggattcagtgggactggcaccccaggatagccaggcaagtaacattttagtaatggaccacatgattatgacccca

SEQ ID NO: 710715 - DNA, 120 bp, Artificial Sequence
  ENSG00000196914_41 (sequence is synthesized)
gagatgcctaccatggagccagaagggggtcttgatgacagtggagagcacttttttgatgcccgtgaagcacatagtgatgagaatccatcagaaggtgatggagcagttaacaaggaa

SEQ ID NO: 710716 - DNA, 120 bp, Artificial Sequence
  ENSG00000196914_42 (sequence is synthesized)
gagaaggatgttaatttacgcatctcaggaaactatttgatccttgatggctatgacccagtgcaggagagttccacagatgaggaggttgcttcctcacttaccctgcagcccatgaca

SEQ ID NO: 710717 - DNA, 120 bp, Artificial Sequence
  ENSG00000196914_43 (sequence is synthesized)
cctgctgtggaatccacccaccagcagcaacattctcctcagaatactcactccgatggggcaatttcaccattcacccccgaatttctggtccagcagcgctggggagctatggagtat

SEQ ID NO: 710718 - DNA, 120 bp, Artificial Sequence
  ENSG00000196914_44 (sequence is synthesized)
tcctgttttgagatccagagtccctcctcttgtgcagattcacagagccagatcatggagtacattcataagatagaggctgaccttgaacacttaaagaaggtggaggaaagttacacc

SEQ ID NO: 710719 - DNA, 120 bp, Artificial Sequence
  ENSG00000196914_45 (sequence is synthesized)
attctttgccaaaggctggctggatcagccctcacagacaagcactcagataaaagttagagccgcatgtcctggaggtgactgcaggttgttggatttggagtatcggccgtgtctcac

SEQ ID NO: 710720 - DNA, 120 bp, Artificial Sequence
  ENSG00000196914_46 (sequence is synthesized)
cacatcctggctccagtgtggatgcagagagagtgtgacagaggatctgcctgtgaaccacctgggattagtcaagtcccaaggtgcccagagtgggactagttcttcacagtgtggcag

SEQ ID NO: 710721 - DNA, 120 bp, Artificial Sequence
  ENSG00000196914_47 (sequence is synthesized)
ctgcactaatctgtttgtgagggaatatccattccctcactctactctcctcactatcggaaattcattttgattcagaataaaaaccaaatgtatagagctttgggtgtaggatatgaa

SEQ ID NO: 710722 - DNA, 120 bp, Artificial Sequence
  ENSG00000196914_48 (sequence is synthesized)
attgtacttagatttaagaaaaagagaaaatcagatgtatttatttgacttcattccgtatttgaaagcacattttaatttttatttgccttgttttgttttaattgagtagtgagagtt

SEQ ID NO: 710723 - DNA, 120 bp, Artificial Sequence
  ENSG00000196914_49 (sequence is synthesized)
ttagacctttgtctttagtacacccaaggatcaactgctcctgaagcaaagaggtcaggatggagtatgcagaagttgggtagagaggttaagaagaggaggaagtgagacggggaaggg

SEQ ID NO: 710724 - DNA, 120 bp, Artificial Sequence
  ENSG00000196914_50 (sequence is synthesized)
aggagcaccttgcttcactatacagtattccaagctctctgctgtccagtaggctgcttctctgagggtcacctcaaaggtatgctatgccgtgtggctcttatgtgcccaggtggtgtg

SEQ ID NO: 710725 - DNA, 120 bp, Artificial Sequence
  ENSG00000196914_51 (sequence is synthesized)
gtcagagagtggatgggcttcctcccgccctgaggcaagcacctcttctctgtagctgggatcaaccacaattaataggaatcctcaacatactaaatagcaggcacttgaaaatgggtg

SEQ ID NO: 710726 - DNA, 120 bp, Artificial Sequence
  ENSG00000196914_52 (sequence is synthesized)
tgttttcttccattgtcgtcttttctattgagggttgggatttgggtgggagaggaaagcaaattttattttcttgactataaatttgttattcttggtatcatttcatttttataatta

SEQ ID NO: 710727 - DNA, 120 bp, Artificial Sequence
  ENSG00000196914_53 (sequence is synthesized)
tacattagacattggcacttgtgtaaaactgtccctgcagattgagcaggaagtaaaaacaaatggaaatgcttcggatagtggcaggggtgggggttgctaaggaaagggtgggatggg

SEQ ID NO: 710728 - DNA, 120 bp, Artificial Sequence
  ENSG00000196914_54 (sequence is synthesized)
agtgggtaaagagtttgggaaggttatctaactgaatcactactgagttgaatcatggctatcattagccacaggtactgctgattataaggccagtaaaattttagtacctggaggttt

SEQ ID NO: 710729 - DNA, 120 bp, Artificial Sequence
  ENSG00000196914_55 (sequence is synthesized)
gactctaatttttgcactgatggtgccaaagggccctgagtcaaaaggatagccaagggtggagtggaaaaagatatggtgaaggcagaactgctcacaccagctccagaagcacgtcct

SEQ ID NO: 710730 - DNA, 120 bp, Artificial Sequence
  ENSG00000196914_56 (sequence is synthesized)
ctgacttcactgccgcagctctttccacacggggccgtgattgaccctaaaaattgcagaccagcacatacactggacactgcaggcaaggtgttggtaactgcctgctctaggatgaat

SEQ ID NO: 710731 - DNA, 120 bp, Artificial Sequence
  ENSG00000196914_57 (sequence is synthesized)
agtagcgttagcagcaccctacagagggtaagtttcagaattgtaatttgagaactccttcaattatattgactttctttggttttccttgtgcattaggtatatattttttgaagtatt

SEQ ID NO: 710732 - DNA, 120 bp, Artificial Sequence
  ENSG00000196914_58 (sequence is synthesized)
tttgccaactaaaatgaagtctgtaaattctgttaataaacaaggagttcatccgttgctcacatctttcattggtgccctctgaactctgtgggttgctaggatgtaattttaatgctt

SEQ ID NO: 710733 - DNA, 120 bp, Artificial Sequence
  ENSG00000196914_59 (sequence is synthesized)
ccctgcagtccaaagatgattttttcaccacaaatggtaagggatgcccacctacttttataaacaccactgcaacttaacaagtttatttatctatgtccagatttctgtttctgtcct

SEQ ID NO: 710734 - DNA, 120 bp, Artificial Sequence
  ENSG00000196914_60 (sequence is synthesized)
aaattgatctgtgtttttaggtggatcaacttggatctttagacctcatctataaattgaaattatatttttagtcataagccaagtacaatctaactcagaatgggattaaaaatttta

SEQ ID NO: 710735 - DNA, 120 bp, Artificial Sequence
  ENSG00000196914_61 (sequence is synthesized)
gaagcagaagctaatatataaatgaagtttgggatttggaactttctgtatctcttaggaggaacaagtaaaaaccaaatggttacattgtgctgctagaaataatgtcattctcaatta

SEQ ID NO: 710736 - DNA, 120 bp, Artificial Sequence
  ENSG00000196914_62 (sequence is synthesized)
aaagggttacacctgtagccacttgacactaacaccatcgagggcaattaatcaggagaaaagtaaatataaaaactttgctcttaacgtcacacactacagggtaattatgtaattctc

SEQ ID NO: 710737 - DNA, 120 bp, Artificial Sequence
  ENSG00000196914_63 (sequence is synthesized)
tagcactcaattaagaagcttgtaggttagcaaaatttcagtttctctagttcagccagtgtcttgtccttagtaattatttgctttccctgcagttcaatttctccttggaactctaac

SEQ ID NO: 710738 - DNA, 120 bp, Artificial Sequence
  ENSG00000196914_64 (sequence is synthesized)
aggactaactggaaaaatactttgaccatagctctagtacttccaaataaattcatatctagattttcaaacaaagccccaagatgaagtctaattctgaaaatatctcacaatttttga

SEQ ID NO: 710739 - DNA, 120 bp, Artificial Sequence
  ENSG00000196914_65 (sequence is synthesized)
atgttctttttatcttaccgacctaacttctcttttccctcccaacttggcctcccacacgttccatttcattttggccattatagtcacatccgtttgactttggttgtgacatcttcc

SEQ ID NO: 710740 - DNA, 120 bp, Artificial Sequence
  ENSG00000196914_66 (sequence is synthesized)
tttcaggatgatggaattagatgcagtctgtctttgagtgagactggtcaccatcagaggagttttttctaagtgacgtgactagaagttgaaatctacttccctgctaaagggcacagg

SEQ ID NO: 710741 - DNA, 120 bp, Artificial Sequence
  ENSG00000196914_67 (sequence is synthesized)
ggtggtgtacaaagaaagctaccttcccagagcaagcaggctgcattttagctatggaagtgacctgctgtgacactgtgctctcttctgtgggcttaatggttcctttgctatgaagtg

SEQ ID NO: 710742 - DNA, 120 bp, Artificial Sequence
  ENSG00000196914_68 (sequence is synthesized)
gcaaattacatgtagagtgtctccttccttttcagagaacagttaatcaaggcaaatcagcaagcccccaaagtgctgtaatttaacatcatgattaccaccttcgaagctatatatttt

SEQ ID NO: 710743 - DNA, 120 bp, Artificial Sequence
  ENSG00000196914_69 (sequence is synthesized)
gcatactttaaaatcacctaacttggactgcttgaattacattggcttttagaaccgaaattgtaactatgtattgtatttcatgggaggtatattttatgagctttttggctttctttt

SEQ ID NO: 710744 - DNA, 120 bp, Artificial Sequence
  ENSG00000196914_70 (sequence is synthesized)
ttcccacagcaactgccaatgaaggatgaatcccctttttaaaaagttgttgttgttgttgtttatttgattttgagttaggagggataatagagaagtccatttaaaaattatttttag

SEQ ID NO: 710745 - DNA, 120 bp, Artificial Sequence
  ENSG00000196914_71 (sequence is synthesized)
aagctaaagaaagtaattatgcttcctgtgaattgtcttttactggcatctttgttttcctctttgatgttagtaaatttggtgtaatacgtggggcttccatatttcaaagtggaagct

SEQ ID NO: 710746 - DNA, 120 bp, Artificial Sequence
  ENSG00000196914_72 (sequence is synthesized)
ttcttctctgaagtcgatatatggttttgaattactagagctttggtcagtatttccttccctatatgtcacagagggcaccactgagaactgcgtgcataggacctcaaaatacaaaat

SEQ ID NO: 710747 - DNA, 120 bp, Artificial Sequence
  ENSG00000196914_73 (sequence is synthesized)
tagcagggcctcacagtcagcttcctcatggctagtttttcccccttatattacaatttttgttttataagtcatttttttcctgatatttccaccacttttcagagtcatctacaaaat

SEQ ID NO: 710748 - DNA, 120 bp, Artificial Sequence
  ENSG00000196914_74 (sequence is synthesized)
ttttctttcctcaagaaaagagttccttttgccttattccttatgccttccccactggtattgagggttttgataataaattggtaggaaaaaaaagtacctcctagaaggaagccttcc

SEQ ID NO: 710749 - DNA, 120 bp, Artificial Sequence
  ENSG00000196914_75 (sequence is synthesized)
ccaccatttccaggtgccaactgctaagcagatatattccaaaaatggtaactgtcatgtgcacactgttggttatttttaataagcctcttcctactagaacattttattttccttgtt

SEQ ID NO: 710750 - DNA, 120 bp, Artificial Sequence
  ENSG00000196914_76 (sequence is synthesized)
caccatacaatcatgtactctttaacagaaattgcttttaaaaaatatctggaactatctttaaaaaaactttattaataatcatgtatttttactgatcacattttgaaatgcctaaaa

SEQ ID NO: 710751 - DNA, 120 bp, Artificial Sequence
  ENSG00000196914_77 (sequence is synthesized)
gactttattgttctaattatccagatgtacctttgtaaaatagctcttttatgaattagctgataaggctgtatgtttctggaacaaaatattggtcatctaaaaactttctgttttctg

SEQ ID NO: 710752 - DNA, 120 bp, Artificial Sequence
  ENSG00000196914_78 (sequence is synthesized)
gggtctgggaaaatagaaaataagatttcaaatattaaataagcttaaaggaaccaagcatgtgactttttatttgtattctggttgatttgtcttgtccaagttatattagaaaagttg

SEQ ID NO: 710753 - DNA, 120 bp, Artificial Sequence
  ENSG00000196914_79 (sequence is synthesized)
aggagtcgaggagcctgtaattaattttcctgtcagtgactgtcagacatcttcctgcttattagagcatccctagcaacaaggctaaaccttcatgacagtgctggcaggtgggcttgc

SEQ ID NO: 710754 - DNA, 120 bp, Artificial Sequence
  ENSG00000196914_80 (sequence is synthesized)
cctagcatgtggggcaggtttgttgtttttttaatagctttattgagatattcacatatcatataattcatccatttaaagtgtataatcagatgggttttggtatattattgattttta

SEQ ID NO: 710755 - DNA, 120 bp, Artificial Sequence
  ENSG00000196914_81 (sequence is synthesized)
attgtggtgaaatatatatataacaaaatttgctattgtaactatttttaagtataaagttcagtgaggtaggccagcttttatgacgcacctgaagataactttggttttaatcctacc

SEQ ID NO: 710756 - DNA, 120 bp, Artificial Sequence
  ENSG00000196914_82 (sequence is synthesized)
ctaaatgaagcatatgcctctatttttcctgtccccagtgctgggcttcttcacataccaacatttctgtgcttttaccaacagcattttagctcagaaggctcgcttactttgggcatt

SEQ ID NO: 710757 - DNA, 120 bp, Artificial Sequence
  ENSG00000196914_83 (sequence is synthesized)
tgctgtattttggttttgaaatacttgtaatttgacttattcttgggataatattttagttttcagtcattcaagggcacatttggctgacggagctaataagcgtaataaaatgcttag

SEQ ID NO: 710758 - DNA, 120 bp, Artificial Sequence
  ENSG00000196914_84 (sequence is synthesized)
tagtttataccatcttttagttaaacattttaaagattaagactattcaaatgtactttgcggaaattaacctgtttgtatgcctggctttgtttacaaacatatatctatatctatata

SEQ ID NO: 710759 - DNA, 120 bp, Artificial Sequence
  ENSG00000196914_85 (sequence is synthesized)
tatagatacagatacagatacatatctggtggaacaaagaaatacctgtaccattcccacttgctctttgatagccacctcctaggaatggagacaataaaactctgtatttgcatgtga

SEQ ID NO: 710760 - DNA, 120 bp, Artificial Sequence
  ENSG00000196914_86 (sequence is synthesized)
tagggtgactgaacatgggacaccaaagccctttcgaaagtaagtaaatcttaagcagctttcaataaaggcgcattttaagaaacgtaaccttttttcctctaaagtttcattttaaag

SEQ ID NO: 710761 - DNA, 120 bp, Artificial Sequence
  ENSG00000196914_87 (sequence is synthesized)
gaaaagaaaccctgtataccaatctgttatgtagtataaaagaaagctcttaagaaacactggtcattcaaaagctgtattttgaagtatgtataaaacagccatttgtaggagaggatg

SEQ ID NO: 710762 - DNA, 120 bp, Artificial Sequence
  ENSG00000196914_88 (sequence is synthesized)
aaatttcagtgctaagtcagattcaggaatctgattagaatttattgtaatataaagatttgtgctgtttctcattgtccacctaaagtcttcaaattgaattcactcttttttcttcat

SEQ ID NO: 710763 - DNA, 120 bp, Artificial Sequence
  ENSG00000196914_89 (sequence is synthesized)
ttcaaagtttctcctagccttttgttttaaacaaagaggaaattaaactggacagataatccttgaactcaagaaaatgcaaatgtttctctgattcttattgataatttaaaaggaaaa

SEQ ID NO: 710764 - DNA, 120 bp, Artificial Sequence
  ENSG00000196914_90 (sequence is synthesized)
tgtgttaagccttaaagatatttaagattcatagcattatagatcttaaagttgaaaagtcattgcaacaactaagttatttttatgcatagattttaaatgaggaaggtaaagcccagg

SEQ ID NO: 710765 - DNA, 120 bp, Artificial Sequence
  ENSG00000196914_91 (sequence is synthesized)
gagattgaattcgttaagatcatacagctaataacgtgtaaggaaaaaaattcagttcctggtctttctgtatcgaagtgcagtgttctttatttaccctagcatgtatgtgataaatgt

SEQ ID NO: 710766 - DNA, 120 bp, Artificial Sequence
  ENSG00000196914_92 (sequence is synthesized)
tgctgtaccctttactatccttagcatgtgatatgaataaatatcttgtctctgacaatactgagacataatgaaattataagcctgaccccagaagtgagtgtttataggcaaattaga

SEQ ID NO: 710767 - DNA, 120 bp, Artificial Sequence
  ENSG00000196914_93 (sequence is synthesized)
taaccaaaagtactattatttcttaagagggctcaagttaaaggctatatgatgttggggcttacagttttcttaatgatgtagttgtgataggtgggtattattgtaaacagctggatg

SEQ ID NO: 710768 - DNA, 120 bp, Artificial Sequence
  ENSG00000196914_94 (sequence is synthesized)
tgtttgggaatacactaaaaaaaatagttttgaatgatattttttatttgtcagtattcaactctcagagccagtatgtaggaaaatttcttggaatcagaatgacttcagagatatttc

SEQ ID NO: 710769 - DNA, 120 bp, Artificial Sequence
  ENSG00000196914_95 (sequence is synthesized)
atcctttctaaatgataaataatttattatataattcatttgctacttcactccagctaaagactatgattgatcccatggaattgttctaagtaaggcaacatttcatatctctttcct

SEQ ID NO: 710770 - DNA, 120 bp, Artificial Sequence
  ENSG00000196914_96 (sequence is synthesized)
aagaaactcaaaatacagtgagaaatccagacatataaactattattagacaatgtgaaaagtgaaattagcagtttacaaagagtgctatttctgattctgttcatgccttatactttc

SEQ ID NO: 710771 - DNA, 120 bp, Artificial Sequence
  ENSG00000196914_97 (sequence is synthesized)
cttttactttgcctaaactaaataccccctgtgttgctacataatcgtcatgaacatctttagtggcagtagagtattctgtcagtttgtaattatttgtgtttttgtttagtgtttact

SEQ ID NO: 710772 - DNA, 120 bp, Artificial Sequence
  ENSG00000196914_98 (sequence is synthesized)
agattgtaaagctgtatgagtacaaggaccttctttattattgtattttcaactgttagcaaaatgcttagtaaatatttgttgaatggatgaatgaattgtttagaataagttcctggt

SEQ ID NO: 710773 - DNA, 120 bp, Artificial Sequence
  ENSG00000196914_99 (sequence is synthesized)
aaatgtgctataaaactaccctttgattttccaaagctgtcagtgataaagagtttgaagaaaacatcttgagtttgaggtgtacacggtactgtgtgcgaacttttaattagtgctctg

SEQ ID NO: 710774 - DNA, 120 bp, Artificial Sequence
  ENSG00000196914_100 (sequence is synthesized)
gggttttcatttacacttaacaatttctttgaactaaccattagcattacactatgaaaatcgcaaaagaaatttactctgttacgtatctcttattttttgtacttcaactctagcaaa

SEQ ID NO: 710775 - DNA, 77 bp, Artificial Sequence
  ENSG00000196914_101 (sequence is synthesized)
agatttctcttaaggtatagttttggactctcgccttaatagtgtgttgccaaaataaagatattctctggcagagt

SEQ ID NO: 710776 - DNA, 120 bp, Artificial Sequence
  ENSG00000196914_102 (sequence is synthesized)
ttcttcagctagaatgaatttctggagaaaggagttgttaggatgattttactgaattcccaatatgccttgtttccattcagcgttatttctgaactaagtaccccctatgttgctaca

SEQ ID NO: 710777 - DNA, 79 bp, Artificial Sequence
  ENSG00000196914_103 (sequence is synthesized)
cagcgttatttctgaactaagtaccccctatgttgctacataattgtcataaacatctttcgtgggctgggcgtggtga

SEQ ID NO: 710778 - DNA, 80 bp, Artificial Sequence
  ENSG00000196914_104 (sequence is synthesized)
ggtgacactggagcgagactctgcctcacatctttagtggcagtattctgtcaaatgtccgtaacatagtttacttacct

SEQ ID NO: 710779 - DNA, 120 bp, Artificial Sequence
  ENSG00000196914_105 (sequence is synthesized)
cagtattctgtcaaatgtccgtaacatagtttacttacctcttctgattctgtttccattcaacttgtgtttgttaaattaaaaaaaaaaagtgtgtatagatctctccaccacactgaa

SEQ ID NO: 710780 - DNA, 120 bp, Artificial Sequence
  ENSG00000196914_106 (sequence is synthesized)
cgtctctttatacatatttacttagtctccatatttctaaaatttctccacctctccattgtactttattttctgatttccctttcaccccaggcccaataaagagagataagctcactt

SEQ ID NO: 710781 - DNA, 120 bp, Artificial Sequence
  ENSG00000196914_107 (sequence is synthesized)
gagatggctgcaggagaaatagggatggtggtaccatggggaggggtcatgtgatggttcttatctcaggcagtagcacatttgaaaatactgaagccaggtgcggtgactcttgattgt

SEQ ID NO: 710782 - DNA, 120 bp, Artificial Sequence
  ENSG00000196914_108 (sequence is synthesized)
aattccagcactttgcaaggccaaggcgggaggatcacttgagcctgggagttcgagaccagcctgagctacatagtgagaccctgcctctacaacaagaacagccaaaataagctgtgt

SEQ ID NO: 710783 - DNA, 120 bp, Artificial Sequence
  ENSG00000196914_109 (sequence is synthesized)
atcatggtgcatgtgtgtagtctgagctacctgggaggctgaggtagtattgctttagtctggggagtccaggctgctgtgagccatcatctcgccactaaactccagcctgggtgacag

SEQ ID NO: 710784 - DNA, 120 bp, Artificial Sequence
  ENSG00000196914_110 (sequence is synthesized)
aaaaaaaaaaaaaaaaaaagatattggcatggtagagtggtgggagtaggattgtgatagtgagtgtcccccacaatgacgagttctccctcaaatgccatgagtgcctcttgttgagaa

SEQ ID NO: 710785 - DNA, 120 bp, Artificial Sequence
  ENSG00000196914_111 (sequence is synthesized)
tgagtgcctcttgttgagaaacattgagaaggtgtgaaatttttagaggaagttaaagagatggaggatttcacagatgctaaccgtgagttccaaggtatacaaaagaagaatttgagg

SEQ ID NO: 710786 - DNA, 120 bp, Artificial Sequence
  ENSG00000196914_112 (sequence is synthesized)
gtgtaggatgctttggatattgaacacctgagtgggagtctttggcttcttgtggtgactttgtgaacaaggataattagcaggatggggattggtctggatggtctttgaggtacatta

SEQ ID NO: 710787 - DNA, 120 bp, Artificial Sequence
  ENSG00000196914_113 (sequence is synthesized)
tgatgatgaaggtgtgagtgttgggggagaactggggtgggagcttactaagaactcacaaaaataaagacttcatcttcattcttacaaatgaacacagctccatgtctctcagcattc

SEQ ID NO: 710788 - DNA, 120 bp, Artificial Sequence
  ENSG00000196914_114 (sequence is synthesized)
ctcctccctctgtccaccattcctctccttcttttctcatgacccttcttctttccctacatcctcctcttcctcgctttcgtcgtcctgcctcacccctcctccatctcctcatctttc

SEQ ID NO: 710789 - DNA, 120 bp, Artificial Sequence
  ENSG00000196914_115 (sequence is synthesized)
tgctctaccttcctctccctttctctcttttcttcttccttccttcatctgtctgtctgtatgtttctctgcataacaatccactatatatattttttagggtctaccatgtttcacaca

SEQ ID NO: 710790 - DNA, 120 bp, Artificial Sequence
  ENSG00000196914_116 (sequence is synthesized)
ttagggtctaccatgtttcacacattttaccagattcttttacattgtccttttttgcttttagctaatttgcaatgcagattattttatttattttatttatttatttttgagacggag

SEQ ID NO: 710791 - DNA, 120 bp, Artificial Sequence
  ENSG00000196914_117 (sequence is synthesized)
ctactcactgaatattattaactaacaacttagcaaaagtgcagttcaaaataaatgcaaaagagtaatagcatttaatctggtaatttggatttatttattttttttcttttgagacga

SEQ ID NO: 710792 - DNA, 85 bp, Artificial Sequence
  ENSG00000196914_118 (sequence is synthesized)
tgagacgagggtccccttggcacactgcaacctccacatcccaggctcaagcaattcttcaacctcagcctcctgagtagctggg

SEQ ID NO: 710793 - DNA, 89 bp, Artificial Sequence
  ENSG00000196914_119 (sequence is synthesized)
tgggactacaggcatgcaccaccatgacctggctaatttttttgttttatgtagaggcagggtttcgccatgcaagcggtccacctgcc

SEQ ID NO: 710794 - DNA, 120 bp, Artificial Sequence
  ENSG00000196914_120 (sequence is synthesized)
acaggtgtgagccaccgtgcccggccagtaatttggatttttgacatgcttttagcaaagtttctagtaaattattgtggaattagtgctaattcgtataatctttgttttattgaagta

SEQ ID NO: 710795 - DNA, 120 bp, Artificial Sequence
  ENSG00000196914_121 (sequence is synthesized)
ttgaagtacaataaatatagtacaataaatacgttaatatggtaagttgcacaaattttaagtgtacatcttgatgaattttaaagtaaatatatgtaacctttatctagtttaaggggc

SEQ ID NO: 710796 - DNA, 120 bp, Artificial Sequence
  ENSG00000196914_122 (sequence is synthesized)
cttcttatcatccctcttgtggtcagtaaaatcatctgacaaatgcctttccaaggatgtcgaatgtatatataaagaaaaagcttaggattgctaagggagtggtattttggtgaggat

SEQ ID NO: 710797 - DNA, 120 bp, Artificial Sequence
  ENSG00000196914_123 (sequence is synthesized)
agaagcttagggcattacttaaagtttttaaattatatgctattcctatacttagtagcattctagcactgaagcctggcatggtggtatgtacctataatgccagctacttgggaggct

SEQ ID NO: 710798 - DNA, 89 bp, Artificial Sequence
  ENSG00000196914_124 (sequence is synthesized)
agcccccacttcaaactggttgggtgcataaaagaactaaaacaccatttcagaactcataactgaaatgtagaaaggtactcaaattt

SEQ ID NO: 710799 - DNA, 120 bp, Artificial Sequence
  ENSG00000196914_125 (sequence is synthesized)
tcagaactcataactgaaatgtagaaaggtactcaaattttcttcaatttattttatattaaattattacaatatcccaaagaattatttatcaagctgctggagtttaacctagctttg

SEQ ID NO: 710800 - DNA, 120 bp, Artificial Sequence
  ENSG00000196914_126 (sequence is synthesized)
gtaaaaaatggagtatctgcaaagtacaataaaaatgtgaggtatgcctgtacctgtaaaaagttgaggaaaagcagaatggtggtttgtaactgtcacatacaaagcgttaatttagaa

SEQ ID NO: 710801 - DNA, 120 bp, Artificial Sequence
  ENSG00000196914_127 (sequence is synthesized)
gaaggcattggccagaaatcataaaagcaaaaatcataaataggcctttagattttactcttgctgtttaaataaaatcattttggaaagtatttttccagtattgtttccttaagatca

SEQ ID NO: 710802 - DNA, 120 bp, Artificial Sequence
  ENSG00000196914_128 (sequence is synthesized)
ctttacatacacagacaatccttgacttactatggttccaacttcgacagtttttttactttacagtggtgggaaagtaatacacattcaatagaaaccatactttgaattttgaatttt

SEQ ID NO: 710803 - DNA, 120 bp, Artificial Sequence
  ENSG00000196914_129 (sequence is synthesized)
aatcttttccggagcttggcaatatgtggtatgttactcttgatgctgggcagcaacagtgagccacagctcctggtcagccatgtgatcacagggtaaacaaccactctacagtgtact

SEQ ID NO: 710804 - DNA, 120 bp, Artificial Sequence
  ENSG00000196914_130 (sequence is synthesized)
gtactgctagatgattttgcccagctgtaggctaatgcaagtgttctgagcacatttaaggtcagctaggccaagctatggtatttggtaggttcagtgtattaaatgctttctcaactt

SEQ ID NO: 710805 - DNA, 120 bp, Artificial Sequence
  ENSG00000196914_131 (sequence is synthesized)
aagatattttcaatttttgatggttttattaggatataagttcatcagaaatcaaggaacatctatacttaaactgcttgtaaaactactgtagaggccgggcgcagtggctcatgccta

SEQ ID NO: 710806 - DNA, 120 bp, Artificial Sequence
  ENSG00000196914_132 (sequence is synthesized)
aaaaaaaaaaaaaaccaaaaaaaactactgtagaactgcttgagtttgggggcattattttctttggtaaacccagctgctttttgtagttgtgtggtgctttgattgactaacatgcta

SEQ ID NO: 710807 - DNA, 120 bp, Artificial Sequence
  ENSG00000196914_133 (sequence is synthesized)
gtgctttgattgactaacatgctaaaaatgctgccagtctccttgttaaacatgttaaatgtcatattcatcatagagtaagaatacaaaattggagtgacctattaaaatattgctttg

SEQ ID NO: 710808 - DNA, 120 bp, Artificial Sequence
  ENSG00000196914_134 (sequence is synthesized)
tatgtgtcctacttgaaaaaatactctgaatttatctacaaatgcgctacaggcgggctttttacaaaatgcctttatgtacaaacttttgggaatatggctttaaatggaagattatat

SEQ ID NO: 710809 - DNA, 120 bp, Artificial Sequence
  ENSG00000196914_135 (sequence is synthesized)
ggaaaacatcttcgtaaaccataaagcaattatctacaagtatagaggctgtattaaaaaacaatgtatttgacttctacgagcacctactagtaaatcactttttaggtgtttaaccat

SEQ ID NO: 710810 - DNA, 120 bp, Artificial Sequence
  ENSG00000196914_136 (sequence is synthesized)
caagccagctccagctgctgcacaggtgaaacagcagtgatttaattttgtttcaacacagaaaacttacggcctgcccatggtcatagtgggttttatactgagtaagaaggaatgcta

SEQ ID NO: 710811 - DNA, 120 bp, Artificial Sequence
  ENSG00000196914_137 (sequence is synthesized)
gctagtatgccaaggatttgcttcccagagtagtaagacagtagttgttgtaaaggcttcagggtgtaagaaaattaaattttaggccagatgtagtggctcatgcccataatcccagca

SEQ ID NO: 710812 - DNA, 120 bp, Artificial Sequence
  ENSG00000196914_138 (sequence is synthesized)
ctgaaaaaaaaaaaaatgaaaatttagtctcagtcttcaggcattttgtatcttatattctccaaatgtcagcttgtctgtgtaatttataagtaacgtaggctgaaaggtaataggttg

SEQ ID NO: 710813 - DNA, 74 bp, Artificial Sequence
  ENSG00000196914_139 (sequence is synthesized)
tgtaatttataagtaacgtaggctgaaaggtaataggttgtgataggctacaagcaagaaaacattgcaccaag

SEQ ID NO: 710814 - DNA, 87 bp, Artificial Sequence
  ENSG00000196914_140 (sequence is synthesized)
gcctgggcgacagagcaacactgtctttggaatatgatcagaaaaggtctggttgtgtcaagatcagacctttttaatggagaacca

SEQ ID NO: 710815 - DNA, 120 bp, Artificial Sequence
  ENSG00000196914_141 (sequence is synthesized)
tctggttgtgtcaagatcagacctttttaatggagaaccattgatattccacatagatatgcagttctgtgtattttgtcacttgaaatattgaaaggattctggttgtctgtcactttg

SEQ ID NO: 710816 - DNA, 120 bp, Artificial Sequence
  ENSG00000196914_142 (sequence is synthesized)
caaagtagttaagatacttaaacatggtgttcaacttcttattcctccagcttattgattcttgctattggaaagttaccataagatttaaatctcttattctggttcagtaggatgaat

SEQ ID NO: 710817 - DNA, 120 bp, Artificial Sequence
  ENSG00000196914_143 (sequence is synthesized)
aaatttagtaacaaaatcttacaagtaaagtaactacatctatccttattttttctttgtttcaggtttcccctcaaaaaacctataaggcatggaagtattttgaaccgagagtcacca

SEQ ID NO: 710818 - DNA, 120 bp, Artificial Sequence
  ENSG00000196914_144 (sequence is synthesized)
acagataagaagcagaaagttgagcgcattgcatcacatgattttgaccccacaggtaaaacactattcattctttcaaagagtattgagagtagtgaagttcagaataatagagcttaa

SEQ ID NO: 710819 - DNA, 120 bp, Artificial Sequence
  ENSG00000196914_145 (sequence is synthesized)
gctacccgaaacactcaggaatagttgtttgatctgttttaggactctcacattcctccaattatatcataataaagcctttgcatttagtaggaatgcaagcatttttaacttccaaca

SEQ ID NO: 710820 - DNA, 120 bp, Artificial Sequence
  ENSG00000196914_146 (sequence is synthesized)
ctgtacattccactacagaagtatcattgtagagtatattgtatctttaaatagtgataataatagaaatggttatataataattggagatttggtcagatcaagaactcagtgttaagt

SEQ ID NO: 710821 - DNA, 120 bp, Artificial Sequence
  ENSG00000196914_147 (sequence is synthesized)
tgaatcatggtataagcagtaatatgtcataaaaccaaggctctaacaactcgacacttgcgtagtcatctaaaaattcaattgtgattatggtgaattggagttttagataaatcagtt

SEQ ID NO: 710822 - DNA, 120 bp, Artificial Sequence
  ENSG00000196914_148 (sequence is synthesized)
tcacaaattaatgatggtctcattttagagtaaacaaatgaatagaaatccctttctcttcagtcaaaaagtattctgaacttaaagagctgtctttcaacctaagcagtgtcgatcttt

SEQ ID NO: 710823 - DNA, 120 bp, Artificial Sequence
  ENSG00000196914_149 (sequence is synthesized)
cctagggttgtcaccttaacagactttcagattgatctccttttaaaacatctaggctttttccttttgctttctccttgtaagcttactccatatttgattcatagaaagtgcttggta

SEQ ID NO: 710824 - DNA, 120 bp, Artificial Sequence
  ENSG00000196914_150 (sequence is synthesized)
atcttgcttttttcatttgaaactgatatatattttttgtgcacatactattttattcagttgcctgtccctttgacaagagacgaagtaaatcccgctatctcagatacataaaaataa

SEQ ID NO: 710825 - DNA, 120 bp, Artificial Sequence
  ENSG00000196914_151 (sequence is synthesized)
aaaatattataaatattatctaggaagcacatagataatcattttctgcattttgggtagtaggtaaaatgaaattccaatcatcaatttaggaggctttggtggtgggactatgtatta

SEQ ID NO: 710826 - DNA, 120 bp, Artificial Sequence
  ENSG00000196914_152 (sequence is synthesized)
tgtcacttacagatctccatgaagagagaattttccattctgatgcctaattttgtagtcatggggctcagaggctttcatttacatgattaggtattgtcttgccaataaggtcaaaag

SEQ ID NO: 710827 - DNA, 120 bp, Artificial Sequence
  ENSG00000196914_153 (sequence is synthesized)
tttctgccctatgttcagaaaaatataatcttgttaggtttattttgtatctacatctgtgctgtgcccatctccaaagacagatttaagcaaagatgtatacaatgcttcataatgaga

SEQ ID NO: 710828 - DNA, 120 bp, Artificial Sequence
  ENSG00000196914_154 (sequence is synthesized)
tcattatagcttttagtgcttttgtcatctctacaattatcaggtgatatattttgtatactattcatgtgttgttttgtttgaacatatttttattgcactgtcttttcttcgataaat

SEQ ID NO: 710829 - DNA, 120 bp, Artificial Sequence
  ENSG00000196914_155 (sequence is synthesized)
ctttaaaatatgtcattacctgtgctgtttgtgactattctaagtgctgtcatctgttatgttcatactttgtgtttgcacgatttaacttgatcatgattcattcttttttccccatga

SEQ ID NO: 710830 - DNA, 120 bp, Artificial Sequence
  ENSG00000196914_156 (sequence is synthesized)
atttttccccttacattgtctccatattttctatatctctctccttttctcccgctcttgtgcagatagctcctccaagaagacaaagtctagttcagaggagagtagatccgagatata

SEQ ID NO: 710831 - DNA, 120 bp, Artificial Sequence
  ENSG00000196914_157 (sequence is synthesized)
tggtaagctaatgtagctaattcagccttgccctttggagcttgcttcatggtgttccttttctgttctttttttcctttctttctttctttttaaataactgcagcctttcttgtgtct

SEQ ID NO: 710832 - DNA, 120 bp, Artificial Sequence
  ENSG00000196914_158 (sequence is synthesized)
ccacattgcccatcttctcccgtcttgtttatggtaggaaggtgattatctctaatatgtttgggtcaggttcctccaaataacatgaatgggctttgaattcttgtcatcttcttccca

SEQ ID NO: 710833 - DNA, 120 bp, Artificial Sequence
  ENSG00000196914_159 (sequence is synthesized)
catctcatttgcagagtttggattatgaagaatttgaggaattaagtcttttcctctaagtataatactggtgtaatttagacgtattagcagttctttggaatttttatttcatttttt

SEQ ID NO: 710834 - DNA, 120 bp, Artificial Sequence
  ENSG00000196914_160 (sequence is synthesized)
gtttgtttatttttaattgcctcgtcatgtggaaaagtcattcttgtataatttatccacgatggcaaaaatacgtaagtattttatcttcatagcttgaagaatttgtgcctttgagaa

SEQ ID NO: 710835 - DNA, 120 bp, Artificial Sequence
  ENSG00000196914_161 (sequence is synthesized)
gtttctctgaagcttaatcggaatgggaaaatttcagaatggtaccttttaaataatcttaacaaagagcaagtttaacctgagtggtcaacttttgcagcagatgattgaaatgctaat

SEQ ID NO: 710836 - DNA, 120 bp, Artificial Sequence
  ENSG00000196914_162 (sequence is synthesized)
atttctagactgtgtcctgtcttccaaagatacaataaccatgtttgtgaagttcatacctatttttccttttcctttgcagttttatttgccctctttccttcttttggagtctgatta

SEQ ID NO: 710837 - DNA, 120 bp, Artificial Sequence
  ENSG00000196914_163 (sequence is synthesized)
tttttttttggttttttgttttttgagaaaagtgaataagagaggaattacctggagctaagattttaaaaataatttctgaaagactgataaattatttctttttttaggaagattcca

SEQ ID NO: 710838 - DNA, 120 bp, Artificial Sequence
  ENSG00000196914_164 (sequence is synthesized)
ctttttttaggaagattccaaatttggcctcgaagggaaatcaggtcatctttaatagagccacaaatctatagagcagaagctcccccaggtgcagatagatgtttcctagcttgatat

SEQ ID NO: 710839 - DNA, 120 bp, Artificial Sequence
  ENSG00000196914_165 (sequence is synthesized)
ataggagaggaaaaaatacaggaattgccctcccctttttaagacatttgataattcacatctgctggcacttgagcccatatcagatactttttagtattatgaaagctcagtgtttgg

SEQ ID NO: 710840 - DNA, 120 bp, Artificial Sequence
  ENSG00000196914_166 (sequence is synthesized)
ttctaaaccagttaattcttctatgttagatatatacacatagttctttacttgggtttttgtgaccagtgctttttctgtgtataccttttacagtagttcagcagtaaatgtatactg

SEQ ID NO: 710841 - DNA, 120 bp, Artificial Sequence
  ENSG00000196914_167 (sequence is synthesized)
tgccttgtgacacatcaagtttacgctttttcttccttccagagtattttggctactgataagtaagaactacctaattcctggagactatatttctgttctatataaagagctttctat

SEQ ID NO: 710842 - DNA, 120 bp, Artificial Sequence
  ENSG00000196914_168 (sequence is synthesized)
agtttatcctctccttaggaacatgaacattatctttatagctctattctttttcggtagcctttgcagtgttctatttcgtcttcctctccattttcctagatctgcgatgtgtattta

SEQ ID NO: 710843 - DNA, 120 bp, Artificial Sequence
  ENSG00000196914_169 (sequence is synthesized)
gaagcttgttgtatgctttggatgaagactaacaatttaggaacctctgactagaaatactatactaatatttttcttagcagtgatagaaacattaatactagttcaggcatgccattg

SEQ ID NO: 710844 - DNA, 120 bp, Artificial Sequence
  ENSG00000196914_170 (sequence is synthesized)
gcttggtagtgatagaaacattttaagtggtaattgggaagtaaggtgtggcttctctgtgtgtttgttttttgagaacccttgaaataccttttttggaaggaactgagtccacaagtc

SEQ ID NO: 710845 - DNA, 120 bp, Artificial Sequence
  ENSG00000196914_171 (sequence is synthesized)
ctcaaaaagcactcatcggagggatgagttgattagaacagaattagcatgctaacgtaaatctctttgacattacaaatattttatcacctgtgtgaatagacgtctttagattacgta

SEQ ID NO: 710846 - DNA, 120 bp, Artificial Sequence
  ENSG00000196914_172 (sequence is synthesized)
cagttagcatagatgaaaaagtctctctggggattcagaaaagcttgaaactactgagtagaatcatagcaactggtgacattctgctttagtgtagggtcttattataagcccacttca

SEQ ID NO: 710847 - DNA, 120 bp, Artificial Sequence
  ENSG00000196914_173 (sequence is synthesized)
aactttagagattatacattgctttctcggggtaaaattcattagctgagtacttaacaaaaatgctagttactcacatattatttattttaaactttcttggctttttttttttttttt

SEQ ID NO: 710848 - DNA, 75 bp, Artificial Sequence
  ENSG00000196914_174 (sequence is synthesized)
tttaaatctcgctgtgtggcccaggatggagtataatggcgggatcatgactcactgcagcctcaacctcctggg

SEQ ID NO: 710849 - DNA, 120 bp, Artificial Sequence
  ENSG00000196914_175 (sequence is synthesized)
tagctgggactacaggtgcacaccactgcacccagctgttttgtttgtttgtttgtttttttaatagagatgaggttgttgaaggaatgatttgccaggggaaaaaaaaaaaagaaagaa

SEQ ID NO: 710850 - DNA, 120 bp, Artificial Sequence
  ENSG00000196914_176 (sequence is synthesized)
agcatggcatttcagtcactggtttgcagagtccaggtacactcttctgaagagttcaatggagaatgtgctctattatctgttaaaatgctggccggatgtggtggctcatgcctgtaa

SEQ ID NO: 710851 - DNA, 120 bp, Artificial Sequence
  ENSG00000196914_177 (sequence is synthesized)
tgtcctttgggtaggtttagaaaaactgtcagattgtgtatgtggagccgtttattttgtcatagtacttgagaaactggattttttttttcttttttctgatacttttagataaatttc

SEQ ID NO: 710852 - DNA, 120 bp, Artificial Sequence
  ENSG00000196914_178 (sequence is synthesized)
cacctgatttttttttggaatattaaagccttgaggttaaagaaaataataagagttgttaaaaggcagaattgtgtttaggagactcaatatgtagtgttgcaacactaggaggaaaaa

SEQ ID NO: 710853 - DNA, 120 bp, Artificial Sequence
  ENSG00000196914_179 (sequence is synthesized)
ctacaggtacatattattcactcagtttaaaacttgcggatctgtttatacaacttcagctatagccactataactgctgtgcaaatgactctcaaatcataggcctacccttctttgct

SEQ ID NO: 710854 - DNA, 120 bp, Artificial Sequence
  ENSG00000196914_180 (sequence is synthesized)
gaactccatccagatcttgcaatgttaaactgctgttagatttaagccaaactcatttttttcctatttcttccaaaatttttattccccaatcctatatggtctttaattttagtactt

SEQ ID NO: 710855 - DNA, 120 bp, Artificial Sequence
  ENSG00000196914_181 (sequence is synthesized)
atggtcttcagacatcctgtatgtatgtatgtatttatgtatgcatgtatttatgtatgtatatatgtatgaatgagacagagtcttactctgttgcccaagctgcagtacagaggttaa

SEQ ID NO: 710856 - DNA, 120 bp, Artificial Sequence
  ENSG00000196914_182 (sequence is synthesized)
ctgtaacctcaaactcctgggctcaaactgtgtacccactttggcctcccaagtagctaagactatagacacacgccaccacgcctggctaatttattttggtttttttagagatgggtc

SEQ ID NO: 710857 - DNA, 120 bp, Artificial Sequence
  ENSG00000196914_183 (sequence is synthesized)
tggcctcaagtgatcctccctccttgacctcccaaagtgctgcgattacaggcctgagctaccgtgcccagcacccatgtttattattttatatattaatgcctctgtactgccgttttt

SEQ ID NO: 710858 - DNA, 120 bp, Artificial Sequence
  ENSG00000196914_184 (sequence is synthesized)
ttatatattaatgcctctgtactgccgtttttgtgctgaatctaactttgtgagttgacaaatggaggagctattgcatgggaaactatctgacaatctacaatttattcttagaatttt

SEQ ID NO: 710859 - DNA, 120 bp, Artificial Sequence
  ENSG00000196914_185 (sequence is synthesized)
gttatctttgtttctatagcagtgtttgtgagattacttgatgattttagagcattgtatcagtgatttttcaatcaagagtgattatgcctccgtggacatttgacaaatgtctggaaa

SEQ ID NO: 710860 - DNA, 120 bp, Artificial Sequence
  ENSG00000196914_186 (sequence is synthesized)
cgctgcagctggcatctggtgggtgcatagaggtcaggggtgctgctaagtgtcttagaatgcacgggctagaccctacagccaagaactctctggcgcaaaatgtcaacagtgccgcag

SEQ ID NO: 710861 - DNA, 120 bp, Artificial Sequence
  ENSG00000196914_187 (sequence is synthesized)
ttgagaaaccctgcattatacatttatgaaaattaattaaaaatgaaaacatagagttcgatgatagccttcaattatgtatcattaatggaaatcttgggttagtacttctcaggtata

SEQ ID NO: 710862 - DNA, 120 bp, Artificial Sequence
  ENSG00000196914_188 (sequence is synthesized)
ttagcctctctgctaactttgtcttaccatttctgctcttatttttcctttctcctattgtcttcattcactttttctttaattttttaattgtaaccatttatgtaagccaactttatt

SEQ ID NO: 710863 - DNA, 120 bp, Artificial Sequence
  ENSG00000196914_189 (sequence is synthesized)
gtaagaagttttaagtatgtatgaattaataaaagaatgtacagaagtgtacagaaagtgttaaagtcagataaccaagtgtatagtgagcaaaggatatttactgtttccaaggggagt

SEQ ID NO: 710864 - DNA, 120 bp, Artificial Sequence
  ENSG00000196914_190 (sequence is synthesized)
ggttttttccccccaaaaaaaactcgttgttgtggtctttttctctgccagagtggtacatggccttgaaaatttgtgaacccctactttgaaaataaagtacttcaaaggaaataaaca

SEQ ID NO: 710865 - DNA, 120 bp, Artificial Sequence
  ENSG00000196914_191 (sequence is synthesized)
aaaagaaatctcaccatttaagtgaaccatgtctttttgatgggttggctttattctttttctaaatttgaccaccaggtaatttttctgtttcttttccctgaatgttgccaggacact

SEQ ID NO: 710866 - DNA, 120 bp, Artificial Sequence
  ENSG00000196917_0 (sequence is synthesized)
aaatgtttggatttctccaccaggagggaggacaaacaagctttcttcttgccttctgggcagctttgtgtgctctccagcacggagtccgaggaggaacagcgaagctgaaaatgaaaa

SEQ ID NO: 710867 - DNA, 120 bp, Artificial Sequence
  ENSG00000196917_1 (sequence is synthesized)
ttactctggcgctggacccaatcgctcctctacggcatcaatctcatcggacccccccaccctaccgcctctcagaaatgaccacttttgcaaaattgcatgcatttccaagcttcatcc

SEQ ID NO: 710868 - DNA, 120 bp, Artificial Sequence
  ENSG00000196917_2 (sequence is synthesized)
ggctccaggcttggcctctcccagaggcaggcggcttgtgagacgggctccagagaaaggacctccctgggtctctcatttcctggctgaagtttctcttctcgctgctgtggcagcatc

SEQ ID NO: 710869 - DNA, 120 bp, Artificial Sequence
  ENSG00000196917_3 (sequence is synthesized)
caacccacacacacaggacccgcatcctgggtgatgaagtcagacacgcagcagctgggtgagtgctaacgctcagataagcatctgtgccattgtggggactccctgggctgctctgca

SEQ ID NO: 710870 - DNA, 120 bp, Artificial Sequence
  ENSG00000196917_4 (sequence is synthesized)
cccggacacttgctctgtccccgccatgtacaacgggtcgtgctgccgcatcgagggggacaccatctcccaggtgatgccgccgctgctcattgtggcctttgtgctgggcgcactagg

SEQ ID NO: 710871 - DNA, 120 bp, Artificial Sequence
  ENSG00000196917_5 (sequence is synthesized)
caatggggtcgccctgtgtggtttctgcttccacatgaagacctggaagcccagcactgtttaccttttcaatttggccgtggctgatttcctccttatgatctgcctgccttttcggac

SEQ ID NO: 710872 - DNA, 120 bp, Artificial Sequence
  ENSG00000196917_6 (sequence is synthesized)
agactattacctcagacgtagacactgggcttttggggacattccctgccgagtggggctcttcacgttggccatgaacagggccgggagcatcgtgttccttacggtggtggctgcgga

SEQ ID NO: 710873 - DNA, 120 bp, Artificial Sequence
  ENSG00000196917_7 (sequence is synthesized)
caggtatttcaaagtggtccacccccaccacgcggtgaacactatctccacccgggtggcggctggcatcgtctgcaccctgtgggccctggtcatcctgggaacagtgtatcttttgct

SEQ ID NO: 710874 - DNA, 120 bp, Artificial Sequence
  ENSG00000196917_8 (sequence is synthesized)
ggagaaccatctctgcgtgcaagagacggccgtctcctgtgagagcttcatcatggagtcggccaatggctggcatgacatcatgttccagctggagttctttatgcccctcggcatcat

SEQ ID NO: 710875 - DNA, 120 bp, Artificial Sequence
  ENSG00000196917_9 (sequence is synthesized)
cttattttgctccttcaagattgtttggagcctgaggcggaggcagcagctggccagacaggctcggatgaagaaggcgacccggttcatcatggtggtggcaattgtgttcatcacatg

SEQ ID NO: 710876 - DNA, 120 bp, Artificial Sequence
  ENSG00000196917_10 (sequence is synthesized)
ctacctgcccagcgtgtctgctagactctatttcctctggacggtgccctcgagtgcctgcgatccctctgtccatggggccctgcacataaccctcagcttcacctacatgaacagcat

SEQ ID NO: 710877 - DNA, 120 bp, Artificial Sequence
  ENSG00000196917_11 (sequence is synthesized)
gctggatcccctggtgtattatttttcaagcccctcctttcccaaattctacaacaagctcaaaatctgcagtctgaaacccaagcagccaggacactcaaaaacacaaaggccggaaga

SEQ ID NO: 710878 - DNA, 120 bp, Artificial Sequence
  ENSG00000196917_12 (sequence is synthesized)
gatgccaatttcgaacctcggtcgcaggagttgcatcagtgtggcaaatagtttccaaagccagtctgatgggcaatgggatccccacattgttgagtggcactgaacaagcagaccaac

SEQ ID NO: 710879 - DNA, 120 bp, Artificial Sequence
  ENSG00000196917_13 (sequence is synthesized)
aacactgaggaagatagagtggtgacttagaattaactcgtgctaaggggtcgggggctttgaaaatgccacccccctttcttattgcaagacggcttctcgcacatgaactgcatcctt

SEQ ID NO: 710880 - DNA, 120 bp, Artificial Sequence
  ENSG00000196917_14 (sequence is synthesized)
ctcattctgtcggaaatgaaattcacacaactataccttttggggaggttccagttgattgaagtgagttggctgcattttcttatctgatcacaatggcaggggacagaatgtgcatgg

SEQ ID NO: 710881 - DNA, 120 bp, Artificial Sequence
  ENSG00000196917_15 (sequence is synthesized)
tggcaggggacagaatgtgcatggagtggagcatgtgtgtgttgggaggggggctaggaactgcacagcccttgtgtaattttcgttgtttgtttttgttttgagacagagtctcactct

SEQ ID NO: 710882 - DNA, 67 bp, Artificial Sequence
  ENSG00000196917_16 (sequence is synthesized)
cacaggcgtgagccaccgtgcctggcctcccctgtgtcattttaaatggctaagtaaatgggtatat

SEQ ID NO: 710883 - DNA, 120 bp, Artificial Sequence
  ENSG00000196917_17 (sequence is synthesized)
tcccctgtgtcattttaaatggctaagtaaatgggtatatgtgtttgaatggggcatgttcactctcttaggggctatggggcagttagcagcatttcctatcctctgaccttaaatcat

SEQ ID NO: 710884 - DNA, 120 bp, Artificial Sequence
  ENSG00000196917_18 (sequence is synthesized)
tatcaattttcatctttacatttctttgtacatctgtacattttgtccaaatgtacatctgtacgtctgtcatcattgtgacttcctggtagcccaagaagaacaacaacaaaacaatct

SEQ ID NO: 710885 - DNA, 120 bp, Artificial Sequence
  ENSG00000196917_19 (sequence is synthesized)
gctctgaccttcttcaaatctttgtatttcaaagaaggtgctgagggatctgtttccttgccctggcttctccagtgggatgtgctgagtccaatacaattgcttttataattgcttttg

SEQ ID NO: 710886 - DNA, 120 bp, Artificial Sequence
  ENSG00000196917_20 (sequence is synthesized)
acaacttgtcatgtgactgtgaattgaaattattcacttattttccaagtatttactgaattcgtatttggtggcaggcagtatactgtgtaatttttagtggagggtcattagtcaact

SEQ ID NO: 710887 - DNA, 120 bp, Artificial Sequence
  ENSG00000196917_21 (sequence is synthesized)
cttatgtgacagtaaagttttttgggggggtggggacagagaagttaagagctttcatcctttcacggaatacagtttctagaccgattctgtgtgaacatcagttttgtcctcttattg

SEQ ID NO: 710888 - DNA, 120 bp, Artificial Sequence
  ENSG00000196917_22 (sequence is synthesized)
caagactccctcatacacatgagtttcccaaatgtgtacctggacccctcgaaacagaggactctacgaaatgacaagctgcccctgccctgaattagggggaaacattccaggccaact

SEQ ID NO: 710889 - DNA, 120 bp, Artificial Sequence
  ENSG00000196917_23 (sequence is synthesized)
ctagctcctttctcaagctacaaagtggtgaacatggttctcaactccttaatttatactctctcaaatgcccaggatactctacccacttaagaaccttgccaacttctgggggttggg

SEQ ID NO: 710890 - DNA, 69 bp, Artificial Sequence
  ENSG00000196917_24 (sequence is synthesized)
ggtgaggtgacatcgtgccattgcactccagactgggccacaggagtgaaacgccgtctcaaaaaaaaa

SEQ ID NO: 710891 - DNA, 120 bp, Artificial Sequence
  ENSG00000196917_25 (sequence is synthesized)
agactgggccacaggagtgaaacgccgtctcaaaaaaaaaaaagaactttgccaacttctagttctttggcctcaaaacacccctctaggctgtccctattattccttttttcagaggca

SEQ ID NO: 710892 - DNA, 120 bp, Artificial Sequence
  ENSG00000196917_26 (sequence is synthesized)
ctgtgcagcctagtgatgaaaagtacgagctatagagcattagaagcatcgaagtttgaatctcagctcaagcatttactaggcctgtgatcttagggcagcttgtgtttttagacactg

SEQ ID NO: 710893 - DNA, 120 bp, Artificial Sequence
  ENSG00000196917_27 (sequence is synthesized)
cctcagcctcctgaatagctgggagtacaggcataagccaccacactcagctaatttttaaattttttttatagagacgaggtctcactcactgtgttgcccaagctggtctcaaactcc

SEQ ID NO: 710894 - DNA, 120 bp, Artificial Sequence
  ENSG00000196917_28 (sequence is synthesized)
ctcccaaagtattgcgattgccagcatgagccactgctcccagcctggcatatatatagatatatatagagatatatagatatctatctatctatatatatatatatttttttttttttt

SEQ ID NO: 710895 - DNA, 120 bp, Artificial Sequence
  ENSG00000196917_29 (sequence is synthesized)
tcccaaagtgcttggattacaggtgtaagccaccgcaccccgcccagcctggcagattttatttaatcatttgtagcttcattttcctcgtctgtcaaacagggatactgtaatacaacc

SEQ ID NO: 710896 - DNA, 120 bp, Artificial Sequence
  ENSG00000196917_30 (sequence is synthesized)
tcagtgtgtcattgggcagtttaaatgaatgtacattcctgaggcatcagaactttgttcactgttatatacccaatgcctagaagaggacctgcacatagcaggtgctcagtaaatgtt

SEQ ID NO: 710897 - DNA, 120 bp, Artificial Sequence
  ENSG00000196917_31 (sequence is synthesized)
tgttgaatgaatgattaagtgcatgtaaagcattaagcatagcgcctggcagtaagtgctcaatattatgacttcttatattaacacgttttacatataaagaaatggaggcaagaaagc

SEQ ID NO: 710898 - DNA, 120 bp, Artificial Sequence
  ENSG00000196917_32 (sequence is synthesized)
atttcctttggggtttagagcgcttaagttgttcctctgttatcatgcctgaattcccccgcccctcagttacctggggaagagtaaaggcaagaattcttaccagcattagtcatacat

SEQ ID NO: 710899 - DNA, 120 bp, Artificial Sequence
  ENSG00000196917_33 (sequence is synthesized)
cctcctgataggaatctgcgaaaacacacacttctgcttttagttctattcttagaattctctcctgggctgttgctcctttgttccttcattgtaataaaaatggattctgaaagcaaa

SEQ ID NO: 710900 - DNA, 120 bp, Artificial Sequence
  ENSG00000196923_0 (sequence is synthesized)
gtcagaacactggcggccgatcccaacgaggctccctggagcccgacgcagagcagcgccctggccgggccaagcaggagccggcatcatggattccttcaaagtagtgctggaggggcc

SEQ ID NO: 710901 - DNA, 120 bp, Artificial Sequence
  ENSG00000196923_1 (sequence is synthesized)
agcaccttggggcttccggctgcaagggggcaaggacttcaatgtgcccctctccatttcccggctcactcctgggggcaaagcggcgcaggccggagtggccgtgggtgactgggtgct

SEQ ID NO: 710902 - DNA, 120 bp, Artificial Sequence
  ENSG00000196923_2 (sequence is synthesized)
gagcatcgatggcgagaatgcgggtagcctcacacacatcgaagctcagaacaagatccgggcctgcggggagcgcctcagcctgggcctcagcagggcccagccggttcagagcaaacc

SEQ ID NO: 710903 - DNA, 120 bp, Artificial Sequence
  ENSG00000196923_3 (sequence is synthesized)
gcagaaggcctccgcccccgccgcggaccctccgcggtacacctttgcacccagcgtctccctcaacaagacggcccggccctttggggcgcccccgcccgctgacagcgccccgcagca

SEQ ID NO: 710904 - DNA, 120 bp, Artificial Sequence
  ENSG00000196923_4 (sequence is synthesized)
gaatggacagccgctccgaccgctggtcccagatgccagcaagcagcggctgatggagaacacagaggactggcggccgcggccggggacaggccagtcgcgttccttccgcatccttgc

SEQ ID NO: 710905 - DNA, 120 bp, Artificial Sequence
  ENSG00000196923_5 (sequence is synthesized)
ccacctcacaggcaccgagttcatgcaagacccggatgaggagcacctgaagaaatcaagccaggtgcccaggacagaagccccagccccagcctcatctacaccccaggagccctggcc

SEQ ID NO: 710906 - DNA, 120 bp, Artificial Sequence
  ENSG00000196923_6 (sequence is synthesized)
tggccctaccgcccccagccctaccagccgcccgccctgggctgtggaccctgcgtttgccgagcgctatgccccggacaaaacgagcacagtgctgacccggcacagccagccggccac

SEQ ID NO: 710907 - DNA, 120 bp, Artificial Sequence
  ENSG00000196923_7 (sequence is synthesized)
tgcaggcagctgccggaggggtgccaggagggggcagcaacaacggcaagactcccgtgtgtcaccagtgccacaaggtcatccggggccgctacctggtggcgctgggccacgcgtacc

SEQ ID NO: 710908 - DNA, 120 bp, Artificial Sequence
  ENSG00000196923_8 (sequence is synthesized)
acccggaggagtttgtgtgtagccagtgtgggaaggtcctggaagagggtggcttctttgaggagaagggcgccatcttctgcccaccatgctatgacgtgcgctatgcacccagctgtg

SEQ ID NO: 710909 - DNA, 120 bp, Artificial Sequence
  ENSG00000196923_9 (sequence is synthesized)
ccaagtgcaagaagaagattacaggcgagatcatgcacgccctgaagatgacctggcacgtgcactgctttacctgtgctgcctgcaagacgcccatccggaacagggccttctacatgg

SEQ ID NO: 710910 - DNA, 120 bp, Artificial Sequence
  ENSG00000196923_10 (sequence is synthesized)
aggagggcgtgccctattgcgagcgagactatgagaagatgtttggcacgaaatgccatggctgtgacttcaagatcgacgctggggaccgcttcctggaggccctgggcttcagctggc

SEQ ID NO: 710911 - DNA, 120 bp, Artificial Sequence
  ENSG00000196923_11 (sequence is synthesized)
atgacacctgcttcgtctgtgcgatatgtcagatcaacctggaaggaaagaccttctactccaagaaggacaggcctctctgcaagagccatgccttctctcatgtgtgagccccttctg

SEQ ID NO: 710912 - DNA, 120 bp, Artificial Sequence
  ENSG00000196923_12 (sequence is synthesized)
cccacagctgccgcggtggcccctagcctgaggggcctggagtcgtggccctgcatttctgggtagggctggcaatggttgccttaaccctggctcctggcccgagcctggggctccctg

SEQ ID NO: 710913 - DNA, 120 bp, Artificial Sequence
  ENSG00000196923_13 (sequence is synthesized)
ggccctgccccacccaccttatcctcccaccccactccctccaccaccacagcacaccggtgctggccacaccagccccctttcacctccagtgccacaataaacctgtacccagctgtg

SEQ ID NO: 710914 - DNA, 120 bp, Artificial Sequence
  ENSG00000196923_14 (sequence is synthesized)
tggcggtgaatagataagcatcgtgactggggaagctcaggtgagcaccacctgagggagagggtctggcagtgaataaataagcagtgtgactgggaaattgtgaagctcaggtgagcg

SEQ ID NO: 710915 - DNA, 120 bp, Artificial Sequence
  ENSG00000196923_15 (sequence is synthesized)
ccaccacctcctgggttgctttagtgtccagcagctgcctagaactatgttgaatgaagagctctctgggttctggaagtgggacagctttgggtggggcagtgttaccaccgtcagcct

SEQ ID NO: 710916 - DNA, 120 bp, Artificial Sequence
  ENSG00000196923_16 (sequence is synthesized)
gaagaaatcaagggaaaagtatgtcctggagctgcagagcccacgctacacccgcctccgggactggcaccaccagcgctctgcccacgtgctcaacgtgcagtcgtagcccggccctct

SEQ ID NO: 710917 - DNA, 120 bp, Artificial Sequence
  ENSG00000196923_17 (sequence is synthesized)
ccagccggctgccctctctgcctccctctttctgttcctcctgcccagggcacccccttagtgcctccagcttctgcctacctcaccccccctttcgtgcccctggcctgagcctcctgc

SEQ ID NO: 710918 - DNA, 120 bp, Artificial Sequence
  ENSG00000196923_18 (sequence is synthesized)
tggcctggccctggccgcccacctgggttcatctgacactgccttccctctttgccctgtggtactgctgtctgccaggtctgtgctgccttgggcatggaataaacattctcagccctg

SEQ ID NO: 710919 - DNA, 120 bp, Artificial Sequence
  ENSG00000196923_19 (sequence is synthesized)
ggggaggccgcgccagtttagtccctcggcccacccctggttgcaaagaacctcaagcctggattcaggcacccctcaccgttccagtcccaaggggaggggggctgctcctgtctttcc

SEQ ID NO: 710920 - DNA, 120 bp, Artificial Sequence
  ENSG00000196923_20 (sequence is synthesized)
aaagtgaggtccgccagccagcagcccaggccagcctgacaaaatacctgcctcctatggcttgggcgtgctcaggggctgcccgtgcctgcctggcccctgtccaaggagccggcatca

SEQ ID NO: 710921 - DNA, 120 bp, Artificial Sequence
  ENSG00000196923_21 (sequence is synthesized)
tggtatcctgagctggcccggcctgcctgcctgcccgcccaccatgctggccactcaccttctcttctctcctctcaggagccggcatcatggattccttcaaagtagtgctggaggggc

SEQ ID NO: 710922 - DNA, 120 bp, Artificial Sequence
  ENSG00000196923_22 (sequence is synthesized)
cctcacaggcaccgagttcatgcaagacccggatgaggagcacctgaagaaatcaagctagagaccgcacaccagctaactggacattgctaggagaagctgcccttcccatccctaccc

SEQ ID NO: 710923 - DNA, 120 bp, Artificial Sequence
  ENSG00000196923_23 (sequence is synthesized)
cagtgggacctggaatccaactcggcagtttccacgcccccagtcatctcccgtggggccagcaggacccaggttggggggtggggccatgtcaggaagctcagccatgcagggccttga

SEQ ID NO: 710924 - DNA, 120 bp, Artificial Sequence
  ENSG00000196923_24 (sequence is synthesized)
tcgccctcctgtcctctcacctacccgcccagcagggctcctggcctcacccttacccactccctcccatcactgtaacccaaacccacatgcaccaaatcctgggaggggctgccccca

SEQ ID NO: 710925 - DNA, 120 bp, Artificial Sequence
  ENSG00000196923_25 (sequence is synthesized)
ccgcccacccccagtgtggggttctgagccacaccctccccacagacagccgctccgaccgctggtcccagatgccagcaagcagcggctgatggagaacacagaggactggcggccgcg

SEQ ID NO: 710926 - DNA, 120 bp, Artificial Sequence
  ENSG00000196923_26 (sequence is synthesized)
gagggctgctgggaaacccacagtccaggtctctccccgagtgagccctccgggtccttaccagcgtaataaatgggctgctgtactggcctcaccctgcattagtcaggatgctcttaa

SEQ ID NO: 710927 - DNA, 120 bp, Artificial Sequence
  ENSG00000196923_27 (sequence is synthesized)
tgcacggtcctggcaccacgcatgtccgcctgtctgtccgcctgtctgtccgcctgctgcctcccgccgccggcgctgcgtgctcgcccgcactcggtcagccctcggtcctgcgtggac

SEQ ID NO: 710928 - DNA, 120 bp, Artificial Sequence
  ENSG00000196923_28 (sequence is synthesized)
tgagatcgccactcccaaatgggccccttgaaacctgagtcgtcctctccccgtagcctccaaatagatgtagggggtggggtgggggtggggggctggagctgccgctgtcctctgctg

SEQ ID NO: 710929 - DNA, 120 bp, Artificial Sequence
  ENSG00000196923_29 (sequence is synthesized)
ggagaatggagttgccatccgcgtgatggggatggctgtgggaggagaggtttggggtgagggaatcaggaactgagtgctggacatggcaagtctgaaggcgcagtggtcgtccactca

SEQ ID NO: 710930 - DNA, 120 bp, Artificial Sequence
  ENSG00000196923_30 (sequence is synthesized)
gagaccttggagttggagatggaggtgtgggagtcctgaacagttagatgtagtgtttaccgcgagaaggaacagggcttgcggccagccctcctgtgttcccgtgacccagggcagggc

SEQ ID NO: 710931 - DNA, 120 bp, Artificial Sequence
  ENSG00000196923_31 (sequence is synthesized)
agtgggccctcatggagaagactgcattcgagcagaaacttgaagggggtgaggggtgagcctagagatatctggggcagagcagtccaggcagaggggacagccggtgtcaagcccagg

SEQ ID NO: 710932 - DNA, 120 bp, Artificial Sequence
  ENSG00000196924_0 (sequence is synthesized)
gcgtggaggcgcgtcgcgcgcagcggacgccgacagaatccccgaggcgcctggcgcgggcgcgggcgcgaaggcgatccgggcgccaccccgcggtcatcggtcaccggtcgctctcag

SEQ ID NO: 710933 - DNA, 120 bp, Artificial Sequence
  ENSG00000196924_1 (sequence is synthesized)
gaacagcagcgcaacctctgctccctgcctcgcctcccgcgcgcctaggtgcctgcgactttaattaaagggccgtcccctcgccgaggctgcagcaccgcccccccggcttctcgcgcc

SEQ ID NO: 710934 - DNA, 120 bp, Artificial Sequence
  ENSG00000196924_2 (sequence is synthesized)
tcaaaatgagtagctcccactctcgggcgggccagagcgcagcaggcgcggctccgggcggcggcgtcgacacgcgggacgccgagatgccggccaccgagaaggacctggcggaggacg

SEQ ID NO: 710935 - DNA, 120 bp, Artificial Sequence
  ENSG00000196924_3 (sequence is synthesized)
cgccgtggaagaagatccagcagaacactttcacgcgctggtgcaacgagcacctgaagtgcgtgagcaagcgcatcgccaacctgcagacggacctgagcgacgggctgcggcttatcg

SEQ ID NO: 710936 - DNA, 120 bp, Artificial Sequence
  ENSG00000196924_4 (sequence is synthesized)
cgctgttggaggtgctcagccagaagaagatgcaccgcaagcacaaccagcggcccactttccgccaaatgcagcttgagaacgtgtcggtggcgctcgagttcctggaccgcgagagca

SEQ ID NO: 710937 - DNA, 120 bp, Artificial Sequence
  ENSG00000196924_5 (sequence is synthesized)
tcaaactggtgtccatcgacagcaaggccatcgtggacgggaacctgaagctgatcctgggcctcatctggaccctgatcctgcactactccatctccatgcccatgtgggacgaggagg

SEQ ID NO: 710938 - DNA, 120 bp, Artificial Sequence
  ENSG00000196924_6 (sequence is synthesized)
aggatgaggaggccaagaagcagacccccaagcagaggctcctgggctggatccagaacaagctgccgcagctgcccatcaccaacttcagccgggactggcagagcggccgggccctgg

SEQ ID NO: 710939 - DNA, 120 bp, Artificial Sequence
  ENSG00000196924_7 (sequence is synthesized)
gcgccctggtggacagctgtgccccgggcctgtgtcctgactgggactcttgggacgccagcaagcccgttaccaatgcgcgagaggccatgcagcaggcggatgactggctgggcatcc

SEQ ID NO: 710940 - DNA, 120 bp, Artificial Sequence
  ENSG00000196924_8 (sequence is synthesized)
cccaggtgatcacccccgaggagattgtggaccccaacgtggacgagcactctgtcatgacctacctgtcccagttccccaaggccaagctgaagccaggggctcccttgcggcccaaac

SEQ ID NO: 710941 - DNA, 120 bp, Artificial Sequence
  ENSG00000196924_9 (sequence is synthesized)
tgaacccgaagaaagcccgtgcctacgggccaggcatcgagcccacaggcaacatggtgaagaagcgggcagagttcactgtggagaccagaagtgctggccagggagaggtgctggtgt

SEQ ID NO: 710942 - DNA, 120 bp, Artificial Sequence
  ENSG00000196924_10 (sequence is synthesized)
acgtggaggacccggccggacaccaggaggaggcaaaagtgaccgccaataacgacaagaaccgcaccttctccgtctggtacgtccccgaggtgacggggactcataaggttactgtgc

SEQ ID NO: 710943 - DNA, 120 bp, Artificial Sequence
  ENSG00000196924_11 (sequence is synthesized)
tctttgctggccagcacatcgccaagagccccttcgaggtgtacgtggataagtcacagggtgacgccagcaaagtgacagcccaaggtcccggcctggagcccagtggcaacatcgcca

SEQ ID NO: 710944 - DNA, 120 bp, Artificial Sequence
  ENSG00000196924_12 (sequence is synthesized)
acaagaccacctactttgagatctttacggcaggagctggcacgggcgaggtcgaggttgtgatccaggaccccatgggacagaagggcacggtagagcctcagctggaggcccggggcg

SEQ ID NO: 710945 - DNA, 120 bp, Artificial Sequence
  ENSG00000196924_13 (sequence is synthesized)
acagcacataccgctgcagctaccagcccaccatggagggcgtccacaccgtgcacgtcacgtttgccggcgtgcccatccctcgcagcccctacactgtcactgttggccaagcctgta

SEQ ID NO: 710946 - DNA, 120 bp, Artificial Sequence
  ENSG00000196924_14 (sequence is synthesized)
acccgagtgcctgccgggcggttggccggggcctccagcccaagggtgtgcgggtgaaggagacagctgacttcaaggtgtacacaaagggcgctggcagtggggagctgaaggtcaccg

SEQ ID NO: 710947 - DNA, 120 bp, Artificial Sequence
  ENSG00000196924_15 (sequence is synthesized)
tgaagggccccaagggagaggagcgcgtgaagcagaaggacctgggggatggcgtgtatggcttcgagtattaccccatggtccctggaacctatatcgtcaccatcacgtggggtggtc

SEQ ID NO: 710948 - DNA, 120 bp, Artificial Sequence
  ENSG00000196924_16 (sequence is synthesized)
agaacatcgggcgcagtcccttcgaagtgaaggtgggcaccgagtgtggcaatcagaaggtacgggcctggggccctgggctggagggcggcgtcgttggcaagtcagcagactttgtgg

SEQ ID NO: 710949 - DNA, 120 bp, Artificial Sequence
  ENSG00000196924_17 (sequence is synthesized)
tggaggctatcggggacgacgtgggcacgctgggcttctcggtggaagggccatcgcaggctaagatcgaatgtgacgacaagggcgacggctcctgtgatgtgcgctactggccgcagg

SEQ ID NO: 710950 - DNA, 120 bp, Artificial Sequence
  ENSG00000196924_18 (sequence is synthesized)
aggctggcgagtatgccgttcacgtgctgtgcaacagcgaagacatccgcctcagccccttcatggctgacatccgtgacgcgccccaggacttccacccagacagggtgaaggcacgtg

SEQ ID NO: 710951 - DNA, 120 bp, Artificial Sequence
  ENSG00000196924_19 (sequence is synthesized)
ggcctggattggagaagacaggtgtggccgtcaacaagccagcagagttcacagtggatgccaagcacggtggcaaggccccacttcgggtccaagtccaggacaatgaaggctgccctg

SEQ ID NO: 710952 - DNA, 120 bp, Artificial Sequence
  ENSG00000196924_20 (sequence is synthesized)
tggaggcgttggtcaaggacaacggcaatggcacttacagctgctcctacgtgcccaggaagccggtgaagcacacagccatggtgtcctggggaggcgtcagcatccccaacagcccct

SEQ ID NO: 710953 - DNA, 120 bp, Artificial Sequence
  ENSG00000196924_21 (sequence is synthesized)
tcagggtgaatgtgggagctggcagccaccccaacaaggtcaaagtatacggccccggagtagccaagacagggctcaaggcccacgagcccacctacttcactgtggactgcgccgagg

SEQ ID NO: 710954 - DNA, 120 bp, Artificial Sequence
  ENSG00000196924_22 (sequence is synthesized)
ctggccagggggacgtcagcatcggcatcaagtgtgcccctggagtggtaggccccgccgaagctgacatcgacttcgacatcatccgcaatgacaatgacaccttcacggtcaagtaca

SEQ ID NO: 710955 - DNA, 120 bp, Artificial Sequence
  ENSG00000196924_23 (sequence is synthesized)
cgccccggggggctggcagctacaccattatggtcctctttgctgaccaggccacgcccaccagccccatccgagtcaaggtggagccctctcatgacgccagtaaggtgaaggccgagg

SEQ ID NO: 710956 - DNA, 120 bp, Artificial Sequence
  ENSG00000196924_24 (sequence is synthesized)
gccctggcctcagtcgcactggtgtcgagcttggcaagcccacccacttcacagtaaatgccaaagctgctggcaaaggcaagctggacgtccagttctcaggactcaccaagggggatg

SEQ ID NO: 710957 - DNA, 120 bp, Artificial Sequence
  ENSG00000196924_25 (sequence is synthesized)
cagtgcgagatgtggacatcatcgaccaccatgacaacacctacacagtcaagtacacgcctgtccagcagggtccagtaggcgtcaatgtcacttatggaggggatcccatccctaaga

SEQ ID NO: 710958 - DNA, 120 bp, Artificial Sequence
  ENSG00000196924_26 (sequence is synthesized)
gccctttctcagtggcagtatctccaagcctggacctcagcaagatcaaggtgtctggcctgggagagaaggtggacgttggcaaagaccaggagttcacagtcaaatcaaagggtgctg

SEQ ID NO: 710959 - DNA, 120 bp, Artificial Sequence
  ENSG00000196924_27 (sequence is synthesized)
gtggtcaaggcaaagtggcatccaagattgtgggcccctcgggtgcagcggtgccctgcaaggtggagccaggcctgggggctgacaacagtgtggtgcgcttcctgccccgtgaggaag

SEQ ID NO: 710960 - DNA, 120 bp, Artificial Sequence
  ENSG00000196924_28 (sequence is synthesized)
ggccctatgaggtggaggtgacctatgacggcgtgcccgtgcctggcagcccctttcctctggaagctgtggcccccaccaagcctagcaaggtgaaggcgtttgggccggggctgcagg

SEQ ID NO: 710961 - DNA, 120 bp, Artificial Sequence
  ENSG00000196924_29 (sequence is synthesized)
gaggcagtgcgggctcccccgcccgcttcaccatcgacaccaagggcgccggcacaggtggcctgggcctgacggtggagggcccctgtgaggcgcagctcgagtgcttggacaatgggg

SEQ ID NO: 710962 - DNA, 120 bp, Artificial Sequence
  ENSG00000196924_30 (sequence is synthesized)
atggcacatgttccgtgtcctacgtgcccaccgagcccggggactacaacatcaacatcctcttcgctgacacccacatccctggctccccattcaaggcccacgtggttccctgctttg

SEQ ID NO: 710963 - DNA, 120 bp, Artificial Sequence
  ENSG00000196924_31 (sequence is synthesized)
acgcatccaaagtcaagtgctcaggccccgggctggagcgggccaccgctggggaggtgggccaattccaagtggactgctcgagcgcgggcagcgcggagctgaccattgagatctgct

SEQ ID NO: 710964 - DNA, 120 bp, Artificial Sequence
  ENSG00000196924_32 (sequence is synthesized)
cggaggcggggcttccggccgaggtgtacatccaggaccacggtgatggcacgcacaccattacctacattcccctctgccccggggcctacaccgtcaccatcaagtacggcggccagc

SEQ ID NO: 710965 - DNA, 120 bp, Artificial Sequence
  ENSG00000196924_33 (sequence is synthesized)
ccgtgcccaacttccccagcaagctgcaggtggaacctgcggtggacacttccggtgtccagtgctatgggcctggtattgagggccagggtgtcttccgtgaggccaccactgagttca

SEQ ID NO: 710966 - DNA, 120 bp, Artificial Sequence
  ENSG00000196924_34 (sequence is synthesized)
gtgtggacgcccgggctctgacacagaccggagggccgcacgtcaaggcccgtgtggccaacccctcaggcaacctgacggagacctacgttcaggaccgtggcgatggcatgtacaaag

SEQ ID NO: 710967 - DNA, 120 bp, Artificial Sequence
  ENSG00000196924_35 (sequence is synthesized)
ccctcccgggtgcgtgtccacgggccaggcatccaaagtggcaccaccaacaagcccaacaagttcactgtggagaccaggggagctggcacgggcggcctgggcctggctgtagagggc

SEQ ID NO: 710968 - DNA, 120 bp, Artificial Sequence
  ENSG00000196924_36 (sequence is synthesized)
ccctccgaggccaagatgtcctgcatggataacaaggacggcagctgctcggtcgagtacatcccttatgaggctggcacctacagcctcaacgtcacctatggtggccatcaagtgcca

SEQ ID NO: 710969 - DNA, 120 bp, Artificial Sequence
  ENSG00000196924_37 (sequence is synthesized)
ggcagtcctttcaaggtccctgtgcatgatgtgacagatgcgtccaaggtcaagtgctctgggcccggcctgagcccaggcatggttcgtgccaacctccctcagtccttccaggtggac

SEQ ID NO: 710970 - DNA, 120 bp, Artificial Sequence
  ENSG00000196924_38 (sequence is synthesized)
acaagcaaggctggtgtggccccattgcaggtcaaagtgcaagggcccaaaggcctggtggagccagtggacgtggtagacaacgctgatggcacccagaccgtcaattatgtgcccagc

SEQ ID NO: 710971 - DNA, 120 bp, Artificial Sequence
  ENSG00000196924_39 (sequence is synthesized)
cgagaagggccctacagcatctcagtactgtatggagatgaagaggtaccccggagccccttcaaggtcaaggtgctgcctactcatgatgccagcaaggtgaaggccagtggccccggg

SEQ ID NO: 710972 - DNA, 120 bp, Artificial Sequence
  ENSG00000196924_40 (sequence is synthesized)
ctcaacaccactggcgtgcctgccagcctgcccgtggagttcaccatcgatgcaaaggacgccggggagggcctgctggctgtccagatcacggatcccgaaggcaagccgaagaagaca

SEQ ID NO: 710973 - DNA, 120 bp, Artificial Sequence
  ENSG00000196924_41 (sequence is synthesized)
cacatccaagacaaccatgacggcacgtatacagtggcctacgtgccagacgtgacaggtcgctacaccatcctcatcaagtacggtggtgacgagatccccttctccccgtaccgcgtg

SEQ ID NO: 710974 - DNA, 120 bp, Artificial Sequence
  ENSG00000196924_42 (sequence is synthesized)
cgtgccgtgcccaccggggacgccagcaagtgcactgtcacagtgtcaatcggaggtcacgggctaggtgctggcatcggccccaccattcagattggggaggagacggtgatcactgtg

SEQ ID NO: 710975 - DNA, 120 bp, Artificial Sequence
  ENSG00000196924_43 (sequence is synthesized)
gacactaaggcggcaggcaaaggcaaagtgacgtgcaccgtgtgcacgcctgatggctcagaggtggatgtggacgtggtggagaatgaggacggcactttcgacatcttctacacggcc

SEQ ID NO: 710976 - DNA, 120 bp, Artificial Sequence
  ENSG00000196924_44 (sequence is synthesized)
ccccagccgggcaaatacgtcatctgtgtgcgctttggtggcgagcacgtgcccaacagccccttccaagtgacggctctggctggggaccagccctcggtgcagccccctctacggtct

SEQ ID NO: 710977 - DNA, 120 bp, Artificial Sequence
  ENSG00000196924_45 (sequence is synthesized)
cagcagctggccccacagtacacctacgcccagggcggccagcagacttgggccccggagaggcccctggtgggtgtcaatgggctggatgtgaccagcctgaggccctttgaccttgtc

SEQ ID NO: 710978 - DNA, 120 bp, Artificial Sequence
  ENSG00000196924_46 (sequence is synthesized)
atccccttcaccatcaagaagggcgagatcacaggggaggttcggatgccctcaggcaaggtggcgcagcccaccatcactgacaacaaagacggcaccgtgaccgtgcggtatgcaccc

SEQ ID NO: 710979 - DNA, 120 bp, Artificial Sequence
  ENSG00000196924_47 (sequence is synthesized)
agcgaggctggcctgcacgagatggacatccgctatgacaacatgcacatcccaggaagccccttgcagttctatgtggattacgtcaactgtggccatgtcactgcctatgggcctggc

SEQ ID NO: 710980 - DNA, 120 bp, Artificial Sequence
  ENSG00000196924_48 (sequence is synthesized)
ctcacccatggagtagtgaacaagcctgccaccttcaccgtcaacaccaaggatgcaggagaggggggcctgtctctggccattgagggcccgtccaaagcagaaatcagctgcactgac

SEQ ID NO: 710981 - DNA, 120 bp, Artificial Sequence
  ENSG00000196924_49 (sequence is synthesized)
aaccaggatgggacatgcagcgtgtcctacctgcctgtgctgccgggggactacagcattctagtcaagtacaatgaacagcacgtcccaggcagccccttcactgctcgggtcacaggt

SEQ ID NO: 710982 - DNA, 120 bp, Artificial Sequence
  ENSG00000196924_50 (sequence is synthesized)
gacgactccatgcgtatgtcccacctaaaggtcggctctgctgccgacatccccatcaacatctcagagacggatctcagcctgctgacggccactgtggtcccgccctcgggccgggag

SEQ ID NO: 710983 - DNA, 120 bp, Artificial Sequence
  ENSG00000196924_51 (sequence is synthesized)
gagccctgtttgctgaagcggctgcgtaatggccacgtggggatttcattcgtgcccaaggagacgggggagcacctggtgcatgtgaagaaaaatggccagcacgtggccagcagcccc

SEQ ID NO: 710984 - DNA, 120 bp, Artificial Sequence
  ENSG00000196924_52 (sequence is synthesized)
atcccggtggtgatcagccagtcggaaattggggatgccagtcgtgttcgggtctctggtcagggccttcacgaaggccacacctttgagcctgcagagtttatcattgatacccgcgat

SEQ ID NO: 710985 - DNA, 120 bp, Artificial Sequence
  ENSG00000196924_53 (sequence is synthesized)
gcaggctatggtgggctcagcctgtccattgagggccccagcaaggtggacatcaacacagaggacctggaggacgggacgtgcagggtcacctactgccccacagagccaggcaactac

SEQ ID NO: 710986 - DNA, 120 bp, Artificial Sequence
  ENSG00000196924_54 (sequence is synthesized)
atcatcaacatcaagtttgccgaccagcacgtgcctggcagccccttctctgtgaaggtgacaggcgagggccgggtgaaagagagcatcacccgcaggcgtcgggctccttcagtggcc

SEQ ID NO: 710987 - DNA, 120 bp, Artificial Sequence
  ENSG00000196924_55 (sequence is synthesized)
aacgttggtagtcattgtgacctcagcctgaaaatccctgaaattagcatccaggatatgacagcccaggtgaccagcccatcgggcaagacccatgaggccgagatcgtggaaggggag

SEQ ID NO: 710988 - DNA, 120 bp, Artificial Sequence
  ENSG00000196924_56 (sequence is synthesized)
aaccacacctactgcatccgctttgttcccgctgagatgggcacacacacagtcagcgtgaagtacaagggccagcacgtgcctgggagccccttccagttcaccgtggggcccctaggg

SEQ ID NO: 710989 - DNA, 120 bp, Artificial Sequence
  ENSG00000196924_57 (sequence is synthesized)
gaagggggagcccacaaggtccgagctgggggccctggcctggagagagctgaagctggagtgccagccgaattcagtatctggacccgggaagctggtgctggaggcctggccattgct

SEQ ID NO: 710990 - DNA, 120 bp, Artificial Sequence
  ENSG00000196924_58 (sequence is synthesized)
gtcgagggccccagcaaggctgagatctcttttgaggaccgcaaggacggctcctgtggtgtggcttatgtggtccaggagccaggtgactacgaagtctcagtcaagttcaacgaggaa

SEQ ID NO: 710991 - DNA, 120 bp, Artificial Sequence
  ENSG00000196924_59 (sequence is synthesized)
cacattcccgacagccccttcgtggtgcctgtggcttctccgtctggcgacgcccgccgcctcactgtttctagccttcaggagtcagggctaaaggtcaaccagccagcctcttttgca

SEQ ID NO: 710992 - DNA, 120 bp, Artificial Sequence
  ENSG00000196924_60 (sequence is synthesized)
gtcagcctgaacggggccaagggggcgatcgatgccaaggtgcacagcccctcaggagccctggaggagtgctatgtcacagaaattgaccaagataagtatgctgtgcgcttcatccct

SEQ ID NO: 710993 - DNA, 120 bp, Artificial Sequence
  ENSG00000196924_61 (sequence is synthesized)
cgggagaatggcgtttacctgattgacgtcaagttcaacggcacccacatccctggaagccccttcaagatccgagttggggagcctgggcatggaggggacccaggcttggtgtctgct

SEQ ID NO: 710994 - DNA, 120 bp, Artificial Sequence
  ENSG00000196924_62 (sequence is synthesized)
tacggagcaggtctggaaggcggtgtcacagggaacccagctgagttcgtcgtgaacacgagcaatgcgggagctggtgccctgtcggtgaccattgacggcccctccaaggtgaagatg

SEQ ID NO: 710995 - DNA, 120 bp, Artificial Sequence
  ENSG00000196924_63 (sequence is synthesized)
gattgccaggagtgccctgagggctaccgcgtcacctatacccccatggcacctggcagctacctcatctccatcaagtacggcggcccctaccacattgggggcagccccttcaaggcc

SEQ ID NO: 710996 - DNA, 120 bp, Artificial Sequence
  ENSG00000196924_64 (sequence is synthesized)
aaagtcacaggcccccgtctcgtcagcaaccacagcctccacgagacatcatcagtgtttgtagactctctgaccaaggccacctgtgccccccagcatggggccccgggtcctgggcct

SEQ ID NO: 710997 - DNA, 120 bp, Artificial Sequence
  ENSG00000196924_65 (sequence is synthesized)
gctgacgccagcaaggtggtggccaagggcctggggctgagcaaggcctacgtaggccagaagagcagcttcacagtagactgcagcaaagcaggcaacaacatgctgctggtgggggtt

SEQ ID NO: 710998 - DNA, 120 bp, Artificial Sequence
  ENSG00000196924_66 (sequence is synthesized)
catggcccaaggaccccctgcgaggagatcctggtgaagcacgtgggcagccggctctacagcgtgtcctacctgctcaaggacaagggggagtacacactggtggtcaaatggggggac

SEQ ID NO: 710999 - DNA, 120 bp, Artificial Sequence
  ENSG00000196924_67 (sequence is synthesized)
gagcacatcccaggcagcccctaccgcgttgtggtgccctgagtctggggcccgtgccagccggcagcccccaagcctgccccgctacccaagcagccccgccctcttcccctcaacccc

SEQ ID NO: 711000 - DNA, 120 bp, Artificial Sequence
  ENSG00000196924_68 (sequence is synthesized)
ggcccaggccgccctggccgcccgcctgtcactgcagccgcccctgccctgtgccgtgctgcgctcacctgcctccccagccagccgctgacctctcggctttcacttgggcagagggag

SEQ ID NO: 711001 - DNA, 120 bp, Artificial Sequence
  ENSG00000196924_69 (sequence is synthesized)
ccatttggtggcgctgcttgtcttctttggttctgggaggggtgagggatgggggtcctgtacacaaccacccactagttctcttctccagccaagaggaataaagttttgcttccattc

SEQ ID NO: 711002 - DNA, 120 bp, Artificial Sequence
  ENSG00000196924_70 (sequence is synthesized)
tgcctggtgagtgcagcagtgcctcggcagcccccctcactacaccagggcccacaggcagtatgtgactggaggggcgtgggccgtgctttcttcctgcaggcagccccttctctgtga

SEQ ID NO: 711003 - DNA, 120 bp, Artificial Sequence
  ENSG00000196924_71 (sequence is synthesized)
ctaggcctggggctgggtcctggccgtccagtgtggtggggtaggaatggaggcccaggagactagctgatgctctgtccctggggctggggccaggcctggtggagccagtggacgtgg

SEQ ID NO: 711004 - DNA, 120 bp, Artificial Sequence
  ENSG00000196924_72 (sequence is synthesized)
agggcactgaggggactggtggctgttgtcaggcttctcggtggaagggccatcgcaggctaagatcgaatgtgacgacaagggcgacggctcctgtgatgtgcgctactggccgcagga

SEQ ID NO: 711005 - DNA, 120 bp, Artificial Sequence
  ENSG00000196924_73 (sequence is synthesized)
cctgagtgtgggtattggacccagggctggcacagatagccctgcctggcactcactcttcactttgaggtcacagggccacccaggctgttcgtgggaggtgggaggcccaaaggctga

SEQ ID NO: 711006 - DNA, 120 bp, Artificial Sequence
  ENSG00000196924_74 (sequence is synthesized)
tgggcctgccctgcctctgcccactccaccgccaccacctcacagagagatggggctgggggacacacgaggctgccattccacaaggcccttcttcctgcctcaggaagccccttgcag

SEQ ID NO: 711007 - DNA, 120 bp, Artificial Sequence
  ENSG00000196924_75 (sequence is synthesized)
tgtgttcagtgacccccctggcccagctctgggttccaggcctctgctctggccgggtgcagcccacgcttggggtcggcaggaaatatcctgcccaccacgtggagtttttctcgtgtc

SEQ ID NO: 711008 - DNA, 120 bp, Artificial Sequence
  ENSG00000196924_76 (sequence is synthesized)
tcaggtctaaaggctttgaacagaagcctgtgccccttgagcaccagggctgcggtttaaagagggacagcctgccaaggctgggtgctgcccacagggtggggcagccctcccttcctg

SEQ ID NO: 711009 - DNA, 120 bp, Artificial Sequence
  ENSG00000196924_77 (sequence is synthesized)
ccacctgggtgtgtgcgacggcagagtgtgggggcaggggcggggatgtgcgcctgtggcttgctgccccttgcaaatcagtggctctccctctttaaaccaagttggacgccagatggg

SEQ ID NO: 711010 - DNA, 120 bp, Artificial Sequence
  ENSG00000196924_78 (sequence is synthesized)
taagtgcgacccgcgggcctcttgctcctggggcctttccgtcctcccttgccctggctcaagcacccccatctaaccatgtctgctgtgcttccaggagtcagggctaaaggtcaacca

SEQ ID NO: 711011 - DNA, 120 bp, Artificial Sequence
  ENSG00000196924_79 (sequence is synthesized)
gtccctgcccggccgccctgccctgctggctggaagcaggctgagagtacaaaaggaaggtaccgcttctgtaagcagccaagacggggccccaactcctgggccccctaagccaggcaa

SEQ ID NO: 711012 - DNA, 120 bp, Artificial Sequence
  ENSG00000196924_80 (sequence is synthesized)
ccctttcccaattggtgacccaagccgctggggatgtggctcgccacccacagctattaggaaggccttctaccctgcagtaccatgccatctccacagggaaagactcaaagtccagcc

SEQ ID NO: 711013 - DNA, 120 bp, Artificial Sequence
  ENSG00000196924_81 (sequence is synthesized)
tcagtgctgcccggcccttcagccacggccatggtacttgtgcacaggcctggggcagccttgtgggtaggaggagcccagtgggcttcatttcacggcctagtcctgcccttcccagct

SEQ ID NO: 711014 - DNA, 120 bp, Artificial Sequence
  ENSG00000196924_82 (sequence is synthesized)
gcatgacctgaagcaagttcctgcccgtctctgagcctgttaacatgcaggggatatggtgttcacggtaacctttcttaggaggcagcaaggcctgggtttggcttgtaaaagatttcc

SEQ ID NO: 711015 - DNA, 120 bp, Artificial Sequence
  ENSG00000196924_83 (sequence is synthesized)
gtcccaatgcaccctgacggtgggcagcttgagtgtctaaaccttcggccctcaggaggtctgctgcggggtgcaggtgcccagcgtggctgggctcacactgatggaccggcaaaatgg

SEQ ID NO: 711016 - DNA, 120 bp, Artificial Sequence
  ENSG00000196924_84 (sequence is synthesized)
gctgctaggcccttgcctccaagctcttggtgacaacaggaggcacctggaggtgacaagcctgtgctgggtggccgaggacagggaggcaggccagtctggctctgcctgacctcctgt

SEQ ID NO: 711017 - DNA, 120 bp, Artificial Sequence
  ENSG00000196932_0 (sequence is synthesized)
agcgctggagaataacgccctggagacagggcagcgcagccccagactccctggaaaacccagcagtctggaaaagctgggtttggactcacccctctttgaagagttctcaggaagttt

SEQ ID NO: 711018 - DNA, 120 bp, Artificial Sequence
  ENSG00000196932_1 (sequence is synthesized)
gggggaggggcgagccgcgcaccagttctaccggcatcgggcgctgagggtgagaagggaccacaagcagcagcaggtctcagtgcttgtcatattcctgctcaccggtgggctccgggc

SEQ ID NO: 711019 - DNA, 120 bp, Artificial Sequence
  ENSG00000196932_2 (sequence is synthesized)
acgcccggcagggtcctgggggcgcaggcaaggggacgtaggcagagtgctccggccagcatggagggactggtcttccttaacgccctggccactcggttgctgttcctgctgcactcg

SEQ ID NO: 711020 - DNA, 120 bp, Artificial Sequence
  ENSG00000196932_3 (sequence is synthesized)
ctggtcggggtctggcgagtgaccgaggtgaagaaggagccgcggtactggctgcttgcgctgctcaacctcttgctcttcctggagactgcgctcaccctcaagttcaagcgcggcaga

SEQ ID NO: 711021 - DNA, 120 bp, Artificial Sequence
  ENSG00000196932_4 (sequence is synthesized)
ggctacaaatggttttcaccagccatatttttatatctgattagcatcgttccatcattatggcttcttgaattgcaccatgagacccagtattgcagtatccaggctgaaggaacatca

SEQ ID NO: 711022 - DNA, 120 bp, Artificial Sequence
  ENSG00000196932_5 (sequence is synthesized)
cagaataccagcagaaaagaagacttcaatcaaacattgacatccaatgaacaaaccagtagagctgatgatctcattgagacggccaaagtttttgtgaataacttatctacagtatgt

SEQ ID NO: 711023 - DNA, 120 bp, Artificial Sequence
  ENSG00000196932_6 (sequence is synthesized)
gagaaagtttggacattgggactccatcagacattcctgttaatgctaataattggaagatggcttctacccattggaggcgggatcactcgagatcaactctctcaacttcttcttatg

SEQ ID NO: 711024 - DNA, 120 bp, Artificial Sequence
  ENSG00000196932_7 (sequence is synthesized)
tttgtggggacagcggctgacatactggaattcacaagtgagaccctagaagaacaaaatgtgaggaatagtcctgcactagtctatgccatccttgttatatggacttggagcatgctg

SEQ ID NO: 711025 - DNA, 120 bp, Artificial Sequence
  ENSG00000196932_8 (sequence is synthesized)
cagtttccacttgacctggcagtacagaacgttgtgtgccctgtgtctgtgacagagaggggattccccagcctgttcttttgccagtacagtgccgatctgtggaacatcggaatcagc

SEQ ID NO: 711026 - DNA, 120 bp, Artificial Sequence
  ENSG00000196932_9 (sequence is synthesized)
gtcttcatacaagatggccccttccttgtcgtgcgtctcatactgatgacctatttcaaagtgatcaatcagatgctggtgttctttgccgcgaagaacttcctcgtggtggtgttgcaa

SEQ ID NO: 711027 - DNA, 120 bp, Artificial Sequence
  ENSG00000196932_10 (sequence is synthesized)
ctctaccgcttggtggtgctggcattggcagtccgtgcttcgttgagaagtcagtcagaaggcctgaaaggagaacatggttgccgggcacagacctctgagagtgggccctctcagcgg

SEQ ID NO: 711028 - DNA, 120 bp, Artificial Sequence
  ENSG00000196932_11 (sequence is synthesized)
gactggcagaacgagtctaaggagggcctggctattcctttgcggggctccccagtcacctccgacgactcccaccacaccccttagttattgattgacagtggtctgcggctagaacct

SEQ ID NO: 711029 - DNA, 120 bp, Artificial Sequence
  ENSG00000196932_12 (sequence is synthesized)
gactccctggttcttcttacagggaggatcctttttctcctccaaccttggcgtataataattttcaaaagaacaacataaaaaggtgatcttaaaccaaagctgaggaattttcttttt

SEQ ID NO: 711030 - DNA, 120 bp, Artificial Sequence
  ENSG00000196932_13 (sequence is synthesized)
tcaactgaatagaaggaactttgattagtgactattgctacaacttctgtgtgatggtatcagatgttatagttgttcaacgactaagtgatttgtttgtcttgaactgtttgaaaagct

SEQ ID NO: 711031 - DNA, 120 bp, Artificial Sequence
  ENSG00000196932_14 (sequence is synthesized)
atggaagaggttacagtgacatgccctcgaaagatttggtgcagaccaactgtcgcggctgttacctggaaatagagaagctttgaactttgcctccattgtcagactatttcgtctgat

SEQ ID NO: 711032 - DNA, 120 bp, Artificial Sequence
  ENSG00000196932_15 (sequence is synthesized)
cttttctgcaatgttcctctgacatcaaaaaatgtacattcagtgaatgcagaacaaatgaagggaaaagtgcctttaaaattacctcactgtgggctggaagaagcgaaaatctctgcc

SEQ ID NO: 711033 - DNA, 120 bp, Artificial Sequence
  ENSG00000196932_16 (sequence is synthesized)
cagcttccgtatcatagagagccctattcatcgctgcccaggccttcccaggaaaatcattttttctgggctgatgttgtattctgccatggcgcatatgttcttacagaaattttattg

SEQ ID NO: 711034 - DNA, 120 bp, Artificial Sequence
  ENSG00000196932_17 (sequence is synthesized)
cttttgtcttgggtgctacaaaattcacagcaagccattttggttacatatctactggttgcaaggcaggaaatattggtgaaatgctagcaaagtcacaatttctactctgaacatgat

SEQ ID NO: 711035 - DNA, 120 bp, Artificial Sequence
  ENSG00000196932_18 (sequence is synthesized)
ttgcagtgttcatcagtatttttctgaaccctgctttaccattttctatattgccaagttgaatcatgtgggctgatgcagggaagctctgaagcagtgaataaaggtgtttcgggccct

SEQ ID NO: 711036 - DNA, 120 bp, Artificial Sequence
  ENSG00000196932_19 (sequence is synthesized)
gtaagtgtttccatggtttctggtgtctgccagcagtagtgaacaaagctgcagcttctttgaaccgcgactactggaagtggcctttgctctcagggaacatggtgatggagggttgca

SEQ ID NO: 711037 - DNA, 120 bp, Artificial Sequence
  ENSG00000196932_20 (sequence is synthesized)
tcagctccacccatggccaacagcccttgttgagtgacgggagtcggaatgtgctaccccgttgtgggaatcaggcaattcgctttattttcttgcattaagacttcattttcccagtat

SEQ ID NO: 711038 - DNA, 120 bp, Artificial Sequence
  ENSG00000196932_21 (sequence is synthesized)
gaggtgattcagaaccttttaaagtgatttttgcctttaaagatacagtgtgaaaatttgctcgggtgtgtagcagtaattacacgaggcaaacagttccaaaactgttcttttaggttc

SEQ ID NO: 711039 - DNA, 120 bp, Artificial Sequence
  ENSG00000196932_22 (sequence is synthesized)
aaaacctaattcccccagattagtatactcgagaattcaaagggacatttaaggtggggtatgcccttaatttggtatgacttattgacaaccagttgggacaattttatctgtaactct

SEQ ID NO: 711040 - DNA, 120 bp, Artificial Sequence
  ENSG00000196932_23 (sequence is synthesized)
ctgggtgacatgatacctattcgaaacattttatacaaacttttatagacaaattgtgtttttatacagagtcatgcatattttctcataaatggcttcttcagtgccattgttatatgt

SEQ ID NO: 711041 - DNA, 120 bp, Artificial Sequence
  ENSG00000196932_24 (sequence is synthesized)
tttttatttctttcttccttgtgcttctaattttaacaatataatgactataaaatgacacatggaactaatggaatacatttatgattttccataataattttatgaaagttaagatca

SEQ ID NO: 711042 - DNA, 120 bp, Artificial Sequence
  ENSG00000196932_25 (sequence is synthesized)
agaaattatatttatatgaagtaaatcacttgacaacttttaagggcatgttatttgaagtgctcagcagttgaaagcaaaataataactgctatttataaaaatgcctcagcagaatct

SEQ ID NO: 711043 - DNA, 120 bp, Artificial Sequence
  ENSG00000196932_26 (sequence is synthesized)
gtttttatgttgactgctttatgttgaatattttcttccacaacatgtatgtgctgcttattattgcagatttgctcatggcatacttttcatgttttaatttttttcttccagcaaaat

SEQ ID NO: 711044 - DNA, 120 bp, Artificial Sequence
  ENSG00000196932_27 (sequence is synthesized)
aaacactgaggccctaaaaatagataaagtataaagtagtacggctgttgcaaggatatttttaaatgctttcaaatctgagacttggcttggcttcgtgaatgagtttctagtgtttaa

SEQ ID NO: 711045 - DNA, 120 bp, Artificial Sequence
  ENSG00000196932_28 (sequence is synthesized)
attaaagtattttgtaattagactcctcgtgggcttgagaaataaaaagcctgtccaaagtctagctttatttagagggtcaggaagtcaaagagcacccaggaccatcttggcaattaa

SEQ ID NO: 711046 - DNA, 120 bp, Artificial Sequence
  ENSG00000196932_29 (sequence is synthesized)
tagcggcaaaaatagacccagcttctgcaaggttttccaggaaaatctgcttggggcagcatttgttaacctagctgccagtactcctactctcttatactggctgcttttataatagga

SEQ ID NO: 711047 - DNA, 120 bp, Artificial Sequence
  ENSG00000196932_30 (sequence is synthesized)
aaaaaaaatatgcatttgcttagtttatttgaataaaagctctaaacctaggttatatattagccattcctaagactcctgattaaatattacaaatttgttcagttcatagcgtagact

SEQ ID NO: 711048 - DNA, 120 bp, Artificial Sequence
  ENSG00000196932_31 (sequence is synthesized)
gctaaatactgtaatgtttcaaaacatccaactgtttgttataaagtggctagaacatcaattacctcccatgtgtggacatcctgggacttgtttacattttatctgtaataagataac

SEQ ID NO: 711049 - DNA, 120 bp, Artificial Sequence
  ENSG00000196932_32 (sequence is synthesized)
tgactcacaacacctgtataatgtgatgcaagtcatcctctctatcataacccctccccccaacacacagtaggtcactccccaacccctgaagaaagtggcttatttgaggttgttggt

SEQ ID NO: 711050 - DNA, 120 bp, Artificial Sequence
  ENSG00000196932_33 (sequence is synthesized)
gctgttggtattattgccatagttgttatttaattgcttgattaaactcagtcaaatatccttcctaaaaacatgtcattccacttgtgaaagaaaacacaatgtgcatgtttcaatgat

SEQ ID NO: 711051 - DNA, 120 bp, Artificial Sequence
  ENSG00000196932_34 (sequence is synthesized)
actgtgcggaaacacacctcatgatcatcttgtgggtttcttttgcccttactggatgactctcagaggacatgacttgacatagtaacattagtaaactgtctttatctttgattattc

SEQ ID NO: 711052 - DNA, 120 bp, Artificial Sequence
  ENSG00000196932_35 (sequence is synthesized)
ttttaatttttatttgagctgtttcaatagcataatgaaataaaattttgaattggccaataacatgctttataatcttccagtgaagagtctgatacaaatttactcttggcactgttg

SEQ ID NO: 711053 - DNA, 120 bp, Artificial Sequence
  ENSG00000196932_36 (sequence is synthesized)
tagttccactaacaaatagcacttcagaccttatagaaccatatagatatggccaaggaatagcaggattcactattataatactaattgttaactcattatttaattgaacatttccaa

SEQ ID NO: 711054 - DNA, 120 bp, Artificial Sequence
  ENSG00000196932_37 (sequence is synthesized)
agctctggaaaggcatgcatttgtaggtgcacatgctttaagatttctatccatctttcagagttgaatgtaataatgtttggtatttaattcttgataattcttaaccaacttttcctg

SEQ ID NO: 711055 - DNA, 120 bp, Artificial Sequence
  ENSG00000196932_38 (sequence is synthesized)
ttacaggagagaaagaattgcaaatgccaggcatctgtccactttagccctcctccaatgctaagaaagagggatggtgacgtatactacagagacgcaaatgaaacaccaaacagtctt

SEQ ID NO: 711056 - DNA, 120 bp, Artificial Sequence
  ENSG00000196932_39 (sequence is synthesized)
gaattacaagaaaaaaaggggattttttttttttctaatttcagacttggctttttacttagaggacattctgatttgctctcagaaacatctgatttggggttaaactaggcggctgga

SEQ ID NO: 711057 - DNA, 120 bp, Artificial Sequence
  ENSG00000196932_40 (sequence is synthesized)
ggatgtttacagctttgaggcttcaaataagtttccatatgcagggagtaactttaaacaatgtttgaataattaactgctaagtcttatattttatgtgtatctatttcatcctctgtc

SEQ ID NO: 711058 - DNA, 120 bp, Artificial Sequence
  ENSG00000196932_41 (sequence is synthesized)
tctttcttactagaataccatataagaatattttctctgcagtatttatatttatactattttgctatgagtggcctttgtattttattatatgcattaaatagtgtgtgcacaacttta

SEQ ID NO: 711059 - DNA, 120 bp, Artificial Sequence
  ENSG00000196932_42 (sequence is synthesized)
ttgtatttaatgcctctacacttgaagcatttaaagatatcccttacaatcacctcatttcttttggtttcaattactcctccttgatgcttttcagacctcttcaatctgaaaatctct

SEQ ID NO: 711060 - DNA, 120 bp, Artificial Sequence
  ENSG00000196932_43 (sequence is synthesized)
tttgatggaagatggaaacaaaatctattattatgctaccaagctcaaattgatgacttcctttctatctttgctaaaaataaatgtgaccctgtttaatatcctttgcatttctgcaac

SEQ ID NO: 711061 - DNA, 120 bp, Artificial Sequence
  ENSG00000196932_44 (sequence is synthesized)
ctctgttctttctgattttagccttcatgaccattttcctaggtctaggacatttgtatatttgtctgagtatggacccttctttggtgcttttaaccattccttccataaatatatgtt

SEQ ID NO: 711062 - DNA, 120 bp, Artificial Sequence
  ENSG00000196932_45 (sequence is synthesized)
gtatccatcaagcactgttctaggcactaaggatacagtggtgaatgaaataggcttattccttgctttatgtcctactatctggtataaatctttgtttattggatttatctccttacc

SEQ ID NO: 711063 - DNA, 120 bp, Artificial Sequence
  ENSG00000196932_46 (sequence is synthesized)
tttttcctatctaatgacaattttatttcaatgttgagtttttaatctttgatcatcatttagctcttttgaaatgtcttttcaattcgatccctggtttcttagaataattattaatcc

SEQ ID NO: 711064 - DNA, 120 bp, Artificial Sequence
  ENSG00000196932_47 (sequence is synthesized)
tcccactgacattccttgaaatcagccatttgaatatccatgttaatatctatattttctcccctatcatttttctcccataatgtttccataattttgtaaaactaaagacagcaatat

SEQ ID NO: 711065 - DNA, 120 bp, Artificial Sequence
  ENSG00000196932_48 (sequence is synthesized)
gggaccaagaggctttgtcataattcatgcatatgttgggctttaagtctcagattatttatttttcacttcttcattattccattattatcatgtaaggatttttttcattgatttatt

SEQ ID NO: 711066 - DNA, 120 bp, Artificial Sequence
  ENSG00000196932_49 (sequence is synthesized)
aaatcaccaagatattttggccacaagaggtttattaggaatatactaaaaaacttgactgagaagacttttctgcatgtgatcatactttttattacaaatttaacattttgtctgtat

SEQ ID NO: 711067 - DNA, 120 bp, Artificial Sequence
  ENSG00000196932_50 (sequence is synthesized)
gacatactaaccccaagtggcaacttgttctattttgagggtactggttttctatccacgttctatgccatatgtgcatgtgagaagccttccatcaatgtccaccaagtcatgataaaa

SEQ ID NO: 711068 - DNA, 120 bp, Artificial Sequence
  ENSG00000196932_51 (sequence is synthesized)
tgtgaagtagaaaagaatcaaaagcacagccttcaacaacccattggagagtccccctgtggggagccatttacacaggaatccacctaacagtattcacacctggaatatttcttaatt

SEQ ID NO: 711069 - DNA, 120 bp, Artificial Sequence
  ENSG00000196932_52 (sequence is synthesized)
ttgttaatgaggacactatgggagactttttcagaagccttgtttaaatctgaatgtctgtcatcaatttacataacattacctgcttggtaatcctaactatattttttaagaggagga

SEQ ID NO: 711070 - DNA, 120 bp, Artificial Sequence
  ENSG00000196932_53 (sequence is synthesized)
actaagtttaattgagtgcaatttttctcagaggacctgtgctgatgcttcgtaataactgtgttcttctaaaagggctctcagaaatcttttaaaggatcatttatataatctaactag

SEQ ID NO: 711071 - DNA, 120 bp, Artificial Sequence
  ENSG00000196932_54 (sequence is synthesized)
agattaatagtaaatgtgccttttgtacttcaagacatatttctgcttcattttgaaagttgagactttatttttttatcaccaaccttgtctccaccattaactgccaagacagataat

SEQ ID NO: 711072 - DNA, 120 bp, Artificial Sequence
  ENSG00000196932_55 (sequence is synthesized)
acttgacctggcagacccatgtattagaacttcagaagacataggagcagttaaaattgtcctcattggaggtccttggaatcctactggtcttactttaataaaaacataaacccctaa

SEQ ID NO: 711073 - DNA, 120 bp, Artificial Sequence
  ENSG00000196935_0 (sequence is synthesized)
cggcgctgcctctggattgcctgcgtgtgggagtacaactctgcctctccaaggagaacgggttgtgaccactgaacaaaacttgcccattgaaagcaaacccggaacagctggataatg

SEQ ID NO: 711074 - DNA, 120 bp, Artificial Sequence
  ENSG00000196935_1 (sequence is synthesized)
tccaccccgagccgattcaagaaggacaaagagatcatagccgagtatgaaagtcaagtcaaagaaattcgagctcaactggtagaacaacaaaaatgcctggagcagcaaacggagatg

SEQ ID NO: 711075 - DNA, 120 bp, Artificial Sequence
  ENSG00000196935_2 (sequence is synthesized)
cgagttcagcttctccaggatctgcaagatttcttccgaaaaaaagctgaaattgagacggaatattcccggaatctagagaagttagcagaaaggttcatggcaaaaacaagaagcact

SEQ ID NO: 711076 - DNA, 120 bp, Artificial Sequence
  ENSG00000196935_3 (sequence is synthesized)
aaggatcatcaacaatacaagaaagaccagaacctgttgtctccagtgaactgctggtatttgctcctgaaccaagtaaggagagaaagcaaagaccatgcaaccttgagtgacatctat

SEQ ID NO: 711077 - DNA, 120 bp, Artificial Sequence
  ENSG00000196935_4 (sequence is synthesized)
ctgaacaatgtgattatgcggttcatgcagataagtgaggattctaccaggatgtttaaaaagagcaaagagattgcattccaacttcatgaggatttaatgaaggttcttaatgagctt

SEQ ID NO: 711078 - DNA, 120 bp, Artificial Sequence
  ENSG00000196935_5 (sequence is synthesized)
tatacggtgatgaaaacataccatatgtatcatgcagagagcatcagtgcagagagcaagctgaaagaggccgaaaaacaagaggaaaagcaaattgggagatctggtgatccagtcttc

SEQ ID NO: 711079 - DNA, 120 bp, Artificial Sequence
  ENSG00000196935_6 (sequence is synthesized)
catattcgactagaggagagacatcaacggcgaagctctgtaaagaaaattgaaaaaatgaaagaaaaaagacaagcaaaatattcagaaaataagctaaaatcaattaaggcacggaac

SEQ ID NO: 711080 - DNA, 120 bp, Artificial Sequence
  ENSG00000196935_7 (sequence is synthesized)
gaatatctcctaacacttgaagccaccaatgcctcagttttcaagtactatattcatgatctttctgatttaattgattgctgtgatcttggctaccatgcaagtctgaacagagcccta

SEQ ID NO: 711081 - DNA, 120 bp, Artificial Sequence
  ENSG00000196935_8 (sequence is synthesized)
agaacatatctgtctgcggagtacaaccttgaaacctccagacatgagggcttagacattattgagaatgcagttgataatttagagcccaggagcgataagcagagattcatggagatg

SEQ ID NO: 711082 - DNA, 120 bp, Artificial Sequence
  ENSG00000196935_9 (sequence is synthesized)
taccctgctgcgttctgtccaccaatgaagtttgagtttcagtctcacatgggtgatgaggtgtgccaggtcagtgcccagcagccagtccaggcagagctcatgctcaggtaccaacag

SEQ ID NO: 711083 - DNA, 120 bp, Artificial Sequence
  ENSG00000196935_10 (sequence is synthesized)
ttgcagtcccgccttgccacgctcaaaatcgagaatgaagaggttaagaaaacgactgaagccaccttgcagacgatacaagatatggtcaccatcgaggactatgatgtttctgaatgc

SEQ ID NO: 711084 - DNA, 120 bp, Artificial Sequence
  ENSG00000196935_11 (sequence is synthesized)
ttccagcacagtcgttccacagaatcagtgaagtccactgtctctgaaacctacctgagtaaacccagcatcgccaagagaagagccaaccagcaggaaactgaacagttctacttcatg

SEQ ID NO: 711085 - DNA, 120 bp, Artificial Sequence
  ENSG00000196935_12 (sequence is synthesized)
aaactcagagaatatttggaaggcagtaatctcatcacaaaacttcaagccaaacatgacttgctgcagaggaccctgggagaaggtcatagagctgaatatatgactacaaggcctcca

SEQ ID NO: 711086 - DNA, 120 bp, Artificial Sequence
  ENSG00000196935_13 (sequence is synthesized)
aatgttccccctaagccccagaaacacaggaagtccaggccccgctcacagtataatactaagttgtttaatggggatttggaaacattcgtcaaggactcaggacaggttattcccctc

SEQ ID NO: 711087 - DNA, 120 bp, Artificial Sequence
  ENSG00000196935_14 (sequence is synthesized)
attgtggaaagctgtattcggttcatcaatctctatggtcttcagcatcaggggattttcagagtgtctggttcccaggtggaagtcaatgatattaaaaattcatttgagagaggtgaa

SEQ ID NO: 711088 - DNA, 120 bp, Artificial Sequence
  ENSG00000196935_15 (sequence is synthesized)
aatcctttggctgatgaccagagtaaccatgatattaactcagttgctggcgttctgaagctctatttccgtgggctggaaaaccccctctttcctaaggaaagatttaacgatctgatt

SEQ ID NO: 711089 - DNA, 120 bp, Artificial Sequence
  ENSG00000196935_16 (sequence is synthesized)
tcttgtatcagaatagataatctctatgagagggcgcttcacatccgcaaactcctcctgactttgcccaggtcggtccttatagtgatgaggtacctctttgccttcctcaatcatcta

SEQ ID NO: 711090 - DNA, 120 bp, Artificial Sequence
  ENSG00000196935_17 (sequence is synthesized)
tcacagtacagcgatgagaatatgatggacccttataacctggccatttgctttggcccaacattgatgcctgtcccagaaatacaggatcaagtgtcttgccaggcacatgtgaatgaa

SEQ ID NO: 711091 - DNA, 120 bp, Artificial Sequence
  ENSG00000196935_18 (sequence is synthesized)
attatcaaaaccatcatcatccaccatgagactattttcccagatgctaaagagctggatggccctgtttatgagaaatgtatggctggagatgactattgcgacagcccatacagtgag

SEQ ID NO: 711092 - DNA, 120 bp, Artificial Sequence
  ENSG00000196935_19 (sequence is synthesized)
cacggtacattggaggaagtggaccaagatgctggtacagagccccacacaagtgaagatgaatgtgagccaatagaagcaatagccaagtttgactatgttgggcggtctgccagagaa

SEQ ID NO: 711093 - DNA, 120 bp, Artificial Sequence
  ENSG00000196935_20 (sequence is synthesized)
ctatccttcaagaagggtgcctccctgctgctgtatcaccgtgcatctgaggactggtgggaaggcaggcacaacgggattgacgggctggtgcctcaccagtatatagtggtgcaggat

SEQ ID NO: 711094 - DNA, 120 bp, Artificial Sequence
  ENSG00000196935_21 (sequence is synthesized)
atggatgatacgttttcagacactctgagccaaaaagccgacagtgaggccagcagtgggccagtcacggaagacaagtcctcatccaaggacatgaactccccgacagaccgtcatcct

SEQ ID NO: 711095 - DNA, 120 bp, Artificial Sequence
  ENSG00000196935_22 (sequence is synthesized)
gacggctatttagccaggcaacgaaaaagaggagagccaccccctccagtaaggcgtcctggcaggaccagtgatggccattgcccgctccaccctccacatgccctttctaactcctca

SEQ ID NO: 711096 - DNA, 120 bp, Artificial Sequence
  ENSG00000196935_23 (sequence is synthesized)
gttgacctagggtccccaagccttgccagtcacccccggggcctgctgcagaaccgtggcctcaacaatgacagtcctgagcggaggcgcaggcctggccatggcagcctgaccaacatc

SEQ ID NO: 711097 - DNA, 120 bp, Artificial Sequence
  ENSG00000196935_24 (sequence is synthesized)
agccggcacgactccctcaagaagatcgacagccctcccattagaaggtccacgtcatcagggcaatacacgggcttcaatgaccacaagccactggacccagagacaattgctcaggat

SEQ ID NO: 711098 - DNA, 120 bp, Artificial Sequence
  ENSG00000196935_25 (sequence is synthesized)
attgaagaaacgatgaacacagctttgaatgaactccgagaactggagagacagagcacagcaaagcatgcccctgatgtggtgctggataccctggagcaagtgaaaaactctcccacc

SEQ ID NO: 711099 - DNA, 120 bp, Artificial Sequence
  ENSG00000196935_26 (sequence is synthesized)
cctgccacttccacggaatctctcagccctttgcacaacgttgccctcaggagctccgagcctcagattcgacgtagcacgagctcctccagtgacacaatgagtactttcaagcctatg

SEQ ID NO: 711100 - DNA, 120 bp, Artificial Sequence
  ENSG00000196935_27 (sequence is synthesized)
gtggcacccagaatgggcgtgcagctgaagcctccagcccttaggccaaaacctgctgttcttccaaaaacaaatcctaccataggacctgccccacctccccagggtccaacagacaag

SEQ ID NO: 711101 - DNA, 120 bp, Artificial Sequence
  ENSG00000196935_28 (sequence is synthesized)
tcatgcacaatgtaaaaaccagccaagcaaggccataaagggaggtgacttaaaaaagaaaatggattagtgacaaaagtcactgatccataactttccttagttttgtgcttataactg

SEQ ID NO: 711102 - DNA, 120 bp, Artificial Sequence
  ENSG00000196935_29 (sequence is synthesized)
gagatcttttggcttttctatgttgtcgaatgtaatgtctgagactagctaaattaacacgggcatttgtattttgtaatttttttaaataactggacatatgtcattttaaggacaata

SEQ ID NO: 711103 - DNA, 120 bp, Artificial Sequence
  ENSG00000196935_30 (sequence is synthesized)
gaaacacttagacttacttgaaaatccaatgctgcaccacttgtaatgaaggcaacaccgctctccacattgtacagagcttcaggtttaatgtagcccagctgagtcagaaaggttgtg

SEQ ID NO: 711104 - DNA, 120 bp, Artificial Sequence
  ENSG00000196935_31 (sequence is synthesized)
acctgaaggcagaagaacccgaatgccacacctcattggagtatagccagtgttggtctgtggcacttgggctgaaaggtgataatggcattgcgtggtagctgacaatgagcaccttcg

SEQ ID NO: 711105 - DNA, 120 bp, Artificial Sequence
  ENSG00000196935_32 (sequence is synthesized)
gttccatgtggagcggggtttagctcatgcaaaagacttgcaattgtctccatgggacgatcccagtgggactgtcagcccacagctcgagtgggttggatgcttgcctctttcctaaca

SEQ ID NO: 711106 - DNA, 120 bp, Artificial Sequence
  ENSG00000196935_33 (sequence is synthesized)
gttatttccccgggtccagcttaaagactcgatggaaggaggtagaacctctgctgttactgcttgaacttaacctgggaaaggagaggaagacaccatctccaaagctattaatgtcac

SEQ ID NO: 711107 - DNA, 120 bp, Artificial Sequence
  ENSG00000196935_34 (sequence is synthesized)
tccttttgcgagcatgattaggccccggagatttccaagtccccccatctacacttacaaacgattagaagggtttaattttaaagactttctggttacactactccacgaactcctcca

SEQ ID NO: 711108 - DNA, 120 bp, Artificial Sequence
  ENSG00000196935_35 (sequence is synthesized)
aagatccgttattcaataactgcctagaaaatgtttccatctcctctaaatccctgtgttctcctctgtggaaatgaaggcagcaagaagcacctgaggccttggttcatgcagtgttct

SEQ ID NO: 711109 - DNA, 120 bp, Artificial Sequence
  ENSG00000196935_36 (sequence is synthesized)
cttttgactaaatcacctaggttcctttaaacatgctacaaagcccaggcatggtggtgcacacctgtactcccagctactcgggtggtttacacaggaggatggctttgggcctagtag

SEQ ID NO: 711110 - DNA, 120 bp, Artificial Sequence
  ENSG00000196935_37 (sequence is synthesized)
gagaccctgtctcttaaaaaaaaaaaaaatgctacaaagtcctgatgatcctaaatttgaaatcccaactgtcctctccatttgtctttgagccaaccctgaactggccctggtacctga

SEQ ID NO: 711111 - DNA, 120 bp, Artificial Sequence
  ENSG00000196935_38 (sequence is synthesized)
ccaaccctgaactggccctggtacctgagtaagagccatgcagggccatcagcagaacatggccttgtggttctcacccagttgtgtacctcacaaccacaacttctttttctttgtccc

SEQ ID NO: 711112 - DNA, 120 bp, Artificial Sequence
  ENSG00000196935_39 (sequence is synthesized)
ttttcccctttttggttttggttttgtatgtgggctctatgtaactcccatagtcagctgaactctcaattggagaccctctttctctggcatcctagcacacaggcaattttttaagcc

SEQ ID NO: 711113 - DNA, 120 bp, Artificial Sequence
  ENSG00000196935_40 (sequence is synthesized)
tatatttatgctacattttcccccatcttaagaaaatttgctttgatttccattctcctactagcagcagctgatatcacctgtagacctatgagcattttatctattctatcattgaag

SEQ ID NO: 711114 - DNA, 120 bp, Artificial Sequence
  ENSG00000196935_41 (sequence is synthesized)
ttactgataaagatttttgttgttgttgttgttgttgggagaaatggatttcccacaactaatccctctggcccaccattaatttccttcttggtttcatttcaaactggcagccaattg

SEQ ID NO: 711115 - DNA, 120 bp, Artificial Sequence
  ENSG00000196935_42 (sequence is synthesized)
cacgcccatctaagagctacacagtgtagattttacttcatcagcccattggtgaatgcatcgtgcagaaaagaactgggatctgtactaaaatcaagatcattactttgatctctacct

SEQ ID NO: 711116 - DNA, 120 bp, Artificial Sequence
  ENSG00000196935_43 (sequence is synthesized)
cagtttgccagtgtagtcattctattgcaggaagagattaaattgatgagatattgttactttcagagtcacactgctgattgcttgcctggggcctaatttcacaaatgaatagtgact

SEQ ID NO: 711117 - DNA, 120 bp, Artificial Sequence
  ENSG00000196935_44 (sequence is synthesized)
tttttcccatgtatttctaggtatggtaaacttttaaacctccaaattttcagagccatactttttgcccattttgaaaaagaagcccaggacagcaccttgtctagcccctccccattt

SEQ ID NO: 711118 - DNA, 120 bp, Artificial Sequence
  ENSG00000196935_45 (sequence is synthesized)
ctcctgagcttttggggtccttcagcacccttggacaccgtggagatccagccaagactgagctttgaatagcactagcccttttaaacaatcctcacaaattccttaggaatttaaact

SEQ ID NO: 711119 - DNA, 60 bp, Artificial Sequence
  ENSG00000196935_46 (sequence is synthesized)
cttttaaacaatcctcacaaattccttaggaatttaaactttccaaaataatcccagagt

SEQ ID NO: 711120 - DNA, 86 bp, Artificial Sequence
  ENSG00000196935_47 (sequence is synthesized)
ttccaccacttctttaaaatagtaagaattcttaaaaaccatattccttgtttgatggaagagtaagatgttaacagagggcatca

SEQ ID NO: 711121 - DNA, 120 bp, Artificial Sequence
  ENSG00000196935_48 (sequence is synthesized)
cttgtttgatggaagagtaagatgttaacagagggcatcaaagggccagaggtgtctttgaatttattttttttcaatgtcttttctgagcttcagccttagcttttcagatcttcctcc

SEQ ID NO: 711122 - DNA, 120 bp, Artificial Sequence
  ENSG00000196935_49 (sequence is synthesized)
tacctgttcatttattcagccttctatctggtcatcctccccagcggctcctctctctgatgtgtccacctacggtggaacgaggattgcctttctgtgctccccatcaggactttgctg

SEQ ID NO: 711123 - DNA, 120 bp, Artificial Sequence
  ENSG00000196935_50 (sequence is synthesized)
tcttggccggcaggagtcgtgctgctgcagagcctcacaggctgtgccttgtttcaggaaacagctcctaatactctcccatcactcactttacctgtctccatcttatttccctatact

SEQ ID NO: 711124 - DNA, 120 bp, Artificial Sequence
  ENSG00000196935_51 (sequence is synthesized)
cctattgtcagcttgagactttttttttttttcaattccaaatgaagggtatgacctcagagtgagtgaggactcagtaaagactcacctctccttacttggtttattaaatgtcttcag

SEQ ID NO: 711125 - DNA, 120 bp, Artificial Sequence
  ENSG00000196935_52 (sequence is synthesized)
attccagagataagacaaggtggccacttcacaaagaatccagaatcatgctcagtaaagctcattaaaagccactgcagctgagaaggttcacagcccttctttatagccacagaggca

SEQ ID NO: 711126 - DNA, 120 bp, Artificial Sequence
  ENSG00000196935_53 (sequence is synthesized)
gcacacaggggaggtgggaagacacagggaaacgagagaagaaggataatgaggccttgaggtgttctgcccccaatttcaaggagcttatcaggcttcatgtgcaatttggggagggga

SEQ ID NO: 711127 - DNA, 120 bp, Artificial Sequence
  ENSG00000196935_54 (sequence is synthesized)
gctttttgatggtgggtaaataatggctctacaaagattacctgactccactgacacaagaatatgtattctcagctgatataactgtgtgttcacatcccatccatagaactcactgaa

SEQ ID NO: 711128 - DNA, 120 bp, Artificial Sequence
  ENSG00000196935_55 (sequence is synthesized)
ggagattcatcaagtcagccttttggactgggttggggtttggggagtggatttggggatagagagaaaggtgtacttagtacacattttctaatgggcgttacgtgaactgtttgaacc

SEQ ID NO: 711129 - DNA, 120 bp, Artificial Sequence
  ENSG00000196935_56 (sequence is synthesized)
tgctgagtggcgctttgtagagctccatgttcacgttcagtgtcaacaccattcaacagctttgcacatcttcgtacaacataatctggctttggtgccccttgagccacctgtagaata

SEQ ID NO: 711130 - DNA, 120 bp, Artificial Sequence
  ENSG00000196935_57 (sequence is synthesized)
atttatagcagggtcccacaatctactgcaatgatcgtgaacagttatcagtggatatagtgctccaagagtcaaattgtatccgttaagggttttctaacttttgctatcccccccgcg

SEQ ID NO: 711131 - DNA, 120 bp, Artificial Sequence
  ENSG00000196935_58 (sequence is synthesized)
accaaaaaaagggggggtttataatttaaagaaaaggaaaagaggcgtgggttggtagttgtgtccttaacatttaggaatgacatagcctctggagtctacaaactgaagaaactttca

SEQ ID NO: 711132 - DNA, 120 bp, Artificial Sequence
  ENSG00000196935_59 (sequence is synthesized)
tctgatcagccttggaaatccaaagttaaagagcctatgtgtctcttgaggcgggggttagaggattcaaatttgggatgatgctcattgattcctgaccatagcagtgagaggccattt

SEQ ID NO: 711133 - DNA, 120 bp, Artificial Sequence
  ENSG00000196935_60 (sequence is synthesized)
tttgtgcaggaaatgtgcttaggactcagtcttgttttcgattatccaccacagaaaccctgagacacagagcagcttagaagtctctacccaggcgtaaatagagctccctactccaga

SEQ ID NO: 711134 - DNA, 120 bp, Artificial Sequence
  ENSG00000196935_61 (sequence is synthesized)
ccacctgccacccacctcccaagttgagaacacaagctccagctgggctggagagtcaggcttggtgcagggtgactttggcgaagttttgtcagatccataaagcaaactggaatttga

SEQ ID NO: 711135 - DNA, 120 bp, Artificial Sequence
  ENSG00000196935_62 (sequence is synthesized)
gctttcacttaccctagtatacgttcttaaaaaaaaaaaaaagtctatgtggtataatcgagatggatacctgtgtctttaaattacgtagggaattttgtatgtttaaataattgtact

SEQ ID NO: 711136 - DNA, 120 bp, Artificial Sequence
  ENSG00000196935_63 (sequence is synthesized)
gggttccataatgcttatcttagaaactttagtaaaagaaaatatatgaaccgtgcatttgtgaatgccccccttagagcattcatccaagttcagtgtgtagtgtgatggttattatag

SEQ ID NO: 711137 - DNA, 120 bp, Artificial Sequence
  ENSG00000196935_64 (sequence is synthesized)
atatttaaagtatagtaagtggctgtgtaacaggagagactgctgtttacctacgtactgaagggtaactgctgcccgcgtaattaaatcagtattgtcctttcctgtcggtttgatcaa

SEQ ID NO: 711138 - DNA, 120 bp, Artificial Sequence
  ENSG00000196935_65 (sequence is synthesized)
ttgcggtaccggtagcttcctgcttgtgactgttacctaattgtgtcaatgtacatctgtagtatgtacatgtgaaagtgcctttctattttagaggagttttagccttgctcttgtacc

SEQ ID NO: 711139 - DNA, 120 bp, Artificial Sequence
  ENSG00000196935_66 (sequence is synthesized)
gttgccccgctctgtgccccacccccacctcctcctcccaattcctgctgcccactcgagtgtttcgaagcttcctccctgtcccccaccttccccatccccgccttcctgtgcctcggt

SEQ ID NO: 711140 - DNA, 120 bp, Artificial Sequence
  ENSG00000196935_67 (sequence is synthesized)
gctcagtaatgtcccatctcacctccctgtcggtcctcagactgtctcgttttccttgtagacgtgattgtgcctttctcacccctgtgtcctcccatcccaccgcatcagtcccccgct

SEQ ID NO: 711141 - DNA, 120 bp, Artificial Sequence
  ENSG00000196935_68 (sequence is synthesized)
catgtgctgctgacagcatcgcattcgcccgtgctctgtactgcctctcaccatttcattccctcctctctgaggtgaaaataaagggggatgcttttacagtctggaaagaaaaaaaat

SEQ ID NO: 711142 - DNA, 120 bp, Artificial Sequence
  ENSG00000196935_69 (sequence is synthesized)
gttttgttaatctgttgtgacaatgcacttttatgtatagtactgtacatttttggcatgtaccattacaggcttcagtatacagtcaggtttgttcttcacggtgtatctttataataa

SEQ ID NO: 711143 - DNA, 120 bp, Artificial Sequence
  ENSG00000196935_70 (sequence is synthesized)
ataagatagttctggctgcctttgtctgcttccagtttgatgtgcatctctgtggtgtctttgttcctttcctttcattcatcactactttctccttgacagctagcttgcattaaataa

SEQ ID NO: 711144 - DNA, 120 bp, Artificial Sequence
  ENSG00000196935_71 (sequence is synthesized)
tgtgaaacttttacctttaaaatatttttttatctcactttcatttcttgttcatttggaaatagggtgtcctgcacagggccctgcccatgaagctgtggtttttcagtcatggtttgg

SEQ ID NO: 711145 - DNA, 120 bp, Artificial Sequence
  ENSG00000196935_72 (sequence is synthesized)
aggctcaatgtgtagtcagagaaaagagtcttggcagacacttaactgagaagctgagagtgtacaagcctcctaaacatacaccagattgaaatctttcttttgagaaagactctagtt

SEQ ID NO: 711146 - DNA, 120 bp, Artificial Sequence
  ENSG00000196935_73 (sequence is synthesized)
aaccacggcaagcccatctttggtttcatttgaataaattgaaaaataatccttaggttatttttctgtgcttagaactccccgtgtattggtatttttctttacttttttttttttttt

SEQ ID NO: 711147 - DNA, 64 bp, Artificial Sequence
  ENSG00000196935_74 (sequence is synthesized)
tttctttacttttttttttttttttttgagacgaatctctctgtgtcattcaagcgattctcct

SEQ ID NO: 711148 - DNA, 120 bp, Artificial Sequence
  ENSG00000196935_75 (sequence is synthesized)
gctgggattacaggtgtgagccattgcatctggccaggtatttttctttaaatataaaaaaaagataacttgaggtctagcaatatgtagtagatagctttgtaaaacaatgtaagttgt

SEQ ID NO: 711149 - DNA, 120 bp, Artificial Sequence
  ENSG00000196935_76 (sequence is synthesized)
aatgtaagttgtgcaagattgaatattgataagatataaagtttaaaaaatgacaggcaaatcaaggaaaaacactttttattaaagtgcagaatactaacaaaagtgtgcaaatcatta

SEQ ID NO: 711150 - DNA, 120 bp, Artificial Sequence
  ENSG00000196935_77 (sequence is synthesized)
gtgtaacagttctcacgagctgacacactgatgtatccaccacccagtttaagcaatagcacattatcagcatcccagaagctactgtgctcatgcctctgtgaatgtatcagtatcctg

SEQ ID NO: 711151 - DNA, 120 bp, Artificial Sequence
  ENSG00000196935_78 (sequence is synthesized)
actaatcacaccatggtgtagttttgcctgtcatcttagctttctataaatgggttcatacagtatgtagattttgtgtctggctccttttgttgaaatgtatgtttgtaagagtcgtca

SEQ ID NO: 711152 - DNA, 120 bp, Artificial Sequence
  ENSG00000196935_79 (sequence is synthesized)
ttgttagtaaaatagtggtttttccatttttactgctatatagaattccattacatgaatatgctcaatattatatttattttagtatttcctgattaaactttgggtagtatatgcaga

SEQ ID NO: 711153 - DNA, 120 bp, Artificial Sequence
  ENSG00000196935_80 (sequence is synthesized)
tatctttaaacatggagaaatgaatggggggtgagggacccacctgtcaaaggaattgttttcccaaactatgacggaataatgttgaactaacctgttgaccggaaggcctactcaaag

SEQ ID NO: 711154 - DNA, 120 bp, Artificial Sequence
  ENSG00000196935_81 (sequence is synthesized)
gcaaggatacttttctttctttccaaaaaagcactgtctgatatggagactggaaatattcatagatgacactgaaactagttgaagctttacttgatgcttatcaagtcatgttctctt

SEQ ID NO: 711155 - DNA, 120 bp, Artificial Sequence
  ENSG00000196935_82 (sequence is synthesized)
acccgatgctggatgctttttcttcaatgcctactttaggaccacagagttggatttagaggctagcccaccaggaacaaatgcccaaatcagtctgtagagttgttccaggaaagactc

SEQ ID NO: 711156 - DNA, 120 bp, Artificial Sequence
  ENSG00000196935_83 (sequence is synthesized)
caccatcctgctaccctcaaatcttaagctcctcagcctgccacgaccatctcctgttgagaaaattgcgcctgcctccccatctctcactcccgaaccagagtcccaacggggtgtaac

SEQ ID NO: 711157 - DNA, 120 bp, Artificial Sequence
  ENSG00000196935_84 (sequence is synthesized)
tggtcgtcagttcccacagttcatatgcctgcaccctgtaagaatcttagaaaggcagagcaagggtgtttgctggcttctgccttgagtagttgggactcctaaaaaggaaaattcccc

SEQ ID NO: 711158 - DNA, 120 bp, Artificial Sequence
  ENSG00000196935_85 (sequence is synthesized)
aagtttgacctagaatgtcaaaaaggtcctaaaagcacagaatgatggtaaattctatccacaggccatatagccctggaaaatattgggaaactgaggcatgggttggtaatttattga

SEQ ID NO: 711159 - DNA, 120 bp, Artificial Sequence
  ENSG00000196935_86 (sequence is synthesized)
ttgaagtttagtaaacgaatttgaattaattaggaccagataatcaatttttggcttacttatactatagtataagcaaataagtatttaaactttagtataaatatttttgctcactta

SEQ ID NO: 711160 - DNA, 120 bp, Artificial Sequence
  ENSG00000196935_87 (sequence is synthesized)
tcacggtgaggttcatcacctcttcagtagccttttatctgtttctacatagtaaatagaaaacttgccttctataataaaaacaaaatagtttttctatcaaggtcagtctcagcaaga

SEQ ID NO: 711161 - DNA, 120 bp, Artificial Sequence
  ENSG00000196935_88 (sequence is synthesized)
gaaatgggactgggctggatatcaacacatgtgcttgtgtgcatgtgcacgtgtgtgggtgggagggtgcggaggggttgggaagagagattgctcctcccgcagtgctgaaacaacatg

SEQ ID NO: 711162 - DNA, 120 bp, Artificial Sequence
  ENSG00000196935_89 (sequence is synthesized)
ccttgttcagtattaacatcttgaaggcagttatggcagcatgatccaggagatcgtcagctctaggatatttgcgatccaattctggcgacttatggatggatccttcacacccaacag

SEQ ID NO: 711163 - DNA, 120 bp, Artificial Sequence
  ENSG00000196935_90 (sequence is synthesized)
ctgtctatcaggggtgcttccgagggtcactgggtttcttttagctgcttggctgtgcagctgaagttaggacttttgatgaattaccctctcaatgatggtgtattgttctaatcttct

SEQ ID NO: 711164 - DNA, 120 bp, Artificial Sequence
  ENSG00000196935_91 (sequence is synthesized)
gtctctgacatacccaaggaaccccttgtgtaaaaatcatgtccctctaaatgcaagtggatgattgtgccaataagccaggagagaaggaaacatcttcagtggtccagtggcacattc

SEQ ID NO: 711165 - DNA, 120 bp, Artificial Sequence
  ENSG00000196935_92 (sequence is synthesized)
gcacattcaaaattgtacaatgacatgacattaactcaaaaatgaagtttgaggttctgggcctttgatggactgcatctattaaaaacaaaaagtggtgtctcatgcctgtaatcccag

SEQ ID NO: 711166 - DNA, 90 bp, Artificial Sequence
  ENSG00000196935_93 (sequence is synthesized)
cactttgagaggccaaggcaggaggatcaaaaaatgcgaatttttatatttttttgtgagatcccatctctaccacatagtagtacatgc

SEQ ID NO: 711167 - DNA, 85 bp, Artificial Sequence
  ENSG00000196935_94 (sequence is synthesized)
ctgaggcaggaagattgcttgagcccagatgtttgaggctgcaatagaagagtgagaagctatctcaaaaaaaaaaaaaaaaaaa

SEQ ID NO: 711168 - DNA, 120 bp, Artificial Sequence
  ENSG00000196935_95 (sequence is synthesized)
aaaaaaaaaaaaaaaaaaaaaaacatggtcaagatttgtaatagaaattgccatttgaattttggtctgtaagcccaaagattgttactgtgttagtaactaaatattacgagatgcatt

SEQ ID NO: 711169 - DNA, 120 bp, Artificial Sequence
  ENSG00000196935_96 (sequence is synthesized)
aggaaaagaaggaaaagaaattttaagtaagccaaaaatctattatatagtcataagtcaaactcagttactagacttcaacaaataccaacccatgcctccatttcccaaacagaaata

SEQ ID NO: 711170 - DNA, 120 bp, Artificial Sequence
  ENSG00000196935_97 (sequence is synthesized)
ataatatgaacatcttagtatattgtcttctaatccttacattatgttatttttaagcagagtcaaactcatattctgtatataattgtatatacattgggtttttctcccttatagcaa

SEQ ID NO: 711171 - DNA, 120 bp, Artificial Sequence
  ENSG00000196935_98 (sequence is synthesized)
ttcacactaggagtctcagtcaacatgattttttaatggctgtataatattctagcgtatgaacacatcattatttaaccattttcctgtcactgagtgagcctgtttgaaggttttgtt

SEQ ID NO: 711172 - DNA, 120 bp, Artificial Sequence
  ENSG00000196935_99 (sequence is synthesized)
tttttttcaattgaatgttatgttgtggtgagcagctctgtatataataattaattgtctgtgtttggatcataaagttagcattgactccaaaaagtgaaatcactgggtcagaggatg

SEQ ID NO: 711173 - DNA, 120 bp, Artificial Sequence
  ENSG00000196935_100 (sequence is synthesized)
caattatctgtaaggctcatgacaaatattgccgacctgttttccagcaaagttgtacaaatttacatccctgccagtaatgcataacagtacacgagtataaaacatggtcatgtttct

SEQ ID NO: 711174 - DNA, 120 bp, Artificial Sequence
  ENSG00000196935_101 (sequence is synthesized)
ttaccagtgtactaggtgagtgataggctcaatgcaaattcttagcagtttgttaatgtgcacacccacatttccagagtacaaatctctatttcactcacctctgtgtcctaaacttca

SEQ ID NO: 711175 - DNA, 120 bp, Artificial Sequence
  ENSG00000196935_102 (sequence is synthesized)
gatgactctttattgtttcagctaaacatcagcaaacagagattttcctcaggcaccttaagctcaacagacccaaaaattaaacccactttgtttcattccaaaaaatattctgcagcc

SEQ ID NO: 711176 - DNA, 120 bp, Artificial Sequence
  ENSG00000196935_103 (sequence is synthesized)
cctctacatcctccaatctgttccgctgcctatctctgctctaagctaattctgtgcaccattccccttgccacaacgattgccgtagcttccacggtggtgtggctgtgcccactgtct

SEQ ID NO: 711177 - DNA, 120 bp, Artificial Sequence
  ENSG00000196935_104 (sequence is synthesized)
cctccttgaaatgattatctacactgctgccaataaatcatctttctcaaaaacaaaatgagaaacctaacaaacaatcattgaaaatgtaccatgtactgacatcgttttcctcaacac

SEQ ID NO: 711178 - DNA, 120 bp, Artificial Sequence
  ENSG00000196935_105 (sequence is synthesized)
gttgcatgtcaatagccaacatgtattgagtaccagactccatgctacaaatgttaaccctcataagaaagccaagagagccacagttattatcatcatctttatccgtaagaaaattaa

SEQ ID NO: 711179 - DNA, 120 bp, Artificial Sequence
  ENSG00000196935_106 (sequence is synthesized)
gccgcaggagttaaacacttgccctggtcacacagctagatagtgacagagcaggatttgattccacgccatctggtgctggaggctatgctcataaccactgctgcattctgacctctg

SEQ ID NO: 711180 - DNA, 120 bp, Artificial Sequence
  ENSG00000196935_107 (sequence is synthesized)
taacatgctcatgtcattaccctgctcaaaagccacacgtgggtccccactgctgcaggacggcatactactgtgtcttattcatctttgtatcttcaagcctaatgcatcactaactaa

SEQ ID NO: 711181 - DNA, 120 bp, Artificial Sequence
  ENSG00000196935_108 (sequence is synthesized)
atagcaaatcggcggaactgaaatgaattcaatgtctgccgctttgacctcagcctgccatttcagccttcctgctcaccacctcctcttcggaacctttagtttcagccatagcaagct

SEQ ID NO: 711182 - DNA, 120 bp, Artificial Sequence
  ENSG00000196935_109 (sequence is synthesized)
acctttctttgaaaatgtgatgctgtgtgctccctccgcatatacttcatgtcattcctcagcctaaaatgtcccctacttcatcctgacaactgcctgttgaaattatattcatcattc

SEQ ID NO: 711183 - DNA, 120 bp, Artificial Sequence
  ENSG00000196935_110 (sequence is synthesized)
caaacccaacaaaatggttacatccttcatgaagggttccccaaacctcccagctggcattaattgttctgttacattttgttttcattaaatcaggctcccttccggggatctagctgt

SEQ ID NO: 711184 - DNA, 87 bp, Artificial Sequence
  ENSG00000196935_111 (sequence is synthesized)
gttttcattaaatcaggctcccttccggggatctagctgtgaatgagacacacagggctcctggtctcatggagtgtacttcctggt

SEQ ID NO: 711185 - DNA, 120 bp, Artificial Sequence
  ENSG00000196935_112 (sequence is synthesized)
ggtgttgataactgctacaaaaagcaaaagtgaaataaacagggtgatagaatttagagtgtctaggagaagcattttagatgggacagcttgaatgccaccttggatgtggtagcattt

SEQ ID NO: 711186 - DNA, 120 bp, Artificial Sequence
  ENSG00000196935_113 (sequence is synthesized)
gagctaagacctgaataatgagaaggaaccagccatgtgaaaaggaagagaaagacccaagcagaaggaactgcacatgggaaaacaggaccatgctcacgtggttaaagagtcaaacac

SEQ ID NO: 711187 - DNA, 120 bp, Artificial Sequence
  ENSG00000196935_114 (sequence is synthesized)
attcactgtgactgtaccaccataagcaagaagccctggagatgaaaataaaggccagaatgtggacagagatcagattttggaggccaaagtaaggtacttaaaattagccgggcttgg

SEQ ID NO: 711188 - DNA, 120 bp, Artificial Sequence
  ENSG00000196935_115 (sequence is synthesized)
gtacttaaaattagccgggcttggtggtgcacaactgtaatcccacctactcgggaggctgaagcaggggaattgcttgaacccatgagacggaggttgcagtgacccgagattgtgcca

SEQ ID NO: 711189 - DNA, 120 bp, Artificial Sequence
  ENSG00000196935_116 (sequence is synthesized)
ccatctcaaaaaaaaaaaaaaaagtaaggtacttagatgtcattctaagttcaaggaaagccattggaagtttccaaaaaggaacatgacagcatctatatttttagaagatgaccctca

SEQ ID NO: 711190 - DNA, 120 bp, Artificial Sequence
  ENSG00000196935_117 (sequence is synthesized)
gaccctcaaaaccacaatgagatatcacctcatacccattaggatggccactctcaaatgatcaaactccagaaaataacaagtattggccagggtgtagagaaactgacacccttgtgc

SEQ ID NO: 711191 - DNA, 120 bp, Artificial Sequence
  ENSG00000196935_118 (sequence is synthesized)
actgttggtgggaatgtaaaatggtagagccactaaggaaaacagtgtggaagttcctcaaaaaattaaaaataaaaccctcatatgatccaccaagcccacttctgggtacatatccaa

SEQ ID NO: 711192 - DNA, 120 bp, Artificial Sequence
  ENSG00000196935_119 (sequence is synthesized)
aagaattgaaaacagaagagatatttgcacactcatgttcacgcagcttaattcacaatagccacaagagagaagcaacccatgaatggatgaatgggtaaagaaaatgtgccatacaca

SEQ ID NO: 711193 - DNA, 120 bp, Artificial Sequence
  ENSG00000196935_120 (sequence is synthesized)
taaaatagaatattatgcagccttaaaaaagaaggaattcctgtcatatgccacaatatggatgaaacttaaggatactaagctaagtgaaatgagccaatcaataaaggacaaacattg

SEQ ID NO: 711194 - DNA, 120 bp, Artificial Sequence
  ENSG00000196935_121 (sequence is synthesized)
catgattttacttctatgagatatctaaagtagtcaaactcttataaacagaaagcagaatggtgattgccagggatcgggatgaggaagaaaatggaaattgttgttcagtgtttacag

SEQ ID NO: 711195 - DNA, 120 bp, Artificial Sequence
  ENSG00000196935_122 (sequence is synthesized)
ggtttcagttttgcaagataaaaagttctaaagatctgttgtccaacaatatgcatgcagataacatcatattaaacatggttaagatagtaaattttatactatgtaattttttaacca

SEQ ID NO: 711196 - DNA, 120 bp, Artificial Sequence
  ENSG00000196935_123 (sequence is synthesized)
caattttaaacatcactgtagatgttgtagttgtgtttggggtccacgggtggggaggagcttgggaaggaatggcatgagggaagtgagagaccacaattaaggagcaacacaggagat

SEQ ID NO: 711197 - DNA, 120 bp, Artificial Sequence
  ENSG00000196935_124 (sequence is synthesized)
gagggtggcttggactagatagccaggtagaaggagaggaagggatgaaccgggggttcgtttcagagtcaaaatcaagatttgctaataaattaaatatgggaataaagaaagaaaaga

SEQ ID NO: 711198 - DNA, 120 bp, Artificial Sequence
  ENSG00000196935_125 (sequence is synthesized)
atcaagagtggctcctagtatttgtttgagcaaatgggtggaatatattgatatatacttaaaaagaatgactggggaaaggaagaagttggccaggatgtacaaccaagtattcacgtt

SEQ ID NO: 711199 - DNA, 120 bp, Artificial Sequence
  ENSG00000196935_126 (sequence is synthesized)
tgaatttatttaatttaagataggtattagacttccaagtggagaagtctaggaggcagatggacttgaagctcaggggaggatttctggccagaaggtgtaaatttgatatttaaagct

SEQ ID NO: 711200 - DNA, 120 bp, Artificial Sequence
  ENSG00000196935_127 (sequence is synthesized)
atgggactcccggaaagagaaagagaaaggaaggtacagagcacataaccaagccctgggaagcccagcttgggagagcttgggtggagtgaggagctggcagaggagacagaaggagca

SEQ ID NO: 711201 - DNA, 120 bp, Artificial Sequence
  ENSG00000196935_128 (sequence is synthesized)
gccagggcggaggaggaaaaccaggaggagcatgtaatgtgatcagtacccagggaagaaatgattgccatttctagtgtgcatttgttaacataaatatgataataaaaatagttaaca

SEQ ID NO: 711202 - DNA, 77 bp, Artificial Sequence
  ENSG00000196935_129 (sequence is synthesized)
tcctcccacctcagcctcccaagtacgagggattacaggtgcatgcaaccatgcccagctatgttaaggccgggcac

SEQ ID NO: 711203 - DNA, 120 bp, Artificial Sequence
  ENSG00000196935_130 (sequence is synthesized)
cgtctcaaaataaataaataaataaatatattaaaaaataaacaagttcaggcttgttaaatattttttatgtttgtttgtttgctttgttttttttgagacgtagtcccgctccgtctc

SEQ ID NO: 711204 - DNA, 78 bp, Artificial Sequence
  ENSG00000196935_131 (sequence is synthesized)
aacaagttcaggcttgttaaatattttttatgtttgtttgtttgctttgttttttttgagacgtagtcccgctcacga

SEQ ID NO: 711205 - DNA, 90 bp, Artificial Sequence
  ENSG00000196935_132 (sequence is synthesized)
ctgttggcagttaaatattttctatgtgccaagcactgtgctaactgctttcatattatcggatttagtcctgtaagaccggaatcatta

SEQ ID NO: 711206 - DNA, 120 bp, Artificial Sequence
  ENSG00000196935_133 (sequence is synthesized)
tcatattatcggatttagtcctgtaagaccggaatcattattatccccatttttcagattaaaacaaacaaacaaaagctgaggtttaaagaaattatctcttgtaaaatcacacagcta

SEQ ID NO: 711207 - DNA, 120 bp, Artificial Sequence
  ENSG00000196935_134 (sequence is synthesized)
acaattgagccagtatctggacctagatctattgcctacagagccgcacgtttaactactgttatcttgcctccttattgctccacacacttgaaatataaatttttaaagacattttat

SEQ ID NO: 711208 - DNA, 120 bp, Artificial Sequence
  ENSG00000196935_135 (sequence is synthesized)
tcttttttgtcttcatcagaatttattgaatcctgattattttttccttaatgttgattttgtagactcatttgcaggaagaacaatgtcaggtggagagaaggaattgaatgaatattt

SEQ ID NO: 711209 - DNA, 120 bp, Artificial Sequence
  ENSG00000196935_136 (sequence is synthesized)
ttaataaatttgtagatgttaatatgatttacttatttgcaattttcatagctatatgatattctatcccatttccagtgtttttgctcttttagtagcaaatactctgaatctctgcat

SEQ ID NO: 711210 - DNA, 120 bp, Artificial Sequence
  ENSG00000196935_137 (sequence is synthesized)
atgttactcattttctatcatcctattccttgtgatggatacccaagggtactcatctacaggatgaaagggtatgagcacgtttctaggtgccctgaccccaagattaggggttttgtt

SEQ ID NO: 711211 - DNA, 120 bp, Artificial Sequence
  ENSG00000196935_138 (sequence is synthesized)
agaggcaaagctaaaaggaaatgataaaataaatgaatatttatagaagttaaatctattaatctagccttattacaccgagtacaacagggaataataagccatctatctgaacgtgca

SEQ ID NO: 711212 - DNA, 120 bp, Artificial Sequence
  ENSG00000196935_139 (sequence is synthesized)
cggttagggcctcaaggaaagtgggctcagcaatgagtgttggtacacatggaaaatcacatttgccatgttttctatggctttgggctgctgctgcatcactgcagtttaataggagga

SEQ ID NO: 711213 - DNA, 120 bp, Artificial Sequence
  ENSG00000196935_140 (sequence is synthesized)
ggctggtgaaaatgttaccaactgccaggggtcaatggcgaaagaacacatttctctaggaaagattaccttctctgaagaagtgatagggggaataaggcataaaattatctgacctga

SEQ ID NO: 711214 - DNA, 120 bp, Artificial Sequence
  ENSG00000196935_141 (sequence is synthesized)
gagaccttaacagctaggcctgcactgctcatgctttgggaccagaaagcggatggtttgatatggtagctgcacttctaaaaaaaaaagggggcattcttggcaggagaaagggtgtta

SEQ ID NO: 711215 - DNA, 120 bp, Artificial Sequence
  ENSG00000196935_142 (sequence is synthesized)
catggaaagatcagcgatagtacacacgccttcccatagagtgaggtggctttcccacccctcaacactccttcagacccccactgtaacaaagggatgtgtctacctctaaattcatca

SEQ ID NO: 711216 - DNA, 120 bp, Artificial Sequence
  ENSG00000196935_143 (sequence is synthesized)
tttactgaacaaataactcatgagggttaccatatgtctgacactgtaggaagagctgaagcagggcctaaaacactatagtgcaagtatctgtttacacatctgtatgagagtaattga

SEQ ID NO: 711217 - DNA, 120 bp, Artificial Sequence
  ENSG00000196935_144 (sequence is synthesized)
tgctagctgctgtaacaaacaaccccccaaactcagtaacacaatcaagctgtatttctccttcacatcatagcctggtgtgggtcaggtaggtgactcagggttctaggctccttccat

SEQ ID NO: 711218 - DNA, 120 bp, Artificial Sequence
  ENSG00000196935_145 (sequence is synthesized)
ttttttgtcgctgccacactggaaatgggatagaatatcgtatagctatgagaattgcaaataagtaaattatattaacatgtacaaatttattaaaaatactctttcaattccttctct

SEQ ID NO: 711219 - DNA, 120 bp, Artificial Sequence
  ENSG00000196935_146 (sequence is synthesized)
ctgcctgacattgttcttcctggaaatgagtctacaaaatcaacattaaggaaaaaatgatcaggattcaataaattctggatagaaaaaagaataaaatgtctttaaaaatttatattt

SEQ ID NO: 711220 - DNA, 120 bp, Artificial Sequence
  ENSG00000196935_147 (sequence is synthesized)
caagtgtgtgggggcaataaagaggccagataatagtagttaaatgtggggctctgtaggcaatagatctaggtcagatactggctcaattgttagctgtgtgatttcacaagagataac

SEQ ID NO: 711221 - DNA, 120 bp, Artificial Sequence
  ENSG00000196935_148 (sequence is synthesized)
tgatgctagctgctgtaacaaacaaccccccaaactcagtaacacaatcaagctgaatttctccttcacatcacaacttggtgtggatcgggcaggtgactcagggttctgggctccttc

SEQ ID NO: 711222 - DNA, 120 bp, Artificial Sequence
  ENSG00000196935_149 (sequence is synthesized)
cattttttttgttgctgccaccttagtacgtggccaccatgaagaggaagagaaagcacttgcaatgatgtgaggttttctgtcttggtatggaggagacatgaatcactactgtacatg

SEQ ID NO: 711223 - DNA, 120 bp, Artificial Sequence
  ENSG00000196935_150 (sequence is synthesized)
gaggagacatgaatcactactgtacatgtccaagtcacatggcaagggaggccaggaaatgtcatcttcctataatgcaagaaaaagaacccagggccgggcacagtggctcacgcctat

SEQ ID NO: 711224 - DNA, 120 bp, Artificial Sequence
  ENSG00000196935_151 (sequence is synthesized)
agaggattgcttgagcccagagcaattaaacactgcctggtgcatagttagtgctcaagaattgtgctataatcaatgttactaaattatctaggattagatgtttctaaattaaaacta

SEQ ID NO: 711225 - DNA, 120 bp, Artificial Sequence
  ENSG00000196935_152 (sequence is synthesized)
tttcctgctttgtatttgtcctttattccaaaaacttaaaaatttctcatttctggtttgtcagggatgaaatactaaagcaacttcatggattgtgatttcaagtatatgaaaagttta

SEQ ID NO: 711226 - DNA, 120 bp, Artificial Sequence
  ENSG00000196935_153 (sequence is synthesized)
agacccaattgcttttgaaggagattcatctagaaaaaccagggattcaaacccaacacatcgggtgctaaagtctaccctcttagttgacatagaattaaattaaaatcagtattgatt

SEQ ID NO: 711227 - DNA, 120 bp, Artificial Sequence
  ENSG00000196935_154 (sequence is synthesized)
agttgacatagaattaaattaaaatcagtattgattggattatgctttgataaaaatgtaacttcatttaagtctagtaaataattaggattatgaggtcaggagtttgagaccagcctg

SEQ ID NO: 711228 - DNA, 120 bp, Artificial Sequence
  ENSG00000196935_155 (sequence is synthesized)
agcctgggtgacagggtgagactccatcttaagaagaaaaaaaaagcaattacttttgcaccaacctaataaaaatgaaaaatcccaatgaaaatgcatgaatatcatgtgccttgacaa

SEQ ID NO: 711229 - DNA, 120 bp, Artificial Sequence
  ENSG00000196935_156 (sequence is synthesized)
acaacttacggagcatttggaacatgtcaaacagtaatcagaggtcaggttgaggaaaaaatgataagaaccctctctgccccaccattcacatcattcagtggatctatgtactaaatc

SEQ ID NO: 711230 - DNA, 120 bp, Artificial Sequence
  ENSG00000196935_157 (sequence is synthesized)
gtggatctatgtactaaatctagccagtgggttgtgagcaaaaatgatctgtgtcacttgtgggttaaaatataaaagagtgctaggcacactggctcgcacctgtaatcccagcacttt

SEQ ID NO: 711231 - DNA, 89 bp, Artificial Sequence
  ENSG00000196935_158 (sequence is synthesized)
cagcctgggcaacatagcaagaccccatccctacaaaacagttttttaaaaaactagctgtagggaactttagaaggccgaggtgggtg

SEQ ID NO: 711232 - DNA, 90 bp, Artificial Sequence
  ENSG00000196935_159 (sequence is synthesized)
ttgtggtggtgtgtgatgaaaggatcgcttgagcctgggaggtagacgctgcagtgagctgagatcatacctctgcacttcagcctgggt

SEQ ID NO: 711233 - DNA, 90 bp, Artificial Sequence
  ENSG00000196935_160 (sequence is synthesized)
taacaataacgtatgagagaggattcaagctttccaagcagtctcttcccctgccatggcactcatagaagcctcccgttaagatggcag

SEQ ID NO: 711234 - DNA, 120 bp, Artificial Sequence
  ENSG00000196935_161 (sequence is synthesized)
ctgccatggcactcatagaagcctcccgttaagatggcagagctgtaatgctagaaaagcacagactgttaagtcactgcatggaggatggtcatcctggagaattgtttggactcgagt

SEQ ID NO: 711235 - DNA, 120 bp, Artificial Sequence
  ENSG00000196935_162 (sequence is synthesized)
ggactctacaacagcaggaaataaactactgttatatcaagctactgacattgagaattaggttgcatagttatgccacagcataatgtagcctttcctgatgcatacaattacttttcc

SEQ ID NO: 711236 - DNA, 120 bp, Artificial Sequence
  ENSG00000196935_163 (sequence is synthesized)
tttcttttttcttttccctggagttcataattacctttgtttcatttgcttagctttctatttacataaataggtaaaaattccttctcaaaaatcttttacagaagtgttctcaaactc

SEQ ID NO: 711237 - DNA, 120 bp, Artificial Sequence
  ENSG00000196935_164 (sequence is synthesized)
aatgcattgaaacatgctatagtttataaatcttggatccatcacttaaagaggcatttgacctgtttcagtatggataagttgttctctaagtctactgcatagctgagagcctaagat

SEQ ID NO: 711238 - DNA, 120 bp, Artificial Sequence
  ENSG00000196935_165 (sequence is synthesized)
ctctggggactcactccacttttctcttgagttggttccactatttcctggaacctcatacagccatctcagctagtcatgactgacctagatttaacacagtatatccttaatcagctt

SEQ ID NO: 711239 - DNA, 120 bp, Artificial Sequence
  ENSG00000196935_166 (sequence is synthesized)
cctgattgagagtgtattttgagacattccatgtctagaaagtgtctttatctcacatgtaattgtgatagtctggctgagtataaaatcttacttaggatgttaacttaaaatcaatgt

SEQ ID NO: 711240 - DNA, 120 bp, Artificial Sequence
  ENSG00000196935_167 (sequence is synthesized)
ggtcaaggaaaggaggaaaaatatgtcctcctagtaattcccagtgtaagtggaaatgacccagccctagatttacttggctttagtttccatcaccatagatttctcaatcaaaaggca

SEQ ID NO: 711241 - DNA, 120 bp, Artificial Sequence
  ENSG00000196935_168 (sequence is synthesized)
aatatatctcatatgtcggaagattaatgtatgaataatcagtaccactggcatatggctactctcctattttccttacccctttgtcttcacaaggaagcccagactctgtttgccagt

SEQ ID NO: 711242 - DNA, 120 bp, Artificial Sequence
  ENSG00000196935_169 (sequence is synthesized)
ggctgggtcctggggccgataacttcaagctaaacattcaatatcagtatggtaggtgaggaagattttctcagagtggctcattatctggaaagtgtaagaatgaggtggcagaaagag

SEQ ID NO: 711243 - DNA, 120 bp, Artificial Sequence
  ENSG00000196935_170 (sequence is synthesized)
gtagaaacagcatgaaaaggcagagccaaggagagatcgacaaacaagaaggattgtgcccatatttctctattctctctagcattatgaatcatttcccctcaggattttggagatgtt

SEQ ID NO: 711244 - DNA, 120 bp, Artificial Sequence
  ENSG00000196935_171 (sequence is synthesized)
gcatcagtgttgctaccgaacattccaaagccattctaattctgttactttgtatgttcttttttttccctatacataatttactattgcatgtttttctcagggtttctgaaatttcag

SEQ ID NO: 711245 - DNA, 120 bp, Artificial Sequence
  ENSG00000196935_172 (sequence is synthesized)
aatatcctgatgtggatctattttgattcattgtactgaagaccatttcagcccatcttacactttgattctggaaagtcttcttttccctggagcttataattacttttatttcatttg

SEQ ID NO: 711246 - DNA, 120 bp, Artificial Sequence
  ENSG00000196935_173 (sequence is synthesized)
cttagctttctatgtacataagtagataaaaattaattcattctcaaaatcttccacagaaatgctttcaaactcaatgcattaaaaacatgctatagtttataaaccttcttggatcta

SEQ ID NO: 711247 - DNA, 120 bp, Artificial Sequence
  ENSG00000196935_174 (sequence is synthesized)
tcaaggaagatttatttgattattttatctcctccattccatctgttttcttataattcctaatatttggaggttggacctcatgaactgatcctataattttactaattttcctccagt

SEQ ID NO: 711248 - DNA, 120 bp, Artificial Sequence
  ENSG00000196935_175 (sequence is synthesized)
ttttcatctatttgactttttgctctattttcagggaaatatcctcaactttatctgctaactcttctgttaagtactttatttctgctctcatgcttttaatttccaaaagctcttttt

SEQ ID NO: 711249 - DNA, 120 bp, Artificial Sequence
  ENSG00000196935_176 (sequence is synthesized)
gtgagctggctgttcatttttttatagaatcctgtccttatttgacaggtcctatatatttttttattttgagattattagtgatagttcttctaagttttcttctctctgcacactgta

SEQ ID NO: 711250 - DNA, 120 bp, Artificial Sequence
  ENSG00000196935_177 (sequence is synthesized)
tttcctctaagttgcttttttaaatttttgacctgtgtttgctttgctttcgtttatgttacaggctttcctaaaattcctggtgatccttggctatctgctcgaatttaaaaacaagca

SEQ ID NO: 711251 - DNA, 120 bp, Artificial Sequence
  ENSG00000196935_178 (sequence is synthesized)
ctaaagaagggcactaaaaaacagattgtcatagcagtattatccataatagccaaatgatagaagcaatgcaaatgtccatcaacagagggacaaatgaataagcaaatgtggtatatt

SEQ ID NO: 711252 - DNA, 120 bp, Artificial Sequence
  ENSG00000196935_179 (sequence is synthesized)
gatacaatggaatactattctgtaatgaagatgggaaagaacggagtactgatacacgctacaacatgggtaaactgaaaacattattacgtgaaataagccagtcataaaccacatatt

SEQ ID NO: 711253 - DNA, 120 bp, Artificial Sequence
  ENSG00000196935_180 (sequence is synthesized)
gtgtatattttatccataagaaatgttcagaataggcaaatctataaaaatacaaagtagatttgtagttgctgagggctgggaaaagggtttggggagagaaatgactgctaatgggag

SEQ ID NO: 711254 - DNA, 120 bp, Artificial Sequence
  ENSG00000196935_181 (sequence is synthesized)
tatgggatgttcttttggggctgataaaatgttccaaaattcattgtgtgataactacacatctgtaaatatactaaaaaccactgaattgtatccaataaagtactaaattgtatgata

SEQ ID NO: 711255 - DNA, 120 bp, Artificial Sequence
  ENSG00000196935_182 (sequence is synthesized)
cttgctgttaatgaacttggttaaacatggtcaagtgtatgtatgtatatattatcagtactggccttctctatctaagaggaatagcaagaaatttagagacattatttggacattgat

SEQ ID NO: 711256 - DNA, 120 bp, Artificial Sequence
  ENSG00000196935_183 (sequence is synthesized)
ttctactaactccactgaattagattcagccttcactttttgggaaatgcacggacactgggaaagatgaaatgaagaagttttccagcatgatgttcttgtctttggagcttagcctta

SEQ ID NO: 711257 - DNA, 120 bp, Artificial Sequence
  ENSG00000196935_184 (sequence is synthesized)
cttaggtcttagaacaaaaacaagtcggtagttattagttactgtatctcattttccaaaacacacgtttctttgttacagtcatttacacatatttttgcatgccacatttttgctttt

SEQ ID NO: 711258 - DNA, 120 bp, Artificial Sequence
  ENSG00000196935_185 (sequence is synthesized)
gagcttttgctgaatcactaaatgaccacctttcatgttcctaatgtattaaaattatcagaggattctttgaggattaaatgtgtcagtaagggtattattttgaacaatgcgtaaaag

SEQ ID NO: 711259 - DNA, 120 bp, Artificial Sequence
  ENSG00000196935_186 (sequence is synthesized)
gtgaaggccagctgaagaggcctttttgttgtgaacagaataatatactggaatctgaggactgcactgttatgaatggattatttggctatggaaagaagttatttttaggcacagcat

SEQ ID NO: 711260 - DNA, 120 bp, Artificial Sequence
  ENSG00000196935_187 (sequence is synthesized)
ccctataagccctgaagctatgtgttttacaaactagaaattatgcactaaataaaaattaccagatgtcagtctctgtatgtgccaaatggcaaatgtgtaatggttcagagcctggaa

SEQ ID NO: 711261 - DNA, 120 bp, Artificial Sequence
  ENSG00000196935_188 (sequence is synthesized)
gaaatgatgcttatttctttgccattcaaactcaaaagggatagctgaggtagagtgctgttgaaaaaattgcagtgtttccagctacccaaagatgttacgaattgttatctgaaaggc

SEQ ID NO: 711262 - DNA, 120 bp, Artificial Sequence
  ENSG00000196935_189 (sequence is synthesized)
tttcattctttcccctcatggctcgttgtgtgtttgtggcattacaaatgtaacccacatatttattctaatttattacattctttcctgaggctcctcttgttcttttaaagggtcagc

SEQ ID NO: 711263 - DNA, 120 bp, Artificial Sequence
  ENSG00000196935_190 (sequence is synthesized)
agataacttattttaagaatcaacctggacacagtattctaacaaaggtccaatacagagctaaataaataataggagtcatagccagacacagtgactcacgcctgtaatcccaacatt

SEQ ID NO: 711264 - DNA, 120 bp, Artificial Sequence
  ENSG00000196935_191 (sequence is synthesized)
tatatatatatttatatatatttcgtgacttatatcttgcacataccagcatacctcattaattttaatgtaaccatccattggcttctcttctctccttagaaattcgagctcaactgg

SEQ ID NO: 711265 - DNA, 120 bp, Artificial Sequence
  ENSG00000196935_192 (sequence is synthesized)
tgaagatggtatgctctccccttatgctattataaagccagtctttatatccctattgtaaacaattgcttgtattaacattttagaggcaaagcacagtggctcctacctataatccca

SEQ ID NO: 711266 - DNA, 120 bp, Artificial Sequence
  ENSG00000196935_193 (sequence is synthesized)
tgtttagatttggttttgtttgtatatgtcatgattaagttctcctggcacgattttcttctaaagcatggtgctaaccttgaggaagcgtagtgaaatctagggagggctggaaagtca

SEQ ID NO: 711267 - DNA, 120 bp, Artificial Sequence
  ENSG00000196935_194 (sequence is synthesized)
ataccgagctcctagggagggatcttcagagtgtggtgctcctgatcgtagaaaagtctggaaacactgcccctcccctacctgctgaccccccagtctcttcttccttcccttctcaga

SEQ ID NO: 711268 - DNA, 120 bp, Artificial Sequence
  ENSG00000196935_195 (sequence is synthesized)
cttctgcacccttccaaccccacccctgtttgttttaatgggcgagtatttgttgttccatctgttgcctgtttagactctggaaaccagttaaaccagtttgggtgatttttttctttc

SEQ ID NO: 711269 - DNA, 120 bp, Artificial Sequence
  ENSG00000196935_196 (sequence is synthesized)
agcaggcattggctgtagttgagaaacaatcttaaagtataagtagattgctatgtctaataatagtaacaaaacaacagcaacagctaacacttgaaaggctttctctgtgccaggctt

SEQ ID NO: 711270 - DNA, 120 bp, Artificial Sequence
  ENSG00000196935_197 (sequence is synthesized)
tgttctgagttgtatattttactgtgcactaataatttctccgtttttacaaatgaggaaactgaggggaggcatgagaatacaggcaaaggggactgtataaatgttaatgtttctctt

SEQ ID NO: 711271 - DNA, 120 bp, Artificial Sequence
  ENSG00000196935_198 (sequence is synthesized)
tgtctttatgaaatttaaaaggaaaaaaataaatacaagccaagttcctgtcttaagtgcttcatagtctgtaactttatcttttattcacactagaccctgccagaagttagaaaaagt

SEQ ID NO: 711272 - DNA, 120 bp, Artificial Sequence
  ENSG00000196935_199 (sequence is synthesized)
aaaagagaatgtggaagggagtgggaaatgagaggactgagttgtgtgagtaactcaggtcaaaaaagagattgcgcctcttagacctaaattcttgcctcccacaattctggaaccttc

SEQ ID NO: 711273 - DNA, 120 bp, Artificial Sequence
  ENSG00000196935_200 (sequence is synthesized)
cttaaccataaagtttctatcaccttatctcctggtttccaccaaagaactcatcatcctcagggaatgaccacatggagaaaggttatcatgacctaagaaccatgtctgacacagtta

SEQ ID NO: 711274 - DNA, 120 bp, Artificial Sequence
  ENSG00000196935_201 (sequence is synthesized)
ggatgaaaaggccaattacacctagaaggaaaaaaaaaaaacaacgcaaactactaaaaagtgtcattaaaaaataaaataaccaaatacaatgtatgaaccttcacacactagattaaa

SEQ ID NO: 711275 - DNA, 120 bp, Artificial Sequence
  ENSG00000196935_202 (sequence is synthesized)
ttagatactgaatcaaaaagcaaaagttatgaaagacattttaagaacaattagggaagttgaaatacagactgtatattaaataatattattgaattagtgttaattttcctagatatg

SEQ ID NO: 711276 - DNA, 120 bp, Artificial Sequence
  ENSG00000196935_203 (sequence is synthesized)
ataatggtattgtgattataaagaagaacattcttattcttaagaaatgcttgctaaagtgtcatgatgtctgcaacttaccttcaaatggttctaaaaaaaaaaagagggagagagaaa

SEQ ID NO: 711277 - DNA, 120 bp, Artificial Sequence
  ENSG00000196935_204 (sequence is synthesized)
gaaggtacagtcaatgtggcaaacattaacagccggaaaatctacatgaaggggataaggatacttcctgtactgctcttttaactcttctgtaggtttgaactttaaaaaaaaaaaaaa

SEQ ID NO: 711278 - DNA, 120 bp, Artificial Sequence
  ENSG00000196935_205 (sequence is synthesized)
ccagcagtgggccagtcacggaagacaagtcctcatccaaggacatgaactccccgacagaccgtcatcctgacggctatttagccaggtaagtagagcctgggaatcaggcccctaagc

SEQ ID NO: 711279 - DNA, 120 bp, Artificial Sequence
  ENSG00000196937_0 (sequence is synthesized)
acttgccggggtgaggggcagccggaggagtccgagaggaagcggaggcgcgagctggaggcggcggctcccgtcggcctccggcaggactgagcgctgggaggccggaaggcgggcgcg

SEQ ID NO: 711280 - DNA, 120 bp, Artificial Sequence
  ENSG00000196937_1 (sequence is synthesized)
cgcggcggagaggcgggcgggaggccggagcatattaatgaaaagtgccataaactgaaaaaccaaacatgagggtagcaggtgctgcaaagttggtggtagctgtggcagtgtttttac

SEQ ID NO: 711281 - DNA, 120 bp, Artificial Sequence
  ENSG00000196937_2 (sequence is synthesized)
tgacattttatgttatttctcaagtatttgaaataaaaatggatgcaagtttaggaaatctatttgcaagatcagcattggacacagctgcacgttctacaaagcctcccagatataagt

SEQ ID NO: 711282 - DNA, 120 bp, Artificial Sequence
  ENSG00000196937_3 (sequence is synthesized)
gtgggatctcaaaagcttgccctgagaagcattttgcttttaaaatggcaagtggagcagccaacgtggtgggacccaaaatctgcctggaagataatgttttaatgagtggtgttaaga

SEQ ID NO: 711283 - DNA, 120 bp, Artificial Sequence
  ENSG00000196937_4 (sequence is synthesized)
ataatgttggaagagggatcaatgttgccttggcaaatggaaaaacaggagaagtattagacactaaatattttgacatgtggggaggagatgtggcaccatttattgagtttctgaagg

SEQ ID NO: 711284 - DNA, 120 bp, Artificial Sequence
  ENSG00000196937_5 (sequence is synthesized)
ccatacaagatggaacaatagttttaatgggaacatacgatgatggagcaaccaaactcaatgatgaggcacggcggctcattgctgatttggggagcacatctattactaatcttggtt

SEQ ID NO: 711285 - DNA, 120 bp, Artificial Sequence
  ENSG00000196937_6 (sequence is synthesized)
ttagagacaactgggtcttctgtggtgggaagggcattaagacaaaaagcccttttgaacagcacataaagaacaataaggatacaaacaaatatgaaggatggcctgaagttgtagaaa

SEQ ID NO: 711286 - DNA, 120 bp, Artificial Sequence
  ENSG00000196937_7 (sequence is synthesized)
tggaaggatgcatcccccagaagcaagactaatggaaatgtggagagaattgaagaaagcgcactttcactcttaatgggagagctataaatggcagagctatgtgtaaatattttaaga

SEQ ID NO: 711287 - DNA, 120 bp, Artificial Sequence
  ENSG00000196937_8 (sequence is synthesized)
gcatgcagccatcttggtgtgtgcatgagtattgtctcttttgatatcaggattatttattgctaacgtaaatagatagcattgtaaataatcatcacaatgatcaaatcactgaaccat

SEQ ID NO: 711288 - DNA, 120 bp, Artificial Sequence
  ENSG00000196937_9 (sequence is synthesized)
gtctccgcacatttccctaaaagtacaatgtttagactgctatggtaatacatattttaaattctaaaagcatacacaatgtgtaactgaatggtttgtgaaaaatatattgatatatat

SEQ ID NO: 711289 - DNA, 120 bp, Artificial Sequence
  ENSG00000196937_10 (sequence is synthesized)
ttttcttttatgtttctatatgttgcgttgtgatgacattatcttttaaattaaaaagagatttggctagttgtgtgtgtaatgttactttacagtccgactctcctgatgtacctcttt

SEQ ID NO: 711290 - DNA, 120 bp, Artificial Sequence
  ENSG00000196937_11 (sequence is synthesized)
tcatgatctttttctttccttcccaagaaactgaggaatgtttaatatgaaaacatacatcggatatgtgaaaagcacaacaaaattcttaatgtacacagtaaaaaagtaaatatataa

SEQ ID NO: 711291 - DNA, 120 bp, Artificial Sequence
  ENSG00000196937_12 (sequence is synthesized)
atgtagatggcatttaggaccacagcttgctggatttgtgttagctatgggaataacttgattttgtataagctatttagagtgaggctggaggtggcagcttcacagaactggagaacc

SEQ ID NO: 711292 - DNA, 120 bp, Artificial Sequence
  ENSG00000196937_13 (sequence is synthesized)
aggccaagtcccctccccaacctaattaggtcattcaggacagctaagtcagtatatttagagcaatactagcatacgtttttcttaattgttatcagcattgaccaagtggtttggaag

SEQ ID NO: 711293 - DNA, 120 bp, Artificial Sequence
  ENSG00000196937_14 (sequence is synthesized)
gaggcatgctttaatatcacaataattttgatttgtaaaccaagaaattaatcctgtgtttatctaacttcataatagcaattattgcccgaagctatagtggcatatttacaaaagttc

SEQ ID NO: 711294 - DNA, 120 bp, Artificial Sequence
  ENSG00000196937_15 (sequence is synthesized)
ttattactgggcggactgataacatttaaaaaataattgtgtttgaccccaaatgactttatacccaattctacataaaaatatagaagatctatctttttttgttaccttcagatgttc

SEQ ID NO: 711295 - DNA, 120 bp, Artificial Sequence
  ENSG00000196937_16 (sequence is synthesized)
actaaataactcagtttttaagcagaagttttcagggcattaaatatatgttgtgtatgaagtatctcaaactggaacataaatttagtgatcaaactgccattcacagtgtaaggcagc

SEQ ID NO: 711296 - DNA, 120 bp, Artificial Sequence
  ENSG00000196937_17 (sequence is synthesized)
acttaaatttcgaacctaaagtttagatgcattgtataaaaaaacctaaaagcagtatctgttatttagctgtaaaccaagttggaagctattcggataatttcttaaatattgatgaac

SEQ ID NO: 711297 - DNA, 120 bp, Artificial Sequence
  ENSG00000196937_18 (sequence is synthesized)
tttggagtactgtttcttccttcaaactgaatgtaattaattcatgaataaatgcaccttatatgtttaaacaatctttgtatacttttgggatttttggtgcttatatgctaaatcaca

SEQ ID NO: 711298 - DNA, 120 bp, Artificial Sequence
  ENSG00000196937_19 (sequence is synthesized)
ttcagcatgtgtattttgacatttaaaatacttccctcaattctgtaaattaaaagaatagttattttacagttccagggattgtgaaataaatgttgcagttttttaaaataatgaaaa

SEQ ID NO: 711299 - DNA, 120 bp, Artificial Sequence
  ENSG00000196937_20 (sequence is synthesized)
aagagagcagaaaagagattatcttttgtttgataccttaagaatgatgcagaacatatgcttaatgtccatgttttaagaataatctgaagcagtgtagcacaaaaatggtctattatt

SEQ ID NO: 711300 - DNA, 120 bp, Artificial Sequence
  ENSG00000196937_21 (sequence is synthesized)
tcaggcctaatattttttaatatgtatttctatttgtgaaatattatttaaggacattgctttaaaattattcagtattagactgtcttctctgacttagtagagatctttttaatttcc

SEQ ID NO: 711301 - DNA, 120 bp, Artificial Sequence
  ENSG00000196937_22 (sequence is synthesized)
ctgatatgttattgtacaatatttaattctaaatttatttcaatttctcccccttcagtttaatgagtggtgttaagaataatgttggaagagggatcaatgttgccttggcaaatggaa

SEQ ID NO: 711302 - DNA, 120 bp, Artificial Sequence
  ENSG00000196937_23 (sequence is synthesized)
aaacaggagaagtattagacactaaatattttgacatgtggggaggaggtaagcataaataacatgactgtgttcttttgctggcactgacttaatcacctcaatacaatgtagcccatt

SEQ ID NO: 711303 - DNA, 120 bp, Artificial Sequence
  ENSG00000196937_24 (sequence is synthesized)
aatgagagaatgatgatgctatttgcgttagttcattttgtttcccttactttctgttcactaaatgtccagctgtatttaagttatcattcatgttttatatactttcttcttcttaga

SEQ ID NO: 711304 - DNA, 120 bp, Artificial Sequence
  ENSG00000196937_25 (sequence is synthesized)
taaaaagttaaatgaaggtgaattgttgtgaaataaaaacctaacaggtccttttaatagaataaacttaaaattaattgttggagttcatgtcttttgtcactaaagaattcaaccagt

SEQ ID NO: 711305 - DNA, 120 bp, Artificial Sequence
  ENSG00000196937_26 (sequence is synthesized)
agaaatgtaactctgaaaaaaaattattttccaaaatgttctgttatttaaagtctcattttgtctcatgttttgtgttaatatcccagtgaaccagtattagcatacagttccctctgt

SEQ ID NO: 711306 - DNA, 120 bp, Artificial Sequence
  ENSG00000196943_0 (sequence is synthesized)
gcccgcgtttctaaactttgtctggataaggcgcacgcttggcgacgtcgaaggtccgtccgcagttaaggaagcttttgcagccggacaggtcgcgaagcacacatggggcagggtccg

SEQ ID NO: 711307 - DNA, 120 bp, Artificial Sequence
  ENSG00000196943_1 (sequence is synthesized)
cgctctccacacaaggtggggcgccggttcccagctggtggcaaacgggggcgcggggccaaggggtcggggcgccccttaccaggccgtaagcggcaaccctggccgcctccggatggg

SEQ ID NO: 711308 - DNA, 120 bp, Artificial Sequence
  ENSG00000196943_2 (sequence is synthesized)
cgctcggagccggctccagattcgcacccgcacctgagcccggaagctctgggatatttccgccgggcgctgtcagcattgaaagaggctcccgagactggggaagaacgagatctgatg

SEQ ID NO: 711309 - DNA, 120 bp, Artificial Sequence
  ENSG00000196943_3 (sequence is synthesized)
gtgcacaatataatgaaggaagtagagactcaggccctagctttgtccacgaacaggactggcagtgagatgctgcaggaactgttgggattcagtcccttgaaaccgctttgtcgcgtg

SEQ ID NO: 711310 - DNA, 120 bp, Artificial Sequence
  ENSG00000196943_4 (sequence is synthesized)
tgggctgctctgcgctctaacttgcgcactgtggcctgtcaccgatgcggggtccatgtattacaaagtgctttgctacagctccctcgattgctggggagtgctgcagaggaggaggag

SEQ ID NO: 711311 - DNA, 120 bp, Artificial Sequence
  ENSG00000196943_5 (sequence is synthesized)
gaggaggaggaggatggaaaggatggtcccacggagaccctggaggagctggtcctgggactagccgctgaggtgtgtgatgattttcttgtctactgtggagacacacatggcagcttc

SEQ ID NO: 711312 - DNA, 120 bp, Artificial Sequence
  ENSG00000196943_6 (sequence is synthesized)
gtggtcagaactctgcttcaggtgttaggagggactattctggagtctgagagagccaggccccgtggttcccaatcatctgaagcacagaagaccccagctcaggaatgtaagccagct

SEQ ID NO: 711313 - DNA, 120 bp, Artificial Sequence
  ENSG00000196943_7 (sequence is synthesized)
gattttgaagtccctgaaacctttttgaatcgccttcaggacctgagctcctcctttctgaaggacattgcagtgtttatcactgataagatctccagcttctgtcttcaagtggcttta

SEQ ID NO: 711314 - DNA, 120 bp, Artificial Sequence
  ENSG00000196943_8 (sequence is synthesized)
caggttttacaccgcaaacttccccagttttgcgctcatctctgcaatgctgtgattggctacctgagtactcgcggttcctcagtagatggcagtcccctactgctatttctccgagat

SEQ ID NO: 711315 - DNA, 120 bp, Artificial Sequence
  ENSG00000196943_9 (sequence is synthesized)
cagacgagttccagactcctggagcaggtcctgctggtgttggagcccccaagactccagagcctctttgaggagcacttgcaggggcagctgcagaccctggctgcacatcccattgcc

SEQ ID NO: 711316 - DNA, 120 bp, Artificial Sequence
  ENSG00000196943_10 (sequence is synthesized)
aacttccctttgcagcgcttactggatgcagtcactacccctgagctgctgtcccctgtgtttgaggagctgagccctgtcttggaagctgtattggcccagggccacccaggggtagtc

SEQ ID NO: 711317 - DNA, 120 bp, Artificial Sequence
  ENSG00000196943_11 (sequence is synthesized)
attgccctggtgggggcctgtcgcagagttggggcctaccaagccaaggtcctacagctcttgttggaggcattccactgtgcagagccctcatcccggcaagtggcctgtgtgcctctc

SEQ ID NO: 711318 - DNA, 120 bp, Artificial Sequence
  ENSG00000196943_12 (sequence is synthesized)
tttgccactttgatggcttatgaggtgtactatggactgacggaggaggagggggcagtgcctgcagagcaccaggtggcaatggccgcagccagagccttgggggatgtgacagtcctt

SEQ ID NO: 711319 - DNA, 120 bp, Artificial Sequence
  ENSG00000196943_13 (sequence is synthesized)
gggtctctactgctccagcatctgctgcacttctccactcctggtcttgtacttcgaagtctgggtgccttgacgggaccacagcttctgtcccttgcccaaagtcccgctggctctcat

SEQ ID NO: 711320 - DNA, 120 bp, Artificial Sequence
  ENSG00000196943_14 (sequence is synthesized)
gtgctcgatgccatcctgaccagcccctctgtgacgcgcaagctgcgccgccgtgtgctgcagaacctaaagggacaatatgtggctctggcctgtagtcgccatggcagccgtgtgcta

SEQ ID NO: 711321 - DNA, 120 bp, Artificial Sequence
  ENSG00000196943_15 (sequence is synthesized)
gatgccatctggagtggagcagccttgagggcccggaaggaaattgctgctgagcttggggagcagaaccaggagctgataagagaccctttcggccaccatgtggctcgaaatgtggcc

SEQ ID NO: 711322 - DNA, 120 bp, Artificial Sequence
  ENSG00000196943_16 (sequence is synthesized)
ttgactaccttcctaaagcggcgagaggcttgggaacagcagcagggtgcggtggccaagcggaggcgggcattgaactccatacttgaagactgaggctttggatctgggactgggtgt

SEQ ID NO: 711323 - DNA, 120 bp, Artificial Sequence
  ENSG00000196943_17 (sequence is synthesized)
tgatgggggagggcaaaatggggtatccaccccatccctttcctggtttaaattggagtcagaagtcttagtggtaaatatttgatatttttattggaaatgtttttgttagtttgaggg

SEQ ID NO: 711324 - DNA, 120 bp, Artificial Sequence
  ENSG00000196943_18 (sequence is synthesized)
gaagggtatgaagacagatctcaaggtaaagtcagagagggctgtcatcagtatgctggggagtttagggacaggaggcattggtaggggattagatgtagcagcagtcaggctgggatc

SEQ ID NO: 711325 - DNA, 120 bp, Artificial Sequence
  ENSG00000196943_19 (sequence is synthesized)
aagatgcctgggggacatcttgatcttggcctttcagggcaagtgggaggccagaaaggtggctaggaaagaacagcattcttcaggtaagggtatagacttgggatgtgaggcgttatg

SEQ ID NO: 711326 - DNA, 120 bp, Artificial Sequence
  ENSG00000196943_20 (sequence is synthesized)
ctgaaaggttctgtcacgaggggatcagaggacagtggggaaattgggtgggttatctagcctgtactgtctgcaggtcctgaaatttgatgctgtcatagtctttgcagtgggtcggtt

SEQ ID NO: 711327 - DNA, 120 bp, Artificial Sequence
  ENSG00000196943_21 (sequence is synthesized)
ggaatgattctgggggcagaagctcagagccccttagtaggaatggaggcggcccttctgctgccactgctcagccccctccactgcatgacgaagggtggaggaaattcccagcaacat

SEQ ID NO: 711328 - DNA, 120 bp, Artificial Sequence
  ENSG00000196943_22 (sequence is synthesized)
atggcccaggccttgcagcagtgtggaggtccaacgaaggagctccctgaatggcagagacaagaggaaatcagatgatttggaaaacttgggaggaagccatcaagctgggagatgagg

SEQ ID NO: 711329 - DNA, 120 bp, Artificial Sequence
  ENSG00000196943_23 (sequence is synthesized)
actttccacaagcaagagctaactaggggtaggtgggtgcaagaggacgaattatggggactatccaactgtaggggatggggcagtatgacatgttgatttctgacctgagtactttct

SEQ ID NO: 711330 - DNA, 120 bp, Artificial Sequence
  ENSG00000196943_24 (sequence is synthesized)
ttgggccaagtccttgaaagtcacaactcatagagtagagcccgtagaatgtggctttgacattcaggctgccaaagaggtctcgagggttttgcttgtacacgtcaaaggtgaatcggg

SEQ ID NO: 711331 - DNA, 120 bp, Artificial Sequence
  ENSG00000196943_25 (sequence is synthesized)
acagcactccactctgtaggacacccttgtcagtgcagtagatcctcataccagacacccaccactaatctccatcagcactgggtcagaccctccctcgcttggactttctgtccactg

SEQ ID NO: 711332 - DNA, 120 bp, Artificial Sequence
  ENSG00000196943_26 (sequence is synthesized)
tgtgacatccttgacaattccacaactcctcctgcacctggtccccaggatcagggttaagctagagaggaagcccgggaaagctctaaaggacaggcattggaagcagccccagtatag

SEQ ID NO: 711333 - DNA, 120 bp, Artificial Sequence
  ENSG00000196943_27 (sequence is synthesized)
gcctcttacccttgtagggctccagctctgaccagactgcaacaccatcaggcacgtgtcatcctccagcagctggaagaagtcctcactgtccactgcagttccatcctcctctagcac

SEQ ID NO: 711334 - DNA, 120 bp, Artificial Sequence
  ENSG00000196943_28 (sequence is synthesized)
cagggttagcactccattcagcagtagggtctccaatgcctgcccaatggcaagaagcaagaagggcaggtcttatcccatgccccttccctctttagctgcccaacatccatcagttgg

SEQ ID NO: 711335 - DNA, 120 bp, Artificial Sequence
  ENSG00000196943_29 (sequence is synthesized)
ctctagacattggtcgatgtcccactttgactttccggcactttgatacctcctaaaggttgcagctctccgtgttcttcagtttttgggggatcctagctagaggctgacctttttcct

SEQ ID NO: 711336 - DNA, 120 bp, Artificial Sequence
  ENSG00000196943_30 (sequence is synthesized)
ctttgctcctaccatgtcattggcatctccccttgctcccctccaagtcacttctggtttggaattggaaagcaagccaggttctcacgaagtccacccttctgtcttatctacaatgct

SEQ ID NO: 711337 - DNA, 120 bp, Artificial Sequence
  ENSG00000196943_31 (sequence is synthesized)
gcacctcacttcccacaccctcaagagttctccagaagtgttttcagtaatagtgtttaacctttttgagtccttactctgtgccaggtatgaggactttacctacattatcctcttact

SEQ ID NO: 711338 - DNA, 120 bp, Artificial Sequence
  ENSG00000196943_32 (sequence is synthesized)
cctttcaacaaccctaggaggtgatgtattattattgcctttttatagttgaagaaactgaggttttggtaggttgaacaacttcccaaggtttgacaggcaggaagtggcagaatcaga

SEQ ID NO: 711339 - DNA, 120 bp, Artificial Sequence
  ENSG00000196943_33 (sequence is synthesized)
atttgaacttgatttgtcacacaaatcacctttccatactagcttctgaattctgtccctcgaactctccctatctcctgctaacccctgctcccatagaaaagctcactcggtggaaaa

SEQ ID NO: 711340 - DNA, 120 bp, Artificial Sequence
  ENSG00000196943_34 (sequence is synthesized)
tgaacaaattgaccagagctcattaggcccactccgctgcttttagccctcagagggaggggcagctgtgtgacttcagccctctgctccatcatcacaagttgccactgttgtggagcc

SEQ ID NO: 711341 - DNA, 120 bp, Artificial Sequence
  ENSG00000196943_35 (sequence is synthesized)
ccttggctacccctgctataggaaccgaggaacttggcctacttactttggctagcagctcctggcgggtggcagctgtcaggcctttccggatggtccgcttgtgatcacagacacgga

SEQ ID NO: 711342 - DNA, 120 bp, Artificial Sequence
  ENSG00000196943_36 (sequence is synthesized)
aaggtcgctggggtggtggagctgaggtccagaccctccgtccaaactccgagcttatattagatactgacctggtagttgagaagaaaagtcaagaaggggcgaggaggggcttggtga

SEQ ID NO: 711343 - DNA, 120 bp, Artificial Sequence
  ENSG00000196943_37 (sequence is synthesized)
gtgtaaagggcatgatgagggtagagtggctagagggctagggagggagagatctaggtttatcgattagggatgagggagagaccatggagtgcaggtgggggcgggtggctcaggagc

SEQ ID NO: 711344 - DNA, 120 bp, Artificial Sequence
  ENSG00000196943_38 (sequence is synthesized)
ttgacaagcccactgtggagtggggagcaggagaggaaggggtactggttagtctcctaggggctgagtggagtattgttgccctgcctatatcccctaaaggtggagggtagagcggag

SEQ ID NO: 711345 - DNA, 120 bp, Artificial Sequence
  ENSG00000196943_39 (sequence is synthesized)
ggttagcagtcacctgagtaagtcactggggttcagagctgagaggtactccatggtggaccggagagttccttccctggaacttctgggctgggtggttctctcctgtgctggggcttt

SEQ ID NO: 711346 - DNA, 120 bp, Artificial Sequence
  ENSG00000196943_40 (sequence is synthesized)
agtggtgttttctgttacaaacctgggatctcagcccaggacaaggtgggaatgagtcaagcctggactctggcccccctgcctggccagtaagaagggcaaagtccaaggggagggatg

SEQ ID NO: 711347 - DNA, 120 bp, Artificial Sequence
  ENSG00000196943_41 (sequence is synthesized)
agggaggggccagatggggtcctggaggaagaattgcctggcaaaagccattggagcttgtatgtgtgtctttggtgatgacatgtgttgtgagggtagatgggaaccatgtaaaaggat

SEQ ID NO: 711348 - DNA, 120 bp, Artificial Sequence
  ENSG00000196943_42 (sequence is synthesized)
gaaatgtgacttctggtgtttttttatttctatggagggaatttctggggacggtttctggctctcaggctctgagaagctgcagtttatgagtggctctgtgtgtgctgccacctactg

SEQ ID NO: 711349 - DNA, 120 bp, Artificial Sequence
  ENSG00000196943_43 (sequence is synthesized)
gagaagccataagctgcagctttaggaaaagggaacccggggcagagtgtggggaagtgggatggcagcatggcagggctttggaaaatgagaggtgagactgtgtccaggaagggtgta

SEQ ID NO: 711350 - DNA, 120 bp, Artificial Sequence
  ENSG00000196943_44 (sequence is synthesized)
aggagaggatggatcctgatacatggattcaggatcattagggtcctgtctgggacactggccttcctgcttacctgctctttccttcctccttggtcggaggaggggctggctcactgc

SEQ ID NO: 711351 - DNA, 120 bp, Artificial Sequence
  ENSG00000196943_45 (sequence is synthesized)
tctggcttcattttccagagctgcctgctgcagtcacacttaggtcatcttctctcacttttctccttttgccgattagtggacgtgacagagatgtgaatggggcagggatgtcctttg

SEQ ID NO: 711352 - DNA, 120 bp, Artificial Sequence
  ENSG00000196943_46 (sequence is synthesized)
atggcatcaagactttagcttctggtgcgctgtgtcccagctctgatttcagttgcagccgtgatggacagttgcatggaagctgagactctcactgacagtgaaaccctcaaatgaaca

SEQ ID NO: 711353 - DNA, 120 bp, Artificial Sequence
  ENSG00000196943_47 (sequence is synthesized)
caatccctgctttcctgccaaggatccttgtagggtcccccagcttccccactttttttctgtgtcctgacaaagaaacacagagtaacttgattgccctgtgacctggccagttgcatt

SEQ ID NO: 711354 - DNA, 120 bp, Artificial Sequence
  ENSG00000196943_48 (sequence is synthesized)
tcccctgcaggcttgagcccaagccagagccttgaaaaggtattcaggttgttgcccaaaacactgaaaaaaactggccctggccctgaaccaaataccttgaaccctcgtaaactccat

SEQ ID NO: 711355 - DNA, 120 bp, Artificial Sequence
  ENSG00000196943_49 (sequence is synthesized)
accctgacccccttgttttggatatacccaggtagaacaactctctctcactgtctgttgtgaggatacgctgtagcccactcattaagtacattctcctaataaatgctttggactgat

SEQ ID NO: 711356 - DNA, 120 bp, Artificial Sequence
  ENSG00000196944_0 (sequence is synthesized)
atggacaacatcacctggatggccagccacactggatggtcggatttcatcctgatgggactcttcagacaatccaaacatccaatggccaatatcacctggatggccaaccacactgga

SEQ ID NO: 711357 - DNA, 120 bp, Artificial Sequence
  ENSG00000196944_1 (sequence is synthesized)
tggtcggatttcatcctgttgggactcttcagacaatccaaacatccagcactactttgtgtggtcatttttgtggttttcctgatggcgttgtctggaaatgctgtcctgatccttctg

SEQ ID NO: 711358 - DNA, 120 bp, Artificial Sequence
  ENSG00000196944_2 (sequence is synthesized)
atacactgtgacgcccacctccacacccccatgtactttttcatcagtcaattgtctctcatggacatggcgtacatttctgtcactgtgcccaagatgctcctggaccaggtcatgggt

SEQ ID NO: 711359 - DNA, 120 bp, Artificial Sequence
  ENSG00000196944_3 (sequence is synthesized)
gtgaataagatctcagcccctgagtgtgggatgcagatgttcttctacgtgacactagcaggttcagaatttttccttctagccaccatggcctatgaccgctacgtggccatctgccat

SEQ ID NO: 711360 - DNA, 120 bp, Artificial Sequence
  ENSG00000196944_4 (sequence is synthesized)
acattcactcccatcaccatgaccttccccttccgtggatcccgggagattcatcatttcttctgtgaagttcctgctgtattgaatctctcctgctcagacacctcactctatgagatt

SEQ ID NO: 711361 - DNA, 120 bp, Artificial Sequence
  ENSG00000196944_5 (sequence is synthesized)
ttcatgtacttgtgctgtgtcctcatgctcctcatccctgtggtgatcatttcaagctcctatttactcatcctcctcaccatccacgggatgaactcagcagagggccggaaaaaggcc

SEQ ID NO: 711362 - DNA, 120 bp, Artificial Sequence
  ENSG00000196944_6 (sequence is synthesized)
tttgccacctgctcctcccacctgactgtggtcatcctcttctatggggctgccatctacacctacatgctccccagctcctaccacacccctgagaaggacatgatggtatctgtcttc

SEQ ID NO: 711363 - DNA, 120 bp, Artificial Sequence
  ENSG00000196944_7 (sequence is synthesized)
tataccatcctcactccagtggtgaaccctttaatctatagtcttaggaataaggatgtcatgggggctctgaagaaaatgttaacagtggaacctgcctttcaaaaagctatggagtag

SEQ ID NO: 711364 - DNA, 120 bp, Artificial Sequence
  ENSG00000196946_0 (sequence is synthesized)
ttctttctccaacctcagcttttcttagtgcctaaagtgtctgcacatggaaatccagaggtagacagagagaaactgagttccggacaatgcattcactaaagaaagtgacttttgaag

SEQ ID NO: 711365 - DNA, 120 bp, Artificial Sequence
  ENSG00000196946_1 (sequence is synthesized)
atgtagctattgacttcacccaggaagagtgggccatgatggacacatccaagagaaagctgtacagagatgtgatgctggaaaatatcagtcacctggtgtccctcgggtaccagataa

SEQ ID NO: 711366 - DNA, 120 bp, Artificial Sequence
  ENSG00000196946_2 (sequence is synthesized)
gcaaatcctatataattttgcagctggagcaaggaaaagagctgtggcgggaaggaagagaatttcttcaagaccagaatccagacagggaaagtgcccttaagaaaaaacacatgatat

SEQ ID NO: 711367 - DNA, 120 bp, Artificial Sequence
  ENSG00000196946_3 (sequence is synthesized)
ccatgcatcctatcaccagaaaagacgcatccaccagtatgacaatggagaactctctcattctggaggatccttttgaatgtaatgattcgggagaagattgcactcacagttccacaa

SEQ ID NO: 711368 - DNA, 120 bp, Artificial Sequence
  ENSG00000196946_4 (sequence is synthesized)
taactcagcgtttgttaactcacagtggaaagaaaccctatgtcagcaaacagtgtggaaaatctcttcgtaatcttttctcccctaaaccacataaacaaattcatactaaaggtaaat

SEQ ID NO: 711369 - DNA, 120 bp, Artificial Sequence
  ENSG00000196946_5 (sequence is synthesized)
catatcaatgtaatctatgtgaaaaggcctatactaattgctttcgccttagacggcacaagatgactcacactggagagaggccatatgcatgtcatctatgtggaaaagccttcactc

SEQ ID NO: 711370 - DNA, 120 bp, Artificial Sequence
  ENSG00000196946_6 (sequence is synthesized)
agtgttctcaccttagaagacatgagaaaactcacacgggagagagaccatataagtgtcatcaatgtgggaaagcctttattcaatcctttaaccttcgaagacatgagagaactcacc

SEQ ID NO: 711371 - DNA, 120 bp, Artificial Sequence
  ENSG00000196946_7 (sequence is synthesized)
ttggaaaaaagtgttatgaatgtgataaaagtgggaaagcctttagtcaaagctctggctttagaggaaacaaaataattcacactggagagaaaccacatgcttgtcttctatgtggga

SEQ ID NO: 711372 - DNA, 120 bp, Artificial Sequence
  ENSG00000196946_8 (sequence is synthesized)
aggccttcagtctgtcttccgaccttagatgacatgagagaacatgcactggagaaaagccatatgaatgccatttatgtgggaaagccttcagtcaatgtactagtcttaaatagcatc

SEQ ID NO: 711373 - DNA, 120 bp, Artificial Sequence
  ENSG00000196946_9 (sequence is synthesized)
agaaaattcacgctggagagaaaattataaacttcttcagaacatattctgactttagatgacactgtgttaggaatgacgaaggtaaggaatgtggaagagacttcagctgtagttgta

SEQ ID NO: 711374 - DNA, 120 bp, Artificial Sequence
  ENSG00000196946_10 (sequence is synthesized)
gcatctaaacatgccaaaggactcatattttgaagaaatactggaatcaacatggaagatacttcagttacctttattcttcagtccacatcaataaattcatatggaagagaaattgta

SEQ ID NO: 711375 - DNA, 120 bp, Artificial Sequence
  ENSG00000196946_11 (sequence is synthesized)
tgacatgtatgtaccaaagacttgttagtgatctgagcataaatgacatgagagagctgaaactgtcaacatagtcaactaaaagtcttcagcaacagctttaacttaaaacatgtggga

SEQ ID NO: 711376 - DNA, 120 bp, Artificial Sequence
  ENSG00000196946_12 (sequence is synthesized)
ctttcaggtagagaatctctaactctgcattcagtgtgaaaatatttttatttgcaatttattgtcaaataacatgagaaaactttacttggatgaaccctttatttgtattttctgtga

SEQ ID NO: 711377 - DNA, 120 bp, Artificial Sequence
  ENSG00000196946_13 (sequence is synthesized)
ataaacattcagccaagcaccaggcttgatgttcacaagaaaacagagtgataaaatgctgctaaaatggaaaataagagaggaaagccttcataagctaaataagaagggaaagtcttt

SEQ ID NO: 711378 - DNA, 120 bp, Artificial Sequence
  ENSG00000196946_14 (sequence is synthesized)
acttgtggcacatgtgagatttcacactggacaaaacatggttagcatcctgaaaggagaaaattctttagtggtaattcatttcttagttgacattaagtttctcacattgaggagcta

SEQ ID NO: 711379 - DNA, 120 bp, Artificial Sequence
  ENSG00000196946_15 (sequence is synthesized)
tcaaacttgaaaatcactgtggagaaacctgatagatttctcatcagaaaagtgagtcaagaaggtggacctctagaaaaaactcttaacacatactttagcaaaataattcagaaattt

SEQ ID NO: 711380 - DNA, 120 bp, Artificial Sequence
  ENSG00000196946_16 (sequence is synthesized)
gagaaaatatctattcataaaaatgtggcatataaatgcataatagtaaagtgaccagggaataaattgaatgcagaattatataagaaatctcattaaacttttccaaaagatcaatac

SEQ ID NO: 711381 - DNA, 120 bp, Artificial Sequence
  ENSG00000196946_17 (sequence is synthesized)
ttacaaatattgaaagaatacaatctgttgttgaaaaaacttagtatgttggcgaagcccttgtttcatttatgcagccctaacaaatcgatttgcatctgcactccttgggtgagattc

SEQ ID NO: 711382 - DNA, 120 bp, Artificial Sequence
  ENSG00000196946_18 (sequence is synthesized)
ttggtcgagattctaccccaacttctgagtctccccagtctttaacagctctttcctcacagctcacctccctttacttcaacgtccactaaaaccacttgtttccatccaaccctcgag

SEQ ID NO: 711383 - DNA, 120 bp, Artificial Sequence
  ENSG00000196946_19 (sequence is synthesized)
ttgacacaccagggatcttcagccccacttgctagatttctcagtgtgtcattgcatagatttagcagggaaatggaggctgtatcaaagacccctagtatatgcatttgggtgtccgca

SEQ ID NO: 711384 - DNA, 120 bp, Artificial Sequence
  ENSG00000196946_20 (sequence is synthesized)
gcccttgcctctgtctctgagcagttacctgggatcagagaataaggcagctcttctcttctatccctcagaaggctcttgaaattttgtccctggagcctctctaactggaagtagcag

SEQ ID NO: 711385 - DNA, 120 bp, Artificial Sequence
  ENSG00000196946_21 (sequence is synthesized)
ttcatctcatgacaccccacattttattcaggtgagtcctgagttattacacagagacagacacagctgtgctccttttactgcagtccagaagataaaacaccagcatgataaaacagc

SEQ ID NO: 711386 - DNA, 120 bp, Artificial Sequence
  ENSG00000196946_22 (sequence is synthesized)
cgaacctgtcagccaccttgcaagcctttcctatattcgattcaatgtacttttcccgaagcaaaatgaaagttctcacagaggggccctcctctgccttgtcctcagaattggaaaatg

SEQ ID NO: 711387 - DNA, 120 bp, Artificial Sequence
  ENSG00000196946_23 (sequence is synthesized)
tattgtccgtgaaggagcctcagtactgaacctaaaactcaagagaaaatgtttcctgaatatcaagtgggatgacttgaaattttgccaaacaggcacaatcttaatacgatcggcctt

SEQ ID NO: 711388 - DNA, 120 bp, Artificial Sequence
  ENSG00000196946_24 (sequence is synthesized)
actaaggctaaatggccttatccgtggttgaagttgacaaatcaatatattaaaaaatctccacaagtgattgattttactctgcagccagggtttatgtcaagtgtgaggataatgagc

SEQ ID NO: 711389 - DNA, 120 bp, Artificial Sequence
  ENSG00000196946_25 (sequence is synthesized)
aagaaattcaagcccttggcaaactggttggagaggcaaggactgtgtccaggcagagctcatatcattatttattgtttaatctatttaattaaatatgtaatttacccacaaactgtg

SEQ ID NO: 711390 - DNA, 120 bp, Artificial Sequence
  ENSG00000196946_26 (sequence is synthesized)
gctgacattatatgtactcctgagccacattgagatgtactatttgtgctatgaaattctatgggatttgacaaatgcatggtggcagatctccagccattattaaagcgtaacacagaa

SEQ ID NO: 711391 - DNA, 120 bp, Artificial Sequence
  ENSG00000196946_27 (sequence is synthesized)
tgcttctcttattcaagctcatcttccctccacatagagggaatcaatcgacttttgtatactgatttttgaatttgcttctttatttccatcttcttcaattaaagcacaagatatcgt

SEQ ID NO: 711392 - DNA, 120 bp, Artificial Sequence
  ENSG00000196950_0 (sequence is synthesized)
gcagccggggtttggtaccgagcggagaggagatgcacacggcactcgagtgtgaggaaaaatagaaatgaaggtacatatgcacacaaaattttgcctcatttgtttgctgacatttat

SEQ ID NO: 711393 - DNA, 120 bp, Artificial Sequence
  ENSG00000196950_1 (sequence is synthesized)
ttttcatcattgcaaccattgccatgaagaacatgaccatggccctgaagcgcttcacagacagcatcgtggaatgacagaattggagccaagcaaattttcaaagcaagctgctgaaaa

SEQ ID NO: 711394 - DNA, 120 bp, Artificial Sequence
  ENSG00000196950_2 (sequence is synthesized)
tgaaaaaaaatactatattgaaaaactttttgagcgttatggtgaaaatggaagattatccttttttggtttggagaaacttttaacaaacttgggccttggagagagaaaagtagttga

SEQ ID NO: 711395 - DNA, 120 bp, Artificial Sequence
  ENSG00000196950_3 (sequence is synthesized)
gattaatcatgaggatcttggccacgatcatgtttctcatttagatattttggcagttcaagagggaaagcattttcactcacataaccaccagcattcccataatcatttaaattcaga

SEQ ID NO: 711396 - DNA, 120 bp, Artificial Sequence
  ENSG00000196950_4 (sequence is synthesized)
aaatcaaactgtgaccagtgtatccacaaaaagaaaccataaatgtgatccagagaaagagacagttgaagtgtctgtaaaatctgatgataaacatatgcatgaccataatcaccgcct

SEQ ID NO: 711397 - DNA, 120 bp, Artificial Sequence
  ENSG00000196950_5 (sequence is synthesized)
acgtcatcaccatcgtttgcatcatcatcttgatcataacaacactcaccattttcataatgattccattactcccagtgagcgtggggagcctagcaatgaaccttcaacagagaccaa

SEQ ID NO: 711398 - DNA, 120 bp, Artificial Sequence
  ENSG00000196950_6 (sequence is synthesized)
taaaacccaggaacaatctgatgttaaactaccgaaaggaaagaggaagaaaaaagggaggaaaagtaatgaaaattctgaggttattacaccaggttttccccctaaccatgatcaggg

SEQ ID NO: 711399 - DNA, 120 bp, Artificial Sequence
  ENSG00000196950_7 (sequence is synthesized)
tgaacagtatgagcataatcgggtccacaaacctgatcgtgtacataacccaggtcattctcatgtacatcttccagaacgtaatggtcatgatcctggtcgtggacaccaagatcttga

SEQ ID NO: 711400 - DNA, 120 bp, Artificial Sequence
  ENSG00000196950_8 (sequence is synthesized)
tcctgataatgaaggtgaacttcgacatactagaaagagagaagcaccacatgttaaaaataatgcaataatttctttgagaaaagatctaaatgaagatgaccatcatcatgaatgttt

SEQ ID NO: 711401 - DNA, 120 bp, Artificial Sequence
  ENSG00000196950_9 (sequence is synthesized)
gaacgtcactcagttattaaaatactatggtcatggtgccaactctcccatctcaactgatttatttacatacctttgccctgcattgttatatcaaatcgacagcagactttgtattga

SEQ ID NO: 711402 - DNA, 120 bp, Artificial Sequence
  ENSG00000196950_10 (sequence is synthesized)
gcattttgacaaacttttagttgaagatataaataaggataaaaacctggttcctgaagatgaggcaaatataggggcatcagcctggatttgtggtatcatttctatcactgtcattag

SEQ ID NO: 711403 - DNA, 120 bp, Artificial Sequence
  ENSG00000196950_11 (sequence is synthesized)
cctgctttccttgctaggcgtgatcttggttcctatcattaaccaaggatgcttcaaattccttcttacattccttgttgcattagctgtaggaacaatgagtggagacgcccttcttca

SEQ ID NO: 711404 - DNA, 120 bp, Artificial Sequence
  ENSG00000196950_12 (sequence is synthesized)
tctactgccccattctcagggtggacatgatcacagtcaccaacatgcacatgggcatggacattctcatggacatgaatctaacaagtttttggaagaatatgatgctgtattgaaagg

SEQ ID NO: 711405 - DNA, 120 bp, Artificial Sequence
  ENSG00000196950_13 (sequence is synthesized)
acttgttgctctaggaggcatttacttgctatttatcattgaacactgcattagaatgtttaagcactacaaacaacaaagaggaaaacagaaatggtttatgaaacagaacacagaaga

SEQ ID NO: 711406 - DNA, 120 bp, Artificial Sequence
  ENSG00000196950_14 (sequence is synthesized)
atcaactattggaagaaagctttcagatcacaagttaaacaatacaccagattctgactggcttcaactcaagcctcttgccggaactgatgactcggttgtttctgaagatcgacttaa

SEQ ID NO: 711407 - DNA, 120 bp, Artificial Sequence
  ENSG00000196950_15 (sequence is synthesized)
tgaaactgaactgacagatttagaaggccaacaagaatcccctcctaaaaattacctttgtatagaagaggagaaaatcatagaccattctcacagtgatggattacataccattcatga

SEQ ID NO: 711408 - DNA, 120 bp, Artificial Sequence
  ENSG00000196950_16 (sequence is synthesized)
gcatgatctccatgctgctgcacataaccaccacggcgagaacaaaactgtgctgaggaagcataatcaccagtggcaccacaagcattctcatcattcccatggcccctgtcattctgg

SEQ ID NO: 711409 - DNA, 120 bp, Artificial Sequence
  ENSG00000196950_17 (sequence is synthesized)
atccgatctgaaagaaacaggaatagctaatatagcctggatggtgatcatgggggatggcatccacaacttcagtgatgggctcgcaattggtgcagctttcagtgctggattgacagg

SEQ ID NO: 711410 - DNA, 120 bp, Artificial Sequence
  ENSG00000196950_18 (sequence is synthesized)
aggaatcagtacttctatagccgtcttctgtcatgaactgccacatgaattaggagattttgcagttcttcttaaagcaggcatgactgtaaagcaagcaattgtatacaacctcctctc

SEQ ID NO: 711411 - DNA, 120 bp, Artificial Sequence
  ENSG00000196950_19 (sequence is synthesized)
tgccatgatggcttacataggcatgctcataggcacagctgttggtcagtatgccaataacatcacactttggatctttgcagtcactgcaggcatgttcctctatgtagccttggtgga

SEQ ID NO: 711412 - DNA, 120 bp, Artificial Sequence
  ENSG00000196950_20 (sequence is synthesized)
tatgcttccagaaatgttgcatggtgatggtgacaatgaagaacatggcttttgtcctgtggggcaattcatccttcagaatttaggattgctctttggatttgccattatgctggtgat

SEQ ID NO: 711413 - DNA, 120 bp, Artificial Sequence
  ENSG00000196950_21 (sequence is synthesized)
ttgattacgagaatgttaccatgcagctttgcatctgttccttgtactgtatgcacattgctcaaaggaaagtcagtggcttgcactacttacaagtttcatagatttgagcctaaccac

SEQ ID NO: 711414 - DNA, 120 bp, Artificial Sequence
  ENSG00000196950_22 (sequence is synthesized)
aagaggctggtgcttagtactgttttccctgcacgtaggggtcttttaaaaatataaagcttgtgataaagagaggagaatatgggactccatgaaccagtgttgatatgtttgattaag

SEQ ID NO: 711415 - DNA, 120 bp, Artificial Sequence
  ENSG00000196950_23 (sequence is synthesized)
acttttcacaaaataatcatataaaacactagtctctttattagtagaaacttctgtggctatgcagaaatagagatcgaaccaaaaaaaatcatttaaactttaaaaatattttaaatg

SEQ ID NO: 711416 - DNA, 120 bp, Artificial Sequence
  ENSG00000196950_24 (sequence is synthesized)
gactttggggagacattttttgtgtgttttaagaatgaattgtagtgctctttaattcagctacatatattcatgtggtgatagggatcaacttgacacaactttgaaactgcataaagt

SEQ ID NO: 711417 - DNA, 120 bp, Artificial Sequence
  ENSG00000196950_25 (sequence is synthesized)
agacataggaactagaggaaagctcaggctgcattagagtatgaatttagcattgggaaaagcccttattcttgaatctagagttactatttttgtatatatttgcatagtgtttaaacc

SEQ ID NO: 711418 - DNA, 120 bp, Artificial Sequence
  ENSG00000196950_26 (sequence is synthesized)
tgcagcctaaactactgaaatttgtgattgtatgtttgtgtgagcttcagtttaatgaaagattcataatggttctttgtattattataatacttggtgttggggtgttctttctgtttt

SEQ ID NO: 711419 - DNA, 120 bp, Artificial Sequence
  ENSG00000196950_27 (sequence is synthesized)
ttgttttgattttttttttttttttttggcgggggtaggtgagggtttggagcatgtggtctttttaaaaaattgtaaccctctagaaaatatcaaagaaatgaaccagacgtggtttaa

SEQ ID NO: 711420 - DNA, 120 bp, Artificial Sequence
  ENSG00000196950_28 (sequence is synthesized)
accagacgtggtttaaatagttgattttcctattttaacagtaccaactagttaattgggaaatgtaagttctgaatgttcacattgctttaccagtttggcactggaaccaagagcaca

SEQ ID NO: 711421 - DNA, 120 bp, Artificial Sequence
  ENSG00000196950_29 (sequence is synthesized)
tgtcgtggctggctacaaggttgtaaagcagaaaatcgaagtttaccatgtctgtaatgtgtacatgaagtgtcaatttagaacagttactaggataaactccattattgccatggctgt

SEQ ID NO: 711422 - DNA, 120 bp, Artificial Sequence
  ENSG00000196950_30 (sequence is synthesized)
catggtacccaagtgacttggaagatgcatttaaattactcagctgaaatcacttgatcatcttgtgccaagatatgctgttggtgcctgatagggattagtcttttaggtgccctgttc

SEQ ID NO: 711423 - DNA, 120 bp, Artificial Sequence
  ENSG00000196950_31 (sequence is synthesized)
tcctaccataattgtgaatgatttgtgagaagtgcaagccatgtttatcctgaatttttacttaataatttgtattactagtcatatgcatgtagctttctgtttacatcctatgccaca

SEQ ID NO: 711424 - DNA, 120 bp, Artificial Sequence
  ENSG00000196950_32 (sequence is synthesized)
tggtcttcatttatgccaggtaaactgtatttgaactatgtgcagctagctttgttttaatctgcttggcaaccagtgtagctgctgtaacaatctatcttattgttcaaatatataaga

SEQ ID NO: 711425 - DNA, 120 bp, Artificial Sequence
  ENSG00000196950_33 (sequence is synthesized)
gccaaactcttttccattccatctaaaatgttttcatttagtactcttctttcctcctactctatgaacttcaaaacaaaaacaaaactttgagagcagcacatgcatccaggtatttat

SEQ ID NO: 711426 - DNA, 120 bp, Artificial Sequence
  ENSG00000196950_34 (sequence is synthesized)
agattattgccagtgtcttttctgtatgctataagcaagggagcttaggtgttatttctttaatttatgcttgaatctgaaaaattatttctgacttactccatggcctccttataataa

SEQ ID NO: 711427 - DNA, 120 bp, Artificial Sequence
  ENSG00000196950_35 (sequence is synthesized)
gtagaagttttatatataattaattttcagcattgggcactgaattaggacagtcctcatctcattgcttggcccttcaagcaacctagctaaaaggtgctgatattttatttagtactg

SEQ ID NO: 711428 - DNA, 120 bp, Artificial Sequence
  ENSG00000196950_36 (sequence is synthesized)
ccaacttcaagtgatttagatatctatctatctagatttctgaaccaagatatatttatagttcacttttgggtttttatacccacggtaggattctgcattccagcattaaatctgctt

SEQ ID NO: 711429 - DNA, 120 bp, Artificial Sequence
  ENSG00000196950_37 (sequence is synthesized)
cattttagaacctttataaaagcaatagctggaatatactcccagttttaaaataaatgcctgattgatttaaagcaagtaggttatgctgaagtatataaagaagttttatattctctc

SEQ ID NO: 711430 - DNA, 120 bp, Artificial Sequence
  ENSG00000196950_38 (sequence is synthesized)
aaaaatggtattatctttctttatttgctagattcttacaaatcttttaagagggctgtaacagttgctgctagtattagggttccacatcattctaatgtatagtttcaagtcttaata

SEQ ID NO: 711431 - DNA, 120 bp, Artificial Sequence
  ENSG00000196950_39 (sequence is synthesized)
gacaatctgaattccactacatttcttttggctccaacattccttttagcttgaccagtctaatttaaaatgtgtttgttggaggtcattaacgttacttgtacaatgctgtcactgtgt

SEQ ID NO: 711432 - DNA, 120 bp, Artificial Sequence
  ENSG00000196950_40 (sequence is synthesized)
gacatccatatgaattttggtatatatcaatcaatcaatcaatcacattgcattcaatcaatcagctgtgattgattgattatgcttagaaatactatagtaactagatgcagtgtgaat

SEQ ID NO: 711433 - DNA, 120 bp, Artificial Sequence
  ENSG00000196950_41 (sequence is synthesized)
tttttccattaacaaacaaacaagtcagtggcttaaatgtgattatggtcctgcaaggtgattcttgctaaaatatctaaacttttgttttgttttaactgaatcattttttaacttaaa

SEQ ID NO: 711434 - DNA, 120 bp, Artificial Sequence
  ENSG00000196950_42 (sequence is synthesized)
aagctggaaaatatcaaatgctgttttttttttttcattgtcaacagtggtgtgtcattttatgtatgttcctaatgcttatggaactcctccaaaataaagttactcaaagagagcaaa

SEQ ID NO: 711435 - DNA, 120 bp, Artificial Sequence
  ENSG00000196950_43 (sequence is synthesized)
agttgatcactctgaagctttttggctaaagcgtttgggtttagagcttccattactcattcgccttgcccaaggcctcagcaaccgacgttcgaaagccaggagaaaaggcgaatgata

SEQ ID NO: 711436 - DNA, 120 bp, Artificial Sequence
  ENSG00000196950_44 (sequence is synthesized)
aagggcgctccacgcatgcgttaagaagccgccccaactcccccgcggcgttctttcttggaacaaaactagcgcggagccacggaactccgcagtttgcgtagacttgaatttcctatt

SEQ ID NO: 711437 - DNA, 120 bp, Artificial Sequence
  ENSG00000196950_45 (sequence is synthesized)
cttgtacgccgcaagcgtagcagggtgtcagacgcgccggtttctgcgacgcagttagcgcagtctgctttggtgaatacacgatttggtgcagccggggtttggtaccgagcggagagg

SEQ ID NO: 711438 - DNA, 120 bp, Artificial Sequence
  ENSG00000196950_46 (sequence is synthesized)
gcagtcggcggcggccagccgaagcagagcgcgtggtgggcagagtgttgggcgccgcggctcctcgtgtgcggtctgggctgctgcgggccgcgggatcgggagccggcggcatccact

SEQ ID NO: 711439 - DNA, 120 bp, Artificial Sequence
  ENSG00000196950_47 (sequence is synthesized)
attagatggggggctgcggcttggagaacactcacagttctgagttcagctgtggacggaataatgaagggcagctgcagaaggaggtagagctgcagattcagagcccctggacctgag

SEQ ID NO: 711440 - DNA, 120 bp, Artificial Sequence
  ENSG00000196950_48 (sequence is synthesized)
aggcttcaataattgttacctgagttggattgaattgaaataaagaagtaaagatcctatatcatctactgaaatctttaaagggaaaaatagaaatgaaggtacatatgcacacaaaat

SEQ ID NO: 711441 - DNA, 120 bp, Artificial Sequence
  ENSG00000196950_49 (sequence is synthesized)
gtttggtaccgagcggagaggagatgcacacggcactcgagtgtgaggtggagagcgatgtggggcgcggcagggggatcgcgtagaggaaccttcgcgcaccgcctctccgggtctggg

SEQ ID NO: 711442 - DNA, 120 bp, Artificial Sequence
  ENSG00000196950_50 (sequence is synthesized)
aatctgctgaactccttgcctctcctggggtccctcgaacgccccagctaagaagggcgggggccttgccagggcgcgagcaacatgacgttcaaggtcttcctgtggcttctgtaaaga

SEQ ID NO: 711443 - DNA, 120 bp, Artificial Sequence
  ENSG00000196950_51 (sequence is synthesized)
aagggtcgttcactcgagtacctattctaagtaacagtgacacaaaacacatgttagaaaaaaacaaaaagtatggtaggttatactgttttttaaaagaaacttttatttatgcctttt

SEQ ID NO: 711444 - DNA, 120 bp, Artificial Sequence
  ENSG00000196950_52 (sequence is synthesized)
gctgttaagtcctctaattttacattggaactgagtcattcttggagcaaaactagaataggtttgtatttgttttctttttggatgtgtatctaaattgtacataattaagaaaaagca

SEQ ID NO: 711445 - DNA, 120 bp, Artificial Sequence
  ENSG00000196950_53 (sequence is synthesized)
actgtctatgctaatcttatggactataatatgtatgattaaatttggctggagcttaacaaatatatggttatgtatcactctggtcagttgatttttcccaaaggctacagttttgtg

SEQ ID NO: 711446 - DNA, 120 bp, Artificial Sequence
  ENSG00000196950_54 (sequence is synthesized)
ttcagttgttacatttggaggtgtaagggtataatttagtggggttttttagaacacgtaaacaaatgtctgtagtatatttctttaataacttgatttctcaaagtagagttaccatat

SEQ ID NO: 711447 - DNA, 120 bp, Artificial Sequence
  ENSG00000196950_55 (sequence is synthesized)
tgaaaaaactgcttaacattatattttcaaatgtatttacatatccctaaaagagaacagtttaatttcaatcctaggtttaataaatttgccatatctttgaaaaagcaaaaaaaaaaa

SEQ ID NO: 711448 - DNA, 120 bp, Artificial Sequence
  ENSG00000196950_56 (sequence is synthesized)
gcggcgttctttcttggaacaaaactagcgcggagccacggaactccgcagtttgcgtagacttgaatttcctattcctcggacgatccatgtggaatccgaaaaatagaaatgaagaac

SEQ ID NO: 711449 - DNA, 120 bp, Artificial Sequence
  ENSG00000196954_0 (sequence is synthesized)
actctgaggctctttccaacgctgtaaaaaaggacagaggctgttccctatggcagaaggcaaccacagaaaaaagccacttaaggtgttggaatccctgggcaaagatttcctcactgg

SEQ ID NO: 711450 - DNA, 120 bp, Artificial Sequence
  ENSG00000196954_1 (sequence is synthesized)
tgttttggataacttggtggaacaaaatgtactgaactggaaggaagaggaaaaaaagaaatattacgatgctaaaactgaagacaaagttcgggtcatggcagactctatgcaagagaa

SEQ ID NO: 711451 - DNA, 120 bp, Artificial Sequence
  ENSG00000196954_2 (sequence is synthesized)
gcaacgtatggcaggacaaatgcttcttcaaaccttttttaacatagaccaaatatcccccaataaaaaagctcatccgaatatggaggctggaccacctgagtcaggagaatctacaga

SEQ ID NO: 711452 - DNA, 120 bp, Artificial Sequence
  ENSG00000196954_3 (sequence is synthesized)
tgccctcaagctttgtcctcatgaagaattcctgagactatgtaaagaaagagctgaagagatctatccaataaaggagagaaacaaccgcacacgcctggctctcatcatatgcaatac

SEQ ID NO: 711453 - DNA, 120 bp, Artificial Sequence
  ENSG00000196954_4 (sequence is synthesized)
agagtttgaccatctgcctccgaggaatggagctgactttgacatcacagggatgaaggagctacttgagggtctggactatagtgtagatgtagaagagaatctgacagccagggatat

SEQ ID NO: 711454 - DNA, 120 bp, Artificial Sequence
  ENSG00000196954_5 (sequence is synthesized)
ctgcggaactgtgcatgatgagaaaaaaccagatgtgctgctttatgacaccatcttccagatattcaacaaccgcaactgcctcagtctgaaggacaaacccaaggtcatcattgtcca

SEQ ID NO: 711455 - DNA, 120 bp, Artificial Sequence
  ENSG00000196954_6 (sequence is synthesized)
ggcctgcagaggtgcaaaccgtggggaactgtgggtcagagactctccagcatccttggaagtggcctcttcacagtcatctgagaacctagaggaagatgctgtttacaagacccacgt

SEQ ID NO: 711456 - DNA, 120 bp, Artificial Sequence
  ENSG00000196954_7 (sequence is synthesized)
ggagaaggacttcattgctttctgctcttcaacgccacacaacgtgtcctggagagacagcacaatgggctctatcttcatcacacaactcatcacatgcttccagaaatattcttggtg

SEQ ID NO: 711457 - DNA, 120 bp, Artificial Sequence
  ENSG00000196954_8 (sequence is synthesized)
ctgccacctagaggaagtatttcggaaggtacagcaatcatttgaaactccaagggccaaagctcaaatgcccaccatagaacgactgtccatgacaagatatttctacctctttcctgg

SEQ ID NO: 711458 - DNA, 120 bp, Artificial Sequence
  ENSG00000196954_9 (sequence is synthesized)
caattgaaaatggaagccacaagcagcccagccctccttaatcaacttcaaggagcaccttcattagtacagcttgcatatttaacattttgtatttcaataaaagtgaagacaaacgaa

SEQ ID NO: 711459 - DNA, 120 bp, Artificial Sequence
  ENSG00000196954_10 (sequence is synthesized)
agtagagaggtacccagtttctgtcattcagttgtttaaaatatggctaaggaaaagacaattccaatatatcccagcagaagatcaaagtaaaataaaataatatcaaccataagcttt

SEQ ID NO: 711460 - DNA, 120 bp, Artificial Sequence
  ENSG00000196954_11 (sequence is synthesized)
atgttatggagcgtaagttcttaagttttagagaaggaaaaatattttgaaataatttttatttcttaatttattaaatgaataaaatctgggtggtctgctaggtcatggatttcctcc

SEQ ID NO: 711461 - DNA, 120 bp, Artificial Sequence
  ENSG00000196954_12 (sequence is synthesized)
tggtgacagaggggtaaatgaggcctacatgacgtaatcctatctaggactcacattttcgtgggagatatggatactgaaaatgtgggttaacaaacaaatatgtgcttacagattgtg

SEQ ID NO: 711462 - DNA, 120 bp, Artificial Sequence
  ENSG00000196954_13 (sequence is synthesized)
tcaaaccttttttaacatagaccaaatatcccccaataaaaaaggtgataaattgggtcacagaggcagaaatcacaatttatgttctgcaatatcctgcagctcatccgaatatggagg

SEQ ID NO: 711463 - DNA, 120 bp, Artificial Sequence
  ENSG00000196954_14 (sequence is synthesized)
ctaacagttatgaaggtgtatgcagaggattgtgatgtttggtttatatttaggggcaacattcttaaacctcatccagtgtaaataaagtacattgaattctaaagaaactctacctaa

SEQ ID NO: 711464 - DNA, 120 bp, Artificial Sequence
  ENSG00000196954_15 (sequence is synthesized)
gatgatttcactatcagtaggcacattgttgaatgacactggagagaaagaaaagtggtgtgtgtgtgtgtgtgtctctctctgtgtgtgtttgtatgtgtgtgggtctgtatgtatgaa

SEQ ID NO: 711465 - DNA, 120 bp, Artificial Sequence
  ENSG00000196954_16 (sequence is synthesized)
ggagggatggatcccggtcccacctaaagaagcagtctggccatgatctgccacagcggctgtgctgcactgtgaagactgctgcccagtccaatctgcccagcctccctagcactgtca

SEQ ID NO: 711466 - DNA, 120 bp, Artificial Sequence
  ENSG00000196954_17 (sequence is synthesized)
gaaactaaattccagtaattggatgccaatttgctgatgacaaggcacttcctgataatgagtctggaattctgagcagcagtttcacaatctgtaattacacgtttccgccctttgcaa

SEQ ID NO: 711467 - DNA, 120 bp, Artificial Sequence
  ENSG00000196954_18 (sequence is synthesized)
gttctgtggaaagtaggtaaatgtcaggttgtaagtgcttcctacaaatctgtaaagataattcccaagctatgcttttctttttaaaaacattctcaaaacaaaaatatgaacaaaaac

SEQ ID NO: 711468 - DNA, 120 bp, Artificial Sequence
  ENSG00000196954_19 (sequence is synthesized)
gaagtatttcggaaggaagccacaagcagcccagccctccttaatcaacttcaaggagcaccttcattagtacagcttgcatatttaacattttgtatttcaataaaagtgaagacaaac

SEQ ID NO: 711469 - DNA, 120 bp, Artificial Sequence
  ENSG00000196954_20 (sequence is synthesized)
cagaagcctttgtgatctcacctgttggaatgcactaatgttttctgagccccttaaatatcttgtctacattcttttaagaagctcttcaccaactgtcagaaggcaaccacagaaaaa

SEQ ID NO: 711470 - DNA, 120 bp, Artificial Sequence
  ENSG00000196954_21 (sequence is synthesized)
aaatagaaaaaaaagaagagatatcattgctttccttcagtgcaccatttcttacagcactaaatgattgggggtggggatgacagtaaccattttcaataatgcttttactaagggaaa

SEQ ID NO: 711471 - DNA, 120 bp, Artificial Sequence
  ENSG00000196954_22 (sequence is synthesized)
gattatgtgacttcacaatgataccaatcctttctcaatccatgatgcagatcattttatcatgagttgaaagaaaattggtatttctattgctcctgtatttattcttgtaattatttg

SEQ ID NO: 711472 - DNA, 120 bp, Artificial Sequence
  ENSG00000196954_23 (sequence is synthesized)
gattttatggcaattgtagcattagccatggaataaacatatttggaggataatatagctgacttgtaattggttgcactctacttgaaaagtctagacatgaaggatacttgggaaata

SEQ ID NO: 711473 - DNA, 120 bp, Artificial Sequence
  ENSG00000196954_24 (sequence is synthesized)
taattaaagcttgaaaaacattataaatttatgtgttaaaaatagtaacaaaatagctatgcttccgaaggcaaagacttttgctgtattcatttttcactggagtcaacgacaacatct

SEQ ID NO: 711474 - DNA, 120 bp, Artificial Sequence
  ENSG00000196954_25 (sequence is synthesized)
agtggagaaatttctgttcaattttatccacagtaagtggtgaaggagatcatcagaatccctaaatcaaagttaaacagaaatactcaaactttggaatggaatcattttcatgatagc

SEQ ID NO: 711475 - DNA, 120 bp, Artificial Sequence
  ENSG00000196954_26 (sequence is synthesized)
ttgatttgtaaatgttttacagaaattttgacattgtgtggtttgagaagaatttcatttgaaactggggccattatgtaaaacagcatccctttttcttataattattgagggggaaat

SEQ ID NO: 711476 - DNA, 120 bp, Artificial Sequence
  ENSG00000196954_27 (sequence is synthesized)
tgagggggaaattagtaaagagatcaggggactgtagaatgttgcagtgccactttgctccaaagattcaattgcctcatggctggctgaggatggtggctcatgcctataatcccaaca

SEQ ID NO: 711477 - DNA, 120 bp, Artificial Sequence
  ENSG00000196954_28 (sequence is synthesized)
tctttcagtggcagtaagggatttgtgggcctgaggccatctttgaatgaatctagaaaatcaagaatccctatgaaacaatgatctgatagaatgttgtgtgctctccacatattttac

SEQ ID NO: 711478 - DNA, 120 bp, Artificial Sequence
  ENSG00000196954_29 (sequence is synthesized)
atgatcttatgtgtgccgtgagaacagattcctaaagcaacccgatacatggaaacccattcaccactcaccatttaaacagatgatgaattctgttttttttattaagcccatttaaca

SEQ ID NO: 711479 - DNA, 120 bp, Artificial Sequence
  ENSG00000196954_30 (sequence is synthesized)
ttttacatagtgtttttatggattccaggaatggcttctctttctcaaatgatcaacttcaagtcttctttccatatttcacatctgattctacaatgagcagtgccattgcatgccctg

SEQ ID NO: 711480 - DNA, 120 bp, Artificial Sequence
  ENSG00000196954_31 (sequence is synthesized)
ctagaactgtggataccctttaaaacaagtagaaaatgatagggtggggctgattaggtctaatctcagggaacactggttagtatttcatgtctaggtaattatcttaaggagcgtaca

SEQ ID NO: 711481 - DNA, 120 bp, Artificial Sequence
  ENSG00000196954_32 (sequence is synthesized)
actgtttttgatttgtatatttttaaatcttattttttaaaaccactttattgaggtatgattgacatacataatgttacatatttaatgtatacaacttaatgagtttggagatttcta

SEQ ID NO: 711482 - DNA, 120 bp, Artificial Sequence
  ENSG00000196954_33 (sequence is synthesized)
tctatgtactcctgaaatcatcaccactatctatgccataaacatatctctcttctccaaaagattcttacacttctctgtttattattatcatcattccgtgactgcgtgtgagaagta

SEQ ID NO: 711483 - DNA, 120 bp, Artificial Sequence
  ENSG00000196954_34 (sequence is synthesized)
tacttagcataaaatctactctcttaacaaatttcaagtacataacacaatgttggttactactggcaccaccctgtacaatagatttttatcacttttttcagcttctatcactgaaac

SEQ ID NO: 711484 - DNA, 120 bp, Artificial Sequence
  ENSG00000196954_35 (sequence is synthesized)
ttgtcatgtgttcatctatttctattatacggtgaaagacagtgtggcataatctgcaaacaactttggagcctggtggcaattttttgttgcttactcactgtgtgaacatggggaagt

SEQ ID NO: 711485 - DNA, 120 bp, Artificial Sequence
  ENSG00000196954_36 (sequence is synthesized)
gcccctataaaagctgagagaatgaacatgagttttgtagtagaaagccaatcccaagaatcaaaatttcttcaatacacaatctcttgcaatgcttaccaactgcaacttttgatcacc

SEQ ID NO: 711486 - DNA, 120 bp, Artificial Sequence
  ENSG00000196954_37 (sequence is synthesized)
cagctgagtacttggatggtcaaattggtgtttttgttgatatagtctggtgattatctgctacttctttccgacttacatgtatttggattcctccaactctacaattaatcaggcaat

SEQ ID NO: 711487 - DNA, 120 bp, Artificial Sequence
  ENSG00000196954_38 (sequence is synthesized)
caatcaatcaatcaaggaggtaaggaaaaccgcagcagaatgtgatgatgaaaaaccaaggatagtaattattaaaatagaaacatgctcatgcttccattactatttatattcatttat

SEQ ID NO: 711488 - DNA, 75 bp, Artificial Sequence
  ENSG00000196954_39 (sequence is synthesized)
cactaagtagccaaacattgcatcaaaccctaaacaaaacagagtaaacaaaggagctaactctggagaaagcag

SEQ ID NO: 711489 - DNA, 120 bp, Artificial Sequence
  ENSG00000196954_40 (sequence is synthesized)
aaaacagagtaaacaaaggagctaactctggagaaagcagcattttgatcctctgagtgaggatgtcacagcaaataccacattactgacatccagataccattaccagatggtacagaa

SEQ ID NO: 711490 - DNA, 120 bp, Artificial Sequence
  ENSG00000196954_41 (sequence is synthesized)
tacatcctacactgtagagtttgtgttgatccaggctctggttctcagactgttctcacaatgcagatcaccaatcactcagggttggcttttgaatcttcaatcacagtccagaagttc

SEQ ID NO: 711491 - DNA, 120 bp, Artificial Sequence
  ENSG00000196954_42 (sequence is synthesized)
cttcaagctcccatgtaacttttgttattattttgaccaaaatattatagaatgggtacattgagtctggactaaatgatgactttcttcactcataatagctttatttaacactagact

SEQ ID NO: 711492 - DNA, 120 bp, Artificial Sequence
  ENSG00000196954_43 (sequence is synthesized)
ataagactattatcaatctccctctaagatacatacttaaaattatattttatagtgaaatgtataaagttgttctcaatacttccaacatttaccacataatttttactcttggtttct

SEQ ID NO: 711493 - DNA, 120 bp, Artificial Sequence
  ENSG00000196954_44 (sequence is synthesized)
gacacttcagtcacaatattgcatcatttcagcataacagctttcagtgcctaatccatccagtggggctgcatttggacattgaattgtttgttgactaatatttgccaacactaactg

SEQ ID NO: 711494 - DNA, 120 bp, Artificial Sequence
  ENSG00000196954_45 (sequence is synthesized)
tgcaccaggttttgttctagatgcttggaatatgccaattaacaacgtaaatagatttcttacactctgaaagcttatattctagtgagtagaaacagactctgaagacataaagtggta

SEQ ID NO: 711495 - DNA, 120 bp, Artificial Sequence
  ENSG00000196954_46 (sequence is synthesized)
aatatatcacaggccggagagcaaaaaaagataaaaggaaaaataaaggaagacaaaggaaaacacagaatgatggatgctgtactcctatagatatttcactcaaaagcttttcttgaa

SEQ ID NO: 711496 - DNA, 120 bp, Artificial Sequence
  ENSG00000196954_47 (sequence is synthesized)
ataatgaaatcagaacaaagaatggacagagttggggagtgaataatgtggttcttatgcaggaaaagtgttccagcacagaatacagccagtgcaaatgccctgggatagcaatgcact

SEQ ID NO: 711497 - DNA, 120 bp, Artificial Sequence
  ENSG00000196954_48 (sequence is synthesized)
aaacatgtttaaagaactgcaatgagacagtgtgaccaaaagagaacgtgagtggagaaaatggcagagacaaattaggagaagcagtgagaagccagatcgcgtggttctatgttatca

SEQ ID NO: 711498 - DNA, 120 bp, Artificial Sequence
  ENSG00000196954_49 (sequence is synthesized)
catggtaaacctttaaaaattattatctgagcgagacaggaagcctttctagtgctttagaaaaaagaagtaatatgctttaaattaggttttacaaagatcacattttggtgaatagac

SEQ ID NO: 711499 - DNA, 120 bp, Artificial Sequence
  ENSG00000196954_50 (sequence is synthesized)
taagatgtcacagatggaagtcaagggaagtggcaagagcacatggaagaggatgcaagaagaatcatgatgagggatgggatgaaggcagcaaggggtaaccatcttgaccttctgttt

SEQ ID NO: 711500 - DNA, 120 bp, Artificial Sequence
  ENSG00000196954_51 (sequence is synthesized)
tttctctcccctgcaggaagccacaagcagcccagccctccttaatcaacttcaaggagcaccttcattagtacagcttgcatatttaacattttgtatttcaataaaagtgaagacaaa

SEQ ID NO: 711501 - DNA, 120 bp, Artificial Sequence
  ENSG00000196961_0 (sequence is synthesized)
atgccggccgtgtccaagggcgatgggatgcgggggctcgcggtgttcatctccgacatccggaactgtaagagcaaagaggcggaaattaagagaatcaacaaggaactggccaacatc

SEQ ID NO: 711502 - DNA, 120 bp, Artificial Sequence
  ENSG00000196961_1 (sequence is synthesized)
cgctccaagttcaaaggagacaaagccttggatggctacagtaagaaaaaatatgtgtgtaaactgcttttcatcttcctgcttggccatgacattgactttgggcacatggaggctgtg

SEQ ID NO: 711503 - DNA, 120 bp, Artificial Sequence
  ENSG00000196961_2 (sequence is synthesized)
aatctgttgagttccaataaatacacagagaagcaaataggttacctgttcatttctgtgctggtgaactcgaactcggagctgatccgcctcatcaacaacgccatcaagaatgacctg

SEQ ID NO: 711504 - DNA, 120 bp, Artificial Sequence
  ENSG00000196961_3 (sequence is synthesized)
gccagccgcaaccccaccttcatgtgcctggccctgcactgcatcgccaacgtgggcagccgggagatgggcgaggcctttgccgctgacatcccccgcatcctggtggccggggacagc

SEQ ID NO: 711505 - DNA, 120 bp, Artificial Sequence
  ENSG00000196961_4 (sequence is synthesized)
atggacagtgtcaagcagagtgcggccctgtgcctccttcgactgtacaaggcctcgcctgacctggtgcccatgggcgagtggacggcgcgtgtggtacacctgctcaatgaccagcac

SEQ ID NO: 711506 - DNA, 120 bp, Artificial Sequence
  ENSG00000196961_5 (sequence is synthesized)
atgggtgtggtcacggccgccgtcagcctcatcacctgtctctgcaagaagaacccagatgacttcaagacgtgcgtctctctggctgtgtcgcgcctgagccggatcgtctcctctgcc

SEQ ID NO: 711507 - DNA, 120 bp, Artificial Sequence
  ENSG00000196961_6 (sequence is synthesized)
tccaccgacctccaggactacacctactacttcgtcccagcaccctggctctcggtgaagctcctgcggctgctgcagtgctacccgcctccagaggatgcggctgtgaaggggcggctg

SEQ ID NO: 711508 - DNA, 120 bp, Artificial Sequence
  ENSG00000196961_7 (sequence is synthesized)
gtggaatgtctggagactgtgctcaacaaggcccaggagccccccaaatccaagaaggtgcagcattccaacgccaagaacgccatcctcttcgagaccatcagcctcatcatccactat

SEQ ID NO: 711509 - DNA, 120 bp, Artificial Sequence
  ENSG00000196961_8 (sequence is synthesized)
gacagtgagcccaacctcctggttcgggcctgcaaccagctgggccagttcctgcagcaccgggagaccaacctgcgctacctggccctggagagcatgtgcacgctggccagctccgag

SEQ ID NO: 711510 - DNA, 120 bp, Artificial Sequence
  ENSG00000196961_9 (sequence is synthesized)
ttctcccatgaagccgtcaagacgcacattgacaccgtcatcaatgccctcaagacggagcgggacgtcagcgtgcggcagcgggcggctgacctcctctacgccatgtgtgaccggagc

SEQ ID NO: 711511 - DNA, 120 bp, Artificial Sequence
  ENSG00000196961_10 (sequence is synthesized)
aatgccaagcagatcgtgtcggagatgctgcggtacctggagacggcagactacgccatccgcgaggagatcgtcctgaaggtggccatcctggccgagaagtacgccgtggactacagc

SEQ ID NO: 711512 - DNA, 120 bp, Artificial Sequence
  ENSG00000196961_11 (sequence is synthesized)
tggtacgtggacaccatcctcaacctcatccgcattgcgggcgactacgtgagtgaggaggtgtggtaccgtgtgctacagatcgtcaccaaccgtgatgacgtccagggctatgccgcc

SEQ ID NO: 711513 - DNA, 120 bp, Artificial Sequence
  ENSG00000196961_12 (sequence is synthesized)
aagaccgtctttgaggcgctccaggcccctgcctgtcacgagaacatggtgaaggttggcggctacatccttggggagtttgggaacctgattgctggggacccccgctccagcccccca

SEQ ID NO: 711514 - DNA, 120 bp, Artificial Sequence
  ENSG00000196961_13 (sequence is synthesized)
ccacgcgggcgctgctgctgtccacctacatcaagttcatcaacctcttccccgagaccaaggccaccatccagggcgtcctgcgggccggctcccagctgcgcaatgctgacgtggagc

SEQ ID NO: 711515 - DNA, 120 bp, Artificial Sequence
  ENSG00000196961_14 (sequence is synthesized)
tgcagcagcgagccgtggagtacctcaccctcagctcagtggccagcaccgacgtcctggccacggtgctggaggagatgccgcccttccccgagcgcgagtcgtccatcctggccaagc

SEQ ID NO: 711516 - DNA, 120 bp, Artificial Sequence
  ENSG00000196961_15 (sequence is synthesized)
tgaaacgcaagaaggggccaggggccggcagcgccctggacgatggccggagggaccccagcagcaacgacatcaacgggggcatggagcccacccccagcactgtgtcgacgccctcgc

SEQ ID NO: 711517 - DNA, 120 bp, Artificial Sequence
  ENSG00000196961_16 (sequence is synthesized)
cctccgccgacctcctggggctgcgggcagcccctcccccggcagcacccccggcttctgcaggagcagggaaccttctggtggacgtcttcgatggcccggccgcccagcccagcctgg

SEQ ID NO: 711518 - DNA, 120 bp, Artificial Sequence
  ENSG00000196961_17 (sequence is synthesized)
ggcccacccccgaggaggccttcctcagcgagctggagccgcctgcccccgagagccccatggctttgctggctgacccagctccagctgctgacccaggtcctgaggacatcggccctc

SEQ ID NO: 711519 - DNA, 120 bp, Artificial Sequence
  ENSG00000196961_18 (sequence is synthesized)
ccattccggaagccgatgagttgctgaataagtttgtgtgtaagaacaacggggtcctgttcgagaaccagctgctgcagatcggagtcaagtcagagttccgacagaacctgggccgca

SEQ ID NO: 711520 - DNA, 120 bp, Artificial Sequence
  ENSG00000196961_19 (sequence is synthesized)
tgtatctcttctatggcaacaagacctcggtgcagttccagaatttctcacccactgtggttcacccgggagacctccagactcagctggctgtgcagaccaagcgcgtggcggcgcagg

SEQ ID NO: 711521 - DNA, 120 bp, Artificial Sequence
  ENSG00000196961_20 (sequence is synthesized)
tggacggcggcgcgcaggtgcagcaggtgctcaatatcgagtgcctgcgggacttcctgacgcccccgctgctgtccgtgcgcttccggtacggtggcgccccccaggccctcaccctga

SEQ ID NO: 711522 - DNA, 120 bp, Artificial Sequence
  ENSG00000196961_21 (sequence is synthesized)
agctcccagtgaccatcaacaagttcttccagcccaccgagatggcggcccaggatttcttccagcgctggaagcagctgagcctccctcaacaggaggcgcagaaaatcttcaaagcca

SEQ ID NO: 711523 - DNA, 120 bp, Artificial Sequence
  ENSG00000196961_22 (sequence is synthesized)
accaccccatggacgcagaagttactaaggccaagcttctggggtttggctctgctctcctggacaatgtggaccccaaccctgagaacttcgtgggggcggggatcatccagactaaag

SEQ ID NO: 711524 - DNA, 120 bp, Artificial Sequence
  ENSG00000196961_23 (sequence is synthesized)
ccctgcaggtgggctgtctgcttcggctggagcccaatgcccaggcccagatgtaccggctgaccctgcgcaccagcaaggagcccgtctcccgtcacctgtgtgagctgctggcacagc

SEQ ID NO: 711525 - DNA, 120 bp, Artificial Sequence
  ENSG00000196961_24 (sequence is synthesized)
agttctgagccctggactctgccccgggggatgtggccggcactgggcagccccttggactgaggcagttttggtggatgggggacctccactggtgacagagaagacaccagggtttgg

SEQ ID NO: 711526 - DNA, 120 bp, Artificial Sequence
  ENSG00000196961_25 (sequence is synthesized)
gggatgcctgggactttcctccggccttttgtatttttatttttgttcatctgctgctgtttacattctggggggttagggggagtccccctccctccctttcccccccaagcacagagg

SEQ ID NO: 711527 - DNA, 120 bp, Artificial Sequence
  ENSG00000196961_26 (sequence is synthesized)
ggagaggggccagggaagtggatgtctcctcccctcccaccccaccctgttgtagcccctcctaccccctccccatccaggggctgtgtattattgtgagcgaataaacagagagacgct

SEQ ID NO: 711528 - DNA, 80 bp, Artificial Sequence
  ENSG00000196961_27 (sequence is synthesized)
agccctccccgcggccggctcggctccttggcgctgcctggggtcctttccgcccggtccccgcttgccagcccccgctg

SEQ ID NO: 711529 - DNA, 120 bp, Artificial Sequence
  ENSG00000196961_28 (sequence is synthesized)
aatgctgacgtggagctgcagcagcgagccgtggagtacctcaccctcagctcagtggccagcaccgacgtcctggtcagagccctgtccccccaccccacccctcttgcacaccccctt

SEQ ID NO: 711530 - DNA, 120 bp, Artificial Sequence
  ENSG00000196961_29 (sequence is synthesized)
cacccccgaggaggccttcctcaggtagcaccccctgggcccgggccccttctcgcggccacccccagggctgtcccttctcggcctctgtccccgttttccctgagcccctcccccgcc

SEQ ID NO: 711531 - DNA, 120 bp, Artificial Sequence
  ENSG00000196961_30 (sequence is synthesized)
cccgactcgctcctctctccatcctgatgccttcgccagccctggctgctgcctcccctgccccagcctccctgctcacgccctccctctgccactctggactccgccgaccctggccac

SEQ ID NO: 711532 - DNA, 120 bp, Artificial Sequence
  ENSG00000196961_31 (sequence is synthesized)
ccttcgttgtctcctttcctgtcaccgtttctcagcctgctcttccttttctccttctctccttccctcttccgtccctccctctctgtctctcttctgccctctcgctgcctatgtgga

SEQ ID NO: 711533 - DNA, 120 bp, Artificial Sequence
  ENSG00000196961_32 (sequence is synthesized)
attggctgcctgccacgcctgtcttctcttgtctgctctgggattggatggctcagcgagctggagccgcctgcccccgagagccccatggctttgctggctgacccagctccagctgct

SEQ ID NO: 711534 - DNA, 120 bp, Artificial Sequence
  ENSG00000196961_33 (sequence is synthesized)
gagtaaggggtggcctggggtgggaggtcggtcgggggggcggactcgggtgtccccagggagagttaggggactgggagccctcgtcaacgggttcctgatgagcagcagaggcaggga

SEQ ID NO: 711535 - DNA, 120 bp, Artificial Sequence
  ENSG00000196961_34 (sequence is synthesized)
cttggaggaaagggaaacttggtgtctgccgatgcgggggcacgggccagggttctattcccattggaggccactgctggatggatgcgaggttcctcgaggctctgtgaggggtctgga

SEQ ID NO: 711536 - DNA, 120 bp, Artificial Sequence
  ENSG00000196961_35 (sequence is synthesized)
tatgtggttctggggttctgtccttagggcttgttctcgcactcaatcgctctgggcctttgcccctccccaccaagttccttcccatctcactctgctccatgcctccagcccaggtcc

SEQ ID NO: 711537 - DNA, 120 bp, Artificial Sequence
  ENSG00000196961_36 (sequence is synthesized)
tgaggacatcggccctcccattccggaagccgatgagttgctgaataagtgagtcctgggagtggtgggggaggggaacgggacaggtgcggagcccaggccaggtgcagacaggcaccc

SEQ ID NO: 711538 - DNA, 120 bp, Artificial Sequence
  ENSG00000196961_37 (sequence is synthesized)
cctcaggtttgtgtgtaagaacaacggggtcctgttcgagaaccagctgctgcagatcggagtcaagtcagagttccgacagaacctgggtgtgtcccgggggactgtgggaatgggtcg

SEQ ID NO: 711539 - DNA, 120 bp, Artificial Sequence
  ENSG00000196961_38 (sequence is synthesized)
gagggagaccttggggaaggggtcagagggactcagatggagctctgcctcccccacctactgcaggccgcatgtatctcttctatggcaacaagacctcggtgcagttccagaatttct

SEQ ID NO: 711540 - DNA, 120 bp, Artificial Sequence
  ENSG00000196961_39 (sequence is synthesized)
cacccactgtggttcacccgggagacctccagactcatatcctctcaggcccggcccagcctcctgcctctccacgtcggccttcctcaccgtggggaagccggctgacccaggtccaca

SEQ ID NO: 711541 - DNA, 120 bp, Artificial Sequence
  ENSG00000196961_40 (sequence is synthesized)
cttctcttcagcctctcttgggcacgcaattagttctctgagattgagtgtctgcatctgttaagatgggggtgggattccttcccccaggacaggggatgacagtgaagtggtgtgtgg

SEQ ID NO: 711542 - DNA, 120 bp, Artificial Sequence
  ENSG00000196961_41 (sequence is synthesized)
gaggctttacttccagaactccacctgctccaggcctcattttgtccctgtctggcaccttccgtgtcctgccatcgtcctccactgggctccatgtcatgatgccagcaccgcctgcac

SEQ ID NO: 711543 - DNA, 120 bp, Artificial Sequence
  ENSG00000196961_42 (sequence is synthesized)
tcaggagccaggcctgcgggtccagacgctgatcaggcctgatctgggctgagtcactttgcctctctgggctctcctgtccccgctgtgaagtgtatgtagaccctcctcttcctcata

SEQ ID NO: 711544 - DNA, 120 bp, Artificial Sequence
  ENSG00000196961_43 (sequence is synthesized)
gggttattgtgaagatcagagtgtctggaaaaccctggaagggcggctggaggtatcagtcccccctgcccgttctctgggcctccattgccacattcatgaaattagaaaagctcgacc

SEQ ID NO: 711545 - DNA, 86 bp, Artificial Sequence
  ENSG00000196961_44 (sequence is synthesized)
gcctccattgccacattcatgaaattagaaaagctcgacctgaaaactccttctggccggcaggctgaggccagtggatcatttga

SEQ ID NO: 711546 - DNA, 61 bp, Artificial Sequence
  ENSG00000196961_45 (sequence is synthesized)
tggcacgtggtggttgtggtgagccgagattgtaccactacactccagtctgggcgacagt

SEQ ID NO: 711547 - DNA, 120 bp, Artificial Sequence
  ENSG00000196961_46 (sequence is synthesized)
gtggttgtggtgagccgagattgtaccactacactccagtctgggcgacagtctcaaaaaaaagaaaaagaaaagaaaaaattccttcttcggtcgggcacggtggctcacgcctgtaat

SEQ ID NO: 711548 - DNA, 120 bp, Artificial Sequence
  ENSG00000196961_47 (sequence is synthesized)
caaccgtgatgacgtccagggctatgccgccaagaccgtctttgaggcgctccaggcccctgcctgtcacgagaacatggtgaagttctccctgctccactccaagttccatctgtgcag

SEQ ID NO: 711549 - DNA, 120 bp, Artificial Sequence
  ENSG00000196961_48 (sequence is synthesized)
tcacatctgttgggaaccttcccctactgctcacagtcacaatagccagtgtgtatgaaactcctgtagtgagccaggcactgggcagggggcacctgcacctgccgaacagagctggca

SEQ ID NO: 711550 - DNA, 120 bp, Artificial Sequence
  ENSG00000196961_49 (sequence is synthesized)
gctctaaacccctccctctgccactgagctcccccgagcttctgtcgccttggctgactgacctcatggagcagtttcttcggaccctgtgctgaggggcttggcacacagtaggtgcta

SEQ ID NO: 711551 - DNA, 120 bp, Artificial Sequence
  ENSG00000196961_50 (sequence is synthesized)
atgcaccagttccctccattcagccagcatgtccagcacctgccaggggccagggctgatgtacaccaccaaatctctgggtgtgcatgcctgtctgtgtgcatgcctgcatgcgtgcat

SEQ ID NO: 711552 - DNA, 120 bp, Artificial Sequence
  ENSG00000196961_51 (sequence is synthesized)
gcgttcgcctgtgtgtgtcgatacctgcccgtgtgcatgcatgtctgcgtgcatcccctgtgtgtggatgtgtcattgtgtgtgcatctgtatgtatgcgtgtctgtgtctatatgtggc

SEQ ID NO: 711553 - DNA, 120 bp, Artificial Sequence
  ENSG00000196961_52 (sequence is synthesized)
agtgttcatggtatctctgtgtccctctatgtgtgtacatgtgtatatatcagtgtgtgcatctacatgtgtacctgtgcatgcaagtggatgtgtacatgagtgtagatacctgtgtgc

SEQ ID NO: 711554 - DNA, 120 bp, Artificial Sequence
  ENSG00000196961_53 (sequence is synthesized)
atgcctgtgtgtgcgtgtctcaatgcttgccagcatctacgtgtgtccatgcatgtccctctgcacatggtgtgtgtgtacacactctgagtatacgatatggaggtgacaccagaggcc

SEQ ID NO: 711555 - DNA, 120 bp, Artificial Sequence
  ENSG00000196961_54 (sequence is synthesized)
catcgtgtgtgaagccagtgatgaattctgttgtgtggccctggggacatgtcttccttctctgggcctctttttcgtcctgtcaagaagggcttaagtcatgctctaagcccatgacca

SEQ ID NO: 711556 - DNA, 120 bp, Artificial Sequence
  ENSG00000196961_55 (sequence is synthesized)
ccccagaaggcccagctggtaattctggggtacacccattgcaggcacctcacccactccaaccctcggtggtgtaggaactggagacacagccttgtcctgaggctgggcctgaggaca

SEQ ID NO: 711557 - DNA, 120 bp, Artificial Sequence
  ENSG00000196961_56 (sequence is synthesized)
caccaaccctgtgtcacctccttttcagcaaatggtggtgggctattgccaatttgtttgcaagtcatttttttgtcatatgcattatgaaaagtttcccagcatccagataagtacaga

SEQ ID NO: 711558 - DNA, 120 bp, Artificial Sequence
  ENSG00000196961_57 (sequence is synthesized)
gatttcattacttggacttcacattttgccatgtatgcatgctcttgtttattttcttctgaaatatttaaaagtaaattacagacatcatgatgttttgcctttaaatatgttgttctg

SEQ ID NO: 711559 - DNA, 77 bp, Artificial Sequence
  ENSG00000196961_58 (sequence is synthesized)
taaatatgttgctgggaggccgaggtagaaggatcacttgagctcaggaattcgagaccagtctggccaacatggca

SEQ ID NO: 711560 - DNA, 120 bp, Artificial Sequence
  ENSG00000196961_59 (sequence is synthesized)
cggctggattatttcatcaactcctgaggacattttacacatgtccttgtgttgagacagggcctcactcacccaagctggaatgcagtggcatgaacactgctcactgcagcctcgaac

SEQ ID NO: 711561 - DNA, 120 bp, Artificial Sequence
  ENSG00000196961_60 (sequence is synthesized)
cacatgtccagaggctaagagaggttaagtggttgcccacagccactcaggtggttaagagctgggattcaaacccaagtcagcctccagagctaatactattatgtctcagtgcggtgt

SEQ ID NO: 711562 - DNA, 120 bp, Artificial Sequence
  ENSG00000196961_61 (sequence is synthesized)
gacattgtggaaggccaaaggaggcacctagggggcgcctcagaggtttccatagtatgaactttgtagttgaaccttgtaggattgagtccaggattgcaccatggggtccctcaaaga

SEQ ID NO: 711563 - DNA, 120 bp, Artificial Sequence
  ENSG00000196961_62 (sequence is synthesized)
cctgcaggcgggagctgccgggagctctggggttcctgacccagacctcccgggggcccacctcctctgtctggcttccttgactcctggcgggcacagctggctgtgcagaccaagcgc

SEQ ID NO: 711564 - DNA, 120 bp, Artificial Sequence
  ENSG00000196961_63 (sequence is synthesized)
gccggtgggcggagcctccggggtgaggggcggggcctaatggagcctccctttcacctcatcaggtacggtggcgccccccaggccctcaccctgaagctcccagtgaccatcaacaag

SEQ ID NO: 711565 - DNA, 120 bp, Artificial Sequence
  ENSG00000196961_64 (sequence is synthesized)
ttcttccagcccaccgagatggcggcccaggatttcttccagcgctggaagcagctgagcctgtgaggggtggggagggggcggagccaaagccgcgcctctgggtgggcgggtcgggcc

SEQ ID NO: 711566 - DNA, 120 bp, Artificial Sequence
  ENSG00000196961_65 (sequence is synthesized)
gtccaggtccctgacttgaaccttcccggtccccagccctcaacaggaggcgcagaaaatcttcaaagccaaccaccccatggacgcagaagttactaaggccaaggtgagagaccgcgg

SEQ ID NO: 711567 - DNA, 120 bp, Artificial Sequence
  ENSG00000196961_66 (sequence is synthesized)
cctgaggccggcaggaaggccgcctgtcatctctgcgtccacccttcctgcctcactgttctttaattcacgtccccactttgaccctcctcctctcacatttctttgtccacttttact

SEQ ID NO: 711568 - DNA, 120 bp, Artificial Sequence
  ENSG00000196961_67 (sequence is synthesized)
cctctttatctatcagtttaatctcctgtctccaacctctggtgttcctctcctcttcctgtccctccctgatttctacctttccatatcctttccacctttctctcatcttttataatt

SEQ ID NO: 711569 - DNA, 120 bp, Artificial Sequence
  ENSG00000196961_68 (sequence is synthesized)
ttcttcctctctggcgcctctgttgatttcagtcttacatttttctctcctgtgtcttgtatcacctttctggcccctttatccttccttccttctatctcccttgggtcccgacttccc

SEQ ID NO: 711570 - DNA, 120 bp, Artificial Sequence
  ENSG00000196961_69 (sequence is synthesized)
caatctgcccgcctcggcctcccaaagtaccaggattacaggcatgagccactgcttccggcccacagccctgttttacttcctgtgtgagcttgggcccgtcactcaacctttctgtga

SEQ ID NO: 711571 - DNA, 120 bp, Artificial Sequence
  ENSG00000196961_70 (sequence is synthesized)
ctcaacctttctgtgactcagtttcccacctataaccccacctgcagcagagctttcagtgttccaccagtcagtaggtggctgcacccaccgatcccggagagggcgctcattgttgtc

SEQ ID NO: 711572 - DNA, 120 bp, Artificial Sequence
  ENSG00000196967_0 (sequence is synthesized)
agcctacaaaggggaggtgctagaagtcggaccggaagtggaagtggtcttccaaggcttttttgccgctggtgtcaggagtattttcatattccaataccgataaatctttgaggtttc

SEQ ID NO: 711573 - DNA, 120 bp, Artificial Sequence
  ENSG00000196967_1 (sequence is synthesized)
tgggtgtctctggggagcccctgggccagattttcctctagactccagcccatctcttcagagcagctctgcttgagttcacagatgactgccaagcttcagacaccctacagaaaaagg

SEQ ID NO: 711574 - DNA, 120 bp, Artificial Sequence
  ENSG00000196967_2 (sequence is synthesized)
gttgagacccagtgtggccatgccagctaattggacctcacctcagaaatcctcagccctggctccagaggatcatggcagctcctatgagggatcagtgtccttcagggatgtggctat

SEQ ID NO: 711575 - DNA, 120 bp, Artificial Sequence
  ENSG00000196967_3 (sequence is synthesized)
cgatttcagcagagaggaatggcggcacctggacccttctcagagaaacctgtaccgggatgtgatgctggagacctacagccacctgctctcagtaggatatcaagttcctgaagcaga

SEQ ID NO: 711576 - DNA, 120 bp, Artificial Sequence
  ENSG00000196967_4 (sequence is synthesized)
ggtggtcatgttggagcaaggaaaggaaccatgggcactgcagggtgagaggccacgtcagagctgcccaggagagaaattatgggaccataatcaatgtagaaaaatcctcagttataa

SEQ ID NO: 711577 - DNA, 120 bp, Artificial Sequence
  ENSG00000196967_5 (sequence is synthesized)
acaagtatcctctcaacctcaaaaaatgtatcctggggagaaagcttatgaatgcgccaaatttgaaaagatattcacccagaagtcacagctcaaagtacacctgaaagttcttgcagg

SEQ ID NO: 711578 - DNA, 120 bp, Artificial Sequence
  ENSG00000196967_6 (sequence is synthesized)
agaaaagctctatgtatgcattgaatgtgggaaggcttttgtacagaagccagaatttattatacaccagaaaacccatatgagagagaaaccctttaaatgcaatgaatgtggaaaatc

SEQ ID NO: 711579 - DNA, 120 bp, Artificial Sequence
  ENSG00000196967_7 (sequence is synthesized)
cttttttcaagtgtcgtccctcttcaggcatcagagaattcataccggagagaaactctatgaatgcagccagtgtgggaaaggcttctcttataactcagatctcagtatacatgagaa

SEQ ID NO: 711580 - DNA, 120 bp, Artificial Sequence
  ENSG00000196967_8 (sequence is synthesized)
aattcatactggagagagacaccatgaatgcactgactgtggcaaagcattcacacaaaagtccacactcaagatgcatcagaaaatccatacaggcgagagatcctacatctgtattga

SEQ ID NO: 711581 - DNA, 120 bp, Artificial Sequence
  ENSG00000196967_9 (sequence is synthesized)
atgcggacaggccttcatccagaagacccatttgattgcacaccgaagaattcatactggagaaaaaccatatgagtgcagtaactgtggcaaatccttcatttccaagtcacaacttca

SEQ ID NO: 711582 - DNA, 120 bp, Artificial Sequence
  ENSG00000196967_10 (sequence is synthesized)
ggtacatcaacgtgttcacacaagagtgaagccctatatatgtaccgaatatgggaaggtcttcagcaataattccaacctcgttacacataagaaagttcaaagtagagagaaatcttc

SEQ ID NO: 711583 - DNA, 120 bp, Artificial Sequence
  ENSG00000196967_11 (sequence is synthesized)
catatgtactgagtgtgggaaggcctttacctacaggtcagagttgattattcatcagagaattcacactggagagaaaccttatgaatgcagtgactgtgggaaagccttcactcagaa

SEQ ID NO: 711584 - DNA, 120 bp, Artificial Sequence
  ENSG00000196967_12 (sequence is synthesized)
gtcagcactcacagtgcatcagagaattcatacaggagaaaaatcgtatatatgcatgaaatgtggactggccttcattcagaaggcacacttgattgcacatcaaataattcatactgg

SEQ ID NO: 711585 - DNA, 120 bp, Artificial Sequence
  ENSG00000196967_13 (sequence is synthesized)
agagaaacctcataaatgtggtcactgtgggaaattgtttacctccaagtcgcaactccatgttcataaacgaattcacacaggagaaaagccctatatgtgcaataaatgtgggaaggc

SEQ ID NO: 711586 - DNA, 120 bp, Artificial Sequence
  ENSG00000196967_14 (sequence is synthesized)
attcaccaaccggtcaaatctcattacacatcagaaaactcatacaggagagaaatcttatatatgttccaaatgtggaaaggccttcacccagaggtcagacttgattacacatcagag

SEQ ID NO: 711587 - DNA, 120 bp, Artificial Sequence
  ENSG00000196967_15 (sequence is synthesized)
aatccatactggggagaagccttatgaatgcaatacttgtggaaaagccttcactcagaagtcacacctcaatatacatcagaaaattcacactggagagagacagtatgaatgccacga

SEQ ID NO: 711588 - DNA, 120 bp, Artificial Sequence
  ENSG00000196967_16 (sequence is synthesized)
atgtgggaaagccttcaaccagaaatcaatactcattgttcatcagaaaattcatacaggagagaaaccctatgtatgcactgagtgtggaagagctttcatccgcaagtcaaactttat

SEQ ID NO: 711589 - DNA, 120 bp, Artificial Sequence
  ENSG00000196967_17 (sequence is synthesized)
tactcatcaaagaattcatactggagagaagccttatgaatgcagtgactgtgggaagtcctttacctccaagtctcagctcctggtgcatcagccagttcacacaggagagaaacccta

SEQ ID NO: 711590 - DNA, 120 bp, Artificial Sequence
  ENSG00000196967_18 (sequence is synthesized)
tgtgtgtgccgagtgcgggaaggcctttagtggcaggtcaaatctcagtaagcaccagaaaactcataccggagaaaagccctacatttgttctgaatgtgggaagacctttcgacagaa

SEQ ID NO: 711591 - DNA, 120 bp, Artificial Sequence
  ENSG00000196967_19 (sequence is synthesized)
gtcagagttgattacacatcacagaattcatactggagagaaaccttatgagtgcagtgactgtgggaagtctttcactaaaaaatcacagctccaagtgcatcagcgaattcacactgg

SEQ ID NO: 711592 - DNA, 120 bp, Artificial Sequence
  ENSG00000196967_20 (sequence is synthesized)
agagaagccttacgtgtgtgctgagtgtgggaaggcctttactgacaggtccaatttgaataaacatcagacaacacacactggagacaaaccctacaagtgtggcatctgtgggaaagg

SEQ ID NO: 711593 - DNA, 120 bp, Artificial Sequence
  ENSG00000196967_21 (sequence is synthesized)
cttcgttcagaaatcagtgttcagcgtccatcagagcagccacgcttgagagaaacagtgtgagaaaacccccctgagggttgggtctgattgtacactgttgcacgcatgcagcagaaa

SEQ ID NO: 711594 - DNA, 120 bp, Artificial Sequence
  ENSG00000196967_22 (sequence is synthesized)
aatatgtatattattgtaaatagaaatgaccacagcagaatgtcacacatggctgttctggagagggcctctgagaaggcactgaatgaggcgagggacccttcctacattgtcaccatc

SEQ ID NO: 711595 - DNA, 120 bp, Artificial Sequence
  ENSG00000196967_23 (sequence is synthesized)
cccagtaaaccttgggtcattattcatactgacaaggaaccgagtcaatttggtgaataggaaaagccttctcatgaaaactacaatagaatactgttaccaaattcttcctaagaaaga

SEQ ID NO: 711596 - DNA, 120 bp, Artificial Sequence
  ENSG00000196967_24 (sequence is synthesized)
tcgtattaagttaacgataatcctgtttactgtggattaggtatagtgccaacaaattgaatgataaaacaacataatacgtagttattttgatagtgatgaatcctaagttatgtgagt

SEQ ID NO: 711597 - DNA, 120 bp, Artificial Sequence
  ENSG00000196967_25 (sequence is synthesized)
tgttcgttgtggaacacattgtgtaacagactcctgggtgtttttctttctcattcgaatctaccacagttggtcatatccaaccctcattcagtatttctatcaagaaagagatgctac

SEQ ID NO: 711598 - DNA, 120 bp, Artificial Sequence
  ENSG00000196967_26 (sequence is synthesized)
aaaaaaaaaaagaaaaaacctttatgtatacagacgtaaacctcagaatgtatgttgagtccccactgtcatctaccaagacttgcacccccctcattatctaccatgactgtctctcag

SEQ ID NO: 711599 - DNA, 120 bp, Artificial Sequence
  ENSG00000196967_27 (sequence is synthesized)
cctcacgggccctcagcactttgtgttttgacccccagcaccgtgtcttgtgaactcccatcaccttcaagaaagcttccgaggtaagaattttatggtcatctgggacaacttaaatct

SEQ ID NO: 711600 - DNA, 120 bp, Artificial Sequence
  ENSG00000196967_28 (sequence is synthesized)
cccttctgctgtcatagttcttccaactcagttgcctttttttttttttcgtactcatcactgacttgaagcttagtatctggcttccttaaggatgtaactttcatgtaacagattaat

SEQ ID NO: 711601 - DNA, 120 bp, Artificial Sequence
  ENSG00000196967_29 (sequence is synthesized)
aacttatatgaaaaccaacacaaccatatgtttagggctggaaagggccatgacgcctggccatttttcctgttttaccttactcttatgtgtgtcacacttcatcaattccggaaacag

SEQ ID NO: 711602 - DNA, 120 bp, Artificial Sequence
  ENSG00000196967_30 (sequence is synthesized)
tttctggagatctcctcattacctcttttacaatcacctcactccagcatggtgtctgttacctcttcccacttgtgacaatgtctagtaaggtccactctccattctgtgtgatgacca

SEQ ID NO: 711603 - DNA, 120 bp, Artificial Sequence
  ENSG00000196967_31 (sequence is synthesized)
cttattacaaccctcagaataggggacagtggtgtgccccctgcaatacaatggtttctatctcctgatacttttattacacctctagcaggatgtcttgtgatcctccttattgatttt

SEQ ID NO: 711604 - DNA, 120 bp, Artificial Sequence
  ENSG00000196967_32 (sequence is synthesized)
tccctcacgatgatgaacaattatctcccgttactcacctagcagtatctaactgtccctaacacagcatgtgggaatgccctcaatacggtggatgctgttaactttcttccttcccct

SEQ ID NO: 711605 - DNA, 120 bp, Artificial Sequence
  ENSG00000196967_33 (sequence is synthesized)
caggcaatggcggtgacttacaatgaaccataatgtccacatttcccaactgtattttggagcctcttctgtccccttctttctaggaccccagttaaaaaaaaaaaaaacaaaaactag

SEQ ID NO: 711606 - DNA, 120 bp, Artificial Sequence
  ENSG00000196967_34 (sequence is synthesized)
cccaatgtctgttgatgcccattaatcactaacacagtgtctgacccctccattaaattttgatggtatctcttggctccccattgtcccgttaacccaatgtctgctgattcccaattt

SEQ ID NO: 711607 - DNA, 120 bp, Artificial Sequence
  ENSG00000196967_35 (sequence is synthesized)
gtgatgaggatgaggtcccagcctcatagaccttttcctctgagttccccccaaggcacaatggaatgatggacccagggtgggccagggatgatctggagatctcaggagaccacaagc

SEQ ID NO: 711608 - DNA, 120 bp, Artificial Sequence
  ENSG00000196967_36 (sequence is synthesized)
tgggcttcctgtctactacatgagtatggtgtgagcagaacagtgaaagctgtctatgttggttcaaattctggtgccaacactgatccacttagggaccctcagcctgcccagaaacct

SEQ ID NO: 711609 - DNA, 120 bp, Artificial Sequence
  ENSG00000196967_37 (sequence is synthesized)
cctctgggcctcaattttctcacttgtaaaatgggattatgggagaatgaagtgactttttttgggtcacatgatggatgggatccaagccagcagggcccaatgacagcatcctgttaa

SEQ ID NO: 711610 - DNA, 120 bp, Artificial Sequence
  ENSG00000196967_38 (sequence is synthesized)
tattagtcatcagtcaacataagcatctgactatcctctgtatgcccaagcctcatgaagggaaacaatttattgtaaatgacttttgattatttctcttatatatttattgtaacaata

SEQ ID NO: 711611 - DNA, 120 bp, Artificial Sequence
  ENSG00000196967_39 (sequence is synthesized)
ttataatacttacgtatatgtatatgcatatacccgtatatacggaaggctttattttttagagtagttttaggttcaaagcaaaattgggtagaaattacagaggtttcccatatatcc

SEQ ID NO: 711612 - DNA, 120 bp, Artificial Sequence
  ENSG00000196967_40 (sequence is synthesized)
cctaatccacatatgcatagcctcccacattatcagcattcctctcagagtagtatatttgttacaattggtgaacctccactgacactcattaccaccccaagtctataggttatatta

SEQ ID NO: 711613 - DNA, 120 bp, Artificial Sequence
  ENSG00000196967_41 (sequence is synthesized)
gggttcatccttggtgtaacaccatagaatgtgtcttgtactttctgcttgttggagcaagtggatcatggcatgtttccactgttatacacagagtagtttcactgccctaaaaatcct

SEQ ID NO: 711614 - DNA, 120 bp, Artificial Sequence
  ENSG00000196967_42 (sequence is synthesized)
ctgtgttctgcctgtcatcccttcatctcctctaatcctggcaacattttttctgtctccatagttttacctttgatcttttatatcatatagttgaaattatacagtgtgtagcctttt

SEQ ID NO: 711615 - DNA, 120 bp, Artificial Sequence
  ENSG00000196967_43 (sequence is synthesized)
caaattgacttctttcacttagtaatgtggatttcagtttcctccatgtcttttcatggcttgataatgcatttctttttagagccaaattatgttccatcgtctggatgtttatttatt

SEQ ID NO: 711616 - DNA, 120 bp, Artificial Sequence
  ENSG00000196967_44 (sequence is synthesized)
cacctactgaaggactgttggatgcttccttttggcaattatgaggaaagctgttataaatatctgtgcaggctttttgtgtggacataactgaaatatttttaaagttatatttattga

SEQ ID NO: 711617 - DNA, 120 bp, Artificial Sequence
  ENSG00000196967_45 (sequence is synthesized)
ggtataatttacattcagtaatagtcacactttttagtgtagagttctgagttttgacagttgtatctaatcatgcaatcaacaccacaatcaagatgaagaacaggcccctcacttccc

SEQ ID NO: 711618 - DNA, 120 bp, Artificial Sequence
  ENSG00000196967_46 (sequence is synthesized)
taacttctttcctatccctttttagtcccttttcccactcccagcccttggcaatcaccagtctgtttccgtctctatagttctgccttttccataatattgtataagtggagtccttgt

SEQ ID NO: 711619 - DNA, 120 bp, Artificial Sequence
  ENSG00000196967_47 (sequence is synthesized)
gtgtgtgtgtgtgtgtgtgttttgtacgtgtatgtatatctccttttgagtcggagtgctttcatttaatgtgatgtatctgagattcatccatatggttctatgaaaaacaaatggaaa

SEQ ID NO: 711620 - DNA, 120 bp, Artificial Sequence
  ENSG00000196967_48 (sequence is synthesized)
gaaaataaggtgatgaaaagatgctcaacatctttaattatcaggaaaatgtaaatcaaaccacaatgagatactactatagaatggcttttagaatggctaaaaatgaaaacgtgccat

SEQ ID NO: 711621 - DNA, 120 bp, Artificial Sequence
  ENSG00000196967_49 (sequence is synthesized)
aaattggcaagaatacagaccaatggaaattttcatgcattgcttgtaggattgtaaaacggtctgtccactatgcacaaaagtttggcagcttcttatactattaaccatacatttatc

SEQ ID NO: 711622 - DNA, 120 bp, Artificial Sequence
  ENSG00000196967_50 (sequence is synthesized)
atatgactcagcaactccacacttaggtatttaccctagatgaaagaaaaattctgtttacatgaaaacctatactcagatgttcacagcaattgtataattgcccaaattaggaagtaa

SEQ ID NO: 711623 - DNA, 120 bp, Artificial Sequence
  ENSG00000196967_51 (sequence is synthesized)
cacaaatgtacatcagtggatgagtgattaaacaaattgtgtacaccaatactatggagggctgctcagacataaagaaatgatttattgacacttactacaacatggatgaatctcaaa

SEQ ID NO: 711624 - DNA, 120 bp, Artificial Sequence
  ENSG00000196967_52 (sequence is synthesized)
agtgctgttgtattttaggtaaaccatgtgataacttgaattacatttgataaaagatttataagtgtaaaaactagatttatatattttaattttatatgtgcctgtcattacatacta

SEQ ID NO: 711625 - DNA, 120 bp, Artificial Sequence
  ENSG00000196967_53 (sequence is synthesized)
atgattacctaattttaatattttacatatcaaactttcacataatattttggttatttctactttcacgtagttgcatttaatgtttgtagtgtaaagatataactacaataaaagagg

SEQ ID NO: 711626 - DNA, 120 bp, Artificial Sequence
  ENSG00000196967_54 (sequence is synthesized)
aaaagaggccagagagtctgcagttggagttagtcaacatttttatttgtcaggcatctcaattctggctgttttaacatcaaggatcttttctctggctttgggcctttgcaccgactg

SEQ ID NO: 711627 - DNA, 120 bp, Artificial Sequence
  ENSG00000196967_55 (sequence is synthesized)
ttctgagagtgctctgcttctccagtgcccgtgcatcttgctttcctcttccacctttgcagtgcctccatccccatcttatcctgccattgaagtaacacatctgtagagctcacttgc

SEQ ID NO: 711628 - DNA, 120 bp, Artificial Sequence
  ENSG00000196967_56 (sequence is synthesized)
tgctcccttattttgtatgatatttgcattgcaaatactattactatctgacctgattcaatattcctttttttggtttctcatccctcttccccactggaccatcagcctcatgagaac

SEQ ID NO: 711629 - DNA, 120 bp, Artificial Sequence
  ENSG00000196967_57 (sequence is synthesized)
cagactttgtctgtcctgtttctgctgtataccaggcgcccagcacggtgccagctcaaagcagatgctcagtacaagcttgttaaatggatgaatgaataatagcaataatatcgaggt

SEQ ID NO: 711630 - DNA, 120 bp, Artificial Sequence
  ENSG00000196967_58 (sequence is synthesized)
tgaccagatgccccgcacagattggtaacatgtgtggggaagttggtggggtgggtttgggtcctctaattcaagatttaatgcctcctcccaccatggtccagcacacccagctctaac

SEQ ID NO: 711631 - DNA, 120 bp, Artificial Sequence
  ENSG00000196967_59 (sequence is synthesized)
tccatgtcagggcagtaccaaactgagtatcctacctacatacattccacactgtttacaagatctaacttagcctcctcctggtcacagtggcaggtcacatagagggggaaaggggca

SEQ ID NO: 711632 - DNA, 120 bp, Artificial Sequence
  ENSG00000196967_60 (sequence is synthesized)
ggagtgggggatccataggcagggggccactcccatcagcatctagcctagcactttctatcctgcaccccattgtcagtgtcacctgccccacctcctccactggagcagccactggaa

SEQ ID NO: 711633 - DNA, 120 bp, Artificial Sequence
  ENSG00000196967_61 (sequence is synthesized)
aatatagaaccccaggagcaagaggaatgtggcagggctgagggttctggggctcaggcaccttgttggataatggatgtgatgcagtgtggcagacattgaccccgtggccaaagtcag

SEQ ID NO: 711634 - DNA, 120 bp, Artificial Sequence
  ENSG00000196967_62 (sequence is synthesized)
cttaaagccaaggttgtcatggacacttcccataatgccaggatgaatcacaccctccaccctcagctctcaaatgggctactagtgccaatgtgactattttttatttttatttttttt

SEQ ID NO: 711635 - DNA, 63 bp, Artificial Sequence
  ENSG00000196967_63 (sequence is synthesized)
gatttgcccacctcggccacccaaagcattgggattacaggcctgagccacctcgcccaaccc

SEQ ID NO: 711636 - DNA, 120 bp, Artificial Sequence
  ENSG00000196967_64 (sequence is synthesized)
aagcattgggattacaggcctgagccacctcgcccaacccagtgtgactatttatggtatatcctacacctccccaccacactctactccacattcctcataccgtaccataccgtacac

SEQ ID NO: 711637 - DNA, 120 bp, Artificial Sequence
  ENSG00000196967_65 (sequence is synthesized)
catgccatagcataccacttacagttttacttaattctataattatattgtttctattaatggttttaaatataatcaacacaattatactttataacaaatatcagaatccttgtcatt

SEQ ID NO: 711638 - DNA, 120 bp, Artificial Sequence
  ENSG00000196967_66 (sequence is synthesized)
attatatgcctctaaattattaagatatcataaataacaacatatcaattctgatgctaagaaatcctctgtctctgctagtttctgccaccttcaggtgtttgtattatataaacacag

SEQ ID NO: 711639 - DNA, 120 bp, Artificial Sequence
  ENSG00000196967_67 (sequence is synthesized)
tagtcccacccctgggctgatgttttccaccctctgtgaaatcagcacaattaggttacatccttagtgattttattatggtgttattttaatatttattataacaaggaatgctgctat

SEQ ID NO: 711640 - DNA, 120 bp, Artificial Sequence
  ENSG00000196967_68 (sequence is synthesized)
taaaacaaaaaattgtgctctctgtttacatttgtgaaataggacaatataagaagcacattagtacaatcatttgagttatattaagtttgtgcctataataaatgccaatcctgaaaa

SEQ ID NO: 711641 - DNA, 120 bp, Artificial Sequence
  ENSG00000196967_69 (sequence is synthesized)
cattgaagagtagaagaaaacaatagcctagtaggtttttactgggattagtgaaacaactgctatgttctcagcaacccactccaaagccaaagtcaaaactaaaattgtaaaatatct

SEQ ID NO: 711642 - DNA, 120 bp, Artificial Sequence
  ENSG00000196967_70 (sequence is synthesized)
caaagccaaagtcaaaactaaaattgtaaaatatctcaaaaacaataaaaatggtatatatatatcagaagctctggtatatagcaaaactgtactaaaaataatttagaaaaataattt

SEQ ID NO: 711643 - DNA, 120 bp, Artificial Sequence
  ENSG00000196967_71 (sequence is synthesized)
gtggtcaatgaggacaagtcaacgagagattcctgagtacgtctatggtcaccctttgcggtaaacttgtgcgctcagaagaagccagggtaacaatgggacaaactaaaaaaacgagag

SEQ ID NO: 711644 - DNA, 120 bp, Artificial Sequence
  ENSG00000196967_72 (sequence is synthesized)
acaaattaattgactgttacacatttctgcaagcagaggttgccaacgcaggactggcaatagcatctgaaatcagactactactcctgcagaacaacatcttactggtaaaaaaaagaa

SEQ ID NO: 711645 - DNA, 85 bp, Artificial Sequence
  ENSG00000196967_73 (sequence is synthesized)
taaaaaaaagaatcaacaacaataagacatgggaaatagggaaggtggtaacgtggaggagaggttttgcttgtgtttcaccagg

SEQ ID NO: 711646 - DNA, 120 bp, Artificial Sequence
  ENSG00000196967_74 (sequence is synthesized)
tcctgtttggataccaactagacatttgaagttctacaatgaacctgtcggagatgcaaagaaaagcacctccacggagacagaaacactgcaatcaagcaccatcaactcacaagataa

SEQ ID NO: 711647 - DNA, 120 bp, Artificial Sequence
  ENSG00000196967_75 (sequence is synthesized)
caccaagaaggcagagccgccgacttgggcacaattaaagaagctgacacagttagctaaaaaaggccttgagaacacaaaggtgacacaaactccagagagtatgctgcttgcagcttt

SEQ ID NO: 711648 - DNA, 120 bp, Artificial Sequence
  ENSG00000196967_76 (sequence is synthesized)
gatgattgtatcaatggtgcaccgtattctgctagtgagagcaagggaaggcgtgtggatccctgtgtccatggaccgacagtgggaggcctcgccatccatccatattttgactgaatc

SEQ ID NO: 711649 - DNA, 85 bp, Artificial Sequence
  ENSG00000196967_77 (sequence is synthesized)
aaaagaaaagggggaaatgggaaaagagagatcagactgttaccgtgtctatgcagaaataagtagacataagagactccgtttt

SEQ ID NO: 711650 - DNA, 120 bp, Artificial Sequence
  ENSG00000196967_78 (sequence is synthesized)
aaaagggggaaatgggaaaagagagatcagactgttaccgtgtctatgcagaaataagtagacataagagactccgttttgttctgtaccaagaaaattcttctgccttgagatgctgtt

SEQ ID NO: 711651 - DNA, 77 bp, Artificial Sequence
  ENSG00000196967_79 (sequence is synthesized)
cccaaccctgtgctccaaagggctatgcaggatgtactttgttaaaaaaaagtgcttgaaggcagtatgcttgttaa

SEQ ID NO: 711652 - DNA, 120 bp, Artificial Sequence
  ENSG00000196967_80 (sequence is synthesized)
catcaccattctctaatctcaagtacccaggacacaatacactgtggaaggccacagggacctctgcctgggaaagccaggtattgcccaagatttctccccatgtgatagcctgagata

SEQ ID NO: 711653 - DNA, 73 bp, Artificial Sequence
  ENSG00000196967_81 (sequence is synthesized)
ctgagatatggcctcatgggaagggtaagacctgactgtcccccagcccgacatcccccagcccgacacccga

SEQ ID NO: 711654 - DNA, 120 bp, Artificial Sequence
  ENSG00000196967_82 (sequence is synthesized)
tcctgctcgtccctgggcaatagaatgtctcagtgtaaaacccaattgtatgttctatttactgagataggagaaaaccaccttagggctggaggagagacatgctagtggtaatactgc

SEQ ID NO: 711655 - DNA, 120 bp, Artificial Sequence
  ENSG00000196967_83 (sequence is synthesized)
tctttaatgcaccgagatgtttgtacacgtgcacatcaaggcacagcaccttttcttaaccttgtttacgacacagagacttttgtttacatgttttcccgctgaccctctccccactat

SEQ ID NO: 711656 - DNA, 120 bp, Artificial Sequence
  ENSG00000196968_0 (sequence is synthesized)
gactatccgctgggcggggtcggtgctggccgagggggcgccggctgccggagtggacatggcggccggccccattagggtggtgttggtccttctaggggtgctcagtgtctgtgcagc

SEQ ID NO: 711657 - DNA, 120 bp, Artificial Sequence
  ENSG00000196968_1 (sequence is synthesized)
cagcggccatgggtccgtagcggagagggaggccggcggggaggcggagtgggcggaaccgtgggatggcgcggttttccggccgccctcggcgctgggcgcagtgggggtgacgcgcag

SEQ ID NO: 711658 - DNA, 120 bp, Artificial Sequence
  ENSG00000196968_2 (sequence is synthesized)
ctctgggacgccgcggccagggagggaggaggcgggggacttgccggtactgctgtggtggagcccagggctattcccccacttcccgggagactcggagcgcatcgagtgtgcgcgcgg

SEQ ID NO: 711659 - DNA, 120 bp, Artificial Sequence
  ENSG00000196968_3 (sequence is synthesized)
cgcgtgcgtggcgtcccggaaccgccgagcgctgagggactcgcggacgcgcgcgctgctcttctacggcacagacttccgcgcgtcggccgccccgctgccgcgcctggcgcaccagag

SEQ ID NO: 711660 - DNA, 120 bp, Artificial Sequence
  ENSG00000196968_4 (sequence is synthesized)
ctgggcgctcctccacgaggagtcgcccctcaacaacttcttgctgagccacggcccgggcatccgcctcttcaatcttacctccaccttcagtcgccactcggattacccgctgtcgct

SEQ ID NO: 711661 - DNA, 120 bp, Artificial Sequence
  ENSG00000196968_5 (sequence is synthesized)
gcagtggctgcccgggaccgcctatctgcgccgcccggtgcctccgcccatggaacgcgcggagtggcgccgccgcggctacgcgccgctgctctatctgcagtcacactgcgacgtgcc

SEQ ID NO: 711662 - DNA, 120 bp, Artificial Sequence
  ENSG00000196968_6 (sequence is synthesized)
agcggaccgggaccgctacgtgcgcgagctcatgcgccacatcccggtagactcctacgggaaatgcctgcagaatcgggagctgcctaccgcgcggctacaggacacagccacggccac

SEQ ID NO: 711663 - DNA, 120 bp, Artificial Sequence
  ENSG00000196968_7 (sequence is synthesized)
caccgaggatccagagctcttggctttcttgtcccgctataagttccacttggccctggaaaatgccatctgtaacgactacatgacagaaaaactgtggcgtcccatgcacctgggcgc

SEQ ID NO: 711664 - DNA, 120 bp, Artificial Sequence
  ENSG00000196968_8 (sequence is synthesized)
agggactggatgccgaacaatcactccgtcatcctgattgatgattttgagtctcctcagaagctggcagagtttattgactttctggacaagaatgatgaggagtatatgaaatacctg

SEQ ID NO: 711665 - DNA, 120 bp, Artificial Sequence
  ENSG00000196968_9 (sequence is synthesized)
gcatacaagcaacctgggggcatcaccaaccaatttcttctggatagtctgaagcatcgggagtggggagtgaatgatcctttgctgcctaactacctcaacggcttcgagtgtttcgtc

SEQ ID NO: 711666 - DNA, 120 bp, Artificial Sequence
  ENSG00000196968_10 (sequence is synthesized)
tgtgactacgaactggctcggctggatgccgagaaagcccacgcggcctctcccggggacagccccgtctttgagccccacattgcccagccctcacacatggactgcccagtgcccaca

SEQ ID NO: 711667 - DNA, 120 bp, Artificial Sequence
  ENSG00000196968_11 (sequence is synthesized)
cctggctttggcaatgtggaagagattcctgagaatgacagttggaaagagatgtggctgcaagattattggcaaggtctggaccagggggaagctctcactgccatgatccacaacaat

SEQ ID NO: 711668 - DNA, 120 bp, Artificial Sequence
  ENSG00000196968_12 (sequence is synthesized)
gaaacagagcagacgaaattttgggattacctacatgaaatcttcatgaagaggcaacatctctaagtgcccttgcaagagcctttaacttggcggagctaaggagatcttattctacca

SEQ ID NO: 711669 - DNA, 120 bp, Artificial Sequence
  ENSG00000196968_13 (sequence is synthesized)
tgggacataaggagcatccactgcacaaacccttaatgaacactgtcttttcatggattcaaggaattccagttttatctattaagattttatcttaatgatgagtagccaaggtctaac

SEQ ID NO: 711670 - DNA, 120 bp, Artificial Sequence
  ENSG00000196968_14 (sequence is synthesized)
atagggcctctcctcaaggagagatggagggatacaattcttggttcagtgggaaacagaaccctaaaacatccatttgattcaaggtgctggtccaacagagtttttaaactactcact

SEQ ID NO: 711671 - DNA, 120 bp, Artificial Sequence
  ENSG00000196968_15 (sequence is synthesized)
tctttatttcatcctttcgactgtacttgattaccagtgaagtaagatgggtcaggttacgacttacaacttttgttctattccccagactcctcattattcagtacatttcccaataat

SEQ ID NO: 711672 - DNA, 120 bp, Artificial Sequence
  ENSG00000196968_16 (sequence is synthesized)
ctctttttctcatctcttgctttataaattgttacgttggtggagaagcaaaacatttggtgagttgtattctggttttccggagttggatttttttatattatatactttcatgtcaaa

SEQ ID NO: 711673 - DNA, 120 bp, Artificial Sequence
  ENSG00000196968_17 (sequence is synthesized)
gagattcctgagaatgacaggtaagagtgctggggtcccctgcagctatcaaatcatttacttacttgcttactgtgggcaattaagtagcactaggtgctgagcaggtgcaggaggaaa

SEQ ID NO: 711674 - DNA, 120 bp, Artificial Sequence
  ENSG00000196968_18 (sequence is synthesized)
tgggctcattctgtatttaaggtgtcaacagtctagttggggggataagacaagctgaaaaagctgaatagatgtaaaatataattcaaggcaacgtatgaaaatcagcttatgtgaaca

SEQ ID NO: 711675 - DNA, 120 bp, Artificial Sequence
  ENSG00000196968_19 (sequence is synthesized)
atgtttccagtagtggttcaaaaagattgaaccagagtacagggcctgtgcagacaggggagagagaaaatggggcaaataaatagggacaaggctataaatatcattaataccaggttc

SEQ ID NO: 711676 - DNA, 120 bp, Artificial Sequence
  ENSG00000196968_20 (sequence is synthesized)
aggagtttgcactgcactaaaaatcaactcagctatttgagcaccttttatagagtggaaatggggttgggcagtagagaagagcacttttagagaggcttttctgcagtagtcaggggt

SEQ ID NO: 711677 - DNA, 120 bp, Artificial Sequence
  ENSG00000196968_21 (sequence is synthesized)
tacacctgttaaccagccataatttttttttttaagcggctgtgctgaggatgagccccatgtagttggtgcaggtggggacacactgcctgtgtaactagaaaaactaggcatggccgg

SEQ ID NO: 711678 - DNA, 120 bp, Artificial Sequence
  ENSG00000196968_22 (sequence is synthesized)
aatcccagcactttgggaggtcaaggggggaggaacacttgaggccagagacaatataatatataatataatatattgaccagcctggacaatataataagagcctctctgtacaattta

SEQ ID NO: 711679 - DNA, 120 bp, Artificial Sequence
  ENSG00000196968_23 (sequence is synthesized)
gagcctctctgtacaatttaaaaactaaaagcctggggtggtggcacatacctgtagtcctggctacttgggaggctgtggcaggtggattgcttgaacctaggagttcaatgctgtagt

SEQ ID NO: 711680 - DNA, 120 bp, Artificial Sequence
  ENSG00000196968_24 (sequence is synthesized)
gagctaggatcgtgccactgcattccagcctgggttggagtaagaccctgtcacacacacacacacacacaaaacaatgcacaatgcgcatcagaagggaagcgaataggctactgtagt

SEQ ID NO: 711681 - DNA, 120 bp, Artificial Sequence
  ENSG00000196968_25 (sequence is synthesized)
aggtggcaaaaggtggtggtactgggaaacaaggccagcgtgtggtgtggggtgggaaaatgttgaaaccacttgtagcaagccacacctattgggggagaggtgataagattattaagc

SEQ ID NO: 711682 - DNA, 120 bp, Artificial Sequence
  ENSG00000196968_26 (sequence is synthesized)
tgaagtaaggctgctagaatggcctatagaaaccgacttggacagtggatggcagcagaaggccatttattaacagatgctgctggcagttttgtcctgatggttggaatccttcaccaa

SEQ ID NO: 711683 - DNA, 120 bp, Artificial Sequence
  ENSG00000196968_27 (sequence is synthesized)
ccaagtaatttgtatctaattacaaattgtttgtatctgaacataatatgatttactagaggaaaagtatgaaaaaatatgaaacattaagaaaataaatattcaggttatgtcttttct

SEQ ID NO: 711684 - DNA, 90 bp, Artificial Sequence
  ENSG00000196968_28 (sequence is synthesized)
ctttgggaggccaaggtaggaggatcgcttgagcccagggattcaagaccagcttgggtcagaaaaaattagctgggcatggtgtgtgtg

SEQ ID NO: 711685 - DNA, 87 bp, Artificial Sequence
  ENSG00000196968_29 (sequence is synthesized)
acatggtaaaaccccatctctacaaaaaacagaaaaaattagctgggcatggtgtgtgtgccttgtagagccactgcactccagaaa

SEQ ID NO: 711686 - DNA, 120 bp, Artificial Sequence
  ENSG00000196968_30 (sequence is synthesized)
ttcaaaaatatatctaagccagatgtgatggcatgggtctgcagtcccagctactcagaaggctaaggcaggaagatcgcttgagcccaagagtttgaggctgtagtatgctgtgagtgc

SEQ ID NO: 711687 - DNA, 120 bp, Artificial Sequence
  ENSG00000196968_31 (sequence is synthesized)
agtatgctgtgagtgcgcctatgagtgccaactgggcaacacagtgagacctctgtctaaaaaaaaaaaaaaaatctgttgggctgggtgagctggctcacgcctgtaatcccagcactc

SEQ ID NO: 711688 - DNA, 120 bp, Artificial Sequence
  ENSG00000196968_32 (sequence is synthesized)
aaactccatttcaaaaaaaaaaaaaaaatctgttaaaatttgatatagtaggcactgacaaaagaggtcaaatgcaggactgatttctaagcttgcaatctatctaaatgcagatgctaa

SEQ ID NO: 711689 - DNA, 120 bp, Artificial Sequence
  ENSG00000196968_33 (sequence is synthesized)
tatctaaatgcagatgctaatttagagtgcataattattacacaagtacagacctaggttagggcttaaatttcattatgtgcaataaaaaggttaagtgatggttaagcaaggtgtaga

SEQ ID NO: 711690 - DNA, 120 bp, Artificial Sequence
  ENSG00000196968_34 (sequence is synthesized)
ttatccttacctctcctaatgacatgggctcacattggcattcctttcatacttttacgtataaagtgggcagttgtttctgaatgactgttgctggagcctcaggcctgctttgtgctt

SEQ ID NO: 711691 - DNA, 120 bp, Artificial Sequence
  ENSG00000196968_35 (sequence is synthesized)
ggtgctttccagactttctcctttattcctatcaccatatacgtactcacaaaagagcagtgtaaaccaggtattacatttccacaagggaaagtagaaccaggaatagccacatgatac

SEQ ID NO: 711692 - DNA, 120 bp, Artificial Sequence
  ENSG00000196968_36 (sequence is synthesized)
ttaccgaaagcttcactttccctatagagaaagcaagcaacatgaatcttctgatttggggcccagcctgctgctgtatacagaggttggcattattggtgatagaaatgtctgatagga

SEQ ID NO: 711693 - DNA, 120 bp, Artificial Sequence
  ENSG00000196968_37 (sequence is synthesized)
gtcttttaattatactctggagtgtggaggtggagtgcaaggctgcttcctttattactgcaagtgttattttctattatctcaggtttcgttttgtgtaataaactgcttcttgttaaa

SEQ ID NO: 711694 - DNA, 120 bp, Artificial Sequence
  ENSG00000196972_0 (sequence is synthesized)
cgtcctgaggctcgagctcttgcgggtcgatcggtcggcggggcctgcgcggggcccgggcccatggcggcgtcggcggctctgtctgcggcggcggcggcggcagccctgtctggcttg

SEQ ID NO: 711695 - DNA, 120 bp, Artificial Sequence
  ENSG00000196972_1 (sequence is synthesized)
agccctgtctggcttggcggttcggctgtcgcgctcggcggcggcccgaggctcatacggcgccttctgcaaggggctcacgcgcacgctgctcaccttcttcgacctggcctggcggct

SEQ ID NO: 711696 - DNA, 120 bp, Artificial Sequence
  ENSG00000196972_2 (sequence is synthesized)
gcgcatgaacttcccctacttctacatcgtggcctcggtgatgctcaacgtccgcctgcaagtgcggatcgagtgagcgccggcggcggcggcggccgcggaggcccggctggaggggcg

SEQ ID NO: 711697 - DNA, 120 bp, Artificial Sequence
  ENSG00000196972_3 (sequence is synthesized)
gggcatgaaggacagctggatcgcggcggggggcggaggtggggcggcccgggcccctggactctagacctacgccgcccgggcacgaaggcccagccctggccctggccgcggtctcag

SEQ ID NO: 711698 - DNA, 120 bp, Artificial Sequence
  ENSG00000196972_4 (sequence is synthesized)
aggcccagccctggccctggccgcggtctcagcccgggaccccggatcgcgcagaaatgcactgaacaggcccctacaattgggctccagaaactacctgagctcggactacctgttgcc

SEQ ID NO: 711699 - DNA, 120 bp, Artificial Sequence
  ENSG00000196972_5 (sequence is synthesized)
tcacattggcaaaagagggggaaaccagaaggagggaattctgctgcggcgacttgactttccccgccccgagcagaaaggcattgacgtttgtaggcggtgacccgccccttctctggc

SEQ ID NO: 711700 - DNA, 120 bp, Artificial Sequence
  ENSG00000196972_6 (sequence is synthesized)
cttgccaagagtctcatccctaccctggggcacctctgaccctggacctgcttgggcagaggcagcgtgaagggcctgaacaagaggagaagaagggccttcctagtagaggcacagcat

SEQ ID NO: 711701 - DNA, 120 bp, Artificial Sequence
  ENSG00000196972_7 (sequence is synthesized)
ggacaaaggctcacaggggtgggggtgcccagtgatcgagtcctggcttgggagggaaggtctgagttccctgggaactgaaatcggctagcagcactgtgagagaggtgtatttccccc

SEQ ID NO: 711702 - DNA, 120 bp, Artificial Sequence
  ENSG00000196972_8 (sequence is synthesized)
tcctaatgacagaggaaaccgaggcttcggggagggggggatttgcccttgacatgcagataggatgaggaggaactgcgtgtgcccctgggcctgcaggctcccacacccctccccagt

SEQ ID NO: 711703 - DNA, 120 bp, Artificial Sequence
  ENSG00000196972_9 (sequence is synthesized)
cttctccaagacctggcatgatgggaggagggaggggaaagtgaagagggaagcatagggctcctagggcaccaagggagaggggcccaagggtagggaatctggggatctcgctttctt

SEQ ID NO: 711704 - DNA, 120 bp, Artificial Sequence
  ENSG00000196972_10 (sequence is synthesized)
tggagcagtacagaagatcacaggaaagattaggacagacagctgagatggcagacaggagagatgggccccaggatccctggggagccaagctttcccccacagcctagcctccccacc

SEQ ID NO: 711705 - DNA, 120 bp, Artificial Sequence
  ENSG00000196972_11 (sequence is synthesized)
tggtgggcaagtggggctgatggtggtgtcatggctcctggagacacgacataaccaggagggtgaagggataaacctggggtgggctggggctgagacccatggcatgaccccaattct

SEQ ID NO: 711706 - DNA, 120 bp, Artificial Sequence
  ENSG00000196972_12 (sequence is synthesized)
ctctcctcaagctcgacccccccgccatccccaggatcacacaggagaatctcatcctcacggcttggattggtcctgggggcccccggttgtgctgctaactggtgtacaatgctcaag

SEQ ID NO: 711707 - DNA, 120 bp, Artificial Sequence
  ENSG00000196972_13 (sequence is synthesized)
agcagcccagaggggagccaggaagggaccctcgccctcacctgctatccccatttccgcatctcttgcactggtaccctgagggccacattctcagttcctgggattgaaaactgcagc

SEQ ID NO: 711708 - DNA, 120 bp, Artificial Sequence
  ENSG00000196972_14 (sequence is synthesized)
agtctggccagctccagggacagagtgatccaaccacctaccacgtaccctcctcagcaggccactggacccaggtcctgaatgaagctgtccgcctgcctcaccccagaagaggctgga

SEQ ID NO: 711709 - DNA, 120 bp, Artificial Sequence
  ENSG00000196972_15 (sequence is synthesized)
cagtggctgcctcgtgccccctgcagtctcccacagccagggcccgatggggtgcctccttgtcccaagtctcctgagaacccctgaccttgctggcctctctcatccgccccaaccctg

SEQ ID NO: 711710 - DNA, 120 bp, Artificial Sequence
  ENSG00000196972_16 (sequence is synthesized)
tccacccttgaccacctctgggggcctgtcagcctgctggtccccccaacagatctctgggggcagcctctgtgggacaagagtgatacagagctggaggagaagaggagtgaggggcct

SEQ ID NO: 711711 - DNA, 120 bp, Artificial Sequence
  ENSG00000196972_17 (sequence is synthesized)
ccttgtgtctgatgcacagatgtggccctttcaaaccctggtgtcaccctctgggtgactggatccctagctccagcctcttcctgggccagccaggaagggtggaggaaagttctttgc

SEQ ID NO: 711712 - DNA, 120 bp, Artificial Sequence
  ENSG00000196972_18 (sequence is synthesized)
tgattgcatgtgtgatacagtggggggtgcctgagccctccccatgcaaggggctcatcctgggactctggaagctgcttccctactgggagaaatgtgtgtcggagctgcaggggtccc

SEQ ID NO: 711713 - DNA, 120 bp, Artificial Sequence
  ENSG00000196972_19 (sequence is synthesized)
taccctcagagacccccgactgcagggaacccaccccataagagggtcacggatgtccatgtccgcccaccccccgtggcttctgctgtggctatattggcctagaggggctgactgggg

SEQ ID NO: 711714 - DNA, 120 bp, Artificial Sequence
  ENSG00000196972_20 (sequence is synthesized)
aggagcagggctaagccctcagcatttgctcctgtccctgccttttcacccctgctgcctgaagtggtagccccgcctgctgcttctctacctcccctccccacctcttctctcccctac

SEQ ID NO: 711715 - DNA, 120 bp, Artificial Sequence
  ENSG00000196972_21 (sequence is synthesized)
agggcccttgctgcgtgatggggtctccatgcactttatttatttgcagtctgttttctaggcggtggagcttctagacaccgaccggaatgacatacgtttctgtgtgtgattcactgt

SEQ ID NO: 711716 - DNA, 120 bp, Artificial Sequence
  ENSG00000196972_22 (sequence is synthesized)
gtactggtcagcacaggctggccagagagatgttcttgtttctggtgttgtcacgtcttcttgttttctctaagtttaaaaaaaaaaaaaagtccttggtttaatacactaaaatcccaa

SEQ ID NO: 711717 - DNA, 120 bp, Artificial Sequence
  ENSG00000196975_0 (sequence is synthesized)
gtgacctccgcagccgcagaggaggagcgcagcccggcctcgaagaacttctgcttgggtggctgaactctgatcttgacctagagtcatggccatggcaaccaaaggaggtactgtcaa

SEQ ID NO: 711718 - DNA, 120 bp, Artificial Sequence
  ENSG00000196975_1 (sequence is synthesized)
agctgcttcaggattcaatgccatggaagatgcccagaccctgaggaaggccatgaaagggctcggcaccgatgaagacgccattattagcgtccttgcctaccgcaacaccgcccagcg

SEQ ID NO: 711719 - DNA, 120 bp, Artificial Sequence
  ENSG00000196975_2 (sequence is synthesized)
ccaggagatcaggacagcctacaagagcaccatcggcagggacttgatagacgacctgaagtcagaactgagtggcaacttcgagcaggtgattgtggggatgatgacgcccacggtgct

SEQ ID NO: 711720 - DNA, 120 bp, Artificial Sequence
  ENSG00000196975_3 (sequence is synthesized)
gtatgacgtgcaagagctgcgaagggccatgaagggagccggcactgatgagggctgcctaattgagatcctggcctcccggacccctgaggagatccggcgcataagccaaacctacca

SEQ ID NO: 711721 - DNA, 120 bp, Artificial Sequence
  ENSG00000196975_4 (sequence is synthesized)
gcagcaatatggacggagccttgaagatgacattcgctctgacacatcgttcatgttccagcgagtgctggtgtctctgtcagctggtgggagggatgaaggaaattatctggacgatgc

SEQ ID NO: 711722 - DNA, 120 bp, Artificial Sequence
  ENSG00000196975_5 (sequence is synthesized)
tctcgtgagacaggatgcccaggacctgtatgaggctggagagaagaaatgggggacagatgaggtgaaatttctaactgttctctgttcccggaaccgaaatcacctgttgcatgtgtt

SEQ ID NO: 711723 - DNA, 120 bp, Artificial Sequence
  ENSG00000196975_6 (sequence is synthesized)
tgatgaatacaaaaggatatcacagaaggatattgaacagagtattaaatctgaaacatctggtagctttgaagatgctctgctggctatagtaaagtgcatgaggaacaaatctgcata

SEQ ID NO: 711724 - DNA, 120 bp, Artificial Sequence
  ENSG00000196975_7 (sequence is synthesized)
ttttgctgaaaagctctataaatcgatgaagggcttgggcaccgatgataacaccctcatcagagtgatggtttctcgagcagaaattgacatgttggatatccgggcacacttcaagag

SEQ ID NO: 711725 - DNA, 120 bp, Artificial Sequence
  ENSG00000196975_8 (sequence is synthesized)
actctatggaaagtctctgtactcgttcatcaagggtgacacatctggagactacaggaaagtactgcttgttctctgtggaggagatgattaaaataaaaatcccagaaggacaggagg

SEQ ID NO: 711726 - DNA, 120 bp, Artificial Sequence
  ENSG00000196975_9 (sequence is synthesized)
attctcaacactttgaatttttttaacttcatttttctacactgctattatcattatctcagaatgcttatttccaattaaaacgcctacagctgcctcctagaatatagactgtctgta

SEQ ID NO: 711727 - DNA, 120 bp, Artificial Sequence
  ENSG00000196975_10 (sequence is synthesized)
ttattattcacctataattagtcattatgatgctttaaagctgtacttgcatttcaaagcttataagatataaatggagattttaaagtagaaataaatatgtattccatgtttttaaaa

SEQ ID NO: 711728 - DNA, 120 bp, Artificial Sequence
  ENSG00000196975_11 (sequence is synthesized)
actttgtgtttcacagacattgaatatattaaattattccatattttcttttcagtgaaaaattttttaaatggaagactgttctaaaatcacttttttccctaatccaatttttagagt

SEQ ID NO: 711729 - DNA, 120 bp, Artificial Sequence
  ENSG00000196975_12 (sequence is synthesized)
ggctagtagtttcttcatttgaaattgtaagcatccggtcagtaagaatgcccatccagttttctatatttcatagtcaaagccttgaaagcatctacaaatctctttttttaggttttg

SEQ ID NO: 711730 - DNA, 120 bp, Artificial Sequence
  ENSG00000196975_13 (sequence is synthesized)
tccatagcatcagttgatccttactaagtttttcatgggagacttccttcatcacatcttatgttgaaatcactttctgtagtcaaagtataccaaaaccaatttatctgaactaaattc

SEQ ID NO: 711731 - DNA, 120 bp, Artificial Sequence
  ENSG00000196975_14 (sequence is synthesized)
taaagtatggttatacaaaccatatacatctggttaccaaacataaatgctgaacattccatattattatagttaatgtcttaatccagcttgcaagtgaatggaaaaaaaaataagctt

SEQ ID NO: 711732 - DNA, 120 bp, Artificial Sequence
  ENSG00000196975_15 (sequence is synthesized)
caaactaggtattctgggaatgatgtaatgctctgaatttagtatgatataaagaaaacttttttgtgctaaaaatactttttaaaatcaattttgttgattgtagtaatttctatttgc

SEQ ID NO: 711733 - DNA, 120 bp, Artificial Sequence
  ENSG00000196975_16 (sequence is synthesized)
actgtgcctttcaactccagaaacattctgaagatgtacttggatttaattaaaaagttcactttgtaagaacgtggaaaaataattttaatttaaaaatggtgtttttaggccgggggc

SEQ ID NO: 711734 - DNA, 87 bp, Artificial Sequence
  ENSG00000196975_17 (sequence is synthesized)
tgtggtggctggtgcctgtaatcccagccactcggaggctgagtcagggagaactgcttgaacccaggagggccagcctgggcgaca

SEQ ID NO: 711735 - DNA, 120 bp, Artificial Sequence
  ENSG00000196975_18 (sequence is synthesized)
gcctgggcgacagagcgagaatccatctaaaaaaaaaaaaaaaaaaagtgtctttaaagtgaggtatagtctttctctgatccacttttcaccttctgaggtttttcatcttggcccctg

SEQ ID NO: 711736 - DNA, 120 bp, Artificial Sequence
  ENSG00000196975_19 (sequence is synthesized)
aaaggagctatttttgaaggacttgtgttactcagtttctacaggaattacaagataagaaaaaaaaaatcatatttagtcttatgcgtgcctactggctaatgttcacatatgccaaac

SEQ ID NO: 711737 - DNA, 120 bp, Artificial Sequence
  ENSG00000196975_20 (sequence is synthesized)
actactcaataacataaaataatgtatgaacttattctctggaaatgagtgatgccctctgctctaagtagaccatttatattaaatatcataaatgtataaaggacattcatattctta

SEQ ID NO: 711738 - DNA, 120 bp, Artificial Sequence
  ENSG00000196975_21 (sequence is synthesized)
tgtgtgcacccagggttgagaactactgcataagaggtcctagaagatatctggtatggccagagtacagagggaccggagaagaacttctgcttgggtggctgaactctgatcttgacc

SEQ ID NO: 711739 - DNA, 120 bp, Artificial Sequence
  ENSG00000196975_22 (sequence is synthesized)
gctgattagacttttcacagaacgctgagcatgagggatcctcggtgccaagctctgcttcgagggagatccctgtttagccaaatggcggtctgttggctccttaagatttctcaggtg

SEQ ID NO: 711740 - DNA, 120 bp, Artificial Sequence
  ENSG00000196975_23 (sequence is synthesized)
aagatgacactctattttgcctacccagtgcagtattttattaccctaaaagttggaaagttgttccttattatcagacaaagaatctaaggtacttgttcaaaagtggtggcaccagca

SEQ ID NO: 711741 - DNA, 120 bp, Artificial Sequence
  ENSG00000196975_24 (sequence is synthesized)
gatcttagcattccaaggaatggtctggaggggccgtctggcccaaattcttcccttcagactggactgtacgtcctccagccaaatcagaatgacagccattcactcccccttagagac

SEQ ID NO: 711742 - DNA, 120 bp, Artificial Sequence
  ENSG00000196975_25 (sequence is synthesized)
ctccagagggtgatacgtatgaagtgcctttaaaaaatgcctgactttttgccctaagaatataactaaaaatgcacagaggttcagatctcacagtgtttattcagcattgtctacatt

SEQ ID NO: 711743 - DNA, 120 bp, Artificial Sequence
  ENSG00000196975_26 (sequence is synthesized)
agctaaaaatgcccaagagtagcagattgtctaaacaaaatattatacacttacacaatgaactattatgtagtcattaaaacttatattaaagagtatttttttcttttatttagcctt

SEQ ID NO: 711744 - DNA, 90 bp, Artificial Sequence
  ENSG00000196975_27 (sequence is synthesized)
tctcactctgttgcccaggctggaatgcaatggccccatcatagctcactgcaacctcgacctcctgggcttcagcaacccacccactgt

SEQ ID NO: 711745 - DNA, 120 bp, Artificial Sequence
  ENSG00000196975_28 (sequence is synthesized)
gtgctgggattacagatgtgagccactacacctggccaagaatactattaaaatatttattaaatggtttggtatatgtaagtgaaaaagacaagccataaaatagtatgctatgatccc

SEQ ID NO: 711746 - DNA, 120 bp, Artificial Sequence
  ENSG00000196975_29 (sequence is synthesized)
tgctatgatcccatttttaaaaaattaacacagttaataacacagtattttttaaataaatgaaaataatttgtgcatgtgggggaaaatgaggaaggatatttacagaaatgttgtcaa

SEQ ID NO: 711747 - DNA, 120 bp, Artificial Sequence
  ENSG00000196975_30 (sequence is synthesized)
tgattcttatttctgggtgattagactgcagtggagttcctcgccttgccccttctttttacttatttgttttttcctaagccttctgtggtcaacatgtgttacctttatagaaagaaa

SEQ ID NO: 711748 - DNA, 120 bp, Artificial Sequence
  ENSG00000196975_31 (sequence is synthesized)
acaaccacaataagagctttgtgggaagtgttcagagcaggagattctaaaccttaggagtctggatttagcaacccaatccccacatctgcccaatgagggttttcttccctgagggct

SEQ ID NO: 711749 - DNA, 120 bp, Artificial Sequence
  ENSG00000196975_32 (sequence is synthesized)
tggcatggtcatggctcactgcagccttgacctccccaggctgagatgatcctcccacctcagcctcccctgtagctggtactacaagcatgcgccaacatacccagctaatttttgtat

SEQ ID NO: 711750 - DNA, 120 bp, Artificial Sequence
  ENSG00000196975_33 (sequence is synthesized)
ttacaggcatgagccactgcgctcggccgtggagcttctcatggataacctgtcagaacctcccaagtgagagacgtggcagagaggcatatgctaggatttgcatttgacagcgctcca

SEQ ID NO: 711751 - DNA, 120 bp, Artificial Sequence
  ENSG00000196975_34 (sequence is synthesized)
gcgctccaaccccagccccacctcaaagctgggttcagaagctcctatctggttgctttccatcagtgaagcagcagaggctgctccacagctgtggttccctctgtgtcactgagaacc

SEQ ID NO: 711752 - DNA, 120 bp, Artificial Sequence
  ENSG00000196975_35 (sequence is synthesized)
acgttcagatcggacccctgggtggcaggaagcacagagggaggatttcagacccagctttttcaaccccacattttaagaaacaggaatatcttggctgggtgcggtggctcacgccta

SEQ ID NO: 711753 - DNA, 120 bp, Artificial Sequence
  ENSG00000196975_36 (sequence is synthesized)
ggcaacagaatgagactccatctcaaaagaaacaaaacaaaaacaggaatatcgtgtgacaggataagctgatcttgaccattttaccagagtttagtttttgaaaaactgtgtgtgggg

SEQ ID NO: 711754 - DNA, 120 bp, Artificial Sequence
  ENSG00000196975_37 (sequence is synthesized)
ggggtgaaaaaacctcatgataagctgcttccataagcaggctggtcttgaggggacagattgctctggagtgtgacagggcattgggcaagactcttaattctgaagtagctaatttca

SEQ ID NO: 711755 - DNA, 120 bp, Artificial Sequence
  ENSG00000196975_38 (sequence is synthesized)
gccatgcacaaacaacgaggaaacagaagattcaccaaacatttatgaacagccagctgttataaagacaagggaccaatctgaaaaatcagaataaagtctccttgttaaagctgctgc

SEQ ID NO: 711756 - DNA, 120 bp, Artificial Sequence
  ENSG00000196975_39 (sequence is synthesized)
tgtgtgtgagagaaagagagagaggatggagttgggcaagtaccaggatcttcagagggaatcagcaagctggagatgcaggccagcctatggttttgttccagtctgagtccaaaggcc

SEQ ID NO: 711757 - DNA, 120 bp, Artificial Sequence
  ENSG00000196975_40 (sequence is synthesized)
tgagaactaggagcagttcccatctgaaggccagcaggctggaaacccatgaagagctgatgttccagttcaagtccaaaggcaggaaaaaaactgatgtcctagctcaaggcagtcagg

SEQ ID NO: 711758 - DNA, 120 bp, Artificial Sequence
  ENSG00000196975_41 (sequence is synthesized)
caggaggagtccctctcactcttgggaaggtcagccctcttcttgaaaacaaaagctttcagctgattgtatgagggcccctcctccatattggatcatccaaaaaccctcacagaaaca

SEQ ID NO: 711759 - DNA, 120 bp, Artificial Sequence
  ENSG00000196975_42 (sequence is synthesized)
cccagaataatgtttgagcaaaaatctgggtaacccatggctcagtcaagttgacataaaataaattgtcacaagcctgttgagattcaagtttcagaagtgctgaataagatgaactct

SEQ ID NO: 711760 - DNA, 120 bp, Artificial Sequence
  ENSG00000196975_43 (sequence is synthesized)
tttgaattaggtgaattagatgaacgctttcagctttaaatttttatgattatgtgaattgactctaaagcagtgagggaatcagagaaagaagtgaaaaaatgggggagtatatggagg

SEQ ID NO: 711761 - DNA, 120 bp, Artificial Sequence
  ENSG00000196975_44 (sequence is synthesized)
taagcccaatgagccacaatatgtgtgagttaagatctttttgagaaatgtaacaggcaagctgcttattaaaaatgaacagtaattctgattgagcaataatgtagttaaattgagcag

SEQ ID NO: 711762 - DNA, 120 bp, Artificial Sequence
  ENSG00000196975_45 (sequence is synthesized)
aatgagtttcctatattcctacctggttggaatgtaagcaattggcaatgggtccctggttctactgtgagacctgtagcctcaggaaaatcacagatcattctagagcagggctatcca

SEQ ID NO: 711763 - DNA, 120 bp, Artificial Sequence
  ENSG00000196975_46 (sequence is synthesized)
atagaactccccgcagtgatgagaacattccacatctgcactgtcctgtatgggtgactaccggctacctgtagccgctgggtacttgaaatgaggccaatgtgattgaagagctgaatt

SEQ ID NO: 711764 - DNA, 120 bp, Artificial Sequence
  ENSG00000196975_47 (sequence is synthesized)
ttaaattgtatttaatttcaattaacatttaaacagccacatgtggttagtggcaactgtaggggacagcccaaatctagggcatttcttttagctcttaagatagaaccatgtagtctc

SEQ ID NO: 711765 - DNA, 120 bp, Artificial Sequence
  ENSG00000196975_48 (sequence is synthesized)
cagctagggaactgctagtgtttgccctgactcccaggggggtatgacagggtcccaacagccttatgcctgaggaaggatcctgagtcatttccactcaccactaccatttccaacccc

SEQ ID NO: 711766 - DNA, 120 bp, Artificial Sequence
  ENSG00000196975_49 (sequence is synthesized)
atcaccaacaaaataaaactaagccagctcagctctttgagcttctggaaatatttgcctgtgtcctggcacatcgtttttggaattttagacctgtgctttgtttggcttcaggacctg

SEQ ID NO: 711767 - DNA, 120 bp, Artificial Sequence
  ENSG00000196975_50 (sequence is synthesized)
tatgaggctggagagaagaaatgggggacagatgaggtgaaatttctaactgttctctgttcccggaaccgaaatcacctgttgcatggtaaggcacttacttcatttcccaaagaaaag

SEQ ID NO: 711768 - DNA, 120 bp, Artificial Sequence
  ENSG00000196975_51 (sequence is synthesized)
gagtgaaagatagcaaaaactatattgcccataagtagttgataaccttcctccttcagttggtacaaagaactgattgtacccaagtgtcttagattctcaccctggaaatgtattagt

SEQ ID NO: 711769 - DNA, 120 bp, Artificial Sequence
  ENSG00000196975_52 (sequence is synthesized)
ccaatgatgtatatgaaagctaatttctgaaagattaattatgaataattagaaaaagtgcatgtagtcatagaagtttggcattcttgtttctaggaaactgaccttcacagtcagtcc

SEQ ID NO: 711770 - DNA, 120 bp, Artificial Sequence
  ENSG00000196975_53 (sequence is synthesized)
tttttctaaagtagccccagtattttcattctaatgtagttacatatgaaagtaatctgtagtagatcaggtagcaataaaatagcaatgttggttgatatttattcctgtgtaatatcc

SEQ ID NO: 711771 - DNA, 120 bp, Artificial Sequence
  ENSG00000196975_54 (sequence is synthesized)
aagctgtaaagctaatacaagtgatttctttaggggttatgttgtataagatgaatagtggataatttcaaatttgatatgtttctaatttgtttctgataaatataaactttgtaatgt

SEQ ID NO: 711772 - DNA, 120 bp, Artificial Sequence
  ENSG00000196975_55 (sequence is synthesized)
gattttaacttatttgggggaaagatactagacaattttagaatatttgctgtcaggttcatattcttttaaacaagcaagtaaggatataataagatatttcatcttttatacgagttc

SEQ ID NO: 711773 - DNA, 120 bp, Artificial Sequence
  ENSG00000196975_56 (sequence is synthesized)
tttagatctttaagtacattataattttataaacccacccaccatacccttttaatcacacacactgatttgcaaagcttgtgggaaatttgagaatgagtttgctaaattgaaaacata

SEQ ID NO: 711774 - DNA, 120 bp, Artificial Sequence
  ENSG00000196975_57 (sequence is synthesized)
gggctaccatcaggtacacaaacttctgactcagcttctttcttcacttccttcccttgcctggttacaaataacaggaatctccccctggtggtgttttccaagaactgcaggtcctca

SEQ ID NO: 711775 - DNA, 120 bp, Artificial Sequence
  ENSG00000196975_58 (sequence is synthesized)
gaagccgatttagtgcataaatgcatttgcaagaattttcacttctgggtacaagtcaatagttaggcagttatgaaatatctgtttgtaagccactgggagaaaatattttaagcactg

SEQ ID NO: 711776 - DNA, 120 bp, Artificial Sequence
  ENSG00000196975_59 (sequence is synthesized)
tttggactaggaaaacttcataattgtcttaccaaccaacaataatggtgagatttcataataactaccgttttgttaataatgttctattttctaggtgcagtgttaagcattttataa

SEQ ID NO: 711777 - DNA, 120 bp, Artificial Sequence
  ENSG00000196975_60 (sequence is synthesized)
gcattgtttcttgcaacactcaatggagcagtaattattttccccattttacagtggagaaaactgaggcttagaaaatgtgtcaattaagttctttgattccaagccacacacactgac

SEQ ID NO: 711778 - DNA, 120 bp, Artificial Sequence
  ENSG00000196975_61 (sequence is synthesized)
ttcaatttaagtaagaaaagatgaaataatatagaatggcacaggagggaaaatggaaaatactggtagctcacagatttgaacagacagctgaacaccttcaggaagaacagaaatcaa

SEQ ID NO: 711779 - DNA, 120 bp, Artificial Sequence
  ENSG00000196975_62 (sequence is synthesized)
ggcagttctgggggtctcagtagaagggaataatggattttatttctaaagcagagtttctgaagttcgttttctattaaaaatgctaaatattgaccccctacttcagactggctgaat

SEQ ID NO: 711780 - DNA, 120 bp, Artificial Sequence
  ENSG00000196975_63 (sequence is synthesized)
tagaatctctgagtgtgacacccaggaagtttaataggtttctctgagggtaaagatgatgcagtgcttttggccatccccgtgagctgctcaattaaaaagttcccaggagagagtcta

SEQ ID NO: 711781 - DNA, 120 bp, Artificial Sequence
  ENSG00000196975_64 (sequence is synthesized)
acgggtcctgactgggtcaactgctcacgtgtttgacagaggttgtggtgtatgttgttgggtatggtgtcccttgattgacagccctgttaaaatcacattgatggaagtgaggcagca

SEQ ID NO: 711782 - DNA, 120 bp, Artificial Sequence
  ENSG00000196975_65 (sequence is synthesized)
ccccaaagaaggcgatggtgagaagataaaatagatacctgctctaagaagtttccagaaggagacagcaagagaggggaacatattcaccacattcaaaaatacttggcaaaaaacaac

SEQ ID NO: 711783 - DNA, 120 bp, Artificial Sequence
  ENSG00000196975_66 (sequence is synthesized)
aacaaatgtaattatgtttaagtattttaaaagatgcaaccagctgttattaactgtgactcagttctgaagcagttgaattgttctagttttgatgagccaaaagggagatgacaggga

SEQ ID NO: 711784 - DNA, 120 bp, Artificial Sequence
  ENSG00000196975_67 (sequence is synthesized)
ggtgattgccaaggacaaaaacacaaaaagacacattctgcttattaaggaaacaatgagaaaggaaagcaaagctccccagaggccatctccattttatgtgtgagggtcccagataag

SEQ ID NO: 711785 - DNA, 120 bp, Artificial Sequence
  ENSG00000196975_68 (sequence is synthesized)
ggaaaggacttgactgatgtcctccaaacatcacagcatttcttcctccttatctggggcccattccactctgcacatccctcctggctgcttgcccacattactaattagtttcctcct

SEQ ID NO: 711786 - DNA, 120 bp, Artificial Sequence
  ENSG00000196975_69 (sequence is synthesized)
gataagacccgctgtctggccctgagtagggtgtgacctccgcagccgcagaggaggagcgcagcccggcctcgtaatttcccctctgcttttatcacagaagaacttctgcttgggtgg

SEQ ID NO: 711787 - DNA, 120 bp, Artificial Sequence
  ENSG00000196975_70 (sequence is synthesized)
ctctgtcagctgtgagtgactgcttctgatggggggcgggttttatcgaaatgtccactctatcccctttgccagcctttctcatcctttcagcccctgacatgtggatattccccaggt

SEQ ID NO: 711788 - DNA, 120 bp, Artificial Sequence
  ENSG00000196975_71 (sequence is synthesized)
agtgttctcagacccctctgttcctttatcttatttctccttcagagactctggctaatcctgcctgcccattttttctactttaatttgatatttacaagtacctaacacctgccaggt

SEQ ID NO: 711789 - DNA, 120 bp, Artificial Sequence
  ENSG00000196975_72 (sequence is synthesized)
gcgcggccgtcccggcccggggccccaggtgcgcttcccctagagagggattttccggtctcgtgggcagaggaacaaccaggaacttgggctcagtctccaccccacagtggggcggat

SEQ ID NO: 711790 - DNA, 120 bp, Artificial Sequence
  ENSG00000196975_73 (sequence is synthesized)
tgttccagcgagtgctggtgtctctgtcagctatgacgtgatgatgacaacgatgatgggagtgatgtgactggagctgcactttcagaagagtaatgtaatagtgacgtgtaggatgaa

SEQ ID NO: 711791 - DNA, 120 bp, Artificial Sequence
  ENSG00000196975_74 (sequence is synthesized)
ataagtaaaaccgatgcccttccgcccctaacctcaaaagctgcttttgcgtctcgatgttattgagagccggctctgcggtcagctctgagctaggcgctgtgagaacgctcagtaaga

SEQ ID NO: 711792 - DNA, 120 bp, Artificial Sequence
  ENSG00000196975_75 (sequence is synthesized)
cagtgtctcgtctggaaatgtacaggcgagattcaaaccgagaaactgccaaaggttgtgtgcagggcagatcctaggataccggagacccagcccgttggcttgacctcaaaactcggg

SEQ ID NO: 711793 - DNA, 120 bp, Artificial Sequence
  ENSG00000196975_76 (sequence is synthesized)
ggcttttcggcccatgctgtcccttaattcctcctcctttgctgacgctgtgggtgcgcatcaaagcctaaacttcactagctcccttgcacacaagaacactaaccctaacctgaccag

SEQ ID NO: 711794 - DNA, 120 bp, Artificial Sequence
  ENSG00000196975_77 (sequence is synthesized)
tgagggcggggatggactgtgtgatttgcatctgccaaatgcagaaaatttggaagttcacagcctcttagttggatgcccctgtgtcacagaacacattttggctatggggtgtgatct

SEQ ID NO: 711795 - DNA, 120 bp, Artificial Sequence
  ENSG00000196975_78 (sequence is synthesized)
gtgtctgaggaacaacaagaagctacacgtcatccacacaggagccaaatctggaactctggtctcagttcttcaggactatttgagcgaataatcactcaacactggagtaaaggatgt

SEQ ID NO: 711796 - DNA, 120 bp, Artificial Sequence
  ENSG00000196975_79 (sequence is synthesized)
gaggcagttcctgggccttaagagtatatattgtcataagggaatacatcaggtacacagttgctagaaggcatgaaaagattacatgccaaaggagaggcgcataggaaaaagaagatt

SEQ ID NO: 711797 - DNA, 120 bp, Artificial Sequence
  ENSG00000196975_80 (sequence is synthesized)
caaggagaaaatttggttgtagaaacaaagaaaagccttcatgacagagatgctggttcagagaggacttggaggattactagaatttcaagaggcagagacgtgggtgggtgtattgca

SEQ ID NO: 711798 - DNA, 120 bp, Artificial Sequence
  ENSG00000196975_81 (sequence is synthesized)
gacaggaagaacagcaagaataaggcagggaacatggggttcagggaacaactgggtgaacagttgggctggtgattctggaaacagggtgggaggataaactggaattctatgttggga

SEQ ID NO: 711799 - DNA, 120 bp, Artificial Sequence
  ENSG00000196975_82 (sequence is synthesized)
gcagtttacacttatttatttgggagcagtagatgacgtgatgatgacaacgatgatgggagtgatgtgactggagctgcactttcagaagagtaatgtaatagtgacgtgtaggatgaa

SEQ ID NO: 711800 - DNA, 120 bp, Artificial Sequence
  ENSG00000196975_83 (sequence is synthesized)
tcaaagggggaacctcttctgatctgctgtaacattcagttcagaatctgtgtccagcttgagtacaagtattggtacttaacctaacaaaacaataggaatcctttctgtagtgtgtat

SEQ ID NO: 711801 - DNA, 120 bp, Artificial Sequence
  ENSG00000196976_0 (sequence is synthesized)
ggcgaccacggtgtcttcaaaagccccgtcagggttggcttcctggggccggaccgactgtgggtcagtttgcaccagcgctctggaatcgagttacgcgcgaaagggcagagtttctgg

SEQ ID NO: 711802 - DNA, 120 bp, Artificial Sequence
  ENSG00000196976_1 (sequence is synthesized)
aggaaaccgcagcctctcaaccgctgaccgggtctcagaaggcccccggcagggccgcttggcgggaactgaccacgcgccagtcaggctctccagggacctgcgcaggcgcgtgtgggc

SEQ ID NO: 711803 - DNA, 120 bp, Artificial Sequence
  ENSG00000196976_2 (sequence is synthesized)
ggagtcgtgcgcagggggcggggcttcgggaaggagccacagagagggcggggcgtaggacctgcgcttcgggggtggagtcggagcggcgcggcggcggtcatgcgggacgcggatgca

SEQ ID NO: 711804 - DNA, 120 bp, Artificial Sequence
  ENSG00000196976_3 (sequence is synthesized)
caggtccgggcagagacgccgcgtctgcggccagggggtcacgaatgcggccgcacatattcaccctcagcgtgcctttcccgacccccttggaggcggaaatcgcccatgggtccctgg

SEQ ID NO: 711805 - DNA, 120 bp, Artificial Sequence
  ENSG00000196976_4 (sequence is synthesized)
caccagatgccgagccccaccaaagggtggttgggaaggatctcacagtgagtggcaggatcctggtcgtccgctggaaagctgaagactgtcgcctgctccgaatttccgtcatcaact

SEQ ID NO: 711806 - DNA, 120 bp, Artificial Sequence
  ENSG00000196976_5 (sequence is synthesized)
ttcttgaccagctttccctggtggtgcggaccatgcagcgctttgggccccccgtttcccgctaagcctggcctgggcaaatggagcgaggtcccactttgcgtctccttgtaggcagtg

SEQ ID NO: 711807 - DNA, 120 bp, Artificial Sequence
  ENSG00000196976_6 (sequence is synthesized)
cgtccatccttccctagggcaggaattcccacagttgctactttcctgggagggcctcatgttttatctggttcttaaatgtttgttactacagaaaataaaactgcgctactattccaa

SEQ ID NO: 711808 - DNA, 120 bp, Artificial Sequence
  ENSG00000196981_0 (sequence is synthesized)
agtgcacacctgctggtacgagcaaaagtagccgacaggccagagtttccagtttcggtggcttcgtaggcttttagcttctgaaatccgctaaaagcggcggttcattcatcttcaagt

SEQ ID NO: 711809 - DNA, 120 bp, Artificial Sequence
  ENSG00000196981_1 (sequence is synthesized)
acctagcctgactggtagggctgctcagcattccgaaacatttcgacctggggaggggggcggcggtgaaagaatactttctgtagagagtgcccctcgcgtcgcccctgctttgaaggc

SEQ ID NO: 711810 - DNA, 120 bp, Artificial Sequence
  ENSG00000196981_2 (sequence is synthesized)
tttatgtattaacggaatgccgaacatttgtgtcctacttgctgacagcgcacaggatccttctaacagtatttctcaagtacttaacaaaaagatgaaaacttgaagtccaagccgtgc

SEQ ID NO: 711811 - DNA, 120 bp, Artificial Sequence
  ENSG00000196981_3 (sequence is synthesized)
tgctgattccgtctcacagtttaaagactgtccagaaactttaagctttcaaaactgtacattttaaaatcctgtgcgtttatcttcattttgctgggcagaaagccaaagtactggact

SEQ ID NO: 711812 - DNA, 120 bp, Artificial Sequence
  ENSG00000196981_4 (sequence is synthesized)
gcctggttcagggctgaacgcctagtacacctgctaacttggagcttcagagccatggcaaccaaggagtcaagagacgccaaagcacagttggccctctcctcatcggccaatcagagc

SEQ ID NO: 711813 - DNA, 120 bp, Artificial Sequence
  ENSG00000196981_5 (sequence is synthesized)
aaggaagtgcctgaaaacccaaactatgctctcaaatgtactcttgtgggacacacggaagcagtgtcatcagttaagtttagtcctaatggagaatggctagcaagttcttctgctgat

SEQ ID NO: 711814 - DNA, 120 bp, Artificial Sequence
  ENSG00000196981_6 (sequence is synthesized)
aggctaatcataatttggggagcatatgatggaaaatatgagaaaacactctatggtcataatttggaaatatcggatgttgcctggtcatcagattccagtcgtcttgtttctgcctca

SEQ ID NO: 711815 - DNA, 120 bp, Artificial Sequence
  ENSG00000196981_7 (sequence is synthesized)
gatgataaaactctaaaattatgggatgtgagatctggaaaatgtttgaaaacactgaaggggcacagtaattatgtcttttgttgtaacttcaatccgccatccaaccttataatctcg

SEQ ID NO: 711816 - DNA, 120 bp, Artificial Sequence
  ENSG00000196981_8 (sequence is synthesized)
ggatcttttgatgagactgtaaaaatatgggaggtgaaaacaggaaagtgtctcaagactttgtctgctcattctgacccagtttctgctgttcattttaattgtagtgggtccttgata

SEQ ID NO: 711817 - DNA, 120 bp, Artificial Sequence
  ENSG00000196981_9 (sequence is synthesized)
gtgtcaggtagctatgatggcctctgtagaatctgggatgctgcatcaggtcagtgtttaaaaacgctcgttgatgacgataaccctcctgtctcttttgtaaaattttctccaaatggt

SEQ ID NO: 711818 - DNA, 120 bp, Artificial Sequence
  ENSG00000196981_10 (sequence is synthesized)
aaatacattctcactgcaactttggacaacactcttaaactatgggattatagcagaggcaggtgcctgaaaacatacactggtcataagaatgagaaatattgcatatttgccaatttt

SEQ ID NO: 711819 - DNA, 120 bp, Artificial Sequence
  ENSG00000196981_11 (sequence is synthesized)
tcagttactggtggaaagtggattgtgtctggttccgaggataacctggtttacatttggaaccttcagactaaagagattgtgcagaaattacaaggccatacagatgttgtgatctca

SEQ ID NO: 711820 - DNA, 120 bp, Artificial Sequence
  ENSG00000196981_12 (sequence is synthesized)
gcagcttgtcatcctacagaaaacctcatcgcatcagcagcattagaaaatgacaaaacaattaaactgtggatgagtaaccactaatccctttgaaaatcaagtagtagagccaagttg

SEQ ID NO: 711821 - DNA, 120 bp, Artificial Sequence
  ENSG00000196981_13 (sequence is synthesized)
gccaaaaaacttggatatttaaaaagacggtttcttttaattttggcagtttggtattttaaaaattgtctattgttaaattttgagattcatacactacatttacaaaatgagatagtt

SEQ ID NO: 711822 - DNA, 120 bp, Artificial Sequence
  ENSG00000196981_14 (sequence is synthesized)
gaaaaagcacatctagaattcagcttctgactaccaatcttttttgagcaactttttgtaatttttatggatttatgtcacttttattacagggatatattgcatagtggtgaaatctgg

SEQ ID NO: 711823 - DNA, 120 bp, Artificial Sequence
  ENSG00000196981_15 (sequence is synthesized)
gcttagtataccctcacccaaatagtatacattgtacctagtaaatactttcccatctctcaccccactcccacctttgaaggctctagtgtctatgattctgctctccacgtccaggtg

SEQ ID NO: 711824 - DNA, 120 bp, Artificial Sequence
  ENSG00000196981_16 (sequence is synthesized)
tacacattgtttatctcccacttacgagaacatgtggtttttgactttctgtatcattacttcacttaatggcctccaggtccatccatgttgttgcaaaagataagatttcattatttt

SEQ ID NO: 711825 - DNA, 120 bp, Artificial Sequence
  ENSG00000196981_17 (sequence is synthesized)
ttctgtggtgtgtatgtgtgtgtgtgtatgcatatatgtgtatgtgtatgtatataagtatatacaccacattatccagtcatctggatatgtatataagtatatacaccacattttctt

SEQ ID NO: 711826 - DNA, 120 bp, Artificial Sequence
  ENSG00000196981_18 (sequence is synthesized)
tatccagtcatctcttgatggacccttaggttggttccataactttgctattacgaatagtgctgcgataaacagcactattatgaatagtgctgcgataaacagtgcaggtgattttaa

SEQ ID NO: 711827 - DNA, 120 bp, Artificial Sequence
  ENSG00000196981_19 (sequence is synthesized)
aatataatttcctttgggtagatacctactagtgggattgctggatcgaatggtagtttttagttggaaaatctccatactgttttccagaggttgtaaaatgtacattcctccccacag

SEQ ID NO: 711828 - DNA, 120 bp, Artificial Sequence
  ENSG00000196981_20 (sequence is synthesized)
agaggttgtaaaatgtacattcctccccacagtgtataagctgtgcctttactctgcatctttgccatgattctttttgagacagagtctctggtgcccaggctggagtgcagtggcaca

SEQ ID NO: 711829 - DNA, 86 bp, Artificial Sequence
  ENSG00000196981_21 (sequence is synthesized)
atgtctcaacatcccaggtagctaggattacaggcgtgccaccatgcctggctaatgtttctatttttagtagagacagggtttca

SEQ ID NO: 711830 - DNA, 120 bp, Artificial Sequence
  ENSG00000196981_22 (sequence is synthesized)
tgattagtgatgttgagcatttttttgtgtgtgtttgttggccacttgtatgtcttctttgaaaactgacttctaatcttgaggcctattaataatttcatttgtctgtcactggacaat

SEQ ID NO: 711831 - DNA, 120 bp, Artificial Sequence
  ENSG00000196981_23 (sequence is synthesized)
gaggcctattaataatttcatttgtctgtcactggacaatttctcattcctctcagtgactatcctagaggatcagtgtatttgagaaatatttagaagtaaagttgacaggacaggatg

SEQ ID NO: 711832 - DNA, 120 bp, Artificial Sequence
  ENSG00000196981_24 (sequence is synthesized)
attgattaaaagaggggagcaagggaatttgaaataattccagggtttctggtttgggagatcagatgaacaagtgcataagcctgggatgctggtggaggactggagagacatggcaga

SEQ ID NO: 711833 - DNA, 120 bp, Artificial Sequence
  ENSG00000196981_25 (sequence is synthesized)
tgctacctgcacacttttggtaatattctgtgtgatgggatatgaaatggtccatagaaaaaaaccggaaaaatacgccaaggttaggttcattctaagagtctaaaaatttcaaaaacc

SEQ ID NO: 711834 - DNA, 120 bp, Artificial Sequence
  ENSG00000196981_26 (sequence is synthesized)
aaaacaacattataaatggtgtttctcaaggacctttcactacctttttagattgtgcttgtgattttcaggcaagctaaatgtctgatgaagactgctcttcttttgttctgtgtctga

SEQ ID NO: 711835 - DNA, 120 bp, Artificial Sequence
  ENSG00000196981_27 (sequence is synthesized)
cctactaattcctgcccatgcttcaaactcagttcagaaatcactgaaggaaccatccactgccggcctgcctgcaaccacagctgacagctgagttagttaggttttcctgtccctatt

SEQ ID NO: 711836 - DNA, 120 bp, Artificial Sequence
  ENSG00000196981_28 (sequence is synthesized)
atttaccagtttgtactgaaatgctttcatgggctgtgcttccagattatgagttctgtggaatcaggaagtatgtctctgtattcttgtattctttggcttttttgtgtagtaaaggga

SEQ ID NO: 711837 - DNA, 120 bp, Artificial Sequence
  ENSG00000196981_29 (sequence is synthesized)
ctcaagtaatgtttgacagtgaaggatacaacttcattccttgcctgctttgataaattttagtaataaattcccaaaactatcatgttgattaaaaataaaaagtaaccgtaacctcac

SEQ ID NO: 711838 - DNA, 120 bp, Artificial Sequence
  ENSG00000196981_30 (sequence is synthesized)
acattaactttattcaaacaaacagcacttacaggaaatgtaaagtagaaaaagatttctgcccactttacctacggagacatgataaacacgcaaaaaaaacctagaaattaagcaaaa

SEQ ID NO: 711839 - DNA, 120 bp, Artificial Sequence
  ENSG00000196981_31 (sequence is synthesized)
aatagcacaataatttaactgaaagcaacaagggcaaaactgtctccttttgtagtttgtggtaccttatagtagtgctcattcagtttcgtttgcttgataaatctgaggactatgaga

SEQ ID NO: 711840 - DNA, 120 bp, Artificial Sequence
  ENSG00000196981_32 (sequence is synthesized)
tatcagagttactagtagggtaggagtgctgtaagggtactgggagaagtaggattagttaggggcagatcttgaattctggccaagaaactgatatttaacccataaagagatagtcac

SEQ ID NO: 711841 - DNA, 120 bp, Artificial Sequence
  ENSG00000196981_33 (sequence is synthesized)
tatatgttatcaaataggagaataacacaaatgagaaatgactgttaattcctgatgcataataacagttgtgagctttagtttaatgtaatatttgtaataaaaacgtttggccaggca

SEQ ID NO: 711842 - DNA, 120 bp, Artificial Sequence
  ENSG00000196990_0 (sequence is synthesized)
gctgttgatggagaagggggcggatgacagccgggaccgtggtcatcaccgggggcatcttggcgactgtgattttgctctgcatcatcgctgttctgtgctactgccggctccagtact

SEQ ID NO: 711843 - DNA, 120 bp, Artificial Sequence
  ENSG00000196990_1 (sequence is synthesized)
actgctgcaagaaggacgagtcggaggaggacgaggaggaaccagacttcgccgttcactcgcacctgcccccgctgcactccaaccgcaacctggtgctgaccaacgggccggcgctct

SEQ ID NO: 711844 - DNA, 120 bp, Artificial Sequence
  ENSG00000196990_2 (sequence is synthesized)
accccaccgcctccacctccttcagccagaagtccccgcaggcccgcgccctctgccgcagctgctcccactgcgagccccccaccttcttcctgcaggagccgccggaggaggaagagg

SEQ ID NO: 711845 - DNA, 120 bp, Artificial Sequence
  ENSG00000196990_3 (sequence is synthesized)
acgtgctgaacggcggggagcgcgtgctctacaagagcgtgagccaggaggacgtggagctgcccccggggggcttcgggggcctgcaggcgctcaaccccaaccgcctctcagccatgc

SEQ ID NO: 711846 - DNA, 120 bp, Artificial Sequence
  ENSG00000196990_4 (sequence is synthesized)
ccgcccccgggatcctggccttgaaggtcctgagacaatggggggattcctttggcacacccacctggccccaggccccaagtggggcttggctgagccctcctggaatccctgtcctca

SEQ ID NO: 711847 - DNA, 120 bp, Artificial Sequence
  ENSG00000196990_5 (sequence is synthesized)
ggggaggcccaggcttggggagcccccaggctcgtggcagggataaggctcattgaacacaaatgtgtcctggggggaggcacagctggggcctggggctagaaggaccaggtgaccata

SEQ ID NO: 711848 - DNA, 120 bp, Artificial Sequence
  ENSG00000196990_6 (sequence is synthesized)
cagccggctgggcatgcaccagggctctcaggcacagaggccaccgttactcctgatgattctgtctcagacccaacaacctggccttcccaggaggtctccatgtgtcaccccctccct

SEQ ID NO: 711849 - DNA, 120 bp, Artificial Sequence
  ENSG00000196990_7 (sequence is synthesized)
gggtctcacccttctcacctgctcaaggaagggatgacctcagtgaggcccagggccctgcagcaaggccctccctggcaattgcagaccaaggattctgctcctccaccttgaactcca

SEQ ID NO: 711850 - DNA, 120 bp, Artificial Sequence
  ENSG00000196990_8 (sequence is synthesized)
gcctctttctctccatttttccctctctctcccctacccgtctctccctctctctcacacacacactcttccgggttcaagggccaagtgtctgcctaggctgagacacgtgctgagctc

SEQ ID NO: 711851 - DNA, 120 bp, Artificial Sequence
  ENSG00000196990_9 (sequence is synthesized)
cccttctgccagcccacccccagccgggctctggataacatctcggagaccaaccgcggcagcacagggcagccgagcacttcctcgtctgtttattactgaacgcaggcatctgggagc

SEQ ID NO: 711852 - DNA, 62 bp, Artificial Sequence
  ENSG00000196993_0 (sequence is synthesized)
ttccactcattcaacactttttttttaaattatctaataggttggcactcatgttcctgtcg

SEQ ID NO: 711853 - DNA, 78 bp, Artificial Sequence
  ENSG00000196993_1 (sequence is synthesized)
aagctctctattgtcctgaccccacagttcctgtcgcatgaccagagccagttcaccaaggagctgcagcagcaacct

SEQ ID NO: 711854 - DNA, 66 bp, Artificial Sequence
  ENSG00000196993_2 (sequence is synthesized)
gtctggctgtctatcgtcatcgtgagactgactttggtgtaggagttcgagaccaccctggccaac

SEQ ID NO: 711855 - DNA, 78 bp, Artificial Sequence
  ENSG00000196993_3 (sequence is synthesized)
ttgataattatcattattgggtttctgagacgttacacatttaacattctcttctgcacaagttgcctttgtgtgtct

SEQ ID NO: 711856 - DNA, 77 bp, Artificial Sequence
  ENSG00000196993_4 (sequence is synthesized)
gtctgctcactccccttccaccctcagtggatgataatatcaaggagtgtcctcttgctccaaggaatgtctctttg

SEQ ID NO: 711857 - DNA, 77 bp, Artificial Sequence
  ENSG00000196993_5 (sequence is synthesized)
atgtctctttgtcccaagactcctcccttagctactcaggaggccgaggtggaaaaaccacccaaacccaagaggtg

SEQ ID NO: 711858 - DNA, 120 bp, Artificial Sequence
  ENSG00000196993_6 (sequence is synthesized)
aggaggccgaggtggaaaaaccacccaaacccaagaggtggagggtggatgaggtggaacaatcgcccaagcccaagaggcagagggaggccgaggcacaacaattacccaaacccaaga

SEQ ID NO: 711859 - DNA, 120 bp, Artificial Sequence
  ENSG00000196993_7 (sequence is synthesized)
acaattacccaaacccaagaggcggaggttgagtaagctgagaacacgccattgcactcaagcctgggcaataagaataaatccgtaggtcgaaaaaaagaaaaaaatcaaaaaacaaaa

SEQ ID NO: 711860 - DNA, 84 bp, Artificial Sequence
  ENSG00000196998_0 (sequence is synthesized)
ggctcccacaccactgcctcgtgtggggttgttcgcccgtgaaggggcaggacagggtgcgcgctggtggaggttgaaattgtt

SEQ ID NO: 711861 - DNA, 120 bp, Artificial Sequence
  ENSG00000196998_1 (sequence is synthesized)
aaaaaaaaaaaaagaaagaaaagaaattgttacattttatatatataggaacaatcctgcaccatgactcaacagccacttcgaggagtgaccagcctgcgtttcaaccaagaccaaagc

SEQ ID NO: 711862 - DNA, 120 bp, Artificial Sequence
  ENSG00000196998_2 (sequence is synthesized)
caaccaagaccaaagctgcttttgctgcgccatggagacaggtgtgcgcatctacaacgtggagcccttgatggagaaggggcatctggaccacgagcaggtgggcagcatgggcttggt

SEQ ID NO: 711863 - DNA, 120 bp, Artificial Sequence
  ENSG00000196998_3 (sequence is synthesized)
ggagatgctgcaccgctccaaccttctggccttggtgggcggtggtagtagtcccaagttctcagagatctcagcagtgctgatctgggacgatgcccgggagggcaaggactccaagga

SEQ ID NO: 711864 - DNA, 120 bp, Artificial Sequence
  ENSG00000196998_4 (sequence is synthesized)
gaagctggtgctggagttcaccttcaccaagccagtgctttctgtgcgcatgcgccatgacaagatcgtgatcgtgctgaagaaccgcatctatgtgtactccttccccgacaatccccg

SEQ ID NO: 711865 - DNA, 120 bp, Artificial Sequence
  ENSG00000196998_5 (sequence is synthesized)
ttgagtttgatacccgggacaaccccaaggggctctgtgacctctgccccagcctggagaagcaactgctagtgttcccgggacacaagtgtgggagtctgcaacttgtggacctggcga

SEQ ID NO: 711866 - DNA, 120 bp, Artificial Sequence
  ENSG00000196998_6 (sequence is synthesized)
gcacaaagcctggcacctcgtctgctccattcacgatcaatgcacatcagagtgacatagcctgtgtgtctctaaaccagccaggcactgtagtggcctcagcctcccagaagggtaccc

SEQ ID NO: 711867 - DNA, 120 bp, Artificial Sequence
  ENSG00000196998_7 (sequence is synthesized)
ttattcgcctctttgacacacaatccaaggagaaactggtggagctgcgccgaggcactgaccctgccaccctctactgcattaacttcagccacgactcctccttcctctgcgcttcca

SEQ ID NO: 711868 - DNA, 120 bp, Artificial Sequence
  ENSG00000196998_8 (sequence is synthesized)
gtgataagggtactgtccatatctttgctctcaaggatacccgcctcaaccgccgctccgcgctggctcgcgtgggcaaggtggggcctatgattgggcagtacgtggactctcagtgga

SEQ ID NO: 711869 - DNA, 120 bp, Artificial Sequence
  ENSG00000196998_9 (sequence is synthesized)
gcctggcgagcttcactgtgcctgctgagtcagcttgcatctgcgccttcggtcgcaatacttccaagaacgtcaactctgtcattgccatctgcgtagatgggaccttccacaaatatg

SEQ ID NO: 711870 - DNA, 120 bp, Artificial Sequence
  ENSG00000196998_10 (sequence is synthesized)
tcttcactcctgatggaaactgcaacagagaggctttcgacgtgtaccttgacatctgtgatgatgatgacttttaaggaccctgggggctgtgctagggacctgcagtggcagaactgc

SEQ ID NO: 711871 - DNA, 120 bp, Artificial Sequence
  ENSG00000196998_11 (sequence is synthesized)
agagctgagccttggcagtggggcgtgcttggaagccaccagccagcaagcattaatggggctggtgcccactttccactcagcagagctatgtctaaataaagagctcacttcccccca

SEQ ID NO: 711872 - DNA, 120 bp, Artificial Sequence
  ENSG00000196998_12 (sequence is synthesized)
ttcctgcgacaggctccctcccccggaagtagggcctgatgtaaacacccgagccgggctccaaggcccgggaggtcagaaaaccgggccgcgggcggcaccgacagctggggcccgggt

SEQ ID NO: 711873 - DNA, 120 bp, Artificial Sequence
  ENSG00000196998_13 (sequence is synthesized)
ggaggaaattgccagggacccagagggagtgccctaatccaacctggggattttttaaaagcttcctaggaagagatgatctccgatgtgatgaatacgaataaaaggcccttaatggca

SEQ ID NO: 711874 - DNA, 120 bp, Artificial Sequence
  ENSG00000196998_14 (sequence is synthesized)
cccttcgcctccggtcccccagccaaccttcctccgctccccgcgccctccccggagaaccccactgtcactcgcgatgctccgaagacccgggaactaggcgaggaaggcggtggccgc

SEQ ID NO: 711875 - DNA, 120 bp, Artificial Sequence
  ENSG00000196998_15 (sequence is synthesized)
cgctggtggaggttagtgaggtcacacaccgggccgtggcgcctggtgcgctgggcgcttccacctcaaccttcgtagcaaacccagcggggttctgtgcctgcgcaccgtggttcctgc

SEQ ID NO: 711876 - DNA, 120 bp, Artificial Sequence
  ENSG00000196998_16 (sequence is synthesized)
gttcatttactgtcccgtttctcactccggaaagtgtggctttgagtttgatctgcaggagtaggacgggcacagcgggtgtctggtcttcctcgcaccataaatcgcagagcgagccct

SEQ ID NO: 711877 - DNA, 120 bp, Artificial Sequence
  ENSG00000196998_17 (sequence is synthesized)
ctgtggtctctggatacagtataccaaagttagattaactgtactccttctcacaagccggtccaacgtttgcagcagtgaaaaagccctaagtgtcagggcctttggcgaagcctgtgt

SEQ ID NO: 711878 - DNA, 120 bp, Artificial Sequence
  ENSG00000196998_18 (sequence is synthesized)
cggtggtagtagtcccaagttctcagagatctcaggtaagtgccctcatcctgccctttggcccagatttctcggattcctggcctcccacaggcaccccaaggtactggcagatgaaga

SEQ ID NO: 711879 - DNA, 120 bp, Artificial Sequence
  ENSG00000196998_19 (sequence is synthesized)
aaccggggcggctactctcggccgccgcggaggtccgcgtcttgttagcagggaaggtttactcccccattgtgggtgaccaaggggctgagggcttggccggtttcgctttgctggggg

SEQ ID NO: 711880 - DNA, 120 bp, Artificial Sequence
  ENSG00000196998_20 (sequence is synthesized)
acactttccccagttttccaggcgcaaactgatggttttggagcattaaggtctggtcggatggggcaggatggctgcgttgacacgtcttatttaatccacatcatagacagtctcggc

SEQ ID NO: 711881 - DNA, 120 bp, Artificial Sequence
  ENSG00000196998_21 (sequence is synthesized)
tgcttttgctgcgccatggagacagaccacgagcaggtgggcagcatgggcttggtggagatgctgcaccgctccaaccttctggccttggtgggcggtggtagtagtcccaagttctca

SEQ ID NO: 711882 - DNA, 120 bp, Artificial Sequence
  ENSG00000196998_22 (sequence is synthesized)
ctttgttttcattttaaaaattctgattgagtgcctcctgtgtgccatgccctagagcacttactgtgagcctggaactgccctaagcactttacgtttattaactcatttaatcctcac

SEQ ID NO: 711883 - DNA, 120 bp, Artificial Sequence
  ENSG00000196998_23 (sequence is synthesized)
aaaatcttggagccgtcttcccaatacccccttggcttgagcctcaagtgccatcttactttaagggtttttcttgatgatcccatctggacaaggcaggagttgccctaggtgagtcac

SEQ ID NO: 711884 - DNA, 120 bp, Artificial Sequence
  ENSG00000196998_24 (sequence is synthesized)
agagccctaggattcctcacggaaatctccagggtgcatggactaggaccctggaggcagaaatagttaccgaggggaagttacaggcctgagtgtgagtccctgtttggttgctgatga

SEQ ID NO: 711885 - DNA, 120 bp, Artificial Sequence
  ENSG00000196998_25 (sequence is synthesized)
gctttgaggtccttggccagacactcaaccactttgaacctcagtttcctcatctgtagatgagtgtaacagtctagaacactcctctcagggatcatatccacaagtgctcgtgctgtg

SEQ ID NO: 711886 - DNA, 120 bp, Artificial Sequence
  ENSG00000196998_26 (sequence is synthesized)
cgaggatctcactggttgtttattgaaaggctaagcaagtaggttgaggtccctgggaagcaggggtggatcctgtgtcaccagggctgccccttaccctaaaccttggccccgacaacc

SEQ ID NO: 711887 - DNA, 120 bp, Artificial Sequence
  ENSG00000196998_27 (sequence is synthesized)
gtgcttttacggttccgggtactggctcccacaccactgcctcgtgtggggttgttcgcccgtgaaggggcaggacagggtgcgcgctggtggagttttccaggcgcaaactgatggttt

SEQ ID NO: 711888 - DNA, 120 bp, Artificial Sequence
  ENSG00000196998_28 (sequence is synthesized)
caacttgtggtgagccgtccagtggacaagggtgggtaggttggtggactggcttccttgtggactcttggccccttccctccataccaccccaacctcagactcctccctcctacccca

SEQ ID NO: 711889 - DNA, 120 bp, Artificial Sequence
  ENSG00000196998_29 (sequence is synthesized)
ccatatctttgctctcaaggatacccgcctcaaccgccgctccgctgctgcctgcaggctggctcgcgtgggcaaggtggggcctatgattgggcagtacgtggactctcagtggagcct

SEQ ID NO: 711890 - DNA, 120 bp, Artificial Sequence
  ENSG00000196998_30 (sequence is synthesized)
cggctggtcttgggagaggggcgaggcatcccggacagagtcttggaatggagaggaacaatcctgcaccatgactcaacagccacttcgaggagtgaccagcctgcgtttcaaccaaga

SEQ ID NO: 711891 - DNA, 120 bp, Artificial Sequence
  ENSG00000196998_31 (sequence is synthesized)
atctttgctctcaaggatacccgcctcaaccgccgctccgcgtgagtaccccctccccaccctaccgtgtccctgtccccctgcccatttaccatacctgggcttagccagtgctgcctg

SEQ ID NO: 711892 - DNA, 120 bp, Artificial Sequence
  ENSG00000196998_32 (sequence is synthesized)
aactctgtcattggtgagtgggaacagccccttggttgggggtactgcatggggcaaaggcctgcaggttggacctgaaaggattttagggccatgtgaggctcagcttcatcatcagta

SEQ ID NO: 711893 - DNA, 120 bp, Artificial Sequence
  ENSG00000196998_33 (sequence is synthesized)
agggggacagcactgggcaaaggcctggaggcagaccctaggtcctgagatgcctgagaggactggagcctgtggctgtggcagcctctgaccttttaccaccccccctcccccagccat

SEQ ID NO: 711894 - DNA, 120 bp, Artificial Sequence
  ENSG00000197006_0 (sequence is synthesized)
ctccccacccccagcctttgccctgaagggggctggatgggcaaggcggccgcgatggctcgagctcgggcggtggcggcggtggccggaggcggcggtgcctcctcctcctcgccccgg

SEQ ID NO: 711895 - DNA, 120 bp, Artificial Sequence
  ENSG00000197006_1 (sequence is synthesized)
cgccggcggtgatccgagcgagcggccgcggcccccgatgagactgctggcgggctggctgtgcctgagcctggcgtccgtgtggctggcgcggaggatgtggacgctgcggagcccgct

SEQ ID NO: 711896 - DNA, 120 bp, Artificial Sequence
  ENSG00000197006_2 (sequence is synthesized)
cacccgctccctgtacgtgaacatgactagcggcccgggtgggccggcggcggccgcgggcggcaggaaggagaaccaccagtggtatgtgtgcaacagagagaaattatgcgaatcact

SEQ ID NO: 711897 - DNA, 120 bp, Artificial Sequence
  ENSG00000197006_3 (sequence is synthesized)
ccaggctgtctttgttcagagttaccttgatcaaggaacacagatcttcttaaacaacagcattgagaaatcgggctggctatttatccaattatatcattcttttgtgtcatctgtttt

SEQ ID NO: 711898 - DNA, 120 bp, Artificial Sequence
  ENSG00000197006_4 (sequence is synthesized)
tagcctgtttatgtctagaacatctatcaatgggttgctaggaagaggctcaatgtttgtgttttcaccagatcagtttcagagactgcttaaaattaatccagactggaaaacccacag

SEQ ID NO: 711899 - DNA, 120 bp, Artificial Sequence
  ENSG00000197006_5 (sequence is synthesized)
acttcttgatttaggtgctggagatggagaagtcacaaaaatcatgagccctcattttgaagaaatctatgccactgagctttctgaaactatgatatggcagcttcagaaaaagaaata

SEQ ID NO: 711900 - DNA, 120 bp, Artificial Sequence
  ENSG00000197006_6 (sequence is synthesized)
cagagtccttggtataaatgaatggcagaatacggggttccagtatgatgtcatcagctgcctgaacttgctggaccgctgtgatcagcccctgactttgttaaaagatatcagaagtgt

SEQ ID NO: 711901 - DNA, 120 bp, Artificial Sequence
  ENSG00000197006_7 (sequence is synthesized)
cttggagccaactagaggcagggtcatccttgcccttgtcctcccctttcatccctatgtggaaaacgtaggtggcaagtgggagaaaccatcagaaattttggaaatcaaaggacagaa

SEQ ID NO: 711902 - DNA, 120 bp, Artificial Sequence
  ENSG00000197006_8 (sequence is synthesized)
ctgggaagaacaagtgaatagtctgcctgaagttttcagaaaagctggttttgttatcgaagctttcaccagactaccatacctgtgtgaaggcgacatgtataatgactactacgttct

SEQ ID NO: 711903 - DNA, 120 bp, Artificial Sequence
  ENSG00000197006_9 (sequence is synthesized)
ggatgacgctgtctttgttctcaaaccagtataaacacgtggaggtcgaagtcttcagagtccgcaccctccgggatgtgcccttggaagagggtctgtgttcacaattacgtgaaggga

SEQ ID NO: 711904 - DNA, 120 bp, Artificial Sequence
  ENSG00000197006_10 (sequence is synthesized)
ggacccttggggaccgccattctaaatatcatgtaggaatttaaaaagccaaaatactaattatttctttgtagtgtgtaaaggaatgtttttaaaagacaaaaacccaactctttgtgg

SEQ ID NO: 711905 - DNA, 120 bp, Artificial Sequence
  ENSG00000197006_11 (sequence is synthesized)
atttttatcaactctttactcagagccactctccaatgcaggtcacactccaattatgatggaagatattttttatacttaattgcagtagggactcattcccagacaaagcaatagtca

SEQ ID NO: 711906 - DNA, 120 bp, Artificial Sequence
  ENSG00000197006_12 (sequence is synthesized)
cgacttcatggaaccaatcaatggattgttttttgaagactggcaataaagctgtccattcaattccaaatactggttttaaggtatagccactgatattctttcatgtttagaaattct

SEQ ID NO: 711907 - DNA, 120 bp, Artificial Sequence
  ENSG00000197006_13 (sequence is synthesized)
tgctaataaacttttttggagatgactttggcatcatgtttgaattcatataaagctcccctagcattttttattggtttggcttcaggagtacccaaatagtagcattatgagaatgac

SEQ ID NO: 711908 - DNA, 120 bp, Artificial Sequence
  ENSG00000197006_14 (sequence is synthesized)
gcagacaatttgaataggggggaaggaaggcttcagacttgggggaaggggagattattgcaaattgcagtgaacactgagtcagtaaaaaaaaaaaacagaaacaaaaacccagcctca

SEQ ID NO: 711909 - DNA, 120 bp, Artificial Sequence
  ENSG00000197006_15 (sequence is synthesized)
ttcagatacagaacttcagggacccctccccccacccccccagttaatgctgctgtgaaaaatgcaaaataacctggttctgactttgtgatcactcatgtcccatacactgaactttgt

SEQ ID NO: 711910 - DNA, 120 bp, Artificial Sequence
  ENSG00000197006_16 (sequence is synthesized)
ttttttctggacaatctcaggttctcagaattgaaacattcagttttgtctactgacaaaatgcaactaaaaatgttttaattcaacttcttactctacacttatatacctctctcccag

SEQ ID NO: 711911 - DNA, 120 bp, Artificial Sequence
  ENSG00000197006_17 (sequence is synthesized)
agcttggctcttccctgaaatccttaaaggagtttattatttgccaagaatatggtttgatgaagaccgtgtcagactcatgcattctggaatccgtgagtgcctccaaccataaaccca

SEQ ID NO: 711912 - DNA, 120 bp, Artificial Sequence
  ENSG00000197006_18 (sequence is synthesized)
gaaatgctgccatagaggaacccattagcaagatcaataaccatcgtggatattccaaagagcagagcatttaacccagaatctgaaatctcagtaataacagaaatgtcaatatgagat

SEQ ID NO: 711913 - DNA, 120 bp, Artificial Sequence
  ENSG00000197006_19 (sequence is synthesized)
tgtggttattaacaatatgttatcctcactactttatttcttttttcatccaggtgtttcattaagtattctcatttatatgctcatagaagtcatcagatcaacacattcactccaaca

SEQ ID NO: 711914 - DNA, 120 bp, Artificial Sequence
  ENSG00000197006_20 (sequence is synthesized)
cctgggtataaaggcgaattaaaacctgaagaattactttattattcattaagaactgcattcccacatcctcacaccaatatcttccactgttactgtgcagtcataataagagttggg

SEQ ID NO: 711915 - DNA, 120 bp, Artificial Sequence
  ENSG00000197006_21 (sequence is synthesized)
ttatgtgatttatgcaaaattgttattggtgtgttctaatgatttttttccaggaattcaagtaagtgaagtacaaatacttagcaccatagattgtaaaaatagaaagaggaaatgaga

SEQ ID NO: 711916 - DNA, 120 bp, Artificial Sequence
  ENSG00000197006_22 (sequence is synthesized)
aaacttaatgtcgttcttgtacagttgagttttgcttctttataaactgtctgttaaaatcaggggttgctgttagactgtcaagcagaagtgatggatgttcaaggaggcaggttgccc

SEQ ID NO: 711917 - DNA, 120 bp, Artificial Sequence
  ENSG00000197006_23 (sequence is synthesized)
caaagtgttttctaactttcaagtagagaactttatgctctaataagaaaaatacaactcattcttaaccacccccccaaaacagagaaaacacatacatttatgcattttaaagataaa

SEQ ID NO: 711918 - DNA, 120 bp, Artificial Sequence
  ENSG00000197006_24 (sequence is synthesized)
aagtagtttctcaaaaaaatctgaagttctctgaaaaccagcttattaaaagtgctgttttgtggtgaaaattgaaaccaaatccactcacatttcctatcgggtcttgaaattcttggt

SEQ ID NO: 711919 - DNA, 120 bp, Artificial Sequence
  ENSG00000197006_25 (sequence is synthesized)
ggtgtgtcaccattccactagatggcagtgttgcttactgagtgtcaatggcttttttccccgtaaatggaatcatgtttttctcccccaaagtacaataaagctgccttgtctgcacca

SEQ ID NO: 711920 - DNA, 120 bp, Artificial Sequence
  ENSG00000197006_26 (sequence is synthesized)
ggttattaaaagtagaagcaaaaagtcacccatagtccttttgcctgaaataactcccattaacattttgatatatttcttcacagatgagaaaaaattaagaactttccccccttccct

SEQ ID NO: 711921 - DNA, 120 bp, Artificial Sequence
  ENSG00000197006_27 (sequence is synthesized)
gccctataatccaaattgtgtgggcaaatctgagattactagatgtattggaaatcctttctctttcatagataaaaaaacagaagtagacagaattttaaaaatagatatactatggga

SEQ ID NO: 711922 - DNA, 120 bp, Artificial Sequence
  ENSG00000197006_28 (sequence is synthesized)
tggctattggagtcatggcagttttttttttcttaaatgaaaagtacttttatagaaattgttctttgaaaatattcagcaaataatcatttattgctttctatgtgcagatcaagtttg

SEQ ID NO: 711923 - DNA, 120 bp, Artificial Sequence
  ENSG00000197006_29 (sequence is synthesized)
tatgataattaaattattgataacttatacctacgattttaagaatattttcaaccctttggtcagattgtctccaattagcataatagcaaagagacttttcaaggttaatatgaaact

SEQ ID NO: 711924 - DNA, 120 bp, Artificial Sequence
  ENSG00000197006_30 (sequence is synthesized)
ttttctcagctatttttttattgtctatttctcaggggaaaaaggaaacttatcctcttaggcagttttcataatgttatacatttaaaaattaatctgaaggagcttaaaatataaatg

SEQ ID NO: 711925 - DNA, 120 bp, Artificial Sequence
  ENSG00000197006_31 (sequence is synthesized)
cattaggtgaaaaatagcagttgatttaaataaaatgaaggaggagaagaaaaagaaccttaccgacacaaaatagaatgagattggtttgcagatggcgagcgatgttgcttctgctcg

SEQ ID NO: 711926 - DNA, 120 bp, Artificial Sequence
  ENSG00000197006_32 (sequence is synthesized)
cagtccccatttctgtgtatgccggggcgggttggggtgtgtatttgaaaggaaagttggctttcttttttcagaagggaagaagagctgaagagaggaacctcttatgaaggaaccata

SEQ ID NO: 711927 - DNA, 120 bp, Artificial Sequence
  ENSG00000197006_33 (sequence is synthesized)
atcaggaactttttgaaattgtgcaaggatggcttcaccatttaacattgagattttggcctggagcacatttagaaatgtgcatatcttttttttttccatggattttacagttgtcat

SEQ ID NO: 711928 - DNA, 120 bp, Artificial Sequence
  ENSG00000197006_34 (sequence is synthesized)
aggtgttagatgtttctgggtgagattttgatttacacctagcacatatttccaggaaggagtattgtttgacaaataattcgtacttggatttttcagaacagttcagtcactgtctag

SEQ ID NO: 711929 - DNA, 120 bp, Artificial Sequence
  ENSG00000197006_35 (sequence is synthesized)
ggtacctgctctgggtgccactctgggccagtaactgctgggaacaaagaacagcagaaggagaagtggctttgtgtagagatgagaaaagttagtaaacaacacattctaatgcagcga

SEQ ID NO: 711930 - DNA, 120 bp, Artificial Sequence
  ENSG00000197006_36 (sequence is synthesized)
ataaataaattgtctgttattaactttttgtactccagttttgaatccaaagacacctgccttccccccttttttgacagggtctctatcacccaggctggaatgcagtggcaagattgc

SEQ ID NO: 711931 - DNA, 82 bp, Artificial Sequence
  ENSG00000197006_37 (sequence is synthesized)
tttttttttttgtagattctgtgttgtctaggctagtcctgccctcaagcgatccccctgccttggcctcccaaagtgttag

SEQ ID NO: 711932 - DNA, 120 bp, Artificial Sequence
  ENSG00000197006_38 (sequence is synthesized)
acaggtgtgagccaccatgcctggcccaaagacccccttttaatgtgttgagaaacaaatatgtgggccctctgtcctctgtgtcctctcccccagcacttagtggtgattcagtaaggg

SEQ ID NO: 711933 - DNA, 120 bp, Artificial Sequence
  ENSG00000197006_39 (sequence is synthesized)
cctctcccccagcacttagtggtgattcagtaagggtcttctttgtaaagcagcagaaacagactcaggctgacttaaaaggaaatttatgcaaacatttgaaggtagatcctagagtca

SEQ ID NO: 711934 - DNA, 120 bp, Artificial Sequence
  ENSG00000197006_40 (sequence is synthesized)
ctgggagggctagtgaatcttgtgtggggtccacagccaggaagaatgcctcaaatcacaccataaacaggtctgaagaggatgctactgccactgccaaacactaggtgccatcagccc

SEQ ID NO: 711935 - DNA, 120 bp, Artificial Sequence
  ENSG00000197006_41 (sequence is synthesized)
tgttgtcagcatcgctcaaccactgccccagccccttggtctcactgccattgctccacccccagagaaggagaagctcacatccccactactctgggtcactggctctccattccaggg

SEQ ID NO: 711936 - DNA, 120 bp, Artificial Sequence
  ENSG00000197006_42 (sequence is synthesized)
catgggcaagtgtgcctggcttaggctgcgtgccagtgcctcagctgcacggcaggccaggaaagcggctcccaggccttgtgtctctcccagactctgggcaggcaattccccagacat

SEQ ID NO: 711937 - DNA, 120 bp, Artificial Sequence
  ENSG00000197006_43 (sequence is synthesized)
gggaagagcgtcatctgcaccactgaaaattatgaaaaatctccccaccatgatatgatgtctgtgcccttggcatctgctcatgatatattttctcattaacagaaagttattctcagt

SEQ ID NO: 711938 - DNA, 85 bp, Artificial Sequence
  ENSG00000197006_44 (sequence is synthesized)
ctcaatctggttttaacacttcaacagatgtatgtagtttttgtatcaccatagcacctaaaaagtacccccaaagttaaatata

SEQ ID NO: 711939 - DNA, 120 bp, Artificial Sequence
  ENSG00000197006_45 (sequence is synthesized)
tcaccatagcacctaaaaagtacccccaaagttaaatatactgtcatctctgtgtgtgtgtctgtagtcagtgccaggtttgtatgtgaatttgaggaccttccctagtccccttgtccc

SEQ ID NO: 711940 - DNA, 120 bp, Artificial Sequence
  ENSG00000197006_46 (sequence is synthesized)
ccaggcatctcctgctcataggtttggaaatgactgatagaggcttcatctctagtccaagaaatgctggacggtgtatccatcctactgttccatctctctctggtcctggagcttaat

SEQ ID NO: 711941 - DNA, 120 bp, Artificial Sequence
  ENSG00000197006_47 (sequence is synthesized)
atccttcatgagcctgtttttattttcagcctaataaatctctctaggtagtaagttgcataagtttactatgccagtggtattttcttgcatttgtccaaaactgtccttcagatatta

SEQ ID NO: 711942 - DNA, 120 bp, Artificial Sequence
  ENSG00000197006_48 (sequence is synthesized)
catgttgctctctgtttcagtattccagcatttaatgaccagttttccaaacccattaaccattacaccctgcagtcagtctattggcagatactacccaaaactgtcagagaagataac

SEQ ID NO: 711943 - DNA, 120 bp, Artificial Sequence
  ENSG00000197006_49 (sequence is synthesized)
agtgtggggccttggatccagacaaacctgggcttacatttccatactgacactcattaaccttgcaagcgtgggcaagttcttcaccccttctgagtctgttctttatctgcccacctg

SEQ ID NO: 711944 - DNA, 120 bp, Artificial Sequence
  ENSG00000197006_50 (sequence is synthesized)
tctcaaagagtacctgggaagtacaaaagaggtaactcatgaagccctcaggcttggaacgtaccaagtccttggtagatatggctcctccctgcttccctctttaaatcacttgtttgt

SEQ ID NO: 711945 - DNA, 120 bp, Artificial Sequence
  ENSG00000197006_51 (sequence is synthesized)
cggtaagtgtggtcagtcaggctagctcttactgaggatagctgtttattggtatttgtgattttgtgctgtgtacaattaaatattgtctagtatgtcttataatagcctgcagtttaa

SEQ ID NO: 711946 - DNA, 120 bp, Artificial Sequence
  ENSG00000197006_52 (sequence is synthesized)
gcggccgcggcccccgatgagactgctggcgggctggctgtgcctgagcctggcgtccgtgtggctggcgcggaggatgtggacgctgcggagcccgctcacccgctcccttggtatgtg

SEQ ID NO: 711947 - DNA, 120 bp, Artificial Sequence
  ENSG00000197006_53 (sequence is synthesized)
ggaaaggcaacttaatctggtcactggagtgttaaattctgttgcttactttgctatttgggtttgtttggtgattttgagttaaggcattggattatgtgactgttttcttgtctaaaa

SEQ ID NO: 711948 - DNA, 120 bp, Artificial Sequence
  ENSG00000197008_0 (sequence is synthesized)
tttgtctcgctgcagcgggtgctgcaggtctggccttcacttttctgcgtcctcttactcctagaggcccagcctctgtggcgctgtgatctggttattgggagattcacagctaagacg

SEQ ID NO: 711949 - DNA, 120 bp, Artificial Sequence
  ENSG00000197008_1 (sequence is synthesized)
ccaggatcccccggaagcctagaaatgggaccactgacatttatggatgtggccatagagttctctttggaggagtggcagtgcctggacactgcacagcggaatgtatataggcatgtg

SEQ ID NO: 711950 - DNA, 120 bp, Artificial Sequence
  ENSG00000197008_2 (sequence is synthesized)
atgttagagaactacagaaacctggttttcttggctctgtgttctcgttttgcccaagacctttggctagagcagaacataaaagattctttccaaaaagtgacactgagcagatatgga

SEQ ID NO: 711951 - DNA, 120 bp, Artificial Sequence
  ENSG00000197008_3 (sequence is synthesized)
aaatatggacataagaatttacagttaagaaaaggctgtaaaagtgtggatgagtgtaagggacaccaaggaggttttaatggacttaaccaatgtttgaaaattaccacaagcaaaata

SEQ ID NO: 711952 - DNA, 120 bp, Artificial Sequence
  ENSG00000197008_4 (sequence is synthesized)
aatcactttgcatgctttcacgcctaactcaacataaaaaaattcatactagagagaatttctacaaatgtgaagagtgtggaaaaacctttaactggtccacaaacctttctaaaccta

SEQ ID NO: 711953 - DNA, 120 bp, Artificial Sequence
  ENSG00000197008_5 (sequence is synthesized)
ctggagaaaaaccctacaaatgtgaagtatgtggaaaagcctttcaccaatcctcaatccttactaaacataagataattcgtactggagaaaaaccctataaatgtgcacactgtggca

SEQ ID NO: 711954 - DNA, 120 bp, Artificial Sequence
  ENSG00000197008_6 (sequence is synthesized)
cataagataattcgtactggagaaaaaccctataaatgtgcacactgtggcaaagcctttaaacagtcctcacaccttactagacataagataattcatactgaagagaaaccctacaaa

SEQ ID NO: 711955 - DNA, 120 bp, Artificial Sequence
  ENSG00000197008_7 (sequence is synthesized)
ttactaaacatcagataatttatactggagaggaaccatacaaatgtgaggaatgtggcaaagcttttaacctatcttaacaacttactgaacataagaaaatttacactagagagaaag

SEQ ID NO: 711956 - DNA, 120 bp, Artificial Sequence
  ENSG00000197008_8 (sequence is synthesized)
ggatcccccggaagcctagaaatggccagaaaaactgggaaaatcacaggctcttccacttactggatatttaacaagatattcttcttgagccaaaaacattgacattagcgggaccac

SEQ ID NO: 711957 - DNA, 89 bp, Artificial Sequence
  ENSG00000197008_9 (sequence is synthesized)
ataattcatagcggagagaaaccccacaaatgtgaagaatgtggcagagcttttaaccagtccgcaaagctcactgaacataagttaaa

SEQ ID NO: 711958 - DNA, 120 bp, Artificial Sequence
  ENSG00000197008_10 (sequence is synthesized)
cacataagaaaattcatactggggagaaaccccacaaatgtggagaatgcggaaaagcctttaactggtcctcaactcttattacacataagataattcacagtggagaaaaaccctaca

SEQ ID NO: 711959 - DNA, 120 bp, Artificial Sequence
  ENSG00000197008_11 (sequence is synthesized)
gtggcaaagcttttaaccagtcctcacaccttatgagacataagaaaattcatagtaaagagaaaccctacaaatgtgaacagtgtggcaaggtctttaagaagtcctcaactcttactg

SEQ ID NO: 711960 - DNA, 89 bp, Artificial Sequence
  ENSG00000197008_12 (sequence is synthesized)
ggaatgtggcaaaggttttagccaactctcaaaccttactaaacacaagaagattcatactagagagaaaccctacaaatgtgaagaat

SEQ ID NO: 711961 - DNA, 120 bp, Artificial Sequence
  ENSG00000197008_13 (sequence is synthesized)
accctacaaatgtgaagaatgtggcatatcttttaaccagttctcacaacttgctatacataagatgattcacacttgaatgaaaccctacaaatgtgaacgatgtggcagttgttttaa

SEQ ID NO: 711962 - DNA, 82 bp, Artificial Sequence
  ENSG00000197008_14 (sequence is synthesized)
tgaatgaaaccctacaaatgtgaacgatgtggcagttgttttaactagttctcgaactttactatgcataagaaaattcaaa

SEQ ID NO: 711963 - DNA, 120 bp, Artificial Sequence
  ENSG00000197008_15 (sequence is synthesized)
tttatactggagcaaaaccttggaaattcaaagaatgtggtaaaacttacaatcctcaaaacttcttacacctaaaattcatgcaggagagaaacaccacaaatgtgaaaaatttggtaa

SEQ ID NO: 711964 - DNA, 120 bp, Artificial Sequence
  ENSG00000197008_16 (sequence is synthesized)
attctttaacaagtcttcaaccctttctgcacataatataattcatactggagagaaaccccacaaatatgaagaatgtggtaatgcttttaaccaattctcaaatcttactaaacaaaa

SEQ ID NO: 711965 - DNA, 120 bp, Artificial Sequence
  ENSG00000197008_17 (sequence is synthesized)
ttaatactgaaaatgttacaaaccagaaaaatgtgaaaatgattttaacaaaaccttcaaatttttctaaacataaaggaaatcatactggtaagaaattataaaaatgtgaagaatgtg

SEQ ID NO: 711966 - DNA, 120 bp, Artificial Sequence
  ENSG00000197008_18 (sequence is synthesized)
acaaagcctttaaatggttgtcacacttgattgtaggtaagataattcatactggcagaaactcccagaagtgtgaagaatatggcaaaactttaattcctataccttattgcacaggaa

SEQ ID NO: 711967 - DNA, 120 bp, Artificial Sequence
  ENSG00000197008_19 (sequence is synthesized)
agcatttatacttcagaaaatgttgtactgatataaagaatgtagaaaagccattaatatgtgcttacatcttattcaacattagagagttagtacttaataaaagcattataaatgcaa

SEQ ID NO: 711968 - DNA, 120 bp, Artificial Sequence
  ENSG00000197008_20 (sequence is synthesized)
ttagagaactacagaaacctggttttcttggccagacctgattacctgtctggaacaaggaaaagagccctggaatatgaagagacatgagatggtggtagccaaacattcagctctgtg

SEQ ID NO: 711969 - DNA, 120 bp, Artificial Sequence
  ENSG00000197008_21 (sequence is synthesized)
aagtatcctgccatttgtttcagcactttatgtcatgggaaacagaaaccagtgtctgcaaaagcacctagaagccagaaataaagatctctgtgttctcgttttgcccaagacctttgg

SEQ ID NO: 711970 - DNA, 120 bp, Artificial Sequence
  ENSG00000197013_0 (sequence is synthesized)
acggtttccggaatatggcggggcgtttggctcttgctgcagccagagctccaggtctcgtcttcatttctgtgtcctttgttcttagaggcccagcctgtgtggccctgtgacccgcag

SEQ ID NO: 711971 - DNA, 120 bp, Artificial Sequence
  ENSG00000197013_1 (sequence is synthesized)
tgtggccctgtgacccgcagatattgggagatacacagctaagactccaggaccccctggaagcctagaaatgggaccattgacatttacagatgtggccatagaattctctctggagga

SEQ ID NO: 711972 - DNA, 120 bp, Artificial Sequence
  ENSG00000197013_2 (sequence is synthesized)
cacaacagaacttatatagaaatgtgatgttagagaactacagaaacttggtcttcctgggtattgctgtttctaagccagacctaatcacttgtctagagaaagaaaaagaaccctgca

SEQ ID NO: 711973 - DNA, 120 bp, Artificial Sequence
  ENSG00000197013_3 (sequence is synthesized)
agatgaagcgacatgaaatggtggatgaacccccagttgtgtgttctcattttgctgaagacttttggccagagcaagacataaaagattctttccaaaaagtgacactgaggagatatg

SEQ ID NO: 711974 - DNA, 120 bp, Artificial Sequence
  ENSG00000197013_4 (sequence is synthesized)
ataaacgtggacatgagaacttacaattaagaaaaggctataaaactgtaggtgattgtaagctatacaaaggaggttataatggacttaaccaatgtttgacacttacccagagcaaaa

SEQ ID NO: 711975 - DNA, 120 bp, Artificial Sequence
  ENSG00000197013_5 (sequence is synthesized)
tgtatcactgtgatatatatgtaaaagtcttttatgcattttcaaatgcagatagatacaagacaagacatactggaaagaaacctttccagtgtaaaaaatgtggcaaatcattttgca

SEQ ID NO: 711976 - DNA, 120 bp, Artificial Sequence
  ENSG00000197013_6 (sequence is synthesized)
tgctttcacaactaactcaacataagaaaattcatattagagagaatacctacagatgtaaagaatttggcaatgcctttaatcagtcctcagcccttactaaccataagagaatttatg

SEQ ID NO: 711977 - DNA, 120 bp, Artificial Sequence
  ENSG00000197013_7 (sequence is synthesized)
ttactaaccataagagaatttatgttggtgagaaacactacagatgtgaagaatgtggcaaagcatttaaccactactcaacccttactaaccataagagaattcatactggagagaaac

SEQ ID NO: 711978 - DNA, 120 bp, Artificial Sequence
  ENSG00000197013_8 (sequence is synthesized)
aagcctttagcaggtactcaacccttactacccataagagaattcattctggagagaagccctacaaatgtgatgaatgtggcaaaacctttagcatatcctcaacctttactaaacata

SEQ ID NO: 711979 - DNA, 83 bp, Artificial Sequence
  ENSG00000197013_9 (sequence is synthesized)
catactgctttaaccggtcctcaacccttactagccataagagaatacatactggtgagaaaccctacaaatgtgaagaatgt

SEQ ID NO: 711980 - DNA, 120 bp, Artificial Sequence
  ENSG00000197013_10 (sequence is synthesized)
ttactcgacataaaaaaattcatactggagaggaaccctacaaatttgaaaaatgtggcagagtttttacctgttcctcaacacttactcaagacaagaaaattcatactggagagaaac

SEQ ID NO: 711981 - DNA, 120 bp, Artificial Sequence
  ENSG00000197013_11 (sequence is synthesized)
cctacaattgtgaagaatgtggcaaagtttttacctattcctctacacttactagacataagagaattcatactgaagagaaaccctataaatgtaacgaatgtggcaaagcttttaacc

SEQ ID NO: 711982 - DNA, 64 bp, Artificial Sequence
  ENSG00000197013_12 (sequence is synthesized)
aaaccctataaatgtaacgaatgtggcaaagcttttaaccggtcctcacaccttactagccata

SEQ ID NO: 711983 - DNA, 66 bp, Artificial Sequence
  ENSG00000197013_13 (sequence is synthesized)
aaccttaacagtcataaaaacctgtcctcaagacttactcaacataagaaaattcatactggagag

SEQ ID NO: 711984 - DNA, 78 bp, Artificial Sequence
  ENSG00000197013_14 (sequence is synthesized)
caatgtgacaaagcttttacccactcctcaaaccttagtagtcataagaaaattcatagtggagagaaaccctacaaa

SEQ ID NO: 711985 - DNA, 90 bp, Artificial Sequence
  ENSG00000197013_15 (sequence is synthesized)
tgtgaagaatgtggcaaagcttttaatcggtcctcaagacttactcaacataagaaaattcatactaccaaagcttttacccggtcttca

SEQ ID NO: 711986 - DNA, 90 bp, Artificial Sequence
  ENSG00000197013_16 (sequence is synthesized)
aattcatactaccaaagcttttacccggtcttcaagacttactcaacataagaaaattcataggatgggtgtggtggctcatgcctgtaa

SEQ ID NO: 711987 - DNA, 120 bp, Artificial Sequence
  ENSG00000197013_17 (sequence is synthesized)
gagatcacgccactacactccagcctggatgacaaaacaagactctgtctaaaaaatatataaataaataaaagaaagaaaattcatagtagagagaaaccttacaaatgtgtagaatgt

SEQ ID NO: 711988 - DNA, 120 bp, Artificial Sequence
  ENSG00000197013_18 (sequence is synthesized)
aattcatagtagagagaaaccttacaaatgtgtagaatgtggcaaaactcgttttaactaatgctcacatcttattgcatagaaaagcatttatacctgaaaaaaggtatacaaatttaa

SEQ ID NO: 711989 - DNA, 120 bp, Artificial Sequence
  ENSG00000197013_19 (sequence is synthesized)
aaaatgtggaaaagccattaaaatctgttcacatcttaacaacagagagttgatacttaataagagcattgtaagtgcaattactgtcaaacaatcttgtagaaaatatcatcctttaaa

SEQ ID NO: 711990 - DNA, 120 bp, Artificial Sequence
  ENSG00000197013_20 (sequence is synthesized)
gtgaatgagactagtctgaggaaaaacattacaaatgtaaagagggttatagtgcatttacttgtatcacagatcttgttgtacacattttatactagaggaaaaccctgaagcagttgc

SEQ ID NO: 711991 - DNA, 120 bp, Artificial Sequence
  ENSG00000197013_21 (sequence is synthesized)
accaactttgttcaacatcagaaatttatattggagaaaaatccagcaagtgtaataaatttggaaaaacttttttttccccaaaaactatacctcaggaaacaatggagagtttatatt

SEQ ID NO: 711992 - DNA, 120 bp, Artificial Sequence
  ENSG00000197013_22 (sequence is synthesized)
cctcaggaaacaatggagagtttatattaacatatatttttgcatatggccatatgtataaaaatatttaattcaaaattgaatttaaaaagtctacataaatatcatacatagatatgt

SEQ ID NO: 711993 - DNA, 120 bp, Artificial Sequence
  ENSG00000197013_23 (sequence is synthesized)
tagaatatgatatttaatacatagaaaagtctacatgaatatcagaatttacagtagaaacaactaagacacaaacacttgagacattacactaaagtgctgagtatagaaaataaaact

SEQ ID NO: 711994 - DNA, 120 bp, Artificial Sequence
  ENSG00000197013_24 (sequence is synthesized)
gagacattacactaaagtgctgagtatagaaaataaaactaaagttgttaaattatttgtatataacttttaaaagagtggaagatattttgcaaagttatattcaaagtgtacttttta

SEQ ID NO: 711995 - DNA, 90 bp, Artificial Sequence
  ENSG00000197013_25 (sequence is synthesized)
tttgagatggagtctcactttgttgcctacgttggagttcagtggcacaatttcagcttgctgccaacttcgacctttgggttcaagcag

SEQ ID NO: 711996 - DNA, 76 bp, Artificial Sequence
  ENSG00000197013_26 (sequence is synthesized)
atttttagtagagatgagatttcaccattttgtccagggtggtctcaaactcttcagcagccatgagccactgcac

SEQ ID NO: 711997 - DNA, 120 bp, Artificial Sequence
  ENSG00000197013_27 (sequence is synthesized)
ccatgagccactgcacccagcccaaagtatgcttttaaaaatatgtatatatataaaatttttgaaaagcaaattatgatataattcaagtatcaaattacttcatgctgtttcattgtt

SEQ ID NO: 711998 - DNA, 120 bp, Artificial Sequence
  ENSG00000197013_28 (sequence is synthesized)
cctattcacatgtgaaagcatgtgatcaattattgctgcatcacatatagactcattaggtggaaattatggcctcttctgtaaaaaagtaaggacattaaaatgtaagatgcttgatga

SEQ ID NO: 711999 - DNA, 120 bp, Artificial Sequence
  ENSG00000197013_29 (sequence is synthesized)
aaatctaagtggagaggctctttgtggttaacttattgagtgatgtatgaggtcgatgttcagagtaatatgcctctgtattacagtgatagaaaatattttttagttaaaagtgaattt

SEQ ID NO: 712000 - DNA, 120 bp, Artificial Sequence
  ENSG00000197013_30 (sequence is synthesized)
tcattttagtgattgagcttttatgttataaaatgcagtatatttcaaaatttttaaattatatgtaaatttgattttatttgttaccatgttaagactattgtgcatttaatgaagcat

SEQ ID NO: 712001 - DNA, 120 bp, Artificial Sequence
  ENSG00000197013_31 (sequence is synthesized)
gcatttaatgaagcattattatgctatcaactttaacctatcccacgttactcaagggtgtagctaaatgaaggtagcagtatgctatttagtaacatagtggaatagcatctctagtaa

SEQ ID NO: 712002 - DNA, 120 bp, Artificial Sequence
  ENSG00000197013_32 (sequence is synthesized)
tctcttttgccagtagctttaactggcagataagttaatattgttcccataggttaaatatttatcctttttttgatatttaaatttttttcttatttttttgtgggtacataatatgtg

SEQ ID NO: 712003 - DNA, 120 bp, Artificial Sequence
  ENSG00000197013_33 (sequence is synthesized)
tatatatttatgcaaatctggcatattttgatagaggcatacaatatgtaataattacatcaattacatcagggtaaattatgtagccattacttgtaacatttatcttttacaaacaac

SEQ ID NO: 712004 - DNA, 120 bp, Artificial Sequence
  ENSG00000197013_34 (sequence is synthesized)
tcaattatgcacttttagttattttaaagtgtacaattaaattgctattgactgcatggttatctttgtggtataaaaatttatatataagtataaataaactcatttctgagtcttaaa

SEQ ID NO: 712005 - DNA, 70 bp, Artificial Sequence
  ENSG00000197013_35 (sequence is synthesized)
cctaatcacttgtctagagaaagaaaaagaaccctgcaagatgaagcgacatgaaatggtggatgaaccc

SEQ ID NO: 712006 - DNA, 120 bp, Artificial Sequence
  ENSG00000197013_36 (sequence is synthesized)
cagcttgctagaggtccactccagaccctgttcacctgggaatcacaaatagaggctgtagaatggcaaaaattgcttcctgctccttcctctggaagcttcatcacagaggggcaccag

SEQ ID NO: 712007 - DNA, 120 bp, Artificial Sequence
  ENSG00000197013_37 (sequence is synthesized)
cctgatgccaaccggagctctcctgtatgaggtttctatcgacccctgttgggaagtctctcccagtcaggaggcacaggggtcagggaccaacgtgaggaggcagtctgtcccttagca

SEQ ID NO: 712008 - DNA, 120 bp, Artificial Sequence
  ENSG00000197013_38 (sequence is synthesized)
gagctgacgtgctgtgctgggagaatccctcttgtcagggtcacctgctctcttcagagccagcagtcaggaaggattaaatctatggaagctgtgcccacagcaaccccttcccccagg

SEQ ID NO: 712009 - DNA, 90 bp, Artificial Sequence
  ENSG00000197013_39 (sequence is synthesized)
gattttgtctgtaagcccctgactggggctgtctcctttccatccgagatgccctgcccagcgaggaggaatctagagaagcagtctggc

SEQ ID NO: 712010 - DNA, 120 bp, Artificial Sequence
  ENSG00000197013_40 (sequence is synthesized)
attgggagatacacagctaagactccaggaccccctggaagcctagaaatgtgactgtgcctgacgtgtagccctgtctggggagctctgcacgcgcaattccgcagtctctcccagatt

SEQ ID NO: 712011 - DNA, 67 bp, Artificial Sequence
  ENSG00000197013_41 (sequence is synthesized)
gcccagctaaatttttatttttttatttttagtagagaaagggtttcactgtgttagccaggatagt

SEQ ID NO: 712012 - DNA, 120 bp, Artificial Sequence
  ENSG00000197013_42 (sequence is synthesized)
ctttatctttatcaagttgtggtctaagtgagcatttggtatgattttgggattattgaatttgctgaggattgttgtgtttctgattgcgtggtcaattttagagtatgtgacacatgg

SEQ ID NO: 712013 - DNA, 120 bp, Artificial Sequence
  ENSG00000197013_43 (sequence is synthesized)
tacacagctaagactccaggaccccctggaagcctagaaatggtgagagtgccgagtctgacatccccagagagggggaggggctggtcggaaccgtgagaagtggccgtggcggactta

SEQ ID NO: 712014 - DNA, 120 bp, Artificial Sequence
  ENSG00000197013_44 (sequence is synthesized)
ctcggcttcagtccccttcagccataagatggcgactgtgctgacagccgggccccgggcgtcctgtcttccctccgcagtgactgtgcctgacgtgtagccctgtctggggagctctgc

SEQ ID NO: 712015 - DNA, 120 bp, Artificial Sequence
  ENSG00000197013_45 (sequence is synthesized)
acgcgcaattccgcagtctctcccagattgtgcaagaaccatgggaggggcgtcaggacaaaaaaactgggaaaaacacagcttccttcatttactgaatgtttgacaaaatattctttt

SEQ ID NO: 712016 - DNA, 120 bp, Artificial Sequence
  ENSG00000197013_46 (sequence is synthesized)
tttttcttggaatttttgtggggtgatgtgtcctcagccaccctttagtttttttcctggtcctgggttccagtactgtctgtgaataaaccaagatatcagtcatggctatgtctgcaa

SEQ ID NO: 712017 - DNA, 120 bp, Artificial Sequence
  ENSG00000197013_47 (sequence is synthesized)
ttagcttgctgagcttcatgggattgggacctgctgagcgagaccacgtggctccctggcttcagcccctttctaggggagtaaagggttctgtcttgctggggttccagatgccactgt

SEQ ID NO: 712018 - DNA, 120 bp, Artificial Sequence
  ENSG00000197013_48 (sequence is synthesized)
tgctggggttccagatgccactgtggtacaaaacaaacaaacaacaacaacaaagcaaaactcctgcagctagcttggtgtctgcccaaatagccacccagttttgtgcttgaaacccag

SEQ ID NO: 712019 - DNA, 120 bp, Artificial Sequence
  ENSG00000197013_49 (sequence is synthesized)
gggaatcccctgatctgcagattgcaaaaatcatggggaaaggatagtaacctggccgggtagcacagttcctcacggcttcccttggctgggggagggaggtcccccagctccttgcac

SEQ ID NO: 712020 - DNA, 120 bp, Artificial Sequence
  ENSG00000197013_50 (sequence is synthesized)
ccccagctccttgcacttcgtgggtgaagcgatgccccaccctgcttctgctcgccctccatgggttgtacccactgcctaaccagtcccagttggatgaactgggtacctcagttggaa

SEQ ID NO: 712021 - DNA, 120 bp, Artificial Sequence
  ENSG00000197013_51 (sequence is synthesized)
tcttctgcatgggtctcgctgggagctgcagactggaaatgtttatttggccctcttgaccctgtcccccaaatcatcttttatttttatttcatccaaatagctgctatcttttttttg

SEQ ID NO: 712022 - DNA, 120 bp, Artificial Sequence
  ENSG00000197013_52 (sequence is synthesized)
tacatctttgcctaaattataataagaacaacgatctaaatttgcatagcaagtggaccctatatttggaatttaaagagtttctggcaaaatttagattaaattggctaattaataaca

SEQ ID NO: 712023 - DNA, 120 bp, Artificial Sequence
  ENSG00000197013_53 (sequence is synthesized)
tacaggaagctttatgatctatctgtgtattcatcatccaggtgttatgactctcgtcttttcactggaacctgccaaaaagggtgattgtgacatatcactggacccagcaccttggtg

SEQ ID NO: 712024 - DNA, 120 bp, Artificial Sequence
  ENSG00000197013_54 (sequence is synthesized)
atgtgactctcctctcctccttaggccctgcttacattgtgtctgttgaaatacggctggtccaacacctaggacaaaaaaactgggaaaaacacagcttccttcatttactgaatgttt

SEQ ID NO: 712025 - DNA, 120 bp, Artificial Sequence
  ENSG00000197013_55 (sequence is synthesized)
gacaaaatattctttttggatcaaaaacattggcattactggtgagcttgttagaaattcagcaactcagactttattccagattttctgaaaaaataatctgcattaacaaaatcttca

SEQ ID NO: 712026 - DNA, 120 bp, Artificial Sequence
  ENSG00000197016_0 (sequence is synthesized)
acttccggaaaggacccaaagccgggcgagtgcacgtcccgccggttgctgaggagaagggaggtctgggcggggcagcggccgaggctggactggggcgcggcgggggcggtgtcctgg

SEQ ID NO: 712027 - DNA, 120 bp, Artificial Sequence
  ENSG00000197016_1 (sequence is synthesized)
ttcctgtgtgggcggcgggcgtgagcgtgcgcgtgtggcctggtggctgtgagtgcccatacgtggtgagcgtgcggtgctgtgctgaggaggggcgagcgcgcgcggggatggcggccc

SEQ ID NO: 712028 - DNA, 120 bp, Artificial Sequence
  ENSG00000197016_2 (sequence is synthesized)
ggtgtgtgactgtccggtgcgtggccgcgaatctgcgcctgcgtgcatggcccggcggcgtgcggaaggcggtgtgtgttggaatgagtgaagcactttaagtggccaagagcaggaaac

SEQ ID NO: 712029 - DNA, 120 bp, Artificial Sequence
  ENSG00000197016_3 (sequence is synthesized)
ccggccggaggaggcttaccccgttctcccctgtatcgactgcgtagagcccagtgtgggcaaagtcctagagcccggggaagttgcccgggcggggcagcctcggctgaagcatttcct

SEQ ID NO: 712030 - DNA, 120 bp, Artificial Sequence
  ENSG00000197016_4 (sequence is synthesized)
gtcagccctatctggaaggggcagagcccaggacagggctccatgtccacaggacggcgaggagcgaagaccatggggactgagtacacagatgaagacacagaagcatagagaggataa

SEQ ID NO: 712031 - DNA, 120 bp, Artificial Sequence
  ENSG00000197016_5 (sequence is synthesized)
gtaatcactagcaagtggaagaaccgggattcagatccagaacaggctgactccagagtcactggctgtcatgtagtttcctcaactactgcctcagctctacaatcccagagtaaagct

SEQ ID NO: 712032 - DNA, 120 bp, Artificial Sequence
  ENSG00000197016_6 (sequence is synthesized)
cttctccaaatgaagagccaggaagaggtagaggtggcaggaattaaactttgtaaagccatgtccctgggttcagtgactttcacagatgtggccatagacttttcccaagatgaatgg

SEQ ID NO: 712033 - DNA, 120 bp, Artificial Sequence
  ENSG00000197016_7 (sequence is synthesized)
gagtggctgaatcttgctcagagaagtttgtacaagaaggtgatgttagaaaactacaggaacctagtttcagtgggtctttgcatttctaaaccagatgtgatctccttactggagcaa

SEQ ID NO: 712034 - DNA, 120 bp, Artificial Sequence
  ENSG00000197016_8 (sequence is synthesized)
gagaaagacccttgggtgataaaaggagggatgaacagaggcctgtgcccagacttggagtgtgtgtgggtgaccaaatcattatctttaaaccaggatatttatgaagaaaaattaccc

SEQ ID NO: 712035 - DNA, 120 bp, Artificial Sequence
  ENSG00000197016_9 (sequence is synthesized)
ccggcaatcataatggaaagacttaaaagctatgaccttgaatgttcaacattagggaaaaactggaaatgtgaagacttgtttgagagggagcttgtaaaccagaagacacattttagg

SEQ ID NO: 712036 - DNA, 120 bp, Artificial Sequence
  ENSG00000197016_10 (sequence is synthesized)
caagagaccatcactcatatagatactcttattgaaaaaagagatcactctaacaaatctgggacagtttttcatctgaatacattatcttatataaaacagatttttcccatggaagag

SEQ ID NO: 712037 - DNA, 120 bp, Artificial Sequence
  ENSG00000197016_11 (sequence is synthesized)
agaatatttaattttcatacagataagaaaagcttaaaaacacattcagttgtgaaaaaacacaagcaagaccgtggagaaaagaaacttttaaaatgtaatgactgtgagaaaatattc

SEQ ID NO: 712038 - DNA, 120 bp, Artificial Sequence
  ENSG00000197016_12 (sequence is synthesized)
agcaaaatctcaacccttactcttcaccaaagaattcatacaggagagaaaccctatgaatgtattgaatgtggaaaggcctttagccagagtgcccaccttgctcaacatcagagaata

SEQ ID NO: 712039 - DNA, 120 bp, Artificial Sequence
  ENSG00000197016_13 (sequence is synthesized)
cacacaggagaaaaaccttttgaatgtactgaatgtgggaaagccttcagccagaatgctcatcttgttcaacaccagagagttcatactggagagaaaccttatcagtgtaagcagtgt

SEQ ID NO: 712040 - DNA, 120 bp, Artificial Sequence
  ENSG00000197016_14 (sequence is synthesized)
aataaagcattcagccagcttgcacaccttgctcaacatcagagggtccacactggagagaaaccctatgaatgtattgaatgtgggaaggcttttagtgattgctcatccctagctcat

SEQ ID NO: 712041 - DNA, 120 bp, Artificial Sequence
  ENSG00000197016_15 (sequence is synthesized)
catcgaaggattcacactgggaaaagaccttatgaatgtattgactgtgggaaagctttcaggcagaatgcttctcttatacgtcatcggcgatattatcatactggagagaaacccttt

SEQ ID NO: 712042 - DNA, 120 bp, Artificial Sequence
  ENSG00000197016_16 (sequence is synthesized)
gactgtattgattgtgggaaggctttcactgatcacataggacttattcagcataagagaactcatactggagagagaccttacaaatgtaatgtgtgtgggaaggcttttagccatggc

SEQ ID NO: 712043 - DNA, 120 bp, Artificial Sequence
  ENSG00000197016_17 (sequence is synthesized)
tcatctctgacagtacatcagagaattcatacaggagagaaaccttatgaatgcaatatctgtgagaaagccttcagccatcgtgggtctcttactcttcatcagagagttcatactgga

SEQ ID NO: 712044 - DNA, 120 bp, Artificial Sequence
  ENSG00000197016_18 (sequence is synthesized)
tactcttcatcagagagttcatactggagagaaaccctatgaatgtaaagaatgtgggaaagctttccggcagagcacgcatctggctcatcatcagagaattcatactggagagaaacc

SEQ ID NO: 712045 - DNA, 120 bp, Artificial Sequence
  ENSG00000197016_19 (sequence is synthesized)
ttcagccagaatgcacacctcgcgcaacatcagaaaatacacactggggagaaaccttatgaatgtaaggaatgtggtaaggccttcagtcagattgcacaccttgttcagcaccagaga

SEQ ID NO: 712046 - DNA, 120 bp, Artificial Sequence
  ENSG00000197016_20 (sequence is synthesized)
gttcatactggtgagaagccttacgaatgtattgaatgtgggaaggcctttagtgatggctcatatcttgttcaacatcagagactccacagtggcaaaagaccgtatgaatgtcttgaa

SEQ ID NO: 712047 - DNA, 120 bp, Artificial Sequence
  ENSG00000197016_21 (sequence is synthesized)
tgtgggaaggcattcaggcagagggcatccttgatttgtcatcagagatgtcatactggtgagaaaccttatgaatgtaatgtttgtgggaaagcctttagccatcgtaaatcccttact

SEQ ID NO: 712048 - DNA, 120 bp, Artificial Sequence
  ENSG00000197016_22 (sequence is synthesized)
ctgcatcagagaattcatacaggagagaaaccttatgagtgtaaggaatgtagcaaagccttcagccaggttgcccatcttactctacataagagaattcatactggagaaaggccctat

SEQ ID NO: 712049 - DNA, 120 bp, Artificial Sequence
  ENSG00000197016_23 (sequence is synthesized)
gagtgtaaagaatgtggaaaagccttcaggcagagtgtacatcttgctcatcatcagcgaattcataccggagagtcatcagttattctctcctctgccctcccataccaccaagtccta

SEQ ID NO: 712050 - DNA, 120 bp, Artificial Sequence
  ENSG00000197016_24 (sequence is synthesized)
tagattcaatctcgtaaatgcttctagcatccatctgcttttttccagcacatgtcccatcatcatagtccaagacgcaaccatctcatctggatttctgcagtagcataactgttgccc

SEQ ID NO: 712051 - DNA, 120 bp, Artificial Sequence
  ENSG00000197016_25 (sequence is synthesized)
cttttgcttctatcaactacatgtttaacactgtaggcagcctaaccttttaaaaataaaaatacataatttatgttattttcccatttaaaacacttgatttgaaaaatatattaacta

SEQ ID NO: 712052 - DNA, 120 bp, Artificial Sequence
  ENSG00000197016_26 (sequence is synthesized)
atccatttcaaggatttagcacacactggcatatagttattgctaaataaatgctagccattaaggtaaaggtttccttacaaactatcatattaagcagcaagtaaaccaaacagtaag

SEQ ID NO: 712053 - DNA, 120 bp, Artificial Sequence
  ENSG00000197016_27 (sequence is synthesized)
tctaagactaagattttagagcagacagaagactactctcctggtagagaggaaagatgaacaaactcagaattgaaagatttatggtacacaaggtaacatggtggcttatcactccct

SEQ ID NO: 712054 - DNA, 120 bp, Artificial Sequence
  ENSG00000197016_28 (sequence is synthesized)
ttatcactccctctgtgacattgttgatgagcaactctcactttacctgacactgagaagtgagaatcagccaattagaacaaaagcttttagctgggtgcggtggctcatgcctgtagt

SEQ ID NO: 712055 - DNA, 86 bp, Artificial Sequence
  ENSG00000197016_29 (sequence is synthesized)
tcatgatcacaccactgcaattccagctgggcagcagagccagacactgtctcaaggaaaaacaaagaacaaaagcatttggtaga

SEQ ID NO: 712056 - DNA, 120 bp, Artificial Sequence
  ENSG00000197016_30 (sequence is synthesized)
ctgtctcaaggaaaaacaaagaacaaaagcatttggtagaatgtaggactaaccagggtaggtagtagtaaaccaaaagtaacaagccaaaaaaacttgaatagattaatagccatgaaa

SEQ ID NO: 712057 - DNA, 120 bp, Artificial Sequence
  ENSG00000197016_31 (sequence is synthesized)
cactgaaaagggtagttcaatactttggcctttataaaagtaccacagacaattcgtgtggtatttaaattgttctagcataaaataaaatgcaataagaccttccatcttgttccatga

SEQ ID NO: 712058 - DNA, 120 bp, Artificial Sequence
  ENSG00000197016_32 (sequence is synthesized)
gattgacaagacatgccaaaacataaaaatatgtacactgcaattagtttctgaatgtagatgttacaacttaaacttatttttaaaatatttaaaaataggaaggctagacatgcctct

SEQ ID NO: 712059 - DNA, 120 bp, Artificial Sequence
  ENSG00000197016_33 (sequence is synthesized)
gtatagaaaatctgataaaaatatttctccctaaattgtaaattcattgatattccagtaaaaatttccatatttttttagttgagaagctgattctgatcatctgtagaattttgattt

SEQ ID NO: 712060 - DNA, 120 bp, Artificial Sequence
  ENSG00000197016_34 (sequence is synthesized)
taacgaggaatgtagtttacattaggaatgtagtactaatactaattgaacatttgctaatgtttcacacactattttaggtgctgggggatacagtaaggtacaagatggacaaaaata

SEQ ID NO: 712061 - DNA, 120 bp, Artificial Sequence
  ENSG00000197016_35 (sequence is synthesized)
cgtgctcttacagatctagtagaacagaaaaaattaaatgcatgctatgtgataagtatatgatatgtcccataaagagaaatgatataaaaaagaagctagggagtgctggatcaggca

SEQ ID NO: 712062 - DNA, 120 bp, Artificial Sequence
  ENSG00000197016_36 (sequence is synthesized)
ccttactatccccagaacatgttggtattagaggatgagggaagaactagaggtaactgtgagacacaaaaggcataatgaaaatagtcatgatagtcccaaggcagatattgtttatga

SEQ ID NO: 712063 - DNA, 120 bp, Artificial Sequence
  ENSG00000197016_37 (sequence is synthesized)
tgctttgagtgttggaggaagggaggattgatggtttaacagagatcatggcagttatgttcactcatataaatgttgatttagaagctggtggaagggtattttttgagtgacagcttt

SEQ ID NO: 712064 - DNA, 120 bp, Artificial Sequence
  ENSG00000197016_38 (sequence is synthesized)
attgagacaaagcaattctggagaacacccatatccttctctctgtatccatcagcagaagtgaagagggagccccaaagttccacttaaagtgtacaacttatggcttttagttcattc

SEQ ID NO: 712065 - DNA, 120 bp, Artificial Sequence
  ENSG00000197016_39 (sequence is synthesized)
acggagttgtgcaaccatcaccaccatcaattttagaacattttcatcacctcaaagaggaatcccttgtccttttgtagttatggccatccctggaagagtacttttttttttttttca

SEQ ID NO: 712066 - DNA, 120 bp, Artificial Sequence
  ENSG00000197016_40 (sequence is synthesized)
actgaagcacccagagctcttgggttccctcttaactgctttctgtggaagtatagagggccatgtgagggaagccgttatccagagtacatgactgctagaaaatggagtttggggctc

SEQ ID NO: 712067 - DNA, 120 bp, Artificial Sequence
  ENSG00000197016_41 (sequence is synthesized)
cctcttcacttctgctgatagaagcataatggctaggggatgggtagtctcaccagagaatgtggagctttcagactctccttatatatgataaaaaggatttttcattgtagtggggaa

SEQ ID NO: 712068 - DNA, 120 bp, Artificial Sequence
  ENSG00000197016_42 (sequence is synthesized)
aaggtggtttgatcaaatggcattgggaaacttagctcactggaaaaacagatctgtacctttcacactaatgaaatgcctgagatattaaaggtctaaatgtaaaattaaagtacatga

SEQ ID NO: 712069 - DNA, 120 bp, Artificial Sequence
  ENSG00000197016_43 (sequence is synthesized)
aaaacagaataatatatatgtaccctcggtttgaaatagactttaagcactaatgcataaccccaaagctgacattaggcttttatatggtggaaaacatcatagtcaatagataaatga

SEQ ID NO: 712070 - DNA, 120 bp, Artificial Sequence
  ENSG00000197016_44 (sequence is synthesized)
gagactgacacaaagtgtttgcaacagatataataaaggactgtaattcgtgatattcaaagtactattacaaaccaataataatctgcaacttagaaaaatggactaatgtcccattca

SEQ ID NO: 712071 - DNA, 120 bp, Artificial Sequence
  ENSG00000197016_45 (sequence is synthesized)
caaaagatgcaataaaagcagttaatgaaaattatccaatatcactagaaatcaagaaatgcaaattaaagtgattatctactttttccccaaaagactgactaatcgagtgataacatt

SEQ ID NO: 712072 - DNA, 120 bp, Artificial Sequence
  ENSG00000197016_46 (sequence is synthesized)
cagtattggtgaatgtgtggaaacaagggaattccattgttgattacatatctattgctttatgtatataccctttgaattaatattccttggaaaccaacatatacaaaggtagataaa

SEQ ID NO: 712073 - DNA, 120 bp, Artificial Sequence
  ENSG00000197016_47 (sequence is synthesized)
tgtattagtggcaaaaaaattaatggtaaactattaaaacaacaagtgtccatcagggtaataaataaattaattatggtatatatccattcaataggaattatgcagctgttgaaaaaa

SEQ ID NO: 712074 - DNA, 120 bp, Artificial Sequence
  ENSG00000197016_48 (sequence is synthesized)
aatcaatgtgtgtagtcatagaaagatagctgtgctatactaaatgaaaaattgcagacctgtattgtagtataggcccataattgtgatatcaaaaataaaaatcaaaatatatattat

SEQ ID NO: 712075 - DNA, 120 bp, Artificial Sequence
  ENSG00000197016_49 (sequence is synthesized)
agtaggcatttgtttttctctgcccagtttcccttgcctcctccttttggctgcactatctcatcttttccttttgagtaactggccataccctaccatatgtttttgatggacgtggcc

SEQ ID NO: 712076 - DNA, 120 bp, Artificial Sequence
  ENSG00000197016_50 (sequence is synthesized)
aataaaattgtctctgaatttcaaaaggcatttggatctgtgtcatccaatggcaactccctaaaagctgatgcagttattcttttgattggtccttggaaccaccctggtttttgtact

SEQ ID NO: 712077 - DNA, 120 bp, Artificial Sequence
  ENSG00000197016_51 (sequence is synthesized)
ttccaagtctgtgattcctcaaactacccattgtctttccggtacttgatttttgcctcctgttggtcagttgcttgcaagtaaagaaacaatcatacagaatttggtacgaagattggg

SEQ ID NO: 712078 - DNA, 120 bp, Artificial Sequence
  ENSG00000197016_52 (sequence is synthesized)
taatgggcattagaatctttggaaaaatcaggtattgggagttgctttttggatgagatggggcgaataagacttatattctagactggaaagcatctcatggtgtgcgatgagcaaacg

SEQ ID NO: 712079 - DNA, 120 bp, Artificial Sequence
  ENSG00000197016_53 (sequence is synthesized)
cctgattattcattatagtcacctgggatgaatagaggtctagggttctggataatgataatttaaggaggatggagaatgctgaatccaaaaggtatatgtaatactggtatctaactg

SEQ ID NO: 712080 - DNA, 120 bp, Artificial Sequence
  ENSG00000197016_54 (sequence is synthesized)
cttggaataacttaaagtttagctcttgaatttctagcattaaggcaaaaaaaattcacctaagggattttgtatgatattgttgaaagatgtcttacattgtttaaagtcatagggtta

SEQ ID NO: 712081 - DNA, 120 bp, Artificial Sequence
  ENSG00000197016_55 (sequence is synthesized)
agatggctcataaccaaatttagagactatttttatgcattgttaaagtggaatgctggttaaattttatactttattcacaagagtcactgtgaattgaattgtgaattcagttctgaa

SEQ ID NO: 712082 - DNA, 120 bp, Artificial Sequence
  ENSG00000197016_56 (sequence is synthesized)
ttgtgttcccaccagcaccaccaaatgctggcctctaccaccaccaaatttacttgttgaagtcctaaaccccaacatgactgtatttggacataaggcctttaagaaactaaggttaag

SEQ ID NO: 712083 - DNA, 120 bp, Artificial Sequence
  ENSG00000197016_57 (sequence is synthesized)
ttaggccataagagtgaggccctaatcccataggactagtgtccttataagaggaagagacaccagaggtttgtctctccacatgtgcacagaggaaatgctgtgtaaggacacaacaag

SEQ ID NO: 712084 - DNA, 120 bp, Artificial Sequence
  ENSG00000197016_58 (sequence is synthesized)
aatgctgccatctgcaagccaggaggagagacctcaccaggaaccagccctgccagcaccttgatcttggacttttaatctccaggactgtgagaaaataaatgttggttgtttaagcca

SEQ ID NO: 712085 - DNA, 120 bp, Artificial Sequence
  ENSG00000197016_59 (sequence is synthesized)
agtgaggactgtgagtgaggacagaagaagctgaagggaagaaagcattttcagactttgattattagtgctacttggtttctcactacttctttttctccccagctctacaatcccaga

SEQ ID NO: 712086 - DNA, 120 bp, Artificial Sequence
  ENSG00000197016_60 (sequence is synthesized)
ataaaaggagggatgaacagaggcctgtgcccagatatcctgaaaatgccacatcagtaagttgaacaagaagaacgggagctttaagaacaagattcaagatgaaacaacacaagtgtt

SEQ ID NO: 712087 - DNA, 120 bp, Artificial Sequence
  ENSG00000197016_61 (sequence is synthesized)
gaatattttataaatagctaaaggcagaaaacgttgccaattatctcagacttccagaaagtgaaaacaaacaaacaaacaaactaaagtcttaattgaaaagaagaaagaaagacatga

SEQ ID NO: 712088 - DNA, 120 bp, Artificial Sequence
  ENSG00000197016_62 (sequence is synthesized)
agaaagaaatagagaatgcatgttgagagtggggacaggtaagtaccagctggactcttaccctgggctgttggtcctgaggatgcggtataggttcagcctaggcactggctccacccc

SEQ ID NO: 712089 - DNA, 120 bp, Artificial Sequence
  ENSG00000197016_63 (sequence is synthesized)
cagcctaggcactggctccaccccttgaaatagtttggatatttgtccctgcccaaaatctcatgttagattgtaatccccagtgctggagatggggcctggtgggaggtgtttggatca

SEQ ID NO: 712090 - DNA, 120 bp, Artificial Sequence
  ENSG00000197016_64 (sequence is synthesized)
tgctgtcttctcgataatgagtgagttcttgtgagattaggtcctttaaaaatgtgtggcacatttcgccccttctgtcttgctcatgtgtttttgccatgtgatgtgcggctccccttt

SEQ ID NO: 712091 - DNA, 120 bp, Artificial Sequence
  ENSG00000197016_65 (sequence is synthesized)
ccatgtgatgtgcggctcccctttcaccttttgccatgattgtaagcctcctgtggcctccccagaagtcaagcaaatgccaatgtcatgtttgctgtacagcctgcagaactgtgagcc

SEQ ID NO: 712092 - DNA, 87 bp, Artificial Sequence
  ENSG00000197016_66 (sequence is synthesized)
aattaacatcatgccaaacagaaattttctcaggcaaggtttaagaggcttgaagctcaagctatgcaaagtcacttccacattttt

SEQ ID NO: 712093 - DNA, 86 bp, Artificial Sequence
  ENSG00000197016_67 (sequence is synthesized)
caagactggggagaaaaagaggtttaattagatttacagtaccacatggctgaggagacctcagaatcatggtgggaggtgaaagg

SEQ ID NO: 712094 - DNA, 73 bp, Artificial Sequence
  ENSG00000197016_68 (sequence is synthesized)
tcttacatggtggcggcaagagaaaatgtgaaagaagcaaaagcggaacccccgataaacccatcagttgccc

SEQ ID NO: 712095 - DNA, 120 bp, Artificial Sequence
  ENSG00000197016_69 (sequence is synthesized)
gcatgggaaagaccatgccccatgattcagttacctccctctgggtccttcccacaacacgtgggaatcctgggaggtacaattcaagttgagctttggttggggacacagccaaaccat

SEQ ID NO: 712096 - DNA, 120 bp, Artificial Sequence
  ENSG00000197016_70 (sequence is synthesized)
cagccaaaccatatcactatcctttgggaaacataaagttaggttgccaactttatagcacttcccagtttaaattgtaggaggacaagttcccttttttttttttttgagatggagtct

SEQ ID NO: 712097 - DNA, 120 bp, Artificial Sequence
  ENSG00000197016_71 (sequence is synthesized)
agccaccaggcctggccgacaagttcccatttcttactaaagagaagtcttggcaataactgaacaatgtctctggcagtttaccccagaaggacaaactttgacttttacaggaagctg

SEQ ID NO: 712098 - DNA, 120 bp, Artificial Sequence
  ENSG00000197016_72 (sequence is synthesized)
gccaggagtgacataggagccatctgttaagttgaaggaattgacatttctagatcacggtggaaaaactcccaccacccacccaatgtggccttcacactgacatgtttgttgtgttcc

SEQ ID NO: 712099 - DNA, 120 bp, Artificial Sequence
  ENSG00000197016_73 (sequence is synthesized)
gcccaaacagggacagtctgagttacacgcaatttagagtcactcaaattgatccctcagtttttgattaatagcatattggtgttttaaataaagtattttcagaagagtacaaagggc

SEQ ID NO: 712100 - DNA, 120 bp, Artificial Sequence
  ENSG00000197016_74 (sequence is synthesized)
tttaattaaatctgagtaattttaaaggaaatatatgatcaaaaaagaggaaaaatgtgcctcaaaatagacataaatggcttaaatgaatgctaaaactgaaaatcaaaataatttaga

SEQ ID NO: 712101 - DNA, 120 bp, Artificial Sequence
  ENSG00000197016_75 (sequence is synthesized)
atgcacatactaatttggaaacaggtaaaacagacataagagttttatttgtagggggagggtctgtaaagttaattatgtgaacttctgcgttgtaactatgtatttttacaatctact

SEQ ID NO: 712102 - DNA, 120 bp, Artificial Sequence
  ENSG00000197016_76 (sequence is synthesized)
ttctaaaccagatgtgatctccttactggagcaagagaaagacccttgggtgataaaaggagggatgaacagaggcctgtgcccagatcaagaatgctatgtagagaggttgtaactgaa

SEQ ID NO: 712103 - DNA, 120 bp, Artificial Sequence
  ENSG00000197019_0 (sequence is synthesized)
agaactgcgtctcgcgacccaggcgcgggtttccggaggacagccaacaagcgatgctgccgccgccgtttcctgattggttgtgggtggctacctcttcgttctgattggccgctagtg

SEQ ID NO: 712104 - DNA, 120 bp, Artificial Sequence
  ENSG00000197019_1 (sequence is synthesized)
agcaagatgctgagcaagggtctgaagcggaaacgggaggaggaggaggagaaggaacctctggcagtcgactcctggtggctagatcctggccacacagcggtggcacaggcacccccg

SEQ ID NO: 712105 - DNA, 120 bp, Artificial Sequence
  ENSG00000197019_2 (sequence is synthesized)
gccgtggcctctagctccctctttgacctctcagtgctcaagctccaccacagcctgcagcagagtgagccggacctgcggcacctggtgctggtcgtgaacactctgcggcgcatccag

SEQ ID NO: 712106 - DNA, 120 bp, Artificial Sequence
  ENSG00000197019_3 (sequence is synthesized)
gcgtccatggcacccgcggctgccctgccacctgtgcctagcccacctgcagcccccagtgtggctgacaacttactggcaagctcggacgctgccctttcagcctccatggccagcctc

SEQ ID NO: 712107 - DNA, 120 bp, Artificial Sequence
  ENSG00000197019_4 (sequence is synthesized)
ctggaggacctcagccacattgagggcctgagtcaggctccccaacccttggcagacgaggggccaccaggccgtagcatcgggggagcagcgcccagcctgggtgccttggacctgctg

SEQ ID NO: 712108 - DNA, 120 bp, Artificial Sequence
  ENSG00000197019_5 (sequence is synthesized)
ggcccagccactggctgtctactggacgatgggcttgagggcctgtttgaggatattgacacctctatgtatgacaatgaactttgggcaccagcctctgagggcctcaaaccaggccct

SEQ ID NO: 712109 - DNA, 120 bp, Artificial Sequence
  ENSG00000197019_6 (sequence is synthesized)
gaggatgggccgggcaaggaggaagctccggagctggacgaggccgaattggactacctcatggatgtgctggtgggcacacaggcactggagcgaccgccggggccagggcgctgagcc

SEQ ID NO: 712110 - DNA, 120 bp, Artificial Sequence
  ENSG00000197019_7 (sequence is synthesized)
ctcgtgctggaatggttgtctggtatctgaactgagcctgctggctggaccaactgtcctcgaaaagacacagctggcttccctagtacagagaacagggcttgggccactttggagaga

SEQ ID NO: 712111 - DNA, 120 bp, Artificial Sequence
  ENSG00000197019_8 (sequence is synthesized)
gggctggcagggggagcctggaattaccccctagtgatggaatgacagggtctggtggggactgaattccctggccctggggtcatagcttgggctgttccttctctgatacgggaagag

SEQ ID NO: 712112 - DNA, 120 bp, Artificial Sequence
  ENSG00000197019_9 (sequence is synthesized)
accccaatcagatttttcaaattaaagccagtcctgggaaatctcaaatccgtgtgctgctttgtctctgggcaaatgtgaaggcgagataaaaacatcaaacattttattgggcgtagg

SEQ ID NO: 712113 - DNA, 120 bp, Artificial Sequence
  ENSG00000197019_10 (sequence is synthesized)
ctgtgtacgaggcacagtttctaagcacgtcactgtgttaactcatttaatcctataacagccctacaagatcggtagtattatcatccctattttacaggtgagaaaaccaaggttcca

SEQ ID NO: 712114 - DNA, 74 bp, Artificial Sequence
  ENSG00000197019_11 (sequence is synthesized)
ttatcatccctattttacaggtgagaaaaccaaggttccaagattatcacttgaggtgggttttaaattatgaa

SEQ ID NO: 712115 - DNA, 81 bp, Artificial Sequence
  ENSG00000197019_12 (sequence is synthesized)
tcctgggctcaagcgatcctcctaccaggccactttttttttttctttcttttttttttaagacagatttcggctcactgc

SEQ ID NO: 712116 - DNA, 68 bp, Artificial Sequence
  ENSG00000197019_13 (sequence is synthesized)
agtggcgtgaggcctcccaattagctgggaccgactaattttttatattttttgtagagacagggttt

SEQ ID NO: 712117 - DNA, 65 bp, Artificial Sequence
  ENSG00000197019_14 (sequence is synthesized)
cttaaattttatttcttttctttgctagcaggaagtcaaggcaactttttaaaaatgaaagcaag

SEQ ID NO: 712118 - DNA, 120 bp, Artificial Sequence
  ENSG00000197019_15 (sequence is synthesized)
tagcaggaagtcaaggcaactttttaaaaatgaaagcaagtcctcgcctggagtctacctgtatttattgaggagcgaaggggagattgctttcagaatggtcccgaaataaaaacacaa

SEQ ID NO: 712119 - DNA, 120 bp, Artificial Sequence
  ENSG00000197019_16 (sequence is synthesized)
aacctggaccctggacagatcctctccaaggagccctgagagtcggctctccaggaaaatgggggaggaaagggggacaacagcccatttttaaaaataaaattcactcctggtcttaaa

SEQ ID NO: 712120 - DNA, 120 bp, Artificial Sequence
  ENSG00000197020_0 (sequence is synthesized)
gtggccctctgacctgcagatattgggagatccacagctaagacgccaggaccccctagaagcctagaaatggtggacccgaggtatggaatgtgtcctctcaagggagcaagtggatgc

SEQ ID NO: 712121 - DNA, 120 bp, Artificial Sequence
  ENSG00000197020_1 (sequence is synthesized)
tatggaatgtgtcctctcaagggagcaagtggatgccctggggctgagaggagtcttctggtgcagtcttattttgaaaaggggccattgacgtttagggatgtggccatagaattctct

SEQ ID NO: 712122 - DNA, 120 bp, Artificial Sequence
  ENSG00000197020_2 (sequence is synthesized)
ggtttgtataggaaagtgatgttagagaactacagaaacctggtcttcttgggtattgctctcactaagccagacctgatcacctgtctggagcaaggaaaagagccctggaatataaag

SEQ ID NO: 712123 - DNA, 120 bp, Artificial Sequence
  ENSG00000197020_3 (sequence is synthesized)
agacatgagatggtagccaaacccccagttatatgttctcattttccccaagacctttgggcagagcaggacattaaagattcttttcaagaagcgattctgaaaaaatatggaaaatat

SEQ ID NO: 712124 - DNA, 120 bp, Artificial Sequence
  ENSG00000197020_4 (sequence is synthesized)
ggacatgacaatttacagttacaaaaaggctgtaaaagtgtggatgagtgtaaagtgcacaaagaacatgataacaaattaaaccagtgtttgataactacccagagcaacatatttcaa

SEQ ID NO: 712125 - DNA, 120 bp, Artificial Sequence
  ENSG00000197020_5 (sequence is synthesized)
tgtgatccatctgcaaaagtctttcatacattttcaaattcaaacagacataagataagacatactagaaagaaacctttcaaatgtaaaaaatgtgaaaaatcattttgcatgctttta

SEQ ID NO: 712126 - DNA, 120 bp, Artificial Sequence
  ENSG00000197020_6 (sequence is synthesized)
cacctaactcaacataaaagatttcatattacagagaattcctaccaatgtaaagattgtggcaaagccttcaactggttctcaacccttactacacacaggagaattcatactggagag

SEQ ID NO: 712127 - DNA, 120 bp, Artificial Sequence
  ENSG00000197020_7 (sequence is synthesized)
aattcatactggagagaaaccatacagatgtgaagaatgtgggaaagcttttaaccggtcttcacaccttactacacataaaagaattcatactggagtgaaaccctacaaatgtacaga

SEQ ID NO: 712128 - DNA, 120 bp, Artificial Sequence
  ENSG00000197020_8 (sequence is synthesized)
tacacataaaagaattcatactggagtgaaaccctacaaatgtacagaatgtggcaaagcttttaaccggtcctcacaccttactacacacaggataattcatactggagagaaacccta

SEQ ID NO: 712129 - DNA, 74 bp, Artificial Sequence
  ENSG00000197020_9 (sequence is synthesized)
aactcataccgattctcataccttactaaacataagacaagtcatactggagagaaattctacaaatgtgaaga

SEQ ID NO: 712130 - DNA, 88 bp, Artificial Sequence
  ENSG00000197020_10 (sequence is synthesized)
ctcataccttactaaacataagacaagtcatcggcaaaggctttaactggtcctcagccctcactaaacataagagaattcatactgg

SEQ ID NO: 712131 - DNA, 87 bp, Artificial Sequence
  ENSG00000197020_11 (sequence is synthesized)
tacccataagatcgaatgtggcaaagcctttaaccggtcctcacaactaactgcacataagatgattcatactggagagaaacccta

SEQ ID NO: 712132 - DNA, 120 bp, Artificial Sequence
  ENSG00000197020_12 (sequence is synthesized)
ctggagagaaaccctacaaatgtgaggaatgtggcaaagcttttaaccgatcctcaacccttactaaacataagataactcatactggagagaaatcttacaaatgggaagaatgtggta

SEQ ID NO: 712133 - DNA, 120 bp, Artificial Sequence
  ENSG00000197020_13 (sequence is synthesized)
taaacataagataactcatactggagagaaatcttacaaatgggaagaatgtggtaaagactttaaccagtccctaagccttattaaaataactcatactggagagaaaccctacaaatg

SEQ ID NO: 712134 - DNA, 120 bp, Artificial Sequence
  ENSG00000197020_14 (sequence is synthesized)
caactcttactaaacataaaaattcatactggagggaactcctgctgtgaagaatatggcaaagcctttaataaattctcaattcctaacagacataagataattcatactagagagaaa

SEQ ID NO: 712135 - DNA, 120 bp, Artificial Sequence
  ENSG00000197020_15 (sequence is synthesized)
cccctcccccaacaatggcgcagcccaggctgcacccgcgcaagcaggtgcctcctcgctggcagttcacccgcccaccccgcgacccgccccgggcagggctccggcctccctgcacgc

SEQ ID NO: 712136 - DNA, 120 bp, Artificial Sequence
  ENSG00000197020_16 (sequence is synthesized)
ctgcacgctcgccgcgctgccgctgcctccgcctccccaagctgactcatctggagataattatgtgtttttctctttcgttctctttatgtgatggattacatttattgatttacatat

SEQ ID NO: 712137 - DNA, 120 bp, Artificial Sequence
  ENSG00000197020_17 (sequence is synthesized)
aaagccttttaccagtcctcaactcttactaaacataaaaaaattcatactggagggaactcctgtgactgtgaagaatatggcaaagcctttaataaattctcaattcctaacagacat

SEQ ID NO: 712138 - DNA, 120 bp, Artificial Sequence
  ENSG00000197020_18 (sequence is synthesized)
aagataattcatactagagagaaattctacaaaccagaaagatgtgacagtgctttgaaaacacctcaaacttttcaaaacataaatcatagtgttgagaaatcctagaaatgtgaagaa

SEQ ID NO: 712139 - DNA, 120 bp, Artificial Sequence
  ENSG00000197020_19 (sequence is synthesized)
tgtgataaagttttaaatggttgtcacacttgattgtaggtaaggtaagttatactggagaaaacttctacatgtgtgaacagtgtgacaaaacttttaactaatgctcacaccttcaca

SEQ ID NO: 712140 - DNA, 120 bp, Artificial Sequence
  ENSG00000197020_20 (sequence is synthesized)
ggaaagcatttatacttgagaaatattgtacaaatataaagactgtgaaaaagccattaatacatgctcacatcttactcaacatcagagagttcatactcaataaaaacataagtgcaa

SEQ ID NO: 712141 - DNA, 120 bp, Artificial Sequence
  ENSG00000197020_21 (sequence is synthesized)
aggttttgctctcacttctctgtgtcttctgctcctaggggcctagcctgtgtggccctctgacctgcagatattgggagatccacagctaagacgccaggaccccctagaagcctagaa

SEQ ID NO: 712142 - DNA, 60 bp, Artificial Sequence
  ENSG00000197020_22 (sequence is synthesized)
agccaaacccccagacggagtctcgctctgtcatcaagcttcctgcctcagcctcctgag

SEQ ID NO: 712143 - DNA, 120 bp, Artificial Sequence
  ENSG00000197020_23 (sequence is synthesized)
atatctttaagaaaatataagcttttaaagtgaagagtattttgaagaagaacattgtagtagaattgtaatatgtttacttgtatcacagatcttactgtacacgttttgtattagagg

SEQ ID NO: 712144 - DNA, 120 bp, Artificial Sequence
  ENSG00000197020_24 (sequence is synthesized)
aaacctctgaagcagttgctcaaactttgttcaatatcagggaatttatattgaaaaaaactgtgcgaatgtaataaagttggaaaaatactttttcaaaaactacagcttagaaaacac

SEQ ID NO: 712145 - DNA, 120 bp, Artificial Sequence
  ENSG00000197020_25 (sequence is synthesized)
cagagagttcatactaaaacatatttttgcagatacaggaaaaattttttaaaaattttaatcattaagtctgtaaatatcagagaatttacagtagaaatatgtaaggcactgatgctt

SEQ ID NO: 712146 - DNA, 120 bp, Artificial Sequence
  ENSG00000197020_26 (sequence is synthesized)
caggtattttactaaatcagagtgctgagtatagaaaataatctaaaactaaaattggtaaaatatttgtatataactttaaaagtagaaattttttgcagttattgcattcaaagtatg

SEQ ID NO: 712147 - DNA, 120 bp, Artificial Sequence
  ENSG00000197020_27 (sequence is synthesized)
tcaactcttaaattatttcctgccttttcttcactcctatttacatgtgaaagcatgtgatcaattgttgctgcatcagatatgagagattcttttttattaggtgagcattatttataa

SEQ ID NO: 712148 - DNA, 120 bp, Artificial Sequence
  ENSG00000197020_28 (sequence is synthesized)
actttgctatgaaaaagacattaaaatatgagatgtatgatgaaaatctaagtgaagagacttttatggttaacttataatattaagcaatgtgtgcgttaggcattcagagtaatattc

SEQ ID NO: 712149 - DNA, 120 bp, Artificial Sequence
  ENSG00000197020_29 (sequence is synthesized)
aagcaatgtgtgcgttaggcattcagagtaatattctgcattatgagaaaacttaatttcatttataagtaaattaaaattagtatattttactaatacttttatataaaatgcagtata

SEQ ID NO: 712150 - DNA, 120 bp, Artificial Sequence
  ENSG00000197020_30 (sequence is synthesized)
ttcaacctttttaacatgttaaatactattgtgcattcagtgaagtgttattatgccacagacattaacctattccaccttactcaagggtgtacgtaaaacatggtaacagtatactat

SEQ ID NO: 712151 - DNA, 120 bp, Artificial Sequence
  ENSG00000197020_31 (sequence is synthesized)
ttggtaacataatggattaacatctctagtaatctcttttgctagtggctttgactgcaaataagttaaagaatattatttctgtaggttaaatttttgtttttattttattttattttt

SEQ ID NO: 712152 - DNA, 77 bp, Artificial Sequence
  ENSG00000197020_32 (sequence is synthesized)
taatgtaagtcaagctggtctcgaactcctgaccttaaatgatttgcctgcctcggcttcccaaagttctgggatta

SEQ ID NO: 712153 - DNA, 120 bp, Artificial Sequence
  ENSG00000197020_33 (sequence is synthesized)
caggcatgagccaccgtgcccagccaaatgtttattttatttaaatttatttttcttaattatttggggtacataatatgagtatatattcatgcaatatatggcatattttgatacaag

SEQ ID NO: 712154 - DNA, 120 bp, Artificial Sequence
  ENSG00000197020_34 (sequence is synthesized)
catattttgatacaagaatacagtatataataatcacatcagggtaaatgaggtatccatcacctctagtatttatcctttgtattacaagcaacccagttttatacttttagttatttt

SEQ ID NO: 712155 - DNA, 120 bp, Artificial Sequence
  ENSG00000197020_35 (sequence is synthesized)
aaaatgtaaaattaaattgttattgattacagtgttatttttatggtcataataaaagttatgtagaagtataataaaatccctacatttctgaggcctgaataagtatttttaaagttt

SEQ ID NO: 712156 - DNA, 120 bp, Artificial Sequence
  ENSG00000197020_36 (sequence is synthesized)
tctaatatttattttttgagcatgtttcctgtctgcctgcaaacacatgcagacatttagttttgatttacatatagttaaatatatgttagtctaaagataaaccttaagtgtaagaaa

SEQ ID NO: 712157 - DNA, 120 bp, Artificial Sequence
  ENSG00000197020_37 (sequence is synthesized)
attatagagtgagtttgtgtgtatgaatttgtacctgttttccgaagaaaaaagcaatactgaacaaaacaaatcattttaacaagatgactactagaaaactaaaagcctcaaaaatgc

SEQ ID NO: 712158 - DNA, 120 bp, Artificial Sequence
  ENSG00000197020_38 (sequence is synthesized)
taaaagaaaatgtattctctgctttgtattgaatttattactgtacattctgtggcttatagttctgaatctccccatgaaaattctgtttatacttgcctggtactcatgatagacccc

SEQ ID NO: 712159 - DNA, 120 bp, Artificial Sequence
  ENSG00000197020_39 (sequence is synthesized)
cccctaattattttgtatcttttttcatataaatattttacagattatgaagtattcattatgtgagctggtctgtgattataagaataatttttacaaaatttagtgcatacaaaattt

SEQ ID NO: 712160 - DNA, 120 bp, Artificial Sequence
  ENSG00000197020_40 (sequence is synthesized)
atgtaattccacaattagtgtattaagttacattttatttagttagaacacttcattttgtttttagttggagaactctatagccctttagttatttttcttttcactttttatagttga

SEQ ID NO: 712161 - DNA, 120 bp, Artificial Sequence
  ENSG00000197020_41 (sequence is synthesized)
cataagtaaatttatttattgagtcaatttgttcaggtaagtactagggaagctttataagtcgtgaggatgtttttatatttaaatgtagcaaacatacatgacagttcttgctgtgta

SEQ ID NO: 712162 - DNA, 120 bp, Artificial Sequence
  ENSG00000197020_42 (sequence is synthesized)
acagatgctccatagtaagccataagtattcctgctaaagttagcttgtaacttcagttcagagatggaaaacatcagtggtgaagaaataaaattgattcttcatgtggagaggacata

SEQ ID NO: 712163 - DNA, 120 bp, Artificial Sequence
  ENSG00000197020_43 (sequence is synthesized)
gtttccaggctgcaatgctgaatcttgctgaatttaaagagaagttctgcatcttttatttcttaattatcttcagatttctctgtatttattatgtgtatccccagctatgtatgcagc

SEQ ID NO: 712164 - DNA, 120 bp, Artificial Sequence
  ENSG00000197020_44 (sequence is synthesized)
acagcccatctcctttttctgtgttatggcttcagttttctcactgttgtcttaatgccatttcatttcacatggtactttgtaaattttgacgagaaagttggttgttttttttttttt

SEQ ID NO: 712165 - DNA, 65 bp, Artificial Sequence
  ENSG00000197020_45 (sequence is synthesized)
acaggcacctgccaccacatctggctgaatttttttttttttaattttttatgatccacctgcct

SEQ ID NO: 712166 - DNA, 120 bp, Artificial Sequence
  ENSG00000197020_46 (sequence is synthesized)
attacaggcataagccactgcacccagctgaaagttggtattttttaatgcactgaataattgtttttaactggagagtttggttatcaatataactttcggattagttaagataaaagc

SEQ ID NO: 712167 - DNA, 120 bp, Artificial Sequence
  ENSG00000197020_47 (sequence is synthesized)
aatataactttcggattagttaagataaaagcatacattgtccacaggtgagaagattaaatcagaatagttgttctttgttaaaaaaaaaattagattcttaaagtgtggcaaacataa

SEQ ID NO: 712168 - DNA, 80 bp, Artificial Sequence
  ENSG00000197020_48 (sequence is synthesized)
agtgtggcaaacataaaatttgcaagaaaatgtagaaattaaatttttaagagttaatggtaagtgaacaattttaaatt

SEQ ID NO: 712169 - DNA, 120 bp, Artificial Sequence
  ENSG00000197020_49 (sequence is synthesized)
ggtatggaatgtgtcctctcaagggagcaagtggatgccctggggctgagaggagtcttctggtgcagtcttattttgaaaagggtctggatgtcgcccagactggagtgcagtagcatg

SEQ ID NO: 712170 - DNA, 120 bp, Artificial Sequence
  ENSG00000197020_50 (sequence is synthesized)
cgccaccatatccagctaattatttttatttattattattttttacagacaggggctcactgtgttgactagactggtcttgaactgctgcgctcaagtaatcctcccacctcagcctcc

SEQ ID NO: 712171 - DNA, 120 bp, Artificial Sequence
  ENSG00000197020_51 (sequence is synthesized)
catgaatcactatgcccggtgcatttcttttgcatttaattttgcatttttctaagagatggggtcccgatatgttgtccaggttgaagtgcagtagctatttctataggcaccatcacg

SEQ ID NO: 712172 - DNA, 120 bp, Artificial Sequence
  ENSG00000197021_0 (sequence is synthesized)
atgacctttcctctttatcttccttgttgtgcaggtaaagaaaccaagtggaagagtgtttcctcctctggccgtaaagcagctgtccccgccctactccggaccgccccaaagactcca

SEQ ID NO: 712173 - DNA, 120 bp, Artificial Sequence
  ENSG00000197021_1 (sequence is synthesized)
tgggatggacctgagtcagccgaatcctagccccttcccttgggcctgctgtggtgctcgacatcagtgacagacggaagcagcagaccatcaaggctacgggaggcccggggcgcttgc

SEQ ID NO: 712174 - DNA, 120 bp, Artificial Sequence
  ENSG00000197021_2 (sequence is synthesized)
gaagatgaagtttggctgcctctccttccggcagccttatgctggctttgtcttaaatggaatcaagactgtggagacgcgctggcgtcctctgctgagcagccagcggaactgtaccat

SEQ ID NO: 712175 - DNA, 120 bp, Artificial Sequence
  ENSG00000197021_3 (sequence is synthesized)
cgccgtccacattgctcacagggactgggaaggcgatgcctgtcgggagctgctggtggagagactcgggatgactcctgctcagattcaggccttgctcaggaaaggggaaaagtttgg

SEQ ID NO: 712176 - DNA, 120 bp, Artificial Sequence
  ENSG00000197021_4 (sequence is synthesized)
acctgaagcagaagtacctgactgtgatttcaaaccccaggtggttactggagcccatacctaggaaaggaggcaaggatgtattccaggtagacatcccagagcacctgatccctttgg

SEQ ID NO: 712177 - DNA, 120 bp, Artificial Sequence
  ENSG00000197021_5 (sequence is synthesized)
ggcatgaagtgtgacaagtgtgggctcctgaaaggaatgttccagagaaaccagctaaatcatggcaccttcaatttgccatcgtgacgcagacctgtataaattaggttaaagatgaat

SEQ ID NO: 712178 - DNA, 120 bp, Artificial Sequence
  ENSG00000197021_6 (sequence is synthesized)
ttccactgctttggagagtcccacccactaagcactgtgcatgtaaacaggttcctttgctcagatgaaggaagtagggggtggggctttccttgtgtgatgcctccttaggcacacagg

SEQ ID NO: 712179 - DNA, 120 bp, Artificial Sequence
  ENSG00000197021_7 (sequence is synthesized)
caatgtctcaagtactttgaccttagggtagaaggcaaagctgccagtaaatgtctcagcattgctgctaattttggtcctgctagtttctggattgtacaaataaatgtgttgtagatg

SEQ ID NO: 712180 - DNA, 120 bp, Artificial Sequence
  ENSG00000197021_8 (sequence is synthesized)
ggagctgcatgaaagccgaagttatggaccgctagcatctgtcactggccaccggtttccgggagtaagcggcagctaccttacagccctgacacgagccgggtgctctctcttctcacc

SEQ ID NO: 712181 - DNA, 120 bp, Artificial Sequence
  ENSG00000197021_9 (sequence is synthesized)
gcggcccacgtctcctcgctggctccggtggcctcgctgggtcgcgaggaggcggaggactgtactctgaggccaaaagccagagtcggccctgaacgcccacgactctcagggtccaga

SEQ ID NO: 712182 - DNA, 120 bp, Artificial Sequence
  ENSG00000197021_10 (sequence is synthesized)
ggccgtgagaccggccgcggctgaaaggtaaagaaaccaagtggaagagtgtttcctcctctggccgtaaagcaggtactctctgcagcaccagctgtccccgccctactccggaccgcc

SEQ ID NO: 712183 - DNA, 120 bp, Artificial Sequence
  ENSG00000197021_11 (sequence is synthesized)
tgaagaacctccctctggaagagatccttgtcgatgatcacggcgtctccatcatcgttccagctcacagacttgaatgtgtcttcctccacaatcgtccaaagctttcttgggaaggag

SEQ ID NO: 712184 - DNA, 120 bp, Artificial Sequence
  ENSG00000197021_12 (sequence is synthesized)
agcctaaaaaggttgtggttgtcttccacgttgaccacgcgttggtttcggtcttctggtggtgagttatcttgggagcctggatcttggctcatggcttggtcctcgtgcctgtccaaa

SEQ ID NO: 712185 - DNA, 120 bp, Artificial Sequence
  ENSG00000197021_13 (sequence is synthesized)
acctcgctggaatctggatttggatcaggtgaagaaccagatgggcccccgcttgttggctctccaccaacagatggggccagcttggcttcatattcctgttcagtgttctgactcgcc

SEQ ID NO: 712186 - DNA, 120 bp, Artificial Sequence
  ENSG00000197021_14 (sequence is synthesized)
atggagctacaccagaatcaggagcattttgtacccaaggcccttatcactgtcctagcaagtccaaaatgccttcagtcagagtaggcgtgcccaataaatactgtccacaaaattcta

SEQ ID NO: 712187 - DNA, 120 bp, Artificial Sequence
  ENSG00000197021_15 (sequence is synthesized)
ggagagcagtggtgggggaaggggcttgaggaaggtggcacccagaggggtggagaggagatgtctgactgagggccatctgaggtcacggtgcatcctgaggacagagctgagattgga

SEQ ID NO: 712188 - DNA, 120 bp, Artificial Sequence
  ENSG00000197021_16 (sequence is synthesized)
tccccggccttgtcctggttggctggcgcgggacaggatccggtaaactgaacagcgtctccttgtggcaagtgcgtgcgtacgtgcgtggcgacgtcactgcgtggcttcgtgaatacg

SEQ ID NO: 712189 - DNA, 120 bp, Artificial Sequence
  ENSG00000197021_17 (sequence is synthesized)
tggcttcctagcgatttggcggtgtataggcgtggctgaatacgggcctcctgcgtacgtgcgtggtgtacgtacgtgcgtgattacgcgcacacgtacgttcctcatgaaagggacgac

SEQ ID NO: 712190 - DNA, 120 bp, Artificial Sequence
  ENSG00000197024_0 (sequence is synthesized)
gcactcgctgcccacaaagcgccagctgaggggccgctgcgggtggagtgcggcggagtcggcctcgcgaccccagcttgatccgccgcctgctgcaccgcgcctccgccgcgttcctgc

SEQ ID NO: 712191 - DNA, 80 bp, Artificial Sequence
  ENSG00000197024_1 (sequence is synthesized)
gcgtcccgagccccgacggccgcgtgagtcccgtccgtgcggggaaggcagggccgggtcggcgccgcctgtggagagga

SEQ ID NO: 712192 - DNA, 120 bp, Artificial Sequence
  ENSG00000197024_2 (sequence is synthesized)
cggcggcagcggcggcgacttccgaggcccgggctagacagcgcagggccatggctgaggcggccccggccccgacatctgaatgggactccgagtgccttacatccctgcagccccttc

SEQ ID NO: 712193 - DNA, 120 bp, Artificial Sequence
  ENSG00000197024_3 (sequence is synthesized)
ctcttcctacacccccagcagcaaatgaggcacacctgcagacagcagctatctctctgtggacagtggtggccgccgtgcaggctatagagaggaaggtggagatccacagccggcgac

SEQ ID NO: 712194 - DNA, 120 bp, Artificial Sequence
  ENSG00000197024_4 (sequence is synthesized)
tcctacacctggaaggtcggacagggacagcagagaagaaactagccagctgtgaaaagacagttaccgagcttgggaaccagctggagggcaagtgggccgtgctgggaaccctgctgc

SEQ ID NO: 712195 - DNA, 120 bp, Artificial Sequence
  ENSG00000197024_5 (sequence is synthesized)
aggagtacgggctgctgcagaggcggctggagaacttggagaacctgctgcgcaacaggaacttctggatcctgcggctccctccaggtattaagggagatatcccaaaggtgcctgtgg

SEQ ID NO: 712196 - DNA, 120 bp, Artificial Sequence
  ENSG00000197024_6 (sequence is synthesized)
catttgatgatgtctccatctacttttccactccagagtgggaaaaattagaagaatggcaaaaggaactttacaagaatatcatgaagggcaactacgagtctctcatctccatggatt

SEQ ID NO: 712197 - DNA, 120 bp, Artificial Sequence
  ENSG00000197024_7 (sequence is synthesized)
atgctataaatcaacctgatgtcttatctcagattcaaccagaaggggaacataatacagaggaccaggcagggccagaggaaagtgagattcccacagaccccagtgaagagcctggta

SEQ ID NO: 712198 - DNA, 120 bp, Artificial Sequence
  ENSG00000197024_8 (sequence is synthesized)
tttcaacatcagatattctgtcttggattaaacaagaagaagagcctcaggttggggccccaccggagtccaaggagagtgacgtgtacaaaagcacttatgctgatgaagagcttgtca

SEQ ID NO: 712199 - DNA, 120 bp, Artificial Sequence
  ENSG00000197024_9 (sequence is synthesized)
tcaaagctgaaggccttgctagatcctcgttgtgccctgaggttccagtccctttctcttctccaccagcagcagcaaaggatgctttttcagatgtggctttcaaaagccagcagtcta

SEQ ID NO: 712200 - DNA, 120 bp, Artificial Sequence
  ENSG00000197024_10 (sequence is synthesized)
catccatgacaccttttggacgtccagccactgacctgcctgaagcctctgagggacaagtgacttttactcagttgggtagctatcccctcccacctccagttggcgagcaggtgttct

SEQ ID NO: 712201 - DNA, 120 bp, Artificial Sequence
  ENSG00000197024_11 (sequence is synthesized)
catgccaccactgtggcaagaatctcagccaagacatgttgctgacccaccaatgtagccatgctactgagcaccccttaccctgtgcccagtgccctaagcactttactccacaggcgg

SEQ ID NO: 712202 - DNA, 120 bp, Artificial Sequence
  ENSG00000197024_12 (sequence is synthesized)
acctcagcagcacctcccaggaccatgccagcgagacaccccccacctgcccacactgtgccaggacttttactcacccatcaagacttacctaccatcttcgggtccataacagcactg

SEQ ID NO: 712203 - DNA, 120 bp, Artificial Sequence
  ENSG00000197024_13 (sequence is synthesized)
agcgtcctttcccctgtcctgattgccccaagcgctttgctgaccaggctcgactcaccagccaccggagagctcatgcaagcgaaaggcccttccgctgtgcccagtgcggcaggagct

SEQ ID NO: 712204 - DNA, 120 bp, Artificial Sequence
  ENSG00000197024_14 (sequence is synthesized)
tcagcttgaaaatcagcctcctgctccaccagcggggtcatgcacaagagcgccctttctcctgccctcagtgtggcattgacttcaacggccactcggccctgatccgccaccagatga

SEQ ID NO: 712205 - DNA, 120 bp, Artificial Sequence
  ENSG00000197024_15 (sequence is synthesized)
tccacacaggcgagcgtccttacccctgcactgactgcagtaagagcttcatgcgcaaggagcacctgctgaaccaccggcggctgcacacaggcgagcggcccttcagttgtcctcact

SEQ ID NO: 712206 - DNA, 120 bp, Artificial Sequence
  ENSG00000197024_16 (sequence is synthesized)
gtggcaagagcttcatccgcaagcaccacctaatgaaacaccagcgcatccacaccggggagcggccctacccctgctcctactgtggcaggagcttccgctacaaacagacactcaagg

SEQ ID NO: 712207 - DNA, 120 bp, Artificial Sequence
  ENSG00000197024_17 (sequence is synthesized)
accacctccgttcaggccacaatggaggctgtgggggtgatagtgacccatcaggtcagccacccaacccaccaggtcccctcataactgggcttgaaacttctggcctgggtgtcaaca

SEQ ID NO: 712208 - DNA, 120 bp, Artificial Sequence
  ENSG00000197024_18 (sequence is synthesized)
ctgaaggtctagagaccaaccagtggtatggggaagggagtggagggggagttttgtaaatccaaatctctgtggcttcatgcttgtatatgctcacagcagggcacaaaatccaagaga

SEQ ID NO: 712209 - DNA, 120 bp, Artificial Sequence
  ENSG00000197024_19 (sequence is synthesized)
aggtctgtgagccccatccaacacccacagtaattattatctggcacatcaatgaatttggggtcctatacacttgactagagacatgcttgtgttttggaatttcacacccttacaaga

SEQ ID NO: 712210 - DNA, 120 bp, Artificial Sequence
  ENSG00000197024_20 (sequence is synthesized)
ataccacattttgaaacccagaaagacctggaaaggagcccagcatgtccatcttttcaaagatacaacaaaagcagaagttacaagaatattgcggagaggttggaaagcaggatttaa

SEQ ID NO: 712211 - DNA, 120 bp, Artificial Sequence
  ENSG00000197024_21 (sequence is synthesized)
cctctagttctcttgttctcagagaacagcaggttgatagtagattatgtctctaggtagagacagatacatgagaagagcctccaaaactggaagcccatcataaggcatgagaatgtt

SEQ ID NO: 712212 - DNA, 120 bp, Artificial Sequence
  ENSG00000197024_22 (sequence is synthesized)
aagccactgtttatgttgctgcctcctctctcaaaaccagccaagatctgttcacacacctctgtggctgtctttccctgaaacatggtaactcaagactgcctgcctaggtttcttaga

SEQ ID NO: 712213 - DNA, 120 bp, Artificial Sequence
  ENSG00000197024_23 (sequence is synthesized)
ttaattattcacataaattttgtttaatattggttgaacaagaaatctgactttaaaagattattaaggagaatattccttaactatactggcttgatttgaaacaggctcttattgcca

SEQ ID NO: 712214 - DNA, 120 bp, Artificial Sequence
  ENSG00000197024_24 (sequence is synthesized)
tttaaactgccagaaatctttgccaaggtcctggttaaaaaaattggaaacggttttcttagccccagctttaaaagctagagatctcagagaaatagctggcttaacaatgacagaaca

SEQ ID NO: 712215 - DNA, 120 bp, Artificial Sequence
  ENSG00000197024_25 (sequence is synthesized)
gcttaaaatttgtgcctacaccatgttctgagagtcgttcacatcaaattcttatcttttccaagccagtaagttggcttctccattcctggtgtctgatattcttgacaatcatcagca

SEQ ID NO: 712216 - DNA, 120 bp, Artificial Sequence
  ENSG00000197024_26 (sequence is synthesized)
acaaagatcacagcactttccagaagcatggagcttcagaaagtgccagtgaactcttggtcctcagtagtgagatgataacagtgttataatgcagcttccttgagccatcagagagag

SEQ ID NO: 712217 - DNA, 120 bp, Artificial Sequence
  ENSG00000197024_27 (sequence is synthesized)
tgtatgttcaccctatctggctgtatcccattggcagtggacagattgaggaaattcctagatcactgagagctaagcaccatgcatagacaacagtttgttcttgcctgtgttgctttt

SEQ ID NO: 712218 - DNA, 120 bp, Artificial Sequence
  ENSG00000197024_28 (sequence is synthesized)
agggactttgactaccacatgttcttttcttggggtgatttaatcacctgggagcatctgagtctgctcctaagtggctttgcaactgggcctaagttctgtttcctttatggatctcaa

SEQ ID NO: 712219 - DNA, 120 bp, Artificial Sequence
  ENSG00000197024_29 (sequence is synthesized)
attttcatctgcacaatgaggctgttgaaaggaaaaaaagtgagcctctaggaattattcaaaaaaagtctgtgatacattccttttcctgccaaagttctgtctctgtctttggcttct

SEQ ID NO: 712220 - DNA, 120 bp, Artificial Sequence
  ENSG00000197024_30 (sequence is synthesized)
gtccaggcaaagctaaataagacagcaaagtcaaagcagataaattcttgttgaaacttgactaaaatttatttgatttgttgttttactcccacttggaatcctgaggtagaagacaga

SEQ ID NO: 712221 - DNA, 120 bp, Artificial Sequence
  ENSG00000197024_31 (sequence is synthesized)
atgcagaagtcttacatcttgggcaggaaactggtttattcctatactcttgtttcctctgcttcttcctgaggtctagaacaaggtctggaaatgtttagacaggatattttcttgatg

SEQ ID NO: 712222 - DNA, 120 bp, Artificial Sequence
  ENSG00000197024_32 (sequence is synthesized)
aagtgataaggaaaggacccatttttttgctcatcacctagcccatccttcactctctctagttatgcataacaacactagaagaaggtgttagcccagctaactttgcttctgggaagg

SEQ ID NO: 712223 - DNA, 120 bp, Artificial Sequence
  ENSG00000197024_33 (sequence is synthesized)
ctatgtctgaacatgttgctctgtaggataatcacacttagaaaacatctgctccatgacattcacaataccagggaccatgggagacacaagaaatgtgtgtctgctgtcataacttac

SEQ ID NO: 712224 - DNA, 120 bp, Artificial Sequence
  ENSG00000197024_34 (sequence is synthesized)
agtgaaaaagcccaataatacagaacaagacatgatgggcaataccctagcatattgggattaagagctttctagccagaatctggacctataccatgggaaaatttaggggtgctggga

SEQ ID NO: 712225 - DNA, 120 bp, Artificial Sequence
  ENSG00000197024_35 (sequence is synthesized)
atcccaaagccaaggttctggcttcattggcaacccactaggaacttgaatgtgagattcagctctagtttgcaccttgatttccccagtgaaaagggagaagagccaaagtattgtcta

SEQ ID NO: 712226 - DNA, 120 bp, Artificial Sequence
  ENSG00000197024_36 (sequence is synthesized)
ggtgctgagttcccttttctgagtggatttcaagcatttgccagggtatgctggaggagggactcctaaagtaggtgagatgtgggactaggtaacactttaaatacttttttactcaaa

SEQ ID NO: 712227 - DNA, 120 bp, Artificial Sequence
  ENSG00000197024_37 (sequence is synthesized)
gatttgccaagaacacagcttattagtgaaagagacctgtggattgaaatggctgcagatagatcccgcagtcccttctgaaaggaactgtgtagccagcagggacctaaactttggcaa

SEQ ID NO: 712228 - DNA, 120 bp, Artificial Sequence
  ENSG00000197024_38 (sequence is synthesized)
aaagtgaacacaattcaaatacgaatgaaggaagagccctcagatggaacgaaaggcgatgtgcaaggccatcccagagagacggaagcaggtgcgatactaagcctcagcccaagaata

SEQ ID NO: 712229 - DNA, 120 bp, Artificial Sequence
  ENSG00000197024_39 (sequence is synthesized)
aaagagagttcaactgttactcttttctttcatcaatcccctatcagttagaactgcaggccagttccaaagagtgtttgcttaagattcaaaagtgggtaagtaaaatggatcagtggg

SEQ ID NO: 712230 - DNA, 120 bp, Artificial Sequence
  ENSG00000197024_40 (sequence is synthesized)
aaggataaggtgtccaacagaaagtgtggaggagaaactcttggcctatcaagtgctcctgagagaaaccatgcaatttaacacttcagttaaagaaatacatgagaactgcttgtcatg

SEQ ID NO: 712231 - DNA, 120 bp, Artificial Sequence
  ENSG00000197024_41 (sequence is synthesized)
accagacaagataggaaaggggaaaccccagaaacgtgctcttcatctgtcagccttttggaccaagaagctgtcactatcacacataagcaccattcccttagagtggatccaggtgtt

SEQ ID NO: 712232 - DNA, 120 bp, Artificial Sequence
  ENSG00000197024_42 (sequence is synthesized)
gactataaccagatttactctttgcttactaggttttccattgtcaccattggatgaacctctggtttagccacagttgtgaaaataaatggaagttggttgattgtctagaaagtgcaa

SEQ ID NO: 712233 - DNA, 120 bp, Artificial Sequence
  ENSG00000197024_43 (sequence is synthesized)
gaagatggccctgctccttttctgctgaacatttagtattggaaactcctacttcccttttcattaataatgtgtgcaagtttcctattagcggggaaggtgtggggctctgctgggctt

SEQ ID NO: 712234 - DNA, 120 bp, Artificial Sequence
  ENSG00000197024_44 (sequence is synthesized)
ctcttgagcatatctgagaagtgatgttcatgtctatctcaaccaggaccagaccctgtgacttactcggtaataacagtccacacaagcctcgttgatattaaaaaaaaaaaaaaaaaa

SEQ ID NO: 712235 - DNA, 120 bp, Artificial Sequence
  ENSG00000197024_45 (sequence is synthesized)
tcggtcctcagaggaggggcccgggcaccctccgtgcgggccgcagcacgccggtctttgagggacccttggactcccggatctgcatgcgagggatgcggtcgaagacgagatgaggga

SEQ ID NO: 712236 - DNA, 120 bp, Artificial Sequence
  ENSG00000197024_46 (sequence is synthesized)
gctgacgggaggggaaacggaggggcaggtgaacatggagagagcaggaacagggagagagtagggacagcgactgggagacgcgctccacagaaacccggactgagaggcagcgagagg

SEQ ID NO: 712237 - DNA, 74 bp, Artificial Sequence
  ENSG00000197024_47 (sequence is synthesized)
acgcgctccacagaaacccggactgagaggcagcgagaggacgtagtcttgctctgttgcctaggctggagtag

SEQ ID NO: 712238 - DNA, 120 bp, Artificial Sequence
  ENSG00000197024_48 (sequence is synthesized)
ggccgcgggagcgttcgtcaccagcaatctgagcggtggcgcgggcggcatttaagtgtgcggaggcgcattcccgccgcgctgcgtgacgcctgggctcccggcaccggactcgggaca

SEQ ID NO: 712239 - DNA, 120 bp, Artificial Sequence
  ENSG00000197024_49 (sequence is synthesized)
gcctgcacgcagccccgtagaatgagaaggggacggtcaggccgcggggaaagcactgatcgcatttgccacccaagaggtctttggtcacctctaggagagcaattgtactgggcacgc

SEQ ID NO: 712240 - DNA, 120 bp, Artificial Sequence
  ENSG00000197024_50 (sequence is synthesized)
acatttccgctgttctaaatacggctgcccttcagcagaagctgttgcctgcagacggcgcctgcgtatcgagcctccgtgaagaaaatcactccccagaatgagcccggctttgcggct

SEQ ID NO: 712241 - DNA, 120 bp, Artificial Sequence
  ENSG00000197037_0 (sequence is synthesized)
gttctcaaaagggtcattgatgcagtcattctcagtctcctcggagggagtctgaagatgcttaaagagcatccagagatggcggaagctcctcagcagcagttgggtattcctgtggtg

SEQ ID NO: 712242 - DNA, 120 bp, Artificial Sequence
  ENSG00000197037_1 (sequence is synthesized)
aaactggagaaagagttgccatggggcagaggaagggaggaccctagtccagagacttttcggctgaggtttcggcagttccgctaccaggaggcagctggaccccaggaagctcttagg

SEQ ID NO: 712243 - DNA, 120 bp, Artificial Sequence
  ENSG00000197037_2 (sequence is synthesized)
gagctccaggagctctgtcgtcggtggctgaggcccgagttgcacaccaaggagcagatcctggagctgctggtgctggagcagttcctcactatcctgccccgcgagttctacgcctgg

SEQ ID NO: 712244 - DNA, 120 bp, Artificial Sequence
  ENSG00000197037_3 (sequence is synthesized)
atccgggagcatggcccagagagtggcaaggccctggccgccatggtggaggacctgacagaaagagcactggaggccaaggcggttccatgccacaggcagggagagcaggaggaaaca

SEQ ID NO: 712245 - DNA, 120 bp, Artificial Sequence
  ENSG00000197037_4 (sequence is synthesized)
gcactttgcagaggcgcttgggagccaggcatccagctggggccagtggaggtcaagcctgaatgggggatgccccctggggaaggagttcaaggtccagacccaggtaccgaggagcag

SEQ ID NO: 712246 - DNA, 120 bp, Artificial Sequence
  ENSG00000197037_5 (sequence is synthesized)
ctcagtcaggaccctggagatgagacacgggccttccaggagcaagcactacctgttctgcaggcgggtcctggcctccccgcagtgaatcccagagaccaagagatggcagctgggttc

SEQ ID NO: 712247 - DNA, 120 bp, Artificial Sequence
  ENSG00000197037_6 (sequence is synthesized)
tttactgctggatcgcaggggttggggccatttaaagatatggccctggccttccctgaggaggagtggaggcatgtgaccccagcccagatagactgctttggggagtatgtggaaccg

SEQ ID NO: 712248 - DNA, 120 bp, Artificial Sequence
  ENSG00000197037_7 (sequence is synthesized)
caggactgcagggtctctccaggcggtgggagcaaggaaaaggaggcaaaacccccacaggaagacctgaaaggggcgctggtggcactgacatcagagaggtttggggaagcctctctc

SEQ ID NO: 712249 - DNA, 120 bp, Artificial Sequence
  ENSG00000197037_8 (sequence is synthesized)
cagggccctgggctcggaagggtctgtgagcaggagcctggtggccctgcaggcagtgcgcctgggcttcctcctccccagcacggtgccatccccctgcctgacgaagtcaaaacccac

SEQ ID NO: 712250 - DNA, 120 bp, Artificial Sequence
  ENSG00000197037_9 (sequence is synthesized)
agctccttctggaagcctttccagtgccctgagtgtgggaaaggattcagtcggagctccaatctcgtcaggcaccagcgaacccacgaagagaagtcttatggctgtgtggagtgtggg

SEQ ID NO: 712251 - DNA, 120 bp, Artificial Sequence
  ENSG00000197037_10 (sequence is synthesized)
aagggctttaccctgagagaatacctgatgaagcaccagagaacccacctgggaaagaggccctacgtgtgcagcgagtgctggaaaaccttcagccagagacaccacctggaggtgcac

SEQ ID NO: 712252 - DNA, 120 bp, Artificial Sequence
  ENSG00000197037_11 (sequence is synthesized)
cagcgcagccacactggggagaagccctacaagtgcggggactgctggaagagcttcagccgcaggcagcacctgcaggtgcaccggaggacgcacaccggggagaagccctacacctgc

SEQ ID NO: 712253 - DNA, 120 bp, Artificial Sequence
  ENSG00000197037_12 (sequence is synthesized)
gagtgtggcaagagcttcagcaggaatgccaatctggcggtgcaccggcgtgcccacactggcgagaagccatatgggtgccaggtgtgcgggaagcggttcagcaaaggggagcggctg

SEQ ID NO: 712254 - DNA, 120 bp, Artificial Sequence
  ENSG00000197037_13 (sequence is synthesized)
gtccgacaccagagaatccatacaggggagaagccctaccactgtcctgcctgcgggcgaagcttcaaccagaggtccatcctcaaccggcaccagaagacccagcaccgccaggagccg

SEQ ID NO: 712255 - DNA, 120 bp, Artificial Sequence
  ENSG00000197037_14 (sequence is synthesized)
ctggtgcagtgagcatagcaggtggcaggcagcaccatcattcatctttctcactgcagggccttgcggggtgcaaggtgatggctgcaggaaagcactggtcccatcgccttcccaccc

SEQ ID NO: 712256 - DNA, 120 bp, Artificial Sequence
  ENSG00000197037_15 (sequence is synthesized)
attcgccaacgcgggaaaggcaaggcctggcttacttagagcttccagagagcatagctgcttccatctcttacccaagtggtgctaaacaatttttcttccaatgtttgagggaagcag

SEQ ID NO: 712257 - DNA, 120 bp, Artificial Sequence
  ENSG00000197037_16 (sequence is synthesized)
tcttcctgagggctctgtcttgcctgcagggtcatagctcagactcttcccccaccccctctcttttccattgaacaaacatttattgaacatcctctgagcacctggccgtgggaatgc

SEQ ID NO: 712258 - DNA, 120 bp, Artificial Sequence
  ENSG00000197037_17 (sequence is synthesized)
cgtggtgaatgagagactagacgtgatgcctctgggggttgtgcgttggggatgcatgcgacagcccatgacccgaggcattctcagggtatctgtgctgtgtgcccgtgagaacatctt

SEQ ID NO: 712259 - DNA, 120 bp, Artificial Sequence
  ENSG00000197037_18 (sequence is synthesized)
cccatgaccactcctgccctcctgccccgtgctggatcttccctccccagctgggatctgctcccaggcaactgtgtgaattttacattatttggagcctcatctgtgtcaggctataac

SEQ ID NO: 712260 - DNA, 120 bp, Artificial Sequence
  ENSG00000197037_19 (sequence is synthesized)
attctatcctcatctgtaaaacttccccgtccattattccttgcactataacaactgtcaacacaccaactattaggaagttagtattttgctattgatcactgaataaacatcagagta

SEQ ID NO: 712261 - DNA, 120 bp, Artificial Sequence
  ENSG00000197037_20 (sequence is synthesized)
ttttaaaaaacagttctctagaaagaactgttataattaaaatgagtctgaaagatgaactctagtattaatgccctatatttgatggcactttatagttcataaaattaatttcacccc

SEQ ID NO: 712262 - DNA, 120 bp, Artificial Sequence
  ENSG00000197037_21 (sequence is synthesized)
attctcattggacccatttcccaagtatttattgaggccctgtaacaaacatgtcaggaactcttctgggtgcttgagacacatccatgaataaaatagggggagaagctgttgacctcg

SEQ ID NO: 712263 - DNA, 120 bp, Artificial Sequence
  ENSG00000197037_22 (sequence is synthesized)
tagagcttatgtctcgtggatgtacctgatcttcagaacccgtggatattcctgcaaatcctctgggcctgtattcattgctttgtcagcatcttgccctgaaatgcatttgtcacctac

SEQ ID NO: 712264 - DNA, 120 bp, Artificial Sequence
  ENSG00000197037_23 (sequence is synthesized)
ctcttgttactaaatggtctctgccctccagacccttgtcatccaaggcactaggggtcctggacacccactggggatgatgagctggtagcgacctgttttgcatgagtgccaagtcag

SEQ ID NO: 712265 - DNA, 120 bp, Artificial Sequence
  ENSG00000197037_24 (sequence is synthesized)
gaaaaataaagatatttgtaggcattaaaaaaaaatacatttctttaaaaatgagaagatgcaatatttgtaaactgttgaagcttccttattgtgccatcacttaagggtttcatttct

SEQ ID NO: 712266 - DNA, 120 bp, Artificial Sequence
  ENSG00000197037_25 (sequence is synthesized)
gtttaaagttctggaagctgcataactagcgtggactgactgctgtgtcattgtgctgtgcctttgaaccctggctgagtgagtgagtttgtcctttgttgatagtgtcctataattgca

SEQ ID NO: 712267 - DNA, 120 bp, Artificial Sequence
  ENSG00000197037_26 (sequence is synthesized)
aaatgtggtttgtcttctgatgcctcttaataccagattcttttactgagatttttttttttcattttccattgtaaataaggtaaatggtaatgactaacacaaagctgtattactcag

SEQ ID NO: 712268 - DNA, 120 bp, Artificial Sequence
  ENSG00000197037_27 (sequence is synthesized)
cccactttgaaacgtggttttatcacctgttcttgttaggcagcatggtgtctaattttggcttagcaaatgacgctccttggtcttcctggctcattagctgtgcccacgaggctgcac

SEQ ID NO: 712269 - DNA, 120 bp, Artificial Sequence
  ENSG00000197037_28 (sequence is synthesized)
tgactgggtcgtaaatgtatctgagatgtccacacggggctgctgctgctcctctgtaatactgaggtccacatgcaaaatcagctttttttcccccgtaattatcagagcagctaggca

SEQ ID NO: 712270 - DNA, 120 bp, Artificial Sequence
  ENSG00000197037_29 (sequence is synthesized)
gggctgacagccaggcagactcagtgggaggcttctggcctgagtgtggccttccccagagggtggttttccaaaggcaggtggggactggggaggcctcggggggctgcttgtcattac

SEQ ID NO: 712271 - DNA, 120 bp, Artificial Sequence
  ENSG00000197037_30 (sequence is synthesized)
ctgaatcacagatgctcttttgtcatacacagccagcattcctctgggtttcagcaagttggcatatcttaagcttcagaaggagctgggccttgctgactttcctatctggcctcttcc

SEQ ID NO: 712272 - DNA, 120 bp, Artificial Sequence
  ENSG00000197037_31 (sequence is synthesized)
ctatctcctgtggggccaagagcttaggacagtgtctcagaaaagcctctaagtagggggtttttcccatgggattgtggtagtctgatttttcatatctattcaaatgttaagaaatat

SEQ ID NO: 712273 - DNA, 120 bp, Artificial Sequence
  ENSG00000197037_32 (sequence is synthesized)
gcagctcacttccggaccgcggatagcactggcgaccctagcgggtgagaggcccttcagggccgcggcgggttgagcgcaccatcacatctaagccatcagcaagtttgttggttttaa

SEQ ID NO: 712274 - DNA, 120 bp, Artificial Sequence
  ENSG00000197037_33 (sequence is synthesized)
tctccaaaatacgtcttgattttgtctgactctttgccaccaccctgatctaagcccttatcatctgcttgaatcactaacttgtctccacttgcagtttttaaaagagttgcttccatt

SEQ ID NO: 712275 - DNA, 120 bp, Artificial Sequence
  ENSG00000197037_34 (sequence is synthesized)
gccgtagctctggcgctcctggcaaaggaaggggacttcatggcaggcgggtaaatgggtccagcacggaccatggggcacgaggagctgctttcctgtgtcaatagaggagccaaatga

SEQ ID NO: 712276 - DNA, 120 bp, Artificial Sequence
  ENSG00000197037_35 (sequence is synthesized)
tggagcaggaaaacatgaggccattattctggctgtatggagacaggtcggtcatgaggacccccaaacacctacattgtgtccatgattaaagacactgagggcttgagaacaagatac

SEQ ID NO: 712277 - DNA, 120 bp, Artificial Sequence
  ENSG00000197037_36 (sequence is synthesized)
ttttttctagtagtgagtatattgtgttaaaatcctcagcaggataatatttgggcttggtgatggcaggtagaggggacccttgtcaaatggcgtggacagataaaagttgctcagggc

SEQ ID NO: 712278 - DNA, 120 bp, Artificial Sequence
  ENSG00000197037_37 (sequence is synthesized)
ctgatgcatgagtttagcttccttttcacttcctcactaatgtcctggggaagagctcagctgatttttccttcctctcccctgaagctggaatggttcttttcttggttctctttttag

SEQ ID NO: 712279 - DNA, 120 bp, Artificial Sequence
  ENSG00000197037_38 (sequence is synthesized)
cctggagatgagacacgggccttccaggagcaaggtgagtaagacgcagatagtggggatgtcaggtcataggaaacagtgctgtgcagccaactctcttcagaaacccagcaatggagc

SEQ ID NO: 712280 - DNA, 120 bp, Artificial Sequence
  ENSG00000197037_39 (sequence is synthesized)
aactaagttacccacgaggtgtaattgtgaattttcttggctacttcctccaccttaggaaatagatgaagtgaaattgtttcttctccctttaccctctggtgtctggaggggatatct

SEQ ID NO: 712281 - DNA, 120 bp, Artificial Sequence
  ENSG00000197037_40 (sequence is synthesized)
gggatcatgctttcttattatttctcttttctttccctcagatcccttctagaaactaccaagaaatattcagctgacttgcaggaatactttttcagtaggcagataaaccatatcccc

SEQ ID NO: 712282 - DNA, 76 bp, Artificial Sequence
  ENSG00000197037_41 (sequence is synthesized)
gcaggaatactttttcagtaggcagataaaccatatcccccaaagtaatatgtagctttctttctttctttctttc

SEQ ID NO: 712283 - DNA, 83 bp, Artificial Sequence
  ENSG00000197037_42 (sequence is synthesized)
tcactgcaacctttgcctcctgggttgcctacaggcatgtgccaccatgccctgttaatttttttgtatttttagtggagacg

SEQ ID NO: 712284 - DNA, 73 bp, Artificial Sequence
  ENSG00000197037_43 (sequence is synthesized)
gtagctttattttgttattgaatctcataggaggttattcccagagtgtgactgggtagcatgggtagccctg

SEQ ID NO: 712285 - DNA, 120 bp, Artificial Sequence
  ENSG00000197037_44 (sequence is synthesized)
gttattcccagagtgtgactgggtagcatgggtagccctggacggacagggccgggacaatcttgccagctgagaacaggagacacccaggccccagctgagaatagggcaagggacacc

SEQ ID NO: 712286 - DNA, 120 bp, Artificial Sequence
  ENSG00000197037_45 (sequence is synthesized)
caggcccctgtgcatgggaaagtgtggtaccagagtgaaaagggattctgtctggagtcttctggttcctgaggttgtgagcatctggtaggggacacatttgaacgagctaacagcata

SEQ ID NO: 712287 - DNA, 120 bp, Artificial Sequence
  ENSG00000197037_46 (sequence is synthesized)
ggatagcactggcgaccctagcgggtgagaggcccttcagggccgcggcgggatctccttcccctggtgctttggacttccaagtctgtcttcccagtctaggtcttccgcataatccac

SEQ ID NO: 712288 - DNA, 120 bp, Artificial Sequence
  ENSG00000197037_47 (sequence is synthesized)
gtgaggaggggatccaggtctggcgcccttggcgtgggcagggaatgttaaagaatccaaagatttgaggaagcagtaggagtggacgaggtgtggagccgccctcctctgccctcagac

SEQ ID NO: 712289 - DNA, 120 bp, Artificial Sequence
  ENSG00000197037_48 (sequence is synthesized)
tccctgaggttctttttggagagcagtggcgttttcagcaagaaaggccattcccaggggagatgctgccatgcagaagggcctgaagcctctgtttggtcatgagggcagaggcctggc

SEQ ID NO: 712290 - DNA, 120 bp, Artificial Sequence
  ENSG00000197037_49 (sequence is synthesized)
catatttcccttgtgggcatcaggcaaaaagaaggcagttgtgattgtttttggggtccctcatagacctgaccctgctttggacagagatgcctctgggaaggcagagaatcccacctg

SEQ ID NO: 712291 - DNA, 120 bp, Artificial Sequence
  ENSG00000197037_50 (sequence is synthesized)
gggaatatttttccggaaaagggttgtccatggcagtactgtttctctgtggctcatagggctcctgtaacaattctctggtgctgctctaatgacaccaagtgatttggcaccgcacgt

SEQ ID NO: 712292 - DNA, 120 bp, Artificial Sequence
  ENSG00000197037_51 (sequence is synthesized)
gcttccttgaggttccagccatatttcggtcactttgtggtacagccccctgatggatgactgggaaaggagagcaggactgatgacaccgtcttgctcacaagcccccgtccttctgta

SEQ ID NO: 712293 - DNA, 120 bp, Artificial Sequence
  ENSG00000197037_52 (sequence is synthesized)
gttcagcctcccgtgcacactctcgtcaccctgacttcctgtcttcagaatcctaagagaattttttcctactcaactcaggagcttaaaagtggacccagaaatgccttgtttttgtga

SEQ ID NO: 712294 - DNA, 120 bp, Artificial Sequence
  ENSG00000197037_53 (sequence is synthesized)
gtacttctcagtgagagagtcctcctgatttttcttgctctttttaatttattatttttgagacagggtcagtcaacagcctaggctggagtgcagtggcacaatcctagcttactgcag

SEQ ID NO: 712295 - DNA, 83 bp, Artificial Sequence
  ENSG00000197037_54 (sequence is synthesized)
cctgagtagctgagaccacaggcatgagtctcgccatgttgcccaggcttcctggctctctttaaagcaactatttctcactg

SEQ ID NO: 712296 - DNA, 120 bp, Artificial Sequence
  ENSG00000197043_0 (sequence is synthesized)
gcggttgctgctgggctaacgggctccgatccagcgagcgctgcgtcctcgagtccctgcgcccgtgcgtccgtctgcgacccgaggcctccgctgcgcgtggattctgctgcgaaccgg

SEQ ID NO: 712297 - DNA, 120 bp, Artificial Sequence
  ENSG00000197043_1 (sequence is synthesized)
agaccatggccaaaccagcacagggtgccaagtaccggggctccatccatgacttcccaggctttgaccccaaccaggatgccgaggctctgtacactgccatgaagggctttggcagtg

SEQ ID NO: 712298 - DNA, 120 bp, Artificial Sequence
  ENSG00000197043_2 (sequence is synthesized)
acaaggaggccatactggacataatcacctcacggagcaacaggcagaggcaggaggtctgccagagctacaagtccctctacggcaaggacctcattgctgatttaaagtatgaattga

SEQ ID NO: 712299 - DNA, 120 bp, Artificial Sequence
  ENSG00000197043_3 (sequence is synthesized)
cgggcaagtttgaacggttgattgtgggcctgatgaggccacctgcctattgtgatgccaaagaaattaaagatgccatctcgggcattggcactgatgagaagtgcctcattgagatct

SEQ ID NO: 712300 - DNA, 120 bp, Artificial Sequence
  ENSG00000197043_4 (sequence is synthesized)
tggcttcccggaccaatgagcagatgcaccagctggtggcagcatacaaagatgcctacgagcgggacctggaggctgacatcatcggcgacacctctggccacttccagaagatgcttg

SEQ ID NO: 712301 - DNA, 120 bp, Artificial Sequence
  ENSG00000197043_5 (sequence is synthesized)
tggtcctgctccagggaaccagggaggaggatgacgtagtgagcgaggacctggtacaacaggatgtccaggacctatacgaggcaggggaactgaaatggggaacagatgaagcccagt

SEQ ID NO: 712302 - DNA, 120 bp, Artificial Sequence
  ENSG00000197043_6 (sequence is synthesized)
tcatttacatcttgggaaatcgcagcaagcagcatcttcggttggtgttcgatgagtatctgaagaccacagggaagccgattgaagccagcatccgaggggagctgtctggggactttg

SEQ ID NO: 712303 - DNA, 120 bp, Artificial Sequence
  ENSG00000197043_7 (sequence is synthesized)
agaagctaatgctggccgtagtgaagtgtatccggagcaccccggaatattttgctgaaaggctcttcaaggctatgaagggcctggggactcgggacaacaccctgatccgcatcatgg

SEQ ID NO: 712304 - DNA, 120 bp, Artificial Sequence
  ENSG00000197043_8 (sequence is synthesized)
tctcccgtagtgagttggacatgctcgacattcgggagatcttccggaccaagtatgagaagtccctctacagcatgatcaagaatgacacctctggcgagtacaagaagactctgctga

SEQ ID NO: 712305 - DNA, 120 bp, Artificial Sequence
  ENSG00000197043_9 (sequence is synthesized)
agctgtctgggggagatgatgatgctgctggccagttcttcccggaggcagcgcaggtggcctatcagatgtgggaacttagtgcagtggcccgagtagagctgaagggaactgtgcgcc

SEQ ID NO: 712306 - DNA, 120 bp, Artificial Sequence
  ENSG00000197043_10 (sequence is synthesized)
cagccaatgacttcaaccctgacgcagatgccaaagcgctgcggaaagccatgaagggactcgggactgacgaagacacaatcatcgatatcatcacgcaccgcagcaatgtccagcggc

SEQ ID NO: 712307 - DNA, 120 bp, Artificial Sequence
  ENSG00000197043_11 (sequence is synthesized)
agcagatccggcagaccttcaagtctcactttggccgggacttaatgactgacctgaagtctgagatctctggagacctggcaaggctgattctggggctcatgatgccaccggcccatt

SEQ ID NO: 712308 - DNA, 120 bp, Artificial Sequence
  ENSG00000197043_12 (sequence is synthesized)
agcagttgaagaaggccatggagggagccggcacagatgaaaaggctcttattgaaatcctggccactcggaccaatgctgaaatccgggccatcaatgaggcctataaggaggactatc

SEQ ID NO: 712309 - DNA, 120 bp, Artificial Sequence
  ENSG00000197043_13 (sequence is synthesized)
acaagtccctggaggatgctctgagctcagacacatctggccacttcaggaggatcctcatttctctggccacggggcatcgtgaggagggaggagaaaacctggaccaggcacgggaag

SEQ ID NO: 712310 - DNA, 120 bp, Artificial Sequence
  ENSG00000197043_14 (sequence is synthesized)
atgcccaggtggctgctgagatcttggaaatagcagacacacctagtggagacaaaacttccttggagacacgtttcatgacgatcctgtgtacccggagctatccgcacctccggagag

SEQ ID NO: 712311 - DNA, 120 bp, Artificial Sequence
  ENSG00000197043_15 (sequence is synthesized)
tcttccaggagttcatcaagatgaccaactatgacgtggagcacaccatcaagaaggagatgtctggggatgtcagggatgcatttgtggccattgttcaaagtgtcaagaacaagcctc

SEQ ID NO: 712312 - DNA, 120 bp, Artificial Sequence
  ENSG00000197043_16 (sequence is synthesized)
tcttctttgccgacaaactttacaaatccatgaagggtgctggcacagatgagaagactctgaccaggatcatggtatcccgcagtgagattgacctgctcaacatccggagggaattca

SEQ ID NO: 712313 - DNA, 120 bp, Artificial Sequence
  ENSG00000197043_17 (sequence is synthesized)
ttgagaaatatgacaagtctctccaccaagccattgagggtgacacctccggagacttcctgaaggccttgctggctctctgtggtggtgaggactagggccacagctttggcgggcact

SEQ ID NO: 712314 - DNA, 120 bp, Artificial Sequence
  ENSG00000197043_18 (sequence is synthesized)
tctgccaagaaatggttatcagcaccagccgccatggccaagcctgattgttccagctccagagactaaggaaggggcaggggtggggggaggggttgggttgggctcttatcttcagtg

SEQ ID NO: 712315 - DNA, 120 bp, Artificial Sequence
  ENSG00000197043_19 (sequence is synthesized)
gagcttaggaaacgctcccactcccacgggccatcgagggcccagcacggctgagcggctgaaaaaccgtagccatagatcctgtccacctccactcccctctgaccctcaggctttccc

SEQ ID NO: 712316 - DNA, 120 bp, Artificial Sequence
  ENSG00000197043_20 (sequence is synthesized)
agcttcctccccttgctacagcctctgccctggtttgggctatgtcagatccaaaaacatcctgaacctctgtctgtaaaatgagtagtgtctgtactttgaatgagggggttggtggca

SEQ ID NO: 712317 - DNA, 120 bp, Artificial Sequence
  ENSG00000197043_21 (sequence is synthesized)
ggggccagttgaatgtgctgggcggggtggtgggaaggatagtaaatgtgctggggcaaactgacaaatcttcccatccatttcaccacccatctccatccaggccgcgctagagtactg

SEQ ID NO: 712318 - DNA, 120 bp, Artificial Sequence
  ENSG00000197043_22 (sequence is synthesized)
gaccaggaatttggatgcctgggttcaaatctgcatctgccatgcacttgtttctgaccttaggccagcccctttccctccctgagtctctattttcttatctacaatgagacagttgga

SEQ ID NO: 712319 - DNA, 120 bp, Artificial Sequence
  ENSG00000197043_23 (sequence is synthesized)
caaaaaaatcttggcttcccttctaacattaacttcctaaagtatgcctccgattcattcccttgacactttttatttctaaggaagaaataaaaagagatacacaaacacataaacaca

SEQ ID NO: 712320 - DNA, 120 bp, Artificial Sequence
  ENSG00000197043_24 (sequence is synthesized)
ttttatttgcaaaggtcttcaggctaccaattactcgtgtgttcagggatcaggcagcagttctgagtggcttggtcagtgtgtcctgtctcctgaggtttcctctttcagtcaagtgcc

SEQ ID NO: 712321 - DNA, 120 bp, Artificial Sequence
  ENSG00000197043_25 (sequence is synthesized)
tccagaggcctggccggggtcctgcagtgcagacgttgggaggcacggagacggggagagggggaggcggtccaggactcactctgctccacctctgactccttgaagggtgccaagtac

SEQ ID NO: 712322 - DNA, 120 bp, Artificial Sequence
  ENSG00000197043_26 (sequence is synthesized)
tggggtgcgggtggaagaatgatttcattcacctgtgtgctcgttcaggttatttcctggatatggcactccaggttagcctgtgggctgacaccttaccctgctctttttcttctcatc

SEQ ID NO: 712323 - DNA, 120 bp, Artificial Sequence
  ENSG00000197043_27 (sequence is synthesized)
tgctgtatgctgggctcgtgctaggtgttagggctgcactagtgaataagatgggtgaggtgtcaactctgtggactgccagatagtgagagagatacacagtaaacgaggaaacagaca

SEQ ID NO: 712324 - DNA, 120 bp, Artificial Sequence
  ENSG00000197043_28 (sequence is synthesized)
gtggtggggaagtggcacagggctgtggacctgaccctgcatagccgtttgctagcagcatgacatggagtaagacctctgttgtttctgagcctgtctcttagggttggtaacagtaca

SEQ ID NO: 712325 - DNA, 120 bp, Artificial Sequence
  ENSG00000197043_29 (sequence is synthesized)
tacctccaagggtgatgatttaatgagattacttagcccagcacctgccagagtaagtgctcattaagtgtaattcttaccgttgtaactactcttcctctttcctcttctatctcctct

SEQ ID NO: 712326 - DNA, 120 bp, Artificial Sequence
  ENSG00000197043_30 (sequence is synthesized)
ggagggccagggctgctatgaataagtgttcattcagccttcccctctttcaggctgtgcagaaccttcacctccttgtctgagaggagcccagggctgggtgagaggtaacctttcttt

SEQ ID NO: 712327 - DNA, 120 bp, Artificial Sequence
  ENSG00000197043_31 (sequence is synthesized)
agagaccagagagcatccagaggcctggccggggtcctgcagtgcagacgttgggaggcacggagacggggagagggggaggcggtccaggactcactctgctccacctctgactccttg

SEQ ID NO: 712328 - DNA, 120 bp, Artificial Sequence
  ENSG00000197043_32 (sequence is synthesized)
aagggatcattttcatctcctatactcagccaggcttttttaccctctcctggatgctttggaaggtggtgcagggctgcaggccttggccaagcccccctcccttggggaaatggcact

SEQ ID NO: 712329 - DNA, 120 bp, Artificial Sequence
  ENSG00000197043_33 (sequence is synthesized)
gtcctttgggcgggttgcagcaggtggtatgggaaagtcatccacaccgctccccagggtgtatgtggccagcactggattttgcagggaaagcagctcagcctggaccaggggtgccaa

SEQ ID NO: 712330 - DNA, 120 bp, Artificial Sequence
  ENSG00000197043_34 (sequence is synthesized)
ggacttgttatgatcgagggctgctaggcagagatgttggctgcttcctgggccctggcaagtcactttctctttctgagatgcctttaccccgtctagaaaatgagggacttggagtca

SEQ ID NO: 712331 - DNA, 120 bp, Artificial Sequence
  ENSG00000197043_35 (sequence is synthesized)
tggattattaagggcccttgtgggattcagaaacactagatgtaaaatattcagccaatttgagcagtatggtctaggttgctctgggagggatcagaagccatcttaaagccagggtaa

SEQ ID NO: 712332 - DNA, 120 bp, Artificial Sequence
  ENSG00000197043_36 (sequence is synthesized)
atggtgtgtttatgattagctcaggagcttcccagaaccctcagaggcggggctgtggaatcagcagggggactggccctcagaactgcagtctgaacatctagttctggaaggagcttg

SEQ ID NO: 712333 - DNA, 120 bp, Artificial Sequence
  ENSG00000197043_37 (sequence is synthesized)
gcccctccttgaagccatctctccttggaaaggggagctcctccagatgggcctgggctgcagccagcagctgaaattgccagcaacaagcccagaggaaagtgcttcaaggctggagat

SEQ ID NO: 712334 - DNA, 120 bp, Artificial Sequence
  ENSG00000197043_38 (sequence is synthesized)
acgggctccgatccagcgagcgctgcgtcctcgagtccctgcgcccgtgcgtccgtctgcgacccgaggcctccgctgcgcggattttctggggaggcccagtggaatcaccagcctcac

SEQ ID NO: 712335 - DNA, 120 bp, Artificial Sequence
  ENSG00000197043_39 (sequence is synthesized)
cccacccagcctctccgatatacttcctgggtggcgacaaagcacaggatgtggtctctaccgtgattcctgagcatgcatgcaccccttctcctgccaatagaggggaggaagtcggag

SEQ ID NO: 712336 - DNA, 120 bp, Artificial Sequence
  ENSG00000197043_40 (sequence is synthesized)
gggtgtctttatgcctataaacttgccttggaatccagcctcactccctttcctcctggagttgagaagcccccacagagactggctatgggggagtgactgtctataggttccttggat

SEQ ID NO: 712337 - DNA, 120 bp, Artificial Sequence
  ENSG00000197043_41 (sequence is synthesized)
agatataaaagtgctgtgttatctcaaaagggtgtggtgcttgagaaggcaggcgacctgagcctcaagttcctcttctgaaaaatccatgtcctggtggtccttaaataatagcaataa

SEQ ID NO: 712338 - DNA, 120 bp, Artificial Sequence
  ENSG00000197043_42 (sequence is synthesized)
aatggtaaccactattacctctcgaacccttaaatttgccaggccccggctgaagccttgctatgttagacgctgttattaatgcctattttgcagacatggaaactccagcccttaaca

SEQ ID NO: 712339 - DNA, 120 bp, Artificial Sequence
  ENSG00000197043_43 (sequence is synthesized)
gtttaaggaagaaataataatgacaaatgcttataaaatatagtgcttcctgtgtgccaggtcctcttctaagctctagacttgtcttaattttttttatcctcatcataactcctatga

SEQ ID NO: 712340 - DNA, 120 bp, Artificial Sequence
  ENSG00000197043_44 (sequence is synthesized)
gggaggtgctatttttatcccttttttttttttttaatatgaaacaggcacagagaggctcaatacttgcacaacaccacacagctactaaatatcaccctcaggcttcaatctcaggca

SEQ ID NO: 712341 - DNA, 120 bp, Artificial Sequence
  ENSG00000197044_0 (sequence is synthesized)
gtcaatcaggcgcactgaccggaggagggtgcaaggttcaaagagcccgccgagtcttctccacgcccctgcactgggctccgggttctgtcactgagagacgccctggaacgtctgtgg

SEQ ID NO: 712342 - DNA, 120 bp, Artificial Sequence
  ENSG00000197044_1 (sequence is synthesized)
cagcttctgtctcgctgggacccgcactgacagcgggaggcagagggaggaacctggacgccggaagccgggaaatggactcagtggcatttgaggatgtggctataaacttcacctgtg

SEQ ID NO: 712343 - DNA, 120 bp, Artificial Sequence
  ENSG00000197044_2 (sequence is synthesized)
aggagtgggctttgctgggtccatcacagaagagtctctacagagatgtgatgcaggaaaccatcagaaacctggactgtataggaatgatatggcaaaatcatgatatagaagaagatc

SEQ ID NO: 712344 - DNA, 120 bp, Artificial Sequence
  ENSG00000197044_3 (sequence is synthesized)
agtacaaagatctcagaagaaatctaagatgtcatatggtagagagagcctgtgaaattaaagataatagtcaatgtggaggaccctttacccagactcaagacagtattgtgaacgaga

SEQ ID NO: 712345 - DNA, 120 bp, Artificial Sequence
  ENSG00000197044_4 (sequence is synthesized)
aaatacctggagtagatccatgggaaagcagtgagtgtacagacgtcctcatgggtcgttcatctcttaattgctacgttagagttgacagtgaacacaaaccatgtgagtatcaagaat

SEQ ID NO: 712346 - DNA, 120 bp, Artificial Sequence
  ENSG00000197044_5 (sequence is synthesized)
atggagagaagccatatacacatacacaatgtgggacagctttcagttatcagccctgctttcaaatacatgaaagacctcagcatggaaagaaactctatgattgtaaggaatgtgcaa

SEQ ID NO: 712347 - DNA, 120 bp, Artificial Sequence
  ENSG00000197044_6 (sequence is synthesized)
gcttcagttctcttgaaaaccttcaaagacacatggcagcacaccatggagatggacctcgtatatgtaagttgtgtggaaacgcctttatttggcctagtttatttcatatgcttagaa

SEQ ID NO: 712348 - DNA, 120 bp, Artificial Sequence
  ENSG00000197044_7 (sequence is synthesized)
gaactcacactgaagagaaaccatatgaatatgagcagtgttctacagcgtttcctgcttatagttccactctaagacatgaaagaacacacagtggagagaaaccctatcaatgtaaac

SEQ ID NO: 712349 - DNA, 120 bp, Artificial Sequence
  ENSG00000197044_8 (sequence is synthesized)
aatgtgggaaagccttcagttgttcctgttacactcaactatatgaaaggactcacactggagaacaatcctatgaatgtaagcaatgtgggaaagcattttatcatcttggaagctttc

SEQ ID NO: 712350 - DNA, 120 bp, Artificial Sequence
  ENSG00000197044_9 (sequence is synthesized)
aaagacacatgatagtgcacactggagatgggcctcataaatgtaagatatgtggaaaaggctttctttctcccagttcagttcgaagacataaaagaactcacactggagagaaaccgt

SEQ ID NO: 712351 - DNA, 120 bp, Artificial Sequence
  ENSG00000197044_10 (sequence is synthesized)
atgaatgtaagtattgtgggaaagcattctctgattgcacaggttttcgaagacacatgataacgcacactggagatggacctcataaatgcaaggtatgtgggaaagcctttgattctc

SEQ ID NO: 712352 - DNA, 120 bp, Artificial Sequence
  ENSG00000197044_11 (sequence is synthesized)
ccagtttatgtcgaaggcatgaaacaactcatactggggagaaaccctataaatgtgaatgtgggaaagcctttagtgatttctattactttcgaaatcatgaaactactcacactggag

SEQ ID NO: 712353 - DNA, 120 bp, Artificial Sequence
  ENSG00000197044_12 (sequence is synthesized)
agaagccatataaatgtaaacaatgtggaaaagccttcatttgttgcacttaccttcaaatacatgaaagaattcacactggggagagaccctataaatgtaaacaatgcggaaaagcct

SEQ ID NO: 712354 - DNA, 120 bp, Artificial Sequence
  ENSG00000197044_13 (sequence is synthesized)
tcaggtcttccaattacattcgagtacatgaaaagactcacactggagaaaagccctatgaatgtaagcagtgtggaaaagcactttctcatctgaaaagctttcagagacacatgataa

SEQ ID NO: 712355 - DNA, 120 bp, Artificial Sequence
  ENSG00000197044_14 (sequence is synthesized)
tgcacactggagatggacctcataaatgtaagatatgtgggaaaagctttgattctcccagttcatttcgaagacatgaaagaattcacactggggagagaccctataagtgtaaactat

SEQ ID NO: 712356 - DNA, 88 bp, Artificial Sequence
  ENSG00000197044_15 (sequence is synthesized)
gttgtcagcaatgtgggaaagcattatctgatctctcaagctttcgaagacacatgataacacatactggaaatggacctcataaatg

SEQ ID NO: 712357 - DNA, 120 bp, Artificial Sequence
  ENSG00000197044_16 (sequence is synthesized)
gacacatgataacacatactggaaatggacctcataaatgtaagatatgtgggaaaggctttgattatcccagttcagtgcaaagacatgaaagaactcacactggagagaaaccctatg

SEQ ID NO: 712358 - DNA, 120 bp, Artificial Sequence
  ENSG00000197044_17 (sequence is synthesized)
aatgcaaggaatgtggtaaagccttcagtcattcaagttacttacgaatacacgaaagagttcatactggagagaagccgtataaatgtaaggaatgtgggaaaccattccattgtccca

SEQ ID NO: 712359 - DNA, 120 bp, Artificial Sequence
  ENSG00000197044_18 (sequence is synthesized)
cataaacatgaaaggacccacagtatggagaaaccctataagtgtaaagaatgtggggaagcatttcattgtatcagttcctttcataaacatgaaatgactcactagagaaaaccccta

SEQ ID NO: 712360 - DNA, 120 bp, Artificial Sequence
  ENSG00000197044_19 (sequence is synthesized)
tgagtgttgaacatgtgagaaagccttaagtactttcagcttcttacaaatacataagagactcacactgaaaaaagttgtatgaatataaaaatgtactaaaaccttccatttttttca

SEQ ID NO: 712361 - DNA, 120 bp, Artificial Sequence
  ENSG00000197044_20 (sequence is synthesized)
gtaccttttgaaaacatgaccaaactcatacttcaaaaatatatatataatgaatgtgaggaatatgaaaaaactttctttgtctagcaaactttcaaaggtggttattataacatacta

SEQ ID NO: 712362 - DNA, 120 bp, Artificial Sequence
  ENSG00000197044_21 (sequence is synthesized)
gcaatggaccttactactgtaaggaatgtagaaatgcatttactagtcctaattcatttcagttacatgaaagatttcaaactgcagagaaccactatgaatgtaaacaatgtggtaaag

SEQ ID NO: 712363 - DNA, 120 bp, Artificial Sequence
  ENSG00000197044_22 (sequence is synthesized)
catttagtagcttcagtttcttttgaatacagtcttctctagtttctgaggtgaattgattccagcaccctcaggaatacctatattcagagatattcaagtccctgatattaaaaacag

SEQ ID NO: 712364 - DNA, 120 bp, Artificial Sequence
  ENSG00000197044_23 (sequence is synthesized)
catatttgcatataatctaggcacatttttctgtatatcttaaatcatttctagattacttataatacacaatgcattgtaaattctgtataagttgcttttgtattatttagggaatca

SEQ ID NO: 712365 - DNA, 120 bp, Artificial Sequence
  ENSG00000197044_24 (sequence is synthesized)
tgacaagaaaaaagtctacatgttcagtacaaatacaactgtcattcattgtcctaagtacgtgtacatgtcagcaacaatgtcaggatctgtggagtttgcgagtataagatctttaag

SEQ ID NO: 712366 - DNA, 120 bp, Artificial Sequence
  ENSG00000197044_25 (sequence is synthesized)
tgttgaaggtttcatctccataattgcagctgctttagctacaaatattataggaagctgttccttctttttctttacatcaccaaaccttccagtggttataggcattttgttatcctt

SEQ ID NO: 712367 - DNA, 120 bp, Artificial Sequence
  ENSG00000197044_26 (sequence is synthesized)
caagtgacctggagcctttgttgcatgacaggattgtacctgaagatcacattctttaacaattggacctactgaatctgtaaaactactagaagaaaacatattgaaaatacttcagga

SEQ ID NO: 712368 - DNA, 120 bp, Artificial Sequence
  ENSG00000197044_27 (sequence is synthesized)
cattggtttaggcaaagattttatggctaatacctcaaagcacagacaacaaagataaaaatagacaaatgagactatcttacactaaaaagtagctgtgcaaagtaaagggaacaacaa

SEQ ID NO: 712369 - DNA, 120 bp, Artificial Sequence
  ENSG00000197044_28 (sequence is synthesized)
gagtgcagagaaaacctgttgaatatgagagaatatttgcaaactatgcgacaagggactaatatccaaatatacaaggaactcaaacatctcaacagcaaaaaatataaataatcccat

SEQ ID NO: 712370 - DNA, 120 bp, Artificial Sequence
  ENSG00000197044_29 (sequence is synthesized)
taaagtgggaaaaggatgtgaacagacagttctcaaaagaagacatgcaaatggccaaaaagtatatggaaatatgttcaacatcactaatgattaggaaaatgcaaattgaaaccacaa

SEQ ID NO: 712371 - DNA, 120 bp, Artificial Sequence
  ENSG00000197044_30 (sequence is synthesized)
tgagatactctacttagaattgttcttactaaaaaagataaaaaacaacaaatgctgatgaggatgtggagaaaagaaaactttcactgttggtgaaagtataaattagaacaactactg

SEQ ID NO: 712372 - DNA, 120 bp, Artificial Sequence
  ENSG00000197044_31 (sequence is synthesized)
tggaaaacagtatgtagatttctcaaaaacctaaaaatagaaccaccacatgatccagcaaaccaagtataaccacaggaaaagaaatcagtatatcaaagagatacttgcacttgcata

SEQ ID NO: 712373 - DNA, 120 bp, Artificial Sequence
  ENSG00000197044_32 (sequence is synthesized)
tttatcacagcactattcatgataacaaagatatggaattaacctaagcatccatcagtggacacagggataaagaaaatgtttatgtacacagtggaatactatttggccataaaaaag

SEQ ID NO: 712374 - DNA, 80 bp, Artificial Sequence
  ENSG00000197044_33 (sequence is synthesized)
gtttatgtacacagtggaatactatttggccataaaaaagagtaaaatgttattgctaacaacatggatggaacttgagg

SEQ ID NO: 712375 - DNA, 120 bp, Artificial Sequence
  ENSG00000197044_34 (sequence is synthesized)
tcacctcatggagatagggaatagaataagttatccggggctgagaaggggaaatgaagagaaattggtgaatatgtacaaatttccatttagatcaaaggaataagttctgatgttaga

SEQ ID NO: 712376 - DNA, 120 bp, Artificial Sequence
  ENSG00000197044_35 (sequence is synthesized)
aagcatactagagtgaactatagttagcaaaaatatattgcatatttcaaagtagttggaagagaggacttgaaatgttaccaacacatagaagtggtaaatactcaagatcatggatac

SEQ ID NO: 712377 - DNA, 120 bp, Artificial Sequence
  ENSG00000197044_36 (sequence is synthesized)
cccaaatacgctgacttgaccattacacattctatgcatgcaagaaatgctcatgtgtaccttatatatatgtaaaatatgtatcaataaaagaaaatatataagatagttttaaaataa

SEQ ID NO: 712378 - DNA, 120 bp, Artificial Sequence
  ENSG00000197044_37 (sequence is synthesized)
ataggtaaggatgtcatcatgtcttcacttagtcaattagagacatttgtttcttggtcatcaatgctgttcaattatttgaaatatggaagggtatataattggcccttgaaccagcca

SEQ ID NO: 712379 - DNA, 120 bp, Artificial Sequence
  ENSG00000197044_38 (sequence is synthesized)
cccaagcagtcatacatcttctcccgcacaacttaaccactagtagcctactgtttactggcagcattactggtaacataaacagttgattaatacatgtattatatgtcatatgtatta

SEQ ID NO: 712380 - DNA, 120 bp, Artificial Sequence
  ENSG00000197045_0 (sequence is synthesized)
attcttaaaggcgcccgagtgtaggcgacaggccgctgacggccggaaggaaaatgagtgagtctttggttgtttgtgatgttgccgaagatttagtggaaaagctgagaaagtttcgtt

SEQ ID NO: 712381 - DNA, 120 bp, Artificial Sequence
  ENSG00000197045_1 (sequence is synthesized)
ttcgcaaagaaacgaacaacgctgctattataatgaagattgacaaggataaacgcctggtggtactggatgaggagcttgagggcatttcaccagatgaacttaaagatgaactacctg

SEQ ID NO: 712382 - DNA, 120 bp, Artificial Sequence
  ENSG00000197045_2 (sequence is synthesized)
aacgacaacctcgcttcattgtgtatagttataaatatcaacatgatgatggaagagtttcatatcctctgtgctttattttctccagtcctgttggatgtaagcctgaacaacagatga

SEQ ID NO: 712383 - DNA, 120 bp, Artificial Sequence
  ENSG00000197045_3 (sequence is synthesized)
tgtatgctggaagtaagaataagctagtccagacagctgaactaaccaaggtatttgaaataagaaataccgaagacctaactgaagaatggttacgtgagaaacttggattttttcact

SEQ ID NO: 712384 - DNA, 120 bp, Artificial Sequence
  ENSG00000197045_4 (sequence is synthesized)
aatgtgaacttctgtgtttctaaagtatttatgtattaacctgaccatactggaatcagacataaatacttatttatgcctaaaaatgcactgttacttacagtttgtttcctgcagtaa

SEQ ID NO: 712385 - DNA, 120 bp, Artificial Sequence
  ENSG00000197045_5 (sequence is synthesized)
agaaaaattcttcatttgtgcaaaatttgaacaaagaggaaatcatcttcatagtaatgaaactttgtaaagtgtttccttatattggtaattgttaggtggactacttttctccaggga

SEQ ID NO: 712386 - DNA, 120 bp, Artificial Sequence
  ENSG00000197045_6 (sequence is synthesized)
ctttttgcactcttgtgactaatttctataacttatggttcggaatttgttactatttacagacaccattggaaagtggatatattagattgtgagagacaacagttgcctccttttgac

SEQ ID NO: 712387 - DNA, 120 bp, Artificial Sequence
  ENSG00000197045_7 (sequence is synthesized)
aaatactggatattagcagtttatttatgaaaatagcgtattatcacttgtcaaatcattgaaattcatttggggtcaaagacttgagtgacccagtattgagccatgaataatttagtg

SEQ ID NO: 712388 - DNA, 120 bp, Artificial Sequence
  ENSG00000197045_8 (sequence is synthesized)
taacctgtattacaagtacattgatgaattctgtatcttctttggtttcctgtatctttttaatcaagtctagaaactatgttcatcagtcactcatttttaaggtcgggagttagattt

SEQ ID NO: 712389 - DNA, 120 bp, Artificial Sequence
  ENSG00000197045_9 (sequence is synthesized)
tatgatagaattatgactgttagcttttctccttatagcatcttagtcttagaaattggtgggttgtaataatcaagggcttcattccttttatgtcatttctagacagttttgaatcta

SEQ ID NO: 712390 - DNA, 120 bp, Artificial Sequence
  ENSG00000197045_10 (sequence is synthesized)
ggttaataacactttatttataaagcacctcaatgtcctgtgaacactaattattttaaatgtgttaatactgtgcctttgatttgttagctttaaagttagtttaagacttttacactg

SEQ ID NO: 712391 - DNA, 120 bp, Artificial Sequence
  ENSG00000197045_11 (sequence is synthesized)
ccagtattccacatttggtgaaattaatacttttttaaagggtccaaataaaataattttctaatgtgtatatctgaaatttgtaataaaatcaacttcatattttaaaaattccaacta

SEQ ID NO: 712392 - DNA, 120 bp, Artificial Sequence
  ENSG00000197045_12 (sequence is synthesized)
tctgcttgcattggtgaatatatggcagtcgagagttataattttgggtatacttgtggttagttttgtgccataggaaaaaattatcttaaaactttggccatagttaataacattaac

SEQ ID NO: 712393 - DNA, 120 bp, Artificial Sequence
  ENSG00000197045_13 (sequence is synthesized)
acttcaatagcaatcacatcttatatcctaaatgtcagaagatattctgaactggatgcctgaatagttaactaaaccagtcttgttagatgatggtactcttggcataaagcgaggatt

SEQ ID NO: 712394 - DNA, 120 bp, Artificial Sequence
  ENSG00000197045_14 (sequence is synthesized)
ctgatatttggcatacttgtaaaaacaaatacataagtaaccattgaacattaatttgataataggtctagagactctaaaaactaaccaaacttggtgagtgtattcttatattaagaa

SEQ ID NO: 712395 - DNA, 120 bp, Artificial Sequence
  ENSG00000197045_15 (sequence is synthesized)
tatcttagtcatctcaaaactagcaaaatttaaattttggcatgttttccattcatatgttctttgcattttatttttgaggtttctgtgagaagtaaagatagttggaatttttgcgat

SEQ ID NO: 712396 - DNA, 120 bp, Artificial Sequence
  ENSG00000197045_16 (sequence is synthesized)
attgaatagaacatcttctgttcccaacactgtttggcttcactaatttagaagtcaggaagcaatagaaagttggagatgaggaagtgctagagtaggtgtttgttttggttcttggag

SEQ ID NO: 712397 - DNA, 120 bp, Artificial Sequence
  ENSG00000197045_17 (sequence is synthesized)
agattctttattccaatttccagagagaagagaaaactcacccaggaagtttaaaaattctttaaacaggtattttgatattggagaataacatgcatataattctgtaggaatgcacat

SEQ ID NO: 712398 - DNA, 120 bp, Artificial Sequence
  ENSG00000197045_18 (sequence is synthesized)
gtaatccaagtgagtggagagtgtttttaatgtttttgaatgaaggaaatgaggttttgtttcacctgttttgcagcagtaagagaaactagtgctgcaagaatgtattttttaatgaag

SEQ ID NO: 712399 - DNA, 120 bp, Artificial Sequence
  ENSG00000197045_19 (sequence is synthesized)
ttccttattttgtcttgcatgttttagttttgcttatttttaaatttggaggtcctccataatgtcagataatattgacctgccatacgttagcactcttagttccgctactgtctttaa

SEQ ID NO: 712400 - DNA, 120 bp, Artificial Sequence
  ENSG00000197045_20 (sequence is synthesized)
caggagcaaagagctgtgataaaccatgcttttttgagcttgtctgactcctaattaataacatgtttttggcaagacaacagattgaggttagaggatcagtaggacatttttattcca

SEQ ID NO: 712401 - DNA, 120 bp, Artificial Sequence
  ENSG00000197045_21 (sequence is synthesized)
tctgtcctatggggaaatttacaaatcccgtgctctaaaatgttctcaaacatttatatagatttccctttcatcttactaaattttgcattgttcttttcaagtatgtttcgtatttac

SEQ ID NO: 712402 - DNA, 120 bp, Artificial Sequence
  ENSG00000197045_22 (sequence is synthesized)
tgtctttttttctgccatttcccaaataataactccagatttcataattccagtttttacattccgttatctttctggtacaaccattcccattcagccttaaatctgagtcctttttag

SEQ ID NO: 712403 - DNA, 120 bp, Artificial Sequence
  ENSG00000197045_23 (sequence is synthesized)
cagcaacttttttcctgggatcctccttcgtggtcttctaagtcagtgttagttttgaaatttttggccctgcataagttctgcatagcatctaatgtcaaaatagaaccaactggtaat

SEQ ID NO: 712404 - DNA, 120 bp, Artificial Sequence
  ENSG00000197045_24 (sequence is synthesized)
cacagtattatttagtgtggtttccatgacaacaaaaatacatacgaagaaaacttctcaggttactatgctgaaattccaaaatgtctgagttttgaatagtgatcactttgttctggt

SEQ ID NO: 712405 - DNA, 120 bp, Artificial Sequence
  ENSG00000197045_25 (sequence is synthesized)
attgacgcaattatattaggaaaaaagttggttgactgtttttgtttaattgacttctaaaatgttcaaattgtctagttctaaaagtttactaaatgcctagtgcagttaaacatactc

SEQ ID NO: 712406 - DNA, 120 bp, Artificial Sequence
  ENSG00000197045_26 (sequence is synthesized)
ttgtttaagtgtgtgttgctaaattttttactgtcattactaaataatctgtgtggcaaaatgtgtgtcagcacttttccctccttttttatctcctattttcaggagtcaaatgtagcc

SEQ ID NO: 712407 - DNA, 120 bp, Artificial Sequence
  ENSG00000197045_27 (sequence is synthesized)
ataaactgtatccttgtctgacactttagctaaaaatttccagttaggggagtttattgccaaattaaatttggctgttccccccaacccatatagatattaaggaaggtgtacttaaaa

SEQ ID NO: 712408 - DNA, 120 bp, Artificial Sequence
  ENSG00000197045_28 (sequence is synthesized)
aatgtttggactgcttttaaaacctgagcaatgtcattaatccatatgtggactagtgatgaatagatattttcataagagtttaaatgctgatatttggtggaagtagagagtaactca

SEQ ID NO: 712409 - DNA, 120 bp, Artificial Sequence
  ENSG00000197045_29 (sequence is synthesized)
tattctatcaattcaagtattcttactatggttgctttccctatttgttcaatagactgataatactggaatttatagagtttgagccattacaacttttgtgaggatgtgtttcaaaca

SEQ ID NO: 712410 - DNA, 120 bp, Artificial Sequence
  ENSG00000197045_30 (sequence is synthesized)
tttctggacaaatcttattttgtatttctggaagaatgtagtaatcttctagaccgcttaaaaccaatgctcccaagctgaatattcttgagaaatttgtttttattatgccatttgaca

SEQ ID NO: 712411 - DNA, 120 bp, Artificial Sequence
  ENSG00000197045_31 (sequence is synthesized)
tttcaaatcagtgctcatatacagtaaacttgtgatagaaattgtattttattgctttttggattataattcatataaatataattacttgaatattgtttgagatcattaacatgccag

SEQ ID NO: 712412 - DNA, 120 bp, Artificial Sequence
  ENSG00000197045_32 (sequence is synthesized)
ggcagttcccactgatttagatggtccaagataatctcattcaggaggcttgaaacattaatggtttagtcttgtgaattttaacagttctctgtcatcgtttaacaaaaccaacaactg

SEQ ID NO: 712413 - DNA, 120 bp, Artificial Sequence
  ENSG00000197045_33 (sequence is synthesized)
acacaactccttaagctgtggtttcagtctctgctagttcatattgcatgtttattttggacagtcttttgttaagcatggtgcttgtactggtttaaataaaatgttaacattaaaaga

SEQ ID NO: 712414 - DNA, 120 bp, Artificial Sequence
  ENSG00000197045_34 (sequence is synthesized)
ggggaggccccacgccaggtccttctggttggagggcttcagcttctgagctttctgatgacattgcacattattatgtgtgtggtttttgagacattcattagccaaagagaaagttaa

SEQ ID NO: 712415 - DNA, 120 bp, Artificial Sequence
  ENSG00000197045_35 (sequence is synthesized)
ggtggtactggatgaggagcttgaggtttgttcaatgaactaaatacaattttataggcatttcaccagatgaacttaaagatgaactacctgaacgacaacctcgatatccttttctta

SEQ ID NO: 712416 - DNA, 120 bp, Artificial Sequence
  ENSG00000197045_36 (sequence is synthesized)
ttggcttagatccaattaagccattttatactagacaaattttctgctgtttttaaagatgaacattgttgaataacctaaattgaggagggtctgtgtctatgtgtgtccatgtgcctg

SEQ ID NO: 712417 - DNA, 120 bp, Artificial Sequence
  ENSG00000197045_37 (sequence is synthesized)
tgtgcatgcatccctagaaagaatgaagcatcatctcttagaacttattttcttaggataaatttctagacgtgtaattgttgactcaaatcatacatgtattttaaggattttgaaacg

SEQ ID NO: 712418 - DNA, 120 bp, Artificial Sequence
  ENSG00000197045_38 (sequence is synthesized)
aacgtgatgacattctaatatagcagaagtattttctttttatattttaatcatataaaaatgtgaacttcacatataattgcatatatttgtgtttcttttaaatagtagttaacagtg

SEQ ID NO: 712419 - DNA, 120 bp, Artificial Sequence
  ENSG00000197045_39 (sequence is synthesized)
gcttataatcttgagaatggtcctagagtaatttacattgggtattaaaatgggttactggtatttaaggaattcattatcaccagaacttctatcaccactgttcaggcctgcaataaa

SEQ ID NO: 712420 - DNA, 120 bp, Artificial Sequence
  ENSG00000197045_40 (sequence is synthesized)
aactgcattcactgagctattctccaaacttcataatttgtataatttacttcccactcaaaatatactgcagtatatttttaacttaatatatcggcagagtgaaacttttatcagagc

SEQ ID NO: 712421 - DNA, 120 bp, Artificial Sequence
  ENSG00000197045_41 (sequence is synthesized)
agatctccctgccctactggtccactaccatcccaaaaccttgtgtattttagtcatccataaaattgatcttgatatttagtgtcaaagttaagatagtgcagaaagtttttaattgtt

SEQ ID NO: 712422 - DNA, 120 bp, Artificial Sequence
  ENSG00000197045_42 (sequence is synthesized)
tgcaaggctctaaaagtcaggatctacaaatgtctagaatctttatttttgccaacctgtagacttgttcttgtttatttataacttaactgtctctttctgtaggcagtgtgcaatgta

SEQ ID NO: 712423 - DNA, 120 bp, Artificial Sequence
  ENSG00000197045_43 (sequence is synthesized)
agactcaaaatacaacccatatatattctgtaaactcaatagcaaaggaaatcctaaatgtgtcattttaaaaaataaaaataatgataacccatacctttctcaaaatctgtgtctcat

SEQ ID NO: 712424 - DNA, 120 bp, Artificial Sequence
  ENSG00000197045_44 (sequence is synthesized)
ttctacactaatctctcttttccaggatgtaagcctgaacaacagatgatgtatgctggaagtaagaataagctagtccagacagctgaactaaccaaggtggtatttatatttgactga

SEQ ID NO: 712425 - DNA, 120 bp, Artificial Sequence
  ENSG00000197045_45 (sequence is synthesized)
cttgttgagacaatattttcctttagactataaagcaatagctaaaatagtctaaaggagtattttttatgcaggtgaaggttatttagaccagattagtaagttagccaaagctttttg

SEQ ID NO: 712426 - DNA, 120 bp, Artificial Sequence
  ENSG00000197045_46 (sequence is synthesized)
ttaactggaaatagaatgagatagaagcgtttgaaccaaagtgtattttttgaataagttgattggaagaaatcacattcaaaatataggcagtgttagaaagccactgtaactattaaa

SEQ ID NO: 712427 - DNA, 120 bp, Artificial Sequence
  ENSG00000197045_47 (sequence is synthesized)
tctattgagagttagtttatctgccataaggtaatttctaatagataagggtcagcattgaagtttctctgaaccctttaccatagtctaaaatgaaccgagttctgtgctggaattcag

SEQ ID NO: 712428 - DNA, 120 bp, Artificial Sequence
  ENSG00000197045_48 (sequence is synthesized)
tattatgcagttaattgtattgtttccaaatataaaattgttaagaatattaataaagttagaacattctgttttatatgagaacttgctttaagatttaacatgtccctattttatggt

SEQ ID NO: 712429 - DNA, 120 bp, Artificial Sequence
  ENSG00000197045_49 (sequence is synthesized)
atttttgaaagttaaaggtaagaggtacttggctctcaaactttatttaacttccacatattagtttgaattgaaaaagtatatgcacttaaggttttgaaataggatattatattgcca

SEQ ID NO: 712430 - DNA, 120 bp, Artificial Sequence
  ENSG00000197045_50 (sequence is synthesized)
aaactgtgttagacagtatttcctttcaagttttattttaagaacagcatcagtattttccccttgggtgcttaataatcaactctggaatgcctttaagtgccctctgctgtttcccct

SEQ ID NO: 712431 - DNA, 120 bp, Artificial Sequence
  ENSG00000197045_51 (sequence is synthesized)
tagcccatgtgattgttaccactgctttatagacattactttttcctgatttgtaacacagggacactggagttgctctaacggtttgggtggttaagaaggagctgttaacggcctcaa

SEQ ID NO: 712432 - DNA, 120 bp, Artificial Sequence
  ENSG00000197045_52 (sequence is synthesized)
gtctgttctaatcctggggatgccctacagtgctgaagttgagacattacagtttaccagttacttttacagataatctcattgaatccttacaacagccctgtgagatattctgtagat

SEQ ID NO: 712433 - DNA, 120 bp, Artificial Sequence
  ENSG00000197045_53 (sequence is synthesized)
aggaaaacagacccagtggatgaatgacttgctcagggttgcataacagtaaatttagacagagctaggatttagctctgtctaggacttaggattcacatctggctccaaatcctatcc

SEQ ID NO: 712434 - DNA, 120 bp, Artificial Sequence
  ENSG00000197045_54 (sequence is synthesized)
tttctgctgtaatacattgcttttctatagccgttatgctttctgggcctgattcagattcttgctggagatttgtggctgatctccatctccctctgatatttccatttgacattcaga

SEQ ID NO: 712435 - DNA, 120 bp, Artificial Sequence
  ENSG00000197045_55 (sequence is synthesized)
ctctggaagaccagcgtatgttcctcagttcctaactagattgattttagttgtgtttacttgggatgtcttctaggagataagatttacagaactgctcttttagactatttgtagatt

SEQ ID NO: 712436 - DNA, 120 bp, Artificial Sequence
  ENSG00000197045_56 (sequence is synthesized)
tgtgcttttgggagagttttggtttcatgttgtcttgattgctgtactttggtaactgagtacttagcatttaaaagaagtgaagttctacctaaaaggtatatctcatttacacaggtt

SEQ ID NO: 712437 - DNA, 120 bp, Artificial Sequence
  ENSG00000197045_57 (sequence is synthesized)
aagtcatgaacaatatgaaaggaagcagaatttggtatttaatactcaaatatataaccaaaaatagtttggtgtataatactcaaatatattttaaaaaattcaaatatttgacttttt

SEQ ID NO: 712438 - DNA, 120 bp, Artificial Sequence
  ENSG00000197045_58 (sequence is synthesized)
ggtttccggagccggcggcggcgggcagcgcccaggagggctcggcggccgcttccgctcccagcagctggccagtgcccatagctagagtacttggcctctgccgccgccaccacgcct

SEQ ID NO: 712439 - DNA, 120 bp, Artificial Sequence
  ENSG00000197045_59 (sequence is synthesized)
ggattgtcccacctcccccatagtccttttatcagctgcctgtacagctctggagaaggcggtcgtcttggtccttgggtaatgaggattcccatctgcagtgacccatccaacccatcc

SEQ ID NO: 712440 - DNA, 120 bp, Artificial Sequence
  ENSG00000197045_60 (sequence is synthesized)
ttcttgggggactaaaaatagcctggccattcatcctcaaatagaaacctttgcctacacctaaaatgacaaagttcagcattgtgtacatagtgactttgggcattattccagttgtag

SEQ ID NO: 712441 - DNA, 120 bp, Artificial Sequence
  ENSG00000197045_61 (sequence is synthesized)
atttgaactctggtttcaggaagagtacttttaagtggcactggcactatcttctgaaaatggaaaaagtgatttgcatattgctcctcccactgtgagctatatctgacattatgcaga

SEQ ID NO: 712442 - DNA, 120 bp, Artificial Sequence
  ENSG00000197046_0 (sequence is synthesized)
actggggaggtggccgagagcgggtctggcctggggtgttcagatgctcacagcatggaaaagtccatctggctgctggcctgcttggcgtgggttctcccgacaggctcatttgtgaga

SEQ ID NO: 712443 - DNA, 120 bp, Artificial Sequence
  ENSG00000197046_1 (sequence is synthesized)
actaaaatagatactacggagaacttgctcaacacagaggtgcacagctcgccagcgcagcgctggtccatgcaggtgccacccgaggtgagcgcggaggcaggcgacgcggcagtgctg

SEQ ID NO: 712444 - DNA, 120 bp, Artificial Sequence
  ENSG00000197046_2 (sequence is synthesized)
ccctgcaccttcacgcacccgcaccgccactacgacgggccgctgacggccatctggcgcgcgggcgagccctatgcgggcccgcaggtgttccgctgcgctgcggcgcggggcagcgag

SEQ ID NO: 712445 - DNA, 120 bp, Artificial Sequence
  ENSG00000197046_3 (sequence is synthesized)
ctctgccagacggcgctgagcctgcacggccgcttccggctgctgggcaacccgcgccgcaacgacctctcgctgcgcgtcgagcgcctcgccctggctgacgaccgccgctacttctgc

SEQ ID NO: 712446 - DNA, 120 bp, Artificial Sequence
  ENSG00000197046_4 (sequence is synthesized)
cgcgtcgagttcgccggcgacgtccatgaccgctacgagagccgccacggcgtccggctgcacgtgacagccgcgccgcggatcgtcaacatctcggtgctgcccagtccggctcacgcc

SEQ ID NO: 712447 - DNA, 120 bp, Artificial Sequence
  ENSG00000197046_5 (sequence is synthesized)
ttccgcgcgctctgcactgccgaaggggagccgccgcccgccctcgcctggtccggcccggccctgggcaacagcttggcagccgtgcggagcccgcgtgagggtcacggccacctagtg

SEQ ID NO: 712448 - DNA, 120 bp, Artificial Sequence
  ENSG00000197046_6 (sequence is synthesized)
accgccgaactgcccgcactgacccatgacggccgctacacgtgtacggccgccaacagcctgggccgctccgaggccagcgtctacctgttccgcttccatggcgccagcggggcctcg

SEQ ID NO: 712449 - DNA, 120 bp, Artificial Sequence
  ENSG00000197046_7 (sequence is synthesized)
acggtcgccctcctgctcggcgctctcggcttcaaggcgctgctgctgctcggggtcctggccgcccgcgctgcccgccgccgcccagagcatctggacaccccggacaccccaccacgg

SEQ ID NO: 712450 - DNA, 120 bp, Artificial Sequence
  ENSG00000197046_8 (sequence is synthesized)
tcccaggcccaggagtccaattatgaaaatttgagccagatgaacccccggagcccaccagccaccatgtgctcaccgtgaggagtccctcagccaccaacatccatttcagcactgtaa

SEQ ID NO: 712451 - DNA, 120 bp, Artificial Sequence
  ENSG00000197046_9 (sequence is synthesized)
agaacaaaggccagtgcgaggcttggctggcacagccagtcctggttctcgggcaccttggcagcccccagctgggtggctcctcccctgctcaaggtcaagaccctgctcaaggaggct

SEQ ID NO: 712452 - DNA, 120 bp, Artificial Sequence
  ENSG00000197046_10 (sequence is synthesized)
cctgctcaaggaggctcatctggcctcctatgtggacaaccatttcggagctccctgatatttttgccagcatttcgtaaatgtgcatacgtctgtgtgtgtgtgtgtgtgtgagagaga

SEQ ID NO: 712453 - DNA, 120 bp, Artificial Sequence
  ENSG00000197046_11 (sequence is synthesized)
gcattagcttgagcgtgaaacttccagaaatgttcccttgccctttcttacctagaacacctgctatagtaaagcagacaggaaactgtttacagggcctggaggcccagtcttgtcctc

SEQ ID NO: 712454 - DNA, 120 bp, Artificial Sequence
  ENSG00000197046_12 (sequence is synthesized)
tgttgaacacggacaatcatattcttccctcctggctgggaggactacaaagatctgaggaaataatggatatgaaggggctttggaaagtacaaagccatcttctcatgaggggcatga

SEQ ID NO: 712455 - DNA, 120 bp, Artificial Sequence
  ENSG00000197046_13 (sequence is synthesized)
cagaaccctctttgcagagtgacctttggacgtgcagtcagttcttggagaagtgtggcccctgcagcagtgtcacggagaacacagagttccagagagcaagcctggggcaggggctgt

SEQ ID NO: 712456 - DNA, 120 bp, Artificial Sequence
  ENSG00000197046_14 (sequence is synthesized)
gcaaacgtgtggtcagaggaacatcaaatcctggaaacttggtggcagggagaggcctggggcctttaccccatgccccctgggatctccactgtgactgtcccacaccctctgcccaac

SEQ ID NO: 712457 - DNA, 120 bp, Artificial Sequence
  ENSG00000197046_15 (sequence is synthesized)
tcttgccccatcagctgccctgcattgccttgagctgggacccctaggaaatggaaaccaggctcccctctctcaaggtatctgggaaccactgtctcaggagctgaagccgggagacct

SEQ ID NO: 712458 - DNA, 120 bp, Artificial Sequence
  ENSG00000197046_16 (sequence is synthesized)
gaggggaggtctggccggagagtccgtgcgtaaagcagctacagctctgacctctctgacctgcagcctctcagggcgtgcgaagtccaaacgcactggcaacttcaccccctttgccct

SEQ ID NO: 712459 - DNA, 120 bp, Artificial Sequence
  ENSG00000197046_17 (sequence is synthesized)
aacgcgggcaggctgacttggaggggtgcttccctatttacacctcagggtgaatttgttgatcaccttagctcctgtggtccttggggcttagggagaggagggaggcatgcctgggtc

SEQ ID NO: 712460 - DNA, 120 bp, Artificial Sequence
  ENSG00000197046_18 (sequence is synthesized)
ccaggtaagctggcaagaggaaagggccacaggctaggggaataacgaggccatgaacaagacatctcaccccagttacaatggcttttatccaaaagacaggcaatgacaaatgctgat

SEQ ID NO: 712461 - DNA, 120 bp, Artificial Sequence
  ENSG00000197046_19 (sequence is synthesized)
gagaaagtggagaaagaggaatccccatatactattggtgggaatgtaaattagtatagccactatggagaacagtacagtttcctcaaaaaactaaaaataggctgggcgtggtggctc

SEQ ID NO: 712462 - DNA, 65 bp, Artificial Sequence
  ENSG00000197046_20 (sequence is synthesized)
aggctgaggcagatcctccagcctgggcaacagagagactgtctccaaagaaaaaaaaagaaata

SEQ ID NO: 712463 - DNA, 120 bp, Artificial Sequence
  ENSG00000197046_21 (sequence is synthesized)
ggcaacagagagactgtctccaaagaaaaaaaaagaaatagaactaccatatgatccagtaatcccactgctgggtatctgtcagcaaggaaatcagtatattgaaaagataccagtact

SEQ ID NO: 712464 - DNA, 120 bp, Artificial Sequence
  ENSG00000197046_22 (sequence is synthesized)
cccatgtttactgcagcactatttgcaatagccaagatatggaatcagcctaagtgtccatccacgaatgaatgaagaaaatgaacacacaatgaaatattcagccataaaaaaaaaaaa

SEQ ID NO: 712465 - DNA, 120 bp, Artificial Sequence
  ENSG00000197046_23 (sequence is synthesized)
actttacacatggagaagcagaagcagagatgatagaatctttcgcccaaggccacatctgtattgggacgggggcagcctggcacccaagtgcccattcctcccttctgaccagccccc

SEQ ID NO: 712466 - DNA, 120 bp, Artificial Sequence
  ENSG00000197046_24 (sequence is synthesized)
acccctccggctctggcgtccaaagggctaaggggaggggtgcccttgtgacagtcacccgccttctcccctgcagccgcgccgcggatcgtcaacatctcggtgctgcccagtccggct

SEQ ID NO: 712467 - DNA, 120 bp, Artificial Sequence
  ENSG00000197046_25 (sequence is synthesized)
acaaatacttattgagtacctactgcataccaggcactggtactaaagacacagcaagatccctgacctcacagaactcatatcctattgtggagaattttaataaatatggaaacacgc

SEQ ID NO: 712468 - DNA, 120 bp, Artificial Sequence
  ENSG00000197050_0 (sequence is synthesized)
gagatttggaggcctcgcgtggggagagggccgcgtctgtggaggagcttggctccgcacctgctgggctggcgaacccgaaattgggcttggaacccgggagccagatcttggaccctg

SEQ ID NO: 712469 - DNA, 120 bp, Artificial Sequence
  ENSG00000197050_1 (sequence is synthesized)
aactgcacctctgtcaagagcccagaggagaaagaatggctgtttcagtagcaatgtccaagctctgcattctccagactctgtgctttcctaagataggaacccagaagaggactgatc

SEQ ID NO: 712470 - DNA, 120 bp, Artificial Sequence
  ENSG00000197050_2 (sequence is synthesized)
atttcttgcagctctaaaaaccatggctcggaaattagtgatgttcagggatgttgccattgacttctctcaggaagagtgggaatgcctggactctgctcagagagatttgtatagaga

SEQ ID NO: 712471 - DNA, 120 bp, Artificial Sequence
  ENSG00000197050_3 (sequence is synthesized)
tgtgatgttggagaactatagcaacttggtatcactagacttgccttcaaggtgtgcaagtaaggacttatctccagaaaagaacacttatgaaacagaattatcccaatgggaaatgag

SEQ ID NO: 712472 - DNA, 120 bp, Artificial Sequence
  ENSG00000197050_4 (sequence is synthesized)
tgacagacttgaaaactgtgatcttgaagagtccaattccagggattatttggaagccaaaggcaagatggagaagcaacaagaaaatcagaaggaatatttcaggcaagggatgatcat

SEQ ID NO: 712473 - DNA, 120 bp, Artificial Sequence
  ENSG00000197050_5 (sequence is synthesized)
atatgacaaaatgtccattttcaaccagcatacttacttatctcaacattcaagatgtcattctactgagaaaccctataaatgtaaggaatgtgggaaagccttcagacgagcctcaca

SEQ ID NO: 712474 - DNA, 120 bp, Artificial Sequence
  ENSG00000197050_6 (sequence is synthesized)
cctaacacaacatcaaagtattcatactggtgaaaaaccctatgaatgtaagcaatgcgggaaggcctttagtcgtgattcacaactcagtcttcatcagagacttcatactggtgagaa

SEQ ID NO: 712475 - DNA, 120 bp, Artificial Sequence
  ENSG00000197050_7 (sequence is synthesized)
accctatgcatgtaaggaatgtgggaaggcctttactcaaagctcacaacttattttacatcatagaattcatactggtgaaaaaccatataaatgtgaagaatgtgggaaagcctttat

SEQ ID NO: 712476 - DNA, 120 bp, Artificial Sequence
  ENSG00000197050_8 (sequence is synthesized)
tcgtagctcacaacttacccgacatcaaaaagttcatactggtgagaaaccttatgaatgtaaagaatgtgggaaggcctttactcagaattcacaacttacactacaccagagacttca

SEQ ID NO: 712477 - DNA, 120 bp, Artificial Sequence
  ENSG00000197050_9 (sequence is synthesized)
ttcatactggtgaaaagctctatgaatgtaaagaatgtaggaaggtctttactcagctctcacaacttattctgcataagagaattcataccggtgagaaaccctatgaatgtaaggaat

SEQ ID NO: 712478 - DNA, 120 bp, Artificial Sequence
  ENSG00000197050_10 (sequence is synthesized)
aaaagcttttatttgtggctcacagctttctcaacatcagaaaattcataatggggaaaaaccatatgaatgtaaggaatgtggaagggcctttattcggggctcactactgatgcaaca

SEQ ID NO: 712479 - DNA, 120 bp, Artificial Sequence
  ENSG00000197050_11 (sequence is synthesized)
tcagaggattcatactggtgaaaaaccctataaatgtgaagaatgtgggaaggcctttatccgtggctcacaacttactcaacaccagagaattcacaccaatgaaaagccctatgaatg

SEQ ID NO: 712480 - DNA, 120 bp, Artificial Sequence
  ENSG00000197050_12 (sequence is synthesized)
taaggaatgtggaaagatgtttagtcatggctcacaacttactcaacatcagagaatacacactggtgagaaaccctatcaatgtaaggaatgtggaaaagcgtttaatcgtggctcact

SEQ ID NO: 712481 - DNA, 89 bp, Artificial Sequence
  ENSG00000197050_13 (sequence is synthesized)
agaatgtggaaaaacctttagtcgtggctcagaacttactcaacatgagcgaattcacacaggtgagaaaccctatgaatgtaaggaat

SEQ ID NO: 712482 - DNA, 120 bp, Artificial Sequence
  ENSG00000197050_14 (sequence is synthesized)
accctatgaatgtaaggaatgtgggaaatcttttattcgtggttcccagcttactcaacatcagagaatccatactggtgagaaaccttatgaatgtaaagaatgtagaatggcctttac

SEQ ID NO: 712483 - DNA, 120 bp, Artificial Sequence
  ENSG00000197050_15 (sequence is synthesized)
tggtgagaaaccctatgtgtgtaatgaatgtggaaaggcctttgcgcgtggcttactacttatacaacatcagagaattcatactggtgagaaaccatatcaatgtaaggaatgtgggaa

SEQ ID NO: 712484 - DNA, 120 bp, Artificial Sequence
  ENSG00000197050_16 (sequence is synthesized)
agcctttattcgtggttcacagttgactcaacatcagcgaattcacactggagaaaaaccctatgaatgcaaggagtgtggcaaggcctttagtcatggctctcagcttactctacatca

SEQ ID NO: 712485 - DNA, 120 bp, Artificial Sequence
  ENSG00000197050_17 (sequence is synthesized)
gagaatccatactggtgagaagccctatgaatgcagagaatgtagaaaggcctttactcagagttcacatctttctcggcatcagagaattcatactggtgagaaaccatatcaatgtaa

SEQ ID NO: 712486 - DNA, 120 bp, Artificial Sequence
  ENSG00000197050_18 (sequence is synthesized)
ggaatgtgggaaggcctttactcgtggttcacagctaactcaacatcagagaattcatatcagtgagaaatcttttgaatataaggaatgtgggattgactttagtcatggctcacaagt

SEQ ID NO: 712487 - DNA, 120 bp, Artificial Sequence
  ENSG00000197050_19 (sequence is synthesized)
ttacatgtgaattgtctgattatttgagatcactatgaagaggttctctggttgttagcagcaaagaattctcacaaatgtgaatatgggcgcacatttgcctcataaagcacagcatca

SEQ ID NO: 712488 - DNA, 120 bp, Artificial Sequence
  ENSG00000197050_20 (sequence is synthesized)
gataatttatgtgagagaaaatggtagtgtcattcatatagaaaaacatcattactggaaacctattaaacattagcaaattggagaatagttttaatatagtaaatgtaggaagccctt

SEQ ID NO: 712489 - DNA, 120 bp, Artificial Sequence
  ENSG00000197050_21 (sequence is synthesized)
tagccatattgaaaacaaatatctttttcaacgttatcttagctctactagttgatctttttgttatatgtatcatgatacttaacctctaccttggtttaatcattttaagatagacct

SEQ ID NO: 712490 - DNA, 120 bp, Artificial Sequence
  ENSG00000197050_22 (sequence is synthesized)
aagtatattacctttattgtaagattcttggaagtattatgtaagttattacatgtaaaagctcttagaatggtgccttgaacgtagcataccacaaatattagctaccattttcactag

SEQ ID NO: 712491 - DNA, 120 bp, Artificial Sequence
  ENSG00000197050_23 (sequence is synthesized)
tgttattttagagaatttgcatgagaggagagtacttatgagtataatgaatattgagaaatcttttatcaacacatccaagatgacttggttggggggcactgtatgccataatgaatg

SEQ ID NO: 712492 - DNA, 120 bp, Artificial Sequence
  ENSG00000197050_24 (sequence is synthesized)
tgagaaagctgtcatttaaatctcatccattattgctataagaggaaattcatactgttaaaaaaaaaaaaacccagtggatataatcagtgtattattaaaaaaaaaaaaacccagtgg

SEQ ID NO: 712493 - DNA, 120 bp, Artificial Sequence
  ENSG00000197050_25 (sequence is synthesized)
atgtaatcagtgtattattgagcacagctgttagagaagtgggacaaggtgtgaagtgatttttaacgaagtctaagatccaaagtctaataaatctaggaattttttaaaaacttgaat

SEQ ID NO: 712494 - DNA, 120 bp, Artificial Sequence
  ENSG00000197050_26 (sequence is synthesized)
gtattgcttttgaagtaaacaaaataactgatattacagactattttgcaatgaaaaatgatgagagtttgtgatacagactgcttttttcctaccctatatctattttctcttttttag

SEQ ID NO: 712495 - DNA, 120 bp, Artificial Sequence
  ENSG00000197050_27 (sequence is synthesized)
taacaaatttctgggctgaaaatctcagccttccttgcaggtcaacaagatagaagtgatatttatatgagtaggagatttacgaaatccatttttcctgtctttttttccgtgcctaca

SEQ ID NO: 712496 - DNA, 120 bp, Artificial Sequence
  ENSG00000197050_28 (sequence is synthesized)
atgtggacatctaagctggagctccgttactctcatggggactttgagaatggtatctgggtgttatggatcatggagcagaaatacagaaggagtctgcaaccctgatgactttgtgga

SEQ ID NO: 712497 - DNA, 120 bp, Artificial Sequence
  ENSG00000197050_29 (sequence is synthesized)
acagccatactagctctggtctgcttgcctcctgtttctctttaaataaaattaaacatcttatttgttgatgctattgtagttctgttattgacaataaaaattcttaaggatataaaa

SEQ ID NO: 712498 - DNA, 120 bp, Artificial Sequence
  ENSG00000197050_30 (sequence is synthesized)
agaaaccagtccctgaggcttgggaaagcaggagccctccgcggcagtgcgtcggtgtcgaggctccgaggctccggcctcacctctccaggaggtcgacagaacgacaggacgttctcc

SEQ ID NO: 712499 - DNA, 120 bp, Artificial Sequence
  ENSG00000197050_31 (sequence is synthesized)
gaatgccaggagtcgcagagggcagagcaggatgaagaaaccacaggcggagtctaggggaagcagtacggcgtccctgcctcaggcctgcccggacggtgtgcggacttgccttcaagg

SEQ ID NO: 712500 - DNA, 120 bp, Artificial Sequence
  ENSG00000197050_32 (sequence is synthesized)
agtctgccatctgtttcattgttattccttttcacatcaaatatcaacgtaatgaataacagtctgaaaacttatctctaactggttgaagagcttgacctacgaaagtctgacaaatag

SEQ ID NO: 712501 - DNA, 120 bp, Artificial Sequence
  ENSG00000197050_33 (sequence is synthesized)
tagcaacttggtatcactagcacatcaaatatcaacgtaatgaataacagtctgaaaacttatctctaactggttgaagagcttgacctacgaaagtctgacaaatagttggactattaa

SEQ ID NO: 712502 - DNA, 120 bp, Artificial Sequence
  ENSG00000197054_0 (sequence is synthesized)
gtccttgcgcagccggtggttgatatccgctgtatccatccccgagagggacctggtacctctacccaggtttctatcgctctgtctcctgcgctgtgcccttctgtagtcacaggagct

SEQ ID NO: 712503 - DNA, 120 bp, Artificial Sequence
  ENSG00000197054_1 (sequence is synthesized)
gtagagaggaccccaggacatctgaaagccaggaaatgatgtttcaggaccctgtggcctgtgaggatgttgctgtgaacttcacccaggaggagtgggctttgctggatatttcgcaga

SEQ ID NO: 712504 - DNA, 120 bp, Artificial Sequence
  ENSG00000197054_2 (sequence is synthesized)
ggaaactctacagggaagtgatgctggaaactttcaggaacctgacctctatagggaaaaagtggaaagaccagaacattgaatatgagtaccaaaaccccaggagaaacttcaggagtc

SEQ ID NO: 712505 - DNA, 120 bp, Artificial Sequence
  ENSG00000197054_3 (sequence is synthesized)
tcatagaagggaatgtcaatgaaattaaagaagacagtcattgtggagaaacttttacccaggttccagatgacaggctgaacttccaggagaagaaagcttctcctgaagcaaaatcat

SEQ ID NO: 712506 - DNA, 120 bp, Artificial Sequence
  ENSG00000197054_4 (sequence is synthesized)
gtgataactttgtatgtggagaagttggcataggtaactcatcttttaatatgaacatcagaggtgacattgggcacaaggcatacgagtatcaggactatgcaccaaagccatataagt

SEQ ID NO: 712507 - DNA, 120 bp, Artificial Sequence
  ENSG00000197054_5 (sequence is synthesized)
gtcaacaacctaagaaagccttcagatatcacccctcctttagaacacaagaaaggaatcacaccggagagaaaccctatgcttgtaaagaatgtggaaaaacctttatttcccattcag

SEQ ID NO: 712508 - DNA, 120 bp, Artificial Sequence
  ENSG00000197054_6 (sequence is synthesized)
gcattcgaagacgcatggtaatgcacagtggggatggaccttataaatgtaagttttgtgggaaagctgtccattgtctcagattatatcttatccatgaaagaactcacactggagaga

SEQ ID NO: 712509 - DNA, 120 bp, Artificial Sequence
  ENSG00000197054_7 (sequence is synthesized)
aaccgtatgaatgtaaacaatgtgttaaatcctttagttattctgctacccatcgaatacatgaaagaactcacactggagaaaagccttatgaatgtcagcaatgtgggaaagcattcc

SEQ ID NO: 712510 - DNA, 120 bp, Artificial Sequence
  ENSG00000197054_8 (sequence is synthesized)
atagttccagttcttttcaagcacataaaagaacccacactgggggaaagccatatgaatgtaaacaatgtggcaaatccttcagttggtgtcattcctttcaaatacatgaaagaactc

SEQ ID NO: 712511 - DNA, 120 bp, Artificial Sequence
  ENSG00000197054_9 (sequence is synthesized)
acactggggagaagccctgtgaatgtagcaaatgtaataaagcattccgtagttacagatcctatcttagacataaaaggagtcacacgggagagaagccttatcaatgtaaggaatgta

SEQ ID NO: 712512 - DNA, 120 bp, Artificial Sequence
  ENSG00000197054_10 (sequence is synthesized)
aagttttcaaacacacctaagaatgcgctctggagaaagaccttataaatgttagatatgtgggaaaggcctttattctgccaagtcatttcgaagacatgaaaaaactcacactggaga

SEQ ID NO: 712513 - DNA, 120 bp, Artificial Sequence
  ENSG00000197054_11 (sequence is synthesized)
tttcgaagacatgaaaaaactcacactggagagaaaccctataaatgcatgccatgtggtaaagccttcaatctttccagttcctttcagtatcatgaaaggactcacactggagagaaa

SEQ ID NO: 712514 - DNA, 120 bp, Artificial Sequence
  ENSG00000197054_12 (sequence is synthesized)
cagatgtgccccacaccttcgaaggcatggtaggactcactggagagaaaccctatgagtgtaaggaatgtgggaaagccttcagatctgcctcacaccttcaaattcatgaaaggacac

SEQ ID NO: 712515 - DNA, 120 bp, Artificial Sequence
  ENSG00000197054_13 (sequence is synthesized)
aaacacacataagaatacactctggagaaagaccttataaatgtaagacatgtgggaaaggcttttattctcccacgtcatttcaaagacatgaaaaaactcacactgcagagaaaccct

SEQ ID NO: 712516 - DNA, 120 bp, Artificial Sequence
  ENSG00000197054_14 (sequence is synthesized)
tttcaaagacatgaaaaaactcacactgcagagaaaccctatgaatgcaagcaatgtggtaaagccttcagtagttccagttccttttggtaccatgaaaggactcacactggagagaaa

SEQ ID NO: 712517 - DNA, 120 bp, Artificial Sequence
  ENSG00000197054_15 (sequence is synthesized)
cctcaatccttcaaatgcatgctgggactcaccctgaagagaagccctacgagtgtaagcaatgtgggaaagccttcagatctgccccacaccttcgaatccatggtagaactcacactg

SEQ ID NO: 712518 - DNA, 120 bp, Artificial Sequence
  ENSG00000197054_16 (sequence is synthesized)
gagagaaaccctatgagtgtaaggaatgtgggaaagccttcagatctgccaagaaccttcgaattcatgaaaggacacaaacacacgtaagaatgcactctgtagaaagaccttataaat

SEQ ID NO: 712519 - DNA, 120 bp, Artificial Sequence
  ENSG00000197054_17 (sequence is synthesized)
aagaatgcactctgtagaaagaccttataaatgtaagatatgtgggaaaggcttttattctgccaagtcatttcaaatacctgaaaaatcttacactggagagaaaccctatgagtgtaa

SEQ ID NO: 712520 - DNA, 120 bp, Artificial Sequence
  ENSG00000197054_18 (sequence is synthesized)
gagaaaccctatgagtgtaagcaatgtggaaaaaccttcagatctacctcacaccttcgaaaacatggtaggactcacactggatagaaaccaaagcaggtgaatcacctgaggtcagga

SEQ ID NO: 712521 - DNA, 120 bp, Artificial Sequence
  ENSG00000197054_19 (sequence is synthesized)
ctgaggtcaggagttcaagactggcctgatcaatatgatgaaacccctgtctctactaaaactacaaaaattggccaggcgtggtggcctgcttctgtaatcctagctagttgggaggct

SEQ ID NO: 712522 - DNA, 84 bp, Artificial Sequence
  ENSG00000197054_20 (sequence is synthesized)
actacaaaaattggccaggcgtggtggcctgcttctgtaatcctagctagttgggaggctggcacaggagaatcgcttgaatct

SEQ ID NO: 712523 - DNA, 120 bp, Artificial Sequence
  ENSG00000197054_21 (sequence is synthesized)
ctgtttaccagaaagtacgttgggtaaaacatagaaattcatttataccttagaaagctatttttttcaggttggtttagtgagtcacaggaagctaataaattacaataataatgtaaa

SEQ ID NO: 712524 - DNA, 120 bp, Artificial Sequence
  ENSG00000197054_22 (sequence is synthesized)
ccagcctgggcaacaagttgttgttttgaaaatccatctcaaaacaacaacaacaaaaatgctttatggaagaaagtacagaaagcgagaaagggatgtgatgaccaaagcagggaataa

SEQ ID NO: 712525 - DNA, 120 bp, Artificial Sequence
  ENSG00000197054_23 (sequence is synthesized)
atgtttggagtccacggcaacttcttgggaatagagtctaggcccccactgctgtcactctcacccagcctcctctacacatgtgagatgtttcaggaccctgtggcctgtgaggatgtt

SEQ ID NO: 712526 - DNA, 120 bp, Artificial Sequence
  ENSG00000197056_0 (sequence is synthesized)
cgtttcgcttcgaagattgtttcagaagcgttgggcggggcgtccctgagagaaattagaatctggaaactgttcttcaggaagaaacccattagtttggaactggagaattcctttgca

SEQ ID NO: 712527 - DNA, 120 bp, Artificial Sequence
  ENSG00000197056_1 (sequence is synthesized)
tcagatactaaaatgaaagaaccacttttaggtggtgagtgtgacaaggcagtggcatcacagctggggctgctagatgaaattaagacagaacccgacaatgctcaagagtattgtcat

SEQ ID NO: 712528 - DNA, 120 bp, Artificial Sequence
  ENSG00000197056_2 (sequence is synthesized)
aggcaacagtccagaactcaggagaatgaactgaaaataaatgctgtgttttcagagagtgcttcacagttgactgcaggcattcagctttctctggcatcatctggcgtgaataaaatg

SEQ ID NO: 712529 - DNA, 120 bp, Artificial Sequence
  ENSG00000197056_3 (sequence is synthesized)
cttccttcagtttcaaccacagctattcaggtttcctgtgctggttgtaaaaaaattctccagaaggggcaaactgcttatcagaggaaaggatctgctcaacttttctgctccatacca

SEQ ID NO: 712530 - DNA, 120 bp, Artificial Sequence
  ENSG00000197056_4 (sequence is synthesized)
tgcatcactgaatacatttcatctgccagttcaccagttccttctaagagaacttgttcaaactgctcaaaagacattttaaatccaaaggatgtgattagtgtccagctggaagacact

SEQ ID NO: 712531 - DNA, 120 bp, Artificial Sequence
  ENSG00000197056_5 (sequence is synthesized)
acctcttgcaaaactttttgcagcctatcttgtctttcatcatatgaagaaaaaagaaaaccatttgttaccatatgtactaatagcattttgaccaagtgcagcatgtgccagaagact

SEQ ID NO: 712532 - DNA, 120 bp, Artificial Sequence
  ENSG00000197056_6 (sequence is synthesized)
gctattattcagtatgaagtaaaataccaaaatgtgaaacataatctttgcagtaatgcctgcctttcaaagtttcactctgctaacaacttcatcatgaactgctgtgagaactgtggc

SEQ ID NO: 712533 - DNA, 120 bp, Artificial Sequence
  ENSG00000197056_7 (sequence is synthesized)
acttactgttacaccagctctagtctgtcccacatacttcagatggaaggacagtctcattactttaatagttcaaagagtattacagcatataagcagaaacctgccaaaccacttata

SEQ ID NO: 712534 - DNA, 120 bp, Artificial Sequence
  ENSG00000197056_8 (sequence is synthesized)
tctgttccttgcaaaccattgaagccctcagatgaaatgattgagactacgagtgatttggggaagacagagcttttctgctctattaattgtttctctgcatacagtaaagctaagatg

SEQ ID NO: 712535 - DNA, 120 bp, Artificial Sequence
  ENSG00000197056_9 (sequence is synthesized)
gaatcttcttcagtaagtgttgtttctgtggtgcatgatacttcaacagagcttctttctccaaagaaagatacgactccagttataagcaatatagtgtcattggcagacaccgatgtt

SEQ ID NO: 712536 - DNA, 120 bp, Artificial Sequence
  ENSG00000197056_10 (sequence is synthesized)
gccttgcccatcatgaacactgatgtcttacaagatacagtttcttcagtaacagcaacagcagatgtcattgtggatctttctaagagttcacctagtgaacccagtaatgctgttgct

SEQ ID NO: 712537 - DNA, 120 bp, Artificial Sequence
  ENSG00000197056_11 (sequence is synthesized)
agtagtagtacggaacagccaagcgtttcaccatcttcatcagtattcagtcagcatgcaattggttccagtacagaagtacaaaaagacaatatgaaatctatgaaaataagtgatgaa

SEQ ID NO: 712538 - DNA, 120 bp, Artificial Sequence
  ENSG00000197056_12 (sequence is synthesized)
ctatgtcacccaaaatgtacatccaaagtacaaaaagttaaaggtaaatcacgaagtattaaaaaatcttgttgtgcagattttgagtgtttggaaaacagtaaaaaagatgtggcattc

SEQ ID NO: 712539 - DNA, 120 bp, Artificial Sequence
  ENSG00000197056_13 (sequence is synthesized)
tgttattcatgccagttgttctgccaaaaatattttagctgtggaagagagtcatttgcaacccacggaacttctaattggaaaaaaaccctggaaaaattcagaaagcatgaaaaaagt

SEQ ID NO: 712540 - DNA, 120 bp, Artificial Sequence
  ENSG00000197056_14 (sequence is synthesized)
gaaatgcatttgaagtcattggaattttggagagaataccaattttgtgatggagctgtcagtgacgatttatctattcattcgaaacagattgagggaaataaaaagtacctaaagctt

SEQ ID NO: 712541 - DNA, 120 bp, Artificial Sequence
  ENSG00000197056_15 (sequence is synthesized)
ataattgaaaatattttatttcttggaaagcagtgtttacccttaagaggaaacgaccagtcagtttcatctgtgaataaaggcaattttttagaattgttagaaatgagagcaaaagat

SEQ ID NO: 712542 - DNA, 120 bp, Artificial Sequence
  ENSG00000197056_16 (sequence is synthesized)
aaaggagaagaaacatttcgacttatgaattcacaagttgacttctataacagtacacaaattcaaagtgatattatcgaaataataaagactgaaatgttgcaggatattgtgaatgag

SEQ ID NO: 712543 - DNA, 120 bp, Artificial Sequence
  ENSG00000197056_17 (sequence is synthesized)
agatacccacaaaaatcatcaaaggctatcttaattaaggaaagattcttgggttttgttgatactgaggagatgactgggacccacttacataggactatcaaaacttatctgcagcaa

SEQ ID NO: 712544 - DNA, 120 bp, Artificial Sequence
  ENSG00000197056_18 (sequence is synthesized)
attggagttgatatggataaaatacatggccaggcctatgatagcaccactaatttgaagataaaatttaataaaatagcagcagaattcaagaaagaagaaccaagagctttatacata

SEQ ID NO: 712545 - DNA, 120 bp, Artificial Sequence
  ENSG00000197056_19 (sequence is synthesized)
cattgttatgcacactttttggatttatcaataattaggttttgtaaagaagtaaaagaactccgaagtgctctaaaaactctcagttctttgttcaacactatttgtatgtctggggaa

SEQ ID NO: 712546 - DNA, 120 bp, Artificial Sequence
  ENSG00000197056_20 (sequence is synthesized)
atgttggcaaattttcgaaacatttataggctaagtcaaaacaaaacatgcaagaaacatatatcacaatcatgttggacagtccatgatcgtacattactatctgtgattgacagtctt

SEQ ID NO: 712547 - DNA, 120 bp, Artificial Sequence
  ENSG00000197056_21 (sequence is synthesized)
ccagagattattgaaacattggaagttatagcaagccattcttcaaatacaagtttcgccgatgaattgagtcatttgctgacattggtttccaaatttgaatttgtcttttgtttgaaa

SEQ ID NO: 712548 - DNA, 120 bp, Artificial Sequence
  ENSG00000197056_22 (sequence is synthesized)
ttcctgtatcgagtgctgagtgttacaggaattctttccaaagagcttcaaaataaaaccatagacattttttctttgtcttcaaaaatagaagcaattttggaatgtttatcatctgaa

SEQ ID NO: 712549 - DNA, 120 bp, Artificial Sequence
  ENSG00000197056_23 (sequence is synthesized)
agaaatgacgtatactttaaaacaatctgggatggaacagaggaaatatgtcaaaaaataacctgtaaaggttttaaagttgaaaaaccttctcttcagaaaagaagaaaaattcagaaa

SEQ ID NO: 712550 - DNA, 120 bp, Artificial Sequence
  ENSG00000197056_24 (sequence is synthesized)
tcagtagatcttggcaattcagataatatgttttttcctacttcaacagaagaacaatataaaattaatatctattaccaaggattagatactatattacaaaatttaaagttatgtttt

SEQ ID NO: 712551 - DNA, 120 bp, Artificial Sequence
  ENSG00000197056_25 (sequence is synthesized)
tcggagtttgattattgcaaaataaagcaaatttcagaactgttatttaaatggaatgaaccattaaatgaaacaacagcaaaacatgttcaggaattttataaacttgatgaggacatt

SEQ ID NO: 712552 - DNA, 120 bp, Artificial Sequence
  ENSG00000197056_26 (sequence is synthesized)
atcccagaacttagattttatcgacattatgcaaagcttaactttgtcatagatgatagttgcataaacttcgtcagtctcggctgtttgtttattcagcatggtcttcacagtaatatt

SEQ ID NO: 712553 - DNA, 120 bp, Artificial Sequence
  ENSG00000197056_27 (sequence is synthesized)
ccttgtctctcaaagctattatatattgctttgtcttggccaattacttcagcaagtactgagaactcattttctaccctgcctcgtcttaagacatatttatgtaataccatgggacaa

SEQ ID NO: 712554 - DNA, 120 bp, Artificial Sequence
  ENSG00000197056_28 (sequence is synthesized)
gagaagcttactggcccagccctaatggctgttgagcaggagttggtaaataaactaatggagcctgaaagactcaatgaaattgtggaaaagtttatcagtcagatgaaagaaatataa

SEQ ID NO: 712555 - DNA, 120 bp, Artificial Sequence
  ENSG00000197056_29 (sequence is synthesized)
tacatgctcatttgaacttacctaaaagacttgtatttccattgggatgttttcatttcaaaattgttcaaaattcaaaagacacagaacgataaacagtgaagtctccttccctccttt

SEQ ID NO: 712556 - DNA, 120 bp, Artificial Sequence
  ENSG00000197056_30 (sequence is synthesized)
agaactcattttctcttcccaaaaagtgttatcttttccttaaatatccctctagaggtatttttcctaagtggtattgtacggtgtatactgttcttcagcttgtcttctctgtgtaac

SEQ ID NO: 712557 - DNA, 120 bp, Artificial Sequence
  ENSG00000197056_31 (sequence is synthesized)
atatttttgagattgtcccatgtcgttacatgaagagtttcttgattcttggtctataattgcagatgttattgtatgaatgtaccataatatatttgagcagtccctgctgacattttt

SEQ ID NO: 712558 - DNA, 120 bp, Artificial Sequence
  ENSG00000197056_32 (sequence is synthesized)
ttcctaaccttttgctattataaataatgattcattttataaccttttatataggtcacattgcacatgagtgagtttactgtaagctggaaatctaaagttagaattactaggttaaga

SEQ ID NO: 712559 - DNA, 120 bp, Artificial Sequence
  ENSG00000197056_33 (sequence is synthesized)
tatgtgcatttttacttttgatagatattggcaagttgccatctataaggattgtgccagtttacagtcccacccacaatgcatgagagtgcctattaaatctttgtaagtgttatcaaa

SEQ ID NO: 712560 - DNA, 67 bp, Artificial Sequence
  ENSG00000197056_34 (sequence is synthesized)
tgagagaaattctggaaactgttcttcaggaagaaacccattagtttggaactggagaattcctttg

SEQ ID NO: 712561 - DNA, 120 bp, Artificial Sequence
  ENSG00000197056_35 (sequence is synthesized)
agcattcttataggagtctccagcctctctttgcagttttcaagacaggaagttgacttcttccttgcagctccttccacagtgaacaacttggctgtcagagaggttctgattacaaaa

SEQ ID NO: 712562 - DNA, 120 bp, Artificial Sequence
  ENSG00000197056_36 (sequence is synthesized)
cccagtccagccacaaaaagcttctgcagaagcctgcctaatgtttacaaacctacgatgcagccactacaattatccccatttcaaggtcgaagaaatggagatttatagaagttgtca

SEQ ID NO: 712563 - DNA, 120 bp, Artificial Sequence
  ENSG00000197056_37 (sequence is synthesized)
aatcgcttactagcacacagctaataagtagtaaagccatctctcaaatccaggaaatctaactgccctgcctgagctctgagtcaagggtcctactttggctgccagccagcgacgact

SEQ ID NO: 712564 - DNA, 120 bp, Artificial Sequence
  ENSG00000197056_38 (sequence is synthesized)
gccaccacacctagctaatctgtagcatcctttagtgcccatttcctgaaaggtggcctactgagagagcatgatattaaataatacttggcttgctgagcacttcacatgcaccatccc

SEQ ID NO: 712565 - DNA, 120 bp, Artificial Sequence
  ENSG00000197056_39 (sequence is synthesized)
acttaatcctcaccatttaaccctaagaggatttataccatcagctcccctgcttctcagacctttagactcaaattgaattacaccactggtttccctgggtctccagcttgcagacag

SEQ ID NO: 712566 - DNA, 73 bp, Artificial Sequence
  ENSG00000197056_40 (sequence is synthesized)
gtttcgcttcgaagattgtttcagaagcgttgggcggggcgtccctgagagaaatgtccattcactgcgacct

SEQ ID NO: 712567 - DNA, 75 bp, Artificial Sequence
  ENSG00000197056_41 (sequence is synthesized)
gaggggtagtgagtacagattgggttaacctcagatagaaagctttacatttcttttttgtttgtttgtttgttt

SEQ ID NO: 712568 - DNA, 120 bp, Artificial Sequence
  ENSG00000197057_0 (sequence is synthesized)
ggggagcactgctgcacttctaaagaaagaagaaaaggagatttgtaatttatgcggcatgcatgatgaatgtactccacagcagacaatgtcctccattcaagataccaaagcagcaga

SEQ ID NO: 712569 - DNA, 120 bp, Artificial Sequence
  ENSG00000197057_1 (sequence is synthesized)
cattgctgcaagaggggaactaaatgtcatagaaacagctactgtttctcccacaaatggagaggaaagtcattacacaaaccaggtccagttagaaaaaaataaaacacatatgagttc

SEQ ID NO: 712570 - DNA, 120 bp, Artificial Sequence
  ENSG00000197057_2 (sequence is synthesized)
agcattagtggaaaaagaaaacaatacatcactgaatggacgtgtactggggcaagaagagtcacagaataaaatgttcccagataatgcagaaaatgaagatgataaacaaatagaaca

SEQ ID NO: 712571 - DNA, 120 bp, Artificial Sequence
  ENSG00000197057_3 (sequence is synthesized)
catgactgttgagaacataaatggcaacagggaagagactcatggcataattcagacaacagagacagaaattcaagagacttcagaaagcccaagagaagagatgaccacatcctcaat

SEQ ID NO: 712572 - DNA, 120 bp, Artificial Sequence
  ENSG00000197057_4 (sequence is synthesized)
aatatgtgatatctccaagaaatatataaatagtactcttcccaatgattcagagaatataaagcacaagaataacataatggaaaaggagtatcttgatgtgctgagtgatgttactgg

SEQ ID NO: 712573 - DNA, 120 bp, Artificial Sequence
  ENSG00000197057_5 (sequence is synthesized)
cccccaagtgtcttgttatattacagcaccatcatatgttctacaacaactagaatgccggataataaatcacatgagttctttaatagtgggtgataatgaagagttagttagcaacgt

SEQ ID NO: 712574 - DNA, 120 bp, Artificial Sequence
  ENSG00000197057_6 (sequence is synthesized)
cataactattgaatgctcagataaggaaaagagagttccatttccaataggcattgcaattccatttactgcacgttacagaggaaattacagagatatcatggtgaaagtgtgtgacat

SEQ ID NO: 712575 - DNA, 120 bp, Artificial Sequence
  ENSG00000197057_7 (sequence is synthesized)
aaaccttcaatcaagttacctaaacccaaattcactagaaggaatgaagggaggttataaggggacctgtgcttcagtaaaagtttacaaattgggtatcttttctgttgtgtcttgttt

SEQ ID NO: 712576 - DNA, 120 bp, Artificial Sequence
  ENSG00000197057_8 (sequence is synthesized)
aaagaaagagtcgttcacagtaacaaagaaaggcctcgctcttaagtcaagcatggattcccgaatatccttaaattaccctccaggagtttttacctctccagtgctggtgcagttaaa

SEQ ID NO: 712577 - DNA, 120 bp, Artificial Sequence
  ENSG00000197057_9 (sequence is synthesized)
gatccaaccagttgacccagctctggtggcacatttaaaagcacagcaagatactttctactcagtccaatccacaagccctctgattcacattcagcacccatcaacttatccttttca

SEQ ID NO: 712578 - DNA, 120 bp, Artificial Sequence
  ENSG00000197057_10 (sequence is synthesized)
gaagccagtcactttgtttttaccttgttctccataccttgataaaaacaaccttggttctgagatagatcataaaagaagagcaagtgccacaataaataggattacaccttcgtattt

SEQ ID NO: 712579 - DNA, 120 bp, Artificial Sequence
  ENSG00000197057_11 (sequence is synthesized)
caaccggacaaaaattgcctccataagaaaacctaggaaaaatgccagtgaatgtttgaaattactgggattcagaagccaagacagtggttggtgtgggcttgatgatgttgtgaaaac

SEQ ID NO: 712580 - DNA, 120 bp, Artificial Sequence
  ENSG00000197057_12 (sequence is synthesized)
catacagagcggcttggtatcagttgaattgtatgaacatttggagaggtttattgtacttcacctctcttccaccatggacaatagtcatttggttacttttgtgaaatctttagagga

SEQ ID NO: 712581 - DNA, 120 bp, Artificial Sequence
  ENSG00000197057_13 (sequence is synthesized)
agccatgctcagcaccactgcctgcatagtactgtctcaccagaaggacaatccacatagaatagctgttttagtggtgccttccaaagatttaagccaggtgcttaaggacctgcactt

SEQ ID NO: 712582 - DNA, 120 bp, Artificial Sequence
  ENSG00000197057_14 (sequence is synthesized)
ggtttggaggacctccagagccatctcgtcatttccaagttcgagaaggagaacaacttcttttaagatttactggaaacatatttgcttcaagcaacgggaaggattatggaaaagact

SEQ ID NO: 712583 - DNA, 120 bp, Artificial Sequence
  ENSG00000197057_15 (sequence is synthesized)
acacacttatttttcacttgcaaagaaaacctaggctggaactccaaatcaaagaagtggacgaatttggaaactatagttgccctcattacaaaggcaccattgtcgtttataaagtac

SEQ ID NO: 712584 - DNA, 120 bp, Artificial Sequence
  ENSG00000197057_16 (sequence is synthesized)
ctaaaggaaagatagtccccaacttgaatcaatctctcgtaattaatgaaaaccattctcagttgccaatttgcaaattaccattgaaattgccaaagcataagaaattaatcaaccgtc

SEQ ID NO: 712585 - DNA, 120 bp, Artificial Sequence
  ENSG00000197057_17 (sequence is synthesized)
cacagagtaccaaaagagtttctaaggatcctgtagaagccctttgggataacttgctccattggctggctgaggagctctcagaagaaaatgctgagtctctttcctcaactctccctc

SEQ ID NO: 712586 - DNA, 120 bp, Artificial Sequence
  ENSG00000197057_18 (sequence is synthesized)
tgcgccgtagcaccattcagctcatcaaactcaagaaccctgatgatctcacagaacagatccacgagtttctttgcttctggaaaaaatcgcttccaactttcaccgacaaacttcgcc

SEQ ID NO: 712587 - DNA, 120 bp, Artificial Sequence
  ENSG00000197057_19 (sequence is synthesized)
tcctggctcgacatctccgcaagattggcaggagtgatcttgcagaagagctcaaattcaagtgggaaaataaagtgttcactgaaccacagcagtgttttgatgtagcccctgagtaaa

SEQ ID NO: 712588 - DNA, 120 bp, Artificial Sequence
  ENSG00000197057_20 (sequence is synthesized)
agcctgatctctcttcctttacccctaggaaaaggcacacggtgggtttttgtttctgtcaacattttcctggaagtttccgaatgatattatttgaagtcagtctatttaatgatgtgc

SEQ ID NO: 712589 - DNA, 120 bp, Artificial Sequence
  ENSG00000197057_21 (sequence is synthesized)
tatttaatgatgtgagacaaagggagaagcacggatcagataatagaaagcattcctgggtgtgagcgctcctctctggttgagtgattatgttttgcaaccatgactgtcttgagtttg

SEQ ID NO: 712590 - DNA, 120 bp, Artificial Sequence
  ENSG00000197057_22 (sequence is synthesized)
gcctcacttaatagcatttgcaattgagtttgacttgttcacattttaaaagctaagtgtgaagaaaagatctgatatatgtaattacttattaattggtatctacataaaattaaacta

SEQ ID NO: 712591 - DNA, 120 bp, Artificial Sequence
  ENSG00000197057_23 (sequence is synthesized)
gttttctgtgacttcaagtgtgagcccaaaaatatctgagacagttctcaatcaatttagaaagattattttgccaaggttaaggacaggcccgtaacagcctcagaagatcctgatgac

SEQ ID NO: 712592 - DNA, 120 bp, Artificial Sequence
  ENSG00000197057_24 (sequence is synthesized)
atatgcccaaggtgttcggggtagagcttgcttttatgcattttagggagttataatatatcaatcaatacatgtaaggtgtacattggctcaatctggaaaggtaggacaactcaaagc

SEQ ID NO: 712593 - DNA, 120 bp, Artificial Sequence
  ENSG00000197057_25 (sequence is synthesized)
attggctcaatctggaaaggtaggacaactcaaagcaggggcttccagatcacaggtagatttaaagattcttgattggcattgattgaacagttattatctaaagacctggaatcaata

SEQ ID NO: 712594 - DNA, 120 bp, Artificial Sequence
  ENSG00000197057_26 (sequence is synthesized)
agaccaaagttttataatgcagatgaagcctccaggtagcagactttagagggaatagattgtaaatatttctgatcagtcctaaggtctgttgaaatttatgctggccagcttttcctg

SEQ ID NO: 712595 - DNA, 120 bp, Artificial Sequence
  ENSG00000197057_27 (sequence is synthesized)
aattccaaaagagaggagggtattatggagtcatgtccaacctccccttcccagcatggcctaaactagtttttcaggataactttgaaatgcccttggctgagagaaggggcttgttca

SEQ ID NO: 712596 - DNA, 120 bp, Artificial Sequence
  ENSG00000197057_28 (sequence is synthesized)
atgttgtgagaaagtgctgggctagctgactcggatcatctcctagagtttaggagaaataacaatcacaaagtttgaatttgcaaaacctttaggctttgctggcaggagagaaaatac

SEQ ID NO: 712597 - DNA, 120 bp, Artificial Sequence
  ENSG00000197057_29 (sequence is synthesized)
cacttttggatcataaaatggatatggaatacatgggctcaggtaaactgggccaaatattgaagcagatttggagacaaaaccagatgctaaagcaggcactcttgggtgatgaccttt

SEQ ID NO: 712598 - DNA, 120 bp, Artificial Sequence
  ENSG00000197057_30 (sequence is synthesized)
gtgagggggctggtggggccacttggatggccactgtggtctttctgggtcaggaactcagcagtgcccttcaccagctgctggagcacacctcaggcaccctgcgttccacctgccagc

SEQ ID NO: 712599 - DNA, 120 bp, Artificial Sequence
  ENSG00000197057_31 (sequence is synthesized)
ggtctttgtaggtttctaaaattatcttgccatgtttcattagatgtcagtgcagaaacataatttggtttagttttgtatttattctttgtgtgtccatgtatgtgtgtgtagaaatca

SEQ ID NO: 712600 - DNA, 120 bp, Artificial Sequence
  ENSG00000197057_32 (sequence is synthesized)
attgtgaggtcacaatatgaatagttaggggaaaggaaaaagataattctcaacgggtgaaaataattttctaaatgctgcaaaagctgaatatttcaagtagtttctggttatatcaaa

SEQ ID NO: 712601 - DNA, 120 bp, Artificial Sequence
  ENSG00000197057_33 (sequence is synthesized)
acttgatccttgatattgcatctatcacagaggaaaacactcacacaccgggagagcttagggtggccactaacagacaattgcttcgcttggaagggaagcaggagagaccaagagctc

SEQ ID NO: 712602 - DNA, 120 bp, Artificial Sequence
  ENSG00000197057_34 (sequence is synthesized)
catataaagcaggtgcagtgggatcactgctggtgggatccagcagagcagcagtagggcagcagctgtgcgaacctgtggaaaccacagatgtcatctggacctatatggcaccatgag

SEQ ID NO: 712603 - DNA, 120 bp, Artificial Sequence
  ENSG00000197057_35 (sequence is synthesized)
aggaaaactaaaggacaggtagaaaccatcatggcatgctacgtggtgatagatgcatggggagaagctgccgtgcccacagaaggagtgtggagggctgcatggtccagctgagcactg

SEQ ID NO: 712604 - DNA, 120 bp, Artificial Sequence
  ENSG00000197057_36 (sequence is synthesized)
gggggcacctagtggaacagtgtggatgccaagagagtaaagcccatgaaactgccagaaatacttgagaaaactttgccagaaactgaaatttctgcatgagatgatgggccccagagc

SEQ ID NO: 712605 - DNA, 120 bp, Artificial Sequence
  ENSG00000197057_37 (sequence is synthesized)
gacttagaattttatttttggttgactcaggcaaccaattcaagttacatagataccatagagcctacagtaaacaatacaaaataaattggactgaaagacttgatgtcggtggtagta

SEQ ID NO: 712606 - DNA, 120 bp, Artificial Sequence
  ENSG00000197057_38 (sequence is synthesized)
actcactttaaaaaaacctttctaagctcgaaataaattaaaaatagaataacacttcagccatttactggcacagacttttcctttataaaaatataacttggaagagggaaaattcca

SEQ ID NO: 712607 - DNA, 120 bp, Artificial Sequence
  ENSG00000197057_39 (sequence is synthesized)
tattttgttattagcgaaatgaggcagtgcagagaaaataagttatcagtgaaagaattcaaggcctatttcttctacttaggaagaaaacctgctttaaaattagttaacagaagcctt

SEQ ID NO: 712608 - DNA, 120 bp, Artificial Sequence
  ENSG00000197057_40 (sequence is synthesized)
attacataagccctagatatacatcattaaaaataaacaaaacatctgtaaatagaacattaaaatgaaagaaaaaattaaaacttatctaaacccctctttctattgataatcgctatt

SEQ ID NO: 712609 - DNA, 120 bp, Artificial Sequence
  ENSG00000197057_41 (sequence is synthesized)
aatgtctagtataagctttgagtttttggaaagcctaacgccctttagctctctgaagcagttggatataaatgggacattgaactagtttcactgactcattaatgcaaaaaccattag

SEQ ID NO: 712610 - DNA, 120 bp, Artificial Sequence
  ENSG00000197057_42 (sequence is synthesized)
gtcgttggcttgaaaacatcggtagcaattagtttcagttattgaatacctaggaattaattgagttatattacaaaattaaatgttttaatctctttcaaatttaaacgcaagacttcc

SEQ ID NO: 712611 - DNA, 120 bp, Artificial Sequence
  ENSG00000197057_43 (sequence is synthesized)
ttctacaaattaaccagggatttagatatctattcaggtatatatcaaaaaaggcgattcccattttcaaacatagtcccataaaggaatattttattagtcaagattttttacatgctg

SEQ ID NO: 712612 - DNA, 120 bp, Artificial Sequence
  ENSG00000197057_44 (sequence is synthesized)
ccaaaaaggtacaatatgtattttcatgtattcttggggcaaagaaaacagactaaaatgttcattgttttcctgattacaatcgaacaaaaaagtaaagaaaatgaaagttgcttctta

SEQ ID NO: 712613 - DNA, 120 bp, Artificial Sequence
  ENSG00000197061_0 (sequence is synthesized)
ttttcaatcaggtccgccaagtttgtatttaaggaactgtttcagttcataccttccactgcgataggaatcatgtctggtcgcggcaaaggcggaaaaggcttggggaagggtggtgct

SEQ ID NO: 712614 - DNA, 120 bp, Artificial Sequence
  ENSG00000197061_1 (sequence is synthesized)
ggtggcgtcaagcgcatttccggtcttatctatgaggagactcgaggtgtgcttaaggttttcttagagaacgttattcgagacgccgtcacctatacggagcacgccaagcgcaaaact

SEQ ID NO: 712615 - DNA, 120 bp, Artificial Sequence
  ENSG00000197061_2 (sequence is synthesized)
gtcacagccatggatgtagtatatgccctaaaacgtcaggggcgcactctgtatggcttcggcggctgaatctaagaatacgcggtctcctgagaacttcaaaaaacaaaaacaaaaaaa

SEQ ID NO: 712616 - DNA, 120 bp, Artificial Sequence
  ENSG00000197062_0 (sequence is synthesized)
ctcggcgatgagctaagacgctgtttcagagcgtttgggtcctctgaggccccttgaccaggagtgtctctgaagatacagtccaaagaaagttctccaaaacaaggagaacagtctgaa

SEQ ID NO: 712617 - DNA, 120 bp, Artificial Sequence
  ENSG00000197062_1 (sequence is synthesized)
gctggggatggcaacagcattggtgagtgcccattccctggctcccctgaatctgaagaaggaggggcttcgggtagtgagggaggatcactactctacttgggaacagggattcaagct

SEQ ID NO: 712618 - DNA, 120 bp, Artificial Sequence
  ENSG00000197062_2 (sequence is synthesized)
gcaaggaaacagtaaaggccttggacaggagccattgtgcaaacaattcaggcagttgcgttatgaagagaccacaggacctcgagaagcactaagtcggctccgggagctctgtcaaca

SEQ ID NO: 712619 - DNA, 120 bp, Artificial Sequence
  ENSG00000197062_3 (sequence is synthesized)
gtggctacagcccgagacccataccaaggagcagatcctggagctgctggtgctggagcagtttctgatcatcctgcctaaggagctccaggcccgggtgcaggagcatcacccagagag

SEQ ID NO: 712620 - DNA, 120 bp, Artificial Sequence
  ENSG00000197062_4 (sequence is synthesized)
cagggaggacgtggttgttgttctggaggatttgcagctggatcttggagaaacaggacaacaggacccagaccagccaaagaaacaaaaaatacttgtggaggagatggcccctctgaa

SEQ ID NO: 712621 - DNA, 120 bp, Artificial Sequence
  ENSG00000197062_5 (sequence is synthesized)
aggagtacaggaacagcaggttcggcatgagtgtgaagttacaaagcctgagaaagagaagggtgaggagacaaggattgagaatgggaagcttattgtagtaacagactcttgtggaag

SEQ ID NO: 712622 - DNA, 120 bp, Artificial Sequence
  ENSG00000197062_6 (sequence is synthesized)
agtagagtcatctgggaaaatatctgaacccatggaggctcataatgagggctctaacttggaaaggcatcaggccaagcccaaagagaagattgagtataaatgctcagaacgtgagca

SEQ ID NO: 712623 - DNA, 120 bp, Artificial Sequence
  ENSG00000197062_7 (sequence is synthesized)
gagattcatccagcacttggacctgattgaacatgcgagtacacacacgggaaagaaactctgcgagtctgatgtgtgtcagagttccagtcttacaggacataagaaagtcctctctag

SEQ ID NO: 712624 - DNA, 120 bp, Artificial Sequence
  ENSG00000197062_8 (sequence is synthesized)
tcttggtgagaagccttatcagtgcaatgagtgtggcaaagtctttagccagaatgcaggccttttggaacatctcagaattcatactggagagaaaccttatctatgtatccattgtgg

SEQ ID NO: 712625 - DNA, 120 bp, Artificial Sequence
  ENSG00000197062_9 (sequence is synthesized)
aaaaaattttaggcgcagctctcaccttaatcgacatcagagaattcacagtcaggaggagccctgtgagtgcaaggagtgtggaaaaacctttagtcaggccttactcctcacccacca

SEQ ID NO: 712626 - DNA, 120 bp, Artificial Sequence
  ENSG00000197062_10 (sequence is synthesized)
tcagagaatccatagtcactccaaaagccatcaatgtaacgagtgtggaaaagctttcagtttgacctcagaccttattcgacaccacagaattcatactggagaaaaacctttcaagtg

SEQ ID NO: 712627 - DNA, 120 bp, Artificial Sequence
  ENSG00000197062_11 (sequence is synthesized)
taacatatgccagaaagccttccgactaaactcacaccttgctcagcatgtaagaatccacaatgaagaaaaaccctatcagtgtagtgaatgtggagaagccttcaggcaaaggtcagg

SEQ ID NO: 712628 - DNA, 120 bp, Artificial Sequence
  ENSG00000197062_12 (sequence is synthesized)
tctttttcaacatcagagatatcaccacaaagacaaactggcttgatgaggtgttctctccttgtagaacatcagagaaggcacattgactagcaaacagcactttaggaaaagtcaccg

SEQ ID NO: 712629 - DNA, 120 bp, Artificial Sequence
  ENSG00000197062_13 (sequence is synthesized)
tagcccactgtggcatcagaaaattcttgggggctgagttggaggctccctgcctctattctctctcctttgctttccttgaagtcagctttggaccacaataatttcactgtagatgat

SEQ ID NO: 712630 - DNA, 120 bp, Artificial Sequence
  ENSG00000197062_14 (sequence is synthesized)
atgctaggatcaaagttaaacagcattcttcactgcaggacatctcagagcatgtaacataactgcatgattatatactctaagcaatagagagcttcatgactgagtaagagttttgaa

SEQ ID NO: 712631 - DNA, 120 bp, Artificial Sequence
  ENSG00000197062_15 (sequence is synthesized)
gtcagcagtgaatcaagtgcccacagatttgcaggcttaagcagaacaagggaagattgatatttttggatatgctatagcagctttctcctatgaaataaaactgatgatgtttggaag

SEQ ID NO: 712632 - DNA, 120 bp, Artificial Sequence
  ENSG00000197062_16 (sequence is synthesized)
gaaatgaccctcccagccgtcctcagcaggcagcacccatgttagtctccttctgcgatgcctaagcggcagcaccatcgagccaaggtcctccagcgttcctagagcggagaagaaagc

SEQ ID NO: 712633 - DNA, 120 bp, Artificial Sequence
  ENSG00000197062_17 (sequence is synthesized)
ccttccttccccagtggaagcattttcaaaagcaaagataattttcgctggtgaacttcagaacttgccttcagggttagcttcatgtaattttaccatttcccatccccattccccacc

SEQ ID NO: 712634 - DNA, 120 bp, Artificial Sequence
  ENSG00000197062_18 (sequence is synthesized)
acattatgtcaagattcaagttataaattaacgttttacttagactttgaaagagatttcatgagtaatttgaatgaaccttgctgaattaatctgaatagcaactgtctgacttgataa

SEQ ID NO: 712635 - DNA, 120 bp, Artificial Sequence
  ENSG00000197062_19 (sequence is synthesized)
ctccagtgccagtatagtggctgctgcatagacactattcagtaaatgtctgatgaaagaaattggactttttccctttaatactgatgatgcaattttgaaatgttgcttgttctggaa

SEQ ID NO: 712636 - DNA, 120 bp, Artificial Sequence
  ENSG00000197062_20 (sequence is synthesized)
tacttcggaagttaaacaataaagtcagcttggagaggagatcatgatctttatactgtgaatagcagaatgtcacagatgaagaatattaaaattaggggcgtccactccaaaacatat

SEQ ID NO: 712637 - DNA, 120 bp, Artificial Sequence
  ENSG00000197062_21 (sequence is synthesized)
caccagagtgacaacttcagccctcagcctctgcaatccatatatatcctggtcttgggagtccatagaatactgtttccttctaataaaggtttcaaacaaatccctgcagatttattt

SEQ ID NO: 712638 - DNA, 120 bp, Artificial Sequence
  ENSG00000197062_22 (sequence is synthesized)
atgagagtgatgaagctgtggatctggtaaacagagtacaaccttctgctgcatatttttcatccattcagcgcaattttaagtagatattaaaggagtgtctctgaagatacagtccaa

SEQ ID NO: 712639 - DNA, 120 bp, Artificial Sequence
  ENSG00000197062_23 (sequence is synthesized)
gacactcggcgatgagctaagacgctgtttcagagcgtttgggtcctctgaggccccttgaccaggtgaggagacaaggattgagaatgggaagcttattgtagtaacagactcttgtgg

SEQ ID NO: 712640 - DNA, 80 bp, Artificial Sequence
  ENSG00000197063_0 (sequence is synthesized)
atgtgacgtctgtggagcggcggcggcggcggcggatcccgagcctggtccggcccggccttcccagtgcgctcggcccg

SEQ ID NO: 712641 - DNA, 120 bp, Artificial Sequence
  ENSG00000197063_1 (sequence is synthesized)
cgcggcctcggagcgcgcgcggccccgccccgccccggcctcggcccgccgggcccgcagtgtgagagcgcctgctcgctgtgcccccgggttatgacgacccccaataaaggaaacaag

SEQ ID NO: 712642 - DNA, 120 bp, Artificial Sequence
  ENSG00000197063_2 (sequence is synthesized)
acgacccccaataaaggaaacaaggccttgaaggtgaagcgggagccgggtgagaatggcaccagcctgacggatgaggagctggtgaccatgtcggtgcgggagctgaaccagcacctg

SEQ ID NO: 712643 - DNA, 120 bp, Artificial Sequence
  ENSG00000197063_3 (sequence is synthesized)
cggggcctgtccaaggaggagatcgtccagctgaagcagcgccggcgcacgctcaagaaccgcggctacgctgccagctgccgcgtgaagcgggtgacgcagaaggaggagctggagaag

SEQ ID NO: 712644 - DNA, 120 bp, Artificial Sequence
  ENSG00000197063_4 (sequence is synthesized)
cagaaggcggagctgcagcaggaggtggagaagctggcctcagagaacgccagcatgaagctggagctcgacgcgctgcgctccaagtacgaggcgctgcagaccttcgcccggacggtg

SEQ ID NO: 712645 - DNA, 120 bp, Artificial Sequence
  ENSG00000197063_5 (sequence is synthesized)
gcccgcagccccgtggcgccagcccggggcccccttgccgccggcctggggcccctcgtcccaggcaaggtggccgccaccagcgtcatcacaatagtaaagtccaagacggatgcccga

SEQ ID NO: 712646 - DNA, 120 bp, Artificial Sequence
  ENSG00000197063_6 (sequence is synthesized)
tcgtagggacgcgcgtctgcccaggcgggtctttgcggggccactaggcacatggcgaatttggctgccctgtccctctgtttccttctcttctctttcctccctctcttccccaccctt

SEQ ID NO: 712647 - DNA, 120 bp, Artificial Sequence
  ENSG00000197063_7 (sequence is synthesized)
ctctcttccctgcaaagcacaacctgtaccccaggggcgccgggctgagcccctttgatctcgtcattgtcgtcgtgtgttttgtatgttgggattggtcagttcggcggtgacgtgggg

SEQ ID NO: 712648 - DNA, 120 bp, Artificial Sequence
  ENSG00000197063_8 (sequence is synthesized)
tcgccccaaccccttttgtaccagggccatgcaggcttggagtccagagttggtgctgtgggaacggactagagagagttgcgggagagagaaggagcaggcacgctgggcctcgcgtgt

SEQ ID NO: 712649 - DNA, 120 bp, Artificial Sequence
  ENSG00000197063_9 (sequence is synthesized)
ccccgagcagtgagggtcccagtgttccctccactcccgagtggccacaggctcgcgggctgggaaggattcactctctttagccccaggggagcagctcagcttagcccagcatgaaga

SEQ ID NO: 712650 - DNA, 120 bp, Artificial Sequence
  ENSG00000197063_10 (sequence is synthesized)
gatgggctctgctctgagagtagggcgggcttgaaggccctgatgggtggaccaccagcctgggcgcagtggtgctgggggcgtgcagctgggcccaggggctgtgcactcaggcctgac

SEQ ID NO: 712651 - DNA, 120 bp, Artificial Sequence
  ENSG00000197063_11 (sequence is synthesized)
ccgttgcactgaacaagaccaaatctctggttgtgcgcttaacgtgagggtgggtccagtgtgccctgcgatgggtcccgtgtcactgtttacatgacctatttgtgtggttatatagcc

SEQ ID NO: 712652 - DNA, 120 bp, Artificial Sequence
  ENSG00000197063_12 (sequence is synthesized)
ctttatttaaaagagagaagttccttttacaaagttattaaattaattatatgtttaaaagttaaagaaaaaagagctgcagagtatttataaaactgtcttttagaaaaaaaacaagca

SEQ ID NO: 712653 - DNA, 120 bp, Artificial Sequence
  ENSG00000197063_13 (sequence is synthesized)
tatttataaaactgtcttttagaaaaaaaacaagcaagaagaccatttgaccatatgaatggaaaagggaagaaagtataatagaaactttgctagttaaaaaaaaaagaaaaaaaaaga

SEQ ID NO: 712654 - DNA, 120 bp, Artificial Sequence
  ENSG00000197063_14 (sequence is synthesized)
tttgtggctgttggagtttagtttttatatacacagagttatcagacattatttataaaacttagtttaaaaaaaagacaaaaaaaaaaaagccaagccgtgagccgaccagaaggccgt

SEQ ID NO: 712655 - DNA, 120 bp, Artificial Sequence
  ENSG00000197063_15 (sequence is synthesized)
cctctttgatatcttttgcaattgtaccgaaagtgacttactcctctgcccttcctgcttccgtctcttgccggtgccgtggtgtcgtccgtgcctggtgaggttttgtgcagcggtaaa

SEQ ID NO: 712656 - DNA, 120 bp, Artificial Sequence
  ENSG00000197063_16 (sequence is synthesized)
gtgctggtgcttctggtgacctttgacctgtgggtgtcacttcttgtgtctgttttcccgtgttcgttttttgggtttagttgtgcttttgcttctgctggcttgctggacctgggctgg

SEQ ID NO: 712657 - DNA, 120 bp, Artificial Sequence
  ENSG00000197063_17 (sequence is synthesized)
ggtgccaagtggcgcctgctgcgtcagagctcaaggaatctgtgcccaccaccagctcctggtccgtaggaggtgagacatggggttctgtcatgcccccctccactgagccttggctac

SEQ ID NO: 712658 - DNA, 120 bp, Artificial Sequence
  ENSG00000197063_18 (sequence is synthesized)
atctgtgtctagggcttgggctgatctagtggcggggtaggtgaaactggggtcccttggggcgccccacgctgcttccacacccaccacctctggccttgggtggtggcattacaggga

SEQ ID NO: 712659 - DNA, 120 bp, Artificial Sequence
  ENSG00000197063_19 (sequence is synthesized)
tgagggagtcactgtgggtggccacagggctatggccaagcgttccctggccgtcttcctctggcctcagctttgttcctataggctgcccgcgccgtgggctgcaggtctcgccgcccg

SEQ ID NO: 712660 - DNA, 120 bp, Artificial Sequence
  ENSG00000197063_20 (sequence is synthesized)
cttgatccctgaggtgtttccatgctgcgggtggtgcttccaggcagagtgggtgggggcccaccgggcaccgccctttcttccttgtccctgcctcactctgagagccttgggggtctc

SEQ ID NO: 712661 - DNA, 120 bp, Artificial Sequence
  ENSG00000197063_21 (sequence is synthesized)
cagtctccagggccgggtcttgtccctcttctccgctggtccacgctggcagctcttggcttcgggcctgccttctgcctccctttgggatctgtgtcttccagggatcagctgcttggc

SEQ ID NO: 712662 - DNA, 120 bp, Artificial Sequence
  ENSG00000197063_22 (sequence is synthesized)
ttctgctggaggtgcctccctgtgggggcgcagcctgcctcctgctctcagttcctcgccagaggctgctgcccttcctggctgggctcaggaggctccttgtaggcatatgatggggag

SEQ ID NO: 712663 - DNA, 120 bp, Artificial Sequence
  ENSG00000197063_23 (sequence is synthesized)
ggggtgcccctacccacctccaagaggctacagccctgtgtctggccatgtgagccctggcctttcaccgggttgctggtttcttttctgtggggcccagacttctgtaaagcacacaga

SEQ ID NO: 712664 - DNA, 120 bp, Artificial Sequence
  ENSG00000197063_24 (sequence is synthesized)
tgtgggtaagatgaaaaactgtggcccaacagggcttaaccctatggatggtgggatttttatccaatagtttggcctggtgtgcccacaggatgggaacagggaggcaccatcaacact

SEQ ID NO: 712665 - DNA, 120 bp, Artificial Sequence
  ENSG00000197063_25 (sequence is synthesized)
tgtcatgttaatgagcttttctttgctcgaggtgttcagagacaagtcctgtgtctacctgcgtcagcctgaaaatggaaatattggctgttgactcttgtcatttagtgacttcatccc

SEQ ID NO: 712666 - DNA, 120 bp, Artificial Sequence
  ENSG00000197063_26 (sequence is synthesized)
cctcccctcagtctgatcttgtctaagtagaatccaggcgttagttggaatcatatcataagtatccatgaagaaaacgtcatgatctgcctcggagtggggagaaacaggccctccttg

SEQ ID NO: 712667 - DNA, 120 bp, Artificial Sequence
  ENSG00000197063_27 (sequence is synthesized)
tccttgtgcagcccccacttttgtcctggctgtgggtggccatccattttgagcacctctgccaggctgcagacctggaggcgaagggagtgtggaagaggagggtgtaagggtcgacgc

SEQ ID NO: 712668 - DNA, 120 bp, Artificial Sequence
  ENSG00000197063_28 (sequence is synthesized)
gtgctgaatgggaggtgcaggtcctcggtgcgttggcagaagaggcttctggagtttcgaggccatacctcctttcaagagctttggatttggggcgacttccctgggtctaggggagtg

SEQ ID NO: 712669 - DNA, 120 bp, Artificial Sequence
  ENSG00000197063_29 (sequence is synthesized)
ttcctgtcccctgtcaggtcagccctgcggagccactccacccctcttccccttcccctggatttcctgacatagatggtgtgttcatgtgcaggtgtgagtgtgctgtccttctgatct

SEQ ID NO: 712670 - DNA, 120 bp, Artificial Sequence
  ENSG00000197063_30 (sequence is synthesized)
ctgttgatcccgctttcctactgagagggtggtggagagggtggtggtctcttctcacctcagtttttctgacacagcgaatcgagggctttggccaaggccaggtctctcaaacttgtc

SEQ ID NO: 712671 - DNA, 120 bp, Artificial Sequence
  ENSG00000197063_31 (sequence is synthesized)
cgccaagtaaaccatgatatatgtcttcccttccaccttaactttgccccaactcctcttttatcctaacatggacgctcagatttcagaggaatacccagcagggacaggtcagctctc

SEQ ID NO: 712672 - DNA, 120 bp, Artificial Sequence
  ENSG00000197063_32 (sequence is synthesized)
accaggagagtgaggcccctggctgctgctcggggtggcactggtgttgctggctcagctcttggtgcatgtttcagatatgtgtgtacacttctgactggtgatcagggcccggcccac

SEQ ID NO: 712673 - DNA, 120 bp, Artificial Sequence
  ENSG00000197063_33 (sequence is synthesized)
ggccctgagcggctgcagcctgctttgggacgatggtcaggtcccatgttgtccctgctgcctccctctggagtggccacttggccaaagcgcccatccacatctggaaagtcggagccg

SEQ ID NO: 712674 - DNA, 120 bp, Artificial Sequence
  ENSG00000197063_34 (sequence is synthesized)
cagcctgctgcaccgtttccgctctgggatcttgtgagttacttttttaggctgtggtttggtgaaaggaaccaacacattaacgatttttcccccagaagccactgaataattcttttt

SEQ ID NO: 712675 - DNA, 120 bp, Artificial Sequence
  ENSG00000197063_35 (sequence is synthesized)
ggtgtatttttgccttcctgttggctgtctggccttggagcaggtcgggagagtagagtacataatcagtgccacacagaggcagggcgtgtctgagagactaatgcctgtcctgcctct

SEQ ID NO: 712676 - DNA, 120 bp, Artificial Sequence
  ENSG00000197063_36 (sequence is synthesized)
ggcctgtgtcctgggtgtgtaccatacctgctgggccagtcccacacatttccaccctgcccctggagcagcagctttgataccatgggtgtcccttgagtctgagctagagtgtgtccc

SEQ ID NO: 712677 - DNA, 120 bp, Artificial Sequence
  ENSG00000197063_37 (sequence is synthesized)
cgataaactgtgagacctccctgttcttggtgaccccagttgggctttggcccctccagcaaccttgtgtcccagccctgcccttcttcccaccccctcaatctgctagtccctgaagcc

SEQ ID NO: 712678 - DNA, 120 bp, Artificial Sequence
  ENSG00000197063_38 (sequence is synthesized)
tttaaccaaacgggagtgggcacagaaagccttctcctggcaacaggacaagggctgcccgcgtgtccagccctgttgctctcctggcgctgagaggtgggtccaagcagagttgatcag

SEQ ID NO: 712679 - DNA, 120 bp, Artificial Sequence
  ENSG00000197063_39 (sequence is synthesized)
tccctgcctgccctgcctaggtctagccaggggaggttgtgtgtgtgggagaagaccccgggatctgctggggtgggatggaggttattaaagatctaagtgaggaggggctggggtttg

SEQ ID NO: 712680 - DNA, 120 bp, Artificial Sequence
  ENSG00000197063_40 (sequence is synthesized)
gatgcggggtgaggcccgagcgctcacacttcgtgtagggcgggcaggggcctgacctcttgcagggcagtggccttggtgccctacccctgccctgcgcagtatttattgctaaattat

SEQ ID NO: 712681 - DNA, 120 bp, Artificial Sequence
  ENSG00000197063_41 (sequence is synthesized)
tgtccaggaggggcagcactgggcctggccccccgggtatttattgctgtacatagtgtatgtttgtgatatataaggttttctttattttgtatatgatcaataaaccttttaaagaga

SEQ ID NO: 712682 - DNA, 120 bp, Artificial Sequence
  ENSG00000197063_42 (sequence is synthesized)
ccgcgtcttattccttctaatctctcccctgccccttgtcttgcgcctgccttcctaacagccttcagttccccttctcccgtcagaccttcctgacctcccacctggttctctaggggc

SEQ ID NO: 712683 - DNA, 120 bp, Artificial Sequence
  ENSG00000197070_0 (sequence is synthesized)
gtcgctgcgcggctggccggtgaggccgcggcatggggcgagtgcagctcttcgagatcagcctgagccacggccgcgtcgtctacagccccggggagccgttggctgggaccgtgcgcg

SEQ ID NO: 712684 - DNA, 120 bp, Artificial Sequence
  ENSG00000197070_1 (sequence is synthesized)
tgcgcctgggggcaccgctgccgttccgagccatccgggtgacctgcataggttcctgcggggtctccaacaaggctaatgacacagcgtgggtagtggaggagggttacttcaacagtt

SEQ ID NO: 712685 - DNA, 120 bp, Artificial Sequence
  ENSG00000197070_2 (sequence is synthesized)
ccctgtcgctggcagacaaggggagcctgcccgctggagagcacagcttccccttccagttcctgcttcctgccactgcacccacgtcctttgagggtcctttcgggaagatcgtgcacc

SEQ ID NO: 712686 - DNA, 120 bp, Artificial Sequence
  ENSG00000197070_3 (sequence is synthesized)
aggtgagggccgccatccacacgccacggttttccaaggatcacaagtgcagcctcgtgttctatatcttgagccccttgaacctgaacagcatcccagacattgagcaacccaacgtgg

SEQ ID NO: 712687 - DNA, 120 bp, Artificial Sequence
  ENSG00000197070_4 (sequence is synthesized)
cctctgccaccaagaagttctcctacaagctggtgaagacgggcagcgtggtcctcacagccagcactgatctccgcggctatgtggtggggcaggcactgcagctgcatgccgacgttg

SEQ ID NO: 712688 - DNA, 120 bp, Artificial Sequence
  ENSG00000197070_5 (sequence is synthesized)
agaaccagtcaggcaaggacaccagccctgtggtggccagtctgctgcagaaagtgtcctataaggccaagcgctggatccacgacgtacggaccattgcggaggtggagggtgcgggcg

SEQ ID NO: 712689 - DNA, 120 bp, Artificial Sequence
  ENSG00000197070_6 (sequence is synthesized)
aaggcgccggaagctactgtgaccctcccggtcttcattggcaatattgctgtgaaccatgccccagtgagcccccggccaggcctggggctgcctcctggggccccacccctggtggtg

SEQ ID NO: 712690 - DNA, 120 bp, Artificial Sequence
  ENSG00000197070_7 (sequence is synthesized)
ccttccgcaccaccccaggaggaggctgaggctgaggctgcggctggcggcccccacttcttggaccccgtcttcctctccaccaagagccattcgcagcggcagcccctgctggccacc

SEQ ID NO: 712691 - DNA, 120 bp, Artificial Sequence
  ENSG00000197070_8 (sequence is synthesized)
ttgagttctgtgcctggtgcgccggagccctgccctcaggatggcagccctgcctcacacccgctgcaccctcccttgtgcatttcaacaggtgccactgtcccctactttgcagagggc

SEQ ID NO: 712692 - DNA, 120 bp, Artificial Sequence
  ENSG00000197070_9 (sequence is synthesized)
tccggggggccagtgcccactaccagcaccttgattcttcctccagagtacagttcttggggctacccctatgaggccccaccgtcttatgagcagagctgcggcggcgtggaacccagc

SEQ ID NO: 712693 - DNA, 120 bp, Artificial Sequence
  ENSG00000197070_10 (sequence is synthesized)
ctgacccctgagagctgaccccgtgctgccttctccaggcaggcctggcctctgccctgggactggggcgcccagggcctcgtgccttctctcttggcctagcctggcccactcaggacc

SEQ ID NO: 712694 - DNA, 120 bp, Artificial Sequence
  ENSG00000197070_11 (sequence is synthesized)
tgcccagcctctgccagctcctctggcatccgccctcttctccctggggctggggtgggggtggcagggagctgggacctggagagacaactcctgtaaataaaacactttatttgtaga

SEQ ID NO: 712695 - DNA, 120 bp, Artificial Sequence
  ENSG00000197070_12 (sequence is synthesized)
agttagcttcctggagtgtggacgggtccttccctgcctgactgacttgtccacagggcagcaagaagatgcgccccttggtgtgtcccgagtgtctcctgtaggcagctgagctttcgc

SEQ ID NO: 712696 - DNA, 84 bp, Artificial Sequence
  ENSG00000197070_13 (sequence is synthesized)
atgggtggatcgcttgaacacaggaggtttagcctgggcggcgggagtgagaccgtgtctcaaaaacaacaacaacaacaacaa

SEQ ID NO: 712697 - DNA, 120 bp, Artificial Sequence
  ENSG00000197070_14 (sequence is synthesized)
caacaacaacaacaacaaaaaaacaaaaaatggaccgaggttggggtggcaaggctgggctggaatggaggctgaggacaggccctggcagcgcccgggggtagagggcgtgcagcagga

SEQ ID NO: 712698 - DNA, 120 bp, Artificial Sequence
  ENSG00000197070_15 (sequence is synthesized)
agcaagggccaccctcagggatgggggactgggcctggcagctgccgaggggtaggcaggatgcatgtggagagccacgtggggctgcggctgagccaaggattgtgagaggaatcctgc

SEQ ID NO: 712699 - DNA, 120 bp, Artificial Sequence
  ENSG00000197070_16 (sequence is synthesized)
tgctctgggtggcaggcagaaggcctgggccacaggtggggcctgctggggagaccacaggtgaggcaggtatggctgaccctgggcgctcggcacaccggtactcctcctgcctggctg

SEQ ID NO: 712700 - DNA, 120 bp, Artificial Sequence
  ENSG00000197070_17 (sequence is synthesized)
ctccctcagcaggtgtcagagtctgagtcaccttttcctcacgtgacccccaccaggaccaggcagggaggtggccatctttggccctgactcagccctgcagggagaagaggggctgga

SEQ ID NO: 712701 - DNA, 120 bp, Artificial Sequence
  ENSG00000197070_18 (sequence is synthesized)
ggtgcaggtggcctgccactgtctcccccaacccctgcccacctgggtcttgtgctgtgtgtacttctgctgcgtctgtcctcccttgtgaccagcttctgctggacctgattgtccagc

SEQ ID NO: 712702 - DNA, 120 bp, Artificial Sequence
  ENSG00000197070_19 (sequence is synthesized)
catgatcttctgatcatcatggtttctggacacacatctgttggactaaggaatttgtgttcctggccacagaacagtgccacctctgcctcaagcagttcctggtctgggcactccccc

SEQ ID NO: 712703 - DNA, 120 bp, Artificial Sequence
  ENSG00000197070_20 (sequence is synthesized)
agggaggccggagaggactgagccgtctcctgatgcagaaagtcagccccgctgggcagtgctcgcccaggaagtagggccccacccaacggtgtgctgactgtggaacactgtgtctgc

SEQ ID NO: 712704 - DNA, 120 bp, Artificial Sequence
  ENSG00000197070_21 (sequence is synthesized)
ctggattgcagggcagacgtcgttttgtgctggtcaggcccctcgcctgcctgattcccttggagccccccaagacaggagatgggcagatgtcctctgaagtggcatgggctgcttgct

SEQ ID NO: 712705 - DNA, 120 bp, Artificial Sequence
  ENSG00000197070_22 (sequence is synthesized)
cactggccttcccaggaccctgcccaggtggtgctgcttggccccaggtcgaattcctgtgctggcagcaagcaggggcctgggccgtcggctggctggggctcatgcagccatcccctt

SEQ ID NO: 712706 - DNA, 120 bp, Artificial Sequence
  ENSG00000197070_23 (sequence is synthesized)
ggtgaggggggccagggtctggaggcagtggcctctttgccctgagctgactgctgatgtccaggggcagggcgtggcagggctgaggggcctgtcccaatgccacagggatccagcctg

SEQ ID NO: 712707 - DNA, 120 bp, Artificial Sequence
  ENSG00000197070_24 (sequence is synthesized)
ggtgagtcgacagccagggcttggcagggaggggacgccaagagccccacgcagaccctgctttcttcccgcagaggccccaccgtcttatgagcagagctgcggcggcgtggaacccag

SEQ ID NO: 712708 - DNA, 120 bp, Artificial Sequence
  ENSG00000197070_25 (sequence is synthesized)
ggcagacaagggtaagtttgggagccagttcccgagtggtgacccctgggggcagcccttggagtggggcctgtctgtcctgtcctccccctttcctagatctgcctcttggatctggca

SEQ ID NO: 712709 - DNA, 120 bp, Artificial Sequence
  ENSG00000197070_26 (sequence is synthesized)
tcataggcgctgggtggctgaaggggccacctcccccttgtgctggatttgggtgggctctgacccctggcacagctgtttcacccttgccccattcccaaaccactctcctgttcaagc

SEQ ID NO: 712710 - DNA, 120 bp, Artificial Sequence
  ENSG00000197070_27 (sequence is synthesized)
caagctcttatcctcagtccttcacccaagccacagccctgtgctgctgtggcgctggtgactgagacagggagacccagtgtgagctggtcagctgcagtgcccactcttatcctggcc

SEQ ID NO: 712711 - DNA, 120 bp, Artificial Sequence
  ENSG00000197077_0 (sequence is synthesized)
acccccatgaatccacaaccataaccatggccacgcgggtcgaggtgggctccataacgcccttgacggccgtgccaggcctgggtgagatgggcaaggaggagaccctgacgaggacct

SEQ ID NO: 712712 - DNA, 120 bp, Artificial Sequence
  ENSG00000197077_1 (sequence is synthesized)
acttcctccaggccggcgaagcctctggggctcccccagcccggatcttggaagcgaagagccccctgcggagcccggcccggttactccctctgccaaggctcgcccccaaacccttct

SEQ ID NO: 712713 - DNA, 120 bp, Artificial Sequence
  ENSG00000197077_2 (sequence is synthesized)
cgaaggagcaggacgtgaaatctcctgtcccgtctctgcggcccagttcgactggaccttccccctctggggggctctctgaggagccagcagcaaaggatctggacaacaggatgcccg

SEQ ID NO: 712714 - DNA, 120 bp, Artificial Sequence
  ENSG00000197077_3 (sequence is synthesized)
gcttggtggggcaggaggtgggcagtggggagggcccgaggacgagctcgcccctcttcaacaaggctgtgttcctgcggcccagctccagcaccatgattctcttcgaaaccaccaaaa

SEQ ID NO: 712715 - DNA, 120 bp, Artificial Sequence
  ENSG00000197077_4 (sequence is synthesized)
gcggccccgctctggggaaggcggttagtgagggggcggaggaggccaagctaggtgtgtccggctcccggcctgaggtggctgccaagcccgccctgcccacccagaagcctgcgggga

SEQ ID NO: 712716 - DNA, 120 bp, Artificial Sequence
  ENSG00000197077_5 (sequence is synthesized)
cccttccccggtcagctcccctgtctcaggacacaaaaccacctgtaccccaagaggaggcaggccaagaccatcctccctcaaaggccagcagtgtggaggacacggcacgcccccttg

SEQ ID NO: 712717 - DNA, 120 bp, Artificial Sequence
  ENSG00000197077_6 (sequence is synthesized)
tggagcccaggcctcgcctgaagagaaggcccgtgtctgccattttcacggagtccattcagcctcagaagccaggccccggcgcagcggccacagtgggcaaagtgccacccacccctc

SEQ ID NO: 712718 - DNA, 120 bp, Artificial Sequence
  ENSG00000197077_7 (sequence is synthesized)
ccgagaagacgtgggtgaggaagcccaggcccttgtccatggacctcacggcccggtttgagaacaaagaggccttgctgaggaaggtggccgatgaaggaagtggacccacagcagggg

SEQ ID NO: 712719 - DNA, 120 bp, Artificial Sequence
  ENSG00000197077_8 (sequence is synthesized)
atatggctgggctagagaggcccagagcagcgtccaagctggacagggactgtttggtcaaggcggaggctcctcttcatgatcctgatttggacttcctggaggtggccaagaaaatcc

SEQ ID NO: 712720 - DNA, 120 bp, Artificial Sequence
  ENSG00000197077_9 (sequence is synthesized)
gtgaacggaaggagaagatgctttcgaagccggagatgggcagccccagagccctggtggggggctcatctggggtcacccccagcaatgaccagagtccctgggaagaaaaggccaagc

SEQ ID NO: 712721 - DNA, 120 bp, Artificial Sequence
  ENSG00000197077_10 (sequence is synthesized)
tggacccagagccagagaaggctgctgagtccccctcacccaggctgggaaggggcctagaacttgctgaggttaagagcagagtggcggatggggaggccgcggcagggggagagtggg

SEQ ID NO: 712722 - DNA, 120 bp, Artificial Sequence
  ENSG00000197077_11 (sequence is synthesized)
cctccaggaggagtgtcaggaagtgcatcagcctgtttcgggaggacagcaccttggccttggcagtggggtctgaatctcccctggccacccctgcgtccccatcggcggcaccagagc

SEQ ID NO: 712723 - DNA, 120 bp, Artificial Sequence
  ENSG00000197077_12 (sequence is synthesized)
cggagaaaggggttgtgagcgttcaggaacggatcagaggctggactgccgagagctcagaggctaagcccgaggtcaggaggaggacgttccaggctcggccgctgtcggcggatttga

SEQ ID NO: 712724 - DNA, 120 bp, Artificial Sequence
  ENSG00000197077_13 (sequence is synthesized)
ccaaattgttttcaagttcagcttccagcaacgaagtcaaatatgagaagagtgctgagctgagcggcgagtttcctaaggaaccgagagaaaagcaaaaggaggggcacagtttggatg

SEQ ID NO: 712725 - DNA, 120 bp, Artificial Sequence
  ENSG00000197077_14 (sequence is synthesized)
gagcatgcatcccgagaagcccctggaagcctgggacactccgggataagtccaggcagacggagcagaaggttagctctaaccaagaccccgacagctgtcgcggtggaagctcagtgg

SEQ ID NO: 712726 - DNA, 120 bp, Artificial Sequence
  ENSG00000197077_15 (sequence is synthesized)
aggccccgtgcccttctgacgtcactccagaggatgaccggagcttccagactgtgtgggccacagtatttgagcaccacgtggagagacacacagtggctgaccagtcgggacgttgtc

SEQ ID NO: 712727 - DNA, 120 bp, Artificial Sequence
  ENSG00000197077_16 (sequence is synthesized)
tctccaccacaccccctggtgacatggcccatgcccgtgtctcagaacccaggccgaggcctgagatgggctcttggctgggcagggacccaccagacatgacaaaactgaagaaagaga

SEQ ID NO: 712728 - DNA, 120 bp, Artificial Sequence
  ENSG00000197077_17 (sequence is synthesized)
actccagagggtttgacaatcccgagacggagaaattgggaccaaccacccttttgaatggtgaactgagaccgtatcacacgcctctccgggacaaataccctttgtctgaaaaccaca

SEQ ID NO: 712729 - DNA, 120 bp, Artificial Sequence
  ENSG00000197077_18 (sequence is synthesized)
ataataacaccttcctcaaacacttggaaaatcctcccacatcgcagagaattgagcccagatatgacattgtgcatgcagtgggagagcgtgtgcacagcgaggccatctcaccggcac

SEQ ID NO: 712730 - DNA, 120 bp, Artificial Sequence
  ENSG00000197077_19 (sequence is synthesized)
cggaggagaaagcggtcacgctccgcagcctcaggtcttggctctcactgaaggacaggcagctgtcccaggaggtcacccctgctgacctggagtgtggtttggaaggtcaggcggggt

SEQ ID NO: 712731 - DNA, 120 bp, Artificial Sequence
  ENSG00000197077_20 (sequence is synthesized)
ccgtccaaagggccagtttgatttgggaagctcgaggcatgcctgaggctagtggaccgaagtttgggggcaattgcccgtttcccaaatggacaggcggggcagtggtgagctcgcaca

SEQ ID NO: 712732 - DNA, 120 bp, Artificial Sequence
  ENSG00000197077_21 (sequence is synthesized)
aagccaccgtggcagtcagcgaagagcactgtgctcccggggccacctccgtcagggctatcaaggctgccatctgggaaagccagcatgaggggccagagggggccagaagcaagccag

SEQ ID NO: 712733 - DNA, 120 bp, Artificial Sequence
  ENSG00000197077_22 (sequence is synthesized)
gagtgggagcaaggggcccaccccagggatgccccctcgatcctctttccagggctacgaatgggccttctgactcccaagcacgaacacatccagatgcatttgctgtgcagaaagggc

SEQ ID NO: 712734 - DNA, 120 bp, Artificial Sequence
  ENSG00000197077_23 (sequence is synthesized)
ccttcattgtagccgccagggagggtgatccagggccggcccaggtgccacagcctgcagtcagaatgcggaaagccggcgccatggaccagagaatggacagatggcggcggcggactt

SEQ ID NO: 712735 - DNA, 120 bp, Artificial Sequence
  ENSG00000197077_24 (sequence is synthesized)
taccccccaacgtgaaatttgatacattcagttctcttgtcccagaggactctccacatgtggggcacagacgaacagattatgtgagccccacagccagtgccttaagaaaacctcaac

SEQ ID NO: 712736 - DNA, 120 bp, Artificial Sequence
  ENSG00000197077_25 (sequence is synthesized)
tatcccactacagggtggagacccaggaggtgaacccaggtgcttcacgggaccagacttccccagcagtgaagcaagggtcacctgtggaacccaaggcgacattttttgcagtcacct

SEQ ID NO: 712737 - DNA, 120 bp, Artificial Sequence
  ENSG00000197077_26 (sequence is synthesized)
atcagattcccaatactcaaaaggcaaagggtgtggttctgtcaggagctgaaagcttgctggaacattctagaaaaatcactccaccctcgtctcctcattctttaacatccactttgg

SEQ ID NO: 712738 - DNA, 120 bp, Artificial Sequence
  ENSG00000197077_27 (sequence is synthesized)
tttctcttggtcatgaagaggcattggagatggcaggcagtaaaaactggatgaagggacgagagcatgaaaatgcaagcattttaaaaactctgaagccaacagaccgtccatcatctc

SEQ ID NO: 712739 - DNA, 120 bp, Artificial Sequence
  ENSG00000197077_28 (sequence is synthesized)
ttggggcctggagtctggaccctttcaatggaagaatcattgatgtggatgccttatggagtcatcggggatcagaagatggccctcgtcctcaaagcaattggaaggaaagtgcgaaca

SEQ ID NO: 712740 - DNA, 120 bp, Artificial Sequence
  ENSG00000197077_29 (sequence is synthesized)
agatgtcccccagcggcggagctccccaaaccaccccgactctgaggagtcgtccaaaagatcttcctgtgagaaggaagactgatgtgatcagtgacacgttcccaggtaaaatcagag

SEQ ID NO: 712741 - DNA, 120 bp, Artificial Sequence
  ENSG00000197077_30 (sequence is synthesized)
atggctacagatccagcgttcttgacattgacgccctgatggcagagtaccaggagctgtcgctgaaagtccctggggaggctcaggagaggaggagtcccaccgtggagcccagtacgt

SEQ ID NO: 712742 - DNA, 120 bp, Artificial Sequence
  ENSG00000197077_31 (sequence is synthesized)
tgcctcgggagaggcctgttcagctgggcggggtggagcagagaaggaggagcctgaaggagatgcccgataccgggggtctctggaaaccggccagttctgccgaaataaatcacagtt

SEQ ID NO: 712743 - DNA, 120 bp, Artificial Sequence
  ENSG00000197077_32 (sequence is synthesized)
tcactcctggcttaggcaagcagctggcagagaccttggagacagccatgggcaccaaatctagccctcccttctgggctctgccaccctcggctccttctgaaaggtatccagggggct

SEQ ID NO: 712744 - DNA, 120 bp, Artificial Sequence
  ENSG00000197077_33 (sequence is synthesized)
ctcctatacctgcggatcccaggaaaaaaacggggtttgctgaggatgacagaaaggcctttgccagtaaacatcatgttgcaaagtgtcagaattacctggctgagtcaaagccctctg

SEQ ID NO: 712745 - DNA, 120 bp, Artificial Sequence
  ENSG00000197077_34 (sequence is synthesized)
gtcgggaggatccaggcagtggggtcagggtgtcacccaaatcgccccccactgaccagaagaaagggaccccaaggaaatccaccgggcggggagaggaggacagtgtggcccagtggg

SEQ ID NO: 712746 - DNA, 120 bp, Artificial Sequence
  ENSG00000197077_35 (sequence is synthesized)
gtgaccacccacgtgactgtggacgggtgccgctggatatcaagagggcctactcagagaaggggccccctgccaacatccgagagggcctgtccatcatgcatgaagccagagagagga

SEQ ID NO: 712747 - DNA, 120 bp, Artificial Sequence
  ENSG00000197077_36 (sequence is synthesized)
ggcgagagcagcccaaagggaggcccagccttactggagagaatttggaggccaaaatgggaccctgttggtgggagtcagggactggagacagtcacaaggtgctgccacgggacctgg

SEQ ID NO: 712748 - DNA, 120 bp, Artificial Sequence
  ENSG00000197077_37 (sequence is synthesized)
agaaggaggatgccccccaggagaaggagcgaccgctccagcaggtgtcccctgtggcctcggttccctggagaagccacagcttctgcaaagacaggaggagtgggccctttgtggacc

SEQ ID NO: 712749 - DNA, 120 bp, Artificial Sequence
  ENSG00000197077_38 (sequence is synthesized)
agctgaagcagtgtttctcccggcagcccactgaacccaaggacactgacaccctcgtgcacgaagccggcagccagtatgggacgtggacagagcagtgccagagtggggagagcttgg

SEQ ID NO: 712750 - DNA, 120 bp, Artificial Sequence
  ENSG00000197077_39 (sequence is synthesized)
ccactgagtccccagatagcagtgccacatcgacaaggaaacagccccccagcagccgtttgtcttctctgtcctcccaaacggagcccacctcggcaggggaccagtatgactgctcca

SEQ ID NO: 712751 - DNA, 120 bp, Artificial Sequence
  ENSG00000197077_40 (sequence is synthesized)
gggaccagcggagcaccagcgtggaccactccagcactgacctggaatccaccgatgggatggaggggccgcctccaccggacgcctgccctgaaaagagagtagatgacttctccttca

SEQ ID NO: 712752 - DNA, 120 bp, Artificial Sequence
  ENSG00000197077_41 (sequence is synthesized)
ttgatcaaacctcagtcctcgactcaagtgccctcaagacccgggtgcagctcagcaagagaagccgccgccgggcccccatctcccactccctccggcgcagccgatttagtgagtccg

SEQ ID NO: 712753 - DNA, 120 bp, Artificial Sequence
  ENSG00000197077_42 (sequence is synthesized)
agagcagatcacctttggaggatgagactgacaacacgtggatgttcaaagactcaacggaggagaaatcacccaggaaggaggagtcggatgaggaggagacggcatccaaagctgaga

SEQ ID NO: 712754 - DNA, 120 bp, Artificial Sequence
  ENSG00000197077_43 (sequence is synthesized)
ccggcagtgctaaaggctcagctgcacaagaggccagaggtggacagtcctggcgagacccccagctgggcaccccaacccaagagccccaagtcccccttccagcctggggtgctgggc

SEQ ID NO: 712755 - DNA, 120 bp, Artificial Sequence
  ENSG00000197077_44 (sequence is synthesized)
agtcgcgtgctgccttccagcatggacaaggatgagaggtcggatgaaccctctccccagtggctaaaggaattgaaatccaagaagaggcaaagtctttatgagaaccaagtttgacca

SEQ ID NO: 712756 - DNA, 120 bp, Artificial Sequence
  ENSG00000197077_45 (sequence is synthesized)
ggcagggaacactgccacatctacgtaacagaagccttaaccatcagaacccgcagacgaggccgagctgctgccgtttcttcctgcacaacgcttacgtgcctgggcccttcccattgg

SEQ ID NO: 712757 - DNA, 120 bp, Artificial Sequence
  ENSG00000197077_46 (sequence is synthesized)
attgagaacgctatccagtgcccctgtcctcgccaggctctccctggatccagacgggaagacccaacctccaggagcactcgctcatctccccagacagcacttcaggctgggaaagga

SEQ ID NO: 712758 - DNA, 120 bp, Artificial Sequence
  ENSG00000197077_47 (sequence is synthesized)
gccaggctgcccagaaacgtccatgtgggtggttttgctttttatgtaaaaatttgcatttctacctattttagacaccttcatcagctccaagaacatcagtgtgaggctggaattgtc

SEQ ID NO: 712759 - DNA, 120 bp, Artificial Sequence
  ENSG00000197077_48 (sequence is synthesized)
tccccaggttctgaaaaacacctgcatttgtgaaagcacctcctcacccgaccccggggcaggtctttttttggaaggacatttccaaggaagatcaaactgttcattttctgctgtagt

SEQ ID NO: 712760 - DNA, 120 bp, Artificial Sequence
  ENSG00000197077_49 (sequence is synthesized)
ctcggtgcagggtattaccgctgggttgaggttttctattctttttttttggtgagttccttcttccccttgaggaatcagcagttccaatttttaaacatactctccctgattatgtgt

SEQ ID NO: 712761 - DNA, 120 bp, Artificial Sequence
  ENSG00000197077_50 (sequence is synthesized)
atttctctttctagtggggctgtgtgcatcgttggcctatgttattgtatgtcatttttgtttgctttagaaggcgataaagcaataattcagctaattttctttgaaacttgataggta

SEQ ID NO: 712762 - DNA, 120 bp, Artificial Sequence
  ENSG00000197077_51 (sequence is synthesized)
tatatgtgtttacgttaaaggacaggaggaaagatgtgcgaataatttgttctgaagtatccagtcacctcaggttatcttatccctatccaagctgtttagaagttataattgtcactc

SEQ ID NO: 712763 - DNA, 120 bp, Artificial Sequence
  ENSG00000197077_52 (sequence is synthesized)
ttgtatttatttccatggcttcttttcatttgagctctggtttcggtagggtgacctttgccccttggccttaagggttcataaactgcagcccaagtggtggtgcctttgcttatgaat

SEQ ID NO: 712764 - DNA, 120 bp, Artificial Sequence
  ENSG00000197077_53 (sequence is synthesized)
catcagacctgccctagtaatctttttctccagagtcttctttgaacatgacgtgggctgctggcatggaggagttgttccaaactggcctcagaacagatgcatgaatgaagggtactt

SEQ ID NO: 712765 - DNA, 120 bp, Artificial Sequence
  ENSG00000197077_54 (sequence is synthesized)
tttgcttttgctcacctcattttccttcatctttcttgatgaatccattatttgcaaatgctgtcaaaacatgctttccttctccctggctacctctcaggagttcatttgtctctctgt

SEQ ID NO: 712766 - DNA, 120 bp, Artificial Sequence
  ENSG00000197077_55 (sequence is synthesized)
ctcagcttcctccctcatcttcctttacccctcttctctgtcttagtgggtggatgggcatggatagaaatcctctgtttctttaggttaggataaacacctgggccctggtgaggcagt

SEQ ID NO: 712767 - DNA, 120 bp, Artificial Sequence
  ENSG00000197077_56 (sequence is synthesized)
tgctgttcagcaccagggacagcaactgcagggctgtgaggccggagcccaccttgtgtcctgttcgatgagctttggttactgatgagcaattgccagatcatgtcacccacccagcct

SEQ ID NO: 712768 - DNA, 120 bp, Artificial Sequence
  ENSG00000197077_57 (sequence is synthesized)
tttacacctgggagcctcatgcatctgggtttgggagtttggccctgctgatgatagtttgttttctcttcattccctgaattagtcatcagttctccgtggccatttggggattcatgc

SEQ ID NO: 712769 - DNA, 120 bp, Artificial Sequence
  ENSG00000197077_58 (sequence is synthesized)
ctgcaactgcttcagtcgaattcttttttaaagatccagtttatgttttataataattttgatcttatggctttcaacgtcaataggatcccctttaaaaataccctgctagtgttttgt

SEQ ID NO: 712770 - DNA, 120 bp, Artificial Sequence
  ENSG00000197077_59 (sequence is synthesized)
cctgctagtgttttgttttgttttgtttttctgagacaaggtcttactctgttgctcaagctggagtggagtggcacgatcatagctcactaacacctgggctcaagtgattctcccacc

SEQ ID NO: 712771 - DNA, 74 bp, Artificial Sequence
  ENSG00000197077_60 (sequence is synthesized)
ccaagtagctgggactacaggtgtatgctaccatgaccagctaatttttaaatatttttgtagagacaagggtc

SEQ ID NO: 712772 - DNA, 120 bp, Artificial Sequence
  ENSG00000197077_61 (sequence is synthesized)
ctcagcctcccaaagtgctcggattacagacatgagccactgcacctggcctgaaacacattcctagtcttttgatcctgacttcttatctgggctgctgtctctctttccttcaggtgg

SEQ ID NO: 712773 - DNA, 120 bp, Artificial Sequence
  ENSG00000197077_62 (sequence is synthesized)
aaaggaccccttggtaccatctcaagcagtaggaaaggacctgctcttacatatattgatggtcctcatgcaaaactctcaattcttaattagtcatgtctcagctcaaggatatcagac

SEQ ID NO: 712774 - DNA, 120 bp, Artificial Sequence
  ENSG00000197077_63 (sequence is synthesized)
aggaatgaaacacacttgaaaatgagattgacctggagattttttttccctaatctctcataccttaattggaaaaataatcaattaattctatgttaattaggatatacaaagttcacc

SEQ ID NO: 712775 - DNA, 120 bp, Artificial Sequence
  ENSG00000197077_64 (sequence is synthesized)
ctccttgaaagtgactagggcaagccctgaagatcttcctcacctccttttatttttctataaccttgtctcctccagcaccacagggaagacaatcacagtgggtcaagagcgaccctc

SEQ ID NO: 712776 - DNA, 120 bp, Artificial Sequence
  ENSG00000197077_65 (sequence is synthesized)
tttcacgtgggctctgccatgacctctgagacctgcttatgatcagtgcaatgaagttagaagtaactgatgattgggagcctttgcagatagctgggcaaatgggtgatttacttatcc

SEQ ID NO: 712777 - DNA, 120 bp, Artificial Sequence
  ENSG00000197077_66 (sequence is synthesized)
ccattctaaatggagtgagctctctttgaggctaagcaaggaggcgttgtatgctagtttctagactttgcctggagacccctttggaaatctgtcttctttttaaactcacttaatatg

SEQ ID NO: 712778 - DNA, 120 bp, Artificial Sequence
  ENSG00000197077_67 (sequence is synthesized)
ccttaatcatctgtgtgtaatggagtcatccgctcctcaatctaaccctcctcccctggggctttggctgtcctcaatgagagtttcatgcagaatggaaaatcctctatatgtacaatc

SEQ ID NO: 712779 - DNA, 120 bp, Artificial Sequence
  ENSG00000197077_68 (sequence is synthesized)
tctctccccctcatttctcttcctcctcacctccaccacccctttgcacatcagcattttaacagctgatcttttgagaagcctgtatctttttcctcttcagtagatacccttcttcat

SEQ ID NO: 712780 - DNA, 120 bp, Artificial Sequence
  ENSG00000197077_69 (sequence is synthesized)
ggtcctttgcctaatcaaacagaggcttttggcctttgaaaatccatgacaaggcctcagaaatcagtgttgtggaggattactccatgccaccggagaaactctggtgaaagagaaacc

SEQ ID NO: 712781 - DNA, 120 bp, Artificial Sequence
  ENSG00000197077_70 (sequence is synthesized)
tcgtggtctttaggatgttgggattttgagtgaacctgacctgatagcctcaggattcagggaaaggacaatcagatggcggtgttttccagggggacgcgccaaatcatgtggtttcag

SEQ ID NO: 712782 - DNA, 120 bp, Artificial Sequence
  ENSG00000197077_71 (sequence is synthesized)
acaattgtgtttgcctttgtgcctccctggaagggaggccaactaagggtatcaccaagaagccaaaagagaaataggcatgagcctgtggttttaaactttacaggctgggcaaaggat

SEQ ID NO: 712783 - DNA, 120 bp, Artificial Sequence
  ENSG00000197077_72 (sequence is synthesized)
ttagaaagacccttagcatgattttcctaaaagagaccttagctgctccaacctggtgctgatagctgctttgttgatctatgctttaaaatttttctttataatgcccccagatggctc

SEQ ID NO: 712784 - DNA, 120 bp, Artificial Sequence
  ENSG00000197077_73 (sequence is synthesized)
ctggaactagtcgtaattgcaaactgtaaaaatccctcctccccagtgtagatatttaaaccagagtaagtgatggggagacattctgtggtctctgaatgtgccttccccctcaccgtg

SEQ ID NO: 712785 - DNA, 120 bp, Artificial Sequence
  ENSG00000197077_74 (sequence is synthesized)
tgttaaaacacaaaagccgaagttccatggcatcatgattccgaggggctggagggataggacccactccacatctaaaggggatctgctttgggctcggtcccattagcgagtggggga

SEQ ID NO: 712786 - DNA, 120 bp, Artificial Sequence
  ENSG00000197077_75 (sequence is synthesized)
ctcttgctgtgtgctaagaggctgctaggactcacccagttggaattctgggtgggctcaggaagtttagagccacgtaaaaagctggtaggcatgagtgtgccaggtctttgccagcct

SEQ ID NO: 712787 - DNA, 120 bp, Artificial Sequence
  ENSG00000197077_76 (sequence is synthesized)
gcgtctccttttgcaccccccaatccagagtttgctttcttttgactaaattggctcctgcagggggaagggcagaaagctaggccctctgctctggaaagtcggcctgaggtttccggc

SEQ ID NO: 712788 - DNA, 120 bp, Artificial Sequence
  ENSG00000197077_77 (sequence is synthesized)
aagttaacccttaaaatggacacccctcagcccgccctcccctttggccttcccagaatctccttcagtggttgctctcacacctgtgccataacatcatcttccatgacttggacgggc

SEQ ID NO: 712789 - DNA, 120 bp, Artificial Sequence
  ENSG00000197077_78 (sequence is synthesized)
acttccttgacaattcctattggcatcacacgggctacaaattatgctgttttctaaagaatttgaacttttttttttttcttttcttgagacacggtcttgctctgttggccaggctgg

SEQ ID NO: 712790 - DNA, 120 bp, Artificial Sequence
  ENSG00000197077_79 (sequence is synthesized)
ctccaactcctgggctcaagcaatcctctcatctccacctccagagtagcctagatgacaggcgcacatcaccacgcccagctgatcttttaaatctgttttgtagaaacaggatctcac

SEQ ID NO: 712791 - DNA, 120 bp, Artificial Sequence
  ENSG00000197077_80 (sequence is synthesized)
ggcgcacatcaccacgcccagctgatcttttaaatctgttttgtagaaacaggatctcactatattgcccaagctggtcttaaacttggtctcaagtgattctactgcctcagcctccca

SEQ ID NO: 712792 - DNA, 120 bp, Artificial Sequence
  ENSG00000197077_81 (sequence is synthesized)
catgcccagctgaatttgagctttttaataatctcattccacatagccttatagatcctgtaaatagggggggtcacaaaagtaatatattgtgttatggaagataattttgtactgtgc

SEQ ID NO: 712793 - DNA, 120 bp, Artificial Sequence
  ENSG00000197077_82 (sequence is synthesized)
tgtttcctaaatcataccaatatcctaaagtcatgcacttcccagatgatcgtgatcctccaaatgctttgtaagatggggcagggcgtggaaatatatatatatacacacacacacaga

SEQ ID NO: 712794 - DNA, 120 bp, Artificial Sequence
  ENSG00000197077_83 (sequence is synthesized)
gacacacacacacacaagtatagtatatattttcctaacctttcttctgggtccttcctcagatctttgagtcacgatagaaaaggagctcgagttctttgtgtaggaaagttaagcttc

SEQ ID NO: 712795 - DNA, 120 bp, Artificial Sequence
  ENSG00000197077_84 (sequence is synthesized)
ctgcctgcggtgttcttgcaattgccttaggaattcacaagctctaggagttctgaacggaaggcagacgagaggcactttatccagtcccagaaagaatctctaaccgtgtgactgaga

SEQ ID NO: 712796 - DNA, 120 bp, Artificial Sequence
  ENSG00000197077_85 (sequence is synthesized)
agtcatctagaaaaacttatatttttaatgtaaaaacaaatggggcttaccagacctcacagagtattggacgtctacaagtgcttttatattttgtaactgtaaagaagtttcatatgc

SEQ ID NO: 712797 - DNA, 120 bp, Artificial Sequence
  ENSG00000197077_86 (sequence is synthesized)
acagaagagcagttggaaatctggtcgactgcaataaaacaagatgacctttgcatgtacaaagatgttgcattcagactatgaaaatagcaaataaagctttggtgcaagttgcattgg

SEQ ID NO: 712798 - DNA, 89 bp, Artificial Sequence
  ENSG00000197077_87 (sequence is synthesized)
acgtgccatggtgcagtcatagctcactgcagcctcaaattcatgggctcaagcaattcacctcagcctcccaaagtgctggaactaca

SEQ ID NO: 712799 - DNA, 120 bp, Artificial Sequence
  ENSG00000197077_88 (sequence is synthesized)
caagcaattcacctcagcctcccaaagtgctggaactacaagcatacaccaccatacccaacctgctgaaactcagcctgctgggacgagtcttctttcccccttcttgtttctgccatg

SEQ ID NO: 712800 - DNA, 120 bp, Artificial Sequence
  ENSG00000197077_89 (sequence is synthesized)
gaagtgtgtggacagccccattcatgatgacatgtgacactactggcttttcccggcagtcacaccccctgacccagggcctgccagcttggcaattgcttctccattcttgaagttcct

SEQ ID NO: 712801 - DNA, 120 bp, Artificial Sequence
  ENSG00000197077_90 (sequence is synthesized)
gtgcacacattcagttcccgggcatcaccttctctcttcttgccttcttgccgtacaactgaaaaccctaaaaccctccgtgcctacggctcccgggagggtgagggtccaggcagctgg

SEQ ID NO: 712802 - DNA, 120 bp, Artificial Sequence
  ENSG00000197077_91 (sequence is synthesized)
gttcagaaggatccacccctggacccgccccactggacgagaagccagagatgccccgggcggggctcataggaccgagtggtggcttctcagttccccaggcagccgtggccattagtg

SEQ ID NO: 712803 - DNA, 120 bp, Artificial Sequence
  ENSG00000197077_92 (sequence is synthesized)
gagccgactggctggtcccctggccgtgagccggcttctgaatgatttatgccgccttgaacttgactccagcgtgacaggagtgagaagagccgctcccgctagaggaaagctggaaac

SEQ ID NO: 712804 - DNA, 120 bp, Artificial Sequence
  ENSG00000197077_93 (sequence is synthesized)
ctccttgtctcggccgatcagctgggtgagccctggaactggaacctggactgcccagtgtgttgactttataactccgctggggtggactcccagcctggcacttagctgcctcttaat

SEQ ID NO: 712805 - DNA, 120 bp, Artificial Sequence
  ENSG00000197077_94 (sequence is synthesized)
tctgagcggcacccgtggatgcagccggctcctggctcagggatgtttacttacccttggtttgcctgaagaaagctgctgtttttaattttttttcctccaagcaagcccaaaacttcc

SEQ ID NO: 712806 - DNA, 120 bp, Artificial Sequence
  ENSG00000197077_95 (sequence is synthesized)
atgagcaaaagagtccaaagaggcaagaggacactggcgttttaattgctctctccctccctaacttccttcttccctctcctcctggctggccccatggattacctgggagataaactc

SEQ ID NO: 712807 - DNA, 120 bp, Artificial Sequence
  ENSG00000197077_96 (sequence is synthesized)
acagtggcccagacccacatgacccagtggatgggcaccgtgaggaggtccttccaggaagccctcaatttggtgaccaccacggtgggccacgaacggacgagtgcagagtcggccagc

SEQ ID NO: 712808 - DNA, 120 bp, Artificial Sequence
  ENSG00000197077_97 (sequence is synthesized)
cggacccccttcaagcgtacttcctccttccgacacctggcttcccggagtcgggaatccttccgccgcttctctgctcgcagccaacagagattttcttcactgaggaaaaggcataca

SEQ ID NO: 712809 - DNA, 120 bp, Artificial Sequence
  ENSG00000197077_98 (sequence is synthesized)
gacagcccagggccctgacggggttgagggcagcaggcaactgtccaggaatctggtgtcacctgactagctgtgttgtggttcttgatgtggagggtgtttggtggctctgctggggaa

SEQ ID NO: 712810 - DNA, 120 bp, Artificial Sequence
  ENSG00000197077_99 (sequence is synthesized)
accttcttcctcttgagtttccagcccagcactgcctggcatggagtggttaagggaacatagactggtgttggaaagtcctgggttccaatcccagcacggtctcctgtcaacctcttt

SEQ ID NO: 712811 - DNA, 120 bp, Artificial Sequence
  ENSG00000197077_100 (sequence is synthesized)
gagggcactgtctttgaaatgggactcacttatgcatgtatcttggacctgccatacacctgctgtgtgtcttggggcaaatgtcttcacctctctgagcctcagcttccttatccactt

SEQ ID NO: 712812 - DNA, 120 bp, Artificial Sequence
  ENSG00000197077_101 (sequence is synthesized)
gtaaccagcatcatcagctccacagcctcaaatacaattgcatgcattcaaattaaaactgatctaagcccttacctgctaggtaagcagggagtctgaccacttacccctgggaagtca

SEQ ID NO: 712813 - DNA, 120 bp, Artificial Sequence
  ENSG00000197077_102 (sequence is synthesized)
ccctgaggtttatagttgcaagcatgaagaggctggagtttgctcagaatgattctgctgaacgttctcactaaggtcttgcttggtacaacagtgtccctggtatcaggggatccgact

SEQ ID NO: 712814 - DNA, 120 bp, Artificial Sequence
  ENSG00000197077_103 (sequence is synthesized)
gtctctgtagtggctcttccaggacagaaagtcccctcaggcatgggcacctttcatggaggtcccaggggacagtccctagcactcagctctttcaggtcccaagcacagccaggatgt

SEQ ID NO: 712815 - DNA, 120 bp, Artificial Sequence
  ENSG00000197077_104 (sequence is synthesized)
cagctgccccagcatagcaggtcaaacggtctcctgctctagcatcttccagaccagaacttatcctcctttcccctgggagccccacctccaggggtcaggcaggtcttccttttcaac

SEQ ID NO: 712816 - DNA, 120 bp, Artificial Sequence
  ENSG00000197077_105 (sequence is synthesized)
ccttgaaacccaggggtgatgtcattattctcctcgcgtaacaatagggctacctgcccactttctgggggatggaacatctgcaaaatgtgaaagggaccctctctcctggcagtaaag

SEQ ID NO: 712817 - DNA, 120 bp, Artificial Sequence
  ENSG00000197077_106 (sequence is synthesized)
cctcccacctacacacttgggcatggctacccacatttccccagaggaggaacaccgctgctttagaaaaagggcttcctttagggcttcaaagaggattctccttcagtatatggccaa

SEQ ID NO: 712818 - DNA, 120 bp, Artificial Sequence
  ENSG00000197077_107 (sequence is synthesized)
ggtctctcgctggcacctctagatcagggcggagacaaagaaagacacaagttgagtcttgattggggaaccccattatataaccatggccatgcccacctccctgggtgtcatcaggat

SEQ ID NO: 712819 - DNA, 120 bp, Artificial Sequence
  ENSG00000197077_108 (sequence is synthesized)
ttagttaggtgatatattcagttattcactcaacagacatgtattgagatcttgctgtgtgccttacatgccagcatcatgtcactgcatcatgaactttcctgctagaacgctaagtgg

SEQ ID NO: 712820 - DNA, 120 bp, Artificial Sequence
  ENSG00000197077_109 (sequence is synthesized)
ttccttcttgatgtccattataaacaacaatcagtgagtgttgaccactggcccaggcacatgttaataaccccagaggcaaaactgcctgcgctttttgcaaattagcaaatcagagtg

SEQ ID NO: 712821 - DNA, 120 bp, Artificial Sequence
  ENSG00000197077_110 (sequence is synthesized)
gccatggagtgactctaaatgctggtgtcccgaagcataggtctaacgcttactgaaattatactgcggtttatgtgtgatgcccaccacgatttgggtctcctgtggggatactgaggt

SEQ ID NO: 712822 - DNA, 120 bp, Artificial Sequence
  ENSG00000197077_111 (sequence is synthesized)
ttatgtatggtgccaaccatgatttaggtctcctgtggggacggtttggaggccaaatggggaggcggaggcggagcactaaggaatccagtctctgtaccaggctgaggatgcaagggt

SEQ ID NO: 712823 - DNA, 120 bp, Artificial Sequence
  ENSG00000197077_112 (sequence is synthesized)
taagtggccggagaagcaagcctgcctctaggtgcagcaggcactttctgatttccgtctttccccctctttcactggtcccgtgcaagtctcctcacaagataccactgtggctggttt

SEQ ID NO: 712824 - DNA, 120 bp, Artificial Sequence
  ENSG00000197077_113 (sequence is synthesized)
gggaagtagctatgatcagctccttccaccaccccattgggacttttgttacttaccattgttgggaaatgattcattgaaattagcctgtcatcactgacttagaaggccttgggtgat

SEQ ID NO: 712825 - DNA, 120 bp, Artificial Sequence
  ENSG00000197077_114 (sequence is synthesized)
ggaatttctccaaagtggacctaggcggaagaaaccaacatttcatgtaagaacgtgagcttgccggaaagagctcttggctgtgagccgtggtcaggctctgtctgaaacaagggcttt

SEQ ID NO: 712826 - DNA, 120 bp, Artificial Sequence
  ENSG00000197077_115 (sequence is synthesized)
ccacacctgagcacagggagttctctcagccactgtaggaaggaggcactctgtttatctcctttttataaatagggacacccaagctcagagaagtgaagctcattgcccaaggtcaca

SEQ ID NO: 712827 - DNA, 120 bp, Artificial Sequence
  ENSG00000197077_116 (sequence is synthesized)
taaccaggattcgaacccagcagggtttgaaccccagctctgagcacttcactgctgtctcccgggagaattctgagccaggcacttcccatctccttactggggcccacccagatggtc

SEQ ID NO: 712828 - DNA, 120 bp, Artificial Sequence
  ENSG00000197077_117 (sequence is synthesized)
tgtgctccccaccctttcactgggggggccctcaccaaccccccacctgtcgcagctccgagtgtgagtcttcagggatgcctgaaaatggactcctgatgtttagtaagctgccccctc

SEQ ID NO: 712829 - DNA, 120 bp, Artificial Sequence
  ENSG00000197077_118 (sequence is synthesized)
ccttcccacctgcaccctagattatgtgagtaatggaggaattccacggagaacgtctcaacccggggactctgtgtgaatacagttgacagaaggatttagttagatgttgaatccatt

SEQ ID NO: 712830 - DNA, 120 bp, Artificial Sequence
  ENSG00000197077_119 (sequence is synthesized)
attcattcaacaaacaaacattaattgagctcctgctgtgtactgatcattgctgtagattacatgcttgtgtggtggatgtcactgggagggaaaaggcatttgtattatgtgcctact

SEQ ID NO: 712831 - DNA, 120 bp, Artificial Sequence
  ENSG00000197077_120 (sequence is synthesized)
gggtgccaggaagccaggcactgtactagggcactcaaggttcattgttccacctgacttttgtcatcagcctatggggtatgttttatggggaaatttaggctttgggtgttaggttac

SEQ ID NO: 712832 - DNA, 120 bp, Artificial Sequence
  ENSG00000197077_121 (sequence is synthesized)
tattaaaatgtggaagccctggcctaggtaccacctaaatagcctctcatctgtcaacgaagctgtgtaccgccaactgtgttgtggtaccctccattgatggttcccttgatttttttc

SEQ ID NO: 712833 - DNA, 120 bp, Artificial Sequence
  ENSG00000197077_122 (sequence is synthesized)
ggggaatgggggtccctctccttccaaactcaggctatacttctagagaggtgctcgcataggttttagagctgaatagaagagagttacaactttttaattttctctagcagcagaagc

SEQ ID NO: 712834 - DNA, 120 bp, Artificial Sequence
  ENSG00000197077_123 (sequence is synthesized)
tttgttcatgagaattctcaatactcagatacctaaaaagtacaacagaggccggggaaggaggccaggaatcaggccagctggcctctcctcttccccgcccactgccacctgctacat

SEQ ID NO: 712835 - DNA, 120 bp, Artificial Sequence
  ENSG00000197077_124 (sequence is synthesized)
ggaacgccagggcaccattgctggagaactactgatctagtttagccctctccagaccgatggggaaactgaggcattctccctcctcttcccctttggggaagtatctttattatcaga

SEQ ID NO: 712836 - DNA, 120 bp, Artificial Sequence
  ENSG00000197077_125 (sequence is synthesized)
gatctggaggacctgggaaggtggatcaaagggcacggccaggttgaatgagatcggtttcactcccttcgtggaacagctatcccgatcctgggctgttctgtgtagagacgagcacaa

SEQ ID NO: 712837 - DNA, 120 bp, Artificial Sequence
  ENSG00000197077_126 (sequence is synthesized)
agcagcttctgccccccaagaggctctcaggctctcagaggggtgtttcagcagctggaggtggaggttaagaacaggggatctaaggtcacacagccagggtttaattccaccattgct

SEQ ID NO: 712838 - DNA, 120 bp, Artificial Sequence
  ENSG00000197077_127 (sequence is synthesized)
gcttaagagctgcatgatgtgggaaaaggtacttgacctcctgaacctcagtttcctcaactgtaaagtgggttttctaacctcctaaccttccgaggtggtcatgaggatgaaacaaga

SEQ ID NO: 712839 - DNA, 120 bp, Artificial Sequence
  ENSG00000197077_128 (sequence is synthesized)
gtgtgtctaaagccctgtgcctgagccctgggatgtagaagtactcagtgaagcagagtggaaatcttatcatgagcactgttaatccatgaaagttagggattgttcctgatgctagag

SEQ ID NO: 712840 - DNA, 120 bp, Artificial Sequence
  ENSG00000197077_129 (sequence is synthesized)
ttgtaatgatagtaagtgctggttggatcagagcaagagtgggtaagctatggcccacaggctaaatccagcccacatcagtttttgtaagtaagctttattggaacacagccacatgca

SEQ ID NO: 712841 - DNA, 120 bp, Artificial Sequence
  ENSG00000197077_130 (sequence is synthesized)
ttcatttatgtattgtccataactgctttagtgctaccactgcagagttaagaagtagcacagatgtcccacagcccacagaatcaggaatattttactctctggccctttctctgaccc

SEQ ID NO: 712842 - DNA, 120 bp, Artificial Sequence
  ENSG00000197077_131 (sequence is synthesized)
ctgtgatggagggaggcaggtgaagggctcataatgcacacttgaggatgggcggcagaaaagacttccagctgggtgcagtggctcacgtctatagtcccaggactttggaaggcagag

SEQ ID NO: 712843 - DNA, 80 bp, Artificial Sequence
  ENSG00000197077_132 (sequence is synthesized)
gtggctcacgtctatagtcccaggactttggaaggcagaggtgagaggatcacttgaggccaggggttggaactaaagaa

SEQ ID NO: 712844 - DNA, 120 bp, Artificial Sequence
  ENSG00000197079_0 (sequence is synthesized)
ctggcctcagagacctatcaattgcatctgagttgcaggggccatggcttccaaatgcctcaaggccggcttctcttctgggtctctcaagagcccaggaggggccagtgggggctccac

SEQ ID NO: 712845 - DNA, 120 bp, Artificial Sequence
  ENSG00000197079_1 (sequence is synthesized)
tcgtgtgtccgcaatgtactccagcagctcttgcaagcttccaagtctctcccctgtggccagaagtttctctgcctgctcagtgggtctgggcagaagcagctacagggccaccagctg

SEQ ID NO: 712846 - DNA, 120 bp, Artificial Sequence
  ENSG00000197079_2 (sequence is synthesized)
cctccctgctctctgcctccctgctggaggcttcgctaccagctacagtgggggtgggggctggtttggggagggcatcctcactggcaatgagaaggagaccatgcaatccctgaacga

SEQ ID NO: 712847 - DNA, 120 bp, Artificial Sequence
  ENSG00000197079_3 (sequence is synthesized)
ccgcctggccggctacctggagaaggtgcgtcagctggagcaggagaacgccagcctggagagccgcatccgtgagtggtgtgagcagcaggtcccctacatgtgccctgactaccagtc

SEQ ID NO: 712848 - DNA, 120 bp, Artificial Sequence
  ENSG00000197079_4 (sequence is synthesized)
ctacttccggaccatcgaggagctccagaagaagactctatgcagcaaggctgagaatgccaggctggtggtggagattgacaatgccaaattggctgcagatgacttcaggaccaagta

SEQ ID NO: 712849 - DNA, 120 bp, Artificial Sequence
  ENSG00000197079_5 (sequence is synthesized)
tgagacggaggtgtccctgcggcagctggtggagtcagacatcaacggcctgcgcaggatcctggatgacctgaccctgtgcaagtctgacctggaggcccaggtggagtccctgaagga

SEQ ID NO: 712850 - DNA, 120 bp, Artificial Sequence
  ENSG00000197079_6 (sequence is synthesized)
accgagttctggaggagatgaggtgccagtatgaaaccctggtggagaataaccgccgggatgctgaagactggttggacacccagagtgaggagctgaaccagcaggtggtgtccagct

SEQ ID NO: 712851 - DNA, 120 bp, Artificial Sequence
  ENSG00000197079_7 (sequence is synthesized)
cagagcagttgcagtcctgccaggcagagatcatcgagctgagacgcacggtcaacgccctggagattgagctgcaggctcagcacagcatgagagatgctttggaatccaccctggcag

SEQ ID NO: 712852 - DNA, 120 bp, Artificial Sequence
  ENSG00000197079_8 (sequence is synthesized)
agacggaggcccgctatagctcccagctggcccagatgcagtgcatgatcaccaacgtggaggcccagctggccgagatccgggctgacctggagcggcagaaccaggagtaccaggtgc

SEQ ID NO: 712853 - DNA, 120 bp, Artificial Sequence
  ENSG00000197079_9 (sequence is synthesized)
tgctggacgtccgggcccggctggagtgtgagatcaacacgtaccggggcctgctggagagtgaggacagcaagctcccctgtaacccatgtgcacctgactactcaccctccaagtcat

SEQ ID NO: 712854 - DNA, 120 bp, Artificial Sequence
  ENSG00000197079_10 (sequence is synthesized)
gccttccctgtcttcctgcggcctcctgcggtcctagtgcagcccgcacaaactgcagcccccgccccatttgtgtgccctgcccagggggtcggttctgagagcggggtctggctgaaa

SEQ ID NO: 712855 - DNA, 120 bp, Artificial Sequence
  ENSG00000197079_11 (sequence is synthesized)
aggctttctgcaaatacatgccctaaagtttctcagagcctgtcacaaaggccggctgcccccaaaggtctcaactcctcatcatttcaatgggtgccagggtctctgttctcaggctgc

SEQ ID NO: 712856 - DNA, 120 bp, Artificial Sequence
  ENSG00000197079_12 (sequence is synthesized)
ctcctgggtcaggttttccttctaggtgctgttccggtggattctgaaatgcagtagagggcttttgttggcagaacaataaagtgcatttgctcaggcccctgatgcctaacttgcacc

SEQ ID NO: 712857 - DNA, 120 bp, Artificial Sequence
  ENSG00000197081_0 (sequence is synthesized)
cgagcccagtcgagccgcgctcacctcgggctcccgctccgtctccacctccgcctttgccctggcggcgcgaccccgtcccgggcgcggcccccagcagtcgcgcgccgttagcctcgc

SEQ ID NO: 712858 - DNA, 80 bp, Artificial Sequence
  ENSG00000197081_1 (sequence is synthesized)
gccggagcccccacctggggcccgcgcccgcccgccgcccgcagcgctctctgctcctgctgcagctgctgctgctcgtc

SEQ ID NO: 712859 - DNA, 120 bp, Artificial Sequence
  ENSG00000197081_2 (sequence is synthesized)
cgtcgctgccccggggtccacgcaggcccaggccgccccgttccccgagctgtgcagttatacatgggaagctgttgataccaaaaataatgtactttataaaatcaacatctgtggaag

SEQ ID NO: 712860 - DNA, 120 bp, Artificial Sequence
  ENSG00000197081_3 (sequence is synthesized)
tgtggatattgtccagtgcgggccatcaagtgctgtttgtatgcacgacttgaagacacgcacttatcattcagtgggtgactctgttttgagaagtgcaaccagatctctcctggaatt

SEQ ID NO: 712861 - DNA, 120 bp, Artificial Sequence
  ENSG00000197081_4 (sequence is synthesized)
caacacaacagtgagctgtgaccagcaaggcacaaatcacagagtccagagcagcattgccttcctgtgtgggaaaaccctgggaactcctgaatttgtaactgcaacagaatgtgtgca

SEQ ID NO: 712862 - DNA, 120 bp, Artificial Sequence
  ENSG00000197081_5 (sequence is synthesized)
ctactttgagtggaggaccactgcagcctgcaagaaagacatatttaaagcaaataaggaggtgccatgctatgtgtttgatgaagagttgaggaagcatgatctcaatcctctgatcaa

SEQ ID NO: 712863 - DNA, 120 bp, Artificial Sequence
  ENSG00000197081_6 (sequence is synthesized)
gcttagtggtgcctacttggtggatgactccgatccggacacttctctattcatcaatgtttgtagagacatagacacactacgagacccaggttcacagctgcgggcctgtccccccgg

SEQ ID NO: 712864 - DNA, 120 bp, Artificial Sequence
  ENSG00000197081_7 (sequence is synthesized)
cactgccgcctgcctggtaagaggacaccaggcgtttgatgttggccagccccgggacggactgaagctggtgcgcaaggacaggcttgtcctgagttacgtgagggaagaggcaggaaa

SEQ ID NO: 712865 - DNA, 120 bp, Artificial Sequence
  ENSG00000197081_8 (sequence is synthesized)
gctagacttttgtgatggtcacagccctgcggtgactattacatttgtttgcccgtcggagcggagagagggcaccattcccaaactcacagctaaatccaactgccgctatgaaattga

SEQ ID NO: 712866 - DNA, 120 bp, Artificial Sequence
  ENSG00000197081_9 (sequence is synthesized)
gtggattactgagtatgcctgccacagagattacctggaaagtaaaacttgttctctgagcggcgagcagcaggatgtctccatagacctcacaccacttgcccagagcggaggttcatc

SEQ ID NO: 712867 - DNA, 120 bp, Artificial Sequence
  ENSG00000197081_10 (sequence is synthesized)
ctatatttcagatggaaaagaatatttgttttatttgaatgtctgtggagaaactgaaatacagttctgtaataaaaaacaagctgcagtttgccaagtgaaaaagagcgatacctctca

SEQ ID NO: 712868 - DNA, 120 bp, Artificial Sequence
  ENSG00000197081_11 (sequence is synthesized)
agtcaaagcagcaggaagataccacaatcagaccctccgatattcggatggagacctcaccttgatatattttggaggtgatgaatgcagctcagggtttcagcggatgagcgtcataaa

SEQ ID NO: 712869 - DNA, 120 bp, Artificial Sequence
  ENSG00000197081_12 (sequence is synthesized)
ctttgagtgcaataaaaccgcaggtaacgatgggaaaggaactcctgtattcacaggggaggttgactgcacctacttcttcacatgggacacggaatacgcctgtgttaaggagaagga

SEQ ID NO: 712870 - DNA, 120 bp, Artificial Sequence
  ENSG00000197081_13 (sequence is synthesized)
agacctcctctgcggtgccaccgacgggaagaagcgctatgacctgtccgcgctggtccgccatgcagaaccagagcagaattgggaagctgtggatggcagtcagacggaaacagagaa

SEQ ID NO: 712871 - DNA, 120 bp, Artificial Sequence
  ENSG00000197081_14 (sequence is synthesized)
gaagcattttttcattaatatttgtcacagagtgctgcaggaaggcaaggcacgagggtgtcccgaggacgcggcagtgtgtgcagtggataaaaatggaagtaaaaatctgggaaaatt

SEQ ID NO: 712872 - DNA, 120 bp, Artificial Sequence
  ENSG00000197081_15 (sequence is synthesized)
tatttcctctcccatgaaagagaaaggaaacattcaactctcttattcagatggtgatgattgtggtcatggcaagaaaattaaaactaatatcacacttgtatgcaagccaggtgatct

SEQ ID NO: 712873 - DNA, 120 bp, Artificial Sequence
  ENSG00000197081_16 (sequence is synthesized)
ggaaagtgcaccagtgttgagaacttctggggaaggcggttgcttttatgagtttgagtggcacacagctgcggcctgtgtgctgtctaagacagaaggggagaactgcacggtctttga

SEQ ID NO: 712874 - DNA, 120 bp, Artificial Sequence
  ENSG00000197081_17 (sequence is synthesized)
ctcccaggcagggttttcttttgacttatcacctctcacaaagaaaaatggtgcctataaagttgagacaaagaagtatgacttttatataaatgtgtgtggcccggtgtctgtgagccc

SEQ ID NO: 712875 - DNA, 120 bp, Artificial Sequence
  ENSG00000197081_18 (sequence is synthesized)
ctgtcagccagactcaggagcctgccaggtggcaaaaagtgatgagaagacttggaacttgggtctgagtaatgcgaagctttcatattatgatgggatgatccaactgaactacagagg

SEQ ID NO: 712876 - DNA, 120 bp, Artificial Sequence
  ENSG00000197081_19 (sequence is synthesized)
cggcacaccctataacaatgaaagacacacaccgagagctacgctcatcacctttctctgtgatcgagacgcgggagtgggcttccctgaatatcaggaagaggataactccacctacaa

SEQ ID NO: 712877 - DNA, 120 bp, Artificial Sequence
  ENSG00000197081_20 (sequence is synthesized)
cttccggtggtacaccagctatgcctgcccggaggagcccctggaatgcgtagtgaccgacccctccacgctggagcagtacgacctctccagtctggcaaaatctgaaggtggccttgg

SEQ ID NO: 712878 - DNA, 120 bp, Artificial Sequence
  ENSG00000197081_21 (sequence is synthesized)
aggaaactggtatgccatggacaactcaggggaacatgtcacgtggaggaaatactacattaacgtgtgtcggcctctgaatccagtgccgggctgcaaccgatatgcatcggcttgcca

SEQ ID NO: 712879 - DNA, 120 bp, Artificial Sequence
  ENSG00000197081_22 (sequence is synthesized)
gatgaagtatgaaaaagatcagggctccttcactgaagtggtttccatcagtaacttgggaatggcaaagaccggcccggtggttgaggacagcggcagcctccttctggaatacgtgaa

SEQ ID NO: 712880 - DNA, 120 bp, Artificial Sequence
  ENSG00000197081_23 (sequence is synthesized)
tgggtcggcctgcaccaccagcgatggcagacagaccacatataccacgaggatccatctcgtctgctccaggggcaggctgaacagccaccccatcttttctctcaactgggagtgtgt

SEQ ID NO: 712881 - DNA, 120 bp, Artificial Sequence
  ENSG00000197081_24 (sequence is synthesized)
ggtcagtttcctgtggaacacagaggctgcctgtcccattcagacaacgacggatacagaccaggcttgctctataagggatcccaacagtggatttgtgtttaatcttaatccgctaaa

SEQ ID NO: 712882 - DNA, 120 bp, Artificial Sequence
  ENSG00000197081_25 (sequence is synthesized)
cagttcgcaaggatataacgtctctggcattgggaagatttttatgtttaatgtctgcggcacaatgcctgtctgtgggaccatcctgggaaaacctgcttctggctgtgaggcagaaac

SEQ ID NO: 712883 - DNA, 120 bp, Artificial Sequence
  ENSG00000197081_26 (sequence is synthesized)
ccaaactgaagagctcaagaattggaagccagcaaggccagtcggaattgagaaaagcctccagctgtccacagagggcttcatcactctgacctacaaagggcctctctctgccaaagg

SEQ ID NO: 712884 - DNA, 120 bp, Artificial Sequence
  ENSG00000197081_27 (sequence is synthesized)
taccgctgatgcttttatcgtccgctttgtttgcaatgatgatgtttactcagggcccctcaaattcctgcatcaagatatcgactctgggcaagggatccgaaacacttactttgagtt

SEQ ID NO: 712885 - DNA, 120 bp, Artificial Sequence
  ENSG00000197081_28 (sequence is synthesized)
tgaaaccgcgttggcctgtgttccttctccagtggactgccaagtcaccgacctggctggaaatgagtacgacctgactggcctaagcacagtcaggaaaccttggacggctgttgacac

SEQ ID NO: 712886 - DNA, 120 bp, Artificial Sequence
  ENSG00000197081_29 (sequence is synthesized)
ctctgtcgatgggagaaagaggactttctatttgagcgtttgcaatcctctcccttacattcctggatgccagggcagcgcagtggggtcttgcttagtgtcagaaggcaatagctggaa

SEQ ID NO: 712887 - DNA, 120 bp, Artificial Sequence
  ENSG00000197081_30 (sequence is synthesized)
tctgggtgtggtgcagatgagtccccaagccgcggcgaatggatctttgagcatcatgtatgtcaacggtgacaagtgtgggaaccagcgcttctccaccaggatcacgtttgagtgtgc

SEQ ID NO: 712888 - DNA, 120 bp, Artificial Sequence
  ENSG00000197081_31 (sequence is synthesized)
tcagatatcgggctcaccagcatttcagcttcaggatggttgtgagtacgtgtttatctggagaactgtggaagcctgtcccgttgtcagagtggaaggggacaactgtgaggtgaaaga

SEQ ID NO: 712889 - DNA, 120 bp, Artificial Sequence
  ENSG00000197081_32 (sequence is synthesized)
cccaaggcatggcaacttgtatgacctgaagcccctgggcctcaacgacaccatcgtgagcgctggcgaatacacttattacttccgggtctgtgggaagctttcctcagacgtctgccc

SEQ ID NO: 712890 - DNA, 120 bp, Artificial Sequence
  ENSG00000197081_33 (sequence is synthesized)
cacaagtgacaagtccaaggtggtctcctcatgtcaggaaaagcgggaaccgcagggatttcacaaagtggcaggtctcctgactcagaagctaacttatgaaaatggcttgttaaaaat

SEQ ID NO: 712891 - DNA, 120 bp, Artificial Sequence
  ENSG00000197081_34 (sequence is synthesized)
gaacttcacggggggggacacttgccataaggtttatcagcgctccacagccatcttcttctactgtgaccgcggcacccagcggccagtatttctaaaggagacttcagattgttccta

SEQ ID NO: 712892 - DNA, 120 bp, Artificial Sequence
  ENSG00000197081_35 (sequence is synthesized)
cttgtttgagtggcgaacgcagtatgcctgcccacctttcgatctgactgaatgttcattcaaagatggggctggcaactccttcgacctctcgtccctgtcaaggtacagtgacaactg

SEQ ID NO: 712893 - DNA, 120 bp, Artificial Sequence
  ENSG00000197081_36 (sequence is synthesized)
ggaagccatcactgggacgggggacccggagcactacctcatcaatgtctgcaagtctctggccccgcaggctggcactgagccgtgccctccagaagcagccgcgtgtctgctgggtgg

SEQ ID NO: 712894 - DNA, 120 bp, Artificial Sequence
  ENSG00000197081_37 (sequence is synthesized)
ctccaagcccgtgaacctcggcagggtaagggacggacctcagtggagagatggcataattgtcctgaaatacgttgatggcgacttatgtccagatgggattcggaaaaagtcaaccac

SEQ ID NO: 712895 - DNA, 120 bp, Artificial Sequence
  ENSG00000197081_38 (sequence is synthesized)
catccgattcacctgcagcgagagccaagtgaactccaggcccatgttcatcagcgccgtggaggactgtgagtacacctttgcctggcccacagccacagcctgtcccatgaagagcaa

SEQ ID NO: 712896 - DNA, 120 bp, Artificial Sequence
  ENSG00000197081_39 (sequence is synthesized)
cgagcatgatgactgccaggtcaccaacccaagcacaggacacctgtttgatctgagctccttaagtggcagggcgggattcacagctgcttacagcgagaaggggttggtttacatgag

SEQ ID NO: 712897 - DNA, 120 bp, Artificial Sequence
  ENSG00000197081_40 (sequence is synthesized)
catctgtggggagaatgaaaactgccctcctggcgtgggggcctgctttggacagaccaggattagcgtgggcaaggccaacaagaggctgagatacgtggaccaggtcctgcagctggt

SEQ ID NO: 712898 - DNA, 120 bp, Artificial Sequence
  ENSG00000197081_41 (sequence is synthesized)
gtacaaggatgggtccccttgtccctccaaatccggcctgagctataagagtgtgatcagtttcgtgtgcaggcctgaggccaggccaaccaataggcccatgctcatctccctggacaa

SEQ ID NO: 712899 - DNA, 120 bp, Artificial Sequence
  ENSG00000197081_42 (sequence is synthesized)
gcagacatgcactctcttcttctcctggcacacgccgctggcctgcgagcaagcgaccgaatgttccgtgaggaatggaagctctattgttgacttgtctccccttattcatcgcactgg

SEQ ID NO: 712900 - DNA, 120 bp, Artificial Sequence
  ENSG00000197081_43 (sequence is synthesized)
tggttatgaggcttatgatgagagtgaggatgatgcctccgataccaaccctgatttctacatcaatatttgtcagccactaaatcccatgcacggagtgccctgtcctgccggagccgc

SEQ ID NO: 712901 - DNA, 120 bp, Artificial Sequence
  ENSG00000197081_44 (sequence is synthesized)
tgtgtgcaaagttcctattgatggtccccccatagatatcggccgggtagcaggaccaccaatactcaatccaatagcaaatgagatttacttgaattttgaaagcagtactccttgctt

SEQ ID NO: 712902 - DNA, 120 bp, Artificial Sequence
  ENSG00000197081_45 (sequence is synthesized)
agcggacaagcatttcaactacacctcgctcatcgcgtttcactgtaagagaggtgtgagcatgggaacgcctaagctgttaaggaccagcgagtgcgactttgtgttcgaatgggagac

SEQ ID NO: 712903 - DNA, 120 bp, Artificial Sequence
  ENSG00000197081_46 (sequence is synthesized)
tcctgtcgtctgtcctgatgaagtgaggatggatggctgtaccctgacagatgagcagctcctctacagcttcaacttgtccagcctttccacgagcacctttaaggtgactcgcgactc

SEQ ID NO: 712904 - DNA, 120 bp, Artificial Sequence
  ENSG00000197081_47 (sequence is synthesized)
gcgcacctacagcgttggggtgtgcacctttgcagtcgggccagaacaaggaggctgtaaggacggaggagtctgtctgctctcaggcaccaagggggcatcctttggacggctgcaatc

SEQ ID NO: 712905 - DNA, 120 bp, Artificial Sequence
  ENSG00000197081_48 (sequence is synthesized)
aatgaaactggattacaggcaccaggatgaagcggtcgttttaagttacgtgaatggtgatcgttgccctccagaaaccgatgacggcgtcccctgtgtcttccccttcatattcaatgg

SEQ ID NO: 712906 - DNA, 120 bp, Artificial Sequence
  ENSG00000197081_49 (sequence is synthesized)
gaagagctacgaggagtgcatcatagagagcagggcgaagctgtggtgtagcacaactgcggactacgacagagaccacgagtggggcttctgcagacactcaaacagctaccggacatc

SEQ ID NO: 712907 - DNA, 120 bp, Artificial Sequence
  ENSG00000197081_50 (sequence is synthesized)
cagcatcatatttaagtgtgatgaagatgaggacattgggaggccacaagtcttcagtgaagtgcgtgggtgtgatgtgacatttgagtggaaaacaaaagttgtctgccctccaaagaa

SEQ ID NO: 712908 - DNA, 120 bp, Artificial Sequence
  ENSG00000197081_51 (sequence is synthesized)
gttggagtgcaaattcgtccagaaacacaaaacctacgacctgcggctgctctcctctctcaccgggtcctggtccctcgtccacaacggagtctcgtactatataaatctgtgccagaa

SEQ ID NO: 712909 - DNA, 120 bp, Artificial Sequence
  ENSG00000197081_52 (sequence is synthesized)
aatatataaagggcccctgggctgctctgaaagggccagcatttgcagaaggaccacaactggtgacgtccaggtcctgggactcgttcacacgcagaagctgggtgtcataggtgacaa

SEQ ID NO: 712910 - DNA, 120 bp, Artificial Sequence
  ENSG00000197081_53 (sequence is synthesized)
agttgttgtcacgtactccaaaggttatccgtgtggtggaaataagaccgcatcctccgtgatagaattgacctgtacaaagacggtgggcagacctgcattcaagaggtttgatatcga

SEQ ID NO: 712911 - DNA, 120 bp, Artificial Sequence
  ENSG00000197081_54 (sequence is synthesized)
cagctgcacttactacttcagctgggactcccgggctgcctgcgccgtgaagcctcaggaggtgcagatggtgaatgggaccatcaccaaccctataaatggcaagagcttcagcctcgg

SEQ ID NO: 712912 - DNA, 120 bp, Artificial Sequence
  ENSG00000197081_55 (sequence is synthesized)
agatatttattttaagctgttcagagcctctggggacatgaggaccaatggggacaactacctgtatgagatccaactttcctccatcacaagctccagaaacccggcgtgctctggagc

SEQ ID NO: 712913 - DNA, 120 bp, Artificial Sequence
  ENSG00000197081_56 (sequence is synthesized)
caacatatgccaggtgaagcccaacgatcagcacttcagtcggaaagttggaacctctgacaagaccaagtactaccttcaagacggcgatctcgatgtcgtgtttgcctcttcctctaa

SEQ ID NO: 712914 - DNA, 120 bp, Artificial Sequence
  ENSG00000197081_57 (sequence is synthesized)
gtgcggaaaggataagaccaagtctgtttcttccaccatcttcttccactgtgaccctctggtggaggacgggatccccgagttcagtcacgagactgccgactgccagtacctcttctc

SEQ ID NO: 712915 - DNA, 120 bp, Artificial Sequence
  ENSG00000197081_58 (sequence is synthesized)
tacacctcagccgtgtgtcctctgggggtgggctttgacagcgagaatcccggggacgacgggcagatgcacaaggggctgtcagaacggagccaggcagtcggcgcggtgctcagcctg

SEQ ID NO: 712916 - DNA, 120 bp, Artificial Sequence
  ENSG00000197081_59 (sequence is synthesized)
ctgctggtggcgctcacctgctgcctgctggccctgttgctctacaagaaggagaggagggaaacagtgataagtaagctgaccacttgctgtaggagaagttccaacgtgtcctacaaa

SEQ ID NO: 712917 - DNA, 120 bp, Artificial Sequence
  ENSG00000197081_60 (sequence is synthesized)
tactcaaaggtgaataaggaagaagagacagatgagaatgaaacagagtggctgatggaagagatccagctgcctcctccacggcagggaaaggaagggcaggagaacggccatattacc

SEQ ID NO: 712918 - DNA, 120 bp, Artificial Sequence
  ENSG00000197081_61 (sequence is synthesized)
accaagtcagtgaaagccctcagctccctgcatggggatgaccaggacagtgaggatgaggttctgaccatcccagaggtgaaagttcactcgggcaggggagctggggcagagagctcc

SEQ ID NO: 712919 - DNA, 120 bp, Artificial Sequence
  ENSG00000197081_62 (sequence is synthesized)
cacccagtgagaaacgcacagagcaatgcccttcaggagcgtgaggacgatagggtggggctggtcaggggtgagaaggcgaggaaagggaagtccagctctgcacagcagaagacagtg

SEQ ID NO: 712920 - DNA, 120 bp, Artificial Sequence
  ENSG00000197081_63 (sequence is synthesized)
agctccaccaagctggtgtccttccatgacgacagcgacgaggacctcttacacatctgactccgcagtgcctgcaggggagcacggagccgcgggacagccaagcacctccaaccaaat

SEQ ID NO: 712921 - DNA, 120 bp, Artificial Sequence
  ENSG00000197081_64 (sequence is synthesized)
aagacttccactcgatgatgcttctataattttgcctttaacagaaactttcaaaagggaagagtttttgtgatgggggagagggtgaaggaggtcaggccccactccttcctgattgtt

SEQ ID NO: 712922 - DNA, 120 bp, Artificial Sequence
  ENSG00000197081_65 (sequence is synthesized)
tacagtcattggaataaggcatggctcagatcggccacagggcggtaccttgtgcccagggttttgccccaagtcctcatttaaaagcataaggccggacgcatctcaaaacagagggct

SEQ ID NO: 712923 - DNA, 120 bp, Artificial Sequence
  ENSG00000197081_66 (sequence is synthesized)
gcattcgaagaaacccttgctgctttagtcccgatagggtatttgaccccgatatattttagcattttaattctctccccctatttattgactttgacaattactcaggtttgagaaaaa

SEQ ID NO: 712924 - DNA, 120 bp, Artificial Sequence
  ENSG00000197081_67 (sequence is synthesized)
ggaaaaaaaaacagccaccgtttcttcctgccagcaggggtgtgatgtaccagtttgtccatcttgagatggtgaggctgtcagtgtatggggcagcttccggcgggatgttgaactggt

SEQ ID NO: 712925 - DNA, 120 bp, Artificial Sequence
  ENSG00000197081_68 (sequence is synthesized)
cattaatgtgtcccctgagttggagctcattctgtctcttttctcttttgctttctgtttcttaagggcacacacacgtgcgtgcgagcacacacacacatacgtgcacagggtccccga

SEQ ID NO: 712926 - DNA, 120 bp, Artificial Sequence
  ENSG00000197081_69 (sequence is synthesized)
gtgcctaggttttggagagtttgcctgttctatgcctttagtcaggaatggctgcacctttttgcatgatatcttcaagcctgggcgtacagagcacatttgtcagtatttttgccggct

SEQ ID NO: 712927 - DNA, 80 bp, Artificial Sequence
  ENSG00000197081_70 (sequence is synthesized)
agttgaggtgtcagagaaaatgaattttttccagatttggggtataggtctcatctcttcaggttctcatgataccacct

SEQ ID NO: 712928 - DNA, 120 bp, Artificial Sequence
  ENSG00000197081_71 (sequence is synthesized)
ggtataggtctcatctcttcaggttctcatgataccacctttactgtgcttatttttttaagaaaaaagtgttgatcaaccattcgacctataagaagccttaatttgcacagtgtgtga

SEQ ID NO: 712929 - DNA, 120 bp, Artificial Sequence
  ENSG00000197081_72 (sequence is synthesized)
cttacagaaactgcatgaaaaatcatgggccagagcctcggccctagcattgcacttggcctcatgctggagggaggctgggcgggtacagcgcggaggaggagggaggccaggcgggca

SEQ ID NO: 712930 - DNA, 120 bp, Artificial Sequence
  ENSG00000197081_73 (sequence is synthesized)
tggcgtggaggaggagggaggccgggcggtcacagcatggaggaggagggaggcgctgctggtgttcttattctggcggcagcgcctttcctgccatgtttagtgaatgacttttctcgc

SEQ ID NO: 712931 - DNA, 120 bp, Artificial Sequence
  ENSG00000197081_74 (sequence is synthesized)
attgtagaattgtatatagactctggtgttctattgctgagaagcaaaccgccctgcagcatccctcagcctgtaccggtttggctggcttgtttgatttcaacatgagtgtatttttta

SEQ ID NO: 712932 - DNA, 120 bp, Artificial Sequence
  ENSG00000197081_75 (sequence is synthesized)
aaattgatttttctcttcatttttttttcaatcaactttactgtaatataaagtattcaacaatttcaataaaagataaattattaattgggtgttaccattttttccttgatagtgaga

SEQ ID NO: 712933 - DNA, 120 bp, Artificial Sequence
  ENSG00000197081_76 (sequence is synthesized)
cgttcccgagcgagttacccatctgcctgcctgtcttttctttctgttaagtgactgaatttgggttttaactctggtgttctcgttgaccctttatgaggcagcactttcatttttctc

SEQ ID NO: 712934 - DNA, 120 bp, Artificial Sequence
  ENSG00000197081_77 (sequence is synthesized)
cagagtctcctggtcgtaggtgttaactttgggtccaatctgccttcccttggctctttctagatccgatttctttaccttctccaggccaacctcggggtgtggtcctgttcatcaaaa

SEQ ID NO: 712935 - DNA, 120 bp, Artificial Sequence
  ENSG00000197081_78 (sequence is synthesized)
caatgaacatggagtttagagtccagtgagtcaataaagcttttttttgtgcaacctgatctaacatggagatgttttctcttgagtaaactcactgagttttccatcttaaattactca

SEQ ID NO: 712936 - DNA, 120 bp, Artificial Sequence
  ENSG00000197081_79 (sequence is synthesized)
gcagtgactgagagctacctgcatggaagcaggaagttactccagtgttataaacaaacttcttagactcaacatcctattctccatccctttttttttcctgtagagtccaaaaacctc

SEQ ID NO: 712937 - DNA, 120 bp, Artificial Sequence
  ENSG00000197081_80 (sequence is synthesized)
aaccgtctcatttttaaattatccaattggagttacctttttaaaaaagttattcttaaggactttccaatacctctcctgaggaagacatgtcaggtcttctaaaagtttacattatga

SEQ ID NO: 712938 - DNA, 120 bp, Artificial Sequence
  ENSG00000197081_81 (sequence is synthesized)
ccaaagaaagatgctggtcctcaggcattctacccagggggctgttctccaggccattcccacctcctgctaagaccatggggagccctctctgtaaggaggggcatatgcagggacctg

SEQ ID NO: 712939 - DNA, 120 bp, Artificial Sequence
  ENSG00000197081_82 (sequence is synthesized)
cccatccccttggtaagctggatggcaaaaaggcatgttgtctgcaccactggctgcctgctaatgtcgctgtcagtggggaaggagaagtgacaacacgtttgagtgcatttgctttga

SEQ ID NO: 712940 - DNA, 120 bp, Artificial Sequence
  ENSG00000197081_83 (sequence is synthesized)
ctcttagaaacccaagcctctgaaaaaagagtaactacttgccagctgttgttacagatgatatttttaggaaaacatcccgtgacagcaaatcagaattggactctttttcagagaaat

SEQ ID NO: 712941 - DNA, 120 bp, Artificial Sequence
  ENSG00000197081_84 (sequence is synthesized)
gattttattgatggagtacaacctgggtatttagcttcctttcaacaaaattttttgtgcccctttcttgagactgtccatgaatgacagagacatagaataagaactggggtgctaaag

SEQ ID NO: 712942 - DNA, 120 bp, Artificial Sequence
  ENSG00000197081_85 (sequence is synthesized)
atggaataggcaaaccccacaccaaggaaatccacagtgaagtggaaatctggttcttatgaacattttaagagcatctgaagcctgtacttcaccaaccctaaaataatacgtaacacg

SEQ ID NO: 712943 - DNA, 120 bp, Artificial Sequence
  ENSG00000197081_86 (sequence is synthesized)
agatgattcctcaggaaggaacatatagacatacagacaggagacaacatatagacattagaacttacaggacaaagaactctttttccctgaatcatttgagatgaagtttcttcccat

SEQ ID NO: 712944 - DNA, 120 bp, Artificial Sequence
  ENSG00000197081_87 (sequence is synthesized)
caccaggcattcctacaaacaaggaccttcacacgactaagatgccacctggtgattaaagaacactttgggctggtccgatccattgtacaagttaaagcactgatgggtacacaggtc

SEQ ID NO: 712945 - DNA, 120 bp, Artificial Sequence
  ENSG00000197081_88 (sequence is synthesized)
ttacccctgttggcgatcgggtcacaaggagccagtgtgtgtgtcaccaggaggttgtatggacgagactggatttctggaaatatcctttactgactctgaagaatcccatggctcagg

SEQ ID NO: 712946 - DNA, 120 bp, Artificial Sequence
  ENSG00000197081_89 (sequence is synthesized)
gaggtacactcatgtcctttcttacttctccggttccactctgttgactagtagttggcctcttgagccatacttgctgtcagttctggacattgttctgtgagaatggggtcaacgggc

SEQ ID NO: 712947 - DNA, 120 bp, Artificial Sequence
  ENSG00000197081_90 (sequence is synthesized)
agtcgtggtgcaggtgagcttgtgtgcaaggcggcaagatagccacattgagttggggacagtatggcctgggggtgttggataggtaaggcagaagcaagcccagaacttggagcctgt

SEQ ID NO: 712948 - DNA, 120 bp, Artificial Sequence
  ENSG00000197081_91 (sequence is synthesized)
tgtgactgtcacagtaaggagtttgaagtcctgaaagcagttgagagctgtaggagggccagattgggcttttgagcaagatagtctagatgaaagtaaagagatggagacgcttcagca

SEQ ID NO: 712949 - DNA, 120 bp, Artificial Sequence
  ENSG00000197081_92 (sequence is synthesized)
accagatgggaggttgggcatgggagctgtggctgtgctgagctgagaagcctcagactgcctgcgaggctctctctgggaggaagtcaggtctttctttccttcgtttccttcctttca

SEQ ID NO: 712950 - DNA, 120 bp, Artificial Sequence
  ENSG00000197081_93 (sequence is synthesized)
cgtttccttcctttcattcctttcctttccttcctttttcctctttctttctttccttttctctctctctctttttctttctctctttctttcgagatggagtctcgctctgttgccagg

SEQ ID NO: 712951 - DNA, 120 bp, Artificial Sequence
  ENSG00000197081_94 (sequence is synthesized)
ctttttcttaaagagggacagactgaaggtaggctgtgaatggtcagttatttgtatttctttaccttttatgctatcttgtagtttgaccagtttgcaaaacaaattgaataaaaagta

SEQ ID NO: 712952 - DNA, 120 bp, Artificial Sequence
  ENSG00000197081_95 (sequence is synthesized)
attgataatgttgttttgatgctcagtgtttgagggaaacacaatctagtgaatggggttattggttgtcacacctgggagagtgaaaatgaggggctcacaacccaggtgaggtcatct

SEQ ID NO: 712953 - DNA, 120 bp, Artificial Sequence
  ENSG00000197081_96 (sequence is synthesized)
ggtgccactcagccccatcccagagaaagcagccttgggatgctggcctcggtgacaaccaagaagtgatggtgggttgctagagacagggtggagcacagagccctggaaggaagcagg

SEQ ID NO: 712954 - DNA, 120 bp, Artificial Sequence
  ENSG00000197081_97 (sequence is synthesized)
aagtcaggttcaagaaaggacttgtgacctcacccttggcttcagggttttatttttctttcttttaaaacattttgagacaacatgtagacattcaaacttacagaacaaagaactatt

SEQ ID NO: 712955 - DNA, 120 bp, Artificial Sequence
  ENSG00000197081_98 (sequence is synthesized)
ttttccctgaatcatttgagactaagttccctcctatcaccagacatttctacaaatgaggaccttcacaggactaaggtgccaccatcagaaccacaatatgtggggacggtactgcca

SEQ ID NO: 712956 - DNA, 120 bp, Artificial Sequence
  ENSG00000197081_99 (sequence is synthesized)
gctaagccttagtgctgtttcggtgttgacagctgtcacaatgatgcccttttcagtagaggagcctgtgatggtcacgtgttgcaggtgatcattgtgccatttggtttacttctgtct

SEQ ID NO: 712957 - DNA, 120 bp, Artificial Sequence
  ENSG00000197081_100 (sequence is synthesized)
ggaaagtttctcctttctgtaacctccatgaccttgacacatgaggtcactcttctcacccgccccacctctgggagggtgcctgatttgccctgccccacccagcggctttaggactca

SEQ ID NO: 712958 - DNA, 120 bp, Artificial Sequence
  ENSG00000197081_101 (sequence is synthesized)
gctcttcaggaacaattagggagagggcccttgggtctaactgcaaaatcatacttgaactagaaaatcccgttggcataggtatggattgtcatatagaaacatttttcgcagtgtgcc

SEQ ID NO: 712959 - DNA, 120 bp, Artificial Sequence
  ENSG00000197081_102 (sequence is synthesized)
ccgtggaacacttgttctgtatgttgttaacagatgttttgcaaaaaatgaaaaggacctgagctctaataagtttgggaaatgctgaattgaagtgaaacagcttttcttggtgtgaga

SEQ ID NO: 712960 - DNA, 120 bp, Artificial Sequence
  ENSG00000197081_103 (sequence is synthesized)
cctttcagagtctttaaaggagagttgctgaccacacgtgaaatcacaatagaaaatggccagcaggcctccaggtaggcagcaattcctagacatttgcctgtgttccctgggggagct

SEQ ID NO: 712961 - DNA, 120 bp, Artificial Sequence
  ENSG00000197081_104 (sequence is synthesized)
ggtggcctgtgaccatccactgggaaattcccttctgtggcgaggttctgttgttttccagaggctcccacggagcatgctgggtgggtggtctgtatgagaccacaccgttgatgagca

SEQ ID NO: 712962 - DNA, 120 bp, Artificial Sequence
  ENSG00000197081_105 (sequence is synthesized)
gtgaggcccaaacaggtatatcaaaaaatgctcagcatcgctgatcatcagggaaatgcacatcataaacacagtgagacgttgcctcacacctgccagaatggctactgtcagacgaaa

SEQ ID NO: 712963 - DNA, 120 bp, Artificial Sequence
  ENSG00000197081_106 (sequence is synthesized)
gacaacaagtgtgggtgaggatgtggagaaaagcgaacacttgtccacctttggtgagaatgtaaattggtatagccattatggaaaacaggaagttcctgaaaaaattaagaacagcta

SEQ ID NO: 712964 - DNA, 120 bp, Artificial Sequence
  ENSG00000197081_107 (sequence is synthesized)
ccaggaatcccacatctgggtgtatatccaaaagaaatgaagtcagtaccttgaagagatctctgcagcccctgttcattgcagcattattcacaatagccaagatagggaaaaagcctc

SEQ ID NO: 712965 - DNA, 120 bp, Artificial Sequence
  ENSG00000197081_108 (sequence is synthesized)
cctcagtgtctactgacaaataaagatggatcaagaaaatgcatgtatgtatacacacacacagtggaataccaagtcttgcagaagaaggaaatcctgtcatttgtgacaacatggatg

SEQ ID NO: 712966 - DNA, 120 bp, Artificial Sequence
  ENSG00000197081_109 (sequence is synthesized)
gaaataagccagacacagaaagaaaaataccagatgatctcacttatatgtggaatctaaaaaggttggactcagaagcagagagtggaatggtggttaccaaaggccagagggtgcagg

SEQ ID NO: 712967 - DNA, 120 bp, Artificial Sequence
  ENSG00000197081_110 (sequence is synthesized)
caaaggccagagggtgcaggaagtgagcagatgttggtgaaagggtgcagaggttcagctatgcaacatgaatgaattctggagatccactgtgcagcatggtgactatgatactgcttt

SEQ ID NO: 712968 - DNA, 120 bp, Artificial Sequence
  ENSG00000197081_111 (sequence is synthesized)
gtgtatttaaaattttcagagagtagatcttgtgttctttcccctctccaaataaaaggaaattatttgaggtgatggatatgtttaactagcttgactggggcaatgattttgtaatga

SEQ ID NO: 712969 - DNA, 120 bp, Artificial Sequence
  ENSG00000197081_112 (sequence is synthesized)
taagtatctcaaaacatcatgttgtacaacataagtatacaattgacccttgaacaatacaggtttgaactctgtgggtccacttacatgcggttttttttttctgtaaaagttacaccc

SEQ ID NO: 712970 - DNA, 120 bp, Artificial Sequence
  ENSG00000197081_113 (sequence is synthesized)
gatgcgtcagccccttcttctacctcttccacctctggcacccttggcacagcaagaccaaccccccacttcctcctcctcctcctcagcctactcagggtaaagacaaggatgaagacc

SEQ ID NO: 712971 - DNA, 78 bp, Artificial Sequence
  ENSG00000197081_114 (sequence is synthesized)
cctcctcagcctactcagggtaaaatataataaatatattttctcctcatgattttcttaaaactttttctgtatttt

SEQ ID NO: 712972 - DNA, 120 bp, Artificial Sequence
  ENSG00000197081_115 (sequence is synthesized)
gaaacagcaaaatgtagaaacctaacaacctgtctttgagcttttcataagtgtggaaaatctgcattaagctgcatgaaacattttttattttgcttctttcacattgttcctgatagg

SEQ ID NO: 712973 - DNA, 120 bp, Artificial Sequence
  ENSG00000197081_116 (sequence is synthesized)
gtgcttgtgtgtgtgcacaggcgtgttcttggaagtgaacactgaatggaggagtcagatgccctcctttggactggccagctctagcccccagactgggttttttctgttggagtaaca

SEQ ID NO: 712974 - DNA, 120 bp, Artificial Sequence
  ENSG00000197081_117 (sequence is synthesized)
ctttccccacccccactgccccagtggacacacacacatcctgtttgtgttttcctcggttttctctgtttgttttgggaatgggcccagcaatgagcttgttgggaaagttttcatctt

SEQ ID NO: 712975 - DNA, 120 bp, Artificial Sequence
  ENSG00000197081_118 (sequence is synthesized)
gaattttggtgcacactaaactacagcaaggacagattcggcaggggcgggatggcttgtcaattttgattgagtgacctcttcttttatgtaatgagtatcaagataatcctttttgca

SEQ ID NO: 712976 - DNA, 120 bp, Artificial Sequence
  ENSG00000197081_119 (sequence is synthesized)
aagtggtgaccctatggtagagtttggatctggggattgcagaatgtcactgggtgcattgaagctgaaggcgtgcatttctctgagtaatgagaagcacccttgagtcaccaaggcact

SEQ ID NO: 712977 - DNA, 120 bp, Artificial Sequence
  ENSG00000197081_120 (sequence is synthesized)
ggcatatcaaaaagcggtgccgctgtccatatcttgacgattgtagacacagttgtagctgtagagagatgatgggattccgtcatcatcagagacctgccccatctgttgacccccagg

SEQ ID NO: 712978 - DNA, 120 bp, Artificial Sequence
  ENSG00000197081_121 (sequence is synthesized)
ctgtgactccaggcaccctgcagggcatcccaccactgctcagagcaattctagggcccattctggtttccagcctaagtgctgccccacccagagggtctttctggcccttgcttccgt

SEQ ID NO: 712979 - DNA, 120 bp, Artificial Sequence
  ENSG00000197081_122 (sequence is synthesized)
ctcgaagcctccggagatcaggtctgcgttgggagagacaggcacccctgccctggtagcaccgcacccctgcgaacgtcctagcaagcaggcaaagaaccagcccagggtcttgccact

SEQ ID NO: 712980 - DNA, 120 bp, Artificial Sequence
  ENSG00000197081_123 (sequence is synthesized)
gggaaggctttcaagcccaaaatgccccagtaactgctgttgtggcacctgcccctgggatgcccttgttcacaggtctgccattgctgtccttgttctctacatggccccttttgttac

SEQ ID NO: 712981 - DNA, 120 bp, Artificial Sequence
  ENSG00000197081_124 (sequence is synthesized)
tttcacaatacacacattttttaagtacctatttgcttaggccctatgaggctggagggtgttgtgaggatagatggctctctaggtgttcacagactagcagcagagagagataaggag

SEQ ID NO: 712982 - DNA, 120 bp, Artificial Sequence
  ENSG00000197081_125 (sequence is synthesized)
catgatgatggaggttcagggcagtgctgctagagtagagcgagtgcttagtgttgtcgctccgctgctttaccaggagggaggcaccgaggtcagctggctggggtctgggctgggtgc

SEQ ID NO: 712983 - DNA, 120 bp, Artificial Sequence
  ENSG00000197081_126 (sequence is synthesized)
aggggtcaggcagttcagagaggaggaagtgctgcctgagccacactacattgaggagcatgccagtcccgtgttggggtggctttagggcctgggcctccagacattcaaaggcatgga

SEQ ID NO: 712984 - DNA, 120 bp, Artificial Sequence
  ENSG00000197081_127 (sequence is synthesized)
ccaggggaactgcgagcaggttagaggcgtgtatggggaatgtggctgaagatgaccctggaacggtgagtgtgcagtattgtaagaaacttgtatgtcctgcagaggagctggattata

SEQ ID NO: 712985 - DNA, 120 bp, Artificial Sequence
  ENSG00000197081_128 (sequence is synthesized)
tctggaaatctgtgaagtcccaaggattttcagcaggggtatgacatacatctgactcgtgaatgagaaaatcagtgtggcctctggatggacctcgcatctggtctgagcactccctgc

SEQ ID NO: 712986 - DNA, 120 bp, Artificial Sequence
  ENSG00000197081_129 (sequence is synthesized)
acccctcagcttctccatcattctctcatcgccctcacctcctagcctacctacgctactagcctccttagccatgtctgcaccctgaatcacgtctctcctacttggtgtccccagtcc

SEQ ID NO: 712987 - DNA, 120 bp, Artificial Sequence
  ENSG00000197081_130 (sequence is synthesized)
ccagggatgcagcctgtatcttccccatgtgcccagcccctctgatgcctgaccttggttctggctcccaggtcaccccaactggctctcctggactccggctggctcaggctgctctgc

SEQ ID NO: 712988 - DNA, 120 bp, Artificial Sequence
  ENSG00000197081_131 (sequence is synthesized)
tgtggtctgaatctccctgcaactttgtgatgacctcctttggcctgttctgttcagggctttttattaatgacttggccgagatctttgagagtgtgctgatctcatttggggatgctg

SEQ ID NO: 712989 - DNA, 120 bp, Artificial Sequence
  ENSG00000197081_132 (sequence is synthesized)
ggaagacagaatcattatccaaaaagatcgaaatggacgagcaggatatgagaagggcattatatcgtttcagacttacagggaagaggtgtggacatcgatgagctgccaaccaaacaa

SEQ ID NO: 712990 - DNA, 120 bp, Artificial Sequence
  ENSG00000197081_133 (sequence is synthesized)
tcatgggcaggttttggctgagtcttaggagctcagggccagagccgctgattgtgctgtattgggcggggctgctccaggcagggaagacctccagatacagtgctgagacactgttac

SEQ ID NO: 712991 - DNA, 120 bp, Artificial Sequence
  ENSG00000197081_134 (sequence is synthesized)
gggcgtggatttgtcccacccgaggtgttcaagcagcctggctgggaccctcgagcagctgggacctgcatctggacctgggatgtgcttggattatattcaagttttcccggccacatt

SEQ ID NO: 712992 - DNA, 120 bp, Artificial Sequence
  ENSG00000197081_135 (sequence is synthesized)
gcatctggtgccagggagagcttggccaacagagggtgcatgtgagctgctgtttgtgaacagaactgattccttccagacgctgagtttggaaaaggggtgactcagaaattgccaaag

SEQ ID NO: 712993 - DNA, 120 bp, Artificial Sequence
  ENSG00000197081_136 (sequence is synthesized)
gatttatgaatgtatgagtctgagaagcttaaacaaaaatctaaaaatctaggagcaaattttccaggttttgaatgttgcacggtttacaaattttaaaaaatttatattgaatgcttg

SEQ ID NO: 712994 - DNA, 120 bp, Artificial Sequence
  ENSG00000197081_137 (sequence is synthesized)
cctgctttgtcacattactgatgtgtgcaccacagtcatcttccctgtccattgtggtgatgaaaagaagtgagtaaaataaccaccctcgctccgagctgccgtcagtgttgagtcggg

SEQ ID NO: 712995 - DNA, 120 bp, Artificial Sequence
  ENSG00000197081_138 (sequence is synthesized)
aaattctgcctaggcctgcgcagcccggggagtgggggcctcgggacccaactgaagtctcgcagcaccttgactgaaagccagtgagctgcttcaagggctccgcagtgttcattgttt

SEQ ID NO: 712996 - DNA, 120 bp, Artificial Sequence
  ENSG00000197081_139 (sequence is synthesized)
taatccgtggcttcccacaaagttccacatttaacttcctccaaggaaggggattaaaattttcaactaactcccttcagttgaaatctcggaccacttttaaaacaaaaaccttggtct

SEQ ID NO: 712997 - DNA, 120 bp, Artificial Sequence
  ENSG00000197081_140 (sequence is synthesized)
aattctttactttgttatgaatttcttgacagtggattgagcgatacgtgtcagaactaagcatttcactgtaggcaaattgtgtcttagttatcaagtaaatgtacaaaaaaactaaaa

SEQ ID NO: 712998 - DNA, 120 bp, Artificial Sequence
  ENSG00000197081_141 (sequence is synthesized)
ttcctacactatcctcccacctttgggtgctgagacgccttcctgcagcgccgtctctggaagcttgaagtcactttcctgtgtcccagcatttctctacaaataaattgttcttagtga

SEQ ID NO: 712999 - DNA, 120 bp, Artificial Sequence
  ENSG00000197084_0 (sequence is synthesized)
atgtcctgccagcagagccagcagcagtgccagccccctcccaagtgcacccccaagtgccctcccaagtgccccaccccaaagtgtcccccaaagtgtccccctaagtgccctcctgtc

SEQ ID NO: 713000 - DNA, 120 bp, Artificial Sequence
  ENSG00000197084_1 (sequence is synthesized)
tcttcctgctgcagtgtcagctccggaggctgctgtggctccagctctgggggcagctgtggctccagctctgggggatgctgcagttctgggggaggtggctgctgcctgagccaccac

SEQ ID NO: 713001 - DNA, 120 bp, Artificial Sequence
  ENSG00000197084_2 (sequence is synthesized)
ctgcagccagccctcggggggctccagctgctgtggcggggggagtggccagcactctggaggctgctgctgaagtggaccctgagcctagaagagcagaatccaggaccgcaaactgcc

SEQ ID NO: 713002 - DNA, 120 bp, Artificial Sequence
  ENSG00000197084_3 (sequence is synthesized)
aaggacatcccccttctcctactaggcctgcctgagaggctcacaggtccaagggaaagctctgaacttgccaagagcatatcttttccctggagtccagaaactcagatcctctcctgg

SEQ ID NO: 713003 - DNA, 120 bp, Artificial Sequence
  ENSG00000197084_4 (sequence is synthesized)
atctccattcactggccttggacctcacctttgtggctaccctcccacgctctgtctaagcccctagcttactcaatgtcatttgcagcgtgcatctgctgattaaaggactaaaacaag

SEQ ID NO: 713004 - DNA, 120 bp, Artificial Sequence
  ENSG00000197084_5 (sequence is synthesized)
atgtcagctccggaggctgctgtggctccagctctgggggcagctgtggctccagctctgggggatgctgcagttctgggggaggtggctgctgcctgagccaccacaggcgccgtaggt

SEQ ID NO: 713005 - DNA, 120 bp, Artificial Sequence
  ENSG00000197093_0 (sequence is synthesized)
aagagtcgggcggtggctgggatgggcgggagggcccggcccgatttcccttgctgctccccttgtggcctgacgctgacagaggcaaaaatctgctaactcagggggcagactcaacca

SEQ ID NO: 713006 - DNA, 120 bp, Artificial Sequence
  ENSG00000197093_1 (sequence is synthesized)
agactgtgagcaggcctggggaatgaccccccgatctccaaccagtgccttccgcagctgcacggctgtctccagctgtctctgcccctcttcctggccctggctccatctctctgtcac

SEQ ID NO: 713007 - DNA, 120 bp, Artificial Sequence
  ENSG00000197093_2 (sequence is synthesized)
ctcacccttccctgtgccacatgggccctctctctcctgccaggacgctgcggctctggggacctcggagcctgggggtggctctgggagtcttcatgaccattggctttgcactccagc

SEQ ID NO: 713008 - DNA, 120 bp, Artificial Sequence
  ENSG00000197093_3 (sequence is synthesized)
tcttgggagggcccttccagaggaggctacctgggctacagctccgacagccctcggccccatccctacgaccagcccttccgtcctgcccaccccggcagcgactggtgttcctgaaga

SEQ ID NO: 713009 - DNA, 120 bp, Artificial Sequence
  ENSG00000197093_4 (sequence is synthesized)
cacataaatccgggagcagctctgtgctgagcctgcttcaccgctatggggaccagcacgggctgcgcttcgccctccctgcccgctaccagtttggctacccaaagctcttccaggcct

SEQ ID NO: 713010 - DNA, 120 bp, Artificial Sequence
  ENSG00000197093_5 (sequence is synthesized)
ctagggtaaaaggctaccgcccacagggtggaggcacccagctccccttccacatcctctgtcaccacatgaggttcaacctgaaagaggtacttcaggtcatgccttctgacagcttct

SEQ ID NO: 713011 - DNA, 120 bp, Artificial Sequence
  ENSG00000197093_6 (sequence is synthesized)
ttttttccattgtccgagacccagcggctctggctcgctctgccttctcctactataaatccacctcatcagccttccgcaagtcaccatctttggctgccttcctggccaatcctcgag

SEQ ID NO: 713012 - DNA, 120 bp, Artificial Sequence
  ENSG00000197093_7 (sequence is synthesized)
gcttctacaggcctggggcccgtggggaccactacgctcgcaacttactatggtttgactttggcctgccctttcccccagagaagagggccaagagagggaatattcatccccccagag

SEQ ID NO: 713013 - DNA, 120 bp, Artificial Sequence
  ENSG00000197093_8 (sequence is synthesized)
accccaaccccccacagctgcaggtcttgccttctggtgctggccctcgagcccaaaccctcaatcccaatgccctcatccatcctgtttccactgttactgatcatcgcagccagatat

SEQ ID NO: 713014 - DNA, 120 bp, Artificial Sequence
  ENSG00000197093_9 (sequence is synthesized)
caagccctgcctctttcgatttggggtcttcatccttcatccagtggggtctggcatggctggactctgtctttgacctggtcatggtggctgagtacttcgatgagtcattggttctgc

SEQ ID NO: 713015 - DNA, 120 bp, Artificial Sequence
  ENSG00000197093_10 (sequence is synthesized)
gatgccctgtgctggggtctagatgacgtggtgggcttcatgcacaatgcccaggctggacataagcagggcctcagcactgtcagcaacagtggactgactgcggaggaccggcagctg

SEQ ID NO: 713016 - DNA, 120 bp, Artificial Sequence
  ENSG00000197093_11 (sequence is synthesized)
actgcacgggcccgagcctggaacaacctggactgggctctctatgtccacttcaaccgcagtctctgggcacggatagagaaatacggccagggccggctgcagacagctgtggccgag

SEQ ID NO: 713017 - DNA, 120 bp, Artificial Sequence
  ENSG00000197093_12 (sequence is synthesized)
ctccgggctcgccgagaggccctagcgaaacattgtctggtagggggtgaggcttctgaccccaaatacatcactgatcgccggttccgccccttccagtttgggtcagctaaggttttg

SEQ ID NO: 713018 - DNA, 120 bp, Artificial Sequence
  ENSG00000197093_13 (sequence is synthesized)
ggctatatacttcggagtggattgagcccccaagaccaagaggaatgtgagcgcctagctacccctgagctccagtacaaggacaagctggatgccaagcagttcccccctaccgtctca

SEQ ID NO: 713019 - DNA, 120 bp, Artificial Sequence
  ENSG00000197093_14 (sequence is synthesized)
ctgcccctcaagacttcaaggccactctccccataaacatcagactacagatttaggtggaagagcagccatgtttgaagggcacatgtgatgagtggggggcagcaagatgccatttct

SEQ ID NO: 713020 - DNA, 120 bp, Artificial Sequence
  ENSG00000197093_15 (sequence is synthesized)
gcatctcccagaagggatgagtctttgtcccgatgcaagccccctcttcgctgggctcccagcagtgcttccctcctccaccctccactcattttgttctttccccccaacttttttttt

SEQ ID NO: 713021 - DNA, 120 bp, Artificial Sequence
  ENSG00000197093_16 (sequence is synthesized)
ctcagcctccagagtagctaggattacagatacgtgccaccatacccggctaatttttatatttttagagacagggattcaacatgttggttaggctggtcttgaactcctcacctcagg

SEQ ID NO: 713022 - DNA, 120 bp, Artificial Sequence
  ENSG00000197093_17 (sequence is synthesized)
cccaaagtgctgccattacaggcgtgagccactaggcctgacctccccttcccctttcctgccccaaggcagatccacatcaccgaagctccctagaggggcaaaagatggagtgagcca

SEQ ID NO: 713023 - DNA, 120 bp, Artificial Sequence
  ENSG00000197093_18 (sequence is synthesized)
caggaagtttggggcgtggtgagttggaatgatacgtccatttctctatgaaatatttgctactagactgttcatttctctctgacatgtttgttgaatgaataaataatttgaaacttc

SEQ ID NO: 713024 - DNA, 83 bp, Artificial Sequence
  ENSG00000197093_19 (sequence is synthesized)
ctgcagttagtgtttgcgcctttctccttatctttgtgtcatagtctctctgtccctctgtctctctctctctgctctctttc

SEQ ID NO: 713025 - DNA, 120 bp, Artificial Sequence
  ENSG00000197093_20 (sequence is synthesized)
tgtctccctctccagccccaccctttcagtctcctccgggtgcactgataaggttggaaagtggaatggtgggtaagtccagggatctgggctttataagtagccacacgtctcccccag

SEQ ID NO: 713026 - DNA, 120 bp, Artificial Sequence
  ENSG00000197093_21 (sequence is synthesized)
cccctgtcatacatgggggtctgccccgtgctgagacagagaaaaaagaggcgcgggaatttataacccaatggctcttacccattgcaatgccactcctggaagtccaacctcccttcc

SEQ ID NO: 713027 - DNA, 120 bp, Artificial Sequence
  ENSG00000197093_22 (sequence is synthesized)
tcctgcctgggttcatacacctgtgtcctgtctgatcctcattcccactgtatggcttcccttcctggtcctgggatagggctctttatccccatctgtgacagccagaggggctctgga

SEQ ID NO: 713028 - DNA, 120 bp, Artificial Sequence
  ENSG00000197093_23 (sequence is synthesized)
ggaaaccaggttcccgaccatggtctgacctgactgtgttaatgagctgattgatctgatctctctctctcttgctggctgtttcattcacgagctggggctttttctctccttccctta

SEQ ID NO: 713029 - DNA, 120 bp, Artificial Sequence
  ENSG00000197093_24 (sequence is synthesized)
taaatccccaaggctcagggacaactgtaggtggggagcgggaggaactggagataagaaagtgatagagcagagacagtagttgtggggccacctaggagagtctgggtatagacaaca

SEQ ID NO: 713030 - DNA, 120 bp, Artificial Sequence
  ENSG00000197093_25 (sequence is synthesized)
tccccagccactccccttccctgaaggaggtctcagctgcagcaggagagaaggctgcctctgcctctctccttagacttcccttcttcccccctcatttcccttctagacgctgacaga

SEQ ID NO: 713031 - DNA, 120 bp, Artificial Sequence
  ENSG00000197102_0 (sequence is synthesized)
agtctgcggtgggctagcggacggtccggcttccggcggccgtttctgtctcttgctggctgtctcgctgagtcgcggccgccttctcatcgctcctggaaggtcccgagcgcgacacca

SEQ ID NO: 713032 - DNA, 120 bp, Artificial Sequence
  ENSG00000197102_1 (sequence is synthesized)
tgtcggagcccgggggcggcggcggcgaggacggctcggccggattggaagtgtcggccgtgcagaatgtggcggacgtgtcggtgctgcagaagcacctgcgcaagctggtgccgctgc

SEQ ID NO: 713033 - DNA, 120 bp, Artificial Sequence
  ENSG00000197102_2 (sequence is synthesized)
tgctggaggacggcggcgaggcgccggccgcgctggaggcggcgctggaggagaagagcgccctggagcagatgcgcaagttcctttcggacccgcaggtccacacggtgctggtggagc

SEQ ID NO: 713034 - DNA, 120 bp, Artificial Sequence
  ENSG00000197102_3 (sequence is synthesized)
gctccacgctcaaagaggacgtcggtgatgaaggagaagaagaaaaagaattcatttcctataacatcaacatagacattcattatggggttaaatccaatagcttggcattcattaaac

SEQ ID NO: 713035 - DNA, 120 bp, Artificial Sequence
  ENSG00000197102_4 (sequence is synthesized)
gtactcccgtgattgatgcagataaacccgtgtcttctcagctccgggtccttacactcagtgaagactcgccctacgaaactttgcattctttcattagcaatgcagtggctccttttt

SEQ ID NO: 713036 - DNA, 120 bp, Artificial Sequence
  ENSG00000197102_5 (sequence is synthesized)
ttaagtcctacattagagagtctggcaaggcagacagggatggtgataaaatggctccttcagttgaaaagaagattgcagaactcgaaatgggactccttcacttgcagcaaaatattg

SEQ ID NO: 713037 - DNA, 120 bp, Artificial Sequence
  ENSG00000197102_6 (sequence is synthesized)
aaattccggagatcagcctgccgattcatccaatgatcacaaatgttgcaaaacagtgttatgagcgtggagaaaagccaaaagttacagactttggtgataaggttgaagacccaacat

SEQ ID NO: 713038 - DNA, 120 bp, Artificial Sequence
  ENSG00000197102_7 (sequence is synthesized)
ttcttaatcagttacaatctggagttaaccgctggatccgagaaattcaaaaagtgaccaaactggatcgagatcctgcatcaggaactgccttacaggaaattagtttttggctaaact

SEQ ID NO: 713039 - DNA, 120 bp, Artificial Sequence
  ENSG00000197102_8 (sequence is synthesized)
tggaacgtgcgttataccgcatccaggagaaacgggagagcccggaagttctcctgactctggatatcttgaaacatggcaagcgcttccatgccaccgtcagttttgacactgacacag

SEQ ID NO: 713040 - DNA, 120 bp, Artificial Sequence
  ENSG00000197102_9 (sequence is synthesized)
gtctaaaacaggctttggaaactgtgaatgactacaatcctctgatgaaagatttccctctgaatgatttgctgtctgccacggagctggacaaaataagacaggcgcttgttgccattt

SEQ ID NO: 713041 - DNA, 120 bp, Artificial Sequence
  ENSG00000197102_10 (sequence is synthesized)
tcacacatttgagaaagatccgaaacacaaaatatcctattcagagggcactgcgtttggtggaggcaatttcaagagacttgagttctcaattactcaaagtattgggcactaggaaat

SEQ ID NO: 713042 - DNA, 120 bp, Artificial Sequence
  ENSG00000197102_11 (sequence is synthesized)
tgatgcatgttgcttatgaagaatttgaaaaagttatggtagcatgctttgaagtttttcagacttgggatgatgagtatgagaaacttcaggtattgttgagagacatcgtcaaaagaa

SEQ ID NO: 713043 - DNA, 120 bp, Artificial Sequence
  ENSG00000197102_12 (sequence is synthesized)
aaagggaagaaaatctgaagatggtgtggcgtatcaaccctgcccacaggaagctgcaggcccgccttgaccagatgagaaaatttagacgccagcatgaacagctaagagctgttatcg

SEQ ID NO: 713044 - DNA, 120 bp, Artificial Sequence
  ENSG00000197102_13 (sequence is synthesized)
tcagggtcctgaggccacaggtcacggcagttgcacaacagaatcaaggagaggtccctgaaccccaagatatgaaagtggctgaggttctctttgatgctgcagatgcaaatgccattg

SEQ ID NO: 713045 - DNA, 120 bp, Artificial Sequence
  ENSG00000197102_14 (sequence is synthesized)
aggaagtaaaccttgcttatgagaacgtcaaggaagtggatggactggatgtttccaaagagggcacggaagcctgggaggctgctatgaagaggtacgatgagaggatcgacagagtgg

SEQ ID NO: 713046 - DNA, 120 bp, Artificial Sequence
  ENSG00000197102_15 (sequence is synthesized)
agacccggatcaccgctcgccttcgggatcagcttggcacagccaagaatgccaacgagatgtttaggattttctccaggtttaatgcactgtttgtcaggcctcacatccgtggggcca

SEQ ID NO: 713047 - DNA, 120 bp, Artificial Sequence
  ENSG00000197102_16 (sequence is synthesized)
ttcgcgaataccagacccagctgatccagcgcgtgaaagatgacattgagtctcttcacgacaagttcaaggtccagtacccacagagtcaggcttgtaagatgagtcacgttcgtgact

SEQ ID NO: 713048 - DNA, 120 bp, Artificial Sequence
  ENSG00000197102_17 (sequence is synthesized)
tgccccctgtgtcagggtctatcatctgggctaaacagatcgacaggcagctgacggcctacatgaagcgggtggaagatgtccttggcaagggctgggagaatcacgtggaggggcaga

SEQ ID NO: 713049 - DNA, 120 bp, Artificial Sequence
  ENSG00000197102_18 (sequence is synthesized)
agctgaagcaggatggagacagcttccgcatgaagctcaacacgcaggagatctttgatgactgggcaaggaaggtgcagcagcgcaacctcggtgtctcggggcgcattttcaccatcg

SEQ ID NO: 713050 - DNA, 120 bp, Artificial Sequence
  ENSG00000197102_19 (sequence is synthesized)
aaagtactcgggttcggggccgaactggaaatgtgcttaagctgaaagttaactttcttcctgagattatcacactatccaaagaagtccggaacctcaaatggcttggtttccgcgtcc

SEQ ID NO: 713051 - DNA, 120 bp, Artificial Sequence
  ENSG00000197102_20 (sequence is synthesized)
cactggcgattgtgaacaaagcccatcaagcaaaccagctttacccgtttgccatctcactgatcgagagcgttcgtacctatgaacggacctgcgagaaggtggaggagcggaacacca

SEQ ID NO: 713052 - DNA, 120 bp, Artificial Sequence
  ENSG00000197102_21 (sequence is synthesized)
tttcccttttggtggctggcttgaaaaaggaagtgcaggccctgatcgcagaaggcattgcgttggtgtgggagtcctacaaacttgacccatatgtacagcgcttagcagagactgtct

SEQ ID NO: 713053 - DNA, 120 bp, Artificial Sequence
  ENSG00000197102_22 (sequence is synthesized)
tcaacttccaagaaaaggtggatgatctgctgatcattgaagaaaaaatagacctagaagtccgttccttggaaacttgtatgtatgaccataagacattctcggaaatcttgaacagag

SEQ ID NO: 713054 - DNA, 120 bp, Artificial Sequence
  ENSG00000197102_23 (sequence is synthesized)
tccagaaagcagtggatgacttaaatctgcactcctattccaatttgcccatctgggtcaacaagcttgacatggagattgaaagaatattgggcgtccgtctgcaagctggcctgagag

SEQ ID NO: 713055 - DNA, 120 bp, Artificial Sequence
  ENSG00000197102_24 (sequence is synthesized)
cttggacgcaggttcttcttggacaagctgaagataaagcagaagttgacatggacacagatgctccacaagttagtcacaagcctggtggagagccaaagatcaaaaatgtcgttcatg

SEQ ID NO: 713056 - DNA, 120 bp, Artificial Sequence
  ENSG00000197102_25 (sequence is synthesized)
agctaagaataaccaatcaggtaatctacttgaatccaccaattgaagagtgcagatacaagctgtatcaggaaatgtttgcctggaagatggttgtactgtctctccccaggatccaga

SEQ ID NO: 713057 - DNA, 120 bp, Artificial Sequence
  ENSG00000197102_26 (sequence is synthesized)
gtcagaggtaccaggtgggtgtacattacgaattgactgaggaagagaaattctatcggaatgctttaacacggatgcctgatggccctgttgccctggaagagtcgtattctgctgtca

SEQ ID NO: 713058 - DNA, 120 bp, Artificial Sequence
  ENSG00000197102_27 (sequence is synthesized)
tgggcattgtatctgaagttgaacagtatgtcaaggtttggcttcagtatcagtgtttatgggatatgcaagctgaaaacatctataacagacttggagaagatctcaacaaatggcagg

SEQ ID NO: 713059 - DNA, 120 bp, Artificial Sequence
  ENSG00000197102_28 (sequence is synthesized)
ctctcctggtccaaataaggaaggccagaggaacctttgacaatgcagaaaccaagaaagagtttggaccagtagttatagattatggcaaggtacaatctaaggtgaacttgaaatatg

SEQ ID NO: 713060 - DNA, 120 bp, Artificial Sequence
  ENSG00000197102_29 (sequence is synthesized)
actcttggcataaggaggttcttagcaaatttgggcagatgctaggatcaaacatgacggaattccattcccagatctcaaagtcccgccaagagttggagcagcactcagtagacacgg

SEQ ID NO: 713061 - DNA, 120 bp, Artificial Sequence
  ENSG00000197102_30 (sequence is synthesized)
ccagcacctccgatgcagtgaccttcatcacctatgtgcagtctttgaaacggaagatcaagcagtttgagaagcaagttgagctctaccgcaatggccagcgcttactggaaaagcaaa

SEQ ID NO: 713062 - DNA, 120 bp, Artificial Sequence
  ENSG00000197102_31 (sequence is synthesized)
ggttccagttcccaccttcctggctttatattgacaacatcgagggagagtggggagccttcaatgacatcatgcggcgaaaggactctgccattcagcagcaggtggcaaacctgcaaa

SEQ ID NO: 713063 - DNA, 120 bp, Artificial Sequence
  ENSG00000197102_32 (sequence is synthesized)
tgaagattgtccaggaggatcgggccgtggaaagccgcaccaccgacctgctgactgactgggagaagaccaagcctgtcacgggcaaccttcgcccagaagaggcacttcaggctctca

SEQ ID NO: 713064 - DNA, 120 bp, Artificial Sequence
  ENSG00000197102_33 (sequence is synthesized)
ccatatatgaggggaagtttggtaggctgaaggacgacagagagaagtgtgcaaaggccaaggaggcgctggaattgacagatactgggcttctcagtggcagtgaagagcgcgtgcagg

SEQ ID NO: 713065 - DNA, 120 bp, Artificial Sequence
  ENSG00000197102_34 (sequence is synthesized)
tggccttagaagaattacaggacctcaaaggcgtttggtcagaactttctaaggtttgggagcaaatcgatcagatgaaggagcaaccctgggtttcagtacagcctcgaaagcttcgac

SEQ ID NO: 713066 - DNA, 120 bp, Artificial Sequence
  ENSG00000197102_35 (sequence is synthesized)
aaaatttggatgccctcctgaaccagctgaaaagcttccctgcccggttgcgacagtatgcgtcctatgagtttgttcagaggcttctgaaaggttacatgaagataaatatgctggtga

SEQ ID NO: 713067 - DNA, 120 bp, Artificial Sequence
  ENSG00000197102_36 (sequence is synthesized)
ttgaactgaaatccgaagcacttaaagaccgccattggaaacagctcatgaaaaggcttcacgttaattgggttgtttctgagctaacccttggccaaatctgggatgttgacttgcaga

SEQ ID NO: 713068 - DNA, 120 bp, Artificial Sequence
  ENSG00000197102_37 (sequence is synthesized)
aaaatgaagcgattgtcaaggatgtactgcttgtggcacaaggggagatggctttggaagaatttttgaagcagataagagaagtgtggaatacttatgaactagacttggttaattatc

SEQ ID NO: 713069 - DNA, 120 bp, Artificial Sequence
  ENSG00000197102_38 (sequence is synthesized)
agaacaagtgccgcttgatccgtggctgggatgacctcttcaacaaggtcaaagaacacatcaacagcgtctcggccatgaagctctctccgtattacaaggtttttgaagaggatgctc

SEQ ID NO: 713070 - DNA, 120 bp, Artificial Sequence
  ENSG00000197102_39 (sequence is synthesized)
tcagctgggaagataagctgaacaggatcatggctctctttgatgtgtggattgatgtgcagaggcggtgggtctacctggaaggtatcttcacaggcagtgcagatatcaagcacctgc

SEQ ID NO: 713071 - DNA, 120 bp, Artificial Sequence
  ENSG00000197102_40 (sequence is synthesized)
tgccagtggaaacccagcggtttcagagcatcagcactgagtttttggctctaatgaaaaaagtgtccaagtctccccttgttatggatgttctgaacatccagggagtacagaggtctc

SEQ ID NO: 713072 - DNA, 120 bp, Artificial Sequence
  ENSG00000197102_41 (sequence is synthesized)
tggaaagattggcagacctgctaggaaagatccagaaagcattgggagaatatctggaaagagagcggtcatctttccccaggttctattttgtgggtgatgaagatttgcttgaaatca

SEQ ID NO: 713073 - DNA, 120 bp, Artificial Sequence
  ENSG00000197102_42 (sequence is synthesized)
ttggaaacagcaagaatgtcgctaaattacagaaacacttcaagaagatgtttgctggagtttcgagcatcatcctgaacgaggataactctgttgttttgggtatttcatctcgggaag

SEQ ID NO: 713074 - DNA, 120 bp, Artificial Sequence
  ENSG00000197102_43 (sequence is synthesized)
gagaggaggttatgtttaaaactcctgtgtcaattactgaacatcccaaaatcaatgagtggctcacattggtagaaaaggagatgagagtcaccctggccaaactgcttgctgagtctg

SEQ ID NO: 713075 - DNA, 120 bp, Artificial Sequence
  ENSG00000197102_44 (sequence is synthesized)
ttacggaagttgagatttttggtaaagcaacttcaattgacccaaatacctacatcacttggattgataaataccaggcccagcttgtggttttgtcagcccagatagcctggtctgaga

SEQ ID NO: 713076 - DNA, 120 bp, Artificial Sequence
  ENSG00000197102_45 (sequence is synthesized)
acgtggagaccgcactgagcagcatgggcggaggtggagatgccgcgcccttgcactctgtgctgagcaatgtggaggtcaccctcaatgtgttagcagactctgtcctcatggagcagc

SEQ ID NO: 713077 - DNA, 120 bp, Artificial Sequence
  ENSG00000197102_46 (sequence is synthesized)
ccccactccgaaggcggaagctagaacacttgattacagagttggttcaccagagagatgttacaaggtccttgatcaaaagcaagattgacaacgccaaatcttttgaatggctcagcc

SEQ ID NO: 713078 - DNA, 120 bp, Artificial Sequence
  ENSG00000197102_47 (sequence is synthesized)
agatgcgattttactttgaccctaagcaaactgatgtgttacagcagttgtcaattcaaatggcaaatgccaaatttaactatggctttgagtacctgggtgttcaggacaaactggtcc

SEQ ID NO: 713079 - DNA, 120 bp, Artificial Sequence
  ENSG00000197102_48 (sequence is synthesized)
agacccccctcactgaccgctgctatttgacaatgacacaagccttggaggccaggctggggggttccccatttggacctgctggaactgggaaaacagagtctgtcaaagctcttggcc

SEQ ID NO: 713080 - DNA, 120 bp, Artificial Sequence
  ENSG00000197102_49 (sequence is synthesized)
atcagcttggacggtttgttttagttttcaactgtgatgaaacctttgatttccaggcaatgggccggatctttgtgggcctttgccaggtgggtgcctggggctgctttgacgagttca

SEQ ID NO: 713081 - DNA, 120 bp, Artificial Sequence
  ENSG00000197102_50 (sequence is synthesized)
accgcctggaggagcggatgctctcggctgtgtcccagcaggtgcagtgcatacaggaagcactgcgtgaacattccaaccccaactacgacaagacctctgcccccattacttgtgagc

SEQ ID NO: 713082 - DNA, 120 bp, Artificial Sequence
  ENSG00000197102_51 (sequence is synthesized)
tgctgaacaaacaagtcaaggtgagcccggacatggccatcttcatcaccatgaaccctggctacgcgggccggtctaaccttcctgacaacttgaagaagctgttccggagcttggcca

SEQ ID NO: 713083 - DNA, 120 bp, Artificial Sequence
  ENSG00000197102_52 (sequence is synthesized)
tgaccaagcccgaccggcagttaatcgcccaggtcatgctgtactcacagggtttccgcactgctgaagtgcttgccaacaaaatcgtcccgttttttaaactatgcgatgagcagctct

SEQ ID NO: 713084 - DNA, 120 bp, Artificial Sequence
  ENSG00000197102_53 (sequence is synthesized)
cttcccaaagccattatgacttcggtcttcgggctttgaagagtgtgctggtgagtgcaggcaatgtgaagagagagagaatccagaagataaagagggagaaagaggaacgaggggaag

SEQ ID NO: 713085 - DNA, 120 bp, Artificial Sequence
  ENSG00000197102_54 (sequence is synthesized)
cagttgatgaaggagaaattgctgaaaatctccctgaacaagagattctgatacagagcgtctgtgagacgatggtgccaaagctggtggcagaggacatcccgctgctcttcagcctcc

SEQ ID NO: 713086 - DNA, 120 bp, Artificial Sequence
  ENSG00000197102_55 (sequence is synthesized)
tgtcggacgtgttccctggagtccagtatcacaggggtgagatgactgcccttcgagaggagctgaagaaagtgtgtcaggagatgtatttgacatatggagatggagaagaagttggtg

SEQ ID NO: 713087 - DNA, 120 bp, Artificial Sequence
  ENSG00000197102_56 (sequence is synthesized)
gaatgtgggttgaaaaggttctccagctctatcagatcacccagatcaatcatggcctgatgatggtggggccctcgggaagtgggaagagcatggcctggcgtgtcctgctgaaggcat

SEQ ID NO: 713088 - DNA, 120 bp, Artificial Sequence
  ENSG00000197102_57 (sequence is synthesized)
tggagagactcgagggtgtggaaggtgtggcccatatcatcgaccccaaggccatcagcaaagaccacctctacggaaccctggaccccaacaccagggaatggacagatgggctcttca

SEQ ID NO: 713089 - DNA, 120 bp, Artificial Sequence
  ENSG00000197102_58 (sequence is synthesized)
cacacgtgctgagaaagatcatcgacagcgtgagaggcgagctgcagaagcgccagtggatcgtcttcgatggcgatgtggatccagagtgggttgagaacttgaactcagtgctggatg

SEQ ID NO: 713090 - DNA, 120 bp, Artificial Sequence
  ENSG00000197102_59 (sequence is synthesized)
acaataagctcctaactttgcccaatggagagcgcctcagtcttccacccaatgtgagaataatgtttgaggtacaggacttgaaatacgcgaccttggccacagtgtcgcgctgcggca

SEQ ID NO: 713091 - DNA, 120 bp, Artificial Sequence
  ENSG00000197102_60 (sequence is synthesized)
tggtctggttcagtgaggatgtgctgagcaccgacatgatcttcaacaacttcctggccaggctgcgcagcatcccgctggatgaaggggaggatgaggcacagcggcggcgtaagggca

SEQ ID NO: 713092 - DNA, 120 bp, Artificial Sequence
  ENSG00000197102_61 (sequence is synthesized)
aagaggatgagggggaggaggccgcttcccccatgctgcagatccaaagagatgcagctacgatcatgcaaccgtacttcacgtccaacggcctggtcaccaaggcgctagagcacgcct

SEQ ID NO: 713093 - DNA, 120 bp, Artificial Sequence
  ENSG00000197102_62 (sequence is synthesized)
tccagctggagcacatcatggacctaacacgcctgcgctgcctgggctcgctcttctccatgctgcaccaggcctgccgcaacgtggcgcagtataacgccaaccatcccgacttcccca

SEQ ID NO: 713094 - DNA, 120 bp, Artificial Sequence
  ENSG00000197102_63 (sequence is synthesized)
tgcagatcgagcagctggagcgctacattcagcgatatctggtttatgccatactctggtccctgtctggagacagccggctaaaaatgagagcagagctgggtgaatacatcagaagaa

SEQ ID NO: 713095 - DNA, 120 bp, Artificial Sequence
  ENSG00000197102_64 (sequence is synthesized)
tcacgaccgtgcctctgcccactgcgcccaacatacccattatcgattatgaggtgtccatcagcggagaatggtctccgtggcaggccaaggtgcctcagattgaagtggagacgcaca

SEQ ID NO: 713096 - DNA, 120 bp, Artificial Sequence
  ENSG00000197102_65 (sequence is synthesized)
aggtggcagcccctgatgtcgtcgtgccaacgctggacacagtccgccacgaagccctcttgtacacttggctggccgaacacaagcccctggtcttgtgtggccctcctgggtctggca

SEQ ID NO: 713097 - DNA, 120 bp, Artificial Sequence
  ENSG00000197102_66 (sequence is synthesized)
agaccatgacactcttcagcgccctccgggccttgcctgacatggaggtggtgggtctcaacttctccagtgctactactccagagctgcttctgaagacttttgatcactactgcgagt

SEQ ID NO: 713098 - DNA, 120 bp, Artificial Sequence
  ENSG00000197102_67 (sequence is synthesized)
acaggcgcacacctaatggggtggttttggctcctgttcaacttggaaagtggctggtgttgttctgtgatgaaatcaacttgccagatatggataaatatgggacccagagggtcatat

SEQ ID NO: 713099 - DNA, 120 bp, Artificial Sequence
  ENSG00000197102_68 (sequence is synthesized)
ccttcatcagacagatggtggagcacggaggcttttaccgtacctcagatcaaacatgggtgaagctggagagaatccagtttgttggggcttgtaatccccccacagaccctggaagaa

SEQ ID NO: 713100 - DNA, 120 bp, Artificial Sequence
  ENSG00000197102_69 (sequence is synthesized)
agcccctctcacacaggttcctgcgccacgtgcctgtcgtgtatgtggattacccgggccccgcctccctcacacagatctacggcaccttcaaccgcgccatgctgaggctcattccat

SEQ ID NO: 713101 - DNA, 120 bp, Artificial Sequence
  ENSG00000197102_70 (sequence is synthesized)
ccctgcggacgtatgcagagccgctcactgctgccatggtggagttctacaccatgtctcaggagagattcacccaggatacacaacctcactatatctattcaccccgtgaaatgacta

SEQ ID NO: 713102 - DNA, 120 bp, Artificial Sequence
  ENSG00000197102_71 (sequence is synthesized)
ggtgggtgagaggcatctttgaagcgctgagacctctggagaccctgcctgttgaaggcctcattcggatttgggcacatgaagctctgcgtctcttccaagatagactcgtagaggatg

SEQ ID NO: 713103 - DNA, 120 bp, Artificial Sequence
  ENSG00000197102_72 (sequence is synthesized)
aggagaggcgttggactgatgagaacatcgacacggttgctctgaagcacttccctaacatcgacagagagaaggcaatgagccgacccatcttgtacagcaactggctgtcaaaggatt

SEQ ID NO: 713104 - DNA, 120 bp, Artificial Sequence
  ENSG00000197102_73 (sequence is synthesized)
acatcccagtagaccaagaagagttaagagattatgtcaaagctaggctgaaggtcttttatgaagaagaacttgatgttccgctggtgctgtttaatgaagtcctagaccacgtgctga

SEQ ID NO: 713105 - DNA, 120 bp, Artificial Sequence
  ENSG00000197102_74 (sequence is synthesized)
ggattgacagaatattccgtcaacctcaaggccacttgcttctgattggtgttagtggagcaggaaaaactaccctgtctcgtttcgtcgcctggatgaacggtttgagtgtgtaccaga

SEQ ID NO: 713106 - DNA, 120 bp, Artificial Sequence
  ENSG00000197102_75 (sequence is synthesized)
ttaaggtccataggaagtacacaggggaagactttgatgaagatctacggacagtgttgagacgttctggctgtaaaaatgaaaagatagcatttataatggatgaatctaatgtgttag

SEQ ID NO: 713107 - DNA, 120 bp, Artificial Sequence
  ENSG00000197102_76 (sequence is synthesized)
attctggattcctggagcgaatgaatacccttctggccaatggagaggtgcctggtctctttgaaggagacgagtatgccaccttgatgacgcagtgcaaagagggggcacagaaggaag

SEQ ID NO: 713108 - DNA, 120 bp, Artificial Sequence
  ENSG00000197102_77 (sequence is synthesized)
gcctgatgctggactcgcacgaggagctctacaagtggttcactagccaggttatccgcaacctccacgtcgtgttcaccatgaacccgtcctcggagggactcaaggaccgggcagcta

SEQ ID NO: 713109 - DNA, 120 bp, Artificial Sequence
  ENSG00000197102_78 (sequence is synthesized)
catcaccagcacttttcaacaggtgtgtgttgaattggtttggagactggtccaccgaagcactgtatcaggttggcaaagaattcacaagtaagatggatctggagaagccaaattaca

SEQ ID NO: 713110 - DNA, 120 bp, Artificial Sequence
  ENSG00000197102_79 (sequence is synthesized)
tcgtgcctgattacatgccagttgtgtatgataagctgccgcagccaccatcccatcgggaagccattgtgaacagctgtgtgtttgttcatcagactcttcaccaggcgaatgctcggc

SEQ ID NO: 713111 - DNA, 120 bp, Artificial Sequence
  ENSG00000197102_80 (sequence is synthesized)
tagcaaagcgaggcggcagaacgatggccatcacccctcgccactacctggacttcatcaatcactatgccaacctgttccacgagaagcggagcgagctggaggagcagcagatgcact

SEQ ID NO: 713112 - DNA, 120 bp, Artificial Sequence
  ENSG00000197102_81 (sequence is synthesized)
tgaacgtggggctcaggaagatcaaagagacagtcgaccaggtagaagaactgcgtcgtgacttgaggataaagagccaagagctggaggtgaagaatgcagcagccaatgacaagctga

SEQ ID NO: 713113 - DNA, 120 bp, Artificial Sequence
  ENSG00000197102_82 (sequence is synthesized)
aaaagatggtgaaagaccagcaggaggctgaaaagaagaaggttatgagccaagaaatccaggaacagctgcataagcagcaggaggtaattgcagacaaacagatgagtgtcaaagaag

SEQ ID NO: 713114 - DNA, 120 bp, Artificial Sequence
  ENSG00000197102_83 (sequence is synthesized)
gccgtcattgaggcccagaatgctgtgaagtcgatcaagaagcagcacctggtggaggtgaggtccatggccaaccctcctgctgctgtgaagctggcgctggagtccatctgcctgctg

SEQ ID NO: 713115 - DNA, 120 bp, Artificial Sequence
  ENSG00000197102_84 (sequence is synthesized)
ctgggggaaagcaccacagactggaagcagatccgctccatcatcatgcgggagaacttcatccccaccatcgtcaacttctctgcagaggagatcagtgacgccataagggagaagatg

SEQ ID NO: 713116 - DNA, 120 bp, Artificial Sequence
  ENSG00000197102_85 (sequence is synthesized)
aagaaaaattacatgtccaatccaagttacaattatgaaattgtgaatcgggcttccctggcttgcggccctatggtgaaatgggcaattgcacagcttaactatgcagacatgttaaag

SEQ ID NO: 713117 - DNA, 120 bp, Artificial Sequence
  ENSG00000197102_86 (sequence is synthesized)
agagtggagcccctacgcaatgagctgcagaagctggaagatgacgccaaggacaaccagcagaaggccaacgaggtggagcagatgatccgagacctggaagccagcatcgcccgctac

SEQ ID NO: 713118 - DNA, 120 bp, Artificial Sequence
  ENSG00000197102_87 (sequence is synthesized)
aaggaggaatacgccgtcctgatctcagaggcccaggccatcaaggcagacctggcagctgtcgaggcaaaagtaaaccggagcactgctcttctgaagagcttgtctgctgaacgtgaa

SEQ ID NO: 713119 - DNA, 120 bp, Artificial Sequence
  ENSG00000197102_88 (sequence is synthesized)
cgatgggaaaaaacaagtgaaactttcaaaaaccagatgtccaccattgctggggactgtctcttgtcagctgcgttcattgcctacgcgggttactttgaccagcagatgcgtcagaac

SEQ ID NO: 713120 - DNA, 120 bp, Artificial Sequence
  ENSG00000197102_89 (sequence is synthesized)
ttgttcactacctggtcccatcacctacagcaagccaacatccagttccgtacagatattgccaggacggaatacctttccaatgctgatgagcgtcttcgctggcaggccagctccttg

SEQ ID NO: 713121 - DNA, 120 bp, Artificial Sequence
  ENSG00000197102_90 (sequence is synthesized)
cctgctgatgacctttgcacagaaaatgccatcatgctgaaacgattcaataggtatccgctgatcattgacccctctggacaggccacagaattcattatgaatgaatataaggatcgt

SEQ ID NO: 713122 - DNA, 120 bp, Artificial Sequence
  ENSG00000197102_91 (sequence is synthesized)
aagatcacacggaccagcttcctggatgacgccttcagaaagaacttagagagtgcactgagattcggtaacccccttctggtccaggatgtggaaagctacgatccagttttgaacccg

SEQ ID NO: 713123 - DNA, 120 bp, Artificial Sequence
  ENSG00000197102_92 (sequence is synthesized)
gtgctgaaccgtgaagtgcggcgaacaggggggagagtgctgatcactctcggggaccaggacatagacctgtcgccatcgtttgtcatcttcctgtccacccgggatccaactgtcgag

SEQ ID NO: 713124 - DNA, 120 bp, Artificial Sequence
  ENSG00000197102_93 (sequence is synthesized)
ttcccaccagatctctgttcccgggttacttttgtaaacttcacagttacccgtagcagtttacaaagccagtgtctaaatgaagtacttaaagcagaaagacctgatgtggacgagaaa

SEQ ID NO: 713125 - DNA, 120 bp, Artificial Sequence
  ENSG00000197102_94 (sequence is synthesized)
cgatctgatcttcttaaacttcaaggggaatttcagctccgtttgcgtcagctggaaaaatctctactacaagctctgaacgaggtgaaagggcgcattttggatgacgacacgatcata

SEQ ID NO: 713126 - DNA, 120 bp, Artificial Sequence
  ENSG00000197102_95 (sequence is synthesized)
accactctggagaacctgaagagagaggctgcagaggtcaccaggaaagttgaggagacggacattgtcatgcaggaggtggagaccgtgtcccagcagtacctcccgctctccaccgcc

SEQ ID NO: 713127 - DNA, 120 bp, Artificial Sequence
  ENSG00000197102_96 (sequence is synthesized)
tgcagcagcatctacttcaccatggagtccctcaagcagatacacttcttgtaccagtactccctccagtttttcctggacatttatcacaacgtcctatacgagaacccgaacctgaag

SEQ ID NO: 713128 - DNA, 120 bp, Artificial Sequence
  ENSG00000197102_97 (sequence is synthesized)
ggtgtcaccgaccacacacagcgcctgtccattataacaaaggacctcttccaggtggcgtttaaccgagtggctcgaggcatgctgcatcaggaccacattacctttgccatgctgctg

SEQ ID NO: 713129 - DNA, 120 bp, Artificial Sequence
  ENSG00000197102_98 (sequence is synthesized)
gcaagaatcaaactgaagggcaccgtgggggagcccacctacgatgcagaattccagcacttcttgagaggaaatgagattgtcctgagtgctggctccacccccaggatccagggcctg

SEQ ID NO: 713130 - DNA, 120 bp, Artificial Sequence
  ENSG00000197102_99 (sequence is synthesized)
actgtggagcaggcggaggcggtggtgaggctgagctgccttcccgcgtttaaggacttgattgcaaaggttcaggcagacgagcaatttggcatctggctggacagcagctccccggag

SEQ ID NO: 713131 - DNA, 120 bp, Artificial Sequence
  ENSG00000197102_100 (sequence is synthesized)
cagactgtgccctacctctggagtgaagaaacacctgcaacacccattggccaggccatccaccgcctgctcctgatccaggctttccggcccgatcgcctgttggccatggcccacatg

SEQ ID NO: 713132 - DNA, 120 bp, Artificial Sequence
  ENSG00000197102_101 (sequence is synthesized)
tttgtttcaacaaaccttggggagtctttcatgtccatcatggagcagccgctcgacctgacccacattgtgggcacagaggtgaagcccaacactcctgtcttaatgtgctctgtgcct

SEQ ID NO: 713133 - DNA, 120 bp, Artificial Sequence
  ENSG00000197102_102 (sequence is synthesized)
ggttatgatgccagtggacatgtcgaggaccttgcagccgagcagaacacgcagatcacttcaattgcaatcggctctgcagaaggctttaaccaagcagataaggcaataaacaccgct

SEQ ID NO: 713134 - DNA, 120 bp, Artificial Sequence
  ENSG00000197102_103 (sequence is synthesized)
gtaaagtcgggcaggtgggtgatgctgaagaatgtgcatctggccccagggtggctgatgcagctggagaagaagttgcattccctgcagccgcatgcctgcttccgactcttcctcacc

SEQ ID NO: 713135 - DNA, 120 bp, Artificial Sequence
  ENSG00000197102_104 (sequence is synthesized)
atggagatcaaccccaaggtgcctgtgaatctgctccgtgcgggccgcatctttgtgttcgagccaccgccaggggtgaaggccaacatgctgaggacgttcagcagcattcccgtctca

SEQ ID NO: 713136 - DNA, 120 bp, Artificial Sequence
  ENSG00000197102_105 (sequence is synthesized)
cggatatgcaagtctcccaacgagcgtgcccgcttgtacttcctgctggcctggtttcatgcgatcatccaagaacgcttacgatacgcaccactggggtggtcaaagaagtatgaattt

SEQ ID NO: 713137 - DNA, 120 bp, Artificial Sequence
  ENSG00000197102_106 (sequence is synthesized)
ggagagtctgacctgcggtcagcttgcgatacggtggacacgtggctggatgacacggccaagggcaggcagaacatctcaccggataagatcccgtggtctgcactaaagaccttaatg

SEQ ID NO: 713138 - DNA, 120 bp, Artificial Sequence
  ENSG00000197102_107 (sequence is synthesized)
gcccagtccatttatggcgggcgcgtggacaacgagtttgaccagcgtctgctcaacaccttcctggagcgcctgttcacaaccaggagtttcgacagtgagtttaagctggcatgcaag

SEQ ID NO: 713139 - DNA, 120 bp, Artificial Sequence
  ENSG00000197102_108 (sequence is synthesized)
gtcgacggacataaagacattcaaatgccagatggcatcaggcgagaggagtttgtgcagtgggtggagttgctccccgacacccagacgccctcctggctgggcctgcccaacaacgcc

SEQ ID NO: 713140 - DNA, 120 bp, Artificial Sequence
  ENSG00000197102_109 (sequence is synthesized)
gagagagtcctccttaccacacagggtgtggacatgatcagtaaaatgctgaagatgcagatgttggaggatgaggacgacctggcctacgcagagactgagaagaagacgaggacagac

SEQ ID NO: 713141 - DNA, 120 bp, Artificial Sequence
  ENSG00000197102_110 (sequence is synthesized)
tccacgtccgacgggcgccctgcctggatgcggacactgcacaccaccgcgtccaactggctgcacctcatcccccagacgctgagccacctcaagcgcaccgtggagaatatcaaggat

SEQ ID NO: 713142 - DNA, 120 bp, Artificial Sequence
  ENSG00000197102_111 (sequence is synthesized)
cctttgttcaggttctttgagagagaagtgaagatgggcgcaaagctgcttcaggacgttcgccaggaccttgcagatgtcgtccaggtgtgcgaaggaaagaagaagcagaccaactac

SEQ ID NO: 713143 - DNA, 120 bp, Artificial Sequence
  ENSG00000197102_112 (sequence is synthesized)
ttgcgcacgctgatcaacgagctagtgaaagggatcttgcctcggagctggtcccactacacggtgcctgccggcatgaccgtcatccagtgggtgtccgacttcagcgagaggatcaaa

SEQ ID NO: 713144 - DNA, 120 bp, Artificial Sequence
  ENSG00000197102_113 (sequence is synthesized)
cagctgcagaacatctcactggcagctgcatctggtggcgccaaggagctaaagaacatccacgtgtgcctgggtggcctgttcgtgcctgaggcgtacatcactgccaccaggcagtat

SEQ ID NO: 713145 - DNA, 120 bp, Artificial Sequence
  ENSG00000197102_114 (sequence is synthesized)
gtggcccaggccaacagctggtccctggaggagctctgcctggaagtcaacgtcaccacctcacagggcgccacccttgacgcttgcagcttcggagtcacgggtttgaaacttcaaggg

SEQ ID NO: 713146 - DNA, 120 bp, Artificial Sequence
  ENSG00000197102_115 (sequence is synthesized)
gccacgtgcaacaacaacaagctgtcactgtccaatgccatctcaaccgcccttcccctgacgcagctgcgctgggtcaagcagacaaacaccgagaagaaggccagtgtggtaacctta

SEQ ID NO: 713147 - DNA, 120 bp, Artificial Sequence
  ENSG00000197102_116 (sequence is synthesized)
cctgtctacctgaacttcacccgtgcagacctcatcttcaccgtggacttcgaaattgctacaaaggaggatcctcgcagcttctacgagcggggtgtcgcagtcttgtgcacagagtaa

SEQ ID NO: 713148 - DNA, 120 bp, Artificial Sequence
  ENSG00000197102_117 (sequence is synthesized)
acttttctagctgcccctttctgtaatagtgaaagttggtatttaacatttattcatttttaaaatatttggaaggtctgagcttgtgaaaagaaagtggttggtctgaggttggaggaa

SEQ ID NO: 713149 - DNA, 120 bp, Artificial Sequence
  ENSG00000197102_118 (sequence is synthesized)
gctgaatggaatctgacggttgggagtggtggaaattggaaggataccaggaggtatttgggaaggccaatggcgtggctcctttgaggaaataaaacactaagcatgagccggctccgc

SEQ ID NO: 713150 - DNA, 120 bp, Artificial Sequence
  ENSG00000197102_119 (sequence is synthesized)
ctcttctgtctccgctttcatcccagggcacagagccttgccttccatgctgcccagggagggcagcccacggcagccatgcccctccccacctcgctttcatcatgagctcgctcccga

SEQ ID NO: 713151 - DNA, 120 bp, Artificial Sequence
  ENSG00000197102_120 (sequence is synthesized)
gcggccacagcactcatgaatgaagaccttggggcccttcacagacacagatgcagccagctgtggctctgaaggccctggggcccgggcaccatggttcacacctttaatcgcagcact

SEQ ID NO: 713152 - DNA, 120 bp, Artificial Sequence
  ENSG00000197102_121 (sequence is synthesized)
gttcacacctttaatcgcagcactttgggagtctgggagttaaagaccagcctcggcaacatagtgagaccccgtctctacaggaaattaaatcaggtgtggtggtgcatgcctgtagtc

SEQ ID NO: 713153 - DNA, 65 bp, Artificial Sequence
  ENSG00000197102_122 (sequence is synthesized)
gtgcatgcctgtagtcccagctacttgagggctgaggtgggaggatcacccaagcccaagaggtc

SEQ ID NO: 713154 - DNA, 120 bp, Artificial Sequence
  ENSG00000197102_123 (sequence is synthesized)
gaggcggaggttgcagtgagctgaaaaaaaaaaaggcagcccccagccgcttgtgttcttgaccagggccccaggacttggctcctccagacaagggagttttgtgctgtagatgaggga

SEQ ID NO: 713155 - DNA, 120 bp, Artificial Sequence
  ENSG00000197102_124 (sequence is synthesized)
atgagggagttgcccatcgccgccctagcaagtccattcccacacgacctttccagtggtgatgatgacagtggcccatacagctgactgtttgcatctcacgttcacattgctagaggt

SEQ ID NO: 713156 - DNA, 90 bp, Artificial Sequence
  ENSG00000197102_125 (sequence is synthesized)
cagctgactgtttgcatctcacgttcacattgctagaggtgatgggtgtgctacacccgtggaaacaggcttctggcatctcagtgtctt

SEQ ID NO: 713157 - DNA, 67 bp, Artificial Sequence
  ENSG00000197102_126 (sequence is synthesized)
ctgcaacctccacctaccgggttcaagtgatcctcctgcctcctatatttttagtagagacagggct

SEQ ID NO: 713158 - DNA, 66 bp, Artificial Sequence
  ENSG00000197102_127 (sequence is synthesized)
gcctgcacctggccaaatttttgtattttttgtagagatggaatctcgctattttccctgggctgg

SEQ ID NO: 713159 - DNA, 120 bp, Artificial Sequence
  ENSG00000197102_128 (sequence is synthesized)
tttttgtagagatggaatctcgctattttccctgggctggtctcaaactcctggcattaagggctcctcctatctcagcctctcaaagtgccggggttctaggtgtgagtcaccgagttg

SEQ ID NO: 713160 - DNA, 89 bp, Artificial Sequence
  ENSG00000197102_129 (sequence is synthesized)
tctcaaagtgccggggttctaggtgtgagtcaccgagttgagcccctaaacacatgtttttctttttagagacagggtctcactcgatg

SEQ ID NO: 713161 - DNA, 90 bp, Artificial Sequence
  ENSG00000197102_130 (sequence is synthesized)
tgatcctcccacctcagccttctgagcagctgggaccacagacacacaccaccatgtcggctaatttttgtatctcgggctggtctcgaa

SEQ ID NO: 713162 - DNA, 120 bp, Artificial Sequence
  ENSG00000197102_131 (sequence is synthesized)
attacaagtgtgagccaccacacccagcccctaaaaacatttatgtgcatcgacatcagctttgatcagaagagcccctgctcctcttgggctgggaccccttcctggactgagtctgct

SEQ ID NO: 713163 - DNA, 120 bp, Artificial Sequence
  ENSG00000197102_132 (sequence is synthesized)
ctcctcttgggctgggaccccttcctggactgagtctgctcaccttggattaggccacctactgcttcttcctcttccttttctcaggctctgcaaggaagagctccagcttcctcttgg

SEQ ID NO: 713164 - DNA, 120 bp, Artificial Sequence
  ENSG00000197102_133 (sequence is synthesized)
agaaggagattctgggccccttttctctctcccaaacctaggtggtggccatgcccctcgagctctgcttggcacgtgtctgccagtctcagggggctccatgggagtgaggaagggctc

SEQ ID NO: 713165 - DNA, 120 bp, Artificial Sequence
  ENSG00000197102_134 (sequence is synthesized)
ggcggccctgggggtctggtcctcctccgccatcctcgagtcctcgggctacgtgccctcatctttggcttccagggacacgggcccagctggccacttctatgacaagaatgtgggttt

SEQ ID NO: 713166 - DNA, 120 bp, Artificial Sequence
  ENSG00000197102_135 (sequence is synthesized)
tttgtgacagggcgtctactatatgaacttcctctggactctgacttcagtgtgtaggaagccaccttacagctcatgtcacccagagaacagtcgttgcagctccagttggaatgactg

SEQ ID NO: 713167 - DNA, 120 bp, Artificial Sequence
  ENSG00000197102_136 (sequence is synthesized)
ggggtgtcttccgaatcgccatcataaagatctaaaagctgaggacaaaagtgtttctcagtccaagagcagttctgcgaggcggaatcaagtctaacatgctcgcatgcgctgactctt

SEQ ID NO: 713168 - DNA, 84 bp, Artificial Sequence
  ENSG00000197102_137 (sequence is synthesized)
ggcggaatcaagtctaacatgctcgcatgcgctgactcttcctcccgtcactgatgctggtttttgcaggctctgccttgcaaa

SEQ ID NO: 713169 - DNA, 84 bp, Artificial Sequence
  ENSG00000197102_138 (sequence is synthesized)
gagccaccacactcggcctctttgtttgtgaggctggagtgcagtgatgcaacctcatctcactgcagcctagacctcctgggc

SEQ ID NO: 713170 - DNA, 79 bp, Artificial Sequence
  ENSG00000197102_139 (sequence is synthesized)
tttgagacagtctggctctgtcactgaggctggagtgcagtgatgcaacctcatctcactgcagcctcagactacaggt

SEQ ID NO: 713171 - DNA, 120 bp, Artificial Sequence
  ENSG00000197102_140 (sequence is synthesized)
tgaatttttaaaaatgtgttagatcaatattcatatcacccaaaaacagcctgagagcccgccaccactggggactcagcctgagccttgttcccagaaagccctcaacgcagtgctggg

SEQ ID NO: 713172 - DNA, 120 bp, Artificial Sequence
  ENSG00000197102_141 (sequence is synthesized)
cacagacctgggaggcttggctcaaaccgccctgccctccgttggcagggcagagctccgtcttttcctctcaacagctcttccaaagggcaaggcagcattttcctggtgaggggcaag

SEQ ID NO: 713173 - DNA, 120 bp, Artificial Sequence
  ENSG00000197102_142 (sequence is synthesized)
cgaagctgaggccagacccacccccgagtcttccctctgccacatccagggcctgaagggcgttctggggagcctccaccttcacaccgaaggccgccaaggtggttggcaagaagctga

SEQ ID NO: 713174 - DNA, 120 bp, Artificial Sequence
  ENSG00000197102_143 (sequence is synthesized)
aatgggcgtttaagtccgaaccttgttttcaaaggtgcccattgcctgttctcaaagcaatgcacctgagaagcagtggcaggtggcacagcccacccccaaccgccagggccacccaaa

SEQ ID NO: 713175 - DNA, 77 bp, Artificial Sequence
  ENSG00000197102_144 (sequence is synthesized)
aggtggcacagcccacccccaaccgccagggccacccaaacaccagttacaacaccatcaccaacagagcctttgca

SEQ ID NO: 713176 - DNA, 83 bp, Artificial Sequence
  ENSG00000197102_145 (sequence is synthesized)
tgggaggattatgggcctgagccaccccacccggcccaaccttattattactgaagtcgccttgttacacacaaacatctaca

SEQ ID NO: 713177 - DNA, 120 bp, Artificial Sequence
  ENSG00000197102_146 (sequence is synthesized)
attattactgaagtcgccttgttacacacaaacatctacagtgcctcctggccactccttctggacttttctttcctagcccaggtcaaagtgggccttcgggaggaccctggaggagaa

SEQ ID NO: 713178 - DNA, 120 bp, Artificial Sequence
  ENSG00000197102_147 (sequence is synthesized)
gccccctcctcttcacttccaccctctctcttccacccctggaagtcagctttctgacctcagaatcccagctatcttctggactcaggtgacaagtcacctaagtgacagatccagcat

SEQ ID NO: 713179 - DNA, 120 bp, Artificial Sequence
  ENSG00000197102_148 (sequence is synthesized)
gcactttatgaccatcactctgctcctcctgcatcagcgccccacccaacagagccgaccaggctgggaacaccgagaccgagagcgcgtggctgtgtctacaaaggcctcctctttgag

SEQ ID NO: 713180 - DNA, 120 bp, Artificial Sequence
  ENSG00000197102_149 (sequence is synthesized)
ggagacacgcgaggcacgggtggggcgatgagacaggatcggccggtccttgacagtctctgaagctgggagaacatgaccccatgctctcctgttggagtcaccacctctttgccaaca

SEQ ID NO: 713181 - DNA, 120 bp, Artificial Sequence
  ENSG00000197102_150 (sequence is synthesized)
gccaccaaacctccacctccaattaagctccacccccatgtccccactgccctccggacatctgttcagcacccccctcgacctggccaaggctccacgcaccgccctggtttcccgctc

SEQ ID NO: 713182 - DNA, 120 bp, Artificial Sequence
  ENSG00000197102_151 (sequence is synthesized)
tgcccagccccccgctgaagtctctaatgggttcttccgattccacctgtccaaggtaaaaccctgaggttgtccctcctccgcggcacctccaggtatctggttgctcaggctgaaatg

SEQ ID NO: 713183 - DNA, 120 bp, Artificial Sequence
  ENSG00000197102_152 (sequence is synthesized)
tttcccaaggccctggctcctcctccttccaaaccccgcaggcagctgattagcaaactctgactctaacctcaaaacatgtccagaattcagccacatctccccacttccccgcctggc

SEQ ID NO: 713184 - DNA, 120 bp, Artificial Sequence
  ENSG00000197102_153 (sequence is synthesized)
cgcctggccctgggccccgctattccatctcaatctctgccctggcccccagcccagcatccactctcagaccagagcaatgcttgtgaactccgaaaatctgagacaggtctcagttaa

SEQ ID NO: 713185 - DNA, 90 bp, Artificial Sequence
  ENSG00000197102_154 (sequence is synthesized)
ctgagacaggtctcagttaatttagaaaagatatttgtcaaggttgaggacgcgcacccatgacacagcctcaggaggtcctgactgggg

SEQ ID NO: 713186 - DNA, 88 bp, Artificial Sequence
  ENSG00000197102_155 (sequence is synthesized)
gttaaaaatcagctcatgacttagaacccgatgttacccatagatttcaggcattgtatggaagaacatcgtgagactccctgctctg

SEQ ID NO: 713187 - DNA, 120 bp, Artificial Sequence
  ENSG00000197102_156 (sequence is synthesized)
aggcattgtatggaagaacatcgtgagactccctgctctgttctgtttcactctgactaccagtgcatgaaacccctgtcacgtatcccccagactgctcaatcaatcacgaccctttca

SEQ ID NO: 713188 - DNA, 60 bp, Artificial Sequence
  ENSG00000197102_157 (sequence is synthesized)
aatcacgaccctttcagggattttaagatggtaacttgccgatgctcccagctgaataaa

SEQ ID NO: 713189 - DNA, 120 bp, Artificial Sequence
  ENSG00000197102_158 (sequence is synthesized)
aatgacaaccgtgggcccttcgatgaaactgtccacaaaggctgtggaggtgcataatatgctttatgaagatttgcccaaggcctatttgaatttttgttgttgttgtttaaatgaaga

SEQ ID NO: 713190 - DNA, 120 bp, Artificial Sequence
  ENSG00000197102_159 (sequence is synthesized)
ggaaacaatacttaacctgaaaattttacatgatacagttcaatttctgaaaatgctaagtgcatgactatattggaaagttgtttatactgataaaaattctgcttaccagactttcca

SEQ ID NO: 713191 - DNA, 120 bp, Artificial Sequence
  ENSG00000197102_160 (sequence is synthesized)
gtgccagagatgaacaacctgaatcgctgatcaatacgtagtttacattctgtattggcttctttccttcctctatgtgattcatttaagaaaaagtttattgtttacacaagctgtgtg

SEQ ID NO: 713192 - DNA, 120 bp, Artificial Sequence
  ENSG00000197102_161 (sequence is synthesized)
tgtttggcctgagagatgctgtacgggattgaacacatagctcatccattgggtctcttgttgtcctcggcgggatctgatgtgtccttgttgaggctgctcattggtgtctcctgtccc

SEQ ID NO: 713193 - DNA, 120 bp, Artificial Sequence
  ENSG00000197102_162 (sequence is synthesized)
actggctccagccttcctgacttactaaagaactcgccacagtttggaaatgtttgttttacatgtgacctgtgtaacatctctccagctggggagtttcagtacttgcctttaataatc

SEQ ID NO: 713194 - DNA, 82 bp, Artificial Sequence
  ENSG00000197102_163 (sequence is synthesized)
ctctccagctggggagtttcagtacttgcctttaataatccatagataggcgcttgtaaagccagctacttgggagagtgcg

SEQ ID NO: 713195 - DNA, 120 bp, Artificial Sequence
  ENSG00000197102_164 (sequence is synthesized)
ttctgctggaattgcattagtctctcatgtcagtctagaggacaggaccgtgtcttactggtctttgcattcctcctggacttcacaaataacagttgctcagcaaatgtttaatataca

SEQ ID NO: 713196 - DNA, 120 bp, Artificial Sequence
  ENSG00000197102_165 (sequence is synthesized)
tgggaggatcacttaagcccaggaggcagaggttatattgagctgagatcacggcactgcaatccagcctgggcaacagagcaagacccagactcaaaacaacataaatagaccttaggg

SEQ ID NO: 713197 - DNA, 120 bp, Artificial Sequence
  ENSG00000197102_166 (sequence is synthesized)
ctcaaaacaacataaatagaccttagggcacttcatgtttgacattgtactgttatttgtaaaggaaatacttgtttcttacctcttacctctttagtaacatctcattcttgtcactgg

SEQ ID NO: 713198 - DNA, 120 bp, Artificial Sequence
  ENSG00000197102_167 (sequence is synthesized)
gctgtaaattctggagccgtctaacactttagtgcccccactgactctgcctctgataaaatgatctcctttgcctttgtctcccactgctgctgtatgttcaggcccttactctttcct

SEQ ID NO: 713199 - DNA, 120 bp, Artificial Sequence
  ENSG00000197102_168 (sequence is synthesized)
ctagatcaggaatcagcacgctttctctttaaagagccagatcataaatgttttaacctttacaggtggagtagtctcgggcacagctactcagtgctgccattgtagggcaaaagcctc

SEQ ID NO: 713200 - DNA, 120 bp, Artificial Sequence
  ENSG00000197102_169 (sequence is synthesized)
cagagaccatatataaatgaatgggtgtggctgtggccagtaaaacctcattactgaaaaatgcaaggcttggcctgctaaccatgttttgctaatccttgctgtagattctgtgtgata

SEQ ID NO: 713201 - DNA, 120 bp, Artificial Sequence
  ENSG00000197102_170 (sequence is synthesized)
gaagaattcagtctactcctccctcccagaagagctttgtgaaatccactctgagcttgtaggtgtcctgctgcccagcccctgcaggccatctccattgcccttggaatgtcgtccagc

SEQ ID NO: 713202 - DNA, 120 bp, Artificial Sequence
  ENSG00000197102_171 (sequence is synthesized)
cctggcttcccctggtagtctgatcatcttgctgtgcttcagaaatcaagggaccagagcagtttctcacatcaggcctgccttgcccctttcttgtcatttcttactaataaaaggtgg

SEQ ID NO: 713203 - DNA, 120 bp, Artificial Sequence
  ENSG00000197102_172 (sequence is synthesized)
ttggtgtaatcaccatcctcagtttagagaagttaaagggcttagagaggtttggaagtgtaaggggtatctcgaaagctctaagtggctaagctgaggcccgactcgagtgttctggcc

SEQ ID NO: 713204 - DNA, 120 bp, Artificial Sequence
  ENSG00000197102_173 (sequence is synthesized)
ccgagggccaggctccttctatcatgtcacacccatctgccaaggccaaaattgttttctgaggttaagtcacagagtttcctgaagagtgagaagatgtaactattttctgaaaggcga

SEQ ID NO: 713205 - DNA, 120 bp, Artificial Sequence
  ENSG00000197102_174 (sequence is synthesized)
ggtcactgaacattgcacatatgcttccctcaaaggttctggtttccaaaaatatcattagtaaccatctgaagctttttctgaatgcttgagattgtcttcatctctcaaagcaaagtt

SEQ ID NO: 713206 - DNA, 120 bp, Artificial Sequence
  ENSG00000197102_175 (sequence is synthesized)
cctacaaagctagattgtatttaccatagtgaaacccctctcataaaagaaacttcacaatataagctttgtgtcaatatacgtttttagagatctgttgataattacgtaagtatgcta

SEQ ID NO: 713207 - DNA, 120 bp, Artificial Sequence
  ENSG00000197102_176 (sequence is synthesized)
tttatcaatccctgacttgaatttcacccagaaatataaaatattcagtgtaactgtcttgtaattgtttctgagtgttctagctatgacccaattgctaatttaagtattgatagcagt

SEQ ID NO: 713208 - DNA, 120 bp, Artificial Sequence
  ENSG00000197102_177 (sequence is synthesized)
ggtagagtgaggtcctcagccgctccctggcgggggggaagcagggtgctgcttctcttatggaacaacatcgtctcctgctcttgtcccaggtggcgtttaaccgagtggctcgaggca

SEQ ID NO: 713209 - DNA, 120 bp, Artificial Sequence
  ENSG00000197102_178 (sequence is synthesized)
caggtggcaggcaatctcctctcccccagcacaggcccccaagaccaaacagagccctcccaggcgccaagtgaagaccgaaactcttgggcgagaggagggggattgtggcaggggttt

SEQ ID NO: 713210 - DNA, 120 bp, Artificial Sequence
  ENSG00000197102_179 (sequence is synthesized)
cgttctgtcaattctgttctattttgtgccacattcacgttttctgacattcttagaaactctgtcttctctagatttcttactggctgaataaattctgatggtctcattggatgacac

SEQ ID NO: 713211 - DNA, 120 bp, Artificial Sequence
  ENSG00000197102_180 (sequence is synthesized)
cacaggtaaaacagctcggtagactgctctgcttcacacacgcacagctccaggattgctgtaaacacagcgccacaaaaacctggttttgataataaagacaacaatactgcttattgt

SEQ ID NO: 713212 - DNA, 120 bp, Artificial Sequence
  ENSG00000197102_181 (sequence is synthesized)
gaccccgtctcaaaaaaaaaaaaaaaaagacctgtctggacaacatagtgagatcctgtctctatataaaatttccttcctttgagcaggttgaaaagtaaaagccatgtttgattatgg

SEQ ID NO: 713213 - DNA, 120 bp, Artificial Sequence
  ENSG00000197102_182 (sequence is synthesized)
agcagcagtactcatgtgaatctgctgccatcgtcaggatgtggagagctctttgtaaagctttgactgacctggcatctgcactgttcttggcgaagtgctgttttctaatgactctgt

SEQ ID NO: 713214 - DNA, 120 bp, Artificial Sequence
  ENSG00000197102_183 (sequence is synthesized)
ggatgctgcagggcgtggtgctgagaggccagactctgcgtggaagagcgagctgacccctcgtgaccgccaaagcctagctggccatggggagtgaggaggaaagctgtgcccctcgaa

SEQ ID NO: 713215 - DNA, 120 bp, Artificial Sequence
  ENSG00000197102_184 (sequence is synthesized)
aaagacattcaaatgccagatggcatcaggtatgctgctgcctgctggaatggagacagttgtgatgtcagggcgtctggtgtcactcagaggtgacccctgacatcatttccaaatgca

SEQ ID NO: 713216 - DNA, 120 bp, Artificial Sequence
  ENSG00000197102_185 (sequence is synthesized)
gcaacaaggatcctccccacacgcagggtgggtggcgagggtcccctcacgcggggtgggtggcgagggtccccacacgcagggtgagtgtgcactgctgtcccagggccctccctggtt

SEQ ID NO: 713217 - DNA, 120 bp, Artificial Sequence
  ENSG00000197102_186 (sequence is synthesized)
atgctgggtgtggctctgtcagcctcggccttcctgccagtctccagctgctcctagctccactccgaggggaggcagaggaaagaactggctcttctctgcagcatcaactcagttcta

SEQ ID NO: 713218 - DNA, 120 bp, Artificial Sequence
  ENSG00000197102_187 (sequence is synthesized)
tctagagaaaaggcttgatatttatgtaaatgagcctagaaataacatttagatgttcatctcatattgaaaagcagttactggctgggcacactggctcacacctataatcccagcact

SEQ ID NO: 713219 - DNA, 61 bp, Artificial Sequence
  ENSG00000197102_188 (sequence is synthesized)
ttgggaggccaaggcgggcagatcactcgaggttaggatttccagcatggtggcaggcacc

SEQ ID NO: 713220 - DNA, 120 bp, Artificial Sequence
  ENSG00000197102_189 (sequence is synthesized)
gcgggcaccttggccaggggccacaacccagcccagccacacagcaccacgtgcagacagccaggcctgcaggagcttccgagagcagctctgtgctcttaccctcaaggtgggcggggg

SEQ ID NO: 713221 - DNA, 120 bp, Artificial Sequence
  ENSG00000197102_190 (sequence is synthesized)
gaggggaggagcttagaaatgctgaagaatttgtttttcttctgtgctggttcactgaatgttgaccaaaatctttacacaacttctagttttttaggggtcttccaagacgacagtgaa

SEQ ID NO: 713222 - DNA, 120 bp, Artificial Sequence
  ENSG00000197102_191 (sequence is synthesized)
caggacagtggaaaagcaggggcaggcgggcatggggggctcatccaaagttgtggggagcccccagcatcctcctgtttgccccaaaagccctaattgccaggaacactgagccacttg

SEQ ID NO: 713223 - DNA, 120 bp, Artificial Sequence
  ENSG00000197102_192 (sequence is synthesized)
tgtgacatgaggttttagccgcggttttgcttggatgtgattatggtcctccagaaagacacacctggactaatttgaccctagaaactgcacggttctgagacatgctctggaccagcc

SEQ ID NO: 713224 - DNA, 120 bp, Artificial Sequence
  ENSG00000197102_193 (sequence is synthesized)
tgagctagagcagatgtggtgagggcggcgccaggggcataaagtgcagcctgggaaaggcagtaggtggagccgccagccgcctgtgtgggcagccaggatgcctagcacttgcacatt

SEQ ID NO: 713225 - DNA, 120 bp, Artificial Sequence
  ENSG00000197102_194 (sequence is synthesized)
acgggaaatgaggttcacagaggaaatccatttcgcacctgtccaaacctctccttgccgggccccatcagctgtcccgggcagtcttccagttttcttacttttcccttaagccaccag

SEQ ID NO: 713226 - DNA, 68 bp, Artificial Sequence
  ENSG00000197102_195 (sequence is synthesized)
aacaacacacactgggacctttcagagcatggaggtttaggcttataaccagggtgatgaaataattt

SEQ ID NO: 713227 - DNA, 120 bp, Artificial Sequence
  ENSG00000197102_196 (sequence is synthesized)
cacagaggaacaacacacactgggacctttcagagcatggaggtttaggcttataaccagggtgatgaaataatttgtacagtaaaccccatgacaagtttacctatgtaacaaacctgc

SEQ ID NO: 713228 - DNA, 120 bp, Artificial Sequence
  ENSG00000197102_197 (sequence is synthesized)
tttaaataaagcatgtaaggtcactaggaagcatcagatttgcaacgagatgaattcattatgcaaatggaaaaaaatttttaagaaatgaaataaaatgccattccaagggtctgtgtc

SEQ ID NO: 713229 - DNA, 120 bp, Artificial Sequence
  ENSG00000197102_198 (sequence is synthesized)
agcactgtccccagaactttctgcaggggcaggaatgccttatggtccacactgtccagtgtggtagccactagccttgggggctactgagcacttcccatggctagtgtgactaggaac

SEQ ID NO: 713230 - DNA, 120 bp, Artificial Sequence
  ENSG00000197102_199 (sequence is synthesized)
gaactgagttttaattttttattttatgtttttttgagacagagtgttgctctgtcccccagtctgaacctcccaggttcaagcaattctgtctcagcctcccaggtagctgggactaca

SEQ ID NO: 713231 - DNA, 120 bp, Artificial Sequence
  ENSG00000197102_200 (sequence is synthesized)
gctggaattacaggcgtgagccaccgcatctggctgagtttttaattttagttcatttaaatgtaagtagccacacatagctagtggccaccacacgcaagtggcgggtggcttttggga

SEQ ID NO: 713232 - DNA, 120 bp, Artificial Sequence
  ENSG00000197102_201 (sequence is synthesized)
aggtatgcttatccagagtaggacagcaacatagcatttgggtgaagataaagttacaaagccctgaccatcaagttccacccgtgtggaatgcaggatgtggaaagctacgatccagtt

SEQ ID NO: 713233 - DNA, 120 bp, Artificial Sequence
  ENSG00000197102_202 (sequence is synthesized)
attgttccatggaccattggttccactgtgccggacggaacgtactcacaccggtgtcacctcagagcaggtgtccagctgagcccaggcattgggcaagatgagttggcccttttgaaa

SEQ ID NO: 713234 - DNA, 120 bp, Artificial Sequence
  ENSG00000197102_203 (sequence is synthesized)
tggactgaaaacaccctagaagattgtgagataggcagacagcgccacagcgagcagccgcagcccttcctccctagagagccccgagagctgcgactcgggcaggggcctcagcgggtt

SEQ ID NO: 713235 - DNA, 120 bp, Artificial Sequence
  ENSG00000197102_204 (sequence is synthesized)
tctgagcagcctcagcttcacacaagctcggttccaagtcacgctctgccaaagctgtccgtgaccctggacagttcggaagctctggggctctccccggaggccgagttacttctgttt

SEQ ID NO: 713236 - DNA, 120 bp, Artificial Sequence
  ENSG00000197102_205 (sequence is synthesized)
tcctggagcgaatgaatacccttctggccaatggagaggtaattaggtgacgtgttgcgttgcattacgtgttaccgggggaccagtaagtcagcactgtgctgtttcccaggtgcctgg

SEQ ID NO: 713237 - DNA, 120 bp, Artificial Sequence
  ENSG00000197102_206 (sequence is synthesized)
cacgaccgtgcctctgcccactgcgcccaacatacccattatcgattatgaggtgagcatgcagctaccacccgtgtttctgattctcgccttgttgatttaactcatcctggaacaagc

SEQ ID NO: 713238 - DNA, 120 bp, Artificial Sequence
  ENSG00000197102_207 (sequence is synthesized)
tgaccatggaccttggcttcgtcttttcattttattccatttcatagaaggactttatccttttagttccatgtgttagcaaagagtgcagattaacctgaccaattacttccttgttct

SEQ ID NO: 713239 - DNA, 120 bp, Artificial Sequence
  ENSG00000197102_208 (sequence is synthesized)
gaaagttcaagtttgtgttcaggtaaacaaacctcgtgaggaggcaccttggttgcagccggactcacacttccatctccgtgtgtaggtgtccatcagcggagaatggtctccgtggca

SEQ ID NO: 713240 - DNA, 120 bp, Artificial Sequence
  ENSG00000197102_209 (sequence is synthesized)
gtacacacggctgagcaccttccagattttgctgcagttcccagtgtggactcactcaccatgtggcctttacgttcaagtcccttttccctctgtgatttcttgcccgtcccctccctc

SEQ ID NO: 713241 - DNA, 120 bp, Artificial Sequence
  ENSG00000197102_210 (sequence is synthesized)
gccaaggagctaaaggtgaaggcgctcctgacgagtctcgggtggtcagcagctgtcctgggctggggtgggagtggctctggggaaaaacacagggcccaggtctgacctgagctcctt

SEQ ID NO: 713242 - DNA, 120 bp, Artificial Sequence
  ENSG00000197102_211 (sequence is synthesized)
cggtggcctgagaccattgttcccagatacatgcacttagggtgaccggctggcagttgggtggagcctctgggcgccctgtgactggggtttgtgtagctgttgtgttcacctcagcct

SEQ ID NO: 713243 - DNA, 120 bp, Artificial Sequence
  ENSG00000197102_212 (sequence is synthesized)
ttgaaatcagttgttcaggccaggcacggtggctcacgcctccaatcccagaactttcggctgttcaggccaggcacagtggctcacggctccaatcccagaactttgggaggctgaggc

SEQ ID NO: 713244 - DNA, 120 bp, Artificial Sequence
  ENSG00000197102_213 (sequence is synthesized)
aggtgaagtgcttgagcctaggagttagagaccaacctgggctacatggcgacaccctgtctctacaaaaaaatacaaaaatgagctgggcggggtggcatgcgcctgtagtcctagcta

SEQ ID NO: 713245 - DNA, 80 bp, Artificial Sequence
  ENSG00000197102_214 (sequence is synthesized)
aaaaaccctgtctcattaaaaaagaagaaagaaaaaaattgttcaagtgttgagcacattttcagctttcacctgagaac

SEQ ID NO: 713246 - DNA, 120 bp, Artificial Sequence
  ENSG00000197102_215 (sequence is synthesized)
gttcaagtgttgagcacattttcagctttcacctgagaaccaagggtcagtctagctcatccccagtggtcagtcactggggcaatgagatgggagctggctctggtctcttccatttta

SEQ ID NO: 713247 - DNA, 120 bp, Artificial Sequence
  ENSG00000197102_216 (sequence is synthesized)
catgctgaaacgattcaataggtatgagctcgggtgccaaggagaggcatgggaggaatgtgggtggtgatcttgaatttttttcaaaatacacccttgtttgaagagaggaatagaaaa

SEQ ID NO: 713248 - DNA, 120 bp, Artificial Sequence
  ENSG00000197102_217 (sequence is synthesized)
tggggcgtgggcatacagtgctggcagcttggtgctcctctgatggtggggcgtgtgctgttctcgttattgtcaagtgtctgagttattctgcagtgaatgcttcttgtaaccttctaa

SEQ ID NO: 713249 - DNA, 64 bp, Artificial Sequence
  ENSG00000197102_218 (sequence is synthesized)
ctgagttattctgcagtgaatgcttcttgtaaccttctaaaatcgattggcaggggccaggcac

SEQ ID NO: 713250 - DNA, 120 bp, Artificial Sequence
  ENSG00000197102_219 (sequence is synthesized)
tggattggcagggttgtgtttgggggtggacattcaaacaaacagtcctctgttacaagaactgaaaatagctagttaaaggggaagtactacctgtttttctgcttaggaaagacagaa

SEQ ID NO: 713251 - DNA, 120 bp, Artificial Sequence
  ENSG00000197102_220 (sequence is synthesized)
taagaaatgggatgtaactgcagtgaagatgggctaggtgccgagagggttccacgtctcaccgggtggtgccagcaagagtatgaatcaatcagtacagcctgtgcgcagggctggatt

SEQ ID NO: 713252 - DNA, 120 bp, Artificial Sequence
  ENSG00000197102_221 (sequence is synthesized)
tgcctaaatgaccctttgacctaggagttccacttctaggtgttcattcaacagtagcctggcctaggtacagaatgtgtgtaggtaccaagtgtgtaccagctgaagactggagataac

SEQ ID NO: 713253 - DNA, 120 bp, Artificial Sequence
  ENSG00000197102_222 (sequence is synthesized)
tcagatggccctcctgagggcccaccacgccgtggtgctgggtagtctttgccaacacaggacattcgaatacaggctggacaggtgcagagcggacagtagaggcctcccacgaggcca

SEQ ID NO: 713254 - DNA, 120 bp, Artificial Sequence
  ENSG00000197102_223 (sequence is synthesized)
caactcccacactgacacatgtgtctgtaaatgcttagaccttctctgtaaagacaggcgaaaaactggtaaaagccatcacctgggcaagggactttggtgaccaaagaatagggtcag

SEQ ID NO: 713255 - DNA, 120 bp, Artificial Sequence
  ENSG00000197102_224 (sequence is synthesized)
aaaggcagggcagcatggttcttctcaccatatgcccttttatagttgagttttgtaaaagcttgtgtgtatattaccagttgggtttttttttaacgttttaactggctagaccgtagg

SEQ ID NO: 713256 - DNA, 120 bp, Artificial Sequence
  ENSG00000197102_225 (sequence is synthesized)
tagatcacattagcttatttgtgtcctttcctcatttgtagaatggttcgataacagtgtcagcctcatagggctgttatgaggattacgtgacgtagtgtctgtaatttgacacggtcc

SEQ ID NO: 713257 - DNA, 120 bp, Artificial Sequence
  ENSG00000197102_226 (sequence is synthesized)
ttggcaattaaaattctgtataatgttaatcccttgctgctgcgacatcattgatgttgatacgtgctgtctagaaggatcgtaaacatgaaaaagctattctaacagtgcaggatgctg

SEQ ID NO: 713258 - DNA, 120 bp, Artificial Sequence
  ENSG00000197102_227 (sequence is synthesized)
agaggatgattgtcccagaaggaaaaagatttttaactatggccctcttggtgtatgactcaagctacctcctcatgccaatagttgttcaaaaggatgaggtgatgttagcattaagca

SEQ ID NO: 713259 - DNA, 120 bp, Artificial Sequence
  ENSG00000197102_228 (sequence is synthesized)
tgtaagctttattggtaaacctgaaaacgtctccggaaaccactctcgggtggtggtaacagcctatcaatcagggtctctcatcagggactcggctaaccgtgatcctgtgctttcccc

SEQ ID NO: 713260 - DNA, 120 bp, Artificial Sequence
  ENSG00000197102_229 (sequence is synthesized)
aattcctttttgggggctgcctttagttttcaactttgtaagacttcattttgtatcagaaggataaagctttgcggtggttctgtaatagataaattcaacagaatcattatttgcatt

SEQ ID NO: 713261 - DNA, 63 bp, Artificial Sequence
  ENSG00000197102_230 (sequence is synthesized)
ttctgtaatagataaattcaacagaatcattatttgcatttaaaattctattcagtggtcggg

SEQ ID NO: 713262 - DNA, 89 bp, Artificial Sequence
  ENSG00000197102_231 (sequence is synthesized)
agagactgtatcttaaaaaaaaaaaaaattatattcagtacagccataaaaagcaagaaacagccaggcgtggtggcttatgcctgtaa

SEQ ID NO: 713263 - DNA, 120 bp, Artificial Sequence
  ENSG00000197102_232 (sequence is synthesized)
aggtctgaggacctctgaaatgctgcacctgtggggatgtgcgctctctcctaggcgaggcagagccttcgttgaggggctaggaaaggtgcagtgggtgtctgtgatgcaagaagactg

SEQ ID NO: 713264 - DNA, 120 bp, Artificial Sequence
  ENSG00000197102_233 (sequence is synthesized)
ggaaccactgtctttaggttaactttgctgtaagtgtctttcttttgttgttgaaattttataaaaatcaaagtttaattccctttttaatagcgatatctggtttatgccatactctgg

SEQ ID NO: 713265 - DNA, 120 bp, Artificial Sequence
  ENSG00000197102_234 (sequence is synthesized)
aaagacaacaatactgcttattgtggattcctcttgggttacttctctgtgctgtaatgccaggaaaacatgttaaaaataaaagcattggccgggcgcagtggcttacgcctataatcc

SEQ ID NO: 713266 - DNA, 120 bp, Artificial Sequence
  ENSG00000197102_235 (sequence is synthesized)
ctctgggcccagaaagaacatcttctcaggcccctcactcggggctctcctttcccttgacaggtacacactatttgctggcactgtaataacttctgccttctttgtttgcaggtgaag

SEQ ID NO: 713267 - DNA, 120 bp, Artificial Sequence
  ENSG00000197102_236 (sequence is synthesized)
tcaacaaaccttggggagtctttcatgtccatcatggagcagccgctcgacctgacccacattgtgggcacagaggtaatgtcctggtacagcccgggcttcccacgagactccatgccc

SEQ ID NO: 713268 - DNA, 120 bp, Artificial Sequence
  ENSG00000197102_237 (sequence is synthesized)
tggagatcaaccccaaggtgggtggttgaaggagtggagacgttgcaggctggcctggcactgtgctgtcggcacgtgtgtggtggaattgaacaggcgccctcatccacacccgagcat

SEQ ID NO: 713269 - DNA, 120 bp, Artificial Sequence
  ENSG00000197102_238 (sequence is synthesized)
taaaacaaaaggagtgtggaggaaagcaatacttgcctttgtgatcagtattctcttaaggcgagaatacactttgttccaaagtggctcagaggtgcttggaggtttgggtttttttta

SEQ ID NO: 713270 - DNA, 120 bp, Artificial Sequence
  ENSG00000197102_239 (sequence is synthesized)
ttttgatgatgctaggagcaggtaattcccatgatgtaagccagtcagtgtcgcggcatttattccttttttttttttttgcacaatttgttggactgcatctctatctcgagttctcca

SEQ ID NO: 713271 - DNA, 120 bp, Artificial Sequence
  ENSG00000197102_240 (sequence is synthesized)
tgacactcaggtgtggtgttgcccaaataaaatagtggtctctgcctctggtggcttgacctgggacacgtgcacatgaggtacatgggaatgggtccacctgggctgggagaatgtggc

SEQ ID NO: 713272 - DNA, 120 bp, Artificial Sequence
  ENSG00000197102_241 (sequence is synthesized)
tggtggtccccgaagaaaggccaaagagcagcccccgaggaagcgtctacttcagctccctgggagaacgagagctttgtctgttgttttagagacattttagaatgcattttgtttttt

SEQ ID NO: 713273 - DNA, 120 bp, Artificial Sequence
  ENSG00000197102_242 (sequence is synthesized)
aaacgttttgatcactcaaaccttatacgttatttaaatttacctttttaacatttaagccatgacttgtgagttcttcttgcagttcacatgtcttgggatggctgaaatagactgtaa

SEQ ID NO: 713274 - DNA, 120 bp, Artificial Sequence
  ENSG00000197102_243 (sequence is synthesized)
tgttgacccagtgagtcgagtgcacgaatgtgggcgagtggtgctcgcaccctttgttcaccaacagttactgatcacgcacctcctggggatgcagcgggcagtacttgagccatgctg

SEQ ID NO: 713275 - DNA, 120 bp, Artificial Sequence
  ENSG00000197102_244 (sequence is synthesized)
cttttggccaactaaacttcgtgtgctagctaagtgcagctctggagtcatggacccagattccatggagtagtgatcattgtgtaagtaattttcaaagatagcatctcaactgctaga

SEQ ID NO: 713276 - DNA, 120 bp, Artificial Sequence
  ENSG00000197102_245 (sequence is synthesized)
ttttttttccatttccatggctagtgagaaacattttaataggttttattgatggctttctatcatttattgagtaataagcacactctatgattatcagttaaccctgtatggtggggt

SEQ ID NO: 713277 - DNA, 120 bp, Artificial Sequence
  ENSG00000197102_246 (sequence is synthesized)
tgtcgttaaggtttcttaagctgttatacatctagagagctgggaaaatgagaaatttggaatggggctttctaggctgtcccttggaaaatgagtgcatgatgcaggtgcctgacaaca

SEQ ID NO: 713278 - DNA, 120 bp, Artificial Sequence
  ENSG00000197102_247 (sequence is synthesized)
acacttcaacatgcgctgcatgcaccatgctggcctcggtgaattcgctctttaacatctgtaaggccccggaggacttttttcctggaaaataatacacactgagtagtcactaagtgt

SEQ ID NO: 713279 - DNA, 120 bp, Artificial Sequence
  ENSG00000197102_248 (sequence is synthesized)
tgttaattaggatagattgatacaaactggacacttttcagccgttgaatcccccaccagcagctccagacctgtttgctctgctgcctgagggcctcgctccgtacccagcttctgccc

SEQ ID NO: 713280 - DNA, 120 bp, Artificial Sequence
  ENSG00000197102_249 (sequence is synthesized)
cgctgagattctgagtcgtgtgtggtcattagttatatatgatctgggtctcatctcctctgggactgtgaacaacttgggcacgtttctaacccacccaaaaccctgcacataatgtgg

SEQ ID NO: 713281 - DNA, 120 bp, Artificial Sequence
  ENSG00000197102_250 (sequence is synthesized)
atgaaccgatttgcaggattcggtataaatcctgaaaggcctcatccctgagcatcttgttcggttttccttttaggtaaaccggagcactgctcttctgaagagcttgtctgctgaacg

SEQ ID NO: 713282 - DNA, 120 bp, Artificial Sequence
  ENSG00000197102_251 (sequence is synthesized)
aggcagaggttgcagcaagccaagatggtgccactgcactccagcccgggcgacagcacaagactccgtctcaaaaaaataaaaataaagtggattggcagggttgtgtttgggggtgga

SEQ ID NO: 713283 - DNA, 120 bp, Artificial Sequence
  ENSG00000197102_252 (sequence is synthesized)
gtcctcctggtatgctttccccatagaagctaaagcccagtcccatcaccaaatgcagaagtgggtccctgggcccccggaagtgccgtgtggtgaactgcacagctgcttttgcttttc

SEQ ID NO: 713284 - DNA, 120 bp, Artificial Sequence
  ENSG00000197102_253 (sequence is synthesized)
cacagctgcttttgcttttcagctgtaggtaaaatttccttccatggccgggcaccgtggctcacactggtaatcctagcactttggaaggtcgaggtgggaggatcacttgagcccagg

SEQ ID NO: 713285 - DNA, 120 bp, Artificial Sequence
  ENSG00000197102_254 (sequence is synthesized)
aaaaacacaaagttactagcctgggcaacatagtaaggccccatctctacaaaaaataaaaccttagccaggcgtggcggtgcacacctgtagtcccatctactcgggaggctaaagcag

SEQ ID NO: 713286 - DNA, 84 bp, Artificial Sequence
  ENSG00000197102_255 (sequence is synthesized)
cagaggcctgtctgtgaatgaatggtcactgattcccaagataagtatttcaatgttaaaactttttaaggaaaccacttaggg

SEQ ID NO: 713287 - DNA, 120 bp, Artificial Sequence
  ENSG00000197102_256 (sequence is synthesized)
gtatttcaatgttaaaactttttaaggaaaccacttagggagatcgcttctaggtaggtgttggcttagaagtaaatcagaaatttccaattcctattcatctcatgcttaaagaccaca

SEQ ID NO: 713288 - DNA, 120 bp, Artificial Sequence
  ENSG00000197102_257 (sequence is synthesized)
ttttgagtgtgttaggccagaccctgggctagccaggctgagaggaagtgtcagactgtggagggcagagcgtggagcccccttcctgagtaccttcaggtgttctcaggaagtgagcag

SEQ ID NO: 713289 - DNA, 120 bp, Artificial Sequence
  ENSG00000197102_258 (sequence is synthesized)
gtattagtttagtaatctaaaaatcagcaaatggcacctttgtcctatggatacatccaggtagtaaggtgttctcacaggcgtgtccagagggctcacggaaggcacagcagatgtggc

SEQ ID NO: 713290 - DNA, 120 bp, Artificial Sequence
  ENSG00000197102_259 (sequence is synthesized)
tgaatttcctgatttgagctgatcctgaaatgctgagcatttgctgagtgggtactttgggaagaacagtccaggcaggggagggcgtctctgagtccatgcttccacccagcacccacc

SEQ ID NO: 713291 - DNA, 120 bp, Artificial Sequence
  ENSG00000197102_260 (sequence is synthesized)
cacctctacaaaaaaatttgaaaatttagccaggcaaggtaactcacgcctatggtcccagcaacttgggaggcttgagcccaggaagtcacagtgagctgtggtcacaccaccatactg

SEQ ID NO: 713292 - DNA, 120 bp, Artificial Sequence
  ENSG00000197102_261 (sequence is synthesized)
ccaggaagtcacagtgagctgtggtcacaccaccatactgcagcctgggtaaaagagcaaaaccctgtttcaaaaaatacttcagaaaacaaaatatcagccgggcgcggtggctcatgc

SEQ ID NO: 713293 - DNA, 90 bp, Artificial Sequence
  ENSG00000197102_262 (sequence is synthesized)
gcagcctcagcaacaagagcgaaactctgtctcaaagaaaaaaaaaatacagcgaggtgcaatggcacacgcctgtaatcccagcacttt

SEQ ID NO: 713294 - DNA, 120 bp, Artificial Sequence
  ENSG00000197106_0 (sequence is synthesized)
ctttcggaaagcgagggaacagtgcgcgcagcgctccgcccagctccgttctgctccgcagagccggcgctgccagggcgcagggagggcggcactcggccccagtcttcgcaatcccgc

SEQ ID NO: 713295 - DNA, 120 bp, Artificial Sequence
  ENSG00000197106_1 (sequence is synthesized)
gcgctctctccgccgtgggacctgggtccccgcgccgctcccctgagccccgagcgcgcggcgggcgggagccaggttgggactggtggtgaggcagggagtgaggagcgagcggagtcg

SEQ ID NO: 713296 - DNA, 120 bp, Artificial Sequence
  ENSG00000197106_2 (sequence is synthesized)
gctccgggtcgccccagccccagccgggggcctgtggcccgggggaggagctgtgcgtccgcgacccgtcggggatcgcagctgctcggccggagtgcacgggccgagtctgcgcgacta

SEQ ID NO: 713297 - DNA, 120 bp, Artificial Sequence
  ENSG00000197106_3 (sequence is synthesized)
cgagtctgcgcgactacccacgcgtgacaggtccctgaatgagaaggagctgacagcagctgaattccatcttctctgtgtgctggggagcagggctacacggcccaggtggcatcaatg

SEQ ID NO: 713298 - DNA, 120 bp, Artificial Sequence
  ENSG00000197106_4 (sequence is synthesized)
ccgaagaacagcaaagtgacccagcgtgagcacagcagtgagcatgtcactgagtccgtggccgacctgctggccctcgaggagcctgtggactataagcagagtgtactgaatgtggct

SEQ ID NO: 713299 - DNA, 120 bp, Artificial Sequence
  ENSG00000197106_5 (sequence is synthesized)
ggtgaggcaggcggcaagcagaaggcggtggaggaggagctggatgcagaggaccggccggcctggaacagtaagctgcagtacatcctggcccagattggcttctctgtgggcctcggc

SEQ ID NO: 713300 - DNA, 120 bp, Artificial Sequence
  ENSG00000197106_6 (sequence is synthesized)
aacatctggaggttcccctacctgtgccagaaaaatggaggaggtgcttacctggtgccctacctggtgctgctgatcatcatcgggatccccctcttcttcctggagctggctgtgggt

SEQ ID NO: 713301 - DNA, 120 bp, Artificial Sequence
  ENSG00000197106_7 (sequence is synthesized)
cagaggatccgccgcggcagcatcggtgtgtggcactatatatgtccccgcctggggggcatcggcttctccagctgcatagtctgtctctttgtggggctgtattataatgtgatcatc

SEQ ID NO: 713302 - DNA, 120 bp, Artificial Sequence
  ENSG00000197106_8 (sequence is synthesized)
gggtggagcatcttctatttcttcaagtccttccagtacccgctgccctggagtgaatgtcctgtcgtcaggaatgggagcgtggcagtggtggaggcagagtgtgaaaagagctcagcc

SEQ ID NO: 713303 - DNA, 120 bp, Artificial Sequence
  ENSG00000197106_9 (sequence is synthesized)
actacctacttctggtaccgagaggccttggacatctctgactccatctcggagagtgggggcctcaactggaagatgaccctgtgcctcctcgtggcctggagcatcgtggggatggct

SEQ ID NO: 713304 - DNA, 120 bp, Artificial Sequence
  ENSG00000197106_10 (sequence is synthesized)
gtcgttaagggcatccagtcctcggggaaggtgatgtatttcagctccctcttcccctacgtggtgctggcctgcttcctggtccgggggctgttgctgcgaggggcagttgatggcatc

SEQ ID NO: 713305 - DNA, 120 bp, Artificial Sequence
  ENSG00000197106_11 (sequence is synthesized)
ctacacatgttcactcccaagctggacaagatgctggacccccaggtgtggcgggaggcagctacccaggtcttctttgccttgggcctgggctttggtggtgtcattgccttctccagc

SEQ ID NO: 713306 - DNA, 120 bp, Artificial Sequence
  ENSG00000197106_12 (sequence is synthesized)
tacaataagcaggacaacaactgccacttcgatgccgccctggtgtccttcatcaacttcttcacgtcagtgttggccaccctcgtggtgtttgctgtgctgggcttcaaggccaacatc

SEQ ID NO: 713307 - DNA, 120 bp, Artificial Sequence
  ENSG00000197106_13 (sequence is synthesized)
atgaatgagaagtgtgtggtcgagaatgctgagaaaatcctagggtaccttaacaccaacgtcctgagccgggacctcatcccaccccacgtcaacttctcccacctgaccacaaaggac

SEQ ID NO: 713308 - DNA, 120 bp, Artificial Sequence
  ENSG00000197106_14 (sequence is synthesized)
tacatggagatgtacaatgtcatcatgaccgtgaaggaggaccagttctcagccctgggccttgacccctgccttctggaggacgagctggacaagtccgtgcagggcacaggcctggcc

SEQ ID NO: 713309 - DNA, 120 bp, Artificial Sequence
  ENSG00000197106_15 (sequence is synthesized)
ttcatcgccttcactgaggccatgacgcacttccccgcctccccgttctggtccgtcatgttcttcttgatgcttatcaacctgggcctgggcagcatgatcgggaccatggcaggcatc

SEQ ID NO: 713310 - DNA, 120 bp, Artificial Sequence
  ENSG00000197106_16 (sequence is synthesized)
accacgcccatcatcgacaccttcaaggtgcccaaggagatgttcacagtgggctgctgtgtctttgcattcctcgtggggctgttgttcgtccagcgctccggaaactactttgtcacc

SEQ ID NO: 713311 - DNA, 120 bp, Artificial Sequence
  ENSG00000197106_17 (sequence is synthesized)
atgttcgatgactactcggccaccctgccactcactctcatcgtcatccttgagaacatcgctgtggcctggatttatggaaccaagaagttcatgcaggagctgacggagatgctgggc

SEQ ID NO: 713312 - DNA, 120 bp, Artificial Sequence
  ENSG00000197106_18 (sequence is synthesized)
ttccgcccctaccgcttctatttctacatgtggaagttcgtgtctccactatgcatggctgtgctcaccacagccagcatcatccagctgggggtcacgcccccgggctacagcgcctgg

SEQ ID NO: 713313 - DNA, 120 bp, Artificial Sequence
  ENSG00000197106_19 (sequence is synthesized)
atcaaggaggaggctgccgagcgctacctgtatttccccaactgggccatggcactcctgatcaccctcatcgtcgtggcgacgctgcccatccctgtggtgttcgtcctgcggcacttc

SEQ ID NO: 713314 - DNA, 120 bp, Artificial Sequence
  ENSG00000197106_20 (sequence is synthesized)
cacctgctctctgatggctccaacaccctctccgtgtcctacaagaagggccgcatgatgaaggacatctccaacctggaggagaacgatgagacccgcttcatcctcagcaaggtgccc

SEQ ID NO: 713315 - DNA, 120 bp, Artificial Sequence
  ENSG00000197106_21 (sequence is synthesized)
agtgaggcaccttcccccatgcccactcaccgttcctatctggggcccggcagcacatcacccctggagaccagcggtaaccccaatggacgctatgggagcggctacctgctggccagc

SEQ ID NO: 713316 - DNA, 120 bp, Artificial Sequence
  ENSG00000197106_22 (sequence is synthesized)
acccctgagtcggagctgtgaccactgcccaagccctgcccgcctctccccccacgctcaacctgcccacttgtccaggcctggcctctttcttgaggtggccaccaggcccaggccagg

SEQ ID NO: 713317 - DNA, 120 bp, Artificial Sequence
  ENSG00000197106_23 (sequence is synthesized)
ccctttgcccaagaagagagggtctgccctgcctcactcccctcttcagtcccagtagactctgctccctagccctgagcaggaggctgggagcagctctgtttcctaattcaggacccc

SEQ ID NO: 713318 - DNA, 120 bp, Artificial Sequence
  ENSG00000197106_24 (sequence is synthesized)
actcatctagccctccaagagcctccgccaaattgtagccatgtaattggaacaacccataaggcctgcttcccagtccatgggagattccaagtggccactgcaggagtcactcacctc

SEQ ID NO: 713319 - DNA, 120 bp, Artificial Sequence
  ENSG00000197106_25 (sequence is synthesized)
cctctctccctgtaacttgccacctgcagttcttagggctgtggggtcagatggtggtggtgagaggccttggggctggggaaggagagtggactttggctcactctgccatgagaacag

SEQ ID NO: 713320 - DNA, 120 bp, Artificial Sequence
  ENSG00000197106_26 (sequence is synthesized)
aggcggagggtgggagcaggtgtgccagggctcagggctcagacttgggagggcctaggcagaagccccaagttctgttttctgaggtatgtgctgcccttggcttcagcatgagccttg

SEQ ID NO: 713321 - DNA, 120 bp, Artificial Sequence
  ENSG00000197106_27 (sequence is synthesized)
gtagcagaaggtgaggaacctcctctgccctggtccctgggtggaatcttcccatgtccttggccctgcctggggtgtgtggtgtgtgctcctgcatcttgtctgggagtgcagtgaccg

SEQ ID NO: 713322 - DNA, 120 bp, Artificial Sequence
  ENSG00000197106_28 (sequence is synthesized)
ggaccagaaccttccccacctcaattagggcttagccatctccctgtccccagcacccctccccagcccacagtggtggcctctgcctctttcctggagagagaaggacagtgcacggag

SEQ ID NO: 713323 - DNA, 120 bp, Artificial Sequence
  ENSG00000197106_29 (sequence is synthesized)
aggtttccagagcacaaattgttggttcctagcacaaattagatggtttggagcacaatggtgaagcacactcccctccctcctcacctggggtccaatgttctgtctagtggcagcttt

SEQ ID NO: 713324 - DNA, 120 bp, Artificial Sequence
  ENSG00000197106_30 (sequence is synthesized)
tcccctggaacaggggtccctggagttcacaggcttatccccaggaagcctcactcctggggaaagacagataatttcactgcccctttgagccaccactcactctccttattacacaag

SEQ ID NO: 713325 - DNA, 120 bp, Artificial Sequence
  ENSG00000197106_31 (sequence is synthesized)
cacagccgcccagtgtgcacatcatgtgcagacaccttggaaacctttcccaagccttcctggcccacagtggccagtgccataggcagtgctgtggacagtagaggctgccaaaggcaa

SEQ ID NO: 713326 - DNA, 120 bp, Artificial Sequence
  ENSG00000197106_32 (sequence is synthesized)
gggctggtcttcaggatggaggccagcctgtgcagaaggctgcagctgacaacagcgaccccacctgccattaccttcagggcctcctctggaagagaacccattctcagagtgcagcca

SEQ ID NO: 713327 - DNA, 87 bp, Artificial Sequence
  ENSG00000197106_33 (sequence is synthesized)
ggcctcctctggaagagaacccattctcagagtgcagccagggaggaacctgacccaagagtaaatgtctgcagagagttggggagt

SEQ ID NO: 713328 - DNA, 120 bp, Artificial Sequence
  ENSG00000197106_34 (sequence is synthesized)
atgggttggggggtgggggtggatggatagatggatggatggatggacggatggggtgggggaaggaaggaaaggagggagaaaggagggaatactggctccatctttgagagctctggt

SEQ ID NO: 713329 - DNA, 120 bp, Artificial Sequence
  ENSG00000197106_35 (sequence is synthesized)
gggcagggcagaaacaggccacagtgctcaacccggacaccctcacgaagggtcgcaagtcactcttgtggctcagattgctcttaggacctggagggacagaccagaatcagggtcccc

SEQ ID NO: 713330 - DNA, 120 bp, Artificial Sequence
  ENSG00000197106_36 (sequence is synthesized)
tcctttacccctgagttccttactgttcccccaagcctgggagcagtctatcccccaaccctgccatctcccttactcatccctcttccacagcttcccctttctagccccctctgccct

SEQ ID NO: 713331 - DNA, 120 bp, Artificial Sequence
  ENSG00000197106_37 (sequence is synthesized)
acctgtctttcctgagtgtttgaggggagagagagacccacatctccccaaagagatgagcttttggggcacaacatcccaccgcagtccccctcacccgacaacacctcctacctggcc

SEQ ID NO: 713332 - DNA, 120 bp, Artificial Sequence
  ENSG00000197106_38 (sequence is synthesized)
ccttgccaaatcccaagcagaattagcaacaggaaaagcagagccccaggagagacactctactatatatactcttctatatattctgtttctattgtatattcactctgtacatgtggg

SEQ ID NO: 713333 - DNA, 120 bp, Artificial Sequence
  ENSG00000197106_39 (sequence is synthesized)
tgtaaatgctgttaaatgacaaacccaatattatactgtggctggtggactattttcatcctcagtgctgtacagatctattttcattgtatatttgatatatttttaattttgtagcgt

SEQ ID NO: 713334 - DNA, 120 bp, Artificial Sequence
  ENSG00000197106_40 (sequence is synthesized)
gtggctgggccaggccccagcgggaggggctgagctggggctgtgtgcttgctaggtgtgggcgcgctagtgctcgttgtagccttttgctgtgtcttcgctgtgtgttagacgtagggc

SEQ ID NO: 713335 - DNA, 120 bp, Artificial Sequence
  ENSG00000197106_41 (sequence is synthesized)
ctagagctcggggtgtgtgtgtgcgtgctgtgtgtatggtgtgcacatacgtgagtgtgggtgtgtgtagcgtgctgatctgtgactcccagtgttcaccaccttcctgaagaccacgct

SEQ ID NO: 713336 - DNA, 120 bp, Artificial Sequence
  ENSG00000197106_42 (sequence is synthesized)
ccctccccctgcctcctcctcctcctcttggctctattgggagcctcagggccggcagggtgcttcgggagccccctgctacggggaaaggcatgtgtttcttgctggtgactcattgcc

SEQ ID NO: 713337 - DNA, 120 bp, Artificial Sequence
  ENSG00000197106_43 (sequence is synthesized)
ttcacaccactgggtttgccagaaacagggaaggagggcgttaagggaaaaaaaaaatcctcaaatttatttaccagtcagcttcttgctgttcccagtagaatcgctagctcttctcca

SEQ ID NO: 713338 - DNA, 120 bp, Artificial Sequence
  ENSG00000197106_44 (sequence is synthesized)
gaggaaaagtactaggattcttaagatggcgagaccccaagagggatctcatagcactgctgcatttgccgttgacgcagtcctgacagtgtttgaaaagggccgcctgccccctcccca

SEQ ID NO: 713339 - DNA, 120 bp, Artificial Sequence
  ENSG00000197106_45 (sequence is synthesized)
ctgtgcttttgatgcctttggagtcaaaggcaggtggggtcacctgatgagctaagatccagccccagaatcctggaggagcaggaggtagcaggagaggaccaggtccccaagtccctt

SEQ ID NO: 713340 - DNA, 120 bp, Artificial Sequence
  ENSG00000197106_46 (sequence is synthesized)
cacagggtccccacccccactggctttggtgctgtccacacagtgcccaccagaaggcagagggaactccagggcagggatgtgcctgaaagagtcaacagtcccctgatcccctacctc

SEQ ID NO: 713341 - DNA, 120 bp, Artificial Sequence
  ENSG00000197106_47 (sequence is synthesized)
tgcctgccctccagccccatcaccagcttcttgctcagggagacttccgccctcctcactgaggcaacatgaagcccgaggcccagatgggggctgaacaggtagggcacatcagttaat

SEQ ID NO: 713342 - DNA, 120 bp, Artificial Sequence
  ENSG00000197106_48 (sequence is synthesized)
gccagtgaggtcagcttctgccctccagcaatacatgtgcaggggttgctgctttcccagtgccaggagaacccccgctccgagtcagcctgtgtgggtcatgaggctggggcccaggag

SEQ ID NO: 713343 - DNA, 120 bp, Artificial Sequence
  ENSG00000197106_49 (sequence is synthesized)
acacggtcccaggcactgcacaggcctgcagtattaccaggcggaggggctgcttttctgcccttcctcacccccacgccccaccccactcccccagagtactccccactgtgaaaagag

SEQ ID NO: 713344 - DNA, 120 bp, Artificial Sequence
  ENSG00000197106_50 (sequence is synthesized)
ctggaaactaaactggttagaatgaacctggctccctgagcatccctggatccttcaaataggccctgagatgtgaggtctgctgcttcactggggcccgatgactttggctgggggagg

SEQ ID NO: 713345 - DNA, 120 bp, Artificial Sequence
  ENSG00000197106_51 (sequence is synthesized)
gggcctagggcctcttctcattgaaagctctgctttatacagacccaagcatacacaccaggccgtcactttgggttctggcataagttcagaacaattcaagtccatgtgtcccatggc

SEQ ID NO: 713346 - DNA, 120 bp, Artificial Sequence
  ENSG00000197106_52 (sequence is synthesized)
tggtcagagccctgggtcaaaaccactcagcccaggggaggggatgaggcattgtcaccctagacccctcttcctctctcccccaccatagtgtgcaataaagtgtctgttcttaccaaa

SEQ ID NO: 713347 - DNA, 120 bp, Artificial Sequence
  ENSG00000197106_53 (sequence is synthesized)
ggtgcccaaggagatgttcacaggtaactcctccctgcccccatgcccaggctctgcaggctgcccttgtggacaacaattccgttctggcttctgactgggtccttcatgaccccacac

SEQ ID NO: 713348 - DNA, 120 bp, Artificial Sequence
  ENSG00000197106_54 (sequence is synthesized)
ccagaaggctccaccccacactgggacacagctggagcctggctgtgccactcagtgattagcactcacaagccaggaagagaaagctacttggaaatctggagcaaacatgagccggga

SEQ ID NO: 713349 - DNA, 120 bp, Artificial Sequence
  ENSG00000197110_0 (sequence is synthesized)
ctgcattccctcagctccctttctctctgtgacacagacatgaccggggactgcatgccagtgctggtgctgatggccgcagtgctgaccgtgactggagcagttcctgtcgccaggctc

SEQ ID NO: 713350 - DNA, 120 bp, Artificial Sequence
  ENSG00000197110_1 (sequence is synthesized)
cgcggggctctcccggatgcaaggggctgccacatagcccagttcaagtccctgtctccacaggagctgcaggcctttaagagggccaaagatgccttagaagagtcgcttctgctgaag

SEQ ID NO: 713351 - DNA, 120 bp, Artificial Sequence
  ENSG00000197110_2 (sequence is synthesized)
ttctggaggccaccgctgacactgacccagccctgggggatgtcttggaccagccccttcacaccctgcaccatatcctctcccagctccgggcctgtatccagcctcagcccacggcag

SEQ ID NO: 713352 - DNA, 120 bp, Artificial Sequence
  ENSG00000197110_3 (sequence is synthesized)
ggcccaggacccggggccgcctccaccattggctgcaccggctccaggaggccccaaaaaaggagtcccctggctgcctcgaggcctctgtcaccttcaacctcttccgcctcctcacgc

SEQ ID NO: 713353 - DNA, 120 bp, Artificial Sequence
  ENSG00000197110_4 (sequence is synthesized)
gagacctgaattgtgttgccagcggggacctgtgtgtctgacccttccgccagtcatgcaacctgagattttatttataaattagccacttggcttaatttattgtcacccagtcgctat

SEQ ID NO: 713354 - DNA, 120 bp, Artificial Sequence
  ENSG00000197111_0 (sequence is synthesized)
cttccccttcccgcccgctccccttttcccctcagtcgcctcgcgcctgcagtttttggctttcacccccaaccagtgaccaaagacttgaccactcaaagtccagctccccagaacact

SEQ ID NO: 713355 - DNA, 120 bp, Artificial Sequence
  ENSG00000197111_1 (sequence is synthesized)
gctcgacatggacaccggtgtgattgaaggtggattaaatgtcactctcaccatccggctacttatgcatggaaaggaagttggcagtatcatcggaaagaaaggagaatcagttaagaa

SEQ ID NO: 713356 - DNA, 120 bp, Artificial Sequence
  ENSG00000197111_2 (sequence is synthesized)
gatgcgcgaggagagtggtgcacgtatcaacatctcagaagggaattgtcctgagagaattatcactttggctggacccactaatgccatcttcaaagcctttgctatgatcattgacaa

SEQ ID NO: 713357 - DNA, 120 bp, Artificial Sequence
  ENSG00000197111_3 (sequence is synthesized)
actggaagaggacataagcagctctatgaccaatagcacagctgccagtagacccccggtcaccctgaggctggtggtccctgctagtcagtgtggctctctcattggaaaaggtggatg

SEQ ID NO: 713358 - DNA, 120 bp, Artificial Sequence
  ENSG00000197111_4 (sequence is synthesized)
caagatcaaggaaatacgagagagtacaggggctcaggtccaggtggcaggggatatgctacccaactcaactgagcgggccatcactattgctggcattccacaatccatcattgagtg

SEQ ID NO: 713359 - DNA, 120 bp, Artificial Sequence
  ENSG00000197111_5 (sequence is synthesized)
tgtcaaacagatctgcgtggtcatgttggagtcccccccgaagggcgtgaccatcccgtaccggcccaagccgtccagctctccggtcatctttgcaggtggtcaggacaggtacagcac

SEQ ID NO: 713360 - DNA, 120 bp, Artificial Sequence
  ENSG00000197111_6 (sequence is synthesized)
gctttccccacaccaccccgtccatgtgcctcaaccctgacctggagggaccacctctagaggcctataccattcaaggacagtatgccattccacagccagatttgaccaagctgcacc

SEQ ID NO: 713361 - DNA, 120 bp, Artificial Sequence
  ENSG00000197111_7 (sequence is synthesized)
agttggcaatgcaacagtctcattttcccatgacgcatggcaacaccggattcagtggcattgaatccagctctccagaggtgaaaggctattgggcaggtttggatgcatctgctcaga

SEQ ID NO: 713362 - DNA, 120 bp, Artificial Sequence
  ENSG00000197111_8 (sequence is synthesized)
ctacttctcatgaactcaccattccaaacgatttgattggctgcataatcgggcgtcaaggcgccaaaatcaatgagatccgtcagatgtctggggcgcagatcaaaattgcgaacccag

SEQ ID NO: 713363 - DNA, 120 bp, Artificial Sequence
  ENSG00000197111_9 (sequence is synthesized)
tggaaggatctactgataggcaggttaccatcactggatctgctgccagcattagcctggctcaatatctaatcaatgtcaggctttcctcggagacgggtggcatggggagcagctaga

SEQ ID NO: 713364 - DNA, 120 bp, Artificial Sequence
  ENSG00000197111_10 (sequence is synthesized)
acaatgcagattcatccataatccctttctgctgttcaccaccacccatgatccatctgtgtagtttctgaacagtcagcgattccaggttttaaatagtttgtaaattttcagtttcta

SEQ ID NO: 713365 - DNA, 120 bp, Artificial Sequence
  ENSG00000197111_11 (sequence is synthesized)
cacactttatcatccactcgtgattttttaattaaagcgttttaattcctttctctgttcagctgttgatgctgagatccatatttagttttataagcttctccctggtttttttttttt

SEQ ID NO: 713366 - DNA, 80 bp, Artificial Sequence
  ENSG00000197111_12 (sequence is synthesized)
gcccgccctccgcccgcccgcccgccctccgccgccctccacccgccccggggtctctttcccccttcctcctcctcctc

SEQ ID NO: 713367 - DNA, 120 bp, Artificial Sequence
  ENSG00000197111_13 (sequence is synthesized)
catggaaatgtaagagtggaatattaatacatttcagtttagttctgtaatgtcaggaatttttcaaaaaaattaaaagatggactggagctttttctttgtgaatagaaactggatgcc

SEQ ID NO: 713368 - DNA, 120 bp, Artificial Sequence
  ENSG00000197111_14 (sequence is synthesized)
ggttttattcctcttgtcttgctgttatttttgtaccttttatccctcaaaggacccttcttgggttttgaatggaagcctttattccggttaagatgttttcttctattttaccacttc

SEQ ID NO: 713369 - DNA, 120 bp, Artificial Sequence
  ENSG00000197111_15 (sequence is synthesized)
catctttttttgtggccctcgatcctatttttccctgactccatgcttggttggcccttataaaacttgtgcccaaaagattgaggattagactttccgaggacttacctgtcctagggg

SEQ ID NO: 713370 - DNA, 120 bp, Artificial Sequence
  ENSG00000197111_16 (sequence is synthesized)
agtaggcaagcacttccactagggagggggtgggggaaaggaatgacacatgacatacatggcatacacattaagcagttgatcatatgtctgactgggttccagtttcttgggaatgtt

SEQ ID NO: 713371 - DNA, 120 bp, Artificial Sequence
  ENSG00000197111_17 (sequence is synthesized)
ggtccccttgttcaggcttgcatattttaaactaaaaatttcagtctattgtttttagtaacttcatttatagtcctccataacaagttagaaggatgtatctgctaccatttattccta

SEQ ID NO: 713372 - DNA, 120 bp, Artificial Sequence
  ENSG00000197111_18 (sequence is synthesized)
taattttagaaagttggggcttgacattatactcatttagtgagagtagatgcaaaaaagtggaggggcaggagaacttctccagacacctcagataaagtccggagcccaaggctttat

SEQ ID NO: 713373 - DNA, 120 bp, Artificial Sequence
  ENSG00000197111_19 (sequence is synthesized)
cttaaccatgtatggtaccccattcattcatcaagaaaaccctcaacagctgggcctgcatggagtgttatatttcaaggtttttcacaggggttacagtaggacagtccccaccccaat

SEQ ID NO: 713374 - DNA, 120 bp, Artificial Sequence
  ENSG00000197111_20 (sequence is synthesized)
caggcaccaggataaaagcagggacttaaacagcaccccggttcttcagcctgagccatcacatgctatcagtctcctaacctccccctgggccttaagacagggcttgggcagagaaga

SEQ ID NO: 713375 - DNA, 120 bp, Artificial Sequence
  ENSG00000197111_21 (sequence is synthesized)
taaatggtgggacaaaaaaatgagttacattgccacctgagaaacctcagaggggaggacccagccttagcctccctcctcccaagtgcaaaatgtgtaaacagagtaaacggaacagaa

SEQ ID NO: 713376 - DNA, 120 bp, Artificial Sequence
  ENSG00000197111_22 (sequence is synthesized)
aagtgcagtctaagtggttttctctcctgcccctcccaccgcccctccccccaccccctattatttggggataaagaatataaagacaaccctggcttttctattgccttgttgcttgct

SEQ ID NO: 713377 - DNA, 120 bp, Artificial Sequence
  ENSG00000197111_23 (sequence is synthesized)
gaatataaggaatggggtggggcaggaaggggcttgcccttagccacagctctacggctgtgcctcattcatttccacagctgccagtgtccctagagtttatcaggtgaattggtcagg

SEQ ID NO: 713378 - DNA, 120 bp, Artificial Sequence
  ENSG00000197111_24 (sequence is synthesized)
ggatcagtctccctcgagcctgacttacggctgggacagccccatctttctgttgattatgtggcgcatatatatatatatatgtatatatatataatttatataaatatttctctatgt

SEQ ID NO: 713379 - DNA, 120 bp, Artificial Sequence
  ENSG00000197111_25 (sequence is synthesized)
accttcccagcctcaggcgatcctctcatctcagcctcccaaggagccgggactgcaggctcccaccaccacacccaaatttttgtatttttttgtaaaaatggtgttttgccatgtggc

SEQ ID NO: 713380 - DNA, 120 bp, Artificial Sequence
  ENSG00000197111_26 (sequence is synthesized)
ctcctgagctcaagcaatccacccacctcaggctcccagtgttattactacaggcttgagccagcacacttgcttgcctgcagcgtcatttttcttgaccagacttataaacaacaagga

SEQ ID NO: 713381 - DNA, 120 bp, Artificial Sequence
  ENSG00000197111_27 (sequence is synthesized)
cttgcttgcctgcagcgtcatttttcttgaccagacttataaacaacaaggagaaaaataggaagatgtattgggaaatagatgtaattctacatctttttttttttttttgagacaggg

SEQ ID NO: 713382 - DNA, 120 bp, Artificial Sequence
  ENSG00000197111_28 (sequence is synthesized)
catggcttactgcaacctcgacttctgggctcatgtaaccctcctacctcaagcctcctgagtacctggtaccataggcgcgctccacaatgcccggctaatttttcttctttctgttgt

SEQ ID NO: 713383 - DNA, 120 bp, Artificial Sequence
  ENSG00000197111_29 (sequence is synthesized)
ttgttgtagagacgagtctcactgttttgctcaggctggtctccaactcctgagcttccgatgattcgactgccttggtctcccaaagtgctcggattacagatgtgagccactgtgcct

SEQ ID NO: 713384 - DNA, 120 bp, Artificial Sequence
  ENSG00000197111_30 (sequence is synthesized)
cctacttcctgtttaactatggaagttacgttgaattatggaagattttaattgtatctagatgttactgaatttggtgttggaatgaaactcgaatggctgcttgagtttttgggagcg

SEQ ID NO: 713385 - DNA, 120 bp, Artificial Sequence
  ENSG00000197111_31 (sequence is synthesized)
tatcgtacatggcacgacagagatcttaattttgttaattgctatattcgaagcacttctcatggtacctggcacatagaatggccttgatgtaaatattttttcagtaacataatgaaa

SEQ ID NO: 713386 - DNA, 120 bp, Artificial Sequence
  ENSG00000197111_32 (sequence is synthesized)
ggtgggtgatacttgtggggcttttgcttcgcccagagaactatcattagttgaaaggcaactatttagaaggaccttttgcttgagagtaggttaaatttaggctgttattcacgctta

SEQ ID NO: 713387 - DNA, 120 bp, Artificial Sequence
  ENSG00000197111_33 (sequence is synthesized)
tatttttaactctaattcactaaacagtcctatctggaataagggaagagtgggacaaagaacaaaaagggaagattggaaatggataaatatctactagagttttaggctctgaaattg

SEQ ID NO: 713388 - DNA, 120 bp, Artificial Sequence
  ENSG00000197111_34 (sequence is synthesized)
gtgcaagagagaggccagtcccaaggtctcagcttgacatctgtttaaaacaaacttcgttatccagcatcctgctggtttaaacttgcctgtctactatggctaagcccaaggaggtaa

SEQ ID NO: 713389 - DNA, 120 bp, Artificial Sequence
  ENSG00000197111_35 (sequence is synthesized)
tgtgtttgttaacgtggttttcatttggggtcagttattctaaaagaaaaaaaaagccctggaaggtttgggggtgaggtttggggatgcttgtcaggcaaagggtaggctgatatttct

SEQ ID NO: 713390 - DNA, 120 bp, Artificial Sequence
  ENSG00000197111_36 (sequence is synthesized)
ccacaccaccccgtccatgtgcctcaaccctgacctggagggaccacctctagagttgaccaagctgcaccagttggcaatgcaacagtctcattttcccatgacgcatggcaacaccgg

SEQ ID NO: 713391 - DNA, 120 bp, Artificial Sequence
  ENSG00000197111_37 (sequence is synthesized)
ccctcctcccaggcagcctccgtcacgatccctgatcacctcagcatcaacctctctcaaccctccaccccttcttcttcttcctcctccaccaccaccccctcgctcgccacagcgggg

SEQ ID NO: 713392 - DNA, 120 bp, Artificial Sequence
  ENSG00000197111_38 (sequence is synthesized)
acctccgacgcaccctccagcctccccaaccctcttccgaccgccccttgtgtctccagtctgcttggcatgaaacccatccctctcctggctctaaatgttgtgtctgctgctaagggt

SEQ ID NO: 713393 - DNA, 120 bp, Artificial Sequence
  ENSG00000197111_39 (sequence is synthesized)
ggcacctcctccagtattattttgttcattttgttttcctttgttaacattggtgagaatgaaactattgtgagcttgttaccgtttcctttttactactttgggggataactgggtggg

SEQ ID NO: 713394 - DNA, 120 bp, Artificial Sequence
  ENSG00000197111_40 (sequence is synthesized)
ggtgggggagtggtaacccttgtttaggtttaggccatttcagctgagtgcctgtttcagggtctgacttgaattctttatctagagccacagttttctcttctttcttgtttgttactt

SEQ ID NO: 713395 - DNA, 120 bp, Artificial Sequence
  ENSG00000197111_41 (sequence is synthesized)
ttctttgtagctttattctgccttgcaatataacaatgtgttaggctctgtgttaatgaataaaagctgcttcgttaacttttttttttttttttaagaattatttaatggttaagctat

SEQ ID NO: 713396 - DNA, 120 bp, Artificial Sequence
  ENSG00000197111_42 (sequence is synthesized)
cagcaggccttcttggccatatttgtgtttctagctgtaataaagttggcgcagtaagaaccttagtacactgtgtgctgtgaagggtaaagggttgggggcttgtgacttgtggctatt

SEQ ID NO: 713397 - DNA, 120 bp, Artificial Sequence
  ENSG00000197111_43 (sequence is synthesized)
cagctaggaagcctgtataactgacatgggctttttgaatcccaagtgaattttatagtcgtttgtcaatatttccacaaagagataacgagtctgtggcagtttagatcctgaaggtcc

SEQ ID NO: 713398 - DNA, 120 bp, Artificial Sequence
  ENSG00000197111_44 (sequence is synthesized)
tctgtaattggcaacaagcttcactagtgaggaagtttatctgacttctcagatggccttaccttgccagcagcagctaacaaggtgttcatcccaggattcctctggtgaatggttacc

SEQ ID NO: 713399 - DNA, 120 bp, Artificial Sequence
  ENSG00000197111_45 (sequence is synthesized)
atgaggatctcttccaagtcatacattcaaagaacatacttctttacccagaatgaaggggaggggcaaagtgggataagtctaataaaattaggcagcttctgtctgcattcctctgaa

SEQ ID NO: 713400 - DNA, 120 bp, Artificial Sequence
  ENSG00000197111_46 (sequence is synthesized)
aggtgtttctgaattctttgaagctttttctgctgaaggacaagtggtgcacgttcagcagtttccttagaaccattgccaattgaaagaaccttgttcatcctgagagtcagcggaaac

SEQ ID NO: 713401 - DNA, 120 bp, Artificial Sequence
  ENSG00000197111_47 (sequence is synthesized)
cctgtcattaatgagaggaactggaaagttgccttctatactgtgtaacagaacctgagctgtatattttgtcatgcagttgtgcttggtgtgtatataagtctgacatactgtcattta

SEQ ID NO: 713402 - DNA, 120 bp, Artificial Sequence
  ENSG00000197111_48 (sequence is synthesized)
agacattggtcctttttgaggataccacactcccttgcccttgcttccatcccccatccctaataggctgggctttgcaggaaatggcatgaaatcagctcttctgagtgtacagaagaa

SEQ ID NO: 713403 - DNA, 120 bp, Artificial Sequence
  ENSG00000197111_49 (sequence is synthesized)
cctttcgagcattatttctacacccttctcccccactctttcctctttggaggcttccaagttagtgatgaatcccaacagctaatgatgctgggtttccagtttatttccttctgttag

SEQ ID NO: 713404 - DNA, 120 bp, Artificial Sequence
  ENSG00000197111_50 (sequence is synthesized)
gaaccgtttattttttcccccctctttctagtcgagggaagggggggctttttttcttaagtggaaaatgcttggataaccgaggggagagggggctgcggagttaaagaaagggtagac

SEQ ID NO: 713405 - DNA, 120 bp, Artificial Sequence
  ENSG00000197111_51 (sequence is synthesized)
gggctcccagttgccgagttaatcaggacgtttctcggggtaacgaatttttaaattacaaaatgcctgccgatgtaatcccagaccgagctatttatggaaggggtattggacagcagt

SEQ ID NO: 713406 - DNA, 120 bp, Artificial Sequence
  ENSG00000197111_52 (sequence is synthesized)
gttagcagctggattgctggaatggggtacctttatcttgacctagtcaggagggaaattcgacaaatttcttggattacttggtttggagttagaaatgcatctttgtactttacctca

SEQ ID NO: 713407 - DNA, 120 bp, Artificial Sequence
  ENSG00000197111_53 (sequence is synthesized)
ataggtttcctgttttgttttttttttttttgccttttcgaagttgcgttattgtgatatttgtaaagggcttcctattacatctgcaagaggtttttggctttcacccccaaccagtga

SEQ ID NO: 713408 - DNA, 120 bp, Artificial Sequence
  ENSG00000197111_54 (sequence is synthesized)
ggggcttttctgtataaggaataacttgtccgatagggttaggatgagaccaccaaactcattttcacttgtatcttaacaggcattgaatccagctctccagaggtgaaaggctattgg

SEQ ID NO: 713409 - DNA, 120 bp, Artificial Sequence
  ENSG00000197111_55 (sequence is synthesized)
ggtaatgattaaaaaaaaaaaaatctgtagtattctactgttatattaataaactggtgggagtcttgtttcactgcccatgaaccataccagcaacatgcacatggcagagaggagctg

SEQ ID NO: 713410 - DNA, 120 bp, Artificial Sequence
  ENSG00000197111_56 (sequence is synthesized)
agagagcaaaggggtgggcctggagcccccgagggtcccttgatggatctggccaacccccttctaaaaatgatgagacagcagccatagctgagatcaggactaagcttgagtgttagc

SEQ ID NO: 713411 - DNA, 120 bp, Artificial Sequence
  ENSG00000197111_57 (sequence is synthesized)
cagctggcctggttcagtccaggtgttgttaaagatgggtacgggtatttgctgatgggatttttttttctttctttttctttggaaaacaaaatgaaagccagaacaaaattattgaac

SEQ ID NO: 713412 - DNA, 120 bp, Artificial Sequence
  ENSG00000197111_58 (sequence is synthesized)
aaaagacagggactaaatctggagaaatgaagtcccctcacctgactgccatttcattctatctgaccttccagtctaggttaggagaatagggggtggaggggattaatctgatacagg

SEQ ID NO: 713413 - DNA, 120 bp, Artificial Sequence
  ENSG00000197111_59 (sequence is synthesized)
tatatttaaagcaactctgcatgtgtgccagaagtccatggtacccattaacaggcataatattggcactggtgctagtgagcatcaggtgagatacaatttggaacacaacaggaaagg

SEQ ID NO: 713414 - DNA, 120 bp, Artificial Sequence
  ENSG00000197114_0 (sequence is synthesized)
gaaaagggggcgccgggccgctctagccggtgaggccggcgggctctctgtggctgcggctgggaaaccgcgcggaggaggtgcccggccggggaccagccctggtccagcgcctccctc

SEQ ID NO: 713415 - DNA, 120 bp, Artificial Sequence
  ENSG00000197114_1 (sequence is synthesized)
tctcagcatggacgaggagagcctggagtcggccttgcagacctaccgtgcgcagctgcagcaggtggagctggccttgggcgccggcctggattcgtctgagcaggctgacctgcgcca

SEQ ID NO: 713416 - DNA, 120 bp, Artificial Sequence
  ENSG00000197114_2 (sequence is synthesized)
gctgcagggggacctgaaggagctcatcgagctcaccgaggccagcctggtgtctgtcaggaagagcagcttgttggccgcgctggacgaagagcgcccgggccgccaggaagatgctga

SEQ ID NO: 713417 - DNA, 120 bp, Artificial Sequence
  ENSG00000197114_3 (sequence is synthesized)
gtaccaggctttccgggaggccatcactgaggcggtggaggcaccagcagcggcccgtgggtccggatcagagaccgttcctaaagcagaggcggggccagaatctgcggcaggtgggca

SEQ ID NO: 713418 - DNA, 120 bp, Artificial Sequence
  ENSG00000197114_4 (sequence is synthesized)
ggaggaggaagagggagaggacgaggaagagctgagtgggacaaaggtgagcgcgccctactacagctcctggggcactctggagtatcacaacgccatggtggtgggaacggaagaggc

SEQ ID NO: 713419 - DNA, 120 bp, Artificial Sequence
  ENSG00000197114_5 (sequence is synthesized)
ggaggatggctcggcgggtgtccgtgtgctttacctgtaccccactcacaagtctctgaagccgtgcccgttcttcctggagggaaagtgccgctttaaggagaactgcaggttctccca

SEQ ID NO: 713420 - DNA, 120 bp, Artificial Sequence
  ENSG00000197114_6 (sequence is synthesized)
tgggcaggtggtctctctggatgagctgcgccccttccaggacccagacctgagctccctgcaggccggctctgcgtgtctggccaagcaccaggatggcctctggcacgcagcacgcat

SEQ ID NO: 713421 - DNA, 120 bp, Artificial Sequence
  ENSG00000197114_7 (sequence is synthesized)
caccgatgtggacaacggctactacacagtcaagtttgactcgctgctgctgagggaggccgtggtggagggggacggcatcctgcccccactgcgcacagaggccacagagtccgactc

SEQ ID NO: 713422 - DNA, 120 bp, Artificial Sequence
  ENSG00000197114_8 (sequence is synthesized)
agctatgccagagtggtggggtcggacgccgtggactctgcacagtcctctgccctctgtccgtctcttgcagtggtggggtcagatgctgtggactctgggacctgcagctctgccttt

SEQ ID NO: 713423 - DNA, 120 bp, Artificial Sequence
  ENSG00000197114_9 (sequence is synthesized)
gctggctgggaggtgcacacgcgaggtataggctccagactcctcaccaagatgggctatgagtttggcaagggtttgggccgacacgcggaaggccgggtggagcccatccatgctgtg

SEQ ID NO: 713424 - DNA, 120 bp, Artificial Sequence
  ENSG00000197114_10 (sequence is synthesized)
gtgttgcctcgagggaagtcgctggaccagtgtgtggagaccctgcagaagcagaccagggttggcaaggctggcaccaacaagccccccaggtgccggggaagaggggccaggcctggg

SEQ ID NO: 713425 - DNA, 120 bp, Artificial Sequence
  ENSG00000197114_11 (sequence is synthesized)
ggccgcccagctcctcggaatgtgtttgacttcctcaatgaaaagctgcaaggtcaggctcctggggccctagaagccggggcggccccagcggggaggaggagcaaggacatgtaccat

SEQ ID NO: 713426 - DNA, 120 bp, Artificial Sequence
  ENSG00000197114_12 (sequence is synthesized)
gccagcaagagtgccaagcgggccctgagcctgcggctcttccagactgaggagaagatcgagcgaacccagcgggacatcaggagcatccaggaggctctcgcccgcaacgctggccgg

SEQ ID NO: 713427 - DNA, 120 bp, Artificial Sequence
  ENSG00000197114_13 (sequence is synthesized)
catagcgtggcgtcagcccagctgcaggagaagctggcaggagcccagcgccagctggggcagctccgggctcaggaagccggcctgcagcaggagcagaggaaggcagacacccacaag

SEQ ID NO: 713428 - DNA, 120 bp, Artificial Sequence
  ENSG00000197114_14 (sequence is synthesized)
aagatgactgagttctagagaccccacaagcactatggacgaagcgtgggaccccagcacgggctgccctcaggaagaccagtgttgcccgaggaggggccggcctgctggcctggggcg

SEQ ID NO: 713429 - DNA, 120 bp, Artificial Sequence
  ENSG00000197114_15 (sequence is synthesized)
tgcagacactgctgagtggagacagagctgcggggtcccatctggacacttacttgcccacctgccagtgtcttgggcatttccttggcaaggacattaaagtgatttcatcacagtgtc

SEQ ID NO: 713430 - DNA, 120 bp, Artificial Sequence
  ENSG00000197114_16 (sequence is synthesized)
ggaggaagtgccgatcggctgctggggcgaaaagggggcgccgggccgctctagccggtgaggccggcgggctctctgtggctgcggctgggaaaccgcgcggaggagccctggtccagc

SEQ ID NO: 713431 - DNA, 120 bp, Artificial Sequence
  ENSG00000197114_17 (sequence is synthesized)
tgagtacaagctgccctggagaagtgggcaggctgctgcagcatagcccaggtccagcagccatcaggttcccggggtcccgcagccatcgggttcccagggtcccgcagccacagcact

SEQ ID NO: 713432 - DNA, 120 bp, Artificial Sequence
  ENSG00000197114_18 (sequence is synthesized)
gccatccccgtgctcctcagattcccggggtcccgcggccacagcactgccatccccgtgctcctcagattcccagggtcctacggccacagcactgccatctccgtgctcctcagattc

SEQ ID NO: 713433 - DNA, 120 bp, Artificial Sequence
  ENSG00000197114_19 (sequence is synthesized)
ccggggtcccgtggccacagcactgccatccccgtgctcctcagattcccggggtcccgcagccacagcactgccatccccgtgcctccgcaggtttgggccgacacgcggaaggccggg

SEQ ID NO: 713434 - DNA, 120 bp, Artificial Sequence
  ENSG00000197114_20 (sequence is synthesized)
cgggaatgggaactggtgggcagtgtccagctctccagaggggtgtgtgtatgcgtgtgcgtgtgtgtgtatatatgtgggaggtcacctgacccaagcatggcgggctgagtccaggag

SEQ ID NO: 713435 - DNA, 120 bp, Artificial Sequence
  ENSG00000197114_21 (sequence is synthesized)
gggtctgcatgttggaggtgtacccagggatcagtgatggtggtttctgaagccccatgtccctggtgaaggaggactgaaccaaggactctgtgagggcaggtgaggcgctcacagcct

SEQ ID NO: 713436 - DNA, 120 bp, Artificial Sequence
  ENSG00000197114_22 (sequence is synthesized)
cgcgaaggtggagaagggcaggggcaggagagggctgcggaggaggggccacggtgcagcaggccgtggggactgccatgcactctgcctggtgtcacatgcccacagcagcctcggtga

SEQ ID NO: 713437 - DNA, 120 bp, Artificial Sequence
  ENSG00000197114_23 (sequence is synthesized)
gactccagctatgccagaggtatggcagcagctgcggagcccaggagccaggaaggtggggtcaccctgagaggctcctggccggtgagggcaccaaccatctaaccaaactattggaga

SEQ ID NO: 713438 - DNA, 120 bp, Artificial Sequence
  ENSG00000197114_24 (sequence is synthesized)
gtgtgtgactgcggcgagggtgccacctgtgcctgaggaggccgtgtgggtaggggtagatccgtggcggcctttatcttcaaggagtgtgggtgcaacagctacagtctcattgatggg

SEQ ID NO: 713439 - DNA, 120 bp, Artificial Sequence
  ENSG00000197114_25 (sequence is synthesized)
aggccatggtcgtggctgtggccatgggagaggaggggcctggagttgccgaggaagtcacagaaaatgaccaactgatggggcctggagtgcaggaggggcagctcctctgcatggctt

SEQ ID NO: 713440 - DNA, 80 bp, Artificial Sequence
  ENSG00000197119_0 (sequence is synthesized)
agcgagtcagctgccgccgagggaccagcgcgggtctagctgctgccgccatccccaccatccctgaccgcgcctgcccg

SEQ ID NO: 713441 - DNA, 120 bp, Artificial Sequence
  ENSG00000197119_1 (sequence is synthesized)
ccgcgcgctcggggaccccgacggcgcccagcccggcgaggggcctcagggggaggacgaggaggaaaggcggcctcgccggggacccggccatggcgctggacttcttggctggatgcg

SEQ ID NO: 713442 - DNA, 120 bp, Artificial Sequence
  ENSG00000197119_2 (sequence is synthesized)
cggggggtgtggcaggcgtgcttgtgggacacccgtttgacacggtcaaggtacggcttcaggtccagagcgtggagaagcctcagtaccgcgggacgttgcactgcttcaagtccatca

SEQ ID NO: 713443 - DNA, 120 bp, Artificial Sequence
  ENSG00000197119_3 (sequence is synthesized)
tcaagcaagagagcgtgctgggcctgtacaagggcctgggctcgccgctcatggggctcaccttcatcaacgcgctggtgttcggggtgcagggcaacaccctccgggccctgggccacg

SEQ ID NO: 713444 - DNA, 120 bp, Artificial Sequence
  ENSG00000197119_4 (sequence is synthesized)
actcgcccctcaaccagttcctggcaggtgcggcggcgggcgccatccagtgcgtcatctgctgccccatggagctggccaagacgcggctgcagctgcaggacgcgggcccagcgcgca

SEQ ID NO: 713445 - DNA, 120 bp, Artificial Sequence
  ENSG00000197119_5 (sequence is synthesized)
cctacaagggctcgctggactgcctcgcgcagatctacgggcacgagggtctgcgtggcgtcaaccggggcatggtgtccacgttgctgcgtgagacgcccagcttcggcgtctacttcc

SEQ ID NO: 713446 - DNA, 120 bp, Artificial Sequence
  ENSG00000197119_6 (sequence is synthesized)
tcacctatgacgctctcacgcgggcgctgggctgcgagccgggcgaccgcctgctggtgcccaagctgctgttggcgggcggtacgtcaggcatcgtgtcctggctctctacctatcctg

SEQ ID NO: 713447 - DNA, 120 bp, Artificial Sequence
  ENSG00000197119_7 (sequence is synthesized)
tggacgtggtcaagtcgcggctgcaggcggacggactgcggggcgccccgcgctaccgcggcatcctggactgcgtgcaccagagctaccgcgccgagggctggcgcgtcttcacacggg

SEQ ID NO: 713448 - DNA, 120 bp, Artificial Sequence
  ENSG00000197119_8 (sequence is synthesized)
ggctggcgtccacgctgctgcgcgccttccccgtcaacgctgccaccttcgccaccgtcacggtggtgctcacctacgcgcgcggcgaggaggccgggcccgagggcgaggctgtgcccg

SEQ ID NO: 713449 - DNA, 120 bp, Artificial Sequence
  ENSG00000197119_9 (sequence is synthesized)
gggcctgccctggcgcagccctccagcctgtgacgctcaccccgccctccttccccagggctccttctcagaaacctgggacataaattggcccctgagtcgattgccctgcttcctgct

SEQ ID NO: 713450 - DNA, 120 bp, Artificial Sequence
  ENSG00000197119_10 (sequence is synthesized)
gggatgctgcgagctgtggagtctatcagacgtgggctgaattttgctgatcagctgggtagttttggccgagaactgcacttgcctcagtgttctcatctatgaaataaggaccctcat

SEQ ID NO: 713451 - DNA, 120 bp, Artificial Sequence
  ENSG00000197119_11 (sequence is synthesized)
gcccacactgtagagtcacgaagctcagagattattcccagcagcagccagcacctggcctggctgaggccattgcaccgttatcctggaaactgaggcagacactccagcccctttctg

SEQ ID NO: 713452 - DNA, 120 bp, Artificial Sequence
  ENSG00000197119_12 (sequence is synthesized)
ggatcctggccacgtcattgtgctcctgccctgcaggctggctcccgggggtctctgatggccaaccaaggggccacccagggacctctaactccacacatcctccacccgggggggtgg

SEQ ID NO: 713453 - DNA, 120 bp, Artificial Sequence
  ENSG00000197119_13 (sequence is synthesized)
tgggccacccctctggtctgtgttagggacagaggaaaacttggtgtgcctcctggtgtcacagaactggatcctctgcataccccagcttctccacatgccactgctaggggtacccca

SEQ ID NO: 713454 - DNA, 120 bp, Artificial Sequence
  ENSG00000197119_14 (sequence is synthesized)
gctgctgccactcctgctggagggtgaactggggaccctgcaccctccgggaagccatggagtctgctggaggcaccatatcagcctgcgggactagggtggggagcaaacaggccagcg

SEQ ID NO: 713455 - DNA, 120 bp, Artificial Sequence
  ENSG00000197119_15 (sequence is synthesized)
gtggaggtctggacagttcaagtgtgatgcagctgtggcaaggagaaatccttccgcctctgggcctcaggctgcctgtccataaaatggggacatggccagctgacggacaactgagtc

SEQ ID NO: 713456 - DNA, 120 bp, Artificial Sequence
  ENSG00000197119_16 (sequence is synthesized)
tccggcccacctaccaccgccagccaggatcccccaaagtgtgcagagggctcagcagagaacagtatgggaccccctcaccaggcctggaacacctccagccacaaagaagccaaaggt

SEQ ID NO: 713457 - DNA, 120 bp, Artificial Sequence
  ENSG00000197119_17 (sequence is synthesized)
cagtccctctgctccccagcaaacggtgcctcccaggcattctcagtgccagggcttcatccctgtgaaggcacagggcctgctagtgggcacaggggtggctagttggggcctggggca

SEQ ID NO: 713458 - DNA, 120 bp, Artificial Sequence
  ENSG00000197119_18 (sequence is synthesized)
gaggagggctgcaccaggcgtcctggggaatgtgctcagtgaagacgacactgggctttgcacagcctggtgtcgctgtacagaaactgtcaagggaataaagtgttctttgttttttaa

SEQ ID NO: 713459 - DNA, 120 bp, Artificial Sequence
  ENSG00000197119_19 (sequence is synthesized)
aggtgtttggattaatgggatatcccagaaatagtgtgtgcagcctcccaggggacaacttctgctgtcagccacccagaccagtcagccgcggagagcagcagcctgcagatgggacac

SEQ ID NO: 713460 - DNA, 120 bp, Artificial Sequence
  ENSG00000197119_20 (sequence is synthesized)
gggacaggtgctggcttggccttgggatgtcacatgcataccctcccagtggacgtgaggattccaggggctcatgggatctgcctgctgcacccacaggtgtggcaggcgtgcttgtgg

SEQ ID NO: 713461 - DNA, 120 bp, Artificial Sequence
  ENSG00000197119_21 (sequence is synthesized)
gacacccgtttgacacggtcaaggcccttgggactgaaagaatccaagatctggatctcctctatagcgcccagaaccacagccaccgtcctgaagcacacggccttcacacgtttctac

SEQ ID NO: 713462 - DNA, 120 bp, Artificial Sequence
  ENSG00000197119_22 (sequence is synthesized)
gtctcatcgctgcttttttttcctcggcgcgtacattggagagaggctcacagggttggggtggctggaagcctgtttccgtgtacagccccaggtgggcagctgcttttacaccaggcc

SEQ ID NO: 713463 - DNA, 120 bp, Artificial Sequence
  ENSG00000197119_23 (sequence is synthesized)
gggttgaaccttcctcactgctttgtcctggcatctcccagctggggctgatccacatgctgggttcatggccaagtccatcctgggcttggccagctggaaccgaggtgctgaggtttt

SEQ ID NO: 713464 - DNA, 120 bp, Artificial Sequence
  ENSG00000197119_24 (sequence is synthesized)
tacacgtggccgctcttcccactgagcaaaggcacagctgacggcaaggcaggatgcgcaccctgagctgggtttgcgggagacttccagtctccttttctggtgagcctaggtgtgtgt

SEQ ID NO: 713465 - DNA, 120 bp, Artificial Sequence
  ENSG00000197119_25 (sequence is synthesized)
ggggctgtctccatccatagcaaaagtgtaactttgttgtagatgggcgtaagcctcaccctggagagcgctagtacggcttcaggtccagagcgtggagaagcctcagtaccgcgggac

SEQ ID NO: 713466 - DNA, 120 bp, Artificial Sequence
  ENSG00000197119_26 (sequence is synthesized)
ataccctcccagtggacgtgaggattccaggggctcatgggatctgcctgctgcacccacaggtgtggcaggcgtgcttgtgggacacccgtttgacacggtcaagggcaagctgtgagt

SEQ ID NO: 713467 - DNA, 120 bp, Artificial Sequence
  ENSG00000197119_27 (sequence is synthesized)
atttcgggactgactccaccccgtcccgcgcagccatccagcggggttggggctacggagccgaccccctactcggctggccttggagggcactgaaccactctggcgccgagtcacgcc

SEQ ID NO: 713468 - DNA, 120 bp, Artificial Sequence
  ENSG00000197119_28 (sequence is synthesized)
ttggaacgccgccccttcctacgcggttttcacctgcccttgttcaccgcctcttcatctacttggatttggctcgaataaaccctcagctcccggccagcgctgagagccctggcggaa

SEQ ID NO: 713469 - DNA, 120 bp, Artificial Sequence
  ENSG00000197119_29 (sequence is synthesized)
tgttggggaggtgttgtgcgctgaggggagttagaacttcccggtcggttacccagtgggaagctgcggggcacaaagcccagaatttgctgctaatcgctgggtgccctggagacagag

SEQ ID NO: 713470 - DNA, 120 bp, Artificial Sequence
  ENSG00000197119_30 (sequence is synthesized)
ggggcgtgtcctctgcggattccattctcaccttcccctcccgcttctgatctcgctgtttgctccacccttgctccccacccactatcagctccagcgggtgggggtgaagggctgtcc

SEQ ID NO: 713471 - DNA, 120 bp, Artificial Sequence
  ENSG00000197119_31 (sequence is synthesized)
tggggctacggagccgaccccctactcggctggccttggagggcactgaaccactctggcgccgagtcacgccttggaacgccgccccttcctacgcggttttgtgagctgttgggggcg

SEQ ID NO: 713472 - DNA, 120 bp, Artificial Sequence
  ENSG00000197119_32 (sequence is synthesized)
gaaggggggtggtgggtgggtcgggcgagccggtgtggggcaccttctccgaggcgcggtcgcggctctggggttcctcccatgcagttgtccccgggagggcccgggcgggcgtgcagt

SEQ ID NO: 713473 - DNA, 120 bp, Artificial Sequence
  ENSG00000197119_33 (sequence is synthesized)
ttattcaccaggatttagatgtcgggggcgggggagggtggttggcggcgggagttgctgagagggccggccgcttatccctgtttggtcccacttttctcccagcacctgcccttgttc

SEQ ID NO: 713474 - DNA, 120 bp, Artificial Sequence
  ENSG00000197119_34 (sequence is synthesized)
gcaactctgagcctcctattgagcaaagataagctcataggcaacaaagagcactttgacatggaagaggttctgggccactgggctcggaggcagcggggcctgaccagcgccccaggc

SEQ ID NO: 713475 - DNA, 120 bp, Artificial Sequence
  ENSG00000197119_35 (sequence is synthesized)
cccagagctgctgacgtgggtccccaaggaggttgttggctgttctcttgccaccactctattaactcataactgctgttctcacgagaggctactggcagagaccaggcaggagctcct

SEQ ID NO: 713476 - DNA, 120 bp, Artificial Sequence
  ENSG00000197119_36 (sequence is synthesized)
tttttgcgcctattgcctcgaagccagtctctgatgggacattagggcaggggcccttcagcctagtctgggacatgggccgctcactcagcagtatgacaagcatcacctggagaacgg

SEQ ID NO: 713477 - DNA, 120 bp, Artificial Sequence
  ENSG00000197119_37 (sequence is synthesized)
gccagtctcaggaggtcgttcatgccccactggcagtgcactgtgcagccatagtgtaaacaagaggcttaacctgaattggtctgagatcttggggaccccctaccctgtctccagcag

SEQ ID NO: 713478 - DNA, 120 bp, Artificial Sequence
  ENSG00000197119_38 (sequence is synthesized)
gctgtctccctgggctcaaggtggctcccactgagggaaggggacggaggtatcagccagtgcatcaggacctggggtcgtcactcccaaggggccattaccctgttcagtctccgtggc

SEQ ID NO: 713479 - DNA, 120 bp, Artificial Sequence
  ENSG00000197119_39 (sequence is synthesized)
cactctgggggagggaggtaaacctttacaggtaaggcccagagtgaggcccagagacagagtcatttgtgagcacgccaggctgatgagcggcagggggaaaattcaaatctggggagg

SEQ ID NO: 713480 - DNA, 120 bp, Artificial Sequence
  ENSG00000197119_40 (sequence is synthesized)
ctgccacccaggagaaacagaacatggccagccctctggaagtcttccctcctgctcctatcaactcctccctccccttctgaggcttccactggcctaacttcctcctttttttttgag

SEQ ID NO: 713481 - DNA, 120 bp, Artificial Sequence
  ENSG00000197119_41 (sequence is synthesized)
acacggtcttgctctgtcaccctaggtggagtgcagtggtgcaatcatagcccactgcagccttgatttcccaggctcaagcaatcctcccaccgcagcctctcaagtagctgaaactac

SEQ ID NO: 713482 - DNA, 120 bp, Artificial Sequence
  ENSG00000197119_42 (sequence is synthesized)
ctacaggcacacaccaccatgcctagctcatgttttttttgaagttattagtagagatggggtcttgatatgttgcccagctggtctcaaactactgggctcaagtgatcctcctgcctt

SEQ ID NO: 713483 - DNA, 120 bp, Artificial Sequence
  ENSG00000197119_43 (sequence is synthesized)
tcccaaagtgctgggatgacaggcctggcccactgtcctcacttccaacaccacgggtcccttttgcctggttgaatataattgcagctgtaccctaggatcatcaggggccacccgagt

SEQ ID NO: 713484 - DNA, 120 bp, Artificial Sequence
  ENSG00000197119_44 (sequence is synthesized)
gagggggtgaccggccatccctgggcatgggatggggagtgtgggtgggggctggctgtgggggctccgcgcctggatgtgatgttgaaattttgtgttgctttaaccgcctttactttc

SEQ ID NO: 713485 - DNA, 120 bp, Artificial Sequence
  ENSG00000197119_45 (sequence is synthesized)
caccctgtcatgcccatctccccaaccccagagttccctccgtagcaggggacagggagggtgtgaggcaagcttgggctcagcacaggtcctggggtgggggctcgggctggccaaaaa

SEQ ID NO: 713486 - DNA, 120 bp, Artificial Sequence
  ENSG00000197119_46 (sequence is synthesized)
aaatcagccccctctggattgggggtcctcatgtgggggtctctcggccctatggggagctgggagcttcctaaacttgtgtccaaatgactagtttcccaggggtgggtccgttcccat

SEQ ID NO: 713487 - DNA, 120 bp, Artificial Sequence
  ENSG00000197119_47 (sequence is synthesized)
caatcctcaaaggagagcctggcaccccaagattttaagagcctgagctataaatgacaagacttgggacactgggccacagttcctctcccagagagcaagggctcgtcacagactgag

SEQ ID NO: 713488 - DNA, 120 bp, Artificial Sequence
  ENSG00000197119_48 (sequence is synthesized)
gggtactgaggggtcagaaacaaagtggggagaggcctctgcccacattggtgggagaagctgagttgacctaagcctgacattccccagccggctggacttgggcattcaccagtgtct

SEQ ID NO: 713489 - DNA, 120 bp, Artificial Sequence
  ENSG00000197119_49 (sequence is synthesized)
gtgatctgcaaagacttcacaacactacccaggtggcactgagtatccaacctgggaagggacagctccatgtcacatcagttctactcacacagccctcttagtgccagtgttggggct

SEQ ID NO: 713490 - DNA, 120 bp, Artificial Sequence
  ENSG00000197119_50 (sequence is synthesized)
gcaggaggaacagagatccccccagaggccccagaacattgaagggagagcagcaaacctcgcatcaaggtgttggccaagaactgggcctccagggtgggagggtgcttcgggccaatc

SEQ ID NO: 713491 - DNA, 120 bp, Artificial Sequence
  ENSG00000197119_51 (sequence is synthesized)
ttgaagcattggcttccagctgttgaggtcctgggggtactgagatggtacttgtttcctaacaaaacattttttataagtgcattcaccaatagagggcccacctattctggtggagag

SEQ ID NO: 713492 - DNA, 120 bp, Artificial Sequence
  ENSG00000197119_52 (sequence is synthesized)
aattggaaaaggttccagaatccgggcagaagcctggctgttcccggtgagggctctcccttgctagcactccctcccaccctcactctgagcaacacagctgctcatgtccctggagag

SEQ ID NO: 713493 - DNA, 120 bp, Artificial Sequence
  ENSG00000197119_53 (sequence is synthesized)
gacagctttggccaagttgttaaacatctctgagcctgtcttcccatcttggaaatgggggcagttgtcccaatgccgagataattgagtgtgaagccctcccctgtcccatgctgccta

SEQ ID NO: 713494 - DNA, 120 bp, Artificial Sequence
  ENSG00000197119_54 (sequence is synthesized)
gaggctactggcagagaccaggcaggagctcctggagccaaggtcattgcttttatttttatttatttatttattgagatggaatgttcctttctcgcccaggctggagtgcagtggcat

SEQ ID NO: 713495 - DNA, 67 bp, Artificial Sequence
  ENSG00000197119_55 (sequence is synthesized)
agcctcctgagtagcagggattacaggcgtatgccaccacactaggctaattttttttacagacacg

SEQ ID NO: 713496 - DNA, 120 bp, Artificial Sequence
  ENSG00000197119_56 (sequence is synthesized)
gatacccggcccaccctgccctggaattacaaaagtcttagactgtgcctgagtgcccggcctccttgggagaccctcctaggcagcctaagcaccagacccgggagctgggtgctctgg

SEQ ID NO: 713497 - DNA, 120 bp, Artificial Sequence
  ENSG00000197121_0 (sequence is synthesized)
agtgtctagcacgctcagtccgggcttggggccccgcggcggagaaggaggtagagggggcggcggcggcggcggcggtggtggcggcaccatgtttcttcactcagttaatctctggaa

SEQ ID NO: 713498 - DNA, 120 bp, Artificial Sequence
  ENSG00000197121_1 (sequence is synthesized)
cctggcgttttatgtcttcatggtctttctggcaaccctggggctgtgggatgtcttcttcggcttcgaggagaataagtgcagtatgagctacatgtttgagtacccggagtatcagaa

SEQ ID NO: 713499 - DNA, 120 bp, Artificial Sequence
  ENSG00000197121_2 (sequence is synthesized)
aatagaacttccaaagaaactggcaaaacgctatcccgcatatgagttgtatctttatggagagggatcctatgctgaagaacacaaaattctccctttgacgggtattccagttctctt

SEQ ID NO: 713500 - DNA, 120 bp, Artificial Sequence
  ENSG00000197121_3 (sequence is synthesized)
tcttcctggtaatgctggaagttataagcaagttcgttctattggctccattgcacttagaaaagcagaggacattgacttcaagtaccactttgacttctttagtgtgaacttcaatga

SEQ ID NO: 713501 - DNA, 120 bp, Artificial Sequence
  ENSG00000197121_4 (sequence is synthesized)
agaactggtggctttgtatggtggaagtcttcagaagcagaccaagtttgtacatgaatgtattaaaacaattctcaaactctataagggtcaagaatttgctccaaaaagtgtggcaat

SEQ ID NO: 713502 - DNA, 120 bp, Artificial Sequence
  ENSG00000197121_5 (sequence is synthesized)
aattggtcattctatgggtggccttgttgcaagagcattgcttacactgaaaaattttaagcatgatctgataaatcttcttattacacaagccacacctcatgttgctcctgtgatgcc

SEQ ID NO: 713503 - DNA, 120 bp, Artificial Sequence
  ENSG00000197121_6 (sequence is synthesized)
attagatcgtttcattacagatttttatacgactgtaaacaactattggattctaaatgctcgacacataaatttaaccacactttctgtagctggaggattccgggattaccaagttcg

SEQ ID NO: 713504 - DNA, 120 bp, Artificial Sequence
  ENSG00000197121_7 (sequence is synthesized)
ttcaggattgacttttctaccaaaattaagccatcataccagtgccttatctgttgtgagttcagcagtgcctaagacctgggtctcaacagaccacctctccattgtgtggtgtaaaca

SEQ ID NO: 713505 - DNA, 120 bp, Artificial Sequence
  ENSG00000197121_8 (sequence is synthesized)
attgcagttgactacagttcgagcattctttgatcttattgatgctgatactaaacaaataactcaaaattccaagaagaaactgtcagttttgtatcaccactttataagacacccatc

SEQ ID NO: 713506 - DNA, 120 bp, Artificial Sequence
  ENSG00000197121_9 (sequence is synthesized)
aaaacattttgaggaaaatccagctataatttctgacttaacagggacatctatgtgggttctagtaaaagtgtccaaatggacctatgtagcttacaacgaatctgagaagatatattt

SEQ ID NO: 713507 - DNA, 120 bp, Artificial Sequence
  ENSG00000197121_10 (sequence is synthesized)
tacatttcctcttgaaaatcatagaaaaatctacactcatgtctattgtcagagcactatgctggatacaaatagttggatttttgcttgcataaacagcacttctatgtgcctgcaagg

SEQ ID NO: 713508 - DNA, 120 bp, Artificial Sequence
  ENSG00000197121_11 (sequence is synthesized)
ggttgatttatcatggaaagctgaactgctgccaacaattaagtatctgacattaagacttcaagactatccatctttgtctcatcttgttgtttatgtaccatctgttcgtggaagtaa

SEQ ID NO: 713509 - DNA, 120 bp, Artificial Sequence
  ENSG00000197121_12 (sequence is synthesized)
gtttgttgtagattgtgaattctttaaaaaagagaaaagatacatacagcttcctgtaactcatcttttttcctttggattgtcttcaaggaaagtggtgttaaatacaaatggcctata

SEQ ID NO: 713510 - DNA, 120 bp, Artificial Sequence
  ENSG00000197121_13 (sequence is synthesized)
ctacaatctagagcttctgaactttggacagatataccaagcttttaaaatcaacgtggtaagcaagtgctcagcagtcaaagaagaaataaccagtatctatagacttcatattccttg

SEQ ID NO: 713511 - DNA, 120 bp, Artificial Sequence
  ENSG00000197121_14 (sequence is synthesized)
gtcttatgaagattcactaaccattgcacaggctccatcttccacagaaatttctctgaaactccatattgctcaaccagaaaacaatacccatgtggcattatttaaaatgtacacgtc

SEQ ID NO: 713512 - DNA, 120 bp, Artificial Sequence
  ENSG00000197121_15 (sequence is synthesized)
atcagactgtcggtacgaggtgacagttaagacttccttttcacaaatacttggacaggtagttagatttcatggtggagctcttcctgcttatgtcgtatctaatatccttcttgctta

SEQ ID NO: 713513 - DNA, 120 bp, Artificial Sequence
  ENSG00000197121_16 (sequence is synthesized)
tagaggacagttatattctcttttctcaacaggttgttgcttagaatatgctaccatgttggataaagaagccaaaccatacaaagttgatccttttgtaattatcattaagtttctgtt

SEQ ID NO: 713514 - DNA, 120 bp, Artificial Sequence
  ENSG00000197121_17 (sequence is synthesized)
ggggtataaatggtttaaagaattgtgggatgtattattgttaccagaattagatgccgtcattttaacttgtcagagtatgtgtttccccctgatatccttgattctctttctgtttgg

SEQ ID NO: 713515 - DNA, 120 bp, Artificial Sequence
  ENSG00000197121_18 (sequence is synthesized)
aacgtgtactgcctactggagtggcctactgtcttctgcatctgtgagacttctttcttcattgtggctagctttgaaaagaccctctgaacttcctaaagatatcaagatgatatcacc

SEQ ID NO: 713516 - DNA, 120 bp, Artificial Sequence
  ENSG00000197121_19 (sequence is synthesized)
agacttgccctttttgacaattgtcttgatcatagttagttggacaacttgtggagcactagccatacttctttcttatctttactatgtgtttaaggttgttcatctgcaagccagctt

SEQ ID NO: 713517 - DNA, 120 bp, Artificial Sequence
  ENSG00000197121_20 (sequence is synthesized)
aacaacttttaagaatagccagcctgtgaatcccaaacactctagaagaagtgaaaagaaatccaatcatcataaagactcctcaatacaccatcttcgtttatctgccaacgatgctga

SEQ ID NO: 713518 - DNA, 120 bp, Artificial Sequence
  ENSG00000197121_21 (sequence is synthesized)
agatagccttcgcatgcacagtactgtgattaacttactaacatggattgtattactcagcatgccttctctaatttattggctaaagaatcttaggtattattttaaacttaatcctga

SEQ ID NO: 713519 - DNA, 120 bp, Artificial Sequence
  ENSG00000197121_22 (sequence is synthesized)
tccatgtaaacctttggcatttatccttattccgactatggcaattcttggaaatacttacactgtttcaataaaatcaagtaaattgttgaagactacttcacaatttccacttcctct

SEQ ID NO: 713520 - DNA, 120 bp, Artificial Sequence
  ENSG00000197121_23 (sequence is synthesized)
ggctgttggtgtgattgcttttgggtcagcacatttatataggcttccatgctttgtcttcattcctcttttactccatgcattatgcaactttatgtaagattggacttaaggaatgat

SEQ ID NO: 713521 - DNA, 120 bp, Artificial Sequence
  ENSG00000197121_24 (sequence is synthesized)
gaagataatttatgtgtttagggccagtgataagagggaacacacagatccatcagtatggacagcaagatcctttggagaagacaagtctatttttacaatattgaaaataggaaatta

SEQ ID NO: 713522 - DNA, 120 bp, Artificial Sequence
  ENSG00000197121_25 (sequence is synthesized)
gttttgtaatgtttgagggaagtagttgaagcatggttttgttttgtggtgtggaatccatgtagtaatcatttttgaaaaattcatgaagggatatatggtgatcactatcattgagga

SEQ ID NO: 713523 - DNA, 120 bp, Artificial Sequence
  ENSG00000197121_26 (sequence is synthesized)
ctcctgtgcatataaaatagtctgttttatcaactgtacgagaagtctgatatgagagatttagtagatgcagcattatttgcagtctcactgcaagcattctgctcatttcatcaaact

SEQ ID NO: 713524 - DNA, 120 bp, Artificial Sequence
  ENSG00000197121_27 (sequence is synthesized)
ttttttcacaaaagtaggttattttgaatttgctatagtttacctattaagaaataagtctttaaataactgatgaaatttatagctgtttggtttctcaaaggttaaatagccacagaa

SEQ ID NO: 713525 - DNA, 120 bp, Artificial Sequence
  ENSG00000197121_28 (sequence is synthesized)
agcctttggttagtttttggcagccaccatgaacaaagtggatcttgtcttcttacatctatgaaaatagagctttgaatggtaaggagatatgttttcttggtaaccaatgcaagattg

SEQ ID NO: 713526 - DNA, 120 bp, Artificial Sequence
  ENSG00000197121_29 (sequence is synthesized)
atgggtggaaacatgattcaaacttacacaatttttcttgctatttttcaaatatgaatcttactatatattctcggtgaacatcaggagactattaaagaggtctgctgttaaatgtaa

SEQ ID NO: 713527 - DNA, 120 bp, Artificial Sequence
  ENSG00000197121_30 (sequence is synthesized)
agaaaaaatgctcgtagctatttgcttcctggtattggagcagttcagttgtttagtttataccattggattcaattcattgcaccatggttgccaaaagtgcctgaggtcataatggat

SEQ ID NO: 713528 - DNA, 120 bp, Artificial Sequence
  ENSG00000197121_31 (sequence is synthesized)
tgttaaaataactaaattccagtggttggaaactctaggtttgtaccattttttctgctgtgggaaaaaacaacaacaacaacatgatcaaggtaacatcacatttgatgtataatatta

SEQ ID NO: 713529 - DNA, 120 bp, Artificial Sequence
  ENSG00000197121_32 (sequence is synthesized)
tactattaatggaatatcagtagacaactgttaacccattagtagcatgagtataaacagtacacctgaataaattggagacattagccactaggtttaacagtggaatcttgatttgcc

SEQ ID NO: 713530 - DNA, 120 bp, Artificial Sequence
  ENSG00000197121_33 (sequence is synthesized)
taggtgacttctgggattactgtttgacaaataagagtaacattttatttcatttcagaatttacgtcacttttagctacaagagtaggaagaaggtaatcggcaaggcagaagagtata

SEQ ID NO: 713531 - DNA, 120 bp, Artificial Sequence
  ENSG00000197121_34 (sequence is synthesized)
ctctttgccttaggatagcgtaaactcaggctgagacatacccggcttatagagttcttctagatgtgtagactgtaaatgcccaaatcctctcaactaaagttttagtgattccacaaa

SEQ ID NO: 713532 - DNA, 120 bp, Artificial Sequence
  ENSG00000197121_35 (sequence is synthesized)
gcctctcatgtaaatttccagtgattccaccattgcacttgtgaatatgtatccttgttagtacccagggatgtcctcgagcaccagttttattttatctgccattgcatctggattcca

SEQ ID NO: 713533 - DNA, 120 bp, Artificial Sequence
  ENSG00000197121_36 (sequence is synthesized)
ttacagcctctcagctgttactgcctgtggacagttacttctgcttactgcctgtagagagttacctaacttctcttctcagttcttcctcaggtcctggctattttggcctcagttgaa

SEQ ID NO: 713534 - DNA, 120 bp, Artificial Sequence
  ENSG00000197121_37 (sequence is synthesized)
gggagtcttgctctcatctctgagggttttaagtttgtttgatcccattgttgtcttttctagctttgagcatgtttttcagtattcatattttaacttactgagaacattaaagggaaa

SEQ ID NO: 713535 - DNA, 120 bp, Artificial Sequence
  ENSG00000197121_38 (sequence is synthesized)
tgataaactcgtggtggggatatggcagacaggtgcttgtttgtttgagagaagtagcagaagagataaaatacaaagtgctatatgtttcagctggagaggaaagagagagaatttatt

SEQ ID NO: 713536 - DNA, 120 bp, Artificial Sequence
  ENSG00000197121_39 (sequence is synthesized)
agattatatacttgtcccatggcataccacgtatatgtttaaatagggacacatctccctatgtttaactatacttataaacaactttgatacacattgcgtcttttattctgtcacctg

SEQ ID NO: 713537 - DNA, 120 bp, Artificial Sequence
  ENSG00000197121_40 (sequence is synthesized)
atattttagtgtatctcaagttacagattacatgtgtccttaaactatttctgaatttggacttagttccatatacagaaagaactttagaaaattcattaatttggatcttctattgat

SEQ ID NO: 713538 - DNA, 120 bp, Artificial Sequence
  ENSG00000197121_41 (sequence is synthesized)
agccataaatattatgtttatgtattctaaaacctctttgtttagttagtactgttcatgaatgtaacaagcttcaatttctcatttgtgagtagtacatttgctttttgtttgtttgtt

SEQ ID NO: 713539 - DNA, 120 bp, Artificial Sequence
  ENSG00000197121_42 (sequence is synthesized)
tacaggcgtgagccaccacgcccagccgtacatttactttttaaagcagcagactaggtacactaattctcactcaaatattttcatgggaatgtagttatcaccaagtcctaaagtatt

SEQ ID NO: 713540 - DNA, 120 bp, Artificial Sequence
  ENSG00000197121_43 (sequence is synthesized)
gttatcaccaagtcctaaagtattatttatgccaaaaaaaatttcattttaaggactacaaaaatgattctaattaaacattttataatcaatagtaggttgggtctttagccattatat

SEQ ID NO: 713541 - DNA, 120 bp, Artificial Sequence
  ENSG00000197121_44 (sequence is synthesized)
cattgagtcttgatgcactttaaacccagctggctaccagagatgcgaaggtgggctctttgaagattagcaaaatggacgtttctgtcacttgagaaaaggaaagttctttgcctttaa

SEQ ID NO: 713542 - DNA, 120 bp, Artificial Sequence
  ENSG00000197121_45 (sequence is synthesized)
attacacagttttcatcatgcccacaatctatattattggctggttaaacagcactgccctattagcaatgttaacaaaaatgaaattatttattggcggttatagattatctaattcag

SEQ ID NO: 713543 - DNA, 120 bp, Artificial Sequence
  ENSG00000197121_46 (sequence is synthesized)
gaaatttctgagctcaacttttacagcaactgttatgccttctaatttagcaattgagttatgagtaagttttgtgcttaactcctagaccctattgttgataaccagatcaaatatagt

SEQ ID NO: 713544 - DNA, 120 bp, Artificial Sequence
  ENSG00000197121_47 (sequence is synthesized)
ctgtacagaggaaaacactgggaacatttagtatttctaaagcctcctttggagttactactgattgtaatttggaactgataataggtagagattgctaacactgttttttttcctgga

SEQ ID NO: 713545 - DNA, 120 bp, Artificial Sequence
  ENSG00000197121_48 (sequence is synthesized)
tcttttttatgccagaaattaaacaggttctgctaactcttttttttctcttggttatcaccagaatgaaaatatttaaagtgatgactctagaaaagccatctgtgcctggttaacatt

SEQ ID NO: 713546 - DNA, 120 bp, Artificial Sequence
  ENSG00000197121_49 (sequence is synthesized)
gagtttgagtctcttcaatatatattgatcatgtattgattaatctttattttttcatattttggctagacaaattcagatctatataatggaataccccttcttgagtgaactatacta

SEQ ID NO: 713547 - DNA, 120 bp, Artificial Sequence
  ENSG00000197121_50 (sequence is synthesized)
ctaatctacatgattatatagtaaggaaaaaagaagaaataactgtaataggcatagtgtttgttgttggttgtcttgtcattcatgtgatactactcatttccaaaattcacacaaact

SEQ ID NO: 713548 - DNA, 120 bp, Artificial Sequence
  ENSG00000197121_51 (sequence is synthesized)
gatactactcatttccaaaattcacacaaacttacatgaggtggattatttgttttgttcattatttagttcctatatgttttttctttagaaacagagtctcattctgtcacccaggct

SEQ ID NO: 713549 - DNA, 120 bp, Artificial Sequence
  ENSG00000197121_52 (sequence is synthesized)
gccttgaactctttggctcatgtgatcctcccatctcagcctcccacagcaggtgagactacaggtacatgccactgtgcctgactttttaatttttttgtagagacgaggtttcagttt

SEQ ID NO: 713550 - DNA, 120 bp, Artificial Sequence
  ENSG00000197121_53 (sequence is synthesized)
gatcctcccacctcggcctcccaaagtagtgggatttcaggcatgaccacctggcctagttcctatacttttcttaattcttcagacttctcacatttagtatagtgcattcatttcatc

SEQ ID NO: 713551 - DNA, 120 bp, Artificial Sequence
  ENSG00000197121_54 (sequence is synthesized)
gacttctcacatttagtatagtgcattcatttcatcttgctgtttattagcaccctttgtggccaagggaaataaaaggtggtaaaattcagttttcagtttagttcttgaaagctctgg

SEQ ID NO: 713552 - DNA, 120 bp, Artificial Sequence
  ENSG00000197121_55 (sequence is synthesized)
gaaatggaggaaacacaaaactatgaattaaactagggctgttgatttctgaacccccagataaatcagttgacccacattttcattttaggtgttaggtccaaattagcataatgtctt

SEQ ID NO: 713553 - DNA, 120 bp, Artificial Sequence
  ENSG00000197121_56 (sequence is synthesized)
gcattattattaggttcagtgtgaaactttacagtgctgcatttgaagtttagtaactggttattattaatcatttgggaaaaatgaaaatgtgttgggactttctatgactaggcattt

SEQ ID NO: 713554 - DNA, 120 bp, Artificial Sequence
  ENSG00000197121_57 (sequence is synthesized)
gttgattatttttcatgattgctttttgttttctcattgtgtaggatttgtgaacttgtatattacaggaaacaagatactttgtaaaatttactggggaaaatccatttggagtgcatg

SEQ ID NO: 713555 - DNA, 120 bp, Artificial Sequence
  ENSG00000197121_58 (sequence is synthesized)
acatttgccaggataagaaagcagtaatatgtttgtattataaaattacaccctgccagaaaactttctttcctagtaaggtaaatgtagaagggacttttacagcatagtaagttgatt

SEQ ID NO: 713556 - DNA, 120 bp, Artificial Sequence
  ENSG00000197121_59 (sequence is synthesized)
aggagccaaaattttattccagtttttttttgaactaagaatgttttaaattctgtaatgaacttttatgtttacccattactcatgcattctttcacaatatgtttaatagcctgagga

SEQ ID NO: 713557 - DNA, 120 bp, Artificial Sequence
  ENSG00000197121_60 (sequence is synthesized)
aataggaaagctgtgaagctactaccattctttacttttaataagaataataggaaagaaaagtcaggtcagtaatccaaatccaaatatgtatactgcaaatgctcaagaagtcacatt

SEQ ID NO: 713558 - DNA, 120 bp, Artificial Sequence
  ENSG00000197121_61 (sequence is synthesized)
ttttgataaattgtattgagtacagaagaacttatatgaatttattatctgttaataacttagttttgacaacagaataacatttggaaattgtgagaataatcaagctgtttttccatt

SEQ ID NO: 713559 - DNA, 120 bp, Artificial Sequence
  ENSG00000197121_62 (sequence is synthesized)
aacagtgtaaattcataacatgtccttcaaaaggtgatattctaagctgtcttaattgtctacggttgataacttttaaataaagtacaggactttctgaaagtgtttggcatgttatgc

SEQ ID NO: 713560 - DNA, 120 bp, Artificial Sequence
  ENSG00000197121_63 (sequence is synthesized)
tgccaaaaacaatctgtgttttgaaataccaattaatcagttaatttctgaagactttgtataggacttgatatatgagtcagaatctgtctgtactcattctgtacattgtaactttga

SEQ ID NO: 713561 - DNA, 120 bp, Artificial Sequence
  ENSG00000197121_64 (sequence is synthesized)
acacttatgaaaaactgtatctgttggtgtgttttgattagttagtgtagatttgtttgcgtatttgaattccgattttagtttaggaagactaaaagtagccatttttgtaaagttcat

SEQ ID NO: 713562 - DNA, 120 bp, Artificial Sequence
  ENSG00000197121_65 (sequence is synthesized)
atgctattttttaatgtcatttttgtttttaatatttatacaatagtgatgttactagtaaaaaatgtttatagataacacgtagagctattaactgttcaaaagcctacatgataggca

SEQ ID NO: 713563 - DNA, 120 bp, Artificial Sequence
  ENSG00000197121_66 (sequence is synthesized)
tattttgtatttcgtgttgcactcgttctgtttcatattggactttttacatcccttttttagcaaaaaaaagagacacatttgaattctctttagcataaagctgtgcattggaaacta

SEQ ID NO: 713564 - DNA, 120 bp, Artificial Sequence
  ENSG00000197121_67 (sequence is synthesized)
tgtgactgtatccatacggttagcaaaatactctttgccaccaaaggtaaatgaaactgtaaaatacctctggatatttgtgccaatgaacttttcttagcatattaggattaaagcaaa

SEQ ID NO: 713565 - DNA, 120 bp, Artificial Sequence
  ENSG00000197121_68 (sequence is synthesized)
aataatcttttcagtatgtttcatctaggacttacaataaatgtttaaaccatgaaaacttatatttcataccctaatttttctttgaaaatattcaagatttgtagcctagtgtgttct

SEQ ID NO: 713566 - DNA, 120 bp, Artificial Sequence
  ENSG00000197121_69 (sequence is synthesized)
attttgtgtgattgcttgaatgttttctgattttattgggtaaaagtttgcctagtaatgatctttcagcaattcattgaaataattatttgaagtaatcttgcttcagatttaatttgt

SEQ ID NO: 713567 - DNA, 120 bp, Artificial Sequence
  ENSG00000197121_70 (sequence is synthesized)
gatgtacattgttgtacaagccattttagtacaggtgtctcatttatgtagttgaaaggtgactgtggaatttcttttgttttttatgtatttccattcagtctctttatatagtcacat

SEQ ID NO: 713568 - DNA, 120 bp, Artificial Sequence
  ENSG00000197121_71 (sequence is synthesized)
gtttcacaggggaacttgtccactggaacctaacatagtacaaccttttaatatgcgtatcttaaaggaaaatattataaaacaagatattaatactaaagtgttaacattaatatgttg

SEQ ID NO: 713569 - DNA, 120 bp, Artificial Sequence
  ENSG00000197121_72 (sequence is synthesized)
ttctcatggaagaaaagtagaaaatgtgataggcttagaaattattttttatcagcattaagtgcttcaatttctccccataaagattctaaggaaatttcagttcctcatattatagtt

SEQ ID NO: 713570 - DNA, 120 bp, Artificial Sequence
  ENSG00000197121_73 (sequence is synthesized)
ttccccataatttaatattactaagtatttctctgcccagtaatgttgatgcagtttgcataaatagccttggaagtaaggaggcaggacagaaagccaaatatcgaaatctctggcctt

SEQ ID NO: 713571 - DNA, 120 bp, Artificial Sequence
  ENSG00000197121_74 (sequence is synthesized)
gatttagtgacagtttattctaatggggaccataggtgttattagtaaaaagatagtgtacaaggcctaagttcagtttacattgttctttgaaatgagttcatcttttgtgttgaataa

SEQ ID NO: 713572 - DNA, 120 bp, Artificial Sequence
  ENSG00000197121_75 (sequence is synthesized)
ttgtattctaagtaggagatgcctgtatttaacataatcatgctttctatataatcaaatatgtatttgttggaatactggtagaaataaccttcccttcctccactgtgcagtggaaaa

SEQ ID NO: 713573 - DNA, 120 bp, Artificial Sequence
  ENSG00000197121_76 (sequence is synthesized)
ctccactgtgcagtggaaaaaaaactcccgatttatactgtatataaattaggaaattatgttacatatttacatttttaaaaatataaaaatgacatattattttgaagtgattgtatt

SEQ ID NO: 713574 - DNA, 120 bp, Artificial Sequence
  ENSG00000197121_77 (sequence is synthesized)
ctggctataaatataacaacatacccatgagaaaccagaccaaaattgaatatatatcatcactgtgaccttgaacttatagtcatttgggataaaacagagtgtgccttgaaatgataa

SEQ ID NO: 713575 - DNA, 120 bp, Artificial Sequence
  ENSG00000197121_78 (sequence is synthesized)
agagtgccctgcaattttataactgtacattttattatgggtggtcctctcaaattggccccaaatccttgtcttcgaggttggtgaaataaaagtttaaaataaaagttgactggtatt

SEQ ID NO: 713576 - DNA, 120 bp, Artificial Sequence
  ENSG00000197121_79 (sequence is synthesized)
tcctttagtatttccagaactattgctgtagaggcctcccttaattttcagagttctcattttgaattaaagtagacttacgctacatagatgtagaaaattaggtttggcttaggtttc

SEQ ID NO: 713577 - DNA, 120 bp, Artificial Sequence
  ENSG00000197121_80 (sequence is synthesized)
tgaaaaaatattctaggagaaggtggtagcattgttctgaacttaccacacttggaaaaactaatcttcaaatgtaattttttgtcttattaatgagtaatctgtcaaagacatgaattc

SEQ ID NO: 713578 - DNA, 120 bp, Artificial Sequence
  ENSG00000197121_81 (sequence is synthesized)
agacatgaattctttgacttgtgctcattctttctgaacttattgaggcttatatatatcaaataaggttaatttacacaataattatttttaataattaataaactcattcatgtagta

SEQ ID NO: 713579 - DNA, 120 bp, Artificial Sequence
  ENSG00000197121_82 (sequence is synthesized)
ttatttcctctcatttttccttctcttttttcttcctatatatttttaaggcttcaagagaaaacgggcttcagtttttaaaaaaatgtagacttgcatttttactgtgcttatttaaaa

SEQ ID NO: 713580 - DNA, 120 bp, Artificial Sequence
  ENSG00000197121_83 (sequence is synthesized)
taatggatataatttatattaaggtccaaattattttattcacaggataatcatggtctctgataaaagatgcccacatttctgtgtactcacagttgttgtatatttttcaatttcaat

SEQ ID NO: 713581 - DNA, 120 bp, Artificial Sequence
  ENSG00000197121_84 (sequence is synthesized)
tttgaaagtaaactcaacacattgttttcccattttacctccactacctactcgccagacaaaaatatagatttctctaaaaacacatacaaagaaaatgtctttccttaaaacatgatc

SEQ ID NO: 713582 - DNA, 120 bp, Artificial Sequence
  ENSG00000197121_85 (sequence is synthesized)
ttattgacatgaaggtagtttgagcaagggtatgtaataaaataaatggctctcaacctgcatcaatttttatactatagttaaaaaatttatagaggacaacctatgtgttatgctgag

SEQ ID NO: 713583 - DNA, 120 bp, Artificial Sequence
  ENSG00000197121_86 (sequence is synthesized)
atagactcagtaatcatttgtttgcaaattgattatttttttctcatccatccagaaagtacagtgcataacaacaacacttaacaagtgcagaggaacctgtcctgtagtatataataa

SEQ ID NO: 713584 - DNA, 120 bp, Artificial Sequence
  ENSG00000197121_87 (sequence is synthesized)
aaaatgattgtcaccttgctgatctttccatttaaacatgcatgatctccagtactttgtacaatgtatagtatattaaatacatttatgtgtaattttgtgtgtatttttatatggtat

SEQ ID NO: 713585 - DNA, 120 bp, Artificial Sequence
  ENSG00000197121_88 (sequence is synthesized)
aattaaaattattacatttatgtgattgtaattcacaaaaagtactacttactatattctgtagagtgtgttgtgaatgtttttacctgtgtttgagcattatggtgtaggtttaataga

SEQ ID NO: 713586 - DNA, 120 bp, Artificial Sequence
  ENSG00000197121_89 (sequence is synthesized)
tgaatatttgccttcagtctctgctcaggtattaatgtgtagtaatttttggtgctttctttttaatctgtgataatctggtgttctgaatgttcaaaaataaatttggttgaatacgca

SEQ ID NO: 713587 - DNA, 120 bp, Artificial Sequence
  ENSG00000197121_90 (sequence is synthesized)
gataatgattttaattgtgttttacatgtaacattatatttggttccataatgcaatataaattttcatacagatttggcagttgacttgtttcattaaatgaggttttttttttctctt

SEQ ID NO: 713588 - DNA, 120 bp, Artificial Sequence
  ENSG00000197121_91 (sequence is synthesized)
aggcaaaggtctaataagtatatcaatgtctacttcaatagtatcatttcaaaagtaattattcactttatgtatatcagtctaaacttagactgcctttaatgtttgtaaataggtgta

SEQ ID NO: 713589 - DNA, 120 bp, Artificial Sequence
  ENSG00000197121_92 (sequence is synthesized)
tatggtccatgatctgtgagtatcctagattcaaacgcaaatcattacagggtattgatgaaacagtgcctctctgatcacttttaaaagtatattttagacctctctaccctagttaac

SEQ ID NO: 713590 - DNA, 120 bp, Artificial Sequence
  ENSG00000197121_93 (sequence is synthesized)
attccattcttaatttagtcacattttcagatttttggttaagcatcaatatgtagatctttttttccatcattacaactaacttggctttctaaaaaaaaaaaaaaaaagaacatatta

SEQ ID NO: 713591 - DNA, 120 bp, Artificial Sequence
  ENSG00000197121_94 (sequence is synthesized)
ctttctactagtatcaatatagattagtaaagctatactgaaatgcagatcttcaaagatcagtaggctcacttggaaaataaatgacttgttccatacaaagaattaaaaatttgtttt

SEQ ID NO: 713592 - DNA, 120 bp, Artificial Sequence
  ENSG00000197121_95 (sequence is synthesized)
tcagtataattataaattaagtatcatggaactttagagactctcttgaatagtcagacacctcaaatattaagtccttaaatttcagttgttgggttttttgcttttatattttctttt

SEQ ID NO: 713593 - DNA, 120 bp, Artificial Sequence
  ENSG00000197121_96 (sequence is synthesized)
gattggaagtaataaaatttattttgtctagagtttattgctgggagattagatttttaggagttaactccatacagaagtgaaaacctgtaaataaatttttaattattggcattgtct

SEQ ID NO: 713594 - DNA, 120 bp, Artificial Sequence
  ENSG00000197121_97 (sequence is synthesized)
taatgctaattaaataatcagtatgtttttaaaaacttccttgatattctaagtaatacagtactttgaattcaacaggattgtcttcaaggaaagtggtgttaaatacaaatggcctat

SEQ ID NO: 713595 - DNA, 120 bp, Artificial Sequence
  ENSG00000197121_98 (sequence is synthesized)
tatgaagattcactaaccattgcacagtaagtatttgaaagaatttactttaaactttggtgtttttgaataatagatattctgcttagtttatttatttaaatcatgaattattaaaat

SEQ ID NO: 713596 - DNA, 120 bp, Artificial Sequence
  ENSG00000197121_99 (sequence is synthesized)
gcatcagtaaaatgtatgtatcctttatgtagcattgttcctataatttaatatatagtattcttatgaaatgatagagaacttaaactttacttccttggaacctgaacccccttccac

SEQ ID NO: 713597 - DNA, 120 bp, Artificial Sequence
  ENSG00000197121_100 (sequence is synthesized)
cctctcgcaactcctgtgtcctagagggagcattcaaacaattgtgatatcattgaaaaagtgcccatccacaattatgtgtctggcacctagcttcctctacattattcagttgtattg

SEQ ID NO: 713598 - DNA, 120 bp, Artificial Sequence
  ENSG00000197121_101 (sequence is synthesized)
tttttcctaacattctagtgttttgaagctgctacaagtgattgatttcgagctttttttaaaaactcctcctttgtacaaaacagaaccgaaattcttcaaaacgaattaagtcatttg

SEQ ID NO: 713599 - DNA, 120 bp, Artificial Sequence
  ENSG00000197122_0 (sequence is synthesized)
atccctgctttgcagatgaggacgctgaggcccagagagggaaagccacttgcctagggacacacagcggggagaggtggagcagggcctctatttcgagacccctgactccacacctgg

SEQ ID NO: 713600 - DNA, 120 bp, Artificial Sequence
  ENSG00000197122_1 (sequence is synthesized)
tgtttgtgccaagaccccaggctgcctcccaggtcctctgggacagcccctgccttctaccaggaccatgggtagcaacaagagcaagcccaaggatgccagccagcggcgccgcagcct

SEQ ID NO: 713601 - DNA, 120 bp, Artificial Sequence
  ENSG00000197122_2 (sequence is synthesized)
cccaaggatgccagccagcggcgccgcagcctggagcccgccgagaacgtgcacggcgctggcgggggcgctttccccgcctcgcagacccccagcaagccagcctcggccgacggccac

SEQ ID NO: 713602 - DNA, 120 bp, Artificial Sequence
  ENSG00000197122_3 (sequence is synthesized)
cgccgagcccaagctgttcggaggcttcaactcctcggacaccgtcacctccccgcagagggcgggcccgctggccggtggagtgaccacctttgtggccctctatgactatgagtctag

SEQ ID NO: 713603 - DNA, 120 bp, Artificial Sequence
  ENSG00000197122_4 (sequence is synthesized)
gacggagacagacctgtccttcaagaaaggcgagcggctccagattgtcaacaacacagagggagactggtggctggcccactcgctcagcacaggacagacaggctacatccccagcaa

SEQ ID NO: 713604 - DNA, 120 bp, Artificial Sequence
  ENSG00000197122_5 (sequence is synthesized)
ctacgtggcgccctccgactccatccaggctgaggagtggtattttggcaagatcaccagacgggagtcagagcggttactgctcaatgcagagaacccgagagggaccttcctcgtgcg

SEQ ID NO: 713605 - DNA, 120 bp, Artificial Sequence
  ENSG00000197122_6 (sequence is synthesized)
agaaagtgagaccacgaaaggtgcctactgcctctcagtgtctgacttcgacaacgccaagggcctcaacgtgaagcactacaagatccgcaagctggacagcggcggcttctacatcac

SEQ ID NO: 713606 - DNA, 120 bp, Artificial Sequence
  ENSG00000197122_7 (sequence is synthesized)
ctcccgcacccagttcaacagcctgcagcagctggtggcctactactccaaacacgccgatggcctgtgccaccgcctcaccaccgtgtgccccacgtccaagccgcagactcagggcct

SEQ ID NO: 713607 - DNA, 120 bp, Artificial Sequence
  ENSG00000197122_8 (sequence is synthesized)
ggccaaggatgcctgggagatccctcgggagtcgctgcggctggaggtcaagctgggccagggctgctttggcgaggtgtggatggggacctggaacggtaccaccagggtggccatcaa

SEQ ID NO: 713608 - DNA, 120 bp, Artificial Sequence
  ENSG00000197122_9 (sequence is synthesized)
aaccctgaagcctggcacgatgtctccagaggccttcctgcaggaggcccaggtcatgaagaagctgaggcatgagaagctggtgcagttgtatgctgtggtttcagaggagcccattta

SEQ ID NO: 713609 - DNA, 120 bp, Artificial Sequence
  ENSG00000197122_10 (sequence is synthesized)
catcgtcacggagtacatgagcaaggggagtttgctggactttctcaagggggagacaggcaagtacctgcggctgcctcagctggtggacatggctgctcagatcgcctcaggcatggc

SEQ ID NO: 713610 - DNA, 120 bp, Artificial Sequence
  ENSG00000197122_11 (sequence is synthesized)
gtacgtggagcggatgaactacgtccaccgggaccttcgtgcagccaacatcctggtgggagagaacctggtgtgcaaagtggcggactttgggctggctcggctcattgaagacaatga

SEQ ID NO: 713611 - DNA, 120 bp, Artificial Sequence
  ENSG00000197122_12 (sequence is synthesized)
gtacacggcgcggcaaggtgccaaattccccatcaagtggacggctccagaagctgccctctatggccgcttcaccatcaagtcggacgtgtggtccttcgggatcctgctgactgagct

SEQ ID NO: 713612 - DNA, 120 bp, Artificial Sequence
  ENSG00000197122_13 (sequence is synthesized)
caccacaaagggacgggtgccctaccctgggatggtgaaccgcgaggtgctggaccaggtggagcggggctaccggatgccctgcccgccggagtgtcccgagtccctgcacgacctcat

SEQ ID NO: 713613 - DNA, 120 bp, Artificial Sequence
  ENSG00000197122_14 (sequence is synthesized)
gtgccagtgctggcggaaggagcctgaggagcggcccaccttcgagtacctgcaggccttcctggaggactacttcacgtccaccgagccccagtaccagcccggggagaacctctaggc

SEQ ID NO: 713614 - DNA, 120 bp, Artificial Sequence
  ENSG00000197122_15 (sequence is synthesized)
acaggcgggcccagaccggcttctcggcttggatcctgggctgggtggcccctgtctcggggcttgccccactctgcctgcctgctgttggtcctctctctgtggggctgaattgccagg

SEQ ID NO: 713615 - DNA, 120 bp, Artificial Sequence
  ENSG00000197122_16 (sequence is synthesized)
tcctctttggtggcatggaaggggcttctggacctagggtggcctgagagggcggtgggtatgcgagaccagcacggtgactctgtccagctcccgctgtggccgcacgcctctccctgc

SEQ ID NO: 713616 - DNA, 120 bp, Artificial Sequence
  ENSG00000197122_17 (sequence is synthesized)
actccctcctggagctctgtgggtctctggaagaggaaccaggagaagggctggggccggggctgagggtgcccttttccagcctcagcctactccgctcactgaactccttccccactt

SEQ ID NO: 713617 - DNA, 120 bp, Artificial Sequence
  ENSG00000197122_18 (sequence is synthesized)
ctgtgccacccccggtctatgtcgagagctggccaaagagcctttccaaagaggagcgatgggcccctggccccgcctgcctgccaccctgccccttgccatccattctggaaacacctg

SEQ ID NO: 713618 - DNA, 120 bp, Artificial Sequence
  ENSG00000197122_19 (sequence is synthesized)
taggcagaggctgccgagacagaccctctgccgctgcttccaggctgggcagcacaaggccttgcctggcctgatgatggtgggtgggtgggatgagtaccccctcaaaccctgccctcc

SEQ ID NO: 713619 - DNA, 120 bp, Artificial Sequence
  ENSG00000197122_20 (sequence is synthesized)
ttagacctgagggacccttcgagatcatcacttccttgcccccatttcacccatggggagacagttgagagcggggatgtgacatgcccaaggccacggagcagttcagagtggaggcgg

SEQ ID NO: 713620 - DNA, 120 bp, Artificial Sequence
  ENSG00000197122_21 (sequence is synthesized)
gcttggaacccggtgctccctctgtcatcctcaggaaccaacaattcgtcggaggcatcatggaaagactgggacagcccaggaaacaaggggtctgaggatgcattcgagatggcagat

SEQ ID NO: 713621 - DNA, 120 bp, Artificial Sequence
  ENSG00000197122_22 (sequence is synthesized)
tcccactgccgctgcccgctcagcccagctgttgggaacagcatggaggcagatgtggggctgagctggggaatcagggtaaaaggtgcaggtgtggagagagaggcttcaatcggcttg

SEQ ID NO: 713622 - DNA, 120 bp, Artificial Sequence
  ENSG00000197122_23 (sequence is synthesized)
tgggtgatgtttgaccttcagagccagccggctatgaaagggagcgagcccctcggctctggaggcaatcaagcagacatagaagagccaagagtccaggaggccctggtcctggcctcc

SEQ ID NO: 713623 - DNA, 120 bp, Artificial Sequence
  ENSG00000197122_24 (sequence is synthesized)
ttccccgtactttgtcccgtggcatttcaattcctggccctgttctcctccccaagtcggcaccctttaactcatgaggagggaaaagagtgcctaagcgggggtgaaagaggacgtgtt

SEQ ID NO: 713624 - DNA, 120 bp, Artificial Sequence
  ENSG00000197122_25 (sequence is synthesized)
acccactgccatgcaccaggactggctgtgtaaccttgggtggcccctgctgtctctctgggctgcagagtctgccccacatgtggccatggcctctgcaactgctcagctctggtccag

SEQ ID NO: 713625 - DNA, 120 bp, Artificial Sequence
  ENSG00000197122_26 (sequence is synthesized)
gccctgtggcaggacacacatggtgagcctagccctgggacatcaggagactgggctctggctctgttcggcctttgggtgtgtggtggattctccctgggcctcagtgtgcccatctgt

SEQ ID NO: 713626 - DNA, 120 bp, Artificial Sequence
  ENSG00000197122_27 (sequence is synthesized)
aaaggggcagctgacagtttgtggcatcttgccaagggtccctgtgtgtgtgtatgtgtgtgcatgtgtgcgtgtctccatgtgcgtccatatttaacatgtaaaaatgtcccccccgct

SEQ ID NO: 713627 - DNA, 120 bp, Artificial Sequence
  ENSG00000197122_28 (sequence is synthesized)
ccgtcccccaaacatgttgtacatttcaccatggccccctcatcatagcaataacattcccactgccaggggttcttgagccagccaggccctgccagtggggaaggaggccaagcagtg

SEQ ID NO: 713628 - DNA, 120 bp, Artificial Sequence
  ENSG00000197122_29 (sequence is synthesized)
cctgcctatgaaatttcaacttttcctttcatacgtctttattacccaagtcttctcccgtccattccagtcaaatctgggctcactcaccccagcgagctctcaaatccctctccaact

SEQ ID NO: 713629 - DNA, 120 bp, Artificial Sequence
  ENSG00000197122_30 (sequence is synthesized)
gcctaaggccctttgtgtaaggtgtcttaatactgtcctttttttttttttaacagtgttttgtagatttcagatgactatgcagaggcctgggggacccctggctctgggccgggcctg

SEQ ID NO: 713630 - DNA, 120 bp, Artificial Sequence
  ENSG00000197122_31 (sequence is synthesized)
gggctccgaaattccaaggcccagacttgcggggggtgggggggtatccagaattggttgtaaatactttgcatattgtctgattaaacacaaacagacctcagaatctgatcaacagtt

SEQ ID NO: 713631 - DNA, 120 bp, Artificial Sequence
  ENSG00000197122_32 (sequence is synthesized)
tgctggaaagcgagatggggcggaatgcgagaacaaactaccccttgaggggtctttgggcagcactagtagctggagggcttcaggccaaggcaggggtgacatcagattggagacagc

SEQ ID NO: 713632 - DNA, 120 bp, Artificial Sequence
  ENSG00000197122_33 (sequence is synthesized)
tacggcagaatgtggctgtttgtgaacatctgcacctgtgttagggggtgagcacctgggagaaggacaaggcacatcacaggacttccctgagcatgacaagttcaggactcaaatgtc

SEQ ID NO: 713633 - DNA, 120 bp, Artificial Sequence
  ENSG00000197122_34 (sequence is synthesized)
cgtggtggatggtagcagtgacattggggagtgggtggggctgtcaagcctgcctagaggagatcacaaatacacgacgagaataccgttgtgtgtgctcttcgtgtgtttcctaggagt

SEQ ID NO: 713634 - DNA, 120 bp, Artificial Sequence
  ENSG00000197122_35 (sequence is synthesized)
gcagggcaggggtgctgggtcgatccacaaaagtcctgaaaacgctgaagaaaaatccaaagacccttcccctcctccctccttccccaccaccgaagcacacagtcttgaaggttgatt

SEQ ID NO: 713635 - DNA, 120 bp, Artificial Sequence
  ENSG00000197122_36 (sequence is synthesized)
tgcaaccgtctatacaaacacatttattttacacaaatatacatcagatcacacacctgtgcaccggagtcaactctggccacgacattgcttaattaaaaacaaatttcaaaaactgga

SEQ ID NO: 713636 - DNA, 120 bp, Artificial Sequence
  ENSG00000197122_37 (sequence is synthesized)
gccggagcggccaggccgccgtctgcccgtcccgctggacgtcccgcggtccgccctcccgtgcgtccgtctgccggtgagcccgcccgcccgccggcccagaacagagaacagaagctc

SEQ ID NO: 713637 - DNA, 120 bp, Artificial Sequence
  ENSG00000197122_38 (sequence is synthesized)
ttgcctgaagaagtgtggggagggtggggaaggggtggttggctctccagccccagagtgctctgtggccctgggagggcatgggtggcacctgagccaggctcccacggttccgcctgc

SEQ ID NO: 713638 - DNA, 120 bp, Artificial Sequence
  ENSG00000197122_39 (sequence is synthesized)
cctgaatccctctgccctggtggccttgggcaagtcatgactcctgctgggcctgtttccccacccgtaaaacaaagaagttgagcgtctgatgttaggctctctcgatggtccatgctc

SEQ ID NO: 713639 - DNA, 120 bp, Artificial Sequence
  ENSG00000197122_40 (sequence is synthesized)
atgctgtggggactcacgctggccccaccacctccctgggcctccctcagccactagagccctgagcacagcacctaggaggatggtgggcaccgggcttgtggctgacggctcccttct

SEQ ID NO: 713640 - DNA, 120 bp, Artificial Sequence
  ENSG00000197122_41 (sequence is synthesized)
ggtctgcttacaggtgccctgaggggtgattctgggcagcagaaggcccttacctgggcatcaggggtcactgacttactgtgggacctcgggcctcagttgtcgtctctgtaaaggtca

SEQ ID NO: 713641 - DNA, 120 bp, Artificial Sequence
  ENSG00000197122_42 (sequence is synthesized)
ctgttattcccattggacggatgagaaaactgaggctcagagaggggacttgggcagcaggcaggacctggcactcatctgtgtctgggtccgctggggcctctttccctggtcacctcg

SEQ ID NO: 713642 - DNA, 120 bp, Artificial Sequence
  ENSG00000197122_43 (sequence is synthesized)
ctttcctggctgcatcggatctcgtgcctcccctttgacctttgccttctgccctctgctctgtgccctgtgctccctactcccgcagagcactgctcctgctttcgatgccaacagcat

SEQ ID NO: 713643 - DNA, 120 bp, Artificial Sequence
  ENSG00000197122_44 (sequence is synthesized)
tctcctgggctggggtgggaggtctggctgtccagcgccccagccatatccagggagaagcactgtgagtgggcagaagcctggacagtcagcaccatcctccgtcctcccacccccagg

SEQ ID NO: 713644 - DNA, 120 bp, Artificial Sequence
  ENSG00000197122_45 (sequence is synthesized)
acttccccctcccccctcccttcctctctcctcccttttccctcctttccttgtctccttcttcttcctcttctttcccccagcccccctcctccctgtccccctctctccctgctccac

SEQ ID NO: 713645 - DNA, 120 bp, Artificial Sequence
  ENSG00000197122_46 (sequence is synthesized)
gcagtgtcccactgcccgcctttctctgcagctggctggtatggagggggctgccctgaggagccccagagtaagctggaagggaggggacagaggctggtgtcatttgtctctgtagcc

SEQ ID NO: 713646 - DNA, 120 bp, Artificial Sequence
  ENSG00000197122_47 (sequence is synthesized)
ctaggaccggtctgaaccggttgctgggagaggaggagggggcggccagatcgattgcagcaaagagggaagagagcggcagagggagctcgcggggcttgcgtgctggaacacgccgat

SEQ ID NO: 713647 - DNA, 120 bp, Artificial Sequence
  ENSG00000197122_48 (sequence is synthesized)
caaacaagtgcggccatttcaccagcccaggctggcttctgctgttgactggctgtggcacctcaagcagcccctttcccctctagcctcagtttatcaccgcaagagctaccattcatc

SEQ ID NO: 713648 - DNA, 120 bp, Artificial Sequence
  ENSG00000197123_0 (sequence is synthesized)
atggctaaaagaccgggatcccctggaagccgagaaatgggactgttgacattcagagatgtagtcatagaattctctctggaggagtggcaatgcctggatcacgctcagcagaattta

SEQ ID NO: 713649 - DNA, 120 bp, Artificial Sequence
  ENSG00000197123_1 (sequence is synthesized)
tatagagatgtgatgttagagaactacagaaacctggtctccctgggtattgctgtctctaagccagacttgatcacctgtctggagcaaaataaagagccttggaatataaagagaaat

SEQ ID NO: 713650 - DNA, 120 bp, Artificial Sequence
  ENSG00000197123_2 (sequence is synthesized)
gagatggtaaccaaacacccagttatgtgttctcatttcacccaagaccttccgccagagctaggcataaaagattcactccaaaaagtaataccaagaagatatggaaaaagtggacat

SEQ ID NO: 713651 - DNA, 120 bp, Artificial Sequence
  ENSG00000197123_3 (sequence is synthesized)
gacaatttacaagtaaaaacatgtaaaagcatgggtgagtgtgaggtgcaaaaaggaggttgtaatgaagttaaccaatgtttgtcaactacccaaaacaaaatatttcagactcataaa

SEQ ID NO: 713652 - DNA, 120 bp, Artificial Sequence
  ENSG00000197123_4 (sequence is synthesized)
tgtgtcaaagtcttcggcaaattttcaaattccaatagacataagacaagacatactggaaagaaacatttcaaatgtaaaaaatatggcaaatcattttgcatggtttcacaactacat

SEQ ID NO: 713653 - DNA, 120 bp, Artificial Sequence
  ENSG00000197123_5 (sequence is synthesized)
ttcatactggagagaaaccctacagatgtgaggaatgtggcaaagcttttacctggtcctcaacccttactaaacataggagaattcatactggagaaaaaccctacacatgtgaagaat

SEQ ID NO: 713654 - DNA, 120 bp, Artificial Sequence
  ENSG00000197123_6 (sequence is synthesized)
aaaaaccctacacatgtgaagaatgtggccaagcctttagccgctcctcaacacttgctaaccacaagagaattcatactggagagaaaccatacacatgtgaagaatgtggcaaagcct

SEQ ID NO: 713655 - DNA, 67 bp, Artificial Sequence
  ENSG00000197123_7 (sequence is synthesized)
catgtgaagaatgtggcaaagcctttaactgctcctcaacccttaaggaaagcctttgccttctcct

SEQ ID NO: 713656 - DNA, 120 bp, Artificial Sequence
  ENSG00000197123_8 (sequence is synthesized)
aatgtaaagaatgtgggaaagcctttgccttctcctcaactcttaatactcataagaggattcatactggagaggaaccctacaaatgtgaagaatgtgacaaagcttttaagtggtcct

SEQ ID NO: 713657 - DNA, 90 bp, Artificial Sequence
  ENSG00000197123_9 (sequence is synthesized)
tacaaatgtgaagaatgtgacaaagcttttaagtggtcctcaagtcttgctaatcataagagtatgtaatgtgataaagtccagccttca

SEQ ID NO: 713658 - DNA, 120 bp, Artificial Sequence
  ENSG00000197123_10 (sequence is synthesized)
ggtacttgatccaggtatatgtcacattcccaactgttggctgggcccaagcaaattagtaaaataaattaggtgctgtgtgaaagtatacgccacaatcacacctgcgggaaggaccag

SEQ ID NO: 713659 - DNA, 120 bp, Artificial Sequence
  ENSG00000197123_11 (sequence is synthesized)
gaataaatttcacaattctacgtatttcccagctttaggtctgagagtctacacttctgagctccagttcttctcttcactgctctgcgtcctctgttcctagaggccaagccactgtgg

SEQ ID NO: 713660 - DNA, 120 bp, Artificial Sequence
  ENSG00000197124_0 (sequence is synthesized)
gcctttgtctcgctccagccagagctcagggtccatcttcattgcttagtatcctctgctctagtagttcccggtgactgtcgcagcctctgttgccctctgacttgcagatgctgtgag

SEQ ID NO: 713661 - DNA, 120 bp, Artificial Sequence
  ENSG00000197124_1 (sequence is synthesized)
atccagagctaagactccacgacatcccggaagccgaaaaatggaactgttgacattcagggatgtgaccatagaattctctctggaggagtgggagtttctgaaccctgctcagcagag

SEQ ID NO: 713662 - DNA, 120 bp, Artificial Sequence
  ENSG00000197124_2 (sequence is synthesized)
tttgtataggaaagtgatgctagagaactacagaaacctggtctctctgggtcttactgtttctaagccagaactgattagccgtctggagcaaagacaggagccctggaatgtgaagag

SEQ ID NO: 713663 - DNA, 120 bp, Artificial Sequence
  ENSG00000197124_3 (sequence is synthesized)
acatgagaccatagccaaacccccagctatgtcttctcattacactgaagaccttttgccagaacagtgcatgcaagattcattccaaaaagtgatactgagaagatatggaagctgtgg

SEQ ID NO: 713664 - DNA, 120 bp, Artificial Sequence
  ENSG00000197124_4 (sequence is synthesized)
acttgaggatttacacttaaggaaggatggggaaaatgtgggtgagtgtaaggatcaaaaagaaatttataatggacttaaccaatgtttgtcaactctacctagcaaaattttcccata

SEQ ID NO: 713665 - DNA, 120 bp, Artificial Sequence
  ENSG00000197124_5 (sequence is synthesized)
taataaatgtgtgaaagtctttagtaaatcatcaaatctaaatagagaaaacataagacatactacagagaaacttttcaaatgtatgcaatgtggcaaagtctttaaatctcactcagg

SEQ ID NO: 713666 - DNA, 120 bp, Artificial Sequence
  ENSG00000197124_6 (sequence is synthesized)
cctttcttatcataagataattcacactgaagagaaactctgcatatgtgaggaatgtggcaaaacctttaagtggttctcataccttactaaacataagagaattcacactggagagaa

SEQ ID NO: 713667 - DNA, 89 bp, Artificial Sequence
  ENSG00000197124_7 (sequence is synthesized)
tgaagaatgtggcaaagcttttaactggtgctcgagtcttactaaacataagagaatccatactggaaagcctttcactggtgttcacc

SEQ ID NO: 713668 - DNA, 120 bp, Artificial Sequence
  ENSG00000197124_8 (sequence is synthesized)
ctggtgttcaccctttgttagacataagaaaattcatacaggagaaaaaccctatacatgtgaagactgtggcagagcgtttaaccggcactcacatctcaccaaacataagacaattca

SEQ ID NO: 713669 - DNA, 120 bp, Artificial Sequence
  ENSG00000197124_9 (sequence is synthesized)
cactggaaagaaaccctacaaatgtaaagaatgtgggaaagcctttaaccactgctcactacttactatacatgagagaacccatacgggagagaaaccctataaatgtgaagaatgtgg

SEQ ID NO: 713670 - DNA, 89 bp, Artificial Sequence
  ENSG00000197124_10 (sequence is synthesized)
cccatacgggagagaaaccctatcatcatcaattcttactgaacataaggtaattcatagcggagagaaaccctacaaatgtgaaaaat

SEQ ID NO: 713671 - DNA, 82 bp, Artificial Sequence
  ENSG00000197124_11 (sequence is synthesized)
tgaagaatgtggcaaagcttttaactggtcctcaatccttactctgtgaagaatgtggaaaagcctttaatcggtgctcaca

SEQ ID NO: 713672 - DNA, 120 bp, Artificial Sequence
  ENSG00000197124_12 (sequence is synthesized)
accctacaactgtgaagaatgtggaaaagcctttaatcggtgctcacaccttactagacataagaaaattcatactgccgtcaaacgctataaatgtgaagaatgtggcaaagcttttaa

SEQ ID NO: 713673 - DNA, 120 bp, Artificial Sequence
  ENSG00000197124_13 (sequence is synthesized)
aatgaacataagagagttcaaagaggagagaaatcctgcaagtataaaaaatgtggggaagcttttaatcactgctcaaaccttactacgtaagaatttttactaaagagaaatcctaca

SEQ ID NO: 713674 - DNA, 120 bp, Artificial Sequence
  ENSG00000197124_14 (sequence is synthesized)
aatgtaaagaatgtggcaaattccataaatcttgctcaaggcattgaaatcacaagataattcatactggagagaaacactacaaatgtgaagaatgtggggaaagtcttcaaccattgc

SEQ ID NO: 713675 - DNA, 120 bp, Artificial Sequence
  ENSG00000197124_15 (sequence is synthesized)
tgacagcttattgcacagaagaaaattcatgctgagaaaaattctgattttaaagaatgtggcaaagcatttaataactactatgaacttactcatcagaggttttgtgctagataaaag

SEQ ID NO: 713676 - DNA, 120 bp, Artificial Sequence
  ENSG00000197124_16 (sequence is synthesized)
caatgtaagtgtaatgatacacattacatttatctgtggaaagatgtcaccaaataaaagccttagagtacacaaggtgtaatgatagtgatacattacatttgtacatggaaagacttc

SEQ ID NO: 713677 - DNA, 120 bp, Artificial Sequence
  ENSG00000197124_17 (sequence is synthesized)
aaaaatataagccttagagtacacaagagtttttatactgaagaaaaacattacaaatataaagattgttgcaatacttttacttatgttacagattttgttgtacataggagaatttat

SEQ ID NO: 713678 - DNA, 120 bp, Artificial Sequence
  ENSG00000197124_18 (sequence is synthesized)
actgaaaggtaaccctctaacagttgctcaaattttattccattttagataatttacattggaaagaaaccctacaactgtaatgaatatgaaaaaaattgtttaaaaagtacaccttag

SEQ ID NO: 713679 - DNA, 62 bp, Artificial Sequence
  ENSG00000197124_19 (sequence is synthesized)
taatgaatatgaaaaaaattgtttaaaaagtacaccttagaaaacactagtttaaggccggg

SEQ ID NO: 713680 - DNA, 66 bp, Artificial Sequence
  ENSG00000197124_20 (sequence is synthesized)
caggagatcgagatcgggtgcctgtagtcccagctactgggagaggctgaggcaggagaatggcgt

SEQ ID NO: 713681 - DNA, 120 bp, Artificial Sequence
  ENSG00000197124_21 (sequence is synthesized)
gacagagactctgtctcaaaaaaaaagaaagaacgctagtttatatgaaagcatttaacagatgcagtaaatataaaaaattaataaaaaattaagtctaaatgaacatcagaagattca

SEQ ID NO: 713682 - DNA, 120 bp, Artificial Sequence
  ENSG00000197124_22 (sequence is synthesized)
tctaaatgaacatcagaagattcacagtagaaaccactaagacgctaacactttcaatgttattctaaatcagggcattgattataaagagtaattcaaggttaacataatttagttagc

SEQ ID NO: 713683 - DNA, 120 bp, Artificial Sequence
  ENSG00000197124_23 (sequence is synthesized)
ctaaacagaaataggagattaatattttgagacttaaacaattatattcaaagtacactttttgcattgaaagaattttagatttttacaaaggcaaattttgatgtaattgaactctca

SEQ ID NO: 713684 - DNA, 120 bp, Artificial Sequence
  ENSG00000197124_24 (sequence is synthesized)
aattacttgatgctgtgtctttattcctagtgtctgtatgaaagcatgtggtcaatttctgctgctcggggtttgagaagttctatattaggatgtcatttacatacttttcaacagaag

SEQ ID NO: 713685 - DNA, 120 bp, Artificial Sequence
  ENSG00000197124_25 (sequence is synthesized)
attgaggacactgaaatatgaggtgtgtgaagaaagtacacagagaaacttttgtggttgacttataaaacttgtaagtgctgcatgagatagatgttcagagtaatagtcttgtgcatt

SEQ ID NO: 713686 - DNA, 120 bp, Artificial Sequence
  ENSG00000197124_26 (sequence is synthesized)
attcaaattttagtaaattgttttaccaattgcacattagatagtatagtggattttgtaatgcttttcttagactgtgtgaacttagtttcaataaaacaattatttttaatgtgttaa

SEQ ID NO: 713687 - DNA, 120 bp, Artificial Sequence
  ENSG00000197124_27 (sequence is synthesized)
tctctgtgtgctgacagtgtgggcttctaccccacttaagctcagaccacatatatcagcttgatattatcaggcagtgtgctgaagacctgggcagttggcactgggcccatggatttg

SEQ ID NO: 713688 - DNA, 120 bp, Artificial Sequence
  ENSG00000197124_28 (sequence is synthesized)
tcctctggccctttggggtcaagcaccatctgtgatataagtggatgccatgctgtgggcacccttctgcaggaccagccaggtaggtcatcttggacggtgccagcaggcaaagtggtg

SEQ ID NO: 713689 - DNA, 120 bp, Artificial Sequence
  ENSG00000197124_29 (sequence is synthesized)
catggatcagattcacctcagtcccatgatagctacaaccttgctctctctcagcctggcagacagcagcagatggatcccctcagtgcaagatgcagagcctcggaggatgggcaccta

SEQ ID NO: 713690 - DNA, 120 bp, Artificial Sequence
  ENSG00000197124_30 (sequence is synthesized)
tggtcagctacagctgcacagcacagtgaaaactgcagatttccacaagagtttaagctgtgcctctgcctattctccaggtggctccccctgccagttcacagatgtatagggatcata

SEQ ID NO: 713691 - DNA, 120 bp, Artificial Sequence
  ENSG00000197124_31 (sequence is synthesized)
tgagagtctataatcaggagctcagactagatttagctgggaaatgcctttcaaggagaaggaaccaaagtgagaatctcagaggtccatggctagactgtgttgccctggggtttcttc

SEQ ID NO: 713692 - DNA, 120 bp, Artificial Sequence
  ENSG00000197124_32 (sequence is synthesized)
acatatcccttccataagactggtctggatctacgagccagtcctggtgcccagtgactttgagcaagcttcccatcttcctcttcaaccacagtttctgcattacctctgaattaagct

SEQ ID NO: 713693 - DNA, 120 bp, Artificial Sequence
  ENSG00000197124_33 (sequence is synthesized)
ttttctcaaaagatctgtttaaagtatgatgttttactcaacattttgttttctctccttggagtgagtgtttcccagctgcatctagtaagtcatcctgtccttttcttaattttctgt

SEQ ID NO: 713694 - DNA, 120 bp, Artificial Sequence
  ENSG00000197124_34 (sequence is synthesized)
acatattaataagtttccctagtattatatgaggagtcatgagaattgttgtaaattcaacatctattcattggtggatgtatattttctttttgtgagagaaacacttgtgatttgaag

SEQ ID NO: 713695 - DNA, 120 bp, Artificial Sequence
  ENSG00000197124_35 (sequence is synthesized)
gtgacgggactggggcctcccagctgtcagctccggagtctgcggactggagtccccggcaggcacagctcggccgtcgatcacctccgggcacaggatgcgaggaactgttgacattca

SEQ ID NO: 713696 - DNA, 120 bp, Artificial Sequence
  ENSG00000197124_36 (sequence is synthesized)
ctgctctagtagttcccggtgactgtcgcagcctctgttgccctctgacttgcagatgctgtgagatccagagctaagactccacgacatcccggaagccgaaaaatgaatcagtctcag

SEQ ID NO: 713697 - DNA, 120 bp, Artificial Sequence
  ENSG00000197124_37 (sequence is synthesized)
cagagtgactgtagaccctcttcccagcacctgagagtctttgagacatttgaggttgttgtgtgcagactgggatgggagttgttccagttttcacttgggtgaaaaaaaaggagagct

SEQ ID NO: 713698 - DNA, 120 bp, Artificial Sequence
  ENSG00000197124_38 (sequence is synthesized)
ggagactgatcaaccaattactttcatttcatatggcgattagaaaaacagatgaggcaatcataatctctgcaatccaggaactgtgtctgtggcaaatgaataaatggctgaatttca

SEQ ID NO: 713699 - DNA, 120 bp, Artificial Sequence
  ENSG00000197124_39 (sequence is synthesized)
agtagttcccggtgactgtcgcagcctctgttgccctctgacttgcagatgctgtgagatccagagctaagactccacgacatcccggaagccgaaaaatgctatgtcttctcattacac

SEQ ID NO: 713700 - DNA, 120 bp, Artificial Sequence
  ENSG00000197124_40 (sequence is synthesized)
aacctggaggatcctcctgctcattctctgtgcccctggacacgtagctagaggagtgcatgcactggcttatagcagagctgccactattctgggtttttttttttttccttgtcttat

SEQ ID NO: 713701 - DNA, 120 bp, Artificial Sequence
  ENSG00000197125_0 (sequence is synthesized)
ggagggcagcagtggtctctctctctctctaaataactttttcccttgtccccacagaatgccttaaatgacaatggctgctgagaattcctccttcgtgacacagtttatcctcgcagg

SEQ ID NO: 713702 - DNA, 120 bp, Artificial Sequence
  ENSG00000197125_1 (sequence is synthesized)
cttaactgaccaaccgggagtccagatccccctcttcttcctgtttctaggcttctacgtggtcactgtggtggggaacctgggcttgataaccctgataaggctcaactctcacttgca

SEQ ID NO: 713703 - DNA, 120 bp, Artificial Sequence
  ENSG00000197125_2 (sequence is synthesized)
cacccctatgtacttcttcctctataacttgtccttcatagatttctgctattccagtgttatcactcccaaaatgctgatgagctttgtcttaaagaagaacagcatctcctacgcagg

SEQ ID NO: 713704 - DNA, 120 bp, Artificial Sequence
  ENSG00000197125_3 (sequence is synthesized)
gtgtatgactcagctcttcttctttcttttctttgttgtctctgagtccttcatcctgtcagcaatggcgtatgaccgctatgtggccatctgtaacccactgttgtacatggtcaccat

SEQ ID NO: 713705 - DNA, 120 bp, Artificial Sequence
  ENSG00000197125_4 (sequence is synthesized)
gcgtgcatgatgggtgtgaccttctgtgccaataaccttgtcaaccactacatgtgtgacatccttccccttcttgagtgtgcttgcaccagcacctatgtgaatgagcttgtagtgttt

SEQ ID NO: 713706 - DNA, 120 bp, Artificial Sequence
  ENSG00000197125_5 (sequence is synthesized)
gttgttgtgggcattgatattggtgtgcccacagtcaccatcttcatttcctatgctctcattctctccagcatcttccacattgattccacggagggcaggtccaaagccttcagcacc

SEQ ID NO: 713707 - DNA, 120 bp, Artificial Sequence
  ENSG00000197125_6 (sequence is synthesized)
tgcagctcccacataattgcagtttctctgttctttgggtcaggagcattcatgtacctcaaacccttttctcttttagctatgaaccagggcaaggtgtcttccctattctataccact

SEQ ID NO: 713708 - DNA, 120 bp, Artificial Sequence
  ENSG00000197125_7 (sequence is synthesized)
gtggtgcccatgctcaacccattaatttatagcctgaggaataaggacgtcaaagttgctctaaagaaaatcttgaacaaaaatgcattctcctgagaaaagggcaatgctcaggaaaga

SEQ ID NO: 713709 - DNA, 120 bp, Artificial Sequence
  ENSG00000197125_8 (sequence is synthesized)
ggtttctcataatcactgagggagtggcagatttctaggtataagagttacacttgaggcatcttgtttctgagcagtgactaaaatacattccacatgtggcagaggagcaagctctga

SEQ ID NO: 713710 - DNA, 120 bp, Artificial Sequence
  ENSG00000197125_9 (sequence is synthesized)
gctccgcagccaatctgtctgaacaagtgaagataagagctggacctaaaggcacatcactgaaactctgggctgaagaggatgagaggctgaatccggatgagcagtccgaacttttcc

SEQ ID NO: 713711 - DNA, 120 bp, Artificial Sequence
  ENSG00000197125_10 (sequence is synthesized)
tttaagggttctttaatttacaaacattcttaagagctttgaatactcacacagtaagtcttgaggatcatttcactcagttccccgctatttctgaggatagactcaagcttatgtacc

SEQ ID NO: 713712 - DNA, 120 bp, Artificial Sequence
  ENSG00000197125_11 (sequence is synthesized)
ttccccgaggtcgctcagctgctcagcagtggaactgcgactaaaatccaggctctttatttccagtactggctgcttttcattatggctcactttcttcctccctcagcctctggaaga

SEQ ID NO: 713713 - DNA, 120 bp, Artificial Sequence
  ENSG00000197125_12 (sequence is synthesized)
tttcatttcaaatgtgagctggcctaggatgttaaaatctgattctgtcctcagaaattacatgcaacttttcaaaggctaattttaaatgtcgcatttttgcaagtaggtaggaagtat

SEQ ID NO: 713714 - DNA, 120 bp, Artificial Sequence
  ENSG00000197125_13 (sequence is synthesized)
atagaattttttgttgagatggccttggccaaatgaccagggaaattcttgaagcattttgaagaaggtgcaggggaagtgtgttaggacccagggagcagcatgtatggtacctcttaa

SEQ ID NO: 713715 - DNA, 120 bp, Artificial Sequence
  ENSG00000197125_14 (sequence is synthesized)
gacagtggggtggagcttcagggacttggacttgaagggttttagtgatgctgggtggaagaacttatagaaaatgtcaaggttatgaagaacagaatttgggaattatttcacatgcaa

SEQ ID NO: 713716 - DNA, 60 bp, Artificial Sequence
  ENSG00000197125_15 (sequence is synthesized)
agatggggaccaaatgcagtggctcatgcatgtactctcagctactcaggagactgaggg

SEQ ID NO: 713717 - DNA, 120 bp, Artificial Sequence
  ENSG00000197125_16 (sequence is synthesized)
aacaacaacaaaaaaacttcaagatggagaagtccaccgcctagggtggtcagttatggatctggagaatatttcagaaccacagagagccttgtgttacaagtcagtagtcaggtgaga

SEQ ID NO: 713718 - DNA, 120 bp, Artificial Sequence
  ENSG00000197125_17 (sequence is synthesized)
tccacacagcagtcagtcagtggagggaatgaccactgaatggtataatgctgcatgcagcagaaaccatgtggggtactttttgcatggtttcacagatcaactttctgccccttggcg

SEQ ID NO: 713719 - DNA, 120 bp, Artificial Sequence
  ENSG00000197125_18 (sequence is synthesized)
cctcacgccgaatcctgggaggtattccttaactggtccccttgccctctggtttcagttgggttagaccaatggcaacatcagcagaggaaatcagagggtaggaggagtgtgatatta

SEQ ID NO: 713720 - DNA, 120 bp, Artificial Sequence
  ENSG00000197125_19 (sequence is synthesized)
tgctatttatttccctgacttcctcctagctgggcaacagtggcagtaactgaatgcctcatttcttactgggttataataactgccccctccctcgtctcttcatgccaaggagtgata

SEQ ID NO: 713721 - DNA, 120 bp, Artificial Sequence
  ENSG00000197125_20 (sequence is synthesized)
atgtctccctgctgttgctaacccagagagcttgaccatctctttgtggtttctctcaaccacttttgcttaaacaaatgcagatagtttctttattgtattttcaattactgtatttat

SEQ ID NO: 713722 - DNA, 120 bp, Artificial Sequence
  ENSG00000197125_21 (sequence is synthesized)
gtggatcatctgatttttgcagaaaccctgactgctgcaccttccaataaagggtgggagaaatgatatggctcaggtttataagcccacagcctaatggtactgtataaaggaaggtag

SEQ ID NO: 713723 - DNA, 120 bp, Artificial Sequence
  ENSG00000197125_22 (sequence is synthesized)
agtagcttttcagtttaaaaagattataaatagtagatttctttgtgaaacaatgatatgtgaaatgctgtgaaaatgtgttgacttacgagtctctctttaggaagattctcttctatt

SEQ ID NO: 713724 - DNA, 120 bp, Artificial Sequence
  ENSG00000197125_23 (sequence is synthesized)
tagaaaaagtaaagtttggatggatgtagagtgttgccctttgggatggtgcagattaataagggtgaattcaaaagaatgagggattgtgtcttggacagcatggactagataaacaac

SEQ ID NO: 713725 - DNA, 120 bp, Artificial Sequence
  ENSG00000197125_24 (sequence is synthesized)
acagaatttagctgactatgggattgagaggggcagagcagcataaagactcaaaaagagcagagcccagagagttggatggtagaatcaaatttgaacctgagcttctcctcagctgtg

SEQ ID NO: 713726 - DNA, 120 bp, Artificial Sequence
  ENSG00000197125_25 (sequence is synthesized)
ttgcctttagcattacatgatgtctctgaacatcaatttcttcatctttaaaaacgtttttctcagaggtattaagtgaattagatgccagattctcggtaaatttgtttctgtccctgc

SEQ ID NO: 713727 - DNA, 120 bp, Artificial Sequence
  ENSG00000197125_26 (sequence is synthesized)
cagatccttttccttttaatatcagcacttgcactaatttattatgtgaccttgggacaattgcttcatttttctgggtctatgcttgcttatatgaaaatgatcatgttctatcagatt

SEQ ID NO: 713728 - DNA, 120 bp, Artificial Sequence
  ENSG00000197125_27 (sequence is synthesized)
atttctacattccatttacaagatatatttatttatatattgaccagataatacatttgctataggctgaacacttgtgtcccctcagaatcagattttgaaatgacggatgttgaaagg

SEQ ID NO: 713729 - DNA, 120 bp, Artificial Sequence
  ENSG00000197125_28 (sequence is synthesized)
gacggatgttgaaaggaggtggggtctttgggaggtgattaggtaatgagggtggggccctcatgaatgaggttagtgtccttataaaagagtcctgaggctgggtgcggtggctcacgc

SEQ ID NO: 713730 - DNA, 120 bp, Artificial Sequence
  ENSG00000197125_29 (sequence is synthesized)
cacacacacacacacacacacaaagtctgagagagacctcccccacctcttctaccatgtaagaacaaaacaagaaggctctgtctatgaggcagaaagcgggctctcaccagacacgga

SEQ ID NO: 713731 - DNA, 120 bp, Artificial Sequence
  ENSG00000197125_30 (sequence is synthesized)
ctatgaggcagaaagcgggctctcaccagacacggaatctgctgctgccttaatcttggacttctcagcctctggaaccatgagaaataaattcctgctgtttaaaagccacctggtgtg

SEQ ID NO: 713732 - DNA, 120 bp, Artificial Sequence
  ENSG00000197128_0 (sequence is synthesized)
gggcgggacttcctctaccatcctcgggtggacattttgtttgcttttccattaatccactggtttagtttccagaacgcaatgtcagacctgaggtgacagaaaagggaaaacgtgaga

SEQ ID NO: 713733 - DNA, 120 bp, Artificial Sequence
  ENSG00000197128_1 (sequence is synthesized)
gagtgtcttcttccctgaagagaggtgggcctgaggcttgacagtggcgctgcctgagtgacctagccgctgggctgggccctggacagctgatcccaggttcctgcacttgtcgccacc

SEQ ID NO: 713734 - DNA, 120 bp, Artificial Sequence
  ENSG00000197128_2 (sequence is synthesized)
cttccgtagtccacaggcctgatggcggcggctgagccgatgggcccggcacaggttcccatgaactcagaagtaattgtggaccctatacaggggcaggtgaactttgaggacgtgttc

SEQ ID NO: 713735 - DNA, 120 bp, Artificial Sequence
  ENSG00000197128_3 (sequence is synthesized)
gtgtacttctcccaggaggagtgggtgctccttgatgaggctcagaggctcctgtaccgtgatgtgatgctggagaactttgcacttatggcctctctgggacatacatctttcatgtcc

SEQ ID NO: 713736 - DNA, 120 bp, Artificial Sequence
  ENSG00000197128_4 (sequence is synthesized)
cacatagttgcctcactggtgatgggtagtgagccctgggtacctgactgggtggacatgaccctagctgttgccacagagactccaggtgggagtgaccctggttgttggcatggaatg

SEQ ID NO: 713737 - DNA, 120 bp, Artificial Sequence
  ENSG00000197128_5 (sequence is synthesized)
gaggatgaagagataccttttgagcagagcttttctataggaatgtcacagatcaggattcccaagggaggtccttctactcagaaggcttacccctgtgggacatgtggcctggtctta

SEQ ID NO: 713738 - DNA, 120 bp, Artificial Sequence
  ENSG00000197128_6 (sequence is synthesized)
aaagacattttgcacttggctgagcaccaggaaacacacccagggcagaaaccatacatgtgtgtgctgtgtgggaaacagttctgcttcagtgcaaaccttcaccagcaccagaagcag

SEQ ID NO: 713739 - DNA, 120 bp, Artificial Sequence
  ENSG00000197128_7 (sequence is synthesized)
cacagtggagagaaaccctttagaagtgataagagcaggccctttcttctgaacaactgtgctgtgcaatcaatggagatgtcttttgtgacaggggaggcttgtaaggacttcctagcc

SEQ ID NO: 713740 - DNA, 120 bp, Artificial Sequence
  ENSG00000197128_8 (sequence is synthesized)
agctcaagcattttcgagcaccatgcccctcacaatgagtggaagccacacagcaacaccaagtgtgaggaggcctctcactgtggaaaaaggcattacaaatgcagtgaatgtgggaaa

SEQ ID NO: 713741 - DNA, 120 bp, Artificial Sequence
  ENSG00000197128_9 (sequence is synthesized)
accttcagccgcaaagactcacttgttcaacaccagagagtccacactggagaaaggccttatgagtgcggtgaatgtgggaaaacctttagccgcaaacccatacttgctcagcaccag

SEQ ID NO: 713742 - DNA, 120 bp, Artificial Sequence
  ENSG00000197128_10 (sequence is synthesized)
agaatccacactggagaaatgccttatgagtgtggcatatgtgggaaagtttttaatcatagctctaaccttattgtacatcaaagagtacacactggagcaaggccttacaagtgcagt

SEQ ID NO: 713743 - DNA, 120 bp, Artificial Sequence
  ENSG00000197128_11 (sequence is synthesized)
gaatgtgggaaagcctatagtcacaaatctacacttgttcagcatgagagtatccatactggagaaaggccatatgagtgcagcgaatgtggaaaatactttggtcacaaatacagactc

SEQ ID NO: 713744 - DNA, 120 bp, Artificial Sequence
  ENSG00000197128_12 (sequence is synthesized)
attaaacattggagtgttcatactggagcaaggccttatgagtgcatcgcatgtgggaagttctttagccaaagctctgaccttattgcacatcaaagagttcataatggtgaaaagcct

SEQ ID NO: 713745 - DNA, 120 bp, Artificial Sequence
  ENSG00000197128_13 (sequence is synthesized)
tatgtgtgcagtgaatgtggaaaagcctttagccacaaacatgtacttgttcagcatcatagaattcacactggagaaaggccatataagtgcagtgaatgtgggaaggccttcaggcag

SEQ ID NO: 713746 - DNA, 120 bp, Artificial Sequence
  ENSG00000197128_14 (sequence is synthesized)
agggcttccctcatccgccactggaaaattcacactggagaaaggccttaggatgggagataattccgtttccttgttcaacataataactgacatcagagagaagctccaagcatagcc

SEQ ID NO: 713747 - DNA, 120 bp, Artificial Sequence
  ENSG00000197128_15 (sequence is synthesized)
tttatgtgtagccgacagccagaagtagaactttatacactcaaacactcaccctggggaggttcttccgagtgccagctatatgggaagccttctggagctatgctgaattttctagac

SEQ ID NO: 713748 - DNA, 120 bp, Artificial Sequence
  ENSG00000197128_16 (sequence is synthesized)
tcttgctggaatttcgtcaaggcagtgcctgttagaagccatctgtctttgtgctggaagagtcctgccttgtgccaaagtaaccccaatgtgtttcaaaagacagacctctgtactatt

SEQ ID NO: 713749 - DNA, 120 bp, Artificial Sequence
  ENSG00000197128_17 (sequence is synthesized)
cccttccctggagggaatcatcagtagcctgaggccatcaaggattctcactttttttctgccccactactggtttaagcatgagcatgacccagttttagccagaaaaatgggagcttt

SEQ ID NO: 713750 - DNA, 120 bp, Artificial Sequence
  ENSG00000197128_18 (sequence is synthesized)
gttctgctgaccactggcagaggtttcccttcatggatatagttgatctcacatggcacttgggacgaatttttctagccttcaagacacctgacctgaaattggctgcctcatattctg

SEQ ID NO: 713751 - DNA, 120 bp, Artificial Sequence
  ENSG00000197128_19 (sequence is synthesized)
gttttgcaacaaatgccttaatttttagactatctgaaatcttgaggattctgttcgctttgtgggttgggttgagaacagaattgagctaagccagtatgaagggaagaacagcttttg

SEQ ID NO: 713752 - DNA, 120 bp, Artificial Sequence
  ENSG00000197128_20 (sequence is synthesized)
tgagagctccaactatctgtatctctgaagtgatagtaggatggcaaagactagctcttatgctagtgtcaagctaacttacttgactgcttcagctctcctaggaaagaatgccagtct

SEQ ID NO: 713753 - DNA, 120 bp, Artificial Sequence
  ENSG00000197128_21 (sequence is synthesized)
ttgtaggcctaatcttttggtctatatgttaagattttttgtgtaattgaggtcaccctaagcagtgggcatttgttgtgataatctctaatgtgtctgggagcaacatgaattacgtcc

SEQ ID NO: 713754 - DNA, 120 bp, Artificial Sequence
  ENSG00000197128_22 (sequence is synthesized)
tcatattcccaaggcttcttgaggagaatttgaactcagtggacatgtcaagatctctgaagtctatttttcagtaggcagttgatattggctgtcctccagaaggcccaggtaggaatc

SEQ ID NO: 713755 - DNA, 120 bp, Artificial Sequence
  ENSG00000197128_23 (sequence is synthesized)
atagttggtgcagaaacccagattaataaaggaatgagaaaactgcagcaaactatagggaatatgacccttctaaaggtacatccacatgtgtttccattactctggctccattatgag

SEQ ID NO: 713756 - DNA, 120 bp, Artificial Sequence
  ENSG00000197128_24 (sequence is synthesized)
ggtttacagaaatatttccatacctgtgtctcttatggctaaggttactgtccagaagtcagtctaaacatttttgcaataaactgcacatatttatagtgtaccatttgataagttttg

SEQ ID NO: 713757 - DNA, 120 bp, Artificial Sequence
  ENSG00000197128_25 (sequence is synthesized)
atacatgttggcacttctcaaaccaaaagtttcctgattccttttatattttctccctttccttcacccatccccaggcaactattgatccgttgtcactgtagatttgtttgtatttcc

SEQ ID NO: 713758 - DNA, 120 bp, Artificial Sequence
  ENSG00000197128_26 (sequence is synthesized)
tagaattctacagagatagagtaatttaatatgtattctaatgtttttggcttcttaaactctgaaattaaggctcatggtggtgttctgtgtttcatagttcatttcttttcatttgta

SEQ ID NO: 713759 - DNA, 120 bp, Artificial Sequence
  ENSG00000197128_27 (sequence is synthesized)
ctttgctaagagtgttccattgtagagaaatagtttcaaagcaagtgatccaggagagaactcacacaagaacaaagccacagtatctgtcattaccttaaactgaaagtgatgagccgt

SEQ ID NO: 713760 - DNA, 120 bp, Artificial Sequence
  ENSG00000197128_28 (sequence is synthesized)
catttctgctatatttcataagtaaccctagctaatcctggttaaaagtggaagagaactacacaaaggtgaaaatagggatttgtggggcgttttcttggactctggtgaccataatcc

SEQ ID NO: 713761 - DNA, 120 bp, Artificial Sequence
  ENSG00000197128_29 (sequence is synthesized)
tatatggtttttttctttttctgttttagttgtttaatatgaattacattgactgatttttttaaatgttaagccaaccttgcatttctgtaataattcccatttggtcatgatgtatta

SEQ ID NO: 713762 - DNA, 120 bp, Artificial Sequence
  ENSG00000197128_30 (sequence is synthesized)
gtcatttagtatattgttgaatttgatttgctattttgttttgttttgttttgtttttttgtaacaagttttgcaccaatgttcacgagtgatatttgtccctaactttctttcttgctt

SEQ ID NO: 713763 - DNA, 120 bp, Artificial Sequence
  ENSG00000197128_31 (sequence is synthesized)
gcttgcttttttttctttgtaattttatatcttgcccaggtttggctttggtatcagcataatgccagctttatagagtaagttgggaagtattcctgctcttcagctctctggaagagt

SEQ ID NO: 713764 - DNA, 120 bp, Artificial Sequence
  ENSG00000197128_32 (sequence is synthesized)
ttgtgaataattggtattatttcttccttaaatgtttggtagaattcaccaaggaagctgtctgggcctggagtttgttttgtaggaaagtttctaactataagtttgatttctgtggta

SEQ ID NO: 713765 - DNA, 120 bp, Artificial Sequence
  ENSG00000197128_33 (sequence is synthesized)
gatagagggctgtacaagttatatgtacatctgtctgtgtgtgtgttgtctgtctgtcactctggccctgaagtgtgttttgtaggacagcatctaactacaagtttgatttccatggta

SEQ ID NO: 713766 - DNA, 120 bp, Artificial Sequence
  ENSG00000197128_34 (sequence is synthesized)
gatggagggctatactagttatatatacatctgtctgtccgtccatctgtttgtcactccatccatccatctatctctagagtgagctttgatggtttgtgtctttcaaggagtttttct

SEQ ID NO: 713767 - DNA, 120 bp, Artificial Sequence
  ENSG00000197128_35 (sequence is synthesized)
gttttatttaagtactcaaatttttcaaaatattattttcatacttgtagaatttgtagtggtgcaacctcttctattcctgatactggtaatgtctatatttttcttttaaccttgatt

SEQ ID NO: 713768 - DNA, 120 bp, Artificial Sequence
  ENSG00000197128_36 (sequence is synthesized)
ggtttgggtagagatttatcaattttacaattttattgatcttaaagtacttggtattattgaattttctgttttctgatattttgggatttttcttttccattttgagttttactaatg

SEQ ID NO: 713769 - DNA, 120 bp, Artificial Sequence
  ENSG00000197128_37 (sequence is synthesized)
ccttccgcttttattggatttcatttcttttgctactttttaacatggaagctgaggtccttcatttcaaacctttgggtttttttcccctaatatggggaagagatgttaatgttaaaa

SEQ ID NO: 713770 - DNA, 120 bp, Artificial Sequence
  ENSG00000197128_38 (sequence is synthesized)
ttttttcccctaatatggggaagagatgttaatgttaaaaatctatctgagaactgctttaattacctcccatcaagcttgatgtggtttcatttttttttttgagacagtgtcttgctc

SEQ ID NO: 713771 - DNA, 67 bp, Artificial Sequence
  ENSG00000197128_39 (sequence is synthesized)
gccgatgtggtttcattttagttgagtttaggatgttttccagttaaaaaaattcttcttgacacat

SEQ ID NO: 713772 - DNA, 120 bp, Artificial Sequence
  ENSG00000197128_40 (sequence is synthesized)
ttaggatgttttccagttaaaaaaattcttcttgacacatggctctttttaaatgtatgttatttaattcctaaatatttggggattttgcttatctttctggtagtttctgcaataatt

SEQ ID NO: 713773 - DNA, 120 bp, Artificial Sequence
  ENSG00000197128_41 (sequence is synthesized)
ccattgtggtcagagtacattaagacttgaattatttacatttattgagatttgctttgtggcccagaatatgggctatcttggtatgagttacatgttcacttgaaatgtatactgtac

SEQ ID NO: 713774 - DNA, 120 bp, Artificial Sequence
  ENSG00000197128_42 (sequence is synthesized)
tctcgtttgatgaaggggttctacaagtgttgattaggtaaaaatggttgatgttatttaagttttttctatctttattgacattctgtggttttggttccagcaattattttaagagga

SEQ ID NO: 713775 - DNA, 120 bp, Artificial Sequence
  ENSG00000197128_43 (sequence is synthesized)
ttgttgacatctctgaatattaaattggatttacttctctgcagttctgtcagattttgcttcacatattttagtatgtttttattaggtgaataataaatatttcctattttatgtcca

SEQ ID NO: 713776 - DNA, 120 bp, Artificial Sequence
  ENSG00000197128_44 (sequence is synthesized)
ggtgttatatagaacactctcctgctactctccgatctcttgggtctgaggactctggagaagccccaagcccagggtcctgactccgggccaggggttttatggaggggtttccatttc

SEQ ID NO: 713777 - DNA, 120 bp, Artificial Sequence
  ENSG00000197128_45 (sequence is synthesized)
tgccaaccattggaataaggttggaaggttgttccaggcacaggaaccagcctgtgcaaaatacttagaggggcaggtgaactttgaggacgtgttcgtgtacttctcccaggaggagtg

SEQ ID NO: 713778 - DNA, 120 bp, Artificial Sequence
  ENSG00000197128_46 (sequence is synthesized)
caactactcatgcaagaaagcacattcataagaaccagaaaactagatgagtgatcggagtacctgattttaacataatatcaagaagaaaggcattgaagtgggtaggaaaggtagtct

SEQ ID NO: 713779 - DNA, 120 bp, Artificial Sequence
  ENSG00000197128_47 (sequence is synthesized)
tgcattgcttaaaccacccctttcccatcccttggcagaccaacatgcagagaaaaatctgtgtgcttgtagaagagagcacgaagtgagtgtgggactgcattggaacctggtgctgcc

SEQ ID NO: 713780 - DNA, 120 bp, Artificial Sequence
  ENSG00000197128_48 (sequence is synthesized)
acagcatttacaccagcctggggccagaagcaaattcctttcaacccccgtgaaaggaacctgagtctcagctggcaccaccaacagctgaccgaagtggcctggggcccagaataagtt

SEQ ID NO: 713781 - DNA, 120 bp, Artificial Sequence
  ENSG00000197128_49 (sequence is synthesized)
gtacctgactgggtggacatgaccctagctgttgccacaggttgttggcatggaatggaggatgaagagataccttttgagcagagcttttctataggaatcttcagtgcaaaccttcac

SEQ ID NO: 713782 - DNA, 120 bp, Artificial Sequence
  ENSG00000197134_0 (sequence is synthesized)
actttgtctctcgctctagcccgagctgcaggtctcgtcttccctggtctgtgtcctcttctcctaggggcccagcctctgtggccctgtgacctgcaggtattgggagatccccagcta

SEQ ID NO: 713783 - DNA, 120 bp, Artificial Sequence
  ENSG00000197134_1 (sequence is synthesized)
gtgacctgcaggtattgggagatccccagctaagacgccaggtcctcctggaagcctagaaatgggaccactgacaattagggatgtgactgtagaattctctctggaggagtggcattg

SEQ ID NO: 713784 - DNA, 120 bp, Artificial Sequence
  ENSG00000197134_2 (sequence is synthesized)
atgtgatgttagagaactacagaaacctggtcttcctgggtattgctgtctctaagccagacctgatcacctgtctggagcaaggaaaagagccctgtaatatgaagagacatgagatgg

SEQ ID NO: 713785 - DNA, 120 bp, Artificial Sequence
  ENSG00000197134_3 (sequence is synthesized)
tagccaaacccccagttatgtgttctcatattgctgaagacctttgcccagagcgagacataaaatattttttccaaaaagtcatactgaggagatatgataaatgtgaacatgagaatt

SEQ ID NO: 713786 - DNA, 120 bp, Artificial Sequence
  ENSG00000197134_4 (sequence is synthesized)
tacaattaagaaagggctgtaaaagtgtggatgagtgtaaggtgtgcaaaggaggttataatggacttaaccaatgtctgataactacccagagcaaaatgtatcaatgtgataaatatg

SEQ ID NO: 713787 - DNA, 120 bp, Artificial Sequence
  ENSG00000197134_5 (sequence is synthesized)
taaaagtcttctataagttttcaaattcagatagacataagataagacatactgaaaagaaaacttgcaaatgtaaagaatgtggcaaatcattttgcatgctttcacaactaactcgac

SEQ ID NO: 713788 - DNA, 79 bp, Artificial Sequence
  ENSG00000197134_6 (sequence is synthesized)
tgtggcaaatcattttgcatgctttcacaactaactcgacataagagaattcatattagagagaattcccgctcttact

SEQ ID NO: 713789 - DNA, 120 bp, Artificial Sequence
  ENSG00000197134_7 (sequence is synthesized)
gtgaagagtgtggaaaagcttttaaccggtcttcacaccttactcaacataaggtaattcatactagagagaaaccctacaaatgtgaagagtgtggcaaagcctttaaccggtcttcac

SEQ ID NO: 713790 - DNA, 120 bp, Artificial Sequence
  ENSG00000197134_8 (sequence is synthesized)
acattactcaacataagagaattcataatagagagaagcccttcaaatatgatgaatgttgcaaagcctttaagtggtcctcagctcttactacccttactcaacataagagaattcata

SEQ ID NO: 713791 - DNA, 120 bp, Artificial Sequence
  ENSG00000197134_9 (sequence is synthesized)
ctggagagaaaccctacaaatgtgaagagtgtggcaaagcctttaaccagtcctcagcccttactcgacataagatgattcatactggagagaaacccttccaatgtgaagagtgtggca

SEQ ID NO: 713792 - DNA, 120 bp, Artificial Sequence
  ENSG00000197134_10 (sequence is synthesized)
aagcttttaaccggtcttcacaccttactcaacataagataattcatactaaagagaaaccctacaaatgtgaagagtgtggaaaagcctttaaccggtcttcacaccttactaaacata

SEQ ID NO: 713793 - DNA, 120 bp, Artificial Sequence
  ENSG00000197134_11 (sequence is synthesized)
cataagagaattcatactagagagaaggcctacaaatgtgatgaatattgcaaagcttttaactggtcctcagctcttactacccttactcagcataagataattcatactggagagaaa

SEQ ID NO: 713794 - DNA, 74 bp, Artificial Sequence
  ENSG00000197134_12 (sequence is synthesized)
cttactcatgtggcaaagcctttaaccggtcttcataccttattcgacataagataattcatactggagagaaa

SEQ ID NO: 713795 - DNA, 78 bp, Artificial Sequence
  ENSG00000197134_13 (sequence is synthesized)
ccctacaaatgtgaagagtgtggcaaagcctttaaccagtcttcacaccttactcaacataaaataattcatactggg

SEQ ID NO: 713796 - DNA, 120 bp, Artificial Sequence
  ENSG00000197134_14 (sequence is synthesized)
ccctacaaatgtgaagaatgtggcaagccttttaatcgtttctcataccttaccgtacataagagaattcatgctggagagaaccccaacaaatatgaagaatgtggcaaagcttgtaac

SEQ ID NO: 713797 - DNA, 89 bp, Artificial Sequence
  ENSG00000197134_15 (sequence is synthesized)
agtcaaagcttttaactgttcctcaatccttactaaacataagggaattcataatagagaaaccctacaaatgtgaagaacgtggcctg

SEQ ID NO: 713798 - DNA, 120 bp, Artificial Sequence
  ENSG00000197134_16 (sequence is synthesized)
ggcttttaacaaatcctcaacatttactaagcataaaataattcatgctggagagaaactcttgaaatgtgatgaatgtggcatagcctcttcccagttctcaactcttactaaacatga

SEQ ID NO: 713799 - DNA, 120 bp, Artificial Sequence
  ENSG00000197134_17 (sequence is synthesized)
gaacacatgtggaagataaagcctacaaatatgaagaatgtgacaaggcctttaaaagttctcaacccttattacacataatttatactggacagaaatcctaaagtgtgaagaatgtca

SEQ ID NO: 713800 - DNA, 120 bp, Artificial Sequence
  ENSG00000197134_18 (sequence is synthesized)
caaagcccttaataagtcctcaattcttaacagatataagatgtttcatactggagcgaaactacaatcctgaatgatgtcacagtgcttttaacaatacctcaaacttttctaaacata

SEQ ID NO: 713801 - DNA, 120 bp, Artificial Sequence
  ENSG00000197134_19 (sequence is synthesized)
aaaaaaaattatactagtgcgaaactctagaaatataaagaacatgaaaaacttttaaatggttttcacacttgattgcaggtaaaataatttataccggagaaaactccaagtgtgaag

SEQ ID NO: 713802 - DNA, 120 bp, Artificial Sequence
  ENSG00000197134_20 (sequence is synthesized)
aatataacttttaaccagtgttcacaacttattgtacaggaaagcatttatagttgagaaatggtgtacaaatataaagaatgtggaaaagtcattaatatttgctcacatattacacat

SEQ ID NO: 713803 - DNA, 120 bp, Artificial Sequence
  ENSG00000197134_21 (sequence is synthesized)
cagagagttcatacttaataaaagtattataaatacaattactgtcaaatgatctttcagaaatataaacctttaaagtgaagaagagttcattctaaagacaaacattacaaatataaa

SEQ ID NO: 713804 - DNA, 120 bp, Artificial Sequence
  ENSG00000197134_22 (sequence is synthesized)
ggggtttgtagtgcttttacttgtatcacagattttattgtacacattttgtactagagaataaccctgaagcagttgctaaaattttgttcagcattaggaaatttatgttggagaaga

SEQ ID NO: 713805 - DNA, 120 bp, Artificial Sequence
  ENSG00000197134_23 (sequence is synthesized)
attcagcaagtgtgattaatttggaaaaacattttttccataactatagcttagaaaatgccagagagctcatactaaaatatacttttgcagatgcaataaatacaaagaaatatttaa

SEQ ID NO: 713806 - DNA, 120 bp, Artificial Sequence
  ENSG00000197134_24 (sequence is synthesized)
ttcaaattgagtttatataattatcagagaattaacagtagaaatagctaaggcactgacacttcagacattacactaaatcagattgctgagtatagaaaatccaaaactacagttggt

SEQ ID NO: 713807 - DNA, 120 bp, Artificial Sequence
  ENSG00000197134_25 (sequence is synthesized)
aatccaaaactacagttggtaagtaaattaattttatgtaactttaaaatgagtagacatttctttgagaagtcataattaaattcaagtatacttttttgataaaattataaagctttt

SEQ ID NO: 713808 - DNA, 120 bp, Artificial Sequence
  ENSG00000197134_26 (sequence is synthesized)
agtcaactctcaaattacttcatgctgtttcttcatttctattgtattcacctgtgaaagcatgtgatcaactattgctgcatcagagatatgagagatactttattaggtgggaattat

SEQ ID NO: 713809 - DNA, 120 bp, Artificial Sequence
  ENSG00000197134_27 (sequence is synthesized)
atacgacctcttctataaaatagtaaggacactgaaatataagatgcataagagtctaagtgaagaggttctttgtggttaacttagtgatgtatgaagtagttgctcatgttatgagag

SEQ ID NO: 713810 - DNA, 120 bp, Artificial Sequence
  ENSG00000197134_28 (sequence is synthesized)
cagtacattttaaaatttttagattatttgtggacttaatttataattaaatattttcttttaccacgttaagactattgtacgttcaggccgggcacagtagctcacgcctgtaatccc

SEQ ID NO: 713811 - DNA, 63 bp, Artificial Sequence
  ENSG00000197134_29 (sequence is synthesized)
aaatcccagctatttgggagattgaggcaagagaatcacgtgtacccaggaggcagaggttgc

SEQ ID NO: 713812 - DNA, 64 bp, Artificial Sequence
  ENSG00000197134_30 (sequence is synthesized)
atggtggtgggtgcctgaaatcccagctatttgggagattgaggcaagagaatcacgtaggcaa

SEQ ID NO: 713813 - DNA, 72 bp, Artificial Sequence
  ENSG00000197134_31 (sequence is synthesized)
agacgccaggtcctcctggaagcctagaaatgatggagtcttgctctgtcgtcagactggagtgcagtggga

SEQ ID NO: 713814 - DNA, 120 bp, Artificial Sequence
  ENSG00000197134_32 (sequence is synthesized)
cacaaagtgtgcccaaggttgccccttagatgcctgaatccaatgtctgctgaaattgagatgtccaagaattcaagaacacgtccagaaaacctggctgttgtagaaaaaaatataaat

SEQ ID NO: 713815 - DNA, 120 bp, Artificial Sequence
  ENSG00000197134_33 (sequence is synthesized)
tagaaatgaaaagctttattcttctaccttgaaataagcacttagcatcttaaagcatttaagatgatatgtacatttatctttgttattttgaaatatacataaattatattaacagct

SEQ ID NO: 713816 - DNA, 120 bp, Artificial Sequence
  ENSG00000197134_34 (sequence is synthesized)
ataaactgtggcccaggaagctggaactgagactttgaactgcttcaggcaccacattaaaagccagggtctgcaggcctgcctgcatggctgtaaacgggtgtcttcctccaggcctgt

SEQ ID NO: 713817 - DNA, 120 bp, Artificial Sequence
  ENSG00000197134_35 (sequence is synthesized)
gaaaggacagaacctctcccagactgcggctgaaaggattttgaaataattacagagtaaattcagaattctcagtgggaccaagtagcgttggccatttcctgtcctgtagccaagacc

SEQ ID NO: 713818 - DNA, 120 bp, Artificial Sequence
  ENSG00000197134_36 (sequence is synthesized)
aggggtcctgtagtttgccaccaaaatgagagcctgctttctgaagagaacacccctcaatctttggctttagcagaatttcacaacttcatccctggactttaaagatctcttaaaggc

SEQ ID NO: 713819 - DNA, 120 bp, Artificial Sequence
  ENSG00000197134_37 (sequence is synthesized)
atttattttggagatggggtcttgctacataacccaggctggtcttgaaatcttggcctgaagcaattctccaaccttaatataccatgtagctgtcattacaggtttgagccatgaggc

SEQ ID NO: 713820 - DNA, 120 bp, Artificial Sequence
  ENSG00000197136_0 (sequence is synthesized)
ggcgcatgcgccactgcaggctggcggttcgcggctccttcttccggcctcctccttaggccggcaccagcagaagccgggcgagcgcggagccccaagcaagtgacctgcgaccccgaa

SEQ ID NO: 713821 - DNA, 120 bp, Artificial Sequence
  ENSG00000197136_1 (sequence is synthesized)
agtggaccccagatcctggggttctccctggtccggagactagggagctgtcgcctgcaccccgggagcacccaccccacgaccacctctggatgccgccgacgggtacccggcccgtgc

SEQ ID NO: 713822 - DNA, 120 bp, Artificial Sequence
  ENSG00000197136_2 (sequence is synthesized)
cccgcgcctgcctgccggctcggcccctcggagcaattctgggccaggagtggggacccggaccccgcccctgatgcagccccacccccgcgtccgggccttgcaccactgactgtcccg

SEQ ID NO: 713823 - DNA, 80 bp, Artificial Sequence
  ENSG00000197136_3 (sequence is synthesized)
ggccttgcaccactgactgtcccggccggccccgccccctgctcgcaccctcgcgcggccgagcccccctcccccgctgg

SEQ ID NO: 713824 - DNA, 120 bp, Artificial Sequence
  ENSG00000197136_4 (sequence is synthesized)
cgcccccatgagggtcccgggagggggggcgcgggcagcagcggcggggccatggggtcgcaggtgttgcagatcctgcgccagggggtgtgggcctcgctcaccggcggttggttcttc

SEQ ID NO: 713825 - DNA, 120 bp, Artificial Sequence
  ENSG00000197136_5 (sequence is synthesized)
ggttcttcgacccgcaccagagcaccttctccaactgcttccacctctatgtctggatcttcctgctcatctttcccttcttactgtacatggtcctgcctcccagcttgatggtggccg

SEQ ID NO: 713826 - DNA, 120 bp, Artificial Sequence
  ENSG00000197136_6 (sequence is synthesized)
gcgtgtactgcctcgtggtggctgtcatctttgctactatcaagactgtcaattatcggcttcatgccatgtttgaccagggcgagatcgtggagaagcgcagctctaccatgggggagc

SEQ ID NO: 713827 - DNA, 120 bp, Artificial Sequence
  ENSG00000197136_7 (sequence is synthesized)
tggaggaagagcctgcccagggggacagcaatccacccagggaccccggagtggagatgacagtgttccggaaagtcagttccacacccccggtgcgctgcagctcccagcactctgtgt

SEQ ID NO: 713828 - DNA, 120 bp, Artificial Sequence
  ENSG00000197136_8 (sequence is synthesized)
ttggcttcaaccaggtctcggagctgctgccccgaatggaggactctgggccccttagagacatcaaggagctggtgcgggagcagggcagcaacaatgtgatcgtgacttctgccgacc

SEQ ID NO: 713829 - DNA, 120 bp, Artificial Sequence
  ENSG00000197136_9 (sequence is synthesized)
gagagatgctgaagctcagctcgcaggagaaactgattggagaccttccccagacgcctccaggggctgtcccagacccctctcttgccagtacagactcttcagagccttctcccctgg

SEQ ID NO: 713830 - DNA, 120 bp, Artificial Sequence
  ENSG00000197136_10 (sequence is synthesized)
ctggagatggagcgccctggagtgggagcagcatggctgacactcccatgagccccctgctgaaggggagcctcagccaggagctgagcaagagcttcctgaccctgacccagcctgacc

SEQ ID NO: 713831 - DNA, 120 bp, Artificial Sequence
  ENSG00000197136_11 (sequence is synthesized)
gggccctggtgaggaccagcagtcgacgggaacaacgcaggggggcaggtggctatcagccccttgaccggcggggctcaggggagcccacgccccagaaagccggctcctcagactcct

SEQ ID NO: 713832 - DNA, 120 bp, Artificial Sequence
  ENSG00000197136_12 (sequence is synthesized)
gcttcagcggcactgacagggagacattgagcagcttcaagagtgagaagaccaactccacccatctggacagccccccaggggggccagcccctgagggcagcgacacagacccaccct

SEQ ID NO: 713833 - DNA, 120 bp, Artificial Sequence
  ENSG00000197136_13 (sequence is synthesized)
ctgaggctgagctgcctgcctcaccagacgccggggtcccctcagatgacacgctgcgttcctttgacacggtcattggagcagggacgccaccgggcctggctgagccgctcctggtcg

SEQ ID NO: 713834 - DNA, 120 bp, Artificial Sequence
  ENSG00000197136_14 (sequence is synthesized)
tgcggcccaaggacttggccctgctacggcctagcaaacggcagccacccctgcgaagacactctccacctggccgtgcccctcgacggcccctgcttgaaggtgggggcttctttgagg

SEQ ID NO: 713835 - DNA, 120 bp, Artificial Sequence
  ENSG00000197136_15 (sequence is synthesized)
atgaagacactagtgagggcagtgaactgagcccggcctccagtctccgatcgcagcgccgctacagtactgacagctcctcttctacttcctgctactcccctgagagctcccggggtg

SEQ ID NO: 713836 - DNA, 120 bp, Artificial Sequence
  ENSG00000197136_16 (sequence is synthesized)
cagcagggggaccccggaagcggagggccccccatggggctgaggagggaactgctgtgccccccaagcggccatatgggacccagcggacgcctagtaccgccagcgctaaaacacatg

SEQ ID NO: 713837 - DNA, 120 bp, Artificial Sequence
  ENSG00000197136_17 (sequence is synthesized)
cccgtgtgctgagcatggatggggctgggggtgatgttctgaggcccccactggctggctgcaaggcagagctggaggcccaggttggggtggagcaggctgctagtgagcctgttgtgc

SEQ ID NO: 713838 - DNA, 120 bp, Artificial Sequence
  ENSG00000197136_18 (sequence is synthesized)
tgcctgctgaggcgcgaaggggacccgctgccaaccagcccggctggcggggggagctgcaggaggaaggtgctgtggggggagcggccgaggagactggcaggcgggaccgctcaagca

SEQ ID NO: 713839 - DNA, 120 bp, Artificial Sequence
  ENSG00000197136_19 (sequence is synthesized)
gtgtgaggcggacccaggccattcggagacgccacaatgcaggcagcaaccccacccctccagcctctgtcatgggctcgccgcccagcagcctgcaggaagctcagcggggccgggctg

SEQ ID NO: 713840 - DNA, 120 bp, Artificial Sequence
  ENSG00000197136_20 (sequence is synthesized)
cctcccactcccgggcgctgacgctgccctctgcgctgcatttcgcctcttcactgttgctcacccgggccggtgccaatgtgcatgaggcctgcacctttgatgacacttctgagggtg

SEQ ID NO: 713841 - DNA, 120 bp, Artificial Sequence
  ENSG00000197136_21 (sequence is synthesized)
ctgtgcactatttctacgatgagagcggtgtgcggcgttcctacacctttggcctggctggaggcggctacgagaaccctgtagggcagcaaggggagcagacagctaatggagcctggg

SEQ ID NO: 713842 - DNA, 120 bp, Artificial Sequence
  ENSG00000197136_22 (sequence is synthesized)
accgacactcgcattcctccagcttccactcggctgatgtccctgaggctacaggcggcctgaacctgctgcagccgaggcctgtggttctgcagggcatgcaggtgcgccgggtgcccc

SEQ ID NO: 713843 - DNA, 120 bp, Artificial Sequence
  ENSG00000197136_23 (sequence is synthesized)
tggagatcccggaggagcagacactgatggaagaagcgccaccccgggcccagcatagttacaagtactggcttctccctggccgctggacctctgtgcgctatgagcggcttgccctgc

SEQ ID NO: 713844 - DNA, 120 bp, Artificial Sequence
  ENSG00000197136_24 (sequence is synthesized)
tggctctgctggaccggacgcggggagtgctggagaacatcttcggcgtgggcctgagcagccttgtggccttcctgggctacctgctgctgctcaagggcttcttcactgacatctggg

SEQ ID NO: 713845 - DNA, 120 bp, Artificial Sequence
  ENSG00000197136_25 (sequence is synthesized)
tcttccagttctgcctggtcatcgcctcctgccagtactccttgctgaagagcgtgcagcctgatgcggcgtcccccatgcacggccacaactgggtgatcgcgtacagccgtcctgtct

SEQ ID NO: 713846 - DNA, 120 bp, Artificial Sequence
  ENSG00000197136_26 (sequence is synthesized)
acttctgcatctgctgtctgctcatctggctgctggacgccctgggctcagctcagcccttcccacctgtctccctctacggcctcacgctcttctctgcctccttcttcttctgtgccc

SEQ ID NO: 713847 - DNA, 120 bp, Artificial Sequence
  ENSG00000197136_27 (sequence is synthesized)
gagacgtggccactgtgttcaccctgtgcttccccttcgtcttcctcctgggcctcctgccccaggtcaacacctgcctcatgtacctgctggagcaaatagatatgcacggcttcgggg

SEQ ID NO: 713848 - DNA, 120 bp, Artificial Sequence
  ENSG00000197136_28 (sequence is synthesized)
gcacagctgccaccagcccgctcacggcagtcttcagcctctcccgcagcctgctggctgctgccctgctctacggtttctgccttggggccatcaagactccgtggccagagcagcacg

SEQ ID NO: 713849 - DNA, 120 bp, Artificial Sequence
  ENSG00000197136_29 (sequence is synthesized)
tggcctcctggtggcactgtcctaccacctgagccggcagagcagcgaccccaccgtgctctggtctctgatccggagcaagctgttccctgagctggaggagcgcagcttggagacagc

SEQ ID NO: 713850 - DNA, 120 bp, Artificial Sequence
  ENSG00000197136_30 (sequence is synthesized)
ccgggccgagcccccggaccccttgccggacaagatgcgccagtcggtgcgtgaggtcttgcactccgacctggtgatgtgtgtggtgatcgccgtgctcaccttcgccatcagcgccag

SEQ ID NO: 713851 - DNA, 120 bp, Artificial Sequence
  ENSG00000197136_31 (sequence is synthesized)
caccgtctttattgccctgaagtcggtgctgggtttcgtgttgtacgcactggctggggccgtgggcttcttcacacattacctgctgccacaactccgcaaacagctgccctggttctg

SEQ ID NO: 713852 - DNA, 120 bp, Artificial Sequence
  ENSG00000197136_32 (sequence is synthesized)
cctgtcacagcccgtgctgaagccgctggagtacagccagtatgaagtgcgcggtgccgcccaggtgatgtggtttgagaagctgtatgctggcctgcagtgcgtagagaagtacctcat

SEQ ID NO: 713853 - DNA, 120 bp, Artificial Sequence
  ENSG00000197136_33 (sequence is synthesized)
ctaccccgccgtggtgctcaacgccctcacggtggacgcccacacagtcgtcagccacccggacaagtactgcttctactgccgggcgctgctgatgaccgtggctgggctgaagctgct

SEQ ID NO: 713854 - DNA, 120 bp, Artificial Sequence
  ENSG00000197136_34 (sequence is synthesized)
gcgctcagccttctgctgccccccacagcagtacctgacgttggccttcaccgtcctgctcttccactttgactacccgcgcctctcccagggctttctgcttgactacttcctcatgtc

SEQ ID NO: 713855 - DNA, 120 bp, Artificial Sequence
  ENSG00000197136_35 (sequence is synthesized)
cctgctttgcagcaagctgtgggacttgctgtacaagctgcgtttcgtgctgacctacatcgcgccctggcagatcacctggggctcggctttccacgcttttgcccagccgtttgccgt

SEQ ID NO: 713856 - DNA, 120 bp, Artificial Sequence
  ENSG00000197136_36 (sequence is synthesized)
gccacactcggccatgctgttcgtccaggccctgctctcggggctcttctccacgcctctcaacccactgctaggcagtgccgtcttcatcatgtcctacgctcggcccctcaagttctg

SEQ ID NO: 713857 - DNA, 120 bp, Artificial Sequence
  ENSG00000197136_37 (sequence is synthesized)
ggagcgcgactacaacactaaacgtgtggatcattccaacacccgcctggtcacacagctggacaggaaccctggcgctgatgacaacaacctcaactccatcttctatgagcacttgac

SEQ ID NO: 713858 - DNA, 120 bp, Artificial Sequence
  ENSG00000197136_38 (sequence is synthesized)
acgttcgctgcagcacacactgtgtggggacctggtgctgggccgctggggcaactatggccctggtgactgcttcgtcctggcctctgactacctcaacgccctggtgcacctcatcga

SEQ ID NO: 713859 - DNA, 120 bp, Artificial Sequence
  ENSG00000197136_39 (sequence is synthesized)
ggttggcaatggcctcgtcaccttccagctgcgtggccttgagttccggggcacttactgccagcagcgcgaggtggaggctatcaccgagggtgtggaggaggacgagggctgttgctg

SEQ ID NO: 713860 - DNA, 120 bp, Artificial Sequence
  ENSG00000197136_40 (sequence is synthesized)
ctgtgaacctggccacctgccacgggtcctgtccttcaatgctgcctttgggcagcgctggctggcttgggaggtaacagccagcaagtacgtgctggagggctatagcattagtgacaa

SEQ ID NO: 713861 - DNA, 120 bp, Artificial Sequence
  ENSG00000197136_41 (sequence is synthesized)
taatgctgcctccatgctgcaggttttcgacctccgcaagatcctcatcacctactatgtcaagagcatcatctactacgtgagccgctcaccaaagctggaggtgtggctcagccatga

SEQ ID NO: 713862 - DNA, 120 bp, Artificial Sequence
  ENSG00000197136_42 (sequence is synthesized)
gggcatcacggcagccctgaggcctgtgcgggtgcccggctatgccgactcggatcccaccttctcgctgagtgtggatgaggactatgacctccgcctgtctggcctctcgctgccctc

SEQ ID NO: 713863 - DNA, 120 bp, Artificial Sequence
  ENSG00000197136_43 (sequence is synthesized)
cttttgtgctgtgcacctcgagtggatccagtactgcgcctcccggcgcagccagcccgtggaccaggattggaactccccgctggtcacgctgtgttttggcctgtgtgtgctgggccg

SEQ ID NO: 713864 - DNA, 120 bp, Artificial Sequence
  ENSG00000197136_44 (sequence is synthesized)
ccgggccctggggacagcctctcacagcatgtctgcaagcctggagcccttcctctacggcctgcacgccctgttcaagggggattttcgcatcacctccccacgtgacgagtgggtctt

SEQ ID NO: 713865 - DNA, 120 bp, Artificial Sequence
  ENSG00000197136_45 (sequence is synthesized)
tgccgacatggacctgcttcaccgcgttgtggcgcctggggttcgcatggccctcaagcttcaccaggaccacttcacgtccccagatgaatatgaggagccagcagccctatacgatgc

SEQ ID NO: 713866 - DNA, 120 bp, Artificial Sequence
  ENSG00000197136_46 (sequence is synthesized)
cattgcggccaacgaggagcggctggtcatctcacatgagggtgacccagcatggcgcagcgccatcctcagcaacacgccctccctgctggcgctgcgccatgtcctggatgatgcctc

SEQ ID NO: 713867 - DNA, 120 bp, Artificial Sequence
  ENSG00000197136_47 (sequence is synthesized)
cgacgagtacaagatcatcatgctcaaccggcgccacctcagcttccgagtcatcaaggtgaaccgggagtgcgtgcgcggcctgtgggccgggcagcagcaggagctggtgttcctgcg

SEQ ID NO: 713868 - DNA, 120 bp, Artificial Sequence
  ENSG00000197136_48 (sequence is synthesized)
caaccgcaaccccgagcgtggcagcatccagaacgccaagcaggcgcttcgcaacatgatcaactcctcctgtgaccagccgctgggctaccccatctacgtgtcgcctctcaccacctc

SEQ ID NO: 713869 - DNA, 120 bp, Artificial Sequence
  ENSG00000197136_49 (sequence is synthesized)
gctggctggcagccacccccagctacgggcactgtggggtggccccatcagcctgggtgccattgcccactggctcctgcgcacctgggagaggcttcacaagggctgtggcgccggctg

SEQ ID NO: 713870 - DNA, 120 bp, Artificial Sequence
  ENSG00000197136_50 (sequence is synthesized)
caatagtggcgggaacgtggatgattcagactgtagtgggggcggtggcctgacctccctcagcaataacccccccgtggcacaccccacacctgagaacacggcaggcaatggtgacca

SEQ ID NO: 713871 - DNA, 120 bp, Artificial Sequence
  ENSG00000197136_51 (sequence is synthesized)
acccctcccaccaggccctggctgggggccgcggtcctccctgagtggctctggtgatgggcggcccccacctctgctgcagtggcctccccctcggctccctggaccaccccctgcatc

SEQ ID NO: 713872 - DNA, 120 bp, Artificial Sequence
  ENSG00000197136_52 (sequence is synthesized)
gcctatccccacagagggtccccggacctcacggccccctggcccgggtctcctcagttctgagggccccagtggaaagtggagcctggggggccggaaggggctgggaggatctgacgg

SEQ ID NO: 713873 - DNA, 120 bp, Artificial Sequence
  ENSG00000197136_53 (sequence is synthesized)
ggagccagcctcagggagccccaaaggaggtacccccaaatctcaggcgcctctagacctcagcctcagcctcagcctcagcctcagccccgatgtcagcactgaggcctcaccccccag

SEQ ID NO: 713874 - DNA, 120 bp, Artificial Sequence
  ENSG00000197136_54 (sequence is synthesized)
agcttcccaggacattccttgcttggacagcagtgcccctgagagtggcacacctatgggtgccctgggcgactggcctgcccctattgaggagcgtgagagcccggcagcccagcccct

SEQ ID NO: 713875 - DNA, 120 bp, Artificial Sequence
  ENSG00000197136_55 (sequence is synthesized)
gctggaacaccagtactgagctacctggcgcccactggaccacctcctaggattcagtaacggacctgctctgctgcctctctgctggaccacagaactgagtggctttggcctacatgt

SEQ ID NO: 713876 - DNA, 120 bp, Artificial Sequence
  ENSG00000197136_56 (sequence is synthesized)
ctgaaccctgacctttggctgccttggccagagtaccaaaactgagtgacccagacctctgaccttgacccctgatctctctcatccccagtccagggcctgggctccccagatggaggc

SEQ ID NO: 713877 - DNA, 120 bp, Artificial Sequence
  ENSG00000197136_57 (sequence is synthesized)
agtcagcctcccagccaggccctaagagccaaaccatgggctggtcccacttggagcctgtggccaggaccacctcagcccctgggcctgcactgcctgcaggtgtggcccccttggcct

SEQ ID NO: 713878 - DNA, 75 bp, Artificial Sequence
  ENSG00000197136_58 (sequence is synthesized)
cctgggcctgcactgcctgcaggtgtggcccccttggcctggacctggggcctgaattgtgggaagggtggtttc

SEQ ID NO: 713879 - DNA, 120 bp, Artificial Sequence
  ENSG00000197136_59 (sequence is synthesized)
agtacagccagtatgaagtgcgcggtgagtgcccacccctgatggccaggcctgggcagtggctcgggctgcagcctggctggtgggagctgtggtcctctcggctcaggagtgccagca

SEQ ID NO: 713880 - DNA, 120 bp, Artificial Sequence
  ENSG00000197136_60 (sequence is synthesized)
ctgctccctccctgccctctgtgtccgtgttgcccggctgcgctctccaccgactcttctcctcgtgccctgctgtgcccttcccttgcctgtgttgccctggtcctgccctccttcctg

SEQ ID NO: 713881 - DNA, 120 bp, Artificial Sequence
  ENSG00000197136_61 (sequence is synthesized)
tctgtgagaagacggaagaattagaaccccagggccctgaagggatctcttgtccagaattaaacactgatcaccagtggaccagagctgcctggagcacatcttcactgggctgcataa

SEQ ID NO: 713882 - DNA, 120 bp, Artificial Sequence
  ENSG00000197136_62 (sequence is synthesized)
tggtttttaaaaaatcctggagcctctattttagcatctcgatttgagatatgaagatccatgtttcttgagtttttcttaaacgacagaagattttgcttcccagactagcatccctct

SEQ ID NO: 713883 - DNA, 120 bp, Artificial Sequence
  ENSG00000197136_63 (sequence is synthesized)
gtggctacaaccagcctgaaccgaggggtctgccctttagaagggcccagctcacgggctcactgtgcactcaggccctagccagcctgctgtacgtaggtgtttgcgatttcatcattg

SEQ ID NO: 713884 - DNA, 120 bp, Artificial Sequence
  ENSG00000197136_64 (sequence is synthesized)
gccttgttttaacagacagcagagcagagcacctgccataaagcaagcctcgatgtgctaagtgccatgtggagcccttgccctgctggggctcgctgctcccatttgagctgccacaga

SEQ ID NO: 713885 - DNA, 120 bp, Artificial Sequence
  ENSG00000197140_0 (sequence is synthesized)
gacttcccaacggcttcccgctggcagccccgaagccgcaccatgttccgcctctggttgctgctggccgggctctgcggcctcctggcgtcaagacccggttttcaaaattcacttcta

SEQ ID NO: 713886 - DNA, 120 bp, Artificial Sequence
  ENSG00000197140_1 (sequence is synthesized)
cagatcgtaattccagagaaaatccaaacaaatacaaatgacagttcagaaatagaatatgaacaaatatcctatattattccaatagatgagaaactgtacactgtgcaccttaaacaa

SEQ ID NO: 713887 - DNA, 120 bp, Artificial Sequence
  ENSG00000197140_2 (sequence is synthesized)
agatattttttagcagataattttatgatctatttgtacaatcaaggatctatgaatacttattcttcagatattcagactcaatgctactatcaaggaaatattgaaggatatccagat

SEQ ID NO: 713888 - DNA, 120 bp, Artificial Sequence
  ENSG00000197140_3 (sequence is synthesized)
tccatggtcacactcagcacgtgctctggactaagaggaatactgcaatttgaaaatgtttcttatggaattgagcctctggaatctgcagttgaatttcagcatgttctttacaaatta

SEQ ID NO: 713889 - DNA, 120 bp, Artificial Sequence
  ENSG00000197140_4 (sequence is synthesized)
aagaatgaagacaatgatattgcaatttttattgacagaagcctgaaagaacaaccaatggatgacaacatttttataagtgaaaaatcagaaccagctgttccagatttatttcctctt

SEQ ID NO: 713890 - DNA, 120 bp, Artificial Sequence
  ENSG00000197140_5 (sequence is synthesized)
tatctagaaatgcatattgtggtggacaaaactttgtatgattactggggctctgatagcatgatagtaacaaataaagtcatcgaaattgttggccttgcaaattcaatgttcacccaa

SEQ ID NO: 713891 - DNA, 120 bp, Artificial Sequence
  ENSG00000197140_6 (sequence is synthesized)
tttaaagttactattgtgctgtcatcattggagttatggtcagatgaaaataagatttctacagttggtgaggcagatgaattattgcaaaaatttttagaatggaaacaatcttatctt

SEQ ID NO: 713892 - DNA, 120 bp, Artificial Sequence
  ENSG00000197140_7 (sequence is synthesized)
aacctaaggcctcatgatattgcatatctactaatttatatggattatcctcgttatttgggagcagtgtttcctggaacaatgtgtattactcgttattctgcaggagttgcattgtac

SEQ ID NO: 713893 - DNA, 120 bp, Artificial Sequence
  ENSG00000197140_8 (sequence is synthesized)
cccaaggagataactctggaggcatttgcagttattgtcacccagatgctggcactcagtctgggaatatcatatgacgacccaaagaaatgtcaatgttcagaatccacctgtataatg

SEQ ID NO: 713894 - DNA, 120 bp, Artificial Sequence
  ENSG00000197140_9 (sequence is synthesized)
aatccagaagttgtgcaatccaatggtgtgaagacttttagcagttgcagtttgaggagctttcaaaatttcatttcaaatgtgggtgtcaaatgtcttcagaataagccacaaatgcaa

SEQ ID NO: 713895 - DNA, 120 bp, Artificial Sequence
  ENSG00000197140_10 (sequence is synthesized)
aatctccgaaaccagtctgtggcaatggcagattggagggaaatgaaatctgtgattgtggtactgaggctcaatgtggacctgcaagctgttgtgattttcgaacttgtgtactgaaag

SEQ ID NO: 713896 - DNA, 120 bp, Artificial Sequence
  ENSG00000197140_11 (sequence is synthesized)
acggagcaaaatgttataaaggactgtgctgcaaagactgtcaaattttacaatcaggcgttgaatgtaggccgaaagcacatcctgaatgtgacatcgctgaaaattgtaatggaacct

SEQ ID NO: 713897 - DNA, 120 bp, Artificial Sequence
  ENSG00000197140_12 (sequence is synthesized)
caccagaatgtggtcctgacataactttaatcaatggactttcatgcaaaaataataagtttatttgttatgacggagactgccatgatctcgatgcacgttgtgagagtgtatttggaa

SEQ ID NO: 713898 - DNA, 120 bp, Artificial Sequence
  ENSG00000197140_13 (sequence is synthesized)
aaggttcaagaaatgctccatttgcctgctatgaagaaatacaatctcaatcagacagatttgggaactgtggtagggatagaaataacaaatatgtgttctgtggatggaggaatctta

SEQ ID NO: 713899 - DNA, 120 bp, Artificial Sequence
  ENSG00000197140_14 (sequence is synthesized)
tatgtggaagattagtttgtacctaccctactcgaaagcctttccatcaagaaaatggtgatgtgatttatgctttcgtacgagattctgtatgcataactgtagactacaaattgcctc

SEQ ID NO: 713900 - DNA, 120 bp, Artificial Sequence
  ENSG00000197140_15 (sequence is synthesized)
gaacagttccagatccactggctgtcaaaaatggctctcagtgtgatattgggagggtttgtgtaaatcgtgaatgtgtagaatcaaggataattaaggcttcagcacatgtttgttcac

SEQ ID NO: 713901 - DNA, 120 bp, Artificial Sequence
  ENSG00000197140_16 (sequence is synthesized)
aacagtgttctggacatggagtgtgtgattccagaaacaagtgccattgttcgccaggctataagcctccaaactgccaaatacgttccaaaggattttccatatttcctgaggaagata

SEQ ID NO: 713902 - DNA, 120 bp, Artificial Sequence
  ENSG00000197140_17 (sequence is synthesized)
tgggttcaatcatggaaagagcatctgggaagactgaaaacacctggcttctaggtttcctcattgctcttcctattctcattgtaacaaccgcaatagttttggcaaggaaacagttga

SEQ ID NO: 713903 - DNA, 120 bp, Artificial Sequence
  ENSG00000197140_18 (sequence is synthesized)
aaaagtggttcgccaaggaagaggaattcccaagtagcgaatctaaatcggaaggtagcacacagacatatgccagccaatccagctcagaaggcagcactcagacatatgccagccaaa

SEQ ID NO: 713904 - DNA, 120 bp, Artificial Sequence
  ENSG00000197140_19 (sequence is synthesized)
ccagatcagaaagcagcagtcaagctgatactagcaaatccaaatcagaagatagtgctgaagcatatactagcagatccaaatcacaggacagtacccaaacacaaagcagtagtaact

SEQ ID NO: 713905 - DNA, 120 bp, Artificial Sequence
  ENSG00000197140_20 (sequence is synthesized)
agtgattccttcagaaggcaacggataacatcgagagtctcgctaagaaatgaaaattctgtctttccttccgtggtcacagctgaaagaaacaataaattgagtgtggatcaatttgca

SEQ ID NO: 713906 - DNA, 120 bp, Artificial Sequence
  ENSG00000197140_21 (sequence is synthesized)
tgatattgcatatctactaatgtaagaataatgtttcattattcctagaaagaaaacaaagacctgtgataattatgtggcttaatgtaaggaattattattcatttctgaatatccatg

SEQ ID NO: 713907 - DNA, 120 bp, Artificial Sequence
  ENSG00000197140_22 (sequence is synthesized)
ctttgattatttagtatgtgctttattcaggctttatgctcaatttctagttgtcaggcaataaaaaactttactaacatttatttctatgctaataaagcttttataaatgaagacatt

SEQ ID NO: 713908 - DNA, 120 bp, Artificial Sequence
  ENSG00000197140_23 (sequence is synthesized)
gagagtttcaagaggttaagccatctcaggactcttggatctggtggtactactaggtttgaacccacagttcgtaactctagagccaaaactcttaaccactacttaaagagatgggat

SEQ ID NO: 713909 - DNA, 120 bp, Artificial Sequence
  ENSG00000197140_24 (sequence is synthesized)
ttatcttgagaggtttacattcttaaataagctttgaccaaagacttggtaaatgtggctacaaagactttaccctaatgaattttctgagtaattttaaaatgttagttttctaattat

SEQ ID NO: 713910 - DNA, 120 bp, Artificial Sequence
  ENSG00000197140_25 (sequence is synthesized)
tatatttataattgtattcatattaaatttattagcaataattagcaagtgtctttcaatgaaactatacatgtctatatatgtatttaagtttggtatgtcagtgttttcttttgcttg

SEQ ID NO: 713911 - DNA, 120 bp, Artificial Sequence
  ENSG00000197140_26 (sequence is synthesized)
ttcttttgcttgtgtgagactaatctttccctcacatctctgccagccataaatgttactgctcttttaatttttggtagtctgatggatataacttaatgtcattgtcattttaatttg

SEQ ID NO: 713912 - DNA, 120 bp, Artificial Sequence
  ENSG00000197140_27 (sequence is synthesized)
ctttttttctgatgactggtggatttgagcatcttttcaaatgcttgttgatcatttgtatctgtccttctgtaattgccttttcttgtcatttgactacttccctataatttgtaaggg

SEQ ID NO: 713913 - DNA, 120 bp, Artificial Sequence
  ENSG00000197140_28 (sequence is synthesized)
ctacttccctataatttgtaagggtttttaaaaaataatttcattatctttaatatttatattttttccccataagttattggggtacaggtgatatttggttacatgagtaagttcttt

SEQ ID NO: 713914 - DNA, 120 bp, Artificial Sequence
  ENSG00000197140_29 (sequence is synthesized)
atatttgtagtcttttatccctcgccccacctcccactcttccccccagtccccacagtccattgtatcattcttatgcctttgcctcatagcttagctcccacatattggtcagaacat

SEQ ID NO: 713915 - DNA, 73 bp, Artificial Sequence
  ENSG00000197140_30 (sequence is synthesized)
gtccccacagtccattgtatcattcttatgcctttgcctcatagcttagctcccacatattggtcagaacata

SEQ ID NO: 713916 - DNA, 79 bp, Artificial Sequence
  ENSG00000197140_31 (sequence is synthesized)
aatctcatccaggtcgctgcaaatgcagttgccacagtttttttatccactggttgattgatgggcatttgggttggtt

SEQ ID NO: 713917 - DNA, 73 bp, Artificial Sequence
  ENSG00000197140_32 (sequence is synthesized)
cagtgtagaaatgttccatgatcactttattggaggagtaaggtggttttacattgtggttttgatttgcatt

SEQ ID NO: 713918 - DNA, 120 bp, Artificial Sequence
  ENSG00000197140_33 (sequence is synthesized)
actgttttttgattttttgattatggcctttattggaggagtaaggtggttttacattgtggttttgatttgcatttccctgctcattagtgttgagcatttttttcatatgtttgttgg

SEQ ID NO: 713919 - DNA, 74 bp, Artificial Sequence
  ENSG00000197140_34 (sequence is synthesized)
tctcactctgtgggttgtctgtttactgtgctgactgttccttttgctgtgtgaaaagctctttagtttaaggt

SEQ ID NO: 713920 - DNA, 88 bp, Artificial Sequence
  ENSG00000197140_35 (sequence is synthesized)
atctttgtttttattgcatttgcttttgaggtctttgtcgtgaaattcttgcctaagccaatgtctggaaggggtttttgatcttagt

SEQ ID NO: 713921 - DNA, 86 bp, Artificial Sequence
  ENSG00000197140_36 (sequence is synthesized)
ggtgagagatgaggatccagtttcatctcctacatgtggcttgggctctccccactttatgtttttgtttgctttgctgaagatca

SEQ ID NO: 713922 - DNA, 70 bp, Artificial Sequence
  ENSG00000197140_37 (sequence is synthesized)
ttctctattctgttccattgatctacagtatagtttcaaatcagttagtgtgatggctccagatttgttc

SEQ ID NO: 713923 - DNA, 78 bp, Artificial Sequence
  ENSG00000197140_38 (sequence is synthesized)
catgctgttttggtgactatggccttacagtatagtttcaaatcagttagtgtgatgggggctgtttttaggttccat

SEQ ID NO: 713924 - DNA, 120 bp, Artificial Sequence
  ENSG00000197140_39 (sequence is synthesized)
atgatggtggtattttgatggggattgaattgaatttttagactgcttttggcaatatcattttcacaatattgattcgatccatccatgagcatgggatgtgtttcaatttgtttgtgt

SEQ ID NO: 713925 - DNA, 89 bp, Artificial Sequence
  ENSG00000197140_40 (sequence is synthesized)
tgtgtcatctatgatttctttcagcattactccttggttaagtatattcctaagtattttatttttttgcagctattgtgaaaggggtt

SEQ ID NO: 713926 - DNA, 86 bp, Artificial Sequence
  ENSG00000197140_41 (sequence is synthesized)
agatctaggagctttctggaggagtctttagcattttcaaggtaaatgatcgtatcatcaccaaacgtgacagtttgacttcctct

SEQ ID NO: 713927 - DNA, 120 bp, Artificial Sequence
  ENSG00000197140_42 (sequence is synthesized)
tgatcgtatcatcaccaaacgtgacagtttgacttcctctttaccgatttggatgcctgtaagggctttttgaatgcttagatactaacattgtttatctttatgacaaatactttttcc

SEQ ID NO: 713928 - DNA, 120 bp, Artificial Sequence
  ENSG00000197140_43 (sequence is synthesized)
atatctataatttttctataaacttttttttctctgctacattgcagcagaccttgctggactgaacaaaggaggacgaatgcaggaataaagacaaagagaaaagaatatatttgcaag

SEQ ID NO: 713929 - DNA, 120 bp, Artificial Sequence
  ENSG00000197140_44 (sequence is synthesized)
aaggggtcagggggctccttgcttttagtgaacaggggccctgaacttctagagcccttcatatttattgagtaaaggagatagggagaagggggtggttgtggtcagctgcttgactta

SEQ ID NO: 713930 - DNA, 120 bp, Artificial Sequence
  ENSG00000197140_45 (sequence is synthesized)
gtgcaggcctgcatgactgcattctttgaacagtaggctccagatgttccagtagataccctcaaggagcacggcaccagggagtgactgccctcagcataccttctggtggcaggcaca

SEQ ID NO: 713931 - DNA, 120 bp, Artificial Sequence
  ENSG00000197140_46 (sequence is synthesized)
gatgtgaatttgcccacattatgcattcatgataaacagtttgctgtttaatcatatagcctccaggggaatgctgagttggtcatgaccctcaggctttcggctcccaacactacatga

SEQ ID NO: 713932 - DNA, 120 bp, Artificial Sequence
  ENSG00000197140_47 (sequence is synthesized)
aaacttttacatttcatatggccaaatttgttaatattttcttcttactttttggtttcctgtatagtgtagaaggtctcttccacccccaacttttagtctgctagagttttctttagg

SEQ ID NO: 713933 - DNA, 120 bp, Artificial Sequence
  ENSG00000197140_48 (sequence is synthesized)
attaatattattaccttttatagagtatggaattcatagttagaactggagctgaacctttgaaggagggaaaggaaacaaacactgacaaagcaaggtggtagatcttgacaactgatt

SEQ ID NO: 713934 - DNA, 120 bp, Artificial Sequence
  ENSG00000197140_49 (sequence is synthesized)
tgatgtggagtgggcacgtcaaaaggtgtcagtatgaggtaaaaaatatattactgagcttgtcaggagtatgtgtagaattttaggggaagtctaagttgtaaaaaaagggcttattaa

SEQ ID NO: 713935 - DNA, 120 bp, Artificial Sequence
  ENSG00000197140_50 (sequence is synthesized)
agtatctgtgggagggagaaacagagtaaacaatacttagatgttggaacataaaaccaatgtttggcattaggaacaaatacttggaaacaaatgctggaagggttaggtataaacaat

SEQ ID NO: 713936 - DNA, 120 bp, Artificial Sequence
  ENSG00000197140_51 (sequence is synthesized)
atcagagagacagaataaaagtagtggagaggcagtgcgattgtgaagtgaagtgcacttgagacagaaggggcatttcaaattgagaattgaattccaagcttcttaagattctttact

SEQ ID NO: 713937 - DNA, 120 bp, Artificial Sequence
  ENSG00000197140_52 (sequence is synthesized)
cacatcctggcttattcgttttggtgggggctctaaataaggcagtaaatgcttggagcatctataccttagtagttgagaatatggctcggattcagactgtgtaagttcagatccttc

SEQ ID NO: 713938 - DNA, 120 bp, Artificial Sequence
  ENSG00000197140_53 (sequence is synthesized)
agtaggacgtattaatcatgctaccttgagagagttacttatacttcgcatctgatacttgatttgctcaatggggacaaaaataatatctacttcactagtttgttttgagtgttaaat

SEQ ID NO: 713939 - DNA, 120 bp, Artificial Sequence
  ENSG00000197140_54 (sequence is synthesized)
ggattagttaatgtaaagttctgagaatagtgctattattatatgacagtttaaatggctccttactcaaggctgaaataataatgtttgggtgtgaaacaataaagcactcctattgga

SEQ ID NO: 713940 - DNA, 120 bp, Artificial Sequence
  ENSG00000197140_55 (sequence is synthesized)
aactgttgaactttactacctgggagcaacatattttaatctatacattgaaacgatttgtcactgtcactcaacaaagtattttttatcagaatattggagcaaagcctttggcaaaca

SEQ ID NO: 713941 - DNA, 120 bp, Artificial Sequence
  ENSG00000197140_56 (sequence is synthesized)
tagccagatgtgatgagaacactaaaggcattaaaaactttgatctattagatatgtttcagatatcaagagtgtttaatctaattaatactaatatgtcatattaaataatattccaaa

SEQ ID NO: 713942 - DNA, 120 bp, Artificial Sequence
  ENSG00000197140_57 (sequence is synthesized)
tttgaaacaattgaggacatatggaaagatcatacctcaatttgcttcagatttggattttatgaactgcagacttaaattattagcaggaattctcatttttaaattgtctgttaaaat

SEQ ID NO: 713943 - DNA, 120 bp, Artificial Sequence
  ENSG00000197140_58 (sequence is synthesized)
ttatatgtataagcaaacatatacgcgctaattcttcttgttaatgtttatattttttccatctttgctgacgtataattgacaaaaattgtatgtatgtttttaggtgtatgattttgt

SEQ ID NO: 713944 - DNA, 120 bp, Artificial Sequence
  ENSG00000197140_59 (sequence is synthesized)
tttgatatatgtatacattgtgaaatatttgccacagttaagttgattaacatgtccatcatctcatatagttaccatttttttttatcctttaaaagaatttttgtatctatccttttt

SEQ ID NO: 713945 - DNA, 120 bp, Artificial Sequence
  ENSG00000197140_60 (sequence is synthesized)
gcagatttcaaatatataatagaatgtcgtttactaaagtcacattgttgtacattacatctcttgaacttatttattttgcataactaaaattttgtaccccttgactagcattttgcc

SEQ ID NO: 713946 - DNA, 120 bp, Artificial Sequence
  ENSG00000197140_61 (sequence is synthesized)
atttctccccttacctcagcctcttgcaaccatcattctactctctgcatttttgagtttgacaattttagattgtatatataagtgagatcatgcgttatttacctctctgtatctagc

SEQ ID NO: 713947 - DNA, 120 bp, Artificial Sequence
  ENSG00000197140_62 (sequence is synthesized)
ttatttcacttagcataatggcctccaggttcatctgtgttactgcaaatggcaggattttcctccttactctgactgaataatattgcattttgtgtgtttgtgtatatgtatatatct

SEQ ID NO: 713948 - DNA, 120 bp, Artificial Sequence
  ENSG00000197140_63 (sequence is synthesized)
atataaacacagacatatatatatcatatttttaatacatttatctgtttacctaagctaaaagtgaactttcttctcttatactcagaacacaaataaaactctgactttcattccatc

SEQ ID NO: 713949 - DNA, 120 bp, Artificial Sequence
  ENSG00000197140_64 (sequence is synthesized)
ccttcgtgttccggacgctaaacaccgagagcaccccgtctccggggcctccggagaacgctgtcccatgaacgtgcggggagcggcccccggcgtccgcgcgtccccgcgtccctggca

SEQ ID NO: 713950 - DNA, 120 bp, Artificial Sequence
  ENSG00000197140_65 (sequence is synthesized)
ggactaagaagcctgaaagaacaaccaatggatgacaacatttttataagtgaaaaatcagaaccagctgttccagatttatttcctctttatctagaaatgcatattgtggtggacaaa

SEQ ID NO: 713951 - DNA, 120 bp, Artificial Sequence
  ENSG00000197140_66 (sequence is synthesized)
atctaaatcggaaggtagcacacagacatatgccagccaatccagctcagaaggcagcactcagacatatgccagccaaaccagatcagaaagcagcagtcaagctgatactagcaagta

SEQ ID NO: 713952 - DNA, 120 bp, Artificial Sequence
  ENSG00000197140_67 (sequence is synthesized)
agtgaattagggggcattttttttatataataagtatatgttaaaaattgagatgaacaaattgataattaacaattacttgctaactattaactgagtagccacaattagtaaagtact

SEQ ID NO: 713953 - DNA, 120 bp, Artificial Sequence
  ENSG00000197140_68 (sequence is synthesized)
ctttcctgcagtttagttaatatgtgttgggagtttatttttgggaaacaaaggaaaacatttttggtgaaatgtttaaggagctaattcataaaaaggatctttttgtattctttttct

SEQ ID NO: 713954 - DNA, 120 bp, Artificial Sequence
  ENSG00000197140_69 (sequence is synthesized)
tggagtacaccaaggggaagtttacttttttatttggagatggcacaactagaaactaatatgtatgctgatgaataactgagtgaatgctcgcatagatcacctgggaagaatttgttg

SEQ ID NO: 713955 - DNA, 120 bp, Artificial Sequence
  ENSG00000197140_70 (sequence is synthesized)
ttttccaggggattaggcgccccgtccggatggagaagcgactcagggcccagcaccagggctcacgcctgtaatcccagggctttgagagactgaggcgagctgattgtttgacctcgg

SEQ ID NO: 713956 - DNA, 120 bp, Artificial Sequence
  ENSG00000197140_71 (sequence is synthesized)
ccccatctctacaaaaaaatttaaaaaaatgttccgaggtggtggtgcgcacctgtgatcccagctacccgggaggctgagggaggaggaccacgttttcaaaattcacttctacagatc

SEQ ID NO: 713957 - DNA, 120 bp, Artificial Sequence
  ENSG00000197140_72 (sequence is synthesized)
gtttaactctgatgtctgtgttgattttttcttttttggtctgggtgatctttccattactgagtgaggtgttgaattgtccaggtattattgtaatttattctttctttctctttatgt

SEQ ID NO: 713958 - DNA, 120 bp, Artificial Sequence
  ENSG00000197140_73 (sequence is synthesized)
ctattaatgtttgctttatatatttgggttcaccagtgttgggtgcactgtatttagaattattatattctcttgctaaatggactactttagtagtatatggggaccacctttgtttct

SEQ ID NO: 713959 - DNA, 120 bp, Artificial Sequence
  ENSG00000197140_74 (sequence is synthesized)
ttttacagtctttgacttgaagtctattttatctaatataaatatagctattcctgctcttttgtgtttccatgtgcatgtaatatatttttccatgcctttattttcagtctatgtgtc

SEQ ID NO: 713960 - DNA, 120 bp, Artificial Sequence
  ENSG00000197140_75 (sequence is synthesized)
ttcatacatgatgtatttttataggtagcatatagtgaggtctcgctttttatccattctgacattctccatgtcttttaagtagagaatatagtccagaggaaggtaagtaggttacta

SEQ ID NO: 713961 - DNA, 120 bp, Artificial Sequence
  ENSG00000197140_76 (sequence is synthesized)
gttactctcttgtgactggtagtaaaagtcctacattagtgttttaaatatttaaagatgttaaaacctgtaactatcagcagcattcatatccttttccaaattcaaacagtaagccca

SEQ ID NO: 713962 - DNA, 120 bp, Artificial Sequence
  ENSG00000197140_77 (sequence is synthesized)
tcaaaatataactcctagtaaagattttactattgtcatgatgtatttttacttgtacatttcactaattcatagcaatgtggacctgcaagctgttgtgattttcgaacttgtgtactg

SEQ ID NO: 713963 - DNA, 120 bp, Artificial Sequence
  ENSG00000197140_78 (sequence is synthesized)
agattggaggaaaaagcctggttgtgaagtccatttgggcagcgtcagtggggaaaaaaatgcagctggcgctcttcaaaaatatgaagagctggcatttcatattgaaaagcggctcac

SEQ ID NO: 713964 - DNA, 120 bp, Artificial Sequence
  ENSG00000197142_0 (sequence is synthesized)
aaaaccaggaagtgaagtccccgagcacgttagaaagcctgacatggcctgactcgggacagctcagagcagggcagaactggggacactctgggccggccttctgcctgcatggacgct

SEQ ID NO: 713965 - DNA, 120 bp, Artificial Sequence
  ENSG00000197142_1 (sequence is synthesized)
ctgaagccaccctgtctctggaggaaccacgagcgagggaagaaggacagggactcgtgtggcaggaagaactcagagccgggaagcccccattcactagaagcactgagagatgcggcc

SEQ ID NO: 713966 - DNA, 120 bp, Artificial Sequence
  ENSG00000197142_2 (sequence is synthesized)
ccctcgcagggtctgaatttcctgctgctgttcacaaagatgctttttatctttaactttttgttttccccacttccgaccccggcgttgatctgcatcctgacatttggagctgccatc

SEQ ID NO: 713967 - DNA, 120 bp, Artificial Sequence
  ENSG00000197142_3 (sequence is synthesized)
ttcttgtggctgatcaccagacctcaacccgtcttacctcttcttgacctgaacaatcagtctgtgggaattgagggaggagcacggaagggggtttcccagaagaacaatgacctaaca

SEQ ID NO: 713968 - DNA, 120 bp, Artificial Sequence
  ENSG00000197142_4 (sequence is synthesized)
agttgctgcttctcagatgccaagactatgtatgaggttttccaaagaggactcgctgtgtctgacaatgggccctgcttgggatatagaaaaccaaaccagccctacagatggctatct

SEQ ID NO: 713969 - DNA, 120 bp, Artificial Sequence
  ENSG00000197142_5 (sequence is synthesized)
tacaaacaggtgtctgatagagcagagtacctgggttcctgtctcttgcataaaggttataaatcatcaccagaccagtttgtcggcatctttgctcagaataggccagagtggatcatc

SEQ ID NO: 713970 - DNA, 120 bp, Artificial Sequence
  ENSG00000197142_6 (sequence is synthesized)
tccgaattggcttgttacacgtactctatggtagctgtacctctgtatgacaccttgggaccagaagccatcgtacatattgtcaacaaggctgatatcgccatggtgatctgtgacaca

SEQ ID NO: 713971 - DNA, 120 bp, Artificial Sequence
  ENSG00000197142_7 (sequence is synthesized)
ccccaaaaggcattggtgctgatagggaatgtagagaaaggcttcaccccgagcctgaaggtgatcatccttatggacccctttgatgatgacctgaagcaaagaggggagaagagtgga

SEQ ID NO: 713972 - DNA, 120 bp, Artificial Sequence
  ENSG00000197142_8 (sequence is synthesized)
attgagatcttatccctatatgatgctgagaacctaggcaaagagcacttcagaaaacctgtgcctcctagcccagaagacctgagcgtcatctgcttcaccagtgggaccacaggtgac

SEQ ID NO: 713973 - DNA, 120 bp, Artificial Sequence
  ENSG00000197142_9 (sequence is synthesized)
cccaaaggagccatgataacccatcaaaatattgtttcaaatgctgctgcctttctcaaatgtgtggagcatgcttatgagcccactcctgatgatgtggccatatcctacctccctctg

SEQ ID NO: 713974 - DNA, 120 bp, Artificial Sequence
  ENSG00000197142_10 (sequence is synthesized)
gctcatatgtttgagaggattgtacaggctgttgtgtacagctgtggagccagagttggattcttccaaggggatattcggttgctggctgacgacatgaagactttgaagcccacattg

SEQ ID NO: 713975 - DNA, 120 bp, Artificial Sequence
  ENSG00000197142_11 (sequence is synthesized)
tttcccgcggtgcctcgactccttaacaggatctacgataaggtacaaaatgaggccaagacacccttgaagaagttcttgttgaagctggctgtttccagtaaattcaaagagcttcaa

SEQ ID NO: 713976 - DNA, 120 bp, Artificial Sequence
  ENSG00000197142_12 (sequence is synthesized)
aagggtatcatcaggcatgatagtttctgggacaagctcatctttgcaaagatccaggacagcctgggcggaagggttcgtgtaattgtcactggagctgcccccatgtccacttcagtc

SEQ ID NO: 713977 - DNA, 120 bp, Artificial Sequence
  ENSG00000197142_13 (sequence is synthesized)
tggggtgcccctggcttgcaattacgtgaagctggaagatgtggctgacatgaactactttacagtgaataatgaaggagaggtctgcatcaagggtacaaacgtgttcaaaggatacct

SEQ ID NO: 713978 - DNA, 120 bp, Artificial Sequence
  ENSG00000197142_14 (sequence is synthesized)
gaaggaccctgagaagacacaggaagccctggacagtgatggctggcttcacacaggagacattggtcgctggctcccgaatggaactctgaagatcatcgaccgtaaaaagaacatttt

SEQ ID NO: 713979 - DNA, 120 bp, Artificial Sequence
  ENSG00000197142_15 (sequence is synthesized)
caagctggcccaaggagaatacattgcaccagagaagatagaaaatatctacaacaggagtcaaccagtgttacaaatttttgtacacggggagagcttacggtcatccttagtaggagt

SEQ ID NO: 713980 - DNA, 120 bp, Artificial Sequence
  ENSG00000197142_16 (sequence is synthesized)
ggtggttcctgacacagatgtacttccctcatttgcagccaagcttggggtgaagggctcctttgaggaactgtgccaaaaccaagttgtaagggaagccattttagaagacttgcagaa

SEQ ID NO: 713981 - DNA, 120 bp, Artificial Sequence
  ENSG00000197142_17 (sequence is synthesized)
aattgggaaagaaagtggccttaaaacttttgaacaggtcaaagccatttttcttcatccagagccattttccattgaaaatgggctcttgacaccaacattgaaagcaaagcgaggaga

SEQ ID NO: 713982 - DNA, 120 bp, Artificial Sequence
  ENSG00000197142_18 (sequence is synthesized)
gctttccaaatactttcggacccaaattgacagcctgtatgagcacatccaggattaggataaggtacttaagtacctgccggcccactgtgcactgcttgtgagaaaatggattaaaaa

SEQ ID NO: 713983 - DNA, 120 bp, Artificial Sequence
  ENSG00000197142_19 (sequence is synthesized)
ctattcttacatttgttttgcctttcctcctatttttttttaacctgttaaactctaaagccatagcttttgttttatattgagacatataatgtgtaaacttagttcccaaataaatca

SEQ ID NO: 713984 - DNA, 120 bp, Artificial Sequence
  ENSG00000197142_20 (sequence is synthesized)
atcctgtctttcccatcttcgatgttgctaatattaaggcttcagggctacttttatcaacatgcctgtcttcaagatcccagtttatgttctgtgtccttcctcatgatttccaacctt

SEQ ID NO: 713985 - DNA, 120 bp, Artificial Sequence
  ENSG00000197142_21 (sequence is synthesized)
aatactattagtaaccacaagttcaagggtcaaagggaccctctgtgccttcttctttgttttgtgataaacataacttgccaacagtctctatgcttatttacatcttctactgttcaa

SEQ ID NO: 713986 - DNA, 120 bp, Artificial Sequence
  ENSG00000197142_22 (sequence is synthesized)
actaagagatttttaaattctgaaaaactgcttacaattcatgttttctagccactccacaaaccactaaaattttagttttagcctatcactcatgtcaatcatatctatgagacaaat

SEQ ID NO: 713987 - DNA, 120 bp, Artificial Sequence
  ENSG00000197142_23 (sequence is synthesized)
gtctccgatgctcttctgcgtaaattaaattgtgtactgaagggaaaagtttgatcataccaaacatttcctaaactctctagttagatatctgacttgggagtattaaaaattgggtct

SEQ ID NO: 713988 - DNA, 120 bp, Artificial Sequence
  ENSG00000197142_24 (sequence is synthesized)
atgacatattgtccaaaaggaatgctgttcttaaagcattatttacagtaggaactggggagtaaatctgttccctacagtttgctgctgagctggaagctgtgggggaaggagttgaca

SEQ ID NO: 713989 - DNA, 120 bp, Artificial Sequence
  ENSG00000197142_25 (sequence is synthesized)
ggtgggcccagtgaacttttccagtaaatgaagcaagcactgaataaaaacctcctgaactgggaacaaagatctacaggcaagcaagatgcccacacaacaggcttattttctgtgaag

SEQ ID NO: 713990 - DNA, 120 bp, Artificial Sequence
  ENSG00000197142_26 (sequence is synthesized)
gaaccaactgatctcccccacccttggattagagttcctgctctaccttacccacagataacacatgttgtttctacttgtaaatgtaaagtctttaaaataaactattacagatactta

SEQ ID NO: 713991 - DNA, 120 bp, Artificial Sequence
  ENSG00000197142_27 (sequence is synthesized)
cttactgtcagaggttactacaagtgtttgaacaggtaacttctacctttgaacttctgttgtgacagattcaaaggttccaggggagtgtgttggccactctcaggacagtacacagta

SEQ ID NO: 713992 - DNA, 120 bp, Artificial Sequence
  ENSG00000197142_28 (sequence is synthesized)
gcttcgggtgtgtcccagtcagtcctaggagctgtggaaagagtagaagtgcctgaatgtggtgctgaatcaatacagccagctgtgaggggagcacttcctggacccaggaagggagag

SEQ ID NO: 713993 - DNA, 120 bp, Artificial Sequence
  ENSG00000197142_29 (sequence is synthesized)
gccagaggatggaatgccacaggccccacttcgtctcccagcccttcatctttcttccatgtccaaaggcggctccccagaggccaagggctcagctcttgtgttctctgagactgtggc

SEQ ID NO: 713994 - DNA, 120 bp, Artificial Sequence
  ENSG00000197142_30 (sequence is synthesized)
acagctcaccctggcttccttagtaggaagcttttaagaactgctctgtagaaagaacaaaccctaatctagctccagcaaagagccaggatcatgctgaacttcctgtgagccttcgtg

SEQ ID NO: 713995 - DNA, 120 bp, Artificial Sequence
  ENSG00000197142_31 (sequence is synthesized)
gcctaggaaagctttatgcacacccatgggcccatcgtggaggagaggatgcctcaccagttcctgcatctgtcacaagtggctgcagcccaaacagactgaatagttttatgggactcg

SEQ ID NO: 713996 - DNA, 120 bp, Artificial Sequence
  ENSG00000197142_32 (sequence is synthesized)
gggataggatggagagtttaaaaaataaaactctcttttctatttaaaataatatgttcattgtgggaaaagattgggaaagaagagtaaaaatgctattcagagaaaactgttaacact

SEQ ID NO: 713997 - DNA, 120 bp, Artificial Sequence
  ENSG00000197147_0 (sequence is synthesized)
gcctccggcagccgggaaagtgcgggcgcggggccgcagcctgcccgcccggagcggcccaggagcacgccgcggggagcgcgggcgtccggggctggagtcgcgcaggtaatagttaac

SEQ ID NO: 713998 - DNA, 120 bp, Artificial Sequence
  ENSG00000197147_1 (sequence is synthesized)
gtaatagttaacctcttctgtgagaagtcagaaggtgatctctttaatgctttctttttaagaatttttcaaattgagactaattgcagaggttccagttgaccagcattcataggaatg

SEQ ID NO: 713999 - DNA, 120 bp, Artificial Sequence
  ENSG00000197147_2 (sequence is synthesized)
aagacaaacacagagatggtgtgtctaagaaacttcaaaaggtgtagacctcctgactgaagcatattggatttatttaatttttttcactgtatttctgtcctcctacaagggaaagtc

SEQ ID NO: 714000 - DNA, 120 bp, Artificial Sequence
  ENSG00000197147_3 (sequence is synthesized)
atgattacactaactgagctaaaatgcttagcagatgcccagtcatcttatcacatcttaaaaccatggtgggacgtcttctggtattacatcacactgatcatgctgctggtggccgtg

SEQ ID NO: 714001 - DNA, 120 bp, Artificial Sequence
  ENSG00000197147_4 (sequence is synthesized)
ctggccggagctctccagctgacgcagagcagggttctgtgctgtcttccatgcaaagtggaatttgacaatcactgtgccgtgccttgggacatcctgaaagccagcatgaacacatcc

SEQ ID NO: 714002 - DNA, 120 bp, Artificial Sequence
  ENSG00000197147_5 (sequence is synthesized)
tctaatcctgggacaccgcttccgctccccctccgaattcagaatgacctccaccgacagcagtactcctatattgatgccgtctgttacgagaaacagctccattggtttgcaaagttt

SEQ ID NO: 714003 - DNA, 120 bp, Artificial Sequence
  ENSG00000197147_6 (sequence is synthesized)
ttcccctatctggtgctcttgcacacgctcatctttgcagcctgcagcaacttttggcttcactaccccagtaccagttccaggctcgagcattttgtggccatccttcacaagtgcttc

SEQ ID NO: 714004 - DNA, 120 bp, Artificial Sequence
  ENSG00000197147_7 (sequence is synthesized)
gattctccatggaccacccgcgccctttcagaaacagtggctgagcagtcagtgaggcctctgaaactctccaagtccaagattttgctttcgtcctcagggtgttcagctgacatagat

SEQ ID NO: 714005 - DNA, 120 bp, Artificial Sequence
  ENSG00000197147_8 (sequence is synthesized)
tccggcaaacagtcattgccctacccacagccaggtttggagtcagctggcatagaaagcccaacttccagtgtcctggacaagaaggagggtgaacaggccaaagccatctttgaaaaa

SEQ ID NO: 714006 - DNA, 120 bp, Artificial Sequence
  ENSG00000197147_9 (sequence is synthesized)
gtgaaaagattccgcatgcatgtggagcagaaggacatcatttatagagtatatctgaaacagataatagtcaaagtcattttgtttgtgctcatcataacttatgttccatatttttta

SEQ ID NO: 714007 - DNA, 120 bp, Artificial Sequence
  ENSG00000197147_10 (sequence is synthesized)
acccacatcactcttgaaatcgactgttcagttgatgtgcaggcttttacaggatataagcgctaccagtgtgtctattccttggcagaaatctttaaggtcctggcttcattttatgtc

SEQ ID NO: 714008 - DNA, 120 bp, Artificial Sequence
  ENSG00000197147_11 (sequence is synthesized)
attttggttatactttatggtctgacctcttcctacagcctgtggtggatgctgaggagttccctgaagcaatattcctttgaggcgttaagagaaaaaagcaactacagtgacatccct

SEQ ID NO: 714009 - DNA, 120 bp, Artificial Sequence
  ENSG00000197147_12 (sequence is synthesized)
gatgtcaagaatgactttgccttcatccttcatctggctgatcagtatgatcctctttattccaaacgcttctccatattcctatcagaggtcagtgagaacaaactgaaacagatcaac

SEQ ID NO: 714010 - DNA, 120 bp, Artificial Sequence
  ENSG00000197147_13 (sequence is synthesized)
ctcaataatgaatggacagttgagaaactgaaaagtaagcttgtgaaaaatgcccaggacaagatagaactgcatctttttatgctcaacggtcttccagacaatgtctttgagttaact

SEQ ID NO: 714011 - DNA, 120 bp, Artificial Sequence
  ENSG00000197147_14 (sequence is synthesized)
gaaatggaagtgctaagcctggagcttatcccagaggtgaagctgccctctgcagtctcacagctggtcaacctcaaggagcttcgtgtgtaccattcatctctggtcgtagaccatcct

SEQ ID NO: 714012 - DNA, 120 bp, Artificial Sequence
  ENSG00000197147_15 (sequence is synthesized)
gcactggcctttctagaggagaatttaaaaatcctccgcctgaaatttactgaaatgggaaaaatcccacgctgggtatttcacctcaagaatctcaaggaactttatctttcgggctgt

SEQ ID NO: 714013 - DNA, 120 bp, Artificial Sequence
  ENSG00000197147_16 (sequence is synthesized)
gttctccctgaacagttgagtactatgcagttggagggctttcaggacttaaaaaatctaaggaccctgtacttgaagagcagcctctcccggatcccacaagttgttacagacctcctg

SEQ ID NO: 714014 - DNA, 120 bp, Artificial Sequence
  ENSG00000197147_17 (sequence is synthesized)
ccttcattgcagaaactgtcccttgataatgagggaagcaaactggttgtgttgaacaacttgaaaaagatggtcaatctgaaaagcctagaactgatcagctgtgacctggaacgcatc

SEQ ID NO: 714015 - DNA, 120 bp, Artificial Sequence
  ENSG00000197147_18 (sequence is synthesized)
ccacattccattttcagcctgaataatttgcatgagttagacctaagggaaaataaccttaaaactgtggaagagatcattagctttcagcatcttcagaatctttcctgcttaaagttg

SEQ ID NO: 714016 - DNA, 120 bp, Artificial Sequence
  ENSG00000197147_19 (sequence is synthesized)
tggcacaataacattgcttatattcctgcacagattggggcattatctaacctagagcagctctctttggaccataataatattgagaatctgcccttgcagcttttcctatgcactaaa

SEQ ID NO: 714017 - DNA, 120 bp, Artificial Sequence
  ENSG00000197147_20 (sequence is synthesized)
ctacattatttggatctaagctataaccacttgaccttcattccagaagaaatccagtatctgagtaatttgcagtactttgctgtgaccaacaacaatattgagatgctaccagatggg

SEQ ID NO: 714018 - DNA, 120 bp, Artificial Sequence
  ENSG00000197147_21 (sequence is synthesized)
ctgtttcagtgcaaaaagctgcagtgtttacttttggggaaaaatagcttgatgaatttgtcccctcatgtgggtgagctgtcaaaccttactcatctggagctcattggtaattacctg

SEQ ID NO: 714019 - DNA, 120 bp, Artificial Sequence
  ENSG00000197147_22 (sequence is synthesized)
gaaacacttcctcctgaactagaaggatgtcagtccctaaaacggaactgtctgattgttgaggagaacttgctcaatactcttcctctccctgtaacagaacgtttacagacgtgctta

SEQ ID NO: 714020 - DNA, 120 bp, Artificial Sequence
  ENSG00000197147_23 (sequence is synthesized)
tccctgtaacagaacgtttacagacgtgcttagacaaatgttgacttaaagaaaagagacccgtgtttcaaaatcatttttaaaagtatgctcggccgggcgtggtggctcatgcctata

SEQ ID NO: 714021 - DNA, 88 bp, Artificial Sequence
  ENSG00000197147_24 (sequence is synthesized)
accagcctgggtgacagagcaagactcttatctcaaaaaaaaaaaaaaaatgctccagggctttaaatgagaagtaaaattttctaag

SEQ ID NO: 714022 - DNA, 120 bp, Artificial Sequence
  ENSG00000197147_25 (sequence is synthesized)
aatgctccagggctttaaatgagaagtaaaattttctaagttaataaagatgaagaatgggtgactattatgatgaaccataactaaatgtcttattaaagcaactgagtgtctagccct

SEQ ID NO: 714023 - DNA, 120 bp, Artificial Sequence
  ENSG00000197147_26 (sequence is synthesized)
aaattaaccaggtaaaaactgttaacactaacctgaagttttgtgaataactgttctttaacttattgagatgttgcaagaaatgcacatccagggtggactgggagctatgaaatgact

SEQ ID NO: 714024 - DNA, 120 bp, Artificial Sequence
  ENSG00000197147_27 (sequence is synthesized)
aaattcctccttgcagtgtttaccttcaagattgtataggtattctctcctcttcttcccccagtccccattacttatttgcacacttgttttaactgacttcctgttttgatatttatc

SEQ ID NO: 714025 - DNA, 120 bp, Artificial Sequence
  ENSG00000197147_28 (sequence is synthesized)
accaagaccataaactcatcaatatgaattttcttgatgtatactcacgactgtctttgatttatgttcctaaatttttttagatagggtatgttgtgcttggcagaattcttttttggc

SEQ ID NO: 714026 - DNA, 120 bp, Artificial Sequence
  ENSG00000197147_29 (sequence is synthesized)
ttaatttttacttcctttcccagcttgcttgagtcttccttaacctggttttctcttaacaccaatgatgaaccctgagaaaatgcctgcatttggcctttgcctagaacaggagctgag

SEQ ID NO: 714027 - DNA, 120 bp, Artificial Sequence
  ENSG00000197147_30 (sequence is synthesized)
gtattccctaaaatttcttcttgtctatcatcaaggcctttttttatttgttaagaatttttatattaaatgtaaaacatataaatattttctattgtataatcttggattcaacatctg

SEQ ID NO: 714028 - DNA, 120 bp, Artificial Sequence
  ENSG00000197147_31 (sequence is synthesized)
aacatctgtgaggatcatttttgtaagatacatagaatttgtgcatttctttatgaacttactgttagtgttcttggtttcggctgtttatgactcatgtttatgtacattctgctccaa

SEQ ID NO: 714029 - DNA, 120 bp, Artificial Sequence
  ENSG00000197147_32 (sequence is synthesized)
aatgtttttgtactctgcaactaattacttttggataacaaaagccttgtgtttaatgccctaaagtatttgggggtttccttgtgagagggtggccgaatcatctacctctctcttcca

SEQ ID NO: 714030 - DNA, 120 bp, Artificial Sequence
  ENSG00000197147_33 (sequence is synthesized)
tagttgctgtgcaatcgtacgggtaaaattcttaattacttacaaaaactgtgatagaggggagaggtacagatttggtttttaaattgattttaaaatactttatagaaatttagtaag

SEQ ID NO: 714031 - DNA, 120 bp, Artificial Sequence
  ENSG00000197147_34 (sequence is synthesized)
agttaaagcaaaagactttttttccctccatctatgtaatctctagctatgattataatgtaaaacagcctctattcagtgtctaaaatgagttctcaaaacccacaaagaaatagatcc

SEQ ID NO: 714032 - DNA, 120 bp, Artificial Sequence
  ENSG00000197147_35 (sequence is synthesized)
atttaactgaaattcatctcatgcctttatctaactcttctggaaaatacattttgctcctttttataaagagctttgtgcttggccttttattatgcatatttttaatgaataaaatca

SEQ ID NO: 714033 - DNA, 120 bp, Artificial Sequence
  ENSG00000197147_36 (sequence is synthesized)
actgactcatttttgggaaatgtacatctttaatatgtttttccctaagggtctaggcattatgatgccacctcttcattttggatataactatgaagaaatctattaactgcacctaca

SEQ ID NO: 714034 - DNA, 120 bp, Artificial Sequence
  ENSG00000197147_37 (sequence is synthesized)
caaaactggaaaacactataggtaaacagtactgtgtatatggaattgtggtgcgtggtatgtgttttctcttgctttgttccagaaagatgaaagtgagtctttaaagcatagcaaata

SEQ ID NO: 714035 - DNA, 120 bp, Artificial Sequence
  ENSG00000197147_38 (sequence is synthesized)
gagcttcccctcacctgccacacactcctgcactaaagttcaaagaaaagaattattcaaatcaaatgaaatttgaataatattagctatcaggaatataggacaccaaacacactgcct

SEQ ID NO: 714036 - DNA, 120 bp, Artificial Sequence
  ENSG00000197147_39 (sequence is synthesized)
cacacattattgtttattctgaacggaaaggaacagtgtaaaaataaactacttaccaaaacttgcctttagtcagaacattcagctctcagggaagcaggtataactgatgaaacttct

SEQ ID NO: 714037 - DNA, 120 bp, Artificial Sequence
  ENSG00000197147_40 (sequence is synthesized)
aggacttcagaaaacagattctaattatatccatgtttttcgttgttattttcattttttaaagtgtgagttgatgtttattttagtgtttcacaatagaattatcatgtatactgattc

SEQ ID NO: 714038 - DNA, 120 bp, Artificial Sequence
  ENSG00000197147_41 (sequence is synthesized)
cagtgtggcatgtgattaagttttggacatgaatatgccaaaagtgcttaaatgtttttggccacataactagctagaatttcaaaacaaaattcagatttgctaccattcacctgacga

SEQ ID NO: 714039 - DNA, 120 bp, Artificial Sequence
  ENSG00000197147_42 (sequence is synthesized)
acttctccatggctcgtcactggtttggttcaactgcagaagtcattggctaaattttccttatcacctacgtaaatttctagaagaatttactagcaggattaataatgaatattataa

SEQ ID NO: 714040 - DNA, 120 bp, Artificial Sequence
  ENSG00000197147_43 (sequence is synthesized)
actgctttccacacactagggtataattattggtgcaatctatgttgttcttgatgccatggttttacatcttttaatttaaaccttatacaccagtgtttaggtcgcttttgagacaag

SEQ ID NO: 714041 - DNA, 120 bp, Artificial Sequence
  ENSG00000197147_44 (sequence is synthesized)
gtagccctgatgcaaggaaaaatgaggctactacttcacataaaaaatagggtgttaataccacctttactgtactgttggagcagatctttattttacaagtgttcatattcacataag

SEQ ID NO: 714042 - DNA, 120 bp, Artificial Sequence
  ENSG00000197147_45 (sequence is synthesized)
agaattttaaatgaagaaaattaagtttgttaaattataattatgagactttcgttggcatttgatttcaagaatacatatgcattttccaaaaaataaatgtggaggttattcagaaca

SEQ ID NO: 714043 - DNA, 120 bp, Artificial Sequence
  ENSG00000197147_46 (sequence is synthesized)
aaattcatagcttacggtagtaatggcatggattaattttatttgcatgcacacacagacacacatacttcatatatgcaaattatagcattagtttttgatatatctagtggttttttt

SEQ ID NO: 714044 - DNA, 120 bp, Artificial Sequence
  ENSG00000197147_47 (sequence is synthesized)
ttcaaaattgcaggaggttgtagattaaattaagtatgatagcacgttttttaattcattaatcatgaagtgctctgttccctaagttatgacatttagaagaaatcacatgctcaacct

SEQ ID NO: 714045 - DNA, 120 bp, Artificial Sequence
  ENSG00000197147_48 (sequence is synthesized)
taatctgagaacctaagtgtttttgagcattccagtaaaggagtagtgttcttttcctaacttacatcagggtacatctgtgtggcacacagatactatcttttcattcttcactcccag

SEQ ID NO: 714046 - DNA, 120 bp, Artificial Sequence
  ENSG00000197147_49 (sequence is synthesized)
tcttaatttctttcccctgtatgtcactgtattttatgtcacttcacattgtgttaaacagggtaaatagagatcctcagtatctcagtgctgtggcatagctccaataggtgtgctgtg

SEQ ID NO: 714047 - DNA, 120 bp, Artificial Sequence
  ENSG00000197147_50 (sequence is synthesized)
gtgcactgcagtgatgtatttgcataacattgtttgatagtgaaaaattttttttcggttcaagtgttttgtgattaaaattttatgtttaattaaaatattgcataatattgatgggtt

SEQ ID NO: 714048 - DNA, 120 bp, Artificial Sequence
  ENSG00000197147_51 (sequence is synthesized)
caaaaaccattaaaataatcaaacaattattctgtgcccttaacattattttcttgtgttttcaataaaattttcttttcatctttccatcttcacattctcttagcatcatcctatgca

SEQ ID NO: 714049 - DNA, 120 bp, Artificial Sequence
  ENSG00000197147_52 (sequence is synthesized)
cataaggtatgttgttttccttctccactcacctaccgcactaaatttgatcagcaattgtacagtaacagaatatatttgtgccagaagatttgcaatgatatttgagcatgtatttat

SEQ ID NO: 714050 - DNA, 120 bp, Artificial Sequence
  ENSG00000197147_53 (sequence is synthesized)
ttaggaggaagccagtgcctgtaattatgtctcattgagtagttttactttgcccatcctgcagtatttagagctgatctgtacccaaagcaggacaatgtaactgtagatctgctttgt

SEQ ID NO: 714051 - DNA, 120 bp, Artificial Sequence
  ENSG00000197147_54 (sequence is synthesized)
tttcagtaactgtacattgcatcagaatctgtttatttctatctggaaacagacagaatggtgggggagggaaggagttattttgcatcctagtttgtattatgaagtcatcatatatat

SEQ ID NO: 714052 - DNA, 120 bp, Artificial Sequence
  ENSG00000197147_55 (sequence is synthesized)
atttgaaatagtataagctaattactgttgcagaatgccctcgatataattatttcttttcagctggatgtgaaaagctgaagcagtgaaaacctgcagtcttatttcactggtttcctt

SEQ ID NO: 714053 - DNA, 120 bp, Artificial Sequence
  ENSG00000197147_56 (sequence is synthesized)
ctgtttcttgtccatcacttctgtatccacagggagctatctactacatacctttggtaacaggctacattctcttcagattttttatatgaataatttcatcagcactaaagcattaac

SEQ ID NO: 714054 - DNA, 120 bp, Artificial Sequence
  ENSG00000197147_57 (sequence is synthesized)
atagaataatgagccaaagtactgagtcgagatggctttcagttgagtttaatttcatatttaacttttgcatttaacttgtataatacactactgctgagaaaaacaattatgaatgcc

SEQ ID NO: 714055 - DNA, 120 bp, Artificial Sequence
  ENSG00000197147_58 (sequence is synthesized)
ttctgcatgttgtacattatctctaacagagatggtgcaattttaagaatacaaaggggtatagagttagaatggatgtgttcgtgcatatatatgttgtatttaaatattaatgtttac

SEQ ID NO: 714056 - DNA, 120 bp, Artificial Sequence
  ENSG00000197147_59 (sequence is synthesized)
aagaagattttttttaaattcttcaaatacttcacttagtgaaataatgggccaatctggaatagagacattttatttggttagtgcaagagtgaaagctagcatttgttaaccttcaca

SEQ ID NO: 714057 - DNA, 120 bp, Artificial Sequence
  ENSG00000197147_60 (sequence is synthesized)
tatttatctgtgtacaattgtttttgcttctggtaatgaattattagaaaatggaagattttgttcaatgtttttggccctcaggtttactgtgtaaatctgcatttttggtggtaaatc

SEQ ID NO: 714058 - DNA, 120 bp, Artificial Sequence
  ENSG00000197147_61 (sequence is synthesized)
cctttgccacagattcagtagcttttggtaaacttcactgtttttaaagtaccttttgtgtaaaataaagatccaatttttataacaaatggcaaataaaaacagtaaatgctggaagaa

SEQ ID NO: 714059 - DNA, 120 bp, Artificial Sequence
  ENSG00000197147_62 (sequence is synthesized)
atggcccacagctctggagactggaaggtccaagatcaagatactacagatttgatttctggacgttgaacatggtgtaggagtagaaaagcaacagggacggaaggagagaacttaccc

SEQ ID NO: 714060 - DNA, 120 bp, Artificial Sequence
  ENSG00000197147_63 (sequence is synthesized)
cttcaagcccttttataaggcactaaatcccatcattgagggcagagtcctcatagcctaatcacctcctaaatgctccatttcttaatattgttgcactgaggattaagcttcaacatg

SEQ ID NO: 714061 - DNA, 120 bp, Artificial Sequence
  ENSG00000197150_0 (sequence is synthesized)
gttgtcgggatgggggcgggagccaacatagagccctcagtgggatgagggtgaaactgctattgccggcggctcctgttttaccgcgtcagcatgctggtgcatttatttcgggtcggg

SEQ ID NO: 714062 - DNA, 120 bp, Artificial Sequence
  ENSG00000197150_1 (sequence is synthesized)
attcggggtggcccattcccaggcaggctgctaccgcccctccgcttccagacattctcagctgtcaggtactctgatggctaccgcagctcctccctcctccgggccgtggcccacctg

SEQ ID NO: 714063 - DNA, 120 bp, Artificial Sequence
  ENSG00000197150_2 (sequence is synthesized)
cggtcccagctctgggcccacctccctcgagcccccctagctcccagatggagcccctctgcctggtgctgggttgggggagccctgctaggccccatggtactgagtaagcatccccac

SEQ ID NO: 714064 - DNA, 120 bp, Artificial Sequence
  ENSG00000197150_3 (sequence is synthesized)
ctctgccttgtggccctgtgtgaggcagaagaggcccctcctgccagctccacaccccatgtcgtggggtctcgctttaactggaagctcttctggcagtttctgcacccccacctgctg

SEQ ID NO: 714065 - DNA, 120 bp, Artificial Sequence
  ENSG00000197150_4 (sequence is synthesized)
gtcctgggggtagccgtcgtgctggccttgggtgcggcactcgtgaatgtacagatccccctgctcctgggccagctggtagaggtcgtggccaagtacacaagggaccacgtagggagt

SEQ ID NO: 714066 - DNA, 120 bp, Artificial Sequence
  ENSG00000197150_5 (sequence is synthesized)
ttcatgactgagtcccagaatctcagcacccacctgcttatcctctatggtgtccagggactgctgaccttcgggtacctggtgctgctgtcccacgttggcgagcgcatggctgtggac

SEQ ID NO: 714067 - DNA, 120 bp, Artificial Sequence
  ENSG00000197150_6 (sequence is synthesized)
atgcggagggccctcttcagctccctgctccgacaagacatcaccttctttgacgccaataagacagggcagctggtgagccgcttgacaactgacgtgcaggagtttaagtcatccttc

SEQ ID NO: 714068 - DNA, 120 bp, Artificial Sequence
  ENSG00000197150_7 (sequence is synthesized)
aagcttgtcatctcccaggggctgcgaagctgcacccaggtggcaggctgcctggtgtccctgtccatgctgtcgacacgcctcacgctgctgctgatggtggccacaccagccctgatg

SEQ ID NO: 714069 - DNA, 120 bp, Artificial Sequence
  ENSG00000197150_8 (sequence is synthesized)
ggagtgggcaccctgatgggctcaggcctccgaaaattgtctcgccagtgtcaggagcagatcgccagggcaatgggcgtagcagacgaggccctgggcaatgtgcggactgtgcgtgcc

SEQ ID NO: 714070 - DNA, 120 bp, Artificial Sequence
  ENSG00000197150_9 (sequence is synthesized)
ttcgccatggagcaacgggaagaggagcgctatggggcagagctggaagcctgccgctgccgggcagaggagctgggccgcggcatcgccttgttccaagggctttccaacatcgccttc

SEQ ID NO: 714071 - DNA, 120 bp, Artificial Sequence
  ENSG00000197150_10 (sequence is synthesized)
aactgcatggtcttgggtaccctatttattgggggctcccttgtggccggacagcagctgacagggggagacctcatgtccttcctggtggcctcccagacagtgcaaaggtccatggcc

SEQ ID NO: 714072 - DNA, 120 bp, Artificial Sequence
  ENSG00000197150_11 (sequence is synthesized)
aacctctctgtcctgtttgggcaggtggtccgggggctgagtgcaggtgcccgggtctttgagtacatggccctgaacccctgcatcccactgtctgggggctgctgcgtccccaaagag

SEQ ID NO: 714073 - DNA, 120 bp, Artificial Sequence
  ENSG00000197150_12 (sequence is synthesized)
cagctgcgtggctccgttacatttcagaacgtctgcttcagctacccctgccgccccggcttcgaggtgctgaaagacttcaccctgacgctgccccctggcaagatcgtggccctcgtg

SEQ ID NO: 714074 - DNA, 120 bp, Artificial Sequence
  ENSG00000197150_13 (sequence is synthesized)
ggccagtctggcggaggaaagaccaccgtggcttccctgctggagcgcttctacgaccccacggcaggcgtggtgatgctggatgggcgggacctgcgcacccttgacccctcctggctc

SEQ ID NO: 714075 - DNA, 120 bp, Artificial Sequence
  ENSG00000197150_14 (sequence is synthesized)
cggggccaggttgtcggcttcatcagccaggagcccgtcctgtttgggacgaccatcatggaaaacatccgctttgggaagctggaagcttccgatgaagaggtgtacacagccgcccgg

SEQ ID NO: 714076 - DNA, 120 bp, Artificial Sequence
  ENSG00000197150_15 (sequence is synthesized)
gaagcgaatgctcacgagttcatcaccagcttccccgagggctacaacacggtcgtcggtgaacggggcactaccctgtctgggggccagaagcagcgcctggccatcgcccgagccctt

SEQ ID NO: 714077 - DNA, 120 bp, Artificial Sequence
  ENSG00000197150_16 (sequence is synthesized)
atcaagcagcccacggtgctgatactggatgaagctaccagcgcgctggatgcagagtccgagcgggttgtacaggaggccctggaccgggccagtgcaggccgcacggtgctggtaatt

SEQ ID NO: 714078 - DNA, 120 bp, Artificial Sequence
  ENSG00000197150_17 (sequence is synthesized)
gcccaccggctcagcactgtccgtggggcccactgcattgtcgtcatggccgatggccgtgtctgggaggctgggacacatgaagagctcctgaagaaaggcgggctatacgccgagctc

SEQ ID NO: 714079 - DNA, 120 bp, Artificial Sequence
  ENSG00000197150_18 (sequence is synthesized)
atccggaggcaggccctggatgccccgaggacagcggccccaccgcccaaaaagccagaaggccccaggagccaccagcacaagtcctgagaagggccccctgaggtgtggtcgctgcca

SEQ ID NO: 714080 - DNA, 120 bp, Artificial Sequence
  ENSG00000197150_19 (sequence is synthesized)
atcagtgttagggctggggctcagcctgggggagcctactggggactgagcccccaggagggccagcatgtggagagtcgctgcggctgctcctgctcacaataaagccggggccgagca

SEQ ID NO: 714081 - DNA, 120 bp, Artificial Sequence
  ENSG00000197150_20 (sequence is synthesized)
gctggcaggggaggccaatccctccctcccctccccagtcctgccggctgcctccctcccaccagagtctgccagagtcattgggctgcaatgggcagagacagagttccacgagacacc

SEQ ID NO: 714082 - DNA, 120 bp, Artificial Sequence
  ENSG00000197150_21 (sequence is synthesized)
tccactctattctccctttgcccagacccctccagacctctcaagagacgttctggccagtctccctgccccacccagcagcttcaaattggccaggcctacagtagctccagggaattt

SEQ ID NO: 714083 - DNA, 120 bp, Artificial Sequence
  ENSG00000197150_22 (sequence is synthesized)
ttaaaaatcagggtctggaagtgggcctgggaattcaaacctaggctcttcccacacccttgctaggacctcacttccctagactggcgactgactccctctcctgtgtccccactccct

SEQ ID NO: 714084 - DNA, 120 bp, Artificial Sequence
  ENSG00000197150_23 (sequence is synthesized)
ccatgggagaaggagcctatcccctggctcaccccgggacccacagtccccatcttccaaacaacctccctcctttctccctgcacagtgaacacagtcctgatttctagatttcacctc

SEQ ID NO: 714085 - DNA, 120 bp, Artificial Sequence
  ENSG00000197150_24 (sequence is synthesized)
ccctccccacccacaagggacacaggcctaacagggcccaacacttgggtcagggtaggagggacggggccacaatggccagttcccacgagaagcgccagcctgcctggctgtcttcca

SEQ ID NO: 714086 - DNA, 120 bp, Artificial Sequence
  ENSG00000197150_25 (sequence is synthesized)
ccggccctgccctgtgtgcctggcgtctttcacccactgagattgtgaaccagcctccatctacaccaagaacacccagcactgaaggagatgggaggggctgatgcccacctggagctc

SEQ ID NO: 714087 - DNA, 120 bp, Artificial Sequence
  ENSG00000197150_26 (sequence is synthesized)
tctgcttcctgcccacagtgctgacgagtacagagctaaatggagcagctactgcagaatccagtacagaatcggtccaggagggtgcggctgtggacaggccagcatccccagcaggtt

SEQ ID NO: 714088 - DNA, 120 bp, Artificial Sequence
  ENSG00000197150_27 (sequence is synthesized)
ctgggaggcgcaccttgaaaggggaaggcagacatcctgagtgatgggcgcctgtggccctgagactgtggatgagggggctaggctccagctggcttctgaggggcctggaaaggcaca

SEQ ID NO: 714089 - DNA, 120 bp, Artificial Sequence
  ENSG00000197150_28 (sequence is synthesized)
caagtaggtccttggctgaactggtgccccagcaggacctcgtgtccctgcactgctgcagatgcatcagccctccccatgttggtgccgctgtcacttcctactgggatccttccccta

SEQ ID NO: 714090 - DNA, 120 bp, Artificial Sequence
  ENSG00000197150_29 (sequence is synthesized)
tccagccacatccaggctgtgggactacacggtgccctgttcccctgggcaggagaagaggtggtacctgcaatgcaccttcacagccaggcaagcattctggatttaccctgtgtaaag

SEQ ID NO: 714091 - DNA, 120 bp, Artificial Sequence
  ENSG00000197150_30 (sequence is synthesized)
aagggtggtaccctctttcaggggtgtgatacagtgcattgatggagcagctggtgctgctgggaggccagcctggaagaggcagcagtggctcaagtttgcgtgcaggagccagagtgg

SEQ ID NO: 714092 - DNA, 120 bp, Artificial Sequence
  ENSG00000197150_31 (sequence is synthesized)
gacccacgggctcttgtgggtgtggtttagaactagatggtgctttggggacaagccatccaaaaaccccaggcccacatccaccctgatttgatatcccacttcctgacagatcagagg

SEQ ID NO: 714093 - DNA, 120 bp, Artificial Sequence
  ENSG00000197150_32 (sequence is synthesized)
ctgtgtctttaagcagtggaggtccaggagcagagcctggggctggttcacagctaaacccctccttagggcagcccagagtagggcctcagctggcaagtccacaagccctgctggggc

SEQ ID NO: 714094 - DNA, 120 bp, Artificial Sequence
  ENSG00000197150_33 (sequence is synthesized)
cctgcttgttggcctgacccctccctcaccaggcagccagccaaggtggttcctgcttcacccactcagtcatcagcctcaggctgcccaaaatgcctctgacaccagatttatatcttc

SEQ ID NO: 714095 - DNA, 120 bp, Artificial Sequence
  ENSG00000197150_34 (sequence is synthesized)
tgggcggcttctttaaatccagcccttcacccgccccctagagaagcagtgaaaccccttggctagtccagctggaagagctagaccgcaggagccgcgccgtcttcctaacctcgcctc

SEQ ID NO: 714096 - DNA, 120 bp, Artificial Sequence
  ENSG00000197150_35 (sequence is synthesized)
ggccttcgctccacagtggagagtgggagcctagctgtgcttgatgctgaatgcctgttttgagagtgtgagtgggatcatctacagtaaatacttgcaaagcatggcactgtggctctg

SEQ ID NO: 714097 - DNA, 120 bp, Artificial Sequence
  ENSG00000197150_36 (sequence is synthesized)
gggagctggtacgcctgtgctgtaaccatggtactcagtccttccaaagtgtttattaatcaagcacctgtcatgtgccattgagcccacgatggggaatgaggacagtccctgccccca

SEQ ID NO: 714098 - DNA, 120 bp, Artificial Sequence
  ENSG00000197150_37 (sequence is synthesized)
tgaagcttgtgtcctgttgggaggacagacaggtggcccagcagttgcagcatggtgtgtgcacacgtttggctggtggaaccatgtttctaccactcatggtcaaaaaaagcccaccaa

SEQ ID NO: 714099 - DNA, 120 bp, Artificial Sequence
  ENSG00000197150_38 (sequence is synthesized)
agtcctgggagttcacatctgtgtgatgatacggcaacattgtttgtaatggaaagactggacacccccagtgcccatcagtgggggagtcattaaataaactatggtatgtgcacataa

SEQ ID NO: 714100 - DNA, 120 bp, Artificial Sequence
  ENSG00000197150_39 (sequence is synthesized)
ctgctaccgcccctccgcttccagacattctcagctgtcagaaacacatggcgtaatgggaaaactggacagttacacaaggcagaaggagagtactctgatggctaccgcagctcctcc

SEQ ID NO: 714101 - DNA, 120 bp, Artificial Sequence
  ENSG00000197150_40 (sequence is synthesized)
agggcagtgccggcccgccgggagatggagtccacgagcttgcgcgaggcttgctgggagctgtaggccaggcctaccggggtggaatgtcactccgcgggtgttggcctcaattattta

SEQ ID NO: 714102 - DNA, 120 bp, Artificial Sequence
  ENSG00000197150_41 (sequence is synthesized)
tagtgacactccagtcgccagcaggaggctcctgcgtctgcagccgcgtgtcagccagaaggaggggacgctcggggtcagtgaccacgcccagtccgcactcccgaccgggggtcccct

SEQ ID NO: 714103 - DNA, 120 bp, Artificial Sequence
  ENSG00000197150_42 (sequence is synthesized)
cagttacacaaggcagaaggagactgtggagagggagtgtgtgtcatggcgccccaggccagggaggggaggtagggtaatgggcctgggacatcagaagacatggcacactggcagagt

SEQ ID NO: 714104 - DNA, 120 bp, Artificial Sequence
  ENSG00000197150_43 (sequence is synthesized)
agagccagcctgggtgctggagtcagactgcagacttggttccctgctcgtcccagttctgctgcctgcggacaagttatttcagctctcttagctccacatgatttttttcatctgtca

SEQ ID NO: 714105 - DNA, 120 bp, Artificial Sequence
  ENSG00000197150_44 (sequence is synthesized)
attctactgaggcatgtgtcctcgccctgctgcatggtgcacccctgcgtgtgtgtccgccggatcagaacccctcactgcagggtgtactgtcccaggaagcgggaggcggacggagac

SEQ ID NO: 714106 - DNA, 120 bp, Artificial Sequence
  ENSG00000197150_45 (sequence is synthesized)
aggctcccattttcagccccaaacctgacattccacagagacgttcctcccatttccgcagctgcatggacaccctcgcgtgccccgtttctgctcgtgctccctaatctgagcaccttc

SEQ ID NO: 714107 - DNA, 120 bp, Artificial Sequence
  ENSG00000197150_46 (sequence is synthesized)
agaccctttctggtcccgggctcaggcctccttggcagcctcgccctcctccagcccaaggagctgttctgtcgtggctttggaattcagatgctctcactgtgatagagatggggtctt

SEQ ID NO: 714108 - DNA, 120 bp, Artificial Sequence
  ENSG00000197150_47 (sequence is synthesized)
ggggggctgggagctgttctgtcgtggctttggagttcagatgctctcactgtgatagagatggggtcttggggggctgcctccaccactgcctgccctgctcagcgctgacccacttcc

SEQ ID NO: 714109 - DNA, 120 bp, Artificial Sequence
  ENSG00000197150_48 (sequence is synthesized)
tgacccacttcccttgaccagagttttggcctctctgaatgggacggtcgttttagtcctgagggcccataagaagcccagtggcggctgggtgcggtggcgcacacctgtaatcccagc

SEQ ID NO: 714110 - DNA, 120 bp, Artificial Sequence
  ENSG00000197150_49 (sequence is synthesized)
agtggctcccttaataaaatcaccccttagccctctgtggtgggcagtggtgggacagtctccctgtggggagggtggctgcactgtccagccccaaccctcccgcttcgggacccccac

SEQ ID NO: 714111 - DNA, 120 bp, Artificial Sequence
  ENSG00000197150_50 (sequence is synthesized)
ttcccctttagggcctgagactctgactttacctcccaccgtactgcttggccatccagcagctttatgacacacacaagaacccccaggggcttgtctgtgctgtttcgctggctgctc

SEQ ID NO: 714112 - DNA, 120 bp, Artificial Sequence
  ENSG00000197150_51 (sequence is synthesized)
ccacagccacaggccctagacccatcctcttggaggtccttctagcgctgcctatgtggagattcttccccactcatcttgggggtttggatttgttgcataaagcagctgatgtgtttc

SEQ ID NO: 714113 - DNA, 120 bp, Artificial Sequence
  ENSG00000197150_52 (sequence is synthesized)
ccacagggtcctgccagctaagccaagggcccatgcattggcactggggtctagcagagagaggggagcaggatggcccggcctacctcaggcagcctaacctatgagcccatcctgagt

SEQ ID NO: 714114 - DNA, 120 bp, Artificial Sequence
  ENSG00000197150_53 (sequence is synthesized)
actcctgatggagatggggaggtgcccagacagacagcaagtggggcccagccgcctcatcagaatcagggccaggctccacctgggaacaggcccgtagcctacagcccacggcccctg

SEQ ID NO: 714115 - DNA, 120 bp, Artificial Sequence
  ENSG00000197150_54 (sequence is synthesized)
agagcagggtcatcacactccaatgagtcatgtgcattttgaatttcagttgctgcccagcccctttgccaggccctaatgtcttccagatctctggtggagaatgtgcccctgctcatc

SEQ ID NO: 714116 - DNA, 120 bp, Artificial Sequence
  ENSG00000197150_55 (sequence is synthesized)
aacagatagctggctgggctggctccttcctgcctggtgcctcccccggctgcctttagcaagtgctgactgcactgagtccactgggaccttttccttttgggtttcgaggctcctccc

SEQ ID NO: 714117 - DNA, 120 bp, Artificial Sequence
  ENSG00000197150_56 (sequence is synthesized)
actcacccccaccctagtgctggaagaagtgagtctgcagctgaagggttgctggggagtcagtctttcctcttacttaggaggggaccaggcatacacacactgtcacaggtcagccag

SEQ ID NO: 714118 - DNA, 120 bp, Artificial Sequence
  ENSG00000197150_57 (sequence is synthesized)
ccttcctcctcagcctcctggcagccggccagccctaccccggccctgccgggacgaaggaggccacccactgtctagacagataacactgtgggtatacttatctgcagggcaagctca

SEQ ID NO: 714119 - DNA, 120 bp, Artificial Sequence
  ENSG00000197150_58 (sequence is synthesized)
tgagaaaaatttttttcagggaattttgttttggggtctcctgagagttcccctgtggcccagtgtcttctgttttcttctttctccaaaaagatttaacatcacttcttccacctaaat

SEQ ID NO: 714120 - DNA, 120 bp, Artificial Sequence
  ENSG00000197150_59 (sequence is synthesized)
gtctgccaaagtcattgcttccccaagagtctgcagcattagatctgctctccccttctaagccacgcacccttgatctctgttcatggtggcggcctccgcatcctcagggccgagcag

SEQ ID NO: 714121 - DNA, 120 bp, Artificial Sequence
  ENSG00000197150_60 (sequence is synthesized)
ggagtccgtgggtcagctgggctcccttcctcgtgggctgatatcaccgctgcatgtgtgcacaggcctcaccctgcagaccacaggccagggcactggaggacacccacagaggcctgt

SEQ ID NO: 714122 - DNA, 120 bp, Artificial Sequence
  ENSG00000197150_61 (sequence is synthesized)
gccttcacttccatttcctcgtggagcaccccctcccaggggcttgggctgagctgagggacagctgtcatcctcatctggccaaggagggagccagggctcagcgatctggtgttgcta

SEQ ID NO: 714123 - DNA, 120 bp, Artificial Sequence
  ENSG00000197150_62 (sequence is synthesized)
cgtcccagggctctacgcccccatggtgcaggagcagtctctgcatttggccacaggccacctgcttccttgctcccccgccccaccgtggcttccttcccctcctctggctcttcttgt

SEQ ID NO: 714124 - DNA, 120 bp, Artificial Sequence
  ENSG00000197150_63 (sequence is synthesized)
gcctgccacttccagggatgacaagctgacccctgtccccacacaccccacccttatagcttattgctttgcgttggtccaaaaccacccgctcagctgagcctctgggatgaccagagc

SEQ ID NO: 714125 - DNA, 120 bp, Artificial Sequence
  ENSG00000197150_64 (sequence is synthesized)
tgatcaccagacagctcaaggcgggcctcccccctcctatctctttccaagctaaacacaagcagttctacataaatatgttatggtaaataatgagatagtaaatatgctgtaacagat

SEQ ID NO: 714126 - DNA, 120 bp, Artificial Sequence
  ENSG00000197150_65 (sequence is synthesized)
aaagggacgtcctctaagtggagtcagactatgtccttttgtgactgcgttttgtcactccacattgtgtcctcagcttcctccgtgttgcaccctgtccgaattcccttccgctgcagg

SEQ ID NO: 714127 - DNA, 120 bp, Artificial Sequence
  ENSG00000197150_66 (sequence is synthesized)
taggcaaaaggcacaggccttcctgaaagcaggggaaggatgagatgaagactgcaattagaagggtctagggatgtgaaaggccatgatggtaaagagaaaagctcacactactctttt

SEQ ID NO: 714128 - DNA, 120 bp, Artificial Sequence
  ENSG00000197150_67 (sequence is synthesized)
tttaaacctttccccatcagtaagcttatctagatcttctagatctcaccatcctctcctggctggataacttctgctccctacaaccagtcctgtctgcctccagcccatgcccctctg

SEQ ID NO: 714129 - DNA, 120 bp, Artificial Sequence
  ENSG00000197150_68 (sequence is synthesized)
gtctcgccagtgtcaggagcaggtaccggcattcctggccatcctcttcaccctccccacaccgtttctctttccactccccggaactcctccctgtccccatcctggactccttgtcct

SEQ ID NO: 714130 - DNA, 120 bp, Artificial Sequence
  ENSG00000197150_69 (sequence is synthesized)
tcgccagggcaatgggcgtagcagacgaggccctgggcaatgtgcggactgtgcgtgccttcgccatggagcaacgggaagaggagtgagtcctgggagggcggagcacaaagcagagat

SEQ ID NO: 714131 - DNA, 120 bp, Artificial Sequence
  ENSG00000197150_70 (sequence is synthesized)
atgtagtggtgcttccaggattcaaagtactctgatggctaccgcagctcctccctcctccgggccgtggcccacctgcggtcccagctctgggcccacctccctcgagcccccctagct

SEQ ID NO: 714132 - DNA, 120 bp, Artificial Sequence
  ENSG00000197150_71 (sequence is synthesized)
ctgctaccgcccctccgcttccagacattctcagctgtcagaaactgaagttgcttcagaacagccctgagaagggcaggggcaagggcctgacagaagaggaagtgctccttccagagg

SEQ ID NO: 714133 - DNA, 120 bp, Artificial Sequence
  ENSG00000197150_72 (sequence is synthesized)
ccaggaggtggggctgtgtctgccctggtggctgctgtgagcaagtccagtgccgggcacaggagcagctctctttcctcacctctctgcaccgtggtcccttaaacccccggccccttc

SEQ ID NO: 714134 - DNA, 120 bp, Artificial Sequence
  ENSG00000197153_0 (sequence is synthesized)
atggcccggacgaagcagacagctcgcaagtctaccggcggcaaggcaccgcggaagcagctggccaccaaggcagcgcgcaaaagcgctccagcgactggcggtgtgaagaagccccac

SEQ ID NO: 714135 - DNA, 120 bp, Artificial Sequence
  ENSG00000197153_1 (sequence is synthesized)
tcgactgagctgctcatccgcaaactgccatttcagcgcctggtgcgagaaatcgcgcaggatttcaaaaccgaccttcgtttccagagctcggcggtgatggcgctgcaagaggcgtgc

SEQ ID NO: 714136 - DNA, 120 bp, Artificial Sequence
  ENSG00000197153_2 (sequence is synthesized)
gaggcctatctggtgggtctctttgaagacaccaacctctgtgctattcacgccaagcgtgtcactattatgcctaaggacatccagcttgcgcgtcgtatccgtggcgagcgagcataa

SEQ ID NO: 714137 - DNA, 120 bp, Artificial Sequence
  ENSG00000197153_3 (sequence is synthesized)
ccaaaacccgctcctctagagctgggctccaatttcctgtaggacgagtgcaccgcctgctccgcaagggcaactacgctgagcgggtcggggccggcgcgccggtttacctggcggcgg

SEQ ID NO: 714138 - DNA, 120 bp, Artificial Sequence
  ENSG00000197153_4 (sequence is synthesized)
tgctggagtacctaactgccgagatcctggagctggcgggcaacgcagcccgcgacaacaaaaagacccgcatcatcccgcgccacttgcagctggccatccgcaacgacgaggagctca

SEQ ID NO: 714139 - DNA, 120 bp, Artificial Sequence
  ENSG00000197157_0 (sequence is synthesized)
ctctttcgctccgtgtcccgctgctgctcctgtgagcgcccggcgagtccgtcccgtccaccgtccgcagctggtagccagcctgcccctcgcctcgactccctttcaccaacaccgaca

SEQ ID NO: 714140 - DNA, 120 bp, Artificial Sequence
  ENSG00000197157_1 (sequence is synthesized)
cccacattgacacctccagtccggccagccgctccactcgttgcctttgcatctccacacatggcgtcctccgcgcagagcggcggctcctccgggggacccgcggtccccaccgtgcag

SEQ ID NO: 714141 - DNA, 120 bp, Artificial Sequence
  ENSG00000197157_2 (sequence is synthesized)
cggggcatcatcaagatggtcctctcagggtgcgccatcattgtccgaggtcagcctcgtggtgggcctcctcctgagcggcagatcaacctcagcaacattcgtgctggaaatcttgct

SEQ ID NO: 714142 - DNA, 120 bp, Artificial Sequence
  ENSG00000197157_3 (sequence is synthesized)
cgccgggcagccgccacacaacctgatgcaaaggatacccctgatgagccctgggcatttccagctcgagagttccttcgaaagaagctgattgggaaggaagtctgtttcacgatagaa

SEQ ID NO: 714143 - DNA, 120 bp, Artificial Sequence
  ENSG00000197157_4 (sequence is synthesized)
aacaagactccccaggggcgagagtatggcatgatctaccttggaaaagataccaatggggaaaacattgcagaatcactggttgcagagggcttagccacccggagagaaggcatgaga

SEQ ID NO: 714144 - DNA, 120 bp, Artificial Sequence
  ENSG00000197157_5 (sequence is synthesized)
gctaataatcctgagcagaaccggctttcagaatgtgaagaacaagcaaaggcagccaagaaagggatgtggagtgaggggaacggttcacatactatccgggatctcaagtataccatt

SEQ ID NO: 714145 - DNA, 120 bp, Artificial Sequence
  ENSG00000197157_6 (sequence is synthesized)
gaaaacccaaggcactttgtggactcacaccaccagaagcctgttaatgctatcatcgagcatgtgcgggacggcagtgtggtcagggccctgctcctcccagattactacctggttaca

SEQ ID NO: 714146 - DNA, 120 bp, Artificial Sequence
  ENSG00000197157_7 (sequence is synthesized)
gtcatgctgtcaggcatcaagtgcccaacttttcgacgggaagcagatggcagtgaaactccagagccttttgctgcagaagccaaatttttcactgagtcgcgactgcttcagagagat

SEQ ID NO: 714147 - DNA, 120 bp, Artificial Sequence
  ENSG00000197157_8 (sequence is synthesized)
gttcagatcattctggagagctgccacaaccagaacattctgggtaccatccttcatccaaatggcaacatcacagagctcctcctgaaggaaggtttcgcacgctgtgtggactggtcg

SEQ ID NO: 714148 - DNA, 120 bp, Artificial Sequence
  ENSG00000197157_9 (sequence is synthesized)
attgcagtttacacccggggcgcagaaaagctgagggcggcagagaggtttgccaaagagcgcaggctgagaatatggagagactatgtggctcccacagctaatttggaccaaaaggac

SEQ ID NO: 714149 - DNA, 120 bp, Artificial Sequence
  ENSG00000197157_10 (sequence is synthesized)
aagcagtttgttgccaaggtgatgcaggttctgaatgctgatgccattgttgtgaagctgaactcaggcgattacaagacgattcacctgtccagcatccgaccaccgaggctggagggg

SEQ ID NO: 714150 - DNA, 120 bp, Artificial Sequence
  ENSG00000197157_11 (sequence is synthesized)
gagaacacccaggataagaacaagaaactgcgtcccctgtatgacattccttacatgtttgaggcccgggaatttcttcgaaaaaagcttattgggaagaaggtcaatgtgacggtggac

SEQ ID NO: 714151 - DNA, 120 bp, Artificial Sequence
  ENSG00000197157_12 (sequence is synthesized)
tacattagaccagccagcccagccacagagacagtgcctgccttttcagagcgtacctgtgccactgtcaccattggaggaataaacattgctgaggctcttgtcagcaaaggtctagcc

SEQ ID NO: 714152 - DNA, 120 bp, Artificial Sequence
  ENSG00000197157_13 (sequence is synthesized)
acagtgatcagataccggcaggatgatgaccagagatcatcacactacgatgaactgcttgctgcagaggccagagctattaagaatggcaaaggattgcatagcaagaaggaagtgcct

SEQ ID NO: 714153 - DNA, 120 bp, Artificial Sequence
  ENSG00000197157_14 (sequence is synthesized)
tggtggaatacgtcttcagtggttctcgtctcaaactctatttgccaaaggaaacttgccttatcaccttcttgcttgcaggcattgaatgccccagaggagcccgaaacctcccaggct

SEQ ID NO: 714154 - DNA, 120 bp, Artificial Sequence
  ENSG00000197157_15 (sequence is synthesized)
tggtgcaggaaggagagcccttcagcgaggaagctacacttttcaccaaggaactggtgctgcagcgagaggtggaggtggaggtggagagcatggacaaggccggcaactttatcggct

SEQ ID NO: 714155 - DNA, 120 bp, Artificial Sequence
  ENSG00000197157_16 (sequence is synthesized)
ggctgcacatcgacggtgccaacctgtccgtcctgctggtggagcacgcgctctccaaggtccacttcaccgccgaacgcagctcctactacaagtccctgctgtctgccgaggaggccg

SEQ ID NO: 714156 - DNA, 120 bp, Artificial Sequence
  ENSG00000197157_17 (sequence is synthesized)
caaagcagaagaaagagaaggtctgggcccactatgaggagcagcccgtggaggaggtgatgccagtgctggaggagaaggagcgatctgctagctacaagcccgtgtttgtgactgaga

SEQ ID NO: 714157 - DNA, 120 bp, Artificial Sequence
  ENSG00000197157_18 (sequence is synthesized)
tcactgatgacctgcacttctacgtgcaggatgtggagaccggcacccagttggagaagctgatggagaacatgcgcaatgacattgccagtcacccccctgtagagggctcctatgccc

SEQ ID NO: 714158 - DNA, 120 bp, Artificial Sequence
  ENSG00000197157_19 (sequence is synthesized)
cccgcaggggagagttctgcattgccaaatttgtagatggagaatggtaccgtgcccgagtagagaaagtcgagtctcctgccaaaatacatgtcttctacattgactacggcaacagag

SEQ ID NO: 714159 - DNA, 120 bp, Artificial Sequence
  ENSG00000197157_20 (sequence is synthesized)
aggtcctgccatccacccgcctgggtaccctatcacctgccttcagcactcgggtgctgccagctcaagccacggagtatgccttcgccttcatccaggtgccccaagatgatgatgccc

SEQ ID NO: 714160 - DNA, 120 bp, Artificial Sequence
  ENSG00000197157_21 (sequence is synthesized)
gcacggacgccgtggacagcgtagttcgggatatccagaacactcagtgcctgctcaacgtggaacacctgagtgccggctgcccccatgtcaccctgcagtttgcagattccaagggcg

SEQ ID NO: 714161 - DNA, 120 bp, Artificial Sequence
  ENSG00000197157_22 (sequence is synthesized)
atgtggggctgggcttggtgaaggaagggctggtcatggtggaggtgcgcaaggagaaacagttccagaaagtgatcacagaatacctgaatgcccaagagtcagccaagagcgccaggc

SEQ ID NO: 714162 - DNA, 120 bp, Artificial Sequence
  ENSG00000197157_23 (sequence is synthesized)
tgaacctgtggcgctatggagactttcgagctgatgatgcagacgaatttggctacagccgctaaggaggggatcgggtttggcccccagccccgctcacgccagtccctcttcctctgc

SEQ ID NO: 714163 - DNA, 120 bp, Artificial Sequence
  ENSG00000197157_24 (sequence is synthesized)
cgggagggtgttttcaactccaaaccccagagaggggttgtagattgggtccagctttgcttcagtgtgtggaaatgtctcgtggggtggcatcggggctgcggggtggggaccccaagg

SEQ ID NO: 714164 - DNA, 120 bp, Artificial Sequence
  ENSG00000197157_25 (sequence is synthesized)
ctttctggggcagacccttgtcctctgggatgatgggcactgctatccacagtctctgccagttggttttatttggaggtttgtgggctttttttaaaaaaaaaaagtcctcaaatcagg

SEQ ID NO: 714165 - DNA, 120 bp, Artificial Sequence
  ENSG00000197157_26 (sequence is synthesized)
aagaaacatcaaagactatgtcctagtggagggagtaatcctaacacccaggctggccgccagctggcacctgcctctatcccagactgccctcgtcccagctctctgtccaactgttga

SEQ ID NO: 714166 - DNA, 120 bp, Artificial Sequence
  ENSG00000197157_27 (sequence is synthesized)
ttatgtgatttttctgatacgtccattctcaaatgccagtgtgttcacatcttcgctctggccagcccattctgtatttaaagcttttgaggcccaataaaatagtacgtgctgtctgca

SEQ ID NO: 714167 - DNA, 120 bp, Artificial Sequence
  ENSG00000197157_28 (sequence is synthesized)
tttacatgaacaatgcaaatgtgaagagatttgaaggggagggatgagaagacagggagctggcaaataaatgaagccctgttcgctcttaaatcactttgaatggcattgaatgcccca

SEQ ID NO: 714168 - DNA, 120 bp, Artificial Sequence
  ENSG00000197157_29 (sequence is synthesized)
gaggagcccgaaacctcccaggcttggtgcaggaaggagagcccttcagcgaggaagctacacttttcaccaaggaactggtgctgcagcgagagtgcctcccagacaacagcctcatca

SEQ ID NO: 714169 - DNA, 120 bp, Artificial Sequence
  ENSG00000197157_30 (sequence is synthesized)
gcatttaaaatgtttcatgtgattaaacacggaaagaaatgttattacttctgtttcttaggcctgtgctcctctaactgattcttcttttgtgcctggaacaatgcctttaatttgaaa

SEQ ID NO: 714170 - DNA, 120 bp, Artificial Sequence
  ENSG00000197157_31 (sequence is synthesized)
agacttctccatcagatagtcctctgcctggctgtcctttgtgtggacacatgggtaacactggcctcacttccataagggttctgtcccagagcactctcttgccctcagaggagtgat

SEQ ID NO: 714171 - DNA, 120 bp, Artificial Sequence
  ENSG00000197157_32 (sequence is synthesized)
ggcattgaatgccccagaggagcccgaaacctcccaggcttggtgcaggaaggagagcccttcagcgaggaagctacacttttcaccaaggaactggtgctgcagcgagagctcctgtgt

SEQ ID NO: 714172 - DNA, 120 bp, Artificial Sequence
  ENSG00000197157_33 (sequence is synthesized)
ctgttgtctgattcctgcttcatctgctgtttgatttttgtgggccttacttttcccatttgctcatgtatgtctatattcctatatctaatgtttcttaaaagacaaatctgactgtgt

SEQ ID NO: 714173 - DNA, 120 bp, Artificial Sequence
  ENSG00000197157_34 (sequence is synthesized)
tcgtaattcgtgccttatcagaatggacctgttatactggcagttcaccatatataccattacattttgtttctcccatctctcaggtagacttacactttcggcccagcacatcagtca

SEQ ID NO: 714174 - DNA, 120 bp, Artificial Sequence
  ENSG00000197157_35 (sequence is synthesized)
tcgcccttgcttgctttcctattcactcctgttctggaaggtgcaccaccttttcttggaaggcttcccttgctctcccaggctagatgagatgtccttccatcagttcccacagcaccc

SEQ ID NO: 714175 - DNA, 120 bp, Artificial Sequence
  ENSG00000197157_36 (sequence is synthesized)
tgtgcatgtatctgttgtgcacttaccaatagtatacaagggatctatgacccaagtctctccccactagcttgtaagctcctcacagacaggaaccatgttttgtctttgtactccagt

SEQ ID NO: 714176 - DNA, 120 bp, Artificial Sequence
  ENSG00000197157_37 (sequence is synthesized)
agcctgtggacctaggtaatagcccactgtcttctgtcgctgatgccattttgatgtactctttctttgtattttgagtatttttatatcatagaactgctgattctggatgtgcccaca

SEQ ID NO: 714177 - DNA, 120 bp, Artificial Sequence
  ENSG00000197157_38 (sequence is synthesized)
agcagcttgtatctgttgtttatatgtttactacctttagtggcagttgaagtcttagagctttttcttgtaccttttcccatagacttagatttgttgtgttttcactactacttttct

SEQ ID NO: 714178 - DNA, 120 bp, Artificial Sequence
  ENSG00000197157_39 (sequence is synthesized)
tggaatagtttaggaacatttcctgggtagccttaagcatttgaaatcaccattggttatggcagagctcttttattaatttatttttgaattcttcattcatttacattgttcagaatg

SEQ ID NO: 714179 - DNA, 120 bp, Artificial Sequence
  ENSG00000197157_40 (sequence is synthesized)
gacttgtgtagtcatacatccccactttaacaaccctcgcttctctcttcatttttgcaccctcctaccccttcccattgtgattcttgttttaatcggtttttctcttcttccttaaca

SEQ ID NO: 714180 - DNA, 120 bp, Artificial Sequence
  ENSG00000197157_41 (sequence is synthesized)
atgtgactgagttctgagagtcgaaatgtccatgatttggcactctggaggatagagcacacagactttgtgttgatgcaccaaaaaaggatacccaaaaagcaaagcagttcctgcctt

SEQ ID NO: 714181 - DNA, 120 bp, Artificial Sequence
  ENSG00000197157_42 (sequence is synthesized)
atcatggacccttcagctcaatgactttcctggttctcctttctgtgtgacacacaggatgctcgctatattgtttctgagaaaaagcttgtattgcttctggccattttcatccttttt

SEQ ID NO: 714182 - DNA, 120 bp, Artificial Sequence
  ENSG00000197157_43 (sequence is synthesized)
agagctcctggggatccctccccaagaggagaccatcttgggatcccagataacactgagcaacttacgccctgtccttcctgccctggcttctggcagtcagcctccatgagccagtca

SEQ ID NO: 714183 - DNA, 120 bp, Artificial Sequence
  ENSG00000197157_44 (sequence is synthesized)
tggcagagtgcacagttcctgaagaggaggtttctaatcagggagatgctgagcagcagagagagtctgctgctggggcctaaaatttacagctctaagaattcattgctgccgttgctg

SEQ ID NO: 714184 - DNA, 120 bp, Artificial Sequence
  ENSG00000197157_45 (sequence is synthesized)
gtcctgccagacaagggtgaacccagatgcctgggccagaaccacaggcaggcccggtgaccacagggatacttgtcttggtgtgctcccctagccagcagctggagaaccccctggcct

SEQ ID NO: 714185 - DNA, 120 bp, Artificial Sequence
  ENSG00000197157_46 (sequence is synthesized)
gtgggaacgtagtcagggaacccatgtcacagacagaagggcattgggaggaaatggaaaagcgattagagtccagttatactgcgattgttttcatgggaaccactaggtgtgccagca

SEQ ID NO: 714186 - DNA, 120 bp, Artificial Sequence
  ENSG00000197157_47 (sequence is synthesized)
ccaggcccagagtgagctccccatctactgctggaccagcagggcacgttctctccaggcttcacccactggggagcctttgtacattgcaaagtggaaccaagtcatgggatgaacagg

SEQ ID NO: 714187 - DNA, 120 bp, Artificial Sequence
  ENSG00000197162_0 (sequence is synthesized)
acggacttgtctgaggaaagacaggaaagcgccagcatctccaccttccccggaagcctccctttgccaggcagaaagggtttcccatggggccgcccctggcgccgcgcccggcccacg

SEQ ID NO: 714188 - DNA, 120 bp, Artificial Sequence
  ENSG00000197162_1 (sequence is synthesized)
tacccggggaggccgggccccggaggacgagggaaagcaggccgggcgccgtgagcttcgcggacgtggccgtgtacttctctcccgaggagtgggaatgcctgcggccagcgcagaggg

SEQ ID NO: 714189 - DNA, 120 bp, Artificial Sequence
  ENSG00000197162_2 (sequence is synthesized)
ccctgtaccgggacgtgatgcgggagaccttcggccacctgggcgcgctgggattttcagttcccaaacccgcttttatctcgtgggtggaaggagaagtggaggcgtggagcccggagg

SEQ ID NO: 714190 - DNA, 120 bp, Artificial Sequence
  ENSG00000197162_3 (sequence is synthesized)
cccaggatcccgacggtgagagctctgcagctttcagcaggggccaaggacaggaagcaggatccagggatgggaatgaggagaaggaaaggctgaagaagtgtccaaaacaaaaagagg

SEQ ID NO: 714191 - DNA, 120 bp, Artificial Sequence
  ENSG00000197162_4 (sequence is synthesized)
tggcgcatgaagtggctgtcaaggagtggtggcccagcgtcgcctgcccagagttctgcaaccctaggcagagccccatgaatccctggctcaaggacactctgacccgaagactgcccc

SEQ ID NO: 714192 - DNA, 120 bp, Artificial Sequence
  ENSG00000197162_5 (sequence is synthesized)
actcttgcccagactgtggccgcaacttcagctacccttccctcctggccagccaccagcgggtccactccggggagcggcccttctcctgcggccagtgtcaggcgcgtttctcccagc

SEQ ID NO: 714193 - DNA, 120 bp, Artificial Sequence
  ENSG00000197162_6 (sequence is synthesized)
gcaggtacctgctccagcatcagttcatccacaccggcgagaagccctacccctgccccgactgcgggcgccgcttccgccagaggggttccctggctatccacaggcgggctcacaccg

SEQ ID NO: 714194 - DNA, 120 bp, Artificial Sequence
  ENSG00000197162_7 (sequence is synthesized)
gggagaagccttacgcgtgctcagactgcaagagtcgcttcacttacccctacctgctggccatccaccagcgcaagcacacgggcgagaagccctacagctgccccgattgcagcctcc

SEQ ID NO: 714195 - DNA, 120 bp, Artificial Sequence
  ENSG00000197162_8 (sequence is synthesized)
gtttcgcctacacctccctgctggccatccacaggcgcatacacaccggcgagaagccctacccctgtcctgactgcggccgccgcttcacctattcttccctcctcctcagtcaccggc

SEQ ID NO: 714196 - DNA, 120 bp, Artificial Sequence
  ENSG00000197162_9 (sequence is synthesized)
gcattcactccgacagccggcccttcccctgcgtggagtgtgggaaaggcttcaagcgcaagaccgccctggaagcccatcggtggatccaccgctcctgcagcgagaggcgcgcgtggc

SEQ ID NO: 714197 - DNA, 120 bp, Artificial Sequence
  ENSG00000197162_10 (sequence is synthesized)
agcaggccgtggtggggcgttcagagcccatccctgttttgggaggcaaggatcccccagttcacttccggcactttccagatatatttcaagagtgtgggtgatggcgttcacacaaac

SEQ ID NO: 714198 - DNA, 120 bp, Artificial Sequence
  ENSG00000197162_11 (sequence is synthesized)
tggtcagcgtttccctggagaggaagaggcaaggtttgtgtatttgggggataaggaaaggaagtgggcgtttgaggaaaacaaagttctgccttaggtaaaaagcagaggtaggggcac

SEQ ID NO: 714199 - DNA, 120 bp, Artificial Sequence
  ENSG00000197162_12 (sequence is synthesized)
agagggctgtggggaggaggcaggaatctgaaaaggtgcctgggggttgaccccattttctgaagctccagcacacagggccccgtgttcacgtcccatccttcactgaaaaccattcac

SEQ ID NO: 714200 - DNA, 120 bp, Artificial Sequence
  ENSG00000197162_13 (sequence is synthesized)
ccctacattccagtgcctattaaaggagcctgcacccactctggaccccccagaatagaggggatacctcaggcctgtccctcggctggtggggggggcggagctcatcccaggattctt

SEQ ID NO: 714201 - DNA, 62 bp, Artificial Sequence
  ENSG00000197162_14 (sequence is synthesized)
ctcggctggtggggggggcggagctcatcccaggattcttttcttttttttgagatggagtc

SEQ ID NO: 714202 - DNA, 72 bp, Artificial Sequence
  ENSG00000197162_15 (sequence is synthesized)
cattctctgcctcagccttcccactgttagtagagacggggttccaccatcttggccaggctggtcttgaat

SEQ ID NO: 714203 - DNA, 120 bp, Artificial Sequence
  ENSG00000197162_16 (sequence is synthesized)
ctgggattacaagcgtgagccaccgacccctgccgaggattctgccttttaccaatgcaggtgaaacatctggcaaggagacacctggagtgtaggtgttccttggtcttgaagacctag

SEQ ID NO: 714204 - DNA, 120 bp, Artificial Sequence
  ENSG00000197162_17 (sequence is synthesized)
ggtcttgaagacctagaggtggccatagagaggacagtggcctcaggtggggaactccccccccactctcattctgcaagtgcacaaactatcaaacatagcggactctggaactgggcc

SEQ ID NO: 714205 - DNA, 120 bp, Artificial Sequence
  ENSG00000197162_18 (sequence is synthesized)
aactcttcactgtatgcattagtgattgcagtgtttttttcttcttcagatatttgcatgttccctggattttgtattttttgataaagatatattcttgggccacagtagctggagata

SEQ ID NO: 714206 - DNA, 84 bp, Artificial Sequence
  ENSG00000197162_19 (sequence is synthesized)
gatataatgccggaggatctctattgcctgggctggagtgcagtggcccaagctacgctcactgcaagctccacctcctgggtt

SEQ ID NO: 714207 - DNA, 120 bp, Artificial Sequence
  ENSG00000197162_20 (sequence is synthesized)
gaaagaataaattaattgtgattaaagttgaaatcaaggcatagtctttccagtctaatttttactgtaatgcttgtatgtcaacagttatgaaggccaggcgcggtggctcacgcctgt

SEQ ID NO: 714208 - DNA, 120 bp, Artificial Sequence
  ENSG00000197162_21 (sequence is synthesized)
aaagaggtaggtgggactaagcatttctgcattccaggactggtggtcagtgactcaaatatctctttgaaaagactgcttctttgaatccttgggttccaagataattaatgggaactg

SEQ ID NO: 714209 - DNA, 120 bp, Artificial Sequence
  ENSG00000197162_22 (sequence is synthesized)
tccttgggttccaagataattaatgggaactggtgccgggcacggtggctcacacctgtgatcccagcactgtgggaggctgaggctggttaatcacttgaggtcaggagtttgagacca

SEQ ID NO: 714210 - DNA, 120 bp, Artificial Sequence
  ENSG00000197162_23 (sequence is synthesized)
agctactcaggaggctaaggcaagaggatcacttgagcctgggagacagaggttgcagtaagctgagatggctccattgcactccagcctgggctacaaagcaggactctgtctcaaaac

SEQ ID NO: 714211 - DNA, 120 bp, Artificial Sequence
  ENSG00000197162_24 (sequence is synthesized)
actccagcctgggctacaaagcaggactctgtctcaaaacaaaaacagatacaaaaactgggaacggggtgttatctttacttcaccacatagcctctcctgaattggtggacctggatt

SEQ ID NO: 714212 - DNA, 120 bp, Artificial Sequence
  ENSG00000197162_25 (sequence is synthesized)
cctagcttggctcagtccccactggctgtgtggcctttagcatcacctagattctacaaataacatttttctctatttgttttacacatgtcaatctgcctatccatccctctatccatt

SEQ ID NO: 714213 - DNA, 120 bp, Artificial Sequence
  ENSG00000197162_26 (sequence is synthesized)
catttatccattttattaatgtatttcaaagtaagttgcagacatcattacatttcacttctaaacacttcagcatacagctgagttttatgcaagaaacttaagctctcagctgggtac

SEQ ID NO: 714214 - DNA, 120 bp, Artificial Sequence
  ENSG00000197162_27 (sequence is synthesized)
ttgggaggctgaggcaggaggattgcatgagattgggagtttgagacgagcctggaaaacagcaagacctcatttctactaaaaattttaaaaattagccgagcatggtgggggagggtg

SEQ ID NO: 714215 - DNA, 120 bp, Artificial Sequence
  ENSG00000197162_28 (sequence is synthesized)
ggatagcttgagcccaggagtttgaggctatagtgagctatgatggcgccacttcagtctgagtaacagcaagacactattaaaaaaaaaaaagagccaggcgcagtggctcacacctgt

SEQ ID NO: 714216 - DNA, 120 bp, Artificial Sequence
  ENSG00000197162_29 (sequence is synthesized)
cagcctgggcaacaagagtggaactctgtttcaaaaaagaaagaaagaaattcagctcccacttaaagttcagttgtactctgttattgacaagtaaagtcgattgaagcccagtcatct

SEQ ID NO: 714217 - DNA, 120 bp, Artificial Sequence
  ENSG00000197162_30 (sequence is synthesized)
agtaaagtcgattgaagcccagtcatctcctgtatgttgtgtgacttctcataattatctgatcaagagtcttgaagaaacatttacaatttgatgggcaataaaataatttgaaagcaa

SEQ ID NO: 714218 - DNA, 120 bp, Artificial Sequence
  ENSG00000197162_31 (sequence is synthesized)
tctcccgaggagtgggaatgcctgcggccagcgcagagggccctgtaccgggacgtgatgcgggagaccttcggccacctgggcgcgctgggtgaggccgggccctccggccgggacccc

SEQ ID NO: 714219 - DNA, 120 bp, Artificial Sequence
  ENSG00000197162_32 (sequence is synthesized)
cagaactcaaggtaataatgtaagcatattaataatatttaattattaacaattaataattaatcaattaataacatatgcatatgagatcagcaggagtcacactaaaagccaaaaagc

SEQ ID NO: 714220 - DNA, 120 bp, Artificial Sequence
  ENSG00000197165_0 (sequence is synthesized)
acactcagccactgcgggcgaggagggcacaaggccaggttcccaagagctcaggaacatggagctgatccaggacatctctcgcccgccactggagtacgtgaagggggtcccgctcat

SEQ ID NO: 714221 - DNA, 120 bp, Artificial Sequence
  ENSG00000197165_1 (sequence is synthesized)
caagtactttgcagaggcactggggcccctgcagagcttccaggcccggcctgatgacctgctcatcagcacctaccccaagtccggcaccacctgggtgagccagattctggacatgat

SEQ ID NO: 714222 - DNA, 120 bp, Artificial Sequence
  ENSG00000197165_2 (sequence is synthesized)
ctaccagggcggtgacctggaaaagtgtcaccgagctcccatcttcatgcgggtgcccttccttgagttcaaagtcccagggattccctcagggatggagactctgaaaaacacaccagc

SEQ ID NO: 714223 - DNA, 120 bp, Artificial Sequence
  ENSG00000197165_3 (sequence is synthesized)
cccacgactcctgaagacacacctgcccctggctctgctcccccagactctgttggatcagaaggtcaaggtggtctatgttgcccgcaacgcaaaggatgtggcggtttcctactacca

SEQ ID NO: 714224 - DNA, 120 bp, Artificial Sequence
  ENSG00000197165_4 (sequence is synthesized)
gagaagtgtcctatgggtcctggtaccagcacgtgcaagagtggtgggagctgagccgcacccaccctgttctctacctcttctatgaagacatgaaggagaaccccaaaagggagattc

SEQ ID NO: 714225 - DNA, 120 bp, Artificial Sequence
  ENSG00000197165_5 (sequence is synthesized)
aaaagatcctggagtttgtggggcgctccctgccagaggagactgtggacctcatggttgagcacacgtcgttcaaggagatgaagaagaaccctatgaccaactacaccaccgtccgcc

SEQ ID NO: 714226 - DNA, 120 bp, Artificial Sequence
  ENSG00000197165_6 (sequence is synthesized)
gggagttcatggaccacagcatctcccccttcatgaggaaaggcatggctggggactggaagaccaccttcaccgtggcgcagaatgagcgcttcgatgcggactatgcgaagaagatgg

SEQ ID NO: 714227 - DNA, 120 bp, Artificial Sequence
  ENSG00000197165_7 (sequence is synthesized)
caggctgcagcctcagcttccgctctgagctgtgagaggggttcctggagtcactgcagagggagtgtgcgaatcaagcctgaccaagaggctccagaataaagtatgatttgtgttcaa

SEQ ID NO: 714228 - DNA, 120 bp, Artificial Sequence
  ENSG00000197165_8 (sequence is synthesized)
gtttgtcctggagcccagatggactgtggccgggcaagtggatcacaggcctggccagcctaggagttgccacatgtgaggggccgaggggctcaaggaggggaacatcggggagaggag

SEQ ID NO: 714229 - DNA, 120 bp, Artificial Sequence
  ENSG00000197165_9 (sequence is synthesized)
cctactgggtggaggctgggggtcccagcaggaaatggtgagacaaagggcgctggctggcaggaagacagcacaggaaggtcctagaggttcctcagtgcagctggactctcctggaga

SEQ ID NO: 714230 - DNA, 120 bp, Artificial Sequence
  ENSG00000197165_10 (sequence is synthesized)
ccttcacacaccctgacatctgggccccgcgccacgagggtgctttcactggtctgcaccatggcccaggccctgggattttgaacagctccgcaggtgaatgaaaggaacatggagctg

SEQ ID NO: 714231 - DNA, 120 bp, Artificial Sequence
  ENSG00000197165_11 (sequence is synthesized)
ctcagccactgcgggcgaggagggcacaaggccaggttcccaagagctcaggtgagtgacacaccggaatggcccaggacgccctcaccctgctcagcttgtggctccaacattccagaa

SEQ ID NO: 714232 - DNA, 120 bp, Artificial Sequence
  ENSG00000197165_12 (sequence is synthesized)
gccgaggcctctgctatccctgccctctccccatggatatcccatttcagacaaccccggccggcctgaatccccctcccttccttttttttttttccggggaggccaggtcttgctgtc

SEQ ID NO: 714233 - DNA, 90 bp, Artificial Sequence
  ENSG00000197165_13 (sequence is synthesized)
ttgaattagctaggactacagaccctcaccatcctgcctggatagttttaaaaaatatttttaaaagatttttagagatggggtcttcca

SEQ ID NO: 714234 - DNA, 120 bp, Artificial Sequence
  ENSG00000197165_14 (sequence is synthesized)
aaaaatatttttaaaagatttttagagatggggtcttccaatgctgcccagattggtctccaaattctggcctcagcctccctagggtctgggattacaggtgggagccaccctgcccag

SEQ ID NO: 714235 - DNA, 120 bp, Artificial Sequence
  ENSG00000197165_15 (sequence is synthesized)
acttccctgaaagcaagaattccactttcttgctgttgtgatggtggtaagggaacgggcctggctctggcccctgacgcaggaacatggagctgatccaggacatctctcgcccgccac

SEQ ID NO: 714236 - DNA, 120 bp, Artificial Sequence
  ENSG00000197168_0 (sequence is synthesized)
cccggatccttccgggacgcttcgttggccccgcggagccggcggagcagttatctgtggccacaaagaaagttatttgtctctgtcttggcaaggctgggaggaaagttttagctaaga

SEQ ID NO: 714237 - DNA, 120 bp, Artificial Sequence
  ENSG00000197168_1 (sequence is synthesized)
aactcagcccattggagaccatggataagtacgatgtgattaaggccatcgggcaaggtgccttcgggaaagcatacttagctaaagggaaatcagatagcaagcactgtgtcataaaag

SEQ ID NO: 714238 - DNA, 120 bp, Artificial Sequence
  ENSG00000197168_2 (sequence is synthesized)
agatcaattttgaaaagatgcccatacaagaaaaagaagcttcaaagaaagaagtgattcttctggaaaagatgaaacatcccaacattgtagccttcttcaattcatttcaagagaatg

SEQ ID NO: 714239 - DNA, 120 bp, Artificial Sequence
  ENSG00000197168_3 (sequence is synthesized)
gcaggctgtttattgtaatggaatattgtgatggaggggatctcatgaaaaggatcaatagacaacggggtgtgttatttagtgaagatcagatcctcggttggtttgtacagatttctc

SEQ ID NO: 714240 - DNA, 120 bp, Artificial Sequence
  ENSG00000197168_4 (sequence is synthesized)
taggactaaaacatattcatgacaggaagatattacacagggacataaaagctcagaacatttttcttagcaagaacggaatggtggcaaagcttggggactttggtatagcaagagtcc

SEQ ID NO: 714241 - DNA, 120 bp, Artificial Sequence
  ENSG00000197168_5 (sequence is synthesized)
tgaataattccatggaacttgctcgaacttgtattggaacaccttactacctgtccccagagatctgtcagaataaaccctacaacaataaaacggatatttggtctcttggctgtgtct

SEQ ID NO: 714242 - DNA, 120 bp, Artificial Sequence
  ENSG00000197168_6 (sequence is synthesized)
tatatgagctctgcacacttaaacatccttttgagggtaacaacttacagcagctggttctgaagatttgtcaagcacattttgccccaatatctccggggttttctcgtgagctccatt

SEQ ID NO: 714243 - DNA, 120 bp, Artificial Sequence
  ENSG00000197168_7 (sequence is synthesized)
ccttgatatctcagctctttcaagtatctcctcgagaccgaccatccataaattccattttgaaaaggccctttttagagaatcttattcccaaatatttgactcctgaggtcattcagg

SEQ ID NO: 714244 - DNA, 120 bp, Artificial Sequence
  ENSG00000197168_8 (sequence is synthesized)
aagaattcagtcacatgcttatatgcagagcaggagcgccagcttctcgacatgctgggaaggtggtccagaagtgtaaaatacaaaaagtgagattccagggaaagtgcccaccaagat

SEQ ID NO: 714245 - DNA, 120 bp, Artificial Sequence
  ENSG00000197168_9 (sequence is synthesized)
caaggatatctgtgccaattaaaaggaatgctatattgcatagaaatgaatggagaccaccagctggagcccagaaggccagatctataaaaatgatagaaagacccaaaattgctgctg

SEQ ID NO: 714246 - DNA, 120 bp, Artificial Sequence
  ENSG00000197168_10 (sequence is synthesized)
tctgtggacattatgattattattatgctcaacttgatatgctgaggaggagagcccacaaaccaagttatcaccctattcctcaagaaaatactggagttgaggattacggtcaggaaa

SEQ ID NO: 714247 - DNA, 120 bp, Artificial Sequence
  ENSG00000197168_11 (sequence is synthesized)
cgaggcatggtccatccccaagtcaatggcctgctgagtaccttcagagaaaatttgaagctcaacaatataagttgaaagtggagaagcaattgggtcttcgtccatcttctgccgagc

SEQ ID NO: 714248 - DNA, 120 bp, Artificial Sequence
  ENSG00000197168_12 (sequence is synthesized)
gaagagcctagattccaggagctgccatttaggaaaaacgaaatgaaggaacaggaatattggaagcagttagaggaaatacgccaacagtaccacaatgacatgaaagaaattagaaag

SEQ ID NO: 714249 - DNA, 120 bp, Artificial Sequence
  ENSG00000197168_13 (sequence is synthesized)
aagatggggagagaaccagaggagaactcaaaaataagtcataaaacctatttggtgaagaagagtaacctgcctgtccatcaagatgcatctgagggagaagcacctgtgcagatggaa

SEQ ID NO: 714250 - DNA, 90 bp, Artificial Sequence
  ENSG00000197168_14 (sequence is synthesized)
acattgaaaaagacttgaaacaaatgaggcttcagaacacaaaggaaagtaaaaatccagaacagaaatataaagctaagaagggggtaa

SEQ ID NO: 714251 - DNA, 120 bp, Artificial Sequence
  ENSG00000197168_15 (sequence is synthesized)
aaaaatccagaacagaaatataaagctaagaagggggtaaaatttgaaattaatttagacaaatgtatttctgatgaaaacatcctccaagaggaagaggcaatggatataccaaatgaa

SEQ ID NO: 714252 - DNA, 120 bp, Artificial Sequence
  ENSG00000197168_16 (sequence is synthesized)
actttgacctttgaggatggcatgaagtttaaggaatatgaatgtgtaaaggagcatggagattatacagacaaagcatttgaaaaacttcactgcccagaagcagggttttccacgcag

SEQ ID NO: 714253 - DNA, 120 bp, Artificial Sequence
  ENSG00000197168_17 (sequence is synthesized)
actgtagctgctgtgggaaacaggaggcagtgggatggaggagcgcctcagactctgctgcagatgatggcagtggccgacatcacctccacctgccccacggggcctgacagtgagtct

SEQ ID NO: 714254 - DNA, 120 bp, Artificial Sequence
  ENSG00000197168_18 (sequence is synthesized)
gtgcttagcgtcagtcgtcaggaagggaagaccaaggacccgtacagcccagtgctcatcctgatgtgatagtctacttctcactatacaccctatagatcttgtatcagacactttcaa

SEQ ID NO: 714255 - DNA, 120 bp, Artificial Sequence
  ENSG00000197168_19 (sequence is synthesized)
atatgttgttttgatatctccctatgcctaaagagacttgcctgctaattatcctggacaaatgaccactctagacatgcacatataaaggaggaaaaatccaggatgccaccttcctca

SEQ ID NO: 714256 - DNA, 120 bp, Artificial Sequence
  ENSG00000197168_20 (sequence is synthesized)
ctcagagtgagggaaaatgcgtgaggaaggacagctgacttgatttaccttccaaggccagctcaacaactttttttgcgatttcatagggtcatttttttttttttaatttttattttt

SEQ ID NO: 714257 - DNA, 60 bp, Artificial Sequence
  ENSG00000197168_21 (sequence is synthesized)
acatcttgcactgcccttaatccattcatagcaggatcccaaggcagaagaatttttctt

SEQ ID NO: 714258 - DNA, 120 bp, Artificial Sequence
  ENSG00000197168_22 (sequence is synthesized)
cagtggcggcatgaagctccaggaactttaatgagtgttttggcagcagcacatctaacgagtagctcattttctgccgatgaagaatttgcaatgggaacattaaaacaatggctaccc

SEQ ID NO: 714259 - DNA, 120 bp, Artificial Sequence
  ENSG00000197168_23 (sequence is synthesized)
aaagaagaagatgaagggaaggtagaaatggtctctggcattgaagtagatgaggaacaactagaaccaagatctgatgatgatgatacaaattttgaagaatctgaagatgagttgaga

SEQ ID NO: 714260 - DNA, 120 bp, Artificial Sequence
  ENSG00000197168_24 (sequence is synthesized)
gatgaagtagtagaatacttagaaaaactcgctactttcaaaggggaagaaaaaacagaagaggcctccagtacctctaaggactctagaaagtcaagagaaagagaggggataagtatg

SEQ ID NO: 714261 - DNA, 120 bp, Artificial Sequence
  ENSG00000197168_25 (sequence is synthesized)
cagaaatctgaagaattaagggagggcttggagaatatttctactacatctaatgaccacatttgtattactgatgaagaccaaggaacatcaacaaccagtcaaaatatacaagtgtga

SEQ ID NO: 714262 - DNA, 120 bp, Artificial Sequence
  ENSG00000197168_26 (sequence is synthesized)
atgactcttcccctcatcagctatgtgacaagaagtcactaaacttttctatatctcggcttctttattaataaaatgagaggtgggattaggttacctccaaggttttaacattctttg

SEQ ID NO: 714263 - DNA, 120 bp, Artificial Sequence
  ENSG00000197168_27 (sequence is synthesized)
aagtaataagttagtgtctattacctatagtatttatttgggtacaagtcataaatgctcatttactgtaagggttttctagtaatctcaaggatttattaatttttctttcaatttagg

SEQ ID NO: 714264 - DNA, 120 bp, Artificial Sequence
  ENSG00000197168_28 (sequence is synthesized)
tttctttcaatttaggaagtagaacttttgaatatagccattaatatttttactttaaagtttctattaagaaatcttaggccgggcagtctcatcactttgggaggccaaggcaggcag

SEQ ID NO: 714265 - DNA, 120 bp, Artificial Sequence
  ENSG00000197168_29 (sequence is synthesized)
tatatgtggtaggcagagtaatgtggctcaatgccccctccaaaacatgtcccatcctaatccccacagtttgcaaatatggcaaaggagaattaaggttgcaggtgaaattgtttgctt

SEQ ID NO: 714266 - DNA, 120 bp, Artificial Sequence
  ENSG00000197168_30 (sequence is synthesized)
atcagctgaccttaaaatagggaggttatcttggtttatccacctgggtgcagtgtaatcacaagggtccttacaagtggaagaggaagacaaaagagaaaaccagagagatcgcagcat

SEQ ID NO: 714267 - DNA, 120 bp, Artificial Sequence
  ENSG00000197168_31 (sequence is synthesized)
gaaaaggactcagcctgatgttgctggctttgaagatgttggacaaggccacaaactaagaattcagacagcctctggaatctggaaaaggcaaagaaatggattcttccctagagcctc

SEQ ID NO: 714268 - DNA, 120 bp, Artificial Sequence
  ENSG00000197168_32 (sequence is synthesized)
cagaaggaacacagccctgccaacaacttaattttagcctagtgagttcaatttcatacttctgacttgcagaactgttaagataataaatttgtgttaactaagtttgtgataatttgt

SEQ ID NO: 714269 - DNA, 120 bp, Artificial Sequence
  ENSG00000197168_33 (sequence is synthesized)
taggacagcaatagaaaacaaatacaatatacaggttcactcatttaacataatctgccgttttacaaaactgtgattttgaagtttcttgttgcattgaatacacttttttgaagctga

SEQ ID NO: 714270 - DNA, 120 bp, Artificial Sequence
  ENSG00000197168_34 (sequence is synthesized)
tgttgacacaggaataaggcaattgagcaagaacaacaaggcatggtgtgttaattatgcactaaatgaccatggccattttgtctaatagtttcaatagtttccaatagtttcaagtgt

SEQ ID NO: 714271 - DNA, 120 bp, Artificial Sequence
  ENSG00000197168_35 (sequence is synthesized)
atgtttcctgaattaataaatgctaaaacatttcctcattaagactgtaagctgtttggtgtaggaaaactaactttttaaaattgatcataacaattccaacgttgaacatggcctgga

SEQ ID NO: 714272 - DNA, 120 bp, Artificial Sequence
  ENSG00000197168_36 (sequence is synthesized)
gcttaacagatgtttatttaaatactaaggagtatgtctgggcttaggaaggagagggtggttacatttcagggtggtagaattctgcctgaaatatctgctttataataaaagtaaaat

SEQ ID NO: 714273 - DNA, 120 bp, Artificial Sequence
  ENSG00000197168_37 (sequence is synthesized)
gtctcaccgatacactgttaaactgagaaaacaaagatgaggtaaggtgggtcagattatttctaaggtctgtttactatttacatttcatataattttcattaaatgtggagaatgcaa

SEQ ID NO: 714274 - DNA, 120 bp, Artificial Sequence
  ENSG00000197168_38 (sequence is synthesized)
gtcttaggagtcacctgaggtacatccagttttttgtgactatttcctgatgtttgacagactgttctttcaacttggtgtagagttacagtctactcttttagggagaatgctgtttgt

SEQ ID NO: 714275 - DNA, 120 bp, Artificial Sequence
  ENSG00000197168_39 (sequence is synthesized)
tcacatcatgaggctgtaaatatttaaaatgttctcaccattgtgttagtttccaactgacacatggcctgagagattggagtatcattaattctgcaactcttttagtgctccggatgt

SEQ ID NO: 714276 - DNA, 120 bp, Artificial Sequence
  ENSG00000197168_40 (sequence is synthesized)
gcatgtttatttactttcaggactagttcagacatagtaaaactgctagtgacttcatgtaatccttattctgaactgtatttgaaagcaagggaaatgaaacatgatccctaataacct

SEQ ID NO: 714277 - DNA, 81 bp, Artificial Sequence
  ENSG00000197168_41 (sequence is synthesized)
tttgaaagcaagggaaatgaaacatgatccctaataacctcaaacatccaaagatcaagtcaattttaaggatggtaaatg

SEQ ID NO: 714278 - DNA, 88 bp, Artificial Sequence
  ENSG00000197168_42 (sequence is synthesized)
acccatctctatccacccctcagaaaaaaaaaaaaaaaaaaaagaattagctggtgtgttggtgtgcacctctggtcccagctcttca

SEQ ID NO: 714279 - DNA, 120 bp, Artificial Sequence
  ENSG00000197168_43 (sequence is synthesized)
agctggtgtgttggtgtgcacctctggtcccagctcttcaggaggctgaggcgggaggatcactttagtttcagcctgggaggttgaggctacagtgagccataatccgtgatcacatca

SEQ ID NO: 714280 - DNA, 120 bp, Artificial Sequence
  ENSG00000197168_44 (sequence is synthesized)
ctcaaaaaaaaaaaaaaaaaaaaaaagcatgtcaggttatcgggtttgttcccatgataaaagatgcttggctaaagtctagtctattttaggtaatagtcaccaagctttactcaacaa

SEQ ID NO: 714281 - DNA, 120 bp, Artificial Sequence
  ENSG00000197168_45 (sequence is synthesized)
agtctattttaggtaatagtcaccaagctttactcaacaattttgaattctttgctgtaaactggaagtattcactgtgataagtatacatatctgcaacactttcagctgattttagtc

SEQ ID NO: 714282 - DNA, 120 bp, Artificial Sequence
  ENSG00000197168_46 (sequence is synthesized)
cctaattctagaccttacccattttacacacactattagctaaatcgtgttcctgaggcatggctctgattactttactctggctttagccttggcctcatccgttaaattgaaactgtt

SEQ ID NO: 714283 - DNA, 120 bp, Artificial Sequence
  ENSG00000197168_47 (sequence is synthesized)
caccagacctgtatgcattaaaaatttttttattagaaaaatcagtgtcttgctagccatgtatgatagctatcaaattgatcattctgtaaatggtagcaataagtgtatcaacacttt

SEQ ID NO: 714284 - DNA, 120 bp, Artificial Sequence
  ENSG00000197168_48 (sequence is synthesized)
gacctcctctgtgtctagtaacatttgcatatagtacaactgagcacatagcaccagaatattggaacagatgcttctccaaagccaagggttgccttacatttagagtgggaaaagagg

SEQ ID NO: 714285 - DNA, 120 bp, Artificial Sequence
  ENSG00000197168_49 (sequence is synthesized)
aaaatgagttagcagaggagcagcggggaggggggtaaattacaggacataatttgcttctaaaaatttgtgtttcgtgttgtagttatataattaacttttctattgtactgattgaca

SEQ ID NO: 714286 - DNA, 120 bp, Artificial Sequence
  ENSG00000197168_50 (sequence is synthesized)
gatttggcacagacatcctctcattgtgaatatatatgaatatatcagagttttggactctggggtatatttacataaacacaagtattctgaaagcattgataaccacactggtgtctc

SEQ ID NO: 714287 - DNA, 120 bp, Artificial Sequence
  ENSG00000197168_51 (sequence is synthesized)
ttaattttgtctataagatgaccttataaaatccctcaagaattatttaaatcaagtgtacgaagctctgcagttttttgttatgtctgaaatattcattaaaaagtttattaaacctga

SEQ ID NO: 714288 - DNA, 120 bp, Artificial Sequence
  ENSG00000197168_52 (sequence is synthesized)
agcggccccgggaacccggatccttccgggacgcttcgttggccccgcggagccggcggagcagatgcccatacaagaaaaagaagcttcaaagaaagaagtgattcttctggaaaagat

SEQ ID NO: 714289 - DNA, 120 bp, Artificial Sequence
  ENSG00000197168_53 (sequence is synthesized)
gaaacatcccaacattgtagccttcttcaattcatttcaagatcctcggttggtttgtacagatttctctaggactaaaacatattcatgacaggaagatattacacagggacataaaag

SEQ ID NO: 714290 - DNA, 120 bp, Artificial Sequence
  ENSG00000197168_54 (sequence is synthesized)
ctcaggtaacagctcagagagaagactaagacagaactgatcttttcttgaagtacctcaaacaacatgacattttctccatttatagaacatttttcttagcaagaacggaatggtggc

SEQ ID NO: 714291 - DNA, 120 bp, Artificial Sequence
  ENSG00000197170_0 (sequence is synthesized)
gtgggtgacgagtggtggccgaagcagggggacagcaagggacgctcaggcggggaccatggcggacggcggctcggagcgggctgacgggcgcatcgtcaagatggaggtggactacag

SEQ ID NO: 714292 - DNA, 120 bp, Artificial Sequence
  ENSG00000197170_1 (sequence is synthesized)
cgccacggtggatcagcgcctacccgagtgtgcgaagctagccaaggaaggaagacttcaagaagtcattgaaacccttctctctctggaaaagcagactcgtactgcttccgatatggt

SEQ ID NO: 714293 - DNA, 120 bp, Artificial Sequence
  ENSG00000197170_2 (sequence is synthesized)
atcgacatcccgtatcttagttgcagtagtgaagatgtgctatgaggctaaagaatgggatttacttaatgaaaatattatgcttttgtccaaaaggcggagtcagttaaaacaagctgt

SEQ ID NO: 714294 - DNA, 120 bp, Artificial Sequence
  ENSG00000197170_3 (sequence is synthesized)
tgccaaaatggttcaacagtgctgtacttatgttgaggaaatcacagaccttcctatcaaacttcgattaattgatactctacgaatggttaccgaaggcaagatttatgttgaaattga

SEQ ID NO: 714295 - DNA, 120 bp, Artificial Sequence
  ENSG00000197170_4 (sequence is synthesized)
gcgtgcgcgactgactaaaacattagcaactataaaagaacaaaatggtgatgtgaaagaggcagcctccattttacaggagttacaggtggaaacctacgggtcaatggaaaagaaaga

SEQ ID NO: 714296 - DNA, 120 bp, Artificial Sequence
  ENSG00000197170_5 (sequence is synthesized)
gcgagtggaatttattttggagcaaatgaggctctgcctagctgtgaaggattacattcgaacacaaatcatcagcaagaaaattaacaccaaatttttccaggaagaaaatacagagaa

SEQ ID NO: 714297 - DNA, 120 bp, Artificial Sequence
  ENSG00000197170_6 (sequence is synthesized)
attaaagttgaagtactataatttaatgattcagctggatcaacatgagggatcctatttgtctatttgtaagcactacagagcaatatatgatactccctgtatacaggcagaaagtga

SEQ ID NO: 714298 - DNA, 120 bp, Artificial Sequence
  ENSG00000197170_7 (sequence is synthesized)
aaaatggcagcaggctctgaagagtgttgtactctatgttatcctggctccttttgacaatgaacagtcagatttggttcaccgaataagtggtgacaagaagttagaagaaattcccaa

SEQ ID NO: 714299 - DNA, 120 bp, Artificial Sequence
  ENSG00000197170_8 (sequence is synthesized)
atacaaggatcttttaaagctttttaccacaatggagttgatgcgttggtccacacttgttgaggactatggaatggaattaagaaaaggttcccttgagagtcctgcaacggatgtttt

SEQ ID NO: 714300 - DNA, 120 bp, Artificial Sequence
  ENSG00000197170_9 (sequence is synthesized)
tggttctacagaggaaggtgaaaaaaggtggaaagacttgaagaacagagttgttgaacataatattagaataatggccaagtattatactcggataacaatgaaaaggatggcacagct

SEQ ID NO: 714301 - DNA, 120 bp, Artificial Sequence
  ENSG00000197170_10 (sequence is synthesized)
tctggatctatctgttgatgagtccgaagcctttctctcaaatctagtagttaacaagaccatctttgctaaagtagacagattagcaggaattatcaacttccagagacccaaggatcc

SEQ ID NO: 714302 - DNA, 120 bp, Artificial Sequence
  ENSG00000197170_11 (sequence is synthesized)
aaataatttattaaatgactggtctcagaaactgaactcattaatgtctctggttaacaaaactacgcatctcatagccaaagaggagatgatacataatctacaataagggtcttagtg

SEQ ID NO: 714303 - DNA, 120 bp, Artificial Sequence
  ENSG00000197170_12 (sequence is synthesized)
ctttagaaaaaagttaaaattggaagtcattaaaaaaagactgttataatggtgtatatgttggggttttttttctaagcttctttgtcttaaattttaaaatagtgaatatgtttgaga

SEQ ID NO: 714304 - DNA, 120 bp, Artificial Sequence
  ENSG00000197170_13 (sequence is synthesized)
ctccctttgacctttcagttccccaagttcattgttaactttgcatttgcaattggtgcaaaaatacagatttctgtcgtctgaatacacaaaaagttgtgtcataacttacccagatat

SEQ ID NO: 714305 - DNA, 120 bp, Artificial Sequence
  ENSG00000197170_14 (sequence is synthesized)
gtttttctatcatttgaaacctttttagctactgtttgttttcattcaactaacaaacatattccaataataaaagcagtatatacatatttcctttctacagttacctctgattctcaa

SEQ ID NO: 714306 - DNA, 120 bp, Artificial Sequence
  ENSG00000197170_15 (sequence is synthesized)
cattttgtggggtagtgatttggcaagtgttttttaaataaaacaaatctcattgtaaagctatcagtcatttagtagaatagaaaagcaacatagagcatacaagaacatttgggatag

SEQ ID NO: 714307 - DNA, 120 bp, Artificial Sequence
  ENSG00000197170_16 (sequence is synthesized)
agttgtgatttgtgaagaatttgtactttgatattgtggcggaaagtctagactgagtgtgtatgctggtaaactgtagacttttttttttttttttttgagtccggctggttccaatca

SEQ ID NO: 714308 - DNA, 120 bp, Artificial Sequence
  ENSG00000197170_17 (sequence is synthesized)
cagtagcttgattgctttcagccctcatcctctcacttgatcagttgttcaacagaatcagctgacataattgacacagtttattgggtgttaagtccgctctatagggatagtgactac

SEQ ID NO: 714309 - DNA, 120 bp, Artificial Sequence
  ENSG00000197170_18 (sequence is synthesized)
ccctttctttatatgggtttaaatttaacataaagttgtttttataaggcttatttgtggctttaacttgtaagtctgattacatcattattgttccaaattcattatctctgtaggaac

SEQ ID NO: 714310 - DNA, 120 bp, Artificial Sequence
  ENSG00000197170_19 (sequence is synthesized)
ttttagttccattatatgaacactggataacctaattttttttaatgctttaaaaaaatggcaaaaagacgtcaggccaccctcatagtaagtggtgtagtattaaaatattttcacgga

SEQ ID NO: 714311 - DNA, 120 bp, Artificial Sequence
  ENSG00000197170_20 (sequence is synthesized)
attaaaagtagcttgctgtcaaagaaacacctgagatgaattggtgtgaacgaattttgcaagtttaatttgatttatttcagagaaaatagaaaaaacaatgttagaaggttatttaaa

SEQ ID NO: 714312 - DNA, 120 bp, Artificial Sequence
  ENSG00000197170_21 (sequence is synthesized)
atgatacttaaataaagaaagtgtgaggtctactttaaaaaaattcaaatgaagagaaaaagaaaaacagcattctagaaatggcatttctcctaattaattttccacttaatggaagat

SEQ ID NO: 714313 - DNA, 120 bp, Artificial Sequence
  ENSG00000197170_22 (sequence is synthesized)
tatcaattgtcctattttatgatcccaggactgaagacagttgtgggatatctgtcatatttatcctgtgagtcattgtgaataatgacatacagtactgaagtaatctgattttattct

SEQ ID NO: 714314 - DNA, 120 bp, Artificial Sequence
  ENSG00000197170_23 (sequence is synthesized)
ttggaaattcaatgcattggtcacactaataacatcaacatctgctatcacttatctttttaaaactaaccaaaaaaggccgggtgcagtggatcccagcactttgggaggccaaggcgg

SEQ ID NO: 714315 - DNA, 120 bp, Artificial Sequence
  ENSG00000197170_24 (sequence is synthesized)
aaacaaaactggaaagttcagaaacagaagttcacactaacagagtatggttttaattttcctttgaatgaaaaggatagaagataaaattgtgtattgttaacatgtaaataaaattgg

SEQ ID NO: 714316 - DNA, 120 bp, Artificial Sequence
  ENSG00000197170_25 (sequence is synthesized)
agctaatttgaaactagcttctcaataacttcatctttctagagactcattacctgtgggcttgtcaaacctggactatttggccaaataggttgctatagagattgcaagtgttcctcc

SEQ ID NO: 714317 - DNA, 73 bp, Artificial Sequence
  ENSG00000197170_26 (sequence is synthesized)
tggccaaataggttgctatagagattgcaagtgttcctcctctttatttttttcagtgtcacgatctcggctc

SEQ ID NO: 714318 - DNA, 120 bp, Artificial Sequence
  ENSG00000197170_27 (sequence is synthesized)
ttacaggcatgagccactgcacccaactcctctttcgtctttctttaacacacactaggctctttgtgtattatgattcagtgctatttgtaactgtgtcccagtgaccaaattgcactc

SEQ ID NO: 714319 - DNA, 120 bp, Artificial Sequence
  ENSG00000197170_28 (sequence is synthesized)
tatttgtaactgtgtcccagtgaccaaattgcactcgactcgatcagctgttcatccatttcgtgttttttcctgtcaaacattaatccagcaaatatatgaggtatttaccaatttatt

SEQ ID NO: 714320 - DNA, 120 bp, Artificial Sequence
  ENSG00000197170_29 (sequence is synthesized)
ttcttagtattacaaaataattcattagcataaagtacaatagtgaaatatttgagttgttcggaacctcaattaatcctgttttacatttcagacctaaagctggcaatcaggagaaga

SEQ ID NO: 714321 - DNA, 120 bp, Artificial Sequence
  ENSG00000197170_30 (sequence is synthesized)
agcactttgttttaaatgtggagaagataacacttgattccatttcattgtcattagtgtattaaccagcaggagaggtgatgagccatttttcaaatgaaataccttttatttccatat

SEQ ID NO: 714322 - DNA, 120 bp, Artificial Sequence
  ENSG00000197170_31 (sequence is synthesized)
aatttttttattttagagttcaatagctgtttctatgattatcctcaatttccatatgttactgaatctgaaaaacatctttaaaattcaaacagttccattttctctcttgtaagtgtt

SEQ ID NO: 714323 - DNA, 120 bp, Artificial Sequence
  ENSG00000197170_32 (sequence is synthesized)
aaatgtgataaaagtacatattttaaattgttttcagctcttggatatagcagcaataaaaacactaatttgtgggtatttaagaaaacctggagaataaactcatactttaaaagatca

SEQ ID NO: 714324 - DNA, 120 bp, Artificial Sequence
  ENSG00000197170_33 (sequence is synthesized)
atattcatagtaattcagaataactacagaaaccaaaatatctaagtatttagttttgttattgaaacttagaactagctttgctccagtgatggactgtagaaaaataaaagctctgag

SEQ ID NO: 714325 - DNA, 120 bp, Artificial Sequence
  ENSG00000197170_34 (sequence is synthesized)
acttacttggatatgaaaataaatggacttttagacttactgacaaatgttacgtgttctccctgctctctatcctctccccagaatattagaataatggccaagtattatactcggata

SEQ ID NO: 714326 - DNA, 83 bp, Artificial Sequence
  ENSG00000197170_35 (sequence is synthesized)
agtggatgttgccaaaatggttcaacagtgctgtacttatgttgaggaaatcacagaccttcctatcaaacttcgattaattg

SEQ ID NO: 714327 - DNA, 120 bp, Artificial Sequence
  ENSG00000197170_36 (sequence is synthesized)
tgcgaagctagccaaggcatgcctttataggtattgatttaaatcttacaccaaccctgtggattggtacaattattgtgcccacttcgctgaagagaaaattgagagtcagagagcttg

SEQ ID NO: 714328 - DNA, 120 bp, Artificial Sequence
  ENSG00000197170_37 (sequence is synthesized)
tgttttactcaaggttgtgtaacaaatcattgaaagattggattcattcaggaattaaaggaggtgcaaacagaacttatactcaacattgatgttgaacaaactcattagtcgcttaca

SEQ ID NO: 714329 - DNA, 120 bp, Artificial Sequence
  ENSG00000197170_38 (sequence is synthesized)
aaaagcatttgtatttcagaacttttcacaagctcttctataagtctgtttaaaatgtgttaagtcaacgttgtaacatcctagagggtgttttaaaattcagtctacattctcacaatg

SEQ ID NO: 714330 - DNA, 120 bp, Artificial Sequence
  ENSG00000197170_39 (sequence is synthesized)
aaattagcatgatatatctcagtcgaaacaccattttgaaagaaaattggctaacctaagtgtatacttctgtgtatacttctttttttgagatggagttttactattgttgcccacact

SEQ ID NO: 714331 - DNA, 120 bp, Artificial Sequence
  ENSG00000197172_0 (sequence is synthesized)
gaggtcagaagaccgcgagattctcgccctgagcaacgagcgacggcctgacgtcggcggagggaagccggcccaggctcggtgaggaggcaaggttctgaggggacaggctgacgtgga

SEQ ID NO: 714332 - DNA, 120 bp, Artificial Sequence
  ENSG00000197172_1 (sequence is synthesized)
ggaacagaggcccccggaggagcactgaaggagaagatctgccagtgggtctccattgcccagctcctgcccacactcccgcctgttgccctgaccagagtcatcatgcctcttgagcag

SEQ ID NO: 714333 - DNA, 120 bp, Artificial Sequence
  ENSG00000197172_2 (sequence is synthesized)
aggagtcagcactgcaagcctgaagaaggccttgaggcccgaggagaggccctgggcctggtgggtgcgcaggctcctgctactgaggagcaggaggctgcctcctcctcttctactcta

SEQ ID NO: 714334 - DNA, 120 bp, Artificial Sequence
  ENSG00000197172_3 (sequence is synthesized)
gttgaagtcaccctgggggaggtgcctgctgccgagtcaccagatcctccccagagtcctcagggagcctccagcctccccactaccatgaactaccctctctggagccaatcctatgag

SEQ ID NO: 714335 - DNA, 120 bp, Artificial Sequence
  ENSG00000197172_4 (sequence is synthesized)
gactccagcaaccaagaagaggaggggccaagcaccttccctgacctggagtctgagttccaagcagcactcagtaggaaggtggccaagttggttcattttctgctcctcaagtatcga

SEQ ID NO: 714336 - DNA, 120 bp, Artificial Sequence
  ENSG00000197172_5 (sequence is synthesized)
gccagggagccggtcacaaaggcagaaatgctggggagtgtcgtcggaaattggcagtacttctttcctgtgatcttcagcaaagcttccgattccttgcagctggtctttggcatcgag

SEQ ID NO: 714337 - DNA, 120 bp, Artificial Sequence
  ENSG00000197172_6 (sequence is synthesized)
ctgatggaagtggaccccatcggccacgtgtacatctttgccacctgcctgggcctctcctacgatggcctgctgggtgacaatcagatcatgcccaagacaggcttcctgataatcatc

SEQ ID NO: 714338 - DNA, 120 bp, Artificial Sequence
  ENSG00000197172_7 (sequence is synthesized)
agtgtgttagaggtgtttgaggggagggaagacagtatcttcggggatcccaagaagctgctcacccaatatttcgtgcaggaaaactacctggagtaccggcaggtccccggcagtgat

SEQ ID NO: 714339 - DNA, 120 bp, Artificial Sequence
  ENSG00000197172_8 (sequence is synthesized)
cctgcatgctatgagttcctgtggggtccaagggccctcattgaaaccagctatgtgaaagtcctgcaccatatggtaaagatcagtggaggacctcgcatttcctacccactcctgcat

SEQ ID NO: 714340 - DNA, 120 bp, Artificial Sequence
  ENSG00000197172_9 (sequence is synthesized)
gagtgggctttgagagagggggaagagtgagtctgagcacgagttgcagccagggccagtgggagggggtttgggccagtgcaccttccggggccccatcccttagtttccactgcctcc

SEQ ID NO: 714341 - DNA, 120 bp, Artificial Sequence
  ENSG00000197172_10 (sequence is synthesized)
tgtgacgtgaggcccattcttcactctttgaagcgagcagtcagcattcttagtagtgggtttctgttctgttggatgactttgagattattctttgtttcctgttggagttgttcaaat

SEQ ID NO: 714342 - DNA, 120 bp, Artificial Sequence
  ENSG00000197172_11 (sequence is synthesized)
gttccttttaacggatggttgaatgagcgtcagcatccaggtttatgaatgacagtagtcacacatagtgctgtttatatagtttaggagtaagagtcttgttttttattcagattggga

SEQ ID NO: 714343 - DNA, 120 bp, Artificial Sequence
  ENSG00000197172_12 (sequence is synthesized)
aatccattccattttgtgaattgtgacataataatagcagtggtaaaagtatttgcttaaaattgtgagcgaattagcaataacatacatgagataactcaagaaatcaaaagatagttg

SEQ ID NO: 714344 - DNA, 120 bp, Artificial Sequence
  ENSG00000197172_13 (sequence is synthesized)
attcttgccttgtacctcaatctattctgtaaaattaaacaaatatgcaaaccaggatttccttgacttctttgagaatgcaagcgaaattaaatctgaataaataattcttcctcttca

SEQ ID NO: 714345 - DNA, 120 bp, Artificial Sequence
  ENSG00000197172_14 (sequence is synthesized)
agcaacgagcgacggcctgacgtcggcggagggaagccggcccaggctcggtgaggaggcaagtcctgcagcctcagcatgtgctggccggatgtaccctgaggtgccctctcacttcct

SEQ ID NO: 714346 - DNA, 120 bp, Artificial Sequence
  ENSG00000197177_0 (sequence is synthesized)
gtcgccgcgggaggtgcgcgcagaggcggcggcgctgctggccgggctgggccgctcgtgcgcggggctgtgactcaccggccggcgccgcagccccgcaatctgttgataactcggtcc

SEQ ID NO: 714347 - DNA, 120 bp, Artificial Sequence
  ENSG00000197177_1 (sequence is synthesized)
gttgataactcggtcccagctcggccgctgccctcgcgaatggagagcgggtccccggcggggggagcgcagcgcgtctgtctccgggagcgcggcccggccgccccggcagccgcttcg

SEQ ID NO: 714348 - DNA, 120 bp, Artificial Sequence
  ENSG00000197177_2 (sequence is synthesized)
gcagctcccggactgcgcccgccccgccgcggtcaccctgaggccaggggcccgggagcgcgacctcctggccgccgtctgggactttgaccttccagaggccatggaggctggcgggga

SEQ ID NO: 714349 - DNA, 120 bp, Artificial Sequence
  ENSG00000197177_3 (sequence is synthesized)
gcagggcgccacctgatcgcctccccctggacgcctcctccagcggcgctcacgcttccgcaactttgcagcgctcatggatctgaagacagtgctctccctgccccgctacccagggga

SEQ ID NO: 714350 - DNA, 120 bp, Artificial Sequence
  ENSG00000197177_4 (sequence is synthesized)
gttcctgcaccccgtggtgtacgcgtgcacggccgtcatgctgctctgcctcctggcctccttcgtcacctacatcgtgcaccagagcgccatccgcatcagccgcaagggccggcacac

SEQ ID NO: 714351 - DNA, 120 bp, Artificial Sequence
  ENSG00000197177_5 (sequence is synthesized)
gctcctgaatttctgcttccacgcggccctgaccttcactgtgttcgccggcggcatcaatcgcaccaagtaccccatcctgtgccaggcggtgggcatcgtgctgcactattctacact

SEQ ID NO: 714352 - DNA, 120 bp, Artificial Sequence
  ENSG00000197177_6 (sequence is synthesized)
gtccaccatgctgtggataggagtgaccgccaggaacatctacaagcaggtgaccaagaaggcccctctgtgcctggacacagaccagccaccgtaccccaggcagcccctgctcaggtt

SEQ ID NO: 714353 - DNA, 120 bp, Artificial Sequence
  ENSG00000197177_7 (sequence is synthesized)
ttacctcgtcagcggaggggtcccctttatcatctgtggggtcacggctgccacgaacatcaggaattacgggacagaggacgaggacacggcgtactgctggatggcctgggagcccag

SEQ ID NO: 714354 - DNA, 120 bp, Artificial Sequence
  ENSG00000197177_8 (sequence is synthesized)
cctgggcgccttctacggcccagccgccatcatcaccctggtcacctgtgtgtacttcctgggcacctacgtgcagctgcggcgccacccagggcgcaggtacgagctgcgcacacagcc

SEQ ID NO: 714355 - DNA, 120 bp, Artificial Sequence
  ENSG00000197177_9 (sequence is synthesized)
cgaggagcagcggcggctggcgacacccgagggcggccgtgggatccggccaggcaccccacccgcacacgatgcccccggcgcctccgtgctgcagaacgagcactcattccaggcaca

SEQ ID NO: 714356 - DNA, 120 bp, Artificial Sequence
  ENSG00000197177_10 (sequence is synthesized)
gctgcgcgccgccgccttcacgctgttcctgttcacggccacgtgggccttcggggcgctggcggtgtcacagggccacttcctggacatggtcttcagctgcctgtacggcgccttctg

SEQ ID NO: 714357 - DNA, 120 bp, Artificial Sequence
  ENSG00000197177_11 (sequence is synthesized)
cgtgaccctgggactcttcgtgctcatccaccactgcgccaagcgtgaggacgtgtggcagtgctggtgggcatgctgcccgccccgcaaggacgcccaccccgcacttgacgccaacgg

SEQ ID NO: 714358 - DNA, 120 bp, Artificial Sequence
  ENSG00000197177_12 (sequence is synthesized)
tgggccgcgccgcctgcctgcactcgccgggactgggccagccacggggcttcgcgcacccaccgggcccctgcaagatgaccaacctgcaggccgcgcagggccacgccagttgcctgt

SEQ ID NO: 714359 - DNA, 120 bp, Artificial Sequence
  ENSG00000197177_13 (sequence is synthesized)
ttgcctgtcaccggccaccccgtgctgcgccaagatgcactgcgagccactgacggcggacgaggcgcacgtgcacctgcaggaggagggcgccttcgggcacgacccccacctgcacgg

SEQ ID NO: 714360 - DNA, 120 bp, Artificial Sequence
  ENSG00000197177_14 (sequence is synthesized)
gtgccttcagggcagaactaagccgccctactttagccggcacccagcagaggagcccgagtacgcctaccacatcccatccagcctggatggcagcccccgcagctcgcgcacagacag

SEQ ID NO: 714361 - DNA, 120 bp, Artificial Sequence
  ENSG00000197177_15 (sequence is synthesized)
cccccccagctctctggatggcccggcggggacacacacgctggcctgctgcacccagggcgaccccttccccatggtcacccagcccgagggcagtgatgggagccctgccctctacag

SEQ ID NO: 714362 - DNA, 120 bp, Artificial Sequence
  ENSG00000197177_16 (sequence is synthesized)
ctgccccacgcagccgggcagggaggcagcgctcgggcccggccacttggagatgctgcggaggacacagtccctgccctttggtggccccagccagaacgggctgcccaagggtaaatt

SEQ ID NO: 714363 - DNA, 120 bp, Artificial Sequence
  ENSG00000197177_17 (sequence is synthesized)
gggcagaggacacggtgttcctggaggagcttcagagcagagtggggggcccatctgccacatgaggtcactgggggtaccgaagtgaccccgcctttcagaagccgttcacacccctgc

SEQ ID NO: 714364 - DNA, 120 bp, Artificial Sequence
  ENSG00000197177_18 (sequence is synthesized)
cccttccttgtgatcacacccctgccccttccttgtgatcacacccctgccccttccttgtgatcacacccctgccccttccttgtgaaagacctcagcggggaaacgctccgggccacg

SEQ ID NO: 714365 - DNA, 120 bp, Artificial Sequence
  ENSG00000197177_19 (sequence is synthesized)
cccactccccttatcccaattccgcgtgctggtcccgcacacggtcatccggtttctgtcctgtggtctccagtcctggggcaccctagaggcagagcaggggattccatcaaaggaccc

SEQ ID NO: 714366 - DNA, 120 bp, Artificial Sequence
  ENSG00000197177_20 (sequence is synthesized)
actgagaccccagcatggccctgcccgagatgccctgctgcccacggagtcctggcttcccctggtgtggccgggcagggccgagatcgcaggagggggctgccctgacctttcccagtg

SEQ ID NO: 714367 - DNA, 120 bp, Artificial Sequence
  ENSG00000197177_21 (sequence is synthesized)
ttcaatgtgtgtgtcttgcgttctactccgggggtggcggcggcaggtctgtccccagcattctcgctctgggcagaaccctcgggaccctccgctgtcgtgtgtctgagccacccctgc

SEQ ID NO: 714368 - DNA, 120 bp, Artificial Sequence
  ENSG00000197177_22 (sequence is synthesized)
agcttcacagggcccctgcacacctctgcccactcagtgtgccctgtcagccctgtccttgtcgtagccccagccctgcagggctgagagcaccacagatgctgggggctgctctggact

SEQ ID NO: 714369 - DNA, 120 bp, Artificial Sequence
  ENSG00000197177_23 (sequence is synthesized)
ttggggatggctgtcagcctcagagggccaatggggggctttcacgggcccaaggcttgggaaaatgcccagacatcctttagtgaagactcgacttccaaaaccagccaccgctgggac

SEQ ID NO: 714370 - DNA, 120 bp, Artificial Sequence
  ENSG00000197177_24 (sequence is synthesized)
tggattccactccagtataggcacttagcaacacgaaggtttattccaaaaagaaaaggggctgacagacgggagattctcatggacaaaatccctttccctttttctcgtctccatgaa

SEQ ID NO: 714371 - DNA, 120 bp, Artificial Sequence
  ENSG00000197177_25 (sequence is synthesized)
catctgggtaccaagccctgactcaaaggacagatgtggatgacagcaagacttctgtgaaagcaagtggcccgtccctaggtgggagggagtccagagggtcatgggtgtgaaactgtg

SEQ ID NO: 714372 - DNA, 120 bp, Artificial Sequence
  ENSG00000197177_26 (sequence is synthesized)
cacagctttccctccctccctcttcctccttgtctgtgacacatgtgcacccacacacacacacacaaacacatgtgcatatcacacacatgcacacacacaaacacatgtgcatatcac

SEQ ID NO: 714373 - DNA, 120 bp, Artificial Sequence
  ENSG00000197177_27 (sequence is synthesized)
acacgcgcacacacccaaacacgtgcatatcacacacatgcacacacacaaacacgtgcatatcacacacatgcacacaaacgtgcatatcacacacacgcacacacacccaaacacgtg

SEQ ID NO: 714374 - DNA, 120 bp, Artificial Sequence
  ENSG00000197177_28 (sequence is synthesized)
catatcacacacacgcacacacacaaacacgtgcatatcacacacaaacacacgtgcacacatacttaacacacacttgcacctgctgtgcacatgtgcacacacacgtagtagtgtgtt

SEQ ID NO: 714375 - DNA, 120 bp, Artificial Sequence
  ENSG00000197177_29 (sequence is synthesized)
ttccagccacccacacactgggtttgcattggagattgtttcaccctgcaaacgtcaacgtcagcagactcgtcggtgcgctgtgctatccggttgggaggtctcaccaggagcagagcc

SEQ ID NO: 714376 - DNA, 120 bp, Artificial Sequence
  ENSG00000197177_30 (sequence is synthesized)
tccctaacgtgcacctccgagaagaggggtgtcggggagtgttcccagcacctgctcggtggaagggctctccggagactggcactcagtatctgagtatgaggagcctcacttcccggg

SEQ ID NO: 714377 - DNA, 120 bp, Artificial Sequence
  ENSG00000197177_31 (sequence is synthesized)
gtgtcggtaaacttgaccgtgactcagtaacccacagcgtgctcctcccagcaaaccccgtgtgtccttacaggtcgaccagacgggccgtcggaggaccaccaggtggctctgcctctg

SEQ ID NO: 714378 - DNA, 120 bp, Artificial Sequence
  ENSG00000197177_32 (sequence is synthesized)
cctcaccttctcacctgcttccatagctgatgtgaacccgaatccccacgctgtgctgtgtacgcactgtaggtgcagaaccgtccacacaaaaatacagtcttggcattgtttgttctt

SEQ ID NO: 714379 - DNA, 120 bp, Artificial Sequence
  ENSG00000197177_33 (sequence is synthesized)
tgtgaggctggttaatagcatccccgtgtgtttttctcaccctcgatggggtagaggggcacctgaatgtgtggcccccgtctgtgtcctggatcctggggcagggctgctctccctggc

SEQ ID NO: 714380 - DNA, 120 bp, Artificial Sequence
  ENSG00000197177_34 (sequence is synthesized)
ccctgcagcccctcatgaactttccaccctcagtgcccccggctgagcagagaggcgtcccaccattcaaccaaagaaagtcaacattgaacattaaacctctgtgtgtttctatactga

SEQ ID NO: 714381 - DNA, 120 bp, Artificial Sequence
  ENSG00000197177_35 (sequence is synthesized)
atgcgaggccacgggaaccactcgcggctgaaatccagatgtgcttctctgggcaacgtccatcaccaccaggcacagatggcgcacggtgcacactgccgagggggccggacaccacag

SEQ ID NO: 714382 - DNA, 120 bp, Artificial Sequence
  ENSG00000197177_36 (sequence is synthesized)
tcaccagacagccggggcccaaccgctgggggccacacccggggcagatggacgtaccggcccatcgaggccctcatcaacgtcagctttcccggagcaaagggtgggagaacggccgag

SEQ ID NO: 714383 - DNA, 120 bp, Artificial Sequence
  ENSG00000197177_37 (sequence is synthesized)
ggcgagccctcatgggcgtgggtcttcagaagtggctatttgcagagacaggctcttcctgggcttcccgtctccacccgagtggctgcctgctggtggcaacaccatccaggcagggac

SEQ ID NO: 714384 - DNA, 120 bp, Artificial Sequence
  ENSG00000197177_38 (sequence is synthesized)
tcagggttcttgggacctggatttattgacctgctcagagaggagcccagcggccgtgcagatgggaaggcagctgctcagaaaacagggcgtctttatttgttcccgactttcctaggc

SEQ ID NO: 714385 - DNA, 120 bp, Artificial Sequence
  ENSG00000197177_39 (sequence is synthesized)
aacaaattaccagaggccgccgactcgtttggggaaattgcttctgggaacagtgttatttttacctccgtcttgcaatcctctcacccacctggcaccccaccgcccagcgcacgcaag

SEQ ID NO: 714386 - DNA, 120 bp, Artificial Sequence
  ENSG00000197177_40 (sequence is synthesized)
ccaagtcccggagctgccatgctcgtctgtgaggaaacgctggagctgggtgcccagggctgctgggggtccacgagcccccggggccaggccgtgagcttggtcggtgggcccacggcc

SEQ ID NO: 714387 - DNA, 120 bp, Artificial Sequence
  ENSG00000197177_41 (sequence is synthesized)
ggaggctccaggctgggaggggctggctgcaccatgggcctgctcatggccctccaggccagacgccccagggacggcacctgggctgaccctcgaagatgctccagggctgtggagggc

SEQ ID NO: 714388 - DNA, 120 bp, Artificial Sequence
  ENSG00000197177_42 (sequence is synthesized)
tcgggcctcaccagggctgcccttgtgagtccagggccatcgggggtggaggaggacaccaggagggaaggctgcgtgcttgtgggctcctggaggtcgtccacccacagaagccgtgtt

SEQ ID NO: 714389 - DNA, 120 bp, Artificial Sequence
  ENSG00000197177_43 (sequence is synthesized)
ctgattatcaacacgccctctggcaggaccccctggagccagggctccctcggcagcaccgggcgctacaaccagacccgggcaccaggcagccagcagcaggggctgtgctcggatgca

SEQ ID NO: 714390 - DNA, 120 bp, Artificial Sequence
  ENSG00000197177_44 (sequence is synthesized)
gctctacacgaggattttgtgccggagcctactcctgccttctttcaataccctccacaagccttcagcaaaaccaaggttcgcgacttggggaggggaggcctttatgccttttccaag

SEQ ID NO: 714391 - DNA, 120 bp, Artificial Sequence
  ENSG00000197177_45 (sequence is synthesized)
gaggagaaggtatctgaggcccagcgggtagaggcctacgagacccacggccttggcctgagtacaggccgacagaaccctgtgccgtccccctgtaagcctggatgcgtgtgccagggc

SEQ ID NO: 714392 - DNA, 120 bp, Artificial Sequence
  ENSG00000197177_46 (sequence is synthesized)
cttgcgctggacgcagaggcctggccgaggcaccctggacgcaggccctgtgcggccaaggaggcctgcctgggcccacctggctgcagcggggagctgagcctccctgaggaggaagga

SEQ ID NO: 714393 - DNA, 120 bp, Artificial Sequence
  ENSG00000197177_47 (sequence is synthesized)
atcgcacctggggcagcaacagcagctcctgcctgggtccctcatggccgcgtgagccgcttcctcactgtaaagctcttcacctatgtaactatgtatcaatgtaaacaggaacgtatc

SEQ ID NO: 714394 - DNA, 120 bp, Artificial Sequence
  ENSG00000197177_48 (sequence is synthesized)
ctccgcctctgcatctctggtgaatccgggcgatacgtgcggcgctcacgcttccgcaactttgcagcgctcatggtgagtacgggggtcccgggggtcctgcagctgggggctaggccg

SEQ ID NO: 714395 - DNA, 120 bp, Artificial Sequence
  ENSG00000197177_49 (sequence is synthesized)
ctgcgggggggcggccacccgtatggggactcccaggctggaaaagttgtggaatggcgagctggtgaccgggcttccgggctcagtgccggggaaagaaggttcctcagccagtcggag

SEQ ID NO: 714396 - DNA, 120 bp, Artificial Sequence
  ENSG00000197177_50 (sequence is synthesized)
ctgcagacctggccccggacacctcactgtgtaggaaagaaggttcctcagccagttggagctgcagacctagccccggacacctcactgtgcaggaaagaaggttcctcagccagtcgg

SEQ ID NO: 714397 - DNA, 120 bp, Artificial Sequence
  ENSG00000197177_51 (sequence is synthesized)
agctgcagacctggccccggacacctcacccgcagggaggaagattccttcaggcagctggcattccccaggtttgaagaggtcactttcccacctctcactgctgcagaaagagcaccc

SEQ ID NO: 714398 - DNA, 120 bp, Artificial Sequence
  ENSG00000197177_52 (sequence is synthesized)
tctgtccacggtggacactctctagccagccagggcctcgtcttggctggacggacaagaagtgtggcctcaggagggaagcaggagctctcgggcccgctggctgcctgcatcccgaca

SEQ ID NO: 714399 - DNA, 120 bp, Artificial Sequence
  ENSG00000197177_53 (sequence is synthesized)
cccgtggggggctcatcctacccacagtaagagcatcctggcgtgaccccactgaggacttcacctcctctcccttggtggacacctatccaggtgggcatcgtgctgcactattctaca

SEQ ID NO: 714400 - DNA, 120 bp, Artificial Sequence
  ENSG00000197181_0 (sequence is synthesized)
gtgggccccggggcgtgggttgagctcggtcttcccctgaggccgcgcggagctgggcgactggggcgaggactcgcgcacaggtaattaaccagaacaggatcgacacgtgttctctac

SEQ ID NO: 714401 - DNA, 120 bp, Artificial Sequence
  ENSG00000197181_1 (sequence is synthesized)
agcccgtccatggatcctttccgaccatcgttcaggggccagtctcctatccacccatcccagtgccaggctgtacggatgccaggctgttggccacaagcttctaaacctttggaccca

SEQ ID NO: 714402 - DNA, 120 bp, Artificial Sequence
  ENSG00000197181_2 (sequence is synthesized)
gctctgggcaggggagcacctgcaggcagaggccatgtatttggaaagccagaggaaccaagcacacagagggggccagcacaaagggagtctgtgggtttggtctccatgttccgaggc

SEQ ID NO: 714403 - DNA, 120 bp, Artificial Sequence
  ENSG00000197181_3 (sequence is synthesized)
ctgggcattgaaacagtttctaagacccctctgaaacgggaaatgcttccatcaggtagaggcattttaggtcgaggcttgtctgctaatctggtacgcaaggacagggaggaactctct

SEQ ID NO: 714404 - DNA, 120 bp, Artificial Sequence
  ENSG00000197181_4 (sequence is synthesized)
cccactttttgggatccaaaagtgttggcggctggggacagcaagatggcagagacctccgttggttggagtaggacgcttggaagagggagttcagatgcgtctttattaccactggga

SEQ ID NO: 714405 - DNA, 120 bp, Artificial Sequence
  ENSG00000197181_5 (sequence is synthesized)
agagcagcaggtggtatcagcagagaagtggacaagcctccctgtaccttcagcacaccgtcccggggtcccccgcagctgtcatcaccaccagctctgccccagtctcccctgcactct

SEQ ID NO: 714406 - DNA, 120 bp, Artificial Sequence
  ENSG00000197181_6 (sequence is synthesized)
ccagatcgccctctggtcctgactgtggaacacaaggaaaaagagcttattgtgaagcaaggatcaaaaggaacacctcagtctttgggactgaacctcgtcaaaatacagtgtcataat

SEQ ID NO: 714407 - DNA, 120 bp, Artificial Sequence
  ENSG00000197181_7 (sequence is synthesized)
gaagcagtttatcaatatcatgtgactttcagccccaatgtggagtgcaaaagcatgaggttcggcatgttgaaggaccatcaagctgtcaccggcaacgtcactgcgtttgatggatct

SEQ ID NO: 714408 - DNA, 120 bp, Artificial Sequence
  ENSG00000197181_8 (sequence is synthesized)
attctctatctgcctgttaagcttcaacaagttcttgagttaaaaagtcaaaggaaaacagacagtgctgaaatcagcattaagattcagatgacaaagatcctggagccctgctctgac

SEQ ID NO: 714409 - DNA, 120 bp, Artificial Sequence
  ENSG00000197181_9 (sequence is synthesized)
ctgtgcattcccttctacaatgttgttttccgtcgggtaatgaaacttttagatatgaagcttgtggggagaaacttttatgaccctacaagtgctatggtactacagcaacacagattg

SEQ ID NO: 714410 - DNA, 120 bp, Artificial Sequence
  ENSG00000197181_10 (sequence is synthesized)
cagatctggccaggctatgcagctagcatccgaaggacagatggagggctcttcctgctagctgatgtctcccataaggtcattcggaatgactgtgtgctggatgtcatgcatgccatt

SEQ ID NO: 714411 - DNA, 120 bp, Artificial Sequence
  ENSG00000197181_11 (sequence is synthesized)
tatcagcagaataaagaacacttccaggatgagtgtactaagcttctggttggcaatattgttatcacccgatataacaatcgtacctatcgtattgatgatgtggattggaataagact

SEQ ID NO: 714412 - DNA, 120 bp, Artificial Sequence
  ENSG00000197181_12 (sequence is synthesized)
ccaaaggatagcttcacgatgtctgatgggaaagagatcacattcttggaatactacagcaaaaattatgggatcacagttaaggaagaggaccagccattgctgattcacaggcccagt

SEQ ID NO: 714413 - DNA, 120 bp, Artificial Sequence
  ENSG00000197181_13 (sequence is synthesized)
gagagacaggataatcatgggatgctgctaaaaggggaaatcctgctgctgcctgagctttcttttatgaccggaatcccagagaagatgaagaaggacttcagagccatgaaggatttg

SEQ ID NO: 714414 - DNA, 120 bp, Artificial Sequence
  ENSG00000197181_14 (sequence is synthesized)
gctcagcaaatcaatctgagccccaagcaacaccatagtgctttggaatgcttgctgcaaagaattgcaaagaacgaggcagccaccaatgaactgatgcgttgggggctccgtctgcaa

SEQ ID NO: 714415 - DNA, 120 bp, Artificial Sequence
  ENSG00000197181_15 (sequence is synthesized)
aaggatgtacataagattgaaggacgtgttctgccaatggaaagaattaacttaaaaaatacttcgtttatcacatctcaggaactaaactgggttaaggaagtaaccagagacccttcc

SEQ ID NO: 714416 - DNA, 120 bp, Artificial Sequence
  ENSG00000197181_16 (sequence is synthesized)
atcttgactatccccatgcatttctgggcacttttttacccaaagagagcaatggaccaggctcgagaactggtcaacatgttggagaagatagccggccccattggcatgcgtatgagc

SEQ ID NO: 714417 - DNA, 120 bp, Artificial Sequence
  ENSG00000197181_17 (sequence is synthesized)
ccaccggcctgggttgaactaaaggatgaccgaatagagacttatgtcagaaccattcaatccacgttaggagctgaggggaagatacagatggttgtttgcatcatcatgggcccacgt

SEQ ID NO: 714418 - DNA, 120 bp, Artificial Sequence
  ENSG00000197181_18 (sequence is synthesized)
gatgatctctatggggccatcaagaagctgtgctgtgtgcagtccccagtgccctcccaggttgtcaatgttcgaaccattggtcagcccaccaggcttcggagtgtggcccagaagatt

SEQ ID NO: 714419 - DNA, 120 bp, Artificial Sequence
  ENSG00000197181_19 (sequence is synthesized)
ttacttcagattaactgtaaattgggtggtgagctctggggagtggatattcctctgaaacagttaatggtgatcgggatggatgtttaccatgaccccagtagaggcatgcgctccgtg

SEQ ID NO: 714420 - DNA, 120 bp, Artificial Sequence
  ENSG00000197181_20 (sequence is synthesized)
gttggcttcgtggcaagcatcaatctcaccctcacaaaatggtattcccgggtggtgttccagatgccgcatcaggagattgtggacagcctgaagctatgcctcgtgggctccttaaaa

SEQ ID NO: 714421 - DNA, 120 bp, Artificial Sequence
  ENSG00000197181_21 (sequence is synthesized)
gaagacagttgccaactatgagattcctcaactacagaagtgttttgaagcttttgagaattatcagcccaagatggtggtgtttgtagttcagaagaaaatcagtactaatctatatct

SEQ ID NO: 714422 - DNA, 120 bp, Artificial Sequence
  ENSG00000197181_22 (sequence is synthesized)
ggctgctcctcagaactttgtaactcccactcctggaactgtggtagatcatacaataacaagctgtgagtgggtggatttctatcttcttgcccatcatgtacggcagggctgtggcat

SEQ ID NO: 714423 - DNA, 120 bp, Artificial Sequence
  ENSG00000197181_23 (sequence is synthesized)
tcctacgcattatgtctgtgttctcaacaccgcaaacctgagccctgatcatatgcagaggctgactttcaaactgtgccacatgtactggaattggcctggcaccatcagagttccagc

SEQ ID NO: 714424 - DNA, 120 bp, Artificial Sequence
  ENSG00000197181_24 (sequence is synthesized)
tccttgcaagtatgcccacaagctagctttcctgtcaggacacatcttgcatcatgaaccagccatccagctgtgcgagaacctgttcttcctgtgactgcacagcttggagatgggctg

SEQ ID NO: 714425 - DNA, 120 bp, Artificial Sequence
  ENSG00000197181_25 (sequence is synthesized)
gtgagaagaaaggcggcctcagaactcagctgtgactcttgcagaatcaacagagactgaagtgggcttttgtgttataattttccctttctccaaccctgtagaataagatttctttct

SEQ ID NO: 714426 - DNA, 120 bp, Artificial Sequence
  ENSG00000197181_26 (sequence is synthesized)
tgtcttttaaacctaatatcaccaagaagcaagtttctgagtaacagctgaaaatggccttgttgcctgtgtagagcaagttacggtggtactgccactctgcaggtggagcgggtgact

SEQ ID NO: 714427 - DNA, 78 bp, Artificial Sequence
  ENSG00000197181_27 (sequence is synthesized)
ttacggtggtactgccactctgcaggtggagcgggtgactctgggggaccattaagacctccagaccgggtgcggtgg

SEQ ID NO: 714428 - DNA, 78 bp, Artificial Sequence
  ENSG00000197181_28 (sequence is synthesized)
caacatgagctgcagaaaccagcagaagcagccattatacttctaagctgtgccaactaagtggttcccatttctgga

SEQ ID NO: 714429 - DNA, 120 bp, Artificial Sequence
  ENSG00000197181_29 (sequence is synthesized)
acttctaagctgtgccaactaagtggttcccatttctggagccagagatgataattaagtcattgcaagttgcctgaagagaattactcaggcaactgggaaaggcagtggaaggtctgt

SEQ ID NO: 714430 - DNA, 120 bp, Artificial Sequence
  ENSG00000197181_30 (sequence is synthesized)
gaagcaaagttttcaagtagatattgctattactggcaggtgtgcaaggcgtgtagtaaaatcagtttgtggcataggtcggcccttgctgactaaatcctctctggggattgaattgat

SEQ ID NO: 714431 - DNA, 120 bp, Artificial Sequence
  ENSG00000197181_31 (sequence is synthesized)
gacgactgtgacttgagttggattcgaaaatggcttcccttggcctcttgaaagagtgcagatgaagccttttccgtggatttcagtaactttccagcataccatgacgatttcttcccc

SEQ ID NO: 714432 - DNA, 120 bp, Artificial Sequence
  ENSG00000197181_32 (sequence is synthesized)
aaatatacacatgctcttttgctctttgtgcctgatcttcagtaatttttagttttttaacaggcagaaaaaatctagcagctaggaaagttcaagttggggtgggagtttttagtgaac

SEQ ID NO: 714433 - DNA, 120 bp, Artificial Sequence
  ENSG00000197181_33 (sequence is synthesized)
ttttctcccaggtgtgtggcctttatttctatttatatatgtttgtaaatggaattaccccctttctcttgcaaaataaccgcttcctggctgttggctcactttgctggaatttttctg

SEQ ID NO: 714434 - DNA, 120 bp, Artificial Sequence
  ENSG00000197181_34 (sequence is synthesized)
aatccaggttaagatttccagaagtcagctttggaaaacgtgacactcctaccaaagtccagatggttagaaagttatcacataccatgggtttcagtgtttttggaaacccgttttttt

SEQ ID NO: 714435 - DNA, 120 bp, Artificial Sequence
  ENSG00000197181_35 (sequence is synthesized)
ctggttttttttcccccctctccattttagaatcttctcccagtcccttcgggcctagttctgtctcatcttgctttattgggttttaaaaaccggtcttatttaagcttttctaatttg

SEQ ID NO: 714436 - DNA, 120 bp, Artificial Sequence
  ENSG00000197181_36 (sequence is synthesized)
tatttatgtacttatttattttttggtatgatggcagggaggggacaaagcagaaataccccttttatatgacaatgtgtgagaaaagaaactttagcttaaaactccgtaaaatgtgct

SEQ ID NO: 714437 - DNA, 120 bp, Artificial Sequence
  ENSG00000197181_37 (sequence is synthesized)
cacttcagcagcacatatactaaaattaaaatgatatagagaagattagcatatagaaaaaaagaaaaaagatttccttaaaacaagaaaaccaagaatgtttttggtttgttgcggtgc

SEQ ID NO: 714438 - DNA, 120 bp, Artificial Sequence
  ENSG00000197181_38 (sequence is synthesized)
ccagccgaggttgaggagggatgggtattgttggtgcactgctggtttcatttggagtgtgggacattagggtgagacaaggacctggaatttaaaaaccacagaatcaaacactgtgaa

SEQ ID NO: 714439 - DNA, 120 bp, Artificial Sequence
  ENSG00000197181_39 (sequence is synthesized)
ccactggtctctggctaagcagatcagttttctgattttccttggaagcgttttgaatttttctgttgaagttggatttcctaatactttttttctcttagataatcagaacaaatggtt

SEQ ID NO: 714440 - DNA, 120 bp, Artificial Sequence
  ENSG00000197181_40 (sequence is synthesized)
gaatacattataatacaaaaatttcttcactttttattcttggttttcttgcctcgtttttcggttttaatgccaaatgattgggtcatggggtgggaaataaaaacaactttgtataaa

SEQ ID NO: 714441 - DNA, 120 bp, Artificial Sequence
  ENSG00000197181_41 (sequence is synthesized)
attcgaggcccggcgccgcggccccaagaaggtgtccaggttggggcggcaggggaggccctccggaggcccaagtggacgtcttatttggcctgagagaggagatagaacccctggcag

SEQ ID NO: 714442 - DNA, 120 bp, Artificial Sequence
  ENSG00000197181_42 (sequence is synthesized)
ggctgtggctttggggaaaggtgcttttctcggggtggaaaggggatgggactcgccttcgggggccttgcttctggttaggcccgagtcgcgaggcctcagcgcggagcacgcacccag

SEQ ID NO: 714443 - DNA, 120 bp, Artificial Sequence
  ENSG00000197181_43 (sequence is synthesized)
ggatgcgagggaggcaggcccagcccgtcctgggttcgctccccattgaacctttcggacagccaagtatctgctacctgatcccagggggaaacccacactgggagagggccctctggg

SEQ ID NO: 714444 - DNA, 120 bp, Artificial Sequence
  ENSG00000197181_44 (sequence is synthesized)
ggagctacctgaatctatagaagtggtgctggaggttgagggaagcgtggacaaagaggaagattccagatgtcccttaagggaggccgtccagcgcttctgagtaattaaccagaacag

SEQ ID NO: 714445 - DNA, 120 bp, Artificial Sequence
  ENSG00000197181_45 (sequence is synthesized)
agaagctttttttccctgccctctaggcacagtagctttggcactaactgcaaaaggatctgccatgattccaggctacacaatgcgagtgggcctctcactgactgtggtccgtagcct

SEQ ID NO: 714446 - DNA, 120 bp, Artificial Sequence
  ENSG00000197183_0 (sequence is synthesized)
atgccgaagccgacgctgctgctgcgcgggggctgggagcgcgagcgcagccccggggactcggagctgggccgccagttccgggactggtgcttgcgcacctacggcgactcggccaaa

SEQ ID NO: 714447 - DNA, 120 bp, Artificial Sequence
  ENSG00000197183_1 (sequence is synthesized)
accaagacggtgacacgcagcaaataccagcggatcgccgaggtcctgcagggcggcggcgggactggcgcgggcagcggccccgcagccggcgagaaaggcaagttccagttctgggtg

SEQ ID NO: 714448 - DNA, 120 bp, Artificial Sequence
  ENSG00000197183_2 (sequence is synthesized)
cgctccaagggcttccgcctgggcagcggccgggaacccaagatgggccaagtggtgtatgtgccggtcaagacgggctcgggggcagatggcctgtcggagccagagggcatctctctg

SEQ ID NO: 714449 - DNA, 120 bp, Artificial Sequence
  ENSG00000197183_3 (sequence is synthesized)
aagcgggtcgctgtggtggaagatttctttgacatcatctactcgatgcatgtggagagctcagcggagccaggcaaagcccccaagcacgctgggcagaagaaaacctaccgagcgatc

SEQ ID NO: 714450 - DNA, 120 bp, Artificial Sequence
  ENSG00000197183_4 (sequence is synthesized)
gcagagacctatgccttcctcccgagagaggccgtgacccggttcctgatgagctgtacggagtgtcagaagaggatgcactttaactccaatggcctggaacccaaagaaaacgagcct

SEQ ID NO: 714451 - DNA, 120 bp, Artificial Sequence
  ENSG00000197183_5 (sequence is synthesized)
ccatctccactggtctctgggattattgattacaacatgcccctcacctccacctacctgaagcagatgaagcttcgagtgatgaattcccaggagcaggatgagacttctgtgagcagc

SEQ ID NO: 714452 - DNA, 120 bp, Artificial Sequence
  ENSG00000197183_6 (sequence is synthesized)
gaggattttgatatgagcgactccacatggatgtcagctgacccgcacctggcctccagcctgagccccagccaggacgagaggatgcggagcccgcagaacctccacagtcaagaggac

SEQ ID NO: 714453 - DNA, 120 bp, Artificial Sequence
  ENSG00000197183_7 (sequence is synthesized)
gatgactcctcctctgagagtggcagcggcaatggctcctccaccctgaacccatccacgtcgagcagcacgcagggcgaccctgccttccccgagatgaatggcaacggcgccgtggcc

SEQ ID NO: 714454 - DNA, 120 bp, Artificial Sequence
  ENSG00000197183_8 (sequence is synthesized)
cccatggacttcaccacggccgccgaggatcagcccatcaacctgtgtgacaagctcccgccggccacggcacttggcacagcctcctacccctcggatggctgcggtgccgacgggctg

SEQ ID NO: 714455 - DNA, 120 bp, Artificial Sequence
  ENSG00000197183_9 (sequence is synthesized)
cggagccgcgtcaaatacggggtgaagaccacccccgagtcccccccctacagctctgggagctacgattccatcaagaccgaggtcagcggctgccctgaggacctgacagtgggccgg

SEQ ID NO: 714456 - DNA, 120 bp, Artificial Sequence
  ENSG00000197183_10 (sequence is synthesized)
gccccgacggcagatgatgacgacgatgaccacgatgaccatgaggacaatgacaagatgaacgactctgaaggcatggaccctgagcgtcttaaggccttcaacatgtttgtgcgtctc

SEQ ID NO: 714457 - DNA, 120 bp, Artificial Sequence
  ENSG00000197183_11 (sequence is synthesized)
tttgtggacgagaacctggaccgcatggtgcccatctccaagcagcccaaggagaagatccaggccatcatcgagtcctgcagccggcagttccctgagttccaggagcgggcccgcaag

SEQ ID NO: 714458 - DNA, 120 bp, Artificial Sequence
  ENSG00000197183_12 (sequence is synthesized)
cgcatccgcacgtacctcaagtcctgccgtcgcatgaagaagaacggcatggagatgaccagacccacgccaccccatctgacctcggccatggcagaaaacatcctggcagctgcctgt

SEQ ID NO: 714459 - DNA, 120 bp, Artificial Sequence
  ENSG00000197183_13 (sequence is synthesized)
gagagcgagacaagaaaggcagccaagcggatgcgtctagagatctaccagtcctcacaggatgagcccatagccctggacaagcagcactcgcgggactccgcagccatcacccactcc

SEQ ID NO: 714460 - DNA, 120 bp, Artificial Sequence
  ENSG00000197183_14 (sequence is synthesized)
acctactcactgccagcctcctcctactcccaggaccctgtgtacgccaacggcggcctcaactacagttaccgcgggtacggggccttgagcagcaacctgcagccccctgcctccctc

SEQ ID NO: 714461 - DNA, 120 bp, Artificial Sequence
  ENSG00000197183_15 (sequence is synthesized)
caaacaggaaaccacagtaatgggcccacggacctcagcatgaaaggcggggcctctaccacctccaccacccccacgcccaccccctccagcaccagcaccagcaggcccgtgcccacc

SEQ ID NO: 714462 - DNA, 120 bp, Artificial Sequence
  ENSG00000197183_16 (sequence is synthesized)
gctcagctcagccccacggagatcagcgccgtgcggcagctcatcgcgggctaccgggagtctgctgccttcctgctgcgctctgcagatgaactggaaaacctcatcctacagcagaac

SEQ ID NO: 714463 - DNA, 120 bp, Artificial Sequence
  ENSG00000197183_17 (sequence is synthesized)
tgaccccaccggcacctggagcgcactgccctagggaaggaggctgtcccagcctggacctggcttcctgcctcaccagttggtacattttgtttttgaaagaggtgggatccaaaagag

SEQ ID NO: 714464 - DNA, 84 bp, Artificial Sequence
  ENSG00000197183_18 (sequence is synthesized)
tggtacattttgtttttgaaagaggtgggatccaaaagagctgtttctagccacactccaagcacctgagactttgggcacaag

SEQ ID NO: 714465 - DNA, 120 bp, Artificial Sequence
  ENSG00000197183_19 (sequence is synthesized)
cggggcagctctggaagggttgggggctcccctgacaaggcgctggggctgcagctctgtttagaatcaccttcgtggaccctgatgttagaatcccacccccagataattacctttcaa

SEQ ID NO: 714466 - DNA, 120 bp, Artificial Sequence
  ENSG00000197183_20 (sequence is synthesized)
gtcttaggtgagcagaattgcatatttattgagaaaagcaaagtggaccctttcttcctctccccttagtaatttatttttctgaaaatggattcttttgtgtttgtacagattgctagt

SEQ ID NO: 714467 - DNA, 120 bp, Artificial Sequence
  ENSG00000197183_21 (sequence is synthesized)
ctgtgtctgtctgatcagaaggatgtatccccatacctaacattccatatcactacactgatgtgggctggggccagtaggggcaggacaggtgccaggctggctgttcctctgcatgcc

SEQ ID NO: 714468 - DNA, 120 bp, Artificial Sequence
  ENSG00000197183_22 (sequence is synthesized)
tggtgcaccctgtggccgctagcccttggccaggccatcctgttgcagatcccagtgctgccacagggacaccaccaggcacctccctaggcaacgccaagcaggaggacctcacccaca

SEQ ID NO: 714469 - DNA, 120 bp, Artificial Sequence
  ENSG00000197183_23 (sequence is synthesized)
cccatggcaaagcaaaacaaaagaggcaccccgaccccattctacagaagccccagtccatggtcacctgtattctacctcacactccagcgtgggctttttccaggatgtgccctgagc

SEQ ID NO: 714470 - DNA, 120 bp, Artificial Sequence
  ENSG00000197183_24 (sequence is synthesized)
ctgttctgaacagctgtaaccccaactcccccacacaatgtgtctgcctgggaggtaagtaagtccagactgggtgtccaggagctggaacccagagagcgtcctgtccctaaccagcca

SEQ ID NO: 714471 - DNA, 120 bp, Artificial Sequence
  ENSG00000197183_25 (sequence is synthesized)
ctgcagccctccagctctggccctcagctgcttgacaggacggactgctgggagatggcagccggttggcagggcccttgccctcacaccccgctgcccaggagccaggtctgaacttct

SEQ ID NO: 714472 - DNA, 120 bp, Artificial Sequence
  ENSG00000197183_26 (sequence is synthesized)
gtgcacaggcctggcccctcagactcactcctgccaagaggggccacttcttcagggtgagccccggctatcaggcagccgtgagctccagggcgggctgcagctcccatccccttgcgc

SEQ ID NO: 714473 - DNA, 120 bp, Artificial Sequence
  ENSG00000197183_27 (sequence is synthesized)
atccctggagtgtgaaaaagggcaaaaagaaaaagctggcctggtttccttcctccctgattgattgattgataggcacttcctcttgctcagtgcaatacctaccagtgctgctaaacc

SEQ ID NO: 714474 - DNA, 120 bp, Artificial Sequence
  ENSG00000197183_28 (sequence is synthesized)
agggactcgcccagacctcagcaggcccccagggcctctccgtgcaacactccgtagccatgacagcagctctctgctgcccgcccctgcccagagctggcagaagccctctgttgcctt

SEQ ID NO: 714475 - DNA, 120 bp, Artificial Sequence
  ENSG00000197183_29 (sequence is synthesized)
tcctccctcagagcagagaggccccaggggagccagggccgagtggatcctaggatggccacggagagccactcgctcccagaacaggcaccccttcccaaaccagcttttctgcagcca

SEQ ID NO: 714476 - DNA, 120 bp, Artificial Sequence
  ENSG00000197183_30 (sequence is synthesized)
attgcctgttgcagctgtggccactgcctcccggcactgtggcagactccccccaaggagggatggggggggcaccagtgaggatgccccatcctgcctcaggtccagaactctgaaagg

SEQ ID NO: 714477 - DNA, 120 bp, Artificial Sequence
  ENSG00000197183_31 (sequence is synthesized)
tagggtgcccaccccgtgcttacttccggcccctagaggttgggggtggtcgttatctctcaagtggcctccaataccccatccagccacaccacctctgccttccatctgaccaatccc

SEQ ID NO: 714478 - DNA, 120 bp, Artificial Sequence
  ENSG00000197183_32 (sequence is synthesized)
caggcctctggtcagggccaggacacctgagactcacccttagcacagcacaacctccagtgcccaaggcctctcccacaccccagccatccacacatctggccccacctgctcagtact

SEQ ID NO: 714479 - DNA, 120 bp, Artificial Sequence
  ENSG00000197183_33 (sequence is synthesized)
actcaacatttgaattcgtgtaaatatttatttttgtgtgtgaacaatactacaaagtaatcagtaagatcttttgcaaaaatgttaccccaggcaattatttgtgaaaatcttaatgtt

SEQ ID NO: 714480 - DNA, 120 bp, Artificial Sequence
  ENSG00000197183_34 (sequence is synthesized)
aaaacctggcagagacaatcgccaccctagaattcctggtatcagttacttaacgtgtcacttctcctcccagaggcagtacccaagctagacatgaaccgtttgcatttcttggcagac

SEQ ID NO: 714481 - DNA, 120 bp, Artificial Sequence
  ENSG00000197183_35 (sequence is synthesized)
aggagtgagaaagactggggaaggggctccctccccctacccacacaaggattagatctaaagatcagcataagctacagtttgaagtcatgtttttctgagttcaagctgttggaactg

SEQ ID NO: 714482 - DNA, 120 bp, Artificial Sequence
  ENSG00000197183_36 (sequence is synthesized)
accaccctccagcctgccttagtactgcggcaagagcgtaggttcaatgtgttttcaagagaaaggaaagaatatgttgttaaagtccattgggcctcccaggcccctccaggacaatgg

SEQ ID NO: 714483 - DNA, 120 bp, Artificial Sequence
  ENSG00000197183_37 (sequence is synthesized)
atttcatcatgtcgaccccacctcttgggtgggctcctcctttccagtgaaactacacctgaagccctagagatggcagaatcaggagcaagtttctgcatggaaacaggattccattta

SEQ ID NO: 714484 - DNA, 120 bp, Artificial Sequence
  ENSG00000197183_38 (sequence is synthesized)
gctggctcagtcagggaacttgttttgcttttgttttaaaagatgcagcttcaaccccttccccctactcccgacttggagggcaccaaagagctggttctgatgaactaagctcactgc

SEQ ID NO: 714485 - DNA, 120 bp, Artificial Sequence
  ENSG00000197183_39 (sequence is synthesized)
tgtctcaccctcaccagagggactgccttctcccaaaaggagctcccaaagcccttgtcccacagccatttaaaaatcttctgaagggcctcagggcacaaagtgatcatttgggatcct

SEQ ID NO: 714486 - DNA, 120 bp, Artificial Sequence
  ENSG00000197183_40 (sequence is synthesized)
aagttaaaaaggaaatgcaagagtaggatactccaattccagagtctttgcaggaggctaatcccacaagaagggtagcatcagagaagtgggcattggtcttagtggtggatcatcagg

SEQ ID NO: 714487 - DNA, 120 bp, Artificial Sequence
  ENSG00000197183_41 (sequence is synthesized)
tagacaagtgatagtgtgtgtaacccatctgaaattcattttaccgtcaccactcttacaaaggacagtttattcccaaggacagtgctgacggggagggggacaggcagggagttagga

SEQ ID NO: 714488 - DNA, 120 bp, Artificial Sequence
  ENSG00000197183_42 (sequence is synthesized)
gggttttcgaggatttcaaacaggtggaacccatccatccctattcccaagggccacttacaactctaagggtggttacaggattaactaccagttcattttcaaaatgctgctttgaac

SEQ ID NO: 714489 - DNA, 120 bp, Artificial Sequence
  ENSG00000197183_43 (sequence is synthesized)
tcagagggttgatacttttaatttgtaattttttgtaaaactttttacaaaatagtaaagtatttcaccagaataccagtttcaatccgtccatggtctgatttttatataatttagtgg

SEQ ID NO: 714490 - DNA, 120 bp, Artificial Sequence
  ENSG00000197183_44 (sequence is synthesized)
tgctttagaaactttgtttttgttgtttctgagctaaacagctcaatcctttttcgcctgtatctacctaagaccaatgtgaacctttgtatttttgctcctaattttggactcagtgaa

SEQ ID NO: 714491 - DNA, 120 bp, Artificial Sequence
  ENSG00000197183_45 (sequence is synthesized)
agtgtactgtttacatgtacagatgcccccagtccctgtgtgttctgcaagacttgctcttgaggaggaagatgcacctcactaagctcatctgcttagcaaagccacaaacaaaaacct

SEQ ID NO: 714492 - DNA, 120 bp, Artificial Sequence
  ENSG00000197183_46 (sequence is synthesized)
ctcactttttacctacgtttccacctaaaaatacaacaaaaaacctataccacgtagaactcagattggctgaaaaacactttccacctggtagatggcccatatgcctcaattatgtgg

SEQ ID NO: 714493 - DNA, 120 bp, Artificial Sequence
  ENSG00000197183_47 (sequence is synthesized)
tccatttaggagcaggagtcagaagagagacctcttattggctgctggtgggtaactgcatggacagaggaaaagggaaggcaggactttgctgcagagctgtgggatgaatgtagttct

SEQ ID NO: 714494 - DNA, 120 bp, Artificial Sequence
  ENSG00000197183_48 (sequence is synthesized)
tccctgggcagcctgggagtgggaaggtcagaatgactcatgttgccttcaggatcaagccatccaggatttagggacaacccaagaggtctttagtcctctggcataatttagacatgt

SEQ ID NO: 714495 - DNA, 120 bp, Artificial Sequence
  ENSG00000197183_49 (sequence is synthesized)
tttggaagagcatgagttccatatctgagatgagatttaagactttcagtgcagatagtacaagccatttcttcagggttcctctgggggcagctccttcatgaggtcccacctccgggg

SEQ ID NO: 714496 - DNA, 120 bp, Artificial Sequence
  ENSG00000197183_50 (sequence is synthesized)
aggggcacagggctccagatagtaagcacttaaggcaaacagtggatggcaccaacttttaaaggtgactctattaatggcttcacctctaaattatatttttacagatatgcacctatg

SEQ ID NO: 714497 - DNA, 120 bp, Artificial Sequence
  ENSG00000197183_51 (sequence is synthesized)
caacttaacgtggctcttctaagcaggtgaggacttcctcctcaatgctctctataaaaattatttgtgttctatatagtgagttttaccagtaaatgtggcttaatattttaattctta

SEQ ID NO: 714498 - DNA, 120 bp, Artificial Sequence
  ENSG00000197183_52 (sequence is synthesized)
gaatgtgtcttctctacgtgatgtgactaaattctgttttgtttgtggaatgactagcacaggccgactccctctctccctcacttaacaaaagaccaatgagctgttaatcgagctgtt

SEQ ID NO: 714499 - DNA, 120 bp, Artificial Sequence
  ENSG00000197183_53 (sequence is synthesized)
atctccatggtattacttgctaaatgcactgatttcataagtatgtggaatccttttccttttgaatctgtatatcatatataagactgaatctacttaataaacactgaacaacaaacc

SEQ ID NO: 714500 - DNA, 120 bp, Artificial Sequence
  ENSG00000197183_54 (sequence is synthesized)
ccctgggtggggcccgcacctggggctctccgctcgttagcgcgcccagggcgcctcctcggcccgagagggacccgcccgcggggcctggctggctcagggctacctccttccgcctag

SEQ ID NO: 714501 - DNA, 120 bp, Artificial Sequence
  ENSG00000197183_55 (sequence is synthesized)
tggctcagggctacctccttccgcctaggacccccccttcggtgactcccgattccctgtcctaggctgcggtgccccgggaggcgggtcgccagagtagcagacagagctctttaatgg

SEQ ID NO: 714502 - DNA, 120 bp, Artificial Sequence
  ENSG00000197183_56 (sequence is synthesized)
gtgtcttctagggcgggtgctgtttgtgcatcatttgggttcccacacacttcctatgaggtggcgaaagccattatgcctatggtgtctgctcacacagggggaaactgaggcccaggc

SEQ ID NO: 714503 - DNA, 120 bp, Artificial Sequence
  ENSG00000197183_57 (sequence is synthesized)
aggacagccccttgcctggggtgggggctgggttgtccttaggcctgtgacttcacctctacagcaccctcctgtggaccctctccctgcccccgccaggccagagtcctgcagccaggc

SEQ ID NO: 714504 - DNA, 120 bp, Artificial Sequence
  ENSG00000197183_58 (sequence is synthesized)
ccagaccctggcctgtccgtccggggatgctggacagtactcctccctccagccctcataagtcattgtcattcggatctgcatttccccagcccctctccttctaactggggggcactg

SEQ ID NO: 714505 - DNA, 120 bp, Artificial Sequence
  ENSG00000197183_59 (sequence is synthesized)
tggcccactgtgcccctttctcttcccattccttccccctacacccattccagacatcccagagttaacaaaacccaaaagaaagagaaaaaagactcagagctgcttggaggagatgac

SEQ ID NO: 714506 - DNA, 120 bp, Artificial Sequence
  ENSG00000197183_60 (sequence is synthesized)
atcctcaaatgtagcgccgttgtttgaggggctggtcccaggcacctttctctgtggcctggggtgtgcgttttggtccccagcgtgatttgaaagaagatggaggttcagcgaagcaga

SEQ ID NO: 714507 - DNA, 120 bp, Artificial Sequence
  ENSG00000197183_61 (sequence is synthesized)
aaggaggtcttggaatatgtgaggcctgttccagatggcaggtgcgactcggtggtggcggtggcggcggcagctacgcgctaacagttggagattgtgcacaagggtggagaagagtta

SEQ ID NO: 714508 - DNA, 120 bp, Artificial Sequence
  ENSG00000197183_62 (sequence is synthesized)
tccctggctcaatcatggagacattctgatcagcagttctcaaaatctgtcttgcatcagaatcatctgggggggcctgttaaaacccccagcacatcagatttgggttctccttgaagg

SEQ ID NO: 714509 - DNA, 120 bp, Artificial Sequence
  ENSG00000197183_63 (sequence is synthesized)
ccacgtagacatcctggcgttcttcccctagggtgtagcacacatggaatccaggtggccctagctcaccagaggacagttcaagggggcagatggcctgtcggagccagagggcatctc

SEQ ID NO: 714510 - DNA, 120 bp, Artificial Sequence
  ENSG00000197183_64 (sequence is synthesized)
aatgatttcagttttaggggaagatctaggtgtgtgacgtctaattcattagccaaggacggctactgagccttggaaaaggctagtgcagacaggtgtgcaatacacgctgcgtctcag

SEQ ID NO: 714511 - DNA, 120 bp, Artificial Sequence
  ENSG00000197183_65 (sequence is synthesized)
cggctccgtaggaaagaagaaggtgaaatatctcagctctgataacacggtatcaattatttgttgaaatggtactattttggatatattgggttaaataaagtagattattaaaattga

SEQ ID NO: 714512 - DNA, 120 bp, Artificial Sequence
  ENSG00000197183_66 (sequence is synthesized)
ctgttatcaccgtgctcatctgtgcccatgaagaatgaagcacaaaaccgcacaaacagccggaagcacagccccctggttttgtttcatacagaatggcactaaatccaggtcaccact

SEQ ID NO: 714513 - DNA, 80 bp, Artificial Sequence
  ENSG00000197183_67 (sequence is synthesized)
ccgggcagtgacgcgccgcggtggtgccagcccctctccccgggcagccgcggcggcagcagcagcagcagcagctggag

SEQ ID NO: 714514 - DNA, 120 bp, Artificial Sequence
  ENSG00000197183_68 (sequence is synthesized)
cagcagcagcagcagcagctggagctgtggggctgtcaccgccgcccgccccgctcactcgcggatcccgaccgcccatctccgcctcgcttccagcccaggatgagacttctgtgagca

SEQ ID NO: 714515 - DNA, 120 bp, Artificial Sequence
  ENSG00000197183_69 (sequence is synthesized)
tcaaatacggggtgaagaccacccccgaggtcctggtgttggcctctgctgaggaaacagctgacaccctcctaagcgctcagcagccccgggaaccagtcccccccctacagctctggg

SEQ ID NO: 714516 - DNA, 120 bp, Artificial Sequence
  ENSG00000197183_70 (sequence is synthesized)
gccccattgcagagtgaggatggacagttcccgcgtttggaaacacatttcctggatgaacttaagagctgtggccactagttcgttctaaaaatcattattgggcaccagcatgtgtgg

SEQ ID NO: 714517 - DNA, 120 bp, Artificial Sequence
  ENSG00000197183_71 (sequence is synthesized)
ataaataaagcctcccacctgccccacatcaccaaggatgagaagatccagtaaactggggagagtgaattggtttgaaaacacatttgatttcaggaataaaaggtgcaaatgagtaaa

SEQ ID NO: 714518 - DNA, 80 bp, Artificial Sequence
  ENSG00000197183_72 (sequence is synthesized)
atccagcagcctcgccggagccacaccgcgggacagacgcggccgcggcgcgtcccggcccggtccagcccagcccagcc

SEQ ID NO: 714519 - DNA, 120 bp, Artificial Sequence
  ENSG00000197183_73 (sequence is synthesized)
tggatgtaccataatttacttatccagtcccctgttaatggacatttggattgtttatgatattctgctctcgcaagacttcagtgaacatccctgaatatggatggccatttcaagcat

SEQ ID NO: 714520 - DNA, 120 bp, Artificial Sequence
  ENSG00000197183_74 (sequence is synthesized)
gggcgagtttataccaaggagttgaattgctgcgtctgagggcatgtgcttttggagatgatacagactgccctccacagacagggaaccaattttcactcccggcaataatgtctagaa

SEQ ID NO: 714521 - DNA, 120 bp, Artificial Sequence
  ENSG00000197183_75 (sequence is synthesized)
cgtgagccattcgtgtgatgaccgaggttactgtatattgagcattcagtgtatgctggcactgtgcatcccctcgtaatgaccctgaagatcagaattaaaatccccactttacagaga

SEQ ID NO: 714522 - DNA, 72 bp, Artificial Sequence
  ENSG00000197191_0 (sequence is synthesized)
cgcaagcagaaagcctccaagagccaatggctctcaagcatcttggtctctgctaagaagaggctcagaggc

SEQ ID NO: 714523 - DNA, 120 bp, Artificial Sequence
  ENSG00000197191_1 (sequence is synthesized)
ctcaagcatcttggtctctgctaagaagaggctcagaggcttagaagccctgcctcgccggggctttgaggtgtgtgagcaatggctggggactgcaggcccgggaatctgagggcctca

SEQ ID NO: 714524 - DNA, 120 bp, Artificial Sequence
  ENSG00000197191_2 (sequence is synthesized)
ccccacttcctttccagagccgtgacctcaggctcacctcctgccctcctctcaggcaagctgcagatgccctttagggcccaggccatgccccggatgtgaggggctgagtcactggtt

SEQ ID NO: 714525 - DNA, 120 bp, Artificial Sequence
  ENSG00000197191_3 (sequence is synthesized)
tggcagtgcccctcagagcccaggcctgggctgccacccacctgaggacgagggctgggccagctgtcgtgctccagttgctggggcctcttgggatcttgggaaccccatctctgagcc

SEQ ID NO: 714526 - DNA, 120 bp, Artificial Sequence
  ENSG00000197191_4 (sequence is synthesized)
ccgccccatggccccgcccctcccaaggagggaaaaggcggctgccagtcgctcaactcaggcactgggacctagagctcagaagaccgagaggacagactgccgtgttgccaccacagg

SEQ ID NO: 714527 - DNA, 120 bp, Artificial Sequence
  ENSG00000197191_5 (sequence is synthesized)
agaggtggcttccacctgttcctcatcctcggagatgcagcccctgccagtggggccctgtgccccagagccaacccacctcttgcagccgaccgaggtcccagggcccaagggcgccaa

SEQ ID NO: 714528 - DNA, 120 bp, Artificial Sequence
  ENSG00000197191_6 (sequence is synthesized)
gggtaaccagggggctgcccccatccagaaccagcaggcctggcagcagcctggcaacccctacagcagcagtcagcgccaggccggactgacctacgctggccctccgcccgcggggcg

SEQ ID NO: 714529 - DNA, 120 bp, Artificial Sequence
  ENSG00000197191_7 (sequence is synthesized)
cggggatgacatcgcccaccactgctgctgctgcccctgctgccactgctgccactgcccccccttctgccgctgccacagctgctgctgctgtgtcatctcctagcccagcccaccctg

SEQ ID NO: 714530 - DNA, 120 bp, Artificial Sequence
  ENSG00000197191_8 (sequence is synthesized)
ccagggccaggacccagacttcagcaaatgtggctcacacagtgccgggacatgccgggacatgcggggtggctgttgtcatgggcgtctgccccttcacaccaggcactggggctcaga

SEQ ID NO: 714531 - DNA, 120 bp, Artificial Sequence
  ENSG00000197191_9 (sequence is synthesized)
cccaccaggaaggtggccgttcagcccgagctcctgaaacggaatcccaggtcctggctggagagggacacccctgattaccttaaggcccaggcaataaagcagggtgatcttcctccc

SEQ ID NO: 714532 - DNA, 120 bp, Artificial Sequence
  ENSG00000197208_0 (sequence is synthesized)
aagtgtacagtggcatcaagctcagcgcgagctcccgggaacgctccaacgccttcagcctgtttcccaggaacggtccccggcttcgcgccccaatttctaacagcctgcctgtccccc

SEQ ID NO: 714533 - DNA, 120 bp, Artificial Sequence
  ENSG00000197208_1 (sequence is synthesized)
gggaacgttctaacatccttggggagcgccccagctacaagacactgtcctgagaacgctgtcatcacccgtagttgcaagtttcggagcggcagtgggaagcatgcgggactacgacga

SEQ ID NO: 714534 - DNA, 120 bp, Artificial Sequence
  ENSG00000197208_2 (sequence is synthesized)
ggtgatcgccttcctgggcgagtgggggcccttccagcgcctcatcttcttcctgctcagcgccagcatcatccccaatggcttcaatggtatgtcagtcgtgttcctggcggggacccc

SEQ ID NO: 714535 - DNA, 120 bp, Artificial Sequence
  ENSG00000197208_3 (sequence is synthesized)
ggagcaccgctgtcgagtgccggacgccgcgaacctgagcagcgcctggcgcaacaacagtgtcccgctgcggctgcgggacggccgcgaggtgccccacagctgcagccgctaccggct

SEQ ID NO: 714536 - DNA, 120 bp, Artificial Sequence
  ENSG00000197208_4 (sequence is synthesized)
cgccaccatcgccaacttctcggcgctcgggctggagccggggcgcgacgtggacctggggcagctggagcaggagagctgcctggatggctgggagttcagccaggacgtctacctgtc

SEQ ID NO: 714537 - DNA, 120 bp, Artificial Sequence
  ENSG00000197208_5 (sequence is synthesized)
caccgtcgtgaccgagtggaatctggtgtgtgaggacaactggaaggtgcccctcaccacctccctgttcttcgtaggcgtgctcctcggctccttcgtgtccgggcagctgtcagacag

SEQ ID NO: 714538 - DNA, 120 bp, Artificial Sequence
  ENSG00000197208_6 (sequence is synthesized)
gtttggcaggaagaacgttctcttcgcaaccatggctgtacagactggcttcagcttcctgcagattttctccatcagctgggagatgttcactgtgttatttgtcatcgtgggcatggg

SEQ ID NO: 714539 - DNA, 120 bp, Artificial Sequence
  ENSG00000197208_7 (sequence is synthesized)
ccagatctccaactatgtggtagccttcatactaggaacagaaattcttggcaagtcagttcgtattatattctctacattaggagtgtgcacattttttgcagttggctatatgctgct

SEQ ID NO: 714540 - DNA, 120 bp, Artificial Sequence
  ENSG00000197208_8 (sequence is synthesized)
gccactgtttgcttacttcatcagagactggcggatgctgctgctggcgctgacggtgccgggagtgctgtgtgtcccgctgtggtggttcattcctgaatctccccgatggctgatatc

SEQ ID NO: 714541 - DNA, 120 bp, Artificial Sequence
  ENSG00000197208_9 (sequence is synthesized)
tgatatttgattctgtggaggagctaaatcccctgaagcagcagaaagctttcattctggacctgttcaggactcggaatattgccataatgaccattatgtctttgctgctatggatgc

SEQ ID NO: 714542 - DNA, 120 bp, Artificial Sequence
  ENSG00000197208_10 (sequence is synthesized)
tgacctcagtgggttactttgctctgtctctggatgctcctaatttacatggagatgcctacctgaactgtttcctctctgccttgattgaaattccagcttacattacagcctggctgc

SEQ ID NO: 714543 - DNA, 120 bp, Artificial Sequence
  ENSG00000197208_11 (sequence is synthesized)
tattgcgaaccctgcccaggcgttatatcatagctgcagtactgttctggggaggaggtgtgcttctcttcattcaactggtacctgtggattattacttcttatccattggtctggtca

SEQ ID NO: 714544 - DNA, 120 bp, Artificial Sequence
  ENSG00000197208_12 (sequence is synthesized)
tgctgggaaaatttgggatcacctctgctttctccatgctgtatgtcttcactgctgagctctacccaaccctggtcaggaacatggcggtgggggtcacatccacggcctccagagtgg

SEQ ID NO: 714545 - DNA, 120 bp, Artificial Sequence
  ENSG00000197208_13 (sequence is synthesized)
gcagcatcattgccccctactttgtttacctcggtgcttacaacagaatgctgccctacatcgtcatgggtagtctgactgtcctgattggaatcctcaccctttttttccctgaaagtt

SEQ ID NO: 714546 - DNA, 120 bp, Artificial Sequence
  ENSG00000197208_14 (sequence is synthesized)
tgggaatgactcttccagaaaccttagagcagatgcagaaagtgaaatggttcagatctgggaaaaaaacaagagactcaatggagacagaagaaaatcccaaggttctaataactgcat

SEQ ID NO: 714547 - DNA, 120 bp, Artificial Sequence
  ENSG00000197208_15 (sequence is synthesized)
tctgaaaaaatatctaccccatttggtgaagtgaaaaacagaaaaataagaccctgtggagaaattcgttgttcccactgaaatggactgactgtaacgattgacaccaaaatgaacctt

SEQ ID NO: 714548 - DNA, 120 bp, Artificial Sequence
  ENSG00000197208_16 (sequence is synthesized)
gctatcaagaaatgctcgtcatacagtaaactctggatgattcttccagataatgtccttgctttacaaaccaaccatttctagagagtctccttactcattaattcaatgaaatggatt

SEQ ID NO: 714549 - DNA, 120 bp, Artificial Sequence
  ENSG00000197208_17 (sequence is synthesized)
ggtaagatgtcttgaaaacatgttagtcaaggactggtaaaatacatataaagattaacactcatttccaatcatacaaatactatccaaataaaaataacatcattgtattaacgcaaa

SEQ ID NO: 714550 - DNA, 120 bp, Artificial Sequence
  ENSG00000197208_18 (sequence is synthesized)
acttgccccagacagaggccagcctgggaccagcactgacaagctgagtgctccccctgaacatttaccagtggtcttaccattttcctataaaagaaaatagctttcttctgaacatcc

SEQ ID NO: 714551 - DNA, 120 bp, Artificial Sequence
  ENSG00000197208_19 (sequence is synthesized)
catccttgcaggttcattcctgaatctccccgatggctgatatcccagagaagatttagagaggctgaagatatcatccaaaaagctgcaaaaatgaacaacatagctgtaccagcagtg

SEQ ID NO: 714552 - DNA, 120 bp, Artificial Sequence
  ENSG00000197208_20 (sequence is synthesized)
tccctggccacagacttctggaggcatcaggaggtgtactgccgtaccatatacttgtgaggtttggggtcctttcctgaggccccagtttctctaagacagcagatggcctcctgaggc

SEQ ID NO: 714553 - DNA, 120 bp, Artificial Sequence
  ENSG00000197208_21 (sequence is synthesized)
ccttcatactaggccacttctctatagcatgggcagatccccaacaaaaggcagagccattgccattggtcacatctccgccccaggtgtagtgaaccaagggcagactctgtggaaagg

SEQ ID NO: 714554 - DNA, 120 bp, Artificial Sequence
  ENSG00000197213_0 (sequence is synthesized)
atggctgcaaattggacactctcatggggtcagggaggaccctgcaacagccctgggtcagacactccacggtctgtggcgtccccagaaactcaacttggaaatcacgacaggaaccct

SEQ ID NO: 714555 - DNA, 120 bp, Artificial Sequence
  ENSG00000197213_1 (sequence is synthesized)
gagacttggcacatgaatttcaggatgttcagctgcccagaggagtcggaccccatccaggctctgaggaaactcactgagctgtgccatctgtggctgaggcccgacctccacaccaaa

SEQ ID NO: 714556 - DNA, 120 bp, Artificial Sequence
  ENSG00000197213_2 (sequence is synthesized)
gagcagatcctggacatgctggtgatggagcagttcatgatctccatgccccaggagctccaggtcttagtcaaggtgaacggtgtgcagagctgcaaagacctggaggacctgctacga

SEQ ID NO: 714557 - DNA, 120 bp, Artificial Sequence
  ENSG00000197213_3 (sequence is synthesized)
aataacagaagacccaagaaatggtctatagtcaacttgctcggcaaagaatatcttatgctgaactcagatgtcgagatggctgaagcccccgccagtgtcagagatgatccgagagac

SEQ ID NO: 714558 - DNA, 120 bp, Artificial Sequence
  ENSG00000197213_4 (sequence is synthesized)
gtgtccagccagtgggcctcctctgtgaaccagatgcatccggggacaggccaggcccgccgagagcagcagatcctgcccagggtcgctgcactgtccaggaggcagggagaggacttt

SEQ ID NO: 714559 - DNA, 120 bp, Artificial Sequence
  ENSG00000197213_5 (sequence is synthesized)
ctgctacacaagagtattgacgtaacaggtgacccaaactctccgagacccaagcagaccttggagaaggatctgaaggaaaacagggaagagaacccaggactgtcatccccagagcct

SEQ ID NO: 714560 - DNA, 120 bp, Artificial Sequence
  ENSG00000197213_6 (sequence is synthesized)
gtggaaaatgtggatgctgacacaccttctgcctgcgttgtggagagagaagctttgactcacagcgggaacagaggagatgctctgaatctgagcagtcccaaaagaagcaaaccagat

SEQ ID NO: 714561 - DNA, 120 bp, Artificial Sequence
  ENSG00000197213_7 (sequence is synthesized)
gcctcctccatttcccaagaagagcctcaaggagaagccacacctgtgggcaacagagaatccccaggacaagctgagatcaatccagttcattccccaggccctgcgggcccggtcagt

SEQ ID NO: 714562 - DNA, 120 bp, Artificial Sequence
  ENSG00000197213_8 (sequence is synthesized)
cacccagatggccaagaagccaaggccctgccgccctttgcatgtgacgtgtgcaataaatcatttaagtatttttcccagctaagcatccacaggaggtcacacacaggagacagaccc

SEQ ID NO: 714563 - DNA, 120 bp, Artificial Sequence
  ENSG00000197213_9 (sequence is synthesized)
tttcaatgtgatctctgtcggaagcgcttcttgcagccctcagacctccgagttcaccagcgagtccacactggcgagaggccctacatgtgtgacgtctgccaaaagcggttcgcccac

SEQ ID NO: 714564 - DNA, 120 bp, Artificial Sequence
  ENSG00000197213_10 (sequence is synthesized)
gagtccaccttacagggccacaagaggatccacaccggggagaggccgtttaaatgtaaatactgcagcaaagttttcagccacaaggggaacctgaacgttcaccagcgcacccactcc

SEQ ID NO: 714565 - DNA, 120 bp, Artificial Sequence
  ENSG00000197213_11 (sequence is synthesized)
ggagagaagccctacaaatgtcccacctgtcaaaaggccttccgtcagctggggacattcaagcgtcacctgaaaacacaccgggaaaccacctcccagtgattccagagtcaggtccac

SEQ ID NO: 714566 - DNA, 120 bp, Artificial Sequence
  ENSG00000197213_12 (sequence is synthesized)
atcctccaccccaagagacagtgaatgatggtttttctccaatgttaccagatgacatatacacataaagcacttggtaggaattgcccggatgtttgaataaatatttatcctccccca

SEQ ID NO: 714567 - DNA, 120 bp, Artificial Sequence
  ENSG00000197213_13 (sequence is synthesized)
tgggaaatgtaatcaacgccgattacgaaaatggactctgtggccctaaaccaatcacggcgcggcgcagggaaccggaaacgcggcctggagtcccgcttctccataaatagacgcagt

SEQ ID NO: 714568 - DNA, 120 bp, Artificial Sequence
  ENSG00000197213_14 (sequence is synthesized)
tcagctccaggccggttggagagcgcatcccagaccgagaaggtcggaggcagaagccgggaaggagacttctgaacaaactgtgaatatattactgagaagaaacaggggcagcctgtg

SEQ ID NO: 714569 - DNA, 120 bp, Artificial Sequence
  ENSG00000197217_0 (sequence is synthesized)
aggaaaggagcgcggcctccaggaagccggctggccgtgatgctgcccactggtggtcccccgctcccggggtccccggccggccaagcaggagggctctaactccgtgaggaccccagc

SEQ ID NO: 714570 - DNA, 120 bp, Artificial Sequence
  ENSG00000197217_1 (sequence is synthesized)
attatttctataattgtttgtgagaaggactgaatcccagagcattgccttgttgctgacctttcagtatggggaggattggcatctcctgtctttttcctgcttcttggcattttagca

SEQ ID NO: 714571 - DNA, 120 bp, Artificial Sequence
  ENSG00000197217_2 (sequence is synthesized)
tatctccagtagggtgtcctcgaattctgaataccaatttacgccaaattatggtcattagtgtcctggctgctgctgtttcacttttatatttttctgttgtcataatccgaaataagt

SEQ ID NO: 714572 - DNA, 120 bp, Artificial Sequence
  ENSG00000197217_3 (sequence is synthesized)
atgggcgactaaccagagacaagaaatttcaaaggtacctggcacgagttaccgacattgaagctacagacaccaataaccccaatgtgaactatgggatcgtggtggactgtggtagca

SEQ ID NO: 714573 - DNA, 120 bp, Artificial Sequence
  ENSG00000197217_4 (sequence is synthesized)
gtgggtctcgagtatttgtttactgctggccaaggcataatggcaatccacatgatctgttggatatcaggcaaatgagggataaaaaccgaaagccagtggtcatgaagataaaaccgg

SEQ ID NO: 714574 - DNA, 120 bp, Artificial Sequence
  ENSG00000197217_5 (sequence is synthesized)
gcatttcagaatttgctacctctccagagaaagtcagtgattacatttctccacttttgaactttgctgcagagcatgtgccacgggcaaaacacaaagagacacctctctacattctct

SEQ ID NO: 714575 - DNA, 120 bp, Artificial Sequence
  ENSG00000197217_6 (sequence is synthesized)
gcacggctggaatgagaatcctccccgaaagccagcagaaagctattctggaagaccttctgaccgatatccccgtgcactttgactttctgttttctgactctcatgcagaagtaattt

SEQ ID NO: 714576 - DNA, 120 bp, Artificial Sequence
  ENSG00000197217_7 (sequence is synthesized)
ctgggaaacaagaaggtgtgtatgcttggattggcattaattttgtccttggacgatttgagcatattgaagatgatgatgaggccgttgtggaagttaacattcctggaagtgaaagca

SEQ ID NO: 714577 - DNA, 120 bp, Artificial Sequence
  ENSG00000197217_8 (sequence is synthesized)
gcgaagccattgtccgtaaaaggacagcgggcattctcgacatgggcggcgtgtcgactcagatagcgtacgaagtccccaaaactgtaagctttgcgtcctcacagcaggaagaagtag

SEQ ID NO: 714578 - DNA, 120 bp, Artificial Sequence
  ENSG00000197217_9 (sequence is synthesized)
ctaaaaacttgttagctgaatttaacttgggatgtgatgttcaccaaactgagcatgtgtatcgagtctatgtggccacgtttcttgggtttggtggcaatgctgctcgacagagatacg

SEQ ID NO: 714579 - DNA, 120 bp, Artificial Sequence
  ENSG00000197217_10 (sequence is synthesized)
aagacagaatatttgccaacaccattcaaaagaacaggctcctgggtaaacagactggtctgactcctgatatgccgtacttggacccctgcctacccctagacattaaagatgaaatcc

SEQ ID NO: 714580 - DNA, 120 bp, Artificial Sequence
  ENSG00000197217_11 (sequence is synthesized)
agcaaaatggacaaaccatatacctacgagggactggagactttgacctgtgtcgagagactatccagcctttcatgaataaaacaaacgagacccagacttccctcaatggggtctacc

SEQ ID NO: 714581 - DNA, 120 bp, Artificial Sequence
  ENSG00000197217_12 (sequence is synthesized)
agcccccaattcacttccagaacagtgaattctatggcttctccgaattctactactgcaccgaggatgtgttacgaatggggggagactacaatgctgctaaatttactaaagctgcaa

SEQ ID NO: 714582 - DNA, 120 bp, Artificial Sequence
  ENSG00000197217_13 (sequence is synthesized)
aggattattgtgcaacaaagtggtccattttgcgggaacgctttgaccgaggactgtacgcctctcatgctgacctccacaggcttaagtatcagtgcttcaaatcggcctggatgtttg

SEQ ID NO: 714583 - DNA, 120 bp, Artificial Sequence
  ENSG00000197217_14 (sequence is synthesized)
aggtgtttcataggggcttttcgtttcctgtcaactataaaagcttaaagactgccttgcaagtttacgacaaggaggttcagtggacccttggagccatcctctacaggacccgctttc

SEQ ID NO: 714584 - DNA, 120 bp, Artificial Sequence
  ENSG00000197217_15 (sequence is synthesized)
taccattaagagacatccagcaggaggccttccgagccagtcacacccactggcggggcgtttcctttgtctacaaccactacctgttctctggctgcttcctggtggtgctgctggcca

SEQ ID NO: 714585 - DNA, 120 bp, Artificial Sequence
  ENSG00000197217_16 (sequence is synthesized)
tcctgctgtacctgctgcggctgcggcgcatccacaggcgcactccccggagcagctcggccgccgccctctggatggaggagggccttcccgcccagaatgccccggggaccttgtgat

SEQ ID NO: 714586 - DNA, 120 bp, Artificial Sequence
  ENSG00000197217_17 (sequence is synthesized)
ccagctcacagctccacgaagactcaaaaggaaaagccatttttgcctcagggtttctcctctttattttcctgtggttttgttttttctttcccttttttgttcctccaaacaaaaaca

SEQ ID NO: 714587 - DNA, 120 bp, Artificial Sequence
  ENSG00000197217_18 (sequence is synthesized)
agtgagactccgtctcaaaaaaaaaaaatgcattgtttataagccctgctgtctagaagtattgcgtttagccattttgagtacagcattaaattgaggagtggggaagagggaaattca

SEQ ID NO: 714588 - DNA, 120 bp, Artificial Sequence
  ENSG00000197217_19 (sequence is synthesized)
ttaaattgaggagtggggaagagggaaattcacttgatttttgctgcacaggatatctgccaaaaataaatgagatttctggggtttctctaaggaatgttaaatttaaacacatgcact

SEQ ID NO: 714589 - DNA, 120 bp, Artificial Sequence
  ENSG00000197217_20 (sequence is synthesized)
ttgatactggagggaggtggaaagatgcattctgtcagtggagaggggactgaatagtgatgctttcatagaaccaaaaaacttactgcctgaaatgataatcctcttttttctctatct

SEQ ID NO: 714590 - DNA, 120 bp, Artificial Sequence
  ENSG00000197217_21 (sequence is synthesized)
tgaaagctctaacctgaagagggtgatttttttttttatttattgttcaggtctgttactgtatatgttttctttgcaaatttaaattttttaaaccatttatatccaaaacagagaaac

SEQ ID NO: 714591 - DNA, 120 bp, Artificial Sequence
  ENSG00000197217_22 (sequence is synthesized)
atcgactacagctttgtgcgagtgtgtgaaaaatcccaagaaaccagcgtgaggggaggcaatgctggttctttaaaaacacacacttcagaatttactggtacattttatttagaaaaa

SEQ ID NO: 714592 - DNA, 120 bp, Artificial Sequence
  ENSG00000197217_23 (sequence is synthesized)
tcctcgttactgttatcttttcctgaccgcaggtaattacgctccttattccatatttcagtggcattagaacactgtggttttgaaagaattggaaattcctagtttcaccagtttcgg

SEQ ID NO: 714593 - DNA, 120 bp, Artificial Sequence
  ENSG00000197217_24 (sequence is synthesized)
ttttattggaactagagcacatgcccacttcttgctcagtattcctcagtgtttctgcttaatcgtgcctcagtttcttccagcttccaattggtgtttcccccaccccccttaattaaa

SEQ ID NO: 714594 - DNA, 120 bp, Artificial Sequence
  ENSG00000197217_25 (sequence is synthesized)
agtcatctcagcttttaatcgtactgggagaccccatgcacagcctgccgagtcctcttcctaaccgcattgactgaggctgttgctggcagcaccactgtaaatccagaagggaagagt

SEQ ID NO: 714595 - DNA, 120 bp, Artificial Sequence
  ENSG00000197217_26 (sequence is synthesized)
ctgcatccaatacaggaaataaattcacattttgaaggaaaaaattcgacaatttaagccaaaatctaaaaaggacaattggattggcatatgtgagattggtgttttttcacctattta

SEQ ID NO: 714596 - DNA, 120 bp, Artificial Sequence
  ENSG00000197217_27 (sequence is synthesized)
tttagttgagaagtttggggaattctcgtacagtttttttaggtggagtttgttttgtgcgagtgtctgtgtgtgctgttccctaactccagaacagttaaattcctgtagttggtagca

SEQ ID NO: 714597 - DNA, 120 bp, Artificial Sequence
  ENSG00000197217_28 (sequence is synthesized)
gattagtacccagaagtggggttgttgctataacagataactgaggatattataaaagtggctttggaactaggtactgggcagaggctgggagagtttggagaaacaggagagaaaagg

SEQ ID NO: 714598 - DNA, 120 bp, Artificial Sequence
  ENSG00000197217_29 (sequence is synthesized)
cctgtattgccatgaactgagcattaggggcagttctgctgagggatcagaagagaagaccaagggaattctgtcccagttgtggctcaaactgcctcaggtgcagcttaacctgcgtct

SEQ ID NO: 714599 - DNA, 120 bp, Artificial Sequence
  ENSG00000197217_30 (sequence is synthesized)
ctggaaggtaaaatgcatctgatccttgaggcaagagctgtgggggcatggctccctcacctggatttcaaagcgtgttaccagcagcctggggacccaggctctgcctctggatttacc

SEQ ID NO: 714600 - DNA, 120 bp, Artificial Sequence
  ENSG00000197217_31 (sequence is synthesized)
tgcatcgtatttgcgcttcgtggtcaaagttgttaagaaaggggtgagcttctggctacctaataagttggtcttggccacctgcctgcgacacttcctggaggagccatggattattgg

SEQ ID NO: 714601 - DNA, 120 bp, Artificial Sequence
  ENSG00000197217_32 (sequence is synthesized)
tggaggctgcagggagctggcgatggagccactggtgtcagcagcagagagggaagaaaggaaaggaaggggccacaaatggttgaagtgggcaggtgggcacccagggagttaggggac

SEQ ID NO: 714602 - DNA, 120 bp, Artificial Sequence
  ENSG00000197217_33 (sequence is synthesized)
cccgccttccagctctgggcatagaagagttagtcacatacctgaggatcctgaaacaagggctgagaaaacctcattgctccagctgagaggtagtagtggatttgccatttttaaaca

SEQ ID NO: 714603 - DNA, 120 bp, Artificial Sequence
  ENSG00000197217_34 (sequence is synthesized)
gttgcctaagaaaaaacgttgaagaatatgcagcagacactatatgtggcctgtaaagcctagaatatttactaaaatatttacagaaaaagtttgctggtccttgtgagaacaatgcag

SEQ ID NO: 714604 - DNA, 120 bp, Artificial Sequence
  ENSG00000197217_35 (sequence is synthesized)
ttcaaaaaaggatacagacagaagcatcctcttaaatcaggaatgtagtttccatttgtgggcacgaaaagatggacaagagaagtaaccaaacttcaatcttaaaatatttgttgcacc

SEQ ID NO: 714605 - DNA, 120 bp, Artificial Sequence
  ENSG00000197217_36 (sequence is synthesized)
agaatttcacttcggatttttccgtctagattattttcaagatgagttttgaaacaaaccaagaaacctgcccctcacccaaaattgtttaaaaagagaccactcaagggagttcattat

SEQ ID NO: 714606 - DNA, 120 bp, Artificial Sequence
  ENSG00000197217_37 (sequence is synthesized)
gccgtatggagatgtctgcagtcgcagcaaatcacattccagagaaggtctcgcgtaggtgaagacagccaggtgctttctctaagagatacagggtgggtgagagacaagccagggagg

SEQ ID NO: 714607 - DNA, 120 bp, Artificial Sequence
  ENSG00000197217_38 (sequence is synthesized)
atcttaattcaagagaagaattcataccaagagctgaccaagaaggcagtaaattctgtgtacttgtagcagaagaaattggactaggaacttgcccaaagctttatcaaagaaaagcat

SEQ ID NO: 714608 - DNA, 120 bp, Artificial Sequence
  ENSG00000197217_39 (sequence is synthesized)
tgtgttcaatcttggtagaaacatgccagcaataagtgcttatgttccatagccatatcatgggcttctcacttttaaacctcctccaggggatgttctcagacatttcacaatccctct

SEQ ID NO: 714609 - DNA, 120 bp, Artificial Sequence
  ENSG00000197217_40 (sequence is synthesized)
ggggacattacagtagaagagaaacacatggaactgtaccagtgctttttgcccatgttcatcctaagctccggctttaggcagtgctttctgacctgggcggagtgaagacgctgctgg

SEQ ID NO: 714610 - DNA, 120 bp, Artificial Sequence
  ENSG00000197217_41 (sequence is synthesized)
tggctgaggccagtaacatggggcccctgcccagccaccctgaaggctgggtaggtccctcttttcaccaccagttttccacatctgtgtactctagattaacaaactctggataaacag

SEQ ID NO: 714611 - DNA, 120 bp, Artificial Sequence
  ENSG00000197217_42 (sequence is synthesized)
atatttacattttaaactcaggcctacacagagtagttttccttataaggagcatgtatcacttagcaagaaactaaaaatggcaaatgagtttttcatcctttaagaaaaaaatcagct

SEQ ID NO: 714612 - DNA, 120 bp, Artificial Sequence
  ENSG00000197217_43 (sequence is synthesized)
ttagaattctctgcggtcagttgtgtgcaatgcaacaaaactacctttcagtaaattacttagttatttatttcagtgttttgtttcttttgatactaagtttccctttcaataatgaat

SEQ ID NO: 714613 - DNA, 120 bp, Artificial Sequence
  ENSG00000197217_44 (sequence is synthesized)
gatgtgaccaaccaaggagaatttgtttgttctgtactaaaattatattttacagttaggaattataaaaagcaagggagcatctttaaatgttttttgtttaagcgatgtcttccatcc

SEQ ID NO: 714614 - DNA, 120 bp, Artificial Sequence
  ENSG00000197217_45 (sequence is synthesized)
aaagtaagaataatactctcggaaggtccttttggtgtcatgtcacttgctgtatgtggcagccttacagtgccacacttgggtactgaaaaatcaataaaacgaaagttcatcatccca

SEQ ID NO: 714615 - DNA, 120 bp, Artificial Sequence
  ENSG00000197217_46 (sequence is synthesized)
ggatgtgaagcaagtacatcaaccttgaaacgcgcgcagttggtttgggagagccggcctgaggaagcccctgccccaaggctgcccacagagggaaggattgtgtgtgtgtgtgtgtgt

SEQ ID NO: 714616 - DNA, 120 bp, Artificial Sequence
  ENSG00000197217_47 (sequence is synthesized)
taaatcagaattgtcatattgaattatgagtgatgcttagaagggtccttgggaagtgcagaagcagacatttttgtcccttttagatgagactatttttagacttttctttttagtagg

SEQ ID NO: 714617 - DNA, 120 bp, Artificial Sequence
  ENSG00000197217_48 (sequence is synthesized)
aggaaaggagcgcggcctccaggaagccggctggccgtgatgctgcccactggtggtcccccgctcccggggtccccggccggccaagcaggattggcatctcctgtctttttcctgctt

SEQ ID NO: 714618 - DNA, 120 bp, Artificial Sequence
  ENSG00000197217_49 (sequence is synthesized)
gccggccacggcagaattgtagggacagtgacgtttgcttttggtcttgccccctccccacaagtgcttcctcccttctcaccctaccatcccgtaatacacagcactcctgtcctactg

SEQ ID NO: 714619 - DNA, 120 bp, Artificial Sequence
  ENSG00000197217_50 (sequence is synthesized)
tatttgtttactgctggccaaggcataatggcaatccacatgatctgttggatatcaggcaaatgagggataaaaaccgaaagccagtggtcatgaagataaaaccggagcatgtgccac

SEQ ID NO: 714620 - DNA, 120 bp, Artificial Sequence
  ENSG00000197217_51 (sequence is synthesized)
ctctgctcgagaaaggggctcagcggcggcggaagcggagggggaccaccgtggagagcgcggtcccagcccggccactgcggatccctgaaaccaagaaaatagggatgctgataatac

SEQ ID NO: 714621 - DNA, 120 bp, Artificial Sequence
  ENSG00000197217_52 (sequence is synthesized)
cttgctcagggggttgtccaaagctgtgttgtgcagtatggcagccaccaccatatggggccaccaaacacttgcaatgtgctgcttggaattgagatgcgctgcaaacgcaaagtacgt

SEQ ID NO: 714622 - DNA, 120 bp, Artificial Sequence
  ENSG00000197217_53 (sequence is synthesized)
gctggatttcaaagacttagtacaaaaagaaaaaagaacgcaaaacatctcattaataatttttgtattgattccatattgaaatatattgcatcaaataaaatatatctttaacattga

SEQ ID NO: 714623 - DNA, 120 bp, Artificial Sequence
  ENSG00000197217_54 (sequence is synthesized)
ggactgaaacccatacctcttactccaggcccctcccctacaccactgctagcctgtccgtcctggaaccccaaaacaacatttgtcatctttggtggaatgaattagttattgatggtg

SEQ ID NO: 714624 - DNA, 120 bp, Artificial Sequence
  ENSG00000197223_0 (sequence is synthesized)
gggagactggagtcgaaggccgtgaggtatttttctaagtcagccataatggcaggtgaagaaattaatgaagactatccagtagaaattcacgagtatttgtcagcgtttgagaattcc

SEQ ID NO: 714625 - DNA, 120 bp, Artificial Sequence
  ENSG00000197223_1 (sequence is synthesized)
attggtgctgtggatgagatgctgaagaccatgatgtctgtttctagaaatgagttgttgcagaagttggatccacttgaacaagcaaaagtggatttggtttctgcatacacattaaat

SEQ ID NO: 714626 - DNA, 120 bp, Artificial Sequence
  ENSG00000197223_2 (sequence is synthesized)
tcaatgttttgggtttatttggcaacccaaggagttaatcctaaggaacatccagtaaaacaggaattggaaagaatcagagtatatatgaacagagtcaaggaaataacagacaagaaa

SEQ ID NO: 714627 - DNA, 120 bp, Artificial Sequence
  ENSG00000197223_3 (sequence is synthesized)
aaggctggcaagctggacagaggtgcagcttcaagatttgtaaaaaatgccctctgggaaccaaaatcgaaaaatgcatcaaaagttgccaataaaggaaaaagtaaaagttaacttttt

SEQ ID NO: 714628 - DNA, 120 bp, Artificial Sequence
  ENSG00000197223_4 (sequence is synthesized)
ggttttgatgtacacatattcaaaaagtacatcttcccccccccccccccccccgcaaaataattctgtggcagggcaaggtttaaatgtgtttcttattaatatgtaaattcacagtaa

SEQ ID NO: 714629 - DNA, 120 bp, Artificial Sequence
  ENSG00000197223_5 (sequence is synthesized)
atatgtaaagctaaatactttcctctccaaagatcattatctttattgattagcactgaggattttaacattgtgatatattatatatttataatttaccatctcttgatgagactctta

SEQ ID NO: 714630 - DNA, 120 bp, Artificial Sequence
  ENSG00000197223_6 (sequence is synthesized)
tttctttatataggtcagtcttgcaagtaccattttataagcagctgtgaaatttaagtgaaatgttctttgtaaacatttgtactattttaaatgaataatgaccttatgaagtatgct

SEQ ID NO: 714631 - DNA, 120 bp, Artificial Sequence
  ENSG00000197223_7 (sequence is synthesized)
atctgtaggctgaaattataggtacatctgttttcactatatgatattaagaaagcgtgaaatgacttaaatgttcatttttttctgtatagatactttatcatgttttcatgattttag

SEQ ID NO: 714632 - DNA, 120 bp, Artificial Sequence
  ENSG00000197223_8 (sequence is synthesized)
gaattactgctttgttgatattcaaagtgtgaaactaaaactttatggttgtactttaattcttggcatgttgcctctatgtcccatttaaaataaaatacattctcattaactttagat

SEQ ID NO: 714633 - DNA, 120 bp, Artificial Sequence
  ENSG00000197223_9 (sequence is synthesized)
gtataactgacctgtgtatttttatcttttgagtaaatttgccttccaaattaggaagataggttttagaagtcatcacaaatagagaaattcttgagtttttgttcctgatgcatggtg

SEQ ID NO: 714634 - DNA, 120 bp, Artificial Sequence
  ENSG00000197223_10 (sequence is synthesized)
tccacagttcttttcatctcattttttttcagattttttttatttcatgtttttgaggctgtatcaagtacatacaagtgttttggaacaacttcttaagttacctaatgccacttaagc

SEQ ID NO: 714635 - DNA, 120 bp, Artificial Sequence
  ENSG00000197223_11 (sequence is synthesized)
agatgagaagtccaaaggagattacactgtgtttgtattgtggtttatttttctggaatattagttacagagagtactacatagtaaacctttttttaaatgtctaagcccatgaatttt

SEQ ID NO: 714636 - DNA, 120 bp, Artificial Sequence
  ENSG00000197223_12 (sequence is synthesized)
aattatatgcccttaatgctttcagtgtttgaatccatatcattatgtgtaggaatgccaagtatagtaaagtactttaatttttgaaaaaggagttgttaaaattttctgtgtgattaa

SEQ ID NO: 714637 - DNA, 120 bp, Artificial Sequence
  ENSG00000197223_13 (sequence is synthesized)
ttctccataagtaaccttgaataaatggatttcttgatttatgatagcagatattggaaatggtcttaaaatgtaatggattttgtaaagcatgttgaactctttctatgacacatgaag

SEQ ID NO: 714638 - DNA, 120 bp, Artificial Sequence
  ENSG00000197223_14 (sequence is synthesized)
aggaagtcactgatagacgcagaaggtcttttctgtctctgatgtcagtttttgaagtggaagaacattagtgaacatttatagttattttactcctttttttgcctttgtctccaaatt

SEQ ID NO: 714639 - DNA, 120 bp, Artificial Sequence
  ENSG00000197223_15 (sequence is synthesized)
tctagctatttttaaaaataacctcttcatgagagaaatgtgttactgttaagatcaagtgtagtgtacctgtctttgtgttatttattgcaaagaaatttatttggatttctgtatatt

SEQ ID NO: 714640 - DNA, 120 bp, Artificial Sequence
  ENSG00000197223_16 (sequence is synthesized)
ttctaatttcataaaagaaaaacagcttaaatgaaaaatgttatacaattgcagaaaatcattattggttttagctaagttattggtttatgaaagtgcacctctacgttctgttaaatt

SEQ ID NO: 714641 - DNA, 120 bp, Artificial Sequence
  ENSG00000197223_17 (sequence is synthesized)
gtgtaacttttaagtgagtaattctttcattattaggtagaaataaaagtttgagtatattccattttattatgtataattttaaatacttagcacgtaataaggagctgaatggctgta

SEQ ID NO: 714642 - DNA, 120 bp, Artificial Sequence
  ENSG00000197223_18 (sequence is synthesized)
tcgtcatcgttgcccgaccgctttccgggagactggagtcgaaggccgtgagccagtgttttagaaggagtatgtggaagggcaaggagtacctatagaaccccggaggagggtgaggag

SEQ ID NO: 714643 - DNA, 120 bp, Artificial Sequence
  ENSG00000197223_19 (sequence is synthesized)
agtatgggaagatttgtggattctgaaaagccatttggttttctgtatgtactggatgtgcgtatgtgtgtgtgtgtgtatttgtgtagactaatttccctagatgatctgagccaaaaa

SEQ ID NO: 714644 - DNA, 120 bp, Artificial Sequence
  ENSG00000197223_20 (sequence is synthesized)
tgaaaatttaaagtttgttctactagtcctgtgaactgaggtcaccaattgggaaagaaaggatgaggagtcaatgtacaagcccacctacctggttgcactgacccatgcagaaagaac

SEQ ID NO: 714645 - DNA, 120 bp, Artificial Sequence
  ENSG00000197223_21 (sequence is synthesized)
aagtactcaatgggactggtgtattgtttatatgattgaaaggggtgctgtgttatttagaaatagtatttacctgcatgtagcaaagacctggaaaataatgggttaattctcccatat

SEQ ID NO: 714646 - DNA, 120 bp, Artificial Sequence
  ENSG00000197223_22 (sequence is synthesized)
aatgaaagtcaagctgtaggtagtctaaagttgcatagtgtctctccatgattcaggctccattcttttttctccactacccctatcctcaagatgatttcatggttcatgatgactgca

SEQ ID NO: 714647 - DNA, 120 bp, Artificial Sequence
  ENSG00000197223_23 (sequence is synthesized)
aggaccttgccatcaaaccactgagaaggtttgaagaaggaataaagatagaagggtggaaagtggcacatcttccatcagccataatggcaggtgaagaaattaatgaagactatccag

SEQ ID NO: 714648 - DNA, 120 bp, Artificial Sequence
  ENSG00000197223_24 (sequence is synthesized)
ttataacacttttaatagatacttatttttaaatctagatgccagtgagccacacatagatttagtattacatggaaattgaataatttaaagtttaattgtttgtaggactttcctttt

SEQ ID NO: 714649 - DNA, 120 bp, Artificial Sequence
  ENSG00000197223_25 (sequence is synthesized)
tttcagatcatttggttattggattatatgaagtgaaaaaaacttctttgatacattgtacttggtaaaagtcaaatgttatcagatggtgttcaaagtttgtgtattttttttctgtct

SEQ ID NO: 714650 - DNA, 120 bp, Artificial Sequence
  ENSG00000197223_26 (sequence is synthesized)
ggagactggagtcgaaggccgtgaggtatttttctaagtgagaggaaggactgagtggcagtaacatctgttagggttactgggcagcatccccgcaacccaggtactcagtctcagcca

SEQ ID NO: 714651 - DNA, 120 bp, Artificial Sequence
  ENSG00000197223_27 (sequence is synthesized)
caccttactgagtggtgaagagaagcaagttttctcatgccctctccgtctgtctctacctctgcagccagtgttttagaaggagtatgtggaagggcaaggagtacctatagaaccccg

SEQ ID NO: 714652 - DNA, 120 bp, Artificial Sequence
  ENSG00000197226_0 (sequence is synthesized)
ctcgcgggcctcggcccggtgcgagcggctccgcgatgtggctgagcccggaggaggtgctggtggccaatgcgctgtgggtgacggagcgggccaaccccttcttcgtgctgcagcgac

SEQ ID NO: 714653 - DNA, 120 bp, Artificial Sequence
  ENSG00000197226_1 (sequence is synthesized)
gccggggccacggcaggggcggcggccttacgggtcttctcgtgggcaccctggacgtggtgctggactccagtgcccgcgtggccccttaccgcatcctgcaccagacccaggactccc

SEQ ID NO: 714654 - DNA, 120 bp, Artificial Sequence
  ENSG00000197226_2 (sequence is synthesized)
aggtctactggacagtggcgtgtggttcttcccgcaaagagatcacaaaacactgggaatggctggaaaataacttgctccagacactgtccatcttcgacagtgaggaagatatcacca

SEQ ID NO: 714655 - DNA, 120 bp, Artificial Sequence
  ENSG00000197226_3 (sequence is synthesized)
ccttcgtcaagggcaagatacacggaatcatcgcagaagagaacaagaacctgcagccccagggagacgaggaccccgggaagttcaaggaggctgagctgaagatgcggaagcagtttg

SEQ ID NO: 714656 - DNA, 120 bp, Artificial Sequence
  ENSG00000197226_4 (sequence is synthesized)
ggatgcctgagggcgagaagctggtgaattactactcctgcagctactggaagggccgcgtgccccggcagggctggctgtacctgacggtcaaccacctgtgcttctactccttcctgc

SEQ ID NO: 714657 - DNA, 120 bp, Artificial Sequence
  ENSG00000197226_5 (sequence is synthesized)
tggggaaggaagtgagcctcgtggtgcagtgggtggacataacgcgtctggagaagaacgccaccctgctcttccccgagagcatccgtgtggacacccgcgaccaggagctcttcttct

SEQ ID NO: 714658 - DNA, 120 bp, Artificial Sequence
  ENSG00000197226_6 (sequence is synthesized)
ccatgttcctcaacatcggcgagaccttcaagctcatggagcagttggccaacctggccatgcggcagctgctggacagcgagggcttcctggaggacaaggccctgcctaggcccatcc

SEQ ID NO: 714659 - DNA, 120 bp, Artificial Sequence
  ENSG00000197226_7 (sequence is synthesized)
ggccacacaggaacatctcagccctgaagcgagacctggacgcccgagccaagaatgagtgctaccgagccacgttccggctgcccagggatgagcggctagacggccacacaagctgca

SEQ ID NO: 714660 - DNA, 120 bp, Artificial Sequence
  ENSG00000197226_8 (sequence is synthesized)
ccctgtggacgccgttcaacaagctgcacatccctggccagatgttcatctccaacaactacatctgcttcgccagcaaggaggaggacgcttgccacctcatcatacccctgagggagg

SEQ ID NO: 714661 - DNA, 120 bp, Artificial Sequence
  ENSG00000197226_9 (sequence is synthesized)
tgaccattgtcgaaaaagctgacagctccagcgtgctgcccagccccctgtccatcagcaccaaaagcaaaatgacattcctgtttgccaacctgaaagaccgtgatttcttggtgcaga

SEQ ID NO: 714662 - DNA, 120 bp, Artificial Sequence
  ENSG00000197226_10 (sequence is synthesized)
ggatctctgacttcctccagaaaacaccatccaagcagccaggcagtatcgggagcaggaaagccagtgttgtggaccctagcacagagtcttccccagctcctcaggaggggtcggagc

SEQ ID NO: 714663 - DNA, 120 bp, Artificial Sequence
  ENSG00000197226_11 (sequence is synthesized)
agcccgccagcccagcctctcccctcagcagccgccagagcttctgtgcgcaggaggcgccaaccgcatcccagggcctgctgaagctcttccagaaaaactcgcccatggaggaccttg

SEQ ID NO: 714664 - DNA, 120 bp, Artificial Sequence
  ENSG00000197226_12 (sequence is synthesized)
gagccaagggggccaaggagaagatgaaagaggagtcatggcacatccacttcttcgagtacgggcgtggcgtgtgcatgtaccgcacagccaagacgcgggcactggtcctgaagggta

SEQ ID NO: 714665 - DNA, 120 bp, Artificial Sequence
  ENSG00000197226_13 (sequence is synthesized)
tccctgagagcctccggggagagctgtggctcctcttctccggggcctggaatgagatggtgactcaccccgggtactatgctgagctggtggagaagtccaccgggaagtacagcctgg

SEQ ID NO: 714666 - DNA, 120 bp, Artificial Sequence
  ENSG00000197226_14 (sequence is synthesized)
ccacagaggagatcgagcgagacctgcaccgctccatgcccgagcaccctgccttccagaacgagctggggattgctgccctccggcgggtgctgactgcctatgccttccgaaacccca

SEQ ID NO: 714667 - DNA, 120 bp, Artificial Sequence
  ENSG00000197226_15 (sequence is synthesized)
ccatcggctactgccaggcaatgaacatcgtgacctcggtgctcctgctctatggcagtgaggaggaggccttctggctcctggtggccctgtgcgagcgcatgctgcccgactactaca

SEQ ID NO: 714668 - DNA, 120 bp, Artificial Sequence
  ENSG00000197226_16 (sequence is synthesized)
acaccagggtggtgggagccctggtggaccaaggcatcttcgaagagctcacgagagacttcctgccgcagctctcggagaagatgcaggacctgggggtgatctccagcatctcgctgt

SEQ ID NO: 714669 - DNA, 120 bp, Artificial Sequence
  ENSG00000197226_17 (sequence is synthesized)
cctggttcctgaccctcttcctcagcgtcatgcccttcgagagcgccgtggtcatcgtcgactgctttttctatgagggcatcaaggtgatcctgcaggtggccctggccgtcctggacg

SEQ ID NO: 714670 - DNA, 120 bp, Artificial Sequence
  ENSG00000197226_18 (sequence is synthesized)
ccaacatggagcagctgctgggctgcagcgacgagggcgaggccatgaccatgctgggcagatacctggataatgtggtcaacaagcagagtgtctctcctcctatcccgcacctccgtg

SEQ ID NO: 714671 - DNA, 120 bp, Artificial Sequence
  ENSG00000197226_19 (sequence is synthesized)
ccttgctgagcagcagcgatgacccccctgcagaggtggacatctttgagctcctgaaagtgtcctatgagaaattcagcagcctgagggccgaagacattgagcagatgcggtttaaac

SEQ ID NO: 714672 - DNA, 120 bp, Artificial Sequence
  ENSG00000197226_20 (sequence is synthesized)
agaggctgaaagtgatccagtccttggaggacacggccaagaggagtgtggtccgagctatacctgtggacattggtttctccattgaagagctggaggacctttacatggtgtttaagg

SEQ ID NO: 714673 - DNA, 120 bp, Artificial Sequence
  ENSG00000197226_21 (sequence is synthesized)
gcagtaccggattgatgccagccagttccgggaactctttgccagcctgacaccctgggcctgtggctcccacacacctctgctggcagggcgcatgttcaggctcctggacgaaaacaa

SEQ ID NO: 714674 - DNA, 120 bp, Artificial Sequence
  ENSG00000197226_22 (sequence is synthesized)
ggactcgctgatcaacttcaaggagttcgtgacagggatgagcgggatgtaccacggggacctgacagagaagctcaaggtgctctacaagctacaccttcccccagctctgagcccaga

SEQ ID NO: 714675 - DNA, 120 bp, Artificial Sequence
  ENSG00000197226_23 (sequence is synthesized)
ggaagccgagtcagccctggaggcggcccattatttcacagaggacagctcctcagaagaagcactaccacaggaagagcaagaaggaagtggaagtgaggagagaggagaggagaaggg

SEQ ID NO: 714676 - DNA, 120 bp, Artificial Sequence
  ENSG00000197226_24 (sequence is synthesized)
gaccagctctccggactatcggcactaccttcgaatgtgggccaaggagaaagaggctcagaaggagacgattaaggatcttcccaagatgaaccaggagcagttcattgagctgtgcaa

SEQ ID NO: 714677 - DNA, 120 bp, Artificial Sequence
  ENSG00000197226_25 (sequence is synthesized)
gacgctttacaacatgttcagtgaagaccccatggagcaggacctgtaccacgccatcgccaccgtggccagcctcctgctccgcatcggagaggtggggaagaagttctcagcccgcac

SEQ ID NO: 714678 - DNA, 120 bp, Artificial Sequence
  ENSG00000197226_26 (sequence is synthesized)
aggcaggaagcccagggactgtgccactgaggaggacgagccaccagcacccgaactgcatcaggacgcagccagggagcttcagcccccagctgcaggagacccccaagccaaagcagg

SEQ ID NO: 714679 - DNA, 120 bp, Artificial Sequence
  ENSG00000197226_27 (sequence is synthesized)
cggagacacacacctcggaaaagccccacaggagagccaggtggtggtggaggggggcagcggcgagggacagggctcaccctcccagctgctgtctgacgatgaaaccaaagacgacat

SEQ ID NO: 714680 - DNA, 120 bp, Artificial Sequence
  ENSG00000197226_28 (sequence is synthesized)
gtccatgtcctcctactcggtggtcagcacgggctccctgcaatgtgaagaccttgcagacgacacggtgctggtgggcggggaggcctgcagccccacagcgcgcatcggcggcaccgt

SEQ ID NO: 714681 - DNA, 120 bp, Artificial Sequence
  ENSG00000197226_29 (sequence is synthesized)
cgacaccgactggtgcatctcctttgagcagatcctggcctccatcctgacggagtccgtgctggtgaacttctttgagaagagagtggacattggactcaagatcaaggaccaaaagaa

SEQ ID NO: 714682 - DNA, 120 bp, Artificial Sequence
  ENSG00000197226_30 (sequence is synthesized)
agtggagagacagttcagcaccgccagtgaccatgagcagcctggagtttccggctgatgcctgcagctgtgaggcctggcccaaggtgtcatcagtggggctggcctcatctcctcctg

SEQ ID NO: 714683 - DNA, 120 bp, Artificial Sequence
  ENSG00000197226_31 (sequence is synthesized)
cctttcctcccttatcagtttctctttaaaggtgtgcccctcctgctctcccaggagcagtgagttgtgagtggaaagaaggctggtgcagacccagctgccttagacagattccctggg

SEQ ID NO: 714684 - DNA, 120 bp, Artificial Sequence
  ENSG00000197226_32 (sequence is synthesized)
cctgcatctcctggcgccggctgcttctgggcccaggaagaggctgtggctcccaccttccttacacctggtgggagcccgcctcgcaccagctgcacctgcctagcattacaggctctc

SEQ ID NO: 714685 - DNA, 120 bp, Artificial Sequence
  ENSG00000197226_33 (sequence is synthesized)
agatctgcccttgcttgcctcatacctctgtgctccacactgcggccaggccagctgagtccctccatccgtggatgctttcctgcagctatgtggtatgggggtcattcctgcctcttg

SEQ ID NO: 714686 - DNA, 120 bp, Artificial Sequence
  ENSG00000197226_34 (sequence is synthesized)
gcaccaggttggggggcatgtgcttgttgggcaccaaagtgatggaaccctcaggtgctctccgggagcctgaacctcctgactgaggaacatgggcagaacatgtttattgcacagagt

SEQ ID NO: 714687 - DNA, 120 bp, Artificial Sequence
  ENSG00000197226_35 (sequence is synthesized)
gggcgctgcgcacaggcgtggctgtacacgtgctctcagctcatcatcctttccagtaactttaaaaaaacatccctcaggtcctgatatatttccttggattcatttcacttggctaga

SEQ ID NO: 714688 - DNA, 120 bp, Artificial Sequence
  ENSG00000197226_36 (sequence is synthesized)
aattacactgtgctcaatgccttaataaatccctgaaagaaataaaaaccactgtgtgcaatgccttgctgtggcccccaaccactgcttaggcctcccaacttctccccaggccaagta

SEQ ID NO: 714689 - DNA, 120 bp, Artificial Sequence
  ENSG00000197226_37 (sequence is synthesized)
tggggccctggctgtgttctggaagttcaagacacttagtcctccacagtgggtggaagagtgcaaggtctgccaggtcagatggagacgcagaacctgctggtgcaagctgggcaggtc

SEQ ID NO: 714690 - DNA, 120 bp, Artificial Sequence
  ENSG00000197226_38 (sequence is synthesized)
ctgaccaacctgcatcaggggatgccctgagctccacaggtcttcatgggcaggggttgtgggtcctggtgaaggaagtgcatcctcaggcctgggctgtagcaagctgtctgcccttgg

SEQ ID NO: 714691 - DNA, 120 bp, Artificial Sequence
  ENSG00000197226_39 (sequence is synthesized)
gttcaagaaccagactgtggagccaaaggtgaccgcagggggccccagggctggagccacaaggataccctcactttgcatgaggagctgaaactgaccagtgtccagtgttagccccca

SEQ ID NO: 714692 - DNA, 120 bp, Artificial Sequence
  ENSG00000197226_40 (sequence is synthesized)
catggggctgctcttgcttctactaaaagatacagcagttacccccttatccacaggggatacagtggatatctaaaaccagacccccagtggatgtctaaaaccacagataataacaaa

SEQ ID NO: 714693 - DNA, 120 bp, Artificial Sequence
  ENSG00000197226_41 (sequence is synthesized)
ccttatacatactgttttttcctatgcatacatacctgtgattaagtttatgaattaggcaccttaagagattgacaacaataactaataataaaatgtaacggttatactgtaatgaaa

SEQ ID NO: 714694 - DNA, 120 bp, Artificial Sequence
  ENSG00000197226_42 (sequence is synthesized)
cgcccatcctgggaaggggcccggagtgtgagagagagactcccccacgcccatcctggaaaggagcccggagtgtgagctgagtggtccgagctatacctgtggacattggtttctcca

SEQ ID NO: 714695 - DNA, 120 bp, Artificial Sequence
  ENSG00000197226_43 (sequence is synthesized)
tgaaagtgtcctatgagaaattcagcagcctgagggccgaagacattgagcagatgcggtttaaacagaggctgaaagtgatccagtccttggaggacacggccaagaggagtgtggtat

SEQ ID NO: 714696 - DNA, 120 bp, Artificial Sequence
  ENSG00000197226_44 (sequence is synthesized)
gggtgccagcagggctgggcaggggctgggctgggggggcagcagtgccttccccacagagcagggtgggtacagggctccaccgcacccagtctcctacactgctttggtatgtacatc

SEQ ID NO: 714697 - DNA, 120 bp, Artificial Sequence
  ENSG00000197226_45 (sequence is synthesized)
cccaccctgaaagccacatgcccagccctctgggccgagcccgcccagcctggcttcccatgtgttccctgccccactcccaggtagcaacatgccgccatcctccgcacaccccaaatg

SEQ ID NO: 714698 - DNA, 120 bp, Artificial Sequence
  ENSG00000197226_46 (sequence is synthesized)
gcatgtgtctgccacaagctgctgttctcatctctagaggggccaggccctccctgccaccctgtgctgcaagacctgtttgtggtctctgcccccaaaggcagggacttcctccattgt

SEQ ID NO: 714699 - DNA, 120 bp, Artificial Sequence
  ENSG00000197226_47 (sequence is synthesized)
acagagccacacacccggtactcctcactcctgctgggcccattgcccatgaggaaccttctctggctgtcctttctgcattgctgctgcactcagagcaaagccacactgtggaggcct

SEQ ID NO: 714700 - DNA, 120 bp, Artificial Sequence
  ENSG00000197226_48 (sequence is synthesized)
gtacacttcggctttgttcccatgaccttccctgccaggcgttcaggctgaagttcttgacggtagaactgcagtatcactattgtaccagcaaacttaacaagaattccttaatatcac

SEQ ID NO: 714701 - DNA, 120 bp, Artificial Sequence
  ENSG00000197226_49 (sequence is synthesized)
aggctcccccacgcccatcctgggaaggggcccggagtgtgagagagagactcccccacgcccatcctggaaaggagcccggagtgtgagctgagtggtaggtggggggccagggatggg

SEQ ID NO: 714702 - DNA, 120 bp, Artificial Sequence
  ENSG00000197226_50 (sequence is synthesized)
ctgtgggcctcgctctctcccgaagggtccgcccttgagtgctgggccactgagagggcggttcacacccttgcccttgtctgccgaggatgctctcacagagtgccgtacttctgtgcc

SEQ ID NO: 714703 - DNA, 120 bp, Artificial Sequence
  ENSG00000197226_51 (sequence is synthesized)
cagaaggtgagcggccactggaacacccgacatgcccagccagcactctgcagccaccgccgccttcctgtggggctcgggcagtggccagcagtcccacctgggctcagggagcaggcc

SEQ ID NO: 714704 - DNA, 120 bp, Artificial Sequence
  ENSG00000197226_52 (sequence is synthesized)
gcatggggttctccccaggggaccacgggctgggctctgccatgctggcgggggctggggccgccccctgtggatgtcctcactcctgtttctcttgtgtctctgtcttcctggaccttg

SEQ ID NO: 714705 - DNA, 120 bp, Artificial Sequence
  ENSG00000197226_53 (sequence is synthesized)
gctcctccccactctgcccctctgcctctcctctgctgtcccttccagcatctcctctggcctcagatctggatcttttcctgccctgggaggctcaaggtcagtccctggaaggcaggg

SEQ ID NO: 714706 - DNA, 120 bp, Artificial Sequence
  ENSG00000197226_54 (sequence is synthesized)
gcgccccctgtacctcctaacactcttcctgcactatcaggaagcctggaagctctttgtcccagggacctctctgggacttcatcctctggggcataagttctgagaaggacccagaag

SEQ ID NO: 714707 - DNA, 120 bp, Artificial Sequence
  ENSG00000197226_55 (sequence is synthesized)
cagccaaccccctccccatctgttaacaaggggctgatgacagcctgagagctttcgggaggtgctgcagtgtctggcccgtgcttaccgccccagggctccgcaggcttggacagaggg

SEQ ID NO: 714708 - DNA, 120 bp, Artificial Sequence
  ENSG00000197226_56 (sequence is synthesized)
ggagggtggacacaccaccagcctaggggtcccctcgacccacaggcttagcggctggaccgtctcaccagaccgtgtcccacaggccaagcacctggctagccagtactgggggtgcag

SEQ ID NO: 714709 - DNA, 120 bp, Artificial Sequence
  ENSG00000197226_57 (sequence is synthesized)
aagccactcctctgcaccgcctccgtgtctgctgtaggtgggcggtaaataaggcccccacactaggcgccaagcaggcccagggcaaggcctccacagccacatgttagagacattctg

SEQ ID NO: 714710 - DNA, 120 bp, Artificial Sequence
  ENSG00000197226_58 (sequence is synthesized)
tcttcctgtgagtaggaaacaaatacaaaatgctgtcattggagcgtgtgaaagacacagtgtggctgagtgggggctggaaagaatagtggatgctttcctaggaaaaatcttcatgtt

SEQ ID NO: 714711 - DNA, 120 bp, Artificial Sequence
  ENSG00000197226_59 (sequence is synthesized)
ccacgtcacgttttttgttaaggaaaaacacgcatgttgagtgcctgttagaactcatccctgtgctatgtttaaagcctgttgggagcatctgatcccaggtgatgggagcatgctagg

SEQ ID NO: 714712 - DNA, 120 bp, Artificial Sequence
  ENSG00000197226_60 (sequence is synthesized)
ccctgggctttcgcagtcgagctggtgacatgcagcacacttgcaaaaccgaccataatgccacctggtggtttcacatgggggataatgcacaccaaggaaccgactcaaaagagaacc

SEQ ID NO: 714713 - DNA, 120 bp, Artificial Sequence
  ENSG00000197226_61 (sequence is synthesized)
aaaaatagtgtgtaccaagatgcccatggcagtcctggtgacagtggcagaggctgacttgagcttgaggaccttgatttcaaggacagaaactacagaagcaggtacaccttctgttgt

SEQ ID NO: 714714 - DNA, 120 bp, Artificial Sequence
  ENSG00000197226_62 (sequence is synthesized)
acatggaaccagcaggccactctaggcttgtcccgcatgcttctgggagcggcatgttggtgcagagccctggcctcagaccgcatgtggcccccaggaagcagggcctccattccaggg

SEQ ID NO: 714715 - DNA, 120 bp, Artificial Sequence
  ENSG00000197226_63 (sequence is synthesized)
tgagttgcctgagcccagagaggtgtgcccttcactgccaccagacagccagcgagagcagctcagaactggggtgctgccgacctgcctgaggtgcccccaccagccacactgcctttg

SEQ ID NO: 714716 - DNA, 120 bp, Artificial Sequence
  ENSG00000197226_64 (sequence is synthesized)
gggaacagctccaggagagctggtcggctgcttctctccccaggtgcatgttcccacgcagggagtatagtgcgcgccagttccggcaaatgtcctccccgaaacgctgcaccaagcaca

SEQ ID NO: 714717 - DNA, 120 bp, Artificial Sequence
  ENSG00000197226_65 (sequence is synthesized)
ggagctgtgcacagaccacccctcagtaacaggcacagcaggcgcgggtggaaggggtcattagggttcccctgagttctagcaggaacattccccagagttctagcaggaactatagaa

SEQ ID NO: 714718 - DNA, 120 bp, Artificial Sequence
  ENSG00000197226_66 (sequence is synthesized)
ttcgttagtcctcagactggtctatagccctcatcattgttcacgtcaaaaccagcatgttgagacttgtattcatttgaaaaaaggaattgagggtttggcggcctttattttaacctg

SEQ ID NO: 714719 - DNA, 120 bp, Artificial Sequence
  ENSG00000197226_67 (sequence is synthesized)
accaagtgagggaatgctcaggcccttttgctctggtgccatagggcggggctgggcgggccaggcaggaggtgtggcatgggagacctgctccccagggcctggcctggggctggctgt

SEQ ID NO: 714720 - DNA, 120 bp, Artificial Sequence
  ENSG00000197226_68 (sequence is synthesized)
acagaaacacagactacatctcaaggaccccaggagcttgcagtcccaacagcagaatgttattcatgttctttttatttttgcgtttgtccagaagcactaccacaggaagagcaagaa

SEQ ID NO: 714721 - DNA, 120 bp, Artificial Sequence
  ENSG00000197226_69 (sequence is synthesized)
agggacctctctgggacttcatcctctggggcataagttctgagaaggacccagaagcaagccactcctctgcaccgcctccgtgtctgctgtaggtgggcggtaaataaggcccccaca

SEQ ID NO: 714722 - DNA, 120 bp, Artificial Sequence
  ENSG00000197226_70 (sequence is synthesized)
ccagggtctctgcagggatccagatgacgggagccaaatgagtatccctcactctgcgacctcagctgcacgttgaggacagaggctcccccacgcccatcctgggaaggggcccggagt

SEQ ID NO: 714723 - DNA, 120 bp, Artificial Sequence
  ENSG00000197226_71 (sequence is synthesized)
gtgagagagaggctcccccacgcccatcctgggaaggggcccggagtgtgagagagaggctcccccacgcccatcctgggaaggggcccggagtgtgagagagaggctcccccacgccca

SEQ ID NO: 714724 - DNA, 120 bp, Artificial Sequence
  ENSG00000197226_72 (sequence is synthesized)
tcctgggaaggggcccggagtgtgagagagaggctcccccacgcccatcctgggaaggggcccggagtgtgagagagaggctcccccacgcccatcctgggaaggggcccggagtgtgag

SEQ ID NO: 714725 - DNA, 120 bp, Artificial Sequence
  ENSG00000197226_73 (sequence is synthesized)
tctatttttaatatttcaaggaacctccgtgctatgctctatccaccaactgtgcaccacagttggaggccagaccaccaactgtggcatgactctgtgcagacacagagccagtagctg

SEQ ID NO: 714726 - DNA, 120 bp, Artificial Sequence
  ENSG00000197226_74 (sequence is synthesized)
attctctgccgctgttcttagagaccccagcgttgaggcacccttgcttgctggtcttttccccagtcactgccagggagccccctaccccgggagatggcggatgcgtcccccgatcag

SEQ ID NO: 714727 - DNA, 120 bp, Artificial Sequence
  ENSG00000197226_75 (sequence is synthesized)
ggagcaggcctcgggatgcacaggaggctccacgctctccaccagccccacgggcacccagccagccctctcttgccagcttctctccagctgccctgtgactccccatctgagagaaga

SEQ ID NO: 714728 - DNA, 120 bp, Artificial Sequence
  ENSG00000197226_76 (sequence is synthesized)
cattgtggatcattgtcatcagcttaggtccaaccactgcagcaatttagggaaaacctgtggctgttctgggtttttttcccatgaccaccttcccaaacgccagggtgttttatgata

SEQ ID NO: 714729 - DNA, 120 bp, Artificial Sequence
  ENSG00000197226_77 (sequence is synthesized)
tggtgagagtggggttaattactgaggactcggtgtccagcagccagagaggagctgagggctgagctgcagccacagcctcctgcccagccagacaggctcttctccgtgcaccgtttg

SEQ ID NO: 714730 - DNA, 120 bp, Artificial Sequence
  ENSG00000197226_78 (sequence is synthesized)
cccccatggcccttcttgcaccgggccccgatccagctctggatggatgggcgcatcagaggccacctggcagcacagttgttagggcgtccccttccctgttttattttctagtcttcc

SEQ ID NO: 714731 - DNA, 120 bp, Artificial Sequence
  ENSG00000197226_79 (sequence is synthesized)
gaagggaagggccctcccgctgaggagctggtctcctgagccttgggaggtgtggctcagcgcggcctggtctttcccgggaattgcgaggaaggccacacttgctggccagcactgtct

SEQ ID NO: 714732 - DNA, 120 bp, Artificial Sequence
  ENSG00000197226_80 (sequence is synthesized)
ccccagccagggtctcccacttgtccagaagttcagctgcagaggacaggcctctgtgagactgtggggcctcgagggggcacagcagcgtcgcaggctggaggttcacattggaggaga

SEQ ID NO: 714733 - DNA, 120 bp, Artificial Sequence
  ENSG00000197226_81 (sequence is synthesized)
gggagcgggagcttgagcacttcacagaggtctgagagcagggccttggcctgggaagggacgtggaggagaatcccatgggtgaccgggcactgctgggtacagaactcccaccgagga

SEQ ID NO: 714734 - DNA, 120 bp, Artificial Sequence
  ENSG00000197226_82 (sequence is synthesized)
ggcagctggacccaaaacccactaggagggccatgagtggagcttcagggctggaaccgaaactgctgcatttatctgtcaagtttcttaagggtttattcccagagtttcagctagaga

SEQ ID NO: 714735 - DNA, 120 bp, Artificial Sequence
  ENSG00000197226_83 (sequence is synthesized)
atcctgtcacatggccatgaggaggggccacttctctctggcctctcagtggtgctgtagcctagtggggctgcactggcgacaggctgtctgtgcagggggcagggctcagcaggagtg

SEQ ID NO: 714736 - DNA, 120 bp, Artificial Sequence
  ENSG00000197226_84 (sequence is synthesized)
gctgcatggacaatgctccaaggaggggtcatctccctcatcacagaaggaaacaaaggcgcaggcaggtggaaatcctgggctgggcactctgctgtggctggacctgccccaggtccc

SEQ ID NO: 714737 - DNA, 120 bp, Artificial Sequence
  ENSG00000197226_85 (sequence is synthesized)
tgctgtcgctttgccatctgaggttagcagctgccctcagaaccgaccccggggatgtttagaatactggggctgagcttcacccgaggagattctcacttgattgcctgtgatggggcc

SEQ ID NO: 714738 - DNA, 120 bp, Artificial Sequence
  ENSG00000197226_86 (sequence is synthesized)
tttttaaagctggcaggccattgctctgtgcctccagagctgaaggctcttgacatagctgttctcgtttgtggctggctcaccagagaggccgtggtaggacagaccccactgggcctg

SEQ ID NO: 714739 - DNA, 120 bp, Artificial Sequence
  ENSG00000197226_87 (sequence is synthesized)
gtcccagggttgagagcatgcggggctaccctgagactcctgagcctcctcagcctgccctgccctgtcctgtccagacacagagaacacttgggctctgctgggcttgtggcccatgcc

SEQ ID NO: 714740 - DNA, 120 bp, Artificial Sequence
  ENSG00000197226_88 (sequence is synthesized)
cgctacactcacccaggaccatgcgatccgcaaccctgggtactgcttggtgacctccagcaaagactgcactgaatgaggccggccagcacgcacaacgcggcccgacctctgagctac

SEQ ID NO: 714741 - DNA, 120 bp, Artificial Sequence
  ENSG00000197226_89 (sequence is synthesized)
ccaaagggagagcagcaagttgcctgtgcgtggctggttcctgtgcgcccataggagcatgaaacgcccccaaagggcccactggccagatggtcactggggcaggcgggcagctgccat

SEQ ID NO: 714742 - DNA, 120 bp, Artificial Sequence
  ENSG00000197226_90 (sequence is synthesized)
tcactggactcctaattgtgttgattggatttttacctgggacatgtatttccttttcaaacacaatgtcaaagtcaggaaagcggctggatgcagtaggaggcccaggcgggtggatca

SEQ ID NO: 714743 - DNA, 120 bp, Artificial Sequence
  ENSG00000197233_0 (sequence is synthesized)
atgagccctgagaaccagagcagcgtgtccgagttcctccttctgggcctccccatccggccagagcagcaggctgtgttcttcaccctgttcctgggcatgtacctgaccacggtgctg

SEQ ID NO: 714744 - DNA, 120 bp, Artificial Sequence
  ENSG00000197233_1 (sequence is synthesized)
gggaacctgctcatcatgctgctcatccagctggactctcaccttcacacccccatgtacttcttcctcagccacttggctctcactgacatctccttttcatctgtcactgtccctaag

SEQ ID NO: 714745 - DNA, 120 bp, Artificial Sequence
  ENSG00000197233_2 (sequence is synthesized)
atgctgatggacatgcggactaagtacaaatcgatcctctatgaggaatgcatttctcagatgtatttttttatattttttactgacctggacagcttccttattacatcaatggcatat

SEQ ID NO: 714746 - DNA, 120 bp, Artificial Sequence
  ENSG00000197233_3 (sequence is synthesized)
agctccctctctcacacccttctcctgacccggctgtctttctgtgctgcgaacaccatcccccatgtcttctgtgaccttgctgccctgctcaagctgtcctgctcagatatcttcctc

SEQ ID NO: 714747 - DNA, 120 bp, Artificial Sequence
  ENSG00000197233_4 (sequence is synthesized)
aatgagctggtcatgttcacagtaggggtggtggtcattaccctgccattcatgtgtatcctggtatcatatggctacattggggccaccatcctgagggtcccttcaaccaaagggatc

SEQ ID NO: 714748 - DNA, 120 bp, Artificial Sequence
  ENSG00000197233_5 (sequence is synthesized)
cacaaagcattgtccacatgtggctcccatctctctgtggtgtctctctattatgggtcaatatttggccagtaccttttcccgactgtaagcagttctattgacaaggatgtcattgtg

SEQ ID NO: 714749 - DNA, 120 bp, Artificial Sequence
  ENSG00000197233_6 (sequence is synthesized)
gctctcatgtacacggtggtcacacccatgttgaacccctttatctacagccttaggaacagggacatgaaagaggcccttgggaaactcttcagtagagcaacatttttctcttggtga

SEQ ID NO: 714750 - DNA, 120 bp, Artificial Sequence
  ENSG00000197238_0 (sequence is synthesized)
gactcctcttgctcgtcatgtctggccgcggcaaaggcgggaagggtcttggcaaaggcggcgctaagcgccaccgtaaagtactgcgcgacaatatccagggcatcaccaagccggcca

SEQ ID NO: 714751 - DNA, 120 bp, Artificial Sequence
  ENSG00000197238_1 (sequence is synthesized)
tcgccgcggcggcgtgaagcgcatctccggcctcatctacgaggagactcgcggggtgctgaaggtgttcctggagaacgtgatccgggacgccgtgacctatacagagcacgccaagcg

SEQ ID NO: 714752 - DNA, 120 bp, Artificial Sequence
  ENSG00000197238_2 (sequence is synthesized)
caagacggtcaccgccatggatgtggtctacgcgctcaagcgccagggccgcaccctctacggtttcggtggttgagcgtccctttctatcaataaaaggcccttttcagggccacccta

SEQ ID NO: 714753 - DNA, 120 bp, Artificial Sequence
  ENSG00000197241_0 (sequence is synthesized)
atggagaacaaagaggcgggaacccctccacccattccatccagggaggggcggctccagccgacgctgttgctggcgacactgagcgcggcctttggctcagccttccagtacggctac

SEQ ID NO: 714754 - DNA, 120 bp, Artificial Sequence
  ENSG00000197241_1 (sequence is synthesized)
aacctctctgtggtcaacacgccgcacaaggtcttcaagtcattttacaacgaaacctactttgagcgacacgcaacattcatggacgggaagctcatgctgcttctatggtcttgcacc

SEQ ID NO: 714755 - DNA, 120 bp, Artificial Sequence
  ENSG00000197241_2 (sequence is synthesized)
gtctccatgtttcctctgggcggcctgttggggtcattgctcgtgggcctgctggttgatagctgcggcagaaaggggaccctgctgatcaacaacatctttgccatcatccccgccatc

SEQ ID NO: 714756 - DNA, 120 bp, Artificial Sequence
  ENSG00000197241_3 (sequence is synthesized)
ctgatgggagtcagcaaagtggccaaggcttttgagctgatcgtcttttcccgagtggtgctgggagtctgtgcaggcatctcctacagcgcccttcccatgtacctgggagaactggcc

SEQ ID NO: 714757 - DNA, 120 bp, Artificial Sequence
  ENSG00000197241_4 (sequence is synthesized)
cccaagaacctgagaggcatggtgggaacaatgaccgaggttttcgtcatcgttggagtcttcctagcacagatcttcagcctccaggccatcttgggcaacccggcaggctggccggtg

SEQ ID NO: 714758 - DNA, 120 bp, Artificial Sequence
  ENSG00000197241_5 (sequence is synthesized)
cttctggcgctcacaggggtgcccgccctgctgcagctgctgaccctgcccttcttccccgaaagcccccgctactccctgattcagaaaggagatgaagccacagcgcgacaagctctg

SEQ ID NO: 714759 - DNA, 120 bp, Artificial Sequence
  ENSG00000197241_6 (sequence is synthesized)
ctctgtgccctgcggtccctgcgctggcagctcctctccatcatcgtgctcatggccggccagcagctgtcgggcatcaatgcgatcaactactatgcggacaccatctacacatctgcg

SEQ ID NO: 714760 - DNA, 120 bp, Artificial Sequence
  ENSG00000197241_7 (sequence is synthesized)
ggcgtggaggccgctcactcccaatatgtaacggtgggctctggcgtcgtcaacatagtgatgaccatcacctcggctgtccttgtggagcggctgggacggcggcacctcctgctggcc

SEQ ID NO: 714761 - DNA, 120 bp, Artificial Sequence
  ENSG00000197241_8 (sequence is synthesized)
ggctacggcatctgcggctctgcctgcctggtgctgacggtggtgctcctattccagaacagggtccccgagctgtcctacctcggcatcatctgtgtctttgcctacatcgcgggacat

SEQ ID NO: 714762 - DNA, 120 bp, Artificial Sequence
  ENSG00000197241_9 (sequence is synthesized)
tccattgggcccagtcctgtcccctcggtggtgaggaccgagatcttcctgcagtcctcccggcgggcagctttcatggtggacggggcagtgcactggctcaccaacttcatcataggc

SEQ ID NO: 714763 - DNA, 120 bp, Artificial Sequence
  ENSG00000197241_10 (sequence is synthesized)
ttcctgttcccatccatccaggaggccatcggtgcctacagtttcatcatctttgccggaatctgcctcctcactgcgatttacatctacgtggttattccggagaccaagggcaaaaca

SEQ ID NO: 714764 - DNA, 120 bp, Artificial Sequence
  ENSG00000197241_11 (sequence is synthesized)
tttgtggagataaaccgcatttttgccaagagaaacagggtgaagcttccagaggagaaagaagaaaccattgatgctgggcctcccacagcctctcctgccaaggaaacttccttttag

SEQ ID NO: 714765 - DNA, 120 bp, Artificial Sequence
  ENSG00000197245_0 (sequence is synthesized)
agtctggacctgcccaaggacccctgcaattaggcctcccatgcagaggtcagtgagagcccaagccaattgctctaggccccgtggctggctacttatggggcactgtcctgaccagct

SEQ ID NO: 714766 - DNA, 120 bp, Artificial Sequence
  ENSG00000197245_1 (sequence is synthesized)
ctgctaagatgctcctggcccctccctccaccccgtccagaggacggacccccagcgccgtggagaggctggaagccgacaaagccaagtatgtcaagacgcaccaggtgatagctaggc

SEQ ID NO: 714767 - DNA, 120 bp, Artificial Sequence
  ENSG00000197245_2 (sequence is synthesized)
aggcgacaggagccagccctgcgtgggagtcctgggccgctcacgccgcacccctgcaacgagctggggccccctgcatcgcccaggacgcccaggccggtccgccggggaagcggcagg

SEQ ID NO: 714768 - DNA, 120 bp, Artificial Sequence
  ENSG00000197245_3 (sequence is synthesized)
tgccgaggcctgattccctcatcttctaccgccagaagcgggactgcaaggcttcggtgaacaaagagaacgccaagggccagggtctggtgcggcgcctctttctgggtgccccgcggg

SEQ ID NO: 714769 - DNA, 120 bp, Artificial Sequence
  ENSG00000197245_4 (sequence is synthesized)
acgctgccccgagcagcccggcctccacagagcgacctgcggcttcagggggttgggctgcgccccaggatgccccggaagcggcgggaaagcgggcgctgtgtcccacgtgctcgctgc

SEQ ID NO: 714770 - DNA, 120 bp, Artificial Sequence
  ENSG00000197245_5 (sequence is synthesized)
ccctgtcggagaaggagcgcttcttcaactactgcggcctggagcgcgcgctggtggaggtgctgggcgcagagcgcttctccccgcagagctggggagccgacgccagcccgcaggccg

SEQ ID NO: 714771 - DNA, 80 bp, Artificial Sequence
  ENSG00000197245_6 (sequence is synthesized)
gaacttcgccgccgcccggctccggggacgccagcgactggacatccagcgacaggggcgtggacagcccgggcggcgcg

SEQ ID NO: 714772 - DNA, 120 bp, Artificial Sequence
  ENSG00000197245_7 (sequence is synthesized)
cgggaccggcgccccccggtgtcggtggtggagcgcaacgcgcgcgtcatccagtggctgtacggctgccagcgcgcccgcggaccgccgcgcgagtccgaggtgtgaccgccgcggctc

SEQ ID NO: 714773 - DNA, 120 bp, Artificial Sequence
  ENSG00000197245_8 (sequence is synthesized)
ctggccccgggactggccccgggcacggaaaaggacacccctcttctggcgcgctgggtgcctttgcgtaagcccttccttctggaactcagtttcgcgtctgaaccttggggaggtgga

SEQ ID NO: 714774 - DNA, 120 bp, Artificial Sequence
  ENSG00000197245_9 (sequence is synthesized)
acaagttgctgccgaaggcccttccctgctcccgcggcgaagggggagggagaggcctcttggtccctgtggagacccggtctggggagtcacgattggggtgggagatgagcaaacctg

SEQ ID NO: 714775 - DNA, 120 bp, Artificial Sequence
  ENSG00000197245_10 (sequence is synthesized)
ctgaataaagttaaaacgttatttaaatggggagctgaggaaggagcaaacgggttttcgcggttaaacccgtgggttttggaatgtgtgttcccggctgtgtgatcctgggcaagaact

SEQ ID NO: 714776 - DNA, 120 bp, Artificial Sequence
  ENSG00000197245_11 (sequence is synthesized)
gagggaggagtaggggatagaagtatttcaaaatagttgtaatgcgcatggcaaagtgcccagcatatagaaagtgctcaataaacgataactgctgtgacttctaccgaatgagtacta

SEQ ID NO: 714777 - DNA, 120 bp, Artificial Sequence
  ENSG00000197245_12 (sequence is synthesized)
acactgttgtgatctccactggcctccaggtcgatccaaactagagctgggagctgggaataatgcgctttgggagcccgaggaggcgtctgctccagaaatctgggctccaccagatcc

SEQ ID NO: 714778 - DNA, 120 bp, Artificial Sequence
  ENSG00000197245_13 (sequence is synthesized)
taaaaggccccattcccggagttttgctgccccagttgtggtcactgggtatgaagggctgagatccaacctttcggacacaaaaagaagggaaccgggccgggcgcggtggctcaggcc

SEQ ID NO: 714779 - DNA, 120 bp, Artificial Sequence
  ENSG00000197245_14 (sequence is synthesized)
ataaaaataaaaataaaaaaagaaaagaaggaaacctttcctgccagccggcaggctcctgccactgcctccctttcctgcaaggacacacaagttcgcctattttcatcacaggttcgc

SEQ ID NO: 714780 - DNA, 120 bp, Artificial Sequence
  ENSG00000197245_15 (sequence is synthesized)
cgcctattttcatcacaggttcgcacctccaagcctgcatccttcatgcacctccttcctttgcctgggttgccgttccttttctctctgctcttccttctctttttttttttttttttt

SEQ ID NO: 714781 - DNA, 120 bp, Artificial Sequence
  ENSG00000197245_16 (sequence is synthesized)
cgtgagccaccgcgcccggcccccttcttccttctcggagataacgtatattctcctccaggaagccgtcctgaatgcccccagtcagcctcacctgctctgagctcccaagtacagtcc

SEQ ID NO: 714782 - DNA, 120 bp, Artificial Sequence
  ENSG00000197245_17 (sequence is synthesized)
tgagctcccaagtacagtcctatttttgggcctcaatttgtcaccttttgtgggacccgctggtactctgggttctctagttaatctttgacctttttcctagtacagggacggcgcaca

SEQ ID NO: 714783 - DNA, 120 bp, Artificial Sequence
  ENSG00000197245_18 (sequence is synthesized)
tagtagggccacaggcacagtttgttgaattaaatgaggctggagagggcgatggacgcagtcctctggagctctccaacttcctggaaagttgtaccttaaataaaaaacccatcctga

SEQ ID NO: 714784 - DNA, 120 bp, Artificial Sequence
  ENSG00000197249_0 (sequence is synthesized)
tgggcaggaactgggcactgtgcccagggcatgcactgcctccacgcagcaaccctcagagtcctgagctgaaccaagaaggaggagggggtcgggcctccgaggaaggcctagccgctg

SEQ ID NO: 714785 - DNA, 120 bp, Artificial Sequence
  ENSG00000197249_1 (sequence is synthesized)
ctgctgccaggaattccaggttggaggggcggcaacctcctgccagccttcaggccactctcctgtgcctgccagaagagacagagcttgaggagagcttgaggagagcaggaaaggtgg

SEQ ID NO: 714786 - DNA, 120 bp, Artificial Sequence
  ENSG00000197249_2 (sequence is synthesized)
gacattgctgctgctgctcactcagttccacaggacaatgccgtcttctgtctcgtggggcatcctcctgctggcaggcctgtgctgcctggtccctgtctccctggctgaggatcccca

SEQ ID NO: 714787 - DNA, 120 bp, Artificial Sequence
  ENSG00000197249_3 (sequence is synthesized)
gggagatgctgcccagaagacagatacatcccaccatgatcaggatcacccaaccttcaacaagatcacccccaacctggctgagttcgccttcagcctataccgccagctggcacacca

SEQ ID NO: 714788 - DNA, 120 bp, Artificial Sequence
  ENSG00000197249_4 (sequence is synthesized)
gtccaacagcaccaatatcttcttctccccagtgagcatcgctacagcctttgcaatgctctccctggggaccaaggctgacactcacgatgaaatcctggagggcctgaatttcaacct

SEQ ID NO: 714789 - DNA, 120 bp, Artificial Sequence
  ENSG00000197249_5 (sequence is synthesized)
cacggagattccggaggctcagatccatgaaggcttccaggaactcctccgtaccctcaaccagccagacagccagctccagctgaccaccggcaatggcctgttcctcagcgagggcct

SEQ ID NO: 714790 - DNA, 120 bp, Artificial Sequence
  ENSG00000197249_6 (sequence is synthesized)
gaagctagtggataagtttttggaggatgttaaaaagttgtaccactcagaagccttcactgtcaacttcggggacaccgaagaggccaagaaacagatcaacgattacgtggagaaggg

SEQ ID NO: 714791 - DNA, 120 bp, Artificial Sequence
  ENSG00000197249_7 (sequence is synthesized)
tactcaagggaaaattgtggatttggtcaaggagcttgacagagacacagtttttgctctggtgaattacatcttctttaaaggcaaatgggagagaccctttgaagtcaaggacaccga

SEQ ID NO: 714792 - DNA, 120 bp, Artificial Sequence
  ENSG00000197249_8 (sequence is synthesized)
ggaagaggacttccacgtggaccaggtgaccaccgtgaaggtgcctatgatgaagcgtttaggcatgtttaacatccagcactgtaagaagctgtccagctgggtgctgctgatgaaata

SEQ ID NO: 714793 - DNA, 120 bp, Artificial Sequence
  ENSG00000197249_9 (sequence is synthesized)
cctgggcaatgccaccgccatcttcttcctgcctgatgaggggaaactacagcacctggaaaatgaactcacccacgatatcatcaccaagttcctggaaaatgaagacagaaggtctgc

SEQ ID NO: 714794 - DNA, 120 bp, Artificial Sequence
  ENSG00000197249_10 (sequence is synthesized)
cagcttacatttacccaaactgtccattactggaacctatgatctgaagagcgtcctgggtcaactgggcatcactaaggtcttcagcaatggggctgacctctccggggtcacagagga

SEQ ID NO: 714795 - DNA, 120 bp, Artificial Sequence
  ENSG00000197249_11 (sequence is synthesized)
ggcacccctgaagctctccaaggccgtgcataaggctgtgctgaccatcgacgagaaagggactgaagctgctggggccatgtttttagaggccatacccatgtctatcccccccgaggt

SEQ ID NO: 714796 - DNA, 120 bp, Artificial Sequence
  ENSG00000197249_12 (sequence is synthesized)
caagttcaacaaaccctttgtcttcttaatgattgaacaaaataccaagtctcccctcttcatgggaaaagtggtgaatcccacccaaaaataactgcctctcgctcctcaacccctccc

SEQ ID NO: 714797 - DNA, 120 bp, Artificial Sequence
  ENSG00000197249_13 (sequence is synthesized)
ctgtatgtgggctccaggtaacagtgctgtcttcgggccccctgaactgtgttcatggagcatctggctgggtaggcacatgctgggcttgaatccaggggggactgaatcctcagctta

SEQ ID NO: 714798 - DNA, 120 bp, Artificial Sequence
  ENSG00000197249_14 (sequence is synthesized)
cggacctgggcccatctgtttctggagggctccagtcttccttgtcctgtcttggagtccccaagaaggaatcacaggggaggaaccagataccagccatgaccccaggctccaccaagc

SEQ ID NO: 714799 - DNA, 120 bp, Artificial Sequence
  ENSG00000197249_15 (sequence is synthesized)
atcttcatgtccccctgctcatcccccactcccccccacccagagttgctcatcctgccagggctggctgtgcccaccccaaggctgccctcctgggggccccagaactgcctgatcgtg

SEQ ID NO: 714800 - DNA, 120 bp, Artificial Sequence
  ENSG00000197249_16 (sequence is synthesized)
ccgtggcccagttttgtggcatctgcagcaacacaagagagaggacaatgtcctcctcttgacccgctgtcacctaaccagactcgggccctgcacctctcaggcacttctggaaaatga

SEQ ID NO: 714801 - DNA, 120 bp, Artificial Sequence
  ENSG00000197249_17 (sequence is synthesized)
ctgaggcagattcttcctgaagcccattctccatggggcaacaaggacacctattctgtccttgtccttccatcgctgccccagaaagcctcacatatctccgtttagaatcaggtccct

SEQ ID NO: 714802 - DNA, 120 bp, Artificial Sequence
  ENSG00000197249_18 (sequence is synthesized)
tctccccagatgaagaggagggtctctgctttgttttctctatctcctcctcagacttgaccaggcccagcaggccccagaagaccattaccctatatcccttctcctccctagtcacat

SEQ ID NO: 714803 - DNA, 120 bp, Artificial Sequence
  ENSG00000197249_19 (sequence is synthesized)
ggccataggcctgctgatggctcaggaaggccattgcaaggactcctcagctatgggagaggaagcacatcacccattgacccccgcaacccctccctttcctcctctgagtcccgactg

SEQ ID NO: 714804 - DNA, 120 bp, Artificial Sequence
  ENSG00000197249_20 (sequence is synthesized)
gggccacatgcagcctgacttctttgtgcctgttgctgtccctgcagtcttcagagggccaccgcagctccagtgccacggcaggaggctgttcctgaatagcccctgtggtaagggcca

SEQ ID NO: 714805 - DNA, 120 bp, Artificial Sequence
  ENSG00000197249_21 (sequence is synthesized)
ggagagtccttccatcctccaaggccctgctaaaggacacagcagccaggaagtcccctgggcccctagctgaaggacagcctgctccctccgtctctaccaggaatggccttgtcctat

SEQ ID NO: 714806 - DNA, 120 bp, Artificial Sequence
  ENSG00000197249_22 (sequence is synthesized)
ggaaggcactgccccatcccaaactaatctaggaatcactgtctaaccactcactgtcatgaatgtgtacttaaaggatgaggttgagtcataccaaatagtgatttcgatagttcaaaa

SEQ ID NO: 714807 - DNA, 120 bp, Artificial Sequence
  ENSG00000197249_23 (sequence is synthesized)
tggtgaaattagcaattctacatgattcagtctaatcaatggataccgactgtttcccacacaagtctcctgttctcttaagcttactcactgacagcctttcactctccacaaatacat

SEQ ID NO: 714808 - DNA, 120 bp, Artificial Sequence
  ENSG00000197249_24 (sequence is synthesized)
taaagatatggccatcaccaagccccctaggatgacaccagacctgagagtctgaagacctggatccaagttctgacttttccccctgacagctgtgtgaccttcgtgaagtcgccaaac

SEQ ID NO: 714809 - DNA, 120 bp, Artificial Sequence
  ENSG00000197249_25 (sequence is synthesized)
ctctctgagccccagtcattgctagtaagacctgcctttgagttggtatgatgttcaagttagataacaaaatgtttatacccattagaacagagaataaatagaactacatttcttgca

SEQ ID NO: 714810 - DNA, 120 bp, Artificial Sequence
  ENSG00000197249_26 (sequence is synthesized)
aggtacaatgactcctttcggtaagtgcagtggaagctgtacactgcccaggcaaagcgtccgggcagcgtaggcgggcgactcagatcccagccagtggacttagcccctgtttgctcc

SEQ ID NO: 714811 - DNA, 120 bp, Artificial Sequence
  ENSG00000197249_27 (sequence is synthesized)
tccgataactggggtgaccttggttaatattcaccagcagcctcccccgttgcccctctggatccactgcttaaatacggacgaggacagggccctgtctcctcagcttcaggcaccacc

SEQ ID NO: 714812 - DNA, 120 bp, Artificial Sequence
  ENSG00000197249_28 (sequence is synthesized)
ggcagtaagtcttcagcatcaggcattttggggtgactcagtaaatggtagatcttgctaccagtggaacagccactaaggattctgcagtgagagcagagggccagctaagtggtactc

SEQ ID NO: 714813 - DNA, 120 bp, Artificial Sequence
  ENSG00000197249_29 (sequence is synthesized)
tcccagagactgtctgactcacgccaccccctccaccttggacacaggacgctgtggtttctgagccaggtacaatgactcctttcgcagcctcccccgttgcccctctggatccactgc

SEQ ID NO: 714814 - DNA, 120 bp, Artificial Sequence
  ENSG00000197249_30 (sequence is synthesized)
aatccagcacaaacccctgctttcaaggagagatgagcgtctctaaagcccctgacagcaagagcccagaactgggacaccattagtgacccagacggcagggtcattgcagatgtaagt

SEQ ID NO: 714815 - DNA, 120 bp, Artificial Sequence
  ENSG00000197249_31 (sequence is synthesized)
cacacctcttagccatgttgggactgaggcccatcaggactggccagagggctgaggagggtgaaccccacatccctgggtcactgctactctgtataaacttggcttccagaatgaggc

SEQ ID NO: 714816 - DNA, 120 bp, Artificial Sequence
  ENSG00000197249_32 (sequence is synthesized)
caggcaccaccactgacctgggacagtgaatctgttactgatgtcggcaagtacttggcacaggctggtttaataatccctaggcacttccacgtggtgtcaatccctgatcactgggag

SEQ ID NO: 714817 - DNA, 120 bp, Artificial Sequence
  ENSG00000197249_33 (sequence is synthesized)
ctctccaaggtgagatcaccctgacgaccttgttgcaccctggtatctgtagggaagaatgtgtgggggctgcagctctgtcctgaggctgaggaaggggccgagggaaacaaatgaaga

SEQ ID NO: 714818 - DNA, 120 bp, Artificial Sequence
  ENSG00000197249_34 (sequence is synthesized)
cccaggctgagctcctgaagatgcccgtgattcactgacacgggacgtggtcaaacagcaaagccaggcaggggactgctgtgcagctggcactttcggggcctcccttgaggttgtgtc

SEQ ID NO: 714819 - DNA, 120 bp, Artificial Sequence
  ENSG00000197249_35 (sequence is synthesized)
actgaccctgaatttcaactttgcccaagaccttctagacattgggccttgatttatccatactgacacagaaaggtttgggctaagttgtttcaaaggaatttctgactccttcgatct

SEQ ID NO: 714820 - DNA, 120 bp, Artificial Sequence
  ENSG00000197249_36 (sequence is synthesized)
agcagcctcccccgttgcccctctggatccactgcttaaatacggacgaggacagggccctgtctcctcagcttcaggcaccaccactgacctgggacagtgaatctgagcatcgctaca

SEQ ID NO: 714821 - DNA, 120 bp, Artificial Sequence
  ENSG00000197249_37 (sequence is synthesized)
tcgcctggtagagccccaaggtggaggcataaatgggactggtgaatgacagaaggggcaaaaatgcactcatccattcactctgcaagtatctacggcacgtacgccagctcccaagca

SEQ ID NO: 714822 - DNA, 120 bp, Artificial Sequence
  ENSG00000197249_38 (sequence is synthesized)
ggtttgcgggttgcacagcgggcgatgcaatctgatttaggcttttaaagggattgcaatcaagtggggccccactagcctcaaccctgtacctcccctcccctccacccccagcagtct

SEQ ID NO: 714823 - DNA, 120 bp, Artificial Sequence
  ENSG00000197253_0 (sequence is synthesized)
ggtaagtccccactctcagagaccctgacatcagcgtcacctggagcagagtggcccagcctcagactcagagcaccaagacccaggcctgcaggcctggacccaccccggtccccccgt

SEQ ID NO: 714824 - DNA, 120 bp, Artificial Sequence
  ENSG00000197253_1 (sequence is synthesized)
cccagctccattcttcaccccacaatctgtagcccccagccctgccctgtgaggcccggccaggcccacgatgctcctccttgctccccagatgctgaatctgctgctgctggcgctgcc

SEQ ID NO: 714825 - DNA, 120 bp, Artificial Sequence
  ENSG00000197253_2 (sequence is synthesized)
cgtcctggcgagccgcgcctacgcggcccctgccccaggccaggccctgcagcgagtgggcatcgttgggggtcaggaggcccccaggagcaagtggccctggcaggtgagcctgagagt

SEQ ID NO: 714826 - DNA, 120 bp, Artificial Sequence
  ENSG00000197253_3 (sequence is synthesized)
ccgcgaccgatactggatgcacttctgcgggggctccctcatccacccccagtgggtgctgaccgcagcgcactgcgtgggaccggacgtcaaggatctggccgccctcagggtgcaact

SEQ ID NO: 714827 - DNA, 120 bp, Artificial Sequence
  ENSG00000197253_4 (sequence is synthesized)
gcgggagcagcacctctactaccaggaccagctgctgccggtcagcaggatcatcgtgcacccacagttctacaccgcccagatcggagcggacatcgccctgctggagctggaggagcc

SEQ ID NO: 714828 - DNA, 120 bp, Artificial Sequence
  ENSG00000197253_5 (sequence is synthesized)
ccctgccccctgcctcagagaccttccccccggggatgccgtgctgggtcactggctggggcgatgtggacaatgatgagcgcctcccaccgccatttcctctgaagcaggtgaaggtcc

SEQ ID NO: 714829 - DNA, 120 bp, Artificial Sequence
  ENSG00000197253_6 (sequence is synthesized)
ccataatggaaaaccacatttgtgacgcaaaataccaccttggcgcctacacgggagacgacgtccgcatcgtccgtgacgacatgctgtgtgccgggaacacccggagggactcatgcc

SEQ ID NO: 714830 - DNA, 120 bp, Artificial Sequence
  ENSG00000197253_7 (sequence is synthesized)
agggcgactccggagggcccctggtgtgcaaggtgaatggcacctggctgcaggcgggcgtggtcagctggggcgagggctgtgcccagcccaaccggcctggcatctacacccgtgtca

SEQ ID NO: 714831 - DNA, 120 bp, Artificial Sequence
  ENSG00000197253_8 (sequence is synthesized)
cctactacttggactggatccaccactatgtccccaaaaagccgtgagtcaggcctggggtgtccacctgggtcactggagagccagcccctcctgttcaaaacaccactgcttcctacc

SEQ ID NO: 714832 - DNA, 120 bp, Artificial Sequence
  ENSG00000197253_9 (sequence is synthesized)
caggtggcgactgccccccacaccttccctgccccgtcctgagtgccccttcctgtcctaagccccctgctctcttctgagccccttcccctgtcctgaggacccttccccatcctgagc

SEQ ID NO: 714833 - DNA, 120 bp, Artificial Sequence
  ENSG00000197253_10 (sequence is synthesized)
ccccttccctgtcctaagcctgacgcctgcaccgggccctccggccctcccctgcccaggcagctggtggtgggcgctaatcctcctgagtgctggacctcattaaagtgcatggaaatc

SEQ ID NO: 714834 - DNA, 120 bp, Artificial Sequence
  ENSG00000197253_11 (sequence is synthesized)
acattttcaaattcattttgaggtctttctctacatcaatagatgcagagatgtgcatttagtctcccgaatctctgcaaatgacctctgtcctcacaaggggtggactcaactcccagt

SEQ ID NO: 714835 - DNA, 120 bp, Artificial Sequence
  ENSG00000197253_12 (sequence is synthesized)
gccctctccagccccacgtgacctctgcctctgcagcccctgaaggcccatccctcggctcctgttctgcaggcccagcgtcttgttaatgaagatggacctggaactcgggcccttctt

SEQ ID NO: 714836 - DNA, 120 bp, Artificial Sequence
  ENSG00000197256_0 (sequence is synthesized)
gcgggacccagggaaggcagcggccggagcgcgcaaggtgttgaaagacagagaagcgaagacagagacgtggaaagacagggagagagacacggagagagacgcagaaggacagagacg

SEQ ID NO: 714837 - DNA, 120 bp, Artificial Sequence
  ENSG00000197256_1 (sequence is synthesized)
tggagagagacgcagagagacagagacgtggagagacacagagagacgtggagagacacagagagacttggagagagacaaagcaagacaggacgggagaacaaggacaagctcaggtaa

SEQ ID NO: 714838 - DNA, 120 bp, Artificial Sequence
  ENSG00000197256_2 (sequence is synthesized)
gcctcagccggtgctgcaggcagtctgactcgcagtccctcaagtgacttccaaggagcatctgtagaaaagaagatggcccaggtcctgcacgtgcctgctcccttcccagggacccct

SEQ ID NO: 714839 - DNA, 120 bp, Artificial Sequence
  ENSG00000197256_3 (sequence is synthesized)
ggcccagcctccccacctgccttccctgccaaggaccccgatccaccctactccgtggagaccccctatggctaccgcctggacctggacttcctcaagtacgtggatgacatcgagaag

SEQ ID NO: 714840 - DNA, 120 bp, Artificial Sequence
  ENSG00000197256_4 (sequence is synthesized)
ggccacacgctgcgacgcgtggcagtgcagcgccgcccccgcctgagctcgctgccccgtggccctggctcctggtggacgtccactgagtcgctgtgctccaatgccagtggggacagc

SEQ ID NO: 714841 - DNA, 120 bp, Artificial Sequence
  ENSG00000197256_5 (sequence is synthesized)
cgccactcagcctattcctactgcggccgtggcttctaccctcagtatggtgctctggagacccgcggtggcttcaatccgcgggtggagcgcacgctgctggatgcccgtcgccgtctc

SEQ ID NO: 714842 - DNA, 120 bp, Artificial Sequence
  ENSG00000197256_6 (sequence is synthesized)
gaggaccaggcggccacacccaccggcctgggctccctgacccccagtgcggccggctcgacagcctccctggtgggcgtggggttgccacccccgacaccacggagttcaggactgtcc

SEQ ID NO: 714843 - DNA, 120 bp, Artificial Sequence
  ENSG00000197256_7 (sequence is synthesized)
acaccggtgcctcccagtgccgggcacctggcccacgtgcgggagcagatggcgggtgccctgcggaagctgcggcagctggaggagcaggtgaagctgatccctgtgctccaggtgaag

SEQ ID NO: 714844 - DNA, 120 bp, Artificial Sequence
  ENSG00000197256_8 (sequence is synthesized)
ctctcggtgctccaggaggaaaagcggcagctcacagtacaacttaagagccagaagttcctgggccaccccacagcgggccggggtcgcagcgagctctgcctggacctccccgatccc

SEQ ID NO: 714845 - DNA, 120 bp, Artificial Sequence
  ENSG00000197256_9 (sequence is synthesized)
ccagaggacccagtggcactggagacccggagtgtgggcacctgggttcgagaacgggacttgggcatgcctgatggggaggctgccctcgccgccaaggtcgctgtgctggagacccag

SEQ ID NO: 714846 - DNA, 120 bp, Artificial Sequence
  ENSG00000197256_10 (sequence is synthesized)
ctcaagaaggcgctgcaggagctgcaggcagctcaggcccggcaggctgacccccagccccaggcctggccaccgccggacagcccggtccgcgtggatacagtccgggtggtagaaggg

SEQ ID NO: 714847 - DNA, 120 bp, Artificial Sequence
  ENSG00000197256_11 (sequence is synthesized)
ccacgggaggtggaggtggtggccagcacagccgctggcgcccccgcacagcgggcccagagcctggagccttacggcacagggctgagggccctggcaatgcctggtaggcctgagagc

SEQ ID NO: 714848 - DNA, 120 bp, Artificial Sequence
  ENSG00000197256_12 (sequence is synthesized)
ccacctgtgttccgcagccaggaggtggtggagacaatgtgcccagtgcccgctgcagctaccagcaacgtccatatggtgaagaagattagcatcacagagcgaagctgcgatggagca

SEQ ID NO: 714849 - DNA, 120 bp, Artificial Sequence
  ENSG00000197256_13 (sequence is synthesized)
gcaggcctcccagaagttcctgccgaatcgtcttcgtcacccccggggtccgaggtagcctcccttacacagcctgagaagagcacaggccgagtgcccacccaggagcccacccacagg

SEQ ID NO: 714850 - DNA, 120 bp, Artificial Sequence
  ENSG00000197256_14 (sequence is synthesized)
gagcccaccaggcaagcagcctcccaagagtccgaggaggccgggggcaccggcgggcccccggcaggcgtgcgatctatcatgaaacggaaagaggaggttgcagaccccacggcccac

SEQ ID NO: 714851 - DNA, 120 bp, Artificial Sequence
  ENSG00000197256_15 (sequence is synthesized)
cggaggagcctccagttcgtgggggtcaacggcgggtatgagtcgtcatccgaggactccagcacagcagagaacatctcagacaacgacagcacagagaacgaggccccagagccgagg

SEQ ID NO: 714852 - DNA, 120 bp, Artificial Sequence
  ENSG00000197256_16 (sequence is synthesized)
gagagggttccgagtgtggccgaagccccccagctcaggcctgcagggacggcagcggccaagaccagccggcaggagtgtcagctgtctcgagaatctcagcacatacccactgctgag

SEQ ID NO: 714853 - DNA, 120 bp, Artificial Sequence
  ENSG00000197256_17 (sequence is synthesized)
ggggcatcaggatcaaacacggaggaggagatcaggatggagctaagccctgacctcatctcagcctgcttggccctggaaaagtacctggacaatcccaacgccctcacagagcgggag

SEQ ID NO: 714854 - DNA, 120 bp, Artificial Sequence
  ENSG00000197256_18 (sequence is synthesized)
ctgaaagtggcctacaccacagtgctgcaggagtggctgcgcctggcctgccgcagcgacgcacaccccgagctggtgcggcggcacctggtcacgttccgggccatgtctgcgcggctg

SEQ ID NO: 714855 - DNA, 120 bp, Artificial Sequence
  ENSG00000197256_19 (sequence is synthesized)
ctggactacgtggtcaacatcgccgacagcaacggcaacacagccctgcactactccgtgtctcatgccaacttccccgtggtgcagcagctgctcgacagcggtgtctgcaaggtggac

SEQ ID NO: 714856 - DNA, 120 bp, Artificial Sequence
  ENSG00000197256_20 (sequence is synthesized)
aaacagaaccgtgctggctacagccctattatgctcaccgccctggccaccctgaagacccaggacgacatcgagactgtccttcagctcttccggcttggcaacatcaatgccaaagcc

SEQ ID NO: 714857 - DNA, 120 bp, Artificial Sequence
  ENSG00000197256_21 (sequence is synthesized)
ccaggcaggacagacggccctgatgctggccgtcagccacgggcgggtggacgttgtcaaagccctgctggcctgtgaggcagatgtcaacgtgcaagatgatgacggctccacggccct

SEQ ID NO: 714858 - DNA, 120 bp, Artificial Sequence
  ENSG00000197256_22 (sequence is synthesized)
catgtgcgcctgtgagcacggccacaaggagatcgcggggctgctgctggccgtgcccagctgtgacatctcactcacagatcgcgatgggagcacagctctgatggtggccttggacgc

SEQ ID NO: 714859 - DNA, 120 bp, Artificial Sequence
  ENSG00000197256_23 (sequence is synthesized)
agggcagagtgagattgcgtccatgctgtattcccgcatgaacatcaagtgctcgtttgccccaatgtcagatgacgagagccctacatcatcctcggcagaagagtagccgtgagggag

SEQ ID NO: 714860 - DNA, 120 bp, Artificial Sequence
  ENSG00000197256_24 (sequence is synthesized)
gcggggaccagccagaccgggagcaaaccgtcccttgtccccgtctcctccctgttcccgttcctccctggcccaccccactcacactccccaaggcccacggctcaaaggcaagcgagc

SEQ ID NO: 714861 - DNA, 120 bp, Artificial Sequence
  ENSG00000197256_25 (sequence is synthesized)
tctccctctgcttccctgggggagccccgacggccacaggactccagctccaagtgggttttcttggctcccctgttcaaagtggccacagcgcagaccgaagcaaaattcttgtataca

SEQ ID NO: 714862 - DNA, 120 bp, Artificial Sequence
  ENSG00000197256_26 (sequence is synthesized)
ttggcgccagggctgatgctggggtgtgggttttatgaagaacattgagaacaatcagctggtaattatggatggaggaagagggagaggaaaaaaatattgtatttttgaatcattgtt

SEQ ID NO: 714863 - DNA, 120 bp, Artificial Sequence
  ENSG00000197256_27 (sequence is synthesized)
gcaggagggggtgggaatcttaggatttgttgccagatttgaaagtcactggaacttgcatattttcattttaatcctaagtgttattacgcaccagttggggttcacccttcatccccc

SEQ ID NO: 714864 - DNA, 120 bp, Artificial Sequence
  ENSG00000197256_28 (sequence is synthesized)
acatttaattgtctgatatagaatagtgttgtgtccactgccccgctagacggctttcttaggggaattttcttctggttgtttcacaagacagattctgtccttgtcacccgggacaga

SEQ ID NO: 714865 - DNA, 120 bp, Artificial Sequence
  ENSG00000197256_29 (sequence is synthesized)
aaactcagtcttttcaccctcattcagatgaagggactcaggacaggctctgtgacttacagggacccaatcaattcacaatgagaaattaccggccaggcgtggtgactcacgtctgta

SEQ ID NO: 714866 - DNA, 90 bp, Artificial Sequence
  ENSG00000197256_30 (sequence is synthesized)
atcccagcactttgggagggcaaggcaagagcttgagcttgagcctagacgttaatctctacaagaaatttaaaaactagccaggcgtgg

SEQ ID NO: 714867 - DNA, 120 bp, Artificial Sequence
  ENSG00000197256_31 (sequence is synthesized)
gtagtcccagctacttgggaggctgagccctggaggtcgaggctacagtgagctatgatcacaccattgcacttcagcctgggcgacacagcgagaccctgtctcaagaaagaaaagaaa

SEQ ID NO: 714868 - DNA, 120 bp, Artificial Sequence
  ENSG00000197256_32 (sequence is synthesized)
aaagaaaagaaaaagagacaaattacccagaaacccctcccttccccacatggaggccttggcaaatgttaattttcctagaaaatccttcagacctgaagacgcaggaaaagaatctgg

SEQ ID NO: 714869 - DNA, 120 bp, Artificial Sequence
  ENSG00000197256_33 (sequence is synthesized)
ctctcagggtggcttctgcgtccccgccgccaggccccagactatggtcacagggccgtcctgttcctccccgggactccagaatttctctcctcaaaggaaagaaaacagggcatgcgc

SEQ ID NO: 714870 - DNA, 120 bp, Artificial Sequence
  ENSG00000197256_34 (sequence is synthesized)
ttgttggcaaaacgcagggccggctcccaaaaaccccatgtgtgtacgattaaaagttggccgtccccaggcctcccagcgcaaacttcaagagacagggctttgctgaaaaccaaacat

SEQ ID NO: 714871 - DNA, 120 bp, Artificial Sequence
  ENSG00000197256_35 (sequence is synthesized)
gggccagctgggctttttaacaacctagagactttccggagctgcctggaacagagcctgcgggaaacggggcttgccagagacactcacagtttccttcatggcctgttttggtcccct

SEQ ID NO: 714872 - DNA, 120 bp, Artificial Sequence
  ENSG00000197256_36 (sequence is synthesized)
aagaatctccacatcattgtctttcttgtgccttttccttggtgagcaacagaaagggaagggttccaagcctctaaaaatgtgctttgtgatcaggagtgcgctccaaaccaaatacgc

SEQ ID NO: 714873 - DNA, 120 bp, Artificial Sequence
  ENSG00000197256_37 (sequence is synthesized)
gcgctgccctttcgaggccagtgagctcagcctccaaggctttaaagccacatttcagcaagagaaagcgctgagagctcgcaggttcattaaagaaggcaaagcactggtttctctcct

SEQ ID NO: 714874 - DNA, 120 bp, Artificial Sequence
  ENSG00000197256_38 (sequence is synthesized)
tagaaaagtaggtttcttggcttgatgtagactggcttgctttgatttttagtgaagggaatgtacgtaaaacaaaatagggcttggctggtcaaaggagacaagcaggatggatggatg

SEQ ID NO: 714875 - DNA, 120 bp, Artificial Sequence
  ENSG00000197256_39 (sequence is synthesized)
gatggatggatggatggatgaatagatagatggtgtttgcatgtaaattgcagagaaaacaaaaccaaagctgattggaaacaattaattgtgggtgtctgagggggaaggtcgcagctt

SEQ ID NO: 714876 - DNA, 120 bp, Artificial Sequence
  ENSG00000197256_40 (sequence is synthesized)
gggaaggtcgcagctttgggcagctttgagaagcggtacaagagttctgtgcctgtgtgtccagccctggagccagccagtgcatttattttaagctcttagaagcaactccttggccca

SEQ ID NO: 714877 - DNA, 120 bp, Artificial Sequence
  ENSG00000197256_41 (sequence is synthesized)
ggaatgcgtgacccctgagatgggtccacgcatctctctacacttccttctctccgtgggatactggactcgtgcctctgcgcccattctcttctcacgcatatccatgagctttaattt

SEQ ID NO: 714878 - DNA, 120 bp, Artificial Sequence
  ENSG00000197256_42 (sequence is synthesized)
cactttctgatcacggtacgtccataaagccagtattacacttaaatgaagtattcttttttgtaatcgttttttttagaaggtaaacaaatttaataaagctaccaataatgttgatga

SEQ ID NO: 714879 - DNA, 120 bp, Artificial Sequence
  ENSG00000197256_43 (sequence is synthesized)
gcggcgcgcgcgaagacgctcgggcggcgggacccagggaaggcagcggccggagcgcgcaaggggtgagcctccaggcaaatggaaaacggaatttcctgcaattggtgaccatgtgtt

SEQ ID NO: 714880 - DNA, 120 bp, Artificial Sequence
  ENSG00000197256_44 (sequence is synthesized)
gcgtccatgctgtattcccgcatgaacatcaagtgctcggtgagtctcaatccggccgggtaggcacgggatgggtgggtctctgaaaggacagagatttgttgtttttgtttttgaggc

SEQ ID NO: 714881 - DNA, 78 bp, Artificial Sequence
  ENSG00000197256_45 (sequence is synthesized)
tgggtggcacgatctgggctcattgcaacctccgcctcccggcttcaagccattctgctgcctcagcctcctgagtag

SEQ ID NO: 714882 - DNA, 120 bp, Artificial Sequence
  ENSG00000197256_46 (sequence is synthesized)
caggcaggcaggggagaatggcttggggggggggggcctctttcttcccatggctcatcctggactctcagaacgccagggtccaggcagggtgcggtggcgcatgcctgtaatcccagc

SEQ ID NO: 714883 - DNA, 120 bp, Artificial Sequence
  ENSG00000197256_47 (sequence is synthesized)
agagaaaattgtttccataaaggggaaaggcttcactcctagctgcctccccaactttccctaccccttccccccgacccagtccaggcctgacccagctctcagctttggggtcactgg

SEQ ID NO: 714884 - DNA, 120 bp, Artificial Sequence
  ENSG00000197256_48 (sequence is synthesized)
gggtccccttcgccatgctttgcctctctttgtccccctgcgtctctgtctcctcagatccttgcaggaagacgaggttcccttcttccccaaccccttagcgcctcaacccccatcctt

SEQ ID NO: 714885 - DNA, 120 bp, Artificial Sequence
  ENSG00000197256_49 (sequence is synthesized)
ccgtgtggccagctccgggcctgggctgaggggagggggtgcaggaagggtggggcctgttgggcttggggccccccagccccagggctatgtggaggctgggctatgggaacagctgga

SEQ ID NO: 714886 - DNA, 64 bp, Artificial Sequence
  ENSG00000197256_50 (sequence is synthesized)
gagttgatgtgttgaaagacagagaagcgaagacagagacgtggaaagacagggagagagacac

SEQ ID NO: 714887 - DNA, 120 bp, Artificial Sequence
  ENSG00000197256_51 (sequence is synthesized)
cccgctctcccctgtctctgtcccactttctgcctctgttcctccccggctctgccctctccccgcactgtcccccctcgccctcctccgcggccatgccccagacggcgggaaggcggc

SEQ ID NO: 714888 - DNA, 120 bp, Artificial Sequence
  ENSG00000197256_52 (sequence is synthesized)
cgtccggccgggctgggcctgggcttggcggctgggccggcgtggggagcggcagctgtttgccattagcccgggatcccacaggccccgccccctctctgcacggggcggggtccttct

SEQ ID NO: 714889 - DNA, 120 bp, Artificial Sequence
  ENSG00000197256_53 (sequence is synthesized)
ttctcgcctccccccaccccgagtttggggcgggaagacccccccccaccaccaccaccgacctccgcgatgtgcaggccggtcttgggtggtgggttggggagacccgcgccccttccc

SEQ ID NO: 714890 - DNA, 120 bp, Artificial Sequence
  ENSG00000197256_54 (sequence is synthesized)
tgcgctccctacctgtcccctcttataggctccagtctctccatctctgtcttatcctgtcaccccttccccattccccaggggtcccatggcgagagaagggtctcagccacagacatc

SEQ ID NO: 714891 - DNA, 120 bp, Artificial Sequence
  ENSG00000197256_55 (sequence is synthesized)
cgggacgtgctggtcctcatcgagggcggtgagatgactgagtaccctcagacctcagtctccgtatctgggaaacgggtagagatatctgatgtggagtctgagggtggtggcttggtg

SEQ ID NO: 714892 - DNA, 120 bp, Artificial Sequence
  ENSG00000197256_56 (sequence is synthesized)
ggcagtggggggatccaccaggcttaggttcatgttcaggcccagccacttccccatggccccagtgaccccgaggaagccactgtacctttctgtaccctctgcatcccctgtctgtga

SEQ ID NO: 714893 - DNA, 120 bp, Artificial Sequence
  ENSG00000197256_57 (sequence is synthesized)
gtacctttctgtaccctctgcatcccctgtctgtgaaacggggcgataagtgcccatctcatagaattgtcatgacaattaaaagagttgatgttaggctgggtgcagtggctcatgcct

SEQ ID NO: 714894 - DNA, 120 bp, Artificial Sequence
  ENSG00000197261_0 (sequence is synthesized)
gcggttagcctggggctgatctagtcttcagctttcaccggctgggagtccggagctgcagcagaggccacacccagggcttggtggtcccgcgctttccggagctcagcaggcgcttgc

SEQ ID NO: 714895 - DNA, 120 bp, Artificial Sequence
  ENSG00000197261_1 (sequence is synthesized)
tgcttgaaccggtcaaagaaggaacgaatgaatgacccttttgccaggatggagacccgggggcctcagggagctgcgaatcccatggactcctcccgcagcctgggggacctcgggcct

SEQ ID NO: 714896 - DNA, 120 bp, Artificial Sequence
  ENSG00000197261_2 (sequence is synthesized)
tttccgcgggaggtagggcgcggggctccgctagctccgggcgcccggaatcccgcgacggcaggggcgagccgaagccagggcggcggccacgaggacagaacggcagatcgggccctc

SEQ ID NO: 714897 - DNA, 120 bp, Artificial Sequence
  ENSG00000197261_3 (sequence is synthesized)
ggacctcgggccggggaggaattggaccgtgagtcctgggtcagagagaaagtgctctttctcctgcacccagagaggtggttagggactcgaggggaccctgcacgggaagaggtggcc

SEQ ID NO: 714898 - DNA, 120 bp, Artificial Sequence
  ENSG00000197261_4 (sequence is synthesized)
ggtgcagaggaccttcctcatgcgggtggagaggaccacggcgaggagcccaactacccttctgtctttcaacgacaaaagcgaatttctggcaggcgtgtagccccgccgcgggacgca

SEQ ID NO: 714899 - DNA, 120 bp, Artificial Sequence
  ENSG00000197261_5 (sequence is synthesized)
gcagacccacccaaatacgtgcttgtgcgggtggaggattatcaggtaacacaagaagtgttgcagacctcctgggccaagggtcgcatgaccacgaggactgaggagcacttcgtgacc

SEQ ID NO: 714900 - DNA, 120 bp, Artificial Sequence
  ENSG00000197261_6 (sequence is synthesized)
ttcgcagcagtagagagggacagcctggggaacgctggggccctgctgaatcccgggctctccaggcacgaacaggggcatcccgcgtccacgccgcggggaggagggtttcaccgtctc

SEQ ID NO: 714901 - DNA, 120 bp, Artificial Sequence
  ENSG00000197261_7 (sequence is synthesized)
cagggacttggctcgaggaaattaaactctaatgagtagctcgagaaatgttccgggatggtggatgagcgatcatccttaaaagaaaatgctattctgggagctccaacctgcaattaa

SEQ ID NO: 714902 - DNA, 120 bp, Artificial Sequence
  ENSG00000197261_8 (sequence is synthesized)
cctacagaaggaaccttttgagaggctggtgcagcgcttcggggaggcagattaagaactgtaagcagcataatacctcctttgtggcttgaattccttcgctgtctggggacctaagtc

SEQ ID NO: 714903 - DNA, 120 bp, Artificial Sequence
  ENSG00000197261_9 (sequence is synthesized)
attcagaagaggtggagaaaagatattttcagattggcagaatgtgggagttttgaaatgagaaaacctgttgttaatttgcattttggaataactctcaattgatctcttttctgttcc

SEQ ID NO: 714904 - DNA, 120 bp, Artificial Sequence
  ENSG00000197261_10 (sequence is synthesized)
ccgcccccctcttgtttctctttaggacctagaaacagaagtgaagtttgaagtctgctctctgcaaagagggtgggagtgggtggagaagaggcttgttttaaaagccaaaaacagaaa

SEQ ID NO: 714905 - DNA, 120 bp, Artificial Sequence
  ENSG00000197261_11 (sequence is synthesized)
gtaaaaagaaatgggaaagtaaaaccaaagcagcaagtgactctcttctgatgtgcacttttcatttttctcccccacatttcagtgttagaaagaaaacgagaggagctagggaaagaa

SEQ ID NO: 714906 - DNA, 120 bp, Artificial Sequence
  ENSG00000197261_12 (sequence is synthesized)
aggctggtgcagcgcttcggggaggcagattaagaactgtgttcctgatccaagcagaaccctgttatttgaagagcctgagaaatcttatcccgtttacaaatgtcctgggagtgcatc

SEQ ID NO: 714907 - DNA, 120 bp, Artificial Sequence
  ENSG00000197261_13 (sequence is synthesized)
caaagtgaaacttgggcatcctcaatactaagaaatctctgagaatgactggatcttggctctttgatcttacctctactcctctgaaaaacatgattatctaaaattgtgttaggtgga

SEQ ID NO: 714908 - DNA, 120 bp, Artificial Sequence
  ENSG00000197261_14 (sequence is synthesized)
gtgttaggtggatgaaccgcatcaaagacttccagaagccactccagtgaccataagataaatgtcagaatcgcataacccccaggatcagcctgttgctcaggctggagtgcaatggca

SEQ ID NO: 714909 - DNA, 120 bp, Artificial Sequence
  ENSG00000197261_15 (sequence is synthesized)
actgtcatgtagttagtgataaaatgcttctatctgaaaaaaaatttgttgttctaaattctaaaaaattctcgtgattattgcttaaattttaataaagcagatgtgattttcaaatta

SEQ ID NO: 714910 - DNA, 120 bp, Artificial Sequence
  ENSG00000197261_16 (sequence is synthesized)
cggggaggcagattaagaactttggcctggttgaagctctgtgaggagcaaagcagccctctccaggtgaactgcttgactttaccacctgaaggagtatttactgcaagaattaacaaa

SEQ ID NO: 714911 - DNA, 120 bp, Artificial Sequence
  ENSG00000197261_17 (sequence is synthesized)
ttactgcaagaattaacaaagcagactgcagtgcaacggcacgatcttggctcaccacaacctctacctccagggttcaagcgatgctcctacctcagcctcctcagtagctgggattac

SEQ ID NO: 714912 - DNA, 120 bp, Artificial Sequence
  ENSG00000197261_18 (sequence is synthesized)
agataaatgtcagaatcgcataacccccaggatcagagatggagtctcactctgtcacccagcctggaatgtagtggcatcattgtaactcactgcagcctgaaactccttggcttaagt

SEQ ID NO: 714913 - DNA, 76 bp, Artificial Sequence
  ENSG00000197261_19 (sequence is synthesized)
aagctaccatgcctggctattcttttttgttaattttttttaaactaaggaatgaagaaaataaaacattacatga

SEQ ID NO: 714914 - DNA, 120 bp, Artificial Sequence
  ENSG00000197261_20 (sequence is synthesized)
ccttgtgtagttcaaaaaaatctcctctggtaatactgaaacaactaatttttcttattttgtttgttcctctttattattaaatactatgtgaattaactctttagtagttggcctggt

SEQ ID NO: 714915 - DNA, 120 bp, Artificial Sequence
  ENSG00000197261_21 (sequence is synthesized)
ttacaaccatgatctccttttgggaatcattacatttgacttactgcttatttttgttggatgttaccagtgcttggtgataaaacttgatgtggctctttgctttgaaaaagaaaaaaa

SEQ ID NO: 714916 - DNA, 120 bp, Artificial Sequence
  ENSG00000197265_0 (sequence is synthesized)
actgagctcctagcacccgatcgggaagtggcgggcggagtcccgggtccagtcgccgcctcagctaccgccgctgccgccgccgccgccgccaccgccagtggtgagaccccgacctgg

SEQ ID NO: 714917 - DNA, 120 bp, Artificial Sequence
  ENSG00000197265_1 (sequence is synthesized)
tgagaccccgacctggcgggtcagcgctgggcgtgcgtgcgggcaggcgggggcgctgacgagaagcaggaagagggtgcagtgccggcgtgggcggccggccgaggcggaggcgcagga

SEQ ID NO: 714918 - DNA, 120 bp, Artificial Sequence
  ENSG00000197265_2 (sequence is synthesized)
tgcgaggctgcccttctcactcagcattatggatccaagcctgttgagagaaagggagctgttcaaaaaacgagctctttctactcctgtagtagaaaaacgttcagcatcttctgagtc

SEQ ID NO: 714919 - DNA, 120 bp, Artificial Sequence
  ENSG00000197265_3 (sequence is synthesized)
atcatcatcatcgtcaaagaagaagaaaacaaaggtagaacatggaggatcgtcaggctctaaacaaaattctgatcatagcaatggatcatttaacttgaaagctttgtcaggaagctc

SEQ ID NO: 714920 - DNA, 120 bp, Artificial Sequence
  ENSG00000197265_4 (sequence is synthesized)
tggatataagtttggtgttcttgctaagattgtgaattacatgaagacacggcatcagcgaggagatacgcatcctctaaccttagatgaaattttggatgaaacacaacatttagatat

SEQ ID NO: 714921 - DNA, 120 bp, Artificial Sequence
  ENSG00000197265_5 (sequence is synthesized)
tggactcaagcagaaacaatggctaatgactgaggctttagtcaacaatcccaaaattgaagtaatagatgggaagtatgctttcaagcccaagtacaacgtgagagataagaaggccct

SEQ ID NO: 714922 - DNA, 120 bp, Artificial Sequence
  ENSG00000197265_6 (sequence is synthesized)
acttaggctcttagatcagcatgaccagcgaggattaggaggaattcttttagaagacatagaagaagcactgcccaattcccagaaagctgtcaaggctttgggggaccagatactatt

SEQ ID NO: 714923 - DNA, 120 bp, Artificial Sequence
  ENSG00000197265_7 (sequence is synthesized)
gaagaatttcagaaactgtggaggagtgtcactgtagattccatggacgaggagaaaattgaagaatatctgaagcgacagggtatttcttccatgcaggaatctggaccaaagaaagtg

SEQ ID NO: 714924 - DNA, 120 bp, Artificial Sequence
  ENSG00000197265_8 (sequence is synthesized)
gcccctattcagagaaggaaaaagcctgcttcacagaaaaagcgacgctttaagactcataacgaacacttggctggagtgctgaaggattactctgacattacttccagcaaataggga

SEQ ID NO: 714925 - DNA, 120 bp, Artificial Sequence
  ENSG00000197265_9 (sequence is synthesized)
acagttttgccctggaacagagttacagatacacaatcaagagtgttcttgctgatgctcggggtctgaagactgtcttcctatctgcttcttgcggctgaggagaggagcagttcagtt

SEQ ID NO: 714926 - DNA, 120 bp, Artificial Sequence
  ENSG00000197265_10 (sequence is synthesized)
tacaaaacaagtgcaaattaccaaactcaaagcttatttgagtagaatgggctcatgggcaatgtgatgttccctgttaaccttctgttactccctgggagaaaggcgctgagcgtggca

SEQ ID NO: 714927 - DNA, 120 bp, Artificial Sequence
  ENSG00000197265_11 (sequence is synthesized)
tgcaggtgtctttgctgtgtttttctccacttctaaatggttcctggttcctttcttcctcgtttgttactttagagcaagtttgcccatagtcttgaatgcaatatttgtttattccaa

SEQ ID NO: 714928 - DNA, 120 bp, Artificial Sequence
  ENSG00000197265_12 (sequence is synthesized)
aagaacatatttataataaaatcactgtagaaggatttttaagatgttagtgaattctgtttcttttcattctcggaaatggcaggaagcagctccagtctctgatttccatgggtcacg

SEQ ID NO: 714929 - DNA, 120 bp, Artificial Sequence
  ENSG00000197265_13 (sequence is synthesized)
tgctggggatgtgatgaagcctgcagtctgcactgtgttgctgagcacatggatttcaccactggaacacaggtgtgctgcttgttagcaagcagagcaataaagatgtgctggatgtca

SEQ ID NO: 714930 - DNA, 78 bp, Artificial Sequence
  ENSG00000197265_14 (sequence is synthesized)
agatactatttgtaaatcgtcccgataagaagaaaatacttttcttcaatgataagagctgtcagttttctgtggatg

SEQ ID NO: 714931 - DNA, 120 bp, Artificial Sequence
  ENSG00000197265_15 (sequence is synthesized)
cagaaaaattaagatgtttgcaccactttgtgcaggaaatgtggtaactgaggtcacagccaggccatctggctctgaggcctgcaccacactgttgtgctacttttgcatttacgggaa

SEQ ID NO: 714932 - DNA, 120 bp, Artificial Sequence
  ENSG00000197265_16 (sequence is synthesized)
agggctaagcacagacaaaatgtgagtgcgttatttgggaattttaagcaaagcctcattggtaagttggctcattttcttcccttctatggcagttacacagttttttattcttaactc

SEQ ID NO: 714933 - DNA, 120 bp, Artificial Sequence
  ENSG00000197265_17 (sequence is synthesized)
atgtgggacaaggaagggtcttttgaaatgaaaggatcaaatctgagcttttaaattctagtctgttttctcctcttttctgctaagagagtagatttctaaatcagttctgattttatt

SEQ ID NO: 714934 - DNA, 120 bp, Artificial Sequence
  ENSG00000197265_18 (sequence is synthesized)
gtcaggaggtttggttcctggccctggctcttccatctgtgcgaccttaaccagacagcttcacttcagatttcacgtattaaaataggaataacactaatacctgtttgctcctagagt

SEQ ID NO: 714935 - DNA, 120 bp, Artificial Sequence
  ENSG00000197272_0 (sequence is synthesized)
gaccaaagaggctgggccccgccatgggccagacggcaggcgaccttggctggcggctcagcctgttgctgcttcccttgctcctggttcaagctggtgtctggggattcccaaggcccc

SEQ ID NO: 714936 - DNA, 120 bp, Artificial Sequence
  ENSG00000197272_1 (sequence is synthesized)
cagggaggccccagctgagcctgcaggagctgcggagggagttcacagtcagcctgcatctcgccaggaagctgctctccgaggttcggggccaggcccaccgctttgcggaatctcacc

SEQ ID NO: 714937 - DNA, 120 bp, Artificial Sequence
  ENSG00000197272_2 (sequence is synthesized)
tgccaggagtgaacctgtacctcctgcccctgggagagcagctccctgatgtttccctgaccttccaggcctggcgccgcctctctgacccggagcgtctctgcttcatctccaccacgc

SEQ ID NO: 714938 - DNA, 120 bp, Artificial Sequence
  ENSG00000197272_3 (sequence is synthesized)
ttcagcccttccatgccctgctgggagggctggggacccagggccgctggaccaacatggagaggatgcagctgtgggccatgaggctggacctccgcgatctgcagcggcacctccgct

SEQ ID NO: 714939 - DNA, 120 bp, Artificial Sequence
  ENSG00000197272_4 (sequence is synthesized)
tcccaggggcactgggcagcgccttacagggcccggcccaggtgtcctggccccagctcctctccacctaccgcctgctgcactccttggagctcgtcttatctcgggccgtgcgggagt

SEQ ID NO: 714940 - DNA, 120 bp, Artificial Sequence
  ENSG00000197272_5 (sequence is synthesized)
tgctgctgctgtccaaggctgggcactcagtctggcccttggggttcccaacattgagcccccagccctgatcggtggcttcttagccccctgccccccaccctttagaactttaggact

SEQ ID NO: 714941 - DNA, 120 bp, Artificial Sequence
  ENSG00000197272_6 (sequence is synthesized)
ggagtcttggcatcagggcagccttcgcatcatcagccttggacaagggagggctcttccagccccctgccccaggctctacccagtaactgaaagcccctctggtcctcgccagctatt

SEQ ID NO: 714942 - DNA, 120 bp, Artificial Sequence
  ENSG00000197272_7 (sequence is synthesized)
tatttcttggatatttatttattgtttagggagatgatggtttatttattgtcttggggcccgatggtcctcctcgggccaagcccccatgctgggtgcccaataaagcactctcatcca

SEQ ID NO: 714943 - DNA, 120 bp, Artificial Sequence
  ENSG00000197272_8 (sequence is synthesized)
cccgcactggcccacgctgaagataggggacttgagttccagtcttccttctgctaccgaccggctttgtgaccttgaacaagacttcccctccctgattccatcctcatgtcacatctg

SEQ ID NO: 714944 - DNA, 120 bp, Artificial Sequence
  ENSG00000197272_9 (sequence is synthesized)
aagcctccaacttctgtcactgagctcaggattcccaggcaagcccacggagtgccccacagggtcagagccgtaacaggacttggaaaataacccgaaaattgggctcagcctgttgct

SEQ ID NO: 714945 - DNA, 120 bp, Artificial Sequence
  ENSG00000197273_0 (sequence is synthesized)
agaacagccacccctctctcgggcactgctgccatgaatgccttcctgctctccgcactgtgcctccttggggcctgggccgccttggcaggaggggtcaccgtgcaggatggaaatttc

SEQ ID NO: 714946 - DNA, 120 bp, Artificial Sequence
  ENSG00000197273_1 (sequence is synthesized)
tccttttctctggagtcagtgaagaagctcaaagacctccaggagccccaggagcccagggttgggaaactcaggaactttgcacccatccctggtgaacctgtggttcccatcctctgt

SEQ ID NO: 714947 - DNA, 120 bp, Artificial Sequence
  ENSG00000197273_2 (sequence is synthesized)
tacgctgcctgtaccggatgctaggggggcttgcccactgcctgcctcccctccgcagcagggaagctcttttctcctgcagaaagggccacccatgatactccactcccagcagctcaa

SEQ ID NO: 714948 - DNA, 120 bp, Artificial Sequence
  ENSG00000197273_3 (sequence is synthesized)
cctaccctggtccagtcgggaggagcagcccggggaggaactgggtgactggaggcctcgccccaacactgtccttccctgccacttcaacccccagctaataaaccagattccagagta

SEQ ID NO: 714949 - DNA, 120 bp, Artificial Sequence
  ENSG00000197275_0 (sequence is synthesized)
gtccgcgattggcttcgccgaggcgggatccttgagcttctccggcggcgaggggatagctggttaccagaaggacttctttgcagggccagtggtttctgtcagattttcgccggtcac

SEQ ID NO: 714950 - DNA, 120 bp, Artificial Sequence
  ENSG00000197275_1 (sequence is synthesized)
gactgctgaatatgagacgatctgcagcaccaagtcagttgcaggggaattccttcaaaaaaccaaaatttatacctccaggaagaagtaatccaggtctgaatgaagagattacaaaac

SEQ ID NO: 714951 - DNA, 120 bp, Artificial Sequence
  ENSG00000197275_2 (sequence is synthesized)
tgaatccagatataaaattatttgagggtgttgcaattaataacacctttctcccgtcacaaaatgatcttagaatatgcagtttaaatctgcctagtgaagaaagtactagagaaatca

SEQ ID NO: 714952 - DNA, 120 bp, Artificial Sequence
  ENSG00000197275_3 (sequence is synthesized)
ataacagagataattgcagtggaaaatattgttttgaagcacctacactggcaacattagatccacctcatacagttcattcggctcctaaagaagtagcagtgtccaaggaacaagaag

SEQ ID NO: 714953 - DNA, 120 bp, Artificial Sequence
  ENSG00000197275_4 (sequence is synthesized)
agaaatctgatagcctagttaaatatttcagtgttgtttggtgtaagccttcaaagaaaaaacataaaaagtgggaaggtgatgctgttcttattgtaaaaggaaagtcatttatattaa

SEQ ID NO: 714954 - DNA, 120 bp, Artificial Sequence
  ENSG00000197275_5 (sequence is synthesized)
agaatttggaaggcaaagacattggaagaggcattggttataaattcaaagagcttgaaaagattgaagagggccaaacactgatgatttgtggaaaagaaatagaagtcatgggtgtaa

SEQ ID NO: 714955 - DNA, 120 bp, Artificial Sequence
  ENSG00000197275_6 (sequence is synthesized)
tctctccagatgacttcagcagtggcaggtgttttcagcttggaggaggaagtactgctatctcgcattcttctcaggttgccaggaaatgtttctctaaccctttcaaaagtgtttgta

SEQ ID NO: 714956 - DNA, 120 bp, Artificial Sequence
  ENSG00000197275_7 (sequence is synthesized)
aaccaagttcaaaggaaaatagacagaatgatttccaaaattgcaaaccacgccatgacccatatacgccaaattccctcgttatgccacgaccagataagaatcaccagtgggtattca

SEQ ID NO: 714957 - DNA, 120 bp, Artificial Sequence
  ENSG00000197275_8 (sequence is synthesized)
ataagaactgtttccctcttgtggatgtagtgattgatccttaccttgtatatcatcttcgaccacatcagaaagaaggaatcatattcctttatgaatgtgtaatgggaatgagaatga

SEQ ID NO: 714958 - DNA, 120 bp, Artificial Sequence
  ENSG00000197275_9 (sequence is synthesized)
atggcagatgtggagctattcttgctgatgaaatgggtttagggaagacattgcaatgtatttcgctcatctggaccctgcagtgtcagggaccctatggaggcaagccagtaataaaga

SEQ ID NO: 714959 - DNA, 120 bp, Artificial Sequence
  ENSG00000197275_10 (sequence is synthesized)
agacactaattgtcacacctggaagcttggtgaataattggaagaaagaatttcaaaaatggctaggaagtgaaaggatcaagatatttactgttgatcaggaccacaaagttgaagaat

SEQ ID NO: 714960 - DNA, 120 bp, Artificial Sequence
  ENSG00000197275_11 (sequence is synthesized)
tcatcaagtctatattttattctgttcttattatcagttatgaaatgttacttcgttccctggatcaaattaagaatataaaatttgatcttctaatctgtgacgaggggcatcgtttga

SEQ ID NO: 714961 - DNA, 120 bp, Artificial Sequence
  ENSG00000197275_12 (sequence is synthesized)
ccaattcagaatgatctgcaagaattttttgcattaattgattttgtaaatccaggaatattaggctctttgtcatcttataggaaaatatatgaagaacccatcattttatcgagagaa

SEQ ID NO: 714962 - DNA, 120 bp, Artificial Sequence
  ENSG00000197275_13 (sequence is synthesized)
ccttctgcttctgaggaagaaaaggagttaggagaaagaagagcagctgaacttacttgcctcactggactctttatccttagaagaacccaagaaattataaataaatatctcccacct

SEQ ID NO: 714963 - DNA, 120 bp, Artificial Sequence
  ENSG00000197275_14 (sequence is synthesized)
aaaatagagaatgttgtcttttgccgaccaggagcactacagattgagctttatcgaaagctgttaaattctcaggttgtcaggttctgccttcaagggttgttggaaaatagtccccat

SEQ ID NO: 714964 - DNA, 120 bp, Artificial Sequence
  ENSG00000197275_15 (sequence is synthesized)
ctaatatgtataggagctcttaaaaaactgtgcaatcacccctgccttttgttcaactctataaaggaaaaggaatgtagctcaacttgtgataaaaatgaagaaaagagtctatacaaa

SEQ ID NO: 714965 - DNA, 120 bp, Artificial Sequence
  ENSG00000197275_16 (sequence is synthesized)
ggcttgctaagtgtgtttcctgctgactacaaccctctcctgtttactgaaaaggagtcaggaaaactacaggtgttgtccaagctcttagcggttatccacgaacttcgacctactgaa

SEQ ID NO: 714966 - DNA, 120 bp, Artificial Sequence
  ENSG00000197275_17 (sequence is synthesized)
aaggtggtgttggtatccaactatacacaaaccttgaacattttacaagaagtatgtaagcgtcatggatatgcttatacaagacttgatggacaaacaccaatctctcaaaggcagcag

SEQ ID NO: 714967 - DNA, 120 bp, Artificial Sequence
  ENSG00000197275_18 (sequence is synthesized)
attgttgatggctttaacagtcaacactcttctttttttatttttttgttaagttcaaaagctggtggtgtaggacttaacctcattggaggatctcacttaattctctatgacattgat

SEQ ID NO: 714968 - DNA, 120 bp, Artificial Sequence
  ENSG00000197275_19 (sequence is synthesized)
tggaatccagccactgacattcaggcaatgtctagagtatggagagatggtcagaaatatcctgtacatatttacagactcctaactacaggtacaatagaagaaaagatctatcaaagg

SEQ ID NO: 714969 - DNA, 120 bp, Artificial Sequence
  ENSG00000197275_20 (sequence is synthesized)
cagatcagtaagcaaggtctttgtggggcagttgtcgacctcaccaagacatctgaacatattcagttttcagtagaagaacttaaaaatttgttcacattacatgaaagttcagattgt

SEQ ID NO: 714970 - DNA, 120 bp, Artificial Sequence
  ENSG00000197275_21 (sequence is synthesized)
gttactcatgatctgcttgactgtgagtgtacaggagaagaagttcatacaggtgattcgttggaaaaattcattgtctctagagattgtcagcttggtccacatcaccagaaatctaac

SEQ ID NO: 714971 - DNA, 120 bp, Artificial Sequence
  ENSG00000197275_22 (sequence is synthesized)
tccctgaaacctctttctatgtcccagctgaagcaatggaaacatttttctggagatcatttaaatcttacagatccttttcttgaaagaataacagaaaatgtgtcattcatttttcag

SEQ ID NO: 714972 - DNA, 120 bp, Artificial Sequence
  ENSG00000197275_23 (sequence is synthesized)
aatataaccactcaagctactggcacatagtgaaagattacttctgacattccattgctcttcttttgaaaattagtatggtaattaaatgtactttttgaaaattaatagaattattta

SEQ ID NO: 714973 - DNA, 120 bp, Artificial Sequence
  ENSG00000197275_24 (sequence is synthesized)
aattacagtatatgttgcaaaatatatcacttttgatacaatagtcaaaattgagtggtttaatgttttgtaaatattaagtgtttaaatgaaaaataaagatgtgcttatatcattgta

SEQ ID NO: 714974 - DNA, 120 bp, Artificial Sequence
  ENSG00000197275_25 (sequence is synthesized)
tagaaaaatcaatagtgtgaactctttatttttctccacaatccttcgtttcttgcattccttattttagaatatgacatcacttgtctaaaattcatgaataggaacttcacaaagaat

SEQ ID NO: 714975 - DNA, 120 bp, Artificial Sequence
  ENSG00000197275_26 (sequence is synthesized)
tatgacaataaacatataaaaatgttcatctttactagttttgaaaaaagtagaacaaaataaccaaagtgacttttgtacttttctattggtgtgtgtttgtttatttagagatggtgt

SEQ ID NO: 714976 - DNA, 120 bp, Artificial Sequence
  ENSG00000197275_27 (sequence is synthesized)
ttgaagcacctacactggcaacattagatccacctcatacagtgcaaacttggatgaggaggcacaggctggtaccagttcactacagttcattcggctcctaaagaagtagcagtgtcc

SEQ ID NO: 714977 - DNA, 120 bp, Artificial Sequence
  ENSG00000197275_28 (sequence is synthesized)
aagacattaaaccacctcctccactggttttaaattctcaacagagtgatactttagagcaaagagaagaacatgaattagtacatgttatggaaagatccttgtcgccttcactttcct

SEQ ID NO: 714978 - DNA, 120 bp, Artificial Sequence
  ENSG00000197275_29 (sequence is synthesized)
ctgttgatatgagaatgacatcgtctccatcttctattccaaggagagatgatttttttcggcatgagagtggtgaacactttaggtcactattagggtatgatcctcagatcctgcaaa

SEQ ID NO: 714979 - DNA, 120 bp, Artificial Sequence
  ENSG00000197275_30 (sequence is synthesized)
tgttgaaagaggagcatcagataattttagaaaatcaaaaaaattttggattgtatgttcaggagaagagggatggattgaaaagaaggcagcagctagaggaagagctactaagagcaa

SEQ ID NO: 714980 - DNA, 120 bp, Artificial Sequence
  ENSG00000197275_31 (sequence is synthesized)
aatcttgcaatttgataattttgattttggccaaattactttaatttgggaatatcctgaaacagaatacacgttcttgaaaaatgttgttaatctctattatggaaaaactttttagat

SEQ ID NO: 714981 - DNA, 120 bp, Artificial Sequence
  ENSG00000197275_32 (sequence is synthesized)
ataattttctaattattttcttttgagatattaaaatttactggttggttggcatggttatagtttttattgtcttcttttttttttccctaagtttaattgttgaccttacaaaagata

SEQ ID NO: 714982 - DNA, 120 bp, Artificial Sequence
  ENSG00000197275_33 (sequence is synthesized)
ttttattctgatcactaagatatacacaaatgcatatacaaacacatattctttcaaagttctgagtcttcaacatttttagttagaactttgaaagctataattagagatttttaagtc

SEQ ID NO: 714983 - DNA, 120 bp, Artificial Sequence
  ENSG00000197275_34 (sequence is synthesized)
agtctaatttaggagctatactaacctaataccaagaagcttgtctgtatgacattggtttttatgcttttatcttttgaaggagtaaatcctaggattttagagatggaagatatttgg

SEQ ID NO: 714984 - DNA, 120 bp, Artificial Sequence
  ENSG00000197275_35 (sequence is synthesized)
agaacactttttttccatctctgcagtttaggggtaatgaaacaggtccagggagaactcaatgacttacttagggtaacaaagctatttatggcagagcagagaccagcacttagtttt

SEQ ID NO: 714985 - DNA, 120 bp, Artificial Sequence
  ENSG00000197275_36 (sequence is synthesized)
tctttgtgtaatttccatcccgctattcgatagaagtaaatatccactaaaacattctctagatttaaatattagaagcatttctttcattaaaattgcctttaaagattgttaggttgt

SEQ ID NO: 714986 - DNA, 120 bp, Artificial Sequence
  ENSG00000197275_37 (sequence is synthesized)
gaaatcaggataattacatcaattacccccattctctctctatttttgttccagcaaaatagataaggtattccattgaagctattatatattttggctgtgtgatttaaagacatgtct

SEQ ID NO: 714987 - DNA, 120 bp, Artificial Sequence
  ENSG00000197275_38 (sequence is synthesized)
taattcattttgaatgtcctgttctggaaaaaatttctttcacagtaaaaatcagaatgaacaaaattaaaattttatgtattttataagtattgttattttagtattcatggaaataaa

SEQ ID NO: 714988 - DNA, 120 bp, Artificial Sequence
  ENSG00000197275_39 (sequence is synthesized)
tacatgtgggaaatattaatactacacttgcagggtgaaggtagcaggcatgagactgcgttagaactgctctgtaactaactcagtagaaggcatgttacttttttaaaaaatgatcaa

SEQ ID NO: 714989 - DNA, 120 bp, Artificial Sequence
  ENSG00000197275_40 (sequence is synthesized)
atcatgacctataaagatttacctaacagtttcttggacttttcagatagccgttaatcttcacctttttccttccataattttagcattttcccctcctaattaaaaaaacaaacttga

SEQ ID NO: 714990 - DNA, 120 bp, Artificial Sequence
  ENSG00000197275_41 (sequence is synthesized)
tctttcagatcttaatagaacatttcctcagggtgcccttcacttaccttccggaccaagtcagcctctcttgtcatatgtgattcgttggaaaaattcattgtctctagagattgtcag

SEQ ID NO: 714991 - DNA, 120 bp, Artificial Sequence
  ENSG00000197279_0 (sequence is synthesized)
cggccaacgtcattttcttttcaggagtcccttctgttatttagcaagacacactactacaatggagaaaaaagatgccccctccttcaagccctgagatcttcaggactttggcgaaaa

SEQ ID NO: 714992 - DNA, 120 bp, Artificial Sequence
  ENSG00000197279_1 (sequence is synthesized)
gtctgcgcccgaagagacccaggaaggattcttggaattgtagtccaaaggcatcccgccttctgcgcagactcacaagtccctgtggacggaattcttgaagtgtagcgccgctcagtc

SEQ ID NO: 714993 - DNA, 120 bp, Artificial Sequence
  ENSG00000197279_2 (sequence is synthesized)
cttccaccggaagtgtccgatcggaatcagccctgtccgagaggtgagtccgggtttggggatccagatgtccagccccgtgtccccctccaaacatccagtccctctcatattgccttt

SEQ ID NO: 714994 - DNA, 120 bp, Artificial Sequence
  ENSG00000197279_3 (sequence is synthesized)
gaaattagcagcctctgggtgaccagaccttggccctcagaggaatcccggagaaaggtagaaccagcttcggcgttgggaacgcaggcgcgcttacgcatttagtgagggtttggcggt

SEQ ID NO: 714995 - DNA, 120 bp, Artificial Sequence
  ENSG00000197279_4 (sequence is synthesized)
ctccatagttaccgccgccgcgcgtgacgtcatagtggagcgctgagggcttggtggcgtggggtgggggctgtcctactgatcctgaatttggggtcactggtaagaggagttgcccat

SEQ ID NO: 714996 - DNA, 120 bp, Artificial Sequence
  ENSG00000197279_5 (sequence is synthesized)
tccagccaggtggaacggggaggggtgccacatgtctcagatctgccattgtctgcgaaaagaaactgctgcgaggaccatccccaatcccctgcttcccttgggaagagtaaccgccgt

SEQ ID NO: 714997 - DNA, 120 bp, Artificial Sequence
  ENSG00000197279_6 (sequence is synthesized)
tttgtaggacacttggggacaaccccgcttgtcctgaaatttattgacacggtaaatagtatttcctgtgtgccgaggatgcagttaaaccaacactgaccccctgcccttgagaaacac

SEQ ID NO: 714998 - DNA, 120 bp, Artificial Sequence
  ENSG00000197279_7 (sequence is synthesized)
aagatggctacagaaccaaagaaagctgcagcccagaactctccagaggatgaaggacttctgatagtgaagatagaagaggaagaatttatccatgggcaggacacttgcttacagaga

SEQ ID NO: 714999 - DNA, 120 bp, Artificial Sequence
  ENSG00000197279_8 (sequence is synthesized)
agtgaactccttaagcaggagctctgcaggcagctttttaggcagttctgctaccaggattctcctggacctcgcgaggcactgagccgcctccgggagctctgctgtcagtggctgaag

SEQ ID NO: 715000 - DNA, 120 bp, Artificial Sequence
  ENSG00000197279_9 (sequence is synthesized)
gaggaggcagtgaccatactagaagatttggagagaggcactgatgaagcagtactccaggttcaagcccatgaacatggacaagaaatattccagaaaaaagtgtcacctcctggacca

SEQ ID NO: 715001 - DNA, 120 bp, Artificial Sequence
  ENSG00000197279_10 (sequence is synthesized)
gcacttaatgtcaagttacagccagtggagaccaaggcccattttgattcatcagaaccccagctcctatgggactgtgataatgagagtgaaaacagtagatccatgccaaagctggaa

SEQ ID NO: 715002 - DNA, 120 bp, Artificial Sequence
  ENSG00000197279_11 (sequence is synthesized)
atttttgaaaaaattgaatcacagagaattatatctggaagaatctcaggatacatatcagaagcatctggtgagtctcaagacatctgtaagtctgcaggcagggtaaagagacaatgg

SEQ ID NO: 715003 - DNA, 120 bp, Artificial Sequence
  ENSG00000197279_12 (sequence is synthesized)
gaaaaagaatcaggggagtctcagagactctcgtctgcccaggatgaaggttttggtaaaatcctcacccacaaaaatacagtcagaggtgaaataataagccacgatggatgtgagagg

SEQ ID NO: 715004 - DNA, 120 bp, Artificial Sequence
  ENSG00000197279_13 (sequence is synthesized)
agattaaatctgaactcaaatgaattcacacaccagaaatcttgtaaacatggtacctgtgaccagagcttcaaatggaactcagattttattaaccatcaaataatttatgctggagaa

SEQ ID NO: 715005 - DNA, 120 bp, Artificial Sequence
  ENSG00000197279_14 (sequence is synthesized)
aaaaatcaccaatatggaaaatctttcaagagcccaaaacttgctaaacatgcagcagttttcagtggagataaaactcatcagtgtaatgaatgtgggaaagctttcaggcacagctca

SEQ ID NO: 715006 - DNA, 120 bp, Artificial Sequence
  ENSG00000197279_15 (sequence is synthesized)
aaacttgctaggcatcagagaatccacactggagagagatgctatgaatgtaatgaatgtgggaaaagctttgcagagagctcagatcttactagacatcggcgaattcacactggggaa

SEQ ID NO: 715007 - DNA, 120 bp, Artificial Sequence
  ENSG00000197279_16 (sequence is synthesized)
agaccctttggttgcaaagaatgtgggagagcattcaacctgaactcacatcttatcaggcatcagagaattcacaccagagagaaaccctacgagtgtagtgaatgtgggaaaaccttc

SEQ ID NO: 715008 - DNA, 120 bp, Artificial Sequence
  ENSG00000197279_17 (sequence is synthesized)
cgagtgagctcacatcttattcgacactttagaattcacactggagaaaaaccctatgaatgcagtgagtgtggaagagccttcagtcagagctcaaaccttagtcaacaccagagaatt

SEQ ID NO: 715009 - DNA, 120 bp, Artificial Sequence
  ENSG00000197279_18 (sequence is synthesized)
cacatgagggaaaacctattaatgtaaggaacttaaatttgtaagtaaatgctgaggaaatggcacaatatgaaaaatattaaataaaaaataaatattgggcaagatggaagactgaaa

SEQ ID NO: 715010 - DNA, 120 bp, Artificial Sequence
  ENSG00000197283_0 (sequence is synthesized)
tctcggctgccgctgctgccgttggctcttattctcctcctcctcctcctctctcctcctctctgcttctctctgctcctctctcctcctctctcctcctcctcctcctccacctcctcc

SEQ ID NO: 715011 - DNA, 120 bp, Artificial Sequence
  ENSG00000197283_1 (sequence is synthesized)
tccttctccccctctttctccccctctttctctcttctttctcccccgtccccccgccccctccccccaggcctgatgagcaggtctcgagcctccatccatcgggggagcatccccgcg

SEQ ID NO: 715012 - DNA, 120 bp, Artificial Sequence
  ENSG00000197283_2 (sequence is synthesized)
atgtcctatgcccccttcagagatgtacggggaccctctatgcaccgaacccaatacgttcattccccgtatgatcgtcctggttggaaccctcggttctgcatcatctcggggaaccag

SEQ ID NO: 715013 - DNA, 120 bp, Artificial Sequence
  ENSG00000197283_3 (sequence is synthesized)
ctgctcatgctggatgaggatgagatacaccccctactgatccgggaccggaggagcgagtccagtcgcaacaaactgctgagacgcacagtctccgtgccggtggaggggcggccccac

SEQ ID NO: 715014 - DNA, 120 bp, Artificial Sequence
  ENSG00000197283_4 (sequence is synthesized)
ggcgagcatgaataccacttgggtcgctcgaggaggaagagtgtcccaggggggaagcagtacagcatggagggtgcccctgctgcgcccttccggccctcgcaaggcttcctgagccga

SEQ ID NO: 715015 - DNA, 120 bp, Artificial Sequence
  ENSG00000197283_5 (sequence is synthesized)
cggctaaaaagctccatcaaacgaacgaagtcacaacccaaacttgaccggaccagcagctttcgccagatcctgcctcgcttccgaagtgctgaccatgaccgggcccggctgatgcaa

SEQ ID NO: 715016 - DNA, 120 bp, Artificial Sequence
  ENSG00000197283_6 (sequence is synthesized)
agctttaaggagtcacactctcatgagtccttgctgagtcctagcagtgcagctgaggcattggagctcaacttggatgaagattccattatcaagccagtgcacagctccatcctgggc

SEQ ID NO: 715017 - DNA, 120 bp, Artificial Sequence
  ENSG00000197283_7 (sequence is synthesized)
caggagttctgttttgaggtaacaacttcatcaggaacaaaatgctttgcctgtcggtctgcggccgaaagagacaaatggattgagaatctgcagcgggcagtaaagcccaacaaggac

SEQ ID NO: 715018 - DNA, 120 bp, Artificial Sequence
  ENSG00000197283_8 (sequence is synthesized)
aacagccgccgggtagacaatgtgctaaagctgtggatcatagaggcccgggagctgccccccaagaagcggtactactgtgagctctgcctggatgacatgctgtatgcacgcaccacc

SEQ ID NO: 715019 - DNA, 120 bp, Artificial Sequence
  ENSG00000197283_9 (sequence is synthesized)
tccaagccccgctctgcctctggggacaccgtcttctggggcgagcacttcgagtttaacaacctgccggctgtccgtgccctgcggctgcatctgtaccgtgactcagacaaaaagcgc

SEQ ID NO: 715020 - DNA, 120 bp, Artificial Sequence
  ENSG00000197283_10 (sequence is synthesized)
aagaaggacaaggcaggctatgtcggcctggtgactgtgccagtggccaccctggctgggcgccacttcacagagcagtggtaccctgtaaccctgccaacaggcagtgggggatctggg

SEQ ID NO: 715021 - DNA, 120 bp, Artificial Sequence
  ENSG00000197283_11 (sequence is synthesized)
ggcatgggttcgggagggggagggggctcggggggtggctcagggggcaagggcaaaggaggttgcccggctgtgcggctgaaagcacgttaccagacaatgagcatcttgcccatggag

SEQ ID NO: 715022 - DNA, 120 bp, Artificial Sequence
  ENSG00000197283_12 (sequence is synthesized)
ctatataaagagtttgcagagtatgtcaccaaccattatcggatgctgtgtgcagtcttggagcccgccctgaatgtcaaaggcaaggaggaggttgccagtgcactagttcacatcctg

SEQ ID NO: 715023 - DNA, 120 bp, Artificial Sequence
  ENSG00000197283_13 (sequence is synthesized)
cagagtacaggcaaggccaaggacttcctttcagacatggccatgtctgaggtagaccggttcatggaacgggagcacctcatattccgcgagaacacgcttgccactaaagccatagaa

SEQ ID NO: 715024 - DNA, 120 bp, Artificial Sequence
  ENSG00000197283_14 (sequence is synthesized)
gagtatatgagactgattggtcagaaatacctcaaggatgccattggagaattcatccgtgctctgtatgaatctgaggaaaactgcgaggtagaccctatcaagtgcacagcatccagt

SEQ ID NO: 715025 - DNA, 120 bp, Artificial Sequence
  ENSG00000197283_15 (sequence is synthesized)
ttggcagagcaccaggccaacctgcgaatgtgctgtgagttggccctgtgcaaggtggtcaactcccactgcgtgttcccgagggagctgaaggaggtgtttgcttcgtggcggctgcgc

SEQ ID NO: 715026 - DNA, 120 bp, Artificial Sequence
  ENSG00000197283_16 (sequence is synthesized)
tgcgcagagcgaggccgggaggacatcgcagacaggcttatcagcgcctcactcttcctgcgcttcctctgcccagcgattatgtcgcccagtctctttgggcttatgcaggagtaccca

SEQ ID NO: 715027 - DNA, 120 bp, Artificial Sequence
  ENSG00000197283_17 (sequence is synthesized)
gatgagcagacctcacgaaccctcaccctcattgccaaggtcatccagaacctggccaacttttccaagtttacctcaaaggaggactttctgggcttcatgaatgagtttctggagctg

SEQ ID NO: 715028 - DNA, 120 bp, Artificial Sequence
  ENSG00000197283_18 (sequence is synthesized)
gaatggggttccatgcagcagtttttgtatgagatctccaatctggacacgctaaccaacagcagtagctttgagggttacatcgacttgggccgagagctctccacactgcatgcccta

SEQ ID NO: 715029 - DNA, 120 bp, Artificial Sequence
  ENSG00000197283_19 (sequence is synthesized)
ctctgggaggtgctgccccagctcagcaaggaagccctcctgaagctgggtccactgccccggctcctcaacgacatcagcacagctctgaggaaccccaacatccaaaggcagccaagc

SEQ ID NO: 715030 - DNA, 120 bp, Artificial Sequence
  ENSG00000197283_20 (sequence is synthesized)
cgccagagtgagcggccccggcctcagcctgtggtactgcgggggccatcggctgagatgcagggctacatgatgcgggacctcaacagctccatcgaccttcagtccttcatggctcga

SEQ ID NO: 715031 - DNA, 120 bp, Artificial Sequence
  ENSG00000197283_21 (sequence is synthesized)
ggcctcaacagctctatggacatggctcgcctcccctccccaaccaaggaaaagccacccccaccaccgcctggtggtggtaaagacctgttctatgtaagccgtccacccctggcccgt

SEQ ID NO: 715032 - DNA, 120 bp, Artificial Sequence
  ENSG00000197283_22 (sequence is synthesized)
tcctcaccagcatactgcacgagcagctcggacatcacagagccagagcagaagatgctgagtgtcaacaagagtgtgtccatgctggacttacagggtgatgggcctggtggccgcctc

SEQ ID NO: 715033 - DNA, 120 bp, Artificial Sequence
  ENSG00000197283_23 (sequence is synthesized)
aacagcagcagtgtttcgaacctggcggccgtaggggacctgctgcactcaagccaggcctcgctgacagcagccttggggctacggcctgcgcctgccggacgcctctcccaggggagt

SEQ ID NO: 715034 - DNA, 120 bp, Artificial Sequence
  ENSG00000197283_24 (sequence is synthesized)
ggctcatccatcacggcggctggcatgcgcctcagccagatgggtgtcaccacagacggtgtccctgcccagcaactgcgaatccccctctccttccagaaccctctcttccacatggct

SEQ ID NO: 715035 - DNA, 120 bp, Artificial Sequence
  ENSG00000197283_25 (sequence is synthesized)
caggtcccccaggcggccatggagggggcggtggccatggcccaccttcctcccatcaccaccaccaccaccatcaccaccaccgaggtggagagccccctggggacacctttgccccat

SEQ ID NO: 715036 - DNA, 120 bp, Artificial Sequence
  ENSG00000197283_26 (sequence is synthesized)
tccatggctatagcaagagtgaggacctctcttccggggtccccaagccccctgctgcctccatccttcatagccacagctacagtgatgagtttggaccctctggcactgacttcaccc

SEQ ID NO: 715037 - DNA, 120 bp, Artificial Sequence
  ENSG00000197283_27 (sequence is synthesized)
gtcggcagctttcactccaggacaacctgcagcacatgctgtcccctccccagatcaccattggtccccagaggccagccccctcagggcctggaggtgggagcggtgggggcagcggtg

SEQ ID NO: 715038 - DNA, 120 bp, Artificial Sequence
  ENSG00000197283_28 (sequence is synthesized)
ggggtggcgggggccagccgcctccattgcagaggggcaagtctcagcagttgacagtcagcgcagcccagaaaccccggccatccagcgggaatctattgcagtccccagagccaagtt

SEQ ID NO: 715039 - DNA, 120 bp, Artificial Sequence
  ENSG00000197283_29 (sequence is synthesized)
atggccccgcccgtccacggcaacagagcctcagcaaggagggcagcattgggggcagcgggggcagcggtggcggagggggtggggggctgaagccctccatcaccaagcagcattctc

SEQ ID NO: 715040 - DNA, 120 bp, Artificial Sequence
  ENSG00000197283_30 (sequence is synthesized)
agacaccatccacattgaaccccacaatgccagcctctgagcggacagtggcctgggtctccaacatgcctcacctgtcggctgacatcgagagtgcccacatcgagcgggaagagtaca

SEQ ID NO: 715041 - DNA, 120 bp, Artificial Sequence
  ENSG00000197283_31 (sequence is synthesized)
agctcaaggagtactcaaaatcgatggatgagagccggctggatagggtgaaggagtacgaggaggagattcactcactgaaagagcggctgcacatgtccaaccggaagctggaagagt

SEQ ID NO: 715042 - DNA, 120 bp, Artificial Sequence
  ENSG00000197283_32 (sequence is synthesized)
atgagcggaggctgctgtcccaggaagaacaaaccagcaaaatcctgatgcagtatcaggcccgactggagcagagtgagaagaggctaaggcagcagcaggcagagaaggattcccaga

SEQ ID NO: 715043 - DNA, 120 bp, Artificial Sequence
  ENSG00000197283_33 (sequence is synthesized)
tcaagagcatcattggcaggctgatgctggtggaggaggagctgcgccgggaccaccccgccatggctgagccgctgccagaacccaagaagaggctgctcgacgctcaggagaggcagc

SEQ ID NO: 715044 - DNA, 120 bp, Artificial Sequence
  ENSG00000197283_34 (sequence is synthesized)
ttccccccttgggtccaacaaacccgcgtgtgacgctggccccaccgtggaatggcctggcccccccagccccaccacccccaccccggctgcagattacggagaacggcgagttccgaa

SEQ ID NO: 715045 - DNA, 120 bp, Artificial Sequence
  ENSG00000197283_35 (sequence is synthesized)
acaccgcagaccactagcccacccagcatcagagaccttctcttcctttcctgtgcaccccaccctgtaacagcaccaaccaccaggattggacatcaccgaggaacagcgggattgcct

SEQ ID NO: 715046 - DNA, 120 bp, Artificial Sequence
  ENSG00000197283_36 (sequence is synthesized)
ccccgaatgcctccctgggaggcacactgattgcccacccccaccactgcaccatttccaggagggagagtggggaccctcagccgcccccttttccttcccattggggtgctgccctct

SEQ ID NO: 715047 - DNA, 120 bp, Artificial Sequence
  ENSG00000197283_37 (sequence is synthesized)
ctttgacccccagggacccttgccccaggacaccgcctaccccgtacagaccccttcactccggggtgctatccccatcctctgcctcatcgttcccctgagcactgggggacagaccct

SEQ ID NO: 715048 - DNA, 120 bp, Artificial Sequence
  ENSG00000197283_38 (sequence is synthesized)
cacccccaccctgggggtgtggcacctccaaactttcaacttcagggtgatttttttagcagtaaccagagctgacaatctaactcccctccaccgccccattttggcctcccctgcccc

SEQ ID NO: 715049 - DNA, 120 bp, Artificial Sequence
  ENSG00000197283_39 (sequence is synthesized)
ccttgttatggggaggggaccccgggtgagggggccctattaccccttgatttctcaggagcgtctgggggggctcagcacgcacaaactccttctccttctaccactcttaaatttact

SEQ ID NO: 715050 - DNA, 120 bp, Artificial Sequence
  ENSG00000197283_40 (sequence is synthesized)
ccctccccacccagaacccagatggggtggagggggccaccggggcagggagggggcggcaaggggggaatgggagttgtctccccttctccccacacctgatctgctctcggctggtcc

SEQ ID NO: 715051 - DNA, 120 bp, Artificial Sequence
  ENSG00000197283_41 (sequence is synthesized)
cagagcggggtgagggggcttatgcccccccctcccccagtgtgttgggtggggtggaattgaggttagggtgaggggtcagggtttaggagggtgtgtatgttgggaggacaggctagt

SEQ ID NO: 715052 - DNA, 120 bp, Artificial Sequence
  ENSG00000197283_42 (sequence is synthesized)
tgatctgtcctactctgacacacagtcccctctgccccttccttctctcttcttggtctctactcccagggggaggggggaacttactctaggaaaagccatgtctctctcccccagggt

SEQ ID NO: 715053 - DNA, 120 bp, Artificial Sequence
  ENSG00000197283_43 (sequence is synthesized)
ggggggacctgtgttggaggaggggtgttggggggcccccttccatgactctgtcccctgggggaggtaggacagggctgggcttccctctcatcctccccctcccaatctccttccacc

SEQ ID NO: 715054 - DNA, 120 bp, Artificial Sequence
  ENSG00000197283_44 (sequence is synthesized)
tccctccctcccgccagctccacgatttttcggtgtttctctgtacatagttttctggcgggataggggaggtaggatggatggggtttggggtgggtaggccatgggaggggagaagcc

SEQ ID NO: 715055 - DNA, 120 bp, Artificial Sequence
  ENSG00000197283_45 (sequence is synthesized)
cctccttggcaccccctcttccctgactgctgtcccctacccagccttgcccccttcatccttttgcgtttggtattgagactctcctagactctactcctctttcttttgtatggacag

SEQ ID NO: 715056 - DNA, 120 bp, Artificial Sequence
  ENSG00000197283_46 (sequence is synthesized)
ttccccttcagtcccatccccctacacatacacccagccggggccaaatttatacttatataaaagttgtaaatatgtgaaattttatccctgtgccctttccccacctcaggccctacc

SEQ ID NO: 715057 - DNA, 120 bp, Artificial Sequence
  ENSG00000197283_47 (sequence is synthesized)
cctggaccctccccaaccttccttctctcttctttggctgttgtaattatctggggtttgtactgtacatatccggggtgtgtgtgtgtgggctgggggcaacccttctgtacagagctt

SEQ ID NO: 715058 - DNA, 120 bp, Artificial Sequence
  ENSG00000197283_48 (sequence is synthesized)
cctggccccctccccccccgcccctctgcttccctccccacccaccacctcaagggtagggagttgctcttcctacctgttttattttgttttctcgttctccctccccaccccactccc

SEQ ID NO: 715059 - DNA, 120 bp, Artificial Sequence
  ENSG00000197283_49 (sequence is synthesized)
agccttatctatcccccctcactgtccccttttctccactcccagccccatttcctttttttctggagtgtgtggtgaaacagaaaaaaacatgtttaataaacggagattgttctttta

SEQ ID NO: 715060 - DNA, 120 bp, Artificial Sequence
  ENSG00000197283_50 (sequence is synthesized)
gggggaagaggaaagcctgcctatgggcaatgacctttaacccatctttccccccagctagccccttctggggtgggtgggcaccagggacctagcctccctggatctttggtgtccttc

SEQ ID NO: 715061 - DNA, 120 bp, Artificial Sequence
  ENSG00000197283_51 (sequence is synthesized)
attactggggttttactgaccctctcagccatgctcccctgctgactgccagccccagtcatgggcctaaggcctcccaccccatccccctcagggggctcctgctcaggttccttgccc

SEQ ID NO: 715062 - DNA, 120 bp, Artificial Sequence
  ENSG00000197283_52 (sequence is synthesized)
cctggttccgctttggccacgggcggaggacacagggggaggtgactccggaccactgcaggttggtcgtgaagcccactccctccaacacctccggagcctctcccctctcactgctgc

SEQ ID NO: 715063 - DNA, 120 bp, Artificial Sequence
  ENSG00000197283_53 (sequence is synthesized)
cctccacacccagagaacctccacagactccagccctccgacacctgcacagatccatctcccaagacaccacccaaagagagcatttgctgctgcttcccagaactgtccaacaatacc

SEQ ID NO: 715064 - DNA, 120 bp, Artificial Sequence
  ENSG00000197283_54 (sequence is synthesized)
ttagcaacaccaagagttgggccctagatgggcccagcacattcacaggtcacacccacttccctgcaaaacccaccccctcccagcctcctcctgactctaagccctcctcttcctcta

SEQ ID NO: 715065 - DNA, 120 bp, Artificial Sequence
  ENSG00000197283_55 (sequence is synthesized)
tcatagtctgctgtttgtccactggctgctcctggcagccccctagtgaccccatcttcatcccatcgtctgtgcctttgtcactcctggcagcgtcagcccaactcctgtgccttccca

SEQ ID NO: 715066 - DNA, 120 bp, Artificial Sequence
  ENSG00000197283_56 (sequence is synthesized)
aggccctctcatgtctctgactgtgaacagatgtacggggaccctctatgcaccgaacccaatacgttcattccccgtatgatcgtcctggttggaaccctcggttctgcatcatctcgg

SEQ ID NO: 715067 - DNA, 120 bp, Artificial Sequence
  ENSG00000197283_57 (sequence is synthesized)
ccctggcccccccggggggcggtgcgagaataccacttgggtcgctcgaggaggaagagtgtcccaggggggaagcagtacagcatggagggtgcccctgctgcgcccttccggccctcg

SEQ ID NO: 715068 - DNA, 120 bp, Artificial Sequence
  ENSG00000197283_58 (sequence is synthesized)
agggtttgggagaattctccggaagatacaccccctactgatccgggaccggaggagcgagtccagtcgcaacaaactgctgagacgcacagtctccgtgccggtggaggggcggcccca

SEQ ID NO: 715069 - DNA, 120 bp, Artificial Sequence
  ENSG00000197283_59 (sequence is synthesized)
tgagattctcttctctctgatcccagaggacgttaacttctactgcaggagaggcagcttccccccttgggtccaacaaacccgcgtgtgacgctggccccaccgtggaatggcctggcc

SEQ ID NO: 715070 - DNA, 120 bp, Artificial Sequence
  ENSG00000197283_60 (sequence is synthesized)
tcactttcaactgtgatctcctgaaggccgatgtacggggaccctctatgcaccgaacccaatacgttcattccccgtatgatcgtcctggttggaaccctcggttctgcatcatctcgg

SEQ ID NO: 715071 - DNA, 120 bp, Artificial Sequence
  ENSG00000197283_61 (sequence is synthesized)
tgtgagttggccctgtgcaaggtggtcaactcccactggtgagactgggaacgctgggctggggggccagggtcgggggaattatgtgttcatctgttcatctatctgtccatcctcaaa

SEQ ID NO: 715072 - DNA, 120 bp, Artificial Sequence
  ENSG00000197283_62 (sequence is synthesized)
gaggactgagcaccatttatgggcaaagcattgttctaggcgctatagagcaaacaggtgaaagaggcctggtccctgccctcagagggcctccaccagaatggggacaaattagaagaa

SEQ ID NO: 715073 - DNA, 120 bp, Artificial Sequence
  ENSG00000197283_63 (sequence is synthesized)
gaggagactgcaggggtggaggtgtatggagatacaccccctactgatccgggaccggaggagcgagtccagtcgcaacaaactgctgagacgcacagtctccgtgccggtggaggggcg

SEQ ID NO: 715074 - DNA, 120 bp, Artificial Sequence
  ENSG00000197283_64 (sequence is synthesized)
gaatgtgctgtgagttggccctgtgcaaggtggtcaactcccactgcctcccatcttgctcctgcggtccctccttccctgtctctctcacccctgtttccacaccctcacctcctacca

SEQ ID NO: 715075 - DNA, 120 bp, Artificial Sequence
  ENSG00000197283_65 (sequence is synthesized)
cccccctcagcatgttccctggaagctgagggtctctggggctcagtcccggtctctctctttctctctctctctctctgtctccccgacccttccccccagcgtgttcccgagggagct

SEQ ID NO: 715076 - DNA, 120 bp, Artificial Sequence
  ENSG00000197283_66 (sequence is synthesized)
gaagccgcggtggcggcggcggcggcggcagctgctccctccgcatgttctcgctgcatcttccgagtggggggagttatgaataccacttgggtcgctcgaggaggaagagtgtcccag

SEQ ID NO: 715077 - DNA, 120 bp, Artificial Sequence
  ENSG00000197283_67 (sequence is synthesized)
gggataatttggtgggggactcagagtatgatgtacggggaccctctatgcaccgaacccaatacgttcattccccgtatgatcgtcctggttggaaccctcggttctgcatcatctcgg

SEQ ID NO: 715078 - DNA, 120 bp, Artificial Sequence
  ENSG00000197296_0 (sequence is synthesized)
gatacggtggccgagagggcacggagaggaggacggtggctgacgagatccggcatggagcatctggagcgctgcgagtggttgttgcgggggacgctggtgcgggcggccgtgcggcgc

SEQ ID NO: 715079 - DNA, 120 bp, Artificial Sequence
  ENSG00000197296_1 (sequence is synthesized)
tacctgccctgggccctggtggcctccatgctggcgggctccctcctcaaggagttgtccccgttgcccgagagctacctcagcaacaagcgcaacgtcctcaacgtgtattttgtcaaa

SEQ ID NO: 715080 - DNA, 120 bp, Artificial Sequence
  ENSG00000197296_2 (sequence is synthesized)
gtggcctgggcctggacgttctgtctccttctgcctttcattgccctcaccaactaccatctgaccggcaaggctggcttggtcctgcggcggctgagcaccctgcttgtgggcacggcc

SEQ ID NO: 715081 - DNA, 120 bp, Artificial Sequence
  ENSG00000197296_3 (sequence is synthesized)
atctggtacatctgcacctccatcttctccaacatcgaacactacacgggcagctgctaccagtccccagccctggagggggtcagaaaggaacaccagagcaagcagcagtgccaccag

SEQ ID NO: 715082 - DNA, 120 bp, Artificial Sequence
  ENSG00000197296_4 (sequence is synthesized)
gaagggggcttttggcatggctttgacatctcaggtcactccttcctgctgaccttctgcgccctcatgattgtagaagagatgtctgtgctgcatgaggtgaagacggaccgaagccac

SEQ ID NO: 715083 - DNA, 120 bp, Artificial Sequence
  ENSG00000197296_5 (sequence is synthesized)
tgcctccacaccgccatcaccaccctggttgtggccctgggcattctgactttcatctgggtgttgatgtttctgtgcacagctgtttatttccacaacttgtcccagaaggtgtttggc

SEQ ID NO: 715084 - DNA, 120 bp, Artificial Sequence
  ENSG00000197296_6 (sequence is synthesized)
accttgtttggtttgctgagctggtacgggacatacgggttttggtatccgaaagccttttccccaggacttcctccccagagctgtagtttgaatttgaagcaagatagttacaagaaa

SEQ ID NO: 715085 - DNA, 120 bp, Artificial Sequence
  ENSG00000197296_7 (sequence is synthesized)
taaaagagtaacagaggggggacagaaggacaatggctaatctatttttcaaatatatattttgcttagttatttggctaaattattgatcctacttcagagggaaagtgtaccaggcag

SEQ ID NO: 715086 - DNA, 120 bp, Artificial Sequence
  ENSG00000197296_8 (sequence is synthesized)
ttttggtgggtggtgctgaagtctggggagtgagtttagtcttcagactattcttggcgacatcaccagtgttgcaagcaccaccattcccagttaggcactttttgtccctggtaagac

SEQ ID NO: 715087 - DNA, 120 bp, Artificial Sequence
  ENSG00000197296_9 (sequence is synthesized)
ttgacctttatctggaacactccttttgtccctagagtggggacctaaggctcagcaaaagggcagaatcaggaaagcctttatggtgtggctaaaggagtggccagagccttgggactc

SEQ ID NO: 715088 - DNA, 120 bp, Artificial Sequence
  ENSG00000197296_10 (sequence is synthesized)
ctttgctgccttctccctggttccagttgtctttagattttcacggctcttactgctgttacttaacagtattttccagccaggcatggtggttcacacctctaatccctgcactttggg

SEQ ID NO: 715089 - DNA, 120 bp, Artificial Sequence
  ENSG00000197296_11 (sequence is synthesized)
tgacagagcagactccacctcaaaaaagaaaaaacaaaacaaaacagtatttcccactggtcagttttgcataggcatctatttcaggcagggtttttttcttttttttgagatggagtt

SEQ ID NO: 715090 - DNA, 120 bp, Artificial Sequence
  ENSG00000197296_12 (sequence is synthesized)
cccggctcaggcagggttctttataaaaacagcctgatgcctgaaggacactctctggttgtaatatttgtttcatccatgaagtgtttaaatattgcaactgacttgcgattagccacc

SEQ ID NO: 715091 - DNA, 120 bp, Artificial Sequence
  ENSG00000197296_13 (sequence is synthesized)
aaaacaggcccttttagatgcagtgcctctccgaccaagtattggatgattcatacgtaatggactatgatcattttctgtccatgttttctattactatatgctggtttttttggagca

SEQ ID NO: 715092 - DNA, 120 bp, Artificial Sequence
  ENSG00000197296_14 (sequence is synthesized)
ataagattactttttttctgttctattttgagcgaatcctttacagtttttgataagaactgtgacatttgttctttgttgataaaactcctgaaaataactcacaaggccagtgctgca

SEQ ID NO: 715093 - DNA, 120 bp, Artificial Sequence
  ENSG00000197296_15 (sequence is synthesized)
tttagaacactaatgtacttgttatgaaccaaactctggtcttacagtcttaaattccacctcatggggctgttttctctgttagcaatgaaacctgggccaggtgtagtggctcacacc

SEQ ID NO: 715094 - DNA, 74 bp, Artificial Sequence
  ENSG00000197296_16 (sequence is synthesized)
ctggtttctataaataaataagataatcaaaccagaaagcaggcattttagtaacagcctgttgaattttaagg

SEQ ID NO: 715095 - DNA, 120 bp, Artificial Sequence
  ENSG00000197296_17 (sequence is synthesized)
gaaagcaggcattttagtaacagcctgttgaattttaaggtgaatcaaggtaattttgcagaatgcgttcttgcaccgaaatgtccctgaccacatatcagtggtatagactgaacagtg

SEQ ID NO: 715096 - DNA, 120 bp, Artificial Sequence
  ENSG00000197296_18 (sequence is synthesized)
tgcttcagggtcatgtgctgagtgcactgatcactctgctgtggcccagggcatctgtacctgttggacaagattatgataattcagaagtgaagtaaaatgcctccctctgatggcaaa

SEQ ID NO: 715097 - DNA, 120 bp, Artificial Sequence
  ENSG00000197296_19 (sequence is synthesized)
aagccaacctgtttgcaaaatcacccttattgaagggtggcatggctgtggtccctccctcctgttacttgcatcaccaaccaaactaaaccaaaccatacctgggcctgttcagctgga

SEQ ID NO: 715098 - DNA, 120 bp, Artificial Sequence
  ENSG00000197296_20 (sequence is synthesized)
cttgaaatcagtttcctttttctctcccctttgcagcacttttcagtttccagctttgtcattctgtggcctttgctgtgacaatgctgggaagggttagaaatcctgtcacctccatcc

SEQ ID NO: 715099 - DNA, 120 bp, Artificial Sequence
  ENSG00000197296_21 (sequence is synthesized)
acaaaggcacagttccacgccctgtgataagatatcccctcttctctcccagactgtctccttaagcctttcaaactgagccccttgctgttggggtaatcacccttaaggccgccttga

SEQ ID NO: 715100 - DNA, 120 bp, Artificial Sequence
  ENSG00000197296_22 (sequence is synthesized)
tgcccctctctccaatcaagtccaatagtagcattaactgagaagcactacacctgactggcttcactgaagcttaagtggttgaggatgaatcttcggtgtaaaatcttttactataag

SEQ ID NO: 715101 - DNA, 120 bp, Artificial Sequence
  ENSG00000197296_23 (sequence is synthesized)
gatatattttaaatatttcatatcccatcaagttggaggttaattttatccatcacaatgagtcatgatttgttgcacccaaaaggagcagaaacacaggtgatgagatatgggaggtgg

SEQ ID NO: 715102 - DNA, 120 bp, Artificial Sequence
  ENSG00000197296_24 (sequence is synthesized)
caccatggtgctttggaggcgttggtaagatgtgaccctctgttgcctatgcccataaaccagtggtgggagtggccatggagtagatggcaggggcttgttgaagggattgaaagctct

SEQ ID NO: 715103 - DNA, 62 bp, Artificial Sequence
  ENSG00000197296_25 (sequence is synthesized)
ttgggccagcctagccaacatgataaaaccccgtctcgactaaaaatacaaaaattagccag

SEQ ID NO: 715104 - DNA, 120 bp, Artificial Sequence
  ENSG00000197296_26 (sequence is synthesized)
gagactctgtctcaaaaaaaaaaaaggctctccaaagtgtcatgttcagcaccaaaagggaataggcacagggtgaccccagaagttcatttgtgacacttaaatctccagatatttatc

SEQ ID NO: 715105 - DNA, 120 bp, Artificial Sequence
  ENSG00000197296_27 (sequence is synthesized)
cacttaaatctccagatatttatcccacgtgggtctgatgcgggctcagcactaaattaactgtatgtggaaagtgtcaattgcagagccttctgtatcgatgaggcttccgccacttgt

SEQ ID NO: 715106 - DNA, 120 bp, Artificial Sequence
  ENSG00000197296_28 (sequence is synthesized)
ccatgcttagcccccttgcctcttccttgggagcatgctttctattcctatgtgaaacagcctgacataagtgaaaggatttgggctcaagcaaacatgagatgtgggttcatatcttgg

SEQ ID NO: 715107 - DNA, 120 bp, Artificial Sequence
  ENSG00000197296_29 (sequence is synthesized)
caccactcctgatagctgtgtgatcatggcaaacctcgttttcatcgtctgtcaggtggagatgaagagaaatggtgcatgtaaagtgctcagcatctgtgcttagcaggccatagtctc

SEQ ID NO: 715108 - DNA, 120 bp, Artificial Sequence
  ENSG00000197296_30 (sequence is synthesized)
cctgcctcctttttcttgagtaagcctttagaactttctgactcctctagagaaggcagagaaacgaatatattttgggtgccatttggagtctgggtcttttgttaaaattgtcctgta

SEQ ID NO: 715109 - DNA, 120 bp, Artificial Sequence
  ENSG00000197296_31 (sequence is synthesized)
ttatgttgaaaagtgtcggttacccccaggctctgggggcatctgtgatcatagaatactgccatgcttattttgcctttctatgttgagattaattcactgacgcctcattttccacgt

SEQ ID NO: 715110 - DNA, 120 bp, Artificial Sequence
  ENSG00000197296_32 (sequence is synthesized)
gcatctgtcatagtctgggtaccagattgtatttagagaatggctcttgccactgttatgtacacacagatcgtgtgtgtaaacaagcaaattaaagtaaactgagataatgaaatccca

SEQ ID NO: 715111 - DNA, 120 bp, Artificial Sequence
  ENSG00000197299_0 (sequence is synthesized)
ccggcgggaagtgagccagggcttggcgcggcggccgtggttgcggcgcgggaagtttggatcctggttccgtccgctaggagtctgcgtgcgaggattatggctgctgttcctcaaaat

SEQ ID NO: 715112 - DNA, 120 bp, Artificial Sequence
  ENSG00000197299_1 (sequence is synthesized)
aatctacaggagcaactagaacgtcactcagccagaacacttaataataaattaagtctttcaaaaccaaaattttcaggtttcacttttaaaaagaaaacatcttcagataacaatgta

SEQ ID NO: 715113 - DNA, 120 bp, Artificial Sequence
  ENSG00000197299_2 (sequence is synthesized)
tctgtaactaatgtgtcagtagcaaaaacacctgtattaagaaataaagatgttaatgttaccgaagacttttccttcagtgaacctctacccaacaccacaaatcagcaaagggtcaag

SEQ ID NO: 715114 - DNA, 120 bp, Artificial Sequence
  ENSG00000197299_3 (sequence is synthesized)
gacttctttaaaaatgctccagcaggacaggaaacacagagaggtggatcaaaatcattattgccagatttcttgcagactccgaaggaagttgtatgcactacccaaaacacaccaact

SEQ ID NO: 715115 - DNA, 120 bp, Artificial Sequence
  ENSG00000197299_4 (sequence is synthesized)
gtaaagaaatcccgggatactgctctcaagaaattagaatttagttcttcaccagattctttaagtaccatcaatgattgggatgatatggatgactttgatacttctgagacttcaaaa

SEQ ID NO: 715116 - DNA, 120 bp, Artificial Sequence
  ENSG00000197299_5 (sequence is synthesized)
tcatttgttacaccaccccaaagtcactttgtaagagtaagcactgctcagaaatcaaaaaagggtaagagaaacttttttaaagcacagctttatacaacaaacacagtaaagactgat

SEQ ID NO: 715117 - DNA, 120 bp, Artificial Sequence
  ENSG00000197299_6 (sequence is synthesized)
ttgcctccaccctcctctgaaagcgagcaaatagatttgactgaggaacagaaggatgactcagaatggttaagcagcgatgtgatttgcatcgatgatggccccattgctgaagtgcat

SEQ ID NO: 715118 - DNA, 120 bp, Artificial Sequence
  ENSG00000197299_7 (sequence is synthesized)
ataaatgaagatgctcaggaaagtgactctctgaaaactcatttggaagatgaaagagataatagcgaaaagaagaagaatttggaagaagctgaattacattcaactgagaaagttcca

SEQ ID NO: 715119 - DNA, 120 bp, Artificial Sequence
  ENSG00000197299_8 (sequence is synthesized)
tgtattgaatttgatgatgatgattatgatacggattttgttccaccttctccagaagaaattatttctgcttcttcttcctcttcaaaatgccttagtacgttaaaggaccttgacacc

SEQ ID NO: 715120 - DNA, 120 bp, Artificial Sequence
  ENSG00000197299_9 (sequence is synthesized)
tctgacagaaaagaggatgttcttagcacatcaaaagatcttttgtcaaaacctgagaaaatgagtatgcaggagctgaatccagaaaccagcacagactgtgacgctagacagataagt

SEQ ID NO: 715121 - DNA, 120 bp, Artificial Sequence
  ENSG00000197299_10 (sequence is synthesized)
ttacagcagcagcttattcatgtgatggagcacatctgtaaattaattgatactattcctgatgataaactgaaacttttggattgtgggaacgaactgcttcagcagcggaacataaga

SEQ ID NO: 715122 - DNA, 120 bp, Artificial Sequence
  ENSG00000197299_11 (sequence is synthesized)
aggaaacttctaacggaagtagattttaataaaagtgatgccagtcttcttggctcattgtggagatacaggcctgattcacttgatggccctatggagggtgattcctgccctacaggg

SEQ ID NO: 715123 - DNA, 120 bp, Artificial Sequence
  ENSG00000197299_12 (sequence is synthesized)
aattctatgaaggagttaaatttttcacaccttccctcaaattctgtttctcctggggactgtttactgactaccaccctaggaaagacaggattctctgccaccaggaagaatcttttt

SEQ ID NO: 715124 - DNA, 120 bp, Artificial Sequence
  ENSG00000197299_13 (sequence is synthesized)
gaaaggcctttattcaatacccatttacagaagtcctttgtaagtagcaactgggctgaaacaccaagactaggaaaaaaaaatgaaagctcttatttcccaggaaatgttctcacaagc

SEQ ID NO: 715125 - DNA, 120 bp, Artificial Sequence
  ENSG00000197299_14 (sequence is synthesized)
actgctgtgaaagatcagaataaacatactgcttcaataaatgacttagaaagagaaacccaaccttcctatgatattgataattttgacatagatgactttgatgatgatgatgactgg

SEQ ID NO: 715126 - DNA, 120 bp, Artificial Sequence
  ENSG00000197299_15 (sequence is synthesized)
gaagacataatgcataatttagcagccagcaaatcttccacagctgcctatcaacccatcaaggaaggtcggccaattaaatcagtatcagaaagactttcctcagccaagacagactgt

SEQ ID NO: 715127 - DNA, 120 bp, Artificial Sequence
  ENSG00000197299_16 (sequence is synthesized)
cttccagtgtcatctactgctcaaaatataaacttctcagagtcaattcagaattatactgacaagtcagcacaaaatttagcatccagaaatctgaaacatgagcgtttccaaagtctt

SEQ ID NO: 715128 - DNA, 120 bp, Artificial Sequence
  ENSG00000197299_17 (sequence is synthesized)
agttttcctcatacaaaggaaatgatgaagatttttcataaaaaatttggcctgcataattttagaactaatcagctagaggcgatcaatgctgcactgcttggtgaagactgttttatc

SEQ ID NO: 715129 - DNA, 120 bp, Artificial Sequence
  ENSG00000197299_18 (sequence is synthesized)
ctgatgccgactggaggtggtaagagtttgtgttaccagctccctgcctgtgtttctcctggggtcactgttgtcatttctcccttgagatcacttatcgtagatcaagtccaaaagctg

SEQ ID NO: 715130 - DNA, 120 bp, Artificial Sequence
  ENSG00000197299_19 (sequence is synthesized)
acttccttggatattccagctacatatctgacaggtgataagactgactcagaagctacaaatatttacctccagttatcaaaaaaagacccaatcataaaacttctatatgtcactcca

SEQ ID NO: 715131 - DNA, 120 bp, Artificial Sequence
  ENSG00000197299_20 (sequence is synthesized)
gaaaagatctgtgcaagtaacagactcatttctactctggagaatctctatgagaggaagctcttggcacgttttgttattgatgaagcacattgtgtcagtcagtggggacatgatttt

SEQ ID NO: 715132 - DNA, 120 bp, Artificial Sequence
  ENSG00000197299_21 (sequence is synthesized)
tcccagggtacagaaggacatcctgactcagctgaagattctcagacctcaggtgtttagcatgagctttaacagacataatctgaaatactatgtattaccgaaaaagcctaaaaaggt

SEQ ID NO: 715133 - DNA, 120 bp, Artificial Sequence
  ENSG00000197299_22 (sequence is synthesized)
ggcatttgattgcctagaatggatcagaaagcaccacccatatgattcagggataatttactgcctctccaggcgagaatgtgacaccatggctgacacgttacagagagatgggctcgc

SEQ ID NO: 715134 - DNA, 120 bp, Artificial Sequence
  ENSG00000197299_23 (sequence is synthesized)
tgctcttgcttaccatgctggcctcagtgattctgccagagatgaagtgcagcagaagtggattaatcaggatggctgtcaggttatctgtgctacaattgcatttggaatggggattga

SEQ ID NO: 715135 - DNA, 120 bp, Artificial Sequence
  ENSG00000197299_24 (sequence is synthesized)
caaaccggacgtgcgatttgtgattcatgcatctctccctaaatctgtggagggttactaccaagaatctggcagagctggaagagatggggaaatatctcactgcctgcttttctatac

SEQ ID NO: 715136 - DNA, 120 bp, Artificial Sequence
  ENSG00000197299_25 (sequence is synthesized)
ctatcatgatgtgaccagactgaaaagacttataatgatggaaaaagatggaaaccatcatacaagagaaactcacttcaataatttgtatagcatggtacattactgtgaaaatataac

SEQ ID NO: 715137 - DNA, 120 bp, Artificial Sequence
  ENSG00000197299_26 (sequence is synthesized)
ggaatgcaggagaatacagcttttggcctactttggtgaaaatggatttaatcctgatttttgtaagaaacacccagatgtttcttgtgataattgctgtaaaacaaaggattataaaac

SEQ ID NO: 715138 - DNA, 120 bp, Artificial Sequence
  ENSG00000197299_27 (sequence is synthesized)
aagagatgtgactgacgatgtgaaaagtattgtaagatttgttcaagaacatagttcatcacaaggaatgagaaatataaaacatgtaggtccttctggaagatttactatgaatatgct

SEQ ID NO: 715139 - DNA, 120 bp, Artificial Sequence
  ENSG00000197299_28 (sequence is synthesized)
ggtcgacattttcttggggagtaagagtgcaaaaatccagtcaggtatatttggaaaaggatctgcttattcacgacacaatgccgaaagactttttaaaaagctgatacttgacaagat

SEQ ID NO: 715140 - DNA, 120 bp, Artificial Sequence
  ENSG00000197299_29 (sequence is synthesized)
tttggatgaagacttatatatcaatgccaatgaccaggcgatcgcttatgtgatgctcggaaataaagcccaaactgtactaaatggcaatttaaaggtagactttatggaaacagaaaa

SEQ ID NO: 715141 - DNA, 120 bp, Artificial Sequence
  ENSG00000197299_30 (sequence is synthesized)
ttccagcagtgtgaaaaaacaaaaagcgttagtagcaaaagtgtctcagagggaagagatggttaaaaaatgtcttggagaacttacagaagtctgcaaatctctggggaaagtttttgg

SEQ ID NO: 715142 - DNA, 120 bp, Artificial Sequence
  ENSG00000197299_31 (sequence is synthesized)
tgtccattacttcaatatttttaataccgtcactctcaagaagcttgcagaatctttatcttctgatcctgaggttttgcttcaaattgatggtgttactgaagacaaactggaaaaata

SEQ ID NO: 715143 - DNA, 120 bp, Artificial Sequence
  ENSG00000197299_32 (sequence is synthesized)
tggtgcggaagtgatttcagtattacagaaatactctgaatggacatcgccagctgaagacagttccccagggataagcctgtccagcagcagaggccccggaagaagtgccgctgagga

SEQ ID NO: 715144 - DNA, 120 bp, Artificial Sequence
  ENSG00000197299_33 (sequence is synthesized)
gctcgacgaggaaatacccgtatcttcccactactttgcaagtaaaaccagaaatgaaaggaagaggaaaaagatgccagcctcccaaaggtctaagaggagaaaaactgcttccagtgg

SEQ ID NO: 715145 - DNA, 120 bp, Artificial Sequence
  ENSG00000197299_34 (sequence is synthesized)
ttccaaggcaaagggggggtctgccacatgtagaaagatatcttccaaaacgaaatcctccagcatcattggatccagttcagcctcacatacttctcaagcgacatcaggagccaatag

SEQ ID NO: 715146 - DNA, 120 bp, Artificial Sequence
  ENSG00000197299_35 (sequence is synthesized)
caaattggggattatggctccaccgaagcctataaatagaccgtttcttaagccttcatatgcattctcataacaaccgaatctcaatgtacatagaccctctttcttgtttgtcagcat

SEQ ID NO: 715147 - DNA, 120 bp, Artificial Sequence
  ENSG00000197299_36 (sequence is synthesized)
ctgaccatctgtgactataaagctgttattcttgttataccatttgaagtttttactcgtctctattaatatttaaataaatgctggggggtgatagttcttctttttaaaataaacatt

SEQ ID NO: 715148 - DNA, 120 bp, Artificial Sequence
  ENSG00000197299_37 (sequence is synthesized)
ttcttttgaataagcatgttttgctgccgctgcaagtgttgtggccgttgtttctcagaacgtctgaggcagcagctgaatcatctcagtgcaagagcttctgagcataacacgaaaccc

SEQ ID NO: 715149 - DNA, 120 bp, Artificial Sequence
  ENSG00000197299_38 (sequence is synthesized)
agaagccaaaggaagagccacgcgtgggcccttgtgaaactaaagcttttcgtgtaagacaacacaaacaaaatttaaagacaaatgacggggaaaagaggagaaaatatattacaaagg

SEQ ID NO: 715150 - DNA, 120 bp, Artificial Sequence
  ENSG00000197299_39 (sequence is synthesized)
attagtatccatcataccaaatacccgtgaaccagtcagaaacatcccagggggcaggtggaccaaggatgtgaacaggctagtctcagaagaagaaatacacatgctcatggcccggca

SEQ ID NO: 715151 - DNA, 120 bp, Artificial Sequence
  ENSG00000197299_40 (sequence is synthesized)
tgactgtgtgagcaacaccccccacacctcagtagcaaaaacagagaacagtggcagcacatcgtgggctgactgcagttgattctggctctcttacatgagaatgccaagtcatacaag

SEQ ID NO: 715152 - DNA, 120 bp, Artificial Sequence
  ENSG00000197299_41 (sequence is synthesized)
aaagtgcctgccatgctgagcttctctttaccttcttgggttttaatggcattgcaagttatcagtataaaaactcatattagttatactaaatagttggaccaagttaagatattaggt

SEQ ID NO: 715153 - DNA, 120 bp, Artificial Sequence
  ENSG00000197299_42 (sequence is synthesized)
tgttatgtagtgtgcattttaaagtaaaacaaatgatagagcttttagaagcatctattatgaaaatgttccttcaagtctgtgccttatgaatctaataagcttttgcttttatatcag

SEQ ID NO: 715154 - DNA, 120 bp, Artificial Sequence
  ENSG00000197299_43 (sequence is synthesized)
ctttgacctcagatactcagagaagtgcatggccactgccgtaatctcaggctctgcttcctcaggatgttcagttcggtggatgctcgactgataaatacagcaaatataagtcaaacc

SEQ ID NO: 715155 - DNA, 120 bp, Artificial Sequence
  ENSG00000197299_44 (sequence is synthesized)
atcatcattggggataatgaagatttgaaaaaaaaaaacctaacatttattcctatagtactaaaatcttgaggatgaacattaatactcagttaattataatatagaatgccatgttga

SEQ ID NO: 715156 - DNA, 120 bp, Artificial Sequence
  ENSG00000197299_45 (sequence is synthesized)
ttgacaatgctgttaacagtaattttcttatttaatatttaaagttatatgaatctattctaaatatttctatgatatgctctatttttcccctataagtatgtcttactatagtcttca

SEQ ID NO: 715157 - DNA, 120 bp, Artificial Sequence
  ENSG00000197299_46 (sequence is synthesized)
attatggctgctgttcctcaaaataatctacaggagcaactagaacgtcactcagccagaacacttaataataaattaagtctttcaaaaccaaaattttcgtaagtgttttgactggtt

SEQ ID NO: 715158 - DNA, 120 bp, Artificial Sequence
  ENSG00000197299_47 (sequence is synthesized)
tgctgtcacataggcactaacttaccacattgtacacatgagatatcttctctttaaactcccccattgtacagatgaggaaatgaagctgagagattcattgattttcccactttgcca

SEQ ID NO: 715159 - DNA, 120 bp, Artificial Sequence
  ENSG00000197299_48 (sequence is synthesized)
cagtaaagagagggcacaccagtctcagctagatgagtactggccatgggaacagtgggcaagagcagatctgctccactccacgcacatggcacaggtcccaccctcagcttcctcctg

SEQ ID NO: 715160 - DNA, 120 bp, Artificial Sequence
  ENSG00000197302_0 (sequence is synthesized)
ggcggcttccgggatttggcggtggcctttgttggctgcagtaagagctcagtctcttcaccaggggctcccagtccttccatctgggaggccaaggcggcttcgcgttctgagaataga

SEQ ID NO: 715161 - DNA, 120 bp, Artificial Sequence
  ENSG00000197302_1 (sequence is synthesized)
tagacagaacctctgttactctgtgaccggcaggcaccgggagatccgtagctcagacgccaggacatcccggaagctgggaaatgggactgttgacattcagggatgtggccatagaat

SEQ ID NO: 715162 - DNA, 120 bp, Artificial Sequence
  ENSG00000197302_2 (sequence is synthesized)
tcgggaggagtgggaacacctggactcagatcagaagcttttatatggggatgtgatgttagagaactacggaaacctggtctctctgggtctcgctgtctctaagccggacctgatcac

SEQ ID NO: 715163 - DNA, 120 bp, Artificial Sequence
  ENSG00000197302_3 (sequence is synthesized)
ctttttggagcaaaggaaagagccctggaatgtgaagagtgcagagacagtagccatccagccagatatcttttctcatgatactcaaggcctcttaagaaagaagcttatagaagcatc

SEQ ID NO: 715164 - DNA, 120 bp, Artificial Sequence
  ENSG00000197302_4 (sequence is synthesized)
attccaaaaagtgatattggatggatatgggagctgtggccctcagaatttaaacttaaggaaagagtgggaaagtgagggcaaaataatcctatggtgaaaaaaatcaacaagataatc

SEQ ID NO: 715165 - DNA, 120 bp, Artificial Sequence
  ENSG00000197302_5 (sequence is synthesized)
tctgcttgagaaaaaggaccaaagacaagtgaattttctgagggtgatgaaagtgttgcttcgaaaaggggtgaagtttatatgggtctatttatttgtctaacatgtacagttaaggtt

SEQ ID NO: 715166 - DNA, 120 bp, Artificial Sequence
  ENSG00000197302_6 (sequence is synthesized)
tatgccttgcaatgtatgtacatcttcacaaaaaaaatcttaaaaaaattaaatgggtgggggtagggaaagggttgaagtatagatgaagcagaagtggtacatgattagtagttgaag

SEQ ID NO: 715167 - DNA, 120 bp, Artificial Sequence
  ENSG00000197302_7 (sequence is synthesized)
ctgggggcaggtctatatattttatttttatgtctttaatagcatttgtataaatgtacaatattcgtttacaatgttagctcaggatcttgtttacctttggacagggagggagggaga

SEQ ID NO: 715168 - DNA, 120 bp, Artificial Sequence
  ENSG00000197302_8 (sequence is synthesized)
aatttattttctgggtaggagtaaagctggttctattcctcagttatgtaaattatctgttataatccaaaaagctttacatgaatgtttctgtatgtaatgtggtatatcaataaaaaa

SEQ ID NO: 715169 - DNA, 120 bp, Artificial Sequence
  ENSG00000197302_9 (sequence is synthesized)
ttaaatattacatatttgcaccagaatcctaactcactatctcagaatgttagcagcattttcttttgttgtaaagtggaacacaatctcatggcattagcagatgggtttgaatattct

SEQ ID NO: 715170 - DNA, 120 bp, Artificial Sequence
  ENSG00000197302_10 (sequence is synthesized)
aaagtatcaacgtcctaatctcatgggcacctcttgggtctttccatttttgccttcatttgctaagtggcatgcttttgattttttgagatgaaactttttcccagcaaagtcttttcc

SEQ ID NO: 715171 - DNA, 120 bp, Artificial Sequence
  ENSG00000197302_11 (sequence is synthesized)
tgctctgaaagccaggacacctagcacaggaccctgggcatagtatgcactcagtacatgtggagcatgttgatcaggaacaaaaggagtagcaaaggtcagttcctgcaaaggtgagta

SEQ ID NO: 715172 - DNA, 120 bp, Artificial Sequence
  ENSG00000197302_12 (sequence is synthesized)
gataatacaggtatgactgaaaggctgcaactcaggagtaaacattttacattcattcaagagacaatttgcaactagtacaccaaaaaattttggcttgaagcagtactttggggactt

SEQ ID NO: 715173 - DNA, 120 bp, Artificial Sequence
  ENSG00000197302_13 (sequence is synthesized)
ggctaaactctgtaatcacttggagaactttaaacaatactgacgtctgggccctactccagggattttgattttattggtctgttgcaatttaggttttgggaattgtagggcctccgc

SEQ ID NO: 715174 - DNA, 120 bp, Artificial Sequence
  ENSG00000197302_14 (sequence is synthesized)
atgtgactgtaatgtggagccaggggtgagacccactgtttcagggtgagggatgcattagctgtgtgtgatttccatgtgtgctgcaagtatttaacctatgaccactcctgcatttgg

SEQ ID NO: 715175 - DNA, 120 bp, Artificial Sequence
  ENSG00000197302_15 (sequence is synthesized)
agtcttggaaattgcagcaggaggaaatgtctctctacagatctattttttatgtcacttgcttttagagtaagaggttatttcaggcacagtaatttgatttaatctgttttcaaatac

SEQ ID NO: 715176 - DNA, 120 bp, Artificial Sequence
  ENSG00000197302_16 (sequence is synthesized)
taaatctgaaaatactaaaatgaaaagaatttgcaaatgtgagaatttgcaaacatgtggagtgtgttcttatgtgctttccagtttctctgatgataagaaatgagtaatgttgggcct

SEQ ID NO: 715177 - DNA, 120 bp, Artificial Sequence
  ENSG00000197302_17 (sequence is synthesized)
tgatttcctaaactcagccctcagtcactttctcaaattatttgaagaccttccaagttgcttcagaagcattgtccaaaggagattattcccagtagtgaagaataatagatggatgag

SEQ ID NO: 715178 - DNA, 120 bp, Artificial Sequence
  ENSG00000197302_18 (sequence is synthesized)
aatgtctaaggaatcctacttctgtcgcagaagtggcactctccagaacctcaagggcccatggagttcatgggctttggagtcaggcagagttgaccctgagtcccatcccagcctctt

SEQ ID NO: 715179 - DNA, 120 bp, Artificial Sequence
  ENSG00000197302_19 (sequence is synthesized)
aatagactagttacttgacttggaacagttatgcaagacaaagcacaatgatactgattgcagtaatgggaacaattcattcctctctgtatccatgccctttgcaatgcatgtttttag

SEQ ID NO: 715180 - DNA, 120 bp, Artificial Sequence
  ENSG00000197302_20 (sequence is synthesized)
ctactcccatggagggaaagattctgtttttccagtccttggatctgactggccttatttgctgtggccaattcatacttactgttctagtgaaacaattaggcatgttttgctcctcat

SEQ ID NO: 715181 - DNA, 120 bp, Artificial Sequence
  ENSG00000197302_21 (sequence is synthesized)
tctagactttaattaaaattaaaattttatgatattttatttctactgtattttgctgtattcattctgctcagtattctagttcaccggtcctcttatctctgtttaatttagtggtga

SEQ ID NO: 715182 - DNA, 120 bp, Artificial Sequence
  ENSG00000197302_22 (sequence is synthesized)
acctatacattgtctggtaacttaattttgtattttcgtattctattgggctgtcgttcaaatgtggcttttaaacttcagttacttgttctttctacaaaaataaacattgattttcta

SEQ ID NO: 715183 - DNA, 120 bp, Artificial Sequence
  ENSG00000197302_23 (sequence is synthesized)
gacaactacctataacaaaaacctcactgttacaggaggtcaaaaacatgaaaaaactcaatttatgtcagttgctttttctaaaccatgtgtttctgtaagtaagtgtcaacatcaatt

SEQ ID NO: 715184 - DNA, 120 bp, Artificial Sequence
  ENSG00000197302_24 (sequence is synthesized)
tttgaaacttaccttttcttttaaaggaaatttggataatccgaatagtgacttagtccatgtttcaaataatcatttaaaccaattaaaatatagaactggagtaaatgttcagtcaaa

SEQ ID NO: 715185 - DNA, 120 bp, Artificial Sequence
  ENSG00000197302_25 (sequence is synthesized)
tttaaaaacgaggaggtgatttctaaatatgatcaatttgatggatctttgttaaaagtttgtttcaccaacaaataacacctcgttctgcctgtgatcaatatagaaaggtcttcattc

SEQ ID NO: 715186 - DNA, 120 bp, Artificial Sequence
  ENSG00000197302_26 (sequence is synthesized)
attcatcattgcttaatcaatgtcaaggaatagataatttgggaaaatatcacacacataataaaactttgacagcctttaggcaggactataccctaaataattaccagtatatttgtg

SEQ ID NO: 715187 - DNA, 120 bp, Artificial Sequence
  ENSG00000197302_27 (sequence is synthesized)
ttgcagagaaaaatcagtacaataaatctgatacaacattaagccaaggcataagccccagaagacatcagaaaactcattttctacataaccattgcaaacgtaaaaaatgtgagaaag

SEQ ID NO: 715188 - DNA, 120 bp, Artificial Sequence
  ENSG00000197302_28 (sequence is synthesized)
cctttcatgaatgcaccaaccatgtccatcagagtatctttattcaagagaagtctgccaaatgtaataagtgtatagaaacttttatccagtcatcaaaacatactcagcctcagagaa

SEQ ID NO: 715189 - DNA, 120 bp, Artificial Sequence
  ENSG00000197302_29 (sequence is synthesized)
tccatattggagaaaagtcacacagatgtaataatggtgagaaaatccttagtaaattgtcaagtctaagaaaacataagataatccataatgaagagaaaccttacaaatgtaaagaat

SEQ ID NO: 715190 - DNA, 85 bp, Artificial Sequence
  ENSG00000197302_30 (sequence is synthesized)
ataatccataatgaagagaaaccttacaaatgtaaagaatgtgacaaagcctttaaccatcgttcacaccttactcaacatcaaa

SEQ ID NO: 715191 - DNA, 120 bp, Artificial Sequence
  ENSG00000197302_31 (sequence is synthesized)
ctcttctcattccagtaagagccacatgcaaggcaagaatcagagtccagctcagatgggggaactctaggaagagagaaatccattccatggacagctgccaagatagagcaggacagc

SEQ ID NO: 715192 - DNA, 120 bp, Artificial Sequence
  ENSG00000197302_32 (sequence is synthesized)
aagctgggaaatggtgaatgtgccaggtcgggggtccccagaagagggagaggggcggtcggaagcggcgggaaccctctttgaggtcactgaacatctgactggctgggcacctgctcc

SEQ ID NO: 715193 - DNA, 120 bp, Artificial Sequence
  ENSG00000197302_33 (sequence is synthesized)
agagtgcagagacagtagccatccagccagaagtcaaagtgaatacccattaaacaacaaattgtcctttccacacttctctccagctcctgaagagcaccattctgcctaatgtttcta

SEQ ID NO: 715194 - DNA, 120 bp, Artificial Sequence
  ENSG00000197302_34 (sequence is synthesized)
catactggagagaaaccttacaaatgtaaagaatgtggtaaatcatttaaagtgtcttcagcccttactcagcatgagagaattcatactggagagaaaccctataaatgtaaggaatgc

SEQ ID NO: 715195 - DNA, 120 bp, Artificial Sequence
  ENSG00000197302_35 (sequence is synthesized)
tgtaaggaatgcagcaaagcctttaactgtaggtcgtacctaactaaacatcagagaattcataccggagaaaaactttacaaatgtaaatcatgtagcaaatctttttctcgttcctca

SEQ ID NO: 715196 - DNA, 120 bp, Artificial Sequence
  ENSG00000197302_36 (sequence is synthesized)
agtcttattgtccaccagagaattcatactggagaaaaaccctataaatgcaaagaatgtggcaaagcctttaattgtagttcacgccttactcaacatcaaagaattcataccggagag

SEQ ID NO: 715197 - DNA, 120 bp, Artificial Sequence
  ENSG00000197302_37 (sequence is synthesized)
aaaccctacatatgtaaagaatgtggcaaagcctttaactgtagttcatcccttactaaacatcagagaattcatactggagtaaaactttacaaatgtaaagcatgtagcaaatctttc

SEQ ID NO: 715198 - DNA, 120 bp, Artificial Sequence
  ENSG00000197302_38 (sequence is synthesized)
tctcattcctcatgtctttctgtgcatcagataactcatactggaatgaaaccatatatatgtaaggattgtggcatctcctttaaccggtcttcaaaccttagacgacatcagatgatt

SEQ ID NO: 715199 - DNA, 120 bp, Artificial Sequence
  ENSG00000197302_39 (sequence is synthesized)
cctacaaatgtaaagaatgtggcaaattatttaatcgatgctcaacccttactcgacataaaagtattcatactagagaatttctatagttgtagtaaatgtgaaaagagttttatccaa

SEQ ID NO: 715200 - DNA, 120 bp, Artificial Sequence
  ENSG00000197302_40 (sequence is synthesized)
aaagagttttatccaaaatttagaacttaaaaatcaccatagagtttatagggaaaccgactttacagattgaataaatgggaggaagtatttaatcagaactcaaatctgaatgtgtca

SEQ ID NO: 715201 - DNA, 120 bp, Artificial Sequence
  ENSG00000197302_41 (sequence is synthesized)
ggacttacacaaaaaaggactaaagcacagatccccactttaaaattaaataagagtatttgttatggaggattactctaaagccaaagcagttacttattttgttatgtgtttcaaatg

SEQ ID NO: 715202 - DNA, 120 bp, Artificial Sequence
  ENSG00000197302_42 (sequence is synthesized)
agcaaaagcattgatgtttggacaagtaattattcagtgagcatgttatttgtattgaaaacatttgaaatttgtataaagcaaatcataatttaattctcagattagttgttatacctt

SEQ ID NO: 715203 - DNA, 120 bp, Artificial Sequence
  ENSG00000197302_43 (sequence is synthesized)
agacccatgatgcctgctgtgggggacccccagaggcccacaccgggcacagcgagcggcccagatctcagtctctaggagaccacccactaccacttcagaaaagcctggtgacctctc

SEQ ID NO: 715204 - DNA, 120 bp, Artificial Sequence
  ENSG00000197302_44 (sequence is synthesized)
cctctgtgctgtggtacaaacctgtgccatggccacccaggtggcctatgtctttcgcactgagggctggctcatcccagccatactccctggtccctagggtggagaagctcagaactc

SEQ ID NO: 715205 - DNA, 120 bp, Artificial Sequence
  ENSG00000197302_45 (sequence is synthesized)
ctcctaggaagaaaatggatccaccctttccctggagaggagataaaggagcctgttggtggatcaaatgaggctttagctggggtcgcccaggccctattcaacagaggacacagctgt

SEQ ID NO: 715206 - DNA, 120 bp, Artificial Sequence
  ENSG00000197302_46 (sequence is synthesized)
gtgagtgagaacaaagacctgctacttctcaggcaattttagacacactgtgttaatacatgacacaactgggggcactcttgggaaaggagtttgaacaatatcctcaaagtggaaact

SEQ ID NO: 715207 - DNA, 120 bp, Artificial Sequence
  ENSG00000197302_47 (sequence is synthesized)
gtgtttcgtttaggtctaaaaccactgacaaattttgtatttcatgttagacatttgatgtttttggatgttttatgacagtcacgcatttctttgtaatcagaaaatattagggtataa

SEQ ID NO: 715208 - DNA, 120 bp, Artificial Sequence
  ENSG00000197302_48 (sequence is synthesized)
tcattcatatgtgtttgtgtattgaaaagtacagcaaaatgaagatatatgtagatcctccccctataagtcaaaaagactgtagctcttttctctcccaccctgagtcaataaaggact

SEQ ID NO: 715209 - DNA, 120 bp, Artificial Sequence
  ENSG00000197302_49 (sequence is synthesized)
gatatctactaacctttaatagcattctctatggagaaatgttggtattttttcaatttgaggaaatgataaaatcaccatgctattgtttcattttctttgttctaaaactttcagaat

SEQ ID NO: 715210 - DNA, 120 bp, Artificial Sequence
  ENSG00000197302_50 (sequence is synthesized)
gtattaagtgcttgttgatcatatttttatttattcttcaacctggattatattttttgcctaattttaatcttccattttacagatttcaattgagcttattttttaaaacaggttgat

SEQ ID NO: 715211 - DNA, 120 bp, Artificial Sequence
  ENSG00000197302_51 (sequence is synthesized)
aacatcattaatatcaacttattttcttggaaatttaatggcaaatgtaaaatacatgaagaaaatctaaaagaggctctttgtgtttgaatcattaaacagtaatatgtgtaaacatat

SEQ ID NO: 715212 - DNA, 120 bp, Artificial Sequence
  ENSG00000197302_52 (sequence is synthesized)
agtacatatttagggcattagtattctatactaaagtaaaagaggaatattctgaatttatttattacatcaattgctccttaagtagaaaaacactggtcagttatttaaaatactggc

SEQ ID NO: 715213 - DNA, 120 bp, Artificial Sequence
  ENSG00000197302_53 (sequence is synthesized)
atacctttatagtacaatgaagtagtaatcttgaatattatttgatgtgttaaaaataaaaacatcttcacagatatcagagaaaagtgaaaactcatatctgaaagattataaatatac

SEQ ID NO: 715214 - DNA, 120 bp, Artificial Sequence
  ENSG00000197302_54 (sequence is synthesized)
tttatatcaattttccagagaacttaaacttctaataatattggtaatattctcatggttactattttatattctttcctgctttttgtagctactggtgtactatgacagttataataa

SEQ ID NO: 715215 - DNA, 120 bp, Artificial Sequence
  ENSG00000197302_55 (sequence is synthesized)
agattatatgggggtatacttaaatgccatacttttaaaatcctgaatcattgtttataaagttttattcaatatttttctttgcacatgccctttttcagtccaattgaacacttagag

SEQ ID NO: 715216 - DNA, 120 bp, Artificial Sequence
  ENSG00000197302_56 (sequence is synthesized)
aatggaaaagaaaatgatggatcacaacaggaaactggagaactgttgatttattacagttctcaaattagaaacctcccaaattcttaaagctaaattagcttttcattgcacactgaa

SEQ ID NO: 715217 - DNA, 120 bp, Artificial Sequence
  ENSG00000197302_57 (sequence is synthesized)
tttttctctgataaatctaatgtcttctgggttcagactttatcccgtacaaatccttttttcttgcctgtgattcatgtgagaagaattatataattttcttatttcaaagcttataaa

SEQ ID NO: 715218 - DNA, 120 bp, Artificial Sequence
  ENSG00000197302_58 (sequence is synthesized)
ctattacttataagttctcatggattttaagaatgtttttgtaaaatttaatggtgctgtccaggtgtggtggctcacgccggtaatcccagcatttcgggaggctgaggcaggaggatc

SEQ ID NO: 715219 - DNA, 120 bp, Artificial Sequence
  ENSG00000197302_59 (sequence is synthesized)
cacctgtaatcccagttactcaggaggcaaaggcaggagagttgcttgaactgaggagatgaaggttacagtgagccaagtttgtgcctcacactccagcctgggtaacagagtgagact

SEQ ID NO: 715220 - DNA, 120 bp, Artificial Sequence
  ENSG00000197302_60 (sequence is synthesized)
atctacctatagacataaccctactgaggaggatggggataaaaggtctgcatctaagtcactttgaaaaacagtattttgattgaatgctgtaagactacacaaatgctgtattctact

SEQ ID NO: 715221 - DNA, 120 bp, Artificial Sequence
  ENSG00000197302_61 (sequence is synthesized)
gagtaatattttattttcctacaaggatatgcattagcaattctgaaacagttttacatgttattatataatatatggaggctgtttctcagtgtagttcacaaaagttaaatggtgaat

SEQ ID NO: 715222 - DNA, 120 bp, Artificial Sequence
  ENSG00000197302_62 (sequence is synthesized)
gctagcatgaatcttgtggtcctagcccaaagttggaaatatcaggatgaacccatgactaatacatctggatggatggatggatgaatagatataaagataggtaggtaggtaggtagg

SEQ ID NO: 715223 - DNA, 120 bp, Artificial Sequence
  ENSG00000197302_63 (sequence is synthesized)
tagatagatagatagatagatagatgaagcgatgtctaagatatctggaaggatggatggatggatggatggatagttagatagatagatagatagatagatacatagatagacgattca

SEQ ID NO: 715224 - DNA, 120 bp, Artificial Sequence
  ENSG00000197302_64 (sequence is synthesized)
atagatacatagatagacgattcagagatagataatgttccaaactcttgagggccaagaactggtgacatcttgtatcaacacatctaggtctacaatcttggtttctaaacaacattc

SEQ ID NO: 715225 - DNA, 120 bp, Artificial Sequence
  ENSG00000197302_65 (sequence is synthesized)
attaaaaggacccaagggttgaagttagaaaatacaagttgagctagagtatcttgtaaagccacaaagaaaaaagtgcttaataaaaatgatggggacttttcaaagggagccaacctg

SEQ ID NO: 715226 - DNA, 120 bp, Artificial Sequence
  ENSG00000197302_66 (sequence is synthesized)
aaagacctcccaatggtccaagctccaacaatatgagcaataagttatgatagctttggattatggcccacagaataaagtaatactcatctctactgtgtgaataaaagagattaaata

SEQ ID NO: 715227 - DNA, 120 bp, Artificial Sequence
  ENSG00000197302_67 (sequence is synthesized)
aggaaagaaggaatgaaatctacaatatttaaaatacagatcaatgtagttggataatgcaaaataaatcaacactagaacatcacagtaataattaccatagggaagattccccgagga

SEQ ID NO: 715228 - DNA, 120 bp, Artificial Sequence
  ENSG00000197302_68 (sequence is synthesized)
taataattaccatagggaagattccccgaggaattcaaaaatttcaggaaaaacttaaacactaaagagtgtatttgggccagtctcggtggcacatgcctgtaatcctagcactttggg

SEQ ID NO: 715229 - DNA, 70 bp, Artificial Sequence
  ENSG00000197302_69 (sequence is synthesized)
tggtgaaaccccgtctctattaaaaatgaaaaaattagtcgggcatgcacttgaacctgggaagcagaag

SEQ ID NO: 715230 - DNA, 73 bp, Artificial Sequence
  ENSG00000197302_70 (sequence is synthesized)
agctacttgggaggctgaagcaggagagtcacttgaacctgggaagcagaagttgttgaactctgtctcaaaa

SEQ ID NO: 715231 - DNA, 120 bp, Artificial Sequence
  ENSG00000197302_71 (sequence is synthesized)
aagaaaagtgtatttgcatattttaagtatctaccatctaatatttattaatacaattttttcttaatttcttagacttgtgactatttgaaacaaattataacactgtattgtaggatt

SEQ ID NO: 715232 - DNA, 120 bp, Artificial Sequence
  ENSG00000197302_72 (sequence is synthesized)
aaaatttataacacatggaataagaagataaatggaactgttctgtagcaaatttttcatgttttatatttaagacagtatagtattaactctaaaagtatggtggatatgttaaagatt

SEQ ID NO: 715233 - DNA, 120 bp, Artificial Sequence
  ENSG00000197302_73 (sequence is synthesized)
catattgtattccctgcagcaaccactaaaaaatgcaaagaagtgtaatgtaaatgctaaaaaaggagataattataaaatatttatttgcacaatatttatgtatcttttagtcataat

SEQ ID NO: 715234 - DNA, 120 bp, Artificial Sequence
  ENSG00000197302_74 (sequence is synthesized)
agcccaaaacaggaaacaaccaaaatgtccattaataagaaaatgaactaattgtatagcttttagaacaaaatacagctcaggaatatgaaaaaccaagcacacatcctggataaaatt

SEQ ID NO: 715235 - DNA, 120 bp, Artificial Sequence
  ENSG00000197309_0 (sequence is synthesized)
caaggcattcttccatgtcctcagcctcctctttccttcctaggactggcttccatggaggtgaagaactgctgcatggtgacagagttcatccttttgggaatcccacacacagagggg

SEQ ID NO: 715236 - DNA, 120 bp, Artificial Sequence
  ENSG00000197309_1 (sequence is synthesized)
ctggagatgacactttttgtcttattcttgcccttctatgcctgcactctactgggaaatgtgtctatccttgttgctgttatgtcttctgctcgccttcacacacctatgtatttcttc

SEQ ID NO: 715237 - DNA, 120 bp, Artificial Sequence
  ENSG00000197309_2 (sequence is synthesized)
ctgggaaacttgtctgtgtttgacatgggtttctcctcagtgacttgtcccaaaatgctgctctaccttatggggctgagccgactcatctcctacaaagactgtgtctgccagcttttc

SEQ ID NO: 715238 - DNA, 120 bp, Artificial Sequence
  ENSG00000197309_3 (sequence is synthesized)
ttcttccatttcctcgggagcattgagtgcttcttgtttacggtgatggcctatgaccgcttcactgccatctgttatcctctgcgatacacagtcatcatgaacccaaggatctgtgtg

SEQ ID NO: 715239 - DNA, 120 bp, Artificial Sequence
  ENSG00000197309_4 (sequence is synthesized)
tgccatactgtggtcccaatgaagtggatcacttcttctgtgacattccagcactgttgcccttggcctgtgctgacacatccttagcccagagggtgagcttcaccaacgttggcctca

SEQ ID NO: 715240 - DNA, 120 bp, Artificial Sequence
  ENSG00000197309_5 (sequence is synthesized)
tatctcttgtctgctttctgctaattcttttatcctacactagaatcacaatatctatcttaagcattcgtacaactgagggccgtcgccgtgccttctccacctgcagtgctcacctca

SEQ ID NO: 715241 - DNA, 120 bp, Artificial Sequence
  ENSG00000197309_6 (sequence is synthesized)
ttgccatcctctgtgcctatgggcccatcatcactgtctacctgcagcccacacccaaccccatgctgggaaccgtggtacaaattctcatgaatctggtaggaccaatgctgaaccctt

SEQ ID NO: 715242 - DNA, 120 bp, Artificial Sequence
  ENSG00000197309_7 (sequence is synthesized)
tgatctataccttgaggaataaggaagtaaaaacagccctgaaaacaatattgcacaggacaggccatgttcctgagagttagtaagagcagataaatgggtgcatggctctggaattcc

SEQ ID NO: 715243 - DNA, 120 bp, Artificial Sequence
  ENSG00000197309_8 (sequence is synthesized)
tggaattttcagcactgtgctgaatgatatggaccattatgctatatataatacattatctttttgcaatattttattttattgtctaggttctgcctcttcacctatcttcaaagtcat

SEQ ID NO: 715244 - DNA, 120 bp, Artificial Sequence
  ENSG00000197309_9 (sequence is synthesized)
atagtcttgtttattgttactttgcctttcttctatagagaattgcctgtccctggaaggaagatcttttccatcctgccatttttttttttttttgcatcacttttctcaatttactcc

SEQ ID NO: 715245 - DNA, 120 bp, Artificial Sequence
  ENSG00000197309_10 (sequence is synthesized)
cctcatactatttgtgagacaaacctatagggaaaggcaataaaaagaaaagagattttaaataactgattgagagaataatataattttaaaaatatattaacagactaaggactagag

SEQ ID NO: 715246 - DNA, 120 bp, Artificial Sequence
  ENSG00000197309_11 (sequence is synthesized)
tcaagatgcagtgtttttttttcctccccaaatatctggaaagggaataacttagaatttgtcagcaaggatgttcatcccatgtctgaccccatacctgattgctctgtctaaacattt

SEQ ID NO: 715247 - DNA, 120 bp, Artificial Sequence
  ENSG00000197309_12 (sequence is synthesized)
ttaggcagattgggttagcctcactgcctaaggaaagtaaaaagcattgtgtctagtatattagatttgggtctgtttccatcttgctaccagctattagtgtggcaagtagtgtggtaa

SEQ ID NO: 715248 - DNA, 120 bp, Artificial Sequence
  ENSG00000197309_13 (sequence is synthesized)
agtgaatttatcctgagatttccatgttaaatatacttagtgagaactttctgtttagttatcatatgtattagatttctaggtaagattctactggagaaagtttgaaagcttctggac

SEQ ID NO: 715249 - DNA, 120 bp, Artificial Sequence
  ENSG00000197309_14 (sequence is synthesized)
tttttgatctctggggtaccttgtaagattaaaaactatgatgtgtatcttttgtttctacccataactttaaaggtgtttctgccttttctttaacacctgaacctcacccttacctct

SEQ ID NO: 715250 - DNA, 120 bp, Artificial Sequence
  ENSG00000197309_15 (sequence is synthesized)
tggatattcatttgagcttgctagacttggtaaagcttcaaggatcatttcattacctaccaaacaattctgctcttccaaaaaaaattgtaaataaaatatttatacttacatttggcc

SEQ ID NO: 715251 - DNA, 120 bp, Artificial Sequence
  ENSG00000197309_16 (sequence is synthesized)
tcatgcaacatcctcattttttgatgtgcatcaaagttatctactttggctcaaaaacagctacacagaagctttgtggagccactgattagatctgaaatcccacagaagacagagaca

SEQ ID NO: 715252 - DNA, 120 bp, Artificial Sequence
  ENSG00000197309_17 (sequence is synthesized)
ctcagcattttcctggattcgttgtattaactgcctagggtacacataattttacctctttacacctcttaccaaaatactaagcaccgtgttattaaaattccaactagaaagcttccc

SEQ ID NO: 715253 - DNA, 120 bp, Artificial Sequence
  ENSG00000197309_18 (sequence is synthesized)
aatccactgtgatgtaacaaaaataaattcagcttcatattctcctttttatcccttttcaaaaactcctaagcatgacacccgaattgcaaagcttcctgccagaattctctgtatcct

SEQ ID NO: 715254 - DNA, 120 bp, Artificial Sequence
  ENSG00000197309_19 (sequence is synthesized)
tggaactgtcaagtatataattgtcttagtagcctcttcactcatttgtgccttaaatttctgtctttggttcagtagtatgaagattatcttttatagagccctgattatttgtcagat

SEQ ID NO: 715255 - DNA, 120 bp, Artificial Sequence
  ENSG00000197309_20 (sequence is synthesized)
attatcataaatgctgtgtaaaactatctcatttaatcctcaaaacaatctttgatatttgtgctattgttcccattttactgtgagaggcccaggatatgaatgcaaggcttttacgct

SEQ ID NO: 715256 - DNA, 120 bp, Artificial Sequence
  ENSG00000197309_21 (sequence is synthesized)
taaacactaagaaactgcttccaaaatgcttaaaaatctttccaactaagaagagataagaaaccaagagggagcagttgacttcatccatgccagcccaagaagcatcttacatccaag

SEQ ID NO: 715257 - DNA, 120 bp, Artificial Sequence
  ENSG00000197309_22 (sequence is synthesized)
ataaagatattttctcccactcttatgaaggaaatggtaaccaagggagtcaatggtgggcttaactccagaacgtagatggcagaggcctcaagtgggcaaggcatctcactgcagcag

SEQ ID NO: 715258 - DNA, 120 bp, Artificial Sequence
  ENSG00000197309_23 (sequence is synthesized)
aggccagggtgagaaacgattaggcatacgaagagggacacagcaacggagactcaaaaaagaagggccacacaggaatcagaagtgccacatcttcatgtcttcttccagtaaaaaaca

SEQ ID NO: 715259 - DNA, 120 bp, Artificial Sequence
  ENSG00000197309_24 (sequence is synthesized)
gacaagagccatagatgaaggcactggaatctttgtatcactgaggattgctggaaggaggagagatgactgagaatacaaaaatcagcaacagcttgaaagaaagctctgtctccaaac

SEQ ID NO: 715260 - DNA, 120 bp, Artificial Sequence
  ENSG00000197309_25 (sequence is synthesized)
acccaccatatgccttcttctgtcacctgtgctccacttctctcgttaggaagtttcctgaccaatgtaaggagatggctgttgattttcagttactgatttctcacccgatctgggcaa

SEQ ID NO: 715261 - DNA, 120 bp, Artificial Sequence
  ENSG00000197309_26 (sequence is synthesized)
tgatccttgatccagcagctcacaatcctctctctgagccccagtattgatttcatttagcttgttgaattcgccttctaaggattcatagagacatctcaaaggctctgttattggcca

SEQ ID NO: 715262 - DNA, 120 bp, Artificial Sequence
  ENSG00000197309_27 (sequence is synthesized)
agggaaaatctaacaaaagatctcagagcccctccctggccccaaaatggtttcagatgtaactcaacattccagaggaatggtaataatgggactgcattttcccttttctctggtata

SEQ ID NO: 715263 - DNA, 120 bp, Artificial Sequence
  ENSG00000197312_0 (sequence is synthesized)
agacggactcgcaggcgtgtggcggcggccgtgcttgctagtgagggcgggagggagtgactcactgagcgtgtgtgagggagggagcgagcgagcgaacgagcagccggcgccgtcctc

SEQ ID NO: 715264 - DNA, 120 bp, Artificial Sequence
  ENSG00000197312_1 (sequence is synthesized)
gccacgccgccgcctcttcccctgcgccccgcgcccaggccgggccgagccgagccgagccgggtcgggcccgggccatgctgctcaccgtgtactgtgtgcggagggacctctccgagg

SEQ ID NO: 715265 - DNA, 120 bp, Artificial Sequence
  ENSG00000197312_2 (sequence is synthesized)
agggacctctccgaggtgaccttttccctccaggtcgacgccgacttcgagctgcacaacttccgcgcgctgtgcgagctcgagtctggcatccccgcagccgagagccagatcgtctat

SEQ ID NO: 715266 - DNA, 120 bp, Artificial Sequence
  ENSG00000197312_3 (sequence is synthesized)
gcggaaagacctctcacagacaaccacagatcattggcttcttatggcttgaaagatggggacgttgtgattttacgacagaaggagaatgcagaccctcgacctccagtgcagttccca

SEQ ID NO: 715267 - DNA, 120 bp, Artificial Sequence
  ENSG00000197312_4 (sequence is synthesized)
aacttaccccgaatagatttcagtagtatagctgtgcctggcacatcaagtccccggcagcgccagccaccaggaacacagcagtcccactcatctcctggagaaataacttcatctcct

SEQ ID NO: 715268 - DNA, 120 bp, Artificial Sequence
  ENSG00000197312_5 (sequence is synthesized)
cagggcttggacaatccagccttgctccgagatatgttgctggccaacccgcatgagctgtccttgctgaaggaacgcaatccacccctggcagaagctctgctcagtggagaccttgag

SEQ ID NO: 715269 - DNA, 120 bp, Artificial Sequence
  ENSG00000197312_6 (sequence is synthesized)
aaattttctagagtcctggtggagcagcagcaggaccgagcccggagagagcaagaaaggattcgtctgttttctgctgatccctttgaccttgaagctcaggcaaagatagaagaagat

SEQ ID NO: 715270 - DNA, 120 bp, Artificial Sequence
  ENSG00000197312_7 (sequence is synthesized)
ataaggcaacagaacattgaggaaaacatgacaatagctatggaagaggctccggaaagttttggccaagtagtgatgctttatattaactgcaaagtgaatggacatcctgtgaaagcc

SEQ ID NO: 715271 - DNA, 120 bp, Artificial Sequence
  ENSG00000197312_8 (sequence is synthesized)
tttgttgactcaggtgcccagatgactatcatgagccaagcttgtgcagaaaggtgtaacataatgagactggtggaccgtcggtgggcagggattgccaaaggagtgggcacccagaag

SEQ ID NO: 715272 - DNA, 120 bp, Artificial Sequence
  ENSG00000197312_9 (sequence is synthesized)
attattggaagggtacatctagctcaggttcagattgaaggagattttttgccatgttccttctctatacttgaggaacagcccatggacatgcttctgggactggacatgcttaaacgg

SEQ ID NO: 715273 - DNA, 120 bp, Artificial Sequence
  ENSG00000197312_10 (sequence is synthesized)
caccagtgttccatcgacctgaagaaaaatgtactcgtgatcggcaccacaggctcccagaccacctttcttcctgagggagagctaccagagtgtgcccggttggcatatggggctgga

SEQ ID NO: 715274 - DNA, 120 bp, Artificial Sequence
  ENSG00000197312_11 (sequence is synthesized)
agagaggatgtacggccagaggagattgcagaccaagaattagcagaagcccttcaaaaatcagcagaggatgcagagcgtcagaagccatgatgcatgtagtgtgtgtgtactgcagct

SEQ ID NO: 715275 - DNA, 120 bp, Artificial Sequence
  ENSG00000197312_12 (sequence is synthesized)
ggagtgggccccagaccagagaaaagtggtaaagaatctacctcactgggaatgtcatcattaccaacttcagatgggtttaaccatcccgcccgttcttcaggacagagtcctgatgtt

SEQ ID NO: 715276 - DNA, 120 bp, Artificial Sequence
  ENSG00000197312_13 (sequence is synthesized)
ggtaatcctatgagtcttgctcgctctgtctctgcttcagtctgccctatcaagcccagtgactcagatcgcattgaacctaaagctgtgaaggctttgaaggcttcagctgaattccag

SEQ ID NO: 715277 - DNA, 120 bp, Artificial Sequence
  ENSG00000197312_14 (sequence is synthesized)
ctaaactctgaaaagaaagaacatctttctttacaagatctttctgatcatgcttcctcagcagaccatgctccaacagaccagagtccagctatgcctatgcagaattcatccgaagaa

SEQ ID NO: 715278 - DNA, 120 bp, Artificial Sequence
  ENSG00000197312_15 (sequence is synthesized)
ataactgttgcaggtaatctggagaaatctgctgaaagaagcacccagggcctcaaatttcatctccatacaagacaggaagctagtttatctgtcacatctactaggatgcatgaacca

SEQ ID NO: 715279 - DNA, 120 bp, Artificial Sequence
  ENSG00000197312_16 (sequence is synthesized)
cagatgtttctaggtgaaaaggattggcatccagaaaatcagaacctgagtcaagtgagtgaccctcagcagcacgaagaaccagggaatgaacagtatgaggttgcacaacaaaaagct

SEQ ID NO: 715280 - DNA, 120 bp, Artificial Sequence
  ENSG00000197312_17 (sequence is synthesized)
tcacatgaccaagaatatctttgtaacataggggaccttgagcttcctgaagaaaggcaacagaatcaacacaaaattgttgatttggaagctacgatgaaaggaaatgggctcccacag

SEQ ID NO: 715281 - DNA, 120 bp, Artificial Sequence
  ENSG00000197312_18 (sequence is synthesized)
aatgtggatcctccaagtgcgaagaaaagtattccatcttcagaatgcagtggctgctcaaattcagaaacatttatggaaatcgatacagctcaacagtccctagttactttgcttaat

SEQ ID NO: 715282 - DNA, 120 bp, Artificial Sequence
  ENSG00000197312_19 (sequence is synthesized)
tcaacaggcaggcagaatgccaatgtcaagaacattggtgcattggatctcactttagataatcccttgatggaagtagaaacatcaaaatgtaacccttcatctgaaattttgaatgat

SEQ ID NO: 715283 - DNA, 120 bp, Artificial Sequence
  ENSG00000197312_20 (sequence is synthesized)
tccatttccactcaggatttacagcccccagaaactaatgttgaaatacctggaacaaataaagaatatggccattactcctctccaagtctctgtggcagttgtcagccttctgtggag

SEQ ID NO: 715284 - DNA, 120 bp, Artificial Sequence
  ENSG00000197312_21 (sequence is synthesized)
tcagcagaagaatcttgcccgtctataacggcagccttgaaagaacttcatgaacttttggttgttagcagtaaaccagcttcagaaaatacatctgaagaagtaatctgtcaatcagaa

SEQ ID NO: 715285 - DNA, 120 bp, Artificial Sequence
  ENSG00000197312_22 (sequence is synthesized)
accatagctgagggccaaaccagtattaaagacctttctgaaagatggacccaaaatgagcatcttacccagaatgaacagtgtccacaagtctcctttcatcaggccatatctgtatca

SEQ ID NO: 715286 - DNA, 120 bp, Artificial Sequence
  ENSG00000197312_23 (sequence is synthesized)
gtggagacagaaaaattaacaggtacttcatctgacactggaagagaagctgtagaaaatgtaaacttcaggagtctaggtgatggcctgtcaaccgataaggaaggtgtccccaaatct

SEQ ID NO: 715287 - DNA, 120 bp, Artificial Sequence
  ENSG00000197312_24 (sequence is synthesized)
agggaatccataaataagaaccgttctgtcactgtaacctcagctaaaacatccaatcagttacactgcaccttaggtgtagaaatttcacccaaacttttagcaggtgaggaggatgca

SEQ ID NO: 715288 - DNA, 120 bp, Artificial Sequence
  ENSG00000197312_25 (sequence is synthesized)
ctcaatcagacttctgagcaaactaagtctttgtcatccaatttcatattggttaaagacttaggtcagggcatacagaattcagtaacagacaggcctgaaaccagagaaaatgtctgt

SEQ ID NO: 715289 - DNA, 120 bp, Artificial Sequence
  ENSG00000197312_26 (sequence is synthesized)
cctgatgcttcgaggccattacttgaatatgaaccacctaccagccatccatcatcaagtcctgccattcttccaccattgatttttcctgccacagatattgaccgcattctccgtgct

SEQ ID NO: 715290 - DNA, 120 bp, Artificial Sequence
  ENSG00000197312_27 (sequence is synthesized)
ggctttactttgcaggaagctcttggagctttgcatcgagttggtgggaatgcagaccttgcacttcttgttttgctcgcaaaaaacatcgtagttcctacatgactgtgggaaagtggg

SEQ ID NO: 715291 - DNA, 120 bp, Artificial Sequence
  ENSG00000197312_28 (sequence is synthesized)
ctagaccgttctccattccctttaaacaaaagaaagctctctctatatacacgcacacatacacactcaccacatatacagtatatatagaaacctgcaagcagaatgttgagccagatt

SEQ ID NO: 715292 - DNA, 120 bp, Artificial Sequence
  ENSG00000197312_29 (sequence is synthesized)
ttttttaaagatttttttcggccaaagtaatttatgatcttttgtctgatgaatttgtctatcctacttgttaaaatttaggcctttttaaatgtattggcagtatgtgcatacagaagc

SEQ ID NO: 715293 - DNA, 120 bp, Artificial Sequence
  ENSG00000197312_30 (sequence is synthesized)
tttttattctcattaagatgtatcctggaataaaatggatggttttgtgtgtagcatactgttttagaatgagagtaaatgctttgaaaagcagaagccatgagaaatcccactacccat

SEQ ID NO: 715294 - DNA, 120 bp, Artificial Sequence
  ENSG00000197312_31 (sequence is synthesized)
ccagctaaaaacagatgaactctccacactgtgactgtgtgtctgtgctgatggcaaggtatggtttgctggctcagttgtcaatttagaaacttttgaccacataatttggtgtttgga

SEQ ID NO: 715295 - DNA, 120 bp, Artificial Sequence
  ENSG00000197312_32 (sequence is synthesized)
attctacccagtgctctgtgtatcatgattcattaattataacaggaaattggagaataattgaatatcttatcgtagagtggtatgtttttatttgtgtgcttaggatttgacatttta

SEQ ID NO: 715296 - DNA, 120 bp, Artificial Sequence
  ENSG00000197312_33 (sequence is synthesized)
atagggcgagcaggagggtttaaatcttgggctactttgtgcatcacaggctgctgcatggattgccatgaatccttattacattggatgggatattgtgggggagttacaatgcaagtg

SEQ ID NO: 715297 - DNA, 120 bp, Artificial Sequence
  ENSG00000197312_34 (sequence is synthesized)
aaacgtggtgctacccagattcttaaaagaacagaacaaccataattccatttgcagatgtcaagaactgtgagggaaaaataatggcctaaacactggaatttgctagagtttgggttt

SEQ ID NO: 715298 - DNA, 120 bp, Artificial Sequence
  ENSG00000197312_35 (sequence is synthesized)
gctagcatctcactgataacacctcaacccttaatgactaatggtggaattaagttcaggaatggattcattgccagcagcttatttcctttctagactcttctgccaggaagttcttca

SEQ ID NO: 715299 - DNA, 120 bp, Artificial Sequence
  ENSG00000197312_36 (sequence is synthesized)
aacgctcagtgtgagctgtgatctgagtgaaatactaagtgtgataaccttgtcactggttaatcttggtgcttggaacggtcagtctatttggagagtgtcctttgtggcagtggaaat

SEQ ID NO: 715300 - DNA, 120 bp, Artificial Sequence
  ENSG00000197312_37 (sequence is synthesized)
agtaattacagtttctgacttaagtggccttggtagagttttccatccttttctttcctcaggagtttcttttttaagcaaaattcatcttatttgtgtttaccatgtcaagttagagtg

SEQ ID NO: 715301 - DNA, 120 bp, Artificial Sequence
  ENSG00000197312_38 (sequence is synthesized)
gggcataatatatagatgtatttattgtggcctttttttatataaggactagcccttggaaatcattgtcctgtgggccccactgtgcaataatcctactggataggttttagataattc

SEQ ID NO: 715302 - DNA, 120 bp, Artificial Sequence
  ENSG00000197312_39 (sequence is synthesized)
tttcctggcaaactgctcttttgggtacctagcaggaatctgaagtcttggttttattgaaaagaattttgagattcataatttctgattctagattatagtttgtaacatgtttgaaac

SEQ ID NO: 715303 - DNA, 120 bp, Artificial Sequence
  ENSG00000197312_40 (sequence is synthesized)
agaagcttcgaaagagtgatttctcaacttagtgttaaatgattttgtctgaagtctgactctttgtaagcttgtttgtttcatcaaattttaagtcattgagcacaatcaaaatggagg

SEQ ID NO: 715304 - DNA, 120 bp, Artificial Sequence
  ENSG00000197312_41 (sequence is synthesized)
ctcatatctcaggagtttttgaaattttaatttaggggcacttagagacatttttttctaccccatccaacttctttctttccttttgctatgatgtttgtatgtatgttataagacttt

SEQ ID NO: 715305 - DNA, 120 bp, Artificial Sequence
  ENSG00000197312_42 (sequence is synthesized)
agtgatgggatggcgtgtcacgtagattcatcatgatcctttatgtagttaggaaatggttgacagaaggaattgtagtttactgcttttcagagggcgtgaagaacaacaggtcagcca

SEQ ID NO: 715306 - DNA, 120 bp, Artificial Sequence
  ENSG00000197312_43 (sequence is synthesized)
ggttgtctttaagatgttcttttagacagctgcacattgtagaccctttcacctgccctacaccaaagatgtacgatgcactaggaaactgctcataggatttctgtcagctgacttaaa

SEQ ID NO: 715307 - DNA, 120 bp, Artificial Sequence
  ENSG00000197312_44 (sequence is synthesized)
aagcttataaatctttggaaccacggggtgggaagggtgggggaacttactgatgacaatagactccctcctaaagggccttccatgtaagcagaacgaaccttggcacacaattcagtg

SEQ ID NO: 715308 - DNA, 120 bp, Artificial Sequence
  ENSG00000197312_45 (sequence is synthesized)
tggatatttgggaaacagttccaagtggaatatataatatcagtcgggaaaagatttcattaggatagctttttgtgtatgtatatgtatatttatttttaggaatagatctatagttgt

SEQ ID NO: 715309 - DNA, 120 bp, Artificial Sequence
  ENSG00000197312_46 (sequence is synthesized)
acatgaattcctgttaggaatactctgaatgagcttaacccacttgccaaatatccttgtcccttccatcattttatttttgagatggggtcttgcagtgttgcccaggctggactcaaa

SEQ ID NO: 715310 - DNA, 120 bp, Artificial Sequence
  ENSG00000197312_47 (sequence is synthesized)
ctctggggcttaatcatccttctgagtagctgggactacataaaggccaaagtataattgcttttgatttttaaaatcttcttgcccatcatttttataaaaataaagctgtttgtccaa

SEQ ID NO: 715311 - DNA, 120 bp, Artificial Sequence
  ENSG00000197312_48 (sequence is synthesized)
tgcagtgagcctagatcacgccactgcactccagtgtgggcggcagagtgagactctgtctcacccaaaaaaaaaaaaaaaaagctattgacactgttaatattttggatgacttaaatt

SEQ ID NO: 715312 - DNA, 120 bp, Artificial Sequence
  ENSG00000197312_49 (sequence is synthesized)
aatttagcagctctagaatgcaaagggtatattaaggagcattacaatagtgaaccttcatcgtcagcttttattcaattaagagctccagaaatgcagaaattatgggttaacttctaa

SEQ ID NO: 715313 - DNA, 120 bp, Artificial Sequence
  ENSG00000197312_50 (sequence is synthesized)
gaataccatcaaatccctgtgaattctggttgccaacagtaataaccagtaatgggcacctttaccggacagctcctttaccataaccagtagtgggcagttctgcggtcagcacttaac

SEQ ID NO: 715314 - DNA, 120 bp, Artificial Sequence
  ENSG00000197312_51 (sequence is synthesized)
tacaagggcggtctctgtttcttcaccagagagagaagattttcctgtgtaatttgtgccatttccctgaagttggttcttgagcggaaagatgtgcttggtaaccagacagcagcttta
